United States Patent Application Publication US 2018/0305689 A1 - sequence listing, part 94

SEQ ID NO: 1331196 - RNA, 19 nt, Artificial Sequence
  Description of Artificial Sequence: Synthetic oligonucleotide
  Sense strand starting at position 672 of SEQ ID NO: 1242218
uuccucuggugucuaacaa

SEQ ID NO: 1331197 - RNA, 19 nt, Artificial Sequence
  Description of Artificial Sequence: Synthetic oligonucleotide
  Antisense strand to SEQ ID NO: 1331196
uuguuagacaccagaggaa

SEQ ID NO: 1331198 - RNA, 19 nt, Artificial Sequence
  Description of Artificial Sequence: Synthetic oligonucleotide
  Sense strand starting at position 673 of SEQ ID NO: 1242218
uccucuggugucuaacaaa

SEQ ID NO: 1331199 - RNA, 19 nt, Artificial Sequence
  Description of Artificial Sequence: Synthetic oligonucleotide
  Antisense strand to SEQ ID NO: 1331198
uuuguuagacaccagagga

SEQ ID NO: 1331200 - RNA, 19 nt, Artificial Sequence
  Description of Artificial Sequence: Synthetic oligonucleotide
  Sense strand starting at position 730 of SEQ ID NO: 1242218
acaggauaugacugccauu

SEQ ID NO: 1331201 - RNA, 19 nt, Artificial Sequence
  Description of Artificial Sequence: Synthetic oligonucleotide
  Antisense strand to SEQ ID NO: 1331200
aauggcagucauauccugu

SEQ ID NO: 1331202 - RNA, 19 nt, Artificial Sequence
  Description of Artificial Sequence: Synthetic oligonucleotide
  Sense strand starting at position 794 of SEQ ID NO: 1242218
agugcaguuggugaaagua

SEQ ID NO: 1331203 - RNA, 19 nt, Artificial Sequence
  Description of Artificial Sequence: Synthetic oligonucleotide
  Antisense strand to SEQ ID NO: 1331202
uacuuucaccaacugcacu

SEQ ID NO: 1331204 - RNA, 19 nt, Artificial Sequence
  Description of Artificial Sequence: Synthetic oligonucleotide
  Sense strand starting at position 815 of SEQ ID NO: 1242218
gaaacagaggucugcuaac

SEQ ID NO: 1331205 - RNA, 19 nt, Artificial Sequence
  Description of Artificial Sequence: Synthetic oligonucleotide
  Antisense strand to SEQ ID NO: 1331204
guuagcagaccucuguuuc

SEQ ID NO: 1331206 - RNA, 19 nt, Artificial Sequence
  Description of Artificial Sequence: Synthetic oligonucleotide
  Sense strand starting at position 879 of SEQ ID NO: 1242218
uuuccuacguucuugggaa

SEQ ID NO: 1331207 - RNA, 19 nt, Artificial Sequence
  Description of Artificial Sequence: Synthetic oligonucleotide
  Antisense strand to SEQ ID NO: 1331206
uucccaagaacguaggaaa

SEQ ID NO: 1331208 - RNA, 19 nt, Artificial Sequence
  Description of Artificial Sequence: Synthetic oligonucleotide
  Sense strand starting at position 902 of SEQ ID NO: 1242218
ggauaugauagccaagucu

SEQ ID NO: 1331209 - RNA, 19 nt, Artificial Sequence
  Description of Artificial Sequence: Synthetic oligonucleotide
  Antisense strand to SEQ ID NO: 1331208
agacuuggcuaucauaucc

SEQ ID NO: 1331210 - RNA, 19 nt, Artificial Sequence
  Description of Artificial Sequence: Synthetic oligonucleotide
  Sense strand starting at position 1014 of SEQ ID NO: 1242218
ccuccauaugcuuagugaa

SEQ ID NO: 1331211 - RNA, 19 nt, Artificial Sequence
  Description of Artificial Sequence: Synthetic oligonucleotide
  Antisense strand to SEQ ID NO: 1331210
uucacuaagcauauggagg

SEQ ID NO: 1331212 - RNA, 19 nt, Artificial Sequence
  Description of Artificial Sequence: Synthetic oligonucleotide
  Sense strand starting at position 1024 of SEQ ID NO: 1242218
cuuagugaaguccagucaa

SEQ ID NO: 1331213 - RNA, 19 nt, Artificial Sequence
  Description of Artificial Sequence: Synthetic oligonucleotide
  Antisense strand to SEQ ID NO: 1331212
uugacuggacuucacuaag

SEQ ID NO: 1331214 - RNA, 19 nt, Artificial Sequence
  Description of Artificial Sequence: Synthetic oligonucleotide
  Sense strand starting at position 1128 of SEQ ID NO: 1242218
cuaauauaaccggagucuu

SEQ ID NO: 1331215 - RNA, 19 nt, Artificial Sequence
  Description of Artificial Sequence: Synthetic oligonucleotide
  Antisense strand to SEQ ID NO: 1331214
aagacuccgguuauauuag

SEQ ID NO: 1331216 - RNA, 19 nt, Artificial Sequence
  Description of Artificial Sequence: Synthetic oligonucleotide
  Sense strand starting at position 2193 of SEQ ID NO: 1242218
ccgauuuccuucuugugca

SEQ ID NO: 1331217 - RNA, 19 nt, Artificial Sequence
  Description of Artificial Sequence: Synthetic oligonucleotide
  Antisense strand to SEQ ID NO: 1331216
ugcacaagaaggaaaucgg

SEQ ID NO: 1331218 - RNA, 19 nt, Artificial Sequence
  Description of Artificial Sequence: Synthetic oligonucleotide
  Sense strand starting at position 2210 of SEQ ID NO: 1242218
caaacaucagaguguaguu

SEQ ID NO: 1331219 - RNA, 19 nt, Artificial Sequence
  Description of Artificial Sequence: Synthetic oligonucleotide
  Antisense strand to SEQ ID NO: 1331218
aacuacacucugauguuug

SEQ ID NO: 1331220 - RNA, 19 nt, Artificial Sequence
  Description of Artificial Sequence: Synthetic oligonucleotide
  Sense strand starting at position 2220 of SEQ ID NO: 1242218
aguguaguuacacaaaguu

SEQ ID NO: 1331221 - RNA, 19 nt, Artificial Sequence
  Description of Artificial Sequence: Synthetic oligonucleotide
  Antisense strand to SEQ ID NO: 1331220
aacuuuguguaacuacacu

SEQ ID NO: 1331222 - RNA, 19 nt, Artificial Sequence
  Description of Artificial Sequence: Synthetic oligonucleotide
  Sense strand starting at position 2354 of SEQ ID NO: 1242218
cuaccacaucaguagguau

SEQ ID NO: 1331223 - RNA, 19 nt, Artificial Sequence
  Description of Artificial Sequence: Synthetic oligonucleotide
  Antisense strand to SEQ ID NO: 1331222
auaccuacugaugugguag

SEQ ID NO: 1331224 - RNA, 19 nt, Artificial Sequence
  Description of Artificial Sequence: Synthetic oligonucleotide
  Sense strand starting at position 2356 of SEQ ID NO: 1242218
accacaucaguagguauua

SEQ ID NO: 1331225 - RNA, 19 nt, Artificial Sequence
  Description of Artificial Sequence: Synthetic oligonucleotide
  Antisense strand to SEQ ID NO: 1331224
uaauaccuacugauguggu

SEQ ID NO: 1331226 - RNA, 19 nt, Artificial Sequence
  Description of Artificial Sequence: Synthetic oligonucleotide
  Sense strand starting at position 2429 of SEQ ID NO: 1242218
uccuuaugugaugaaugua

SEQ ID NO: 1331227 - RNA, 19 nt, Artificial Sequence
  Description of Artificial Sequence: Synthetic oligonucleotide
  Antisense strand to SEQ ID NO: 1331226
uacauucaucacauaagga

SEQ ID NO: 1331228 - RNA, 19 nt, Artificial Sequence
  Description of Artificial Sequence: Synthetic oligonucleotide
  Sense strand starting at position 2432 of SEQ ID NO: 1242218
uuaugugaugaauguauag

SEQ ID NO: 1331229 - RNA, 19 nt, Artificial Sequence
  Description of Artificial Sequence: Synthetic oligonucleotide
  Antisense strand to SEQ ID NO: 1331228
cuauacauucaucacauaa

SEQ ID NO: 1331230 - RNA, 19 nt, Artificial Sequence
  Description of Artificial Sequence: Synthetic oligonucleotide
  Sense strand starting at position 2477 of SEQ ID NO: 1242218
aagcaauaacuguagugua

SEQ ID NO: 1331231 - RNA, 19 nt, Artificial Sequence
  Description of Artificial Sequence: Synthetic oligonucleotide
  Antisense strand to SEQ ID NO: 1331230
uacacuacaguuauugcuu

SEQ ID NO: 1331232 - RNA, 19 nt, Artificial Sequence
  Description of Artificial Sequence: Synthetic oligonucleotide
  Sense strand starting at position 2535 of SEQ ID NO: 1242218
agguaauagugcccacaua

SEQ ID NO: 1331233 - RNA, 19 nt, Artificial Sequence
  Description of Artificial Sequence: Synthetic oligonucleotide
  Antisense strand to SEQ ID NO: 1331232
uaugugggcacuauuaccu

SEQ ID NO: 1331234 - RNA, 19 nt, Artificial Sequence
  Description of Artificial Sequence: Synthetic oligonucleotide
  Sense strand starting at position 2536 of SEQ ID NO: 1242218
gguaauagugcccacauag

SEQ ID NO: 1331235 - RNA, 19 nt, Artificial Sequence
  Description of Artificial Sequence: Synthetic oligonucleotide
  Antisense strand to SEQ ID NO: 1331234
cuaugugggcacuauuacc

SEQ ID NO: 1331236 - RNA, 19 nt, Artificial Sequence
  Description of Artificial Sequence: Synthetic oligonucleotide
  Sense strand starting at position 2563 of SEQ ID NO: 1242218
uguuauaaccaucagugac

SEQ ID NO: 1331237 - RNA, 19 nt, Artificial Sequence
  Description of Artificial Sequence: Synthetic oligonucleotide
  Antisense strand to SEQ ID NO: 1331236
gucacugaugguuauaaca

SEQ ID NO: 1331238 - RNA, 19 nt, Artificial Sequence
  Description of Artificial Sequence: Synthetic oligonucleotide
  Sense strand starting at position 2679 of SEQ ID NO: 1242218
agaaacuguuaagucuuaa

SEQ ID NO: 1331239 - RNA, 19 nt, Artificial Sequence
  Description of Artificial Sequence: Synthetic oligonucleotide
  Antisense strand to SEQ ID NO: 1331238
uuaagacuuaacaguuucu

SEQ ID NO: 1331240 - RNA, 19 nt, Artificial Sequence
  Description of Artificial Sequence: Synthetic oligonucleotide
  Sense strand starting at position 2747 of SEQ ID NO: 1242218
agaugugacuuccuaagaa

SEQ ID NO: 1331241 - RNA, 19 nt, Artificial Sequence
  Description of Artificial Sequence: Synthetic oligonucleotide
  Antisense strand to SEQ ID NO: 1331240
uucuuaggaagucacaucu

SEQ ID NO: 1331242 - RNA, 19 nt, Artificial Sequence
  Description of Artificial Sequence: Synthetic oligonucleotide
  Sense strand starting at position 3040 of SEQ ID NO: 1242218
guuagaacacgaggucuaa

SEQ ID NO: 1331243 - RNA, 19 nt, Artificial Sequence
  Description of Artificial Sequence: Synthetic oligonucleotide
  Antisense strand to SEQ ID NO: 1331242
uuagaccucguguucuaac

SEQ ID NO: 1331244 - RNA, 19 nt, Artificial Sequence
  Description of Artificial Sequence: Synthetic oligonucleotide
  Sense strand starting at position 3812 of SEQ ID NO: 1242218
ggcucaagcuucuuuacaa

SEQ ID NO: 1331245 - RNA, 19 nt, Artificial Sequence
  Description of Artificial Sequence: Synthetic oligonucleotide
  Antisense strand to SEQ ID NO: 1331244
uuguaaagaagcuugagcc

SEQ ID NO: 1331246 - RNA, 19 nt, Artificial Sequence
  Description of Artificial Sequence: Synthetic oligonucleotide
  Sense strand starting at position 3952 of SEQ ID NO: 1242218
aggagcauuguguaacaga

SEQ ID NO: 1331247 - RNA, 19 nt, Artificial Sequence
  Description of Artificial Sequence: Synthetic oligonucleotide
  Antisense strand to SEQ ID NO: 1331246
ucuguuacacaaugcuccu

SEQ ID NO: 1331248 - RNA, 19 nt, Artificial Sequence
  Description of Artificial Sequence: Synthetic oligonucleotide
  Sense strand starting at position 24 of SEQ ID NO: 1242219
gaccuacaagagugauauu

SEQ ID NO: 1331249 - RNA, 19 nt, Artificial Sequence
  Description of Artificial Sequence: Synthetic oligonucleotide
  Antisense strand to SEQ ID NO: 1331248
aauaucacucuuguagguc

SEQ ID NO: 1331250 - RNA, 19 nt, Artificial Sequence
  Description of Artificial Sequence: Synthetic oligonucleotide
  Sense strand starting at position 86 of SEQ ID NO: 1242219
agaccuguccaaggauaua

SEQ ID NO: 1331251 - RNA, 19 nt, Artificial Sequence
  Description of Artificial Sequence: Synthetic oligonucleotide
  Antisense strand to SEQ ID NO: 1331250
uauauccuuggacaggucu

SEQ ID NO: 1331252 - RNA, 19 nt, Artificial Sequence
  Description of Artificial Sequence: Synthetic oligonucleotide
  Sense strand starting at position 332 of SEQ ID NO: 1242219
gguguuuaccuuuaucaua

SEQ ID NO: 1331253 - RNA, 19 nt, Artificial Sequence
  Description of Artificial Sequence: Synthetic oligonucleotide
  Antisense strand to SEQ ID NO: 1331252
uaugauaaagguaaacacc

SEQ ID NO: 1331254 - RNA, 19 nt, Artificial Sequence
  Description of Artificial Sequence: Synthetic oligonucleotide
  Sense strand starting at position 406 of SEQ ID NO: 1242219
gcuccuuuagagcaacaau

SEQ ID NO: 1331255 - RNA, 19 nt, Artificial Sequence
  Description of Artificial Sequence: Synthetic oligonucleotide
  Antisense strand to SEQ ID NO: 1331254
auuguugcucuaaaggagc

SEQ ID NO: 1331256 - RNA, 19 nt, Artificial Sequence
  Description of Artificial Sequence: Synthetic oligonucleotide
  Sense strand starting at position 448 of SEQ ID NO: 1242219
ccaguauauagccaagugu

SEQ ID NO: 1331257 - RNA, 19 nt, Artificial Sequence
  Description of Artificial Sequence: Synthetic oligonucleotide
  Antisense strand to SEQ ID NO: 1331256
acacuuggcuauauacugg

SEQ ID NO: 1331258 - RNA, 19 nt, Artificial Sequence
  Description of Artificial Sequence: Synthetic oligonucleotide
  Sense strand starting at position 491 of SEQ ID NO: 1242219
gugaaugaauuagcuaaau

SEQ ID NO: 1331259 - RNA, 19 nt, Artificial Sequence
  Description of Artificial Sequence: Synthetic oligonucleotide
  Antisense strand to SEQ ID NO: 1331258
auuuagcuaauucauucac

SEQ ID NO: 1331260 - RNA, 19 nt, Artificial Sequence
  Description of Artificial Sequence: Synthetic oligonucleotide
  Sense strand starting at position 599 of SEQ ID NO: 1242219
uucuguuugaacgaacgaa

SEQ ID NO: 1331261 - RNA, 19 nt, Artificial Sequence
  Description of Artificial Sequence: Synthetic oligonucleotide
  Antisense strand to SEQ ID NO: 1331260
uucguucguucaaacagaa

SEQ ID NO: 1331262 - RNA, 19 nt, Artificial Sequence
  Description of Artificial Sequence: Synthetic oligonucleotide
  Sense strand starting at position 603 of SEQ ID NO: 1242219
guuugaacgaacgaauuaa

SEQ ID NO: 1331263 - RNA, 19 nt, Artificial Sequence
  Description of Artificial Sequence: Synthetic oligonucleotide
  Antisense strand to SEQ ID NO: 1331262
uuaauucguucguucaaac

SEQ ID NO: 1331264 - RNA, 19 nt, Artificial Sequence
  Description of Artificial Sequence: Synthetic oligonucleotide
  Sense strand starting at position 625 of SEQ ID NO: 1242219
cuguauagauucccucaua

SEQ ID NO: 1331265 - RNA, 19 nt, Artificial Sequence
  Description of Artificial Sequence: Synthetic oligonucleotide
  Antisense strand to SEQ ID NO: 1331264
uaugagggaaucuauacag

SEQ ID NO: 1331266 - RNA, 19 nt, Artificial Sequence
  Description of Artificial Sequence: Synthetic oligonucleotide
  Sense strand starting at position 626 of SEQ ID NO: 1242219
uguauagauucccucauac

SEQ ID NO: 1331267 - RNA, 19 nt, Artificial Sequence
  Description of Artificial Sequence: Synthetic oligonucleotide
  Antisense strand to SEQ ID NO: 1331266
guaugagggaaucuauaca

SEQ ID NO: 1331268 - RNA, 19 nt, Artificial Sequence
  Description of Artificial Sequence: Synthetic oligonucleotide
  Sense strand starting at position 720 of SEQ ID NO: 1242219
ugaguaaauaacggauaau

SEQ ID NO: 1331269 - RNA, 19 nt, Artificial Sequence
  Description of Artificial Sequence: Synthetic oligonucleotide
  Antisense strand to SEQ ID NO: 1331268
auuauccguuauuuacuca

SEQ ID NO: 1331270 - RNA, 19 nt, Artificial Sequence
  Description of Artificial Sequence: Synthetic oligonucleotide
  Sense strand starting at position 805 of SEQ ID NO: 1242219
aauaucuggugucucugaa

SEQ ID NO: 1331271 - RNA, 19 nt, Artificial Sequence
  Description of Artificial Sequence: Synthetic oligonucleotide
  Antisense strand to SEQ ID NO: 1331270
uucagagacaccagauauu

SEQ ID NO: 1331272 - RNA, 19 nt, Artificial Sequence
  Description of Artificial Sequence: Synthetic oligonucleotide
  Sense strand starting at position 822 of SEQ ID NO: 1242219
aagcaugaugcugggaaga

SEQ ID NO: 1331273 - RNA, 19 nt, Artificial Sequence
  Description of Artificial Sequence: Synthetic oligonucleotide
  Antisense strand to SEQ ID NO: 1331272
ucuucccagcaucaugcuu

SEQ ID NO: 1331274 - RNA, 19 nt, Artificial Sequence
  Description of Artificial Sequence: Synthetic oligonucleotide
  Sense strand starting at position 836 of SEQ ID NO: 1242219
gaagacagaucaucaguuu

SEQ ID NO: 1331275 - RNA, 19 nt, Artificial Sequence
  Description of Artificial Sequence: Synthetic oligonucleotide
  Antisense strand to SEQ ID NO: 1331274
aaacugaugaucugucuuc

SEQ ID NO: 1331276 - RNA, 19 nt, Artificial Sequence
  Description of Artificial Sequence: Synthetic oligonucleotide
  Sense strand starting at position 839 of SEQ ID NO: 1242219
gacagaucaucaguuugac

SEQ ID NO: 1331277 - RNA, 19 nt, Artificial Sequence
  Description of Artificial Sequence: Synthetic oligonucleotide
  Antisense strand to SEQ ID NO: 1331276
gucaaacugaugaucuguc

SEQ ID NO: 1331278 - RNA, 19 nt, Artificial Sequence
  Description of Artificial Sequence: Synthetic oligonucleotide
  Sense strand starting at position 842 of SEQ ID NO: 1242219
agaucaucaguuugacuua

SEQ ID NO: 1331279 - RNA, 19 nt, Artificial Sequence
  Description of Artificial Sequence: Synthetic oligonucleotide
  Antisense strand to SEQ ID NO: 1331278
uaagucaaacugaugaucu

SEQ ID NO: 1331280 - RNA, 19 nt, Artificial Sequence
  Description of Artificial Sequence: Synthetic oligonucleotide
  Sense strand starting at position 908 of SEQ ID NO: 1242219
uuccucuggugucuaacaa

SEQ ID NO: 1331281 - RNA, 19 nt, Artificial Sequence
  Description of Artificial Sequence: Synthetic oligonucleotide
  Antisense strand to SEQ ID NO: 1331280
uuguuagacaccagaggaa

SEQ ID NO: 1331282 - RNA, 19 nt, Artificial Sequence
  Description of Artificial Sequence: Synthetic oligonucleotide
  Sense strand starting at position 909 of SEQ ID NO: 1242219
uccucuggugucuaacaaa

SEQ ID NO: 1331283 - RNA, 19 nt, Artificial Sequence
  Description of Artificial Sequence: Synthetic oligonucleotide
  Antisense strand to SEQ ID NO: 1331282
uuuguuagacaccagagga

SEQ ID NO: 1331284 - RNA, 19 nt, Artificial Sequence
  Description of Artificial Sequence: Synthetic oligonucleotide
  Sense strand starting at position 966 of SEQ ID NO: 1242219
acaggauaugacugccauu

SEQ ID NO: 1331285 - RNA, 19 nt, Artificial Sequence
  Description of Artificial Sequence: Synthetic oligonucleotide
  Antisense strand to SEQ ID NO: 1331284
aauggcagucauauccugu

SEQ ID NO: 1331286 - RNA, 19 nt, Artificial Sequence
  Description of Artificial Sequence: Synthetic oligonucleotide
  Sense strand starting at position 1030 of SEQ ID NO: 1242219
agugcaguuggugaaagua

SEQ ID NO: 1331287 - RNA, 19 nt, Artificial Sequence
  Description of Artificial Sequence: Synthetic oligonucleotide
  Antisense strand to SEQ ID NO: 1331286
uacuuucaccaacugcacu

SEQ ID NO: 1331288 - RNA, 19 nt, Artificial Sequence
  Description of Artificial Sequence: Synthetic oligonucleotide
  Sense strand starting at position 1051 of SEQ ID NO: 1242219
gaaacagaggucugcuaac

SEQ ID NO: 1331289 - RNA, 19 nt, Artificial Sequence
  Description of Artificial Sequence: Synthetic oligonucleotide
  Antisense strand to SEQ ID NO: 1331288
guuagcagaccucuguuuc

SEQ ID NO: 1331290 - RNA, 19 nt, Artificial Sequence
  Description of Artificial Sequence: Synthetic oligonucleotide
  Sense strand starting at position 1115 of SEQ ID NO: 1242219
uuuccuacguucuugggaa

SEQ ID NO: 1331291 - RNA, 19 nt, Artificial Sequence
  Description of Artificial Sequence: Synthetic oligonucleotide
  Antisense strand to SEQ ID NO: 1331290
uucccaagaacguaggaaa

SEQ ID NO: 1331292 - RNA, 19 nt, Artificial Sequence
  Description of Artificial Sequence: Synthetic oligonucleotide
  Sense strand starting at position 1138 of SEQ ID NO: 1242219
ggauaugauagccaagucu

SEQ ID NO: 1331293 - RNA, 19 nt, Artificial Sequence
  Description of Artificial Sequence: Synthetic oligonucleotide
  Antisense strand to SEQ ID NO: 1331292
agacuuggcuaucauaucc

SEQ ID NO: 1331294 - RNA, 19 nt, Artificial Sequence
  Description of Artificial Sequence: Synthetic oligonucleotide
  Sense strand starting at position 1250 of SEQ ID NO: 1242219
ccuccauaugcuuagugaa

SEQ ID NO: 1331295 - RNA, 19 nt, Artificial Sequence
  Description of Artificial Sequence: Synthetic oligonucleotide
  Antisense strand to SEQ ID NO: 1331294
uucacuaagcauauggagg

SEQ ID NO: 1331296 - RNA, 19 nt, Artificial Sequence
  Description of Artificial Sequence: Synthetic oligonucleotide
  Sense strand starting at position 1260 of SEQ ID NO: 1242219
cuuagugaaguccagucaa

SEQ ID NO: 1331297 - RNA, 19 nt, Artificial Sequence
  Description of Artificial Sequence: Synthetic oligonucleotide
  Antisense strand to SEQ ID NO: 1331296
uugacuggacuucacuaag

SEQ ID NO: 1331298 - RNA, 19 nt, Artificial Sequence
  Description of Artificial Sequence: Synthetic oligonucleotide
  Sense strand starting at position 1364 of SEQ ID NO: 1242219
cuaauauaaccggagucuu

SEQ ID NO: 1331299 - RNA, 19 nt, Artificial Sequence
  Description of Artificial Sequence: Synthetic oligonucleotide
  Antisense strand to SEQ ID NO: 1331298
aagacuccgguuauauuag

SEQ ID NO: 1331300 - RNA, 19 nt, Artificial Sequence
  Description of Artificial Sequence: Synthetic oligonucleotide
  Sense strand starting at position 2429 of SEQ ID NO: 1242219
ccgauuuccuucuugugca

SEQ ID NO: 1331301 - RNA, 19 nt, Artificial Sequence
  Description of Artificial Sequence: Synthetic oligonucleotide
  Antisense strand to SEQ ID NO: 1331300
ugcacaagaaggaaaucgg

SEQ ID NO: 1331302 - RNA, 19 nt, Artificial Sequence
  Description of Artificial Sequence: Synthetic oligonucleotide
  Sense strand starting at position 2446 of SEQ ID NO: 1242219
caaacaucagaguguaguu

SEQ ID NO: 1331303 - RNA, 19 nt, Artificial Sequence
  Description of Artificial Sequence: Synthetic oligonucleotide
  Antisense strand to SEQ ID NO: 1331302
aacuacacucugauguuug

SEQ ID NO: 1331304 - RNA, 19 nt, Artificial Sequence
  Description of Artificial Sequence: Synthetic oligonucleotide
  Sense strand starting at position 2456 of SEQ ID NO: 1242219
aguguaguuacacaaaguu

SEQ ID NO: 1331305 - RNA, 19 nt, Artificial Sequence
  Description of Artificial Sequence: Synthetic oligonucleotide
  Antisense strand to SEQ ID NO: 1331304
aacuuuguguaacuacacu

SEQ ID NO: 1331306 - RNA, 19 nt, Artificial Sequence
  Description of Artificial Sequence: Synthetic oligonucleotide
  Sense strand starting at position 2590 of SEQ ID NO: 1242219
cuaccacaucaguagguau

SEQ ID NO: 1331307 - RNA, 19 nt, Artificial Sequence
  Description of Artificial Sequence: Synthetic oligonucleotide
  Antisense strand to SEQ ID NO: 1331306
auaccuacugaugugguag

SEQ ID NO: 1331308 - RNA, 19 nt, Artificial Sequence
  Description of Artificial Sequence: Synthetic oligonucleotide
  Sense strand starting at position 2592 of SEQ ID NO: 1242219
accacaucaguagguauua

SEQ ID NO: 1331309 - RNA, 19 nt, Artificial Sequence
  Description of Artificial Sequence: Synthetic oligonucleotide
  Antisense strand to SEQ ID NO: 1331308
uaauaccuacugauguggu

SEQ ID NO: 1331310 - RNA, 19 nt, Artificial Sequence
  Description of Artificial Sequence: Synthetic oligonucleotide
  Sense strand starting at position 2665 of SEQ ID NO: 1242219
uccuuaugugaugaaugua

SEQ ID NO: 1331311 - RNA, 19 nt, Artificial Sequence
  Description of Artificial Sequence: Synthetic oligonucleotide
  Antisense strand to SEQ ID NO: 1331310
uacauucaucacauaagga

SEQ ID NO: 1331312 - RNA, 19 nt, Artificial Sequence
  Description of Artificial Sequence: Synthetic oligonucleotide
  Sense strand starting at position 2668 of SEQ ID NO: 1242219
uuaugugaugaauguauag

SEQ ID NO: 1331313 - RNA, 19 nt, Artificial Sequence
  Description of Artificial Sequence: Synthetic oligonucleotide
  Antisense strand to SEQ ID NO: 1331312
cuauacauucaucacauaa

SEQ ID NO: 1331314 - RNA, 19 nt, Artificial Sequence
  Description of Artificial Sequence: Synthetic oligonucleotide
  Sense strand starting at position 2713 of SEQ ID NO: 1242219
aagcaauaacuguagugua

SEQ ID NO: 1331315 - RNA, 19 nt, Artificial Sequence
  Description of Artificial Sequence: Synthetic oligonucleotide
  Antisense strand to SEQ ID NO: 1331314
uacacuacaguuauugcuu

SEQ ID NO: 1331316 - RNA, 19 nt, Artificial Sequence
  Description of Artificial Sequence: Synthetic oligonucleotide
  Sense strand starting at position 2771 of SEQ ID NO: 1242219
agguaauagugcccacaua

SEQ ID NO: 1331317 - RNA, 19 nt, Artificial Sequence
  Description of Artificial Sequence: Synthetic oligonucleotide
  Antisense strand to SEQ ID NO: 1331316
uaugugggcacuauuaccu

SEQ ID NO: 1331318 - RNA, 19 nt, Artificial Sequence
  Description of Artificial Sequence: Synthetic oligonucleotide
  Sense strand starting at position 2772 of SEQ ID NO: 1242219
gguaauagugcccacauag

SEQ ID NO: 1331319 - RNA, 19 nt, Artificial Sequence
  Description of Artificial Sequence: Synthetic oligonucleotide
  Antisense strand to SEQ ID NO: 1331318
cuaugugggcacuauuacc

SEQ ID NO: 1331320 - RNA, 19 nt, Artificial Sequence
  Description of Artificial Sequence: Synthetic oligonucleotide
  Sense strand starting at position 2799 of SEQ ID NO: 1242219
uguuauaaccaucagugac

SEQ ID NO: 1331321 - RNA, 19 nt, Artificial Sequence
  Description of Artificial Sequence: Synthetic oligonucleotide
  Antisense strand to SEQ ID NO: 1331320
gucacugaugguuauaaca

SEQ ID NO: 1331322 - RNA, 19 nt, Artificial Sequence
  Description of Artificial Sequence: Synthetic oligonucleotide
  Sense strand starting at position 2915 of SEQ ID NO: 1242219
agaaacuguuaagucuuaa

SEQ ID NO: 1331323 - RNA, 19 nt, Artificial Sequence
  Description of Artificial Sequence: Synthetic oligonucleotide
  Antisense strand to SEQ ID NO: 1331322
uuaagacuuaacaguuucu

SEQ ID NO: 1331324 - RNA, 19 nt, Artificial Sequence
  Description of Artificial Sequence: Synthetic oligonucleotide
  Sense strand starting at position 2983 of SEQ ID NO: 1242219
agaugugacuuccuaagaa

SEQ ID NO: 1331325 - RNA, 19 nt, Artificial Sequence
  Description of Artificial Sequence: Synthetic oligonucleotide
  Antisense strand to SEQ ID NO: 1331324
uucuuaggaagucacaucu

SEQ ID NO: 1331326 - RNA, 19 nt, Artificial Sequence
  Description of Artificial Sequence: Synthetic oligonucleotide
  Sense strand starting at position 3276 of SEQ ID NO: 1242219
guuagaacacgaggucuaa

SEQ ID NO: 1331327 - RNA, 19 nt, Artificial Sequence
  Description of Artificial Sequence: Synthetic oligonucleotide
  Antisense strand to SEQ ID NO: 1331326
uuagaccucguguucuaac

SEQ ID NO: 1331328 - RNA, 19 nt, Artificial Sequence
  Description of Artificial Sequence: Synthetic oligonucleotide
  Sense strand starting at position 491 of SEQ ID NO: 1242220
gugauucucaacugugaga

SEQ ID NO: 1331329 - RNA, 19 nt, Artificial Sequence
  Description of Artificial Sequence: Synthetic oligonucleotide
  Antisense strand to SEQ ID NO: 1331328
ucucacaguugagaaucac

SEQ ID NO: 1331330 - RNA, 19 nt, Artificial Sequence
  Description of Artificial Sequence: Synthetic oligonucleotide
  Sense strand starting at position 493 of SEQ ID NO: 1242220
gauucucaacugugagauu

SEQ ID NO: 1331331 - RNA, 19 nt, Artificial Sequence
  Description of Artificial Sequence: Synthetic oligonucleotide
  Antisense strand to SEQ ID NO: 1331330
aaucucacaguugagaauc

SEQ ID NO: 1331332 - RNA, 19 nt, Artificial Sequence
  Description of Artificial Sequence: Synthetic oligonucleotide
  Sense strand starting at position 494 of SEQ ID NO: 1242220
auucucaacugugagauuu

SEQ ID NO: 1331333 - RNA, 19 nt, Artificial Sequence
  Description of Artificial Sequence: Synthetic oligonucleotide
  Antisense strand to SEQ ID NO: 1331332
aaaucucacaguugagaau

SEQ ID NO: 1331334 - RNA, 19 nt, Artificial Sequence
  Description of Artificial Sequence: Synthetic oligonucleotide
  Sense strand starting at position 638 of SEQ ID NO: 1242220
ccaucuuuguugcuauaca

SEQ ID NO: 1331335 - RNA, 19 nt, Artificial Sequence
  Description of Artificial Sequence: Synthetic oligonucleotide
  Antisense strand to SEQ ID NO: 1331334
uguauagcaacaaagaugg

SEQ ID NO: 1331336 - RNA, 19 nt, Artificial Sequence
  Description of Artificial Sequence: Synthetic oligonucleotide
  Sense strand starting at position 669 of SEQ ID NO: 1242220
cccguccaacuaugaauua

SEQ ID NO: 1331337 - RNA, 19 nt, Artificial Sequence
  Description of Artificial Sequence: Synthetic oligonucleotide
  Antisense strand to SEQ ID NO: 1331336
uaauucauaguuggacggg

SEQ ID NO: 1331338 - RNA, 19 nt, Artificial Sequence
  Description of Artificial Sequence: Synthetic oligonucleotide
  Sense strand starting at position 706 of SEQ ID NO: 1242220
uuaagugucucugcuggga

SEQ ID NO: 1331339 - RNA, 19 nt, Artificial Sequence
  Description of Artificial Sequence: Synthetic oligonucleotide
  Antisense strand to SEQ ID NO: 1331338
ucccagcagagacacuuaa

SEQ ID NO: 1331340 - RNA, 19 nt, Artificial Sequence
  Description of Artificial Sequence: Synthetic oligonucleotide
  Sense strand starting at position 811 of SEQ ID NO: 1242220
ucacuaagcucuguuauug

SEQ ID NO: 1331341 - RNA, 19 nt, Artificial Sequence
  Description of Artificial Sequence: Synthetic oligonucleotide
  Antisense strand to SEQ ID NO: 1331340
caauaacagagcuuaguga

SEQ ID NO: 1331342 - RNA, 19 nt, Artificial Sequence
  Description of Artificial Sequence: Synthetic oligonucleotide
  Sense strand starting at position 821 of SEQ ID NO: 1242220
cuguuauugguauagagac

SEQ ID NO: 1331343 - RNA, 19 nt, Artificial Sequence
  Description of Artificial Sequence: Synthetic oligonucleotide
  Antisense strand to SEQ ID NO: 1331342
gucucuauaccaauaacag

SEQ ID NO: 1331344 - RNA, 19 nt, Artificial Sequence
  Description of Artificial Sequence: Synthetic oligonucleotide
  Sense strand starting at position 1036 of SEQ ID NO: 1242220
ccucucagucacuagacuu

SEQ ID NO: 1331345 - RNA, 19 nt, Artificial Sequence
  Description of Artificial Sequence: Synthetic oligonucleotide
  Antisense strand to SEQ ID NO: 1331344
aagucuagugacugagagg

SEQ ID NO: 1331346 - RNA, 19 nt, Artificial Sequence
  Description of Artificial Sequence: Synthetic oligonucleotide
  Sense strand starting at position 1096 of SEQ ID NO: 1242220
augauacuagucggcagaa

SEQ ID NO: 1331347 - RNA, 19 nt, Artificial Sequence
  Description of Artificial Sequence: Synthetic oligonucleotide
  Antisense strand to SEQ ID NO: 1331346
uucugccgacuaguaucau

SEQ ID NO: 1331348 - RNA, 19 nt, Artificial Sequence
  Description of Artificial Sequence: Synthetic oligonucleotide
  Sense strand starting at position 1097 of SEQ ID NO: 1242220
ugauacuagucggcagaau

SEQ ID NO: 1331349 - RNA, 19 nt, Artificial Sequence
  Description of Artificial Sequence: Synthetic oligonucleotide
  Antisense strand to SEQ ID NO: 1331348
auucugccgacuaguauca

SEQ ID NO: 1331350 - RNA, 19 nt, Artificial Sequence
  Description of Artificial Sequence: Synthetic oligonucleotide
  Sense strand starting at position 1098 of SEQ ID NO: 1242220
gauacuagucggcagaaua

SEQ ID NO: 1331351 - RNA, 19 nt, Artificial Sequence
  Description of Artificial Sequence: Synthetic oligonucleotide
  Antisense strand to SEQ ID NO: 1331350
uauucugccgacuaguauc

SEQ ID NO: 1331352 - RNA, 19 nt, Artificial Sequence
  Description of Artificial Sequence: Synthetic oligonucleotide
  Sense strand starting at position 1106 of SEQ ID NO: 1242220
ucggcagaauaaucuuaaa

SEQ ID NO: 1331353 - RNA, 19 nt, Artificial Sequence
  Description of Artificial Sequence: Synthetic oligonucleotide
  Antisense strand to SEQ ID NO: 1331352
uuuaagauuauucugccga

SEQ ID NO: 1331354 - RNA, 19 nt, Artificial Sequence
  Description of Artificial Sequence: Synthetic oligonucleotide
  Sense strand starting at position 1137 of SEQ ID NO: 1242220
gcuaaaguaucuguuagaa

SEQ ID NO: 1331355 - RNA, 19 nt, Artificial Sequence
  Description of Artificial Sequence: Synthetic oligonucleotide
  Antisense strand to SEQ ID NO: 1331354
uucuaacagauacuuuagc

SEQ ID NO: 1331356 - RNA, 19 nt, Artificial Sequence
  Description of Artificial Sequence: Synthetic oligonucleotide
  Sense strand starting at position 1161 of SEQ ID NO: 1242220
acuaauguuuaccuggcaa

SEQ ID NO: 1331357 - RNA, 19 nt, Artificial Sequence
  Description of Artificial Sequence: Synthetic oligonucleotide
  Antisense strand to SEQ ID NO: 1331356
uugccagguaaacauuagu

SEQ ID NO: 1331358 - RNA, 19 nt, Artificial Sequence
  Description of Artificial Sequence: Synthetic oligonucleotide
  Sense strand starting at position 1220 of SEQ ID NO: 1242220
aucuuaucgucagucugaa

SEQ ID NO: 1331359 - RNA, 19 nt, Artificial Sequence
  Description of Artificial Sequence: Synthetic oligonucleotide
  Antisense strand to SEQ ID NO: 1331358
uucagacugacgauaagau

SEQ ID NO: 1331360 - RNA, 19 nt, Artificial Sequence
  Description of Artificial Sequence: Synthetic oligonucleotide
  Sense strand starting at position 1313 of SEQ ID NO: 1242220
agugaugacacaugcgaaa

SEQ ID NO: 1331361 - RNA, 19 nt, Artificial Sequence
  Description of Artificial Sequence: Synthetic oligonucleotide
  Antisense strand to SEQ ID NO: 1331360
uuucgcaugugucaucacu

SEQ ID NO: 1331362 - RNA, 19 nt, Artificial Sequence
  Description of Artificial Sequence: Synthetic oligonucleotide
  Sense strand starting at position 1315 of SEQ ID NO: 1242220
ugaugacacaugcgaaaga

SEQ ID NO: 1331363 - RNA, 19 nt, Artificial Sequence
  Description of Artificial Sequence: Synthetic oligonucleotide
  Antisense strand to SEQ ID NO: 1331362
ucuuucgcaugugucauca

SEQ ID NO: 1331364 - RNA, 19 nt, Artificial Sequence
  Description of Artificial Sequence: Synthetic oligonucleotide
  Sense strand starting at position 1535 of SEQ ID NO: 1242220
ggucgauggguuggaaacu

SEQ ID NO: 1331365 - RNA, 19 nt, Artificial Sequence
  Description of Artificial Sequence: Synthetic oligonucleotide
  Antisense strand to SEQ ID NO: 1331364
aguuuccaacccaucgacc

SEQ ID NO: 1331366 - RNA, 19 nt, Artificial Sequence
  Description of Artificial Sequence: Synthetic oligonucleotide
  Sense strand starting at position 2425 of SEQ ID NO: 1242220
ugggacaguucccuugacu

SEQ ID NO: 1331367 - RNA, 19 nt, Artificial Sequence
  Description of Artificial Sequence: Synthetic oligonucleotide
  Antisense strand to SEQ ID NO: 1331366
agucaagggaacuguccca

SEQ ID NO: 1331368 - RNA, 19 nt, Artificial Sequence
  Description of Artificial Sequence: Synthetic oligonucleotide
  Sense strand starting at position 2617 of SEQ ID NO: 1242220
ggucacuucugagcucuua

SEQ ID NO: 1331369 - RNA, 19 nt, Artificial Sequence
  Description of Artificial Sequence: Synthetic oligonucleotide
  Antisense strand to SEQ ID NO: 1331368
uaagagcucagaagugacc

SEQ ID NO: 1331370 - RNA, 19 nt, Artificial Sequence
  Description of Artificial Sequence: Synthetic oligonucleotide
  Sense strand starting at position 2627 of SEQ ID NO: 1242220
gagcucuuacgguaauucu

SEQ ID NO: 1331371 - RNA, 19 nt, Artificial Sequence
  Description of Artificial Sequence: Synthetic oligonucleotide
  Antisense strand to SEQ ID NO: 1331370
agaauuaccguaagagcuc

SEQ ID NO: 1331372 - RNA, 19 nt, Artificial Sequence
  Description of Artificial Sequence: Synthetic oligonucleotide
  Sense strand starting at position 2637 of SEQ ID NO: 1242220
gguaauucugacuggagca

SEQ ID NO: 1331373 - RNA, 19 nt, Artificial Sequence
  Description of Artificial Sequence: Synthetic oligonucleotide
  Antisense strand to SEQ ID NO: 1331372
ugcuccagucagaauuacc

SEQ ID NO: 1331374 - RNA, 19 nt, Artificial Sequence
  Description of Artificial Sequence: Synthetic oligonucleotide
  Sense strand starting at position 2693 of SEQ ID NO: 1242220
gugaaucuauuacuugaga

SEQ ID NO: 1331375 - RNA, 19 nt, Artificial Sequence
  Description of Artificial Sequence: Synthetic oligonucleotide
  Antisense strand to SEQ ID NO: 1331374
ucucaaguaauagauucac

SEQ ID NO: 1331376 - RNA, 19 nt, Artificial Sequence
  Description of Artificial Sequence: Synthetic oligonucleotide
  Sense strand starting at position 2708 of SEQ ID NO: 1242220
gagacuagguccuucuuau

SEQ ID NO: 1331377 - RNA, 19 nt, Artificial Sequence
  Description of Artificial Sequence: Synthetic oligonucleotide
  Antisense strand to SEQ ID NO: 1331376
auaagaaggaccuagucuc

SEQ ID NO: 1331378 - RNA, 19 nt, Artificial Sequence
  Description of Artificial Sequence: Synthetic oligonucleotide
  Sense strand starting at position 2813 of SEQ ID NO: 1242220
ugaugaguguuacucacag

SEQ ID NO: 1331379 - RNA, 19 nt, Artificial Sequence
  Description of Artificial Sequence: Synthetic oligonucleotide
  Antisense strand to SEQ ID NO: 1331378
cugugaguaacacucauca

SEQ ID NO: 1331380 - RNA, 19 nt, Artificial Sequence
  Description of Artificial Sequence: Synthetic oligonucleotide
  Sense strand starting at position 2920 of SEQ ID NO: 1242220
agguuaaccuguuugaauu

SEQ ID NO: 1331381 - RNA, 19 nt, Artificial Sequence
  Description of Artificial Sequence: Synthetic oligonucleotide
  Antisense strand to SEQ ID NO: 1331380
aauucaaacagguuaaccu

SEQ ID NO: 1331382 - RNA, 19 nt, Artificial Sequence
  Description of Artificial Sequence: Synthetic oligonucleotide
  Sense strand starting at position 2921 of SEQ ID NO: 1242220
gguuaaccuguuugaauuc

SEQ ID NO: 1331383 - RNA, 19 nt, Artificial Sequence
  Description of Artificial Sequence: Synthetic oligonucleotide
  Antisense strand to SEQ ID NO: 1331382
gaauucaaacagguuaacc

SEQ ID NO: 1331384 - RNA, 19 nt, Artificial Sequence
  Description of Artificial Sequence: Synthetic oligonucleotide
  Sense strand starting at position 2946 of SEQ ID NO: 1242220
gcccaagaaccguaaccau

SEQ ID NO: 1331385 - RNA, 19 nt, Artificial Sequence
  Description of Artificial Sequence: Synthetic oligonucleotide
  Antisense strand to SEQ ID NO: 1331384
augguuacgguucuugggc

SEQ ID NO: 1331386 - RNA, 19 nt, Artificial Sequence
  Description of Artificial Sequence: Synthetic oligonucleotide
  Sense strand starting at position 2955 of SEQ ID NO: 1242220
ccguaaccauaauuguauu

SEQ ID NO: 1331387 - RNA, 19 nt, Artificial Sequence
  Description of Artificial Sequence: Synthetic oligonucleotide
  Antisense strand to SEQ ID NO: 1331386
aauacaauuaugguuacgg

SEQ ID NO: 1331388 - RNA, 19 nt, Artificial Sequence
  Description of Artificial Sequence: Synthetic oligonucleotide
  Sense strand starting at position 3144 of SEQ ID NO: 1242220
guuaguuccauuggauuag

SEQ ID NO: 1331389 - RNA, 19 nt, Artificial Sequence
  Description of Artificial Sequence: Synthetic oligonucleotide
  Antisense strand to SEQ ID NO: 1331388
cuaauccaauggaacuaac

SEQ ID NO: 1331390 - RNA, 19 nt, Artificial Sequence
  Description of Artificial Sequence: Synthetic oligonucleotide
  Sense strand starting at position 3148 of SEQ ID NO: 1242220
guuccauuggauuagaagu

SEQ ID NO: 1331391 - RNA, 19 nt, Artificial Sequence
  Description of Artificial Sequence: Synthetic oligonucleotide
  Antisense strand to SEQ ID NO: 1331390
acuucuaauccaauggaac

SEQ ID NO: 1331392 - RNA, 19 nt, Artificial Sequence
  Description of Artificial Sequence: Synthetic oligonucleotide
  Sense strand starting at position 3154 of SEQ ID NO: 1242220
uuggauuagaaguguuaaa

SEQ ID NO: 1331393 - RNA, 19 nt, Artificial Sequence
  Description of Artificial Sequence: Synthetic oligonucleotide
  Antisense strand to SEQ ID NO: 1331392
uuuaacacuucuaauccaa

SEQ ID NO: 1331394 - RNA, 19 nt, Artificial Sequence
  Description of Artificial Sequence: Synthetic oligonucleotide
  Sense strand starting at position 3429 of SEQ ID NO: 1242220
ccagauaucugguuguauu

SEQ ID NO: 1331395 - RNA, 19 nt, Artificial Sequence
  Description of Artificial Sequence: Synthetic oligonucleotide
  Antisense strand to SEQ ID NO: 1331394
aauacaaccagauaucugg

SEQ ID NO: 1331396 - RNA, 19 nt, Artificial Sequence
  Description of Artificial Sequence: Synthetic oligonucleotide
  Sense strand starting at position 3430 of SEQ ID NO: 1242220
cagauaucugguuguauua

SEQ ID NO: 1331397 - RNA, 19 nt, Artificial Sequence
  Description of Artificial Sequence: Synthetic oligonucleotide
  Antisense strand to SEQ ID NO: 1331396
uaauacaaccagauaucug

SEQ ID NO: 1331398 - RNA, 19 nt, Artificial Sequence
  Description of Artificial Sequence: Synthetic oligonucleotide
  Sense strand starting at position 3489 of SEQ ID NO: 1242220
gcuuaaagagcagacauua

SEQ ID NO: 1331399 - RNA, 19 nt, Artificial Sequence
  Description of Artificial Sequence: Synthetic oligonucleotide
  Antisense strand to SEQ ID NO: 1331398
uaaugucugcucuuuaagc

SEQ ID NO: 1331400 - RNA, 19 nt, Artificial Sequence
  Description of Artificial Sequence: Synthetic oligonucleotide
  Sense strand starting at position 3560 of SEQ ID NO: 1242220
uagggaucugccuaacuug

SEQ ID NO: 1331401 - RNA, 19 nt, Artificial Sequence
  Description of Artificial Sequence: Synthetic oligonucleotide
  Antisense strand to SEQ ID NO: 1331400
caaguuaggcagaucccua

SEQ ID NO: 1331402 - RNA, 19 nt, Artificial Sequence
  Description of Artificial Sequence: Synthetic oligonucleotide
  Sense strand starting at position 3664 of SEQ ID NO: 1242220
auaacaugcucucugggau

SEQ ID NO: 1331403 - RNA, 19 nt, Artificial Sequence
  Description of Artificial Sequence: Synthetic oligonucleotide
  Antisense strand to SEQ ID NO: 1331402
aucccagagagcauguuau

SEQ ID NO: 1331404 - RNA, 19 nt, Artificial Sequence
  Description of Artificial Sequence: Synthetic oligonucleotide
  Sense strand starting at position 3676 of SEQ ID NO: 1242220
cugggaucucuugaugucu

SEQ ID NO: 1331405 - RNA, 19 nt, Artificial Sequence
  Description of Artificial Sequence: Synthetic oligonucleotide
  Antisense strand to SEQ ID NO: 1331404
agacaucaagagaucccag

SEQ ID NO: 1331406 - RNA, 19 nt, Artificial Sequence
  Description of Artificial Sequence: Synthetic oligonucleotide
  Sense strand starting at position 3687 of SEQ ID NO: 1242220
ugaugucucuucuuguaag

SEQ ID NO: 1331407 - RNA, 19 nt, Artificial Sequence
  Description of Artificial Sequence: Synthetic oligonucleotide
  Antisense strand to SEQ ID NO: 1331406
cuuacaagaagagacauca

SEQ ID NO: 1331408 - RNA, 19 nt, Artificial Sequence
  Description of Artificial Sequence: Synthetic oligonucleotide
  Sense strand starting at position 18 of SEQ ID NO: 1242221
ggcgaauuauaagcaauau

SEQ ID NO: 1331409 - RNA, 19 nt, Artificial Sequence
  Description of Artificial Sequence: Synthetic oligonucleotide
  Antisense strand to SEQ ID NO: 1331408
auauugcuuauaauucgcc

SEQ ID NO: 1331410 - RNA, 19 nt, Artificial Sequence
  Description of Artificial Sequence: Synthetic oligonucleotide
  Sense strand starting at position 303 of SEQ ID NO: 1242221
gcauguauacucguguuua

SEQ ID NO: 1331411 - RNA, 19 nt, Artificial Sequence
  Description of Artificial Sequence: Synthetic oligonucleotide
  Antisense strand to SEQ ID NO: 1331410
uaaacacgaguauacaugc

SEQ ID NO: 1331412 - RNA, 19 nt, Artificial Sequence
  Description of Artificial Sequence: Synthetic oligonucleotide
  Sense strand starting at position 308 of SEQ ID NO: 1242221
uauacucguguuuagauau

SEQ ID NO: 1331413 - RNA, 19 nt, Artificial Sequence
  Description of Artificial Sequence: Synthetic oligonucleotide
  Antisense strand to SEQ ID NO: 1331412
auaucuaaacacgaguaua

SEQ ID NO: 1331414 - RNA, 19 nt, Artificial Sequence
  Description of Artificial Sequence: Synthetic oligonucleotide
  Sense strand starting at position 314 of SEQ ID NO: 1242221
cguguuuagauaugaauag

SEQ ID NO: 1331415 - RNA, 19 nt, Artificial Sequence
  Description of Artificial Sequence: Synthetic oligonucleotide
  Antisense strand to SEQ ID NO: 1331414
cuauucauaucuaaacacg

SEQ ID NO: 1331416 - RNA, 19 nt, Artificial Sequence
  Description of Artificial Sequence: Synthetic oligonucleotide
  Sense strand starting at position 685 of SEQ ID NO: 1242221
agaccuuucccuugucuau

SEQ ID NO: 1331417 - RNA, 19 nt, Artificial Sequence
  Description of Artificial Sequence: Synthetic oligonucleotide
  Antisense strand to SEQ ID NO: 1331416
auagacaagggaaaggucu

SEQ ID NO: 1331418 - RNA, 19 nt, Artificial Sequence
  Description of Artificial Sequence: Synthetic oligonucleotide
  Sense strand starting at position 733 of SEQ ID NO: 1242221
ugcucugaggcauaacaga

SEQ ID NO: 1331419 - RNA, 19 nt, Artificial Sequence
  Description of Artificial Sequence: Synthetic oligonucleotide
  Antisense strand to SEQ ID NO: 1331418
ucuguuaugccucagagca

SEQ ID NO: 1331420 - RNA, 19 nt, Artificial Sequence
  Description of Artificial Sequence: Synthetic oligonucleotide
  Sense strand starting at position 808 of SEQ ID NO: 1242221
gagguaggcauaugaaagu

SEQ ID NO: 1331421 - RNA, 19 nt, Artificial Sequence
  Description of Artificial Sequence: Synthetic oligonucleotide
  Antisense strand to SEQ ID NO: 1331420
acuuucauaugccuaccuc

SEQ ID NO: 1331422 - RNA, 19 nt, Artificial Sequence
  Description of Artificial Sequence: Synthetic oligonucleotide
  Sense strand starting at position 1175 of SEQ ID NO: 1242221
acuuccucucgguauaaau

SEQ ID NO: 1331423 - RNA, 19 nt, Artificial Sequence
  Description of Artificial Sequence: Synthetic oligonucleotide
  Antisense strand to SEQ ID NO: 1331422
auuuauaccgagaggaagu

SEQ ID NO: 1331424 - RNA, 19 nt, Artificial Sequence
  Description of Artificial Sequence: Synthetic oligonucleotide
  Sense strand starting at position 1177 of SEQ ID NO: 1242221
uuccucucgguauaaauca

SEQ ID NO: 1331425 - RNA, 19 nt, Artificial Sequence
  Description of Artificial Sequence: Synthetic oligonucleotide
  Antisense strand to SEQ ID NO: 1331424
ugauuuauaccgagaggaa

SEQ ID NO: 1331426 - RNA, 19 nt, Artificial Sequence
  Description of Artificial Sequence: Synthetic oligonucleotide
  Sense strand starting at position 1184 of SEQ ID NO: 1242221
cgguauaaaucaguuuaaa

SEQ ID NO: 1331427 - RNA, 19 nt, Artificial Sequence
  Description of Artificial Sequence: Synthetic oligonucleotide
  Antisense strand to SEQ ID NO: 1331426
uuuaaacugauuuauaccg

SEQ ID NO: 1331428 - RNA, 19 nt, Artificial Sequence
  Description of Artificial Sequence: Synthetic oligonucleotide
  Sense strand starting at position 1298 of SEQ ID NO: 1242221
agaggaaauguccgaugau

SEQ ID NO: 1331429 - RNA, 19 nt, Artificial Sequence
  Description of Artificial Sequence: Synthetic oligonucleotide
  Antisense strand to SEQ ID NO: 1331428
aucaucggacauuuccucu

SEQ ID NO: 1331430 - RNA, 19 nt, Artificial Sequence
  Description of Artificial Sequence: Synthetic oligonucleotide
  Sense strand starting at position 1301 of SEQ ID NO: 1242221
ggaaauguccgaugauguc

SEQ ID NO: 1331431 - RNA, 19 nt, Artificial Sequence
  Description of Artificial Sequence: Synthetic oligonucleotide
  Antisense strand to SEQ ID NO: 1331430
gacaucaucggacauuucc

SEQ ID NO: 1331432 - RNA, 19 nt, Artificial Sequence
  Description of Artificial Sequence: Synthetic oligonucleotide
  Sense strand starting at position 1313 of SEQ ID NO: 1242221
ugaugucaucccuagauac

SEQ ID NO: 1331433 - RNA, 19 nt, Artificial Sequence
  Description of Artificial Sequence: Synthetic oligonucleotide
  Antisense strand to SEQ ID NO: 1331432
guaucuagggaugacauca

SEQ ID NO: 1331434 - RNA, 19 nt, Artificial Sequence
  Description of Artificial Sequence: Synthetic oligonucleotide
  Sense strand starting at position 1315 of SEQ ID NO: 1242221
augucaucccuagauacuc

SEQ ID NO: 1331435 - RNA, 19 nt, Artificial Sequence
  Description of Artificial Sequence: Synthetic oligonucleotide
  Antisense strand to SEQ ID NO: 1331434
gaguaucuagggaugacau

SEQ ID NO: 1331436 - RNA, 19 nt, Artificial Sequence
  Description of Artificial Sequence: Synthetic oligonucleotide
  Sense strand starting at position 1323 of SEQ ID NO: 1242221
ccuagauacucccuaguga

SEQ ID NO: 1331437 - RNA, 19 nt, Artificial Sequence
  Description of Artificial Sequence: Synthetic oligonucleotide
  Antisense strand to SEQ ID NO: 1331436
ucacuagggaguaucuagg

SEQ ID NO: 1331438 - RNA, 19 nt, Artificial Sequence
  Description of Artificial Sequence: Synthetic oligonucleotide
  Sense strand starting at position 1324 of SEQ ID NO: 1242221
cuagauacucccuagugau

SEQ ID NO: 1331439 - RNA, 19 nt, Artificial Sequence
  Description of Artificial Sequence: Synthetic oligonucleotide
  Antisense strand to SEQ ID NO: 1331438
aucacuagggaguaucuag

SEQ ID NO: 1331440 - RNA, 19 nt, Artificial Sequence
  Description of Artificial Sequence: Synthetic oligonucleotide
  Sense strand starting at position 1400 of SEQ ID NO: 1242221
cugagcuuugcucaaagau

SEQ ID NO: 1331441 - RNA, 19 nt, Artificial Sequence
  Description of Artificial Sequence: Synthetic oligonucleotide
  Antisense strand to SEQ ID NO: 1331440
aucuuugagcaaagcucag

SEQ ID NO: 1331442 - RNA, 19 nt, Artificial Sequence
  Description of Artificial Sequence: Synthetic oligonucleotide
  Sense strand starting at position 2227 of SEQ ID NO: 1242221
cuugcaaagcgggauuaga

SEQ ID NO: 1331443 - RNA, 19 nt, Artificial Sequence
  Description of Artificial Sequence: Synthetic oligonucleotide
  Antisense strand to SEQ ID NO: 1331442
ucuaaucccgcuuugcaag

SEQ ID NO: 1331444 - RNA, 19 nt, Artificial Sequence
  Description of Artificial Sequence: Synthetic oligonucleotide
  Sense strand starting at position 2320 of SEQ ID NO: 1242221
uuuaaagacuucuugcaag

SEQ ID NO: 1331445 - RNA, 19 nt, Artificial Sequence
  Description of Artificial Sequence: Synthetic oligonucleotide
  Antisense strand to SEQ ID NO: 1331444
cuugcaagaagucuuuaaa

SEQ ID NO: 1331446 - RNA, 19 nt, Artificial Sequence
  Description of Artificial Sequence: Synthetic oligonucleotide
  Sense strand starting at position 2339 of SEQ ID NO: 1242221
uccucagacugccuuuaga

SEQ ID NO: 1331447 - RNA, 19 nt, Artificial Sequence
  Description of Artificial Sequence: Synthetic oligonucleotide
  Antisense strand to SEQ ID NO: 1331446
ucuaaaggcagucugagga

SEQ ID NO: 1331448 - RNA, 19 nt, Artificial Sequence
  Description of Artificial Sequence: Synthetic oligonucleotide
  Sense strand starting at position 2342 of SEQ ID NO: 1242221
ucagacugccuuuagaaau

SEQ ID NO: 1331449 - RNA, 19 nt, Artificial Sequence
  Description of Artificial Sequence: Synthetic oligonucleotide
  Antisense strand to SEQ ID NO: 1331448
auuucuaaaggcagucuga

SEQ ID NO: 1331450 - RNA, 19 nt, Artificial Sequence
  Description of Artificial Sequence: Synthetic oligonucleotide
  Sense strand starting at position 2435 of SEQ ID NO: 1242221
auugaugacugauugcaau

SEQ ID NO: 1331451 - RNA, 19 nt, Artificial Sequence
  Description of Artificial Sequence: Synthetic oligonucleotide
  Antisense strand to SEQ ID NO: 1331450
auugcaaucagucaucaau

SEQ ID NO: 1331452 - RNA, 19 nt, Artificial Sequence
  Description of Artificial Sequence: Synthetic oligonucleotide
  Sense strand starting at position 2608 of SEQ ID NO: 1242221
ucuacuagaugggcuaaua

SEQ ID NO: 1331453 - RNA, 19 nt, Artificial Sequence
  Description of Artificial Sequence: Synthetic oligonucleotide
  Antisense strand to SEQ ID NO: 1331452
uauuagcccaucuaguaga

SEQ ID NO: 1331454 - RNA, 19 nt, Artificial Sequence
  Description of Artificial Sequence: Synthetic oligonucleotide
  Sense strand starting at position 2651 of SEQ ID NO: 1242221
guguuuauuguauacugau

SEQ ID NO: 1331455 - RNA, 19 nt, Artificial Sequence
  Description of Artificial Sequence: Synthetic oligonucleotide
  Antisense strand to SEQ ID NO: 1331454
aucaguauacaauaaacac

SEQ ID NO: 1331456 - RNA, 19 nt, Artificial Sequence
  Description of Artificial Sequence: Synthetic oligonucleotide
  Sense strand starting at position 2658 of SEQ ID NO: 1242221
uuguauacugauggaaauu

SEQ ID NO: 1331457 - RNA, 19 nt, Artificial Sequence
  Description of Artificial Sequence: Synthetic oligonucleotide
  Antisense strand to SEQ ID NO: 1331456
aauuuccaucaguauacaa

SEQ ID NO: 1331458 - RNA, 19 nt, Artificial Sequence
  Description of Artificial Sequence: Synthetic oligonucleotide
  Sense strand starting at position 2793 of SEQ ID NO: 1242221
cuaauucucgaguacuaua

SEQ ID NO: 1331459 - RNA, 19 nt, Artificial Sequence
  Description of Artificial Sequence: Synthetic oligonucleotide
  Antisense strand to SEQ ID NO: 1331458
uauaguacucgagaauuag

SEQ ID NO: 1331460 - RNA, 19 nt, Artificial Sequence
  Description of Artificial Sequence: Synthetic oligonucleotide
  Sense strand starting at position 2798 of SEQ ID NO: 1242221
ucucgaguacuauaaucuu

SEQ ID NO: 1331461 - RNA, 19 nt, Artificial Sequence
  Description of Artificial Sequence: Synthetic oligonucleotide
  Antisense strand to SEQ ID NO: 1331460
aagauuauaguacucgaga

SEQ ID NO: 1331462 - RNA, 19 nt, Artificial Sequence
  Description of Artificial Sequence: Synthetic oligonucleotide
  Sense strand starting at position 2902 of SEQ ID NO: 1242221
agucacuuugcagaauauc

SEQ ID NO: 1331463 - RNA, 19 nt, Artificial Sequence
  Description of Artificial Sequence: Synthetic oligonucleotide
  Antisense strand to SEQ ID NO: 1331462
gauauucugcaaagugacu

SEQ ID NO: 1331464 - RNA, 19 nt, Artificial Sequence
  Description of Artificial Sequence: Synthetic oligonucleotide
  Sense strand starting at position 3124 of SEQ ID NO: 1242221
guaguugcuguauaaauug

SEQ ID NO: 1331465 - RNA, 19 nt, Artificial Sequence
  Description of Artificial Sequence: Synthetic oligonucleotide
  Antisense strand to SEQ ID NO: 1331464
caauuuauacagcaacuac

SEQ ID NO: 1331466 - RNA, 19 nt, Artificial Sequence
  Description of Artificial Sequence: Synthetic oligonucleotide
  Sense strand starting at position 3131 of SEQ ID NO: 1242221
cuguauaaauuguuucuca

SEQ ID NO: 1331467 - RNA, 19 nt, Artificial Sequence
  Description of Artificial Sequence: Synthetic oligonucleotide
  Antisense strand to SEQ ID NO: 1331466
ugagaaacaauuuauacag

SEQ ID NO: 1331468 - RNA, 19 nt, Artificial Sequence
  Description of Artificial Sequence: Synthetic oligonucleotide
  Sense strand starting at position 3168 of SEQ ID NO: 1242221
gauuuauaaucgcagaaag

SEQ ID NO: 1331469 - RNA, 19 nt, Artificial Sequence
  Description of Artificial Sequence: Synthetic oligonucleotide
  Antisense strand to SEQ ID NO: 1331468
cuuucugcgauuauaaauc

SEQ ID NO: 1331470 - RNA, 19 nt, Artificial Sequence
  Description of Artificial Sequence: Synthetic oligonucleotide
  Sense strand starting at position 3244 of SEQ ID NO: 1242221
cccauaacucccugggcaa

SEQ ID NO: 1331471 - RNA, 19 nt, Artificial Sequence
  Description of Artificial Sequence: Synthetic oligonucleotide
  Antisense strand to SEQ ID NO: 1331470
uugcccagggaguuauggg

SEQ ID NO: 1331472 - RNA, 19 nt, Artificial Sequence
  Description of Artificial Sequence: Synthetic oligonucleotide
  Sense strand starting at position 3364 of SEQ ID NO: 1242221
gugcuauaugaacauaaug

SEQ ID NO: 1331473 - RNA, 19 nt, Artificial Sequence
  Description of Artificial Sequence: Synthetic oligonucleotide
  Antisense strand to SEQ ID NO: 1331472
cauuauguucauauagcac

SEQ ID NO: 1331474 - RNA, 19 nt, Artificial Sequence
  Description of Artificial Sequence: Synthetic oligonucleotide
  Sense strand starting at position 3602 of SEQ ID NO: 1242221
uuaagaggccuuuaugcuu

SEQ ID NO: 1331475 - RNA, 19 nt, Artificial Sequence
  Description of Artificial Sequence: Synthetic oligonucleotide
  Antisense strand to SEQ ID NO: 1331474
aagcauaaaggccucuuaa

SEQ ID NO: 1331476 - RNA, 19 nt, Artificial Sequence
  Description of Artificial Sequence: Synthetic oligonucleotide
  Sense strand starting at position 3623 of SEQ ID NO: 1242221
aacagaguaguagguacau

SEQ ID NO: 1331477 - RNA, 19 nt, Artificial Sequence
  Description of Artificial Sequence: Synthetic oligonucleotide
  Antisense strand to SEQ ID NO: 1331476
auguaccuacuacucuguu

SEQ ID NO: 1331478 - RNA, 19 nt, Artificial Sequence
  Description of Artificial Sequence: Synthetic oligonucleotide
  Sense strand starting at position 3625 of SEQ ID NO: 1242221
cagaguaguagguacauga

SEQ ID NO: 1331479 - RNA, 19 nt, Artificial Sequence
  Description of Artificial Sequence: Synthetic oligonucleotide
  Antisense strand to SEQ ID NO: 1331478
ucauguaccuacuacucug

SEQ ID NO: 1331480 - RNA, 19 nt, Artificial Sequence
  Description of Artificial Sequence: Synthetic oligonucleotide
  Sense strand starting at position 3629 of SEQ ID NO: 1242221
guaguagguacaugaggaa

SEQ ID NO: 1331481 - RNA, 19 nt, Artificial Sequence
  Description of Artificial Sequence: Synthetic oligonucleotide
  Antisense strand to SEQ ID NO: 1331480
uuccucauguaccuacuac

SEQ ID NO: 1331482 - RNA, 19 nt, Artificial Sequence
  Description of Artificial Sequence: Synthetic oligonucleotide
  Sense strand starting at position 3873 of SEQ ID NO: 1242221
gguucuaguccugauaaag

SEQ ID NO: 1331483 - RNA, 19 nt, Artificial Sequence
  Description of Artificial Sequence: Synthetic oligonucleotide
  Antisense strand to SEQ ID NO: 1331482
cuuuaucaggacuagaacc

SEQ ID NO: 1331484 - RNA, 19 nt, Artificial Sequence
  Description of Artificial Sequence: Synthetic oligonucleotide
  Sense strand starting at position 3895 of SEQ ID NO: 1242221
agagguuaauuccuacuga

SEQ ID NO: 1331485 - RNA, 19 nt, Artificial Sequence
  Description of Artificial Sequence: Synthetic oligonucleotide
  Antisense strand to SEQ ID NO: 1331484
ucaguaggaauuaaccucu

SEQ ID NO: 1331486 - RNA, 19 nt, Artificial Sequence
  Description of Artificial Sequence: Synthetic oligonucleotide
  Sense strand starting at position 3914 of SEQ ID NO: 1242221
gagauuggugagggccuua

SEQ ID NO: 1331487 - RNA, 19 nt, Artificial Sequence
  Description of Artificial Sequence: Synthetic oligonucleotide
  Antisense strand to SEQ ID NO: 1331486
uaaggcccucaccaaucuc

SEQ ID NO: 1331488 - RNA, 19 nt, Artificial Sequence
  Description of Artificial Sequence: Synthetic oligonucleotide
  Sense strand starting at position 81 of SEQ ID NO: 1242222
acacaugcccaaugggaau

SEQ ID NO: 1331489 - RNA, 19 nt, Artificial Sequence
  Description of Artificial Sequence: Synthetic oligonucleotide
  Antisense strand to SEQ ID NO: 1331488
auucccauugggcaugugu

SEQ ID NO: 1331490 - RNA, 19 nt, Artificial Sequence
  Description of Artificial Sequence: Synthetic oligonucleotide
  Sense strand starting at position 141 of SEQ ID NO: 1242222
agaguagacugacuucuua

SEQ ID NO: 1331491 - RNA, 19 nt, Artificial Sequence
  Description of Artificial Sequence: Synthetic oligonucleotide
  Antisense strand to SEQ ID NO: 1331490
uaagaagucagucuacucu

SEQ ID NO: 1331492 - RNA, 19 nt, Artificial Sequence
  Description of Artificial Sequence: Synthetic oligonucleotide
  Sense strand starting at position 189 of SEQ ID NO: 1242222
gacaaaguguucucuuaga

SEQ ID NO: 1331493 - RNA, 19 nt, Artificial Sequence
  Description of Artificial Sequence: Synthetic oligonucleotide
  Antisense strand to SEQ ID NO: 1331492
ucuaagagaacacuuuguc

SEQ ID NO: 1331494 - RNA, 19 nt, Artificial Sequence
  Description of Artificial Sequence: Synthetic oligonucleotide
  Sense strand starting at position 256 of SEQ ID NO: 1242222
ggccgaggaugccuugaaa

SEQ ID NO: 1331495 - RNA, 19 nt, Artificial Sequence
  Description of Artificial Sequence: Synthetic oligonucleotide
  Antisense strand to SEQ ID NO: 1331494
uuucaaggcauccucggcc

SEQ ID NO: 1331496 - RNA, 19 nt, Artificial Sequence
  Description of Artificial Sequence: Synthetic oligonucleotide
  Sense strand starting at position 259 of SEQ ID NO: 1242222
cgaggaugccuugaaaggu

SEQ ID NO: 1331497 - RNA, 19 nt, Artificial Sequence
  Description of Artificial Sequence: Synthetic oligonucleotide
  Antisense strand to SEQ ID NO: 1331496
accuuucaaggcauccucg

SEQ ID NO: 1331498 - RNA, 19 nt, Artificial Sequence
  Description of Artificial Sequence: Synthetic oligonucleotide
  Sense strand starting at position 269 of SEQ ID NO: 1242222
uugaaagguuucucguuga

SEQ ID NO: 1331499 - RNA, 19 nt, Artificial Sequence
  Description of Artificial Sequence: Synthetic oligonucleotide
  Antisense strand to SEQ ID NO: 1331498
ucaacgagaaaccuuucaa

SEQ ID NO: 1331500 - RNA, 19 nt, Artificial Sequence
  Description of Artificial Sequence: Synthetic oligonucleotide
  Sense strand starting at position 274 of SEQ ID NO: 1242222
agguuucucguugauguuu

SEQ ID NO: 1331501 - RNA, 19 nt, Artificial Sequence
  Description of Artificial Sequence: Synthetic oligonucleotide
  Antisense strand to SEQ ID NO: 1331500
aaacaucaacgagaaaccu

SEQ ID NO: 1331502 - RNA, 19 nt, Artificial Sequence
  Description of Artificial Sequence: Synthetic oligonucleotide
  Sense strand starting at position 295 of SEQ ID NO: 1242222
uuguaaucauucuuuggaa

SEQ ID NO: 1331503 - RNA, 19 nt, Artificial Sequence
  Description of Artificial Sequence: Synthetic oligonucleotide
  Antisense strand to SEQ ID NO: 1331502
uuccaaagaaugauuacaa

SEQ ID NO: 1331504 - RNA, 19 nt, Artificial Sequence
  Description of Artificial Sequence: Synthetic oligonucleotide
  Sense strand starting at position 296 of SEQ ID NO: 1242222
uguaaucauucuuuggaau

SEQ ID NO: 1331505 - RNA, 19 nt, Artificial Sequence
  Description of Artificial Sequence: Synthetic oligonucleotide
  Antisense strand to SEQ ID NO: 1331504
auuccaaagaaugauuaca

SEQ ID NO: 1331506 - RNA, 19 nt, Artificial Sequence
  Description of Artificial Sequence: Synthetic oligonucleotide
  Sense strand starting at position 297 of SEQ ID NO: 1242222
guaaucauucuuuggaaua

SEQ ID NO: 1331507 - RNA, 19 nt, Artificial Sequence
  Description of Artificial Sequence: Synthetic oligonucleotide
  Antisense strand to SEQ ID NO: 1331506
uauuccaaagaaugauuac

SEQ ID NO: 1331508 - RNA, 19 nt, Artificial Sequence
  Description of Artificial Sequence: Synthetic oligonucleotide
  Sense strand starting at position 333 of SEQ ID NO: 1242222
gggcuucugagcuuugugu

SEQ ID NO: 1331509 - RNA, 19 nt, Artificial Sequence
  Description of Artificial Sequence: Synthetic oligonucleotide
  Antisense strand to SEQ ID NO: 1331508
acacaaagcucagaagccc

SEQ ID NO: 1331510 - RNA, 19 nt, Artificial Sequence
  Description of Artificial Sequence: Synthetic oligonucleotide
  Sense strand starting at position 548 of SEQ ID NO: 1242222
gaagccuuguaauagauuu

SEQ ID NO: 1331511 - RNA, 19 nt, Artificial Sequence
  Description of Artificial Sequence: Synthetic oligonucleotide
  Antisense strand to SEQ ID NO: 1331510
aaaucuauuacaaggcuuc

SEQ ID NO: 1331512 - RNA, 19 nt, Artificial Sequence
  Description of Artificial Sequence: Synthetic oligonucleotide
  Sense strand starting at position 805 of SEQ ID NO: 1242222
gggcgucuucccgugcgaa

SEQ ID NO: 1331513 - RNA, 19 nt, Artificial Sequence
  Description of Artificial Sequence: Synthetic oligonucleotide
  Antisense strand to SEQ ID NO: 1331512
uucgcacgggaagacgccc

SEQ ID NO: 1331514 - RNA, 19 nt, Artificial Sequence
  Description of Artificial Sequence: Synthetic oligonucleotide
  Sense strand starting at position 1405 of SEQ ID NO: 1242222
gaaaccgacuuggaauaaa

SEQ ID NO: 1331515 - RNA, 19 nt, Artificial Sequence
  Description of Artificial Sequence: Synthetic oligonucleotide
  Antisense strand to SEQ ID NO: 1331514
uuuauuccaagucgguuuc

SEQ ID NO: 1331516 - RNA, 19 nt, Artificial Sequence
  Description of Artificial Sequence: Synthetic oligonucleotide
  Sense strand starting at position 1957 of SEQ ID NO: 1242222
ucuuucuucggccacuuaa

SEQ ID NO: 1331517 - RNA, 19 nt, Artificial Sequence
  Description of Artificial Sequence: Synthetic oligonucleotide
  Antisense strand to SEQ ID NO: 1331516
uuaaguggccgaagaaaga

SEQ ID NO: 1331518 - RNA, 19 nt, Artificial Sequence
  Description of Artificial Sequence: Synthetic oligonucleotide
  Sense strand starting at position 2009 of SEQ ID NO: 1242222
cgggcaaucuguccauaaa

SEQ ID NO: 1331519 - RNA, 19 nt, Artificial Sequence
  Description of Artificial Sequence: Synthetic oligonucleotide
  Antisense strand to SEQ ID NO: 1331518
uuuauggacagauugcccg

SEQ ID NO: 1331520 - RNA, 19 nt, Artificial Sequence
  Description of Artificial Sequence: Synthetic oligonucleotide
  Sense strand starting at position 2010 of SEQ ID NO: 1242222
gggcaaucuguccauaaau

SEQ ID NO: 1331521 - RNA, 19 nt, Artificial Sequence
  Description of Artificial Sequence: Synthetic oligonucleotide
  Antisense strand to SEQ ID NO: 1331520
auuuauggacagauugccc

SEQ ID NO: 1331522 - RNA, 19 nt, Artificial Sequence
  Description of Artificial Sequence: Synthetic oligonucleotide
  Sense strand starting at position 2012 of SEQ ID NO: 1242222
gcaaucuguccauaaaugg

SEQ ID NO: 1331523 - RNA, 19 nt, Artificial Sequence
  Description of Artificial Sequence: Synthetic oligonucleotide
  Antisense strand to SEQ ID NO: 1331522
ccauuuauggacagauugc

SEQ ID NO: 1331524 - RNA, 19 nt, Artificial Sequence
  Description of Artificial Sequence: Synthetic oligonucleotide
  Sense strand starting at position 2072 of SEQ ID NO: 1242222
agcgucacuccucagggaa

SEQ ID NO: 1331525 - RNA, 19 nt, Artificial Sequence
  Description of Artificial Sequence: Synthetic oligonucleotide
  Antisense strand to SEQ ID NO: 1331524
uucccugaggagugacgcu

SEQ ID NO: 1331526 - RNA, 19 nt, Artificial Sequence
  Description of Artificial Sequence: Synthetic oligonucleotide
  Sense strand starting at position 2290 of SEQ ID NO: 1242222
guggguuucgcuuccaagu

SEQ ID NO: 1331527 - RNA, 19 nt, Artificial Sequence
  Description of Artificial Sequence: Synthetic oligonucleotide
  Antisense strand to SEQ ID NO: 1331526
acuuggaagcgaaacccac

SEQ ID NO: 1331528 - RNA, 19 nt, Artificial Sequence
  Description of Artificial Sequence: Synthetic oligonucleotide
  Sense strand starting at position 2419 of SEQ ID NO: 1242222
ucuggauugugagcaaagu

SEQ ID NO: 1331529 - RNA, 19 nt, Artificial Sequence
  Description of Artificial Sequence: Synthetic oligonucleotide
  Antisense strand to SEQ ID NO: 1331528
acuuugcucacaauccaga

SEQ ID NO: 1331530 - RNA, 19 nt, Artificial Sequence
  Description of Artificial Sequence: Synthetic oligonucleotide
  Sense strand starting at position 2631 of SEQ ID NO: 1242222
agagauaggugggaagaaa

SEQ ID NO: 1331531 - RNA, 19 nt, Artificial Sequence
  Description of Artificial Sequence: Synthetic oligonucleotide
  Antisense strand to SEQ ID NO: 1331530
uuucuucccaccuaucucu

SEQ ID NO: 1331532 - RNA, 19 nt, Artificial Sequence
  Description of Artificial Sequence: Synthetic oligonucleotide
  Sense strand starting at position 2665 of SEQ ID NO: 1242222
gccaacacaucugcugaaa

SEQ ID NO: 1331533 - RNA, 19 nt, Artificial Sequence
  Description of Artificial Sequence: Synthetic oligonucleotide
  Antisense strand to SEQ ID NO: 1331532
uuucagcagauguguuggc

SEQ ID NO: 1331534 - RNA, 19 nt, Artificial Sequence
  Description of Artificial Sequence: Synthetic oligonucleotide
  Sense strand starting at position 2703 of SEQ ID NO: 1242222
ugcauuauuccagacuguc

SEQ ID NO: 1331535 - RNA, 19 nt, Artificial Sequence
  Description of Artificial Sequence: Synthetic oligonucleotide
  Antisense strand to SEQ ID NO: 1331534
gacagucuggaauaaugca

SEQ ID NO: 1331536 - RNA, 19 nt, Artificial Sequence
  Description of Artificial Sequence: Synthetic oligonucleotide
  Sense strand starting at position 2706 of SEQ ID NO: 1242222
auuauuccagacugucgaa

SEQ ID NO: 1331537 - RNA, 19 nt, Artificial Sequence
  Description of Artificial Sequence: Synthetic oligonucleotide
  Antisense strand to SEQ ID NO: 1331536
uucgacagucuggaauaau

SEQ ID NO: 1331538 - RNA, 19 nt, Artificial Sequence
  Description of Artificial Sequence: Synthetic oligonucleotide
  Sense strand starting at position 2713 of SEQ ID NO: 1242222
cagacugucgaauauccaa

SEQ ID NO: 1331539 - RNA, 19 nt, Artificial Sequence
  Description of Artificial Sequence: Synthetic oligonucleotide
  Antisense strand to SEQ ID NO: 1331538
uuggauauucgacagucug

SEQ ID NO: 1331540 - RNA, 19 nt, Artificial Sequence
  Description of Artificial Sequence: Synthetic oligonucleotide
  Sense strand starting at position 2818 of SEQ ID NO: 1242222
ggaaguaaauuuggugagu

SEQ ID NO: 1331541 - RNA, 19 nt, Artificial Sequence
  Description of Artificial Sequence: Synthetic oligonucleotide
  Antisense strand to SEQ ID NO: 1331540
acucaccaaauuuacuucc

SEQ ID NO: 1331542 - RNA, 19 nt, Artificial Sequence
  Description of Artificial Sequence: Synthetic oligonucleotide
  Sense strand starting at position 3138 of SEQ ID NO: 1242222
acgagaaucguuuaaacag

SEQ ID NO: 1331543 - RNA, 19 nt, Artificial Sequence
  Description of Artificial Sequence: Synthetic oligonucleotide
  Antisense strand to SEQ ID NO: 1331542
cuguuuaaacgauucucgu

SEQ ID NO: 1331544 - RNA, 19 nt, Artificial Sequence
  Description of Artificial Sequence: Synthetic oligonucleotide
  Sense strand starting at position 3329 of SEQ ID NO: 1242222
uagaguuagaaaggguauu

SEQ ID NO: 1331545 - RNA, 19 nt, Artificial Sequence
  Description of Artificial Sequence: Synthetic oligonucleotide
  Antisense strand to SEQ ID NO: 1331544
aauacccuuucuaacucua

SEQ ID NO: 1331546 - RNA, 19 nt, Artificial Sequence
  Description of Artificial Sequence: Synthetic oligonucleotide
  Sense strand starting at position 3335 of SEQ ID NO: 1242222
uagaaaggguauuaaacuu

SEQ ID NO: 1331547 - RNA, 19 nt, Artificial Sequence
  Description of Artificial Sequence: Synthetic oligonucleotide
  Antisense strand to SEQ ID NO: 1331546
aaguuuaauacccuuucua

SEQ ID NO: 1331548 - RNA, 19 nt, Artificial Sequence
  Description of Artificial Sequence: Synthetic oligonucleotide
  Sense strand starting at position 3342 of SEQ ID NO: 1242222
gguauuaaacuuuaucuug

SEQ ID NO: 1331549 - RNA, 19 nt, Artificial Sequence
  Description of Artificial Sequence: Synthetic oligonucleotide
  Antisense strand to SEQ ID NO: 1331548
caagauaaaguuuaauacc

SEQ ID NO: 1331550 - RNA, 19 nt, Artificial Sequence
  Description of Artificial Sequence: Synthetic oligonucleotide
  Sense strand starting at position 3411 of SEQ ID NO: 1242222
guguuaagccaggagcaaa

SEQ ID NO: 1331551 - RNA, 19 nt, Artificial Sequence
  Description of Artificial Sequence: Synthetic oligonucleotide
  Antisense strand to SEQ ID NO: 1331550
uuugcuccuggcuuaacac

SEQ ID NO: 1331552 - RNA, 19 nt, Artificial Sequence
  Description of Artificial Sequence: Synthetic oligonucleotide
  Sense strand starting at position 3653 of SEQ ID NO: 1242222
uuaaaugggugagucuuau

SEQ ID NO: 1331553 - RNA, 19 nt, Artificial Sequence
  Description of Artificial Sequence: Synthetic oligonucleotide
  Antisense strand to SEQ ID NO: 1331552
auaagacucacccauuuaa

SEQ ID NO: 1331554 - RNA, 19 nt, Artificial Sequence
  Description of Artificial Sequence: Synthetic oligonucleotide
  Sense strand starting at position 3743 of SEQ ID NO: 1242222
uuacauaguuuggcaacaa

SEQ ID NO: 1331555 - RNA, 19 nt, Artificial Sequence
  Description of Artificial Sequence: Synthetic oligonucleotide
  Antisense strand to SEQ ID NO: 1331554
uuguugccaaacuauguaa

SEQ ID NO: 1331556 - RNA, 19 nt, Artificial Sequence
  Description of Artificial Sequence: Synthetic oligonucleotide
  Sense strand starting at position 3747 of SEQ ID NO: 1242222
auaguuuggcaacaauaua

SEQ ID NO: 1331557 - RNA, 19 nt, Artificial Sequence
  Description of Artificial Sequence: Synthetic oligonucleotide
  Antisense strand to SEQ ID NO: 1331556
uauauuguugccaaacuau

SEQ ID NO: 1331558 - RNA, 19 nt, Artificial Sequence
  Description of Artificial Sequence: Synthetic oligonucleotide
  Sense strand starting at position 3760 of SEQ ID NO: 1242222
aauauaaucgaaugugugu

SEQ ID NO: 1331559 - RNA, 19 nt, Artificial Sequence
  Description of Artificial Sequence: Synthetic oligonucleotide
  Antisense strand to SEQ ID NO: 1331558
acacacauucgauuauauu

SEQ ID NO: 1331560 - RNA, 19 nt, Artificial Sequence
  Description of Artificial Sequence: Synthetic oligonucleotide
  Sense strand starting at position 3765 of SEQ ID NO: 1242222
aaucgaauguguguuauaa

SEQ ID NO: 1331561 - RNA, 19 nt, Artificial Sequence
  Description of Artificial Sequence: Synthetic oligonucleotide
  Antisense strand to SEQ ID NO: 1331560
uuauaacacacauucgauu

SEQ ID NO: 1331562 - RNA, 19 nt, Artificial Sequence
  Description of Artificial Sequence: Synthetic oligonucleotide
  Sense strand starting at position 3906 of SEQ ID NO: 1242222
aaugaaaugcgacaguagu

SEQ ID NO: 1331563 - RNA, 19 nt, Artificial Sequence
  Description of Artificial Sequence: Synthetic oligonucleotide
  Antisense strand to SEQ ID NO: 1331562
acuacugucgcauuucauu

SEQ ID NO: 1331564 - RNA, 19 nt, Artificial Sequence
  Description of Artificial Sequence: Synthetic oligonucleotide
  Sense strand starting at position 3956 of SEQ ID NO: 1242222
uaguuuagggcaggaaauu

SEQ ID NO: 1331565 - RNA, 19 nt, Artificial Sequence
  Description of Artificial Sequence: Synthetic oligonucleotide
  Antisense strand to SEQ ID NO: 1331564
aauuuccugcccuaaacua

SEQ ID NO: 1331566 - RNA, 19 nt, Artificial Sequence
  Description of Artificial Sequence: Synthetic oligonucleotide
  Sense strand starting at position 3979 of SEQ ID NO: 1242222
ugacauaguuauguaguau

SEQ ID NO: 1331567 - RNA, 19 nt, Artificial Sequence
  Description of Artificial Sequence: Synthetic oligonucleotide
  Antisense strand to SEQ ID NO: 1331566
auacuacauaacuauguca

SEQ ID NO: 1331568 - RNA, 19 nt, Artificial Sequence
  Description of Artificial Sequence: Synthetic oligonucleotide
  Sense strand starting at position 80 of SEQ ID NO: 1242223
guuggacaaacuugaugua

SEQ ID NO: 1331569 - RNA, 19 nt, Artificial Sequence
  Description of Artificial Sequence: Synthetic oligonucleotide
  Antisense strand to SEQ ID NO: 1331568
uacaucaaguuuguccaac

SEQ ID NO: 1331570 - RNA, 19 nt, Artificial Sequence
  Description of Artificial Sequence: Synthetic oligonucleotide
  Sense strand starting at position 121 of SEQ ID NO: 1242223
caaaguaaccaaggaaugu

SEQ ID NO: 1331571 - RNA, 19 nt, Artificial Sequence
  Description of Artificial Sequence: Synthetic oligonucleotide
  Antisense strand to SEQ ID NO: 1331570
acauuccuugguuacuuug

SEQ ID NO: 1331572 - RNA, 19 nt, Artificial Sequence
  Description of Artificial Sequence: Synthetic oligonucleotide
  Sense strand starting at position 136 of SEQ ID NO: 1242223
auguuuacagacugauuau

SEQ ID NO: 1331573 - RNA, 19 nt, Artificial Sequence
  Description of Artificial Sequence: Synthetic oligonucleotide
  Antisense strand to SEQ ID NO: 1331572
auaaucagucuguaaacau

SEQ ID NO: 1331574 - RNA, 19 nt, Artificial Sequence
  Description of Artificial Sequence: Synthetic oligonucleotide
  Sense strand starting at position 196 of SEQ ID NO: 1242223
cucauaaguuccuuaugag

SEQ ID NO: 1331575 - RNA, 19 nt, Artificial Sequence
  Description of Artificial Sequence: Synthetic oligonucleotide
  Antisense strand to SEQ ID NO: 1331574
cucauaaggaacuuaugag

SEQ ID NO: 1331576 - RNA, 19 nt, Artificial Sequence
  Description of Artificial Sequence: Synthetic oligonucleotide
  Sense strand starting at position 329 of SEQ ID NO: 1242223
agagaucuacaaugccuaa

SEQ ID NO: 1331577 - RNA, 19 nt, Artificial Sequence
  Description of Artificial Sequence: Synthetic oligonucleotide
  Antisense strand to SEQ ID NO: 1331576
uuaggcauuguagaucucu

SEQ ID NO: 1331578 - RNA, 19 nt, Artificial Sequence
  Description of Artificial Sequence: Synthetic oligonucleotide
  Sense strand starting at position 379 of SEQ ID NO: 1242223
cuguacagucguuaaaucu

SEQ ID NO: 1331579 - RNA, 19 nt, Artificial Sequence
  Description of Artificial Sequence: Synthetic oligonucleotide
  Antisense strand to SEQ ID NO: 1331578
agauuuaacgacuguacag

SEQ ID NO: 1331580 - RNA, 19 nt, Artificial Sequence
  Description of Artificial Sequence: Synthetic oligonucleotide
  Sense strand starting at position 471 of SEQ ID NO: 1242223
aucucauauuugcagagaa

SEQ ID NO: 1331581 - RNA, 19 nt, Artificial Sequence
  Description of Artificial Sequence: Synthetic oligonucleotide
  Antisense strand to SEQ ID NO: 1331580
uucucugcaaauaugagau

SEQ ID NO: 1331582 - RNA, 19 nt, Artificial Sequence
  Description of Artificial Sequence: Synthetic oligonucleotide
  Sense strand starting at position 512 of SEQ ID NO: 1242223
ucacaacgauuauuaaguu

SEQ ID NO: 1331583 - RNA, 19 nt, Artificial Sequence
  Description of Artificial Sequence: Synthetic oligonucleotide
  Antisense strand to SEQ ID NO: 1331582
aacuuaauaaucguuguga

SEQ ID NO: 1331584 - RNA, 19 nt, Artificial Sequence
  Description of Artificial Sequence: Synthetic oligonucleotide
  Sense strand starting at position 723 of SEQ ID NO: 1242223
cagugacauuuggaaacaa

SEQ ID NO: 1331585 - RNA, 19 nt, Artificial Sequence
  Description of Artificial Sequence: Synthetic oligonucleotide
  Antisense strand to SEQ ID NO: 1331584
uuguuuccaaaugucacug

SEQ ID NO: 1331586 - RNA, 19 nt, Artificial Sequence
  Description of Artificial Sequence: Synthetic oligonucleotide
  Sense strand starting at position 767 of SEQ ID NO: 1242223
aaugaaaguucuguugcaa

SEQ ID NO: 1331587 - RNA, 19 nt, Artificial Sequence
  Description of Artificial Sequence: Synthetic oligonucleotide
  Antisense strand to SEQ ID NO: 1331586
uugcaacagaacuuucauu

SEQ ID NO: 1331588 - RNA, 19 nt, Artificial Sequence
  Description of Artificial Sequence: Synthetic oligonucleotide
  Sense strand starting at position 808 of SEQ ID NO: 1242223
cuauuaacugcauguagaa

SEQ ID NO: 1331589 - RNA, 19 nt, Artificial Sequence
  Description of Artificial Sequence: Synthetic oligonucleotide
  Antisense strand to SEQ ID NO: 1331588
uucuacaugcaguuaauag

SEQ ID NO: 1331590 - RNA, 19 nt, Artificial Sequence
  Description of Artificial Sequence: Synthetic oligonucleotide
  Sense strand starting at position 931 of SEQ ID NO: 1242223
agugacaguucuccauaau

SEQ ID NO: 1331591 - RNA, 19 nt, Artificial Sequence
  Description of Artificial Sequence: Synthetic oligonucleotide
  Antisense strand to SEQ ID NO: 1331590
auuauggagaacugucacu

SEQ ID NO: 1331592 - RNA, 19 nt, Artificial Sequence
  Description of Artificial Sequence: Synthetic oligonucleotide
  Sense strand starting at position 932 of SEQ ID NO: 1242223
gugacaguucuccauaaua

SEQ ID NO: 1331593 - RNA, 19 nt, Artificial Sequence
  Description of Artificial Sequence: Synthetic oligonucleotide
  Antisense strand to SEQ ID NO: 1331592
uauuauggagaacugucac

SEQ ID NO: 1331594 - RNA, 19 nt, Artificial Sequence
  Description of Artificial Sequence: Synthetic oligonucleotide
  Sense strand starting at position 964 of SEQ ID NO: 1242223
ucgccagacccugaguaua

SEQ ID NO: 1331595 - RNA, 19 nt, Artificial Sequence
  Description of Artificial Sequence: Synthetic oligonucleotide
  Antisense strand to SEQ ID NO: 1331594
uauacucagggucuggcga

SEQ ID NO: 1331596 - RNA, 19 nt, Artificial Sequence
  Description of Artificial Sequence: Synthetic oligonucleotide
  Sense strand starting at position 966 of SEQ ID NO: 1242223
gccagacccugaguauauu

SEQ ID NO: 1331597 - RNA, 19 nt, Artificial Sequence
  Description of Artificial Sequence: Synthetic oligonucleotide
  Antisense strand to SEQ ID NO: 1331596
aauauacucagggucuggc

SEQ ID NO: 1331598 - RNA, 19 nt, Artificial Sequence
  Description of Artificial Sequence: Synthetic oligonucleotide
  Sense strand starting at position 1078 of SEQ ID NO: 1242223
aaggcucugcgggauuaca

SEQ ID NO: 1331599 - RNA, 19 nt, Artificial Sequence
  Description of Artificial Sequence: Synthetic oligonucleotide
  Antisense strand to SEQ ID NO: 1331598
uguaaucccgcagagccuu

SEQ ID NO: 1331600 - RNA, 19 nt, Artificial Sequence
  Description of Artificial Sequence: Synthetic oligonucleotide
  Sense strand starting at position 1105 of SEQ ID NO: 1242223
gcaaacucccagcgauaaa

SEQ ID NO: 1331601 - RNA, 19 nt, Artificial Sequence
  Description of Artificial Sequence: Synthetic oligonucleotide
  Antisense strand to SEQ ID NO: 1331600
uuuaucgcugggaguuugc

SEQ ID NO: 1331602 - RNA, 19 nt, Artificial Sequence
  Description of Artificial Sequence: Synthetic oligonucleotide
  Sense strand starting at position 1144 of SEQ ID NO: 1242223
cggugaaucagcucgcguu

SEQ ID NO: 1331603 - RNA, 19 nt, Artificial Sequence
  Description of Artificial Sequence: Synthetic oligonucleotide
  Antisense strand to SEQ ID NO: 1331602
aacgcgagcugauucaccg

SEQ ID NO: 1331604 - RNA, 19 nt, Artificial Sequence
  Description of Artificial Sequence: Synthetic oligonucleotide
  Sense strand starting at position 1348 of SEQ ID NO: 1242223
auccgaucuacuggagcaa

SEQ ID NO: 1331605 - RNA, 19 nt, Artificial Sequence
  Description of Artificial Sequence: Synthetic oligonucleotide
  Antisense strand to SEQ ID NO: 1331604
uugcuccaguagaucggau

SEQ ID NO: 1331606 - RNA, 19 nt, Artificial Sequence
  Description of Artificial Sequence: Synthetic oligonucleotide
  Sense strand starting at position 2369 of SEQ ID NO: 1242223
gcuguuacuguguccgaau

SEQ ID NO: 1331607 - RNA, 19 nt, Artificial Sequence
  Description of Artificial Sequence: Synthetic oligonucleotide
  Antisense strand to SEQ ID NO: 1331606
auucggacacaguaacagc

SEQ ID NO: 1331608 - RNA, 19 nt, Artificial Sequence
  Description of Artificial Sequence: Synthetic oligonucleotide
  Sense strand starting at position 2426 of SEQ ID NO: 1242223
caagcauuccuagggagag

SEQ ID NO: 1331609 - RNA, 19 nt, Artificial Sequence
  Description of Artificial Sequence: Synthetic oligonucleotide
  Antisense strand to SEQ ID NO: 1331608
cucucccuaggaaugcuug

SEQ ID NO: 1331610 - RNA, 19 nt, Artificial Sequence
  Description of Artificial Sequence: Synthetic oligonucleotide
  Sense strand starting at position 2553 of SEQ ID NO: 1242223
gguuaagguugaucaccaa

SEQ ID NO: 1331611 - RNA, 19 nt, Artificial Sequence
  Description of Artificial Sequence: Synthetic oligonucleotide
  Antisense strand to SEQ ID NO: 1331610
uuggugaucaaccuuaacc

SEQ ID NO: 1331612 - RNA, 19 nt, Artificial Sequence
  Description of Artificial Sequence: Synthetic oligonucleotide
  Sense strand starting at position 2560 of SEQ ID NO: 1242223
guugaucaccaaggucauu

SEQ ID NO: 1331613 - RNA, 19 nt, Artificial Sequence
  Description of Artificial Sequence: Synthetic oligonucleotide
  Antisense strand to SEQ ID NO: 1331612
aaugaccuuggugaucaac

SEQ ID NO: 1331614 - RNA, 19 nt, Artificial Sequence
  Description of Artificial Sequence: Synthetic oligonucleotide
  Sense strand starting at position 2658 of SEQ ID NO: 1242223
gugacuuugaaacgagaua

SEQ ID NO: 1331615 - RNA, 19 nt, Artificial Sequence
  Description of Artificial Sequence: Synthetic oligonucleotide
  Antisense strand to SEQ ID NO: 1331614
uaucucguuucaaagucac

SEQ ID NO: 1331616 - RNA, 19 nt, Artificial Sequence
  Description of Artificial Sequence: Synthetic oligonucleotide
  Sense strand starting at position 2696 of SEQ ID NO: 1242223
gccucuuuccuagaccugu

SEQ ID NO: 1331617 - RNA, 19 nt, Artificial Sequence
  Description of Artificial Sequence: Synthetic oligonucleotide
  Antisense strand to SEQ ID NO: 1331616
acaggucuaggaaagaggc

SEQ ID NO: 1331618 - RNA, 19 nt, Artificial Sequence
  Description of Artificial Sequence: Synthetic oligonucleotide
  Sense strand starting at position 2855 of SEQ ID NO: 1242223
uguauuacaguuuaacuca

SEQ ID NO: 1331619 - RNA, 19 nt, Artificial Sequence
  Description of Artificial Sequence: Synthetic oligonucleotide
  Antisense strand to SEQ ID NO: 1331618
ugaguuaaacuguaauaca

SEQ ID NO: 1331620 - RNA, 19 nt, Artificial Sequence
  Description of Artificial Sequence: Synthetic oligonucleotide
  Sense strand starting at position 2907 of SEQ ID NO: 1242223
cacggugauccuugaacau

SEQ ID NO: 1331621 - RNA, 19 nt, Artificial Sequence
  Description of Artificial Sequence: Synthetic oligonucleotide
  Antisense strand to SEQ ID NO: 1331620
auguucaaggaucaccgug

SEQ ID NO: 1331622 - RNA, 19 nt, Artificial Sequence
  Description of Artificial Sequence: Synthetic oligonucleotide
  Sense strand starting at position 2931 of SEQ ID NO: 1242223
acaagaauguggucuuucu

SEQ ID NO: 1331623 - RNA, 19 nt, Artificial Sequence
  Description of Artificial Sequence: Synthetic oligonucleotide
  Antisense strand to SEQ ID NO: 1331622
agaaagaccacauucuugu

SEQ ID NO: 1331624 - RNA, 19 nt, Artificial Sequence
  Description of Artificial Sequence: Synthetic oligonucleotide
  Sense strand starting at position 3001 of SEQ ID NO: 1242223
ucguuucugguugaauaau

SEQ ID NO: 1331625 - RNA, 19 nt, Artificial Sequence
  Description of Artificial Sequence: Synthetic oligonucleotide
  Antisense strand to SEQ ID NO: 1331624
auuauucaaccagaaacga

SEQ ID NO: 1331626 - RNA, 19 nt, Artificial Sequence
  Description of Artificial Sequence: Synthetic oligonucleotide
  Sense strand starting at position 3133 of SEQ ID NO: 1242223
cugucaugguaaucuggua

SEQ ID NO: 1331627 - RNA, 19 nt, Artificial Sequence
  Description of Artificial Sequence: Synthetic oligonucleotide
  Antisense strand to SEQ ID NO: 1331626
uaccagauuaccaugacag

SEQ ID NO: 1331628 - RNA, 19 nt, Artificial Sequence
  Description of Artificial Sequence: Synthetic oligonucleotide
  Sense strand starting at position 3140 of SEQ ID NO: 1242223
gguaaucugguagaccauu

SEQ ID NO: 1331629 - RNA, 19 nt, Artificial Sequence
  Description of Artificial Sequence: Synthetic oligonucleotide
  Antisense strand to SEQ ID NO: 1331628
aauggucuaccagauuacc

SEQ ID NO: 1331630 - RNA, 19 nt, Artificial Sequence
  Description of Artificial Sequence: Synthetic oligonucleotide
  Sense strand starting at position 3208 of SEQ ID NO: 1242223
gugcguguguauuuggaga

SEQ ID NO: 1331631 - RNA, 19 nt, Artificial Sequence
  Description of Artificial Sequence: Synthetic oligonucleotide
  Antisense strand to SEQ ID NO: 1331630
ucuccaaauacacacgcac

SEQ ID NO: 1331632 - RNA, 19 nt, Artificial Sequence
  Description of Artificial Sequence: Synthetic oligonucleotide
  Sense strand starting at position 3321 of SEQ ID NO: 1242223
aaugucuacugagucgaaa

SEQ ID NO: 1331633 - RNA, 19 nt, Artificial Sequence
  Description of Artificial Sequence: Synthetic oligonucleotide
  Antisense strand to SEQ ID NO: 1331632
uuucgacucaguagacauu

SEQ ID NO: 1331634 - RNA, 19 nt, Artificial Sequence
  Description of Artificial Sequence: Synthetic oligonucleotide
  Sense strand starting at position 3347 of SEQ ID NO: 1242223
agauuugucucuguuccuu

SEQ ID NO: 1331635 - RNA, 19 nt, Artificial Sequence
  Description of Artificial Sequence: Synthetic oligonucleotide
  Antisense strand to SEQ ID NO: 1331634
aaggaacagagacaaaucu

SEQ ID NO: 1331636 - RNA, 19 nt, Artificial Sequence
  Description of Artificial Sequence: Synthetic oligonucleotide
  Sense strand starting at position 3468 of SEQ ID NO: 1242223
ggagcacuggacugagauu

SEQ ID NO: 1331637 - RNA, 19 nt, Artificial Sequence
  Description of Artificial Sequence: Synthetic oligonucleotide
  Antisense strand to SEQ ID NO: 1331636
aaucucaguccagugcucc

SEQ ID NO: 1331638 - RNA, 19 nt, Artificial Sequence
  Description of Artificial Sequence: Synthetic oligonucleotide
  Sense strand starting at position 3593 of SEQ ID NO: 1242223
ucgagaaaugcugaguaua

SEQ ID NO: 1331639 - RNA, 19 nt, Artificial Sequence
  Description of Artificial Sequence: Synthetic oligonucleotide
  Antisense strand to SEQ ID NO: 1331638
uauacucagcauuucucga

SEQ ID NO: 1331640 - RNA, 19 nt, Artificial Sequence
  Description of Artificial Sequence: Synthetic oligonucleotide
  Sense strand starting at position 3595 of SEQ ID NO: 1242223
gagaaaugcugaguauacu

SEQ ID NO: 1331641 - RNA, 19 nt, Artificial Sequence
  Description of Artificial Sequence: Synthetic oligonucleotide
  Antisense strand to SEQ ID NO: 1331640
aguauacucagcauuucuc

SEQ ID NO: 1331642 - RNA, 19 nt, Artificial Sequence
  Description of Artificial Sequence: Synthetic oligonucleotide
  Sense strand starting at position 3656 of SEQ ID NO: 1242223
gugugaaugcuuucuucgu

SEQ ID NO: 1331643 - RNA, 19 nt, Artificial Sequence
  Description of Artificial Sequence: Synthetic oligonucleotide
  Antisense strand to SEQ ID NO: 1331642
acgaagaaagcauucacac

SEQ ID NO: 1331644 - RNA, 19 nt, Artificial Sequence
  Description of Artificial Sequence: Synthetic oligonucleotide
  Sense strand starting at position 3725 of SEQ ID NO: 1242223
cuuauaaguccagaacgca

SEQ ID NO: 1331645 - RNA, 19 nt, Artificial Sequence
  Description of Artificial Sequence: Synthetic oligonucleotide
  Antisense strand to SEQ ID NO: 1331644
ugcguucuggacuuauaag

SEQ ID NO: 1331646 - RNA, 19 nt, Artificial Sequence
  Description of Artificial Sequence: Synthetic oligonucleotide
  Sense strand starting at position 3835 of SEQ ID NO: 1242223
gauugauacugagucuugu

SEQ ID NO: 1331647 - RNA, 19 nt, Artificial Sequence
  Description of Artificial Sequence: Synthetic oligonucleotide
  Antisense strand to SEQ ID NO: 1331646
acaagacucaguaucaauc

SEQ ID NO: 1331648 - RNA, 19 nt, Artificial Sequence
  Description of Artificial Sequence: Synthetic oligonucleotide
  Sense strand starting at position 198 of SEQ ID NO: 1242224
acacaaggucagugggaau

SEQ ID NO: 1331649 - RNA, 19 nt, Artificial Sequence
  Description of Artificial Sequence: Synthetic oligonucleotide
  Antisense strand to SEQ ID NO: 1331648
auucccacugaccuugugu

SEQ ID NO: 1331650 - RNA, 19 nt, Artificial Sequence
  Description of Artificial Sequence: Synthetic oligonucleotide
  Sense strand starting at position 310 of SEQ ID NO: 1242224
gugccugguacuuacuaga

SEQ ID NO: 1331651 - RNA, 19 nt, Artificial Sequence
  Description of Artificial Sequence: Synthetic oligonucleotide
  Antisense strand to SEQ ID NO: 1331650
ucuaguaaguaccaggcac

SEQ ID NO: 1331652 - RNA, 19 nt, Artificial Sequence
  Description of Artificial Sequence: Synthetic oligonucleotide
  Sense strand starting at position 344 of SEQ ID NO: 1242224
ugagguuugaggcaccuaa

SEQ ID NO: 1331653 - RNA, 19 nt, Artificial Sequence
  Description of Artificial Sequence: Synthetic oligonucleotide
  Antisense strand to SEQ ID NO: 1331652
uuaggugccucaaaccuca

SEQ ID NO: 1331654 - RNA, 19 nt, Artificial Sequence
  Description of Artificial Sequence: Synthetic oligonucleotide
  Sense strand starting at position 439 of SEQ ID NO: 1242224
uucucuguccuccaaagua

SEQ ID NO: 1331655 - RNA, 19 nt, Artificial Sequence
  Description of Artificial Sequence: Synthetic oligonucleotide
  Antisense strand to SEQ ID NO: 1331654
uacuuuggaggacagagaa

SEQ ID NO: 1331656 - RNA, 19 nt, Artificial Sequence
  Description of Artificial Sequence: Synthetic oligonucleotide
  Sense strand starting at position 451 of SEQ ID NO: 1242224
caaaguaucgucgaagacu

SEQ ID NO: 1331657 - RNA, 19 nt, Artificial Sequence
  Description of Artificial Sequence: Synthetic oligonucleotide
  Antisense strand to SEQ ID NO: 1331656
agucuucgacgauacuuug

SEQ ID NO: 1331658 - RNA, 19 nt, Artificial Sequence
  Description of Artificial Sequence: Synthetic oligonucleotide
  Sense strand starting at position 460 of SEQ ID NO: 1242224
gucgaagacuaguccaaga

SEQ ID NO: 1331659 - RNA, 19 nt, Artificial Sequence
  Description of Artificial Sequence: Synthetic oligonucleotide
  Antisense strand to SEQ ID NO: 1331658
ucuuggacuagucuucgac

SEQ ID NO: 1331660 - RNA, 19 nt, Artificial Sequence
  Description of Artificial Sequence: Synthetic oligonucleotide
  Sense strand starting at position 609 of SEQ ID NO: 1242224
aguuaauggagaugcaaua

SEQ ID NO: 1331661 - RNA, 19 nt, Artificial Sequence
  Description of Artificial Sequence: Synthetic oligonucleotide
  Antisense strand to SEQ ID NO: 1331660
uauugcaucuccauuaacu

SEQ ID NO: 1331662 - RNA, 19 nt, Artificial Sequence
  Description of Artificial Sequence: Synthetic oligonucleotide
  Sense strand starting at position 666 of SEQ ID NO: 1242224
guuacuaaguaaucaaagu

SEQ ID NO: 1331663 - RNA, 19 nt, Artificial Sequence
  Description of Artificial Sequence: Synthetic oligonucleotide
  Antisense strand to SEQ ID NO: 1331662
acuuugauuacuuaguaac

SEQ ID NO: 1331664 - RNA, 19 nt, Artificial Sequence
  Description of Artificial Sequence: Synthetic oligonucleotide
  Sense strand starting at position 801 of SEQ ID NO: 1242224
gauggauucuaguuccacu

SEQ ID NO: 1331665 - RNA, 19 nt, Artificial Sequence
  Description of Artificial Sequence: Synthetic oligonucleotide
  Antisense strand to SEQ ID NO: 1331664
aguggaacuagaauccauc

SEQ ID NO: 1331666 - RNA, 19 nt, Artificial Sequence
  Description of Artificial Sequence: Synthetic oligonucleotide
  Sense strand starting at position 1030 of SEQ ID NO: 1242224
gaagcuucugaggaaugcu

SEQ ID NO: 1331667 - RNA, 19 nt, Artificial Sequence
  Description of Artificial Sequence: Synthetic oligonucleotide
  Antisense strand to SEQ ID NO: 1331666
agcauuccucagaagcuuc

SEQ ID NO: 1331668 - RNA, 19 nt, Artificial Sequence
  Description of Artificial Sequence: Synthetic oligonucleotide
  Sense strand starting at position 1038 of SEQ ID NO: 1242224
ugaggaaugcucuaguguu

SEQ ID NO: 1331669 - RNA, 19 nt, Artificial Sequence
  Description of Artificial Sequence: Synthetic oligonucleotide
  Antisense strand to SEQ ID NO: 1331668
aacacuagagcauuccuca

SEQ ID NO: 1331670 - RNA, 19 nt, Artificial Sequence
  Description of Artificial Sequence: Synthetic oligonucleotide
  Sense strand starting at position 1050 of SEQ ID NO: 1242224
uaguguuucccagagucag

SEQ ID NO: 1331671 - RNA, 19 nt, Artificial Sequence
  Description of Artificial Sequence: Synthetic oligonucleotide
  Antisense strand to SEQ ID NO: 1331670
cugacucugggaaacacua

SEQ ID NO: 1331672 - RNA, 19 nt, Artificial Sequence
  Description of Artificial Sequence: Synthetic oligonucleotide
  Sense strand starting at position 1097 of SEQ ID NO: 1242224
gguguuuguacuguugcua

SEQ ID NO: 1331673 - RNA, 19 nt, Artificial Sequence
  Description of Artificial Sequence: Synthetic oligonucleotide
  Antisense strand to SEQ ID NO: 1331672
uagcaacaguacaaacacc

SEQ ID NO: 1331674 - RNA, 19 nt, Artificial Sequence
  Description of Artificial Sequence: Synthetic oligonucleotide
  Sense strand starting at position 1098 of SEQ ID NO: 1242224
guguuuguacuguugcuaa

SEQ ID NO: 1331675 - RNA, 19 nt, Artificial Sequence
  Description of Artificial Sequence: Synthetic oligonucleotide
  Antisense strand to SEQ ID NO: 1331674
uuagcaacaguacaaacac

SEQ ID NO: 1331676 - RNA, 19 nt, Artificial Sequence
  Description of Artificial Sequence: Synthetic oligonucleotide
  Sense strand starting at position 1120 of SEQ ID NO: 1242224
uacagauguuaggcaaaga

SEQ ID NO: 1331677 - RNA, 19 nt, Artificial Sequence
  Description of Artificial Sequence: Synthetic oligonucleotide
  Antisense strand to SEQ ID NO: 1331676
ucuuugccuaacaucugua

SEQ ID NO: 1331678 - RNA, 19 nt, Artificial Sequence
  Description of Artificial Sequence: Synthetic oligonucleotide
  Sense strand starting at position 1745 of SEQ ID NO: 1242224
ggucgagucagcguuagca

SEQ ID NO: 1331679 - RNA, 19 nt, Artificial Sequence
  Description of Artificial Sequence: Synthetic oligonucleotide
  Antisense strand to SEQ ID NO: 1331678
ugcuaacgcugacucgacc

SEQ ID NO: 1331680 - RNA, 19 nt, Artificial Sequence
  Description of Artificial Sequence: Synthetic oligonucleotide
  Sense strand starting at position 2025 of SEQ ID NO: 1242224
cgggauuggucccuccaag

SEQ ID NO: 1331681 - RNA, 19 nt, Artificial Sequence
  Description of Artificial Sequence: Synthetic oligonucleotide
  Antisense strand to SEQ ID NO: 1331680
cuuggagggaccaaucccg

SEQ ID NO: 1331682 - RNA, 19 nt, Artificial Sequence
  Description of Artificial Sequence: Synthetic oligonucleotide
  Sense strand starting at position 2179 of SEQ ID NO: 1242224
guguuagcuccucaaagag

SEQ ID NO: 1331683 - RNA, 19 nt, Artificial Sequence
  Description of Artificial Sequence: Synthetic oligonucleotide
  Antisense strand to SEQ ID NO: 1331682
cucuuugaggagcuaacac

SEQ ID NO: 1331684 - RNA, 19 nt, Artificial Sequence
  Description of Artificial Sequence: Synthetic oligonucleotide
  Sense strand starting at position 2260 of SEQ ID NO: 1242224
guguuaagaguccagcaag

SEQ ID NO: 1331685 - RNA, 19 nt, Artificial Sequence
  Description of Artificial Sequence: Synthetic oligonucleotide
  Antisense strand to SEQ ID NO: 1331684
cuugcuggacucuuaacac

SEQ ID NO: 1331686 - RNA, 19 nt, Artificial Sequence
  Description of Artificial Sequence: Synthetic oligonucleotide
  Sense strand starting at position 2326 of SEQ ID NO: 1242224
augagcauugucuaugcaa

SEQ ID NO: 1331687 - RNA, 19 nt, Artificial Sequence
  Description of Artificial Sequence: Synthetic oligonucleotide
  Antisense strand to SEQ ID NO: 1331686
uugcauagacaaugcucau

SEQ ID NO: 1331688 - RNA, 19 nt, Artificial Sequence
  Description of Artificial Sequence: Synthetic oligonucleotide
  Sense strand starting at position 2333 of SEQ ID NO: 1242224
uugucuaugcaauacaaga

SEQ ID NO: 1331689 - RNA, 19 nt, Artificial Sequence
  Description of Artificial Sequence: Synthetic oligonucleotide
  Antisense strand to SEQ ID NO: 1331688
ucuuguauugcauagacaa

SEQ ID NO: 1331690 - RNA, 19 nt, Artificial Sequence
  Description of Artificial Sequence: Synthetic oligonucleotide
  Sense strand starting at position 2507 of SEQ ID NO: 1242224
uaauauggucaagguguca

SEQ ID NO: 1331691 - RNA, 19 nt, Artificial Sequence
  Description of Artificial Sequence: Synthetic oligonucleotide
  Antisense strand to SEQ ID NO: 1331690
ugacaccuugaccauauua

SEQ ID NO: 1331692 - RNA, 19 nt, Artificial Sequence
  Description of Artificial Sequence: Synthetic oligonucleotide
  Sense strand starting at position 2554 of SEQ ID NO: 1242224
auauauuggcgucagaauc

SEQ ID NO: 1331693 - RNA, 19 nt, Artificial Sequence
  Description of Artificial Sequence: Synthetic oligonucleotide
  Antisense strand to SEQ ID NO: 1331692
gauucugacgccaauauau

SEQ ID NO: 1331694 - RNA, 19 nt, Artificial Sequence
  Description of Artificial Sequence: Synthetic oligonucleotide
  Sense strand starting at position 2588 of SEQ ID NO: 1242224
agaauuguacaaugauucu

SEQ ID NO: 1331695 - RNA, 19 nt, Artificial Sequence
  Description of Artificial Sequence: Synthetic oligonucleotide
  Antisense strand to SEQ ID NO: 1331694
agaaucauuguacaauucu

SEQ ID NO: 1331696 - RNA, 19 nt, Artificial Sequence
  Description of Artificial Sequence: Synthetic oligonucleotide
  Sense strand starting at position 2673 of SEQ ID NO: 1242224
ccauauauuuagggacaua

SEQ ID NO: 1331697 - RNA, 19 nt, Artificial Sequence
  Description of Artificial Sequence: Synthetic oligonucleotide
  Antisense strand to SEQ ID NO: 1331696
uaugucccuaaauauaugg

SEQ ID NO: 1331698 - RNA, 19 nt, Artificial Sequence
  Description of Artificial Sequence: Synthetic oligonucleotide
  Sense strand starting at position 2735 of SEQ ID NO: 1242224
cggauacgugaguaaugga

SEQ ID NO: 1331699 - RNA, 19 nt, Artificial Sequence
  Description of Artificial Sequence: Synthetic oligonucleotide
  Antisense strand to SEQ ID NO: 1331698
uccauuacucacguauccg

SEQ ID NO: 1331700 - RNA, 19 nt, Artificial Sequence
  Description of Artificial Sequence: Synthetic oligonucleotide
  Sense strand starting at position 2740 of SEQ ID NO: 1242224
acgugaguaauggaacaug

SEQ ID NO: 1331701 - RNA, 19 nt, Artificial Sequence
  Description of Artificial Sequence: Synthetic oligonucleotide
  Antisense strand to SEQ ID NO: 1331700
cauguuccauuacucacgu

SEQ ID NO: 1331702 - RNA, 19 nt, Artificial Sequence
  Description of Artificial Sequence: Synthetic oligonucleotide
  Sense strand starting at position 3002 of SEQ ID NO: 1242224
aagaauuguuaaucgguua

SEQ ID NO: 1331703 - RNA, 19 nt, Artificial Sequence
  Description of Artificial Sequence: Synthetic oligonucleotide
  Antisense strand to SEQ ID NO: 1331702
uaaccgauuaacaauucuu

SEQ ID NO: 1331704 - RNA, 19 nt, Artificial Sequence
  Description of Artificial Sequence: Synthetic oligonucleotide
  Sense strand starting at position 3003 of SEQ ID NO: 1242224
agaauuguuaaucgguuaa

SEQ ID NO: 1331705 - RNA, 19 nt, Artificial Sequence
  Description of Artificial Sequence: Synthetic oligonucleotide
  Antisense strand to SEQ ID NO: 1331704
uuaaccgauuaacaauucu

SEQ ID NO: 1331706 - RNA, 19 nt, Artificial Sequence
  Description of Artificial Sequence: Synthetic oligonucleotide
  Sense strand starting at position 3005 of SEQ ID NO: 1242224
aauuguuaaucgguuaaag

SEQ ID NO: 1331707 - RNA, 19 nt, Artificial Sequence
  Description of Artificial Sequence: Synthetic oligonucleotide
  Antisense strand to SEQ ID NO: 1331706
cuuuaaccgauuaacaauu

SEQ ID NO: 1331708 - RNA, 19 nt, Artificial Sequence
  Description of Artificial Sequence: Synthetic oligonucleotide
  Sense strand starting at position 3007 of SEQ ID NO: 1242224
uuguuaaucgguuaaagaa

SEQ ID NO: 1331709 - RNA, 19 nt, Artificial Sequence
  Description of Artificial Sequence: Synthetic oligonucleotide
  Antisense strand to SEQ ID NO: 1331708
uucuuuaaccgauuaacaa

SEQ ID NO: 1331710 - RNA, 19 nt, Artificial Sequence
  Description of Artificial Sequence: Synthetic oligonucleotide
  Sense strand starting at position 3080 of SEQ ID NO: 1242224
acacuuaaauggcuuguua

SEQ ID NO: 1331711 - RNA, 19 nt, Artificial Sequence
  Description of Artificial Sequence: Synthetic oligonucleotide
  Antisense strand to SEQ ID NO: 1331710
uaacaagccauuuaagugu

SEQ ID NO: 1331712 - RNA, 19 nt, Artificial Sequence
  Description of Artificial Sequence: Synthetic oligonucleotide
  Sense strand starting at position 3109 of SEQ ID NO: 1242224
agaugucaacuuuagcagu

SEQ ID NO: 1331713 - RNA, 19 nt, Artificial Sequence
  Description of Artificial Sequence: Synthetic oligonucleotide
  Antisense strand to SEQ ID NO: 1331712
acugcuaaaguugacaucu

SEQ ID NO: 1331714 - RNA, 19 nt, Artificial Sequence
  Description of Artificial Sequence: Synthetic oligonucleotide
  Sense strand starting at position 3210 of SEQ ID NO: 1242224
cucagauacugccuaggau

SEQ ID NO: 1331715 - RNA, 19 nt, Artificial Sequence
  Description of Artificial Sequence: Synthetic oligonucleotide
  Antisense strand to SEQ ID NO: 1331714
auccuaggcaguaucugag

SEQ ID NO: 1331716 - RNA, 19 nt, Artificial Sequence
  Description of Artificial Sequence: Synthetic oligonucleotide
  Sense strand starting at position 3218 of SEQ ID NO: 1242224
cugccuaggaugugagaaa

SEQ ID NO: 1331717 - RNA, 19 nt, Artificial Sequence
  Description of Artificial Sequence: Synthetic oligonucleotide
  Antisense strand to SEQ ID NO: 1331716
uuucucacauccuaggcag

SEQ ID NO: 1331718 - RNA, 19 nt, Artificial Sequence
  Description of Artificial Sequence: Synthetic oligonucleotide
  Sense strand starting at position 3608 of SEQ ID NO: 1242224
agagcaauuugagaauagu

SEQ ID NO: 1331719 - RNA, 19 nt, Artificial Sequence
  Description of Artificial Sequence: Synthetic oligonucleotide
  Antisense strand to SEQ ID NO: 1331718
acuauucucaaauugcucu

SEQ ID NO: 1331720 - RNA, 19 nt, Artificial Sequence
  Description of Artificial Sequence: Synthetic oligonucleotide
  Sense strand starting at position 3671 of SEQ ID NO: 1242224
gagacaguuaaguagaugu

SEQ ID NO: 1331721 - RNA, 19 nt, Artificial Sequence
  Description of Artificial Sequence: Synthetic oligonucleotide
  Antisense strand to SEQ ID NO: 1331720
acaucuacuuaacugucuc

SEQ ID NO: 1331722 - RNA, 19 nt, Artificial Sequence
  Description of Artificial Sequence: Synthetic oligonucleotide
  Sense strand starting at position 3878 of SEQ ID NO: 1242224
ugaauagaugucuagccca

SEQ ID NO: 1331723 - RNA, 19 nt, Artificial Sequence
  Description of Artificial Sequence: Synthetic oligonucleotide
  Antisense strand to SEQ ID NO: 1331722
ugggcuagacaucuauuca

SEQ ID NO: 1331724 - RNA, 19 nt, Artificial Sequence
  Description of Artificial Sequence: Synthetic oligonucleotide
  Sense strand starting at position 3949 of SEQ ID NO: 1242224
ggguacaaguaugugugaa

SEQ ID NO: 1331725 - RNA, 19 nt, Artificial Sequence
  Description of Artificial Sequence: Synthetic oligonucleotide
  Antisense strand to SEQ ID NO: 1331724
uucacacauacuuguaccc

SEQ ID NO: 1331726 - RNA, 19 nt, Artificial Sequence
  Description of Artificial Sequence: Synthetic oligonucleotide
  Sense strand starting at position 3951 of SEQ ID NO: 1242224
guacaaguaugugugaaua

SEQ ID NO: 1331727 - RNA, 19 nt, Artificial Sequence
  Description of Artificial Sequence: Synthetic oligonucleotide
  Antisense strand to SEQ ID NO: 1331726
uauucacacauacuuguac

SEQ ID NO: 1331728 - RNA, 19 nt, Artificial Sequence
  Description of Artificial Sequence: Synthetic oligonucleotide
  Sense strand starting at position 38 of SEQ ID NO: 1242225
agugguugccucuaaagag

SEQ ID NO: 1331729 - RNA, 19 nt, Artificial Sequence
  Description of Artificial Sequence: Synthetic oligonucleotide
  Antisense strand to SEQ ID NO: 1331728
cucuuuagaggcaaccacu

SEQ ID NO: 1331730 - RNA, 19 nt, Artificial Sequence
  Description of Artificial Sequence: Synthetic oligonucleotide
  Sense strand starting at position 374 of SEQ ID NO: 1242225
cucagugaacacugcauga

SEQ ID NO: 1331731 - RNA, 19 nt, Artificial Sequence
  Description of Artificial Sequence: Synthetic oligonucleotide
  Antisense strand to SEQ ID NO: 1331730
ucaugcaguguucacugag

SEQ ID NO: 1331732 - RNA, 19 nt, Artificial Sequence
  Description of Artificial Sequence: Synthetic oligonucleotide
  Sense strand starting at position 376 of SEQ ID NO: 1242225
cagugaacacugcaugauu

SEQ ID NO: 1331733 - RNA, 19 nt, Artificial Sequence
  Description of Artificial Sequence: Synthetic oligonucleotide
  Antisense strand to SEQ ID NO: 1331732
aaucaugcaguguucacug

SEQ ID NO: 1331734 - RNA, 19 nt, Artificial Sequence
  Description of Artificial Sequence: Synthetic oligonucleotide
  Sense strand starting at position 384 of SEQ ID NO: 1242225
acugcaugauuucuguacu

SEQ ID NO: 1331735 - RNA, 19 nt, Artificial Sequence
  Description of Artificial Sequence: Synthetic oligonucleotide
  Antisense strand to SEQ ID NO: 1331734
aguacagaaaucaugcagu

SEQ ID NO: 1331736 - RNA, 19 nt, Artificial Sequence
  Description of Artificial Sequence: Synthetic oligonucleotide
  Sense strand starting at position 387 of SEQ ID NO: 1242225
gcaugauuucuguacuugc

SEQ ID NO: 1331737 - RNA, 19 nt, Artificial Sequence
  Description of Artificial Sequence: Synthetic oligonucleotide
  Antisense strand to SEQ ID NO: 1331736
gcaaguacagaaaucaugc

SEQ ID NO: 1331738 - RNA, 19 nt, Artificial Sequence
  Description of Artificial Sequence: Synthetic oligonucleotide
  Sense strand starting at position 397 of SEQ ID NO: 1242225
uguacuugcuucuuggaga

SEQ ID NO: 1331739 - RNA, 19 nt, Artificial Sequence
  Description of Artificial Sequence: Synthetic oligonucleotide
  Antisense strand to SEQ ID NO: 1331738
ucuccaagaagcaaguaca

SEQ ID NO: 1331740 - RNA, 19 nt, Artificial Sequence
  Description of Artificial Sequence: Synthetic oligonucleotide
  Sense strand starting at position 402 of SEQ ID NO: 1242225
uugcuucuuggagaagcaa

SEQ ID NO: 1331741 - RNA, 19 nt, Artificial Sequence
  Description of Artificial Sequence: Synthetic oligonucleotide
  Antisense strand to SEQ ID NO: 1331740
uugcuucuccaagaagcaa

SEQ ID NO: 1331742 - RNA, 19 nt, Artificial Sequence
  Description of Artificial Sequence: Synthetic oligonucleotide
  Sense strand starting at position 632 of SEQ ID NO: 1242225
aguuauauccacuagugca

SEQ ID NO: 1331743 - RNA, 19 nt, Artificial Sequence
  Description of Artificial Sequence: Synthetic oligonucleotide
  Antisense strand to SEQ ID NO: 1331742
ugcacuaguggauauaacu

SEQ ID NO: 1331744 - RNA, 19 nt, Artificial Sequence
  Description of Artificial Sequence: Synthetic oligonucleotide
  Sense strand starting at position 642 of SEQ ID NO: 1242225
acuagugcaacgugauuua

SEQ ID NO: 1331745 - RNA, 19 nt, Artificial Sequence
  Description of Artificial Sequence: Synthetic oligonucleotide
  Antisense strand to SEQ ID NO: 1331744
uaaaucacguugcacuagu

SEQ ID NO: 1331746 - RNA, 19 nt, Artificial Sequence
  Description of Artificial Sequence: Synthetic oligonucleotide
  Sense strand starting at position 645 of SEQ ID NO: 1242225
agugcaacgugauuuaauc

SEQ ID NO: 1331747 - RNA, 19 nt, Artificial Sequence
  Description of Artificial Sequence: Synthetic oligonucleotide
  Antisense strand to SEQ ID NO: 1331746
gauuaaaucacguugcacu

SEQ ID NO: 1331748 - RNA, 19 nt, Artificial Sequence
  Description of Artificial Sequence: Synthetic oligonucleotide
  Sense strand starting at position 656 of SEQ ID NO: 1242225
auuuaauccuuacagaggu

SEQ ID NO: 1331749 - RNA, 19 nt, Artificial Sequence
  Description of Artificial Sequence: Synthetic oligonucleotide
  Antisense strand to SEQ ID NO: 1331748
accucuguaaggauuaaau

SEQ ID NO: 1331750 - RNA, 19 nt, Artificial Sequence
  Description of Artificial Sequence: Synthetic oligonucleotide
  Sense strand starting at position 736 of SEQ ID NO: 1242225
caggcucugugaccuuaua

SEQ ID NO: 1331751 - RNA, 19 nt, Artificial Sequence
  Description of Artificial Sequence: Synthetic oligonucleotide
  Antisense strand to SEQ ID NO: 1331750
uauaaggucacagagccug

SEQ ID NO: 1331752 - RNA, 19 nt, Artificial Sequence
  Description of Artificial Sequence: Synthetic oligonucleotide
  Sense strand starting at position 1052 of SEQ ID NO: 1242225
accacaucuaccgggagua

SEQ ID NO: 1331753 - RNA, 19 nt, Artificial Sequence
  Description of Artificial Sequence: Synthetic oligonucleotide
  Antisense strand to SEQ ID NO: 1331752
uacucccgguagauguggu

SEQ ID NO: 1331754 - RNA, 19 nt, Artificial Sequence
  Description of Artificial Sequence: Synthetic oligonucleotide
  Sense strand starting at position 1053 of SEQ ID NO: 1242225
ccacaucuaccgggaguaa

SEQ ID NO: 1331755 - RNA, 19 nt, Artificial Sequence
  Description of Artificial Sequence: Synthetic oligonucleotide
  Antisense strand to SEQ ID NO: 1331754
uuacucccgguagaugugg

SEQ ID NO: 1331756 - RNA, 19 nt, Artificial Sequence
  Description of Artificial Sequence: Synthetic oligonucleotide
  Sense strand starting at position 1223 of SEQ ID NO: 1242225
gccugagaacuguaaucac

SEQ ID NO: 1331757 - RNA, 19 nt, Artificial Sequence
  Description of Artificial Sequence: Synthetic oligonucleotide
  Antisense strand to SEQ ID NO: 1331756
gugauuacaguucucaggc

SEQ ID NO: 1331758 - RNA, 19 nt, Artificial Sequence
  Description of Artificial Sequence: Synthetic oligonucleotide
  Sense strand starting at position 1254 of SEQ ID NO: 1242225
gaggauguaacguagucua

SEQ ID NO: 1331759 - RNA, 19 nt, Artificial Sequence
  Description of Artificial Sequence: Synthetic oligonucleotide
  Antisense strand to SEQ ID NO: 1331758
uagacuacguuacauccuc

SEQ ID NO: 1331760 - RNA, 19 nt, Artificial Sequence
  Description of Artificial Sequence: Synthetic oligonucleotide
  Sense strand starting at position 1257 of SEQ ID NO: 1242225
gauguaacguagucuagaa

SEQ ID NO: 1331761 - RNA, 19 nt, Artificial Sequence
  Description of Artificial Sequence: Synthetic oligonucleotide
  Antisense strand to SEQ ID NO: 1331760
uucuagacuacguuacauc

SEQ ID NO: 1331762 - RNA, 19 nt, Artificial Sequence
  Description of Artificial Sequence: Synthetic oligonucleotide
  Sense strand starting at position 2390 of SEQ ID NO: 1242225
guuugucucggcaguggau

SEQ ID NO: 1331763 - RNA, 19 nt, Artificial Sequence
  Description of Artificial Sequence: Synthetic oligonucleotide
  Antisense strand to SEQ ID NO: 1331762
auccacugccgagacaaac

SEQ ID NO: 1331764 - RNA, 19 nt, Artificial Sequence
  Description of Artificial Sequence: Synthetic oligonucleotide
  Sense strand starting at position 2608 of SEQ ID NO: 1242225
uggguuccagaaugucaga

SEQ ID NO: 1331765 - RNA, 19 nt, Artificial Sequence
  Description of Artificial Sequence: Synthetic oligonucleotide
  Antisense strand to SEQ ID NO: 1331764
ucugacauucuggaaccca

SEQ ID NO: 1331766 - RNA, 19 nt, Artificial Sequence
  Description of Artificial Sequence: Synthetic oligonucleotide
  Sense strand starting at position 2615 of SEQ ID NO: 1242225
cagaaugucagaggcgaau

SEQ ID NO: 1331767 - RNA, 19 nt, Artificial Sequence
  Description of Artificial Sequence: Synthetic oligonucleotide
  Antisense strand to SEQ ID NO: 1331766
auucgccucugacauucug

SEQ ID NO: 1331768 - RNA, 19 nt, Artificial Sequence
  Description of Artificial Sequence: Synthetic oligonucleotide
  Sense strand starting at position 2617 of SEQ ID NO: 1242225
gaaugucagaggcgaauua

SEQ ID NO: 1331769 - RNA, 19 nt, Artificial Sequence
  Description of Artificial Sequence: Synthetic oligonucleotide
  Antisense strand to SEQ ID NO: 1331768
uaauucgccucugacauuc

SEQ ID NO: 1331770 - RNA, 19 nt, Artificial Sequence
  Description of Artificial Sequence: Synthetic oligonucleotide
  Sense strand starting at position 2618 of SEQ ID NO: 1242225
aaugucagaggcgaauuaa

SEQ ID NO: 1331771 - RNA, 19 nt, Artificial Sequence
  Description of Artificial Sequence: Synthetic oligonucleotide
  Antisense strand to SEQ ID NO: 1331770
uuaauucgccucugacauu

SEQ ID NO: 1331772 - RNA, 19 nt, Artificial Sequence
  Description of Artificial Sequence: Synthetic oligonucleotide
  Sense strand starting at position 2699 of SEQ ID NO: 1242225
acaauaaagugacaauaga

SEQ ID NO: 1331773 - RNA, 19 nt, Artificial Sequence
  Description of Artificial Sequence: Synthetic oligonucleotide
  Antisense strand to SEQ ID NO: 1331772
ucuauugucacuuuauugu

SEQ ID NO: 1331774 - RNA, 19 nt, Artificial Sequence
  Description of Artificial Sequence: Synthetic oligonucleotide
  Sense strand starting at position 2759 of SEQ ID NO: 1242225
ccagguuguguaggaggau

SEQ ID NO: 1331775 - RNA, 19 nt, Artificial Sequence
  Description of Artificial Sequence: Synthetic oligonucleotide
  Antisense strand to SEQ ID NO: 1331774
auccuccuacacaaccugg

SEQ ID NO: 1331776 - RNA, 19 nt, Artificial Sequence
  Description of Artificial Sequence: Synthetic oligonucleotide
  Sense strand starting at position 2818 of SEQ ID NO: 1242225
uuuagaggacuguguuaaa

SEQ ID NO: 1331777 - RNA, 19 nt, Artificial Sequence
  Description of Artificial Sequence: Synthetic oligonucleotide
  Antisense strand to SEQ ID NO: 1331776
uuuaacacaguccucuaaa

SEQ ID NO: 1331778 - RNA, 19 nt, Artificial Sequence
  Description of Artificial Sequence: Synthetic oligonucleotide
  Sense strand starting at position 2847 of SEQ ID NO: 1242225
uccaguaccuggucaaaga

SEQ ID NO: 1331779 - RNA, 19 nt, Artificial Sequence
  Description of Artificial Sequence: Synthetic oligonucleotide
  Antisense strand to SEQ ID NO: 1331778
ucuuugaccagguacugga

SEQ ID NO: 1331780 - RNA, 19 nt, Artificial Sequence
  Description of Artificial Sequence: Synthetic oligonucleotide
  Sense strand starting at position 2969 of SEQ ID NO: 1242225
aguguagacuucccuuuaa

SEQ ID NO: 1331781 - RNA, 19 nt, Artificial Sequence
  Description of Artificial Sequence: Synthetic oligonucleotide
  Antisense strand to SEQ ID NO: 1331780
uuaaagggaagucuacacu

SEQ ID NO: 1331782 - RNA, 19 nt, Artificial Sequence
  Description of Artificial Sequence: Synthetic oligonucleotide
  Sense strand starting at position 2995 of SEQ ID NO: 1242225
ucguuauaaaguuagagaa

SEQ ID NO: 1331783 - RNA, 19 nt, Artificial Sequence
  Description of Artificial Sequence: Synthetic oligonucleotide
  Antisense strand to SEQ ID NO: 1331782
uucucuaacuuuauaacga

SEQ ID NO: 1331784 - RNA, 19 nt, Artificial Sequence
  Description of Artificial Sequence: Synthetic oligonucleotide
  Sense strand starting at position 3048 of SEQ ID NO: 1242225
ucuguuuagguagaagacu

SEQ ID NO: 1331785 - RNA, 19 nt, Artificial Sequence
  Description of Artificial Sequence: Synthetic oligonucleotide
  Antisense strand to SEQ ID NO: 1331784
agucuucuaccuaaacaga

SEQ ID NO: 1331786 - RNA, 19 nt, Artificial Sequence
  Description of Artificial Sequence: Synthetic oligonucleotide
  Sense strand starting at position 3116 of SEQ ID NO: 1242225
gcuaauuuauaagaucaag

SEQ ID NO: 1331787 - RNA, 19 nt, Artificial Sequence
  Description of Artificial Sequence: Synthetic oligonucleotide
  Antisense strand to SEQ ID NO: 1331786
cuugaucuuauaaauuagc

SEQ ID NO: 1331788 - RNA, 19 nt, Artificial Sequence
  Description of Artificial Sequence: Synthetic oligonucleotide
  Sense strand starting at position 3328 of SEQ ID NO: 1242225
ugagacaguuggcucugua

SEQ ID NO: 1331789 - RNA, 19 nt, Artificial Sequence
  Description of Artificial Sequence: Synthetic oligonucleotide
  Antisense strand to SEQ ID NO: 1331788
uacagagccaacugucuca

SEQ ID NO: 1331790 - RNA, 19 nt, Artificial Sequence
  Description of Artificial Sequence: Synthetic oligonucleotide
  Sense strand starting at position 3331 of SEQ ID NO: 1242225
gacaguuggcucuguaaca

SEQ ID NO: 1331791 - RNA, 19 nt, Artificial Sequence
  Description of Artificial Sequence: Synthetic oligonucleotide
  Antisense strand to SEQ ID NO: 1331790
uguuacagagccaacuguc

SEQ ID NO: 1331792 - RNA, 19 nt, Artificial Sequence
  Description of Artificial Sequence: Synthetic oligonucleotide
  Sense strand starting at position 3344 of SEQ ID NO: 1242225
guaacauuaagauggaggu

SEQ ID NO: 1331793 - RNA, 19 nt, Artificial Sequence
  Description of Artificial Sequence: Synthetic oligonucleotide
  Antisense strand to SEQ ID NO: 1331792
accuccaucuuaauguuac

SEQ ID NO: 1331794 - RNA, 19 nt, Artificial Sequence
  Description of Artificial Sequence: Synthetic oligonucleotide
  Sense strand starting at position 3348 of SEQ ID NO: 1242225
cauuaagauggaggucauu

SEQ ID NO: 1331795 - RNA, 19 nt, Artificial Sequence
  Description of Artificial Sequence: Synthetic oligonucleotide
  Antisense strand to SEQ ID NO: 1331794
aaugaccuccaucuuaaug

SEQ ID NO: 1331796 - RNA, 19 nt, Artificial Sequence
  Description of Artificial Sequence: Synthetic oligonucleotide
  Sense strand starting at position 3683 of SEQ ID NO: 1242225
uacagagaggcuuggagau

SEQ ID NO: 1331797 - RNA, 19 nt, Artificial Sequence
  Description of Artificial Sequence: Synthetic oligonucleotide
  Antisense strand to SEQ ID NO: 1331796
aucuccaagccucucugua

SEQ ID NO: 1331798 - RNA, 19 nt, Artificial Sequence
  Description of Artificial Sequence: Synthetic oligonucleotide
  Sense strand starting at position 3712 of SEQ ID NO: 1242225
acuugagcggcguuauguu

SEQ ID NO: 1331799 - RNA, 19 nt, Artificial Sequence
  Description of Artificial Sequence: Synthetic oligonucleotide
  Antisense strand to SEQ ID NO: 1331798
aacauaacgccgcucaagu

SEQ ID NO: 1331800 - RNA, 19 nt, Artificial Sequence
  Description of Artificial Sequence: Synthetic oligonucleotide
  Sense strand starting at position 3717 of SEQ ID NO: 1242225
agcggcguuauguuuggaa

SEQ ID NO: 1331801 - RNA, 19 nt, Artificial Sequence
  Description of Artificial Sequence: Synthetic oligonucleotide
  Antisense strand to SEQ ID NO: 1331800
uuccaaacauaacgccgcu

SEQ ID NO: 1331802 - RNA, 19 nt, Artificial Sequence
  Description of Artificial Sequence: Synthetic oligonucleotide
  Sense strand starting at position 3804 of SEQ ID NO: 1242225
guuuaucagguccaaauua

SEQ ID NO: 1331803 - RNA, 19 nt, Artificial Sequence
  Description of Artificial Sequence: Synthetic oligonucleotide
  Antisense strand to SEQ ID NO: 1331802
uaauuuggaccugauaaac

SEQ ID NO: 1331804 - RNA, 19 nt, Artificial Sequence
  Description of Artificial Sequence: Synthetic oligonucleotide
  Sense strand starting at position 3938 of SEQ ID NO: 1242225
gccaauuuaugagaugcag

SEQ ID NO: 1331805 - RNA, 19 nt, Artificial Sequence
  Description of Artificial Sequence: Synthetic oligonucleotide
  Antisense strand to SEQ ID NO: 1331804
cugcaucucauaaauuggc

SEQ ID NO: 1331806 - RNA, 19 nt, Artificial Sequence
  Description of Artificial Sequence: Synthetic oligonucleotide
  Sense strand starting at position 3977 of SEQ ID NO: 1242225
gccaauuuaugagaugcaa

SEQ ID NO: 1331807 - RNA, 19 nt, Artificial Sequence
  Description of Artificial Sequence: Synthetic oligonucleotide
  Antisense strand to SEQ ID NO: 1331806
uugcaucucauaaauuggc

SEQ ID NO: 1331808 - RNA, 19 nt, Artificial Sequence
  Description of Artificial Sequence: Synthetic oligonucleotide
  Sense strand starting at position 59 of SEQ ID NO: 1242226
ucugcaaaucaugagcaga

SEQ ID NO: 1331809 - RNA, 19 nt, Artificial Sequence
  Description of Artificial Sequence: Synthetic oligonucleotide
  Antisense strand to SEQ ID NO: 1331808
ucugcucaugauuugcaga

SEQ ID NO: 1331810 - RNA, 19 nt, Artificial Sequence
  Description of Artificial Sequence: Synthetic oligonucleotide
  Sense strand starting at position 183 of SEQ ID NO: 1242226
cccugaguucuccagucca

SEQ ID NO: 1331811 - RNA, 19 nt, Artificial Sequence
  Description of Artificial Sequence: Synthetic oligonucleotide
  Antisense strand to SEQ ID NO: 1331810
uggacuggagaacucaggg

SEQ ID NO: 1331812 - RNA, 19 nt, Artificial Sequence
  Description of Artificial Sequence: Synthetic oligonucleotide
  Sense strand starting at position 252 of SEQ ID NO: 1242226
caauguguccgacagcaaa

SEQ ID NO: 1331813 - RNA, 19 nt, Artificial Sequence
  Description of Artificial Sequence: Synthetic oligonucleotide
  Antisense strand to SEQ ID NO: 1331812
uuugcugucggacacauug

SEQ ID NO: 1331814 - RNA, 19 nt, Artificial Sequence
  Description of Artificial Sequence: Synthetic oligonucleotide
  Sense strand starting at position 296 of SEQ ID NO: 1242226
aaaggaaacguuugaccca

SEQ ID NO: 1331815 - RNA, 19 nt, Artificial Sequence
  Description of Artificial Sequence: Synthetic oligonucleotide
  Antisense strand to SEQ ID NO: 1331814
ugggucaaacguuuccuuu

SEQ ID NO: 1331816 - RNA, 19 nt, Artificial Sequence
  Description of Artificial Sequence: Synthetic oligonucleotide
  Sense strand starting at position 333 of SEQ ID NO: 1242226
uuuguauacuagucacauu

SEQ ID NO: 1331817 - RNA, 19 nt, Artificial Sequence
  Description of Artificial Sequence: Synthetic oligonucleotide
  Antisense strand to SEQ ID NO: 1331816
aaugugacuaguauacaaa

SEQ ID NO: 1331818 - RNA, 19 nt, Artificial Sequence
  Description of Artificial Sequence: Synthetic oligonucleotide
  Sense strand starting at position 336 of SEQ ID NO: 1242226
guauacuagucacauuugu

SEQ ID NO: 1331819 - RNA, 19 nt, Artificial Sequence
  Description of Artificial Sequence: Synthetic oligonucleotide
  Antisense strand to SEQ ID NO: 1331818
acaaaugugacuaguauac

SEQ ID NO: 1331820 - RNA, 19 nt, Artificial Sequence
  Description of Artificial Sequence: Synthetic oligonucleotide
  Sense strand starting at position 353 of SEQ ID NO: 1242226
guaucaacccaccguauua

SEQ ID NO: 1331821 - RNA, 19 nt, Artificial Sequence
  Description of Artificial Sequence: Synthetic oligonucleotide
  Antisense strand to SEQ ID NO: 1331820
uaauacgguggguugauac

SEQ ID NO: 1331822 - RNA, 19 nt, Artificial Sequence
  Description of Artificial Sequence: Synthetic oligonucleotide
  Sense strand starting at position 434 of SEQ ID NO: 1242226
caugcagucuggucacaca

SEQ ID NO: 1331823 - RNA, 19 nt, Artificial Sequence
  Description of Artificial Sequence: Synthetic oligonucleotide
  Antisense strand to SEQ ID NO: 1331822
ugugugaccagacugcaug

SEQ ID NO: 1331824 - RNA, 19 nt, Artificial Sequence
  Description of Artificial Sequence: Synthetic oligonucleotide
  Sense strand starting at position 573 of SEQ ID NO: 1242226
ccaggacugugguuggaaa

SEQ ID NO: 1331825 - RNA, 19 nt, Artificial Sequence
  Description of Artificial Sequence: Synthetic oligonucleotide
  Antisense strand to SEQ ID NO: 1331824
uuuccaaccacaguccugg

SEQ ID NO: 1331826 - RNA, 19 nt, Artificial Sequence
  Description of Artificial Sequence: Synthetic oligonucleotide
  Sense strand starting at position 607 of SEQ ID NO: 1242226
uguagaucuuacucuauga

SEQ ID NO: 1331827 - RNA, 19 nt, Artificial Sequence
  Description of Artificial Sequence: Synthetic oligonucleotide
  Antisense strand to SEQ ID NO: 1331826
ucauagaguaagaucuaca

SEQ ID NO: 1331828 - RNA, 19 nt, Artificial Sequence
  Description of Artificial Sequence: Synthetic oligonucleotide
  Sense strand starting at position 623 of SEQ ID NO: 1242226
ugaugcuaaugauuggaca

SEQ ID NO: 1331829 - RNA, 19 nt, Artificial Sequence
  Description of Artificial Sequence: Synthetic oligonucleotide
  Antisense strand to SEQ ID NO: 1331828
uguccaaucauuagcauca

SEQ ID NO: 1331830 - RNA, 19 nt, Artificial Sequence
  Description of Artificial Sequence: Synthetic oligonucleotide
  Sense strand starting at position 624 of SEQ ID NO: 1242226
gaugcuaaugauuggacaa

SEQ ID NO: 1331831 - RNA, 19 nt, Artificial Sequence
  Description of Artificial Sequence: Synthetic oligonucleotide
  Antisense strand to SEQ ID NO: 1331830
uuguccaaucauuagcauc

SEQ ID NO: 1331832 - RNA, 19 nt, Artificial Sequence
  Description of Artificial Sequence: Synthetic oligonucleotide
  Sense strand starting at position 1253 of SEQ ID NO: 1242226
agaagaaagugguuuacau

SEQ ID NO: 1331833 - RNA, 19 nt, Artificial Sequence
  Description of Artificial Sequence: Synthetic oligonucleotide
  Antisense strand to SEQ ID NO: 1331832
auguaaaccacuuucuucu

SEQ ID NO: 1331834 - RNA, 19 nt, Artificial Sequence
  Description of Artificial Sequence: Synthetic oligonucleotide
  Sense strand starting at position 1520 of SEQ ID NO: 1242226
gccaauaaacucggcuuga

SEQ ID NO: 1331835 - RNA, 19 nt, Artificial Sequence
  Description of Artificial Sequence: Synthetic oligonucleotide
  Antisense strand to SEQ ID NO: 1331834
ucaagccgaguuuauuggc

SEQ ID NO: 1331836 - RNA, 19 nt, Artificial Sequence
  Description of Artificial Sequence: Synthetic oligonucleotide
  Sense strand starting at position 1524 of SEQ ID NO: 1242226
auaaacucggcuugacaga

SEQ ID NO: 1331837 - RNA, 19 nt, Artificial Sequence
  Description of Artificial Sequence: Synthetic oligonucleotide
  Antisense strand to SEQ ID NO: 1331836
ucugucaagccgaguuuau

SEQ ID NO: 1331838 - RNA, 19 nt, Artificial Sequence
  Description of Artificial Sequence: Synthetic oligonucleotide
  Sense strand starting at position 2493 of SEQ ID NO: 1242226
ggugaugacuaagcuaaga

SEQ ID NO: 1331839 - RNA, 19 nt, Artificial Sequence
  Description of Artificial Sequence: Synthetic oligonucleotide
  Antisense strand to SEQ ID NO: 1331838
ucuuagcuuagucaucacc

SEQ ID NO: 1331840 - RNA, 19 nt, Artificial Sequence
  Description of Artificial Sequence: Synthetic oligonucleotide
  Sense strand starting at position 2513 of SEQ ID NO: 1242226
cugaaaugcaaguaggagu

SEQ ID NO: 1331841 - RNA, 19 nt, Artificial Sequence
  Description of Artificial Sequence: Synthetic oligonucleotide
  Antisense strand to SEQ ID NO: 1331840
acuccuacuugcauuucag

SEQ ID NO: 1331842 - RNA, 19 nt, Artificial Sequence
  Description of Artificial Sequence: Synthetic oligonucleotide
  Sense strand starting at position 2632 of SEQ ID NO: 1242226
gagucacuguuguuaccuu

SEQ ID NO: 1331843 - RNA, 19 nt, Artificial Sequence
  Description of Artificial Sequence: Synthetic oligonucleotide
  Antisense strand to SEQ ID NO: 1331842
aagguaacaacagugacuc

SEQ ID NO: 1331844 - RNA, 19 nt, Artificial Sequence
  Description of Artificial Sequence: Synthetic oligonucleotide
  Sense strand starting at position 2675 of SEQ ID NO: 1242226
cgcugacucaccuagggau

SEQ ID NO: 1331845 - RNA, 19 nt, Artificial Sequence
  Description of Artificial Sequence: Synthetic oligonucleotide
  Antisense strand to SEQ ID NO: 1331844
aucccuaggugagucagcg

SEQ ID NO: 1331846 - RNA, 19 nt, Artificial Sequence
  Description of Artificial Sequence: Synthetic oligonucleotide
  Sense strand starting at position 2682 of SEQ ID NO: 1242226
ucaccuagggauugagcaa

SEQ ID NO: 1331847 - RNA, 19 nt, Artificial Sequence
  Description of Artificial Sequence: Synthetic oligonucleotide
  Antisense strand to SEQ ID NO: 1331846
uugcucaaucccuagguga

SEQ ID NO: 1331848 - RNA, 19 nt, Artificial Sequence
  Description of Artificial Sequence: Synthetic oligonucleotide
  Sense strand starting at position 2808 of SEQ ID NO: 1242226
gagggagucccaggucaaa

SEQ ID NO: 1331849 - RNA, 19 nt, Artificial Sequence
  Description of Artificial Sequence: Synthetic oligonucleotide
  Antisense strand to SEQ ID NO: 1331848
uuugaccugggacucccuc

SEQ ID NO: 1331850 - RNA, 19 nt, Artificial Sequence
  Description of Artificial Sequence: Synthetic oligonucleotide
  Sense strand starting at position 2952 of SEQ ID NO: 1242226
ugaggaaccugugugcuua

SEQ ID NO: 1331851 - RNA, 19 nt, Artificial Sequence
  Description of Artificial Sequence: Synthetic oligonucleotide
  Antisense strand to SEQ ID NO: 1331850
uaagcacacagguuccuca

SEQ ID NO: 1331852 - RNA, 19 nt, Artificial Sequence
  Description of Artificial Sequence: Synthetic oligonucleotide
  Sense strand starting at position 2960 of SEQ ID NO: 1242226
cugugugcuuagcuggaaa

SEQ ID NO: 1331853 - RNA, 19 nt, Artificial Sequence
  Description of Artificial Sequence: Synthetic oligonucleotide
  Antisense strand to SEQ ID NO: 1331852
uuuccagcuaagcacacag

SEQ ID NO: 1331854 - RNA, 19 nt, Artificial Sequence
  Description of Artificial Sequence: Synthetic oligonucleotide
  Sense strand starting at position 2982 of SEQ ID NO: 1242226
ggccuuuaucuugaggaca

SEQ ID NO: 1331855 - RNA, 19 nt, Artificial Sequence
  Description of Artificial Sequence: Synthetic oligonucleotide
  Antisense strand to SEQ ID NO: 1331854
uguccucaagauaaaggcc

SEQ ID NO: 1331856 - RNA, 19 nt, Artificial Sequence
  Description of Artificial Sequence: Synthetic oligonucleotide
  Sense strand starting at position 3098 of SEQ ID NO: 1242226
acgcaugcucaggaacuua

SEQ ID NO: 1331857 - RNA, 19 nt, Artificial Sequence
  Description of Artificial Sequence: Synthetic oligonucleotide
  Antisense strand to SEQ ID NO: 1331856
uaaguuccugagcaugcgu

SEQ ID NO: 1331858 - RNA, 19 nt, Artificial Sequence
  Description of Artificial Sequence: Synthetic oligonucleotide
  Sense strand starting at position 3127 of SEQ ID NO: 1242226
gggacccugucuucuguua

SEQ ID NO: 1331859 - RNA, 19 nt, Artificial Sequence
  Description of Artificial Sequence: Synthetic oligonucleotide
  Antisense strand to SEQ ID NO: 1331858
uaacagaagacaggguccc

SEQ ID NO: 1331860 - RNA, 19 nt, Artificial Sequence
  Description of Artificial Sequence: Synthetic oligonucleotide
  Sense strand starting at position 3140 of SEQ ID NO: 1242226
cuguuagaguuaucuaugu

SEQ ID NO: 1331861 - RNA, 19 nt, Artificial Sequence
  Description of Artificial Sequence: Synthetic oligonucleotide
  Antisense strand to SEQ ID NO: 1331860
acauagauaacucuaacag

SEQ ID NO: 1331862 - RNA, 19 nt, Artificial Sequence
  Description of Artificial Sequence: Synthetic oligonucleotide
  Sense strand starting at position 3142 of SEQ ID NO: 1242226
guuagaguuaucuaugugu

SEQ ID NO: 1331863 - RNA, 19 nt, Artificial Sequence
  Description of Artificial Sequence: Synthetic oligonucleotide
  Antisense strand to SEQ ID NO: 1331862
acacauagauaacucuaac

SEQ ID NO: 1331864 - RNA, 19 nt, Artificial Sequence
  Description of Artificial Sequence: Synthetic oligonucleotide
  Sense strand starting at position 3144 of SEQ ID NO: 1242226
uagaguuaucuaugugugu

SEQ ID NO: 1331865 - RNA, 19 nt, Artificial Sequence
  Description of Artificial Sequence: Synthetic oligonucleotide
  Antisense strand to SEQ ID NO: 1331864
acacacauagauaacucua

SEQ ID NO: 1331866 - RNA, 19 nt, Artificial Sequence
  Description of Artificial Sequence: Synthetic oligonucleotide
  Sense strand starting at position 3323 of SEQ ID NO: 1242226
gguguauacaagugacuuu

SEQ ID NO: 1331867 - RNA, 19 nt, Artificial Sequence
  Description of Artificial Sequence: Synthetic oligonucleotide
  Antisense strand to SEQ ID NO: 1331866
aaagucacuuguauacacc

SEQ ID NO: 1331868 - RNA, 19 nt, Artificial Sequence
  Description of Artificial Sequence: Synthetic oligonucleotide
  Sense strand starting at position 3330 of SEQ ID NO: 1242226
acaagugacuuucccaaag

SEQ ID NO: 1331869 - RNA, 19 nt, Artificial Sequence
  Description of Artificial Sequence: Synthetic oligonucleotide
  Antisense strand to SEQ ID NO: 1331868
cuuugggaaagucacuugu

SEQ ID NO: 1331870 - RNA, 19 nt, Artificial Sequence
  Description of Artificial Sequence: Synthetic oligonucleotide
  Sense strand starting at position 3506 of SEQ ID NO: 1242226
cagagacauuagguuaauu

SEQ ID NO: 1331871 - RNA, 19 nt, Artificial Sequence
  Description of Artificial Sequence: Synthetic oligonucleotide
  Antisense strand to SEQ ID NO: 1331870
aauuaaccuaaugucucug

SEQ ID NO: 1331872 - RNA, 19 nt, Artificial Sequence
  Description of Artificial Sequence: Synthetic oligonucleotide
  Sense strand starting at position 3514 of SEQ ID NO: 1242226
uuagguuaauuggugaaca

SEQ ID NO: 1331873 - RNA, 19 nt, Artificial Sequence
  Description of Artificial Sequence: Synthetic oligonucleotide
  Antisense strand to SEQ ID NO: 1331872
uguucaccaauuaaccuaa

SEQ ID NO: 1331874 - RNA, 19 nt, Artificial Sequence
  Description of Artificial Sequence: Synthetic oligonucleotide
  Sense strand starting at position 3548 of SEQ ID NO: 1242226
cuagucuucuaacccaagu

SEQ ID NO: 1331875 - RNA, 19 nt, Artificial Sequence
  Description of Artificial Sequence: Synthetic oligonucleotide
  Antisense strand to SEQ ID NO: 1331874
acuuggguuagaagacuag

SEQ ID NO: 1331876 - RNA, 19 nt, Artificial Sequence
  Description of Artificial Sequence: Synthetic oligonucleotide
  Sense strand starting at position 3784 of SEQ ID NO: 1242226
gcuggaucuuguuuacauc

SEQ ID NO: 1331877 - RNA, 19 nt, Artificial Sequence
  Description of Artificial Sequence: Synthetic oligonucleotide
  Antisense strand to SEQ ID NO: 1331876
gauguaaacaagauccagc

SEQ ID NO: 1331878 - RNA, 19 nt, Artificial Sequence
  Description of Artificial Sequence: Synthetic oligonucleotide
  Sense strand starting at position 3815 of SEQ ID NO: 1242226
auaucuagagcagguaauu

SEQ ID NO: 1331879 - RNA, 19 nt, Artificial Sequence
  Description of Artificial Sequence: Synthetic oligonucleotide
  Antisense strand to SEQ ID NO: 1331878
aauuaccugcucuagauau

SEQ ID NO: 1331880 - RNA, 19 nt, Artificial Sequence
  Description of Artificial Sequence: Synthetic oligonucleotide
  Sense strand starting at position 3826 of SEQ ID NO: 1242226
agguaauugacguguggua

SEQ ID NO: 1331881 - RNA, 19 nt, Artificial Sequence
  Description of Artificial Sequence: Synthetic oligonucleotide
  Antisense strand to SEQ ID NO: 1331880
uaccacacgucaauuaccu

SEQ ID NO: 1331882 - RNA, 19 nt, Artificial Sequence
  Description of Artificial Sequence: Synthetic oligonucleotide
  Sense strand starting at position 3835 of SEQ ID NO: 1242226
acgugugguagugcaagua

SEQ ID NO: 1331883 - RNA, 19 nt, Artificial Sequence
  Description of Artificial Sequence: Synthetic oligonucleotide
  Antisense strand to SEQ ID NO: 1331882
uacuugcacuaccacacgu

SEQ ID NO: 1331884 - RNA, 19 nt, Artificial Sequence
  Description of Artificial Sequence: Synthetic oligonucleotide
  Sense strand starting at position 3869 of SEQ ID NO: 1242226
aagaaauguuauuacagag

SEQ ID NO: 1331885 - RNA, 19 nt, Artificial Sequence
  Description of Artificial Sequence: Synthetic oligonucleotide
  Antisense strand to SEQ ID NO: 1331884
cucuguaauaacauuucuu

SEQ ID NO: 1331886 - RNA, 19 nt, Artificial Sequence
  Description of Artificial Sequence: Synthetic oligonucleotide
  Sense strand starting at position 3898 of SEQ ID NO: 1242226
acucacucauggucaugaa

SEQ ID NO: 1331887 - RNA, 19 nt, Artificial Sequence
  Description of Artificial Sequence: Synthetic oligonucleotide
  Antisense strand to SEQ ID NO: 1331886
uucaugaccaugagugagu

SEQ ID NO: 1331888 - RNA, 19 nt, Artificial Sequence
  Description of Artificial Sequence: Synthetic oligonucleotide
  Sense strand starting at position 230 of SEQ ID NO: 1242227
ucacaaauuuaggaguaau

SEQ ID NO: 1331889 - RNA, 19 nt, Artificial Sequence
  Description of Artificial Sequence: Synthetic oligonucleotide
  Antisense strand to SEQ ID NO: 1331888
auuacuccuaaauuuguga

SEQ ID NO: 1331890 - RNA, 19 nt, Artificial Sequence
  Description of Artificial Sequence: Synthetic oligonucleotide
  Sense strand starting at position 242 of SEQ ID NO: 1242227
gaguaaucaugaguagcga

SEQ ID NO: 1331891 - RNA, 19 nt, Artificial Sequence
  Description of Artificial Sequence: Synthetic oligonucleotide
  Antisense strand to SEQ ID NO: 1331890
ucgcuacucaugauuacuc

SEQ ID NO: 1331892 - RNA, 19 nt, Artificial Sequence
  Description of Artificial Sequence: Synthetic oligonucleotide
  Sense strand starting at position 243 of SEQ ID NO: 1242227
aguaaucaugaguagcgau

SEQ ID NO: 1331893 - RNA, 19 nt, Artificial Sequence
  Description of Artificial Sequence: Synthetic oligonucleotide
  Antisense strand to SEQ ID NO: 1331892
aucgcuacucaugauuacu

SEQ ID NO: 1331894 - RNA, 19 nt, Artificial Sequence
  Description of Artificial Sequence: Synthetic oligonucleotide
  Sense strand starting at position 486 of SEQ ID NO: 1242227
aaauuaguguacuccacga

SEQ ID NO: 1331895 - RNA, 19 nt, Artificial Sequence
  Description of Artificial Sequence: Synthetic oligonucleotide
  Antisense strand to SEQ ID NO: 1331894
ucguggaguacacuaauuu

SEQ ID NO: 1331896 - RNA, 19 nt, Artificial Sequence
  Description of Artificial Sequence: Synthetic oligonucleotide
  Sense strand starting at position 530 of SEQ ID NO: 1242227
caugaagggccuugacuuu

SEQ ID NO: 1331897 - RNA, 19 nt, Artificial Sequence
  Description of Artificial Sequence: Synthetic oligonucleotide
  Antisense strand to SEQ ID NO: 1331896
aaagucaaggcccuucaug

SEQ ID NO: 1331898 - RNA, 19 nt, Artificial Sequence
  Description of Artificial Sequence: Synthetic oligonucleotide
  Sense strand starting at position 643 of SEQ ID NO: 1242227
auggaaacuuucucaaugu

SEQ ID NO: 1331899 - RNA, 19 nt, Artificial Sequence
  Description of Artificial Sequence: Synthetic oligonucleotide
  Antisense strand to SEQ ID NO: 1331898
acauugagaaaguuuccau

SEQ ID NO: 1331900 - RNA, 19 nt, Artificial Sequence
  Description of Artificial Sequence: Synthetic oligonucleotide
  Sense strand starting at position 794 of SEQ ID NO: 1242227
acaacauugcauuaaaggu

SEQ ID NO: 1331901 - RNA, 19 nt, Artificial Sequence
  Description of Artificial Sequence: Synthetic oligonucleotide
  Antisense strand to SEQ ID NO: 1331900
accuuuaaugcaauguugu

SEQ ID NO: 1331902 - RNA, 19 nt, Artificial Sequence
  Description of Artificial Sequence: Synthetic oligonucleotide
  Sense strand starting at position 846 of SEQ ID NO: 1242227
acgugaauacugcacugua

SEQ ID NO: 1331903 - RNA, 19 nt, Artificial Sequence
  Description of Artificial Sequence: Synthetic oligonucleotide
  Antisense strand to SEQ ID NO: 1331902
uacagugcaguauucacgu

SEQ ID NO: 1331904 - RNA, 19 nt, Artificial Sequence
  Description of Artificial Sequence: Synthetic oligonucleotide
  Sense strand starting at position 849 of SEQ ID NO: 1242227
ugaauacugcacuguaaau

SEQ ID NO: 1331905 - RNA, 19 nt, Artificial Sequence
  Description of Artificial Sequence: Synthetic oligonucleotide
  Antisense strand to SEQ ID NO: 1331904
auuuacagugcaguauuca

SEQ ID NO: 1331906 - RNA, 19 nt, Artificial Sequence
  Description of Artificial Sequence: Synthetic oligonucleotide
  Sense strand starting at position 1194 of SEQ ID NO: 1242227
ggacgaacuccucagugau

SEQ ID NO: 1331907 - RNA, 19 nt, Artificial Sequence
  Description of Artificial Sequence: Synthetic oligonucleotide
  Antisense strand to SEQ ID NO: 1331906
aucacugaggaguucgucc

SEQ ID NO: 1331908 - RNA, 19 nt, Artificial Sequence
  Description of Artificial Sequence: Synthetic oligonucleotide
  Sense strand starting at position 1196 of SEQ ID NO: 1242227
acgaacuccucagugauga

SEQ ID NO: 1331909 - RNA, 19 nt, Artificial Sequence
  Description of Artificial Sequence: Synthetic oligonucleotide
  Antisense strand to SEQ ID NO: 1331908
ucaucacugaggaguucgu

SEQ ID NO: 1331910 - RNA, 19 nt, Artificial Sequence
  Description of Artificial Sequence: Synthetic oligonucleotide
  Sense strand starting at position 1197 of SEQ ID NO: 1242227
cgaacuccucagugaugag

SEQ ID NO: 1331911 - RNA, 19 nt, Artificial Sequence
  Description of Artificial Sequence: Synthetic oligonucleotide
  Antisense strand to SEQ ID NO: 1331910
cucaucacugaggaguucg

SEQ ID NO: 1331912 - RNA, 19 nt, Artificial Sequence
  Description of Artificial Sequence: Synthetic oligonucleotide
  Sense strand starting at position 1404 of SEQ ID NO: 1242227
gcgcuuugaccagcgcaaa

SEQ ID NO: 1331913 - RNA, 19 nt, Artificial Sequence
  Description of Artificial Sequence: Synthetic oligonucleotide
  Antisense strand to SEQ ID NO: 1331912
uuugcgcuggucaaagcgc

SEQ ID NO: 1331914 - RNA, 19 nt, Artificial Sequence
  Description of Artificial Sequence: Synthetic oligonucleotide
  Sense strand starting at position 1979 of SEQ ID NO: 1242227
cgcggauuccuggagagga

SEQ ID NO: 1331915 - RNA, 19 nt, Artificial Sequence
  Description of Artificial Sequence: Synthetic oligonucleotide
  Antisense strand to SEQ ID NO: 1331914
uccucuccaggaauccgcg

SEQ ID NO: 1331916 - RNA, 19 nt, Artificial Sequence
  Description of Artificial Sequence: Synthetic oligonucleotide
  Sense strand starting at position 2183 of SEQ ID NO: 1242227
uccuguuugggcugagaag

SEQ ID NO: 1331917 - RNA, 19 nt, Artificial Sequence
  Description of Artificial Sequence: Synthetic oligonucleotide
  Antisense strand to SEQ ID NO: 1331916
cuucucagcccaaacagga

SEQ ID NO: 1331918 - RNA, 19 nt, Artificial Sequence
  Description of Artificial Sequence: Synthetic oligonucleotide
  Sense strand starting at position 2184 of SEQ ID NO: 1242227
ccuguuugggcugagaaga

SEQ ID NO: 1331919 - RNA, 19 nt, Artificial Sequence
  Description of Artificial Sequence: Synthetic oligonucleotide
  Antisense strand to SEQ ID NO: 1331918
ucuucucagcccaaacagg

SEQ ID NO: 1331920 - RNA, 19 nt, Artificial Sequence
  Description of Artificial Sequence: Synthetic oligonucleotide
  Sense strand starting at position 2288 of SEQ ID NO: 1242227
gggucaaguuucuugggaa

SEQ ID NO: 1331921 - RNA, 19 nt, Artificial Sequence
  Description of Artificial Sequence: Synthetic oligonucleotide
  Antisense strand to SEQ ID NO: 1331920
uucccaagaaacuugaccc

SEQ ID NO: 1331922 - RNA, 19 nt, Artificial Sequence
  Description of Artificial Sequence: Synthetic oligonucleotide
  Sense strand starting at position 2371 of SEQ ID NO: 1242227
cuuuguaaacaugagcuuu

SEQ ID NO: 1331923 - RNA, 19 nt, Artificial Sequence
  Description of Artificial Sequence: Synthetic oligonucleotide
  Antisense strand to SEQ ID NO: 1331922
aaagcucauguuuacaaag

SEQ ID NO: 1331924 - RNA, 19 nt, Artificial Sequence
  Description of Artificial Sequence: Synthetic oligonucleotide
  Sense strand starting at position 2373 of SEQ ID NO: 1242227
uuguaaacaugagcuuuau

SEQ ID NO: 1331925 - RNA, 19 nt, Artificial Sequence
  Description of Artificial Sequence: Synthetic oligonucleotide
  Antisense strand to SEQ ID NO: 1331924
auaaagcucauguuuacaa

SEQ ID NO: 1331926 - RNA, 19 nt, Artificial Sequence
  Description of Artificial Sequence: Synthetic oligonucleotide
  Sense strand starting at position 2377 of SEQ ID NO: 1242227
aaacaugagcuuuaugcga

SEQ ID NO: 1331927 - RNA, 19 nt, Artificial Sequence
  Description of Artificial Sequence: Synthetic oligonucleotide
  Antisense strand to SEQ ID NO: 1331926
ucgcauaaagcucauguuu

SEQ ID NO: 1331928 - RNA, 19 nt, Artificial Sequence
  Description of Artificial Sequence: Synthetic oligonucleotide
  Sense strand starting at position 2440 of SEQ ID NO: 1242227
cuguaaaguggaugucuga

SEQ ID NO: 1331929 - RNA, 19 nt, Artificial Sequence
  Description of Artificial Sequence: Synthetic oligonucleotide
  Antisense strand to SEQ ID NO: 1331928
ucagacauccacuuuacag

SEQ ID NO: 1331930 - RNA, 19 nt, Artificial Sequence
  Description of Artificial Sequence: Synthetic oligonucleotide
  Sense strand starting at position 2545 of SEQ ID NO: 1242227
ucguuaacguaauuuccua

SEQ ID NO: 1331931 - RNA, 19 nt, Artificial Sequence
  Description of Artificial Sequence: Synthetic oligonucleotide
  Antisense strand to SEQ ID NO: 1331930
uaggaaauuacguuaacga

SEQ ID NO: 1331932 - RNA, 19 nt, Artificial Sequence
  Description of Artificial Sequence: Synthetic oligonucleotide
  Sense strand starting at position 2569 of SEQ ID NO: 1242227
ccaugugaacuaugaacuu

SEQ ID NO: 1331933 - RNA, 19 nt, Artificial Sequence
  Description of Artificial Sequence: Synthetic oligonucleotide
  Antisense strand to SEQ ID NO: 1331932
aaguucauaguucacaugg

SEQ ID NO: 1331934 - RNA, 19 nt, Artificial Sequence
  Description of Artificial Sequence: Synthetic oligonucleotide
  Sense strand starting at position 2600 of SEQ ID NO: 1242227
guggacuuagagcaucauu

SEQ ID NO: 1331935 - RNA, 19 nt, Artificial Sequence
  Description of Artificial Sequence: Synthetic oligonucleotide
  Antisense strand to SEQ ID NO: 1331934
aaugaugcucuaaguccac

SEQ ID NO: 1331936 - RNA, 19 nt, Artificial Sequence
  Description of Artificial Sequence: Synthetic oligonucleotide
  Sense strand starting at position 2621 of SEQ ID NO: 1242227
ugcuuuaacgggcauaaau

SEQ ID NO: 1331937 - RNA, 19 nt, Artificial Sequence
  Description of Artificial Sequence: Synthetic oligonucleotide
  Antisense strand to SEQ ID NO: 1331936
auuuaugcccguuaaagca

SEQ ID NO: 1331938 - RNA, 19 nt, Artificial Sequence
  Description of Artificial Sequence: Synthetic oligonucleotide
  Sense strand starting at position 2647 of SEQ ID NO: 1242227
uuacacuuccuuuggguaa

SEQ ID NO: 1331939 - RNA, 19 nt, Artificial Sequence
  Description of Artificial Sequence: Synthetic oligonucleotide
  Antisense strand to SEQ ID NO: 1331938
uuacccaaaggaaguguaa

SEQ ID NO: 1331940 - RNA, 19 nt, Artificial Sequence
  Description of Artificial Sequence: Synthetic oligonucleotide
  Sense strand starting at position 2660 of SEQ ID NO: 1242227
ggguaacuuugauuccauu

SEQ ID NO: 1331941 - RNA, 19 nt, Artificial Sequence
  Description of Artificial Sequence: Synthetic oligonucleotide
  Antisense strand to SEQ ID NO: 1331940
aauggaaucaaaguuaccc

SEQ ID NO: 1331942 - RNA, 19 nt, Artificial Sequence
  Description of Artificial Sequence: Synthetic oligonucleotide
  Sense strand starting at position 2691 of SEQ ID NO: 1242227
auacuuaguccauagcaga

SEQ ID NO: 1331943 - RNA, 19 nt, Artificial Sequence
  Description of Artificial Sequence: Synthetic oligonucleotide
  Antisense strand to SEQ ID NO: 1331942
ucugcuauggacuaaguau

SEQ ID NO: 1331944 - RNA, 19 nt, Artificial Sequence
  Description of Artificial Sequence: Synthetic oligonucleotide
  Sense strand starting at position 2705 of SEQ ID NO: 1242227
gcagaaggauugcuauauc

SEQ ID NO: 1331945 - RNA, 19 nt, Artificial Sequence
  Description of Artificial Sequence: Synthetic oligonucleotide
  Antisense strand to SEQ ID NO: 1331944
gauauagcaauccuucugc

SEQ ID NO: 1331946 - RNA, 19 nt, Artificial Sequence
  Description of Artificial Sequence: Synthetic oligonucleotide
  Sense strand starting at position 2841 of SEQ ID NO: 1242227
acccaagucuuuccugaga

SEQ ID NO: 1331947 - RNA, 19 nt, Artificial Sequence
  Description of Artificial Sequence: Synthetic oligonucleotide
  Antisense strand to SEQ ID NO: 1331946
ucucaggaaagacuugggu

SEQ ID NO: 1331948 - RNA, 19 nt, Artificial Sequence
  Description of Artificial Sequence: Synthetic oligonucleotide
  Sense strand starting at position 2872 of SEQ ID NO: 1242227
auaggucccauggguaaua

SEQ ID NO: 1331949 - RNA, 19 nt, Artificial Sequence
  Description of Artificial Sequence: Synthetic oligonucleotide
  Antisense strand to SEQ ID NO: 1331948
uauuacccaugggaccuau

SEQ ID NO: 1331950 - RNA, 19 nt, Artificial Sequence
  Description of Artificial Sequence: Synthetic oligonucleotide
  Sense strand starting at position 2881 of SEQ ID NO: 1242227
auggguaauaucugguagu

SEQ ID NO: 1331951 - RNA, 19 nt, Artificial Sequence
  Description of Artificial Sequence: Synthetic oligonucleotide
  Antisense strand to SEQ ID NO: 1331950
acuaccagauauuacccau

SEQ ID NO: 1331952 - RNA, 19 nt, Artificial Sequence
  Description of Artificial Sequence: Synthetic oligonucleotide
  Sense strand starting at position 2898 of SEQ ID NO: 1242227
gugucucugagaugaccaa

SEQ ID NO: 1331953 - RNA, 19 nt, Artificial Sequence
  Description of Artificial Sequence: Synthetic oligonucleotide
  Antisense strand to SEQ ID NO: 1331952
uuggucaucucagagacac

SEQ ID NO: 1331954 - RNA, 19 nt, Artificial Sequence
  Description of Artificial Sequence: Synthetic oligonucleotide
  Sense strand starting at position 2964 of SEQ ID NO: 1242227
acagauucccagugggcaa

SEQ ID NO: 1331955 - RNA, 19 nt, Artificial Sequence
  Description of Artificial Sequence: Synthetic oligonucleotide
  Antisense strand to SEQ ID NO: 1331954
uugcccacugggaaucugu

SEQ ID NO: 1331956 - RNA, 19 nt, Artificial Sequence
  Description of Artificial Sequence: Synthetic oligonucleotide
  Sense strand starting at position 3139 of SEQ ID NO: 1242227
auaugcugucuugaaucua

SEQ ID NO: 1331957 - RNA, 19 nt, Artificial Sequence
  Description of Artificial Sequence: Synthetic oligonucleotide
  Antisense strand to SEQ ID NO: 1331956
uagauucaagacagcauau

SEQ ID NO: 1331958 - RNA, 19 nt, Artificial Sequence
  Description of Artificial Sequence: Synthetic oligonucleotide
  Sense strand starting at position 3215 of SEQ ID NO: 1242227
ccucacugugaguauguau

SEQ ID NO: 1331959 - RNA, 19 nt, Artificial Sequence
  Description of Artificial Sequence: Synthetic oligonucleotide
  Antisense strand to SEQ ID NO: 1331958
auacauacucacagugagg

SEQ ID NO: 1331960 - RNA, 19 nt, Artificial Sequence
  Description of Artificial Sequence: Synthetic oligonucleotide
  Sense strand starting at position 3396 of SEQ ID NO: 1242227
auaucagucuuaguuggaa

SEQ ID NO: 1331961 - RNA, 19 nt, Artificial Sequence
  Description of Artificial Sequence: Synthetic oligonucleotide
  Antisense strand to SEQ ID NO: 1331960
uuccaacuaagacugauau

SEQ ID NO: 1331962 - RNA, 19 nt, Artificial Sequence
  Description of Artificial Sequence: Synthetic oligonucleotide
  Sense strand starting at position 3399 of SEQ ID NO: 1242227
ucagucuuaguuggaauua

SEQ ID NO: 1331963 - RNA, 19 nt, Artificial Sequence
  Description of Artificial Sequence: Synthetic oligonucleotide
  Antisense strand to SEQ ID NO: 1331962
uaauuccaacuaagacuga

SEQ ID NO: 1331964 - RNA, 19 nt, Artificial Sequence
  Description of Artificial Sequence: Synthetic oligonucleotide
  Sense strand starting at position 3567 of SEQ ID NO: 1242227
uuaagaaugucucuugaac

SEQ ID NO: 1331965 - RNA, 19 nt, Artificial Sequence
  Description of Artificial Sequence: Synthetic oligonucleotide
  Antisense strand to SEQ ID NO: 1331964
guucaagagacauucuuaa

SEQ ID NO: 1331966 - RNA, 19 nt, Artificial Sequence
  Description of Artificial Sequence: Synthetic oligonucleotide
  Sense strand starting at position 3573 of SEQ ID NO: 1242227
augucucuugaacagacuu

SEQ ID NO: 1331967 - RNA, 19 nt, Artificial Sequence
  Description of Artificial Sequence: Synthetic oligonucleotide
  Antisense strand to SEQ ID NO: 1331966
aagucuguucaagagacau

SEQ ID NO: 1331968 - RNA, 19 nt, Artificial Sequence
  Description of Artificial Sequence: Synthetic oligonucleotide
  Sense strand starting at position 112 of SEQ ID NO: 1242228
cccaaacaggcaugguuaa

SEQ ID NO: 1331969 - RNA, 19 nt, Artificial Sequence
  Description of Artificial Sequence: Synthetic oligonucleotide
  Antisense strand to SEQ ID NO: 1331968
uuaaccaugccuguuuggg

SEQ ID NO: 1331970 - RNA, 19 nt, Artificial Sequence
  Description of Artificial Sequence: Synthetic oligonucleotide
  Sense strand starting at position 113 of SEQ ID NO: 1242228
ccaaacaggcaugguuaau

SEQ ID NO: 1331971 - RNA, 19 nt, Artificial Sequence
  Description of Artificial Sequence: Synthetic oligonucleotide
  Antisense strand to SEQ ID NO: 1331970
auuaaccaugccuguuugg

SEQ ID NO: 1331972 - RNA, 19 nt, Artificial Sequence
  Description of Artificial Sequence: Synthetic oligonucleotide
  Sense strand starting at position 245 of SEQ ID NO: 1242228
ugaccuuaauauguagcaa

SEQ ID NO: 1331973 - RNA, 19 nt, Artificial Sequence
  Description of Artificial Sequence: Synthetic oligonucleotide
  Antisense strand to SEQ ID NO: 1331972
uugcuacauauuaagguca

SEQ ID NO: 1331974 - RNA, 19 nt, Artificial Sequence
  Description of Artificial Sequence: Synthetic oligonucleotide
  Sense strand starting at position 415 of SEQ ID NO: 1242228
agcagagcugaauaauuau

SEQ ID NO: 1331975 - RNA, 19 nt, Artificial Sequence
  Description of Artificial Sequence: Synthetic oligonucleotide
  Antisense strand to SEQ ID NO: 1331974
auaauuauucagcucugcu

SEQ ID NO: 1331976 - RNA, 19 nt, Artificial Sequence
  Description of Artificial Sequence: Synthetic oligonucleotide
  Sense strand starting at position 772 of SEQ ID NO: 1242228
ugcuccuuuguuuauagau

SEQ ID NO: 1331977 - RNA, 19 nt, Artificial Sequence
  Description of Artificial Sequence: Synthetic oligonucleotide
  Antisense strand to SEQ ID NO: 1331976
aucuauaaacaaaggagca

SEQ ID NO: 1331978 - RNA, 19 nt, Artificial Sequence
  Description of Artificial Sequence: Synthetic oligonucleotide
  Sense strand starting at position 860 of SEQ ID NO: 1242228
cauugaagcguuuacagca

SEQ ID NO: 1331979 - RNA, 19 nt, Artificial Sequence
  Description of Artificial Sequence: Synthetic oligonucleotide
  Antisense strand to SEQ ID NO: 1331978
ugcuguaaacgcuucaaug

SEQ ID NO: 1331980 - RNA, 19 nt, Artificial Sequence
  Description of Artificial Sequence: Synthetic oligonucleotide
  Sense strand starting at position 865 of SEQ ID NO: 1242228
aagcguuuacagcaauaug

SEQ ID NO: 1331981 - RNA, 19 nt, Artificial Sequence
  Description of Artificial Sequence: Synthetic oligonucleotide
  Antisense strand to SEQ ID NO: 1331980
cauauugcuguaaacgcuu

SEQ ID NO: 1331982 - RNA, 19 nt, Artificial Sequence
  Description of Artificial Sequence: Synthetic oligonucleotide
  Sense strand starting at position 1079 of SEQ ID NO: 1242228
ggaccuuggccacaaacuu

SEQ ID NO: 1331983 - RNA, 19 nt, Artificial Sequence
  Description of Artificial Sequence: Synthetic oligonucleotide
  Antisense strand to SEQ ID NO: 1331982
aaguuuguggccaaggucc

SEQ ID NO: 1331984 - RNA, 19 nt, Artificial Sequence
  Description of Artificial Sequence: Synthetic oligonucleotide
  Sense strand starting at position 1218 of SEQ ID NO: 1242228
aguaaugaguuucuuugga

SEQ ID NO: 1331985 - RNA, 19 nt, Artificial Sequence
  Description of Artificial Sequence: Synthetic oligonucleotide
  Antisense strand to SEQ ID NO: 1331984
uccaaagaaacucauuacu

SEQ ID NO: 1331986 - RNA, 19 nt, Artificial Sequence
  Description of Artificial Sequence: Synthetic oligonucleotide
  Sense strand starting at position 1220 of SEQ ID NO: 1242228
uaaugaguuucuuuggauc

SEQ ID NO: 1331987 - RNA, 19 nt, Artificial Sequence
  Description of Artificial Sequence: Synthetic oligonucleotide
  Antisense strand to SEQ ID NO: 1331986
gauccaaagaaacucauua

SEQ ID NO: 1331988 - RNA, 19 nt, Artificial Sequence
  Description of Artificial Sequence: Synthetic oligonucleotide
  Sense strand starting at position 1419 of SEQ ID NO: 1242228
gguguugaugaggauguaa

SEQ ID NO: 1331989 - RNA, 19 nt, Artificial Sequence
  Description of Artificial Sequence: Synthetic oligonucleotide
  Antisense strand to SEQ ID NO: 1331988
uuacauccucaucaacacc

SEQ ID NO: 1331990 - RNA, 19 nt, Artificial Sequence
  Description of Artificial Sequence: Synthetic oligonucleotide
  Sense strand starting at position 1434 of SEQ ID NO: 1242228
guaaguguugcucuugggu

SEQ ID NO: 1331991 - RNA, 19 nt, Artificial Sequence
  Description of Artificial Sequence: Synthetic oligonucleotide
  Antisense strand to SEQ ID NO: 1331990
acccaagagcaacacuuac

SEQ ID NO: 1331992 - RNA, 19 nt, Artificial Sequence
  Description of Artificial Sequence: Synthetic oligonucleotide
  Sense strand starting at position 1520 of SEQ ID NO: 1242228
ggaagauguccuuguaguc

SEQ ID NO: 1331993 - RNA, 19 nt, Artificial Sequence
  Description of Artificial Sequence: Synthetic oligonucleotide
  Antisense strand to SEQ ID NO: 1331992
gacuacaaggacaucuucc

SEQ ID NO: 1331994 - RNA, 19 nt, Artificial Sequence
  Description of Artificial Sequence: Synthetic oligonucleotide
  Sense strand starting at position 1586 of SEQ ID NO: 1242228
ucuggucuuuaaucagcaa

SEQ ID NO: 1331995 - RNA, 19 nt, Artificial Sequence
  Description of Artificial Sequence: Synthetic oligonucleotide
  Antisense strand to SEQ ID NO: 1331994
uugcugauuaaagaccaga

SEQ ID NO: 1331996 - RNA, 19 nt, Artificial Sequence
  Description of Artificial Sequence: Synthetic oligonucleotide
  Sense strand starting at position 1589 of SEQ ID NO: 1242228
ggucuuuaaucagcaagaa

SEQ ID NO: 1331997 - RNA, 19 nt, Artificial Sequence
  Description of Artificial Sequence: Synthetic oligonucleotide
  Antisense strand to SEQ ID NO: 1331996
uucuugcugauuaaagacc

SEQ ID NO: 1331998 - RNA, 19 nt, Artificial Sequence
  Description of Artificial Sequence: Synthetic oligonucleotide
  Sense strand starting at position 1590 of SEQ ID NO: 1242228
gucuuuaaucagcaagaac

SEQ ID NO: 1331999 - RNA, 19 nt, Artificial Sequence
  Description of Artificial Sequence: Synthetic oligonucleotide
  Antisense strand to SEQ ID NO: 1331998
guucuugcugauuaaagac

SEQ ID NO: 1332000 - RNA, 19 nt, Artificial Sequence
  Description of Artificial Sequence: Synthetic oligonucleotide
  Sense strand starting at position 2005 of SEQ ID NO: 1242228
cugcgugcugcgucaugaa

SEQ ID NO: 1332001 - RNA, 19 nt, Artificial Sequence
  Description of Artificial Sequence: Synthetic oligonucleotide
  Antisense strand to SEQ ID NO: 1332000
uucaugacgcagcacgcag

SEQ ID NO: 1332002 - RNA, 19 nt, Artificial Sequence
  Description of Artificial Sequence: Synthetic oligonucleotide
  Sense strand starting at position 2243 of SEQ ID NO: 1242228
acaguauuaugaguuucua

SEQ ID NO: 1332003 - RNA, 19 nt, Artificial Sequence
  Description of Artificial Sequence: Synthetic oligonucleotide
  Antisense strand to SEQ ID NO: 1332002
uagaaacucauaauacugu

SEQ ID NO: 1332004 - RNA, 19 nt, Artificial Sequence
  Description of Artificial Sequence: Synthetic oligonucleotide
  Sense strand starting at position 2256 of SEQ ID NO: 1242228
uuucuaaaucgggagcauu

SEQ ID NO: 1332005 - RNA, 19 nt, Artificial Sequence
  Description of Artificial Sequence: Synthetic oligonucleotide
  Antisense strand to SEQ ID NO: 1332004
aaugcucccgauuuagaaa

SEQ ID NO: 1332006 - RNA, 19 nt, Artificial Sequence
  Description of Artificial Sequence: Synthetic oligonucleotide
  Sense strand starting at position 2293 of SEQ ID NO: 1242228
agaggaugaacgugugaga

SEQ ID NO: 1332007 - RNA, 19 nt, Artificial Sequence
  Description of Artificial Sequence: Synthetic oligonucleotide
  Antisense strand to SEQ ID NO: 1332006
ucucacacguucauccucu

SEQ ID NO: 1332008 - RNA, 19 nt, Artificial Sequence
  Description of Artificial Sequence: Synthetic oligonucleotide
  Sense strand starting at position 2552 of SEQ ID NO: 1242228
guauuuauauucucugcau

SEQ ID NO: 1332009 - RNA, 19 nt, Artificial Sequence
  Description of Artificial Sequence: Synthetic oligonucleotide
  Antisense strand to SEQ ID NO: 1332008
augcagagaauauaaauac

SEQ ID NO: 1332010 - RNA, 19 nt, Artificial Sequence
  Description of Artificial Sequence: Synthetic oligonucleotide
  Sense strand starting at position 2584 of SEQ ID NO: 1242228
cuagacaacuaugagaaga

SEQ ID NO: 1332011 - RNA, 19 nt, Artificial Sequence
  Description of Artificial Sequence: Synthetic oligonucleotide
  Antisense strand to SEQ ID NO: 1332010
ucuucucauaguugucuag

SEQ ID NO: 1332012 - RNA, 19 nt, Artificial Sequence
  Description of Artificial Sequence: Synthetic oligonucleotide
  Sense strand starting at position 2616 of SEQ ID NO: 1242228
gucaguauuagguaaaugu

SEQ ID NO: 1332013 - RNA, 19 nt, Artificial Sequence
  Description of Artificial Sequence: Synthetic oligonucleotide
  Antisense strand to SEQ ID NO: 1332012
acauuuaccuaauacugac

SEQ ID NO: 1332014 - RNA, 19 nt, Artificial Sequence
  Description of Artificial Sequence: Synthetic oligonucleotide
  Sense strand starting at position 2640 of SEQ ID NO: 1242228
cuuggucacauggguuuau

SEQ ID NO: 1332015 - RNA, 19 nt, Artificial Sequence
  Description of Artificial Sequence: Synthetic oligonucleotide
  Antisense strand to SEQ ID NO: 1332014
auaaacccaugugaccaag

SEQ ID NO: 1332016 - RNA, 19 nt, Artificial Sequence
  Description of Artificial Sequence: Synthetic oligonucleotide
  Sense strand starting at position 2644 of SEQ ID NO: 1242228
gucacauggguuuaucuuu

SEQ ID NO: 1332017 - RNA, 19 nt, Artificial Sequence
  Description of Artificial Sequence: Synthetic oligonucleotide
  Antisense strand to SEQ ID NO: 1332016
aaagauaaacccaugugac

SEQ ID NO: 1332018 - RNA, 19 nt, Artificial Sequence
  Description of Artificial Sequence: Synthetic oligonucleotide
  Sense strand starting at position 2701 of SEQ ID NO: 1242228
agaaauggguaagaggaau

SEQ ID NO: 1332019 - RNA, 19 nt, Artificial Sequence
  Description of Artificial Sequence: Synthetic oligonucleotide
  Antisense strand to SEQ ID NO: 1332018
auuccucuuacccauuucu

SEQ ID NO: 1332020 - RNA, 19 nt, Artificial Sequence
  Description of Artificial Sequence: Synthetic oligonucleotide
  Sense strand starting at position 2733 of SEQ ID NO: 1242228
gugcacucucaagagauua

SEQ ID NO: 1332021 - RNA, 19 nt, Artificial Sequence
  Description of Artificial Sequence: Synthetic oligonucleotide
  Antisense strand to SEQ ID NO: 1332020
uaaucucuugagagugcac

SEQ ID NO: 1332022 - RNA, 19 nt, Artificial Sequence
  Description of Artificial Sequence: Synthetic oligonucleotide
  Sense strand starting at position 2764 of SEQ ID NO: 1242228
gggcaucacugaucaagaa

SEQ ID NO: 1332023 - RNA, 19 nt, Artificial Sequence
  Description of Artificial Sequence: Synthetic oligonucleotide
  Antisense strand to SEQ ID NO: 1332022
uucuugaucagugaugccc

SEQ ID NO: 1332024 - RNA, 19 nt, Artificial Sequence
  Description of Artificial Sequence: Synthetic oligonucleotide
  Sense strand starting at position 2821 of SEQ ID NO: 1242228
auauauuagcuuugaggaa

SEQ ID NO: 1332025 - RNA, 19 nt, Artificial Sequence
  Description of Artificial Sequence: Synthetic oligonucleotide
  Antisense strand to SEQ ID NO: 1332024
uuccucaaagcuaauauau

SEQ ID NO: 1332026 - RNA, 19 nt, Artificial Sequence
  Description of Artificial Sequence: Synthetic oligonucleotide
  Sense strand starting at position 3031 of SEQ ID NO: 1242228
acugaauuucccugugucu

SEQ ID NO: 1332027 - RNA, 19 nt, Artificial Sequence
  Description of Artificial Sequence: Synthetic oligonucleotide
  Antisense strand to SEQ ID NO: 1332026
agacacagggaaauucagu

SEQ ID NO: 1332028 - RNA, 19 nt, Artificial Sequence
  Description of Artificial Sequence: Synthetic oligonucleotide
  Sense strand starting at position 3096 of SEQ ID NO: 1242228
ugaguuccucuuuaaugca

SEQ ID NO: 1332029 - RNA, 19 nt, Artificial Sequence
  Description of Artificial Sequence: Synthetic oligonucleotide
  Antisense strand to SEQ ID NO: 1332028
ugcauuaaagaggaacuca

SEQ ID NO: 1332030 - RNA, 19 nt, Artificial Sequence
  Description of Artificial Sequence: Synthetic oligonucleotide
  Sense strand starting at position 3144 of SEQ ID NO: 1242228
acauuaucugaguaauagc

SEQ ID NO: 1332031 - RNA, 19 nt, Artificial Sequence
  Description of Artificial Sequence: Synthetic oligonucleotide
  Antisense strand to SEQ ID NO: 1332030
gcuauuacucagauaaugu

SEQ ID NO: 1332032 - RNA, 19 nt, Artificial Sequence
  Description of Artificial Sequence: Synthetic oligonucleotide
  Sense strand starting at position 3194 of SEQ ID NO: 1242228
uuguuaguagcauaacacu

SEQ ID NO: 1332033 - RNA, 19 nt, Artificial Sequence
  Description of Artificial Sequence: Synthetic oligonucleotide
  Antisense strand to SEQ ID NO: 1332032
aguguuaugcuacuaacaa

SEQ ID NO: 1332034 - RNA, 19 nt, Artificial Sequence
  Description of Artificial Sequence: Synthetic oligonucleotide
  Sense strand starting at position 3244 of SEQ ID NO: 1242228
ugauaauggcacuggaacu

SEQ ID NO: 1332035 - RNA, 19 nt, Artificial Sequence
  Description of Artificial Sequence: Synthetic oligonucleotide
  Antisense strand to SEQ ID NO: 1332034
aguuccagugccauuauca

SEQ ID NO: 1332036 - RNA, 19 nt, Artificial Sequence
  Description of Artificial Sequence: Synthetic oligonucleotide
  Sense strand starting at position 3315 of SEQ ID NO: 1242228
ucugguaugcaaugaguaa

SEQ ID NO: 1332037 - RNA, 19 nt, Artificial Sequence
  Description of Artificial Sequence: Synthetic oligonucleotide
  Antisense strand to SEQ ID NO: 1332036
uuacucauugcauaccaga

SEQ ID NO: 1332038 - RNA, 19 nt, Artificial Sequence
  Description of Artificial Sequence: Synthetic oligonucleotide
  Sense strand starting at position 3316 of SEQ ID NO: 1242228
cugguaugcaaugaguaau

SEQ ID NO: 1332039 - RNA, 19 nt, Artificial Sequence
  Description of Artificial Sequence: Synthetic oligonucleotide
  Antisense strand to SEQ ID NO: 1332038
auuacucauugcauaccag

SEQ ID NO: 1332040 - RNA, 19 nt, Artificial Sequence
  Description of Artificial Sequence: Synthetic oligonucleotide
  Sense strand starting at position 3319 of SEQ ID NO: 1242228
guaugcaaugaguaauaac

SEQ ID NO: 1332041 - RNA, 19 nt, Artificial Sequence
  Description of Artificial Sequence: Synthetic oligonucleotide
  Antisense strand to SEQ ID NO: 1332040
guuauuacucauugcauac

SEQ ID NO: 1332042 - RNA, 19 nt, Artificial Sequence
  Description of Artificial Sequence: Synthetic oligonucleotide
  Sense strand starting at position 3357 of SEQ ID NO: 1242228
gcaacuauauccucaggca

SEQ ID NO: 1332043 - RNA, 19 nt, Artificial Sequence
  Description of Artificial Sequence: Synthetic oligonucleotide
  Antisense strand to SEQ ID NO: 1332042
ugccugaggauauaguugc

SEQ ID NO: 1332044 - RNA, 19 nt, Artificial Sequence
  Description of Artificial Sequence: Synthetic oligonucleotide
  Sense strand starting at position 3554 of SEQ ID NO: 1242228
uguuguauugagggaauag

SEQ ID NO: 1332045 - RNA, 19 nt, Artificial Sequence
  Description of Artificial Sequence: Synthetic oligonucleotide
  Antisense strand to SEQ ID NO: 1332044
cuauucccucaauacaaca

SEQ ID NO: 1332046 - RNA, 19 nt, Artificial Sequence
  Description of Artificial Sequence: Synthetic oligonucleotide
  Sense strand starting at position 3908 of SEQ ID NO: 1242228
agcucuuuaaagggacaga

SEQ ID NO: 1332047 - RNA, 19 nt, Artificial Sequence
  Description of Artificial Sequence: Synthetic oligonucleotide
  Antisense strand to SEQ ID NO: 1332046
ucugucccuuuaaagagcu

SEQ ID NO: 1332048 - RNA, 19 nt, Artificial Sequence
  Description of Artificial Sequence: Synthetic oligonucleotide
  Sense strand starting at position 31 of SEQ ID NO: 1242229
gccacugcaccugaugaau

SEQ ID NO: 1332049 - RNA, 19 nt, Artificial Sequence
  Description of Artificial Sequence: Synthetic oligonucleotide
  Antisense strand to SEQ ID NO: 1332048
auucaucaggugcaguggc

SEQ ID NO: 1332050 - RNA, 19 nt, Artificial Sequence
  Description of Artificial Sequence: Synthetic oligonucleotide
  Sense strand starting at position 454 of SEQ ID NO: 1242229
auacguauuuccuuucugu

SEQ ID NO: 1332051 - RNA, 19 nt, Artificial Sequence
  Description of Artificial Sequence: Synthetic oligonucleotide
  Antisense strand to SEQ ID NO: 1332050
acagaaaggaaauacguau

SEQ ID NO: 1332052 - RNA, 19 nt, Artificial Sequence
  Description of Artificial Sequence: Synthetic oligonucleotide
  Sense strand starting at position 458 of SEQ ID NO: 1242229
guauuuccuuucuguagga

SEQ ID NO: 1332053 - RNA, 19 nt, Artificial Sequence
  Description of Artificial Sequence: Synthetic oligonucleotide
  Antisense strand to SEQ ID NO: 1332052
uccuacagaaaggaaauac

SEQ ID NO: 1332054 - RNA, 19 nt, Artificial Sequence
  Description of Artificial Sequence: Synthetic oligonucleotide
  Sense strand starting at position 462 of SEQ ID NO: 1242229
uuccuuucuguaggauaca

SEQ ID NO: 1332055 - RNA, 19 nt, Artificial Sequence
  Description of Artificial Sequence: Synthetic oligonucleotide
  Antisense strand to SEQ ID NO: 1332054
uguauccuacagaaaggaa

SEQ ID NO: 1332056 - RNA, 19 nt, Artificial Sequence
  Description of Artificial Sequence: Synthetic oligonucleotide
  Sense strand starting at position 703 of SEQ ID NO: 1242229
ccacuauguuggccagagu

SEQ ID NO: 1332057 - RNA, 19 nt, Artificial Sequence
  Description of Artificial Sequence: Synthetic oligonucleotide
  Antisense strand to SEQ ID NO: 1332056
acucuggccaacauagugg

SEQ ID NO: 1332058 - RNA, 19 nt, Artificial Sequence
  Description of Artificial Sequence: Synthetic oligonucleotide
  Sense strand starting at position 932 of SEQ ID NO: 1242229
ucccgaguggcugaaauua

SEQ ID NO: 1332059 - RNA, 19 nt, Artificial Sequence
  Description of Artificial Sequence: Synthetic oligonucleotide
  Antisense strand to SEQ ID NO: 1332058
uaauuucagccacucggga

SEQ ID NO: 1332060 - RNA, 19 nt, Artificial Sequence
  Description of Artificial Sequence: Synthetic oligonucleotide
  Sense strand starting at position 1086 of SEQ ID NO: 1242229
ugccucagucacugggauu

SEQ ID NO: 1332061 - RNA, 19 nt, Artificial Sequence
  Description of Artificial Sequence: Synthetic oligonucleotide
  Antisense strand to SEQ ID NO: 1332060
aaucccagugacugaggca

SEQ ID NO: 1332062 - RNA, 19 nt, Artificial Sequence
  Description of Artificial Sequence: Synthetic oligonucleotide
  Sense strand starting at position 1087 of SEQ ID NO: 1242229
gccucagucacugggauua

SEQ ID NO: 1332063 - RNA, 19 nt, Artificial Sequence
  Description of Artificial Sequence: Synthetic oligonucleotide
  Antisense strand to SEQ ID NO: 1332062
uaaucccagugacugaggc

SEQ ID NO: 1332064 - RNA, 19 nt, Artificial Sequence
  Description of Artificial Sequence: Synthetic oligonucleotide
  Sense strand starting at position 1265 of SEQ ID NO: 1242229
cgacauuaucaauaagguu

SEQ ID NO: 1332065 - RNA, 19 nt, Artificial Sequence
  Description of Artificial Sequence: Synthetic oligonucleotide
  Antisense strand to SEQ ID NO: 1332064
aaccuuauugauaaugucg

SEQ ID NO: 1332066 - RNA, 19 nt, Artificial Sequence
  Description of Artificial Sequence: Synthetic oligonucleotide
  Sense strand starting at position 1272 of SEQ ID NO: 1242229
aucaauaagguuuguugau

SEQ ID NO: 1332067 - RNA, 19 nt, Artificial Sequence
  Description of Artificial Sequence: Synthetic oligonucleotide
  Antisense strand to SEQ ID NO: 1332066
aucaacaaaccuuauugau

SEQ ID NO: 1332068 - RNA, 19 nt, Artificial Sequence
  Description of Artificial Sequence: Synthetic oligonucleotide
  Sense strand starting at position 1273 of SEQ ID NO: 1242229
ucaauaagguuuguugaua

SEQ ID NO: 1332069 - RNA, 19 nt, Artificial Sequence
  Description of Artificial Sequence: Synthetic oligonucleotide
  Antisense strand to SEQ ID NO: 1332068
uaucaacaaaccuuauuga

SEQ ID NO: 1332070 - RNA, 19 nt, Artificial Sequence
  Description of Artificial Sequence: Synthetic oligonucleotide
  Sense strand starting at position 1274 of SEQ ID NO: 1242229
caauaagguuuguugauaa

SEQ ID NO: 1332071 - RNA, 19 nt, Artificial Sequence
  Description of Artificial Sequence: Synthetic oligonucleotide
  Antisense strand to SEQ ID NO: 1332070
uuaucaacaaaccuuauug

SEQ ID NO: 1332072 - RNA, 19 nt, Artificial Sequence
  Description of Artificial Sequence: Synthetic oligonucleotide
  Sense strand starting at position 1278 of SEQ ID NO: 1242229
aagguuuguugauaaauca

SEQ ID NO: 1332073 - RNA, 19 nt, Artificial Sequence
  Description of Artificial Sequence: Synthetic oligonucleotide
  Antisense strand to SEQ ID NO: 1332072
ugauuuaucaacaaaccuu

SEQ ID NO: 1332074 - RNA, 19 nt, Artificial Sequence
  Description of Artificial Sequence: Synthetic oligonucleotide
  Sense strand starting at position 1300 of SEQ ID NO: 1242229
ccauguaaacaguauguuu

SEQ ID NO: 1332075 - RNA, 19 nt, Artificial Sequence
  Description of Artificial Sequence: Synthetic oligonucleotide
  Antisense strand to SEQ ID NO: 1332074
aaacauacuguuuacaugg

SEQ ID NO: 1332076 - RNA, 19 nt, Artificial Sequence
  Description of Artificial Sequence: Synthetic oligonucleotide
  Sense strand starting at position 1366 of SEQ ID NO: 1242229
aucugaggucccggaauua

SEQ ID NO: 1332077 - RNA, 19 nt, Artificial Sequence
  Description of Artificial Sequence: Synthetic oligonucleotide
  Antisense strand to SEQ ID NO: 1332076
uaauuccgggaccucagau

SEQ ID NO: 1332078 - RNA, 19 nt, Artificial Sequence
  Description of Artificial Sequence: Synthetic oligonucleotide
  Sense strand starting at position 1409 of SEQ ID NO: 1242229
gccgguugcacuuaaauga

SEQ ID NO: 1332079 - RNA, 19 nt, Artificial Sequence
  Description of Artificial Sequence: Synthetic oligonucleotide
  Antisense strand to SEQ ID NO: 1332078
ucauuuaagugcaaccggc

SEQ ID NO: 1332080 - RNA, 19 nt, Artificial Sequence
  Description of Artificial Sequence: Synthetic oligonucleotide
  Sense strand starting at position 1444 of SEQ ID NO: 1242229
accgaaauuugagaaacaa

SEQ ID NO: 1332081 - RNA, 19 nt, Artificial Sequence
  Description of Artificial Sequence: Synthetic oligonucleotide
  Antisense strand to SEQ ID NO: 1332080
uuguuucucaaauuucggu

SEQ ID NO: 1332082 - RNA, 19 nt, Artificial Sequence
  Description of Artificial Sequence: Synthetic oligonucleotide
  Sense strand starting at position 1643 of SEQ ID NO: 1242229
gcuagaagugaguagaauu

SEQ ID NO: 1332083 - RNA, 19 nt, Artificial Sequence
  Description of Artificial Sequence: Synthetic oligonucleotide
  Antisense strand to SEQ ID NO: 1332082
aauucuacucacuucuagc

SEQ ID NO: 1332084 - RNA, 19 nt, Artificial Sequence
  Description of Artificial Sequence: Synthetic oligonucleotide
  Sense strand starting at position 1689 of SEQ ID NO: 1242229
gccagaaacugcucuaagu

SEQ ID NO: 1332085 - RNA, 19 nt, Artificial Sequence
  Description of Artificial Sequence: Synthetic oligonucleotide
  Antisense strand to SEQ ID NO: 1332084
acuuagagcaguuucuggc

SEQ ID NO: 1332086 - RNA, 19 nt, Artificial Sequence
  Description of Artificial Sequence: Synthetic oligonucleotide
  Sense strand starting at position 1691 of SEQ ID NO: 1242229
cagaaacugcucuaagugu

SEQ ID NO: 1332087 - RNA, 19 nt, Artificial Sequence
  Description of Artificial Sequence: Synthetic oligonucleotide
  Antisense strand to SEQ ID NO: 1332086
acacuuagagcaguuucug

SEQ ID NO: 1332088 - RNA, 19 nt, Artificial Sequence
  Description of Artificial Sequence: Synthetic oligonucleotide
  Sense strand starting at position 1722 of SEQ ID NO: 1242229
ucacaacaauccugagaga

SEQ ID NO: 1332089 - RNA, 19 nt, Artificial Sequence
  Description of Artificial Sequence: Synthetic oligonucleotide
  Antisense strand to SEQ ID NO: 1332088
ucucucaggauuguuguga

SEQ ID NO: 1332090 - RNA, 19 nt, Artificial Sequence
  Description of Artificial Sequence: Synthetic oligonucleotide
  Sense strand starting at position 1725 of SEQ ID NO: 1242229
caacaauccugagagaggu

SEQ ID NO: 1332091 - RNA, 19 nt, Artificial Sequence
  Description of Artificial Sequence: Synthetic oligonucleotide
  Antisense strand to SEQ ID NO: 1332090
accucucucaggauuguug

SEQ ID NO: 1332092 - RNA, 19 nt, Artificial Sequence
  Description of Artificial Sequence: Synthetic oligonucleotide
  Sense strand starting at position 1789 of SEQ ID NO: 1242229
ggcuaauuuacccgagguc

SEQ ID NO: 1332093 - RNA, 19 nt, Artificial Sequence
  Description of Artificial Sequence: Synthetic oligonucleotide
  Antisense strand to SEQ ID NO: 1332092
gaccucggguaaauuagcc

SEQ ID NO: 1332094 - RNA, 19 nt, Artificial Sequence
  Description of Artificial Sequence: Synthetic oligonucleotide
  Sense strand starting at position 1810 of SEQ ID NO: 1242229
acagguagugaguggcaaa

SEQ ID NO: 1332095 - RNA, 19 nt, Artificial Sequence
  Description of Artificial Sequence: Synthetic oligonucleotide
  Antisense strand to SEQ ID NO: 1332094
uuugccacucacuaccugu

SEQ ID NO: 1332096 - RNA, 19 nt, Artificial Sequence
  Description of Artificial Sequence: Synthetic oligonucleotide
  Sense strand starting at position 2022 of SEQ ID NO: 1242229
ccacuuuacccguauaggu

SEQ ID NO: 1332097 - RNA, 19 nt, Artificial Sequence
  Description of Artificial Sequence: Synthetic oligonucleotide
  Antisense strand to SEQ ID NO: 1332096
accuauacggguaaagugg

SEQ ID NO: 1332098 - RNA, 19 nt, Artificial Sequence
  Description of Artificial Sequence: Synthetic oligonucleotide
  Sense strand starting at position 2073 of SEQ ID NO: 1242229
gcgucagaacaccaaaguu

SEQ ID NO: 1332099 - RNA, 19 nt, Artificial Sequence
  Description of Artificial Sequence: Synthetic oligonucleotide
  Antisense strand to SEQ ID NO: 1332098
aacuuugguguucugacgc

SEQ ID NO: 1332100 - RNA, 19 nt, Artificial Sequence
  Description of Artificial Sequence: Synthetic oligonucleotide
  Sense strand starting at position 3115 of SEQ ID NO: 1242229
gcacuuaaacauuguuugu

SEQ ID NO: 1332101 - RNA, 19 nt, Artificial Sequence
  Description of Artificial Sequence: Synthetic oligonucleotide
  Antisense strand to SEQ ID NO: 1332100
acaaacaauguuuaagugc

SEQ ID NO: 1332102 - RNA, 19 nt, Artificial Sequence
  Description of Artificial Sequence: Synthetic oligonucleotide
  Sense strand starting at position 3146 of SEQ ID NO: 1242229
uucuuacugccagggaaga

SEQ ID NO: 1332103 - RNA, 19 nt, Artificial Sequence
  Description of Artificial Sequence: Synthetic oligonucleotide
  Antisense strand to SEQ ID NO: 1332102
ucuucccuggcaguaagaa

SEQ ID NO: 1332104 - RNA, 19 nt, Artificial Sequence
  Description of Artificial Sequence: Synthetic oligonucleotide
  Sense strand starting at position 3215 of SEQ ID NO: 1242229
gugagcuuucuugggucca

SEQ ID NO: 1332105 - RNA, 19 nt, Artificial Sequence
  Description of Artificial Sequence: Synthetic oligonucleotide
  Antisense strand to SEQ ID NO: 1332104
uggacccaagaaagcucac

SEQ ID NO: 1332106 - RNA, 19 nt, Artificial Sequence
  Description of Artificial Sequence: Synthetic oligonucleotide
  Sense strand starting at position 3217 of SEQ ID NO: 1242229
gagcuuucuuggguccaga

SEQ ID NO: 1332107 - RNA, 19 nt, Artificial Sequence
  Description of Artificial Sequence: Synthetic oligonucleotide
  Antisense strand to SEQ ID NO: 1332106
ucuggacccaagaaagcuc

SEQ ID NO: 1332108 - RNA, 19 nt, Artificial Sequence
  Description of Artificial Sequence: Synthetic oligonucleotide
  Sense strand starting at position 3263 of SEQ ID NO: 1242229
guaccauagcggcgggaau

SEQ ID NO: 1332109 - RNA, 19 nt, Artificial Sequence
  Description of Artificial Sequence: Synthetic oligonucleotide
  Antisense strand to SEQ ID NO: 1332108
auucccgccgcuaugguac

SEQ ID NO: 1332110 - RNA, 19 nt, Artificial Sequence
  Description of Artificial Sequence: Synthetic oligonucleotide
  Sense strand starting at position 3277 of SEQ ID NO: 1242229
ggaauuuagugcuuagugu

SEQ ID NO: 1332111 - RNA, 19 nt, Artificial Sequence
  Description of Artificial Sequence: Synthetic oligonucleotide
  Antisense strand to SEQ ID NO: 1332110
acacuaagcacuaaauucc

SEQ ID NO: 1332112 - RNA, 19 nt, Artificial Sequence
  Description of Artificial Sequence: Synthetic oligonucleotide
  Sense strand starting at position 3283 of SEQ ID NO: 1242229
uagugcuuagugugaauuu

SEQ ID NO: 1332113 - RNA, 19 nt, Artificial Sequence
  Description of Artificial Sequence: Synthetic oligonucleotide
  Antisense strand to SEQ ID NO: 1332112
aaauucacacuaagcacua

SEQ ID NO: 1332114 - RNA, 19 nt, Artificial Sequence
  Description of Artificial Sequence: Synthetic oligonucleotide
  Sense strand starting at position 3292 of SEQ ID NO: 1242229
gugugaauuugagagcaua

SEQ ID NO: 1332115 - RNA, 19 nt, Artificial Sequence
  Description of Artificial Sequence: Synthetic oligonucleotide
  Antisense strand to SEQ ID NO: 1332114
uaugcucucaaauucacac

SEQ ID NO: 1332116 - RNA, 19 nt, Artificial Sequence
  Description of Artificial Sequence: Synthetic oligonucleotide
  Sense strand starting at position 3302 of SEQ ID NO: 1242229
gagagcauauaguuccgua

SEQ ID NO: 1332117 - RNA, 19 nt, Artificial Sequence
  Description of Artificial Sequence: Synthetic oligonucleotide
  Antisense strand to SEQ ID NO: 1332116
uacggaacuauaugcucuc

SEQ ID NO: 1332118 - RNA, 19 nt, Artificial Sequence
  Description of Artificial Sequence: Synthetic oligonucleotide
  Sense strand starting at position 3306 of SEQ ID NO: 1242229
gcauauaguuccguaacac

SEQ ID NO: 1332119 - RNA, 19 nt, Artificial Sequence
  Description of Artificial Sequence: Synthetic oligonucleotide
  Antisense strand to SEQ ID NO: 1332118
guguuacggaacuauaugc

SEQ ID NO: 1332120 - RNA, 19 nt, Artificial Sequence
  Description of Artificial Sequence: Synthetic oligonucleotide
  Sense strand starting at position 3318 of SEQ ID NO: 1242229
guaacaccuuuguucucua

SEQ ID NO: 1332121 - RNA, 19 nt, Artificial Sequence
  Description of Artificial Sequence: Synthetic oligonucleotide
  Antisense strand to SEQ ID NO: 1332120
uagagaacaaagguguuac

SEQ ID NO: 1332122 - RNA, 19 nt, Artificial Sequence
  Description of Artificial Sequence: Synthetic oligonucleotide
  Sense strand starting at position 3323 of SEQ ID NO: 1242229
accuuuguucucuaagguu

SEQ ID NO: 1332123 - RNA, 19 nt, Artificial Sequence
  Description of Artificial Sequence: Synthetic oligonucleotide
  Antisense strand to SEQ ID NO: 1332122
aaccuuagagaacaaaggu

SEQ ID NO: 1332124 - RNA, 19 nt, Artificial Sequence
  Description of Artificial Sequence: Synthetic oligonucleotide
  Sense strand starting at position 3341 of SEQ ID NO: 1242229
uccgaaggagcucacuaaa

SEQ ID NO: 1332125 - RNA, 19 nt, Artificial Sequence
  Description of Artificial Sequence: Synthetic oligonucleotide
  Antisense strand to SEQ ID NO: 1332124
uuuagugagcuccuucgga

SEQ ID NO: 1332126 - RNA, 19 nt, Artificial Sequence
  Description of Artificial Sequence: Synthetic oligonucleotide
  Sense strand starting at position 3428 of SEQ ID NO: 1242229
uuggcuucucuagacucua

SEQ ID NO: 1332127 - RNA, 19 nt, Artificial Sequence
  Description of Artificial Sequence: Synthetic oligonucleotide
  Antisense strand to SEQ ID NO: 1332126
uagagucuagagaagccaa

SEQ ID NO: 1332128 - RNA, 19 nt, Artificial Sequence
  Description of Artificial Sequence: Synthetic oligonucleotide
  Sense strand starting at position 143 of SEQ ID NO: 1242230
ggaaacuuaccuugcaaga

SEQ ID NO: 1332129 - RNA, 19 nt, Artificial Sequence
  Description of Artificial Sequence: Synthetic oligonucleotide
  Antisense strand to SEQ ID NO: 1332128
ucuugcaagguaaguuucc

SEQ ID NO: 1332130 - RNA, 19 nt, Artificial Sequence
  Description of Artificial Sequence: Synthetic oligonucleotide
  Sense strand starting at position 178 of SEQ ID NO: 1242230
gugcaaucucuguugcugu

SEQ ID NO: 1332131 - RNA, 19 nt, Artificial Sequence
  Description of Artificial Sequence: Synthetic oligonucleotide
  Antisense strand to SEQ ID NO: 1332130
acagcaacagagauugcac

SEQ ID NO: 1332132 - RNA, 19 nt, Artificial Sequence
  Description of Artificial Sequence: Synthetic oligonucleotide
  Sense strand starting at position 231 of SEQ ID NO: 1242230
agaugcaaacuuuaugagu

SEQ ID NO: 1332133 - RNA, 19 nt, Artificial Sequence
  Description of Artificial Sequence: Synthetic oligonucleotide
  Antisense strand to SEQ ID NO: 1332132
acucauaaaguuugcaucu

SEQ ID NO: 1332134 - RNA, 19 nt, Artificial Sequence
  Description of Artificial Sequence: Synthetic oligonucleotide
  Sense strand starting at position 240 of SEQ ID NO: 1242230
cuuuaugaguaacugagau

SEQ ID NO: 1332135 - RNA, 19 nt, Artificial Sequence
  Description of Artificial Sequence: Synthetic oligonucleotide
  Antisense strand to SEQ ID NO: 1332134
aucucaguuacucauaaag

SEQ ID NO: 1332136 - RNA, 19 nt, Artificial Sequence
  Description of Artificial Sequence: Synthetic oligonucleotide
  Sense strand starting at position 298 of SEQ ID NO: 1242230
caggaaauauuuggauaag

SEQ ID NO: 1332137 - RNA, 19 nt, Artificial Sequence
  Description of Artificial Sequence: Synthetic oligonucleotide
  Antisense strand to SEQ ID NO: 1332136
cuuauccaaauauuuccug

SEQ ID NO: 1332138 - RNA, 19 nt, Artificial Sequence
  Description of Artificial Sequence: Synthetic oligonucleotide
  Sense strand starting at position 326 of SEQ ID NO: 1242230
augaaauacuucuucguaa

SEQ ID NO: 1332139 - RNA, 19 nt, Artificial Sequence
  Description of Artificial Sequence: Synthetic oligonucleotide
  Antisense strand to SEQ ID NO: 1332138
uuacgaagaaguauuucau

SEQ ID NO: 1332140 - RNA, 19 nt, Artificial Sequence
  Description of Artificial Sequence: Synthetic oligonucleotide
  Sense strand starting at position 327 of SEQ ID NO: 1242230
ugaaauacuucuucguaaa

SEQ ID NO: 1332141 - RNA, 19 nt, Artificial Sequence
  Description of Artificial Sequence: Synthetic oligonucleotide
  Antisense strand to SEQ ID NO: 1332140
uuuacgaagaaguauuuca

SEQ ID NO: 1332142 - RNA, 19 nt, Artificial Sequence
  Description of Artificial Sequence: Synthetic oligonucleotide
  Sense strand starting at position 558 of SEQ ID NO: 1242230
ggugaaaugcacugaaaca

SEQ ID NO: 1332143 - RNA, 19 nt, Artificial Sequence
  Description of Artificial Sequence: Synthetic oligonucleotide
  Antisense strand to SEQ ID NO: 1332142
uguuucagugcauuucacc

SEQ ID NO: 1332144 - RNA, 19 nt, Artificial Sequence
  Description of Artificial Sequence: Synthetic oligonucleotide
  Sense strand starting at position 611 of SEQ ID NO: 1242230
ucugucugggaguauuauu

SEQ ID NO: 1332145 - RNA, 19 nt, Artificial Sequence
  Description of Artificial Sequence: Synthetic oligonucleotide
  Antisense strand to SEQ ID NO: 1332144
aauaauacucccagacaga

SEQ ID NO: 1332146 - RNA, 19 nt, Artificial Sequence
  Description of Artificial Sequence: Synthetic oligonucleotide
  Sense strand starting at position 616 of SEQ ID NO: 1242230
cugggaguauuauucgaaa

SEQ ID NO: 1332147 - RNA, 19 nt, Artificial Sequence
  Description of Artificial Sequence: Synthetic oligonucleotide
  Antisense strand to SEQ ID NO: 1332146
uuucgaauaauacucccag

SEQ ID NO: 1332148 - RNA, 19 nt, Artificial Sequence
  Description of Artificial Sequence: Synthetic oligonucleotide
  Sense strand starting at position 618 of SEQ ID NO: 1242230
gggaguauuauucgaaaga

SEQ ID NO: 1332149 - RNA, 19 nt, Artificial Sequence
  Description of Artificial Sequence: Synthetic oligonucleotide
  Antisense strand to SEQ ID NO: 1332148
ucuuucgaauaauacuccc

SEQ ID NO: 1332150 - RNA, 19 nt, Artificial Sequence
  Description of Artificial Sequence: Synthetic oligonucleotide
  Sense strand starting at position 674 of SEQ ID NO: 1242230
gccguaugucucuuacuuc

SEQ ID NO: 1332151 - RNA, 19 nt, Artificial Sequence
  Description of Artificial Sequence: Synthetic oligonucleotide
  Antisense strand to SEQ ID NO: 1332150
gaaguaagagacauacggc

SEQ ID NO: 1332152 - RNA, 19 nt, Artificial Sequence
  Description of Artificial Sequence: Synthetic oligonucleotide
  Sense strand starting at position 813 of SEQ ID NO: 1242230
ugaaguuugauaggauccu

SEQ ID NO: 1332153 - RNA, 19 nt, Artificial Sequence
  Description of Artificial Sequence: Synthetic oligonucleotide
  Antisense strand to SEQ ID NO: 1332152
aggauccuaucaaacuuca

SEQ ID NO: 1332154 - RNA, 19 nt, Artificial Sequence
  Description of Artificial Sequence: Synthetic oligonucleotide
  Sense strand starting at position 822 of SEQ ID NO: 1242230
auaggauccuuugcucaga

SEQ ID NO: 1332155 - RNA, 19 nt, Artificial Sequence
  Description of Artificial Sequence: Synthetic oligonucleotide
  Antisense strand to SEQ ID NO: 1332154
ucugagcaaaggauccuau

SEQ ID NO: 1332156 - RNA, 19 nt, Artificial Sequence
  Description of Artificial Sequence: Synthetic oligonucleotide
  Sense strand starting at position 845 of SEQ ID NO: 1242230
uacacagacuuguuggaga

SEQ ID NO: 1332157 - RNA, 19 nt, Artificial Sequence
  Description of Artificial Sequence: Synthetic oligonucleotide
  Antisense strand to SEQ ID NO: 1332156
ucuccaacaagucugugua

SEQ ID NO: 1332158 - RNA, 19 nt, Artificial Sequence
  Description of Artificial Sequence: Synthetic oligonucleotide
  Sense strand starting at position 977 of SEQ ID NO: 1242230
ccaagucauccuggacaaa

SEQ ID NO: 1332159 - RNA, 19 nt, Artificial Sequence
  Description of Artificial Sequence: Synthetic oligonucleotide
  Antisense strand to SEQ ID NO: 1332158
uuuguccaggaugacuugg

SEQ ID NO: 1332160 - RNA, 19 nt, Artificial Sequence
  Description of Artificial Sequence: Synthetic oligonucleotide
  Sense strand starting at position 1078 of SEQ ID NO: 1242230
gaagguaaguuuccaccca

SEQ ID NO: 1332161 - RNA, 19 nt, Artificial Sequence
  Description of Artificial Sequence: Synthetic oligonucleotide
  Antisense strand to SEQ ID NO: 1332160
uggguggaaacuuaccuuc

SEQ ID NO: 1332162 - RNA, 19 nt, Artificial Sequence
  Description of Artificial Sequence: Synthetic oligonucleotide
  Sense strand starting at position 1103 of SEQ ID NO: 1242230
uaucaucacuugguggaaa

SEQ ID NO: 1332163 - RNA, 19 nt, Artificial Sequence
  Description of Artificial Sequence: Synthetic oligonucleotide
  Antisense strand to SEQ ID NO: 1332162
uuuccaccaagugaugaua

SEQ ID NO: 1332164 - RNA, 19 nt, Artificial Sequence
  Description of Artificial Sequence: Synthetic oligonucleotide
  Sense strand starting at position 1129 of SEQ ID NO: 1242230
cuacuacugucacugauga

SEQ ID NO: 1332165 - RNA, 19 nt, Artificial Sequence
  Description of Artificial Sequence: Synthetic oligonucleotide
  Antisense strand to SEQ ID NO: 1332164
ucaucagugacaguaguag

SEQ ID NO: 1332166 - RNA, 19 nt, Artificial Sequence
  Description of Artificial Sequence: Synthetic oligonucleotide
  Sense strand starting at position 1220 of SEQ ID NO: 1242230
acccauuaucacugguuga

SEQ ID NO: 1332167 - RNA, 19 nt, Artificial Sequence
  Description of Artificial Sequence: Synthetic oligonucleotide
  Antisense strand to SEQ ID NO: 1332166
ucaaccagugauaaugggu

SEQ ID NO: 1332168 - RNA, 19 nt, Artificial Sequence
  Description of Artificial Sequence: Synthetic oligonucleotide
  Sense strand starting at position 1396 of SEQ ID NO: 1242230
gacugaagauauccacugu

SEQ ID NO: 1332169 - RNA, 19 nt, Artificial Sequence
  Description of Artificial Sequence: Synthetic oligonucleotide
  Antisense strand to SEQ ID NO: 1332168
acaguggauaucuucaguc

SEQ ID NO: 1332170 - RNA, 19 nt, Artificial Sequence
  Description of Artificial Sequence: Synthetic oligonucleotide
  Sense strand starting at position 1430 of SEQ ID NO: 1242230
gugaaaucuguagacagcu

SEQ ID NO: 1332171 - RNA, 19 nt, Artificial Sequence
  Description of Artificial Sequence: Synthetic oligonucleotide
  Antisense strand to SEQ ID NO: 1332170
agcugucuacagauuucac

SEQ ID NO: 1332172 - RNA, 19 nt, Artificial Sequence
  Description of Artificial Sequence: Synthetic oligonucleotide
  Sense strand starting at position 1482 of SEQ ID NO: 1242230
agaugaucuuucuugagac

SEQ ID NO: 1332173 - RNA, 19 nt, Artificial Sequence
  Description of Artificial Sequence: Synthetic oligonucleotide
  Antisense strand to SEQ ID NO: 1332172
gucucaagaaagaucaucu

SEQ ID NO: 1332174 - RNA, 19 nt, Artificial Sequence
  Description of Artificial Sequence: Synthetic oligonucleotide
  Sense strand starting at position 1490 of SEQ ID NO: 1242230
uuucuugagacugaacguu

SEQ ID NO: 1332175 - RNA, 19 nt, Artificial Sequence
  Description of Artificial Sequence: Synthetic oligonucleotide
  Antisense strand to SEQ ID NO: 1332174
aacguucagucucaagaaa

SEQ ID NO: 1332176 - RNA, 19 nt, Artificial Sequence
  Description of Artificial Sequence: Synthetic oligonucleotide
  Sense strand starting at position 1604 of SEQ ID NO: 1242230
ugugaacauggcuauccaa

SEQ ID NO: 1332177 - RNA, 19 nt, Artificial Sequence
  Description of Artificial Sequence: Synthetic oligonucleotide
  Antisense strand to SEQ ID NO: 1332176
uuggauagccauguucaca

SEQ ID NO: 1332178 - RNA, 19 nt, Artificial Sequence
  Description of Artificial Sequence: Synthetic oligonucleotide
  Sense strand starting at position 1961 of SEQ ID NO: 1242230
cuugauuuccagcgaccuu

SEQ ID NO: 1332179 - RNA, 19 nt, Artificial Sequence
  Description of Artificial Sequence: Synthetic oligonucleotide
  Antisense strand to SEQ ID NO: 1332178
aaggucgcuggaaaucaag

SEQ ID NO: 1332180 - RNA, 19 nt, Artificial Sequence
  Description of Artificial Sequence: Synthetic oligonucleotide
  Sense strand starting at position 2294 of SEQ ID NO: 1242230
cuaggaaucuagucaaguu

SEQ ID NO: 1332181 - RNA, 19 nt, Artificial Sequence
  Description of Artificial Sequence: Synthetic oligonucleotide
  Antisense strand to SEQ ID NO: 1332180
aacuugacuagauuccuag

SEQ ID NO: 1332182 - RNA, 19 nt, Artificial Sequence
  Description of Artificial Sequence: Synthetic oligonucleotide
  Sense strand starting at position 2316 of SEQ ID NO: 1242230
uaauauagggacuguuaau

SEQ ID NO: 1332183 - RNA, 19 nt, Artificial Sequence
  Description of Artificial Sequence: Synthetic oligonucleotide
  Antisense strand to SEQ ID NO: 1332182
auuaacagucccuauauua

SEQ ID NO: 1332184 - RNA, 19 nt, Artificial Sequence
  Description of Artificial Sequence: Synthetic oligonucleotide
  Sense strand starting at position 2357 of SEQ ID NO: 1242230
ucaaacaguuagguaaauu

SEQ ID NO: 1332185 - RNA, 19 nt, Artificial Sequence
  Description of Artificial Sequence: Synthetic oligonucleotide
  Antisense strand to SEQ ID NO: 1332184
aauuuaccuaacuguuuga

SEQ ID NO: 1332186 - RNA, 19 nt, Artificial Sequence
  Description of Artificial Sequence: Synthetic oligonucleotide
  Sense strand starting at position 2553 of SEQ ID NO: 1242230
agaagcugucacuaagcau

SEQ ID NO: 1332187 - RNA, 19 nt, Artificial Sequence
  Description of Artificial Sequence: Synthetic oligonucleotide
  Antisense strand to SEQ ID NO: 1332186
augcuuagugacagcuucu

SEQ ID NO: 1332188 - RNA, 19 nt, Artificial Sequence
  Description of Artificial Sequence: Synthetic oligonucleotide
  Sense strand starting at position 2606 of SEQ ID NO: 1242230
guagaacagucuuuaaaug

SEQ ID NO: 1332189 - RNA, 19 nt, Artificial Sequence
  Description of Artificial Sequence: Synthetic oligonucleotide
  Antisense strand to SEQ ID NO: 1332188
cauuuaaagacuguucuac

SEQ ID NO: 1332190 - RNA, 19 nt, Artificial Sequence
  Description of Artificial Sequence: Synthetic oligonucleotide
  Sense strand starting at position 2787 of SEQ ID NO: 1242230
uguugugguaaguaaagaa

SEQ ID NO: 1332191 - RNA, 19 nt, Artificial Sequence
  Description of Artificial Sequence: Synthetic oligonucleotide
  Antisense strand to SEQ ID NO: 1332190
uucuuuacuuaccacaaca

SEQ ID NO: 1332192 - RNA, 19 nt, Artificial Sequence
  Description of Artificial Sequence: Synthetic oligonucleotide
  Sense strand starting at position 2911 of SEQ ID NO: 1242230
ccauuuagcuguuugauau

SEQ ID NO: 1332193 - RNA, 19 nt, Artificial Sequence
  Description of Artificial Sequence: Synthetic oligonucleotide
  Antisense strand to SEQ ID NO: 1332192
auaucaaacagcuaaaugg

SEQ ID NO: 1332194 - RNA, 19 nt, Artificial Sequence
  Description of Artificial Sequence: Synthetic oligonucleotide
  Sense strand starting at position 3010 of SEQ ID NO: 1242230
cuacccuagagguggaauu

SEQ ID NO: 1332195 - RNA, 19 nt, Artificial Sequence
  Description of Artificial Sequence: Synthetic oligonucleotide
  Antisense strand to SEQ ID NO: 1332194
aauuccaccucuaggguag

SEQ ID NO: 1332196 - RNA, 19 nt, Artificial Sequence
  Description of Artificial Sequence: Synthetic oligonucleotide
  Sense strand starting at position 3011 of SEQ ID NO: 1242230
uacccuagagguggaauua

SEQ ID NO: 1332197 - RNA, 19 nt, Artificial Sequence
  Description of Artificial Sequence: Synthetic oligonucleotide
  Antisense strand to SEQ ID NO: 1332196
uaauuccaccucuagggua

SEQ ID NO: 1332198 - RNA, 19 nt, Artificial Sequence
  Description of Artificial Sequence: Synthetic oligonucleotide
  Sense strand starting at position 3020 of SEQ ID NO: 1242230
gguggaauuacucaccagu

SEQ ID NO: 1332199 - RNA, 19 nt, Artificial Sequence
  Description of Artificial Sequence: Synthetic oligonucleotide
  Antisense strand to SEQ ID NO: 1332198
acuggugaguaauuccacc

SEQ ID NO: 1332200 - RNA, 19 nt, Artificial Sequence
  Description of Artificial Sequence: Synthetic oligonucleotide
  Sense strand starting at position 3023 of SEQ ID NO: 1242230
ggaauuacucaccagugcu

SEQ ID NO: 1332201 - RNA, 19 nt, Artificial Sequence
  Description of Artificial Sequence: Synthetic oligonucleotide
  Antisense strand to SEQ ID NO: 1332200
agcacuggugaguaauucc

SEQ ID NO: 1332202 - RNA, 19 nt, Artificial Sequence
  Description of Artificial Sequence: Synthetic oligonucleotide
  Sense strand starting at position 3209 of SEQ ID NO: 1242230
gguauucuauuugaaagaa

SEQ ID NO: 1332203 - RNA, 19 nt, Artificial Sequence
  Description of Artificial Sequence: Synthetic oligonucleotide
  Antisense strand to SEQ ID NO: 1332202
uucuuucaaauagaauacc

SEQ ID NO: 1332204 - RNA, 19 nt, Artificial Sequence
  Description of Artificial Sequence: Synthetic oligonucleotide
  Sense strand starting at position 3763 of SEQ ID NO: 1242230
ucuuucugggauuaagugu

SEQ ID NO: 1332205 - RNA, 19 nt, Artificial Sequence
  Description of Artificial Sequence: Synthetic oligonucleotide
  Antisense strand to SEQ ID NO: 1332204
acacuuaaucccagaaaga

SEQ ID NO: 1332206 - RNA, 19 nt, Artificial Sequence
  Description of Artificial Sequence: Synthetic oligonucleotide
  Sense strand starting at position 3813 of SEQ ID NO: 1242230
cuaauaggcuaaucaauga

SEQ ID NO: 1332207 - RNA, 19 nt, Artificial Sequence
  Description of Artificial Sequence: Synthetic oligonucleotide
  Antisense strand to SEQ ID NO: 1332206
ucauugauuagccuauuag

SEQ ID NO: 1332208 - RNA, 19 nt, Artificial Sequence
  Description of Artificial Sequence: Synthetic oligonucleotide
  Sense strand starting at position 251 of SEQ ID NO: 1242231
agggccuaccugugaauau

SEQ ID NO: 1332209 - RNA, 19 nt, Artificial Sequence
  Description of Artificial Sequence: Synthetic oligonucleotide
  Antisense strand to SEQ ID NO: 1332208
auauucacagguaggcccu

SEQ ID NO: 1332210 - RNA, 19 nt, Artificial Sequence
  Description of Artificial Sequence: Synthetic oligonucleotide
  Sense strand starting at position 407 of SEQ ID NO: 1242231
ucugaucucgucuacagaa

SEQ ID NO: 1332211 - RNA, 19 nt, Artificial Sequence
  Description of Artificial Sequence: Synthetic oligonucleotide
  Antisense strand to SEQ ID NO: 1332210
uucuguagacgagaucaga

SEQ ID NO: 1332212 - RNA, 19 nt, Artificial Sequence
  Description of Artificial Sequence: Synthetic oligonucleotide
  Sense strand starting at position 409 of SEQ ID NO: 1242231
ugaucucgucuacagaaua

SEQ ID NO: 1332213 - RNA, 19 nt, Artificial Sequence
  Description of Artificial Sequence: Synthetic oligonucleotide
  Antisense strand to SEQ ID NO: 1332212
uauucuguagacgagauca

SEQ ID NO: 1332214 - RNA, 19 nt, Artificial Sequence
  Description of Artificial Sequence: Synthetic oligonucleotide
  Sense strand starting at position 432 of SEQ ID NO: 1242231
ugccauuagcuagaaugau

SEQ ID NO: 1332215 - RNA, 19 nt, Artificial Sequence
  Description of Artificial Sequence: Synthetic oligonucleotide
  Antisense strand to SEQ ID NO: 1332214
aucauucuagcuaauggca

SEQ ID NO: 1332216 - RNA, 19 nt, Artificial Sequence
  Description of Artificial Sequence: Synthetic oligonucleotide
  Sense strand starting at position 444 of SEQ ID NO: 1242231
gaaugauaucuuuagcugu

SEQ ID NO: 1332217 - RNA, 19 nt, Artificial Sequence
  Description of Artificial Sequence: Synthetic oligonucleotide
  Antisense strand to SEQ ID NO: 1332216
acagcuaaagauaucauuc

SEQ ID NO: 1332218 - RNA, 19 nt, Artificial Sequence
  Description of Artificial Sequence: Synthetic oligonucleotide
  Sense strand starting at position 446 of SEQ ID NO: 1242231
augauaucuuuagcuguaa

SEQ ID NO: 1332219 - RNA, 19 nt, Artificial Sequence
  Description of Artificial Sequence: Synthetic oligonucleotide
  Antisense strand to SEQ ID NO: 1332218
uuacagcuaaagauaucau

SEQ ID NO: 1332220 - RNA, 19 nt, Artificial Sequence
  Description of Artificial Sequence: Synthetic oligonucleotide
  Sense strand starting at position 475 of SEQ ID NO: 1242231
auuguuucugagggacuau

SEQ ID NO: 1332221 - RNA, 19 nt, Artificial Sequence
  Description of Artificial Sequence: Synthetic oligonucleotide
  Antisense strand to SEQ ID NO: 1332220
auagucccucagaaacaau

SEQ ID NO: 1332222 - RNA, 19 nt, Artificial Sequence
  Description of Artificial Sequence: Synthetic oligonucleotide
  Sense strand starting at position 499 of SEQ ID NO: 1242231
gccaccauuuguccaucau

SEQ ID NO: 1332223 - RNA, 19 nt, Artificial Sequence
  Description of Artificial Sequence: Synthetic oligonucleotide
  Antisense strand to SEQ ID NO: 1332222
augauggacaaaugguggc

SEQ ID NO: 1332224 - RNA, 19 nt, Artificial Sequence
  Description of Artificial Sequence: Synthetic oligonucleotide
  Sense strand starting at position 535 of SEQ ID NO: 1242231
ggcagcaauagcuaggaaa

SEQ ID NO: 1332225 - RNA, 19 nt, Artificial Sequence
  Description of Artificial Sequence: Synthetic oligonucleotide
  Antisense strand to SEQ ID NO: 1332224
uuuccuagcuauugcugcc

SEQ ID NO: 1332226 - RNA, 19 nt, Artificial Sequence
  Description of Artificial Sequence: Synthetic oligonucleotide
  Sense strand starting at position 719 of SEQ ID NO: 1242231
uuaagcaagcaguauaaau

SEQ ID NO: 1332227 - RNA, 19 nt, Artificial Sequence
  Description of Artificial Sequence: Synthetic oligonucleotide
  Antisense strand to SEQ ID NO: 1332226
auuuauacugcuugcuuaa

SEQ ID NO: 1332228 - RNA, 19 nt, Artificial Sequence
  Description of Artificial Sequence: Synthetic oligonucleotide
  Sense strand starting at position 841 of SEQ ID NO: 1242231
ggaaccagucacuguuaga

SEQ ID NO: 1332229 - RNA, 19 nt, Artificial Sequence
  Description of Artificial Sequence: Synthetic oligonucleotide
  Antisense strand to SEQ ID NO: 1332228
ucuaacagugacugguucc

SEQ ID NO: 1332230 - RNA, 19 nt, Artificial Sequence
  Description of Artificial Sequence: Synthetic oligonucleotide
  Sense strand starting at position 989 of SEQ ID NO: 1242231
aggcauaaucagcauuagu

SEQ ID NO: 1332231 - RNA, 19 nt, Artificial Sequence
  Description of Artificial Sequence: Synthetic oligonucleotide
  Antisense strand to SEQ ID NO: 1332230
acuaaugcugauuaugccu

SEQ ID NO: 1332232 - RNA, 19 nt, Artificial Sequence
  Description of Artificial Sequence: Synthetic oligonucleotide
  Sense strand starting at position 1081 of SEQ ID NO: 1242231
gugguaacuucuuuauaaa

SEQ ID NO: 1332233 - RNA, 19 nt, Artificial Sequence
  Description of Artificial Sequence: Synthetic oligonucleotide
  Antisense strand to SEQ ID NO: 1332232
uuuauaaagaaguuaccac

SEQ ID NO: 1332234 - RNA, 19 nt, Artificial Sequence
  Description of Artificial Sequence: Synthetic oligonucleotide
  Sense strand starting at position 1135 of SEQ ID NO: 1242231
aacgacgaccggugaaaua

SEQ ID NO: 1332235 - RNA, 19 nt, Artificial Sequence
  Description of Artificial Sequence: Synthetic oligonucleotide
  Antisense strand to SEQ ID NO: 1332234
uauuucaccggucgucguu

SEQ ID NO: 1332236 - RNA, 19 nt, Artificial Sequence
  Description of Artificial Sequence: Synthetic oligonucleotide
  Sense strand starting at position 1171 of SEQ ID NO: 1242231
acuagacacuuguugcuaa

SEQ ID NO: 1332237 - RNA, 19 nt, Artificial Sequence
  Description of Artificial Sequence: Synthetic oligonucleotide
  Antisense strand to SEQ ID NO: 1332236
uuagcaacaagugucuagu

SEQ ID NO: 1332238 - RNA, 19 nt, Artificial Sequence
  Description of Artificial Sequence: Synthetic oligonucleotide
  Sense strand starting at position 1174 of SEQ ID NO: 1242231
agacacuuguugcuaaaga

SEQ ID NO: 1332239 - RNA, 19 nt, Artificial Sequence
  Description of Artificial Sequence: Synthetic oligonucleotide
  Antisense strand to SEQ ID NO: 1332238
ucuuuagcaacaagugucu

SEQ ID NO: 1332240 - RNA, 19 nt, Artificial Sequence
  Description of Artificial Sequence: Synthetic oligonucleotide
  Sense strand starting at position 2250 of SEQ ID NO: 1242231
ugagauccgacccagaguu

SEQ ID NO: 1332241 - RNA, 19 nt, Artificial Sequence
  Description of Artificial Sequence: Synthetic oligonucleotide
  Antisense strand to SEQ ID NO: 1332240
aacucugggucggaucuca

SEQ ID NO: 1332242 - RNA, 19 nt, Artificial Sequence
  Description of Artificial Sequence: Synthetic oligonucleotide
  Sense strand starting at position 2276 of SEQ ID NO: 1242231
ugacuagacgccugggaau

SEQ ID NO: 1332243 - RNA, 19 nt, Artificial Sequence
  Description of Artificial Sequence: Synthetic oligonucleotide
  Antisense strand to SEQ ID NO: 1332242
auucccaggcgucuaguca

SEQ ID NO: 1332244 - RNA, 19 nt, Artificial Sequence
  Description of Artificial Sequence: Synthetic oligonucleotide
  Sense strand starting at position 2287 of SEQ ID NO: 1242231
cugggaauccgugagcuua

SEQ ID NO: 1332245 - RNA, 19 nt, Artificial Sequence
  Description of Artificial Sequence: Synthetic oligonucleotide
  Antisense strand to SEQ ID NO: 1332244
uaagcucacggauucccag

SEQ ID NO: 1332246 - RNA, 19 nt, Artificial Sequence
  Description of Artificial Sequence: Synthetic oligonucleotide
  Sense strand starting at position 2359 of SEQ ID NO: 1242231
gugucauucccauaagaag

SEQ ID NO: 1332247 - RNA, 19 nt, Artificial Sequence
  Description of Artificial Sequence: Synthetic oligonucleotide
  Antisense strand to SEQ ID NO: 1332246
cuucuuaugggaaugacac

SEQ ID NO: 1332248 - RNA, 19 nt, Artificial Sequence
  Description of Artificial Sequence: Synthetic oligonucleotide
  Sense strand starting at position 2453 of SEQ ID NO: 1242231
ggacucgggaucugaaauu

SEQ ID NO: 1332249 - RNA, 19 nt, Artificial Sequence
  Description of Artificial Sequence: Synthetic oligonucleotide
  Antisense strand to SEQ ID NO: 1332248
aauuucagaucccgagucc

SEQ ID NO: 1332250 - RNA, 19 nt, Artificial Sequence
  Description of Artificial Sequence: Synthetic oligonucleotide
  Sense strand starting at position 2496 of SEQ ID NO: 1242231
gccaguuccuaagcuauuu

SEQ ID NO: 1332251 - RNA, 19 nt, Artificial Sequence
  Description of Artificial Sequence: Synthetic oligonucleotide
  Antisense strand to SEQ ID NO: 1332250
aaauagcuuaggaacuggc

SEQ ID NO: 1332252 - RNA, 19 nt, Artificial Sequence
  Description of Artificial Sequence: Synthetic oligonucleotide
  Sense strand starting at position 2507 of SEQ ID NO: 1242231
agcuauuuguuguccuaug

SEQ ID NO: 1332253 - RNA, 19 nt, Artificial Sequence
  Description of Artificial Sequence: Synthetic oligonucleotide
  Antisense strand to SEQ ID NO: 1332252
cauaggacaacaaauagcu

SEQ ID NO: 1332254 - RNA, 19 nt, Artificial Sequence
  Description of Artificial Sequence: Synthetic oligonucleotide
  Sense strand starting at position 2748 of SEQ ID NO: 1242231
ugggcuuuauaauuccaua

SEQ ID NO: 1332255 - RNA, 19 nt, Artificial Sequence
  Description of Artificial Sequence: Synthetic oligonucleotide
  Antisense strand to SEQ ID NO: 1332254
uauggaauuauaaagccca

SEQ ID NO: 1332256 - RNA, 19 nt, Artificial Sequence
  Description of Artificial Sequence: Synthetic oligonucleotide
  Sense strand starting at position 2877 of SEQ ID NO: 1242231
ugcagaauucugcaaucuc

SEQ ID NO: 1332257 - RNA, 19 nt, Artificial Sequence
  Description of Artificial Sequence: Synthetic oligonucleotide
  Antisense strand to SEQ ID NO: 1332256
gagauugcagaauucugca

SEQ ID NO: 1332258 - RNA, 19 nt, Artificial Sequence
  Description of Artificial Sequence: Synthetic oligonucleotide
  Sense strand starting at position 2956 of SEQ ID NO: 1242231
uuaagaugcuacgugggaa

SEQ ID NO: 1332259 - RNA, 19 nt, Artificial Sequence
  Description of Artificial Sequence: Synthetic oligonucleotide
  Antisense strand to SEQ ID NO: 1332258
uucccacguagcaucuuaa

SEQ ID NO: 1332260 - RNA, 19 nt, Artificial Sequence
  Description of Artificial Sequence: Synthetic oligonucleotide
  Sense strand starting at position 2978 of SEQ ID NO: 1242231
ggcuauagcccauauuacu

SEQ ID NO: 1332261 - RNA, 19 nt, Artificial Sequence
  Description of Artificial Sequence: Synthetic oligonucleotide
  Antisense strand to SEQ ID NO: 1332260
aguaauaugggcuauagcc

SEQ ID NO: 1332262 - RNA, 19 nt, Artificial Sequence
  Description of Artificial Sequence: Synthetic oligonucleotide
  Sense strand starting at position 3318 of SEQ ID NO: 1242231
acuuuaugauugguaggau

SEQ ID NO: 1332263 - RNA, 19 nt, Artificial Sequence
  Description of Artificial Sequence: Synthetic oligonucleotide
  Antisense strand to SEQ ID NO: 1332262
auccuaccaaucauaaagu

SEQ ID NO: 1332264 - RNA, 19 nt, Artificial Sequence
  Description of Artificial Sequence: Synthetic oligonucleotide
  Sense strand starting at position 3321 of SEQ ID NO: 1242231
uuaugauugguaggaucca

SEQ ID NO: 1332265 - RNA, 19 nt, Artificial Sequence
  Description of Artificial Sequence: Synthetic oligonucleotide
  Antisense strand to SEQ ID NO: 1332264
uggauccuaccaaucauaa

SEQ ID NO: 1332266 - RNA, 19 nt, Artificial Sequence
  Description of Artificial Sequence: Synthetic oligonucleotide
  Sense strand starting at position 3515 of SEQ ID NO: 1242231
ugucacauaucugugggau

SEQ ID NO: 1332267 - RNA, 19 nt, Artificial Sequence
  Description of Artificial Sequence: Synthetic oligonucleotide
  Antisense strand to SEQ ID NO: 1332266
aucccacagauaugugaca

SEQ ID NO: 1332268 - RNA, 19 nt, Artificial Sequence
  Description of Artificial Sequence: Synthetic oligonucleotide
  Sense strand starting at position 3516 of SEQ ID NO: 1242231
gucacauaucugugggauu

SEQ ID NO: 1332269 - RNA, 19 nt, Artificial Sequence
  Description of Artificial Sequence: Synthetic oligonucleotide
  Antisense strand to SEQ ID NO: 1332268
aaucccacagauaugugac

SEQ ID NO: 1332270 - RNA, 19 nt, Artificial Sequence
  Description of Artificial Sequence: Synthetic oligonucleotide
  Sense strand starting at position 3583 of SEQ ID NO: 1242231
uugcgaauauuucccucau

SEQ ID NO: 1332271 - RNA, 19 nt, Artificial Sequence
  Description of Artificial Sequence: Synthetic oligonucleotide
  Antisense strand to SEQ ID NO: 1332270
augagggaaauauucgcaa

SEQ ID NO: 1332272 - RNA, 19 nt, Artificial Sequence
  Description of Artificial Sequence: Synthetic oligonucleotide
  Sense strand starting at position 3584 of SEQ ID NO: 1242231
ugcgaauauuucccucauc

SEQ ID NO: 1332273 - RNA, 19 nt, Artificial Sequence
  Description of Artificial Sequence: Synthetic oligonucleotide
  Antisense strand to SEQ ID NO: 1332272
gaugagggaaauauucgca

SEQ ID NO: 1332274 - RNA, 19 nt, Artificial Sequence
  Description of Artificial Sequence: Synthetic oligonucleotide
  Sense strand starting at position 3585 of SEQ ID NO: 1242231
gcgaauauuucccucaucu

SEQ ID NO: 1332275 - RNA, 19 nt, Artificial Sequence
  Description of Artificial Sequence: Synthetic oligonucleotide
  Antisense strand to SEQ ID NO: 1332274
agaugagggaaauauucgc

SEQ ID NO: 1332276 - RNA, 19 nt, Artificial Sequence
  Description of Artificial Sequence: Synthetic oligonucleotide
  Sense strand starting at position 3832 of SEQ ID NO: 1242231
ugauguauccaauagguau

SEQ ID NO: 1332277 - RNA, 19 nt, Artificial Sequence
  Description of Artificial Sequence: Synthetic oligonucleotide
  Antisense strand to SEQ ID NO: 1332276
auaccuauuggauacauca

SEQ ID NO: 1332278 - RNA, 19 nt, Artificial Sequence
  Description of Artificial Sequence: Synthetic oligonucleotide
  Sense strand starting at position 3836 of SEQ ID NO: 1242231
guauccaauagguauuagu

SEQ ID NO: 1332279 - RNA, 19 nt, Artificial Sequence
  Description of Artificial Sequence: Synthetic oligonucleotide
  Antisense strand to SEQ ID NO: 1332278
acuaauaccuauuggauac

SEQ ID NO: 1332280 - RNA, 19 nt, Artificial Sequence
  Description of Artificial Sequence: Synthetic oligonucleotide
  Sense strand starting at position 3846 of SEQ ID NO: 1242231
gguauuagugaugauacuu

SEQ ID NO: 1332281 - RNA, 19 nt, Artificial Sequence
  Description of Artificial Sequence: Synthetic oligonucleotide
  Antisense strand to SEQ ID NO: 1332280
aaguaucaucacuaauacc

SEQ ID NO: 1332282 - RNA, 19 nt, Artificial Sequence
  Description of Artificial Sequence: Synthetic oligonucleotide
  Sense strand starting at position 3876 of SEQ ID NO: 1242231
ugauuugacucaugauuuc

SEQ ID NO: 1332283 - RNA, 19 nt, Artificial Sequence
  Description of Artificial Sequence: Synthetic oligonucleotide
  Antisense strand to SEQ ID NO: 1332282
gaaaucaugagucaaauca

SEQ ID NO: 1332284 - RNA, 19 nt, Artificial Sequence
  Description of Artificial Sequence: Synthetic oligonucleotide
  Sense strand starting at position 3901 of SEQ ID NO: 1242231
ugucuuuccgaauaugaaa

SEQ ID NO: 1332285 - RNA, 19 nt, Artificial Sequence
  Description of Artificial Sequence: Synthetic oligonucleotide
  Antisense strand to SEQ ID NO: 1332284
uuucauauucggaaagaca

SEQ ID NO: 1332286 - RNA, 19 nt, Artificial Sequence
  Description of Artificial Sequence: Synthetic oligonucleotide
  Sense strand starting at position 3953 of SEQ ID NO: 1242231
gaacuagaguaauuauugu

SEQ ID NO: 1332287 - RNA, 19 nt, Artificial Sequence
  Description of Artificial Sequence: Synthetic oligonucleotide
  Antisense strand to SEQ ID NO: 1332286
acaauaauuacucuaguuc

SEQ ID NO: 1332288 - RNA, 19 nt, Artificial Sequence
  Description of Artificial Sequence: Synthetic oligonucleotide
  Sense strand starting at position 140 of SEQ ID NO: 1242232
cagguauacugucuugauc

SEQ ID NO: 1332289 - RNA, 19 nt, Artificial Sequence
  Description of Artificial Sequence: Synthetic oligonucleotide
  Antisense strand to SEQ ID NO: 1332288
gaucaagacaguauaccug

SEQ ID NO: 1332290 - RNA, 19 nt, Artificial Sequence
  Description of Artificial Sequence: Synthetic oligonucleotide
  Sense strand starting at position 148 of SEQ ID NO: 1242232
cugucuugaucugcagaug

SEQ ID NO: 1332291 - RNA, 19 nt, Artificial Sequence
  Description of Artificial Sequence: Synthetic oligonucleotide
  Antisense strand to SEQ ID NO: 1332290
caucugcagaucaagacag

SEQ ID NO: 1332292 - RNA, 19 nt, Artificial Sequence
  Description of Artificial Sequence: Synthetic oligonucleotide
  Sense strand starting at position 149 of SEQ ID NO: 1242232
ugucuugaucugcagauga

SEQ ID NO: 1332293 - RNA, 19 nt, Artificial Sequence
  Description of Artificial Sequence: Synthetic oligonucleotide
  Antisense strand to SEQ ID NO: 1332292
ucaucugcagaucaagaca

SEQ ID NO: 1332294 - RNA, 19 nt, Artificial Sequence
  Description of Artificial Sequence: Synthetic oligonucleotide
  Sense strand starting at position 153 of SEQ ID NO: 1242232
uugaucugcagaugagaga

SEQ ID NO: 1332295 - RNA, 19 nt, Artificial Sequence
  Description of Artificial Sequence: Synthetic oligonucleotide
  Antisense strand to SEQ ID NO: 1332294
ucucucaucugcagaucaa

SEQ ID NO: 1332296 - RNA, 19 nt, Artificial Sequence
  Description of Artificial Sequence: Synthetic oligonucleotide
  Sense strand starting at position 1200 of SEQ ID NO: 1242232
cugaaagggucuuaggauc

SEQ ID NO: 1332297 - RNA, 19 nt, Artificial Sequence
  Description of Artificial Sequence: Synthetic oligonucleotide
  Antisense strand to SEQ ID NO: 1332296
gauccuaagacccuuucag

SEQ ID NO: 1332298 - RNA, 19 nt, Artificial Sequence
  Description of Artificial Sequence: Synthetic oligonucleotide
  Sense strand starting at position 2658 of SEQ ID NO: 1242232
uccuguguggcuggaguau

SEQ ID NO: 1332299 - RNA, 19 nt, Artificial Sequence
  Description of Artificial Sequence: Synthetic oligonucleotide
  Antisense strand to SEQ ID NO: 1332298
auacuccagccacacagga

SEQ ID NO: 1332300 - RNA, 19 nt, Artificial Sequence
  Description of Artificial Sequence: Synthetic oligonucleotide
  Sense strand starting at position 2670 of SEQ ID NO: 1242232
ggaguauagcugcggguua

SEQ ID NO: 1332301 - RNA, 19 nt, Artificial Sequence
  Description of Artificial Sequence: Synthetic oligonucleotide
  Antisense strand to SEQ ID NO: 1332300
uaacccgcagcuauacucc

SEQ ID NO: 1332302 - RNA, 19 nt, Artificial Sequence
  Description of Artificial Sequence: Synthetic oligonucleotide
  Sense strand starting at position 2685 of SEQ ID NO: 1242232
guuagugcuggcaggugaa

SEQ ID NO: 1332303 - RNA, 19 nt, Artificial Sequence
  Description of Artificial Sequence: Synthetic oligonucleotide
  Antisense strand to SEQ ID NO: 1332302
uucaccugccagcacuaac

SEQ ID NO: 1332304 - RNA, 19 nt, Artificial Sequence
  Description of Artificial Sequence: Synthetic oligonucleotide
  Sense strand starting at position 2773 of SEQ ID NO: 1242232
auucuaaguguauaccuaa

SEQ ID NO: 1332305 - RNA, 19 nt, Artificial Sequence
  Description of Artificial Sequence: Synthetic oligonucleotide
  Antisense strand to SEQ ID NO: 1332304
uuagguauacacuuagaau

SEQ ID NO: 1332306 - RNA, 19 nt, Artificial Sequence
  Description of Artificial Sequence: Synthetic oligonucleotide
  Sense strand starting at position 2825 of SEQ ID NO: 1242232
ccugcuacgucuccuuauu

SEQ ID NO: 1332307 - RNA, 19 nt, Artificial Sequence
  Description of Artificial Sequence: Synthetic oligonucleotide
  Antisense strand to SEQ ID NO: 1332306
aauaaggagacguagcagg

SEQ ID NO: 1332308 - RNA, 19 nt, Artificial Sequence
  Description of Artificial Sequence: Synthetic oligonucleotide
  Sense strand starting at position 2834 of SEQ ID NO: 1242232
ucuccuuauuaggcguaau

SEQ ID NO: 1332309 - RNA, 19 nt, Artificial Sequence
  Description of Artificial Sequence: Synthetic oligonucleotide
  Antisense strand to SEQ ID NO: 1332308
auuacgccuaauaaggaga

SEQ ID NO: 1332310 - RNA, 19 nt, Artificial Sequence
  Description of Artificial Sequence: Synthetic oligonucleotide
  Sense strand starting at position 2837 of SEQ ID NO: 1242232
ccuuauuaggcguaauaaa

SEQ ID NO: 1332311 - RNA, 19 nt, Artificial Sequence
  Description of Artificial Sequence: Synthetic oligonucleotide
  Antisense strand to SEQ ID NO: 1332310
uuuauuacgccuaauaagg

SEQ ID NO: 1332312 - RNA, 19 nt, Artificial Sequence
  Description of Artificial Sequence: Synthetic oligonucleotide
  Sense strand starting at position 2857 of SEQ ID NO: 1242232
uuauguggcuuuguaagaa

SEQ ID NO: 1332313 - RNA, 19 nt, Artificial Sequence
  Description of Artificial Sequence: Synthetic oligonucleotide
  Antisense strand to SEQ ID NO: 1332312
uucuuacaaagccacauaa

SEQ ID NO: 1332314 - RNA, 19 nt, Artificial Sequence
  Description of Artificial Sequence: Synthetic oligonucleotide
  Sense strand starting at position 2861 of SEQ ID NO: 1242232
guggcuuuguaagaaauug

SEQ ID NO: 1332315 - RNA, 19 nt, Artificial Sequence
  Description of Artificial Sequence: Synthetic oligonucleotide
  Antisense strand to SEQ ID NO: 1332314
caauuucuuacaaagccac

SEQ ID NO: 1332316 - RNA, 19 nt, Artificial Sequence
  Description of Artificial Sequence: Synthetic oligonucleotide
  Sense strand starting at position 2883 of SEQ ID NO: 1242232
uuuagagaugcauguuaaa

SEQ ID NO: 1332317 - RNA, 19 nt, Artificial Sequence
  Description of Artificial Sequence: Synthetic oligonucleotide
  Antisense strand to SEQ ID NO: 1332316
uuuaacaugcaucucuaaa

SEQ ID NO: 1332318 - RNA, 19 nt, Artificial Sequence
  Description of Artificial Sequence: Synthetic oligonucleotide
  Sense strand starting at position 2886 of SEQ ID NO: 1242232
agagaugcauguuaaagua

SEQ ID NO: 1332319 - RNA, 19 nt, Artificial Sequence
  Description of Artificial Sequence: Synthetic oligonucleotide
  Antisense strand to SEQ ID NO: 1332318
uacuuuaacaugcaucucu

SEQ ID NO: 1332320 - RNA, 19 nt, Artificial Sequence
  Description of Artificial Sequence: Synthetic oligonucleotide
  Sense strand starting at position 2896 of SEQ ID NO: 1242232
guuaaaguauuggguauga

SEQ ID NO: 1332321 - RNA, 19 nt, Artificial Sequence
  Description of Artificial Sequence: Synthetic oligonucleotide
  Antisense strand to SEQ ID NO: 1332320
ucauacccaauacuuuaac

SEQ ID NO: 1332322 - RNA, 19 nt, Artificial Sequence
  Description of Artificial Sequence: Synthetic oligonucleotide
  Sense strand starting at position 2900 of SEQ ID NO: 1242232
aaguauuggguaugaaaug

SEQ ID NO: 1332323 - RNA, 19 nt, Artificial Sequence
  Description of Artificial Sequence: Synthetic oligonucleotide
  Antisense strand to SEQ ID NO: 1332322
cauuucauacccaauacuu

SEQ ID NO: 1332324 - RNA, 19 nt, Artificial Sequence
  Description of Artificial Sequence: Synthetic oligonucleotide
  Sense strand starting at position 2901 of SEQ ID NO: 1242232
aguauuggguaugaaaugu

SEQ ID NO: 1332325 - RNA, 19 nt, Artificial Sequence
  Description of Artificial Sequence: Synthetic oligonucleotide
  Antisense strand to SEQ ID NO: 1332324
acauuucauacccaauacu

SEQ ID NO: 1332326 - RNA, 19 nt, Artificial Sequence
  Description of Artificial Sequence: Synthetic oligonucleotide
  Sense strand starting at position 2905 of SEQ ID NO: 1242232
uuggguaugaaaugucaug

SEQ ID NO: 1332327 - RNA, 19 nt, Artificial Sequence
  Description of Artificial Sequence: Synthetic oligonucleotide
  Antisense strand to SEQ ID NO: 1332326
caugacauuucauacccaa

SEQ ID NO: 1332328 - RNA, 19 nt, Artificial Sequence
  Description of Artificial Sequence: Synthetic oligonucleotide
  Sense strand starting at position 2910 of SEQ ID NO: 1242232
uaugaaaugucaugauuug

SEQ ID NO: 1332329 - RNA, 19 nt, Artificial Sequence
  Description of Artificial Sequence: Synthetic oligonucleotide
  Antisense strand to SEQ ID NO: 1332328
caaaucaugacauuucaua

SEQ ID NO: 1332330 - RNA, 19 nt, Artificial Sequence
  Description of Artificial Sequence: Synthetic oligonucleotide
  Sense strand starting at position 2979 of SEQ ID NO: 1242232
acuugauauuaguugacaa

SEQ ID NO: 1332331 - RNA, 19 nt, Artificial Sequence
  Description of Artificial Sequence: Synthetic oligonucleotide
  Antisense strand to SEQ ID NO: 1332330
uugucaacuaauaucaagu

SEQ ID NO: 1332332 - RNA, 19 nt, Artificial Sequence
  Description of Artificial Sequence: Synthetic oligonucleotide
  Sense strand starting at position 3670 of SEQ ID NO: 1242232
cgcgccuggcuggauuaua

SEQ ID NO: 1332333 - RNA, 19 nt, Artificial Sequence
  Description of Artificial Sequence: Synthetic oligonucleotide
  Antisense strand to SEQ ID NO: 1332332
uauaauccagccaggcgcg

SEQ ID NO: 1332334 - RNA, 19 nt, Artificial Sequence
  Description of Artificial Sequence: Synthetic oligonucleotide
  Sense strand starting at position 3763 of SEQ ID NO: 1242232
augauaccuuucugaagag

SEQ ID NO: 1332335 - RNA, 19 nt, Artificial Sequence
  Description of Artificial Sequence: Synthetic oligonucleotide
  Antisense strand to SEQ ID NO: 1332334
cucuucagaaagguaucau

SEQ ID NO: 1332336 - RNA, 19 nt, Artificial Sequence
  Description of Artificial Sequence: Synthetic oligonucleotide
  Sense strand starting at position 3764 of SEQ ID NO: 1242232
ugauaccuuucugaagagu

SEQ ID NO: 1332337 - RNA, 19 nt, Artificial Sequence
  Description of Artificial Sequence: Synthetic oligonucleotide
  Antisense strand to SEQ ID NO: 1332336
acucuucagaaagguauca

SEQ ID NO: 1332338 - RNA, 19 nt, Artificial Sequence
  Description of Artificial Sequence: Synthetic oligonucleotide
  Sense strand starting at position 3775 of SEQ ID NO: 1242232
ugaagagucucagccaguu

SEQ ID NO: 1332339 - RNA, 19 nt, Artificial Sequence
  Description of Artificial Sequence: Synthetic oligonucleotide
  Antisense strand to SEQ ID NO: 1332338
aacuggcugagacucuuca

SEQ ID NO: 1332340 - RNA, 19 nt, Artificial Sequence
  Description of Artificial Sequence: Synthetic oligonucleotide
  Sense strand starting at position 3781 of SEQ ID NO: 1242232
gucucagccaguuguuguu

SEQ ID NO: 1332341 - RNA, 19 nt, Artificial Sequence
  Description of Artificial Sequence: Synthetic oligonucleotide
  Antisense strand to SEQ ID NO: 1332340
aacaacaacuggcugagac

SEQ ID NO: 1332342 - RNA, 19 nt, Artificial Sequence
  Description of Artificial Sequence: Synthetic oligonucleotide
  Sense strand starting at position 3787 of SEQ ID NO: 1242232
gccaguuguuguuugagau

SEQ ID NO: 1332343 - RNA, 19 nt, Artificial Sequence
  Description of Artificial Sequence: Synthetic oligonucleotide
  Antisense strand to SEQ ID NO: 1332342
aucucaaacaacaacuggc

SEQ ID NO: 1332344 - RNA, 19 nt, Artificial Sequence
  Description of Artificial Sequence: Synthetic oligonucleotide
  Sense strand starting at position 3788 of SEQ ID NO: 1242232
ccaguuguuguuugagaua

SEQ ID NO: 1332345 - RNA, 19 nt, Artificial Sequence
  Description of Artificial Sequence: Synthetic oligonucleotide
  Antisense strand to SEQ ID NO: 1332344
uaucucaaacaacaacugg

SEQ ID NO: 1332346 - RNA, 19 nt, Artificial Sequence
  Description of Artificial Sequence: Synthetic oligonucleotide
  Sense strand starting at position 3791 of SEQ ID NO: 1242232
guuguuguuugagauagau

SEQ ID NO: 1332347 - RNA, 19 nt, Artificial Sequence
  Description of Artificial Sequence: Synthetic oligonucleotide
  Antisense strand to SEQ ID NO: 1332346
aucuaucucaaacaacaac

SEQ ID NO: 1332348 - RNA, 19 nt, Artificial Sequence
  Description of Artificial Sequence: Synthetic oligonucleotide
  Sense strand starting at position 3800 of SEQ ID NO: 1242232
ugagauagaugcugcauca

SEQ ID NO: 1332349 - RNA, 19 nt, Artificial Sequence
  Description of Artificial Sequence: Synthetic oligonucleotide
  Antisense strand to SEQ ID NO: 1332348
ugaugcagcaucuaucuca

SEQ ID NO: 1332350 - RNA, 19 nt, Artificial Sequence
  Description of Artificial Sequence: Synthetic oligonucleotide
  Sense strand starting at position 3823 of SEQ ID NO: 1242232
cucaauuugucugaaugua

SEQ ID NO: 1332351 - RNA, 19 nt, Artificial Sequence
  Description of Artificial Sequence: Synthetic oligonucleotide
  Antisense strand to SEQ ID NO: 1332350
uacauucagacaaauugag

SEQ ID NO: 1332352 - RNA, 19 nt, Artificial Sequence
  Description of Artificial Sequence: Synthetic oligonucleotide
  Sense strand starting at position 3833 of SEQ ID NO: 1242232
cugaauguauccucagggu

SEQ ID NO: 1332353 - RNA, 19 nt, Artificial Sequence
  Description of Artificial Sequence: Synthetic oligonucleotide
  Antisense strand to SEQ ID NO: 1332352
acccugaggauacauucag

SEQ ID NO: 1332354 - RNA, 19 nt, Artificial Sequence
  Description of Artificial Sequence: Synthetic oligonucleotide
  Sense strand starting at position 3846 of SEQ ID NO: 1242232
cagggugucacugauauug

SEQ ID NO: 1332355 - RNA, 19 nt, Artificial Sequence
  Description of Artificial Sequence: Synthetic oligonucleotide
  Antisense strand to SEQ ID NO: 1332354
caauaucagugacacccug

SEQ ID NO: 1332356 - RNA, 19 nt, Artificial Sequence
  Description of Artificial Sequence: Synthetic oligonucleotide
  Sense strand starting at position 3848 of SEQ ID NO: 1242232
gggugucacugauauuguc

SEQ ID NO: 1332357 - RNA, 19 nt, Artificial Sequence
  Description of Artificial Sequence: Synthetic oligonucleotide
  Antisense strand to SEQ ID NO: 1332356
gacaauaucagugacaccc

SEQ ID NO: 1332358 - RNA, 19 nt, Artificial Sequence
  Description of Artificial Sequence: Synthetic oligonucleotide
  Sense strand starting at position 3854 of SEQ ID NO: 1242232
cacugauauugucacagag

SEQ ID NO: 1332359 - RNA, 19 nt, Artificial Sequence
  Description of Artificial Sequence: Synthetic oligonucleotide
  Antisense strand to SEQ ID NO: 1332358
cucugugacaauaucagug

SEQ ID NO: 1332360 - RNA, 19 nt, Artificial Sequence
  Description of Artificial Sequence: Synthetic oligonucleotide
  Sense strand starting at position 3856 of SEQ ID NO: 1242232
cugauauugucacagagau

SEQ ID NO: 1332361 - RNA, 19 nt, Artificial Sequence
  Description of Artificial Sequence: Synthetic oligonucleotide
  Antisense strand to SEQ ID NO: 1332360
aucucugugacaauaucag

SEQ ID NO: 1332362 - RNA, 19 nt, Artificial Sequence
  Description of Artificial Sequence: Synthetic oligonucleotide
  Sense strand starting at position 3866 of SEQ ID NO: 1242232
cacagagauugguccucua

SEQ ID NO: 1332363 - RNA, 19 nt, Artificial Sequence
  Description of Artificial Sequence: Synthetic oligonucleotide
  Antisense strand to SEQ ID NO: 1332362
uagaggaccaaucucugug

SEQ ID NO: 1332364 - RNA, 19 nt, Artificial Sequence
  Description of Artificial Sequence: Synthetic oligonucleotide
  Sense strand starting at position 3869 of SEQ ID NO: 1242232
agagauugguccucuaucu

SEQ ID NO: 1332365 - RNA, 19 nt, Artificial Sequence
  Description of Artificial Sequence: Synthetic oligonucleotide
  Antisense strand to SEQ ID NO: 1332364
agauagaggaccaaucucu

SEQ ID NO: 1332366 - RNA, 19 nt, Artificial Sequence
  Description of Artificial Sequence: Synthetic oligonucleotide
  Sense strand starting at position 3896 of SEQ ID NO: 1242232
uccugcaugcugggaauua

SEQ ID NO: 1332367 - RNA, 19 nt, Artificial Sequence
  Description of Artificial Sequence: Synthetic oligonucleotide
  Antisense strand to SEQ ID NO: 1332366
uaauucccagcaugcagga

SEQ ID NO: 1332368 - RNA, 19 nt, Artificial Sequence
  Description of Artificial Sequence: Synthetic oligonucleotide
  Sense strand starting at position 571 of SEQ ID NO: 1242233
cugaaagggucuuaggauc

SEQ ID NO: 1332369 - RNA, 19 nt, Artificial Sequence
  Description of Artificial Sequence: Synthetic oligonucleotide
  Antisense strand to SEQ ID NO: 1332368
gauccuaagacccuuucag

SEQ ID NO: 1332370 - RNA, 19 nt, Artificial Sequence
  Description of Artificial Sequence: Synthetic oligonucleotide
  Sense strand starting at position 2029 of SEQ ID NO: 1242233
uccuguguggcuggaguau

SEQ ID NO: 1332371 - RNA, 19 nt, Artificial Sequence
  Description of Artificial Sequence: Synthetic oligonucleotide
  Antisense strand to SEQ ID NO: 1332370
auacuccagccacacagga

SEQ ID NO: 1332372 - RNA, 19 nt, Artificial Sequence
  Description of Artificial Sequence: Synthetic oligonucleotide
  Sense strand starting at position 2041 of SEQ ID NO: 1242233
ggaguauagcugcggguua

SEQ ID NO: 1332373 - RNA, 19 nt, Artificial Sequence
  Description of Artificial Sequence: Synthetic oligonucleotide
  Antisense strand to SEQ ID NO: 1332372
uaacccgcagcuauacucc

SEQ ID NO: 1332374 - RNA, 19 nt, Artificial Sequence
  Description of Artificial Sequence: Synthetic oligonucleotide
  Sense strand starting at position 2056 of SEQ ID NO: 1242233
guuagugcuggcaggugaa

SEQ ID NO: 1332375 - RNA, 19 nt, Artificial Sequence
  Description of Artificial Sequence: Synthetic oligonucleotide
  Antisense strand to SEQ ID NO: 1332374
uucaccugccagcacuaac

SEQ ID NO: 1332376 - RNA, 19 nt, Artificial Sequence
  Description of Artificial Sequence: Synthetic oligonucleotide
  Sense strand starting at position 2144 of SEQ ID NO: 1242233
auucuaaguguauaccuaa

SEQ ID NO: 1332377 - RNA, 19 nt, Artificial Sequence
  Description of Artificial Sequence: Synthetic oligonucleotide
  Antisense strand to SEQ ID NO: 1332376
uuagguauacacuuagaau

SEQ ID NO: 1332378 - RNA, 19 nt, Artificial Sequence
  Description of Artificial Sequence: Synthetic oligonucleotide
  Sense strand starting at position 2196 of SEQ ID NO: 1242233
ccugcuacgucuccuuauu

SEQ ID NO: 1332379 - RNA, 19 nt, Artificial Sequence
  Description of Artificial Sequence: Synthetic oligonucleotide
  Antisense strand to SEQ ID NO: 1332378
aauaaggagacguagcagg

SEQ ID NO: 1332380 - RNA, 19 nt, Artificial Sequence
  Description of Artificial Sequence: Synthetic oligonucleotide
  Sense strand starting at position 2205 of SEQ ID NO: 1242233
ucuccuuauuaggcguaau

SEQ ID NO: 1332381 - RNA, 19 nt, Artificial Sequence
  Description of Artificial Sequence: Synthetic oligonucleotide
  Antisense strand to SEQ ID NO: 1332380
auuacgccuaauaaggaga

SEQ ID NO: 1332382 - RNA, 19 nt, Artificial Sequence
  Description of Artificial Sequence: Synthetic oligonucleotide
  Sense strand starting at position 2208 of SEQ ID NO: 1242233
ccuuauuaggcguaauaaa

SEQ ID NO: 1332383 - RNA, 19 nt, Artificial Sequence
  Description of Artificial Sequence: Synthetic oligonucleotide
  Antisense strand to SEQ ID NO: 1332382
uuuauuacgccuaauaagg

SEQ ID NO: 1332384 - RNA, 19 nt, Artificial Sequence
  Description of Artificial Sequence: Synthetic oligonucleotide
  Sense strand starting at position 2228 of SEQ ID NO: 1242233
uuauguggcuuuguaagaa

SEQ ID NO: 1332385 - RNA, 19 nt, Artificial Sequence
  Description of Artificial Sequence: Synthetic oligonucleotide
  Antisense strand to SEQ ID NO: 1332384
uucuuacaaagccacauaa

SEQ ID NO: 1332386 - RNA, 19 nt, Artificial Sequence
  Description of Artificial Sequence: Synthetic oligonucleotide
  Sense strand starting at position 2232 of SEQ ID NO: 1242233
guggcuuuguaagaaauug

SEQ ID NO: 1332387 - RNA, 19 nt, Artificial Sequence
  Description of Artificial Sequence: Synthetic oligonucleotide
  Antisense strand to SEQ ID NO: 1332386
caauuucuuacaaagccac

SEQ ID NO: 1332388 - RNA, 19 nt, Artificial Sequence
  Description of Artificial Sequence: Synthetic oligonucleotide
  Sense strand starting at position 2254 of SEQ ID NO: 1242233
uuuagagaugcauguuaaa

SEQ ID NO: 1332389 - RNA, 19 nt, Artificial Sequence
  Description of Artificial Sequence: Synthetic oligonucleotide
  Antisense strand to SEQ ID NO: 1332388
uuuaacaugcaucucuaaa

SEQ ID NO: 1332390 - RNA, 19 nt, Artificial Sequence
  Description of Artificial Sequence: Synthetic oligonucleotide
  Sense strand starting at position 2257 of SEQ ID NO: 1242233
agagaugcauguuaaagua

SEQ ID NO: 1332391 - RNA, 19 nt, Artificial Sequence
  Description of Artificial Sequence: Synthetic oligonucleotide
  Antisense strand to SEQ ID NO: 1332390
uacuuuaacaugcaucucu

SEQ ID NO: 1332392 - RNA, 19 nt, Artificial Sequence
  Description of Artificial Sequence: Synthetic oligonucleotide
  Sense strand starting at position 2271 of SEQ ID NO: 1242233
aaguauuggguaugaaaug

SEQ ID NO: 1332393 - RNA, 19 nt, Artificial Sequence
  Description of Artificial Sequence: Synthetic oligonucleotide
  Antisense strand to SEQ ID NO: 1332392
cauuucauacccaauacuu

SEQ ID NO: 1332394 - RNA, 19 nt, Artificial Sequence
  Description of Artificial Sequence: Synthetic oligonucleotide
  Sense strand starting at position 2272 of SEQ ID NO: 1242233
aguauuggguaugaaaugu

SEQ ID NO: 1332395 - RNA, 19 nt, Artificial Sequence
  Description of Artificial Sequence: Synthetic oligonucleotide
  Antisense strand to SEQ ID NO: 1332394
acauuucauacccaauacu

SEQ ID NO: 1332396 - RNA, 19 nt, Artificial Sequence
  Description of Artificial Sequence: Synthetic oligonucleotide
  Sense strand starting at position 2276 of SEQ ID NO: 1242233
uuggguaugaaaugucaug

SEQ ID NO: 1332397 - RNA, 19 nt, Artificial Sequence
  Description of Artificial Sequence: Synthetic oligonucleotide
  Antisense strand to SEQ ID NO: 1332396
caugacauuucauacccaa

SEQ ID NO: 1332398 - RNA, 19 nt, Artificial Sequence
  Description of Artificial Sequence: Synthetic oligonucleotide
  Sense strand starting at position 2281 of SEQ ID NO: 1242233
uaugaaaugucaugauuug

SEQ ID NO: 1332399 - RNA, 19 nt, Artificial Sequence
  Description of Artificial Sequence: Synthetic oligonucleotide
  Antisense strand to SEQ ID NO: 1332398
caaaucaugacauuucaua

SEQ ID NO: 1332400 - RNA, 19 nt, Artificial Sequence
  Description of Artificial Sequence: Synthetic oligonucleotide
  Sense strand starting at position 2350 of SEQ ID NO: 1242233
acuugauauuaguugacaa

SEQ ID NO: 1332401 - RNA, 19 nt, Artificial Sequence
  Description of Artificial Sequence: Synthetic oligonucleotide
  Antisense strand to SEQ ID NO: 1332400
uugucaacuaauaucaagu

SEQ ID NO: 1332402 - RNA, 19 nt, Artificial Sequence
  Description of Artificial Sequence: Synthetic oligonucleotide
  Sense strand starting at position 3041 of SEQ ID NO: 1242233
cgcgccuggcuggauuaua

SEQ ID NO: 1332403 - RNA, 19 nt, Artificial Sequence
  Description of Artificial Sequence: Synthetic oligonucleotide
  Antisense strand to SEQ ID NO: 1332402
uauaauccagccaggcgcg

SEQ ID NO: 1332404 - RNA, 19 nt, Artificial Sequence
  Description of Artificial Sequence: Synthetic oligonucleotide
  Sense strand starting at position 3134 of SEQ ID NO: 1242233
augauaccuuucugaagag

SEQ ID NO: 1332405 - RNA, 19 nt, Artificial Sequence
  Description of Artificial Sequence: Synthetic oligonucleotide
  Antisense strand to SEQ ID NO: 1332404
cucuucagaaagguaucau

SEQ ID NO: 1332406 - RNA, 19 nt, Artificial Sequence
  Description of Artificial Sequence: Synthetic oligonucleotide
  Sense strand starting at position 3135 of SEQ ID NO: 1242233
ugauaccuuucugaagagu

SEQ ID NO: 1332407 - RNA, 19 nt, Artificial Sequence
  Description of Artificial Sequence: Synthetic oligonucleotide
  Antisense strand to SEQ ID NO: 1332406
acucuucagaaagguauca

SEQ ID NO: 1332408 - RNA, 19 nt, Artificial Sequence
  Description of Artificial Sequence: Synthetic oligonucleotide
  Sense strand starting at position 3146 of SEQ ID NO: 1242233
ugaagagucucagccaguu

SEQ ID NO: 1332409 - RNA, 19 nt, Artificial Sequence
  Description of Artificial Sequence: Synthetic oligonucleotide
  Antisense strand to SEQ ID NO: 1332408
aacuggcugagacucuuca

SEQ ID NO: 1332410 - RNA, 19 nt, Artificial Sequence
  Description of Artificial Sequence: Synthetic oligonucleotide
  Sense strand starting at position 3152 of SEQ ID NO: 1242233
gucucagccaguuguuguu

SEQ ID NO: 1332411 - RNA, 19 nt, Artificial Sequence
  Description of Artificial Sequence: Synthetic oligonucleotide
  Antisense strand to SEQ ID NO: 1332410
aacaacaacuggcugagac

SEQ ID NO: 1332412 - RNA, 19 nt, Artificial Sequence
  Description of Artificial Sequence: Synthetic oligonucleotide
  Sense strand starting at position 3158 of SEQ ID NO: 1242233
gccaguuguuguuugagau

SEQ ID NO: 1332413 - RNA, 19 nt, Artificial Sequence
  Description of Artificial Sequence: Synthetic oligonucleotide
  Antisense strand to SEQ ID NO: 1332412
aucucaaacaacaacuggc

SEQ ID NO: 1332414 - RNA, 19 nt, Artificial Sequence
  Description of Artificial Sequence: Synthetic oligonucleotide
  Sense strand starting at position 3159 of SEQ ID NO: 1242233
ccaguuguuguuugagaua

SEQ ID NO: 1332415 - RNA, 19 nt, Artificial Sequence
  Description of Artificial Sequence: Synthetic oligonucleotide
  Antisense strand to SEQ ID NO: 1332414
uaucucaaacaacaacugg

SEQ ID NO: 1332416 - RNA, 19 nt, Artificial Sequence
  Description of Artificial Sequence: Synthetic oligonucleotide
  Sense strand starting at position 3162 of SEQ ID NO: 1242233
guuguuguuugagauagau

SEQ ID NO: 1332417 - RNA, 19 nt, Artificial Sequence
  Description of Artificial Sequence: Synthetic oligonucleotide
  Antisense strand to SEQ ID NO: 1332416
aucuaucucaaacaacaac

SEQ ID NO: 1332418 - RNA, 19 nt, Artificial Sequence
  Description of Artificial Sequence: Synthetic oligonucleotide
  Sense strand starting at position 3194 of SEQ ID NO: 1242233
cucaauuugucugaaugua

SEQ ID NO: 1332419 - RNA, 19 nt, Artificial Sequence
  Description of Artificial Sequence: Synthetic oligonucleotide
  Antisense strand to SEQ ID NO: 1332418
uacauucagacaaauugag

SEQ ID NO: 1332420 - RNA, 19 nt, Artificial Sequence
  Description of Artificial Sequence: Synthetic oligonucleotide
  Sense strand starting at position 3204 of SEQ ID NO: 1242233
cugaauguauccucagggu

SEQ ID NO: 1332421 - RNA, 19 nt, Artificial Sequence
  Description of Artificial Sequence: Synthetic oligonucleotide
  Antisense strand to SEQ ID NO: 1332420
acccugaggauacauucag

SEQ ID NO: 1332422 - RNA, 19 nt, Artificial Sequence
  Description of Artificial Sequence: Synthetic oligonucleotide
  Sense strand starting at position 3217 of SEQ ID NO: 1242233
cagggugucacugauauug

SEQ ID NO: 1332423 - RNA, 19 nt, Artificial Sequence
  Description of Artificial Sequence: Synthetic oligonucleotide
  Antisense strand to SEQ ID NO: 1332422
caauaucagugacacccug

SEQ ID NO: 1332424 - RNA, 19 nt, Artificial Sequence
  Description of Artificial Sequence: Synthetic oligonucleotide
  Sense strand starting at position 3225 of SEQ ID NO: 1242233
cacugauauugucacagag

SEQ ID NO: 1332425 - RNA, 19 nt, Artificial Sequence
  Description of Artificial Sequence: Synthetic oligonucleotide
  Antisense strand to SEQ ID NO: 1332424
cucugugacaauaucagug

SEQ ID NO: 1332426 - RNA, 19 nt, Artificial Sequence
  Description of Artificial Sequence: Synthetic oligonucleotide
  Sense strand starting at position 3227 of SEQ ID NO: 1242233
cugauauugucacagagau

SEQ ID NO: 1332427 - RNA, 19 nt, Artificial Sequence
  Description of Artificial Sequence: Synthetic oligonucleotide
  Antisense strand to SEQ ID NO: 1332426
aucucugugacaauaucag

SEQ ID NO: 1332428 - RNA, 19 nt, Artificial Sequence
  Description of Artificial Sequence: Synthetic oligonucleotide
  Sense strand starting at position 3237 of SEQ ID NO: 1242233
cacagagauugguccucua

SEQ ID NO: 1332429 - RNA, 19 nt, Artificial Sequence
  Description of Artificial Sequence: Synthetic oligonucleotide
  Antisense strand to SEQ ID NO: 1332428
uagaggaccaaucucugug

SEQ ID NO: 1332430 - RNA, 19 nt, Artificial Sequence
  Description of Artificial Sequence: Synthetic oligonucleotide
  Sense strand starting at position 3240 of SEQ ID NO: 1242233
agagauugguccucuaucu

SEQ ID NO: 1332431 - RNA, 19 nt, Artificial Sequence
  Description of Artificial Sequence: Synthetic oligonucleotide
  Antisense strand to SEQ ID NO: 1332430
agauagaggaccaaucucu

SEQ ID NO: 1332432 - RNA, 19 nt, Artificial Sequence
  Description of Artificial Sequence: Synthetic oligonucleotide
  Sense strand starting at position 3267 of SEQ ID NO: 1242233
uccugcaugcugggaauua

SEQ ID NO: 1332433 - RNA, 19 nt, Artificial Sequence
  Description of Artificial Sequence: Synthetic oligonucleotide
  Antisense strand to SEQ ID NO: 1332432
uaauucccagcaugcagga

SEQ ID NO: 1332434 - RNA, 19 nt, Artificial Sequence
  Description of Artificial Sequence: Synthetic oligonucleotide
  Sense strand starting at position 3658 of SEQ ID NO: 1242233
acugcucuguacuuugaau

SEQ ID NO: 1332435 - RNA, 19 nt, Artificial Sequence
  Description of Artificial Sequence: Synthetic oligonucleotide
  Antisense strand to SEQ ID NO: 1332434
auucaaaguacagagcagu

SEQ ID NO: 1332436 - RNA, 19 nt, Artificial Sequence
  Description of Artificial Sequence: Synthetic oligonucleotide
  Sense strand starting at position 3713 of SEQ ID NO: 1242233
ccacuuuauugggagcuga

SEQ ID NO: 1332437 - RNA, 19 nt, Artificial Sequence
  Description of Artificial Sequence: Synthetic oligonucleotide
  Antisense strand to SEQ ID NO: 1332436
ucagcucccaauaaagugg

SEQ ID NO: 1332438 - RNA, 19 nt, Artificial Sequence
  Description of Artificial Sequence: Synthetic oligonucleotide
  Sense strand starting at position 3717 of SEQ ID NO: 1242233
uuuauugggagcugaaacu

SEQ ID NO: 1332439 - RNA, 19 nt, Artificial Sequence
  Description of Artificial Sequence: Synthetic oligonucleotide
  Antisense strand to SEQ ID NO: 1332438
aguuucagcucccaauaaa

SEQ ID NO: 1332440 - RNA, 19 nt, Artificial Sequence
  Description of Artificial Sequence: Synthetic oligonucleotide
  Sense strand starting at position 3758 of SEQ ID NO: 1242233
gccagaccucugcauuaga

SEQ ID NO: 1332441 - RNA, 19 nt, Artificial Sequence
  Description of Artificial Sequence: Synthetic oligonucleotide
  Antisense strand to SEQ ID NO: 1332440
ucuaaugcagaggucuggc

SEQ ID NO: 1332442 - RNA, 19 nt, Artificial Sequence
  Description of Artificial Sequence: Synthetic oligonucleotide
  Sense strand starting at position 3817 of SEQ ID NO: 1242233
ggaguaauuucuuuguugu

SEQ ID NO: 1332443 - RNA, 19 nt, Artificial Sequence
  Description of Artificial Sequence: Synthetic oligonucleotide
  Antisense strand to SEQ ID NO: 1332442
acaacaaagaaauuacucc

SEQ ID NO: 1332444 - RNA, 19 nt, Artificial Sequence
  Description of Artificial Sequence: Synthetic oligonucleotide
  Sense strand starting at position 3818 of SEQ ID NO: 1242233
gaguaauuucuuuguuguu

SEQ ID NO: 1332445 - RNA, 19 nt, Artificial Sequence
  Description of Artificial Sequence: Synthetic oligonucleotide
  Antisense strand to SEQ ID NO: 1332444
aacaacaaagaaauuacuc

SEQ ID NO: 1332446 - RNA, 19 nt, Artificial Sequence
  Description of Artificial Sequence: Synthetic oligonucleotide
  Sense strand starting at position 3831 of SEQ ID NO: 1242233
guuguucucuuguuuaaau

SEQ ID NO: 1332447 - RNA, 19 nt, Artificial Sequence
  Description of Artificial Sequence: Synthetic oligonucleotide
  Antisense strand to SEQ ID NO: 1332446
auuuaaacaagagaacaac

SEQ ID NO: 1332448 - RNA, 19 nt, Artificial Sequence
  Description of Artificial Sequence: Synthetic oligonucleotide
  Sense strand starting at position 101 of SEQ ID NO: 1242234
uguugaaacagauguuaag

SEQ ID NO: 1332449 - RNA, 19 nt, Artificial Sequence
  Description of Artificial Sequence: Synthetic oligonucleotide
  Antisense strand to SEQ ID NO: 1332448
cuuaacaucuguuucaaca

SEQ ID NO: 1332450 - RNA, 19 nt, Artificial Sequence
  Description of Artificial Sequence: Synthetic oligonucleotide
  Sense strand starting at position 447 of SEQ ID NO: 1242234
uacguagcuguuuagagaa

SEQ ID NO: 1332451 - RNA, 19 nt, Artificial Sequence
  Description of Artificial Sequence: Synthetic oligonucleotide
  Antisense strand to SEQ ID NO: 1332450
uucucuaaacagcuacgua

SEQ ID NO: 1332452 - RNA, 19 nt, Artificial Sequence
  Description of Artificial Sequence: Synthetic oligonucleotide
  Sense strand starting at position 461 of SEQ ID NO: 1242234
gagaauaccgagugguacu

SEQ ID NO: 1332453 - RNA, 19 nt, Artificial Sequence
  Description of Artificial Sequence: Synthetic oligonucleotide
  Antisense strand to SEQ ID NO: 1332452
aguaccacucgguauucuc

SEQ ID NO: 1332454 - RNA, 19 nt, Artificial Sequence
  Description of Artificial Sequence: Synthetic oligonucleotide
  Sense strand starting at position 462 of SEQ ID NO: 1242234
agaauaccgagugguacuu

SEQ ID NO: 1332455 - RNA, 19 nt, Artificial Sequence
  Description of Artificial Sequence: Synthetic oligonucleotide
  Antisense strand to SEQ ID NO: 1332454
aaguaccacucgguauucu

SEQ ID NO: 1332456 - RNA, 19 nt, Artificial Sequence
  Description of Artificial Sequence: Synthetic oligonucleotide
  Sense strand starting at position 494 of SEQ ID NO: 1242234
guucuuuaacauuggcaaa

SEQ ID NO: 1332457 - RNA, 19 nt, Artificial Sequence
  Description of Artificial Sequence: Synthetic oligonucleotide
  Antisense strand to SEQ ID NO: 1332456
uuugccaauguuaaagaac

SEQ ID NO: 1332458 - RNA, 19 nt, Artificial Sequence
  Description of Artificial Sequence: Synthetic oligonucleotide
  Sense strand starting at position 661 of SEQ ID NO: 1242234
cauaucucacacgagugaa

SEQ ID NO: 1332459 - RNA, 19 nt, Artificial Sequence
  Description of Artificial Sequence: Synthetic oligonucleotide
  Antisense strand to SEQ ID NO: 1332458
uucacucgugugagauaug

SEQ ID NO: 1332460 - RNA, 19 nt, Artificial Sequence
  Description of Artificial Sequence: Synthetic oligonucleotide
  Sense strand starting at position 664 of SEQ ID NO: 1242234
aucucacacgagugaaagu

SEQ ID NO: 1332461 - RNA, 19 nt, Artificial Sequence
  Description of Artificial Sequence: Synthetic oligonucleotide
  Antisense strand to SEQ ID NO: 1332460
acuuucacucgugugagau

SEQ ID NO: 1332462 - RNA, 19 nt, Artificial Sequence
  Description of Artificial Sequence: Synthetic oligonucleotide
  Sense strand starting at position 761 of SEQ ID NO: 1242234
guguauccugcucaacaau

SEQ ID NO: 1332463 - RNA, 19 nt, Artificial Sequence
  Description of Artificial Sequence: Synthetic oligonucleotide
  Antisense strand to SEQ ID NO: 1332462
auuguugagcaggauacac

SEQ ID NO: 1332464 - RNA, 19 nt, Artificial Sequence
  Description of Artificial Sequence: Synthetic oligonucleotide
  Sense strand starting at position 794 of SEQ ID NO: 1242234
cccggaaggcuuggcauuu

SEQ ID NO: 1332465 - RNA, 19 nt, Artificial Sequence
  Description of Artificial Sequence: Synthetic oligonucleotide
  Antisense strand to SEQ ID NO: 1332464
aaaugccaagccuuccggg

SEQ ID NO: 1332466 - RNA, 19 nt, Artificial Sequence
  Description of Artificial Sequence: Synthetic oligonucleotide
  Sense strand starting at position 955 of SEQ ID NO: 1242234
uuagacaauucccuugguu

SEQ ID NO: 1332467 - RNA, 19 nt, Artificial Sequence
  Description of Artificial Sequence: Synthetic oligonucleotide
  Antisense strand to SEQ ID NO: 1332466
aaccaagggaauugucuaa

SEQ ID NO: 1332468 - RNA, 19 nt, Artificial Sequence
  Description of Artificial Sequence: Synthetic oligonucleotide
  Sense strand starting at position 957 of SEQ ID NO: 1242234
agacaauucccuugguuaa

SEQ ID NO: 1332469 - RNA, 19 nt, Artificial Sequence
  Description of Artificial Sequence: Synthetic oligonucleotide
  Antisense strand to SEQ ID NO: 1332468
uuaaccaagggaauugucu

SEQ ID NO: 1332470 - RNA, 19 nt, Artificial Sequence
  Description of Artificial Sequence: Synthetic oligonucleotide
  Sense strand starting at position 958 of SEQ ID NO: 1242234
gacaauucccuugguuaag

SEQ ID NO: 1332471 - RNA, 19 nt, Artificial Sequence
  Description of Artificial Sequence: Synthetic oligonucleotide
  Antisense strand to SEQ ID NO: 1332470
cuuaaccaagggaauuguc

SEQ ID NO: 1332472 - RNA, 19 nt, Artificial Sequence
  Description of Artificial Sequence: Synthetic oligonucleotide
  Sense strand starting at position 959 of SEQ ID NO: 1242234
acaauucccuugguuaaga

SEQ ID NO: 1332473 - RNA, 19 nt, Artificial Sequence
  Description of Artificial Sequence: Synthetic oligonucleotide
  Antisense strand to SEQ ID NO: 1332472
ucuuaaccaagggaauugu

SEQ ID NO: 1332474 - RNA, 19 nt, Artificial Sequence
  Description of Artificial Sequence: Synthetic oligonucleotide
  Sense strand starting at position 967 of SEQ ID NO: 1242234
cuugguuaagagugguuaa

SEQ ID NO: 1332475 - RNA, 19 nt, Artificial Sequence
  Description of Artificial Sequence: Synthetic oligonucleotide
  Antisense strand to SEQ ID NO: 1332474
uuaaccacucuuaaccaag

SEQ ID NO: 1332476 - RNA, 19 nt, Artificial Sequence
  Description of Artificial Sequence: Synthetic oligonucleotide
  Sense strand starting at position 968 of SEQ ID NO: 1242234
uugguuaagagugguuaau

SEQ ID NO: 1332477 - RNA, 19 nt, Artificial Sequence
  Description of Artificial Sequence: Synthetic oligonucleotide
  Antisense strand to SEQ ID NO: 1332476
auuaaccacucuuaaccaa

SEQ ID NO: 1332478 - RNA, 19 nt, Artificial Sequence
  Description of Artificial Sequence: Synthetic oligonucleotide
  Sense strand starting at position 970 of SEQ ID NO: 1242234
gguuaagagugguuaauag

SEQ ID NO: 1332479 - RNA, 19 nt, Artificial Sequence
  Description of Artificial Sequence: Synthetic oligonucleotide
  Antisense strand to SEQ ID NO: 1332478
cuauuaaccacucuuaacc

SEQ ID NO: 1332480 - RNA, 19 nt, Artificial Sequence
  Description of Artificial Sequence: Synthetic oligonucleotide
  Sense strand starting at position 979 of SEQ ID NO: 1242234
ugguuaauaggcuguaaau

SEQ ID NO: 1332481 - RNA, 19 nt, Artificial Sequence
  Description of Artificial Sequence: Synthetic oligonucleotide
  Antisense strand to SEQ ID NO: 1332480
auuuacagccuauuaacca

SEQ ID NO: 1332482 - RNA, 19 nt, Artificial Sequence
  Description of Artificial Sequence: Synthetic oligonucleotide
  Sense strand starting at position 981 of SEQ ID NO: 1242234
guuaauaggcuguaaauau

SEQ ID NO: 1332483 - RNA, 19 nt, Artificial Sequence
  Description of Artificial Sequence: Synthetic oligonucleotide
  Antisense strand to SEQ ID NO: 1332482
auauuuacagccuauuaac

SEQ ID NO: 1332484 - RNA, 19 nt, Artificial Sequence
  Description of Artificial Sequence: Synthetic oligonucleotide
  Sense strand starting at position 1078 of SEQ ID NO: 1242234
ggcguccucaucguuaaau

SEQ ID NO: 1332485 - RNA, 19 nt, Artificial Sequence
  Description of Artificial Sequence: Synthetic oligonucleotide
  Antisense strand to SEQ ID NO: 1332484
auuuaacgaugaggacgcc

SEQ ID NO: 1332486 - RNA, 19 nt, Artificial Sequence
  Description of Artificial Sequence: Synthetic oligonucleotide
  Sense strand starting at position 1177 of SEQ ID NO: 1242234
cgaggagucccucgagacu

SEQ ID NO: 1332487 - RNA, 19 nt, Artificial Sequence
  Description of Artificial Sequence: Synthetic oligonucleotide
  Antisense strand to SEQ ID NO: 1332486
agucucgagggacuccucg

SEQ ID NO: 1332488 - RNA, 19 nt, Artificial Sequence
  Description of Artificial Sequence: Synthetic oligonucleotide
  Sense strand starting at position 1199 of SEQ ID NO: 1242234
cagcucuuccucgagacuu

SEQ ID NO: 1332489 - RNA, 19 nt, Artificial Sequence
  Description of Artificial Sequence: Synthetic oligonucleotide
  Antisense strand to SEQ ID NO: 1332488
aagucucgaggaagagcug

SEQ ID NO: 1332490 - RNA, 19 nt, Artificial Sequence
  Description of Artificial Sequence: Synthetic oligonucleotide
  Sense strand starting at position 1297 of SEQ ID NO: 1242234
gccgucugauuguuuauuu

SEQ ID NO: 1332491 - RNA, 19 nt, Artificial Sequence
  Description of Artificial Sequence: Synthetic oligonucleotide
  Antisense strand to SEQ ID NO: 1332490
aaauaaacaaucagacggc

SEQ ID NO: 1332492 - RNA, 19 nt, Artificial Sequence
  Description of Artificial Sequence: Synthetic oligonucleotide
  Sense strand starting at position 1298 of SEQ ID NO: 1242234
ccgucugauuguuuauuua

SEQ ID NO: 1332493 - RNA, 19 nt, Artificial Sequence
  Description of Artificial Sequence: Synthetic oligonucleotide
  Antisense strand to SEQ ID NO: 1332492
uaaauaaacaaucagacgg

SEQ ID NO: 1332494 - RNA, 19 nt, Artificial Sequence
  Description of Artificial Sequence: Synthetic oligonucleotide
  Sense strand starting at position 1369 of SEQ ID NO: 1242234
acucuuacaagugggauga

SEQ ID NO: 1332495 - RNA, 19 nt, Artificial Sequence
  Description of Artificial Sequence: Synthetic oligonucleotide
  Antisense strand to SEQ ID NO: 1332494
ucaucccacuuguaagagu

SEQ ID NO: 1332496 - RNA, 19 nt, Artificial Sequence
  Description of Artificial Sequence: Synthetic oligonucleotide
  Sense strand starting at position 2676 of SEQ ID NO: 1242234
ggauuuaugugcucgccaa

SEQ ID NO: 1332497 - RNA, 19 nt, Artificial Sequence
  Description of Artificial Sequence: Synthetic oligonucleotide
  Antisense strand to SEQ ID NO: 1332496
uuggcgagcacauaaaucc

SEQ ID NO: 1332498 - RNA, 19 nt, Artificial Sequence
  Description of Artificial Sequence: Synthetic oligonucleotide
  Sense strand starting at position 2677 of SEQ ID NO: 1242234
gauuuaugugcucgccaaa

SEQ ID NO: 1332499 - RNA, 19 nt, Artificial Sequence
  Description of Artificial Sequence: Synthetic oligonucleotide
  Antisense strand to SEQ ID NO: 1332498
uuuggcgagcacauaaauc

SEQ ID NO: 1332500 - RNA, 19 nt, Artificial Sequence
  Description of Artificial Sequence: Synthetic oligonucleotide
  Sense strand starting at position 2961 of SEQ ID NO: 1242234
gccagucuucucgcaguaa

SEQ ID NO: 1332501 - RNA, 19 nt, Artificial Sequence
  Description of Artificial Sequence: Synthetic oligonucleotide
  Antisense strand to SEQ ID NO: 1332500
uuacugcgagaagacuggc

SEQ ID NO: 1332502 - RNA, 19 nt, Artificial Sequence
  Description of Artificial Sequence: Synthetic oligonucleotide
  Sense strand starting at position 3087 of SEQ ID NO: 1242234
cuuaguaaucgugaggcag

SEQ ID NO: 1332503 - RNA, 19 nt, Artificial Sequence
  Description of Artificial Sequence: Synthetic oligonucleotide
  Antisense strand to SEQ ID NO: 1332502
cugccucacgauuacuaag

SEQ ID NO: 1332504 - RNA, 19 nt, Artificial Sequence
  Description of Artificial Sequence: Synthetic oligonucleotide
  Sense strand starting at position 3491 of SEQ ID NO: 1242234
ucaugcuaguucuuugaaa

SEQ ID NO: 1332505 - RNA, 19 nt, Artificial Sequence
  Description of Artificial Sequence: Synthetic oligonucleotide
  Antisense strand to SEQ ID NO: 1332504
uuucaaagaacuagcauga

SEQ ID NO: 1332506 - RNA, 19 nt, Artificial Sequence
  Description of Artificial Sequence: Synthetic oligonucleotide
  Sense strand starting at position 3493 of SEQ ID NO: 1242234
augcuaguucuuugaaaca

SEQ ID NO: 1332507 - RNA, 19 nt, Artificial Sequence
  Description of Artificial Sequence: Synthetic oligonucleotide
  Antisense strand to SEQ ID NO: 1332506
uguuucaaagaacuagcau

SEQ ID NO: 1332508 - RNA, 19 nt, Artificial Sequence
  Description of Artificial Sequence: Synthetic oligonucleotide
  Sense strand starting at position 3527 of SEQ ID NO: 1242234
gaaacacaugcuuaugguu

SEQ ID NO: 1332509 - RNA, 19 nt, Artificial Sequence
  Description of Artificial Sequence: Synthetic oligonucleotide
  Antisense strand to SEQ ID NO: 1332508
aaccauaagcauguguuuc

SEQ ID NO: 1332510 - RNA, 19 nt, Artificial Sequence
  Description of Artificial Sequence: Synthetic oligonucleotide
  Sense strand starting at position 3582 of SEQ ID NO: 1242234
ugguuagaguuguuaacca

SEQ ID NO: 1332511 - RNA, 19 nt, Artificial Sequence
  Description of Artificial Sequence: Synthetic oligonucleotide
  Antisense strand to SEQ ID NO: 1332510
ugguuaacaacucuaacca

SEQ ID NO: 1332512 - RNA, 19 nt, Artificial Sequence
  Description of Artificial Sequence: Synthetic oligonucleotide
  Sense strand starting at position 3586 of SEQ ID NO: 1242234
uagaguuguuaaccagcaa

SEQ ID NO: 1332513 - RNA, 19 nt, Artificial Sequence
  Description of Artificial Sequence: Synthetic oligonucleotide
  Antisense strand to SEQ ID NO: 1332512
uugcugguuaacaacucua

SEQ ID NO: 1332514 - RNA, 19 nt, Artificial Sequence
  Description of Artificial Sequence: Synthetic oligonucleotide
  Sense strand starting at position 3613 of SEQ ID NO: 1242234
ccuaaauacccgugauuga

SEQ ID NO: 1332515 - RNA, 19 nt, Artificial Sequence
  Description of Artificial Sequence: Synthetic oligonucleotide
  Antisense strand to SEQ ID NO: 1332514
ucaaucacggguauuuagg

SEQ ID NO: 1332516 - RNA, 19 nt, Artificial Sequence
  Description of Artificial Sequence: Synthetic oligonucleotide
  Sense strand starting at position 3614 of SEQ ID NO: 1242234
cuaaauacccgugauugac

SEQ ID NO: 1332517 - RNA, 19 nt, Artificial Sequence
  Description of Artificial Sequence: Synthetic oligonucleotide
  Antisense strand to SEQ ID NO: 1332516
gucaaucacggguauuuag

SEQ ID NO: 1332518 - RNA, 19 nt, Artificial Sequence
  Description of Artificial Sequence: Synthetic oligonucleotide
  Sense strand starting at position 3823 of SEQ ID NO: 1242234
accuauaacguguaauaug

SEQ ID NO: 1332519 - RNA, 19 nt, Artificial Sequence
  Description of Artificial Sequence: Synthetic oligonucleotide
  Antisense strand to SEQ ID NO: 1332518
cauauuacacguuauaggu

SEQ ID NO: 1332520 - RNA, 19 nt, Artificial Sequence
  Description of Artificial Sequence: Synthetic oligonucleotide
  Sense strand starting at position 3840 of SEQ ID NO: 1242234
ugacuucugagaugaagcu

SEQ ID NO: 1332521 - RNA, 19 nt, Artificial Sequence
  Description of Artificial Sequence: Synthetic oligonucleotide
  Antisense strand to SEQ ID NO: 1332520
agcuucaucucagaaguca

SEQ ID NO: 1332522 - RNA, 19 nt, Artificial Sequence
  Description of Artificial Sequence: Synthetic oligonucleotide
  Sense strand starting at position 3849 of SEQ ID NO: 1242234
agaugaagcuuacauuuau

SEQ ID NO: 1332523 - RNA, 19 nt, Artificial Sequence
  Description of Artificial Sequence: Synthetic oligonucleotide
  Antisense strand to SEQ ID NO: 1332522
auaaauguaagcuucaucu

SEQ ID NO: 1332524 - RNA, 19 nt, Artificial Sequence
  Description of Artificial Sequence: Synthetic oligonucleotide
  Sense strand starting at position 3888 of SEQ ID NO: 1242234
augaguuguggcuaauaac

SEQ ID NO: 1332525 - RNA, 19 nt, Artificial Sequence
  Description of Artificial Sequence: Synthetic oligonucleotide
  Antisense strand to SEQ ID NO: 1332524
guuauuagccacaacucau

SEQ ID NO: 1332526 - RNA, 19 nt, Artificial Sequence
  Description of Artificial Sequence: Synthetic oligonucleotide
  Sense strand starting at position 3964 of SEQ ID NO: 1242234
uguauaucagguuaauauc

SEQ ID NO: 1332527 - RNA, 19 nt, Artificial Sequence
  Description of Artificial Sequence: Synthetic oligonucleotide
  Antisense strand to SEQ ID NO: 1332526
gauauuaaccugauauaca

SEQ ID NO: 1332528 - RNA, 19 nt, Artificial Sequence
  Description of Artificial Sequence: Synthetic oligonucleotide
  Sense strand starting at position 195 of SEQ ID NO: 1242235
gucauauacugccucauau

SEQ ID NO: 1332529 - RNA, 19 nt, Artificial Sequence
  Description of Artificial Sequence: Synthetic oligonucleotide
  Antisense strand to SEQ ID NO: 1332528
auaugaggcaguauaugac

SEQ ID NO: 1332530 - RNA, 19 nt, Artificial Sequence
  Description of Artificial Sequence: Synthetic oligonucleotide
  Sense strand starting at position 395 of SEQ ID NO: 1242235
gcuugagcccugggaauug

SEQ ID NO: 1332531 - RNA, 19 nt, Artificial Sequence
  Description of Artificial Sequence: Synthetic oligonucleotide
  Antisense strand to SEQ ID NO: 1332530
caauucccagggcucaagc

SEQ ID NO: 1332532 - RNA, 19 nt, Artificial Sequence
  Description of Artificial Sequence: Synthetic oligonucleotide
  Sense strand starting at position 433 of SEQ ID NO: 1242235
ugaugaggcuaucucuaca

SEQ ID NO: 1332533 - RNA, 19 nt, Artificial Sequence
  Description of Artificial Sequence: Synthetic oligonucleotide
  Antisense strand to SEQ ID NO: 1332532
uguagagauagccucauca

SEQ ID NO: 1332534 - RNA, 19 nt, Artificial Sequence
  Description of Artificial Sequence: Synthetic oligonucleotide
  Sense strand starting at position 562 of SEQ ID NO: 1242235
cggugaucacaucauugua

SEQ ID NO: 1332535 - RNA, 19 nt, Artificial Sequence
  Description of Artificial Sequence: Synthetic oligonucleotide
  Antisense strand to SEQ ID NO: 1332534
uacaaugaugugaucaccg

SEQ ID NO: 1332536 - RNA, 19 nt, Artificial Sequence
  Description of Artificial Sequence: Synthetic oligonucleotide
  Sense strand starting at position 564 of SEQ ID NO: 1242235
gugaucacaucauuguacu

SEQ ID NO: 1332537 - RNA, 19 nt, Artificial Sequence
  Description of Artificial Sequence: Synthetic oligonucleotide
  Antisense strand to SEQ ID NO: 1332536
aguacaaugaugugaucac

SEQ ID NO: 1332538 - RNA, 19 nt, Artificial Sequence
  Description of Artificial Sequence: Synthetic oligonucleotide
  Sense strand starting at position 672 of SEQ ID NO: 1242235
auguguauaccauguuaua

SEQ ID NO: 1332539 - RNA, 19 nt, Artificial Sequence
  Description of Artificial Sequence: Synthetic oligonucleotide
  Antisense strand to SEQ ID NO: 1332538
uauaacaugguauacacau

SEQ ID NO: 1332540 - RNA, 19 nt, Artificial Sequence
  Description of Artificial Sequence: Synthetic oligonucleotide
  Sense strand starting at position 697 of SEQ ID NO: 1242235
gguugagccauauguaaua

SEQ ID NO: 1332541 - RNA, 19 nt, Artificial Sequence
  Description of Artificial Sequence: Synthetic oligonucleotide
  Antisense strand to SEQ ID NO: 1332540
uauuacauauggcucaacc

SEQ ID NO: 1332542 - RNA, 19 nt, Artificial Sequence
  Description of Artificial Sequence: Synthetic oligonucleotide
  Sense strand starting at position 812 of SEQ ID NO: 1242235
ccagcaucccuguaccuua

SEQ ID NO: 1332543 - RNA, 19 nt, Artificial Sequence
  Description of Artificial Sequence: Synthetic oligonucleotide
  Antisense strand to SEQ ID NO: 1332542
uaagguacagggaugcugg

SEQ ID NO: 1332544 - RNA, 19 nt, Artificial Sequence
  Description of Artificial Sequence: Synthetic oligonucleotide
  Sense strand starting at position 869 of SEQ ID NO: 1242235
uugugaugucugcgauuua

SEQ ID NO: 1332545 - RNA, 19 nt, Artificial Sequence
  Description of Artificial Sequence: Synthetic oligonucleotide
  Antisense strand to SEQ ID NO: 1332544
uaaaucgcagacaucacaa

SEQ ID NO: 1332546 - RNA, 19 nt, Artificial Sequence
  Description of Artificial Sequence: Synthetic oligonucleotide
  Sense strand starting at position 1102 of SEQ ID NO: 1242235
uagggaaguucguuauauu

SEQ ID NO: 1332547 - RNA, 19 nt, Artificial Sequence
  Description of Artificial Sequence: Synthetic oligonucleotide
  Antisense strand to SEQ ID NO: 1332546
aauauaacgaacuucccua

SEQ ID NO: 1332548 - RNA, 19 nt, Artificial Sequence
  Description of Artificial Sequence: Synthetic oligonucleotide
  Sense strand starting at position 1103 of SEQ ID NO: 1242235
agggaaguucguuauauua

SEQ ID NO: 1332549 - RNA, 19 nt, Artificial Sequence
  Description of Artificial Sequence: Synthetic oligonucleotide
  Antisense strand to SEQ ID NO: 1332548
uaauauaacgaacuucccu

SEQ ID NO: 1332550 - RNA, 19 nt, Artificial Sequence
  Description of Artificial Sequence: Synthetic oligonucleotide
  Sense strand starting at position 1111 of SEQ ID NO: 1242235
ucguuauauuacucuacuu

SEQ ID NO: 1332551 - RNA, 19 nt, Artificial Sequence
  Description of Artificial Sequence: Synthetic oligonucleotide
  Antisense strand to SEQ ID NO: 1332550
aaguagaguaauauaacga

SEQ ID NO: 1332552 - RNA, 19 nt, Artificial Sequence
  Description of Artificial Sequence: Synthetic oligonucleotide
  Sense strand starting at position 1242 of SEQ ID NO: 1242235
caaacaagguauccugagu

SEQ ID NO: 1332553 - RNA, 19 nt, Artificial Sequence
  Description of Artificial Sequence: Synthetic oligonucleotide
  Antisense strand to SEQ ID NO: 1332552
acucaggauaccuuguuug

SEQ ID NO: 1332554 - RNA, 19 nt, Artificial Sequence
  Description of Artificial Sequence: Synthetic oligonucleotide
  Sense strand starting at position 1995 of SEQ ID NO: 1242235
cggaaguagccggguaaga

SEQ ID NO: 1332555 - RNA, 19 nt, Artificial Sequence
  Description of Artificial Sequence: Synthetic oligonucleotide
  Antisense strand to SEQ ID NO: 1332554
ucuuacccggcuacuuccg

SEQ ID NO: 1332556 - RNA, 19 nt, Artificial Sequence
  Description of Artificial Sequence: Synthetic oligonucleotide
  Sense strand starting at position 2137 of SEQ ID NO: 1242235
gagggcuucccugaaacgu

SEQ ID NO: 1332557 - RNA, 19 nt, Artificial Sequence
  Description of Artificial Sequence: Synthetic oligonucleotide
  Antisense strand to SEQ ID NO: 1332556
acguuucagggaagcccuc

SEQ ID NO: 1332558 - RNA, 19 nt, Artificial Sequence
  Description of Artificial Sequence: Synthetic oligonucleotide
  Sense strand starting at position 2362 of SEQ ID NO: 1242235
ggcucauugucuccuggau

SEQ ID NO: 1332559 - RNA, 19 nt, Artificial Sequence
  Description of Artificial Sequence: Synthetic oligonucleotide
  Antisense strand to SEQ ID NO: 1332558
auccaggagacaaugagcc

SEQ ID NO: 1332560 - RNA, 19 nt, Artificial Sequence
  Description of Artificial Sequence: Synthetic oligonucleotide
  Sense strand starting at position 2442 of SEQ ID NO: 1242235
aaggcuugaugagcagaaa

SEQ ID NO: 1332561 - RNA, 19 nt, Artificial Sequence
  Description of Artificial Sequence: Synthetic oligonucleotide
  Antisense strand to SEQ ID NO: 1332560
uuucugcucaucaagccuu

SEQ ID NO: 1332562 - RNA, 19 nt, Artificial Sequence
  Description of Artificial Sequence: Synthetic oligonucleotide
  Sense strand starting at position 2491 of SEQ ID NO: 1242235
aucuucuagucuuuaccga

SEQ ID NO: 1332563 - RNA, 19 nt, Artificial Sequence
  Description of Artificial Sequence: Synthetic oligonucleotide
  Antisense strand to SEQ ID NO: 1332562
ucgguaaagacuagaagau

SEQ ID NO: 1332564 - RNA, 19 nt, Artificial Sequence
  Description of Artificial Sequence: Synthetic oligonucleotide
  Sense strand starting at position 2532 of SEQ ID NO: 1242235
ugaggaauucuuggugucu

SEQ ID NO: 1332565 - RNA, 19 nt, Artificial Sequence
  Description of Artificial Sequence: Synthetic oligonucleotide
  Antisense strand to SEQ ID NO: 1332564
agacaccaagaauuccuca

SEQ ID NO: 1332566 - RNA, 19 nt, Artificial Sequence
  Description of Artificial Sequence: Synthetic oligonucleotide
  Sense strand starting at position 2533 of SEQ ID NO: 1242235
gaggaauucuuggugucuu

SEQ ID NO: 1332567 - RNA, 19 nt, Artificial Sequence
  Description of Artificial Sequence: Synthetic oligonucleotide
  Antisense strand to SEQ ID NO: 1332566
aagacaccaagaauuccuc

SEQ ID NO: 1332568 - RNA, 19 nt, Artificial Sequence
  Description of Artificial Sequence: Synthetic oligonucleotide
  Sense strand starting at position 2699 of SEQ ID NO: 1242235
accugaacugauugauguu

SEQ ID NO: 1332569 - RNA, 19 nt, Artificial Sequence
  Description of Artificial Sequence: Synthetic oligonucleotide
  Antisense strand to SEQ ID NO: 1332568
aacaucaaucaguucaggu

SEQ ID NO: 1332570 - RNA, 19 nt, Artificial Sequence
  Description of Artificial Sequence: Synthetic oligonucleotide
  Sense strand starting at position 2706 of SEQ ID NO: 1242235
cugauugauguugaggagu

SEQ ID NO: 1332571 - RNA, 19 nt, Artificial Sequence
  Description of Artificial Sequence: Synthetic oligonucleotide
  Antisense strand to SEQ ID NO: 1332570
acuccucaacaucaaucag

SEQ ID NO: 1332572 - RNA, 19 nt, Artificial Sequence
  Description of Artificial Sequence: Synthetic oligonucleotide
  Sense strand starting at position 2939 of SEQ ID NO: 1242235
guccuucugcaguggaaac

SEQ ID NO: 1332573 - RNA, 19 nt, Artificial Sequence
  Description of Artificial Sequence: Synthetic oligonucleotide
  Antisense strand to SEQ ID NO: 1332572
guuuccacugcagaaggac

SEQ ID NO: 1332574 - RNA, 19 nt, Artificial Sequence
  Description of Artificial Sequence: Synthetic oligonucleotide
  Sense strand starting at position 2957 of SEQ ID NO: 1242235
cauggaugucccugaguug

SEQ ID NO: 1332575 - RNA, 19 nt, Artificial Sequence
  Description of Artificial Sequence: Synthetic oligonucleotide
  Antisense strand to SEQ ID NO: 1332574
caacucagggacauccaug

SEQ ID NO: 1332576 - RNA, 19 nt, Artificial Sequence
  Description of Artificial Sequence: Synthetic oligonucleotide
  Sense strand starting at position 3062 of SEQ ID NO: 1242235
cugucuuucccacacugua

SEQ ID NO: 1332577 - RNA, 19 nt, Artificial Sequence
  Description of Artificial Sequence: Synthetic oligonucleotide
  Antisense strand to SEQ ID NO: 1332576
uacagugugggaaagacag

SEQ ID NO: 1332578 - RNA, 19 nt, Artificial Sequence
  Description of Artificial Sequence: Synthetic oligonucleotide
  Sense strand starting at position 3075 of SEQ ID NO: 1242235
acuguauuguaauugguau

SEQ ID NO: 1332579 - RNA, 19 nt, Artificial Sequence
  Description of Artificial Sequence: Synthetic oligonucleotide
  Antisense strand to SEQ ID NO: 1332578
auaccaauuacaauacagu

SEQ ID NO: 1332580 - RNA, 19 nt, Artificial Sequence
  Description of Artificial Sequence: Synthetic oligonucleotide
  Sense strand starting at position 3076 of SEQ ID NO: 1242235
cuguauuguaauugguaug

SEQ ID NO: 1332581 - RNA, 19 nt, Artificial Sequence
  Description of Artificial Sequence: Synthetic oligonucleotide
  Antisense strand to SEQ ID NO: 1332580
cauaccaauuacaauacag

SEQ ID NO: 1332582 - RNA, 19 nt, Artificial Sequence
  Description of Artificial Sequence: Synthetic oligonucleotide
  Sense strand starting at position 3081 of SEQ ID NO: 1242235
uuguaauugguaugguaug

SEQ ID NO: 1332583 - RNA, 19 nt, Artificial Sequence
  Description of Artificial Sequence: Synthetic oligonucleotide
  Antisense strand to SEQ ID NO: 1332582
cauaccauaccaauuacaa

SEQ ID NO: 1332584 - RNA, 19 nt, Artificial Sequence
  Description of Artificial Sequence: Synthetic oligonucleotide
  Sense strand starting at position 3129 of SEQ ID NO: 1242235
gagugcugggacuguauuu

SEQ ID NO: 1332585 - RNA, 19 nt, Artificial Sequence
  Description of Artificial Sequence: Synthetic oligonucleotide
  Antisense strand to SEQ ID NO: 1332584
aaauacagucccagcacuc

SEQ ID NO: 1332586 - RNA, 19 nt, Artificial Sequence
  Description of Artificial Sequence: Synthetic oligonucleotide
  Sense strand starting at position 3140 of SEQ ID NO: 1242235
cuguauuucugccauuucu

SEQ ID NO: 1332587 - RNA, 19 nt, Artificial Sequence
  Description of Artificial Sequence: Synthetic oligonucleotide
  Antisense strand to SEQ ID NO: 1332586
agaaauggcagaaauacag

SEQ ID NO: 1332588 - RNA, 19 nt, Artificial Sequence
  Description of Artificial Sequence: Synthetic oligonucleotide
  Sense strand starting at position 3164 of SEQ ID NO: 1242235
cagggucuaguguacagaa

SEQ ID NO: 1332589 - RNA, 19 nt, Artificial Sequence
  Description of Artificial Sequence: Synthetic oligonucleotide
  Antisense strand to SEQ ID NO: 1332588
uucuguacacuagacccug

SEQ ID NO: 1332590 - RNA, 19 nt, Artificial Sequence
  Description of Artificial Sequence: Synthetic oligonucleotide
  Sense strand starting at position 3386 of SEQ ID NO: 1242235
uggaguuugcagugaagug

SEQ ID NO: 1332591 - RNA, 19 nt, Artificial Sequence
  Description of Artificial Sequence: Synthetic oligonucleotide
  Antisense strand to SEQ ID NO: 1332590
cacuucacugcaaacucca

SEQ ID NO: 1332592 - RNA, 19 nt, Artificial Sequence
  Description of Artificial Sequence: Synthetic oligonucleotide
  Sense strand starting at position 3402 of SEQ ID NO: 1242235
gugagaucaagccauugua

SEQ ID NO: 1332593 - RNA, 19 nt, Artificial Sequence
  Description of Artificial Sequence: Synthetic oligonucleotide
  Antisense strand to SEQ ID NO: 1332592
uacaauggcuugaucucac

SEQ ID NO: 1332594 - RNA, 19 nt, Artificial Sequence
  Description of Artificial Sequence: Synthetic oligonucleotide
  Sense strand starting at position 3405 of SEQ ID NO: 1242235
agaucaagccauuguacuu

SEQ ID NO: 1332595 - RNA, 19 nt, Artificial Sequence
  Description of Artificial Sequence: Synthetic oligonucleotide
  Antisense strand to SEQ ID NO: 1332594
aaguacaauggcuugaucu

SEQ ID NO: 1332596 - RNA, 19 nt, Artificial Sequence
  Description of Artificial Sequence: Synthetic oligonucleotide
  Sense strand starting at position 3507 of SEQ ID NO: 1242235
guggaagugccauauuaua

SEQ ID NO: 1332597 - RNA, 19 nt, Artificial Sequence
  Description of Artificial Sequence: Synthetic oligonucleotide
  Antisense strand to SEQ ID NO: 1332596
uauaauauggcacuuccac

SEQ ID NO: 1332598 - RNA, 19 nt, Artificial Sequence
  Description of Artificial Sequence: Synthetic oligonucleotide
  Sense strand starting at position 3534 of SEQ ID NO: 1242235
gcauccaagcucuaugcuu

SEQ ID NO: 1332599 - RNA, 19 nt, Artificial Sequence
  Description of Artificial Sequence: Synthetic oligonucleotide
  Antisense strand to SEQ ID NO: 1332598
aagcauagagcuuggaugc

SEQ ID NO: 1332600 - RNA, 19 nt, Artificial Sequence
  Description of Artificial Sequence: Synthetic oligonucleotide
  Sense strand starting at position 3707 of SEQ ID NO: 1242235
aaguucuugggcugcagau

SEQ ID NO: 1332601 - RNA, 19 nt, Artificial Sequence
  Description of Artificial Sequence: Synthetic oligonucleotide
  Antisense strand to SEQ ID NO: 1332600
aucugcagcccaagaacuu

SEQ ID NO: 1332602 - RNA, 19 nt, Artificial Sequence
  Description of Artificial Sequence: Synthetic oligonucleotide
  Sense strand starting at position 3741 of SEQ ID NO: 1242235
gugggauugcagcauucau

SEQ ID NO: 1332603 - RNA, 19 nt, Artificial Sequence
  Description of Artificial Sequence: Synthetic oligonucleotide
  Antisense strand to SEQ ID NO: 1332602
augaaugcugcaaucccac

SEQ ID NO: 1332604 - RNA, 19 nt, Artificial Sequence
  Description of Artificial Sequence: Synthetic oligonucleotide
  Sense strand starting at position 3867 of SEQ ID NO: 1242235
ggaccagacucauagauuu

SEQ ID NO: 1332605 - RNA, 19 nt, Artificial Sequence
  Description of Artificial Sequence: Synthetic oligonucleotide
  Antisense strand to SEQ ID NO: 1332604
aaaucuaugagucuggucc

SEQ ID NO: 1332606 - RNA, 19 nt, Artificial Sequence
  Description of Artificial Sequence: Synthetic oligonucleotide
  Sense strand starting at position 3969 of SEQ ID NO: 1242235
ggauggagcguuggaagaa

SEQ ID NO: 1332607 - RNA, 19 nt, Artificial Sequence
  Description of Artificial Sequence: Synthetic oligonucleotide
  Antisense strand to SEQ ID NO: 1332606
uucuuccaacgcuccaucc

SEQ ID NO: 1332608 - RNA, 19 nt, Artificial Sequence
  Description of Artificial Sequence: Synthetic oligonucleotide
  Sense strand starting at position 4 of SEQ ID NO: 1242236
gccgcaagauguucuucua

SEQ ID NO: 1332609 - RNA, 19 nt, Artificial Sequence
  Description of Artificial Sequence: Synthetic oligonucleotide
  Antisense strand to SEQ ID NO: 1332608
uagaagaacaucuugcggc

SEQ ID NO: 1332610 - RNA, 19 nt, Artificial Sequence
  Description of Artificial Sequence: Synthetic oligonucleotide
  Sense strand starting at position 146 of SEQ ID NO: 1242236
gccugucacacggacagau

SEQ ID NO: 1332611 - RNA, 19 nt, Artificial Sequence
  Description of Artificial Sequence: Synthetic oligonucleotide
  Antisense strand to SEQ ID NO: 1332610
aucuguccgugugacaggc

SEQ ID NO: 1332612 - RNA, 19 nt, Artificial Sequence
  Description of Artificial Sequence: Synthetic oligonucleotide
  Sense strand starting at position 158 of SEQ ID NO: 1242236
gacagaugcucccugaagu

SEQ ID NO: 1332613 - RNA, 19 nt, Artificial Sequence
  Description of Artificial Sequence: Synthetic oligonucleotide
  Antisense strand to SEQ ID NO: 1332612
acuucagggagcaucuguc

SEQ ID NO: 1332614 - RNA, 19 nt, Artificial Sequence
  Description of Artificial Sequence: Synthetic oligonucleotide
  Sense strand starting at position 191 of SEQ ID NO: 1242236
uguguaucugugugccuua

SEQ ID NO: 1332615 - RNA, 19 nt, Artificial Sequence
  Description of Artificial Sequence: Synthetic oligonucleotide
  Antisense strand to SEQ ID NO: 1332614
uaaggcacacagauacaca

SEQ ID NO: 1332616 - RNA, 19 nt, Artificial Sequence
  Description of Artificial Sequence: Synthetic oligonucleotide
  Sense strand starting at position 196 of SEQ ID NO: 1242236
aucugugugccuuagagac

SEQ ID NO: 1332617 - RNA, 19 nt, Artificial Sequence
  Description of Artificial Sequence: Synthetic oligonucleotide
  Antisense strand to SEQ ID NO: 1332616
gucucuaaggcacacagau

SEQ ID NO: 1332618 - RNA, 19 nt, Artificial Sequence
  Description of Artificial Sequence: Synthetic oligonucleotide
  Sense strand starting at position 219 of SEQ ID NO: 1242236
acaucugcauccuuggaaa

SEQ ID NO: 1332619 - RNA, 19 nt, Artificial Sequence
  Description of Artificial Sequence: Synthetic oligonucleotide
  Antisense strand to SEQ ID NO: 1332618
uuuccaaggaugcagaugu

SEQ ID NO: 1332620 - RNA, 19 nt, Artificial Sequence
  Description of Artificial Sequence: Synthetic oligonucleotide
  Sense strand starting at position 261 of SEQ ID NO: 1242236
cuauuuaaauuguauggga

SEQ ID NO: 1332621 - RNA, 19 nt, Artificial Sequence
  Description of Artificial Sequence: Synthetic oligonucleotide
  Antisense strand to SEQ ID NO: 1332620
ucccauacaauuuaaauag

SEQ ID NO: 1332622 - RNA, 19 nt, Artificial Sequence
  Description of Artificial Sequence: Synthetic oligonucleotide
  Sense strand starting at position 386 of SEQ ID NO: 1242236
ggcucacucagagaaaguu

SEQ ID NO: 1332623 - RNA, 19 nt, Artificial Sequence
  Description of Artificial Sequence: Synthetic oligonucleotide
  Antisense strand to SEQ ID NO: 1332622
aacuuucucugagugagcc

SEQ ID NO: 1332624 - RNA, 19 nt, Artificial Sequence
  Description of Artificial Sequence: Synthetic oligonucleotide
  Sense strand starting at position 408 of SEQ ID NO: 1242236
ccugcauuccgccauguaa

SEQ ID NO: 1332625 - RNA, 19 nt, Artificial Sequence
  Description of Artificial Sequence: Synthetic oligonucleotide
  Antisense strand to SEQ ID NO: 1332624
uuacauggcggaaugcagg

SEQ ID NO: 1332626 - RNA, 19 nt, Artificial Sequence
  Description of Artificial Sequence: Synthetic oligonucleotide
  Sense strand starting at position 410 of SEQ ID NO: 1242236
ugcauuccgccauguaaau

SEQ ID NO: 1332627 - RNA, 19 nt, Artificial Sequence
  Description of Artificial Sequence: Synthetic oligonucleotide
  Antisense strand to SEQ ID NO: 1332626
auuuacauggcggaaugca

SEQ ID NO: 1332628 - RNA, 19 nt, Artificial Sequence
  Description of Artificial Sequence: Synthetic oligonucleotide
  Sense strand starting at position 466 of SEQ ID NO: 1242236
gccacauccuucccagaga

SEQ ID NO: 1332629 - RNA, 19 nt, Artificial Sequence
  Description of Artificial Sequence: Synthetic oligonucleotide
  Antisense strand to SEQ ID NO: 1332628
ucucugggaaggauguggc

SEQ ID NO: 1332630 - RNA, 19 nt, Artificial Sequence
  Description of Artificial Sequence: Synthetic oligonucleotide
  Sense strand starting at position 495 of SEQ ID NO: 1242236
uucuucuucuaagaguaug

SEQ ID NO: 1332631 - RNA, 19 nt, Artificial Sequence
  Description of Artificial Sequence: Synthetic oligonucleotide
  Antisense strand to SEQ ID NO: 1332630
cauacucuuagaagaagaa

SEQ ID NO: 1332632 - RNA, 19 nt, Artificial Sequence
  Description of Artificial Sequence: Synthetic oligonucleotide
  Sense strand starting at position 503 of SEQ ID NO: 1242236
cuaagaguauggccaagaa

SEQ ID NO: 1332633 - RNA, 19 nt, Artificial Sequence
  Description of Artificial Sequence: Synthetic oligonucleotide
  Antisense strand to SEQ ID NO: 1332632
uucuuggccauacucuuag

SEQ ID NO: 1332634 - RNA, 19 nt, Artificial Sequence
  Description of Artificial Sequence: Synthetic oligonucleotide
  Sense strand starting at position 738 of SEQ ID NO: 1242236
gcgcguguucuccaaacug

SEQ ID NO: 1332635 - RNA, 19 nt, Artificial Sequence
  Description of Artificial Sequence: Synthetic oligonucleotide
  Antisense strand to SEQ ID NO: 1332634
caguuuggagaacacgcgc

SEQ ID NO: 1332636 - RNA, 19 nt, Artificial Sequence
  Description of Artificial Sequence: Synthetic oligonucleotide
  Sense strand starting at position 771 of SEQ ID NO: 1242236
ucauuuggugcaggucuaa

SEQ ID NO: 1332637 - RNA, 19 nt, Artificial Sequence
  Description of Artificial Sequence: Synthetic oligonucleotide
  Antisense strand to SEQ ID NO: 1332636
uuagaccugcaccaaauga

SEQ ID NO: 1332638 - RNA, 19 nt, Artificial Sequence
  Description of Artificial Sequence: Synthetic oligonucleotide
  Sense strand starting at position 1165 of SEQ ID NO: 1242236
ucaggacgcaccugugauu

SEQ ID NO: 1332639 - RNA, 19 nt, Artificial Sequence
  Description of Artificial Sequence: Synthetic oligonucleotide
  Antisense strand to SEQ ID NO: 1332638
aaucacaggugcguccuga

SEQ ID NO: 1332640 - RNA, 19 nt, Artificial Sequence
  Description of Artificial Sequence: Synthetic oligonucleotide
  Sense strand starting at position 1830 of SEQ ID NO: 1242236
caggacuccugguuaaguu

SEQ ID NO: 1332641 - RNA, 19 nt, Artificial Sequence
  Description of Artificial Sequence: Synthetic oligonucleotide
  Antisense strand to SEQ ID NO: 1332640
aacuuaaccaggaguccug

SEQ ID NO: 1332642 - RNA, 19 nt, Artificial Sequence
  Description of Artificial Sequence: Synthetic oligonucleotide
  Sense strand starting at position 1831 of SEQ ID NO: 1242236
aggacuccugguuaaguuu

SEQ ID NO: 1332643 - RNA, 19 nt, Artificial Sequence
  Description of Artificial Sequence: Synthetic oligonucleotide
  Antisense strand to SEQ ID NO: 1332642
aaacuuaaccaggaguccu

SEQ ID NO: 1332644 - RNA, 19 nt, Artificial Sequence
  Description of Artificial Sequence: Synthetic oligonucleotide
  Sense strand starting at position 1856 of SEQ ID NO: 1242236
cggagaaacacgcauacuu

SEQ ID NO: 1332645 - RNA, 19 nt, Artificial Sequence
  Description of Artificial Sequence: Synthetic oligonucleotide
  Antisense strand to SEQ ID NO: 1332644
aaguaugcguguuucuccg

SEQ ID NO: 1332646 - RNA, 19 nt, Artificial Sequence
  Description of Artificial Sequence: Synthetic oligonucleotide
  Sense strand starting at position 1866 of SEQ ID NO: 1242236
cgcauacuuucugaguggu

SEQ ID NO: 1332647 - RNA, 19 nt, Artificial Sequence
  Description of Artificial Sequence: Synthetic oligonucleotide
  Antisense strand to SEQ ID NO: 1332646
accacucagaaaguaugcg

SEQ ID NO: 1332648 - RNA, 19 nt, Artificial Sequence
  Description of Artificial Sequence: Synthetic oligonucleotide
  Sense strand starting at position 1868 of SEQ ID NO: 1242236
cauacuuucugaguggugu

SEQ ID NO: 1332649 - RNA, 19 nt, Artificial Sequence
  Description of Artificial Sequence: Synthetic oligonucleotide
  Antisense strand to SEQ ID NO: 1332648
acaccacucagaaaguaug

SEQ ID NO: 1332650 - RNA, 19 nt, Artificial Sequence
  Description of Artificial Sequence: Synthetic oligonucleotide
  Sense strand starting at position 1881 of SEQ ID NO: 1242236
ugguguccucugcaauauc

SEQ ID NO: 1332651 - RNA, 19 nt, Artificial Sequence
  Description of Artificial Sequence: Synthetic oligonucleotide
  Antisense strand to SEQ ID NO: 1332650
gauauugcagaggacacca

SEQ ID NO: 1332652 - RNA, 19 nt, Artificial Sequence
  Description of Artificial Sequence: Synthetic oligonucleotide
  Sense strand starting at position 2054 of SEQ ID NO: 1242236
gcgcuagagucagcuacau

SEQ ID NO: 1332653 - RNA, 19 nt, Artificial Sequence
  Description of Artificial Sequence: Synthetic oligonucleotide
  Antisense strand to SEQ ID NO: 1332652
auguagcugacucuagcgc

SEQ ID NO: 1332654 - RNA, 19 nt, Artificial Sequence
  Description of Artificial Sequence: Synthetic oligonucleotide
  Sense strand starting at position 2079 of SEQ ID NO: 1242236
cugggcuugugaucccaua

SEQ ID NO: 1332655 - RNA, 19 nt, Artificial Sequence
  Description of Artificial Sequence: Synthetic oligonucleotide
  Antisense strand to SEQ ID NO: 1332654
uaugggaucacaagcccag

SEQ ID NO: 1332656 - RNA, 19 nt, Artificial Sequence
  Description of Artificial Sequence: Synthetic oligonucleotide
  Sense strand starting at position 2629 of SEQ ID NO: 1242236
guuucuguaucgguacaua

SEQ ID NO: 1332657 - RNA, 19 nt, Artificial Sequence
  Description of Artificial Sequence: Synthetic oligonucleotide
  Antisense strand to SEQ ID NO: 1332656
uauguaccgauacagaaac

SEQ ID NO: 1332658 - RNA, 19 nt, Artificial Sequence
  Description of Artificial Sequence: Synthetic oligonucleotide
  Sense strand starting at position 2632 of SEQ ID NO: 1242236
ucuguaucgguacauaaau

SEQ ID NO: 1332659 - RNA, 19 nt, Artificial Sequence
  Description of Artificial Sequence: Synthetic oligonucleotide
  Antisense strand to SEQ ID NO: 1332658
auuuauguaccgauacaga

SEQ ID NO: 1332660 - RNA, 19 nt, Artificial Sequence
  Description of Artificial Sequence: Synthetic oligonucleotide
  Sense strand starting at position 2652 of SEQ ID NO: 1242236
ugauuauucuaaugacagu

SEQ ID NO: 1332661 - RNA, 19 nt, Artificial Sequence
  Description of Artificial Sequence: Synthetic oligonucleotide
  Antisense strand to SEQ ID NO: 1332660
acugucauuagaauaauca

SEQ ID NO: 1332662 - RNA, 19 nt, Artificial Sequence
  Description of Artificial Sequence: Synthetic oligonucleotide
  Sense strand starting at position 2692 of SEQ ID NO: 1242236
cagccauuguuggguguua

SEQ ID NO: 1332663 - RNA, 19 nt, Artificial Sequence
  Description of Artificial Sequence: Synthetic oligonucleotide
  Antisense strand to SEQ ID NO: 1332662
uaacacccaacaauggcug

SEQ ID NO: 1332664 - RNA, 19 nt, Artificial Sequence
  Description of Artificial Sequence: Synthetic oligonucleotide
  Sense strand starting at position 2839 of SEQ ID NO: 1242236
gccuccgaguaucuagaau

SEQ ID NO: 1332665 - RNA, 19 nt, Artificial Sequence
  Description of Artificial Sequence: Synthetic oligonucleotide
  Antisense strand to SEQ ID NO: 1332664
auucuagauacucggaggc

SEQ ID NO: 1332666 - RNA, 19 nt, Artificial Sequence
  Description of Artificial Sequence: Synthetic oligonucleotide
  Sense strand starting at position 2955 of SEQ ID NO: 1242236
aggugauccguccgcucua

SEQ ID NO: 1332667 - RNA, 19 nt, Artificial Sequence
  Description of Artificial Sequence: Synthetic oligonucleotide
  Antisense strand to SEQ ID NO: 1332666
uagagcggacggaucaccu

SEQ ID NO: 1332668 - RNA, 19 nt, Artificial Sequence
  Description of Artificial Sequence: Synthetic oligonucleotide
  Sense strand starting at position 3040 of SEQ ID NO: 1242236
gucuauaaacgaugcuaca

SEQ ID NO: 1332669 - RNA, 19 nt, Artificial Sequence
  Description of Artificial Sequence: Synthetic oligonucleotide
  Antisense strand to SEQ ID NO: 1332668
uguagcaucguuuauagac

SEQ ID NO: 1332670 - RNA, 19 nt, Artificial Sequence
  Description of Artificial Sequence: Synthetic oligonucleotide
  Sense strand starting at position 3161 of SEQ ID NO: 1242236
gagacccgucucuaccaaa

SEQ ID NO: 1332671 - RNA, 19 nt, Artificial Sequence
  Description of Artificial Sequence: Synthetic oligonucleotide
  Antisense strand to SEQ ID NO: 1332670
uuugguagagacgggucuc

SEQ ID NO: 1332672 - RNA, 19 nt, Artificial Sequence
  Description of Artificial Sequence: Synthetic oligonucleotide
  Sense strand starting at position 3760 of SEQ ID NO: 1242236
gugaguacauagguuaaau

SEQ ID NO: 1332673 - RNA, 19 nt, Artificial Sequence
  Description of Artificial Sequence: Synthetic oligonucleotide
  Antisense strand to SEQ ID NO: 1332672
auuuaaccuauguacucac

SEQ ID NO: 1332674 - RNA, 19 nt, Artificial Sequence
  Description of Artificial Sequence: Synthetic oligonucleotide
  Sense strand starting at position 3771 of SEQ ID NO: 1242236
gguuaaaugacaggcauau

SEQ ID NO: 1332675 - RNA, 19 nt, Artificial Sequence
  Description of Artificial Sequence: Synthetic oligonucleotide
  Antisense strand to SEQ ID NO: 1332674
auaugccugucauuuaacc

SEQ ID NO: 1332676 - RNA, 19 nt, Artificial Sequence
  Description of Artificial Sequence: Synthetic oligonucleotide
  Sense strand starting at position 15 of SEQ ID NO: 1242237
augucuuacaucugguguu

SEQ ID NO: 1332677 - RNA, 19 nt, Artificial Sequence
  Description of Artificial Sequence: Synthetic oligonucleotide
  Antisense strand to SEQ ID NO: 1332676
aacaccagauguaagacau

SEQ ID NO: 1332678 - RNA, 19 nt, Artificial Sequence
  Description of Artificial Sequence: Synthetic oligonucleotide
  Sense strand starting at position 27 of SEQ ID NO: 1242237
ugguguucacguguucuua

SEQ ID NO: 1332679 - RNA, 19 nt, Artificial Sequence
  Description of Artificial Sequence: Synthetic oligonucleotide
  Antisense strand to SEQ ID NO: 1332678
uaagaacacgugaacacca

SEQ ID NO: 1332680 - RNA, 19 nt, Artificial Sequence
  Description of Artificial Sequence: Synthetic oligonucleotide
  Sense strand starting at position 101 of SEQ ID NO: 1242237
ucagguguacugcaagauu

SEQ ID NO: 1332681 - RNA, 19 nt, Artificial Sequence
  Description of Artificial Sequence: Synthetic oligonucleotide
  Antisense strand to SEQ ID NO: 1332680
aaucuugcaguacaccuga

SEQ ID NO: 1332682 - RNA, 19 nt, Artificial Sequence
  Description of Artificial Sequence: Synthetic oligonucleotide
  Sense strand starting at position 411 of SEQ ID NO: 1242237
gccgcaagauguucuucua

SEQ ID NO: 1332683 - RNA, 19 nt, Artificial Sequence
  Description of Artificial Sequence: Synthetic oligonucleotide
  Antisense strand to SEQ ID NO: 1332682
uagaagaacaucuugcggc

SEQ ID NO: 1332684 - RNA, 19 nt, Artificial Sequence
  Description of Artificial Sequence: Synthetic oligonucleotide
  Sense strand starting at position 553 of SEQ ID NO: 1242237
gccugucacacggacagau

SEQ ID NO: 1332685 - RNA, 19 nt, Artificial Sequence
  Description of Artificial Sequence: Synthetic oligonucleotide
  Antisense strand to SEQ ID NO: 1332684
aucuguccgugugacaggc

SEQ ID NO: 1332686 - RNA, 19 nt, Artificial Sequence
  Description of Artificial Sequence: Synthetic oligonucleotide
  Sense strand starting at position 565 of SEQ ID NO: 1242237
gacagaugcucccugaagu

SEQ ID NO: 1332687 - RNA, 19 nt, Artificial Sequence
  Description of Artificial Sequence: Synthetic oligonucleotide
  Antisense strand to SEQ ID NO: 1332686
acuucagggagcaucuguc

SEQ ID NO: 1332688 - RNA, 19 nt, Artificial Sequence
  Description of Artificial Sequence: Synthetic oligonucleotide
  Sense strand starting at position 598 of SEQ ID NO: 1242237
uguguaucugugugccuua

SEQ ID NO: 1332689 - RNA, 19 nt, Artificial Sequence
  Description of Artificial Sequence: Synthetic oligonucleotide
  Antisense strand to SEQ ID NO: 1332688
uaaggcacacagauacaca

SEQ ID NO: 1332690 - RNA, 19 nt, Artificial Sequence
  Description of Artificial Sequence: Synthetic oligonucleotide
  Sense strand starting at position 603 of SEQ ID NO: 1242237
aucugugugccuuagagac

SEQ ID NO: 1332691 - RNA, 19 nt, Artificial Sequence
  Description of Artificial Sequence: Synthetic oligonucleotide
  Antisense strand to SEQ ID NO: 1332690
gucucuaaggcacacagau

SEQ ID NO: 1332692 - RNA, 19 nt, Artificial Sequence
  Description of Artificial Sequence: Synthetic oligonucleotide
  Sense strand starting at position 626 of SEQ ID NO: 1242237
acaucugcauccuuggaaa

SEQ ID NO: 1332693 - RNA, 19 nt, Artificial Sequence
  Description of Artificial Sequence: Synthetic oligonucleotide
  Antisense strand to SEQ ID NO: 1332692
uuuccaaggaugcagaugu

SEQ ID NO: 1332694 - RNA, 19 nt, Artificial Sequence
  Description of Artificial Sequence: Synthetic oligonucleotide
  Sense strand starting at position 668 of SEQ ID NO: 1242237
cuauuuaaauuguauggga

SEQ ID NO: 1332695 - RNA, 19 nt, Artificial Sequence
  Description of Artificial Sequence: Synthetic oligonucleotide
  Antisense strand to SEQ ID NO: 1332694
ucccauacaauuuaaauag

SEQ ID NO: 1332696 - RNA, 19 nt, Artificial Sequence
  Description of Artificial Sequence: Synthetic oligonucleotide
  Sense strand starting at position 793 of SEQ ID NO: 1242237
ggcucacucagagaaaguu

SEQ ID NO: 1332697 - RNA, 19 nt, Artificial Sequence
  Description of Artificial Sequence: Synthetic oligonucleotide
  Antisense strand to SEQ ID NO: 1332696
aacuuucucugagugagcc

SEQ ID NO: 1332698 - RNA, 19 nt, Artificial Sequence
  Description of Artificial Sequence: Synthetic oligonucleotide
  Sense strand starting at position 815 of SEQ ID NO: 1242237
ccugcauuccgccauguaa

SEQ ID NO: 1332699 - RNA, 19 nt, Artificial Sequence
  Description of Artificial Sequence: Synthetic oligonucleotide
  Antisense strand to SEQ ID NO: 1332698
uuacauggcggaaugcagg

SEQ ID NO: 1332700 - RNA, 19 nt, Artificial Sequence
  Description of Artificial Sequence: Synthetic oligonucleotide
  Sense strand starting at position 817 of SEQ ID NO: 1242237
ugcauuccgccauguaaau

SEQ ID NO: 1332701 - RNA, 19 nt, Artificial Sequence
  Description of Artificial Sequence: Synthetic oligonucleotide
  Antisense strand to SEQ ID NO: 1332700
auuuacauggcggaaugca

SEQ ID NO: 1332702 - RNA, 19 nt, Artificial Sequence
  Description of Artificial Sequence: Synthetic oligonucleotide
  Sense strand starting at position 873 of SEQ ID NO: 1242237
gccacauccuucccagaga

SEQ ID NO: 1332703 - RNA, 19 nt, Artificial Sequence
  Description of Artificial Sequence: Synthetic oligonucleotide
  Antisense strand to SEQ ID NO: 1332702
ucucugggaaggauguggc

SEQ ID NO: 1332704 - RNA, 19 nt, Artificial Sequence
  Description of Artificial Sequence: Synthetic oligonucleotide
  Sense strand starting at position 902 of SEQ ID NO: 1242237
uucuucuucuaagaguaug

SEQ ID NO: 1332705 - RNA, 19 nt, Artificial Sequence
  Description of Artificial Sequence: Synthetic oligonucleotide
  Antisense strand to SEQ ID NO: 1332704
cauacucuuagaagaagaa

SEQ ID NO: 1332706 - RNA, 19 nt, Artificial Sequence
  Description of Artificial Sequence: Synthetic oligonucleotide
  Sense strand starting at position 910 of SEQ ID NO: 1242237
cuaagaguauggccaagaa

SEQ ID NO: 1332707 - RNA, 19 nt, Artificial Sequence
  Description of Artificial Sequence: Synthetic oligonucleotide
  Antisense strand to SEQ ID NO: 1332706
uucuuggccauacucuuag

SEQ ID NO: 1332708 - RNA, 19 nt, Artificial Sequence
  Description of Artificial Sequence: Synthetic oligonucleotide
  Sense strand starting at position 1145 of SEQ ID NO: 1242237
gcgcguguucuccaaacug

SEQ ID NO: 1332709 - RNA, 19 nt, Artificial Sequence
  Description of Artificial Sequence: Synthetic oligonucleotide
  Antisense strand to SEQ ID NO: 1332708
caguuuggagaacacgcgc

SEQ ID NO: 1332710 - RNA, 19 nt, Artificial Sequence
  Description of Artificial Sequence: Synthetic oligonucleotide
  Sense strand starting at position 1178 of SEQ ID NO: 1242237
ucauuuggugcaggucuaa

SEQ ID NO: 1332711 - RNA, 19 nt, Artificial Sequence
  Description of Artificial Sequence: Synthetic oligonucleotide
  Antisense strand to SEQ ID NO: 1332710
uuagaccugcaccaaauga

SEQ ID NO: 1332712 - RNA, 19 nt, Artificial Sequence
  Description of Artificial Sequence: Synthetic oligonucleotide
  Sense strand starting at position 1572 of SEQ ID NO: 1242237
ucaggacgcaccugugauu

SEQ ID NO: 1332713 - RNA, 19 nt, Artificial Sequence
  Description of Artificial Sequence: Synthetic oligonucleotide
  Antisense strand to SEQ ID NO: 1332712
aaucacaggugcguccuga

SEQ ID NO: 1332714 - RNA, 19 nt, Artificial Sequence
  Description of Artificial Sequence: Synthetic oligonucleotide
  Sense strand starting at position 2237 of SEQ ID NO: 1242237
caggacuccugguuaaguu

SEQ ID NO: 1332715 - RNA, 19 nt, Artificial Sequence
  Description of Artificial Sequence: Synthetic oligonucleotide
  Antisense strand to SEQ ID NO: 1332714
aacuuaaccaggaguccug

SEQ ID NO: 1332716 - RNA, 19 nt, Artificial Sequence
  Description of Artificial Sequence: Synthetic oligonucleotide
  Sense strand starting at position 2238 of SEQ ID NO: 1242237
aggacuccugguuaaguuu

SEQ ID NO: 1332717 - RNA, 19 nt, Artificial Sequence
  Description of Artificial Sequence: Synthetic oligonucleotide
  Antisense strand to SEQ ID NO: 1332716
aaacuuaaccaggaguccu

SEQ ID NO: 1332718 - RNA, 19 nt, Artificial Sequence
  Description of Artificial Sequence: Synthetic oligonucleotide
  Sense strand starting at position 2263 of SEQ ID NO: 1242237
cggagaaacacgcauacuu

SEQ ID NO: 1332719 - RNA, 19 nt, Artificial Sequence
  Description of Artificial Sequence: Synthetic oligonucleotide
  Antisense strand to SEQ ID NO: 1332718
aaguaugcguguuucuccg

SEQ ID NO: 1332720 - RNA, 19 nt, Artificial Sequence
  Description of Artificial Sequence: Synthetic oligonucleotide
  Sense strand starting at position 2273 of SEQ ID NO: 1242237
cgcauacuuucugaguggu

SEQ ID NO: 1332721 - RNA, 19 nt, Artificial Sequence
  Description of Artificial Sequence: Synthetic oligonucleotide
  Antisense strand to SEQ ID NO: 1332720
accacucagaaaguaugcg

SEQ ID NO: 1332722 - RNA, 19 nt, Artificial Sequence
  Description of Artificial Sequence: Synthetic oligonucleotide
  Sense strand starting at position 2275 of SEQ ID NO: 1242237
cauacuuucugaguggugu

SEQ ID NO: 1332723 - RNA, 19 nt, Artificial Sequence
  Description of Artificial Sequence: Synthetic oligonucleotide
  Antisense strand to SEQ ID NO: 1332722
acaccacucagaaaguaug

SEQ ID NO: 1332724 - RNA, 19 nt, Artificial Sequence
  Description of Artificial Sequence: Synthetic oligonucleotide
  Sense strand starting at position 2288 of SEQ ID NO: 1242237
ugguguccucugcaauauc

SEQ ID NO: 1332725 - RNA, 19 nt, Artificial Sequence
  Description of Artificial Sequence: Synthetic oligonucleotide
  Antisense strand to SEQ ID NO: 1332724
gauauugcagaggacacca

SEQ ID NO: 1332726 - RNA, 19 nt, Artificial Sequence
  Description of Artificial Sequence: Synthetic oligonucleotide
  Sense strand starting at position 2461 of SEQ ID NO: 1242237
gcgcuagagucagcuacau

SEQ ID NO: 1332727 - RNA, 19 nt, Artificial Sequence
  Description of Artificial Sequence: Synthetic oligonucleotide
  Antisense strand to SEQ ID NO: 1332726
auguagcugacucuagcgc

SEQ ID NO: 1332728 - RNA, 19 nt, Artificial Sequence
  Description of Artificial Sequence: Synthetic oligonucleotide
  Sense strand starting at position 2486 of SEQ ID NO: 1242237
cugggcuugugaucccaua

SEQ ID NO: 1332729 - RNA, 19 nt, Artificial Sequence
  Description of Artificial Sequence: Synthetic oligonucleotide
  Antisense strand to SEQ ID NO: 1332728
uaugggaucacaagcccag

SEQ ID NO: 1332730 - RNA, 19 nt, Artificial Sequence
  Description of Artificial Sequence: Synthetic oligonucleotide
  Sense strand starting at position 3036 of SEQ ID NO: 1242237
guuucuguaucgguacaua

SEQ ID NO: 1332731 - RNA, 19 nt, Artificial Sequence
  Description of Artificial Sequence: Synthetic oligonucleotide
  Antisense strand to SEQ ID NO: 1332730
uauguaccgauacagaaac

SEQ ID NO: 1332732 - RNA, 19 nt, Artificial Sequence
  Description of Artificial Sequence: Synthetic oligonucleotide
  Sense strand starting at position 3039 of SEQ ID NO: 1242237
ucuguaucgguacauaaau

SEQ ID NO: 1332733 - RNA, 19 nt, Artificial Sequence
  Description of Artificial Sequence: Synthetic oligonucleotide
  Antisense strand to SEQ ID NO: 1332732
auuuauguaccgauacaga

SEQ ID NO: 1332734 - RNA, 19 nt, Artificial Sequence
  Description of Artificial Sequence: Synthetic oligonucleotide
  Sense strand starting at position 3059 of SEQ ID NO: 1242237
ugauuauucuaaugacagu

SEQ ID NO: 1332735 - RNA, 19 nt, Artificial Sequence
  Description of Artificial Sequence: Synthetic oligonucleotide
  Antisense strand to SEQ ID NO: 1332734
acugucauuagaauaauca

SEQ ID NO: 1332736 - RNA, 19 nt, Artificial Sequence
  Description of Artificial Sequence: Synthetic oligonucleotide
  Sense strand starting at position 3099 of SEQ ID NO: 1242237
cagccauuguuggguguua

SEQ ID NO: 1332737 - RNA, 19 nt, Artificial Sequence
  Description of Artificial Sequence: Synthetic oligonucleotide
  Antisense strand to SEQ ID NO: 1332736
uaacacccaacaauggcug

SEQ ID NO: 1332738 - RNA, 19 nt, Artificial Sequence
  Description of Artificial Sequence: Synthetic oligonucleotide
  Sense strand starting at position 3246 of SEQ ID NO: 1242237
gccuccgaguaucuagaau

SEQ ID NO: 1332739 - RNA, 19 nt, Artificial Sequence
  Description of Artificial Sequence: Synthetic oligonucleotide
  Antisense strand to SEQ ID NO: 1332738
auucuagauacucggaggc

SEQ ID NO: 1332740 - RNA, 19 nt, Artificial Sequence
  Description of Artificial Sequence: Synthetic oligonucleotide
  Sense strand starting at position 3362 of SEQ ID NO: 1242237
aggugauccguccgcucua

SEQ ID NO: 1332741 - RNA, 19 nt, Artificial Sequence
  Description of Artificial Sequence: Synthetic oligonucleotide
  Antisense strand to SEQ ID NO: 1332740
uagagcggacggaucaccu

SEQ ID NO: 1332742 - RNA, 19 nt, Artificial Sequence
  Description of Artificial Sequence: Synthetic oligonucleotide
  Sense strand starting at position 3447 of SEQ ID NO: 1242237
gucuauaaacgaugcuaca

SEQ ID NO: 1332743 - RNA, 19 nt, Artificial Sequence
  Description of Artificial Sequence: Synthetic oligonucleotide
  Antisense strand to SEQ ID NO: 1332742
uguagcaucguuuauagac

SEQ ID NO: 1332744 - RNA, 19 nt, Artificial Sequence
  Description of Artificial Sequence: Synthetic oligonucleotide
  Sense strand starting at position 3568 of SEQ ID NO: 1242237
gagacccgucucuaccaaa

SEQ ID NO: 1332745 - RNA, 19 nt, Artificial Sequence
  Description of Artificial Sequence: Synthetic oligonucleotide
  Antisense strand to SEQ ID NO: 1332744
uuugguagagacgggucuc

SEQ ID NO: 1332746 - RNA, 19 nt, Artificial Sequence
  Description of Artificial Sequence: Synthetic oligonucleotide
  Sense strand starting at position 395 of SEQ ID NO: 1242238
gguuuccacugcuaucuaa

SEQ ID NO: 1332747 - RNA, 19 nt, Artificial Sequence
  Description of Artificial Sequence: Synthetic oligonucleotide
  Antisense strand to SEQ ID NO: 1332746
uuagauagcaguggaaacc

SEQ ID NO: 1332748 - RNA, 19 nt, Artificial Sequence
  Description of Artificial Sequence: Synthetic oligonucleotide
  Sense strand starting at position 473 of SEQ ID NO: 1242238
gugguuggaucgcuuaagu

SEQ ID NO: 1332749 - RNA, 19 nt, Artificial Sequence
  Description of Artificial Sequence: Synthetic oligonucleotide
  Antisense strand to SEQ ID NO: 1332748
acuuaagcgauccaaccac

SEQ ID NO: 1332750 - RNA, 19 nt, Artificial Sequence
  Description of Artificial Sequence: Synthetic oligonucleotide
  Sense strand starting at position 481 of SEQ ID NO: 1242238
aucgcuuaaguccagaauu

SEQ ID NO: 1332751 - RNA, 19 nt, Artificial Sequence
  Description of Artificial Sequence: Synthetic oligonucleotide
  Antisense strand to SEQ ID NO: 1332750
aauucuggacuuaagcgau

SEQ ID NO: 1332752 - RNA, 19 nt, Artificial Sequence
  Description of Artificial Sequence: Synthetic oligonucleotide
  Sense strand starting at position 483 of SEQ ID NO: 1242238
cgcuuaaguccagaauuag

SEQ ID NO: 1332753 - RNA, 19 nt, Artificial Sequence
  Description of Artificial Sequence: Synthetic oligonucleotide
  Antisense strand to SEQ ID NO: 1332752
cuaauucuggacuuaagcg

SEQ ID NO: 1332754 - RNA, 19 nt, Artificial Sequence
  Description of Artificial Sequence: Synthetic oligonucleotide
  Sense strand starting at position 509 of SEQ ID NO: 1242238
gccgguguaacauggugaa

SEQ ID NO: 1332755 - RNA, 19 nt, Artificial Sequence
  Description of Artificial Sequence: Synthetic oligonucleotide
  Antisense strand to SEQ ID NO: 1332754
uucaccauguuacaccggc

SEQ ID NO: 1332756 - RNA, 19 nt, Artificial Sequence
  Description of Artificial Sequence: Synthetic oligonucleotide
  Sense strand starting at position 682 of SEQ ID NO: 1242238
gcaagaccuuggcucagaa

SEQ ID NO: 1332757 - RNA, 19 nt, Artificial Sequence
  Description of Artificial Sequence: Synthetic oligonucleotide
  Antisense strand to SEQ ID NO: 1332756
uucugagccaaggucuugc

SEQ ID NO: 1332758 - RNA, 19 nt, Artificial Sequence
  Description of Artificial Sequence: Synthetic oligonucleotide
  Sense strand starting at position 763 of SEQ ID NO: 1242238
gcaguacuguacuuauaaa

SEQ ID NO: 1332759 - RNA, 19 nt, Artificial Sequence
  Description of Artificial Sequence: Synthetic oligonucleotide
  Antisense strand to SEQ ID NO: 1332758
uuuauaaguacaguacugc

SEQ ID NO: 1332760 - RNA, 19 nt, Artificial Sequence
  Description of Artificial Sequence: Synthetic oligonucleotide
  Sense strand starting at position 1150 of SEQ ID NO: 1242238
acucucgacucugauauuu

SEQ ID NO: 1332761 - RNA, 19 nt, Artificial Sequence
  Description of Artificial Sequence: Synthetic oligonucleotide
  Antisense strand to SEQ ID NO: 1332760
aaauaucagagucgagagu

SEQ ID NO: 1332762 - RNA, 19 nt, Artificial Sequence
  Description of Artificial Sequence: Synthetic oligonucleotide
  Sense strand starting at position 1183 of SEQ ID NO: 1242238
aaguauuaaccgggcacau

SEQ ID NO: 1332763 - RNA, 19 nt, Artificial Sequence
  Description of Artificial Sequence: Synthetic oligonucleotide
  Antisense strand to SEQ ID NO: 1332762
augugcccgguuaauacuu

SEQ ID NO: 1332764 - RNA, 19 nt, Artificial Sequence
  Description of Artificial Sequence: Synthetic oligonucleotide
  Sense strand starting at position 1239 of SEQ ID NO: 1242238
gcaguccuguauuaaauga

SEQ ID NO: 1332765 - RNA, 19 nt, Artificial Sequence
  Description of Artificial Sequence: Synthetic oligonucleotide
  Antisense strand to SEQ ID NO: 1332764
ucauuuaauacaggacugc

SEQ ID NO: 1332766 - RNA, 19 nt, Artificial Sequence
  Description of Artificial Sequence: Synthetic oligonucleotide
  Sense strand starting at position 1336 of SEQ ID NO: 1242238
gaaauaggauuccgugauu

SEQ ID NO: 1332767 - RNA, 19 nt, Artificial Sequence
  Description of Artificial Sequence: Synthetic oligonucleotide
  Antisense strand to SEQ ID NO: 1332766
aaucacggaauccuauuuc

SEQ ID NO: 1332768 - RNA, 19 nt, Artificial Sequence
  Description of Artificial Sequence: Synthetic oligonucleotide
  Sense strand starting at position 1400 of SEQ ID NO: 1242238
acuucuaaggcuuguuuaa

SEQ ID NO: 1332769 - RNA, 19 nt, Artificial Sequence
  Description of Artificial Sequence: Synthetic oligonucleotide
  Antisense strand to SEQ ID NO: 1332768
uuaaacaagccuuagaagu

SEQ ID NO: 1332770 - RNA, 19 nt, Artificial Sequence
  Description of Artificial Sequence: Synthetic oligonucleotide
  Sense strand starting at position 1402 of SEQ ID NO: 1242238
uucuaaggcuuguuuaacu

SEQ ID NO: 1332771 - RNA, 19 nt, Artificial Sequence
  Description of Artificial Sequence: Synthetic oligonucleotide
  Antisense strand to SEQ ID NO: 1332770
aguuaaacaagccuuagaa

SEQ ID NO: 1332772 - RNA, 19 nt, Artificial Sequence
  Description of Artificial Sequence: Synthetic oligonucleotide
  Sense strand starting at position 1413 of SEQ ID NO: 1242238
guuuaacugucaguuauga

SEQ ID NO: 1332773 - RNA, 19 nt, Artificial Sequence
  Description of Artificial Sequence: Synthetic oligonucleotide
  Antisense strand to SEQ ID NO: 1332772
ucauaacugacaguuaaac

SEQ ID NO: 1332774 - RNA, 19 nt, Artificial Sequence
  Description of Artificial Sequence: Synthetic oligonucleotide
  Sense strand starting at position 1569 of SEQ ID NO: 1242238
uggguuuccucacugagga

SEQ ID NO: 1332775 - RNA, 19 nt, Artificial Sequence
  Description of Artificial Sequence: Synthetic oligonucleotide
  Antisense strand to SEQ ID NO: 1332774
uccucagugaggaaaccca

SEQ ID NO: 1332776 - RNA, 19 nt, Artificial Sequence
  Description of Artificial Sequence: Synthetic oligonucleotide
  Sense strand starting at position 1579 of SEQ ID NO: 1242238
cacugaggauuacaggaaa

SEQ ID NO: 1332777 - RNA, 19 nt, Artificial Sequence
  Description of Artificial Sequence: Synthetic oligonucleotide
  Antisense strand to SEQ ID NO: 1332776
uuuccuguaauccucagug

SEQ ID NO: 1332778 - RNA, 19 nt, Artificial Sequence
  Description of Artificial Sequence: Synthetic oligonucleotide
  Sense strand starting at position 1618 of SEQ ID NO: 1242238
aaggaaaguugcccgaaga

SEQ ID NO: 1332779 - RNA, 19 nt, Artificial Sequence
  Description of Artificial Sequence: Synthetic oligonucleotide
  Antisense strand to SEQ ID NO: 1332778
ucuucgggcaacuuuccuu

SEQ ID NO: 1332780 - RNA, 19 nt, Artificial Sequence
  Description of Artificial Sequence: Synthetic oligonucleotide
  Sense strand starting at position 1619 of SEQ ID NO: 1242238
aggaaaguugcccgaagaa

SEQ ID NO: 1332781 - RNA, 19 nt, Artificial Sequence
  Description of Artificial Sequence: Synthetic oligonucleotide
  Antisense strand to SEQ ID NO: 1332780
uucuucgggcaacuuuccu

SEQ ID NO: 1332782 - RNA, 19 nt, Artificial Sequence
  Description of Artificial Sequence: Synthetic oligonucleotide
  Sense strand starting at position 1685 of SEQ ID NO: 1242238
ucgcgcuugccugaaagga

SEQ ID NO: 1332783 - RNA, 19 nt, Artificial Sequence
  Description of Artificial Sequence: Synthetic oligonucleotide
  Antisense strand to SEQ ID NO: 1332782
uccuuucaggcaagcgcga

SEQ ID NO: 1332784 - RNA, 19 nt, Artificial Sequence
  Description of Artificial Sequence: Synthetic oligonucleotide
  Sense strand starting at position 2192 of SEQ ID NO: 1242238
guaguuaagcaguacagua

SEQ ID NO: 1332785 - RNA, 19 nt, Artificial Sequence
  Description of Artificial Sequence: Synthetic oligonucleotide
  Antisense strand to SEQ ID NO: 1332784
uacuguacugcuuaacuac

SEQ ID NO: 1332786 - RNA, 19 nt, Artificial Sequence
  Description of Artificial Sequence: Synthetic oligonucleotide
  Sense strand starting at position 2253 of SEQ ID NO: 1242238
cggcguggcccuuauuuaa

SEQ ID NO: 1332787 - RNA, 19 nt, Artificial Sequence
  Description of Artificial Sequence: Synthetic oligonucleotide
  Antisense strand to SEQ ID NO: 1332786
uuaaauaagggccacgccg

SEQ ID NO: 1332788 - RNA, 19 nt, Artificial Sequence
  Description of Artificial Sequence: Synthetic oligonucleotide
  Sense strand starting at position 2737 of SEQ ID NO: 1242238
guuggugcgcgccaguaau

SEQ ID NO: 1332789 - RNA, 19 nt, Artificial Sequence
  Description of Artificial Sequence: Synthetic oligonucleotide
  Antisense strand to SEQ ID NO: 1332788
auuacuggcgcgcaccaac

SEQ ID NO: 1332790 - RNA, 19 nt, Artificial Sequence
  Description of Artificial Sequence: Synthetic oligonucleotide
  Sense strand starting at position 3038 of SEQ ID NO: 1242238
ggccgaaauagcuguggua

SEQ ID NO: 1332791 - RNA, 19 nt, Artificial Sequence
  Description of Artificial Sequence: Synthetic oligonucleotide
  Antisense strand to SEQ ID NO: 1332790
uaccacagcuauuucggcc

SEQ ID NO: 1332792 - RNA, 19 nt, Artificial Sequence
  Description of Artificial Sequence: Synthetic oligonucleotide
  Sense strand starting at position 3040 of SEQ ID NO: 1242238
ccgaaauagcugugguagu

SEQ ID NO: 1332793 - RNA, 19 nt, Artificial Sequence
  Description of Artificial Sequence: Synthetic oligonucleotide
  Antisense strand to SEQ ID NO: 1332792
acuaccacagcuauuucgg

SEQ ID NO: 1332794 - RNA, 19 nt, Artificial Sequence
  Description of Artificial Sequence: Synthetic oligonucleotide
  Sense strand starting at position 3095 of SEQ ID NO: 1242238
gcggaauagaugugagguu

SEQ ID NO: 1332795 - RNA, 19 nt, Artificial Sequence
  Description of Artificial Sequence: Synthetic oligonucleotide
  Antisense strand to SEQ ID NO: 1332794
aaccucacaucuauuccgc

SEQ ID NO: 1332796 - RNA, 19 nt, Artificial Sequence
  Description of Artificial Sequence: Synthetic oligonucleotide
  Sense strand starting at position 3102 of SEQ ID NO: 1242238
agaugugagguugacguuu

SEQ ID NO: 1332797 - RNA, 19 nt, Artificial Sequence
  Description of Artificial Sequence: Synthetic oligonucleotide
  Antisense strand to SEQ ID NO: 1332796
aaacgucaaccucacaucu

SEQ ID NO: 1332798 - RNA, 19 nt, Artificial Sequence
  Description of Artificial Sequence: Synthetic oligonucleotide
  Sense strand starting at position 3108 of SEQ ID NO: 1242238
gagguugacguuuggugaa

SEQ ID NO: 1332799 - RNA, 19 nt, Artificial Sequence
  Description of Artificial Sequence: Synthetic oligonucleotide
  Antisense strand to SEQ ID NO: 1332798
uucaccaaacgucaaccuc

SEQ ID NO: 1332800 - RNA, 19 nt, Artificial Sequence
  Description of Artificial Sequence: Synthetic oligonucleotide
  Sense strand starting at position 3110 of SEQ ID NO: 1242238
gguugacguuuggugaaag

SEQ ID NO: 1332801 - RNA, 19 nt, Artificial Sequence
  Description of Artificial Sequence: Synthetic oligonucleotide
  Antisense strand to SEQ ID NO: 1332800
cuuucaccaaacgucaacc

SEQ ID NO: 1332802 - RNA, 19 nt, Artificial Sequence
  Description of Artificial Sequence: Synthetic oligonucleotide
  Sense strand starting at position 3143 of SEQ ID NO: 1242238
cugagagcagauugauuga

SEQ ID NO: 1332803 - RNA, 19 nt, Artificial Sequence
  Description of Artificial Sequence: Synthetic oligonucleotide
  Antisense strand to SEQ ID NO: 1332802
ucaaucaaucugcucucag

SEQ ID NO: 1332804 - RNA, 19 nt, Artificial Sequence
  Description of Artificial Sequence: Synthetic oligonucleotide
  Sense strand starting at position 3339 of SEQ ID NO: 1242238
gacggagucuuucuuguca

SEQ ID NO: 1332805 - RNA, 19 nt, Artificial Sequence
  Description of Artificial Sequence: Synthetic oligonucleotide
  Antisense strand to SEQ ID NO: 1332804
ugacaagaaagacuccguc

SEQ ID NO: 1332806 - RNA, 19 nt, Artificial Sequence
  Description of Artificial Sequence: Synthetic oligonucleotide
  Sense strand starting at position 3734 of SEQ ID NO: 1242238
ugagauguauaggaaacua

SEQ ID NO: 1332807 - RNA, 19 nt, Artificial Sequence
  Description of Artificial Sequence: Synthetic oligonucleotide
  Antisense strand to SEQ ID NO: 1332806
uaguuuccuauacaucuca

SEQ ID NO: 1332808 - RNA, 19 nt, Artificial Sequence
  Description of Artificial Sequence: Synthetic oligonucleotide
  Sense strand starting at position 3746 of SEQ ID NO: 1242238
gaaacuaacuguuaggcua

SEQ ID NO: 1332809 - RNA, 19 nt, Artificial Sequence
  Description of Artificial Sequence: Synthetic oligonucleotide
  Antisense strand to SEQ ID NO: 1332808
uagccuaacaguuaguuuc

SEQ ID NO: 1332810 - RNA, 19 nt, Artificial Sequence
  Description of Artificial Sequence: Synthetic oligonucleotide
  Sense strand starting at position 3791 of SEQ ID NO: 1242238
agaaauuccuugggaucca

SEQ ID NO: 1332811 - RNA, 19 nt, Artificial Sequence
  Description of Artificial Sequence: Synthetic oligonucleotide
  Antisense strand to SEQ ID NO: 1332810
uggaucccaaggaauuucu

SEQ ID NO: 1332812 - RNA, 19 nt, Artificial Sequence
  Description of Artificial Sequence: Synthetic oligonucleotide
  Sense strand starting at position 3842 of SEQ ID NO: 1242238
agagcucauuuguaagaag

SEQ ID NO: 1332813 - RNA, 19 nt, Artificial Sequence
  Description of Artificial Sequence: Synthetic oligonucleotide
  Antisense strand to SEQ ID NO: 1332812
cuucuuacaaaugagcucu

SEQ ID NO: 1332814 - RNA, 19 nt, Artificial Sequence
  Description of Artificial Sequence: Synthetic oligonucleotide
  Sense strand starting at position 3864 of SEQ ID NO: 1242238
agaguagccagcuagaguu

SEQ ID NO: 1332815 - RNA, 19 nt, Artificial Sequence
  Description of Artificial Sequence: Synthetic oligonucleotide
  Antisense strand to SEQ ID NO: 1332814
aacucuagcuggcuacucu

SEQ ID NO: 1332816 - RNA, 19 nt, Artificial Sequence
  Description of Artificial Sequence: Synthetic oligonucleotide
  Sense strand starting at position 3877 of SEQ ID NO: 1242238
agaguuagaucuccuagua

SEQ ID NO: 1332817 - RNA, 19 nt, Artificial Sequence
  Description of Artificial Sequence: Synthetic oligonucleotide
  Antisense strand to SEQ ID NO: 1332816
uacuaggagaucuaacucu

SEQ ID NO: 1332818 - RNA, 19 nt, Artificial Sequence
  Description of Artificial Sequence: Synthetic oligonucleotide
  Sense strand starting at position 3899 of SEQ ID NO: 1242238
caaugauuccuugguugca

SEQ ID NO: 1332819 - RNA, 19 nt, Artificial Sequence
  Description of Artificial Sequence: Synthetic oligonucleotide
  Antisense strand to SEQ ID NO: 1332818
ugcaaccaaggaaucauug

SEQ ID NO: 1332820 - RNA, 19 nt, Artificial Sequence
  Description of Artificial Sequence: Synthetic oligonucleotide
  Sense strand starting at position 3918 of SEQ ID NO: 1242238
gguguagagucccuuagga

SEQ ID NO: 1332821 - RNA, 19 nt, Artificial Sequence
  Description of Artificial Sequence: Synthetic oligonucleotide
  Antisense strand to SEQ ID NO: 1332820
uccuaagggacucuacacc

SEQ ID NO: 1332822 - RNA, 19 nt, Artificial Sequence
  Description of Artificial Sequence: Synthetic oligonucleotide
  Sense strand starting at position 3920 of SEQ ID NO: 1242238
uguagagucccuuaggaau

SEQ ID NO: 1332823 - RNA, 19 nt, Artificial Sequence
  Description of Artificial Sequence: Synthetic oligonucleotide
  Antisense strand to SEQ ID NO: 1332822
auuccuaagggacucuaca

SEQ ID NO: 1332824 - RNA, 19 nt, Artificial Sequence
  Description of Artificial Sequence: Synthetic oligonucleotide
  Sense strand starting at position 3932 of SEQ ID NO: 1242238
uaggaauguuguuccaggu

SEQ ID NO: 1332825 - RNA, 19 nt, Artificial Sequence
  Description of Artificial Sequence: Synthetic oligonucleotide
  Antisense strand to SEQ ID NO: 1332824
accuggaacaacauuccua

SEQ ID NO: 1332826 - RNA, 19 nt, Artificial Sequence
  Description of Artificial Sequence: Synthetic oligonucleotide
  Sense strand starting at position 36 of SEQ ID NO: 1242239
agccuagaacgucaaaugu

SEQ ID NO: 1332827 - RNA, 19 nt, Artificial Sequence
  Description of Artificial Sequence: Synthetic oligonucleotide
  Antisense strand to SEQ ID NO: 1332826
acauuugacguucuaggcu

SEQ ID NO: 1332828 - RNA, 19 nt, Artificial Sequence
  Description of Artificial Sequence: Synthetic oligonucleotide
  Sense strand starting at position 315 of SEQ ID NO: 1242239
cccagucuguuacuuuaga

SEQ ID NO: 1332829 - RNA, 19 nt, Artificial Sequence
  Description of Artificial Sequence: Synthetic oligonucleotide
  Antisense strand to SEQ ID NO: 1332828
ucuaaaguaacagacuggg

SEQ ID NO: 1332830 - RNA, 19 nt, Artificial Sequence
  Description of Artificial Sequence: Synthetic oligonucleotide
  Sense strand starting at position 323 of SEQ ID NO: 1242239
guuacuuuagacuggguga

SEQ ID NO: 1332831 - RNA, 19 nt, Artificial Sequence
  Description of Artificial Sequence: Synthetic oligonucleotide
  Antisense strand to SEQ ID NO: 1332830
ucacccagucuaaaguaac

SEQ ID NO: 1332832 - RNA, 19 nt, Artificial Sequence
  Description of Artificial Sequence: Synthetic oligonucleotide
  Sense strand starting at position 324 of SEQ ID NO: 1242239
uuacuuuagacugggugau

SEQ ID NO: 1332833 - RNA, 19 nt, Artificial Sequence
  Description of Artificial Sequence: Synthetic oligonucleotide
  Antisense strand to SEQ ID NO: 1332832
aucacccagucuaaaguaa

SEQ ID NO: 1332834 - RNA, 19 nt, Artificial Sequence
  Description of Artificial Sequence: Synthetic oligonucleotide
  Sense strand starting at position 326 of SEQ ID NO: 1242239
acuuuagacugggugauga

SEQ ID NO: 1332835 - RNA, 19 nt, Artificial Sequence
  Description of Artificial Sequence: Synthetic oligonucleotide
  Antisense strand to SEQ ID NO: 1332834
ucaucacccagucuaaagu

SEQ ID NO: 1332836 - RNA, 19 nt, Artificial Sequence
  Description of Artificial Sequence: Synthetic oligonucleotide
  Sense strand starting at position 350 of SEQ ID NO: 1242239
gggaacuucuuucccuacu

SEQ ID NO: 1332837 - RNA, 19 nt, Artificial Sequence
  Description of Artificial Sequence: Synthetic oligonucleotide
  Antisense strand to SEQ ID NO: 1332836
aguagggaaagaaguuccc

SEQ ID NO: 1332838 - RNA, 19 nt, Artificial Sequence
  Description of Artificial Sequence: Synthetic oligonucleotide
  Sense strand starting at position 516 of SEQ ID NO: 1242239
uacaguacugggugguaau

SEQ ID NO: 1332839 - RNA, 19 nt, Artificial Sequence
  Description of Artificial Sequence: Synthetic oligonucleotide
  Antisense strand to SEQ ID NO: 1332838
auuaccacccaguacugua

SEQ ID NO: 1332840 - RNA, 19 nt, Artificial Sequence
  Description of Artificial Sequence: Synthetic oligonucleotide
  Sense strand starting at position 517 of SEQ ID NO: 1242239
acaguacugggugguaauu

SEQ ID NO: 1332841 - RNA, 19 nt, Artificial Sequence
  Description of Artificial Sequence: Synthetic oligonucleotide
  Antisense strand to SEQ ID NO: 1332840
aauuaccacccaguacugu

SEQ ID NO: 1332842 - RNA, 19 nt, Artificial Sequence
  Description of Artificial Sequence: Synthetic oligonucleotide
  Sense strand starting at position 526 of SEQ ID NO: 1242239
ggugguaauuccucccaug

SEQ ID NO: 1332843 - RNA, 19 nt, Artificial Sequence
  Description of Artificial Sequence: Synthetic oligonucleotide
  Antisense strand to SEQ ID NO: 1332842
caugggaggaauuaccacc

SEQ ID NO: 1332844 - RNA, 19 nt, Artificial Sequence
  Description of Artificial Sequence: Synthetic oligonucleotide
  Sense strand starting at position 646 of SEQ ID NO: 1242239
ccuucuuuagcaggaggau

SEQ ID NO: 1332845 - RNA, 19 nt, Artificial Sequence
  Description of Artificial Sequence: Synthetic oligonucleotide
  Antisense strand to SEQ ID NO: 1332844
auccuccugcuaaagaagg

SEQ ID NO: 1332846 - RNA, 19 nt, Artificial Sequence
  Description of Artificial Sequence: Synthetic oligonucleotide
  Sense strand starting at position 647 of SEQ ID NO: 1242239
cuucuuuagcaggaggauu

SEQ ID NO: 1332847 - RNA, 19 nt, Artificial Sequence
  Description of Artificial Sequence: Synthetic oligonucleotide
  Antisense strand to SEQ ID NO: 1332846
aauccuccugcuaaagaag

SEQ ID NO: 1332848 - RNA, 19 nt, Artificial Sequence
  Description of Artificial Sequence: Synthetic oligonucleotide
  Sense strand starting at position 854 of SEQ ID NO: 1242239
ccacguuuccguucuugua

SEQ ID NO: 1332849 - RNA, 19 nt, Artificial Sequence
  Description of Artificial Sequence: Synthetic oligonucleotide
  Antisense strand to SEQ ID NO: 1332848
uacaagaacggaaacgugg

SEQ ID NO: 1332850 - RNA, 19 nt, Artificial Sequence
  Description of Artificial Sequence: Synthetic oligonucleotide
  Sense strand starting at position 1028 of SEQ ID NO: 1242239
gggagaaacucugcuaguu

SEQ ID NO: 1332851 - RNA, 19 nt, Artificial Sequence
  Description of Artificial Sequence: Synthetic oligonucleotide
  Antisense strand to SEQ ID NO: 1332850
aacuagcagaguuucuccc

SEQ ID NO: 1332852 - RNA, 19 nt, Artificial Sequence
  Description of Artificial Sequence: Synthetic oligonucleotide
  Sense strand starting at position 1146 of SEQ ID NO: 1242239
uuagaagauucgguuaagu

SEQ ID NO: 1332853 - RNA, 19 nt, Artificial Sequence
  Description of Artificial Sequence: Synthetic oligonucleotide
  Antisense strand to SEQ ID NO: 1332852
acuuaaccgaaucuucuaa

SEQ ID NO: 1332854 - RNA, 19 nt, Artificial Sequence
  Description of Artificial Sequence: Synthetic oligonucleotide
  Sense strand starting at position 1148 of SEQ ID NO: 1242239
agaagauucgguuaagucu

SEQ ID NO: 1332855 - RNA, 19 nt, Artificial Sequence
  Description of Artificial Sequence: Synthetic oligonucleotide
  Antisense strand to SEQ ID NO: 1332854
agacuuaaccgaaucuucu

SEQ ID NO: 1332856 - RNA, 19 nt, Artificial Sequence
  Description of Artificial Sequence: Synthetic oligonucleotide
  Sense strand starting at position 1159 of SEQ ID NO: 1242239
uuaagucucgccuaaggua

SEQ ID NO: 1332857 - RNA, 19 nt, Artificial Sequence
  Description of Artificial Sequence: Synthetic oligonucleotide
  Antisense strand to SEQ ID NO: 1332856
uaccuuaggcgagacuuaa

SEQ ID NO: 1332858 - RNA, 19 nt, Artificial Sequence
  Description of Artificial Sequence: Synthetic oligonucleotide
  Sense strand starting at position 1265 of SEQ ID NO: 1242239
ccgggucucaaguacauau

SEQ ID NO: 1332859 - RNA, 19 nt, Artificial Sequence
  Description of Artificial Sequence: Synthetic oligonucleotide
  Antisense strand to SEQ ID NO: 1332858
auauguacuugagacccgg

SEQ ID NO: 1332860 - RNA, 19 nt, Artificial Sequence
  Description of Artificial Sequence: Synthetic oligonucleotide
  Sense strand starting at position 2242 of SEQ ID NO: 1242239
cuagguuucccaggcuaac

SEQ ID NO: 1332861 - RNA, 19 nt, Artificial Sequence
  Description of Artificial Sequence: Synthetic oligonucleotide
  Antisense strand to SEQ ID NO: 1332860
guuagccugggaaaccuag

SEQ ID NO: 1332862 - RNA, 19 nt, Artificial Sequence
  Description of Artificial Sequence: Synthetic oligonucleotide
  Sense strand starting at position 2388 of SEQ ID NO: 1242239
agcaucacagucuggaaau

SEQ ID NO: 1332863 - RNA, 19 nt, Artificial Sequence
  Description of Artificial Sequence: Synthetic oligonucleotide
  Antisense strand to SEQ ID NO: 1332862
auuuccagacugugaugcu

SEQ ID NO: 1332864 - RNA, 19 nt, Artificial Sequence
  Description of Artificial Sequence: Synthetic oligonucleotide
  Sense strand starting at position 2390 of SEQ ID NO: 1242239
caucacagucuggaaaugu

SEQ ID NO: 1332865 - RNA, 19 nt, Artificial Sequence
  Description of Artificial Sequence: Synthetic oligonucleotide
  Antisense strand to SEQ ID NO: 1332864
acauuuccagacugugaug

SEQ ID NO: 1332866 - RNA, 19 nt, Artificial Sequence
  Description of Artificial Sequence: Synthetic oligonucleotide
  Sense strand starting at position 2422 of SEQ ID NO: 1242239
aggugcucagaaugggaau

SEQ ID NO: 1332867 - RNA, 19 nt, Artificial Sequence
  Description of Artificial Sequence: Synthetic oligonucleotide
  Antisense strand to SEQ ID NO: 1332866
auucccauucugagcaccu

SEQ ID NO: 1332868 - RNA, 19 nt, Artificial Sequence
  Description of Artificial Sequence: Synthetic oligonucleotide
  Sense strand starting at position 2753 of SEQ ID NO: 1242239
ccaggagcugucuggacuu

SEQ ID NO: 1332869 - RNA, 19 nt, Artificial Sequence
  Description of Artificial Sequence: Synthetic oligonucleotide
  Antisense strand to SEQ ID NO: 1332868
aaguccagacagcuccugg

SEQ ID NO: 1332870 - RNA, 19 nt, Artificial Sequence
  Description of Artificial Sequence: Synthetic oligonucleotide
  Sense strand starting at position 2821 of SEQ ID NO: 1242239
aacacugugcuccagaaga

SEQ ID NO: 1332871 - RNA, 19 nt, Artificial Sequence
  Description of Artificial Sequence: Synthetic oligonucleotide
  Antisense strand to SEQ ID NO: 1332870
ucuucuggagcacaguguu

SEQ ID NO: 1332872 - RNA, 19 nt, Artificial Sequence
  Description of Artificial Sequence: Synthetic oligonucleotide
  Sense strand starting at position 2823 of SEQ ID NO: 1242239
cacugugcuccagaagaau

SEQ ID NO: 1332873 - RNA, 19 nt, Artificial Sequence
  Description of Artificial Sequence: Synthetic oligonucleotide
  Antisense strand to SEQ ID NO: 1332872
auucuucuggagcacagug

SEQ ID NO: 1332874 - RNA, 19 nt, Artificial Sequence
  Description of Artificial Sequence: Synthetic oligonucleotide
  Sense strand starting at position 3016 of SEQ ID NO: 1242239
ucuggauaccucuggaaca

SEQ ID NO: 1332875 - RNA, 19 nt, Artificial Sequence
  Description of Artificial Sequence: Synthetic oligonucleotide
  Antisense strand to SEQ ID NO: 1332874
uguuccagagguauccaga

SEQ ID NO: 1332876 - RNA, 19 nt, Artificial Sequence
  Description of Artificial Sequence: Synthetic oligonucleotide
  Sense strand starting at position 3062 of SEQ ID NO: 1242239
acucccaucuggcuugaua

SEQ ID NO: 1332877 - RNA, 19 nt, Artificial Sequence
  Description of Artificial Sequence: Synthetic oligonucleotide
  Antisense strand to SEQ ID NO: 1332876
uaucaagccagaugggagu

SEQ ID NO: 1332878 - RNA, 19 nt, Artificial Sequence
  Description of Artificial Sequence: Synthetic oligonucleotide
  Sense strand starting at position 3064 of SEQ ID NO: 1242239
ucccaucuggcuugauaau

SEQ ID NO: 1332879 - RNA, 19 nt, Artificial Sequence
  Description of Artificial Sequence: Synthetic oligonucleotide
  Antisense strand to SEQ ID NO: 1332878
auuaucaagccagauggga

SEQ ID NO: 1332880 - RNA, 19 nt, Artificial Sequence
  Description of Artificial Sequence: Synthetic oligonucleotide
  Sense strand starting at position 3094 of SEQ ID NO: 1242239
cuaggacucuugcuuagua

SEQ ID NO: 1332881 - RNA, 19 nt, Artificial Sequence
  Description of Artificial Sequence: Synthetic oligonucleotide
  Antisense strand to SEQ ID NO: 1332880
uacuaagcaagaguccuag

SEQ ID NO: 1332882 - RNA, 19 nt, Artificial Sequence
  Description of Artificial Sequence: Synthetic oligonucleotide
  Sense strand starting at position 3095 of SEQ ID NO: 1242239
uaggacucuugcuuaguau

SEQ ID NO: 1332883 - RNA, 19 nt, Artificial Sequence
  Description of Artificial Sequence: Synthetic oligonucleotide
  Antisense strand to SEQ ID NO: 1332882
auacuaagcaagaguccua

SEQ ID NO: 1332884 - RNA, 19 nt, Artificial Sequence
  Description of Artificial Sequence: Synthetic oligonucleotide
  Sense strand starting at position 3138 of SEQ ID NO: 1242239
uguggauccucauccuaga

SEQ ID NO: 1332885 - RNA, 19 nt, Artificial Sequence
  Description of Artificial Sequence: Synthetic oligonucleotide
  Antisense strand to SEQ ID NO: 1332884
ucuaggaugaggauccaca

SEQ ID NO: 1332886 - RNA, 19 nt, Artificial Sequence
  Description of Artificial Sequence: Synthetic oligonucleotide
  Sense strand starting at position 3330 of SEQ ID NO: 1242239
agccaugguguacagauau

SEQ ID NO: 1332887 - RNA, 19 nt, Artificial Sequence
  Description of Artificial Sequence: Synthetic oligonucleotide
  Antisense strand to SEQ ID NO: 1332886
auaucuguacaccauggcu

SEQ ID NO: 1332888 - RNA, 19 nt, Artificial Sequence
  Description of Artificial Sequence: Synthetic oligonucleotide
  Sense strand starting at position 3356 of SEQ ID NO: 1242239
aucaccuuccgguaaucau

SEQ ID NO: 1332889 - RNA, 19 nt, Artificial Sequence
  Description of Artificial Sequence: Synthetic oligonucleotide
  Antisense strand to SEQ ID NO: 1332888
augauuaccggaaggugau

SEQ ID NO: 1332890 - RNA, 19 nt, Artificial Sequence
  Description of Artificial Sequence: Synthetic oligonucleotide
  Sense strand starting at position 3366 of SEQ ID NO: 1242239
gguaaucauuccuuuguga

SEQ ID NO: 1332891 - RNA, 19 nt, Artificial Sequence
  Description of Artificial Sequence: Synthetic oligonucleotide
  Antisense strand to SEQ ID NO: 1332890
ucacaaaggaaugauuacc

SEQ ID NO: 1332892 - RNA, 19 nt, Artificial Sequence
  Description of Artificial Sequence: Synthetic oligonucleotide
  Sense strand starting at position 3428 of SEQ ID NO: 1242239
uucucuaguccauggauaa

SEQ ID NO: 1332893 - RNA, 19 nt, Artificial Sequence
  Description of Artificial Sequence: Synthetic oligonucleotide
  Antisense strand to SEQ ID NO: 1332892
uuauccauggacuagagaa

SEQ ID NO: 1332894 - RNA, 19 nt, Artificial Sequence
  Description of Artificial Sequence: Synthetic oligonucleotide
  Sense strand starting at position 3429 of SEQ ID NO: 1242239
ucucuaguccauggauaau

SEQ ID NO: 1332895 - RNA, 19 nt, Artificial Sequence
  Description of Artificial Sequence: Synthetic oligonucleotide
  Antisense strand to SEQ ID NO: 1332894
auuauccauggacuagaga

SEQ ID NO: 1332896 - RNA, 19 nt, Artificial Sequence
  Description of Artificial Sequence: Synthetic oligonucleotide
  Sense strand starting at position 3447 of SEQ ID NO: 1242239
uagaaauuagcgugaacac

SEQ ID NO: 1332897 - RNA, 19 nt, Artificial Sequence
  Description of Artificial Sequence: Synthetic oligonucleotide
  Antisense strand to SEQ ID NO: 1332896
guguucacgcuaauuucua

SEQ ID NO: 1332898 - RNA, 19 nt, Artificial Sequence
  Description of Artificial Sequence: Synthetic oligonucleotide
  Sense strand starting at position 3448 of SEQ ID NO: 1242239
agaaauuagcgugaacaca

SEQ ID NO: 1332899 - RNA, 19 nt, Artificial Sequence
  Description of Artificial Sequence: Synthetic oligonucleotide
  Antisense strand to SEQ ID NO: 1332898
uguguucacgcuaauuucu

SEQ ID NO: 1332900 - RNA, 19 nt, Artificial Sequence
  Description of Artificial Sequence: Synthetic oligonucleotide
  Sense strand starting at position 3481 of SEQ ID NO: 1242239
gauugagugcugcaucacu

SEQ ID NO: 1332901 - RNA, 19 nt, Artificial Sequence
  Description of Artificial Sequence: Synthetic oligonucleotide
  Antisense strand to SEQ ID NO: 1332900
agugaugcagcacucaauc

SEQ ID NO: 1332902 - RNA, 19 nt, Artificial Sequence
  Description of Artificial Sequence: Synthetic oligonucleotide
  Sense strand starting at position 3643 of SEQ ID NO: 1242239
aaaucuaugcagggcagau

SEQ ID NO: 1332903 - RNA, 19 nt, Artificial Sequence
  Description of Artificial Sequence: Synthetic oligonucleotide
  Antisense strand to SEQ ID NO: 1332902
aucugcccugcauagauuu

SEQ ID NO: 1332904 - RNA, 19 nt, Artificial Sequence
  Description of Artificial Sequence: Synthetic oligonucleotide
  Sense strand starting at position 3722 of SEQ ID NO: 1242239
guguuuauguaucucagga

SEQ ID NO: 1332905 - RNA, 19 nt, Artificial Sequence
  Description of Artificial Sequence: Synthetic oligonucleotide
  Antisense strand to SEQ ID NO: 1332904
uccugagauacauaaacac

SEQ ID NO: 1332906 - RNA, 19 nt, Artificial Sequence
  Description of Artificial Sequence: Synthetic oligonucleotide
  Sense strand starting at position 235 of SEQ ID NO: 1242240
acugaccucugucuguaau

SEQ ID NO: 1332907 - RNA, 19 nt, Artificial Sequence
  Description of Artificial Sequence: Synthetic oligonucleotide
  Antisense strand to SEQ ID NO: 1332906
auuacagacagaggucagu

SEQ ID NO: 1332908 - RNA, 19 nt, Artificial Sequence
  Description of Artificial Sequence: Synthetic oligonucleotide
  Sense strand starting at position 236 of SEQ ID NO: 1242240
cugaccucugucuguaaua

SEQ ID NO: 1332909 - RNA, 19 nt, Artificial Sequence
  Description of Artificial Sequence: Synthetic oligonucleotide
  Antisense strand to SEQ ID NO: 1332908
uauuacagacagaggucag

SEQ ID NO: 1332910 - RNA, 19 nt, Artificial Sequence
  Description of Artificial Sequence: Synthetic oligonucleotide
  Sense strand starting at position 237 of SEQ ID NO: 1242240
ugaccucugucuguaauau

SEQ ID NO: 1332911 - RNA, 19 nt, Artificial Sequence
  Description of Artificial Sequence: Synthetic oligonucleotide
  Antisense strand to SEQ ID NO: 1332910
auauuacagacagagguca

SEQ ID NO: 1332912 - RNA, 19 nt, Artificial Sequence
  Description of Artificial Sequence: Synthetic oligonucleotide
  Sense strand starting at position 238 of SEQ ID NO: 1242240
gaccucugucuguaauaug

SEQ ID NO: 1332913 - RNA, 19 nt, Artificial Sequence
  Description of Artificial Sequence: Synthetic oligonucleotide
  Antisense strand to SEQ ID NO: 1332912
cauauuacagacagagguc

SEQ ID NO: 1332914 - RNA, 19 nt, Artificial Sequence
  Description of Artificial Sequence: Synthetic oligonucleotide
  Sense strand starting at position 311 of SEQ ID NO: 1242240
acaagaaauuacguuaagu

SEQ ID NO: 1332915 - RNA, 19 nt, Artificial Sequence
  Description of Artificial Sequence: Synthetic oligonucleotide
  Antisense strand to SEQ ID NO: 1332914
acuuaacguaauuucuugu

SEQ ID NO: 1332916 - RNA, 19 nt, Artificial Sequence
  Description of Artificial Sequence: Synthetic oligonucleotide
  Sense strand starting at position 316 of SEQ ID NO: 1242240
aaauuacguuaagugacaa

SEQ ID NO: 1332917 - RNA, 19 nt, Artificial Sequence
  Description of Artificial Sequence: Synthetic oligonucleotide
  Antisense strand to SEQ ID NO: 1332916
uugucacuuaacguaauuu

SEQ ID NO: 1332918 - RNA, 19 nt, Artificial Sequence
  Description of Artificial Sequence: Synthetic oligonucleotide
  Sense strand starting at position 616 of SEQ ID NO: 1242240
agucaaauguguucccuuu

SEQ ID NO: 1332919 - RNA, 19 nt, Artificial Sequence
  Description of Artificial Sequence: Synthetic oligonucleotide
  Antisense strand to SEQ ID NO: 1332918
aaagggaacacauuugacu

SEQ ID NO: 1332920 - RNA, 19 nt, Artificial Sequence
  Description of Artificial Sequence: Synthetic oligonucleotide
  Sense strand starting at position 618 of SEQ ID NO: 1242240
ucaaauguguucccuuuau

SEQ ID NO: 1332921 - RNA, 19 nt, Artificial Sequence
  Description of Artificial Sequence: Synthetic oligonucleotide
  Antisense strand to SEQ ID NO: 1332920
auaaagggaacacauuuga

SEQ ID NO: 1332922 - RNA, 19 nt, Artificial Sequence
  Description of Artificial Sequence: Synthetic oligonucleotide
  Sense strand starting at position 622 of SEQ ID NO: 1242240
auguguucccuuuaugggu

SEQ ID NO: 1332923 - RNA, 19 nt, Artificial Sequence
  Description of Artificial Sequence: Synthetic oligonucleotide
  Antisense strand to SEQ ID NO: 1332922
acccauaaagggaacacau

SEQ ID NO: 1332924 - RNA, 19 nt, Artificial Sequence
  Description of Artificial Sequence: Synthetic oligonucleotide
  Sense strand starting at position 669 of SEQ ID NO: 1242240
auaaucaaucgccacgaga

SEQ ID NO: 1332925 - RNA, 19 nt, Artificial Sequence
  Description of Artificial Sequence: Synthetic oligonucleotide
  Antisense strand to SEQ ID NO: 1332924
ucucguggcgauugauuau

SEQ ID NO: 1332926 - RNA, 19 nt, Artificial Sequence
  Description of Artificial Sequence: Synthetic oligonucleotide
  Sense strand starting at position 671 of SEQ ID NO: 1242240
aaucaaucgccacgagaga

SEQ ID NO: 1332927 - RNA, 19 nt, Artificial Sequence
  Description of Artificial Sequence: Synthetic oligonucleotide
  Antisense strand to SEQ ID NO: 1332926
ucucucguggcgauugauu

SEQ ID NO: 1332928 - RNA, 19 nt, Artificial Sequence
  Description of Artificial Sequence: Synthetic oligonucleotide
  Sense strand starting at position 736 of SEQ ID NO: 1242240
guccgaagaguuugguuac

SEQ ID NO: 1332929 - RNA, 19 nt, Artificial Sequence
  Description of Artificial Sequence: Synthetic oligonucleotide
  Antisense strand to SEQ ID NO: 1332928
guaaccaaacucuucggac

SEQ ID NO: 1332930 - RNA, 19 nt, Artificial Sequence
  Description of Artificial Sequence: Synthetic oligonucleotide
  Sense strand starting at position 739 of SEQ ID NO: 1242240
cgaagaguuugguuacgga

SEQ ID NO: 1332931 - RNA, 19 nt, Artificial Sequence
  Description of Artificial Sequence: Synthetic oligonucleotide
  Antisense strand to SEQ ID NO: 1332930
uccguaaccaaacucuucg

SEQ ID NO: 1332932 - RNA, 19 nt, Artificial Sequence
  Description of Artificial Sequence: Synthetic oligonucleotide
  Sense strand starting at position 863 of SEQ ID NO: 1242240
ugauucggugucgagagua

SEQ ID NO: 1332933 - RNA, 19 nt, Artificial Sequence
  Description of Artificial Sequence: Synthetic oligonucleotide
  Antisense strand to SEQ ID NO: 1332932
uacucucgacaccgaauca

SEQ ID NO: 1332934 - RNA, 19 nt, Artificial Sequence
  Description of Artificial Sequence: Synthetic oligonucleotide
  Sense strand starting at position 868 of SEQ ID NO: 1242240
cggugucgagaguauuugu

SEQ ID NO: 1332935 - RNA, 19 nt, Artificial Sequence
  Description of Artificial Sequence: Synthetic oligonucleotide
  Antisense strand to SEQ ID NO: 1332934
acaaauacucucgacaccg

SEQ ID NO: 1332936 - RNA, 19 nt, Artificial Sequence
  Description of Artificial Sequence: Synthetic oligonucleotide
  Sense strand starting at position 871 of SEQ ID NO: 1242240
ugucgagaguauuugucau

SEQ ID NO: 1332937 - RNA, 19 nt, Artificial Sequence
  Description of Artificial Sequence: Synthetic oligonucleotide
  Antisense strand to SEQ ID NO: 1332936
augacaaauacucucgaca

SEQ ID NO: 1332938 - RNA, 19 nt, Artificial Sequence
  Description of Artificial Sequence: Synthetic oligonucleotide
  Sense strand starting at position 873 of SEQ ID NO: 1242240
ucgagaguauuugucaucu

SEQ ID NO: 1332939 - RNA, 19 nt, Artificial Sequence
  Description of Artificial Sequence: Synthetic oligonucleotide
  Antisense strand to SEQ ID NO: 1332938
agaugacaaauacucucga

SEQ ID NO: 1332940 - RNA, 19 nt, Artificial Sequence
  Description of Artificial Sequence: Synthetic oligonucleotide
  Sense strand starting at position 960 of SEQ ID NO: 1242240
cacagaauguaugucagua

SEQ ID NO: 1332941 - RNA, 19 nt, Artificial Sequence
  Description of Artificial Sequence: Synthetic oligonucleotide
  Antisense strand to SEQ ID NO: 1332940
uacugacauacauucugug

SEQ ID NO: 1332942 - RNA, 19 nt, Artificial Sequence
  Description of Artificial Sequence: Synthetic oligonucleotide
  Sense strand starting at position 965 of SEQ ID NO: 1242240
aauguaugucaguacagga

SEQ ID NO: 1332943 - RNA, 19 nt, Artificial Sequence
  Description of Artificial Sequence: Synthetic oligonucleotide
  Antisense strand to SEQ ID NO: 1332942
uccuguacugacauacauu

SEQ ID NO: 1332944 - RNA, 19 nt, Artificial Sequence
  Description of Artificial Sequence: Synthetic oligonucleotide
  Sense strand starting at position 970 of SEQ ID NO: 1242240
augucaguacaggagugau

SEQ ID NO: 1332945 - RNA, 19 nt, Artificial Sequence
  Description of Artificial Sequence: Synthetic oligonucleotide
  Antisense strand to SEQ ID NO: 1332944
aucacuccuguacugacau

SEQ ID NO: 1332946 - RNA, 19 nt, Artificial Sequence
  Description of Artificial Sequence: Synthetic oligonucleotide
  Sense strand starting at position 973 of SEQ ID NO: 1242240
ucaguacaggagugaugaa

SEQ ID NO: 1332947 - RNA, 19 nt, Artificial Sequence
  Description of Artificial Sequence: Synthetic oligonucleotide
  Antisense strand to SEQ ID NO: 1332946
uucaucacuccuguacuga

SEQ ID NO: 1332948 - RNA, 19 nt, Artificial Sequence
  Description of Artificial Sequence: Synthetic oligonucleotide
  Sense strand starting at position 1146 of SEQ ID NO: 1242240
gcgggaggaugguuugaga

SEQ ID NO: 1332949 - RNA, 19 nt, Artificial Sequence
  Description of Artificial Sequence: Synthetic oligonucleotide
  Antisense strand to SEQ ID NO: 1332948
ucucaaaccauccucccgc

SEQ ID NO: 1332950 - RNA, 19 nt, Artificial Sequence
  Description of Artificial Sequence: Synthetic oligonucleotide
  Sense strand starting at position 1584 of SEQ ID NO: 1242240
caguguugcccagaauggu

SEQ ID NO: 1332951 - RNA, 19 nt, Artificial Sequence
  Description of Artificial Sequence: Synthetic oligonucleotide
  Antisense strand to SEQ ID NO: 1332950
accauucugggcaacacug

SEQ ID NO: 1332952 - RNA, 19 nt, Artificial Sequence
  Description of Artificial Sequence: Synthetic oligonucleotide
  Sense strand starting at position 1775 of SEQ ID NO: 1242240
uagguaacuccacguauga

SEQ ID NO: 1332953 - RNA, 19 nt, Artificial Sequence
  Description of Artificial Sequence: Synthetic oligonucleotide
  Antisense strand to SEQ ID NO: 1332952
ucauacguggaguuaccua

SEQ ID NO: 1332954 - RNA, 19 nt, Artificial Sequence
  Description of Artificial Sequence: Synthetic oligonucleotide
  Sense strand starting at position 1903 of SEQ ID NO: 1242240
ggagaaacaugaucgcuua

SEQ ID NO: 1332955 - RNA, 19 nt, Artificial Sequence
  Description of Artificial Sequence: Synthetic oligonucleotide
  Antisense strand to SEQ ID NO: 1332954
uaagcgaucauguuucucc

SEQ ID NO: 1332956 - RNA, 19 nt, Artificial Sequence
  Description of Artificial Sequence: Synthetic oligonucleotide
  Sense strand starting at position 1904 of SEQ ID NO: 1242240
gagaaacaugaucgcuuau

SEQ ID NO: 1332957 - RNA, 19 nt, Artificial Sequence
  Description of Artificial Sequence: Synthetic oligonucleotide
  Antisense strand to SEQ ID NO: 1332956
auaagcgaucauguuucuc

SEQ ID NO: 1332958 - RNA, 19 nt, Artificial Sequence
  Description of Artificial Sequence: Synthetic oligonucleotide
  Sense strand starting at position 1980 of SEQ ID NO: 1242240
ucacguguucgucaauuuc

SEQ ID NO: 1332959 - RNA, 19 nt, Artificial Sequence
  Description of Artificial Sequence: Synthetic oligonucleotide
  Antisense strand to SEQ ID NO: 1332958
gaaauugacgaacacguga

SEQ ID NO: 1332960 - RNA, 19 nt, Artificial Sequence
  Description of Artificial Sequence: Synthetic oligonucleotide
  Sense strand starting at position 2120 of SEQ ID NO: 1242240
ugcaacuuugcaggcuaaa

SEQ ID NO: 1332961 - RNA, 19 nt, Artificial Sequence
  Description of Artificial Sequence: Synthetic oligonucleotide
  Antisense strand to SEQ ID NO: 1332960
uuuagccugcaaaguugca

SEQ ID NO: 1332962 - RNA, 19 nt, Artificial Sequence
  Description of Artificial Sequence: Synthetic oligonucleotide
  Sense strand starting at position 2529 of SEQ ID NO: 1242240
cuuucuuaugguggugagu

SEQ ID NO: 1332963 - RNA, 19 nt, Artificial Sequence
  Description of Artificial Sequence: Synthetic oligonucleotide
  Antisense strand to SEQ ID NO: 1332962
acucaccaccauaagaaag

SEQ ID NO: 1332964 - RNA, 19 nt, Artificial Sequence
  Description of Artificial Sequence: Synthetic oligonucleotide
  Sense strand starting at position 2538 of SEQ ID NO: 1242240
gguggugaguagcuaauaa

SEQ ID NO: 1332965 - RNA, 19 nt, Artificial Sequence
  Description of Artificial Sequence: Synthetic oligonucleotide
  Antisense strand to SEQ ID NO: 1332964
uuauuagcuacucaccacc

SEQ ID NO: 1332966 - RNA, 19 nt, Artificial Sequence
  Description of Artificial Sequence: Synthetic oligonucleotide
  Sense strand starting at position 2622 of SEQ ID NO: 1242240
auaagacucucguuuaaag

SEQ ID NO: 1332967 - RNA, 19 nt, Artificial Sequence
  Description of Artificial Sequence: Synthetic oligonucleotide
  Antisense strand to SEQ ID NO: 1332966
cuuuaaacgagagucuuau

SEQ ID NO: 1332968 - RNA, 19 nt, Artificial Sequence
  Description of Artificial Sequence: Synthetic oligonucleotide
  Sense strand starting at position 2667 of SEQ ID NO: 1242240
uuacaaagaucaucguuac

SEQ ID NO: 1332969 - RNA, 19 nt, Artificial Sequence
  Description of Artificial Sequence: Synthetic oligonucleotide
  Antisense strand to SEQ ID NO: 1332968
guaacgaugaucuuuguaa

SEQ ID NO: 1332970 - RNA, 19 nt, Artificial Sequence
  Description of Artificial Sequence: Synthetic oligonucleotide
  Sense strand starting at position 2723 of SEQ ID NO: 1242240
uuaacuguguaaccagaaa

SEQ ID NO: 1332971 - RNA, 19 nt, Artificial Sequence
  Description of Artificial Sequence: Synthetic oligonucleotide
  Antisense strand to SEQ ID NO: 1332970
uuucugguuacacaguuaa

SEQ ID NO: 1332972 - RNA, 19 nt, Artificial Sequence
  Description of Artificial Sequence: Synthetic oligonucleotide
  Sense strand starting at position 3364 of SEQ ID NO: 1242240
gaauaugguuuguauuuac

SEQ ID NO: 1332973 - RNA, 19 nt, Artificial Sequence
  Description of Artificial Sequence: Synthetic oligonucleotide
  Antisense strand to SEQ ID NO: 1332972
guaaauacaaaccauauuc

SEQ ID NO: 1332974 - RNA, 19 nt, Artificial Sequence
  Description of Artificial Sequence: Synthetic oligonucleotide
  Sense strand starting at position 3371 of SEQ ID NO: 1242240
guuuguauuuacuuguagu

SEQ ID NO: 1332975 - RNA, 19 nt, Artificial Sequence
  Description of Artificial Sequence: Synthetic oligonucleotide
  Antisense strand to SEQ ID NO: 1332974
acuacaaguaaauacaaac

SEQ ID NO: 1332976 - RNA, 19 nt, Artificial Sequence
  Description of Artificial Sequence: Synthetic oligonucleotide
  Sense strand starting at position 3377 of SEQ ID NO: 1242240
auuuacuuguaguugcaua

SEQ ID NO: 1332977 - RNA, 19 nt, Artificial Sequence
  Description of Artificial Sequence: Synthetic oligonucleotide
  Antisense strand to SEQ ID NO: 1332976
uaugcaacuacaaguaaau

SEQ ID NO: 1332978 - RNA, 19 nt, Artificial Sequence
  Description of Artificial Sequence: Synthetic oligonucleotide
  Sense strand starting at position 3432 of SEQ ID NO: 1242240
acugguuuccucugggaua

SEQ ID NO: 1332979 - RNA, 19 nt, Artificial Sequence
  Description of Artificial Sequence: Synthetic oligonucleotide
  Antisense strand to SEQ ID NO: 1332978
uaucccagaggaaaccagu

SEQ ID NO: 1332980 - RNA, 19 nt, Artificial Sequence
  Description of Artificial Sequence: Synthetic oligonucleotide
  Sense strand starting at position 3454 of SEQ ID NO: 1242240
aacuuaguugcaggagaaa

SEQ ID NO: 1332981 - RNA, 19 nt, Artificial Sequence
  Description of Artificial Sequence: Synthetic oligonucleotide
  Antisense strand to SEQ ID NO: 1332980
uuucuccugcaacuaaguu

SEQ ID NO: 1332982 - RNA, 19 nt, Artificial Sequence
  Description of Artificial Sequence: Synthetic oligonucleotide
  Sense strand starting at position 3487 of SEQ ID NO: 1242240
gaggcagacuuauugcuau

SEQ ID NO: 1332983 - RNA, 19 nt, Artificial Sequence
  Description of Artificial Sequence: Synthetic oligonucleotide
  Antisense strand to SEQ ID NO: 1332982
auagcaauaagucugccuc

SEQ ID NO: 1332984 - RNA, 19 nt, Artificial Sequence
  Description of Artificial Sequence: Synthetic oligonucleotide
  Sense strand starting at position 3490 of SEQ ID NO: 1242240
gcagacuuauugcuaugua

SEQ ID NO: 1332985 - RNA, 19 nt, Artificial Sequence
  Description of Artificial Sequence: Synthetic oligonucleotide
  Antisense strand to SEQ ID NO: 1332984
uacauagcaauaagucugc

SEQ ID NO: 1332986 - RNA, 19 nt, Artificial Sequence
  Description of Artificial Sequence: Synthetic oligonucleotide
  Sense strand starting at position 26 of SEQ ID NO: 1242241
ugucuagcacaugaugauu

SEQ ID NO: 1332987 - RNA, 19 nt, Artificial Sequence
  Description of Artificial Sequence: Synthetic oligonucleotide
  Antisense strand to SEQ ID NO: 1332986
aaucaucaugugcuagaca

SEQ ID NO: 1332988 - RNA, 19 nt, Artificial Sequence
  Description of Artificial Sequence: Synthetic oligonucleotide
  Sense strand starting at position 31 of SEQ ID NO: 1242241
agcacaugaugauuaggua

SEQ ID NO: 1332989 - RNA, 19 nt, Artificial Sequence
  Description of Artificial Sequence: Synthetic oligonucleotide
  Antisense strand to SEQ ID NO: 1332988
uaccuaaucaucaugugcu

SEQ ID NO: 1332990 - RNA, 19 nt, Artificial Sequence
  Description of Artificial Sequence: Synthetic oligonucleotide
  Sense strand starting at position 32 of SEQ ID NO: 1242241
gcacaugaugauuagguau

SEQ ID NO: 1332991 - RNA, 19 nt, Artificial Sequence
  Description of Artificial Sequence: Synthetic oligonucleotide
  Antisense strand to SEQ ID NO: 1332990
auaccuaaucaucaugugc

SEQ ID NO: 1332992 - RNA, 19 nt, Artificial Sequence
  Description of Artificial Sequence: Synthetic oligonucleotide
  Sense strand starting at position 35 of SEQ ID NO: 1242241
caugaugauuagguaugua

SEQ ID NO: 1332993 - RNA, 19 nt, Artificial Sequence
  Description of Artificial Sequence: Synthetic oligonucleotide
  Antisense strand to SEQ ID NO: 1332992
uacauaccuaaucaucaug

SEQ ID NO: 1332994 - RNA, 19 nt, Artificial Sequence
  Description of Artificial Sequence: Synthetic oligonucleotide
  Sense strand starting at position 38 of SEQ ID NO: 1242241
gaugauuagguauguacac

SEQ ID NO: 1332995 - RNA, 19 nt, Artificial Sequence
  Description of Artificial Sequence: Synthetic oligonucleotide
  Antisense strand to SEQ ID NO: 1332994
guguacauaccuaaucauc

SEQ ID NO: 1332996 - RNA, 19 nt, Artificial Sequence
  Description of Artificial Sequence: Synthetic oligonucleotide
  Sense strand starting at position 105 of SEQ ID NO: 1242241
cagcaaguccuagauggau

SEQ ID NO: 1332997 - RNA, 19 nt, Artificial Sequence
  Description of Artificial Sequence: Synthetic oligonucleotide
  Antisense strand to SEQ ID NO: 1332996
auccaucuaggacuugcug

SEQ ID NO: 1332998 - RNA, 19 nt, Artificial Sequence
  Description of Artificial Sequence: Synthetic oligonucleotide
  Sense strand starting at position 452 of SEQ ID NO: 1242241
ccagccucccacugagaua

SEQ ID NO: 1332999 - RNA, 19 nt, Artificial Sequence
  Description of Artificial Sequence: Synthetic oligonucleotide
  Antisense strand to SEQ ID NO: 1332998
uaucucagugggaggcugg

SEQ ID NO: 1333000 - RNA, 19 nt, Artificial Sequence
  Description of Artificial Sequence: Synthetic oligonucleotide
  Sense strand starting at position 1012 of SEQ ID NO: 1242241
auguucuugccagaaacau

SEQ ID NO: 1333001 - RNA, 19 nt, Artificial Sequence
  Description of Artificial Sequence: Synthetic oligonucleotide
  Antisense strand to SEQ ID NO: 1333000
auguuucuggcaagaacau

SEQ ID NO: 1333002 - RNA, 19 nt, Artificial Sequence
  Description of Artificial Sequence: Synthetic oligonucleotide
  Sense strand starting at position 1018 of SEQ ID NO: 1242241
uugccagaaacaugagagu

SEQ ID NO: 1333003 - RNA, 19 nt, Artificial Sequence
  Description of Artificial Sequence: Synthetic oligonucleotide
  Antisense strand to SEQ ID NO: 1333002
acucucauguuucuggcaa

SEQ ID NO: 1333004 - RNA, 19 nt, Artificial Sequence
  Description of Artificial Sequence: Synthetic oligonucleotide
  Sense strand starting at position 1141 of SEQ ID NO: 1242241
acccaugcaccuggagaaa

SEQ ID NO: 1333005 - RNA, 19 nt, Artificial Sequence
  Description of Artificial Sequence: Synthetic oligonucleotide
  Antisense strand to SEQ ID NO: 1333004
uuucuccaggugcaugggu

SEQ ID NO: 1333006 - RNA, 19 nt, Artificial Sequence
  Description of Artificial Sequence: Synthetic oligonucleotide
  Sense strand starting at position 1399 of SEQ ID NO: 1242241
gagugaucuagguggugag

SEQ ID NO: 1333007 - RNA, 19 nt, Artificial Sequence
  Description of Artificial Sequence: Synthetic oligonucleotide
  Antisense strand to SEQ ID NO: 1333006
cucaccaccuagaucacuc

SEQ ID NO: 1333008 - RNA, 19 nt, Artificial Sequence
  Description of Artificial Sequence: Synthetic oligonucleotide
  Sense strand starting at position 1494 of SEQ ID NO: 1242241
gaacaaugugcucaccaga

SEQ ID NO: 1333009 - RNA, 19 nt, Artificial Sequence
  Description of Artificial Sequence: Synthetic oligonucleotide
  Antisense strand to SEQ ID NO: 1333008
ucuggugagcacauuguuc

SEQ ID NO: 1333010 - RNA, 19 nt, Artificial Sequence
  Description of Artificial Sequence: Synthetic oligonucleotide
  Sense strand starting at position 1620 of SEQ ID NO: 1242241
augagaugcuguuuggaaa

SEQ ID NO: 1333011 - RNA, 19 nt, Artificial Sequence
  Description of Artificial Sequence: Synthetic oligonucleotide
  Antisense strand to SEQ ID NO: 1333010
uuuccaaacagcaucucau

SEQ ID NO: 1333012 - RNA, 19 nt, Artificial Sequence
  Description of Artificial Sequence: Synthetic oligonucleotide
  Sense strand starting at position 1645 of SEQ ID NO: 1242241
acuggaaagcauuguacaa

SEQ ID NO: 1333013 - RNA, 19 nt, Artificial Sequence
  Description of Artificial Sequence: Synthetic oligonucleotide
  Antisense strand to SEQ ID NO: 1333012
uuguacaaugcuuuccagu

SEQ ID NO: 1333014 - RNA, 19 nt, Artificial Sequence
  Description of Artificial Sequence: Synthetic oligonucleotide
  Sense strand starting at position 2233 of SEQ ID NO: 1242241
gaagcuagguuaucuagga

SEQ ID NO: 1333015 - RNA, 19 nt, Artificial Sequence
  Description of Artificial Sequence: Synthetic oligonucleotide
  Antisense strand to SEQ ID NO: 1333014
uccuagauaaccuagcuuc

SEQ ID NO: 1333016 - RNA, 19 nt, Artificial Sequence
  Description of Artificial Sequence: Synthetic oligonucleotide
  Sense strand starting at position 2234 of SEQ ID NO: 1242241
aagcuagguuaucuaggaa

SEQ ID NO: 1333017 - RNA, 19 nt, Artificial Sequence
  Description of Artificial Sequence: Synthetic oligonucleotide
  Antisense strand to SEQ ID NO: 1333016
uuccuagauaaccuagcuu

SEQ ID NO: 1333018 - RNA, 19 nt, Artificial Sequence
  Description of Artificial Sequence: Synthetic oligonucleotide
  Sense strand starting at position 2237 of SEQ ID NO: 1242241
cuagguuaucuaggaacau

SEQ ID NO: 1333019 - RNA, 19 nt, Artificial Sequence
  Description of Artificial Sequence: Synthetic oligonucleotide
  Antisense strand to SEQ ID NO: 1333018
auguuccuagauaaccuag

SEQ ID NO: 1333020 - RNA, 19 nt, Artificial Sequence
  Description of Artificial Sequence: Synthetic oligonucleotide
  Sense strand starting at position 2307 of SEQ ID NO: 1242241
gcaagacuucgccaauaac

SEQ ID NO: 1333021 - RNA, 19 nt, Artificial Sequence
  Description of Artificial Sequence: Synthetic oligonucleotide
  Antisense strand to SEQ ID NO: 1333020
guuauuggcgaagucuugc

SEQ ID NO: 1333022 - RNA, 19 nt, Artificial Sequence
  Description of Artificial Sequence: Synthetic oligonucleotide
  Sense strand starting at position 2310 of SEQ ID NO: 1242241
agacuucgccaauaacaau

SEQ ID NO: 1333023 - RNA, 19 nt, Artificial Sequence
  Description of Artificial Sequence: Synthetic oligonucleotide
  Antisense strand to SEQ ID NO: 1333022
auuguuauuggcgaagucu

SEQ ID NO: 1333024 - RNA, 19 nt, Artificial Sequence
  Description of Artificial Sequence: Synthetic oligonucleotide
  Sense strand starting at position 2448 of SEQ ID NO: 1242241
ucauucuauugauuaggga

SEQ ID NO: 1333025 - RNA, 19 nt, Artificial Sequence
  Description of Artificial Sequence: Synthetic oligonucleotide
  Antisense strand to SEQ ID NO: 1333024
ucccuaaucaauagaauga

SEQ ID NO: 1333026 - RNA, 19 nt, Artificial Sequence
  Description of Artificial Sequence: Synthetic oligonucleotide
  Sense strand starting at position 2541 of SEQ ID NO: 1242241
gagauuguauaguuaacca

SEQ ID NO: 1333027 - RNA, 19 nt, Artificial Sequence
  Description of Artificial Sequence: Synthetic oligonucleotide
  Antisense strand to SEQ ID NO: 1333026
ugguuaacuauacaaucuc

SEQ ID NO: 1333028 - RNA, 19 nt, Artificial Sequence
  Description of Artificial Sequence: Synthetic oligonucleotide
  Sense strand starting at position 2584 of SEQ ID NO: 1242241
acauauuguguacaacuau

SEQ ID NO: 1333029 - RNA, 19 nt, Artificial Sequence
  Description of Artificial Sequence: Synthetic oligonucleotide
  Antisense strand to SEQ ID NO: 1333028
auaguuguacacaauaugu

SEQ ID NO: 1333030 - RNA, 19 nt, Artificial Sequence
  Description of Artificial Sequence: Synthetic oligonucleotide
  Sense strand starting at position 2590 of SEQ ID NO: 1242241
uguguacaacuauauugaa

SEQ ID NO: 1333031 - RNA, 19 nt, Artificial Sequence
  Description of Artificial Sequence: Synthetic oligonucleotide
  Antisense strand to SEQ ID NO: 1333030
uucaauauaguuguacaca

SEQ ID NO: 1333032 - RNA, 19 nt, Artificial Sequence
  Description of Artificial Sequence: Synthetic oligonucleotide
  Sense strand starting at position 2863 of SEQ ID NO: 1242241
ggaaaugauuaguuaucau

SEQ ID NO: 1333033 - RNA, 19 nt, Artificial Sequence
  Description of Artificial Sequence: Synthetic oligonucleotide
  Antisense strand to SEQ ID NO: 1333032
augauaacuaaucauuucc

SEQ ID NO: 1333034 - RNA, 19 nt, Artificial Sequence
  Description of Artificial Sequence: Synthetic oligonucleotide
  Sense strand starting at position 2898 of SEQ ID NO: 1242241
agcagagugcuacaagaaa

SEQ ID NO: 1333035 - RNA, 19 nt, Artificial Sequence
  Description of Artificial Sequence: Synthetic oligonucleotide
  Antisense strand to SEQ ID NO: 1333034
uuucuuguagcacucugcu

SEQ ID NO: 1333036 - RNA, 19 nt, Artificial Sequence
  Description of Artificial Sequence: Synthetic oligonucleotide
  Sense strand starting at position 3116 of SEQ ID NO: 1242241
uuugguaaucucuggaaau

SEQ ID NO: 1333037 - RNA, 19 nt, Artificial Sequence
  Description of Artificial Sequence: Synthetic oligonucleotide
  Antisense strand to SEQ ID NO: 1333036
auuuccagagauuaccaaa

SEQ ID NO: 1333038 - RNA, 19 nt, Artificial Sequence
  Description of Artificial Sequence: Synthetic oligonucleotide
  Sense strand starting at position 3317 of SEQ ID NO: 1242241
ucaaguuauggccaguuaa

SEQ ID NO: 1333039 - RNA, 19 nt, Artificial Sequence
  Description of Artificial Sequence: Synthetic oligonucleotide
  Antisense strand to SEQ ID NO: 1333038
uuaacuggccauaacuuga

SEQ ID NO: 1333040 - RNA, 19 nt, Artificial Sequence
  Description of Artificial Sequence: Synthetic oligonucleotide
  Sense strand starting at position 3496 of SEQ ID NO: 1242241
ucacuauaucaugggcauu

SEQ ID NO: 1333041 - RNA, 19 nt, Artificial Sequence
  Description of Artificial Sequence: Synthetic oligonucleotide
  Antisense strand to SEQ ID NO: 1333040
aaugcccaugauauaguga

SEQ ID NO: 1333042 - RNA, 19 nt, Artificial Sequence
  Description of Artificial Sequence: Synthetic oligonucleotide
  Sense strand starting at position 3612 of SEQ ID NO: 1242241
gauaauccagcaugguaaa

SEQ ID NO: 1333043 - RNA, 19 nt, Artificial Sequence
  Description of Artificial Sequence: Synthetic oligonucleotide
  Antisense strand to SEQ ID NO: 1333042
uuuaccaugcuggauuauc

SEQ ID NO: 1333044 - RNA, 19 nt, Artificial Sequence
  Description of Artificial Sequence: Synthetic oligonucleotide
  Sense strand starting at position 3613 of SEQ ID NO: 1242241
auaauccagcaugguaaau

SEQ ID NO: 1333045 - RNA, 19 nt, Artificial Sequence
  Description of Artificial Sequence: Synthetic oligonucleotide
  Antisense strand to SEQ ID NO: 1333044
auuuaccaugcuggauuau

SEQ ID NO: 1333046 - RNA, 19 nt, Artificial Sequence
  Description of Artificial Sequence: Synthetic oligonucleotide
  Sense strand starting at position 3677 of SEQ ID NO: 1242241
cgaggagacuucccaguga

SEQ ID NO: 1333047 - RNA, 19 nt, Artificial Sequence
  Description of Artificial Sequence: Synthetic oligonucleotide
  Antisense strand to SEQ ID NO: 1333046
ucacugggaagucuccucg

SEQ ID NO: 1333048 - RNA, 19 nt, Artificial Sequence
  Description of Artificial Sequence: Synthetic oligonucleotide
  Sense strand starting at position 3681 of SEQ ID NO: 1242241
gagacuucccagugaaagu

SEQ ID NO: 1333049 - RNA, 19 nt, Artificial Sequence
  Description of Artificial Sequence: Synthetic oligonucleotide
  Antisense strand to SEQ ID NO: 1333048
acuuucacugggaagucuc

SEQ ID NO: 1333050 - RNA, 19 nt, Artificial Sequence
  Description of Artificial Sequence: Synthetic oligonucleotide
  Sense strand starting at position 3690 of SEQ ID NO: 1242241
cagugaaagugacugaucu

SEQ ID NO: 1333051 - RNA, 19 nt, Artificial Sequence
  Description of Artificial Sequence: Synthetic oligonucleotide
  Antisense strand to SEQ ID NO: 1333050
agaucagucacuuucacug

SEQ ID NO: 1333052 - RNA, 19 nt, Artificial Sequence
  Description of Artificial Sequence: Synthetic oligonucleotide
  Sense strand starting at position 3692 of SEQ ID NO: 1242241
gugaaagugacugaucugu

SEQ ID NO: 1333053 - RNA, 19 nt, Artificial Sequence
  Description of Artificial Sequence: Synthetic oligonucleotide
  Antisense strand to SEQ ID NO: 1333052
acagaucagucacuuucac

SEQ ID NO: 1333054 - RNA, 19 nt, Artificial Sequence
  Description of Artificial Sequence: Synthetic oligonucleotide
  Sense strand starting at position 3694 of SEQ ID NO: 1242241
gaaagugacugaucuguag

SEQ ID NO: 1333055 - RNA, 19 nt, Artificial Sequence
  Description of Artificial Sequence: Synthetic oligonucleotide
  Antisense strand to SEQ ID NO: 1333054
cuacagaucagucacuuuc

SEQ ID NO: 1333056 - RNA, 19 nt, Artificial Sequence
  Description of Artificial Sequence: Synthetic oligonucleotide
  Sense strand starting at position 3721 of SEQ ID NO: 1242241
agaacaugaguaggaguuu

SEQ ID NO: 1333057 - RNA, 19 nt, Artificial Sequence
  Description of Artificial Sequence: Synthetic oligonucleotide
  Antisense strand to SEQ ID NO: 1333056
aaacuccuacucauguucu

SEQ ID NO: 1333058 - RNA, 19 nt, Artificial Sequence
  Description of Artificial Sequence: Synthetic oligonucleotide
  Sense strand starting at position 3783 of SEQ ID NO: 1242241
cguguagaaaggcaugaaa

SEQ ID NO: 1333059 - RNA, 19 nt, Artificial Sequence
  Description of Artificial Sequence: Synthetic oligonucleotide
  Antisense strand to SEQ ID NO: 1333058
uuucaugccuuucuacacg

SEQ ID NO: 1333060 - RNA, 19 nt, Artificial Sequence
  Description of Artificial Sequence: Synthetic oligonucleotide
  Sense strand starting at position 3785 of SEQ ID NO: 1242241
uguagaaaggcaugaaaug

SEQ ID NO: 1333061 - RNA, 19 nt, Artificial Sequence
  Description of Artificial Sequence: Synthetic oligonucleotide
  Antisense strand to SEQ ID NO: 1333060
cauuucaugccuuucuaca

SEQ ID NO: 1333062 - RNA, 19 nt, Artificial Sequence
  Description of Artificial Sequence: Synthetic oligonucleotide
  Sense strand starting at position 3926 of SEQ ID NO: 1242241
gagcuaaaggccuaggauu

SEQ ID NO: 1333063 - RNA, 19 nt, Artificial Sequence
  Description of Artificial Sequence: Synthetic oligonucleotide
  Antisense strand to SEQ ID NO: 1333062
aauccuaggccuuuagcuc

SEQ ID NO: 1333064 - RNA, 19 nt, Artificial Sequence
  Description of Artificial Sequence: Synthetic oligonucleotide
  Sense strand starting at position 3938 of SEQ ID NO: 1242241
uaggauuaccuaggagcua

SEQ ID NO: 1333065 - RNA, 19 nt, Artificial Sequence
  Description of Artificial Sequence: Synthetic oligonucleotide
  Antisense strand to SEQ ID NO: 1333064
uagcuccuagguaauccua

SEQ ID NO: 1333066 - RNA, 19 nt, Artificial Sequence
  Description of Artificial Sequence: Synthetic oligonucleotide
  Sense strand starting at position 55 of SEQ ID NO: 1242242
ugcacucuagucugagcua

SEQ ID NO: 1333067 - RNA, 19 nt, Artificial Sequence
  Description of Artificial Sequence: Synthetic oligonucleotide
  Antisense strand to SEQ ID NO: 1333066
uagcucagacuagagugca

SEQ ID NO: 1333068 - RNA, 19 nt, Artificial Sequence
  Description of Artificial Sequence: Synthetic oligonucleotide
  Sense strand starting at position 139 of SEQ ID NO: 1242242
aaauuaugguguuaggcaa

SEQ ID NO: 1333069 - RNA, 19 nt, Artificial Sequence
  Description of Artificial Sequence: Synthetic oligonucleotide
  Antisense strand to SEQ ID NO: 1333068
uugccuaacaccauaauuu

SEQ ID NO: 1333070 - RNA, 19 nt, Artificial Sequence
  Description of Artificial Sequence: Synthetic oligonucleotide
  Sense strand starting at position 143 of SEQ ID NO: 1242242
uaugguguuaggcaagaga

SEQ ID NO: 1333071 - RNA, 19 nt, Artificial Sequence
  Description of Artificial Sequence: Synthetic oligonucleotide
  Antisense strand to SEQ ID NO: 1333070
ucucuugccuaacaccaua

SEQ ID NO: 1333072 - RNA, 19 nt, Artificial Sequence
  Description of Artificial Sequence: Synthetic oligonucleotide
  Sense strand starting at position 156 of SEQ ID NO: 1242242
aagagacugcacugaguua

SEQ ID NO: 1333073 - RNA, 19 nt, Artificial Sequence
  Description of Artificial Sequence: Synthetic oligonucleotide
  Antisense strand to SEQ ID NO: 1333072
uaacucagugcagucucuu

SEQ ID NO: 1333074 - RNA, 19 nt, Artificial Sequence
  Description of Artificial Sequence: Synthetic oligonucleotide
  Sense strand starting at position 208 of SEQ ID NO: 1242242
cagaguguacugugugaca

SEQ ID NO: 1333075 - RNA, 19 nt, Artificial Sequence
  Description of Artificial Sequence: Synthetic oligonucleotide
  Antisense strand to SEQ ID NO: 1333074
ugucacacaguacacucug

SEQ ID NO: 1333076 - RNA, 19 nt, Artificial Sequence
  Description of Artificial Sequence: Synthetic oligonucleotide
  Sense strand starting at position 210 of SEQ ID NO: 1242242
gaguguacugugugacagu

SEQ ID NO: 1333077 - RNA, 19 nt, Artificial Sequence
  Description of Artificial Sequence: Synthetic oligonucleotide
  Antisense strand to SEQ ID NO: 1333076
acugucacacaguacacuc

SEQ ID NO: 1333078 - RNA, 19 nt, Artificial Sequence
  Description of Artificial Sequence: Synthetic oligonucleotide
  Sense strand starting at position 254 of SEQ ID NO: 1242242
ccauauauguuagucacuu

SEQ ID NO: 1333079 - RNA, 19 nt, Artificial Sequence
  Description of Artificial Sequence: Synthetic oligonucleotide
  Antisense strand to SEQ ID NO: 1333078
aagugacuaacauauaugg

SEQ ID NO: 1333080 - RNA, 19 nt, Artificial Sequence
  Description of Artificial Sequence: Synthetic oligonucleotide
  Sense strand starting at position 258 of SEQ ID NO: 1242242
auauguuagucacuuguga

SEQ ID NO: 1333081 - RNA, 19 nt, Artificial Sequence
  Description of Artificial Sequence: Synthetic oligonucleotide
  Antisense strand to SEQ ID NO: 1333080
ucacaagugacuaacauau

SEQ ID NO: 1333082 - RNA, 19 nt, Artificial Sequence
  Description of Artificial Sequence: Synthetic oligonucleotide
  Sense strand starting at position 260 of SEQ ID NO: 1242242
auguuagucacuugugacu

SEQ ID NO: 1333083 - RNA, 19 nt, Artificial Sequence
  Description of Artificial Sequence: Synthetic oligonucleotide
  Antisense strand to SEQ ID NO: 1333082
agucacaagugacuaacau

SEQ ID NO: 1333084 - RNA, 19 nt, Artificial Sequence
  Description of Artificial Sequence: Synthetic oligonucleotide
  Sense strand starting at position 273 of SEQ ID NO: 1242242
gugacuugcugaucuacaa

SEQ ID NO: 1333085 - RNA, 19 nt, Artificial Sequence
  Description of Artificial Sequence: Synthetic oligonucleotide
  Antisense strand to SEQ ID NO: 1333084
uuguagaucagcaagucac

SEQ ID NO: 1333086 - RNA, 19 nt, Artificial Sequence
  Description of Artificial Sequence: Synthetic oligonucleotide
  Sense strand starting at position 304 of SEQ ID NO: 1242242
aauaacugguguuaguaau

SEQ ID NO: 1333087 - RNA, 19 nt, Artificial Sequence
  Description of Artificial Sequence: Synthetic oligonucleotide
  Antisense strand to SEQ ID NO: 1333086
auuacuaacaccaguuauu

SEQ ID NO: 1333088 - RNA, 19 nt, Artificial Sequence
  Description of Artificial Sequence: Synthetic oligonucleotide
  Sense strand starting at position 310 of SEQ ID NO: 1242242
ugguguuaguaauaaugau

SEQ ID NO: 1333089 - RNA, 19 nt, Artificial Sequence
  Description of Artificial Sequence: Synthetic oligonucleotide
  Antisense strand to SEQ ID NO: 1333088
aucauuauuacuaacacca

SEQ ID NO: 1333090 - RNA, 19 nt, Artificial Sequence
  Description of Artificial Sequence: Synthetic oligonucleotide
  Sense strand starting at position 372 of SEQ ID NO: 1242242
gguccucuaugucaaggaa

SEQ ID NO: 1333091 - RNA, 19 nt, Artificial Sequence
  Description of Artificial Sequence: Synthetic oligonucleotide
  Antisense strand to SEQ ID NO: 1333090
uuccuugacauagaggacc

SEQ ID NO: 1333092 - RNA, 19 nt, Artificial Sequence
  Description of Artificial Sequence: Synthetic oligonucleotide
  Sense strand starting at position 375 of SEQ ID NO: 1242242
ccucuaugucaaggaagaa

SEQ ID NO: 1333093 - RNA, 19 nt, Artificial Sequence
  Description of Artificial Sequence: Synthetic oligonucleotide
  Antisense strand to SEQ ID NO: 1333092
uucuuccuugacauagagg

SEQ ID NO: 1333094 - RNA, 19 nt, Artificial Sequence
  Description of Artificial Sequence: Synthetic oligonucleotide
  Sense strand starting at position 549 of SEQ ID NO: 1242242
uaacuaagaucguuuagca

SEQ ID NO: 1333095 - RNA, 19 nt, Artificial Sequence
  Description of Artificial Sequence: Synthetic oligonucleotide
  Antisense strand to SEQ ID NO: 1333094
ugcuaaacgaucuuaguua

SEQ ID NO: 1333096 - RNA, 19 nt, Artificial Sequence
  Description of Artificial Sequence: Synthetic oligonucleotide
  Sense strand starting at position 1024 of SEQ ID NO: 1242242
ucagucuuugcagaccaga

SEQ ID NO: 1333097 - RNA, 19 nt, Artificial Sequence
  Description of Artificial Sequence: Synthetic oligonucleotide
  Antisense strand to SEQ ID NO: 1333096
ucuggucugcaaagacuga

SEQ ID NO: 1333098 - RNA, 19 nt, Artificial Sequence
  Description of Artificial Sequence: Synthetic oligonucleotide
  Sense strand starting at position 1066 of SEQ ID NO: 1242242
guuguucuaacgugggaaa

SEQ ID NO: 1333099 - RNA, 19 nt, Artificial Sequence
  Description of Artificial Sequence: Synthetic oligonucleotide
  Antisense strand to SEQ ID NO: 1333098
uuucccacguuagaacaac

SEQ ID NO: 1333100 - RNA, 19 nt, Artificial Sequence
  Description of Artificial Sequence: Synthetic oligonucleotide
  Sense strand starting at position 1150 of SEQ ID NO: 1242242
aaugaaaugugagcgucau

SEQ ID NO: 1333101 - RNA, 19 nt, Artificial Sequence
  Description of Artificial Sequence: Synthetic oligonucleotide
  Antisense strand to SEQ ID NO: 1333100
augacgcucacauuucauu

SEQ ID NO: 1333102 - RNA, 19 nt, Artificial Sequence
  Description of Artificial Sequence: Synthetic oligonucleotide
  Sense strand starting at position 1151 of SEQ ID NO: 1242242
augaaaugugagcgucaug

SEQ ID NO: 1333103 - RNA, 19 nt, Artificial Sequence
  Description of Artificial Sequence: Synthetic oligonucleotide
  Antisense strand to SEQ ID NO: 1333102
caugacgcucacauuucau

SEQ ID NO: 1333104 - RNA, 19 nt, Artificial Sequence
  Description of Artificial Sequence: Synthetic oligonucleotide
  Sense strand starting at position 1154 of SEQ ID NO: 1242242
aaaugugagcgucaugcuu

SEQ ID NO: 1333105 - RNA, 19 nt, Artificial Sequence
  Description of Artificial Sequence: Synthetic oligonucleotide
  Antisense strand to SEQ ID NO: 1333104
aagcaugacgcucacauuu

SEQ ID NO: 1333106 - RNA, 19 nt, Artificial Sequence
  Description of Artificial Sequence: Synthetic oligonucleotide
  Sense strand starting at position 1173 of SEQ ID NO: 1242242
uuccacaagucaugaaaga

SEQ ID NO: 1333107 - RNA, 19 nt, Artificial Sequence
  Description of Artificial Sequence: Synthetic oligonucleotide
  Antisense strand to SEQ ID NO: 1333106
ucuuucaugacuuguggaa

SEQ ID NO: 1333108 - RNA, 19 nt, Artificial Sequence
  Description of Artificial Sequence: Synthetic oligonucleotide
  Sense strand starting at position 1306 of SEQ ID NO: 1242242
acaaguuaugggugcagca

SEQ ID NO: 1333109 - RNA, 19 nt, Artificial Sequence
  Description of Artificial Sequence: Synthetic oligonucleotide
  Antisense strand to SEQ ID NO: 1333108
ugcugcacccauaacuugu

SEQ ID NO: 1333110 - RNA, 19 nt, Artificial Sequence
  Description of Artificial Sequence: Synthetic oligonucleotide
  Sense strand starting at position 1773 of SEQ ID NO: 1242242
ccgucacucacucggauaa

SEQ ID NO: 1333111 - RNA, 19 nt, Artificial Sequence
  Description of Artificial Sequence: Synthetic oligonucleotide
  Antisense strand to SEQ ID NO: 1333110
uuauccgagugagugacgg

SEQ ID NO: 1333112 - RNA, 19 nt, Artificial Sequence
  Description of Artificial Sequence: Synthetic oligonucleotide
  Sense strand starting at position 2226 of SEQ ID NO: 1242242
gggauaccgccgugguuua

SEQ ID NO: 1333113 - RNA, 19 nt, Artificial Sequence
  Description of Artificial Sequence: Synthetic oligonucleotide
  Antisense strand to SEQ ID NO: 1333112
uaaaccacggcgguauccc

SEQ ID NO: 1333114 - RNA, 19 nt, Artificial Sequence
  Description of Artificial Sequence: Synthetic oligonucleotide
  Sense strand starting at position 2246 of SEQ ID NO: 1242242
acgcggucccugugaggaa

SEQ ID NO: 1333115 - RNA, 19 nt, Artificial Sequence
  Description of Artificial Sequence: Synthetic oligonucleotide
  Antisense strand to SEQ ID NO: 1333114
uuccucacagggaccgcgu

SEQ ID NO: 1333116 - RNA, 19 nt, Artificial Sequence
  Description of Artificial Sequence: Synthetic oligonucleotide
  Sense strand starting at position 2282 of SEQ ID NO: 1242242
ggcagauaaccuggcaauu

SEQ ID NO: 1333117 - RNA, 19 nt, Artificial Sequence
  Description of Artificial Sequence: Synthetic oligonucleotide
  Antisense strand to SEQ ID NO: 1333116
aauugccagguuaucugcc

SEQ ID NO: 1333118 - RNA, 19 nt, Artificial Sequence
  Description of Artificial Sequence: Synthetic oligonucleotide
  Sense strand starting at position 2296 of SEQ ID NO: 1242242
caauuaccacagcgugaaa

SEQ ID NO: 1333119 - RNA, 19 nt, Artificial Sequence
  Description of Artificial Sequence: Synthetic oligonucleotide
  Antisense strand to SEQ ID NO: 1333118
uuucacgcugugguaauug

SEQ ID NO: 1333120 - RNA, 19 nt, Artificial Sequence
  Description of Artificial Sequence: Synthetic oligonucleotide
  Sense strand starting at position 2419 of SEQ ID NO: 1242242
ccaagaacugagcauaguu

SEQ ID NO: 1333121 - RNA, 19 nt, Artificial Sequence
  Description of Artificial Sequence: Synthetic oligonucleotide
  Antisense strand to SEQ ID NO: 1333120
aacuaugcucaguucuugg

SEQ ID NO: 1333122 - RNA, 19 nt, Artificial Sequence
  Description of Artificial Sequence: Synthetic oligonucleotide
  Sense strand starting at position 2429 of SEQ ID NO: 1242242
agcauaguuccggcgaguu

SEQ ID NO: 1333123 - RNA, 19 nt, Artificial Sequence
  Description of Artificial Sequence: Synthetic oligonucleotide
  Antisense strand to SEQ ID NO: 1333122
aacucgccggaacuaugcu

SEQ ID NO: 1333124 - RNA, 19 nt, Artificial Sequence
  Description of Artificial Sequence: Synthetic oligonucleotide
  Sense strand starting at position 2430 of SEQ ID NO: 1242242
gcauaguuccggcgaguug

SEQ ID NO: 1333125 - RNA, 19 nt, Artificial Sequence
  Description of Artificial Sequence: Synthetic oligonucleotide
  Antisense strand to SEQ ID NO: 1333124
caacucgccggaacuaugc

SEQ ID NO: 1333126 - RNA, 19 nt, Artificial Sequence
  Description of Artificial Sequence: Synthetic oligonucleotide
  Sense strand starting at position 2642 of SEQ ID NO: 1242242
gggacuaauagauggcagu

SEQ ID NO: 1333127 - RNA, 19 nt, Artificial Sequence
  Description of Artificial Sequence: Synthetic oligonucleotide
  Antisense strand to SEQ ID NO: 1333126
acugccaucuauuaguccc

SEQ ID NO: 1333128 - RNA, 19 nt, Artificial Sequence
  Description of Artificial Sequence: Synthetic oligonucleotide
  Sense strand starting at position 2798 of SEQ ID NO: 1242242
uagugaaacuucguggcua

SEQ ID NO: 1333129 - RNA, 19 nt, Artificial Sequence
  Description of Artificial Sequence: Synthetic oligonucleotide
  Antisense strand to SEQ ID NO: 1333128
uagccacgaaguuucacua

SEQ ID NO: 1333130 - RNA, 19 nt, Artificial Sequence
  Description of Artificial Sequence: Synthetic oligonucleotide
  Sense strand starting at position 2800 of SEQ ID NO: 1242242
gugaaacuucguggcuacu

SEQ ID NO: 1333131 - RNA, 19 nt, Artificial Sequence
  Description of Artificial Sequence: Synthetic oligonucleotide
  Antisense strand to SEQ ID NO: 1333130
aguagccacgaaguuucac

SEQ ID NO: 1333132 - RNA, 19 nt, Artificial Sequence
  Description of Artificial Sequence: Synthetic oligonucleotide
  Sense strand starting at position 2802 of SEQ ID NO: 1242242
gaaacuucguggcuacuaa

SEQ ID NO: 1333133 - RNA, 19 nt, Artificial Sequence
  Description of Artificial Sequence: Synthetic oligonucleotide
  Antisense strand to SEQ ID NO: 1333132
uuaguagccacgaaguuuc

SEQ ID NO: 1333134 - RNA, 19 nt, Artificial Sequence
  Description of Artificial Sequence: Synthetic oligonucleotide
  Sense strand starting at position 2803 of SEQ ID NO: 1242242
aaacuucguggcuacuaaa

SEQ ID NO: 1333135 - RNA, 19 nt, Artificial Sequence
  Description of Artificial Sequence: Synthetic oligonucleotide
  Antisense strand to SEQ ID NO: 1333134
uuuaguagccacgaaguuu

SEQ ID NO: 1333136 - RNA, 19 nt, Artificial Sequence
  Description of Artificial Sequence: Synthetic oligonucleotide
  Sense strand starting at position 3149 of SEQ ID NO: 1242242
gcugggaacgguugugauu

SEQ ID NO: 1333137 - RNA, 19 nt, Artificial Sequence
  Description of Artificial Sequence: Synthetic oligonucleotide
  Antisense strand to SEQ ID NO: 1333136
aaucacaaccguucccagc

SEQ ID NO: 1333138 - RNA, 19 nt, Artificial Sequence
  Description of Artificial Sequence: Synthetic oligonucleotide
  Sense strand starting at position 3152 of SEQ ID NO: 1242242
gggaacgguugugauuaga

SEQ ID NO: 1333139 - RNA, 19 nt, Artificial Sequence
  Description of Artificial Sequence: Synthetic oligonucleotide
  Antisense strand to SEQ ID NO: 1333138
ucuaaucacaaccguuccc

SEQ ID NO: 1333140 - RNA, 19 nt, Artificial Sequence
  Description of Artificial Sequence: Synthetic oligonucleotide
  Sense strand starting at position 3163 of SEQ ID NO: 1242242
ugauuagauuuguauucca

SEQ ID NO: 1333141 - RNA, 19 nt, Artificial Sequence
  Description of Artificial Sequence: Synthetic oligonucleotide
  Antisense strand to SEQ ID NO: 1333140
uggaauacaaaucuaauca

SEQ ID NO: 1333142 - RNA, 19 nt, Artificial Sequence
  Description of Artificial Sequence: Synthetic oligonucleotide
  Sense strand starting at position 3193 of SEQ ID NO: 1242242
cuuccuguagcaugaagaa

SEQ ID NO: 1333143 - RNA, 19 nt, Artificial Sequence
  Description of Artificial Sequence: Synthetic oligonucleotide
  Antisense strand to SEQ ID NO: 1333142
uucuucaugcuacaggaag

SEQ ID NO: 1333144 - RNA, 19 nt, Artificial Sequence
  Description of Artificial Sequence: Synthetic oligonucleotide
  Sense strand starting at position 3913 of SEQ ID NO: 1242242
guaguaacccuauggaguc

SEQ ID NO: 1333145 - RNA, 19 nt, Artificial Sequence
  Description of Artificial Sequence: Synthetic oligonucleotide
  Antisense strand to SEQ ID NO: 1333144
gacuccauaggguuacuac

SEQ ID NO: 1333146 - RNA, 19 nt, Artificial Sequence
  Description of Artificial Sequence: Synthetic oligonucleotide
  Sense strand starting at position 2095 of SEQ ID NO: 1242243
gugccuuguccugacuaga

SEQ ID NO: 1333147 - RNA, 19 nt, Artificial Sequence
  Description of Artificial Sequence: Synthetic oligonucleotide
  Antisense strand to SEQ ID NO: 1333146
ucuagucaggacaaggcac

SEQ ID NO: 1333148 - RNA, 19 nt, Artificial Sequence
  Description of Artificial Sequence: Synthetic oligonucleotide
  Sense strand starting at position 2542 of SEQ ID NO: 1242243
ugcuccuugggucauugau

SEQ ID NO: 1333149 - RNA, 19 nt, Artificial Sequence
  Description of Artificial Sequence: Synthetic oligonucleotide
  Antisense strand to SEQ ID NO: 1333148
aucaaugacccaaggagca

SEQ ID NO: 1333150 - RNA, 19 nt, Artificial Sequence
  Description of Artificial Sequence: Synthetic oligonucleotide
  Sense strand starting at position 2544 of SEQ ID NO: 1242243
cuccuugggucauugauau

SEQ ID NO: 1333151 - RNA, 19 nt, Artificial Sequence
  Description of Artificial Sequence: Synthetic oligonucleotide
  Antisense strand to SEQ ID NO: 1333150
auaucaaugacccaaggag

SEQ ID NO: 1333152 - RNA, 19 nt, Artificial Sequence
  Description of Artificial Sequence: Synthetic oligonucleotide
  Sense strand starting at position 2550 of SEQ ID NO: 1242243
gggucauugauaugacagu

SEQ ID NO: 1333153 - RNA, 19 nt, Artificial Sequence
  Description of Artificial Sequence: Synthetic oligonucleotide
  Antisense strand to SEQ ID NO: 1333152
acugucauaucaaugaccc

SEQ ID NO: 1333154 - RNA, 19 nt, Artificial Sequence
  Description of Artificial Sequence: Synthetic oligonucleotide
  Sense strand starting at position 2556 of SEQ ID NO: 1242243
uugauaugacaguggccua

SEQ ID NO: 1333155 - RNA, 19 nt, Artificial Sequence
  Description of Artificial Sequence: Synthetic oligonucleotide
  Antisense strand to SEQ ID NO: 1333154
uaggccacugucauaucaa

SEQ ID NO: 1333156 - RNA, 19 nt, Artificial Sequence
  Description of Artificial Sequence: Synthetic oligonucleotide
  Sense strand starting at position 2585 of SEQ ID NO: 1242243
gaaccugggcugugugauu

SEQ ID NO: 1333157 - RNA, 19 nt, Artificial Sequence
  Description of Artificial Sequence: Synthetic oligonucleotide
  Antisense strand to SEQ ID NO: 1333156
aaucacacagcccagguuc

SEQ ID NO: 1333158 - RNA, 19 nt, Artificial Sequence
  Description of Artificial Sequence: Synthetic oligonucleotide
  Sense strand starting at position 2590 of SEQ ID NO: 1242243
ugggcugugugauuccaga

SEQ ID NO: 1333159 - RNA, 19 nt, Artificial Sequence
  Description of Artificial Sequence: Synthetic oligonucleotide
  Antisense strand to SEQ ID NO: 1333158
ucuggaaucacacagccca

SEQ ID NO: 1333160 - RNA, 19 nt, Artificial Sequence
  Description of Artificial Sequence: Synthetic oligonucleotide
  Sense strand starting at position 2633 of SEQ ID NO: 1242243
ccuuguuauggacacauca

SEQ ID NO: 1333161 - RNA, 19 nt, Artificial Sequence
  Description of Artificial Sequence: Synthetic oligonucleotide
  Antisense strand to SEQ ID NO: 1333160
ugauguguccauaacaagg

SEQ ID NO: 1333162 - RNA, 19 nt, Artificial Sequence
  Description of Artificial Sequence: Synthetic oligonucleotide
  Sense strand starting at position 2657 of SEQ ID NO: 1242243
ucucauuauuuccuguagu

SEQ ID NO: 1333163 - RNA, 19 nt, Artificial Sequence
  Description of Artificial Sequence: Synthetic oligonucleotide
  Antisense strand to SEQ ID NO: 1333162
acuacaggaaauaaugaga

SEQ ID NO: 1333164 - RNA, 19 nt, Artificial Sequence
  Description of Artificial Sequence: Synthetic oligonucleotide
  Sense strand starting at position 2667 of SEQ ID NO: 1242243
uccuguaguccuuagggua

SEQ ID NO: 1333165 - RNA, 19 nt, Artificial Sequence
  Description of Artificial Sequence: Synthetic oligonucleotide
  Antisense strand to SEQ ID NO: 1333164
uacccuaaggacuacagga

SEQ ID NO: 1333166 - RNA, 19 nt, Artificial Sequence
  Description of Artificial Sequence: Synthetic oligonucleotide
  Sense strand starting at position 2694 of SEQ ID NO: 1242243
acagcacaucuguauuaag

SEQ ID NO: 1333167 - RNA, 19 nt, Artificial Sequence
  Description of Artificial Sequence: Synthetic oligonucleotide
  Antisense strand to SEQ ID NO: 1333166
cuuaauacagaugugcugu

SEQ ID NO: 1333168 - RNA, 19 nt, Artificial Sequence
  Description of Artificial Sequence: Synthetic oligonucleotide
  Sense strand starting at position 2775 of SEQ ID NO: 1242243
gcuccagucuccucugaag

SEQ ID NO: 1333169 - RNA, 19 nt, Artificial Sequence
  Description of Artificial Sequence: Synthetic oligonucleotide
  Antisense strand to SEQ ID NO: 1333168
cuucagaggagacuggagc

SEQ ID NO: 1333170 - RNA, 19 nt, Artificial Sequence
  Description of Artificial Sequence: Synthetic oligonucleotide
  Sense strand starting at position 2777 of SEQ ID NO: 1242243
uccagucuccucugaagac

SEQ ID NO: 1333171 - RNA, 19 nt, Artificial Sequence
  Description of Artificial Sequence: Synthetic oligonucleotide
  Antisense strand to SEQ ID NO: 1333170
gucuucagaggagacugga

SEQ ID NO: 1333172 - RNA, 19 nt, Artificial Sequence
  Description of Artificial Sequence: Synthetic oligonucleotide
  Sense strand starting at position 2877 of SEQ ID NO: 1242243
uuuggucuaguuugaagga

SEQ ID NO: 1333173 - RNA, 19 nt, Artificial Sequence
  Description of Artificial Sequence: Synthetic oligonucleotide
  Antisense strand to SEQ ID NO: 1333172
uccuucaaacuagaccaaa

SEQ ID NO: 1333174 - RNA, 19 nt, Artificial Sequence
  Description of Artificial Sequence: Synthetic oligonucleotide
  Sense strand starting at position 2930 of SEQ ID NO: 1242243
uuggccuaucccgaaagaa

SEQ ID NO: 1333175 - RNA, 19 nt, Artificial Sequence
  Description of Artificial Sequence: Synthetic oligonucleotide
  Antisense strand to SEQ ID NO: 1333174
uucuuucgggauaggccaa

SEQ ID NO: 1333176 - RNA, 19 nt, Artificial Sequence
  Description of Artificial Sequence: Synthetic oligonucleotide
  Sense strand starting at position 2987 of SEQ ID NO: 1242243
ucuggccuucuuggaauau

SEQ ID NO: 1333177 - RNA, 19 nt, Artificial Sequence
  Description of Artificial Sequence: Synthetic oligonucleotide
  Antisense strand to SEQ ID NO: 1333176
auauuccaagaaggccaga

SEQ ID NO: 1333178 - RNA, 19 nt, Artificial Sequence
  Description of Artificial Sequence: Synthetic oligonucleotide
  Sense strand starting at position 2991 of SEQ ID NO: 1242243
gccuucuuggaauauguua

SEQ ID NO: 1333179 - RNA, 19 nt, Artificial Sequence
  Description of Artificial Sequence: Synthetic oligonucleotide
  Antisense strand to SEQ ID NO: 1333178
uaacauauuccaagaaggc

SEQ ID NO: 1333180 - RNA, 19 nt, Artificial Sequence
  Description of Artificial Sequence: Synthetic oligonucleotide
  Sense strand starting at position 2996 of SEQ ID NO: 1242243
cuuggaauauguuagaaag

SEQ ID NO: 1333181 - RNA, 19 nt, Artificial Sequence
  Description of Artificial Sequence: Synthetic oligonucleotide
  Antisense strand to SEQ ID NO: 1333180
cuuucuaacauauuccaag

SEQ ID NO: 1333182 - RNA, 19 nt, Artificial Sequence
  Description of Artificial Sequence: Synthetic oligonucleotide
  Sense strand starting at position 2998 of SEQ ID NO: 1242243
uggaauauguuagaaagca

SEQ ID NO: 1333183 - RNA, 19 nt, Artificial Sequence
  Description of Artificial Sequence: Synthetic oligonucleotide
  Antisense strand to SEQ ID NO: 1333182
ugcuuucuaacauauucca

SEQ ID NO: 1333184 - RNA, 19 nt, Artificial Sequence
  Description of Artificial Sequence: Synthetic oligonucleotide
  Sense strand starting at position 3027 of SEQ ID NO: 1242243
guauuugcaagucaguagu

SEQ ID NO: 1333185 - RNA, 19 nt, Artificial Sequence
  Description of Artificial Sequence: Synthetic oligonucleotide
  Antisense strand to SEQ ID NO: 1333184
acuacugacuugcaaauac

SEQ ID NO: 1333186 - RNA, 19 nt, Artificial Sequence
  Description of Artificial Sequence: Synthetic oligonucleotide
  Sense strand starting at position 3035 of SEQ ID NO: 1242243
aagucaguaguggagcaau

SEQ ID NO: 1333187 - RNA, 19 nt, Artificial Sequence
  Description of Artificial Sequence: Synthetic oligonucleotide
  Antisense strand to SEQ ID NO: 1333186
auugcuccacuacugacuu

SEQ ID NO: 1333188 - RNA, 19 nt, Artificial Sequence
  Description of Artificial Sequence: Synthetic oligonucleotide
  Sense strand starting at position 3038 of SEQ ID NO: 1242243
ucaguaguggagcaaugua

SEQ ID NO: 1333189 - RNA, 19 nt, Artificial Sequence
  Description of Artificial Sequence: Synthetic oligonucleotide
  Antisense strand to SEQ ID NO: 1333188
uacauugcuccacuacuga

SEQ ID NO: 1333190 - RNA, 19 nt, Artificial Sequence
  Description of Artificial Sequence: Synthetic oligonucleotide
  Sense strand starting at position 3046 of SEQ ID NO: 1242243
ggagcaauguauucgauua

SEQ ID NO: 1333191 - RNA, 19 nt, Artificial Sequence
  Description of Artificial Sequence: Synthetic oligonucleotide
  Antisense strand to SEQ ID NO: 1333190
uaaucgaauacauugcucc

SEQ ID NO: 1333192 - RNA, 19 nt, Artificial Sequence
  Description of Artificial Sequence: Synthetic oligonucleotide
  Sense strand starting at position 3125 of SEQ ID NO: 1242243
acauuacugucaccuaagu

SEQ ID NO: 1333193 - RNA, 19 nt, Artificial Sequence
  Description of Artificial Sequence: Synthetic oligonucleotide
  Antisense strand to SEQ ID NO: 1333192
acuuaggugacaguaaugu

SEQ ID NO: 1333194 - RNA, 19 nt, Artificial Sequence
  Description of Artificial Sequence: Synthetic oligonucleotide
  Sense strand starting at position 3154 of SEQ ID NO: 1242243
auauucuuaugcccaagga

SEQ ID NO: 1333195 - RNA, 19 nt, Artificial Sequence
  Description of Artificial Sequence: Synthetic oligonucleotide
  Antisense strand to SEQ ID NO: 1333194
uccuugggcauaagaauau

SEQ ID NO: 1333196 - RNA, 19 nt, Artificial Sequence
  Description of Artificial Sequence: Synthetic oligonucleotide
  Sense strand starting at position 3201 of SEQ ID NO: 1242243
aaggaaauauguguuacug

SEQ ID NO: 1333197 - RNA, 19 nt, Artificial Sequence
  Description of Artificial Sequence: Synthetic oligonucleotide
  Antisense strand to SEQ ID NO: 1333196
caguaacacauauuuccuu

SEQ ID NO: 1333198 - RNA, 19 nt, Artificial Sequence
  Description of Artificial Sequence: Synthetic oligonucleotide
  Sense strand starting at position 3271 of SEQ ID NO: 1242243
acaugaccuuaucuaguuu

SEQ ID NO: 1333199 - RNA, 19 nt, Artificial Sequence
  Description of Artificial Sequence: Synthetic oligonucleotide
  Antisense strand to SEQ ID NO: 1333198
aaacuagauaaggucaugu

SEQ ID NO: 1333200 - RNA, 19 nt, Artificial Sequence
  Description of Artificial Sequence: Synthetic oligonucleotide
  Sense strand starting at position 3294 of SEQ ID NO: 1242243
cuuguuucuuugguuuauu

SEQ ID NO: 1333201 - RNA, 19 nt, Artificial Sequence
  Description of Artificial Sequence: Synthetic oligonucleotide
  Antisense strand to SEQ ID NO: 1333200
aauaaaccaaagaaacaag

SEQ ID NO: 1333202 - RNA, 19 nt, Artificial Sequence
  Description of Artificial Sequence: Synthetic oligonucleotide
  Sense strand starting at position 3329 of SEQ ID NO: 1242243
cucucuuugggcuaauguu

SEQ ID NO: 1333203 - RNA, 19 nt, Artificial Sequence
  Description of Artificial Sequence: Synthetic oligonucleotide
  Antisense strand to SEQ ID NO: 1333202
aacauuagcccaaagagag

SEQ ID NO: 1333204 - RNA, 19 nt, Artificial Sequence
  Description of Artificial Sequence: Synthetic oligonucleotide
  Sense strand starting at position 3344 of SEQ ID NO: 1242243
uguugugugccagacauag

SEQ ID NO: 1333205 - RNA, 19 nt, Artificial Sequence
  Description of Artificial Sequence: Synthetic oligonucleotide
  Antisense strand to SEQ ID NO: 1333204
cuaugucuggcacacaaca

SEQ ID NO: 1333206 - RNA, 19 nt, Artificial Sequence
  Description of Artificial Sequence: Synthetic oligonucleotide
  Sense strand starting at position 3346 of SEQ ID NO: 1242243
uugugugccagacauagga

SEQ ID NO: 1333207 - RNA, 19 nt, Artificial Sequence
  Description of Artificial Sequence: Synthetic oligonucleotide
  Antisense strand to SEQ ID NO: 1333206
uccuaugucuggcacacaa

SEQ ID NO: 1333208 - RNA, 19 nt, Artificial Sequence
  Description of Artificial Sequence: Synthetic oligonucleotide
  Sense strand starting at position 3368 of SEQ ID NO: 1242243
guggaagguucagaaccaa

SEQ ID NO: 1333209 - RNA, 19 nt, Artificial Sequence
  Description of Artificial Sequence: Synthetic oligonucleotide
  Antisense strand to SEQ ID NO: 1333208
uugguucugaaccuuccac

SEQ ID NO: 1333210 - RNA, 19 nt, Artificial Sequence
  Description of Artificial Sequence: Synthetic oligonucleotide
  Sense strand starting at position 3517 of SEQ ID NO: 1242243
gaguaaaugugggcuucca

SEQ ID NO: 1333211 - RNA, 19 nt, Artificial Sequence
  Description of Artificial Sequence: Synthetic oligonucleotide
  Antisense strand to SEQ ID NO: 1333210
uggaagcccacauuuacuc

SEQ ID NO: 1333212 - RNA, 19 nt, Artificial Sequence
  Description of Artificial Sequence: Synthetic oligonucleotide
  Sense strand starting at position 3621 of SEQ ID NO: 1242243
uuccuaaccucucagggaa

SEQ ID NO: 1333213 - RNA, 19 nt, Artificial Sequence
  Description of Artificial Sequence: Synthetic oligonucleotide
  Antisense strand to SEQ ID NO: 1333212
uucccugagagguuaggaa

SEQ ID NO: 1333214 - RNA, 19 nt, Artificial Sequence
  Description of Artificial Sequence: Synthetic oligonucleotide
  Sense strand starting at position 3640 of SEQ ID NO: 1242243
ccgagaaauuguuuacaau

SEQ ID NO: 1333215 - RNA, 19 nt, Artificial Sequence
  Description of Artificial Sequence: Synthetic oligonucleotide
  Antisense strand to SEQ ID NO: 1333214
auuguaaacaauuucucgg

SEQ ID NO: 1333216 - RNA, 19 nt, Artificial Sequence
  Description of Artificial Sequence: Synthetic oligonucleotide
  Sense strand starting at position 3641 of SEQ ID NO: 1242243
cgagaaauuguuuacaauu

SEQ ID NO: 1333217 - RNA, 19 nt, Artificial Sequence
  Description of Artificial Sequence: Synthetic oligonucleotide
  Antisense strand to SEQ ID NO: 1333216
aauuguaaacaauuucucg

SEQ ID NO: 1333218 - RNA, 19 nt, Artificial Sequence
  Description of Artificial Sequence: Synthetic oligonucleotide
  Sense strand starting at position 3681 of SEQ ID NO: 1242243
uugauaucauuugaggaga

SEQ ID NO: 1333219 - RNA, 19 nt, Artificial Sequence
  Description of Artificial Sequence: Synthetic oligonucleotide
  Antisense strand to SEQ ID NO: 1333218
ucuccucaaaugauaucaa

SEQ ID NO: 1333220 - RNA, 19 nt, Artificial Sequence
  Description of Artificial Sequence: Synthetic oligonucleotide
  Sense strand starting at position 3683 of SEQ ID NO: 1242243
gauaucauuugaggagagu

SEQ ID NO: 1333221 - RNA, 19 nt, Artificial Sequence
  Description of Artificial Sequence: Synthetic oligonucleotide
  Antisense strand to SEQ ID NO: 1333220
acucuccucaaaugauauc

SEQ ID NO: 1333222 - RNA, 19 nt, Artificial Sequence
  Description of Artificial Sequence: Synthetic oligonucleotide
  Sense strand starting at position 3744 of SEQ ID NO: 1242243
agaacaaucugguacaagu

SEQ ID NO: 1333223 - RNA, 19 nt, Artificial Sequence
  Description of Artificial Sequence: Synthetic oligonucleotide
  Antisense strand to SEQ ID NO: 1333222
acuuguaccagauuguucu

SEQ ID NO: 1333224 - RNA, 19 nt, Artificial Sequence
  Description of Artificial Sequence: Synthetic oligonucleotide
  Sense strand starting at position 3952 of SEQ ID NO: 1242243
cuugucaaaugggaauaga

SEQ ID NO: 1333225 - RNA, 19 nt, Artificial Sequence
  Description of Artificial Sequence: Synthetic oligonucleotide
  Antisense strand to SEQ ID NO: 1333224
ucuauucccauuugacaag

SEQ ID NO: 1333226 - RNA, 19 nt, Artificial Sequence
  Description of Artificial Sequence: Synthetic oligonucleotide
  Sense strand starting at position 25 of SEQ ID NO: 1242244
agugauauccaaggccaug

SEQ ID NO: 1333227 - RNA, 19 nt, Artificial Sequence
  Description of Artificial Sequence: Synthetic oligonucleotide
  Antisense strand to SEQ ID NO: 1333226
cauggccuuggauaucacu

SEQ ID NO: 1333228 - RNA, 19 nt, Artificial Sequence
  Description of Artificial Sequence: Synthetic oligonucleotide
  Sense strand starting at position 238 of SEQ ID NO: 1242244
auuguucuggccuaacaau

SEQ ID NO: 1333229 - RNA, 19 nt, Artificial Sequence
  Description of Artificial Sequence: Synthetic oligonucleotide
  Antisense strand to SEQ ID NO: 1333228
auuguuaggccagaacaau

SEQ ID NO: 1333230 - RNA, 19 nt, Artificial Sequence
  Description of Artificial Sequence: Synthetic oligonucleotide
  Sense strand starting at position 388 of SEQ ID NO: 1242244
auccuagacucacuuguga

SEQ ID NO: 1333231 - RNA, 19 nt, Artificial Sequence
  Description of Artificial Sequence: Synthetic oligonucleotide
  Antisense strand to SEQ ID NO: 1333230
ucacaagugagucuaggau

SEQ ID NO: 1333232 - RNA, 19 nt, Artificial Sequence
  Description of Artificial Sequence: Synthetic oligonucleotide
  Sense strand starting at position 466 of SEQ ID NO: 1242244
ggucccuaugcccaugauu

SEQ ID NO: 1333233 - RNA, 19 nt, Artificial Sequence
  Description of Artificial Sequence: Synthetic oligonucleotide
  Antisense strand to SEQ ID NO: 1333232
aaucaugggcauagggacc

SEQ ID NO: 1333234 - RNA, 19 nt, Artificial Sequence
  Description of Artificial Sequence: Synthetic oligonucleotide
  Sense strand starting at position 691 of SEQ ID NO: 1242244
cagcuaugugucccuguuu

SEQ ID NO: 1333235 - RNA, 19 nt, Artificial Sequence
  Description of Artificial Sequence: Synthetic oligonucleotide
  Antisense strand to SEQ ID NO: 1333234
aaacagggacacauagcug

SEQ ID NO: 1333236 - RNA, 19 nt, Artificial Sequence
  Description of Artificial Sequence: Synthetic oligonucleotide
  Sense strand starting at position 716 of SEQ ID NO: 1242244
aggcccgaccaauaucaua

SEQ ID NO: 1333237 - RNA, 19 nt, Artificial Sequence
  Description of Artificial Sequence: Synthetic oligonucleotide
  Antisense strand to SEQ ID NO: 1333236
uaugauauuggucgggccu

SEQ ID NO: 1333238 - RNA, 19 nt, Artificial Sequence
  Description of Artificial Sequence: Synthetic oligonucleotide
  Sense strand starting at position 1134 of SEQ ID NO: 1242244
gauccaagguucccugauu

SEQ ID NO: 1333239 - RNA, 19 nt, Artificial Sequence
  Description of Artificial Sequence: Synthetic oligonucleotide
  Antisense strand to SEQ ID NO: 1333238
aaucagggaaccuuggauc

SEQ ID NO: 1333240 - RNA, 19 nt, Artificial Sequence
  Description of Artificial Sequence: Synthetic oligonucleotide
  Sense strand starting at position 1189 of SEQ ID NO: 1242244
ccauuaguguuccucagga

SEQ ID NO: 1333241 - RNA, 19 nt, Artificial Sequence
  Description of Artificial Sequence: Synthetic oligonucleotide
  Antisense strand to SEQ ID NO: 1333240
uccugaggaacacuaaugg

SEQ ID NO: 1333242 - RNA, 19 nt, Artificial Sequence
  Description of Artificial Sequence: Synthetic oligonucleotide
  Sense strand starting at position 1191 of SEQ ID NO: 1242244
auuaguguuccucaggacu

SEQ ID NO: 1333243 - RNA, 19 nt, Artificial Sequence
  Description of Artificial Sequence: Synthetic oligonucleotide
  Antisense strand to SEQ ID NO: 1333242
aguccugaggaacacuaau

SEQ ID NO: 1333244 - RNA, 19 nt, Artificial Sequence
  Description of Artificial Sequence: Synthetic oligonucleotide
  Sense strand starting at position 1798 of SEQ ID NO: 1242244
cgacauccucccuagcaga

SEQ ID NO: 1333245 - RNA, 19 nt, Artificial Sequence
  Description of Artificial Sequence: Synthetic oligonucleotide
  Antisense strand to SEQ ID NO: 1333244
ucugcuagggaggaugucg

SEQ ID NO: 1333246 - RNA, 19 nt, Artificial Sequence
  Description of Artificial Sequence: Synthetic oligonucleotide
  Sense strand starting at position 2022 of SEQ ID NO: 1242244
cgcaaggaucgcgagaaga

SEQ ID NO: 1333247 - RNA, 19 nt, Artificial Sequence
  Description of Artificial Sequence: Synthetic oligonucleotide
  Antisense strand to SEQ ID NO: 1333246
ucuucucgcgauccuugcg

SEQ ID NO: 1333248 - RNA, 19 nt, Artificial Sequence
  Description of Artificial Sequence: Synthetic oligonucleotide
  Sense strand starting at position 2298 of SEQ ID NO: 1242244
uuguuagcgcucuuggcua

SEQ ID NO: 1333249 - RNA, 19 nt, Artificial Sequence
  Description of Artificial Sequence: Synthetic oligonucleotide
  Antisense strand to SEQ ID NO: 1333248
uagccaagagcgcuaacaa

SEQ ID NO: 1333250 - RNA, 19 nt, Artificial Sequence
  Description of Artificial Sequence: Synthetic oligonucleotide
  Sense strand starting at position 2518 of SEQ ID NO: 1242244
cucccuuugccugaaaugu

SEQ ID NO: 1333251 - RNA, 19 nt, Artificial Sequence
  Description of Artificial Sequence: Synthetic oligonucleotide
  Antisense strand to SEQ ID NO: 1333250
acauuucaggcaaagggag

SEQ ID NO: 1333252 - RNA, 19 nt, Artificial Sequence
  Description of Artificial Sequence: Synthetic oligonucleotide
  Sense strand starting at position 2527 of SEQ ID NO: 1242244
ccugaaauguccuccuuug

SEQ ID NO: 1333253 - RNA, 19 nt, Artificial Sequence
  Description of Artificial Sequence: Synthetic oligonucleotide
  Antisense strand to SEQ ID NO: 1333252
caaaggaggacauuucagg

SEQ ID NO: 1333254 - RNA, 19 nt, Artificial Sequence
  Description of Artificial Sequence: Synthetic oligonucleotide
  Sense strand starting at position 2660 of SEQ ID NO: 1242244
aaggaagucguguaugaac

SEQ ID NO: 1333255 - RNA, 19 nt, Artificial Sequence
  Description of Artificial Sequence: Synthetic oligonucleotide
  Antisense strand to SEQ ID NO: 1333254
guucauacacgacuuccuu

SEQ ID NO: 1333256 - RNA, 19 nt, Artificial Sequence
  Description of Artificial Sequence: Synthetic oligonucleotide
  Sense strand starting at position 2668 of SEQ ID NO: 1242244
cguguaugaacuuacauga

SEQ ID NO: 1333257 - RNA, 19 nt, Artificial Sequence
  Description of Artificial Sequence: Synthetic oligonucleotide
  Antisense strand to SEQ ID NO: 1333256
ucauguaaguucauacacg

SEQ ID NO: 1333258 - RNA, 19 nt, Artificial Sequence
  Description of Artificial Sequence: Synthetic oligonucleotide
  Sense strand starting at position 2888 of SEQ ID NO: 1242244
uuacuacuguuugcauaga

SEQ ID NO: 1333259 - RNA, 19 nt, Artificial Sequence
  Description of Artificial Sequence: Synthetic oligonucleotide
  Antisense strand to SEQ ID NO: 1333258
ucuaugcaaacaguaguaa

SEQ ID NO: 1333260 - RNA, 19 nt, Artificial Sequence
  Description of Artificial Sequence: Synthetic oligonucleotide
  Sense strand starting at position 2899 of SEQ ID NO: 1242244
ugcauagaaguuugggaaa

SEQ ID NO: 1333261 - RNA, 19 nt, Artificial Sequence
  Description of Artificial Sequence: Synthetic oligonucleotide
  Antisense strand to SEQ ID NO: 1333260
uuucccaaacuucuaugca

SEQ ID NO: 1333262 - RNA, 19 nt, Artificial Sequence
  Description of Artificial Sequence: Synthetic oligonucleotide
  Sense strand starting at position 3015 of SEQ ID NO: 1242244
cugggagugucuguggaaa

SEQ ID NO: 1333263 - RNA, 19 nt, Artificial Sequence
  Description of Artificial Sequence: Synthetic oligonucleotide
  Antisense strand to SEQ ID NO: 1333262
uuuccacagacacucccag

SEQ ID NO: 1333264 - RNA, 19 nt, Artificial Sequence
  Description of Artificial Sequence: Synthetic oligonucleotide
  Sense strand starting at position 3131 of SEQ ID NO: 1242244
gcuaaaguggucuggaacu

SEQ ID NO: 1333265 - RNA, 19 nt, Artificial Sequence
  Description of Artificial Sequence: Synthetic oligonucleotide
  Antisense strand to SEQ ID NO: 1333264
aguuccagaccacuuuagc

SEQ ID NO: 1333266 - RNA, 19 nt, Artificial Sequence
  Description of Artificial Sequence: Synthetic oligonucleotide
  Sense strand starting at position 3133 of SEQ ID NO: 1242244
uaaaguggucuggaacuuu

SEQ ID NO: 1333267 - RNA, 19 nt, Artificial Sequence
  Description of Artificial Sequence: Synthetic oligonucleotide
  Antisense strand to SEQ ID NO: 1333266
aaaguuccagaccacuuua

SEQ ID NO: 1333268 - RNA, 19 nt, Artificial Sequence
  Description of Artificial Sequence: Synthetic oligonucleotide
  Sense strand starting at position 3214 of SEQ ID NO: 1242244
uggcauguuguugauugaa

SEQ ID NO: 1333269 - RNA, 19 nt, Artificial Sequence
  Description of Artificial Sequence: Synthetic oligonucleotide
  Antisense strand to SEQ ID NO: 1333268
uucaaucaacaacaugcca

SEQ ID NO: 1333270 - RNA, 19 nt, Artificial Sequence
  Description of Artificial Sequence: Synthetic oligonucleotide
  Sense strand starting at position 3530 of SEQ ID NO: 1242244
cucucagaauguuuguauu

SEQ ID NO: 1333271 - RNA, 19 nt, Artificial Sequence
  Description of Artificial Sequence: Synthetic oligonucleotide
  Antisense strand to SEQ ID NO: 1333270
aauacaaacauucugagag

SEQ ID NO: 1333272 - RNA, 19 nt, Artificial Sequence
  Description of Artificial Sequence: Synthetic oligonucleotide
  Sense strand starting at position 3532 of SEQ ID NO: 1242244
cucagaauguuuguauuaa

SEQ ID NO: 1333273 - RNA, 19 nt, Artificial Sequence
  Description of Artificial Sequence: Synthetic oligonucleotide
  Antisense strand to SEQ ID NO: 1333272
uuaauacaaacauucugag

SEQ ID NO: 1333274 - RNA, 19 nt, Artificial Sequence
  Description of Artificial Sequence: Synthetic oligonucleotide
  Sense strand starting at position 3640 of SEQ ID NO: 1242244
augugcuugggucagugaa

SEQ ID NO: 1333275 - RNA, 19 nt, Artificial Sequence
  Description of Artificial Sequence: Synthetic oligonucleotide
  Antisense strand to SEQ ID NO: 1333274
uucacugacccaagcacau

SEQ ID NO: 1333276 - RNA, 19 nt, Artificial Sequence
  Description of Artificial Sequence: Synthetic oligonucleotide
  Sense strand starting at position 3648 of SEQ ID NO: 1242244
gggucagugaaauguguaa

SEQ ID NO: 1333277 - RNA, 19 nt, Artificial Sequence
  Description of Artificial Sequence: Synthetic oligonucleotide
  Antisense strand to SEQ ID NO: 1333276
uuacacauuucacugaccc

SEQ ID NO: 1333278 - RNA, 19 nt, Artificial Sequence
  Description of Artificial Sequence: Synthetic oligonucleotide
  Sense strand starting at position 3650 of SEQ ID NO: 1242244
gucagugaaauguguaaag

SEQ ID NO: 1333279 - RNA, 19 nt, Artificial Sequence
  Description of Artificial Sequence: Synthetic oligonucleotide
  Antisense strand to SEQ ID NO: 1333278
cuuuacacauuucacugac

SEQ ID NO: 1333280 - RNA, 19 nt, Artificial Sequence
  Description of Artificial Sequence: Synthetic oligonucleotide
  Sense strand starting at position 3652 of SEQ ID NO: 1242244
cagugaaauguguaaagua

SEQ ID NO: 1333281 - RNA, 19 nt, Artificial Sequence
  Description of Artificial Sequence: Synthetic oligonucleotide
  Antisense strand to SEQ ID NO: 1333280
uacuuuacacauuucacug

SEQ ID NO: 1333282 - RNA, 19 nt, Artificial Sequence
  Description of Artificial Sequence: Synthetic oligonucleotide
  Sense strand starting at position 3706 of SEQ ID NO: 1242244
aguuuagacucuuucccau

SEQ ID NO: 1333283 - RNA, 19 nt, Artificial Sequence
  Description of Artificial Sequence: Synthetic oligonucleotide
  Antisense strand to SEQ ID NO: 1333282
augggaaagagucuaaacu

SEQ ID NO: 1333284 - RNA, 19 nt, Artificial Sequence
  Description of Artificial Sequence: Synthetic oligonucleotide
  Sense strand starting at position 3735 of SEQ ID NO: 1242244
cuugguagugauuacugau

SEQ ID NO: 1333285 - RNA, 19 nt, Artificial Sequence
  Description of Artificial Sequence: Synthetic oligonucleotide
  Antisense strand to SEQ ID NO: 1333284
aucaguaaucacuaccaag

SEQ ID NO: 1333286 - RNA, 19 nt, Artificial Sequence
  Description of Artificial Sequence: Synthetic oligonucleotide
  Sense strand starting at position 3741 of SEQ ID NO: 1242244
agugauuacugaucaugac

SEQ ID NO: 1333287 - RNA, 19 nt, Artificial Sequence
  Description of Artificial Sequence: Synthetic oligonucleotide
  Antisense strand to SEQ ID NO: 1333286
gucaugaucaguaaucacu

SEQ ID NO: 1333288 - RNA, 19 nt, Artificial Sequence
  Description of Artificial Sequence: Synthetic oligonucleotide
  Sense strand starting at position 3794 of SEQ ID NO: 1242244
gcauuagucccugaguuag

SEQ ID NO: 1333289 - RNA, 19 nt, Artificial Sequence
  Description of Artificial Sequence: Synthetic oligonucleotide
  Antisense strand to SEQ ID NO: 1333288
cuaacucagggacuaaugc

SEQ ID NO: 1333290 - RNA, 19 nt, Artificial Sequence
  Description of Artificial Sequence: Synthetic oligonucleotide
  Sense strand starting at position 3849 of SEQ ID NO: 1242244
acagguacccucuguugaa

SEQ ID NO: 1333291 - RNA, 19 nt, Artificial Sequence
  Description of Artificial Sequence: Synthetic oligonucleotide
  Antisense strand to SEQ ID NO: 1333290
uucaacagaggguaccugu

SEQ ID NO: 1333292 - RNA, 19 nt, Artificial Sequence
  Description of Artificial Sequence: Synthetic oligonucleotide
  Sense strand starting at position 3850 of SEQ ID NO: 1242244
cagguacccucuguugaau

SEQ ID NO: 1333293 - RNA, 19 nt, Artificial Sequence
  Description of Artificial Sequence: Synthetic oligonucleotide
  Antisense strand to SEQ ID NO: 1333292
auucaacagaggguaccug

SEQ ID NO: 1333294 - RNA, 19 nt, Artificial Sequence
  Description of Artificial Sequence: Synthetic oligonucleotide
  Sense strand starting at position 3853 of SEQ ID NO: 1242244
guacccucuguugaauuaa

SEQ ID NO: 1333295 - RNA, 19 nt, Artificial Sequence
  Description of Artificial Sequence: Synthetic oligonucleotide
  Antisense strand to SEQ ID NO: 1333294
uuaauucaacagaggguac

SEQ ID NO: 1333296 - RNA, 19 nt, Artificial Sequence
  Description of Artificial Sequence: Synthetic oligonucleotide
  Sense strand starting at position 3862 of SEQ ID NO: 1242244
guugaauuaaacugugaga

SEQ ID NO: 1333297 - RNA, 19 nt, Artificial Sequence
  Description of Artificial Sequence: Synthetic oligonucleotide
  Antisense strand to SEQ ID NO: 1333296
ucucacaguuuaauucaac

SEQ ID NO: 1333298 - RNA, 19 nt, Artificial Sequence
  Description of Artificial Sequence: Synthetic oligonucleotide
  Sense strand starting at position 3864 of SEQ ID NO: 1242244
ugaauuaaacugugagauu

SEQ ID NO: 1333299 - RNA, 19 nt, Artificial Sequence
  Description of Artificial Sequence: Synthetic oligonucleotide
  Antisense strand to SEQ ID NO: 1333298
aaucucacaguuuaauuca

SEQ ID NO: 1333300 - RNA, 19 nt, Artificial Sequence
  Description of Artificial Sequence: Synthetic oligonucleotide
  Sense strand starting at position 3887 of SEQ ID NO: 1242244
ggguauuuguuccugugac

SEQ ID NO: 1333301 - RNA, 19 nt, Artificial Sequence
  Description of Artificial Sequence: Synthetic oligonucleotide
  Antisense strand to SEQ ID NO: 1333300
gucacaggaacaaauaccc

SEQ ID NO: 1333302 - RNA, 19 nt, Artificial Sequence
  Description of Artificial Sequence: Synthetic oligonucleotide
  Sense strand starting at position 3914 of SEQ ID NO: 1242244
gacuguuccggcuaaugga

SEQ ID NO: 1333303 - RNA, 19 nt, Artificial Sequence
  Description of Artificial Sequence: Synthetic oligonucleotide
  Antisense strand to SEQ ID NO: 1333302
uccauuagccggaacaguc

SEQ ID NO: 1333304 - RNA, 19 nt, Artificial Sequence
  Description of Artificial Sequence: Synthetic oligonucleotide
  Sense strand starting at position 3979 of SEQ ID NO: 1242244
cugucaucuuaggcaaaug

SEQ ID NO: 1333305 - RNA, 19 nt, Artificial Sequence
  Description of Artificial Sequence: Synthetic oligonucleotide
  Antisense strand to SEQ ID NO: 1333304
cauuugccuaagaugacag

SEQ ID NO: 1333306 - RNA, 19 nt, Artificial Sequence
  Description of Artificial Sequence: Synthetic oligonucleotide
  Sense strand starting at position 222 of SEQ ID NO: 1242245
ggaggagguugugaucuua

SEQ ID NO: 1333307 - RNA, 19 nt, Artificial Sequence
  Description of Artificial Sequence: Synthetic oligonucleotide
  Antisense strand to SEQ ID NO: 1333306
uaagaucacaaccuccucc

SEQ ID NO: 1333308 - RNA, 19 nt, Artificial Sequence
  Description of Artificial Sequence: Synthetic oligonucleotide
  Sense strand starting at position 832 of SEQ ID NO: 1242245
gagccaugggcuuggacau

SEQ ID NO: 1333309 - RNA, 19 nt, Artificial Sequence
  Description of Artificial Sequence: Synthetic oligonucleotide
  Antisense strand to SEQ ID NO: 1333308
auguccaagcccauggcuc

SEQ ID NO: 1333310 - RNA, 19 nt, Artificial Sequence
  Description of Artificial Sequence: Synthetic oligonucleotide
  Sense strand starting at position 931 of SEQ ID NO: 1242245
cgcacucaccuguagauga

SEQ ID NO: 1333311 - RNA, 19 nt, Artificial Sequence
  Description of Artificial Sequence: Synthetic oligonucleotide
  Antisense strand to SEQ ID NO: 1333310
ucaucuacaggugagugcg

SEQ ID NO: 1333312 - RNA, 19 nt, Artificial Sequence
  Description of Artificial Sequence: Synthetic oligonucleotide
  Sense strand starting at position 1201 of SEQ ID NO: 1242245
cucuuccaucuggagaagu

SEQ ID NO: 1333313 - RNA, 19 nt, Artificial Sequence
  Description of Artificial Sequence: Synthetic oligonucleotide
  Antisense strand to SEQ ID NO: 1333312
acuucuccagauggaagag

SEQ ID NO: 1333314 - RNA, 19 nt, Artificial Sequence
  Description of Artificial Sequence: Synthetic oligonucleotide
  Sense strand starting at position 1203 of SEQ ID NO: 1242245
cuuccaucuggagaagugu

SEQ ID NO: 1333315 - RNA, 19 nt, Artificial Sequence
  Description of Artificial Sequence: Synthetic oligonucleotide
  Antisense strand to SEQ ID NO: 1333314
acacuucuccagauggaag

SEQ ID NO: 1333316 - RNA, 19 nt, Artificial Sequence
  Description of Artificial Sequence: Synthetic oligonucleotide
  Sense strand starting at position 1212 of SEQ ID NO: 1242245
ggagaagugucucccucac

SEQ ID NO: 1333317 - RNA, 19 nt, Artificial Sequence
  Description of Artificial Sequence: Synthetic oligonucleotide
  Antisense strand to SEQ ID NO: 1333316
gugagggagacacuucucc

SEQ ID NO: 1333318 - RNA, 19 nt, Artificial Sequence
  Description of Artificial Sequence: Synthetic oligonucleotide
  Sense strand starting at position 1403 of SEQ ID NO: 1242245
ggaccucugugcuguuaag

SEQ ID NO: 1333319 - RNA, 19 nt, Artificial Sequence
  Description of Artificial Sequence: Synthetic oligonucleotide
  Antisense strand to SEQ ID NO: 1333318
cuuaacagcacagaggucc

SEQ ID NO: 1333320 - RNA, 19 nt, Artificial Sequence
  Description of Artificial Sequence: Synthetic oligonucleotide
  Sense strand starting at position 1679 of SEQ ID NO: 1242245
aagccauaccugugggauc

SEQ ID NO: 1333321 - RNA, 19 nt, Artificial Sequence
  Description of Artificial Sequence: Synthetic oligonucleotide
  Antisense strand to SEQ ID NO: 1333320
gaucccacagguauggcuu

SEQ ID NO: 1333322 - RNA, 19 nt, Artificial Sequence
  Description of Artificial Sequence: Synthetic oligonucleotide
  Sense strand starting at position 2360 of SEQ ID NO: 1242245
cucccaaucaggugggauu

SEQ ID NO: 1333323 - RNA, 19 nt, Artificial Sequence
  Description of Artificial Sequence: Synthetic oligonucleotide
  Antisense strand to SEQ ID NO: 1333322
aaucccaccugauugggag

SEQ ID NO: 1333324 - RNA, 19 nt, Artificial Sequence
  Description of Artificial Sequence: Synthetic oligonucleotide
  Sense strand starting at position 2361 of SEQ ID NO: 1242245
ucccaaucaggugggauua

SEQ ID NO: 1333325 - RNA, 19 nt, Artificial Sequence
  Description of Artificial Sequence: Synthetic oligonucleotide
  Antisense strand to SEQ ID NO: 1333324
uaaucccaccugauuggga

SEQ ID NO: 1333326 - RNA, 19 nt, Artificial Sequence
  Description of Artificial Sequence: Synthetic oligonucleotide
  Sense strand starting at position 2685 of SEQ ID NO: 1242245
acuccaaucccuuggaaag

SEQ ID NO: 1333327 - RNA, 19 nt, Artificial Sequence
  Description of Artificial Sequence: Synthetic oligonucleotide
  Antisense strand to SEQ ID NO: 1333326
cuuuccaagggauuggagu

SEQ ID NO: 1333328 - RNA, 19 nt, Artificial Sequence
  Description of Artificial Sequence: Synthetic oligonucleotide
  Sense strand starting at position 3111 of SEQ ID NO: 1242245
ggaggaacuugucuuacau

SEQ ID NO: 1333329 - RNA, 19 nt, Artificial Sequence
  Description of Artificial Sequence: Synthetic oligonucleotide
  Antisense strand to SEQ ID NO: 1333328
auguaagacaaguuccucc

SEQ ID NO: 1333330 - RNA, 19 nt, Artificial Sequence
  Description of Artificial Sequence: Synthetic oligonucleotide
  Sense strand starting at position 3121 of SEQ ID NO: 1242245
gucuuacauccuugccuua

SEQ ID NO: 1333331 - RNA, 19 nt, Artificial Sequence
  Description of Artificial Sequence: Synthetic oligonucleotide
  Antisense strand to SEQ ID NO: 1333330
uaaggcaaggauguaagac

SEQ ID NO: 1333332 - RNA, 19 nt, Artificial Sequence
  Description of Artificial Sequence: Synthetic oligonucleotide
  Sense strand starting at position 3126 of SEQ ID NO: 1242245
acauccuugccuuauagua

SEQ ID NO: 1333333 - RNA, 19 nt, Artificial Sequence
  Description of Artificial Sequence: Synthetic oligonucleotide
  Antisense strand to SEQ ID NO: 1333332
uacuauaaggcaaggaugu

SEQ ID NO: 1333334 - RNA, 19 nt, Artificial Sequence
  Description of Artificial Sequence: Synthetic oligonucleotide
  Sense strand starting at position 3233 of SEQ ID NO: 1242245
cugagaaagugacucaauc

SEQ ID NO: 1333335 - RNA, 19 nt, Artificial Sequence
  Description of Artificial Sequence: Synthetic oligonucleotide
  Antisense strand to SEQ ID NO: 1333334
gauugagucacuuucucag

SEQ ID NO: 1333336 - RNA, 19 nt, Artificial Sequence
  Description of Artificial Sequence: Synthetic oligonucleotide
  Sense strand starting at position 3295 of SEQ ID NO: 1242245
gcaccuguccuauggugua

SEQ ID NO: 1333337 - RNA, 19 nt, Artificial Sequence
  Description of Artificial Sequence: Synthetic oligonucleotide
  Antisense strand to SEQ ID NO: 1333336
uacaccauaggacaggugc

SEQ ID NO: 1333338 - RNA, 19 nt, Artificial Sequence
  Description of Artificial Sequence: Synthetic oligonucleotide
  Sense strand starting at position 3357 of SEQ ID NO: 1242245
ccugguacucaguaagaac

SEQ ID NO: 1333339 - RNA, 19 nt, Artificial Sequence
  Description of Artificial Sequence: Synthetic oligonucleotide
  Antisense strand to SEQ ID NO: 1333338
guucuuacugaguaccagg

SEQ ID NO: 1333340 - RNA, 19 nt, Artificial Sequence
  Description of Artificial Sequence: Synthetic oligonucleotide
  Sense strand starting at position 3360 of SEQ ID NO: 1242245
gguacucaguaagaaccua

SEQ ID NO: 1333341 - RNA, 19 nt, Artificial Sequence
  Description of Artificial Sequence: Synthetic oligonucleotide
  Antisense strand to SEQ ID NO: 1333340
uagguucuuacugaguacc

SEQ ID NO: 1333342 - RNA, 19 nt, Artificial Sequence
  Description of Artificial Sequence: Synthetic oligonucleotide
  Sense strand starting at position 3391 of SEQ ID NO: 1242245
ugcagcugauauuguuaua

SEQ ID NO: 1333343 - RNA, 19 nt, Artificial Sequence
  Description of Artificial Sequence: Synthetic oligonucleotide
  Antisense strand to SEQ ID NO: 1333342
uauaacaauaucagcugca

SEQ ID NO: 1333344 - RNA, 19 nt, Artificial Sequence
  Description of Artificial Sequence: Synthetic oligonucleotide
  Sense strand starting at position 3394 of SEQ ID NO: 1242245
agcugauauuguuauauuc

SEQ ID NO: 1333345 - RNA, 19 nt, Artificial Sequence
  Description of Artificial Sequence: Synthetic oligonucleotide
  Antisense strand to SEQ ID NO: 1333344
gaauauaacaauaucagcu

SEQ ID NO: 1333346 - RNA, 19 nt, Artificial Sequence
  Description of Artificial Sequence: Synthetic oligonucleotide
  Sense strand starting at position 3636 of SEQ ID NO: 1242245
ccagaaggaucauggaguu

SEQ ID NO: 1333347 - RNA, 19 nt, Artificial Sequence
  Description of Artificial Sequence: Synthetic oligonucleotide
  Antisense strand to SEQ ID NO: 1333346
aacuccaugauccuucugg

SEQ ID NO: 1333348 - RNA, 19 nt, Artificial Sequence
  Description of Artificial Sequence: Synthetic oligonucleotide
  Sense strand starting at position 3671 of SEQ ID NO: 1242245
gggccuggcccuuauguaa

SEQ ID NO: 1333349 - RNA, 19 nt, Artificial Sequence
  Description of Artificial Sequence: Synthetic oligonucleotide
  Antisense strand to SEQ ID NO: 1333348
uuacauaagggccaggccc

SEQ ID NO: 1333350 - RNA, 19 nt, Artificial Sequence
  Description of Artificial Sequence: Synthetic oligonucleotide
  Sense strand starting at position 3695 of SEQ ID NO: 1242245
guuaacccucccugugaca

SEQ ID NO: 1333351 - RNA, 19 nt, Artificial Sequence
  Description of Artificial Sequence: Synthetic oligonucleotide
  Antisense strand to SEQ ID NO: 1333350
ugucacagggaggguuaac

SEQ ID NO: 1333352 - RNA, 19 nt, Artificial Sequence
  Description of Artificial Sequence: Synthetic oligonucleotide
  Sense strand starting at position 141 of SEQ ID NO: 1242246
ugggcuguauuucuuuaca

SEQ ID NO: 1333353 - RNA, 19 nt, Artificial Sequence
  Description of Artificial Sequence: Synthetic oligonucleotide
  Antisense strand to SEQ ID NO: 1333352
uguaaagaaauacagccca

SEQ ID NO: 1333354 - RNA, 19 nt, Artificial Sequence
  Description of Artificial Sequence: Synthetic oligonucleotide
  Sense strand starting at position 146 of SEQ ID NO: 1242246
uguauuucuuuacagauug

SEQ ID NO: 1333355 - RNA, 19 nt, Artificial Sequence
  Description of Artificial Sequence: Synthetic oligonucleotide
  Antisense strand to SEQ ID NO: 1333354
caaucuguaaagaaauaca

SEQ ID NO: 1333356 - RNA, 19 nt, Artificial Sequence
  Description of Artificial Sequence: Synthetic oligonucleotide
  Sense strand starting at position 187 of SEQ ID NO: 1242246
ccagcaaaugccgaguuua

SEQ ID NO: 1333357 - RNA, 19 nt, Artificial Sequence
  Description of Artificial Sequence: Synthetic oligonucleotide
  Antisense strand to SEQ ID NO: 1333356
uaaacucggcauuugcugg

SEQ ID NO: 1333358 - RNA, 19 nt, Artificial Sequence
  Description of Artificial Sequence: Synthetic oligonucleotide
  Sense strand starting at position 195 of SEQ ID NO: 1242246
ugccgaguuuaacucugaa

SEQ ID NO: 1333359 - RNA, 19 nt, Artificial Sequence
  Description of Artificial Sequence: Synthetic oligonucleotide
  Antisense strand to SEQ ID NO: 1333358
uucagaguuaaacucggca

SEQ ID NO: 1333360 - RNA, 19 nt, Artificial Sequence
  Description of Artificial Sequence: Synthetic oligonucleotide
  Sense strand starting at position 198 of SEQ ID NO: 1242246
cgaguuuaacucugaacuc

SEQ ID NO: 1333361 - RNA, 19 nt, Artificial Sequence
  Description of Artificial Sequence: Synthetic oligonucleotide
  Antisense strand to SEQ ID NO: 1333360
gaguucagaguuaaacucg

SEQ ID NO: 1333362 - RNA, 19 nt, Artificial Sequence
  Description of Artificial Sequence: Synthetic oligonucleotide
  Sense strand starting at position 332 of SEQ ID NO: 1242246
uccauugugucccucugaa

SEQ ID NO: 1333363 - RNA, 19 nt, Artificial Sequence
  Description of Artificial Sequence: Synthetic oligonucleotide
  Antisense strand to SEQ ID NO: 1333362
uucagagggacacaaugga

SEQ ID NO: 1333364 - RNA, 19 nt, Artificial Sequence
  Description of Artificial Sequence: Synthetic oligonucleotide
  Sense strand starting at position 415 of SEQ ID NO: 1242246
agaguuagguccucugaaa

SEQ ID NO: 1333365 - RNA, 19 nt, Artificial Sequence
  Description of Artificial Sequence: Synthetic oligonucleotide
  Antisense strand to SEQ ID NO: 1333364
uuucagaggaccuaacucu

SEQ ID NO: 1333366 - RNA, 19 nt, Artificial Sequence
  Description of Artificial Sequence: Synthetic oligonucleotide
  Sense strand starting at position 521 of SEQ ID NO: 1242246
guaagaguccucgcugccu

SEQ ID NO: 1333367 - RNA, 19 nt, Artificial Sequence
  Description of Artificial Sequence: Synthetic oligonucleotide
  Antisense strand to SEQ ID NO: 1333366
aggcagcgaggacucuuac

SEQ ID NO: 1333368 - RNA, 19 nt, Artificial Sequence
  Description of Artificial Sequence: Synthetic oligonucleotide
  Sense strand starting at position 869 of SEQ ID NO: 1242246
agcacagaauugcuucuua

SEQ ID NO: 1333369 - RNA, 19 nt, Artificial Sequence
  Description of Artificial Sequence: Synthetic oligonucleotide
  Antisense strand to SEQ ID NO: 1333368
uaagaagcaauucugugcu

SEQ ID NO: 1333370 - RNA, 19 nt, Artificial Sequence
  Description of Artificial Sequence: Synthetic oligonucleotide
  Sense strand starting at position 926 of SEQ ID NO: 1242246
aaacguuugccugaaaucc

SEQ ID NO: 1333371 - RNA, 19 nt, Artificial Sequence
  Description of Artificial Sequence: Synthetic oligonucleotide
  Antisense strand to SEQ ID NO: 1333370
ggauuucaggcaaacguuu

SEQ ID NO: 1333372 - RNA, 19 nt, Artificial Sequence
  Description of Artificial Sequence: Synthetic oligonucleotide
  Sense strand starting at position 1183 of SEQ ID NO: 1242246
gagucaucugcugcuugca

SEQ ID NO: 1333373 - RNA, 19 nt, Artificial Sequence
  Description of Artificial Sequence: Synthetic oligonucleotide
  Antisense strand to SEQ ID NO: 1333372
ugcaagcagcagaugacuc

SEQ ID NO: 1333374 - RNA, 19 nt, Artificial Sequence
  Description of Artificial Sequence: Synthetic oligonucleotide
  Sense strand starting at position 1230 of SEQ ID NO: 1242246
guuugcucuguggaaggaa

SEQ ID NO: 1333375 - RNA, 19 nt, Artificial Sequence
  Description of Artificial Sequence: Synthetic oligonucleotide
  Antisense strand to SEQ ID NO: 1333374
uuccuuccacagagcaaac

SEQ ID NO: 1333376 - RNA, 19 nt, Artificial Sequence
  Description of Artificial Sequence: Synthetic oligonucleotide
  Sense strand starting at position 1238 of SEQ ID NO: 1242246
uguggaaggaaaugaguuu

SEQ ID NO: 1333377 - RNA, 19 nt, Artificial Sequence
  Description of Artificial Sequence: Synthetic oligonucleotide
  Antisense strand to SEQ ID NO: 1333376
aaacucauuuccuuccaca

SEQ ID NO: 1333378 - RNA, 19 nt, Artificial Sequence
  Description of Artificial Sequence: Synthetic oligonucleotide
  Sense strand starting at position 1245 of SEQ ID NO: 1242246
ggaaaugaguuugaggaga

SEQ ID NO: 1333379 - RNA, 19 nt, Artificial Sequence
  Description of Artificial Sequence: Synthetic oligonucleotide
  Antisense strand to SEQ ID NO: 1333378
ucuccucaaacucauuucc

SEQ ID NO: 1333380 - RNA, 19 nt, Artificial Sequence
  Description of Artificial Sequence: Synthetic oligonucleotide
  Sense strand starting at position 1290 of SEQ ID NO: 1242246
agucuuaacgcuucgguuu

SEQ ID NO: 1333381 - RNA, 19 nt, Artificial Sequence
  Description of Artificial Sequence: Synthetic oligonucleotide
  Antisense strand to SEQ ID NO: 1333380
aaaccgaagcguuaagacu

SEQ ID NO: 1333382 - RNA, 19 nt, Artificial Sequence
  Description of Artificial Sequence: Synthetic oligonucleotide
  Sense strand starting at position 2095 of SEQ ID NO: 1242246
ccaacuuaaugaguuuagu

SEQ ID NO: 1333383 - RNA, 19 nt, Artificial Sequence
  Description of Artificial Sequence: Synthetic oligonucleotide
  Antisense strand to SEQ ID NO: 1333382
acuaaacucauuaaguugg

SEQ ID NO: 1333384 - RNA, 19 nt, Artificial Sequence
  Description of Artificial Sequence: Synthetic oligonucleotide
  Sense strand starting at position 2131 of SEQ ID NO: 1242246
ggcucagccucagcagaaa

SEQ ID NO: 1333385 - RNA, 19 nt, Artificial Sequence
  Description of Artificial Sequence: Synthetic oligonucleotide
  Antisense strand to SEQ ID NO: 1333384
uuucugcugaggcugagcc

SEQ ID NO: 1333386 - RNA, 19 nt, Artificial Sequence
  Description of Artificial Sequence: Synthetic oligonucleotide
  Sense strand starting at position 2229 of SEQ ID NO: 1242246
gauggaggcuaauccuaaa

SEQ ID NO: 1333387 - RNA, 19 nt, Artificial Sequence
  Description of Artificial Sequence: Synthetic oligonucleotide
  Antisense strand to SEQ ID NO: 1333386
uuuaggauuagccuccauc

SEQ ID NO: 1333388 - RNA, 19 nt, Artificial Sequence
  Description of Artificial Sequence: Synthetic oligonucleotide
  Sense strand starting at position 2320 of SEQ ID NO: 1242246
ucccucguccuggaucaaa

SEQ ID NO: 1333389 - RNA, 19 nt, Artificial Sequence
  Description of Artificial Sequence: Synthetic oligonucleotide
  Antisense strand to SEQ ID NO: 1333388
uuugauccaggacgaggga

SEQ ID NO: 1333390 - RNA, 19 nt, Artificial Sequence
  Description of Artificial Sequence: Synthetic oligonucleotide
  Sense strand starting at position 2323 of SEQ ID NO: 1242246
cucguccuggaucaaagau

SEQ ID NO: 1333391 - RNA, 19 nt, Artificial Sequence
  Description of Artificial Sequence: Synthetic oligonucleotide
  Antisense strand to SEQ ID NO: 1333390
aucuuugauccaggacgag

SEQ ID NO: 1333392 - RNA, 19 nt, Artificial Sequence
  Description of Artificial Sequence: Synthetic oligonucleotide
  Sense strand starting at position 2339 of SEQ ID NO: 1242246
gauagaacuugagacaaga

SEQ ID NO: 1333393 - RNA, 19 nt, Artificial Sequence
  Description of Artificial Sequence: Synthetic oligonucleotide
  Antisense strand to SEQ ID NO: 1333392
ucuugucucaaguucuauc

SEQ ID NO: 1333394 - RNA, 19 nt, Artificial Sequence
  Description of Artificial Sequence: Synthetic oligonucleotide
  Sense strand starting at position 2372 of SEQ ID NO: 1242246
cuaggaauccuuuggaauc

SEQ ID NO: 1333395 - RNA, 19 nt, Artificial Sequence
  Description of Artificial Sequence: Synthetic oligonucleotide
  Antisense strand to SEQ ID NO: 1333394
gauuccaaaggauuccuag

SEQ ID NO: 1333396 - RNA, 19 nt, Artificial Sequence
  Description of Artificial Sequence: Synthetic oligonucleotide
  Sense strand starting at position 2468 of SEQ ID NO: 1242246
uccgguccuuauucuagaa

SEQ ID NO: 1333397 - RNA, 19 nt, Artificial Sequence
  Description of Artificial Sequence: Synthetic oligonucleotide
  Antisense strand to SEQ ID NO: 1333396
uucuagaauaaggaccgga

SEQ ID NO: 1333398 - RNA, 19 nt, Artificial Sequence
  Description of Artificial Sequence: Synthetic oligonucleotide
  Sense strand starting at position 2480 of SEQ ID NO: 1242246
ucuagaacuuuccugagga

SEQ ID NO: 1333399 - RNA, 19 nt, Artificial Sequence
  Description of Artificial Sequence: Synthetic oligonucleotide
  Antisense strand to SEQ ID NO: 1333398
uccucaggaaaguucuaga

SEQ ID NO: 1333400 - RNA, 19 nt, Artificial Sequence
  Description of Artificial Sequence: Synthetic oligonucleotide
  Sense strand starting at position 2606 of SEQ ID NO: 1242246
gcaagaauacgguaacuag

SEQ ID NO: 1333401 - RNA, 19 nt, Artificial Sequence
  Description of Artificial Sequence: Synthetic oligonucleotide
  Antisense strand to SEQ ID NO: 1333400
cuaguuaccguauucuugc

SEQ ID NO: 1333402 - RNA, 19 nt, Artificial Sequence
  Description of Artificial Sequence: Synthetic oligonucleotide
  Sense strand starting at position 2659 of SEQ ID NO: 1242246
guuuaauacugucuuaacu

SEQ ID NO: 1333403 - RNA, 19 nt, Artificial Sequence
  Description of Artificial Sequence: Synthetic oligonucleotide
  Antisense strand to SEQ ID NO: 1333402
aguuaagacaguauuaaac

SEQ ID NO: 1333404 - RNA, 19 nt, Artificial Sequence
  Description of Artificial Sequence: Synthetic oligonucleotide
  Sense strand starting at position 2754 of SEQ ID NO: 1242246
ugguaagauguaugucaga

SEQ ID NO: 1333405 - RNA, 19 nt, Artificial Sequence
  Description of Artificial Sequence: Synthetic oligonucleotide
  Antisense strand to SEQ ID NO: 1333404
ucugacauacaucuuacca

SEQ ID NO: 1333406 - RNA, 19 nt, Artificial Sequence
  Description of Artificial Sequence: Synthetic oligonucleotide
  Sense strand starting at position 2840 of SEQ ID NO: 1242246
cacagugcugaauguuaau

SEQ ID NO: 1333407 - RNA, 19 nt, Artificial Sequence
  Description of Artificial Sequence: Synthetic oligonucleotide
  Antisense strand to SEQ ID NO: 1333406
auuaacauucagcacugug

SEQ ID NO: 1333408 - RNA, 19 nt, Artificial Sequence
  Description of Artificial Sequence: Synthetic oligonucleotide
  Sense strand starting at position 2846 of SEQ ID NO: 1242246
gcugaauguuaauuacaug

SEQ ID NO: 1333409 - RNA, 19 nt, Artificial Sequence
  Description of Artificial Sequence: Synthetic oligonucleotide
  Antisense strand to SEQ ID NO: 1333408
cauguaauuaacauucagc

SEQ ID NO: 1333410 - RNA, 19 nt, Artificial Sequence
  Description of Artificial Sequence: Synthetic oligonucleotide
  Sense strand starting at position 2861 of SEQ ID NO: 1242246
cauguuuacuggcuaauga

SEQ ID NO: 1333411 - RNA, 19 nt, Artificial Sequence
  Description of Artificial Sequence: Synthetic oligonucleotide
  Antisense strand to SEQ ID NO: 1333410
ucauuagccaguaaacaug

SEQ ID NO: 1333412 - RNA, 19 nt, Artificial Sequence
  Description of Artificial Sequence: Synthetic oligonucleotide
  Sense strand starting at position 2862 of SEQ ID NO: 1242246
auguuuacuggcuaaugaa

SEQ ID NO: 1333413 - RNA, 19 nt, Artificial Sequence
  Description of Artificial Sequence: Synthetic oligonucleotide
  Antisense strand to SEQ ID NO: 1333412
uucauuagccaguaaacau

SEQ ID NO: 1333414 - RNA, 19 nt, Artificial Sequence
  Description of Artificial Sequence: Synthetic oligonucleotide
  Sense strand starting at position 2920 of SEQ ID NO: 1242246
cucugaagacacuguaauu

SEQ ID NO: 1333415 - RNA, 19 nt, Artificial Sequence
  Description of Artificial Sequence: Synthetic oligonucleotide
  Antisense strand to SEQ ID NO: 1333414
aauuacagugucuucagag

SEQ ID NO: 1333416 - RNA, 19 nt, Artificial Sequence
  Description of Artificial Sequence: Synthetic oligonucleotide
  Sense strand starting at position 3046 of SEQ ID NO: 1242246
uuugucucaucaguuauac

SEQ ID NO: 1333417 - RNA, 19 nt, Artificial Sequence
  Description of Artificial Sequence: Synthetic oligonucleotide
  Antisense strand to SEQ ID NO: 1333416
guauaacugaugagacaaa

SEQ ID NO: 1333418 - RNA, 19 nt, Artificial Sequence
  Description of Artificial Sequence: Synthetic oligonucleotide
  Sense strand starting at position 3056 of SEQ ID NO: 1242246
caguuauacugaguggaug

SEQ ID NO: 1333419 - RNA, 19 nt, Artificial Sequence
  Description of Artificial Sequence: Synthetic oligonucleotide
  Antisense strand to SEQ ID NO: 1333418
cauccacucaguauaacug

SEQ ID NO: 1333420 - RNA, 19 nt, Artificial Sequence
  Description of Artificial Sequence: Synthetic oligonucleotide
  Sense strand starting at position 3101 of SEQ ID NO: 1242246
gugaacucauucucuuagu

SEQ ID NO: 1333421 - RNA, 19 nt, Artificial Sequence
  Description of Artificial Sequence: Synthetic oligonucleotide
  Antisense strand to SEQ ID NO: 1333420
acuaagagaaugaguucac

SEQ ID NO: 1333422 - RNA, 19 nt, Artificial Sequence
  Description of Artificial Sequence: Synthetic oligonucleotide
  Sense strand starting at position 3106 of SEQ ID NO: 1242246
cucauucucuuaguagaag

SEQ ID NO: 1333423 - RNA, 19 nt, Artificial Sequence
  Description of Artificial Sequence: Synthetic oligonucleotide
  Antisense strand to SEQ ID NO: 1333422
cuucuacuaagagaaugag

SEQ ID NO: 1333424 - RNA, 19 nt, Artificial Sequence
  Description of Artificial Sequence: Synthetic oligonucleotide
  Sense strand starting at position 3606 of SEQ ID NO: 1242246
uuuaacuuuggccaaaguu

SEQ ID NO: 1333425 - RNA, 19 nt, Artificial Sequence
  Description of Artificial Sequence: Synthetic oligonucleotide
  Antisense strand to SEQ ID NO: 1333424
aacuuuggccaaaguuaaa

SEQ ID NO: 1333426 - RNA, 19 nt, Artificial Sequence
  Description of Artificial Sequence: Synthetic oligonucleotide
  Sense strand starting at position 3642 of SEQ ID NO: 1242246
ucggaucuaggaggucaaa

SEQ ID NO: 1333427 - RNA, 19 nt, Artificial Sequence
  Description of Artificial Sequence: Synthetic oligonucleotide
  Antisense strand to SEQ ID NO: 1333426
uuugaccuccuagauccga

SEQ ID NO: 1333428 - RNA, 19 nt, Artificial Sequence
  Description of Artificial Sequence: Synthetic oligonucleotide
  Sense strand starting at position 3926 of SEQ ID NO: 1242246
ggaguuucugaauggugug

SEQ ID NO: 1333429 - RNA, 19 nt, Artificial Sequence
  Description of Artificial Sequence: Synthetic oligonucleotide
  Antisense strand to SEQ ID NO: 1333428
cacaccauucagaaacucc

SEQ ID NO: 1333430 - RNA, 19 nt, Artificial Sequence
  Description of Artificial Sequence: Synthetic oligonucleotide
  Sense strand starting at position 3927 of SEQ ID NO: 1242246
gaguuucugaaugguguga

SEQ ID NO: 1333431 - RNA, 19 nt, Artificial Sequence
  Description of Artificial Sequence: Synthetic oligonucleotide
  Antisense strand to SEQ ID NO: 1333430
ucacaccauucagaaacuc

SEQ ID NO: 1333432 - RNA, 19 nt, Artificial Sequence
  Description of Artificial Sequence: Synthetic oligonucleotide
  Sense strand starting at position 1229 of SEQ ID NO: 1242247
gagagucgcucucgcagaa

SEQ ID NO: 1333433 - RNA, 19 nt, Artificial Sequence
  Description of Artificial Sequence: Synthetic oligonucleotide
  Antisense strand to SEQ ID NO: 1333432
uucugcgagagcgacucuc

SEQ ID NO: 1333434 - RNA, 19 nt, Artificial Sequence
  Description of Artificial Sequence: Synthetic oligonucleotide
  Sense strand starting at position 1425 of SEQ ID NO: 1242247
cgcgcucucuucguuucaa

SEQ ID NO: 1333435 - RNA, 19 nt, Artificial Sequence
  Description of Artificial Sequence: Synthetic oligonucleotide
  Antisense strand to SEQ ID NO: 1333434
uugaaacgaagagagcgcg

SEQ ID NO: 1333436 - RNA, 19 nt, Artificial Sequence
  Description of Artificial Sequence: Synthetic oligonucleotide
  Sense strand starting at position 1491 of SEQ ID NO: 1242247
auguuaauccacggagggu

SEQ ID NO: 1333437 - RNA, 19 nt, Artificial Sequence
  Description of Artificial Sequence: Synthetic oligonucleotide
  Antisense strand to SEQ ID NO: 1333436
acccuccguggauuaacau

SEQ ID NO: 1333438 - RNA, 19 nt, Artificial Sequence
  Description of Artificial Sequence: Synthetic oligonucleotide
  Sense strand starting at position 1533 of SEQ ID NO: 1242247
agcguuaauacggcgaagu

SEQ ID NO: 1333439 - RNA, 19 nt, Artificial Sequence
  Description of Artificial Sequence: Synthetic oligonucleotide
  Antisense strand to SEQ ID NO: 1333438
acuucgccguauuaacgcu

SEQ ID NO: 1333440 - RNA, 19 nt, Artificial Sequence
  Description of Artificial Sequence: Synthetic oligonucleotide
  Sense strand starting at position 1534 of SEQ ID NO: 1242247
gcguuaauacggcgaagug

SEQ ID NO: 1333441 - RNA, 19 nt, Artificial Sequence
  Description of Artificial Sequence: Synthetic oligonucleotide
  Antisense strand to SEQ ID NO: 1333440
cacuucgccguauuaacgc

SEQ ID NO: 1333442 - RNA, 19 nt, Artificial Sequence
  Description of Artificial Sequence: Synthetic oligonucleotide
  Sense strand starting at position 1701 of SEQ ID NO: 1242247
agaaguaaacuaggcuuua

SEQ ID NO: 1333443 - RNA, 19 nt, Artificial Sequence
  Description of Artificial Sequence: Synthetic oligonucleotide
  Antisense strand to SEQ ID NO: 1333442
uaaagccuaguuuacuucu

SEQ ID NO: 1333444 - RNA, 19 nt, Artificial Sequence
  Description of Artificial Sequence: Synthetic oligonucleotide
  Sense strand starting at position 1756 of SEQ ID NO: 1242247
ggcagacuccagugaacuc

SEQ ID NO: 1333445 - RNA, 19 nt, Artificial Sequence
  Description of Artificial Sequence: Synthetic oligonucleotide
  Antisense strand to SEQ ID NO: 1333444
gaguucacuggagucugcc

SEQ ID NO: 1333446 - RNA, 19 nt, Artificial Sequence
  Description of Artificial Sequence: Synthetic oligonucleotide
  Sense strand starting at position 1822 of SEQ ID NO: 1242247
aggaaaucagucggccaaa

SEQ ID NO: 1333447 - RNA, 19 nt, Artificial Sequence
  Description of Artificial Sequence: Synthetic oligonucleotide
  Antisense strand to SEQ ID NO: 1333446
uuuggccgacugauuuccu

SEQ ID NO: 1333448 - RNA, 19 nt, Artificial Sequence
  Description of Artificial Sequence: Synthetic oligonucleotide
  Sense strand starting at position 1823 of SEQ ID NO: 1242247
ggaaaucagucggccaaag

SEQ ID NO: 1333449 - RNA, 19 nt, Artificial Sequence
  Description of Artificial Sequence: Synthetic oligonucleotide
  Antisense strand to SEQ ID NO: 1333448
cuuuggccgacugauuucc

SEQ ID NO: 1333450 - RNA, 19 nt, Artificial Sequence
  Description of Artificial Sequence: Synthetic oligonucleotide
  Sense strand starting at position 1872 of SEQ ID NO: 1242247
agaacucgcuucuaguaua

SEQ ID NO: 1333451 - RNA, 19 nt, Artificial Sequence
  Description of Artificial Sequence: Synthetic oligonucleotide
  Antisense strand to SEQ ID NO: 1333450
uauacuagaagcgaguucu

SEQ ID NO: 1333452 - RNA, 19 nt, Artificial Sequence
  Description of Artificial Sequence: Synthetic oligonucleotide
  Sense strand starting at position 1929 of SEQ ID NO: 1242247
ggcuucuuguccuuaccca

SEQ ID NO: 1333453 - RNA, 19 nt, Artificial Sequence
  Description of Artificial Sequence: Synthetic oligonucleotide
  Antisense strand to SEQ ID NO: 1333452
uggguaaggacaagaagcc

SEQ ID NO: 1333454 - RNA, 19 nt, Artificial Sequence
  Description of Artificial Sequence: Synthetic oligonucleotide
  Sense strand starting at position 1998 of SEQ ID NO: 1242247
ggagaaaugagaggccgau

SEQ ID NO: 1333455 - RNA, 19 nt, Artificial Sequence
  Description of Artificial Sequence: Synthetic oligonucleotide
  Antisense strand to SEQ ID NO: 1333454
aucggccucucauuucucc

SEQ ID NO: 1333456 - RNA, 19 nt, Artificial Sequence
  Description of Artificial Sequence: Synthetic oligonucleotide
  Sense strand starting at position 3906 of SEQ ID NO: 1242247
acacgacugcugcaacuua

SEQ ID NO: 1333457 - RNA, 19 nt, Artificial Sequence
  Description of Artificial Sequence: Synthetic oligonucleotide
  Antisense strand to SEQ ID NO: 1333456
uaaguugcagcagucgugu

SEQ ID NO: 1333458 - RNA, 19 nt, Artificial Sequence
  Description of Artificial Sequence: Synthetic oligonucleotide
  Sense strand starting at position 43 of SEQ ID NO: 1242248
cacuuuggguuguuugaaa

SEQ ID NO: 1333459 - RNA, 19 nt, Artificial Sequence
  Description of Artificial Sequence: Synthetic oligonucleotide
  Antisense strand to SEQ ID NO: 1333458
uuucaaacaacccaaagug

SEQ ID NO: 1333460 - RNA, 19 nt, Artificial Sequence
  Description of Artificial Sequence: Synthetic oligonucleotide
  Sense strand starting at position 68 of SEQ ID NO: 1242248
uuaaguguuugcuugggca

SEQ ID NO: 1333461 - RNA, 19 nt, Artificial Sequence
  Description of Artificial Sequence: Synthetic oligonucleotide
  Antisense strand to SEQ ID NO: 1333460
ugcccaagcaaacacuuaa

SEQ ID NO: 1333462 - RNA, 19 nt, Artificial Sequence
  Description of Artificial Sequence: Synthetic oligonucleotide
  Sense strand starting at position 119 of SEQ ID NO: 1242248
ugcagacauucugaagagu

SEQ ID NO: 1333463 - RNA, 19 nt, Artificial Sequence
  Description of Artificial Sequence: Synthetic oligonucleotide
  Antisense strand to SEQ ID NO: 1333462
acucuucagaaugucugca

SEQ ID NO: 1333464 - RNA, 19 nt, Artificial Sequence
  Description of Artificial Sequence: Synthetic oligonucleotide
  Sense strand starting at position 191 of SEQ ID NO: 1242248
ccuggcagucugcauuauu

SEQ ID NO: 1333465 - RNA, 19 nt, Artificial Sequence
  Description of Artificial Sequence: Synthetic oligonucleotide
  Antisense strand to SEQ ID NO: 1333464
aauaaugcagacugccagg

SEQ ID NO: 1333466 - RNA, 19 nt, Artificial Sequence
  Description of Artificial Sequence: Synthetic oligonucleotide
  Sense strand starting at position 194 of SEQ ID NO: 1242248
ggcagucugcauuauucca

SEQ ID NO: 1333467 - RNA, 19 nt, Artificial Sequence
  Description of Artificial Sequence: Synthetic oligonucleotide
  Antisense strand to SEQ ID NO: 1333466
uggaauaaugcagacugcc

SEQ ID NO: 1333468 - RNA, 19 nt, Artificial Sequence
  Description of Artificial Sequence: Synthetic oligonucleotide
  Sense strand starting at position 199 of SEQ ID NO: 1242248
ucugcauuauuccaguaag

SEQ ID NO: 1333469 - RNA, 19 nt, Artificial Sequence
  Description of Artificial Sequence: Synthetic oligonucleotide
  Antisense strand to SEQ ID NO: 1333468
cuuacuggaauaaugcaga

SEQ ID NO: 1333470 - RNA, 19 nt, Artificial Sequence
  Description of Artificial Sequence: Synthetic oligonucleotide
  Sense strand starting at position 202 of SEQ ID NO: 1242248
gcauuauuccaguaagaau

SEQ ID NO: 1333471 - RNA, 19 nt, Artificial Sequence
  Description of Artificial Sequence: Synthetic oligonucleotide
  Antisense strand to SEQ ID NO: 1333470
auucuuacuggaauaaugc

SEQ ID NO: 1333472 - RNA, 19 nt, Artificial Sequence
  Description of Artificial Sequence: Synthetic oligonucleotide
  Sense strand starting at position 247 of SEQ ID NO: 1242248
guuggauuugccuggagcu

SEQ ID NO: 1333473 - RNA, 19 nt, Artificial Sequence
  Description of Artificial Sequence: Synthetic oligonucleotide
  Antisense strand to SEQ ID NO: 1333472
agcuccaggcaaauccaac

SEQ ID NO: 1333474 - RNA, 19 nt, Artificial Sequence
  Description of Artificial Sequence: Synthetic oligonucleotide
  Sense strand starting at position 277 of SEQ ID NO: 1242248
ugaguuagcaggcaaacuu

SEQ ID NO: 1333475 - RNA, 19 nt, Artificial Sequence
  Description of Artificial Sequence: Synthetic oligonucleotide
  Antisense strand to SEQ ID NO: 1333474
aaguuugccugcuaacuca

SEQ ID NO: 1333476 - RNA, 19 nt, Artificial Sequence
  Description of Artificial Sequence: Synthetic oligonucleotide
  Sense strand starting at position 513 of SEQ ID NO: 1242248
gggaaucuaucugaagcau

SEQ ID NO: 1333477 - RNA, 19 nt, Artificial Sequence
  Description of Artificial Sequence: Synthetic oligonucleotide
  Antisense strand to SEQ ID NO: 1333476
augcuucagauagauuccc

SEQ ID NO: 1333478 - RNA, 19 nt, Artificial Sequence
  Description of Artificial Sequence: Synthetic oligonucleotide
  Sense strand starting at position 2004 of SEQ ID NO: 1242248
gagagucgcucucgcagaa

SEQ ID NO: 1333479 - RNA, 19 nt, Artificial Sequence
  Description of Artificial Sequence: Synthetic oligonucleotide
  Antisense strand to SEQ ID NO: 1333478
uucugcgagagcgacucuc

SEQ ID NO: 1333480 - RNA, 19 nt, Artificial Sequence
  Description of Artificial Sequence: Synthetic oligonucleotide
  Sense strand starting at position 2200 of SEQ ID NO: 1242248
cgcgcucucuucguuucaa

SEQ ID NO: 1333481 - RNA, 19 nt, Artificial Sequence
  Description of Artificial Sequence: Synthetic oligonucleotide
  Antisense strand to SEQ ID NO: 1333480
uugaaacgaagagagcgcg

SEQ ID NO: 1333482 - RNA, 19 nt, Artificial Sequence
  Description of Artificial Sequence: Synthetic oligonucleotide
  Sense strand starting at position 2266 of SEQ ID NO: 1242248
auguuaauccacggagggu

SEQ ID NO: 1333483 - RNA, 19 nt, Artificial Sequence
  Description of Artificial Sequence: Synthetic oligonucleotide
  Antisense strand to SEQ ID NO: 1333482
acccuccguggauuaacau

SEQ ID NO: 1333484 - RNA, 19 nt, Artificial Sequence
  Description of Artificial Sequence: Synthetic oligonucleotide
  Sense strand starting at position 2308 of SEQ ID NO: 1242248
agcguuaauacggcgaagu

SEQ ID NO: 1333485 - RNA, 19 nt, Artificial Sequence
  Description of Artificial Sequence: Synthetic oligonucleotide
  Antisense strand to SEQ ID NO: 1333484
acuucgccguauuaacgcu

SEQ ID NO: 1333486 - RNA, 19 nt, Artificial Sequence
  Description of Artificial Sequence: Synthetic oligonucleotide
  Sense strand starting at position 2309 of SEQ ID NO: 1242248
gcguuaauacggcgaagug

SEQ ID NO: 1333487 - RNA, 19 nt, Artificial Sequence
  Description of Artificial Sequence: Synthetic oligonucleotide
  Antisense strand to SEQ ID NO: 1333486
cacuucgccguauuaacgc

SEQ ID NO: 1333488 - RNA, 19 nt, Artificial Sequence
  Description of Artificial Sequence: Synthetic oligonucleotide
  Sense strand starting at position 2476 of SEQ ID NO: 1242248
agaaguaaacuaggcuuua

SEQ ID NO: 1333489 - RNA, 19 nt, Artificial Sequence
  Description of Artificial Sequence: Synthetic oligonucleotide
  Antisense strand to SEQ ID NO: 1333488
uaaagccuaguuuacuucu

SEQ ID NO: 1333490 - RNA, 19 nt, Artificial Sequence
  Description of Artificial Sequence: Synthetic oligonucleotide
  Sense strand starting at position 2531 of SEQ ID NO: 1242248
ggcagacuccagugaacuc

SEQ ID NO: 1333491 - RNA, 19 nt, Artificial Sequence
  Description of Artificial Sequence: Synthetic oligonucleotide
  Antisense strand to SEQ ID NO: 1333490
gaguucacuggagucugcc

SEQ ID NO: 1333492 - RNA, 19 nt, Artificial Sequence
  Description of Artificial Sequence: Synthetic oligonucleotide
  Sense strand starting at position 2597 of SEQ ID NO: 1242248
aggaaaucagucggccaaa

SEQ ID NO: 1333493 - RNA, 19 nt, Artificial Sequence
  Description of Artificial Sequence: Synthetic oligonucleotide
  Antisense strand to SEQ ID NO: 1333492
uuuggccgacugauuuccu

SEQ ID NO: 1333494 - RNA, 19 nt, Artificial Sequence
  Description of Artificial Sequence: Synthetic oligonucleotide
  Sense strand starting at position 2598 of SEQ ID NO: 1242248
ggaaaucagucggccaaag

SEQ ID NO: 1333495 - RNA, 19 nt, Artificial Sequence
  Description of Artificial Sequence: Synthetic oligonucleotide
  Antisense strand to SEQ ID NO: 1333494
cuuuggccgacugauuucc

SEQ ID NO: 1333496 - RNA, 19 nt, Artificial Sequence
  Description of Artificial Sequence: Synthetic oligonucleotide
  Sense strand starting at position 2647 of SEQ ID NO: 1242248
agaacucgcuucuaguaua

SEQ ID NO: 1333497 - RNA, 19 nt, Artificial Sequence
  Description of Artificial Sequence: Synthetic oligonucleotide
  Antisense strand to SEQ ID NO: 1333496
uauacuagaagcgaguucu

SEQ ID NO: 1333498 - RNA, 19 nt, Artificial Sequence
  Description of Artificial Sequence: Synthetic oligonucleotide
  Sense strand starting at position 2704 of SEQ ID NO: 1242248
ggcuucuuguccuuaccca

SEQ ID NO: 1333499 - RNA, 19 nt, Artificial Sequence
  Description of Artificial Sequence: Synthetic oligonucleotide
  Antisense strand to SEQ ID NO: 1333498
uggguaaggacaagaagcc

SEQ ID NO: 1333500 - RNA, 19 nt, Artificial Sequence
  Description of Artificial Sequence: Synthetic oligonucleotide
  Sense strand starting at position 2773 of SEQ ID NO: 1242248
ggagaaaugagaggccgau

SEQ ID NO: 1333501 - RNA, 19 nt, Artificial Sequence
  Description of Artificial Sequence: Synthetic oligonucleotide
  Antisense strand to SEQ ID NO: 1333500
aucggccucucauuucucc

SEQ ID NO: 1333502 - RNA, 19 nt, Artificial Sequence
  Description of Artificial Sequence: Synthetic oligonucleotide
  Sense strand starting at position 18 of SEQ ID NO: 1242249
agaaguaaacuaggcuuua

SEQ ID NO: 1333503 - RNA, 19 nt, Artificial Sequence
  Description of Artificial Sequence: Synthetic oligonucleotide
  Antisense strand to SEQ ID NO: 1333502
uaaagccuaguuuacuucu

SEQ ID NO: 1333504 - RNA, 19 nt, Artificial Sequence
  Description of Artificial Sequence: Synthetic oligonucleotide
  Sense strand starting at position 73 of SEQ ID NO: 1242249
ggcagacuccagugaacuc

SEQ ID NO: 1333505 - RNA, 19 nt, Artificial Sequence
  Description of Artificial Sequence: Synthetic oligonucleotide
  Antisense strand to SEQ ID NO: 1333504
gaguucacuggagucugcc

SEQ ID NO: 1333506 - RNA, 19 nt, Artificial Sequence
  Description of Artificial Sequence: Synthetic oligonucleotide
  Sense strand starting at position 139 of SEQ ID NO: 1242249
aggaaaucagucggccaaa

SEQ ID NO: 1333507 - RNA, 19 nt, Artificial Sequence
  Description of Artificial Sequence: Synthetic oligonucleotide
  Antisense strand to SEQ ID NO: 1333506
uuuggccgacugauuuccu

SEQ ID NO: 1333508 - RNA, 19 nt, Artificial Sequence
  Description of Artificial Sequence: Synthetic oligonucleotide
  Sense strand starting at position 140 of SEQ ID NO: 1242249
ggaaaucagucggccaaag

SEQ ID NO: 1333509 - RNA, 19 nt, Artificial Sequence
  Description of Artificial Sequence: Synthetic oligonucleotide
  Antisense strand to SEQ ID NO: 1333508
cuuuggccgacugauuucc

SEQ ID NO: 1333510 - RNA, 19 nt, Artificial Sequence
  Description of Artificial Sequence: Synthetic oligonucleotide
  Sense strand starting at position 189 of SEQ ID NO: 1242249
agaacucgcuucuaguaua

SEQ ID NO: 1333511 - RNA, 19 nt, Artificial Sequence
  Description of Artificial Sequence: Synthetic oligonucleotide
  Antisense strand to SEQ ID NO: 1333510
uauacuagaagcgaguucu

SEQ ID NO: 1333512 - RNA, 19 nt, Artificial Sequence
  Description of Artificial Sequence: Synthetic oligonucleotide
  Sense strand starting at position 246 of SEQ ID NO: 1242249
ggcuucuuguccuuaccca

SEQ ID NO: 1333513 - RNA, 19 nt, Artificial Sequence
  Description of Artificial Sequence: Synthetic oligonucleotide
  Antisense strand to SEQ ID NO: 1333512
uggguaaggacaagaagcc

SEQ ID NO: 1333514 - RNA, 19 nt, Artificial Sequence
  Description of Artificial Sequence: Synthetic oligonucleotide
  Sense strand starting at position 315 of SEQ ID NO: 1242249
ggagaaaugagaggccgau

SEQ ID NO: 1333515 - RNA, 19 nt, Artificial Sequence
  Description of Artificial Sequence: Synthetic oligonucleotide
  Antisense strand to SEQ ID NO: 1333514
aucggccucucauuucucc

SEQ ID NO: 1333516 - RNA, 19 nt, Artificial Sequence
  Description of Artificial Sequence: Synthetic oligonucleotide
  Sense strand starting at position 2223 of SEQ ID NO: 1242249
acacgacugcugcaacuua

SEQ ID NO: 1333517 - RNA, 19 nt, Artificial Sequence
  Description of Artificial Sequence: Synthetic oligonucleotide
  Antisense strand to SEQ ID NO: 1333516
uaaguugcagcagucgugu

SEQ ID NO: 1333518 - RNA, 19 nt, Artificial Sequence
  Description of Artificial Sequence: Synthetic oligonucleotide
  Sense strand starting at position 2740 of SEQ ID NO: 1242249
gguuucuuugcagagggau

SEQ ID NO: 1333519 - RNA, 19 nt, Artificial Sequence
  Description of Artificial Sequence: Synthetic oligonucleotide
  Antisense strand to SEQ ID NO: 1333518
aucccucugcaaagaaacc

SEQ ID NO: 1333520 - RNA, 19 nt, Artificial Sequence
  Description of Artificial Sequence: Synthetic oligonucleotide
  Sense strand starting at position 2811 of SEQ ID NO: 1242249
acgaaagaguuggccagau

SEQ ID NO: 1333521 - RNA, 19 nt, Artificial Sequence
  Description of Artificial Sequence: Synthetic oligonucleotide
  Antisense strand to SEQ ID NO: 1333520
aucuggccaacucuuucgu

SEQ ID NO: 1333522 - RNA, 19 nt, Artificial Sequence
  Description of Artificial Sequence: Synthetic oligonucleotide
  Sense strand starting at position 2875 of SEQ ID NO: 1242249
ucgguuuggugacauauau

SEQ ID NO: 1333523 - RNA, 19 nt, Artificial Sequence
  Description of Artificial Sequence: Synthetic oligonucleotide
  Antisense strand to SEQ ID NO: 1333522
auauaugucaccaaaccga

SEQ ID NO: 1333524 - RNA, 19 nt, Artificial Sequence
  Description of Artificial Sequence: Synthetic oligonucleotide
  Sense strand starting at position 2925 of SEQ ID NO: 1242249
gccguucuguuucuguuua

SEQ ID NO: 1333525 - RNA, 19 nt, Artificial Sequence
  Description of Artificial Sequence: Synthetic oligonucleotide
  Antisense strand to SEQ ID NO: 1333524
uaaacagaaacagaacggc

SEQ ID NO: 1333526 - RNA, 19 nt, Artificial Sequence
  Description of Artificial Sequence: Synthetic oligonucleotide
  Sense strand starting at position 2927 of SEQ ID NO: 1242249
cguucuguuucuguuuauu

SEQ ID NO: 1333527 - RNA, 19 nt, Artificial Sequence
  Description of Artificial Sequence: Synthetic oligonucleotide
  Antisense strand to SEQ ID NO: 1333526
aauaaacagaaacagaacg

SEQ ID NO: 1333528 - RNA, 19 nt, Artificial Sequence
  Description of Artificial Sequence: Synthetic oligonucleotide
  Sense strand starting at position 2966 of SEQ ID NO: 1242249
acagguauguggccugaca

SEQ ID NO: 1333529 - RNA, 19 nt, Artificial Sequence
  Description of Artificial Sequence: Synthetic oligonucleotide
  Antisense strand to SEQ ID NO: 1333528
ugucaggccacauaccugu

SEQ ID NO: 1333530 - RNA, 19 nt, Artificial Sequence
  Description of Artificial Sequence: Synthetic oligonucleotide
  Sense strand starting at position 2968 of SEQ ID NO: 1242249
agguauguggccugacauu

SEQ ID NO: 1333531 - RNA, 19 nt, Artificial Sequence
  Description of Artificial Sequence: Synthetic oligonucleotide
  Antisense strand to SEQ ID NO: 1333530
aaugucaggccacauaccu

SEQ ID NO: 1333532 - RNA, 19 nt, Artificial Sequence
  Description of Artificial Sequence: Synthetic oligonucleotide
  Sense strand starting at position 3036 of SEQ ID NO: 1242249
ucaucugauugucaugaug

SEQ ID NO: 1333533 - RNA, 19 nt, Artificial Sequence
  Description of Artificial Sequence: Synthetic oligonucleotide
  Antisense strand to SEQ ID NO: 1333532
caucaugacaaucagauga

SEQ ID NO: 1333534 - RNA, 19 nt, Artificial Sequence
  Description of Artificial Sequence: Synthetic oligonucleotide
  Sense strand starting at position 3038 of SEQ ID NO: 1242249
aucugauugucaugaugca

SEQ ID NO: 1333535 - RNA, 19 nt, Artificial Sequence
  Description of Artificial Sequence: Synthetic oligonucleotide
  Antisense strand to SEQ ID NO: 1333534
ugcaucaugacaaucagau

SEQ ID NO: 1333536 - RNA, 19 nt, Artificial Sequence
  Description of Artificial Sequence: Synthetic oligonucleotide
  Sense strand starting at position 3039 of SEQ ID NO: 1242249
ucugauugucaugaugcaa

SEQ ID NO: 1333537 - RNA, 19 nt, Artificial Sequence
  Description of Artificial Sequence: Synthetic oligonucleotide
  Antisense strand to SEQ ID NO: 1333536
uugcaucaugacaaucaga

SEQ ID NO: 1333538 - RNA, 19 nt, Artificial Sequence
  Description of Artificial Sequence: Synthetic oligonucleotide
  Sense strand starting at position 3130 of SEQ ID NO: 1242249
acacccagucauggugaga

SEQ ID NO: 1333539 - RNA, 19 nt, Artificial Sequence
  Description of Artificial Sequence: Synthetic oligonucleotide
  Antisense strand to SEQ ID NO: 1333538
ucucaccaugacugggugu

SEQ ID NO: 1333540 - RNA, 19 nt, Artificial Sequence
  Description of Artificial Sequence: Synthetic oligonucleotide
  Sense strand starting at position 3225 of SEQ ID NO: 1242249
cauguaagcgcacauguau

SEQ ID NO: 1333541 - RNA, 19 nt, Artificial Sequence
  Description of Artificial Sequence: Synthetic oligonucleotide
  Antisense strand to SEQ ID NO: 1333540
auacaugugcgcuuacaug

SEQ ID NO: 1333542 - RNA, 19 nt, Artificial Sequence
  Description of Artificial Sequence: Synthetic oligonucleotide
  Sense strand starting at position 3246 of SEQ ID NO: 1242249
gaugcacauuugucaaugu

SEQ ID NO: 1333543 - RNA, 19 nt, Artificial Sequence
  Description of Artificial Sequence: Synthetic oligonucleotide
  Antisense strand to SEQ ID NO: 1333542
acauugacaaaugugcauc

SEQ ID NO: 1333544 - RNA, 19 nt, Artificial Sequence
  Description of Artificial Sequence: Synthetic oligonucleotide
  Sense strand starting at position 3247 of SEQ ID NO: 1242249
augcacauuugucaaugua

SEQ ID NO: 1333545 - RNA, 19 nt, Artificial Sequence
  Description of Artificial Sequence: Synthetic oligonucleotide
  Antisense strand to SEQ ID NO: 1333544
uacauugacaaaugugcau

SEQ ID NO: 1333546 - RNA, 19 nt, Artificial Sequence
  Description of Artificial Sequence: Synthetic oligonucleotide
  Sense strand starting at position 3284 of SEQ ID NO: 1242249
cgacuaugcuucuagguca

SEQ ID NO: 1333547 - RNA, 19 nt, Artificial Sequence
  Description of Artificial Sequence: Synthetic oligonucleotide
  Antisense strand to SEQ ID NO: 1333546
ugaccuagaagcauagucg

SEQ ID NO: 1333548 - RNA, 19 nt, Artificial Sequence
  Description of Artificial Sequence: Synthetic oligonucleotide
  Sense strand starting at position 3289 of SEQ ID NO: 1242249
augcuucuaggucauagaa

SEQ ID NO: 1333549 - RNA, 19 nt, Artificial Sequence
  Description of Artificial Sequence: Synthetic oligonucleotide
  Antisense strand to SEQ ID NO: 1333548
uucuaugaccuagaagcau

SEQ ID NO: 1333550 - RNA, 19 nt, Artificial Sequence
  Description of Artificial Sequence: Synthetic oligonucleotide
  Sense strand starting at position 3291 of SEQ ID NO: 1242249
gcuucuaggucauagaaca

SEQ ID NO: 1333551 - RNA, 19 nt, Artificial Sequence
  Description of Artificial Sequence: Synthetic oligonucleotide
  Antisense strand to SEQ ID NO: 1333550
uguucuaugaccuagaagc

SEQ ID NO: 1333552 - RNA, 19 nt, Artificial Sequence
  Description of Artificial Sequence: Synthetic oligonucleotide
  Sense strand starting at position 3395 of SEQ ID NO: 1242249
gggaaauaauacuaguaca

SEQ ID NO: 1333553 - RNA, 19 nt, Artificial Sequence
  Description of Artificial Sequence: Synthetic oligonucleotide
  Antisense strand to SEQ ID NO: 1333552
uguacuaguauuauuuccc

SEQ ID NO: 1333554 - RNA, 19 nt, Artificial Sequence
  Description of Artificial Sequence: Synthetic oligonucleotide
  Sense strand starting at position 3520 of SEQ ID NO: 1242249
acaguugugucuuugaauu

SEQ ID NO: 1333555 - RNA, 19 nt, Artificial Sequence
  Description of Artificial Sequence: Synthetic oligonucleotide
  Antisense strand to SEQ ID NO: 1333554
aauucaaagacacaacugu

SEQ ID NO: 1333556 - RNA, 19 nt, Artificial Sequence
  Description of Artificial Sequence: Synthetic oligonucleotide
  Sense strand starting at position 3531 of SEQ ID NO: 1242249
uuugaauuccagggugucu

SEQ ID NO: 1333557 - RNA, 19 nt, Artificial Sequence
  Description of Artificial Sequence: Synthetic oligonucleotide
  Antisense strand to SEQ ID NO: 1333556
agacacccuggaauucaaa

SEQ ID NO: 1333558 - RNA, 19 nt, Artificial Sequence
  Description of Artificial Sequence: Synthetic oligonucleotide
  Sense strand starting at position 3590 of SEQ ID NO: 1242249
acuauauuccaacgcagua

SEQ ID NO: 1333559 - RNA, 19 nt, Artificial Sequence
  Description of Artificial Sequence: Synthetic oligonucleotide
  Antisense strand to SEQ ID NO: 1333558
uacugcguuggaauauagu

SEQ ID NO: 1333560 - RNA, 19 nt, Artificial Sequence
  Description of Artificial Sequence: Synthetic oligonucleotide
  Sense strand starting at position 3602 of SEQ ID NO: 1242249
cgcaguaaacuuguuguuu

SEQ ID NO: 1333561 - RNA, 19 nt, Artificial Sequence
  Description of Artificial Sequence: Synthetic oligonucleotide
  Antisense strand to SEQ ID NO: 1333560
aaacaacaaguuuacugcg

SEQ ID NO: 1333562 - RNA, 19 nt, Artificial Sequence
  Description of Artificial Sequence: Synthetic oligonucleotide
  Sense strand starting at position 3603 of SEQ ID NO: 1242249
gcaguaaacuuguuguuua

SEQ ID NO: 1333563 - RNA, 19 nt, Artificial Sequence
  Description of Artificial Sequence: Synthetic oligonucleotide
  Antisense strand to SEQ ID NO: 1333562
uaaacaacaaguuuacugc

SEQ ID NO: 1333564 - RNA, 19 nt, Artificial Sequence
  Description of Artificial Sequence: Synthetic oligonucleotide
  Sense strand starting at position 3606 of SEQ ID NO: 1242249
guaaacuuguuguuuauga

SEQ ID NO: 1333565 - RNA, 19 nt, Artificial Sequence
  Description of Artificial Sequence: Synthetic oligonucleotide
  Antisense strand to SEQ ID NO: 1333564
ucauaaacaacaaguuuac

SEQ ID NO: 1333566 - RNA, 19 nt, Artificial Sequence
  Description of Artificial Sequence: Synthetic oligonucleotide
  Sense strand starting at position 3613 of SEQ ID NO: 1242249
uguuguuuaugaccaguua

SEQ ID NO: 1333567 - RNA, 19 nt, Artificial Sequence
  Description of Artificial Sequence: Synthetic oligonucleotide
  Antisense strand to SEQ ID NO: 1333566
uaacuggucauaaacaaca

SEQ ID NO: 1333568 - RNA, 19 nt, Artificial Sequence
  Description of Artificial Sequence: Synthetic oligonucleotide
  Sense strand starting at position 3620 of SEQ ID NO: 1242249
uaugaccaguuagugaauu

SEQ ID NO: 1333569 - RNA, 19 nt, Artificial Sequence
  Description of Artificial Sequence: Synthetic oligonucleotide
  Antisense strand to SEQ ID NO: 1333568
aauucacuaacuggucaua

SEQ ID NO: 1333570 - RNA, 19 nt, Artificial Sequence
  Description of Artificial Sequence: Synthetic oligonucleotide
  Sense strand starting at position 3621 of SEQ ID NO: 1242249
augaccaguuagugaauua

SEQ ID NO: 1333571 - RNA, 19 nt, Artificial Sequence
  Description of Artificial Sequence: Synthetic oligonucleotide
  Antisense strand to SEQ ID NO: 1333570
uaauucacuaacuggucau

SEQ ID NO: 1333572 - RNA, 19 nt, Artificial Sequence
  Description of Artificial Sequence: Synthetic oligonucleotide
  Sense strand starting at position 3721 of SEQ ID NO: 1242249
caaccagguuugugaacaa

SEQ ID NO: 1333573 - RNA, 19 nt, Artificial Sequence
  Description of Artificial Sequence: Synthetic oligonucleotide
  Antisense strand to SEQ ID NO: 1333572
uuguucacaaaccugguug

SEQ ID NO: 1333574 - RNA, 19 nt, Artificial Sequence
  Description of Artificial Sequence: Synthetic oligonucleotide
  Sense strand starting at position 3760 of SEQ ID NO: 1242249
gacgcugagcuccaggaaa

SEQ ID NO: 1333575 - RNA, 19 nt, Artificial Sequence
  Description of Artificial Sequence: Synthetic oligonucleotide
  Antisense strand to SEQ ID NO: 1333574
uuuccuggagcucagcguc

SEQ ID NO: 1333576 - RNA, 19 nt, Artificial Sequence
  Description of Artificial Sequence: Synthetic oligonucleotide
  Sense strand starting at position 3762 of SEQ ID NO: 1242249
cgcugagcuccaggaaaga

SEQ ID NO: 1333577 - RNA, 19 nt, Artificial Sequence
  Description of Artificial Sequence: Synthetic oligonucleotide
  Antisense strand to SEQ ID NO: 1333576
ucuuuccuggagcucagcg

SEQ ID NO: 1333578 - RNA, 19 nt, Artificial Sequence
  Description of Artificial Sequence: Synthetic oligonucleotide
  Sense strand starting at position 3953 of SEQ ID NO: 1242249
gacuaaagaucugggcaga

SEQ ID NO: 1333579 - RNA, 19 nt, Artificial Sequence
  Description of Artificial Sequence: Synthetic oligonucleotide
  Antisense strand to SEQ ID NO: 1333578
ucugcccagaucuuuaguc

SEQ ID NO: 1333580 - RNA, 19 nt, Artificial Sequence
  Description of Artificial Sequence: Synthetic oligonucleotide
  Sense strand starting at position 3954 of SEQ ID NO: 1242249
acuaaagaucugggcagau

SEQ ID NO: 1333581 - RNA, 19 nt, Artificial Sequence
  Description of Artificial Sequence: Synthetic oligonucleotide
  Antisense strand to SEQ ID NO: 1333580
aucugcccagaucuuuagu

SEQ ID NO: 1333582 - RNA, 19 nt, Artificial Sequence
  Description of Artificial Sequence: Synthetic oligonucleotide
  Sense strand starting at position 91 of SEQ ID NO: 1242250
acauuauagcccuaagagu

SEQ ID NO: 1333583 - RNA, 19 nt, Artificial Sequence
  Description of Artificial Sequence: Synthetic oligonucleotide
  Antisense strand to SEQ ID NO: 1333582
acucuuagggcuauaaugu

SEQ ID NO: 1333584 - RNA, 19 nt, Artificial Sequence
  Description of Artificial Sequence: Synthetic oligonucleotide
  Sense strand starting at position 304 of SEQ ID NO: 1242250
caucaaaggcgucaucaua

SEQ ID NO: 1333585 - RNA, 19 nt, Artificial Sequence
  Description of Artificial Sequence: Synthetic oligonucleotide
  Antisense strand to SEQ ID NO: 1333584
uaugaugacgccuuugaug

SEQ ID NO: 1333586 - RNA, 19 nt, Artificial Sequence
  Description of Artificial Sequence: Synthetic oligonucleotide
  Sense strand starting at position 311 of SEQ ID NO: 1242250
ggcgucaucauauaugguu

SEQ ID NO: 1333587 - RNA, 19 nt, Artificial Sequence
  Description of Artificial Sequence: Synthetic oligonucleotide
  Antisense strand to SEQ ID NO: 1333586
aaccauauaugaugacgcc

SEQ ID NO: 1333588 - RNA, 19 nt, Artificial Sequence
  Description of Artificial Sequence: Synthetic oligonucleotide
  Sense strand starting at position 340 of SEQ ID NO: 1242250
gguggaauguaacuuuauc

SEQ ID NO: 1333589 - RNA, 19 nt, Artificial Sequence
  Description of Artificial Sequence: Synthetic oligonucleotide
  Antisense strand to SEQ ID NO: 1333588
gauaaaguuacauuccacc

SEQ ID NO: 1333590 - RNA, 19 nt, Artificial Sequence
  Description of Artificial Sequence: Synthetic oligonucleotide
  Sense strand starting at position 364 of SEQ ID NO: 1242250
uaagauuaguguccuuguu

SEQ ID NO: 1333591 - RNA, 19 nt, Artificial Sequence
  Description of Artificial Sequence: Synthetic oligonucleotide
  Antisense strand to SEQ ID NO: 1333590
aacaaggacacuaaucuua

SEQ ID NO: 1333592 - RNA, 19 nt, Artificial Sequence
  Description of Artificial Sequence: Synthetic oligonucleotide
  Sense strand starting at position 386 of SEQ ID NO: 1242250
auuggauuauagucagaca

SEQ ID NO: 1333593 - RNA, 19 nt, Artificial Sequence
  Description of Artificial Sequence: Synthetic oligonucleotide
  Antisense strand to SEQ ID NO: 1333592
ugucugacuauaauccaau

SEQ ID NO: 1333594 - RNA, 19 nt, Artificial Sequence
  Description of Artificial Sequence: Synthetic oligonucleotide
  Sense strand starting at position 497 of SEQ ID NO: 1242250
uccuuauuauuugagcuga

SEQ ID NO: 1333595 - RNA, 19 nt, Artificial Sequence
  Description of Artificial Sequence: Synthetic oligonucleotide
  Antisense strand to SEQ ID NO: 1333594
ucagcucaaauaauaagga

SEQ ID NO: 1333596 - RNA, 19 nt, Artificial Sequence
  Description of Artificial Sequence: Synthetic oligonucleotide
  Sense strand starting at position 533 of SEQ ID NO: 1242250
gcuagaauuuaucagguua

SEQ ID NO: 1333597 - RNA, 19 nt, Artificial Sequence
  Description of Artificial Sequence: Synthetic oligonucleotide
  Antisense strand to SEQ ID NO: 1333596
uaaccugauaaauucuagc

SEQ ID NO: 1333598 - RNA, 19 nt, Artificial Sequence
  Description of Artificial Sequence: Synthetic oligonucleotide
  Sense strand starting at position 684 of SEQ ID NO: 1242250
auaauacagccuuguguua

SEQ ID NO: 1333599 - RNA, 19 nt, Artificial Sequence
  Description of Artificial Sequence: Synthetic oligonucleotide
  Antisense strand to SEQ ID NO: 1333598
uaacacaaggcuguauuau

SEQ ID NO: 1333600 - RNA, 19 nt, Artificial Sequence
  Description of Artificial Sequence: Synthetic oligonucleotide
  Sense strand starting at position 719 of SEQ ID NO: 1242250
guuguucuauugcuaugga

SEQ ID NO: 1333601 - RNA, 19 nt, Artificial Sequence
  Description of Artificial Sequence: Synthetic oligonucleotide
  Antisense strand to SEQ ID NO: 1333600
uccauagcaauagaacaac

SEQ ID NO: 1333602 - RNA, 19 nt, Artificial Sequence
  Description of Artificial Sequence: Synthetic oligonucleotide
  Sense strand starting at position 722 of SEQ ID NO: 1242250
guucuauugcuauggacac

SEQ ID NO: 1333603 - RNA, 19 nt, Artificial Sequence
  Description of Artificial Sequence: Synthetic oligonucleotide
  Antisense strand to SEQ ID NO: 1333602
guguccauagcaauagaac

SEQ ID NO: 1333604 - RNA, 19 nt, Artificial Sequence
  Description of Artificial Sequence: Synthetic oligonucleotide
  Sense strand starting at position 1132 of SEQ ID NO: 1242250
uuucguaaacauuguuaac

SEQ ID NO: 1333605 - RNA, 19 nt, Artificial Sequence
  Description of Artificial Sequence: Synthetic oligonucleotide
  Antisense strand to SEQ ID NO: 1333604
guuaacaauguuuacgaaa

SEQ ID NO: 1333606 - RNA, 19 nt, Artificial Sequence
  Description of Artificial Sequence: Synthetic oligonucleotide
  Sense strand starting at position 1134 of SEQ ID NO: 1242250
ucguaaacauuguuaacau

SEQ ID NO: 1333607 - RNA, 19 nt, Artificial Sequence
  Description of Artificial Sequence: Synthetic oligonucleotide
  Antisense strand to SEQ ID NO: 1333606
auguuaacaauguuuacga

SEQ ID NO: 1333608 - RNA, 19 nt, Artificial Sequence
  Description of Artificial Sequence: Synthetic oligonucleotide
  Sense strand starting at position 1454 of SEQ ID NO: 1242250
augucuggcaucuggcaaa

SEQ ID NO: 1333609 - RNA, 19 nt, Artificial Sequence
  Description of Artificial Sequence: Synthetic oligonucleotide
  Antisense strand to SEQ ID NO: 1333608
uuugccagaugccagacau

SEQ ID NO: 1333610 - RNA, 19 nt, Artificial Sequence
  Description of Artificial Sequence: Synthetic oligonucleotide
  Sense strand starting at position 1500 of SEQ ID NO: 1242250
auaugaaguuuccugcuau

SEQ ID NO: 1333611 - RNA, 19 nt, Artificial Sequence
  Description of Artificial Sequence: Synthetic oligonucleotide
  Antisense strand to SEQ ID NO: 1333610
auagcaggaaacuucauau

SEQ ID NO: 1333612 - RNA, 19 nt, Artificial Sequence
  Description of Artificial Sequence: Synthetic oligonucleotide
  Sense strand starting at position 1506 of SEQ ID NO: 1242250
aguuuccugcuauaacaga

SEQ ID NO: 1333613 - RNA, 19 nt, Artificial Sequence
  Description of Artificial Sequence: Synthetic oligonucleotide
  Antisense strand to SEQ ID NO: 1333612
ucuguuauagcaggaaacu

SEQ ID NO: 1333614 - RNA, 19 nt, Artificial Sequence
  Description of Artificial Sequence: Synthetic oligonucleotide
  Sense strand starting at position 1594 of SEQ ID NO: 1242250
aguucuguucuauaaagaa

SEQ ID NO: 1333615 - RNA, 19 nt, Artificial Sequence
  Description of Artificial Sequence: Synthetic oligonucleotide
  Antisense strand to SEQ ID NO: 1333614
uucuuuauagaacagaacu

SEQ ID NO: 1333616 - RNA, 19 nt, Artificial Sequence
  Description of Artificial Sequence: Synthetic oligonucleotide
  Sense strand starting at position 1734 of SEQ ID NO: 1242250
cgagcaagcaaucgagaga

SEQ ID NO: 1333617 - RNA, 19 nt, Artificial Sequence
  Description of Artificial Sequence: Synthetic oligonucleotide
  Antisense strand to SEQ ID NO: 1333616
ucucucgauugcuugcucg

SEQ ID NO: 1333618 - RNA, 19 nt, Artificial Sequence
  Description of Artificial Sequence: Synthetic oligonucleotide
  Sense strand starting at position 1980 of SEQ ID NO: 1242250
ugauuuauauggcugcagu

SEQ ID NO: 1333619 - RNA, 19 nt, Artificial Sequence
  Description of Artificial Sequence: Synthetic oligonucleotide
  Antisense strand to SEQ ID NO: 1333618
acugcagccauauaaauca

SEQ ID NO: 1333620 - RNA, 19 nt, Artificial Sequence
  Description of Artificial Sequence: Synthetic oligonucleotide
  Sense strand starting at position 1981 of SEQ ID NO: 1242250
gauuuauauggcugcagug

SEQ ID NO: 1333621 - RNA, 19 nt, Artificial Sequence
  Description of Artificial Sequence: Synthetic oligonucleotide
  Antisense strand to SEQ ID NO: 1333620
cacugcagccauauaaauc

SEQ ID NO: 1333622 - RNA, 19 nt, Artificial Sequence
  Description of Artificial Sequence: Synthetic oligonucleotide
  Sense strand starting at position 2091 of SEQ ID NO: 1242250
uugcaaauggagcagaauu

SEQ ID NO: 1333623 - RNA, 19 nt, Artificial Sequence
  Description of Artificial Sequence: Synthetic oligonucleotide
  Antisense strand to SEQ ID NO: 1333622
aauucugcuccauuugcaa

SEQ ID NO: 1333624 - RNA, 19 nt, Artificial Sequence
  Description of Artificial Sequence: Synthetic oligonucleotide
  Sense strand starting at position 2144 of SEQ ID NO: 1242250
ccaaauuacuguccacguu

SEQ ID NO: 1333625 - RNA, 19 nt, Artificial Sequence
  Description of Artificial Sequence: Synthetic oligonucleotide
  Antisense strand to SEQ ID NO: 1333624
aacguggacaguaauuugg

SEQ ID NO: 1333626 - RNA, 19 nt, Artificial Sequence
  Description of Artificial Sequence: Synthetic oligonucleotide
  Sense strand starting at position 2205 of SEQ ID NO: 1242250
aucuuugcuugucugaaua

SEQ ID NO: 1333627 - RNA, 19 nt, Artificial Sequence
  Description of Artificial Sequence: Synthetic oligonucleotide
  Antisense strand to SEQ ID NO: 1333626
uauucagacaagcaaagau

SEQ ID NO: 1333628 - RNA, 19 nt, Artificial Sequence
  Description of Artificial Sequence: Synthetic oligonucleotide
  Sense strand starting at position 2227 of SEQ ID NO: 1242250
caagacguaguguaaguuu

SEQ ID NO: 1333629 - RNA, 19 nt, Artificial Sequence
  Description of Artificial Sequence: Synthetic oligonucleotide
  Antisense strand to SEQ ID NO: 1333628
aaacuuacacuacgucuug

SEQ ID NO: 1333630 - RNA, 19 nt, Artificial Sequence
  Description of Artificial Sequence: Synthetic oligonucleotide
  Sense strand starting at position 2268 of SEQ ID NO: 1242250
ggagcuaauagauaagugu

SEQ ID NO: 1333631 - RNA, 19 nt, Artificial Sequence
  Description of Artificial Sequence: Synthetic oligonucleotide
  Antisense strand to SEQ ID NO: 1333630
acacuuaucuauuagcucc

SEQ ID NO: 1333632 - RNA, 19 nt, Artificial Sequence
  Description of Artificial Sequence: Synthetic oligonucleotide
  Sense strand starting at position 2329 of SEQ ID NO: 1242250
agguuuguguuaccuuaca

SEQ ID NO: 1333633 - RNA, 19 nt, Artificial Sequence
  Description of Artificial Sequence: Synthetic oligonucleotide
  Antisense strand to SEQ ID NO: 1333632
uguaagguaacacaaaccu

SEQ ID NO: 1333634 - RNA, 19 nt, Artificial Sequence
  Description of Artificial Sequence: Synthetic oligonucleotide
  Sense strand starting at position 2474 of SEQ ID NO: 1242250
uaccaaugacaguguaaug

SEQ ID NO: 1333635 - RNA, 19 nt, Artificial Sequence
  Description of Artificial Sequence: Synthetic oligonucleotide
  Antisense strand to SEQ ID NO: 1333634
cauuacacugucauuggua

SEQ ID NO: 1333636 - RNA, 19 nt, Artificial Sequence
  Description of Artificial Sequence: Synthetic oligonucleotide
  Sense strand starting at position 2484 of SEQ ID NO: 1242250
aguguaaugccugaaugcu

SEQ ID NO: 1333637 - RNA, 19 nt, Artificial Sequence
  Description of Artificial Sequence: Synthetic oligonucleotide
  Antisense strand to SEQ ID NO: 1333636
agcauucaggcauuacacu

SEQ ID NO: 1333638 - RNA, 19 nt, Artificial Sequence
  Description of Artificial Sequence: Synthetic oligonucleotide
  Sense strand starting at position 2492 of SEQ ID NO: 1242250
gccugaaugcuauggcaaa

SEQ ID NO: 1333639 - RNA, 19 nt, Artificial Sequence
  Description of Artificial Sequence: Synthetic oligonucleotide
  Antisense strand to SEQ ID NO: 1333638
uuugccauagcauucaggc

SEQ ID NO: 1333640 - RNA, 19 nt, Artificial Sequence
  Description of Artificial Sequence: Synthetic oligonucleotide
  Sense strand starting at position 2503 of SEQ ID NO: 1242250
auggcaaaguuguuaaaua

SEQ ID NO: 1333641 - RNA, 19 nt, Artificial Sequence
  Description of Artificial Sequence: Synthetic oligonucleotide
  Antisense strand to SEQ ID NO: 1333640
uauuuaacaacuuugccau

SEQ ID NO: 1333642 - RNA, 19 nt, Artificial Sequence
  Description of Artificial Sequence: Synthetic oligonucleotide
  Sense strand starting at position 2636 of SEQ ID NO: 1242250
gccaaacauuuagaugguu

SEQ ID NO: 1333643 - RNA, 19 nt, Artificial Sequence
  Description of Artificial Sequence: Synthetic oligonucleotide
  Antisense strand to SEQ ID NO: 1333642
aaccaucuaaauguuuggc

SEQ ID NO: 1333644 - RNA, 19 nt, Artificial Sequence
  Description of Artificial Sequence: Synthetic oligonucleotide
  Sense strand starting at position 2681 of SEQ ID NO: 1242250
auuauuacuugacugaugu

SEQ ID NO: 1333645 - RNA, 19 nt, Artificial Sequence
  Description of Artificial Sequence: Synthetic oligonucleotide
  Antisense strand to SEQ ID NO: 1333644
acaucagucaaguaauaau

SEQ ID NO: 1333646 - RNA, 19 nt, Artificial Sequence
  Description of Artificial Sequence: Synthetic oligonucleotide
  Sense strand starting at position 2682 of SEQ ID NO: 1242250
uuauuacuugacugaugua

SEQ ID NO: 1333647 - RNA, 19 nt, Artificial Sequence
  Description of Artificial Sequence: Synthetic oligonucleotide
  Antisense strand to SEQ ID NO: 1333646
uacaucagucaaguaauaa

SEQ ID NO: 1333648 - RNA, 19 nt, Artificial Sequence
  Description of Artificial Sequence: Synthetic oligonucleotide
  Sense strand starting at position 2694 of SEQ ID NO: 1242250
ugauguaaagcccaaacua

SEQ ID NO: 1333649 - RNA, 19 nt, Artificial Sequence
  Description of Artificial Sequence: Synthetic oligonucleotide
  Antisense strand to SEQ ID NO: 1333648
uaguuugggcuuuacauca

SEQ ID NO: 1333650 - RNA, 19 nt, Artificial Sequence
  Description of Artificial Sequence: Synthetic oligonucleotide
  Sense strand starting at position 2781 of SEQ ID NO: 1242250
uguucauuaggagaauggu

SEQ ID NO: 1333651 - RNA, 19 nt, Artificial Sequence
  Description of Artificial Sequence: Synthetic oligonucleotide
  Antisense strand to SEQ ID NO: 1333650
accauucuccuaaugaaca

SEQ ID NO: 1333652 - RNA, 19 nt, Artificial Sequence
  Description of Artificial Sequence: Synthetic oligonucleotide
  Sense strand starting at position 3850 of SEQ ID NO: 1242250
gccuguuuacucugacgag

SEQ ID NO: 1333653 - RNA, 19 nt, Artificial Sequence
  Description of Artificial Sequence: Synthetic oligonucleotide
  Antisense strand to SEQ ID NO: 1333652
cucgucagaguaaacaggc

SEQ ID NO: 1333654 - RNA, 19 nt, Artificial Sequence
  Description of Artificial Sequence: Synthetic oligonucleotide
  Sense strand starting at position 3854 of SEQ ID NO: 1242250
guuuacucugacgagaguu

SEQ ID NO: 1333655 - RNA, 19 nt, Artificial Sequence
  Description of Artificial Sequence: Synthetic oligonucleotide
  Antisense strand to SEQ ID NO: 1333654
aacucucgucagaguaaac

SEQ ID NO: 1333656 - RNA, 19 nt, Artificial Sequence
  Description of Artificial Sequence: Synthetic oligonucleotide
  Sense strand starting at position 3961 of SEQ ID NO: 1242250
cgaagucuuugcccauauc

SEQ ID NO: 1333657 - RNA, 19 nt, Artificial Sequence
  Description of Artificial Sequence: Synthetic oligonucleotide
  Antisense strand to SEQ ID NO: 1333656
gauaugggcaaagacuucg

SEQ ID NO: 1333658 - RNA, 19 nt, Artificial Sequence
  Description of Artificial Sequence: Synthetic oligonucleotide
  Sense strand starting at position 3964 of SEQ ID NO: 1242250
agucuuugcccauaucugu

SEQ ID NO: 1333659 - RNA, 19 nt, Artificial Sequence
  Description of Artificial Sequence: Synthetic oligonucleotide
  Antisense strand to SEQ ID NO: 1333658
acagauaugggcaaagacu

SEQ ID NO: 1333660 - RNA, 19 nt, Artificial Sequence
  Description of Artificial Sequence: Synthetic oligonucleotide
  Sense strand starting at position 3973 of SEQ ID NO: 1242250
ccauaucuguguccugaau

SEQ ID NO: 1333661 - RNA, 19 nt, Artificial Sequence
  Description of Artificial Sequence: Synthetic oligonucleotide
  Antisense strand to SEQ ID NO: 1333660
auucaggacacagauaugg

SEQ ID NO: 1333662 - RNA, 19 nt, Artificial Sequence
  Description of Artificial Sequence: Synthetic oligonucleotide
  Sense strand starting at position 94 of SEQ ID NO: 1242251
ugagaauuauccucugagc

SEQ ID NO: 1333663 - RNA, 19 nt, Artificial Sequence
  Description of Artificial Sequence: Synthetic oligonucleotide
  Antisense strand to SEQ ID NO: 1333662
gcucagaggauaauucuca

SEQ ID NO: 1333664 - RNA, 19 nt, Artificial Sequence
  Description of Artificial Sequence: Synthetic oligonucleotide
  Sense strand starting at position 96 of SEQ ID NO: 1242251
agaauuauccucugagcaa

SEQ ID NO: 1333665 - RNA, 19 nt, Artificial Sequence
  Description of Artificial Sequence: Synthetic oligonucleotide
  Antisense strand to SEQ ID NO: 1333664
uugcucagaggauaauucu

SEQ ID NO: 1333666 - RNA, 19 nt, Artificial Sequence
  Description of Artificial Sequence: Synthetic oligonucleotide
  Sense strand starting at position 109 of SEQ ID NO: 1242251
gagcaauuccaguaugguc

SEQ ID NO: 1333667 - RNA, 19 nt, Artificial Sequence
  Description of Artificial Sequence: Synthetic oligonucleotide
  Antisense strand to SEQ ID NO: 1333666
gaccauacuggaauugcuc

SEQ ID NO: 1333668 - RNA, 19 nt, Artificial Sequence
  Description of Artificial Sequence: Synthetic oligonucleotide
  Sense strand starting at position 334 of SEQ ID NO: 1242251
gccagaguugaauguucca

SEQ ID NO: 1333669 - RNA, 19 nt, Artificial Sequence
  Description of Artificial Sequence: Synthetic oligonucleotide
  Antisense strand to SEQ ID NO: 1333668
uggaacauucaacucuggc

SEQ ID NO: 1333670 - RNA, 19 nt, Artificial Sequence
  Description of Artificial Sequence: Synthetic oligonucleotide
  Sense strand starting at position 337 of SEQ ID NO: 1242251
agaguugaauguuccaaau

SEQ ID NO: 1333671 - RNA, 19 nt, Artificial Sequence
  Description of Artificial Sequence: Synthetic oligonucleotide
  Antisense strand to SEQ ID NO: 1333670
auuuggaacauucaacucu

SEQ ID NO: 1333672 - RNA, 19 nt, Artificial Sequence
  Description of Artificial Sequence: Synthetic oligonucleotide
  Sense strand starting at position 422 of SEQ ID NO: 1242251
gccauccugacucggaaua

SEQ ID NO: 1333673 - RNA, 19 nt, Artificial Sequence
  Description of Artificial Sequence: Synthetic oligonucleotide
  Antisense strand to SEQ ID NO: 1333672
uauuccgagucaggauggc

SEQ ID NO: 1333674 - RNA, 19 nt, Artificial Sequence
  Description of Artificial Sequence: Synthetic oligonucleotide
  Sense strand starting at position 437 of SEQ ID NO: 1242251
aauaguuccgagcaguuau

SEQ ID NO: 1333675 - RNA, 19 nt, Artificial Sequence
  Description of Artificial Sequence: Synthetic oligonucleotide
  Antisense strand to SEQ ID NO: 1333674
auaacugcucggaacuauu

SEQ ID NO: 1333676 - RNA, 19 nt, Artificial Sequence
  Description of Artificial Sequence: Synthetic oligonucleotide
  Sense strand starting at position 634 of SEQ ID NO: 1242251
gcaacuuguuuacuuguca

SEQ ID NO: 1333677 - RNA, 19 nt, Artificial Sequence
  Description of Artificial Sequence: Synthetic oligonucleotide
  Antisense strand to SEQ ID NO: 1333676
ugacaaguaaacaaguugc

SEQ ID NO: 1333678 - RNA, 19 nt, Artificial Sequence
  Description of Artificial Sequence: Synthetic oligonucleotide
  Sense strand starting at position 638 of SEQ ID NO: 1242251
cuuguuuacuugucagcau

SEQ ID NO: 1333679 - RNA, 19 nt, Artificial Sequence
  Description of Artificial Sequence: Synthetic oligonucleotide
  Antisense strand to SEQ ID NO: 1333678
augcugacaaguaaacaag

SEQ ID NO: 1333680 - RNA, 19 nt, Artificial Sequence
  Description of Artificial Sequence: Synthetic oligonucleotide
  Sense strand starting at position 642 of SEQ ID NO: 1242251
uuuacuugucagcauguuu

SEQ ID NO: 1333681 - RNA, 19 nt, Artificial Sequence
  Description of Artificial Sequence: Synthetic oligonucleotide
  Antisense strand to SEQ ID NO: 1333680
aaacaugcugacaaguaaa

SEQ ID NO: 1333682 - RNA, 19 nt, Artificial Sequence
  Description of Artificial Sequence: Synthetic oligonucleotide
  Sense strand starting at position 703 of SEQ ID NO: 1242251
gcgagcagucccuaucugu

SEQ ID NO: 1333683 - RNA, 19 nt, Artificial Sequence
  Description of Artificial Sequence: Synthetic oligonucleotide
  Antisense strand to SEQ ID NO: 1333682
acagauagggacugcucgc

SEQ ID NO: 1333684 - RNA, 19 nt, Artificial Sequence
  Description of Artificial Sequence: Synthetic oligonucleotide
  Sense strand starting at position 783 of SEQ ID NO: 1242251
aaucgaaccucgucuacuu

SEQ ID NO: 1333685 - RNA, 19 nt, Artificial Sequence
  Description of Artificial Sequence: Synthetic oligonucleotide
  Antisense strand to SEQ ID NO: 1333684
aaguagacgagguucgauu

SEQ ID NO: 1333686 - RNA, 19 nt, Artificial Sequence
  Description of Artificial Sequence: Synthetic oligonucleotide
  Sense strand starting at position 819 of SEQ ID NO: 1242251
gccaaacuguugcuauuua

SEQ ID NO: 1333687 - RNA, 19 nt, Artificial Sequence
  Description of Artificial Sequence: Synthetic oligonucleotide
  Antisense strand to SEQ ID NO: 1333686
uaaauagcaacaguuuggc

SEQ ID NO: 1333688 - RNA, 19 nt, Artificial Sequence
  Description of Artificial Sequence: Synthetic oligonucleotide
  Sense strand starting at position 989 of SEQ ID NO: 1242251
gccggagucaccuggaaug

SEQ ID NO: 1333689 - RNA, 19 nt, Artificial Sequence
  Description of Artificial Sequence: Synthetic oligonucleotide
  Antisense strand to SEQ ID NO: 1333688
cauuccaggugacuccggc

SEQ ID NO: 1333690 - RNA, 19 nt, Artificial Sequence
  Description of Artificial Sequence: Synthetic oligonucleotide
  Sense strand starting at position 1164 of SEQ ID NO: 1242251
gccugacuuacauggaagu

SEQ ID NO: 1333691 - RNA, 19 nt, Artificial Sequence
  Description of Artificial Sequence: Synthetic oligonucleotide
  Antisense strand to SEQ ID NO: 1333690
acuuccauguaagucaggc

SEQ ID NO: 1333692 - RNA, 19 nt, Artificial Sequence
  Description of Artificial Sequence: Synthetic oligonucleotide
  Sense strand starting at position 1180 of SEQ ID NO: 1242251
agugauauuccuugagaug

SEQ ID NO: 1333693 - RNA, 19 nt, Artificial Sequence
  Description of Artificial Sequence: Synthetic oligonucleotide
  Antisense strand to SEQ ID NO: 1333692
caucucaaggaauaucacu

SEQ ID NO: 1333694 - RNA, 19 nt, Artificial Sequence
  Description of Artificial Sequence: Synthetic oligonucleotide
  Sense strand starting at position 1181 of SEQ ID NO: 1242251
gugauauuccuugagaugu

SEQ ID NO: 1333695 - RNA, 19 nt, Artificial Sequence
  Description of Artificial Sequence: Synthetic oligonucleotide
  Antisense strand to SEQ ID NO: 1333694
acaucucaaggaauaucac

SEQ ID NO: 1333696 - RNA, 19 nt, Artificial Sequence
  Description of Artificial Sequence: Synthetic oligonucleotide
  Sense strand starting at position 1189 of SEQ ID NO: 1242251
ccuugagauguccgugaug

SEQ ID NO: 1333697 - RNA, 19 nt, Artificial Sequence
  Description of Artificial Sequence: Synthetic oligonucleotide
  Antisense strand to SEQ ID NO: 1333696
caucacggacaucucaagg

SEQ ID NO: 1333698 - RNA, 19 nt, Artificial Sequence
  Description of Artificial Sequence: Synthetic oligonucleotide
  Sense strand starting at position 1191 of SEQ ID NO: 1242251
uugagauguccgugauguu

SEQ ID NO: 1333699 - RNA, 19 nt, Artificial Sequence
  Description of Artificial Sequence: Synthetic oligonucleotide
  Antisense strand to SEQ ID NO: 1333698
aacaucacggacaucucaa

SEQ ID NO: 1333700 - RNA, 19 nt, Artificial Sequence
  Description of Artificial Sequence: Synthetic oligonucleotide
  Sense strand starting at position 1192 of SEQ ID NO: 1242251
ugagauguccgugauguug

SEQ ID NO: 1333701 - RNA, 19 nt, Artificial Sequence
  Description of Artificial Sequence: Synthetic oligonucleotide
  Antisense strand to SEQ ID NO: 1333700
caacaucacggacaucuca

SEQ ID NO: 1333702 - RNA, 19 nt, Artificial Sequence
  Description of Artificial Sequence: Synthetic oligonucleotide
  Sense strand starting at position 1284 of SEQ ID NO: 1242251
gccggcaauugaucucagu

SEQ ID NO: 1333703 - RNA, 19 nt, Artificial Sequence
  Description of Artificial Sequence: Synthetic oligonucleotide
  Antisense strand to SEQ ID NO: 1333702
acugagaucaauugccggc

SEQ ID NO: 1333704 - RNA, 19 nt, Artificial Sequence
  Description of Artificial Sequence: Synthetic oligonucleotide
  Sense strand starting at position 1295 of SEQ ID NO: 1242251
aucucagucuugcugcaga

SEQ ID NO: 1333705 - RNA, 19 nt, Artificial Sequence
  Description of Artificial Sequence: Synthetic oligonucleotide
  Antisense strand to SEQ ID NO: 1333704
ucugcagcaagacugagau

SEQ ID NO: 1333706 - RNA, 19 nt, Artificial Sequence
  Description of Artificial Sequence: Synthetic oligonucleotide
  Sense strand starting at position 1300 of SEQ ID NO: 1242251
agucuugcugcagacacaa

SEQ ID NO: 1333707 - RNA, 19 nt, Artificial Sequence
  Description of Artificial Sequence: Synthetic oligonucleotide
  Antisense strand to SEQ ID NO: 1333706
uugugucugcagcaagacu

SEQ ID NO: 1333708 - RNA, 19 nt, Artificial Sequence
  Description of Artificial Sequence: Synthetic oligonucleotide
  Sense strand starting at position 1360 of SEQ ID NO: 1242251
gacgcuucccagcaagaaa

SEQ ID NO: 1333709 - RNA, 19 nt, Artificial Sequence
  Description of Artificial Sequence: Synthetic oligonucleotide
  Antisense strand to SEQ ID NO: 1333708
uuucuugcugggaagcguc

SEQ ID NO: 1333710 - RNA, 19 nt, Artificial Sequence
  Description of Artificial Sequence: Synthetic oligonucleotide
  Sense strand starting at position 1423 of SEQ ID NO: 1242251
cuccgaucgcugcuucuaa

SEQ ID NO: 1333711 - RNA, 19 nt, Artificial Sequence
  Description of Artificial Sequence: Synthetic oligonucleotide
  Antisense strand to SEQ ID NO: 1333710
uuagaagcagcgaucggag

SEQ ID NO: 1333712 - RNA, 19 nt, Artificial Sequence
  Description of Artificial Sequence: Synthetic oligonucleotide
  Sense strand starting at position 1553 of SEQ ID NO: 1242251
cuuugaaacgccgagcgau

SEQ ID NO: 1333713 - RNA, 19 nt, Artificial Sequence
  Description of Artificial Sequence: Synthetic oligonucleotide
  Antisense strand to SEQ ID NO: 1333712
aucgcucggcguuucaaag

SEQ ID NO: 1333714 - RNA, 19 nt, Artificial Sequence
  Description of Artificial Sequence: Synthetic oligonucleotide
  Sense strand starting at position 2029 of SEQ ID NO: 1242251
cggguuaucggagcgucuu

SEQ ID NO: 1333715 - RNA, 19 nt, Artificial Sequence
  Description of Artificial Sequence: Synthetic oligonucleotide
  Antisense strand to SEQ ID NO: 1333714
aagacgcuccgauaacccg

SEQ ID NO: 1333716 - RNA, 19 nt, Artificial Sequence
  Description of Artificial Sequence: Synthetic oligonucleotide
  Sense strand starting at position 2662 of SEQ ID NO: 1242251
cgcaguccuuggucugaau

SEQ ID NO: 1333717 - RNA, 19 nt, Artificial Sequence
  Description of Artificial Sequence: Synthetic oligonucleotide
  Antisense strand to SEQ ID NO: 1333716
auucagaccaaggacugcg

SEQ ID NO: 1333718 - RNA, 19 nt, Artificial Sequence
  Description of Artificial Sequence: Synthetic oligonucleotide
  Sense strand starting at position 2664 of SEQ ID NO: 1242251
caguccuuggucugaauga

SEQ ID NO: 1333719 - RNA, 19 nt, Artificial Sequence
  Description of Artificial Sequence: Synthetic oligonucleotide
  Antisense strand to SEQ ID NO: 1333718
ucauucagaccaaggacug

SEQ ID NO: 1333720 - RNA, 19 nt, Artificial Sequence
  Description of Artificial Sequence: Synthetic oligonucleotide
  Sense strand starting at position 2795 of SEQ ID NO: 1242251
uugcauucggccuugagca

SEQ ID NO: 1333721 - RNA, 19 nt, Artificial Sequence
  Description of Artificial Sequence: Synthetic oligonucleotide
  Antisense strand to SEQ ID NO: 1333720
ugcucaaggccgaaugcaa

SEQ ID NO: 1333722 - RNA, 19 nt, Artificial Sequence
  Description of Artificial Sequence: Synthetic oligonucleotide
  Sense strand starting at position 2886 of SEQ ID NO: 1242251
cugugcgugcaagagaaau

SEQ ID NO: 1333723 - RNA, 19 nt, Artificial Sequence
  Description of Artificial Sequence: Synthetic oligonucleotide
  Antisense strand to SEQ ID NO: 1333722
auuucucuugcacgcacag

SEQ ID NO: 1333724 - RNA, 19 nt, Artificial Sequence
  Description of Artificial Sequence: Synthetic oligonucleotide
  Sense strand starting at position 3116 of SEQ ID NO: 1242251
gcagcuuucgacgagagcu

SEQ ID NO: 1333725 - RNA, 19 nt, Artificial Sequence
  Description of Artificial Sequence: Synthetic oligonucleotide
  Antisense strand to SEQ ID NO: 1333724
agcucucgucgaaagcugc

SEQ ID NO: 1333726 - RNA, 19 nt, Artificial Sequence
  Description of Artificial Sequence: Synthetic oligonucleotide
  Sense strand starting at position 3257 of SEQ ID NO: 1242251
gagcauucgcugugggaaa

SEQ ID NO: 1333727 - RNA, 19 nt, Artificial Sequence
  Description of Artificial Sequence: Synthetic oligonucleotide
  Antisense strand to SEQ ID NO: 1333726
uuucccacagcgaaugcuc

SEQ ID NO: 1333728 - RNA, 19 nt, Artificial Sequence
  Description of Artificial Sequence: Synthetic oligonucleotide
  Sense strand starting at position 3412 of SEQ ID NO: 1242251
cauccaguaucugaaagga

SEQ ID NO: 1333729 - RNA, 19 nt, Artificial Sequence
  Description of Artificial Sequence: Synthetic oligonucleotide
  Antisense strand to SEQ ID NO: 1333728
uccuuucagauacuggaug

SEQ ID NO: 1333730 - RNA, 19 nt, Artificial Sequence
  Description of Artificial Sequence: Synthetic oligonucleotide
  Sense strand starting at position 3447 of SEQ ID NO: 1242251
uguggauuccgaugcaggu

SEQ ID NO: 1333731 - RNA, 19 nt, Artificial Sequence
  Description of Artificial Sequence: Synthetic oligonucleotide
  Antisense strand to SEQ ID NO: 1333730
accugcaucggaauccaca

SEQ ID NO: 1333732 - RNA, 19 nt, Artificial Sequence
  Description of Artificial Sequence: Synthetic oligonucleotide
  Sense strand starting at position 3809 of SEQ ID NO: 1242251
uccuuaggccacugggaau

SEQ ID NO: 1333733 - RNA, 19 nt, Artificial Sequence
  Description of Artificial Sequence: Synthetic oligonucleotide
  Antisense strand to SEQ ID NO: 1333732
auucccaguggccuaagga

SEQ ID NO: 1333734 - RNA, 19 nt, Artificial Sequence
  Description of Artificial Sequence: Synthetic oligonucleotide
  Sense strand starting at position 3858 of SEQ ID NO: 1242251
uuggcuuuagaauaucuga

SEQ ID NO: 1333735 - RNA, 19 nt, Artificial Sequence
  Description of Artificial Sequence: Synthetic oligonucleotide
  Antisense strand to SEQ ID NO: 1333734
ucagauauucuaaagccaa

SEQ ID NO: 1333736 - RNA, 19 nt, Artificial Sequence
  Description of Artificial Sequence: Synthetic oligonucleotide
  Sense strand starting at position 3861 of SEQ ID NO: 1242251
gcuuuagaauaucugagag

SEQ ID NO: 1333737 - RNA, 19 nt, Artificial Sequence
  Description of Artificial Sequence: Synthetic oligonucleotide
  Antisense strand to SEQ ID NO: 1333736
cucucagauauucuaaagc

SEQ ID NO: 1333738 - RNA, 19 nt, Artificial Sequence
  Description of Artificial Sequence: Synthetic oligonucleotide
  Sense strand starting at position 3863 of SEQ ID NO: 1242251
uuuagaauaucugagaguc

SEQ ID NO: 1333739 - RNA, 19 nt, Artificial Sequence
  Description of Artificial Sequence: Synthetic oligonucleotide
  Antisense strand to SEQ ID NO: 1333738
gacucucagauauucuaaa

SEQ ID NO: 1333740 - RNA, 19 nt, Artificial Sequence
  Description of Artificial Sequence: Synthetic oligonucleotide
  Sense strand starting at position 3865 of SEQ ID NO: 1242251
uagaauaucugagagucag

SEQ ID NO: 1333741 - RNA, 19 nt, Artificial Sequence
  Description of Artificial Sequence: Synthetic oligonucleotide
  Antisense strand to SEQ ID NO: 1333740
cugacucucagauauucua

SEQ ID NO: 1333742 - RNA, 19 nt, Artificial Sequence
  Description of Artificial Sequence: Synthetic oligonucleotide
  Sense strand starting at position 68 of SEQ ID NO: 1242252
gugccaaguguucagggau

SEQ ID NO: 1333743 - RNA, 19 nt, Artificial Sequence
  Description of Artificial Sequence: Synthetic oligonucleotide
  Antisense strand to SEQ ID NO: 1333742
aucccugaacacuuggcac

SEQ ID NO: 1333744 - RNA, 19 nt, Artificial Sequence
  Description of Artificial Sequence: Synthetic oligonucleotide
  Sense strand starting at position 83 of SEQ ID NO: 1242252
ggaugcagccuuggauaaa

SEQ ID NO: 1333745 - RNA, 19 nt, Artificial Sequence
  Description of Artificial Sequence: Synthetic oligonucleotide
  Antisense strand to SEQ ID NO: 1333744
uuuauccaaggcugcaucc

SEQ ID NO: 1333746 - RNA, 19 nt, Artificial Sequence
  Description of Artificial Sequence: Synthetic oligonucleotide
  Sense strand starting at position 158 of SEQ ID NO: 1242252
uuguuuacgaaguauagag

SEQ ID NO: 1333747 - RNA, 19 nt, Artificial Sequence
  Description of Artificial Sequence: Synthetic oligonucleotide
  Antisense strand to SEQ ID NO: 1333746
cucuauacuucguaaacaa

SEQ ID NO: 1333748 - RNA, 19 nt, Artificial Sequence
  Description of Artificial Sequence: Synthetic oligonucleotide
  Sense strand starting at position 614 of SEQ ID NO: 1242252
gcauuuacucacugucagu

SEQ ID NO: 1333749 - RNA, 19 nt, Artificial Sequence
  Description of Artificial Sequence: Synthetic oligonucleotide
  Antisense strand to SEQ ID NO: 1333748
acugacagugaguaaaugc

SEQ ID NO: 1333750 - RNA, 19 nt, Artificial Sequence
  Description of Artificial Sequence: Synthetic oligonucleotide
  Sense strand starting at position 660 of SEQ ID NO: 1242252
aguauauagcaguauuaug

SEQ ID NO: 1333751 - RNA, 19 nt, Artificial Sequence
  Description of Artificial Sequence: Synthetic oligonucleotide
  Antisense strand to SEQ ID NO: 1333750
cauaauacugcuauauacu

SEQ ID NO: 1333752 - RNA, 19 nt, Artificial Sequence
  Description of Artificial Sequence: Synthetic oligonucleotide
  Sense strand starting at position 667 of SEQ ID NO: 1242252
agcaguauuaugugggaag

SEQ ID NO: 1333753 - RNA, 19 nt, Artificial Sequence
  Description of Artificial Sequence: Synthetic oligonucleotide
  Antisense strand to SEQ ID NO: 1333752
cuucccacauaauacugcu

SEQ ID NO: 1333754 - RNA, 19 nt, Artificial Sequence
  Description of Artificial Sequence: Synthetic oligonucleotide
  Sense strand starting at position 669 of SEQ ID NO: 1242252
caguauuaugugggaaguc

SEQ ID NO: 1333755 - RNA, 19 nt, Artificial Sequence
  Description of Artificial Sequence: Synthetic oligonucleotide
  Antisense strand to SEQ ID NO: 1333754
gacuucccacauaauacug

SEQ ID NO: 1333756 - RNA, 19 nt, Artificial Sequence
  Description of Artificial Sequence: Synthetic oligonucleotide
  Sense strand starting at position 1052 of SEQ ID NO: 1242252
gggccaacucuccaaacau

SEQ ID NO: 1333757 - RNA, 19 nt, Artificial Sequence
  Description of Artificial Sequence: Synthetic oligonucleotide
  Antisense strand to SEQ ID NO: 1333756
auguuuggagaguuggccc

SEQ ID NO: 1333758 - RNA, 19 nt, Artificial Sequence
  Description of Artificial Sequence: Synthetic oligonucleotide
  Sense strand starting at position 1182 of SEQ ID NO: 1242252
uucugacagguccaucaau

SEQ ID NO: 1333759 - RNA, 19 nt, Artificial Sequence
  Description of Artificial Sequence: Synthetic oligonucleotide
  Antisense strand to SEQ ID NO: 1333758
auugauggaccugucagaa

SEQ ID NO: 1333760 - RNA, 19 nt, Artificial Sequence
  Description of Artificial Sequence: Synthetic oligonucleotide
  Sense strand starting at position 1209 of SEQ ID NO: 1242252
aagagauuaucggcaauau

SEQ ID NO: 1333761 - RNA, 19 nt, Artificial Sequence
  Description of Artificial Sequence: Synthetic oligonucleotide
  Antisense strand to SEQ ID NO: 1333760
auauugccgauaaucucuu

SEQ ID NO: 1333762 - RNA, 19 nt, Artificial Sequence
  Description of Artificial Sequence: Synthetic oligonucleotide
  Sense strand starting at position 1210 of SEQ ID NO: 1242252
agagauuaucggcaauauu

SEQ ID NO: 1333763 - RNA, 19 nt, Artificial Sequence
  Description of Artificial Sequence: Synthetic oligonucleotide
  Antisense strand to SEQ ID NO: 1333762
aauauugccgauaaucucu

SEQ ID NO: 1333764 - RNA, 19 nt, Artificial Sequence
  Description of Artificial Sequence: Synthetic oligonucleotide
  Sense strand starting at position 1278 of SEQ ID NO: 1242252
uuacuuaauugucuaacga

SEQ ID NO: 1333765 - RNA, 19 nt, Artificial Sequence
  Description of Artificial Sequence: Synthetic oligonucleotide
  Antisense strand to SEQ ID NO: 1333764
ucguuagacaauuaaguaa

SEQ ID NO: 1333766 - RNA, 19 nt, Artificial Sequence
  Description of Artificial Sequence: Synthetic oligonucleotide
  Sense strand starting at position 1312 of SEQ ID NO: 1242252
gugcuuucugggccugagu

SEQ ID NO: 1333767 - RNA, 19 nt, Artificial Sequence
  Description of Artificial Sequence: Synthetic oligonucleotide
  Antisense strand to SEQ ID NO: 1333766
acucaggcccagaaagcac

SEQ ID NO: 1333768 - RNA, 19 nt, Artificial Sequence
  Description of Artificial Sequence: Synthetic oligonucleotide
  Sense strand starting at position 1404 of SEQ ID NO: 1242252
cggaauagagcuuaucaug

SEQ ID NO: 1333769 - RNA, 19 nt, Artificial Sequence
  Description of Artificial Sequence: Synthetic oligonucleotide
  Antisense strand to SEQ ID NO: 1333768
caugauaagcucuauuccg

SEQ ID NO: 1333770 - RNA, 19 nt, Artificial Sequence
  Description of Artificial Sequence: Synthetic oligonucleotide
  Sense strand starting at position 1469 of SEQ ID NO: 1242252
uccucuuccguuuaucaga

SEQ ID NO: 1333771 - RNA, 19 nt, Artificial Sequence
  Description of Artificial Sequence: Synthetic oligonucleotide
  Antisense strand to SEQ ID NO: 1333770
ucugauaaacggaagagga

SEQ ID NO: 1333772 - RNA, 19 nt, Artificial Sequence
  Description of Artificial Sequence: Synthetic oligonucleotide
  Sense strand starting at position 1485 of SEQ ID NO: 1242252
agaguucuaacugggacua

SEQ ID NO: 1333773 - RNA, 19 nt, Artificial Sequence
  Description of Artificial Sequence: Synthetic oligonucleotide
  Antisense strand to SEQ ID NO: 1333772
uagucccaguuagaacucu

SEQ ID NO: 1333774 - RNA, 19 nt, Artificial Sequence
  Description of Artificial Sequence: Synthetic oligonucleotide
  Sense strand starting at position 2051 of SEQ ID NO: 1242252
caugauguccaaugaggac

SEQ ID NO: 1333775 - RNA, 19 nt, Artificial Sequence
  Description of Artificial Sequence: Synthetic oligonucleotide
  Antisense strand to SEQ ID NO: 1333774
guccucauuggacaucaug

SEQ ID NO: 1333776 - RNA, 19 nt, Artificial Sequence
  Description of Artificial Sequence: Synthetic oligonucleotide
  Sense strand starting at position 2632 of SEQ ID NO: 1242252
ccaggaugagucugucuag

SEQ ID NO: 1333777 - RNA, 19 nt, Artificial Sequence
  Description of Artificial Sequence: Synthetic oligonucleotide
  Antisense strand to SEQ ID NO: 1333776
cuagacagacucauccugg

SEQ ID NO: 1333778 - RNA, 19 nt, Artificial Sequence
  Description of Artificial Sequence: Synthetic oligonucleotide
  Sense strand starting at position 2633 of SEQ ID NO: 1242252
caggaugagucugucuaga

SEQ ID NO: 1333779 - RNA, 19 nt, Artificial Sequence
  Description of Artificial Sequence: Synthetic oligonucleotide
  Antisense strand to SEQ ID NO: 1333778
ucuagacagacucauccug

SEQ ID NO: 1333780 - RNA, 19 nt, Artificial Sequence
  Description of Artificial Sequence: Synthetic oligonucleotide
  Sense strand starting at position 2635 of SEQ ID NO: 1242252
ggaugagucugucuagagg

SEQ ID NO: 1333781 - RNA, 19 nt, Artificial Sequence
  Description of Artificial Sequence: Synthetic oligonucleotide
  Antisense strand to SEQ ID NO: 1333780
ccucuagacagacucaucc

SEQ ID NO: 1333782 - RNA, 19 nt, Artificial Sequence
  Description of Artificial Sequence: Synthetic oligonucleotide
  Sense strand starting at position 2774 of SEQ ID NO: 1242252
aaggcagguacguauugau

SEQ ID NO: 1333783 - RNA, 19 nt, Artificial Sequence
  Description of Artificial Sequence: Synthetic oligonucleotide
  Antisense strand to SEQ ID NO: 1333782
aucaauacguaccugccuu

SEQ ID NO: 1333784 - RNA, 19 nt, Artificial Sequence
  Description of Artificial Sequence: Synthetic oligonucleotide
  Sense strand starting at position 2804 of SEQ ID NO: 1242252
ucucuagucccugacuuua

SEQ ID NO: 1333785 - RNA, 19 nt, Artificial Sequence
  Description of Artificial Sequence: Synthetic oligonucleotide
  Antisense strand to SEQ ID NO: 1333784
uaaagucagggacuagaga

SEQ ID NO: 1333786 - RNA, 19 nt, Artificial Sequence
  Description of Artificial Sequence: Synthetic oligonucleotide
  Sense strand starting at position 2837 of SEQ ID NO: 1242252
guggaacugacauguacga

SEQ ID NO: 1333787 - RNA, 19 nt, Artificial Sequence
  Description of Artificial Sequence: Synthetic oligonucleotide
  Antisense strand to SEQ ID NO: 1333786
ucguacaugucaguuccac

SEQ ID NO: 1333788 - RNA, 19 nt, Artificial Sequence
  Description of Artificial Sequence: Synthetic oligonucleotide
  Sense strand starting at position 2931 of SEQ ID NO: 1242252
guuguauuuguguauuggu

SEQ ID NO: 1333789 - RNA, 19 nt, Artificial Sequence
  Description of Artificial Sequence: Synthetic oligonucleotide
  Antisense strand to SEQ ID NO: 1333788
accaauacacaaauacaac

SEQ ID NO: 1333790 - RNA, 19 nt, Artificial Sequence
  Description of Artificial Sequence: Synthetic oligonucleotide
  Sense strand starting at position 2985 of SEQ ID NO: 1242252
gcuuguacaagugaaguga

SEQ ID NO: 1333791 - RNA, 19 nt, Artificial Sequence
  Description of Artificial Sequence: Synthetic oligonucleotide
  Antisense strand to SEQ ID NO: 1333790
ucacuucacuuguacaagc

SEQ ID NO: 1333792 - RNA, 19 nt, Artificial Sequence
  Description of Artificial Sequence: Synthetic oligonucleotide
  Sense strand starting at position 3004 of SEQ ID NO: 1242252
ggcuaagaaagauguaucu

SEQ ID NO: 1333793 - RNA, 19 nt, Artificial Sequence
  Description of Artificial Sequence: Synthetic oligonucleotide
  Antisense strand to SEQ ID NO: 1333792
agauacaucuuucuuagcc

SEQ ID NO: 1333794 - RNA, 19 nt, Artificial Sequence
  Description of Artificial Sequence: Synthetic oligonucleotide
  Sense strand starting at position 3017 of SEQ ID NO: 1242252
guaucuaguaguggacaaa

SEQ ID NO: 1333795 - RNA, 19 nt, Artificial Sequence
  Description of Artificial Sequence: Synthetic oligonucleotide
  Antisense strand to SEQ ID NO: 1333794
uuuguccacuacuagauac

SEQ ID NO: 1333796 - RNA, 19 nt, Artificial Sequence
  Description of Artificial Sequence: Synthetic oligonucleotide
  Sense strand starting at position 3407 of SEQ ID NO: 1242252
uguuauguacuugaauacu

SEQ ID NO: 1333797 - RNA, 19 nt, Artificial Sequence
  Description of Artificial Sequence: Synthetic oligonucleotide
  Antisense strand to SEQ ID NO: 1333796
aguauucaaguacauaaca

SEQ ID NO: 1333798 - RNA, 19 nt, Artificial Sequence
  Description of Artificial Sequence: Synthetic oligonucleotide
  Sense strand starting at position 3416 of SEQ ID NO: 1242252
cuugaauacugccugguaa

SEQ ID NO: 1333799 - RNA, 19 nt, Artificial Sequence
  Description of Artificial Sequence: Synthetic oligonucleotide
  Antisense strand to SEQ ID NO: 1333798
uuaccaggcaguauucaag

SEQ ID NO: 1333800 - RNA, 19 nt, Artificial Sequence
  Description of Artificial Sequence: Synthetic oligonucleotide
  Sense strand starting at position 3417 of SEQ ID NO: 1242252
uugaauacugccugguaaa

SEQ ID NO: 1333801 - RNA, 19 nt, Artificial Sequence
  Description of Artificial Sequence: Synthetic oligonucleotide
  Antisense strand to SEQ ID NO: 1333800
uuuaccaggcaguauucaa

SEQ ID NO: 1333802 - RNA, 19 nt, Artificial Sequence
  Description of Artificial Sequence: Synthetic oligonucleotide
  Sense strand starting at position 3418 of SEQ ID NO: 1242252
ugaauacugccugguaaac

SEQ ID NO: 1333803 - RNA, 19 nt, Artificial Sequence
  Description of Artificial Sequence: Synthetic oligonucleotide
  Antisense strand to SEQ ID NO: 1333802
guuuaccaggcaguauuca

SEQ ID NO: 1333804 - RNA, 19 nt, Artificial Sequence
  Description of Artificial Sequence: Synthetic oligonucleotide
  Sense strand starting at position 3445 of SEQ ID NO: 1242252
cugccuguacuaugauuua

SEQ ID NO: 1333805 - RNA, 19 nt, Artificial Sequence
  Description of Artificial Sequence: Synthetic oligonucleotide
  Antisense strand to SEQ ID NO: 1333804
uaaaucauaguacaggcag

SEQ ID NO: 1333806 - RNA, 19 nt, Artificial Sequence
  Description of Artificial Sequence: Synthetic oligonucleotide
  Sense strand starting at position 3470 of SEQ ID NO: 1242252
acaauaaaguagucaguga

SEQ ID NO: 1333807 - RNA, 19 nt, Artificial Sequence
  Description of Artificial Sequence: Synthetic oligonucleotide
  Antisense strand to SEQ ID NO: 1333806
ucacugacuacuuuauugu

SEQ ID NO: 1333808 - RNA, 19 nt, Artificial Sequence
  Description of Artificial Sequence: Synthetic oligonucleotide
  Sense strand starting at position 3497 of SEQ ID NO: 1242252
uugcaaggcuccucaauuu

SEQ ID NO: 1333809 - RNA, 19 nt, Artificial Sequence
  Description of Artificial Sequence: Synthetic oligonucleotide
  Antisense strand to SEQ ID NO: 1333808
aaauugaggagccuugcaa

SEQ ID NO: 1333810 - RNA, 19 nt, Artificial Sequence
  Description of Artificial Sequence: Synthetic oligonucleotide
  Sense strand starting at position 3523 of SEQ ID NO: 1242252
uggcuuuaacauugagaca

SEQ ID NO: 1333811 - RNA, 19 nt, Artificial Sequence
  Description of Artificial Sequence: Synthetic oligonucleotide
  Antisense strand to SEQ ID NO: 1333810
ugucucaauguuaaagcca

SEQ ID NO: 1333812 - RNA, 19 nt, Artificial Sequence
  Description of Artificial Sequence: Synthetic oligonucleotide
  Sense strand starting at position 3766 of SEQ ID NO: 1242252
cuuggaauuggguguauuc

SEQ ID NO: 1333813 - RNA, 19 nt, Artificial Sequence
  Description of Artificial Sequence: Synthetic oligonucleotide
  Antisense strand to SEQ ID NO: 1333812
gaauacacccaauuccaag

SEQ ID NO: 1333814 - RNA, 19 nt, Artificial Sequence
  Description of Artificial Sequence: Synthetic oligonucleotide
  Sense strand starting at position 3795 of SEQ ID NO: 1242252
ggcagaagguuccugaaug

SEQ ID NO: 1333815 - RNA, 19 nt, Artificial Sequence
  Description of Artificial Sequence: Synthetic oligonucleotide
  Antisense strand to SEQ ID NO: 1333814
cauucaggaaccuucugcc

SEQ ID NO: 1333816 - RNA, 19 nt, Artificial Sequence
  Description of Artificial Sequence: Synthetic oligonucleotide
  Sense strand starting at position 3862 of SEQ ID NO: 1242252
uguaaucacuagucauaug

SEQ ID NO: 1333817 - RNA, 19 nt, Artificial Sequence
  Description of Artificial Sequence: Synthetic oligonucleotide
  Antisense strand to SEQ ID NO: 1333816
cauaugacuagugauuaca

SEQ ID NO: 1333818 - RNA, 19 nt, Artificial Sequence
  Description of Artificial Sequence: Synthetic oligonucleotide
  Sense strand starting at position 3897 of SEQ ID NO: 1242252
uuaaaucugcauugagaua

SEQ ID NO: 1333819 - RNA, 19 nt, Artificial Sequence
  Description of Artificial Sequence: Synthetic oligonucleotide
  Antisense strand to SEQ ID NO: 1333818
uaucucaaugcagauuuaa

SEQ ID NO: 1333820 - RNA, 19 nt, Artificial Sequence
  Description of Artificial Sequence: Synthetic oligonucleotide
  Sense strand starting at position 3909 of SEQ ID NO: 1242252
ugagauaugcugugaacac

SEQ ID NO: 1333821 - RNA, 19 nt, Artificial Sequence
  Description of Artificial Sequence: Synthetic oligonucleotide
  Antisense strand to SEQ ID NO: 1333820
guguucacagcauaucuca

SEQ ID NO: 1333822 - RNA, 19 nt, Artificial Sequence
  Description of Artificial Sequence: Synthetic oligonucleotide
  Sense strand starting at position 79 of SEQ ID NO: 1242253
aagguuccuggcgacuauu

SEQ ID NO: 1333823 - RNA, 19 nt, Artificial Sequence
  Description of Artificial Sequence: Synthetic oligonucleotide
  Antisense strand to SEQ ID NO: 1333822
aauagucgccaggaaccuu

SEQ ID NO: 1333824 - RNA, 19 nt, Artificial Sequence
  Description of Artificial Sequence: Synthetic oligonucleotide
  Sense strand starting at position 719 of SEQ ID NO: 1242253
ccaguaucaucuguuucuu

SEQ ID NO: 1333825 - RNA, 19 nt, Artificial Sequence
  Description of Artificial Sequence: Synthetic oligonucleotide
  Antisense strand to SEQ ID NO: 1333824
aagaaacagaugauacugg

SEQ ID NO: 1333826 - RNA, 19 nt, Artificial Sequence
  Description of Artificial Sequence: Synthetic oligonucleotide
  Sense strand starting at position 724 of SEQ ID NO: 1242253
aucaucuguuucuugugaa

SEQ ID NO: 1333827 - RNA, 19 nt, Artificial Sequence
  Description of Artificial Sequence: Synthetic oligonucleotide
  Antisense strand to SEQ ID NO: 1333826
uucacaagaaacagaugau

SEQ ID NO: 1333828 - RNA, 19 nt, Artificial Sequence
  Description of Artificial Sequence: Synthetic oligonucleotide
  Sense strand starting at position 734 of SEQ ID NO: 1242253
ucuugugaauacuugcaga

SEQ ID NO: 1333829 - RNA, 19 nt, Artificial Sequence
  Description of Artificial Sequence: Synthetic oligonucleotide
  Antisense strand to SEQ ID NO: 1333828
ucugcaaguauucacaaga

SEQ ID NO: 1333830 - RNA, 19 nt, Artificial Sequence
  Description of Artificial Sequence: Synthetic oligonucleotide
  Sense strand starting at position 1455 of SEQ ID NO: 1242253
auuguaaauaauggcguaa

SEQ ID NO: 1333831 - RNA, 19 nt, Artificial Sequence
  Description of Artificial Sequence: Synthetic oligonucleotide
  Antisense strand to SEQ ID NO: 1333830
uuacgccauuauuuacaau

SEQ ID NO: 1333832 - RNA, 19 nt, Artificial Sequence
  Description of Artificial Sequence: Synthetic oligonucleotide
  Sense strand starting at position 1459 of SEQ ID NO: 1242253
uaaauaauggcguaacgau

SEQ ID NO: 1333833 - RNA, 19 nt, Artificial Sequence
  Description of Artificial Sequence: Synthetic oligonucleotide
  Antisense strand to SEQ ID NO: 1333832
aucguuacgccauuauuua

SEQ ID NO: 1333834 - RNA, 19 nt, Artificial Sequence
  Description of Artificial Sequence: Synthetic oligonucleotide
  Sense strand starting at position 1466 of SEQ ID NO: 1242253
uggcguaacgaugaucuuu

SEQ ID NO: 1333835 - RNA, 19 nt, Artificial Sequence
  Description of Artificial Sequence: Synthetic oligonucleotide
  Antisense strand to SEQ ID NO: 1333834
aaagaucaucguuacgcca

SEQ ID NO: 1333836 - RNA, 19 nt, Artificial Sequence
  Description of Artificial Sequence: Synthetic oligonucleotide
  Sense strand starting at position 1471 of SEQ ID NO: 1242253
uaacgaugaucuuuguaau

SEQ ID NO: 1333837 - RNA, 19 nt, Artificial Sequence
  Description of Artificial Sequence: Synthetic oligonucleotide
  Antisense strand to SEQ ID NO: 1333836
auuacaaagaucaucguua

SEQ ID NO: 1333838 - RNA, 19 nt, Artificial Sequence
  Description of Artificial Sequence: Synthetic oligonucleotide
  Sense strand starting at position 1472 of SEQ ID NO: 1242253
aacgaugaucuuuguaaug

SEQ ID NO: 1333839 - RNA, 19 nt, Artificial Sequence
  Description of Artificial Sequence: Synthetic oligonucleotide
  Antisense strand to SEQ ID NO: 1333838
cauuacaaagaucaucguu

SEQ ID NO: 1333840 - RNA, 19 nt, Artificial Sequence
  Description of Artificial Sequence: Synthetic oligonucleotide
  Sense strand starting at position 1513 of SEQ ID NO: 1242253
uucuuuaaacgagagucuu

SEQ ID NO: 1333841 - RNA, 19 nt, Artificial Sequence
  Description of Artificial Sequence: Synthetic oligonucleotide
  Antisense strand to SEQ ID NO: 1333840
aagacucucguuuaaagaa

SEQ ID NO: 1333842 - RNA, 19 nt, Artificial Sequence
  Description of Artificial Sequence: Synthetic oligonucleotide
  Sense strand starting at position 1583 of SEQ ID NO: 1242253
gcacuuuauuacguuauua

SEQ ID NO: 1333843 - RNA, 19 nt, Artificial Sequence
  Description of Artificial Sequence: Synthetic oligonucleotide
  Antisense strand to SEQ ID NO: 1333842
uaauaacguaauaaagugc

SEQ ID NO: 1333844 - RNA, 19 nt, Artificial Sequence
  Description of Artificial Sequence: Synthetic oligonucleotide
  Sense strand starting at position 1594 of SEQ ID NO: 1242253
cguuauuauuagcuacuca

SEQ ID NO: 1333845 - RNA, 19 nt, Artificial Sequence
  Description of Artificial Sequence: Synthetic oligonucleotide
  Antisense strand to SEQ ID NO: 1333844
ugaguagcuaauaauaacg

SEQ ID NO: 1333846 - RNA, 19 nt, Artificial Sequence
  Description of Artificial Sequence: Synthetic oligonucleotide
  Sense strand starting at position 2134 of SEQ ID NO: 1242253
gagacuuccgguuaugcag

SEQ ID NO: 1333847 - RNA, 19 nt, Artificial Sequence
  Description of Artificial Sequence: Synthetic oligonucleotide
  Antisense strand to SEQ ID NO: 1333846
cugcauaaccggaagucuc

SEQ ID NO: 1333848 - RNA, 19 nt, Artificial Sequence
  Description of Artificial Sequence: Synthetic oligonucleotide
  Sense strand starting at position 2140 of SEQ ID NO: 1242253
uccgguuaugcaggaagga

SEQ ID NO: 1333849 - RNA, 19 nt, Artificial Sequence
  Description of Artificial Sequence: Synthetic oligonucleotide
  Antisense strand to SEQ ID NO: 1333848
uccuuccugcauaaccgga

SEQ ID NO: 1333850 - RNA, 19 nt, Artificial Sequence
  Description of Artificial Sequence: Synthetic oligonucleotide
  Sense strand starting at position 2141 of SEQ ID NO: 1242253
ccgguuaugcaggaaggaa

SEQ ID NO: 1333851 - RNA, 19 nt, Artificial Sequence
  Description of Artificial Sequence: Synthetic oligonucleotide
  Antisense strand to SEQ ID NO: 1333850
uuccuuccugcauaaccgg

SEQ ID NO: 1333852 - RNA, 19 nt, Artificial Sequence
  Description of Artificial Sequence: Synthetic oligonucleotide
  Sense strand starting at position 2226 of SEQ ID NO: 1242253
cuggcuuauaagcgaucau

SEQ ID NO: 1333853 - RNA, 19 nt, Artificial Sequence
  Description of Artificial Sequence: Synthetic oligonucleotide
  Antisense strand to SEQ ID NO: 1333852
augaucgcuuauaagccag

SEQ ID NO: 1333854 - RNA, 19 nt, Artificial Sequence
  Description of Artificial Sequence: Synthetic oligonucleotide
  Sense strand starting at position 2227 of SEQ ID NO: 1242253
uggcuuauaagcgaucaug

SEQ ID NO: 1333855 - RNA, 19 nt, Artificial Sequence
  Description of Artificial Sequence: Synthetic oligonucleotide
  Antisense strand to SEQ ID NO: 1333854
caugaucgcuuauaagcca

SEQ ID NO: 1333856 - RNA, 19 nt, Artificial Sequence
  Description of Artificial Sequence: Synthetic oligonucleotide
  Sense strand starting at position 2230 of SEQ ID NO: 1242253
cuuauaagcgaucauguuu

SEQ ID NO: 1333857 - RNA, 19 nt, Artificial Sequence
  Description of Artificial Sequence: Synthetic oligonucleotide
  Antisense strand to SEQ ID NO: 1333856
aaacaugaucgcuuauaag

SEQ ID NO: 1333858 - RNA, 19 nt, Artificial Sequence
  Description of Artificial Sequence: Synthetic oligonucleotide
  Sense strand starting at position 2235 of SEQ ID NO: 1242253
aagcgaucauguuucucca

SEQ ID NO: 1333859 - RNA, 19 nt, Artificial Sequence
  Description of Artificial Sequence: Synthetic oligonucleotide
  Antisense strand to SEQ ID NO: 1333858
uggagaaacaugaucgcuu

SEQ ID NO: 1333860 - RNA, 19 nt, Artificial Sequence
  Description of Artificial Sequence: Synthetic oligonucleotide
  Sense strand starting at position 2251 of SEQ ID NO: 1242253
ccaguauuaccucaacgag

SEQ ID NO: 1333861 - RNA, 19 nt, Artificial Sequence
  Description of Artificial Sequence: Synthetic oligonucleotide
  Antisense strand to SEQ ID NO: 1333860
cucguugagguaauacugg

SEQ ID NO: 1333862 - RNA, 19 nt, Artificial Sequence
  Description of Artificial Sequence: Synthetic oligonucleotide
  Sense strand starting at position 2280 of SEQ ID NO: 1242253
gagucuauacgcugaaggu

SEQ ID NO: 1333863 - RNA, 19 nt, Artificial Sequence
  Description of Artificial Sequence: Synthetic oligonucleotide
  Antisense strand to SEQ ID NO: 1333862
accuucagcguauagacuc

SEQ ID NO: 1333864 - RNA, 19 nt, Artificial Sequence
  Description of Artificial Sequence: Synthetic oligonucleotide
  Sense strand starting at position 2322 of SEQ ID NO: 1242253
uaggcauggcgagaaaugu

SEQ ID NO: 1333865 - RNA, 19 nt, Artificial Sequence
  Description of Artificial Sequence: Synthetic oligonucleotide
  Antisense strand to SEQ ID NO: 1333864
acauuucucgccaugccua

SEQ ID NO: 1333866 - RNA, 19 nt, Artificial Sequence
  Description of Artificial Sequence: Synthetic oligonucleotide
  Sense strand starting at position 2358 of SEQ ID NO: 1242253
gaggucauacguggaguua

SEQ ID NO: 1333867 - RNA, 19 nt, Artificial Sequence
  Description of Artificial Sequence: Synthetic oligonucleotide
  Antisense strand to SEQ ID NO: 1333866
uaacuccacguaugaccuc

SEQ ID NO: 1333868 - RNA, 19 nt, Artificial Sequence
  Description of Artificial Sequence: Synthetic oligonucleotide
  Sense strand starting at position 2540 of SEQ ID NO: 1242253
ucaggaguucgcgaccauu

SEQ ID NO: 1333869 - RNA, 19 nt, Artificial Sequence
  Description of Artificial Sequence: Synthetic oligonucleotide
  Antisense strand to SEQ ID NO: 1333868
aauggucgcgaacuccuga

SEQ ID NO: 1333870 - RNA, 19 nt, Artificial Sequence
  Description of Artificial Sequence: Synthetic oligonucleotide
  Sense strand starting at position 2707 of SEQ ID NO: 1242253
gcgccauugcacucacuuu

SEQ ID NO: 1333871 - RNA, 19 nt, Artificial Sequence
  Description of Artificial Sequence: Synthetic oligonucleotide
  Antisense strand to SEQ ID NO: 1333870
aaagugagugcaauggcgc

SEQ ID NO: 1333872 - RNA, 19 nt, Artificial Sequence
  Description of Artificial Sequence: Synthetic oligonucleotide
  Sense strand starting at position 2947 of SEQ ID NO: 1242253
uuguuuguuguagagacga

SEQ ID NO: 1333873 - RNA, 19 nt, Artificial Sequence
  Description of Artificial Sequence: Synthetic oligonucleotide
  Antisense strand to SEQ ID NO: 1333872
ucgucucuacaacaaacaa

SEQ ID NO: 1333874 - RNA, 19 nt, Artificial Sequence
  Description of Artificial Sequence: Synthetic oligonucleotide
  Sense strand starting at position 3102 of SEQ ID NO: 1242253
ugaguugaccauugcaucu

SEQ ID NO: 1333875 - RNA, 19 nt, Artificial Sequence
  Description of Artificial Sequence: Synthetic oligonucleotide
  Antisense strand to SEQ ID NO: 1333874
agaugcaauggucaacuca

SEQ ID NO: 1333876 - RNA, 19 nt, Artificial Sequence
  Description of Artificial Sequence: Synthetic oligonucleotide
  Sense strand starting at position 3477 of SEQ ID NO: 1242253
gauugauuaugcuugugug

SEQ ID NO: 1333877 - RNA, 19 nt, Artificial Sequence
  Description of Artificial Sequence: Synthetic oligonucleotide
  Antisense strand to SEQ ID NO: 1333876
cacacaagcauaaucaauc

SEQ ID NO: 1333878 - RNA, 19 nt, Artificial Sequence
  Description of Artificial Sequence: Synthetic oligonucleotide
  Sense strand starting at position 3478 of SEQ ID NO: 1242253
auugauuaugcuuguguga

SEQ ID NO: 1333879 - RNA, 19 nt, Artificial Sequence
  Description of Artificial Sequence: Synthetic oligonucleotide
  Antisense strand to SEQ ID NO: 1333878
ucacacaagcauaaucaau

SEQ ID NO: 1333880 - RNA, 19 nt, Artificial Sequence
  Description of Artificial Sequence: Synthetic oligonucleotide
  Sense strand starting at position 3606 of SEQ ID NO: 1242253
uugugaguuguuggaggaa

SEQ ID NO: 1333881 - RNA, 19 nt, Artificial Sequence
  Description of Artificial Sequence: Synthetic oligonucleotide
  Antisense strand to SEQ ID NO: 1333880
uuccuccaacaacucacaa

SEQ ID NO: 1333882 - RNA, 19 nt, Artificial Sequence
  Description of Artificial Sequence: Synthetic oligonucleotide
  Sense strand starting at position 3608 of SEQ ID NO: 1242253
gugaguuguuggaggaaag

SEQ ID NO: 1333883 - RNA, 19 nt, Artificial Sequence
  Description of Artificial Sequence: Synthetic oligonucleotide
  Antisense strand to SEQ ID NO: 1333882
cuuuccuccaacaacucac

SEQ ID NO: 1333884 - RNA, 19 nt, Artificial Sequence
  Description of Artificial Sequence: Synthetic oligonucleotide
  Sense strand starting at position 3619 of SEQ ID NO: 1242253
gaggaaaggauuggcagua

SEQ ID NO: 1333885 - RNA, 19 nt, Artificial Sequence
  Description of Artificial Sequence: Synthetic oligonucleotide
  Antisense strand to SEQ ID NO: 1333884
uacugccaauccuuuccuc

SEQ ID NO: 1333886 - RNA, 19 nt, Artificial Sequence
  Description of Artificial Sequence: Synthetic oligonucleotide
  Sense strand starting at position 3739 of SEQ ID NO: 1242253
ugugcuguucaugauagga

SEQ ID NO: 1333887 - RNA, 19 nt, Artificial Sequence
  Description of Artificial Sequence: Synthetic oligonucleotide
  Antisense strand to SEQ ID NO: 1333886
uccuaucaugaacagcaca

SEQ ID NO: 1333888 - RNA, 19 nt, Artificial Sequence
  Description of Artificial Sequence: Synthetic oligonucleotide
  Sense strand starting at position 3812 of SEQ ID NO: 1242253
auaccucuguugucacuua

SEQ ID NO: 1333889 - RNA, 19 nt, Artificial Sequence
  Description of Artificial Sequence: Synthetic oligonucleotide
  Antisense strand to SEQ ID NO: 1333888
uaagugacaacagagguau

SEQ ID NO: 1333890 - RNA, 19 nt, Artificial Sequence
  Description of Artificial Sequence: Synthetic oligonucleotide
  Sense strand starting at position 3817 of SEQ ID NO: 1242253
ucuguugucacuuaacgua

SEQ ID NO: 1333891 - RNA, 19 nt, Artificial Sequence
  Description of Artificial Sequence: Synthetic oligonucleotide
  Antisense strand to SEQ ID NO: 1333890
uacguuaagugacaacaga

SEQ ID NO: 1333892 - RNA, 19 nt, Artificial Sequence
  Description of Artificial Sequence: Synthetic oligonucleotide
  Sense strand starting at position 3833 of SEQ ID NO: 1242253
guaauuucuugucccuuga

SEQ ID NO: 1333893 - RNA, 19 nt, Artificial Sequence
  Description of Artificial Sequence: Synthetic oligonucleotide
  Antisense strand to SEQ ID NO: 1333892
ucaagggacaagaaauuac

SEQ ID NO: 1333894 - RNA, 19 nt, Artificial Sequence
  Description of Artificial Sequence: Synthetic oligonucleotide
  Sense strand starting at position 3871 of SEQ ID NO: 1242253
auggaagaguacuuguaaa

SEQ ID NO: 1333895 - RNA, 19 nt, Artificial Sequence
  Description of Artificial Sequence: Synthetic oligonucleotide
  Antisense strand to SEQ ID NO: 1333894
uuuacaaguacucuuccau

SEQ ID NO: 1333896 - RNA, 19 nt, Artificial Sequence
  Description of Artificial Sequence: Synthetic oligonucleotide
  Sense strand starting at position 3908 of SEQ ID NO: 1242253
gacagaggucagugaauug

SEQ ID NO: 1333897 - RNA, 19 nt, Artificial Sequence
  Description of Artificial Sequence: Synthetic oligonucleotide
  Antisense strand to SEQ ID NO: 1333896
caauucacugaccucuguc

SEQ ID NO: 1333898 - RNA, 19 nt, Artificial Sequence
  Description of Artificial Sequence: Synthetic oligonucleotide
  Sense strand starting at position 3913 of SEQ ID NO: 1242253
aggucagugaauugaaagu

SEQ ID NO: 1333899 - RNA, 19 nt, Artificial Sequence
  Description of Artificial Sequence: Synthetic oligonucleotide
  Antisense strand to SEQ ID NO: 1333898
acuuucaauucacugaccu

SEQ ID NO: 1333900 - RNA, 19 nt, Artificial Sequence
  Description of Artificial Sequence: Synthetic oligonucleotide
  Sense strand starting at position 3953 of SEQ ID NO: 1242253
uuguauaacuuugagaaag

SEQ ID NO: 1333901 - RNA, 19 nt, Artificial Sequence
  Description of Artificial Sequence: Synthetic oligonucleotide
  Antisense strand to SEQ ID NO: 1333900
cuuucucaaaguuauacaa

SEQ ID NO: 1333902 - RNA, 19 nt, Artificial Sequence
  Description of Artificial Sequence: Synthetic oligonucleotide
  Sense strand starting at position 22 of SEQ ID NO: 1242254
gagaccaaucuuugaaggu

SEQ ID NO: 1333903 - RNA, 19 nt, Artificial Sequence
  Description of Artificial Sequence: Synthetic oligonucleotide
  Antisense strand to SEQ ID NO: 1333902
accuucaaagauuggucuc

SEQ ID NO: 1333904 - RNA, 19 nt, Artificial Sequence
  Description of Artificial Sequence: Synthetic oligonucleotide
  Sense strand starting at position 66 of SEQ ID NO: 1242254
augugaagccaggguaaga

SEQ ID NO: 1333905 - RNA, 19 nt, Artificial Sequence
  Description of Artificial Sequence: Synthetic oligonucleotide
  Antisense strand to SEQ ID NO: 1333904
ucuuacccuggcuucacau

SEQ ID NO: 1333906 - RNA, 19 nt, Artificial Sequence
  Description of Artificial Sequence: Synthetic oligonucleotide
  Sense strand starting at position 220 of SEQ ID NO: 1242254
guuagagggcucuaugcaa

SEQ ID NO: 1333907 - RNA, 19 nt, Artificial Sequence
  Description of Artificial Sequence: Synthetic oligonucleotide
  Antisense strand to SEQ ID NO: 1333906
uugcauagagcccucuaac

SEQ ID NO: 1333908 - RNA, 19 nt, Artificial Sequence
  Description of Artificial Sequence: Synthetic oligonucleotide
  Sense strand starting at position 626 of SEQ ID NO: 1242254
ugagaaggguugucuugga

SEQ ID NO: 1333909 - RNA, 19 nt, Artificial Sequence
  Description of Artificial Sequence: Synthetic oligonucleotide
  Antisense strand to SEQ ID NO: 1333908
uccaagacaacccuucuca

SEQ ID NO: 1333910 - RNA, 19 nt, Artificial Sequence
  Description of Artificial Sequence: Synthetic oligonucleotide
  Sense strand starting at position 630 of SEQ ID NO: 1242254
aaggguugucuuggagaaa

SEQ ID NO: 1333911 - RNA, 19 nt, Artificial Sequence
  Description of Artificial Sequence: Synthetic oligonucleotide
  Antisense strand to SEQ ID NO: 1333910
uuucuccaagacaacccuu

SEQ ID NO: 1333912 - RNA, 19 nt, Artificial Sequence
  Description of Artificial Sequence: Synthetic oligonucleotide
  Sense strand starting at position 695 of SEQ ID NO: 1242254
aaggauauaccaugcaagu

SEQ ID NO: 1333913 - RNA, 19 nt, Artificial Sequence
  Description of Artificial Sequence: Synthetic oligonucleotide
  Antisense strand to SEQ ID NO: 1333912
acuugcaugguauauccuu

SEQ ID NO: 1333914 - RNA, 19 nt, Artificial Sequence
  Description of Artificial Sequence: Synthetic oligonucleotide
  Sense strand starting at position 809 of SEQ ID NO: 1242254
aagaucuaguguccagaau

SEQ ID NO: 1333915 - RNA, 19 nt, Artificial Sequence
  Description of Artificial Sequence: Synthetic oligonucleotide
  Antisense strand to SEQ ID NO: 1333914
auucuggacacuagaucuu

SEQ ID NO: 1333916 - RNA, 19 nt, Artificial Sequence
  Description of Artificial Sequence: Synthetic oligonucleotide
  Sense strand starting at position 825 of SEQ ID NO: 1242254
aauauagagcuugguuuga

SEQ ID NO: 1333917 - RNA, 19 nt, Artificial Sequence
  Description of Artificial Sequence: Synthetic oligonucleotide
  Antisense strand to SEQ ID NO: 1333916
ucaaaccaagcucuauauu

SEQ ID NO: 1333918 - RNA, 19 nt, Artificial Sequence
  Description of Artificial Sequence: Synthetic oligonucleotide
  Sense strand starting at position 827 of SEQ ID NO: 1242254
uauagagcuugguuugaag

SEQ ID NO: 1333919 - RNA, 19 nt, Artificial Sequence
  Description of Artificial Sequence: Synthetic oligonucleotide
  Antisense strand to SEQ ID NO: 1333918
cuucaaaccaagcucuaua

SEQ ID NO: 1333920 - RNA, 19 nt, Artificial Sequence
  Description of Artificial Sequence: Synthetic oligonucleotide
  Sense strand starting at position 864 of SEQ ID NO: 1242254
gaagguucacuggaagcga

SEQ ID NO: 1333921 - RNA, 19 nt, Artificial Sequence
  Description of Artificial Sequence: Synthetic oligonucleotide
  Antisense strand to SEQ ID NO: 1333920
ucgcuuccagugaaccuuc

SEQ ID NO: 1333922 - RNA, 19 nt, Artificial Sequence
  Description of Artificial Sequence: Synthetic oligonucleotide
  Sense strand starting at position 891 of SEQ ID NO: 1242254
gguccugugaucuaaugau

SEQ ID NO: 1333923 - RNA, 19 nt, Artificial Sequence
  Description of Artificial Sequence: Synthetic oligonucleotide
  Antisense strand to SEQ ID NO: 1333922
aucauuagaucacaggacc

SEQ ID NO: 1333924 - RNA, 19 nt, Artificial Sequence
  Description of Artificial Sequence: Synthetic oligonucleotide
  Sense strand starting at position 897 of SEQ ID NO: 1242254
gugaucuaaugauccaaag

SEQ ID NO: 1333925 - RNA, 19 nt, Artificial Sequence
  Description of Artificial Sequence: Synthetic oligonucleotide
  Antisense strand to SEQ ID NO: 1333924
cuuuggaucauuagaucac

SEQ ID NO: 1333926 - RNA, 19 nt, Artificial Sequence
  Description of Artificial Sequence: Synthetic oligonucleotide
  Sense strand starting at position 947 of SEQ ID NO: 1242254
augaguuccagcugagaaa

SEQ ID NO: 1333927 - RNA, 19 nt, Artificial Sequence
  Description of Artificial Sequence: Synthetic oligonucleotide
  Antisense strand to SEQ ID NO: 1333926
uuucucagcuggaacucau

SEQ ID NO: 1333928 - RNA, 19 nt, Artificial Sequence
  Description of Artificial Sequence: Synthetic oligonucleotide
  Sense strand starting at position 966 of SEQ ID NO: 1242254
agauguuuagaggguaaga

SEQ ID NO: 1333929 - RNA, 19 nt, Artificial Sequence
  Description of Artificial Sequence: Synthetic oligonucleotide
  Antisense strand to SEQ ID NO: 1333928
ucuuacccucuaaacaucu

SEQ ID NO: 1333930 - RNA, 19 nt, Artificial Sequence
  Description of Artificial Sequence: Synthetic oligonucleotide
  Sense strand starting at position 977 of SEQ ID NO: 1242254
ggguaagaauguuuccaag

SEQ ID NO: 1333931 - RNA, 19 nt, Artificial Sequence
  Description of Artificial Sequence: Synthetic oligonucleotide
  Antisense strand to SEQ ID NO: 1333930
cuuggaaacauucuuaccc

SEQ ID NO: 1333932 - RNA, 19 nt, Artificial Sequence
  Description of Artificial Sequence: Synthetic oligonucleotide
  Sense strand starting at position 979 of SEQ ID NO: 1242254
guaagaauguuuccaagag

SEQ ID NO: 1333933 - RNA, 19 nt, Artificial Sequence
  Description of Artificial Sequence: Synthetic oligonucleotide
  Antisense strand to SEQ ID NO: 1333932
cucuuggaaacauucuuac

SEQ ID NO: 1333934 - RNA, 19 nt, Artificial Sequence
  Description of Artificial Sequence: Synthetic oligonucleotide
  Sense strand starting at position 983 of SEQ ID NO: 1242254
gaauguuuccaagaguguu

SEQ ID NO: 1333935 - RNA, 19 nt, Artificial Sequence
  Description of Artificial Sequence: Synthetic oligonucleotide
  Antisense strand to SEQ ID NO: 1333934
aacacucuuggaaacauuc

SEQ ID NO: 1333936 - RNA, 19 nt, Artificial Sequence
  Description of Artificial Sequence: Synthetic oligonucleotide
  Sense strand starting at position 1042 of SEQ ID NO: 1242254
caaaccugguguuugauaa

SEQ ID NO: 1333937 - RNA, 19 nt, Artificial Sequence
  Description of Artificial Sequence: Synthetic oligonucleotide
  Antisense strand to SEQ ID NO: 1333936
uuaucaaacaccagguuug

SEQ ID NO: 1333938 - RNA, 19 nt, Artificial Sequence
  Description of Artificial Sequence: Synthetic oligonucleotide
  Sense strand starting at position 1043 of SEQ ID NO: 1242254
aaaccugguguuugauaaa

SEQ ID NO: 1333939 - RNA, 19 nt, Artificial Sequence
  Description of Artificial Sequence: Synthetic oligonucleotide
  Antisense strand to SEQ ID NO: 1333938
uuuaucaaacaccagguuu

SEQ ID NO: 1333940 - RNA, 19 nt, Artificial Sequence
  Description of Artificial Sequence: Synthetic oligonucleotide
  Sense strand starting at position 1174 of SEQ ID NO: 1242254
cuggacaucuguguaagga

SEQ ID NO: 1333941 - RNA, 19 nt, Artificial Sequence
  Description of Artificial Sequence: Synthetic oligonucleotide
  Antisense strand to SEQ ID NO: 1333940
uccuuacacagauguccag

SEQ ID NO: 1333942 - RNA, 19 nt, Artificial Sequence
  Description of Artificial Sequence: Synthetic oligonucleotide
  Sense strand starting at position 1192 of SEQ ID NO: 1242254
acugcuaggccugaagaga

SEQ ID NO: 1333943 - RNA, 19 nt, Artificial Sequence
  Description of Artificial Sequence: Synthetic oligonucleotide
  Antisense strand to SEQ ID NO: 1333942
ucucuucaggccuagcagu

SEQ ID NO: 1333944 - RNA, 19 nt, Artificial Sequence
  Description of Artificial Sequence: Synthetic oligonucleotide
  Sense strand starting at position 1857 of SEQ ID NO: 1242254
cgaucucugcgggcuaagu

SEQ ID NO: 1333945 - RNA, 19 nt, Artificial Sequence
  Description of Artificial Sequence: Synthetic oligonucleotide
  Antisense strand to SEQ ID NO: 1333944
acuuagcccgcagagaucg

SEQ ID NO: 1333946 - RNA, 19 nt, Artificial Sequence
  Description of Artificial Sequence: Synthetic oligonucleotide
  Sense strand starting at position 2223 of SEQ ID NO: 1242254
uucugugaggauugacuca

SEQ ID NO: 1333947 - RNA, 19 nt, Artificial Sequence
  Description of Artificial Sequence: Synthetic oligonucleotide
  Antisense strand to SEQ ID NO: 1333946
ugagucaauccucacagaa

SEQ ID NO: 1333948 - RNA, 19 nt, Artificial Sequence
  Description of Artificial Sequence: Synthetic oligonucleotide
  Sense strand starting at position 2387 of SEQ ID NO: 1242254
guuaucucagcucauaaug

SEQ ID NO: 1333949 - RNA, 19 nt, Artificial Sequence
  Description of Artificial Sequence: Synthetic oligonucleotide
  Antisense strand to SEQ ID NO: 1333948
cauuaugagcugagauaac

SEQ ID NO: 1333950 - RNA, 19 nt, Artificial Sequence
  Description of Artificial Sequence: Synthetic oligonucleotide
  Sense strand starting at position 2396 of SEQ ID NO: 1242254
gcucauaaugcagaucaau

SEQ ID NO: 1333951 - RNA, 19 nt, Artificial Sequence
  Description of Artificial Sequence: Synthetic oligonucleotide
  Antisense strand to SEQ ID NO: 1333950
auugaucugcauuaugagc

SEQ ID NO: 1333952 - RNA, 19 nt, Artificial Sequence
  Description of Artificial Sequence: Synthetic oligonucleotide
  Sense strand starting at position 2511 of SEQ ID NO: 1242254
aagccagaacucuguagau

SEQ ID NO: 1333953 - RNA, 19 nt, Artificial Sequence
  Description of Artificial Sequence: Synthetic oligonucleotide
  Antisense strand to SEQ ID NO: 1333952
aucuacagaguucuggcuu

SEQ ID NO: 1333954 - RNA, 19 nt, Artificial Sequence
  Description of Artificial Sequence: Synthetic oligonucleotide
  Sense strand starting at position 2513 of SEQ ID NO: 1242254
gccagaacucuguagauca

SEQ ID NO: 1333955 - RNA, 19 nt, Artificial Sequence
  Description of Artificial Sequence: Synthetic oligonucleotide
  Antisense strand to SEQ ID NO: 1333954
ugaucuacagaguucuggc

SEQ ID NO: 1333956 - RNA, 19 nt, Artificial Sequence
  Description of Artificial Sequence: Synthetic oligonucleotide
  Sense strand starting at position 2598 of SEQ ID NO: 1242254
ucacaaucagugcaaguua

SEQ ID NO: 1333957 - RNA, 19 nt, Artificial Sequence
  Description of Artificial Sequence: Synthetic oligonucleotide
  Antisense strand to SEQ ID NO: 1333956
uaacuugcacugauuguga

SEQ ID NO: 1333958 - RNA, 19 nt, Artificial Sequence
  Description of Artificial Sequence: Synthetic oligonucleotide
  Sense strand starting at position 2667 of SEQ ID NO: 1242254
ccuacugguccuuaugaca

SEQ ID NO: 1333959 - RNA, 19 nt, Artificial Sequence
  Description of Artificial Sequence: Synthetic oligonucleotide
  Antisense strand to SEQ ID NO: 1333958
ugucauaaggaccaguagg

SEQ ID NO: 1333960 - RNA, 19 nt, Artificial Sequence
  Description of Artificial Sequence: Synthetic oligonucleotide
  Sense strand starting at position 2824 of SEQ ID NO: 1242254
gaggucacauuaucucaga

SEQ ID NO: 1333961 - RNA, 19 nt, Artificial Sequence
  Description of Artificial Sequence: Synthetic oligonucleotide
  Antisense strand to SEQ ID NO: 1333960
ucugagauaaugugaccuc

SEQ ID NO: 1333962 - RNA, 19 nt, Artificial Sequence
  Description of Artificial Sequence: Synthetic oligonucleotide
  Sense strand starting at position 2825 of SEQ ID NO: 1242254
aggucacauuaucucagau

SEQ ID NO: 1333963 - RNA, 19 nt, Artificial Sequence
  Description of Artificial Sequence: Synthetic oligonucleotide
  Antisense strand to SEQ ID NO: 1333962
aucugagauaaugugaccu

SEQ ID NO: 1333964 - RNA, 19 nt, Artificial Sequence
  Description of Artificial Sequence: Synthetic oligonucleotide
  Sense strand starting at position 3250 of SEQ ID NO: 1242254
ugugcuagaguccaagaau

SEQ ID NO: 1333965 - RNA, 19 nt, Artificial Sequence
  Description of Artificial Sequence: Synthetic oligonucleotide
  Antisense strand to SEQ ID NO: 1333964
auucuuggacucuagcaca

SEQ ID NO: 1333966 - RNA, 19 nt, Artificial Sequence
  Description of Artificial Sequence: Synthetic oligonucleotide
  Sense strand starting at position 3261 of SEQ ID NO: 1242254
ccaagaauacgccauaauc

SEQ ID NO: 1333967 - RNA, 19 nt, Artificial Sequence
  Description of Artificial Sequence: Synthetic oligonucleotide
  Antisense strand to SEQ ID NO: 1333966
gauuauggcguauucuugg

SEQ ID NO: 1333968 - RNA, 19 nt, Artificial Sequence
  Description of Artificial Sequence: Synthetic oligonucleotide
  Sense strand starting at position 3353 of SEQ ID NO: 1242254
uaaguaagugcucaaucug

SEQ ID NO: 1333969 - RNA, 19 nt, Artificial Sequence
  Description of Artificial Sequence: Synthetic oligonucleotide
  Antisense strand to SEQ ID NO: 1333968
cagauugagcacuuacuua

SEQ ID NO: 1333970 - RNA, 19 nt, Artificial Sequence
  Description of Artificial Sequence: Synthetic oligonucleotide
  Sense strand starting at position 3386 of SEQ ID NO: 1242254
gaaaguaauuuagggaauu

SEQ ID NO: 1333971 - RNA, 19 nt, Artificial Sequence
  Description of Artificial Sequence: Synthetic oligonucleotide
  Antisense strand to SEQ ID NO: 1333970
aauucccuaaauuacuuuc

SEQ ID NO: 1333972 - RNA, 19 nt, Artificial Sequence
  Description of Artificial Sequence: Synthetic oligonucleotide
  Sense strand starting at position 3404 of SEQ ID NO: 1242254
uagggacagcuuugcagaa

SEQ ID NO: 1333973 - RNA, 19 nt, Artificial Sequence
  Description of Artificial Sequence: Synthetic oligonucleotide
  Antisense strand to SEQ ID NO: 1333972
uucugcaaagcugucccua

SEQ ID NO: 1333974 - RNA, 19 nt, Artificial Sequence
  Description of Artificial Sequence: Synthetic oligonucleotide
  Sense strand starting at position 3405 of SEQ ID NO: 1242254
agggacagcuuugcagaaa

SEQ ID NO: 1333975 - RNA, 19 nt, Artificial Sequence
  Description of Artificial Sequence: Synthetic oligonucleotide
  Antisense strand to SEQ ID NO: 1333974
uuucugcaaagcugucccu

SEQ ID NO: 1333976 - RNA, 19 nt, Artificial Sequence
  Description of Artificial Sequence: Synthetic oligonucleotide
  Sense strand starting at position 3503 of SEQ ID NO: 1242254
gucaucucaggauaugguu

SEQ ID NO: 1333977 - RNA, 19 nt, Artificial Sequence
  Description of Artificial Sequence: Synthetic oligonucleotide
  Antisense strand to SEQ ID NO: 1333976
aaccauauccugagaugac

SEQ ID NO: 1333978 - RNA, 19 nt, Artificial Sequence
  Description of Artificial Sequence: Synthetic oligonucleotide
  Sense strand starting at position 3649 of SEQ ID NO: 1242254
cccggauuaucacuagaua

SEQ ID NO: 1333979 - RNA, 19 nt, Artificial Sequence
  Description of Artificial Sequence: Synthetic oligonucleotide
  Antisense strand to SEQ ID NO: 1333978
uaucuagugauaauccggg

SEQ ID NO: 1333980 - RNA, 19 nt, Artificial Sequence
  Description of Artificial Sequence: Synthetic oligonucleotide
  Sense strand starting at position 3895 of SEQ ID NO: 1242254
cccauuccuggccaaguaa

SEQ ID NO: 1333981 - RNA, 19 nt, Artificial Sequence
  Description of Artificial Sequence: Synthetic oligonucleotide
  Antisense strand to SEQ ID NO: 1333980
uuacuuggccaggaauggg

SEQ ID NO: 1333982 - RNA, 19 nt, Artificial Sequence
  Description of Artificial Sequence: Synthetic oligonucleotide
  Sense strand starting at position 94 of SEQ ID NO: 1242255
uguggagucucuucucaca

SEQ ID NO: 1333983 - RNA, 19 nt, Artificial Sequence
  Description of Artificial Sequence: Synthetic oligonucleotide
  Antisense strand to SEQ ID NO: 1333982
ugugagaagagacuccaca

SEQ ID NO: 1333984 - RNA, 19 nt, Artificial Sequence
  Description of Artificial Sequence: Synthetic oligonucleotide
  Sense strand starting at position 96 of SEQ ID NO: 1242255
uggagucucuucucacauu

SEQ ID NO: 1333985 - RNA, 19 nt, Artificial Sequence
  Description of Artificial Sequence: Synthetic oligonucleotide
  Antisense strand to SEQ ID NO: 1333984
aaugugagaagagacucca

SEQ ID NO: 1333986 - RNA, 19 nt, Artificial Sequence
  Description of Artificial Sequence: Synthetic oligonucleotide
  Sense strand starting at position 97 of SEQ ID NO: 1242255
ggagucucuucucacauuu

SEQ ID NO: 1333987 - RNA, 19 nt, Artificial Sequence
  Description of Artificial Sequence: Synthetic oligonucleotide
  Antisense strand to SEQ ID NO: 1333986
aaaugugagaagagacucc

SEQ ID NO: 1333988 - RNA, 19 nt, Artificial Sequence
  Description of Artificial Sequence: Synthetic oligonucleotide
  Sense strand starting at position 354 of SEQ ID NO: 1242255
accucuuugugucccuaga

SEQ ID NO: 1333989 - RNA, 19 nt, Artificial Sequence
  Description of Artificial Sequence: Synthetic oligonucleotide
  Antisense strand to SEQ ID NO: 1333988
ucuagggacacaaagaggu

SEQ ID NO: 1333990 - RNA, 19 nt, Artificial Sequence
  Description of Artificial Sequence: Synthetic oligonucleotide
  Sense strand starting at position 356 of SEQ ID NO: 1242255
cucuuugugucccuagaca

SEQ ID NO: 1333991 - RNA, 19 nt, Artificial Sequence
  Description of Artificial Sequence: Synthetic oligonucleotide
  Antisense strand to SEQ ID NO: 1333990
ugucuagggacacaaagag

SEQ ID NO: 1333992 - RNA, 19 nt, Artificial Sequence
  Description of Artificial Sequence: Synthetic oligonucleotide
  Sense strand starting at position 678 of SEQ ID NO: 1242255
gugucaugccgcuggguuu

SEQ ID NO: 1333993 - RNA, 19 nt, Artificial Sequence
  Description of Artificial Sequence: Synthetic oligonucleotide
  Antisense strand to SEQ ID NO: 1333992
aaacccagcggcaugacac

SEQ ID NO: 1333994 - RNA, 19 nt, Artificial Sequence
  Description of Artificial Sequence: Synthetic oligonucleotide
  Sense strand starting at position 725 of SEQ ID NO: 1242255
ugguauuccugauauccuc

SEQ ID NO: 1333995 - RNA, 19 nt, Artificial Sequence
  Description of Artificial Sequence: Synthetic oligonucleotide
  Antisense strand to SEQ ID NO: 1333994
gaggauaucaggaauacca

SEQ ID NO: 1333996 - RNA, 19 nt, Artificial Sequence
  Description of Artificial Sequence: Synthetic oligonucleotide
  Sense strand starting at position 768 of SEQ ID NO: 1242255
gagguugcguucuucucau

SEQ ID NO: 1333997 - RNA, 19 nt, Artificial Sequence
  Description of Artificial Sequence: Synthetic oligonucleotide
  Antisense strand to SEQ ID NO: 1333996
augagaagaacgcaaccuc

SEQ ID NO: 1333998 - RNA, 19 nt, Artificial Sequence
  Description of Artificial Sequence: Synthetic oligonucleotide
  Sense strand starting at position 816 of SEQ ID NO: 1242255
ucaucaguguaaugaaacu

SEQ ID NO: 1333999 - RNA, 19 nt, Artificial Sequence
  Description of Artificial Sequence: Synthetic oligonucleotide
  Antisense strand to SEQ ID NO: 1333998
aguuucauuacacugauga

SEQ ID NO: 1334000 - RNA, 19 nt, Artificial Sequence
  Description of Artificial Sequence: Synthetic oligonucleotide
  Sense strand starting at position 827 of SEQ ID NO: 1242255
augaaacuuuagggacuua

SEQ ID NO: 1334001 - RNA, 19 nt, Artificial Sequence
  Description of Artificial Sequence: Synthetic oligonucleotide
  Antisense strand to SEQ ID NO: 1334000
uaagucccuaaaguuucau

SEQ ID NO: 1334002 - RNA, 19 nt, Artificial Sequence
  Description of Artificial Sequence: Synthetic oligonucleotide
  Sense strand starting at position 923 of SEQ ID NO: 1242255
gugcaauucuuugcagucu

SEQ ID NO: 1334003 - RNA, 19 nt, Artificial Sequence
  Description of Artificial Sequence: Synthetic oligonucleotide
  Antisense strand to SEQ ID NO: 1334002
agacugcaaagaauugcac

SEQ ID NO: 1334004 - RNA, 19 nt, Artificial Sequence
  Description of Artificial Sequence: Synthetic oligonucleotide
  Sense strand starting at position 924 of SEQ ID NO: 1242255
ugcaauucuuugcagucua

SEQ ID NO: 1334005 - RNA, 19 nt, Artificial Sequence
  Description of Artificial Sequence: Synthetic oligonucleotide
  Antisense strand to SEQ ID NO: 1334004
uagacugcaaagaauugca

SEQ ID NO: 1334006 - RNA, 19 nt, Artificial Sequence
  Description of Artificial Sequence: Synthetic oligonucleotide
  Sense strand starting at position 977 of SEQ ID NO: 1242255
cucauuaguucuucuauga

SEQ ID NO: 1334007 - RNA, 19 nt, Artificial Sequence
  Description of Artificial Sequence: Synthetic oligonucleotide
  Antisense strand to SEQ ID NO: 1334006
ucauagaagaacuaaugag

SEQ ID NO: 1334008 - RNA, 19 nt, Artificial Sequence
  Description of Artificial Sequence: Synthetic oligonucleotide
  Sense strand starting at position 981 of SEQ ID NO: 1242255
uuaguucuucuaugagaga

SEQ ID NO: 1334009 - RNA, 19 nt, Artificial Sequence
  Description of Artificial Sequence: Synthetic oligonucleotide
  Antisense strand to SEQ ID NO: 1334008
ucucucauagaagaacuaa

SEQ ID NO: 1334010 - RNA, 19 nt, Artificial Sequence
  Description of Artificial Sequence: Synthetic oligonucleotide
  Sense strand starting at position 982 of SEQ ID NO: 1242255
uaguucuucuaugagagau

SEQ ID NO: 1334011 - RNA, 19 nt, Artificial Sequence
  Description of Artificial Sequence: Synthetic oligonucleotide
  Antisense strand to SEQ ID NO: 1334010
aucucucauagaagaacua

SEQ ID NO: 1334012 - RNA, 19 nt, Artificial Sequence
  Description of Artificial Sequence: Synthetic oligonucleotide
  Sense strand starting at position 984 of SEQ ID NO: 1242255
guucuucuaugagagauag

SEQ ID NO: 1334013 - RNA, 19 nt, Artificial Sequence
  Description of Artificial Sequence: Synthetic oligonucleotide
  Antisense strand to SEQ ID NO: 1334012
cuaucucucauagaagaac

SEQ ID NO: 1334014 - RNA, 19 nt, Artificial Sequence
  Description of Artificial Sequence: Synthetic oligonucleotide
  Sense strand starting at position 1216 of SEQ ID NO: 1242255
cugucacauuggucuaagu

SEQ ID NO: 1334015 - RNA, 19 nt, Artificial Sequence
  Description of Artificial Sequence: Synthetic oligonucleotide
  Antisense strand to SEQ ID NO: 1334014
acuuagaccaaugugacag

SEQ ID NO: 1334016 - RNA, 19 nt, Artificial Sequence
  Description of Artificial Sequence: Synthetic oligonucleotide
  Sense strand starting at position 1218 of SEQ ID NO: 1242255
gucacauuggucuaaguag

SEQ ID NO: 1334017 - RNA, 19 nt, Artificial Sequence
  Description of Artificial Sequence: Synthetic oligonucleotide
  Antisense strand to SEQ ID NO: 1334016
cuacuuagaccaaugugac

SEQ ID NO: 1334018 - RNA, 19 nt, Artificial Sequence
  Description of Artificial Sequence: Synthetic oligonucleotide
  Sense strand starting at position 1232 of SEQ ID NO: 1242255
aguagugcuccucaaagug

SEQ ID NO: 1334019 - RNA, 19 nt, Artificial Sequence
  Description of Artificial Sequence: Synthetic oligonucleotide
  Antisense strand to SEQ ID NO: 1334018
cacuuugaggagcacuacu

SEQ ID NO: 1334020 - RNA, 19 nt, Artificial Sequence
  Description of Artificial Sequence: Synthetic oligonucleotide
  Sense strand starting at position 1388 of SEQ ID NO: 1242255
ccaggcuuccugugcuuaa

SEQ ID NO: 1334021 - RNA, 19 nt, Artificial Sequence
  Description of Artificial Sequence: Synthetic oligonucleotide
  Antisense strand to SEQ ID NO: 1334020
uuaagcacaggaagccugg

SEQ ID NO: 1334022 - RNA, 19 nt, Artificial Sequence
  Description of Artificial Sequence: Synthetic oligonucleotide
  Sense strand starting at position 1391 of SEQ ID NO: 1242255
ggcuuccugugcuuaacau

SEQ ID NO: 1334023 - RNA, 19 nt, Artificial Sequence
  Description of Artificial Sequence: Synthetic oligonucleotide
  Antisense strand to SEQ ID NO: 1334022
auguuaagcacaggaagcc

SEQ ID NO: 1334024 - RNA, 19 nt, Artificial Sequence
  Description of Artificial Sequence: Synthetic oligonucleotide
  Sense strand starting at position 1392 of SEQ ID NO: 1242255
gcuuccugugcuuaacauu

SEQ ID NO: 1334025 - RNA, 19 nt, Artificial Sequence
  Description of Artificial Sequence: Synthetic oligonucleotide
  Antisense strand to SEQ ID NO: 1334024
aauguuaagcacaggaagc

SEQ ID NO: 1334026 - RNA, 19 nt, Artificial Sequence
  Description of Artificial Sequence: Synthetic oligonucleotide
  Sense strand starting at position 1432 of SEQ ID NO: 1242255
ugcacuaaugcccauugau

SEQ ID NO: 1334027 - RNA, 19 nt, Artificial Sequence
  Description of Artificial Sequence: Synthetic oligonucleotide
  Antisense strand to SEQ ID NO: 1334026
aucaaugggcauuagugca

SEQ ID NO: 1334028 - RNA, 19 nt, Artificial Sequence
  Description of Artificial Sequence: Synthetic oligonucleotide
  Sense strand starting at position 1513 of SEQ ID NO: 1242255
ugcauuccauucuaaggaa

SEQ ID NO: 1334029 - RNA, 19 nt, Artificial Sequence
  Description of Artificial Sequence: Synthetic oligonucleotide
  Antisense strand to SEQ ID NO: 1334028
uuccuuagaauggaaugca

SEQ ID NO: 1334030 - RNA, 19 nt, Artificial Sequence
  Description of Artificial Sequence: Synthetic oligonucleotide
  Sense strand starting at position 1595 of SEQ ID NO: 1242255
uggaacauuugcugucuga

SEQ ID NO: 1334031 - RNA, 19 nt, Artificial Sequence
  Description of Artificial Sequence: Synthetic oligonucleotide
  Antisense strand to SEQ ID NO: 1334030
ucagacagcaaauguucca

SEQ ID NO: 1334032 - RNA, 19 nt, Artificial Sequence
  Description of Artificial Sequence: Synthetic oligonucleotide
  Sense strand starting at position 1923 of SEQ ID NO: 1242255
cagaucuuucuccaggagu

SEQ ID NO: 1334033 - RNA, 19 nt, Artificial Sequence
  Description of Artificial Sequence: Synthetic oligonucleotide
  Antisense strand to SEQ ID NO: 1334032
acuccuggagaaagaucug

SEQ ID NO: 1334034 - RNA, 19 nt, Artificial Sequence
  Description of Artificial Sequence: Synthetic oligonucleotide
  Sense strand starting at position 1925 of SEQ ID NO: 1242255
gaucuuucuccaggaguga

SEQ ID NO: 1334035 - RNA, 19 nt, Artificial Sequence
  Description of Artificial Sequence: Synthetic oligonucleotide
  Antisense strand to SEQ ID NO: 1334034
ucacuccuggagaaagauc

SEQ ID NO: 1334036 - RNA, 19 nt, Artificial Sequence
  Description of Artificial Sequence: Synthetic oligonucleotide
  Sense strand starting at position 1980 of SEQ ID NO: 1242255
gagcacagccuucgaagua

SEQ ID NO: 1334037 - RNA, 19 nt, Artificial Sequence
  Description of Artificial Sequence: Synthetic oligonucleotide
  Antisense strand to SEQ ID NO: 1334036
uacuucgaaggcugugcuc

SEQ ID NO: 1334038 - RNA, 19 nt, Artificial Sequence
  Description of Artificial Sequence: Synthetic oligonucleotide
  Sense strand starting at position 1981 of SEQ ID NO: 1242255
agcacagccuucgaaguaa

SEQ ID NO: 1334039 - RNA, 19 nt, Artificial Sequence
  Description of Artificial Sequence: Synthetic oligonucleotide
  Antisense strand to SEQ ID NO: 1334038
uuacuucgaaggcugugcu

SEQ ID NO: 1334040 - RNA, 19 nt, Artificial Sequence
  Description of Artificial Sequence: Synthetic oligonucleotide
  Sense strand starting at position 2357 of SEQ ID NO: 1242255
gggaaaugcucagugaaca

SEQ ID NO: 1334041 - RNA, 19 nt, Artificial Sequence
  Description of Artificial Sequence: Synthetic oligonucleotide
  Antisense strand to SEQ ID NO: 1334040
uguucacugagcauuuccc

SEQ ID NO: 1334042 - RNA, 19 nt, Artificial Sequence
  Description of Artificial Sequence: Synthetic oligonucleotide
  Sense strand starting at position 2358 of SEQ ID NO: 1242255
ggaaaugcucagugaacau

SEQ ID NO: 1334043 - RNA, 19 nt, Artificial Sequence
  Description of Artificial Sequence: Synthetic oligonucleotide
  Antisense strand to SEQ ID NO: 1334042
auguucacugagcauuucc

SEQ ID NO: 1334044 - RNA, 19 nt, Artificial Sequence
  Description of Artificial Sequence: Synthetic oligonucleotide
  Sense strand starting at position 3271 of SEQ ID NO: 1242255
caggaauuggcaggaagua

SEQ ID NO: 1334045 - RNA, 19 nt, Artificial Sequence
  Description of Artificial Sequence: Synthetic oligonucleotide
  Antisense strand to SEQ ID NO: 1334044
uacuuccugccaauuccug

SEQ ID NO: 1334046 - RNA, 19 nt, Artificial Sequence
  Description of Artificial Sequence: Synthetic oligonucleotide
  Sense strand starting at position 3472 of SEQ ID NO: 1242255
cgagaucucugagaccaca

SEQ ID NO: 1334047 - RNA, 19 nt, Artificial Sequence
  Description of Artificial Sequence: Synthetic oligonucleotide
  Antisense strand to SEQ ID NO: 1334046
uguggucucagagaucucg

SEQ ID NO: 1334048 - RNA, 19 nt, Artificial Sequence
  Description of Artificial Sequence: Synthetic oligonucleotide
  Sense strand starting at position 3531 of SEQ ID NO: 1242255
ugugcguuagguguggaua

SEQ ID NO: 1334049 - RNA, 19 nt, Artificial Sequence
  Description of Artificial Sequence: Synthetic oligonucleotide
  Antisense strand to SEQ ID NO: 1334048
uauccacaccuaacgcaca

SEQ ID NO: 1334050 - RNA, 19 nt, Artificial Sequence
  Description of Artificial Sequence: Synthetic oligonucleotide
  Sense strand starting at position 3532 of SEQ ID NO: 1242255
gugcguuagguguggauau

SEQ ID NO: 1334051 - RNA, 19 nt, Artificial Sequence
  Description of Artificial Sequence: Synthetic oligonucleotide
  Antisense strand to SEQ ID NO: 1334050
auauccacaccuaacgcac

SEQ ID NO: 1334052 - RNA, 19 nt, Artificial Sequence
  Description of Artificial Sequence: Synthetic oligonucleotide
  Sense strand starting at position 3628 of SEQ ID NO: 1242255
caguucccgucccagaaau

SEQ ID NO: 1334053 - RNA, 19 nt, Artificial Sequence
  Description of Artificial Sequence: Synthetic oligonucleotide
  Antisense strand to SEQ ID NO: 1334052
auuucugggacgggaacug

SEQ ID NO: 1334054 - RNA, 19 nt, Artificial Sequence
  Description of Artificial Sequence: Synthetic oligonucleotide
  Sense strand starting at position 3778 of SEQ ID NO: 1242255
gcacgcagaucugucgaaa

SEQ ID NO: 1334055 - RNA, 19 nt, Artificial Sequence
  Description of Artificial Sequence: Synthetic oligonucleotide
  Antisense strand to SEQ ID NO: 1334054
uuucgacagaucugcgugc

SEQ ID NO: 1334056 - RNA, 19 nt, Artificial Sequence
  Description of Artificial Sequence: Synthetic oligonucleotide
  Sense strand starting at position 3874 of SEQ ID NO: 1242255
uguguaacugcugaaugua

SEQ ID NO: 1334057 - RNA, 19 nt, Artificial Sequence
  Description of Artificial Sequence: Synthetic oligonucleotide
  Antisense strand to SEQ ID NO: 1334056
uacauucagcaguuacaca

SEQ ID NO: 1334058 - RNA, 19 nt, Artificial Sequence
  Description of Artificial Sequence: Synthetic oligonucleotide
  Sense strand starting at position 680 of SEQ ID NO: 1242256
agagaauggcuccaugucu

SEQ ID NO: 1334059 - RNA, 19 nt, Artificial Sequence
  Description of Artificial Sequence: Synthetic oligonucleotide
  Antisense strand to SEQ ID NO: 1334058
agacauggagccauucucu

SEQ ID NO: 1334060 - RNA, 19 nt, Artificial Sequence
  Description of Artificial Sequence: Synthetic oligonucleotide
  Sense strand starting at position 1052 of SEQ ID NO: 1242256
gcaguuucccuuggacaga

SEQ ID NO: 1334061 - RNA, 19 nt, Artificial Sequence
  Description of Artificial Sequence: Synthetic oligonucleotide
  Antisense strand to SEQ ID NO: 1334060
ucuguccaagggaaacugc

SEQ ID NO: 1334062 - RNA, 19 nt, Artificial Sequence
  Description of Artificial Sequence: Synthetic oligonucleotide
  Sense strand starting at position 1093 of SEQ ID NO: 1242256
aguuacaguuaauugagaa

SEQ ID NO: 1334063 - RNA, 19 nt, Artificial Sequence
  Description of Artificial Sequence: Synthetic oligonucleotide
  Antisense strand to SEQ ID NO: 1334062
uucucaauuaacuguaacu

SEQ ID NO: 1334064 - RNA, 19 nt, Artificial Sequence
  Description of Artificial Sequence: Synthetic oligonucleotide
  Sense strand starting at position 1097 of SEQ ID NO: 1242256
acaguuaauugagaacuua

SEQ ID NO: 1334065 - RNA, 19 nt, Artificial Sequence
  Description of Artificial Sequence: Synthetic oligonucleotide
  Antisense strand to SEQ ID NO: 1334064
uaaguucucaauuaacugu

SEQ ID NO: 1334066 - RNA, 19 nt, Artificial Sequence
  Description of Artificial Sequence: Synthetic oligonucleotide
  Sense strand starting at position 1137 of SEQ ID NO: 1242256
aggcauccgacguggauua

SEQ ID NO: 1334067 - RNA, 19 nt, Artificial Sequence
  Description of Artificial Sequence: Synthetic oligonucleotide
  Antisense strand to SEQ ID NO: 1334066
uaauccacgucggaugccu

SEQ ID NO: 1334068 - RNA, 19 nt, Artificial Sequence
  Description of Artificial Sequence: Synthetic oligonucleotide
  Sense strand starting at position 1139 of SEQ ID NO: 1242256
gcauccgacguggauuauu

SEQ ID NO: 1334069 - RNA, 19 nt, Artificial Sequence
  Description of Artificial Sequence: Synthetic oligonucleotide
  Antisense strand to SEQ ID NO: 1334068
aauaauccacgucggaugc

SEQ ID NO: 1334070 - RNA, 19 nt, Artificial Sequence
  Description of Artificial Sequence: Synthetic oligonucleotide
  Sense strand starting at position 1147 of SEQ ID NO: 1242256
cguggauuauuuccguuaa

SEQ ID NO: 1334071 - RNA, 19 nt, Artificial Sequence
  Description of Artificial Sequence: Synthetic oligonucleotide
  Antisense strand to SEQ ID NO: 1334070
uuaacggaaauaauccacg

SEQ ID NO: 1334072 - RNA, 19 nt, Artificial Sequence
  Description of Artificial Sequence: Synthetic oligonucleotide
  Sense strand starting at position 1149 of SEQ ID NO: 1242256
uggauuauuuccguuaagc

SEQ ID NO: 1334073 - RNA, 19 nt, Artificial Sequence
  Description of Artificial Sequence: Synthetic oligonucleotide
  Antisense strand to SEQ ID NO: 1334072
gcuuaacggaaauaaucca

SEQ ID NO: 1334074 - RNA, 19 nt, Artificial Sequence
  Description of Artificial Sequence: Synthetic oligonucleotide
  Sense strand starting at position 1159 of SEQ ID NO: 1242256
ccguuaagccucugaacaa

SEQ ID NO: 1334075 - RNA, 19 nt, Artificial Sequence
  Description of Artificial Sequence: Synthetic oligonucleotide
  Antisense strand to SEQ ID NO: 1334074
uuguucagaggcuuaacgg

SEQ ID NO: 1334076 - RNA, 19 nt, Artificial Sequence
  Description of Artificial Sequence: Synthetic oligonucleotide
  Sense strand starting at position 1166 of SEQ ID NO: 1242256
gccucugaacaaugcugua

SEQ ID NO: 1334077 - RNA, 19 nt, Artificial Sequence
  Description of Artificial Sequence: Synthetic oligonucleotide
  Antisense strand to SEQ ID NO: 1334076
uacagcauuguucagaggc

SEQ ID NO: 1334078 - RNA, 19 nt, Artificial Sequence
  Description of Artificial Sequence: Synthetic oligonucleotide
  Sense strand starting at position 1171 of SEQ ID NO: 1242256
ugaacaaugcuguaaggua

SEQ ID NO: 1334079 - RNA, 19 nt, Artificial Sequence
  Description of Artificial Sequence: Synthetic oligonucleotide
  Antisense strand to SEQ ID NO: 1334078
uaccuuacagcauuguuca

SEQ ID NO: 1334080 - RNA, 19 nt, Artificial Sequence
  Description of Artificial Sequence: Synthetic oligonucleotide
  Sense strand starting at position 1183 of SEQ ID NO: 1242256
uaagguaaaugcucuuguu

SEQ ID NO: 1334081 - RNA, 19 nt, Artificial Sequence
  Description of Artificial Sequence: Synthetic oligonucleotide
  Antisense strand to SEQ ID NO: 1334080
aacaagagcauuuaccuua

SEQ ID NO: 1334082 - RNA, 19 nt, Artificial Sequence
  Description of Artificial Sequence: Synthetic oligonucleotide
  Sense strand starting at position 1253 of SEQ ID NO: 1242256
aaacuaguagugugaagau

SEQ ID NO: 1334083 - RNA, 19 nt, Artificial Sequence
  Description of Artificial Sequence: Synthetic oligonucleotide
  Antisense strand to SEQ ID NO: 1334082
aucuucacacuacuaguuu

SEQ ID NO: 1334084 - RNA, 19 nt, Artificial Sequence
  Description of Artificial Sequence: Synthetic oligonucleotide
  Sense strand starting at position 1265 of SEQ ID NO: 1242256
ugaagauucuaagaccauc

SEQ ID NO: 1334085 - RNA, 19 nt, Artificial Sequence
  Description of Artificial Sequence: Synthetic oligonucleotide
  Antisense strand to SEQ ID NO: 1334084
gauggucuuagaaucuuca

SEQ ID NO: 1334086 - RNA, 19 nt, Artificial Sequence
  Description of Artificial Sequence: Synthetic oligonucleotide
  Sense strand starting at position 1334 of SEQ ID NO: 1242256
gagcacuagucagucauua

SEQ ID NO: 1334087 - RNA, 19 nt, Artificial Sequence
  Description of Artificial Sequence: Synthetic oligonucleotide
  Antisense strand to SEQ ID NO: 1334086
uaaugacugacuagugcuc

SEQ ID NO: 1334088 - RNA, 19 nt, Artificial Sequence
  Description of Artificial Sequence: Synthetic oligonucleotide
  Sense strand starting at position 1338 of SEQ ID NO: 1242256
acuagucagucauuaccaa

SEQ ID NO: 1334089 - RNA, 19 nt, Artificial Sequence
  Description of Artificial Sequence: Synthetic oligonucleotide
  Antisense strand to SEQ ID NO: 1334088
uugguaaugacugacuagu

SEQ ID NO: 1334090 - RNA, 19 nt, Artificial Sequence
  Description of Artificial Sequence: Synthetic oligonucleotide
  Sense strand starting at position 1544 of SEQ ID NO: 1242256
aggcucaggucuucuguaa

SEQ ID NO: 1334091 - RNA, 19 nt, Artificial Sequence
  Description of Artificial Sequence: Synthetic oligonucleotide
  Antisense strand to SEQ ID NO: 1334090
uuacagaagaccugagccu

SEQ ID NO: 1334092 - RNA, 19 nt, Artificial Sequence
  Description of Artificial Sequence: Synthetic oligonucleotide
  Sense strand starting at position 1548 of SEQ ID NO: 1242256
ucaggucuucuguaaggcu

SEQ ID NO: 1334093 - RNA, 19 nt, Artificial Sequence
  Description of Artificial Sequence: Synthetic oligonucleotide
  Antisense strand to SEQ ID NO: 1334092
agccuuacagaagaccuga

SEQ ID NO: 1334094 - RNA, 19 nt, Artificial Sequence
  Description of Artificial Sequence: Synthetic oligonucleotide
  Sense strand starting at position 1653 of SEQ ID NO: 1242256
ggcucucaccuuugaucuu

SEQ ID NO: 1334095 - RNA, 19 nt, Artificial Sequence
  Description of Artificial Sequence: Synthetic oligonucleotide
  Antisense strand to SEQ ID NO: 1334094
aagaucaaaggugagagcc

SEQ ID NO: 1334096 - RNA, 19 nt, Artificial Sequence
  Description of Artificial Sequence: Synthetic oligonucleotide
  Sense strand starting at position 1992 of SEQ ID NO: 1242256
cagagcuuggacugugaaa

SEQ ID NO: 1334097 - RNA, 19 nt, Artificial Sequence
  Description of Artificial Sequence: Synthetic oligonucleotide
  Antisense strand to SEQ ID NO: 1334096
uuucacaguccaagcucug

SEQ ID NO: 1334098 - RNA, 19 nt, Artificial Sequence
  Description of Artificial Sequence: Synthetic oligonucleotide
  Sense strand starting at position 1994 of SEQ ID NO: 1242256
gagcuuggacugugaaacu

SEQ ID NO: 1334099 - RNA, 19 nt, Artificial Sequence
  Description of Artificial Sequence: Synthetic oligonucleotide
  Antisense strand to SEQ ID NO: 1334098
aguuucacaguccaagcuc

SEQ ID NO: 1334100 - RNA, 19 nt, Artificial Sequence
  Description of Artificial Sequence: Synthetic oligonucleotide
  Sense strand starting at position 2059 of SEQ ID NO: 1242256
uggaaauucuaugcuggga

SEQ ID NO: 1334101 - RNA, 19 nt, Artificial Sequence
  Description of Artificial Sequence: Synthetic oligonucleotide
  Antisense strand to SEQ ID NO: 1334100
ucccagcauagaauuucca

SEQ ID NO: 1334102 - RNA, 19 nt, Artificial Sequence
  Description of Artificial Sequence: Synthetic oligonucleotide
  Sense strand starting at position 2063 of SEQ ID NO: 1242256
aauucuaugcugggagcuu

SEQ ID NO: 1334103 - RNA, 19 nt, Artificial Sequence
  Description of Artificial Sequence: Synthetic oligonucleotide
  Antisense strand to SEQ ID NO: 1334102
aagcucccagcauagaauu

SEQ ID NO: 1334104 - RNA, 19 nt, Artificial Sequence
  Description of Artificial Sequence: Synthetic oligonucleotide
  Sense strand starting at position 2072 of SEQ ID NO: 1242256
cugggagcuuaguuaugga

SEQ ID NO: 1334105 - RNA, 19 nt, Artificial Sequence
  Description of Artificial Sequence: Synthetic oligonucleotide
  Antisense strand to SEQ ID NO: 1334104
uccauaacuaagcucccag

SEQ ID NO: 1334106 - RNA, 19 nt, Artificial Sequence
  Description of Artificial Sequence: Synthetic oligonucleotide
  Sense strand starting at position 2393 of SEQ ID NO: 1242256
agucaauuaucacuaaggu

SEQ ID NO: 1334107 - RNA, 19 nt, Artificial Sequence
  Description of Artificial Sequence: Synthetic oligonucleotide
  Antisense strand to SEQ ID NO: 1334106
accuuagugauaauugacu

SEQ ID NO: 1334108 - RNA, 19 nt, Artificial Sequence
  Description of Artificial Sequence: Synthetic oligonucleotide
  Sense strand starting at position 2394 of SEQ ID NO: 1242256
gucaauuaucacuaaggug

SEQ ID NO: 1334109 - RNA, 19 nt, Artificial Sequence
  Description of Artificial Sequence: Synthetic oligonucleotide
  Antisense strand to SEQ ID NO: 1334108
caccuuagugauaauugac

SEQ ID NO: 1334110 - RNA, 19 nt, Artificial Sequence
  Description of Artificial Sequence: Synthetic oligonucleotide
  Sense strand starting at position 2408 of SEQ ID NO: 1242256
aggugugacugucugauag

SEQ ID NO: 1334111 - RNA, 19 nt, Artificial Sequence
  Description of Artificial Sequence: Synthetic oligonucleotide
  Antisense strand to SEQ ID NO: 1334110
cuaucagacagucacaccu

SEQ ID NO: 1334112 - RNA, 19 nt, Artificial Sequence
  Description of Artificial Sequence: Synthetic oligonucleotide
  Sense strand starting at position 2462 of SEQ ID NO: 1242256
uuuagagauccaugucuag

SEQ ID NO: 1334113 - RNA, 19 nt, Artificial Sequence
  Description of Artificial Sequence: Synthetic oligonucleotide
  Antisense strand to SEQ ID NO: 1334112
cuagacauggaucucuaaa

SEQ ID NO: 1334114 - RNA, 19 nt, Artificial Sequence
  Description of Artificial Sequence: Synthetic oligonucleotide
  Sense strand starting at position 2471 of SEQ ID NO: 1242256
ccaugucuagcucaaugga

SEQ ID NO: 1334115 - RNA, 19 nt, Artificial Sequence
  Description of Artificial Sequence: Synthetic oligonucleotide
  Antisense strand to SEQ ID NO: 1334114
uccauugagcuagacaugg

SEQ ID NO: 1334116 - RNA, 19 nt, Artificial Sequence
  Description of Artificial Sequence: Synthetic oligonucleotide
  Sense strand starting at position 2474 of SEQ ID NO: 1242256
ugucuagcucaauggauac

SEQ ID NO: 1334117 - RNA, 19 nt, Artificial Sequence
  Description of Artificial Sequence: Synthetic oligonucleotide
  Antisense strand to SEQ ID NO: 1334116
guauccauugagcuagaca

SEQ ID NO: 1334118 - RNA, 19 nt, Artificial Sequence
  Description of Artificial Sequence: Synthetic oligonucleotide
  Sense strand starting at position 2613 of SEQ ID NO: 1242256
gcgguaugagaggacacau

SEQ ID NO: 1334119 - RNA, 19 nt, Artificial Sequence
  Description of Artificial Sequence: Synthetic oligonucleotide
  Antisense strand to SEQ ID NO: 1334118
auguguccucucauaccgc

SEQ ID NO: 1334120 - RNA, 19 nt, Artificial Sequence
  Description of Artificial Sequence: Synthetic oligonucleotide
  Sense strand starting at position 2822 of SEQ ID NO: 1242256
gaugacugcuggcuuuaga

SEQ ID NO: 1334121 - RNA, 19 nt, Artificial Sequence
  Description of Artificial Sequence: Synthetic oligonucleotide
  Antisense strand to SEQ ID NO: 1334120
ucuaaagccagcagucauc

SEQ ID NO: 1334122 - RNA, 19 nt, Artificial Sequence
  Description of Artificial Sequence: Synthetic oligonucleotide
  Sense strand starting at position 2963 of SEQ ID NO: 1242256
cagggcucuccuuggauca

SEQ ID NO: 1334123 - RNA, 19 nt, Artificial Sequence
  Description of Artificial Sequence: Synthetic oligonucleotide
  Antisense strand to SEQ ID NO: 1334122
ugauccaaggagagcccug

SEQ ID NO: 1334124 - RNA, 19 nt, Artificial Sequence
  Description of Artificial Sequence: Synthetic oligonucleotide
  Sense strand starting at position 2964 of SEQ ID NO: 1242256
agggcucuccuuggaucau

SEQ ID NO: 1334125 - RNA, 19 nt, Artificial Sequence
  Description of Artificial Sequence: Synthetic oligonucleotide
  Antisense strand to SEQ ID NO: 1334124
augauccaaggagagcccu

SEQ ID NO: 1334126 - RNA, 19 nt, Artificial Sequence
  Description of Artificial Sequence: Synthetic oligonucleotide
  Sense strand starting at position 2976 of SEQ ID NO: 1242256
ggaucauagucucugauug

SEQ ID NO: 1334127 - RNA, 19 nt, Artificial Sequence
  Description of Artificial Sequence: Synthetic oligonucleotide
  Antisense strand to SEQ ID NO: 1334126
caaucagagacuaugaucc

SEQ ID NO: 1334128 - RNA, 19 nt, Artificial Sequence
  Description of Artificial Sequence: Synthetic oligonucleotide
  Sense strand starting at position 2977 of SEQ ID NO: 1242256
gaucauagucucugauuga

SEQ ID NO: 1334129 - RNA, 19 nt, Artificial Sequence
  Description of Artificial Sequence: Synthetic oligonucleotide
  Antisense strand to SEQ ID NO: 1334128
ucaaucagagacuaugauc

SEQ ID NO: 1334130 - RNA, 19 nt, Artificial Sequence
  Description of Artificial Sequence: Synthetic oligonucleotide
  Sense strand starting at position 2981 of SEQ ID NO: 1242256
auagucucugauugaauag

SEQ ID NO: 1334131 - RNA, 19 nt, Artificial Sequence
  Description of Artificial Sequence: Synthetic oligonucleotide
  Antisense strand to SEQ ID NO: 1334130
cuauucaaucagagacuau

SEQ ID NO: 1334132 - RNA, 19 nt, Artificial Sequence
  Description of Artificial Sequence: Synthetic oligonucleotide
  Sense strand starting at position 3186 of SEQ ID NO: 1242256
accucugauuucuggguaa

SEQ ID NO: 1334133 - RNA, 19 nt, Artificial Sequence
  Description of Artificial Sequence: Synthetic oligonucleotide
  Antisense strand to SEQ ID NO: 1334132
uuacccagaaaucagaggu

SEQ ID NO: 1334134 - RNA, 19 nt, Artificial Sequence
  Description of Artificial Sequence: Synthetic oligonucleotide
  Sense strand starting at position 3381 of SEQ ID NO: 1242256
gcgggcagucuccaaguau

SEQ ID NO: 1334135 - RNA, 19 nt, Artificial Sequence
  Description of Artificial Sequence: Synthetic oligonucleotide
  Antisense strand to SEQ ID NO: 1334134
auacuuggagacugcccgc

SEQ ID NO: 1334136 - RNA, 19 nt, Artificial Sequence
  Description of Artificial Sequence: Synthetic oligonucleotide
  Sense strand starting at position 3758 of SEQ ID NO: 1242256
cugggucccuacucauaaa

SEQ ID NO: 1334137 - RNA, 19 nt, Artificial Sequence
  Description of Artificial Sequence: Synthetic oligonucleotide
  Antisense strand to SEQ ID NO: 1334136
uuuaugaguagggacccag

SEQ ID NO: 1334138 - RNA, 19 nt, Artificial Sequence
  Description of Artificial Sequence: Synthetic oligonucleotide
  Sense strand starting at position 79 of SEQ ID NO: 1242257
gcccguaaucaguauuugu

SEQ ID NO: 1334139 - RNA, 19 nt, Artificial Sequence
  Description of Artificial Sequence: Synthetic oligonucleotide
  Antisense strand to SEQ ID NO: 1334138
acaaauacugauuacgggc

SEQ ID NO: 1334140 - RNA, 19 nt, Artificial Sequence
  Description of Artificial Sequence: Synthetic oligonucleotide
  Sense strand starting at position 82 of SEQ ID NO: 1242257
cguaaucaguauuuguaaa

SEQ ID NO: 1334141 - RNA, 19 nt, Artificial Sequence
  Description of Artificial Sequence: Synthetic oligonucleotide
  Antisense strand to SEQ ID NO: 1334140
uuuacaaauacugauuacg

SEQ ID NO: 1334142 - RNA, 19 nt, Artificial Sequence
  Description of Artificial Sequence: Synthetic oligonucleotide
  Sense strand starting at position 155 of SEQ ID NO: 1242257
agcauaucucaaugcagau

SEQ ID NO: 1334143 - RNA, 19 nt, Artificial Sequence
  Description of Artificial Sequence: Synthetic oligonucleotide
  Antisense strand to SEQ ID NO: 1334142
aucugcauugagauaugcu

SEQ ID NO: 1334144 - RNA, 19 nt, Artificial Sequence
  Description of Artificial Sequence: Synthetic oligonucleotide
  Sense strand starting at position 190 of SEQ ID NO: 1242257
gcuacauaugacuagugau

SEQ ID NO: 1334145 - RNA, 19 nt, Artificial Sequence
  Description of Artificial Sequence: Synthetic oligonucleotide
  Antisense strand to SEQ ID NO: 1334144
aucacuagucauauguagc

SEQ ID NO: 1334146 - RNA, 19 nt, Artificial Sequence
  Description of Artificial Sequence: Synthetic oligonucleotide
  Sense strand starting at position 196 of SEQ ID NO: 1242257
uaugacuagugauuacagu

SEQ ID NO: 1334147 - RNA, 19 nt, Artificial Sequence
  Description of Artificial Sequence: Synthetic oligonucleotide
  Antisense strand to SEQ ID NO: 1334146
acuguaaucacuagucaua

SEQ ID NO: 1334148 - RNA, 19 nt, Artificial Sequence
  Description of Artificial Sequence: Synthetic oligonucleotide
  Sense strand starting at position 442 of SEQ ID NO: 1242257
gcagaaaucuuccugguua

SEQ ID NO: 1334149 - RNA, 19 nt, Artificial Sequence
  Description of Artificial Sequence: Synthetic oligonucleotide
  Antisense strand to SEQ ID NO: 1334148
uaaccaggaagauuucugc

SEQ ID NO: 1334150 - RNA, 19 nt, Artificial Sequence
  Description of Artificial Sequence: Synthetic oligonucleotide
  Sense strand starting at position 444 of SEQ ID NO: 1242257
agaaaucuuccugguuacu

SEQ ID NO: 1334151 - RNA, 19 nt, Artificial Sequence
  Description of Artificial Sequence: Synthetic oligonucleotide
  Antisense strand to SEQ ID NO: 1334150
aguaaccaggaagauuucu

SEQ ID NO: 1334152 - RNA, 19 nt, Artificial Sequence
  Description of Artificial Sequence: Synthetic oligonucleotide
  Sense strand starting at position 493 of SEQ ID NO: 1242257
aaccguaacguugaaucaa

SEQ ID NO: 1334153 - RNA, 19 nt, Artificial Sequence
  Description of Artificial Sequence: Synthetic oligonucleotide
  Antisense strand to SEQ ID NO: 1334152
uugauucaacguuacgguu

SEQ ID NO: 1334154 - RNA, 19 nt, Artificial Sequence
  Description of Artificial Sequence: Synthetic oligonucleotide
  Sense strand starting at position 566 of SEQ ID NO: 1242257
ggagccuugcaauaccaaa

SEQ ID NO: 1334155 - RNA, 19 nt, Artificial Sequence
  Description of Artificial Sequence: Synthetic oligonucleotide
  Antisense strand to SEQ ID NO: 1334154
uuugguauugcaaggcucc

SEQ ID NO: 1334156 - RNA, 19 nt, Artificial Sequence
  Description of Artificial Sequence: Synthetic oligonucleotide
  Sense strand starting at position 706 of SEQ ID NO: 1242257
agaauuagcccuggcauag

SEQ ID NO: 1334157 - RNA, 19 nt, Artificial Sequence
  Description of Artificial Sequence: Synthetic oligonucleotide
  Antisense strand to SEQ ID NO: 1334156
cuaugccagggcuaauucu

SEQ ID NO: 1334158 - RNA, 19 nt, Artificial Sequence
  Description of Artificial Sequence: Synthetic oligonucleotide
  Sense strand starting at position 715 of SEQ ID NO: 1242257
ccuggcauagcuuauuaca

SEQ ID NO: 1334159 - RNA, 19 nt, Artificial Sequence
  Description of Artificial Sequence: Synthetic oligonucleotide
  Antisense strand to SEQ ID NO: 1334158
uguaauaagcuaugccagg

SEQ ID NO: 1334160 - RNA, 19 nt, Artificial Sequence
  Description of Artificial Sequence: Synthetic oligonucleotide
  Sense strand starting at position 717 of SEQ ID NO: 1242257
uggcauagcuuauuacaaa

SEQ ID NO: 1334161 - RNA, 19 nt, Artificial Sequence
  Description of Artificial Sequence: Synthetic oligonucleotide
  Antisense strand to SEQ ID NO: 1334160
uuuguaauaagcuaugcca

SEQ ID NO: 1334162 - RNA, 19 nt, Artificial Sequence
  Description of Artificial Sequence: Synthetic oligonucleotide
  Sense strand starting at position 980 of SEQ ID NO: 1242257
aaaggauuguaguuuauag

SEQ ID NO: 1334163 - RNA, 19 nt, Artificial Sequence
  Description of Artificial Sequence: Synthetic oligonucleotide
  Antisense strand to SEQ ID NO: 1334162
cuauaaacuacaauccuuu

SEQ ID NO: 1334164 - RNA, 19 nt, Artificial Sequence
  Description of Artificial Sequence: Synthetic oligonucleotide
  Sense strand starting at position 982 of SEQ ID NO: 1242257
aggauuguaguuuauagua

SEQ ID NO: 1334165 - RNA, 19 nt, Artificial Sequence
  Description of Artificial Sequence: Synthetic oligonucleotide
  Antisense strand to SEQ ID NO: 1334164
uacuauaaacuacaauccu

SEQ ID NO: 1334166 - RNA, 19 nt, Artificial Sequence
  Description of Artificial Sequence: Synthetic oligonucleotide
  Sense strand starting at position 1000 of SEQ ID NO: 1242257
auguuauucucacuguaaa

SEQ ID NO: 1334167 - RNA, 19 nt, Artificial Sequence
  Description of Artificial Sequence: Synthetic oligonucleotide
  Antisense strand to SEQ ID NO: 1334166
uuuacagugagaauaacau

SEQ ID NO: 1334168 - RNA, 19 nt, Artificial Sequence
  Description of Artificial Sequence: Synthetic oligonucleotide
  Sense strand starting at position 1275 of SEQ ID NO: 1242257
uguaauuaucaauacguac

SEQ ID NO: 1334169 - RNA, 19 nt, Artificial Sequence
  Description of Artificial Sequence: Synthetic oligonucleotide
  Antisense strand to SEQ ID NO: 1334168
guacguauugauaauuaca

SEQ ID NO: 1334170 - RNA, 19 nt, Artificial Sequence
  Description of Artificial Sequence: Synthetic oligonucleotide
  Sense strand starting at position 1350 of SEQ ID NO: 1242257
auuuguaacuccuaggaag

SEQ ID NO: 1334171 - RNA, 19 nt, Artificial Sequence
  Description of Artificial Sequence: Synthetic oligonucleotide
  Antisense strand to SEQ ID NO: 1334170
cuuccuaggaguuacaaau

SEQ ID NO: 1334172 - RNA, 19 nt, Artificial Sequence
  Description of Artificial Sequence: Synthetic oligonucleotide
  Sense strand starting at position 1434 of SEQ ID NO: 1242257
ucauccuggccguaaauau

SEQ ID NO: 1334173 - RNA, 19 nt, Artificial Sequence
  Description of Artificial Sequence: Synthetic oligonucleotide
  Antisense strand to SEQ ID NO: 1334172
auauuuacggccaggauga

SEQ ID NO: 1334174 - RNA, 19 nt, Artificial Sequence
  Description of Artificial Sequence: Synthetic oligonucleotide
  Sense strand starting at position 1952 of SEQ ID NO: 1242257
cggcgccuuccuuucgaau

SEQ ID NO: 1334175 - RNA, 19 nt, Artificial Sequence
  Description of Artificial Sequence: Synthetic oligonucleotide
  Antisense strand to SEQ ID NO: 1334174
auucgaaaggaaggcgccg

SEQ ID NO: 1334176 - RNA, 19 nt, Artificial Sequence
  Description of Artificial Sequence: Synthetic oligonucleotide
  Sense strand starting at position 1953 of SEQ ID NO: 1242257
ggcgccuuccuuucgaaua

SEQ ID NO: 1334177 - RNA, 19 nt, Artificial Sequence
  Description of Artificial Sequence: Synthetic oligonucleotide
  Antisense strand to SEQ ID NO: 1334176
uauucgaaaggaaggcgcc

SEQ ID NO: 1334178 - RNA, 19 nt, Artificial Sequence
  Description of Artificial Sequence: Synthetic oligonucleotide
  Sense strand starting at position 2569 of SEQ ID NO: 1242257
gguagucccaguuagaacu

SEQ ID NO: 1334179 - RNA, 19 nt, Artificial Sequence
  Description of Artificial Sequence: Synthetic oligonucleotide
  Antisense strand to SEQ ID NO: 1334178
aguucuaacugggacuacc

SEQ ID NO: 1334180 - RNA, 19 nt, Artificial Sequence
  Description of Artificial Sequence: Synthetic oligonucleotide
  Sense strand starting at position 2661 of SEQ ID NO: 1242257
cucuauuccgagggauggu

SEQ ID NO: 1334181 - RNA, 19 nt, Artificial Sequence
  Description of Artificial Sequence: Synthetic oligonucleotide
  Antisense strand to SEQ ID NO: 1334180
accaucccucggaauagag

SEQ ID NO: 1334182 - RNA, 19 nt, Artificial Sequence
  Description of Artificial Sequence: Synthetic oligonucleotide
  Sense strand starting at position 2662 of SEQ ID NO: 1242257
ucuauuccgagggaugguu

SEQ ID NO: 1334183 - RNA, 19 nt, Artificial Sequence
  Description of Artificial Sequence: Synthetic oligonucleotide
  Antisense strand to SEQ ID NO: 1334182
aaccaucccucggaauaga

SEQ ID NO: 1334184 - RNA, 19 nt, Artificial Sequence
  Description of Artificial Sequence: Synthetic oligonucleotide
  Sense strand starting at position 2843 of SEQ ID NO: 1242257
uguaauauugccgauaauc

SEQ ID NO: 1334185 - RNA, 19 nt, Artificial Sequence
  Description of Artificial Sequence: Synthetic oligonucleotide
  Antisense strand to SEQ ID NO: 1334184
gauuaucggcaauauuaca

SEQ ID NO: 1334186 - RNA, 19 nt, Artificial Sequence
  Description of Artificial Sequence: Synthetic oligonucleotide
  Sense strand starting at position 2854 of SEQ ID NO: 1242257
cgauaaucucuugauacuu

SEQ ID NO: 1334187 - RNA, 19 nt, Artificial Sequence
  Description of Artificial Sequence: Synthetic oligonucleotide
  Antisense strand to SEQ ID NO: 1334186
aaguaucaagagauuaucg

SEQ ID NO: 1334188 - RNA, 19 nt, Artificial Sequence
  Description of Artificial Sequence: Synthetic oligonucleotide
  Sense strand starting at position 2913 of SEQ ID NO: 1242257
ggagcaccuccuuggguaa

SEQ ID NO: 1334189 - RNA, 19 nt, Artificial Sequence
  Description of Artificial Sequence: Synthetic oligonucleotide
  Antisense strand to SEQ ID NO: 1334188
uuacccaaggaggugcucc

SEQ ID NO: 1334190 - RNA, 19 nt, Artificial Sequence
  Description of Artificial Sequence: Synthetic oligonucleotide
  Sense strand starting at position 2914 of SEQ ID NO: 1242257
gagcaccuccuuggguaaa

SEQ ID NO: 1334191 - RNA, 19 nt, Artificial Sequence
  Description of Artificial Sequence: Synthetic oligonucleotide
  Antisense strand to SEQ ID NO: 1334190
uuuacccaaggaggugcuc

SEQ ID NO: 1334192 - RNA, 19 nt, Artificial Sequence
  Description of Artificial Sequence: Synthetic oligonucleotide
  Sense strand starting at position 2952 of SEQ ID NO: 1242257
gguugauggucucuaucaa

SEQ ID NO: 1334193 - RNA, 19 nt, Artificial Sequence
  Description of Artificial Sequence: Synthetic oligonucleotide
  Antisense strand to SEQ ID NO: 1334192
uugauagagaccaucaacc

SEQ ID NO: 1334194 - RNA, 19 nt, Artificial Sequence
  Description of Artificial Sequence: Synthetic oligonucleotide
  Sense strand starting at position 2953 of SEQ ID NO: 1242257
guugauggucucuaucaaa

SEQ ID NO: 1334195 - RNA, 19 nt, Artificial Sequence
  Description of Artificial Sequence: Synthetic oligonucleotide
  Antisense strand to SEQ ID NO: 1334194
uuugauagagaccaucaac

SEQ ID NO: 1334196 - RNA, 19 nt, Artificial Sequence
  Description of Artificial Sequence: Synthetic oligonucleotide
  Sense strand starting at position 2996 of SEQ ID NO: 1242257
gcuacaagauguuuggaga

SEQ ID NO: 1334197 - RNA, 19 nt, Artificial Sequence
  Description of Artificial Sequence: Synthetic oligonucleotide
  Antisense strand to SEQ ID NO: 1334196
ucuccaaacaucuuguagc

SEQ ID NO: 1334198 - RNA, 19 nt, Artificial Sequence
  Description of Artificial Sequence: Synthetic oligonucleotide
  Sense strand starting at position 3257 of SEQ ID NO: 1242257
cuccaacuucggugacaga

SEQ ID NO: 1334199 - RNA, 19 nt, Artificial Sequence
  Description of Artificial Sequence: Synthetic oligonucleotide
  Antisense strand to SEQ ID NO: 1334198
ucugucaccgaaguuggag

SEQ ID NO: 1334200 - RNA, 19 nt, Artificial Sequence
  Description of Artificial Sequence: Synthetic oligonucleotide
  Sense strand starting at position 3373 of SEQ ID NO: 1242257
uuguuaauaguugagacuu

SEQ ID NO: 1334201 - RNA, 19 nt, Artificial Sequence
  Description of Artificial Sequence: Synthetic oligonucleotide
  Antisense strand to SEQ ID NO: 1334200
aagucucaacuauuaacaa

SEQ ID NO: 1334202 - RNA, 19 nt, Artificial Sequence
  Description of Artificial Sequence: Synthetic oligonucleotide
  Sense strand starting at position 3381 of SEQ ID NO: 1242257
aguugagacuucccacaua

SEQ ID NO: 1334203 - RNA, 19 nt, Artificial Sequence
  Description of Artificial Sequence: Synthetic oligonucleotide
  Antisense strand to SEQ ID NO: 1334202
uaugugggaagucucaacu

SEQ ID NO: 1334204 - RNA, 19 nt, Artificial Sequence
  Description of Artificial Sequence: Synthetic oligonucleotide
  Sense strand starting at position 3406 of SEQ ID NO: 1242257
cuauauacucuggagguuu

SEQ ID NO: 1334205 - RNA, 19 nt, Artificial Sequence
  Description of Artificial Sequence: Synthetic oligonucleotide
  Antisense strand to SEQ ID NO: 1334204
aaaccuccagaguauauag

SEQ ID NO: 1334206 - RNA, 19 nt, Artificial Sequence
  Description of Artificial Sequence: Synthetic oligonucleotide
  Sense strand starting at position 3438 of SEQ ID NO: 1242257
ugauacugacagugaguaa

SEQ ID NO: 1334207 - RNA, 19 nt, Artificial Sequence
  Description of Artificial Sequence: Synthetic oligonucleotide
  Antisense strand to SEQ ID NO: 1334206
uuacucacugucaguauca

SEQ ID NO: 1334208 - RNA, 19 nt, Artificial Sequence
  Description of Artificial Sequence: Synthetic oligonucleotide
  Sense strand starting at position 3449 of SEQ ID NO: 1242257
gugaguaaaugcuuaaauc

SEQ ID NO: 1334209 - RNA, 19 nt, Artificial Sequence
  Description of Artificial Sequence: Synthetic oligonucleotide
  Antisense strand to SEQ ID NO: 1334208
gauuuaagcauuuacucac

SEQ ID NO: 1334210 - RNA, 19 nt, Artificial Sequence
  Description of Artificial Sequence: Synthetic oligonucleotide
  Sense strand starting at position 3450 of SEQ ID NO: 1242257
ugaguaaaugcuuaaauca

SEQ ID NO: 1334211 - RNA, 19 nt, Artificial Sequence
  Description of Artificial Sequence: Synthetic oligonucleotide
  Antisense strand to SEQ ID NO: 1334210
ugauuuaagcauuuacuca

SEQ ID NO: 1334212 - RNA, 19 nt, Artificial Sequence
  Description of Artificial Sequence: Synthetic oligonucleotide
  Sense strand starting at position 3790 of SEQ ID NO: 1242257
cgaccuaaauuguuuaaac

SEQ ID NO: 1334213 - RNA, 19 nt, Artificial Sequence
  Description of Artificial Sequence: Synthetic oligonucleotide
  Antisense strand to SEQ ID NO: 1334212
guuuaaacaauuuaggucg

SEQ ID NO: 1334214 - RNA, 19 nt, Artificial Sequence
  Description of Artificial Sequence: Synthetic oligonucleotide
  Sense strand starting at position 3932 of SEQ ID NO: 1242257
gccuaaauuccuuaggcuu

SEQ ID NO: 1334215 - RNA, 19 nt, Artificial Sequence
  Description of Artificial Sequence: Synthetic oligonucleotide
  Antisense strand to SEQ ID NO: 1334214
aagccuaaggaauuuaggc

SEQ ID NO: 1334216 - RNA, 19 nt, Artificial Sequence
  Description of Artificial Sequence: Synthetic oligonucleotide
  Sense strand starting at position 3982 of SEQ ID NO: 1242257
ggcugcaucccugaacacu

SEQ ID NO: 1334217 - RNA, 19 nt, Artificial Sequence
  Description of Artificial Sequence: Synthetic oligonucleotide
  Antisense strand to SEQ ID NO: 1334216
aguguucagggaugcagcc

SEQ ID NO: 1334218 - RNA, 19 nt, Artificial Sequence
  Description of Artificial Sequence: Synthetic oligonucleotide
  Sense strand starting at position 23 of SEQ ID NO: 1242258
aaugcaaaguccucaggga

SEQ ID NO: 1334219 - RNA, 19 nt, Artificial Sequence
  Description of Artificial Sequence: Synthetic oligonucleotide
  Antisense strand to SEQ ID NO: 1334218
ucccugaggacuuugcauu

SEQ ID NO: 1334220 - RNA, 19 nt, Artificial Sequence
  Description of Artificial Sequence: Synthetic oligonucleotide
  Sense strand starting at position 164 of SEQ ID NO: 1242258
uuacaacucgucugugcua

SEQ ID NO: 1334221 - RNA, 19 nt, Artificial Sequence
  Description of Artificial Sequence: Synthetic oligonucleotide
  Antisense strand to SEQ ID NO: 1334220
uagcacagacgaguuguaa

SEQ ID NO: 1334222 - RNA, 19 nt, Artificial Sequence
  Description of Artificial Sequence: Synthetic oligonucleotide
  Sense strand starting at position 166 of SEQ ID NO: 1242258
acaacucgucugugcuaca

SEQ ID NO: 1334223 - RNA, 19 nt, Artificial Sequence
  Description of Artificial Sequence: Synthetic oligonucleotide
  Antisense strand to SEQ ID NO: 1334222
uguagcacagacgaguugu

SEQ ID NO: 1334224 - RNA, 19 nt, Artificial Sequence
  Description of Artificial Sequence: Synthetic oligonucleotide
  Sense strand starting at position 217 of SEQ ID NO: 1242258
cccauacucuuagauugag

SEQ ID NO: 1334225 - RNA, 19 nt, Artificial Sequence
  Description of Artificial Sequence: Synthetic oligonucleotide
  Antisense strand to SEQ ID NO: 1334224
cucaaucuaagaguauggg

SEQ ID NO: 1334226 - RNA, 19 nt, Artificial Sequence
  Description of Artificial Sequence: Synthetic oligonucleotide
  Sense strand starting at position 331 of SEQ ID NO: 1242258
gcgccugggaugugucaga

SEQ ID NO: 1334227 - RNA, 19 nt, Artificial Sequence
  Description of Artificial Sequence: Synthetic oligonucleotide
  Antisense strand to SEQ ID NO: 1334226
ucugacacaucccaggcgc

SEQ ID NO: 1334228 - RNA, 19 nt, Artificial Sequence
  Description of Artificial Sequence: Synthetic oligonucleotide
  Sense strand starting at position 338 of SEQ ID NO: 1242258
ggaugugucagagguaccu

SEQ ID NO: 1334229 - RNA, 19 nt, Artificial Sequence
  Description of Artificial Sequence: Synthetic oligonucleotide
  Antisense strand to SEQ ID NO: 1334228
agguaccucugacacaucc

SEQ ID NO: 1334230 - RNA, 19 nt, Artificial Sequence
  Description of Artificial Sequence: Synthetic oligonucleotide
  Sense strand starting at position 350 of SEQ ID NO: 1242258
gguaccugcgaggaacauu

SEQ ID NO: 1334231 - RNA, 19 nt, Artificial Sequence
  Description of Artificial Sequence: Synthetic oligonucleotide
  Antisense strand to SEQ ID NO: 1334230
aauguuccucgcagguacc

SEQ ID NO: 1334232 - RNA, 19 nt, Artificial Sequence
  Description of Artificial Sequence: Synthetic oligonucleotide
  Sense strand starting at position 360 of SEQ ID NO: 1242258
aggaacauuugcgugcgau

SEQ ID NO: 1334233 - RNA, 19 nt, Artificial Sequence
  Description of Artificial Sequence: Synthetic oligonucleotide
  Antisense strand to SEQ ID NO: 1334232
aucgcacgcaaauguuccu

SEQ ID NO: 1334234 - RNA, 19 nt, Artificial Sequence
  Description of Artificial Sequence: Synthetic oligonucleotide
  Sense strand starting at position 361 of SEQ ID NO: 1242258
ggaacauuugcgugcgauu

SEQ ID NO: 1334235 - RNA, 19 nt, Artificial Sequence
  Description of Artificial Sequence: Synthetic oligonucleotide
  Antisense strand to SEQ ID NO: 1334234
aaucgcacgcaaauguucc

SEQ ID NO: 1334236 - RNA, 19 nt, Artificial Sequence
  Description of Artificial Sequence: Synthetic oligonucleotide
  Sense strand starting at position 458 of SEQ ID NO: 1242258
gggauuucucuccgccuca

SEQ ID NO: 1334237 - RNA, 19 nt, Artificial Sequence
  Description of Artificial Sequence: Synthetic oligonucleotide
  Antisense strand to SEQ ID NO: 1334236
ugaggcggagagaaauccc

SEQ ID NO: 1334238 - RNA, 19 nt, Artificial Sequence
  Description of Artificial Sequence: Synthetic oligonucleotide
  Sense strand starting at position 573 of SEQ ID NO: 1242258
cacccugagcccuggagua

SEQ ID NO: 1334239 - RNA, 19 nt, Artificial Sequence
  Description of Artificial Sequence: Synthetic oligonucleotide
  Antisense strand to SEQ ID NO: 1334238
uacuccagggcucagggug

SEQ ID NO: 1334240 - RNA, 19 nt, Artificial Sequence
  Description of Artificial Sequence: Synthetic oligonucleotide
  Sense strand starting at position 716 of SEQ ID NO: 1242258
ucggcuuucguguaccuua

SEQ ID NO: 1334241 - RNA, 19 nt, Artificial Sequence
  Description of Artificial Sequence: Synthetic oligonucleotide
  Antisense strand to SEQ ID NO: 1334240
uaagguacacgaaagccga

SEQ ID NO: 1334242 - RNA, 19 nt, Artificial Sequence
  Description of Artificial Sequence: Synthetic oligonucleotide
  Sense strand starting at position 846 of SEQ ID NO: 1242258
cggauuugaguuugcucca

SEQ ID NO: 1334243 - RNA, 19 nt, Artificial Sequence
  Description of Artificial Sequence: Synthetic oligonucleotide
  Antisense strand to SEQ ID NO: 1334242
uggagcaaacucaaauccg

SEQ ID NO: 1334244 - RNA, 19 nt, Artificial Sequence
  Description of Artificial Sequence: Synthetic oligonucleotide
  Sense strand starting at position 851 of SEQ ID NO: 1242258
uugaguuugcuccaggguu

SEQ ID NO: 1334245 - RNA, 19 nt, Artificial Sequence
  Description of Artificial Sequence: Synthetic oligonucleotide
  Antisense strand to SEQ ID NO: 1334244
aacccuggagcaaacucaa

SEQ ID NO: 1334246 - RNA, 19 nt, Artificial Sequence
  Description of Artificial Sequence: Synthetic oligonucleotide
  Sense strand starting at position 954 of SEQ ID NO: 1242258
gcuugagcucgguggugau

SEQ ID NO: 1334247 - RNA, 19 nt, Artificial Sequence
  Description of Artificial Sequence: Synthetic oligonucleotide
  Antisense strand to SEQ ID NO: 1334246
aucaccaccgagcucaagc

SEQ ID NO: 1334248 - RNA, 19 nt, Artificial Sequence
  Description of Artificial Sequence: Synthetic oligonucleotide
  Sense strand starting at position 978 of SEQ ID NO: 1242258
gcgccaccucuuugguauu

SEQ ID NO: 1334249 - RNA, 19 nt, Artificial Sequence
  Description of Artificial Sequence: Synthetic oligonucleotide
  Antisense strand to SEQ ID NO: 1334248
aauaccaaagagguggcgc

SEQ ID NO: 1334250 - RNA, 19 nt, Artificial Sequence
  Description of Artificial Sequence: Synthetic oligonucleotide
  Sense strand starting at position 990 of SEQ ID NO: 1242258
ugguauugaucucuuccau

SEQ ID NO: 1334251 - RNA, 19 nt, Artificial Sequence
  Description of Artificial Sequence: Synthetic oligonucleotide
  Antisense strand to SEQ ID NO: 1334250
auggaagagaucaauacca

SEQ ID NO: 1334252 - RNA, 19 nt, Artificial Sequence
  Description of Artificial Sequence: Synthetic oligonucleotide
  Sense strand starting at position 1067 of SEQ ID NO: 1242258
cgggcugugcccaggaguu

SEQ ID NO: 1334253 - RNA, 19 nt, Artificial Sequence
  Description of Artificial Sequence: Synthetic oligonucleotide
  Antisense strand to SEQ ID NO: 1334252
aacuccugggcacagcccg

SEQ ID NO: 1334254 - RNA, 19 nt, Artificial Sequence
  Description of Artificial Sequence: Synthetic oligonucleotide
  Sense strand starting at position 1236 of SEQ ID NO: 1242258
gcaucuugucggugggcau

SEQ ID NO: 1334255 - RNA, 19 nt, Artificial Sequence
  Description of Artificial Sequence: Synthetic oligonucleotide
  Antisense strand to SEQ ID NO: 1334254
augcccaccgacaagaugc

SEQ ID NO: 1334256 - RNA, 19 nt, Artificial Sequence
  Description of Artificial Sequence: Synthetic oligonucleotide
  Sense strand starting at position 1374 of SEQ ID NO: 1242258
ggguauagagguuauucau

SEQ ID NO: 1334257 - RNA, 19 nt, Artificial Sequence
  Description of Artificial Sequence: Synthetic oligonucleotide
  Antisense strand to SEQ ID NO: 1334256
augaauaaccucuauaccc

SEQ ID NO: 1334258 - RNA, 19 nt, Artificial Sequence
  Description of Artificial Sequence: Synthetic oligonucleotide
  Sense strand starting at position 1505 of SEQ ID NO: 1242258
gggaacuuguccgagacug

SEQ ID NO: 1334259 - RNA, 19 nt, Artificial Sequence
  Description of Artificial Sequence: Synthetic oligonucleotide
  Antisense strand to SEQ ID NO: 1334258
cagucucggacaaguuccc

SEQ ID NO: 1334260 - RNA, 19 nt, Artificial Sequence
  Description of Artificial Sequence: Synthetic oligonucleotide
  Sense strand starting at position 1507 of SEQ ID NO: 1242258
gaacuuguccgagacugug

SEQ ID NO: 1334261 - RNA, 19 nt, Artificial Sequence
  Description of Artificial Sequence: Synthetic oligonucleotide
  Antisense strand to SEQ ID NO: 1334260
cacagucucggacaaguuc

SEQ ID NO: 1334262 - RNA, 19 nt, Artificial Sequence
  Description of Artificial Sequence: Synthetic oligonucleotide
  Sense strand starting at position 2303 of SEQ ID NO: 1242258
gagccauggcucuguuacu

SEQ ID NO: 1334263 - RNA, 19 nt, Artificial Sequence
  Description of Artificial Sequence: Synthetic oligonucleotide
  Antisense strand to SEQ ID NO: 1334262
aguaacagagccauggcuc

SEQ ID NO: 1334264 - RNA, 19 nt, Artificial Sequence
  Description of Artificial Sequence: Synthetic oligonucleotide
  Sense strand starting at position 2524 of SEQ ID NO: 1242258
cgggcacgugcgaaagauu

SEQ ID NO: 1334265 - RNA, 19 nt, Artificial Sequence
  Description of Artificial Sequence: Synthetic oligonucleotide
  Antisense strand to SEQ ID NO: 1334264
aaucuuucgcacgugcccg

SEQ ID NO: 1334266 - RNA, 19 nt, Artificial Sequence
  Description of Artificial Sequence: Synthetic oligonucleotide
  Sense strand starting at position 2569 of SEQ ID NO: 1242258
gcugcaaucccaggagacu

SEQ ID NO: 1334267 - RNA, 19 nt, Artificial Sequence
  Description of Artificial Sequence: Synthetic oligonucleotide
  Antisense strand to SEQ ID NO: 1334266
agucuccugggauugcagc

SEQ ID NO: 1334268 - RNA, 19 nt, Artificial Sequence
  Description of Artificial Sequence: Synthetic oligonucleotide
  Sense strand starting at position 2671 of SEQ ID NO: 1242258
ggagugcugugcuuggaga

SEQ ID NO: 1334269 - RNA, 19 nt, Artificial Sequence
  Description of Artificial Sequence: Synthetic oligonucleotide
  Antisense strand to SEQ ID NO: 1334268
ucuccaagcacagcacucc

SEQ ID NO: 1334270 - RNA, 19 nt, Artificial Sequence
  Description of Artificial Sequence: Synthetic oligonucleotide
  Sense strand starting at position 2673 of SEQ ID NO: 1242258
agugcugugcuuggagaca

SEQ ID NO: 1334271 - RNA, 19 nt, Artificial Sequence
  Description of Artificial Sequence: Synthetic oligonucleotide
  Antisense strand to SEQ ID NO: 1334270
ugucuccaagcacagcacu

SEQ ID NO: 1334272 - RNA, 19 nt, Artificial Sequence
  Description of Artificial Sequence: Synthetic oligonucleotide
  Sense strand starting at position 2924 of SEQ ID NO: 1242258
uucguccucccagauacau

SEQ ID NO: 1334273 - RNA, 19 nt, Artificial Sequence
  Description of Artificial Sequence: Synthetic oligonucleotide
  Antisense strand to SEQ ID NO: 1334272
auguaucugggaggacgaa

SEQ ID NO: 1334274 - RNA, 19 nt, Artificial Sequence
  Description of Artificial Sequence: Synthetic oligonucleotide
  Sense strand starting at position 2978 of SEQ ID NO: 1242258
aggaguaaucagugccaag

SEQ ID NO: 1334275 - RNA, 19 nt, Artificial Sequence
  Description of Artificial Sequence: Synthetic oligonucleotide
  Antisense strand to SEQ ID NO: 1334274
cuuggcacugauuacuccu

SEQ ID NO: 1334276 - RNA, 19 nt, Artificial Sequence
  Description of Artificial Sequence: Synthetic oligonucleotide
  Sense strand starting at position 2981 of SEQ ID NO: 1242258
aguaaucagugccaagaau

SEQ ID NO: 1334277 - RNA, 19 nt, Artificial Sequence
  Description of Artificial Sequence: Synthetic oligonucleotide
  Antisense strand to SEQ ID NO: 1334276
auucuuggcacugauuacu

SEQ ID NO: 1334278 - RNA, 19 nt, Artificial Sequence
  Description of Artificial Sequence: Synthetic oligonucleotide
  Sense strand starting at position 3046 of SEQ ID NO: 1242258
ucccgcucagcucauaauu

SEQ ID NO: 1334279 - RNA, 19 nt, Artificial Sequence
  Description of Artificial Sequence: Synthetic oligonucleotide
  Antisense strand to SEQ ID NO: 1334278
aauuaugagcugagcggga

SEQ ID NO: 1334280 - RNA, 19 nt, Artificial Sequence
  Description of Artificial Sequence: Synthetic oligonucleotide
  Sense strand starting at position 3234 of SEQ ID NO: 1242258
ggcgguugcuuuccagaag

SEQ ID NO: 1334281 - RNA, 19 nt, Artificial Sequence
  Description of Artificial Sequence: Synthetic oligonucleotide
  Antisense strand to SEQ ID NO: 1334280
cuucuggaaagcaaccgcc

SEQ ID NO: 1334282 - RNA, 19 nt, Artificial Sequence
  Description of Artificial Sequence: Synthetic oligonucleotide
  Sense strand starting at position 3237 of SEQ ID NO: 1242258
gguugcuuuccagaaguac

SEQ ID NO: 1334283 - RNA, 19 nt, Artificial Sequence
  Description of Artificial Sequence: Synthetic oligonucleotide
  Antisense strand to SEQ ID NO: 1334282
guacuucuggaaagcaacc

SEQ ID NO: 1334284 - RNA, 19 nt, Artificial Sequence
  Description of Artificial Sequence: Synthetic oligonucleotide
  Sense strand starting at position 3580 of SEQ ID NO: 1242258
gacagaugugcccauuguc

SEQ ID NO: 1334285 - RNA, 19 nt, Artificial Sequence
  Description of Artificial Sequence: Synthetic oligonucleotide
  Antisense strand to SEQ ID NO: 1334284
gacaaugggcacaucuguc

SEQ ID NO: 1334286 - RNA, 19 nt, Artificial Sequence
  Description of Artificial Sequence: Synthetic oligonucleotide
  Sense strand starting at position 3607 of SEQ ID NO: 1242258
ggcaguuauggccggguca

SEQ ID NO: 1334287 - RNA, 19 nt, Artificial Sequence
  Description of Artificial Sequence: Synthetic oligonucleotide
  Antisense strand to SEQ ID NO: 1334286
ugacccggccauaacugcc

SEQ ID NO: 1334288 - RNA, 19 nt, Artificial Sequence
  Description of Artificial Sequence: Synthetic oligonucleotide
  Sense strand starting at position 3649 of SEQ ID NO: 1242258
agcggugguuacaaugaga

SEQ ID NO: 1334289 - RNA, 19 nt, Artificial Sequence
  Description of Artificial Sequence: Synthetic oligonucleotide
  Antisense strand to SEQ ID NO: 1334288
ucucauuguaaccaccgcu

SEQ ID NO: 1334290 - RNA, 19 nt, Artificial Sequence
  Description of Artificial Sequence: Synthetic oligonucleotide
  Sense strand starting at position 3693 of SEQ ID NO: 1242258
ggacucagauauggaauaa

SEQ ID NO: 1334291 - RNA, 19 nt, Artificial Sequence
  Description of Artificial Sequence: Synthetic oligonucleotide
  Antisense strand to SEQ ID NO: 1334290
uuauuccauaucugagucc

SEQ ID NO: 1334292 - RNA, 19 nt, Artificial Sequence
  Description of Artificial Sequence: Synthetic oligonucleotide
  Sense strand starting at position 3787 of SEQ ID NO: 1242258
ugguguuuccacugcaaau

SEQ ID NO: 1334293 - RNA, 19 nt, Artificial Sequence
  Description of Artificial Sequence: Synthetic oligonucleotide
  Antisense strand to SEQ ID NO: 1334292
auuugcaguggaaacacca

SEQ ID NO: 1334294 - RNA, 19 nt, Artificial Sequence
  Description of Artificial Sequence: Synthetic oligonucleotide
  Sense strand starting at position 3878 of SEQ ID NO: 1242258
uggccaacccuuugggaaa

SEQ ID NO: 1334295 - RNA, 19 nt, Artificial Sequence
  Description of Artificial Sequence: Synthetic oligonucleotide
  Antisense strand to SEQ ID NO: 1334294
uuucccaaaggguuggcca

SEQ ID NO: 1334296 - RNA, 19 nt, Artificial Sequence
  Description of Artificial Sequence: Synthetic oligonucleotide
  Sense strand starting at position 3980 of SEQ ID NO: 1242258
ggucaaguucaguggauac

SEQ ID NO: 1334297 - RNA, 19 nt, Artificial Sequence
  Description of Artificial Sequence: Synthetic oligonucleotide
  Antisense strand to SEQ ID NO: 1334296
guauccacugaacuugacc

SEQ ID NO: 1334298 - RNA, 19 nt, Artificial Sequence
  Description of Artificial Sequence: Synthetic oligonucleotide
  Sense strand starting at position 57 of SEQ ID NO: 1242259
agggcacugaccuagcaau

SEQ ID NO: 1334299 - RNA, 19 nt, Artificial Sequence
  Description of Artificial Sequence: Synthetic oligonucleotide
  Antisense strand to SEQ ID NO: 1334298
auugcuaggucagugcccu

SEQ ID NO: 1334300 - RNA, 19 nt, Artificial Sequence
  Description of Artificial Sequence: Synthetic oligonucleotide
  Sense strand starting at position 70 of SEQ ID NO: 1242259
agcaaucagagucaugguu

SEQ ID NO: 1334301 - RNA, 19 nt, Artificial Sequence
  Description of Artificial Sequence: Synthetic oligonucleotide
  Antisense strand to SEQ ID NO: 1334300
aaccaugacucugauugcu

SEQ ID NO: 1334302 - RNA, 19 nt, Artificial Sequence
  Description of Artificial Sequence: Synthetic oligonucleotide
  Sense strand starting at position 105 of SEQ ID NO: 1242259
cuuugaugguuuccagcua

SEQ ID NO: 1334303 - RNA, 19 nt, Artificial Sequence
  Description of Artificial Sequence: Synthetic oligonucleotide
  Antisense strand to SEQ ID NO: 1334302
uagcuggaaaccaucaaag

SEQ ID NO: 1334304 - RNA, 19 nt, Artificial Sequence
  Description of Artificial Sequence: Synthetic oligonucleotide
  Sense strand starting at position 146 of SEQ ID NO: 1242259
acugcucaauucuuggauu

SEQ ID NO: 1334305 - RNA, 19 nt, Artificial Sequence
  Description of Artificial Sequence: Synthetic oligonucleotide
  Antisense strand to SEQ ID NO: 1334304
aauccaagaauugagcagu

SEQ ID NO: 1334306 - RNA, 19 nt, Artificial Sequence
  Description of Artificial Sequence: Synthetic oligonucleotide
  Sense strand starting at position 698 of SEQ ID NO: 1242259
auaggaguuaggugguaaa

SEQ ID NO: 1334307 - RNA, 19 nt, Artificial Sequence
  Description of Artificial Sequence: Synthetic oligonucleotide
  Antisense strand to SEQ ID NO: 1334306
uuuaccaccuaacuccuau

SEQ ID NO: 1334308 - RNA, 19 nt, Artificial Sequence
  Description of Artificial Sequence: Synthetic oligonucleotide
  Sense strand starting at position 710 of SEQ ID NO: 1242259
ugguaaacagauugaaugu

SEQ ID NO: 1334309 - RNA, 19 nt, Artificial Sequence
  Description of Artificial Sequence: Synthetic oligonucleotide
  Antisense strand to SEQ ID NO: 1334308
acauucaaucuguuuacca

SEQ ID NO: 1334310 - RNA, 19 nt, Artificial Sequence
  Description of Artificial Sequence: Synthetic oligonucleotide
  Sense strand starting at position 716 of SEQ ID NO: 1242259
acagauugaauguguaguu

SEQ ID NO: 1334311 - RNA, 19 nt, Artificial Sequence
  Description of Artificial Sequence: Synthetic oligonucleotide
  Antisense strand to SEQ ID NO: 1334310
aacuacacauucaaucugu

SEQ ID NO: 1334312 - RNA, 19 nt, Artificial Sequence
  Description of Artificial Sequence: Synthetic oligonucleotide
  Sense strand starting at position 717 of SEQ ID NO: 1242259
cagauugaauguguaguuu

SEQ ID NO: 1334313 - RNA, 19 nt, Artificial Sequence
  Description of Artificial Sequence: Synthetic oligonucleotide
  Antisense strand to SEQ ID NO: 1334312
aaacuacacauucaaucug

SEQ ID NO: 1334314 - RNA, 19 nt, Artificial Sequence
  Description of Artificial Sequence: Synthetic oligonucleotide
  Sense strand starting at position 723 of SEQ ID NO: 1242259
gaauguguaguuugucuau

SEQ ID NO: 1334315 - RNA, 19 nt, Artificial Sequence
  Description of Artificial Sequence: Synthetic oligonucleotide
  Antisense strand to SEQ ID NO: 1334314
auagacaaacuacacauuc

SEQ ID NO: 1334316 - RNA, 19 nt, Artificial Sequence
  Description of Artificial Sequence: Synthetic oligonucleotide
  Sense strand starting at position 725 of SEQ ID NO: 1242259
auguguaguuugucuauca

SEQ ID NO: 1334317 - RNA, 19 nt, Artificial Sequence
  Description of Artificial Sequence: Synthetic oligonucleotide
  Antisense strand to SEQ ID NO: 1334316
ugauagacaaacuacacau

SEQ ID NO: 1334318 - RNA, 19 nt, Artificial Sequence
  Description of Artificial Sequence: Synthetic oligonucleotide
  Sense strand starting at position 726 of SEQ ID NO: 1242259
uguguaguuugucuaucaa

SEQ ID NO: 1334319 - RNA, 19 nt, Artificial Sequence
  Description of Artificial Sequence: Synthetic oligonucleotide
  Antisense strand to SEQ ID NO: 1334318
uugauagacaaacuacaca

SEQ ID NO: 1334320 - RNA, 19 nt, Artificial Sequence
  Description of Artificial Sequence: Synthetic oligonucleotide
  Sense strand starting at position 744 of SEQ ID NO: 1242259
auagaauaaucuguccagu

SEQ ID NO: 1334321 - RNA, 19 nt, Artificial Sequence
  Description of Artificial Sequence: Synthetic oligonucleotide
  Antisense strand to SEQ ID NO: 1334320
acuggacagauuauucuau

SEQ ID NO: 1334322 - RNA, 19 nt, Artificial Sequence
  Description of Artificial Sequence: Synthetic oligonucleotide
  Sense strand starting at position 746 of SEQ ID NO: 1242259
agaauaaucuguccaguag

SEQ ID NO: 1334323 - RNA, 19 nt, Artificial Sequence
  Description of Artificial Sequence: Synthetic oligonucleotide
  Antisense strand to SEQ ID NO: 1334322
cuacuggacagauuauucu

SEQ ID NO: 1334324 - RNA, 19 nt, Artificial Sequence
  Description of Artificial Sequence: Synthetic oligonucleotide
  Sense strand starting at position 908 of SEQ ID NO: 1242259
cuucuaauuuaauggugaa

SEQ ID NO: 1334325 - RNA, 19 nt, Artificial Sequence
  Description of Artificial Sequence: Synthetic oligonucleotide
  Antisense strand to SEQ ID NO: 1334324
uucaccauuaaauuagaag

SEQ ID NO: 1334326 - RNA, 19 nt, Artificial Sequence
  Description of Artificial Sequence: Synthetic oligonucleotide
  Sense strand starting at position 922 of SEQ ID NO: 1242259
gugaaauuguuaccaugau

SEQ ID NO: 1334327 - RNA, 19 nt, Artificial Sequence
  Description of Artificial Sequence: Synthetic oligonucleotide
  Antisense strand to SEQ ID NO: 1334326
aucaugguaacaauuucac

SEQ ID NO: 1334328 - RNA, 19 nt, Artificial Sequence
  Description of Artificial Sequence: Synthetic oligonucleotide
  Sense strand starting at position 959 of SEQ ID NO: 1242259
uauaguauggccugagucu

SEQ ID NO: 1334329 - RNA, 19 nt, Artificial Sequence
  Description of Artificial Sequence: Synthetic oligonucleotide
  Antisense strand to SEQ ID NO: 1334328
agacucaggccauacuaua

SEQ ID NO: 1334330 - RNA, 19 nt, Artificial Sequence
  Description of Artificial Sequence: Synthetic oligonucleotide
  Sense strand starting at position 960 of SEQ ID NO: 1242259
auaguauggccugagucuu

SEQ ID NO: 1334331 - RNA, 19 nt, Artificial Sequence
  Description of Artificial Sequence: Synthetic oligonucleotide
  Antisense strand to SEQ ID NO: 1334330
aagacucaggccauacuau

SEQ ID NO: 1334332 - RNA, 19 nt, Artificial Sequence
  Description of Artificial Sequence: Synthetic oligonucleotide
  Sense strand starting at position 1026 of SEQ ID NO: 1242259
aguaauccauaguuacaca

SEQ ID NO: 1334333 - RNA, 19 nt, Artificial Sequence
  Description of Artificial Sequence: Synthetic oligonucleotide
  Antisense strand to SEQ ID NO: 1334332
uguguaacuauggauuacu

SEQ ID NO: 1334334 - RNA, 19 nt, Artificial Sequence
  Description of Artificial Sequence: Synthetic oligonucleotide
  Sense strand starting at position 2026 of SEQ ID NO: 1242259
ucauguuacuuaccugaag

SEQ ID NO: 1334335 - RNA, 19 nt, Artificial Sequence
  Description of Artificial Sequence: Synthetic oligonucleotide
  Antisense strand to SEQ ID NO: 1334334
cuucagguaaguaacauga

SEQ ID NO: 1334336 - RNA, 19 nt, Artificial Sequence
  Description of Artificial Sequence: Synthetic oligonucleotide
  Sense strand starting at position 2063 of SEQ ID NO: 1242259
agaauuaccuaggcaagua

SEQ ID NO: 1334337 - RNA, 19 nt, Artificial Sequence
  Description of Artificial Sequence: Synthetic oligonucleotide
  Antisense strand to SEQ ID NO: 1334336
uacuugccuagguaauucu

SEQ ID NO: 1334338 - RNA, 19 nt, Artificial Sequence
  Description of Artificial Sequence: Synthetic oligonucleotide
  Sense strand starting at position 2197 of SEQ ID NO: 1242259
ggcugcuauuuggcauuau

SEQ ID NO: 1334339 - RNA, 19 nt, Artificial Sequence
  Description of Artificial Sequence: Synthetic oligonucleotide
  Antisense strand to SEQ ID NO: 1334338
auaaugccaaauagcagcc

SEQ ID NO: 1334340 - RNA, 19 nt, Artificial Sequence
  Description of Artificial Sequence: Synthetic oligonucleotide
  Sense strand starting at position 2301 of SEQ ID NO: 1242259
ugauccuucccaggauguu

SEQ ID NO: 1334341 - RNA, 19 nt, Artificial Sequence
  Description of Artificial Sequence: Synthetic oligonucleotide
  Antisense strand to SEQ ID NO: 1334340
aacauccugggaaggauca

SEQ ID NO: 1334342 - RNA, 19 nt, Artificial Sequence
  Description of Artificial Sequence: Synthetic oligonucleotide
  Sense strand starting at position 2315 of SEQ ID NO: 1242259
auguucuauuugggugaga

SEQ ID NO: 1334343 - RNA, 19 nt, Artificial Sequence
  Description of Artificial Sequence: Synthetic oligonucleotide
  Antisense strand to SEQ ID NO: 1334342
ucucacccaaauagaacau

SEQ ID NO: 1334344 - RNA, 19 nt, Artificial Sequence
  Description of Artificial Sequence: Synthetic oligonucleotide
  Sense strand starting at position 2320 of SEQ ID NO: 1242259
cuauuugggugagauauaa

SEQ ID NO: 1334345 - RNA, 19 nt, Artificial Sequence
  Description of Artificial Sequence: Synthetic oligonucleotide
  Antisense strand to SEQ ID NO: 1334344
uuauaucucacccaaauag

SEQ ID NO: 1334346 - RNA, 19 nt, Artificial Sequence
  Description of Artificial Sequence: Synthetic oligonucleotide
  Sense strand starting at position 2363 of SEQ ID NO: 1242259
augauuucuuaucaaugga

SEQ ID NO: 1334347 - RNA, 19 nt, Artificial Sequence
  Description of Artificial Sequence: Synthetic oligonucleotide
  Antisense strand to SEQ ID NO: 1334346
uccauugauaagaaaucau

SEQ ID NO: 1334348 - RNA, 19 nt, Artificial Sequence
  Description of Artificial Sequence: Synthetic oligonucleotide
  Sense strand starting at position 2568 of SEQ ID NO: 1242259
caaauucucgcuuaugugu

SEQ ID NO: 1334349 - RNA, 19 nt, Artificial Sequence
  Description of Artificial Sequence: Synthetic oligonucleotide
  Antisense strand to SEQ ID NO: 1334348
acacauaagcgagaauuug

SEQ ID NO: 1334350 - RNA, 19 nt, Artificial Sequence
  Description of Artificial Sequence: Synthetic oligonucleotide
  Sense strand starting at position 2573 of SEQ ID NO: 1242259
ucucgcuuaugugugaaau

SEQ ID NO: 1334351 - RNA, 19 nt, Artificial Sequence
  Description of Artificial Sequence: Synthetic oligonucleotide
  Antisense strand to SEQ ID NO: 1334350
auuucacacauaagcgaga

SEQ ID NO: 1334352 - RNA, 19 nt, Artificial Sequence
  Description of Artificial Sequence: Synthetic oligonucleotide
  Sense strand starting at position 2693 of SEQ ID NO: 1242259
guagacucuuggguauaga

SEQ ID NO: 1334353 - RNA, 19 nt, Artificial Sequence
  Description of Artificial Sequence: Synthetic oligonucleotide
  Antisense strand to SEQ ID NO: 1334352
ucuauacccaagagucuac

SEQ ID NO: 1334354 - RNA, 19 nt, Artificial Sequence
  Description of Artificial Sequence: Synthetic oligonucleotide
  Sense strand starting at position 2703 of SEQ ID NO: 1242259
ggguauagaagccguaacu

SEQ ID NO: 1334355 - RNA, 19 nt, Artificial Sequence
  Description of Artificial Sequence: Synthetic oligonucleotide
  Antisense strand to SEQ ID NO: 1334354
aguuacggcuucuauaccc

SEQ ID NO: 1334356 - RNA, 19 nt, Artificial Sequence
  Description of Artificial Sequence: Synthetic oligonucleotide
  Sense strand starting at position 2712 of SEQ ID NO: 1242259
agccguaacugauccacaa

SEQ ID NO: 1334357 - RNA, 19 nt, Artificial Sequence
  Description of Artificial Sequence: Synthetic oligonucleotide
  Antisense strand to SEQ ID NO: 1334356
uuguggaucaguuacggcu

SEQ ID NO: 1334358 - RNA, 19 nt, Artificial Sequence
  Description of Artificial Sequence: Synthetic oligonucleotide
  Sense strand starting at position 2716 of SEQ ID NO: 1242259
guaacugauccacaacggu

SEQ ID NO: 1334359 - RNA, 19 nt, Artificial Sequence
  Description of Artificial Sequence: Synthetic oligonucleotide
  Antisense strand to SEQ ID NO: 1334358
accguuguggaucaguuac

SEQ ID NO: 1334360 - RNA, 19 nt, Artificial Sequence
  Description of Artificial Sequence: Synthetic oligonucleotide
  Sense strand starting at position 2818 of SEQ ID NO: 1242259
guaaauuaaugagacugaa

SEQ ID NO: 1334361 - RNA, 19 nt, Artificial Sequence
  Description of Artificial Sequence: Synthetic oligonucleotide
  Antisense strand to SEQ ID NO: 1334360
uucagucucauuaauuuac

SEQ ID NO: 1334362 - RNA, 19 nt, Artificial Sequence
  Description of Artificial Sequence: Synthetic oligonucleotide
  Sense strand starting at position 2904 of SEQ ID NO: 1242259
caugccagucaggaauuau

SEQ ID NO: 1334363 - RNA, 19 nt, Artificial Sequence
  Description of Artificial Sequence: Synthetic oligonucleotide
  Antisense strand to SEQ ID NO: 1334362
auaauuccugacuggcaug

SEQ ID NO: 1334364 - RNA, 19 nt, Artificial Sequence
  Description of Artificial Sequence: Synthetic oligonucleotide
  Sense strand starting at position 3289 of SEQ ID NO: 1242259
guaucugcacucuggaaga

SEQ ID NO: 1334365 - RNA, 19 nt, Artificial Sequence
  Description of Artificial Sequence: Synthetic oligonucleotide
  Antisense strand to SEQ ID NO: 1334364
ucuuccagagugcagauac

SEQ ID NO: 1334366 - RNA, 19 nt, Artificial Sequence
  Description of Artificial Sequence: Synthetic oligonucleotide
  Sense strand starting at position 3414 of SEQ ID NO: 1242259
agaacaacugcccgaaaua

SEQ ID NO: 1334367 - RNA, 19 nt, Artificial Sequence
  Description of Artificial Sequence: Synthetic oligonucleotide
  Antisense strand to SEQ ID NO: 1334366
uauuucgggcaguuguucu

SEQ ID NO: 1334368 - RNA, 19 nt, Artificial Sequence
  Description of Artificial Sequence: Synthetic oligonucleotide
  Sense strand starting at position 3459 of SEQ ID NO: 1242259
aaguguuccugauuuaguc

SEQ ID NO: 1334369 - RNA, 19 nt, Artificial Sequence
  Description of Artificial Sequence: Synthetic oligonucleotide
  Antisense strand to SEQ ID NO: 1334368
gacuaaaucaggaacacuu

SEQ ID NO: 1334370 - RNA, 19 nt, Artificial Sequence
  Description of Artificial Sequence: Synthetic oligonucleotide
  Sense strand starting at position 3601 of SEQ ID NO: 1242259
aguucuuuacaguaaauac

SEQ ID NO: 1334371 - RNA, 19 nt, Artificial Sequence
  Description of Artificial Sequence: Synthetic oligonucleotide
  Antisense strand to SEQ ID NO: 1334370
guauuuacuguaaagaacu

SEQ ID NO: 1334372 - RNA, 19 nt, Artificial Sequence
  Description of Artificial Sequence: Synthetic oligonucleotide
  Sense strand starting at position 3701 of SEQ ID NO: 1242259
guuauauucuuacuguucu

SEQ ID NO: 1334373 - RNA, 19 nt, Artificial Sequence
  Description of Artificial Sequence: Synthetic oligonucleotide
  Antisense strand to SEQ ID NO: 1334372
agaacaguaagaauauaac

SEQ ID NO: 1334374 - RNA, 19 nt, Artificial Sequence
  Description of Artificial Sequence: Synthetic oligonucleotide
  Sense strand starting at position 3804 of SEQ ID NO: 1242259
ugcauuccuccuggagcuu

SEQ ID NO: 1334375 - RNA, 19 nt, Artificial Sequence
  Description of Artificial Sequence: Synthetic oligonucleotide
  Antisense strand to SEQ ID NO: 1334374
aagcuccaggaggaaugca

SEQ ID NO: 1334376 - RNA, 19 nt, Artificial Sequence
  Description of Artificial Sequence: Synthetic oligonucleotide
  Sense strand starting at position 3876 of SEQ ID NO: 1242259
ccuugcuuggcucaugaca

SEQ ID NO: 1334377 - RNA, 19 nt, Artificial Sequence
  Description of Artificial Sequence: Synthetic oligonucleotide
  Antisense strand to SEQ ID NO: 1334376
ugucaugagccaagcaagg

SEQ ID NO: 1334378 - RNA, 19 nt, Artificial Sequence
  Description of Artificial Sequence: Synthetic oligonucleotide
  Sense strand starting at position 38 of SEQ ID NO: 1242260
aaaugagcaucuguuaaga

SEQ ID NO: 1334379 - RNA, 19 nt, Artificial Sequence
  Description of Artificial Sequence: Synthetic oligonucleotide
  Antisense strand to SEQ ID NO: 1334378
ucuuaacagaugcucauuu

SEQ ID NO: 1334380 - RNA, 19 nt, Artificial Sequence
  Description of Artificial Sequence: Synthetic oligonucleotide
  Sense strand starting at position 51 of SEQ ID NO: 1242260
uuaagauugggauguguca

SEQ ID NO: 1334381 - RNA, 19 nt, Artificial Sequence
  Description of Artificial Sequence: Synthetic oligonucleotide
  Antisense strand to SEQ ID NO: 1334380
ugacacaucccaaucuuaa

SEQ ID NO: 1334382 - RNA, 19 nt, Artificial Sequence
  Description of Artificial Sequence: Synthetic oligonucleotide
  Sense strand starting at position 53 of SEQ ID NO: 1242260
aagauugggaugugucaua

SEQ ID NO: 1334383 - RNA, 19 nt, Artificial Sequence
  Description of Artificial Sequence: Synthetic oligonucleotide
  Antisense strand to SEQ ID NO: 1334382
uaugacacaucccaaucuu

SEQ ID NO: 1334384 - RNA, 19 nt, Artificial Sequence
  Description of Artificial Sequence: Synthetic oligonucleotide
  Sense strand starting at position 228 of SEQ ID NO: 1242260
gcauaauagguauaaucuc

SEQ ID NO: 1334385 - RNA, 19 nt, Artificial Sequence
  Description of Artificial Sequence: Synthetic oligonucleotide
  Antisense strand to SEQ ID NO: 1334384
gagauuauaccuauuaugc

SEQ ID NO: 1334386 - RNA, 19 nt, Artificial Sequence
  Description of Artificial Sequence: Synthetic oligonucleotide
  Sense strand starting at position 308 of SEQ ID NO: 1242260
uaauaagagucaguagagu

SEQ ID NO: 1334387 - RNA, 19 nt, Artificial Sequence
  Description of Artificial Sequence: Synthetic oligonucleotide
  Antisense strand to SEQ ID NO: 1334386
acucuacugacucuuauua

SEQ ID NO: 1334388 - RNA, 19 nt, Artificial Sequence
  Description of Artificial Sequence: Synthetic oligonucleotide
  Sense strand starting at position 316 of SEQ ID NO: 1242260
gucaguagaguugaaucca

SEQ ID NO: 1334389 - RNA, 19 nt, Artificial Sequence
  Description of Artificial Sequence: Synthetic oligonucleotide
  Antisense strand to SEQ ID NO: 1334388
uggauucaacucuacugac

SEQ ID NO: 1334390 - RNA, 19 nt, Artificial Sequence
  Description of Artificial Sequence: Synthetic oligonucleotide
  Sense strand starting at position 471 of SEQ ID NO: 1242260
gcaguuauaccacagaugu

SEQ ID NO: 1334391 - RNA, 19 nt, Artificial Sequence
  Description of Artificial Sequence: Synthetic oligonucleotide
  Antisense strand to SEQ ID NO: 1334390
acaucugugguauaacugc

SEQ ID NO: 1334392 - RNA, 19 nt, Artificial Sequence
  Description of Artificial Sequence: Synthetic oligonucleotide
  Sense strand starting at position 481 of SEQ ID NO: 1242260
cacagaugucuaggaccua

SEQ ID NO: 1334393 - RNA, 19 nt, Artificial Sequence
  Description of Artificial Sequence: Synthetic oligonucleotide
  Antisense strand to SEQ ID NO: 1334392
uagguccuagacaucugug

SEQ ID NO: 1334394 - RNA, 19 nt, Artificial Sequence
  Description of Artificial Sequence: Synthetic oligonucleotide
  Sense strand starting at position 544 of SEQ ID NO: 1242260
ugauaaugcccucauggau

SEQ ID NO: 1334395 - RNA, 19 nt, Artificial Sequence
  Description of Artificial Sequence: Synthetic oligonucleotide
  Antisense strand to SEQ ID NO: 1334394
auccaugagggcauuauca

SEQ ID NO: 1334396 - RNA, 19 nt, Artificial Sequence
  Description of Artificial Sequence: Synthetic oligonucleotide
  Sense strand starting at position 637 of SEQ ID NO: 1242260
guugacauauaucuccuua

SEQ ID NO: 1334397 - RNA, 19 nt, Artificial Sequence
  Description of Artificial Sequence: Synthetic oligonucleotide
  Antisense strand to SEQ ID NO: 1334396
uaaggagauauaugucaac

SEQ ID NO: 1334398 - RNA, 19 nt, Artificial Sequence
  Description of Artificial Sequence: Synthetic oligonucleotide
  Sense strand starting at position 1312 of SEQ ID NO: 1242260
agagcuuuggacgacuuau

SEQ ID NO: 1334399 - RNA, 19 nt, Artificial Sequence
  Description of Artificial Sequence: Synthetic oligonucleotide
  Antisense strand to SEQ ID NO: 1334398
auaagucguccaaagcucu

SEQ ID NO: 1334400 - RNA, 19 nt, Artificial Sequence
  Description of Artificial Sequence: Synthetic oligonucleotide
  Sense strand starting at position 1318 of SEQ ID NO: 1242260
uuggacgacuuaucuaaag

SEQ ID NO: 1334401 - RNA, 19 nt, Artificial Sequence
  Description of Artificial Sequence: Synthetic oligonucleotide
  Antisense strand to SEQ ID NO: 1334400
cuuuagauaagucguccaa

SEQ ID NO: 1334402 - RNA, 19 nt, Artificial Sequence
  Description of Artificial Sequence: Synthetic oligonucleotide
  Sense strand starting at position 1343 of SEQ ID NO: 1242260
gcuggauggucauuaggau

SEQ ID NO: 1334403 - RNA, 19 nt, Artificial Sequence
  Description of Artificial Sequence: Synthetic oligonucleotide
  Antisense strand to SEQ ID NO: 1334402
auccuaaugaccauccagc

SEQ ID NO: 1334404 - RNA, 19 nt, Artificial Sequence
  Description of Artificial Sequence: Synthetic oligonucleotide
  Sense strand starting at position 1349 of SEQ ID NO: 1242260
uggucauuaggaugauagu

SEQ ID NO: 1334405 - RNA, 19 nt, Artificial Sequence
  Description of Artificial Sequence: Synthetic oligonucleotide
  Antisense strand to SEQ ID NO: 1334404
acuaucauccuaaugacca

SEQ ID NO: 1334406 - RNA, 19 nt, Artificial Sequence
  Description of Artificial Sequence: Synthetic oligonucleotide
  Sense strand starting at position 1359 of SEQ ID NO: 1242260
gaugauaguguaugagaug

SEQ ID NO: 1334407 - RNA, 19 nt, Artificial Sequence
  Description of Artificial Sequence: Synthetic oligonucleotide
  Antisense strand to SEQ ID NO: 1334406
caucucauacacuaucauc

SEQ ID NO: 1334408 - RNA, 19 nt, Artificial Sequence
  Description of Artificial Sequence: Synthetic oligonucleotide
  Sense strand starting at position 1364 of SEQ ID NO: 1242260
uaguguaugagaugauuag

SEQ ID NO: 1334409 - RNA, 19 nt, Artificial Sequence
  Description of Artificial Sequence: Synthetic oligonucleotide
  Antisense strand to SEQ ID NO: 1334408
cuaaucaucucauacacua

SEQ ID NO: 1334410 - RNA, 19 nt, Artificial Sequence
  Description of Artificial Sequence: Synthetic oligonucleotide
  Sense strand starting at position 1416 of SEQ ID NO: 1242260
guuagcaaugaccauaaua

SEQ ID NO: 1334411 - RNA, 19 nt, Artificial Sequence
  Description of Artificial Sequence: Synthetic oligonucleotide
  Antisense strand to SEQ ID NO: 1334410
uauuauggucauugcuaac

SEQ ID NO: 1334412 - RNA, 19 nt, Artificial Sequence
  Description of Artificial Sequence: Synthetic oligonucleotide
  Sense strand starting at position 1444 of SEQ ID NO: 1242260
uagguaucuguacaggcaa

SEQ ID NO: 1334413 - RNA, 19 nt, Artificial Sequence
  Description of Artificial Sequence: Synthetic oligonucleotide
  Antisense strand to SEQ ID NO: 1334412
uugccuguacagauaccua

SEQ ID NO: 1334414 - RNA, 19 nt, Artificial Sequence
  Description of Artificial Sequence: Synthetic oligonucleotide
  Sense strand starting at position 1461 of SEQ ID NO: 1242260
aaguuugauuacccuagga

SEQ ID NO: 1334415 - RNA, 19 nt, Artificial Sequence
  Description of Artificial Sequence: Synthetic oligonucleotide
  Antisense strand to SEQ ID NO: 1334414
uccuaggguaaucaaacuu

SEQ ID NO: 1334416 - RNA, 19 nt, Artificial Sequence
  Description of Artificial Sequence: Synthetic oligonucleotide
  Sense strand starting at position 1465 of SEQ ID NO: 1242260
uugauuacccuaggaaggu

SEQ ID NO: 1334417 - RNA, 19 nt, Artificial Sequence
  Description of Artificial Sequence: Synthetic oligonucleotide
  Antisense strand to SEQ ID NO: 1334416
accuuccuaggguaaucaa

SEQ ID NO: 1334418 - RNA, 19 nt, Artificial Sequence
  Description of Artificial Sequence: Synthetic oligonucleotide
  Sense strand starting at position 1727 of SEQ ID NO: 1242260
caaggcagcccuugaaaga

SEQ ID NO: 1334419 - RNA, 19 nt, Artificial Sequence
  Description of Artificial Sequence: Synthetic oligonucleotide
  Antisense strand to SEQ ID NO: 1334418
ucuuucaagggcugccuug

SEQ ID NO: 1334420 - RNA, 19 nt, Artificial Sequence
  Description of Artificial Sequence: Synthetic oligonucleotide
  Sense strand starting at position 1860 of SEQ ID NO: 1242260
gugggagucagauaccacu

SEQ ID NO: 1334421 - RNA, 19 nt, Artificial Sequence
  Description of Artificial Sequence: Synthetic oligonucleotide
  Antisense strand to SEQ ID NO: 1334420
agugguaucugacucccac

SEQ ID NO: 1334422 - RNA, 19 nt, Artificial Sequence
  Description of Artificial Sequence: Synthetic oligonucleotide
  Sense strand starting at position 2046 of SEQ ID NO: 1242260
ugcaguuaccuugaagaag

SEQ ID NO: 1334423 - RNA, 19 nt, Artificial Sequence
  Description of Artificial Sequence: Synthetic oligonucleotide
  Antisense strand to SEQ ID NO: 1334422
cuucuucaagguaacugca

SEQ ID NO: 1334424 - RNA, 19 nt, Artificial Sequence
  Description of Artificial Sequence: Synthetic oligonucleotide
  Sense strand starting at position 2293 of SEQ ID NO: 1242260
auuauuuaugcuugucucu

SEQ ID NO: 1334425 - RNA, 19 nt, Artificial Sequence
  Description of Artificial Sequence: Synthetic oligonucleotide
  Antisense strand to SEQ ID NO: 1334424
agagacaagcauaaauaau

SEQ ID NO: 1334426 - RNA, 19 nt, Artificial Sequence
  Description of Artificial Sequence: Synthetic oligonucleotide
  Sense strand starting at position 2306 of SEQ ID NO: 1242260
gucucucugccagauuaag

SEQ ID NO: 1334427 - RNA, 19 nt, Artificial Sequence
  Description of Artificial Sequence: Synthetic oligonucleotide
  Antisense strand to SEQ ID NO: 1334426
cuuaaucuggcagagagac

SEQ ID NO: 1334428 - RNA, 19 nt, Artificial Sequence
  Description of Artificial Sequence: Synthetic oligonucleotide
  Sense strand starting at position 2315 of SEQ ID NO: 1242260
ccagauuaagucuaugcca

SEQ ID NO: 1334429 - RNA, 19 nt, Artificial Sequence
  Description of Artificial Sequence: Synthetic oligonucleotide
  Antisense strand to SEQ ID NO: 1334428
uggcauagacuuaaucugg

SEQ ID NO: 1334430 - RNA, 19 nt, Artificial Sequence
  Description of Artificial Sequence: Synthetic oligonucleotide
  Sense strand starting at position 2317 of SEQ ID NO: 1242260
agauuaagucuaugccaua

SEQ ID NO: 1334431 - RNA, 19 nt, Artificial Sequence
  Description of Artificial Sequence: Synthetic oligonucleotide
  Antisense strand to SEQ ID NO: 1334430
uauggcauagacuuaaucu

SEQ ID NO: 1334432 - RNA, 19 nt, Artificial Sequence
  Description of Artificial Sequence: Synthetic oligonucleotide
  Sense strand starting at position 2384 of SEQ ID NO: 1242260
acgcauguuauuuggugau

SEQ ID NO: 1334433 - RNA, 19 nt, Artificial Sequence
  Description of Artificial Sequence: Synthetic oligonucleotide
  Antisense strand to SEQ ID NO: 1334432
aucaccaaauaacaugcgu

SEQ ID NO: 1334434 - RNA, 19 nt, Artificial Sequence
  Description of Artificial Sequence: Synthetic oligonucleotide
  Sense strand starting at position 2386 of SEQ ID NO: 1242260
gcauguuauuuggugauau

SEQ ID NO: 1334435 - RNA, 19 nt, Artificial Sequence
  Description of Artificial Sequence: Synthetic oligonucleotide
  Antisense strand to SEQ ID NO: 1334434
auaucaccaaauaacaugc

SEQ ID NO: 1334436 - RNA, 19 nt, Artificial Sequence
  Description of Artificial Sequence: Synthetic oligonucleotide
  Sense strand starting at position 2847 of SEQ ID NO: 1242260
ggauaaugaugacugucua

SEQ ID NO: 1334437 - RNA, 19 nt, Artificial Sequence
  Description of Artificial Sequence: Synthetic oligonucleotide
  Antisense strand to SEQ ID NO: 1334436
uagacagucaucauuaucc

SEQ ID NO: 1334438 - RNA, 19 nt, Artificial Sequence
  Description of Artificial Sequence: Synthetic oligonucleotide
  Sense strand starting at position 2851 of SEQ ID NO: 1242260
aaugaugacugucuagaca

SEQ ID NO: 1334439 - RNA, 19 nt, Artificial Sequence
  Description of Artificial Sequence: Synthetic oligonucleotide
  Antisense strand to SEQ ID NO: 1334438
ugucuagacagucaucauu

SEQ ID NO: 1334440 - RNA, 19 nt, Artificial Sequence
  Description of Artificial Sequence: Synthetic oligonucleotide
  Sense strand starting at position 2904 of SEQ ID NO: 1242260
cuaucugccaggugagaga

SEQ ID NO: 1334441 - RNA, 19 nt, Artificial Sequence
  Description of Artificial Sequence: Synthetic oligonucleotide
  Antisense strand to SEQ ID NO: 1334440
ucucucaccuggcagauag

SEQ ID NO: 1334442 - RNA, 19 nt, Artificial Sequence
  Description of Artificial Sequence: Synthetic oligonucleotide
  Sense strand starting at position 2928 of SEQ ID NO: 1242260
cacugacuucugggcauga

SEQ ID NO: 1334443 - RNA, 19 nt, Artificial Sequence
  Description of Artificial Sequence: Synthetic oligonucleotide
  Antisense strand to SEQ ID NO: 1334442
ucaugcccagaagucagug

SEQ ID NO: 1334444 - RNA, 19 nt, Artificial Sequence
  Description of Artificial Sequence: Synthetic oligonucleotide
  Sense strand starting at position 2959 of SEQ ID NO: 1242260
uucaauuguguauggagga

SEQ ID NO: 1334445 - RNA, 19 nt, Artificial Sequence
  Description of Artificial Sequence: Synthetic oligonucleotide
  Antisense strand to SEQ ID NO: 1334444
uccuccauacacaauugaa

SEQ ID NO: 1334446 - RNA, 19 nt, Artificial Sequence
  Description of Artificial Sequence: Synthetic oligonucleotide
  Sense strand starting at position 3042 of SEQ ID NO: 1242260
gaaagugaggcauagccau

SEQ ID NO: 1334447 - RNA, 19 nt, Artificial Sequence
  Description of Artificial Sequence: Synthetic oligonucleotide
  Antisense strand to SEQ ID NO: 1334446
auggcuaugccucacuuuc

SEQ ID NO: 1334448 - RNA, 19 nt, Artificial Sequence
  Description of Artificial Sequence: Synthetic oligonucleotide
  Sense strand starting at position 3085 of SEQ ID NO: 1242260
aagaguuaaugggcaagua

SEQ ID NO: 1334449 - RNA, 19 nt, Artificial Sequence
  Description of Artificial Sequence: Synthetic oligonucleotide
  Antisense strand to SEQ ID NO: 1334448
uacuugcccauuaacucuu

SEQ ID NO: 1334450 - RNA, 19 nt, Artificial Sequence
  Description of Artificial Sequence: Synthetic oligonucleotide
  Sense strand starting at position 3134 of SEQ ID NO: 1242260
acuaacauuccacgggaga

SEQ ID NO: 1334451 - RNA, 19 nt, Artificial Sequence
  Description of Artificial Sequence: Synthetic oligonucleotide
  Antisense strand to SEQ ID NO: 1334450
ucucccguggaauguuagu

SEQ ID NO: 1334452 - RNA, 19 nt, Artificial Sequence
  Description of Artificial Sequence: Synthetic oligonucleotide
  Sense strand starting at position 3158 of SEQ ID NO: 1242260
agguauagaguuuacacuu

SEQ ID NO: 1334453 - RNA, 19 nt, Artificial Sequence
  Description of Artificial Sequence: Synthetic oligonucleotide
  Antisense strand to SEQ ID NO: 1334452
aaguguaaacucuauaccu

SEQ ID NO: 1334454 - RNA, 19 nt, Artificial Sequence
  Description of Artificial Sequence: Synthetic oligonucleotide
  Sense strand starting at position 3190 of SEQ ID NO: 1242260
gaggaauacuguuauuuga

SEQ ID NO: 1334455 - RNA, 19 nt, Artificial Sequence
  Description of Artificial Sequence: Synthetic oligonucleotide
  Antisense strand to SEQ ID NO: 1334454
ucaaauaacaguauuccuc

SEQ ID NO: 1334456 - RNA, 19 nt, Artificial Sequence
  Description of Artificial Sequence: Synthetic oligonucleotide
  Sense strand starting at position 3738 of SEQ ID NO: 1242260
aggaauuucuugcuaacgu

SEQ ID NO: 1334457 - RNA, 19 nt, Artificial Sequence
  Description of Artificial Sequence: Synthetic oligonucleotide
  Antisense strand to SEQ ID NO: 1334456
acguuagcaagaaauuccu

SEQ ID NO: 1334458 - RNA, 19 nt, Artificial Sequence
  Description of Artificial Sequence: Synthetic oligonucleotide
  Sense strand starting at position 82 of SEQ ID NO: 1242261
ucugguuugccugcuguau

SEQ ID NO: 1334459 - RNA, 19 nt, Artificial Sequence
  Description of Artificial Sequence: Synthetic oligonucleotide
  Antisense strand to SEQ ID NO: 1334458
auacagcaggcaaaccaga

SEQ ID NO: 1334460 - RNA, 19 nt, Artificial Sequence
  Description of Artificial Sequence: Synthetic oligonucleotide
  Sense strand starting at position 83 of SEQ ID NO: 1242261
cugguuugccugcuguauu

SEQ ID NO: 1334461 - RNA, 19 nt, Artificial Sequence
  Description of Artificial Sequence: Synthetic oligonucleotide
  Antisense strand to SEQ ID NO: 1334460
aauacagcaggcaaaccag

SEQ ID NO: 1334462 - RNA, 19 nt, Artificial Sequence
  Description of Artificial Sequence: Synthetic oligonucleotide
  Sense strand starting at position 207 of SEQ ID NO: 1242261
acuuauaaacacgguagaa

SEQ ID NO: 1334463 - RNA, 19 nt, Artificial Sequence
  Description of Artificial Sequence: Synthetic oligonucleotide
  Antisense strand to SEQ ID NO: 1334462
uucuaccguguuuauaagu

SEQ ID NO: 1334464 - RNA, 19 nt, Artificial Sequence
  Description of Artificial Sequence: Synthetic oligonucleotide
  Sense strand starting at position 393 of SEQ ID NO: 1242261
agguucuucccuugacaca

SEQ ID NO: 1334465 - RNA, 19 nt, Artificial Sequence
  Description of Artificial Sequence: Synthetic oligonucleotide
  Antisense strand to SEQ ID NO: 1334464
ugugucaagggaagaaccu

SEQ ID NO: 1334466 - RNA, 19 nt, Artificial Sequence
  Description of Artificial Sequence: Synthetic oligonucleotide
  Sense strand starting at position 394 of SEQ ID NO: 1242261
gguucuucccuugacacau

SEQ ID NO: 1334467 - RNA, 19 nt, Artificial Sequence
  Description of Artificial Sequence: Synthetic oligonucleotide
  Antisense strand to SEQ ID NO: 1334466
augugucaagggaagaacc

SEQ ID NO: 1334468 - RNA, 19 nt, Artificial Sequence
  Description of Artificial Sequence: Synthetic oligonucleotide
  Sense strand starting at position 403 of SEQ ID NO: 1242261
cuugacacaugaguauuau

SEQ ID NO: 1334469 - RNA, 19 nt, Artificial Sequence
  Description of Artificial Sequence: Synthetic oligonucleotide
  Antisense strand to SEQ ID NO: 1334468
auaauacucaugugucaag

SEQ ID NO: 1334470 - RNA, 19 nt, Artificial Sequence
  Description of Artificial Sequence: Synthetic oligonucleotide
  Sense strand starting at position 591 of SEQ ID NO: 1242261
guaguuucucuuuauggac

SEQ ID NO: 1334471 - RNA, 19 nt, Artificial Sequence
  Description of Artificial Sequence: Synthetic oligonucleotide
  Antisense strand to SEQ ID NO: 1334470
guccauaaagagaaacuac

SEQ ID NO: 1334472 - RNA, 19 nt, Artificial Sequence
  Description of Artificial Sequence: Synthetic oligonucleotide
  Sense strand starting at position 843 of SEQ ID NO: 1242261
gguaauaauguuggugaaa

SEQ ID NO: 1334473 - RNA, 19 nt, Artificial Sequence
  Description of Artificial Sequence: Synthetic oligonucleotide
  Antisense strand to SEQ ID NO: 1334472
uuucaccaacauuauuacc

SEQ ID NO: 1334474 - RNA, 19 nt, Artificial Sequence
  Description of Artificial Sequence: Synthetic oligonucleotide
  Sense strand starting at position 844 of SEQ ID NO: 1242261
guaauaauguuggugaaau

SEQ ID NO: 1334475 - RNA, 19 nt, Artificial Sequence
  Description of Artificial Sequence: Synthetic oligonucleotide
  Antisense strand to SEQ ID NO: 1334474
auuucaccaacauuauuac

SEQ ID NO: 1334476 - RNA, 19 nt, Artificial Sequence
  Description of Artificial Sequence: Synthetic oligonucleotide
  Sense strand starting at position 971 of SEQ ID NO: 1242261
gugauauucugguuaaauu

SEQ ID NO: 1334477 - RNA, 19 nt, Artificial Sequence
  Description of Artificial Sequence: Synthetic oligonucleotide
  Antisense strand to SEQ ID NO: 1334476
aauuuaaccagaauaucac

SEQ ID NO: 1334478 - RNA, 19 nt, Artificial Sequence
  Description of Artificial Sequence: Synthetic oligonucleotide
  Sense strand starting at position 2210 of SEQ ID NO: 1242261
aaauacguugcacagaaua

SEQ ID NO: 1334479 - RNA, 19 nt, Artificial Sequence
  Description of Artificial Sequence: Synthetic oligonucleotide
  Antisense strand to SEQ ID NO: 1334478
uauucugugcaacguauuu

SEQ ID NO: 1334480 - RNA, 19 nt, Artificial Sequence
  Description of Artificial Sequence: Synthetic oligonucleotide
  Sense strand starting at position 2212 of SEQ ID NO: 1242261
auacguugcacagaauaag

SEQ ID NO: 1334481 - RNA, 19 nt, Artificial Sequence
  Description of Artificial Sequence: Synthetic oligonucleotide
  Antisense strand to SEQ ID NO: 1334480
cuuauucugugcaacguau

SEQ ID NO: 1334482 - RNA, 19 nt, Artificial Sequence
  Description of Artificial Sequence: Synthetic oligonucleotide
  Sense strand starting at position 2520 of SEQ ID NO: 1242261
uucuaagagugaucuaaca

SEQ ID NO: 1334483 - RNA, 19 nt, Artificial Sequence
  Description of Artificial Sequence: Synthetic oligonucleotide
  Antisense strand to SEQ ID NO: 1334482
uguuagaucacucuuagaa

SEQ ID NO: 1334484 - RNA, 19 nt, Artificial Sequence
  Description of Artificial Sequence: Synthetic oligonucleotide
  Sense strand starting at position 2654 of SEQ ID NO: 1242261
ggcaacucagcuuggaaua

SEQ ID NO: 1334485 - RNA, 19 nt, Artificial Sequence
  Description of Artificial Sequence: Synthetic oligonucleotide
  Antisense strand to SEQ ID NO: 1334484
uauuccaagcugaguugcc

SEQ ID NO: 1334486 - RNA, 19 nt, Artificial Sequence
  Description of Artificial Sequence: Synthetic oligonucleotide
  Sense strand starting at position 2655 of SEQ ID NO: 1242261
gcaacucagcuuggaauaa

SEQ ID NO: 1334487 - RNA, 19 nt, Artificial Sequence
  Description of Artificial Sequence: Synthetic oligonucleotide
  Antisense strand to SEQ ID NO: 1334486
uuauuccaagcugaguugc

SEQ ID NO: 1334488 - RNA, 19 nt, Artificial Sequence
  Description of Artificial Sequence: Synthetic oligonucleotide
  Sense strand starting at position 2659 of SEQ ID NO: 1242261
cucagcuuggaauaacuua

SEQ ID NO: 1334489 - RNA, 19 nt, Artificial Sequence
  Description of Artificial Sequence: Synthetic oligonucleotide
  Antisense strand to SEQ ID NO: 1334488
uaaguuauuccaagcugag

SEQ ID NO: 1334490 - RNA, 19 nt, Artificial Sequence
  Description of Artificial Sequence: Synthetic oligonucleotide
  Sense strand starting at position 2667 of SEQ ID NO: 1242261
ggaauaacuuaaguuccuu

SEQ ID NO: 1334491 - RNA, 19 nt, Artificial Sequence
  Description of Artificial Sequence: Synthetic oligonucleotide
  Antisense strand to SEQ ID NO: 1334490
aaggaacuuaaguuauucc

SEQ ID NO: 1334492 - RNA, 19 nt, Artificial Sequence
  Description of Artificial Sequence: Synthetic oligonucleotide
  Sense strand starting at position 2749 of SEQ ID NO: 1242261
cuaaauugcucccuagaag

SEQ ID NO: 1334493 - RNA, 19 nt, Artificial Sequence
  Description of Artificial Sequence: Synthetic oligonucleotide
  Antisense strand to SEQ ID NO: 1334492
cuucuagggagcaauuuag

SEQ ID NO: 1334494 - RNA, 19 nt, Artificial Sequence
  Description of Artificial Sequence: Synthetic oligonucleotide
  Sense strand starting at position 2758 of SEQ ID NO: 1242261
ucccuagaagcugaaaguu

SEQ ID NO: 1334495 - RNA, 19 nt, Artificial Sequence
  Description of Artificial Sequence: Synthetic oligonucleotide
  Antisense strand to SEQ ID NO: 1334494
aacuuucagcuucuaggga

SEQ ID NO: 1334496 - RNA, 19 nt, Artificial Sequence
  Description of Artificial Sequence: Synthetic oligonucleotide
  Sense strand starting at position 2766 of SEQ ID NO: 1242261
agcugaaaguuacucuauc

SEQ ID NO: 1334497 - RNA, 19 nt, Artificial Sequence
  Description of Artificial Sequence: Synthetic oligonucleotide
  Antisense strand to SEQ ID NO: 1334496
gauagaguaacuuucagcu

SEQ ID NO: 1334498 - RNA, 19 nt, Artificial Sequence
  Description of Artificial Sequence: Synthetic oligonucleotide
  Sense strand starting at position 2767 of SEQ ID NO: 1242261
gcugaaaguuacucuauca

SEQ ID NO: 1334499 - RNA, 19 nt, Artificial Sequence
  Description of Artificial Sequence: Synthetic oligonucleotide
  Antisense strand to SEQ ID NO: 1334498
ugauagaguaacuuucagc

SEQ ID NO: 1334500 - RNA, 19 nt, Artificial Sequence
  Description of Artificial Sequence: Synthetic oligonucleotide
  Sense strand starting at position 2873 of SEQ ID NO: 1242261
uauauaagguuagcaaaga

SEQ ID NO: 1334501 - RNA, 19 nt, Artificial Sequence
  Description of Artificial Sequence: Synthetic oligonucleotide
  Antisense strand to SEQ ID NO: 1334500
ucuuugcuaaccuuauaua

SEQ ID NO: 1334502 - RNA, 19 nt, Artificial Sequence
  Description of Artificial Sequence: Synthetic oligonucleotide
  Sense strand starting at position 3003 of SEQ ID NO: 1242261
acuuaaggucuuuauguac

SEQ ID NO: 1334503 - RNA, 19 nt, Artificial Sequence
  Description of Artificial Sequence: Synthetic oligonucleotide
  Antisense strand to SEQ ID NO: 1334502
guacauaaagaccuuaagu

SEQ ID NO: 1334504 - RNA, 19 nt, Artificial Sequence
  Description of Artificial Sequence: Synthetic oligonucleotide
  Sense strand starting at position 3061 of SEQ ID NO: 1242261
agggcagaauaguuguuua

SEQ ID NO: 1334505 - RNA, 19 nt, Artificial Sequence
  Description of Artificial Sequence: Synthetic oligonucleotide
  Antisense strand to SEQ ID NO: 1334504
uaaacaacuauucugcccu

SEQ ID NO: 1334506 - RNA, 19 nt, Artificial Sequence
  Description of Artificial Sequence: Synthetic oligonucleotide
  Sense strand starting at position 3144 of SEQ ID NO: 1242261
aaagauuaucaguggugau

SEQ ID NO: 1334507 - RNA, 19 nt, Artificial Sequence
  Description of Artificial Sequence: Synthetic oligonucleotide
  Antisense strand to SEQ ID NO: 1334506
aucaccacugauaaucuuu

SEQ ID NO: 1334508 - RNA, 19 nt, Artificial Sequence
  Description of Artificial Sequence: Synthetic oligonucleotide
  Sense strand starting at position 3193 of SEQ ID NO: 1242261
uguucugaagcucaugauu

SEQ ID NO: 1334509 - RNA, 19 nt, Artificial Sequence
  Description of Artificial Sequence: Synthetic oligonucleotide
  Antisense strand to SEQ ID NO: 1334508
aaucaugagcuucagaaca

SEQ ID NO: 1334510 - RNA, 19 nt, Artificial Sequence
  Description of Artificial Sequence: Synthetic oligonucleotide
  Sense strand starting at position 3250 of SEQ ID NO: 1242261
cuauuaagccuagaaugua

SEQ ID NO: 1334511 - RNA, 19 nt, Artificial Sequence
  Description of Artificial Sequence: Synthetic oligonucleotide
  Antisense strand to SEQ ID NO: 1334510
uacauucuaggcuuaauag

SEQ ID NO: 1334512 - RNA, 19 nt, Artificial Sequence
  Description of Artificial Sequence: Synthetic oligonucleotide
  Sense strand starting at position 3339 of SEQ ID NO: 1242261
ugugcugcccaacagaaau

SEQ ID NO: 1334513 - RNA, 19 nt, Artificial Sequence
  Description of Artificial Sequence: Synthetic oligonucleotide
  Antisense strand to SEQ ID NO: 1334512
auuucuguugggcagcaca

SEQ ID NO: 1334514 - RNA, 19 nt, Artificial Sequence
  Description of Artificial Sequence: Synthetic oligonucleotide
  Sense strand starting at position 3427 of SEQ ID NO: 1242261
aauguagaucauuguuuga

SEQ ID NO: 1334515 - RNA, 19 nt, Artificial Sequence
  Description of Artificial Sequence: Synthetic oligonucleotide
  Antisense strand to SEQ ID NO: 1334514
ucaaacaaugaucuacauu

SEQ ID NO: 1334516 - RNA, 19 nt, Artificial Sequence
  Description of Artificial Sequence: Synthetic oligonucleotide
  Sense strand starting at position 3429 of SEQ ID NO: 1242261
uguagaucauuguuugaag

SEQ ID NO: 1334517 - RNA, 19 nt, Artificial Sequence
  Description of Artificial Sequence: Synthetic oligonucleotide
  Antisense strand to SEQ ID NO: 1334516
cuucaaacaaugaucuaca

SEQ ID NO: 1334518 - RNA, 19 nt, Artificial Sequence
  Description of Artificial Sequence: Synthetic oligonucleotide
  Sense strand starting at position 3592 of SEQ ID NO: 1242261
guuguuaugaccugaauga

SEQ ID NO: 1334519 - RNA, 19 nt, Artificial Sequence
  Description of Artificial Sequence: Synthetic oligonucleotide
  Antisense strand to SEQ ID NO: 1334518
ucauucaggucauaacaac

SEQ ID NO: 1334520 - RNA, 19 nt, Artificial Sequence
  Description of Artificial Sequence: Synthetic oligonucleotide
  Sense strand starting at position 3673 of SEQ ID NO: 1242261
gguaaaugacucggcuaaa

SEQ ID NO: 1334521 - RNA, 19 nt, Artificial Sequence
  Description of Artificial Sequence: Synthetic oligonucleotide
  Antisense strand to SEQ ID NO: 1334520
uuuagccgagucauuuacc

SEQ ID NO: 1334522 - RNA, 19 nt, Artificial Sequence
  Description of Artificial Sequence: Synthetic oligonucleotide
  Sense strand starting at position 3674 of SEQ ID NO: 1242261
guaaaugacucggcuaaag

SEQ ID NO: 1334523 - RNA, 19 nt, Artificial Sequence
  Description of Artificial Sequence: Synthetic oligonucleotide
  Antisense strand to SEQ ID NO: 1334522
cuuuagccgagucauuuac

SEQ ID NO: 1334524 - RNA, 19 nt, Artificial Sequence
  Description of Artificial Sequence: Synthetic oligonucleotide
  Sense strand starting at position 3676 of SEQ ID NO: 1242261
aaaugacucggcuaaagcu

SEQ ID NO: 1334525 - RNA, 19 nt, Artificial Sequence
  Description of Artificial Sequence: Synthetic oligonucleotide
  Antisense strand to SEQ ID NO: 1334524
agcuuuagccgagucauuu

SEQ ID NO: 1334526 - RNA, 19 nt, Artificial Sequence
  Description of Artificial Sequence: Synthetic oligonucleotide
  Sense strand starting at position 3684 of SEQ ID NO: 1242261
cggcuaaagcuccagaaca

SEQ ID NO: 1334527 - RNA, 19 nt, Artificial Sequence
  Description of Artificial Sequence: Synthetic oligonucleotide
  Antisense strand to SEQ ID NO: 1334526
uguucuggagcuuuagccg

SEQ ID NO: 1334528 - RNA, 19 nt, Artificial Sequence
  Description of Artificial Sequence: Synthetic oligonucleotide
  Sense strand starting at position 3698 of SEQ ID NO: 1242261
gaacaaguugguggcaaau

SEQ ID NO: 1334529 - RNA, 19 nt, Artificial Sequence
  Description of Artificial Sequence: Synthetic oligonucleotide
  Antisense strand to SEQ ID NO: 1334528
auuugccaccaacuuguuc

SEQ ID NO: 1334530 - RNA, 19 nt, Artificial Sequence
  Description of Artificial Sequence: Synthetic oligonucleotide
  Sense strand starting at position 3711 of SEQ ID NO: 1242261
gcaaauccagaauauguuu

SEQ ID NO: 1334531 - RNA, 19 nt, Artificial Sequence
  Description of Artificial Sequence: Synthetic oligonucleotide
  Antisense strand to SEQ ID NO: 1334530
aaacauauucuggauuugc

SEQ ID NO: 1334532 - RNA, 19 nt, Artificial Sequence
  Description of Artificial Sequence: Synthetic oligonucleotide
  Sense strand starting at position 3716 of SEQ ID NO: 1242261
uccagaauauguuugacuu

SEQ ID NO: 1334533 - RNA, 19 nt, Artificial Sequence
  Description of Artificial Sequence: Synthetic oligonucleotide
  Antisense strand to SEQ ID NO: 1334532
aagucaaacauauucugga

SEQ ID NO: 1334534 - RNA, 19 nt, Artificial Sequence
  Description of Artificial Sequence: Synthetic oligonucleotide
  Sense strand starting at position 3801 of SEQ ID NO: 1242261
cugucuguggcccaggaaa

SEQ ID NO: 1334535 - RNA, 19 nt, Artificial Sequence
  Description of Artificial Sequence: Synthetic oligonucleotide
  Antisense strand to SEQ ID NO: 1334534
uuuccugggccacagacag

SEQ ID NO: 1334536 - RNA, 19 nt, Artificial Sequence
  Description of Artificial Sequence: Synthetic oligonucleotide
  Sense strand starting at position 3944 of SEQ ID NO: 1242261
ugcaaaugucacuggaaua

SEQ ID NO: 1334537 - RNA, 19 nt, Artificial Sequence
  Description of Artificial Sequence: Synthetic oligonucleotide
  Antisense strand to SEQ ID NO: 1334536
uauuccagugacauuugca

SEQ ID NO: 1334538 - RNA, 19 nt, Artificial Sequence
  Description of Artificial Sequence: Synthetic oligonucleotide
  Sense strand starting at position 2327 of SEQ ID NO: 1242262
ugggaaaucuugccaaccu

SEQ ID NO: 1334539 - RNA, 19 nt, Artificial Sequence
  Description of Artificial Sequence: Synthetic oligonucleotide
  Antisense strand to SEQ ID NO: 1334538
agguuggcaagauuuccca

SEQ ID NO: 1334540 - RNA, 19 nt, Artificial Sequence
  Description of Artificial Sequence: Synthetic oligonucleotide
  Sense strand starting at position 2328 of SEQ ID NO: 1242262
gggaaaucuugccaaccug

SEQ ID NO: 1334541 - RNA, 19 nt, Artificial Sequence
  Description of Artificial Sequence: Synthetic oligonucleotide
  Antisense strand to SEQ ID NO: 1334540
cagguuggcaagauuuccc

SEQ ID NO: 1334542 - RNA, 19 nt, Artificial Sequence
  Description of Artificial Sequence: Synthetic oligonucleotide
  Sense strand starting at position 3669 of SEQ ID NO: 1242262
gcuauuaugcuauguaguu

SEQ ID NO: 1334543 - RNA, 19 nt, Artificial Sequence
  Description of Artificial Sequence: Synthetic oligonucleotide
  Antisense strand to SEQ ID NO: 1334542
aacuacauagcauaauagc

SEQ ID NO: 1334544 - RNA, 19 nt, Artificial Sequence
  Description of Artificial Sequence: Synthetic oligonucleotide
  Sense strand starting at position 3670 of SEQ ID NO: 1242262
cuauuaugcuauguaguuu

SEQ ID NO: 1334545 - RNA, 19 nt, Artificial Sequence
  Description of Artificial Sequence: Synthetic oligonucleotide
  Antisense strand to SEQ ID NO: 1334544
aaacuacauagcauaauag

SEQ ID NO: 1334546 - RNA, 19 nt, Artificial Sequence
  Description of Artificial Sequence: Synthetic oligonucleotide
  Sense strand starting at position 618 of SEQ ID NO: 1242263
agacacgucucaugucuua

SEQ ID NO: 1334547 - RNA, 19 nt, Artificial Sequence
  Description of Artificial Sequence: Synthetic oligonucleotide
  Antisense strand to SEQ ID NO: 1334546
uaagacaugagacgugucu

SEQ ID NO: 1334548 - RNA, 19 nt, Artificial Sequence
  Description of Artificial Sequence: Synthetic oligonucleotide
  Sense strand starting at position 623 of SEQ ID NO: 1242263
cgucucaugucuuauuuau

SEQ ID NO: 1334549 - RNA, 19 nt, Artificial Sequence
  Description of Artificial Sequence: Synthetic oligonucleotide
  Antisense strand to SEQ ID NO: 1334548
auaaauaagacaugagacg

SEQ ID NO: 1334550 - RNA, 19 nt, Artificial Sequence
  Description of Artificial Sequence: Synthetic oligonucleotide
  Sense strand starting at position 2327 of SEQ ID NO: 1242263
ugggaaaucuugccaacuu

SEQ ID NO: 1334551 - RNA, 19 nt, Artificial Sequence
  Description of Artificial Sequence: Synthetic oligonucleotide
  Antisense strand to SEQ ID NO: 1334550
aaguuggcaagauuuccca

SEQ ID NO: 1334552 - RNA, 19 nt, Artificial Sequence
  Description of Artificial Sequence: Synthetic oligonucleotide
  Sense strand starting at position 2328 of SEQ ID NO: 1242263
gggaaaucuugccaacuug

SEQ ID NO: 1334553 - RNA, 19 nt, Artificial Sequence
  Description of Artificial Sequence: Synthetic oligonucleotide
  Antisense strand to SEQ ID NO: 1334552
caaguuggcaagauuuccc

SEQ ID NO: 1334554 - RNA, 19 nt, Artificial Sequence
  Description of Artificial Sequence: Synthetic oligonucleotide
  Sense strand starting at position 3668 of SEQ ID NO: 1242263
gcuauaaugcuauguaguu

SEQ ID NO: 1334555 - RNA, 19 nt, Artificial Sequence
  Description of Artificial Sequence: Synthetic oligonucleotide
  Antisense strand to SEQ ID NO: 1334554
aacuacauagcauuauagc

SEQ ID NO: 1334556 - RNA, 19 nt, Artificial Sequence
  Description of Artificial Sequence: Synthetic oligonucleotide
  Sense strand starting at position 3669 of SEQ ID NO: 1242263
cuauaaugcuauguaguuu

SEQ ID NO: 1334557 - RNA, 19 nt, Artificial Sequence
  Description of Artificial Sequence: Synthetic oligonucleotide
  Antisense strand to SEQ ID NO: 1334556
aaacuacauagcauuauag

SEQ ID NO: 1334558 - RNA, 19 nt, Artificial Sequence
  Description of Artificial Sequence: Synthetic oligonucleotide
  Sense strand starting at position 3821 of SEQ ID NO: 1242263
caaugauucugagugucau

SEQ ID NO: 1334559 - RNA, 19 nt, Artificial Sequence
  Description of Artificial Sequence: Synthetic oligonucleotide
  Antisense strand to SEQ ID NO: 1334558
augacacucagaaucauug

SEQ ID NO: 1334560 - RNA, 19 nt, Artificial Sequence
  Description of Artificial Sequence: Synthetic oligonucleotide
  Sense strand starting at position 3822 of SEQ ID NO: 1242263
aaugauucugagugucauc

SEQ ID NO: 1334561 - RNA, 19 nt, Artificial Sequence
  Description of Artificial Sequence: Synthetic oligonucleotide
  Antisense strand to SEQ ID NO: 1334560
gaugacacucagaaucauu

SEQ ID NO: 1334562 - RNA, 19 nt, Artificial Sequence
  Description of Artificial Sequence: Synthetic oligonucleotide
  Sense strand starting at position 3825 of SEQ ID NO: 1242263
gauucugagugucaucaca

SEQ ID NO: 1334563 - RNA, 19 nt, Artificial Sequence
  Description of Artificial Sequence: Synthetic oligonucleotide
  Antisense strand to SEQ ID NO: 1334562
ugugaugacacucagaauc

SEQ ID NO: 1334564 - RNA, 19 nt, Artificial Sequence
  Description of Artificial Sequence: Synthetic oligonucleotide
  Sense strand starting at position 3827 of SEQ ID NO: 1242263
uucugagugucaucacaca

SEQ ID NO: 1334565 - RNA, 19 nt, Artificial Sequence
  Description of Artificial Sequence: Synthetic oligonucleotide
  Antisense strand to SEQ ID NO: 1334564
ugugugaugacacucagaa

SEQ ID NO: 1334566 - RNA, 19 nt, Artificial Sequence
  Description of Artificial Sequence: Synthetic oligonucleotide
  Sense strand starting at position 3921 of SEQ ID NO: 1242263
aagaauuuaugugaaugag

SEQ ID NO: 1334567 - RNA, 19 nt, Artificial Sequence
  Description of Artificial Sequence: Synthetic oligonucleotide
  Antisense strand to SEQ ID NO: 1334566
cucauucacauaaauucuu

SEQ ID NO: 1334568 - RNA, 19 nt, Artificial Sequence
  Description of Artificial Sequence: Synthetic oligonucleotide
  Sense strand starting at position 3927 of SEQ ID NO: 1242263
uuaugugaaugaguguuga

SEQ ID NO: 1334569 - RNA, 19 nt, Artificial Sequence
  Description of Artificial Sequence: Synthetic oligonucleotide
  Antisense strand to SEQ ID NO: 1334568
ucaacacucauucacauaa

SEQ ID NO: 1334570 - RNA, 19 nt, Artificial Sequence
  Description of Artificial Sequence: Synthetic oligonucleotide
  Sense strand starting at position 1 of SEQ ID NO: 1242264
gagugcuucucccucugua

SEQ ID NO: 1334571 - RNA, 19 nt, Artificial Sequence
  Description of Artificial Sequence: Synthetic oligonucleotide
  Antisense strand to SEQ ID NO: 1334570
uacagagggagaagcacuc

SEQ ID NO: 1334572 - RNA, 19 nt, Artificial Sequence
  Description of Artificial Sequence: Synthetic oligonucleotide
  Sense strand starting at position 3751 of SEQ ID NO: 1242264
guauuugggucauagaaga

SEQ ID NO: 1334573 - RNA, 19 nt, Artificial Sequence
  Description of Artificial Sequence: Synthetic oligonucleotide
  Antisense strand to SEQ ID NO: 1334572
ucuucuaugacccaaauac

SEQ ID NO: 1334574 - RNA, 19 nt, Artificial Sequence
  Description of Artificial Sequence: Synthetic oligonucleotide
  Sense strand starting at position 62 of SEQ ID NO: 1242265
guaccugcagaauggaaua

SEQ ID NO: 1334575 - RNA, 19 nt, Artificial Sequence
  Description of Artificial Sequence: Synthetic oligonucleotide
  Antisense strand to SEQ ID NO: 1334574
uauuccauucugcagguac

SEQ ID NO: 1334576 - RNA, 19 nt, Artificial Sequence
  Description of Artificial Sequence: Synthetic oligonucleotide
  Sense strand starting at position 116 of SEQ ID NO: 1242265
augacuugaugagucucaa

SEQ ID NO: 1334577 - RNA, 19 nt, Artificial Sequence
  Description of Artificial Sequence: Synthetic oligonucleotide
  Antisense strand to SEQ ID NO: 1334576
uugagacucaucaagucau

SEQ ID NO: 1334578 - RNA, 19 nt, Artificial Sequence
  Description of Artificial Sequence: Synthetic oligonucleotide
  Sense strand starting at position 136 of SEQ ID NO: 1242265
augaucucccugcaugaaa

SEQ ID NO: 1334579 - RNA, 19 nt, Artificial Sequence
  Description of Artificial Sequence: Synthetic oligonucleotide
  Antisense strand to SEQ ID NO: 1334578
uuucaugcagggagaucau

SEQ ID NO: 1334580 - RNA, 19 nt, Artificial Sequence
  Description of Artificial Sequence: Synthetic oligonucleotide
  Sense strand starting at position 170 of SEQ ID NO: 1242265
aagauuaggcucuguagga

SEQ ID NO: 1334581 - RNA, 19 nt, Artificial Sequence
  Description of Artificial Sequence: Synthetic oligonucleotide
  Antisense strand to SEQ ID NO: 1334580
uccuacagagccuaaucuu

SEQ ID NO: 1334582 - RNA, 19 nt, Artificial Sequence
  Description of Artificial Sequence: Synthetic oligonucleotide
  Sense strand starting at position 186 of SEQ ID NO: 1242265
ggacauuuaucugacauuc

SEQ ID NO: 1334583 - RNA, 19 nt, Artificial Sequence
  Description of Artificial Sequence: Synthetic oligonucleotide
  Antisense strand to SEQ ID NO: 1334582
gaaugucagauaaaugucc

SEQ ID NO: 1334584 - RNA, 19 nt, Artificial Sequence
  Description of Artificial Sequence: Synthetic oligonucleotide
  Sense strand starting at position 354 of SEQ ID NO: 1242265
auccauacauguguuaaag

SEQ ID NO: 1334585 - RNA, 19 nt, Artificial Sequence
  Description of Artificial Sequence: Synthetic oligonucleotide
  Antisense strand to SEQ ID NO: 1334584
cuuuaacacauguauggau

SEQ ID NO: 1334586 - RNA, 19 nt, Artificial Sequence
  Description of Artificial Sequence: Synthetic oligonucleotide
  Sense strand starting at position 470 of SEQ ID NO: 1242265
cuauaaggcugucuagaca

SEQ ID NO: 1334587 - RNA, 19 nt, Artificial Sequence
  Description of Artificial Sequence: Synthetic oligonucleotide
  Antisense strand to SEQ ID NO: 1334586
ugucuagacagccuuauag

SEQ ID NO: 1334588 - RNA, 19 nt, Artificial Sequence
  Description of Artificial Sequence: Synthetic oligonucleotide
  Sense strand starting at position 473 of SEQ ID NO: 1242265
uaaggcugucuagacauua

SEQ ID NO: 1334589 - RNA, 19 nt, Artificial Sequence
  Description of Artificial Sequence: Synthetic oligonucleotide
  Antisense strand to SEQ ID NO: 1334588
uaaugucuagacagccuua

SEQ ID NO: 1334590 - RNA, 19 nt, Artificial Sequence
  Description of Artificial Sequence: Synthetic oligonucleotide
  Sense strand starting at position 629 of SEQ ID NO: 1242265
guggguuaagcucaacaua

SEQ ID NO: 1334591 - RNA, 19 nt, Artificial Sequence
  Description of Artificial Sequence: Synthetic oligonucleotide
  Antisense strand to SEQ ID NO: 1334590
uauguugagcuuaacccac

SEQ ID NO: 1334592 - RNA, 19 nt, Artificial Sequence
  Description of Artificial Sequence: Synthetic oligonucleotide
  Sense strand starting at position 1066 of SEQ ID NO: 1242265
cuuaaagaaucauugugac

SEQ ID NO: 1334593 - RNA, 19 nt, Artificial Sequence
  Description of Artificial Sequence: Synthetic oligonucleotide
  Antisense strand to SEQ ID NO: 1334592
gucacaaugauucuuuaag

SEQ ID NO: 1334594 - RNA, 19 nt, Artificial Sequence
  Description of Artificial Sequence: Synthetic oligonucleotide
  Sense strand starting at position 1181 of SEQ ID NO: 1242265
gcugacuguccugagaagu

SEQ ID NO: 1334595 - RNA, 19 nt, Artificial Sequence
  Description of Artificial Sequence: Synthetic oligonucleotide
  Antisense strand to SEQ ID NO: 1334594
acuucucaggacagucagc

SEQ ID NO: 1334596 - RNA, 19 nt, Artificial Sequence
  Description of Artificial Sequence: Synthetic oligonucleotide
  Sense strand starting at position 1308 of SEQ ID NO: 1242265
augguuauggcugaauaca

SEQ ID NO: 1334597 - RNA, 19 nt, Artificial Sequence
  Description of Artificial Sequence: Synthetic oligonucleotide
  Antisense strand to SEQ ID NO: 1334596
uguauucagccauaaccau

SEQ ID NO: 1334598 - RNA, 19 nt, Artificial Sequence
  Description of Artificial Sequence: Synthetic oligonucleotide
  Sense strand starting at position 1473 of SEQ ID NO: 1242265
aacccuggccuagaguauu

SEQ ID NO: 1334599 - RNA, 19 nt, Artificial Sequence
  Description of Artificial Sequence: Synthetic oligonucleotide
  Antisense strand to SEQ ID NO: 1334598
aauacucuaggccaggguu

SEQ ID NO: 1334600 - RNA, 19 nt, Artificial Sequence
  Description of Artificial Sequence: Synthetic oligonucleotide
  Sense strand starting at position 1615 of SEQ ID NO: 1242265
ugacuuaauaucgguaaga

SEQ ID NO: 1334601 - RNA, 19 nt, Artificial Sequence
  Description of Artificial Sequence: Synthetic oligonucleotide
  Antisense strand to SEQ ID NO: 1334600
ucuuaccgauauuaaguca

SEQ ID NO: 1334602 - RNA, 19 nt, Artificial Sequence
  Description of Artificial Sequence: Synthetic oligonucleotide
  Sense strand starting at position 1616 of SEQ ID NO: 1242265
gacuuaauaucgguaagau

SEQ ID NO: 1334603 - RNA, 19 nt, Artificial Sequence
  Description of Artificial Sequence: Synthetic oligonucleotide
  Antisense strand to SEQ ID NO: 1334602
aucuuaccgauauuaaguc

SEQ ID NO: 1334604 - RNA, 19 nt, Artificial Sequence
  Description of Artificial Sequence: Synthetic oligonucleotide
  Sense strand starting at position 1624 of SEQ ID NO: 1242265
aucgguaagauguaacaca

SEQ ID NO: 1334605 - RNA, 19 nt, Artificial Sequence
  Description of Artificial Sequence: Synthetic oligonucleotide
  Antisense strand to SEQ ID NO: 1334604
uguguuacaucuuaccgau

SEQ ID NO: 1334606 - RNA, 19 nt, Artificial Sequence
  Description of Artificial Sequence: Synthetic oligonucleotide
  Sense strand starting at position 1672 of SEQ ID NO: 1242265
acugucaucagguauugga

SEQ ID NO: 1334607 - RNA, 19 nt, Artificial Sequence
  Description of Artificial Sequence: Synthetic oligonucleotide
  Antisense strand to SEQ ID NO: 1334606
uccaauaccugaugacagu

SEQ ID NO: 1334608 - RNA, 19 nt, Artificial Sequence
  Description of Artificial Sequence: Synthetic oligonucleotide
  Sense strand starting at position 1708 of SEQ ID NO: 1242265
ggugguuaugcccagaaug

SEQ ID NO: 1334609 - RNA, 19 nt, Artificial Sequence
  Description of Artificial Sequence: Synthetic oligonucleotide
  Antisense strand to SEQ ID NO: 1334608
cauucugggcauaaccacc

SEQ ID NO: 1334610 - RNA, 19 nt, Artificial Sequence
  Description of Artificial Sequence: Synthetic oligonucleotide
  Sense strand starting at position 1710 of SEQ ID NO: 1242265
ugguuaugcccagaauggu

SEQ ID NO: 1334611 - RNA, 19 nt, Artificial Sequence
  Description of Artificial Sequence: Synthetic oligonucleotide
  Antisense strand to SEQ ID NO: 1334610
accauucugggcauaacca

SEQ ID NO: 1334612 - RNA, 19 nt, Artificial Sequence
  Description of Artificial Sequence: Synthetic oligonucleotide
  Sense strand starting at position 1823 of SEQ ID NO: 1242265
cguccauaucaagagucau

SEQ ID NO: 1334613 - RNA, 19 nt, Artificial Sequence
  Description of Artificial Sequence: Synthetic oligonucleotide
  Antisense strand to SEQ ID NO: 1334612
augacucuugauauggacg

SEQ ID NO: 1334614 - RNA, 19 nt, Artificial Sequence
  Description of Artificial Sequence: Synthetic oligonucleotide
  Sense strand starting at position 2143 of SEQ ID NO: 1242265
gguauuaugagccaaaugu

SEQ ID NO: 1334615 - RNA, 19 nt, Artificial Sequence
  Description of Artificial Sequence: Synthetic oligonucleotide
  Antisense strand to SEQ ID NO: 1334614
acauuuggcucauaauacc

SEQ ID NO: 1334616 - RNA, 19 nt, Artificial Sequence
  Description of Artificial Sequence: Synthetic oligonucleotide
  Sense strand starting at position 2271 of SEQ ID NO: 1242265
cugguucccugaucuuaga

SEQ ID NO: 1334617 - RNA, 19 nt, Artificial Sequence
  Description of Artificial Sequence: Synthetic oligonucleotide
  Antisense strand to SEQ ID NO: 1334616
ucuaagaucagggaaccag

SEQ ID NO: 1334618 - RNA, 19 nt, Artificial Sequence
  Description of Artificial Sequence: Synthetic oligonucleotide
  Sense strand starting at position 2302 of SEQ ID NO: 1242265
uaguacuguguggaauaca

SEQ ID NO: 1334619 - RNA, 19 nt, Artificial Sequence
  Description of Artificial Sequence: Synthetic oligonucleotide
  Antisense strand to SEQ ID NO: 1334618
uguauuccacacaguacua

SEQ ID NO: 1334620 - RNA, 19 nt, Artificial Sequence
  Description of Artificial Sequence: Synthetic oligonucleotide
  Sense strand starting at position 2530 of SEQ ID NO: 1242265
uuccgaauuguauagacuu

SEQ ID NO: 1334621 - RNA, 19 nt, Artificial Sequence
  Description of Artificial Sequence: Synthetic oligonucleotide
  Antisense strand to SEQ ID NO: 1334620
aagucuauacaauucggaa

SEQ ID NO: 1334622 - RNA, 19 nt, Artificial Sequence
  Description of Artificial Sequence: Synthetic oligonucleotide
  Sense strand starting at position 2549 of SEQ ID NO: 1242265
guaauacuuccacaaugug

SEQ ID NO: 1334623 - RNA, 19 nt, Artificial Sequence
  Description of Artificial Sequence: Synthetic oligonucleotide
  Antisense strand to SEQ ID NO: 1334622
cacauuguggaaguauuac

SEQ ID NO: 1334624 - RNA, 19 nt, Artificial Sequence
  Description of Artificial Sequence: Synthetic oligonucleotide
  Sense strand starting at position 2552 of SEQ ID NO: 1242265
auacuuccacaaugugaug

SEQ ID NO: 1334625 - RNA, 19 nt, Artificial Sequence
  Description of Artificial Sequence: Synthetic oligonucleotide
  Antisense strand to SEQ ID NO: 1334624
caucacauuguggaaguau

SEQ ID NO: 1334626 - RNA, 19 nt, Artificial Sequence
  Description of Artificial Sequence: Synthetic oligonucleotide
  Sense strand starting at position 2558 of SEQ ID NO: 1242265
ccacaaugugaugaauguu

SEQ ID NO: 1334627 - RNA, 19 nt, Artificial Sequence
  Description of Artificial Sequence: Synthetic oligonucleotide
  Antisense strand to SEQ ID NO: 1334626
aacauucaucacauugugg

SEQ ID NO: 1334628 - RNA, 19 nt, Artificial Sequence
  Description of Artificial Sequence: Synthetic oligonucleotide
  Sense strand starting at position 2677 of SEQ ID NO: 1242265
uccacaguugacggaaaua

SEQ ID NO: 1334629 - RNA, 19 nt, Artificial Sequence
  Description of Artificial Sequence: Synthetic oligonucleotide
  Antisense strand to SEQ ID NO: 1334628
uauuuccgucaacugugga

SEQ ID NO: 1334630 - RNA, 19 nt, Artificial Sequence
  Description of Artificial Sequence: Synthetic oligonucleotide
  Sense strand starting at position 2704 of SEQ ID NO: 1242265
gcugaagauggcuacugaa

SEQ ID NO: 1334631 - RNA, 19 nt, Artificial Sequence
  Description of Artificial Sequence: Synthetic oligonucleotide
  Antisense strand to SEQ ID NO: 1334630
uucaguagccaucuucagc

SEQ ID NO: 1334632 - RNA, 19 nt, Artificial Sequence
  Description of Artificial Sequence: Synthetic oligonucleotide
  Sense strand starting at position 2881 of SEQ ID NO: 1242265
ugacauuacaagugagagu

SEQ ID NO: 1334633 - RNA, 19 nt, Artificial Sequence
  Description of Artificial Sequence: Synthetic oligonucleotide
  Antisense strand to SEQ ID NO: 1334632
acucucacuuguaauguca

SEQ ID NO: 1334634 - RNA, 19 nt, Artificial Sequence
  Description of Artificial Sequence: Synthetic oligonucleotide
  Sense strand starting at position 2973 of SEQ ID NO: 1242265
uguguuuguguagauaaga

SEQ ID NO: 1334635 - RNA, 19 nt, Artificial Sequence
  Description of Artificial Sequence: Synthetic oligonucleotide
  Antisense strand to SEQ ID NO: 1334634
ucuuaucuacacaaacaca

SEQ ID NO: 1334636 - RNA, 19 nt, Artificial Sequence
  Description of Artificial Sequence: Synthetic oligonucleotide
  Sense strand starting at position 2984 of SEQ ID NO: 1242265
agauaagaggucugcaagu

SEQ ID NO: 1334637 - RNA, 19 nt, Artificial Sequence
  Description of Artificial Sequence: Synthetic oligonucleotide
  Antisense strand to SEQ ID NO: 1334636
acuugcagaccucuuaucu

SEQ ID NO: 1334638 - RNA, 19 nt, Artificial Sequence
  Description of Artificial Sequence: Synthetic oligonucleotide
  Sense strand starting at position 2986 of SEQ ID NO: 1242265
auaagaggucugcaaguua

SEQ ID NO: 1334639 - RNA, 19 nt, Artificial Sequence
  Description of Artificial Sequence: Synthetic oligonucleotide
  Antisense strand to SEQ ID NO: 1334638
uaacuugcagaccucuuau

SEQ ID NO: 1334640 - RNA, 19 nt, Artificial Sequence
  Description of Artificial Sequence: Synthetic oligonucleotide
  Sense strand starting at position 3165 of SEQ ID NO: 1242265
gauguacuuccuggaacuu

SEQ ID NO: 1334641 - RNA, 19 nt, Artificial Sequence
  Description of Artificial Sequence: Synthetic oligonucleotide
  Antisense strand to SEQ ID NO: 1334640
aaguuccaggaaguacauc

SEQ ID NO: 1334642 - RNA, 19 nt, Artificial Sequence
  Description of Artificial Sequence: Synthetic oligonucleotide
  Sense strand starting at position 3166 of SEQ ID NO: 1242265
auguacuuccuggaacuuu

SEQ ID NO: 1334643 - RNA, 19 nt, Artificial Sequence
  Description of Artificial Sequence: Synthetic oligonucleotide
  Antisense strand to SEQ ID NO: 1334642
aaaguuccaggaaguacau

SEQ ID NO: 1334644 - RNA, 19 nt, Artificial Sequence
  Description of Artificial Sequence: Synthetic oligonucleotide
  Sense strand starting at position 3534 of SEQ ID NO: 1242265
ggaggucuguacccucaga

SEQ ID NO: 1334645 - RNA, 19 nt, Artificial Sequence
  Description of Artificial Sequence: Synthetic oligonucleotide
  Antisense strand to SEQ ID NO: 1334644
ucugaggguacagaccucc

SEQ ID NO: 1334646 - RNA, 19 nt, Artificial Sequence
  Description of Artificial Sequence: Synthetic oligonucleotide
  Sense strand starting at position 3586 of SEQ ID NO: 1242265
gcuccuauuggguacaauu

SEQ ID NO: 1334647 - RNA, 19 nt, Artificial Sequence
  Description of Artificial Sequence: Synthetic oligonucleotide
  Antisense strand to SEQ ID NO: 1334646
aauuguacccaauaggagc

SEQ ID NO: 1334648 - RNA, 19 nt, Artificial Sequence
  Description of Artificial Sequence: Synthetic oligonucleotide
  Sense strand starting at position 3640 of SEQ ID NO: 1242265
ugaccugauguauauggua

SEQ ID NO: 1334649 - RNA, 19 nt, Artificial Sequence
  Description of Artificial Sequence: Synthetic oligonucleotide
  Antisense strand to SEQ ID NO: 1334648
uaccauauacaucagguca

SEQ ID NO: 1334650 - RNA, 19 nt, Artificial Sequence
  Description of Artificial Sequence: Synthetic oligonucleotide
  Sense strand starting at position 3766 of SEQ ID NO: 1242265
augugaucuccuuacucuc

SEQ ID NO: 1334651 - RNA, 19 nt, Artificial Sequence
  Description of Artificial Sequence: Synthetic oligonucleotide
  Antisense strand to SEQ ID NO: 1334650
gagaguaaggagaucacau

SEQ ID NO: 1334652 - RNA, 19 nt, Artificial Sequence
  Description of Artificial Sequence: Synthetic oligonucleotide
  Sense strand starting at position 3980 of SEQ ID NO: 1242265
ggauuacuugcacagcaca

SEQ ID NO: 1334653 - RNA, 19 nt, Artificial Sequence
  Description of Artificial Sequence: Synthetic oligonucleotide
  Antisense strand to SEQ ID NO: 1334652
ugugcugugcaaguaaucc

SEQ ID NO: 1334654 - RNA, 19 nt, Artificial Sequence
  Description of Artificial Sequence: Synthetic oligonucleotide
  Sense strand starting at position 68 of SEQ ID NO: 1242266
acuucuucuccaggagagu

SEQ ID NO: 1334655 - RNA, 19 nt, Artificial Sequence
  Description of Artificial Sequence: Synthetic oligonucleotide
  Antisense strand to SEQ ID NO: 1334654
acucuccuggagaagaagu

SEQ ID NO: 1334656 - RNA, 19 nt, Artificial Sequence
  Description of Artificial Sequence: Synthetic oligonucleotide
  Sense strand starting at position 77 of SEQ ID NO: 1242266
ccaggagagucaguuaucu

SEQ ID NO: 1334657 - RNA, 19 nt, Artificial Sequence
  Description of Artificial Sequence: Synthetic oligonucleotide
  Antisense strand to SEQ ID NO: 1334656
agauaacugacucuccugg

SEQ ID NO: 1334658 - RNA, 19 nt, Artificial Sequence
  Description of Artificial Sequence: Synthetic oligonucleotide
  Sense strand starting at position 611 of SEQ ID NO: 1242266
auagcuguagucuggaaga

SEQ ID NO: 1334659 - RNA, 19 nt, Artificial Sequence
  Description of Artificial Sequence: Synthetic oligonucleotide
  Antisense strand to SEQ ID NO: 1334658
ucuuccagacuacagcuau

SEQ ID NO: 1334660 - RNA, 19 nt, Artificial Sequence
  Description of Artificial Sequence: Synthetic oligonucleotide
  Sense strand starting at position 613 of SEQ ID NO: 1242266
agcuguagucuggaagaua

SEQ ID NO: 1334661 - RNA, 19 nt, Artificial Sequence
  Description of Artificial Sequence: Synthetic oligonucleotide
  Antisense strand to SEQ ID NO: 1334660
uaucuuccagacuacagcu

SEQ ID NO: 1334662 - RNA, 19 nt, Artificial Sequence
  Description of Artificial Sequence: Synthetic oligonucleotide
  Sense strand starting at position 641 of SEQ ID NO: 1242266
ucagaaugauguccugaag

SEQ ID NO: 1334663 - RNA, 19 nt, Artificial Sequence
  Description of Artificial Sequence: Synthetic oligonucleotide
  Antisense strand to SEQ ID NO: 1334662
cuucaggacaucauucuga

SEQ ID NO: 1334664 - RNA, 19 nt, Artificial Sequence
  Description of Artificial Sequence: Synthetic oligonucleotide
  Sense strand starting at position 644 of SEQ ID NO: 1242266
gaaugauguccugaagucu

SEQ ID NO: 1334665 - RNA, 19 nt, Artificial Sequence
  Description of Artificial Sequence: Synthetic oligonucleotide
  Antisense strand to SEQ ID NO: 1334664
agacuucaggacaucauuc

SEQ ID NO: 1334666 - RNA, 19 nt, Artificial Sequence
  Description of Artificial Sequence: Synthetic oligonucleotide
  Sense strand starting at position 650 of SEQ ID NO: 1242266
uguccugaagucugaauag

SEQ ID NO: 1334667 - RNA, 19 nt, Artificial Sequence
  Description of Artificial Sequence: Synthetic oligonucleotide
  Antisense strand to SEQ ID NO: 1334666
cuauucagacuucaggaca

SEQ ID NO: 1334668 - RNA, 19 nt, Artificial Sequence
  Description of Artificial Sequence: Synthetic oligonucleotide
  Sense strand starting at position 1030 of SEQ ID NO: 1242266
cuuauuucgguaggaaguu

SEQ ID NO: 1334669 - RNA, 19 nt, Artificial Sequence
  Description of Artificial Sequence: Synthetic oligonucleotide
  Antisense strand to SEQ ID NO: 1334668
aacuuccuaccgaaauaag

SEQ ID NO: 1334670 - RNA, 19 nt, Artificial Sequence
  Description of Artificial Sequence: Synthetic oligonucleotide
  Sense strand starting at position 1051 of SEQ ID NO: 1242266
aagguauuacagugcuuaa

SEQ ID NO: 1334671 - RNA, 19 nt, Artificial Sequence
  Description of Artificial Sequence: Synthetic oligonucleotide
  Antisense strand to SEQ ID NO: 1334670
uuaagcacuguaauaccuu

SEQ ID NO: 1334672 - RNA, 19 nt, Artificial Sequence
  Description of Artificial Sequence: Synthetic oligonucleotide
  Sense strand starting at position 1105 of SEQ ID NO: 1242266
guuccucacccuuacagua

SEQ ID NO: 1334673 - RNA, 19 nt, Artificial Sequence
  Description of Artificial Sequence: Synthetic oligonucleotide
  Antisense strand to SEQ ID NO: 1334672
uacuguaagggugaggaac

SEQ ID NO: 1334674 - RNA, 19 nt, Artificial Sequence
  Description of Artificial Sequence: Synthetic oligonucleotide
  Sense strand starting at position 1191 of SEQ ID NO: 1242266
augaaauauuuggacuauc

SEQ ID NO: 1334675 - RNA, 19 nt, Artificial Sequence
  Description of Artificial Sequence: Synthetic oligonucleotide
  Antisense strand to SEQ ID NO: 1334674
gauaguccaaauauuucau

SEQ ID NO: 1334676 - RNA, 19 nt, Artificial Sequence
  Description of Artificial Sequence: Synthetic oligonucleotide
  Sense strand starting at position 1227 of SEQ ID NO: 1242266
ccuacugaguuugcaugaa

SEQ ID NO: 1334677 - RNA, 19 nt, Artificial Sequence
  Description of Artificial Sequence: Synthetic oligonucleotide
  Antisense strand to SEQ ID NO: 1334676
uucaugcaaacucaguagg

SEQ ID NO: 1334678 - RNA, 19 nt, Artificial Sequence
  Description of Artificial Sequence: Synthetic oligonucleotide
  Sense strand starting at position 1313 of SEQ ID NO: 1242266
augucuuaugucuaaagcu

SEQ ID NO: 1334679 - RNA, 19 nt, Artificial Sequence
  Description of Artificial Sequence: Synthetic oligonucleotide
  Antisense strand to SEQ ID NO: 1334678
agcuuuagacauaagacau

SEQ ID NO: 1334680 - RNA, 19 nt, Artificial Sequence
  Description of Artificial Sequence: Synthetic oligonucleotide
  Sense strand starting at position 1322 of SEQ ID NO: 1242266
gucuaaagcugaguuagaa

SEQ ID NO: 1334681 - RNA, 19 nt, Artificial Sequence
  Description of Artificial Sequence: Synthetic oligonucleotide
  Antisense strand to SEQ ID NO: 1334680
uucuaacucagcuuuagac

SEQ ID NO: 1334682 - RNA, 19 nt, Artificial Sequence
  Description of Artificial Sequence: Synthetic oligonucleotide
  Sense strand starting at position 1452 of SEQ ID NO: 1242266
agagacuguuaucccuauu

SEQ ID NO: 1334683 - RNA, 19 nt, Artificial Sequence
  Description of Artificial Sequence: Synthetic oligonucleotide
  Antisense strand to SEQ ID NO: 1334682
aauagggauaacagucucu

SEQ ID NO: 1334684 - RNA, 19 nt, Artificial Sequence
  Description of Artificial Sequence: Synthetic oligonucleotide
  Sense strand starting at position 1502 of SEQ ID NO: 1242266
aaagauuacauggguggua

SEQ ID NO: 1334685 - RNA, 19 nt, Artificial Sequence
  Description of Artificial Sequence: Synthetic oligonucleotide
  Antisense strand to SEQ ID NO: 1334684
uaccacccauguaaucuuu

SEQ ID NO: 1334686 - RNA, 19 nt, Artificial Sequence
  Description of Artificial Sequence: Synthetic oligonucleotide
  Sense strand starting at position 1545 of SEQ ID NO: 1242266
cgguuacagaguuagucau

SEQ ID NO: 1334687 - RNA, 19 nt, Artificial Sequence
  Description of Artificial Sequence: Synthetic oligonucleotide
  Antisense strand to SEQ ID NO: 1334686
augacuaacucuguaaccg

SEQ ID NO: 1334688 - RNA, 19 nt, Artificial Sequence
  Description of Artificial Sequence: Synthetic oligonucleotide
  Sense strand starting at position 1619 of SEQ ID NO: 1242266
uuuacuugacuuggugaua

SEQ ID NO: 1334689 - RNA, 19 nt, Artificial Sequence
  Description of Artificial Sequence: Synthetic oligonucleotide
  Antisense strand to SEQ ID NO: 1334688
uaucaccaagucaaguaaa

SEQ ID NO: 1334690 - RNA, 19 nt, Artificial Sequence
  Description of Artificial Sequence: Synthetic oligonucleotide
  Sense strand starting at position 1620 of SEQ ID NO: 1242266
uuacuugacuuggugauau

SEQ ID NO: 1334691 - RNA, 19 nt, Artificial Sequence
  Description of Artificial Sequence: Synthetic oligonucleotide
  Antisense strand to SEQ ID NO: 1334690
auaucaccaagucaaguaa

SEQ ID NO: 1334692 - RNA, 19 nt, Artificial Sequence
  Description of Artificial Sequence: Synthetic oligonucleotide
  Sense strand starting at position 1624 of SEQ ID NO: 1242266
uugacuuggugauauuuga

SEQ ID NO: 1334693 - RNA, 19 nt, Artificial Sequence
  Description of Artificial Sequence: Synthetic oligonucleotide
  Antisense strand to SEQ ID NO: 1334692
ucaaauaucaccaagucaa

SEQ ID NO: 1334694 - RNA, 19 nt, Artificial Sequence
  Description of Artificial Sequence: Synthetic oligonucleotide
  Sense strand starting at position 1647 of SEQ ID NO: 1242266
uaggucaucuauucuagga

SEQ ID NO: 1334695 - RNA, 19 nt, Artificial Sequence
  Description of Artificial Sequence: Synthetic oligonucleotide
  Antisense strand to SEQ ID NO: 1334694
uccuagaauagaugaccua

SEQ ID NO: 1334696 - RNA, 19 nt, Artificial Sequence
  Description of Artificial Sequence: Synthetic oligonucleotide
  Sense strand starting at position 1984 of SEQ ID NO: 1242266
gcugcauagcuggucuuua

SEQ ID NO: 1334697 - RNA, 19 nt, Artificial Sequence
  Description of Artificial Sequence: Synthetic oligonucleotide
  Antisense strand to SEQ ID NO: 1334696
uaaagaccagcuaugcagc

SEQ ID NO: 1334698 - RNA, 19 nt, Artificial Sequence
  Description of Artificial Sequence: Synthetic oligonucleotide
  Sense strand starting at position 2113 of SEQ ID NO: 1242266
gaaggaaugucaccacuuu

SEQ ID NO: 1334699 - RNA, 19 nt, Artificial Sequence
  Description of Artificial Sequence: Synthetic oligonucleotide
  Antisense strand to SEQ ID NO: 1334698
aaaguggugacauuccuuc

SEQ ID NO: 1334700 - RNA, 19 nt, Artificial Sequence
  Description of Artificial Sequence: Synthetic oligonucleotide
  Sense strand starting at position 2159 of SEQ ID NO: 1242266
gugcauggccaccauuaaa

SEQ ID NO: 1334701 - RNA, 19 nt, Artificial Sequence
  Description of Artificial Sequence: Synthetic oligonucleotide
  Antisense strand to SEQ ID NO: 1334700
uuuaaugguggccaugcac

SEQ ID NO: 1334702 - RNA, 19 nt, Artificial Sequence
  Description of Artificial Sequence: Synthetic oligonucleotide
  Sense strand starting at position 2236 of SEQ ID NO: 1242266
cccuguacuguacacauua

SEQ ID NO: 1334703 - RNA, 19 nt, Artificial Sequence
  Description of Artificial Sequence: Synthetic oligonucleotide
  Antisense strand to SEQ ID NO: 1334702
uaauguguacaguacaggg

SEQ ID NO: 1334704 - RNA, 19 nt, Artificial Sequence
  Description of Artificial Sequence: Synthetic oligonucleotide
  Sense strand starting at position 2321 of SEQ ID NO: 1242266
gugucauagccuuucuugu

SEQ ID NO: 1334705 - RNA, 19 nt, Artificial Sequence
  Description of Artificial Sequence: Synthetic oligonucleotide
  Antisense strand to SEQ ID NO: 1334704
acaagaaaggcuaugacac

SEQ ID NO: 1334706 - RNA, 19 nt, Artificial Sequence
  Description of Artificial Sequence: Synthetic oligonucleotide
  Sense strand starting at position 2335 of SEQ ID NO: 1242266
cuuguuuacuauuccagau

SEQ ID NO: 1334707 - RNA, 19 nt, Artificial Sequence
  Description of Artificial Sequence: Synthetic oligonucleotide
  Antisense strand to SEQ ID NO: 1334706
aucuggaauaguaaacaag

SEQ ID NO: 1334708 - RNA, 19 nt, Artificial Sequence
  Description of Artificial Sequence: Synthetic oligonucleotide
  Sense strand starting at position 2349 of SEQ ID NO: 1242266
cagauaggcuuuccaagua

SEQ ID NO: 1334709 - RNA, 19 nt, Artificial Sequence
  Description of Artificial Sequence: Synthetic oligonucleotide
  Antisense strand to SEQ ID NO: 1334708
uacuuggaaagccuaucug

SEQ ID NO: 1334710 - RNA, 19 nt, Artificial Sequence
  Description of Artificial Sequence: Synthetic oligonucleotide
  Sense strand starting at position 2359 of SEQ ID NO: 1242266
uuccaaguauuguuuagau

SEQ ID NO: 1334711 - RNA, 19 nt, Artificial Sequence
  Description of Artificial Sequence: Synthetic oligonucleotide
  Antisense strand to SEQ ID NO: 1334710
aucuaaacaauacuuggaa

SEQ ID NO: 1334712 - RNA, 19 nt, Artificial Sequence
  Description of Artificial Sequence: Synthetic oligonucleotide
  Sense strand starting at position 2361 of SEQ ID NO: 1242266
ccaaguauuguuuagauuc

SEQ ID NO: 1334713 - RNA, 19 nt, Artificial Sequence
  Description of Artificial Sequence: Synthetic oligonucleotide
  Antisense strand to SEQ ID NO: 1334712
gaaucuaaacaauacuugg

SEQ ID NO: 1334714 - RNA, 19 nt, Artificial Sequence
  Description of Artificial Sequence: Synthetic oligonucleotide
  Sense strand starting at position 2377 of SEQ ID NO: 1242266
uucuuccuuccagaguuua

SEQ ID NO: 1334715 - RNA, 19 nt, Artificial Sequence
  Description of Artificial Sequence: Synthetic oligonucleotide
  Antisense strand to SEQ ID NO: 1334714
uaaacucuggaaggaagaa

SEQ ID NO: 1334716 - RNA, 19 nt, Artificial Sequence
  Description of Artificial Sequence: Synthetic oligonucleotide
  Sense strand starting at position 2592 of SEQ ID NO: 1242266
ggacauaggaacuguuuau

SEQ ID NO: 1334717 - RNA, 19 nt, Artificial Sequence
  Description of Artificial Sequence: Synthetic oligonucleotide
  Antisense strand to SEQ ID NO: 1334716
auaaacaguuccuaugucc

SEQ ID NO: 1334718 - RNA, 19 nt, Artificial Sequence
  Description of Artificial Sequence: Synthetic oligonucleotide
  Sense strand starting at position 2677 of SEQ ID NO: 1242266
cugauauuggugcaauauu

SEQ ID NO: 1334719 - RNA, 19 nt, Artificial Sequence
  Description of Artificial Sequence: Synthetic oligonucleotide
  Antisense strand to SEQ ID NO: 1334718
aauauugcaccaauaucag

SEQ ID NO: 1334720 - RNA, 19 nt, Artificial Sequence
  Description of Artificial Sequence: Synthetic oligonucleotide
  Sense strand starting at position 2685 of SEQ ID NO: 1242266
ggugcaauauuccuaaaua

SEQ ID NO: 1334721 - RNA, 19 nt, Artificial Sequence
  Description of Artificial Sequence: Synthetic oligonucleotide
  Antisense strand to SEQ ID NO: 1334720
uauuuaggaauauugcacc

SEQ ID NO: 1334722 - RNA, 19 nt, Artificial Sequence
  Description of Artificial Sequence: Synthetic oligonucleotide
  Sense strand starting at position 2737 of SEQ ID NO: 1242266
ggcacagaaugaucuaugu

SEQ ID NO: 1334723 - RNA, 19 nt, Artificial Sequence
  Description of Artificial Sequence: Synthetic oligonucleotide
  Antisense strand to SEQ ID NO: 1334722
acauagaucauucugugcc

SEQ ID NO: 1334724 - RNA, 19 nt, Artificial Sequence
  Description of Artificial Sequence: Synthetic oligonucleotide
  Sense strand starting at position 2892 of SEQ ID NO: 1242266
aguuauagggaucguggau

SEQ ID NO: 1334725 - RNA, 19 nt, Artificial Sequence
  Description of Artificial Sequence: Synthetic oligonucleotide
  Antisense strand to SEQ ID NO: 1334724
auccacgaucccuauaacu

SEQ ID NO: 1334726 - RNA, 19 nt, Artificial Sequence
  Description of Artificial Sequence: Synthetic oligonucleotide
  Sense strand starting at position 2999 of SEQ ID NO: 1242266
ucuacacucuugucacuga

SEQ ID NO: 1334727 - RNA, 19 nt, Artificial Sequence
  Description of Artificial Sequence: Synthetic oligonucleotide
  Antisense strand to SEQ ID NO: 1334726
ucagugacaagaguguaga

SEQ ID NO: 1334728 - RNA, 19 nt, Artificial Sequence
  Description of Artificial Sequence: Synthetic oligonucleotide
  Sense strand starting at position 3386 of SEQ ID NO: 1242266
uguuacuuuggguaggaca

SEQ ID NO: 1334729 - RNA, 19 nt, Artificial Sequence
  Description of Artificial Sequence: Synthetic oligonucleotide
  Antisense strand to SEQ ID NO: 1334728
uguccuacccaaaguaaca

SEQ ID NO: 1334730 - RNA, 19 nt, Artificial Sequence
  Description of Artificial Sequence: Synthetic oligonucleotide
  Sense strand starting at position 3388 of SEQ ID NO: 1242266
uuacuuuggguaggacauu

SEQ ID NO: 1334731 - RNA, 19 nt, Artificial Sequence
  Description of Artificial Sequence: Synthetic oligonucleotide
  Antisense strand to SEQ ID NO: 1334730
aauguccuacccaaaguaa

SEQ ID NO: 1334732 - RNA, 19 nt, Artificial Sequence
  Description of Artificial Sequence: Synthetic oligonucleotide
  Sense strand starting at position 3801 of SEQ ID NO: 1242266
gcuggcuaucuuguuguau

SEQ ID NO: 1334733 - RNA, 19 nt, Artificial Sequence
  Description of Artificial Sequence: Synthetic oligonucleotide
  Antisense strand to SEQ ID NO: 1334732
auacaacaagauagccagc

SEQ ID NO: 1334734 - RNA, 19 nt, Artificial Sequence
  Description of Artificial Sequence: Synthetic oligonucleotide
  Sense strand starting at position 6 of SEQ ID NO: 1242267
aggucugaguccuuagcau

SEQ ID NO: 1334735 - RNA, 19 nt, Artificial Sequence
  Description of Artificial Sequence: Synthetic oligonucleotide
  Antisense strand to SEQ ID NO: 1334734
augcuaaggacucagaccu

SEQ ID NO: 1334736 - RNA, 19 nt, Artificial Sequence
  Description of Artificial Sequence: Synthetic oligonucleotide
  Sense strand starting at position 200 of SEQ ID NO: 1242267
ucacaacaccauugugagu

SEQ ID NO: 1334737 - RNA, 19 nt, Artificial Sequence
  Description of Artificial Sequence: Synthetic oligonucleotide
  Antisense strand to SEQ ID NO: 1334736
acucacaaugguguuguga

SEQ ID NO: 1334738 - RNA, 19 nt, Artificial Sequence
  Description of Artificial Sequence: Synthetic oligonucleotide
  Sense strand starting at position 290 of SEQ ID NO: 1242267
aaagaaagguaugcuuaua

SEQ ID NO: 1334739 - RNA, 19 nt, Artificial Sequence
  Description of Artificial Sequence: Synthetic oligonucleotide
  Antisense strand to SEQ ID NO: 1334738
uauaagcauaccuuucuuu

SEQ ID NO: 1334740 - RNA, 19 nt, Artificial Sequence
  Description of Artificial Sequence: Synthetic oligonucleotide
  Sense strand starting at position 375 of SEQ ID NO: 1242267
gcuacugcgagcucuguuu

SEQ ID NO: 1334741 - RNA, 19 nt, Artificial Sequence
  Description of Artificial Sequence: Synthetic oligonucleotide
  Antisense strand to SEQ ID NO: 1334740
aaacagagcucgcaguagc

SEQ ID NO: 1334742 - RNA, 19 nt, Artificial Sequence
  Description of Artificial Sequence: Synthetic oligonucleotide
  Sense strand starting at position 421 of SEQ ID NO: 1242267
agaaguaauuguccaagac

SEQ ID NO: 1334743 - RNA, 19 nt, Artificial Sequence
  Description of Artificial Sequence: Synthetic oligonucleotide
  Antisense strand to SEQ ID NO: 1334742
gucuuggacaauuacuucu

SEQ ID NO: 1334744 - RNA, 19 nt, Artificial Sequence
  Description of Artificial Sequence: Synthetic oligonucleotide
  Sense strand starting at position 425 of SEQ ID NO: 1242267
guaauuguccaagacagua

SEQ ID NO: 1334745 - RNA, 19 nt, Artificial Sequence
  Description of Artificial Sequence: Synthetic oligonucleotide
  Antisense strand to SEQ ID NO: 1334744
uacugucuuggacaauuac

SEQ ID NO: 1334746 - RNA, 19 nt, Artificial Sequence
  Description of Artificial Sequence: Synthetic oligonucleotide
  Sense strand starting at position 640 of SEQ ID NO: 1242267
acaugaacaugugugaugu

SEQ ID NO: 1334747 - RNA, 19 nt, Artificial Sequence
  Description of Artificial Sequence: Synthetic oligonucleotide
  Antisense strand to SEQ ID NO: 1334746
acaucacacauguucaugu

SEQ ID NO: 1334748 - RNA, 19 nt, Artificial Sequence
  Description of Artificial Sequence: Synthetic oligonucleotide
  Sense strand starting at position 689 of SEQ ID NO: 1242267
gccagauccucuuccagga

SEQ ID NO: 1334749 - RNA, 19 nt, Artificial Sequence
  Description of Artificial Sequence: Synthetic oligonucleotide
  Antisense strand to SEQ ID NO: 1334748
uccuggaagaggaucuggc

SEQ ID NO: 1334750 - RNA, 19 nt, Artificial Sequence
  Description of Artificial Sequence: Synthetic oligonucleotide
  Sense strand starting at position 748 of SEQ ID NO: 1242267
gaauuagggucucucacua

SEQ ID NO: 1334751 - RNA, 19 nt, Artificial Sequence
  Description of Artificial Sequence: Synthetic oligonucleotide
  Antisense strand to SEQ ID NO: 1334750
uagugagagacccuaauuc

SEQ ID NO: 1334752 - RNA, 19 nt, Artificial Sequence
  Description of Artificial Sequence: Synthetic oligonucleotide
  Sense strand starting at position 825 of SEQ ID NO: 1242267
cugacaauagcuugccaaa

SEQ ID NO: 1334753 - RNA, 19 nt, Artificial Sequence
  Description of Artificial Sequence: Synthetic oligonucleotide
  Antisense strand to SEQ ID NO: 1334752
uuuggcaagcuauugucag

SEQ ID NO: 1334754 - RNA, 19 nt, Artificial Sequence
  Description of Artificial Sequence: Synthetic oligonucleotide
  Sense strand starting at position 877 of SEQ ID NO: 1242267
gagaacuuggaguggcuua

SEQ ID NO: 1334755 - RNA, 19 nt, Artificial Sequence
  Description of Artificial Sequence: Synthetic oligonucleotide
  Antisense strand to SEQ ID NO: 1334754
uaagccacuccaaguucuc

SEQ ID NO: 1334756 - RNA, 19 nt, Artificial Sequence
  Description of Artificial Sequence: Synthetic oligonucleotide
  Sense strand starting at position 993 of SEQ ID NO: 1242267
ggccauuuauaaguuugua

SEQ ID NO: 1334757 - RNA, 19 nt, Artificial Sequence
  Description of Artificial Sequence: Synthetic oligonucleotide
  Antisense strand to SEQ ID NO: 1334756
uacaaacuuauaaauggcc

SEQ ID NO: 1334758 - RNA, 19 nt, Artificial Sequence
  Description of Artificial Sequence: Synthetic oligonucleotide
  Sense strand starting at position 1002 of SEQ ID NO: 1242267
uaaguuuguagagaaguga

SEQ ID NO: 1334759 - RNA, 19 nt, Artificial Sequence
  Description of Artificial Sequence: Synthetic oligonucleotide
  Antisense strand to SEQ ID NO: 1334758
ucacuucucuacaaacuua

SEQ ID NO: 1334760 - RNA, 19 nt, Artificial Sequence
  Description of Artificial Sequence: Synthetic oligonucleotide
  Sense strand starting at position 1019 of SEQ ID NO: 1242267
gaagcaacuugucuaagga

SEQ ID NO: 1334761 - RNA, 19 nt, Artificial Sequence
  Description of Artificial Sequence: Synthetic oligonucleotide
  Antisense strand to SEQ ID NO: 1334760
uccuuagacaaguugcuuc

SEQ ID NO: 1334762 - RNA, 19 nt, Artificial Sequence
  Description of Artificial Sequence: Synthetic oligonucleotide
  Sense strand starting at position 1042 of SEQ ID NO: 1242267
aaggcaaagucuggauaga

SEQ ID NO: 1334763 - RNA, 19 nt, Artificial Sequence
  Description of Artificial Sequence: Synthetic oligonucleotide
  Antisense strand to SEQ ID NO: 1334762
ucuauccagacuuugccuu

SEQ ID NO: 1334764 - RNA, 19 nt, Artificial Sequence
  Description of Artificial Sequence: Synthetic oligonucleotide
  Sense strand starting at position 1084 of SEQ ID NO: 1242267
ccaaaugugucuucggcca

SEQ ID NO: 1334765 - RNA, 19 nt, Artificial Sequence
  Description of Artificial Sequence: Synthetic oligonucleotide
  Antisense strand to SEQ ID NO: 1334764
uggccgaagacacauuugg

SEQ ID NO: 1334766 - RNA, 19 nt, Artificial Sequence
  Description of Artificial Sequence: Synthetic oligonucleotide
  Sense strand starting at position 1099 of SEQ ID NO: 1242267
gccacuguccuauauacua

SEQ ID NO: 1334767 - RNA, 19 nt, Artificial Sequence
  Description of Artificial Sequence: Synthetic oligonucleotide
  Antisense strand to SEQ ID NO: 1334766
uaguauauaggacaguggc

SEQ ID NO: 1334768 - RNA, 19 nt, Artificial Sequence
  Description of Artificial Sequence: Synthetic oligonucleotide
  Sense strand starting at position 1451 of SEQ ID NO: 1242267
gcggcagcuucaccuguaa

SEQ ID NO: 1334769 - RNA, 19 nt, Artificial Sequence
  Description of Artificial Sequence: Synthetic oligonucleotide
  Antisense strand to SEQ ID NO: 1334768
uuacaggugaagcugccgc

SEQ ID NO: 1334770 - RNA, 19 nt, Artificial Sequence
  Description of Artificial Sequence: Synthetic oligonucleotide
  Sense strand starting at position 1464 of SEQ ID NO: 1242267
cuguaacuccugcgggagu

SEQ ID NO: 1334771 - RNA, 19 nt, Artificial Sequence
  Description of Artificial Sequence: Synthetic oligonucleotide
  Antisense strand to SEQ ID NO: 1334770
acucccgcaggaguuacag

SEQ ID NO: 1334772 - RNA, 19 nt, Artificial Sequence
  Description of Artificial Sequence: Synthetic oligonucleotide
  Sense strand starting at position 1533 of SEQ ID NO: 1242267
cacccuuccuguuugggaa

SEQ ID NO: 1334773 - RNA, 19 nt, Artificial Sequence
  Description of Artificial Sequence: Synthetic oligonucleotide
  Antisense strand to SEQ ID NO: 1334772
uucccaaacaggaagggug

SEQ ID NO: 1334774 - RNA, 19 nt, Artificial Sequence
  Description of Artificial Sequence: Synthetic oligonucleotide
  Sense strand starting at position 1563 of SEQ ID NO: 1242267
gcaugaauucccugcacuc

SEQ ID NO: 1334775 - RNA, 19 nt, Artificial Sequence
  Description of Artificial Sequence: Synthetic oligonucleotide
  Antisense strand to SEQ ID NO: 1334774
gagugcagggaauucaugc

SEQ ID NO: 1334776 - RNA, 19 nt, Artificial Sequence
  Description of Artificial Sequence: Synthetic oligonucleotide
  Sense strand starting at position 1609 of SEQ ID NO: 1242267
aggcaucagaccugaagau

SEQ ID NO: 1334777 - RNA, 19 nt, Artificial Sequence
  Description of Artificial Sequence: Synthetic oligonucleotide
  Antisense strand to SEQ ID NO: 1334776
aucuucaggucugaugccu

SEQ ID NO: 1334778 - RNA, 19 nt, Artificial Sequence
  Description of Artificial Sequence: Synthetic oligonucleotide
  Sense strand starting at position 1692 of SEQ ID NO: 1242267
ggcaaagugguguaaguga

SEQ ID NO: 1334779 - RNA, 19 nt, Artificial Sequence
  Description of Artificial Sequence: Synthetic oligonucleotide
  Antisense strand to SEQ ID NO: 1334778
ucacuuacaccacuuugcc

SEQ ID NO: 1334780 - RNA, 19 nt, Artificial Sequence
  Description of Artificial Sequence: Synthetic oligonucleotide
  Sense strand starting at position 1697 of SEQ ID NO: 1242267
agugguguaagugacuuaa

SEQ ID NO: 1334781 - RNA, 19 nt, Artificial Sequence
  Description of Artificial Sequence: Synthetic oligonucleotide
  Antisense strand to SEQ ID NO: 1334780
uuaagucacuuacaccacu

SEQ ID NO: 1334782 - RNA, 19 nt, Artificial Sequence
  Description of Artificial Sequence: Synthetic oligonucleotide
  Sense strand starting at position 1699 of SEQ ID NO: 1242267
ugguguaagugacuuaaca

SEQ ID NO: 1334783 - RNA, 19 nt, Artificial Sequence
  Description of Artificial Sequence: Synthetic oligonucleotide
  Antisense strand to SEQ ID NO: 1334782
uguuaagucacuuacacca

SEQ ID NO: 1334784 - RNA, 19 nt, Artificial Sequence
  Description of Artificial Sequence: Synthetic oligonucleotide
  Sense strand starting at position 1701 of SEQ ID NO: 1242267
guguaagugacuuaacaug

SEQ ID NO: 1334785 - RNA, 19 nt, Artificial Sequence
  Description of Artificial Sequence: Synthetic oligonucleotide
  Antisense strand to SEQ ID NO: 1334784
cauguuaagucacuuacac

SEQ ID NO: 1334786 - RNA, 19 nt, Artificial Sequence
  Description of Artificial Sequence: Synthetic oligonucleotide
  Sense strand starting at position 2017 of SEQ ID NO: 1242267
ucagaaaugcauuauggca

SEQ ID NO: 1334787 - RNA, 19 nt, Artificial Sequence
  Description of Artificial Sequence: Synthetic oligonucleotide
  Antisense strand to SEQ ID NO: 1334786
ugccauaaugcauuucuga

SEQ ID NO: 1334788 - RNA, 19 nt, Artificial Sequence
  Description of Artificial Sequence: Synthetic oligonucleotide
  Sense strand starting at position 3032 of SEQ ID NO: 1242267
accugucaccuuggaugau

SEQ ID NO: 1334789 - RNA, 19 nt, Artificial Sequence
  Description of Artificial Sequence: Synthetic oligonucleotide
  Antisense strand to SEQ ID NO: 1334788
aucauccaaggugacaggu

SEQ ID NO: 1334790 - RNA, 19 nt, Artificial Sequence
  Description of Artificial Sequence: Synthetic oligonucleotide
  Sense strand starting at position 3041 of SEQ ID NO: 1242267
cuuggaugaucugucccau

SEQ ID NO: 1334791 - RNA, 19 nt, Artificial Sequence
  Description of Artificial Sequence: Synthetic oligonucleotide
  Antisense strand to SEQ ID NO: 1334790
augggacagaucauccaag

SEQ ID NO: 1334792 - RNA, 19 nt, Artificial Sequence
  Description of Artificial Sequence: Synthetic oligonucleotide
  Sense strand starting at position 3170 of SEQ ID NO: 1242267
gacuuucuagccugagagu

SEQ ID NO: 1334793 - RNA, 19 nt, Artificial Sequence
  Description of Artificial Sequence: Synthetic oligonucleotide
  Antisense strand to SEQ ID NO: 1334792
acucucaggcuagaaaguc

SEQ ID NO: 1334794 - RNA, 19 nt, Artificial Sequence
  Description of Artificial Sequence: Synthetic oligonucleotide
  Sense strand starting at position 3289 of SEQ ID NO: 1242267
agcagucccugccuaagau

SEQ ID NO: 1334795 - RNA, 19 nt, Artificial Sequence
  Description of Artificial Sequence: Synthetic oligonucleotide
  Antisense strand to SEQ ID NO: 1334794
aucuuaggcagggacugcu

SEQ ID NO: 1334796 - RNA, 19 nt, Artificial Sequence
  Description of Artificial Sequence: Synthetic oligonucleotide
  Sense strand starting at position 3475 of SEQ ID NO: 1242267
ggcuguguucuggcugagu

SEQ ID NO: 1334797 - RNA, 19 nt, Artificial Sequence
  Description of Artificial Sequence: Synthetic oligonucleotide
  Antisense strand to SEQ ID NO: 1334796
acucagccagaacacagcc

SEQ ID NO: 1334798 - RNA, 19 nt, Artificial Sequence
  Description of Artificial Sequence: Synthetic oligonucleotide
  Sense strand starting at position 3500 of SEQ ID NO: 1242267
gaaguucuggcuuggaaac

SEQ ID NO: 1334799 - RNA, 19 nt, Artificial Sequence
  Description of Artificial Sequence: Synthetic oligonucleotide
  Antisense strand to SEQ ID NO: 1334798
guuuccaagccagaacuuc

SEQ ID NO: 1334800 - RNA, 19 nt, Artificial Sequence
  Description of Artificial Sequence: Synthetic oligonucleotide
  Sense strand starting at position 3501 of SEQ ID NO: 1242267
aaguucuggcuuggaaacu

SEQ ID NO: 1334801 - RNA, 19 nt, Artificial Sequence
  Description of Artificial Sequence: Synthetic oligonucleotide
  Antisense strand to SEQ ID NO: 1334800
aguuuccaagccagaacuu

SEQ ID NO: 1334802 - RNA, 19 nt, Artificial Sequence
  Description of Artificial Sequence: Synthetic oligonucleotide
  Sense strand starting at position 3511 of SEQ ID NO: 1242267
uuggaaacucaguacaugu

SEQ ID NO: 1334803 - RNA, 19 nt, Artificial Sequence
  Description of Artificial Sequence: Synthetic oligonucleotide
  Antisense strand to SEQ ID NO: 1334802
acauguacugaguuuccaa

SEQ ID NO: 1334804 - RNA, 19 nt, Artificial Sequence
  Description of Artificial Sequence: Synthetic oligonucleotide
  Sense strand starting at position 3563 of SEQ ID NO: 1242267
ggugacugccagugucaca

SEQ ID NO: 1334805 - RNA, 19 nt, Artificial Sequence
  Description of Artificial Sequence: Synthetic oligonucleotide
  Antisense strand to SEQ ID NO: 1334804
ugugacacuggcagucacc

SEQ ID NO: 1334806 - RNA, 19 nt, Artificial Sequence
  Description of Artificial Sequence: Synthetic oligonucleotide
  Sense strand starting at position 3643 of SEQ ID NO: 1242267
augauuaacugaggucacu

SEQ ID NO: 1334807 - RNA, 19 nt, Artificial Sequence
  Description of Artificial Sequence: Synthetic oligonucleotide
  Antisense strand to SEQ ID NO: 1334806
agugaccucaguuaaucau

SEQ ID NO: 1334808 - RNA, 19 nt, Artificial Sequence
  Description of Artificial Sequence: Synthetic oligonucleotide
  Sense strand starting at position 3773 of SEQ ID NO: 1242267
ccuaauagagcucaggcaa

SEQ ID NO: 1334809 - RNA, 19 nt, Artificial Sequence
  Description of Artificial Sequence: Synthetic oligonucleotide
  Antisense strand to SEQ ID NO: 1334808
uugccugagcucuauuagg

SEQ ID NO: 1334810 - RNA, 19 nt, Artificial Sequence
  Description of Artificial Sequence: Synthetic oligonucleotide
  Sense strand starting at position 3859 of SEQ ID NO: 1242267
ucggcuuuccuagggaaag

SEQ ID NO: 1334811 - RNA, 19 nt, Artificial Sequence
  Description of Artificial Sequence: Synthetic oligonucleotide
  Antisense strand to SEQ ID NO: 1334810
cuuucccuaggaaagccga

SEQ ID NO: 1334812 - RNA, 19 nt, Artificial Sequence
  Description of Artificial Sequence: Synthetic oligonucleotide
  Sense strand starting at position 3861 of SEQ ID NO: 1242267
ggcuuuccuagggaaagca

SEQ ID NO: 1334813 - RNA, 19 nt, Artificial Sequence
  Description of Artificial Sequence: Synthetic oligonucleotide
  Antisense strand to SEQ ID NO: 1334812
ugcuuucccuaggaaagcc

SEQ ID NO: 1334814 - RNA, 19 nt, Artificial Sequence
  Description of Artificial Sequence: Synthetic oligonucleotide
  Sense strand starting at position 48 of SEQ ID NO: 1242268
agcagugcucccuaaauau

SEQ ID NO: 1334815 - RNA, 19 nt, Artificial Sequence
  Description of Artificial Sequence: Synthetic oligonucleotide
  Antisense strand to SEQ ID NO: 1334814
auauuuagggagcacugcu

SEQ ID NO: 1334816 - RNA, 19 nt, Artificial Sequence
  Description of Artificial Sequence: Synthetic oligonucleotide
  Sense strand starting at position 85 of SEQ ID NO: 1242268
agggaaaugucccagaggu

SEQ ID NO: 1334817 - RNA, 19 nt, Artificial Sequence
  Description of Artificial Sequence: Synthetic oligonucleotide
  Antisense strand to SEQ ID NO: 1334816
accucugggacauuucccu

SEQ ID NO: 1334818 - RNA, 19 nt, Artificial Sequence
  Description of Artificial Sequence: Synthetic oligonucleotide
  Sense strand starting at position 89 of SEQ ID NO: 1242268
aaaugucccagagguggua

SEQ ID NO: 1334819 - RNA, 19 nt, Artificial Sequence
  Description of Artificial Sequence: Synthetic oligonucleotide
  Antisense strand to SEQ ID NO: 1334818
uaccaccucugggacauuu

SEQ ID NO: 1334820 - RNA, 19 nt, Artificial Sequence
  Description of Artificial Sequence: Synthetic oligonucleotide
  Sense strand starting at position 219 of SEQ ID NO: 1242268
cugggauuggacuguuuca

SEQ ID NO: 1334821 - RNA, 19 nt, Artificial Sequence
  Description of Artificial Sequence: Synthetic oligonucleotide
  Antisense strand to SEQ ID NO: 1334820
ugaaacaguccaaucccag

SEQ ID NO: 1334822 - RNA, 19 nt, Artificial Sequence
  Description of Artificial Sequence: Synthetic oligonucleotide
  Sense strand starting at position 574 of SEQ ID NO: 1242268
gaaggcuccugguugguau

SEQ ID NO: 1334823 - RNA, 19 nt, Artificial Sequence
  Description of Artificial Sequence: Synthetic oligonucleotide
  Antisense strand to SEQ ID NO: 1334822
auaccaaccaggagccuuc

SEQ ID NO: 1334824 - RNA, 19 nt, Artificial Sequence
  Description of Artificial Sequence: Synthetic oligonucleotide
  Sense strand starting at position 842 of SEQ ID NO: 1242268
gcugacuggcccugcauaa

SEQ ID NO: 1334825 - RNA, 19 nt, Artificial Sequence
  Description of Artificial Sequence: Synthetic oligonucleotide
  Antisense strand to SEQ ID NO: 1334824
uuaugcagggccagucagc

SEQ ID NO: 1334826 - RNA, 19 nt, Artificial Sequence
  Description of Artificial Sequence: Synthetic oligonucleotide
  Sense strand starting at position 857 of SEQ ID NO: 1242268
auaagagagugacaugguu

SEQ ID NO: 1334827 - RNA, 19 nt, Artificial Sequence
  Description of Artificial Sequence: Synthetic oligonucleotide
  Antisense strand to SEQ ID NO: 1334826
aaccaugucacucucuuau

SEQ ID NO: 1334828 - RNA, 19 nt, Artificial Sequence
  Description of Artificial Sequence: Synthetic oligonucleotide
  Sense strand starting at position 865 of SEQ ID NO: 1242268
gugacaugguucuugguag

SEQ ID NO: 1334829 - RNA, 19 nt, Artificial Sequence
  Description of Artificial Sequence: Synthetic oligonucleotide
  Antisense strand to SEQ ID NO: 1334828
cuaccaagaaccaugucac

SEQ ID NO: 1334830 - RNA, 19 nt, Artificial Sequence
  Description of Artificial Sequence: Synthetic oligonucleotide
  Sense strand starting at position 2019 of SEQ ID NO: 1242268
caacguugcuuggcaauuu

SEQ ID NO: 1334831 - RNA, 19 nt, Artificial Sequence
  Description of Artificial Sequence: Synthetic oligonucleotide
  Antisense strand to SEQ ID NO: 1334830
aaauugccaagcaacguug

SEQ ID NO: 1334832 - RNA, 19 nt, Artificial Sequence
  Description of Artificial Sequence: Synthetic oligonucleotide
  Sense strand starting at position 2068 of SEQ ID NO: 1242268
aggugaugucauugacaca

SEQ ID NO: 1334833 - RNA, 19 nt, Artificial Sequence
  Description of Artificial Sequence: Synthetic oligonucleotide
  Antisense strand to SEQ ID NO: 1334832
ugugucaaugacaucaccu

SEQ ID NO: 1334834 - RNA, 19 nt, Artificial Sequence
  Description of Artificial Sequence: Synthetic oligonucleotide
  Sense strand starting at position 2225 of SEQ ID NO: 1242268
cuacccuugcccuagagaa

SEQ ID NO: 1334835 - RNA, 19 nt, Artificial Sequence
  Description of Artificial Sequence: Synthetic oligonucleotide
  Antisense strand to SEQ ID NO: 1334834
uucucuagggcaaggguag

SEQ ID NO: 1334836 - RNA, 19 nt, Artificial Sequence
  Description of Artificial Sequence: Synthetic oligonucleotide
  Sense strand starting at position 2481 of SEQ ID NO: 1242268
gcuugagcuccuugaugug

SEQ ID NO: 1334837 - RNA, 19 nt, Artificial Sequence
  Description of Artificial Sequence: Synthetic oligonucleotide
  Antisense strand to SEQ ID NO: 1334836
cacaucaaggagcucaagc

SEQ ID NO: 1334838 - RNA, 19 nt, Artificial Sequence
  Description of Artificial Sequence: Synthetic oligonucleotide
  Sense strand starting at position 2718 of SEQ ID NO: 1242268
ggcaaaugcuugcccgaaa

SEQ ID NO: 1334839 - RNA, 19 nt, Artificial Sequence
  Description of Artificial Sequence: Synthetic oligonucleotide
  Antisense strand to SEQ ID NO: 1334838
uuucgggcaagcauuugcc

SEQ ID NO: 1334840 - RNA, 19 nt, Artificial Sequence
  Description of Artificial Sequence: Synthetic oligonucleotide
  Sense strand starting at position 2914 of SEQ ID NO: 1242268
uaacuuucuucuguagcga

SEQ ID NO: 1334841 - RNA, 19 nt, Artificial Sequence
  Description of Artificial Sequence: Synthetic oligonucleotide
  Antisense strand to SEQ ID NO: 1334840
ucgcuacagaagaaaguua

SEQ ID NO: 1334842 - RNA, 19 nt, Artificial Sequence
  Description of Artificial Sequence: Synthetic oligonucleotide
  Sense strand starting at position 2915 of SEQ ID NO: 1242268
aacuuucuucuguagcgaa

SEQ ID NO: 1334843 - RNA, 19 nt, Artificial Sequence
  Description of Artificial Sequence: Synthetic oligonucleotide
  Antisense strand to SEQ ID NO: 1334842
uucgcuacagaagaaaguu

SEQ ID NO: 1334844 - RNA, 19 nt, Artificial Sequence
  Description of Artificial Sequence: Synthetic oligonucleotide
  Sense strand starting at position 2935 of SEQ ID NO: 1242268
ccaugugguguuugguuaa

SEQ ID NO: 1334845 - RNA, 19 nt, Artificial Sequence
  Description of Artificial Sequence: Synthetic oligonucleotide
  Antisense strand to SEQ ID NO: 1334844
uuaaccaaacaccacaugg

SEQ ID NO: 1334846 - RNA, 19 nt, Artificial Sequence
  Description of Artificial Sequence: Synthetic oligonucleotide
  Sense strand starting at position 2961 of SEQ ID NO: 1242268
ggcugugagucuucagucu

SEQ ID NO: 1334847 - RNA, 19 nt, Artificial Sequence
  Description of Artificial Sequence: Synthetic oligonucleotide
  Antisense strand to SEQ ID NO: 1334846
agacugaagacucacagcc

SEQ ID NO: 1334848 - RNA, 19 nt, Artificial Sequence
  Description of Artificial Sequence: Synthetic oligonucleotide
  Sense strand starting at position 3001 of SEQ ID NO: 1242268
ucaucaguugagugaccuu

SEQ ID NO: 1334849 - RNA, 19 nt, Artificial Sequence
  Description of Artificial Sequence: Synthetic oligonucleotide
  Antisense strand to SEQ ID NO: 1334848
aaggucacucaacugauga

SEQ ID NO: 1334850 - RNA, 19 nt, Artificial Sequence
  Description of Artificial Sequence: Synthetic oligonucleotide
  Sense strand starting at position 3008 of SEQ ID NO: 1242268
uugagugaccuuuggcaug

SEQ ID NO: 1334851 - RNA, 19 nt, Artificial Sequence
  Description of Artificial Sequence: Synthetic oligonucleotide
  Antisense strand to SEQ ID NO: 1334850
caugccaaaggucacucaa

SEQ ID NO: 1334852 - RNA, 19 nt, Artificial Sequence
  Description of Artificial Sequence: Synthetic oligonucleotide
  Sense strand starting at position 3010 of SEQ ID NO: 1242268
gagugaccuuuggcauguu

SEQ ID NO: 1334853 - RNA, 19 nt, Artificial Sequence
  Description of Artificial Sequence: Synthetic oligonucleotide
  Antisense strand to SEQ ID NO: 1334852
aacaugccaaaggucacuc

SEQ ID NO: 1334854 - RNA, 19 nt, Artificial Sequence
  Description of Artificial Sequence: Synthetic oligonucleotide
  Sense strand starting at position 3086 of SEQ ID NO: 1242268
cucacagggcuguggaaau

SEQ ID NO: 1334855 - RNA, 19 nt, Artificial Sequence
  Description of Artificial Sequence: Synthetic oligonucleotide
  Antisense strand to SEQ ID NO: 1334854
auuuccacagcccugugag

SEQ ID NO: 1334856 - RNA, 19 nt, Artificial Sequence
  Description of Artificial Sequence: Synthetic oligonucleotide
  Sense strand starting at position 3128 of SEQ ID NO: 1242268
agagacugcucaucuugau

SEQ ID NO: 1334857 - RNA, 19 nt, Artificial Sequence
  Description of Artificial Sequence: Synthetic oligonucleotide
  Antisense strand to SEQ ID NO: 1334856
aucaagaugagcagucucu

SEQ ID NO: 1334858 - RNA, 19 nt, Artificial Sequence
  Description of Artificial Sequence: Synthetic oligonucleotide
  Sense strand starting at position 3217 of SEQ ID NO: 1242268
gcaccuucugugcaaaggu

SEQ ID NO: 1334859 - RNA, 19 nt, Artificial Sequence
  Description of Artificial Sequence: Synthetic oligonucleotide
  Antisense strand to SEQ ID NO: 1334858
accuuugcacagaaggugc

SEQ ID NO: 1334860 - RNA, 19 nt, Artificial Sequence
  Description of Artificial Sequence: Synthetic oligonucleotide
  Sense strand starting at position 3241 of SEQ ID NO: 1242268
gcugcaugcguagacauuu

SEQ ID NO: 1334861 - RNA, 19 nt, Artificial Sequence
  Description of Artificial Sequence: Synthetic oligonucleotide
  Antisense strand to SEQ ID NO: 1334860
aaaugucuacgcaugcagc

SEQ ID NO: 1334862 - RNA, 19 nt, Artificial Sequence
  Description of Artificial Sequence: Synthetic oligonucleotide
  Sense strand starting at position 3258 of SEQ ID NO: 1242268
uuugauugaacgcaguguu

SEQ ID NO: 1334863 - RNA, 19 nt, Artificial Sequence
  Description of Artificial Sequence: Synthetic oligonucleotide
  Antisense strand to SEQ ID NO: 1334862
aacacugcguucaaucaaa

SEQ ID NO: 1334864 - RNA, 19 nt, Artificial Sequence
  Description of Artificial Sequence: Synthetic oligonucleotide
  Sense strand starting at position 3261 of SEQ ID NO: 1242268
gauugaacgcaguguuaga

SEQ ID NO: 1334865 - RNA, 19 nt, Artificial Sequence
  Description of Artificial Sequence: Synthetic oligonucleotide
  Antisense strand to SEQ ID NO: 1334864
ucuaacacugcguucaauc

SEQ ID NO: 1334866 - RNA, 19 nt, Artificial Sequence
  Description of Artificial Sequence: Synthetic oligonucleotide
  Sense strand starting at position 3268 of SEQ ID NO: 1242268
cgcaguguuagaugucaug

SEQ ID NO: 1334867 - RNA, 19 nt, Artificial Sequence
  Description of Artificial Sequence: Synthetic oligonucleotide
  Antisense strand to SEQ ID NO: 1334866
caugacaucuaacacugcg

SEQ ID NO: 1334868 - RNA, 19 nt, Artificial Sequence
  Description of Artificial Sequence: Synthetic oligonucleotide
  Sense strand starting at position 3274 of SEQ ID NO: 1242268
guuagaugucauggcauua

SEQ ID NO: 1334869 - RNA, 19 nt, Artificial Sequence
  Description of Artificial Sequence: Synthetic oligonucleotide
  Antisense strand to SEQ ID NO: 1334868
uaaugccaugacaucuaac

SEQ ID NO: 1334870 - RNA, 19 nt, Artificial Sequence
  Description of Artificial Sequence: Synthetic oligonucleotide
  Sense strand starting at position 3279 of SEQ ID NO: 1242268
augucauggcauuaaacau

SEQ ID NO: 1334871 - RNA, 19 nt, Artificial Sequence
  Description of Artificial Sequence: Synthetic oligonucleotide
  Antisense strand to SEQ ID NO: 1334870
auguuuaaugccaugacau

SEQ ID NO: 1334872 - RNA, 19 nt, Artificial Sequence
  Description of Artificial Sequence: Synthetic oligonucleotide
  Sense strand starting at position 3639 of SEQ ID NO: 1242268
cuuuaacuagguuaucagu

SEQ ID NO: 1334873 - RNA, 19 nt, Artificial Sequence
  Description of Artificial Sequence: Synthetic oligonucleotide
  Antisense strand to SEQ ID NO: 1334872
acugauaaccuaguuaaag

SEQ ID NO: 1334874 - RNA, 19 nt, Artificial Sequence
  Description of Artificial Sequence: Synthetic oligonucleotide
  Sense strand starting at position 3741 of SEQ ID NO: 1242268
ugcucugucucacuaagga

SEQ ID NO: 1334875 - RNA, 19 nt, Artificial Sequence
  Description of Artificial Sequence: Synthetic oligonucleotide
  Antisense strand to SEQ ID NO: 1334874
uccuuagugagacagagca

SEQ ID NO: 1334876 - RNA, 19 nt, Artificial Sequence
  Description of Artificial Sequence: Synthetic oligonucleotide
  Sense strand starting at position 3838 of SEQ ID NO: 1242268
gggagagugaauugguaca

SEQ ID NO: 1334877 - RNA, 19 nt, Artificial Sequence
  Description of Artificial Sequence: Synthetic oligonucleotide
  Antisense strand to SEQ ID NO: 1334876
uguaccaauucacucuccc

SEQ ID NO: 1334878 - RNA, 19 nt, Artificial Sequence
  Description of Artificial Sequence: Synthetic oligonucleotide
  Sense strand starting at position 3840 of SEQ ID NO: 1242268
gagagugaauugguacagu

SEQ ID NO: 1334879 - RNA, 19 nt, Artificial Sequence
  Description of Artificial Sequence: Synthetic oligonucleotide
  Antisense strand to SEQ ID NO: 1334878
acuguaccaauucacucuc

SEQ ID NO: 1334880 - RNA, 19 nt, Artificial Sequence
  Description of Artificial Sequence: Synthetic oligonucleotide
  Sense strand starting at position 3843 of SEQ ID NO: 1242268
agugaauugguacagucuu

SEQ ID NO: 1334881 - RNA, 19 nt, Artificial Sequence
  Description of Artificial Sequence: Synthetic oligonucleotide
  Antisense strand to SEQ ID NO: 1334880
aagacuguaccaauucacu

SEQ ID NO: 1334882 - RNA, 19 nt, Artificial Sequence
  Description of Artificial Sequence: Synthetic oligonucleotide
  Sense strand starting at position 3856 of SEQ ID NO: 1242268
agucuucuuggagggcaau

SEQ ID NO: 1334883 - RNA, 19 nt, Artificial Sequence
  Description of Artificial Sequence: Synthetic oligonucleotide
  Antisense strand to SEQ ID NO: 1334882
auugcccuccaagaagacu

SEQ ID NO: 1334884 - RNA, 19 nt, Artificial Sequence
  Description of Artificial Sequence: Synthetic oligonucleotide
  Sense strand starting at position 3857 of SEQ ID NO: 1242268
gucuucuuggagggcaauu

SEQ ID NO: 1334885 - RNA, 19 nt, Artificial Sequence
  Description of Artificial Sequence: Synthetic oligonucleotide
  Antisense strand to SEQ ID NO: 1334884
aauugcccuccaagaagac

SEQ ID NO: 1334886 - RNA, 19 nt, Artificial Sequence
  Description of Artificial Sequence: Synthetic oligonucleotide
  Sense strand starting at position 3902 of SEQ ID NO: 1242268
uguguauguacuugaucca

SEQ ID NO: 1334887 - RNA, 19 nt, Artificial Sequence
  Description of Artificial Sequence: Synthetic oligonucleotide
  Antisense strand to SEQ ID NO: 1334886
uggaucaaguacauacaca

SEQ ID NO: 1334888 - RNA, 19 nt, Artificial Sequence
  Description of Artificial Sequence: Synthetic oligonucleotide
  Sense strand starting at position 3905 of SEQ ID NO: 1242268
guauguacuugauccagca

SEQ ID NO: 1334889 - RNA, 19 nt, Artificial Sequence
  Description of Artificial Sequence: Synthetic oligonucleotide
  Antisense strand to SEQ ID NO: 1334888
ugcuggaucaaguacauac

SEQ ID NO: 1334890 - RNA, 19 nt, Artificial Sequence
  Description of Artificial Sequence: Synthetic oligonucleotide
  Sense strand starting at position 3958 of SEQ ID NO: 1242268
ugcacaucggccugaagau

SEQ ID NO: 1334891 - RNA, 19 nt, Artificial Sequence
  Description of Artificial Sequence: Synthetic oligonucleotide
  Antisense strand to SEQ ID NO: 1334890
aucuucaggccgaugugca

SEQ ID NO: 1334892 - RNA, 19 nt, Artificial Sequence
  Description of Artificial Sequence: Synthetic oligonucleotide
  Sense strand starting at position 3959 of SEQ ID NO: 1242268
gcacaucggccugaagaua

SEQ ID NO: 1334893 - RNA, 19 nt, Artificial Sequence
  Description of Artificial Sequence: Synthetic oligonucleotide
  Antisense strand to SEQ ID NO: 1334892
uaucuucaggccgaugugc

SEQ ID NO: 1334894 - RNA, 19 nt, Artificial Sequence
  Description of Artificial Sequence: Synthetic oligonucleotide
  Sense strand starting at position 4 of SEQ ID NO: 1242269
ggcuuuccuuggcuggaga

SEQ ID NO: 1334895 - RNA, 19 nt, Artificial Sequence
  Description of Artificial Sequence: Synthetic oligonucleotide
  Antisense strand to SEQ ID NO: 1334894
ucuccagccaaggaaagcc

SEQ ID NO: 1334896 - RNA, 19 nt, Artificial Sequence
  Description of Artificial Sequence: Synthetic oligonucleotide
  Sense strand starting at position 538 of SEQ ID NO: 1242269
ggcccagugcuuuauaaac

SEQ ID NO: 1334897 - RNA, 19 nt, Artificial Sequence
  Description of Artificial Sequence: Synthetic oligonucleotide
  Antisense strand to SEQ ID NO: 1334896
guuuauaaagcacugggcc

SEQ ID NO: 1334898 - RNA, 19 nt, Artificial Sequence
  Description of Artificial Sequence: Synthetic oligonucleotide
  Sense strand starting at position 696 of SEQ ID NO: 1242269
gucagaaucugugccaggu

SEQ ID NO: 1334899 - RNA, 19 nt, Artificial Sequence
  Description of Artificial Sequence: Synthetic oligonucleotide
  Antisense strand to SEQ ID NO: 1334898
accuggcacagauucugac

SEQ ID NO: 1334900 - RNA, 19 nt, Artificial Sequence
  Description of Artificial Sequence: Synthetic oligonucleotide
  Sense strand starting at position 700 of SEQ ID NO: 1242269
gaaucugugccaggucaaa

SEQ ID NO: 1334901 - RNA, 19 nt, Artificial Sequence
  Description of Artificial Sequence: Synthetic oligonucleotide
  Antisense strand to SEQ ID NO: 1334900
uuugaccuggcacagauuc

SEQ ID NO: 1334902 - RNA, 19 nt, Artificial Sequence
  Description of Artificial Sequence: Synthetic oligonucleotide
  Sense strand starting at position 754 of SEQ ID NO: 1242269
agcagugcucccuaaauau

SEQ ID NO: 1334903 - RNA, 19 nt, Artificial Sequence
  Description of Artificial Sequence: Synthetic oligonucleotide
  Antisense strand to SEQ ID NO: 1334902
auauuuagggagcacugcu

SEQ ID NO: 1334904 - RNA, 19 nt, Artificial Sequence
  Description of Artificial Sequence: Synthetic oligonucleotide
  Sense strand starting at position 791 of SEQ ID NO: 1242269
agggaaaugucccagaggu

SEQ ID NO: 1334905 - RNA, 19 nt, Artificial Sequence
  Description of Artificial Sequence: Synthetic oligonucleotide
  Antisense strand to SEQ ID NO: 1334904
accucugggacauuucccu

SEQ ID NO: 1334906 - RNA, 19 nt, Artificial Sequence
  Description of Artificial Sequence: Synthetic oligonucleotide
  Sense strand starting at position 795 of SEQ ID NO: 1242269
aaaugucccagagguggua

SEQ ID NO: 1334907 - RNA, 19 nt, Artificial Sequence
  Description of Artificial Sequence: Synthetic oligonucleotide
  Antisense strand to SEQ ID NO: 1334906
uaccaccucugggacauuu

SEQ ID NO: 1334908 - RNA, 19 nt, Artificial Sequence
  Description of Artificial Sequence: Synthetic oligonucleotide
  Sense strand starting at position 925 of SEQ ID NO: 1242269
cugggauuggacuguuuca

SEQ ID NO: 1334909 - RNA, 19 nt, Artificial Sequence
  Description of Artificial Sequence: Synthetic oligonucleotide
  Antisense strand to SEQ ID NO: 1334908
ugaaacaguccaaucccag

SEQ ID NO: 1334910 - RNA, 19 nt, Artificial Sequence
  Description of Artificial Sequence: Synthetic oligonucleotide
  Sense strand starting at position 1280 of SEQ ID NO: 1242269
gaaggcuccugguugguau

SEQ ID NO: 1334911 - RNA, 19 nt, Artificial Sequence
  Description of Artificial Sequence: Synthetic oligonucleotide
  Antisense strand to SEQ ID NO: 1334910
auaccaaccaggagccuuc

SEQ ID NO: 1334912 - RNA, 19 nt, Artificial Sequence
  Description of Artificial Sequence: Synthetic oligonucleotide
  Sense strand starting at position 1292 of SEQ ID NO: 1242269
uugguauuguccugccacu

SEQ ID NO: 1334913 - RNA, 19 nt, Artificial Sequence
  Description of Artificial Sequence: Synthetic oligonucleotide
  Antisense strand to SEQ ID NO: 1334912
aguggcaggacaauaccaa

SEQ ID NO: 1334914 - RNA, 19 nt, Artificial Sequence
  Description of Artificial Sequence: Synthetic oligonucleotide
  Sense strand starting at position 1548 of SEQ ID NO: 1242269
gcugacuggcccugcauaa

SEQ ID NO: 1334915 - RNA, 19 nt, Artificial Sequence
  Description of Artificial Sequence: Synthetic oligonucleotide
  Antisense strand to SEQ ID NO: 1334914
uuaugcagggccagucagc

SEQ ID NO: 1334916 - RNA, 19 nt, Artificial Sequence
  Description of Artificial Sequence: Synthetic oligonucleotide
  Sense strand starting at position 1563 of SEQ ID NO: 1242269
auaagagagugacaugguu

SEQ ID NO: 1334917 - RNA, 19 nt, Artificial Sequence
  Description of Artificial Sequence: Synthetic oligonucleotide
  Antisense strand to SEQ ID NO: 1334916
aaccaugucacucucuuau

SEQ ID NO: 1334918 - RNA, 19 nt, Artificial Sequence
  Description of Artificial Sequence: Synthetic oligonucleotide
  Sense strand starting at position 1571 of SEQ ID NO: 1242269
gugacaugguucuugguag

SEQ ID NO: 1334919 - RNA, 19 nt, Artificial Sequence
  Description of Artificial Sequence: Synthetic oligonucleotide
  Antisense strand to SEQ ID NO: 1334918
cuaccaagaaccaugucac

SEQ ID NO: 1334920 - RNA, 19 nt, Artificial Sequence
  Description of Artificial Sequence: Synthetic oligonucleotide
  Sense strand starting at position 2725 of SEQ ID NO: 1242269
caacguugcuuggcaauuu

SEQ ID NO: 1334921 - RNA, 19 nt, Artificial Sequence
  Description of Artificial Sequence: Synthetic oligonucleotide
  Antisense strand to SEQ ID NO: 1334920
aaauugccaagcaacguug

SEQ ID NO: 1334922 - RNA, 19 nt, Artificial Sequence
  Description of Artificial Sequence: Synthetic oligonucleotide
  Sense strand starting at position 2768 of SEQ ID NO: 1242269
ggaggaaggugaugucauu

SEQ ID NO: 1334923 - RNA, 19 nt, Artificial Sequence
  Description of Artificial Sequence: Synthetic oligonucleotide
  Antisense strand to SEQ ID NO: 1334922
aaugacaucaccuuccucc

SEQ ID NO: 1334924 - RNA, 19 nt, Artificial Sequence
  Description of Artificial Sequence: Synthetic oligonucleotide
  Sense strand starting at position 2774 of SEQ ID NO: 1242269
aggugaugucauugacaca

SEQ ID NO: 1334925 - RNA, 19 nt, Artificial Sequence
  Description of Artificial Sequence: Synthetic oligonucleotide
  Antisense strand to SEQ ID NO: 1334924
ugugucaaugacaucaccu

SEQ ID NO: 1334926 - RNA, 19 nt, Artificial Sequence
  Description of Artificial Sequence: Synthetic oligonucleotide
  Sense strand starting at position 2931 of SEQ ID NO: 1242269
cuacccuugcccuagagaa

SEQ ID NO: 1334927 - RNA, 19 nt, Artificial Sequence
  Description of Artificial Sequence: Synthetic oligonucleotide
  Antisense strand to SEQ ID NO: 1334926
uucucuagggcaaggguag

SEQ ID NO: 1334928 - RNA, 19 nt, Artificial Sequence
  Description of Artificial Sequence: Synthetic oligonucleotide
  Sense strand starting at position 3168 of SEQ ID NO: 1242269
ggcauuugcuggugaggca

SEQ ID NO: 1334929 - RNA, 19 nt, Artificial Sequence
  Description of Artificial Sequence: Synthetic oligonucleotide
  Antisense strand to SEQ ID NO: 1334928
ugccucaccagcaaaugcc

SEQ ID NO: 1334930 - RNA, 19 nt, Artificial Sequence
  Description of Artificial Sequence: Synthetic oligonucleotide
  Sense strand starting at position 3187 of SEQ ID NO: 1242269
gcuugagcuccuugaugug

SEQ ID NO: 1334931 - RNA, 19 nt, Artificial Sequence
  Description of Artificial Sequence: Synthetic oligonucleotide
  Antisense strand to SEQ ID NO: 1334930
cacaucaaggagcucaagc

SEQ ID NO: 1334932 - RNA, 19 nt, Artificial Sequence
  Description of Artificial Sequence: Synthetic oligonucleotide
  Sense strand starting at position 3424 of SEQ ID NO: 1242269
ggcaaaugcuugcccgaaa

SEQ ID NO: 1334933 - RNA, 19 nt, Artificial Sequence
  Description of Artificial Sequence: Synthetic oligonucleotide
  Antisense strand to SEQ ID NO: 1334932
uuucgggcaagcauuugcc

SEQ ID NO: 1334934 - RNA, 19 nt, Artificial Sequence
  Description of Artificial Sequence: Synthetic oligonucleotide
  Sense strand starting at position 3620 of SEQ ID NO: 1242269
uaacuuucuucuguagcga

SEQ ID NO: 1334935 - RNA, 19 nt, Artificial Sequence
  Description of Artificial Sequence: Synthetic oligonucleotide
  Antisense strand to SEQ ID NO: 1334934
ucgcuacagaagaaaguua

SEQ ID NO: 1334936 - RNA, 19 nt, Artificial Sequence
  Description of Artificial Sequence: Synthetic oligonucleotide
  Sense strand starting at position 3621 of SEQ ID NO: 1242269
aacuuucuucuguagcgaa

SEQ ID NO: 1334937 - RNA, 19 nt, Artificial Sequence
  Description of Artificial Sequence: Synthetic oligonucleotide
  Antisense strand to SEQ ID NO: 1334936
uucgcuacagaagaaaguu

SEQ ID NO: 1334938 - RNA, 19 nt, Artificial Sequence
  Description of Artificial Sequence: Synthetic oligonucleotide
  Sense strand starting at position 3641 of SEQ ID NO: 1242269
ccaugugguguuugguuaa

SEQ ID NO: 1334939 - RNA, 19 nt, Artificial Sequence
  Description of Artificial Sequence: Synthetic oligonucleotide
  Antisense strand to SEQ ID NO: 1334938
uuaaccaaacaccacaugg

SEQ ID NO: 1334940 - RNA, 19 nt, Artificial Sequence
  Description of Artificial Sequence: Synthetic oligonucleotide
  Sense strand starting at position 3667 of SEQ ID NO: 1242269
ggcugugagucuucagucu

SEQ ID NO: 1334941 - RNA, 19 nt, Artificial Sequence
  Description of Artificial Sequence: Synthetic oligonucleotide
  Antisense strand to SEQ ID NO: 1334940
agacugaagacucacagcc

SEQ ID NO: 1334942 - RNA, 19 nt, Artificial Sequence
  Description of Artificial Sequence: Synthetic oligonucleotide
  Sense strand starting at position 3707 of SEQ ID NO: 1242269
ucaucaguugagugaccuu

SEQ ID NO: 1334943 - RNA, 19 nt, Artificial Sequence
  Description of Artificial Sequence: Synthetic oligonucleotide
  Antisense strand to SEQ ID NO: 1334942
aaggucacucaacugauga

SEQ ID NO: 1334944 - RNA, 19 nt, Artificial Sequence
  Description of Artificial Sequence: Synthetic oligonucleotide
  Sense strand starting at position 3714 of SEQ ID NO: 1242269
uugagugaccuuuggcaug

SEQ ID NO: 1334945 - RNA, 19 nt, Artificial Sequence
  Description of Artificial Sequence: Synthetic oligonucleotide
  Antisense strand to SEQ ID NO: 1334944
caugccaaaggucacucaa

SEQ ID NO: 1334946 - RNA, 19 nt, Artificial Sequence
  Description of Artificial Sequence: Synthetic oligonucleotide
  Sense strand starting at position 3716 of SEQ ID NO: 1242269
gagugaccuuuggcauguu

SEQ ID NO: 1334947 - RNA, 19 nt, Artificial Sequence
  Description of Artificial Sequence: Synthetic oligonucleotide
  Antisense strand to SEQ ID NO: 1334946
aacaugccaaaggucacuc

SEQ ID NO: 1334948 - RNA, 19 nt, Artificial Sequence
  Description of Artificial Sequence: Synthetic oligonucleotide
  Sense strand starting at position 3717 of SEQ ID NO: 1242269
agugaccuuuggcauguua

SEQ ID NO: 1334949 - RNA, 19 nt, Artificial Sequence
  Description of Artificial Sequence: Synthetic oligonucleotide
  Antisense strand to SEQ ID NO: 1334948
uaacaugccaaaggucacu

SEQ ID NO: 1334950 - RNA, 19 nt, Artificial Sequence
  Description of Artificial Sequence: Synthetic oligonucleotide
  Sense strand starting at position 3725 of SEQ ID NO: 1242269
uuggcauguuauugaacca

SEQ ID NO: 1334951 - RNA, 19 nt, Artificial Sequence
  Description of Artificial Sequence: Synthetic oligonucleotide
  Antisense strand to SEQ ID NO: 1334950
ugguucaauaacaugccaa

SEQ ID NO: 1334952 - RNA, 19 nt, Artificial Sequence
  Description of Artificial Sequence: Synthetic oligonucleotide
  Sense strand starting at position 3792 of SEQ ID NO: 1242269
cucacagggcuguggaaau

SEQ ID NO: 1334953 - RNA, 19 nt, Artificial Sequence
  Description of Artificial Sequence: Synthetic oligonucleotide
  Antisense strand to SEQ ID NO: 1334952
auuuccacagcccugugag

SEQ ID NO: 1334954 - RNA, 19 nt, Artificial Sequence
  Description of Artificial Sequence: Synthetic oligonucleotide
  Sense strand starting at position 3816 of SEQ ID NO: 1242269
gaauaaaguuucuggcaca

SEQ ID NO: 1334955 - RNA, 19 nt, Artificial Sequence
  Description of Artificial Sequence: Synthetic oligonucleotide
  Antisense strand to SEQ ID NO: 1334954
ugugccagaaacuuuauuc

SEQ ID NO: 1334956 - RNA, 19 nt, Artificial Sequence
  Description of Artificial Sequence: Synthetic oligonucleotide
  Sense strand starting at position 3834 of SEQ ID NO: 1242269
agagacugcucaucuugau

SEQ ID NO: 1334957 - RNA, 19 nt, Artificial Sequence
  Description of Artificial Sequence: Synthetic oligonucleotide
  Antisense strand to SEQ ID NO: 1334956
aucaagaugagcagucucu

SEQ ID NO: 1334958 - RNA, 19 nt, Artificial Sequence
  Description of Artificial Sequence: Synthetic oligonucleotide
  Sense strand starting at position 3923 of SEQ ID NO: 1242269
gcaccuucugugcaaaggu

SEQ ID NO: 1334959 - RNA, 19 nt, Artificial Sequence
  Description of Artificial Sequence: Synthetic oligonucleotide
  Antisense strand to SEQ ID NO: 1334958
accuuugcacagaaggugc

SEQ ID NO: 1334960 - RNA, 19 nt, Artificial Sequence
  Description of Artificial Sequence: Synthetic oligonucleotide
  Sense strand starting at position 3947 of SEQ ID NO: 1242269
gcugcaugcguagacauuu

SEQ ID NO: 1334961 - RNA, 19 nt, Artificial Sequence
  Description of Artificial Sequence: Synthetic oligonucleotide
  Antisense strand to SEQ ID NO: 1334960
aaaugucuacgcaugcagc

SEQ ID NO: 1334962 - RNA, 19 nt, Artificial Sequence
  Description of Artificial Sequence: Synthetic oligonucleotide
  Sense strand starting at position 3964 of SEQ ID NO: 1242269
uuugauugaacgcaguguu

SEQ ID NO: 1334963 - RNA, 19 nt, Artificial Sequence
  Description of Artificial Sequence: Synthetic oligonucleotide
  Antisense strand to SEQ ID NO: 1334962
aacacugcguucaaucaaa

SEQ ID NO: 1334964 - RNA, 19 nt, Artificial Sequence
  Description of Artificial Sequence: Synthetic oligonucleotide
  Sense strand starting at position 3967 of SEQ ID NO: 1242269
gauugaacgcaguguuaga

SEQ ID NO: 1334965 - RNA, 19 nt, Artificial Sequence
  Description of Artificial Sequence: Synthetic oligonucleotide
  Antisense strand to SEQ ID NO: 1334964
ucuaacacugcguucaauc

SEQ ID NO: 1334966 - RNA, 19 nt, Artificial Sequence
  Description of Artificial Sequence: Synthetic oligonucleotide
  Sense strand starting at position 3974 of SEQ ID NO: 1242269
cgcaguguuagaugucaug

SEQ ID NO: 1334967 - RNA, 19 nt, Artificial Sequence
  Description of Artificial Sequence: Synthetic oligonucleotide
  Antisense strand to SEQ ID NO: 1334966
caugacaucuaacacugcg

SEQ ID NO: 1334968 - RNA, 19 nt, Artificial Sequence
  Description of Artificial Sequence: Synthetic oligonucleotide
  Sense strand starting at position 3977 of SEQ ID NO: 1242269
aguguuagaugucauggca

SEQ ID NO: 1334969 - RNA, 19 nt, Artificial Sequence
  Description of Artificial Sequence: Synthetic oligonucleotide
  Antisense strand to SEQ ID NO: 1334968
ugccaugacaucuaacacu

SEQ ID NO: 1334970 - RNA, 19 nt, Artificial Sequence
  Description of Artificial Sequence: Synthetic oligonucleotide
  Sense strand starting at position 3980 of SEQ ID NO: 1242269
guuagaugucauggcauua

SEQ ID NO: 1334971 - RNA, 19 nt, Artificial Sequence
  Description of Artificial Sequence: Synthetic oligonucleotide
  Antisense strand to SEQ ID NO: 1334970
uaaugccaugacaucuaac

SEQ ID NO: 1334972 - RNA, 19 nt, Artificial Sequence
  Description of Artificial Sequence: Synthetic oligonucleotide
  Sense strand starting at position 558 of SEQ ID NO: 1242270
ggaagauucuuacuacagu

SEQ ID NO: 1334973 - RNA, 19 nt, Artificial Sequence
  Description of Artificial Sequence: Synthetic oligonucleotide
  Antisense strand to SEQ ID NO: 1334972
acuguaguaagaaucuucc

SEQ ID NO: 1334974 - RNA, 19 nt, Artificial Sequence
  Description of Artificial Sequence: Synthetic oligonucleotide
  Sense strand starting at position 567 of SEQ ID NO: 1242270
uuacuacaguugucccuaa

SEQ ID NO: 1334975 - RNA, 19 nt, Artificial Sequence
  Description of Artificial Sequence: Synthetic oligonucleotide
  Antisense strand to SEQ ID NO: 1334974
uuagggacaacuguaguaa

SEQ ID NO: 1334976 - RNA, 19 nt, Artificial Sequence
  Description of Artificial Sequence: Synthetic oligonucleotide
  Sense strand starting at position 622 of SEQ ID NO: 1242270
auugcuugucaugggaaau

SEQ ID NO: 1334977 - RNA, 19 nt, Artificial Sequence
  Description of Artificial Sequence: Synthetic oligonucleotide
  Antisense strand to SEQ ID NO: 1334976
auuucccaugacaagcaau

SEQ ID NO: 1334978 - RNA, 19 nt, Artificial Sequence
  Description of Artificial Sequence: Synthetic oligonucleotide
  Sense strand starting at position 623 of SEQ ID NO: 1242270
uugcuugucaugggaaaug

SEQ ID NO: 1334979 - RNA, 19 nt, Artificial Sequence
  Description of Artificial Sequence: Synthetic oligonucleotide
  Antisense strand to SEQ ID NO: 1334978
cauuucccaugacaagcaa

SEQ ID NO: 1334980 - RNA, 19 nt, Artificial Sequence
  Description of Artificial Sequence: Synthetic oligonucleotide
  Sense strand starting at position 644 of SEQ ID NO: 1242270
ucacuuugcccagggagaa

SEQ ID NO: 1334981 - RNA, 19 nt, Artificial Sequence
  Description of Artificial Sequence: Synthetic oligonucleotide
  Antisense strand to SEQ ID NO: 1334980
uucucccugggcaaaguga

SEQ ID NO: 1334982 - RNA, 19 nt, Artificial Sequence
  Description of Artificial Sequence: Synthetic oligonucleotide
  Sense strand starting at position 645 of SEQ ID NO: 1242270
cacuuugcccagggagaaa

SEQ ID NO: 1334983 - RNA, 19 nt, Artificial Sequence
  Description of Artificial Sequence: Synthetic oligonucleotide
  Antisense strand to SEQ ID NO: 1334982
uuucucccugggcaaagug

SEQ ID NO: 1334984 - RNA, 19 nt, Artificial Sequence
  Description of Artificial Sequence: Synthetic oligonucleotide
  Sense strand starting at position 745 of SEQ ID NO: 1242270
gguaugugagguggaaagu

SEQ ID NO: 1334985 - RNA, 19 nt, Artificial Sequence
  Description of Artificial Sequence: Synthetic oligonucleotide
  Antisense strand to SEQ ID NO: 1334984
acuuuccaccucacauacc

SEQ ID NO: 1334986 - RNA, 19 nt, Artificial Sequence
  Description of Artificial Sequence: Synthetic oligonucleotide
  Sense strand starting at position 787 of SEQ ID NO: 1242270
ggagauagguccuugcauu

SEQ ID NO: 1334987 - RNA, 19 nt, Artificial Sequence
  Description of Artificial Sequence: Synthetic oligonucleotide
  Antisense strand to SEQ ID NO: 1334986
aaugcaaggaccuaucucc

SEQ ID NO: 1334988 - RNA, 19 nt, Artificial Sequence
  Description of Artificial Sequence: Synthetic oligonucleotide
  Sense strand starting at position 800 of SEQ ID NO: 1242270
ugcauuucuuggcacagga

SEQ ID NO: 1334989 - RNA, 19 nt, Artificial Sequence
  Description of Artificial Sequence: Synthetic oligonucleotide
  Antisense strand to SEQ ID NO: 1334988
uccugugccaagaaaugca

SEQ ID NO: 1334990 - RNA, 19 nt, Artificial Sequence
  Description of Artificial Sequence: Synthetic oligonucleotide
  Sense strand starting at position 913 of SEQ ID NO: 1242270
gugacuugagacuggagau

SEQ ID NO: 1334991 - RNA, 19 nt, Artificial Sequence
  Description of Artificial Sequence: Synthetic oligonucleotide
  Antisense strand to SEQ ID NO: 1334990
aucuccagucucaagucac

SEQ ID NO: 1334992 - RNA, 19 nt, Artificial Sequence
  Description of Artificial Sequence: Synthetic oligonucleotide
  Sense strand starting at position 982 of SEQ ID NO: 1242270
cgaagacaugcugaugcuu

SEQ ID NO: 1334993 - RNA, 19 nt, Artificial Sequence
  Description of Artificial Sequence: Synthetic oligonucleotide
  Antisense strand to SEQ ID NO: 1334992
aagcaucagcaugucuucg

SEQ ID NO: 1334994 - RNA, 19 nt, Artificial Sequence
  Description of Artificial Sequence: Synthetic oligonucleotide
  Sense strand starting at position 1031 of SEQ ID NO: 1242270
cuggaauuauuagagcaaa

SEQ ID NO: 1334995 - RNA, 19 nt, Artificial Sequence
  Description of Artificial Sequence: Synthetic oligonucleotide
  Antisense strand to SEQ ID NO: 1334994
uuugcucuaauaauuccag

SEQ ID NO: 1334996 - RNA, 19 nt, Artificial Sequence
  Description of Artificial Sequence: Synthetic oligonucleotide
  Sense strand starting at position 1084 of SEQ ID NO: 1242270
cgaucuuccucccugaaca

SEQ ID NO: 1334997 - RNA, 19 nt, Artificial Sequence
  Description of Artificial Sequence: Synthetic oligonucleotide
  Antisense strand to SEQ ID NO: 1334996
uguucagggaggaagaucg

SEQ ID NO: 1334998 - RNA, 19 nt, Artificial Sequence
  Description of Artificial Sequence: Synthetic oligonucleotide
  Sense strand starting at position 1192 of SEQ ID NO: 1242270
gcaguugcagucgugugaa

SEQ ID NO: 1334999 - RNA, 19 nt, Artificial Sequence
  Description of Artificial Sequence: Synthetic oligonucleotide
  Antisense strand to SEQ ID NO: 1334998
uucacacgacugcaacugc

SEQ ID NO: 1335000 - RNA, 19 nt, Artificial Sequence
  Description of Artificial Sequence: Synthetic oligonucleotide
  Sense strand starting at position 1386 of SEQ ID NO: 1242270
ccuccagagugguccguaa

SEQ ID NO: 1335001 - RNA, 19 nt, Artificial Sequence
  Description of Artificial Sequence: Synthetic oligonucleotide
  Antisense strand to SEQ ID NO: 1335000
uuacggaccacucuggagg

SEQ ID NO: 1335002 - RNA, 19 nt, Artificial Sequence
  Description of Artificial Sequence: Synthetic oligonucleotide
  Sense strand starting at position 1388 of SEQ ID NO: 1242270
uccagagugguccguaaga

SEQ ID NO: 1335003 - RNA, 19 nt, Artificial Sequence
  Description of Artificial Sequence: Synthetic oligonucleotide
  Antisense strand to SEQ ID NO: 1335002
ucuuacggaccacucugga

SEQ ID NO: 1335004 - RNA, 19 nt, Artificial Sequence
  Description of Artificial Sequence: Synthetic oligonucleotide
  Sense strand starting at position 1390 of SEQ ID NO: 1242270
cagagugguccguaagauc

SEQ ID NO: 1335005 - RNA, 19 nt, Artificial Sequence
  Description of Artificial Sequence: Synthetic oligonucleotide
  Antisense strand to SEQ ID NO: 1335004
gaucuuacggaccacucug

SEQ ID NO: 1335006 - RNA, 19 nt, Artificial Sequence
  Description of Artificial Sequence: Synthetic oligonucleotide
  Sense strand starting at position 1398 of SEQ ID NO: 1242270
uccguaagaucacauuuaa

SEQ ID NO: 1335007 - RNA, 19 nt, Artificial Sequence
  Description of Artificial Sequence: Synthetic oligonucleotide
  Antisense strand to SEQ ID NO: 1335006
uuaaaugugaucuuacgga

SEQ ID NO: 1335008 - RNA, 19 nt, Artificial Sequence
  Description of Artificial Sequence: Synthetic oligonucleotide
  Sense strand starting at position 1544 of SEQ ID NO: 1242270
agccucuguucuucucaua

SEQ ID NO: 1335009 - RNA, 19 nt, Artificial Sequence
  Description of Artificial Sequence: Synthetic oligonucleotide
  Antisense strand to SEQ ID NO: 1335008
uaugagaagaacagaggcu

SEQ ID NO: 1335010 - RNA, 19 nt, Artificial Sequence
  Description of Artificial Sequence: Synthetic oligonucleotide
  Sense strand starting at position 1607 of SEQ ID NO: 1242270
caccuuuaucaggagagcu

SEQ ID NO: 1335011 - RNA, 19 nt, Artificial Sequence
  Description of Artificial Sequence: Synthetic oligonucleotide
  Antisense strand to SEQ ID NO: 1335010
agcucuccugauaaaggug

SEQ ID NO: 1335012 - RNA, 19 nt, Artificial Sequence
  Description of Artificial Sequence: Synthetic oligonucleotide
  Sense strand starting at position 2050 of SEQ ID NO: 1242270
ggacaaagguaagauuaaa

SEQ ID NO: 1335013 - RNA, 19 nt, Artificial Sequence
  Description of Artificial Sequence: Synthetic oligonucleotide
  Antisense strand to SEQ ID NO: 1335012
uuuaaucuuaccuuugucc

SEQ ID NO: 1335014 - RNA, 19 nt, Artificial Sequence
  Description of Artificial Sequence: Synthetic oligonucleotide
  Sense strand starting at position 2364 of SEQ ID NO: 1242270
aggcauuagugagcccuga

SEQ ID NO: 1335015 - RNA, 19 nt, Artificial Sequence
  Description of Artificial Sequence: Synthetic oligonucleotide
  Antisense strand to SEQ ID NO: 1335014
ucagggcucacuaaugccu

SEQ ID NO: 1335016 - RNA, 19 nt, Artificial Sequence
  Description of Artificial Sequence: Synthetic oligonucleotide
  Sense strand starting at position 3143 of SEQ ID NO: 1242270
cucugaaaguguuuggauu

SEQ ID NO: 1335017 - RNA, 19 nt, Artificial Sequence
  Description of Artificial Sequence: Synthetic oligonucleotide
  Antisense strand to SEQ ID NO: 1335016
aauccaaacacuuucagag

SEQ ID NO: 1335018 - RNA, 19 nt, Artificial Sequence
  Description of Artificial Sequence: Synthetic oligonucleotide
  Sense strand starting at position 3312 of SEQ ID NO: 1242270
caguucaggguucgugaga

SEQ ID NO: 1335019 - RNA, 19 nt, Artificial Sequence
  Description of Artificial Sequence: Synthetic oligonucleotide
  Antisense strand to SEQ ID NO: 1335018
ucucacgaacccugaacug

SEQ ID NO: 1335020 - RNA, 19 nt, Artificial Sequence
  Description of Artificial Sequence: Synthetic oligonucleotide
  Sense strand starting at position 3313 of SEQ ID NO: 1242270
aguucaggguucgugagaa

SEQ ID NO: 1335021 - RNA, 19 nt, Artificial Sequence
  Description of Artificial Sequence: Synthetic oligonucleotide
  Antisense strand to SEQ ID NO: 1335020
uucucacgaacccugaacu

SEQ ID NO: 1335022 - RNA, 19 nt, Artificial Sequence
  Description of Artificial Sequence: Synthetic oligonucleotide
  Sense strand starting at position 3321 of SEQ ID NO: 1242270
guucgugagaacuaggcaa

SEQ ID NO: 1335023 - RNA, 19 nt, Artificial Sequence
  Description of Artificial Sequence: Synthetic oligonucleotide
  Antisense strand to SEQ ID NO: 1335022
uugccuaguucucacgaac

SEQ ID NO: 1335024 - RNA, 19 nt, Artificial Sequence
  Description of Artificial Sequence: Synthetic oligonucleotide
  Sense strand starting at position 3340 of SEQ ID NO: 1242270
gcacuugcugaauaugaga

SEQ ID NO: 1335025 - RNA, 19 nt, Artificial Sequence
  Description of Artificial Sequence: Synthetic oligonucleotide
  Antisense strand to SEQ ID NO: 1335024
ucucauauucagcaagugc

SEQ ID NO: 1335026 - RNA, 19 nt, Artificial Sequence
  Description of Artificial Sequence: Synthetic oligonucleotide
  Sense strand starting at position 3389 of SEQ ID NO: 1242270
gguaaauaacuguguaagc

SEQ ID NO: 1335027 - RNA, 19 nt, Artificial Sequence
  Description of Artificial Sequence: Synthetic oligonucleotide
  Antisense strand to SEQ ID NO: 1335026
gcuuacacaguuauuuacc

SEQ ID NO: 1335028 - RNA, 19 nt, Artificial Sequence
  Description of Artificial Sequence: Synthetic oligonucleotide
  Sense strand starting at position 3390 of SEQ ID NO: 1242270
guaaauaacuguguaagca

SEQ ID NO: 1335029 - RNA, 19 nt, Artificial Sequence
  Description of Artificial Sequence: Synthetic oligonucleotide
  Antisense strand to SEQ ID NO: 1335028
ugcuuacacaguuauuuac

SEQ ID NO: 1335030 - RNA, 19 nt, Artificial Sequence
  Description of Artificial Sequence: Synthetic oligonucleotide
  Sense strand starting at position 3398 of SEQ ID NO: 1242270
cuguguaagcaacgauaca

SEQ ID NO: 1335031 - RNA, 19 nt, Artificial Sequence
  Description of Artificial Sequence: Synthetic oligonucleotide
  Antisense strand to SEQ ID NO: 1335030
uguaucguugcuuacacag

SEQ ID NO: 1335032 - RNA, 19 nt, Artificial Sequence
  Description of Artificial Sequence: Synthetic oligonucleotide
  Sense strand starting at position 3399 of SEQ ID NO: 1242270
uguguaagcaacgauacaa

SEQ ID NO: 1335033 - RNA, 19 nt, Artificial Sequence
  Description of Artificial Sequence: Synthetic oligonucleotide
  Antisense strand to SEQ ID NO: 1335032
uuguaucguugcuuacaca

SEQ ID NO: 1335034 - RNA, 19 nt, Artificial Sequence
  Description of Artificial Sequence: Synthetic oligonucleotide
  Sense strand starting at position 3418 of SEQ ID NO: 1242270
gagaaaucccaagguagca

SEQ ID NO: 1335035 - RNA, 19 nt, Artificial Sequence
  Description of Artificial Sequence: Synthetic oligonucleotide
  Antisense strand to SEQ ID NO: 1335034
ugcuaccuugggauuucuc

SEQ ID NO: 1335036 - RNA, 19 nt, Artificial Sequence
  Description of Artificial Sequence: Synthetic oligonucleotide
  Sense strand starting at position 3498 of SEQ ID NO: 1242270
cacauaggacugugaccua

SEQ ID NO: 1335037 - RNA, 19 nt, Artificial Sequence
  Description of Artificial Sequence: Synthetic oligonucleotide
  Antisense strand to SEQ ID NO: 1335036
uaggucacaguccuaugug

SEQ ID NO: 1335038 - RNA, 19 nt, Artificial Sequence
  Description of Artificial Sequence: Synthetic oligonucleotide
  Sense strand starting at position 3511 of SEQ ID NO: 1242270
gaccuaggccagcauuauu

SEQ ID NO: 1335039 - RNA, 19 nt, Artificial Sequence
  Description of Artificial Sequence: Synthetic oligonucleotide
  Antisense strand to SEQ ID NO: 1335038
aauaaugcuggccuagguc

SEQ ID NO: 1335040 - RNA, 19 nt, Artificial Sequence
  Description of Artificial Sequence: Synthetic oligonucleotide
  Sense strand starting at position 3514 of SEQ ID NO: 1242270
cuaggccagcauuauuaga

SEQ ID NO: 1335041 - RNA, 19 nt, Artificial Sequence
  Description of Artificial Sequence: Synthetic oligonucleotide
  Antisense strand to SEQ ID NO: 1335040
ucuaauaaugcuggccuag

SEQ ID NO: 1335042 - RNA, 19 nt, Artificial Sequence
  Description of Artificial Sequence: Synthetic oligonucleotide
  Sense strand starting at position 3522 of SEQ ID NO: 1242270
gcauuauuagaacaggcaa

SEQ ID NO: 1335043 - RNA, 19 nt, Artificial Sequence
  Description of Artificial Sequence: Synthetic oligonucleotide
  Antisense strand to SEQ ID NO: 1335042
uugccuguucuaauaaugc

SEQ ID NO: 1335044 - RNA, 19 nt, Artificial Sequence
  Description of Artificial Sequence: Synthetic oligonucleotide
  Sense strand starting at position 3557 of SEQ ID NO: 1242270
aagagucucugugauuuga

SEQ ID NO: 1335045 - RNA, 19 nt, Artificial Sequence
  Description of Artificial Sequence: Synthetic oligonucleotide
  Antisense strand to SEQ ID NO: 1335044
ucaaaucacagagacucuu

SEQ ID NO: 1335046 - RNA, 19 nt, Artificial Sequence
  Description of Artificial Sequence: Synthetic oligonucleotide
  Sense strand starting at position 3561 of SEQ ID NO: 1242270
gucucugugauuugaggca

SEQ ID NO: 1335047 - RNA, 19 nt, Artificial Sequence
  Description of Artificial Sequence: Synthetic oligonucleotide
  Antisense strand to SEQ ID NO: 1335046
ugccucaaaucacagagac

SEQ ID NO: 1335048 - RNA, 19 nt, Artificial Sequence
  Description of Artificial Sequence: Synthetic oligonucleotide
  Sense strand starting at position 3633 of SEQ ID NO: 1242270
accaguauugcucaagucu

SEQ ID NO: 1335049 - RNA, 19 nt, Artificial Sequence
  Description of Artificial Sequence: Synthetic oligonucleotide
  Antisense strand to SEQ ID NO: 1335048
agacuugagcaauacuggu

SEQ ID NO: 1335050 - RNA, 19 nt, Artificial Sequence
  Description of Artificial Sequence: Synthetic oligonucleotide
  Sense strand starting at position 3911 of SEQ ID NO: 1242270
ggcaaagucagaugauuga

SEQ ID NO: 1335051 - RNA, 19 nt, Artificial Sequence
  Description of Artificial Sequence: Synthetic oligonucleotide
  Antisense strand to SEQ ID NO: 1335050
ucaaucaucugacuuugcc

SEQ ID NO: 1335052 - RNA, 19 nt, Artificial Sequence
  Description of Artificial Sequence: Synthetic oligonucleotide
  Sense strand starting at position 412 of SEQ ID NO: 1242271
ggauguacucuugguguaa

SEQ ID NO: 1335053 - RNA, 19 nt, Artificial Sequence
  Description of Artificial Sequence: Synthetic oligonucleotide
  Antisense strand to SEQ ID NO: 1335052
uuacaccaagaguacaucc

SEQ ID NO: 1335054 - RNA, 19 nt, Artificial Sequence
  Description of Artificial Sequence: Synthetic oligonucleotide
  Sense strand starting at position 413 of SEQ ID NO: 1242271
gauguacucuugguguaag

SEQ ID NO: 1335055 - RNA, 19 nt, Artificial Sequence
  Description of Artificial Sequence: Synthetic oligonucleotide
  Antisense strand to SEQ ID NO: 1335054
cuuacaccaagaguacauc

SEQ ID NO: 1335056 - RNA, 19 nt, Artificial Sequence
  Description of Artificial Sequence: Synthetic oligonucleotide
  Sense strand starting at position 487 of SEQ ID NO: 1242271
ggacaccuuucugauccaa

SEQ ID NO: 1335057 - RNA, 19 nt, Artificial Sequence
  Description of Artificial Sequence: Synthetic oligonucleotide
  Antisense strand to SEQ ID NO: 1335056
uuggaucagaaaggugucc

SEQ ID NO: 1335058 - RNA, 19 nt, Artificial Sequence
  Description of Artificial Sequence: Synthetic oligonucleotide
  Sense strand starting at position 568 of SEQ ID NO: 1242271
gcuguugcaggcuaaucau

SEQ ID NO: 1335059 - RNA, 19 nt, Artificial Sequence
  Description of Artificial Sequence: Synthetic oligonucleotide
  Antisense strand to SEQ ID NO: 1335058
augauuagccugcaacagc

SEQ ID NO: 1335060 - RNA, 19 nt, Artificial Sequence
  Description of Artificial Sequence: Synthetic oligonucleotide
  Sense strand starting at position 682 of SEQ ID NO: 1242271
ccugcaguucugggagcuu

SEQ ID NO: 1335061 - RNA, 19 nt, Artificial Sequence
  Description of Artificial Sequence: Synthetic oligonucleotide
  Antisense strand to SEQ ID NO: 1335060
aagcucccagaacugcagg

SEQ ID NO: 1335062 - RNA, 19 nt, Artificial Sequence
  Description of Artificial Sequence: Synthetic oligonucleotide
  Sense strand starting at position 727 of SEQ ID NO: 1242271
gaccuuacugacuggaguu

SEQ ID NO: 1335063 - RNA, 19 nt, Artificial Sequence
  Description of Artificial Sequence: Synthetic oligonucleotide
  Antisense strand to SEQ ID NO: 1335062
aacuccagucaguaagguc

SEQ ID NO: 1335064 - RNA, 19 nt, Artificial Sequence
  Description of Artificial Sequence: Synthetic oligonucleotide
  Sense strand starting at position 741 of SEQ ID NO: 1242271
gaguuugugucugcuugga

SEQ ID NO: 1335065 - RNA, 19 nt, Artificial Sequence
  Description of Artificial Sequence: Synthetic oligonucleotide
  Antisense strand to SEQ ID NO: 1335064
uccaagcagacacaaacuc

SEQ ID NO: 1335066 - RNA, 19 nt, Artificial Sequence
  Description of Artificial Sequence: Synthetic oligonucleotide
  Sense strand starting at position 872 of SEQ ID NO: 1242271
caugcagcucuggaaggau

SEQ ID NO: 1335067 - RNA, 19 nt, Artificial Sequence
  Description of Artificial Sequence: Synthetic oligonucleotide
  Antisense strand to SEQ ID NO: 1335066
auccuuccagagcugcaug

SEQ ID NO: 1335068 - RNA, 19 nt, Artificial Sequence
  Description of Artificial Sequence: Synthetic oligonucleotide
  Sense strand starting at position 883 of SEQ ID NO: 1242271
ggaaggaugcggugggaaa

SEQ ID NO: 1335069 - RNA, 19 nt, Artificial Sequence
  Description of Artificial Sequence: Synthetic oligonucleotide
  Antisense strand to SEQ ID NO: 1335068
uuucccaccgcauccuucc

SEQ ID NO: 1335070 - RNA, 19 nt, Artificial Sequence
  Description of Artificial Sequence: Synthetic oligonucleotide
  Sense strand starting at position 906 of SEQ ID NO: 1242271
ccacucagugguggagaaa

SEQ ID NO: 1335071 - RNA, 19 nt, Artificial Sequence
  Description of Artificial Sequence: Synthetic oligonucleotide
  Antisense strand to SEQ ID NO: 1335070
uuucuccaccacugagugg

SEQ ID NO: 1335072 - RNA, 19 nt, Artificial Sequence
  Description of Artificial Sequence: Synthetic oligonucleotide
  Sense strand starting at position 978 of SEQ ID NO: 1242271
cucaucugcccauguguua

SEQ ID NO: 1335073 - RNA, 19 nt, Artificial Sequence
  Description of Artificial Sequence: Synthetic oligonucleotide
  Antisense strand to SEQ ID NO: 1335072
uaacacaugggcagaugag

SEQ ID NO: 1335074 - RNA, 19 nt, Artificial Sequence
  Description of Artificial Sequence: Synthetic oligonucleotide
  Sense strand starting at position 993 of SEQ ID NO: 1242271
guuaauaucuacucgccau

SEQ ID NO: 1335075 - RNA, 19 nt, Artificial Sequence
  Description of Artificial Sequence: Synthetic oligonucleotide
  Antisense strand to SEQ ID NO: 1335074
auggcgaguagauauuaac

SEQ ID NO: 1335076 - RNA, 19 nt, Artificial Sequence
  Description of Artificial Sequence: Synthetic oligonucleotide
  Sense strand starting at position 1007 of SEQ ID NO: 1242271
gccauugguuuguuagguu

SEQ ID NO: 1335077 - RNA, 19 nt, Artificial Sequence
  Description of Artificial Sequence: Synthetic oligonucleotide
  Antisense strand to SEQ ID NO: 1335076
aaccuaacaaaccaauggc

SEQ ID NO: 1335078 - RNA, 19 nt, Artificial Sequence
  Description of Artificial Sequence: Synthetic oligonucleotide
  Sense strand starting at position 1183 of SEQ ID NO: 1242271
gccgguucugcucacggau

SEQ ID NO: 1335079 - RNA, 19 nt, Artificial Sequence
  Description of Artificial Sequence: Synthetic oligonucleotide
  Antisense strand to SEQ ID NO: 1335078
auccgugagcagaaccggc

SEQ ID NO: 1335080 - RNA, 19 nt, Artificial Sequence
  Description of Artificial Sequence: Synthetic oligonucleotide
  Sense strand starting at position 1186 of SEQ ID NO: 1242271
gguucugcucacggauaag

SEQ ID NO: 1335081 - RNA, 19 nt, Artificial Sequence
  Description of Artificial Sequence: Synthetic oligonucleotide
  Antisense strand to SEQ ID NO: 1335080
cuuauccgugagcagaacc

SEQ ID NO: 1335082 - RNA, 19 nt, Artificial Sequence
  Description of Artificial Sequence: Synthetic oligonucleotide
  Sense strand starting at position 1189 of SEQ ID NO: 1242271
ucugcucacggauaagagu

SEQ ID NO: 1335083 - RNA, 19 nt, Artificial Sequence
  Description of Artificial Sequence: Synthetic oligonucleotide
  Antisense strand to SEQ ID NO: 1335082
acucuuauccgugagcaga

SEQ ID NO: 1335084 - RNA, 19 nt, Artificial Sequence
  Description of Artificial Sequence: Synthetic oligonucleotide
  Sense strand starting at position 1261 of SEQ ID NO: 1242271
ggcucauccgacuaggacu

SEQ ID NO: 1335085 - RNA, 19 nt, Artificial Sequence
  Description of Artificial Sequence: Synthetic oligonucleotide
  Antisense strand to SEQ ID NO: 1335084
aguccuagucggaugagcc

SEQ ID NO: 1335086 - RNA, 19 nt, Artificial Sequence
  Description of Artificial Sequence: Synthetic oligonucleotide
  Sense strand starting at position 1892 of SEQ ID NO: 1242271
cggguuaccuggguuccaa

SEQ ID NO: 1335087 - RNA, 19 nt, Artificial Sequence
  Description of Artificial Sequence: Synthetic oligonucleotide
  Antisense strand to SEQ ID NO: 1335086
uuggaacccagguaacccg

SEQ ID NO: 1335088 - RNA, 19 nt, Artificial Sequence
  Description of Artificial Sequence: Synthetic oligonucleotide
  Sense strand starting at position 2462 of SEQ ID NO: 1242271
cgcccugaauccuugaagu

SEQ ID NO: 1335089 - RNA, 19 nt, Artificial Sequence
  Description of Artificial Sequence: Synthetic oligonucleotide
  Antisense strand to SEQ ID NO: 1335088
acuucaaggauucagggcg

SEQ ID NO: 1335090 - RNA, 19 nt, Artificial Sequence
  Description of Artificial Sequence: Synthetic oligonucleotide
  Sense strand starting at position 2921 of SEQ ID NO: 1242271
gcucuagucuacucuguga

SEQ ID NO: 1335091 - RNA, 19 nt, Artificial Sequence
  Description of Artificial Sequence: Synthetic oligonucleotide
  Antisense strand to SEQ ID NO: 1335090
ucacagaguagacuagagc

SEQ ID NO: 1335092 - RNA, 19 nt, Artificial Sequence
  Description of Artificial Sequence: Synthetic oligonucleotide
  Sense strand starting at position 3003 of SEQ ID NO: 1242271
gucaauuaucuccggccau

SEQ ID NO: 1335093 - RNA, 19 nt, Artificial Sequence
  Description of Artificial Sequence: Synthetic oligonucleotide
  Antisense strand to SEQ ID NO: 1335092
auggccggagauaauugac

SEQ ID NO: 1335094 - RNA, 19 nt, Artificial Sequence
  Description of Artificial Sequence: Synthetic oligonucleotide
  Sense strand starting at position 3047 of SEQ ID NO: 1242271
ugggcaccuugcuuuauua

SEQ ID NO: 1335095 - RNA, 19 nt, Artificial Sequence
  Description of Artificial Sequence: Synthetic oligonucleotide
  Antisense strand to SEQ ID NO: 1335094
uaauaaagcaaggugccca

SEQ ID NO: 1335096 - RNA, 19 nt, Artificial Sequence
  Description of Artificial Sequence: Synthetic oligonucleotide
  Sense strand starting at position 3075 of SEQ ID NO: 1242271
guggcugugcaucuuguaa

SEQ ID NO: 1335097 - RNA, 19 nt, Artificial Sequence
  Description of Artificial Sequence: Synthetic oligonucleotide
  Antisense strand to SEQ ID NO: 1335096
uuacaagaugcacagccac

SEQ ID NO: 1335098 - RNA, 19 nt, Artificial Sequence
  Description of Artificial Sequence: Synthetic oligonucleotide
  Sense strand starting at position 3210 of SEQ ID NO: 1242271
agaccagaguuugacaaga

SEQ ID NO: 1335099 - RNA, 19 nt, Artificial Sequence
  Description of Artificial Sequence: Synthetic oligonucleotide
  Antisense strand to SEQ ID NO: 1335098
ucuugucaaacucuggucu

SEQ ID NO: 1335100 - RNA, 19 nt, Artificial Sequence
  Description of Artificial Sequence: Synthetic oligonucleotide
  Sense strand starting at position 3212 of SEQ ID NO: 1242271
accagaguuugacaagaau

SEQ ID NO: 1335101 - RNA, 19 nt, Artificial Sequence
  Description of Artificial Sequence: Synthetic oligonucleotide
  Antisense strand to SEQ ID NO: 1335100
auucuugucaaacucuggu

SEQ ID NO: 1335102 - RNA, 19 nt, Artificial Sequence
  Description of Artificial Sequence: Synthetic oligonucleotide
  Sense strand starting at position 3255 of SEQ ID NO: 1242271
gucccagcucuaugcugaa

SEQ ID NO: 1335103 - RNA, 19 nt, Artificial Sequence
  Description of Artificial Sequence: Synthetic oligonucleotide
  Antisense strand to SEQ ID NO: 1335102
uucagcauagagcugggac

SEQ ID NO: 1335104 - RNA, 19 nt, Artificial Sequence
  Description of Artificial Sequence: Synthetic oligonucleotide
  Sense strand starting at position 3277 of SEQ ID NO: 1242271
agaguagccuuggacaaga

SEQ ID NO: 1335105 - RNA, 19 nt, Artificial Sequence
  Description of Artificial Sequence: Synthetic oligonucleotide
  Antisense strand to SEQ ID NO: 1335104
ucuuguccaaggcuacucu

SEQ ID NO: 1335106 - RNA, 19 nt, Artificial Sequence
  Description of Artificial Sequence: Synthetic oligonucleotide
  Sense strand starting at position 3357 of SEQ ID NO: 1242271
gggacucagugagauauua

SEQ ID NO: 1335107 - RNA, 19 nt, Artificial Sequence
  Description of Artificial Sequence: Synthetic oligonucleotide
  Antisense strand to SEQ ID NO: 1335106
uaauaucucacugaguccc

SEQ ID NO: 1335108 - RNA, 19 nt, Artificial Sequence
  Description of Artificial Sequence: Synthetic oligonucleotide
  Sense strand starting at position 3421 of SEQ ID NO: 1242271
ugaugucugggccagugau

SEQ ID NO: 1335109 - RNA, 19 nt, Artificial Sequence
  Description of Artificial Sequence: Synthetic oligonucleotide
  Antisense strand to SEQ ID NO: 1335108
aucacuggcccagacauca

SEQ ID NO: 1335110 - RNA, 19 nt, Artificial Sequence
  Description of Artificial Sequence: Synthetic oligonucleotide
  Sense strand starting at position 3465 of SEQ ID NO: 1242271
aagcauucucugggaggca

SEQ ID NO: 1335111 - RNA, 19 nt, Artificial Sequence
  Description of Artificial Sequence: Synthetic oligonucleotide
  Antisense strand to SEQ ID NO: 1335110
ugccucccagagaaugcuu

SEQ ID NO: 1335112 - RNA, 19 nt, Artificial Sequence
  Description of Artificial Sequence: Synthetic oligonucleotide
  Sense strand starting at position 3595 of SEQ ID NO: 1242271
uggauuccugccugcugua

SEQ ID NO: 1335113 - RNA, 19 nt, Artificial Sequence
  Description of Artificial Sequence: Synthetic oligonucleotide
  Antisense strand to SEQ ID NO: 1335112
uacagcaggcaggaaucca

SEQ ID NO: 1335114 - RNA, 19 nt, Artificial Sequence
  Description of Artificial Sequence: Synthetic oligonucleotide
  Sense strand starting at position 3621 of SEQ ID NO: 1242271
gugugugcaccuugaagaa

SEQ ID NO: 1335115 - RNA, 19 nt, Artificial Sequence
  Description of Artificial Sequence: Synthetic oligonucleotide
  Antisense strand to SEQ ID NO: 1335114
uucuucaaggugcacacac

SEQ ID NO: 1335116 - RNA, 19 nt, Artificial Sequence
  Description of Artificial Sequence: Synthetic oligonucleotide
  Sense strand starting at position 3676 of SEQ ID NO: 1242271
uggagguggucaguggauu

SEQ ID NO: 1335117 - RNA, 19 nt, Artificial Sequence
  Description of Artificial Sequence: Synthetic oligonucleotide
  Antisense strand to SEQ ID NO: 1335116
aauccacugaccaccucca

SEQ ID NO: 1335118 - RNA, 19 nt, Artificial Sequence
  Description of Artificial Sequence: Synthetic oligonucleotide
  Sense strand starting at position 3677 of SEQ ID NO: 1242271
ggagguggucaguggauua

SEQ ID NO: 1335119 - RNA, 19 nt, Artificial Sequence
  Description of Artificial Sequence: Synthetic oligonucleotide
  Antisense strand to SEQ ID NO: 1335118
uaauccacugaccaccucc

SEQ ID NO: 1335120 - RNA, 19 nt, Artificial Sequence
  Description of Artificial Sequence: Synthetic oligonucleotide
  Sense strand starting at position 3682 of SEQ ID NO: 1242271
uggucaguggauuacugau

SEQ ID NO: 1335121 - RNA, 19 nt, Artificial Sequence
  Description of Artificial Sequence: Synthetic oligonucleotide
  Antisense strand to SEQ ID NO: 1335120
aucaguaauccacugacca

SEQ ID NO: 1335122 - RNA, 19 nt, Artificial Sequence
  Description of Artificial Sequence: Synthetic oligonucleotide
  Sense strand starting at position 3708 of SEQ ID NO: 1242271
ucugcauaucuuggccaaa

SEQ ID NO: 1335123 - RNA, 19 nt, Artificial Sequence
  Description of Artificial Sequence: Synthetic oligonucleotide
  Antisense strand to SEQ ID NO: 1335122
uuuggccaagauaugcaga

SEQ ID NO: 1335124 - RNA, 19 nt, Artificial Sequence
  Description of Artificial Sequence: Synthetic oligonucleotide
  Sense strand starting at position 3737 of SEQ ID NO: 1242271
ucugcucuuagggaguuua

SEQ ID NO: 1335125 - RNA, 19 nt, Artificial Sequence
  Description of Artificial Sequence: Synthetic oligonucleotide
  Antisense strand to SEQ ID NO: 1335124
uaaacucccuaagagcaga

SEQ ID NO: 1335126 - RNA, 19 nt, Artificial Sequence
  Description of Artificial Sequence: Synthetic oligonucleotide
  Sense strand starting at position 3752 of SEQ ID NO: 1242271
uuuaaagucuaacugaaug

SEQ ID NO: 1335127 - RNA, 19 nt, Artificial Sequence
  Description of Artificial Sequence: Synthetic oligonucleotide
  Antisense strand to SEQ ID NO: 1335126
cauucaguuagacuuuaaa

SEQ ID NO: 1335128 - RNA, 19 nt, Artificial Sequence
  Description of Artificial Sequence: Synthetic oligonucleotide
  Sense strand starting at position 3757 of SEQ ID NO: 1242271
agucuaacugaaugauuga

SEQ ID NO: 1335129 - RNA, 19 nt, Artificial Sequence
  Description of Artificial Sequence: Synthetic oligonucleotide
  Antisense strand to SEQ ID NO: 1335128
ucaaucauucaguuagacu

SEQ ID NO: 1335130 - RNA, 19 nt, Artificial Sequence
  Description of Artificial Sequence: Synthetic oligonucleotide
  Sense strand starting at position 3965 of SEQ ID NO: 1242271
gggaaagugaccugcccaa

SEQ ID NO: 1335131 - RNA, 19 nt, Artificial Sequence
  Description of Artificial Sequence: Synthetic oligonucleotide
  Antisense strand to SEQ ID NO: 1335130
uugggcaggucacuuuccc

SEQ ID NO: 1335132 - RNA, 19 nt, Artificial Sequence
  Description of Artificial Sequence: Synthetic oligonucleotide
  Sense strand starting at position 38 of SEQ ID NO: 1242272
cuuauucccucagugauug

SEQ ID NO: 1335133 - RNA, 19 nt, Artificial Sequence
  Description of Artificial Sequence: Synthetic oligonucleotide
  Antisense strand to SEQ ID NO: 1335132
caaucacugagggaauaag

SEQ ID NO: 1335134 - RNA, 19 nt, Artificial Sequence
  Description of Artificial Sequence: Synthetic oligonucleotide
  Sense strand starting at position 359 of SEQ ID NO: 1242272
uucccaaaguccuugggau

SEQ ID NO: 1335135 - RNA, 19 nt, Artificial Sequence
  Description of Artificial Sequence: Synthetic oligonucleotide
  Antisense strand to SEQ ID NO: 1335134
aucccaaggacuuugggaa

SEQ ID NO: 1335136 - RNA, 19 nt, Artificial Sequence
  Description of Artificial Sequence: Synthetic oligonucleotide
  Sense strand starting at position 360 of SEQ ID NO: 1242272
ucccaaaguccuugggauu

SEQ ID NO: 1335137 - RNA, 19 nt, Artificial Sequence
  Description of Artificial Sequence: Synthetic oligonucleotide
  Antisense strand to SEQ ID NO: 1335136
aaucccaaggacuuuggga

SEQ ID NO: 1335138 - RNA, 19 nt, Artificial Sequence
  Description of Artificial Sequence: Synthetic oligonucleotide
  Sense strand starting at position 361 of SEQ ID NO: 1242272
cccaaaguccuugggauua

SEQ ID NO: 1335139 - RNA, 19 nt, Artificial Sequence
  Description of Artificial Sequence: Synthetic oligonucleotide
  Antisense strand to SEQ ID NO: 1335138
uaaucccaaggacuuuggg

SEQ ID NO: 1335140 - RNA, 19 nt, Artificial Sequence
  Description of Artificial Sequence: Synthetic oligonucleotide
  Sense strand starting at position 1009 of SEQ ID NO: 1242272
acauuuggauuauaaggau

SEQ ID NO: 1335141 - RNA, 19 nt, Artificial Sequence
  Description of Artificial Sequence: Synthetic oligonucleotide
  Antisense strand to SEQ ID NO: 1335140
auccuuauaauccaaaugu

SEQ ID NO: 1335142 - RNA, 19 nt, Artificial Sequence
  Description of Artificial Sequence: Synthetic oligonucleotide
  Sense strand starting at position 1106 of SEQ ID NO: 1242272
auauguacuggauguuaca

SEQ ID NO: 1335143 - RNA, 19 nt, Artificial Sequence
  Description of Artificial Sequence: Synthetic oligonucleotide
  Antisense strand to SEQ ID NO: 1335142
uguaacauccaguacauau

SEQ ID NO: 1335144 - RNA, 19 nt, Artificial Sequence
  Description of Artificial Sequence: Synthetic oligonucleotide
  Sense strand starting at position 1195 of SEQ ID NO: 1242272
ggugucuaauuauuugcaa

SEQ ID NO: 1335145 - RNA, 19 nt, Artificial Sequence
  Description of Artificial Sequence: Synthetic oligonucleotide
  Antisense strand to SEQ ID NO: 1335144
uugcaaauaauuagacacc

SEQ ID NO: 1335146 - RNA, 19 nt, Artificial Sequence
  Description of Artificial Sequence: Synthetic oligonucleotide
  Sense strand starting at position 1218 of SEQ ID NO: 1242272
auggauaacuuucuagcua

SEQ ID NO: 1335147 - RNA, 19 nt, Artificial Sequence
  Description of Artificial Sequence: Synthetic oligonucleotide
  Antisense strand to SEQ ID NO: 1335146
uagcuagaaaguuauccau

SEQ ID NO: 1335148 - RNA, 19 nt, Artificial Sequence
  Description of Artificial Sequence: Synthetic oligonucleotide
  Sense strand starting at position 1323 of SEQ ID NO: 1242272
cucggagucauuugucauu

SEQ ID NO: 1335149 - RNA, 19 nt, Artificial Sequence
  Description of Artificial Sequence: Synthetic oligonucleotide
  Antisense strand to SEQ ID NO: 1335148
aaugacaaaugacuccgag

SEQ ID NO: 1335150 - RNA, 19 nt, Artificial Sequence
  Description of Artificial Sequence: Synthetic oligonucleotide
  Sense strand starting at position 1332 of SEQ ID NO: 1242272
auuugucauugacaggaga

SEQ ID NO: 1335151 - RNA, 19 nt, Artificial Sequence
  Description of Artificial Sequence: Synthetic oligonucleotide
  Antisense strand to SEQ ID NO: 1335150
ucuccugucaaugacaaau

SEQ ID NO: 1335152 - RNA, 19 nt, Artificial Sequence
  Description of Artificial Sequence: Synthetic oligonucleotide
  Sense strand starting at position 1373 of SEQ ID NO: 1242272
ggagugagcguugacauga

SEQ ID NO: 1335153 - RNA, 19 nt, Artificial Sequence
  Description of Artificial Sequence: Synthetic oligonucleotide
  Antisense strand to SEQ ID NO: 1335152
ucaugucaacgcucacucc

SEQ ID NO: 1335154 - RNA, 19 nt, Artificial Sequence
  Description of Artificial Sequence: Synthetic oligonucleotide
  Sense strand starting at position 1403 of SEQ ID NO: 1242272
guguucuuagcucauggaa

SEQ ID NO: 1335155 - RNA, 19 nt, Artificial Sequence
  Description of Artificial Sequence: Synthetic oligonucleotide
  Antisense strand to SEQ ID NO: 1335154
uuccaugagcuaagaacac

SEQ ID NO: 1335156 - RNA, 19 nt, Artificial Sequence
  Description of Artificial Sequence: Synthetic oligonucleotide
  Sense strand starting at position 1467 of SEQ ID NO: 1242272
ggcggcugucauguuuacu

SEQ ID NO: 1335157 - RNA, 19 nt, Artificial Sequence
  Description of Artificial Sequence: Synthetic oligonucleotide
  Antisense strand to SEQ ID NO: 1335156
aguaaacaugacagccgcc

SEQ ID NO: 1335158 - RNA, 19 nt, Artificial Sequence
  Description of Artificial Sequence: Synthetic oligonucleotide
  Sense strand starting at position 1468 of SEQ ID NO: 1242272
gcggcugucauguuuacua

SEQ ID NO: 1335159 - RNA, 19 nt, Artificial Sequence
  Description of Artificial Sequence: Synthetic oligonucleotide
  Antisense strand to SEQ ID NO: 1335158
uaguaaacaugacagccgc

SEQ ID NO: 1335160 - RNA, 19 nt, Artificial Sequence
  Description of Artificial Sequence: Synthetic oligonucleotide
  Sense strand starting at position 1470 of SEQ ID NO: 1242272
ggcugucauguuuacuaau

SEQ ID NO: 1335161 - RNA, 19 nt, Artificial Sequence
  Description of Artificial Sequence: Synthetic oligonucleotide
  Antisense strand to SEQ ID NO: 1335160
auuaguaaacaugacagcc

SEQ ID NO: 1335162 - RNA, 19 nt, Artificial Sequence
  Description of Artificial Sequence: Synthetic oligonucleotide
  Sense strand starting at position 1480 of SEQ ID NO: 1242272
uuuacuaaugcggauggaa

SEQ ID NO: 1335163 - RNA, 19 nt, Artificial Sequence
  Description of Artificial Sequence: Synthetic oligonucleotide
  Antisense strand to SEQ ID NO: 1335162
uuccauccgcauuaguaaa

SEQ ID NO: 1335164 - RNA, 19 nt, Artificial Sequence
  Description of Artificial Sequence: Synthetic oligonucleotide
  Sense strand starting at position 2059 of SEQ ID NO: 1242272
gggcuaugacaauggaaug

SEQ ID NO: 1335165 - RNA, 19 nt, Artificial Sequence
  Description of Artificial Sequence: Synthetic oligonucleotide
  Antisense strand to SEQ ID NO: 1335164
cauuccauugucauagccc

SEQ ID NO: 1335166 - RNA, 19 nt, Artificial Sequence
  Description of Artificial Sequence: Synthetic oligonucleotide
  Sense strand starting at position 2717 of SEQ ID NO: 1242272
cagccagauggguaaaucu

SEQ ID NO: 1335167 - RNA, 19 nt, Artificial Sequence
  Description of Artificial Sequence: Synthetic oligonucleotide
  Antisense strand to SEQ ID NO: 1335166
agauuuacccaucuggcug

SEQ ID NO: 1335168 - RNA, 19 nt, Artificial Sequence
  Description of Artificial Sequence: Synthetic oligonucleotide
  Sense strand starting at position 2792 of SEQ ID NO: 1242272
uccagaauucucugaauug

SEQ ID NO: 1335169 - RNA, 19 nt, Artificial Sequence
  Description of Artificial Sequence: Synthetic oligonucleotide
  Antisense strand to SEQ ID NO: 1335168
caauucagagaauucugga

SEQ ID NO: 1335170 - RNA, 19 nt, Artificial Sequence
  Description of Artificial Sequence: Synthetic oligonucleotide
  Sense strand starting at position 2801 of SEQ ID NO: 1242272
cucugaauugcuuaagucu

SEQ ID NO: 1335171 - RNA, 19 nt, Artificial Sequence
  Description of Artificial Sequence: Synthetic oligonucleotide
  Antisense strand to SEQ ID NO: 1335170
agacuuaagcaauucagag

SEQ ID NO: 1335172 - RNA, 19 nt, Artificial Sequence
  Description of Artificial Sequence: Synthetic oligonucleotide
  Sense strand starting at position 2812 of SEQ ID NO: 1242272
uuaagucucuggccucaaa

SEQ ID NO: 1335173 - RNA, 19 nt, Artificial Sequence
  Description of Artificial Sequence: Synthetic oligonucleotide
  Antisense strand to SEQ ID NO: 1335172
uuugaggccagagacuuaa

SEQ ID NO: 1335174 - RNA, 19 nt, Artificial Sequence
  Description of Artificial Sequence: Synthetic oligonucleotide
  Sense strand starting at position 2893 of SEQ ID NO: 1242272
uugacuuaacucugcugga

SEQ ID NO: 1335175 - RNA, 19 nt, Artificial Sequence
  Description of Artificial Sequence: Synthetic oligonucleotide
  Antisense strand to SEQ ID NO: 1335174
uccagcagaguuaagucaa

SEQ ID NO: 1335176 - RNA, 19 nt, Artificial Sequence
  Description of Artificial Sequence: Synthetic oligonucleotide
  Sense strand starting at position 2975 of SEQ ID NO: 1242272
gugugaccucauggucaca

SEQ ID NO: 1335177 - RNA, 19 nt, Artificial Sequence
  Description of Artificial Sequence: Synthetic oligonucleotide
  Antisense strand to SEQ ID NO: 1335176
ugugaccaugaggucacac

SEQ ID NO: 1335178 - RNA, 19 nt, Artificial Sequence
  Description of Artificial Sequence: Synthetic oligonucleotide
  Sense strand starting at position 3007 of SEQ ID NO: 1242272
acagaccauugugcuuaaa

SEQ ID NO: 1335179 - RNA, 19 nt, Artificial Sequence
  Description of Artificial Sequence: Synthetic oligonucleotide
  Antisense strand to SEQ ID NO: 1335178
uuuaagcacaauggucugu

SEQ ID NO: 1335180 - RNA, 19 nt, Artificial Sequence
  Description of Artificial Sequence: Synthetic oligonucleotide
  Sense strand starting at position 3067 of SEQ ID NO: 1242272
ggaagaaacuucuccuucu

SEQ ID NO: 1335181 - RNA, 19 nt, Artificial Sequence
  Description of Artificial Sequence: Synthetic oligonucleotide
  Antisense strand to SEQ ID NO: 1335180
agaaggagaaguuucuucc

SEQ ID NO: 1335182 - RNA, 19 nt, Artificial Sequence
  Description of Artificial Sequence: Synthetic oligonucleotide
  Sense strand starting at position 3149 of SEQ ID NO: 1242272
cuaugacuucgggagguag

SEQ ID NO: 1335183 - RNA, 19 nt, Artificial Sequence
  Description of Artificial Sequence: Synthetic oligonucleotide
  Antisense strand to SEQ ID NO: 1335182
cuaccucccgaagucauag

SEQ ID NO: 1335184 - RNA, 19 nt, Artificial Sequence
  Description of Artificial Sequence: Synthetic oligonucleotide
  Sense strand starting at position 3253 of SEQ ID NO: 1242272
ucaaaucuguuugcucuga

SEQ ID NO: 1335185 - RNA, 19 nt, Artificial Sequence
  Description of Artificial Sequence: Synthetic oligonucleotide
  Antisense strand to SEQ ID NO: 1335184
ucagagcaaacagauuuga

SEQ ID NO: 1335186 - RNA, 19 nt, Artificial Sequence
  Description of Artificial Sequence: Synthetic oligonucleotide
  Sense strand starting at position 3464 of SEQ ID NO: 1242272
ccuccuuggccucaagaau

SEQ ID NO: 1335187 - RNA, 19 nt, Artificial Sequence
  Description of Artificial Sequence: Synthetic oligonucleotide
  Antisense strand to SEQ ID NO: 1335186
auucuugaggccaaggagg

SEQ ID NO: 1335188 - RNA, 19 nt, Artificial Sequence
  Description of Artificial Sequence: Synthetic oligonucleotide
  Sense strand starting at position 3476 of SEQ ID NO: 1242272
caagaauuguuuguugggu

SEQ ID NO: 1335189 - RNA, 19 nt, Artificial Sequence
  Description of Artificial Sequence: Synthetic oligonucleotide
  Antisense strand to SEQ ID NO: 1335188
acccaacaaacaauucuug

SEQ ID NO: 1335190 - RNA, 19 nt, Artificial Sequence
  Description of Artificial Sequence: Synthetic oligonucleotide
  Sense strand starting at position 3481 of SEQ ID NO: 1242272
auuguuuguuggguggaua

SEQ ID NO: 1335191 - RNA, 19 nt, Artificial Sequence
  Description of Artificial Sequence: Synthetic oligonucleotide
  Antisense strand to SEQ ID NO: 1335190
uauccacccaacaaacaau

SEQ ID NO: 1335192 - RNA, 19 nt, Artificial Sequence
  Description of Artificial Sequence: Synthetic oligonucleotide
  Sense strand starting at position 3484 of SEQ ID NO: 1242272
guuuguuggguggauauau

SEQ ID NO: 1335193 - RNA, 19 nt, Artificial Sequence
  Description of Artificial Sequence: Synthetic oligonucleotide
  Antisense strand to SEQ ID NO: 1335192
auauauccacccaacaaac

SEQ ID NO: 1335194 - RNA, 19 nt, Artificial Sequence
  Description of Artificial Sequence: Synthetic oligonucleotide
  Sense strand starting at position 3506 of SEQ ID NO: 1242272
auuugcuuaucugaagaua

SEQ ID NO: 1335195 - RNA, 19 nt, Artificial Sequence
  Description of Artificial Sequence: Synthetic oligonucleotide
  Antisense strand to SEQ ID NO: 1335194
uaucuucagauaagcaaau

SEQ ID NO: 1335196 - RNA, 19 nt, Artificial Sequence
  Description of Artificial Sequence: Synthetic oligonucleotide
  Sense strand starting at position 3520 of SEQ ID NO: 1242272
agauauuugucacauauga

SEQ ID NO: 1335197 - RNA, 19 nt, Artificial Sequence
  Description of Artificial Sequence: Synthetic oligonucleotide
  Antisense strand to SEQ ID NO: 1335196
ucauaugugacaaauaucu

SEQ ID NO: 1335198 - RNA, 19 nt, Artificial Sequence
  Description of Artificial Sequence: Synthetic oligonucleotide
  Sense strand starting at position 3614 of SEQ ID NO: 1242272
uuagcucaugcagaauauu

SEQ ID NO: 1335199 - RNA, 19 nt, Artificial Sequence
  Description of Artificial Sequence: Synthetic oligonucleotide
  Antisense strand to SEQ ID NO: 1335198
aauauucugcaugagcuaa

SEQ ID NO: 1335200 - RNA, 19 nt, Artificial Sequence
  Description of Artificial Sequence: Synthetic oligonucleotide
  Sense strand starting at position 3617 of SEQ ID NO: 1242272
gcucaugcagaauauuaga

SEQ ID NO: 1335201 - RNA, 19 nt, Artificial Sequence
  Description of Artificial Sequence: Synthetic oligonucleotide
  Antisense strand to SEQ ID NO: 1335200
ucuaauauucugcaugagc

SEQ ID NO: 1335202 - RNA, 19 nt, Artificial Sequence
  Description of Artificial Sequence: Synthetic oligonucleotide
  Sense strand starting at position 3698 of SEQ ID NO: 1242272
gcauuuacuugauagugaa

SEQ ID NO: 1335203 - RNA, 19 nt, Artificial Sequence
  Description of Artificial Sequence: Synthetic oligonucleotide
  Antisense strand to SEQ ID NO: 1335202
uucacuaucaaguaaaugc

SEQ ID NO: 1335204 - RNA, 19 nt, Artificial Sequence
  Description of Artificial Sequence: Synthetic oligonucleotide
  Sense strand starting at position 3711 of SEQ ID NO: 1242272
agugaaacugaauguucuu

SEQ ID NO: 1335205 - RNA, 19 nt, Artificial Sequence
  Description of Artificial Sequence: Synthetic oligonucleotide
  Antisense strand to SEQ ID NO: 1335204
aagaacauucaguuucacu

SEQ ID NO: 1335206 - RNA, 19 nt, Artificial Sequence
  Description of Artificial Sequence: Synthetic oligonucleotide
  Sense strand starting at position 3714 of SEQ ID NO: 1242272
gaaacugaauguucuuaug

SEQ ID NO: 1335207 - RNA, 19 nt, Artificial Sequence
  Description of Artificial Sequence: Synthetic oligonucleotide
  Antisense strand to SEQ ID NO: 1335206
cauaagaacauucaguuuc

SEQ ID NO: 1335208 - RNA, 19 nt, Artificial Sequence
  Description of Artificial Sequence: Synthetic oligonucleotide
  Sense strand starting at position 3756 of SEQ ID NO: 1242272
aucagaauuugcuaaggug

SEQ ID NO: 1335209 - RNA, 19 nt, Artificial Sequence
  Description of Artificial Sequence: Synthetic oligonucleotide
  Antisense strand to SEQ ID NO: 1335208
caccuuagcaaauucugau

SEQ ID NO: 1335210 - RNA, 19 nt, Artificial Sequence
  Description of Artificial Sequence: Synthetic oligonucleotide
  Sense strand starting at position 3764 of SEQ ID NO: 1242272
uugcuaagguggucucaga

SEQ ID NO: 1335211 - RNA, 19 nt, Artificial Sequence
  Description of Artificial Sequence: Synthetic oligonucleotide
  Antisense strand to SEQ ID NO: 1335210
ucugagaccaccuuagcaa

SEQ ID NO: 1335212 - RNA, 19 nt, Artificial Sequence
  Description of Artificial Sequence: Synthetic oligonucleotide
  Sense strand starting at position 168 of SEQ ID NO: 1242273
cuggcaggucucuaauaca

SEQ ID NO: 1335213 - RNA, 19 nt, Artificial Sequence
  Description of Artificial Sequence: Synthetic oligonucleotide
  Antisense strand to SEQ ID NO: 1335212
uguauuagagaccugccag

SEQ ID NO: 1335214 - RNA, 19 nt, Artificial Sequence
  Description of Artificial Sequence: Synthetic oligonucleotide
  Sense strand starting at position 196 of SEQ ID NO: 1242273
aaugucagguuuccagauu

SEQ ID NO: 1335215 - RNA, 19 nt, Artificial Sequence
  Description of Artificial Sequence: Synthetic oligonucleotide
  Antisense strand to SEQ ID NO: 1335214
aaucuggaaaccugacauu

SEQ ID NO: 1335216 - RNA, 19 nt, Artificial Sequence
  Description of Artificial Sequence: Synthetic oligonucleotide
  Sense strand starting at position 202 of SEQ ID NO: 1242273
agguuuccagauuagugau

SEQ ID NO: 1335217 - RNA, 19 nt, Artificial Sequence
  Description of Artificial Sequence: Synthetic oligonucleotide
  Antisense strand to SEQ ID NO: 1335216
aucacuaaucuggaaaccu

SEQ ID NO: 1335218 - RNA, 19 nt, Artificial Sequence
  Description of Artificial Sequence: Synthetic oligonucleotide
  Sense strand starting at position 212 of SEQ ID NO: 1242273
auuagugauucucugacug

SEQ ID NO: 1335219 - RNA, 19 nt, Artificial Sequence
  Description of Artificial Sequence: Synthetic oligonucleotide
  Antisense strand to SEQ ID NO: 1335218
cagucagagaaucacuaau

SEQ ID NO: 1335220 - RNA, 19 nt, Artificial Sequence
  Description of Artificial Sequence: Synthetic oligonucleotide
  Sense strand starting at position 248 of SEQ ID NO: 1242273
gcaucaguaucaucuagga

SEQ ID NO: 1335221 - RNA, 19 nt, Artificial Sequence
  Description of Artificial Sequence: Synthetic oligonucleotide
  Antisense strand to SEQ ID NO: 1335220
uccuagaugauacugaugc

SEQ ID NO: 1335222 - RNA, 19 nt, Artificial Sequence
  Description of Artificial Sequence: Synthetic oligonucleotide
  Sense strand starting at position 739 of SEQ ID NO: 1242273
agauccuuguguguucuaa

SEQ ID NO: 1335223 - RNA, 19 nt, Artificial Sequence
  Description of Artificial Sequence: Synthetic oligonucleotide
  Antisense strand to SEQ ID NO: 1335222
uuagaacacacaaggaucu

SEQ ID NO: 1335224 - RNA, 19 nt, Artificial Sequence
  Description of Artificial Sequence: Synthetic oligonucleotide
  Sense strand starting at position 751 of SEQ ID NO: 1242273
guucuaaggaccugugguu

SEQ ID NO: 1335225 - RNA, 19 nt, Artificial Sequence
  Description of Artificial Sequence: Synthetic oligonucleotide
  Antisense strand to SEQ ID NO: 1335224
aaccacagguccuuagaac

SEQ ID NO: 1335226 - RNA, 19 nt, Artificial Sequence
  Description of Artificial Sequence: Synthetic oligonucleotide
  Sense strand starting at position 902 of SEQ ID NO: 1242273
cggaaaguauaacuaaagu

SEQ ID NO: 1335227 - RNA, 19 nt, Artificial Sequence
  Description of Artificial Sequence: Synthetic oligonucleotide
  Antisense strand to SEQ ID NO: 1335226
acuuuaguuauacuuuccg

SEQ ID NO: 1335228 - RNA, 19 nt, Artificial Sequence
  Description of Artificial Sequence: Synthetic oligonucleotide
  Sense strand starting at position 1035 of SEQ ID NO: 1242273
uugauuacuggugaagcua

SEQ ID NO: 1335229 - RNA, 19 nt, Artificial Sequence
  Description of Artificial Sequence: Synthetic oligonucleotide
  Antisense strand to SEQ ID NO: 1335228
uagcuucaccaguaaucaa

SEQ ID NO: 1335230 - RNA, 19 nt, Artificial Sequence
  Description of Artificial Sequence: Synthetic oligonucleotide
  Sense strand starting at position 1049 of SEQ ID NO: 1242273
agcuaugugacguacauga

SEQ ID NO: 1335231 - RNA, 19 nt, Artificial Sequence
  Description of Artificial Sequence: Synthetic oligonucleotide
  Antisense strand to SEQ ID NO: 1335230
ucauguacgucacauagcu

SEQ ID NO: 1335232 - RNA, 19 nt, Artificial Sequence
  Description of Artificial Sequence: Synthetic oligonucleotide
  Sense strand starting at position 1296 of SEQ ID NO: 1242273
gcauauucccgccauagag

SEQ ID NO: 1335233 - RNA, 19 nt, Artificial Sequence
  Description of Artificial Sequence: Synthetic oligonucleotide
  Antisense strand to SEQ ID NO: 1335232
cucuauggcgggaauaugc

SEQ ID NO: 1335234 - RNA, 19 nt, Artificial Sequence
  Description of Artificial Sequence: Synthetic oligonucleotide
  Sense strand starting at position 1524 of SEQ ID NO: 1242273
uguuuaucagaauguaacc

SEQ ID NO: 1335235 - RNA, 19 nt, Artificial Sequence
  Description of Artificial Sequence: Synthetic oligonucleotide
  Antisense strand to SEQ ID NO: 1335234
gguuacauucugauaaaca

SEQ ID NO: 1335236 - RNA, 19 nt, Artificial Sequence
  Description of Artificial Sequence: Synthetic oligonucleotide
  Sense strand starting at position 1620 of SEQ ID NO: 1242273
gaaugaacccucugcugga

SEQ ID NO: 1335237 - RNA, 19 nt, Artificial Sequence
  Description of Artificial Sequence: Synthetic oligonucleotide
  Antisense strand to SEQ ID NO: 1335236
uccagcagaggguucauuc

SEQ ID NO: 1335238 - RNA, 19 nt, Artificial Sequence
  Description of Artificial Sequence: Synthetic oligonucleotide
  Sense strand starting at position 1627 of SEQ ID NO: 1242273
cccucugcuggauacuuaa

SEQ ID NO: 1335239 - RNA, 19 nt, Artificial Sequence
  Description of Artificial Sequence: Synthetic oligonucleotide
  Antisense strand to SEQ ID NO: 1335238
uuaaguauccagcagaggg

SEQ ID NO: 1335240 - RNA, 19 nt, Artificial Sequence
  Description of Artificial Sequence: Synthetic oligonucleotide
  Sense strand starting at position 1643 of SEQ ID NO: 1242273
uaagucaaaugggagauau

SEQ ID NO: 1335241 - RNA, 19 nt, Artificial Sequence
  Description of Artificial Sequence: Synthetic oligonucleotide
  Antisense strand to SEQ ID NO: 1335240
auaucucccauuugacuua

SEQ ID NO: 1335242 - RNA, 19 nt, Artificial Sequence
  Description of Artificial Sequence: Synthetic oligonucleotide
  Sense strand starting at position 1777 of SEQ ID NO: 1242273
ugagguucgugagauuuga

SEQ ID NO: 1335243 - RNA, 19 nt, Artificial Sequence
  Description of Artificial Sequence: Synthetic oligonucleotide
  Antisense strand to SEQ ID NO: 1335242
ucaaaucucacgaaccuca

SEQ ID NO: 1335244 - RNA, 19 nt, Artificial Sequence
  Description of Artificial Sequence: Synthetic oligonucleotide
  Sense strand starting at position 1938 of SEQ ID NO: 1242273
ugcugcagaagucaagaaa

SEQ ID NO: 1335245 - RNA, 19 nt, Artificial Sequence
  Description of Artificial Sequence: Synthetic oligonucleotide
  Antisense strand to SEQ ID NO: 1335244
uuucuugacuucugcagca

SEQ ID NO: 1335246 - RNA, 19 nt, Artificial Sequence
  Description of Artificial Sequence: Synthetic oligonucleotide
  Sense strand starting at position 1998 of SEQ ID NO: 1242273
uugcuaucacaaggagaaa

SEQ ID NO: 1335247 - RNA, 19 nt, Artificial Sequence
  Description of Artificial Sequence: Synthetic oligonucleotide
  Antisense strand to SEQ ID NO: 1335246
uuucuccuugugauagcaa

SEQ ID NO: 1335248 - RNA, 19 nt, Artificial Sequence
  Description of Artificial Sequence: Synthetic oligonucleotide
  Sense strand starting at position 2092 of SEQ ID NO: 1242273
gcuuuagugaaagggacuu

SEQ ID NO: 1335249 - RNA, 19 nt, Artificial Sequence
  Description of Artificial Sequence: Synthetic oligonucleotide
  Antisense strand to SEQ ID NO: 1335248
aagucccuuucacuaaagc

SEQ ID NO: 1335250 - RNA, 19 nt, Artificial Sequence
  Description of Artificial Sequence: Synthetic oligonucleotide
  Sense strand starting at position 2104 of SEQ ID NO: 1242273
gggacuugcuuccucuacu

SEQ ID NO: 1335251 - RNA, 19 nt, Artificial Sequence
  Description of Artificial Sequence: Synthetic oligonucleotide
  Antisense strand to SEQ ID NO: 1335250
aguagaggaagcaaguccc

SEQ ID NO: 1335252 - RNA, 19 nt, Artificial Sequence
  Description of Artificial Sequence: Synthetic oligonucleotide
  Sense strand starting at position 2290 of SEQ ID NO: 1242273
ccuacagaggucgaccaau

SEQ ID NO: 1335253 - RNA, 19 nt, Artificial Sequence
  Description of Artificial Sequence: Synthetic oligonucleotide
  Antisense strand to SEQ ID NO: 1335252
auuggucgaccucuguagg

SEQ ID NO: 1335254 - RNA, 19 nt, Artificial Sequence
  Description of Artificial Sequence: Synthetic oligonucleotide
  Sense strand starting at position 2298 of SEQ ID NO: 1242273
ggucgaccaauuugcuuaa

SEQ ID NO: 1335255 - RNA, 19 nt, Artificial Sequence
  Description of Artificial Sequence: Synthetic oligonucleotide
  Antisense strand to SEQ ID NO: 1335254
uuaagcaaauuggucgacc

SEQ ID NO: 1335256 - RNA, 19 nt, Artificial Sequence
  Description of Artificial Sequence: Synthetic oligonucleotide
  Sense strand starting at position 2301 of SEQ ID NO: 1242273
cgaccaauuugcuuaaggu

SEQ ID NO: 1335257 - RNA, 19 nt, Artificial Sequence
  Description of Artificial Sequence: Synthetic oligonucleotide
  Antisense strand to SEQ ID NO: 1335256
accuuaagcaaauuggucg

SEQ ID NO: 1335258 - RNA, 19 nt, Artificial Sequence
  Description of Artificial Sequence: Synthetic oligonucleotide
  Sense strand starting at position 2347 of SEQ ID NO: 1242273
agacauuggacagguccua

SEQ ID NO: 1335259 - RNA, 19 nt, Artificial Sequence
  Description of Artificial Sequence: Synthetic oligonucleotide
  Antisense strand to SEQ ID NO: 1335258
uaggaccuguccaaugucu

SEQ ID NO: 1335260 - RNA, 19 nt, Artificial Sequence
  Description of Artificial Sequence: Synthetic oligonucleotide
  Sense strand starting at position 2382 of SEQ ID NO: 1242273
augugaugugguuauaauu

SEQ ID NO: 1335261 - RNA, 19 nt, Artificial Sequence
  Description of Artificial Sequence: Synthetic oligonucleotide
  Antisense strand to SEQ ID NO: 1335260
aauuauaaccacaucacau

SEQ ID NO: 1335262 - RNA, 19 nt, Artificial Sequence
  Description of Artificial Sequence: Synthetic oligonucleotide
  Sense strand starting at position 2404 of SEQ ID NO: 1242273
ugaguuguuaaugaaguaa

SEQ ID NO: 1335263 - RNA, 19 nt, Artificial Sequence
  Description of Artificial Sequence: Synthetic oligonucleotide
  Antisense strand to SEQ ID NO: 1335262
uuacuucauuaacaacuca

SEQ ID NO: 1335264 - RNA, 19 nt, Artificial Sequence
  Description of Artificial Sequence: Synthetic oligonucleotide
  Sense strand starting at position 2502 of SEQ ID NO: 1242273
uaugaugaguguccagaga

SEQ ID NO: 1335265 - RNA, 19 nt, Artificial Sequence
  Description of Artificial Sequence: Synthetic oligonucleotide
  Antisense strand to SEQ ID NO: 1335264
ucucuggacacucaucaua

SEQ ID NO: 1335266 - RNA, 19 nt, Artificial Sequence
  Description of Artificial Sequence: Synthetic oligonucleotide
  Sense strand starting at position 2539 of SEQ ID NO: 1242273
gcuaauauagaacgcuuua

SEQ ID NO: 1335267 - RNA, 19 nt, Artificial Sequence
  Description of Artificial Sequence: Synthetic oligonucleotide
  Antisense strand to SEQ ID NO: 1335266
uaaagcguucuauauuagc

SEQ ID NO: 1335268 - RNA, 19 nt, Artificial Sequence
  Description of Artificial Sequence: Synthetic oligonucleotide
  Sense strand starting at position 2544 of SEQ ID NO: 1242273
uauagaacgcuuuaugagu

SEQ ID NO: 1335269 - RNA, 19 nt, Artificial Sequence
  Description of Artificial Sequence: Synthetic oligonucleotide
  Antisense strand to SEQ ID NO: 1335268
acucauaaagcguucuaua

SEQ ID NO: 1335270 - RNA, 19 nt, Artificial Sequence
  Description of Artificial Sequence: Synthetic oligonucleotide
  Sense strand starting at position 2565 of SEQ ID NO: 1242273
ccacgagaauaagucaaau

SEQ ID NO: 1335271 - RNA, 19 nt, Artificial Sequence
  Description of Artificial Sequence: Synthetic oligonucleotide
  Antisense strand to SEQ ID NO: 1335270
auuugacuuauucucgugg

SEQ ID NO: 1335272 - RNA, 19 nt, Artificial Sequence
  Description of Artificial Sequence: Synthetic oligonucleotide
  Sense strand starting at position 2584 of SEQ ID NO: 1242273
guaaaugagccucaagucu

SEQ ID NO: 1335273 - RNA, 19 nt, Artificial Sequence
  Description of Artificial Sequence: Synthetic oligonucleotide
  Antisense strand to SEQ ID NO: 1335272
agacuugaggcucauuuac

SEQ ID NO: 1335274 - RNA, 19 nt, Artificial Sequence
  Description of Artificial Sequence: Synthetic oligonucleotide
  Sense strand starting at position 2592 of SEQ ID NO: 1242273
gccucaagucuggaucaca

SEQ ID NO: 1335275 - RNA, 19 nt, Artificial Sequence
  Description of Artificial Sequence: Synthetic oligonucleotide
  Antisense strand to SEQ ID NO: 1335274
ugugauccagacuugaggc

SEQ ID NO: 1335276 - RNA, 19 nt, Artificial Sequence
  Description of Artificial Sequence: Synthetic oligonucleotide
  Sense strand starting at position 2680 of SEQ ID NO: 1242273
agagcucaauguuuaaauu

SEQ ID NO: 1335277 - RNA, 19 nt, Artificial Sequence
  Description of Artificial Sequence: Synthetic oligonucleotide
  Antisense strand to SEQ ID NO: 1335276
aauuuaaacauugagcucu

SEQ ID NO: 1335278 - RNA, 19 nt, Artificial Sequence
  Description of Artificial Sequence: Synthetic oligonucleotide
  Sense strand starting at position 3600 of SEQ ID NO: 1242273
ggagaauacuugcauuuag

SEQ ID NO: 1335279 - RNA, 19 nt, Artificial Sequence
  Description of Artificial Sequence: Synthetic oligonucleotide
  Antisense strand to SEQ ID NO: 1335278
cuaaaugcaaguauucucc

SEQ ID NO: 1335280 - RNA, 19 nt, Artificial Sequence
  Description of Artificial Sequence: Synthetic oligonucleotide
  Sense strand starting at position 3751 of SEQ ID NO: 1242273
aggauucucugguucgaca

SEQ ID NO: 1335281 - RNA, 19 nt, Artificial Sequence
  Description of Artificial Sequence: Synthetic oligonucleotide
  Antisense strand to SEQ ID NO: 1335280
ugucgaaccagagaauccu

SEQ ID NO: 1335282 - RNA, 19 nt, Artificial Sequence
  Description of Artificial Sequence: Synthetic oligonucleotide
  Sense strand starting at position 3753 of SEQ ID NO: 1242273
gauucucugguucgacaau

SEQ ID NO: 1335283 - RNA, 19 nt, Artificial Sequence
  Description of Artificial Sequence: Synthetic oligonucleotide
  Antisense strand to SEQ ID NO: 1335282
auugucgaaccagagaauc

SEQ ID NO: 1335284 - RNA, 19 nt, Artificial Sequence
  Description of Artificial Sequence: Synthetic oligonucleotide
  Sense strand starting at position 3864 of SEQ ID NO: 1242273
uagucaaucugggucugaa

SEQ ID NO: 1335285 - RNA, 19 nt, Artificial Sequence
  Description of Artificial Sequence: Synthetic oligonucleotide
  Antisense strand to SEQ ID NO: 1335284
uucagacccagauugacua

SEQ ID NO: 1335286 - RNA, 19 nt, Artificial Sequence
  Description of Artificial Sequence: Synthetic oligonucleotide
  Sense strand starting at position 3887 of SEQ ID NO: 1242273
ggguucggcacuuauugau

SEQ ID NO: 1335287 - RNA, 19 nt, Artificial Sequence
  Description of Artificial Sequence: Synthetic oligonucleotide
  Antisense strand to SEQ ID NO: 1335286
aucaauaagugccgaaccc

SEQ ID NO: 1335288 - RNA, 19 nt, Artificial Sequence
  Description of Artificial Sequence: Synthetic oligonucleotide
  Sense strand starting at position 3932 of SEQ ID NO: 1242273
cuuugugaaucugauuucu

SEQ ID NO: 1335289 - RNA, 19 nt, Artificial Sequence
  Description of Artificial Sequence: Synthetic oligonucleotide
  Antisense strand to SEQ ID NO: 1335288
agaaaucagauucacaaag

SEQ ID NO: 1335290 - RNA, 19 nt, Artificial Sequence
  Description of Artificial Sequence: Synthetic oligonucleotide
  Sense strand starting at position 3951 of SEQ ID NO: 1242273
ccucuuugagguggagaca

SEQ ID NO: 1335291 - RNA, 19 nt, Artificial Sequence
  Description of Artificial Sequence: Synthetic oligonucleotide
  Antisense strand to SEQ ID NO: 1335290
ugucuccaccucaaagagg

SEQ ID NO: 1335292 - RNA, 19 nt, Artificial Sequence
  Description of Artificial Sequence: Synthetic oligonucleotide
  Sense strand starting at position 94 of SEQ ID NO: 1242274
guacuauacuugccuauuu

SEQ ID NO: 1335293 - RNA, 19 nt, Artificial Sequence
  Description of Artificial Sequence: Synthetic oligonucleotide
  Antisense strand to SEQ ID NO: 1335292
aaauaggcaaguauaguac

SEQ ID NO: 1335294 - RNA, 19 nt, Artificial Sequence
  Description of Artificial Sequence: Synthetic oligonucleotide
  Sense strand starting at position 163 of SEQ ID NO: 1242274
ggacuacuguaccuuagua

SEQ ID NO: 1335295 - RNA, 19 nt, Artificial Sequence
  Description of Artificial Sequence: Synthetic oligonucleotide
  Antisense strand to SEQ ID NO: 1335294
uacuaagguacaguagucc

SEQ ID NO: 1335296 - RNA, 19 nt, Artificial Sequence
  Description of Artificial Sequence: Synthetic oligonucleotide
  Sense strand starting at position 173 of SEQ ID NO: 1242274
accuuaguaguagguugaa

SEQ ID NO: 1335297 - RNA, 19 nt, Artificial Sequence
  Description of Artificial Sequence: Synthetic oligonucleotide
  Antisense strand to SEQ ID NO: 1335296
uucaaccuacuacuaaggu

SEQ ID NO: 1335298 - RNA, 19 nt, Artificial Sequence
  Description of Artificial Sequence: Synthetic oligonucleotide
  Sense strand starting at position 260 of SEQ ID NO: 1242274
gggaauaaauaccaggaau

SEQ ID NO: 1335299 - RNA, 19 nt, Artificial Sequence
  Description of Artificial Sequence: Synthetic oligonucleotide
  Antisense strand to SEQ ID NO: 1335298
auuccugguauuuauuccc

SEQ ID NO: 1335300 - RNA, 19 nt, Artificial Sequence
  Description of Artificial Sequence: Synthetic oligonucleotide
  Sense strand starting at position 442 of SEQ ID NO: 1242274
gagagucccuaacucaagu

SEQ ID NO: 1335301 - RNA, 19 nt, Artificial Sequence
  Description of Artificial Sequence: Synthetic oligonucleotide
  Antisense strand to SEQ ID NO: 1335300
acuugaguuagggacucuc

SEQ ID NO: 1335302 - RNA, 19 nt, Artificial Sequence
  Description of Artificial Sequence: Synthetic oligonucleotide
  Sense strand starting at position 478 of SEQ ID NO: 1242274
aguguuaauccagaacuug

SEQ ID NO: 1335303 - RNA, 19 nt, Artificial Sequence
  Description of Artificial Sequence: Synthetic oligonucleotide
  Antisense strand to SEQ ID NO: 1335302
caaguucuggauuaacacu

SEQ ID NO: 1335304 - RNA, 19 nt, Artificial Sequence
  Description of Artificial Sequence: Synthetic oligonucleotide
  Sense strand starting at position 522 of SEQ ID NO: 1242274
gaggaauguuuagugacag

SEQ ID NO: 1335305 - RNA, 19 nt, Artificial Sequence
  Description of Artificial Sequence: Synthetic oligonucleotide
  Antisense strand to SEQ ID NO: 1335304
cugucacuaaacauuccuc

SEQ ID NO: 1335306 - RNA, 19 nt, Artificial Sequence
  Description of Artificial Sequence: Synthetic oligonucleotide
  Sense strand starting at position 851 of SEQ ID NO: 1242274
gugagucuugucuagagag

SEQ ID NO: 1335307 - RNA, 19 nt, Artificial Sequence
  Description of Artificial Sequence: Synthetic oligonucleotide
  Antisense strand to SEQ ID NO: 1335306
cucucuagacaagacucac

SEQ ID NO: 1335308 - RNA, 19 nt, Artificial Sequence
  Description of Artificial Sequence: Synthetic oligonucleotide
  Sense strand starting at position 1377 of SEQ ID NO: 1242274
uggguuguuguugauaauu

SEQ ID NO: 1335309 - RNA, 19 nt, Artificial Sequence
  Description of Artificial Sequence: Synthetic oligonucleotide
  Antisense strand to SEQ ID NO: 1335308
aauuaucaacaacaaccca

SEQ ID NO: 1335310 - RNA, 19 nt, Artificial Sequence
  Description of Artificial Sequence: Synthetic oligonucleotide
  Sense strand starting at position 1395 of SEQ ID NO: 1242274
uuuacuagguuggugagaa

SEQ ID NO: 1335311 - RNA, 19 nt, Artificial Sequence
  Description of Artificial Sequence: Synthetic oligonucleotide
  Antisense strand to SEQ ID NO: 1335310
uucucaccaaccuaguaaa

SEQ ID NO: 1335312 - RNA, 19 nt, Artificial Sequence
  Description of Artificial Sequence: Synthetic oligonucleotide
  Sense strand starting at position 1457 of SEQ ID NO: 1242274
auaauuagcaaguggaaga

SEQ ID NO: 1335313 - RNA, 19 nt, Artificial Sequence
  Description of Artificial Sequence: Synthetic oligonucleotide
  Antisense strand to SEQ ID NO: 1335312
ucuuccacuugcuaauuau

SEQ ID NO: 1335314 - RNA, 19 nt, Artificial Sequence
  Description of Artificial Sequence: Synthetic oligonucleotide
  Sense strand starting at position 1468 of SEQ ID NO: 1242274
guggaagaauuuggaauaa

SEQ ID NO: 1335315 - RNA, 19 nt, Artificial Sequence
  Description of Artificial Sequence: Synthetic oligonucleotide
  Antisense strand to SEQ ID NO: 1335314
uuauuccaaauucuuccac

SEQ ID NO: 1335316 - RNA, 19 nt, Artificial Sequence
  Description of Artificial Sequence: Synthetic oligonucleotide
  Sense strand starting at position 1707 of SEQ ID NO: 1242274
auccucagucaguaaggau

SEQ ID NO: 1335317 - RNA, 19 nt, Artificial Sequence
  Description of Artificial Sequence: Synthetic oligonucleotide
  Antisense strand to SEQ ID NO: 1335316
auccuuacugacugaggau

SEQ ID NO: 1335318 - RNA, 19 nt, Artificial Sequence
  Description of Artificial Sequence: Synthetic oligonucleotide
  Sense strand starting at position 1759 of SEQ ID NO: 1242274
ccagcaagaugguuagaga

SEQ ID NO: 1335319 - RNA, 19 nt, Artificial Sequence
  Description of Artificial Sequence: Synthetic oligonucleotide
  Antisense strand to SEQ ID NO: 1335318
ucucuaaccaucuugcugg

SEQ ID NO: 1335320 - RNA, 19 nt, Artificial Sequence
  Description of Artificial Sequence: Synthetic oligonucleotide
  Sense strand starting at position 1770 of SEQ ID NO: 1242274
guuagagaauucuuggcca

SEQ ID NO: 1335321 - RNA, 19 nt, Artificial Sequence
  Description of Artificial Sequence: Synthetic oligonucleotide
  Antisense strand to SEQ ID NO: 1335320
uggccaagaauucucuaac

SEQ ID NO: 1335322 - RNA, 19 nt, Artificial Sequence
  Description of Artificial Sequence: Synthetic oligonucleotide
  Sense strand starting at position 1772 of SEQ ID NO: 1242274
uagagaauucuuggccaug

SEQ ID NO: 1335323 - RNA, 19 nt, Artificial Sequence
  Description of Artificial Sequence: Synthetic oligonucleotide
  Antisense strand to SEQ ID NO: 1335322
cauggccaagaauucucua

SEQ ID NO: 1335324 - RNA, 19 nt, Artificial Sequence
  Description of Artificial Sequence: Synthetic oligonucleotide
  Sense strand starting at position 1774 of SEQ ID NO: 1242274
gagaauucuuggccauggu

SEQ ID NO: 1335325 - RNA, 19 nt, Artificial Sequence
  Description of Artificial Sequence: Synthetic oligonucleotide
  Antisense strand to SEQ ID NO: 1335324
accauggccaagaauucuc

SEQ ID NO: 1335326 - RNA, 19 nt, Artificial Sequence
  Description of Artificial Sequence: Synthetic oligonucleotide
  Sense strand starting at position 1784 of SEQ ID NO: 1242274
ggccauggucuugaggaga

SEQ ID NO: 1335327 - RNA, 19 nt, Artificial Sequence
  Description of Artificial Sequence: Synthetic oligonucleotide
  Antisense strand to SEQ ID NO: 1335326
ucuccucaagaccauggcc

SEQ ID NO: 1335328 - RNA, 19 nt, Artificial Sequence
  Description of Artificial Sequence: Synthetic oligonucleotide
  Sense strand starting at position 2121 of SEQ ID NO: 1242274
auggaaauaugagaacaua

SEQ ID NO: 1335329 - RNA, 19 nt, Artificial Sequence
  Description of Artificial Sequence: Synthetic oligonucleotide
  Antisense strand to SEQ ID NO: 1335328
uauguucucauauuuccau

SEQ ID NO: 1335330 - RNA, 19 nt, Artificial Sequence
  Description of Artificial Sequence: Synthetic oligonucleotide
  Sense strand starting at position 2216 of SEQ ID NO: 1242274
guuuauugggauugauauu

SEQ ID NO: 1335331 - RNA, 19 nt, Artificial Sequence
  Description of Artificial Sequence: Synthetic oligonucleotide
  Antisense strand to SEQ ID NO: 1335330
aauaucaaucccaauaaac

SEQ ID NO: 1335332 - RNA, 19 nt, Artificial Sequence
  Description of Artificial Sequence: Synthetic oligonucleotide
  Sense strand starting at position 2342 of SEQ ID NO: 1242274
uaggaaaguccuggguaga

SEQ ID NO: 1335333 - RNA, 19 nt, Artificial Sequence
  Description of Artificial Sequence: Synthetic oligonucleotide
  Antisense strand to SEQ ID NO: 1335332
ucuacccaggacuuuccua

SEQ ID NO: 1335334 - RNA, 19 nt, Artificial Sequence
  Description of Artificial Sequence: Synthetic oligonucleotide
  Sense strand starting at position 2343 of SEQ ID NO: 1242274
aggaaaguccuggguagau

SEQ ID NO: 1335335 - RNA, 19 nt, Artificial Sequence
  Description of Artificial Sequence: Synthetic oligonucleotide
  Antisense strand to SEQ ID NO: 1335334
aucuacccaggacuuuccu

SEQ ID NO: 1335336 - RNA, 19 nt, Artificial Sequence
  Description of Artificial Sequence: Synthetic oligonucleotide
  Sense strand starting at position 2585 of SEQ ID NO: 1242274
auggcaaacugguccagaa

SEQ ID NO: 1335337 - RNA, 19 nt, Artificial Sequence
  Description of Artificial Sequence: Synthetic oligonucleotide
  Antisense strand to SEQ ID NO: 1335336
uucuggaccaguuugccau

SEQ ID NO: 1335338 - RNA, 19 nt, Artificial Sequence
  Description of Artificial Sequence: Synthetic oligonucleotide
  Sense strand starting at position 2745 of SEQ ID NO: 1242274
cccacaugacuuuguagaa

SEQ ID NO: 1335339 - RNA, 19 nt, Artificial Sequence
  Description of Artificial Sequence: Synthetic oligonucleotide
  Antisense strand to SEQ ID NO: 1335338
uucuacaaagucauguggg

SEQ ID NO: 1335340 - RNA, 19 nt, Artificial Sequence
  Description of Artificial Sequence: Synthetic oligonucleotide
  Sense strand starting at position 2746 of SEQ ID NO: 1242274
ccacaugacuuuguagaac

SEQ ID NO: 1335341 - RNA, 19 nt, Artificial Sequence
  Description of Artificial Sequence: Synthetic oligonucleotide
  Antisense strand to SEQ ID NO: 1335340
guucuacaaagucaugugg

SEQ ID NO: 1335342 - RNA, 19 nt, Artificial Sequence
  Description of Artificial Sequence: Synthetic oligonucleotide
  Sense strand starting at position 2825 of SEQ ID NO: 1242274
ucuugucauggugauaaga

SEQ ID NO: 1335343 - RNA, 19 nt, Artificial Sequence
  Description of Artificial Sequence: Synthetic oligonucleotide
  Antisense strand to SEQ ID NO: 1335342
ucuuaucaccaugacaaga

SEQ ID NO: 1335344 - RNA, 19 nt, Artificial Sequence
  Description of Artificial Sequence: Synthetic oligonucleotide
  Sense strand starting at position 2835 of SEQ ID NO: 1242274
gugauaagaccaugauucu

SEQ ID NO: 1335345 - RNA, 19 nt, Artificial Sequence
  Description of Artificial Sequence: Synthetic oligonucleotide
  Antisense strand to SEQ ID NO: 1335344
agaaucauggucuuaucac

SEQ ID NO: 1335346 - RNA, 19 nt, Artificial Sequence
  Description of Artificial Sequence: Synthetic oligonucleotide
  Sense strand starting at position 3362 of SEQ ID NO: 1242274
uucaguguuccagagguga

SEQ ID NO: 1335347 - RNA, 19 nt, Artificial Sequence
  Description of Artificial Sequence: Synthetic oligonucleotide
  Antisense strand to SEQ ID NO: 1335346
ucaccucuggaacacugaa

SEQ ID NO: 1335348 - RNA, 19 nt, Artificial Sequence
  Description of Artificial Sequence: Synthetic oligonucleotide
  Sense strand starting at position 3373 of SEQ ID NO: 1242274
agaggugauucauuagguu

SEQ ID NO: 1335349 - RNA, 19 nt, Artificial Sequence
  Description of Artificial Sequence: Synthetic oligonucleotide
  Antisense strand to SEQ ID NO: 1335348
aaccuaaugaaucaccucu

SEQ ID NO: 1335350 - RNA, 19 nt, Artificial Sequence
  Description of Artificial Sequence: Synthetic oligonucleotide
  Sense strand starting at position 3386 of SEQ ID NO: 1242274
uagguuguuguagagacua

SEQ ID NO: 1335351 - RNA, 19 nt, Artificial Sequence
  Description of Artificial Sequence: Synthetic oligonucleotide
  Antisense strand to SEQ ID NO: 1335350
uagucucuacaacaaccua

SEQ ID NO: 1335352 - RNA, 19 nt, Artificial Sequence
  Description of Artificial Sequence: Synthetic oligonucleotide
  Sense strand starting at position 3388 of SEQ ID NO: 1242274
gguuguuguagagacuaga

SEQ ID NO: 1335353 - RNA, 19 nt, Artificial Sequence
  Description of Artificial Sequence: Synthetic oligonucleotide
  Antisense strand to SEQ ID NO: 1335352
ucuagucucuacaacaacc

SEQ ID NO: 1335354 - RNA, 19 nt, Artificial Sequence
  Description of Artificial Sequence: Synthetic oligonucleotide
  Sense strand starting at position 3391 of SEQ ID NO: 1242274
uguuguagagacuagaucu

SEQ ID NO: 1335355 - RNA, 19 nt, Artificial Sequence
  Description of Artificial Sequence: Synthetic oligonucleotide
  Antisense strand to SEQ ID NO: 1335354
agaucuagucucuacaaca

SEQ ID NO: 1335356 - RNA, 19 nt, Artificial Sequence
  Description of Artificial Sequence: Synthetic oligonucleotide
  Sense strand starting at position 3412 of SEQ ID NO: 1242274
aggagaaacuuguugcaug

SEQ ID NO: 1335357 - RNA, 19 nt, Artificial Sequence
  Description of Artificial Sequence: Synthetic oligonucleotide
  Antisense strand to SEQ ID NO: 1335356
caugcaacaaguuucuccu

SEQ ID NO: 1335358 - RNA, 19 nt, Artificial Sequence
  Description of Artificial Sequence: Synthetic oligonucleotide
  Sense strand starting at position 3417 of SEQ ID NO: 1242274
aaacuuguugcaugaagau

SEQ ID NO: 1335359 - RNA, 19 nt, Artificial Sequence
  Description of Artificial Sequence: Synthetic oligonucleotide
  Antisense strand to SEQ ID NO: 1335358
aucuucaugcaacaaguuu

SEQ ID NO: 1335360 - RNA, 19 nt, Artificial Sequence
  Description of Artificial Sequence: Synthetic oligonucleotide
  Sense strand starting at position 3525 of SEQ ID NO: 1242274
uuuggaguuucacuuggga

SEQ ID NO: 1335361 - RNA, 19 nt, Artificial Sequence
  Description of Artificial Sequence: Synthetic oligonucleotide
  Antisense strand to SEQ ID NO: 1335360
ucccaagugaaacuccaaa

SEQ ID NO: 1335362 - RNA, 19 nt, Artificial Sequence
  Description of Artificial Sequence: Synthetic oligonucleotide
  Sense strand starting at position 3582 of SEQ ID NO: 1242274
agucucauaugucuacuga

SEQ ID NO: 1335363 - RNA, 19 nt, Artificial Sequence
  Description of Artificial Sequence: Synthetic oligonucleotide
  Antisense strand to SEQ ID NO: 1335362
ucaguagacauaugagacu

SEQ ID NO: 1335364 - RNA, 19 nt, Artificial Sequence
  Description of Artificial Sequence: Synthetic oligonucleotide
  Sense strand starting at position 3583 of SEQ ID NO: 1242274
gucucauaugucuacugau

SEQ ID NO: 1335365 - RNA, 19 nt, Artificial Sequence
  Description of Artificial Sequence: Synthetic oligonucleotide
  Antisense strand to SEQ ID NO: 1335364
aucaguagacauaugagac

SEQ ID NO: 1335366 - RNA, 19 nt, Artificial Sequence
  Description of Artificial Sequence: Synthetic oligonucleotide
  Sense strand starting at position 3682 of SEQ ID NO: 1242274
gugaauaaagcagaugcuu

SEQ ID NO: 1335367 - RNA, 19 nt, Artificial Sequence
  Description of Artificial Sequence: Synthetic oligonucleotide
  Antisense strand to SEQ ID NO: 1335366
aagcaucugcuuuauucac

SEQ ID NO: 1335368 - RNA, 19 nt, Artificial Sequence
  Description of Artificial Sequence: Synthetic oligonucleotide
  Sense strand starting at position 3751 of SEQ ID NO: 1242274
caggauuguugggucagau

SEQ ID NO: 1335369 - RNA, 19 nt, Artificial Sequence
  Description of Artificial Sequence: Synthetic oligonucleotide
  Antisense strand to SEQ ID NO: 1335368
aucugacccaacaauccug

SEQ ID NO: 1335370 - RNA, 19 nt, Artificial Sequence
  Description of Artificial Sequence: Synthetic oligonucleotide
  Sense strand starting at position 3777 of SEQ ID NO: 1242274
agacauuagaguggcucau

SEQ ID NO: 1335371 - RNA, 19 nt, Artificial Sequence
  Description of Artificial Sequence: Synthetic oligonucleotide
  Antisense strand to SEQ ID NO: 1335370
augagccacucuaaugucu

SEQ ID NO: 1335372 - RNA, 19 nt, Artificial Sequence
  Description of Artificial Sequence: Synthetic oligonucleotide
  Sense strand starting at position 51 of SEQ ID NO: 1242275
ccuucauucgaauggugga

SEQ ID NO: 1335373 - RNA, 19 nt, Artificial Sequence
  Description of Artificial Sequence: Synthetic oligonucleotide
  Antisense strand to SEQ ID NO: 1335372
uccaccauucgaaugaagg

SEQ ID NO: 1335374 - RNA, 19 nt, Artificial Sequence
  Description of Artificial Sequence: Synthetic oligonucleotide
  Sense strand starting at position 170 of SEQ ID NO: 1242275
uggcuucugccacggauaa

SEQ ID NO: 1335375 - RNA, 19 nt, Artificial Sequence
  Description of Artificial Sequence: Synthetic oligonucleotide
  Antisense strand to SEQ ID NO: 1335374
uuauccguggcagaagcca

SEQ ID NO: 1335376 - RNA, 19 nt, Artificial Sequence
  Description of Artificial Sequence: Synthetic oligonucleotide
  Sense strand starting at position 180 of SEQ ID NO: 1242275
cacggauaacgaugaaacu

SEQ ID NO: 1335377 - RNA, 19 nt, Artificial Sequence
  Description of Artificial Sequence: Synthetic oligonucleotide
  Antisense strand to SEQ ID NO: 1335376
aguuucaucguuauccgug

SEQ ID NO: 1335378 - RNA, 19 nt, Artificial Sequence
  Description of Artificial Sequence: Synthetic oligonucleotide
  Sense strand starting at position 215 of SEQ ID NO: 1242275
ggcacuaagguuuagaguu

SEQ ID NO: 1335379 - RNA, 19 nt, Artificial Sequence
  Description of Artificial Sequence: Synthetic oligonucleotide
  Antisense strand to SEQ ID NO: 1335378
aacucuaaaccuuagugcc

SEQ ID NO: 1335380 - RNA, 19 nt, Artificial Sequence
  Description of Artificial Sequence: Synthetic oligonucleotide
  Sense strand starting at position 221 of SEQ ID NO: 1242275
aagguuuagaguuaugagu

SEQ ID NO: 1335381 - RNA, 19 nt, Artificial Sequence
  Description of Artificial Sequence: Synthetic oligonucleotide
  Antisense strand to SEQ ID NO: 1335380
acucauaacucuaaaccuu

SEQ ID NO: 1335382 - RNA, 19 nt, Artificial Sequence
  Description of Artificial Sequence: Synthetic oligonucleotide
  Sense strand starting at position 272 of SEQ ID NO: 1242275
gaguguguaguuuguagau

SEQ ID NO: 1335383 - RNA, 19 nt, Artificial Sequence
  Description of Artificial Sequence: Synthetic oligonucleotide
  Antisense strand to SEQ ID NO: 1335382
aucuacaaacuacacacuc

SEQ ID NO: 1335384 - RNA, 19 nt, Artificial Sequence
  Description of Artificial Sequence: Synthetic oligonucleotide
  Sense strand starting at position 281 of SEQ ID NO: 1242275
guuuguagauuuguuaacu

SEQ ID NO: 1335385 - RNA, 19 nt, Artificial Sequence
  Description of Artificial Sequence: Synthetic oligonucleotide
  Antisense strand to SEQ ID NO: 1335384
aguuaacaaaucuacaaac

SEQ ID NO: 1335386 - RNA, 19 nt, Artificial Sequence
  Description of Artificial Sequence: Synthetic oligonucleotide
  Sense strand starting at position 389 of SEQ ID NO: 1242275
ccgguagcugguugagaga

SEQ ID NO: 1335387 - RNA, 19 nt, Artificial Sequence
  Description of Artificial Sequence: Synthetic oligonucleotide
  Antisense strand to SEQ ID NO: 1335386
ucucucaaccagcuaccgg

SEQ ID NO: 1335388 - RNA, 19 nt, Artificial Sequence
  Description of Artificial Sequence: Synthetic oligonucleotide
  Sense strand starting at position 426 of SEQ ID NO: 1242275
ggagguccuuugaggguaa

SEQ ID NO: 1335389 - RNA, 19 nt, Artificial Sequence
  Description of Artificial Sequence: Synthetic oligonucleotide
  Antisense strand to SEQ ID NO: 1335388
uuacccucaaaggaccucc

SEQ ID NO: 1335390 - RNA, 19 nt, Artificial Sequence
  Description of Artificial Sequence: Synthetic oligonucleotide
  Sense strand starting at position 438 of SEQ ID NO: 1242275
aggguaaugccgccuuugu

SEQ ID NO: 1335391 - RNA, 19 nt, Artificial Sequence
  Description of Artificial Sequence: Synthetic oligonucleotide
  Antisense strand to SEQ ID NO: 1335390
acaaaggcggcauuacccu

SEQ ID NO: 1335392 - RNA, 19 nt, Artificial Sequence
  Description of Artificial Sequence: Synthetic oligonucleotide
  Sense strand starting at position 471 of SEQ ID NO: 1242275
cugcuugcucacugacaga

SEQ ID NO: 1335393 - RNA, 19 nt, Artificial Sequence
  Description of Artificial Sequence: Synthetic oligonucleotide
  Antisense strand to SEQ ID NO: 1335392
ucugucagugagcaagcag

SEQ ID NO: 1335394 - RNA, 19 nt, Artificial Sequence
  Description of Artificial Sequence: Synthetic oligonucleotide
  Sense strand starting at position 2265 of SEQ ID NO: 1242275
gagcguguacccgagaaac

SEQ ID NO: 1335395 - RNA, 19 nt, Artificial Sequence
  Description of Artificial Sequence: Synthetic oligonucleotide
  Antisense strand to SEQ ID NO: 1335394
guuucucggguacacgcuc

SEQ ID NO: 1335396 - RNA, 19 nt, Artificial Sequence
  Description of Artificial Sequence: Synthetic oligonucleotide
  Sense strand starting at position 2267 of SEQ ID NO: 1242275
gcguguacccgagaaacca

SEQ ID NO: 1335397 - RNA, 19 nt, Artificial Sequence
  Description of Artificial Sequence: Synthetic oligonucleotide
  Antisense strand to SEQ ID NO: 1335396
ugguuucucggguacacgc

SEQ ID NO: 1335398 - RNA, 19 nt, Artificial Sequence
  Description of Artificial Sequence: Synthetic oligonucleotide
  Sense strand starting at position 2476 of SEQ ID NO: 1242275
cugcgaucuugggcaaaug

SEQ ID NO: 1335399 - RNA, 19 nt, Artificial Sequence
  Description of Artificial Sequence: Synthetic oligonucleotide
  Antisense strand to SEQ ID NO: 1335398
cauuugcccaagaucgcag

SEQ ID NO: 1335400 - RNA, 19 nt, Artificial Sequence
  Description of Artificial Sequence: Synthetic oligonucleotide
  Sense strand starting at position 2477 of SEQ ID NO: 1242275
ugcgaucuugggcaaauga

SEQ ID NO: 1335401 - RNA, 19 nt, Artificial Sequence
  Description of Artificial Sequence: Synthetic oligonucleotide
  Antisense strand to SEQ ID NO: 1335400
ucauuugcccaagaucgca

SEQ ID NO: 1335402 - RNA, 19 nt, Artificial Sequence
  Description of Artificial Sequence: Synthetic oligonucleotide
  Sense strand starting at position 2559 of SEQ ID NO: 1242275
cgggcugauuugaggauga

SEQ ID NO: 1335403 - RNA, 19 nt, Artificial Sequence
  Description of Artificial Sequence: Synthetic oligonucleotide
  Antisense strand to SEQ ID NO: 1335402
ucauccucaaaucagcccg

SEQ ID NO: 1335404 - RNA, 19 nt, Artificial Sequence
  Description of Artificial Sequence: Synthetic oligonucleotide
  Sense strand starting at position 2594 of SEQ ID NO: 1242275
acaauaagcuguccguaaa

SEQ ID NO: 1335405 - RNA, 19 nt, Artificial Sequence
  Description of Artificial Sequence: Synthetic oligonucleotide
  Antisense strand to SEQ ID NO: 1335404
uuuacggacagcuuauugu

SEQ ID NO: 1335406 - RNA, 19 nt, Artificial Sequence
  Description of Artificial Sequence: Synthetic oligonucleotide
  Sense strand starting at position 2595 of SEQ ID NO: 1242275
caauaagcuguccguaaac

SEQ ID NO: 1335407 - RNA, 19 nt, Artificial Sequence
  Description of Artificial Sequence: Synthetic oligonucleotide
  Antisense strand to SEQ ID NO: 1335406
guuuacggacagcuuauug

SEQ ID NO: 1335408 - RNA, 19 nt, Artificial Sequence
  Description of Artificial Sequence: Synthetic oligonucleotide
  Sense strand starting at position 2597 of SEQ ID NO: 1242275
auaagcuguccguaaacgu

SEQ ID NO: 1335409 - RNA, 19 nt, Artificial Sequence
  Description of Artificial Sequence: Synthetic oligonucleotide
  Antisense strand to SEQ ID NO: 1335408
acguuuacggacagcuuau

SEQ ID NO: 1335410 - RNA, 19 nt, Artificial Sequence
  Description of Artificial Sequence: Synthetic oligonucleotide
  Sense strand starting at position 2644 of SEQ ID NO: 1242275
gugguagguguucacuaga

SEQ ID NO: 1335411 - RNA, 19 nt, Artificial Sequence
  Description of Artificial Sequence: Synthetic oligonucleotide
  Antisense strand to SEQ ID NO: 1335410
ucuagugaacaccuaccac

SEQ ID NO: 1335412 - RNA, 19 nt, Artificial Sequence
  Description of Artificial Sequence: Synthetic oligonucleotide
  Sense strand starting at position 2647 of SEQ ID NO: 1242275
guagguguucacuagacga

SEQ ID NO: 1335413 - RNA, 19 nt, Artificial Sequence
  Description of Artificial Sequence: Synthetic oligonucleotide
  Antisense strand to SEQ ID NO: 1335412
ucgucuagugaacaccuac

SEQ ID NO: 1335414 - RNA, 19 nt, Artificial Sequence
  Description of Artificial Sequence: Synthetic oligonucleotide
  Sense strand starting at position 2649 of SEQ ID NO: 1242275
agguguucacuagacgaug

SEQ ID NO: 1335415 - RNA, 19 nt, Artificial Sequence
  Description of Artificial Sequence: Synthetic oligonucleotide
  Antisense strand to SEQ ID NO: 1335414
caucgucuagugaacaccu

SEQ ID NO: 1335416 - RNA, 19 nt, Artificial Sequence
  Description of Artificial Sequence: Synthetic oligonucleotide
  Sense strand starting at position 2704 of SEQ ID NO: 1242275
aguagaaagucagcugaau

SEQ ID NO: 1335417 - RNA, 19 nt, Artificial Sequence
  Description of Artificial Sequence: Synthetic oligonucleotide
  Antisense strand to SEQ ID NO: 1335416
auucagcugacuuucuacu

SEQ ID NO: 1335418 - RNA, 19 nt, Artificial Sequence
  Description of Artificial Sequence: Synthetic oligonucleotide
  Sense strand starting at position 2750 of SEQ ID NO: 1242275
ccugguauccaguggauaa

SEQ ID NO: 1335419 - RNA, 19 nt, Artificial Sequence
  Description of Artificial Sequence: Synthetic oligonucleotide
  Antisense strand to SEQ ID NO: 1335418
uuauccacuggauaccagg

SEQ ID NO: 1335420 - RNA, 19 nt, Artificial Sequence
  Description of Artificial Sequence: Synthetic oligonucleotide
  Sense strand starting at position 2751 of SEQ ID NO: 1242275
cugguauccaguggauaau

SEQ ID NO: 1335421 - RNA, 19 nt, Artificial Sequence
  Description of Artificial Sequence: Synthetic oligonucleotide
  Antisense strand to SEQ ID NO: 1335420
auuauccacuggauaccag

SEQ ID NO: 1335422 - RNA, 19 nt, Artificial Sequence
  Description of Artificial Sequence: Synthetic oligonucleotide
  Sense strand starting at position 3107 of SEQ ID NO: 1242275
gaugguuuccgagguccuu

SEQ ID NO: 1335423 - RNA, 19 nt, Artificial Sequence
  Description of Artificial Sequence: Synthetic oligonucleotide
  Antisense strand to SEQ ID NO: 1335422
aaggaccucggaaaccauc

SEQ ID NO: 1335424 - RNA, 19 nt, Artificial Sequence
  Description of Artificial Sequence: Synthetic oligonucleotide
  Sense strand starting at position 3329 of SEQ ID NO: 1242275
uuugcuacacuagauguaa

SEQ ID NO: 1335425 - RNA, 19 nt, Artificial Sequence
  Description of Artificial Sequence: Synthetic oligonucleotide
  Antisense strand to SEQ ID NO: 1335424
uuacaucuaguguagcaaa

SEQ ID NO: 1335426 - RNA, 19 nt, Artificial Sequence
  Description of Artificial Sequence: Synthetic oligonucleotide
  Sense strand starting at position 3489 of SEQ ID NO: 1242275
acaugaggcccucaugcaa

SEQ ID NO: 1335427 - RNA, 19 nt, Artificial Sequence
  Description of Artificial Sequence: Synthetic oligonucleotide
  Antisense strand to SEQ ID NO: 1335426
uugcaugagggccucaugu

SEQ ID NO: 1335428 - RNA, 19 nt, Artificial Sequence
  Description of Artificial Sequence: Synthetic oligonucleotide
  Sense strand starting at position 3522 of SEQ ID NO: 1242275
aggagaaccggccauacuu

SEQ ID NO: 1335429 - RNA, 19 nt, Artificial Sequence
  Description of Artificial Sequence: Synthetic oligonucleotide
  Antisense strand to SEQ ID NO: 1335428
aaguauggccgguucuccu

SEQ ID NO: 1335430 - RNA, 19 nt, Artificial Sequence
  Description of Artificial Sequence: Synthetic oligonucleotide
  Sense strand starting at position 3530 of SEQ ID NO: 1242275
cggccauacuuguuggaca

SEQ ID NO: 1335431 - RNA, 19 nt, Artificial Sequence
  Description of Artificial Sequence: Synthetic oligonucleotide
  Antisense strand to SEQ ID NO: 1335430
uguccaacaaguauggccg

SEQ ID NO: 1335432 - RNA, 19 nt, Artificial Sequence
  Description of Artificial Sequence: Synthetic oligonucleotide
  Sense strand starting at position 3532 of SEQ ID NO: 1242275
gccauacuuguuggacaga

SEQ ID NO: 1335433 - RNA, 19 nt, Artificial Sequence
  Description of Artificial Sequence: Synthetic oligonucleotide
  Antisense strand to SEQ ID NO: 1335432
ucuguccaacaaguauggc

SEQ ID NO: 1335434 - RNA, 19 nt, Artificial Sequence
  Description of Artificial Sequence: Synthetic oligonucleotide
  Sense strand starting at position 3625 of SEQ ID NO: 1242275
gggacauuggccugaguca

SEQ ID NO: 1335435 - RNA, 19 nt, Artificial Sequence
  Description of Artificial Sequence: Synthetic oligonucleotide
  Antisense strand to SEQ ID NO: 1335434
ugacucaggccaauguccc

SEQ ID NO: 1335436 - RNA, 19 nt, Artificial Sequence
  Description of Artificial Sequence: Synthetic oligonucleotide
  Sense strand starting at position 3626 of SEQ ID NO: 1242275
ggacauuggccugagucaa

SEQ ID NO: 1335437 - RNA, 19 nt, Artificial Sequence
  Description of Artificial Sequence: Synthetic oligonucleotide
  Antisense strand to SEQ ID NO: 1335436
uugacucaggccaaugucc

SEQ ID NO: 1335438 - RNA, 19 nt, Artificial Sequence
  Description of Artificial Sequence: Synthetic oligonucleotide
  Sense strand starting at position 3660 of SEQ ID NO: 1242275
ggcauugcauugucaccua

SEQ ID NO: 1335439 - RNA, 19 nt, Artificial Sequence
  Description of Artificial Sequence: Synthetic oligonucleotide
  Antisense strand to SEQ ID NO: 1335438
uaggugacaaugcaaugcc

SEQ ID NO: 1335440 - RNA, 19 nt, Artificial Sequence
  Description of Artificial Sequence: Synthetic oligonucleotide
  Sense strand starting at position 3663 of SEQ ID NO: 1242275
auugcauugucaccuagca

SEQ ID NO: 1335441 - RNA, 19 nt, Artificial Sequence
  Description of Artificial Sequence: Synthetic oligonucleotide
  Antisense strand to SEQ ID NO: 1335440
ugcuaggugacaaugcaau

SEQ ID NO: 1335442 - RNA, 19 nt, Artificial Sequence
  Description of Artificial Sequence: Synthetic oligonucleotide
  Sense strand starting at position 3683 of SEQ ID NO: 1242275
caguaugucugggcagcau

SEQ ID NO: 1335443 - RNA, 19 nt, Artificial Sequence
  Description of Artificial Sequence: Synthetic oligonucleotide
  Antisense strand to SEQ ID NO: 1335442
augcugcccagacauacug

SEQ ID NO: 1335444 - RNA, 19 nt, Artificial Sequence
  Description of Artificial Sequence: Synthetic oligonucleotide
  Sense strand starting at position 3882 of SEQ ID NO: 1242275
ggcagagauaaggguguuu

SEQ ID NO: 1335445 - RNA, 19 nt, Artificial Sequence
  Description of Artificial Sequence: Synthetic oligonucleotide
  Antisense strand to SEQ ID NO: 1335444
aaacacccuuaucucugcc

SEQ ID NO: 1335446 - RNA, 19 nt, Artificial Sequence
  Description of Artificial Sequence: Synthetic oligonucleotide
  Sense strand starting at position 3887 of SEQ ID NO: 1242275
agauaaggguguuuccaua

SEQ ID NO: 1335447 - RNA, 19 nt, Artificial Sequence
  Description of Artificial Sequence: Synthetic oligonucleotide
  Antisense strand to SEQ ID NO: 1335446
uauggaaacacccuuaucu

SEQ ID NO: 1335448 - RNA, 19 nt, Artificial Sequence
  Description of Artificial Sequence: Synthetic oligonucleotide
  Sense strand starting at position 3922 of SEQ ID NO: 1242275
agggauucagccugcugua

SEQ ID NO: 1335449 - RNA, 19 nt, Artificial Sequence
  Description of Artificial Sequence: Synthetic oligonucleotide
  Antisense strand to SEQ ID NO: 1335448
uacagcaggcugaaucccu

SEQ ID NO: 1335450 - RNA, 19 nt, Artificial Sequence
  Description of Artificial Sequence: Synthetic oligonucleotide
  Sense strand starting at position 3974 of SEQ ID NO: 1242275
uuuggagagaucugaaugu

SEQ ID NO: 1335451 - RNA, 19 nt, Artificial Sequence
  Description of Artificial Sequence: Synthetic oligonucleotide
  Antisense strand to SEQ ID NO: 1335450
acauucagaucucuccaaa

SEQ ID NO: 1335452 - RNA, 19 nt, Artificial Sequence
  Description of Artificial Sequence: Synthetic oligonucleotide
  Sense strand starting at position 54 of SEQ ID NO: 1242276
cguugugugacuguuggca

SEQ ID NO: 1335453 - RNA, 19 nt, Artificial Sequence
  Description of Artificial Sequence: Synthetic oligonucleotide
  Antisense strand to SEQ ID NO: 1335452
ugccaacagucacacaacg

SEQ ID NO: 1335454 - RNA, 19 nt, Artificial Sequence
  Description of Artificial Sequence: Synthetic oligonucleotide
  Sense strand starting at position 126 of SEQ ID NO: 1242276
acuucucaaggcuguuaua

SEQ ID NO: 1335455 - RNA, 19 nt, Artificial Sequence
  Description of Artificial Sequence: Synthetic oligonucleotide
  Antisense strand to SEQ ID NO: 1335454
uauaacagccuugagaagu

SEQ ID NO: 1335456 - RNA, 19 nt, Artificial Sequence
  Description of Artificial Sequence: Synthetic oligonucleotide
  Sense strand starting at position 164 of SEQ ID NO: 1242276
auguaaugaccuuagcaca

SEQ ID NO: 1335457 - RNA, 19 nt, Artificial Sequence
  Description of Artificial Sequence: Synthetic oligonucleotide
  Antisense strand to SEQ ID NO: 1335456
ugugcuaaggucauuacau

SEQ ID NO: 1335458 - RNA, 19 nt, Artificial Sequence
  Description of Artificial Sequence: Synthetic oligonucleotide
  Sense strand starting at position 305 of SEQ ID NO: 1242276
uauaguaaaugcuccgaaa

SEQ ID NO: 1335459 - RNA, 19 nt, Artificial Sequence
  Description of Artificial Sequence: Synthetic oligonucleotide
  Antisense strand to SEQ ID NO: 1335458
uuucggagcauuuacuaua

SEQ ID NO: 1335460 - RNA, 19 nt, Artificial Sequence
  Description of Artificial Sequence: Synthetic oligonucleotide
  Sense strand starting at position 307 of SEQ ID NO: 1242276
uaguaaaugcuccgaaaca

SEQ ID NO: 1335461 - RNA, 19 nt, Artificial Sequence
  Description of Artificial Sequence: Synthetic oligonucleotide
  Antisense strand to SEQ ID NO: 1335460
uguuucggagcauuuacua

SEQ ID NO: 1335462 - RNA, 19 nt, Artificial Sequence
  Description of Artificial Sequence: Synthetic oligonucleotide
  Sense strand starting at position 396 of SEQ ID NO: 1242276
cccaucagcuaauuagagu

SEQ ID NO: 1335463 - RNA, 19 nt, Artificial Sequence
  Description of Artificial Sequence: Synthetic oligonucleotide
  Antisense strand to SEQ ID NO: 1335462
acucuaauuagcugauggg

SEQ ID NO: 1335464 - RNA, 19 nt, Artificial Sequence
  Description of Artificial Sequence: Synthetic oligonucleotide
  Sense strand starting at position 780 of SEQ ID NO: 1242276
uugagaguaaguggacaau

SEQ ID NO: 1335465 - RNA, 19 nt, Artificial Sequence
  Description of Artificial Sequence: Synthetic oligonucleotide
  Antisense strand to SEQ ID NO: 1335464
auuguccacuuacucucaa

SEQ ID NO: 1335466 - RNA, 19 nt, Artificial Sequence
  Description of Artificial Sequence: Synthetic oligonucleotide
  Sense strand starting at position 783 of SEQ ID NO: 1242276
agaguaaguggacaauguu

SEQ ID NO: 1335467 - RNA, 19 nt, Artificial Sequence
  Description of Artificial Sequence: Synthetic oligonucleotide
  Antisense strand to SEQ ID NO: 1335466
aacauuguccacuuacucu

SEQ ID NO: 1335468 - RNA, 19 nt, Artificial Sequence
  Description of Artificial Sequence: Synthetic oligonucleotide
  Sense strand starting at position 831 of SEQ ID NO: 1242276
ugcagugccaccguguaau

SEQ ID NO: 1335469 - RNA, 19 nt, Artificial Sequence
  Description of Artificial Sequence: Synthetic oligonucleotide
  Antisense strand to SEQ ID NO: 1335468
auuacacgguggcacugca

SEQ ID NO: 1335470 - RNA, 19 nt, Artificial Sequence
  Description of Artificial Sequence: Synthetic oligonucleotide
  Sense strand starting at position 842 of SEQ ID NO: 1242276
cguguaauccuauacuuug

SEQ ID NO: 1335471 - RNA, 19 nt, Artificial Sequence
  Description of Artificial Sequence: Synthetic oligonucleotide
  Antisense strand to SEQ ID NO: 1335470
caaaguauaggauuacacg

SEQ ID NO: 1335472 - RNA, 19 nt, Artificial Sequence
  Description of Artificial Sequence: Synthetic oligonucleotide
  Sense strand starting at position 848 of SEQ ID NO: 1242276
auccuauacuuuguguuua

SEQ ID NO: 1335473 - RNA, 19 nt, Artificial Sequence
  Description of Artificial Sequence: Synthetic oligonucleotide
  Antisense strand to SEQ ID NO: 1335472
uaaacacaaaguauaggau

SEQ ID NO: 1335474 - RNA, 19 nt, Artificial Sequence
  Description of Artificial Sequence: Synthetic oligonucleotide
  Sense strand starting at position 853 of SEQ ID NO: 1242276
auacuuuguguuuacagga

SEQ ID NO: 1335475 - RNA, 19 nt, Artificial Sequence
  Description of Artificial Sequence: Synthetic oligonucleotide
  Antisense strand to SEQ ID NO: 1335474
uccuguaaacacaaaguau

SEQ ID NO: 1335476 - RNA, 19 nt, Artificial Sequence
  Description of Artificial Sequence: Synthetic oligonucleotide
  Sense strand starting at position 980 of SEQ ID NO: 1242276
gaggcuuagcccugggaaa

SEQ ID NO: 1335477 - RNA, 19 nt, Artificial Sequence
  Description of Artificial Sequence: Synthetic oligonucleotide
  Antisense strand to SEQ ID NO: 1335476
uuucccagggcuaagccuc

SEQ ID NO: 1335478 - RNA, 19 nt, Artificial Sequence
  Description of Artificial Sequence: Synthetic oligonucleotide
  Sense strand starting at position 981 of SEQ ID NO: 1242276
aggcuuagcccugggaaau

SEQ ID NO: 1335479 - RNA, 19 nt, Artificial Sequence
  Description of Artificial Sequence: Synthetic oligonucleotide
  Antisense strand to SEQ ID NO: 1335478
auuucccagggcuaagccu

SEQ ID NO: 1335480 - RNA, 19 nt, Artificial Sequence
  Description of Artificial Sequence: Synthetic oligonucleotide
  Sense strand starting at position 982 of SEQ ID NO: 1242276
ggcuuagcccugggaaaug

SEQ ID NO: 1335481 - RNA, 19 nt, Artificial Sequence
  Description of Artificial Sequence: Synthetic oligonucleotide
  Antisense strand to SEQ ID NO: 1335480
cauuucccagggcuaagcc

SEQ ID NO: 1335482 - RNA, 19 nt, Artificial Sequence
  Description of Artificial Sequence: Synthetic oligonucleotide
  Sense strand starting at position 1942 of SEQ ID NO: 1242276
ccauguucacgacggagau

SEQ ID NO: 1335483 - RNA, 19 nt, Artificial Sequence
  Description of Artificial Sequence: Synthetic oligonucleotide
  Antisense strand to SEQ ID NO: 1335482
aucuccgucgugaacaugg

SEQ ID NO: 1335484 - RNA, 19 nt, Artificial Sequence
  Description of Artificial Sequence: Synthetic oligonucleotide
  Sense strand starting at position 1955 of SEQ ID NO: 1242276
ggagaugcuuugagaagug

SEQ ID NO: 1335485 - RNA, 19 nt, Artificial Sequence
  Description of Artificial Sequence: Synthetic oligonucleotide
  Antisense strand to SEQ ID NO: 1335484
cacuucucaaagcaucucc

SEQ ID NO: 1335486 - RNA, 19 nt, Artificial Sequence
  Description of Artificial Sequence: Synthetic oligonucleotide
  Sense strand starting at position 2057 of SEQ ID NO: 1242276
ccggaaggcucagugcaua

SEQ ID NO: 1335487 - RNA, 19 nt, Artificial Sequence
  Description of Artificial Sequence: Synthetic oligonucleotide
  Antisense strand to SEQ ID NO: 1335486
uaugcacugagccuuccgg

SEQ ID NO: 1335488 - RNA, 19 nt, Artificial Sequence
  Description of Artificial Sequence: Synthetic oligonucleotide
  Sense strand starting at position 2071 of SEQ ID NO: 1242276
gcauaagugggcagucguu

SEQ ID NO: 1335489 - RNA, 19 nt, Artificial Sequence
  Description of Artificial Sequence: Synthetic oligonucleotide
  Antisense strand to SEQ ID NO: 1335488
aacgacugcccacuuaugc

SEQ ID NO: 1335490 - RNA, 19 nt, Artificial Sequence
  Description of Artificial Sequence: Synthetic oligonucleotide
  Sense strand starting at position 2120 of SEQ ID NO: 1242276
guucuuauugagcauccua

SEQ ID NO: 1335491 - RNA, 19 nt, Artificial Sequence
  Description of Artificial Sequence: Synthetic oligonucleotide
  Antisense strand to SEQ ID NO: 1335490
uaggaugcucaauaagaac

SEQ ID NO: 1335492 - RNA, 19 nt, Artificial Sequence
  Description of Artificial Sequence: Synthetic oligonucleotide
  Sense strand starting at position 2182 of SEQ ID NO: 1242276
cagagcuucucuucgugga

SEQ ID NO: 1335493 - RNA, 19 nt, Artificial Sequence
  Description of Artificial Sequence: Synthetic oligonucleotide
  Antisense strand to SEQ ID NO: 1335492
uccacgaagagaagcucug

SEQ ID NO: 1335494 - RNA, 19 nt, Artificial Sequence
  Description of Artificial Sequence: Synthetic oligonucleotide
  Sense strand starting at position 2183 of SEQ ID NO: 1242276
agagcuucucuucguggaa

SEQ ID NO: 1335495 - RNA, 19 nt, Artificial Sequence
  Description of Artificial Sequence: Synthetic oligonucleotide
  Antisense strand to SEQ ID NO: 1335494
uuccacgaagagaagcucu

SEQ ID NO: 1335496 - RNA, 19 nt, Artificial Sequence
  Description of Artificial Sequence: Synthetic oligonucleotide
  Sense strand starting at position 2187 of SEQ ID NO: 1242276
cuucucuucguggaacuau

SEQ ID NO: 1335497 - RNA, 19 nt, Artificial Sequence
  Description of Artificial Sequence: Synthetic oligonucleotide
  Antisense strand to SEQ ID NO: 1335496
auaguuccacgaagagaag

SEQ ID NO: 1335498 - RNA, 19 nt, Artificial Sequence
  Description of Artificial Sequence: Synthetic oligonucleotide
  Sense strand starting at position 2196 of SEQ ID NO: 1242276
guggaacuaucugccuagu

SEQ ID NO: 1335499 - RNA, 19 nt, Artificial Sequence
  Description of Artificial Sequence: Synthetic oligonucleotide
  Antisense strand to SEQ ID NO: 1335498
acuaggcagauaguuccac

SEQ ID NO: 1335500 - RNA, 19 nt, Artificial Sequence
  Description of Artificial Sequence: Synthetic oligonucleotide
  Sense strand starting at position 2198 of SEQ ID NO: 1242276
ggaacuaucugccuaguau

SEQ ID NO: 1335501 - RNA, 19 nt, Artificial Sequence
  Description of Artificial Sequence: Synthetic oligonucleotide
  Antisense strand to SEQ ID NO: 1335500
auacuaggcagauaguucc

SEQ ID NO: 1335502 - RNA, 19 nt, Artificial Sequence
  Description of Artificial Sequence: Synthetic oligonucleotide
  Sense strand starting at position 2227 of SEQ ID NO: 1242276
ucaauuaaucauggugagu

SEQ ID NO: 1335503 - RNA, 19 nt, Artificial Sequence
  Description of Artificial Sequence: Synthetic oligonucleotide
  Antisense strand to SEQ ID NO: 1335502
acucaccaugauuaauuga

SEQ ID NO: 1335504 - RNA, 19 nt, Artificial Sequence
  Description of Artificial Sequence: Synthetic oligonucleotide
  Sense strand starting at position 2232 of SEQ ID NO: 1242276
uaaucauggugaguaucuu

SEQ ID NO: 1335505 - RNA, 19 nt, Artificial Sequence
  Description of Artificial Sequence: Synthetic oligonucleotide
  Antisense strand to SEQ ID NO: 1335504
aagauacucaccaugauua

SEQ ID NO: 1335506 - RNA, 19 nt, Artificial Sequence
  Description of Artificial Sequence: Synthetic oligonucleotide
  Sense strand starting at position 2238 of SEQ ID NO: 1242276
uggugaguaucuucgagaa

SEQ ID NO: 1335507 - RNA, 19 nt, Artificial Sequence
  Description of Artificial Sequence: Synthetic oligonucleotide
  Antisense strand to SEQ ID NO: 1335506
uucucgaagauacucacca

SEQ ID NO: 1335508 - RNA, 19 nt, Artificial Sequence
  Description of Artificial Sequence: Synthetic oligonucleotide
  Sense strand starting at position 2242 of SEQ ID NO: 1242276
gaguaucuucgagaaguug

SEQ ID NO: 1335509 - RNA, 19 nt, Artificial Sequence
  Description of Artificial Sequence: Synthetic oligonucleotide
  Antisense strand to SEQ ID NO: 1335508
caacuucucgaagauacuc

SEQ ID NO: 1335510 - RNA, 19 nt, Artificial Sequence
  Description of Artificial Sequence: Synthetic oligonucleotide
  Sense strand starting at position 2250 of SEQ ID NO: 1242276
ucgagaaguuggagaaggu

SEQ ID NO: 1335511 - RNA, 19 nt, Artificial Sequence
  Description of Artificial Sequence: Synthetic oligonucleotide
  Antisense strand to SEQ ID NO: 1335510
accuucuccaacuucucga

SEQ ID NO: 1335512 - RNA, 19 nt, Artificial Sequence
  Description of Artificial Sequence: Synthetic oligonucleotide
  Sense strand starting at position 2257 of SEQ ID NO: 1242276
guuggagaagguuauccua

SEQ ID NO: 1335513 - RNA, 19 nt, Artificial Sequence
  Description of Artificial Sequence: Synthetic oligonucleotide
  Antisense strand to SEQ ID NO: 1335512
uaggauaaccuucuccaac

SEQ ID NO: 1335514 - RNA, 19 nt, Artificial Sequence
  Description of Artificial Sequence: Synthetic oligonucleotide
  Sense strand starting at position 2289 of SEQ ID NO: 1242276
gcagcugagaucuggaaga

SEQ ID NO: 1335515 - RNA, 19 nt, Artificial Sequence
  Description of Artificial Sequence: Synthetic oligonucleotide
  Antisense strand to SEQ ID NO: 1335514
ucuuccagaucucagcugc

SEQ ID NO: 1335516 - RNA, 19 nt, Artificial Sequence
  Description of Artificial Sequence: Synthetic oligonucleotide
  Sense strand starting at position 2358 of SEQ ID NO: 1242276
gugcaaaggcccuaguaaa

SEQ ID NO: 1335517 - RNA, 19 nt, Artificial Sequence
  Description of Artificial Sequence: Synthetic oligonucleotide
  Antisense strand to SEQ ID NO: 1335516
uuuacuagggccuuugcac

SEQ ID NO: 1335518 - RNA, 19 nt, Artificial Sequence
  Description of Artificial Sequence: Synthetic oligonucleotide
  Sense strand starting at position 2376 of SEQ ID NO: 1242276
auaggagugugaccaacua

SEQ ID NO: 1335519 - RNA, 19 nt, Artificial Sequence
  Description of Artificial Sequence: Synthetic oligonucleotide
  Antisense strand to SEQ ID NO: 1335518
uaguuggucacacuccuau

SEQ ID NO: 1335520 - RNA, 19 nt, Artificial Sequence
  Description of Artificial Sequence: Synthetic oligonucleotide
  Sense strand starting at position 2532 of SEQ ID NO: 1242276
ggcgagaucggccuguagu

SEQ ID NO: 1335521 - RNA, 19 nt, Artificial Sequence
  Description of Artificial Sequence: Synthetic oligonucleotide
  Antisense strand to SEQ ID NO: 1335520
acuacaggccgaucucgcc

SEQ ID NO: 1335522 - RNA, 19 nt, Artificial Sequence
  Description of Artificial Sequence: Synthetic oligonucleotide
  Sense strand starting at position 2606 of SEQ ID NO: 1242276
acugcaaugagccacgaua

SEQ ID NO: 1335523 - RNA, 19 nt, Artificial Sequence
  Description of Artificial Sequence: Synthetic oligonucleotide
  Antisense strand to SEQ ID NO: 1335522
uaucguggcucauugcagu

SEQ ID NO: 1335524 - RNA, 19 nt, Artificial Sequence
  Description of Artificial Sequence: Synthetic oligonucleotide
  Sense strand starting at position 3122 of SEQ ID NO: 1242276
uagucaguugcugggauua

SEQ ID NO: 1335525 - RNA, 19 nt, Artificial Sequence
  Description of Artificial Sequence: Synthetic oligonucleotide
  Antisense strand to SEQ ID NO: 1335524
uaaucccagcaacugacua

SEQ ID NO: 1335526 - RNA, 19 nt, Artificial Sequence
  Description of Artificial Sequence: Synthetic oligonucleotide
  Sense strand starting at position 3216 of SEQ ID NO: 1242276
gucguaaacuccuuacauc

SEQ ID NO: 1335527 - RNA, 19 nt, Artificial Sequence
  Description of Artificial Sequence: Synthetic oligonucleotide
  Antisense strand to SEQ ID NO: 1335526
gauguaaggaguuuacgac

SEQ ID NO: 1335528 - RNA, 19 nt, Artificial Sequence
  Description of Artificial Sequence: Synthetic oligonucleotide
  Sense strand starting at position 3558 of SEQ ID NO: 1242276
uuggaucauguugggauua

SEQ ID NO: 1335529 - RNA, 19 nt, Artificial Sequence
  Description of Artificial Sequence: Synthetic oligonucleotide
  Antisense strand to SEQ ID NO: 1335528
uaaucccaacaugauccaa

SEQ ID NO: 1335530 - RNA, 19 nt, Artificial Sequence
  Description of Artificial Sequence: Synthetic oligonucleotide
  Sense strand starting at position 3623 of SEQ ID NO: 1242276
ucucuuacuuguuauuuga

SEQ ID NO: 1335531 - RNA, 19 nt, Artificial Sequence
  Description of Artificial Sequence: Synthetic oligonucleotide
  Antisense strand to SEQ ID NO: 1335530
ucaaauaacaaguaagaga

SEQ ID NO: 1335532 - RNA, 19 nt, Artificial Sequence
  Description of Artificial Sequence: Synthetic oligonucleotide
  Sense strand starting at position 24 of SEQ ID NO: 1242277
uggcgucaaucagaaccau

SEQ ID NO: 1335533 - RNA, 19 nt, Artificial Sequence
  Description of Artificial Sequence: Synthetic oligonucleotide
  Antisense strand to SEQ ID NO: 1335532
augguucugauugacgcca

SEQ ID NO: 1335534 - RNA, 19 nt, Artificial Sequence
  Description of Artificial Sequence: Synthetic oligonucleotide
  Sense strand starting at position 1193 of SEQ ID NO: 1242277
ggugcuggcgucaaugcaa

SEQ ID NO: 1335535 - RNA, 19 nt, Artificial Sequence
  Description of Artificial Sequence: Synthetic oligonucleotide
  Antisense strand to SEQ ID NO: 1335534
uugcauugacgccagcacc

SEQ ID NO: 1335536 - RNA, 19 nt, Artificial Sequence
  Description of Artificial Sequence: Synthetic oligonucleotide
  Sense strand starting at position 1376 of SEQ ID NO: 1242277
uucgaauuccggcuccgua

SEQ ID NO: 1335537 - RNA, 19 nt, Artificial Sequence
  Description of Artificial Sequence: Synthetic oligonucleotide
  Antisense strand to SEQ ID NO: 1335536
uacggagccggaauucgaa

SEQ ID NO: 1335538 - RNA, 19 nt, Artificial Sequence
  Description of Artificial Sequence: Synthetic oligonucleotide
  Sense strand starting at position 1377 of SEQ ID NO: 1242277
ucgaauuccggcuccguaa

SEQ ID NO: 1335539 - RNA, 19 nt, Artificial Sequence
  Description of Artificial Sequence: Synthetic oligonucleotide
  Antisense strand to SEQ ID NO: 1335538
uuacggagccggaauucga

SEQ ID NO: 1335540 - RNA, 19 nt, Artificial Sequence
  Description of Artificial Sequence: Synthetic oligonucleotide
  Sense strand starting at position 1440 of SEQ ID NO: 1242277
uggagcuguuacccagaaa

SEQ ID NO: 1335541 - RNA, 19 nt, Artificial Sequence
  Description of Artificial Sequence: Synthetic oligonucleotide
  Antisense strand to SEQ ID NO: 1335540
uuucuggguaacagcucca

SEQ ID NO: 1335542 - RNA, 19 nt, Artificial Sequence
  Description of Artificial Sequence: Synthetic oligonucleotide
  Sense strand starting at position 1794 of SEQ ID NO: 1242277
cuagcuugcugugugaacu

SEQ ID NO: 1335543 - RNA, 19 nt, Artificial Sequence
  Description of Artificial Sequence: Synthetic oligonucleotide
  Antisense strand to SEQ ID NO: 1335542
aguucacacagcaagcuag

SEQ ID NO: 1335544 - RNA, 19 nt, Artificial Sequence
  Description of Artificial Sequence: Synthetic oligonucleotide
  Sense strand starting at position 2248 of SEQ ID NO: 1242277
guuuaagcccauuaagcaa

SEQ ID NO: 1335545 - RNA, 19 nt, Artificial Sequence
  Description of Artificial Sequence: Synthetic oligonucleotide
  Antisense strand to SEQ ID NO: 1335544
uugcuuaaugggcuuaaac

SEQ ID NO: 1335546 - RNA, 19 nt, Artificial Sequence
  Description of Artificial Sequence: Synthetic oligonucleotide
  Sense strand starting at position 2299 of SEQ ID NO: 1242277
guacuacuggcuuggugaa

SEQ ID NO: 1335547 - RNA, 19 nt, Artificial Sequence
  Description of Artificial Sequence: Synthetic oligonucleotide
  Antisense strand to SEQ ID NO: 1335546
uucaccaagccaguaguac

SEQ ID NO: 1335548 - RNA, 19 nt, Artificial Sequence
  Description of Artificial Sequence: Synthetic oligonucleotide
  Sense strand starting at position 2301 of SEQ ID NO: 1242277
acuacuggcuuggugaaga

SEQ ID NO: 1335549 - RNA, 19 nt, Artificial Sequence
  Description of Artificial Sequence: Synthetic oligonucleotide
  Antisense strand to SEQ ID NO: 1335548
ucuucaccaagccaguagu

SEQ ID NO: 1335550 - RNA, 19 nt, Artificial Sequence
  Description of Artificial Sequence: Synthetic oligonucleotide
  Sense strand starting at position 2366 of SEQ ID NO: 1242277
ccgccuaaaucguauaauu

SEQ ID NO: 1335551 - RNA, 19 nt, Artificial Sequence
  Description of Artificial Sequence: Synthetic oligonucleotide
  Antisense strand to SEQ ID NO: 1335550
aauuauacgauuuaggcgg

SEQ ID NO: 1335552 - RNA, 19 nt, Artificial Sequence
  Description of Artificial Sequence: Synthetic oligonucleotide
  Sense strand starting at position 2390 of SEQ ID NO: 1242277
cugccuuugcucugcaauu

SEQ ID NO: 1335553 - RNA, 19 nt, Artificial Sequence
  Description of Artificial Sequence: Synthetic oligonucleotide
  Antisense strand to SEQ ID NO: 1335552
aauugcagagcaaaggcag

SEQ ID NO: 1335554 - RNA, 19 nt, Artificial Sequence
  Description of Artificial Sequence: Synthetic oligonucleotide
  Sense strand starting at position 2391 of SEQ ID NO: 1242277
ugccuuugcucugcaauuu

SEQ ID NO: 1335555 - RNA, 19 nt, Artificial Sequence
  Description of Artificial Sequence: Synthetic oligonucleotide
  Antisense strand to SEQ ID NO: 1335554
aaauugcagagcaaaggca

SEQ ID NO: 1335556 - RNA, 19 nt, Artificial Sequence
  Description of Artificial Sequence: Synthetic oligonucleotide
  Sense strand starting at position 2701 of SEQ ID NO: 1242277
gggaucagcuggccugaaa

SEQ ID NO: 1335557 - RNA, 19 nt, Artificial Sequence
  Description of Artificial Sequence: Synthetic oligonucleotide
  Antisense strand to SEQ ID NO: 1335556
uuucaggccagcugauccc

SEQ ID NO: 1335558 - RNA, 19 nt, Artificial Sequence
  Description of Artificial Sequence: Synthetic oligonucleotide
  Sense strand starting at position 2792 of SEQ ID NO: 1242277
cccucucuguucccggaaa

SEQ ID NO: 1335559 - RNA, 19 nt, Artificial Sequence
  Description of Artificial Sequence: Synthetic oligonucleotide
  Antisense strand to SEQ ID NO: 1335558
uuuccgggaacagagaggg

SEQ ID NO: 1335560 - RNA, 19 nt, Artificial Sequence
  Description of Artificial Sequence: Synthetic oligonucleotide
  Sense strand starting at position 2803 of SEQ ID NO: 1242277
cccggaaagcuguaacuaa

SEQ ID NO: 1335561 - RNA, 19 nt, Artificial Sequence
  Description of Artificial Sequence: Synthetic oligonucleotide
  Antisense strand to SEQ ID NO: 1335560
uuaguuacagcuuuccggg

SEQ ID NO: 1335562 - RNA, 19 nt, Artificial Sequence
  Description of Artificial Sequence: Synthetic oligonucleotide
  Sense strand starting at position 2814 of SEQ ID NO: 1242277
guaacuaauuuccaguucu

SEQ ID NO: 1335563 - RNA, 19 nt, Artificial Sequence
  Description of Artificial Sequence: Synthetic oligonucleotide
  Antisense strand to SEQ ID NO: 1335562
agaacuggaaauuaguuac

SEQ ID NO: 1335564 - RNA, 19 nt, Artificial Sequence
  Description of Artificial Sequence: Synthetic oligonucleotide
  Sense strand starting at position 2865 of SEQ ID NO: 1242277
ggcuaugaaugaugcagaa

SEQ ID NO: 1335565 - RNA, 19 nt, Artificial Sequence
  Description of Artificial Sequence: Synthetic oligonucleotide
  Antisense strand to SEQ ID NO: 1335564
uucugcaucauucauagcc

SEQ ID NO: 1335566 - RNA, 19 nt, Artificial Sequence
  Description of Artificial Sequence: Synthetic oligonucleotide
  Sense strand starting at position 2901 of SEQ ID NO: 1242277
gagucaucugccugcuucu

SEQ ID NO: 1335567 - RNA, 19 nt, Artificial Sequence
  Description of Artificial Sequence: Synthetic oligonucleotide
  Antisense strand to SEQ ID NO: 1335566
agaagcaggcagaugacuc

SEQ ID NO: 1335568 - RNA, 19 nt, Artificial Sequence
  Description of Artificial Sequence: Synthetic oligonucleotide
  Sense strand starting at position 3070 of SEQ ID NO: 1242277
acuucuguacccugugaca

SEQ ID NO: 1335569 - RNA, 19 nt, Artificial Sequence
  Description of Artificial Sequence: Synthetic oligonucleotide
  Antisense strand to SEQ ID NO: 1335568
ugucacaggguacagaagu

SEQ ID NO: 1335570 - RNA, 19 nt, Artificial Sequence
  Description of Artificial Sequence: Synthetic oligonucleotide
  Sense strand starting at position 3072 of SEQ ID NO: 1242277
uucuguacccugugacagu

SEQ ID NO: 1335571 - RNA, 19 nt, Artificial Sequence
  Description of Artificial Sequence: Synthetic oligonucleotide
  Antisense strand to SEQ ID NO: 1335570
acugucacaggguacagaa

SEQ ID NO: 1335572 - RNA, 19 nt, Artificial Sequence
  Description of Artificial Sequence: Synthetic oligonucleotide
  Sense strand starting at position 3102 of SEQ ID NO: 1242277
gggucacacugacagaagu

SEQ ID NO: 1335573 - RNA, 19 nt, Artificial Sequence
  Description of Artificial Sequence: Synthetic oligonucleotide
  Antisense strand to SEQ ID NO: 1335572
acuucugucagugugaccc

SEQ ID NO: 1335574 - RNA, 19 nt, Artificial Sequence
  Description of Artificial Sequence: Synthetic oligonucleotide
  Sense strand starting at position 3227 of SEQ ID NO: 1242277
ccaguacugcuggaaggua

SEQ ID NO: 1335575 - RNA, 19 nt, Artificial Sequence
  Description of Artificial Sequence: Synthetic oligonucleotide
  Antisense strand to SEQ ID NO: 1335574
uaccuuccagcaguacugg

SEQ ID NO: 1335576 - RNA, 19 nt, Artificial Sequence
  Description of Artificial Sequence: Synthetic oligonucleotide
  Sense strand starting at position 3277 of SEQ ID NO: 1242277
cucacuauuccguggcaca

SEQ ID NO: 1335577 - RNA, 19 nt, Artificial Sequence
  Description of Artificial Sequence: Synthetic oligonucleotide
  Antisense strand to SEQ ID NO: 1335576
ugugccacggaauagugag

SEQ ID NO: 1335578 - RNA, 19 nt, Artificial Sequence
  Description of Artificial Sequence: Synthetic oligonucleotide
  Sense strand starting at position 3278 of SEQ ID NO: 1242277
ucacuauuccguggcacaa

SEQ ID NO: 1335579 - RNA, 19 nt, Artificial Sequence
  Description of Artificial Sequence: Synthetic oligonucleotide
  Antisense strand to SEQ ID NO: 1335578
uugugccacggaauaguga

SEQ ID NO: 1335580 - RNA, 19 nt, Artificial Sequence
  Description of Artificial Sequence: Synthetic oligonucleotide
  Sense strand starting at position 3362 of SEQ ID NO: 1242277
cugcuugacuuccacaaga

SEQ ID NO: 1335581 - RNA, 19 nt, Artificial Sequence
  Description of Artificial Sequence: Synthetic oligonucleotide
  Antisense strand to SEQ ID NO: 1335580
ucuuguggaagucaagcag

SEQ ID NO: 1335582 - RNA, 19 nt, Artificial Sequence
  Description of Artificial Sequence: Synthetic oligonucleotide
  Sense strand starting at position 3364 of SEQ ID NO: 1242277
gcuugacuuccacaagacu

SEQ ID NO: 1335583 - RNA, 19 nt, Artificial Sequence
  Description of Artificial Sequence: Synthetic oligonucleotide
  Antisense strand to SEQ ID NO: 1335582
agucuuguggaagucaagc

SEQ ID NO: 1335584 - RNA, 19 nt, Artificial Sequence
  Description of Artificial Sequence: Synthetic oligonucleotide
  Sense strand starting at position 3373 of SEQ ID NO: 1242277
ccacaagacucagacuugu

SEQ ID NO: 1335585 - RNA, 19 nt, Artificial Sequence
  Description of Artificial Sequence: Synthetic oligonucleotide
  Antisense strand to SEQ ID NO: 1335584
acaagucugagucuugugg

SEQ ID NO: 1335586 - RNA, 19 nt, Artificial Sequence
  Description of Artificial Sequence: Synthetic oligonucleotide
  Sense strand starting at position 3379 of SEQ ID NO: 1242277
gacucagacuuguagcuga

SEQ ID NO: 1335587 - RNA, 19 nt, Artificial Sequence
  Description of Artificial Sequence: Synthetic oligonucleotide
  Antisense strand to SEQ ID NO: 1335586
ucagcuacaagucugaguc

SEQ ID NO: 1335588 - RNA, 19 nt, Artificial Sequence
  Description of Artificial Sequence: Synthetic oligonucleotide
  Sense strand starting at position 3424 of SEQ ID NO: 1242277
acuugagcaugaggucaau

SEQ ID NO: 1335589 - RNA, 19 nt, Artificial Sequence
  Description of Artificial Sequence: Synthetic oligonucleotide
  Antisense strand to SEQ ID NO: 1335588
auugaccucaugcucaagu

SEQ ID NO: 1335590 - RNA, 19 nt, Artificial Sequence
  Description of Artificial Sequence: Synthetic oligonucleotide
  Sense strand starting at position 3495 of SEQ ID NO: 1242277
cccugugacuggcacagau

SEQ ID NO: 1335591 - RNA, 19 nt, Artificial Sequence
  Description of Artificial Sequence: Synthetic oligonucleotide
  Antisense strand to SEQ ID NO: 1335590
aucugugccagucacaggg

SEQ ID NO: 1335592 - RNA, 19 nt, Artificial Sequence
  Description of Artificial Sequence: Synthetic oligonucleotide
  Sense strand starting at position 3505 of SEQ ID NO: 1242277
ggcacagauuuguggguua

SEQ ID NO: 1335593 - RNA, 19 nt, Artificial Sequence
  Description of Artificial Sequence: Synthetic oligonucleotide
  Antisense strand to SEQ ID NO: 1335592
uaacccacaaaucugugcc

SEQ ID NO: 1335594 - RNA, 19 nt, Artificial Sequence
  Description of Artificial Sequence: Synthetic oligonucleotide
  Sense strand starting at position 3519 of SEQ ID NO: 1242277
gguuauaggucaguccauu

SEQ ID NO: 1335595 - RNA, 19 nt, Artificial Sequence
  Description of Artificial Sequence: Synthetic oligonucleotide
  Antisense strand to SEQ ID NO: 1335594
aauggacugaccuauaacc

SEQ ID NO: 1335596 - RNA, 19 nt, Artificial Sequence
  Description of Artificial Sequence: Synthetic oligonucleotide
  Sense strand starting at position 3530 of SEQ ID NO: 1242277
aguccauucccaggagacu

SEQ ID NO: 1335597 - RNA, 19 nt, Artificial Sequence
  Description of Artificial Sequence: Synthetic oligonucleotide
  Antisense strand to SEQ ID NO: 1335596
agucuccugggaauggacu

SEQ ID NO: 1335598 - RNA, 19 nt, Artificial Sequence
  Description of Artificial Sequence: Synthetic oligonucleotide
  Sense strand starting at position 3578 of SEQ ID NO: 1242277
ucauuaaaggcaugcagau

SEQ ID NO: 1335599 - RNA, 19 nt, Artificial Sequence
  Description of Artificial Sequence: Synthetic oligonucleotide
  Antisense strand to SEQ ID NO: 1335598
aucugcaugccuuuaauga

SEQ ID NO: 1335600 - RNA, 19 nt, Artificial Sequence
  Description of Artificial Sequence: Synthetic oligonucleotide
  Sense strand starting at position 3900 of SEQ ID NO: 1242277
acuguccuccacuguaaau

SEQ ID NO: 1335601 - RNA, 19 nt, Artificial Sequence
  Description of Artificial Sequence: Synthetic oligonucleotide
  Antisense strand to SEQ ID NO: 1335600
auuuacaguggaggacagu

SEQ ID NO: 1335602 - RNA, 19 nt, Artificial Sequence
  Description of Artificial Sequence: Synthetic oligonucleotide
  Sense strand starting at position 3911 of SEQ ID NO: 1242277
cuguaaaucuaggacuacu

SEQ ID NO: 1335603 - RNA, 19 nt, Artificial Sequence
  Description of Artificial Sequence: Synthetic oligonucleotide
  Antisense strand to SEQ ID NO: 1335602
aguaguccuagauuuacag

SEQ ID NO: 1335604 - RNA, 19 nt, Artificial Sequence
  Description of Artificial Sequence: Synthetic oligonucleotide
  Sense strand starting at position 3928 of SEQ ID NO: 1242277
cuaucuaccucagagagua

SEQ ID NO: 1335605 - RNA, 19 nt, Artificial Sequence
  Description of Artificial Sequence: Synthetic oligonucleotide
  Antisense strand to SEQ ID NO: 1335604
uacucucugagguagauag

SEQ ID NO: 1335606 - RNA, 19 nt, Artificial Sequence
  Description of Artificial Sequence: Synthetic oligonucleotide
  Sense strand starting at position 3943 of SEQ ID NO: 1242277
aguaaaugggcucacugau

SEQ ID NO: 1335607 - RNA, 19 nt, Artificial Sequence
  Description of Artificial Sequence: Synthetic oligonucleotide
  Antisense strand to SEQ ID NO: 1335606
aucagugagcccauuuacu

SEQ ID NO: 1335608 - RNA, 19 nt, Artificial Sequence
  Description of Artificial Sequence: Synthetic oligonucleotide
  Sense strand starting at position 3949 of SEQ ID NO: 1242277
ugggcucacugaugucaaa

SEQ ID NO: 1335609 - RNA, 19 nt, Artificial Sequence
  Description of Artificial Sequence: Synthetic oligonucleotide
  Antisense strand to SEQ ID NO: 1335608
uuugacaucagugagccca

SEQ ID NO: 1335610 - RNA, 19 nt, Artificial Sequence
  Description of Artificial Sequence: Synthetic oligonucleotide
  Sense strand starting at position 3962 of SEQ ID NO: 1242277
gucaaaugccuagaacaac

SEQ ID NO: 1335611 - RNA, 19 nt, Artificial Sequence
  Description of Artificial Sequence: Synthetic oligonucleotide
  Antisense strand to SEQ ID NO: 1335610
guuguucuaggcauuugac

SEQ ID NO: 1335612 - RNA, 19 nt, Artificial Sequence
  Description of Artificial Sequence: Synthetic oligonucleotide
  Sense strand starting at position 16 of SEQ ID NO: 1242278
gguugaaguaaguacuuaa

SEQ ID NO: 1335613 - RNA, 19 nt, Artificial Sequence
  Description of Artificial Sequence: Synthetic oligonucleotide
  Antisense strand to SEQ ID NO: 1335612
uuaaguacuuacuucaacc

SEQ ID NO: 1335614 - RNA, 19 nt, Artificial Sequence
  Description of Artificial Sequence: Synthetic oligonucleotide
  Sense strand starting at position 101 of SEQ ID NO: 1242278
caagacaccuaggugaauu

SEQ ID NO: 1335615 - RNA, 19 nt, Artificial Sequence
  Description of Artificial Sequence: Synthetic oligonucleotide
  Antisense strand to SEQ ID NO: 1335614
aauucaccuaggugucuug

SEQ ID NO: 1335616 - RNA, 19 nt, Artificial Sequence
  Description of Artificial Sequence: Synthetic oligonucleotide
  Sense strand starting at position 184 of SEQ ID NO: 1242278
cuacuuugguaaucugaaa

SEQ ID NO: 1335617 - RNA, 19 nt, Artificial Sequence
  Description of Artificial Sequence: Synthetic oligonucleotide
  Antisense strand to SEQ ID NO: 1335616
uuucagauuaccaaaguag

SEQ ID NO: 1335618 - RNA, 19 nt, Artificial Sequence
  Description of Artificial Sequence: Synthetic oligonucleotide
  Sense strand starting at position 222 of SEQ ID NO: 1242278
aauguuagauuuggacuga

SEQ ID NO: 1335619 - RNA, 19 nt, Artificial Sequence
  Description of Artificial Sequence: Synthetic oligonucleotide
  Antisense strand to SEQ ID NO: 1335618
ucaguccaaaucuaacauu

SEQ ID NO: 1335620 - RNA, 19 nt, Artificial Sequence
  Description of Artificial Sequence: Synthetic oligonucleotide
  Sense strand starting at position 223 of SEQ ID NO: 1242278
auguuagauuuggacugaa

SEQ ID NO: 1335621 - RNA, 19 nt, Artificial Sequence
  Description of Artificial Sequence: Synthetic oligonucleotide
  Antisense strand to SEQ ID NO: 1335620
uucaguccaaaucuaacau

SEQ ID NO: 1335622 - RNA, 19 nt, Artificial Sequence
  Description of Artificial Sequence: Synthetic oligonucleotide
  Sense strand starting at position 252 of SEQ ID NO: 1242278
cuguuaaaguuuccauaug

SEQ ID NO: 1335623 - RNA, 19 nt, Artificial Sequence
  Description of Artificial Sequence: Synthetic oligonucleotide
  Antisense strand to SEQ ID NO: 1335622
cauauggaaacuuuaacag

SEQ ID NO: 1335624 - RNA, 19 nt, Artificial Sequence
  Description of Artificial Sequence: Synthetic oligonucleotide
  Sense strand starting at position 315 of SEQ ID NO: 1242278
gcuuaacacugauauuaag

SEQ ID NO: 1335625 - RNA, 19 nt, Artificial Sequence
  Description of Artificial Sequence: Synthetic oligonucleotide
  Antisense strand to SEQ ID NO: 1335624
cuuaauaucaguguuaagc

SEQ ID NO: 1335626 - RNA, 19 nt, Artificial Sequence
  Description of Artificial Sequence: Synthetic oligonucleotide
  Sense strand starting at position 329 of SEQ ID NO: 1242278
uuaagagcaccuugaguua

SEQ ID NO: 1335627 - RNA, 19 nt, Artificial Sequence
  Description of Artificial Sequence: Synthetic oligonucleotide
  Antisense strand to SEQ ID NO: 1335626
uaacucaaggugcucuuaa

SEQ ID NO: 1335628 - RNA, 19 nt, Artificial Sequence
  Description of Artificial Sequence: Synthetic oligonucleotide
  Sense strand starting at position 332 of SEQ ID NO: 1242278
agagcaccuugaguuagua

SEQ ID NO: 1335629 - RNA, 19 nt, Artificial Sequence
  Description of Artificial Sequence: Synthetic oligonucleotide
  Antisense strand to SEQ ID NO: 1335628
uacuaacucaaggugcucu

SEQ ID NO: 1335630 - RNA, 19 nt, Artificial Sequence
  Description of Artificial Sequence: Synthetic oligonucleotide
  Sense strand starting at position 340 of SEQ ID NO: 1242278
uugaguuaguaagccuaaa

SEQ ID NO: 1335631 - RNA, 19 nt, Artificial Sequence
  Description of Artificial Sequence: Synthetic oligonucleotide
  Antisense strand to SEQ ID NO: 1335630
uuuaggcuuacuaacucaa

SEQ ID NO: 1335632 - RNA, 19 nt, Artificial Sequence
  Description of Artificial Sequence: Synthetic oligonucleotide
  Sense strand starting at position 353 of SEQ ID NO: 1242278
ccuaaaccaucagagguuu

SEQ ID NO: 1335633 - RNA, 19 nt, Artificial Sequence
  Description of Artificial Sequence: Synthetic oligonucleotide
  Antisense strand to SEQ ID NO: 1335632
aaaccucugaugguuuagg

SEQ ID NO: 1335634 - RNA, 19 nt, Artificial Sequence
  Description of Artificial Sequence: Synthetic oligonucleotide
  Sense strand starting at position 361 of SEQ ID NO: 1242278
aucagagguuucuuuaaag

SEQ ID NO: 1335635 - RNA, 19 nt, Artificial Sequence
  Description of Artificial Sequence: Synthetic oligonucleotide
  Antisense strand to SEQ ID NO: 1335634
cuuuaaagaaaccucugau

SEQ ID NO: 1335636 - RNA, 19 nt, Artificial Sequence
  Description of Artificial Sequence: Synthetic oligonucleotide
  Sense strand starting at position 432 of SEQ ID NO: 1242278
ucacuuaggguaugggaau

SEQ ID NO: 1335637 - RNA, 19 nt, Artificial Sequence
  Description of Artificial Sequence: Synthetic oligonucleotide
  Antisense strand to SEQ ID NO: 1335636
auucccauacccuaaguga

SEQ ID NO: 1335638 - RNA, 19 nt, Artificial Sequence
  Description of Artificial Sequence: Synthetic oligonucleotide
  Sense strand starting at position 464 of SEQ ID NO: 1242278
acuguuaugcaacacugaa

SEQ ID NO: 1335639 - RNA, 19 nt, Artificial Sequence
  Description of Artificial Sequence: Synthetic oligonucleotide
  Antisense strand to SEQ ID NO: 1335638
uucaguguugcauaacagu

SEQ ID NO: 1335640 - RNA, 19 nt, Artificial Sequence
  Description of Artificial Sequence: Synthetic oligonucleotide
  Sense strand starting at position 512 of SEQ ID NO: 1242278
uaucaugacgacugcuaga

SEQ ID NO: 1335641 - RNA, 19 nt, Artificial Sequence
  Description of Artificial Sequence: Synthetic oligonucleotide
  Antisense strand to SEQ ID NO: 1335640
ucuagcagucgucaugaua

SEQ ID NO: 1335642 - RNA, 19 nt, Artificial Sequence
  Description of Artificial Sequence: Synthetic oligonucleotide
  Sense strand starting at position 515 of SEQ ID NO: 1242278
caugacgacugcuagaaau

SEQ ID NO: 1335643 - RNA, 19 nt, Artificial Sequence
  Description of Artificial Sequence: Synthetic oligonucleotide
  Antisense strand to SEQ ID NO: 1335642
auuucuagcagucgucaug

SEQ ID NO: 1335644 - RNA, 19 nt, Artificial Sequence
  Description of Artificial Sequence: Synthetic oligonucleotide
  Sense strand starting at position 517 of SEQ ID NO: 1242278
ugacgacugcuagaaaugu

SEQ ID NO: 1335645 - RNA, 19 nt, Artificial Sequence
  Description of Artificial Sequence: Synthetic oligonucleotide
  Antisense strand to SEQ ID NO: 1335644
acauuucuagcagucguca

SEQ ID NO: 1335646 - RNA, 19 nt, Artificial Sequence
  Description of Artificial Sequence: Synthetic oligonucleotide
  Sense strand starting at position 526 of SEQ ID NO: 1242278
cuagaaauguaagacagaa

SEQ ID NO: 1335647 - RNA, 19 nt, Artificial Sequence
  Description of Artificial Sequence: Synthetic oligonucleotide
  Antisense strand to SEQ ID NO: 1335646
uucugucuuacauuucuag

SEQ ID NO: 1335648 - RNA, 19 nt, Artificial Sequence
  Description of Artificial Sequence: Synthetic oligonucleotide
  Sense strand starting at position 582 of SEQ ID NO: 1242278
agcaguucucagcaagcaa

SEQ ID NO: 1335649 - RNA, 19 nt, Artificial Sequence
  Description of Artificial Sequence: Synthetic oligonucleotide
  Antisense strand to SEQ ID NO: 1335648
uugcuugcugagaacugcu

SEQ ID NO: 1335650 - RNA, 19 nt, Artificial Sequence
  Description of Artificial Sequence: Synthetic oligonucleotide
  Sense strand starting at position 749 of SEQ ID NO: 1242278
gcuuuaaauucugaaauga

SEQ ID NO: 1335651 - RNA, 19 nt, Artificial Sequence
  Description of Artificial Sequence: Synthetic oligonucleotide
  Antisense strand to SEQ ID NO: 1335650
ucauuucagaauuuaaagc

SEQ ID NO: 1335652 - RNA, 19 nt, Artificial Sequence
  Description of Artificial Sequence: Synthetic oligonucleotide
  Sense strand starting at position 785 of SEQ ID NO: 1242278
ugcugugugccuuaaugau

SEQ ID NO: 1335653 - RNA, 19 nt, Artificial Sequence
  Description of Artificial Sequence: Synthetic oligonucleotide
  Antisense strand to SEQ ID NO: 1335652
aucauuaaggcacacagca

SEQ ID NO: 1335654 - RNA, 19 nt, Artificial Sequence
  Description of Artificial Sequence: Synthetic oligonucleotide
  Sense strand starting at position 791 of SEQ ID NO: 1242278
gugccuuaaugaucacguu

SEQ ID NO: 1335655 - RNA, 19 nt, Artificial Sequence
  Description of Artificial Sequence: Synthetic oligonucleotide
  Antisense strand to SEQ ID NO: 1335654
aacgugaucauuaaggcac

SEQ ID NO: 1335656 - RNA, 19 nt, Artificial Sequence
  Description of Artificial Sequence: Synthetic oligonucleotide
  Sense strand starting at position 792 of SEQ ID NO: 1242278
ugccuuaaugaucacguuu

SEQ ID NO: 1335657 - RNA, 19 nt, Artificial Sequence
  Description of Artificial Sequence: Synthetic oligonucleotide
  Antisense strand to SEQ ID NO: 1335656
aaacgugaucauuaaggca

SEQ ID NO: 1335658 - RNA, 19 nt, Artificial Sequence
  Description of Artificial Sequence: Synthetic oligonucleotide
  Sense strand starting at position 951 of SEQ ID NO: 1242278
cccaguaagucggcuuaau

SEQ ID NO: 1335659 - RNA, 19 nt, Artificial Sequence
  Description of Artificial Sequence: Synthetic oligonucleotide
  Antisense strand to SEQ ID NO: 1335658
auuaagccgacuuacuggg

SEQ ID NO: 1335660 - RNA, 19 nt, Artificial Sequence
  Description of Artificial Sequence: Synthetic oligonucleotide
  Sense strand starting at position 1074 of SEQ ID NO: 1242278
ucaaauacaugugcaauga

SEQ ID NO: 1335661 - RNA, 19 nt, Artificial Sequence
  Description of Artificial Sequence: Synthetic oligonucleotide
  Antisense strand to SEQ ID NO: 1335660
ucauugcacauguauuuga

SEQ ID NO: 1335662 - RNA, 19 nt, Artificial Sequence
  Description of Artificial Sequence: Synthetic oligonucleotide
  Sense strand starting at position 1095 of SEQ ID NO: 1242278
caaagcugauguuccagau

SEQ ID NO: 1335663 - RNA, 19 nt, Artificial Sequence
  Description of Artificial Sequence: Synthetic oligonucleotide
  Antisense strand to SEQ ID NO: 1335662
aucuggaacaucagcuuug

SEQ ID NO: 1335664 - RNA, 19 nt, Artificial Sequence
  Description of Artificial Sequence: Synthetic oligonucleotide
  Sense strand starting at position 1099 of SEQ ID NO: 1242278
gcugauguuccagauuaca

SEQ ID NO: 1335665 - RNA, 19 nt, Artificial Sequence
  Description of Artificial Sequence: Synthetic oligonucleotide
  Antisense strand to SEQ ID NO: 1335664
uguaaucuggaacaucagc

SEQ ID NO: 1335666 - RNA, 19 nt, Artificial Sequence
  Description of Artificial Sequence: Synthetic oligonucleotide
  Sense strand starting at position 1119 of SEQ ID NO: 1242278
ucuagcagucccgaagaaa

SEQ ID NO: 1335667 - RNA, 19 nt, Artificial Sequence
  Description of Artificial Sequence: Synthetic oligonucleotide
  Antisense strand to SEQ ID NO: 1335666
uuucuucgggacugcuaga

SEQ ID NO: 1335668 - RNA, 19 nt, Artificial Sequence
  Description of Artificial Sequence: Synthetic oligonucleotide
  Sense strand starting at position 1294 of SEQ ID NO: 1242278
cgcucuuggagaggaaauu

SEQ ID NO: 1335669 - RNA, 19 nt, Artificial Sequence
  Description of Artificial Sequence: Synthetic oligonucleotide
  Antisense strand to SEQ ID NO: 1335668
aauuuccucuccaagagcg

SEQ ID NO: 1335670 - RNA, 19 nt, Artificial Sequence
  Description of Artificial Sequence: Synthetic oligonucleotide
  Sense strand starting at position 1357 of SEQ ID NO: 1242278
gggagucggauguguccaa

SEQ ID NO: 1335671 - RNA, 19 nt, Artificial Sequence
  Description of Artificial Sequence: Synthetic oligonucleotide
  Antisense strand to SEQ ID NO: 1335670
uuggacacauccgacuccc

SEQ ID NO: 1335672 - RNA, 19 nt, Artificial Sequence
  Description of Artificial Sequence: Synthetic oligonucleotide
  Sense strand starting at position 1358 of SEQ ID NO: 1242278
ggagucggauguguccaaa

SEQ ID NO: 1335673 - RNA, 19 nt, Artificial Sequence
  Description of Artificial Sequence: Synthetic oligonucleotide
  Antisense strand to SEQ ID NO: 1335672
uuuggacacauccgacucc

SEQ ID NO: 1335674 - RNA, 19 nt, Artificial Sequence
  Description of Artificial Sequence: Synthetic oligonucleotide
  Sense strand starting at position 2654 of SEQ ID NO: 1242278
ggugcuggcgucaaugcaa

SEQ ID NO: 1335675 - RNA, 19 nt, Artificial Sequence
  Description of Artificial Sequence: Synthetic oligonucleotide
  Antisense strand to SEQ ID NO: 1335674
uugcauugacgccagcacc

SEQ ID NO: 1335676 - RNA, 19 nt, Artificial Sequence
  Description of Artificial Sequence: Synthetic oligonucleotide
  Sense strand starting at position 2837 of SEQ ID NO: 1242278
uucgaauuccggcuccgua

SEQ ID NO: 1335677 - RNA, 19 nt, Artificial Sequence
  Description of Artificial Sequence: Synthetic oligonucleotide
  Antisense strand to SEQ ID NO: 1335676
uacggagccggaauucgaa

SEQ ID NO: 1335678 - RNA, 19 nt, Artificial Sequence
  Description of Artificial Sequence: Synthetic oligonucleotide
  Sense strand starting at position 2838 of SEQ ID NO: 1242278
ucgaauuccggcuccguaa

SEQ ID NO: 1335679 - RNA, 19 nt, Artificial Sequence
  Description of Artificial Sequence: Synthetic oligonucleotide
  Antisense strand to SEQ ID NO: 1335678
uuacggagccggaauucga

SEQ ID NO: 1335680 - RNA, 19 nt, Artificial Sequence
  Description of Artificial Sequence: Synthetic oligonucleotide
  Sense strand starting at position 2901 of SEQ ID NO: 1242278
uggagcuguuacccagaaa

SEQ ID NO: 1335681 - RNA, 19 nt, Artificial Sequence
  Description of Artificial Sequence: Synthetic oligonucleotide
  Antisense strand to SEQ ID NO: 1335680
uuucuggguaacagcucca

SEQ ID NO: 1335682 - RNA, 19 nt, Artificial Sequence
  Description of Artificial Sequence: Synthetic oligonucleotide
  Sense strand starting at position 3255 of SEQ ID NO: 1242278
cuagcuugcugugugaacu

SEQ ID NO: 1335683 - RNA, 19 nt, Artificial Sequence
  Description of Artificial Sequence: Synthetic oligonucleotide
  Antisense strand to SEQ ID NO: 1335682
aguucacacagcaagcuag

SEQ ID NO: 1335684 - RNA, 19 nt, Artificial Sequence
  Description of Artificial Sequence: Synthetic oligonucleotide
  Sense strand starting at position 3709 of SEQ ID NO: 1242278
guuuaagcccauuaagcaa

SEQ ID NO: 1335685 - RNA, 19 nt, Artificial Sequence
  Description of Artificial Sequence: Synthetic oligonucleotide
  Antisense strand to SEQ ID NO: 1335684
uugcuuaaugggcuuaaac

SEQ ID NO: 1335686 - RNA, 19 nt, Artificial Sequence
  Description of Artificial Sequence: Synthetic oligonucleotide
  Sense strand starting at position 3760 of SEQ ID NO: 1242278
guacuacuggcuuggugaa

SEQ ID NO: 1335687 - RNA, 19 nt, Artificial Sequence
  Description of Artificial Sequence: Synthetic oligonucleotide
  Antisense strand to SEQ ID NO: 1335686
uucaccaagccaguaguac

SEQ ID NO: 1335688 - RNA, 19 nt, Artificial Sequence
  Description of Artificial Sequence: Synthetic oligonucleotide
  Sense strand starting at position 3762 of SEQ ID NO: 1242278
acuacuggcuuggugaaga

SEQ ID NO: 1335689 - RNA, 19 nt, Artificial Sequence
  Description of Artificial Sequence: Synthetic oligonucleotide
  Antisense strand to SEQ ID NO: 1335688
ucuucaccaagccaguagu

SEQ ID NO: 1335690 - RNA, 19 nt, Artificial Sequence
  Description of Artificial Sequence: Synthetic oligonucleotide
  Sense strand starting at position 3852 of SEQ ID NO: 1242278
ugccuuugcucugcaauuu

SEQ ID NO: 1335691 - RNA, 19 nt, Artificial Sequence
  Description of Artificial Sequence: Synthetic oligonucleotide
  Antisense strand to SEQ ID NO: 1335690
aaauugcagagcaaaggca

SEQ ID NO: 1335692 - RNA, 19 nt, Artificial Sequence
  Description of Artificial Sequence: Synthetic oligonucleotide
  Sense strand starting at position 217 of SEQ ID NO: 1242279
cuaauauucuaguggccca

SEQ ID NO: 1335693 - RNA, 19 nt, Artificial Sequence
  Description of Artificial Sequence: Synthetic oligonucleotide
  Antisense strand to SEQ ID NO: 1335692
ugggccacuagaauauuag

SEQ ID NO: 1335694 - RNA, 19 nt, Artificial Sequence
  Description of Artificial Sequence: Synthetic oligonucleotide
  Sense strand starting at position 255 of SEQ ID NO: 1242279
acuuuaaauuguugcauga

SEQ ID NO: 1335695 - RNA, 19 nt, Artificial Sequence
  Description of Artificial Sequence: Synthetic oligonucleotide
  Antisense strand to SEQ ID NO: 1335694
ucaugcaacaauuuaaagu

SEQ ID NO: 1335696 - RNA, 19 nt, Artificial Sequence
  Description of Artificial Sequence: Synthetic oligonucleotide
  Sense strand starting at position 368 of SEQ ID NO: 1242279
auuauauaauugggaagag

SEQ ID NO: 1335697 - RNA, 19 nt, Artificial Sequence
  Description of Artificial Sequence: Synthetic oligonucleotide
  Antisense strand to SEQ ID NO: 1335696
cucuucccaauuauauaau

SEQ ID NO: 1335698 - RNA, 19 nt, Artificial Sequence
  Description of Artificial Sequence: Synthetic oligonucleotide
  Sense strand starting at position 369 of SEQ ID NO: 1242279
uuauauaauugggaagagu

SEQ ID NO: 1335699 - RNA, 19 nt, Artificial Sequence
  Description of Artificial Sequence: Synthetic oligonucleotide
  Antisense strand to SEQ ID NO: 1335698
acucuucccaauuauauaa

SEQ ID NO: 1335700 - RNA, 19 nt, Artificial Sequence
  Description of Artificial Sequence: Synthetic oligonucleotide
  Sense strand starting at position 767 of SEQ ID NO: 1242279
aucacuguuuacucuggua

SEQ ID NO: 1335701 - RNA, 19 nt, Artificial Sequence
  Description of Artificial Sequence: Synthetic oligonucleotide
  Antisense strand to SEQ ID NO: 1335700
uaccagaguaaacagugau

SEQ ID NO: 1335702 - RNA, 19 nt, Artificial Sequence
  Description of Artificial Sequence: Synthetic oligonucleotide
  Sense strand starting at position 770 of SEQ ID NO: 1242279
acuguuuacucugguaaug

SEQ ID NO: 1335703 - RNA, 19 nt, Artificial Sequence
  Description of Artificial Sequence: Synthetic oligonucleotide
  Antisense strand to SEQ ID NO: 1335702
cauuaccagaguaaacagu

SEQ ID NO: 1335704 - RNA, 19 nt, Artificial Sequence
  Description of Artificial Sequence: Synthetic oligonucleotide
  Sense strand starting at position 772 of SEQ ID NO: 1242279
uguuuacucugguaaugau

SEQ ID NO: 1335705 - RNA, 19 nt, Artificial Sequence
  Description of Artificial Sequence: Synthetic oligonucleotide
  Antisense strand to SEQ ID NO: 1335704
aucauuaccagaguaaaca

SEQ ID NO: 1335706 - RNA, 19 nt, Artificial Sequence
  Description of Artificial Sequence: Synthetic oligonucleotide
  Sense strand starting at position 780 of SEQ ID NO: 1242279
cugguaaugaucuggaggu

SEQ ID NO: 1335707 - RNA, 19 nt, Artificial Sequence
  Description of Artificial Sequence: Synthetic oligonucleotide
  Antisense strand to SEQ ID NO: 1335706
accuccagaucauuaccag

SEQ ID NO: 1335708 - RNA, 19 nt, Artificial Sequence
  Description of Artificial Sequence: Synthetic oligonucleotide
  Sense strand starting at position 781 of SEQ ID NO: 1242279
ugguaaugaucuggagguu

SEQ ID NO: 1335709 - RNA, 19 nt, Artificial Sequence
  Description of Artificial Sequence: Synthetic oligonucleotide
  Antisense strand to SEQ ID NO: 1335708
aaccuccagaucauuacca

SEQ ID NO: 1335710 - RNA, 19 nt, Artificial Sequence
  Description of Artificial Sequence: Synthetic oligonucleotide
  Sense strand starting at position 782 of SEQ ID NO: 1242279
gguaaugaucuggagguuu

SEQ ID NO: 1335711 - RNA, 19 nt, Artificial Sequence
  Description of Artificial Sequence: Synthetic oligonucleotide
  Antisense strand to SEQ ID NO: 1335710
aaaccuccagaucauuacc

SEQ ID NO: 1335712 - RNA, 19 nt, Artificial Sequence
  Description of Artificial Sequence: Synthetic oligonucleotide
  Sense strand starting at position 784 of SEQ ID NO: 1242279
uaaugaucuggagguuuaa

SEQ ID NO: 1335713 - RNA, 19 nt, Artificial Sequence
  Description of Artificial Sequence: Synthetic oligonucleotide
  Antisense strand to SEQ ID NO: 1335712
uuaaaccuccagaucauua

SEQ ID NO: 1335714 - RNA, 19 nt, Artificial Sequence
  Description of Artificial Sequence: Synthetic oligonucleotide
  Sense strand starting at position 897 of SEQ ID NO: 1242279
uauuucgaguuaguucuau

SEQ ID NO: 1335715 - RNA, 19 nt, Artificial Sequence
  Description of Artificial Sequence: Synthetic oligonucleotide
  Antisense strand to SEQ ID NO: 1335714
auagaacuaacucgaaaua

SEQ ID NO: 1335716 - RNA, 19 nt, Artificial Sequence
  Description of Artificial Sequence: Synthetic oligonucleotide
  Sense strand starting at position 901 of SEQ ID NO: 1242279
ucgaguuaguucuaucuaa

SEQ ID NO: 1335717 - RNA, 19 nt, Artificial Sequence
  Description of Artificial Sequence: Synthetic oligonucleotide
  Antisense strand to SEQ ID NO: 1335716
uuagauagaacuaacucga

SEQ ID NO: 1335718 - RNA, 19 nt, Artificial Sequence
  Description of Artificial Sequence: Synthetic oligonucleotide
  Sense strand starting at position 950 of SEQ ID NO: 1242279
ccuaaaguggaguauguaa

SEQ ID NO: 1335719 - RNA, 19 nt, Artificial Sequence
  Description of Artificial Sequence: Synthetic oligonucleotide
  Antisense strand to SEQ ID NO: 1335718
uuacauacuccacuuuagg

SEQ ID NO: 1335720 - RNA, 19 nt, Artificial Sequence
  Description of Artificial Sequence: Synthetic oligonucleotide
  Sense strand starting at position 957 of SEQ ID NO: 1242279
uggaguauguaaucaauau

SEQ ID NO: 1335721 - RNA, 19 nt, Artificial Sequence
  Description of Artificial Sequence: Synthetic oligonucleotide
  Antisense strand to SEQ ID NO: 1335720
auauugauuacauacucca

SEQ ID NO: 1335722 - RNA, 19 nt, Artificial Sequence
  Description of Artificial Sequence: Synthetic oligonucleotide
  Sense strand starting at position 961 of SEQ ID NO: 1242279
guauguaaucaauauuggu

SEQ ID NO: 1335723 - RNA, 19 nt, Artificial Sequence
  Description of Artificial Sequence: Synthetic oligonucleotide
  Antisense strand to SEQ ID NO: 1335722
accaauauugauuacauac

SEQ ID NO: 1335724 - RNA, 19 nt, Artificial Sequence
  Description of Artificial Sequence: Synthetic oligonucleotide
  Sense strand starting at position 1040 of SEQ ID NO: 1242279
uggacagauucugauggaa

SEQ ID NO: 1335725 - RNA, 19 nt, Artificial Sequence
  Description of Artificial Sequence: Synthetic oligonucleotide
  Antisense strand to SEQ ID NO: 1335724
uuccaucagaaucugucca

SEQ ID NO: 1335726 - RNA, 19 nt, Artificial Sequence
  Description of Artificial Sequence: Synthetic oligonucleotide
  Sense strand starting at position 1042 of SEQ ID NO: 1242279
gacagauucugauggaauu

SEQ ID NO: 1335727 - RNA, 19 nt, Artificial Sequence
  Description of Artificial Sequence: Synthetic oligonucleotide
  Antisense strand to SEQ ID NO: 1335726
aauuccaucagaaucuguc

SEQ ID NO: 1335728 - RNA, 19 nt, Artificial Sequence
  Description of Artificial Sequence: Synthetic oligonucleotide
  Sense strand starting at position 2972 of SEQ ID NO: 1242279
gccgucacaaagugaagau

SEQ ID NO: 1335729 - RNA, 19 nt, Artificial Sequence
  Description of Artificial Sequence: Synthetic oligonucleotide
  Antisense strand to SEQ ID NO: 1335728
aucuucacuuugugacggc

SEQ ID NO: 1335730 - RNA, 19 nt, Artificial Sequence
  Description of Artificial Sequence: Synthetic oligonucleotide
  Sense strand starting at position 3005 of SEQ ID NO: 1242279
ucgacugcucaaugucuuu

SEQ ID NO: 1335731 - RNA, 19 nt, Artificial Sequence
  Description of Artificial Sequence: Synthetic oligonucleotide
  Antisense strand to SEQ ID NO: 1335730
aaagacauugagcagucga

SEQ ID NO: 1335732 - RNA, 19 nt, Artificial Sequence
  Description of Artificial Sequence: Synthetic oligonucleotide
  Sense strand starting at position 3052 of SEQ ID NO: 1242279
aacccugagucuuaguaga

SEQ ID NO: 1335733 - RNA, 19 nt, Artificial Sequence
  Description of Artificial Sequence: Synthetic oligonucleotide
  Antisense strand to SEQ ID NO: 1335732
ucuacuaagacucaggguu

SEQ ID NO: 1335734 - RNA, 19 nt, Artificial Sequence
  Description of Artificial Sequence: Synthetic oligonucleotide
  Sense strand starting at position 3054 of SEQ ID NO: 1242279
cccugagucuuaguagaau

SEQ ID NO: 1335735 - RNA, 19 nt, Artificial Sequence
  Description of Artificial Sequence: Synthetic oligonucleotide
  Antisense strand to SEQ ID NO: 1335734
auucuacuaagacucaggg

SEQ ID NO: 1335736 - RNA, 19 nt, Artificial Sequence
  Description of Artificial Sequence: Synthetic oligonucleotide
  Sense strand starting at position 3057 of SEQ ID NO: 1242279
ugagucuuaguagaauguu

SEQ ID NO: 1335737 - RNA, 19 nt, Artificial Sequence
  Description of Artificial Sequence: Synthetic oligonucleotide
  Antisense strand to SEQ ID NO: 1335736
aacauucuacuaagacuca

SEQ ID NO: 1335738 - RNA, 19 nt, Artificial Sequence
  Description of Artificial Sequence: Synthetic oligonucleotide
  Sense strand starting at position 3060 of SEQ ID NO: 1242279
gucuuaguagaauguuugu

SEQ ID NO: 1335739 - RNA, 19 nt, Artificial Sequence
  Description of Artificial Sequence: Synthetic oligonucleotide
  Antisense strand to SEQ ID NO: 1335738
acaaacauucuacuaagac

SEQ ID NO: 1335740 - RNA, 19 nt, Artificial Sequence
  Description of Artificial Sequence: Synthetic oligonucleotide
  Sense strand starting at position 3118 of SEQ ID NO: 1242279
aaggaaucuuaagggcaaa

SEQ ID NO: 1335741 - RNA, 19 nt, Artificial Sequence
  Description of Artificial Sequence: Synthetic oligonucleotide
  Antisense strand to SEQ ID NO: 1335740
uuugcccuuaagauuccuu

SEQ ID NO: 1335742 - RNA, 19 nt, Artificial Sequence
  Description of Artificial Sequence: Synthetic oligonucleotide
  Sense strand starting at position 3349 of SEQ ID NO: 1242279
gacacacuaucaggaguua

SEQ ID NO: 1335743 - RNA, 19 nt, Artificial Sequence
  Description of Artificial Sequence: Synthetic oligonucleotide
  Antisense strand to SEQ ID NO: 1335742
uaacuccugauaguguguc

SEQ ID NO: 1335744 - RNA, 19 nt, Artificial Sequence
  Description of Artificial Sequence: Synthetic oligonucleotide
  Sense strand starting at position 3358 of SEQ ID NO: 1242279
ucaggaguuacuuggucag

SEQ ID NO: 1335745 - RNA, 19 nt, Artificial Sequence
  Description of Artificial Sequence: Synthetic oligonucleotide
  Antisense strand to SEQ ID NO: 1335744
cugaccaaguaacuccuga

SEQ ID NO: 1335746 - RNA, 19 nt, Artificial Sequence
  Description of Artificial Sequence: Synthetic oligonucleotide
  Sense strand starting at position 3360 of SEQ ID NO: 1242279
aggaguuacuuggucagca

SEQ ID NO: 1335747 - RNA, 19 nt, Artificial Sequence
  Description of Artificial Sequence: Synthetic oligonucleotide
  Antisense strand to SEQ ID NO: 1335746
ugcugaccaaguaacuccu

SEQ ID NO: 1335748 - RNA, 19 nt, Artificial Sequence
  Description of Artificial Sequence: Synthetic oligonucleotide
  Sense strand starting at position 3554 of SEQ ID NO: 1242279
gccacuagccguggaugau

SEQ ID NO: 1335749 - RNA, 19 nt, Artificial Sequence
  Description of Artificial Sequence: Synthetic oligonucleotide
  Antisense strand to SEQ ID NO: 1335748
aucauccacggcuaguggc

SEQ ID NO: 1335750 - RNA, 19 nt, Artificial Sequence
  Description of Artificial Sequence: Synthetic oligonucleotide
  Sense strand starting at position 3555 of SEQ ID NO: 1242279
ccacuagccguggaugaua

SEQ ID NO: 1335751 - RNA, 19 nt, Artificial Sequence
  Description of Artificial Sequence: Synthetic oligonucleotide
  Antisense strand to SEQ ID NO: 1335750
uaucauccacggcuagugg

SEQ ID NO: 1335752 - RNA, 19 nt, Artificial Sequence
  Description of Artificial Sequence: Synthetic oligonucleotide
  Sense strand starting at position 3564 of SEQ ID NO: 1242279
guggaugauacggaacagu

SEQ ID NO: 1335753 - RNA, 19 nt, Artificial Sequence
  Description of Artificial Sequence: Synthetic oligonucleotide
  Antisense strand to SEQ ID NO: 1335752
acuguuccguaucauccac

SEQ ID NO: 1335754 - RNA, 19 nt, Artificial Sequence
  Description of Artificial Sequence: Synthetic oligonucleotide
  Sense strand starting at position 3573 of SEQ ID NO: 1242279
acggaacaguuucugucaa

SEQ ID NO: 1335755 - RNA, 19 nt, Artificial Sequence
  Description of Artificial Sequence: Synthetic oligonucleotide
  Antisense strand to SEQ ID NO: 1335754
uugacagaaacuguuccgu

SEQ ID NO: 1335756 - RNA, 19 nt, Artificial Sequence
  Description of Artificial Sequence: Synthetic oligonucleotide
  Sense strand starting at position 3574 of SEQ ID NO: 1242279
cggaacaguuucugucaaa

SEQ ID NO: 1335757 - RNA, 19 nt, Artificial Sequence
  Description of Artificial Sequence: Synthetic oligonucleotide
  Antisense strand to SEQ ID NO: 1335756
uuugacagaaacuguuccg

SEQ ID NO: 1335758 - RNA, 19 nt, Artificial Sequence
  Description of Artificial Sequence: Synthetic oligonucleotide
  Sense strand starting at position 3575 of SEQ ID NO: 1242279
ggaacaguuucugucaaag

SEQ ID NO: 1335759 - RNA, 19 nt, Artificial Sequence
  Description of Artificial Sequence: Synthetic oligonucleotide
  Antisense strand to SEQ ID NO: 1335758
cuuugacagaaacuguucc

SEQ ID NO: 1335760 - RNA, 19 nt, Artificial Sequence
  Description of Artificial Sequence: Synthetic oligonucleotide
  Sense strand starting at position 3601 of SEQ ID NO: 1242279
aaacuuugagagugaaccu

SEQ ID NO: 1335761 - RNA, 19 nt, Artificial Sequence
  Description of Artificial Sequence: Synthetic oligonucleotide
  Antisense strand to SEQ ID NO: 1335760
agguucacucucaaaguuu

SEQ ID NO: 1335762 - RNA, 19 nt, Artificial Sequence
  Description of Artificial Sequence: Synthetic oligonucleotide
  Sense strand starting at position 3840 of SEQ ID NO: 1242279
agaaacuuauguugggaga

SEQ ID NO: 1335763 - RNA, 19 nt, Artificial Sequence
  Description of Artificial Sequence: Synthetic oligonucleotide
  Antisense strand to SEQ ID NO: 1335762
ucucccaacauaaguuucu

SEQ ID NO: 1335764 - RNA, 19 nt, Artificial Sequence
  Description of Artificial Sequence: Synthetic oligonucleotide
  Sense strand starting at position 3842 of SEQ ID NO: 1242279
aaacuuauguugggagauc

SEQ ID NO: 1335765 - RNA, 19 nt, Artificial Sequence
  Description of Artificial Sequence: Synthetic oligonucleotide
  Antisense strand to SEQ ID NO: 1335764
gaucucccaacauaaguuu

SEQ ID NO: 1335766 - RNA, 19 nt, Artificial Sequence
  Description of Artificial Sequence: Synthetic oligonucleotide
  Sense strand starting at position 3843 of SEQ ID NO: 1242279
aacuuauguugggagauca

SEQ ID NO: 1335767 - RNA, 19 nt, Artificial Sequence
  Description of Artificial Sequence: Synthetic oligonucleotide
  Antisense strand to SEQ ID NO: 1335766
ugaucucccaacauaaguu

SEQ ID NO: 1335768 - RNA, 19 nt, Artificial Sequence
  Description of Artificial Sequence: Synthetic oligonucleotide
  Sense strand starting at position 3868 of SEQ ID NO: 1242279
gcuagugggcgucucuaua

SEQ ID NO: 1335769 - RNA, 19 nt, Artificial Sequence
  Description of Artificial Sequence: Synthetic oligonucleotide
  Antisense strand to SEQ ID NO: 1335768
uauagagacgcccacuagc

SEQ ID NO: 1335770 - RNA, 19 nt, Artificial Sequence
  Description of Artificial Sequence: Synthetic oligonucleotide
  Sense strand starting at position 3881 of SEQ ID NO: 1242279
ucuauaaagccucaacgua

SEQ ID NO: 1335771 - RNA, 19 nt, Artificial Sequence
  Description of Artificial Sequence: Synthetic oligonucleotide
  Antisense strand to SEQ ID NO: 1335770
uacguugaggcuuuauaga

SEQ ID NO: 1335772 - RNA, 19 nt, Artificial Sequence
  Description of Artificial Sequence: Synthetic oligonucleotide
  Sense strand starting at position 502 of SEQ ID NO: 1242280
agagaagucccaggcaagu

SEQ ID NO: 1335773 - RNA, 19 nt, Artificial Sequence
  Description of Artificial Sequence: Synthetic oligonucleotide
  Antisense strand to SEQ ID NO: 1335772
acuugccugggacuucucu

SEQ ID NO: 1335774 - RNA, 19 nt, Artificial Sequence
  Description of Artificial Sequence: Synthetic oligonucleotide
  Sense strand starting at position 519 of SEQ ID NO: 1242280
gucagaaaguaauuagggu

SEQ ID NO: 1335775 - RNA, 19 nt, Artificial Sequence
  Description of Artificial Sequence: Synthetic oligonucleotide
  Antisense strand to SEQ ID NO: 1335774
acccuaauuacuuucugac

SEQ ID NO: 1335776 - RNA, 19 nt, Artificial Sequence
  Description of Artificial Sequence: Synthetic oligonucleotide
  Sense strand starting at position 533 of SEQ ID NO: 1242280
agggucgucagugaauuga

SEQ ID NO: 1335777 - RNA, 19 nt, Artificial Sequence
  Description of Artificial Sequence: Synthetic oligonucleotide
  Antisense strand to SEQ ID NO: 1335776
ucaauucacugacgacccu

SEQ ID NO: 1335778 - RNA, 19 nt, Artificial Sequence
  Description of Artificial Sequence: Synthetic oligonucleotide
  Sense strand starting at position 542 of SEQ ID NO: 1242280
agugaauugagcuaucuag

SEQ ID NO: 1335779 - RNA, 19 nt, Artificial Sequence
  Description of Artificial Sequence: Synthetic oligonucleotide
  Antisense strand to SEQ ID NO: 1335778
cuagauagcucaauucacu

SEQ ID NO: 1335780 - RNA, 19 nt, Artificial Sequence
  Description of Artificial Sequence: Synthetic oligonucleotide
  Sense strand starting at position 557 of SEQ ID NO: 1242280
cuagaaaugcucugagauu

SEQ ID NO: 1335781 - RNA, 19 nt, Artificial Sequence
  Description of Artificial Sequence: Synthetic oligonucleotide
  Antisense strand to SEQ ID NO: 1335780
aaucucagagcauuucuag

SEQ ID NO: 1335782 - RNA, 19 nt, Artificial Sequence
  Description of Artificial Sequence: Synthetic oligonucleotide
  Sense strand starting at position 563 of SEQ ID NO: 1242280
augcucugagauuacgaga

SEQ ID NO: 1335783 - RNA, 19 nt, Artificial Sequence
  Description of Artificial Sequence: Synthetic oligonucleotide
  Antisense strand to SEQ ID NO: 1335782
ucucguaaucucagagcau

SEQ ID NO: 1335784 - RNA, 19 nt, Artificial Sequence
  Description of Artificial Sequence: Synthetic oligonucleotide
  Sense strand starting at position 585 of SEQ ID NO: 1242280
gccaucaugaagugaguau

SEQ ID NO: 1335785 - RNA, 19 nt, Artificial Sequence
  Description of Artificial Sequence: Synthetic oligonucleotide
  Antisense strand to SEQ ID NO: 1335784
auacucacuucaugauggc

SEQ ID NO: 1335786 - RNA, 19 nt, Artificial Sequence
  Description of Artificial Sequence: Synthetic oligonucleotide
  Sense strand starting at position 592 of SEQ ID NO: 1242280
ugaagugaguauccaagau

SEQ ID NO: 1335787 - RNA, 19 nt, Artificial Sequence
  Description of Artificial Sequence: Synthetic oligonucleotide
  Antisense strand to SEQ ID NO: 1335786
aucuuggauacucacuuca

SEQ ID NO: 1335788 - RNA, 19 nt, Artificial Sequence
  Description of Artificial Sequence: Synthetic oligonucleotide
  Sense strand starting at position 596 of SEQ ID NO: 1242280
gugaguauccaagauugcu

SEQ ID NO: 1335789 - RNA, 19 nt, Artificial Sequence
  Description of Artificial Sequence: Synthetic oligonucleotide
  Antisense strand to SEQ ID NO: 1335788
agcaaucuuggauacucac

SEQ ID NO: 1335790 - RNA, 19 nt, Artificial Sequence
  Description of Artificial Sequence: Synthetic oligonucleotide
  Sense strand starting at position 602 of SEQ ID NO: 1242280
auccaagauugcucaugga

SEQ ID NO: 1335791 - RNA, 19 nt, Artificial Sequence
  Description of Artificial Sequence: Synthetic oligonucleotide
  Antisense strand to SEQ ID NO: 1335790
uccaugagcaaucuuggau

SEQ ID NO: 1335792 - RNA, 19 nt, Artificial Sequence
  Description of Artificial Sequence: Synthetic oligonucleotide
  Sense strand starting at position 606 of SEQ ID NO: 1242280
aagauugcucauggaaagu

SEQ ID NO: 1335793 - RNA, 19 nt, Artificial Sequence
  Description of Artificial Sequence: Synthetic oligonucleotide
  Antisense strand to SEQ ID NO: 1335792
acuuuccaugagcaaucuu

SEQ ID NO: 1335794 - RNA, 19 nt, Artificial Sequence
  Description of Artificial Sequence: Synthetic oligonucleotide
  Sense strand starting at position 673 of SEQ ID NO: 1242280
caauauggguucucugacu

SEQ ID NO: 1335795 - RNA, 19 nt, Artificial Sequence
  Description of Artificial Sequence: Synthetic oligonucleotide
  Antisense strand to SEQ ID NO: 1335794
agucagagaacccauauug

SEQ ID NO: 1335796 - RNA, 19 nt, Artificial Sequence
  Description of Artificial Sequence: Synthetic oligonucleotide
  Sense strand starting at position 678 of SEQ ID NO: 1242280
uggguucucugacuauaca

SEQ ID NO: 1335797 - RNA, 19 nt, Artificial Sequence
  Description of Artificial Sequence: Synthetic oligonucleotide
  Antisense strand to SEQ ID NO: 1335796
uguauagucagagaaccca

SEQ ID NO: 1335798 - RNA, 19 nt, Artificial Sequence
  Description of Artificial Sequence: Synthetic oligonucleotide
  Sense strand starting at position 681 of SEQ ID NO: 1242280
guucucugacuauacacau

SEQ ID NO: 1335799 - RNA, 19 nt, Artificial Sequence
  Description of Artificial Sequence: Synthetic oligonucleotide
  Antisense strand to SEQ ID NO: 1335798
auguguauagucagagaac

SEQ ID NO: 1335800 - RNA, 19 nt, Artificial Sequence
  Description of Artificial Sequence: Synthetic oligonucleotide
  Sense strand starting at position 851 of SEQ ID NO: 1242280
uuauguaagucucuaagua

SEQ ID NO: 1335801 - RNA, 19 nt, Artificial Sequence
  Description of Artificial Sequence: Synthetic oligonucleotide
  Antisense strand to SEQ ID NO: 1335800
uacuuagagacuuacauaa

SEQ ID NO: 1335802 - RNA, 19 nt, Artificial Sequence
  Description of Artificial Sequence: Synthetic oligonucleotide
  Sense strand starting at position 1126 of SEQ ID NO: 1242280
cucagcaaucuuuaacgua

SEQ ID NO: 1335803 - RNA, 19 nt, Artificial Sequence
  Description of Artificial Sequence: Synthetic oligonucleotide
  Antisense strand to SEQ ID NO: 1335802
uacguuaaagauugcugag

SEQ ID NO: 1335804 - RNA, 19 nt, Artificial Sequence
  Description of Artificial Sequence: Synthetic oligonucleotide
  Sense strand starting at position 2351 of SEQ ID NO: 1242280
aaauuuggguucgauuaag

SEQ ID NO: 1335805 - RNA, 19 nt, Artificial Sequence
  Description of Artificial Sequence: Synthetic oligonucleotide
  Antisense strand to SEQ ID NO: 1335804
cuuaaucgaacccaaauuu

SEQ ID NO: 1335806 - RNA, 19 nt, Artificial Sequence
  Description of Artificial Sequence: Synthetic oligonucleotide
  Sense strand starting at position 2361 of SEQ ID NO: 1242280
ucgauuaagccgcagagga

SEQ ID NO: 1335807 - RNA, 19 nt, Artificial Sequence
  Description of Artificial Sequence: Synthetic oligonucleotide
  Antisense strand to SEQ ID NO: 1335806
uccucugcggcuuaaucga

SEQ ID NO: 1335808 - RNA, 19 nt, Artificial Sequence
  Description of Artificial Sequence: Synthetic oligonucleotide
  Sense strand starting at position 2363 of SEQ ID NO: 1242280
gauuaagccgcagaggaaa

SEQ ID NO: 1335809 - RNA, 19 nt, Artificial Sequence
  Description of Artificial Sequence: Synthetic oligonucleotide
  Antisense strand to SEQ ID NO: 1335808
uuuccucugcggcuuaauc

SEQ ID NO: 1335810 - RNA, 19 nt, Artificial Sequence
  Description of Artificial Sequence: Synthetic oligonucleotide
  Sense strand starting at position 2430 of SEQ ID NO: 1242280
gccgucaucgaauacagaa

SEQ ID NO: 1335811 - RNA, 19 nt, Artificial Sequence
  Description of Artificial Sequence: Synthetic oligonucleotide
  Antisense strand to SEQ ID NO: 1335810
uucuguauucgaugacggc

SEQ ID NO: 1335812 - RNA, 19 nt, Artificial Sequence
  Description of Artificial Sequence: Synthetic oligonucleotide
  Sense strand starting at position 2432 of SEQ ID NO: 1242280
cgucaucgaauacagaaua

SEQ ID NO: 1335813 - RNA, 19 nt, Artificial Sequence
  Description of Artificial Sequence: Synthetic oligonucleotide
  Antisense strand to SEQ ID NO: 1335812
uauucuguauucgaugacg

SEQ ID NO: 1335814 - RNA, 19 nt, Artificial Sequence
  Description of Artificial Sequence: Synthetic oligonucleotide
  Sense strand starting at position 2454 of SEQ ID NO: 1242280
uuucgaggacgcuaauaug

SEQ ID NO: 1335815 - RNA, 19 nt, Artificial Sequence
  Description of Artificial Sequence: Synthetic oligonucleotide
  Antisense strand to SEQ ID NO: 1335814
cauauuagcguccucgaaa

SEQ ID NO: 1335816 - RNA, 19 nt, Artificial Sequence
  Description of Artificial Sequence: Synthetic oligonucleotide
  Sense strand starting at position 2464 of SEQ ID NO: 1242280
gcuaauauguagucaugac

SEQ ID NO: 1335817 - RNA, 19 nt, Artificial Sequence
  Description of Artificial Sequence: Synthetic oligonucleotide
  Antisense strand to SEQ ID NO: 1335816
gucaugacuacauauuagc

SEQ ID NO: 1335818 - RNA, 19 nt, Artificial Sequence
  Description of Artificial Sequence: Synthetic oligonucleotide
  Sense strand starting at position 2468 of SEQ ID NO: 1242280
auauguagucaugaccaau

SEQ ID NO: 1335819 - RNA, 19 nt, Artificial Sequence
  Description of Artificial Sequence: Synthetic oligonucleotide
  Antisense strand to SEQ ID NO: 1335818
auuggucaugacuacauau

SEQ ID NO: 1335820 - RNA, 19 nt, Artificial Sequence
  Description of Artificial Sequence: Synthetic oligonucleotide
  Sense strand starting at position 2657 of SEQ ID NO: 1242280
uucuucucaccggagcaau

SEQ ID NO: 1335821 - RNA, 19 nt, Artificial Sequence
  Description of Artificial Sequence: Synthetic oligonucleotide
  Antisense strand to SEQ ID NO: 1335820
auugcuccggugagaagaa

SEQ ID NO: 1335822 - RNA, 19 nt, Artificial Sequence
  Description of Artificial Sequence: Synthetic oligonucleotide
  Sense strand starting at position 2694 of SEQ ID NO: 1242280
agaggaguuaccuguggaa

SEQ ID NO: 1335823 - RNA, 19 nt, Artificial Sequence
  Description of Artificial Sequence: Synthetic oligonucleotide
  Antisense strand to SEQ ID NO: 1335822
uuccacagguaacuccucu

SEQ ID NO: 1335824 - RNA, 19 nt, Artificial Sequence
  Description of Artificial Sequence: Synthetic oligonucleotide
  Sense strand starting at position 2696 of SEQ ID NO: 1242280
aggaguuaccuguggaaag

SEQ ID NO: 1335825 - RNA, 19 nt, Artificial Sequence
  Description of Artificial Sequence: Synthetic oligonucleotide
  Antisense strand to SEQ ID NO: 1335824
cuuuccacagguaacuccu

SEQ ID NO: 1335826 - RNA, 19 nt, Artificial Sequence
  Description of Artificial Sequence: Synthetic oligonucleotide
  Sense strand starting at position 2698 of SEQ ID NO: 1242280
gaguuaccuguggaaaggu

SEQ ID NO: 1335827 - RNA, 19 nt, Artificial Sequence
  Description of Artificial Sequence: Synthetic oligonucleotide
  Antisense strand to SEQ ID NO: 1335826
accuuuccacagguaacuc

SEQ ID NO: 1335828 - RNA, 19 nt, Artificial Sequence
  Description of Artificial Sequence: Synthetic oligonucleotide
  Sense strand starting at position 2707 of SEQ ID NO: 1242280
guggaaaggugguuaagag

SEQ ID NO: 1335829 - RNA, 19 nt, Artificial Sequence
  Description of Artificial Sequence: Synthetic oligonucleotide
  Antisense strand to SEQ ID NO: 1335828
cucuuaaccaccuuuccac

SEQ ID NO: 1335830 - RNA, 19 nt, Artificial Sequence
  Description of Artificial Sequence: Synthetic oligonucleotide
  Sense strand starting at position 2757 of SEQ ID NO: 1242280
uaaagugcugcggaagaau

SEQ ID NO: 1335831 - RNA, 19 nt, Artificial Sequence
  Description of Artificial Sequence: Synthetic oligonucleotide
  Antisense strand to SEQ ID NO: 1335830
auucuuccgcagcacuuua

SEQ ID NO: 1335832 - RNA, 19 nt, Artificial Sequence
  Description of Artificial Sequence: Synthetic oligonucleotide
  Sense strand starting at position 3259 of SEQ ID NO: 1242280
gucagaauuuaugaguuug

SEQ ID NO: 1335833 - RNA, 19 nt, Artificial Sequence
  Description of Artificial Sequence: Synthetic oligonucleotide
  Antisense strand to SEQ ID NO: 1335832
caaacucauaaauucugac

SEQ ID NO: 1335834 - RNA, 19 nt, Artificial Sequence
  Description of Artificial Sequence: Synthetic oligonucleotide
  Sense strand starting at position 3368 of SEQ ID NO: 1242280
gcaccuuugcaagacgaca

SEQ ID NO: 1335835 - RNA, 19 nt, Artificial Sequence
  Description of Artificial Sequence: Synthetic oligonucleotide
  Antisense strand to SEQ ID NO: 1335834
ugucgucuugcaaaggugc

SEQ ID NO: 1335836 - RNA, 19 nt, Artificial Sequence
  Description of Artificial Sequence: Synthetic oligonucleotide
  Sense strand starting at position 3389 of SEQ ID NO: 1242280
gcuugugugacugaugaau

SEQ ID NO: 1335837 - RNA, 19 nt, Artificial Sequence
  Description of Artificial Sequence: Synthetic oligonucleotide
  Antisense strand to SEQ ID NO: 1335836
auucaucagucacacaagc

SEQ ID NO: 1335838 - RNA, 19 nt, Artificial Sequence
  Description of Artificial Sequence: Synthetic oligonucleotide
  Sense strand starting at position 3563 of SEQ ID NO: 1242280
aucuuagcagaaugaaagu

SEQ ID NO: 1335839 - RNA, 19 nt, Artificial Sequence
  Description of Artificial Sequence: Synthetic oligonucleotide
  Antisense strand to SEQ ID NO: 1335838
acuuucauucugcuaagau

SEQ ID NO: 1335840 - RNA, 19 nt, Artificial Sequence
  Description of Artificial Sequence: Synthetic oligonucleotide
  Sense strand starting at position 3593 of SEQ ID NO: 1242280
guacucaaauuugagguua

SEQ ID NO: 1335841 - RNA, 19 nt, Artificial Sequence
  Description of Artificial Sequence: Synthetic oligonucleotide
  Antisense strand to SEQ ID NO: 1335840
uaaccucaaauuugaguac

SEQ ID NO: 1335842 - RNA, 19 nt, Artificial Sequence
  Description of Artificial Sequence: Synthetic oligonucleotide
  Sense strand starting at position 3606 of SEQ ID NO: 1242280
agguuaccuuaacugauaa

SEQ ID NO: 1335843 - RNA, 19 nt, Artificial Sequence
  Description of Artificial Sequence: Synthetic oligonucleotide
  Antisense strand to SEQ ID NO: 1335842
uuaucaguuaagguaaccu

SEQ ID NO: 1335844 - RNA, 19 nt, Artificial Sequence
  Description of Artificial Sequence: Synthetic oligonucleotide
  Sense strand starting at position 3638 of SEQ ID NO: 1242280
aauuauuaggacuguugau

SEQ ID NO: 1335845 - RNA, 19 nt, Artificial Sequence
  Description of Artificial Sequence: Synthetic oligonucleotide
  Antisense strand to SEQ ID NO: 1335844
aucaacaguccuaauaauu

SEQ ID NO: 1335846 - RNA, 19 nt, Artificial Sequence
  Description of Artificial Sequence: Synthetic oligonucleotide
  Sense strand starting at position 3673 of SEQ ID NO: 1242280
ugcccugugccugagaaca

SEQ ID NO: 1335847 - RNA, 19 nt, Artificial Sequence
  Description of Artificial Sequence: Synthetic oligonucleotide
  Antisense strand to SEQ ID NO: 1335846
uguucucaggcacagggca

SEQ ID NO: 1335848 - RNA, 19 nt, Artificial Sequence
  Description of Artificial Sequence: Synthetic oligonucleotide
  Sense strand starting at position 3840 of SEQ ID NO: 1242280
ggucaugagacucagcuca

SEQ ID NO: 1335849 - RNA, 19 nt, Artificial Sequence
  Description of Artificial Sequence: Synthetic oligonucleotide
  Antisense strand to SEQ ID NO: 1335848
ugagcugagucucaugacc

SEQ ID NO: 1335850 - RNA, 19 nt, Artificial Sequence
  Description of Artificial Sequence: Synthetic oligonucleotide
  Sense strand starting at position 3842 of SEQ ID NO: 1242280
ucaugagacucagcucaga

SEQ ID NO: 1335851 - RNA, 19 nt, Artificial Sequence
  Description of Artificial Sequence: Synthetic oligonucleotide
  Antisense strand to SEQ ID NO: 1335850
ucugagcugagucucauga

SEQ ID NO: 1335852 - RNA, 19 nt, Artificial Sequence
  Description of Artificial Sequence: Synthetic oligonucleotide
  Sense strand starting at position 274 of SEQ ID NO: 1242281
gguacauucuagguacacu

SEQ ID NO: 1335853 - RNA, 19 nt, Artificial Sequence
  Description of Artificial Sequence: Synthetic oligonucleotide
  Antisense strand to SEQ ID NO: 1335852
aguguaccuagaauguacc

SEQ ID NO: 1335854 - RNA, 19 nt, Artificial Sequence
  Description of Artificial Sequence: Synthetic oligonucleotide
  Sense strand starting at position 377 of SEQ ID NO: 1242281
ugagaaagccaguauagcu

SEQ ID NO: 1335855 - RNA, 19 nt, Artificial Sequence
  Description of Artificial Sequence: Synthetic oligonucleotide
  Antisense strand to SEQ ID NO: 1335854
agcuauacuggcuuucuca

SEQ ID NO: 1335856 - RNA, 19 nt, Artificial Sequence
  Description of Artificial Sequence: Synthetic oligonucleotide
  Sense strand starting at position 415 of SEQ ID NO: 1242281
ggagucauuugcguggaug

SEQ ID NO: 1335857 - RNA, 19 nt, Artificial Sequence
  Description of Artificial Sequence: Synthetic oligonucleotide
  Antisense strand to SEQ ID NO: 1335856
cauccacgcaaaugacucc

SEQ ID NO: 1335858 - RNA, 19 nt, Artificial Sequence
  Description of Artificial Sequence: Synthetic oligonucleotide
  Sense strand starting at position 416 of SEQ ID NO: 1242281
gagucauuugcguggaugu

SEQ ID NO: 1335859 - RNA, 19 nt, Artificial Sequence
  Description of Artificial Sequence: Synthetic oligonucleotide
  Antisense strand to SEQ ID NO: 1335858
acauccacgcaaaugacuc

SEQ ID NO: 1335860 - RNA, 19 nt, Artificial Sequence
  Description of Artificial Sequence: Synthetic oligonucleotide
  Sense strand starting at position 418 of SEQ ID NO: 1242281
gucauuugcguggauguga

SEQ ID NO: 1335861 - RNA, 19 nt, Artificial Sequence
  Description of Artificial Sequence: Synthetic oligonucleotide
  Antisense strand to SEQ ID NO: 1335860
ucacauccacgcaaaugac

SEQ ID NO: 1335862 - RNA, 19 nt, Artificial Sequence
  Description of Artificial Sequence: Synthetic oligonucleotide
  Sense strand starting at position 431 of SEQ ID NO: 1242281
augugaaucccucaguucu

SEQ ID NO: 1335863 - RNA, 19 nt, Artificial Sequence
  Description of Artificial Sequence: Synthetic oligonucleotide
  Antisense strand to SEQ ID NO: 1335862
agaacugagggauucacau

SEQ ID NO: 1335864 - RNA, 19 nt, Artificial Sequence
  Description of Artificial Sequence: Synthetic oligonucleotide
  Sense strand starting at position 533 of SEQ ID NO: 1242281
gguugugaugaggguuaua

SEQ ID NO: 1335865 - RNA, 19 nt, Artificial Sequence
  Description of Artificial Sequence: Synthetic oligonucleotide
  Antisense strand to SEQ ID NO: 1335864
uauaacccucaucacaacc

SEQ ID NO: 1335866 - RNA, 19 nt, Artificial Sequence
  Description of Artificial Sequence: Synthetic oligonucleotide
  Sense strand starting at position 575 of SEQ ID NO: 1242281
gggaacaauagcugucaua

SEQ ID NO: 1335867 - RNA, 19 nt, Artificial Sequence
  Description of Artificial Sequence: Synthetic oligonucleotide
  Antisense strand to SEQ ID NO: 1335866
uaugacagcuauuguuccc

SEQ ID NO: 1335868 - RNA, 19 nt, Artificial Sequence
  Description of Artificial Sequence: Synthetic oligonucleotide
  Sense strand starting at position 589 of SEQ ID NO: 1242281
ucauaaagauggcuuccaa

SEQ ID NO: 1335869 - RNA, 19 nt, Artificial Sequence
  Description of Artificial Sequence: Synthetic oligonucleotide
  Antisense strand to SEQ ID NO: 1335868
uuggaagccaucuuuauga

SEQ ID NO: 1335870 - RNA, 19 nt, Artificial Sequence
  Description of Artificial Sequence: Synthetic oligonucleotide
  Sense strand starting at position 622 of SEQ ID NO: 1242281
gggccauucuaauugaucu

SEQ ID NO: 1335871 - RNA, 19 nt, Artificial Sequence
  Description of Artificial Sequence: Synthetic oligonucleotide
  Antisense strand to SEQ ID NO: 1335870
agaucaauuagaauggccc

SEQ ID NO: 1335872 - RNA, 19 nt, Artificial Sequence
  Description of Artificial Sequence: Synthetic oligonucleotide
  Sense strand starting at position 629 of SEQ ID NO: 1242281
ucuaauugaucuguuugua

SEQ ID NO: 1335873 - RNA, 19 nt, Artificial Sequence
  Description of Artificial Sequence: Synthetic oligonucleotide
  Antisense strand to SEQ ID NO: 1335872
uacaaacagaucaauuaga

SEQ ID NO: 1335874 - RNA, 19 nt, Artificial Sequence
  Description of Artificial Sequence: Synthetic oligonucleotide
  Sense strand starting at position 752 of SEQ ID NO: 1242281
gaacuaguacuguauucgu

SEQ ID NO: 1335875 - RNA, 19 nt, Artificial Sequence
  Description of Artificial Sequence: Synthetic oligonucleotide
  Antisense strand to SEQ ID NO: 1335874
acgaauacaguacuaguuc

SEQ ID NO: 1335876 - RNA, 19 nt, Artificial Sequence
  Description of Artificial Sequence: Synthetic oligonucleotide
  Sense strand starting at position 865 of SEQ ID NO: 1242281
gaaccuuagaggugcaguu

SEQ ID NO: 1335877 - RNA, 19 nt, Artificial Sequence
  Description of Artificial Sequence: Synthetic oligonucleotide
  Antisense strand to SEQ ID NO: 1335876
aacugcaccucuaagguuc

SEQ ID NO: 1335878 - RNA, 19 nt, Artificial Sequence
  Description of Artificial Sequence: Synthetic oligonucleotide
  Sense strand starting at position 986 of SEQ ID NO: 1242281
gcaguaucucaaugauaca

SEQ ID NO: 1335879 - RNA, 19 nt, Artificial Sequence
  Description of Artificial Sequence: Synthetic oligonucleotide
  Antisense strand to SEQ ID NO: 1335878
uguaucauugagauacugc

SEQ ID NO: 1335880 - RNA, 19 nt, Artificial Sequence
  Description of Artificial Sequence: Synthetic oligonucleotide
  Sense strand starting at position 996 of SEQ ID NO: 1242281
aaugauacagccuggguaa

SEQ ID NO: 1335881 - RNA, 19 nt, Artificial Sequence
  Description of Artificial Sequence: Synthetic oligonucleotide
  Antisense strand to SEQ ID NO: 1335880
uuacccaggcuguaucauu

SEQ ID NO: 1335882 - RNA, 19 nt, Artificial Sequence
  Description of Artificial Sequence: Synthetic oligonucleotide
  Sense strand starting at position 997 of SEQ ID NO: 1242281
augauacagccuggguaau

SEQ ID NO: 1335883 - RNA, 19 nt, Artificial Sequence
  Description of Artificial Sequence: Synthetic oligonucleotide
  Antisense strand to SEQ ID NO: 1335882
auuacccaggcuguaucau

SEQ ID NO: 1335884 - RNA, 19 nt, Artificial Sequence
  Description of Artificial Sequence: Synthetic oligonucleotide
  Sense strand starting at position 998 of SEQ ID NO: 1242281
ugauacagccuggguaaua

SEQ ID NO: 1335885 - RNA, 19 nt, Artificial Sequence
  Description of Artificial Sequence: Synthetic oligonucleotide
  Antisense strand to SEQ ID NO: 1335884
uauuacccaggcuguauca

SEQ ID NO: 1335886 - RNA, 19 nt, Artificial Sequence
  Description of Artificial Sequence: Synthetic oligonucleotide
  Sense strand starting at position 999 of SEQ ID NO: 1242281
gauacagccuggguaauaa

SEQ ID NO: 1335887 - RNA, 19 nt, Artificial Sequence
  Description of Artificial Sequence: Synthetic oligonucleotide
  Antisense strand to SEQ ID NO: 1335886
uuauuacccaggcuguauc

SEQ ID NO: 1335888 - RNA, 19 nt, Artificial Sequence
  Description of Artificial Sequence: Synthetic oligonucleotide
  Sense strand starting at position 1439 of SEQ ID NO: 1242281
ggaagaauguugaguggag

SEQ ID NO: 1335889 - RNA, 19 nt, Artificial Sequence
  Description of Artificial Sequence: Synthetic oligonucleotide
  Antisense strand to SEQ ID NO: 1335888
cuccacucaacauucuucc

SEQ ID NO: 1335890 - RNA, 19 nt, Artificial Sequence
  Description of Artificial Sequence: Synthetic oligonucleotide
  Sense strand starting at position 1501 of SEQ ID NO: 1242281
ggaggaucugucagccggu

SEQ ID NO: 1335891 - RNA, 19 nt, Artificial Sequence
  Description of Artificial Sequence: Synthetic oligonucleotide
  Antisense strand to SEQ ID NO: 1335890
accggcugacagauccucc

SEQ ID NO: 1335892 - RNA, 19 nt, Artificial Sequence
  Description of Artificial Sequence: Synthetic oligonucleotide
  Sense strand starting at position 1608 of SEQ ID NO: 1242281
gcccacucacguugaauuu

SEQ ID NO: 1335893 - RNA, 19 nt, Artificial Sequence
  Description of Artificial Sequence: Synthetic oligonucleotide
  Antisense strand to SEQ ID NO: 1335892
aaauucaacgugagugggc

SEQ ID NO: 1335894 - RNA, 19 nt, Artificial Sequence
  Description of Artificial Sequence: Synthetic oligonucleotide
  Sense strand starting at position 1988 of SEQ ID NO: 1242281
gcacacuuucuguagagca

SEQ ID NO: 1335895 - RNA, 19 nt, Artificial Sequence
  Description of Artificial Sequence: Synthetic oligonucleotide
  Antisense strand to SEQ ID NO: 1335894
ugcucuacagaaagugugc

SEQ ID NO: 1335896 - RNA, 19 nt, Artificial Sequence
  Description of Artificial Sequence: Synthetic oligonucleotide
  Sense strand starting at position 2144 of SEQ ID NO: 1242281
gagucuccuagaggaaagu

SEQ ID NO: 1335897 - RNA, 19 nt, Artificial Sequence
  Description of Artificial Sequence: Synthetic oligonucleotide
  Antisense strand to SEQ ID NO: 1335896
acuuuccucuaggagacuc

SEQ ID NO: 1335898 - RNA, 19 nt, Artificial Sequence
  Description of Artificial Sequence: Synthetic oligonucleotide
  Sense strand starting at position 2221 of SEQ ID NO: 1242281
gaucucagguucucaggaa

SEQ ID NO: 1335899 - RNA, 19 nt, Artificial Sequence
  Description of Artificial Sequence: Synthetic oligonucleotide
  Antisense strand to SEQ ID NO: 1335898
uuccugagaaccugagauc

SEQ ID NO: 1335900 - RNA, 19 nt, Artificial Sequence
  Description of Artificial Sequence: Synthetic oligonucleotide
  Sense strand starting at position 2244 of SEQ ID NO: 1242281
gggugauaucccgaauggu

SEQ ID NO: 1335901 - RNA, 19 nt, Artificial Sequence
  Description of Artificial Sequence: Synthetic oligonucleotide
  Antisense strand to SEQ ID NO: 1335900
accauucgggauaucaccc

SEQ ID NO: 1335902 - RNA, 19 nt, Artificial Sequence
  Description of Artificial Sequence: Synthetic oligonucleotide
  Sense strand starting at position 2443 of SEQ ID NO: 1242281
aaauguucugcuuggauua

SEQ ID NO: 1335903 - RNA, 19 nt, Artificial Sequence
  Description of Artificial Sequence: Synthetic oligonucleotide
  Antisense strand to SEQ ID NO: 1335902
uaauccaagcagaacauuu

SEQ ID NO: 1335904 - RNA, 19 nt, Artificial Sequence
  Description of Artificial Sequence: Synthetic oligonucleotide
  Sense strand starting at position 2448 of SEQ ID NO: 1242281
uucugcuuggauuauugaa

SEQ ID NO: 1335905 - RNA, 19 nt, Artificial Sequence
  Description of Artificial Sequence: Synthetic oligonucleotide
  Antisense strand to SEQ ID NO: 1335904
uucaauaauccaagcagaa

SEQ ID NO: 1335906 - RNA, 19 nt, Artificial Sequence
  Description of Artificial Sequence: Synthetic oligonucleotide
  Sense strand starting at position 2450 of SEQ ID NO: 1242281
cugcuuggauuauugaaca

SEQ ID NO: 1335907 - RNA, 19 nt, Artificial Sequence
  Description of Artificial Sequence: Synthetic oligonucleotide
  Antisense strand to SEQ ID NO: 1335906
uguucaauaauccaagcag

SEQ ID NO: 1335908 - RNA, 19 nt, Artificial Sequence
  Description of Artificial Sequence: Synthetic oligonucleotide
  Sense strand starting at position 2504 of SEQ ID NO: 1242281
gagucauuaugagcaaagu

SEQ ID NO: 1335909 - RNA, 19 nt, Artificial Sequence
  Description of Artificial Sequence: Synthetic oligonucleotide
  Antisense strand to SEQ ID NO: 1335908
acuuugcucauaaugacuc

SEQ ID NO: 1335910 - RNA, 19 nt, Artificial Sequence
  Description of Artificial Sequence: Synthetic oligonucleotide
  Sense strand starting at position 2505 of SEQ ID NO: 1242281
agucauuaugagcaaagug

SEQ ID NO: 1335911 - RNA, 19 nt, Artificial Sequence
  Description of Artificial Sequence: Synthetic oligonucleotide
  Antisense strand to SEQ ID NO: 1335910
cacuuugcucauaaugacu

SEQ ID NO: 1335912 - RNA, 19 nt, Artificial Sequence
  Description of Artificial Sequence: Synthetic oligonucleotide
  Sense strand starting at position 2542 of SEQ ID NO: 1242281
augaaauugcaccgcugaa

SEQ ID NO: 1335913 - RNA, 19 nt, Artificial Sequence
  Description of Artificial Sequence: Synthetic oligonucleotide
  Antisense strand to SEQ ID NO: 1335912
uucagcggugcaauuucau

SEQ ID NO: 1335914 - RNA, 19 nt, Artificial Sequence
  Description of Artificial Sequence: Synthetic oligonucleotide
  Sense strand starting at position 3148 of SEQ ID NO: 1242281
uguagaaggccagguucau

SEQ ID NO: 1335915 - RNA, 19 nt, Artificial Sequence
  Description of Artificial Sequence: Synthetic oligonucleotide
  Antisense strand to SEQ ID NO: 1335914
augaaccuggccuucuaca

SEQ ID NO: 1335916 - RNA, 19 nt, Artificial Sequence
  Description of Artificial Sequence: Synthetic oligonucleotide
  Sense strand starting at position 3461 of SEQ ID NO: 1242281
ggugucauuugggcaguaa

SEQ ID NO: 1335917 - RNA, 19 nt, Artificial Sequence
  Description of Artificial Sequence: Synthetic oligonucleotide
  Antisense strand to SEQ ID NO: 1335916
uuacugcccaaaugacacc

SEQ ID NO: 1335918 - RNA, 19 nt, Artificial Sequence
  Description of Artificial Sequence: Synthetic oligonucleotide
  Sense strand starting at position 3487 of SEQ ID NO: 1242281
ggguauugguacccugaac

SEQ ID NO: 1335919 - RNA, 19 nt, Artificial Sequence
  Description of Artificial Sequence: Synthetic oligonucleotide
  Antisense strand to SEQ ID NO: 1335918
guucaggguaccaauaccc

SEQ ID NO: 1335920 - RNA, 19 nt, Artificial Sequence
  Description of Artificial Sequence: Synthetic oligonucleotide
  Sense strand starting at position 3528 of SEQ ID NO: 1242281
gaaacuaggcuuuggguga

SEQ ID NO: 1335921 - RNA, 19 nt, Artificial Sequence
  Description of Artificial Sequence: Synthetic oligonucleotide
  Antisense strand to SEQ ID NO: 1335920
ucacccaaagccuaguuuc

SEQ ID NO: 1335922 - RNA, 19 nt, Artificial Sequence
  Description of Artificial Sequence: Synthetic oligonucleotide
  Sense strand starting at position 3533 of SEQ ID NO: 1242281
uaggcuuugggugagcaua

SEQ ID NO: 1335923 - RNA, 19 nt, Artificial Sequence
  Description of Artificial Sequence: Synthetic oligonucleotide
  Antisense strand to SEQ ID NO: 1335922
uaugcucacccaaagccua

SEQ ID NO: 1335924 - RNA, 19 nt, Artificial Sequence
  Description of Artificial Sequence: Synthetic oligonucleotide
  Sense strand starting at position 3599 of SEQ ID NO: 1242281
cgaagagagccagaaguuu

SEQ ID NO: 1335925 - RNA, 19 nt, Artificial Sequence
  Description of Artificial Sequence: Synthetic oligonucleotide
  Antisense strand to SEQ ID NO: 1335924
aaacuucuggcucucuucg

SEQ ID NO: 1335926 - RNA, 19 nt, Artificial Sequence
  Description of Artificial Sequence: Synthetic oligonucleotide
  Sense strand starting at position 3641 of SEQ ID NO: 1242281
agggcaauucugcaagcaa

SEQ ID NO: 1335927 - RNA, 19 nt, Artificial Sequence
  Description of Artificial Sequence: Synthetic oligonucleotide
  Antisense strand to SEQ ID NO: 1335926
uugcuugcagaauugcccu

SEQ ID NO: 1335928 - RNA, 19 nt, Artificial Sequence
  Description of Artificial Sequence: Synthetic oligonucleotide
  Sense strand starting at position 3648 of SEQ ID NO: 1242281
uucugcaagcaaugagaau

SEQ ID NO: 1335929 - RNA, 19 nt, Artificial Sequence
  Description of Artificial Sequence: Synthetic oligonucleotide
  Antisense strand to SEQ ID NO: 1335928
auucucauugcuugcagaa

SEQ ID NO: 1335930 - RNA, 19 nt, Artificial Sequence
  Description of Artificial Sequence: Synthetic oligonucleotide
  Sense strand starting at position 3672 of SEQ ID NO: 1242281
gaguccuggccauauacca

SEQ ID NO: 1335931 - RNA, 19 nt, Artificial Sequence
  Description of Artificial Sequence: Synthetic oligonucleotide
  Antisense strand to SEQ ID NO: 1335930
ugguauauggccaggacuc

SEQ ID NO: 1335932 - RNA, 19 nt, Artificial Sequence
  Description of Artificial Sequence: Synthetic oligonucleotide
  Sense strand starting at position 2024 of SEQ ID NO: 1242282
uccagagugccgggaguua

SEQ ID NO: 1335933 - RNA, 19 nt, Artificial Sequence
  Description of Artificial Sequence: Synthetic oligonucleotide
  Antisense strand to SEQ ID NO: 1335932
uaacucccggcacucugga

SEQ ID NO: 1335934 - RNA, 19 nt, Artificial Sequence
  Description of Artificial Sequence: Synthetic oligonucleotide
  Sense strand starting at position 2046 of SEQ ID NO: 1242282
gcaguacuuccgccuuacu

SEQ ID NO: 1335935 - RNA, 19 nt, Artificial Sequence
  Description of Artificial Sequence: Synthetic oligonucleotide
  Antisense strand to SEQ ID NO: 1335934
aguaaggcggaaguacugc

SEQ ID NO: 1335936 - RNA, 19 nt, Artificial Sequence
  Description of Artificial Sequence: Synthetic oligonucleotide
  Sense strand starting at position 2459 of SEQ ID NO: 1242282
cgguuuccuuaagugagca

SEQ ID NO: 1335937 - RNA, 19 nt, Artificial Sequence
  Description of Artificial Sequence: Synthetic oligonucleotide
  Antisense strand to SEQ ID NO: 1335936
ugcucacuuaaggaaaccg

SEQ ID NO: 1335938 - RNA, 19 nt, Artificial Sequence
  Description of Artificial Sequence: Synthetic oligonucleotide
  Sense strand starting at position 2460 of SEQ ID NO: 1242282
gguuuccuuaagugagcau

SEQ ID NO: 1335939 - RNA, 19 nt, Artificial Sequence
  Description of Artificial Sequence: Synthetic oligonucleotide
  Antisense strand to SEQ ID NO: 1335938
augcucacuuaaggaaacc

SEQ ID NO: 1335940 - RNA, 19 nt, Artificial Sequence
  Description of Artificial Sequence: Synthetic oligonucleotide
  Sense strand starting at position 2652 of SEQ ID NO: 1242282
guaccucuggaaugagcau

SEQ ID NO: 1335941 - RNA, 19 nt, Artificial Sequence
  Description of Artificial Sequence: Synthetic oligonucleotide
  Antisense strand to SEQ ID NO: 1335940
augcucauuccagagguac

SEQ ID NO: 1335942 - RNA, 19 nt, Artificial Sequence
  Description of Artificial Sequence: Synthetic oligonucleotide
  Sense strand starting at position 2698 of SEQ ID NO: 1242282
agagcauggagucaguuau

SEQ ID NO: 1335943 - RNA, 19 nt, Artificial Sequence
  Description of Artificial Sequence: Synthetic oligonucleotide
  Antisense strand to SEQ ID NO: 1335942
auaacugacuccaugcucu

SEQ ID NO: 1335944 - RNA, 19 nt, Artificial Sequence
  Description of Artificial Sequence: Synthetic oligonucleotide
  Sense strand starting at position 2708 of SEQ ID NO: 1242282
gucaguuauuuccaaccuu

SEQ ID NO: 1335945 - RNA, 19 nt, Artificial Sequence
  Description of Artificial Sequence: Synthetic oligonucleotide
  Antisense strand to SEQ ID NO: 1335944
aagguuggaaauaacugac

SEQ ID NO: 1335946 - RNA, 19 nt, Artificial Sequence
  Description of Artificial Sequence: Synthetic oligonucleotide
  Sense strand starting at position 2783 of SEQ ID NO: 1242282
auuagucucuuguuggauu

SEQ ID NO: 1335947 - RNA, 19 nt, Artificial Sequence
  Description of Artificial Sequence: Synthetic oligonucleotide
  Antisense strand to SEQ ID NO: 1335946
aauccaacaagagacuaau

SEQ ID NO: 1335948 - RNA, 19 nt, Artificial Sequence
  Description of Artificial Sequence: Synthetic oligonucleotide
  Sense strand starting at position 2812 of SEQ ID NO: 1242282
ucaucugguuucccuagaa

SEQ ID NO: 1335949 - RNA, 19 nt, Artificial Sequence
  Description of Artificial Sequence: Synthetic oligonucleotide
  Antisense strand to SEQ ID NO: 1335948
uucuagggaaaccagauga

SEQ ID NO: 1335950 - RNA, 19 nt, Artificial Sequence
  Description of Artificial Sequence: Synthetic oligonucleotide
  Sense strand starting at position 2816 of SEQ ID NO: 1242282
cugguuucccuagaaccua

SEQ ID NO: 1335951 - RNA, 19 nt, Artificial Sequence
  Description of Artificial Sequence: Synthetic oligonucleotide
  Antisense strand to SEQ ID NO: 1335950
uagguucuagggaaaccag

SEQ ID NO: 1335952 - RNA, 19 nt, Artificial Sequence
  Description of Artificial Sequence: Synthetic oligonucleotide
  Sense strand starting at position 2861 of SEQ ID NO: 1242282
uuugguagcuuguuauuau

SEQ ID NO: 1335953 - RNA, 19 nt, Artificial Sequence
  Description of Artificial Sequence: Synthetic oligonucleotide
  Antisense strand to SEQ ID NO: 1335952
auaauaacaagcuaccaaa

SEQ ID NO: 1335954 - RNA, 19 nt, Artificial Sequence
  Description of Artificial Sequence: Synthetic oligonucleotide
  Sense strand starting at position 2864 of SEQ ID NO: 1242282
gguagcuuguuauuaugua

SEQ ID NO: 1335955 - RNA, 19 nt, Artificial Sequence
  Description of Artificial Sequence: Synthetic oligonucleotide
  Antisense strand to SEQ ID NO: 1335954
uacauaauaacaagcuacc

SEQ ID NO: 1335956 - RNA, 19 nt, Artificial Sequence
  Description of Artificial Sequence: Synthetic oligonucleotide
  Sense strand starting at position 2868 of SEQ ID NO: 1242282
gcuuguuauuauguagaaa

SEQ ID NO: 1335957 - RNA, 19 nt, Artificial Sequence
  Description of Artificial Sequence: Synthetic oligonucleotide
  Antisense strand to SEQ ID NO: 1335956
uuucuacauaauaacaagc

SEQ ID NO: 1335958 - RNA, 19 nt, Artificial Sequence
  Description of Artificial Sequence: Synthetic oligonucleotide
  Sense strand starting at position 2880 of SEQ ID NO: 1242282
guagaaagaugcgacacaa

SEQ ID NO: 1335959 - RNA, 19 nt, Artificial Sequence
  Description of Artificial Sequence: Synthetic oligonucleotide
  Antisense strand to SEQ ID NO: 1335958
uugugucgcaucuuucuac

SEQ ID NO: 1335960 - RNA, 19 nt, Artificial Sequence
  Description of Artificial Sequence: Synthetic oligonucleotide
  Sense strand starting at position 2920 of SEQ ID NO: 1242282
agggcuucuagugacgaca

SEQ ID NO: 1335961 - RNA, 19 nt, Artificial Sequence
  Description of Artificial Sequence: Synthetic oligonucleotide
  Antisense strand to SEQ ID NO: 1335960
ugucgucacuagaagcccu

SEQ ID NO: 1335962 - RNA, 19 nt, Artificial Sequence
  Description of Artificial Sequence: Synthetic oligonucleotide
  Sense strand starting at position 3031 of SEQ ID NO: 1242282
gggugggaucguuguucuu

SEQ ID NO: 1335963 - RNA, 19 nt, Artificial Sequence
  Description of Artificial Sequence: Synthetic oligonucleotide
  Antisense strand to SEQ ID NO: 1335962
aagaacaacgaucccaccc

SEQ ID NO: 1335964 - RNA, 19 nt, Artificial Sequence
  Description of Artificial Sequence: Synthetic oligonucleotide
  Sense strand starting at position 3056 of SEQ ID NO: 1242282
aguugaauucaucgagaga

SEQ ID NO: 1335965 - RNA, 19 nt, Artificial Sequence
  Description of Artificial Sequence: Synthetic oligonucleotide
  Antisense strand to SEQ ID NO: 1335964
ucucucgaugaauucaacu

SEQ ID NO: 1335966 - RNA, 19 nt, Artificial Sequence
  Description of Artificial Sequence: Synthetic oligonucleotide
  Sense strand starting at position 3088 of SEQ ID NO: 1242282
acuugucauuuaugugaga

SEQ ID NO: 1335967 - RNA, 19 nt, Artificial Sequence
  Description of Artificial Sequence: Synthetic oligonucleotide
  Antisense strand to SEQ ID NO: 1335966
ucucacauaaaugacaagu

SEQ ID NO: 1335968 - RNA, 19 nt, Artificial Sequence
  Description of Artificial Sequence: Synthetic oligonucleotide
  Sense strand starting at position 3091 of SEQ ID NO: 1242282
ugucauuuaugugagacua

SEQ ID NO: 1335969 - RNA, 19 nt, Artificial Sequence
  Description of Artificial Sequence: Synthetic oligonucleotide
  Antisense strand to SEQ ID NO: 1335968
uagucucacauaaaugaca

SEQ ID NO: 1335970 - RNA, 19 nt, Artificial Sequence
  Description of Artificial Sequence: Synthetic oligonucleotide
  Sense strand starting at position 3190 of SEQ ID NO: 1242282
ggaugaauuuguuagcacu

SEQ ID NO: 1335971 - RNA, 19 nt, Artificial Sequence
  Description of Artificial Sequence: Synthetic oligonucleotide
  Antisense strand to SEQ ID NO: 1335970
agugcuaacaaauucaucc

SEQ ID NO: 1335972 - RNA, 19 nt, Artificial Sequence
  Description of Artificial Sequence: Synthetic oligonucleotide
  Sense strand starting at position 3193 of SEQ ID NO: 1242282
ugaauuuguuagcacuagu

SEQ ID NO: 1335973 - RNA, 19 nt, Artificial Sequence
  Description of Artificial Sequence: Synthetic oligonucleotide
  Antisense strand to SEQ ID NO: 1335972
acuagugcuaacaaauuca

SEQ ID NO: 1335974 - RNA, 19 nt, Artificial Sequence
  Description of Artificial Sequence: Synthetic oligonucleotide
  Sense strand starting at position 3271 of SEQ ID NO: 1242282
cccuuacuuggaggugaaa

SEQ ID NO: 1335975 - RNA, 19 nt, Artificial Sequence
  Description of Artificial Sequence: Synthetic oligonucleotide
  Antisense strand to SEQ ID NO: 1335974
uuucaccuccaaguaaggg

SEQ ID NO: 1335976 - RNA, 19 nt, Artificial Sequence
  Description of Artificial Sequence: Synthetic oligonucleotide
  Sense strand starting at position 3273 of SEQ ID NO: 1242282
cuuacuuggaggugaaacu

SEQ ID NO: 1335977 - RNA, 19 nt, Artificial Sequence
  Description of Artificial Sequence: Synthetic oligonucleotide
  Antisense strand to SEQ ID NO: 1335976
aguuucaccuccaaguaag

SEQ ID NO: 1335978 - RNA, 19 nt, Artificial Sequence
  Description of Artificial Sequence: Synthetic oligonucleotide
  Sense strand starting at position 3302 of SEQ ID NO: 1242282
agcaaauaauuaggaagua

SEQ ID NO: 1335979 - RNA, 19 nt, Artificial Sequence
  Description of Artificial Sequence: Synthetic oligonucleotide
  Antisense strand to SEQ ID NO: 1335978
uacuuccuaauuauuugcu

SEQ ID NO: 1335980 - RNA, 19 nt, Artificial Sequence
  Description of Artificial Sequence: Synthetic oligonucleotide
  Sense strand starting at position 3303 of SEQ ID NO: 1242282
gcaaauaauuaggaaguau

SEQ ID NO: 1335981 - RNA, 19 nt, Artificial Sequence
  Description of Artificial Sequence: Synthetic oligonucleotide
  Antisense strand to SEQ ID NO: 1335980
auacuuccuaauuauuugc

SEQ ID NO: 1335982 - RNA, 19 nt, Artificial Sequence
  Description of Artificial Sequence: Synthetic oligonucleotide
  Sense strand starting at position 3429 of SEQ ID NO: 1242282
gugcccuugagugguuauu

SEQ ID NO: 1335983 - RNA, 19 nt, Artificial Sequence
  Description of Artificial Sequence: Synthetic oligonucleotide
  Antisense strand to SEQ ID NO: 1335982
aauaaccacucaagggcac

SEQ ID NO: 1335984 - RNA, 19 nt, Artificial Sequence
  Description of Artificial Sequence: Synthetic oligonucleotide
  Sense strand starting at position 3490 of SEQ ID NO: 1242282
uuuacugcugucugucauu

SEQ ID NO: 1335985 - RNA, 19 nt, Artificial Sequence
  Description of Artificial Sequence: Synthetic oligonucleotide
  Antisense strand to SEQ ID NO: 1335984
aaugacagacagcaguaaa

SEQ ID NO: 1335986 - RNA, 19 nt, Artificial Sequence
  Description of Artificial Sequence: Synthetic oligonucleotide
  Sense strand starting at position 3495 of SEQ ID NO: 1242282
ugcugucugucauuaagaa

SEQ ID NO: 1335987 - RNA, 19 nt, Artificial Sequence
  Description of Artificial Sequence: Synthetic oligonucleotide
  Antisense strand to SEQ ID NO: 1335986
uucuuaaugacagacagca

SEQ ID NO: 1335988 - RNA, 19 nt, Artificial Sequence
  Description of Artificial Sequence: Synthetic oligonucleotide
  Sense strand starting at position 3496 of SEQ ID NO: 1242282
gcugucugucauuaagaau

SEQ ID NO: 1335989 - RNA, 19 nt, Artificial Sequence
  Description of Artificial Sequence: Synthetic oligonucleotide
  Antisense strand to SEQ ID NO: 1335988
auucuuaaugacagacagc

SEQ ID NO: 1335990 - RNA, 19 nt, Artificial Sequence
  Description of Artificial Sequence: Synthetic oligonucleotide
  Sense strand starting at position 3522 of SEQ ID NO: 1242282
uagggcauucguuagaguu

SEQ ID NO: 1335991 - RNA, 19 nt, Artificial Sequence
  Description of Artificial Sequence: Synthetic oligonucleotide
  Antisense strand to SEQ ID NO: 1335990
aacucuaacgaaugcccua

SEQ ID NO: 1335992 - RNA, 19 nt, Artificial Sequence
  Description of Artificial Sequence: Synthetic oligonucleotide
  Sense strand starting at position 3529 of SEQ ID NO: 1242282
uucguuagaguuuacccua

SEQ ID NO: 1335993 - RNA, 19 nt, Artificial Sequence
  Description of Artificial Sequence: Synthetic oligonucleotide
  Antisense strand to SEQ ID NO: 1335992
uaggguaaacucuaacgaa

SEQ ID NO: 1335994 - RNA, 19 nt, Artificial Sequence
  Description of Artificial Sequence: Synthetic oligonucleotide
  Sense strand starting at position 3532 of SEQ ID NO: 1242282
guuagaguuuacccuaauu

SEQ ID NO: 1335995 - RNA, 19 nt, Artificial Sequence
  Description of Artificial Sequence: Synthetic oligonucleotide
  Antisense strand to SEQ ID NO: 1335994
aauuaggguaaacucuaac

SEQ ID NO: 1335996 - RNA, 19 nt, Artificial Sequence
  Description of Artificial Sequence: Synthetic oligonucleotide
  Sense strand starting at position 3564 of SEQ ID NO: 1242282
ugauaaaguucucauuaag

SEQ ID NO: 1335997 - RNA, 19 nt, Artificial Sequence
  Description of Artificial Sequence: Synthetic oligonucleotide
  Antisense strand to SEQ ID NO: 1335996
cuuaaugagaacuuuauca

SEQ ID NO: 1335998 - RNA, 19 nt, Artificial Sequence
  Description of Artificial Sequence: Synthetic oligonucleotide
  Sense strand starting at position 3574 of SEQ ID NO: 1242282
cucauuaagcuuuaggaau

SEQ ID NO: 1335999 - RNA, 19 nt, Artificial Sequence
  Description of Artificial Sequence: Synthetic oligonucleotide
  Antisense strand to SEQ ID NO: 1335998
auuccuaaagcuuaaugag

SEQ ID NO: 1336000 - RNA, 19 nt, Artificial Sequence
  Description of Artificial Sequence: Synthetic oligonucleotide
  Sense strand starting at position 3612 of SEQ ID NO: 1242282
ggccacucuucuguauaca

SEQ ID NO: 1336001 - RNA, 19 nt, Artificial Sequence
  Description of Artificial Sequence: Synthetic oligonucleotide
  Antisense strand to SEQ ID NO: 1336000
uguauacagaagaguggcc

SEQ ID NO: 1336002 - RNA, 19 nt, Artificial Sequence
  Description of Artificial Sequence: Synthetic oligonucleotide
  Sense strand starting at position 3797 of SEQ ID NO: 1242282
cuucgaacuucuguacuca

SEQ ID NO: 1336003 - RNA, 19 nt, Artificial Sequence
  Description of Artificial Sequence: Synthetic oligonucleotide
  Antisense strand to SEQ ID NO: 1336002
ugaguacagaaguucgaag

SEQ ID NO: 1336004 - RNA, 19 nt, Artificial Sequence
  Description of Artificial Sequence: Synthetic oligonucleotide
  Sense strand starting at position 3798 of SEQ ID NO: 1242282
uucgaacuucuguacucaa

SEQ ID NO: 1336005 - RNA, 19 nt, Artificial Sequence
  Description of Artificial Sequence: Synthetic oligonucleotide
  Antisense strand to SEQ ID NO: 1336004
uugaguacagaaguucgaa

SEQ ID NO: 1336006 - RNA, 19 nt, Artificial Sequence
  Description of Artificial Sequence: Synthetic oligonucleotide
  Sense strand starting at position 3831 of SEQ ID NO: 1242282
ucagccuccucaguagaua

SEQ ID NO: 1336007 - RNA, 19 nt, Artificial Sequence
  Description of Artificial Sequence: Synthetic oligonucleotide
  Antisense strand to SEQ ID NO: 1336006
uaucuacugaggaggcuga

SEQ ID NO: 1336008 - RNA, 19 nt, Artificial Sequence
  Description of Artificial Sequence: Synthetic oligonucleotide
  Sense strand starting at position 3944 of SEQ ID NO: 1242282
ggccucaagugauauuucu

SEQ ID NO: 1336009 - RNA, 19 nt, Artificial Sequence
  Description of Artificial Sequence: Synthetic oligonucleotide
  Antisense strand to SEQ ID NO: 1336008
agaaauaucacuugaggcc

SEQ ID NO: 1336010 - RNA, 19 nt, Artificial Sequence
  Description of Artificial Sequence: Synthetic oligonucleotide
  Sense strand starting at position 3963 of SEQ ID NO: 1242282
gccucagccugucacauuu

SEQ ID NO: 1336011 - RNA, 19 nt, Artificial Sequence
  Description of Artificial Sequence: Synthetic oligonucleotide
  Antisense strand to SEQ ID NO: 1336010
aaaugugacaggcugaggc

SEQ ID NO: 1336012 - RNA, 19 nt, Artificial Sequence
  Description of Artificial Sequence: Synthetic oligonucleotide
  Sense strand starting at position 55 of SEQ ID NO: 1242283
cccaaaucauggcugauua

SEQ ID NO: 1336013 - RNA, 19 nt, Artificial Sequence
  Description of Artificial Sequence: Synthetic oligonucleotide
  Antisense strand to SEQ ID NO: 1336012
uaaucagccaugauuuggg

SEQ ID NO: 1336014 - RNA, 19 nt, Artificial Sequence
  Description of Artificial Sequence: Synthetic oligonucleotide
  Sense strand starting at position 56 of SEQ ID NO: 1242283
ccaaaucauggcugauuau

SEQ ID NO: 1336015 - RNA, 19 nt, Artificial Sequence
  Description of Artificial Sequence: Synthetic oligonucleotide
  Antisense strand to SEQ ID NO: 1336014
auaaucagccaugauuugg

SEQ ID NO: 1336016 - RNA, 19 nt, Artificial Sequence
  Description of Artificial Sequence: Synthetic oligonucleotide
  Sense strand starting at position 62 of SEQ ID NO: 1242283
cauggcugauuaucaggua

SEQ ID NO: 1336017 - RNA, 19 nt, Artificial Sequence
  Description of Artificial Sequence: Synthetic oligonucleotide
  Antisense strand to SEQ ID NO: 1336016
uaccugauaaucagccaug

SEQ ID NO: 1336018 - RNA, 19 nt, Artificial Sequence
  Description of Artificial Sequence: Synthetic oligonucleotide
  Sense strand starting at position 97 of SEQ ID NO: 1242283
ccaguuugccagcaaacca

SEQ ID NO: 1336019 - RNA, 19 nt, Artificial Sequence
  Description of Artificial Sequence: Synthetic oligonucleotide
  Antisense strand to SEQ ID NO: 1336018
ugguuugcuggcaaacugg

SEQ ID NO: 1336020 - RNA, 19 nt, Artificial Sequence
  Description of Artificial Sequence: Synthetic oligonucleotide
  Sense strand starting at position 138 of SEQ ID NO: 1242283
gggucagugugauucuaag

SEQ ID NO: 1336021 - RNA, 19 nt, Artificial Sequence
  Description of Artificial Sequence: Synthetic oligonucleotide
  Antisense strand to SEQ ID NO: 1336020
cuuagaaucacacugaccc

SEQ ID NO: 1336022 - RNA, 19 nt, Artificial Sequence
  Description of Artificial Sequence: Synthetic oligonucleotide
  Sense strand starting at position 198 of SEQ ID NO: 1242283
caugcauuagaguacaguu

SEQ ID NO: 1336023 - RNA, 19 nt, Artificial Sequence
  Description of Artificial Sequence: Synthetic oligonucleotide
  Antisense strand to SEQ ID NO: 1336022
aacuguacucuaaugcaug

SEQ ID NO: 1336024 - RNA, 19 nt, Artificial Sequence
  Description of Artificial Sequence: Synthetic oligonucleotide
  Sense strand starting at position 207 of SEQ ID NO: 1242283
gaguacaguuuccuuagga

SEQ ID NO: 1336025 - RNA, 19 nt, Artificial Sequence
  Description of Artificial Sequence: Synthetic oligonucleotide
  Antisense strand to SEQ ID NO: 1336024
uccuaaggaaacuguacuc

SEQ ID NO: 1336026 - RNA, 19 nt, Artificial Sequence
  Description of Artificial Sequence: Synthetic oligonucleotide
  Sense strand starting at position 208 of SEQ ID NO: 1242283
aguacaguuuccuuaggaa

SEQ ID NO: 1336027 - RNA, 19 nt, Artificial Sequence
  Description of Artificial Sequence: Synthetic oligonucleotide
  Antisense strand to SEQ ID NO: 1336026
uuccuaaggaaacuguacu

SEQ ID NO: 1336028 - RNA, 19 nt, Artificial Sequence
  Description of Artificial Sequence: Synthetic oligonucleotide
  Sense strand starting at position 317 of SEQ ID NO: 1242283
ucugaaggucgauaggagu

SEQ ID NO: 1336029 - RNA, 19 nt, Artificial Sequence
  Description of Artificial Sequence: Synthetic oligonucleotide
  Antisense strand to SEQ ID NO: 1336028
acuccuaucgaccuucaga

SEQ ID NO: 1336030 - RNA, 19 nt, Artificial Sequence
  Description of Artificial Sequence: Synthetic oligonucleotide
  Sense strand starting at position 324 of SEQ ID NO: 1242283
gucgauaggaguuagaauu

SEQ ID NO: 1336031 - RNA, 19 nt, Artificial Sequence
  Description of Artificial Sequence: Synthetic oligonucleotide
  Antisense strand to SEQ ID NO: 1336030
aauucuaacuccuaucgac

SEQ ID NO: 1336032 - RNA, 19 nt, Artificial Sequence
  Description of Artificial Sequence: Synthetic oligonucleotide
  Sense strand starting at position 438 of SEQ ID NO: 1242283
ggccaaaugugucuaacua

SEQ ID NO: 1336033 - RNA, 19 nt, Artificial Sequence
  Description of Artificial Sequence: Synthetic oligonucleotide
  Antisense strand to SEQ ID NO: 1336032
uaguuagacacauuuggcc

SEQ ID NO: 1336034 - RNA, 19 nt, Artificial Sequence
  Description of Artificial Sequence: Synthetic oligonucleotide
  Sense strand starting at position 439 of SEQ ID NO: 1242283
gccaaaugugucuaacuaa

SEQ ID NO: 1336035 - RNA, 19 nt, Artificial Sequence
  Description of Artificial Sequence: Synthetic oligonucleotide
  Antisense strand to SEQ ID NO: 1336034
uuaguuagacacauuuggc

SEQ ID NO: 1336036 - RNA, 19 nt, Artificial Sequence
  Description of Artificial Sequence: Synthetic oligonucleotide
  Sense strand starting at position 1278 of SEQ ID NO: 1242283
ggaaguucuuacucuggaa

SEQ ID NO: 1336037 - RNA, 19 nt, Artificial Sequence
  Description of Artificial Sequence: Synthetic oligonucleotide
  Antisense strand to SEQ ID NO: 1336036
uuccagaguaagaacuucc

SEQ ID NO: 1336038 - RNA, 19 nt, Artificial Sequence
  Description of Artificial Sequence: Synthetic oligonucleotide
  Sense strand starting at position 1280 of SEQ ID NO: 1242283
aaguucuuacucuggaagu

SEQ ID NO: 1336039 - RNA, 19 nt, Artificial Sequence
  Description of Artificial Sequence: Synthetic oligonucleotide
  Antisense strand to SEQ ID NO: 1336038
acuuccagaguaagaacuu

SEQ ID NO: 1336040 - RNA, 19 nt, Artificial Sequence
  Description of Artificial Sequence: Synthetic oligonucleotide
  Sense strand starting at position 1365 of SEQ ID NO: 1242283
gguuucugggcguauagau

SEQ ID NO: 1336041 - RNA, 19 nt, Artificial Sequence
  Description of Artificial Sequence: Synthetic oligonucleotide
  Antisense strand to SEQ ID NO: 1336040
aucuauacgcccagaaacc

SEQ ID NO: 1336042 - RNA, 19 nt, Artificial Sequence
  Description of Artificial Sequence: Synthetic oligonucleotide
  Sense strand starting at position 1473 of SEQ ID NO: 1242283
ccucccugcuggguugaaa

SEQ ID NO: 1336043 - RNA, 19 nt, Artificial Sequence
  Description of Artificial Sequence: Synthetic oligonucleotide
  Antisense strand to SEQ ID NO: 1336042
uuucaacccagcagggagg

SEQ ID NO: 1336044 - RNA, 19 nt, Artificial Sequence
  Description of Artificial Sequence: Synthetic oligonucleotide
  Sense strand starting at position 1537 of SEQ ID NO: 1242283
acucgagaguuacuugaag

SEQ ID NO: 1336045 - RNA, 19 nt, Artificial Sequence
  Description of Artificial Sequence: Synthetic oligonucleotide
  Antisense strand to SEQ ID NO: 1336044
cuucaaguaacucucgagu

SEQ ID NO: 1336046 - RNA, 19 nt, Artificial Sequence
  Description of Artificial Sequence: Synthetic oligonucleotide
  Sense strand starting at position 1544 of SEQ ID NO: 1242283
aguuacuugaagcgaauga

SEQ ID NO: 1336047 - RNA, 19 nt, Artificial Sequence
  Description of Artificial Sequence: Synthetic oligonucleotide
  Antisense strand to SEQ ID NO: 1336046
ucauucgcuucaaguaacu

SEQ ID NO: 1336048 - RNA, 19 nt, Artificial Sequence
  Description of Artificial Sequence: Synthetic oligonucleotide
  Sense strand starting at position 1571 of SEQ ID NO: 1242283
agcagaaaugccugugauc

SEQ ID NO: 1336049 - RNA, 19 nt, Artificial Sequence
  Description of Artificial Sequence: Synthetic oligonucleotide
  Antisense strand to SEQ ID NO: 1336048
gaucacaggcauuucugcu

SEQ ID NO: 1336050 - RNA, 19 nt, Artificial Sequence
  Description of Artificial Sequence: Synthetic oligonucleotide
  Sense strand starting at position 1582 of SEQ ID NO: 1242283
cugugauccugauuguuua

SEQ ID NO: 1336051 - RNA, 19 nt, Artificial Sequence
  Description of Artificial Sequence: Synthetic oligonucleotide
  Antisense strand to SEQ ID NO: 1336050
uaaacaaucaggaucacag

SEQ ID NO: 1336052 - RNA, 19 nt, Artificial Sequence
  Description of Artificial Sequence: Synthetic oligonucleotide
  Sense strand starting at position 1585 of SEQ ID NO: 1242283
ugauccugauuguuuauua

SEQ ID NO: 1336053 - RNA, 19 nt, Artificial Sequence
  Description of Artificial Sequence: Synthetic oligonucleotide
  Antisense strand to SEQ ID NO: 1336052
uaauaaacaaucaggauca

SEQ ID NO: 1336054 - RNA, 19 nt, Artificial Sequence
  Description of Artificial Sequence: Synthetic oligonucleotide
  Sense strand starting at position 1589 of SEQ ID NO: 1242283
ccugauuguuuauuaauag

SEQ ID NO: 1336055 - RNA, 19 nt, Artificial Sequence
  Description of Artificial Sequence: Synthetic oligonucleotide
  Antisense strand to SEQ ID NO: 1336054
cuauuaauaaacaaucagg

SEQ ID NO: 1336056 - RNA, 19 nt, Artificial Sequence
  Description of Artificial Sequence: Synthetic oligonucleotide
  Sense strand starting at position 1624 of SEQ ID NO: 1242283
cguuuccaucuggaauuau

SEQ ID NO: 1336057 - RNA, 19 nt, Artificial Sequence
  Description of Artificial Sequence: Synthetic oligonucleotide
  Antisense strand to SEQ ID NO: 1336056
auaauuccagauggaaacg

SEQ ID NO: 1336058 - RNA, 19 nt, Artificial Sequence
  Description of Artificial Sequence: Synthetic oligonucleotide
  Sense strand starting at position 2178 of SEQ ID NO: 1242283
gaaggaugucugggacgga

SEQ ID NO: 1336059 - RNA, 19 nt, Artificial Sequence
  Description of Artificial Sequence: Synthetic oligonucleotide
  Antisense strand to SEQ ID NO: 1336058
uccgucccagacauccuuc

SEQ ID NO: 1336060 - RNA, 19 nt, Artificial Sequence
  Description of Artificial Sequence: Synthetic oligonucleotide
  Sense strand starting at position 2199 of SEQ ID NO: 1242283
accacauggugcucaaaga

SEQ ID NO: 1336061 - RNA, 19 nt, Artificial Sequence
  Description of Artificial Sequence: Synthetic oligonucleotide
  Antisense strand to SEQ ID NO: 1336060
ucuuugagcaccauguggu

SEQ ID NO: 1336062 - RNA, 19 nt, Artificial Sequence
  Description of Artificial Sequence: Synthetic oligonucleotide
  Sense strand starting at position 2248 of SEQ ID NO: 1242283
acaagucguuuacuuagau

SEQ ID NO: 1336063 - RNA, 19 nt, Artificial Sequence
  Description of Artificial Sequence: Synthetic oligonucleotide
  Antisense strand to SEQ ID NO: 1336062
aucuaaguaaacgacuugu

SEQ ID NO: 1336064 - RNA, 19 nt, Artificial Sequence
  Description of Artificial Sequence: Synthetic oligonucleotide
  Sense strand starting at position 2281 of SEQ ID NO: 1242283
uuuaguaaucccugccaga

SEQ ID NO: 1336065 - RNA, 19 nt, Artificial Sequence
  Description of Artificial Sequence: Synthetic oligonucleotide
  Antisense strand to SEQ ID NO: 1336064
ucuggcagggauuacuaaa

SEQ ID NO: 1336066 - RNA, 19 nt, Artificial Sequence
  Description of Artificial Sequence: Synthetic oligonucleotide
  Sense strand starting at position 2310 of SEQ ID NO: 1242283
guguuuggccauuaugauu

SEQ ID NO: 1336067 - RNA, 19 nt, Artificial Sequence
  Description of Artificial Sequence: Synthetic oligonucleotide
  Antisense strand to SEQ ID NO: 1336066
aaucauaauggccaaacac

SEQ ID NO: 1336068 - RNA, 19 nt, Artificial Sequence
  Description of Artificial Sequence: Synthetic oligonucleotide
  Sense strand starting at position 2468 of SEQ ID NO: 1242283
guggguccucagggaaguu

SEQ ID NO: 1336069 - RNA, 19 nt, Artificial Sequence
  Description of Artificial Sequence: Synthetic oligonucleotide
  Antisense strand to SEQ ID NO: 1336068
aacuucccugaggacccac

SEQ ID NO: 1336070 - RNA, 19 nt, Artificial Sequence
  Description of Artificial Sequence: Synthetic oligonucleotide
  Sense strand starting at position 2469 of SEQ ID NO: 1242283
uggguccucagggaaguua

SEQ ID NO: 1336071 - RNA, 19 nt, Artificial Sequence
  Description of Artificial Sequence: Synthetic oligonucleotide
  Antisense strand to SEQ ID NO: 1336070
uaacuucccugaggaccca

SEQ ID NO: 1336072 - RNA, 19 nt, Artificial Sequence
  Description of Artificial Sequence: Synthetic oligonucleotide
  Sense strand starting at position 2849 of SEQ ID NO: 1242283
ugaucuuucggagaauucu

SEQ ID NO: 1336073 - RNA, 19 nt, Artificial Sequence
  Description of Artificial Sequence: Synthetic oligonucleotide
  Antisense strand to SEQ ID NO: 1336072
agaauucuccgaaagauca

SEQ ID NO: 1336074 - RNA, 19 nt, Artificial Sequence
  Description of Artificial Sequence: Synthetic oligonucleotide
  Sense strand starting at position 2855 of SEQ ID NO: 1242283
uucggagaauucuauuuaa

SEQ ID NO: 1336075 - RNA, 19 nt, Artificial Sequence
  Description of Artificial Sequence: Synthetic oligonucleotide
  Antisense strand to SEQ ID NO: 1336074
uuaaauagaauucuccgaa

SEQ ID NO: 1336076 - RNA, 19 nt, Artificial Sequence
  Description of Artificial Sequence: Synthetic oligonucleotide
  Sense strand starting at position 2989 of SEQ ID NO: 1242283
guggcaagacugcaucaau

SEQ ID NO: 1336077 - RNA, 19 nt, Artificial Sequence
  Description of Artificial Sequence: Synthetic oligonucleotide
  Antisense strand to SEQ ID NO: 1336076
auugaugcagucuugccac

SEQ ID NO: 1336078 - RNA, 19 nt, Artificial Sequence
  Description of Artificial Sequence: Synthetic oligonucleotide
  Sense strand starting at position 2992 of SEQ ID NO: 1242283
gcaagacugcaucaauuau

SEQ ID NO: 1336079 - RNA, 19 nt, Artificial Sequence
  Description of Artificial Sequence: Synthetic oligonucleotide
  Antisense strand to SEQ ID NO: 1336078
auaauugaugcagucuugc

SEQ ID NO: 1336080 - RNA, 19 nt, Artificial Sequence
  Description of Artificial Sequence: Synthetic oligonucleotide
  Sense strand starting at position 3075 of SEQ ID NO: 1242283
acuugagccgucagucgua

SEQ ID NO: 1336081 - RNA, 19 nt, Artificial Sequence
  Description of Artificial Sequence: Synthetic oligonucleotide
  Antisense strand to SEQ ID NO: 1336080
uacgacugacggcucaagu

SEQ ID NO: 1336082 - RNA, 19 nt, Artificial Sequence
  Description of Artificial Sequence: Synthetic oligonucleotide
  Sense strand starting at position 3303 of SEQ ID NO: 1242283
uagagagcucagugugaca

SEQ ID NO: 1336083 - RNA, 19 nt, Artificial Sequence
  Description of Artificial Sequence: Synthetic oligonucleotide
  Antisense strand to SEQ ID NO: 1336082
ugucacacugagcucucua

SEQ ID NO: 1336084 - RNA, 19 nt, Artificial Sequence
  Description of Artificial Sequence: Synthetic oligonucleotide
  Sense strand starting at position 3644 of SEQ ID NO: 1242283
cuuguagacuuggucucua

SEQ ID NO: 1336085 - RNA, 19 nt, Artificial Sequence
  Description of Artificial Sequence: Synthetic oligonucleotide
  Antisense strand to SEQ ID NO: 1336084
uagagaccaagucuacaag

SEQ ID NO: 1336086 - RNA, 19 nt, Artificial Sequence
  Description of Artificial Sequence: Synthetic oligonucleotide
  Sense strand starting at position 3723 of SEQ ID NO: 1242283
ccagaaucggcggauucuu

SEQ ID NO: 1336087 - RNA, 19 nt, Artificial Sequence
  Description of Artificial Sequence: Synthetic oligonucleotide
  Antisense strand to SEQ ID NO: 1336086
aagaauccgccgauucugg

SEQ ID NO: 1336088 - RNA, 19 nt, Artificial Sequence
  Description of Artificial Sequence: Synthetic oligonucleotide
  Sense strand starting at position 3807 of SEQ ID NO: 1242283
gcgugucccaaguuuguuu

SEQ ID NO: 1336089 - RNA, 19 nt, Artificial Sequence
  Description of Artificial Sequence: Synthetic oligonucleotide
  Antisense strand to SEQ ID NO: 1336088
aaacaaacuugggacacgc

SEQ ID NO: 1336090 - RNA, 19 nt, Artificial Sequence
  Description of Artificial Sequence: Synthetic oligonucleotide
  Sense strand starting at position 3816 of SEQ ID NO: 1242283
aaguuuguuucuucugaug

SEQ ID NO: 1336091 - RNA, 19 nt, Artificial Sequence
  Description of Artificial Sequence: Synthetic oligonucleotide
  Antisense strand to SEQ ID NO: 1336090
caucagaagaaacaaacuu

SEQ ID NO: 1336092 - RNA, 19 nt, Artificial Sequence
  Description of Artificial Sequence: Synthetic oligonucleotide
  Sense strand starting at position 22 of SEQ ID NO: 1242284
ccgguuugccugggacaga

SEQ ID NO: 1336093 - RNA, 19 nt, Artificial Sequence
  Description of Artificial Sequence: Synthetic oligonucleotide
  Antisense strand to SEQ ID NO: 1336092
ucugucccaggcaaaccgg

SEQ ID NO: 1336094 - RNA, 19 nt, Artificial Sequence
  Description of Artificial Sequence: Synthetic oligonucleotide
  Sense strand starting at position 39 of SEQ ID NO: 1242284
gaaggaugucugggacgga

SEQ ID NO: 1336095 - RNA, 19 nt, Artificial Sequence
  Description of Artificial Sequence: Synthetic oligonucleotide
  Antisense strand to SEQ ID NO: 1336094
uccgucccagacauccuuc

SEQ ID NO: 1336096 - RNA, 19 nt, Artificial Sequence
  Description of Artificial Sequence: Synthetic oligonucleotide
  Sense strand starting at position 60 of SEQ ID NO: 1242284
accacauggugcucaaaga

SEQ ID NO: 1336097 - RNA, 19 nt, Artificial Sequence
  Description of Artificial Sequence: Synthetic oligonucleotide
  Antisense strand to SEQ ID NO: 1336096
ucuuugagcaccauguggu

SEQ ID NO: 1336098 - RNA, 19 nt, Artificial Sequence
  Description of Artificial Sequence: Synthetic oligonucleotide
  Sense strand starting at position 105 of SEQ ID NO: 1242284
cccuacaagucguuuacuu

SEQ ID NO: 1336099 - RNA, 19 nt, Artificial Sequence
  Description of Artificial Sequence: Synthetic oligonucleotide
  Antisense strand to SEQ ID NO: 1336098
aaguaaacgacuuguaggg

SEQ ID NO: 1336100 - RNA, 19 nt, Artificial Sequence
  Description of Artificial Sequence: Synthetic oligonucleotide
  Sense strand starting at position 109 of SEQ ID NO: 1242284
acaagucguuuacuuagau

SEQ ID NO: 1336101 - RNA, 19 nt, Artificial Sequence
  Description of Artificial Sequence: Synthetic oligonucleotide
  Antisense strand to SEQ ID NO: 1336100
aucuaaguaaacgacuugu

SEQ ID NO: 1336102 - RNA, 19 nt, Artificial Sequence
  Description of Artificial Sequence: Synthetic oligonucleotide
  Sense strand starting at position 110 of SEQ ID NO: 1242284
caagucguuuacuuagauc

SEQ ID NO: 1336103 - RNA, 19 nt, Artificial Sequence
  Description of Artificial Sequence: Synthetic oligonucleotide
  Antisense strand to SEQ ID NO: 1336102
gaucuaaguaaacgacuug

SEQ ID NO: 1336104 - RNA, 19 nt, Artificial Sequence
  Description of Artificial Sequence: Synthetic oligonucleotide
  Sense strand starting at position 142 of SEQ ID NO: 1242284
uuuaguaaucccugccaga

SEQ ID NO: 1336105 - RNA, 19 nt, Artificial Sequence
  Description of Artificial Sequence: Synthetic oligonucleotide
  Antisense strand to SEQ ID NO: 1336104
ucuggcagggauuacuaaa

SEQ ID NO: 1336106 - RNA, 19 nt, Artificial Sequence
  Description of Artificial Sequence: Synthetic oligonucleotide
  Sense strand starting at position 171 of SEQ ID NO: 1242284
guguuuggccauuaugauu

SEQ ID NO: 1336107 - RNA, 19 nt, Artificial Sequence
  Description of Artificial Sequence: Synthetic oligonucleotide
  Antisense strand to SEQ ID NO: 1336106
aaucauaauggccaaacac

SEQ ID NO: 1336108 - RNA, 19 nt, Artificial Sequence
  Description of Artificial Sequence: Synthetic oligonucleotide
  Sense strand starting at position 329 of SEQ ID NO: 1242284
guggguccucagggaaguu

SEQ ID NO: 1336109 - RNA, 19 nt, Artificial Sequence
  Description of Artificial Sequence: Synthetic oligonucleotide
  Antisense strand to SEQ ID NO: 1336108
aacuucccugaggacccac

SEQ ID NO: 1336110 - RNA, 19 nt, Artificial Sequence
  Description of Artificial Sequence: Synthetic oligonucleotide
  Sense strand starting at position 330 of SEQ ID NO: 1242284
uggguccucagggaaguua

SEQ ID NO: 1336111 - RNA, 19 nt, Artificial Sequence
  Description of Artificial Sequence: Synthetic oligonucleotide
  Antisense strand to SEQ ID NO: 1336110
uaacuucccugaggaccca

SEQ ID NO: 1336112 - RNA, 19 nt, Artificial Sequence
  Description of Artificial Sequence: Synthetic oligonucleotide
  Sense strand starting at position 710 of SEQ ID NO: 1242284
ugaucuuucggagaauucu

SEQ ID NO: 1336113 - RNA, 19 nt, Artificial Sequence
  Description of Artificial Sequence: Synthetic oligonucleotide
  Antisense strand to SEQ ID NO: 1336112
agaauucuccgaaagauca

SEQ ID NO: 1336114 - RNA, 19 nt, Artificial Sequence
  Description of Artificial Sequence: Synthetic oligonucleotide
  Sense strand starting at position 716 of SEQ ID NO: 1242284
uucggagaauucuauuuaa

SEQ ID NO: 1336115 - RNA, 19 nt, Artificial Sequence
  Description of Artificial Sequence: Synthetic oligonucleotide
  Antisense strand to SEQ ID NO: 1336114
uuaaauagaauucuccgaa

SEQ ID NO: 1336116 - RNA, 19 nt, Artificial Sequence
  Description of Artificial Sequence: Synthetic oligonucleotide
  Sense strand starting at position 850 of SEQ ID NO: 1242284
guggcaagacugcaucaau

SEQ ID NO: 1336117 - RNA, 19 nt, Artificial Sequence
  Description of Artificial Sequence: Synthetic oligonucleotide
  Antisense strand to SEQ ID NO: 1336116
auugaugcagucuugccac

SEQ ID NO: 1336118 - RNA, 19 nt, Artificial Sequence
  Description of Artificial Sequence: Synthetic oligonucleotide
  Sense strand starting at position 853 of SEQ ID NO: 1242284
gcaagacugcaucaauuau

SEQ ID NO: 1336119 - RNA, 19 nt, Artificial Sequence
  Description of Artificial Sequence: Synthetic oligonucleotide
  Antisense strand to SEQ ID NO: 1336118
auaauugaugcagucuugc

SEQ ID NO: 1336120 - RNA, 19 nt, Artificial Sequence
  Description of Artificial Sequence: Synthetic oligonucleotide
  Sense strand starting at position 936 of SEQ ID NO: 1242284
acuugagccgucagucgua

SEQ ID NO: 1336121 - RNA, 19 nt, Artificial Sequence
  Description of Artificial Sequence: Synthetic oligonucleotide
  Antisense strand to SEQ ID NO: 1336120
uacgacugacggcucaagu

SEQ ID NO: 1336122 - RNA, 19 nt, Artificial Sequence
  Description of Artificial Sequence: Synthetic oligonucleotide
  Sense strand starting at position 1164 of SEQ ID NO: 1242284
uagagagcucagugugaca

SEQ ID NO: 1336123 - RNA, 19 nt, Artificial Sequence
  Description of Artificial Sequence: Synthetic oligonucleotide
  Antisense strand to SEQ ID NO: 1336122
ugucacacugagcucucua

SEQ ID NO: 1336124 - RNA, 19 nt, Artificial Sequence
  Description of Artificial Sequence: Synthetic oligonucleotide
  Sense strand starting at position 1196 of SEQ ID NO: 1242284
gcuccaucugcugaauugu

SEQ ID NO: 1336125 - RNA, 19 nt, Artificial Sequence
  Description of Artificial Sequence: Synthetic oligonucleotide
  Antisense strand to SEQ ID NO: 1336124
acaauucagcagauggagc

SEQ ID NO: 1336126 - RNA, 19 nt, Artificial Sequence
  Description of Artificial Sequence: Synthetic oligonucleotide
  Sense strand starting at position 1205 of SEQ ID NO: 1242284
gcugaauuguccuccugau

SEQ ID NO: 1336127 - RNA, 19 nt, Artificial Sequence
  Description of Artificial Sequence: Synthetic oligonucleotide
  Antisense strand to SEQ ID NO: 1336126
aucaggaggacaauucagc

SEQ ID NO: 1336128 - RNA, 19 nt, Artificial Sequence
  Description of Artificial Sequence: Synthetic oligonucleotide
  Sense strand starting at position 1473 of SEQ ID NO: 1242284
guuacccgguuucucaaua

SEQ ID NO: 1336129 - RNA, 19 nt, Artificial Sequence
  Description of Artificial Sequence: Synthetic oligonucleotide
  Antisense strand to SEQ ID NO: 1336128
uauugagaaaccggguaac

SEQ ID NO: 1336130 - RNA, 19 nt, Artificial Sequence
  Description of Artificial Sequence: Synthetic oligonucleotide
  Sense strand starting at position 1474 of SEQ ID NO: 1242284
uuacccgguuucucaauau

SEQ ID NO: 1336131 - RNA, 19 nt, Artificial Sequence
  Description of Artificial Sequence: Synthetic oligonucleotide
  Antisense strand to SEQ ID NO: 1336130
auauugagaaaccggguaa

SEQ ID NO: 1336132 - RNA, 19 nt, Artificial Sequence
  Description of Artificial Sequence: Synthetic oligonucleotide
  Sense strand starting at position 1505 of SEQ ID NO: 1242284
cuuguagacuuggucucua

SEQ ID NO: 1336133 - RNA, 19 nt, Artificial Sequence
  Description of Artificial Sequence: Synthetic oligonucleotide
  Antisense strand to SEQ ID NO: 1336132
uagagaccaagucuacaag

SEQ ID NO: 1336134 - RNA, 19 nt, Artificial Sequence
  Description of Artificial Sequence: Synthetic oligonucleotide
  Sense strand starting at position 1584 of SEQ ID NO: 1242284
ccagaaucggcggauucuu

SEQ ID NO: 1336135 - RNA, 19 nt, Artificial Sequence
  Description of Artificial Sequence: Synthetic oligonucleotide
  Antisense strand to SEQ ID NO: 1336134
aagaauccgccgauucugg

SEQ ID NO: 1336136 - RNA, 19 nt, Artificial Sequence
  Description of Artificial Sequence: Synthetic oligonucleotide
  Sense strand starting at position 1668 of SEQ ID NO: 1242284
gcgugucccaaguuuguuu

SEQ ID NO: 1336137 - RNA, 19 nt, Artificial Sequence
  Description of Artificial Sequence: Synthetic oligonucleotide
  Antisense strand to SEQ ID NO: 1336136
aaacaaacuugggacacgc

SEQ ID NO: 1336138 - RNA, 19 nt, Artificial Sequence
  Description of Artificial Sequence: Synthetic oligonucleotide
  Sense strand starting at position 1675 of SEQ ID NO: 1242284
ccaaguuuguuucuucuga

SEQ ID NO: 1336139 - RNA, 19 nt, Artificial Sequence
  Description of Artificial Sequence: Synthetic oligonucleotide
  Antisense strand to SEQ ID NO: 1336138
ucagaagaaacaaacuugg

SEQ ID NO: 1336140 - RNA, 19 nt, Artificial Sequence
  Description of Artificial Sequence: Synthetic oligonucleotide
  Sense strand starting at position 1677 of SEQ ID NO: 1242284
aaguuuguuucuucugaug

SEQ ID NO: 1336141 - RNA, 19 nt, Artificial Sequence
  Description of Artificial Sequence: Synthetic oligonucleotide
  Antisense strand to SEQ ID NO: 1336140
caucagaagaaacaaacuu

SEQ ID NO: 1336142 - RNA, 19 nt, Artificial Sequence
  Description of Artificial Sequence: Synthetic oligonucleotide
  Sense strand starting at position 2651 of SEQ ID NO: 1242284
cgagaagucgagcacuaac

SEQ ID NO: 1336143 - RNA, 19 nt, Artificial Sequence
  Description of Artificial Sequence: Synthetic oligonucleotide
  Antisense strand to SEQ ID NO: 1336142
guuagugcucgacuucucg

SEQ ID NO: 1336144 - RNA, 19 nt, Artificial Sequence
  Description of Artificial Sequence: Synthetic oligonucleotide
  Sense strand starting at position 3014 of SEQ ID NO: 1242284
gcuuccucugcacaguuaa

SEQ ID NO: 1336145 - RNA, 19 nt, Artificial Sequence
  Description of Artificial Sequence: Synthetic oligonucleotide
  Antisense strand to SEQ ID NO: 1336144
uuaacugugcagaggaagc

SEQ ID NO: 1336146 - RNA, 19 nt, Artificial Sequence
  Description of Artificial Sequence: Synthetic oligonucleotide
  Sense strand starting at position 3253 of SEQ ID NO: 1242284
gacagaguuugaccaucuu

SEQ ID NO: 1336147 - RNA, 19 nt, Artificial Sequence
  Description of Artificial Sequence: Synthetic oligonucleotide
  Antisense strand to SEQ ID NO: 1336146
aagauggucaaacucuguc

SEQ ID NO: 1336148 - RNA, 19 nt, Artificial Sequence
  Description of Artificial Sequence: Synthetic oligonucleotide
  Sense strand starting at position 3400 of SEQ ID NO: 1242284
ggguccaacucugcuauca

SEQ ID NO: 1336149 - RNA, 19 nt, Artificial Sequence
  Description of Artificial Sequence: Synthetic oligonucleotide
  Antisense strand to SEQ ID NO: 1336148
ugauagcagaguuggaccc

SEQ ID NO: 1336150 - RNA, 19 nt, Artificial Sequence
  Description of Artificial Sequence: Synthetic oligonucleotide
  Sense strand starting at position 3425 of SEQ ID NO: 1242284
accuaugaggucugggaau

SEQ ID NO: 1336151 - RNA, 19 nt, Artificial Sequence
  Description of Artificial Sequence: Synthetic oligonucleotide
  Antisense strand to SEQ ID NO: 1336150
auucccagaccucauaggu

SEQ ID NO: 1336152 - RNA, 19 nt, Artificial Sequence
  Description of Artificial Sequence: Synthetic oligonucleotide
  Sense strand starting at position 3442 of SEQ ID NO: 1242284
augggaacuuguguuuaag

SEQ ID NO: 1336153 - RNA, 19 nt, Artificial Sequence
  Description of Artificial Sequence: Synthetic oligonucleotide
  Antisense strand to SEQ ID NO: 1336152
cuuaaacacaaguucccau

SEQ ID NO: 1336154 - RNA, 19 nt, Artificial Sequence
  Description of Artificial Sequence: Synthetic oligonucleotide
  Sense strand starting at position 3444 of SEQ ID NO: 1242284
gggaacuuguguuuaagga

SEQ ID NO: 1336155 - RNA, 19 nt, Artificial Sequence
  Description of Artificial Sequence: Synthetic oligonucleotide
  Antisense strand to SEQ ID NO: 1336154
uccuuaaacacaaguuccc

SEQ ID NO: 1336156 - RNA, 19 nt, Artificial Sequence
  Description of Artificial Sequence: Synthetic oligonucleotide
  Sense strand starting at position 3457 of SEQ ID NO: 1242284
uaaggagacuccuuaagug

SEQ ID NO: 1336157 - RNA, 19 nt, Artificial Sequence
  Description of Artificial Sequence: Synthetic oligonucleotide
  Antisense strand to SEQ ID NO: 1336156
cacuuaaggagucuccuua

SEQ ID NO: 1336158 - RNA, 19 nt, Artificial Sequence
  Description of Artificial Sequence: Synthetic oligonucleotide
  Sense strand starting at position 3461 of SEQ ID NO: 1242284
gagacuccuuaagugcaaa

SEQ ID NO: 1336159 - RNA, 19 nt, Artificial Sequence
  Description of Artificial Sequence: Synthetic oligonucleotide
  Antisense strand to SEQ ID NO: 1336158
uuugcacuuaaggagucuc

SEQ ID NO: 1336160 - RNA, 19 nt, Artificial Sequence
  Description of Artificial Sequence: Synthetic oligonucleotide
  Sense strand starting at position 3685 of SEQ ID NO: 1242284
cuuagucacagugauaugu

SEQ ID NO: 1336161 - RNA, 19 nt, Artificial Sequence
  Description of Artificial Sequence: Synthetic oligonucleotide
  Antisense strand to SEQ ID NO: 1336160
acauaucacugugacuaag

SEQ ID NO: 1336162 - RNA, 19 nt, Artificial Sequence
  Description of Artificial Sequence: Synthetic oligonucleotide
  Sense strand starting at position 3689 of SEQ ID NO: 1242284
gucacagugauaugucuau

SEQ ID NO: 1336163 - RNA, 19 nt, Artificial Sequence
  Description of Artificial Sequence: Synthetic oligonucleotide
  Antisense strand to SEQ ID NO: 1336162
auagacauaucacugugac

SEQ ID NO: 1336164 - RNA, 19 nt, Artificial Sequence
  Description of Artificial Sequence: Synthetic oligonucleotide
  Sense strand starting at position 3877 of SEQ ID NO: 1242284
cagucuuuaggcugaugaa

SEQ ID NO: 1336165 - RNA, 19 nt, Artificial Sequence
  Description of Artificial Sequence: Synthetic oligonucleotide
  Antisense strand to SEQ ID NO: 1336164
uucaucagccuaaagacug

SEQ ID NO: 1336166 - RNA, 19 nt, Artificial Sequence
  Description of Artificial Sequence: Synthetic oligonucleotide
  Sense strand starting at position 3878 of SEQ ID NO: 1242284
agucuuuaggcugaugaaa

SEQ ID NO: 1336167 - RNA, 19 nt, Artificial Sequence
  Description of Artificial Sequence: Synthetic oligonucleotide
  Antisense strand to SEQ ID NO: 1336166
uuucaucagccuaaagacu

SEQ ID NO: 1336168 - RNA, 19 nt, Artificial Sequence
  Description of Artificial Sequence: Synthetic oligonucleotide
  Sense strand starting at position 3949 of SEQ ID NO: 1242284
cagagagcacagugaucuu

SEQ ID NO: 1336169 - RNA, 19 nt, Artificial Sequence
  Description of Artificial Sequence: Synthetic oligonucleotide
  Antisense strand to SEQ ID NO: 1336168
aagaucacugugcucucug

SEQ ID NO: 1336170 - RNA, 19 nt, Artificial Sequence
  Description of Artificial Sequence: Synthetic oligonucleotide
  Sense strand starting at position 3975 of SEQ ID NO: 1242284
agcgggauucccgagagga

SEQ ID NO: 1336171 - RNA, 19 nt, Artificial Sequence
  Description of Artificial Sequence: Synthetic oligonucleotide
  Antisense strand to SEQ ID NO: 1336170
uccucucgggaaucccgcu

SEQ ID NO: 1336172 - RNA, 19 nt, Artificial Sequence
  Description of Artificial Sequence: Synthetic oligonucleotide
  Sense strand starting at position 116 of SEQ ID NO: 1242285
cucaacaauuguguguuaa

SEQ ID NO: 1336173 - RNA, 19 nt, Artificial Sequence
  Description of Artificial Sequence: Synthetic oligonucleotide
  Antisense strand to SEQ ID NO: 1336172
uuaacacacaauuguugag

SEQ ID NO: 1336174 - RNA, 19 nt, Artificial Sequence
  Description of Artificial Sequence: Synthetic oligonucleotide
  Sense strand starting at position 117 of SEQ ID NO: 1242285
ucaacaauuguguguuaau

SEQ ID NO: 1336175 - RNA, 19 nt, Artificial Sequence
  Description of Artificial Sequence: Synthetic oligonucleotide
  Antisense strand to SEQ ID NO: 1336174
auuaacacacaauuguuga

SEQ ID NO: 1336176 - RNA, 19 nt, Artificial Sequence
  Description of Artificial Sequence: Synthetic oligonucleotide
  Sense strand starting at position 136 of SEQ ID NO: 1242285
ccgauuccucuugggaaga

SEQ ID NO: 1336177 - RNA, 19 nt, Artificial Sequence
  Description of Artificial Sequence: Synthetic oligonucleotide
  Antisense strand to SEQ ID NO: 1336176
ucuucccaagaggaaucgg

SEQ ID NO: 1336178 - RNA, 19 nt, Artificial Sequence
  Description of Artificial Sequence: Synthetic oligonucleotide
  Sense strand starting at position 236 of SEQ ID NO: 1242285
ucuugucuuguguaaacau

SEQ ID NO: 1336179 - RNA, 19 nt, Artificial Sequence
  Description of Artificial Sequence: Synthetic oligonucleotide
  Antisense strand to SEQ ID NO: 1336178
auguuuacacaagacaaga

SEQ ID NO: 1336180 - RNA, 19 nt, Artificial Sequence
  Description of Artificial Sequence: Synthetic oligonucleotide
  Sense strand starting at position 310 of SEQ ID NO: 1242285
cgggaaggaugguuugcua

SEQ ID NO: 1336181 - RNA, 19 nt, Artificial Sequence
  Description of Artificial Sequence: Synthetic oligonucleotide
  Antisense strand to SEQ ID NO: 1336180
uagcaaaccauccuucccg

SEQ ID NO: 1336182 - RNA, 19 nt, Artificial Sequence
  Description of Artificial Sequence: Synthetic oligonucleotide
  Sense strand starting at position 313 of SEQ ID NO: 1242285
gaaggaugguuugcuagga

SEQ ID NO: 1336183 - RNA, 19 nt, Artificial Sequence
  Description of Artificial Sequence: Synthetic oligonucleotide
  Antisense strand to SEQ ID NO: 1336182
uccuagcaaaccauccuuc

SEQ ID NO: 1336184 - RNA, 19 nt, Artificial Sequence
  Description of Artificial Sequence: Synthetic oligonucleotide
  Sense strand starting at position 642 of SEQ ID NO: 1242285
cucaaaugggaguguagua

SEQ ID NO: 1336185 - RNA, 19 nt, Artificial Sequence
  Description of Artificial Sequence: Synthetic oligonucleotide
  Antisense strand to SEQ ID NO: 1336184
uacuacacucccauuugag

SEQ ID NO: 1336186 - RNA, 19 nt, Artificial Sequence
  Description of Artificial Sequence: Synthetic oligonucleotide
  Sense strand starting at position 658 of SEQ ID NO: 1242285
guaugugacgucaggagca

SEQ ID NO: 1336187 - RNA, 19 nt, Artificial Sequence
  Description of Artificial Sequence: Synthetic oligonucleotide
  Antisense strand to SEQ ID NO: 1336186
ugcuccugacgucacauac

SEQ ID NO: 1336188 - RNA, 19 nt, Artificial Sequence
  Description of Artificial Sequence: Synthetic oligonucleotide
  Sense strand starting at position 660 of SEQ ID NO: 1242285
augugacgucaggagcaaa

SEQ ID NO: 1336189 - RNA, 19 nt, Artificial Sequence
  Description of Artificial Sequence: Synthetic oligonucleotide
  Antisense strand to SEQ ID NO: 1336188
uuugcuccugacgucacau

SEQ ID NO: 1336190 - RNA, 19 nt, Artificial Sequence
  Description of Artificial Sequence: Synthetic oligonucleotide
  Sense strand starting at position 709 of SEQ ID NO: 1242285
aaguuugcugagcauacaa

SEQ ID NO: 1336191 - RNA, 19 nt, Artificial Sequence
  Description of Artificial Sequence: Synthetic oligonucleotide
  Antisense strand to SEQ ID NO: 1336190
uuguaugcucagcaaacuu

SEQ ID NO: 1336192 - RNA, 19 nt, Artificial Sequence
  Description of Artificial Sequence: Synthetic oligonucleotide
  Sense strand starting at position 837 of SEQ ID NO: 1242285
acagucucacuuugucaua

SEQ ID NO: 1336193 - RNA, 19 nt, Artificial Sequence
  Description of Artificial Sequence: Synthetic oligonucleotide
  Antisense strand to SEQ ID NO: 1336192
uaugacaaagugagacugu

SEQ ID NO: 1336194 - RNA, 19 nt, Artificial Sequence
  Description of Artificial Sequence: Synthetic oligonucleotide
  Sense strand starting at position 1431 of SEQ ID NO: 1242285
cucuacuuguacucaaagu

SEQ ID NO: 1336195 - RNA, 19 nt, Artificial Sequence
  Description of Artificial Sequence: Synthetic oligonucleotide
  Antisense strand to SEQ ID NO: 1336194
acuuugaguacaaguagag

SEQ ID NO: 1336196 - RNA, 19 nt, Artificial Sequence
  Description of Artificial Sequence: Synthetic oligonucleotide
  Sense strand starting at position 1458 of SEQ ID NO: 1242285
gaggucagccugugaacua

SEQ ID NO: 1336197 - RNA, 19 nt, Artificial Sequence
  Description of Artificial Sequence: Synthetic oligonucleotide
  Antisense strand to SEQ ID NO: 1336196
uaguucacaggcugaccuc

SEQ ID NO: 1336198 - RNA, 19 nt, Artificial Sequence
  Description of Artificial Sequence: Synthetic oligonucleotide
  Sense strand starting at position 1465 of SEQ ID NO: 1242285
gccugugaacuauacccau

SEQ ID NO: 1336199 - RNA, 19 nt, Artificial Sequence
  Description of Artificial Sequence: Synthetic oligonucleotide
  Antisense strand to SEQ ID NO: 1336198
auggguauaguucacaggc

SEQ ID NO: 1336200 - RNA, 19 nt, Artificial Sequence
  Description of Artificial Sequence: Synthetic oligonucleotide
  Sense strand starting at position 1507 of SEQ ID NO: 1242285
uucccuuagugagugauaa

SEQ ID NO: 1336201 - RNA, 19 nt, Artificial Sequence
  Description of Artificial Sequence: Synthetic oligonucleotide
  Antisense strand to SEQ ID NO: 1336200
uuaucacucacuaagggaa

SEQ ID NO: 1336202 - RNA, 19 nt, Artificial Sequence
  Description of Artificial Sequence: Synthetic oligonucleotide
  Sense strand starting at position 1508 of SEQ ID NO: 1242285
ucccuuagugagugauaaa

SEQ ID NO: 1336203 - RNA, 19 nt, Artificial Sequence
  Description of Artificial Sequence: Synthetic oligonucleotide
  Antisense strand to SEQ ID NO: 1336202
uuuaucacucacuaaggga

SEQ ID NO: 1336204 - RNA, 19 nt, Artificial Sequence
  Description of Artificial Sequence: Synthetic oligonucleotide
  Sense strand starting at position 1740 of SEQ ID NO: 1242285
uggcaaaggcuauaaauca

SEQ ID NO: 1336205 - RNA, 19 nt, Artificial Sequence
  Description of Artificial Sequence: Synthetic oligonucleotide
  Antisense strand to SEQ ID NO: 1336204
ugauuuauagccuuugcca

SEQ ID NO: 1336206 - RNA, 19 nt, Artificial Sequence
  Description of Artificial Sequence: Synthetic oligonucleotide
  Sense strand starting at position 2011 of SEQ ID NO: 1242285
ucuguccucagguguauuu

SEQ ID NO: 1336207 - RNA, 19 nt, Artificial Sequence
  Description of Artificial Sequence: Synthetic oligonucleotide
  Antisense strand to SEQ ID NO: 1336206
aaauacaccugaggacaga

SEQ ID NO: 1336208 - RNA, 19 nt, Artificial Sequence
  Description of Artificial Sequence: Synthetic oligonucleotide
  Sense strand starting at position 2218 of SEQ ID NO: 1242285
accagauuggugugguaac

SEQ ID NO: 1336209 - RNA, 19 nt, Artificial Sequence
  Description of Artificial Sequence: Synthetic oligonucleotide
  Antisense strand to SEQ ID NO: 1336208
guuaccacaccaaucuggu

SEQ ID NO: 1336210 - RNA, 19 nt, Artificial Sequence
  Description of Artificial Sequence: Synthetic oligonucleotide
  Sense strand starting at position 2292 of SEQ ID NO: 1242285
agggacuggcucugaacau

SEQ ID NO: 1336211 - RNA, 19 nt, Artificial Sequence
  Description of Artificial Sequence: Synthetic oligonucleotide
  Antisense strand to SEQ ID NO: 1336210
auguucagagccagucccu

SEQ ID NO: 1336212 - RNA, 19 nt, Artificial Sequence
  Description of Artificial Sequence: Synthetic oligonucleotide
  Sense strand starting at position 2310 of SEQ ID NO: 1242285
uuuguagaguuccuacuga

SEQ ID NO: 1336213 - RNA, 19 nt, Artificial Sequence
  Description of Artificial Sequence: Synthetic oligonucleotide
  Antisense strand to SEQ ID NO: 1336212
ucaguaggaacucuacaaa

SEQ ID NO: 1336214 - RNA, 19 nt, Artificial Sequence
  Description of Artificial Sequence: Synthetic oligonucleotide
  Sense strand starting at position 2383 of SEQ ID NO: 1242285
caagauagauaggaugauu

SEQ ID NO: 1336215 - RNA, 19 nt, Artificial Sequence
  Description of Artificial Sequence: Synthetic oligonucleotide
  Antisense strand to SEQ ID NO: 1336214
aaucauccuaucuaucuug

SEQ ID NO: 1336216 - RNA, 19 nt, Artificial Sequence
  Description of Artificial Sequence: Synthetic oligonucleotide
  Sense strand starting at position 2483 of SEQ ID NO: 1242285
aggccugaauugucagaug

SEQ ID NO: 1336217 - RNA, 19 nt, Artificial Sequence
  Description of Artificial Sequence: Synthetic oligonucleotide
  Antisense strand to SEQ ID NO: 1336216
caucugacaauucaggccu

SEQ ID NO: 1336218 - RNA, 19 nt, Artificial Sequence
  Description of Artificial Sequence: Synthetic oligonucleotide
  Sense strand starting at position 2521 of SEQ ID NO: 1242285
cuagccugagaauggaaau

SEQ ID NO: 1336219 - RNA, 19 nt, Artificial Sequence
  Description of Artificial Sequence: Synthetic oligonucleotide
  Antisense strand to SEQ ID NO: 1336218
auuuccauucucaggcuag

SEQ ID NO: 1336220 - RNA, 19 nt, Artificial Sequence
  Description of Artificial Sequence: Synthetic oligonucleotide
  Sense strand starting at position 2781 of SEQ ID NO: 1242285
gaugucucuugaucccagu

SEQ ID NO: 1336221 - RNA, 19 nt, Artificial Sequence
  Description of Artificial Sequence: Synthetic oligonucleotide
  Antisense strand to SEQ ID NO: 1336220
acugggaucaagagacauc

SEQ ID NO: 1336222 - RNA, 19 nt, Artificial Sequence
  Description of Artificial Sequence: Synthetic oligonucleotide
  Sense strand starting at position 3011 of SEQ ID NO: 1242285
auccgaggagcuggaauua

SEQ ID NO: 1336223 - RNA, 19 nt, Artificial Sequence
  Description of Artificial Sequence: Synthetic oligonucleotide
  Antisense strand to SEQ ID NO: 1336222
uaauuccagcuccucggau

SEQ ID NO: 1336224 - RNA, 19 nt, Artificial Sequence
  Description of Artificial Sequence: Synthetic oligonucleotide
  Sense strand starting at position 3187 of SEQ ID NO: 1242285
gccugugguggcuuucuua

SEQ ID NO: 1336225 - RNA, 19 nt, Artificial Sequence
  Description of Artificial Sequence: Synthetic oligonucleotide
  Antisense strand to SEQ ID NO: 1336224
uaagaaagccaccacaggc

SEQ ID NO: 1336226 - RNA, 19 nt, Artificial Sequence
  Description of Artificial Sequence: Synthetic oligonucleotide
  Sense strand starting at position 3224 of SEQ ID NO: 1242285
caauuagagcaguaacgua

SEQ ID NO: 1336227 - RNA, 19 nt, Artificial Sequence
  Description of Artificial Sequence: Synthetic oligonucleotide
  Antisense strand to SEQ ID NO: 1336226
uacguuacugcucuaauug

SEQ ID NO: 1336228 - RNA, 19 nt, Artificial Sequence
  Description of Artificial Sequence: Synthetic oligonucleotide
  Sense strand starting at position 3320 of SEQ ID NO: 1242285
aguguuugugugccaguuu

SEQ ID NO: 1336229 - RNA, 19 nt, Artificial Sequence
  Description of Artificial Sequence: Synthetic oligonucleotide
  Antisense strand to SEQ ID NO: 1336228
aaacuggcacacaaacacu

SEQ ID NO: 1336230 - RNA, 19 nt, Artificial Sequence
  Description of Artificial Sequence: Synthetic oligonucleotide
  Sense strand starting at position 3346 of SEQ ID NO: 1242285
aguaucaguuaucucauau

SEQ ID NO: 1336231 - RNA, 19 nt, Artificial Sequence
  Description of Artificial Sequence: Synthetic oligonucleotide
  Antisense strand to SEQ ID NO: 1336230
auaugagauaacugauacu

SEQ ID NO: 1336232 - RNA, 19 nt, Artificial Sequence
  Description of Artificial Sequence: Synthetic oligonucleotide
  Sense strand starting at position 3361 of SEQ ID NO: 1242285
auaucagcucuuggaggua

SEQ ID NO: 1336233 - RNA, 19 nt, Artificial Sequence
  Description of Artificial Sequence: Synthetic oligonucleotide
  Antisense strand to SEQ ID NO: 1336232
uaccuccaagagcugauau

SEQ ID NO: 1336234 - RNA, 19 nt, Artificial Sequence
  Description of Artificial Sequence: Synthetic oligonucleotide
  Sense strand starting at position 3437 of SEQ ID NO: 1242285
uaagaaaucugcuugaggu

SEQ ID NO: 1336235 - RNA, 19 nt, Artificial Sequence
  Description of Artificial Sequence: Synthetic oligonucleotide
  Antisense strand to SEQ ID NO: 1336234
accucaagcagauuucuua

SEQ ID NO: 1336236 - RNA, 19 nt, Artificial Sequence
  Description of Artificial Sequence: Synthetic oligonucleotide
  Sense strand starting at position 3438 of SEQ ID NO: 1242285
aagaaaucugcuugagguc

SEQ ID NO: 1336237 - RNA, 19 nt, Artificial Sequence
  Description of Artificial Sequence: Synthetic oligonucleotide
  Antisense strand to SEQ ID NO: 1336236
gaccucaagcagauuucuu

SEQ ID NO: 1336238 - RNA, 19 nt, Artificial Sequence
  Description of Artificial Sequence: Synthetic oligonucleotide
  Sense strand starting at position 3579 of SEQ ID NO: 1242285
gcuaacauuguuggucaaa

SEQ ID NO: 1336239 - RNA, 19 nt, Artificial Sequence
  Description of Artificial Sequence: Synthetic oligonucleotide
  Antisense strand to SEQ ID NO: 1336238
uuugaccaacaauguuagc

SEQ ID NO: 1336240 - RNA, 19 nt, Artificial Sequence
  Description of Artificial Sequence: Synthetic oligonucleotide
  Sense strand starting at position 3580 of SEQ ID NO: 1242285
cuaacauuguuggucaaag

SEQ ID NO: 1336241 - RNA, 19 nt, Artificial Sequence
  Description of Artificial Sequence: Synthetic oligonucleotide
  Antisense strand to SEQ ID NO: 1336240
cuuugaccaacaauguuag

SEQ ID NO: 1336242 - RNA, 19 nt, Artificial Sequence
  Description of Artificial Sequence: Synthetic oligonucleotide
  Sense strand starting at position 3592 of SEQ ID NO: 1242285
gucaaaggacuuugguuua

SEQ ID NO: 1336243 - RNA, 19 nt, Artificial Sequence
  Description of Artificial Sequence: Synthetic oligonucleotide
  Antisense strand to SEQ ID NO: 1336242
uaaaccaaaguccuuugac

SEQ ID NO: 1336244 - RNA, 19 nt, Artificial Sequence
  Description of Artificial Sequence: Synthetic oligonucleotide
  Sense strand starting at position 3595 of SEQ ID NO: 1242285
aaaggacuuugguuuauga

SEQ ID NO: 1336245 - RNA, 19 nt, Artificial Sequence
  Description of Artificial Sequence: Synthetic oligonucleotide
  Antisense strand to SEQ ID NO: 1336244
ucauaaaccaaaguccuuu

SEQ ID NO: 1336246 - RNA, 19 nt, Artificial Sequence
  Description of Artificial Sequence: Synthetic oligonucleotide
  Sense strand starting at position 3605 of SEQ ID NO: 1242285
gguuuaugacuagguggga

SEQ ID NO: 1336247 - RNA, 19 nt, Artificial Sequence
  Description of Artificial Sequence: Synthetic oligonucleotide
  Antisense strand to SEQ ID NO: 1336246
ucccaccuagucauaaacc

SEQ ID NO: 1336248 - RNA, 19 nt, Artificial Sequence
  Description of Artificial Sequence: Synthetic oligonucleotide
  Sense strand starting at position 3747 of SEQ ID NO: 1242285
ggcccaaacugugugaaug

SEQ ID NO: 1336249 - RNA, 19 nt, Artificial Sequence
  Description of Artificial Sequence: Synthetic oligonucleotide
  Antisense strand to SEQ ID NO: 1336248
cauucacacaguuugggcc

SEQ ID NO: 1336250 - RNA, 19 nt, Artificial Sequence
  Description of Artificial Sequence: Synthetic oligonucleotide
  Sense strand starting at position 3757 of SEQ ID NO: 1242285
gugugaauguuaccaacug

SEQ ID NO: 1336251 - RNA, 19 nt, Artificial Sequence
  Description of Artificial Sequence: Synthetic oligonucleotide
  Antisense strand to SEQ ID NO: 1336250
caguugguaacauucacac

SEQ ID NO: 1336252 - RNA, 19 nt, Artificial Sequence
  Description of Artificial Sequence: Synthetic oligonucleotide
  Sense strand starting at position 159 of SEQ ID NO: 1242286
aggguuaauuaucuccaaa

SEQ ID NO: 1336253 - RNA, 19 nt, Artificial Sequence
  Description of Artificial Sequence: Synthetic oligonucleotide
  Antisense strand to SEQ ID NO: 1336252
uuuggagauaauuaacccu

SEQ ID NO: 1336254 - RNA, 19 nt, Artificial Sequence
  Description of Artificial Sequence: Synthetic oligonucleotide
  Sense strand starting at position 331 of SEQ ID NO: 1242286
cgaaucuuggaguguaaac

SEQ ID NO: 1336255 - RNA, 19 nt, Artificial Sequence
  Description of Artificial Sequence: Synthetic oligonucleotide
  Antisense strand to SEQ ID NO: 1336254
guuuacacuccaagauucg

SEQ ID NO: 1336256 - RNA, 19 nt, Artificial Sequence
  Description of Artificial Sequence: Synthetic oligonucleotide
  Sense strand starting at position 340 of SEQ ID NO: 1242286
gaguguaaacauugugaag

SEQ ID NO: 1336257 - RNA, 19 nt, Artificial Sequence
  Description of Artificial Sequence: Synthetic oligonucleotide
  Antisense strand to SEQ ID NO: 1336256
cuucacaauguuuacacuc

SEQ ID NO: 1336258 - RNA, 19 nt, Artificial Sequence
  Description of Artificial Sequence: Synthetic oligonucleotide
  Sense strand starting at position 372 of SEQ ID NO: 1242286
agcucuuucggugaggaua

SEQ ID NO: 1336259 - RNA, 19 nt, Artificial Sequence
  Description of Artificial Sequence: Synthetic oligonucleotide
  Antisense strand to SEQ ID NO: 1336258
uauccucaccgaaagagcu

SEQ ID NO: 1336260 - RNA, 19 nt, Artificial Sequence
  Description of Artificial Sequence: Synthetic oligonucleotide
  Sense strand starting at position 423 of SEQ ID NO: 1242286
ggcauuugguuguucuaga

SEQ ID NO: 1336261 - RNA, 19 nt, Artificial Sequence
  Description of Artificial Sequence: Synthetic oligonucleotide
  Antisense strand to SEQ ID NO: 1336260
ucuagaacaaccaaaugcc

SEQ ID NO: 1336262 - RNA, 19 nt, Artificial Sequence
  Description of Artificial Sequence: Synthetic oligonucleotide
  Sense strand starting at position 424 of SEQ ID NO: 1242286
gcauuugguuguucuagaa

SEQ ID NO: 1336263 - RNA, 19 nt, Artificial Sequence
  Description of Artificial Sequence: Synthetic oligonucleotide
  Antisense strand to SEQ ID NO: 1336262
uucuagaacaaccaaaugc

SEQ ID NO: 1336264 - RNA, 19 nt, Artificial Sequence
  Description of Artificial Sequence: Synthetic oligonucleotide
  Sense strand starting at position 428 of SEQ ID NO: 1242286
uugguuguucuagaaguug

SEQ ID NO: 1336265 - RNA, 19 nt, Artificial Sequence
  Description of Artificial Sequence: Synthetic oligonucleotide
  Antisense strand to SEQ ID NO: 1336264
caacuucuagaacaaccaa

SEQ ID NO: 1336266 - RNA, 19 nt, Artificial Sequence
  Description of Artificial Sequence: Synthetic oligonucleotide
  Sense strand starting at position 543 of SEQ ID NO: 1242286
cucugacagagaugucagu

SEQ ID NO: 1336267 - RNA, 19 nt, Artificial Sequence
  Description of Artificial Sequence: Synthetic oligonucleotide
  Antisense strand to SEQ ID NO: 1336266
acugacaucucugucagag

SEQ ID NO: 1336268 - RNA, 19 nt, Artificial Sequence
  Description of Artificial Sequence: Synthetic oligonucleotide
  Sense strand starting at position 560 of SEQ ID NO: 1242286
guucucugggucgagacau

SEQ ID NO: 1336269 - RNA, 19 nt, Artificial Sequence
  Description of Artificial Sequence: Synthetic oligonucleotide
  Antisense strand to SEQ ID NO: 1336268
augucucgacccagagaac

SEQ ID NO: 1336270 - RNA, 19 nt, Artificial Sequence
  Description of Artificial Sequence: Synthetic oligonucleotide
  Sense strand starting at position 841 of SEQ ID NO: 1242286
aucuaauuucgugaggcgu

SEQ ID NO: 1336271 - RNA, 19 nt, Artificial Sequence
  Description of Artificial Sequence: Synthetic oligonucleotide
  Antisense strand to SEQ ID NO: 1336270
acgccucacgaaauuagau

SEQ ID NO: 1336272 - RNA, 19 nt, Artificial Sequence
  Description of Artificial Sequence: Synthetic oligonucleotide
  Sense strand starting at position 849 of SEQ ID NO: 1242286
ucgugaggcgugaguaauu

SEQ ID NO: 1336273 - RNA, 19 nt, Artificial Sequence
  Description of Artificial Sequence: Synthetic oligonucleotide
  Antisense strand to SEQ ID NO: 1336272
aauuacucacgccucacga

SEQ ID NO: 1336274 - RNA, 19 nt, Artificial Sequence
  Description of Artificial Sequence: Synthetic oligonucleotide
  Sense strand starting at position 873 of SEQ ID NO: 1242286
uguuaagaggaacguucua

SEQ ID NO: 1336275 - RNA, 19 nt, Artificial Sequence
  Description of Artificial Sequence: Synthetic oligonucleotide
  Antisense strand to SEQ ID NO: 1336274
uagaacguuccucuuaaca

SEQ ID NO: 1336276 - RNA, 19 nt, Artificial Sequence
  Description of Artificial Sequence: Synthetic oligonucleotide
  Sense strand starting at position 948 of SEQ ID NO: 1242286
gcaagaugucccuacaaac

SEQ ID NO: 1336277 - RNA, 19 nt, Artificial Sequence
  Description of Artificial Sequence: Synthetic oligonucleotide
  Antisense strand to SEQ ID NO: 1336276
guuuguagggacaucuugc

SEQ ID NO: 1336278 - RNA, 19 nt, Artificial Sequence
  Description of Artificial Sequence: Synthetic oligonucleotide
  Sense strand starting at position 1241 of SEQ ID NO: 1242286
cucgcuaaacuuuaccaga

SEQ ID NO: 1336279 - RNA, 19 nt, Artificial Sequence
  Description of Artificial Sequence: Synthetic oligonucleotide
  Antisense strand to SEQ ID NO: 1336278
ucugguaaaguuuagcgag

SEQ ID NO: 1336280 - RNA, 19 nt, Artificial Sequence
  Description of Artificial Sequence: Synthetic oligonucleotide
  Sense strand starting at position 2114 of SEQ ID NO: 1242286
cggcgagguuugacaguua

SEQ ID NO: 1336281 - RNA, 19 nt, Artificial Sequence
  Description of Artificial Sequence: Synthetic oligonucleotide
  Antisense strand to SEQ ID NO: 1336280
uaacugucaaaccucgccg

SEQ ID NO: 1336282 - RNA, 19 nt, Artificial Sequence
  Description of Artificial Sequence: Synthetic oligonucleotide
  Sense strand starting at position 2236 of SEQ ID NO: 1242286
cgcggaacgcuucugcaua

SEQ ID NO: 1336283 - RNA, 19 nt, Artificial Sequence
  Description of Artificial Sequence: Synthetic oligonucleotide
  Antisense strand to SEQ ID NO: 1336282
uaugcagaagcguuccgcg

SEQ ID NO: 1336284 - RNA, 19 nt, Artificial Sequence
  Description of Artificial Sequence: Synthetic oligonucleotide
  Sense strand starting at position 2398 of SEQ ID NO: 1242286
cuaucauuauuggcucaga

SEQ ID NO: 1336285 - RNA, 19 nt, Artificial Sequence
  Description of Artificial Sequence: Synthetic oligonucleotide
  Antisense strand to SEQ ID NO: 1336284
ucugagccaauaaugauag

SEQ ID NO: 1336286 - RNA, 19 nt, Artificial Sequence
  Description of Artificial Sequence: Synthetic oligonucleotide
  Sense strand starting at position 2408 of SEQ ID NO: 1242286
uggcucagauccucuugau

SEQ ID NO: 1336287 - RNA, 19 nt, Artificial Sequence
  Description of Artificial Sequence: Synthetic oligonucleotide
  Antisense strand to SEQ ID NO: 1336286
aucaagaggaucugagcca

SEQ ID NO: 1336288 - RNA, 19 nt, Artificial Sequence
  Description of Artificial Sequence: Synthetic oligonucleotide
  Sense strand starting at position 2448 of SEQ ID NO: 1242286
aagagauaauucccauggu

SEQ ID NO: 1336289 - RNA, 19 nt, Artificial Sequence
  Description of Artificial Sequence: Synthetic oligonucleotide
  Antisense strand to SEQ ID NO: 1336288
accaugggaauuaucucuu

SEQ ID NO: 1336290 - RNA, 19 nt, Artificial Sequence
  Description of Artificial Sequence: Synthetic oligonucleotide
  Sense strand starting at position 2451 of SEQ ID NO: 1242286
agauaauucccaugguaua

SEQ ID NO: 1336291 - RNA, 19 nt, Artificial Sequence
  Description of Artificial Sequence: Synthetic oligonucleotide
  Antisense strand to SEQ ID NO: 1336290
uauaccaugggaauuaucu

SEQ ID NO: 1336292 - RNA, 19 nt, Artificial Sequence
  Description of Artificial Sequence: Synthetic oligonucleotide
  Sense strand starting at position 2452 of SEQ ID NO: 1242286
gauaauucccaugguauag

SEQ ID NO: 1336293 - RNA, 19 nt, Artificial Sequence
  Description of Artificial Sequence: Synthetic oligonucleotide
  Antisense strand to SEQ ID NO: 1336292
cuauaccaugggaauuauc

SEQ ID NO: 1336294 - RNA, 19 nt, Artificial Sequence
  Description of Artificial Sequence: Synthetic oligonucleotide
  Sense strand starting at position 2582 of SEQ ID NO: 1242286
guauuuauuuagugaccau

SEQ ID NO: 1336295 - RNA, 19 nt, Artificial Sequence
  Description of Artificial Sequence: Synthetic oligonucleotide
  Antisense strand to SEQ ID NO: 1336294
auggucacuaaauaaauac

SEQ ID NO: 1336296 - RNA, 19 nt, Artificial Sequence
  Description of Artificial Sequence: Synthetic oligonucleotide
  Sense strand starting at position 2600 of SEQ ID NO: 1242286
ucugcuugccuugugcuaa

SEQ ID NO: 1336297 - RNA, 19 nt, Artificial Sequence
  Description of Artificial Sequence: Synthetic oligonucleotide
  Antisense strand to SEQ ID NO: 1336296
uuagcacaaggcaagcaga

SEQ ID NO: 1336298 - RNA, 19 nt, Artificial Sequence
  Description of Artificial Sequence: Synthetic oligonucleotide
  Sense strand starting at position 2712 of SEQ ID NO: 1242286
aauguuagugaguaccaga

SEQ ID NO: 1336299 - RNA, 19 nt, Artificial Sequence
  Description of Artificial Sequence: Synthetic oligonucleotide
  Antisense strand to SEQ ID NO: 1336298
ucugguacucacuaacauu

SEQ ID NO: 1336300 - RNA, 19 nt, Artificial Sequence
  Description of Artificial Sequence: Synthetic oligonucleotide
  Sense strand starting at position 2761 of SEQ ID NO: 1242286
ggguuugggagauguacuu

SEQ ID NO: 1336301 - RNA, 19 nt, Artificial Sequence
  Description of Artificial Sequence: Synthetic oligonucleotide
  Antisense strand to SEQ ID NO: 1336300
aaguacaucucccaaaccc

SEQ ID NO: 1336302 - RNA, 19 nt, Artificial Sequence
  Description of Artificial Sequence: Synthetic oligonucleotide
  Sense strand starting at position 2775 of SEQ ID NO: 1242286
uacuuaauucugggagggu

SEQ ID NO: 1336303 - RNA, 19 nt, Artificial Sequence
  Description of Artificial Sequence: Synthetic oligonucleotide
  Antisense strand to SEQ ID NO: 1336302
acccucccagaauuaagua

SEQ ID NO: 1336304 - RNA, 19 nt, Artificial Sequence
  Description of Artificial Sequence: Synthetic oligonucleotide
  Sense strand starting at position 3020 of SEQ ID NO: 1242286
ugaagugucccugcgccua

SEQ ID NO: 1336305 - RNA, 19 nt, Artificial Sequence
  Description of Artificial Sequence: Synthetic oligonucleotide
  Antisense strand to SEQ ID NO: 1336304
uaggcgcagggacacuuca

SEQ ID NO: 1336306 - RNA, 19 nt, Artificial Sequence
  Description of Artificial Sequence: Synthetic oligonucleotide
  Sense strand starting at position 3437 of SEQ ID NO: 1242286
auugaccucucuguagaau

SEQ ID NO: 1336307 - RNA, 19 nt, Artificial Sequence
  Description of Artificial Sequence: Synthetic oligonucleotide
  Antisense strand to SEQ ID NO: 1336306
auucuacagagaggucaau

SEQ ID NO: 1336308 - RNA, 19 nt, Artificial Sequence
  Description of Artificial Sequence: Synthetic oligonucleotide
  Sense strand starting at position 3450 of SEQ ID NO: 1242286
uagaaucgcgaauaauuga

SEQ ID NO: 1336309 - RNA, 19 nt, Artificial Sequence
  Description of Artificial Sequence: Synthetic oligonucleotide
  Antisense strand to SEQ ID NO: 1336308
ucaauuauucgcgauucua

SEQ ID NO: 1336310 - RNA, 19 nt, Artificial Sequence
  Description of Artificial Sequence: Synthetic oligonucleotide
  Sense strand starting at position 3465 of SEQ ID NO: 1242286
uugacaugguuccuuugau

SEQ ID NO: 1336311 - RNA, 19 nt, Artificial Sequence
  Description of Artificial Sequence: Synthetic oligonucleotide
  Antisense strand to SEQ ID NO: 1336310
aucaaaggaaccaugucaa

SEQ ID NO: 1336312 - RNA, 19 nt, Artificial Sequence
  Description of Artificial Sequence: Synthetic oligonucleotide
  Sense strand starting at position 3466 of SEQ ID NO: 1242286
ugacaugguuccuuugauu

SEQ ID NO: 1336313 - RNA, 19 nt, Artificial Sequence
  Description of Artificial Sequence: Synthetic oligonucleotide
  Antisense strand to SEQ ID NO: 1336312
aaucaaaggaaccauguca

SEQ ID NO: 1336314 - RNA, 19 nt, Artificial Sequence
  Description of Artificial Sequence: Synthetic oligonucleotide
  Sense strand starting at position 3507 of SEQ ID NO: 1242286
uuaccuacacgucacagau

SEQ ID NO: 1336315 - RNA, 19 nt, Artificial Sequence
  Description of Artificial Sequence: Synthetic oligonucleotide
  Antisense strand to SEQ ID NO: 1336314
aucugugacguguagguaa

SEQ ID NO: 1336316 - RNA, 19 nt, Artificial Sequence
  Description of Artificial Sequence: Synthetic oligonucleotide
  Sense strand starting at position 3576 of SEQ ID NO: 1242286
uuggcucaaucuuuaaaug

SEQ ID NO: 1336317 - RNA, 19 nt, Artificial Sequence
  Description of Artificial Sequence: Synthetic oligonucleotide
  Antisense strand to SEQ ID NO: 1336316
cauuuaaagauugagccaa

SEQ ID NO: 1336318 - RNA, 19 nt, Artificial Sequence
  Description of Artificial Sequence: Synthetic oligonucleotide
  Sense strand starting at position 3577 of SEQ ID NO: 1242286
uggcucaaucuuuaaaugu

SEQ ID NO: 1336319 - RNA, 19 nt, Artificial Sequence
  Description of Artificial Sequence: Synthetic oligonucleotide
  Antisense strand to SEQ ID NO: 1336318
acauuuaaagauugagcca

SEQ ID NO: 1336320 - RNA, 19 nt, Artificial Sequence
  Description of Artificial Sequence: Synthetic oligonucleotide
  Sense strand starting at position 3652 of SEQ ID NO: 1242286
ucaucuaacugguugacuu

SEQ ID NO: 1336321 - RNA, 19 nt, Artificial Sequence
  Description of Artificial Sequence: Synthetic oligonucleotide
  Antisense strand to SEQ ID NO: 1336320
aagucaaccaguuagauga

SEQ ID NO: 1336322 - RNA, 19 nt, Artificial Sequence
  Description of Artificial Sequence: Synthetic oligonucleotide
  Sense strand starting at position 3678 of SEQ ID NO: 1242286
auaugcucaugacuuugaa

SEQ ID NO: 1336323 - RNA, 19 nt, Artificial Sequence
  Description of Artificial Sequence: Synthetic oligonucleotide
  Antisense strand to SEQ ID NO: 1336322
uucaaagucaugagcauau

SEQ ID NO: 1336324 - RNA, 19 nt, Artificial Sequence
  Description of Artificial Sequence: Synthetic oligonucleotide
  Sense strand starting at position 3756 of SEQ ID NO: 1242286
ucaagaucucauuggcauu

SEQ ID NO: 1336325 - RNA, 19 nt, Artificial Sequence
  Description of Artificial Sequence: Synthetic oligonucleotide
  Antisense strand to SEQ ID NO: 1336324
aaugccaaugagaucuuga

SEQ ID NO: 1336326 - RNA, 19 nt, Artificial Sequence
  Description of Artificial Sequence: Synthetic oligonucleotide
  Sense strand starting at position 3762 of SEQ ID NO: 1242286
ucucauuggcauuauugca

SEQ ID NO: 1336327 - RNA, 19 nt, Artificial Sequence
  Description of Artificial Sequence: Synthetic oligonucleotide
  Antisense strand to SEQ ID NO: 1336326
ugcaauaaugccaaugaga

SEQ ID NO: 1336328 - RNA, 19 nt, Artificial Sequence
  Description of Artificial Sequence: Synthetic oligonucleotide
  Sense strand starting at position 3896 of SEQ ID NO: 1242286
aaagcagauugguuauauc

SEQ ID NO: 1336329 - RNA, 19 nt, Artificial Sequence
  Description of Artificial Sequence: Synthetic oligonucleotide
  Antisense strand to SEQ ID NO: 1336328
gauauaaccaaucugcuuu

SEQ ID NO: 1336330 - RNA, 19 nt, Artificial Sequence
  Description of Artificial Sequence: Synthetic oligonucleotide
  Sense strand starting at position 3971 of SEQ ID NO: 1242286
auugguuaacauuggguua

SEQ ID NO: 1336331 - RNA, 19 nt, Artificial Sequence
  Description of Artificial Sequence: Synthetic oligonucleotide
  Antisense strand to SEQ ID NO: 1336330
uaacccaauguuaaccaau

SEQ ID NO: 1336332 - RNA, 19 nt, Artificial Sequence
  Description of Artificial Sequence: Synthetic oligonucleotide
  Sense strand starting at position 618 of SEQ ID NO: 1242287
agcuccgaguccucauauu

SEQ ID NO: 1336333 - RNA, 19 nt, Artificial Sequence
  Description of Artificial Sequence: Synthetic oligonucleotide
  Antisense strand to SEQ ID NO: 1336332
aauaugaggacucggagcu

SEQ ID NO: 1336334 - RNA, 19 nt, Artificial Sequence
  Description of Artificial Sequence: Synthetic oligonucleotide
  Sense strand starting at position 648 of SEQ ID NO: 1242287
gccucuaugcccgagagca

SEQ ID NO: 1336335 - RNA, 19 nt, Artificial Sequence
  Description of Artificial Sequence: Synthetic oligonucleotide
  Antisense strand to SEQ ID NO: 1336334
ugcucucgggcauagaggc

SEQ ID NO: 1336336 - RNA, 19 nt, Artificial Sequence
  Description of Artificial Sequence: Synthetic oligonucleotide
  Sense strand starting at position 727 of SEQ ID NO: 1242287
agacguaaugggugcuaua

SEQ ID NO: 1336337 - RNA, 19 nt, Artificial Sequence
  Description of Artificial Sequence: Synthetic oligonucleotide
  Antisense strand to SEQ ID NO: 1336336
uauagcacccauuacgucu

SEQ ID NO: 1336338 - RNA, 19 nt, Artificial Sequence
  Description of Artificial Sequence: Synthetic oligonucleotide
  Sense strand starting at position 748 of SEQ ID NO: 1242287
ggacguaaugggugcuaua

SEQ ID NO: 1336339 - RNA, 19 nt, Artificial Sequence
  Description of Artificial Sequence: Synthetic oligonucleotide
  Antisense strand to SEQ ID NO: 1336338
uauagcacccauuacgucc

SEQ ID NO: 1336340 - RNA, 19 nt, Artificial Sequence
  Description of Artificial Sequence: Synthetic oligonucleotide
  Sense strand starting at position 808 of SEQ ID NO: 1242287
cgaggacugucacugguaa

SEQ ID NO: 1336341 - RNA, 19 nt, Artificial Sequence
  Description of Artificial Sequence: Synthetic oligonucleotide
  Antisense strand to SEQ ID NO: 1336340
uuaccagugacaguccucg

SEQ ID NO: 1336342 - RNA, 19 nt, Artificial Sequence
  Description of Artificial Sequence: Synthetic oligonucleotide
  Sense strand starting at position 809 of SEQ ID NO: 1242287
gaggacugucacugguaac

SEQ ID NO: 1336343 - RNA, 19 nt, Artificial Sequence
  Description of Artificial Sequence: Synthetic oligonucleotide
  Antisense strand to SEQ ID NO: 1336342
guuaccagugacaguccuc

SEQ ID NO: 1336344 - RNA, 19 nt, Artificial Sequence
  Description of Artificial Sequence: Synthetic oligonucleotide
  Sense strand starting at position 810 of SEQ ID NO: 1242287
aggacugucacugguaaca

SEQ ID NO: 1336345 - RNA, 19 nt, Artificial Sequence
  Description of Artificial Sequence: Synthetic oligonucleotide
  Antisense strand to SEQ ID NO: 1336344
uguuaccagugacaguccu

SEQ ID NO: 1336346 - RNA, 19 nt, Artificial Sequence
  Description of Artificial Sequence: Synthetic oligonucleotide
  Sense strand starting at position 812 of SEQ ID NO: 1242287
gacugucacugguaacaca

SEQ ID NO: 1336347 - RNA, 19 nt, Artificial Sequence
  Description of Artificial Sequence: Synthetic oligonucleotide
  Antisense strand to SEQ ID NO: 1336346
uguguuaccagugacaguc

SEQ ID NO: 1336348 - RNA, 19 nt, Artificial Sequence
  Description of Artificial Sequence: Synthetic oligonucleotide
  Sense strand starting at position 848 of SEQ ID NO: 1242287
gagaaagggcuuugggcua

SEQ ID NO: 1336349 - RNA, 19 nt, Artificial Sequence
  Description of Artificial Sequence: Synthetic oligonucleotide
  Antisense strand to SEQ ID NO: 1336348
uagcccaaagcccuuucuc

SEQ ID NO: 1336350 - RNA, 19 nt, Artificial Sequence
  Description of Artificial Sequence: Synthetic oligonucleotide
  Sense strand starting at position 1132 of SEQ ID NO: 1242287
agcgacacccucuaauuaa

SEQ ID NO: 1336351 - RNA, 19 nt, Artificial Sequence
  Description of Artificial Sequence: Synthetic oligonucleotide
  Antisense strand to SEQ ID NO: 1336350
uuaauuagagggugucgcu

SEQ ID NO: 1336352 - RNA, 19 nt, Artificial Sequence
  Description of Artificial Sequence: Synthetic oligonucleotide
  Sense strand starting at position 1497 of SEQ ID NO: 1242287
gcacaugaauccucagagu

SEQ ID NO: 1336353 - RNA, 19 nt, Artificial Sequence
  Description of Artificial Sequence: Synthetic oligonucleotide
  Antisense strand to SEQ ID NO: 1336352
acucugaggauucaugugc

SEQ ID NO: 1336354 - RNA, 19 nt, Artificial Sequence
  Description of Artificial Sequence: Synthetic oligonucleotide
  Sense strand starting at position 1580 of SEQ ID NO: 1242287
cgacuucugccuuguaggu

SEQ ID NO: 1336355 - RNA, 19 nt, Artificial Sequence
  Description of Artificial Sequence: Synthetic oligonucleotide
  Antisense strand to SEQ ID NO: 1336354
accuacaaggcagaagucg

SEQ ID NO: 1336356 - RNA, 19 nt, Artificial Sequence
  Description of Artificial Sequence: Synthetic oligonucleotide
  Sense strand starting at position 1701 of SEQ ID NO: 1242287
agcggcuaguagucaaagu

SEQ ID NO: 1336357 - RNA, 19 nt, Artificial Sequence
  Description of Artificial Sequence: Synthetic oligonucleotide
  Antisense strand to SEQ ID NO: 1336356
acuuugacuacuagccgcu

SEQ ID NO: 1336358 - RNA, 19 nt, Artificial Sequence
  Description of Artificial Sequence: Synthetic oligonucleotide
  Sense strand starting at position 1710 of SEQ ID NO: 1242287
uagucaaagucagugugau

SEQ ID NO: 1336359 - RNA, 19 nt, Artificial Sequence
  Description of Artificial Sequence: Synthetic oligonucleotide
  Antisense strand to SEQ ID NO: 1336358
aucacacugacuuugacua

SEQ ID NO: 1336360 - RNA, 19 nt, Artificial Sequence
  Description of Artificial Sequence: Synthetic oligonucleotide
  Sense strand starting at position 1711 of SEQ ID NO: 1242287
agucaaagucagugugauu

SEQ ID NO: 1336361 - RNA, 19 nt, Artificial Sequence
  Description of Artificial Sequence: Synthetic oligonucleotide
  Antisense strand to SEQ ID NO: 1336360
aaucacacugacuuugacu

SEQ ID NO: 1336362 - RNA, 19 nt, Artificial Sequence
  Description of Artificial Sequence: Synthetic oligonucleotide
  Sense strand starting at position 1716 of SEQ ID NO: 1242287
aagucagugugauucccau

SEQ ID NO: 1336363 - RNA, 19 nt, Artificial Sequence
  Description of Artificial Sequence: Synthetic oligonucleotide
  Antisense strand to SEQ ID NO: 1336362
augggaaucacacugacuu

SEQ ID NO: 1336364 - RNA, 19 nt, Artificial Sequence
  Description of Artificial Sequence: Synthetic oligonucleotide
  Sense strand starting at position 1722 of SEQ ID NO: 1242287
gugugauucccaugcccuc

SEQ ID NO: 1336365 - RNA, 19 nt, Artificial Sequence
  Description of Artificial Sequence: Synthetic oligonucleotide
  Antisense strand to SEQ ID NO: 1336364
gagggcaugggaaucacac

SEQ ID NO: 1336366 - RNA, 19 nt, Artificial Sequence
  Description of Artificial Sequence: Synthetic oligonucleotide
  Sense strand starting at position 1776 of SEQ ID NO: 1242287
aauauucggcuagggaaau

SEQ ID NO: 1336367 - RNA, 19 nt, Artificial Sequence
  Description of Artificial Sequence: Synthetic oligonucleotide
  Antisense strand to SEQ ID NO: 1336366
auuucccuagccgaauauu

SEQ ID NO: 1336368 - RNA, 19 nt, Artificial Sequence
  Description of Artificial Sequence: Synthetic oligonucleotide
  Sense strand starting at position 1967 of SEQ ID NO: 1242287
guggcuaagcuccgaaacu

SEQ ID NO: 1336369 - RNA, 19 nt, Artificial Sequence
  Description of Artificial Sequence: Synthetic oligonucleotide
  Antisense strand to SEQ ID NO: 1336368
aguuucggagcuuagccac

SEQ ID NO: 1336370 - RNA, 19 nt, Artificial Sequence
  Description of Artificial Sequence: Synthetic oligonucleotide
  Sense strand starting at position 2027 of SEQ ID NO: 1242287
ccgacuggaucuuuaaauu

SEQ ID NO: 1336371 - RNA, 19 nt, Artificial Sequence
  Description of Artificial Sequence: Synthetic oligonucleotide
  Antisense strand to SEQ ID NO: 1336370
aauuuaaagauccagucgg

SEQ ID NO: 1336372 - RNA, 19 nt, Artificial Sequence
  Description of Artificial Sequence: Synthetic oligonucleotide
  Sense strand starting at position 2071 of SEQ ID NO: 1242287
uaacaaugggcgugucuuu

SEQ ID NO: 1336373 - RNA, 19 nt, Artificial Sequence
  Description of Artificial Sequence: Synthetic oligonucleotide
  Antisense strand to SEQ ID NO: 1336372
aaagacacgcccauuguua

SEQ ID NO: 1336374 - RNA, 19 nt, Artificial Sequence
  Description of Artificial Sequence: Synthetic oligonucleotide
  Sense strand starting at position 2109 of SEQ ID NO: 1242287
gagcuugggcuguaccaau

SEQ ID NO: 1336375 - RNA, 19 nt, Artificial Sequence
  Description of Artificial Sequence: Synthetic oligonucleotide
  Antisense strand to SEQ ID NO: 1336374
auugguacagcccaagcuc

SEQ ID NO: 1336376 - RNA, 19 nt, Artificial Sequence
  Description of Artificial Sequence: Synthetic oligonucleotide
  Sense strand starting at position 2234 of SEQ ID NO: 1242287
gcguggugucgggucugaa

SEQ ID NO: 1336377 - RNA, 19 nt, Artificial Sequence
  Description of Artificial Sequence: Synthetic oligonucleotide
  Antisense strand to SEQ ID NO: 1336376
uucagacccgacaccacgc

SEQ ID NO: 1336378 - RNA, 19 nt, Artificial Sequence
  Description of Artificial Sequence: Synthetic oligonucleotide
  Sense strand starting at position 2473 of SEQ ID NO: 1242287
gccuuuguaagggacuuua

SEQ ID NO: 1336379 - RNA, 19 nt, Artificial Sequence
  Description of Artificial Sequence: Synthetic oligonucleotide
  Antisense strand to SEQ ID NO: 1336378
uaaagucccuuacaaaggc

SEQ ID NO: 1336380 - RNA, 19 nt, Artificial Sequence
  Description of Artificial Sequence: Synthetic oligonucleotide
  Sense strand starting at position 2515 of SEQ ID NO: 1242287
gaggcccaugagugagaaa

SEQ ID NO: 1336381 - RNA, 19 nt, Artificial Sequence
  Description of Artificial Sequence: Synthetic oligonucleotide
  Antisense strand to SEQ ID NO: 1336380
uuucucacucaugggccuc

SEQ ID NO: 1336382 - RNA, 19 nt, Artificial Sequence
  Description of Artificial Sequence: Synthetic oligonucleotide
  Sense strand starting at position 2526 of SEQ ID NO: 1242287
gugagaaacucugagaccu

SEQ ID NO: 1336383 - RNA, 19 nt, Artificial Sequence
  Description of Artificial Sequence: Synthetic oligonucleotide
  Antisense strand to SEQ ID NO: 1336382
aggucucagaguuucucac

SEQ ID NO: 1336384 - RNA, 19 nt, Artificial Sequence
  Description of Artificial Sequence: Synthetic oligonucleotide
  Sense strand starting at position 2574 of SEQ ID NO: 1242287
cgaguagagucucugucuu

SEQ ID NO: 1336385 - RNA, 19 nt, Artificial Sequence
  Description of Artificial Sequence: Synthetic oligonucleotide
  Antisense strand to SEQ ID NO: 1336384
aagacagagacucuacucg

SEQ ID NO: 1336386 - RNA, 19 nt, Artificial Sequence
  Description of Artificial Sequence: Synthetic oligonucleotide
  Sense strand starting at position 2595 of SEQ ID NO: 1242287
gggaaauuguaucccucuu

SEQ ID NO: 1336387 - RNA, 19 nt, Artificial Sequence
  Description of Artificial Sequence: Synthetic oligonucleotide
  Antisense strand to SEQ ID NO: 1336386
aagagggauacaauuuccc

SEQ ID NO: 1336388 - RNA, 19 nt, Artificial Sequence
  Description of Artificial Sequence: Synthetic oligonucleotide
  Sense strand starting at position 2660 of SEQ ID NO: 1242287
cucauugaagcuuggaauu

SEQ ID NO: 1336389 - RNA, 19 nt, Artificial Sequence
  Description of Artificial Sequence: Synthetic oligonucleotide
  Antisense strand to SEQ ID NO: 1336388
aauuccaagcuucaaugag

SEQ ID NO: 1336390 - RNA, 19 nt, Artificial Sequence
  Description of Artificial Sequence: Synthetic oligonucleotide
  Sense strand starting at position 2686 of SEQ ID NO: 1242287
uggaaaggaucuuacaggu

SEQ ID NO: 1336391 - RNA, 19 nt, Artificial Sequence
  Description of Artificial Sequence: Synthetic oligonucleotide
  Antisense strand to SEQ ID NO: 1336390
accuguaagauccuuucca

SEQ ID NO: 1336392 - RNA, 19 nt, Artificial Sequence
  Description of Artificial Sequence: Synthetic oligonucleotide
  Sense strand starting at position 2690 of SEQ ID NO: 1242287
aaggaucuuacaggugagu

SEQ ID NO: 1336393 - RNA, 19 nt, Artificial Sequence
  Description of Artificial Sequence: Synthetic oligonucleotide
  Antisense strand to SEQ ID NO: 1336392
acucaccuguaagauccuu

SEQ ID NO: 1336394 - RNA, 19 nt, Artificial Sequence
  Description of Artificial Sequence: Synthetic oligonucleotide
  Sense strand starting at position 2692 of SEQ ID NO: 1242287
ggaucuuacaggugagucu

SEQ ID NO: 1336395 - RNA, 19 nt, Artificial Sequence
  Description of Artificial Sequence: Synthetic oligonucleotide
  Antisense strand to SEQ ID NO: 1336394
agacucaccuguaagaucc

SEQ ID NO: 1336396 - RNA, 19 nt, Artificial Sequence
  Description of Artificial Sequence: Synthetic oligonucleotide
  Sense strand starting at position 3110 of SEQ ID NO: 1242287
acgggaugucaccauguuu

SEQ ID NO: 1336397 - RNA, 19 nt, Artificial Sequence
  Description of Artificial Sequence: Synthetic oligonucleotide
  Antisense strand to SEQ ID NO: 1336396
aaacauggugacaucccgu

SEQ ID NO: 1336398 - RNA, 19 nt, Artificial Sequence
  Description of Artificial Sequence: Synthetic oligonucleotide
  Sense strand starting at position 3236 of SEQ ID NO: 1242287
aagcaaggcuuccagagau

SEQ ID NO: 1336399 - RNA, 19 nt, Artificial Sequence
  Description of Artificial Sequence: Synthetic oligonucleotide
  Antisense strand to SEQ ID NO: 1336398
aucucuggaagccuugcuu

SEQ ID NO: 1336400 - RNA, 19 nt, Artificial Sequence
  Description of Artificial Sequence: Synthetic oligonucleotide
  Sense strand starting at position 3306 of SEQ ID NO: 1242287
cagauuaccugcucgcuua

SEQ ID NO: 1336401 - RNA, 19 nt, Artificial Sequence
  Description of Artificial Sequence: Synthetic oligonucleotide
  Antisense strand to SEQ ID NO: 1336400
uaagcgagcagguaaucug

SEQ ID NO: 1336402 - RNA, 19 nt, Artificial Sequence
  Description of Artificial Sequence: Synthetic oligonucleotide
  Sense strand starting at position 3307 of SEQ ID NO: 1242287
agauuaccugcucgcuuaa

SEQ ID NO: 1336403 - RNA, 19 nt, Artificial Sequence
  Description of Artificial Sequence: Synthetic oligonucleotide
  Antisense strand to SEQ ID NO: 1336402
uuaagcgagcagguaaucu

SEQ ID NO: 1336404 - RNA, 19 nt, Artificial Sequence
  Description of Artificial Sequence: Synthetic oligonucleotide
  Sense strand starting at position 3380 of SEQ ID NO: 1242287
gagggugaugacugaaagu

SEQ ID NO: 1336405 - RNA, 19 nt, Artificial Sequence
  Description of Artificial Sequence: Synthetic oligonucleotide
  Antisense strand to SEQ ID NO: 1336404
acuuucagucaucacccuc

SEQ ID NO: 1336406 - RNA, 19 nt, Artificial Sequence
  Description of Artificial Sequence: Synthetic oligonucleotide
  Sense strand starting at position 3891 of SEQ ID NO: 1242287
gaaguuucccauugggaac

SEQ ID NO: 1336407 - RNA, 19 nt, Artificial Sequence
  Description of Artificial Sequence: Synthetic oligonucleotide
  Antisense strand to SEQ ID NO: 1336406
guucccaaugggaaacuuc

SEQ ID NO: 1336408 - RNA, 19 nt, Artificial Sequence
  Description of Artificial Sequence: Synthetic oligonucleotide
  Sense strand starting at position 3931 of SEQ ID NO: 1242287
ugaagugguagcgauaauc

SEQ ID NO: 1336409 - RNA, 19 nt, Artificial Sequence
  Description of Artificial Sequence: Synthetic oligonucleotide
  Antisense strand to SEQ ID NO: 1336408
gauuaucgcuaccacuuca

SEQ ID NO: 1336410 - RNA, 19 nt, Artificial Sequence
  Description of Artificial Sequence: Synthetic oligonucleotide
  Sense strand starting at position 3939 of SEQ ID NO: 1242287
uagcgauaaucagucugau

SEQ ID NO: 1336411 - RNA, 19 nt, Artificial Sequence
  Description of Artificial Sequence: Synthetic oligonucleotide
  Antisense strand to SEQ ID NO: 1336410
aucagacugauuaucgcua

SEQ ID NO: 1336412 - RNA, 19 nt, Artificial Sequence
  Description of Artificial Sequence: Synthetic oligonucleotide
  Sense strand starting at position 10 of SEQ ID NO: 1242288
ggcugugucaaguauauua

SEQ ID NO: 1336413 - RNA, 19 nt, Artificial Sequence
  Description of Artificial Sequence: Synthetic oligonucleotide
  Antisense strand to SEQ ID NO: 1336412
uaauauacuugacacagcc

SEQ ID NO: 1336414 - RNA, 19 nt, Artificial Sequence
  Description of Artificial Sequence: Synthetic oligonucleotide
  Sense strand starting at position 12 of SEQ ID NO: 1242288
cugugucaaguauauuaac

SEQ ID NO: 1336415 - RNA, 19 nt, Artificial Sequence
  Description of Artificial Sequence: Synthetic oligonucleotide
  Antisense strand to SEQ ID NO: 1336414
guuaauauacuugacacag

SEQ ID NO: 1336416 - RNA, 19 nt, Artificial Sequence
  Description of Artificial Sequence: Synthetic oligonucleotide
  Sense strand starting at position 68 of SEQ ID NO: 1242288
aaugguauacuuugaugag

SEQ ID NO: 1336417 - RNA, 19 nt, Artificial Sequence
  Description of Artificial Sequence: Synthetic oligonucleotide
  Antisense strand to SEQ ID NO: 1336416
cucaucaaaguauaccauu

SEQ ID NO: 1336418 - RNA, 19 nt, Artificial Sequence
  Description of Artificial Sequence: Synthetic oligonucleotide
  Sense strand starting at position 72 of SEQ ID NO: 1242288
guauacuuugaugaguuaa

SEQ ID NO: 1336419 - RNA, 19 nt, Artificial Sequence
  Description of Artificial Sequence: Synthetic oligonucleotide
  Antisense strand to SEQ ID NO: 1336418
uuaacucaucaaaguauac

SEQ ID NO: 1336420 - RNA, 19 nt, Artificial Sequence
  Description of Artificial Sequence: Synthetic oligonucleotide
  Sense strand starting at position 178 of SEQ ID NO: 1242288
agagucaaccacugucuga

SEQ ID NO: 1336421 - RNA, 19 nt, Artificial Sequence
  Description of Artificial Sequence: Synthetic oligonucleotide
  Antisense strand to SEQ ID NO: 1336420
ucagacagugguugacucu

SEQ ID NO: 1336422 - RNA, 19 nt, Artificial Sequence
  Description of Artificial Sequence: Synthetic oligonucleotide
  Sense strand starting at position 299 of SEQ ID NO: 1242288
guaccuaauuuguauaaac

SEQ ID NO: 1336423 - RNA, 19 nt, Artificial Sequence
  Description of Artificial Sequence: Synthetic oligonucleotide
  Antisense strand to SEQ ID NO: 1336422
guuuauacaaauuagguac

SEQ ID NO: 1336424 - RNA, 19 nt, Artificial Sequence
  Description of Artificial Sequence: Synthetic oligonucleotide
  Sense strand starting at position 800 of SEQ ID NO: 1242288
caacuugguugguuauaca

SEQ ID NO: 1336425 - RNA, 19 nt, Artificial Sequence
  Description of Artificial Sequence: Synthetic oligonucleotide
  Antisense strand to SEQ ID NO: 1336424
uguauaaccaaccaaguug

SEQ ID NO: 1336426 - RNA, 19 nt, Artificial Sequence
  Description of Artificial Sequence: Synthetic oligonucleotide
  Sense strand starting at position 877 of SEQ ID NO: 1242288
gcaacuuauuguguaaaga

SEQ ID NO: 1336427 - RNA, 19 nt, Artificial Sequence
  Description of Artificial Sequence: Synthetic oligonucleotide
  Antisense strand to SEQ ID NO: 1336426
ucuuuacacaauaaguugc

SEQ ID NO: 1336428 - RNA, 19 nt, Artificial Sequence
  Description of Artificial Sequence: Synthetic oligonucleotide
  Sense strand starting at position 940 of SEQ ID NO: 1242288
gccuuaggcuaauuaauua

SEQ ID NO: 1336429 - RNA, 19 nt, Artificial Sequence
  Description of Artificial Sequence: Synthetic oligonucleotide
  Antisense strand to SEQ ID NO: 1336428
uaauuaauuagccuaaggc

SEQ ID NO: 1336430 - RNA, 19 nt, Artificial Sequence
  Description of Artificial Sequence: Synthetic oligonucleotide
  Sense strand starting at position 963 of SEQ ID NO: 1242288
auacuauguguguaucuaa

SEQ ID NO: 1336431 - RNA, 19 nt, Artificial Sequence
  Description of Artificial Sequence: Synthetic oligonucleotide
  Antisense strand to SEQ ID NO: 1336430
uuagauacacacauaguau

SEQ ID NO: 1336432 - RNA, 19 nt, Artificial Sequence
  Description of Artificial Sequence: Synthetic oligonucleotide
  Sense strand starting at position 966 of SEQ ID NO: 1242288
cuauguguguaucuaauga

SEQ ID NO: 1336433 - RNA, 19 nt, Artificial Sequence
  Description of Artificial Sequence: Synthetic oligonucleotide
  Antisense strand to SEQ ID NO: 1336432
ucauuagauacacacauag

SEQ ID NO: 1336434 - RNA, 19 nt, Artificial Sequence
  Description of Artificial Sequence: Synthetic oligonucleotide
  Sense strand starting at position 1047 of SEQ ID NO: 1242288
ugguccucuguacauauau

SEQ ID NO: 1336435 - RNA, 19 nt, Artificial Sequence
  Description of Artificial Sequence: Synthetic oligonucleotide
  Antisense strand to SEQ ID NO: 1336434
auauauguacagaggacca

SEQ ID NO: 1336436 - RNA, 19 nt, Artificial Sequence
  Description of Artificial Sequence: Synthetic oligonucleotide
  Sense strand starting at position 1223 of SEQ ID NO: 1242288
guuguaaauuacuuaucag

SEQ ID NO: 1336437 - RNA, 19 nt, Artificial Sequence
  Description of Artificial Sequence: Synthetic oligonucleotide
  Antisense strand to SEQ ID NO: 1336436
cugauaaguaauuuacaac

SEQ ID NO: 1336438 - RNA, 19 nt, Artificial Sequence
  Description of Artificial Sequence: Synthetic oligonucleotide
  Sense strand starting at position 1226 of SEQ ID NO: 1242288
guaaauuacuuaucaggau

SEQ ID NO: 1336439 - RNA, 19 nt, Artificial Sequence
  Description of Artificial Sequence: Synthetic oligonucleotide
  Antisense strand to SEQ ID NO: 1336438
auccugauaaguaauuuac

SEQ ID NO: 1336440 - RNA, 19 nt, Artificial Sequence
  Description of Artificial Sequence: Synthetic oligonucleotide
  Sense strand starting at position 1259 of SEQ ID NO: 1242288
gugugaugucuccaaaguc

SEQ ID NO: 1336441 - RNA, 19 nt, Artificial Sequence
  Description of Artificial Sequence: Synthetic oligonucleotide
  Antisense strand to SEQ ID NO: 1336440
gacuuuggagacaucacac

SEQ ID NO: 1336442 - RNA, 19 nt, Artificial Sequence
  Description of Artificial Sequence: Synthetic oligonucleotide
  Sense strand starting at position 1307 of SEQ ID NO: 1242288
cggccaaauacagaguauu

SEQ ID NO: 1336443 - RNA, 19 nt, Artificial Sequence
  Description of Artificial Sequence: Synthetic oligonucleotide
  Antisense strand to SEQ ID NO: 1336442
aauacucuguauuuggccg

SEQ ID NO: 1336444 - RNA, 19 nt, Artificial Sequence
  Description of Artificial Sequence: Synthetic oligonucleotide
  Sense strand starting at position 2002 of SEQ ID NO: 1242288
ggagguaccugagugguua

SEQ ID NO: 1336445 - RNA, 19 nt, Artificial Sequence
  Description of Artificial Sequence: Synthetic oligonucleotide
  Antisense strand to SEQ ID NO: 1336444
uaaccacucagguaccucc

SEQ ID NO: 1336446 - RNA, 19 nt, Artificial Sequence
  Description of Artificial Sequence: Synthetic oligonucleotide
  Sense strand starting at position 2003 of SEQ ID NO: 1242288
gagguaccugagugguuau

SEQ ID NO: 1336447 - RNA, 19 nt, Artificial Sequence
  Description of Artificial Sequence: Synthetic oligonucleotide
  Antisense strand to SEQ ID NO: 1336446
auaaccacucagguaccuc

SEQ ID NO: 1336448 - RNA, 19 nt, Artificial Sequence
  Description of Artificial Sequence: Synthetic oligonucleotide
  Sense strand starting at position 2004 of SEQ ID NO: 1242288
agguaccugagugguuauu

SEQ ID NO: 1336449 - RNA, 19 nt, Artificial Sequence
  Description of Artificial Sequence: Synthetic oligonucleotide
  Antisense strand to SEQ ID NO: 1336448
aauaaccacucagguaccu

SEQ ID NO: 1336450 - RNA, 19 nt, Artificial Sequence
  Description of Artificial Sequence: Synthetic oligonucleotide
  Sense strand starting at position 2006 of SEQ ID NO: 1242288
guaccugagugguuauuaa

SEQ ID NO: 1336451 - RNA, 19 nt, Artificial Sequence
  Description of Artificial Sequence: Synthetic oligonucleotide
  Antisense strand to SEQ ID NO: 1336450
uuaauaaccacucagguac

SEQ ID NO: 1336452 - RNA, 19 nt, Artificial Sequence
  Description of Artificial Sequence: Synthetic oligonucleotide
  Sense strand starting at position 2033 of SEQ ID NO: 1242288
acgguaauuguagacguca

SEQ ID NO: 1336453 - RNA, 19 nt, Artificial Sequence
  Description of Artificial Sequence: Synthetic oligonucleotide
  Antisense strand to SEQ ID NO: 1336452
ugacgucuacaauuaccgu

SEQ ID NO: 1336454 - RNA, 19 nt, Artificial Sequence
  Description of Artificial Sequence: Synthetic oligonucleotide
  Sense strand starting at position 2123 of SEQ ID NO: 1242288
gaugauuuagcuuguugua

SEQ ID NO: 1336455 - RNA, 19 nt, Artificial Sequence
  Description of Artificial Sequence: Synthetic oligonucleotide
  Antisense strand to SEQ ID NO: 1336454
uacaacaagcuaaaucauc

SEQ ID NO: 1336456 - RNA, 19 nt, Artificial Sequence
  Description of Artificial Sequence: Synthetic oligonucleotide
  Sense strand starting at position 2125 of SEQ ID NO: 1242288
ugauuuagcuuguuguaca

SEQ ID NO: 1336457 - RNA, 19 nt, Artificial Sequence
  Description of Artificial Sequence: Synthetic oligonucleotide
  Antisense strand to SEQ ID NO: 1336456
uguacaacaagcuaaauca

SEQ ID NO: 1336458 - RNA, 19 nt, Artificial Sequence
  Description of Artificial Sequence: Synthetic oligonucleotide
  Sense strand starting at position 2728 of SEQ ID NO: 1242288
ggagaauggcguuaaccga

SEQ ID NO: 1336459 - RNA, 19 nt, Artificial Sequence
  Description of Artificial Sequence: Synthetic oligonucleotide
  Antisense strand to SEQ ID NO: 1336458
ucgguuaacgccauucucc

SEQ ID NO: 1336460 - RNA, 19 nt, Artificial Sequence
  Description of Artificial Sequence: Synthetic oligonucleotide
  Sense strand starting at position 2862 of SEQ ID NO: 1242288
ugagaacauucuguaauag

SEQ ID NO: 1336461 - RNA, 19 nt, Artificial Sequence
  Description of Artificial Sequence: Synthetic oligonucleotide
  Antisense strand to SEQ ID NO: 1336460
cuauuacagaauguucuca

SEQ ID NO: 1336462 - RNA, 19 nt, Artificial Sequence
  Description of Artificial Sequence: Synthetic oligonucleotide
  Sense strand starting at position 2922 of SEQ ID NO: 1242288
uccuguacuccuuauguau

SEQ ID NO: 1336463 - RNA, 19 nt, Artificial Sequence
  Description of Artificial Sequence: Synthetic oligonucleotide
  Antisense strand to SEQ ID NO: 1336462
auacauaaggaguacagga

SEQ ID NO: 1336464 - RNA, 19 nt, Artificial Sequence
  Description of Artificial Sequence: Synthetic oligonucleotide
  Sense strand starting at position 2992 of SEQ ID NO: 1242288
gugcaaaguagugacauaa

SEQ ID NO: 1336465 - RNA, 19 nt, Artificial Sequence
  Description of Artificial Sequence: Synthetic oligonucleotide
  Antisense strand to SEQ ID NO: 1336464
uuaugucacuacuuugcac

SEQ ID NO: 1336466 - RNA, 19 nt, Artificial Sequence
  Description of Artificial Sequence: Synthetic oligonucleotide
  Sense strand starting at position 3061 of SEQ ID NO: 1242288
guaugcagauuugaagaga

SEQ ID NO: 1336467 - RNA, 19 nt, Artificial Sequence
  Description of Artificial Sequence: Synthetic oligonucleotide
  Antisense strand to SEQ ID NO: 1336466
ucucuucaaaucugcauac

SEQ ID NO: 1336468 - RNA, 19 nt, Artificial Sequence
  Description of Artificial Sequence: Synthetic oligonucleotide
  Sense strand starting at position 3118 of SEQ ID NO: 1242288
uuccuugagcuguauuugu

SEQ ID NO: 1336469 - RNA, 19 nt, Artificial Sequence
  Description of Artificial Sequence: Synthetic oligonucleotide
  Antisense strand to SEQ ID NO: 1336468
acaaauacagcucaaggaa

SEQ ID NO: 1336470 - RNA, 19 nt, Artificial Sequence
  Description of Artificial Sequence: Synthetic oligonucleotide
  Sense strand starting at position 3137 of SEQ ID NO: 1242288
ugcagcaauguuuaggaga

SEQ ID NO: 1336471 - RNA, 19 nt, Artificial Sequence
  Description of Artificial Sequence: Synthetic oligonucleotide
  Antisense strand to SEQ ID NO: 1336470
ucuccuaaacauugcugca

SEQ ID NO: 1336472 - RNA, 19 nt, Artificial Sequence
  Description of Artificial Sequence: Synthetic oligonucleotide
  Sense strand starting at position 3145 of SEQ ID NO: 1242288
uguuuaggagauugacuuu

SEQ ID NO: 1336473 - RNA, 19 nt, Artificial Sequence
  Description of Artificial Sequence: Synthetic oligonucleotide
  Antisense strand to SEQ ID NO: 1336472
aaagucaaucuccuaaaca

SEQ ID NO: 1336474 - RNA, 19 nt, Artificial Sequence
  Description of Artificial Sequence: Synthetic oligonucleotide
  Sense strand starting at position 3190 of SEQ ID NO: 1242288
uuggaauugcuggaggagu

SEQ ID NO: 1336475 - RNA, 19 nt, Artificial Sequence
  Description of Artificial Sequence: Synthetic oligonucleotide
  Antisense strand to SEQ ID NO: 1336474
acuccuccagcaauuccaa

SEQ ID NO: 1336476 - RNA, 19 nt, Artificial Sequence
  Description of Artificial Sequence: Synthetic oligonucleotide
  Sense strand starting at position 3191 of SEQ ID NO: 1242288
uggaauugcuggaggagua

SEQ ID NO: 1336477 - RNA, 19 nt, Artificial Sequence
  Description of Artificial Sequence: Synthetic oligonucleotide
  Antisense strand to SEQ ID NO: 1336476
uacuccuccagcaauucca

SEQ ID NO: 1336478 - RNA, 19 nt, Artificial Sequence
  Description of Artificial Sequence: Synthetic oligonucleotide
  Sense strand starting at position 3192 of SEQ ID NO: 1242288
ggaauugcuggaggaguau

SEQ ID NO: 1336479 - RNA, 19 nt, Artificial Sequence
  Description of Artificial Sequence: Synthetic oligonucleotide
  Antisense strand to SEQ ID NO: 1336478
auacuccuccagcaauucc

SEQ ID NO: 1336480 - RNA, 19 nt, Artificial Sequence
  Description of Artificial Sequence: Synthetic oligonucleotide
  Sense strand starting at position 3279 of SEQ ID NO: 1242288
guacaagaaucagaagaga

SEQ ID NO: 1336481 - RNA, 19 nt, Artificial Sequence
  Description of Artificial Sequence: Synthetic oligonucleotide
  Antisense strand to SEQ ID NO: 1336480
ucucuucugauucuuguac

SEQ ID NO: 1336482 - RNA, 19 nt, Artificial Sequence
  Description of Artificial Sequence: Synthetic oligonucleotide
  Sense strand starting at position 3305 of SEQ ID NO: 1242288
uuaauacuacauggaguua

SEQ ID NO: 1336483 - RNA, 19 nt, Artificial Sequence
  Description of Artificial Sequence: Synthetic oligonucleotide
  Antisense strand to SEQ ID NO: 1336482
uaacuccauguaguauuaa

SEQ ID NO: 1336484 - RNA, 19 nt, Artificial Sequence
  Description of Artificial Sequence: Synthetic oligonucleotide
  Sense strand starting at position 3650 of SEQ ID NO: 1242288
cuguaauaauugcuuaaag

SEQ ID NO: 1336485 - RNA, 19 nt, Artificial Sequence
  Description of Artificial Sequence: Synthetic oligonucleotide
  Antisense strand to SEQ ID NO: 1336484
cuuuaagcaauuauuacag

SEQ ID NO: 1336486 - RNA, 19 nt, Artificial Sequence
  Description of Artificial Sequence: Synthetic oligonucleotide
  Sense strand starting at position 3913 of SEQ ID NO: 1242288
agucucaguguguauauaa

SEQ ID NO: 1336487 - RNA, 19 nt, Artificial Sequence
  Description of Artificial Sequence: Synthetic oligonucleotide
  Antisense strand to SEQ ID NO: 1336486
uuauauacacacugagacu

SEQ ID NO: 1336488 - RNA, 19 nt, Artificial Sequence
  Description of Artificial Sequence: Synthetic oligonucleotide
  Sense strand starting at position 3936 of SEQ ID NO: 1242288
ugggaaggguguuugcaau

SEQ ID NO: 1336489 - RNA, 19 nt, Artificial Sequence
  Description of Artificial Sequence: Synthetic oligonucleotide
  Antisense strand to SEQ ID NO: 1336488
auugcaaacacccuuccca

SEQ ID NO: 1336490 - RNA, 19 nt, Artificial Sequence
  Description of Artificial Sequence: Synthetic oligonucleotide
  Sense strand starting at position 3955 of SEQ ID NO: 1242288
aguguuuguagauauguga

SEQ ID NO: 1336491 - RNA, 19 nt, Artificial Sequence
  Description of Artificial Sequence: Synthetic oligonucleotide
  Antisense strand to SEQ ID NO: 1336490
ucacauaucuacaaacacu

SEQ ID NO: 1336492 - RNA, 19 nt, Artificial Sequence
  Description of Artificial Sequence: Synthetic oligonucleotide
  Sense strand starting at position 157 of SEQ ID NO: 1242289
uuacaugacugagucuuua

SEQ ID NO: 1336493 - RNA, 19 nt, Artificial Sequence
  Description of Artificial Sequence: Synthetic oligonucleotide
  Antisense strand to SEQ ID NO: 1336492
uaaagacucagucauguaa

SEQ ID NO: 1336494 - RNA, 19 nt, Artificial Sequence
  Description of Artificial Sequence: Synthetic oligonucleotide
  Sense strand starting at position 161 of SEQ ID NO: 1242289
augacugagucuuuaaaug

SEQ ID NO: 1336495 - RNA, 19 nt, Artificial Sequence
  Description of Artificial Sequence: Synthetic oligonucleotide
  Antisense strand to SEQ ID NO: 1336494
cauuuaaagacucagucau

SEQ ID NO: 1336496 - RNA, 19 nt, Artificial Sequence
  Description of Artificial Sequence: Synthetic oligonucleotide
  Sense strand starting at position 321 of SEQ ID NO: 1242289
uuaagauugugagcucggu

SEQ ID NO: 1336497 - RNA, 19 nt, Artificial Sequence
  Description of Artificial Sequence: Synthetic oligonucleotide
  Antisense strand to SEQ ID NO: 1336496
accgagcucacaaucuuaa

SEQ ID NO: 1336498 - RNA, 19 nt, Artificial Sequence
  Description of Artificial Sequence: Synthetic oligonucleotide
  Sense strand starting at position 343 of SEQ ID NO: 1242289
cuaugacucgucuagucau

SEQ ID NO: 1336499 - RNA, 19 nt, Artificial Sequence
  Description of Artificial Sequence: Synthetic oligonucleotide
  Antisense strand to SEQ ID NO: 1336498
augacuagacgagucauag

SEQ ID NO: 1336500 - RNA, 19 nt, Artificial Sequence
  Description of Artificial Sequence: Synthetic oligonucleotide
  Sense strand starting at position 402 of SEQ ID NO: 1242289
caccguuugcguucaguga

SEQ ID NO: 1336501 - RNA, 19 nt, Artificial Sequence
  Description of Artificial Sequence: Synthetic oligonucleotide
  Antisense strand to SEQ ID NO: 1336500
ucacugaacgcaaacggug

SEQ ID NO: 1336502 - RNA, 19 nt, Artificial Sequence
  Description of Artificial Sequence: Synthetic oligonucleotide
  Sense strand starting at position 413 of SEQ ID NO: 1242289
uucagugaacgcgacagau

SEQ ID NO: 1336503 - RNA, 19 nt, Artificial Sequence
  Description of Artificial Sequence: Synthetic oligonucleotide
  Antisense strand to SEQ ID NO: 1336502
aucugucgcguucacugaa

SEQ ID NO: 1336504 - RNA, 19 nt, Artificial Sequence
  Description of Artificial Sequence: Synthetic oligonucleotide
  Sense strand starting at position 509 of SEQ ID NO: 1242289
aaaugugccggauaauuaa

SEQ ID NO: 1336505 - RNA, 19 nt, Artificial Sequence
  Description of Artificial Sequence: Synthetic oligonucleotide
  Antisense strand to SEQ ID NO: 1336504
uuaauuauccggcacauuu

SEQ ID NO: 1336506 - RNA, 19 nt, Artificial Sequence
  Description of Artificial Sequence: Synthetic oligonucleotide
  Sense strand starting at position 624 of SEQ ID NO: 1242289
gagguuuaucccgcccguu

SEQ ID NO: 1336507 - RNA, 19 nt, Artificial Sequence
  Description of Artificial Sequence: Synthetic oligonucleotide
  Antisense strand to SEQ ID NO: 1336506
aacgggcgggauaaaccuc

SEQ ID NO: 1336508 - RNA, 19 nt, Artificial Sequence
  Description of Artificial Sequence: Synthetic oligonucleotide
  Sense strand starting at position 625 of SEQ ID NO: 1242289
agguuuaucccgcccguua

SEQ ID NO: 1336509 - RNA, 19 nt, Artificial Sequence
  Description of Artificial Sequence: Synthetic oligonucleotide
  Antisense strand to SEQ ID NO: 1336508
uaacgggcgggauaaaccu

SEQ ID NO: 1336510 - RNA, 19 nt, Artificial Sequence
  Description of Artificial Sequence: Synthetic oligonucleotide
  Sense strand starting at position 1198 of SEQ ID NO: 1242289
ucgcgcaugaauggagaau

SEQ ID NO: 1336511 - RNA, 19 nt, Artificial Sequence
  Description of Artificial Sequence: Synthetic oligonucleotide
  Antisense strand to SEQ ID NO: 1336510
auucuccauucaugcgcga

SEQ ID NO: 1336512 - RNA, 19 nt, Artificial Sequence
  Description of Artificial Sequence: Synthetic oligonucleotide
  Sense strand starting at position 1510 of SEQ ID NO: 1242289
ccgccugaucuggaaggaa

SEQ ID NO: 1336513 - RNA, 19 nt, Artificial Sequence
  Description of Artificial Sequence: Synthetic oligonucleotide
  Antisense strand to SEQ ID NO: 1336512
uuccuuccagaucaggcgg

SEQ ID NO: 1336514 - RNA, 19 nt, Artificial Sequence
  Description of Artificial Sequence: Synthetic oligonucleotide
  Sense strand starting at position 1984 of SEQ ID NO: 1242289
gcccuuucggugggacuaa

SEQ ID NO: 1336515 - RNA, 19 nt, Artificial Sequence
  Description of Artificial Sequence: Synthetic oligonucleotide
  Antisense strand to SEQ ID NO: 1336514
uuagucccaccgaaagggc

SEQ ID NO: 1336516 - RNA, 19 nt, Artificial Sequence
  Description of Artificial Sequence: Synthetic oligonucleotide
  Sense strand starting at position 2094 of SEQ ID NO: 1242289
gagcgacuuuccucccaga

SEQ ID NO: 1336517 - RNA, 19 nt, Artificial Sequence
  Description of Artificial Sequence: Synthetic oligonucleotide
  Antisense strand to SEQ ID NO: 1336516
ucugggaggaaagucgcuc

SEQ ID NO: 1336518 - RNA, 19 nt, Artificial Sequence
  Description of Artificial Sequence: Synthetic oligonucleotide
  Sense strand starting at position 2555 of SEQ ID NO: 1242289
gagcgaaugccucagagua

SEQ ID NO: 1336519 - RNA, 19 nt, Artificial Sequence
  Description of Artificial Sequence: Synthetic oligonucleotide
  Antisense strand to SEQ ID NO: 1336518
uacucugaggcauucgcuc

SEQ ID NO: 1336520 - RNA, 19 nt, Artificial Sequence
  Description of Artificial Sequence: Synthetic oligonucleotide
  Sense strand starting at position 2578 of SEQ ID NO: 1242289
guaaauagacgguguugau

SEQ ID NO: 1336521 - RNA, 19 nt, Artificial Sequence
  Description of Artificial Sequence: Synthetic oligonucleotide
  Antisense strand to SEQ ID NO: 1336520
aucaacaccgucuauuuac

SEQ ID NO: 1336522 - RNA, 19 nt, Artificial Sequence
  Description of Artificial Sequence: Synthetic oligonucleotide
  Sense strand starting at position 2592 of SEQ ID NO: 1242289
uugauauuagcgcagagcu

SEQ ID NO: 1336523 - RNA, 19 nt, Artificial Sequence
  Description of Artificial Sequence: Synthetic oligonucleotide
  Antisense strand to SEQ ID NO: 1336522
agcucugcgcuaauaucaa

SEQ ID NO: 1336524 - RNA, 19 nt, Artificial Sequence
  Description of Artificial Sequence: Synthetic oligonucleotide
  Sense strand starting at position 2634 of SEQ ID NO: 1242289
gaacauuagggccgauaac

SEQ ID NO: 1336525 - RNA, 19 nt, Artificial Sequence
  Description of Artificial Sequence: Synthetic oligonucleotide
  Antisense strand to SEQ ID NO: 1336524
guuaucggcccuaauguuc

SEQ ID NO: 1336526 - RNA, 19 nt, Artificial Sequence
  Description of Artificial Sequence: Synthetic oligonucleotide
  Sense strand starting at position 2644 of SEQ ID NO: 1242289
gccgauaaccuaugcagga

SEQ ID NO: 1336527 - RNA, 19 nt, Artificial Sequence
  Description of Artificial Sequence: Synthetic oligonucleotide
  Antisense strand to SEQ ID NO: 1336526
uccugcauagguuaucggc

SEQ ID NO: 1336528 - RNA, 19 nt, Artificial Sequence
  Description of Artificial Sequence: Synthetic oligonucleotide
  Sense strand starting at position 2681 of SEQ ID NO: 1242289
accuuugucguguuuaagu

SEQ ID NO: 1336529 - RNA, 19 nt, Artificial Sequence
  Description of Artificial Sequence: Synthetic oligonucleotide
  Antisense strand to SEQ ID NO: 1336528
acuuaaacacgacaaaggu

SEQ ID NO: 1336530 - RNA, 19 nt, Artificial Sequence
  Description of Artificial Sequence: Synthetic oligonucleotide
  Sense strand starting at position 2688 of SEQ ID NO: 1242289
ucguguuuaagucaguauu

SEQ ID NO: 1336531 - RNA, 19 nt, Artificial Sequence
  Description of Artificial Sequence: Synthetic oligonucleotide
  Antisense strand to SEQ ID NO: 1336530
aauacugacuuaaacacga

SEQ ID NO: 1336532 - RNA, 19 nt, Artificial Sequence
  Description of Artificial Sequence: Synthetic oligonucleotide
  Sense strand starting at position 2691 of SEQ ID NO: 1242289
uguuuaagucaguauuguu

SEQ ID NO: 1336533 - RNA, 19 nt, Artificial Sequence
  Description of Artificial Sequence: Synthetic oligonucleotide
  Antisense strand to SEQ ID NO: 1336532
aacaauacugacuuaaaca

SEQ ID NO: 1336534 - RNA, 19 nt, Artificial Sequence
  Description of Artificial Sequence: Synthetic oligonucleotide
  Sense strand starting at position 2696 of SEQ ID NO: 1242289
aagucaguauuguuggaac

SEQ ID NO: 1336535 - RNA, 19 nt, Artificial Sequence
  Description of Artificial Sequence: Synthetic oligonucleotide
  Antisense strand to SEQ ID NO: 1336534
guuccaacaauacugacuu

SEQ ID NO: 1336536 - RNA, 19 nt, Artificial Sequence
  Description of Artificial Sequence: Synthetic oligonucleotide
  Sense strand starting at position 2698 of SEQ ID NO: 1242289
gucaguauuguuggaacuu

SEQ ID NO: 1336537 - RNA, 19 nt, Artificial Sequence
  Description of Artificial Sequence: Synthetic oligonucleotide
  Antisense strand to SEQ ID NO: 1336536
aaguuccaacaauacugac

SEQ ID NO: 1336538 - RNA, 19 nt, Artificial Sequence
  Description of Artificial Sequence: Synthetic oligonucleotide
  Sense strand starting at position 2755 of SEQ ID NO: 1242289
guuguuagccagcaacuaa

SEQ ID NO: 1336539 - RNA, 19 nt, Artificial Sequence
  Description of Artificial Sequence: Synthetic oligonucleotide
  Antisense strand to SEQ ID NO: 1336538
uuaguugcuggcuaacaac

SEQ ID NO: 1336540 - RNA, 19 nt, Artificial Sequence
  Description of Artificial Sequence: Synthetic oligonucleotide
  Sense strand starting at position 2771 of SEQ ID NO: 1242289
uaaugaugcgagcaguuau

SEQ ID NO: 1336541 - RNA, 19 nt, Artificial Sequence
  Description of Artificial Sequence: Synthetic oligonucleotide
  Antisense strand to SEQ ID NO: 1336540
auaacugcucgcaucauua

SEQ ID NO: 1336542 - RNA, 19 nt, Artificial Sequence
  Description of Artificial Sequence: Synthetic oligonucleotide
  Sense strand starting at position 2907 of SEQ ID NO: 1242289
gugugaccugcucaggcau

SEQ ID NO: 1336543 - RNA, 19 nt, Artificial Sequence
  Description of Artificial Sequence: Synthetic oligonucleotide
  Antisense strand to SEQ ID NO: 1336542
augccugagcaggucacac

SEQ ID NO: 1336544 - RNA, 19 nt, Artificial Sequence
  Description of Artificial Sequence: Synthetic oligonucleotide
  Sense strand starting at position 3013 of SEQ ID NO: 1242289
aaauuucuguuugaaguga

SEQ ID NO: 1336545 - RNA, 19 nt, Artificial Sequence
  Description of Artificial Sequence: Synthetic oligonucleotide
  Antisense strand to SEQ ID NO: 1336544
ucacuucaaacagaaauuu

SEQ ID NO: 1336546 - RNA, 19 nt, Artificial Sequence
  Description of Artificial Sequence: Synthetic oligonucleotide
  Sense strand starting at position 3017 of SEQ ID NO: 1242289
uucuguuugaagugagaua

SEQ ID NO: 1336547 - RNA, 19 nt, Artificial Sequence
  Description of Artificial Sequence: Synthetic oligonucleotide
  Antisense strand to SEQ ID NO: 1336546
uaucucacuucaaacagaa

SEQ ID NO: 1336548 - RNA, 19 nt, Artificial Sequence
  Description of Artificial Sequence: Synthetic oligonucleotide
  Sense strand starting at position 3090 of SEQ ID NO: 1242289
gaaggaaaugcuugauuau

SEQ ID NO: 1336549 - RNA, 19 nt, Artificial Sequence
  Description of Artificial Sequence: Synthetic oligonucleotide
  Antisense strand to SEQ ID NO: 1336548
auaaucaagcauuuccuuc

SEQ ID NO: 1336550 - RNA, 19 nt, Artificial Sequence
  Description of Artificial Sequence: Synthetic oligonucleotide
  Sense strand starting at position 3093 of SEQ ID NO: 1242289
ggaaaugcuugauuauuaa

SEQ ID NO: 1336551 - RNA, 19 nt, Artificial Sequence
  Description of Artificial Sequence: Synthetic oligonucleotide
  Antisense strand to SEQ ID NO: 1336550
uuaauaaucaagcauuucc

SEQ ID NO: 1336552 - RNA, 19 nt, Artificial Sequence
  Description of Artificial Sequence: Synthetic oligonucleotide
  Sense strand starting at position 3102 of SEQ ID NO: 1242289
ugauuauuaagguggugaa

SEQ ID NO: 1336553 - RNA, 19 nt, Artificial Sequence
  Description of Artificial Sequence: Synthetic oligonucleotide
  Antisense strand to SEQ ID NO: 1336552
uucaccaccuuaauaauca

SEQ ID NO: 1336554 - RNA, 19 nt, Artificial Sequence
  Description of Artificial Sequence: Synthetic oligonucleotide
  Sense strand starting at position 3103 of SEQ ID NO: 1242289
gauuauuaagguggugaaa

SEQ ID NO: 1336555 - RNA, 19 nt, Artificial Sequence
  Description of Artificial Sequence: Synthetic oligonucleotide
  Antisense strand to SEQ ID NO: 1336554
uuucaccaccuuaauaauc

SEQ ID NO: 1336556 - RNA, 19 nt, Artificial Sequence
  Description of Artificial Sequence: Synthetic oligonucleotide
  Sense strand starting at position 3167 of SEQ ID NO: 1242289
aggguuagauuccucucua

SEQ ID NO: 1336557 - RNA, 19 nt, Artificial Sequence
  Description of Artificial Sequence: Synthetic oligonucleotide
  Antisense strand to SEQ ID NO: 1336556
uagagaggaaucuaacccu

SEQ ID NO: 1336558 - RNA, 19 nt, Artificial Sequence
  Description of Artificial Sequence: Synthetic oligonucleotide
  Sense strand starting at position 3168 of SEQ ID NO: 1242289
ggguuagauuccucucuau

SEQ ID NO: 1336559 - RNA, 19 nt, Artificial Sequence
  Description of Artificial Sequence: Synthetic oligonucleotide
  Antisense strand to SEQ ID NO: 1336558
auagagaggaaucuaaccc

SEQ ID NO: 1336560 - RNA, 19 nt, Artificial Sequence
  Description of Artificial Sequence: Synthetic oligonucleotide
  Sense strand starting at position 3620 of SEQ ID NO: 1242289
guucuaaaucuagauaugu

SEQ ID NO: 1336561 - RNA, 19 nt, Artificial Sequence
  Description of Artificial Sequence: Synthetic oligonucleotide
  Antisense strand to SEQ ID NO: 1336560
acauaucuagauuuagaac

SEQ ID NO: 1336562 - RNA, 19 nt, Artificial Sequence
  Description of Artificial Sequence: Synthetic oligonucleotide
  Sense strand starting at position 3647 of SEQ ID NO: 1242289
cugaaauguacauguagag

SEQ ID NO: 1336563 - RNA, 19 nt, Artificial Sequence
  Description of Artificial Sequence: Synthetic oligonucleotide
  Antisense strand to SEQ ID NO: 1336562
cucuacauguacauuucag

SEQ ID NO: 1336564 - RNA, 19 nt, Artificial Sequence
  Description of Artificial Sequence: Synthetic oligonucleotide
  Sense strand starting at position 3731 of SEQ ID NO: 1242289
gccucuggcagagacaaau

SEQ ID NO: 1336565 - RNA, 19 nt, Artificial Sequence
  Description of Artificial Sequence: Synthetic oligonucleotide
  Antisense strand to SEQ ID NO: 1336564
auuugucucugccagaggc

SEQ ID NO: 1336566 - RNA, 19 nt, Artificial Sequence
  Description of Artificial Sequence: Synthetic oligonucleotide
  Sense strand starting at position 3751 of SEQ ID NO: 1242289
cagcgaaucguugcucaca

SEQ ID NO: 1336567 - RNA, 19 nt, Artificial Sequence
  Description of Artificial Sequence: Synthetic oligonucleotide
  Antisense strand to SEQ ID NO: 1336566
ugugagcaacgauucgcug

SEQ ID NO: 1336568 - RNA, 19 nt, Artificial Sequence
  Description of Artificial Sequence: Synthetic oligonucleotide
  Sense strand starting at position 3754 of SEQ ID NO: 1242289
cgaaucguugcucacauua

SEQ ID NO: 1336569 - RNA, 19 nt, Artificial Sequence
  Description of Artificial Sequence: Synthetic oligonucleotide
  Antisense strand to SEQ ID NO: 1336568
uaaugugagcaacgauucg

SEQ ID NO: 1336570 - RNA, 19 nt, Artificial Sequence
  Description of Artificial Sequence: Synthetic oligonucleotide
  Sense strand starting at position 3765 of SEQ ID NO: 1242289
ucacauuaggugcauagua

SEQ ID NO: 1336571 - RNA, 19 nt, Artificial Sequence
  Description of Artificial Sequence: Synthetic oligonucleotide
  Antisense strand to SEQ ID NO: 1336570
uacuaugcaccuaauguga

SEQ ID NO: 1336572 - RNA, 19 nt, Artificial Sequence
  Description of Artificial Sequence: Synthetic oligonucleotide
  Sense strand starting at position 83 of SEQ ID NO: 1242290
caaguaaagugaguuugua

SEQ ID NO: 1336573 - RNA, 19 nt, Artificial Sequence
  Description of Artificial Sequence: Synthetic oligonucleotide
  Antisense strand to SEQ ID NO: 1336572
uacaaacucacuuuacuug

SEQ ID NO: 1336574 - RNA, 19 nt, Artificial Sequence
  Description of Artificial Sequence: Synthetic oligonucleotide
  Sense strand starting at position 87 of SEQ ID NO: 1242290
uaaagugaguuuguaaugu

SEQ ID NO: 1336575 - RNA, 19 nt, Artificial Sequence
  Description of Artificial Sequence: Synthetic oligonucleotide
  Antisense strand to SEQ ID NO: 1336574
acauuacaaacucacuuua

SEQ ID NO: 1336576 - RNA, 19 nt, Artificial Sequence
  Description of Artificial Sequence: Synthetic oligonucleotide
  Sense strand starting at position 317 of SEQ ID NO: 1242290
acgguucuuaaagagcuaa

SEQ ID NO: 1336577 - RNA, 19 nt, Artificial Sequence
  Description of Artificial Sequence: Synthetic oligonucleotide
  Antisense strand to SEQ ID NO: 1336576
uuagcucuuuaagaaccgu

SEQ ID NO: 1336578 - RNA, 19 nt, Artificial Sequence
  Description of Artificial Sequence: Synthetic oligonucleotide
  Sense strand starting at position 396 of SEQ ID NO: 1242290
gcaguugugcuagacagga

SEQ ID NO: 1336579 - RNA, 19 nt, Artificial Sequence
  Description of Artificial Sequence: Synthetic oligonucleotide
  Antisense strand to SEQ ID NO: 1336578
uccugucuagcacaacugc

SEQ ID NO: 1336580 - RNA, 19 nt, Artificial Sequence
  Description of Artificial Sequence: Synthetic oligonucleotide
  Sense strand starting at position 435 of SEQ ID NO: 1242290
ggcucaagucaguaacuga

SEQ ID NO: 1336581 - RNA, 19 nt, Artificial Sequence
  Description of Artificial Sequence: Synthetic oligonucleotide
  Antisense strand to SEQ ID NO: 1336580
ucaguuacugacuugagcc

SEQ ID NO: 1336582 - RNA, 19 nt, Artificial Sequence
  Description of Artificial Sequence: Synthetic oligonucleotide
  Sense strand starting at position 438 of SEQ ID NO: 1242290
ucaagucaguaacugagaa

SEQ ID NO: 1336583 - RNA, 19 nt, Artificial Sequence
  Description of Artificial Sequence: Synthetic oligonucleotide
  Antisense strand to SEQ ID NO: 1336582
uucucaguuacugacuuga

SEQ ID NO: 1336584 - RNA, 19 nt, Artificial Sequence
  Description of Artificial Sequence: Synthetic oligonucleotide
  Sense strand starting at position 442 of SEQ ID NO: 1242290
gucaguaacugagaaauga

SEQ ID NO: 1336585 - RNA, 19 nt, Artificial Sequence
  Description of Artificial Sequence: Synthetic oligonucleotide
  Antisense strand to SEQ ID NO: 1336584
ucauuucucaguuacugac

SEQ ID NO: 1336586 - RNA, 19 nt, Artificial Sequence
  Description of Artificial Sequence: Synthetic oligonucleotide
  Sense strand starting at position 446 of SEQ ID NO: 1242290
guaacugagaaaugaguuc

SEQ ID NO: 1336587 - RNA, 19 nt, Artificial Sequence
  Description of Artificial Sequence: Synthetic oligonucleotide
  Antisense strand to SEQ ID NO: 1336586
gaacucauuucucaguuac

SEQ ID NO: 1336588 - RNA, 19 nt, Artificial Sequence
  Description of Artificial Sequence: Synthetic oligonucleotide
  Sense strand starting at position 615 of SEQ ID NO: 1242290
ccaggugacccggaccaau

SEQ ID NO: 1336589 - RNA, 19 nt, Artificial Sequence
  Description of Artificial Sequence: Synthetic oligonucleotide
  Antisense strand to SEQ ID NO: 1336588
auugguccgggucaccugg

SEQ ID NO: 1336590 - RNA, 19 nt, Artificial Sequence
  Description of Artificial Sequence: Synthetic oligonucleotide
  Sense strand starting at position 731 of SEQ ID NO: 1242290
cugcaagcuccguaguuga

SEQ ID NO: 1336591 - RNA, 19 nt, Artificial Sequence
  Description of Artificial Sequence: Synthetic oligonucleotide
  Antisense strand to SEQ ID NO: 1336590
ucaacuacggagcuugcag

SEQ ID NO: 1336592 - RNA, 19 nt, Artificial Sequence
  Description of Artificial Sequence: Synthetic oligonucleotide
  Sense strand starting at position 859 of SEQ ID NO: 1242290
cgaagauaauucucucaaa

SEQ ID NO: 1336593 - RNA, 19 nt, Artificial Sequence
  Description of Artificial Sequence: Synthetic oligonucleotide
  Antisense strand to SEQ ID NO: 1336592
uuugagagaauuaucuucg

SEQ ID NO: 1336594 - RNA, 19 nt, Artificial Sequence
  Description of Artificial Sequence: Synthetic oligonucleotide
  Sense strand starting at position 931 of SEQ ID NO: 1242290
cagauuuggugauacguua

SEQ ID NO: 1336595 - RNA, 19 nt, Artificial Sequence
  Description of Artificial Sequence: Synthetic oligonucleotide
  Antisense strand to SEQ ID NO: 1336594
uaacguaucaccaaaucug

SEQ ID NO: 1336596 - RNA, 19 nt, Artificial Sequence
  Description of Artificial Sequence: Synthetic oligonucleotide
  Sense strand starting at position 1163 of SEQ ID NO: 1242290
gcuggaauguuccucuggu

SEQ ID NO: 1336597 - RNA, 19 nt, Artificial Sequence
  Description of Artificial Sequence: Synthetic oligonucleotide
  Antisense strand to SEQ ID NO: 1336596
accagaggaacauuccagc

SEQ ID NO: 1336598 - RNA, 19 nt, Artificial Sequence
  Description of Artificial Sequence: Synthetic oligonucleotide
  Sense strand starting at position 1164 of SEQ ID NO: 1242290
cuggaauguuccucuggua

SEQ ID NO: 1336599 - RNA, 19 nt, Artificial Sequence
  Description of Artificial Sequence: Synthetic oligonucleotide
  Antisense strand to SEQ ID NO: 1336598
uaccagaggaacauuccag

SEQ ID NO: 1336600 - RNA, 19 nt, Artificial Sequence
  Description of Artificial Sequence: Synthetic oligonucleotide
  Sense strand starting at position 1184 of SEQ ID NO: 1242290
guaguauucuacuuacagc

SEQ ID NO: 1336601 - RNA, 19 nt, Artificial Sequence
  Description of Artificial Sequence: Synthetic oligonucleotide
  Antisense strand to SEQ ID NO: 1336600
gcuguaaguagaauacuac

SEQ ID NO: 1336602 - RNA, 19 nt, Artificial Sequence
  Description of Artificial Sequence: Synthetic oligonucleotide
  Sense strand starting at position 1305 of SEQ ID NO: 1242290
guuacauuaucaguuacuu

SEQ ID NO: 1336603 - RNA, 19 nt, Artificial Sequence
  Description of Artificial Sequence: Synthetic oligonucleotide
  Antisense strand to SEQ ID NO: 1336602
aaguaacugauaauguaac

SEQ ID NO: 1336604 - RNA, 19 nt, Artificial Sequence
  Description of Artificial Sequence: Synthetic oligonucleotide
  Sense strand starting at position 1313 of SEQ ID NO: 1242290
aucaguuacuuugucaaua

SEQ ID NO: 1336605 - RNA, 19 nt, Artificial Sequence
  Description of Artificial Sequence: Synthetic oligonucleotide
  Antisense strand to SEQ ID NO: 1336604
uauugacaaaguaacugau

SEQ ID NO: 1336606 - RNA, 19 nt, Artificial Sequence
  Description of Artificial Sequence: Synthetic oligonucleotide
  Sense strand starting at position 1314 of SEQ ID NO: 1242290
ucaguuacuuugucaauau

SEQ ID NO: 1336607 - RNA, 19 nt, Artificial Sequence
  Description of Artificial Sequence: Synthetic oligonucleotide
  Antisense strand to SEQ ID NO: 1336606
auauugacaaaguaacuga

SEQ ID NO: 1336608 - RNA, 19 nt, Artificial Sequence
  Description of Artificial Sequence: Synthetic oligonucleotide
  Sense strand starting at position 1350 of SEQ ID NO: 1242290
ggaacugguuuccaggaga

SEQ ID NO: 1336609 - RNA, 19 nt, Artificial Sequence
  Description of Artificial Sequence: Synthetic oligonucleotide
  Antisense strand to SEQ ID NO: 1336608
ucuccuggaaaccaguucc

SEQ ID NO: 1336610 - RNA, 19 nt, Artificial Sequence
  Description of Artificial Sequence: Synthetic oligonucleotide
  Sense strand starting at position 1361 of SEQ ID NO: 1242290
ccaggagacacgugguuau

SEQ ID NO: 1336611 - RNA, 19 nt, Artificial Sequence
  Description of Artificial Sequence: Synthetic oligonucleotide
  Antisense strand to SEQ ID NO: 1336610
auaaccacgugucuccugg

SEQ ID NO: 1336612 - RNA, 19 nt, Artificial Sequence
  Description of Artificial Sequence: Synthetic oligonucleotide
  Sense strand starting at position 1364 of SEQ ID NO: 1242290
ggagacacgugguuauuca

SEQ ID NO: 1336613 - RNA, 19 nt, Artificial Sequence
  Description of Artificial Sequence: Synthetic oligonucleotide
  Antisense strand to SEQ ID NO: 1336612
ugaauaaccacgugucucc

SEQ ID NO: 1336614 - RNA, 19 nt, Artificial Sequence
  Description of Artificial Sequence: Synthetic oligonucleotide
  Sense strand starting at position 1368 of SEQ ID NO: 1242290
acacgugguuauucagaga

SEQ ID NO: 1336615 - RNA, 19 nt, Artificial Sequence
  Description of Artificial Sequence: Synthetic oligonucleotide
  Antisense strand to SEQ ID NO: 1336614
ucucugaauaaccacgugu

SEQ ID NO: 1336616 - RNA, 19 nt, Artificial Sequence
  Description of Artificial Sequence: Synthetic oligonucleotide
  Sense strand starting at position 1385 of SEQ ID NO: 1242290
gagccugauuccucacgau

SEQ ID NO: 1336617 - RNA, 19 nt, Artificial Sequence
  Description of Artificial Sequence: Synthetic oligonucleotide
  Antisense strand to SEQ ID NO: 1336616
aucgugaggaaucaggcuc

SEQ ID NO: 1336618 - RNA, 19 nt, Artificial Sequence
  Description of Artificial Sequence: Synthetic oligonucleotide
  Sense strand starting at position 1446 of SEQ ID NO: 1242290
ggcccuuaugcucaauugu

SEQ ID NO: 1336619 - RNA, 19 nt, Artificial Sequence
  Description of Artificial Sequence: Synthetic oligonucleotide
  Antisense strand to SEQ ID NO: 1336618
acaauugagcauaagggcc

SEQ ID NO: 1336620 - RNA, 19 nt, Artificial Sequence
  Description of Artificial Sequence: Synthetic oligonucleotide
  Sense strand starting at position 1468 of SEQ ID NO: 1242290
cuaaguaauugugcucaaa

SEQ ID NO: 1336621 - RNA, 19 nt, Artificial Sequence
  Description of Artificial Sequence: Synthetic oligonucleotide
  Antisense strand to SEQ ID NO: 1336620
uuugagcacaauuacuuag

SEQ ID NO: 1336622 - RNA, 19 nt, Artificial Sequence
  Description of Artificial Sequence: Synthetic oligonucleotide
  Sense strand starting at position 1821 of SEQ ID NO: 1242290
uuacaugacugagucuuua

SEQ ID NO: 1336623 - RNA, 19 nt, Artificial Sequence
  Description of Artificial Sequence: Synthetic oligonucleotide
  Antisense strand to SEQ ID NO: 1336622
uaaagacucagucauguaa

SEQ ID NO: 1336624 - RNA, 19 nt, Artificial Sequence
  Description of Artificial Sequence: Synthetic oligonucleotide
  Sense strand starting at position 1825 of SEQ ID NO: 1242290
augacugagucuuuaaaug

SEQ ID NO: 1336625 - RNA, 19 nt, Artificial Sequence
  Description of Artificial Sequence: Synthetic oligonucleotide
  Antisense strand to SEQ ID NO: 1336624
cauuuaaagacucagucau

SEQ ID NO: 1336626 - RNA, 19 nt, Artificial Sequence
  Description of Artificial Sequence: Synthetic oligonucleotide
  Sense strand starting at position 1985 of SEQ ID NO: 1242290
uuaagauugugagcucggu

SEQ ID NO: 1336627 - RNA, 19 nt, Artificial Sequence
  Description of Artificial Sequence: Synthetic oligonucleotide
  Antisense strand to SEQ ID NO: 1336626
accgagcucacaaucuuaa

SEQ ID NO: 1336628 - RNA, 19 nt, Artificial Sequence
  Description of Artificial Sequence: Synthetic oligonucleotide
  Sense strand starting at position 2007 of SEQ ID NO: 1242290
cuaugacucgucuagucau

SEQ ID NO: 1336629 - RNA, 19 nt, Artificial Sequence
  Description of Artificial Sequence: Synthetic oligonucleotide
  Antisense strand to SEQ ID NO: 1336628
augacuagacgagucauag

SEQ ID NO: 1336630 - RNA, 19 nt, Artificial Sequence
  Description of Artificial Sequence: Synthetic oligonucleotide
  Sense strand starting at position 2066 of SEQ ID NO: 1242290
caccguuugcguucaguga

SEQ ID NO: 1336631 - RNA, 19 nt, Artificial Sequence
  Description of Artificial Sequence: Synthetic oligonucleotide
  Antisense strand to SEQ ID NO: 1336630
ucacugaacgcaaacggug

SEQ ID NO: 1336632 - RNA, 19 nt, Artificial Sequence
  Description of Artificial Sequence: Synthetic oligonucleotide
  Sense strand starting at position 2077 of SEQ ID NO: 1242290
uucagugaacgcgacagau

SEQ ID NO: 1336633 - RNA, 19 nt, Artificial Sequence
  Description of Artificial Sequence: Synthetic oligonucleotide
  Antisense strand to SEQ ID NO: 1336632
aucugucgcguucacugaa

SEQ ID NO: 1336634 - RNA, 19 nt, Artificial Sequence
  Description of Artificial Sequence: Synthetic oligonucleotide
  Sense strand starting at position 2173 of SEQ ID NO: 1242290
aaaugugccggauaauuaa

SEQ ID NO: 1336635 - RNA, 19 nt, Artificial Sequence
  Description of Artificial Sequence: Synthetic oligonucleotide
  Antisense strand to SEQ ID NO: 1336634
uuaauuauccggcacauuu

SEQ ID NO: 1336636 - RNA, 19 nt, Artificial Sequence
  Description of Artificial Sequence: Synthetic oligonucleotide
  Sense strand starting at position 2288 of SEQ ID NO: 1242290
gagguuuaucccgcccguu

SEQ ID NO: 1336637 - RNA, 19 nt, Artificial Sequence
  Description of Artificial Sequence: Synthetic oligonucleotide
  Antisense strand to SEQ ID NO: 1336636
aacgggcgggauaaaccuc

SEQ ID NO: 1336638 - RNA, 19 nt, Artificial Sequence
  Description of Artificial Sequence: Synthetic oligonucleotide
  Sense strand starting at position 2289 of SEQ ID NO: 1242290
agguuuaucccgcccguua

SEQ ID NO: 1336639 - RNA, 19 nt, Artificial Sequence
  Description of Artificial Sequence: Synthetic oligonucleotide
  Antisense strand to SEQ ID NO: 1336638
uaacgggcgggauaaaccu

SEQ ID NO: 1336640 - RNA, 19 nt, Artificial Sequence
  Description of Artificial Sequence: Synthetic oligonucleotide
  Sense strand starting at position 2862 of SEQ ID NO: 1242290
ucgcgcaugaauggagaau

SEQ ID NO: 1336641 - RNA, 19 nt, Artificial Sequence
  Description of Artificial Sequence: Synthetic oligonucleotide
  Antisense strand to SEQ ID NO: 1336640
auucuccauucaugcgcga

SEQ ID NO: 1336642 - RNA, 19 nt, Artificial Sequence
  Description of Artificial Sequence: Synthetic oligonucleotide
  Sense strand starting at position 3174 of SEQ ID NO: 1242290
ccgccugaucuggaaggaa

SEQ ID NO: 1336643 - RNA, 19 nt, Artificial Sequence
  Description of Artificial Sequence: Synthetic oligonucleotide
  Antisense strand to SEQ ID NO: 1336642
uuccuuccagaucaggcgg

SEQ ID NO: 1336644 - RNA, 19 nt, Artificial Sequence
  Description of Artificial Sequence: Synthetic oligonucleotide
  Sense strand starting at position 3647 of SEQ ID NO: 1242290
ugcccuuucggugggacua

SEQ ID NO: 1336645 - RNA, 19 nt, Artificial Sequence
  Description of Artificial Sequence: Synthetic oligonucleotide
  Antisense strand to SEQ ID NO: 1336644
uagucccaccgaaagggca

SEQ ID NO: 1336646 - RNA, 19 nt, Artificial Sequence
  Description of Artificial Sequence: Synthetic oligonucleotide
  Sense strand starting at position 3648 of SEQ ID NO: 1242290
gcccuuucggugggacuaa

SEQ ID NO: 1336647 - RNA, 19 nt, Artificial Sequence
  Description of Artificial Sequence: Synthetic oligonucleotide
  Antisense strand to SEQ ID NO: 1336646
uuagucccaccgaaagggc

SEQ ID NO: 1336648 - RNA, 19 nt, Artificial Sequence
  Description of Artificial Sequence: Synthetic oligonucleotide
  Sense strand starting at position 3661 of SEQ ID NO: 1242290
gacuaaauucugcggcgga

SEQ ID NO: 1336649 - RNA, 19 nt, Artificial Sequence
  Description of Artificial Sequence: Synthetic oligonucleotide
  Antisense strand to SEQ ID NO: 1336648
uccgccgcagaauuuaguc

SEQ ID NO: 1336650 - RNA, 19 nt, Artificial Sequence
  Description of Artificial Sequence: Synthetic oligonucleotide
  Sense strand starting at position 3758 of SEQ ID NO: 1242290
gagcgacuuuccucccaga

SEQ ID NO: 1336651 - RNA, 19 nt, Artificial Sequence
  Description of Artificial Sequence: Synthetic oligonucleotide
  Antisense strand to SEQ ID NO: 1336650
ucugggaggaaagucgcuc

SEQ ID NO: 1336652 - RNA, 19 nt, Artificial Sequence
  Description of Artificial Sequence: Synthetic oligonucleotide
  Sense strand starting at position 124 of SEQ ID NO: 1242291
ggguagagucagcgcugau

SEQ ID NO: 1336653 - RNA, 19 nt, Artificial Sequence
  Description of Artificial Sequence: Synthetic oligonucleotide
  Antisense strand to SEQ ID NO: 1336652
aucagcgcugacucuaccc

SEQ ID NO: 1336654 - RNA, 19 nt, Artificial Sequence
  Description of Artificial Sequence: Synthetic oligonucleotide
  Sense strand starting at position 978 of SEQ ID NO: 1242291
uugccugagguccacaauu

SEQ ID NO: 1336655 - RNA, 19 nt, Artificial Sequence
  Description of Artificial Sequence: Synthetic oligonucleotide
  Antisense strand to SEQ ID NO: 1336654
aauuguggaccucaggcaa

SEQ ID NO: 1336656 - RNA, 19 nt, Artificial Sequence
  Description of Artificial Sequence: Synthetic oligonucleotide
  Sense strand starting at position 1012 of SEQ ID NO: 1242291
gcaggcuggcuccagauuu

SEQ ID NO: 1336657 - RNA, 19 nt, Artificial Sequence
  Description of Artificial Sequence: Synthetic oligonucleotide
  Antisense strand to SEQ ID NO: 1336656
aaaucuggagccagccugc

SEQ ID NO: 1336658 - RNA, 19 nt, Artificial Sequence
  Description of Artificial Sequence: Synthetic oligonucleotide
  Sense strand starting at position 1020 of SEQ ID NO: 1242291
gcuccagauuuaugccuca

SEQ ID NO: 1336659 - RNA, 19 nt, Artificial Sequence
  Description of Artificial Sequence: Synthetic oligonucleotide
  Antisense strand to SEQ ID NO: 1336658
ugaggcauaaaucuggagc

SEQ ID NO: 1336660 - RNA, 19 nt, Artificial Sequence
  Description of Artificial Sequence: Synthetic oligonucleotide
  Sense strand starting at position 1148 of SEQ ID NO: 1242291
gacauaagcuaucgaggga

SEQ ID NO: 1336661 - RNA, 19 nt, Artificial Sequence
  Description of Artificial Sequence: Synthetic oligonucleotide
  Antisense strand to SEQ ID NO: 1336660
ucccucgauagcuuauguc

SEQ ID NO: 1336662 - RNA, 19 nt, Artificial Sequence
  Description of Artificial Sequence: Synthetic oligonucleotide
  Sense strand starting at position 1236 of SEQ ID NO: 1242291
agaagagcauccuggaaau

SEQ ID NO: 1336663 - RNA, 19 nt, Artificial Sequence
  Description of Artificial Sequence: Synthetic oligonucleotide
  Antisense strand to SEQ ID NO: 1336662
auuuccaggaugcucuucu

SEQ ID NO: 1336664 - RNA, 19 nt, Artificial Sequence
  Description of Artificial Sequence: Synthetic oligonucleotide
  Sense strand starting at position 1680 of SEQ ID NO: 1242291
gcccguucccaggacagaa

SEQ ID NO: 1336665 - RNA, 19 nt, Artificial Sequence
  Description of Artificial Sequence: Synthetic oligonucleotide
  Antisense strand to SEQ ID NO: 1336664
uucuguccugggaacgggc

SEQ ID NO: 1336666 - RNA, 19 nt, Artificial Sequence
  Description of Artificial Sequence: Synthetic oligonucleotide
  Sense strand starting at position 1760 of SEQ ID NO: 1242291
cuggucuuguggucaauaa

SEQ ID NO: 1336667 - RNA, 19 nt, Artificial Sequence
  Description of Artificial Sequence: Synthetic oligonucleotide
  Antisense strand to SEQ ID NO: 1336666
uuauugaccacaagaccag

SEQ ID NO: 1336668 - RNA, 19 nt, Artificial Sequence
  Description of Artificial Sequence: Synthetic oligonucleotide
  Sense strand starting at position 1761 of SEQ ID NO: 1242291
uggucuuguggucaauaaa

SEQ ID NO: 1336669 - RNA, 19 nt, Artificial Sequence
  Description of Artificial Sequence: Synthetic oligonucleotide
  Antisense strand to SEQ ID NO: 1336668
uuuauugaccacaagacca

SEQ ID NO: 1336670 - RNA, 19 nt, Artificial Sequence
  Description of Artificial Sequence: Synthetic oligonucleotide
  Sense strand starting at position 1764 of SEQ ID NO: 1242291
ucuuguggucaauaaacuc

SEQ ID NO: 1336671 - RNA, 19 nt, Artificial Sequence
  Description of Artificial Sequence: Synthetic oligonucleotide
  Antisense strand to SEQ ID NO: 1336670
gaguuuauugaccacaaga

SEQ ID NO: 1336672 - RNA, 19 nt, Artificial Sequence
  Description of Artificial Sequence: Synthetic oligonucleotide
  Sense strand starting at position 2099 of SEQ ID NO: 1242291
acuagagcuccugauaccu

SEQ ID NO: 1336673 - RNA, 19 nt, Artificial Sequence
  Description of Artificial Sequence: Synthetic oligonucleotide
  Antisense strand to SEQ ID NO: 1336672
agguaucaggagcucuagu

SEQ ID NO: 1336674 - RNA, 19 nt, Artificial Sequence
  Description of Artificial Sequence: Synthetic oligonucleotide
  Sense strand starting at position 2107 of SEQ ID NO: 1242291
uccugauaccucuguggca

SEQ ID NO: 1336675 - RNA, 19 nt, Artificial Sequence
  Description of Artificial Sequence: Synthetic oligonucleotide
  Antisense strand to SEQ ID NO: 1336674
ugccacagagguaucagga

SEQ ID NO: 1336676 - RNA, 19 nt, Artificial Sequence
  Description of Artificial Sequence: Synthetic oligonucleotide
  Sense strand starting at position 2250 of SEQ ID NO: 1242291
aguggaguucccugucaca

SEQ ID NO: 1336677 - RNA, 19 nt, Artificial Sequence
  Description of Artificial Sequence: Synthetic oligonucleotide
  Antisense strand to SEQ ID NO: 1336676
ugugacagggaacuccacu

SEQ ID NO: 1336678 - RNA, 19 nt, Artificial Sequence
  Description of Artificial Sequence: Synthetic oligonucleotide
  Sense strand starting at position 2286 of SEQ ID NO: 1242291
gcaccuguuggacaggaau

SEQ ID NO: 1336679 - RNA, 19 nt, Artificial Sequence
  Description of Artificial Sequence: Synthetic oligonucleotide
  Antisense strand to SEQ ID NO: 1336678
auuccuguccaacaggugc

SEQ ID NO: 1336680 - RNA, 19 nt, Artificial Sequence
  Description of Artificial Sequence: Synthetic oligonucleotide
  Sense strand starting at position 2325 of SEQ ID NO: 1242291
auccaucaaucugagauga

SEQ ID NO: 1336681 - RNA, 19 nt, Artificial Sequence
  Description of Artificial Sequence: Synthetic oligonucleotide
  Antisense strand to SEQ ID NO: 1336680
ucaucucagauugauggau

SEQ ID NO: 1336682 - RNA, 19 nt, Artificial Sequence
  Description of Artificial Sequence: Synthetic oligonucleotide
  Sense strand starting at position 2327 of SEQ ID NO: 1242291
ccaucaaucugagaugaac

SEQ ID NO: 1336683 - RNA, 19 nt, Artificial Sequence
  Description of Artificial Sequence: Synthetic oligonucleotide
  Antisense strand to SEQ ID NO: 1336682
guucaucucagauugaugg

SEQ ID NO: 1336684 - RNA, 19 nt, Artificial Sequence
  Description of Artificial Sequence: Synthetic oligonucleotide
  Sense strand starting at position 2371 of SEQ ID NO: 1242291
gggaguggcugucacauaa

SEQ ID NO: 1336685 - RNA, 19 nt, Artificial Sequence
  Description of Artificial Sequence: Synthetic oligonucleotide
  Antisense strand to SEQ ID NO: 1336684
uuaugugacagccacuccc

SEQ ID NO: 1336686 - RNA, 19 nt, Artificial Sequence
  Description of Artificial Sequence: Synthetic oligonucleotide
  Sense strand starting at position 2566 of SEQ ID NO: 1242291
gccugugccuguuauggga

SEQ ID NO: 1336687 - RNA, 19 nt, Artificial Sequence
  Description of Artificial Sequence: Synthetic oligonucleotide
  Antisense strand to SEQ ID NO: 1336686
ucccauaacaggcacaggc

SEQ ID NO: 1336688 - RNA, 19 nt, Artificial Sequence
  Description of Artificial Sequence: Synthetic oligonucleotide
  Sense strand starting at position 2570 of SEQ ID NO: 1242291
gugccuguuaugggagaaa

SEQ ID NO: 1336689 - RNA, 19 nt, Artificial Sequence
  Description of Artificial Sequence: Synthetic oligonucleotide
  Antisense strand to SEQ ID NO: 1336688
uuucucccauaacaggcac

SEQ ID NO: 1336690 - RNA, 19 nt, Artificial Sequence
  Description of Artificial Sequence: Synthetic oligonucleotide
  Sense strand starting at position 2828 of SEQ ID NO: 1242291
cagugaaggucacccugaa

SEQ ID NO: 1336691 - RNA, 19 nt, Artificial Sequence
  Description of Artificial Sequence: Synthetic oligonucleotide
  Antisense strand to SEQ ID NO: 1336690
uucagggugaccuucacug

SEQ ID NO: 1336692 - RNA, 19 nt, Artificial Sequence
  Description of Artificial Sequence: Synthetic oligonucleotide
  Sense strand starting at position 2832 of SEQ ID NO: 1242291
gaaggucacccugaaguuu

SEQ ID NO: 1336693 - RNA, 19 nt, Artificial Sequence
  Description of Artificial Sequence: Synthetic oligonucleotide
  Antisense strand to SEQ ID NO: 1336692
aaacuucagggugaccuuc

SEQ ID NO: 1336694 - RNA, 19 nt, Artificial Sequence
  Description of Artificial Sequence: Synthetic oligonucleotide
  Sense strand starting at position 2898 of SEQ ID NO: 1242291
gagggaggaucagaacaua

SEQ ID NO: 1336695 - RNA, 19 nt, Artificial Sequence
  Description of Artificial Sequence: Synthetic oligonucleotide
  Antisense strand to SEQ ID NO: 1336694
uauguucugauccucccuc

SEQ ID NO: 1336696 - RNA, 19 nt, Artificial Sequence
  Description of Artificial Sequence: Synthetic oligonucleotide
  Sense strand starting at position 3112 of SEQ ID NO: 1242291
ggcagaauagugugaaccu

SEQ ID NO: 1336697 - RNA, 19 nt, Artificial Sequence
  Description of Artificial Sequence: Synthetic oligonucleotide
  Antisense strand to SEQ ID NO: 1336696
agguucacacuauucugcc

SEQ ID NO: 1336698 - RNA, 19 nt, Artificial Sequence
  Description of Artificial Sequence: Synthetic oligonucleotide
  Sense strand starting at position 3770 of SEQ ID NO: 1242291
gcaugaagaucccucuucu

SEQ ID NO: 1336699 - RNA, 19 nt, Artificial Sequence
  Description of Artificial Sequence: Synthetic oligonucleotide
  Antisense strand to SEQ ID NO: 1336698
agaagagggaucuucaugc

SEQ ID NO: 1336700 - RNA, 19 nt, Artificial Sequence
  Description of Artificial Sequence: Synthetic oligonucleotide
  Sense strand starting at position 52 of SEQ ID NO: 1242292
gaggcuucuggaggaaauu

SEQ ID NO: 1336701 - RNA, 19 nt, Artificial Sequence
  Description of Artificial Sequence: Synthetic oligonucleotide
  Antisense strand to SEQ ID NO: 1336700
aauuuccuccagaagccuc

SEQ ID NO: 1336702 - RNA, 19 nt, Artificial Sequence
  Description of Artificial Sequence: Synthetic oligonucleotide
  Sense strand starting at position 62 of SEQ ID NO: 1242292
gaggaaauucgucagccca

SEQ ID NO: 1336703 - RNA, 19 nt, Artificial Sequence
  Description of Artificial Sequence: Synthetic oligonucleotide
  Antisense strand to SEQ ID NO: 1336702
ugggcugacgaauuuccuc

SEQ ID NO: 1336704 - RNA, 19 nt, Artificial Sequence
  Description of Artificial Sequence: Synthetic oligonucleotide
  Sense strand starting at position 197 of SEQ ID NO: 1242292
cacguuugccaggaaguuu

SEQ ID NO: 1336705 - RNA, 19 nt, Artificial Sequence
  Description of Artificial Sequence: Synthetic oligonucleotide
  Antisense strand to SEQ ID NO: 1336704
aaacuuccuggcaaacgug

SEQ ID NO: 1336706 - RNA, 19 nt, Artificial Sequence
  Description of Artificial Sequence: Synthetic oligonucleotide
  Sense strand starting at position 328 of SEQ ID NO: 1242292
gguguucggcaggaagaga

SEQ ID NO: 1336707 - RNA, 19 nt, Artificial Sequence
  Description of Artificial Sequence: Synthetic oligonucleotide
  Antisense strand to SEQ ID NO: 1336706
ucucuuccugccgaacacc

SEQ ID NO: 1336708 - RNA, 19 nt, Artificial Sequence
  Description of Artificial Sequence: Synthetic oligonucleotide
  Sense strand starting at position 577 of SEQ ID NO: 1242292
ccuguuccagcagaaauga

SEQ ID NO: 1336709 - RNA, 19 nt, Artificial Sequence
  Description of Artificial Sequence: Synthetic oligonucleotide
  Antisense strand to SEQ ID NO: 1336708
ucauuucugcuggaacagg

SEQ ID NO: 1336710 - RNA, 19 nt, Artificial Sequence
  Description of Artificial Sequence: Synthetic oligonucleotide
  Sense strand starting at position 968 of SEQ ID NO: 1242292
auccaaauguccgcugaug

SEQ ID NO: 1336711 - RNA, 19 nt, Artificial Sequence
  Description of Artificial Sequence: Synthetic oligonucleotide
  Antisense strand to SEQ ID NO: 1336710
caucagcggacauuuggau

SEQ ID NO: 1336712 - RNA, 19 nt, Artificial Sequence
  Description of Artificial Sequence: Synthetic oligonucleotide
  Sense strand starting at position 1186 of SEQ ID NO: 1242292
cagcgaggucugcauauga

SEQ ID NO: 1336713 - RNA, 19 nt, Artificial Sequence
  Description of Artificial Sequence: Synthetic oligonucleotide
  Antisense strand to SEQ ID NO: 1336712
ucauaugcagaccucgcug

SEQ ID NO: 1336714 - RNA, 19 nt, Artificial Sequence
  Description of Artificial Sequence: Synthetic oligonucleotide
  Sense strand starting at position 1327 of SEQ ID NO: 1242292
aacucugggcuuuggagaa

SEQ ID NO: 1336715 - RNA, 19 nt, Artificial Sequence
  Description of Artificial Sequence: Synthetic oligonucleotide
  Antisense strand to SEQ ID NO: 1336714
uucuccaaagcccagaguu

SEQ ID NO: 1336716 - RNA, 19 nt, Artificial Sequence
  Description of Artificial Sequence: Synthetic oligonucleotide
  Sense strand starting at position 1413 of SEQ ID NO: 1242292
agcucuugggccuacuaaa

SEQ ID NO: 1336717 - RNA, 19 nt, Artificial Sequence
  Description of Artificial Sequence: Synthetic oligonucleotide
  Antisense strand to SEQ ID NO: 1336716
uuuaguaggcccaagagcu

SEQ ID NO: 1336718 - RNA, 19 nt, Artificial Sequence
  Description of Artificial Sequence: Synthetic oligonucleotide
  Sense strand starting at position 1577 of SEQ ID NO: 1242292
ccacuauguucuccgauga

SEQ ID NO: 1336719 - RNA, 19 nt, Artificial Sequence
  Description of Artificial Sequence: Synthetic oligonucleotide
  Antisense strand to SEQ ID NO: 1336718
ucaucggagaacauagugg

SEQ ID NO: 1336720 - RNA, 19 nt, Artificial Sequence
  Description of Artificial Sequence: Synthetic oligonucleotide
  Sense strand starting at position 1578 of SEQ ID NO: 1242292
cacuauguucuccgaugau

SEQ ID NO: 1336721 - RNA, 19 nt, Artificial Sequence
  Description of Artificial Sequence: Synthetic oligonucleotide
  Antisense strand to SEQ ID NO: 1336720
aucaucggagaacauagug

SEQ ID NO: 1336722 - RNA, 19 nt, Artificial Sequence
  Description of Artificial Sequence: Synthetic oligonucleotide
  Sense strand starting at position 1649 of SEQ ID NO: 1242292
ggaagcucugcugaccaga

SEQ ID NO: 1336723 - RNA, 19 nt, Artificial Sequence
  Description of Artificial Sequence: Synthetic oligonucleotide
  Antisense strand to SEQ ID NO: 1336722
ucuggucagcagagcuucc

SEQ ID NO: 1336724 - RNA, 19 nt, Artificial Sequence
  Description of Artificial Sequence: Synthetic oligonucleotide
  Sense strand starting at position 1849 of SEQ ID NO: 1242292
agacacuguuaccugguaa

SEQ ID NO: 1336725 - RNA, 19 nt, Artificial Sequence
  Description of Artificial Sequence: Synthetic oligonucleotide
  Antisense strand to SEQ ID NO: 1336724
uuaccagguaacagugucu

SEQ ID NO: 1336726 - RNA, 19 nt, Artificial Sequence
  Description of Artificial Sequence: Synthetic oligonucleotide
  Sense strand starting at position 1974 of SEQ ID NO: 1242292
cgacggucccagugggaua

SEQ ID NO: 1336727 - RNA, 19 nt, Artificial Sequence
  Description of Artificial Sequence: Synthetic oligonucleotide
  Antisense strand to SEQ ID NO: 1336726
uaucccacugggaccgucg

SEQ ID NO: 1336728 - RNA, 19 nt, Artificial Sequence
  Description of Artificial Sequence: Synthetic oligonucleotide
  Sense strand starting at position 2340 of SEQ ID NO: 1242292
ggcugagcaccugagacua

SEQ ID NO: 1336729 - RNA, 19 nt, Artificial Sequence
  Description of Artificial Sequence: Synthetic oligonucleotide
  Antisense strand to SEQ ID NO: 1336728
uagucucaggugcucagcc

SEQ ID NO: 1336730 - RNA, 19 nt, Artificial Sequence
  Description of Artificial Sequence: Synthetic oligonucleotide
  Sense strand starting at position 2601 of SEQ ID NO: 1242292
ggagauucuuagguuauga

SEQ ID NO: 1336731 - RNA, 19 nt, Artificial Sequence
  Description of Artificial Sequence: Synthetic oligonucleotide
  Antisense strand to SEQ ID NO: 1336730
ucauaaccuaagaaucucc

SEQ ID NO: 1336732 - RNA, 19 nt, Artificial Sequence
  Description of Artificial Sequence: Synthetic oligonucleotide
  Sense strand starting at position 2627 of SEQ ID NO: 1242292
agaaguaaacuuugugaag

SEQ ID NO: 1336733 - RNA, 19 nt, Artificial Sequence
  Description of Artificial Sequence: Synthetic oligonucleotide
  Antisense strand to SEQ ID NO: 1336732
cuucacaaaguuuacuucu

SEQ ID NO: 1336734 - RNA, 19 nt, Artificial Sequence
  Description of Artificial Sequence: Synthetic oligonucleotide
  Sense strand starting at position 2740 of SEQ ID NO: 1242292
acaguugaacagcgaugau

SEQ ID NO: 1336735 - RNA, 19 nt, Artificial Sequence
  Description of Artificial Sequence: Synthetic oligonucleotide
  Antisense strand to SEQ ID NO: 1336734
aucaucgcuguucaacugu

SEQ ID NO: 1336736 - RNA, 19 nt, Artificial Sequence
  Description of Artificial Sequence: Synthetic oligonucleotide
  Sense strand starting at position 2846 of SEQ ID NO: 1242292
ggaaucuaauggucuauga

SEQ ID NO: 1336737 - RNA, 19 nt, Artificial Sequence
  Description of Artificial Sequence: Synthetic oligonucleotide
  Antisense strand to SEQ ID NO: 1336736
ucauagaccauuagauucc

SEQ ID NO: 1336738 - RNA, 19 nt, Artificial Sequence
  Description of Artificial Sequence: Synthetic oligonucleotide
  Sense strand starting at position 2850 of SEQ ID NO: 1242292
ucuaauggucuaugaacaa

SEQ ID NO: 1336739 - RNA, 19 nt, Artificial Sequence
  Description of Artificial Sequence: Synthetic oligonucleotide
  Antisense strand to SEQ ID NO: 1336738
uuguucauagaccauuaga

SEQ ID NO: 1336740 - RNA, 19 nt, Artificial Sequence
  Description of Artificial Sequence: Synthetic oligonucleotide
  Sense strand starting at position 2871 of SEQ ID NO: 1242292
aaacauuauuuggguggaa

SEQ ID NO: 1336741 - RNA, 19 nt, Artificial Sequence
  Description of Artificial Sequence: Synthetic oligonucleotide
  Antisense strand to SEQ ID NO: 1336740
uuccacccaaauaauguuu

SEQ ID NO: 1336742 - RNA, 19 nt, Artificial Sequence
  Description of Artificial Sequence: Synthetic oligonucleotide
  Sense strand starting at position 2883 of SEQ ID NO: 1242292
gguggaaauaucugucauu

SEQ ID NO: 1336743 - RNA, 19 nt, Artificial Sequence
  Description of Artificial Sequence: Synthetic oligonucleotide
  Antisense strand to SEQ ID NO: 1336742
aaugacagauauuuccacc

SEQ ID NO: 1336744 - RNA, 19 nt, Artificial Sequence
  Description of Artificial Sequence: Synthetic oligonucleotide
  Sense strand starting at position 2930 of SEQ ID NO: 1242292
gaauguagugguugagcau

SEQ ID NO: 1336745 - RNA, 19 nt, Artificial Sequence
  Description of Artificial Sequence: Synthetic oligonucleotide
  Antisense strand to SEQ ID NO: 1336744
augcucaaccacuacauuc

SEQ ID NO: 1336746 - RNA, 19 nt, Artificial Sequence
  Description of Artificial Sequence: Synthetic oligonucleotide
  Sense strand starting at position 2998 of SEQ ID NO: 1242292
guugcuugaggccaggaaa

SEQ ID NO: 1336747 - RNA, 19 nt, Artificial Sequence
  Description of Artificial Sequence: Synthetic oligonucleotide
  Antisense strand to SEQ ID NO: 1336746
uuuccuggccucaagcaac

SEQ ID NO: 1336748 - RNA, 19 nt, Artificial Sequence
  Description of Artificial Sequence: Synthetic oligonucleotide
  Sense strand starting at position 3209 of SEQ ID NO: 1242292
gugauacacugucucuuua

SEQ ID NO: 1336749 - RNA, 19 nt, Artificial Sequence
  Description of Artificial Sequence: Synthetic oligonucleotide
  Antisense strand to SEQ ID NO: 1336748
uaaagagacaguguaucac

SEQ ID NO: 1336750 - RNA, 19 nt, Artificial Sequence
  Description of Artificial Sequence: Synthetic oligonucleotide
  Sense strand starting at position 3418 of SEQ ID NO: 1242292
aggcccguuccagaggaau

SEQ ID NO: 1336751 - RNA, 19 nt, Artificial Sequence
  Description of Artificial Sequence: Synthetic oligonucleotide
  Antisense strand to SEQ ID NO: 1336750
auuccucuggaacgggccu

SEQ ID NO: 1336752 - RNA, 19 nt, Artificial Sequence
  Description of Artificial Sequence: Synthetic oligonucleotide
  Sense strand starting at position 3681 of SEQ ID NO: 1242292
gaugcugggccuggugaaa

SEQ ID NO: 1336753 - RNA, 19 nt, Artificial Sequence
  Description of Artificial Sequence: Synthetic oligonucleotide
  Antisense strand to SEQ ID NO: 1336752
uuucaccaggcccagcauc

SEQ ID NO: 1336754 - RNA, 19 nt, Artificial Sequence
  Description of Artificial Sequence: Synthetic oligonucleotide
  Sense strand starting at position 3741 of SEQ ID NO: 1242292
ggguccauggaugggaauu

SEQ ID NO: 1336755 - RNA, 19 nt, Artificial Sequence
  Description of Artificial Sequence: Synthetic oligonucleotide
  Antisense strand to SEQ ID NO: 1336754
aauucccauccauggaccc

SEQ ID NO: 1336756 - RNA, 19 nt, Artificial Sequence
  Description of Artificial Sequence: Synthetic oligonucleotide
  Sense strand starting at position 3742 of SEQ ID NO: 1242292
gguccauggaugggaauua

SEQ ID NO: 1336757 - RNA, 19 nt, Artificial Sequence
  Description of Artificial Sequence: Synthetic oligonucleotide
  Antisense strand to SEQ ID NO: 1336756
uaauucccauccauggacc

SEQ ID NO: 1336758 - RNA, 19 nt, Artificial Sequence
  Description of Artificial Sequence: Synthetic oligonucleotide
  Sense strand starting at position 3768 of SEQ ID NO: 1242292
uuuaaccgucccugaaauu

SEQ ID NO: 1336759 - RNA, 19 nt, Artificial Sequence
  Description of Artificial Sequence: Synthetic oligonucleotide
  Antisense strand to SEQ ID NO: 1336758
aauuucagggacgguuaaa

SEQ ID NO: 1336760 - RNA, 19 nt, Artificial Sequence
  Description of Artificial Sequence: Synthetic oligonucleotide
  Sense strand starting at position 3797 of SEQ ID NO: 1242292
uuaugugacuauguaugca

SEQ ID NO: 1336761 - RNA, 19 nt, Artificial Sequence
  Description of Artificial Sequence: Synthetic oligonucleotide
  Antisense strand to SEQ ID NO: 1336760
ugcauacauagucacauaa

SEQ ID NO: 1336762 - RNA, 19 nt, Artificial Sequence
  Description of Artificial Sequence: Synthetic oligonucleotide
  Sense strand starting at position 3815 of SEQ ID NO: 1242292
augugugaauguuuccaga

SEQ ID NO: 1336763 - RNA, 19 nt, Artificial Sequence
  Description of Artificial Sequence: Synthetic oligonucleotide
  Antisense strand to SEQ ID NO: 1336762
ucuggaaacauucacacau

SEQ ID NO: 1336764 - RNA, 19 nt, Artificial Sequence
  Description of Artificial Sequence: Synthetic oligonucleotide
  Sense strand starting at position 3817 of SEQ ID NO: 1242292
gugugaauguuuccagaga

SEQ ID NO: 1336765 - RNA, 19 nt, Artificial Sequence
  Description of Artificial Sequence: Synthetic oligonucleotide
  Antisense strand to SEQ ID NO: 1336764
ucucuggaaacauucacac

SEQ ID NO: 1336766 - RNA, 19 nt, Artificial Sequence
  Description of Artificial Sequence: Synthetic oligonucleotide
  Sense strand starting at position 3856 of SEQ ID NO: 1242292
uccaguaggugacuaugua

SEQ ID NO: 1336767 - RNA, 19 nt, Artificial Sequence
  Description of Artificial Sequence: Synthetic oligonucleotide
  Antisense strand to SEQ ID NO: 1336766
uacauagucaccuacugga

SEQ ID NO: 1336768 - RNA, 19 nt, Artificial Sequence
  Description of Artificial Sequence: Synthetic oligonucleotide
  Sense strand starting at position 3857 of SEQ ID NO: 1242292
ccaguaggugacuauguau

SEQ ID NO: 1336769 - RNA, 19 nt, Artificial Sequence
  Description of Artificial Sequence: Synthetic oligonucleotide
  Antisense strand to SEQ ID NO: 1336768
auacauagucaccuacugg

SEQ ID NO: 1336770 - RNA, 19 nt, Artificial Sequence
  Description of Artificial Sequence: Synthetic oligonucleotide
  Sense strand starting at position 3912 of SEQ ID NO: 1242292
agcacaguccaguauguga

SEQ ID NO: 1336771 - RNA, 19 nt, Artificial Sequence
  Description of Artificial Sequence: Synthetic oligonucleotide
  Antisense strand to SEQ ID NO: 1336770
ucacauacuggacugugcu

SEQ ID NO: 1336772 - RNA, 19 nt, Artificial Sequence
  Description of Artificial Sequence: Synthetic oligonucleotide
  Sense strand starting at position 3919 of SEQ ID NO: 1242292
uccaguaugugacuaugua

SEQ ID NO: 1336773 - RNA, 19 nt, Artificial Sequence
  Description of Artificial Sequence: Synthetic oligonucleotide
  Antisense strand to SEQ ID NO: 1336772
uacauagucacauacugga

SEQ ID NO: 1336774 - RNA, 19 nt, Artificial Sequence
  Description of Artificial Sequence: Synthetic oligonucleotide
  Sense strand starting at position 3920 of SEQ ID NO: 1242292
ccaguaugugacuauguau

SEQ ID NO: 1336775 - RNA, 19 nt, Artificial Sequence
  Description of Artificial Sequence: Synthetic oligonucleotide
  Antisense strand to SEQ ID NO: 1336774
auacauagucacauacugg

SEQ ID NO: 1336776 - RNA, 19 nt, Artificial Sequence
  Description of Artificial Sequence: Synthetic oligonucleotide
  Sense strand starting at position 3941 of SEQ ID NO: 1242292
augugugaauguuucuaga

SEQ ID NO: 1336777 - RNA, 19 nt, Artificial Sequence
  Description of Artificial Sequence: Synthetic oligonucleotide
  Antisense strand to SEQ ID NO: 1336776
ucuagaaacauucacacau

SEQ ID NO: 1336778 - RNA, 19 nt, Artificial Sequence
  Description of Artificial Sequence: Synthetic oligonucleotide
  Sense strand starting at position 3943 of SEQ ID NO: 1242292
gugugaauguuucuagaga

SEQ ID NO: 1336779 - RNA, 19 nt, Artificial Sequence
  Description of Artificial Sequence: Synthetic oligonucleotide
  Antisense strand to SEQ ID NO: 1336778
ucucuagaaacauucacac

SEQ ID NO: 1336780 - RNA, 19 nt, Artificial Sequence
  Description of Artificial Sequence: Synthetic oligonucleotide
  Sense strand starting at position 98 of SEQ ID NO: 1242293
agggauugaagcugguaua

SEQ ID NO: 1336781 - RNA, 19 nt, Artificial Sequence
  Description of Artificial Sequence: Synthetic oligonucleotide
  Antisense strand to SEQ ID NO: 1336780
uauaccagcuucaaucccu

SEQ ID NO: 1336782 - RNA, 19 nt, Artificial Sequence
  Description of Artificial Sequence: Synthetic oligonucleotide
  Sense strand starting at position 99 of SEQ ID NO: 1242293
gggauugaagcugguauaa

SEQ ID NO: 1336783 - RNA, 19 nt, Artificial Sequence
  Description of Artificial Sequence: Synthetic oligonucleotide
  Antisense strand to SEQ ID NO: 1336782
uuauaccagcuucaauccc

SEQ ID NO: 1336784 - RNA, 19 nt, Artificial Sequence
  Description of Artificial Sequence: Synthetic oligonucleotide
  Sense strand starting at position 453 of SEQ ID NO: 1242293
gugggaauggugggauagu

SEQ ID NO: 1336785 - RNA, 19 nt, Artificial Sequence
  Description of Artificial Sequence: Synthetic oligonucleotide
  Antisense strand to SEQ ID NO: 1336784
acuaucccaccauucccac

SEQ ID NO: 1336786 - RNA, 19 nt, Artificial Sequence
  Description of Artificial Sequence: Synthetic oligonucleotide
  Sense strand starting at position 1250 of SEQ ID NO: 1242293
ggaauugcguauuugcuca

SEQ ID NO: 1336787 - RNA, 19 nt, Artificial Sequence
  Description of Artificial Sequence: Synthetic oligonucleotide
  Antisense strand to SEQ ID NO: 1336786
ugagcaaauacgcaauucc

SEQ ID NO: 1336788 - RNA, 19 nt, Artificial Sequence
  Description of Artificial Sequence: Synthetic oligonucleotide
  Sense strand starting at position 1252 of SEQ ID NO: 1242293
aauugcguauuugcucaua

SEQ ID NO: 1336789 - RNA, 19 nt, Artificial Sequence
  Description of Artificial Sequence: Synthetic oligonucleotide
  Antisense strand to SEQ ID NO: 1336788
uaugagcaaauacgcaauu

SEQ ID NO: 1336790 - RNA, 19 nt, Artificial Sequence
  Description of Artificial Sequence: Synthetic oligonucleotide
  Sense strand starting at position 1255 of SEQ ID NO: 1242293
ugcguauuugcucauaggu

SEQ ID NO: 1336791 - RNA, 19 nt, Artificial Sequence
  Description of Artificial Sequence: Synthetic oligonucleotide
  Antisense strand to SEQ ID NO: 1336790
accuaugagcaaauacgca

SEQ ID NO: 1336792 - RNA, 19 nt, Artificial Sequence
  Description of Artificial Sequence: Synthetic oligonucleotide
  Sense strand starting at position 1282 of SEQ ID NO: 1242293
cgagguaagccagaucuau

SEQ ID NO: 1336793 - RNA, 19 nt, Artificial Sequence
  Description of Artificial Sequence: Synthetic oligonucleotide
  Antisense strand to SEQ ID NO: 1336792
auagaucuggcuuaccucg

SEQ ID NO: 1336794 - RNA, 19 nt, Artificial Sequence
  Description of Artificial Sequence: Synthetic oligonucleotide
  Sense strand starting at position 1299 of SEQ ID NO: 1242293
auguguucccuccaacucu

SEQ ID NO: 1336795 - RNA, 19 nt, Artificial Sequence
  Description of Artificial Sequence: Synthetic oligonucleotide
  Antisense strand to SEQ ID NO: 1336794
agaguuggagggaacacau

SEQ ID NO: 1336796 - RNA, 19 nt, Artificial Sequence
  Description of Artificial Sequence: Synthetic oligonucleotide
  Sense strand starting at position 1469 of SEQ ID NO: 1242293
aucucaggugcccaugaaa

SEQ ID NO: 1336797 - RNA, 19 nt, Artificial Sequence
  Description of Artificial Sequence: Synthetic oligonucleotide
  Antisense strand to SEQ ID NO: 1336796
uuucaugggcaccugagau

SEQ ID NO: 1336798 - RNA, 19 nt, Artificial Sequence
  Description of Artificial Sequence: Synthetic oligonucleotide
  Sense strand starting at position 1472 of SEQ ID NO: 1242293
ucaggugcccaugaaacua

SEQ ID NO: 1336799 - RNA, 19 nt, Artificial Sequence
  Description of Artificial Sequence: Synthetic oligonucleotide
  Antisense strand to SEQ ID NO: 1336798
uaguuucaugggcaccuga

SEQ ID NO: 1336800 - RNA, 19 nt, Artificial Sequence
  Description of Artificial Sequence: Synthetic oligonucleotide
  Sense strand starting at position 1556 of SEQ ID NO: 1242293
cugauuccugccuagcaau

SEQ ID NO: 1336801 - RNA, 19 nt, Artificial Sequence
  Description of Artificial Sequence: Synthetic oligonucleotide
  Antisense strand to SEQ ID NO: 1336800
auugcuaggcaggaaucag

SEQ ID NO: 1336802 - RNA, 19 nt, Artificial Sequence
  Description of Artificial Sequence: Synthetic oligonucleotide
  Sense strand starting at position 1570 of SEQ ID NO: 1242293
gcaauaucagugcauagaa

SEQ ID NO: 1336803 - RNA, 19 nt, Artificial Sequence
  Description of Artificial Sequence: Synthetic oligonucleotide
  Antisense strand to SEQ ID NO: 1336802
uucuaugcacugauauugc

SEQ ID NO: 1336804 - RNA, 19 nt, Artificial Sequence
  Description of Artificial Sequence: Synthetic oligonucleotide
  Sense strand starting at position 1732 of SEQ ID NO: 1242293
agcaaugcaggugaucuua

SEQ ID NO: 1336805 - RNA, 19 nt, Artificial Sequence
  Description of Artificial Sequence: Synthetic oligonucleotide
  Antisense strand to SEQ ID NO: 1336804
uaagaucaccugcauugcu

SEQ ID NO: 1336806 - RNA, 19 nt, Artificial Sequence
  Description of Artificial Sequence: Synthetic oligonucleotide
  Sense strand starting at position 1734 of SEQ ID NO: 1242293
caaugcaggugaucuuauu

SEQ ID NO: 1336807 - RNA, 19 nt, Artificial Sequence
  Description of Artificial Sequence: Synthetic oligonucleotide
  Antisense strand to SEQ ID NO: 1336806
aauaagaucaccugcauug

SEQ ID NO: 1336808 - RNA, 19 nt, Artificial Sequence
  Description of Artificial Sequence: Synthetic oligonucleotide
  Sense strand starting at position 1747 of SEQ ID NO: 1242293
cuuauuccgagucaggaaa

SEQ ID NO: 1336809 - RNA, 19 nt, Artificial Sequence
  Description of Artificial Sequence: Synthetic oligonucleotide
  Antisense strand to SEQ ID NO: 1336808
uuuccugacucggaauaag

SEQ ID NO: 1336810 - RNA, 19 nt, Artificial Sequence
  Description of Artificial Sequence: Synthetic oligonucleotide
  Sense strand starting at position 1883 of SEQ ID NO: 1242293
ccucgaacucacugaaacu

SEQ ID NO: 1336811 - RNA, 19 nt, Artificial Sequence
  Description of Artificial Sequence: Synthetic oligonucleotide
  Antisense strand to SEQ ID NO: 1336810
aguuucagugaguucgagg

SEQ ID NO: 1336812 - RNA, 19 nt, Artificial Sequence
  Description of Artificial Sequence: Synthetic oligonucleotide
  Sense strand starting at position 2175 of SEQ ID NO: 1242293
gaagccagggcuuaacuaa

SEQ ID NO: 1336813 - RNA, 19 nt, Artificial Sequence
  Description of Artificial Sequence: Synthetic oligonucleotide
  Antisense strand to SEQ ID NO: 1336812
uuaguuaagcccuggcuuc

SEQ ID NO: 1336814 - RNA, 19 nt, Artificial Sequence
  Description of Artificial Sequence: Synthetic oligonucleotide
  Sense strand starting at position 2249 of SEQ ID NO: 1242293
gagagaaauuucuugcgcu

SEQ ID NO: 1336815 - RNA, 19 nt, Artificial Sequence
  Description of Artificial Sequence: Synthetic oligonucleotide
  Antisense strand to SEQ ID NO: 1336814
agcgcaagaaauuucucuc

SEQ ID NO: 1336816 - RNA, 19 nt, Artificial Sequence
  Description of Artificial Sequence: Synthetic oligonucleotide
  Sense strand starting at position 2257 of SEQ ID NO: 1242293
uuucuugcgcugccugaaa

SEQ ID NO: 1336817 - RNA, 19 nt, Artificial Sequence
  Description of Artificial Sequence: Synthetic oligonucleotide
  Antisense strand to SEQ ID NO: 1336816
uuucaggcagcgcaagaaa

SEQ ID NO: 1336818 - RNA, 19 nt, Artificial Sequence
  Description of Artificial Sequence: Synthetic oligonucleotide
  Sense strand starting at position 2310 of SEQ ID NO: 1242293
acaguucuccgucaaggga

SEQ ID NO: 1336819 - RNA, 19 nt, Artificial Sequence
  Description of Artificial Sequence: Synthetic oligonucleotide
  Antisense strand to SEQ ID NO: 1336818
ucccuugacggagaacugu

SEQ ID NO: 1336820 - RNA, 19 nt, Artificial Sequence
  Description of Artificial Sequence: Synthetic oligonucleotide
  Sense strand starting at position 2398 of SEQ ID NO: 1242293
ugcgaaacucaauauguca

SEQ ID NO: 1336821 - RNA, 19 nt, Artificial Sequence
  Description of Artificial Sequence: Synthetic oligonucleotide
  Antisense strand to SEQ ID NO: 1336820
ugacauauugaguuucgca

SEQ ID NO: 1336822 - RNA, 19 nt, Artificial Sequence
  Description of Artificial Sequence: Synthetic oligonucleotide
  Sense strand starting at position 2406 of SEQ ID NO: 1242293
ucaauaugucagugggaga

SEQ ID NO: 1336823 - RNA, 19 nt, Artificial Sequence
  Description of Artificial Sequence: Synthetic oligonucleotide
  Antisense strand to SEQ ID NO: 1336822
ucucccacugacauauuga

SEQ ID NO: 1336824 - RNA, 19 nt, Artificial Sequence
  Description of Artificial Sequence: Synthetic oligonucleotide
  Sense strand starting at position 2407 of SEQ ID NO: 1242293
caauaugucagugggagag

SEQ ID NO: 1336825 - RNA, 19 nt, Artificial Sequence
  Description of Artificial Sequence: Synthetic oligonucleotide
  Antisense strand to SEQ ID NO: 1336824
cucucccacugacauauug

SEQ ID NO: 1336826 - RNA, 19 nt, Artificial Sequence
  Description of Artificial Sequence: Synthetic oligonucleotide
  Sense strand starting at position 2634 of SEQ ID NO: 1242293
cucucuuugguuuaauaga

SEQ ID NO: 1336827 - RNA, 19 nt, Artificial Sequence
  Description of Artificial Sequence: Synthetic oligonucleotide
  Antisense strand to SEQ ID NO: 1336826
ucuauuaaaccaaagagag

SEQ ID NO: 1336828 - RNA, 19 nt, Artificial Sequence
  Description of Artificial Sequence: Synthetic oligonucleotide
  Sense strand starting at position 3266 of SEQ ID NO: 1242293
uggguaggagacgguuaua

SEQ ID NO: 1336829 - RNA, 19 nt, Artificial Sequence
  Description of Artificial Sequence: Synthetic oligonucleotide
  Antisense strand to SEQ ID NO: 1336828
uauaaccgucuccuaccca

SEQ ID NO: 1336830 - RNA, 19 nt, Artificial Sequence
  Description of Artificial Sequence: Synthetic oligonucleotide
  Sense strand starting at position 3300 of SEQ ID NO: 1242293
guuugugcuauauaggaaa

SEQ ID NO: 1336831 - RNA, 19 nt, Artificial Sequence
  Description of Artificial Sequence: Synthetic oligonucleotide
  Antisense strand to SEQ ID NO: 1336830
uuuccuauauagcacaaac

SEQ ID NO: 1336832 - RNA, 19 nt, Artificial Sequence
  Description of Artificial Sequence: Synthetic oligonucleotide
  Sense strand starting at position 3354 of SEQ ID NO: 1242293
ggaguugacauucgucaag

SEQ ID NO: 1336833 - RNA, 19 nt, Artificial Sequence
  Description of Artificial Sequence: Synthetic oligonucleotide
  Antisense strand to SEQ ID NO: 1336832
cuugacgaaugucaacucc

SEQ ID NO: 1336834 - RNA, 19 nt, Artificial Sequence
  Description of Artificial Sequence: Synthetic oligonucleotide
  Sense strand starting at position 3486 of SEQ ID NO: 1242293
cuugaagaguugccagauc

SEQ ID NO: 1336835 - RNA, 19 nt, Artificial Sequence
  Description of Artificial Sequence: Synthetic oligonucleotide
  Antisense strand to SEQ ID NO: 1336834
gaucuggcaacucuucaag

SEQ ID NO: 1336836 - RNA, 19 nt, Artificial Sequence
  Description of Artificial Sequence: Synthetic oligonucleotide
  Sense strand starting at position 3581 of SEQ ID NO: 1242293
aggucuuuacuagaagcca

SEQ ID NO: 1336837 - RNA, 19 nt, Artificial Sequence
  Description of Artificial Sequence: Synthetic oligonucleotide
  Antisense strand to SEQ ID NO: 1336836
uggcuucuaguaaagaccu

SEQ ID NO: 1336838 - RNA, 19 nt, Artificial Sequence
  Description of Artificial Sequence: Synthetic oligonucleotide
  Sense strand starting at position 3654 of SEQ ID NO: 1242293
gccagacauggcuauaaua

SEQ ID NO: 1336839 - RNA, 19 nt, Artificial Sequence
  Description of Artificial Sequence: Synthetic oligonucleotide
  Antisense strand to SEQ ID NO: 1336838
uauuauagccaugucuggc

SEQ ID NO: 1336840 - RNA, 19 nt, Artificial Sequence
  Description of Artificial Sequence: Synthetic oligonucleotide
  Sense strand starting at position 3728 of SEQ ID NO: 1242293
aaguuauguggauggagau

SEQ ID NO: 1336841 - RNA, 19 nt, Artificial Sequence
  Description of Artificial Sequence: Synthetic oligonucleotide
  Antisense strand to SEQ ID NO: 1336840
aucuccauccacauaacuu

SEQ ID NO: 1336842 - RNA, 19 nt, Artificial Sequence
  Description of Artificial Sequence: Synthetic oligonucleotide
  Sense strand starting at position 3729 of SEQ ID NO: 1242293
aguuauguggauggagaua

SEQ ID NO: 1336843 - RNA, 19 nt, Artificial Sequence
  Description of Artificial Sequence: Synthetic oligonucleotide
  Antisense strand to SEQ ID NO: 1336842
uaucuccauccacauaacu

SEQ ID NO: 1336844 - RNA, 19 nt, Artificial Sequence
  Description of Artificial Sequence: Synthetic oligonucleotide
  Sense strand starting at position 3748 of SEQ ID NO: 1242293
uguagauacaaagguguuu

SEQ ID NO: 1336845 - RNA, 19 nt, Artificial Sequence
  Description of Artificial Sequence: Synthetic oligonucleotide
  Antisense strand to SEQ ID NO: 1336844
aaacaccuuuguaucuaca

SEQ ID NO: 1336846 - RNA, 19 nt, Artificial Sequence
  Description of Artificial Sequence: Synthetic oligonucleotide
  Sense strand starting at position 3753 of SEQ ID NO: 1242293
auacaaagguguuugaaau

SEQ ID NO: 1336847 - RNA, 19 nt, Artificial Sequence
  Description of Artificial Sequence: Synthetic oligonucleotide
  Antisense strand to SEQ ID NO: 1336846
auuucaaacaccuuuguau

SEQ ID NO: 1336848 - RNA, 19 nt, Artificial Sequence
  Description of Artificial Sequence: Synthetic oligonucleotide
  Sense strand starting at position 3754 of SEQ ID NO: 1242293
uacaaagguguuugaaauc

SEQ ID NO: 1336849 - RNA, 19 nt, Artificial Sequence
  Description of Artificial Sequence: Synthetic oligonucleotide
  Antisense strand to SEQ ID NO: 1336848
gauuucaaacaccuuugua

SEQ ID NO: 1336850 - RNA, 19 nt, Artificial Sequence
  Description of Artificial Sequence: Synthetic oligonucleotide
  Sense strand starting at position 3760 of SEQ ID NO: 1242293
gguguuugaaaucaagcuu

SEQ ID NO: 1336851 - RNA, 19 nt, Artificial Sequence
  Description of Artificial Sequence: Synthetic oligonucleotide
  Antisense strand to SEQ ID NO: 1336850
aagcuugauuucaaacacc

SEQ ID NO: 1336852 - RNA, 19 nt, Artificial Sequence
  Description of Artificial Sequence: Synthetic oligonucleotide
  Sense strand starting at position 3791 of SEQ ID NO: 1242293
agagaaaguuauguguuaa

SEQ ID NO: 1336853 - RNA, 19 nt, Artificial Sequence
  Description of Artificial Sequence: Synthetic oligonucleotide
  Antisense strand to SEQ ID NO: 1336852
uuaacacauaacuuucucu

SEQ ID NO: 1336854 - RNA, 19 nt, Artificial Sequence
  Description of Artificial Sequence: Synthetic oligonucleotide
  Sense strand starting at position 3792 of SEQ ID NO: 1242293
gagaaaguuauguguuaag

SEQ ID NO: 1336855 - RNA, 19 nt, Artificial Sequence
  Description of Artificial Sequence: Synthetic oligonucleotide
  Antisense strand to SEQ ID NO: 1336854
cuuaacacauaacuuucuc

SEQ ID NO: 1336856 - RNA, 19 nt, Artificial Sequence
  Description of Artificial Sequence: Synthetic oligonucleotide
  Sense strand starting at position 3891 of SEQ ID NO: 1242293
ugguuuauugugcaauuaa

SEQ ID NO: 1336857 - RNA, 19 nt, Artificial Sequence
  Description of Artificial Sequence: Synthetic oligonucleotide
  Antisense strand to SEQ ID NO: 1336856
uuaauugcacaauaaacca

SEQ ID NO: 1336858 - RNA, 19 nt, Artificial Sequence
  Description of Artificial Sequence: Synthetic oligonucleotide
  Sense strand starting at position 3952 of SEQ ID NO: 1242293
aauuacguucgugaauaau

SEQ ID NO: 1336859 - RNA, 19 nt, Artificial Sequence
  Description of Artificial Sequence: Synthetic oligonucleotide
  Antisense strand to SEQ ID NO: 1336858
auuauucacgaacguaauu

SEQ ID NO: 1336860 - RNA, 19 nt, Artificial Sequence
  Description of Artificial Sequence: Synthetic oligonucleotide
  Sense strand starting at position 41 of SEQ ID NO: 1242294
gaaagaucccauggcagca

SEQ ID NO: 1336861 - RNA, 19 nt, Artificial Sequence
  Description of Artificial Sequence: Synthetic oligonucleotide
  Antisense strand to SEQ ID NO: 1336860
ugcugccaugggaucuuuc

SEQ ID NO: 1336862 - RNA, 19 nt, Artificial Sequence
  Description of Artificial Sequence: Synthetic oligonucleotide
  Sense strand starting at position 708 of SEQ ID NO: 1242294
cacagaugccuacacguau

SEQ ID NO: 1336863 - RNA, 19 nt, Artificial Sequence
  Description of Artificial Sequence: Synthetic oligonucleotide
  Antisense strand to SEQ ID NO: 1336862
auacguguaggcaucugug

SEQ ID NO: 1336864 - RNA, 19 nt, Artificial Sequence
  Description of Artificial Sequence: Synthetic oligonucleotide
  Sense strand starting at position 760 of SEQ ID NO: 1242294
uguacucacccauguauac

SEQ ID NO: 1336865 - RNA, 19 nt, Artificial Sequence
  Description of Artificial Sequence: Synthetic oligonucleotide
  Antisense strand to SEQ ID NO: 1336864
guauacaugggugaguaca

SEQ ID NO: 1336866 - RNA, 19 nt, Artificial Sequence
  Description of Artificial Sequence: Synthetic oligonucleotide
  Sense strand starting at position 925 of SEQ ID NO: 1242294
gucauaguauggguagguu

SEQ ID NO: 1336867 - RNA, 19 nt, Artificial Sequence
  Description of Artificial Sequence: Synthetic oligonucleotide
  Antisense strand to SEQ ID NO: 1336866
aaccuacccauacuaugac

SEQ ID NO: 1336868 - RNA, 19 nt, Artificial Sequence
  Description of Artificial Sequence: Synthetic oligonucleotide
  Sense strand starting at position 937 of SEQ ID NO: 1242294
guagguuucccgcugcaau

SEQ ID NO: 1336869 - RNA, 19 nt, Artificial Sequence
  Description of Artificial Sequence: Synthetic oligonucleotide
  Antisense strand to SEQ ID NO: 1336868
auugcagcgggaaaccuac

SEQ ID NO: 1336870 - RNA, 19 nt, Artificial Sequence
  Description of Artificial Sequence: Synthetic oligonucleotide
  Sense strand starting at position 1267 of SEQ ID NO: 1242294
cugugagagcugugcuaau

SEQ ID NO: 1336871 - RNA, 19 nt, Artificial Sequence
  Description of Artificial Sequence: Synthetic oligonucleotide
  Antisense strand to SEQ ID NO: 1336870
auuagcacagcucucacag

SEQ ID NO: 1336872 - RNA, 19 nt, Artificial Sequence
  Description of Artificial Sequence: Synthetic oligonucleotide
  Sense strand starting at position 1282 of SEQ ID NO: 1242294
uaauguugugcuugagaag

SEQ ID NO: 1336873 - RNA, 19 nt, Artificial Sequence
  Description of Artificial Sequence: Synthetic oligonucleotide
  Antisense strand to SEQ ID NO: 1336872
cuucucaagcacaacauua

SEQ ID NO: 1336874 - RNA, 19 nt, Artificial Sequence
  Description of Artificial Sequence: Synthetic oligonucleotide
  Sense strand starting at position 1283 of SEQ ID NO: 1242294
aauguugugcuugagaaga

SEQ ID NO: 1336875 - RNA, 19 nt, Artificial Sequence
  Description of Artificial Sequence: Synthetic oligonucleotide
  Antisense strand to SEQ ID NO: 1336874
ucuucucaagcacaacauu

SEQ ID NO: 1336876 - RNA, 19 nt, Artificial Sequence
  Description of Artificial Sequence: Synthetic oligonucleotide
  Sense strand starting at position 1339 of SEQ ID NO: 1242294
uugcuugcucccugacaga

SEQ ID NO: 1336877 - RNA, 19 nt, Artificial Sequence
  Description of Artificial Sequence: Synthetic oligonucleotide
  Antisense strand to SEQ ID NO: 1336876
ucugucagggagcaagcaa

SEQ ID NO: 1336878 - RNA, 19 nt, Artificial Sequence
  Description of Artificial Sequence: Synthetic oligonucleotide
  Sense strand starting at position 1431 of SEQ ID NO: 1242294
ugacgagucaccgagcaga

SEQ ID NO: 1336879 - RNA, 19 nt, Artificial Sequence
  Description of Artificial Sequence: Synthetic oligonucleotide
  Antisense strand to SEQ ID NO: 1336878
ucugcucggugacucguca

SEQ ID NO: 1336880 - RNA, 19 nt, Artificial Sequence
  Description of Artificial Sequence: Synthetic oligonucleotide
  Sense strand starting at position 1660 of SEQ ID NO: 1242294
ucugccaggucaucuagaa

SEQ ID NO: 1336881 - RNA, 19 nt, Artificial Sequence
  Description of Artificial Sequence: Synthetic oligonucleotide
  Antisense strand to SEQ ID NO: 1336880
uucuagaugaccuggcaga

SEQ ID NO: 1336882 - RNA, 19 nt, Artificial Sequence
  Description of Artificial Sequence: Synthetic oligonucleotide
  Sense strand starting at position 1766 of SEQ ID NO: 1242294
ccggguuucccagguaauc

SEQ ID NO: 1336883 - RNA, 19 nt, Artificial Sequence
  Description of Artificial Sequence: Synthetic oligonucleotide
  Antisense strand to SEQ ID NO: 1336882
gauuaccugggaaacccgg

SEQ ID NO: 1336884 - RNA, 19 nt, Artificial Sequence
  Description of Artificial Sequence: Synthetic oligonucleotide
  Sense strand starting at position 1768 of SEQ ID NO: 1242294
ggguuucccagguaaucuc

SEQ ID NO: 1336885 - RNA, 19 nt, Artificial Sequence
  Description of Artificial Sequence: Synthetic oligonucleotide
  Antisense strand to SEQ ID NO: 1336884
gagauuaccugggaaaccc

SEQ ID NO: 1336886 - RNA, 19 nt, Artificial Sequence
  Description of Artificial Sequence: Synthetic oligonucleotide
  Sense strand starting at position 1778 of SEQ ID NO: 1242294
gguaaucucagguacguua

SEQ ID NO: 1336887 - RNA, 19 nt, Artificial Sequence
  Description of Artificial Sequence: Synthetic oligonucleotide
  Antisense strand to SEQ ID NO: 1336886
uaacguaccugagauuacc

SEQ ID NO: 1336888 - RNA, 19 nt, Artificial Sequence
  Description of Artificial Sequence: Synthetic oligonucleotide
  Sense strand starting at position 1866 of SEQ ID NO: 1242294
gcaucuugucugccagcca

SEQ ID NO: 1336889 - RNA, 19 nt, Artificial Sequence
  Description of Artificial Sequence: Synthetic oligonucleotide
  Antisense strand to SEQ ID NO: 1336888
uggcuggcagacaagaugc

SEQ ID NO: 1336890 - RNA, 19 nt, Artificial Sequence
  Description of Artificial Sequence: Synthetic oligonucleotide
  Sense strand starting at position 2013 of SEQ ID NO: 1242294
cugccugcucugcagagaa

SEQ ID NO: 1336891 - RNA, 19 nt, Artificial Sequence
  Description of Artificial Sequence: Synthetic oligonucleotide
  Antisense strand to SEQ ID NO: 1336890
uucucugcagagcaggcag

SEQ ID NO: 1336892 - RNA, 19 nt, Artificial Sequence
  Description of Artificial Sequence: Synthetic oligonucleotide
  Sense strand starting at position 2015 of SEQ ID NO: 1242294
gccugcucugcagagaacu

SEQ ID NO: 1336893 - RNA, 19 nt, Artificial Sequence
  Description of Artificial Sequence: Synthetic oligonucleotide
  Antisense strand to SEQ ID NO: 1336892
aguucucugcagagcaggc

SEQ ID NO: 1336894 - RNA, 19 nt, Artificial Sequence
  Description of Artificial Sequence: Synthetic oligonucleotide
  Sense strand starting at position 2057 of SEQ ID NO: 1242294
uggaguuugacaugcucca

SEQ ID NO: 1336895 - RNA, 19 nt, Artificial Sequence
  Description of Artificial Sequence: Synthetic oligonucleotide
  Antisense strand to SEQ ID NO: 1336894
uggagcaugucaaacucca

SEQ ID NO: 1336896 - RNA, 19 nt, Artificial Sequence
  Description of Artificial Sequence: Synthetic oligonucleotide
  Sense strand starting at position 2181 of SEQ ID NO: 1242294
ugguuaucacugggcuguu

SEQ ID NO: 1336897 - RNA, 19 nt, Artificial Sequence
  Description of Artificial Sequence: Synthetic oligonucleotide
  Antisense strand to SEQ ID NO: 1336896
aacagcccagugauaacca

SEQ ID NO: 1336898 - RNA, 19 nt, Artificial Sequence
  Description of Artificial Sequence: Synthetic oligonucleotide
  Sense strand starting at position 2182 of SEQ ID NO: 1242294
gguuaucacugggcuguuu

SEQ ID NO: 1336899 - RNA, 19 nt, Artificial Sequence
  Description of Artificial Sequence: Synthetic oligonucleotide
  Antisense strand to SEQ ID NO: 1336898
aaacagcccagugauaacc

SEQ ID NO: 1336900 - RNA, 19 nt, Artificial Sequence
  Description of Artificial Sequence: Synthetic oligonucleotide
  Sense strand starting at position 2292 of SEQ ID NO: 1242294
ggaagagucuccuccagcu

SEQ ID NO: 1336901 - RNA, 19 nt, Artificial Sequence
  Description of Artificial Sequence: Synthetic oligonucleotide
  Antisense strand to SEQ ID NO: 1336900
agcuggaggagacucuucc

SEQ ID NO: 1336902 - RNA, 19 nt, Artificial Sequence
  Description of Artificial Sequence: Synthetic oligonucleotide
  Sense strand starting at position 2298 of SEQ ID NO: 1242294
gucuccuccagcuguggaa

SEQ ID NO: 1336903 - RNA, 19 nt, Artificial Sequence
  Description of Artificial Sequence: Synthetic oligonucleotide
  Antisense strand to SEQ ID NO: 1336902
uuccacagcuggaggagac

SEQ ID NO: 1336904 - RNA, 19 nt, Artificial Sequence
  Description of Artificial Sequence: Synthetic oligonucleotide
  Sense strand starting at position 2367 of SEQ ID NO: 1242294
agcugaagccuagaaaucu

SEQ ID NO: 1336905 - RNA, 19 nt, Artificial Sequence
  Description of Artificial Sequence: Synthetic oligonucleotide
  Antisense strand to SEQ ID NO: 1336904
agauuucuaggcuucagcu

SEQ ID NO: 1336906 - RNA, 19 nt, Artificial Sequence
  Description of Artificial Sequence: Synthetic oligonucleotide
  Sense strand starting at position 2413 of SEQ ID NO: 1242294
agauguuucucucuuuaua

SEQ ID NO: 1336907 - RNA, 19 nt, Artificial Sequence
  Description of Artificial Sequence: Synthetic oligonucleotide
  Antisense strand to SEQ ID NO: 1336906
uauaaagagagaaacaucu

SEQ ID NO: 1336908 - RNA, 19 nt, Artificial Sequence
  Description of Artificial Sequence: Synthetic oligonucleotide
  Sense strand starting at position 3057 of SEQ ID NO: 1242294
uuagcauucucuuuggcca

SEQ ID NO: 1336909 - RNA, 19 nt, Artificial Sequence
  Description of Artificial Sequence: Synthetic oligonucleotide
  Antisense strand to SEQ ID NO: 1336908
uggccaaagagaaugcuaa

SEQ ID NO: 1336910 - RNA, 19 nt, Artificial Sequence
  Description of Artificial Sequence: Synthetic oligonucleotide
  Sense strand starting at position 3091 of SEQ ID NO: 1242294
ugcagauggaugugauguu

SEQ ID NO: 1336911 - RNA, 19 nt, Artificial Sequence
  Description of Artificial Sequence: Synthetic oligonucleotide
  Antisense strand to SEQ ID NO: 1336910
aacaucacauccaucugca

SEQ ID NO: 1336912 - RNA, 19 nt, Artificial Sequence
  Description of Artificial Sequence: Synthetic oligonucleotide
  Sense strand starting at position 3395 of SEQ ID NO: 1242294
gccuguuucugcuuuauuu

SEQ ID NO: 1336913 - RNA, 19 nt, Artificial Sequence
  Description of Artificial Sequence: Synthetic oligonucleotide
  Antisense strand to SEQ ID NO: 1336912
aaauaaagcagaaacaggc

SEQ ID NO: 1336914 - RNA, 19 nt, Artificial Sequence
  Description of Artificial Sequence: Synthetic oligonucleotide
  Sense strand starting at position 3399 of SEQ ID NO: 1242294
guuucugcuuuauuuggau

SEQ ID NO: 1336915 - RNA, 19 nt, Artificial Sequence
  Description of Artificial Sequence: Synthetic oligonucleotide
  Antisense strand to SEQ ID NO: 1336914
auccaaauaaagcagaaac

SEQ ID NO: 1336916 - RNA, 19 nt, Artificial Sequence
  Description of Artificial Sequence: Synthetic oligonucleotide
  Sense strand starting at position 3433 of SEQ ID NO: 1242294
uggccugggcucuaagaaa

SEQ ID NO: 1336917 - RNA, 19 nt, Artificial Sequence
  Description of Artificial Sequence: Synthetic oligonucleotide
  Antisense strand to SEQ ID NO: 1336916
uuucuuagagcccaggcca

SEQ ID NO: 1336918 - RNA, 19 nt, Artificial Sequence
  Description of Artificial Sequence: Synthetic oligonucleotide
  Sense strand starting at position 3440 of SEQ ID NO: 1242294
ggcucuaagaaaugagagu

SEQ ID NO: 1336919 - RNA, 19 nt, Artificial Sequence
  Description of Artificial Sequence: Synthetic oligonucleotide
  Antisense strand to SEQ ID NO: 1336918
acucucauuucuuagagcc

SEQ ID NO: 1336920 - RNA, 19 nt, Artificial Sequence
  Description of Artificial Sequence: Synthetic oligonucleotide
  Sense strand starting at position 3465 of SEQ ID NO: 1242294
guuggugauagcugugaau

SEQ ID NO: 1336921 - RNA, 19 nt, Artificial Sequence
  Description of Artificial Sequence: Synthetic oligonucleotide
  Antisense strand to SEQ ID NO: 1336920
auucacagcuaucaccaac

SEQ ID NO: 1336922 - RNA, 19 nt, Artificial Sequence
  Description of Artificial Sequence: Synthetic oligonucleotide
  Sense strand starting at position 3467 of SEQ ID NO: 1242294
uggugauagcugugaaugu

SEQ ID NO: 1336923 - RNA, 19 nt, Artificial Sequence
  Description of Artificial Sequence: Synthetic oligonucleotide
  Antisense strand to SEQ ID NO: 1336922
acauucacagcuaucacca

SEQ ID NO: 1336924 - RNA, 19 nt, Artificial Sequence
  Description of Artificial Sequence: Synthetic oligonucleotide
  Sense strand starting at position 3556 of SEQ ID NO: 1242294
gcucuagcuccugacugau

SEQ ID NO: 1336925 - RNA, 19 nt, Artificial Sequence
  Description of Artificial Sequence: Synthetic oligonucleotide
  Antisense strand to SEQ ID NO: 1336924
aucagucaggagcuagagc

SEQ ID NO: 1336926 - RNA, 19 nt, Artificial Sequence
  Description of Artificial Sequence: Synthetic oligonucleotide
  Sense strand starting at position 3832 of SEQ ID NO: 1242294
cagugugucccgcagaauu

SEQ ID NO: 1336927 - RNA, 19 nt, Artificial Sequence
  Description of Artificial Sequence: Synthetic oligonucleotide
  Antisense strand to SEQ ID NO: 1336926
aauucugcgggacacacug

SEQ ID NO: 1336928 - RNA, 19 nt, Artificial Sequence
  Description of Artificial Sequence: Synthetic oligonucleotide
  Sense strand starting at position 3842 of SEQ ID NO: 1242294
cgcagaauucuguaaugau

SEQ ID NO: 1336929 - RNA, 19 nt, Artificial Sequence
  Description of Artificial Sequence: Synthetic oligonucleotide
  Antisense strand to SEQ ID NO: 1336928
aucauuacagaauucugcg

SEQ ID NO: 1336930 - RNA, 19 nt, Artificial Sequence
  Description of Artificial Sequence: Synthetic oligonucleotide
  Sense strand starting at position 3850 of SEQ ID NO: 1242294
ucuguaaugauggaugugu

SEQ ID NO: 1336931 - RNA, 19 nt, Artificial Sequence
  Description of Artificial Sequence: Synthetic oligonucleotide
  Antisense strand to SEQ ID NO: 1336930
acacauccaucauuacaga

SEQ ID NO: 1336932 - RNA, 19 nt, Artificial Sequence
  Description of Artificial Sequence: Synthetic oligonucleotide
  Sense strand starting at position 3861 of SEQ ID NO: 1242294
ggauguguuccguaucugu

SEQ ID NO: 1336933 - RNA, 19 nt, Artificial Sequence
  Description of Artificial Sequence: Synthetic oligonucleotide
  Antisense strand to SEQ ID NO: 1336932
acagauacggaacacaucc

SEQ ID NO: 1336934 - RNA, 19 nt, Artificial Sequence
  Description of Artificial Sequence: Synthetic oligonucleotide
  Sense strand starting at position 3916 of SEQ ID NO: 1242294
ccacguggcauuuguaaug

SEQ ID NO: 1336935 - RNA, 19 nt, Artificial Sequence
  Description of Artificial Sequence: Synthetic oligonucleotide
  Antisense strand to SEQ ID NO: 1336934
cauuacaaaugccacgugg

SEQ ID NO: 1336936 - RNA, 19 nt, Artificial Sequence
  Description of Artificial Sequence: Synthetic oligonucleotide
  Sense strand starting at position 3959 of SEQ ID NO: 1242294
ggucacuaauuggcuuauu

SEQ ID NO: 1336937 - RNA, 19 nt, Artificial Sequence
  Description of Artificial Sequence: Synthetic oligonucleotide
  Antisense strand to SEQ ID NO: 1336936
aauaagccaauuagugacc

SEQ ID NO: 1336938 - RNA, 19 nt, Artificial Sequence
  Description of Artificial Sequence: Synthetic oligonucleotide
  Sense strand starting at position 3968 of SEQ ID NO: 1242294
uuggcuuauucuucuaagu

SEQ ID NO: 1336939 - RNA, 19 nt, Artificial Sequence
  Description of Artificial Sequence: Synthetic oligonucleotide
  Antisense strand to SEQ ID NO: 1336938
acuuagaagaauaagccaa

SEQ ID NO: 1336940 - RNA, 19 nt, Artificial Sequence
  Description of Artificial Sequence: Synthetic oligonucleotide
  Sense strand starting at position 39 of SEQ ID NO: 1242295
ugaccacuggacuguguua

SEQ ID NO: 1336941 - RNA, 19 nt, Artificial Sequence
  Description of Artificial Sequence: Synthetic oligonucleotide
  Antisense strand to SEQ ID NO: 1336940
uaacacaguccagugguca

SEQ ID NO: 1336942 - RNA, 19 nt, Artificial Sequence
  Description of Artificial Sequence: Synthetic oligonucleotide
  Sense strand starting at position 46 of SEQ ID NO: 1242295
uggacuguguuaccugaga

SEQ ID NO: 1336943 - RNA, 19 nt, Artificial Sequence
  Description of Artificial Sequence: Synthetic oligonucleotide
  Antisense strand to SEQ ID NO: 1336942
ucucagguaacacagucca

SEQ ID NO: 1336944 - RNA, 19 nt, Artificial Sequence
  Description of Artificial Sequence: Synthetic oligonucleotide
  Sense strand starting at position 48 of SEQ ID NO: 1242295
gacuguguuaccugagagu

SEQ ID NO: 1336945 - RNA, 19 nt, Artificial Sequence
  Description of Artificial Sequence: Synthetic oligonucleotide
  Antisense strand to SEQ ID NO: 1336944
acucucagguaacacaguc

SEQ ID NO: 1336946 - RNA, 19 nt, Artificial Sequence
  Description of Artificial Sequence: Synthetic oligonucleotide
  Sense strand starting at position 88 of SEQ ID NO: 1242295
ugcagaguuucuuuccaug

SEQ ID NO: 1336947 - RNA, 19 nt, Artificial Sequence
  Description of Artificial Sequence: Synthetic oligonucleotide
  Antisense strand to SEQ ID NO: 1336946
cauggaaagaaacucugca

SEQ ID NO: 1336948 - RNA, 19 nt, Artificial Sequence
  Description of Artificial Sequence: Synthetic oligonucleotide
  Sense strand starting at position 113 of SEQ ID NO: 1242295
gggagagcuucuccuacca

SEQ ID NO: 1336949 - RNA, 19 nt, Artificial Sequence
  Description of Artificial Sequence: Synthetic oligonucleotide
  Antisense strand to SEQ ID NO: 1336948
ugguaggagaagcucuccc

SEQ ID NO: 1336950 - RNA, 19 nt, Artificial Sequence
  Description of Artificial Sequence: Synthetic oligonucleotide
  Sense strand starting at position 129 of SEQ ID NO: 1242295
ccaaauauauuguaaagag

SEQ ID NO: 1336951 - RNA, 19 nt, Artificial Sequence
  Description of Artificial Sequence: Synthetic oligonucleotide
  Antisense strand to SEQ ID NO: 1336950
cucuuuacaauauauuugg

SEQ ID NO: 1336952 - RNA, 19 nt, Artificial Sequence
  Description of Artificial Sequence: Synthetic oligonucleotide
  Sense strand starting at position 160 of SEQ ID NO: 1242295
gaaauaaaguugggauuug

SEQ ID NO: 1336953 - RNA, 19 nt, Artificial Sequence
  Description of Artificial Sequence: Synthetic oligonucleotide
  Antisense strand to SEQ ID NO: 1336952
caaaucccaacuuuauuuc

SEQ ID NO: 1336954 - RNA, 19 nt, Artificial Sequence
  Description of Artificial Sequence: Synthetic oligonucleotide
  Sense strand starting at position 171 of SEQ ID NO: 1242295
gggauuugcuuacauccua

SEQ ID NO: 1336955 - RNA, 19 nt, Artificial Sequence
  Description of Artificial Sequence: Synthetic oligonucleotide
  Antisense strand to SEQ ID NO: 1336954
uaggauguaagcaaauccc

SEQ ID NO: 1336956 - RNA, 19 nt, Artificial Sequence
  Description of Artificial Sequence: Synthetic oligonucleotide
  Sense strand starting at position 178 of SEQ ID NO: 1242295
gcuuacauccuauguauuc

SEQ ID NO: 1336957 - RNA, 19 nt, Artificial Sequence
  Description of Artificial Sequence: Synthetic oligonucleotide
  Antisense strand to SEQ ID NO: 1336956
gaauacauaggauguaagc

SEQ ID NO: 1336958 - RNA, 19 nt, Artificial Sequence
  Description of Artificial Sequence: Synthetic oligonucleotide
  Sense strand starting at position 279 of SEQ ID NO: 1242295
gcagcauggaccuguggau

SEQ ID NO: 1336959 - RNA, 19 nt, Artificial Sequence
  Description of Artificial Sequence: Synthetic oligonucleotide
  Antisense strand to SEQ ID NO: 1336958
auccacagguccaugcugc

SEQ ID NO: 1336960 - RNA, 19 nt, Artificial Sequence
  Description of Artificial Sequence: Synthetic oligonucleotide
  Sense strand starting at position 291 of SEQ ID NO: 1242295
uguggauaggcuugggaca

SEQ ID NO: 1336961 - RNA, 19 nt, Artificial Sequence
  Description of Artificial Sequence: Synthetic oligonucleotide
  Antisense strand to SEQ ID NO: 1336960
ugucccaagccuauccaca

SEQ ID NO: 1336962 - RNA, 19 nt, Artificial Sequence
  Description of Artificial Sequence: Synthetic oligonucleotide
  Sense strand starting at position 292 of SEQ ID NO: 1242295
guggauaggcuugggacau

SEQ ID NO: 1336963 - RNA, 19 nt, Artificial Sequence
  Description of Artificial Sequence: Synthetic oligonucleotide
  Antisense strand to SEQ ID NO: 1336962
augucccaagccuauccac

SEQ ID NO: 1336964 - RNA, 19 nt, Artificial Sequence
  Description of Artificial Sequence: Synthetic oligonucleotide
  Sense strand starting at position 305 of SEQ ID NO: 1242295
ggacauucuugcuugugca

SEQ ID NO: 1336965 - RNA, 19 nt, Artificial Sequence
  Description of Artificial Sequence: Synthetic oligonucleotide
  Antisense strand to SEQ ID NO: 1336964
ugcacaagcaagaaugucc

SEQ ID NO: 1336966 - RNA, 19 nt, Artificial Sequence
  Description of Artificial Sequence: Synthetic oligonucleotide
  Sense strand starting at position 596 of SEQ ID NO: 1242295
ccacaucacuccuagggaa

SEQ ID NO: 1336967 - RNA, 19 nt, Artificial Sequence
  Description of Artificial Sequence: Synthetic oligonucleotide
  Antisense strand to SEQ ID NO: 1336966
uucccuaggagugaugugg

SEQ ID NO: 1336968 - RNA, 19 nt, Artificial Sequence
  Description of Artificial Sequence: Synthetic oligonucleotide
  Sense strand starting at position 1090 of SEQ ID NO: 1242295
agcagaagccucuaguucu

SEQ ID NO: 1336969 - RNA, 19 nt, Artificial Sequence
  Description of Artificial Sequence: Synthetic oligonucleotide
  Antisense strand to SEQ ID NO: 1336968
agaacuagaggcuucugcu

SEQ ID NO: 1336970 - RNA, 19 nt, Artificial Sequence
  Description of Artificial Sequence: Synthetic oligonucleotide
  Sense strand starting at position 1096 of SEQ ID NO: 1242295
agccucuaguucucacuua

SEQ ID NO: 1336971 - RNA, 19 nt, Artificial Sequence
  Description of Artificial Sequence: Synthetic oligonucleotide
  Antisense strand to SEQ ID NO: 1336970
uaagugagaacuagaggcu

SEQ ID NO: 1336972 - RNA, 19 nt, Artificial Sequence
  Description of Artificial Sequence: Synthetic oligonucleotide
  Sense strand starting at position 1444 of SEQ ID NO: 1242295
cccuuaaucccagguuugu

SEQ ID NO: 1336973 - RNA, 19 nt, Artificial Sequence
  Description of Artificial Sequence: Synthetic oligonucleotide
  Antisense strand to SEQ ID NO: 1336972
acaaaccugggauuaaggg

SEQ ID NO: 1336974 - RNA, 19 nt, Artificial Sequence
  Description of Artificial Sequence: Synthetic oligonucleotide
  Sense strand starting at position 1455 of SEQ ID NO: 1242295
agguuuguuuauccaagca

SEQ ID NO: 1336975 - RNA, 19 nt, Artificial Sequence
  Description of Artificial Sequence: Synthetic oligonucleotide
  Antisense strand to SEQ ID NO: 1336974
ugcuuggauaaacaaaccu

SEQ ID NO: 1336976 - RNA, 19 nt, Artificial Sequence
  Description of Artificial Sequence: Synthetic oligonucleotide
  Sense strand starting at position 1508 of SEQ ID NO: 1242295
ccuggauccuaggagacau

SEQ ID NO: 1336977 - RNA, 19 nt, Artificial Sequence
  Description of Artificial Sequence: Synthetic oligonucleotide
  Antisense strand to SEQ ID NO: 1336976
augucuccuaggauccagg

SEQ ID NO: 1336978 - RNA, 19 nt, Artificial Sequence
  Description of Artificial Sequence: Synthetic oligonucleotide
  Sense strand starting at position 1706 of SEQ ID NO: 1242295
aagcguuccucuuugcaga

SEQ ID NO: 1336979 - RNA, 19 nt, Artificial Sequence
  Description of Artificial Sequence: Synthetic oligonucleotide
  Antisense strand to SEQ ID NO: 1336978
ucugcaaagaggaacgcuu

SEQ ID NO: 1336980 - RNA, 19 nt, Artificial Sequence
  Description of Artificial Sequence: Synthetic oligonucleotide
  Sense strand starting at position 1707 of SEQ ID NO: 1242295
agcguuccucuuugcagaa

SEQ ID NO: 1336981 - RNA, 19 nt, Artificial Sequence
  Description of Artificial Sequence: Synthetic oligonucleotide
  Antisense strand to SEQ ID NO: 1336980
uucugcaaagaggaacgcu

SEQ ID NO: 1336982 - RNA, 19 nt, Artificial Sequence
  Description of Artificial Sequence: Synthetic oligonucleotide
  Sense strand starting at position 1708 of SEQ ID NO: 1242295
gcguuccucuuugcagaau

SEQ ID NO: 1336983 - RNA, 19 nt, Artificial Sequence
  Description of Artificial Sequence: Synthetic oligonucleotide
  Antisense strand to SEQ ID NO: 1336982
auucugcaaagaggaacgc

SEQ ID NO: 1336984 - RNA, 19 nt, Artificial Sequence
  Description of Artificial Sequence: Synthetic oligonucleotide
  Sense strand starting at position 1719 of SEQ ID NO: 1242295
ugcagaaucucagcagaca

SEQ ID NO: 1336985 - RNA, 19 nt, Artificial Sequence
  Description of Artificial Sequence: Synthetic oligonucleotide
  Antisense strand to SEQ ID NO: 1336984
ugucugcugagauucugca

SEQ ID NO: 1336986 - RNA, 19 nt, Artificial Sequence
  Description of Artificial Sequence: Synthetic oligonucleotide
  Sense strand starting at position 1811 of SEQ ID NO: 1242295
cgagcugcuccagaaaucu

SEQ ID NO: 1336987 - RNA, 19 nt, Artificial Sequence
  Description of Artificial Sequence: Synthetic oligonucleotide
  Antisense strand to SEQ ID NO: 1336986
agauuucuggagcagcucg

SEQ ID NO: 1336988 - RNA, 19 nt, Artificial Sequence
  Description of Artificial Sequence: Synthetic oligonucleotide
  Sense strand starting at position 1820 of SEQ ID NO: 1242295
ccagaaaucuaguugcucu

SEQ ID NO: 1336989 - RNA, 19 nt, Artificial Sequence
  Description of Artificial Sequence: Synthetic oligonucleotide
  Antisense strand to SEQ ID NO: 1336988
agagcaacuagauuucugg

SEQ ID NO: 1336990 - RNA, 19 nt, Artificial Sequence
  Description of Artificial Sequence: Synthetic oligonucleotide
  Sense strand starting at position 1889 of SEQ ID NO: 1242295
aggcccaucugccuuguaa

SEQ ID NO: 1336991 - RNA, 19 nt, Artificial Sequence
  Description of Artificial Sequence: Synthetic oligonucleotide
  Antisense strand to SEQ ID NO: 1336990
uuacaaggcagaugggccu

SEQ ID NO: 1336992 - RNA, 19 nt, Artificial Sequence
  Description of Artificial Sequence: Synthetic oligonucleotide
  Sense strand starting at position 1891 of SEQ ID NO: 1242295
gcccaucugccuuguaaau

SEQ ID NO: 1336993 - RNA, 19 nt, Artificial Sequence
  Description of Artificial Sequence: Synthetic oligonucleotide
  Antisense strand to SEQ ID NO: 1336992
auuuacaaggcagaugggc

SEQ ID NO: 1336994 - RNA, 19 nt, Artificial Sequence
  Description of Artificial Sequence: Synthetic oligonucleotide
  Sense strand starting at position 2141 of SEQ ID NO: 1242295
gguggucucuggucagauu

SEQ ID NO: 1336995 - RNA, 19 nt, Artificial Sequence
  Description of Artificial Sequence: Synthetic oligonucleotide
  Antisense strand to SEQ ID NO: 1336994
aaucugaccagagaccacc

SEQ ID NO: 1336996 - RNA, 19 nt, Artificial Sequence
  Description of Artificial Sequence: Synthetic oligonucleotide
  Sense strand starting at position 3227 of SEQ ID NO: 1242295
uagaauugucgcggcugga

SEQ ID NO: 1336997 - RNA, 19 nt, Artificial Sequence
  Description of Artificial Sequence: Synthetic oligonucleotide
  Antisense strand to SEQ ID NO: 1336996
uccagccgcgacaauucua

SEQ ID NO: 1336998 - RNA, 19 nt, Artificial Sequence
  Description of Artificial Sequence: Synthetic oligonucleotide
  Sense strand starting at position 3407 of SEQ ID NO: 1242295
ugaccaagccucuggaaau

SEQ ID NO: 1336999 - RNA, 19 nt, Artificial Sequence
  Description of Artificial Sequence: Synthetic oligonucleotide
  Antisense strand to SEQ ID NO: 1336998
auuuccagaggcuugguca

SEQ ID NO: 1337000 - RNA, 19 nt, Artificial Sequence
  Description of Artificial Sequence: Synthetic oligonucleotide
  Sense strand starting at position 3560 of SEQ ID NO: 1242295
ggaucagguucccucgaua

SEQ ID NO: 1337001 - RNA, 19 nt, Artificial Sequence
  Description of Artificial Sequence: Synthetic oligonucleotide
  Antisense strand to SEQ ID NO: 1337000
uaucgagggaaccugaucc

SEQ ID NO: 1337002 - RNA, 19 nt, Artificial Sequence
  Description of Artificial Sequence: Synthetic oligonucleotide
  Sense strand starting at position 3563 of SEQ ID NO: 1242295
ucagguucccucgauaucu

SEQ ID NO: 1337003 - RNA, 19 nt, Artificial Sequence
  Description of Artificial Sequence: Synthetic oligonucleotide
  Antisense strand to SEQ ID NO: 1337002
agauaucgagggaaccuga

SEQ ID NO: 1337004 - RNA, 19 nt, Artificial Sequence
  Description of Artificial Sequence: Synthetic oligonucleotide
  Sense strand starting at position 3572 of SEQ ID NO: 1242295
cucgauaucuguuugaaug

SEQ ID NO: 1337005 - RNA, 19 nt, Artificial Sequence
  Description of Artificial Sequence: Synthetic oligonucleotide
  Antisense strand to SEQ ID NO: 1337004
cauucaaacagauaucgag

SEQ ID NO: 1337006 - RNA, 19 nt, Artificial Sequence
  Description of Artificial Sequence: Synthetic oligonucleotide
  Sense strand starting at position 3573 of SEQ ID NO: 1242295
ucgauaucuguuugaaugg

SEQ ID NO: 1337007 - RNA, 19 nt, Artificial Sequence
  Description of Artificial Sequence: Synthetic oligonucleotide
  Antisense strand to SEQ ID NO: 1337006
ccauucaaacagauaucga

SEQ ID NO: 1337008 - RNA, 19 nt, Artificial Sequence
  Description of Artificial Sequence: Synthetic oligonucleotide
  Sense strand starting at position 3574 of SEQ ID NO: 1242295
cgauaucuguuugaaugga

SEQ ID NO: 1337009 - RNA, 19 nt, Artificial Sequence
  Description of Artificial Sequence: Synthetic oligonucleotide
  Antisense strand to SEQ ID NO: 1337008
uccauucaaacagauaucg

SEQ ID NO: 1337010 - RNA, 19 nt, Artificial Sequence
  Description of Artificial Sequence: Synthetic oligonucleotide
  Sense strand starting at position 3599 of SEQ ID NO: 1242295
aagggaaaucccugucccu

SEQ ID NO: 1337011 - RNA, 19 nt, Artificial Sequence
  Description of Artificial Sequence: Synthetic oligonucleotide
  Antisense strand to SEQ ID NO: 1337010
agggacagggauuucccuu

SEQ ID NO: 1337012 - RNA, 19 nt, Artificial Sequence
  Description of Artificial Sequence: Synthetic oligonucleotide
  Sense strand starting at position 3681 of SEQ ID NO: 1242295
ucaucuguccuguagccau

SEQ ID NO: 1337013 - RNA, 19 nt, Artificial Sequence
  Description of Artificial Sequence: Synthetic oligonucleotide
  Antisense strand to SEQ ID NO: 1337012
auggcuacaggacagauga

SEQ ID NO: 1337014 - RNA, 19 nt, Artificial Sequence
  Description of Artificial Sequence: Synthetic oligonucleotide
  Sense strand starting at position 3856 of SEQ ID NO: 1242295
gcccaucuuuacucaguga

SEQ ID NO: 1337015 - RNA, 19 nt, Artificial Sequence
  Description of Artificial Sequence: Synthetic oligonucleotide
  Antisense strand to SEQ ID NO: 1337014
ucacugaguaaagaugggc

SEQ ID NO: 1337016 - RNA, 19 nt, Artificial Sequence
  Description of Artificial Sequence: Synthetic oligonucleotide
  Sense strand starting at position 3860 of SEQ ID NO: 1242295
aucuuuacucagugauguc

SEQ ID NO: 1337017 - RNA, 19 nt, Artificial Sequence
  Description of Artificial Sequence: Synthetic oligonucleotide
  Antisense strand to SEQ ID NO: 1337016
gacaucacugaguaaagau

SEQ ID NO: 1337018 - RNA, 19 nt, Artificial Sequence
  Description of Artificial Sequence: Synthetic oligonucleotide
  Sense strand starting at position 3887 of SEQ ID NO: 1242295
cacuguucuugggaccaca

SEQ ID NO: 1337019 - RNA, 19 nt, Artificial Sequence
  Description of Artificial Sequence: Synthetic oligonucleotide
  Antisense strand to SEQ ID NO: 1337018
uguggucccaagaacagug

SEQ ID NO: 1337020 - RNA, 19 nt, Artificial Sequence
  Description of Artificial Sequence: Synthetic oligonucleotide
  Sense strand starting at position 309 of SEQ ID NO: 1242296
aagugacaaugugagagau

SEQ ID NO: 1337021 - RNA, 19 nt, Artificial Sequence
  Description of Artificial Sequence: Synthetic oligonucleotide
  Antisense strand to SEQ ID NO: 1337020
aucucucacauugucacuu

SEQ ID NO: 1337022 - RNA, 19 nt, Artificial Sequence
  Description of Artificial Sequence: Synthetic oligonucleotide
  Sense strand starting at position 311 of SEQ ID NO: 1242296
gugacaaugugagagauuc

SEQ ID NO: 1337023 - RNA, 19 nt, Artificial Sequence
  Description of Artificial Sequence: Synthetic oligonucleotide
  Antisense strand to SEQ ID NO: 1337022
gaaucucucacauugucac

SEQ ID NO: 1337024 - RNA, 19 nt, Artificial Sequence
  Description of Artificial Sequence: Synthetic oligonucleotide
  Sense strand starting at position 319 of SEQ ID NO: 1242296
gugagagauucaggaccaa

SEQ ID NO: 1337025 - RNA, 19 nt, Artificial Sequence
  Description of Artificial Sequence: Synthetic oligonucleotide
  Antisense strand to SEQ ID NO: 1337024
uugguccugaaucucucac

SEQ ID NO: 1337026 - RNA, 19 nt, Artificial Sequence
  Description of Artificial Sequence: Synthetic oligonucleotide
  Sense strand starting at position 361 of SEQ ID NO: 1242296
ccaggagguguccggagaa

SEQ ID NO: 1337027 - RNA, 19 nt, Artificial Sequence
  Description of Artificial Sequence: Synthetic oligonucleotide
  Antisense strand to SEQ ID NO: 1337026
uucuccggacaccuccugg

SEQ ID NO: 1337028 - RNA, 19 nt, Artificial Sequence
  Description of Artificial Sequence: Synthetic oligonucleotide
  Sense strand starting at position 363 of SEQ ID NO: 1242296
aggagguguccggagaacu

SEQ ID NO: 1337029 - RNA, 19 nt, Artificial Sequence
  Description of Artificial Sequence: Synthetic oligonucleotide
  Antisense strand to SEQ ID NO: 1337028
aguucuccggacaccuccu

SEQ ID NO: 1337030 - RNA, 19 nt, Artificial Sequence
  Description of Artificial Sequence: Synthetic oligonucleotide
  Sense strand starting at position 373 of SEQ ID NO: 1242296
cggagaacuucccuuaauc

SEQ ID NO: 1337031 - RNA, 19 nt, Artificial Sequence
  Description of Artificial Sequence: Synthetic oligonucleotide
  Antisense strand to SEQ ID NO: 1337030
gauuaagggaaguucuccg

SEQ ID NO: 1337032 - RNA, 19 nt, Artificial Sequence
  Description of Artificial Sequence: Synthetic oligonucleotide
  Sense strand starting at position 666 of SEQ ID NO: 1242296
ggaagugacuuaucuacca

SEQ ID NO: 1337033 - RNA, 19 nt, Artificial Sequence
  Description of Artificial Sequence: Synthetic oligonucleotide
  Antisense strand to SEQ ID NO: 1337032
ugguagauaagucacuucc

SEQ ID NO: 1337034 - RNA, 19 nt, Artificial Sequence
  Description of Artificial Sequence: Synthetic oligonucleotide
  Sense strand starting at position 1051 of SEQ ID NO: 1242296
cagaacugaguuugcaagu

SEQ ID NO: 1337035 - RNA, 19 nt, Artificial Sequence
  Description of Artificial Sequence: Synthetic oligonucleotide
  Antisense strand to SEQ ID NO: 1337034
acuugcaaacucaguucug

SEQ ID NO: 1337036 - RNA, 19 nt, Artificial Sequence
  Description of Artificial Sequence: Synthetic oligonucleotide
  Sense strand starting at position 1052 of SEQ ID NO: 1242296
agaacugaguuugcaagua

SEQ ID NO: 1337037 - RNA, 19 nt, Artificial Sequence
  Description of Artificial Sequence: Synthetic oligonucleotide
  Antisense strand to SEQ ID NO: 1337036
uacuugcaaacucaguucu

SEQ ID NO: 1337038 - RNA, 19 nt, Artificial Sequence
  Description of Artificial Sequence: Synthetic oligonucleotide
  Sense strand starting at position 1178 of SEQ ID NO: 1242296
ggacuaagaucagacccua

SEQ ID NO: 1337039 - RNA, 19 nt, Artificial Sequence
  Description of Artificial Sequence: Synthetic oligonucleotide
  Antisense strand to SEQ ID NO: 1337038
uagggucugaucuuagucc

SEQ ID NO: 1337040 - RNA, 19 nt, Artificial Sequence
  Description of Artificial Sequence: Synthetic oligonucleotide
  Sense strand starting at position 1228 of SEQ ID NO: 1242296
gcuagcugcucagauggau

SEQ ID NO: 1337041 - RNA, 19 nt, Artificial Sequence
  Description of Artificial Sequence: Synthetic oligonucleotide
  Antisense strand to SEQ ID NO: 1337040
auccaucugagcagcuagc

SEQ ID NO: 1337042 - RNA, 19 nt, Artificial Sequence
  Description of Artificial Sequence: Synthetic oligonucleotide
  Sense strand starting at position 1336 of SEQ ID NO: 1242296
uggucacauccuugagaca

SEQ ID NO: 1337043 - RNA, 19 nt, Artificial Sequence
  Description of Artificial Sequence: Synthetic oligonucleotide
  Antisense strand to SEQ ID NO: 1337042
ugucucaaggaugugacca

SEQ ID NO: 1337044 - RNA, 19 nt, Artificial Sequence
  Description of Artificial Sequence: Synthetic oligonucleotide
  Sense strand starting at position 1395 of SEQ ID NO: 1242296
ggauccgauccuugagaca

SEQ ID NO: 1337045 - RNA, 19 nt, Artificial Sequence
  Description of Artificial Sequence: Synthetic oligonucleotide
  Antisense strand to SEQ ID NO: 1337044
ugucucaaggaucggaucc

SEQ ID NO: 1337046 - RNA, 19 nt, Artificial Sequence
  Description of Artificial Sequence: Synthetic oligonucleotide
  Sense strand starting at position 1569 of SEQ ID NO: 1242296
ucaucaaucucgcuggagu

SEQ ID NO: 1337047 - RNA, 19 nt, Artificial Sequence
  Description of Artificial Sequence: Synthetic oligonucleotide
  Antisense strand to SEQ ID NO: 1337046
acuccagcgagauugauga

SEQ ID NO: 1337048 - RNA, 19 nt, Artificial Sequence
  Description of Artificial Sequence: Synthetic oligonucleotide
  Sense strand starting at position 1586 of SEQ ID NO: 1242296
gucucagucuccuggucaa

SEQ ID NO: 1337049 - RNA, 19 nt, Artificial Sequence
  Description of Artificial Sequence: Synthetic oligonucleotide
  Antisense strand to SEQ ID NO: 1337048
uugaccaggagacugagac

SEQ ID NO: 1337050 - RNA, 19 nt, Artificial Sequence
  Description of Artificial Sequence: Synthetic oligonucleotide
  Sense strand starting at position 1598 of SEQ ID NO: 1242296
uggucaauccaaugggaac

SEQ ID NO: 1337051 - RNA, 19 nt, Artificial Sequence
  Description of Artificial Sequence: Synthetic oligonucleotide
  Antisense strand to SEQ ID NO: 1337050
guucccauuggauugacca

SEQ ID NO: 1337052 - RNA, 19 nt, Artificial Sequence
  Description of Artificial Sequence: Synthetic oligonucleotide
  Sense strand starting at position 1644 of SEQ ID NO: 1242296
gugagaaagucagcgagaa

SEQ ID NO: 1337053 - RNA, 19 nt, Artificial Sequence
  Description of Artificial Sequence: Synthetic oligonucleotide
  Antisense strand to SEQ ID NO: 1337052
uucucgcugacuuucucac

SEQ ID NO: 1337054 - RNA, 19 nt, Artificial Sequence
  Description of Artificial Sequence: Synthetic oligonucleotide
  Sense strand starting at position 1645 of SEQ ID NO: 1242296
ugagaaagucagcgagaau

SEQ ID NO: 1337055 - RNA, 19 nt, Artificial Sequence
  Description of Artificial Sequence: Synthetic oligonucleotide
  Antisense strand to SEQ ID NO: 1337054
auucucgcugacuuucuca

SEQ ID NO: 1337056 - RNA, 19 nt, Artificial Sequence
  Description of Artificial Sequence: Synthetic oligonucleotide
  Sense strand starting at position 1731 of SEQ ID NO: 1242296
ggcucuuccugaggugaga

SEQ ID NO: 1337057 - RNA, 19 nt, Artificial Sequence
  Description of Artificial Sequence: Synthetic oligonucleotide
  Antisense strand to SEQ ID NO: 1337056
ucucaccucaggaagagcc

SEQ ID NO: 1337058 - RNA, 19 nt, Artificial Sequence
  Description of Artificial Sequence: Synthetic oligonucleotide
  Sense strand starting at position 2184 of SEQ ID NO: 1242296
cggagaagguuucccgcau

SEQ ID NO: 1337059 - RNA, 19 nt, Artificial Sequence
  Description of Artificial Sequence: Synthetic oligonucleotide
  Antisense strand to SEQ ID NO: 1337058
augcgggaaaccuucuccg

SEQ ID NO: 1337060 - RNA, 19 nt, Artificial Sequence
  Description of Artificial Sequence: Synthetic oligonucleotide
  Sense strand starting at position 2941 of SEQ ID NO: 1242296
aaauuaagugcaugugaga

SEQ ID NO: 1337061 - RNA, 19 nt, Artificial Sequence
  Description of Artificial Sequence: Synthetic oligonucleotide
  Antisense strand to SEQ ID NO: 1337060
ucucacaugcacuuaauuu

SEQ ID NO: 1337062 - RNA, 19 nt, Artificial Sequence
  Description of Artificial Sequence: Synthetic oligonucleotide
  Sense strand starting at position 2946 of SEQ ID NO: 1242296
aagugcaugugagaucaau

SEQ ID NO: 1337063 - RNA, 19 nt, Artificial Sequence
  Description of Artificial Sequence: Synthetic oligonucleotide
  Antisense strand to SEQ ID NO: 1337062
auugaucucacaugcacuu

SEQ ID NO: 1337064 - RNA, 19 nt, Artificial Sequence
  Description of Artificial Sequence: Synthetic oligonucleotide
  Sense strand starting at position 2952 of SEQ ID NO: 1242296
augugagaucaauggugac

SEQ ID NO: 1337065 - RNA, 19 nt, Artificial Sequence
  Description of Artificial Sequence: Synthetic oligonucleotide
  Antisense strand to SEQ ID NO: 1337064
gucaccauugaucucacau

SEQ ID NO: 1337066 - RNA, 19 nt, Artificial Sequence
  Description of Artificial Sequence: Synthetic oligonucleotide
  Sense strand starting at position 2955 of SEQ ID NO: 1242296
ugagaucaauggugaccuu

SEQ ID NO: 1337067 - RNA, 19 nt, Artificial Sequence
  Description of Artificial Sequence: Synthetic oligonucleotide
  Antisense strand to SEQ ID NO: 1337066
aaggucaccauugaucuca

SEQ ID NO: 1337068 - RNA, 19 nt, Artificial Sequence
  Description of Artificial Sequence: Synthetic oligonucleotide
  Sense strand starting at position 2958 of SEQ ID NO: 1242296
gaucaauggugaccuucuu

SEQ ID NO: 1337069 - RNA, 19 nt, Artificial Sequence
  Description of Artificial Sequence: Synthetic oligonucleotide
  Antisense strand to SEQ ID NO: 1337068
aagaaggucaccauugauc

SEQ ID NO: 1337070 - RNA, 19 nt, Artificial Sequence
  Description of Artificial Sequence: Synthetic oligonucleotide
  Sense strand starting at position 3183 of SEQ ID NO: 1242296
ugaggcugauauuaucaca

SEQ ID NO: 1337071 - RNA, 19 nt, Artificial Sequence
  Description of Artificial Sequence: Synthetic oligonucleotide
  Antisense strand to SEQ ID NO: 1337070
ugugauaauaucagccuca

SEQ ID NO: 1337072 - RNA, 19 nt, Artificial Sequence
  Description of Artificial Sequence: Synthetic oligonucleotide
  Sense strand starting at position 3188 of SEQ ID NO: 1242296
cugauauuaucacacuggu

SEQ ID NO: 1337073 - RNA, 19 nt, Artificial Sequence
  Description of Artificial Sequence: Synthetic oligonucleotide
  Antisense strand to SEQ ID NO: 1337072
accagugugauaauaucag

SEQ ID NO: 1337074 - RNA, 19 nt, Artificial Sequence
  Description of Artificial Sequence: Synthetic oligonucleotide
  Sense strand starting at position 3194 of SEQ ID NO: 1242296
uuaucacacuggucaagaa

SEQ ID NO: 1337075 - RNA, 19 nt, Artificial Sequence
  Description of Artificial Sequence: Synthetic oligonucleotide
  Antisense strand to SEQ ID NO: 1337074
uucuugaccagugugauaa

SEQ ID NO: 1337076 - RNA, 19 nt, Artificial Sequence
  Description of Artificial Sequence: Synthetic oligonucleotide
  Sense strand starting at position 3879 of SEQ ID NO: 1242296
agagcugugcagcauucua

SEQ ID NO: 1337077 - RNA, 19 nt, Artificial Sequence
  Description of Artificial Sequence: Synthetic oligonucleotide
  Antisense strand to SEQ ID NO: 1337076
uagaaugcugcacagcucu

SEQ ID NO: 1337078 - RNA, 19 nt, Artificial Sequence
  Description of Artificial Sequence: Synthetic oligonucleotide
  Sense strand starting at position 3887 of SEQ ID NO: 1242296
gcagcauucuacuccaaug

SEQ ID NO: 1337079 - RNA, 19 nt, Artificial Sequence
  Description of Artificial Sequence: Synthetic oligonucleotide
  Antisense strand to SEQ ID NO: 1337078
cauuggaguagaaugcugc

SEQ ID NO: 1337080 - RNA, 19 nt, Artificial Sequence
  Description of Artificial Sequence: Synthetic oligonucleotide
  Sense strand starting at position 3914 of SEQ ID NO: 1242296
cucagaagaucuuguaucu

SEQ ID NO: 1337081 - RNA, 19 nt, Artificial Sequence
  Description of Artificial Sequence: Synthetic oligonucleotide
  Antisense strand to SEQ ID NO: 1337080
agauacaagaucuucugag

SEQ ID NO: 1337082 - RNA, 19 nt, Artificial Sequence
  Description of Artificial Sequence: Synthetic oligonucleotide
  Sense strand starting at position 3919 of SEQ ID NO: 1242296
aagaucuuguaucuggaaa

SEQ ID NO: 1337083 - RNA, 19 nt, Artificial Sequence
  Description of Artificial Sequence: Synthetic oligonucleotide
  Antisense strand to SEQ ID NO: 1337082
uuuccagauacaagaucuu

SEQ ID NO: 1337084 - RNA, 19 nt, Artificial Sequence
  Description of Artificial Sequence: Synthetic oligonucleotide
  Sense strand starting at position 4 of SEQ ID NO: 1242297
cacagaugagcccaaguua

SEQ ID NO: 1337085 - RNA, 19 nt, Artificial Sequence
  Description of Artificial Sequence: Synthetic oligonucleotide
  Antisense strand to SEQ ID NO: 1337084
uaacuugggcucaucugug

SEQ ID NO: 1337086 - RNA, 19 nt, Artificial Sequence
  Description of Artificial Sequence: Synthetic oligonucleotide
  Sense strand starting at position 192 of SEQ ID NO: 1242297
gcccauuugcccugaacag

SEQ ID NO: 1337087 - RNA, 19 nt, Artificial Sequence
  Description of Artificial Sequence: Synthetic oligonucleotide
  Antisense strand to SEQ ID NO: 1337086
cuguucagggcaaaugggc

SEQ ID NO: 1337088 - RNA, 19 nt, Artificial Sequence
  Description of Artificial Sequence: Synthetic oligonucleotide
  Sense strand starting at position 218 of SEQ ID NO: 1242297
uagguuggagggugaauau

SEQ ID NO: 1337089 - RNA, 19 nt, Artificial Sequence
  Description of Artificial Sequence: Synthetic oligonucleotide
  Antisense strand to SEQ ID NO: 1337088
auauucacccuccaaccua

SEQ ID NO: 1337090 - RNA, 19 nt, Artificial Sequence
  Description of Artificial Sequence: Synthetic oligonucleotide
  Sense strand starting at position 286 of SEQ ID NO: 1242297
auagcuuacuugucaagac

SEQ ID NO: 1337091 - RNA, 19 nt, Artificial Sequence
  Description of Artificial Sequence: Synthetic oligonucleotide
  Antisense strand to SEQ ID NO: 1337090
gucuugacaaguaagcuau

SEQ ID NO: 1337092 - RNA, 19 nt, Artificial Sequence
  Description of Artificial Sequence: Synthetic oligonucleotide
  Sense strand starting at position 290 of SEQ ID NO: 1242297
cuuacuugucaagacugau

SEQ ID NO: 1337093 - RNA, 19 nt, Artificial Sequence
  Description of Artificial Sequence: Synthetic oligonucleotide
  Antisense strand to SEQ ID NO: 1337092
aucagucuugacaaguaag

SEQ ID NO: 1337094 - RNA, 19 nt, Artificial Sequence
  Description of Artificial Sequence: Synthetic oligonucleotide
  Sense strand starting at position 293 of SEQ ID NO: 1242297
acuugucaagacugauguu

SEQ ID NO: 1337095 - RNA, 19 nt, Artificial Sequence
  Description of Artificial Sequence: Synthetic oligonucleotide
  Antisense strand to SEQ ID NO: 1337094
aacaucagucuugacaagu

SEQ ID NO: 1337096 - RNA, 19 nt, Artificial Sequence
  Description of Artificial Sequence: Synthetic oligonucleotide
  Sense strand starting at position 1175 of SEQ ID NO: 1242297
cucuuaaaugaggguccaa

SEQ ID NO: 1337097 - RNA, 19 nt, Artificial Sequence
  Description of Artificial Sequence: Synthetic oligonucleotide
  Antisense strand to SEQ ID NO: 1337096
uuggacccucauuuaagag

SEQ ID NO: 1337098 - RNA, 19 nt, Artificial Sequence
  Description of Artificial Sequence: Synthetic oligonucleotide
  Sense strand starting at position 1378 of SEQ ID NO: 1242297
cuggguuaauuccucuauu

SEQ ID NO: 1337099 - RNA, 19 nt, Artificial Sequence
  Description of Artificial Sequence: Synthetic oligonucleotide
  Antisense strand to SEQ ID NO: 1337098
aauagaggaauuaacccag

SEQ ID NO: 1337100 - RNA, 19 nt, Artificial Sequence
  Description of Artificial Sequence: Synthetic oligonucleotide
  Sense strand starting at position 2058 of SEQ ID NO: 1242297
aguugucaugguuauauga

SEQ ID NO: 1337101 - RNA, 19 nt, Artificial Sequence
  Description of Artificial Sequence: Synthetic oligonucleotide
  Antisense strand to SEQ ID NO: 1337100
ucauauaaccaugacaacu

SEQ ID NO: 1337102 - RNA, 19 nt, Artificial Sequence
  Description of Artificial Sequence: Synthetic oligonucleotide
  Sense strand starting at position 2067 of SEQ ID NO: 1242297
gguuauaugacccaggguu

SEQ ID NO: 1337103 - RNA, 19 nt, Artificial Sequence
  Description of Artificial Sequence: Synthetic oligonucleotide
  Antisense strand to SEQ ID NO: 1337102
aacccugggucauauaacc

SEQ ID NO: 1337104 - RNA, 19 nt, Artificial Sequence
  Description of Artificial Sequence: Synthetic oligonucleotide
  Sense strand starting at position 2171 of SEQ ID NO: 1242297
cuuaguauuccagagccau

SEQ ID NO: 1337105 - RNA, 19 nt, Artificial Sequence
  Description of Artificial Sequence: Synthetic oligonucleotide
  Antisense strand to SEQ ID NO: 1337104
auggcucuggaauacuaag

SEQ ID NO: 1337106 - RNA, 19 nt, Artificial Sequence
  Description of Artificial Sequence: Synthetic oligonucleotide
  Sense strand starting at position 2459 of SEQ ID NO: 1242297
gagauaaauugcccucagu

SEQ ID NO: 1337107 - RNA, 19 nt, Artificial Sequence
  Description of Artificial Sequence: Synthetic oligonucleotide
  Antisense strand to SEQ ID NO: 1337106
acugagggcaauuuaucuc

SEQ ID NO: 1337108 - RNA, 19 nt, Artificial Sequence
  Description of Artificial Sequence: Synthetic oligonucleotide
  Sense strand starting at position 2462 of SEQ ID NO: 1242297
auaaauugcccucagugaa

SEQ ID NO: 1337109 - RNA, 19 nt, Artificial Sequence
  Description of Artificial Sequence: Synthetic oligonucleotide
  Antisense strand to SEQ ID NO: 1337108
uucacugagggcaauuuau

SEQ ID NO: 1337110 - RNA, 19 nt, Artificial Sequence
  Description of Artificial Sequence: Synthetic oligonucleotide
  Sense strand starting at position 2512 of SEQ ID NO: 1242297
caauauagccuuugaguug

SEQ ID NO: 1337111 - RNA, 19 nt, Artificial Sequence
  Description of Artificial Sequence: Synthetic oligonucleotide
  Antisense strand to SEQ ID NO: 1337110
caacucaaaggcuauauug

SEQ ID NO: 1337112 - RNA, 19 nt, Artificial Sequence
  Description of Artificial Sequence: Synthetic oligonucleotide
  Sense strand starting at position 2517 of SEQ ID NO: 1242297
uagccuuugaguugaggga

SEQ ID NO: 1337113 - RNA, 19 nt, Artificial Sequence
  Description of Artificial Sequence: Synthetic oligonucleotide
  Antisense strand to SEQ ID NO: 1337112
ucccucaacucaaaggcua

SEQ ID NO: 1337114 - RNA, 19 nt, Artificial Sequence
  Description of Artificial Sequence: Synthetic oligonucleotide
  Sense strand starting at position 2571 of SEQ ID NO: 1242297
ugaacuuuaccuggccuaa

SEQ ID NO: 1337115 - RNA, 19 nt, Artificial Sequence
  Description of Artificial Sequence: Synthetic oligonucleotide
  Antisense strand to SEQ ID NO: 1337114
uuaggccagguaaaguuca

SEQ ID NO: 1337116 - RNA, 19 nt, Artificial Sequence
  Description of Artificial Sequence: Synthetic oligonucleotide
  Sense strand starting at position 2644 of SEQ ID NO: 1242297
cuggauaagcgacaguguu

SEQ ID NO: 1337117 - RNA, 19 nt, Artificial Sequence
  Description of Artificial Sequence: Synthetic oligonucleotide
  Antisense strand to SEQ ID NO: 1337116
aacacugucgcuuauccag

SEQ ID NO: 1337118 - RNA, 19 nt, Artificial Sequence
  Description of Artificial Sequence: Synthetic oligonucleotide
  Sense strand starting at position 2654 of SEQ ID NO: 1242297
gacaguguugacuaggauu

SEQ ID NO: 1337119 - RNA, 19 nt, Artificial Sequence
  Description of Artificial Sequence: Synthetic oligonucleotide
  Antisense strand to SEQ ID NO: 1337118
aauccuagucaacacuguc

SEQ ID NO: 1337120 - RNA, 19 nt, Artificial Sequence
  Description of Artificial Sequence: Synthetic oligonucleotide
  Sense strand starting at position 2656 of SEQ ID NO: 1242297
caguguugacuaggauucu

SEQ ID NO: 1337121 - RNA, 19 nt, Artificial Sequence
  Description of Artificial Sequence: Synthetic oligonucleotide
  Antisense strand to SEQ ID NO: 1337120
agaauccuagucaacacug

SEQ ID NO: 1337122 - RNA, 19 nt, Artificial Sequence
  Description of Artificial Sequence: Synthetic oligonucleotide
  Sense strand starting at position 2761 of SEQ ID NO: 1242297
aguuccuggcuuuagauau

SEQ ID NO: 1337123 - RNA, 19 nt, Artificial Sequence
  Description of Artificial Sequence: Synthetic oligonucleotide
  Antisense strand to SEQ ID NO: 1337122
auaucuaaagccaggaacu

SEQ ID NO: 1337124 - RNA, 19 nt, Artificial Sequence
  Description of Artificial Sequence: Synthetic oligonucleotide
  Sense strand starting at position 2765 of SEQ ID NO: 1242297
ccuggcuuuagauaugaug

SEQ ID NO: 1337125 - RNA, 19 nt, Artificial Sequence
  Description of Artificial Sequence: Synthetic oligonucleotide
  Antisense strand to SEQ ID NO: 1337124
caucauaucuaaagccagg

SEQ ID NO: 1337126 - RNA, 19 nt, Artificial Sequence
  Description of Artificial Sequence: Synthetic oligonucleotide
  Sense strand starting at position 2767 of SEQ ID NO: 1242297
uggcuuuagauaugaugga

SEQ ID NO: 1337127 - RNA, 19 nt, Artificial Sequence
  Description of Artificial Sequence: Synthetic oligonucleotide
  Antisense strand to SEQ ID NO: 1337126
uccaucauaucuaaagcca

SEQ ID NO: 1337128 - RNA, 19 nt, Artificial Sequence
  Description of Artificial Sequence: Synthetic oligonucleotide
  Sense strand starting at position 2792 of SEQ ID NO: 1242297
ugguauaagccauagcuuu

SEQ ID NO: 1337129 - RNA, 19 nt, Artificial Sequence
  Description of Artificial Sequence: Synthetic oligonucleotide
  Antisense strand to SEQ ID NO: 1337128
aaagcuauggcuuauacca

SEQ ID NO: 1337130 - RNA, 19 nt, Artificial Sequence
  Description of Artificial Sequence: Synthetic oligonucleotide
  Sense strand starting at position 2881 of SEQ ID NO: 1242297
gguggaauuauauguauug

SEQ ID NO: 1337131 - RNA, 19 nt, Artificial Sequence
  Description of Artificial Sequence: Synthetic oligonucleotide
  Antisense strand to SEQ ID NO: 1337130
caauacauauaauuccacc

SEQ ID NO: 1337132 - RNA, 19 nt, Artificial Sequence
  Description of Artificial Sequence: Synthetic oligonucleotide
  Sense strand starting at position 2882 of SEQ ID NO: 1242297
guggaauuauauguauugu

SEQ ID NO: 1337133 - RNA, 19 nt, Artificial Sequence
  Description of Artificial Sequence: Synthetic oligonucleotide
  Antisense strand to SEQ ID NO: 1337132
acaauacauauaauuccac

SEQ ID NO: 1337134 - RNA, 19 nt, Artificial Sequence
  Description of Artificial Sequence: Synthetic oligonucleotide
  Sense strand starting at position 2895 of SEQ ID NO: 1242297
uauuguugacucuguuaag

SEQ ID NO: 1337135 - RNA, 19 nt, Artificial Sequence
  Description of Artificial Sequence: Synthetic oligonucleotide
  Antisense strand to SEQ ID NO: 1337134
cuuaacagagucaacaaua

SEQ ID NO: 1337136 - RNA, 19 nt, Artificial Sequence
  Description of Artificial Sequence: Synthetic oligonucleotide
  Sense strand starting at position 2958 of SEQ ID NO: 1242297
uaugaaagauccuugguaa

SEQ ID NO: 1337137 - RNA, 19 nt, Artificial Sequence
  Description of Artificial Sequence: Synthetic oligonucleotide
  Antisense strand to SEQ ID NO: 1337136
uuaccaaggaucuuucaua

SEQ ID NO: 1337138 - RNA, 19 nt, Artificial Sequence
  Description of Artificial Sequence: Synthetic oligonucleotide
  Sense strand starting at position 2959 of SEQ ID NO: 1242297
augaaagauccuugguaau

SEQ ID NO: 1337139 - RNA, 19 nt, Artificial Sequence
  Description of Artificial Sequence: Synthetic oligonucleotide
  Antisense strand to SEQ ID NO: 1337138
auuaccaaggaucuuucau

SEQ ID NO: 1337140 - RNA, 19 nt, Artificial Sequence
  Description of Artificial Sequence: Synthetic oligonucleotide
  Sense strand starting at position 3171 of SEQ ID NO: 1242297
gcacaaauuaucugugagg

SEQ ID NO: 1337141 - RNA, 19 nt, Artificial Sequence
  Description of Artificial Sequence: Synthetic oligonucleotide
  Antisense strand to SEQ ID NO: 1337140
ccucacagauaauuugugc

SEQ ID NO: 1337142 - RNA, 19 nt, Artificial Sequence
  Description of Artificial Sequence: Synthetic oligonucleotide
  Sense strand starting at position 3173 of SEQ ID NO: 1242297
acaaauuaucugugaggcu

SEQ ID NO: 1337143 - RNA, 19 nt, Artificial Sequence
  Description of Artificial Sequence: Synthetic oligonucleotide
  Antisense strand to SEQ ID NO: 1337142
agccucacagauaauuugu

SEQ ID NO: 1337144 - RNA, 19 nt, Artificial Sequence
  Description of Artificial Sequence: Synthetic oligonucleotide
  Sense strand starting at position 3277 of SEQ ID NO: 1242297
ccugaaagcucugccaaau

SEQ ID NO: 1337145 - RNA, 19 nt, Artificial Sequence
  Description of Artificial Sequence: Synthetic oligonucleotide
  Antisense strand to SEQ ID NO: 1337144
auuuggcagagcuuucagg

SEQ ID NO: 1337146 - RNA, 19 nt, Artificial Sequence
  Description of Artificial Sequence: Synthetic oligonucleotide
  Sense strand starting at position 3342 of SEQ ID NO: 1242297
agaggugagaaguggugaa

SEQ ID NO: 1337147 - RNA, 19 nt, Artificial Sequence
  Description of Artificial Sequence: Synthetic oligonucleotide
  Antisense strand to SEQ ID NO: 1337146
uucaccacuucucaccucu

SEQ ID NO: 1337148 - RNA, 19 nt, Artificial Sequence
  Description of Artificial Sequence: Synthetic oligonucleotide
  Sense strand starting at position 3382 of SEQ ID NO: 1242297
ggaagacagaaguguuagu

SEQ ID NO: 1337149 - RNA, 19 nt, Artificial Sequence
  Description of Artificial Sequence: Synthetic oligonucleotide
  Antisense strand to SEQ ID NO: 1337148
acuaacacuucugucuucc

SEQ ID NO: 1337150 - RNA, 19 nt, Artificial Sequence
  Description of Artificial Sequence: Synthetic oligonucleotide
  Sense strand starting at position 3499 of SEQ ID NO: 1242297
aggucaucuugcucacaag

SEQ ID NO: 1337151 - RNA, 19 nt, Artificial Sequence
  Description of Artificial Sequence: Synthetic oligonucleotide
  Antisense strand to SEQ ID NO: 1337150
cuugugagcaagaugaccu

SEQ ID NO: 1337152 - RNA, 19 nt, Artificial Sequence
  Description of Artificial Sequence: Synthetic oligonucleotide
  Sense strand starting at position 3562 of SEQ ID NO: 1242297
auaaaugaauugucaggca

SEQ ID NO: 1337153 - RNA, 19 nt, Artificial Sequence
  Description of Artificial Sequence: Synthetic oligonucleotide
  Antisense strand to SEQ ID NO: 1337152
ugccugacaauucauuuau

SEQ ID NO: 1337154 - RNA, 19 nt, Artificial Sequence
  Description of Artificial Sequence: Synthetic oligonucleotide
  Sense strand starting at position 3607 of SEQ ID NO: 1242297
gcuguacaucuacgaagaa

SEQ ID NO: 1337155 - RNA, 19 nt, Artificial Sequence
  Description of Artificial Sequence: Synthetic oligonucleotide
  Antisense strand to SEQ ID NO: 1337154
uucuucguagauguacagc

SEQ ID NO: 1337156 - RNA, 19 nt, Artificial Sequence
  Description of Artificial Sequence: Synthetic oligonucleotide
  Sense strand starting at position 3637 of SEQ ID NO: 1242297
uuuggcaucccucaugaau

SEQ ID NO: 1337157 - RNA, 19 nt, Artificial Sequence
  Description of Artificial Sequence: Synthetic oligonucleotide
  Antisense strand to SEQ ID NO: 1337156
auucaugagggaugccaaa

SEQ ID NO: 1337158 - RNA, 19 nt, Artificial Sequence
  Description of Artificial Sequence: Synthetic oligonucleotide
  Sense strand starting at position 3738 of SEQ ID NO: 1242297
ccucuuagaagagguagua

SEQ ID NO: 1337159 - RNA, 19 nt, Artificial Sequence
  Description of Artificial Sequence: Synthetic oligonucleotide
  Antisense strand to SEQ ID NO: 1337158
uacuaccucuucuaagagg

SEQ ID NO: 1337160 - RNA, 19 nt, Artificial Sequence
  Description of Artificial Sequence: Synthetic oligonucleotide
  Sense strand starting at position 3805 of SEQ ID NO: 1242297
gauggauaccacuguaaca

SEQ ID NO: 1337161 - RNA, 19 nt, Artificial Sequence
  Description of Artificial Sequence: Synthetic oligonucleotide
  Antisense strand to SEQ ID NO: 1337160
uguuacagugguauccauc

SEQ ID NO: 1337162 - RNA, 19 nt, Artificial Sequence
  Description of Artificial Sequence: Synthetic oligonucleotide
  Sense strand starting at position 3911 of SEQ ID NO: 1242297
ggcagcagucuagaugagu

SEQ ID NO: 1337163 - RNA, 19 nt, Artificial Sequence
  Description of Artificial Sequence: Synthetic oligonucleotide
  Antisense strand to SEQ ID NO: 1337162
acucaucuagacugcugcc

SEQ ID NO: 1337164 - RNA, 19 nt, Artificial Sequence
  Description of Artificial Sequence: Synthetic oligonucleotide
  Sense strand starting at position 192 of SEQ ID NO: 1242298
cccauaacuuguguuauca

SEQ ID NO: 1337165 - RNA, 19 nt, Artificial Sequence
  Description of Artificial Sequence: Synthetic oligonucleotide
  Antisense strand to SEQ ID NO: 1337164
ugauaacacaaguuauggg

SEQ ID NO: 1337166 - RNA, 19 nt, Artificial Sequence
  Description of Artificial Sequence: Synthetic oligonucleotide
  Sense strand starting at position 238 of SEQ ID NO: 1242298
uccguagcucaggauguua

SEQ ID NO: 1337167 - RNA, 19 nt, Artificial Sequence
  Description of Artificial Sequence: Synthetic oligonucleotide
  Antisense strand to SEQ ID NO: 1337166
uaacauccugagcuacgga

SEQ ID NO: 1337168 - RNA, 19 nt, Artificial Sequence
  Description of Artificial Sequence: Synthetic oligonucleotide
  Sense strand starting at position 240 of SEQ ID NO: 1242298
cguagcucaggauguuaua

SEQ ID NO: 1337169 - RNA, 19 nt, Artificial Sequence
  Description of Artificial Sequence: Synthetic oligonucleotide
  Antisense strand to SEQ ID NO: 1337168
uauaacauccugagcuacg

SEQ ID NO: 1337170 - RNA, 19 nt, Artificial Sequence
  Description of Artificial Sequence: Synthetic oligonucleotide
  Sense strand starting at position 271 of SEQ ID NO: 1242298
aucugaccuuucuuugagu

SEQ ID NO: 1337171 - RNA, 19 nt, Artificial Sequence
  Description of Artificial Sequence: Synthetic oligonucleotide
  Antisense strand to SEQ ID NO: 1337170
acucaaagaaaggucagau

SEQ ID NO: 1337172 - RNA, 19 nt, Artificial Sequence
  Description of Artificial Sequence: Synthetic oligonucleotide
  Sense strand starting at position 276 of SEQ ID NO: 1242298
accuuucuuugagucucau

SEQ ID NO: 1337173 - RNA, 19 nt, Artificial Sequence
  Description of Artificial Sequence: Synthetic oligonucleotide
  Antisense strand to SEQ ID NO: 1337172
augagacucaaagaaaggu

SEQ ID NO: 1337174 - RNA, 19 nt, Artificial Sequence
  Description of Artificial Sequence: Synthetic oligonucleotide
  Sense strand starting at position 301 of SEQ ID NO: 1242298
ugggacuccugaguauaca

SEQ ID NO: 1337175 - RNA, 19 nt, Artificial Sequence
  Description of Artificial Sequence: Synthetic oligonucleotide
  Antisense strand to SEQ ID NO: 1337174
uguauacucaggaguccca

SEQ ID NO: 1337176 - RNA, 19 nt, Artificial Sequence
  Description of Artificial Sequence: Synthetic oligonucleotide
  Sense strand starting at position 576 of SEQ ID NO: 1242298
cuuauccauuagguauauu

SEQ ID NO: 1337177 - RNA, 19 nt, Artificial Sequence
  Description of Artificial Sequence: Synthetic oligonucleotide
  Antisense strand to SEQ ID NO: 1337176
aauauaccuaauggauaag

SEQ ID NO: 1337178 - RNA, 19 nt, Artificial Sequence
  Description of Artificial Sequence: Synthetic oligonucleotide
  Sense strand starting at position 1007 of SEQ ID NO: 1242298
ucauaaauguuaccuagua

SEQ ID NO: 1337179 - RNA, 19 nt, Artificial Sequence
  Description of Artificial Sequence: Synthetic oligonucleotide
  Antisense strand to SEQ ID NO: 1337178
uacuagguaacauuuauga

SEQ ID NO: 1337180 - RNA, 19 nt, Artificial Sequence
  Description of Artificial Sequence: Synthetic oligonucleotide
  Sense strand starting at position 1079 of SEQ ID NO: 1242298
uacgguguccucuguacuu

SEQ ID NO: 1337181 - RNA, 19 nt, Artificial Sequence
  Description of Artificial Sequence: Synthetic oligonucleotide
  Antisense strand to SEQ ID NO: 1337180
aaguacagaggacaccgua

SEQ ID NO: 1337182 - RNA, 19 nt, Artificial Sequence
  Description of Artificial Sequence: Synthetic oligonucleotide
  Sense strand starting at position 1216 of SEQ ID NO: 1242298
aggcuuccuuaagcagaaa

SEQ ID NO: 1337183 - RNA, 19 nt, Artificial Sequence
  Description of Artificial Sequence: Synthetic oligonucleotide
  Antisense strand to SEQ ID NO: 1337182
uuucugcuuaaggaagccu

SEQ ID NO: 1337184 - RNA, 19 nt, Artificial Sequence
  Description of Artificial Sequence: Synthetic oligonucleotide
  Sense strand starting at position 1280 of SEQ ID NO: 1242298
gccaguuucucaccucgga

SEQ ID NO: 1337185 - RNA, 19 nt, Artificial Sequence
  Description of Artificial Sequence: Synthetic oligonucleotide
  Antisense strand to SEQ ID NO: 1337184
uccgaggugagaaacuggc

SEQ ID NO: 1337186 - RNA, 19 nt, Artificial Sequence
  Description of Artificial Sequence: Synthetic oligonucleotide
  Sense strand starting at position 1389 of SEQ ID NO: 1242298
ucugaaguccugcaucuga

SEQ ID NO: 1337187 - RNA, 19 nt, Artificial Sequence
  Description of Artificial Sequence: Synthetic oligonucleotide
  Antisense strand to SEQ ID NO: 1337186
ucagaugcaggacuucaga

SEQ ID NO: 1337188 - RNA, 19 nt, Artificial Sequence
  Description of Artificial Sequence: Synthetic oligonucleotide
  Sense strand starting at position 1398 of SEQ ID NO: 1242298
cugcaucugaggcaaaguu

SEQ ID NO: 1337189 - RNA, 19 nt, Artificial Sequence
  Description of Artificial Sequence: Synthetic oligonucleotide
  Antisense strand to SEQ ID NO: 1337188
aacuuugccucagaugcag

SEQ ID NO: 1337190 - RNA, 19 nt, Artificial Sequence
  Description of Artificial Sequence: Synthetic oligonucleotide
  Sense strand starting at position 1482 of SEQ ID NO: 1242298
ccaacugcucaguggagaa

SEQ ID NO: 1337191 - RNA, 19 nt, Artificial Sequence
  Description of Artificial Sequence: Synthetic oligonucleotide
  Antisense strand to SEQ ID NO: 1337190
uucuccacugagcaguugg

SEQ ID NO: 1337192 - RNA, 19 nt, Artificial Sequence
  Description of Artificial Sequence: Synthetic oligonucleotide
  Sense strand starting at position 1638 of SEQ ID NO: 1242298
uugaccaaauccuccguua

SEQ ID NO: 1337193 - RNA, 19 nt, Artificial Sequence
  Description of Artificial Sequence: Synthetic oligonucleotide
  Antisense strand to SEQ ID NO: 1337192
uaacggaggauuuggucaa

SEQ ID NO: 1337194 - RNA, 19 nt, Artificial Sequence
  Description of Artificial Sequence: Synthetic oligonucleotide
  Sense strand starting at position 1640 of SEQ ID NO: 1242298
gaccaaauccuccguuaga

SEQ ID NO: 1337195 - RNA, 19 nt, Artificial Sequence
  Description of Artificial Sequence: Synthetic oligonucleotide
  Antisense strand to SEQ ID NO: 1337194
ucuaacggaggauuugguc

SEQ ID NO: 1337196 - RNA, 19 nt, Artificial Sequence
  Description of Artificial Sequence: Synthetic oligonucleotide
  Sense strand starting at position 1641 of SEQ ID NO: 1242298
accaaauccuccguuagac

SEQ ID NO: 1337197 - RNA, 19 nt, Artificial Sequence
  Description of Artificial Sequence: Synthetic oligonucleotide
  Antisense strand to SEQ ID NO: 1337196
gucuaacggaggauuuggu

SEQ ID NO: 1337198 - RNA, 19 nt, Artificial Sequence
  Description of Artificial Sequence: Synthetic oligonucleotide
  Sense strand starting at position 2103 of SEQ ID NO: 1242298
cagaccuaccgcugacuua

SEQ ID NO: 1337199 - RNA, 19 nt, Artificial Sequence
  Description of Artificial Sequence: Synthetic oligonucleotide
  Antisense strand to SEQ ID NO: 1337198
uaagucagcgguaggucug

SEQ ID NO: 1337200 - RNA, 19 nt, Artificial Sequence
  Description of Artificial Sequence: Synthetic oligonucleotide
  Sense strand starting at position 2267 of SEQ ID NO: 1242298
cuuucuaagagccguagau

SEQ ID NO: 1337201 - RNA, 19 nt, Artificial Sequence
  Description of Artificial Sequence: Synthetic oligonucleotide
  Antisense strand to SEQ ID NO: 1337200
aucuacggcucuuagaaag

SEQ ID NO: 1337202 - RNA, 19 nt, Artificial Sequence
  Description of Artificial Sequence: Synthetic oligonucleotide
  Sense strand starting at position 2269 of SEQ ID NO: 1242298
uucuaagagccguagaugu

SEQ ID NO: 1337203 - RNA, 19 nt, Artificial Sequence
  Description of Artificial Sequence: Synthetic oligonucleotide
  Antisense strand to SEQ ID NO: 1337202
acaucuacggcucuuagaa

SEQ ID NO: 1337204 - RNA, 19 nt, Artificial Sequence
  Description of Artificial Sequence: Synthetic oligonucleotide
  Sense strand starting at position 2271 of SEQ ID NO: 1242298
cuaagagccguagauguaa

SEQ ID NO: 1337205 - RNA, 19 nt, Artificial Sequence
  Description of Artificial Sequence: Synthetic oligonucleotide
  Antisense strand to SEQ ID NO: 1337204
uuacaucuacggcucuuag

SEQ ID NO: 1337206 - RNA, 19 nt, Artificial Sequence
  Description of Artificial Sequence: Synthetic oligonucleotide
  Sense strand starting at position 2542 of SEQ ID NO: 1242298
gaaccaguucugugaguga

SEQ ID NO: 1337207 - RNA, 19 nt, Artificial Sequence
  Description of Artificial Sequence: Synthetic oligonucleotide
  Antisense strand to SEQ ID NO: 1337206
ucacucacagaacugguuc

SEQ ID NO: 1337208 - RNA, 19 nt, Artificial Sequence
  Description of Artificial Sequence: Synthetic oligonucleotide
  Sense strand starting at position 2547 of SEQ ID NO: 1242298
aguucugugagugauggga

SEQ ID NO: 1337209 - RNA, 19 nt, Artificial Sequence
  Description of Artificial Sequence: Synthetic oligonucleotide
  Antisense strand to SEQ ID NO: 1337208
ucccaucacucacagaacu

SEQ ID NO: 1337210 - RNA, 19 nt, Artificial Sequence
  Description of Artificial Sequence: Synthetic oligonucleotide
  Sense strand starting at position 2551 of SEQ ID NO: 1242298
cugugagugaugggaaguu

SEQ ID NO: 1337211 - RNA, 19 nt, Artificial Sequence
  Description of Artificial Sequence: Synthetic oligonucleotide
  Antisense strand to SEQ ID NO: 1337210
aacuucccaucacucacag

SEQ ID NO: 1337212 - RNA, 19 nt, Artificial Sequence
  Description of Artificial Sequence: Synthetic oligonucleotide
  Sense strand starting at position 2697 of SEQ ID NO: 1242298
cagagauccugggaagcca

SEQ ID NO: 1337213 - RNA, 19 nt, Artificial Sequence
  Description of Artificial Sequence: Synthetic oligonucleotide
  Antisense strand to SEQ ID NO: 1337212
uggcuucccaggaucucug

SEQ ID NO: 1337214 - RNA, 19 nt, Artificial Sequence
  Description of Artificial Sequence: Synthetic oligonucleotide
  Sense strand starting at position 2843 of SEQ ID NO: 1242298
ccagcuaggucuucgccaa

SEQ ID NO: 1337215 - RNA, 19 nt, Artificial Sequence
  Description of Artificial Sequence: Synthetic oligonucleotide
  Antisense strand to SEQ ID NO: 1337214
uuggcgaagaccuagcugg

SEQ ID NO: 1337216 - RNA, 19 nt, Artificial Sequence
  Description of Artificial Sequence: Synthetic oligonucleotide
  Sense strand starting at position 2844 of SEQ ID NO: 1242298
cagcuaggucuucgccaau

SEQ ID NO: 1337217 - RNA, 19 nt, Artificial Sequence
  Description of Artificial Sequence: Synthetic oligonucleotide
  Antisense strand to SEQ ID NO: 1337216
auuggcgaagaccuagcug

SEQ ID NO: 1337218 - RNA, 19 nt, Artificial Sequence
  Description of Artificial Sequence: Synthetic oligonucleotide
  Sense strand starting at position 2847 of SEQ ID NO: 1242298
cuaggucuucgccaaugga

SEQ ID NO: 1337219 - RNA, 19 nt, Artificial Sequence
  Description of Artificial Sequence: Synthetic oligonucleotide
  Antisense strand to SEQ ID NO: 1337218
uccauuggcgaagaccuag

SEQ ID NO: 1337220 - RNA, 19 nt, Artificial Sequence
  Description of Artificial Sequence: Synthetic oligonucleotide
  Sense strand starting at position 3157 of SEQ ID NO: 1242298
cucccaggccuuuagagaa

SEQ ID NO: 1337221 - RNA, 19 nt, Artificial Sequence
  Description of Artificial Sequence: Synthetic oligonucleotide
  Antisense strand to SEQ ID NO: 1337220
uucucuaaaggccugggag

SEQ ID NO: 1337222 - RNA, 19 nt, Artificial Sequence
  Description of Artificial Sequence: Synthetic oligonucleotide
  Sense strand starting at position 3309 of SEQ ID NO: 1242298
cuuugcuugcuuuggaaga

SEQ ID NO: 1337223 - RNA, 19 nt, Artificial Sequence
  Description of Artificial Sequence: Synthetic oligonucleotide
  Antisense strand to SEQ ID NO: 1337222
ucuuccaaagcaagcaaag

SEQ ID NO: 1337224 - RNA, 19 nt, Artificial Sequence
  Description of Artificial Sequence: Synthetic oligonucleotide
  Sense strand starting at position 3349 of SEQ ID NO: 1242298
caaaguccuguuggaaguu

SEQ ID NO: 1337225 - RNA, 19 nt, Artificial Sequence
  Description of Artificial Sequence: Synthetic oligonucleotide
  Antisense strand to SEQ ID NO: 1337224
aacuuccaacaggacuuug

SEQ ID NO: 1337226 - RNA, 19 nt, Artificial Sequence
  Description of Artificial Sequence: Synthetic oligonucleotide
  Sense strand starting at position 3365 of SEQ ID NO: 1242298
guuaacacuucucaaagga

SEQ ID NO: 1337227 - RNA, 19 nt, Artificial Sequence
  Description of Artificial Sequence: Synthetic oligonucleotide
  Antisense strand to SEQ ID NO: 1337226
uccuuugagaaguguuaac

SEQ ID NO: 1337228 - RNA, 19 nt, Artificial Sequence
  Description of Artificial Sequence: Synthetic oligonucleotide
  Sense strand starting at position 3726 of SEQ ID NO: 1242298
aggaauaauuugcagacua

SEQ ID NO: 1337229 - RNA, 19 nt, Artificial Sequence
  Description of Artificial Sequence: Synthetic oligonucleotide
  Antisense strand to SEQ ID NO: 1337228
uagucugcaaauuauuccu

SEQ ID NO: 1337230 - RNA, 19 nt, Artificial Sequence
  Description of Artificial Sequence: Synthetic oligonucleotide
  Sense strand starting at position 3738 of SEQ ID NO: 1242298
cagacuaugucccagagaa

SEQ ID NO: 1337231 - RNA, 19 nt, Artificial Sequence
  Description of Artificial Sequence: Synthetic oligonucleotide
  Antisense strand to SEQ ID NO: 1337230
uucucugggacauagucug

SEQ ID NO: 1337232 - RNA, 19 nt, Artificial Sequence
  Description of Artificial Sequence: Synthetic oligonucleotide
  Sense strand starting at position 3806 of SEQ ID NO: 1242298
ugcugagaaggcugauaua

SEQ ID NO: 1337233 - RNA, 19 nt, Artificial Sequence
  Description of Artificial Sequence: Synthetic oligonucleotide
  Antisense strand to SEQ ID NO: 1337232
uauaucagccuucucagca

SEQ ID NO: 1337234 - RNA, 19 nt, Artificial Sequence
  Description of Artificial Sequence: Synthetic oligonucleotide
  Sense strand starting at position 3809 of SEQ ID NO: 1242298
ugagaaggcugauauagca

SEQ ID NO: 1337235 - RNA, 19 nt, Artificial Sequence
  Description of Artificial Sequence: Synthetic oligonucleotide
  Antisense strand to SEQ ID NO: 1337234
ugcuauaucagccuucuca

SEQ ID NO: 1337236 - RNA, 19 nt, Artificial Sequence
  Description of Artificial Sequence: Synthetic oligonucleotide
  Sense strand starting at position 3816 of SEQ ID NO: 1242298
gcugauauagcauguccuu

SEQ ID NO: 1337237 - RNA, 19 nt, Artificial Sequence
  Description of Artificial Sequence: Synthetic oligonucleotide
  Antisense strand to SEQ ID NO: 1337236
aaggacaugcuauaucagc

SEQ ID NO: 1337238 - RNA, 19 nt, Artificial Sequence
  Description of Artificial Sequence: Synthetic oligonucleotide
  Sense strand starting at position 3819 of SEQ ID NO: 1242298
gauauagcauguccuugau

SEQ ID NO: 1337239 - RNA, 19 nt, Artificial Sequence
  Description of Artificial Sequence: Synthetic oligonucleotide
  Antisense strand to SEQ ID NO: 1337238
aucaaggacaugcuauauc

SEQ ID NO: 1337240 - RNA, 19 nt, Artificial Sequence
  Description of Artificial Sequence: Synthetic oligonucleotide
  Sense strand starting at position 3822 of SEQ ID NO: 1242298
auagcauguccuugauccu

SEQ ID NO: 1337241 - RNA, 19 nt, Artificial Sequence
  Description of Artificial Sequence: Synthetic oligonucleotide
  Antisense strand to SEQ ID NO: 1337240
aggaucaaggacaugcuau

SEQ ID NO: 1337242 - RNA, 19 nt, Artificial Sequence
  Description of Artificial Sequence: Synthetic oligonucleotide
  Sense strand starting at position 3845 of SEQ ID NO: 1242298
aagauuggcuuccuguaaa

SEQ ID NO: 1337243 - RNA, 19 nt, Artificial Sequence
  Description of Artificial Sequence: Synthetic oligonucleotide
  Antisense strand to SEQ ID NO: 1337242
uuuacaggaagccaaucuu

SEQ ID NO: 1337244 - RNA, 19 nt, Artificial Sequence
  Description of Artificial Sequence: Synthetic oligonucleotide
  Sense strand starting at position 5 of SEQ ID NO: 1242299
gcaccaaaucaccgugauc

SEQ ID NO: 1337245 - RNA, 19 nt, Artificial Sequence
  Description of Artificial Sequence: Synthetic oligonucleotide
  Antisense strand to SEQ ID NO: 1337244
gaucacggugauuuggugc

SEQ ID NO: 1337246 - RNA, 19 nt, Artificial Sequence
  Description of Artificial Sequence: Synthetic oligonucleotide
  Sense strand starting at position 7 of SEQ ID NO: 1242299
accaaaucaccgugaucuu

SEQ ID NO: 1337247 - RNA, 19 nt, Artificial Sequence
  Description of Artificial Sequence: Synthetic oligonucleotide
  Antisense strand to SEQ ID NO: 1337246
aagaucacggugauuuggu

SEQ ID NO: 1337248 - RNA, 19 nt, Artificial Sequence
  Description of Artificial Sequence: Synthetic oligonucleotide
  Sense strand starting at position 8 of SEQ ID NO: 1242299
ccaaaucaccgugaucuua

SEQ ID NO: 1337249 - RNA, 19 nt, Artificial Sequence
  Description of Artificial Sequence: Synthetic oligonucleotide
  Antisense strand to SEQ ID NO: 1337248
uaagaucacggugauuugg

SEQ ID NO: 1337250 - RNA, 19 nt, Artificial Sequence
  Description of Artificial Sequence: Synthetic oligonucleotide
  Sense strand starting at position 10 of SEQ ID NO: 1242299
aaaucaccgugaucuuaag

SEQ ID NO: 1337251 - RNA, 19 nt, Artificial Sequence
  Description of Artificial Sequence: Synthetic oligonucleotide
  Antisense strand to SEQ ID NO: 1337250
cuuaagaucacggugauuu

SEQ ID NO: 1337252 - RNA, 19 nt, Artificial Sequence
  Description of Artificial Sequence: Synthetic oligonucleotide
  Sense strand starting at position 78 of SEQ ID NO: 1242299
ggccuuuacugccugacau

SEQ ID NO: 1337253 - RNA, 19 nt, Artificial Sequence
  Description of Artificial Sequence: Synthetic oligonucleotide
  Antisense strand to SEQ ID NO: 1337252
augucaggcaguaaaggcc

SEQ ID NO: 1337254 - RNA, 19 nt, Artificial Sequence
  Description of Artificial Sequence: Synthetic oligonucleotide
  Sense strand starting at position 79 of SEQ ID NO: 1242299
gccuuuacugccugacauu

SEQ ID NO: 1337255 - RNA, 19 nt, Artificial Sequence
  Description of Artificial Sequence: Synthetic oligonucleotide
  Antisense strand to SEQ ID NO: 1337254
aaugucaggcaguaaaggc

SEQ ID NO: 1337256 - RNA, 19 nt, Artificial Sequence
  Description of Artificial Sequence: Synthetic oligonucleotide
  Sense strand starting at position 92 of SEQ ID NO: 1242299
gacauuuacuuggguauuu

SEQ ID NO: 1337257 - RNA, 19 nt, Artificial Sequence
  Description of Artificial Sequence: Synthetic oligonucleotide
  Antisense strand to SEQ ID NO: 1337256
aaauacccaaguaaauguc

SEQ ID NO: 1337258 - RNA, 19 nt, Artificial Sequence
  Description of Artificial Sequence: Synthetic oligonucleotide
  Sense strand starting at position 111 of SEQ ID NO: 1242299
gcuuacugccugugaucuu

SEQ ID NO: 1337259 - RNA, 19 nt, Artificial Sequence
  Description of Artificial Sequence: Synthetic oligonucleotide
  Antisense strand to SEQ ID NO: 1337258
aagaucacaggcaguaagc

SEQ ID NO: 1337260 - RNA, 19 nt, Artificial Sequence
  Description of Artificial Sequence: Synthetic oligonucleotide
  Sense strand starting at position 137 of SEQ ID NO: 1242299
gaaagugagucccacauaa

SEQ ID NO: 1337261 - RNA, 19 nt, Artificial Sequence
  Description of Artificial Sequence: Synthetic oligonucleotide
  Antisense strand to SEQ ID NO: 1337260
uuaugugggacucacuuuc

SEQ ID NO: 1337262 - RNA, 19 nt, Artificial Sequence
  Description of Artificial Sequence: Synthetic oligonucleotide
  Sense strand starting at position 684 of SEQ ID NO: 1242299
cccuccuugcccgaagauu

SEQ ID NO: 1337263 - RNA, 19 nt, Artificial Sequence
  Description of Artificial Sequence: Synthetic oligonucleotide
  Antisense strand to SEQ ID NO: 1337262
aaucuucgggcaaggaggg

SEQ ID NO: 1337264 - RNA, 19 nt, Artificial Sequence
  Description of Artificial Sequence: Synthetic oligonucleotide
  Sense strand starting at position 695 of SEQ ID NO: 1242299
cgaagauuugcucgugcag

SEQ ID NO: 1337265 - RNA, 19 nt, Artificial Sequence
  Description of Artificial Sequence: Synthetic oligonucleotide
  Antisense strand to SEQ ID NO: 1337264
cugcacgagcaaaucuucg

SEQ ID NO: 1337266 - RNA, 19 nt, Artificial Sequence
  Description of Artificial Sequence: Synthetic oligonucleotide
  Sense strand starting at position 1068 of SEQ ID NO: 1242299
cucuccugucagugaaaug

SEQ ID NO: 1337267 - RNA, 19 nt, Artificial Sequence
  Description of Artificial Sequence: Synthetic oligonucleotide
  Antisense strand to SEQ ID NO: 1337266
cauuucacugacaggagag

SEQ ID NO: 1337268 - RNA, 19 nt, Artificial Sequence
  Description of Artificial Sequence: Synthetic oligonucleotide
  Sense strand starting at position 1075 of SEQ ID NO: 1242299
gucagugaaauggguuuga

SEQ ID NO: 1337269 - RNA, 19 nt, Artificial Sequence
  Description of Artificial Sequence: Synthetic oligonucleotide
  Antisense strand to SEQ ID NO: 1337268
ucaaacccauuucacugac

SEQ ID NO: 1337270 - RNA, 19 nt, Artificial Sequence
  Description of Artificial Sequence: Synthetic oligonucleotide
  Sense strand starting at position 1079 of SEQ ID NO: 1242299
gugaaauggguuugaccau

SEQ ID NO: 1337271 - RNA, 19 nt, Artificial Sequence
  Description of Artificial Sequence: Synthetic oligonucleotide
  Antisense strand to SEQ ID NO: 1337270
auggucaaacccauuucac

SEQ ID NO: 1337272 - RNA, 19 nt, Artificial Sequence
  Description of Artificial Sequence: Synthetic oligonucleotide
  Sense strand starting at position 1159 of SEQ ID NO: 1242299
auguaauagguguauccau

SEQ ID NO: 1337273 - RNA, 19 nt, Artificial Sequence
  Description of Artificial Sequence: Synthetic oligonucleotide
  Antisense strand to SEQ ID NO: 1337272
auggauacaccuauuacau

SEQ ID NO: 1337274 - RNA, 19 nt, Artificial Sequence
  Description of Artificial Sequence: Synthetic oligonucleotide
  Sense strand starting at position 1168 of SEQ ID NO: 1242299
guguauccauaaucaucau

SEQ ID NO: 1337275 - RNA, 19 nt, Artificial Sequence
  Description of Artificial Sequence: Synthetic oligonucleotide
  Antisense strand to SEQ ID NO: 1337274
augaugauuauggauacac

SEQ ID NO: 1337276 - RNA, 19 nt, Artificial Sequence
  Description of Artificial Sequence: Synthetic oligonucleotide
  Sense strand starting at position 1298 of SEQ ID NO: 1242299
cacgcaacuucgucaguga

SEQ ID NO: 1337277 - RNA, 19 nt, Artificial Sequence
  Description of Artificial Sequence: Synthetic oligonucleotide
  Antisense strand to SEQ ID NO: 1337276
ucacugacgaaguugcgug

SEQ ID NO: 1337278 - RNA, 19 nt, Artificial Sequence
  Description of Artificial Sequence: Synthetic oligonucleotide
  Sense strand starting at position 1299 of SEQ ID NO: 1242299
acgcaacuucgucagugaa

SEQ ID NO: 1337279 - RNA, 19 nt, Artificial Sequence
  Description of Artificial Sequence: Synthetic oligonucleotide
  Antisense strand to SEQ ID NO: 1337278
uucacugacgaaguugcgu

SEQ ID NO: 1337280 - RNA, 19 nt, Artificial Sequence
  Description of Artificial Sequence: Synthetic oligonucleotide
  Sense strand starting at position 1349 of SEQ ID NO: 1242299
gagagcaguaucuggagua

SEQ ID NO: 1337281 - RNA, 19 nt, Artificial Sequence
  Description of Artificial Sequence: Synthetic oligonucleotide
  Antisense strand to SEQ ID NO: 1337280
uacuccagauacugcucuc

SEQ ID NO: 1337282 - RNA, 19 nt, Artificial Sequence
  Description of Artificial Sequence: Synthetic oligonucleotide
  Sense strand starting at position 1428 of SEQ ID NO: 1242299
cuccuuaggcccugauauc

SEQ ID NO: 1337283 - RNA, 19 nt, Artificial Sequence
  Description of Artificial Sequence: Synthetic oligonucleotide
  Antisense strand to SEQ ID NO: 1337282
gauaucagggccuaaggag

SEQ ID NO: 1337284 - RNA, 19 nt, Artificial Sequence
  Description of Artificial Sequence: Synthetic oligonucleotide
  Sense strand starting at position 1467 of SEQ ID NO: 1242299
acggauucugccugucaca

SEQ ID NO: 1337285 - RNA, 19 nt, Artificial Sequence
  Description of Artificial Sequence: Synthetic oligonucleotide
  Antisense strand to SEQ ID NO: 1337284
ugugacaggcagaauccgu

SEQ ID NO: 1337286 - RNA, 19 nt, Artificial Sequence
  Description of Artificial Sequence: Synthetic oligonucleotide
  Sense strand starting at position 2243 of SEQ ID NO: 1242299
uuuauaaguugcucaagag

SEQ ID NO: 1337287 - RNA, 19 nt, Artificial Sequence
  Description of Artificial Sequence: Synthetic oligonucleotide
  Antisense strand to SEQ ID NO: 1337286
cucuugagcaacuuauaaa

SEQ ID NO: 1337288 - RNA, 19 nt, Artificial Sequence
  Description of Artificial Sequence: Synthetic oligonucleotide
  Sense strand starting at position 2244 of SEQ ID NO: 1242299
uuauaaguugcucaagaga

SEQ ID NO: 1337289 - RNA, 19 nt, Artificial Sequence
  Description of Artificial Sequence: Synthetic oligonucleotide
  Antisense strand to SEQ ID NO: 1337288
ucucuugagcaacuuauaa

SEQ ID NO: 1337290 - RNA, 19 nt, Artificial Sequence
  Description of Artificial Sequence: Synthetic oligonucleotide
  Sense strand starting at position 2351 of SEQ ID NO: 1242299
aagggagguuaugauuaac

SEQ ID NO: 1337291 - RNA, 19 nt, Artificial Sequence
  Description of Artificial Sequence: Synthetic oligonucleotide
  Antisense strand to SEQ ID NO: 1337290
guuaaucauaaccucccuu

SEQ ID NO: 1337292 - RNA, 19 nt, Artificial Sequence
  Description of Artificial Sequence: Synthetic oligonucleotide
  Sense strand starting at position 2375 of SEQ ID NO: 1242299
guuuauuccucccucagga

SEQ ID NO: 1337293 - RNA, 19 nt, Artificial Sequence
  Description of Artificial Sequence: Synthetic oligonucleotide
  Antisense strand to SEQ ID NO: 1337292
uccugagggaggaauaaac

SEQ ID NO: 1337294 - RNA, 19 nt, Artificial Sequence
  Description of Artificial Sequence: Synthetic oligonucleotide
  Sense strand starting at position 2462 of SEQ ID NO: 1242299
ccaagauccgcggaaguaa

SEQ ID NO: 1337295 - RNA, 19 nt, Artificial Sequence
  Description of Artificial Sequence: Synthetic oligonucleotide
  Antisense strand to SEQ ID NO: 1337294
uuacuuccgcggaucuugg

SEQ ID NO: 1337296 - RNA, 19 nt, Artificial Sequence
  Description of Artificial Sequence: Synthetic oligonucleotide
  Sense strand starting at position 2487 of SEQ ID NO: 1242299
ccagcaagucccugcgaga

SEQ ID NO: 1337297 - RNA, 19 nt, Artificial Sequence
  Description of Artificial Sequence: Synthetic oligonucleotide
  Antisense strand to SEQ ID NO: 1337296
ucucgcagggacuugcugg

SEQ ID NO: 1337298 - RNA, 19 nt, Artificial Sequence
  Description of Artificial Sequence: Synthetic oligonucleotide
  Sense strand starting at position 2597 of SEQ ID NO: 1242299
gggcauccuguacagaaau

SEQ ID NO: 1337299 - RNA, 19 nt, Artificial Sequence
  Description of Artificial Sequence: Synthetic oligonucleotide
  Antisense strand to SEQ ID NO: 1337298
auuucuguacaggaugccc

SEQ ID NO: 1337300 - RNA, 19 nt, Artificial Sequence
  Description of Artificial Sequence: Synthetic oligonucleotide
  Sense strand starting at position 2699 of SEQ ID NO: 1242299
ccuccucguccagagcaau

SEQ ID NO: 1337301 - RNA, 19 nt, Artificial Sequence
  Description of Artificial Sequence: Synthetic oligonucleotide
  Antisense strand to SEQ ID NO: 1337300
auugcucuggacgaggagg

SEQ ID NO: 1337302 - RNA, 19 nt, Artificial Sequence
  Description of Artificial Sequence: Synthetic oligonucleotide
  Sense strand starting at position 2749 of SEQ ID NO: 1242299
accugaauuugcccgcaga

SEQ ID NO: 1337303 - RNA, 19 nt, Artificial Sequence
  Description of Artificial Sequence: Synthetic oligonucleotide
  Antisense strand to SEQ ID NO: 1337302
ucugcgggcaaauucaggu

SEQ ID NO: 1337304 - RNA, 19 nt, Artificial Sequence
  Description of Artificial Sequence: Synthetic oligonucleotide
  Sense strand starting at position 2750 of SEQ ID NO: 1242299
ccugaauuugcccgcagau

SEQ ID NO: 1337305 - RNA, 19 nt, Artificial Sequence
  Description of Artificial Sequence: Synthetic oligonucleotide
  Antisense strand to SEQ ID NO: 1337304
aucugcgggcaaauucagg

SEQ ID NO: 1337306 - RNA, 19 nt, Artificial Sequence
  Description of Artificial Sequence: Synthetic oligonucleotide
  Sense strand starting at position 2882 of SEQ ID NO: 1242299
guuggugaacugugguaaa

SEQ ID NO: 1337307 - RNA, 19 nt, Artificial Sequence
  Description of Artificial Sequence: Synthetic oligonucleotide
  Antisense strand to SEQ ID NO: 1337306
uuuaccacaguucaccaac

SEQ ID NO: 1337308 - RNA, 19 nt, Artificial Sequence
  Description of Artificial Sequence: Synthetic oligonucleotide
  Sense strand starting at position 2908 of SEQ ID NO: 1242299
cagaauaaggucuacguga

SEQ ID NO: 1337309 - RNA, 19 nt, Artificial Sequence
  Description of Artificial Sequence: Synthetic oligonucleotide
  Antisense strand to SEQ ID NO: 1337308
ucacguagaccuuauucug

SEQ ID NO: 1337310 - RNA, 19 nt, Artificial Sequence
  Description of Artificial Sequence: Synthetic oligonucleotide
  Sense strand starting at position 2910 of SEQ ID NO: 1242299
gaauaaggucuacgugauu

SEQ ID NO: 1337311 - RNA, 19 nt, Artificial Sequence
  Description of Artificial Sequence: Synthetic oligonucleotide
  Antisense strand to SEQ ID NO: 1337310
aaucacguagaccuuauuc

SEQ ID NO: 1337312 - RNA, 19 nt, Artificial Sequence
  Description of Artificial Sequence: Synthetic oligonucleotide
  Sense strand starting at position 2913 of SEQ ID NO: 1242299
uaaggucuacgugauuaag

SEQ ID NO: 1337313 - RNA, 19 nt, Artificial Sequence
  Description of Artificial Sequence: Synthetic oligonucleotide
  Antisense strand to SEQ ID NO: 1337312
cuuaaucacguagaccuua

SEQ ID NO: 1337314 - RNA, 19 nt, Artificial Sequence
  Description of Artificial Sequence: Synthetic oligonucleotide
  Sense strand starting at position 2915 of SEQ ID NO: 1242299
aggucuacgugauuaagca

SEQ ID NO: 1337315 - RNA, 19 nt, Artificial Sequence
  Description of Artificial Sequence: Synthetic oligonucleotide
  Antisense strand to SEQ ID NO: 1337314
ugcuuaaucacguagaccu

SEQ ID NO: 1337316 - RNA, 19 nt, Artificial Sequence
  Description of Artificial Sequence: Synthetic oligonucleotide
  Sense strand starting at position 3015 of SEQ ID NO: 1242299
acagcugauuaggaauaaa

SEQ ID NO: 1337317 - RNA, 19 nt, Artificial Sequence
  Description of Artificial Sequence: Synthetic oligonucleotide
  Antisense strand to SEQ ID NO: 1337316
uuuauuccuaaucagcugu

SEQ ID NO: 1337318 - RNA, 19 nt, Artificial Sequence
  Description of Artificial Sequence: Synthetic oligonucleotide
  Sense strand starting at position 3424 of SEQ ID NO: 1242299
aggcucucagcuuaaauca

SEQ ID NO: 1337319 - RNA, 19 nt, Artificial Sequence
  Description of Artificial Sequence: Synthetic oligonucleotide
  Antisense strand to SEQ ID NO: 1337318
ugauuuaagcugagagccu

SEQ ID NO: 1337320 - RNA, 19 nt, Artificial Sequence
  Description of Artificial Sequence: Synthetic oligonucleotide
  Sense strand starting at position 3684 of SEQ ID NO: 1242299
agauccuguuaguuaauaa

SEQ ID NO: 1337321 - RNA, 19 nt, Artificial Sequence
  Description of Artificial Sequence: Synthetic oligonucleotide
  Antisense strand to SEQ ID NO: 1337320
uuauuaacuaacaggaucu

SEQ ID NO: 1337322 - RNA, 19 nt, Artificial Sequence
  Description of Artificial Sequence: Synthetic oligonucleotide
  Sense strand starting at position 3734 of SEQ ID NO: 1242299
uuugguguccuuuguaauc

SEQ ID NO: 1337323 - RNA, 19 nt, Artificial Sequence
  Description of Artificial Sequence: Synthetic oligonucleotide
  Antisense strand to SEQ ID NO: 1337322
gauuacaaaggacaccaaa

SEQ ID NO: 1337324 - RNA, 19 nt, Artificial Sequence
  Description of Artificial Sequence: Synthetic oligonucleotide
  Sense strand starting at position 262 of SEQ ID NO: 1242300
augugaugacaucauuguu

SEQ ID NO: 1337325 - RNA, 19 nt, Artificial Sequence
  Description of Artificial Sequence: Synthetic oligonucleotide
  Antisense strand to SEQ ID NO: 1337324
aacaaugaugucaucacau

SEQ ID NO: 1337326 - RNA, 19 nt, Artificial Sequence
  Description of Artificial Sequence: Synthetic oligonucleotide
  Sense strand starting at position 265 of SEQ ID NO: 1242300
ugaugacaucauuguucua

SEQ ID NO: 1337327 - RNA, 19 nt, Artificial Sequence
  Description of Artificial Sequence: Synthetic oligonucleotide
  Antisense strand to SEQ ID NO: 1337326
uagaacaaugaugucauca

SEQ ID NO: 1337328 - RNA, 19 nt, Artificial Sequence
  Description of Artificial Sequence: Synthetic oligonucleotide
  Sense strand starting at position 267 of SEQ ID NO: 1242300
augacaucauuguucuaga

SEQ ID NO: 1337329 - RNA, 19 nt, Artificial Sequence
  Description of Artificial Sequence: Synthetic oligonucleotide
  Antisense strand to SEQ ID NO: 1337328
ucuagaacaaugaugucau

SEQ ID NO: 1337330 - RNA, 19 nt, Artificial Sequence
  Description of Artificial Sequence: Synthetic oligonucleotide
  Sense strand starting at position 268 of SEQ ID NO: 1242300
ugacaucauuguucuagaa

SEQ ID NO: 1337331 - RNA, 19 nt, Artificial Sequence
  Description of Artificial Sequence: Synthetic oligonucleotide
  Antisense strand to SEQ ID NO: 1337330
uucuagaacaaugauguca

SEQ ID NO: 1337332 - RNA, 19 nt, Artificial Sequence
  Description of Artificial Sequence: Synthetic oligonucleotide
  Sense strand starting at position 378 of SEQ ID NO: 1242300
agcucuuugggaugucaau

SEQ ID NO: 1337333 - RNA, 19 nt, Artificial Sequence
  Description of Artificial Sequence: Synthetic oligonucleotide
  Antisense strand to SEQ ID NO: 1337332
auugacaucccaaagagcu

SEQ ID NO: 1337334 - RNA, 19 nt, Artificial Sequence
  Description of Artificial Sequence: Synthetic oligonucleotide
  Sense strand starting at position 387 of SEQ ID NO: 1242300
ggaugucaauaauucuuaa

SEQ ID NO: 1337335 - RNA, 19 nt, Artificial Sequence
  Description of Artificial Sequence: Synthetic oligonucleotide
  Antisense strand to SEQ ID NO: 1337334
uuaagaauuauugacaucc

SEQ ID NO: 1337336 - RNA, 19 nt, Artificial Sequence
  Description of Artificial Sequence: Synthetic oligonucleotide
  Sense strand starting at position 701 of SEQ ID NO: 1242300
uuucuugagccucaugacu

SEQ ID NO: 1337337 - RNA, 19 nt, Artificial Sequence
  Description of Artificial Sequence: Synthetic oligonucleotide
  Antisense strand to SEQ ID NO: 1337336
agucaugaggcucaagaaa

SEQ ID NO: 1337338 - RNA, 19 nt, Artificial Sequence
  Description of Artificial Sequence: Synthetic oligonucleotide
  Sense strand starting at position 850 of SEQ ID NO: 1242300
aguggucuuccauauagau

SEQ ID NO: 1337339 - RNA, 19 nt, Artificial Sequence
  Description of Artificial Sequence: Synthetic oligonucleotide
  Antisense strand to SEQ ID NO: 1337338
aucuauauggaagaccacu

SEQ ID NO: 1337340 - RNA, 19 nt, Artificial Sequence
  Description of Artificial Sequence: Synthetic oligonucleotide
  Sense strand starting at position 1117 of SEQ ID NO: 1242300
cugaaugagggucgaacuu

SEQ ID NO: 1337341 - RNA, 19 nt, Artificial Sequence
  Description of Artificial Sequence: Synthetic oligonucleotide
  Antisense strand to SEQ ID NO: 1337340
aaguucgacccucauucag

SEQ ID NO: 1337342 - RNA, 19 nt, Artificial Sequence
  Description of Artificial Sequence: Synthetic oligonucleotide
  Sense strand starting at position 1132 of SEQ ID NO: 1242300
acuuucccggccuaauaaa

SEQ ID NO: 1337343 - RNA, 19 nt, Artificial Sequence
  Description of Artificial Sequence: Synthetic oligonucleotide
  Antisense strand to SEQ ID NO: 1337342
uuuauuaggccgggaaagu

SEQ ID NO: 1337344 - RNA, 19 nt, Artificial Sequence
  Description of Artificial Sequence: Synthetic oligonucleotide
  Sense strand starting at position 1355 of SEQ ID NO: 1242300
cgagcuauccucgcaggca

SEQ ID NO: 1337345 - RNA, 19 nt, Artificial Sequence
  Description of Artificial Sequence: Synthetic oligonucleotide
  Antisense strand to SEQ ID NO: 1337344
ugccugcgaggauagcucg

SEQ ID NO: 1337346 - RNA, 19 nt, Artificial Sequence
  Description of Artificial Sequence: Synthetic oligonucleotide
  Sense strand starting at position 1438 of SEQ ID NO: 1242300
gacugaagcgaaugugacu

SEQ ID NO: 1337347 - RNA, 19 nt, Artificial Sequence
  Description of Artificial Sequence: Synthetic oligonucleotide
  Antisense strand to SEQ ID NO: 1337346
agucacauucgcuucaguc

SEQ ID NO: 1337348 - RNA, 19 nt, Artificial Sequence
  Description of Artificial Sequence: Synthetic oligonucleotide
  Sense strand starting at position 1444 of SEQ ID NO: 1242300
agcgaaugugacugaguca

SEQ ID NO: 1337349 - RNA, 19 nt, Artificial Sequence
  Description of Artificial Sequence: Synthetic oligonucleotide
  Antisense strand to SEQ ID NO: 1337348
ugacucagucacauucgcu

SEQ ID NO: 1337350 - RNA, 19 nt, Artificial Sequence
  Description of Artificial Sequence: Synthetic oligonucleotide
  Sense strand starting at position 1445 of SEQ ID NO: 1242300
gcgaaugugacugagucaa

SEQ ID NO: 1337351 - RNA, 19 nt, Artificial Sequence
  Description of Artificial Sequence: Synthetic oligonucleotide
  Antisense strand to SEQ ID NO: 1337350
uugacucagucacauucgc

SEQ ID NO: 1337352 - RNA, 19 nt, Artificial Sequence
  Description of Artificial Sequence: Synthetic oligonucleotide
  Sense strand starting at position 1560 of SEQ ID NO: 1242300
agcuuacucguugcgcaaa

SEQ ID NO: 1337353 - RNA, 19 nt, Artificial Sequence
  Description of Artificial Sequence: Synthetic oligonucleotide
  Antisense strand to SEQ ID NO: 1337352
uuugcgcaacgaguaagcu

SEQ ID NO: 1337354 - RNA, 19 nt, Artificial Sequence
  Description of Artificial Sequence: Synthetic oligonucleotide
  Sense strand starting at position 2050 of SEQ ID NO: 1242300
uagcaacguccuguguuau

SEQ ID NO: 1337355 - RNA, 19 nt, Artificial Sequence
  Description of Artificial Sequence: Synthetic oligonucleotide
  Antisense strand to SEQ ID NO: 1337354
auaacacaggacguugcua

SEQ ID NO: 1337356 - RNA, 19 nt, Artificial Sequence
  Description of Artificial Sequence: Synthetic oligonucleotide
  Sense strand starting at position 2873 of SEQ ID NO: 1242300
ggugcaucccaguggaaag

SEQ ID NO: 1337357 - RNA, 19 nt, Artificial Sequence
  Description of Artificial Sequence: Synthetic oligonucleotide
  Antisense strand to SEQ ID NO: 1337356
cuuuccacugggaugcacc

SEQ ID NO: 1337358 - RNA, 19 nt, Artificial Sequence
  Description of Artificial Sequence: Synthetic oligonucleotide
  Sense strand starting at position 2874 of SEQ ID NO: 1242300
gugcaucccaguggaaaga

SEQ ID NO: 1337359 - RNA, 19 nt, Artificial Sequence
  Description of Artificial Sequence: Synthetic oligonucleotide
  Antisense strand to SEQ ID NO: 1337358
ucuuuccacugggaugcac

SEQ ID NO: 1337360 - RNA, 19 nt, Artificial Sequence
  Description of Artificial Sequence: Synthetic oligonucleotide
  Sense strand starting at position 2980 of SEQ ID NO: 1242300
ggaaauugaaguugucuca

SEQ ID NO: 1337361 - RNA, 19 nt, Artificial Sequence
  Description of Artificial Sequence: Synthetic oligonucleotide
  Antisense strand to SEQ ID NO: 1337360
ugagacaacuucaauuucc

SEQ ID NO: 1337362 - RNA, 19 nt, Artificial Sequence
  Description of Artificial Sequence: Synthetic oligonucleotide
  Sense strand starting at position 2993 of SEQ ID NO: 1242300
gucucaauccuguguaaga

SEQ ID NO: 1337363 - RNA, 19 nt, Artificial Sequence
  Description of Artificial Sequence: Synthetic oligonucleotide
  Antisense strand to SEQ ID NO: 1337362
ucuuacacaggauugagac

SEQ ID NO: 1337364 - RNA, 19 nt, Artificial Sequence
  Description of Artificial Sequence: Synthetic oligonucleotide
  Sense strand starting at position 2994 of SEQ ID NO: 1242300
ucucaauccuguguaagau

SEQ ID NO: 1337365 - RNA, 19 nt, Artificial Sequence
  Description of Artificial Sequence: Synthetic oligonucleotide
  Antisense strand to SEQ ID NO: 1337364
aucuuacacaggauugaga

SEQ ID NO: 1337366 - RNA, 19 nt, Artificial Sequence
  Description of Artificial Sequence: Synthetic oligonucleotide
  Sense strand starting at position 2995 of SEQ ID NO: 1242300
cucaauccuguguaagaug

SEQ ID NO: 1337367 - RNA, 19 nt, Artificial Sequence
  Description of Artificial Sequence: Synthetic oligonucleotide
  Antisense strand to SEQ ID NO: 1337366
caucuuacacaggauugag

SEQ ID NO: 1337368 - RNA, 19 nt, Artificial Sequence
  Description of Artificial Sequence: Synthetic oligonucleotide
  Sense strand starting at position 3069 of SEQ ID NO: 1242300
aaagcuauuccagggagca

SEQ ID NO: 1337369 - RNA, 19 nt, Artificial Sequence
  Description of Artificial Sequence: Synthetic oligonucleotide
  Antisense strand to SEQ ID NO: 1337368
ugcucccuggaauagcuuu

SEQ ID NO: 1337370 - RNA, 19 nt, Artificial Sequence
  Description of Artificial Sequence: Synthetic oligonucleotide
  Sense strand starting at position 3070 of SEQ ID NO: 1242300
aagcuauuccagggagcac

SEQ ID NO: 1337371 - RNA, 19 nt, Artificial Sequence
  Description of Artificial Sequence: Synthetic oligonucleotide
  Antisense strand to SEQ ID NO: 1337370
gugcucccuggaauagcuu

SEQ ID NO: 1337372 - RNA, 19 nt, Artificial Sequence
  Description of Artificial Sequence: Synthetic oligonucleotide
  Sense strand starting at position 3071 of SEQ ID NO: 1242300
agcuauuccagggagcaca

SEQ ID NO: 1337373 - RNA, 19 nt, Artificial Sequence
  Description of Artificial Sequence: Synthetic oligonucleotide
  Antisense strand to SEQ ID NO: 1337372
ugugcucccuggaauagcu

SEQ ID NO: 1337374 - RNA, 19 nt, Artificial Sequence
  Description of Artificial Sequence: Synthetic oligonucleotide
  Sense strand starting at position 3120 of SEQ ID NO: 1242300
gguccauucugaucagauu

SEQ ID NO: 1337375 - RNA, 19 nt, Artificial Sequence
  Description of Artificial Sequence: Synthetic oligonucleotide
  Antisense strand to SEQ ID NO: 1337374
aaucugaucagaauggacc

SEQ ID NO: 1337376 - RNA, 19 nt, Artificial Sequence
  Description of Artificial Sequence: Synthetic oligonucleotide
  Sense strand starting at position 3121 of SEQ ID NO: 1242300
guccauucugaucagauuc

SEQ ID NO: 1337377 - RNA, 19 nt, Artificial Sequence
  Description of Artificial Sequence: Synthetic oligonucleotide
  Antisense strand to SEQ ID NO: 1337376
gaaucugaucagaauggac

SEQ ID NO: 1337378 - RNA, 19 nt, Artificial Sequence
  Description of Artificial Sequence: Synthetic oligonucleotide
  Sense strand starting at position 3204 of SEQ ID NO: 1242300
gcagcauuggcugaaugag

SEQ ID NO: 1337379 - RNA, 19 nt, Artificial Sequence
  Description of Artificial Sequence: Synthetic oligonucleotide
  Antisense strand to SEQ ID NO: 1337378
cucauucagccaaugcugc

SEQ ID NO: 1337380 - RNA, 19 nt, Artificial Sequence
  Description of Artificial Sequence: Synthetic oligonucleotide
  Sense strand starting at position 3297 of SEQ ID NO: 1242300
guugaagagauguauucug

SEQ ID NO: 1337381 - RNA, 19 nt, Artificial Sequence
  Description of Artificial Sequence: Synthetic oligonucleotide
  Antisense strand to SEQ ID NO: 1337380
cagaauacaucucuucaac

SEQ ID NO: 1337382 - RNA, 19 nt, Artificial Sequence
  Description of Artificial Sequence: Synthetic oligonucleotide
  Sense strand starting at position 3304 of SEQ ID NO: 1242300
agauguauucugugccaaa

SEQ ID NO: 1337383 - RNA, 19 nt, Artificial Sequence
  Description of Artificial Sequence: Synthetic oligonucleotide
  Antisense strand to SEQ ID NO: 1337382
uuuggcacagaauacaucu

SEQ ID NO: 1337384 - RNA, 19 nt, Artificial Sequence
  Description of Artificial Sequence: Synthetic oligonucleotide
  Sense strand starting at position 3448 of SEQ ID NO: 1242300
agauaaacauuggcuuaau

SEQ ID NO: 1337385 - RNA, 19 nt, Artificial Sequence
  Description of Artificial Sequence: Synthetic oligonucleotide
  Antisense strand to SEQ ID NO: 1337384
auuaagccaauguuuaucu

SEQ ID NO: 1337386 - RNA, 19 nt, Artificial Sequence
  Description of Artificial Sequence: Synthetic oligonucleotide
  Sense strand starting at position 3458 of SEQ ID NO: 1242300
uggcuuaauccacaaaggu

SEQ ID NO: 1337387 - RNA, 19 nt, Artificial Sequence
  Description of Artificial Sequence: Synthetic oligonucleotide
  Antisense strand to SEQ ID NO: 1337386
accuuuguggauuaagcca

SEQ ID NO: 1337388 - RNA, 19 nt, Artificial Sequence
  Description of Artificial Sequence: Synthetic oligonucleotide
  Sense strand starting at position 3568 of SEQ ID NO: 1242300
aggaaugucuagguuagca

SEQ ID NO: 1337389 - RNA, 19 nt, Artificial Sequence
  Description of Artificial Sequence: Synthetic oligonucleotide
  Antisense strand to SEQ ID NO: 1337388
ugcuaaccuagacauuccu

SEQ ID NO: 1337390 - RNA, 19 nt, Artificial Sequence
  Description of Artificial Sequence: Synthetic oligonucleotide
  Sense strand starting at position 3570 of SEQ ID NO: 1242300
gaaugucuagguuagcaua

SEQ ID NO: 1337391 - RNA, 19 nt, Artificial Sequence
  Description of Artificial Sequence: Synthetic oligonucleotide
  Antisense strand to SEQ ID NO: 1337390
uaugcuaaccuagacauuc

SEQ ID NO: 1337392 - RNA, 19 nt, Artificial Sequence
  Description of Artificial Sequence: Synthetic oligonucleotide
  Sense strand starting at position 3592 of SEQ ID NO: 1242300
acuuguggagaccgaaauu

SEQ ID NO: 1337393 - RNA, 19 nt, Artificial Sequence
  Description of Artificial Sequence: Synthetic oligonucleotide
  Antisense strand to SEQ ID NO: 1337392
aauuucggucuccacaagu

SEQ ID NO: 1337394 - RNA, 19 nt, Artificial Sequence
  Description of Artificial Sequence: Synthetic oligonucleotide
  Sense strand starting at position 3634 of SEQ ID NO: 1242300
guuagcaggcuucagagaa

SEQ ID NO: 1337395 - RNA, 19 nt, Artificial Sequence
  Description of Artificial Sequence: Synthetic oligonucleotide
  Antisense strand to SEQ ID NO: 1337394
uucucugaagccugcuaac

SEQ ID NO: 1337396 - RNA, 19 nt, Artificial Sequence
  Description of Artificial Sequence: Synthetic oligonucleotide
  Sense strand starting at position 3648 of SEQ ID NO: 1242300
gagaaaguaaguuguguuu

SEQ ID NO: 1337397 - RNA, 19 nt, Artificial Sequence
  Description of Artificial Sequence: Synthetic oligonucleotide
  Antisense strand to SEQ ID NO: 1337396
aaacacaacuuacuuucuc

SEQ ID NO: 1337398 - RNA, 19 nt, Artificial Sequence
  Description of Artificial Sequence: Synthetic oligonucleotide
  Sense strand starting at position 3678 of SEQ ID NO: 1242300
caagguauauguguugaua

SEQ ID NO: 1337399 - RNA, 19 nt, Artificial Sequence
  Description of Artificial Sequence: Synthetic oligonucleotide
  Antisense strand to SEQ ID NO: 1337398
uaucaacacauauaccuug

SEQ ID NO: 1337400 - RNA, 19 nt, Artificial Sequence
  Description of Artificial Sequence: Synthetic oligonucleotide
  Sense strand starting at position 3681 of SEQ ID NO: 1242300
gguauauguguugauauua

SEQ ID NO: 1337401 - RNA, 19 nt, Artificial Sequence
  Description of Artificial Sequence: Synthetic oligonucleotide
  Antisense strand to SEQ ID NO: 1337400
uaauaucaacacauauacc

SEQ ID NO: 1337402 - RNA, 19 nt, Artificial Sequence
  Description of Artificial Sequence: Synthetic oligonucleotide
  Sense strand starting at position 3871 of SEQ ID NO: 1242300
uuugguuuacagugauaag

SEQ ID NO: 1337403 - RNA, 19 nt, Artificial Sequence
  Description of Artificial Sequence: Synthetic oligonucleotide
  Antisense strand to SEQ ID NO: 1337402
cuuaucacuguaaaccaaa

SEQ ID NO: 1337404 - RNA, 19 nt, Artificial Sequence
  Description of Artificial Sequence: Synthetic oligonucleotide
  Sense strand starting at position 785 of SEQ ID NO: 1242302
uuacauauauguggguauu

SEQ ID NO: 1337405 - RNA, 19 nt, Artificial Sequence
  Description of Artificial Sequence: Synthetic oligonucleotide
  Antisense strand to SEQ ID NO: 1337404
aauacccacauauauguaa

SEQ ID NO: 1337406 - RNA, 19 nt, Artificial Sequence
  Description of Artificial Sequence: Synthetic oligonucleotide
  Sense strand starting at position 795 of SEQ ID NO: 1242302
guggguauuucuggauuuc

SEQ ID NO: 1337407 - RNA, 19 nt, Artificial Sequence
  Description of Artificial Sequence: Synthetic oligonucleotide
  Antisense strand to SEQ ID NO: 1337406
gaaauccagaaauacccac

SEQ ID NO: 1337408 - RNA, 19 nt, Artificial Sequence
  Description of Artificial Sequence: Synthetic oligonucleotide
  Sense strand starting at position 785 of SEQ ID NO: 1242304
uuacauauauguggguauu

SEQ ID NO: 1337409 - RNA, 19 nt, Artificial Sequence
  Description of Artificial Sequence: Synthetic oligonucleotide
  Antisense strand to SEQ ID NO: 1337408
aauacccacauauauguaa

SEQ ID NO: 1337410 - RNA, 19 nt, Artificial Sequence
  Description of Artificial Sequence: Synthetic oligonucleotide
  Sense strand starting at position 795 of SEQ ID NO: 1242304
guggguauuucuggauuuc

SEQ ID NO: 1337411 - RNA, 19 nt, Artificial Sequence
  Description of Artificial Sequence: Synthetic oligonucleotide
  Antisense strand to SEQ ID NO: 1337410
gaaauccagaaauacccac

SEQ ID NO: 1337412 - RNA, 19 nt, Artificial Sequence
  Description of Artificial Sequence: Synthetic oligonucleotide
  Sense strand starting at position 3548 of SEQ ID NO: 1242305
ucaugaaacugguaauuua

SEQ ID NO: 1337413 - RNA, 19 nt, Artificial Sequence
  Description of Artificial Sequence: Synthetic oligonucleotide
  Antisense strand to SEQ ID NO: 1337412
uaaauuaccaguuucauga

SEQ ID NO: 1337414 - RNA, 19 nt, Artificial Sequence
  Description of Artificial Sequence: Synthetic oligonucleotide
  Sense strand starting at position 3555 of SEQ ID NO: 1242305
acugguaauuuaugacauc

SEQ ID NO: 1337415 - RNA, 19 nt, Artificial Sequence
  Description of Artificial Sequence: Synthetic oligonucleotide
  Antisense strand to SEQ ID NO: 1337414
gaugucauaaauuaccagu

SEQ ID NO: 1337416 - RNA, 19 nt, Artificial Sequence
  Description of Artificial Sequence: Synthetic oligonucleotide
  Sense strand starting at position 39 of SEQ ID NO: 1242306
gcuugugauguuuaagucu

SEQ ID NO: 1337417 - RNA, 19 nt, Artificial Sequence
  Description of Artificial Sequence: Synthetic oligonucleotide
  Antisense strand to SEQ ID NO: 1337416
agacuuaaacaucacaagc

SEQ ID NO: 1337418 - RNA, 19 nt, Artificial Sequence
  Description of Artificial Sequence: Synthetic oligonucleotide
  Sense strand starting at position 46 of SEQ ID NO: 1242306
auguuuaagucuccucuga

SEQ ID NO: 1337419 - RNA, 19 nt, Artificial Sequence
  Description of Artificial Sequence: Synthetic oligonucleotide
  Antisense strand to SEQ ID NO: 1337418
ucagaggagacuuaaacau

SEQ ID NO: 1337420 - RNA, 19 nt, Artificial Sequence
  Description of Artificial Sequence: Synthetic oligonucleotide
  Sense strand starting at position 48 of SEQ ID NO: 1242306
guuuaagucuccucugaug

SEQ ID NO: 1337421 - RNA, 19 nt, Artificial Sequence
  Description of Artificial Sequence: Synthetic oligonucleotide
  Antisense strand to SEQ ID NO: 1337420
caucagaggagacuuaaac

SEQ ID NO: 1337422 - RNA, 19 nt, Artificial Sequence
  Description of Artificial Sequence: Synthetic oligonucleotide
  Sense strand starting at position 50 of SEQ ID NO: 1242306
uuaagucuccucugaugag

SEQ ID NO: 1337423 - RNA, 19 nt, Artificial Sequence
  Description of Artificial Sequence: Synthetic oligonucleotide
  Antisense strand to SEQ ID NO: 1337422
cucaucagaggagacuuaa

SEQ ID NO: 1337424 - RNA, 19 nt, Artificial Sequence
  Description of Artificial Sequence: Synthetic oligonucleotide
  Sense strand starting at position 54 of SEQ ID NO: 1242306
gucuccucugaugaguuua

SEQ ID NO: 1337425 - RNA, 19 nt, Artificial Sequence
  Description of Artificial Sequence: Synthetic oligonucleotide
  Antisense strand to SEQ ID NO: 1337424
uaaacucaucagaggagac

SEQ ID NO: 1337426 - RNA, 19 nt, Artificial Sequence
  Description of Artificial Sequence: Synthetic oligonucleotide
  Sense strand starting at position 56 of SEQ ID NO: 1242306
cuccucugaugaguuuaau

SEQ ID NO: 1337427 - RNA, 19 nt, Artificial Sequence
  Description of Artificial Sequence: Synthetic oligonucleotide
  Antisense strand to SEQ ID NO: 1337426
auuaaacucaucagaggag

SEQ ID NO: 1337428 - RNA, 19 nt, Artificial Sequence
  Description of Artificial Sequence: Synthetic oligonucleotide
  Sense strand starting at position 67 of SEQ ID NO: 1242306
aguuuaauucagggcagag

SEQ ID NO: 1337429 - RNA, 19 nt, Artificial Sequence
  Description of Artificial Sequence: Synthetic oligonucleotide
  Antisense strand to SEQ ID NO: 1337428
cucugcccugaauuaaacu

SEQ ID NO: 1337430 - RNA, 19 nt, Artificial Sequence
  Description of Artificial Sequence: Synthetic oligonucleotide
  Sense strand starting at position 295 of SEQ ID NO: 1242306
gccugaauccuuuagccua

SEQ ID NO: 1337431 - RNA, 19 nt, Artificial Sequence
  Description of Artificial Sequence: Synthetic oligonucleotide
  Antisense strand to SEQ ID NO: 1337430
uaggcuaaaggauucaggc

SEQ ID NO: 1337432 - RNA, 19 nt, Artificial Sequence
  Description of Artificial Sequence: Synthetic oligonucleotide
  Sense strand starting at position 343 of SEQ ID NO: 1242306
aggcuucugcuccagcuua

SEQ ID NO: 1337433 - RNA, 19 nt, Artificial Sequence
  Description of Artificial Sequence: Synthetic oligonucleotide
  Antisense strand to SEQ ID NO: 1337432
uaagcuggagcagaagccu

SEQ ID NO: 1337434 - RNA, 19 nt, Artificial Sequence
  Description of Artificial Sequence: Synthetic oligonucleotide
  Sense strand starting at position 646 of SEQ ID NO: 1242306
guguguagcuauuuacaua

SEQ ID NO: 1337435 - RNA, 19 nt, Artificial Sequence
  Description of Artificial Sequence: Synthetic oligonucleotide
  Antisense strand to SEQ ID NO: 1337434
uauguaaauagcuacacac

SEQ ID NO: 1337436 - RNA, 19 nt, Artificial Sequence
  Description of Artificial Sequence: Synthetic oligonucleotide
  Sense strand starting at position 1219 of SEQ ID NO: 1242306
gcggauacugagggauaaa

SEQ ID NO: 1337437 - RNA, 19 nt, Artificial Sequence
  Description of Artificial Sequence: Synthetic oligonucleotide
  Antisense strand to SEQ ID NO: 1337436
uuuaucccucaguauccgc

SEQ ID NO: 1337438 - RNA, 19 nt, Artificial Sequence
  Description of Artificial Sequence: Synthetic oligonucleotide
  Sense strand starting at position 1309 of SEQ ID NO: 1242306
cacugugagagauguggaa

SEQ ID NO: 1337439 - RNA, 19 nt, Artificial Sequence
  Description of Artificial Sequence: Synthetic oligonucleotide
  Antisense strand to SEQ ID NO: 1337438
uuccacaucucucacagug

SEQ ID NO: 1337440 - RNA, 19 nt, Artificial Sequence
  Description of Artificial Sequence: Synthetic oligonucleotide
  Sense strand starting at position 1311 of SEQ ID NO: 1242306
cugugagagauguggaaac

SEQ ID NO: 1337441 - RNA, 19 nt, Artificial Sequence
  Description of Artificial Sequence: Synthetic oligonucleotide
  Antisense strand to SEQ ID NO: 1337440
guuuccacaucucucacag

SEQ ID NO: 1337442 - RNA, 19 nt, Artificial Sequence
  Description of Artificial Sequence: Synthetic oligonucleotide
  Sense strand starting at position 1432 of SEQ ID NO: 1242306
cugacaagauuuggccuaa

SEQ ID NO: 1337443 - RNA, 19 nt, Artificial Sequence
  Description of Artificial Sequence: Synthetic oligonucleotide
  Antisense strand to SEQ ID NO: 1337442
uuaggccaaaucuugucag

SEQ ID NO: 1337444 - RNA, 19 nt, Artificial Sequence
  Description of Artificial Sequence: Synthetic oligonucleotide
  Sense strand starting at position 1564 of SEQ ID NO: 1242306
ccggguaagcguucagugu

SEQ ID NO: 1337445 - RNA, 19 nt, Artificial Sequence
  Description of Artificial Sequence: Synthetic oligonucleotide
  Antisense strand to SEQ ID NO: 1337444
acacugaacgcuuacccgg

SEQ ID NO: 1337446 - RNA, 19 nt, Artificial Sequence
  Description of Artificial Sequence: Synthetic oligonucleotide
  Sense strand starting at position 1628 of SEQ ID NO: 1242306
gacaaauaaucgcagagca

SEQ ID NO: 1337447 - RNA, 19 nt, Artificial Sequence
  Description of Artificial Sequence: Synthetic oligonucleotide
  Antisense strand to SEQ ID NO: 1337446
ugcucugcgauuauuuguc

SEQ ID NO: 1337448 - RNA, 19 nt, Artificial Sequence
  Description of Artificial Sequence: Synthetic oligonucleotide
  Sense strand starting at position 2119 of SEQ ID NO: 1242306
uggcccuguucuuuguauu

SEQ ID NO: 1337449 - RNA, 19 nt, Artificial Sequence
  Description of Artificial Sequence: Synthetic oligonucleotide
  Antisense strand to SEQ ID NO: 1337448
aauacaaagaacagggcca

SEQ ID NO: 1337450 - RNA, 19 nt, Artificial Sequence
  Description of Artificial Sequence: Synthetic oligonucleotide
  Sense strand starting at position 2130 of SEQ ID NO: 1242306
uuuguauugcugggacucu

SEQ ID NO: 1337451 - RNA, 19 nt, Artificial Sequence
  Description of Artificial Sequence: Synthetic oligonucleotide
  Antisense strand to SEQ ID NO: 1337450
agagucccagcaauacaaa

SEQ ID NO: 1337452 - RNA, 19 nt, Artificial Sequence
  Description of Artificial Sequence: Synthetic oligonucleotide
  Sense strand starting at position 2333 of SEQ ID NO: 1242306
cccacuguuggcugaguga

SEQ ID NO: 1337453 - RNA, 19 nt, Artificial Sequence
  Description of Artificial Sequence: Synthetic oligonucleotide
  Antisense strand to SEQ ID NO: 1337452
ucacucagccaacaguggg

SEQ ID NO: 1337454 - RNA, 19 nt, Artificial Sequence
  Description of Artificial Sequence: Synthetic oligonucleotide
  Sense strand starting at position 2394 of SEQ ID NO: 1242306
uuuccuuaaugucaggaua

SEQ ID NO: 1337455 - RNA, 19 nt, Artificial Sequence
  Description of Artificial Sequence: Synthetic oligonucleotide
  Antisense strand to SEQ ID NO: 1337454
uauccugacauuaaggaaa

SEQ ID NO: 1337456 - RNA, 19 nt, Artificial Sequence
  Description of Artificial Sequence: Synthetic oligonucleotide
  Sense strand starting at position 2397 of SEQ ID NO: 1242306
ccuuaaugucaggauaugu

SEQ ID NO: 1337457 - RNA, 19 nt, Artificial Sequence
  Description of Artificial Sequence: Synthetic oligonucleotide
  Antisense strand to SEQ ID NO: 1337456
acauauccugacauuaagg

SEQ ID NO: 1337458 - RNA, 19 nt, Artificial Sequence
  Description of Artificial Sequence: Synthetic oligonucleotide
  Sense strand starting at position 2402 of SEQ ID NO: 1242306
augucaggauauguuaaua

SEQ ID NO: 1337459 - RNA, 19 nt, Artificial Sequence
  Description of Artificial Sequence: Synthetic oligonucleotide
  Antisense strand to SEQ ID NO: 1337458
uauuaacauauccugacau

SEQ ID NO: 1337460 - RNA, 19 nt, Artificial Sequence
  Description of Artificial Sequence: Synthetic oligonucleotide
  Sense strand starting at position 2537 of SEQ ID NO: 1242306
ucaucacaugcauguugua

SEQ ID NO: 1337461 - RNA, 19 nt, Artificial Sequence
  Description of Artificial Sequence: Synthetic oligonucleotide
  Antisense strand to SEQ ID NO: 1337460
uacaacaugcaugugauga

SEQ ID NO: 1337462 - RNA, 19 nt, Artificial Sequence
  Description of Artificial Sequence: Synthetic oligonucleotide
  Sense strand starting at position 2546 of SEQ ID NO: 1242306
gcauguuguagccugcuau

SEQ ID NO: 1337463 - RNA, 19 nt, Artificial Sequence
  Description of Artificial Sequence: Synthetic oligonucleotide
  Antisense strand to SEQ ID NO: 1337462
auagcaggcuacaacaugc

SEQ ID NO: 1337464 - RNA, 19 nt, Artificial Sequence
  Description of Artificial Sequence: Synthetic oligonucleotide
  Sense strand starting at position 2549 of SEQ ID NO: 1242306
uguuguagccugcuaucuu

SEQ ID NO: 1337465 - RNA, 19 nt, Artificial Sequence
  Description of Artificial Sequence: Synthetic oligonucleotide
  Antisense strand to SEQ ID NO: 1337464
aagauagcaggcuacaaca

SEQ ID NO: 1337466 - RNA, 19 nt, Artificial Sequence
  Description of Artificial Sequence: Synthetic oligonucleotide
  Sense strand starting at position 2704 of SEQ ID NO: 1242306
uaucucagccuauggagua

SEQ ID NO: 1337467 - RNA, 19 nt, Artificial Sequence
  Description of Artificial Sequence: Synthetic oligonucleotide
  Antisense strand to SEQ ID NO: 1337466
uacuccauaggcugagaua

SEQ ID NO: 1337468 - RNA, 19 nt, Artificial Sequence
  Description of Artificial Sequence: Synthetic oligonucleotide
  Sense strand starting at position 2907 of SEQ ID NO: 1242306
gcuggaaauaauggugauc

SEQ ID NO: 1337469 - RNA, 19 nt, Artificial Sequence
  Description of Artificial Sequence: Synthetic oligonucleotide
  Antisense strand to SEQ ID NO: 1337468
gaucaccauuauuuccagc

SEQ ID NO: 1337470 - RNA, 19 nt, Artificial Sequence
  Description of Artificial Sequence: Synthetic oligonucleotide
  Sense strand starting at position 2909 of SEQ ID NO: 1242306
uggaaauaauggugaucuc

SEQ ID NO: 1337471 - RNA, 19 nt, Artificial Sequence
  Description of Artificial Sequence: Synthetic oligonucleotide
  Antisense strand to SEQ ID NO: 1337470
gagaucaccauuauuucca

SEQ ID NO: 1337472 - RNA, 19 nt, Artificial Sequence
  Description of Artificial Sequence: Synthetic oligonucleotide
  Sense strand starting at position 2937 of SEQ ID NO: 1242306
guguuguuuguguggaagu

SEQ ID NO: 1337473 - RNA, 19 nt, Artificial Sequence
  Description of Artificial Sequence: Synthetic oligonucleotide
  Antisense strand to SEQ ID NO: 1337472
acuuccacacaaacaacac

SEQ ID NO: 1337474 - RNA, 19 nt, Artificial Sequence
  Description of Artificial Sequence: Synthetic oligonucleotide
  Sense strand starting at position 3040 of SEQ ID NO: 1242306
guuggcagguccuuaguaa

SEQ ID NO: 1337475 - RNA, 19 nt, Artificial Sequence
  Description of Artificial Sequence: Synthetic oligonucleotide
  Antisense strand to SEQ ID NO: 1337474
uuacuaaggaccugccaac

SEQ ID NO: 1337476 - RNA, 19 nt, Artificial Sequence
  Description of Artificial Sequence: Synthetic oligonucleotide
  Sense strand starting at position 3041 of SEQ ID NO: 1242306
uuggcagguccuuaguaaa

SEQ ID NO: 1337477 - RNA, 19 nt, Artificial Sequence
  Description of Artificial Sequence: Synthetic oligonucleotide
  Antisense strand to SEQ ID NO: 1337476
uuuacuaaggaccugccaa

SEQ ID NO: 1337478 - RNA, 19 nt, Artificial Sequence
  Description of Artificial Sequence: Synthetic oligonucleotide
  Sense strand starting at position 3065 of SEQ ID NO: 1242306
gcucguggcacuuaauauu

SEQ ID NO: 1337479 - RNA, 19 nt, Artificial Sequence
  Description of Artificial Sequence: Synthetic oligonucleotide
  Antisense strand to SEQ ID NO: 1337478
aauauuaagugccacgagc

SEQ ID NO: 1337480 - RNA, 19 nt, Artificial Sequence
  Description of Artificial Sequence: Synthetic oligonucleotide
  Sense strand starting at position 3119 of SEQ ID NO: 1242306
agagauaaaucagaugcgu

SEQ ID NO: 1337481 - RNA, 19 nt, Artificial Sequence
  Description of Artificial Sequence: Synthetic oligonucleotide
  Antisense strand to SEQ ID NO: 1337480
acgcaucugauuuaucucu

SEQ ID NO: 1337482 - RNA, 19 nt, Artificial Sequence
  Description of Artificial Sequence: Synthetic oligonucleotide
  Sense strand starting at position 3136 of SEQ ID NO: 1242306
gucccuguucuugagacaa

SEQ ID NO: 1337483 - RNA, 19 nt, Artificial Sequence
  Description of Artificial Sequence: Synthetic oligonucleotide
  Antisense strand to SEQ ID NO: 1337482
uugucucaagaacagggac

SEQ ID NO: 1337484 - RNA, 19 nt, Artificial Sequence
  Description of Artificial Sequence: Synthetic oligonucleotide
  Sense strand starting at position 3138 of SEQ ID NO: 1242306
cccuguucuugagacaaac

SEQ ID NO: 1337485 - RNA, 19 nt, Artificial Sequence
  Description of Artificial Sequence: Synthetic oligonucleotide
  Antisense strand to SEQ ID NO: 1337484
guuugucucaagaacaggg

SEQ ID NO: 1337486 - RNA, 19 nt, Artificial Sequence
  Description of Artificial Sequence: Synthetic oligonucleotide
  Sense strand starting at position 3175 of SEQ ID NO: 1242306
aggguaagauccuccauga

SEQ ID NO: 1337487 - RNA, 19 nt, Artificial Sequence
  Description of Artificial Sequence: Synthetic oligonucleotide
  Antisense strand to SEQ ID NO: 1337486
ucauggaggaucuuacccu

SEQ ID NO: 1337488 - RNA, 19 nt, Artificial Sequence
  Description of Artificial Sequence: Synthetic oligonucleotide
  Sense strand starting at position 3218 of SEQ ID NO: 1242306
agccuucuugaaggaguga

SEQ ID NO: 1337489 - RNA, 19 nt, Artificial Sequence
  Description of Artificial Sequence: Synthetic oligonucleotide
  Antisense strand to SEQ ID NO: 1337488
ucacuccuucaagaaggcu

SEQ ID NO: 1337490 - RNA, 19 nt, Artificial Sequence
  Description of Artificial Sequence: Synthetic oligonucleotide
  Sense strand starting at position 3239 of SEQ ID NO: 1242306
ugaaaugaaucuugaagga

SEQ ID NO: 1337491 - RNA, 19 nt, Artificial Sequence
  Description of Artificial Sequence: Synthetic oligonucleotide
  Antisense strand to SEQ ID NO: 1337490
uccuucaagauucauuuca

SEQ ID NO: 1337492 - RNA, 19 nt, Artificial Sequence
  Description of Artificial Sequence: Synthetic oligonucleotide
  Sense strand starting at position 3521 of SEQ ID NO: 1242306
gggauccagccgugucuuu

SEQ ID NO: 1337493 - RNA, 19 nt, Artificial Sequence
  Description of Artificial Sequence: Synthetic oligonucleotide
  Antisense strand to SEQ ID NO: 1337492
aaagacacggcuggauccc

SEQ ID NO: 1337494 - RNA, 19 nt, Artificial Sequence
  Description of Artificial Sequence: Synthetic oligonucleotide
  Sense strand starting at position 3928 of SEQ ID NO: 1242306
gucguauagcucuaggucu

SEQ ID NO: 1337495 - RNA, 19 nt, Artificial Sequence
  Description of Artificial Sequence: Synthetic oligonucleotide
  Antisense strand to SEQ ID NO: 1337494
agaccuagagcuauacgac

SEQ ID NO: 1337496 - RNA, 19 nt, Artificial Sequence
  Description of Artificial Sequence: Synthetic oligonucleotide
  Sense strand starting at position 31 of SEQ ID NO: 1242307
gcgaaagcucaauaaauga

SEQ ID NO: 1337497 - RNA, 19 nt, Artificial Sequence
  Description of Artificial Sequence: Synthetic oligonucleotide
  Antisense strand to SEQ ID NO: 1337496
ucauuuauugagcuuucgc

SEQ ID NO: 1337498 - RNA, 19 nt, Artificial Sequence
  Description of Artificial Sequence: Synthetic oligonucleotide
  Sense strand starting at position 103 of SEQ ID NO: 1242307
ccaggacgaucauauaaac

SEQ ID NO: 1337499 - RNA, 19 nt, Artificial Sequence
  Description of Artificial Sequence: Synthetic oligonucleotide
  Antisense strand to SEQ ID NO: 1337498
guuuauaugaucguccugg

SEQ ID NO: 1337500 - RNA, 19 nt, Artificial Sequence
  Description of Artificial Sequence: Synthetic oligonucleotide
  Sense strand starting at position 160 of SEQ ID NO: 1242307
gcaucuuaggccuaggaca

SEQ ID NO: 1337501 - RNA, 19 nt, Artificial Sequence
  Description of Artificial Sequence: Synthetic oligonucleotide
  Antisense strand to SEQ ID NO: 1337500
uguccuaggccuaagaugc

SEQ ID NO: 1337502 - RNA, 19 nt, Artificial Sequence
  Description of Artificial Sequence: Synthetic oligonucleotide
  Sense strand starting at position 289 of SEQ ID NO: 1242307
aagcuacaagggugauaaa

SEQ ID NO: 1337503 - RNA, 19 nt, Artificial Sequence
  Description of Artificial Sequence: Synthetic oligonucleotide
  Antisense strand to SEQ ID NO: 1337502
uuuaucacccuuguagcuu

SEQ ID NO: 1337504 - RNA, 19 nt, Artificial Sequence
  Description of Artificial Sequence: Synthetic oligonucleotide
  Sense strand starting at position 299 of SEQ ID NO: 1242307
ggugauaaaguguauauga

SEQ ID NO: 1337505 - RNA, 19 nt, Artificial Sequence
  Description of Artificial Sequence: Synthetic oligonucleotide
  Antisense strand to SEQ ID NO: 1337504
ucauauacacuuuaucacc

SEQ ID NO: 1337506 - RNA, 19 nt, Artificial Sequence
  Description of Artificial Sequence: Synthetic oligonucleotide
  Sense strand starting at position 314 of SEQ ID NO: 1242307
augagccaucuaugaagaa

SEQ ID NO: 1337507 - RNA, 19 nt, Artificial Sequence
  Description of Artificial Sequence: Synthetic oligonucleotide
  Antisense strand to SEQ ID NO: 1337506
uucuucauagauggcucau

SEQ ID NO: 1337508 - RNA, 19 nt, Artificial Sequence
  Description of Artificial Sequence: Synthetic oligonucleotide
  Sense strand starting at position 315 of SEQ ID NO: 1242307
ugagccaucuaugaagaag

SEQ ID NO: 1337509 - RNA, 19 nt, Artificial Sequence
  Description of Artificial Sequence: Synthetic oligonucleotide
  Antisense strand to SEQ ID NO: 1337508
cuucuucauagauggcuca

SEQ ID NO: 1337510 - RNA, 19 nt, Artificial Sequence
  Description of Artificial Sequence: Synthetic oligonucleotide
  Sense strand starting at position 363 of SEQ ID NO: 1242307
uacccagaucugcggagaa

SEQ ID NO: 1337511 - RNA, 19 nt, Artificial Sequence
  Description of Artificial Sequence: Synthetic oligonucleotide
  Antisense strand to SEQ ID NO: 1337510
uucuccgcagaucugggua

SEQ ID NO: 1337512 - RNA, 19 nt, Artificial Sequence
  Description of Artificial Sequence: Synthetic oligonucleotide
  Sense strand starting at position 578 of SEQ ID NO: 1242307
gcccaugugcuacagagaa

SEQ ID NO: 1337513 - RNA, 19 nt, Artificial Sequence
  Description of Artificial Sequence: Synthetic oligonucleotide
  Antisense strand to SEQ ID NO: 1337512
uucucuguagcacaugggc

SEQ ID NO: 1337514 - RNA, 19 nt, Artificial Sequence
  Description of Artificial Sequence: Synthetic oligonucleotide
  Sense strand starting at position 672 of SEQ ID NO: 1242307
ggucuccuuguacaaggau

SEQ ID NO: 1337515 - RNA, 19 nt, Artificial Sequence
  Description of Artificial Sequence: Synthetic oligonucleotide
  Antisense strand to SEQ ID NO: 1337514
auccuuguacaaggagacc

SEQ ID NO: 1337516 - RNA, 19 nt, Artificial Sequence
  Description of Artificial Sequence: Synthetic oligonucleotide
  Sense strand starting at position 684 of SEQ ID NO: 1242307
caaggaugucugcagcuca

SEQ ID NO: 1337517 - RNA, 19 nt, Artificial Sequence
  Description of Artificial Sequence: Synthetic oligonucleotide
  Antisense strand to SEQ ID NO: 1337516
ugagcugcagacauccuug

SEQ ID NO: 1337518 - RNA, 19 nt, Artificial Sequence
  Description of Artificial Sequence: Synthetic oligonucleotide
  Sense strand starting at position 743 of SEQ ID NO: 1242307
ggacaucacucacaagcaa

SEQ ID NO: 1337519 - RNA, 19 nt, Artificial Sequence
  Description of Artificial Sequence: Synthetic oligonucleotide
  Antisense strand to SEQ ID NO: 1337518
uugcuugugagugaugucc

SEQ ID NO: 1337520 - RNA, 19 nt, Artificial Sequence
  Description of Artificial Sequence: Synthetic oligonucleotide
  Sense strand starting at position 754 of SEQ ID NO: 1242307
acaagcaaguugucacaga

SEQ ID NO: 1337521 - RNA, 19 nt, Artificial Sequence
  Description of Artificial Sequence: Synthetic oligonucleotide
  Antisense strand to SEQ ID NO: 1337520
ucugugacaacuugcuugu

SEQ ID NO: 1337522 - RNA, 19 nt, Artificial Sequence
  Description of Artificial Sequence: Synthetic oligonucleotide
  Sense strand starting at position 1175 of SEQ ID NO: 1242307
ggaugcuuggguuguccaa

SEQ ID NO: 1337523 - RNA, 19 nt, Artificial Sequence
  Description of Artificial Sequence: Synthetic oligonucleotide
  Antisense strand to SEQ ID NO: 1337522
uuggacaacccaagcaucc

SEQ ID NO: 1337524 - RNA, 19 nt, Artificial Sequence
  Description of Artificial Sequence: Synthetic oligonucleotide
  Sense strand starting at position 1258 of SEQ ID NO: 1242307
ggaaauguucuaggcuaag

SEQ ID NO: 1337525 - RNA, 19 nt, Artificial Sequence
  Description of Artificial Sequence: Synthetic oligonucleotide
  Antisense strand to SEQ ID NO: 1337524
cuuagccuagaacauuucc

SEQ ID NO: 1337526 - RNA, 19 nt, Artificial Sequence
  Description of Artificial Sequence: Synthetic oligonucleotide
  Sense strand starting at position 2221 of SEQ ID NO: 1242307
cucauagguccugaguucu

SEQ ID NO: 1337527 - RNA, 19 nt, Artificial Sequence
  Description of Artificial Sequence: Synthetic oligonucleotide
  Antisense strand to SEQ ID NO: 1337526
agaacucaggaccuaugag

SEQ ID NO: 1337528 - RNA, 19 nt, Artificial Sequence
  Description of Artificial Sequence: Synthetic oligonucleotide
  Sense strand starting at position 2229 of SEQ ID NO: 1242307
uccugaguucugugccaca

SEQ ID NO: 1337529 - RNA, 19 nt, Artificial Sequence
  Description of Artificial Sequence: Synthetic oligonucleotide
  Antisense strand to SEQ ID NO: 1337528
uguggcacagaacucagga

SEQ ID NO: 1337530 - RNA, 19 nt, Artificial Sequence
  Description of Artificial Sequence: Synthetic oligonucleotide
  Sense strand starting at position 2346 of SEQ ID NO: 1242307
cacguacuucuaggaacaa

SEQ ID NO: 1337531 - RNA, 19 nt, Artificial Sequence
  Description of Artificial Sequence: Synthetic oligonucleotide
  Antisense strand to SEQ ID NO: 1337530
uuguuccuagaaguacgug

SEQ ID NO: 1337532 - RNA, 19 nt, Artificial Sequence
  Description of Artificial Sequence: Synthetic oligonucleotide
  Sense strand starting at position 2412 of SEQ ID NO: 1242307
gugugugcccuacacucau

SEQ ID NO: 1337533 - RNA, 19 nt, Artificial Sequence
  Description of Artificial Sequence: Synthetic oligonucleotide
  Antisense strand to SEQ ID NO: 1337532
augaguguagggcacacac

SEQ ID NO: 1337534 - RNA, 19 nt, Artificial Sequence
  Description of Artificial Sequence: Synthetic oligonucleotide
  Sense strand starting at position 2502 of SEQ ID NO: 1242307
ccugcaaucugcuuaacag

SEQ ID NO: 1337535 - RNA, 19 nt, Artificial Sequence
  Description of Artificial Sequence: Synthetic oligonucleotide
  Antisense strand to SEQ ID NO: 1337534
cuguuaagcagauugcagg

SEQ ID NO: 1337536 - RNA, 19 nt, Artificial Sequence
  Description of Artificial Sequence: Synthetic oligonucleotide
  Sense strand starting at position 2503 of SEQ ID NO: 1242307
cugcaaucugcuuaacaga

SEQ ID NO: 1337537 - RNA, 19 nt, Artificial Sequence
  Description of Artificial Sequence: Synthetic oligonucleotide
  Antisense strand to SEQ ID NO: 1337536
ucuguuaagcagauugcag

SEQ ID NO: 1337538 - RNA, 19 nt, Artificial Sequence
  Description of Artificial Sequence: Synthetic oligonucleotide
  Sense strand starting at position 2519 of SEQ ID NO: 1242307
agaacacauggcugugaaa

SEQ ID NO: 1337539 - RNA, 19 nt, Artificial Sequence
  Description of Artificial Sequence: Synthetic oligonucleotide
  Antisense strand to SEQ ID NO: 1337538
uuucacagccauguguucu

SEQ ID NO: 1337540 - RNA, 19 nt, Artificial Sequence
  Description of Artificial Sequence: Synthetic oligonucleotide
  Sense strand starting at position 3092 of SEQ ID NO: 1242307
cagccagagcuauagucau

SEQ ID NO: 1337541 - RNA, 19 nt, Artificial Sequence
  Description of Artificial Sequence: Synthetic oligonucleotide
  Antisense strand to SEQ ID NO: 1337540
augacuauagcucuggcug

SEQ ID NO: 1337542 - RNA, 19 nt, Artificial Sequence
  Description of Artificial Sequence: Synthetic oligonucleotide
  Sense strand starting at position 3111 of SEQ ID NO: 1242307
gggccaugucugggccaga

SEQ ID NO: 1337543 - RNA, 19 nt, Artificial Sequence
  Description of Artificial Sequence: Synthetic oligonucleotide
  Antisense strand to SEQ ID NO: 1337542
ucuggcccagacauggccc

SEQ ID NO: 1337544 - RNA, 19 nt, Artificial Sequence
  Description of Artificial Sequence: Synthetic oligonucleotide
  Sense strand starting at position 3145 of SEQ ID NO: 1242307
ugcuguuuggccuacacaa

SEQ ID NO: 1337545 - RNA, 19 nt, Artificial Sequence
  Description of Artificial Sequence: Synthetic oligonucleotide
  Antisense strand to SEQ ID NO: 1337544
uuguguaggccaaacagca

SEQ ID NO: 1337546 - RNA, 19 nt, Artificial Sequence
  Description of Artificial Sequence: Synthetic oligonucleotide
  Sense strand starting at position 3147 of SEQ ID NO: 1242307
cuguuuggccuacacaaga

SEQ ID NO: 1337547 - RNA, 19 nt, Artificial Sequence
  Description of Artificial Sequence: Synthetic oligonucleotide
  Antisense strand to SEQ ID NO: 1337546
ucuuguguaggccaaacag

SEQ ID NO: 1337548 - RNA, 19 nt, Artificial Sequence
  Description of Artificial Sequence: Synthetic oligonucleotide
  Sense strand starting at position 3152 of SEQ ID NO: 1242307
uggccuacacaagauuauu

SEQ ID NO: 1337549 - RNA, 19 nt, Artificial Sequence
  Description of Artificial Sequence: Synthetic oligonucleotide
  Antisense strand to SEQ ID NO: 1337548
aauaaucuuguguaggcca

SEQ ID NO: 1337550 - RNA, 19 nt, Artificial Sequence
  Description of Artificial Sequence: Synthetic oligonucleotide
  Sense strand starting at position 3180 of SEQ ID NO: 1242307
gagccaacauguccaaguu

SEQ ID NO: 1337551 - RNA, 19 nt, Artificial Sequence
  Description of Artificial Sequence: Synthetic oligonucleotide
  Antisense strand to SEQ ID NO: 1337550
aacuuggacauguuggcuc

SEQ ID NO: 1337552 - RNA, 19 nt, Artificial Sequence
  Description of Artificial Sequence: Synthetic oligonucleotide
  Sense strand starting at position 3186 of SEQ ID NO: 1242307
acauguccaaguuggaaga

SEQ ID NO: 1337553 - RNA, 19 nt, Artificial Sequence
  Description of Artificial Sequence: Synthetic oligonucleotide
  Antisense strand to SEQ ID NO: 1337552
ucuuccaacuuggacaugu

SEQ ID NO: 1337554 - RNA, 19 nt, Artificial Sequence
  Description of Artificial Sequence: Synthetic oligonucleotide
  Sense strand starting at position 3196 of SEQ ID NO: 1242307
guuggaagauuucgcauag

SEQ ID NO: 1337555 - RNA, 19 nt, Artificial Sequence
  Description of Artificial Sequence: Synthetic oligonucleotide
  Antisense strand to SEQ ID NO: 1337554
cuaugcgaaaucuuccaac

SEQ ID NO: 1337556 - RNA, 19 nt, Artificial Sequence
  Description of Artificial Sequence: Synthetic oligonucleotide
  Sense strand starting at position 3224 of SEQ ID NO: 1242307
uuuccugaguucuugugaa

SEQ ID NO: 1337557 - RNA, 19 nt, Artificial Sequence
  Description of Artificial Sequence: Synthetic oligonucleotide
  Antisense strand to SEQ ID NO: 1337556
uucacaagaacucaggaaa

SEQ ID NO: 1337558 - RNA, 19 nt, Artificial Sequence
  Description of Artificial Sequence: Synthetic oligonucleotide
  Sense strand starting at position 3268 of SEQ ID NO: 1242307
cacacauuccuacgugaga

SEQ ID NO: 1337559 - RNA, 19 nt, Artificial Sequence
  Description of Artificial Sequence: Synthetic oligonucleotide
  Antisense strand to SEQ ID NO: 1337558
ucucacguaggaaugugug

SEQ ID NO: 1337560 - RNA, 19 nt, Artificial Sequence
  Description of Artificial Sequence: Synthetic oligonucleotide
  Sense strand starting at position 3269 of SEQ ID NO: 1242307
acacauuccuacgugagag

SEQ ID NO: 1337561 - RNA, 19 nt, Artificial Sequence
  Description of Artificial Sequence: Synthetic oligonucleotide
  Antisense strand to SEQ ID NO: 1337560
cucucacguaggaaugugu

SEQ ID NO: 1337562 - RNA, 19 nt, Artificial Sequence
  Description of Artificial Sequence: Synthetic oligonucleotide
  Sense strand starting at position 3395 of SEQ ID NO: 1242307
uugcuuccugcauauugua

SEQ ID NO: 1337563 - RNA, 19 nt, Artificial Sequence
  Description of Artificial Sequence: Synthetic oligonucleotide
  Antisense strand to SEQ ID NO: 1337562
uacaauaugcaggaagcaa

SEQ ID NO: 1337564 - RNA, 19 nt, Artificial Sequence
  Description of Artificial Sequence: Synthetic oligonucleotide
  Sense strand starting at position 3472 of SEQ ID NO: 1242307
guagaagucucagagaaga

SEQ ID NO: 1337565 - RNA, 19 nt, Artificial Sequence
  Description of Artificial Sequence: Synthetic oligonucleotide
  Antisense strand to SEQ ID NO: 1337564
ucuucucugagacuucuac

SEQ ID NO: 1337566 - RNA, 19 nt, Artificial Sequence
  Description of Artificial Sequence: Synthetic oligonucleotide
  Sense strand starting at position 3653 of SEQ ID NO: 1242307
cuccauugcccaggauaga

SEQ ID NO: 1337567 - RNA, 19 nt, Artificial Sequence
  Description of Artificial Sequence: Synthetic oligonucleotide
  Antisense strand to SEQ ID NO: 1337566
ucuauccugggcaauggag

SEQ ID NO: 1337568 - RNA, 19 nt, Artificial Sequence
  Description of Artificial Sequence: Synthetic oligonucleotide
  Sense strand starting at position 3821 of SEQ ID NO: 1242307
ccauguugcccagaauuau

SEQ ID NO: 1337569 - RNA, 19 nt, Artificial Sequence
  Description of Artificial Sequence: Synthetic oligonucleotide
  Antisense strand to SEQ ID NO: 1337568
auaauucugggcaacaugg

SEQ ID NO: 1337570 - RNA, 19 nt, Artificial Sequence
  Description of Artificial Sequence: Synthetic oligonucleotide
  Sense strand starting at position 3955 of SEQ ID NO: 1242307
gcuggagucucccuaggau

SEQ ID NO: 1337571 - RNA, 19 nt, Artificial Sequence
  Description of Artificial Sequence: Synthetic oligonucleotide
  Antisense strand to SEQ ID NO: 1337570
auccuagggagacuccagc

SEQ ID NO: 1337572 - RNA, 19 nt, Artificial Sequence
  Description of Artificial Sequence: Synthetic oligonucleotide
  Sense strand starting at position 3967 of SEQ ID NO: 1242307
cuaggauggcccugaauaa

SEQ ID NO: 1337573 - RNA, 19 nt, Artificial Sequence
  Description of Artificial Sequence: Synthetic oligonucleotide
  Antisense strand to SEQ ID NO: 1337572
uuauucagggccauccuag

SEQ ID NO: 1337574 - RNA, 19 nt, Artificial Sequence
  Description of Artificial Sequence: Synthetic oligonucleotide
  Sense strand starting at position 3980 of SEQ ID NO: 1242307
gaauaagccuugcccaguu

SEQ ID NO: 1337575 - RNA, 19 nt, Artificial Sequence
  Description of Artificial Sequence: Synthetic oligonucleotide
  Antisense strand to SEQ ID NO: 1337574
aacugggcaaggcuuauuc

SEQ ID NO: 1337576 - RNA, 19 nt, Artificial Sequence
  Description of Artificial Sequence: Synthetic oligonucleotide
  Sense strand starting at position 800 of SEQ ID NO: 1242308
ggcugaacucugcagguca

SEQ ID NO: 1337577 - RNA, 19 nt, Artificial Sequence
  Description of Artificial Sequence: Synthetic oligonucleotide
  Antisense strand to SEQ ID NO: 1337576
ugaccugcagaguucagcc

SEQ ID NO: 1337578 - RNA, 19 nt, Artificial Sequence
  Description of Artificial Sequence: Synthetic oligonucleotide
  Sense strand starting at position 924 of SEQ ID NO: 1242308
uuggaacagucuuuccgaa

SEQ ID NO: 1337579 - RNA, 19 nt, Artificial Sequence
  Description of Artificial Sequence: Synthetic oligonucleotide
  Antisense strand to SEQ ID NO: 1337578
uucggaaagacuguuccaa

SEQ ID NO: 1337580 - RNA, 19 nt, Artificial Sequence
  Description of Artificial Sequence: Synthetic oligonucleotide
  Sense strand starting at position 926 of SEQ ID NO: 1242308
ggaacagucuuuccgaaga

SEQ ID NO: 1337581 - RNA, 19 nt, Artificial Sequence
  Description of Artificial Sequence: Synthetic oligonucleotide
  Antisense strand to SEQ ID NO: 1337580
ucuucggaaagacuguucc

SEQ ID NO: 1337582 - RNA, 19 nt, Artificial Sequence
  Description of Artificial Sequence: Synthetic oligonucleotide
  Sense strand starting at position 931 of SEQ ID NO: 1242308
agucuuuccgaagagacca

SEQ ID NO: 1337583 - RNA, 19 nt, Artificial Sequence
  Description of Artificial Sequence: Synthetic oligonucleotide
  Antisense strand to SEQ ID NO: 1337582
uggucucuucggaaagacu

SEQ ID NO: 1337584 - RNA, 19 nt, Artificial Sequence
  Description of Artificial Sequence: Synthetic oligonucleotide
  Sense strand starting at position 975 of SEQ ID NO: 1242308
cuccaauucguaggucaaa

SEQ ID NO: 1337585 - RNA, 19 nt, Artificial Sequence
  Description of Artificial Sequence: Synthetic oligonucleotide
  Antisense strand to SEQ ID NO: 1337584
uuugaccuacgaauuggag

SEQ ID NO: 1337586 - RNA, 19 nt, Artificial Sequence
  Description of Artificial Sequence: Synthetic oligonucleotide
  Sense strand starting at position 1312 of SEQ ID NO: 1242308
accacuuaaguuugaagua

SEQ ID NO: 1337587 - RNA, 19 nt, Artificial Sequence
  Description of Artificial Sequence: Synthetic oligonucleotide
  Antisense strand to SEQ ID NO: 1337586
uacuucaaacuuaaguggu

SEQ ID NO: 1337588 - RNA, 19 nt, Artificial Sequence
  Description of Artificial Sequence: Synthetic oligonucleotide
  Sense strand starting at position 1346 of SEQ ID NO: 1242308
guaauuggaaguggcuaaa

SEQ ID NO: 1337589 - RNA, 19 nt, Artificial Sequence
  Description of Artificial Sequence: Synthetic oligonucleotide
  Antisense strand to SEQ ID NO: 1337588
uuuagccacuuccaauuac

SEQ ID NO: 1337590 - RNA, 19 nt, Artificial Sequence
  Description of Artificial Sequence: Synthetic oligonucleotide
  Sense strand starting at position 1550 of SEQ ID NO: 1242308
ggucguucccuggacugaa

SEQ ID NO: 1337591 - RNA, 19 nt, Artificial Sequence
  Description of Artificial Sequence: Synthetic oligonucleotide
  Antisense strand to SEQ ID NO: 1337590
uucaguccagggaacgacc

SEQ ID NO: 1337592 - RNA, 19 nt, Artificial Sequence
  Description of Artificial Sequence: Synthetic oligonucleotide
  Sense strand starting at position 2294 of SEQ ID NO: 1242308
guguuugucaccgccaaau

SEQ ID NO: 1337593 - RNA, 19 nt, Artificial Sequence
  Description of Artificial Sequence: Synthetic oligonucleotide
  Antisense strand to SEQ ID NO: 1337592
auuuggcggugacaaacac

SEQ ID NO: 1337594 - RNA, 19 nt, Artificial Sequence
  Description of Artificial Sequence: Synthetic oligonucleotide
  Sense strand starting at position 2307 of SEQ ID NO: 1242308
ccaaauuggcucuaaacgu

SEQ ID NO: 1337595 - RNA, 19 nt, Artificial Sequence
  Description of Artificial Sequence: Synthetic oligonucleotide
  Antisense strand to SEQ ID NO: 1337594
acguuuagagccaauuugg

SEQ ID NO: 1337596 - RNA, 19 nt, Artificial Sequence
  Description of Artificial Sequence: Synthetic oligonucleotide
  Sense strand starting at position 2430 of SEQ ID NO: 1242308
uacugaggccgucaaguua

SEQ ID NO: 1337597 - RNA, 19 nt, Artificial Sequence
  Description of Artificial Sequence: Synthetic oligonucleotide
  Antisense strand to SEQ ID NO: 1337596
uaacuugacggccucagua

SEQ ID NO: 1337598 - RNA, 19 nt, Artificial Sequence
  Description of Artificial Sequence: Synthetic oligonucleotide
  Sense strand starting at position 2471 of SEQ ID NO: 1242308
uguaaucuugcugugcuua

SEQ ID NO: 1337599 - RNA, 19 nt, Artificial Sequence
  Description of Artificial Sequence: Synthetic oligonucleotide
  Antisense strand to SEQ ID NO: 1337598
uaagcacagcaagauuaca

SEQ ID NO: 1337600 - RNA, 19 nt, Artificial Sequence
  Description of Artificial Sequence: Synthetic oligonucleotide
  Sense strand starting at position 2481 of SEQ ID NO: 1242308
cugugcuuacuguugugua

SEQ ID NO: 1337601 - RNA, 19 nt, Artificial Sequence
  Description of Artificial Sequence: Synthetic oligonucleotide
  Antisense strand to SEQ ID NO: 1337600
uacacaacaguaagcacag

SEQ ID NO: 1337602 - RNA, 19 nt, Artificial Sequence
  Description of Artificial Sequence: Synthetic oligonucleotide
  Sense strand starting at position 2483 of SEQ ID NO: 1242308
gugcuuacuguuguguaua

SEQ ID NO: 1337603 - RNA, 19 nt, Artificial Sequence
  Description of Artificial Sequence: Synthetic oligonucleotide
  Antisense strand to SEQ ID NO: 1337602
uauacacaacaguaagcac

SEQ ID NO: 1337604 - RNA, 19 nt, Artificial Sequence
  Description of Artificial Sequence: Synthetic oligonucleotide
  Sense strand starting at position 2486 of SEQ ID NO: 1242308
cuuacuguuguguauauca

SEQ ID NO: 1337605 - RNA, 19 nt, Artificial Sequence
  Description of Artificial Sequence: Synthetic oligonucleotide
  Antisense strand to SEQ ID NO: 1337604
ugauauacacaacaguaag

SEQ ID NO: 1337606 - RNA, 19 nt, Artificial Sequence
  Description of Artificial Sequence: Synthetic oligonucleotide
  Sense strand starting at position 2494 of SEQ ID NO: 1242308
uguguauaucaauggacau

SEQ ID NO: 1337607 - RNA, 19 nt, Artificial Sequence
  Description of Artificial Sequence: Synthetic oligonucleotide
  Antisense strand to SEQ ID NO: 1337606
auguccauugauauacaca

SEQ ID NO: 1337608 - RNA, 19 nt, Artificial Sequence
  Description of Artificial Sequence: Synthetic oligonucleotide
  Sense strand starting at position 2505 of SEQ ID NO: 1242308
auggacaucuuauuguaua

SEQ ID NO: 1337609 - RNA, 19 nt, Artificial Sequence
  Description of Artificial Sequence: Synthetic oligonucleotide
  Antisense strand to SEQ ID NO: 1337608
uauacaauaagauguccau

SEQ ID NO: 1337610 - RNA, 19 nt, Artificial Sequence
  Description of Artificial Sequence: Synthetic oligonucleotide
  Sense strand starting at position 2598 of SEQ ID NO: 1242308
ugcauuuacucuguccaca

SEQ ID NO: 1337611 - RNA, 19 nt, Artificial Sequence
  Description of Artificial Sequence: Synthetic oligonucleotide
  Antisense strand to SEQ ID NO: 1337610
uguggacagaguaaaugca

SEQ ID NO: 1337612 - RNA, 19 nt, Artificial Sequence
  Description of Artificial Sequence: Synthetic oligonucleotide
  Sense strand starting at position 2650 of SEQ ID NO: 1242308
acaaguccugguugggaua

SEQ ID NO: 1337613 - RNA, 19 nt, Artificial Sequence
  Description of Artificial Sequence: Synthetic oligonucleotide
  Antisense strand to SEQ ID NO: 1337612
uaucccaaccaggacuugu

SEQ ID NO: 1337614 - RNA, 19 nt, Artificial Sequence
  Description of Artificial Sequence: Synthetic oligonucleotide
  Sense strand starting at position 2677 of SEQ ID NO: 1242308
uccgcacugacaugagaaa

SEQ ID NO: 1337615 - RNA, 19 nt, Artificial Sequence
  Description of Artificial Sequence: Synthetic oligonucleotide
  Antisense strand to SEQ ID NO: 1337614
uuucucaugucagugcgga

SEQ ID NO: 1337616 - RNA, 19 nt, Artificial Sequence
  Description of Artificial Sequence: Synthetic oligonucleotide
  Sense strand starting at position 2678 of SEQ ID NO: 1242308
ccgcacugacaugagaaau

SEQ ID NO: 1337617 - RNA, 19 nt, Artificial Sequence
  Description of Artificial Sequence: Synthetic oligonucleotide
  Antisense strand to SEQ ID NO: 1337616
auuucucaugucagugcgg

SEQ ID NO: 1337618 - RNA, 19 nt, Artificial Sequence
  Description of Artificial Sequence: Synthetic oligonucleotide
  Sense strand starting at position 2732 of SEQ ID NO: 1242308
uccggaggucaggaauagu

SEQ ID NO: 1337619 - RNA, 19 nt, Artificial Sequence
  Description of Artificial Sequence: Synthetic oligonucleotide
  Antisense strand to SEQ ID NO: 1337618
acuauuccugaccuccgga

SEQ ID NO: 1337620 - RNA, 19 nt, Artificial Sequence
  Description of Artificial Sequence: Synthetic oligonucleotide
  Sense strand starting at position 2918 of SEQ ID NO: 1242308
aacgauuaacuucguagaa

SEQ ID NO: 1337621 - RNA, 19 nt, Artificial Sequence
  Description of Artificial Sequence: Synthetic oligonucleotide
  Antisense strand to SEQ ID NO: 1337620
uucuacgaaguuaaucguu

SEQ ID NO: 1337622 - RNA, 19 nt, Artificial Sequence
  Description of Artificial Sequence: Synthetic oligonucleotide
  Sense strand starting at position 2919 of SEQ ID NO: 1242308
acgauuaacuucguagaaa

SEQ ID NO: 1337623 - RNA, 19 nt, Artificial Sequence
  Description of Artificial Sequence: Synthetic oligonucleotide
  Antisense strand to SEQ ID NO: 1337622
uuucuacgaaguuaaucgu

SEQ ID NO: 1337624 - RNA, 19 nt, Artificial Sequence
  Description of Artificial Sequence: Synthetic oligonucleotide
  Sense strand starting at position 2922 of SEQ ID NO: 1242308
auuaacuucguagaaauuc

SEQ ID NO: 1337625 - RNA, 19 nt, Artificial Sequence
  Description of Artificial Sequence: Synthetic oligonucleotide
  Antisense strand to SEQ ID NO: 1337624
gaauuucuacgaaguuaau

SEQ ID NO: 1337626 - RNA, 19 nt, Artificial Sequence
  Description of Artificial Sequence: Synthetic oligonucleotide
  Sense strand starting at position 2934 of SEQ ID NO: 1242308
gaaauuccaggucgucaca

SEQ ID NO: 1337627 - RNA, 19 nt, Artificial Sequence
  Description of Artificial Sequence: Synthetic oligonucleotide
  Antisense strand to SEQ ID NO: 1337626
ugugacgaccuggaauuuc

SEQ ID NO: 1337628 - RNA, 19 nt, Artificial Sequence
  Description of Artificial Sequence: Synthetic oligonucleotide
  Sense strand starting at position 2944 of SEQ ID NO: 1242308
gucgucacagcacagauua

SEQ ID NO: 1337629 - RNA, 19 nt, Artificial Sequence
  Description of Artificial Sequence: Synthetic oligonucleotide
  Antisense strand to SEQ ID NO: 1337628
uaaucugugcugugacgac

SEQ ID NO: 1337630 - RNA, 19 nt, Artificial Sequence
  Description of Artificial Sequence: Synthetic oligonucleotide
  Sense strand starting at position 2969 of SEQ ID NO: 1242308
gggcuccauuuacauaaau

SEQ ID NO: 1337631 - RNA, 19 nt, Artificial Sequence
  Description of Artificial Sequence: Synthetic oligonucleotide
  Antisense strand to SEQ ID NO: 1337630
auuuauguaaauggagccc

SEQ ID NO: 1337632 - RNA, 19 nt, Artificial Sequence
  Description of Artificial Sequence: Synthetic oligonucleotide
  Sense strand starting at position 3544 of SEQ ID NO: 1242308
uacugugaucgugaaacug

SEQ ID NO: 1337633 - RNA, 19 nt, Artificial Sequence
  Description of Artificial Sequence: Synthetic oligonucleotide
  Antisense strand to SEQ ID NO: 1337632
caguuucacgaucacagua

SEQ ID NO: 1337634 - RNA, 19 nt, Artificial Sequence
  Description of Artificial Sequence: Synthetic oligonucleotide
  Sense strand starting at position 3793 of SEQ ID NO: 1242308
agucaaucaugcccagauu

SEQ ID NO: 1337635 - RNA, 19 nt, Artificial Sequence
  Description of Artificial Sequence: Synthetic oligonucleotide
  Antisense strand to SEQ ID NO: 1337634
aaucugggcaugauugacu

SEQ ID NO: 1337636 - RNA, 19 nt, Artificial Sequence
  Description of Artificial Sequence: Synthetic oligonucleotide
  Sense strand starting at position 3818 of SEQ ID NO: 1242308
uguucuguuggcuacauau

SEQ ID NO: 1337637 - RNA, 19 nt, Artificial Sequence
  Description of Artificial Sequence: Synthetic oligonucleotide
  Antisense strand to SEQ ID NO: 1337636
auauguagccaacagaaca

SEQ ID NO: 1337638 - RNA, 19 nt, Artificial Sequence
  Description of Artificial Sequence: Synthetic oligonucleotide
  Sense strand starting at position 3829 of SEQ ID NO: 1242308
cuacauaugcaguaugguu

SEQ ID NO: 1337639 - RNA, 19 nt, Artificial Sequence
  Description of Artificial Sequence: Synthetic oligonucleotide
  Antisense strand to SEQ ID NO: 1337638
aaccauacugcauauguag

SEQ ID NO: 1337640 - RNA, 19 nt, Artificial Sequence
  Description of Artificial Sequence: Synthetic oligonucleotide
  Sense strand starting at position 3848 of SEQ ID NO: 1242308
uuacauugcucaucauagu

SEQ ID NO: 1337641 - RNA, 19 nt, Artificial Sequence
  Description of Artificial Sequence: Synthetic oligonucleotide
  Antisense strand to SEQ ID NO: 1337640
acuaugaugagcaauguaa

SEQ ID NO: 1337642 - RNA, 19 nt, Artificial Sequence
  Description of Artificial Sequence: Synthetic oligonucleotide
  Sense strand starting at position 3865 of SEQ ID NO: 1242308
guucuaucuucugucugga

SEQ ID NO: 1337643 - RNA, 19 nt, Artificial Sequence
  Description of Artificial Sequence: Synthetic oligonucleotide
  Antisense strand to SEQ ID NO: 1337642
uccagacagaagauagaac

SEQ ID NO: 1337644 - RNA, 19 nt, Artificial Sequence
  Description of Artificial Sequence: Synthetic oligonucleotide
  Sense strand starting at position 3867 of SEQ ID NO: 1242308
ucuaucuucugucuggaca

SEQ ID NO: 1337645 - RNA, 19 nt, Artificial Sequence
  Description of Artificial Sequence: Synthetic oligonucleotide
  Antisense strand to SEQ ID NO: 1337644
uguccagacagaagauaga

SEQ ID NO: 1337646 - RNA, 19 nt, Artificial Sequence
  Description of Artificial Sequence: Synthetic oligonucleotide
  Sense strand starting at position 3870 of SEQ ID NO: 1242308
aucuucugucuggacacau

SEQ ID NO: 1337647 - RNA, 19 nt, Artificial Sequence
  Description of Artificial Sequence: Synthetic oligonucleotide
  Antisense strand to SEQ ID NO: 1337646
auguguccagacagaagau

SEQ ID NO: 1337648 - RNA, 19 nt, Artificial Sequence
  Description of Artificial Sequence: Synthetic oligonucleotide
  Sense strand starting at position 3919 of SEQ ID NO: 1242308
cuacuaaaguuguuccaca

SEQ ID NO: 1337649 - RNA, 19 nt, Artificial Sequence
  Description of Artificial Sequence: Synthetic oligonucleotide
  Antisense strand to SEQ ID NO: 1337648
uguggaacaacuuuaguag

SEQ ID NO: 1337650 - RNA, 19 nt, Artificial Sequence
  Description of Artificial Sequence: Synthetic oligonucleotide
  Sense strand starting at position 3924 of SEQ ID NO: 1242308
aaaguuguuccacagagca

SEQ ID NO: 1337651 - RNA, 19 nt, Artificial Sequence
  Description of Artificial Sequence: Synthetic oligonucleotide
  Antisense strand to SEQ ID NO: 1337650
ugcucuguggaacaacuuu

SEQ ID NO: 1337652 - RNA, 19 nt, Artificial Sequence
  Description of Artificial Sequence: Synthetic oligonucleotide
  Sense strand starting at position 3926 of SEQ ID NO: 1242308
aguuguuccacagagcaga

SEQ ID NO: 1337653 - RNA, 19 nt, Artificial Sequence
  Description of Artificial Sequence: Synthetic oligonucleotide
  Antisense strand to SEQ ID NO: 1337652
ucugcucuguggaacaacu

SEQ ID NO: 1337654 - RNA, 19 nt, Artificial Sequence
  Description of Artificial Sequence: Synthetic oligonucleotide
  Sense strand starting at position 3946 of SEQ ID NO: 1242308
ccugauuuccuguguucua

SEQ ID NO: 1337655 - RNA, 19 nt, Artificial Sequence
  Description of Artificial Sequence: Synthetic oligonucleotide
  Antisense strand to SEQ ID NO: 1337654
uagaacacaggaaaucagg

SEQ ID NO: 1337656 - RNA, 19 nt, Artificial Sequence
  Description of Artificial Sequence: Synthetic oligonucleotide
  Sense strand starting at position 168 of SEQ ID NO: 1242309
gcuuaauauuucuuguugu

SEQ ID NO: 1337657 - RNA, 19 nt, Artificial Sequence
  Description of Artificial Sequence: Synthetic oligonucleotide
  Antisense strand to SEQ ID NO: 1337656
acaacaagaaauauuaagc

SEQ ID NO: 1337658 - RNA, 19 nt, Artificial Sequence
  Description of Artificial Sequence: Synthetic oligonucleotide
  Sense strand starting at position 2953 of SEQ ID NO: 1242310
acugcaaugacccgugauu

SEQ ID NO: 1337659 - RNA, 19 nt, Artificial Sequence
  Description of Artificial Sequence: Synthetic oligonucleotide
  Antisense strand to SEQ ID NO: 1337658
aaucacgggucauugcagu

SEQ ID NO: 1337660 - RNA, 19 nt, Artificial Sequence
  Description of Artificial Sequence: Synthetic oligonucleotide
  Sense strand starting at position 2955 of SEQ ID NO: 1242310
ugcaaugacccgugauugu

SEQ ID NO: 1337661 - RNA, 19 nt, Artificial Sequence
  Description of Artificial Sequence: Synthetic oligonucleotide
  Antisense strand to SEQ ID NO: 1337660
acaaucacgggucauugca

SEQ ID NO: 1337662 - RNA, 19 nt, Artificial Sequence
  Description of Artificial Sequence: Synthetic oligonucleotide
  Sense strand starting at position 23 of SEQ ID NO: 1242311
ccaagauuggaggaucguu

SEQ ID NO: 1337663 - RNA, 19 nt, Artificial Sequence
  Description of Artificial Sequence: Synthetic oligonucleotide
  Antisense strand to SEQ ID NO: 1337662
aacgauccuccaaucuugg

SEQ ID NO: 1337664 - RNA, 19 nt, Artificial Sequence
  Description of Artificial Sequence: Synthetic oligonucleotide
  Sense strand starting at position 108 of SEQ ID NO: 1242311
acaguacuugcuuaaugga

SEQ ID NO: 1337665 - RNA, 19 nt, Artificial Sequence
  Description of Artificial Sequence: Synthetic oligonucleotide
  Antisense strand to SEQ ID NO: 1337664
uccauuaagcaaguacugu

SEQ ID NO: 1337666 - RNA, 19 nt, Artificial Sequence
  Description of Artificial Sequence: Synthetic oligonucleotide
  Sense strand starting at position 117 of SEQ ID NO: 1242311
gcuuaauggaguuguggga

SEQ ID NO: 1337667 - RNA, 19 nt, Artificial Sequence
  Description of Artificial Sequence: Synthetic oligonucleotide
  Antisense strand to SEQ ID NO: 1337666
ucccacaacuccauuaagc

SEQ ID NO: 1337668 - RNA, 19 nt, Artificial Sequence
  Description of Artificial Sequence: Synthetic oligonucleotide
  Sense strand starting at position 122 of SEQ ID NO: 1242311
auggaguugugggaaggau

SEQ ID NO: 1337669 - RNA, 19 nt, Artificial Sequence
  Description of Artificial Sequence: Synthetic oligonucleotide
  Antisense strand to SEQ ID NO: 1337668
auccuucccacaacuccau

SEQ ID NO: 1337670 - RNA, 19 nt, Artificial Sequence
  Description of Artificial Sequence: Synthetic oligonucleotide
  Sense strand starting at position 184 of SEQ ID NO: 1242311
cguaguuguguucagaaug

SEQ ID NO: 1337671 - RNA, 19 nt, Artificial Sequence
  Description of Artificial Sequence: Synthetic oligonucleotide
  Antisense strand to SEQ ID NO: 1337670
cauucugaacacaacuacg

SEQ ID NO: 1337672 - RNA, 19 nt, Artificial Sequence
  Description of Artificial Sequence: Synthetic oligonucleotide
  Sense strand starting at position 222 of SEQ ID NO: 1242311
agcaguucuuaccucucua

SEQ ID NO: 1337673 - RNA, 19 nt, Artificial Sequence
  Description of Artificial Sequence: Synthetic oligonucleotide
  Antisense strand to SEQ ID NO: 1337672
uagagagguaagaacugcu

SEQ ID NO: 1337674 - RNA, 19 nt, Artificial Sequence
  Description of Artificial Sequence: Synthetic oligonucleotide
  Sense strand starting at position 248 of SEQ ID NO: 1242311
gguuuaaagguauauaagu

SEQ ID NO: 1337675 - RNA, 19 nt, Artificial Sequence
  Description of Artificial Sequence: Synthetic oligonucleotide
  Antisense strand to SEQ ID NO: 1337674
acuuauauaccuuuaaacc

SEQ ID NO: 1337676 - RNA, 19 nt, Artificial Sequence
  Description of Artificial Sequence: Synthetic oligonucleotide
  Sense strand starting at position 326 of SEQ ID NO: 1242311
ugaagaguguuagucagag

SEQ ID NO: 1337677 - RNA, 19 nt, Artificial Sequence
  Description of Artificial Sequence: Synthetic oligonucleotide
  Antisense strand to SEQ ID NO: 1337676
cucugacuaacacucuuca

SEQ ID NO: 1337678 - RNA, 19 nt, Artificial Sequence
  Description of Artificial Sequence: Synthetic oligonucleotide
  Sense strand starting at position 349 of SEQ ID NO: 1242311
ggucaaagauugcuuaggu

SEQ ID NO: 1337679 - RNA, 19 nt, Artificial Sequence
  Description of Artificial Sequence: Synthetic oligonucleotide
  Antisense strand to SEQ ID NO: 1337678
accuaagcaaucuuugacc

SEQ ID NO: 1337680 - RNA, 19 nt, Artificial Sequence
  Description of Artificial Sequence: Synthetic oligonucleotide
  Sense strand starting at position 350 of SEQ ID NO: 1242311
gucaaagauugcuuagguc

SEQ ID NO: 1337681 - RNA, 19 nt, Artificial Sequence
  Description of Artificial Sequence: Synthetic oligonucleotide
  Antisense strand to SEQ ID NO: 1337680
gaccuaagcaaucuuugac

SEQ ID NO: 1337682 - RNA, 19 nt, Artificial Sequence
  Description of Artificial Sequence: Synthetic oligonucleotide
  Sense strand starting at position 443 of SEQ ID NO: 1242311
uucuauauuugugcugaca

SEQ ID NO: 1337683 - RNA, 19 nt, Artificial Sequence
  Description of Artificial Sequence: Synthetic oligonucleotide
  Antisense strand to SEQ ID NO: 1337682
ugucagcacaaauauagaa

SEQ ID NO: 1337684 - RNA, 19 nt, Artificial Sequence
  Description of Artificial Sequence: Synthetic oligonucleotide
  Sense strand starting at position 445 of SEQ ID NO: 1242311
cuauauuugugcugacaac

SEQ ID NO: 1337685 - RNA, 19 nt, Artificial Sequence
  Description of Artificial Sequence: Synthetic oligonucleotide
  Antisense strand to SEQ ID NO: 1337684
guugucagcacaaauauag

SEQ ID NO: 1337686 - RNA, 19 nt, Artificial Sequence
  Description of Artificial Sequence: Synthetic oligonucleotide
  Sense strand starting at position 817 of SEQ ID NO: 1242311
agaaauguggcccauguga

SEQ ID NO: 1337687 - RNA, 19 nt, Artificial Sequence
  Description of Artificial Sequence: Synthetic oligonucleotide
  Antisense strand to SEQ ID NO: 1337686
ucacaugggccacauuucu

SEQ ID NO: 1337688 - RNA, 19 nt, Artificial Sequence
  Description of Artificial Sequence: Synthetic oligonucleotide
  Sense strand starting at position 819 of SEQ ID NO: 1242311
aaauguggcccaugugacu

SEQ ID NO: 1337689 - RNA, 19 nt, Artificial Sequence
  Description of Artificial Sequence: Synthetic oligonucleotide
  Antisense strand to SEQ ID NO: 1337688
agucacaugggccacauuu

SEQ ID NO: 1337690 - RNA, 19 nt, Artificial Sequence
  Description of Artificial Sequence: Synthetic oligonucleotide
  Sense strand starting at position 893 of SEQ ID NO: 1242311
auggcugauggcuacagaa

SEQ ID NO: 1337691 - RNA, 19 nt, Artificial Sequence
  Description of Artificial Sequence: Synthetic oligonucleotide
  Antisense strand to SEQ ID NO: 1337690
uucuguagccaucagccau

SEQ ID NO: 1337692 - RNA, 19 nt, Artificial Sequence
  Description of Artificial Sequence: Synthetic oligonucleotide
  Sense strand starting at position 895 of SEQ ID NO: 1242311
ggcugauggcuacagaauu

SEQ ID NO: 1337693 - RNA, 19 nt, Artificial Sequence
  Description of Artificial Sequence: Synthetic oligonucleotide
  Antisense strand to SEQ ID NO: 1337692
aauucuguagccaucagcc

SEQ ID NO: 1337694 - RNA, 19 nt, Artificial Sequence
  Description of Artificial Sequence: Synthetic oligonucleotide
  Sense strand starting at position 1287 of SEQ ID NO: 1242311
uguagcuccggacauguau

SEQ ID NO: 1337695 - RNA, 19 nt, Artificial Sequence
  Description of Artificial Sequence: Synthetic oligonucleotide
  Antisense strand to SEQ ID NO: 1337694
auacauguccggagcuaca

SEQ ID NO: 1337696 - RNA, 19 nt, Artificial Sequence
  Description of Artificial Sequence: Synthetic oligonucleotide
  Sense strand starting at position 1296 of SEQ ID NO: 1242311
ggacauguaugugcauuga

SEQ ID NO: 1337697 - RNA, 19 nt, Artificial Sequence
  Description of Artificial Sequence: Synthetic oligonucleotide
  Antisense strand to SEQ ID NO: 1337696
ucaaugcacauacaugucc

SEQ ID NO: 1337698 - RNA, 19 nt, Artificial Sequence
  Description of Artificial Sequence: Synthetic oligonucleotide
  Sense strand starting at position 1300 of SEQ ID NO: 1242311
auguaugugcauugaacau

SEQ ID NO: 1337699 - RNA, 19 nt, Artificial Sequence
  Description of Artificial Sequence: Synthetic oligonucleotide
  Antisense strand to SEQ ID NO: 1337698
auguucaaugcacauacau

SEQ ID NO: 1337700 - RNA, 19 nt, Artificial Sequence
  Description of Artificial Sequence: Synthetic oligonucleotide
  Sense strand starting at position 1306 of SEQ ID NO: 1242311
gugcauugaacaugggagu

SEQ ID NO: 1337701 - RNA, 19 nt, Artificial Sequence
  Description of Artificial Sequence: Synthetic oligonucleotide
  Antisense strand to SEQ ID NO: 1337700
acucccauguucaaugcac

SEQ ID NO: 1337702 - RNA, 19 nt, Artificial Sequence
  Description of Artificial Sequence: Synthetic oligonucleotide
  Sense strand starting at position 1309 of SEQ ID NO: 1242311
cauugaacaugggaguaaa

SEQ ID NO: 1337703 - RNA, 19 nt, Artificial Sequence
  Description of Artificial Sequence: Synthetic oligonucleotide
  Antisense strand to SEQ ID NO: 1337702
uuuacucccauguucaaug

SEQ ID NO: 1337704 - RNA, 19 nt, Artificial Sequence
  Description of Artificial Sequence: Synthetic oligonucleotide
  Sense strand starting at position 1344 of SEQ ID NO: 1242311
ugaaacauagugugaccaa

SEQ ID NO: 1337705 - RNA, 19 nt, Artificial Sequence
  Description of Artificial Sequence: Synthetic oligonucleotide
  Antisense strand to SEQ ID NO: 1337704
uuggucacacuauguuuca

SEQ ID NO: 1337706 - RNA, 19 nt, Artificial Sequence
  Description of Artificial Sequence: Synthetic oligonucleotide
  Sense strand starting at position 1372 of SEQ ID NO: 1242311
cuucuauugucucauuuga

SEQ ID NO: 1337707 - RNA, 19 nt, Artificial Sequence
  Description of Artificial Sequence: Synthetic oligonucleotide
  Antisense strand to SEQ ID NO: 1337706
ucaaaugagacaauagaag

SEQ ID NO: 1337708 - RNA, 19 nt, Artificial Sequence
  Description of Artificial Sequence: Synthetic oligonucleotide
  Sense strand starting at position 1393 of SEQ ID NO: 1242311
cucagaaaguccuauaaag

SEQ ID NO: 1337709 - RNA, 19 nt, Artificial Sequence
  Description of Artificial Sequence: Synthetic oligonucleotide
  Antisense strand to SEQ ID NO: 1337708
cuuuauaggacuuucugag

SEQ ID NO: 1337710 - RNA, 19 nt, Artificial Sequence
  Description of Artificial Sequence: Synthetic oligonucleotide
  Sense strand starting at position 1438 of SEQ ID NO: 1242311
auuauagauuagggauguu

SEQ ID NO: 1337711 - RNA, 19 nt, Artificial Sequence
  Description of Artificial Sequence: Synthetic oligonucleotide
  Antisense strand to SEQ ID NO: 1337710
aacaucccuaaucuauaau

SEQ ID NO: 1337712 - RNA, 19 nt, Artificial Sequence
  Description of Artificial Sequence: Synthetic oligonucleotide
  Sense strand starting at position 1667 of SEQ ID NO: 1242311
gugcuaccuaccuggaaga

SEQ ID NO: 1337713 - RNA, 19 nt, Artificial Sequence
  Description of Artificial Sequence: Synthetic oligonucleotide
  Antisense strand to SEQ ID NO: 1337712
ucuuccagguagguagcac

SEQ ID NO: 1337714 - RNA, 19 nt, Artificial Sequence
  Description of Artificial Sequence: Synthetic oligonucleotide
  Sense strand starting at position 1785 of SEQ ID NO: 1242311
uggguaucuuggaggaguc

SEQ ID NO: 1337715 - RNA, 19 nt, Artificial Sequence
  Description of Artificial Sequence: Synthetic oligonucleotide
  Antisense strand to SEQ ID NO: 1337714
gacuccuccaagauaccca

SEQ ID NO: 1337716 - RNA, 19 nt, Artificial Sequence
  Description of Artificial Sequence: Synthetic oligonucleotide
  Sense strand starting at position 1934 of SEQ ID NO: 1242311
gaaguauuggucugggcaa

SEQ ID NO: 1337717 - RNA, 19 nt, Artificial Sequence
  Description of Artificial Sequence: Synthetic oligonucleotide
  Antisense strand to SEQ ID NO: 1337716
uugcccagaccaauacuuc

SEQ ID NO: 1337718 - RNA, 19 nt, Artificial Sequence
  Description of Artificial Sequence: Synthetic oligonucleotide
  Sense strand starting at position 2287 of SEQ ID NO: 1242311
gcuccaaucgcugcucuau

SEQ ID NO: 1337719 - RNA, 19 nt, Artificial Sequence
  Description of Artificial Sequence: Synthetic oligonucleotide
  Antisense strand to SEQ ID NO: 1337718
auagagcagcgauuggagc

SEQ ID NO: 1337720 - RNA, 19 nt, Artificial Sequence
  Description of Artificial Sequence: Synthetic oligonucleotide
  Sense strand starting at position 2330 of SEQ ID NO: 1242311
gucguucucaccugagauc

SEQ ID NO: 1337721 - RNA, 19 nt, Artificial Sequence
  Description of Artificial Sequence: Synthetic oligonucleotide
  Antisense strand to SEQ ID NO: 1337720
gaucucaggugagaacgac

SEQ ID NO: 1337722 - RNA, 19 nt, Artificial Sequence
  Description of Artificial Sequence: Synthetic oligonucleotide
  Sense strand starting at position 2490 of SEQ ID NO: 1242311
gauagaguuggaggucagu

SEQ ID NO: 1337723 - RNA, 19 nt, Artificial Sequence
  Description of Artificial Sequence: Synthetic oligonucleotide
  Antisense strand to SEQ ID NO: 1337722
acugaccuccaacucuauc

SEQ ID NO: 1337724 - RNA, 19 nt, Artificial Sequence
  Description of Artificial Sequence: Synthetic oligonucleotide
  Sense strand starting at position 2493 of SEQ ID NO: 1242311
agaguuggaggucaguuau

SEQ ID NO: 1337725 - RNA, 19 nt, Artificial Sequence
  Description of Artificial Sequence: Synthetic oligonucleotide
  Antisense strand to SEQ ID NO: 1337724
auaacugaccuccaacucu

SEQ ID NO: 1337726 - RNA, 19 nt, Artificial Sequence
  Description of Artificial Sequence: Synthetic oligonucleotide
  Sense strand starting at position 2592 of SEQ ID NO: 1242311
aguuuaccugcuuguaaag

SEQ ID NO: 1337727 - RNA, 19 nt, Artificial Sequence
  Description of Artificial Sequence: Synthetic oligonucleotide
  Antisense strand to SEQ ID NO: 1337726
cuuuacaagcagguaaacu

SEQ ID NO: 1337728 - RNA, 19 nt, Artificial Sequence
  Description of Artificial Sequence: Synthetic oligonucleotide
  Sense strand starting at position 2609 of SEQ ID NO: 1242311
aggcaaauuuaucaagacu

SEQ ID NO: 1337729 - RNA, 19 nt, Artificial Sequence
  Description of Artificial Sequence: Synthetic oligonucleotide
  Antisense strand to SEQ ID NO: 1337728
agucuugauaaauuugccu

SEQ ID NO: 1337730 - RNA, 19 nt, Artificial Sequence
  Description of Artificial Sequence: Synthetic oligonucleotide
  Sense strand starting at position 2620 of SEQ ID NO: 1242311
ucaagacuugucuacuaug

SEQ ID NO: 1337731 - RNA, 19 nt, Artificial Sequence
  Description of Artificial Sequence: Synthetic oligonucleotide
  Antisense strand to SEQ ID NO: 1337730
cauaguagacaagucuuga

SEQ ID NO: 1337732 - RNA, 19 nt, Artificial Sequence
  Description of Artificial Sequence: Synthetic oligonucleotide
  Sense strand starting at position 2701 of SEQ ID NO: 1242311
ucauguauuugcugacaca

SEQ ID NO: 1337733 - RNA, 19 nt, Artificial Sequence
  Description of Artificial Sequence: Synthetic oligonucleotide
  Antisense strand to SEQ ID NO: 1337732
ugugucagcaaauacauga

SEQ ID NO: 1337734 - RNA, 19 nt, Artificial Sequence
  Description of Artificial Sequence: Synthetic oligonucleotide
  Sense strand starting at position 2750 of SEQ ID NO: 1242311
ggugucagggacuaauacu

SEQ ID NO: 1337735 - RNA, 19 nt, Artificial Sequence
  Description of Artificial Sequence: Synthetic oligonucleotide
  Antisense strand to SEQ ID NO: 1337734
aguauuagucccugacacc

SEQ ID NO: 1337736 - RNA, 19 nt, Artificial Sequence
  Description of Artificial Sequence: Synthetic oligonucleotide
  Sense strand starting at position 3938 of SEQ ID NO: 1242311
augacaguuuaaugaugaa

SEQ ID NO: 1337737 - RNA, 19 nt, Artificial Sequence
  Description of Artificial Sequence: Synthetic oligonucleotide
  Antisense strand to SEQ ID NO: 1337736
uucaucauuaaacugucau

SEQ ID NO: 1337738 - RNA, 19 nt, Artificial Sequence
  Description of Artificial Sequence: Synthetic oligonucleotide
  Sense strand starting at position 3964 of SEQ ID NO: 1242311
gcccucacuuaagaagaua

SEQ ID NO: 1337739 - RNA, 19 nt, Artificial Sequence
  Description of Artificial Sequence: Synthetic oligonucleotide
  Antisense strand to SEQ ID NO: 1337738
uaucuucuuaagugagggc

SEQ ID NO: 1337740 - RNA, 19 nt, Artificial Sequence
  Description of Artificial Sequence: Synthetic oligonucleotide
  Sense strand starting at position 3976 of SEQ ID NO: 1242311
gaagauaagggagguguuu

SEQ ID NO: 1337741 - RNA, 19 nt, Artificial Sequence
  Description of Artificial Sequence: Synthetic oligonucleotide
  Antisense strand to SEQ ID NO: 1337740
aaacaccucccuuaucuuc

SEQ ID NO: 1337742 - RNA, 19 nt, Artificial Sequence
  Description of Artificial Sequence: Synthetic oligonucleotide
  Sense strand starting at position 264 of SEQ ID NO: 1242312
gaaggagcuuuguugaucu

SEQ ID NO: 1337743 - RNA, 19 nt, Artificial Sequence
  Description of Artificial Sequence: Synthetic oligonucleotide
  Antisense strand to SEQ ID NO: 1337742
agaucaacaaagcuccuuc

SEQ ID NO: 1337744 - RNA, 19 nt, Artificial Sequence
  Description of Artificial Sequence: Synthetic oligonucleotide
  Sense strand starting at position 316 of SEQ ID NO: 1242312
aauuaauucuggccagagu

SEQ ID NO: 1337745 - RNA, 19 nt, Artificial Sequence
  Description of Artificial Sequence: Synthetic oligonucleotide
  Antisense strand to SEQ ID NO: 1337744
acucuggccagaauuaauu

SEQ ID NO: 1337746 - RNA, 19 nt, Artificial Sequence
  Description of Artificial Sequence: Synthetic oligonucleotide
  Sense strand starting at position 317 of SEQ ID NO: 1242312
auuaauucuggccagaguu

SEQ ID NO: 1337747 - RNA, 19 nt, Artificial Sequence
  Description of Artificial Sequence: Synthetic oligonucleotide
  Antisense strand to SEQ ID NO: 1337746
aacucuggccagaauuaau

SEQ ID NO: 1337748 - RNA, 19 nt, Artificial Sequence
  Description of Artificial Sequence: Synthetic oligonucleotide
  Sense strand starting at position 806 of SEQ ID NO: 1242312
ugaucagaauuagugauca

SEQ ID NO: 1337749 - RNA, 19 nt, Artificial Sequence
  Description of Artificial Sequence: Synthetic oligonucleotide
  Antisense strand to SEQ ID NO: 1337748
ugaucacuaauucugauca

SEQ ID NO: 1337750 - RNA, 19 nt, Artificial Sequence
  Description of Artificial Sequence: Synthetic oligonucleotide
  Sense strand starting at position 880 of SEQ ID NO: 1242312
auuauuuaacgcuguauca

SEQ ID NO: 1337751 - RNA, 19 nt, Artificial Sequence
  Description of Artificial Sequence: Synthetic oligonucleotide
  Antisense strand to SEQ ID NO: 1337750
ugauacagcguuaaauaau

SEQ ID NO: 1337752 - RNA, 19 nt, Artificial Sequence
  Description of Artificial Sequence: Synthetic oligonucleotide
  Sense strand starting at position 887 of SEQ ID NO: 1242312
aacgcuguaucaucagaaa

SEQ ID NO: 1337753 - RNA, 19 nt, Artificial Sequence
  Description of Artificial Sequence: Synthetic oligonucleotide
  Antisense strand to SEQ ID NO: 1337752
uuucugaugauacagcguu

SEQ ID NO: 1337754 - RNA, 19 nt, Artificial Sequence
  Description of Artificial Sequence: Synthetic oligonucleotide
  Sense strand starting at position 933 of SEQ ID NO: 1242312
aguuaauauuuggaaguca

SEQ ID NO: 1337755 - RNA, 19 nt, Artificial Sequence
  Description of Artificial Sequence: Synthetic oligonucleotide
  Antisense strand to SEQ ID NO: 1337754
ugacuuccaaauauuaacu

SEQ ID NO: 1337756 - RNA, 19 nt, Artificial Sequence
  Description of Artificial Sequence: Synthetic oligonucleotide
  Sense strand starting at position 976 of SEQ ID NO: 1242312
ccgucuggucccgauuuca

SEQ ID NO: 1337757 - RNA, 19 nt, Artificial Sequence
  Description of Artificial Sequence: Synthetic oligonucleotide
  Antisense strand to SEQ ID NO: 1337756
ugaaaucgggaccagacgg

SEQ ID NO: 1337758 - RNA, 19 nt, Artificial Sequence
  Description of Artificial Sequence: Synthetic oligonucleotide
  Sense strand starting at position 987 of SEQ ID NO: 1242312
cgauuucaagucggacagu

SEQ ID NO: 1337759 - RNA, 19 nt, Artificial Sequence
  Description of Artificial Sequence: Synthetic oligonucleotide
  Antisense strand to SEQ ID NO: 1337758
acuguccgacuugaaaucg

SEQ ID NO: 1337760 - RNA, 19 nt, Artificial Sequence
  Description of Artificial Sequence: Synthetic oligonucleotide
  Sense strand starting at position 1019 of SEQ ID NO: 1242312
cgccuaggaaguuauuaaa

SEQ ID NO: 1337761 - RNA, 19 nt, Artificial Sequence
  Description of Artificial Sequence: Synthetic oligonucleotide
  Antisense strand to SEQ ID NO: 1337760
uuuaauaacuuccuaggcg

SEQ ID NO: 1337762 - RNA, 19 nt, Artificial Sequence
  Description of Artificial Sequence: Synthetic oligonucleotide
  Sense strand starting at position 1119 of SEQ ID NO: 1242312
caccgcuggccagauauaa

SEQ ID NO: 1337763 - RNA, 19 nt, Artificial Sequence
  Description of Artificial Sequence: Synthetic oligonucleotide
  Antisense strand to SEQ ID NO: 1337762
uuauaucuggccagcggug

SEQ ID NO: 1337764 - RNA, 19 nt, Artificial Sequence
  Description of Artificial Sequence: Synthetic oligonucleotide
  Sense strand starting at position 1344 of SEQ ID NO: 1242312
gaagguuuacaacgaguca

SEQ ID NO: 1337765 - RNA, 19 nt, Artificial Sequence
  Description of Artificial Sequence: Synthetic oligonucleotide
  Antisense strand to SEQ ID NO: 1337764
ugacucguuguaaaccuuc

SEQ ID NO: 1337766 - RNA, 19 nt, Artificial Sequence
  Description of Artificial Sequence: Synthetic oligonucleotide
  Sense strand starting at position 1357 of SEQ ID NO: 1242312
gagucaucugcgccaagca

SEQ ID NO: 1337767 - RNA, 19 nt, Artificial Sequence
  Description of Artificial Sequence: Synthetic oligonucleotide
  Antisense strand to SEQ ID NO: 1337766
ugcuuggcgcagaugacuc

SEQ ID NO: 1337768 - RNA, 19 nt, Artificial Sequence
  Description of Artificial Sequence: Synthetic oligonucleotide
  Sense strand starting at position 1848 of SEQ ID NO: 1242312
ggcgaugucacuccgcgua

SEQ ID NO: 1337769 - RNA, 19 nt, Artificial Sequence
  Description of Artificial Sequence: Synthetic oligonucleotide
  Antisense strand to SEQ ID NO: 1337768
uacgcggagugacaucgcc

SEQ ID NO: 1337770 - RNA, 19 nt, Artificial Sequence
  Description of Artificial Sequence: Synthetic oligonucleotide
  Sense strand starting at position 2178 of SEQ ID NO: 1242312
cgcgcaguuuggauucgaa

SEQ ID NO: 1337771 - RNA, 19 nt, Artificial Sequence
  Description of Artificial Sequence: Synthetic oligonucleotide
  Antisense strand to SEQ ID NO: 1337770
uucgaauccaaacugcgcg

SEQ ID NO: 1337772 - RNA, 19 nt, Artificial Sequence
  Description of Artificial Sequence: Synthetic oligonucleotide
  Sense strand starting at position 2285 of SEQ ID NO: 1242312
guaaguuagcgccuaguuu

SEQ ID NO: 1337773 - RNA, 19 nt, Artificial Sequence
  Description of Artificial Sequence: Synthetic oligonucleotide
  Antisense strand to SEQ ID NO: 1337772
aaacuaggcgcuaacuuac

SEQ ID NO: 1337774 - RNA, 19 nt, Artificial Sequence
  Description of Artificial Sequence: Synthetic oligonucleotide
  Sense strand starting at position 2522 of SEQ ID NO: 1242312
uuagaugaguuucuaaauc

SEQ ID NO: 1337775 - RNA, 19 nt, Artificial Sequence
  Description of Artificial Sequence: Synthetic oligonucleotide
  Antisense strand to SEQ ID NO: 1337774
gauuuagaaacucaucuaa

SEQ ID NO: 1337776 - RNA, 19 nt, Artificial Sequence
  Description of Artificial Sequence: Synthetic oligonucleotide
  Sense strand starting at position 2530 of SEQ ID NO: 1242312
guuucuaaaucguuacaug

SEQ ID NO: 1337777 - RNA, 19 nt, Artificial Sequence
  Description of Artificial Sequence: Synthetic oligonucleotide
  Antisense strand to SEQ ID NO: 1337776
cauguaacgauuuagaaac

SEQ ID NO: 1337778 - RNA, 19 nt, Artificial Sequence
  Description of Artificial Sequence: Synthetic oligonucleotide
  Sense strand starting at position 2531 of SEQ ID NO: 1242312
uuucuaaaucguuacauga

SEQ ID NO: 1337779 - RNA, 19 nt, Artificial Sequence
  Description of Artificial Sequence: Synthetic oligonucleotide
  Antisense strand to SEQ ID NO: 1337778
ucauguaacgauuuagaaa

SEQ ID NO: 1337780 - RNA, 19 nt, Artificial Sequence
  Description of Artificial Sequence: Synthetic oligonucleotide
  Sense strand starting at position 2586 of SEQ ID NO: 1242312
ccuccuuuccucgaugaac

SEQ ID NO: 1337781 - RNA, 19 nt, Artificial Sequence
  Description of Artificial Sequence: Synthetic oligonucleotide
  Antisense strand to SEQ ID NO: 1337780
guucaucgaggaaaggagg

SEQ ID NO: 1337782 - RNA, 19 nt, Artificial Sequence
  Description of Artificial Sequence: Synthetic oligonucleotide
  Sense strand starting at position 2588 of SEQ ID NO: 1242312
uccuuuccucgaugaacau

SEQ ID NO: 1337783 - RNA, 19 nt, Artificial Sequence
  Description of Artificial Sequence: Synthetic oligonucleotide
  Antisense strand to SEQ ID NO: 1337782
auguucaucgaggaaagga

SEQ ID NO: 1337784 - RNA, 19 nt, Artificial Sequence
  Description of Artificial Sequence: Synthetic oligonucleotide
  Sense strand starting at position 2671 of SEQ ID NO: 1242312
ugaauccugguguguagau

SEQ ID NO: 1337785 - RNA, 19 nt, Artificial Sequence
  Description of Artificial Sequence: Synthetic oligonucleotide
  Antisense strand to SEQ ID NO: 1337784
aucuacacaccaggauuca

SEQ ID NO: 1337786 - RNA, 19 nt, Artificial Sequence
  Description of Artificial Sequence: Synthetic oligonucleotide
  Sense strand starting at position 2672 of SEQ ID NO: 1242312
gaauccugguguguagaua

SEQ ID NO: 1337787 - RNA, 19 nt, Artificial Sequence
  Description of Artificial Sequence: Synthetic oligonucleotide
  Antisense strand to SEQ ID NO: 1337786
uaucuacacaccaggauuc

SEQ ID NO: 1337788 - RNA, 19 nt, Artificial Sequence
  Description of Artificial Sequence: Synthetic oligonucleotide
  Sense strand starting at position 2673 of SEQ ID NO: 1242312
aauccugguguguagauau

SEQ ID NO: 1337789 - RNA, 19 nt, Artificial Sequence
  Description of Artificial Sequence: Synthetic oligonucleotide
  Antisense strand to SEQ ID NO: 1337788
auaucuacacaccaggauu

SEQ ID NO: 1337790 - RNA, 19 nt, Artificial Sequence
  Description of Artificial Sequence: Synthetic oligonucleotide
  Sense strand starting at position 2732 of SEQ ID NO: 1242312
agauaaggcugggcugaau

SEQ ID NO: 1337791 - RNA, 19 nt, Artificial Sequence
  Description of Artificial Sequence: Synthetic oligonucleotide
  Antisense strand to SEQ ID NO: 1337790
auucagcccagccuuaucu

SEQ ID NO: 1337792 - RNA, 19 nt, Artificial Sequence
  Description of Artificial Sequence: Synthetic oligonucleotide
  Sense strand starting at position 2812 of SEQ ID NO: 1242312
ggcugauuccuagaggugu

SEQ ID NO: 1337793 - RNA, 19 nt, Artificial Sequence
  Description of Artificial Sequence: Synthetic oligonucleotide
  Antisense strand to SEQ ID NO: 1337792
acaccucuaggaaucagcc

SEQ ID NO: 1337794 - RNA, 19 nt, Artificial Sequence
  Description of Artificial Sequence: Synthetic oligonucleotide
  Sense strand starting at position 2814 of SEQ ID NO: 1242312
cugauuccuagagguguaa

SEQ ID NO: 1337795 - RNA, 19 nt, Artificial Sequence
  Description of Artificial Sequence: Synthetic oligonucleotide
  Antisense strand to SEQ ID NO: 1337794
uuacaccucuaggaaucag

SEQ ID NO: 1337796 - RNA, 19 nt, Artificial Sequence
  Description of Artificial Sequence: Synthetic oligonucleotide
  Sense strand starting at position 2818 of SEQ ID NO: 1242312
uuccuagagguguaauuac

SEQ ID NO: 1337797 - RNA, 19 nt, Artificial Sequence
  Description of Artificial Sequence: Synthetic oligonucleotide
  Antisense strand to SEQ ID NO: 1337796
guaauuacaccucuaggaa

SEQ ID NO: 1337798 - RNA, 19 nt, Artificial Sequence
  Description of Artificial Sequence: Synthetic oligonucleotide
  Sense strand starting at position 2826 of SEQ ID NO: 1242312
gguguaauuacugaaugcu

SEQ ID NO: 1337799 - RNA, 19 nt, Artificial Sequence
  Description of Artificial Sequence: Synthetic oligonucleotide
  Antisense strand to SEQ ID NO: 1337798
agcauucaguaauuacacc

SEQ ID NO: 1337800 - RNA, 19 nt, Artificial Sequence
  Description of Artificial Sequence: Synthetic oligonucleotide
  Sense strand starting at position 2975 of SEQ ID NO: 1242312
ggcauuuccuuguuuggca

SEQ ID NO: 1337801 - RNA, 19 nt, Artificial Sequence
  Description of Artificial Sequence: Synthetic oligonucleotide
  Antisense strand to SEQ ID NO: 1337800
ugccaaacaaggaaaugcc

SEQ ID NO: 1337802 - RNA, 19 nt, Artificial Sequence
  Description of Artificial Sequence: Synthetic oligonucleotide
  Sense strand starting at position 2987 of SEQ ID NO: 1242312
uuuggcacuugauuauaau

SEQ ID NO: 1337803 - RNA, 19 nt, Artificial Sequence
  Description of Artificial Sequence: Synthetic oligonucleotide
  Antisense strand to SEQ ID NO: 1337802
auuauaaucaagugccaaa

SEQ ID NO: 1337804 - RNA, 19 nt, Artificial Sequence
  Description of Artificial Sequence: Synthetic oligonucleotide
  Sense strand starting at position 2988 of SEQ ID NO: 1242312
uuggcacuugauuauaauu

SEQ ID NO: 1337805 - RNA, 19 nt, Artificial Sequence
  Description of Artificial Sequence: Synthetic oligonucleotide
  Antisense strand to SEQ ID NO: 1337804
aauuauaaucaagugccaa

SEQ ID NO: 1337806 - RNA, 19 nt, Artificial Sequence
  Description of Artificial Sequence: Synthetic oligonucleotide
  Sense strand starting at position 3553 of SEQ ID NO: 1242312
ccuugcacucugugauuaa

SEQ ID NO: 1337807 - RNA, 19 nt, Artificial Sequence
  Description of Artificial Sequence: Synthetic oligonucleotide
  Antisense strand to SEQ ID NO: 1337806
uuaaucacagagugcaagg

SEQ ID NO: 1337808 - RNA, 19 nt, Artificial Sequence
  Description of Artificial Sequence: Synthetic oligonucleotide
  Sense strand starting at position 3556 of SEQ ID NO: 1242312
ugcacucugugauuaacau

SEQ ID NO: 1337809 - RNA, 19 nt, Artificial Sequence
  Description of Artificial Sequence: Synthetic oligonucleotide
  Antisense strand to SEQ ID NO: 1337808
auguuaaucacagagugca

SEQ ID NO: 1337810 - RNA, 19 nt, Artificial Sequence
  Description of Artificial Sequence: Synthetic oligonucleotide
  Sense strand starting at position 3557 of SEQ ID NO: 1242312
gcacucugugauuaacauu

SEQ ID NO: 1337811 - RNA, 19 nt, Artificial Sequence
  Description of Artificial Sequence: Synthetic oligonucleotide
  Antisense strand to SEQ ID NO: 1337810
aauguuaaucacagagugc

SEQ ID NO: 1337812 - RNA, 19 nt, Artificial Sequence
  Description of Artificial Sequence: Synthetic oligonucleotide
  Sense strand starting at position 3623 of SEQ ID NO: 1242312
gcauucuuuguugauuaaa

SEQ ID NO: 1337813 - RNA, 19 nt, Artificial Sequence
  Description of Artificial Sequence: Synthetic oligonucleotide
  Antisense strand to SEQ ID NO: 1337812
uuuaaucaacaaagaaugc

SEQ ID NO: 1337814 - RNA, 19 nt, Artificial Sequence
  Description of Artificial Sequence: Synthetic oligonucleotide
  Sense strand starting at position 3634 of SEQ ID NO: 1242312
ugauuaaauuaacaggaga

SEQ ID NO: 1337815 - RNA, 19 nt, Artificial Sequence
  Description of Artificial Sequence: Synthetic oligonucleotide
  Antisense strand to SEQ ID NO: 1337814
ucuccuguuaauuuaauca

SEQ ID NO: 1337816 - RNA, 19 nt, Artificial Sequence
  Description of Artificial Sequence: Synthetic oligonucleotide
  Sense strand starting at position 3837 of SEQ ID NO: 1242312
uguguaauacgcguuuaua

SEQ ID NO: 1337817 - RNA, 19 nt, Artificial Sequence
  Description of Artificial Sequence: Synthetic oligonucleotide
  Antisense strand to SEQ ID NO: 1337816
uauaaacgcguauuacaca

SEQ ID NO: 1337818 - RNA, 19 nt, Artificial Sequence
  Description of Artificial Sequence: Synthetic oligonucleotide
  Sense strand starting at position 3838 of SEQ ID NO: 1242312
guguaauacgcguuuauaa

SEQ ID NO: 1337819 - RNA, 19 nt, Artificial Sequence
  Description of Artificial Sequence: Synthetic oligonucleotide
  Antisense strand to SEQ ID NO: 1337818
uuauaaacgcguauuacac

SEQ ID NO: 1337820 - RNA, 19 nt, Artificial Sequence
  Description of Artificial Sequence: Synthetic oligonucleotide
  Sense strand starting at position 3840 of SEQ ID NO: 1242312
guaauacgcguuuauaaua

SEQ ID NO: 1337821 - RNA, 19 nt, Artificial Sequence
  Description of Artificial Sequence: Synthetic oligonucleotide
  Antisense strand to SEQ ID NO: 1337820
uauuauaaacgcguauuac

SEQ ID NO: 1337822 - RNA, 19 nt, Artificial Sequence
  Description of Artificial Sequence: Synthetic oligonucleotide
  Sense strand starting at position 38 of SEQ ID NO: 1242313
gggaacugcguuuaucuuu

SEQ ID NO: 1337823 - RNA, 19 nt, Artificial Sequence
  Description of Artificial Sequence: Synthetic oligonucleotide
  Antisense strand to SEQ ID NO: 1337822
aaagauaaacgcaguuccc

SEQ ID NO: 1337824 - RNA, 19 nt, Artificial Sequence
  Description of Artificial Sequence: Synthetic oligonucleotide
  Sense strand starting at position 293 of SEQ ID NO: 1242313
acuaauugguccuuacugu

SEQ ID NO: 1337825 - RNA, 19 nt, Artificial Sequence
  Description of Artificial Sequence: Synthetic oligonucleotide
  Antisense strand to SEQ ID NO: 1337824
acaguaaggaccaauuagu

SEQ ID NO: 1337826 - RNA, 19 nt, Artificial Sequence
  Description of Artificial Sequence: Synthetic oligonucleotide
  Sense strand starting at position 300 of SEQ ID NO: 1242313
gguccuuacugucuaauag

SEQ ID NO: 1337827 - RNA, 19 nt, Artificial Sequence
  Description of Artificial Sequence: Synthetic oligonucleotide
  Antisense strand to SEQ ID NO: 1337826
cuauuagacaguaaggacc

SEQ ID NO: 1337828 - RNA, 19 nt, Artificial Sequence
  Description of Artificial Sequence: Synthetic oligonucleotide
  Sense strand starting at position 318 of SEQ ID NO: 1242313
gggauaggagaucgcuuaa

SEQ ID NO: 1337829 - RNA, 19 nt, Artificial Sequence
  Description of Artificial Sequence: Synthetic oligonucleotide
  Antisense strand to SEQ ID NO: 1337828
uuaagcgaucuccuauccc

SEQ ID NO: 1337830 - RNA, 19 nt, Artificial Sequence
  Description of Artificial Sequence: Synthetic oligonucleotide
  Sense strand starting at position 416 of SEQ ID NO: 1242313
ggauaaagcauucgaugac

SEQ ID NO: 1337831 - RNA, 19 nt, Artificial Sequence
  Description of Artificial Sequence: Synthetic oligonucleotide
  Antisense strand to SEQ ID NO: 1337830
gucaucgaaugcuuuaucc

SEQ ID NO: 1337832 - RNA, 19 nt, Artificial Sequence
  Description of Artificial Sequence: Synthetic oligonucleotide
  Sense strand starting at position 423 of SEQ ID NO: 1242313
gcauucgaugaccauacaa

SEQ ID NO: 1337833 - RNA, 19 nt, Artificial Sequence
  Description of Artificial Sequence: Synthetic oligonucleotide
  Antisense strand to SEQ ID NO: 1337832
uuguauggucaucgaaugc

SEQ ID NO: 1337834 - RNA, 19 nt, Artificial Sequence
  Description of Artificial Sequence: Synthetic oligonucleotide
  Sense strand starting at position 562 of SEQ ID NO: 1242313
guggauccuugauuacaaa

SEQ ID NO: 1337835 - RNA, 19 nt, Artificial Sequence
  Description of Artificial Sequence: Synthetic oligonucleotide
  Antisense strand to SEQ ID NO: 1337834
uuuguaaucaaggauccac

SEQ ID NO: 1337836 - RNA, 19 nt, Artificial Sequence
  Description of Artificial Sequence: Synthetic oligonucleotide
  Sense strand starting at position 594 of SEQ ID NO: 1242313
uuuguuucuccucaaggca

SEQ ID NO: 1337837 - RNA, 19 nt, Artificial Sequence
  Description of Artificial Sequence: Synthetic oligonucleotide
  Antisense strand to SEQ ID NO: 1337836
ugccuugaggagaaacaaa

SEQ ID NO: 1337838 - RNA, 19 nt, Artificial Sequence
  Description of Artificial Sequence: Synthetic oligonucleotide
  Sense strand starting at position 607 of SEQ ID NO: 1242313
aaggcagguccucggaaua

SEQ ID NO: 1337839 - RNA, 19 nt, Artificial Sequence
  Description of Artificial Sequence: Synthetic oligonucleotide
  Antisense strand to SEQ ID NO: 1337838
uauuccgaggaccugccuu

SEQ ID NO: 1337840 - RNA, 19 nt, Artificial Sequence
  Description of Artificial Sequence: Synthetic oligonucleotide
  Sense strand starting at position 721 of SEQ ID NO: 1242313
gcgcccauuguguuucuga

SEQ ID NO: 1337841 - RNA, 19 nt, Artificial Sequence
  Description of Artificial Sequence: Synthetic oligonucleotide
  Antisense strand to SEQ ID NO: 1337840
ucagaaacacaaugggcgc

SEQ ID NO: 1337842 - RNA, 19 nt, Artificial Sequence
  Description of Artificial Sequence: Synthetic oligonucleotide
  Sense strand starting at position 732 of SEQ ID NO: 1242313
guuucugagccacaucuga

SEQ ID NO: 1337843 - RNA, 19 nt, Artificial Sequence
  Description of Artificial Sequence: Synthetic oligonucleotide
  Antisense strand to SEQ ID NO: 1337842
ucagauguggcucagaaac

SEQ ID NO: 1337844 - RNA, 19 nt, Artificial Sequence
  Description of Artificial Sequence: Synthetic oligonucleotide
  Sense strand starting at position 739 of SEQ ID NO: 1242313
agccacaucugacuuugau

SEQ ID NO: 1337845 - RNA, 19 nt, Artificial Sequence
  Description of Artificial Sequence: Synthetic oligonucleotide
  Antisense strand to SEQ ID NO: 1337844
aucaaagucagauguggcu

SEQ ID NO: 1337846 - RNA, 19 nt, Artificial Sequence
  Description of Artificial Sequence: Synthetic oligonucleotide
  Sense strand starting at position 1012 of SEQ ID NO: 1242313
uaccuagcuguaggagaua

SEQ ID NO: 1337847 - RNA, 19 nt, Artificial Sequence
  Description of Artificial Sequence: Synthetic oligonucleotide
  Antisense strand to SEQ ID NO: 1337846
uaucuccuacagcuaggua

SEQ ID NO: 1337848 - RNA, 19 nt, Artificial Sequence
  Description of Artificial Sequence: Synthetic oligonucleotide
  Sense strand starting at position 1024 of SEQ ID NO: 1242313
ggagauaaauccuauuuac

SEQ ID NO: 1337849 - RNA, 19 nt, Artificial Sequence
  Description of Artificial Sequence: Synthetic oligonucleotide
  Antisense strand to SEQ ID NO: 1337848
guaaauaggauuuaucucc

SEQ ID NO: 1337850 - RNA, 19 nt, Artificial Sequence
  Description of Artificial Sequence: Synthetic oligonucleotide
  Sense strand starting at position 2429 of SEQ ID NO: 1242313
ggaggcuucucccuugaug

SEQ ID NO: 1337851 - RNA, 19 nt, Artificial Sequence
  Description of Artificial Sequence: Synthetic oligonucleotide
  Antisense strand to SEQ ID NO: 1337850
caucaagggagaagccucc

SEQ ID NO: 1337852 - RNA, 19 nt, Artificial Sequence
  Description of Artificial Sequence: Synthetic oligonucleotide
  Sense strand starting at position 2550 of SEQ ID NO: 1242313
gaggcaucuccggaugaua

SEQ ID NO: 1337853 - RNA, 19 nt, Artificial Sequence
  Description of Artificial Sequence: Synthetic oligonucleotide
  Antisense strand to SEQ ID NO: 1337852
uaucauccggagaugccuc

SEQ ID NO: 1337854 - RNA, 19 nt, Artificial Sequence
  Description of Artificial Sequence: Synthetic oligonucleotide
  Sense strand starting at position 2552 of SEQ ID NO: 1242313
ggcaucuccggaugauaag

SEQ ID NO: 1337855 - RNA, 19 nt, Artificial Sequence
  Description of Artificial Sequence: Synthetic oligonucleotide
  Antisense strand to SEQ ID NO: 1337854
cuuaucauccggagaugcc

SEQ ID NO: 1337856 - RNA, 19 nt, Artificial Sequence
  Description of Artificial Sequence: Synthetic oligonucleotide
  Sense strand starting at position 2652 of SEQ ID NO: 1242313
uccgaagaguggucucaaa

SEQ ID NO: 1337857 - RNA, 19 nt, Artificial Sequence
  Description of Artificial Sequence: Synthetic oligonucleotide
  Antisense strand to SEQ ID NO: 1337856
uuugagaccacucuucgga

SEQ ID NO: 1337858 - RNA, 19 nt, Artificial Sequence
  Description of Artificial Sequence: Synthetic oligonucleotide
  Sense strand starting at position 2728 of SEQ ID NO: 1242313
ucuuuaauuugugagaacu

SEQ ID NO: 1337859 - RNA, 19 nt, Artificial Sequence
  Description of Artificial Sequence: Synthetic oligonucleotide
  Antisense strand to SEQ ID NO: 1337858
aguucucacaaauuaaaga

SEQ ID NO: 1337860 - RNA, 19 nt, Artificial Sequence
  Description of Artificial Sequence: Synthetic oligonucleotide
  Sense strand starting at position 2738 of SEQ ID NO: 1242313
gugagaacugugcacacaa

SEQ ID NO: 1337861 - RNA, 19 nt, Artificial Sequence
  Description of Artificial Sequence: Synthetic oligonucleotide
  Antisense strand to SEQ ID NO: 1337860
uugugugcacaguucucac

SEQ ID NO: 1337862 - RNA, 19 nt, Artificial Sequence
  Description of Artificial Sequence: Synthetic oligonucleotide
  Sense strand starting at position 2786 of SEQ ID NO: 1242313
ucaagagauuuguagauuc

SEQ ID NO: 1337863 - RNA, 19 nt, Artificial Sequence
  Description of Artificial Sequence: Synthetic oligonucleotide
  Antisense strand to SEQ ID NO: 1337862
gaaucuacaaaucucuuga

SEQ ID NO: 1337864 - RNA, 19 nt, Artificial Sequence
  Description of Artificial Sequence: Synthetic oligonucleotide
  Sense strand starting at position 2821 of SEQ ID NO: 1242313
gggagcaggcuuugauaga

SEQ ID NO: 1337865 - RNA, 19 nt, Artificial Sequence
  Description of Artificial Sequence: Synthetic oligonucleotide
  Antisense strand to SEQ ID NO: 1337864
ucuaucaaagccugcuccc

SEQ ID NO: 1337866 - RNA, 19 nt, Artificial Sequence
  Description of Artificial Sequence: Synthetic oligonucleotide
  Sense strand starting at position 2832 of SEQ ID NO: 1242313
uugauagauuacuugguua

SEQ ID NO: 1337867 - RNA, 19 nt, Artificial Sequence
  Description of Artificial Sequence: Synthetic oligonucleotide
  Antisense strand to SEQ ID NO: 1337866
uaaccaaguaaucuaucaa

SEQ ID NO: 1337868 - RNA, 19 nt, Artificial Sequence
  Description of Artificial Sequence: Synthetic oligonucleotide
  Sense strand starting at position 2834 of SEQ ID NO: 1242313
gauagauuacuugguuaua

SEQ ID NO: 1337869 - RNA, 19 nt, Artificial Sequence
  Description of Artificial Sequence: Synthetic oligonucleotide
  Antisense strand to SEQ ID NO: 1337868
uauaaccaaguaaucuauc

SEQ ID NO: 1337870 - RNA, 19 nt, Artificial Sequence
  Description of Artificial Sequence: Synthetic oligonucleotide
  Sense strand starting at position 2935 of SEQ ID NO: 1242313
auguaaucagauugcuaag

SEQ ID NO: 1337871 - RNA, 19 nt, Artificial Sequence
  Description of Artificial Sequence: Synthetic oligonucleotide
  Antisense strand to SEQ ID NO: 1337870
cuuagcaaucugauuacau

SEQ ID NO: 1337872 - RNA, 19 nt, Artificial Sequence
  Description of Artificial Sequence: Synthetic oligonucleotide
  Sense strand starting at position 2968 of SEQ ID NO: 1242313
cguuuacauguggauuaac

SEQ ID NO: 1337873 - RNA, 19 nt, Artificial Sequence
  Description of Artificial Sequence: Synthetic oligonucleotide
  Antisense strand to SEQ ID NO: 1337872
guuaauccacauguaaacg

SEQ ID NO: 1337874 - RNA, 19 nt, Artificial Sequence
  Description of Artificial Sequence: Synthetic oligonucleotide
  Sense strand starting at position 3063 of SEQ ID NO: 1242313
auggaaaucuagcuuuggu

SEQ ID NO: 1337875 - RNA, 19 nt, Artificial Sequence
  Description of Artificial Sequence: Synthetic oligonucleotide
  Antisense strand to SEQ ID NO: 1337874
accaaagcuagauuuccau

SEQ ID NO: 1337876 - RNA, 19 nt, Artificial Sequence
  Description of Artificial Sequence: Synthetic oligonucleotide
  Sense strand starting at position 3066 of SEQ ID NO: 1242313
gaaaucuagcuuugguuac

SEQ ID NO: 1337877 - RNA, 19 nt, Artificial Sequence
  Description of Artificial Sequence: Synthetic oligonucleotide
  Antisense strand to SEQ ID NO: 1337876
guaaccaaagcuagauuuc

SEQ ID NO: 1337878 - RNA, 19 nt, Artificial Sequence
  Description of Artificial Sequence: Synthetic oligonucleotide
  Sense strand starting at position 3076 of SEQ ID NO: 1242313
uuugguuaccacgacauca

SEQ ID NO: 1337879 - RNA, 19 nt, Artificial Sequence
  Description of Artificial Sequence: Synthetic oligonucleotide
  Antisense strand to SEQ ID NO: 1337878
ugaugucgugguaaccaaa

SEQ ID NO: 1337880 - RNA, 19 nt, Artificial Sequence
  Description of Artificial Sequence: Synthetic oligonucleotide
  Sense strand starting at position 3390 of SEQ ID NO: 1242313
gccuguuuccaauaaguga

SEQ ID NO: 1337881 - RNA, 19 nt, Artificial Sequence
  Description of Artificial Sequence: Synthetic oligonucleotide
  Antisense strand to SEQ ID NO: 1337880
ucacuuauuggaaacaggc

SEQ ID NO: 1337882 - RNA, 19 nt, Artificial Sequence
  Description of Artificial Sequence: Synthetic oligonucleotide
  Sense strand starting at position 3397 of SEQ ID NO: 1242313
uccaauaagugaguaaaua

SEQ ID NO: 1337883 - RNA, 19 nt, Artificial Sequence
  Description of Artificial Sequence: Synthetic oligonucleotide
  Antisense strand to SEQ ID NO: 1337882
uauuuacucacuuauugga

SEQ ID NO: 1337884 - RNA, 19 nt, Artificial Sequence
  Description of Artificial Sequence: Synthetic oligonucleotide
  Sense strand starting at position 3543 of SEQ ID NO: 1242313
acaguaauauccuugguau

SEQ ID NO: 1337885 - RNA, 19 nt, Artificial Sequence
  Description of Artificial Sequence: Synthetic oligonucleotide
  Antisense strand to SEQ ID NO: 1337884
auaccaaggauauuacugu

SEQ ID NO: 1337886 - RNA, 19 nt, Artificial Sequence
  Description of Artificial Sequence: Synthetic oligonucleotide
  Sense strand starting at position 3544 of SEQ ID NO: 1242313
caguaauauccuugguaug

SEQ ID NO: 1337887 - RNA, 19 nt, Artificial Sequence
  Description of Artificial Sequence: Synthetic oligonucleotide
  Antisense strand to SEQ ID NO: 1337886
cauaccaaggauauuacug

SEQ ID NO: 1337888 - RNA, 19 nt, Artificial Sequence
  Description of Artificial Sequence: Synthetic oligonucleotide
  Sense strand starting at position 3723 of SEQ ID NO: 1242313
ccuguuugccauuagacua

SEQ ID NO: 1337889 - RNA, 19 nt, Artificial Sequence
  Description of Artificial Sequence: Synthetic oligonucleotide
  Antisense strand to SEQ ID NO: 1337888
uagucuaauggcaaacagg

SEQ ID NO: 1337890 - RNA, 19 nt, Artificial Sequence
  Description of Artificial Sequence: Synthetic oligonucleotide
  Sense strand starting at position 3806 of SEQ ID NO: 1242313
gugcuuauauuuccugaau

SEQ ID NO: 1337891 - RNA, 19 nt, Artificial Sequence
  Description of Artificial Sequence: Synthetic oligonucleotide
  Antisense strand to SEQ ID NO: 1337890
auucaggaaauauaagcac

SEQ ID NO: 1337892 - RNA, 19 nt, Artificial Sequence
  Description of Artificial Sequence: Synthetic oligonucleotide
  Sense strand starting at position 3913 of SEQ ID NO: 1242313
aaggacuuguuaucuaguu

SEQ ID NO: 1337893 - RNA, 19 nt, Artificial Sequence
  Description of Artificial Sequence: Synthetic oligonucleotide
  Antisense strand to SEQ ID NO: 1337892
aacuagauaacaaguccuu

SEQ ID NO: 1337894 - RNA, 19 nt, Artificial Sequence
  Description of Artificial Sequence: Synthetic oligonucleotide
  Sense strand starting at position 3961 of SEQ ID NO: 1242313
gaguaucuugcauauagug

SEQ ID NO: 1337895 - RNA, 19 nt, Artificial Sequence
  Description of Artificial Sequence: Synthetic oligonucleotide
  Antisense strand to SEQ ID NO: 1337894
cacuauaugcaagauacuc

SEQ ID NO: 1337896 - RNA, 19 nt, Artificial Sequence
  Description of Artificial Sequence: Synthetic oligonucleotide
  Sense strand starting at position 3970 of SEQ ID NO: 1242313
gcauauaguguguaauacu

SEQ ID NO: 1337897 - RNA, 19 nt, Artificial Sequence
  Description of Artificial Sequence: Synthetic oligonucleotide
  Antisense strand to SEQ ID NO: 1337896
aguauuacacacuauaugc

SEQ ID NO: 1337898 - RNA, 19 nt, Artificial Sequence
  Description of Artificial Sequence: Synthetic oligonucleotide
  Sense strand starting at position 3977 of SEQ ID NO: 1242313
guguguaauacugagguag

SEQ ID NO: 1337899 - RNA, 19 nt, Artificial Sequence
  Description of Artificial Sequence: Synthetic oligonucleotide
  Antisense strand to SEQ ID NO: 1337898
cuaccucaguauuacacac

SEQ ID NO: 1337900 - RNA, 19 nt, Artificial Sequence
  Description of Artificial Sequence: Synthetic oligonucleotide
  Sense strand starting at position 3981 of SEQ ID NO: 1242313
guaauacugagguaguuaa

SEQ ID NO: 1337901 - RNA, 19 nt, Artificial Sequence
  Description of Artificial Sequence: Synthetic oligonucleotide
  Antisense strand to SEQ ID NO: 1337900
uuaacuaccucaguauuac

SEQ ID NO: 1337902 - RNA, 19 nt, Artificial Sequence
  Description of Artificial Sequence: Synthetic oligonucleotide
  Sense strand starting at position 216 of SEQ ID NO: 1242314
ucauaucuucgagacugca

SEQ ID NO: 1337903 - RNA, 19 nt, Artificial Sequence
  Description of Artificial Sequence: Synthetic oligonucleotide
  Antisense strand to SEQ ID NO: 1337902
ugcagucucgaagauauga

SEQ ID NO: 1337904 - RNA, 19 nt, Artificial Sequence
  Description of Artificial Sequence: Synthetic oligonucleotide
  Sense strand starting at position 250 of SEQ ID NO: 1242314
agugauuccuacccacuga

SEQ ID NO: 1337905 - RNA, 19 nt, Artificial Sequence
  Description of Artificial Sequence: Synthetic oligonucleotide
  Antisense strand to SEQ ID NO: 1337904
ucaguggguaggaaucacu

SEQ ID NO: 1337906 - RNA, 19 nt, Artificial Sequence
  Description of Artificial Sequence: Synthetic oligonucleotide
  Sense strand starting at position 400 of SEQ ID NO: 1242314
ccacucaagucuguaaacu

SEQ ID NO: 1337907 - RNA, 19 nt, Artificial Sequence
  Description of Artificial Sequence: Synthetic oligonucleotide
  Antisense strand to SEQ ID NO: 1337906
aguuuacagacuugagugg

SEQ ID NO: 1337908 - RNA, 19 nt, Artificial Sequence
  Description of Artificial Sequence: Synthetic oligonucleotide
  Sense strand starting at position 463 of SEQ ID NO: 1242314
uguauuaacucaccauguu

SEQ ID NO: 1337909 - RNA, 19 nt, Artificial Sequence
  Description of Artificial Sequence: Synthetic oligonucleotide
  Antisense strand to SEQ ID NO: 1337908
aacauggugaguuaauaca

SEQ ID NO: 1337910 - RNA, 19 nt, Artificial Sequence
  Description of Artificial Sequence: Synthetic oligonucleotide
  Sense strand starting at position 464 of SEQ ID NO: 1242314
guauuaacucaccauguuu

SEQ ID NO: 1337911 - RNA, 19 nt, Artificial Sequence
  Description of Artificial Sequence: Synthetic oligonucleotide
  Antisense strand to SEQ ID NO: 1337910
aaacauggugaguuaauac

SEQ ID NO: 1337912 - RNA, 19 nt, Artificial Sequence
  Description of Artificial Sequence: Synthetic oligonucleotide
  Sense strand starting at position 600 of SEQ ID NO: 1242314
cuaagugucaggcauuaug

SEQ ID NO: 1337913 - RNA, 19 nt, Artificial Sequence
  Description of Artificial Sequence: Synthetic oligonucleotide
  Antisense strand to SEQ ID NO: 1337912
cauaaugccugacacuuag

SEQ ID NO: 1337914 - RNA, 19 nt, Artificial Sequence
  Description of Artificial Sequence: Synthetic oligonucleotide
  Sense strand starting at position 648 of SEQ ID NO: 1242314
accaguuccuguccugaaa

SEQ ID NO: 1337915 - RNA, 19 nt, Artificial Sequence
  Description of Artificial Sequence: Synthetic oligonucleotide
  Antisense strand to SEQ ID NO: 1337914
uuucaggacaggaacuggu

SEQ ID NO: 1337916 - RNA, 19 nt, Artificial Sequence
  Description of Artificial Sequence: Synthetic oligonucleotide
  Sense strand starting at position 675 of SEQ ID NO: 1242314
cuggcaguuaggugagaga

SEQ ID NO: 1337917 - RNA, 19 nt, Artificial Sequence
  Description of Artificial Sequence: Synthetic oligonucleotide
  Antisense strand to SEQ ID NO: 1337916
ucucucaccuaacugccag

SEQ ID NO: 1337918 - RNA, 19 nt, Artificial Sequence
  Description of Artificial Sequence: Synthetic oligonucleotide
  Sense strand starting at position 695 of SEQ ID NO: 1242314
gcagucauagauuauaaug

SEQ ID NO: 1337919 - RNA, 19 nt, Artificial Sequence
  Description of Artificial Sequence: Synthetic oligonucleotide
  Antisense strand to SEQ ID NO: 1337918
cauuauaaucuaugacugc

SEQ ID NO: 1337920 - RNA, 19 nt, Artificial Sequence
  Description of Artificial Sequence: Synthetic oligonucleotide
  Sense strand starting at position 834 of SEQ ID NO: 1242314
cugagaacccuugggucua

SEQ ID NO: 1337921 - RNA, 19 nt, Artificial Sequence
  Description of Artificial Sequence: Synthetic oligonucleotide
  Antisense strand to SEQ ID NO: 1337920
uagacccaaggguucucag

SEQ ID NO: 1337922 - RNA, 19 nt, Artificial Sequence
  Description of Artificial Sequence: Synthetic oligonucleotide
  Sense strand starting at position 893 of SEQ ID NO: 1242314
agcagaaaguaugaacaaa

SEQ ID NO: 1337923 - RNA, 19 nt, Artificial Sequence
  Description of Artificial Sequence: Synthetic oligonucleotide
  Antisense strand to SEQ ID NO: 1337922
uuuguucauacuuucugcu

SEQ ID NO: 1337924 - RNA, 19 nt, Artificial Sequence
  Description of Artificial Sequence: Synthetic oligonucleotide
  Sense strand starting at position 926 of SEQ ID NO: 1242314
gauaguuuagugggcauga

SEQ ID NO: 1337925 - RNA, 19 nt, Artificial Sequence
  Description of Artificial Sequence: Synthetic oligonucleotide
  Antisense strand to SEQ ID NO: 1337924
ucaugcccacuaaacuauc

SEQ ID NO: 1337926 - RNA, 19 nt, Artificial Sequence
  Description of Artificial Sequence: Synthetic oligonucleotide
  Sense strand starting at position 928 of SEQ ID NO: 1242314
uaguuuagugggcaugaga

SEQ ID NO: 1337927 - RNA, 19 nt, Artificial Sequence
  Description of Artificial Sequence: Synthetic oligonucleotide
  Antisense strand to SEQ ID NO: 1337926
ucucaugcccacuaaacua

SEQ ID NO: 1337928 - RNA, 19 nt, Artificial Sequence
  Description of Artificial Sequence: Synthetic oligonucleotide
  Sense strand starting at position 978 of SEQ ID NO: 1242314
auaagagcuaagcgaguau

SEQ ID NO: 1337929 - RNA, 19 nt, Artificial Sequence
  Description of Artificial Sequence: Synthetic oligonucleotide
  Antisense strand to SEQ ID NO: 1337928
auacucgcuuagcucuuau

SEQ ID NO: 1337930 - RNA, 19 nt, Artificial Sequence
  Description of Artificial Sequence: Synthetic oligonucleotide
  Sense strand starting at position 982 of SEQ ID NO: 1242314
gagcuaagcgaguauccaa

SEQ ID NO: 1337931 - RNA, 19 nt, Artificial Sequence
  Description of Artificial Sequence: Synthetic oligonucleotide
  Antisense strand to SEQ ID NO: 1337930
uuggauacucgcuuagcuc

SEQ ID NO: 1337932 - RNA, 19 nt, Artificial Sequence
  Description of Artificial Sequence: Synthetic oligonucleotide
  Sense strand starting at position 1039 of SEQ ID NO: 1242314
gccuucuccagagagugau

SEQ ID NO: 1337933 - RNA, 19 nt, Artificial Sequence
  Description of Artificial Sequence: Synthetic oligonucleotide
  Antisense strand to SEQ ID NO: 1337932
aucacucucuggagaaggc

SEQ ID NO: 1337934 - RNA, 19 nt, Artificial Sequence
  Description of Artificial Sequence: Synthetic oligonucleotide
  Sense strand starting at position 1084 of SEQ ID NO: 1242314
caguuaucuugggcaccau

SEQ ID NO: 1337935 - RNA, 19 nt, Artificial Sequence
  Description of Artificial Sequence: Synthetic oligonucleotide
  Antisense strand to SEQ ID NO: 1337934
auggugcccaagauaacug

SEQ ID NO: 1337936 - RNA, 19 nt, Artificial Sequence
  Description of Artificial Sequence: Synthetic oligonucleotide
  Sense strand starting at position 1134 of SEQ ID NO: 1242314
uguucagcguuauuuggua

SEQ ID NO: 1337937 - RNA, 19 nt, Artificial Sequence
  Description of Artificial Sequence: Synthetic oligonucleotide
  Antisense strand to SEQ ID NO: 1337936
uaccaaauaacgcugaaca

SEQ ID NO: 1337938 - RNA, 19 nt, Artificial Sequence
  Description of Artificial Sequence: Synthetic oligonucleotide
  Sense strand starting at position 1312 of SEQ ID NO: 1242314
acaggaacugauuggcauu

SEQ ID NO: 1337939 - RNA, 19 nt, Artificial Sequence
  Description of Artificial Sequence: Synthetic oligonucleotide
  Antisense strand to SEQ ID NO: 1337938
aaugccaaucaguuccugu

SEQ ID NO: 1337940 - RNA, 19 nt, Artificial Sequence
  Description of Artificial Sequence: Synthetic oligonucleotide
  Sense strand starting at position 1366 of SEQ ID NO: 1242314
cagcgaacugguugaggua

SEQ ID NO: 1337941 - RNA, 19 nt, Artificial Sequence
  Description of Artificial Sequence: Synthetic oligonucleotide
  Antisense strand to SEQ ID NO: 1337940
uaccucaaccaguucgcug

SEQ ID NO: 1337942 - RNA, 19 nt, Artificial Sequence
  Description of Artificial Sequence: Synthetic oligonucleotide
  Sense strand starting at position 1375 of SEQ ID NO: 1242314
gguugagguaauugcaaua

SEQ ID NO: 1337943 - RNA, 19 nt, Artificial Sequence
  Description of Artificial Sequence: Synthetic oligonucleotide
  Antisense strand to SEQ ID NO: 1337942
uauugcaauuaccucaacc

SEQ ID NO: 1337944 - RNA, 19 nt, Artificial Sequence
  Description of Artificial Sequence: Synthetic oligonucleotide
  Sense strand starting at position 3149 of SEQ ID NO: 1242314
guugacuagaucuggguua

SEQ ID NO: 1337945 - RNA, 19 nt, Artificial Sequence
  Description of Artificial Sequence: Synthetic oligonucleotide
  Antisense strand to SEQ ID NO: 1337944
uaacccagaucuagucaac

SEQ ID NO: 1337946 - RNA, 19 nt, Artificial Sequence
  Description of Artificial Sequence: Synthetic oligonucleotide
  Sense strand starting at position 3151 of SEQ ID NO: 1242314
ugacuagaucuggguuaau

SEQ ID NO: 1337947 - RNA, 19 nt, Artificial Sequence
  Description of Artificial Sequence: Synthetic oligonucleotide
  Antisense strand to SEQ ID NO: 1337946
auuaacccagaucuaguca

SEQ ID NO: 1337948 - RNA, 19 nt, Artificial Sequence
  Description of Artificial Sequence: Synthetic oligonucleotide
  Sense strand starting at position 3172 of SEQ ID NO: 1242314
gaagucaucugcucacagu

SEQ ID NO: 1337949 - RNA, 19 nt, Artificial Sequence
  Description of Artificial Sequence: Synthetic oligonucleotide
  Antisense strand to SEQ ID NO: 1337948
acugugagcagaugacuuc

SEQ ID NO: 1337950 - RNA, 19 nt, Artificial Sequence
  Description of Artificial Sequence: Synthetic oligonucleotide
  Sense strand starting at position 3271 of SEQ ID NO: 1242314
aggagauagcuuggaagua

SEQ ID NO: 1337951 - RNA, 19 nt, Artificial Sequence
  Description of Artificial Sequence: Synthetic oligonucleotide
  Antisense strand to SEQ ID NO: 1337950
uacuuccaagcuaucuccu

SEQ ID NO: 1337952 - RNA, 19 nt, Artificial Sequence
  Description of Artificial Sequence: Synthetic oligonucleotide
  Sense strand starting at position 3276 of SEQ ID NO: 1242314
auagcuuggaaguaaguua

SEQ ID NO: 1337953 - RNA, 19 nt, Artificial Sequence
  Description of Artificial Sequence: Synthetic oligonucleotide
  Antisense strand to SEQ ID NO: 1337952
uaacuuacuuccaagcuau

SEQ ID NO: 1337954 - RNA, 19 nt, Artificial Sequence
  Description of Artificial Sequence: Synthetic oligonucleotide
  Sense strand starting at position 3402 of SEQ ID NO: 1242314
ggugguguaacuuauggca

SEQ ID NO: 1337955 - RNA, 19 nt, Artificial Sequence
  Description of Artificial Sequence: Synthetic oligonucleotide
  Antisense strand to SEQ ID NO: 1337954
ugccauaaguuacaccacc

SEQ ID NO: 1337956 - RNA, 19 nt, Artificial Sequence
  Description of Artificial Sequence: Synthetic oligonucleotide
  Sense strand starting at position 3457 of SEQ ID NO: 1242314
ugcggaauucagugaacag

SEQ ID NO: 1337957 - RNA, 19 nt, Artificial Sequence
  Description of Artificial Sequence: Synthetic oligonucleotide
  Antisense strand to SEQ ID NO: 1337956
cuguucacugaauuccgca

SEQ ID NO: 1337958 - RNA, 19 nt, Artificial Sequence
  Description of Artificial Sequence: Synthetic oligonucleotide
  Sense strand starting at position 3492 of SEQ ID NO: 1242314
gguagaauuucucagguca

SEQ ID NO: 1337959 - RNA, 19 nt, Artificial Sequence
  Description of Artificial Sequence: Synthetic oligonucleotide
  Antisense strand to SEQ ID NO: 1337958
ugaccugagaaauucuacc

SEQ ID NO: 1337960 - RNA, 19 nt, Artificial Sequence
  Description of Artificial Sequence: Synthetic oligonucleotide
  Sense strand starting at position 3494 of SEQ ID NO: 1242314
uagaauuucucaggucaag

SEQ ID NO: 1337961 - RNA, 19 nt, Artificial Sequence
  Description of Artificial Sequence: Synthetic oligonucleotide
  Antisense strand to SEQ ID NO: 1337960
cuugaccugagaaauucua

SEQ ID NO: 1337962 - RNA, 19 nt, Artificial Sequence
  Description of Artificial Sequence: Synthetic oligonucleotide
  Sense strand starting at position 3582 of SEQ ID NO: 1242314
gucugaucugaauggagga

SEQ ID NO: 1337963 - RNA, 19 nt, Artificial Sequence
  Description of Artificial Sequence: Synthetic oligonucleotide
  Antisense strand to SEQ ID NO: 1337962
uccuccauucagaucagac

SEQ ID NO: 1337964 - RNA, 19 nt, Artificial Sequence
  Description of Artificial Sequence: Synthetic oligonucleotide
  Sense strand starting at position 3624 of SEQ ID NO: 1242314
gcauuugaggccuaagugu

SEQ ID NO: 1337965 - RNA, 19 nt, Artificial Sequence
  Description of Artificial Sequence: Synthetic oligonucleotide
  Antisense strand to SEQ ID NO: 1337964
acacuuaggccucaaaugc

SEQ ID NO: 1337966 - RNA, 19 nt, Artificial Sequence
  Description of Artificial Sequence: Synthetic oligonucleotide
  Sense strand starting at position 3638 of SEQ ID NO: 1242314
aguguagagugccuuuaau

SEQ ID NO: 1337967 - RNA, 19 nt, Artificial Sequence
  Description of Artificial Sequence: Synthetic oligonucleotide
  Antisense strand to SEQ ID NO: 1337966
auuaaaggcacucuacacu

SEQ ID NO: 1337968 - RNA, 19 nt, Artificial Sequence
  Description of Artificial Sequence: Synthetic oligonucleotide
  Sense strand starting at position 3688 of SEQ ID NO: 1242314
acaggauuaaagugauguu

SEQ ID NO: 1337969 - RNA, 19 nt, Artificial Sequence
  Description of Artificial Sequence: Synthetic oligonucleotide
  Antisense strand to SEQ ID NO: 1337968
aacaucacuuuaauccugu

SEQ ID NO: 1337970 - RNA, 19 nt, Artificial Sequence
  Description of Artificial Sequence: Synthetic oligonucleotide
  Sense strand starting at position 3762 of SEQ ID NO: 1242314
cacagaugguucccacuga

SEQ ID NO: 1337971 - RNA, 19 nt, Artificial Sequence
  Description of Artificial Sequence: Synthetic oligonucleotide
  Antisense strand to SEQ ID NO: 1337970
ucagugggaaccaucugug

SEQ ID NO: 1337972 - RNA, 19 nt, Artificial Sequence
  Description of Artificial Sequence: Synthetic oligonucleotide
  Sense strand starting at position 3766 of SEQ ID NO: 1242314
gaugguucccacugagagg

SEQ ID NO: 1337973 - RNA, 19 nt, Artificial Sequence
  Description of Artificial Sequence: Synthetic oligonucleotide
  Antisense strand to SEQ ID NO: 1337972
ccucucagugggaaccauc

SEQ ID NO: 1337974 - RNA, 19 nt, Artificial Sequence
  Description of Artificial Sequence: Synthetic oligonucleotide
  Sense strand starting at position 3812 of SEQ ID NO: 1242314
gugagccugugacuacaau

SEQ ID NO: 1337975 - RNA, 19 nt, Artificial Sequence
  Description of Artificial Sequence: Synthetic oligonucleotide
  Antisense strand to SEQ ID NO: 1337974
auuguagucacaggcucac

SEQ ID NO: 1337976 - RNA, 19 nt, Artificial Sequence
  Description of Artificial Sequence: Synthetic oligonucleotide
  Sense strand starting at position 3818 of SEQ ID NO: 1242314
cugugacuacaauggaagu

SEQ ID NO: 1337977 - RNA, 19 nt, Artificial Sequence
  Description of Artificial Sequence: Synthetic oligonucleotide
  Antisense strand to SEQ ID NO: 1337976
acuuccauuguagucacag

SEQ ID NO: 1337978 - RNA, 19 nt, Artificial Sequence
  Description of Artificial Sequence: Synthetic oligonucleotide
  Sense strand starting at position 3844 of SEQ ID NO: 1242314
ugugacuuccaagagcaaa

SEQ ID NO: 1337979 - RNA, 19 nt, Artificial Sequence
  Description of Artificial Sequence: Synthetic oligonucleotide
  Antisense strand to SEQ ID NO: 1337978
uuugcucuuggaagucaca

SEQ ID NO: 1337980 - RNA, 19 nt, Artificial Sequence
  Description of Artificial Sequence: Synthetic oligonucleotide
  Sense strand starting at position 3952 of SEQ ID NO: 1242314
uggagagguguuuggccaa

SEQ ID NO: 1337981 - RNA, 19 nt, Artificial Sequence
  Description of Artificial Sequence: Synthetic oligonucleotide
  Antisense strand to SEQ ID NO: 1337980
uuggccaaacaccucucca

SEQ ID NO: 1337982 - RNA, 19 nt, Artificial Sequence
  Description of Artificial Sequence: Synthetic oligonucleotide
  Sense strand starting at position 68 of SEQ ID NO: 1242315
ccagcucugcccuagggaa

SEQ ID NO: 1337983 - RNA, 19 nt, Artificial Sequence
  Description of Artificial Sequence: Synthetic oligonucleotide
  Antisense strand to SEQ ID NO: 1337982
uucccuagggcagagcugg

SEQ ID NO: 1337984 - RNA, 19 nt, Artificial Sequence
  Description of Artificial Sequence: Synthetic oligonucleotide
  Sense strand starting at position 357 of SEQ ID NO: 1242315
cacccugucuuuguagaga

SEQ ID NO: 1337985 - RNA, 19 nt, Artificial Sequence
  Description of Artificial Sequence: Synthetic oligonucleotide
  Antisense strand to SEQ ID NO: 1337984
ucucuacaaagacagggug

SEQ ID NO: 1337986 - RNA, 19 nt, Artificial Sequence
  Description of Artificial Sequence: Synthetic oligonucleotide
  Sense strand starting at position 422 of SEQ ID NO: 1242315
ggguccuuugccuacugua

SEQ ID NO: 1337987 - RNA, 19 nt, Artificial Sequence
  Description of Artificial Sequence: Synthetic oligonucleotide
  Antisense strand to SEQ ID NO: 1337986
uacaguaggcaaaggaccc

SEQ ID NO: 1337988 - RNA, 19 nt, Artificial Sequence
  Description of Artificial Sequence: Synthetic oligonucleotide
  Sense strand starting at position 871 of SEQ ID NO: 1242315
gauuuaagcccguguugaa

SEQ ID NO: 1337989 - RNA, 19 nt, Artificial Sequence
  Description of Artificial Sequence: Synthetic oligonucleotide
  Antisense strand to SEQ ID NO: 1337988
uucaacacgggcuuaaauc

SEQ ID NO: 1337990 - RNA, 19 nt, Artificial Sequence
  Description of Artificial Sequence: Synthetic oligonucleotide
  Sense strand starting at position 982 of SEQ ID NO: 1242315
gaauuaccauuuggaguga

SEQ ID NO: 1337991 - RNA, 19 nt, Artificial Sequence
  Description of Artificial Sequence: Synthetic oligonucleotide
  Antisense strand to SEQ ID NO: 1337990
ucacuccaaaugguaauuc

SEQ ID NO: 1337992 - RNA, 19 nt, Artificial Sequence
  Description of Artificial Sequence: Synthetic oligonucleotide
  Sense strand starting at position 1014 of SEQ ID NO: 1242315
gggcuuuagugccuuggau

SEQ ID NO: 1337993 - RNA, 19 nt, Artificial Sequence
  Description of Artificial Sequence: Synthetic oligonucleotide
  Antisense strand to SEQ ID NO: 1337992
auccaaggcacuaaagccc

SEQ ID NO: 1337994 - RNA, 19 nt, Artificial Sequence
  Description of Artificial Sequence: Synthetic oligonucleotide
  Sense strand starting at position 1162 of SEQ ID NO: 1242315
aaguuugucuggucucuaa

SEQ ID NO: 1337995 - RNA, 19 nt, Artificial Sequence
  Description of Artificial Sequence: Synthetic oligonucleotide
  Antisense strand to SEQ ID NO: 1337994
uuagagaccagacaaacuu

SEQ ID NO: 1337996 - RNA, 19 nt, Artificial Sequence
  Description of Artificial Sequence: Synthetic oligonucleotide
  Sense strand starting at position 1165 of SEQ ID NO: 1242315
uuugucuggucucuaaauc

SEQ ID NO: 1337997 - RNA, 19 nt, Artificial Sequence
  Description of Artificial Sequence: Synthetic oligonucleotide
  Antisense strand to SEQ ID NO: 1337996
gauuuagagaccagacaaa

SEQ ID NO: 1337998 - RNA, 19 nt, Artificial Sequence
  Description of Artificial Sequence: Synthetic oligonucleotide
  Sense strand starting at position 1166 of SEQ ID NO: 1242315
uugucuggucucuaaaucu

SEQ ID NO: 1337999 - RNA, 19 nt, Artificial Sequence
  Description of Artificial Sequence: Synthetic oligonucleotide
  Antisense strand to SEQ ID NO: 1337998
agauuuagagaccagacaa

SEQ ID NO: 1338000 - RNA, 19 nt, Artificial Sequence
  Description of Artificial Sequence: Synthetic oligonucleotide
  Sense strand starting at position 1366 of SEQ ID NO: 1242315
gggccaccuccaugacaau

SEQ ID NO: 1338001 - RNA, 19 nt, Artificial Sequence
  Description of Artificial Sequence: Synthetic oligonucleotide
  Antisense strand to SEQ ID NO: 1338000
auugucauggagguggccc

SEQ ID NO: 1338002 - RNA, 19 nt, Artificial Sequence
  Description of Artificial Sequence: Synthetic oligonucleotide
  Sense strand starting at position 1367 of SEQ ID NO: 1242315
ggccaccuccaugacaauu

SEQ ID NO: 1338003 - RNA, 19 nt, Artificial Sequence
  Description of Artificial Sequence: Synthetic oligonucleotide
  Antisense strand to SEQ ID NO: 1338002
aauugucauggagguggcc

SEQ ID NO: 1338004 - RNA, 19 nt, Artificial Sequence
  Description of Artificial Sequence: Synthetic oligonucleotide
  Sense strand starting at position 2128 of SEQ ID NO: 1242315
gggcucacuuuauuccaga

SEQ ID NO: 1338005 - RNA, 19 nt, Artificial Sequence
  Description of Artificial Sequence: Synthetic oligonucleotide
  Antisense strand to SEQ ID NO: 1338004
ucuggaauaaagugagccc

SEQ ID NO: 1338006 - RNA, 19 nt, Artificial Sequence
  Description of Artificial Sequence: Synthetic oligonucleotide
  Sense strand starting at position 2514 of SEQ ID NO: 1242315
caccgcaagucuccagauu

SEQ ID NO: 1338007 - RNA, 19 nt, Artificial Sequence
  Description of Artificial Sequence: Synthetic oligonucleotide
  Antisense strand to SEQ ID NO: 1338006
aaucuggagacuugcggug

SEQ ID NO: 1338008 - RNA, 19 nt, Artificial Sequence
  Description of Artificial Sequence: Synthetic oligonucleotide
  Sense strand starting at position 2515 of SEQ ID NO: 1242315
accgcaagucuccagauua

SEQ ID NO: 1338009 - RNA, 19 nt, Artificial Sequence
  Description of Artificial Sequence: Synthetic oligonucleotide
  Antisense strand to SEQ ID NO: 1338008
uaaucuggagacuugcggu

SEQ ID NO: 1338010 - RNA, 19 nt, Artificial Sequence
  Description of Artificial Sequence: Synthetic oligonucleotide
  Sense strand starting at position 2755 of SEQ ID NO: 1242315
cacccagucuuuggaaagu

SEQ ID NO: 1338011 - RNA, 19 nt, Artificial Sequence
  Description of Artificial Sequence: Synthetic oligonucleotide
  Antisense strand to SEQ ID NO: 1338010
acuuuccaaagacugggug

SEQ ID NO: 1338012 - RNA, 19 nt, Artificial Sequence
  Description of Artificial Sequence: Synthetic oligonucleotide
  Sense strand starting at position 2771 of SEQ ID NO: 1242315
aguagacggugucgagaau

SEQ ID NO: 1338013 - RNA, 19 nt, Artificial Sequence
  Description of Artificial Sequence: Synthetic oligonucleotide
  Antisense strand to SEQ ID NO: 1338012
auucucgacaccgucuacu

SEQ ID NO: 1338014 - RNA, 19 nt, Artificial Sequence
  Description of Artificial Sequence: Synthetic oligonucleotide
  Sense strand starting at position 2772 of SEQ ID NO: 1242315
guagacggugucgagaaua

SEQ ID NO: 1338015 - RNA, 19 nt, Artificial Sequence
  Description of Artificial Sequence: Synthetic oligonucleotide
  Antisense strand to SEQ ID NO: 1338014
uauucucgacaccgucuac

SEQ ID NO: 1338016 - RNA, 19 nt, Artificial Sequence
  Description of Artificial Sequence: Synthetic oligonucleotide
  Sense strand starting at position 2783 of SEQ ID NO: 1242315
cgagaauauuucuggaauu

SEQ ID NO: 1338017 - RNA, 19 nt, Artificial Sequence
  Description of Artificial Sequence: Synthetic oligonucleotide
  Antisense strand to SEQ ID NO: 1338016
aauuccagaaauauucucg

SEQ ID NO: 1338018 - RNA, 19 nt, Artificial Sequence
  Description of Artificial Sequence: Synthetic oligonucleotide
  Sense strand starting at position 2847 of SEQ ID NO: 1242315
uaggaagagcccuggacua

SEQ ID NO: 1338019 - RNA, 19 nt, Artificial Sequence
  Description of Artificial Sequence: Synthetic oligonucleotide
  Antisense strand to SEQ ID NO: 1338018
uaguccagggcucuuccua

SEQ ID NO: 1338020 - RNA, 19 nt, Artificial Sequence
  Description of Artificial Sequence: Synthetic oligonucleotide
  Sense strand starting at position 2958 of SEQ ID NO: 1242315
gggugagucagggauuguc

SEQ ID NO: 1338021 - RNA, 19 nt, Artificial Sequence
  Description of Artificial Sequence: Synthetic oligonucleotide
  Antisense strand to SEQ ID NO: 1338020
gacaaucccugacucaccc

SEQ ID NO: 1338022 - RNA, 19 nt, Artificial Sequence
  Description of Artificial Sequence: Synthetic oligonucleotide
  Sense strand starting at position 2966 of SEQ ID NO: 1242315
cagggauuguccgcaaauc

SEQ ID NO: 1338023 - RNA, 19 nt, Artificial Sequence
  Description of Artificial Sequence: Synthetic oligonucleotide
  Antisense strand to SEQ ID NO: 1338022
gauuugcggacaaucccug

SEQ ID NO: 1338024 - RNA, 19 nt, Artificial Sequence
  Description of Artificial Sequence: Synthetic oligonucleotide
  Sense strand starting at position 2967 of SEQ ID NO: 1242315
agggauuguccgcaaauca

SEQ ID NO: 1338025 - RNA, 19 nt, Artificial Sequence
  Description of Artificial Sequence: Synthetic oligonucleotide
  Antisense strand to SEQ ID NO: 1338024
ugauuugcggacaaucccu

SEQ ID NO: 1338026 - RNA, 19 nt, Artificial Sequence
  Description of Artificial Sequence: Synthetic oligonucleotide
  Sense strand starting at position 2991 of SEQ ID NO: 1242315
cucacugaugucugccuua

SEQ ID NO: 1338027 - RNA, 19 nt, Artificial Sequence
  Description of Artificial Sequence: Synthetic oligonucleotide
  Antisense strand to SEQ ID NO: 1338026
uaaggcagacaucagugag

SEQ ID NO: 1338028 - RNA, 19 nt, Artificial Sequence
  Description of Artificial Sequence: Synthetic oligonucleotide
  Sense strand starting at position 3032 of SEQ ID NO: 1242315
agagcugcugcagaugaaa

SEQ ID NO: 1338029 - RNA, 19 nt, Artificial Sequence
  Description of Artificial Sequence: Synthetic oligonucleotide
  Antisense strand to SEQ ID NO: 1338028
uuucaucugcagcagcucu

SEQ ID NO: 1338030 - RNA, 19 nt, Artificial Sequence
  Description of Artificial Sequence: Synthetic oligonucleotide
  Sense strand starting at position 3034 of SEQ ID NO: 1242315
agcugcugcagaugaaaua

SEQ ID NO: 1338031 - RNA, 19 nt, Artificial Sequence
  Description of Artificial Sequence: Synthetic oligonucleotide
  Antisense strand to SEQ ID NO: 1338030
uauuucaucugcagcagcu

SEQ ID NO: 1338032 - RNA, 19 nt, Artificial Sequence
  Description of Artificial Sequence: Synthetic oligonucleotide
  Sense strand starting at position 3062 of SEQ ID NO: 1242315
ccaagugcccauuaugcau

SEQ ID NO: 1338033 - RNA, 19 nt, Artificial Sequence
  Description of Artificial Sequence: Synthetic oligonucleotide
  Antisense strand to SEQ ID NO: 1338032
augcauaaugggcacuugg

SEQ ID NO: 1338034 - RNA, 19 nt, Artificial Sequence
  Description of Artificial Sequence: Synthetic oligonucleotide
  Sense strand starting at position 3105 of SEQ ID NO: 1242315
acacccaggcucugaaaua

SEQ ID NO: 1338035 - RNA, 19 nt, Artificial Sequence
  Description of Artificial Sequence: Synthetic oligonucleotide
  Antisense strand to SEQ ID NO: 1338034
uauuucagagccugggugu

SEQ ID NO: 1338036 - RNA, 19 nt, Artificial Sequence
  Description of Artificial Sequence: Synthetic oligonucleotide
  Sense strand starting at position 3193 of SEQ ID NO: 1242315
ccagaaaccuuggauuuga

SEQ ID NO: 1338037 - RNA, 19 nt, Artificial Sequence
  Description of Artificial Sequence: Synthetic oligonucleotide
  Antisense strand to SEQ ID NO: 1338036
ucaaauccaagguuucugg

SEQ ID NO: 1338038 - RNA, 19 nt, Artificial Sequence
  Description of Artificial Sequence: Synthetic oligonucleotide
  Sense strand starting at position 3265 of SEQ ID NO: 1242315
gaagacaauuaauagugua

SEQ ID NO: 1338039 - RNA, 19 nt, Artificial Sequence
  Description of Artificial Sequence: Synthetic oligonucleotide
  Antisense strand to SEQ ID NO: 1338038
uacacuauuaauugucuuc

SEQ ID NO: 1338040 - RNA, 19 nt, Artificial Sequence
  Description of Artificial Sequence: Synthetic oligonucleotide
  Sense strand starting at position 3438 of SEQ ID NO: 1242315
gagacccucuguuaacaga

SEQ ID NO: 1338041 - RNA, 19 nt, Artificial Sequence
  Description of Artificial Sequence: Synthetic oligonucleotide
  Antisense strand to SEQ ID NO: 1338040
ucuguuaacagagggucuc

SEQ ID NO: 1338042 - RNA, 19 nt, Artificial Sequence
  Description of Artificial Sequence: Synthetic oligonucleotide
  Sense strand starting at position 3465 of SEQ ID NO: 1242315
gccugcuuauuggcagaaa

SEQ ID NO: 1338043 - RNA, 19 nt, Artificial Sequence
  Description of Artificial Sequence: Synthetic oligonucleotide
  Antisense strand to SEQ ID NO: 1338042
uuucugccaauaagcaggc

SEQ ID NO: 1338044 - RNA, 19 nt, Artificial Sequence
  Description of Artificial Sequence: Synthetic oligonucleotide
  Sense strand starting at position 3466 of SEQ ID NO: 1242315
ccugcuuauuggcagaaau

SEQ ID NO: 1338045 - RNA, 19 nt, Artificial Sequence
  Description of Artificial Sequence: Synthetic oligonucleotide
  Antisense strand to SEQ ID NO: 1338044
auuucugccaauaagcagg

SEQ ID NO: 1338046 - RNA, 19 nt, Artificial Sequence
  Description of Artificial Sequence: Synthetic oligonucleotide
  Sense strand starting at position 3627 of SEQ ID NO: 1242315
gcaagccuuccuugaucuu

SEQ ID NO: 1338047 - RNA, 19 nt, Artificial Sequence
  Description of Artificial Sequence: Synthetic oligonucleotide
  Antisense strand to SEQ ID NO: 1338046
aagaucaaggaaggcuugc

SEQ ID NO: 1338048 - RNA, 19 nt, Artificial Sequence
  Description of Artificial Sequence: Synthetic oligonucleotide
  Sense strand starting at position 3643 of SEQ ID NO: 1242315
cuuccuuaccugggcaaau

SEQ ID NO: 1338049 - RNA, 19 nt, Artificial Sequence
  Description of Artificial Sequence: Synthetic oligonucleotide
  Antisense strand to SEQ ID NO: 1338048
auuugcccagguaaggaag

SEQ ID NO: 1338050 - RNA, 19 nt, Artificial Sequence
  Description of Artificial Sequence: Synthetic oligonucleotide
  Sense strand starting at position 3790 of SEQ ID NO: 1242315
gaaguaaugugaggaaccu

SEQ ID NO: 1338051 - RNA, 19 nt, Artificial Sequence
  Description of Artificial Sequence: Synthetic oligonucleotide
  Antisense strand to SEQ ID NO: 1338050
agguuccucacauuacuuc

SEQ ID NO: 1338052 - RNA, 19 nt, Artificial Sequence
  Description of Artificial Sequence: Synthetic oligonucleotide
  Sense strand starting at position 3799 of SEQ ID NO: 1242315
ugaggaaccucuggagaga

SEQ ID NO: 1338053 - RNA, 19 nt, Artificial Sequence
  Description of Artificial Sequence: Synthetic oligonucleotide
  Antisense strand to SEQ ID NO: 1338052
ucucuccagagguuccuca

SEQ ID NO: 1338054 - RNA, 19 nt, Artificial Sequence
  Description of Artificial Sequence: Synthetic oligonucleotide
  Sense strand starting at position 3822 of SEQ ID NO: 1242315
gcaauucucuacuagagag

SEQ ID NO: 1338055 - RNA, 19 nt, Artificial Sequence
  Description of Artificial Sequence: Synthetic oligonucleotide
  Antisense strand to SEQ ID NO: 1338054
cucucuaguagagaauugc

SEQ ID NO: 1338056 - RNA, 19 nt, Artificial Sequence
  Description of Artificial Sequence: Synthetic oligonucleotide
  Sense strand starting at position 3906 of SEQ ID NO: 1242315
ccaauucggcuuuggagua

SEQ ID NO: 1338057 - RNA, 19 nt, Artificial Sequence
  Description of Artificial Sequence: Synthetic oligonucleotide
  Antisense strand to SEQ ID NO: 1338056
uacuccaaagccgaauugg

SEQ ID NO: 1338058 - RNA, 19 nt, Artificial Sequence
  Description of Artificial Sequence: Synthetic oligonucleotide
  Sense strand starting at position 415 of SEQ ID NO: 1242316
guuuauauuccagaagcaa

SEQ ID NO: 1338059 - RNA, 19 nt, Artificial Sequence
  Description of Artificial Sequence: Synthetic oligonucleotide
  Antisense strand to SEQ ID NO: 1338058
uugcuucuggaauauaaac

SEQ ID NO: 1338060 - RNA, 19 nt, Artificial Sequence
  Description of Artificial Sequence: Synthetic oligonucleotide
  Sense strand starting at position 559 of SEQ ID NO: 1242316
gacaaagugccauagaugu

SEQ ID NO: 1338061 - RNA, 19 nt, Artificial Sequence
  Description of Artificial Sequence: Synthetic oligonucleotide
  Antisense strand to SEQ ID NO: 1338060
acaucuauggcacuuuguc

SEQ ID NO: 1338062 - RNA, 19 nt, Artificial Sequence
  Description of Artificial Sequence: Synthetic oligonucleotide
  Sense strand starting at position 580 of SEQ ID NO: 1242316
aggagaaguuuccaauaag

SEQ ID NO: 1338063 - RNA, 19 nt, Artificial Sequence
  Description of Artificial Sequence: Synthetic oligonucleotide
  Antisense strand to SEQ ID NO: 1338062
cuuauuggaaacuucuccu

SEQ ID NO: 1338064 - RNA, 19 nt, Artificial Sequence
  Description of Artificial Sequence: Synthetic oligonucleotide
  Sense strand starting at position 980 of SEQ ID NO: 1242316
agcccagaaucuuuaguuu

SEQ ID NO: 1338065 - RNA, 19 nt, Artificial Sequence
  Description of Artificial Sequence: Synthetic oligonucleotide
  Antisense strand to SEQ ID NO: 1338064
aaacuaaagauucugggcu

SEQ ID NO: 1338066 - RNA, 19 nt, Artificial Sequence
  Description of Artificial Sequence: Synthetic oligonucleotide
  Sense strand starting at position 983 of SEQ ID NO: 1242316
ccagaaucuuuaguuugga

SEQ ID NO: 1338067 - RNA, 19 nt, Artificial Sequence
  Description of Artificial Sequence: Synthetic oligonucleotide
  Antisense strand to SEQ ID NO: 1338066
uccaaacuaaagauucugg

SEQ ID NO: 1338068 - RNA, 19 nt, Artificial Sequence
  Description of Artificial Sequence: Synthetic oligonucleotide
  Sense strand starting at position 1092 of SEQ ID NO: 1242316
ugcuuaauguaacuuaaga

SEQ ID NO: 1338069 - RNA, 19 nt, Artificial Sequence
  Description of Artificial Sequence: Synthetic oligonucleotide
  Antisense strand to SEQ ID NO: 1338068
ucuuaaguuacauuaagca

SEQ ID NO: 1338070 - RNA, 19 nt, Artificial Sequence
  Description of Artificial Sequence: Synthetic oligonucleotide
  Sense strand starting at position 1116 of SEQ ID NO: 1242316
uuaaguucucugugcaacu

SEQ ID NO: 1338071 - RNA, 19 nt, Artificial Sequence
  Description of Artificial Sequence: Synthetic oligonucleotide
  Antisense strand to SEQ ID NO: 1338070
aguugcacagagaacuuaa

SEQ ID NO: 1338072 - RNA, 19 nt, Artificial Sequence
  Description of Artificial Sequence: Synthetic oligonucleotide
  Sense strand starting at position 1593 of SEQ ID NO: 1242316
gcccgagaucugcagauga

SEQ ID NO: 1338073 - RNA, 19 nt, Artificial Sequence
  Description of Artificial Sequence: Synthetic oligonucleotide
  Antisense strand to SEQ ID NO: 1338072
ucaucugcagaucucgggc

SEQ ID NO: 1338074 - RNA, 19 nt, Artificial Sequence
  Description of Artificial Sequence: Synthetic oligonucleotide
  Sense strand starting at position 1763 of SEQ ID NO: 1242316
ggccuuuaccuguacguca

SEQ ID NO: 1338075 - RNA, 19 nt, Artificial Sequence
  Description of Artificial Sequence: Synthetic oligonucleotide
  Antisense strand to SEQ ID NO: 1338074
ugacguacagguaaaggcc

SEQ ID NO: 1338076 - RNA, 19 nt, Artificial Sequence
  Description of Artificial Sequence: Synthetic oligonucleotide
  Sense strand starting at position 2297 of SEQ ID NO: 1242316
gcauucuguuuacugagua

SEQ ID NO: 1338077 - RNA, 19 nt, Artificial Sequence
  Description of Artificial Sequence: Synthetic oligonucleotide
  Antisense strand to SEQ ID NO: 1338076
uacucaguaaacagaaugc

SEQ ID NO: 1338078 - RNA, 19 nt, Artificial Sequence
  Description of Artificial Sequence: Synthetic oligonucleotide
  Sense strand starting at position 2301 of SEQ ID NO: 1242316
ucuguuuacugaguaccua

SEQ ID NO: 1338079 - RNA, 19 nt, Artificial Sequence
  Description of Artificial Sequence: Synthetic oligonucleotide
  Antisense strand to SEQ ID NO: 1338078
uagguacucaguaaacaga

SEQ ID NO: 1338080 - RNA, 19 nt, Artificial Sequence
  Description of Artificial Sequence: Synthetic oligonucleotide
  Sense strand starting at position 2371 of SEQ ID NO: 1242316
agucccuucugucuuagaa

SEQ ID NO: 1338081 - RNA, 19 nt, Artificial Sequence
  Description of Artificial Sequence: Synthetic oligonucleotide
  Antisense strand to SEQ ID NO: 1338080
uucuaagacagaagggacu

SEQ ID NO: 1338082 - RNA, 19 nt, Artificial Sequence
  Description of Artificial Sequence: Synthetic oligonucleotide
  Sense strand starting at position 2406 of SEQ ID NO: 1242316
agaugcaaguaauuacaga

SEQ ID NO: 1338083 - RNA, 19 nt, Artificial Sequence
  Description of Artificial Sequence: Synthetic oligonucleotide
  Antisense strand to SEQ ID NO: 1338082
ucuguaauuacuugcaucu

SEQ ID NO: 1338084 - RNA, 19 nt, Artificial Sequence
  Description of Artificial Sequence: Synthetic oligonucleotide
  Sense strand starting at position 2531 of SEQ ID NO: 1242316
guaggugaugauggaaaua

SEQ ID NO: 1338085 - RNA, 19 nt, Artificial Sequence
  Description of Artificial Sequence: Synthetic oligonucleotide
  Antisense strand to SEQ ID NO: 1338084
uauuuccaucaucaccuac

SEQ ID NO: 1338086 - RNA, 19 nt, Artificial Sequence
  Description of Artificial Sequence: Synthetic oligonucleotide
  Sense strand starting at position 2551 of SEQ ID NO: 1242316
ugcacauugcgcucuuuaa

SEQ ID NO: 1338087 - RNA, 19 nt, Artificial Sequence
  Description of Artificial Sequence: Synthetic oligonucleotide
  Antisense strand to SEQ ID NO: 1338086
uuaaagagcgcaaugugca

SEQ ID NO: 1338088 - RNA, 19 nt, Artificial Sequence
  Description of Artificial Sequence: Synthetic oligonucleotide
  Sense strand starting at position 2552 of SEQ ID NO: 1242316
gcacauugcgcucuuuaau

SEQ ID NO: 1338089 - RNA, 19 nt, Artificial Sequence
  Description of Artificial Sequence: Synthetic oligonucleotide
  Antisense strand to SEQ ID NO: 1338088
auuaaagagcgcaaugugc

SEQ ID NO: 1338090 - RNA, 19 nt, Artificial Sequence
  Description of Artificial Sequence: Synthetic oligonucleotide
  Sense strand starting at position 3000 of SEQ ID NO: 1242316
ggcuauucuauuggacagu

SEQ ID NO: 1338091 - RNA, 19 nt, Artificial Sequence
  Description of Artificial Sequence: Synthetic oligonucleotide
  Antisense strand to SEQ ID NO: 1338090
acuguccaauagaauagcc

SEQ ID NO: 1338092 - RNA, 19 nt, Artificial Sequence
  Description of Artificial Sequence: Synthetic oligonucleotide
  Sense strand starting at position 3114 of SEQ ID NO: 1242316
ccaaguucuucugcagaga

SEQ ID NO: 1338093 - RNA, 19 nt, Artificial Sequence
  Description of Artificial Sequence: Synthetic oligonucleotide
  Antisense strand to SEQ ID NO: 1338092
ucucugcagaagaacuugg

SEQ ID NO: 1338094 - RNA, 19 nt, Artificial Sequence
  Description of Artificial Sequence: Synthetic oligonucleotide
  Sense strand starting at position 3115 of SEQ ID NO: 1242316
caaguucuucugcagagaa

SEQ ID NO: 1338095 - RNA, 19 nt, Artificial Sequence
  Description of Artificial Sequence: Synthetic oligonucleotide
  Antisense strand to SEQ ID NO: 1338094
uucucugcagaagaacuug

SEQ ID NO: 1338096 - RNA, 19 nt, Artificial Sequence
  Description of Artificial Sequence: Synthetic oligonucleotide
  Sense strand starting at position 3117 of SEQ ID NO: 1242316
aguucuucugcagagaaga

SEQ ID NO: 1338097 - RNA, 19 nt, Artificial Sequence
  Description of Artificial Sequence: Synthetic oligonucleotide
  Antisense strand to SEQ ID NO: 1338096
ucuucucugcagaagaacu

SEQ ID NO: 1338098 - RNA, 19 nt, Artificial Sequence
  Description of Artificial Sequence: Synthetic oligonucleotide
  Sense strand starting at position 3214 of SEQ ID NO: 1242316
ccauuuauuuagcaaagug

SEQ ID NO: 1338099 - RNA, 19 nt, Artificial Sequence
  Description of Artificial Sequence: Synthetic oligonucleotide
  Antisense strand to SEQ ID NO: 1338098
cacuuugcuaaauaaaugg

SEQ ID NO: 1338100 - RNA, 19 nt, Artificial Sequence
  Description of Artificial Sequence: Synthetic oligonucleotide
  Sense strand starting at position 3222 of SEQ ID NO: 1242316
uuagcaaagugauucuauu

SEQ ID NO: 1338101 - RNA, 19 nt, Artificial Sequence
  Description of Artificial Sequence: Synthetic oligonucleotide
  Antisense strand to SEQ ID NO: 1338100
aauagaaucacuuugcuaa

SEQ ID NO: 1338102 - RNA, 19 nt, Artificial Sequence
  Description of Artificial Sequence: Synthetic oligonucleotide
  Sense strand starting at position 3248 of SEQ ID NO: 1242316
guuuguuuagcagagggau

SEQ ID NO: 1338103 - RNA, 19 nt, Artificial Sequence
  Description of Artificial Sequence: Synthetic oligonucleotide
  Antisense strand to SEQ ID NO: 1338102
aucccucugcuaaacaaac

SEQ ID NO: 1338104 - RNA, 19 nt, Artificial Sequence
  Description of Artificial Sequence: Synthetic oligonucleotide
  Sense strand starting at position 3251 of SEQ ID NO: 1242316
uguuuagcagagggaucua

SEQ ID NO: 1338105 - RNA, 19 nt, Artificial Sequence
  Description of Artificial Sequence: Synthetic oligonucleotide
  Antisense strand to SEQ ID NO: 1338104
uagaucccucugcuaaaca

SEQ ID NO: 1338106 - RNA, 19 nt, Artificial Sequence
  Description of Artificial Sequence: Synthetic oligonucleotide
  Sense strand starting at position 3285 of SEQ ID NO: 1242316
ucugcuagcucucuggaaa

SEQ ID NO: 1338107 - RNA, 19 nt, Artificial Sequence
  Description of Artificial Sequence: Synthetic oligonucleotide
  Antisense strand to SEQ ID NO: 1338106
uuuccagagagcuagcaga

SEQ ID NO: 1338108 - RNA, 19 nt, Artificial Sequence
  Description of Artificial Sequence: Synthetic oligonucleotide
  Sense strand starting at position 3286 of SEQ ID NO: 1242316
cugcuagcucucuggaaac

SEQ ID NO: 1338109 - RNA, 19 nt, Artificial Sequence
  Description of Artificial Sequence: Synthetic oligonucleotide
  Antisense strand to SEQ ID NO: 1338108
guuuccagagagcuagcag

SEQ ID NO: 1338110 - RNA, 19 nt, Artificial Sequence
  Description of Artificial Sequence: Synthetic oligonucleotide
  Sense strand starting at position 3288 of SEQ ID NO: 1242316
gcuagcucucuggaaacau

SEQ ID NO: 1338111 - RNA, 19 nt, Artificial Sequence
  Description of Artificial Sequence: Synthetic oligonucleotide
  Antisense strand to SEQ ID NO: 1338110
auguuuccagagagcuagc

SEQ ID NO: 1338112 - RNA, 19 nt, Artificial Sequence
  Description of Artificial Sequence: Synthetic oligonucleotide
  Sense strand starting at position 3370 of SEQ ID NO: 1242316
caaagaguuuaugaugaua

SEQ ID NO: 1338113 - RNA, 19 nt, Artificial Sequence
  Description of Artificial Sequence: Synthetic oligonucleotide
  Antisense strand to SEQ ID NO: 1338112
uaucaucauaaacucuuug

SEQ ID NO: 1338114 - RNA, 19 nt, Artificial Sequence
  Description of Artificial Sequence: Synthetic oligonucleotide
  Sense strand starting at position 3375 of SEQ ID NO: 1242316
aguuuaugaugauaggaac

SEQ ID NO: 1338115 - RNA, 19 nt, Artificial Sequence
  Description of Artificial Sequence: Synthetic oligonucleotide
  Antisense strand to SEQ ID NO: 1338114
guuccuaucaucauaaacu

SEQ ID NO: 1338116 - RNA, 19 nt, Artificial Sequence
  Description of Artificial Sequence: Synthetic oligonucleotide
  Sense strand starting at position 3403 of SEQ ID NO: 1242316
ugggaaccauugucagaca

SEQ ID NO: 1338117 - RNA, 19 nt, Artificial Sequence
  Description of Artificial Sequence: Synthetic oligonucleotide
  Antisense strand to SEQ ID NO: 1338116
ugucugacaaugguuccca

SEQ ID NO: 1338118 - RNA, 19 nt, Artificial Sequence
  Description of Artificial Sequence: Synthetic oligonucleotide
  Sense strand starting at position 3404 of SEQ ID NO: 1242316
gggaaccauugucagacau

SEQ ID NO: 1338119 - RNA, 19 nt, Artificial Sequence
  Description of Artificial Sequence: Synthetic oligonucleotide
  Antisense strand to SEQ ID NO: 1338118
augucugacaaugguuccc

SEQ ID NO: 1338120 - RNA, 19 nt, Artificial Sequence
  Description of Artificial Sequence: Synthetic oligonucleotide
  Sense strand starting at position 3415 of SEQ ID NO: 1242316
ucagacauuugagagccaa

SEQ ID NO: 1338121 - RNA, 19 nt, Artificial Sequence
  Description of Artificial Sequence: Synthetic oligonucleotide
  Antisense strand to SEQ ID NO: 1338120
uuggcucucaaaugucuga

SEQ ID NO: 1338122 - RNA, 19 nt, Artificial Sequence
  Description of Artificial Sequence: Synthetic oligonucleotide
  Sense strand starting at position 3451 of SEQ ID NO: 1242316
gugaaaugcgaguaggaau

SEQ ID NO: 1338123 - RNA, 19 nt, Artificial Sequence
  Description of Artificial Sequence: Synthetic oligonucleotide
  Antisense strand to SEQ ID NO: 1338122
auuccuacucgcauuucac

SEQ ID NO: 1338124 - RNA, 19 nt, Artificial Sequence
  Description of Artificial Sequence: Synthetic oligonucleotide
  Sense strand starting at position 3551 of SEQ ID NO: 1242316
agcgucucacgcguguaau

SEQ ID NO: 1338125 - RNA, 19 nt, Artificial Sequence
  Description of Artificial Sequence: Synthetic oligonucleotide
  Antisense strand to SEQ ID NO: 1338124
auuacacgcgugagacgcu

SEQ ID NO: 1338126 - RNA, 19 nt, Artificial Sequence
  Description of Artificial Sequence: Synthetic oligonucleotide
  Sense strand starting at position 3834 of SEQ ID NO: 1242316
gaaggagguucugcugcua

SEQ ID NO: 1338127 - RNA, 19 nt, Artificial Sequence
  Description of Artificial Sequence: Synthetic oligonucleotide
  Antisense strand to SEQ ID NO: 1338126
uagcagcagaaccuccuuc

SEQ ID NO: 1338128 - RNA, 19 nt, Artificial Sequence
  Description of Artificial Sequence: Synthetic oligonucleotide
  Sense strand starting at position 3843 of SEQ ID NO: 1242316
ucugcugcuagggauuaaa

SEQ ID NO: 1338129 - RNA, 19 nt, Artificial Sequence
  Description of Artificial Sequence: Synthetic oligonucleotide
  Antisense strand to SEQ ID NO: 1338128
uuuaaucccuagcagcaga

SEQ ID NO: 1338130 - RNA, 19 nt, Artificial Sequence
  Description of Artificial Sequence: Synthetic oligonucleotide
  Sense strand starting at position 3910 of SEQ ID NO: 1242316
uuaggaaagucuuuguuug

SEQ ID NO: 1338131 - RNA, 19 nt, Artificial Sequence
  Description of Artificial Sequence: Synthetic oligonucleotide
  Antisense strand to SEQ ID NO: 1338130
caaacaaagacuuuccuaa

SEQ ID NO: 1338132 - RNA, 19 nt, Artificial Sequence
  Description of Artificial Sequence: Synthetic oligonucleotide
  Sense strand starting at position 3973 of SEQ ID NO: 1242316
caaggaaguuuguuaaccu

SEQ ID NO: 1338133 - RNA, 19 nt, Artificial Sequence
  Description of Artificial Sequence: Synthetic oligonucleotide
  Antisense strand to SEQ ID NO: 1338132
agguuaacaaacuuccuug

SEQ ID NO: 1338134 - RNA, 19 nt, Artificial Sequence
  Description of Artificial Sequence: Synthetic oligonucleotide
  Sense strand starting at position 3980 of SEQ ID NO: 1242316
guuuguuaaccuggagauu

SEQ ID NO: 1338135 - RNA, 19 nt, Artificial Sequence
  Description of Artificial Sequence: Synthetic oligonucleotide
  Antisense strand to SEQ ID NO: 1338134
aaucuccagguuaacaaac

SEQ ID NO: 1338136 - RNA, 19 nt, Artificial Sequence
  Description of Artificial Sequence: Synthetic oligonucleotide
  Sense strand starting at position 3983 of SEQ ID NO: 1242316
uguuaaccuggagauuagu

SEQ ID NO: 1338137 - RNA, 19 nt, Artificial Sequence
  Description of Artificial Sequence: Synthetic oligonucleotide
  Antisense strand to SEQ ID NO: 1338136
acuaaucuccagguuaaca

SEQ ID NO: 1338138 - RNA, 19 nt, Artificial Sequence
  Description of Artificial Sequence: Synthetic oligonucleotide
  Sense strand starting at position 72 of SEQ ID NO: 1242317
cuucccaauucuggcagaa

SEQ ID NO: 1338139 - RNA, 19 nt, Artificial Sequence
  Description of Artificial Sequence: Synthetic oligonucleotide
  Antisense strand to SEQ ID NO: 1338138
uucugccagaauugggaag

SEQ ID NO: 1338140 - RNA, 19 nt, Artificial Sequence
  Description of Artificial Sequence: Synthetic oligonucleotide
  Sense strand starting at position 74 of SEQ ID NO: 1242317
ucccaauucuggcagaaug

SEQ ID NO: 1338141 - RNA, 19 nt, Artificial Sequence
  Description of Artificial Sequence: Synthetic oligonucleotide
  Antisense strand to SEQ ID NO: 1338140
cauucugccagaauuggga

SEQ ID NO: 1338142 - RNA, 19 nt, Artificial Sequence
  Description of Artificial Sequence: Synthetic oligonucleotide
  Sense strand starting at position 340 of SEQ ID NO: 1242317
agccaauaauaguuuguaa

SEQ ID NO: 1338143 - RNA, 19 nt, Artificial Sequence
  Description of Artificial Sequence: Synthetic oligonucleotide
  Antisense strand to SEQ ID NO: 1338142
uuacaaacuauuauuggcu

SEQ ID NO: 1338144 - RNA, 19 nt, Artificial Sequence
  Description of Artificial Sequence: Synthetic oligonucleotide
  Sense strand starting at position 394 of SEQ ID NO: 1242317
aaaugugguccuuggaaac

SEQ ID NO: 1338145 - RNA, 19 nt, Artificial Sequence
  Description of Artificial Sequence: Synthetic oligonucleotide
  Antisense strand to SEQ ID NO: 1338144
guuuccaaggaccacauuu

SEQ ID NO: 1338146 - RNA, 19 nt, Artificial Sequence
  Description of Artificial Sequence: Synthetic oligonucleotide
  Sense strand starting at position 416 of SEQ ID NO: 1242317
agcuguagagcuugaaaug

SEQ ID NO: 1338147 - RNA, 19 nt, Artificial Sequence
  Description of Artificial Sequence: Synthetic oligonucleotide
  Antisense strand to SEQ ID NO: 1338146
cauuucaagcucuacagcu

SEQ ID NO: 1338148 - RNA, 19 nt, Artificial Sequence
  Description of Artificial Sequence: Synthetic oligonucleotide
  Sense strand starting at position 514 of SEQ ID NO: 1242317
acuauaaucgagcauagcu

SEQ ID NO: 1338149 - RNA, 19 nt, Artificial Sequence
  Description of Artificial Sequence: Synthetic oligonucleotide
  Antisense strand to SEQ ID NO: 1338148
agcuaugcucgauuauagu

SEQ ID NO: 1338150 - RNA, 19 nt, Artificial Sequence
  Description of Artificial Sequence: Synthetic oligonucleotide
  Sense strand starting at position 608 of SEQ ID NO: 1242317
ucccaucuuccucaggagu

SEQ ID NO: 1338151 - RNA, 19 nt, Artificial Sequence
  Description of Artificial Sequence: Synthetic oligonucleotide
  Antisense strand to SEQ ID NO: 1338150
acuccugaggaagauggga

SEQ ID NO: 1338152 - RNA, 19 nt, Artificial Sequence
  Description of Artificial Sequence: Synthetic oligonucleotide
  Sense strand starting at position 711 of SEQ ID NO: 1242317
aacuaaaggucauaggcuu

SEQ ID NO: 1338153 - RNA, 19 nt, Artificial Sequence
  Description of Artificial Sequence: Synthetic oligonucleotide
  Antisense strand to SEQ ID NO: 1338152
aagccuaugaccuuuaguu

SEQ ID NO: 1338154 - RNA, 19 nt, Artificial Sequence
  Description of Artificial Sequence: Synthetic oligonucleotide
  Sense strand starting at position 768 of SEQ ID NO: 1242317
uggagacagucagaugaga

SEQ ID NO: 1338155 - RNA, 19 nt, Artificial Sequence
  Description of Artificial Sequence: Synthetic oligonucleotide
  Antisense strand to SEQ ID NO: 1338154
ucucaucugacugucucca

SEQ ID NO: 1338156 - RNA, 19 nt, Artificial Sequence
  Description of Artificial Sequence: Synthetic oligonucleotide
  Sense strand starting at position 870 of SEQ ID NO: 1242317
acgagaagggcuggaucuu

SEQ ID NO: 1338157 - RNA, 19 nt, Artificial Sequence
  Description of Artificial Sequence: Synthetic oligonucleotide
  Antisense strand to SEQ ID NO: 1338156
aagauccagcccuucucgu

SEQ ID NO: 1338158 - RNA, 19 nt, Artificial Sequence
  Description of Artificial Sequence: Synthetic oligonucleotide
  Sense strand starting at position 876 of SEQ ID NO: 1242317
agggcuggaucuuccauaa

SEQ ID NO: 1338159 - RNA, 19 nt, Artificial Sequence
  Description of Artificial Sequence: Synthetic oligonucleotide
  Antisense strand to SEQ ID NO: 1338158
uuauggaagauccagcccu

SEQ ID NO: 1338160 - RNA, 19 nt, Artificial Sequence
  Description of Artificial Sequence: Synthetic oligonucleotide
  Sense strand starting at position 919 of SEQ ID NO: 1242317
cuaagaggcuccucugaaa

SEQ ID NO: 1338161 - RNA, 19 nt, Artificial Sequence
  Description of Artificial Sequence: Synthetic oligonucleotide
  Antisense strand to SEQ ID NO: 1338160
uuucagaggagccucuuag

SEQ ID NO: 1338162 - RNA, 19 nt, Artificial Sequence
  Description of Artificial Sequence: Synthetic oligonucleotide
  Sense strand starting at position 1104 of SEQ ID NO: 1242317
ucugcaaaucucgggaaga

SEQ ID NO: 1338163 - RNA, 19 nt, Artificial Sequence
  Description of Artificial Sequence: Synthetic oligonucleotide
  Antisense strand to SEQ ID NO: 1338162
ucuucccgagauuugcaga

SEQ ID NO: 1338164 - RNA, 19 nt, Artificial Sequence
  Description of Artificial Sequence: Synthetic oligonucleotide
  Sense strand starting at position 1105 of SEQ ID NO: 1242317
cugcaaaucucgggaagaa

SEQ ID NO: 1338165 - RNA, 19 nt, Artificial Sequence
  Description of Artificial Sequence: Synthetic oligonucleotide
  Antisense strand to SEQ ID NO: 1338164
uucuucccgagauuugcag

SEQ ID NO: 1338166 - RNA, 19 nt, Artificial Sequence
  Description of Artificial Sequence: Synthetic oligonucleotide
  Sense strand starting at position 1189 of SEQ ID NO: 1242317
gcugguaagccucggcgaa

SEQ ID NO: 1338167 - RNA, 19 nt, Artificial Sequence
  Description of Artificial Sequence: Synthetic oligonucleotide
  Antisense strand to SEQ ID NO: 1338166
uucgccgaggcuuaccagc

SEQ ID NO: 1338168 - RNA, 19 nt, Artificial Sequence
  Description of Artificial Sequence: Synthetic oligonucleotide
  Sense strand starting at position 1190 of SEQ ID NO: 1242317
cugguaagccucggcgaaa

SEQ ID NO: 1338169 - RNA, 19 nt, Artificial Sequence
  Description of Artificial Sequence: Synthetic oligonucleotide
  Antisense strand to SEQ ID NO: 1338168
uuucgccgaggcuuaccag

SEQ ID NO: 1338170 - RNA, 19 nt, Artificial Sequence
  Description of Artificial Sequence: Synthetic oligonucleotide
  Sense strand starting at position 1193 of SEQ ID NO: 1242317
guaagccucggcgaaagaa

SEQ ID NO: 1338171 - RNA, 19 nt, Artificial Sequence
  Description of Artificial Sequence: Synthetic oligonucleotide
  Antisense strand to SEQ ID NO: 1338170
uucuuucgccgaggcuuac

SEQ ID NO: 1338172 - RNA, 19 nt, Artificial Sequence
  Description of Artificial Sequence: Synthetic oligonucleotide
  Sense strand starting at position 1642 of SEQ ID NO: 1242317
gccgcuucugcuuccuuaa

SEQ ID NO: 1338173 - RNA, 19 nt, Artificial Sequence
  Description of Artificial Sequence: Synthetic oligonucleotide
  Antisense strand to SEQ ID NO: 1338172
uuaaggaagcagaagcggc

SEQ ID NO: 1338174 - RNA, 19 nt, Artificial Sequence
  Description of Artificial Sequence: Synthetic oligonucleotide
  Sense strand starting at position 1644 of SEQ ID NO: 1242317
cgcuucugcuuccuuaaga

SEQ ID NO: 1338175 - RNA, 19 nt, Artificial Sequence
  Description of Artificial Sequence: Synthetic oligonucleotide
  Antisense strand to SEQ ID NO: 1338174
ucuuaaggaagcagaagcg

SEQ ID NO: 1338176 - RNA, 19 nt, Artificial Sequence
  Description of Artificial Sequence: Synthetic oligonucleotide
  Sense strand starting at position 1645 of SEQ ID NO: 1242317
gcuucugcuuccuuaagaa

SEQ ID NO: 1338177 - RNA, 19 nt, Artificial Sequence
  Description of Artificial Sequence: Synthetic oligonucleotide
  Antisense strand to SEQ ID NO: 1338176
uucuuaaggaagcagaagc

SEQ ID NO: 1338178 - RNA, 19 nt, Artificial Sequence
  Description of Artificial Sequence: Synthetic oligonucleotide
  Sense strand starting at position 1681 of SEQ ID NO: 1242317
cgcucucuuccgggaggaa

SEQ ID NO: 1338179 - RNA, 19 nt, Artificial Sequence
  Description of Artificial Sequence: Synthetic oligonucleotide
  Antisense strand to SEQ ID NO: 1338178
uuccucccggaagagagcg

SEQ ID NO: 1338180 - RNA, 19 nt, Artificial Sequence
  Description of Artificial Sequence: Synthetic oligonucleotide
  Sense strand starting at position 1682 of SEQ ID NO: 1242317
gcucucuuccgggaggaaa

SEQ ID NO: 1338181 - RNA, 19 nt, Artificial Sequence
  Description of Artificial Sequence: Synthetic oligonucleotide
  Antisense strand to SEQ ID NO: 1338180
uuuccucccggaagagagc

SEQ ID NO: 1338182 - RNA, 19 nt, Artificial Sequence
  Description of Artificial Sequence: Synthetic oligonucleotide
  Sense strand starting at position 1708 of SEQ ID NO: 1242317
uuauauuauucgcuccguu

SEQ ID NO: 1338183 - RNA, 19 nt, Artificial Sequence
  Description of Artificial Sequence: Synthetic oligonucleotide
  Antisense strand to SEQ ID NO: 1338182
aacggagcgaauaauauaa

SEQ ID NO: 1338184 - RNA, 19 nt, Artificial Sequence
  Description of Artificial Sequence: Synthetic oligonucleotide
  Sense strand starting at position 1834 of SEQ ID NO: 1242317
gcgaagggucggcggaaau

SEQ ID NO: 1338185 - RNA, 19 nt, Artificial Sequence
  Description of Artificial Sequence: Synthetic oligonucleotide
  Antisense strand to SEQ ID NO: 1338184
auuuccgccgacccuucgc

SEQ ID NO: 1338186 - RNA, 19 nt, Artificial Sequence
  Description of Artificial Sequence: Synthetic oligonucleotide
  Sense strand starting at position 1835 of SEQ ID NO: 1242317
cgaagggucggcggaaauu

SEQ ID NO: 1338187 - RNA, 19 nt, Artificial Sequence
  Description of Artificial Sequence: Synthetic oligonucleotide
  Antisense strand to SEQ ID NO: 1338186
aauuuccgccgacccuucg

SEQ ID NO: 1338188 - RNA, 19 nt, Artificial Sequence
  Description of Artificial Sequence: Synthetic oligonucleotide
  Sense strand starting at position 2314 of SEQ ID NO: 1242317
aagaguauuucgugaggcu

SEQ ID NO: 1338189 - RNA, 19 nt, Artificial Sequence
  Description of Artificial Sequence: Synthetic oligonucleotide
  Antisense strand to SEQ ID NO: 1338188
agccucacgaaauacucuu

SEQ ID NO: 1338190 - RNA, 19 nt, Artificial Sequence
  Description of Artificial Sequence: Synthetic oligonucleotide
  Sense strand starting at position 2348 of SEQ ID NO: 1242317
ggaggagaauacguucguu

SEQ ID NO: 1338191 - RNA, 19 nt, Artificial Sequence
  Description of Artificial Sequence: Synthetic oligonucleotide
  Antisense strand to SEQ ID NO: 1338190
aacgaacguauucuccucc

SEQ ID NO: 1338192 - RNA, 19 nt, Artificial Sequence
  Description of Artificial Sequence: Synthetic oligonucleotide
  Sense strand starting at position 2352 of SEQ ID NO: 1242317
gagaauacguucguuugca

SEQ ID NO: 1338193 - RNA, 19 nt, Artificial Sequence
  Description of Artificial Sequence: Synthetic oligonucleotide
  Antisense strand to SEQ ID NO: 1338192
ugcaaacgaacguauucuc

SEQ ID NO: 1338194 - RNA, 19 nt, Artificial Sequence
  Description of Artificial Sequence: Synthetic oligonucleotide
  Sense strand starting at position 2353 of SEQ ID NO: 1242317
agaauacguucguuugcaa

SEQ ID NO: 1338195 - RNA, 19 nt, Artificial Sequence
  Description of Artificial Sequence: Synthetic oligonucleotide
  Antisense strand to SEQ ID NO: 1338194
uugcaaacgaacguauucu

SEQ ID NO: 1338196 - RNA, 19 nt, Artificial Sequence
  Description of Artificial Sequence: Synthetic oligonucleotide
  Sense strand starting at position 2356 of SEQ ID NO: 1242317
auacguucguuugcaaauu

SEQ ID NO: 1338197 - RNA, 19 nt, Artificial Sequence
  Description of Artificial Sequence: Synthetic oligonucleotide
  Antisense strand to SEQ ID NO: 1338196
aauuugcaaacgaacguau

SEQ ID NO: 1338198 - RNA, 19 nt, Artificial Sequence
  Description of Artificial Sequence: Synthetic oligonucleotide
  Sense strand starting at position 2367 of SEQ ID NO: 1242317
ugcaaauuaucugcugacu

SEQ ID NO: 1338199 - RNA, 19 nt, Artificial Sequence
  Description of Artificial Sequence: Synthetic oligonucleotide
  Antisense strand to SEQ ID NO: 1338198
agucagcagauaauuugca

SEQ ID NO: 1338200 - RNA, 19 nt, Artificial Sequence
  Description of Artificial Sequence: Synthetic oligonucleotide
  Sense strand starting at position 2415 of SEQ ID NO: 1242317
gccaccuacgcgugagaaa

SEQ ID NO: 1338201 - RNA, 19 nt, Artificial Sequence
  Description of Artificial Sequence: Synthetic oligonucleotide
  Antisense strand to SEQ ID NO: 1338200
uuucucacgcguagguggc

SEQ ID NO: 1338202 - RNA, 19 nt, Artificial Sequence
  Description of Artificial Sequence: Synthetic oligonucleotide
  Sense strand starting at position 2453 of SEQ ID NO: 1242317
ugucgcuugcagccugaaa

SEQ ID NO: 1338203 - RNA, 19 nt, Artificial Sequence
  Description of Artificial Sequence: Synthetic oligonucleotide
  Antisense strand to SEQ ID NO: 1338202
uuucaggcugcaagcgaca

SEQ ID NO: 1338204 - RNA, 19 nt, Artificial Sequence
  Description of Artificial Sequence: Synthetic oligonucleotide
  Sense strand starting at position 2455 of SEQ ID NO: 1242317
ucgcuugcagccugaaaga

SEQ ID NO: 1338205 - RNA, 19 nt, Artificial Sequence
  Description of Artificial Sequence: Synthetic oligonucleotide
  Antisense strand to SEQ ID NO: 1338204
ucuuucaggcugcaagcga

SEQ ID NO: 1338206 - RNA, 19 nt, Artificial Sequence
  Description of Artificial Sequence: Synthetic oligonucleotide
  Sense strand starting at position 2497 of SEQ ID NO: 1242317
ccaggaugcuuagguggaa

SEQ ID NO: 1338207 - RNA, 19 nt, Artificial Sequence
  Description of Artificial Sequence: Synthetic oligonucleotide
  Antisense strand to SEQ ID NO: 1338206
uuccaccuaagcauccugg

SEQ ID NO: 1338208 - RNA, 19 nt, Artificial Sequence
  Description of Artificial Sequence: Synthetic oligonucleotide
  Sense strand starting at position 2572 of SEQ ID NO: 1242317
ucuccagugucgcuaauuu

SEQ ID NO: 1338209 - RNA, 19 nt, Artificial Sequence
  Description of Artificial Sequence: Synthetic oligonucleotide
  Antisense strand to SEQ ID NO: 1338208
aaauuagcgacacuggaga

SEQ ID NO: 1338210 - RNA, 19 nt, Artificial Sequence
  Description of Artificial Sequence: Synthetic oligonucleotide
  Sense strand starting at position 2701 of SEQ ID NO: 1242317
ggguacagucuuggaguca

SEQ ID NO: 1338211 - RNA, 19 nt, Artificial Sequence
  Description of Artificial Sequence: Synthetic oligonucleotide
  Antisense strand to SEQ ID NO: 1338210
ugacuccaagacuguaccc

SEQ ID NO: 1338212 - RNA, 19 nt, Artificial Sequence
  Description of Artificial Sequence: Synthetic oligonucleotide
  Sense strand starting at position 2702 of SEQ ID NO: 1242317
gguacagucuuggagucau

SEQ ID NO: 1338213 - RNA, 19 nt, Artificial Sequence
  Description of Artificial Sequence: Synthetic oligonucleotide
  Antisense strand to SEQ ID NO: 1338212
augacuccaagacuguacc

SEQ ID NO: 1338214 - RNA, 19 nt, Artificial Sequence
  Description of Artificial Sequence: Synthetic oligonucleotide
  Sense strand starting at position 2893 of SEQ ID NO: 1242317
ggugcugugaguugugaug

SEQ ID NO: 1338215 - RNA, 19 nt, Artificial Sequence
  Description of Artificial Sequence: Synthetic oligonucleotide
  Antisense strand to SEQ ID NO: 1338214
caucacaacucacagcacc

SEQ ID NO: 1338216 - RNA, 19 nt, Artificial Sequence
  Description of Artificial Sequence: Synthetic oligonucleotide
  Sense strand starting at position 3742 of SEQ ID NO: 1242317
gucucaaacuccugguaaa

SEQ ID NO: 1338217 - RNA, 19 nt, Artificial Sequence
  Description of Artificial Sequence: Synthetic oligonucleotide
  Antisense strand to SEQ ID NO: 1338216
uuuaccaggaguuugagac

SEQ ID NO: 1338218 - RNA, 19 nt, Artificial Sequence
  Description of Artificial Sequence: Synthetic oligonucleotide
  Sense strand starting at position 40 of SEQ ID NO: 1242318
uguaucuacuguuuaucau

SEQ ID NO: 1338219 - RNA, 19 nt, Artificial Sequence
  Description of Artificial Sequence: Synthetic oligonucleotide
  Antisense strand to SEQ ID NO: 1338218
augauaaacaguagauaca

SEQ ID NO: 1338220 - RNA, 19 nt, Artificial Sequence
  Description of Artificial Sequence: Synthetic oligonucleotide
  Sense strand starting at position 41 of SEQ ID NO: 1242318
guaucuacuguuuaucauu

SEQ ID NO: 1338221 - RNA, 19 nt, Artificial Sequence
  Description of Artificial Sequence: Synthetic oligonucleotide
  Antisense strand to SEQ ID NO: 1338220
aaugauaaacaguagauac

SEQ ID NO: 1338222 - RNA, 19 nt, Artificial Sequence
  Description of Artificial Sequence: Synthetic oligonucleotide
  Sense strand starting at position 89 of SEQ ID NO: 1242318
cuggaugaagauugucuau

SEQ ID NO: 1338223 - RNA, 19 nt, Artificial Sequence
  Description of Artificial Sequence: Synthetic oligonucleotide
  Antisense strand to SEQ ID NO: 1338222
auagacaaucuucauccag

SEQ ID NO: 1338224 - RNA, 19 nt, Artificial Sequence
  Description of Artificial Sequence: Synthetic oligonucleotide
  Sense strand starting at position 91 of SEQ ID NO: 1242318
ggaugaagauugucuaucu

SEQ ID NO: 1338225 - RNA, 19 nt, Artificial Sequence
  Description of Artificial Sequence: Synthetic oligonucleotide
  Antisense strand to SEQ ID NO: 1338224
agauagacaaucuucaucc

SEQ ID NO: 1338226 - RNA, 19 nt, Artificial Sequence
  Description of Artificial Sequence: Synthetic oligonucleotide
  Sense strand starting at position 92 of SEQ ID NO: 1242318
gaugaagauugucuaucug

SEQ ID NO: 1338227 - RNA, 19 nt, Artificial Sequence
  Description of Artificial Sequence: Synthetic oligonucleotide
  Antisense strand to SEQ ID NO: 1338226
cagauagacaaucuucauc

SEQ ID NO: 1338228 - RNA, 19 nt, Artificial Sequence
  Description of Artificial Sequence: Synthetic oligonucleotide
  Sense strand starting at position 122 of SEQ ID NO: 1242318
gcuguaucccaguaacaag

SEQ ID NO: 1338229 - RNA, 19 nt, Artificial Sequence
  Description of Artificial Sequence: Synthetic oligonucleotide
  Antisense strand to SEQ ID NO: 1338228
cuuguuacugggauacagc

SEQ ID NO: 1338230 - RNA, 19 nt, Artificial Sequence
  Description of Artificial Sequence: Synthetic oligonucleotide
  Sense strand starting at position 222 of SEQ ID NO: 1242318
gucuuaaccuuauuaagag

SEQ ID NO: 1338231 - RNA, 19 nt, Artificial Sequence
  Description of Artificial Sequence: Synthetic oligonucleotide
  Antisense strand to SEQ ID NO: 1338230
cucuuaauaagguuaagac

SEQ ID NO: 1338232 - RNA, 19 nt, Artificial Sequence
  Description of Artificial Sequence: Synthetic oligonucleotide
  Sense strand starting at position 255 of SEQ ID NO: 1242318
ccaauuuccggguggcauu

SEQ ID NO: 1338233 - RNA, 19 nt, Artificial Sequence
  Description of Artificial Sequence: Synthetic oligonucleotide
  Antisense strand to SEQ ID NO: 1338232
aaugccacccggaaauugg

SEQ ID NO: 1338234 - RNA, 19 nt, Artificial Sequence
  Description of Artificial Sequence: Synthetic oligonucleotide
  Sense strand starting at position 282 of SEQ ID NO: 1242318
gugaacuuauaugcaguau

SEQ ID NO: 1338235 - RNA, 19 nt, Artificial Sequence
  Description of Artificial Sequence: Synthetic oligonucleotide
  Antisense strand to SEQ ID NO: 1338234
auacugcauauaaguucac

SEQ ID NO: 1338236 - RNA, 19 nt, Artificial Sequence
  Description of Artificial Sequence: Synthetic oligonucleotide
  Sense strand starting at position 286 of SEQ ID NO: 1242318
acuuauaugcaguaucuuu

SEQ ID NO: 1338237 - RNA, 19 nt, Artificial Sequence
  Description of Artificial Sequence: Synthetic oligonucleotide
  Antisense strand to SEQ ID NO: 1338236
aaagauacugcauauaagu

SEQ ID NO: 1338238 - RNA, 19 nt, Artificial Sequence
  Description of Artificial Sequence: Synthetic oligonucleotide
  Sense strand starting at position 310 of SEQ ID NO: 1242318
gacacaugguucccucuga

SEQ ID NO: 1338239 - RNA, 19 nt, Artificial Sequence
  Description of Artificial Sequence: Synthetic oligonucleotide
  Antisense strand to SEQ ID NO: 1338238
ucagagggaaccauguguc

SEQ ID NO: 1338240 - RNA, 19 nt, Artificial Sequence
  Description of Artificial Sequence: Synthetic oligonucleotide
  Sense strand starting at position 311 of SEQ ID NO: 1242318
acacaugguucccucugau

SEQ ID NO: 1338241 - RNA, 19 nt, Artificial Sequence
  Description of Artificial Sequence: Synthetic oligonucleotide
  Antisense strand to SEQ ID NO: 1338240
aucagagggaaccaugugu

SEQ ID NO: 1338242 - RNA, 19 nt, Artificial Sequence
  Description of Artificial Sequence: Synthetic oligonucleotide
  Sense strand starting at position 589 of SEQ ID NO: 1242318
ucuuguguacuccaacuua

SEQ ID NO: 1338243 - RNA, 19 nt, Artificial Sequence
  Description of Artificial Sequence: Synthetic oligonucleotide
  Antisense strand to SEQ ID NO: 1338242
uaaguuggaguacacaaga

SEQ ID NO: 1338244 - RNA, 19 nt, Artificial Sequence
  Description of Artificial Sequence: Synthetic oligonucleotide
  Sense strand starting at position 677 of SEQ ID NO: 1242318
gccuauugugcugucuuga

SEQ ID NO: 1338245 - RNA, 19 nt, Artificial Sequence
  Description of Artificial Sequence: Synthetic oligonucleotide
  Antisense strand to SEQ ID NO: 1338244
ucaagacagcacaauaggc

SEQ ID NO: 1338246 - RNA, 19 nt, Artificial Sequence
  Description of Artificial Sequence: Synthetic oligonucleotide
  Sense strand starting at position 878 of SEQ ID NO: 1242318
ggacuuaggcccggacaga

SEQ ID NO: 1338247 - RNA, 19 nt, Artificial Sequence
  Description of Artificial Sequence: Synthetic oligonucleotide
  Antisense strand to SEQ ID NO: 1338246
ucuguccgggccuaagucc

SEQ ID NO: 1338248 - RNA, 19 nt, Artificial Sequence
  Description of Artificial Sequence: Synthetic oligonucleotide
  Sense strand starting at position 1003 of SEQ ID NO: 1242318
augggauccuucuccuguu

SEQ ID NO: 1338249 - RNA, 19 nt, Artificial Sequence
  Description of Artificial Sequence: Synthetic oligonucleotide
  Antisense strand to SEQ ID NO: 1338248
aacaggagaaggaucccau

SEQ ID NO: 1338250 - RNA, 19 nt, Artificial Sequence
  Description of Artificial Sequence: Synthetic oligonucleotide
  Sense strand starting at position 1015 of SEQ ID NO: 1242318
uccuguucugcugacauua

SEQ ID NO: 1338251 - RNA, 19 nt, Artificial Sequence
  Description of Artificial Sequence: Synthetic oligonucleotide
  Antisense strand to SEQ ID NO: 1338250
uaaugucagcagaacagga

SEQ ID NO: 1338252 - RNA, 19 nt, Artificial Sequence
  Description of Artificial Sequence: Synthetic oligonucleotide
  Sense strand starting at position 1068 of SEQ ID NO: 1242318
ggaauucggucucuuugau

SEQ ID NO: 1338253 - RNA, 19 nt, Artificial Sequence
  Description of Artificial Sequence: Synthetic oligonucleotide
  Antisense strand to SEQ ID NO: 1338252
aucaaagagaccgaauucc

SEQ ID NO: 1338254 - RNA, 19 nt, Artificial Sequence
  Description of Artificial Sequence: Synthetic oligonucleotide
  Sense strand starting at position 1948 of SEQ ID NO: 1242318
guaccaugcgaggaaacuu

SEQ ID NO: 1338255 - RNA, 19 nt, Artificial Sequence
  Description of Artificial Sequence: Synthetic oligonucleotide
  Antisense strand to SEQ ID NO: 1338254
aaguuuccucgcaugguac

SEQ ID NO: 1338256 - RNA, 19 nt, Artificial Sequence
  Description of Artificial Sequence: Synthetic oligonucleotide
  Sense strand starting at position 2046 of SEQ ID NO: 1242318
uggacaccugucuguagaa

SEQ ID NO: 1338257 - RNA, 19 nt, Artificial Sequence
  Description of Artificial Sequence: Synthetic oligonucleotide
  Antisense strand to SEQ ID NO: 1338256
uucuacagacaggugucca

SEQ ID NO: 1338258 - RNA, 19 nt, Artificial Sequence
  Description of Artificial Sequence: Synthetic oligonucleotide
  Sense strand starting at position 2047 of SEQ ID NO: 1242318
ggacaccugucuguagaau

SEQ ID NO: 1338259 - RNA, 19 nt, Artificial Sequence
  Description of Artificial Sequence: Synthetic oligonucleotide
  Antisense strand to SEQ ID NO: 1338258
auucuacagacaggugucc

SEQ ID NO: 1338260 - RNA, 19 nt, Artificial Sequence
  Description of Artificial Sequence: Synthetic oligonucleotide
  Sense strand starting at position 2048 of SEQ ID NO: 1242318
gacaccugucuguagaaug

SEQ ID NO: 1338261 - RNA, 19 nt, Artificial Sequence
  Description of Artificial Sequence: Synthetic oligonucleotide
  Antisense strand to SEQ ID NO: 1338260
cauucuacagacagguguc

SEQ ID NO: 1338262 - RNA, 19 nt, Artificial Sequence
  Description of Artificial Sequence: Synthetic oligonucleotide
  Sense strand starting at position 2102 of SEQ ID NO: 1242318
gaaagagcgacguagaaua

SEQ ID NO: 1338263 - RNA, 19 nt, Artificial Sequence
  Description of Artificial Sequence: Synthetic oligonucleotide
  Antisense strand to SEQ ID NO: 1338262
uauucuacgucgcucuuuc

SEQ ID NO: 1338264 - RNA, 19 nt, Artificial Sequence
  Description of Artificial Sequence: Synthetic oligonucleotide
  Sense strand starting at position 2182 of SEQ ID NO: 1242318
ggaucucauuuagacguua

SEQ ID NO: 1338265 - RNA, 19 nt, Artificial Sequence
  Description of Artificial Sequence: Synthetic oligonucleotide
  Antisense strand to SEQ ID NO: 1338264
uaacgucuaaaugagaucc

SEQ ID NO: 1338266 - RNA, 19 nt, Artificial Sequence
  Description of Artificial Sequence: Synthetic oligonucleotide
  Sense strand starting at position 2225 of SEQ ID NO: 1242318
gugauuguaaauuagaugu

SEQ ID NO: 1338267 - RNA, 19 nt, Artificial Sequence
  Description of Artificial Sequence: Synthetic oligonucleotide
  Antisense strand to SEQ ID NO: 1338266
acaucuaauuuacaaucac

SEQ ID NO: 1338268 - RNA, 19 nt, Artificial Sequence
  Description of Artificial Sequence: Synthetic oligonucleotide
  Sense strand starting at position 2238 of SEQ ID NO: 1242318
agaugugaucaccggucca

SEQ ID NO: 1338269 - RNA, 19 nt, Artificial Sequence
  Description of Artificial Sequence: Synthetic oligonucleotide
  Antisense strand to SEQ ID NO: 1338268
uggaccggugaucacaucu

SEQ ID NO: 1338270 - RNA, 19 nt, Artificial Sequence
  Description of Artificial Sequence: Synthetic oligonucleotide
  Sense strand starting at position 2457 of SEQ ID NO: 1242318
ugguuauccacugggcuua

SEQ ID NO: 1338271 - RNA, 19 nt, Artificial Sequence
  Description of Artificial Sequence: Synthetic oligonucleotide
  Antisense strand to SEQ ID NO: 1338270
uaagcccaguggauaacca

SEQ ID NO: 1338272 - RNA, 19 nt, Artificial Sequence
  Description of Artificial Sequence: Synthetic oligonucleotide
  Sense strand starting at position 2664 of SEQ ID NO: 1242318
cggcugaucgucguuaaga

SEQ ID NO: 1338273 - RNA, 19 nt, Artificial Sequence
  Description of Artificial Sequence: Synthetic oligonucleotide
  Antisense strand to SEQ ID NO: 1338272
ucuuaacgacgaucagccg

SEQ ID NO: 1338274 - RNA, 19 nt, Artificial Sequence
  Description of Artificial Sequence: Synthetic oligonucleotide
  Sense strand starting at position 2697 of SEQ ID NO: 1242318
aggcaaauguuacccuuua

SEQ ID NO: 1338275 - RNA, 19 nt, Artificial Sequence
  Description of Artificial Sequence: Synthetic oligonucleotide
  Antisense strand to SEQ ID NO: 1338274
uaaaggguaacauuugccu

SEQ ID NO: 1338276 - RNA, 19 nt, Artificial Sequence
  Description of Artificial Sequence: Synthetic oligonucleotide
  Sense strand starting at position 2698 of SEQ ID NO: 1242318
ggcaaauguuacccuuuau

SEQ ID NO: 1338277 - RNA, 19 nt, Artificial Sequence
  Description of Artificial Sequence: Synthetic oligonucleotide
  Antisense strand to SEQ ID NO: 1338276
auaaaggguaacauuugcc

SEQ ID NO: 1338278 - RNA, 19 nt, Artificial Sequence
  Description of Artificial Sequence: Synthetic oligonucleotide
  Sense strand starting at position 2718 of SEQ ID NO: 1242318
uaauaaggguggucuggaa

SEQ ID NO: 1338279 - RNA, 19 nt, Artificial Sequence
  Description of Artificial Sequence: Synthetic oligonucleotide
  Antisense strand to SEQ ID NO: 1338278
uuccagaccacccuuauua

SEQ ID NO: 1338280 - RNA, 19 nt, Artificial Sequence
  Description of Artificial Sequence: Synthetic oligonucleotide
  Sense strand starting at position 2808 of SEQ ID NO: 1242318
aggagaagguuccuccuaa

SEQ ID NO: 1338281 - RNA, 19 nt, Artificial Sequence
  Description of Artificial Sequence: Synthetic oligonucleotide
  Antisense strand to SEQ ID NO: 1338280
uuaggaggaaccuucuccu

SEQ ID NO: 1338282 - RNA, 19 nt, Artificial Sequence
  Description of Artificial Sequence: Synthetic oligonucleotide
  Sense strand starting at position 2809 of SEQ ID NO: 1242318
ggagaagguuccuccuaac

SEQ ID NO: 1338283 - RNA, 19 nt, Artificial Sequence
  Description of Artificial Sequence: Synthetic oligonucleotide
  Antisense strand to SEQ ID NO: 1338282
guuaggaggaaccuucucc

SEQ ID NO: 1338284 - RNA, 19 nt, Artificial Sequence
  Description of Artificial Sequence: Synthetic oligonucleotide
  Sense strand starting at position 2815 of SEQ ID NO: 1242318
gguuccuccuaacuagaau

SEQ ID NO: 1338285 - RNA, 19 nt, Artificial Sequence
  Description of Artificial Sequence: Synthetic oligonucleotide
  Antisense strand to SEQ ID NO: 1338284
auucuaguuaggaggaacc

SEQ ID NO: 1338286 - RNA, 19 nt, Artificial Sequence
  Description of Artificial Sequence: Synthetic oligonucleotide
  Sense strand starting at position 2905 of SEQ ID NO: 1242318
cauaguaaguguucgggaa

SEQ ID NO: 1338287 - RNA, 19 nt, Artificial Sequence
  Description of Artificial Sequence: Synthetic oligonucleotide
  Antisense strand to SEQ ID NO: 1338286
uucccgaacacuuacuaug

SEQ ID NO: 1338288 - RNA, 19 nt, Artificial Sequence
  Description of Artificial Sequence: Synthetic oligonucleotide
  Sense strand starting at position 2906 of SEQ ID NO: 1242318
auaguaaguguucgggaaa

SEQ ID NO: 1338289 - RNA, 19 nt, Artificial Sequence
  Description of Artificial Sequence: Synthetic oligonucleotide
  Antisense strand to SEQ ID NO: 1338288
uuucccgaacacuuacuau

SEQ ID NO: 1338290 - RNA, 19 nt, Artificial Sequence
  Description of Artificial Sequence: Synthetic oligonucleotide
  Sense strand starting at position 3006 of SEQ ID NO: 1242318
gccgaagcaaaugguaaua

SEQ ID NO: 1338291 - RNA, 19 nt, Artificial Sequence
  Description of Artificial Sequence: Synthetic oligonucleotide
  Antisense strand to SEQ ID NO: 1338290
uauuaccauuugcuucggc

SEQ ID NO: 1338292 - RNA, 19 nt, Artificial Sequence
  Description of Artificial Sequence: Synthetic oligonucleotide
  Sense strand starting at position 3380 of SEQ ID NO: 1242318
auguuauagggugguugga

SEQ ID NO: 1338293 - RNA, 19 nt, Artificial Sequence
  Description of Artificial Sequence: Synthetic oligonucleotide
  Antisense strand to SEQ ID NO: 1338292
uccaaccacccuauaacau

SEQ ID NO: 1338294 - RNA, 19 nt, Artificial Sequence
  Description of Artificial Sequence: Synthetic oligonucleotide
  Sense strand starting at position 3412 of SEQ ID NO: 1242318
gcacuuugguaagucaaca

SEQ ID NO: 1338295 - RNA, 19 nt, Artificial Sequence
  Description of Artificial Sequence: Synthetic oligonucleotide
  Antisense strand to SEQ ID NO: 1338294
uguugacuuaccaaagugc

SEQ ID NO: 1338296 - RNA, 19 nt, Artificial Sequence
  Description of Artificial Sequence: Synthetic oligonucleotide
  Sense strand starting at position 3766 of SEQ ID NO: 1242318
uuauaacucuuaguggaag

SEQ ID NO: 1338297 - RNA, 19 nt, Artificial Sequence
  Description of Artificial Sequence: Synthetic oligonucleotide
  Antisense strand to SEQ ID NO: 1338296
cuuccacuaagaguuauaa

SEQ ID NO: 1338298 - RNA, 19 nt, Artificial Sequence
  Description of Artificial Sequence: Synthetic oligonucleotide
  Sense strand starting at position 55 of SEQ ID NO: 1242319
cucagauaccuucggcaaa

SEQ ID NO: 1338299 - RNA, 19 nt, Artificial Sequence
  Description of Artificial Sequence: Synthetic oligonucleotide
  Antisense strand to SEQ ID NO: 1338298
uuugccgaagguaucugag

SEQ ID NO: 1338300 - RNA, 19 nt, Artificial Sequence
  Description of Artificial Sequence: Synthetic oligonucleotide
  Sense strand starting at position 147 of SEQ ID NO: 1242319
aguacuuuccaguauggag

SEQ ID NO: 1338301 - RNA, 19 nt, Artificial Sequence
  Description of Artificial Sequence: Synthetic oligonucleotide
  Antisense strand to SEQ ID NO: 1338300
cuccauacuggaaaguacu

SEQ ID NO: 1338302 - RNA, 19 nt, Artificial Sequence
  Description of Artificial Sequence: Synthetic oligonucleotide
  Sense strand starting at position 199 of SEQ ID NO: 1242319
acaguagaauauucugagu

SEQ ID NO: 1338303 - RNA, 19 nt, Artificial Sequence
  Description of Artificial Sequence: Synthetic oligonucleotide
  Antisense strand to SEQ ID NO: 1338302
acucagaauauucuacugu

SEQ ID NO: 1338304 - RNA, 19 nt, Artificial Sequence
  Description of Artificial Sequence: Synthetic oligonucleotide
  Sense strand starting at position 210 of SEQ ID NO: 1242319
uucugagucagaggaguaa

SEQ ID NO: 1338305 - RNA, 19 nt, Artificial Sequence
  Description of Artificial Sequence: Synthetic oligonucleotide
  Antisense strand to SEQ ID NO: 1338304
uuacuccucugacucagaa

SEQ ID NO: 1338306 - RNA, 19 nt, Artificial Sequence
  Description of Artificial Sequence: Synthetic oligonucleotide
  Sense strand starting at position 227 of SEQ ID NO: 1242319
aagagaugauaagaguaua

SEQ ID NO: 1338307 - RNA, 19 nt, Artificial Sequence
  Description of Artificial Sequence: Synthetic oligonucleotide
  Antisense strand to SEQ ID NO: 1338306
uauacucuuaucaucucuu

SEQ ID NO: 1338308 - RNA, 19 nt, Artificial Sequence
  Description of Artificial Sequence: Synthetic oligonucleotide
  Sense strand starting at position 246 of SEQ ID NO: 1242319
acagcagacuaguuaguau

SEQ ID NO: 1338309 - RNA, 19 nt, Artificial Sequence
  Description of Artificial Sequence: Synthetic oligonucleotide
  Antisense strand to SEQ ID NO: 1338308
auacuaacuagucugcugu

SEQ ID NO: 1338310 - RNA, 19 nt, Artificial Sequence
  Description of Artificial Sequence: Synthetic oligonucleotide
  Sense strand starting at position 249 of SEQ ID NO: 1242319
gcagacuaguuaguauaac

SEQ ID NO: 1338311 - RNA, 19 nt, Artificial Sequence
  Description of Artificial Sequence: Synthetic oligonucleotide
  Antisense strand to SEQ ID NO: 1338310
guuauacuaacuagucugc

SEQ ID NO: 1338312 - RNA, 19 nt, Artificial Sequence
  Description of Artificial Sequence: Synthetic oligonucleotide
  Sense strand starting at position 304 of SEQ ID NO: 1242319
uccugcuugguuuagucaa

SEQ ID NO: 1338313 - RNA, 19 nt, Artificial Sequence
  Description of Artificial Sequence: Synthetic oligonucleotide
  Antisense strand to SEQ ID NO: 1338312
uugacuaaaccaagcagga

SEQ ID NO: 1338314 - RNA, 19 nt, Artificial Sequence
  Description of Artificial Sequence: Synthetic oligonucleotide
  Sense strand starting at position 437 of SEQ ID NO: 1242319
aucuuuguucggcacacua

SEQ ID NO: 1338315 - RNA, 19 nt, Artificial Sequence
  Description of Artificial Sequence: Synthetic oligonucleotide
  Antisense strand to SEQ ID NO: 1338314
uagugugccgaacaaagau

SEQ ID NO: 1338316 - RNA, 19 nt, Artificial Sequence
  Description of Artificial Sequence: Synthetic oligonucleotide
  Sense strand starting at position 490 of SEQ ID NO: 1242319
agagcaucagagugagagu

SEQ ID NO: 1338317 - RNA, 19 nt, Artificial Sequence
  Description of Artificial Sequence: Synthetic oligonucleotide
  Antisense strand to SEQ ID NO: 1338316
acucucacucugaugcucu

SEQ ID NO: 1338318 - RNA, 19 nt, Artificial Sequence
  Description of Artificial Sequence: Synthetic oligonucleotide
  Sense strand starting at position 537 of SEQ ID NO: 1242319
uguacucucuucucauuga

SEQ ID NO: 1338319 - RNA, 19 nt, Artificial Sequence
  Description of Artificial Sequence: Synthetic oligonucleotide
  Antisense strand to SEQ ID NO: 1338318
ucaaugagaagagaguaca

SEQ ID NO: 1338320 - RNA, 19 nt, Artificial Sequence
  Description of Artificial Sequence: Synthetic oligonucleotide
  Sense strand starting at position 596 of SEQ ID NO: 1242319
ggauuccuuccggacucaa

SEQ ID NO: 1338321 - RNA, 19 nt, Artificial Sequence
  Description of Artificial Sequence: Synthetic oligonucleotide
  Antisense strand to SEQ ID NO: 1338320
uugaguccggaaggaaucc

SEQ ID NO: 1338322 - RNA, 19 nt, Artificial Sequence
  Description of Artificial Sequence: Synthetic oligonucleotide
  Sense strand starting at position 650 of SEQ ID NO: 1242319
ccaauauguucuguccaag

SEQ ID NO: 1338323 - RNA, 19 nt, Artificial Sequence
  Description of Artificial Sequence: Synthetic oligonucleotide
  Antisense strand to SEQ ID NO: 1338322
cuuggacagaacauauugg

SEQ ID NO: 1338324 - RNA, 19 nt, Artificial Sequence
  Description of Artificial Sequence: Synthetic oligonucleotide
  Sense strand starting at position 751 of SEQ ID NO: 1242319
gggaaagguauguggcuaa

SEQ ID NO: 1338325 - RNA, 19 nt, Artificial Sequence
  Description of Artificial Sequence: Synthetic oligonucleotide
  Antisense strand to SEQ ID NO: 1338324
uuagccacauaccuuuccc

SEQ ID NO: 1338326 - RNA, 19 nt, Artificial Sequence
  Description of Artificial Sequence: Synthetic oligonucleotide
  Sense strand starting at position 754 of SEQ ID NO: 1242319
aaagguauguggcuaacua

SEQ ID NO: 1338327 - RNA, 19 nt, Artificial Sequence
  Description of Artificial Sequence: Synthetic oligonucleotide
  Antisense strand to SEQ ID NO: 1338326
uaguuagccacauaccuuu

SEQ ID NO: 1338328 - RNA, 19 nt, Artificial Sequence
  Description of Artificial Sequence: Synthetic oligonucleotide
  Sense strand starting at position 1116 of SEQ ID NO: 1242319
gggagcucuaaacacgauu

SEQ ID NO: 1338329 - RNA, 19 nt, Artificial Sequence
  Description of Artificial Sequence: Synthetic oligonucleotide
  Antisense strand to SEQ ID NO: 1338328
aaucguguuuagagcuccc

SEQ ID NO: 1338330 - RNA, 19 nt, Artificial Sequence
  Description of Artificial Sequence: Synthetic oligonucleotide
  Sense strand starting at position 1540 of SEQ ID NO: 1242319
gggaaaggaauucgacgau

SEQ ID NO: 1338331 - RNA, 19 nt, Artificial Sequence
  Description of Artificial Sequence: Synthetic oligonucleotide
  Antisense strand to SEQ ID NO: 1338330
aucgucgaauuccuuuccc

SEQ ID NO: 1338332 - RNA, 19 nt, Artificial Sequence
  Description of Artificial Sequence: Synthetic oligonucleotide
  Sense strand starting at position 1543 of SEQ ID NO: 1242319
aaaggaauucgacgaugug

SEQ ID NO: 1338333 - RNA, 19 nt, Artificial Sequence
  Description of Artificial Sequence: Synthetic oligonucleotide
  Antisense strand to SEQ ID NO: 1338332
cacaucgucgaauuccuuu

SEQ ID NO: 1338334 - RNA, 19 nt, Artificial Sequence
  Description of Artificial Sequence: Synthetic oligonucleotide
  Sense strand starting at position 1546 of SEQ ID NO: 1242319
ggaauucgacgauguggga

SEQ ID NO: 1338335 - RNA, 19 nt, Artificial Sequence
  Description of Artificial Sequence: Synthetic oligonucleotide
  Antisense strand to SEQ ID NO: 1338334
ucccacaucgucgaauucc

SEQ ID NO: 1338336 - RNA, 19 nt, Artificial Sequence
  Description of Artificial Sequence: Synthetic oligonucleotide
  Sense strand starting at position 1729 of SEQ ID NO: 1242319
gagggaggccuauaucagu

SEQ ID NO: 1338337 - RNA, 19 nt, Artificial Sequence
  Description of Artificial Sequence: Synthetic oligonucleotide
  Antisense strand to SEQ ID NO: 1338336
acugauauaggccucccuc

SEQ ID NO: 1338338 - RNA, 19 nt, Artificial Sequence
  Description of Artificial Sequence: Synthetic oligonucleotide
  Sense strand starting at position 2116 of SEQ ID NO: 1242319
agcuuuagucgcuaaagga

SEQ ID NO: 1338339 - RNA, 19 nt, Artificial Sequence
  Description of Artificial Sequence: Synthetic oligonucleotide
  Antisense strand to SEQ ID NO: 1338338
uccuuuagcgacuaaagcu

SEQ ID NO: 1338340 - RNA, 19 nt, Artificial Sequence
  Description of Artificial Sequence: Synthetic oligonucleotide
  Sense strand starting at position 2193 of SEQ ID NO: 1242319
ugcucauuucucgagcuac

SEQ ID NO: 1338341 - RNA, 19 nt, Artificial Sequence
  Description of Artificial Sequence: Synthetic oligonucleotide
  Antisense strand to SEQ ID NO: 1338340
guagcucgagaaaugagca

SEQ ID NO: 1338342 - RNA, 19 nt, Artificial Sequence
  Description of Artificial Sequence: Synthetic oligonucleotide
  Sense strand starting at position 2451 of SEQ ID NO: 1242319
gucacuaaguaauugaaca

SEQ ID NO: 1338343 - RNA, 19 nt, Artificial Sequence
  Description of Artificial Sequence: Synthetic oligonucleotide
  Antisense strand to SEQ ID NO: 1338342
uguucaauuacuuagugac

SEQ ID NO: 1338344 - RNA, 19 nt, Artificial Sequence
  Description of Artificial Sequence: Synthetic oligonucleotide
  Sense strand starting at position 2713 of SEQ ID NO: 1242319
acucacuccucuccggaaa

SEQ ID NO: 1338345 - RNA, 19 nt, Artificial Sequence
  Description of Artificial Sequence: Synthetic oligonucleotide
  Antisense strand to SEQ ID NO: 1338344
uuuccggagaggagugagu

SEQ ID NO: 1338346 - RNA, 19 nt, Artificial Sequence
  Description of Artificial Sequence: Synthetic oligonucleotide
  Sense strand starting at position 2714 of SEQ ID NO: 1242319
cucacuccucuccggaaau

SEQ ID NO: 1338347 - RNA, 19 nt, Artificial Sequence
  Description of Artificial Sequence: Synthetic oligonucleotide
  Antisense strand to SEQ ID NO: 1338346
auuuccggagaggagugag

SEQ ID NO: 1338348 - RNA, 19 nt, Artificial Sequence
  Description of Artificial Sequence: Synthetic oligonucleotide
  Sense strand starting at position 2792 of SEQ ID NO: 1242319
ucaagaacuugaguccuau

SEQ ID NO: 1338349 - RNA, 19 nt, Artificial Sequence
  Description of Artificial Sequence: Synthetic oligonucleotide
  Antisense strand to SEQ ID NO: 1338348
auaggacucaaguucuuga

SEQ ID NO: 1338350 - RNA, 19 nt, Artificial Sequence
  Description of Artificial Sequence: Synthetic oligonucleotide
  Sense strand starting at position 2810 of SEQ ID NO: 1242319
uuuguaggccucuaaucua

SEQ ID NO: 1338351 - RNA, 19 nt, Artificial Sequence
  Description of Artificial Sequence: Synthetic oligonucleotide
  Antisense strand to SEQ ID NO: 1338350
uagauuagaggccuacaaa

SEQ ID NO: 1338352 - RNA, 19 nt, Artificial Sequence
  Description of Artificial Sequence: Synthetic oligonucleotide
  Sense strand starting at position 2862 of SEQ ID NO: 1242319
caagcaaaggaugguaauu

SEQ ID NO: 1338353 - RNA, 19 nt, Artificial Sequence
  Description of Artificial Sequence: Synthetic oligonucleotide
  Antisense strand to SEQ ID NO: 1338352
aauuaccauccuuugcuug

SEQ ID NO: 1338354 - RNA, 19 nt, Artificial Sequence
  Description of Artificial Sequence: Synthetic oligonucleotide
  Sense strand starting at position 2945 of SEQ ID NO: 1242319
cucccuguauuugaagaga

SEQ ID NO: 1338355 - RNA, 19 nt, Artificial Sequence
  Description of Artificial Sequence: Synthetic oligonucleotide
  Antisense strand to SEQ ID NO: 1338354
ucucuucaaauacagggag

SEQ ID NO: 1338356 - RNA, 19 nt, Artificial Sequence
  Description of Artificial Sequence: Synthetic oligonucleotide
  Sense strand starting at position 3035 of SEQ ID NO: 1242319
uuuagacuugugggcaagu

SEQ ID NO: 1338357 - RNA, 19 nt, Artificial Sequence
  Description of Artificial Sequence: Synthetic oligonucleotide
  Antisense strand to SEQ ID NO: 1338356
acuugcccacaagucuaaa

SEQ ID NO: 1338358 - RNA, 19 nt, Artificial Sequence
  Description of Artificial Sequence: Synthetic oligonucleotide
  Sense strand starting at position 3036 of SEQ ID NO: 1242319
uuagacuugugggcaagua

SEQ ID NO: 1338359 - RNA, 19 nt, Artificial Sequence
  Description of Artificial Sequence: Synthetic oligonucleotide
  Antisense strand to SEQ ID NO: 1338358
uacuugcccacaagucuaa

SEQ ID NO: 1338360 - RNA, 19 nt, Artificial Sequence
  Description of Artificial Sequence: Synthetic oligonucleotide
  Sense strand starting at position 3037 of SEQ ID NO: 1242319
uagacuugugggcaaguau

SEQ ID NO: 1338361 - RNA, 19 nt, Artificial Sequence
  Description of Artificial Sequence: Synthetic oligonucleotide
  Antisense strand to SEQ ID NO: 1338360
auacuugcccacaagucua

SEQ ID NO: 1338362 - RNA, 19 nt, Artificial Sequence
  Description of Artificial Sequence: Synthetic oligonucleotide
  Sense strand starting at position 3046 of SEQ ID NO: 1242319
gggcaaguaugccuauaac

SEQ ID NO: 1338363 - RNA, 19 nt, Artificial Sequence
  Description of Artificial Sequence: Synthetic oligonucleotide
  Antisense strand to SEQ ID NO: 1338362
guuauaggcauacuugccc

SEQ ID NO: 1338364 - RNA, 19 nt, Artificial Sequence
  Description of Artificial Sequence: Synthetic oligonucleotide
  Sense strand starting at position 3099 of SEQ ID NO: 1242319
uucccaauuccuggagacu

SEQ ID NO: 1338365 - RNA, 19 nt, Artificial Sequence
  Description of Artificial Sequence: Synthetic oligonucleotide
  Antisense strand to SEQ ID NO: 1338364
agucuccaggaauugggaa

SEQ ID NO: 1338366 - RNA, 19 nt, Artificial Sequence
  Description of Artificial Sequence: Synthetic oligonucleotide
  Sense strand starting at position 3161 of SEQ ID NO: 1242319
ugaaauuaagguugcuuau

SEQ ID NO: 1338367 - RNA, 19 nt, Artificial Sequence
  Description of Artificial Sequence: Synthetic oligonucleotide
  Antisense strand to SEQ ID NO: 1338366
auaagcaaccuuaauuuca

SEQ ID NO: 1338368 - RNA, 19 nt, Artificial Sequence
  Description of Artificial Sequence: Synthetic oligonucleotide
  Sense strand starting at position 3173 of SEQ ID NO: 1242319
ugcuuaucagcugacauua

SEQ ID NO: 1338369 - RNA, 19 nt, Artificial Sequence
  Description of Artificial Sequence: Synthetic oligonucleotide
  Antisense strand to SEQ ID NO: 1338368
uaaugucagcugauaagca

SEQ ID NO: 1338370 - RNA, 19 nt, Artificial Sequence
  Description of Artificial Sequence: Synthetic oligonucleotide
  Sense strand starting at position 3584 of SEQ ID NO: 1242319
gucagagugaugugacuug

SEQ ID NO: 1338371 - RNA, 19 nt, Artificial Sequence
  Description of Artificial Sequence: Synthetic oligonucleotide
  Antisense strand to SEQ ID NO: 1338370
caagucacaucacucugac

SEQ ID NO: 1338372 - RNA, 19 nt, Artificial Sequence
  Description of Artificial Sequence: Synthetic oligonucleotide
  Sense strand starting at position 3773 of SEQ ID NO: 1242319
uugucagaccugugaccua

SEQ ID NO: 1338373 - RNA, 19 nt, Artificial Sequence
  Description of Artificial Sequence: Synthetic oligonucleotide
  Antisense strand to SEQ ID NO: 1338372
uaggucacaggucugacaa

SEQ ID NO: 1338374 - RNA, 19 nt, Artificial Sequence
  Description of Artificial Sequence: Synthetic oligonucleotide
  Sense strand starting at position 3908 of SEQ ID NO: 1242319
aagugauaguaaguuuauc

SEQ ID NO: 1338375 - RNA, 19 nt, Artificial Sequence
  Description of Artificial Sequence: Synthetic oligonucleotide
  Antisense strand to SEQ ID NO: 1338374
gauaaacuuacuaucacuu

SEQ ID NO: 1338376 - RNA, 19 nt, Artificial Sequence
  Description of Artificial Sequence: Synthetic oligonucleotide
  Sense strand starting at position 3914 of SEQ ID NO: 1242319
uaguaaguuuaucuaaggu

SEQ ID NO: 1338377 - RNA, 19 nt, Artificial Sequence
  Description of Artificial Sequence: Synthetic oligonucleotide
  Antisense strand to SEQ ID NO: 1338376
accuuagauaaacuuacua

SEQ ID NO: 1338378 - RNA, 19 nt, Artificial Sequence
  Description of Artificial Sequence: Synthetic oligonucleotide
  Sense strand starting at position 133 of SEQ ID NO: 1242320
gugucaggacccugauugu

SEQ ID NO: 1338379 - RNA, 19 nt, Artificial Sequence
  Description of Artificial Sequence: Synthetic oligonucleotide
  Antisense strand to SEQ ID NO: 1338378
acaaucaggguccugacac

SEQ ID NO: 1338380 - RNA, 19 nt, Artificial Sequence
  Description of Artificial Sequence: Synthetic oligonucleotide
  Sense strand starting at position 243 of SEQ ID NO: 1242320
uugauuaaaccauggguua

SEQ ID NO: 1338381 - RNA, 19 nt, Artificial Sequence
  Description of Artificial Sequence: Synthetic oligonucleotide
  Antisense strand to SEQ ID NO: 1338380
uaacccaugguuuaaucaa

SEQ ID NO: 1338382 - RNA, 19 nt, Artificial Sequence
  Description of Artificial Sequence: Synthetic oligonucleotide
  Sense strand starting at position 244 of SEQ ID NO: 1242320
ugauuaaaccauggguuag

SEQ ID NO: 1338383 - RNA, 19 nt, Artificial Sequence
  Description of Artificial Sequence: Synthetic oligonucleotide
  Antisense strand to SEQ ID NO: 1338382
cuaacccaugguuuaauca

SEQ ID NO: 1338384 - RNA, 19 nt, Artificial Sequence
  Description of Artificial Sequence: Synthetic oligonucleotide
  Sense strand starting at position 317 of SEQ ID NO: 1242320
aggcacugggcuuaacaaa

SEQ ID NO: 1338385 - RNA, 19 nt, Artificial Sequence
  Description of Artificial Sequence: Synthetic oligonucleotide
  Antisense strand to SEQ ID NO: 1338384
uuuguuaagcccagugccu

SEQ ID NO: 1338386 - RNA, 19 nt, Artificial Sequence
  Description of Artificial Sequence: Synthetic oligonucleotide
  Sense strand starting at position 335 of SEQ ID NO: 1242320
auguuuacugcaugcauuu

SEQ ID NO: 1338387 - RNA, 19 nt, Artificial Sequence
  Description of Artificial Sequence: Synthetic oligonucleotide
  Antisense strand to SEQ ID NO: 1338386
aaaugcaugcaguaaacau

SEQ ID NO: 1338388 - RNA, 19 nt, Artificial Sequence
  Description of Artificial Sequence: Synthetic oligonucleotide
  Sense strand starting at position 390 of SEQ ID NO: 1242320
uucagacaugucgguuaug

SEQ ID NO: 1338389 - RNA, 19 nt, Artificial Sequence
  Description of Artificial Sequence: Synthetic oligonucleotide
  Antisense strand to SEQ ID NO: 1338388
cauaaccgacaugucugaa

SEQ ID NO: 1338390 - RNA, 19 nt, Artificial Sequence
  Description of Artificial Sequence: Synthetic oligonucleotide
  Sense strand starting at position 393 of SEQ ID NO: 1242320
agacaugucgguuauggau

SEQ ID NO: 1338391 - RNA, 19 nt, Artificial Sequence
  Description of Artificial Sequence: Synthetic oligonucleotide
  Antisense strand to SEQ ID NO: 1338390
auccauaaccgacaugucu

SEQ ID NO: 1338392 - RNA, 19 nt, Artificial Sequence
  Description of Artificial Sequence: Synthetic oligonucleotide
  Sense strand starting at position 400 of SEQ ID NO: 1242320
ucgguuauggauugaauug

SEQ ID NO: 1338393 - RNA, 19 nt, Artificial Sequence
  Description of Artificial Sequence: Synthetic oligonucleotide
  Antisense strand to SEQ ID NO: 1338392
caauucaauccauaaccga

SEQ ID NO: 1338394 - RNA, 19 nt, Artificial Sequence
  Description of Artificial Sequence: Synthetic oligonucleotide
  Sense strand starting at position 401 of SEQ ID NO: 1242320
cgguuauggauugaauugu

SEQ ID NO: 1338395 - RNA, 19 nt, Artificial Sequence
  Description of Artificial Sequence: Synthetic oligonucleotide
  Antisense strand to SEQ ID NO: 1338394
acaauucaauccauaaccg

SEQ ID NO: 1338396 - RNA, 19 nt, Artificial Sequence
  Description of Artificial Sequence: Synthetic oligonucleotide
  Sense strand starting at position 700 of SEQ ID NO: 1242320
cgcugacaucuugaucuua

SEQ ID NO: 1338397 - RNA, 19 nt, Artificial Sequence
  Description of Artificial Sequence: Synthetic oligonucleotide
  Antisense strand to SEQ ID NO: 1338396
uaagaucaagaugucagcg

SEQ ID NO: 1338398 - RNA, 19 nt, Artificial Sequence
  Description of Artificial Sequence: Synthetic oligonucleotide
  Sense strand starting at position 992 of SEQ ID NO: 1242320
agauuuaauucccagaaga

SEQ ID NO: 1338399 - RNA, 19 nt, Artificial Sequence
  Description of Artificial Sequence: Synthetic oligonucleotide
  Antisense strand to SEQ ID NO: 1338398
ucuucugggaauuaaaucu

SEQ ID NO: 1338400 - RNA, 19 nt, Artificial Sequence
  Description of Artificial Sequence: Synthetic oligonucleotide
  Sense strand starting at position 1448 of SEQ ID NO: 1242320
gcaagacucucagaauaau

SEQ ID NO: 1338401 - RNA, 19 nt, Artificial Sequence
  Description of Artificial Sequence: Synthetic oligonucleotide
  Antisense strand to SEQ ID NO: 1338400
auuauucugagagucuugc

SEQ ID NO: 1338402 - RNA, 19 nt, Artificial Sequence
  Description of Artificial Sequence: Synthetic oligonucleotide
  Sense strand starting at position 1550 of SEQ ID NO: 1242320
gaagaaugcggucaguauu

SEQ ID NO: 1338403 - RNA, 19 nt, Artificial Sequence
  Description of Artificial Sequence: Synthetic oligonucleotide
  Antisense strand to SEQ ID NO: 1338402
aauacugaccgcauucuuc

SEQ ID NO: 1338404 - RNA, 19 nt, Artificial Sequence
  Description of Artificial Sequence: Synthetic oligonucleotide
  Sense strand starting at position 1625 of SEQ ID NO: 1242320
aguagacaucauuaagucu

SEQ ID NO: 1338405 - RNA, 19 nt, Artificial Sequence
  Description of Artificial Sequence: Synthetic oligonucleotide
  Antisense strand to SEQ ID NO: 1338404
agacuuaaugaugucuacu

SEQ ID NO: 1338406 - RNA, 19 nt, Artificial Sequence
  Description of Artificial Sequence: Synthetic oligonucleotide
  Sense strand starting at position 1781 of SEQ ID NO: 1242320
uagagaaccgcuuguuaug

SEQ ID NO: 1338407 - RNA, 19 nt, Artificial Sequence
  Description of Artificial Sequence: Synthetic oligonucleotide
  Antisense strand to SEQ ID NO: 1338406
cauaacaagcgguucucua

SEQ ID NO: 1338408 - RNA, 19 nt, Artificial Sequence
  Description of Artificial Sequence: Synthetic oligonucleotide
  Sense strand starting at position 1783 of SEQ ID NO: 1242320
gagaaccgcuuguuaugau

SEQ ID NO: 1338409 - RNA, 19 nt, Artificial Sequence
  Description of Artificial Sequence: Synthetic oligonucleotide
  Antisense strand to SEQ ID NO: 1338408
aucauaacaagcgguucuc

SEQ ID NO: 1338410 - RNA, 19 nt, Artificial Sequence
  Description of Artificial Sequence: Synthetic oligonucleotide
  Sense strand starting at position 1810 of SEQ ID NO: 1242320
acguuagagacuggaguua

SEQ ID NO: 1338411 - RNA, 19 nt, Artificial Sequence
  Description of Artificial Sequence: Synthetic oligonucleotide
  Antisense strand to SEQ ID NO: 1338410
uaacuccagucucuaacgu

SEQ ID NO: 1338412 - RNA, 19 nt, Artificial Sequence
  Description of Artificial Sequence: Synthetic oligonucleotide
  Sense strand starting at position 2149 of SEQ ID NO: 1242320
guuagaagacucugcacuu

SEQ ID NO: 1338413 - RNA, 19 nt, Artificial Sequence
  Description of Artificial Sequence: Synthetic oligonucleotide
  Antisense strand to SEQ ID NO: 1338412
aagugcagagucuucuaac

SEQ ID NO: 1338414 - RNA, 19 nt, Artificial Sequence
  Description of Artificial Sequence: Synthetic oligonucleotide
  Sense strand starting at position 2225 of SEQ ID NO: 1242320
uugagaaagugccuuguau

SEQ ID NO: 1338415 - RNA, 19 nt, Artificial Sequence
  Description of Artificial Sequence: Synthetic oligonucleotide
  Antisense strand to SEQ ID NO: 1338414
auacaaggcacuuucucaa

SEQ ID NO: 1338416 - RNA, 19 nt, Artificial Sequence
  Description of Artificial Sequence: Synthetic oligonucleotide
  Sense strand starting at position 2227 of SEQ ID NO: 1242320
gagaaagugccuuguauuc

SEQ ID NO: 1338417 - RNA, 19 nt, Artificial Sequence
  Description of Artificial Sequence: Synthetic oligonucleotide
  Antisense strand to SEQ ID NO: 1338416
gaauacaaggcacuuucuc

SEQ ID NO: 1338418 - RNA, 19 nt, Artificial Sequence
  Description of Artificial Sequence: Synthetic oligonucleotide
  Sense strand starting at position 2421 of SEQ ID NO: 1242320
agauaucuugcuggcaucu

SEQ ID NO: 1338419 - RNA, 19 nt, Artificial Sequence
  Description of Artificial Sequence: Synthetic oligonucleotide
  Antisense strand to SEQ ID NO: 1338418
agaugccagcaagauaucu

SEQ ID NO: 1338420 - RNA, 19 nt, Artificial Sequence
  Description of Artificial Sequence: Synthetic oligonucleotide
  Sense strand starting at position 2505 of SEQ ID NO: 1242320
cucuuccugugucuugaau

SEQ ID NO: 1338421 - RNA, 19 nt, Artificial Sequence
  Description of Artificial Sequence: Synthetic oligonucleotide
  Antisense strand to SEQ ID NO: 1338420
auucaagacacaggaagag

SEQ ID NO: 1338422 - RNA, 19 nt, Artificial Sequence
  Description of Artificial Sequence: Synthetic oligonucleotide
  Sense strand starting at position 2654 of SEQ ID NO: 1242320
uuucuuagauggcuauaau

SEQ ID NO: 1338423 - RNA, 19 nt, Artificial Sequence
  Description of Artificial Sequence: Synthetic oligonucleotide
  Antisense strand to SEQ ID NO: 1338422
auuauagccaucuaagaaa

SEQ ID NO: 1338424 - RNA, 19 nt, Artificial Sequence
  Description of Artificial Sequence: Synthetic oligonucleotide
  Sense strand starting at position 2655 of SEQ ID NO: 1242320
uucuuagauggcuauaaua

SEQ ID NO: 1338425 - RNA, 19 nt, Artificial Sequence
  Description of Artificial Sequence: Synthetic oligonucleotide
  Antisense strand to SEQ ID NO: 1338424
uauuauagccaucuaagaa

SEQ ID NO: 1338426 - RNA, 19 nt, Artificial Sequence
  Description of Artificial Sequence: Synthetic oligonucleotide
  Sense strand starting at position 2701 of SEQ ID NO: 1242320
acguauucuugacucugau

SEQ ID NO: 1338427 - RNA, 19 nt, Artificial Sequence
  Description of Artificial Sequence: Synthetic oligonucleotide
  Antisense strand to SEQ ID NO: 1338426
aucagagucaagaauacgu

SEQ ID NO: 1338428 - RNA, 19 nt, Artificial Sequence
  Description of Artificial Sequence: Synthetic oligonucleotide
  Sense strand starting at position 2769 of SEQ ID NO: 1242320
guccaucacucuccuguua

SEQ ID NO: 1338429 - RNA, 19 nt, Artificial Sequence
  Description of Artificial Sequence: Synthetic oligonucleotide
  Antisense strand to SEQ ID NO: 1338428
uaacaggagagugauggac

SEQ ID NO: 1338430 - RNA, 19 nt, Artificial Sequence
  Description of Artificial Sequence: Synthetic oligonucleotide
  Sense strand starting at position 2896 of SEQ ID NO: 1242320
auaauucgcuaaguuaagu

SEQ ID NO: 1338431 - RNA, 19 nt, Artificial Sequence
  Description of Artificial Sequence: Synthetic oligonucleotide
  Antisense strand to SEQ ID NO: 1338430
acuuaacuuagcgaauuau

SEQ ID NO: 1338432 - RNA, 19 nt, Artificial Sequence
  Description of Artificial Sequence: Synthetic oligonucleotide
  Sense strand starting at position 2905 of SEQ ID NO: 1242320
uaaguuaagugguucucaa

SEQ ID NO: 1338433 - RNA, 19 nt, Artificial Sequence
  Description of Artificial Sequence: Synthetic oligonucleotide
  Antisense strand to SEQ ID NO: 1338432
uugagaaccacuuaacuua

SEQ ID NO: 1338434 - RNA, 19 nt, Artificial Sequence
  Description of Artificial Sequence: Synthetic oligonucleotide
  Sense strand starting at position 2957 of SEQ ID NO: 1242320
cuaggaacuuauuagauuu

SEQ ID NO: 1338435 - RNA, 19 nt, Artificial Sequence
  Description of Artificial Sequence: Synthetic oligonucleotide
  Antisense strand to SEQ ID NO: 1338434
aaaucuaauaaguuccuag

SEQ ID NO: 1338436 - RNA, 19 nt, Artificial Sequence
  Description of Artificial Sequence: Synthetic oligonucleotide
  Sense strand starting at position 3002 of SEQ ID NO: 1242320
aucagaaauucugaggaua

SEQ ID NO: 1338437 - RNA, 19 nt, Artificial Sequence
  Description of Artificial Sequence: Synthetic oligonucleotide
  Antisense strand to SEQ ID NO: 1338436
uauccucagaauuucugau

SEQ ID NO: 1338438 - RNA, 19 nt, Artificial Sequence
  Description of Artificial Sequence: Synthetic oligonucleotide
  Sense strand starting at position 3004 of SEQ ID NO: 1242320
cagaaauucugaggauagg

SEQ ID NO: 1338439 - RNA, 19 nt, Artificial Sequence
  Description of Artificial Sequence: Synthetic oligonucleotide
  Antisense strand to SEQ ID NO: 1338438
ccuauccucagaauuucug

SEQ ID NO: 1338440 - RNA, 19 nt, Artificial Sequence
  Description of Artificial Sequence: Synthetic oligonucleotide
  Sense strand starting at position 3027 of SEQ ID NO: 1242320
aggugucugugguucaaca

SEQ ID NO: 1338441 - RNA, 19 nt, Artificial Sequence
  Description of Artificial Sequence: Synthetic oligonucleotide
  Antisense strand to SEQ ID NO: 1338440
uguugaaccacagacaccu

SEQ ID NO: 1338442 - RNA, 19 nt, Artificial Sequence
  Description of Artificial Sequence: Synthetic oligonucleotide
  Sense strand starting at position 3148 of SEQ ID NO: 1242320
cagcaaugcugagcuggau

SEQ ID NO: 1338443 - RNA, 19 nt, Artificial Sequence
  Description of Artificial Sequence: Synthetic oligonucleotide
  Antisense strand to SEQ ID NO: 1338442
auccagcucagcauugcug

SEQ ID NO: 1338444 - RNA, 19 nt, Artificial Sequence
  Description of Artificial Sequence: Synthetic oligonucleotide
  Sense strand starting at position 3177 of SEQ ID NO: 1242320
ugugcuuacuguuucuaga

SEQ ID NO: 1338445 - RNA, 19 nt, Artificial Sequence
  Description of Artificial Sequence: Synthetic oligonucleotide
  Antisense strand to SEQ ID NO: 1338444
ucuagaaacaguaagcaca

SEQ ID NO: 1338446 - RNA, 19 nt, Artificial Sequence
  Description of Artificial Sequence: Synthetic oligonucleotide
  Sense strand starting at position 3179 of SEQ ID NO: 1242320
ugcuuacuguuucuagaaa

SEQ ID NO: 1338447 - RNA, 19 nt, Artificial Sequence
  Description of Artificial Sequence: Synthetic oligonucleotide
  Antisense strand to SEQ ID NO: 1338446
uuucuagaaacaguaagca

SEQ ID NO: 1338448 - RNA, 19 nt, Artificial Sequence
  Description of Artificial Sequence: Synthetic oligonucleotide
  Sense strand starting at position 3324 of SEQ ID NO: 1242320
uuaugaauuauugggugaa

SEQ ID NO: 1338449 - RNA, 19 nt, Artificial Sequence
  Description of Artificial Sequence: Synthetic oligonucleotide
  Antisense strand to SEQ ID NO: 1338448
uucacccaauaauucauaa

SEQ ID NO: 1338450 - RNA, 19 nt, Artificial Sequence
  Description of Artificial Sequence: Synthetic oligonucleotide
  Sense strand starting at position 3336 of SEQ ID NO: 1242320
gggugaaaugucggacaua

SEQ ID NO: 1338451 - RNA, 19 nt, Artificial Sequence
  Description of Artificial Sequence: Synthetic oligonucleotide
  Antisense strand to SEQ ID NO: 1338450
uauguccgacauuucaccc

SEQ ID NO: 1338452 - RNA, 19 nt, Artificial Sequence
  Description of Artificial Sequence: Synthetic oligonucleotide
  Sense strand starting at position 3369 of SEQ ID NO: 1242320
aucccuugccucuaggaga

SEQ ID NO: 1338453 - RNA, 19 nt, Artificial Sequence
  Description of Artificial Sequence: Synthetic oligonucleotide
  Antisense strand to SEQ ID NO: 1338452
ucuccuagaggcaagggau

SEQ ID NO: 1338454 - RNA, 19 nt, Artificial Sequence
  Description of Artificial Sequence: Synthetic oligonucleotide
  Sense strand starting at position 3679 of SEQ ID NO: 1242320
agaguuagcuuccuuuaau

SEQ ID NO: 1338455 - RNA, 19 nt, Artificial Sequence
  Description of Artificial Sequence: Synthetic oligonucleotide
  Antisense strand to SEQ ID NO: 1338454
auuaaaggaagcuaacucu

SEQ ID NO: 1338456 - RNA, 19 nt, Artificial Sequence
  Description of Artificial Sequence: Synthetic oligonucleotide
  Sense strand starting at position 3736 of SEQ ID NO: 1242320
auaggaaucuccuagggau

SEQ ID NO: 1338457 - RNA, 19 nt, Artificial Sequence
  Description of Artificial Sequence: Synthetic oligonucleotide
  Antisense strand to SEQ ID NO: 1338456
aucccuaggagauuccuau

SEQ ID NO: 1338458 - RNA, 19 nt, Artificial Sequence
  Description of Artificial Sequence: Synthetic oligonucleotide
  Sense strand starting at position 8 of SEQ ID NO: 1242321
caguauuguuuggucacca

SEQ ID NO: 1338459 - RNA, 19 nt, Artificial Sequence
  Description of Artificial Sequence: Synthetic oligonucleotide
  Antisense strand to SEQ ID NO: 1338458
uggugaccaaacaauacug

SEQ ID NO: 1338460 - RNA, 19 nt, Artificial Sequence
  Description of Artificial Sequence: Synthetic oligonucleotide
  Sense strand starting at position 12 of SEQ ID NO: 1242321
auuguuuggucaccacacu

SEQ ID NO: 1338461 - RNA, 19 nt, Artificial Sequence
  Description of Artificial Sequence: Synthetic oligonucleotide
  Antisense strand to SEQ ID NO: 1338460
aguguggugaccaaacaau

SEQ ID NO: 1338462 - RNA, 19 nt, Artificial Sequence
  Description of Artificial Sequence: Synthetic oligonucleotide
  Sense strand starting at position 41 of SEQ ID NO: 1242321
ccaggauauucugaaggau

SEQ ID NO: 1338463 - RNA, 19 nt, Artificial Sequence
  Description of Artificial Sequence: Synthetic oligonucleotide
  Antisense strand to SEQ ID NO: 1338462
auccuucagaauauccugg

SEQ ID NO: 1338464 - RNA, 19 nt, Artificial Sequence
  Description of Artificial Sequence: Synthetic oligonucleotide
  Sense strand starting at position 53 of SEQ ID NO: 1242321
gaaggaugccuuggcacua

SEQ ID NO: 1338465 - RNA, 19 nt, Artificial Sequence
  Description of Artificial Sequence: Synthetic oligonucleotide
  Antisense strand to SEQ ID NO: 1338464
uagugccaaggcauccuuc

SEQ ID NO: 1338466 - RNA, 19 nt, Artificial Sequence
  Description of Artificial Sequence: Synthetic oligonucleotide
  Sense strand starting at position 58 of SEQ ID NO: 1242321
augccuuggcacuaauaca

SEQ ID NO: 1338467 - RNA, 19 nt, Artificial Sequence
  Description of Artificial Sequence: Synthetic oligonucleotide
  Antisense strand to SEQ ID NO: 1338466
uguauuagugccaaggcau

SEQ ID NO: 1338468 - RNA, 19 nt, Artificial Sequence
  Description of Artificial Sequence: Synthetic oligonucleotide
  Sense strand starting at position 81 of SEQ ID NO: 1242321
agcaaaugacuuuagcacu

SEQ ID NO: 1338469 - RNA, 19 nt, Artificial Sequence
  Description of Artificial Sequence: Synthetic oligonucleotide
  Antisense strand to SEQ ID NO: 1338468
agugcuaaagucauuugcu

SEQ ID NO: 1338470 - RNA, 19 nt, Artificial Sequence
  Description of Artificial Sequence: Synthetic oligonucleotide
  Sense strand starting at position 241 of SEQ ID NO: 1242321
gugucaggacccugauugu

SEQ ID NO: 1338471 - RNA, 19 nt, Artificial Sequence
  Description of Artificial Sequence: Synthetic oligonucleotide
  Antisense strand to SEQ ID NO: 1338470
acaaucaggguccugacac

SEQ ID NO: 1338472 - RNA, 19 nt, Artificial Sequence
  Description of Artificial Sequence: Synthetic oligonucleotide
  Sense strand starting at position 351 of SEQ ID NO: 1242321
uugauuaaaccauggguua

SEQ ID NO: 1338473 - RNA, 19 nt, Artificial Sequence
  Description of Artificial Sequence: Synthetic oligonucleotide
  Antisense strand to SEQ ID NO: 1338472
uaacccaugguuuaaucaa

SEQ ID NO: 1338474 - RNA, 19 nt, Artificial Sequence
  Description of Artificial Sequence: Synthetic oligonucleotide
  Sense strand starting at position 352 of SEQ ID NO: 1242321
ugauuaaaccauggguuag

SEQ ID NO: 1338475 - RNA, 19 nt, Artificial Sequence
  Description of Artificial Sequence: Synthetic oligonucleotide
  Antisense strand to SEQ ID NO: 1338474
cuaacccaugguuuaauca

SEQ ID NO: 1338476 - RNA, 19 nt, Artificial Sequence
  Description of Artificial Sequence: Synthetic oligonucleotide
  Sense strand starting at position 425 of SEQ ID NO: 1242321
aggcacugggcuuaacaaa

SEQ ID NO: 1338477 - RNA, 19 nt, Artificial Sequence
  Description of Artificial Sequence: Synthetic oligonucleotide
  Antisense strand to SEQ ID NO: 1338476
uuuguuaagcccagugccu

SEQ ID NO: 1338478 - RNA, 19 nt, Artificial Sequence
  Description of Artificial Sequence: Synthetic oligonucleotide
  Sense strand starting at position 443 of SEQ ID NO: 1242321
auguuuacugcaugcauuu

SEQ ID NO: 1338479 - RNA, 19 nt, Artificial Sequence
  Description of Artificial Sequence: Synthetic oligonucleotide
  Antisense strand to SEQ ID NO: 1338478
aaaugcaugcaguaaacau

SEQ ID NO: 1338480 - RNA, 19 nt, Artificial Sequence
  Description of Artificial Sequence: Synthetic oligonucleotide
  Sense strand starting at position 498 of SEQ ID NO: 1242321
uucagacaugucgguuaug

SEQ ID NO: 1338481 - RNA, 19 nt, Artificial Sequence
  Description of Artificial Sequence: Synthetic oligonucleotide
  Antisense strand to SEQ ID NO: 1338480
cauaaccgacaugucugaa

SEQ ID NO: 1338482 - RNA, 19 nt, Artificial Sequence
  Description of Artificial Sequence: Synthetic oligonucleotide
  Sense strand starting at position 501 of SEQ ID NO: 1242321
agacaugucgguuauggau

SEQ ID NO: 1338483 - RNA, 19 nt, Artificial Sequence
  Description of Artificial Sequence: Synthetic oligonucleotide
  Antisense strand to SEQ ID NO: 1338482
auccauaaccgacaugucu

SEQ ID NO: 1338484 - RNA, 19 nt, Artificial Sequence
  Description of Artificial Sequence: Synthetic oligonucleotide
  Sense strand starting at position 508 of SEQ ID NO: 1242321
ucgguuauggauugaauug

SEQ ID NO: 1338485 - RNA, 19 nt, Artificial Sequence
  Description of Artificial Sequence: Synthetic oligonucleotide
  Antisense strand to SEQ ID NO: 1338484
caauucaauccauaaccga

SEQ ID NO: 1338486 - RNA, 19 nt, Artificial Sequence
  Description of Artificial Sequence: Synthetic oligonucleotide
  Sense strand starting at position 509 of SEQ ID NO: 1242321
cgguuauggauugaauugu

SEQ ID NO: 1338487 - RNA, 19 nt, Artificial Sequence
  Description of Artificial Sequence: Synthetic oligonucleotide
  Antisense strand to SEQ ID NO: 1338486
acaauucaauccauaaccg

SEQ ID NO: 1338488 - RNA, 19 nt, Artificial Sequence
  Description of Artificial Sequence: Synthetic oligonucleotide
  Sense strand starting at position 808 of SEQ ID NO: 1242321
cgcugacaucuugaucuua

SEQ ID NO: 1338489 - RNA, 19 nt, Artificial Sequence
  Description of Artificial Sequence: Synthetic oligonucleotide
  Antisense strand to SEQ ID NO: 1338488
uaagaucaagaugucagcg

SEQ ID NO: 1338490 - RNA, 19 nt, Artificial Sequence
  Description of Artificial Sequence: Synthetic oligonucleotide
  Sense strand starting at position 1100 of SEQ ID NO: 1242321
agauuuaauucccagaaga

SEQ ID NO: 1338491 - RNA, 19 nt, Artificial Sequence
  Description of Artificial Sequence: Synthetic oligonucleotide
  Antisense strand to SEQ ID NO: 1338490
ucuucugggaauuaaaucu

SEQ ID NO: 1338492 - RNA, 19 nt, Artificial Sequence
  Description of Artificial Sequence: Synthetic oligonucleotide
  Sense strand starting at position 1658 of SEQ ID NO: 1242321
gaagaaugcggucaguauu

SEQ ID NO: 1338493 - RNA, 19 nt, Artificial Sequence
  Description of Artificial Sequence: Synthetic oligonucleotide
  Antisense strand to SEQ ID NO: 1338492
aauacugaccgcauucuuc

SEQ ID NO: 1338494 - RNA, 19 nt, Artificial Sequence
  Description of Artificial Sequence: Synthetic oligonucleotide
  Sense strand starting at position 1733 of SEQ ID NO: 1242321
aguagacaucauuaagucu

SEQ ID NO: 1338495 - RNA, 19 nt, Artificial Sequence
  Description of Artificial Sequence: Synthetic oligonucleotide
  Antisense strand to SEQ ID NO: 1338494
agacuuaaugaugucuacu

SEQ ID NO: 1338496 - RNA, 19 nt, Artificial Sequence
  Description of Artificial Sequence: Synthetic oligonucleotide
  Sense strand starting at position 1889 of SEQ ID NO: 1242321
uagagaaccgcuuguuaug

SEQ ID NO: 1338497 - RNA, 19 nt, Artificial Sequence
  Description of Artificial Sequence: Synthetic oligonucleotide
  Antisense strand to SEQ ID NO: 1338496
cauaacaagcgguucucua

SEQ ID NO: 1338498 - RNA, 19 nt, Artificial Sequence
  Description of Artificial Sequence: Synthetic oligonucleotide
  Sense strand starting at position 1891 of SEQ ID NO: 1242321
gagaaccgcuuguuaugau

SEQ ID NO: 1338499 - RNA, 19 nt, Artificial Sequence
  Description of Artificial Sequence: Synthetic oligonucleotide
  Antisense strand to SEQ ID NO: 1338498
aucauaacaagcgguucuc

SEQ ID NO: 1338500 - RNA, 19 nt, Artificial Sequence
  Description of Artificial Sequence: Synthetic oligonucleotide
  Sense strand starting at position 1918 of SEQ ID NO: 1242321
acguuagagacuggaguua

SEQ ID NO: 1338501 - RNA, 19 nt, Artificial Sequence
  Description of Artificial Sequence: Synthetic oligonucleotide
  Antisense strand to SEQ ID NO: 1338500
uaacuccagucucuaacgu

SEQ ID NO: 1338502 - RNA, 19 nt, Artificial Sequence
  Description of Artificial Sequence: Synthetic oligonucleotide
  Sense strand starting at position 2257 of SEQ ID NO: 1242321
guuagaagacucugcacuu

SEQ ID NO: 1338503 - RNA, 19 nt, Artificial Sequence
  Description of Artificial Sequence: Synthetic oligonucleotide
  Antisense strand to SEQ ID NO: 1338502
aagugcagagucuucuaac

SEQ ID NO: 1338504 - RNA, 19 nt, Artificial Sequence
  Description of Artificial Sequence: Synthetic oligonucleotide
  Sense strand starting at position 2333 of SEQ ID NO: 1242321
uugagaaagugccuuguau

SEQ ID NO: 1338505 - RNA, 19 nt, Artificial Sequence
  Description of Artificial Sequence: Synthetic oligonucleotide
  Antisense strand to SEQ ID NO: 1338504
auacaaggcacuuucucaa

SEQ ID NO: 1338506 - RNA, 19 nt, Artificial Sequence
  Description of Artificial Sequence: Synthetic oligonucleotide
  Sense strand starting at position 2335 of SEQ ID NO: 1242321
gagaaagugccuuguauuc

SEQ ID NO: 1338507 - RNA, 19 nt, Artificial Sequence
  Description of Artificial Sequence: Synthetic oligonucleotide
  Antisense strand to SEQ ID NO: 1338506
gaauacaaggcacuuucuc

SEQ ID NO: 1338508 - RNA, 19 nt, Artificial Sequence
  Description of Artificial Sequence: Synthetic oligonucleotide
  Sense strand starting at position 2529 of SEQ ID NO: 1242321
agauaucuugcuggcaucu

SEQ ID NO: 1338509 - RNA, 19 nt, Artificial Sequence
  Description of Artificial Sequence: Synthetic oligonucleotide
  Antisense strand to SEQ ID NO: 1338508
agaugccagcaagauaucu

SEQ ID NO: 1338510 - RNA, 19 nt, Artificial Sequence
  Description of Artificial Sequence: Synthetic oligonucleotide
  Sense strand starting at position 2762 of SEQ ID NO: 1242321
uuucuuagauggcuauaau

SEQ ID NO: 1338511 - RNA, 19 nt, Artificial Sequence
  Description of Artificial Sequence: Synthetic oligonucleotide
  Antisense strand to SEQ ID NO: 1338510
auuauagccaucuaagaaa

SEQ ID NO: 1338512 - RNA, 19 nt, Artificial Sequence
  Description of Artificial Sequence: Synthetic oligonucleotide
  Sense strand starting at position 2763 of SEQ ID NO: 1242321
uucuuagauggcuauaaua

SEQ ID NO: 1338513 - RNA, 19 nt, Artificial Sequence
  Description of Artificial Sequence: Synthetic oligonucleotide
  Antisense strand to SEQ ID NO: 1338512
uauuauagccaucuaagaa

SEQ ID NO: 1338514 - RNA, 19 nt, Artificial Sequence
  Description of Artificial Sequence: Synthetic oligonucleotide
  Sense strand starting at position 2809 of SEQ ID NO: 1242321
acguauucuugacucugau

SEQ ID NO: 1338515 - RNA, 19 nt, Artificial Sequence
  Description of Artificial Sequence: Synthetic oligonucleotide
  Antisense strand to SEQ ID NO: 1338514
aucagagucaagaauacgu

SEQ ID NO: 1338516 - RNA, 19 nt, Artificial Sequence
  Description of Artificial Sequence: Synthetic oligonucleotide
  Sense strand starting at position 2877 of SEQ ID NO: 1242321
guccaucacucuccuguua

SEQ ID NO: 1338517 - RNA, 19 nt, Artificial Sequence
  Description of Artificial Sequence: Synthetic oligonucleotide
  Antisense strand to SEQ ID NO: 1338516
uaacaggagagugauggac

SEQ ID NO: 1338518 - RNA, 19 nt, Artificial Sequence
  Description of Artificial Sequence: Synthetic oligonucleotide
  Sense strand starting at position 3004 of SEQ ID NO: 1242321
auaauucgcuaaguuaagu

SEQ ID NO: 1338519 - RNA, 19 nt, Artificial Sequence
  Description of Artificial Sequence: Synthetic oligonucleotide
  Antisense strand to SEQ ID NO: 1338518
acuuaacuuagcgaauuau

SEQ ID NO: 1338520 - RNA, 19 nt, Artificial Sequence
  Description of Artificial Sequence: Synthetic oligonucleotide
  Sense strand starting at position 3013 of SEQ ID NO: 1242321
uaaguuaagugguucucaa

SEQ ID NO: 1338521 - RNA, 19 nt, Artificial Sequence
  Description of Artificial Sequence: Synthetic oligonucleotide
  Antisense strand to SEQ ID NO: 1338520
uugagaaccacuuaacuua

SEQ ID NO: 1338522 - RNA, 19 nt, Artificial Sequence
  Description of Artificial Sequence: Synthetic oligonucleotide
  Sense strand starting at position 3065 of SEQ ID NO: 1242321
cuaggaacuuauuagauuu

SEQ ID NO: 1338523 - RNA, 19 nt, Artificial Sequence
  Description of Artificial Sequence: Synthetic oligonucleotide
  Antisense strand to SEQ ID NO: 1338522
aaaucuaauaaguuccuag

SEQ ID NO: 1338524 - RNA, 19 nt, Artificial Sequence
  Description of Artificial Sequence: Synthetic oligonucleotide
  Sense strand starting at position 3110 of SEQ ID NO: 1242321
aucagaaauucugaggaua

SEQ ID NO: 1338525 - RNA, 19 nt, Artificial Sequence
  Description of Artificial Sequence: Synthetic oligonucleotide
  Antisense strand to SEQ ID NO: 1338524
uauccucagaauuucugau

SEQ ID NO: 1338526 - RNA, 19 nt, Artificial Sequence
  Description of Artificial Sequence: Synthetic oligonucleotide
  Sense strand starting at position 3256 of SEQ ID NO: 1242321
cagcaaugcugagcuggau

SEQ ID NO: 1338527 - RNA, 19 nt, Artificial Sequence
  Description of Artificial Sequence: Synthetic oligonucleotide
  Antisense strand to SEQ ID NO: 1338526
auccagcucagcauugcug

SEQ ID NO: 1338528 - RNA, 19 nt, Artificial Sequence
  Description of Artificial Sequence: Synthetic oligonucleotide
  Sense strand starting at position 3287 of SEQ ID NO: 1242321
ugcuuacuguuucuagaaa

SEQ ID NO: 1338529 - RNA, 19 nt, Artificial Sequence
  Description of Artificial Sequence: Synthetic oligonucleotide
  Antisense strand to SEQ ID NO: 1338528
uuucuagaaacaguaagca

SEQ ID NO: 1338530 - RNA, 19 nt, Artificial Sequence
  Description of Artificial Sequence: Synthetic oligonucleotide
  Sense strand starting at position 3432 of SEQ ID NO: 1242321
uuaugaauuauugggugaa

SEQ ID NO: 1338531 - RNA, 19 nt, Artificial Sequence
  Description of Artificial Sequence: Synthetic oligonucleotide
  Antisense strand to SEQ ID NO: 1338530
uucacccaauaauucauaa

SEQ ID NO: 1338532 - RNA, 19 nt, Artificial Sequence
  Description of Artificial Sequence: Synthetic oligonucleotide
  Sense strand starting at position 3444 of SEQ ID NO: 1242321
gggugaaaugucggacaua

SEQ ID NO: 1338533 - RNA, 19 nt, Artificial Sequence
  Description of Artificial Sequence: Synthetic oligonucleotide
  Antisense strand to SEQ ID NO: 1338532
uauguccgacauuucaccc

SEQ ID NO: 1338534 - RNA, 19 nt, Artificial Sequence
  Description of Artificial Sequence: Synthetic oligonucleotide
  Sense strand starting at position 3477 of SEQ ID NO: 1242321
aucccuugccucuaggaga

SEQ ID NO: 1338535 - RNA, 19 nt, Artificial Sequence
  Description of Artificial Sequence: Synthetic oligonucleotide
  Antisense strand to SEQ ID NO: 1338534
ucuccuagaggcaagggau

SEQ ID NO: 1338536 - RNA, 19 nt, Artificial Sequence
  Description of Artificial Sequence: Synthetic oligonucleotide
  Sense strand starting at position 3787 of SEQ ID NO: 1242321
agaguuagcuuccuuuaau

SEQ ID NO: 1338537 - RNA, 19 nt, Artificial Sequence
  Description of Artificial Sequence: Synthetic oligonucleotide
  Antisense strand to SEQ ID NO: 1338536
auuaaaggaagcuaacucu

SEQ ID NO: 1338538 - RNA, 19 nt, Artificial Sequence
  Description of Artificial Sequence: Synthetic oligonucleotide
  Sense strand starting at position 9 of SEQ ID NO: 1242322
ggacucacauauccugauu

SEQ ID NO: 1338539 - RNA, 19 nt, Artificial Sequence
  Description of Artificial Sequence: Synthetic oligonucleotide
  Antisense strand to SEQ ID NO: 1338538
aaucaggauaugugagucc

SEQ ID NO: 1338540 - RNA, 19 nt, Artificial Sequence
  Description of Artificial Sequence: Synthetic oligonucleotide
  Sense strand starting at position 50 of SEQ ID NO: 1242322
uaaucaagguaguaugaua

SEQ ID NO: 1338541 - RNA, 19 nt, Artificial Sequence
  Description of Artificial Sequence: Synthetic oligonucleotide
  Antisense strand to SEQ ID NO: 1338540
uaucauacuaccuugauua

SEQ ID NO: 1338542 - RNA, 19 nt, Artificial Sequence
  Description of Artificial Sequence: Synthetic oligonucleotide
  Sense strand starting at position 758 of SEQ ID NO: 1242322
caaggcacgucacagaaau

SEQ ID NO: 1338543 - RNA, 19 nt, Artificial Sequence
  Description of Artificial Sequence: Synthetic oligonucleotide
  Antisense strand to SEQ ID NO: 1338542
auuucugugacgugccuug

SEQ ID NO: 1338544 - RNA, 19 nt, Artificial Sequence
  Description of Artificial Sequence: Synthetic oligonucleotide
  Sense strand starting at position 760 of SEQ ID NO: 1242322
aggcacgucacagaaauua

SEQ ID NO: 1338545 - RNA, 19 nt, Artificial Sequence
  Description of Artificial Sequence: Synthetic oligonucleotide
  Antisense strand to SEQ ID NO: 1338544
uaauuucugugacgugccu

SEQ ID NO: 1338546 - RNA, 19 nt, Artificial Sequence
  Description of Artificial Sequence: Synthetic oligonucleotide
  Sense strand starting at position 1317 of SEQ ID NO: 1242322
ugcugaacuggugaucuau

SEQ ID NO: 1338547 - RNA, 19 nt, Artificial Sequence
  Description of Artificial Sequence: Synthetic oligonucleotide
  Antisense strand to SEQ ID NO: 1338546
auagaucaccaguucagca

SEQ ID NO: 1338548 - RNA, 19 nt, Artificial Sequence
  Description of Artificial Sequence: Synthetic oligonucleotide
  Sense strand starting at position 1326 of SEQ ID NO: 1242322
ggugaucuauugggacaga

SEQ ID NO: 1338549 - RNA, 19 nt, Artificial Sequence
  Description of Artificial Sequence: Synthetic oligonucleotide
  Antisense strand to SEQ ID NO: 1338548
ucugucccaauagaucacc

SEQ ID NO: 1338550 - RNA, 19 nt, Artificial Sequence
  Description of Artificial Sequence: Synthetic oligonucleotide
  Sense strand starting at position 1342 of SEQ ID NO: 1242322
agagacaggcuuuggcaau

SEQ ID NO: 1338551 - RNA, 19 nt, Artificial Sequence
  Description of Artificial Sequence: Synthetic oligonucleotide
  Antisense strand to SEQ ID NO: 1338550
auugccaaagccugucucu

SEQ ID NO: 1338552 - RNA, 19 nt, Artificial Sequence
  Description of Artificial Sequence: Synthetic oligonucleotide
  Sense strand starting at position 1343 of SEQ ID NO: 1242322
gagacaggcuuuggcaaua

SEQ ID NO: 1338553 - RNA, 19 nt, Artificial Sequence
  Description of Artificial Sequence: Synthetic oligonucleotide
  Antisense strand to SEQ ID NO: 1338552
uauugccaaagccugucuc

SEQ ID NO: 1338554 - RNA, 19 nt, Artificial Sequence
  Description of Artificial Sequence: Synthetic oligonucleotide
  Sense strand starting at position 1591 of SEQ ID NO: 1242322
cuuucccuccuggaaaguu

SEQ ID NO: 1338555 - RNA, 19 nt, Artificial Sequence
  Description of Artificial Sequence: Synthetic oligonucleotide
  Antisense strand to SEQ ID NO: 1338554
aacuuuccaggagggaaag

SEQ ID NO: 1338556 - RNA, 19 nt, Artificial Sequence
  Description of Artificial Sequence: Synthetic oligonucleotide
  Sense strand starting at position 2010 of SEQ ID NO: 1242322
caucacuucccguaaagga

SEQ ID NO: 1338557 - RNA, 19 nt, Artificial Sequence
  Description of Artificial Sequence: Synthetic oligonucleotide
  Antisense strand to SEQ ID NO: 1338556
uccuuuacgggaagugaug

SEQ ID NO: 1338558 - RNA, 19 nt, Artificial Sequence
  Description of Artificial Sequence: Synthetic oligonucleotide
  Sense strand starting at position 2358 of SEQ ID NO: 1242322
ccauguucuaaggguguuu

SEQ ID NO: 1338559 - RNA, 19 nt, Artificial Sequence
  Description of Artificial Sequence: Synthetic oligonucleotide
  Antisense strand to SEQ ID NO: 1338558
aaacacccuuagaacaugg

SEQ ID NO: 1338560 - RNA, 19 nt, Artificial Sequence
  Description of Artificial Sequence: Synthetic oligonucleotide
  Sense strand starting at position 2633 of SEQ ID NO: 1242322
caauguaauuccgggagga

SEQ ID NO: 1338561 - RNA, 19 nt, Artificial Sequence
  Description of Artificial Sequence: Synthetic oligonucleotide
  Antisense strand to SEQ ID NO: 1338560
uccucccggaauuacauug

SEQ ID NO: 1338562 - RNA, 19 nt, Artificial Sequence
  Description of Artificial Sequence: Synthetic oligonucleotide
  Sense strand starting at position 2634 of SEQ ID NO: 1242322
aauguaauuccgggaggaa

SEQ ID NO: 1338563 - RNA, 19 nt, Artificial Sequence
  Description of Artificial Sequence: Synthetic oligonucleotide
  Antisense strand to SEQ ID NO: 1338562
uuccucccggaauuacauu

SEQ ID NO: 1338564 - RNA, 19 nt, Artificial Sequence
  Description of Artificial Sequence: Synthetic oligonucleotide
  Sense strand starting at position 2637 of SEQ ID NO: 1242322
guaauuccgggaggaaaug

SEQ ID NO: 1338565 - RNA, 19 nt, Artificial Sequence
  Description of Artificial Sequence: Synthetic oligonucleotide
  Antisense strand to SEQ ID NO: 1338564
cauuuccucccggaauuac

SEQ ID NO: 1338566 - RNA, 19 nt, Artificial Sequence
  Description of Artificial Sequence: Synthetic oligonucleotide
  Sense strand starting at position 2667 of SEQ ID NO: 1242322
cucugcucacacuguguaa

SEQ ID NO: 1338567 - RNA, 19 nt, Artificial Sequence
  Description of Artificial Sequence: Synthetic oligonucleotide
  Antisense strand to SEQ ID NO: 1338566
uuacacagugugagcagag

SEQ ID NO: 1338568 - RNA, 19 nt, Artificial Sequence
  Description of Artificial Sequence: Synthetic oligonucleotide
  Sense strand starting at position 2669 of SEQ ID NO: 1242322
cugcucacacuguguaauu

SEQ ID NO: 1338569 - RNA, 19 nt, Artificial Sequence
  Description of Artificial Sequence: Synthetic oligonucleotide
  Antisense strand to SEQ ID NO: 1338568
aauuacacagugugagcag

SEQ ID NO: 1338570 - RNA, 19 nt, Artificial Sequence
  Description of Artificial Sequence: Synthetic oligonucleotide
  Sense strand starting at position 2703 of SEQ ID NO: 1242322
acuguaaauuucuaagagu

SEQ ID NO: 1338571 - RNA, 19 nt, Artificial Sequence
  Description of Artificial Sequence: Synthetic oligonucleotide
  Antisense strand to SEQ ID NO: 1338570
acucuuagaaauuuacagu

SEQ ID NO: 1338572 - RNA, 19 nt, Artificial Sequence
  Description of Artificial Sequence: Synthetic oligonucleotide
  Sense strand starting at position 2706 of SEQ ID NO: 1242322
guaaauuucuaagaguguu

SEQ ID NO: 1338573 - RNA, 19 nt, Artificial Sequence
  Description of Artificial Sequence: Synthetic oligonucleotide
  Antisense strand to SEQ ID NO: 1338572
aacacucuuagaaauuuac

SEQ ID NO: 1338574 - RNA, 19 nt, Artificial Sequence
  Description of Artificial Sequence: Synthetic oligonucleotide
  Sense strand starting at position 2712 of SEQ ID NO: 1242322
uucuaagaguguuagagca

SEQ ID NO: 1338575 - RNA, 19 nt, Artificial Sequence
  Description of Artificial Sequence: Synthetic oligonucleotide
  Antisense strand to SEQ ID NO: 1338574
ugcucuaacacucuuagaa

SEQ ID NO: 1338576 - RNA, 19 nt, Artificial Sequence
  Description of Artificial Sequence: Synthetic oligonucleotide
  Sense strand starting at position 2714 of SEQ ID NO: 1242322
cuaagaguguuagagcaau

SEQ ID NO: 1338577 - RNA, 19 nt, Artificial Sequence
  Description of Artificial Sequence: Synthetic oligonucleotide
  Antisense strand to SEQ ID NO: 1338576
auugcucuaacacucuuag

SEQ ID NO: 1338578 - RNA, 19 nt, Artificial Sequence
  Description of Artificial Sequence: Synthetic oligonucleotide
  Sense strand starting at position 2720 of SEQ ID NO: 1242322
guguuagagcaaugaguuu

SEQ ID NO: 1338579 - RNA, 19 nt, Artificial Sequence
  Description of Artificial Sequence: Synthetic oligonucleotide
  Antisense strand to SEQ ID NO: 1338578
aaacucauugcucuaacac

SEQ ID NO: 1338580 - RNA, 19 nt, Artificial Sequence
  Description of Artificial Sequence: Synthetic oligonucleotide
  Sense strand starting at position 2751 of SEQ ID NO: 1242322
acuacaguauguuaaggaa

SEQ ID NO: 1338581 - RNA, 19 nt, Artificial Sequence
  Description of Artificial Sequence: Synthetic oligonucleotide
  Antisense strand to SEQ ID NO: 1338580
uuccuuaacauacuguagu

SEQ ID NO: 1338582 - RNA, 19 nt, Artificial Sequence
  Description of Artificial Sequence: Synthetic oligonucleotide
  Sense strand starting at position 2770 of SEQ ID NO: 1242322
ccgccucugucggaagaaa

SEQ ID NO: 1338583 - RNA, 19 nt, Artificial Sequence
  Description of Artificial Sequence: Synthetic oligonucleotide
  Antisense strand to SEQ ID NO: 1338582
uuucuuccgacagaggcgg

SEQ ID NO: 1338584 - RNA, 19 nt, Artificial Sequence
  Description of Artificial Sequence: Synthetic oligonucleotide
  Sense strand starting at position 3105 of SEQ ID NO: 1242322
gcaaauuccagcugucgca

SEQ ID NO: 1338585 - RNA, 19 nt, Artificial Sequence
  Description of Artificial Sequence: Synthetic oligonucleotide
  Antisense strand to SEQ ID NO: 1338584
ugcgacagcuggaauuugc

SEQ ID NO: 1338586 - RNA, 19 nt, Artificial Sequence
  Description of Artificial Sequence: Synthetic oligonucleotide
  Sense strand starting at position 3300 of SEQ ID NO: 1242322
cacaguaaacucggguuua

SEQ ID NO: 1338587 - RNA, 19 nt, Artificial Sequence
  Description of Artificial Sequence: Synthetic oligonucleotide
  Antisense strand to SEQ ID NO: 1338586
uaaacccgaguuuacugug

SEQ ID NO: 1338588 - RNA, 19 nt, Artificial Sequence
  Description of Artificial Sequence: Synthetic oligonucleotide
  Sense strand starting at position 3301 of SEQ ID NO: 1242322
acaguaaacucggguuuag

SEQ ID NO: 1338589 - RNA, 19 nt, Artificial Sequence
  Description of Artificial Sequence: Synthetic oligonucleotide
  Antisense strand to SEQ ID NO: 1338588
cuaaacccgaguuuacugu

SEQ ID NO: 1338590 - RNA, 19 nt, Artificial Sequence
  Description of Artificial Sequence: Synthetic oligonucleotide
  Sense strand starting at position 3331 of SEQ ID NO: 1242322
guccuaacagguugauaac

SEQ ID NO: 1338591 - RNA, 19 nt, Artificial Sequence
  Description of Artificial Sequence: Synthetic oligonucleotide
  Antisense strand to SEQ ID NO: 1338590
guuaucaaccuguuaggac

SEQ ID NO: 1338592 - RNA, 19 nt, Artificial Sequence
  Description of Artificial Sequence: Synthetic oligonucleotide
  Sense strand starting at position 3353 of SEQ ID NO: 1242322
aagagcucuucccguguga

SEQ ID NO: 1338593 - RNA, 19 nt, Artificial Sequence
  Description of Artificial Sequence: Synthetic oligonucleotide
  Antisense strand to SEQ ID NO: 1338592
ucacacgggaagagcucuu

SEQ ID NO: 1338594 - RNA, 19 nt, Artificial Sequence
  Description of Artificial Sequence: Synthetic oligonucleotide
  Sense strand starting at position 3355 of SEQ ID NO: 1242322
gagcucuucccgugugaga

SEQ ID NO: 1338595 - RNA, 19 nt, Artificial Sequence
  Description of Artificial Sequence: Synthetic oligonucleotide
  Antisense strand to SEQ ID NO: 1338594
ucucacacgggaagagcuc

SEQ ID NO: 1338596 - RNA, 19 nt, Artificial Sequence
  Description of Artificial Sequence: Synthetic oligonucleotide
  Sense strand starting at position 3357 of SEQ ID NO: 1242322
gcucuucccgugugagaga

SEQ ID NO: 1338597 - RNA, 19 nt, Artificial Sequence
  Description of Artificial Sequence: Synthetic oligonucleotide
  Antisense strand to SEQ ID NO: 1338596
ucucucacacgggaagagc

SEQ ID NO: 1338598 - RNA, 19 nt, Artificial Sequence
  Description of Artificial Sequence: Synthetic oligonucleotide
  Sense strand starting at position 3384 of SEQ ID NO: 1242322
cagacuguuggugagguua

SEQ ID NO: 1338599 - RNA, 19 nt, Artificial Sequence
  Description of Artificial Sequence: Synthetic oligonucleotide
  Antisense strand to SEQ ID NO: 1338598
uaaccucaccaacagucug

SEQ ID NO: 1338600 - RNA, 19 nt, Artificial Sequence
  Description of Artificial Sequence: Synthetic oligonucleotide
  Sense strand starting at position 3386 of SEQ ID NO: 1242322
gacuguuggugagguuaag

SEQ ID NO: 1338601 - RNA, 19 nt, Artificial Sequence
  Description of Artificial Sequence: Synthetic oligonucleotide
  Antisense strand to SEQ ID NO: 1338600
cuuaaccucaccaacaguc

SEQ ID NO: 1338602 - RNA, 19 nt, Artificial Sequence
  Description of Artificial Sequence: Synthetic oligonucleotide
  Sense strand starting at position 3771 of SEQ ID NO: 1242322
gggaaucacugaucagcua

SEQ ID NO: 1338603 - RNA, 19 nt, Artificial Sequence
  Description of Artificial Sequence: Synthetic oligonucleotide
  Antisense strand to SEQ ID NO: 1338602
uagcugaucagugauuccc

SEQ ID NO: 1338604 - RNA, 19 nt, Artificial Sequence
  Description of Artificial Sequence: Synthetic oligonucleotide
  Sense strand starting at position 3812 of SEQ ID NO: 1242322
aguaauugcuaauggcuga

SEQ ID NO: 1338605 - RNA, 19 nt, Artificial Sequence
  Description of Artificial Sequence: Synthetic oligonucleotide
  Antisense strand to SEQ ID NO: 1338604
ucagccauuagcaauuacu

SEQ ID NO: 1338606 - RNA, 19 nt, Artificial Sequence
  Description of Artificial Sequence: Synthetic oligonucleotide
  Sense strand starting at position 3826 of SEQ ID NO: 1242322
gcugauauggcacagggaa

SEQ ID NO: 1338607 - RNA, 19 nt, Artificial Sequence
  Description of Artificial Sequence: Synthetic oligonucleotide
  Antisense strand to SEQ ID NO: 1338606
uucccugugccauaucagc

SEQ ID NO: 1338608 - RNA, 19 nt, Artificial Sequence
  Description of Artificial Sequence: Synthetic oligonucleotide
  Sense strand starting at position 3883 of SEQ ID NO: 1242322
aggcucucaccaggaguau

SEQ ID NO: 1338609 - RNA, 19 nt, Artificial Sequence
  Description of Artificial Sequence: Synthetic oligonucleotide
  Antisense strand to SEQ ID NO: 1338608
auacuccuggugagagccu

SEQ ID NO: 1338610 - RNA, 19 nt, Artificial Sequence
  Description of Artificial Sequence: Synthetic oligonucleotide
  Sense strand starting at position 3884 of SEQ ID NO: 1242322
ggcucucaccaggaguaua

SEQ ID NO: 1338611 - RNA, 19 nt, Artificial Sequence
  Description of Artificial Sequence: Synthetic oligonucleotide
  Antisense strand to SEQ ID NO: 1338610
uauacuccuggugagagcc

SEQ ID NO: 1338612 - RNA, 19 nt, Artificial Sequence
  Description of Artificial Sequence: Synthetic oligonucleotide
  Sense strand starting at position 185 of SEQ ID NO: 1242323
cgcugacaucuugaucuua

SEQ ID NO: 1338613 - RNA, 19 nt, Artificial Sequence
  Description of Artificial Sequence: Synthetic oligonucleotide
  Antisense strand to SEQ ID NO: 1338612
uaagaucaagaugucagcg

SEQ ID NO: 1338614 - RNA, 19 nt, Artificial Sequence
  Description of Artificial Sequence: Synthetic oligonucleotide
  Sense strand starting at position 477 of SEQ ID NO: 1242323
agauuuaauucccagaaga

SEQ ID NO: 1338615 - RNA, 19 nt, Artificial Sequence
  Description of Artificial Sequence: Synthetic oligonucleotide
  Antisense strand to SEQ ID NO: 1338614
ucuucugggaauuaaaucu

SEQ ID NO: 1338616 - RNA, 19 nt, Artificial Sequence
  Description of Artificial Sequence: Synthetic oligonucleotide
  Sense strand starting at position 933 of SEQ ID NO: 1242323
gcaagacucucagaauaau

SEQ ID NO: 1338617 - RNA, 19 nt, Artificial Sequence
  Description of Artificial Sequence: Synthetic oligonucleotide
  Antisense strand to SEQ ID NO: 1338616
auuauucugagagucuugc

SEQ ID NO: 1338618 - RNA, 19 nt, Artificial Sequence
  Description of Artificial Sequence: Synthetic oligonucleotide
  Sense strand starting at position 1035 of SEQ ID NO: 1242323
gaagaaugcggucaguauu

SEQ ID NO: 1338619 - RNA, 19 nt, Artificial Sequence
  Description of Artificial Sequence: Synthetic oligonucleotide
  Antisense strand to SEQ ID NO: 1338618
aauacugaccgcauucuuc

SEQ ID NO: 1338620 - RNA, 19 nt, Artificial Sequence
  Description of Artificial Sequence: Synthetic oligonucleotide
  Sense strand starting at position 1110 of SEQ ID NO: 1242323
aguagacaucauuaagucu

SEQ ID NO: 1338621 - RNA, 19 nt, Artificial Sequence
  Description of Artificial Sequence: Synthetic oligonucleotide
  Antisense strand to SEQ ID NO: 1338620
agacuuaaugaugucuacu

SEQ ID NO: 1338622 - RNA, 19 nt, Artificial Sequence
  Description of Artificial Sequence: Synthetic oligonucleotide
  Sense strand starting at position 1141 of SEQ ID NO: 1242323
caguacgugcaaugguauu

SEQ ID NO: 1338623 - RNA, 19 nt, Artificial Sequence
  Description of Artificial Sequence: Synthetic oligonucleotide
  Antisense strand to SEQ ID NO: 1338622
aauaccauugcacguacug

SEQ ID NO: 1338624 - RNA, 19 nt, Artificial Sequence
  Description of Artificial Sequence: Synthetic oligonucleotide
  Sense strand starting at position 1266 of SEQ ID NO: 1242323
uagagaaccgcuuguuaug

SEQ ID NO: 1338625 - RNA, 19 nt, Artificial Sequence
  Description of Artificial Sequence: Synthetic oligonucleotide
  Antisense strand to SEQ ID NO: 1338624
cauaacaagcgguucucua

SEQ ID NO: 1338626 - RNA, 19 nt, Artificial Sequence
  Description of Artificial Sequence: Synthetic oligonucleotide
  Sense strand starting at position 1268 of SEQ ID NO: 1242323
gagaaccgcuuguuaugau

SEQ ID NO: 1338627 - RNA, 19 nt, Artificial Sequence
  Description of Artificial Sequence: Synthetic oligonucleotide
  Antisense strand to SEQ ID NO: 1338626
aucauaacaagcgguucuc

SEQ ID NO: 1338628 - RNA, 19 nt, Artificial Sequence
  Description of Artificial Sequence: Synthetic oligonucleotide
  Sense strand starting at position 1295 of SEQ ID NO: 1242323
acguuagagacuggaguua

SEQ ID NO: 1338629 - RNA, 19 nt, Artificial Sequence
  Description of Artificial Sequence: Synthetic oligonucleotide
  Antisense strand to SEQ ID NO: 1338628
uaacuccagucucuaacgu

SEQ ID NO: 1338630 - RNA, 19 nt, Artificial Sequence
  Description of Artificial Sequence: Synthetic oligonucleotide
  Sense strand starting at position 1374 of SEQ ID NO: 1242323
gucuaauguuaagacaaag

SEQ ID NO: 1338631 - RNA, 19 nt, Artificial Sequence
  Description of Artificial Sequence: Synthetic oligonucleotide
  Antisense strand to SEQ ID NO: 1338630
cuuugucuuaacauuagac

SEQ ID NO: 1338632 - RNA, 19 nt, Artificial Sequence
  Description of Artificial Sequence: Synthetic oligonucleotide
  Sense strand starting at position 1634 of SEQ ID NO: 1242323
guuagaagacucugcacuu

SEQ ID NO: 1338633 - RNA, 19 nt, Artificial Sequence
  Description of Artificial Sequence: Synthetic oligonucleotide
  Antisense strand to SEQ ID NO: 1338632
aagugcagagucuucuaac

SEQ ID NO: 1338634 - RNA, 19 nt, Artificial Sequence
  Description of Artificial Sequence: Synthetic oligonucleotide
  Sense strand starting at position 1710 of SEQ ID NO: 1242323
uugagaaagugccuuguau

SEQ ID NO: 1338635 - RNA, 19 nt, Artificial Sequence
  Description of Artificial Sequence: Synthetic oligonucleotide
  Antisense strand to SEQ ID NO: 1338634
auacaaggcacuuucucaa

SEQ ID NO: 1338636 - RNA, 19 nt, Artificial Sequence
  Description of Artificial Sequence: Synthetic oligonucleotide
  Sense strand starting at position 1712 of SEQ ID NO: 1242323
gagaaagugccuuguauuc

SEQ ID NO: 1338637 - RNA, 19 nt, Artificial Sequence
  Description of Artificial Sequence: Synthetic oligonucleotide
  Antisense strand to SEQ ID NO: 1338636
gaauacaaggcacuuucuc

SEQ ID NO: 1338638 - RNA, 19 nt, Artificial Sequence
  Description of Artificial Sequence: Synthetic oligonucleotide
  Sense strand starting at position 1906 of SEQ ID NO: 1242323
agauaucuugcuggcaucu

SEQ ID NO: 1338639 - RNA, 19 nt, Artificial Sequence
  Description of Artificial Sequence: Synthetic oligonucleotide
  Antisense strand to SEQ ID NO: 1338638
agaugccagcaagauaucu

SEQ ID NO: 1338640 - RNA, 19 nt, Artificial Sequence
  Description of Artificial Sequence: Synthetic oligonucleotide
  Sense strand starting at position 1990 of SEQ ID NO: 1242323
cucuuccugugucuugaau

SEQ ID NO: 1338641 - RNA, 19 nt, Artificial Sequence
  Description of Artificial Sequence: Synthetic oligonucleotide
  Antisense strand to SEQ ID NO: 1338640
auucaagacacaggaagag

SEQ ID NO: 1338642 - RNA, 19 nt, Artificial Sequence
  Description of Artificial Sequence: Synthetic oligonucleotide
  Sense strand starting at position 2139 of SEQ ID NO: 1242323
uuucuuagauggcuauaau

SEQ ID NO: 1338643 - RNA, 19 nt, Artificial Sequence
  Description of Artificial Sequence: Synthetic oligonucleotide
  Antisense strand to SEQ ID NO: 1338642
auuauagccaucuaagaaa

SEQ ID NO: 1338644 - RNA, 19 nt, Artificial Sequence
  Description of Artificial Sequence: Synthetic oligonucleotide
  Sense strand starting at position 2140 of SEQ ID NO: 1242323
uucuuagauggcuauaaua

SEQ ID NO: 1338645 - RNA, 19 nt, Artificial Sequence
  Description of Artificial Sequence: Synthetic oligonucleotide
  Antisense strand to SEQ ID NO: 1338644
uauuauagccaucuaagaa

SEQ ID NO: 1338646 - RNA, 19 nt, Artificial Sequence
  Description of Artificial Sequence: Synthetic oligonucleotide
  Sense strand starting at position 2186 of SEQ ID NO: 1242323
acguauucuugacucugau

SEQ ID NO: 1338647 - RNA, 19 nt, Artificial Sequence
  Description of Artificial Sequence: Synthetic oligonucleotide
  Antisense strand to SEQ ID NO: 1338646
aucagagucaagaauacgu

SEQ ID NO: 1338648 - RNA, 19 nt, Artificial Sequence
  Description of Artificial Sequence: Synthetic oligonucleotide
  Sense strand starting at position 2254 of SEQ ID NO: 1242323
guccaucacucuccuguua

SEQ ID NO: 1338649 - RNA, 19 nt, Artificial Sequence
  Description of Artificial Sequence: Synthetic oligonucleotide
  Antisense strand to SEQ ID NO: 1338648
uaacaggagagugauggac

SEQ ID NO: 1338650 - RNA, 19 nt, Artificial Sequence
  Description of Artificial Sequence: Synthetic oligonucleotide
  Sense strand starting at position 2381 of SEQ ID NO: 1242323
auaauucgcuaaguuaagu

SEQ ID NO: 1338651 - RNA, 19 nt, Artificial Sequence
  Description of Artificial Sequence: Synthetic oligonucleotide
  Antisense strand to SEQ ID NO: 1338650
acuuaacuuagcgaauuau

SEQ ID NO: 1338652 - RNA, 19 nt, Artificial Sequence
  Description of Artificial Sequence: Synthetic oligonucleotide
  Sense strand starting at position 2390 of SEQ ID NO: 1242323
uaaguuaagugguucucaa

SEQ ID NO: 1338653 - RNA, 19 nt, Artificial Sequence
  Description of Artificial Sequence: Synthetic oligonucleotide
  Antisense strand to SEQ ID NO: 1338652
uugagaaccacuuaacuua

SEQ ID NO: 1338654 - RNA, 19 nt, Artificial Sequence
  Description of Artificial Sequence: Synthetic oligonucleotide
  Sense strand starting at position 2442 of SEQ ID NO: 1242323
cuaggaacuuauuagauuu

SEQ ID NO: 1338655 - RNA, 19 nt, Artificial Sequence
  Description of Artificial Sequence: Synthetic oligonucleotide
  Antisense strand to SEQ ID NO: 1338654
aaaucuaauaaguuccuag

SEQ ID NO: 1338656 - RNA, 19 nt, Artificial Sequence
  Description of Artificial Sequence: Synthetic oligonucleotide
  Sense strand starting at position 2487 of SEQ ID NO: 1242323
aucagaaauucugaggaua

SEQ ID NO: 1338657 - RNA, 19 nt, Artificial Sequence
  Description of Artificial Sequence: Synthetic oligonucleotide
  Antisense strand to SEQ ID NO: 1338656
uauccucagaauuucugau

SEQ ID NO: 1338658 - RNA, 19 nt, Artificial Sequence
  Description of Artificial Sequence: Synthetic oligonucleotide
  Sense strand starting at position 2489 of SEQ ID NO: 1242323
cagaaauucugaggauagg

SEQ ID NO: 1338659 - RNA, 19 nt, Artificial Sequence
  Description of Artificial Sequence: Synthetic oligonucleotide
  Antisense strand to SEQ ID NO: 1338658
ccuauccucagaauuucug

SEQ ID NO: 1338660 - RNA, 19 nt, Artificial Sequence
  Description of Artificial Sequence: Synthetic oligonucleotide
  Sense strand starting at position 2512 of SEQ ID NO: 1242323
aggugucugugguucaaca

SEQ ID NO: 1338661 - RNA, 19 nt, Artificial Sequence
  Description of Artificial Sequence: Synthetic oligonucleotide
  Antisense strand to SEQ ID NO: 1338660
uguugaaccacagacaccu

SEQ ID NO: 1338662 - RNA, 19 nt, Artificial Sequence
  Description of Artificial Sequence: Synthetic oligonucleotide
  Sense strand starting at position 2633 of SEQ ID NO: 1242323
cagcaaugcugagcuggau

SEQ ID NO: 1338663 - RNA, 19 nt, Artificial Sequence
  Description of Artificial Sequence: Synthetic oligonucleotide
  Antisense strand to SEQ ID NO: 1338662
auccagcucagcauugcug

SEQ ID NO: 1338664 - RNA, 19 nt, Artificial Sequence
  Description of Artificial Sequence: Synthetic oligonucleotide
  Sense strand starting at position 2662 of SEQ ID NO: 1242323
ugugcuuacuguuucuaga

SEQ ID NO: 1338665 - RNA, 19 nt, Artificial Sequence
  Description of Artificial Sequence: Synthetic oligonucleotide
  Antisense strand to SEQ ID NO: 1338664
ucuagaaacaguaagcaca

SEQ ID NO: 1338666 - RNA, 19 nt, Artificial Sequence
  Description of Artificial Sequence: Synthetic oligonucleotide
  Sense strand starting at position 2664 of SEQ ID NO: 1242323
ugcuuacuguuucuagaaa

SEQ ID NO: 1338667 - RNA, 19 nt, Artificial Sequence
  Description of Artificial Sequence: Synthetic oligonucleotide
  Antisense strand to SEQ ID NO: 1338666
uuucuagaaacaguaagca

SEQ ID NO: 1338668 - RNA, 19 nt, Artificial Sequence
  Description of Artificial Sequence: Synthetic oligonucleotide
  Sense strand starting at position 2809 of SEQ ID NO: 1242323
uuaugaauuauugggugaa

SEQ ID NO: 1338669 - RNA, 19 nt, Artificial Sequence
  Description of Artificial Sequence: Synthetic oligonucleotide
  Antisense strand to SEQ ID NO: 1338668
uucacccaauaauucauaa

SEQ ID NO: 1338670 - RNA, 19 nt, Artificial Sequence
  Description of Artificial Sequence: Synthetic oligonucleotide
  Sense strand starting at position 2821 of SEQ ID NO: 1242323
gggugaaaugucggacaua

SEQ ID NO: 1338671 - RNA, 19 nt, Artificial Sequence
  Description of Artificial Sequence: Synthetic oligonucleotide
  Antisense strand to SEQ ID NO: 1338670
uauguccgacauuucaccc

SEQ ID NO: 1338672 - RNA, 19 nt, Artificial Sequence
  Description of Artificial Sequence: Synthetic oligonucleotide
  Sense strand starting at position 2854 of SEQ ID NO: 1242323
aucccuugccucuaggaga

SEQ ID NO: 1338673 - RNA, 19 nt, Artificial Sequence
  Description of Artificial Sequence: Synthetic oligonucleotide
  Antisense strand to SEQ ID NO: 1338672
ucuccuagaggcaagggau

SEQ ID NO: 1338674 - RNA, 19 nt, Artificial Sequence
  Description of Artificial Sequence: Synthetic oligonucleotide
  Sense strand starting at position 3164 of SEQ ID NO: 1242323
agaguuagcuuccuuuaau

SEQ ID NO: 1338675 - RNA, 19 nt, Artificial Sequence
  Description of Artificial Sequence: Synthetic oligonucleotide
  Antisense strand to SEQ ID NO: 1338674
auuaaaggaagcuaacucu

SEQ ID NO: 1338676 - RNA, 19 nt, Artificial Sequence
  Description of Artificial Sequence: Synthetic oligonucleotide
  Sense strand starting at position 3221 of SEQ ID NO: 1242323
auaggaaucuccuagggau

SEQ ID NO: 1338677 - RNA, 19 nt, Artificial Sequence
  Description of Artificial Sequence: Synthetic oligonucleotide
  Antisense strand to SEQ ID NO: 1338676
aucccuaggagauuccuau

SEQ ID NO: 1338678 - RNA, 19 nt, Artificial Sequence
  Description of Artificial Sequence: Synthetic oligonucleotide
  Sense strand starting at position 3535 of SEQ ID NO: 1242323
gucuguauuucuccuagua

SEQ ID NO: 1338679 - RNA, 19 nt, Artificial Sequence
  Description of Artificial Sequence: Synthetic oligonucleotide
  Antisense strand to SEQ ID NO: 1338678
uacuaggagaaauacagac

SEQ ID NO: 1338680 - RNA, 19 nt, Artificial Sequence
  Description of Artificial Sequence: Synthetic oligonucleotide
  Sense strand starting at position 3537 of SEQ ID NO: 1242323
cuguauuucuccuaguaag

SEQ ID NO: 1338681 - RNA, 19 nt, Artificial Sequence
  Description of Artificial Sequence: Synthetic oligonucleotide
  Antisense strand to SEQ ID NO: 1338680
cuuacuaggagaaauacag

SEQ ID NO: 1338682 - RNA, 19 nt, Artificial Sequence
  Description of Artificial Sequence: Synthetic oligonucleotide
  Sense strand starting at position 3559 of SEQ ID NO: 1242323
ccaggugaugcccagguaa

SEQ ID NO: 1338683 - RNA, 19 nt, Artificial Sequence
  Description of Artificial Sequence: Synthetic oligonucleotide
  Antisense strand to SEQ ID NO: 1338682
uuaccugggcaucaccugg

SEQ ID NO: 1338684 - RNA, 19 nt, Artificial Sequence
  Description of Artificial Sequence: Synthetic oligonucleotide
  Sense strand starting at position 3561 of SEQ ID NO: 1242323
aggugaugcccagguaaua

SEQ ID NO: 1338685 - RNA, 19 nt, Artificial Sequence
  Description of Artificial Sequence: Synthetic oligonucleotide
  Antisense strand to SEQ ID NO: 1338684
uauuaccugggcaucaccu

SEQ ID NO: 1338686 - RNA, 19 nt, Artificial Sequence
  Description of Artificial Sequence: Synthetic oligonucleotide
  Sense strand starting at position 3909 of SEQ ID NO: 1242323
ucggaaagcugacucuuua

SEQ ID NO: 1338687 - RNA, 19 nt, Artificial Sequence
  Description of Artificial Sequence: Synthetic oligonucleotide
  Antisense strand to SEQ ID NO: 1338686
uaaagagucagcuuuccga

SEQ ID NO: 1338688 - RNA, 19 nt, Artificial Sequence
  Description of Artificial Sequence: Synthetic oligonucleotide
  Sense strand starting at position 3924 of SEQ ID NO: 1242323
uuuaucugccaguagggaa

SEQ ID NO: 1338689 - RNA, 19 nt, Artificial Sequence
  Description of Artificial Sequence: Synthetic oligonucleotide
  Antisense strand to SEQ ID NO: 1338688
uucccuacuggcagauaaa

SEQ ID NO: 1338690 - RNA, 19 nt, Artificial Sequence
  Description of Artificial Sequence: Synthetic oligonucleotide
  Sense strand starting at position 3970 of SEQ ID NO: 1242323
uccagaaagucucagggau

SEQ ID NO: 1338691 - RNA, 19 nt, Artificial Sequence
  Description of Artificial Sequence: Synthetic oligonucleotide
  Antisense strand to SEQ ID NO: 1338690
aucccugagacuuucugga

SEQ ID NO: 1338692 - RNA, 19 nt, Artificial Sequence
  Description of Artificial Sequence: Synthetic oligonucleotide
  Sense strand starting at position 3 of SEQ ID NO: 1242324
gaauauacuugagagauga

SEQ ID NO: 1338693 - RNA, 19 nt, Artificial Sequence
  Description of Artificial Sequence: Synthetic oligonucleotide
  Antisense strand to SEQ ID NO: 1338692
ucaucucucaaguauauuc

SEQ ID NO: 1338694 - RNA, 19 nt, Artificial Sequence
  Description of Artificial Sequence: Synthetic oligonucleotide
  Sense strand starting at position 192 of SEQ ID NO: 1242324
auacuuaaagaguguucua

SEQ ID NO: 1338695 - RNA, 19 nt, Artificial Sequence
  Description of Artificial Sequence: Synthetic oligonucleotide
  Antisense strand to SEQ ID NO: 1338694
uagaacacucuuuaaguau

SEQ ID NO: 1338696 - RNA, 19 nt, Artificial Sequence
  Description of Artificial Sequence: Synthetic oligonucleotide
  Sense strand starting at position 195 of SEQ ID NO: 1242324
cuuaaagaguguucuauac

SEQ ID NO: 1338697 - RNA, 19 nt, Artificial Sequence
  Description of Artificial Sequence: Synthetic oligonucleotide
  Antisense strand to SEQ ID NO: 1338696
guauagaacacucuuuaag

SEQ ID NO: 1338698 - RNA, 19 nt, Artificial Sequence
  Description of Artificial Sequence: Synthetic oligonucleotide
  Sense strand starting at position 335 of SEQ ID NO: 1242324
ugcuguaagaaccauacga

SEQ ID NO: 1338699 - RNA, 19 nt, Artificial Sequence
  Description of Artificial Sequence: Synthetic oligonucleotide
  Antisense strand to SEQ ID NO: 1338698
ucguaugguucuuacagca

SEQ ID NO: 1338700 - RNA, 19 nt, Artificial Sequence
  Description of Artificial Sequence: Synthetic oligonucleotide
  Sense strand starting at position 442 of SEQ ID NO: 1242324
gcaacuauuuaacaggaga

SEQ ID NO: 1338701 - RNA, 19 nt, Artificial Sequence
  Description of Artificial Sequence: Synthetic oligonucleotide
  Antisense strand to SEQ ID NO: 1338700
ucuccuguuaaauaguugc

SEQ ID NO: 1338702 - RNA, 19 nt, Artificial Sequence
  Description of Artificial Sequence: Synthetic oligonucleotide
  Sense strand starting at position 524 of SEQ ID NO: 1242324
augauaaguuaagagaucu

SEQ ID NO: 1338703 - RNA, 19 nt, Artificial Sequence
  Description of Artificial Sequence: Synthetic oligonucleotide
  Antisense strand to SEQ ID NO: 1338702
agaucucuuaacuuaucau

SEQ ID NO: 1338704 - RNA, 19 nt, Artificial Sequence
  Description of Artificial Sequence: Synthetic oligonucleotide
  Sense strand starting at position 772 of SEQ ID NO: 1242324
ugagaagucuugcuucuca

SEQ ID NO: 1338705 - RNA, 19 nt, Artificial Sequence
  Description of Artificial Sequence: Synthetic oligonucleotide
  Antisense strand to SEQ ID NO: 1338704
ugagaagcaagacuucuca

SEQ ID NO: 1338706 - RNA, 19 nt, Artificial Sequence
  Description of Artificial Sequence: Synthetic oligonucleotide
  Sense strand starting at position 886 of SEQ ID NO: 1242324
auuaacgcucuauagacau

SEQ ID NO: 1338707 - RNA, 19 nt, Artificial Sequence
  Description of Artificial Sequence: Synthetic oligonucleotide
  Antisense strand to SEQ ID NO: 1338706
augucuauagagcguuaau

SEQ ID NO: 1338708 - RNA, 19 nt, Artificial Sequence
  Description of Artificial Sequence: Synthetic oligonucleotide
  Sense strand starting at position 1053 of SEQ ID NO: 1242324
cucccuuuacuaugauguu

SEQ ID NO: 1338709 - RNA, 19 nt, Artificial Sequence
  Description of Artificial Sequence: Synthetic oligonucleotide
  Antisense strand to SEQ ID NO: 1338708
aacaucauaguaaagggag

SEQ ID NO: 1338710 - RNA, 19 nt, Artificial Sequence
  Description of Artificial Sequence: Synthetic oligonucleotide
  Sense strand starting at position 2277 of SEQ ID NO: 1242324
gcgggaacuuaacuuuguu

SEQ ID NO: 1338711 - RNA, 19 nt, Artificial Sequence
  Description of Artificial Sequence: Synthetic oligonucleotide
  Antisense strand to SEQ ID NO: 1338710
aacaaaguuaaguucccgc

SEQ ID NO: 1338712 - RNA, 19 nt, Artificial Sequence
  Description of Artificial Sequence: Synthetic oligonucleotide
  Sense strand starting at position 2280 of SEQ ID NO: 1242324
ggaacuuaacuuuguuauu

SEQ ID NO: 1338713 - RNA, 19 nt, Artificial Sequence
  Description of Artificial Sequence: Synthetic oligonucleotide
  Antisense strand to SEQ ID NO: 1338712
aauaacaaaguuaaguucc

SEQ ID NO: 1338714 - RNA, 19 nt, Artificial Sequence
  Description of Artificial Sequence: Synthetic oligonucleotide
  Sense strand starting at position 2294 of SEQ ID NO: 1242324
uuauuucuuugugugcaga

SEQ ID NO: 1338715 - RNA, 19 nt, Artificial Sequence
  Description of Artificial Sequence: Synthetic oligonucleotide
  Antisense strand to SEQ ID NO: 1338714
ucugcacacaaagaaauaa

SEQ ID NO: 1338716 - RNA, 19 nt, Artificial Sequence
  Description of Artificial Sequence: Synthetic oligonucleotide
  Sense strand starting at position 2426 of SEQ ID NO: 1242324
ggguuaucugcagagggca

SEQ ID NO: 1338717 - RNA, 19 nt, Artificial Sequence
  Description of Artificial Sequence: Synthetic oligonucleotide
  Antisense strand to SEQ ID NO: 1338716
ugcccucugcagauaaccc

SEQ ID NO: 1338718 - RNA, 19 nt, Artificial Sequence
  Description of Artificial Sequence: Synthetic oligonucleotide
  Sense strand starting at position 2586 of SEQ ID NO: 1242324
agccaaauacaaugaguau

SEQ ID NO: 1338719 - RNA, 19 nt, Artificial Sequence
  Description of Artificial Sequence: Synthetic oligonucleotide
  Antisense strand to SEQ ID NO: 1338718
auacucauuguauuuggcu

SEQ ID NO: 1338720 - RNA, 19 nt, Artificial Sequence
  Description of Artificial Sequence: Synthetic oligonucleotide
  Sense strand starting at position 2608 of SEQ ID NO: 1242324
gagaaucugcuacgcugau

SEQ ID NO: 1338721 - RNA, 19 nt, Artificial Sequence
  Description of Artificial Sequence: Synthetic oligonucleotide
  Antisense strand to SEQ ID NO: 1338720
aucagcguagcagauucuc

SEQ ID NO: 1338722 - RNA, 19 nt, Artificial Sequence
  Description of Artificial Sequence: Synthetic oligonucleotide
  Sense strand starting at position 2734 of SEQ ID NO: 1242324
uuuagagaguaagauuuga

SEQ ID NO: 1338723 - RNA, 19 nt, Artificial Sequence
  Description of Artificial Sequence: Synthetic oligonucleotide
  Antisense strand to SEQ ID NO: 1338722
ucaaaucuuacucucuaaa

SEQ ID NO: 1338724 - RNA, 19 nt, Artificial Sequence
  Description of Artificial Sequence: Synthetic oligonucleotide
  Sense strand starting at position 2912 of SEQ ID NO: 1242324
acuguuagcagugauggua

SEQ ID NO: 1338725 - RNA, 19 nt, Artificial Sequence
  Description of Artificial Sequence: Synthetic oligonucleotide
  Antisense strand to SEQ ID NO: 1338724
uaccaucacugcuaacagu

SEQ ID NO: 1338726 - RNA, 19 nt, Artificial Sequence
  Description of Artificial Sequence: Synthetic oligonucleotide
  Sense strand starting at position 2915 of SEQ ID NO: 1242324
guuagcagugaugguaaua

SEQ ID NO: 1338727 - RNA, 19 nt, Artificial Sequence
  Description of Artificial Sequence: Synthetic oligonucleotide
  Antisense strand to SEQ ID NO: 1338726
uauuaccaucacugcuaac

SEQ ID NO: 1338728 - RNA, 19 nt, Artificial Sequence
  Description of Artificial Sequence: Synthetic oligonucleotide
  Sense strand starting at position 2952 of SEQ ID NO: 1242324
gcucucacuuaauugauga

SEQ ID NO: 1338729 - RNA, 19 nt, Artificial Sequence
  Description of Artificial Sequence: Synthetic oligonucleotide
  Antisense strand to SEQ ID NO: 1338728
ucaucaauuaagugagagc

SEQ ID NO: 1338730 - RNA, 19 nt, Artificial Sequence
  Description of Artificial Sequence: Synthetic oligonucleotide
  Sense strand starting at position 3076 of SEQ ID NO: 1242324
ucauuugcuaguggcagaa

SEQ ID NO: 1338731 - RNA, 19 nt, Artificial Sequence
  Description of Artificial Sequence: Synthetic oligonucleotide
  Antisense strand to SEQ ID NO: 1338730
uucugccacuagcaaauga

SEQ ID NO: 1338732 - RNA, 19 nt, Artificial Sequence
  Description of Artificial Sequence: Synthetic oligonucleotide
  Sense strand starting at position 3125 of SEQ ID NO: 1242324
uguugacugguucagguaa

SEQ ID NO: 1338733 - RNA, 19 nt, Artificial Sequence
  Description of Artificial Sequence: Synthetic oligonucleotide
  Antisense strand to SEQ ID NO: 1338732
uuaccugaaccagucaaca

SEQ ID NO: 1338734 - RNA, 19 nt, Artificial Sequence
  Description of Artificial Sequence: Synthetic oligonucleotide
  Sense strand starting at position 3136 of SEQ ID NO: 1242324
ucagguaauguggaagcaa

SEQ ID NO: 1338735 - RNA, 19 nt, Artificial Sequence
  Description of Artificial Sequence: Synthetic oligonucleotide
  Antisense strand to SEQ ID NO: 1338734
uugcuuccacauuaccuga

SEQ ID NO: 1338736 - RNA, 19 nt, Artificial Sequence
  Description of Artificial Sequence: Synthetic oligonucleotide
  Sense strand starting at position 3248 of SEQ ID NO: 1242324
gucaaauaccgacagguaa

SEQ ID NO: 1338737 - RNA, 19 nt, Artificial Sequence
  Description of Artificial Sequence: Synthetic oligonucleotide
  Antisense strand to SEQ ID NO: 1338736
uuaccugucgguauuugac

SEQ ID NO: 1338738 - RNA, 19 nt, Artificial Sequence
  Description of Artificial Sequence: Synthetic oligonucleotide
  Sense strand starting at position 3390 of SEQ ID NO: 1242324
ucuggaaggcuagagguua

SEQ ID NO: 1338739 - RNA, 19 nt, Artificial Sequence
  Description of Artificial Sequence: Synthetic oligonucleotide
  Antisense strand to SEQ ID NO: 1338738
uaaccucuagccuuccaga

SEQ ID NO: 1338740 - RNA, 19 nt, Artificial Sequence
  Description of Artificial Sequence: Synthetic oligonucleotide
  Sense strand starting at position 3420 of SEQ ID NO: 1242324
aguggacuccaccauuagu

SEQ ID NO: 1338741 - RNA, 19 nt, Artificial Sequence
  Description of Artificial Sequence: Synthetic oligonucleotide
  Antisense strand to SEQ ID NO: 1338740
acuaaugguggaguccacu

SEQ ID NO: 1338742 - RNA, 19 nt, Artificial Sequence
  Description of Artificial Sequence: Synthetic oligonucleotide
  Sense strand starting at position 3469 of SEQ ID NO: 1242324
guggacaguuaguugaaca

SEQ ID NO: 1338743 - RNA, 19 nt, Artificial Sequence
  Description of Artificial Sequence: Synthetic oligonucleotide
  Antisense strand to SEQ ID NO: 1338742
uguucaacuaacuguccac

SEQ ID NO: 1338744 - RNA, 19 nt, Artificial Sequence
  Description of Artificial Sequence: Synthetic oligonucleotide
  Sense strand starting at position 3470 of SEQ ID NO: 1242324
uggacaguuaguugaacaa

SEQ ID NO: 1338745 - RNA, 19 nt, Artificial Sequence
  Description of Artificial Sequence: Synthetic oligonucleotide
  Antisense strand to SEQ ID NO: 1338744
uuguucaacuaacugucca

SEQ ID NO: 1338746 - RNA, 19 nt, Artificial Sequence
  Description of Artificial Sequence: Synthetic oligonucleotide
  Sense strand starting at position 3567 of SEQ ID NO: 1242324
ugcauuguggcagaagacu

SEQ ID NO: 1338747 - RNA, 19 nt, Artificial Sequence
  Description of Artificial Sequence: Synthetic oligonucleotide
  Antisense strand to SEQ ID NO: 1338746
agucuucugccacaaugca

SEQ ID NO: 1338748 - RNA, 19 nt, Artificial Sequence
  Description of Artificial Sequence: Synthetic oligonucleotide
  Sense strand starting at position 3581 of SEQ ID NO: 1242324
agacuuaguuggcccuaga

SEQ ID NO: 1338749 - RNA, 19 nt, Artificial Sequence
  Description of Artificial Sequence: Synthetic oligonucleotide
  Antisense strand to SEQ ID NO: 1338748
ucuagggccaacuaagucu

SEQ ID NO: 1338750 - RNA, 19 nt, Artificial Sequence
  Description of Artificial Sequence: Synthetic oligonucleotide
  Sense strand starting at position 3584 of SEQ ID NO: 1242324
cuuaguuggcccuagaauu

SEQ ID NO: 1338751 - RNA, 19 nt, Artificial Sequence
  Description of Artificial Sequence: Synthetic oligonucleotide
  Antisense strand to SEQ ID NO: 1338750
aauucuagggccaacuaag

SEQ ID NO: 1338752 - RNA, 19 nt, Artificial Sequence
  Description of Artificial Sequence: Synthetic oligonucleotide
  Sense strand starting at position 3631 of SEQ ID NO: 1242324
ugaaaugugucaucauuaa

SEQ ID NO: 1338753 - RNA, 19 nt, Artificial Sequence
  Description of Artificial Sequence: Synthetic oligonucleotide
  Antisense strand to SEQ ID NO: 1338752
uuaaugaugacacauuuca

SEQ ID NO: 1338754 - RNA, 19 nt, Artificial Sequence
  Description of Artificial Sequence: Synthetic oligonucleotide
  Sense strand starting at position 3635 of SEQ ID NO: 1242324
augugucaucauuaacuga

SEQ ID NO: 1338755 - RNA, 19 nt, Artificial Sequence
  Description of Artificial Sequence: Synthetic oligonucleotide
  Antisense strand to SEQ ID NO: 1338754
ucaguuaaugaugacacau

SEQ ID NO: 1338756 - RNA, 19 nt, Artificial Sequence
  Description of Artificial Sequence: Synthetic oligonucleotide
  Sense strand starting at position 3702 of SEQ ID NO: 1242324
cggaaugucucauuccuag

SEQ ID NO: 1338757 - RNA, 19 nt, Artificial Sequence
  Description of Artificial Sequence: Synthetic oligonucleotide
  Antisense strand to SEQ ID NO: 1338756
cuaggaaugagacauuccg

SEQ ID NO: 1338758 - RNA, 19 nt, Artificial Sequence
  Description of Artificial Sequence: Synthetic oligonucleotide
  Sense strand starting at position 3708 of SEQ ID NO: 1242324
gucucauuccuagagucca

SEQ ID NO: 1338759 - RNA, 19 nt, Artificial Sequence
  Description of Artificial Sequence: Synthetic oligonucleotide
  Antisense strand to SEQ ID NO: 1338758
uggacucuaggaaugagac

SEQ ID NO: 1338760 - RNA, 19 nt, Artificial Sequence
  Description of Artificial Sequence: Synthetic oligonucleotide
  Sense strand starting at position 3823 of SEQ ID NO: 1242324
caagccaguccuugagcaa

SEQ ID NO: 1338761 - RNA, 19 nt, Artificial Sequence
  Description of Artificial Sequence: Synthetic oligonucleotide
  Antisense strand to SEQ ID NO: 1338760
uugcucaaggacuggcuug

SEQ ID NO: 1338762 - RNA, 19 nt, Artificial Sequence
  Description of Artificial Sequence: Synthetic oligonucleotide
  Sense strand starting at position 3865 of SEQ ID NO: 1242324
ugaucugaacaguguggau

SEQ ID NO: 1338763 - RNA, 19 nt, Artificial Sequence
  Description of Artificial Sequence: Synthetic oligonucleotide
  Antisense strand to SEQ ID NO: 1338762
auccacacuguucagauca

SEQ ID NO: 1338764 - RNA, 19 nt, Artificial Sequence
  Description of Artificial Sequence: Synthetic oligonucleotide
  Sense strand starting at position 3872 of SEQ ID NO: 1242324
aacaguguggauuguucua

SEQ ID NO: 1338765 - RNA, 19 nt, Artificial Sequence
  Description of Artificial Sequence: Synthetic oligonucleotide
  Antisense strand to SEQ ID NO: 1338764
uagaacaauccacacuguu

SEQ ID NO: 1338766 - RNA, 19 nt, Artificial Sequence
  Description of Artificial Sequence: Synthetic oligonucleotide
  Sense strand starting at position 3874 of SEQ ID NO: 1242324
caguguggauuguucuaua

SEQ ID NO: 1338767 - RNA, 19 nt, Artificial Sequence
  Description of Artificial Sequence: Synthetic oligonucleotide
  Antisense strand to SEQ ID NO: 1338766
uauagaacaauccacacug

SEQ ID NO: 1338768 - RNA, 19 nt, Artificial Sequence
  Description of Artificial Sequence: Synthetic oligonucleotide
  Sense strand starting at position 3879 of SEQ ID NO: 1242324
uggauuguucuauaucuuc

SEQ ID NO: 1338769 - RNA, 19 nt, Artificial Sequence
  Description of Artificial Sequence: Synthetic oligonucleotide
  Antisense strand to SEQ ID NO: 1338768
gaagauauagaacaaucca

SEQ ID NO: 1338770 - RNA, 19 nt, Artificial Sequence
  Description of Artificial Sequence: Synthetic oligonucleotide
  Sense strand starting at position 3932 of SEQ ID NO: 1242324
cgcaaagaccaguggaauu

SEQ ID NO: 1338771 - RNA, 19 nt, Artificial Sequence
  Description of Artificial Sequence: Synthetic oligonucleotide
  Antisense strand to SEQ ID NO: 1338770
aauuccacuggucuuugcg

SEQ ID NO: 1338772 - RNA, 19 nt, Artificial Sequence
  Description of Artificial Sequence: Synthetic oligonucleotide
  Sense strand starting at position 196 of SEQ ID NO: 1242325
gcugauaaccaguauauaa

SEQ ID NO: 1338773 - RNA, 19 nt, Artificial Sequence
  Description of Artificial Sequence: Synthetic oligonucleotide
  Antisense strand to SEQ ID NO: 1338772
uuauauacugguuaucagc

SEQ ID NO: 1338774 - RNA, 19 nt, Artificial Sequence
  Description of Artificial Sequence: Synthetic oligonucleotide
  Sense strand starting at position 359 of SEQ ID NO: 1242325
agacauuacuguguaacca

SEQ ID NO: 1338775 - RNA, 19 nt, Artificial Sequence
  Description of Artificial Sequence: Synthetic oligonucleotide
  Antisense strand to SEQ ID NO: 1338774
ugguuacacaguaaugucu

SEQ ID NO: 1338776 - RNA, 19 nt, Artificial Sequence
  Description of Artificial Sequence: Synthetic oligonucleotide
  Sense strand starting at position 367 of SEQ ID NO: 1242325
cuguguaaccagcagaaua

SEQ ID NO: 1338777 - RNA, 19 nt, Artificial Sequence
  Description of Artificial Sequence: Synthetic oligonucleotide
  Antisense strand to SEQ ID NO: 1338776
uauucugcugguuacacag

SEQ ID NO: 1338778 - RNA, 19 nt, Artificial Sequence
  Description of Artificial Sequence: Synthetic oligonucleotide
  Sense strand starting at position 369 of SEQ ID NO: 1242325
guguaaccagcagaauagu

SEQ ID NO: 1338779 - RNA, 19 nt, Artificial Sequence
  Description of Artificial Sequence: Synthetic oligonucleotide
  Antisense strand to SEQ ID NO: 1338778
acuauucugcugguuacac

SEQ ID NO: 1338780 - RNA, 19 nt, Artificial Sequence
  Description of Artificial Sequence: Synthetic oligonucleotide
  Sense strand starting at position 568 of SEQ ID NO: 1242325
gcuucugaggaccauucua

SEQ ID NO: 1338781 - RNA, 19 nt, Artificial Sequence
  Description of Artificial Sequence: Synthetic oligonucleotide
  Antisense strand to SEQ ID NO: 1338780
uagaaugguccucagaagc

SEQ ID NO: 1338782 - RNA, 19 nt, Artificial Sequence
  Description of Artificial Sequence: Synthetic oligonucleotide
  Sense strand starting at position 584 of SEQ ID NO: 1242325
cuauuaaguggugauuaca

SEQ ID NO: 1338783 - RNA, 19 nt, Artificial Sequence
  Description of Artificial Sequence: Synthetic oligonucleotide
  Antisense strand to SEQ ID NO: 1338782
uguaaucaccacuuaauag

SEQ ID NO: 1338784 - RNA, 19 nt, Artificial Sequence
  Description of Artificial Sequence: Synthetic oligonucleotide
  Sense strand starting at position 593 of SEQ ID NO: 1242325
ggugauuacauagguguau

SEQ ID NO: 1338785 - RNA, 19 nt, Artificial Sequence
  Description of Artificial Sequence: Synthetic oligonucleotide
  Antisense strand to SEQ ID NO: 1338784
auacaccuauguaaucacc

SEQ ID NO: 1338786 - RNA, 19 nt, Artificial Sequence
  Description of Artificial Sequence: Synthetic oligonucleotide
  Sense strand starting at position 594 of SEQ ID NO: 1242325
gugauuacauagguguaua

SEQ ID NO: 1338787 - RNA, 19 nt, Artificial Sequence
  Description of Artificial Sequence: Synthetic oligonucleotide
  Antisense strand to SEQ ID NO: 1338786
uauacaccuauguaaucac

SEQ ID NO: 1338788 - RNA, 19 nt, Artificial Sequence
  Description of Artificial Sequence: Synthetic oligonucleotide
  Sense strand starting at position 899 of SEQ ID NO: 1242325
guaauaauucacggaguug

SEQ ID NO: 1338789 - RNA, 19 nt, Artificial Sequence
  Description of Artificial Sequence: Synthetic oligonucleotide
  Antisense strand to SEQ ID NO: 1338788
caacuccgugaauuauuac

SEQ ID NO: 1338790 - RNA, 19 nt, Artificial Sequence
  Description of Artificial Sequence: Synthetic oligonucleotide
  Sense strand starting at position 908 of SEQ ID NO: 1242325
cacggaguuguauacaguu

SEQ ID NO: 1338791 - RNA, 19 nt, Artificial Sequence
  Description of Artificial Sequence: Synthetic oligonucleotide
  Antisense strand to SEQ ID NO: 1338790
aacuguauacaacuccgug

SEQ ID NO: 1338792 - RNA, 19 nt, Artificial Sequence
  Description of Artificial Sequence: Synthetic oligonucleotide
  Sense strand starting at position 920 of SEQ ID NO: 1242325
uacaguugugaaugugaau

SEQ ID NO: 1338793 - RNA, 19 nt, Artificial Sequence
  Description of Artificial Sequence: Synthetic oligonucleotide
  Antisense strand to SEQ ID NO: 1338792
auucacauucacaacugua

SEQ ID NO: 1338794 - RNA, 19 nt, Artificial Sequence
  Description of Artificial Sequence: Synthetic oligonucleotide
  Sense strand starting at position 955 of SEQ ID NO: 1242325
uacauugcgcuuuagaagu

SEQ ID NO: 1338795 - RNA, 19 nt, Artificial Sequence
  Description of Artificial Sequence: Synthetic oligonucleotide
  Antisense strand to SEQ ID NO: 1338794
acuucuaaagcgcaaugua

SEQ ID NO: 1338796 - RNA, 19 nt, Artificial Sequence
  Description of Artificial Sequence: Synthetic oligonucleotide
  Sense strand starting at position 1322 of SEQ ID NO: 1242325
ucagaucauucucuaggca

SEQ ID NO: 1338797 - RNA, 19 nt, Artificial Sequence
  Description of Artificial Sequence: Synthetic oligonucleotide
  Antisense strand to SEQ ID NO: 1338796
ugccuagagaaugaucuga

SEQ ID NO: 1338798 - RNA, 19 nt, Artificial Sequence
  Description of Artificial Sequence: Synthetic oligonucleotide
  Sense strand starting at position 1355 of SEQ ID NO: 1242325
uuccgcauuagaugaugaa

SEQ ID NO: 1338799 - RNA, 19 nt, Artificial Sequence
  Description of Artificial Sequence: Synthetic oligonucleotide
  Antisense strand to SEQ ID NO: 1338798
uucaucaucuaaugcggaa

SEQ ID NO: 1338800 - RNA, 19 nt, Artificial Sequence
  Description of Artificial Sequence: Synthetic oligonucleotide
  Sense strand starting at position 1356 of SEQ ID NO: 1242325
uccgcauuagaugaugaaa

SEQ ID NO: 1338801 - RNA, 19 nt, Artificial Sequence
  Description of Artificial Sequence: Synthetic oligonucleotide
  Antisense strand to SEQ ID NO: 1338800
uuucaucaucuaaugcgga

SEQ ID NO: 1338802 - RNA, 19 nt, Artificial Sequence
  Description of Artificial Sequence: Synthetic oligonucleotide
  Sense strand starting at position 1392 of SEQ ID NO: 1242325
ggagauugguacuuucuaa

SEQ ID NO: 1338803 - RNA, 19 nt, Artificial Sequence
  Description of Artificial Sequence: Synthetic oligonucleotide
  Antisense strand to SEQ ID NO: 1338802
uuagaaaguaccaaucucc

SEQ ID NO: 1338804 - RNA, 19 nt, Artificial Sequence
  Description of Artificial Sequence: Synthetic oligonucleotide
  Sense strand starting at position 1444 of SEQ ID NO: 1242325
ggaagcccuggcugugaua

SEQ ID NO: 1338805 - RNA, 19 nt, Artificial Sequence
  Description of Artificial Sequence: Synthetic oligonucleotide
  Antisense strand to SEQ ID NO: 1338804
uaucacagccagggcuucc

SEQ ID NO: 1338806 - RNA, 19 nt, Artificial Sequence
  Description of Artificial Sequence: Synthetic oligonucleotide
  Sense strand starting at position 1519 of SEQ ID NO: 1242325
auagguguugccuauaaag

SEQ ID NO: 1338807 - RNA, 19 nt, Artificial Sequence
  Description of Artificial Sequence: Synthetic oligonucleotide
  Antisense strand to SEQ ID NO: 1338806
cuuuauaggcaacaccuau

SEQ ID NO: 1338808 - RNA, 19 nt, Artificial Sequence
  Description of Artificial Sequence: Synthetic oligonucleotide
  Sense strand starting at position 1530 of SEQ ID NO: 1242325
cuauaaaggcucuaauguu

SEQ ID NO: 1338809 - RNA, 19 nt, Artificial Sequence
  Description of Artificial Sequence: Synthetic oligonucleotide
  Antisense strand to SEQ ID NO: 1338808
aacauuagagccuuuauag

SEQ ID NO: 1338810 - RNA, 19 nt, Artificial Sequence
  Description of Artificial Sequence: Synthetic oligonucleotide
  Sense strand starting at position 2129 of SEQ ID NO: 1242325
gauccugcgcgaguuuaca

SEQ ID NO: 1338811 - RNA, 19 nt, Artificial Sequence
  Description of Artificial Sequence: Synthetic oligonucleotide
  Antisense strand to SEQ ID NO: 1338810
uguaaacucgcgcaggauc

SEQ ID NO: 1338812 - RNA, 19 nt, Artificial Sequence
  Description of Artificial Sequence: Synthetic oligonucleotide
  Sense strand starting at position 2262 of SEQ ID NO: 1242325
cuaggaguucgaggcuaac

SEQ ID NO: 1338813 - RNA, 19 nt, Artificial Sequence
  Description of Artificial Sequence: Synthetic oligonucleotide
  Antisense strand to SEQ ID NO: 1338812
guuagccucgaacuccuag

SEQ ID NO: 1338814 - RNA, 19 nt, Artificial Sequence
  Description of Artificial Sequence: Synthetic oligonucleotide
  Sense strand starting at position 2349 of SEQ ID NO: 1242325
ggaagacuuaaccgaguug

SEQ ID NO: 1338815 - RNA, 19 nt, Artificial Sequence
  Description of Artificial Sequence: Synthetic oligonucleotide
  Antisense strand to SEQ ID NO: 1338814
caacucgguuaagucuucc

SEQ ID NO: 1338816 - RNA, 19 nt, Artificial Sequence
  Description of Artificial Sequence: Synthetic oligonucleotide
  Sense strand starting at position 2368 of SEQ ID NO: 1242325
ccgucuucuguuuaccaga

SEQ ID NO: 1338817 - RNA, 19 nt, Artificial Sequence
  Description of Artificial Sequence: Synthetic oligonucleotide
  Antisense strand to SEQ ID NO: 1338816
ucugguaaacagaagacgg

SEQ ID NO: 1338818 - RNA, 19 nt, Artificial Sequence
  Description of Artificial Sequence: Synthetic oligonucleotide
  Sense strand starting at position 2373 of SEQ ID NO: 1242325
uucuguuuaccagaucgaa

SEQ ID NO: 1338819 - RNA, 19 nt, Artificial Sequence
  Description of Artificial Sequence: Synthetic oligonucleotide
  Antisense strand to SEQ ID NO: 1338818
uucgaucugguaaacagaa

SEQ ID NO: 1338820 - RNA, 19 nt, Artificial Sequence
  Description of Artificial Sequence: Synthetic oligonucleotide
  Sense strand starting at position 2577 of SEQ ID NO: 1242325
cucgcauuccuggagcaag

SEQ ID NO: 1338821 - RNA, 19 nt, Artificial Sequence
  Description of Artificial Sequence: Synthetic oligonucleotide
  Antisense strand to SEQ ID NO: 1338820
cuugcuccaggaaugcgag

SEQ ID NO: 1338822 - RNA, 19 nt, Artificial Sequence
  Description of Artificial Sequence: Synthetic oligonucleotide
  Sense strand starting at position 2635 of SEQ ID NO: 1242325
gcucgagaagauggauaga

SEQ ID NO: 1338823 - RNA, 19 nt, Artificial Sequence
  Description of Artificial Sequence: Synthetic oligonucleotide
  Antisense strand to SEQ ID NO: 1338822
ucuauccaucuucucgagc

SEQ ID NO: 1338824 - RNA, 19 nt, Artificial Sequence
  Description of Artificial Sequence: Synthetic oligonucleotide
  Sense strand starting at position 2657 of SEQ ID NO: 1242325
gggaaauggagcuagcgua

SEQ ID NO: 1338825 - RNA, 19 nt, Artificial Sequence
  Description of Artificial Sequence: Synthetic oligonucleotide
  Antisense strand to SEQ ID NO: 1338824
uacgcuagcuccauuuccc

SEQ ID NO: 1338826 - RNA, 19 nt, Artificial Sequence
  Description of Artificial Sequence: Synthetic oligonucleotide
  Sense strand starting at position 2691 of SEQ ID NO: 1242325
gcuggaauauucgucaauc

SEQ ID NO: 1338827 - RNA, 19 nt, Artificial Sequence
  Description of Artificial Sequence: Synthetic oligonucleotide
  Antisense strand to SEQ ID NO: 1338826
gauugacgaauauuccagc

SEQ ID NO: 1338828 - RNA, 19 nt, Artificial Sequence
  Description of Artificial Sequence: Synthetic oligonucleotide
  Sense strand starting at position 2692 of SEQ ID NO: 1242325
cuggaauauucgucaaucu

SEQ ID NO: 1338829 - RNA, 19 nt, Artificial Sequence
  Description of Artificial Sequence: Synthetic oligonucleotide
  Antisense strand to SEQ ID NO: 1338828
agauugacgaauauuccag

SEQ ID NO: 1338830 - RNA, 19 nt, Artificial Sequence
  Description of Artificial Sequence: Synthetic oligonucleotide
  Sense strand starting at position 2693 of SEQ ID NO: 1242325
uggaauauucgucaaucug

SEQ ID NO: 1338831 - RNA, 19 nt, Artificial Sequence
  Description of Artificial Sequence: Synthetic oligonucleotide
  Antisense strand to SEQ ID NO: 1338830
cagauugacgaauauucca

SEQ ID NO: 1338832 - RNA, 19 nt, Artificial Sequence
  Description of Artificial Sequence: Synthetic oligonucleotide
  Sense strand starting at position 2712 of SEQ ID NO: 1242325
uggugcuuuacuggagauu

SEQ ID NO: 1338833 - RNA, 19 nt, Artificial Sequence
  Description of Artificial Sequence: Synthetic oligonucleotide
  Antisense strand to SEQ ID NO: 1338832
aaucuccaguaaagcacca

SEQ ID NO: 1338834 - RNA, 19 nt, Artificial Sequence
  Description of Artificial Sequence: Synthetic oligonucleotide
  Sense strand starting at position 2778 of SEQ ID NO: 1242325
uaucgugguuuaccagaaa

SEQ ID NO: 1338835 - RNA, 19 nt, Artificial Sequence
  Description of Artificial Sequence: Synthetic oligonucleotide
  Antisense strand to SEQ ID NO: 1338834
uuucugguaaaccacgaua

SEQ ID NO: 1338836 - RNA, 19 nt, Artificial Sequence
  Description of Artificial Sequence: Synthetic oligonucleotide
  Sense strand starting at position 2781 of SEQ ID NO: 1242325
cgugguuuaccagaaaguu

SEQ ID NO: 1338837 - RNA, 19 nt, Artificial Sequence
  Description of Artificial Sequence: Synthetic oligonucleotide
  Antisense strand to SEQ ID NO: 1338836
aacuuucugguaaaccacg

SEQ ID NO: 1338838 - RNA, 19 nt, Artificial Sequence
  Description of Artificial Sequence: Synthetic oligonucleotide
  Sense strand starting at position 3138 of SEQ ID NO: 1242325
agggauucuugggcgaagu

SEQ ID NO: 1338839 - RNA, 19 nt, Artificial Sequence
  Description of Artificial Sequence: Synthetic oligonucleotide
  Antisense strand to SEQ ID NO: 1338838
acuucgcccaagaaucccu

SEQ ID NO: 1338840 - RNA, 19 nt, Artificial Sequence
  Description of Artificial Sequence: Synthetic oligonucleotide
  Sense strand starting at position 3139 of SEQ ID NO: 1242325
gggauucuugggcgaagug

SEQ ID NO: 1338841 - RNA, 19 nt, Artificial Sequence
  Description of Artificial Sequence: Synthetic oligonucleotide
  Antisense strand to SEQ ID NO: 1338840
cacuucgcccaagaauccc

SEQ ID NO: 1338842 - RNA, 19 nt, Artificial Sequence
  Description of Artificial Sequence: Synthetic oligonucleotide
  Sense strand starting at position 3149 of SEQ ID NO: 1242325
ggcgaaguggaagacauua

SEQ ID NO: 1338843 - RNA, 19 nt, Artificial Sequence
  Description of Artificial Sequence: Synthetic oligonucleotide
  Antisense strand to SEQ ID NO: 1338842
uaaugucuuccacuucgcc

SEQ ID NO: 1338844 - RNA, 19 nt, Artificial Sequence
  Description of Artificial Sequence: Synthetic oligonucleotide
  Sense strand starting at position 3178 of SEQ ID NO: 1242325
ggguaguaugggcauggaa

SEQ ID NO: 1338845 - RNA, 19 nt, Artificial Sequence
  Description of Artificial Sequence: Synthetic oligonucleotide
  Antisense strand to SEQ ID NO: 1338844
uuccaugcccauacuaccc

SEQ ID NO: 1338846 - RNA, 19 nt, Artificial Sequence
  Description of Artificial Sequence: Synthetic oligonucleotide
  Sense strand starting at position 3180 of SEQ ID NO: 1242325
guaguaugggcauggaaac

SEQ ID NO: 1338847 - RNA, 19 nt, Artificial Sequence
  Description of Artificial Sequence: Synthetic oligonucleotide
  Antisense strand to SEQ ID NO: 1338846
guuuccaugcccauacuac

SEQ ID NO: 1338848 - RNA, 19 nt, Artificial Sequence
  Description of Artificial Sequence: Synthetic oligonucleotide
  Sense strand starting at position 3220 of SEQ ID NO: 1242325
guauuaucuggcgagggag

SEQ ID NO: 1338849 - RNA, 19 nt, Artificial Sequence
  Description of Artificial Sequence: Synthetic oligonucleotide
  Antisense strand to SEQ ID NO: 1338848
cucccucgccagauaauac

SEQ ID NO: 1338850 - RNA, 19 nt, Artificial Sequence
  Description of Artificial Sequence: Synthetic oligonucleotide
  Sense strand starting at position 3928 of SEQ ID NO: 1242325
gagcuuuggucucuaggua

SEQ ID NO: 1338851 - RNA, 19 nt, Artificial Sequence
  Description of Artificial Sequence: Synthetic oligonucleotide
  Antisense strand to SEQ ID NO: 1338850
uaccuagagaccaaagcuc

SEQ ID NO: 1338852 - RNA, 19 nt, Artificial Sequence
  Description of Artificial Sequence: Synthetic oligonucleotide
  Sense strand starting at position 145 of SEQ ID NO: 1242326
gcugauaaccaguauauaa

SEQ ID NO: 1338853 - RNA, 19 nt, Artificial Sequence
  Description of Artificial Sequence: Synthetic oligonucleotide
  Antisense strand to SEQ ID NO: 1338852
uuauauacugguuaucagc

SEQ ID NO: 1338854 - RNA, 19 nt, Artificial Sequence
  Description of Artificial Sequence: Synthetic oligonucleotide
  Sense strand starting at position 308 of SEQ ID NO: 1242326
agacauuacuguguaacca

SEQ ID NO: 1338855 - RNA, 19 nt, Artificial Sequence
  Description of Artificial Sequence: Synthetic oligonucleotide
  Antisense strand to SEQ ID NO: 1338854
ugguuacacaguaaugucu

SEQ ID NO: 1338856 - RNA, 19 nt, Artificial Sequence
  Description of Artificial Sequence: Synthetic oligonucleotide
  Sense strand starting at position 316 of SEQ ID NO: 1242326
cuguguaaccagcagaaua

SEQ ID NO: 1338857 - RNA, 19 nt, Artificial Sequence
  Description of Artificial Sequence: Synthetic oligonucleotide
  Antisense strand to SEQ ID NO: 1338856
uauucugcugguuacacag

SEQ ID NO: 1338858 - RNA, 19 nt, Artificial Sequence
  Description of Artificial Sequence: Synthetic oligonucleotide
  Sense strand starting at position 318 of SEQ ID NO: 1242326
guguaaccagcagaauagu

SEQ ID NO: 1338859 - RNA, 19 nt, Artificial Sequence
  Description of Artificial Sequence: Synthetic oligonucleotide
  Antisense strand to SEQ ID NO: 1338858
acuauucugcugguuacac

SEQ ID NO: 1338860 - RNA, 19 nt, Artificial Sequence
  Description of Artificial Sequence: Synthetic oligonucleotide
  Sense strand starting at position 517 of SEQ ID NO: 1242326
gcuucugaggaccauucua

SEQ ID NO: 1338861 - RNA, 19 nt, Artificial Sequence
  Description of Artificial Sequence: Synthetic oligonucleotide
  Antisense strand to SEQ ID NO: 1338860
uagaaugguccucagaagc

SEQ ID NO: 1338862 - RNA, 19 nt, Artificial Sequence
  Description of Artificial Sequence: Synthetic oligonucleotide
  Sense strand starting at position 533 of SEQ ID NO: 1242326
cuauuaaguggugauuaca

SEQ ID NO: 1338863 - RNA, 19 nt, Artificial Sequence
  Description of Artificial Sequence: Synthetic oligonucleotide
  Antisense strand to SEQ ID NO: 1338862
uguaaucaccacuuaauag

SEQ ID NO: 1338864 - RNA, 19 nt, Artificial Sequence
  Description of Artificial Sequence: Synthetic oligonucleotide
  Sense strand starting at position 542 of SEQ ID NO: 1242326
ggugauuacauagguguau

SEQ ID NO: 1338865 - RNA, 19 nt, Artificial Sequence
  Description of Artificial Sequence: Synthetic oligonucleotide
  Antisense strand to SEQ ID NO: 1338864
auacaccuauguaaucacc

SEQ ID NO: 1338866 - RNA, 19 nt, Artificial Sequence
  Description of Artificial Sequence: Synthetic oligonucleotide
  Sense strand starting at position 543 of SEQ ID NO: 1242326
gugauuacauagguguaua

SEQ ID NO: 1338867 - RNA, 19 nt, Artificial Sequence
  Description of Artificial Sequence: Synthetic oligonucleotide
  Antisense strand to SEQ ID NO: 1338866
uauacaccuauguaaucac

SEQ ID NO: 1338868 - RNA, 19 nt, Artificial Sequence
  Description of Artificial Sequence: Synthetic oligonucleotide
  Sense strand starting at position 848 of SEQ ID NO: 1242326
guaauaauucacggaguug

SEQ ID NO: 1338869 - RNA, 19 nt, Artificial Sequence
  Description of Artificial Sequence: Synthetic oligonucleotide
  Antisense strand to SEQ ID NO: 1338868
caacuccgugaauuauuac

SEQ ID NO: 1338870 - RNA, 19 nt, Artificial Sequence
  Description of Artificial Sequence: Synthetic oligonucleotide
  Sense strand starting at position 857 of SEQ ID NO: 1242326
cacggaguuguauacaguu

SEQ ID NO: 1338871 - RNA, 19 nt, Artificial Sequence
  Description of Artificial Sequence: Synthetic oligonucleotide
  Antisense strand to SEQ ID NO: 1338870
aacuguauacaacuccgug

SEQ ID NO: 1338872 - RNA, 19 nt, Artificial Sequence
  Description of Artificial Sequence: Synthetic oligonucleotide
  Sense strand starting at position 869 of SEQ ID NO: 1242326
uacaguugugaaugugaau

SEQ ID NO: 1338873 - RNA, 19 nt, Artificial Sequence
  Description of Artificial Sequence: Synthetic oligonucleotide
  Antisense strand to SEQ ID NO: 1338872
auucacauucacaacugua

SEQ ID NO: 1338874 - RNA, 19 nt, Artificial Sequence
  Description of Artificial Sequence: Synthetic oligonucleotide
  Sense strand starting at position 904 of SEQ ID NO: 1242326
uacauugcgcuuuagaagu

SEQ ID NO: 1338875 - RNA, 19 nt, Artificial Sequence
  Description of Artificial Sequence: Synthetic oligonucleotide
  Antisense strand to SEQ ID NO: 1338874
acuucuaaagcgcaaugua

SEQ ID NO: 1338876 - RNA, 19 nt, Artificial Sequence
  Description of Artificial Sequence: Synthetic oligonucleotide
  Sense strand starting at position 1271 of SEQ ID NO: 1242326
ucagaucauucucuaggca

SEQ ID NO: 1338877 - RNA, 19 nt, Artificial Sequence
  Description of Artificial Sequence: Synthetic oligonucleotide
  Antisense strand to SEQ ID NO: 1338876
ugccuagagaaugaucuga

SEQ ID NO: 1338878 - RNA, 19 nt, Artificial Sequence
  Description of Artificial Sequence: Synthetic oligonucleotide
  Sense strand starting at position 1304 of SEQ ID NO: 1242326
uuccgcauuagaugaugaa

SEQ ID NO: 1338879 - RNA, 19 nt, Artificial Sequence
  Description of Artificial Sequence: Synthetic oligonucleotide
  Antisense strand to SEQ ID NO: 1338878
uucaucaucuaaugcggaa

SEQ ID NO: 1338880 - RNA, 19 nt, Artificial Sequence
  Description of Artificial Sequence: Synthetic oligonucleotide
  Sense strand starting at position 1305 of SEQ ID NO: 1242326
uccgcauuagaugaugaaa

SEQ ID NO: 1338881 - RNA, 19 nt, Artificial Sequence
  Description of Artificial Sequence: Synthetic oligonucleotide
  Antisense strand to SEQ ID NO: 1338880
uuucaucaucuaaugcgga

SEQ ID NO: 1338882 - RNA, 19 nt, Artificial Sequence
  Description of Artificial Sequence: Synthetic oligonucleotide
  Sense strand starting at position 1341 of SEQ ID NO: 1242326
ggagauugguacuuucuaa

SEQ ID NO: 1338883 - RNA, 19 nt, Artificial Sequence
  Description of Artificial Sequence: Synthetic oligonucleotide
  Antisense strand to SEQ ID NO: 1338882
uuagaaaguaccaaucucc

SEQ ID NO: 1338884 - RNA, 19 nt, Artificial Sequence
  Description of Artificial Sequence: Synthetic oligonucleotide
  Sense strand starting at position 1393 of SEQ ID NO: 1242326
ggaagcccuggcugugaua

SEQ ID NO: 1338885 - RNA, 19 nt, Artificial Sequence
  Description of Artificial Sequence: Synthetic oligonucleotide
  Antisense strand to SEQ ID NO: 1338884
uaucacagccagggcuucc

SEQ ID NO: 1338886 - RNA, 19 nt, Artificial Sequence
  Description of Artificial Sequence: Synthetic oligonucleotide
  Sense strand starting at position 1468 of SEQ ID NO: 1242326
auagguguugccuauaaag

SEQ ID NO: 1338887 - RNA, 19 nt, Artificial Sequence
  Description of Artificial Sequence: Synthetic oligonucleotide
  Antisense strand to SEQ ID NO: 1338886
cuuuauaggcaacaccuau

SEQ ID NO: 1338888 - RNA, 19 nt, Artificial Sequence
  Description of Artificial Sequence: Synthetic oligonucleotide
  Sense strand starting at position 1479 of SEQ ID NO: 1242326
cuauaaaggcucuaauguu

SEQ ID NO: 1338889 - RNA, 19 nt, Artificial Sequence
  Description of Artificial Sequence: Synthetic oligonucleotide
  Antisense strand to SEQ ID NO: 1338888
aacauuagagccuuuauag

SEQ ID NO: 1338890 - RNA, 19 nt, Artificial Sequence
  Description of Artificial Sequence: Synthetic oligonucleotide
  Sense strand starting at position 2078 of SEQ ID NO: 1242326
gauccugcgcgaguuuaca

SEQ ID NO: 1338891 - RNA, 19 nt, Artificial Sequence
  Description of Artificial Sequence: Synthetic oligonucleotide
  Antisense strand to SEQ ID NO: 1338890
uguaaacucgcgcaggauc

SEQ ID NO: 1338892 - RNA, 19 nt, Artificial Sequence
  Description of Artificial Sequence: Synthetic oligonucleotide
  Sense strand starting at position 2211 of SEQ ID NO: 1242326
cuaggaguucgaggcuaac

SEQ ID NO: 1338893 - RNA, 19 nt, Artificial Sequence
  Description of Artificial Sequence: Synthetic oligonucleotide
  Antisense strand to SEQ ID NO: 1338892
guuagccucgaacuccuag

SEQ ID NO: 1338894 - RNA, 19 nt, Artificial Sequence
  Description of Artificial Sequence: Synthetic oligonucleotide
  Sense strand starting at position 2298 of SEQ ID NO: 1242326
ggaagacuuaaccgaguug

SEQ ID NO: 1338895 - RNA, 19 nt, Artificial Sequence
  Description of Artificial Sequence: Synthetic oligonucleotide
  Antisense strand to SEQ ID NO: 1338894
caacucgguuaagucuucc

SEQ ID NO: 1338896 - RNA, 19 nt, Artificial Sequence
  Description of Artificial Sequence: Synthetic oligonucleotide
  Sense strand starting at position 2317 of SEQ ID NO: 1242326
ccgucuucuguuuaccaga

SEQ ID NO: 1338897 - RNA, 19 nt, Artificial Sequence
  Description of Artificial Sequence: Synthetic oligonucleotide
  Antisense strand to SEQ ID NO: 1338896
ucugguaaacagaagacgg

SEQ ID NO: 1338898 - RNA, 19 nt, Artificial Sequence
  Description of Artificial Sequence: Synthetic oligonucleotide
  Sense strand starting at position 2322 of SEQ ID NO: 1242326
uucuguuuaccagaucgaa

SEQ ID NO: 1338899 - RNA, 19 nt, Artificial Sequence
  Description of Artificial Sequence: Synthetic oligonucleotide
  Antisense strand to SEQ ID NO: 1338898
uucgaucugguaaacagaa

SEQ ID NO: 1338900 - RNA, 19 nt, Artificial Sequence
  Description of Artificial Sequence: Synthetic oligonucleotide
  Sense strand starting at position 2526 of SEQ ID NO: 1242326
cucgcauuccuggagcaag

SEQ ID NO: 1338901 - RNA, 19 nt, Artificial Sequence
  Description of Artificial Sequence: Synthetic oligonucleotide
  Antisense strand to SEQ ID NO: 1338900
cuugcuccaggaaugcgag

SEQ ID NO: 1338902 - RNA, 19 nt, Artificial Sequence
  Description of Artificial Sequence: Synthetic oligonucleotide
  Sense strand starting at position 2584 of SEQ ID NO: 1242326
gcucgagaagauggauaga

SEQ ID NO: 1338903 - RNA, 19 nt, Artificial Sequence
  Description of Artificial Sequence: Synthetic oligonucleotide
  Antisense strand to SEQ ID NO: 1338902
ucuauccaucuucucgagc

SEQ ID NO: 1338904 - RNA, 19 nt, Artificial Sequence
  Description of Artificial Sequence: Synthetic oligonucleotide
  Sense strand starting at position 2606 of SEQ ID NO: 1242326
gggaaauggagcuagcgua

SEQ ID NO: 1338905 - RNA, 19 nt, Artificial Sequence
  Description of Artificial Sequence: Synthetic oligonucleotide
  Antisense strand to SEQ ID NO: 1338904
uacgcuagcuccauuuccc

SEQ ID NO: 1338906 - RNA, 19 nt, Artificial Sequence
  Description of Artificial Sequence: Synthetic oligonucleotide
  Sense strand starting at position 2640 of SEQ ID NO: 1242326
gcuggaauauucgucaauc

SEQ ID NO: 1338907 - RNA, 19 nt, Artificial Sequence
  Description of Artificial Sequence: Synthetic oligonucleotide
  Antisense strand to SEQ ID NO: 1338906
gauugacgaauauuccagc

SEQ ID NO: 1338908 - RNA, 19 nt, Artificial Sequence
  Description of Artificial Sequence: Synthetic oligonucleotide
  Sense strand starting at position 2641 of SEQ ID NO: 1242326
cuggaauauucgucaaucu

SEQ ID NO: 1338909 - RNA, 19 nt, Artificial Sequence
  Description of Artificial Sequence: Synthetic oligonucleotide
  Antisense strand to SEQ ID NO: 1338908
agauugacgaauauuccag

SEQ ID NO: 1338910 - RNA, 19 nt, Artificial Sequence
  Description of Artificial Sequence: Synthetic oligonucleotide
  Sense strand starting at position 2642 of SEQ ID NO: 1242326
uggaauauucgucaaucug

SEQ ID NO: 1338911 - RNA, 19 nt, Artificial Sequence
  Description of Artificial Sequence: Synthetic oligonucleotide
  Antisense strand to SEQ ID NO: 1338910
cagauugacgaauauucca

SEQ ID NO: 1338912 - RNA, 19 nt, Artificial Sequence
  Description of Artificial Sequence: Synthetic oligonucleotide
  Sense strand starting at position 2661 of SEQ ID NO: 1242326
uggugcuuuacuggagauu

SEQ ID NO: 1338913 - RNA, 19 nt, Artificial Sequence
  Description of Artificial Sequence: Synthetic oligonucleotide
  Antisense strand to SEQ ID NO: 1338912
aaucuccaguaaagcacca

SEQ ID NO: 1338914 - RNA, 19 nt, Artificial Sequence
  Description of Artificial Sequence: Synthetic oligonucleotide
  Sense strand starting at position 2727 of SEQ ID NO: 1242326
uaucgugguuuaccagaaa

SEQ ID NO: 1338915 - RNA, 19 nt, Artificial Sequence
  Description of Artificial Sequence: Synthetic oligonucleotide
  Antisense strand to SEQ ID NO: 1338914
uuucugguaaaccacgaua

SEQ ID NO: 1338916 - RNA, 19 nt, Artificial Sequence
  Description of Artificial Sequence: Synthetic oligonucleotide
  Sense strand starting at position 2730 of SEQ ID NO: 1242326
cgugguuuaccagaaaguu

SEQ ID NO: 1338917 - RNA, 19 nt, Artificial Sequence
  Description of Artificial Sequence: Synthetic oligonucleotide
  Antisense strand to SEQ ID NO: 1338916
aacuuucugguaaaccacg

SEQ ID NO: 1338918 - RNA, 19 nt, Artificial Sequence
  Description of Artificial Sequence: Synthetic oligonucleotide
  Sense strand starting at position 3087 of SEQ ID NO: 1242326
agggauucuugggcgaagu

SEQ ID NO: 1338919 - RNA, 19 nt, Artificial Sequence
  Description of Artificial Sequence: Synthetic oligonucleotide
  Antisense strand to SEQ ID NO: 1338918
acuucgcccaagaaucccu

SEQ ID NO: 1338920 - RNA, 19 nt, Artificial Sequence
  Description of Artificial Sequence: Synthetic oligonucleotide
  Sense strand starting at position 3088 of SEQ ID NO: 1242326
gggauucuugggcgaagug

SEQ ID NO: 1338921 - RNA, 19 nt, Artificial Sequence
  Description of Artificial Sequence: Synthetic oligonucleotide
  Antisense strand to SEQ ID NO: 1338920
cacuucgcccaagaauccc

SEQ ID NO: 1338922 - RNA, 19 nt, Artificial Sequence
  Description of Artificial Sequence: Synthetic oligonucleotide
  Sense strand starting at position 3098 of SEQ ID NO: 1242326
ggcgaaguggaagacauua

SEQ ID NO: 1338923 - RNA, 19 nt, Artificial Sequence
  Description of Artificial Sequence: Synthetic oligonucleotide
  Antisense strand to SEQ ID NO: 1338922
uaaugucuuccacuucgcc

SEQ ID NO: 1338924 - RNA, 19 nt, Artificial Sequence
  Description of Artificial Sequence: Synthetic oligonucleotide
  Sense strand starting at position 3127 of SEQ ID NO: 1242326
ggguaguaugggcauggaa

SEQ ID NO: 1338925 - RNA, 19 nt, Artificial Sequence
  Description of Artificial Sequence: Synthetic oligonucleotide
  Antisense strand to SEQ ID NO: 1338924
uuccaugcccauacuaccc

SEQ ID NO: 1338926 - RNA, 19 nt, Artificial Sequence
  Description of Artificial Sequence: Synthetic oligonucleotide
  Sense strand starting at position 3129 of SEQ ID NO: 1242326
guaguaugggcauggaaac

SEQ ID NO: 1338927 - RNA, 19 nt, Artificial Sequence
  Description of Artificial Sequence: Synthetic oligonucleotide
  Antisense strand to SEQ ID NO: 1338926
guuuccaugcccauacuac

SEQ ID NO: 1338928 - RNA, 19 nt, Artificial Sequence
  Description of Artificial Sequence: Synthetic oligonucleotide
  Sense strand starting at position 3169 of SEQ ID NO: 1242326
guauuaucuggcgagggag

SEQ ID NO: 1338929 - RNA, 19 nt, Artificial Sequence
  Description of Artificial Sequence: Synthetic oligonucleotide
  Antisense strand to SEQ ID NO: 1338928
cucccucgccagauaauac

SEQ ID NO: 1338930 - RNA, 19 nt, Artificial Sequence
  Description of Artificial Sequence: Synthetic oligonucleotide
  Sense strand starting at position 3877 of SEQ ID NO: 1242326
gagcuuuggucucuaggua

SEQ ID NO: 1338931 - RNA, 19 nt, Artificial Sequence
  Description of Artificial Sequence: Synthetic oligonucleotide
  Antisense strand to SEQ ID NO: 1338930
uaccuagagaccaaagcuc

SEQ ID NO: 1338932 - RNA, 19 nt, Artificial Sequence
  Description of Artificial Sequence: Synthetic oligonucleotide
  Sense strand starting at position 79 of SEQ ID NO: 1242327
cacccauuggcugaaggua

SEQ ID NO: 1338933 - RNA, 19 nt, Artificial Sequence
  Description of Artificial Sequence: Synthetic oligonucleotide
  Antisense strand to SEQ ID NO: 1338932
uaccuucagccaaugggug

SEQ ID NO: 1338934 - RNA, 19 nt, Artificial Sequence
  Description of Artificial Sequence: Synthetic oligonucleotide
  Sense strand starting at position 130 of SEQ ID NO: 1242327
ucggaucucuguccugaca

SEQ ID NO: 1338935 - RNA, 19 nt, Artificial Sequence
  Description of Artificial Sequence: Synthetic oligonucleotide
  Antisense strand to SEQ ID NO: 1338934
ugucaggacagagauccga

SEQ ID NO: 1338936 - RNA, 19 nt, Artificial Sequence
  Description of Artificial Sequence: Synthetic oligonucleotide
  Sense strand starting at position 132 of SEQ ID NO: 1242327
ggaucucuguccugacaau

SEQ ID NO: 1338937 - RNA, 19 nt, Artificial Sequence
  Description of Artificial Sequence: Synthetic oligonucleotide
  Antisense strand to SEQ ID NO: 1338936
auugucaggacagagaucc

SEQ ID NO: 1338938 - RNA, 19 nt, Artificial Sequence
  Description of Artificial Sequence: Synthetic oligonucleotide
  Sense strand starting at position 232 of SEQ ID NO: 1242327
ugagaucucgguugucuuu

SEQ ID NO: 1338939 - RNA, 19 nt, Artificial Sequence
  Description of Artificial Sequence: Synthetic oligonucleotide
  Antisense strand to SEQ ID NO: 1338938
aaagacaaccgagaucuca

SEQ ID NO: 1338940 - RNA, 19 nt, Artificial Sequence
  Description of Artificial Sequence: Synthetic oligonucleotide
  Sense strand starting at position 344 of SEQ ID NO: 1242327
gccguuaggcccuauggau

SEQ ID NO: 1338941 - RNA, 19 nt, Artificial Sequence
  Description of Artificial Sequence: Synthetic oligonucleotide
  Antisense strand to SEQ ID NO: 1338940
auccauagggccuaacggc

SEQ ID NO: 1338942 - RNA, 19 nt, Artificial Sequence
  Description of Artificial Sequence: Synthetic oligonucleotide
  Sense strand starting at position 364 of SEQ ID NO: 1242327
gaagguuccugccugcagu

SEQ ID NO: 1338943 - RNA, 19 nt, Artificial Sequence
  Description of Artificial Sequence: Synthetic oligonucleotide
  Antisense strand to SEQ ID NO: 1338942
acugcaggcaggaaccuuc

SEQ ID NO: 1338944 - RNA, 19 nt, Artificial Sequence
  Description of Artificial Sequence: Synthetic oligonucleotide
  Sense strand starting at position 405 of SEQ ID NO: 1242327
ucugcuuuaucuuccuagu

SEQ ID NO: 1338945 - RNA, 19 nt, Artificial Sequence
  Description of Artificial Sequence: Synthetic oligonucleotide
  Antisense strand to SEQ ID NO: 1338944
acuaggaagauaaagcaga

SEQ ID NO: 1338946 - RNA, 19 nt, Artificial Sequence
  Description of Artificial Sequence: Synthetic oligonucleotide
  Sense strand starting at position 706 of SEQ ID NO: 1242327
cagagcgguccuugggaau

SEQ ID NO: 1338947 - RNA, 19 nt, Artificial Sequence
  Description of Artificial Sequence: Synthetic oligonucleotide
  Antisense strand to SEQ ID NO: 1338946
auucccaaggaccgcucug

SEQ ID NO: 1338948 - RNA, 19 nt, Artificial Sequence
  Description of Artificial Sequence: Synthetic oligonucleotide
  Sense strand starting at position 718 of SEQ ID NO: 1242327
ugggaaucuuugggcuugu

SEQ ID NO: 1338949 - RNA, 19 nt, Artificial Sequence
  Description of Artificial Sequence: Synthetic oligonucleotide
  Antisense strand to SEQ ID NO: 1338948
acaagcccaaagauuccca

SEQ ID NO: 1338950 - RNA, 19 nt, Artificial Sequence
  Description of Artificial Sequence: Synthetic oligonucleotide
  Sense strand starting at position 719 of SEQ ID NO: 1242327
gggaaucuuugggcuuguu

SEQ ID NO: 1338951 - RNA, 19 nt, Artificial Sequence
  Description of Artificial Sequence: Synthetic oligonucleotide
  Antisense strand to SEQ ID NO: 1338950
aacaagcccaaagauuccc

SEQ ID NO: 1338952 - RNA, 19 nt, Artificial Sequence
  Description of Artificial Sequence: Synthetic oligonucleotide
  Sense strand starting at position 929 of SEQ ID NO: 1242327
acacguucccgguguagaa

SEQ ID NO: 1338953 - RNA, 19 nt, Artificial Sequence
  Description of Artificial Sequence: Synthetic oligonucleotide
  Antisense strand to SEQ ID NO: 1338952
uucuacaccgggaacgugu

SEQ ID NO: 1338954 - RNA, 19 nt, Artificial Sequence
  Description of Artificial Sequence: Synthetic oligonucleotide
  Sense strand starting at position 1451 of SEQ ID NO: 1242327
ucgagucgcucucgaagua

SEQ ID NO: 1338955 - RNA, 19 nt, Artificial Sequence
  Description of Artificial Sequence: Synthetic oligonucleotide
  Antisense strand to SEQ ID NO: 1338954
uacuucgagagcgacucga

SEQ ID NO: 1338956 - RNA, 19 nt, Artificial Sequence
  Description of Artificial Sequence: Synthetic oligonucleotide
  Sense strand starting at position 1456 of SEQ ID NO: 1242327
ucgcucucgaaguagaaga

SEQ ID NO: 1338957 - RNA, 19 nt, Artificial Sequence
  Description of Artificial Sequence: Synthetic oligonucleotide
  Antisense strand to SEQ ID NO: 1338956
ucuucuacuucgagagcga

SEQ ID NO: 1338958 - RNA, 19 nt, Artificial Sequence
  Description of Artificial Sequence: Synthetic oligonucleotide
  Sense strand starting at position 1586 of SEQ ID NO: 1242327
acgcgacguggccaucauu

SEQ ID NO: 1338959 - RNA, 19 nt, Artificial Sequence
  Description of Artificial Sequence: Synthetic oligonucleotide
  Antisense strand to SEQ ID NO: 1338958
aaugauggccacgucgcgu

SEQ ID NO: 1338960 - RNA, 19 nt, Artificial Sequence
  Description of Artificial Sequence: Synthetic oligonucleotide
  Sense strand starting at position 1937 of SEQ ID NO: 1242327
ggagucaugugacgccgau

SEQ ID NO: 1338961 - RNA, 19 nt, Artificial Sequence
  Description of Artificial Sequence: Synthetic oligonucleotide
  Antisense strand to SEQ ID NO: 1338960
aucggcgucacaugacucc

SEQ ID NO: 1338962 - RNA, 19 nt, Artificial Sequence
  Description of Artificial Sequence: Synthetic oligonucleotide
  Sense strand starting at position 2131 of SEQ ID NO: 1242327
cucucccucggauguuaaa

SEQ ID NO: 1338963 - RNA, 19 nt, Artificial Sequence
  Description of Artificial Sequence: Synthetic oligonucleotide
  Antisense strand to SEQ ID NO: 1338962
uuuaacauccgagggagag

SEQ ID NO: 1338964 - RNA, 19 nt, Artificial Sequence
  Description of Artificial Sequence: Synthetic oligonucleotide
  Sense strand starting at position 2252 of SEQ ID NO: 1242327
ggguuaagugccaguuguc

SEQ ID NO: 1338965 - RNA, 19 nt, Artificial Sequence
  Description of Artificial Sequence: Synthetic oligonucleotide
  Antisense strand to SEQ ID NO: 1338964
gacaacuggcacuuaaccc

SEQ ID NO: 1338966 - RNA, 19 nt, Artificial Sequence
  Description of Artificial Sequence: Synthetic oligonucleotide
  Sense strand starting at position 2255 of SEQ ID NO: 1242327
uuaagugccaguugucauu

SEQ ID NO: 1338967 - RNA, 19 nt, Artificial Sequence
  Description of Artificial Sequence: Synthetic oligonucleotide
  Antisense strand to SEQ ID NO: 1338966
aaugacaacuggcacuuaa

SEQ ID NO: 1338968 - RNA, 19 nt, Artificial Sequence
  Description of Artificial Sequence: Synthetic oligonucleotide
  Sense strand starting at position 2310 of SEQ ID NO: 1242327
uuucuaauacgagguggaa

SEQ ID NO: 1338969 - RNA, 19 nt, Artificial Sequence
  Description of Artificial Sequence: Synthetic oligonucleotide
  Antisense strand to SEQ ID NO: 1338968
uuccaccucguauuagaaa

SEQ ID NO: 1338970 - RNA, 19 nt, Artificial Sequence
  Description of Artificial Sequence: Synthetic oligonucleotide
  Sense strand starting at position 2333 of SEQ ID NO: 1242327
gaagguggguggcgaaaua

SEQ ID NO: 1338971 - RNA, 19 nt, Artificial Sequence
  Description of Artificial Sequence: Synthetic oligonucleotide
  Antisense strand to SEQ ID NO: 1338970
uauuucgccacccaccuuc

SEQ ID NO: 1338972 - RNA, 19 nt, Artificial Sequence
  Description of Artificial Sequence: Synthetic oligonucleotide
  Sense strand starting at position 2370 of SEQ ID NO: 1242327
guccuagucuuugcauagu

SEQ ID NO: 1338973 - RNA, 19 nt, Artificial Sequence
  Description of Artificial Sequence: Synthetic oligonucleotide
  Antisense strand to SEQ ID NO: 1338972
acuaugcaaagacuaggac

SEQ ID NO: 1338974 - RNA, 19 nt, Artificial Sequence
  Description of Artificial Sequence: Synthetic oligonucleotide
  Sense strand starting at position 2484 of SEQ ID NO: 1242327
uggugaacguugguuacuu

SEQ ID NO: 1338975 - RNA, 19 nt, Artificial Sequence
  Description of Artificial Sequence: Synthetic oligonucleotide
  Antisense strand to SEQ ID NO: 1338974
aaguaaccaacguucacca

SEQ ID NO: 1338976 - RNA, 19 nt, Artificial Sequence
  Description of Artificial Sequence: Synthetic oligonucleotide
  Sense strand starting at position 2485 of SEQ ID NO: 1242327
ggugaacguugguuacuuu

SEQ ID NO: 1338977 - RNA, 19 nt, Artificial Sequence
  Description of Artificial Sequence: Synthetic oligonucleotide
  Antisense strand to SEQ ID NO: 1338976
aaaguaaccaacguucacc

SEQ ID NO: 1338978 - RNA, 19 nt, Artificial Sequence
  Description of Artificial Sequence: Synthetic oligonucleotide
  Sense strand starting at position 2486 of SEQ ID NO: 1242327
gugaacguugguuacuuua

SEQ ID NO: 1338979 - RNA, 19 nt, Artificial Sequence
  Description of Artificial Sequence: Synthetic oligonucleotide
  Antisense strand to SEQ ID NO: 1338978
uaaaguaaccaacguucac

SEQ ID NO: 1338980 - RNA, 19 nt, Artificial Sequence
  Description of Artificial Sequence: Synthetic oligonucleotide
  Sense strand starting at position 2488 of SEQ ID NO: 1242327
gaacguugguuacuuuauu

SEQ ID NO: 1338981 - RNA, 19 nt, Artificial Sequence
  Description of Artificial Sequence: Synthetic oligonucleotide
  Antisense strand to SEQ ID NO: 1338980
aauaaaguaaccaacguuc

SEQ ID NO: 1338982 - RNA, 19 nt, Artificial Sequence
  Description of Artificial Sequence: Synthetic oligonucleotide
  Sense strand starting at position 2680 of SEQ ID NO: 1242327
gcgcaaugauaccuuaaug

SEQ ID NO: 1338983 - RNA, 19 nt, Artificial Sequence
  Description of Artificial Sequence: Synthetic oligonucleotide
  Antisense strand to SEQ ID NO: 1338982
cauuaagguaucauugcgc

SEQ ID NO: 1338984 - RNA, 19 nt, Artificial Sequence
  Description of Artificial Sequence: Synthetic oligonucleotide
  Sense strand starting at position 2685 of SEQ ID NO: 1242327
augauaccuuaaugauaga

SEQ ID NO: 1338985 - RNA, 19 nt, Artificial Sequence
  Description of Artificial Sequence: Synthetic oligonucleotide
  Antisense strand to SEQ ID NO: 1338984
ucuaucauuaagguaucau

SEQ ID NO: 1338986 - RNA, 19 nt, Artificial Sequence
  Description of Artificial Sequence: Synthetic oligonucleotide
  Sense strand starting at position 2748 of SEQ ID NO: 1242327
cggcauuuauccgagaacg

SEQ ID NO: 1338987 - RNA, 19 nt, Artificial Sequence
  Description of Artificial Sequence: Synthetic oligonucleotide
  Antisense strand to SEQ ID NO: 1338986
cguucucggauaaaugccg

SEQ ID NO: 1338988 - RNA, 19 nt, Artificial Sequence
  Description of Artificial Sequence: Synthetic oligonucleotide
  Sense strand starting at position 2955 of SEQ ID NO: 1242327
accaucuuuccgcacggaa

SEQ ID NO: 1338989 - RNA, 19 nt, Artificial Sequence
  Description of Artificial Sequence: Synthetic oligonucleotide
  Antisense strand to SEQ ID NO: 1338988
uuccgugcggaaagauggu

SEQ ID NO: 1338990 - RNA, 19 nt, Artificial Sequence
  Description of Artificial Sequence: Synthetic oligonucleotide
  Sense strand starting at position 2957 of SEQ ID NO: 1242327
caucuuuccgcacggaaac

SEQ ID NO: 1338991 - RNA, 19 nt, Artificial Sequence
  Description of Artificial Sequence: Synthetic oligonucleotide
  Antisense strand to SEQ ID NO: 1338990
guuuccgugcggaaagaug

SEQ ID NO: 1338992 - RNA, 19 nt, Artificial Sequence
  Description of Artificial Sequence: Synthetic oligonucleotide
  Sense strand starting at position 3935 of SEQ ID NO: 1242327
cuguguaggucacggaaga

SEQ ID NO: 1338993 - RNA, 19 nt, Artificial Sequence
  Description of Artificial Sequence: Synthetic oligonucleotide
  Antisense strand to SEQ ID NO: 1338992
ucuuccgugaccuacacag

SEQ ID NO: 1338994 - RNA, 19 nt, Artificial Sequence
  Description of Artificial Sequence: Synthetic oligonucleotide
  Sense strand starting at position 3936 of SEQ ID NO: 1242327
uguguaggucacggaagaa

SEQ ID NO: 1338995 - RNA, 19 nt, Artificial Sequence
  Description of Artificial Sequence: Synthetic oligonucleotide
  Antisense strand to SEQ ID NO: 1338994
uucuuccgugaccuacaca

SEQ ID NO: 1338996 - RNA, 19 nt, Artificial Sequence
  Description of Artificial Sequence: Synthetic oligonucleotide
  Sense strand starting at position 3965 of SEQ ID NO: 1242327
agcucugcuguggaggaau

SEQ ID NO: 1338997 - RNA, 19 nt, Artificial Sequence
  Description of Artificial Sequence: Synthetic oligonucleotide
  Antisense strand to SEQ ID NO: 1338996
auuccuccacagcagagcu

SEQ ID NO: 1338998 - RNA, 19 nt, Artificial Sequence
  Description of Artificial Sequence: Synthetic oligonucleotide
  Sense strand starting at position 198 of SEQ ID NO: 1242328
ucuggaaucuuguugguga

SEQ ID NO: 1338999 - RNA, 19 nt, Artificial Sequence
  Description of Artificial Sequence: Synthetic oligonucleotide
  Antisense strand to SEQ ID NO: 1338998
ucaccaacaagauuccaga

SEQ ID NO: 1339000 - RNA, 19 nt, Artificial Sequence
  Description of Artificial Sequence: Synthetic oligonucleotide
  Sense strand starting at position 200 of SEQ ID NO: 1242328
uggaaucuuguuggugaag

SEQ ID NO: 1339001 - RNA, 19 nt, Artificial Sequence
  Description of Artificial Sequence: Synthetic oligonucleotide
  Antisense strand to SEQ ID NO: 1339000
cuucaccaacaagauucca

SEQ ID NO: 1339002 - RNA, 19 nt, Artificial Sequence
  Description of Artificial Sequence: Synthetic oligonucleotide
  Sense strand starting at position 289 of SEQ ID NO: 1242328
ugguguagccauuggaguu

SEQ ID NO: 1339003 - RNA, 19 nt, Artificial Sequence
  Description of Artificial Sequence: Synthetic oligonucleotide
  Antisense strand to SEQ ID NO: 1339002
aacuccaauggcuacacca

SEQ ID NO: 1339004 - RNA, 19 nt, Artificial Sequence
  Description of Artificial Sequence: Synthetic oligonucleotide
  Sense strand starting at position 389 of SEQ ID NO: 1242328
ugacgaugucuuggugaug

SEQ ID NO: 1339005 - RNA, 19 nt, Artificial Sequence
  Description of Artificial Sequence: Synthetic oligonucleotide
  Antisense strand to SEQ ID NO: 1339004
caucaccaagacaucguca

SEQ ID NO: 1339006 - RNA, 19 nt, Artificial Sequence
  Description of Artificial Sequence: Synthetic oligonucleotide
  Sense strand starting at position 395 of SEQ ID NO: 1242328
ugucuuggugauggacaga

SEQ ID NO: 1339007 - RNA, 19 nt, Artificial Sequence
  Description of Artificial Sequence: Synthetic oligonucleotide
  Antisense strand to SEQ ID NO: 1339006
ucuguccaucaccaagaca

SEQ ID NO: 1339008 - RNA, 19 nt, Artificial Sequence
  Description of Artificial Sequence: Synthetic oligonucleotide
  Sense strand starting at position 615 of SEQ ID NO: 1242328
gcuccaucauucuuaggau

SEQ ID NO: 1339009 - RNA, 19 nt, Artificial Sequence
  Description of Artificial Sequence: Synthetic oligonucleotide
  Antisense strand to SEQ ID NO: 1339008
auccuaagaaugauggagc

SEQ ID NO: 1339010 - RNA, 19 nt, Artificial Sequence
  Description of Artificial Sequence: Synthetic oligonucleotide
  Sense strand starting at position 624 of SEQ ID NO: 1242328
uucuuaggaucccugaaac

SEQ ID NO: 1339011 - RNA, 19 nt, Artificial Sequence
  Description of Artificial Sequence: Synthetic oligonucleotide
  Antisense strand to SEQ ID NO: 1339010
guuucagggauccuaagaa

SEQ ID NO: 1339012 - RNA, 19 nt, Artificial Sequence
  Description of Artificial Sequence: Synthetic oligonucleotide
  Sense strand starting at position 873 of SEQ ID NO: 1242328
cuggccucauccuuagaga

SEQ ID NO: 1339013 - RNA, 19 nt, Artificial Sequence
  Description of Artificial Sequence: Synthetic oligonucleotide
  Antisense strand to SEQ ID NO: 1339012
ucucuaaggaugaggccag

SEQ ID NO: 1339014 - RNA, 19 nt, Artificial Sequence
  Description of Artificial Sequence: Synthetic oligonucleotide
  Sense strand starting at position 874 of SEQ ID NO: 1242328
uggccucauccuuagagag

SEQ ID NO: 1339015 - RNA, 19 nt, Artificial Sequence
  Description of Artificial Sequence: Synthetic oligonucleotide
  Antisense strand to SEQ ID NO: 1339014
cucucuaaggaugaggcca

SEQ ID NO: 1339016 - RNA, 19 nt, Artificial Sequence
  Description of Artificial Sequence: Synthetic oligonucleotide
  Sense strand starting at position 886 of SEQ ID NO: 1242328
uagagagguccucaggcau

SEQ ID NO: 1339017 - RNA, 19 nt, Artificial Sequence
  Description of Artificial Sequence: Synthetic oligonucleotide
  Antisense strand to SEQ ID NO: 1339016
augccugaggaccucucua

SEQ ID NO: 1339018 - RNA, 19 nt, Artificial Sequence
  Description of Artificial Sequence: Synthetic oligonucleotide
  Sense strand starting at position 1229 of SEQ ID NO: 1242328
aggauaacugcaggaaugu

SEQ ID NO: 1339019 - RNA, 19 nt, Artificial Sequence
  Description of Artificial Sequence: Synthetic oligonucleotide
  Antisense strand to SEQ ID NO: 1339018
acauuccugcaguuauccu

SEQ ID NO: 1339020 - RNA, 19 nt, Artificial Sequence
  Description of Artificial Sequence: Synthetic oligonucleotide
  Sense strand starting at position 1306 of SEQ ID NO: 1242328
gagagcuggcucugaacca

SEQ ID NO: 1339021 - RNA, 19 nt, Artificial Sequence
  Description of Artificial Sequence: Synthetic oligonucleotide
  Antisense strand to SEQ ID NO: 1339020
ugguucagagccagcucuc

SEQ ID NO: 1339022 - RNA, 19 nt, Artificial Sequence
  Description of Artificial Sequence: Synthetic oligonucleotide
  Sense strand starting at position 1388 of SEQ ID NO: 1242328
gaaugaucucagugacuuu

SEQ ID NO: 1339023 - RNA, 19 nt, Artificial Sequence
  Description of Artificial Sequence: Synthetic oligonucleotide
  Antisense strand to SEQ ID NO: 1339022
aaagucacugagaucauuc

SEQ ID NO: 1339024 - RNA, 19 nt, Artificial Sequence
  Description of Artificial Sequence: Synthetic oligonucleotide
  Sense strand starting at position 1448 of SEQ ID NO: 1242328
uucucagagcccugggaau

SEQ ID NO: 1339025 - RNA, 19 nt, Artificial Sequence
  Description of Artificial Sequence: Synthetic oligonucleotide
  Antisense strand to SEQ ID NO: 1339024
auucccagggcucugagaa

SEQ ID NO: 1339026 - RNA, 19 nt, Artificial Sequence
  Description of Artificial Sequence: Synthetic oligonucleotide
  Sense strand starting at position 1462 of SEQ ID NO: 1242328
ggaaucugaucauugaggu

SEQ ID NO: 1339027 - RNA, 19 nt, Artificial Sequence
  Description of Artificial Sequence: Synthetic oligonucleotide
  Antisense strand to SEQ ID NO: 1339026
accucaaugaucagauucc

SEQ ID NO: 1339028 - RNA, 19 nt, Artificial Sequence
  Description of Artificial Sequence: Synthetic oligonucleotide
  Sense strand starting at position 1463 of SEQ ID NO: 1242328
gaaucugaucauugagguu

SEQ ID NO: 1339029 - RNA, 19 nt, Artificial Sequence
  Description of Artificial Sequence: Synthetic oligonucleotide
  Antisense strand to SEQ ID NO: 1339028
aaccucaaugaucagauuc

SEQ ID NO: 1339030 - RNA, 19 nt, Artificial Sequence
  Description of Artificial Sequence: Synthetic oligonucleotide
  Sense strand starting at position 1867 of SEQ ID NO: 1242328
ugagccaaucccugaacuu

SEQ ID NO: 1339031 - RNA, 19 nt, Artificial Sequence
  Description of Artificial Sequence: Synthetic oligonucleotide
  Antisense strand to SEQ ID NO: 1339030
aaguucagggauuggcuca

SEQ ID NO: 1339032 - RNA, 19 nt, Artificial Sequence
  Description of Artificial Sequence: Synthetic oligonucleotide
  Sense strand starting at position 2003 of SEQ ID NO: 1242328
uccaucauuucuuagagua

SEQ ID NO: 1339033 - RNA, 19 nt, Artificial Sequence
  Description of Artificial Sequence: Synthetic oligonucleotide
  Antisense strand to SEQ ID NO: 1339032
uacucuaagaaaugaugga

SEQ ID NO: 1339034 - RNA, 19 nt, Artificial Sequence
  Description of Artificial Sequence: Synthetic oligonucleotide
  Sense strand starting at position 2541 of SEQ ID NO: 1242328
cugauaggcuucuuguaga

SEQ ID NO: 1339035 - RNA, 19 nt, Artificial Sequence
  Description of Artificial Sequence: Synthetic oligonucleotide
  Antisense strand to SEQ ID NO: 1339034
ucuacaagaagccuaucag

SEQ ID NO: 1339036 - RNA, 19 nt, Artificial Sequence
  Description of Artificial Sequence: Synthetic oligonucleotide
  Sense strand starting at position 2546 of SEQ ID NO: 1242328
aggcuucuuguagauggua

SEQ ID NO: 1339037 - RNA, 19 nt, Artificial Sequence
  Description of Artificial Sequence: Synthetic oligonucleotide
  Antisense strand to SEQ ID NO: 1339036
uaccaucuacaagaagccu

SEQ ID NO: 1339038 - RNA, 19 nt, Artificial Sequence
  Description of Artificial Sequence: Synthetic oligonucleotide
  Sense strand starting at position 2548 of SEQ ID NO: 1242328
gcuucuuguagaugguaau

SEQ ID NO: 1339039 - RNA, 19 nt, Artificial Sequence
  Description of Artificial Sequence: Synthetic oligonucleotide
  Antisense strand to SEQ ID NO: 1339038
auuaccaucuacaagaagc

SEQ ID NO: 1339040 - RNA, 19 nt, Artificial Sequence
  Description of Artificial Sequence: Synthetic oligonucleotide
  Sense strand starting at position 2560 of SEQ ID NO: 1242328
ugguaaugagcuuguccag

SEQ ID NO: 1339041 - RNA, 19 nt, Artificial Sequence
  Description of Artificial Sequence: Synthetic oligonucleotide
  Antisense strand to SEQ ID NO: 1339040
cuggacaagcucauuacca

SEQ ID NO: 1339042 - RNA, 19 nt, Artificial Sequence
  Description of Artificial Sequence: Synthetic oligonucleotide
  Sense strand starting at position 2629 of SEQ ID NO: 1242328
ggaagucgaugcucaggaa

SEQ ID NO: 1339043 - RNA, 19 nt, Artificial Sequence
  Description of Artificial Sequence: Synthetic oligonucleotide
  Antisense strand to SEQ ID NO: 1339042
uuccugagcaucgacuucc

SEQ ID NO: 1339044 - RNA, 19 nt, Artificial Sequence
  Description of Artificial Sequence: Synthetic oligonucleotide
  Sense strand starting at position 2734 of SEQ ID NO: 1242328
agcgaaugucaacaucauc

SEQ ID NO: 1339045 - RNA, 19 nt, Artificial Sequence
  Description of Artificial Sequence: Synthetic oligonucleotide
  Antisense strand to SEQ ID NO: 1339044
gaugauguugacauucgcu

SEQ ID NO: 1339046 - RNA, 19 nt, Artificial Sequence
  Description of Artificial Sequence: Synthetic oligonucleotide
  Sense strand starting at position 2796 of SEQ ID NO: 1242328
agaggugaugugggucuaa

SEQ ID NO: 1339047 - RNA, 19 nt, Artificial Sequence
  Description of Artificial Sequence: Synthetic oligonucleotide
  Antisense strand to SEQ ID NO: 1339046
uuagacccacaucaccucu

SEQ ID NO: 1339048 - RNA, 19 nt, Artificial Sequence
  Description of Artificial Sequence: Synthetic oligonucleotide
  Sense strand starting at position 2872 of SEQ ID NO: 1242328
aacacaggauggucuuauu

SEQ ID NO: 1339049 - RNA, 19 nt, Artificial Sequence
  Description of Artificial Sequence: Synthetic oligonucleotide
  Antisense strand to SEQ ID NO: 1339048
aauaagaccauccuguguu

SEQ ID NO: 1339050 - RNA, 19 nt, Artificial Sequence
  Description of Artificial Sequence: Synthetic oligonucleotide
  Sense strand starting at position 2881 of SEQ ID NO: 1242328
uggucuuauuaagagaaca

SEQ ID NO: 1339051 - RNA, 19 nt, Artificial Sequence
  Description of Artificial Sequence: Synthetic oligonucleotide
  Antisense strand to SEQ ID NO: 1339050
uguucucuuaauaagacca

SEQ ID NO: 1339052 - RNA, 19 nt, Artificial Sequence
  Description of Artificial Sequence: Synthetic oligonucleotide
  Sense strand starting at position 2895 of SEQ ID NO: 1242328
gaacaagcuugggaaggau

SEQ ID NO: 1339053 - RNA, 19 nt, Artificial Sequence
  Description of Artificial Sequence: Synthetic oligonucleotide
  Antisense strand to SEQ ID NO: 1339052
auccuucccaagcuuguuc

SEQ ID NO: 1339054 - RNA, 19 nt, Artificial Sequence
  Description of Artificial Sequence: Synthetic oligonucleotide
  Sense strand starting at position 2989 of SEQ ID NO: 1242328
ggagaaguauuacaaauuu

SEQ ID NO: 1339055 - RNA, 19 nt, Artificial Sequence
  Description of Artificial Sequence: Synthetic oligonucleotide
  Antisense strand to SEQ ID NO: 1339054
aaauuuguaauacuucucc

SEQ ID NO: 1339056 - RNA, 19 nt, Artificial Sequence
  Description of Artificial Sequence: Synthetic oligonucleotide
  Sense strand starting at position 3054 of SEQ ID NO: 1242328
cacaaauguguauguggau

SEQ ID NO: 1339057 - RNA, 19 nt, Artificial Sequence
  Description of Artificial Sequence: Synthetic oligonucleotide
  Antisense strand to SEQ ID NO: 1339056
auccacauacacauuugug

SEQ ID NO: 1339058 - RNA, 19 nt, Artificial Sequence
  Description of Artificial Sequence: Synthetic oligonucleotide
  Sense strand starting at position 3363 of SEQ ID NO: 1242328
uguguacaugaauguucuu

SEQ ID NO: 1339059 - RNA, 19 nt, Artificial Sequence
  Description of Artificial Sequence: Synthetic oligonucleotide
  Antisense strand to SEQ ID NO: 1339058
aagaacauucauguacaca

SEQ ID NO: 1339060 - RNA, 19 nt, Artificial Sequence
  Description of Artificial Sequence: Synthetic oligonucleotide
  Sense strand starting at position 3422 of SEQ ID NO: 1242328
agguguccaucagcugaua

SEQ ID NO: 1339061 - RNA, 19 nt, Artificial Sequence
  Description of Artificial Sequence: Synthetic oligonucleotide
  Antisense strand to SEQ ID NO: 1339060
uaucagcugauggacaccu

SEQ ID NO: 1339062 - RNA, 19 nt, Artificial Sequence
  Description of Artificial Sequence: Synthetic oligonucleotide
  Sense strand starting at position 3425 of SEQ ID NO: 1242328
uguccaucagcugauacau

SEQ ID NO: 1339063 - RNA, 19 nt, Artificial Sequence
  Description of Artificial Sequence: Synthetic oligonucleotide
  Antisense strand to SEQ ID NO: 1339062
auguaucagcugauggaca

SEQ ID NO: 1339064 - RNA, 19 nt, Artificial Sequence
  Description of Artificial Sequence: Synthetic oligonucleotide
  Sense strand starting at position 3458 of SEQ ID NO: 1242328
uggucuauuugaucugcua

SEQ ID NO: 1339065 - RNA, 19 nt, Artificial Sequence
  Description of Artificial Sequence: Synthetic oligonucleotide
  Antisense strand to SEQ ID NO: 1339064
uagcagaucaaauagacca

SEQ ID NO: 1339066 - RNA, 19 nt, Artificial Sequence
  Description of Artificial Sequence: Synthetic oligonucleotide
  Sense strand starting at position 3461 of SEQ ID NO: 1242328
ucuauuugaucugcuagca

SEQ ID NO: 1339067 - RNA, 19 nt, Artificial Sequence
  Description of Artificial Sequence: Synthetic oligonucleotide
  Antisense strand to SEQ ID NO: 1339066
ugcuagcagaucaaauaga

SEQ ID NO: 1339068 - RNA, 19 nt, Artificial Sequence
  Description of Artificial Sequence: Synthetic oligonucleotide
  Sense strand starting at position 3509 of SEQ ID NO: 1242328
ugcaguuagccagaacaaa

SEQ ID NO: 1339069 - RNA, 19 nt, Artificial Sequence
  Description of Artificial Sequence: Synthetic oligonucleotide
  Antisense strand to SEQ ID NO: 1339068
uuuguucuggcuaacugca

SEQ ID NO: 1339070 - RNA, 19 nt, Artificial Sequence
  Description of Artificial Sequence: Synthetic oligonucleotide
  Sense strand starting at position 3570 of SEQ ID NO: 1242328
gcuugugaacuugagguca

SEQ ID NO: 1339071 - RNA, 19 nt, Artificial Sequence
  Description of Artificial Sequence: Synthetic oligonucleotide
  Antisense strand to SEQ ID NO: 1339070
ugaccucaaguucacaagc

SEQ ID NO: 1339072 - RNA, 19 nt, Artificial Sequence
  Description of Artificial Sequence: Synthetic oligonucleotide
  Sense strand starting at position 3744 of SEQ ID NO: 1242328
uguugugagucuuuguaau

SEQ ID NO: 1339073 - RNA, 19 nt, Artificial Sequence
  Description of Artificial Sequence: Synthetic oligonucleotide
  Antisense strand to SEQ ID NO: 1339072
auuacaaagacucacaaca

SEQ ID NO: 1339074 - RNA, 19 nt, Artificial Sequence
  Description of Artificial Sequence: Synthetic oligonucleotide
  Sense strand starting at position 3746 of SEQ ID NO: 1242328
uugugagucuuuguaauca

SEQ ID NO: 1339075 - RNA, 19 nt, Artificial Sequence
  Description of Artificial Sequence: Synthetic oligonucleotide
  Antisense strand to SEQ ID NO: 1339074
ugauuacaaagacucacaa

SEQ ID NO: 1339076 - RNA, 19 nt, Artificial Sequence
  Description of Artificial Sequence: Synthetic oligonucleotide
  Sense strand starting at position 3844 of SEQ ID NO: 1242328
uuuguuuguccuuauuacu

SEQ ID NO: 1339077 - RNA, 19 nt, Artificial Sequence
  Description of Artificial Sequence: Synthetic oligonucleotide
  Antisense strand to SEQ ID NO: 1339076
aguaauaaggacaaacaaa

SEQ ID NO: 1339078 - RNA, 19 nt, Artificial Sequence
  Description of Artificial Sequence: Synthetic oligonucleotide
  Sense strand starting at position 34 of SEQ ID NO: 1242329
uagugucaccaguaagaga

SEQ ID NO: 1339079 - RNA, 19 nt, Artificial Sequence
  Description of Artificial Sequence: Synthetic oligonucleotide
  Antisense strand to SEQ ID NO: 1339078
ucucuuacuggugacacua

SEQ ID NO: 1339080 - RNA, 19 nt, Artificial Sequence
  Description of Artificial Sequence: Synthetic oligonucleotide
  Sense strand starting at position 72 of SEQ ID NO: 1242329
uggauucuugaagguugau

SEQ ID NO: 1339081 - RNA, 19 nt, Artificial Sequence
  Description of Artificial Sequence: Synthetic oligonucleotide
  Antisense strand to SEQ ID NO: 1339080
aucaaccuucaagaaucca

SEQ ID NO: 1339082 - RNA, 19 nt, Artificial Sequence
  Description of Artificial Sequence: Synthetic oligonucleotide
  Sense strand starting at position 303 of SEQ ID NO: 1242329
ggcuuucuugcuguacagu

SEQ ID NO: 1339083 - RNA, 19 nt, Artificial Sequence
  Description of Artificial Sequence: Synthetic oligonucleotide
  Antisense strand to SEQ ID NO: 1339082
acuguacagcaagaaagcc

SEQ ID NO: 1339084 - RNA, 19 nt, Artificial Sequence
  Description of Artificial Sequence: Synthetic oligonucleotide
  Sense strand starting at position 408 of SEQ ID NO: 1242329
cuauuauaggcaggucgaa

SEQ ID NO: 1339085 - RNA, 19 nt, Artificial Sequence
  Description of Artificial Sequence: Synthetic oligonucleotide
  Antisense strand to SEQ ID NO: 1339084
uucgaccugccuauaauag

SEQ ID NO: 1339086 - RNA, 19 nt, Artificial Sequence
  Description of Artificial Sequence: Synthetic oligonucleotide
  Sense strand starting at position 619 of SEQ ID NO: 1242329
acucuaaacugguuuaggu

SEQ ID NO: 1339087 - RNA, 19 nt, Artificial Sequence
  Description of Artificial Sequence: Synthetic oligonucleotide
  Antisense strand to SEQ ID NO: 1339086
accuaaaccaguuuagagu

SEQ ID NO: 1339088 - RNA, 19 nt, Artificial Sequence
  Description of Artificial Sequence: Synthetic oligonucleotide
  Sense strand starting at position 636 of SEQ ID NO: 1242329
gugaaauccucuccaggca

SEQ ID NO: 1339089 - RNA, 19 nt, Artificial Sequence
  Description of Artificial Sequence: Synthetic oligonucleotide
  Antisense strand to SEQ ID NO: 1339088
ugccuggagaggauuucac

SEQ ID NO: 1339090 - RNA, 19 nt, Artificial Sequence
  Description of Artificial Sequence: Synthetic oligonucleotide
  Sense strand starting at position 637 of SEQ ID NO: 1242329
ugaaauccucuccaggcau

SEQ ID NO: 1339091 - RNA, 19 nt, Artificial Sequence
  Description of Artificial Sequence: Synthetic oligonucleotide
  Antisense strand to SEQ ID NO: 1339090
augccuggagaggauuuca

SEQ ID NO: 1339092 - RNA, 19 nt, Artificial Sequence
  Description of Artificial Sequence: Synthetic oligonucleotide
  Sense strand starting at position 655 of SEQ ID NO: 1242329
uagguaucucaguggaggu

SEQ ID NO: 1339093 - RNA, 19 nt, Artificial Sequence
  Description of Artificial Sequence: Synthetic oligonucleotide
  Antisense strand to SEQ ID NO: 1339092
accuccacugagauaccua

SEQ ID NO: 1339094 - RNA, 19 nt, Artificial Sequence
  Description of Artificial Sequence: Synthetic oligonucleotide
  Sense strand starting at position 769 of SEQ ID NO: 1242329
gaaggugacucucuugacu

SEQ ID NO: 1339095 - RNA, 19 nt, Artificial Sequence
  Description of Artificial Sequence: Synthetic oligonucleotide
  Antisense strand to SEQ ID NO: 1339094
agucaagagagucaccuuc

SEQ ID NO: 1339096 - RNA, 19 nt, Artificial Sequence
  Description of Artificial Sequence: Synthetic oligonucleotide
  Sense strand starting at position 861 of SEQ ID NO: 1242329
cugaaucuagugcaaagua

SEQ ID NO: 1339097 - RNA, 19 nt, Artificial Sequence
  Description of Artificial Sequence: Synthetic oligonucleotide
  Antisense strand to SEQ ID NO: 1339096
uacuuugcacuagauucag

SEQ ID NO: 1339098 - RNA, 19 nt, Artificial Sequence
  Description of Artificial Sequence: Synthetic oligonucleotide
  Sense strand starting at position 937 of SEQ ID NO: 1242329
ccaagaauccuucguuccu

SEQ ID NO: 1339099 - RNA, 19 nt, Artificial Sequence
  Description of Artificial Sequence: Synthetic oligonucleotide
  Antisense strand to SEQ ID NO: 1339098
aggaacgaaggauucuugg

SEQ ID NO: 1339100 - RNA, 19 nt, Artificial Sequence
  Description of Artificial Sequence: Synthetic oligonucleotide
  Sense strand starting at position 957 of SEQ ID NO: 1242329
ggauuauaagcacgggaag

SEQ ID NO: 1339101 - RNA, 19 nt, Artificial Sequence
  Description of Artificial Sequence: Synthetic oligonucleotide
  Antisense strand to SEQ ID NO: 1339100
cuucccgugcuuauaaucc

SEQ ID NO: 1339102 - RNA, 19 nt, Artificial Sequence
  Description of Artificial Sequence: Synthetic oligonucleotide
  Sense strand starting at position 958 of SEQ ID NO: 1242329
gauuauaagcacgggaagu

SEQ ID NO: 1339103 - RNA, 19 nt, Artificial Sequence
  Description of Artificial Sequence: Synthetic oligonucleotide
  Antisense strand to SEQ ID NO: 1339102
acuucccgugcuuauaauc

SEQ ID NO: 1339104 - RNA, 19 nt, Artificial Sequence
  Description of Artificial Sequence: Synthetic oligonucleotide
  Sense strand starting at position 1037 of SEQ ID NO: 1242329
ugucgaugugaauggaguu

SEQ ID NO: 1339105 - RNA, 19 nt, Artificial Sequence
  Description of Artificial Sequence: Synthetic oligonucleotide
  Antisense strand to SEQ ID NO: 1339104
aacuccauucacaucgaca

SEQ ID NO: 1339106 - RNA, 19 nt, Artificial Sequence
  Description of Artificial Sequence: Synthetic oligonucleotide
  Sense strand starting at position 1050 of SEQ ID NO: 1242329
ggaguugugaagugcacaa

SEQ ID NO: 1339107 - RNA, 19 nt, Artificial Sequence
  Description of Artificial Sequence: Synthetic oligonucleotide
  Antisense strand to SEQ ID NO: 1339106
uugugcacuucacaacucc

SEQ ID NO: 1339108 - RNA, 19 nt, Artificial Sequence
  Description of Artificial Sequence: Synthetic oligonucleotide
  Sense strand starting at position 1254 of SEQ ID NO: 1242329
uacggaaggcgauauguuu

SEQ ID NO: 1339109 - RNA, 19 nt, Artificial Sequence
  Description of Artificial Sequence: Synthetic oligonucleotide
  Antisense strand to SEQ ID NO: 1339108
aaacauaucgccuuccgua

SEQ ID NO: 1339110 - RNA, 19 nt, Artificial Sequence
  Description of Artificial Sequence: Synthetic oligonucleotide
  Sense strand starting at position 1528 of SEQ ID NO: 1242329
agcagaucucaccggacga

SEQ ID NO: 1339111 - RNA, 19 nt, Artificial Sequence
  Description of Artificial Sequence: Synthetic oligonucleotide
  Antisense strand to SEQ ID NO: 1339110
ucguccggugagaucugcu

SEQ ID NO: 1339112 - RNA, 19 nt, Artificial Sequence
  Description of Artificial Sequence: Synthetic oligonucleotide
  Sense strand starting at position 2418 of SEQ ID NO: 1242329
gggccucuccuguauauau

SEQ ID NO: 1339113 - RNA, 19 nt, Artificial Sequence
  Description of Artificial Sequence: Synthetic oligonucleotide
  Antisense strand to SEQ ID NO: 1339112
auauauacaggagaggccc

SEQ ID NO: 1339114 - RNA, 19 nt, Artificial Sequence
  Description of Artificial Sequence: Synthetic oligonucleotide
  Sense strand starting at position 2420 of SEQ ID NO: 1242329
gccucuccuguauauauca

SEQ ID NO: 1339115 - RNA, 19 nt, Artificial Sequence
  Description of Artificial Sequence: Synthetic oligonucleotide
  Antisense strand to SEQ ID NO: 1339114
ugauauauacaggagaggc

SEQ ID NO: 1339116 - RNA, 19 nt, Artificial Sequence
  Description of Artificial Sequence: Synthetic oligonucleotide
  Sense strand starting at position 2467 of SEQ ID NO: 1242329
cggaaagacaguugugaag

SEQ ID NO: 1339117 - RNA, 19 nt, Artificial Sequence
  Description of Artificial Sequence: Synthetic oligonucleotide
  Antisense strand to SEQ ID NO: 1339116
cuucacaacugucuuuccg

SEQ ID NO: 1339118 - RNA, 19 nt, Artificial Sequence
  Description of Artificial Sequence: Synthetic oligonucleotide
  Sense strand starting at position 2528 of SEQ ID NO: 1242329
aggacugggccguagacau

SEQ ID NO: 1339119 - RNA, 19 nt, Artificial Sequence
  Description of Artificial Sequence: Synthetic oligonucleotide
  Antisense strand to SEQ ID NO: 1339118
augucuacggcccaguccu

SEQ ID NO: 1339120 - RNA, 19 nt, Artificial Sequence
  Description of Artificial Sequence: Synthetic oligonucleotide
  Sense strand starting at position 2744 of SEQ ID NO: 1242329
ggugauagugcugauaauc

SEQ ID NO: 1339121 - RNA, 19 nt, Artificial Sequence
  Description of Artificial Sequence: Synthetic oligonucleotide
  Antisense strand to SEQ ID NO: 1339120
gauuaucagcacuaucacc

SEQ ID NO: 1339122 - RNA, 19 nt, Artificial Sequence
  Description of Artificial Sequence: Synthetic oligonucleotide
  Sense strand starting at position 2839 of SEQ ID NO: 1242329
caaagagaucacuguugua

SEQ ID NO: 1339123 - RNA, 19 nt, Artificial Sequence
  Description of Artificial Sequence: Synthetic oligonucleotide
  Antisense strand to SEQ ID NO: 1339122
uacaacagugaucucuuug

SEQ ID NO: 1339124 - RNA, 19 nt, Artificial Sequence
  Description of Artificial Sequence: Synthetic oligonucleotide
  Sense strand starting at position 2935 of SEQ ID NO: 1242329
uggacugaggucugucuga

SEQ ID NO: 1339125 - RNA, 19 nt, Artificial Sequence
  Description of Artificial Sequence: Synthetic oligonucleotide
  Antisense strand to SEQ ID NO: 1339124
ucagacagaccucagucca

SEQ ID NO: 1339126 - RNA, 19 nt, Artificial Sequence
  Description of Artificial Sequence: Synthetic oligonucleotide
  Sense strand starting at position 2946 of SEQ ID NO: 1242329
cugucugacucccuguaau

SEQ ID NO: 1339127 - RNA, 19 nt, Artificial Sequence
  Description of Artificial Sequence: Synthetic oligonucleotide
  Antisense strand to SEQ ID NO: 1339126
auuacagggagucagacag

SEQ ID NO: 1339128 - RNA, 19 nt, Artificial Sequence
  Description of Artificial Sequence: Synthetic oligonucleotide
  Sense strand starting at position 2956 of SEQ ID NO: 1242329
cccuguaaucacugcugga

SEQ ID NO: 1339129 - RNA, 19 nt, Artificial Sequence
  Description of Artificial Sequence: Synthetic oligonucleotide
  Antisense strand to SEQ ID NO: 1339128
uccagcagugauuacaggg

SEQ ID NO: 1339130 - RNA, 19 nt, Artificial Sequence
  Description of Artificial Sequence: Synthetic oligonucleotide
  Sense strand starting at position 2969 of SEQ ID NO: 1242329
gcuggacugcccuaauaac

SEQ ID NO: 1339131 - RNA, 19 nt, Artificial Sequence
  Description of Artificial Sequence: Synthetic oligonucleotide
  Antisense strand to SEQ ID NO: 1339130
guuauuagggcaguccagc

SEQ ID NO: 1339132 - RNA, 19 nt, Artificial Sequence
  Description of Artificial Sequence: Synthetic oligonucleotide
  Sense strand starting at position 3048 of SEQ ID NO: 1242329
cauaguguucuggacuuua

SEQ ID NO: 1339133 - RNA, 19 nt, Artificial Sequence
  Description of Artificial Sequence: Synthetic oligonucleotide
  Antisense strand to SEQ ID NO: 1339132
uaaaguccagaacacuaug

SEQ ID NO: 1339134 - RNA, 19 nt, Artificial Sequence
  Description of Artificial Sequence: Synthetic oligonucleotide
  Sense strand starting at position 3316 of SEQ ID NO: 1242329
agaggccuugucuaaaguu

SEQ ID NO: 1339135 - RNA, 19 nt, Artificial Sequence
  Description of Artificial Sequence: Synthetic oligonucleotide
  Antisense strand to SEQ ID NO: 1339134
aacuuuagacaaggccucu

SEQ ID NO: 1339136 - RNA, 19 nt, Artificial Sequence
  Description of Artificial Sequence: Synthetic oligonucleotide
  Sense strand starting at position 3432 of SEQ ID NO: 1242329
ucaugaacacugggugaua

SEQ ID NO: 1339137 - RNA, 19 nt, Artificial Sequence
  Description of Artificial Sequence: Synthetic oligonucleotide
  Antisense strand to SEQ ID NO: 1339136
uaucacccaguguucauga

SEQ ID NO: 1339138 - RNA, 19 nt, Artificial Sequence
  Description of Artificial Sequence: Synthetic oligonucleotide
  Sense strand starting at position 3433 of SEQ ID NO: 1242329
caugaacacugggugauau

SEQ ID NO: 1339139 - RNA, 19 nt, Artificial Sequence
  Description of Artificial Sequence: Synthetic oligonucleotide
  Antisense strand to SEQ ID NO: 1339138
auaucacccaguguucaug

SEQ ID NO: 1339140 - RNA, 19 nt, Artificial Sequence
  Description of Artificial Sequence: Synthetic oligonucleotide
  Sense strand starting at position 3504 of SEQ ID NO: 1242329
ucaggagaauauuaaauga

SEQ ID NO: 1339141 - RNA, 19 nt, Artificial Sequence
  Description of Artificial Sequence: Synthetic oligonucleotide
  Antisense strand to SEQ ID NO: 1339140
ucauuuaauauucuccuga

SEQ ID NO: 1339142 - RNA, 19 nt, Artificial Sequence
  Description of Artificial Sequence: Synthetic oligonucleotide
  Sense strand starting at position 3544 of SEQ ID NO: 1242329
gggucuaaggcucaaacau

SEQ ID NO: 1339143 - RNA, 19 nt, Artificial Sequence
  Description of Artificial Sequence: Synthetic oligonucleotide
  Antisense strand to SEQ ID NO: 1339142
auguuugagccuuagaccc

SEQ ID NO: 1339144 - RNA, 19 nt, Artificial Sequence
  Description of Artificial Sequence: Synthetic oligonucleotide
  Sense strand starting at position 3627 of SEQ ID NO: 1242329
cggaugucugaggauggua

SEQ ID NO: 1339145 - RNA, 19 nt, Artificial Sequence
  Description of Artificial Sequence: Synthetic oligonucleotide
  Antisense strand to SEQ ID NO: 1339144
uaccauccucagacauccg

SEQ ID NO: 1339146 - RNA, 19 nt, Artificial Sequence
  Description of Artificial Sequence: Synthetic oligonucleotide
  Sense strand starting at position 3629 of SEQ ID NO: 1242329
gaugucugaggaugguaaa

SEQ ID NO: 1339147 - RNA, 19 nt, Artificial Sequence
  Description of Artificial Sequence: Synthetic oligonucleotide
  Antisense strand to SEQ ID NO: 1339146
uuuaccauccucagacauc

SEQ ID NO: 1339148 - RNA, 19 nt, Artificial Sequence
  Description of Artificial Sequence: Synthetic oligonucleotide
  Sense strand starting at position 3642 of SEQ ID NO: 1242329
gguaaagauuuguaucuau

SEQ ID NO: 1339149 - RNA, 19 nt, Artificial Sequence
  Description of Artificial Sequence: Synthetic oligonucleotide
  Antisense strand to SEQ ID NO: 1339148
auagauacaaaucuuuacc

SEQ ID NO: 1339150 - RNA, 19 nt, Artificial Sequence
  Description of Artificial Sequence: Synthetic oligonucleotide
  Sense strand starting at position 3731 of SEQ ID NO: 1242329
cucuuauuaccaggugaac

SEQ ID NO: 1339151 - RNA, 19 nt, Artificial Sequence
  Description of Artificial Sequence: Synthetic oligonucleotide
  Antisense strand to SEQ ID NO: 1339150
guucaccugguaauaagag

SEQ ID NO: 1339152 - RNA, 19 nt, Artificial Sequence
  Description of Artificial Sequence: Synthetic oligonucleotide
  Sense strand starting at position 3874 of SEQ ID NO: 1242329
uaaauuguccgaggucaag

SEQ ID NO: 1339153 - RNA, 19 nt, Artificial Sequence
  Description of Artificial Sequence: Synthetic oligonucleotide
  Antisense strand to SEQ ID NO: 1339152
cuugaccucggacaauuua

SEQ ID NO: 1339154 - RNA, 19 nt, Artificial Sequence
  Description of Artificial Sequence: Synthetic oligonucleotide
  Sense strand starting at position 3877 of SEQ ID NO: 1242329
auuguccgaggucaagaau

SEQ ID NO: 1339155 - RNA, 19 nt, Artificial Sequence
  Description of Artificial Sequence: Synthetic oligonucleotide
  Antisense strand to SEQ ID NO: 1339154
auucuugaccucggacaau

SEQ ID NO: 1339156 - RNA, 19 nt, Artificial Sequence
  Description of Artificial Sequence: Synthetic oligonucleotide
  Sense strand starting at position 3938 of SEQ ID NO: 1242329
gcaguaccugugggacauu

SEQ ID NO: 1339157 - RNA, 19 nt, Artificial Sequence
  Description of Artificial Sequence: Synthetic oligonucleotide
  Antisense strand to SEQ ID NO: 1339156
aaugucccacagguacugc

SEQ ID NO: 1339158 - RNA, 19 nt, Artificial Sequence
  Description of Artificial Sequence: Synthetic oligonucleotide
  Sense strand starting at position 287 of SEQ ID NO: 1242330
gugacacuguuaucucuaa

SEQ ID NO: 1339159 - RNA, 19 nt, Artificial Sequence
  Description of Artificial Sequence: Synthetic oligonucleotide
  Antisense strand to SEQ ID NO: 1339158
uuagagauaacagugucac

SEQ ID NO: 1339160 - RNA, 19 nt, Artificial Sequence
  Description of Artificial Sequence: Synthetic oligonucleotide
  Sense strand starting at position 609 of SEQ ID NO: 1242330
guuacagagcuacggauaa

SEQ ID NO: 1339161 - RNA, 19 nt, Artificial Sequence
  Description of Artificial Sequence: Synthetic oligonucleotide
  Antisense strand to SEQ ID NO: 1339160
uuauccguagcucuguaac

SEQ ID NO: 1339162 - RNA, 19 nt, Artificial Sequence
  Description of Artificial Sequence: Synthetic oligonucleotide
  Sense strand starting at position 668 of SEQ ID NO: 1242330
guaaucccuucuguaggaa

SEQ ID NO: 1339163 - RNA, 19 nt, Artificial Sequence
  Description of Artificial Sequence: Synthetic oligonucleotide
  Antisense strand to SEQ ID NO: 1339162
uuccuacagaagggauuac

SEQ ID NO: 1339164 - RNA, 19 nt, Artificial Sequence
  Description of Artificial Sequence: Synthetic oligonucleotide
  Sense strand starting at position 878 of SEQ ID NO: 1242330
ccaggaguggcauaguuca

SEQ ID NO: 1339165 - RNA, 19 nt, Artificial Sequence
  Description of Artificial Sequence: Synthetic oligonucleotide
  Antisense strand to SEQ ID NO: 1339164
ugaacuaugccacuccugg

SEQ ID NO: 1339166 - RNA, 19 nt, Artificial Sequence
  Description of Artificial Sequence: Synthetic oligonucleotide
  Sense strand starting at position 924 of SEQ ID NO: 1242330
gcccaagaucuuggcucau

SEQ ID NO: 1339167 - RNA, 19 nt, Artificial Sequence
  Description of Artificial Sequence: Synthetic oligonucleotide
  Antisense strand to SEQ ID NO: 1339166
augagccaagaucuugggc

SEQ ID NO: 1339168 - RNA, 19 nt, Artificial Sequence
  Description of Artificial Sequence: Synthetic oligonucleotide
  Sense strand starting at position 926 of SEQ ID NO: 1242330
ccaagaucuuggcucauca

SEQ ID NO: 1339169 - RNA, 19 nt, Artificial Sequence
  Description of Artificial Sequence: Synthetic oligonucleotide
  Antisense strand to SEQ ID NO: 1339168
ugaugagccaagaucuugg

SEQ ID NO: 1339170 - RNA, 19 nt, Artificial Sequence
  Description of Artificial Sequence: Synthetic oligonucleotide
  Sense strand starting at position 930 of SEQ ID NO: 1242330
gaucuuggcucaucaagga

SEQ ID NO: 1339171 - RNA, 19 nt, Artificial Sequence
  Description of Artificial Sequence: Synthetic oligonucleotide
  Antisense strand to SEQ ID NO: 1339170
uccuugaugagccaagauc

SEQ ID NO: 1339172 - RNA, 19 nt, Artificial Sequence
  Description of Artificial Sequence: Synthetic oligonucleotide
  Sense strand starting at position 934 of SEQ ID NO: 1242330
uuggcucaucaaggacaau

SEQ ID NO: 1339173 - RNA, 19 nt, Artificial Sequence
  Description of Artificial Sequence: Synthetic oligonucleotide
  Antisense strand to SEQ ID NO: 1339172
auuguccuugaugagccaa

SEQ ID NO: 1339174 - RNA, 19 nt, Artificial Sequence
  Description of Artificial Sequence: Synthetic oligonucleotide
  Sense strand starting at position 967 of SEQ ID NO: 1242330
accauaacccaauguguuu

SEQ ID NO: 1339175 - RNA, 19 nt, Artificial Sequence
  Description of Artificial Sequence: Synthetic oligonucleotide
  Antisense strand to SEQ ID NO: 1339174
aaacacauuggguuauggu

SEQ ID NO: 1339176 - RNA, 19 nt, Artificial Sequence
  Description of Artificial Sequence: Synthetic oligonucleotide
  Sense strand starting at position 1015 of SEQ ID NO: 1242330
acgaacacauuugauaaga

SEQ ID NO: 1339177 - RNA, 19 nt, Artificial Sequence
  Description of Artificial Sequence: Synthetic oligonucleotide
  Antisense strand to SEQ ID NO: 1339176
ucuuaucaaauguguucgu

SEQ ID NO: 1339178 - RNA, 19 nt, Artificial Sequence
  Description of Artificial Sequence: Synthetic oligonucleotide
  Sense strand starting at position 1082 of SEQ ID NO: 1242330
aguggaccuucccugagaa

SEQ ID NO: 1339179 - RNA, 19 nt, Artificial Sequence
  Description of Artificial Sequence: Synthetic oligonucleotide
  Antisense strand to SEQ ID NO: 1339178
uucucagggaagguccacu

SEQ ID NO: 1339180 - RNA, 19 nt, Artificial Sequence
  Description of Artificial Sequence: Synthetic oligonucleotide
  Sense strand starting at position 1083 of SEQ ID NO: 1242330
guggaccuucccugagaaa

SEQ ID NO: 1339181 - RNA, 19 nt, Artificial Sequence
  Description of Artificial Sequence: Synthetic oligonucleotide
  Antisense strand to SEQ ID NO: 1339180
uuucucagggaagguccac

SEQ ID NO: 1339182 - RNA, 19 nt, Artificial Sequence
  Description of Artificial Sequence: Synthetic oligonucleotide
  Sense strand starting at position 2553 of SEQ ID NO: 1242330
gggagcuaaugaguugcau

SEQ ID NO: 1339183 - RNA, 19 nt, Artificial Sequence
  Description of Artificial Sequence: Synthetic oligonucleotide
  Antisense strand to SEQ ID NO: 1339182
augcaacucauuagcuccc

SEQ ID NO: 1339184 - RNA, 19 nt, Artificial Sequence
  Description of Artificial Sequence: Synthetic oligonucleotide
  Sense strand starting at position 2574 of SEQ ID NO: 1242330
guuuguggccuguugugua

SEQ ID NO: 1339185 - RNA, 19 nt, Artificial Sequence
  Description of Artificial Sequence: Synthetic oligonucleotide
  Antisense strand to SEQ ID NO: 1339184
uacacaacaggccacaaac

SEQ ID NO: 1339186 - RNA, 19 nt, Artificial Sequence
  Description of Artificial Sequence: Synthetic oligonucleotide
  Sense strand starting at position 2698 of SEQ ID NO: 1242330
ggguaaaucuggucauacc

SEQ ID NO: 1339187 - RNA, 19 nt, Artificial Sequence
  Description of Artificial Sequence: Synthetic oligonucleotide
  Antisense strand to SEQ ID NO: 1339186
gguaugaccagauuuaccc

SEQ ID NO: 1339188 - RNA, 19 nt, Artificial Sequence
  Description of Artificial Sequence: Synthetic oligonucleotide
  Sense strand starting at position 2699 of SEQ ID NO: 1242330
gguaaaucuggucauacca

SEQ ID NO: 1339189 - RNA, 19 nt, Artificial Sequence
  Description of Artificial Sequence: Synthetic oligonucleotide
  Antisense strand to SEQ ID NO: 1339188
ugguaugaccagauuuacc

SEQ ID NO: 1339190 - RNA, 19 nt, Artificial Sequence
  Description of Artificial Sequence: Synthetic oligonucleotide
  Sense strand starting at position 2772 of SEQ ID NO: 1242330
gcuccugcccuagaguaau

SEQ ID NO: 1339191 - RNA, 19 nt, Artificial Sequence
  Description of Artificial Sequence: Synthetic oligonucleotide
  Antisense strand to SEQ ID NO: 1339190
auuacucuagggcaggagc

SEQ ID NO: 1339192 - RNA, 19 nt, Artificial Sequence
  Description of Artificial Sequence: Synthetic oligonucleotide
  Sense strand starting at position 2782 of SEQ ID NO: 1242330
uagaguaaucuugggcaag

SEQ ID NO: 1339193 - RNA, 19 nt, Artificial Sequence
  Description of Artificial Sequence: Synthetic oligonucleotide
  Antisense strand to SEQ ID NO: 1339192
cuugcccaagauuacucua

SEQ ID NO: 1339194 - RNA, 19 nt, Artificial Sequence
  Description of Artificial Sequence: Synthetic oligonucleotide
  Sense strand starting at position 2784 of SEQ ID NO: 1242330
gaguaaucuugggcaaguc

SEQ ID NO: 1339195 - RNA, 19 nt, Artificial Sequence
  Description of Artificial Sequence: Synthetic oligonucleotide
  Antisense strand to SEQ ID NO: 1339194
gacuugcccaagauuacuc

SEQ ID NO: 1339196 - RNA, 19 nt, Artificial Sequence
  Description of Artificial Sequence: Synthetic oligonucleotide
  Sense strand starting at position 2785 of SEQ ID NO: 1242330
aguaaucuugggcaaguca

SEQ ID NO: 1339197 - RNA, 19 nt, Artificial Sequence
  Description of Artificial Sequence: Synthetic oligonucleotide
  Antisense strand to SEQ ID NO: 1339196
ugacuugcccaagauuacu

SEQ ID NO: 1339198 - RNA, 19 nt, Artificial Sequence
  Description of Artificial Sequence: Synthetic oligonucleotide
  Sense strand starting at position 2914 of SEQ ID NO: 1242330
ucuagaacccugugaggca

SEQ ID NO: 1339199 - RNA, 19 nt, Artificial Sequence
  Description of Artificial Sequence: Synthetic oligonucleotide
  Antisense strand to SEQ ID NO: 1339198
ugccucacaggguucuaga

SEQ ID NO: 1339200 - RNA, 19 nt, Artificial Sequence
  Description of Artificial Sequence: Synthetic oligonucleotide
  Sense strand starting at position 2940 of SEQ ID NO: 1242330
uggaguacgcuccagguua

SEQ ID NO: 1339201 - RNA, 19 nt, Artificial Sequence
  Description of Artificial Sequence: Synthetic oligonucleotide
  Antisense strand to SEQ ID NO: 1339200
uaaccuggagcguacucca

SEQ ID NO: 1339202 - RNA, 19 nt, Artificial Sequence
  Description of Artificial Sequence: Synthetic oligonucleotide
  Sense strand starting at position 3094 of SEQ ID NO: 1242330
gggucagagcuggauggua

SEQ ID NO: 1339203 - RNA, 19 nt, Artificial Sequence
  Description of Artificial Sequence: Synthetic oligonucleotide
  Antisense strand to SEQ ID NO: 1339202
uaccauccagcucugaccc

SEQ ID NO: 1339204 - RNA, 19 nt, Artificial Sequence
  Description of Artificial Sequence: Synthetic oligonucleotide
  Sense strand starting at position 3146 of SEQ ID NO: 1242330
cuggccaggacaugaauau

SEQ ID NO: 1339205 - RNA, 19 nt, Artificial Sequence
  Description of Artificial Sequence: Synthetic oligonucleotide
  Antisense strand to SEQ ID NO: 1339204
auauucauguccuggccag

SEQ ID NO: 1339206 - RNA, 19 nt, Artificial Sequence
  Description of Artificial Sequence: Synthetic oligonucleotide
  Sense strand starting at position 3217 of SEQ ID NO: 1242330
uaagguaguggguggaauu

SEQ ID NO: 1339207 - RNA, 19 nt, Artificial Sequence
  Description of Artificial Sequence: Synthetic oligonucleotide
  Antisense strand to SEQ ID NO: 1339206
aauuccacccacuaccuua

SEQ ID NO: 1339208 - RNA, 19 nt, Artificial Sequence
  Description of Artificial Sequence: Synthetic oligonucleotide
  Sense strand starting at position 3230 of SEQ ID NO: 1242330
ggaauuuguuuagauuaca

SEQ ID NO: 1339209 - RNA, 19 nt, Artificial Sequence
  Description of Artificial Sequence: Synthetic oligonucleotide
  Antisense strand to SEQ ID NO: 1339208
uguaaucuaaacaaauucc

SEQ ID NO: 1339210 - RNA, 19 nt, Artificial Sequence
  Description of Artificial Sequence: Synthetic oligonucleotide
  Sense strand starting at position 3246 of SEQ ID NO: 1242330
acacucucaggccagaauu

SEQ ID NO: 1339211 - RNA, 19 nt, Artificial Sequence
  Description of Artificial Sequence: Synthetic oligonucleotide
  Antisense strand to SEQ ID NO: 1339210
aauucuggccugagagugu

SEQ ID NO: 1339212 - RNA, 19 nt, Artificial Sequence
  Description of Artificial Sequence: Synthetic oligonucleotide
  Sense strand starting at position 3290 of SEQ ID NO: 1242330
uuuccuuugaguuguagga

SEQ ID NO: 1339213 - RNA, 19 nt, Artificial Sequence
  Description of Artificial Sequence: Synthetic oligonucleotide
  Antisense strand to SEQ ID NO: 1339212
uccuacaacucaaaggaaa

SEQ ID NO: 1339214 - RNA, 19 nt, Artificial Sequence
  Description of Artificial Sequence: Synthetic oligonucleotide
  Sense strand starting at position 3294 of SEQ ID NO: 1242330
cuuugaguuguaggaguug

SEQ ID NO: 1339215 - RNA, 19 nt, Artificial Sequence
  Description of Artificial Sequence: Synthetic oligonucleotide
  Antisense strand to SEQ ID NO: 1339214
caacuccuacaacucaaag

SEQ ID NO: 1339216 - RNA, 19 nt, Artificial Sequence
  Description of Artificial Sequence: Synthetic oligonucleotide
  Sense strand starting at position 3299 of SEQ ID NO: 1242330
aguuguaggaguugagaaa

SEQ ID NO: 1339217 - RNA, 19 nt, Artificial Sequence
  Description of Artificial Sequence: Synthetic oligonucleotide
  Antisense strand to SEQ ID NO: 1339216
uuucucaacuccuacaacu

SEQ ID NO: 1339218 - RNA, 19 nt, Artificial Sequence
  Description of Artificial Sequence: Synthetic oligonucleotide
  Sense strand starting at position 3601 of SEQ ID NO: 1242330
gggugaacucuguaaccau

SEQ ID NO: 1339219 - RNA, 19 nt, Artificial Sequence
  Description of Artificial Sequence: Synthetic oligonucleotide
  Antisense strand to SEQ ID NO: 1339218
augguuacagaguucaccc

SEQ ID NO: 1339220 - RNA, 19 nt, Artificial Sequence
  Description of Artificial Sequence: Synthetic oligonucleotide
  Sense strand starting at position 3616 of SEQ ID NO: 1242330
ccaucugacuguccauagu

SEQ ID NO: 1339221 - RNA, 19 nt, Artificial Sequence
  Description of Artificial Sequence: Synthetic oligonucleotide
  Antisense strand to SEQ ID NO: 1339220
acuauggacagucagaugg

SEQ ID NO: 1339222 - RNA, 19 nt, Artificial Sequence
  Description of Artificial Sequence: Synthetic oligonucleotide
  Sense strand starting at position 3622 of SEQ ID NO: 1242330
gacuguccauaguuagaag

SEQ ID NO: 1339223 - RNA, 19 nt, Artificial Sequence
  Description of Artificial Sequence: Synthetic oligonucleotide
  Antisense strand to SEQ ID NO: 1339222
cuucuaacuauggacaguc

SEQ ID NO: 1339224 - RNA, 19 nt, Artificial Sequence
  Description of Artificial Sequence: Synthetic oligonucleotide
  Sense strand starting at position 3633 of SEQ ID NO: 1242330
guuagaagggacugucuuu

SEQ ID NO: 1339225 - RNA, 19 nt, Artificial Sequence
  Description of Artificial Sequence: Synthetic oligonucleotide
  Antisense strand to SEQ ID NO: 1339224
aaagacagucccuucuaac

SEQ ID NO: 1339226 - RNA, 19 nt, Artificial Sequence
  Description of Artificial Sequence: Synthetic oligonucleotide
  Sense strand starting at position 3696 of SEQ ID NO: 1242330
gagugaccacgucaaggaa

SEQ ID NO: 1339227 - RNA, 19 nt, Artificial Sequence
  Description of Artificial Sequence: Synthetic oligonucleotide
  Antisense strand to SEQ ID NO: 1339226
uuccuugacguggucacuc

SEQ ID NO: 1339228 - RNA, 19 nt, Artificial Sequence
  Description of Artificial Sequence: Synthetic oligonucleotide
  Sense strand starting at position 3704 of SEQ ID NO: 1242330
acgucaaggaaguguuaga

SEQ ID NO: 1339229 - RNA, 19 nt, Artificial Sequence
  Description of Artificial Sequence: Synthetic oligonucleotide
  Antisense strand to SEQ ID NO: 1339228
ucuaacacuuccuugacgu

SEQ ID NO: 1339230 - RNA, 19 nt, Artificial Sequence
  Description of Artificial Sequence: Synthetic oligonucleotide
  Sense strand starting at position 3709 of SEQ ID NO: 1242330
aaggaaguguuagagaaga

SEQ ID NO: 1339231 - RNA, 19 nt, Artificial Sequence
  Description of Artificial Sequence: Synthetic oligonucleotide
  Antisense strand to SEQ ID NO: 1339230
ucuucucuaacacuuccuu

SEQ ID NO: 1339232 - RNA, 19 nt, Artificial Sequence
  Description of Artificial Sequence: Synthetic oligonucleotide
  Sense strand starting at position 3751 of SEQ ID NO: 1242330
gcaguaagaugacccuuaa

SEQ ID NO: 1339233 - RNA, 19 nt, Artificial Sequence
  Description of Artificial Sequence: Synthetic oligonucleotide
  Antisense strand to SEQ ID NO: 1339232
uuaagggucaucuuacugc

SEQ ID NO: 1339234 - RNA, 19 nt, Artificial Sequence
  Description of Artificial Sequence: Synthetic oligonucleotide
  Sense strand starting at position 3950 of SEQ ID NO: 1242330
acugucagacccuggaaua

SEQ ID NO: 1339235 - RNA, 19 nt, Artificial Sequence
  Description of Artificial Sequence: Synthetic oligonucleotide
  Antisense strand to SEQ ID NO: 1339234
uauuccagggucugacagu

SEQ ID NO: 1339236 - RNA, 19 nt, Artificial Sequence
  Description of Artificial Sequence: Synthetic oligonucleotide
  Sense strand starting at position 3951 of SEQ ID NO: 1242330
cugucagacccuggaauaa

SEQ ID NO: 1339237 - RNA, 19 nt, Artificial Sequence
  Description of Artificial Sequence: Synthetic oligonucleotide
  Antisense strand to SEQ ID NO: 1339236
uuauuccagggucugacag

SEQ ID NO: 1339238 - RNA, 19 nt, Artificial Sequence
  Description of Artificial Sequence: Synthetic oligonucleotide
  Sense strand starting at position 150 of SEQ ID NO: 1242331
ucagcuuuauaggagacau

SEQ ID NO: 1339239 - RNA, 19 nt, Artificial Sequence
  Description of Artificial Sequence: Synthetic oligonucleotide
  Antisense strand to SEQ ID NO: 1339238
augucuccuauaaagcuga

SEQ ID NO: 1339240 - RNA, 19 nt, Artificial Sequence
  Description of Artificial Sequence: Synthetic oligonucleotide
  Sense strand starting at position 244 of SEQ ID NO: 1242331
ccaacugucaagggagauu

SEQ ID NO: 1339241 - RNA, 19 nt, Artificial Sequence
  Description of Artificial Sequence: Synthetic oligonucleotide
  Antisense strand to SEQ ID NO: 1339240
aaucucccuugacaguugg

SEQ ID NO: 1339242 - RNA, 19 nt, Artificial Sequence
  Description of Artificial Sequence: Synthetic oligonucleotide
  Sense strand starting at position 371 of SEQ ID NO: 1242331
cacuuaagucauuagugga

SEQ ID NO: 1339243 - RNA, 19 nt, Artificial Sequence
  Description of Artificial Sequence: Synthetic oligonucleotide
  Antisense strand to SEQ ID NO: 1339242
uccacuaaugacuuaagug

SEQ ID NO: 1339244 - RNA, 19 nt, Artificial Sequence
  Description of Artificial Sequence: Synthetic oligonucleotide
  Sense strand starting at position 378 of SEQ ID NO: 1242331
gucauuaguggacagaugu

SEQ ID NO: 1339245 - RNA, 19 nt, Artificial Sequence
  Description of Artificial Sequence: Synthetic oligonucleotide
  Antisense strand to SEQ ID NO: 1339244
acaucuguccacuaaugac

SEQ ID NO: 1339246 - RNA, 19 nt, Artificial Sequence
  Description of Artificial Sequence: Synthetic oligonucleotide
  Sense strand starting at position 391 of SEQ ID NO: 1242331
agaugucacaguuguauau

SEQ ID NO: 1339247 - RNA, 19 nt, Artificial Sequence
  Description of Artificial Sequence: Synthetic oligonucleotide
  Antisense strand to SEQ ID NO: 1339246
auauacaacugugacaucu

SEQ ID NO: 1339248 - RNA, 19 nt, Artificial Sequence
  Description of Artificial Sequence: Synthetic oligonucleotide
  Sense strand starting at position 395 of SEQ ID NO: 1242331
gucacaguuguauauucuu

SEQ ID NO: 1339249 - RNA, 19 nt, Artificial Sequence
  Description of Artificial Sequence: Synthetic oligonucleotide
  Antisense strand to SEQ ID NO: 1339248
aagaauauacaacugugac

SEQ ID NO: 1339250 - RNA, 19 nt, Artificial Sequence
  Description of Artificial Sequence: Synthetic oligonucleotide
  Sense strand starting at position 445 of SEQ ID NO: 1242331
aaaccuagauugucaucga

SEQ ID NO: 1339251 - RNA, 19 nt, Artificial Sequence
  Description of Artificial Sequence: Synthetic oligonucleotide
  Antisense strand to SEQ ID NO: 1339250
ucgaugacaaucuagguuu

SEQ ID NO: 1339252 - RNA, 19 nt, Artificial Sequence
  Description of Artificial Sequence: Synthetic oligonucleotide
  Sense strand starting at position 448 of SEQ ID NO: 1242331
ccuagauugucaucgacug

SEQ ID NO: 1339253 - RNA, 19 nt, Artificial Sequence
  Description of Artificial Sequence: Synthetic oligonucleotide
  Antisense strand to SEQ ID NO: 1339252
cagucgaugacaaucuagg

SEQ ID NO: 1339254 - RNA, 19 nt, Artificial Sequence
  Description of Artificial Sequence: Synthetic oligonucleotide
  Sense strand starting at position 472 of SEQ ID NO: 1242331
ggcugaaggucucugaaua

SEQ ID NO: 1339255 - RNA, 19 nt, Artificial Sequence
  Description of Artificial Sequence: Synthetic oligonucleotide
  Antisense strand to SEQ ID NO: 1339254
uauucagagaccuucagcc

SEQ ID NO: 1339256 - RNA, 19 nt, Artificial Sequence
  Description of Artificial Sequence: Synthetic oligonucleotide
  Sense strand starting at position 473 of SEQ ID NO: 1242331
gcugaaggucucugaauag

SEQ ID NO: 1339257 - RNA, 19 nt, Artificial Sequence
  Description of Artificial Sequence: Synthetic oligonucleotide
  Antisense strand to SEQ ID NO: 1339256
cuauucagagaccuucagc

SEQ ID NO: 1339258 - RNA, 19 nt, Artificial Sequence
  Description of Artificial Sequence: Synthetic oligonucleotide
  Sense strand starting at position 657 of SEQ ID NO: 1242331
cuugguuuccugggcgaga

SEQ ID NO: 1339259 - RNA, 19 nt, Artificial Sequence
  Description of Artificial Sequence: Synthetic oligonucleotide
  Antisense strand to SEQ ID NO: 1339258
ucucgcccaggaaaccaag

SEQ ID NO: 1339260 - RNA, 19 nt, Artificial Sequence
  Description of Artificial Sequence: Synthetic oligonucleotide
  Sense strand starting at position 658 of SEQ ID NO: 1242331
uugguuuccugggcgagaa

SEQ ID NO: 1339261 - RNA, 19 nt, Artificial Sequence
  Description of Artificial Sequence: Synthetic oligonucleotide
  Antisense strand to SEQ ID NO: 1339260
uucucgcccaggaaaccaa

SEQ ID NO: 1339262 - RNA, 19 nt, Artificial Sequence
  Description of Artificial Sequence: Synthetic oligonucleotide
  Sense strand starting at position 805 of SEQ ID NO: 1242331
cacugauaucuuugaggcu

SEQ ID NO: 1339263 - RNA, 19 nt, Artificial Sequence
  Description of Artificial Sequence: Synthetic oligonucleotide
  Antisense strand to SEQ ID NO: 1339262
agccucaaagauaucagug

SEQ ID NO: 1339264 - RNA, 19 nt, Artificial Sequence
  Description of Artificial Sequence: Synthetic oligonucleotide
  Sense strand starting at position 806 of SEQ ID NO: 1242331
acugauaucuuugaggcuu

SEQ ID NO: 1339265 - RNA, 19 nt, Artificial Sequence
  Description of Artificial Sequence: Synthetic oligonucleotide
  Antisense strand to SEQ ID NO: 1339264
aagccucaaagauaucagu

SEQ ID NO: 1339266 - RNA, 19 nt, Artificial Sequence
  Description of Artificial Sequence: Synthetic oligonucleotide
  Sense strand starting at position 931 of SEQ ID NO: 1242331
gccgguggacgagaugauu

SEQ ID NO: 1339267 - RNA, 19 nt, Artificial Sequence
  Description of Artificial Sequence: Synthetic oligonucleotide
  Antisense strand to SEQ ID NO: 1339266
aaucaucucguccaccggc

SEQ ID NO: 1339268 - RNA, 19 nt, Artificial Sequence
  Description of Artificial Sequence: Synthetic oligonucleotide
  Sense strand starting at position 1031 of SEQ ID NO: 1242331
ggacgaacugagugucuuu

SEQ ID NO: 1339269 - RNA, 19 nt, Artificial Sequence
  Description of Artificial Sequence: Synthetic oligonucleotide
  Antisense strand to SEQ ID NO: 1339268
aaagacacucaguucgucc

SEQ ID NO: 1339270 - RNA, 19 nt, Artificial Sequence
  Description of Artificial Sequence: Synthetic oligonucleotide
  Sense strand starting at position 1034 of SEQ ID NO: 1242331
cgaacugagugucuuuagu

SEQ ID NO: 1339271 - RNA, 19 nt, Artificial Sequence
  Description of Artificial Sequence: Synthetic oligonucleotide
  Antisense strand to SEQ ID NO: 1339270
acuaaagacacucaguucg

SEQ ID NO: 1339272 - RNA, 19 nt, Artificial Sequence
  Description of Artificial Sequence: Synthetic oligonucleotide
  Sense strand starting at position 1036 of SEQ ID NO: 1242331
aacugagugucuuuaguca

SEQ ID NO: 1339273 - RNA, 19 nt, Artificial Sequence
  Description of Artificial Sequence: Synthetic oligonucleotide
  Antisense strand to SEQ ID NO: 1339272
ugacuaaagacacucaguu

SEQ ID NO: 1339274 - RNA, 19 nt, Artificial Sequence
  Description of Artificial Sequence: Synthetic oligonucleotide
  Sense strand starting at position 1040 of SEQ ID NO: 1242331
gagugucuuuagucaucuu

SEQ ID NO: 1339275 - RNA, 19 nt, Artificial Sequence
  Description of Artificial Sequence: Synthetic oligonucleotide
  Antisense strand to SEQ ID NO: 1339274
aagaugacuaaagacacuc

SEQ ID NO: 1339276 - RNA, 19 nt, Artificial Sequence
  Description of Artificial Sequence: Synthetic oligonucleotide
  Sense strand starting at position 1065 of SEQ ID NO: 1242331
uaauuaaauugugggcuca

SEQ ID NO: 1339277 - RNA, 19 nt, Artificial Sequence
  Description of Artificial Sequence: Synthetic oligonucleotide
  Antisense strand to SEQ ID NO: 1339276
ugagcccacaauuuaauua

SEQ ID NO: 1339278 - RNA, 19 nt, Artificial Sequence
  Description of Artificial Sequence: Synthetic oligonucleotide
  Sense strand starting at position 1076 of SEQ ID NO: 1242331
ugggcucaccucugccaaa

SEQ ID NO: 1339279 - RNA, 19 nt, Artificial Sequence
  Description of Artificial Sequence: Synthetic oligonucleotide
  Antisense strand to SEQ ID NO: 1339278
uuuggcagaggugagccca

SEQ ID NO: 1339280 - RNA, 19 nt, Artificial Sequence
  Description of Artificial Sequence: Synthetic oligonucleotide
  Sense strand starting at position 2497 of SEQ ID NO: 1242331
uguaucuugaucuaggguu

SEQ ID NO: 1339281 - RNA, 19 nt, Artificial Sequence
  Description of Artificial Sequence: Synthetic oligonucleotide
  Antisense strand to SEQ ID NO: 1339280
aacccuagaucaagauaca

SEQ ID NO: 1339282 - RNA, 19 nt, Artificial Sequence
  Description of Artificial Sequence: Synthetic oligonucleotide
  Sense strand starting at position 2659 of SEQ ID NO: 1242331
gagugaccuugaggaaauc

SEQ ID NO: 1339283 - RNA, 19 nt, Artificial Sequence
  Description of Artificial Sequence: Synthetic oligonucleotide
  Antisense strand to SEQ ID NO: 1339282
gauuuccucaaggucacuc

SEQ ID NO: 1339284 - RNA, 19 nt, Artificial Sequence
  Description of Artificial Sequence: Synthetic oligonucleotide
  Sense strand starting at position 2929 of SEQ ID NO: 1242331
cuccuauucugagcccgaa

SEQ ID NO: 1339285 - RNA, 19 nt, Artificial Sequence
  Description of Artificial Sequence: Synthetic oligonucleotide
  Antisense strand to SEQ ID NO: 1339284
uucgggcucagaauaggag

SEQ ID NO: 1339286 - RNA, 19 nt, Artificial Sequence
  Description of Artificial Sequence: Synthetic oligonucleotide
  Sense strand starting at position 3221 of SEQ ID NO: 1242331
ugcggugacccgagaucuu

SEQ ID NO: 1339287 - RNA, 19 nt, Artificial Sequence
  Description of Artificial Sequence: Synthetic oligonucleotide
  Antisense strand to SEQ ID NO: 1339286
aagaucucgggucaccgca

SEQ ID NO: 1339288 - RNA, 19 nt, Artificial Sequence
  Description of Artificial Sequence: Synthetic oligonucleotide
  Sense strand starting at position 3381 of SEQ ID NO: 1242331
ugucgaccuccugaauuag

SEQ ID NO: 1339289 - RNA, 19 nt, Artificial Sequence
  Description of Artificial Sequence: Synthetic oligonucleotide
  Antisense strand to SEQ ID NO: 1339288
cuaauucaggaggucgaca

SEQ ID NO: 1339290 - RNA, 19 nt, Artificial Sequence
  Description of Artificial Sequence: Synthetic oligonucleotide
  Sense strand starting at position 3430 of SEQ ID NO: 1242331
guggcuuagucuucccagu

SEQ ID NO: 1339291 - RNA, 19 nt, Artificial Sequence
  Description of Artificial Sequence: Synthetic oligonucleotide
  Antisense strand to SEQ ID NO: 1339290
acugggaagacuaagccac

SEQ ID NO: 1339292 - RNA, 19 nt, Artificial Sequence
  Description of Artificial Sequence: Synthetic oligonucleotide
  Sense strand starting at position 3432 of SEQ ID NO: 1242331
ggcuuagucuucccaguaa

SEQ ID NO: 1339293 - RNA, 19 nt, Artificial Sequence
  Description of Artificial Sequence: Synthetic oligonucleotide
  Antisense strand to SEQ ID NO: 1339292
uuacugggaagacuaagcc

SEQ ID NO: 1339294 - RNA, 19 nt, Artificial Sequence
  Description of Artificial Sequence: Synthetic oligonucleotide
  Sense strand starting at position 3504 of SEQ ID NO: 1242331
ugggcaaugucuuuccaau

SEQ ID NO: 1339295 - RNA, 19 nt, Artificial Sequence
  Description of Artificial Sequence: Synthetic oligonucleotide
  Antisense strand to SEQ ID NO: 1339294
auuggaaagacauugccca

SEQ ID NO: 1339296 - RNA, 19 nt, Artificial Sequence
  Description of Artificial Sequence: Synthetic oligonucleotide
  Sense strand starting at position 3506 of SEQ ID NO: 1242331
ggcaaugucuuuccaauga

SEQ ID NO: 1339297 - RNA, 19 nt, Artificial Sequence
  Description of Artificial Sequence: Synthetic oligonucleotide
  Antisense strand to SEQ ID NO: 1339296
ucauuggaaagacauugcc

SEQ ID NO: 1339298 - RNA, 19 nt, Artificial Sequence
  Description of Artificial Sequence: Synthetic oligonucleotide
  Sense strand starting at position 3841 of SEQ ID NO: 1242331
cuaucagguuugucucuaa

SEQ ID NO: 1339299 - RNA, 19 nt, Artificial Sequence
  Description of Artificial Sequence: Synthetic oligonucleotide
  Antisense strand to SEQ ID NO: 1339298
uuagagacaaaccugauag

SEQ ID NO: 1339300 - RNA, 19 nt, Artificial Sequence
  Description of Artificial Sequence: Synthetic oligonucleotide
  Sense strand starting at position 3844 of SEQ ID NO: 1242331
ucagguuugucucuaacuu

SEQ ID NO: 1339301 - RNA, 19 nt, Artificial Sequence
  Description of Artificial Sequence: Synthetic oligonucleotide
  Antisense strand to SEQ ID NO: 1339300
aaguuagagacaaaccuga

SEQ ID NO: 1339302 - RNA, 19 nt, Artificial Sequence
  Description of Artificial Sequence: Synthetic oligonucleotide
  Sense strand starting at position 3856 of SEQ ID NO: 1242331
cuaacuuuggcccaggaau

SEQ ID NO: 1339303 - RNA, 19 nt, Artificial Sequence
  Description of Artificial Sequence: Synthetic oligonucleotide
  Antisense strand to SEQ ID NO: 1339302
auuccugggccaaaguuag

SEQ ID NO: 1339304 - RNA, 19 nt, Artificial Sequence
  Description of Artificial Sequence: Synthetic oligonucleotide
  Sense strand starting at position 3969 of SEQ ID NO: 1242331
gaaggagccuggccagauu

SEQ ID NO: 1339305 - RNA, 19 nt, Artificial Sequence
  Description of Artificial Sequence: Synthetic oligonucleotide
  Antisense strand to SEQ ID NO: 1339304
aaucuggccaggcuccuuc

SEQ ID NO: 1339306 - RNA, 19 nt, Artificial Sequence
  Description of Artificial Sequence: Synthetic oligonucleotide
  Sense strand starting at position 3978 of SEQ ID NO: 1242331
uggccagauuucugaacuc

SEQ ID NO: 1339307 - RNA, 19 nt, Artificial Sequence
  Description of Artificial Sequence: Synthetic oligonucleotide
  Antisense strand to SEQ ID NO: 1339306
gaguucagaaaucuggcca

SEQ ID NO: 1339308 - RNA, 19 nt, Artificial Sequence
  Description of Artificial Sequence: Synthetic oligonucleotide
  Sense strand starting at position 253 of SEQ ID NO: 1242332
ggagcugccuuaucuguaa

SEQ ID NO: 1339309 - RNA, 19 nt, Artificial Sequence
  Description of Artificial Sequence: Synthetic oligonucleotide
  Antisense strand to SEQ ID NO: 1339308
uuacagauaaggcagcucc

SEQ ID NO: 1339310 - RNA, 19 nt, Artificial Sequence
  Description of Artificial Sequence: Synthetic oligonucleotide
  Sense strand starting at position 274 of SEQ ID NO: 1242332
uggagaaacuaucauucuc

SEQ ID NO: 1339311 - RNA, 19 nt, Artificial Sequence
  Description of Artificial Sequence: Synthetic oligonucleotide
  Antisense strand to SEQ ID NO: 1339310
gagaaugauaguuucucca

SEQ ID NO: 1339312 - RNA, 19 nt, Artificial Sequence
  Description of Artificial Sequence: Synthetic oligonucleotide
  Sense strand starting at position 344 of SEQ ID NO: 1242332
ugacuaaugcccuaccgga

SEQ ID NO: 1339313 - RNA, 19 nt, Artificial Sequence
  Description of Artificial Sequence: Synthetic oligonucleotide
  Antisense strand to SEQ ID NO: 1339312
uccgguagggcauuaguca

SEQ ID NO: 1339314 - RNA, 19 nt, Artificial Sequence
  Description of Artificial Sequence: Synthetic oligonucleotide
  Sense strand starting at position 449 of SEQ ID NO: 1242332
uggccuguccuuuaggcau

SEQ ID NO: 1339315 - RNA, 19 nt, Artificial Sequence
  Description of Artificial Sequence: Synthetic oligonucleotide
  Antisense strand to SEQ ID NO: 1339314
augccuaaaggacaggcca

SEQ ID NO: 1339316 - RNA, 19 nt, Artificial Sequence
  Description of Artificial Sequence: Synthetic oligonucleotide
  Sense strand starting at position 456 of SEQ ID NO: 1242332
uccuuuaggcauuggacua

SEQ ID NO: 1339317 - RNA, 19 nt, Artificial Sequence
  Description of Artificial Sequence: Synthetic oligonucleotide
  Antisense strand to SEQ ID NO: 1339316
uaguccaaugccuaaagga

SEQ ID NO: 1339318 - RNA, 19 nt, Artificial Sequence
  Description of Artificial Sequence: Synthetic oligonucleotide
  Sense strand starting at position 527 of SEQ ID NO: 1242332
ggcacuuuaucccauguaa

SEQ ID NO: 1339319 - RNA, 19 nt, Artificial Sequence
  Description of Artificial Sequence: Synthetic oligonucleotide
  Antisense strand to SEQ ID NO: 1339318
uuacaugggauaaagugcc

SEQ ID NO: 1339320 - RNA, 19 nt, Artificial Sequence
  Description of Artificial Sequence: Synthetic oligonucleotide
  Sense strand starting at position 539 of SEQ ID NO: 1242332
cauguaaucuugggaacca

SEQ ID NO: 1339321 - RNA, 19 nt, Artificial Sequence
  Description of Artificial Sequence: Synthetic oligonucleotide
  Antisense strand to SEQ ID NO: 1339320
ugguucccaagauuacaug

SEQ ID NO: 1339322 - RNA, 19 nt, Artificial Sequence
  Description of Artificial Sequence: Synthetic oligonucleotide
  Sense strand starting at position 540 of SEQ ID NO: 1242332
auguaaucuugggaaccaa

SEQ ID NO: 1339323 - RNA, 19 nt, Artificial Sequence
  Description of Artificial Sequence: Synthetic oligonucleotide
  Antisense strand to SEQ ID NO: 1339322
uugguucccaagauuacau

SEQ ID NO: 1339324 - RNA, 19 nt, Artificial Sequence
  Description of Artificial Sequence: Synthetic oligonucleotide
  Sense strand starting at position 573 of SEQ ID NO: 1242332
agaggagauucugagacaa

SEQ ID NO: 1339325 - RNA, 19 nt, Artificial Sequence
  Description of Artificial Sequence: Synthetic oligonucleotide
  Antisense strand to SEQ ID NO: 1339324
uugucucagaaucuccucu

SEQ ID NO: 1339326 - RNA, 19 nt, Artificial Sequence
  Description of Artificial Sequence: Synthetic oligonucleotide
  Sense strand starting at position 575 of SEQ ID NO: 1242332
aggagauucugagacaaag

SEQ ID NO: 1339327 - RNA, 19 nt, Artificial Sequence
  Description of Artificial Sequence: Synthetic oligonucleotide
  Antisense strand to SEQ ID NO: 1339326
cuuugucucagaaucuccu

SEQ ID NO: 1339328 - RNA, 19 nt, Artificial Sequence
  Description of Artificial Sequence: Synthetic oligonucleotide
  Sense strand starting at position 856 of SEQ ID NO: 1242332
aggguuuggugcgaguaca

SEQ ID NO: 1339329 - RNA, 19 nt, Artificial Sequence
  Description of Artificial Sequence: Synthetic oligonucleotide
  Antisense strand to SEQ ID NO: 1339328
uguacucgcaccaaacccu

SEQ ID NO: 1339330 - RNA, 19 nt, Artificial Sequence
  Description of Artificial Sequence: Synthetic oligonucleotide
  Sense strand starting at position 857 of SEQ ID NO: 1242332
ggguuuggugcgaguacau

SEQ ID NO: 1339331 - RNA, 19 nt, Artificial Sequence
  Description of Artificial Sequence: Synthetic oligonucleotide
  Antisense strand to SEQ ID NO: 1339330
auguacucgcaccaaaccc

SEQ ID NO: 1339332 - RNA, 19 nt, Artificial Sequence
  Description of Artificial Sequence: Synthetic oligonucleotide
  Sense strand starting at position 866 of SEQ ID NO: 1242332
gcgaguacaugccaugaua

SEQ ID NO: 1339333 - RNA, 19 nt, Artificial Sequence
  Description of Artificial Sequence: Synthetic oligonucleotide
  Antisense strand to SEQ ID NO: 1339332
uaucauggcauguacucgc

SEQ ID NO: 1339334 - RNA, 19 nt, Artificial Sequence
  Description of Artificial Sequence: Synthetic oligonucleotide
  Sense strand starting at position 868 of SEQ ID NO: 1242332
gaguacaugccaugauaaa

SEQ ID NO: 1339335 - RNA, 19 nt, Artificial Sequence
  Description of Artificial Sequence: Synthetic oligonucleotide
  Antisense strand to SEQ ID NO: 1339334
uuuaucauggcauguacuc

SEQ ID NO: 1339336 - RNA, 19 nt, Artificial Sequence
  Description of Artificial Sequence: Synthetic oligonucleotide
  Sense strand starting at position 869 of SEQ ID NO: 1242332
aguacaugccaugauaaac

SEQ ID NO: 1339337 - RNA, 19 nt, Artificial Sequence
  Description of Artificial Sequence: Synthetic oligonucleotide
  Antisense strand to SEQ ID NO: 1339336
guuuaucauggcauguacu

SEQ ID NO: 1339338 - RNA, 19 nt, Artificial Sequence
  Description of Artificial Sequence: Synthetic oligonucleotide
  Sense strand starting at position 890 of SEQ ID NO: 1242332
acaguauuagcuuacugaa

SEQ ID NO: 1339339 - RNA, 19 nt, Artificial Sequence
  Description of Artificial Sequence: Synthetic oligonucleotide
  Antisense strand to SEQ ID NO: 1339338
uucaguaagcuaauacugu

SEQ ID NO: 1339340 - RNA, 19 nt, Artificial Sequence
  Description of Artificial Sequence: Synthetic oligonucleotide
  Sense strand starting at position 892 of SEQ ID NO: 1242332
aguauuagcuuacugaauc

SEQ ID NO: 1339341 - RNA, 19 nt, Artificial Sequence
  Description of Artificial Sequence: Synthetic oligonucleotide
  Antisense strand to SEQ ID NO: 1339340
gauucaguaagcuaauacu

SEQ ID NO: 1339342 - RNA, 19 nt, Artificial Sequence
  Description of Artificial Sequence: Synthetic oligonucleotide
  Sense strand starting at position 912 of SEQ ID NO: 1242332
aguauuuaguguugacaaa

SEQ ID NO: 1339343 - RNA, 19 nt, Artificial Sequence
  Description of Artificial Sequence: Synthetic oligonucleotide
  Antisense strand to SEQ ID NO: 1339342
uuugucaacacuaaauacu

SEQ ID NO: 1339344 - RNA, 19 nt, Artificial Sequence
  Description of Artificial Sequence: Synthetic oligonucleotide
  Sense strand starting at position 959 of SEQ ID NO: 1242332
uugagaaacuuauacagac

SEQ ID NO: 1339345 - RNA, 19 nt, Artificial Sequence
  Description of Artificial Sequence: Synthetic oligonucleotide
  Antisense strand to SEQ ID NO: 1339344
gucuguauaaguuucucaa

SEQ ID NO: 1339346 - RNA, 19 nt, Artificial Sequence
  Description of Artificial Sequence: Synthetic oligonucleotide
  Sense strand starting at position 1096 of SEQ ID NO: 1242332
gacaaacagucuggugguu

SEQ ID NO: 1339347 - RNA, 19 nt, Artificial Sequence
  Description of Artificial Sequence: Synthetic oligonucleotide
  Antisense strand to SEQ ID NO: 1339346
aaccaccagacuguuuguc

SEQ ID NO: 1339348 - RNA, 19 nt, Artificial Sequence
  Description of Artificial Sequence: Synthetic oligonucleotide
  Sense strand starting at position 1305 of SEQ ID NO: 1242332
agcagaauugcaugggcau

SEQ ID NO: 1339349 - RNA, 19 nt, Artificial Sequence
  Description of Artificial Sequence: Synthetic oligonucleotide
  Antisense strand to SEQ ID NO: 1339348
augcccaugcaauucugcu

SEQ ID NO: 1339350 - RNA, 19 nt, Artificial Sequence
  Description of Artificial Sequence: Synthetic oligonucleotide
  Sense strand starting at position 1306 of SEQ ID NO: 1242332
gcagaauugcaugggcauu

SEQ ID NO: 1339351 - RNA, 19 nt, Artificial Sequence
  Description of Artificial Sequence: Synthetic oligonucleotide
  Antisense strand to SEQ ID NO: 1339350
aaugcccaugcaauucugc

SEQ ID NO: 1339352 - RNA, 19 nt, Artificial Sequence
  Description of Artificial Sequence: Synthetic oligonucleotide
  Sense strand starting at position 1415 of SEQ ID NO: 1242332
ggccucugaccuugaucuu

SEQ ID NO: 1339353 - RNA, 19 nt, Artificial Sequence
  Description of Artificial Sequence: Synthetic oligonucleotide
  Antisense strand to SEQ ID NO: 1339352
aagaucaaggucagaggcc

SEQ ID NO: 1339354 - RNA, 19 nt, Artificial Sequence
  Description of Artificial Sequence: Synthetic oligonucleotide
  Sense strand starting at position 1880 of SEQ ID NO: 1242332
aagguuuggcgaggaguga

SEQ ID NO: 1339355 - RNA, 19 nt, Artificial Sequence
  Description of Artificial Sequence: Synthetic oligonucleotide
  Antisense strand to SEQ ID NO: 1339354
ucacuccucgccaaaccuu

SEQ ID NO: 1339356 - RNA, 19 nt, Artificial Sequence
  Description of Artificial Sequence: Synthetic oligonucleotide
  Sense strand starting at position 2225 of SEQ ID NO: 1242332
gggagucucuacccuaaac

SEQ ID NO: 1339357 - RNA, 19 nt, Artificial Sequence
  Description of Artificial Sequence: Synthetic oligonucleotide
  Antisense strand to SEQ ID NO: 1339356
guuuaggguagagacuccc

SEQ ID NO: 1339358 - RNA, 19 nt, Artificial Sequence
  Description of Artificial Sequence: Synthetic oligonucleotide
  Sense strand starting at position 2227 of SEQ ID NO: 1242332
gagucucuacccuaaacga

SEQ ID NO: 1339359 - RNA, 19 nt, Artificial Sequence
  Description of Artificial Sequence: Synthetic oligonucleotide
  Antisense strand to SEQ ID NO: 1339358
ucguuuaggguagagacuc

SEQ ID NO: 1339360 - RNA, 19 nt, Artificial Sequence
  Description of Artificial Sequence: Synthetic oligonucleotide
  Sense strand starting at position 2243 of SEQ ID NO: 1242332
cgacuuauuucuugggaua

SEQ ID NO: 1339361 - RNA, 19 nt, Artificial Sequence
  Description of Artificial Sequence: Synthetic oligonucleotide
  Antisense strand to SEQ ID NO: 1339360
uaucccaagaaauaagucg

SEQ ID NO: 1339362 - RNA, 19 nt, Artificial Sequence
  Description of Artificial Sequence: Synthetic oligonucleotide
  Sense strand starting at position 2245 of SEQ ID NO: 1242332
acuuauuucuugggauagu

SEQ ID NO: 1339363 - RNA, 19 nt, Artificial Sequence
  Description of Artificial Sequence: Synthetic oligonucleotide
  Antisense strand to SEQ ID NO: 1339362
acuaucccaagaaauaagu

SEQ ID NO: 1339364 - RNA, 19 nt, Artificial Sequence
  Description of Artificial Sequence: Synthetic oligonucleotide
  Sense strand starting at position 2246 of SEQ ID NO: 1242332
cuuauuucuugggauaguu

SEQ ID NO: 1339365 - RNA, 19 nt, Artificial Sequence
  Description of Artificial Sequence: Synthetic oligonucleotide
  Antisense strand to SEQ ID NO: 1339364
aacuaucccaagaaauaag

SEQ ID NO: 1339366 - RNA, 19 nt, Artificial Sequence
  Description of Artificial Sequence: Synthetic oligonucleotide
  Sense strand starting at position 2543 of SEQ ID NO: 1242332
gugaguuucuuauugauua

SEQ ID NO: 1339367 - RNA, 19 nt, Artificial Sequence
  Description of Artificial Sequence: Synthetic oligonucleotide
  Antisense strand to SEQ ID NO: 1339366
uaaucaauaagaaacucac

SEQ ID NO: 1339368 - RNA, 19 nt, Artificial Sequence
  Description of Artificial Sequence: Synthetic oligonucleotide
  Sense strand starting at position 2544 of SEQ ID NO: 1242332
ugaguuucuuauugauuag

SEQ ID NO: 1339369 - RNA, 19 nt, Artificial Sequence
  Description of Artificial Sequence: Synthetic oligonucleotide
  Antisense strand to SEQ ID NO: 1339368
cuaaucaauaagaaacuca

SEQ ID NO: 1339370 - RNA, 19 nt, Artificial Sequence
  Description of Artificial Sequence: Synthetic oligonucleotide
  Sense strand starting at position 2547 of SEQ ID NO: 1242332
guuucuuauugauuagcuu

SEQ ID NO: 1339371 - RNA, 19 nt, Artificial Sequence
  Description of Artificial Sequence: Synthetic oligonucleotide
  Antisense strand to SEQ ID NO: 1339370
aagcuaaucaauaagaaac

SEQ ID NO: 1339372 - RNA, 19 nt, Artificial Sequence
  Description of Artificial Sequence: Synthetic oligonucleotide
  Sense strand starting at position 2556 of SEQ ID NO: 1242332
ugauuagcuuccuaggcuu

SEQ ID NO: 1339373 - RNA, 19 nt, Artificial Sequence
  Description of Artificial Sequence: Synthetic oligonucleotide
  Antisense strand to SEQ ID NO: 1339372
aagccuaggaagcuaauca

SEQ ID NO: 1339374 - RNA, 19 nt, Artificial Sequence
  Description of Artificial Sequence: Synthetic oligonucleotide
  Sense strand starting at position 2580 of SEQ ID NO: 1242332
uugucccuccaguaggauu

SEQ ID NO: 1339375 - RNA, 19 nt, Artificial Sequence
  Description of Artificial Sequence: Synthetic oligonucleotide
  Antisense strand to SEQ ID NO: 1339374
aauccuacuggagggacaa

SEQ ID NO: 1339376 - RNA, 19 nt, Artificial Sequence
  Description of Artificial Sequence: Synthetic oligonucleotide
  Sense strand starting at position 2637 of SEQ ID NO: 1242332
ggauuccuuccauggaggu

SEQ ID NO: 1339377 - RNA, 19 nt, Artificial Sequence
  Description of Artificial Sequence: Synthetic oligonucleotide
  Antisense strand to SEQ ID NO: 1339376
accuccauggaaggaaucc

SEQ ID NO: 1339378 - RNA, 19 nt, Artificial Sequence
  Description of Artificial Sequence: Synthetic oligonucleotide
  Sense strand starting at position 2782 of SEQ ID NO: 1242332
aguggaguucuacacacuu

SEQ ID NO: 1339379 - RNA, 19 nt, Artificial Sequence
  Description of Artificial Sequence: Synthetic oligonucleotide
  Antisense strand to SEQ ID NO: 1339378
aaguguguagaacuccacu

SEQ ID NO: 1339380 - RNA, 19 nt, Artificial Sequence
  Description of Artificial Sequence: Synthetic oligonucleotide
  Sense strand starting at position 3406 of SEQ ID NO: 1242332
gccaguguguggucuguga

SEQ ID NO: 1339381 - RNA, 19 nt, Artificial Sequence
  Description of Artificial Sequence: Synthetic oligonucleotide
  Antisense strand to SEQ ID NO: 1339380
ucacagaccacacacuggc

SEQ ID NO: 1339382 - RNA, 19 nt, Artificial Sequence
  Description of Artificial Sequence: Synthetic oligonucleotide
  Sense strand starting at position 3748 of SEQ ID NO: 1242332
caagucaguuggguguaaa

SEQ ID NO: 1339383 - RNA, 19 nt, Artificial Sequence
  Description of Artificial Sequence: Synthetic oligonucleotide
  Antisense strand to SEQ ID NO: 1339382
uuuacacccaacugacuug

SEQ ID NO: 1339384 - RNA, 19 nt, Artificial Sequence
  Description of Artificial Sequence: Synthetic oligonucleotide
  Sense strand starting at position 3749 of SEQ ID NO: 1242332
aagucaguuggguguaaag

SEQ ID NO: 1339385 - RNA, 19 nt, Artificial Sequence
  Description of Artificial Sequence: Synthetic oligonucleotide
  Antisense strand to SEQ ID NO: 1339384
cuuuacacccaacugacuu

SEQ ID NO: 1339386 - RNA, 19 nt, Artificial Sequence
  Description of Artificial Sequence: Synthetic oligonucleotide
  Sense strand starting at position 3975 of SEQ ID NO: 1242332
gggauacgguuuggauguu

SEQ ID NO: 1339387 - RNA, 19 nt, Artificial Sequence
  Description of Artificial Sequence: Synthetic oligonucleotide
  Antisense strand to SEQ ID NO: 1339386
aacauccaaaccguauccc

SEQ ID NO: 1339388 - RNA, 19 nt, Artificial Sequence
  Description of Artificial Sequence: Synthetic oligonucleotide
  Sense strand starting at position 55 of SEQ ID NO: 1242333
gaacauaucuaggucuuga

SEQ ID NO: 1339389 - RNA, 19 nt, Artificial Sequence
  Description of Artificial Sequence: Synthetic oligonucleotide
  Antisense strand to SEQ ID NO: 1339388
ucaagaccuagauauguuc

SEQ ID NO: 1339390 - RNA, 19 nt, Artificial Sequence
  Description of Artificial Sequence: Synthetic oligonucleotide
  Sense strand starting at position 64 of SEQ ID NO: 1242333
uaggucuugacagauaggu

SEQ ID NO: 1339391 - RNA, 19 nt, Artificial Sequence
  Description of Artificial Sequence: Synthetic oligonucleotide
  Antisense strand to SEQ ID NO: 1339390
accuaucugucaagaccua

SEQ ID NO: 1339392 - RNA, 19 nt, Artificial Sequence
  Description of Artificial Sequence: Synthetic oligonucleotide
  Sense strand starting at position 66 of SEQ ID NO: 1242333
ggucuugacagauagguac

SEQ ID NO: 1339393 - RNA, 19 nt, Artificial Sequence
  Description of Artificial Sequence: Synthetic oligonucleotide
  Antisense strand to SEQ ID NO: 1339392
guaccuaucugucaagacc

SEQ ID NO: 1339394 - RNA, 19 nt, Artificial Sequence
  Description of Artificial Sequence: Synthetic oligonucleotide
  Sense strand starting at position 104 of SEQ ID NO: 1242333
acguguuguguucuuugau

SEQ ID NO: 1339395 - RNA, 19 nt, Artificial Sequence
  Description of Artificial Sequence: Synthetic oligonucleotide
  Antisense strand to SEQ ID NO: 1339394
aucaaagaacacaacacgu

SEQ ID NO: 1339396 - RNA, 19 nt, Artificial Sequence
  Description of Artificial Sequence: Synthetic oligonucleotide
  Sense strand starting at position 116 of SEQ ID NO: 1242333
cuuugauuacucuaguaua

SEQ ID NO: 1339397 - RNA, 19 nt, Artificial Sequence
  Description of Artificial Sequence: Synthetic oligonucleotide
  Antisense strand to SEQ ID NO: 1339396
uauacuagaguaaucaaag

SEQ ID NO: 1339398 - RNA, 19 nt, Artificial Sequence
  Description of Artificial Sequence: Synthetic oligonucleotide
  Sense strand starting at position 193 of SEQ ID NO: 1242333
ugucuaacuaaguggaaga

SEQ ID NO: 1339399 - RNA, 19 nt, Artificial Sequence
  Description of Artificial Sequence: Synthetic oligonucleotide
  Antisense strand to SEQ ID NO: 1339398
ucuuccacuuaguuagaca

SEQ ID NO: 1339400 - RNA, 19 nt, Artificial Sequence
  Description of Artificial Sequence: Synthetic oligonucleotide
  Sense strand starting at position 194 of SEQ ID NO: 1242333
gucuaacuaaguggaagaa

SEQ ID NO: 1339401 - RNA, 19 nt, Artificial Sequence
  Description of Artificial Sequence: Synthetic oligonucleotide
  Antisense strand to SEQ ID NO: 1339400
uucuuccacuuaguuagac

SEQ ID NO: 1339402 - RNA, 19 nt, Artificial Sequence
  Description of Artificial Sequence: Synthetic oligonucleotide
  Sense strand starting at position 220 of SEQ ID NO: 1242333
cuuaaucuuccagaggguu

SEQ ID NO: 1339403 - RNA, 19 nt, Artificial Sequence
  Description of Artificial Sequence: Synthetic oligonucleotide
  Antisense strand to SEQ ID NO: 1339402
aacccucuggaagauuaag

SEQ ID NO: 1339404 - RNA, 19 nt, Artificial Sequence
  Description of Artificial Sequence: Synthetic oligonucleotide
  Sense strand starting at position 233 of SEQ ID NO: 1242333
aggguuccaaugugaauau

SEQ ID NO: 1339405 - RNA, 19 nt, Artificial Sequence
  Description of Artificial Sequence: Synthetic oligonucleotide
  Antisense strand to SEQ ID NO: 1339404
auauucacauuggaacccu

SEQ ID NO: 1339406 - RNA, 19 nt, Artificial Sequence
  Description of Artificial Sequence: Synthetic oligonucleotide
  Sense strand starting at position 237 of SEQ ID NO: 1242333
uuccaaugugaauauguca

SEQ ID NO: 1339407 - RNA, 19 nt, Artificial Sequence
  Description of Artificial Sequence: Synthetic oligonucleotide
  Antisense strand to SEQ ID NO: 1339406
ugacauauucacauuggaa

SEQ ID NO: 1339408 - RNA, 19 nt, Artificial Sequence
  Description of Artificial Sequence: Synthetic oligonucleotide
  Sense strand starting at position 244 of SEQ ID NO: 1242333
gugaauaugucauugacag

SEQ ID NO: 1339409 - RNA, 19 nt, Artificial Sequence
  Description of Artificial Sequence: Synthetic oligonucleotide
  Antisense strand to SEQ ID NO: 1339408
cugucaaugacauauucac

SEQ ID NO: 1339410 - RNA, 19 nt, Artificial Sequence
  Description of Artificial Sequence: Synthetic oligonucleotide
  Sense strand starting at position 298 of SEQ ID NO: 1242333
gcaacuuaauuccuugaug

SEQ ID NO: 1339411 - RNA, 19 nt, Artificial Sequence
  Description of Artificial Sequence: Synthetic oligonucleotide
  Antisense strand to SEQ ID NO: 1339410
caucaaggaauuaaguugc

SEQ ID NO: 1339412 - RNA, 19 nt, Artificial Sequence
  Description of Artificial Sequence: Synthetic oligonucleotide
  Sense strand starting at position 301 of SEQ ID NO: 1242333
acuuaauuccuugauggug

SEQ ID NO: 1339413 - RNA, 19 nt, Artificial Sequence
  Description of Artificial Sequence: Synthetic oligonucleotide
  Antisense strand to SEQ ID NO: 1339412
caccaucaaggaauuaagu

SEQ ID NO: 1339414 - RNA, 19 nt, Artificial Sequence
  Description of Artificial Sequence: Synthetic oligonucleotide
  Sense strand starting at position 415 of SEQ ID NO: 1242333
ggaacaucauuugaauuga

SEQ ID NO: 1339415 - RNA, 19 nt, Artificial Sequence
  Description of Artificial Sequence: Synthetic oligonucleotide
  Antisense strand to SEQ ID NO: 1339414
ucaauucaaaugauguucc

SEQ ID NO: 1339416 - RNA, 19 nt, Artificial Sequence
  Description of Artificial Sequence: Synthetic oligonucleotide
  Sense strand starting at position 479 of SEQ ID NO: 1242333
uuuaauagucugugcauuu

SEQ ID NO: 1339417 - RNA, 19 nt, Artificial Sequence
  Description of Artificial Sequence: Synthetic oligonucleotide
  Antisense strand to SEQ ID NO: 1339416
aaaugcacagacuauuaaa

SEQ ID NO: 1339418 - RNA, 19 nt, Artificial Sequence
  Description of Artificial Sequence: Synthetic oligonucleotide
  Sense strand starting at position 916 of SEQ ID NO: 1242333
gugugacuuccacauagag

SEQ ID NO: 1339419 - RNA, 19 nt, Artificial Sequence
  Description of Artificial Sequence: Synthetic oligonucleotide
  Antisense strand to SEQ ID NO: 1339418
cucuauguggaagucacac

SEQ ID NO: 1339420 - RNA, 19 nt, Artificial Sequence
  Description of Artificial Sequence: Synthetic oligonucleotide
  Sense strand starting at position 928 of SEQ ID NO: 1242333
cauagaguacagggucaau

SEQ ID NO: 1339421 - RNA, 19 nt, Artificial Sequence
  Description of Artificial Sequence: Synthetic oligonucleotide
  Antisense strand to SEQ ID NO: 1339420
auugacccuguacucuaug

SEQ ID NO: 1339422 - RNA, 19 nt, Artificial Sequence
  Description of Artificial Sequence: Synthetic oligonucleotide
  Sense strand starting at position 940 of SEQ ID NO: 1242333
ggucaaugauguuuauaua

SEQ ID NO: 1339423 - RNA, 19 nt, Artificial Sequence
  Description of Artificial Sequence: Synthetic oligonucleotide
  Antisense strand to SEQ ID NO: 1339422
uauauaaacaucauugacc

SEQ ID NO: 1339424 - RNA, 19 nt, Artificial Sequence
  Description of Artificial Sequence: Synthetic oligonucleotide
  Sense strand starting at position 988 of SEQ ID NO: 1242333
guucucagugucuaaagau

SEQ ID NO: 1339425 - RNA, 19 nt, Artificial Sequence
  Description of Artificial Sequence: Synthetic oligonucleotide
  Antisense strand to SEQ ID NO: 1339424
aucuuuagacacugagaac

SEQ ID NO: 1339426 - RNA, 19 nt, Artificial Sequence
  Description of Artificial Sequence: Synthetic oligonucleotide
  Sense strand starting at position 1102 of SEQ ID NO: 1242333
ugcuuaacauauuuguguu

SEQ ID NO: 1339427 - RNA, 19 nt, Artificial Sequence
  Description of Artificial Sequence: Synthetic oligonucleotide
  Antisense strand to SEQ ID NO: 1339426
aacacaaauauguuaagca

SEQ ID NO: 1339428 - RNA, 19 nt, Artificial Sequence
  Description of Artificial Sequence: Synthetic oligonucleotide
  Sense strand starting at position 1112 of SEQ ID NO: 1242333
auuuguguuugucuccauu

SEQ ID NO: 1339429 - RNA, 19 nt, Artificial Sequence
  Description of Artificial Sequence: Synthetic oligonucleotide
  Antisense strand to SEQ ID NO: 1339428
aauggagacaaacacaaau

SEQ ID NO: 1339430 - RNA, 19 nt, Artificial Sequence
  Description of Artificial Sequence: Synthetic oligonucleotide
  Sense strand starting at position 2241 of SEQ ID NO: 1242333
accguccaucaaugagaga

SEQ ID NO: 1339431 - RNA, 19 nt, Artificial Sequence
  Description of Artificial Sequence: Synthetic oligonucleotide
  Antisense strand to SEQ ID NO: 1339430
ucucucauugauggacggu

SEQ ID NO: 1339432 - RNA, 19 nt, Artificial Sequence
  Description of Artificial Sequence: Synthetic oligonucleotide
  Sense strand starting at position 2308 of SEQ ID NO: 1242333
ugaggaaucggccaacagu

SEQ ID NO: 1339433 - RNA, 19 nt, Artificial Sequence
  Description of Artificial Sequence: Synthetic oligonucleotide
  Antisense strand to SEQ ID NO: 1339432
acuguuggccgauuccuca

SEQ ID NO: 1339434 - RNA, 19 nt, Artificial Sequence
  Description of Artificial Sequence: Synthetic oligonucleotide
  Sense strand starting at position 2311 of SEQ ID NO: 1242333
ggaaucggccaacaguauu

SEQ ID NO: 1339435 - RNA, 19 nt, Artificial Sequence
  Description of Artificial Sequence: Synthetic oligonucleotide
  Antisense strand to SEQ ID NO: 1339434
aauacuguuggccgauucc

SEQ ID NO: 1339436 - RNA, 19 nt, Artificial Sequence
  Description of Artificial Sequence: Synthetic oligonucleotide
  Sense strand starting at position 2401 of SEQ ID NO: 1242333
uguaucugaugcucaauuu

SEQ ID NO: 1339437 - RNA, 19 nt, Artificial Sequence
  Description of Artificial Sequence: Synthetic oligonucleotide
  Antisense strand to SEQ ID NO: 1339436
aaauugagcaucagauaca

SEQ ID NO: 1339438 - RNA, 19 nt, Artificial Sequence
  Description of Artificial Sequence: Synthetic oligonucleotide
  Sense strand starting at position 2517 of SEQ ID NO: 1242333
aagaauugucgugaagauu

SEQ ID NO: 1339439 - RNA, 19 nt, Artificial Sequence
  Description of Artificial Sequence: Synthetic oligonucleotide
  Antisense strand to SEQ ID NO: 1339438
aaucuucacgacaauucuu

SEQ ID NO: 1339440 - RNA, 19 nt, Artificial Sequence
  Description of Artificial Sequence: Synthetic oligonucleotide
  Sense strand starting at position 2520 of SEQ ID NO: 1242333
aauugucgugaagauuaaa

SEQ ID NO: 1339441 - RNA, 19 nt, Artificial Sequence
  Description of Artificial Sequence: Synthetic oligonucleotide
  Antisense strand to SEQ ID NO: 1339440
uuuaaucuucacgacaauu

SEQ ID NO: 1339442 - RNA, 19 nt, Artificial Sequence
  Description of Artificial Sequence: Synthetic oligonucleotide
  Sense strand starting at position 2574 of SEQ ID NO: 1242333
aggugaaguguucagugaa

SEQ ID NO: 1339443 - RNA, 19 nt, Artificial Sequence
  Description of Artificial Sequence: Synthetic oligonucleotide
  Antisense strand to SEQ ID NO: 1339442
uucacugaacacuucaccu

SEQ ID NO: 1339444 - RNA, 19 nt, Artificial Sequence
  Description of Artificial Sequence: Synthetic oligonucleotide
  Sense strand starting at position 2642 of SEQ ID NO: 1242333
aggaauagcuuaguaagua

SEQ ID NO: 1339445 - RNA, 19 nt, Artificial Sequence
  Description of Artificial Sequence: Synthetic oligonucleotide
  Antisense strand to SEQ ID NO: 1339444
uacuuacuaagcuauuccu

SEQ ID NO: 1339446 - RNA, 19 nt, Artificial Sequence
  Description of Artificial Sequence: Synthetic oligonucleotide
  Sense strand starting at position 3222 of SEQ ID NO: 1242333
ccuguuguucuccaauaag

SEQ ID NO: 1339447 - RNA, 19 nt, Artificial Sequence
  Description of Artificial Sequence: Synthetic oligonucleotide
  Antisense strand to SEQ ID NO: 1339446
cuuauuggagaacaacagg

SEQ ID NO: 1339448 - RNA, 19 nt, Artificial Sequence
  Description of Artificial Sequence: Synthetic oligonucleotide
  Sense strand starting at position 3225 of SEQ ID NO: 1242333
guuguucuccaauaaguaa

SEQ ID NO: 1339449 - RNA, 19 nt, Artificial Sequence
  Description of Artificial Sequence: Synthetic oligonucleotide
  Antisense strand to SEQ ID NO: 1339448
uuacuuauuggagaacaac

SEQ ID NO: 1339450 - RNA, 19 nt, Artificial Sequence
  Description of Artificial Sequence: Synthetic oligonucleotide
  Sense strand starting at position 3387 of SEQ ID NO: 1242333
uggaguaagcaguaucaga

SEQ ID NO: 1339451 - RNA, 19 nt, Artificial Sequence
  Description of Artificial Sequence: Synthetic oligonucleotide
  Antisense strand to SEQ ID NO: 1339450
ucugauacugcuuacucca

SEQ ID NO: 1339452 - RNA, 19 nt, Artificial Sequence
  Description of Artificial Sequence: Synthetic oligonucleotide
  Sense strand starting at position 3488 of SEQ ID NO: 1242333
guuaucucaguggaucuua

SEQ ID NO: 1339453 - RNA, 19 nt, Artificial Sequence
  Description of Artificial Sequence: Synthetic oligonucleotide
  Antisense strand to SEQ ID NO: 1339452
uaagauccacugagauaac

SEQ ID NO: 1339454 - RNA, 19 nt, Artificial Sequence
  Description of Artificial Sequence: Synthetic oligonucleotide
  Sense strand starting at position 3499 of SEQ ID NO: 1242333
ggaucuuaauuugagaucu

SEQ ID NO: 1339455 - RNA, 19 nt, Artificial Sequence
  Description of Artificial Sequence: Synthetic oligonucleotide
  Antisense strand to SEQ ID NO: 1339454
agaucucaaauuaagaucc

SEQ ID NO: 1339456 - RNA, 19 nt, Artificial Sequence
  Description of Artificial Sequence: Synthetic oligonucleotide
  Sense strand starting at position 3510 of SEQ ID NO: 1242333
ugagaucuuuggguuccua

SEQ ID NO: 1339457 - RNA, 19 nt, Artificial Sequence
  Description of Artificial Sequence: Synthetic oligonucleotide
  Antisense strand to SEQ ID NO: 1339456
uaggaacccaaagaucuca

SEQ ID NO: 1339458 - RNA, 19 nt, Artificial Sequence
  Description of Artificial Sequence: Synthetic oligonucleotide
  Sense strand starting at position 3654 of SEQ ID NO: 1242333
aguuaagagucccugaaga

SEQ ID NO: 1339459 - RNA, 19 nt, Artificial Sequence
  Description of Artificial Sequence: Synthetic oligonucleotide
  Antisense strand to SEQ ID NO: 1339458
ucuucagggacucuuaacu

SEQ ID NO: 1339460 - RNA, 19 nt, Artificial Sequence
  Description of Artificial Sequence: Synthetic oligonucleotide
  Sense strand starting at position 3717 of SEQ ID NO: 1242333
gggauuguuuggaagcaga

SEQ ID NO: 1339461 - RNA, 19 nt, Artificial Sequence
  Description of Artificial Sequence: Synthetic oligonucleotide
  Antisense strand to SEQ ID NO: 1339460
ucugcuuccaaacaauccc

SEQ ID NO: 1339462 - RNA, 19 nt, Artificial Sequence
  Description of Artificial Sequence: Synthetic oligonucleotide
  Sense strand starting at position 3720 of SEQ ID NO: 1242333
auuguuuggaagcagauua

SEQ ID NO: 1339463 - RNA, 19 nt, Artificial Sequence
  Description of Artificial Sequence: Synthetic oligonucleotide
  Antisense strand to SEQ ID NO: 1339462
uaaucugcuuccaaacaau

SEQ ID NO: 1339464 - RNA, 19 nt, Artificial Sequence
  Description of Artificial Sequence: Synthetic oligonucleotide
  Sense strand starting at position 3762 of SEQ ID NO: 1242333
aggcaagacugauccaaug

SEQ ID NO: 1339465 - RNA, 19 nt, Artificial Sequence
  Description of Artificial Sequence: Synthetic oligonucleotide
  Antisense strand to SEQ ID NO: 1339464
cauuggaucagucuugccu

SEQ ID NO: 1339466 - RNA, 19 nt, Artificial Sequence
  Description of Artificial Sequence: Synthetic oligonucleotide
  Sense strand starting at position 3773 of SEQ ID NO: 1242333
auccaaugucauuacuugu

SEQ ID NO: 1339467 - RNA, 19 nt, Artificial Sequence
  Description of Artificial Sequence: Synthetic oligonucleotide
  Antisense strand to SEQ ID NO: 1339466
acaaguaaugacauuggau

SEQ ID NO: 1339468 - RNA, 19 nt, Artificial Sequence
  Description of Artificial Sequence: Synthetic oligonucleotide
  Sense strand starting at position 215 of SEQ ID NO: 1242334
acccaagagcuugguuaga

SEQ ID NO: 1339469 - RNA, 19 nt, Artificial Sequence
  Description of Artificial Sequence: Synthetic oligonucleotide
  Antisense strand to SEQ ID NO: 1339468
ucuaaccaagcucuugggu

SEQ ID NO: 1339470 - RNA, 19 nt, Artificial Sequence
  Description of Artificial Sequence: Synthetic oligonucleotide
  Sense strand starting at position 217 of SEQ ID NO: 1242334
ccaagagcuugguuagaga

SEQ ID NO: 1339471 - RNA, 19 nt, Artificial Sequence
  Description of Artificial Sequence: Synthetic oligonucleotide
  Antisense strand to SEQ ID NO: 1339470
ucucuaaccaagcucuugg

SEQ ID NO: 1339472 - RNA, 19 nt, Artificial Sequence
  Description of Artificial Sequence: Synthetic oligonucleotide
  Sense strand starting at position 224 of SEQ ID NO: 1242334
cuugguuagagauguacaa

SEQ ID NO: 1339473 - RNA, 19 nt, Artificial Sequence
  Description of Artificial Sequence: Synthetic oligonucleotide
  Antisense strand to SEQ ID NO: 1339472
uuguacaucucuaaccaag

SEQ ID NO: 1339474 - RNA, 19 nt, Artificial Sequence
  Description of Artificial Sequence: Synthetic oligonucleotide
  Sense strand starting at position 291 of SEQ ID NO: 1242334
gcccaugaucaaggaguaa

SEQ ID NO: 1339475 - RNA, 19 nt, Artificial Sequence
  Description of Artificial Sequence: Synthetic oligonucleotide
  Antisense strand to SEQ ID NO: 1339474
uuacuccuugaucaugggc

SEQ ID NO: 1339476 - RNA, 19 nt, Artificial Sequence
  Description of Artificial Sequence: Synthetic oligonucleotide
  Sense strand starting at position 385 of SEQ ID NO: 1242334
gauggaucugggcaguuaa

SEQ ID NO: 1339477 - RNA, 19 nt, Artificial Sequence
  Description of Artificial Sequence: Synthetic oligonucleotide
  Antisense strand to SEQ ID NO: 1339476
uuaacugcccagauccauc

SEQ ID NO: 1339478 - RNA, 19 nt, Artificial Sequence
  Description of Artificial Sequence: Synthetic oligonucleotide
  Sense strand starting at position 565 of SEQ ID NO: 1242334
gacugcagauguguugaaa

SEQ ID NO: 1339479 - RNA, 19 nt, Artificial Sequence
  Description of Artificial Sequence: Synthetic oligonucleotide
  Antisense strand to SEQ ID NO: 1339478
uuucaacacaucugcaguc

SEQ ID NO: 1339480 - RNA, 19 nt, Artificial Sequence
  Description of Artificial Sequence: Synthetic oligonucleotide
  Sense strand starting at position 568 of SEQ ID NO: 1242334
ugcagauguguugaaagag

SEQ ID NO: 1339481 - RNA, 19 nt, Artificial Sequence
  Description of Artificial Sequence: Synthetic oligonucleotide
  Antisense strand to SEQ ID NO: 1339480
cucuuucaacacaucugca

SEQ ID NO: 1339482 - RNA, 19 nt, Artificial Sequence
  Description of Artificial Sequence: Synthetic oligonucleotide
  Sense strand starting at position 688 of SEQ ID NO: 1242334
caaagaaagugguuuccua

SEQ ID NO: 1339483 - RNA, 19 nt, Artificial Sequence
  Description of Artificial Sequence: Synthetic oligonucleotide
  Antisense strand to SEQ ID NO: 1339482
uaggaaaccacuuucuuug

SEQ ID NO: 1339484 - RNA, 19 nt, Artificial Sequence
  Description of Artificial Sequence: Synthetic oligonucleotide
  Sense strand starting at position 692 of SEQ ID NO: 1242334
gaaagugguuuccuaagau

SEQ ID NO: 1339485 - RNA, 19 nt, Artificial Sequence
  Description of Artificial Sequence: Synthetic oligonucleotide
  Antisense strand to SEQ ID NO: 1339484
aucuuaggaaaccacuuuc

SEQ ID NO: 1339486 - RNA, 19 nt, Artificial Sequence
  Description of Artificial Sequence: Synthetic oligonucleotide
  Sense strand starting at position 734 of SEQ ID NO: 1242334
ccgugaacauugcugaaau

SEQ ID NO: 1339487 - RNA, 19 nt, Artificial Sequence
  Description of Artificial Sequence: Synthetic oligonucleotide
  Antisense strand to SEQ ID NO: 1339486
auuucagcaauguucacgg

SEQ ID NO: 1339488 - RNA, 19 nt, Artificial Sequence
  Description of Artificial Sequence: Synthetic oligonucleotide
  Sense strand starting at position 884 of SEQ ID NO: 1242334
agagcaaucuuuccugaaa

SEQ ID NO: 1339489 - RNA, 19 nt, Artificial Sequence
  Description of Artificial Sequence: Synthetic oligonucleotide
  Antisense strand to SEQ ID NO: 1339488
uuucaggaaagauugcucu

SEQ ID NO: 1339490 - RNA, 19 nt, Artificial Sequence
  Description of Artificial Sequence: Synthetic oligonucleotide
  Sense strand starting at position 906 of SEQ ID NO: 1242334
agaggcaauccaugugaca

SEQ ID NO: 1339491 - RNA, 19 nt, Artificial Sequence
  Description of Artificial Sequence: Synthetic oligonucleotide
  Antisense strand to SEQ ID NO: 1339490
ugucacauggauugccucu

SEQ ID NO: 1339492 - RNA, 19 nt, Artificial Sequence
  Description of Artificial Sequence: Synthetic oligonucleotide
  Sense strand starting at position 1082 of SEQ ID NO: 1242334
gcaauaaaguauucucgaa

SEQ ID NO: 1339493 - RNA, 19 nt, Artificial Sequence
  Description of Artificial Sequence: Synthetic oligonucleotide
  Antisense strand to SEQ ID NO: 1339492
uucgagaauacuuuauugc

SEQ ID NO: 1339494 - RNA, 19 nt, Artificial Sequence
  Description of Artificial Sequence: Synthetic oligonucleotide
  Sense strand starting at position 1399 of SEQ ID NO: 1242334
ggaugacucaguugucccu

SEQ ID NO: 1339495 - RNA, 19 nt, Artificial Sequence
  Description of Artificial Sequence: Synthetic oligonucleotide
  Antisense strand to SEQ ID NO: 1339494
agggacaacugagucaucc

SEQ ID NO: 1339496 - RNA, 19 nt, Artificial Sequence
  Description of Artificial Sequence: Synthetic oligonucleotide
  Sense strand starting at position 1523 of SEQ ID NO: 1242334
cugaauagagucuagcaca

SEQ ID NO: 1339497 - RNA, 19 nt, Artificial Sequence
  Description of Artificial Sequence: Synthetic oligonucleotide
  Antisense strand to SEQ ID NO: 1339496
ugugcuagacucuauucag

SEQ ID NO: 1339498 - RNA, 19 nt, Artificial Sequence
  Description of Artificial Sequence: Synthetic oligonucleotide
  Sense strand starting at position 1541 of SEQ ID NO: 1242334
auacuugacgcucaauaaa

SEQ ID NO: 1339499 - RNA, 19 nt, Artificial Sequence
  Description of Artificial Sequence: Synthetic oligonucleotide
  Antisense strand to SEQ ID NO: 1339498
uuuauugagcgucaaguau

SEQ ID NO: 1339500 - RNA, 19 nt, Artificial Sequence
  Description of Artificial Sequence: Synthetic oligonucleotide
  Sense strand starting at position 1650 of SEQ ID NO: 1242334
uguauuuccuaucuuaguu

SEQ ID NO: 1339501 - RNA, 19 nt, Artificial Sequence
  Description of Artificial Sequence: Synthetic oligonucleotide
  Antisense strand to SEQ ID NO: 1339500
aacuaagauaggaaauaca

SEQ ID NO: 1339502 - RNA, 19 nt, Artificial Sequence
  Description of Artificial Sequence: Synthetic oligonucleotide
  Sense strand starting at position 1778 of SEQ ID NO: 1242334
ugggcaccucagggauauu

SEQ ID NO: 1339503 - RNA, 19 nt, Artificial Sequence
  Description of Artificial Sequence: Synthetic oligonucleotide
  Antisense strand to SEQ ID NO: 1339502
aauaucccugaggugccca

SEQ ID NO: 1339504 - RNA, 19 nt, Artificial Sequence
  Description of Artificial Sequence: Synthetic oligonucleotide
  Sense strand starting at position 2177 of SEQ ID NO: 1242334
gguugugacccuuauuagu

SEQ ID NO: 1339505 - RNA, 19 nt, Artificial Sequence
  Description of Artificial Sequence: Synthetic oligonucleotide
  Antisense strand to SEQ ID NO: 1339504
acuaauaagggucacaacc

SEQ ID NO: 1339506 - RNA, 19 nt, Artificial Sequence
  Description of Artificial Sequence: Synthetic oligonucleotide
  Sense strand starting at position 2277 of SEQ ID NO: 1242334
cugagaaguuucccaaacu

SEQ ID NO: 1339507 - RNA, 19 nt, Artificial Sequence
  Description of Artificial Sequence: Synthetic oligonucleotide
  Antisense strand to SEQ ID NO: 1339506
aguuugggaaacuucucag

SEQ ID NO: 1339508 - RNA, 19 nt, Artificial Sequence
  Description of Artificial Sequence: Synthetic oligonucleotide
  Sense strand starting at position 2613 of SEQ ID NO: 1242334
gggugauuuauaggcggca

SEQ ID NO: 1339509 - RNA, 19 nt, Artificial Sequence
  Description of Artificial Sequence: Synthetic oligonucleotide
  Antisense strand to SEQ ID NO: 1339508
ugccgccuauaaaucaccc

SEQ ID NO: 1339510 - RNA, 19 nt, Artificial Sequence
  Description of Artificial Sequence: Synthetic oligonucleotide
  Sense strand starting at position 2614 of SEQ ID NO: 1242334
ggugauuuauaggcggcaa

SEQ ID NO: 1339511 - RNA, 19 nt, Artificial Sequence
  Description of Artificial Sequence: Synthetic oligonucleotide
  Antisense strand to SEQ ID NO: 1339510
uugccgccuauaaaucacc

SEQ ID NO: 1339512 - RNA, 19 nt, Artificial Sequence
  Description of Artificial Sequence: Synthetic oligonucleotide
  Sense strand starting at position 2615 of SEQ ID NO: 1242334
gugauuuauaggcggcaaa

SEQ ID NO: 1339513 - RNA, 19 nt, Artificial Sequence
  Description of Artificial Sequence: Synthetic oligonucleotide
  Antisense strand to SEQ ID NO: 1339512
uuugccgccuauaaaucac

SEQ ID NO: 1339514 - RNA, 19 nt, Artificial Sequence
  Description of Artificial Sequence: Synthetic oligonucleotide
  Sense strand starting at position 2669 of SEQ ID NO: 1242334
acaaacuugcagugaauua

SEQ ID NO: 1339515 - RNA, 19 nt, Artificial Sequence
  Description of Artificial Sequence: Synthetic oligonucleotide
  Antisense strand to SEQ ID NO: 1339514
uaauucacugcaaguuugu

SEQ ID NO: 1339516 - RNA, 19 nt, Artificial Sequence
  Description of Artificial Sequence: Synthetic oligonucleotide
  Sense strand starting at position 2690 of SEQ ID NO: 1242334
gaaguaaagcagggauuau

SEQ ID NO: 1339517 - RNA, 19 nt, Artificial Sequence
  Description of Artificial Sequence: Synthetic oligonucleotide
  Antisense strand to SEQ ID NO: 1339516
auaaucccugcuuuacuuc

SEQ ID NO: 1339518 - RNA, 19 nt, Artificial Sequence
  Description of Artificial Sequence: Synthetic oligonucleotide
  Sense strand starting at position 3143 of SEQ ID NO: 1242334
guguccaccucauuugcaa

SEQ ID NO: 1339519 - RNA, 19 nt, Artificial Sequence
  Description of Artificial Sequence: Synthetic oligonucleotide
  Antisense strand to SEQ ID NO: 1339518
uugcaaaugagguggacac

SEQ ID NO: 1339520 - RNA, 19 nt, Artificial Sequence
  Description of Artificial Sequence: Synthetic oligonucleotide
  Sense strand starting at position 3406 of SEQ ID NO: 1242334
acggauaaggcauguaucu

SEQ ID NO: 1339521 - RNA, 19 nt, Artificial Sequence
  Description of Artificial Sequence: Synthetic oligonucleotide
  Antisense strand to SEQ ID NO: 1339520
agauacaugccuuauccgu

SEQ ID NO: 1339522 - RNA, 19 nt, Artificial Sequence
  Description of Artificial Sequence: Synthetic oligonucleotide
  Sense strand starting at position 3563 of SEQ ID NO: 1242334
gggaguggcagugguauuu

SEQ ID NO: 1339523 - RNA, 19 nt, Artificial Sequence
  Description of Artificial Sequence: Synthetic oligonucleotide
  Antisense strand to SEQ ID NO: 1339522
aaauaccacugccacuccc

SEQ ID NO: 1339524 - RNA, 19 nt, Artificial Sequence
  Description of Artificial Sequence: Synthetic oligonucleotide
  Sense strand starting at position 3569 of SEQ ID NO: 1242334
ggcagugguauuugaguga

SEQ ID NO: 1339525 - RNA, 19 nt, Artificial Sequence
  Description of Artificial Sequence: Synthetic oligonucleotide
  Antisense strand to SEQ ID NO: 1339524
ucacucaaauaccacugcc

SEQ ID NO: 1339526 - RNA, 19 nt, Artificial Sequence
  Description of Artificial Sequence: Synthetic oligonucleotide
  Sense strand starting at position 3627 of SEQ ID NO: 1242334
aaggaacuguuguuccaua

SEQ ID NO: 1339527 - RNA, 19 nt, Artificial Sequence
  Description of Artificial Sequence: Synthetic oligonucleotide
  Antisense strand to SEQ ID NO: 1339526
uauggaacaacaguuccuu

SEQ ID NO: 1339528 - RNA, 19 nt, Artificial Sequence
  Description of Artificial Sequence: Synthetic oligonucleotide
  Sense strand starting at position 3632 of SEQ ID NO: 1242334
acuguuguuccauacgaag

SEQ ID NO: 1339529 - RNA, 19 nt, Artificial Sequence
  Description of Artificial Sequence: Synthetic oligonucleotide
  Antisense strand to SEQ ID NO: 1339528
cuucguauggaacaacagu

SEQ ID NO: 1339530 - RNA, 19 nt, Artificial Sequence
  Description of Artificial Sequence: Synthetic oligonucleotide
  Sense strand starting at position 3634 of SEQ ID NO: 1242334
uguuguuccauacgaagga

SEQ ID NO: 1339531 - RNA, 19 nt, Artificial Sequence
  Description of Artificial Sequence: Synthetic oligonucleotide
  Antisense strand to SEQ ID NO: 1339530
uccuucguauggaacaaca

SEQ ID NO: 1339532 - RNA, 19 nt, Artificial Sequence
  Description of Artificial Sequence: Synthetic oligonucleotide
  Sense strand starting at position 3771 of SEQ ID NO: 1242334
gcagcuaaggaaugugaau

SEQ ID NO: 1339533 - RNA, 19 nt, Artificial Sequence
  Description of Artificial Sequence: Synthetic oligonucleotide
  Antisense strand to SEQ ID NO: 1339532
auucacauuccuuagcugc

SEQ ID NO: 1339534 - RNA, 19 nt, Artificial Sequence
  Description of Artificial Sequence: Synthetic oligonucleotide
  Sense strand starting at position 3819 of SEQ ID NO: 1242334
aaauuugcaugggagaaug

SEQ ID NO: 1339535 - RNA, 19 nt, Artificial Sequence
  Description of Artificial Sequence: Synthetic oligonucleotide
  Antisense strand to SEQ ID NO: 1339534
cauucucccaugcaaauuu

SEQ ID NO: 1339536 - RNA, 19 nt, Artificial Sequence
  Description of Artificial Sequence: Synthetic oligonucleotide
  Sense strand starting at position 3861 of SEQ ID NO: 1242334
gcagguuaauaucucggaa

SEQ ID NO: 1339537 - RNA, 19 nt, Artificial Sequence
  Description of Artificial Sequence: Synthetic oligonucleotide
  Antisense strand to SEQ ID NO: 1339536
uuccgagauauuaaccugc

SEQ ID NO: 1339538 - RNA, 19 nt, Artificial Sequence
  Description of Artificial Sequence: Synthetic oligonucleotide
  Sense strand starting at position 3864 of SEQ ID NO: 1242334
gguuaauaucucggaagca

SEQ ID NO: 1339539 - RNA, 19 nt, Artificial Sequence
  Description of Artificial Sequence: Synthetic oligonucleotide
  Antisense strand to SEQ ID NO: 1339538
ugcuuccgagauauuaacc

SEQ ID NO: 1339540 - RNA, 19 nt, Artificial Sequence
  Description of Artificial Sequence: Synthetic oligonucleotide
  Sense strand starting at position 3873 of SEQ ID NO: 1242334
cucggaagcauaugggaua

SEQ ID NO: 1339541 - RNA, 19 nt, Artificial Sequence
  Description of Artificial Sequence: Synthetic oligonucleotide
  Antisense strand to SEQ ID NO: 1339540
uaucccauaugcuuccgag

SEQ ID NO: 1339542 - RNA, 19 nt, Artificial Sequence
  Description of Artificial Sequence: Synthetic oligonucleotide
  Sense strand starting at position 3931 of SEQ ID NO: 1242334
ccagcaguccaguaaagcu

SEQ ID NO: 1339543 - RNA, 19 nt, Artificial Sequence
  Description of Artificial Sequence: Synthetic oligonucleotide
  Antisense strand to SEQ ID NO: 1339542
agcuuuacuggacugcugg

SEQ ID NO: 1339544 - RNA, 19 nt, Artificial Sequence
  Description of Artificial Sequence: Synthetic oligonucleotide
  Sense strand starting at position 3938 of SEQ ID NO: 1242334
uccaguaaagcuuacugaa

SEQ ID NO: 1339545 - RNA, 19 nt, Artificial Sequence
  Description of Artificial Sequence: Synthetic oligonucleotide
  Antisense strand to SEQ ID NO: 1339544
uucaguaagcuuuacugga

SEQ ID NO: 1339546 - RNA, 19 nt, Artificial Sequence
  Description of Artificial Sequence: Synthetic oligonucleotide
  Sense strand starting at position 3974 of SEQ ID NO: 1242334
auugcuucugaagauccau

SEQ ID NO: 1339547 - RNA, 19 nt, Artificial Sequence
  Description of Artificial Sequence: Synthetic oligonucleotide
  Antisense strand to SEQ ID NO: 1339546
auggaucuucagaagcaau

SEQ ID NO: 1339548 - RNA, 19 nt, Artificial Sequence
  Description of Artificial Sequence: Synthetic oligonucleotide
  Sense strand starting at position 66 of SEQ ID NO: 1242335
gucaguugccuccacaacu

SEQ ID NO: 1339549 - RNA, 19 nt, Artificial Sequence
  Description of Artificial Sequence: Synthetic oligonucleotide
  Antisense strand to SEQ ID NO: 1339548
aguuguggaggcaacugac

SEQ ID NO: 1339550 - RNA, 19 nt, Artificial Sequence
  Description of Artificial Sequence: Synthetic oligonucleotide
  Sense strand starting at position 396 of SEQ ID NO: 1242335
gggugaggguauccauuga

SEQ ID NO: 1339551 - RNA, 19 nt, Artificial Sequence
  Description of Artificial Sequence: Synthetic oligonucleotide
  Antisense strand to SEQ ID NO: 1339550
ucaauggauacccucaccc

SEQ ID NO: 1339552 - RNA, 19 nt, Artificial Sequence
  Description of Artificial Sequence: Synthetic oligonucleotide
  Sense strand starting at position 633 of SEQ ID NO: 1242335
gcaucaugacggcauggau

SEQ ID NO: 1339553 - RNA, 19 nt, Artificial Sequence
  Description of Artificial Sequence: Synthetic oligonucleotide
  Antisense strand to SEQ ID NO: 1339552
auccaugccgucaugaugc

SEQ ID NO: 1339554 - RNA, 19 nt, Artificial Sequence
  Description of Artificial Sequence: Synthetic oligonucleotide
  Sense strand starting at position 747 of SEQ ID NO: 1242335
acgccaguugcuuuacgau

SEQ ID NO: 1339555 - RNA, 19 nt, Artificial Sequence
  Description of Artificial Sequence: Synthetic oligonucleotide
  Antisense strand to SEQ ID NO: 1339554
aucguaaagcaacuggcgu

SEQ ID NO: 1339556 - RNA, 19 nt, Artificial Sequence
  Description of Artificial Sequence: Synthetic oligonucleotide
  Sense strand starting at position 814 of SEQ ID NO: 1242335
caaugauggcccugcaaag

SEQ ID NO: 1339557 - RNA, 19 nt, Artificial Sequence
  Description of Artificial Sequence: Synthetic oligonucleotide
  Antisense strand to SEQ ID NO: 1339556
cuuugcagggccaucauug

SEQ ID NO: 1339558 - RNA, 19 nt, Artificial Sequence
  Description of Artificial Sequence: Synthetic oligonucleotide
  Sense strand starting at position 1014 of SEQ ID NO: 1242335
agaauauugcaauggcucu

SEQ ID NO: 1339559 - RNA, 19 nt, Artificial Sequence
  Description of Artificial Sequence: Synthetic oligonucleotide
  Antisense strand to SEQ ID NO: 1339558
agagccauugcaauauucu

SEQ ID NO: 1339560 - RNA, 19 nt, Artificial Sequence
  Description of Artificial Sequence: Synthetic oligonucleotide
  Sense strand starting at position 1020 of SEQ ID NO: 1242335
uugcaauggcucuaacagu

SEQ ID NO: 1339561 - RNA, 19 nt, Artificial Sequence
  Description of Artificial Sequence: Synthetic oligonucleotide
  Antisense strand to SEQ ID NO: 1339560
acuguuagagccauugcaa

SEQ ID NO: 1339562 - RNA, 19 nt, Artificial Sequence
  Description of Artificial Sequence: Synthetic oligonucleotide
  Sense strand starting at position 1036 of SEQ ID NO: 1242335
aguggauggacuuagugua

SEQ ID NO: 1339563 - RNA, 19 nt, Artificial Sequence
  Description of Artificial Sequence: Synthetic oligonucleotide
  Antisense strand to SEQ ID NO: 1339562
uacacuaaguccauccacu

SEQ ID NO: 1339564 - RNA, 19 nt, Artificial Sequence
  Description of Artificial Sequence: Synthetic oligonucleotide
  Sense strand starting at position 1097 of SEQ ID NO: 1242335
gcugaaauauuggaaauuu

SEQ ID NO: 1339565 - RNA, 19 nt, Artificial Sequence
  Description of Artificial Sequence: Synthetic oligonucleotide
  Antisense strand to SEQ ID NO: 1339564
aaauuuccaauauuucagc

SEQ ID NO: 1339566 - RNA, 19 nt, Artificial Sequence
  Description of Artificial Sequence: Synthetic oligonucleotide
  Sense strand starting at position 1135 of SEQ ID NO: 1242335
agcgaaagauauuccauca

SEQ ID NO: 1339567 - RNA, 19 nt, Artificial Sequence
  Description of Artificial Sequence: Synthetic oligonucleotide
  Antisense strand to SEQ ID NO: 1339566
ugauggaauaucuuucgcu

SEQ ID NO: 1339568 - RNA, 19 nt, Artificial Sequence
  Description of Artificial Sequence: Synthetic oligonucleotide
  Sense strand starting at position 1421 of SEQ ID NO: 1242335
cacaguaucuguuugguga

SEQ ID NO: 1339569 - RNA, 19 nt, Artificial Sequence
  Description of Artificial Sequence: Synthetic oligonucleotide
  Antisense strand to SEQ ID NO: 1339568
ucaccaaacagauacugug

SEQ ID NO: 1339570 - RNA, 19 nt, Artificial Sequence
  Description of Artificial Sequence: Synthetic oligonucleotide
  Sense strand starting at position 1422 of SEQ ID NO: 1242335
acaguaucuguuuggugaa

SEQ ID NO: 1339571 - RNA, 19 nt, Artificial Sequence
  Description of Artificial Sequence: Synthetic oligonucleotide
  Antisense strand to SEQ ID NO: 1339570
uucaccaaacagauacugu

SEQ ID NO: 1339572 - RNA, 19 nt, Artificial Sequence
  Description of Artificial Sequence: Synthetic oligonucleotide
  Sense strand starting at position 1461 of SEQ ID NO: 1242335
cuccuucuauggcugcaaa

SEQ ID NO: 1339573 - RNA, 19 nt, Artificial Sequence
  Description of Artificial Sequence: Synthetic oligonucleotide
  Antisense strand to SEQ ID NO: 1339572
uuugcagccauagaaggag

SEQ ID NO: 1339574 - RNA, 19 nt, Artificial Sequence
  Description of Artificial Sequence: Synthetic oligonucleotide
  Sense strand starting at position 1538 of SEQ ID NO: 1242335
ugacuuaauuucgacccau

SEQ ID NO: 1339575 - RNA, 19 nt, Artificial Sequence
  Description of Artificial Sequence: Synthetic oligonucleotide
  Antisense strand to SEQ ID NO: 1339574
augggucgaaauuaaguca

SEQ ID NO: 1339576 - RNA, 19 nt, Artificial Sequence
  Description of Artificial Sequence: Synthetic oligonucleotide
  Sense strand starting at position 1594 of SEQ ID NO: 1242335
acuuguuuaucugcacuca

SEQ ID NO: 1339577 - RNA, 19 nt, Artificial Sequence
  Description of Artificial Sequence: Synthetic oligonucleotide
  Antisense strand to SEQ ID NO: 1339576
ugagugcagauaaacaagu

SEQ ID NO: 1339578 - RNA, 19 nt, Artificial Sequence
  Description of Artificial Sequence: Synthetic oligonucleotide
  Sense strand starting at position 1657 of SEQ ID NO: 1242335
ggcugauugaugcaaaguc

SEQ ID NO: 1339579 - RNA, 19 nt, Artificial Sequence
  Description of Artificial Sequence: Synthetic oligonucleotide
  Antisense strand to SEQ ID NO: 1339578
gacuuugcaucaaucagcc

SEQ ID NO: 1339580 - RNA, 19 nt, Artificial Sequence
  Description of Artificial Sequence: Synthetic oligonucleotide
  Sense strand starting at position 1779 of SEQ ID NO: 1242335
cccacuuugcagcagaaau

SEQ ID NO: 1339581 - RNA, 19 nt, Artificial Sequence
  Description of Artificial Sequence: Synthetic oligonucleotide
  Antisense strand to SEQ ID NO: 1339580
auuucugcugcaaaguggg

SEQ ID NO: 1339582 - RNA, 19 nt, Artificial Sequence
  Description of Artificial Sequence: Synthetic oligonucleotide
  Sense strand starting at position 1791 of SEQ ID NO: 1242335
cagaaaugugccugggcuu

SEQ ID NO: 1339583 - RNA, 19 nt, Artificial Sequence
  Description of Artificial Sequence: Synthetic oligonucleotide
  Antisense strand to SEQ ID NO: 1339582
aagcccaggcacauuucug

SEQ ID NO: 1339584 - RNA, 19 nt, Artificial Sequence
  Description of Artificial Sequence: Synthetic oligonucleotide
  Sense strand starting at position 1792 of SEQ ID NO: 1242335
agaaaugugccugggcuuu

SEQ ID NO: 1339585 - RNA, 19 nt, Artificial Sequence
  Description of Artificial Sequence: Synthetic oligonucleotide
  Antisense strand to SEQ ID NO: 1339584
aaagcccaggcacauuucu

SEQ ID NO: 1339586 - RNA, 19 nt, Artificial Sequence
  Description of Artificial Sequence: Synthetic oligonucleotide
  Sense strand starting at position 1842 of SEQ ID NO: 1242335
gauggaguucuugaucuug

SEQ ID NO: 1339587 - RNA, 19 nt, Artificial Sequence
  Description of Artificial Sequence: Synthetic oligonucleotide
  Antisense strand to SEQ ID NO: 1339586
caagaucaagaacuccauc

SEQ ID NO: 1339588 - RNA, 19 nt, Artificial Sequence
  Description of Artificial Sequence: Synthetic oligonucleotide
  Sense strand starting at position 2140 of SEQ ID NO: 1242335
uggauaagcuaggccuuua

SEQ ID NO: 1339589 - RNA, 19 nt, Artificial Sequence
  Description of Artificial Sequence: Synthetic oligonucleotide
  Antisense strand to SEQ ID NO: 1339588
uaaaggccuagcuuaucca

SEQ ID NO: 1339590 - RNA, 19 nt, Artificial Sequence
  Description of Artificial Sequence: Synthetic oligonucleotide
  Sense strand starting at position 2812 of SEQ ID NO: 1242335
aagagaacuugcgugagga

SEQ ID NO: 1339591 - RNA, 19 nt, Artificial Sequence
  Description of Artificial Sequence: Synthetic oligonucleotide
  Antisense strand to SEQ ID NO: 1339590
uccucacgcaaguucucuu

SEQ ID NO: 1339592 - RNA, 19 nt, Artificial Sequence
  Description of Artificial Sequence: Synthetic oligonucleotide
  Sense strand starting at position 2813 of SEQ ID NO: 1242335
agagaacuugcgugaggag

SEQ ID NO: 1339593 - RNA, 19 nt, Artificial Sequence
  Description of Artificial Sequence: Synthetic oligonucleotide
  Antisense strand to SEQ ID NO: 1339592
cuccucacgcaaguucucu

SEQ ID NO: 1339594 - RNA, 19 nt, Artificial Sequence
  Description of Artificial Sequence: Synthetic oligonucleotide
  Sense strand starting at position 2938 of SEQ ID NO: 1242335
ugcacaugcaugugaggau

SEQ ID NO: 1339595 - RNA, 19 nt, Artificial Sequence
  Description of Artificial Sequence: Synthetic oligonucleotide
  Antisense strand to SEQ ID NO: 1339594
auccucacaugcaugugca

SEQ ID NO: 1339596 - RNA, 19 nt, Artificial Sequence
  Description of Artificial Sequence: Synthetic oligonucleotide
  Sense strand starting at position 2942 of SEQ ID NO: 1242335
caugcaugugaggauuacu

SEQ ID NO: 1339597 - RNA, 19 nt, Artificial Sequence
  Description of Artificial Sequence: Synthetic oligonucleotide
  Antisense strand to SEQ ID NO: 1339596
aguaauccucacaugcaug

SEQ ID NO: 1339598 - RNA, 19 nt, Artificial Sequence
  Description of Artificial Sequence: Synthetic oligonucleotide
  Sense strand starting at position 2952 of SEQ ID NO: 1242335
aggauuacuuccucccuga

SEQ ID NO: 1339599 - RNA, 19 nt, Artificial Sequence
  Description of Artificial Sequence: Synthetic oligonucleotide
  Antisense strand to SEQ ID NO: 1339598
ucagggaggaaguaauccu

SEQ ID NO: 1339600 - RNA, 19 nt, Artificial Sequence
  Description of Artificial Sequence: Synthetic oligonucleotide
  Sense strand starting at position 2955 of SEQ ID NO: 1242335
auuacuuccucccugagua

SEQ ID NO: 1339601 - RNA, 19 nt, Artificial Sequence
  Description of Artificial Sequence: Synthetic oligonucleotide
  Antisense strand to SEQ ID NO: 1339600
uacucagggaggaaguaau

SEQ ID NO: 1339602 - RNA, 19 nt, Artificial Sequence
  Description of Artificial Sequence: Synthetic oligonucleotide
  Sense strand starting at position 2959 of SEQ ID NO: 1242335
cuuccucccugaguaaaug

SEQ ID NO: 1339603 - RNA, 19 nt, Artificial Sequence
  Description of Artificial Sequence: Synthetic oligonucleotide
  Antisense strand to SEQ ID NO: 1339602
cauuuacucagggaggaag

SEQ ID NO: 1339604 - RNA, 19 nt, Artificial Sequence
  Description of Artificial Sequence: Synthetic oligonucleotide
  Sense strand starting at position 3031 of SEQ ID NO: 1242335
aagaacacccguuggaauu

SEQ ID NO: 1339605 - RNA, 19 nt, Artificial Sequence
  Description of Artificial Sequence: Synthetic oligonucleotide
  Antisense strand to SEQ ID NO: 1339604
aauuccaacggguguucuu

SEQ ID NO: 1339606 - RNA, 19 nt, Artificial Sequence
  Description of Artificial Sequence: Synthetic oligonucleotide
  Sense strand starting at position 3032 of SEQ ID NO: 1242335
agaacacccguuggaauua

SEQ ID NO: 1339607 - RNA, 19 nt, Artificial Sequence
  Description of Artificial Sequence: Synthetic oligonucleotide
  Antisense strand to SEQ ID NO: 1339606
uaauuccaacggguguucu

SEQ ID NO: 1339608 - RNA, 19 nt, Artificial Sequence
  Description of Artificial Sequence: Synthetic oligonucleotide
  Sense strand starting at position 3059 of SEQ ID NO: 1242335
uuagguaauucggucuuga

SEQ ID NO: 1339609 - RNA, 19 nt, Artificial Sequence
  Description of Artificial Sequence: Synthetic oligonucleotide
  Antisense strand to SEQ ID NO: 1339608
ucaagaccgaauuaccuaa

SEQ ID NO: 1339610 - RNA, 19 nt, Artificial Sequence
  Description of Artificial Sequence: Synthetic oligonucleotide
  Sense strand starting at position 3201 of SEQ ID NO: 1242335
gcuccaaucagggaagucu

SEQ ID NO: 1339611 - RNA, 19 nt, Artificial Sequence
  Description of Artificial Sequence: Synthetic oligonucleotide
  Antisense strand to SEQ ID NO: 1339610
agacuucccugauuggagc

SEQ ID NO: 1339612 - RNA, 19 nt, Artificial Sequence
  Description of Artificial Sequence: Synthetic oligonucleotide
  Sense strand starting at position 3209 of SEQ ID NO: 1242335
cagggaagucuccaugcca

SEQ ID NO: 1339613 - RNA, 19 nt, Artificial Sequence
  Description of Artificial Sequence: Synthetic oligonucleotide
  Antisense strand to SEQ ID NO: 1339612
uggcauggagacuucccug

SEQ ID NO: 1339614 - RNA, 19 nt, Artificial Sequence
  Description of Artificial Sequence: Synthetic oligonucleotide
  Sense strand starting at position 3412 of SEQ ID NO: 1242335
acugccugccucugaaaga

SEQ ID NO: 1339615 - RNA, 19 nt, Artificial Sequence
  Description of Artificial Sequence: Synthetic oligonucleotide
  Antisense strand to SEQ ID NO: 1339614
ucuuucagaggcaggcagu

SEQ ID NO: 1339616 - RNA, 19 nt, Artificial Sequence
  Description of Artificial Sequence: Synthetic oligonucleotide
  Sense strand starting at position 3425 of SEQ ID NO: 1242335
gaaagaaacgcauguagua

SEQ ID NO: 1339617 - RNA, 19 nt, Artificial Sequence
  Description of Artificial Sequence: Synthetic oligonucleotide
  Antisense strand to SEQ ID NO: 1339616
uacuacaugcguuucuuuc

SEQ ID NO: 1339618 - RNA, 19 nt, Artificial Sequence
  Description of Artificial Sequence: Synthetic oligonucleotide
  Sense strand starting at position 3559 of SEQ ID NO: 1242335
augauagcuuugccacaaa

SEQ ID NO: 1339619 - RNA, 19 nt, Artificial Sequence
  Description of Artificial Sequence: Synthetic oligonucleotide
  Antisense strand to SEQ ID NO: 1339618
uuuguggcaaagcuaucau

SEQ ID NO: 1339620 - RNA, 19 nt, Artificial Sequence
  Description of Artificial Sequence: Synthetic oligonucleotide
  Sense strand starting at position 3577 of SEQ ID NO: 1242335
auaagucagucuccuuuaa

SEQ ID NO: 1339621 - RNA, 19 nt, Artificial Sequence
  Description of Artificial Sequence: Synthetic oligonucleotide
  Antisense strand to SEQ ID NO: 1339620
uuaaaggagacugacuuau

SEQ ID NO: 1339622 - RNA, 19 nt, Artificial Sequence
  Description of Artificial Sequence: Synthetic oligonucleotide
  Sense strand starting at position 3854 of SEQ ID NO: 1242335
cuccuaguggauggugaau

SEQ ID NO: 1339623 - RNA, 19 nt, Artificial Sequence
  Description of Artificial Sequence: Synthetic oligonucleotide
  Antisense strand to SEQ ID NO: 1339622
auucaccauccacuaggag

SEQ ID NO: 1339624 - RNA, 19 nt, Artificial Sequence
  Description of Artificial Sequence: Synthetic oligonucleotide
  Sense strand starting at position 3865 of SEQ ID NO: 1242335
uggugaaucugauuggcuu

SEQ ID NO: 1339625 - RNA, 19 nt, Artificial Sequence
  Description of Artificial Sequence: Synthetic oligonucleotide
  Antisense strand to SEQ ID NO: 1339624
aagccaaucagauucacca

SEQ ID NO: 1339626 - RNA, 19 nt, Artificial Sequence
  Description of Artificial Sequence: Synthetic oligonucleotide
  Sense strand starting at position 3866 of SEQ ID NO: 1242335
ggugaaucugauuggcuug

SEQ ID NO: 1339627 - RNA, 19 nt, Artificial Sequence
  Description of Artificial Sequence: Synthetic oligonucleotide
  Antisense strand to SEQ ID NO: 1339626
caagccaaucagauucacc

SEQ ID NO: 1339628 - RNA, 19 nt, Artificial Sequence
  Description of Artificial Sequence: Synthetic oligonucleotide
  Sense strand starting at position 171 of SEQ ID NO: 1242336
aaaugcuucucuguggagu

SEQ ID NO: 1339629 - RNA, 19 nt, Artificial Sequence
  Description of Artificial Sequence: Synthetic oligonucleotide
  Antisense strand to SEQ ID NO: 1339628
acuccacagagaagcauuu

SEQ ID NO: 1339630 - RNA, 19 nt, Artificial Sequence
  Description of Artificial Sequence: Synthetic oligonucleotide
  Sense strand starting at position 172 of SEQ ID NO: 1242336
aaugcuucucuguggaguu

SEQ ID NO: 1339631 - RNA, 19 nt, Artificial Sequence
  Description of Artificial Sequence: Synthetic oligonucleotide
  Antisense strand to SEQ ID NO: 1339630
aacuccacagagaagcauu

SEQ ID NO: 1339632 - RNA, 19 nt, Artificial Sequence
  Description of Artificial Sequence: Synthetic oligonucleotide
  Sense strand starting at position 367 of SEQ ID NO: 1242336
cgcagaaaguuaucaaaca

SEQ ID NO: 1339633 - RNA, 19 nt, Artificial Sequence
  Description of Artificial Sequence: Synthetic oligonucleotide
  Antisense strand to SEQ ID NO: 1339632
uguuugauaacuuucugcg

SEQ ID NO: 1339634 - RNA, 19 nt, Artificial Sequence
  Description of Artificial Sequence: Synthetic oligonucleotide
  Sense strand starting at position 859 of SEQ ID NO: 1242336
gcacaucuggcccagcauu

SEQ ID NO: 1339635 - RNA, 19 nt, Artificial Sequence
  Description of Artificial Sequence: Synthetic oligonucleotide
  Antisense strand to SEQ ID NO: 1339634
aaugcugggccagaugugc

SEQ ID NO: 1339636 - RNA, 19 nt, Artificial Sequence
  Description of Artificial Sequence: Synthetic oligonucleotide
  Sense strand starting at position 966 of SEQ ID NO: 1242336
ccagaaucccagggcugaa

SEQ ID NO: 1339637 - RNA, 19 nt, Artificial Sequence
  Description of Artificial Sequence: Synthetic oligonucleotide
  Antisense strand to SEQ ID NO: 1339636
uucagcccugggauucugg

SEQ ID NO: 1339638 - RNA, 19 nt, Artificial Sequence
  Description of Artificial Sequence: Synthetic oligonucleotide
  Sense strand starting at position 1034 of SEQ ID NO: 1242336
cuagccucucccuggaaga

SEQ ID NO: 1339639 - RNA, 19 nt, Artificial Sequence
  Description of Artificial Sequence: Synthetic oligonucleotide
  Antisense strand to SEQ ID NO: 1339638
ucuuccagggagaggcuag

SEQ ID NO: 1339640 - RNA, 19 nt, Artificial Sequence
  Description of Artificial Sequence: Synthetic oligonucleotide
  Sense strand starting at position 1075 of SEQ ID NO: 1242336
aauaaaucacgcugcgaag

SEQ ID NO: 1339641 - RNA, 19 nt, Artificial Sequence
  Description of Artificial Sequence: Synthetic oligonucleotide
  Antisense strand to SEQ ID NO: 1339640
cuucgcagcgugauuuauu

SEQ ID NO: 1339642 - RNA, 19 nt, Artificial Sequence
  Description of Artificial Sequence: Synthetic oligonucleotide
  Sense strand starting at position 1675 of SEQ ID NO: 1242336
uuccgaguugucuaggucu

SEQ ID NO: 1339643 - RNA, 19 nt, Artificial Sequence
  Description of Artificial Sequence: Synthetic oligonucleotide
  Antisense strand to SEQ ID NO: 1339642
agaccuagacaacucggaa

SEQ ID NO: 1339644 - RNA, 19 nt, Artificial Sequence
  Description of Artificial Sequence: Synthetic oligonucleotide
  Sense strand starting at position 1891 of SEQ ID NO: 1242336
gcugccacuccagagagau

SEQ ID NO: 1339645 - RNA, 19 nt, Artificial Sequence
  Description of Artificial Sequence: Synthetic oligonucleotide
  Antisense strand to SEQ ID NO: 1339644
aucucucuggaguggcagc

SEQ ID NO: 1339646 - RNA, 19 nt, Artificial Sequence
  Description of Artificial Sequence: Synthetic oligonucleotide
  Sense strand starting at position 1897 of SEQ ID NO: 1242336
acuccagagagauggcuau

SEQ ID NO: 1339647 - RNA, 19 nt, Artificial Sequence
  Description of Artificial Sequence: Synthetic oligonucleotide
  Antisense strand to SEQ ID NO: 1339646
auagccaucucucuggagu

SEQ ID NO: 1339648 - RNA, 19 nt, Artificial Sequence
  Description of Artificial Sequence: Synthetic oligonucleotide
  Sense strand starting at position 2010 of SEQ ID NO: 1242336
cuaacucugucgcuuauuu

SEQ ID NO: 1339649 - RNA, 19 nt, Artificial Sequence
  Description of Artificial Sequence: Synthetic oligonucleotide
  Antisense strand to SEQ ID NO: 1339648
aaauaagcgacagaguuag

SEQ ID NO: 1339650 - RNA, 19 nt, Artificial Sequence
  Description of Artificial Sequence: Synthetic oligonucleotide
  Sense strand starting at position 2077 of SEQ ID NO: 1242336
ucugcugccguugugauau

SEQ ID NO: 1339651 - RNA, 19 nt, Artificial Sequence
  Description of Artificial Sequence: Synthetic oligonucleotide
  Antisense strand to SEQ ID NO: 1339650
auaucacaacggcagcaga

SEQ ID NO: 1339652 - RNA, 19 nt, Artificial Sequence
  Description of Artificial Sequence: Synthetic oligonucleotide
  Sense strand starting at position 2152 of SEQ ID NO: 1242336
cugagcaaguguucuuagu

SEQ ID NO: 1339653 - RNA, 19 nt, Artificial Sequence
  Description of Artificial Sequence: Synthetic oligonucleotide
  Antisense strand to SEQ ID NO: 1339652
acuaagaacacuugcucag

SEQ ID NO: 1339654 - RNA, 19 nt, Artificial Sequence
  Description of Artificial Sequence: Synthetic oligonucleotide
  Sense strand starting at position 2154 of SEQ ID NO: 1242336
gagcaaguguucuuaguca

SEQ ID NO: 1339655 - RNA, 19 nt, Artificial Sequence
  Description of Artificial Sequence: Synthetic oligonucleotide
  Antisense strand to SEQ ID NO: 1339654
ugacuaagaacacuugcuc

SEQ ID NO: 1339656 - RNA, 19 nt, Artificial Sequence
  Description of Artificial Sequence: Synthetic oligonucleotide
  Sense strand starting at position 2262 of SEQ ID NO: 1242336
uuuggagguuucucuuaag

SEQ ID NO: 1339657 - RNA, 19 nt, Artificial Sequence
  Description of Artificial Sequence: Synthetic oligonucleotide
  Antisense strand to SEQ ID NO: 1339656
cuuaagagaaaccuccaaa

SEQ ID NO: 1339658 - RNA, 19 nt, Artificial Sequence
  Description of Artificial Sequence: Synthetic oligonucleotide
  Sense strand starting at position 2268 of SEQ ID NO: 1242336
gguuucucuuaagcacuau

SEQ ID NO: 1339659 - RNA, 19 nt, Artificial Sequence
  Description of Artificial Sequence: Synthetic oligonucleotide
  Antisense strand to SEQ ID NO: 1339658
auagugcuuaagagaaacc

SEQ ID NO: 1339660 - RNA, 19 nt, Artificial Sequence
  Description of Artificial Sequence: Synthetic oligonucleotide
  Sense strand starting at position 2413 of SEQ ID NO: 1242336
gcccuauggcugugaagac

SEQ ID NO: 1339661 - RNA, 19 nt, Artificial Sequence
  Description of Artificial Sequence: Synthetic oligonucleotide
  Antisense strand to SEQ ID NO: 1339660
gucuucacagccauagggc

SEQ ID NO: 1339662 - RNA, 19 nt, Artificial Sequence
  Description of Artificial Sequence: Synthetic oligonucleotide
  Sense strand starting at position 2585 of SEQ ID NO: 1242336
cuguguuucccugaaauau

SEQ ID NO: 1339663 - RNA, 19 nt, Artificial Sequence
  Description of Artificial Sequence: Synthetic oligonucleotide
  Antisense strand to SEQ ID NO: 1339662
auauuucagggaaacacag

SEQ ID NO: 1339664 - RNA, 19 nt, Artificial Sequence
  Description of Artificial Sequence: Synthetic oligonucleotide
  Sense strand starting at position 2615 of SEQ ID NO: 1242336
aucgacaagcucuaaauau

SEQ ID NO: 1339665 - RNA, 19 nt, Artificial Sequence
  Description of Artificial Sequence: Synthetic oligonucleotide
  Antisense strand to SEQ ID NO: 1339664
auauuuagagcuugucgau

SEQ ID NO: 1339666 - RNA, 19 nt, Artificial Sequence
  Description of Artificial Sequence: Synthetic oligonucleotide
  Sense strand starting at position 2900 of SEQ ID NO: 1242336
gagcuaguucuagagucuc

SEQ ID NO: 1339667 - RNA, 19 nt, Artificial Sequence
  Description of Artificial Sequence: Synthetic oligonucleotide
  Antisense strand to SEQ ID NO: 1339666
gagacucuagaacuagcuc

SEQ ID NO: 1339668 - RNA, 19 nt, Artificial Sequence
  Description of Artificial Sequence: Synthetic oligonucleotide
  Sense strand starting at position 2910 of SEQ ID NO: 1242336
uagagucucucgccaauga

SEQ ID NO: 1339669 - RNA, 19 nt, Artificial Sequence
  Description of Artificial Sequence: Synthetic oligonucleotide
  Antisense strand to SEQ ID NO: 1339668
ucauuggcgagagacucua

SEQ ID NO: 1339670 - RNA, 19 nt, Artificial Sequence
  Description of Artificial Sequence: Synthetic oligonucleotide
  Sense strand starting at position 2914 of SEQ ID NO: 1242336
gucucucgccaaugagaag

SEQ ID NO: 1339671 - RNA, 19 nt, Artificial Sequence
  Description of Artificial Sequence: Synthetic oligonucleotide
  Antisense strand to SEQ ID NO: 1339670
cuucucauuggcgagagac

SEQ ID NO: 1339672 - RNA, 19 nt, Artificial Sequence
  Description of Artificial Sequence: Synthetic oligonucleotide
  Sense strand starting at position 2947 of SEQ ID NO: 1242336
ccaagucaccuggacagua

SEQ ID NO: 1339673 - RNA, 19 nt, Artificial Sequence
  Description of Artificial Sequence: Synthetic oligonucleotide
  Antisense strand to SEQ ID NO: 1339672
uacuguccaggugacuugg

SEQ ID NO: 1339674 - RNA, 19 nt, Artificial Sequence
  Description of Artificial Sequence: Synthetic oligonucleotide
  Sense strand starting at position 2963 of SEQ ID NO: 1242336
guaauuaaccaccgucacu

SEQ ID NO: 1339675 - RNA, 19 nt, Artificial Sequence
  Description of Artificial Sequence: Synthetic oligonucleotide
  Antisense strand to SEQ ID NO: 1339674
agugacggugguuaauuac

SEQ ID NO: 1339676 - RNA, 19 nt, Artificial Sequence
  Description of Artificial Sequence: Synthetic oligonucleotide
  Sense strand starting at position 3040 of SEQ ID NO: 1242336
cgcagaagcccagaaauca

SEQ ID NO: 1339677 - RNA, 19 nt, Artificial Sequence
  Description of Artificial Sequence: Synthetic oligonucleotide
  Antisense strand to SEQ ID NO: 1339676
ugauuucugggcuucugcg

SEQ ID NO: 1339678 - RNA, 19 nt, Artificial Sequence
  Description of Artificial Sequence: Synthetic oligonucleotide
  Sense strand starting at position 3071 of SEQ ID NO: 1242336
gcugcccuugcccaagaau

SEQ ID NO: 1339679 - RNA, 19 nt, Artificial Sequence
  Description of Artificial Sequence: Synthetic oligonucleotide
  Antisense strand to SEQ ID NO: 1339678
auucuugggcaagggcagc

SEQ ID NO: 1339680 - RNA, 19 nt, Artificial Sequence
  Description of Artificial Sequence: Synthetic oligonucleotide
  Sense strand starting at position 3347 of SEQ ID NO: 1242336
aagcaaaggugcuuugaca

SEQ ID NO: 1339681 - RNA, 19 nt, Artificial Sequence
  Description of Artificial Sequence: Synthetic oligonucleotide
  Antisense strand to SEQ ID NO: 1339680
ugucaaagcaccuuugcuu

SEQ ID NO: 1339682 - RNA, 19 nt, Artificial Sequence
  Description of Artificial Sequence: Synthetic oligonucleotide
  Sense strand starting at position 3370 of SEQ ID NO: 1242336
gguguaugcacugauuccu

SEQ ID NO: 1339683 - RNA, 19 nt, Artificial Sequence
  Description of Artificial Sequence: Synthetic oligonucleotide
  Antisense strand to SEQ ID NO: 1339682
aggaaucagugcauacacc

SEQ ID NO: 1339684 - RNA, 19 nt, Artificial Sequence
  Description of Artificial Sequence: Synthetic oligonucleotide
  Sense strand starting at position 3453 of SEQ ID NO: 1242336
acagacacauugggauaua

SEQ ID NO: 1339685 - RNA, 19 nt, Artificial Sequence
  Description of Artificial Sequence: Synthetic oligonucleotide
  Antisense strand to SEQ ID NO: 1339684
uauaucccaaugugucugu

SEQ ID NO: 1339686 - RNA, 19 nt, Artificial Sequence
  Description of Artificial Sequence: Synthetic oligonucleotide
  Sense strand starting at position 3454 of SEQ ID NO: 1242336
cagacacauugggauauau

SEQ ID NO: 1339687 - RNA, 19 nt, Artificial Sequence
  Description of Artificial Sequence: Synthetic oligonucleotide
  Antisense strand to SEQ ID NO: 1339686
auauaucccaaugugucug

SEQ ID NO: 1339688 - RNA, 19 nt, Artificial Sequence
  Description of Artificial Sequence: Synthetic oligonucleotide
  Sense strand starting at position 3654 of SEQ ID NO: 1242336
uaaggaucgggcugauaau

SEQ ID NO: 1339689 - RNA, 19 nt, Artificial Sequence
  Description of Artificial Sequence: Synthetic oligonucleotide
  Antisense strand to SEQ ID NO: 1339688
auuaucagcccgauccuua

SEQ ID NO: 1339690 - RNA, 19 nt, Artificial Sequence
  Description of Artificial Sequence: Synthetic oligonucleotide
  Sense strand starting at position 3786 of SEQ ID NO: 1242336
agucuugcgacaugagcaa

SEQ ID NO: 1339691 - RNA, 19 nt, Artificial Sequence
  Description of Artificial Sequence: Synthetic oligonucleotide
  Antisense strand to SEQ ID NO: 1339690
uugcucaugucgcaagacu

SEQ ID NO: 1339692 - RNA, 19 nt, Artificial Sequence
  Description of Artificial Sequence: Synthetic oligonucleotide
  Sense strand starting at position 3790 of SEQ ID NO: 1242336
uugcgacaugagcaaauaa

SEQ ID NO: 1339693 - RNA, 19 nt, Artificial Sequence
  Description of Artificial Sequence: Synthetic oligonucleotide
  Antisense strand to SEQ ID NO: 1339692
uuauuugcucaugucgcaa

SEQ ID NO: 1339694 - RNA, 19 nt, Artificial Sequence
  Description of Artificial Sequence: Synthetic oligonucleotide
  Sense strand starting at position 3853 of SEQ ID NO: 1242336
aggagaaaugucugaggcu

SEQ ID NO: 1339695 - RNA, 19 nt, Artificial Sequence
  Description of Artificial Sequence: Synthetic oligonucleotide
  Antisense strand to SEQ ID NO: 1339694
agccucagacauuucuccu

SEQ ID NO: 1339696 - RNA, 19 nt, Artificial Sequence
  Description of Artificial Sequence: Synthetic oligonucleotide
  Sense strand starting at position 3917 of SEQ ID NO: 1242336
agacuaucaugagaaaucu

SEQ ID NO: 1339697 - RNA, 19 nt, Artificial Sequence
  Description of Artificial Sequence: Synthetic oligonucleotide
  Antisense strand to SEQ ID NO: 1339696
agauuucucaugauagucu

SEQ ID NO: 1339698 - RNA, 19 nt, Artificial Sequence
  Description of Artificial Sequence: Synthetic oligonucleotide
  Sense strand starting at position 3948 of SEQ ID NO: 1242336
agcaguauggcguuguguu

SEQ ID NO: 1339699 - RNA, 19 nt, Artificial Sequence
  Description of Artificial Sequence: Synthetic oligonucleotide
  Antisense strand to SEQ ID NO: 1339698
aacacaacgccauacugcu

SEQ ID NO: 1339700 - RNA, 19 nt, Artificial Sequence
  Description of Artificial Sequence: Synthetic oligonucleotide
  Sense strand starting at position 3956 of SEQ ID NO: 1242336
ggcguuguguugaccuuga

SEQ ID NO: 1339701 - RNA, 19 nt, Artificial Sequence
  Description of Artificial Sequence: Synthetic oligonucleotide
  Antisense strand to SEQ ID NO: 1339700
ucaaggucaacacaacgcc

SEQ ID NO: 1339702 - RNA, 19 nt, Artificial Sequence
  Description of Artificial Sequence: Synthetic oligonucleotide
  Sense strand starting at position 3960 of SEQ ID NO: 1242336
uuguguugaccuugaggaa

SEQ ID NO: 1339703 - RNA, 19 nt, Artificial Sequence
  Description of Artificial Sequence: Synthetic oligonucleotide
  Antisense strand to SEQ ID NO: 1339702
uuccucaaggucaacacaa

SEQ ID NO: 1339704 - RNA, 19 nt, Artificial Sequence
  Description of Artificial Sequence: Synthetic oligonucleotide
  Sense strand starting at position 3961 of SEQ ID NO: 1242336
uguguugaccuugaggaau

SEQ ID NO: 1339705 - RNA, 19 nt, Artificial Sequence
  Description of Artificial Sequence: Synthetic oligonucleotide
  Antisense strand to SEQ ID NO: 1339704
auuccucaaggucaacaca

SEQ ID NO: 1339706 - RNA, 19 nt, Artificial Sequence
  Description of Artificial Sequence: Synthetic oligonucleotide
  Sense strand starting at position 3972 of SEQ ID NO: 1242336
ugaggaaucuagcuauacu

SEQ ID NO: 1339707 - RNA, 19 nt, Artificial Sequence
  Description of Artificial Sequence: Synthetic oligonucleotide
  Antisense strand to SEQ ID NO: 1339706
aguauagcuagauuccuca

SEQ ID NO: 1339708 - RNA, 19 nt, Artificial Sequence
  Description of Artificial Sequence: Synthetic oligonucleotide
  Sense strand starting at position 19 of SEQ ID NO: 1242337
uuccaaugggcuugaucuu

SEQ ID NO: 1339709 - RNA, 19 nt, Artificial Sequence
  Description of Artificial Sequence: Synthetic oligonucleotide
  Antisense strand to SEQ ID NO: 1339708
aagaucaagcccauuggaa

SEQ ID NO: 1339710 - RNA, 19 nt, Artificial Sequence
  Description of Artificial Sequence: Synthetic oligonucleotide
  Sense strand starting at position 25 of SEQ ID NO: 1242337
ugggcuugaucuuuaucua

SEQ ID NO: 1339711 - RNA, 19 nt, Artificial Sequence
  Description of Artificial Sequence: Synthetic oligonucleotide
  Antisense strand to SEQ ID NO: 1339710
uagauaaagaucaagccca

SEQ ID NO: 1339712 - RNA, 19 nt, Artificial Sequence
  Description of Artificial Sequence: Synthetic oligonucleotide
  Sense strand starting at position 26 of SEQ ID NO: 1242337
gggcuugaucuuuaucuag

SEQ ID NO: 1339713 - RNA, 19 nt, Artificial Sequence
  Description of Artificial Sequence: Synthetic oligonucleotide
  Antisense strand to SEQ ID NO: 1339712
cuagauaaagaucaagccc

SEQ ID NO: 1339714 - RNA, 19 nt, Artificial Sequence
  Description of Artificial Sequence: Synthetic oligonucleotide
  Sense strand starting at position 28 of SEQ ID NO: 1242337
gcuugaucuuuaucuagac

SEQ ID NO: 1339715 - RNA, 19 nt, Artificial Sequence
  Description of Artificial Sequence: Synthetic oligonucleotide
  Antisense strand to SEQ ID NO: 1339714
gucuagauaaagaucaagc

SEQ ID NO: 1339716 - RNA, 19 nt, Artificial Sequence
  Description of Artificial Sequence: Synthetic oligonucleotide
  Sense strand starting at position 128 of SEQ ID NO: 1242337
uugaauucuugggaggaaa

SEQ ID NO: 1339717 - RNA, 19 nt, Artificial Sequence
  Description of Artificial Sequence: Synthetic oligonucleotide
  Antisense strand to SEQ ID NO: 1339716
uuuccucccaagaauucaa

SEQ ID NO: 1339718 - RNA, 19 nt, Artificial Sequence
  Description of Artificial Sequence: Synthetic oligonucleotide
  Sense strand starting at position 170 of SEQ ID NO: 1242337
cucuuaaguagguggagaa

SEQ ID NO: 1339719 - RNA, 19 nt, Artificial Sequence
  Description of Artificial Sequence: Synthetic oligonucleotide
  Antisense strand to SEQ ID NO: 1339718
uucuccaccuacuuaagag

SEQ ID NO: 1339720 - RNA, 19 nt, Artificial Sequence
  Description of Artificial Sequence: Synthetic oligonucleotide
  Sense strand starting at position 171 of SEQ ID NO: 1242337
ucuuaaguagguggagaaa

SEQ ID NO: 1339721 - RNA, 19 nt, Artificial Sequence
  Description of Artificial Sequence: Synthetic oligonucleotide
  Antisense strand to SEQ ID NO: 1339720
uuucuccaccuacuuaaga

SEQ ID NO: 1339722 - RNA, 19 nt, Artificial Sequence
  Description of Artificial Sequence: Synthetic oligonucleotide
  Sense strand starting at position 773 of SEQ ID NO: 1242337
ggccauuuggcccgugaca

SEQ ID NO: 1339723 - RNA, 19 nt, Artificial Sequence
  Description of Artificial Sequence: Synthetic oligonucleotide
  Antisense strand to SEQ ID NO: 1339722
ugucacgggccaaauggcc

SEQ ID NO: 1339724 - RNA, 19 nt, Artificial Sequence
  Description of Artificial Sequence: Synthetic oligonucleotide
  Sense strand starting at position 775 of SEQ ID NO: 1242337
ccauuuggcccgugacauu

SEQ ID NO: 1339725 - RNA, 19 nt, Artificial Sequence
  Description of Artificial Sequence: Synthetic oligonucleotide
  Antisense strand to SEQ ID NO: 1339724
aaugucacgggccaaaugg

SEQ ID NO: 1339726 - RNA, 19 nt, Artificial Sequence
  Description of Artificial Sequence: Synthetic oligonucleotide
  Sense strand starting at position 782 of SEQ ID NO: 1242337
gcccgugacauuguguuua

SEQ ID NO: 1339727 - RNA, 19 nt, Artificial Sequence
  Description of Artificial Sequence: Synthetic oligonucleotide
  Antisense strand to SEQ ID NO: 1339726
uaaacacaaugucacgggc

SEQ ID NO: 1339728 - RNA, 19 nt, Artificial Sequence
  Description of Artificial Sequence: Synthetic oligonucleotide
  Sense strand starting at position 784 of SEQ ID NO: 1242337
ccgugacauuguguuuauu

SEQ ID NO: 1339729 - RNA, 19 nt, Artificial Sequence
  Description of Artificial Sequence: Synthetic oligonucleotide
  Antisense strand to SEQ ID NO: 1339728
aauaaacacaaugucacgg

SEQ ID NO: 1339730 - RNA, 19 nt, Artificial Sequence
  Description of Artificial Sequence: Synthetic oligonucleotide
  Sense strand starting at position 786 of SEQ ID NO: 1242337
gugacauuguguuuauuug

SEQ ID NO: 1339731 - RNA, 19 nt, Artificial Sequence
  Description of Artificial Sequence: Synthetic oligonucleotide
  Antisense strand to SEQ ID NO: 1339730
caaauaaacacaaugucac

SEQ ID NO: 1339732 - RNA, 19 nt, Artificial Sequence
  Description of Artificial Sequence: Synthetic oligonucleotide
  Sense strand starting at position 998 of SEQ ID NO: 1242337
aaaugcuucucuguggagu

SEQ ID NO: 1339733 - RNA, 19 nt, Artificial Sequence
  Description of Artificial Sequence: Synthetic oligonucleotide
  Antisense strand to SEQ ID NO: 1339732
acuccacagagaagcauuu

SEQ ID NO: 1339734 - RNA, 19 nt, Artificial Sequence
  Description of Artificial Sequence: Synthetic oligonucleotide
  Sense strand starting at position 999 of SEQ ID NO: 1242337
aaugcuucucuguggaguu

SEQ ID NO: 1339735 - RNA, 19 nt, Artificial Sequence
  Description of Artificial Sequence: Synthetic oligonucleotide
  Antisense strand to SEQ ID NO: 1339734
aacuccacagagaagcauu

SEQ ID NO: 1339736 - RNA, 19 nt, Artificial Sequence
  Description of Artificial Sequence: Synthetic oligonucleotide
  Sense strand starting at position 1194 of SEQ ID NO: 1242337
cgcagaaaguuaucaaaca

SEQ ID NO: 1339737 - RNA, 19 nt, Artificial Sequence
  Description of Artificial Sequence: Synthetic oligonucleotide
  Antisense strand to SEQ ID NO: 1339736
uguuugauaacuuucugcg

SEQ ID NO: 1339738 - RNA, 19 nt, Artificial Sequence
  Description of Artificial Sequence: Synthetic oligonucleotide
  Sense strand starting at position 1195 of SEQ ID NO: 1242337
gcagaaaguuaucaaacag

SEQ ID NO: 1339739 - RNA, 19 nt, Artificial Sequence
  Description of Artificial Sequence: Synthetic oligonucleotide
  Antisense strand to SEQ ID NO: 1339738
cuguuugauaacuuucugc

SEQ ID NO: 1339740 - RNA, 19 nt, Artificial Sequence
  Description of Artificial Sequence: Synthetic oligonucleotide
  Sense strand starting at position 1686 of SEQ ID NO: 1242337
gcacaucuggcccagcauu

SEQ ID NO: 1339741 - RNA, 19 nt, Artificial Sequence
  Description of Artificial Sequence: Synthetic oligonucleotide
  Antisense strand to SEQ ID NO: 1339740
aaugcugggccagaugugc

SEQ ID NO: 1339742 - RNA, 19 nt, Artificial Sequence
  Description of Artificial Sequence: Synthetic oligonucleotide
  Sense strand starting at position 1793 of SEQ ID NO: 1242337
ccagaaucccagggcugaa

SEQ ID NO: 1339743 - RNA, 19 nt, Artificial Sequence
  Description of Artificial Sequence: Synthetic oligonucleotide
  Antisense strand to SEQ ID NO: 1339742
uucagcccugggauucugg

SEQ ID NO: 1339744 - RNA, 19 nt, Artificial Sequence
  Description of Artificial Sequence: Synthetic oligonucleotide
  Sense strand starting at position 1861 of SEQ ID NO: 1242337
cuagccucucccuggaaga

SEQ ID NO: 1339745 - RNA, 19 nt, Artificial Sequence
  Description of Artificial Sequence: Synthetic oligonucleotide
  Antisense strand to SEQ ID NO: 1339744
ucuuccagggagaggcuag

SEQ ID NO: 1339746 - RNA, 19 nt, Artificial Sequence
  Description of Artificial Sequence: Synthetic oligonucleotide
  Sense strand starting at position 1902 of SEQ ID NO: 1242337
aauaaaucacgcugcgaag

SEQ ID NO: 1339747 - RNA, 19 nt, Artificial Sequence
  Description of Artificial Sequence: Synthetic oligonucleotide
  Antisense strand to SEQ ID NO: 1339746
cuucgcagcgugauuuauu

SEQ ID NO: 1339748 - RNA, 19 nt, Artificial Sequence
  Description of Artificial Sequence: Synthetic oligonucleotide
  Sense strand starting at position 2502 of SEQ ID NO: 1242337
uuccgaguugucuaggucu

SEQ ID NO: 1339749 - RNA, 19 nt, Artificial Sequence
  Description of Artificial Sequence: Synthetic oligonucleotide
  Antisense strand to SEQ ID NO: 1339748
agaccuagacaacucggaa

SEQ ID NO: 1339750 - RNA, 19 nt, Artificial Sequence
  Description of Artificial Sequence: Synthetic oligonucleotide
  Sense strand starting at position 2638 of SEQ ID NO: 1242337
ccucgcugcuuccugaaga

SEQ ID NO: 1339751 - RNA, 19 nt, Artificial Sequence
  Description of Artificial Sequence: Synthetic oligonucleotide
  Antisense strand to SEQ ID NO: 1339750
ucuucaggaagcagcgagg

SEQ ID NO: 1339752 - RNA, 19 nt, Artificial Sequence
  Description of Artificial Sequence: Synthetic oligonucleotide
  Sense strand starting at position 2718 of SEQ ID NO: 1242337
gcugccacuccagagagau

SEQ ID NO: 1339753 - RNA, 19 nt, Artificial Sequence
  Description of Artificial Sequence: Synthetic oligonucleotide
  Antisense strand to SEQ ID NO: 1339752
aucucucuggaguggcagc

SEQ ID NO: 1339754 - RNA, 19 nt, Artificial Sequence
  Description of Artificial Sequence: Synthetic oligonucleotide
  Sense strand starting at position 2724 of SEQ ID NO: 1242337
acuccagagagauggcuau

SEQ ID NO: 1339755 - RNA, 19 nt, Artificial Sequence
  Description of Artificial Sequence: Synthetic oligonucleotide
  Antisense strand to SEQ ID NO: 1339754
auagccaucucucuggagu

SEQ ID NO: 1339756 - RNA, 19 nt, Artificial Sequence
  Description of Artificial Sequence: Synthetic oligonucleotide
  Sense strand starting at position 2837 of SEQ ID NO: 1242337
cuaacucugucgcuuauuu

SEQ ID NO: 1339757 - RNA, 19 nt, Artificial Sequence
  Description of Artificial Sequence: Synthetic oligonucleotide
  Antisense strand to SEQ ID NO: 1339756
aaauaagcgacagaguuag

SEQ ID NO: 1339758 - RNA, 19 nt, Artificial Sequence
  Description of Artificial Sequence: Synthetic oligonucleotide
  Sense strand starting at position 2904 of SEQ ID NO: 1242337
ucugcugccguugugauau

SEQ ID NO: 1339759 - RNA, 19 nt, Artificial Sequence
  Description of Artificial Sequence: Synthetic oligonucleotide
  Antisense strand to SEQ ID NO: 1339758
auaucacaacggcagcaga

SEQ ID NO: 1339760 - RNA, 19 nt, Artificial Sequence
  Description of Artificial Sequence: Synthetic oligonucleotide
  Sense strand starting at position 2979 of SEQ ID NO: 1242337
cugagcaaguguucuuagu

SEQ ID NO: 1339761 - RNA, 19 nt, Artificial Sequence
  Description of Artificial Sequence: Synthetic oligonucleotide
  Antisense strand to SEQ ID NO: 1339760
acuaagaacacuugcucag

SEQ ID NO: 1339762 - RNA, 19 nt, Artificial Sequence
  Description of Artificial Sequence: Synthetic oligonucleotide
  Sense strand starting at position 2981 of SEQ ID NO: 1242337
gagcaaguguucuuaguca

SEQ ID NO: 1339763 - RNA, 19 nt, Artificial Sequence
  Description of Artificial Sequence: Synthetic oligonucleotide
  Antisense strand to SEQ ID NO: 1339762
ugacuaagaacacuugcuc

SEQ ID NO: 1339764 - RNA, 19 nt, Artificial Sequence
  Description of Artificial Sequence: Synthetic oligonucleotide
  Sense strand starting at position 3089 of SEQ ID NO: 1242337
uuuggagguuucucuuaag

SEQ ID NO: 1339765 - RNA, 19 nt, Artificial Sequence
  Description of Artificial Sequence: Synthetic oligonucleotide
  Antisense strand to SEQ ID NO: 1339764
cuuaagagaaaccuccaaa

SEQ ID NO: 1339766 - RNA, 19 nt, Artificial Sequence
  Description of Artificial Sequence: Synthetic oligonucleotide
  Sense strand starting at position 3095 of SEQ ID NO: 1242337
gguuucucuuaagcacuau

SEQ ID NO: 1339767 - RNA, 19 nt, Artificial Sequence
  Description of Artificial Sequence: Synthetic oligonucleotide
  Antisense strand to SEQ ID NO: 1339766
auagugcuuaagagaaacc

SEQ ID NO: 1339768 - RNA, 19 nt, Artificial Sequence
  Description of Artificial Sequence: Synthetic oligonucleotide
  Sense strand starting at position 3240 of SEQ ID NO: 1242337
gcccuauggcugugaagac

SEQ ID NO: 1339769 - RNA, 19 nt, Artificial Sequence
  Description of Artificial Sequence: Synthetic oligonucleotide
  Antisense strand to SEQ ID NO: 1339768
gucuucacagccauagggc

SEQ ID NO: 1339770 - RNA, 19 nt, Artificial Sequence
  Description of Artificial Sequence: Synthetic oligonucleotide
  Sense strand starting at position 3412 of SEQ ID NO: 1242337
cuguguuucccugaaauau

SEQ ID NO: 1339771 - RNA, 19 nt, Artificial Sequence
  Description of Artificial Sequence: Synthetic oligonucleotide
  Antisense strand to SEQ ID NO: 1339770
auauuucagggaaacacag

SEQ ID NO: 1339772 - RNA, 19 nt, Artificial Sequence
  Description of Artificial Sequence: Synthetic oligonucleotide
  Sense strand starting at position 3442 of SEQ ID NO: 1242337
aucgacaagcucuaaauau

SEQ ID NO: 1339773 - RNA, 19 nt, Artificial Sequence
  Description of Artificial Sequence: Synthetic oligonucleotide
  Antisense strand to SEQ ID NO: 1339772
auauuuagagcuugucgau

SEQ ID NO: 1339774 - RNA, 19 nt, Artificial Sequence
  Description of Artificial Sequence: Synthetic oligonucleotide
  Sense strand starting at position 3727 of SEQ ID NO: 1242337
gagcuaguucuagagucuc

SEQ ID NO: 1339775 - RNA, 19 nt, Artificial Sequence
  Description of Artificial Sequence: Synthetic oligonucleotide
  Antisense strand to SEQ ID NO: 1339774
gagacucuagaacuagcuc

SEQ ID NO: 1339776 - RNA, 19 nt, Artificial Sequence
  Description of Artificial Sequence: Synthetic oligonucleotide
  Sense strand starting at position 3737 of SEQ ID NO: 1242337
uagagucucucgccaauga

SEQ ID NO: 1339777 - RNA, 19 nt, Artificial Sequence
  Description of Artificial Sequence: Synthetic oligonucleotide
  Antisense strand to SEQ ID NO: 1339776
ucauuggcgagagacucua

SEQ ID NO: 1339778 - RNA, 19 nt, Artificial Sequence
  Description of Artificial Sequence: Synthetic oligonucleotide
  Sense strand starting at position 3741 of SEQ ID NO: 1242337
gucucucgccaaugagaag

SEQ ID NO: 1339779 - RNA, 19 nt, Artificial Sequence
  Description of Artificial Sequence: Synthetic oligonucleotide
  Antisense strand to SEQ ID NO: 1339778
cuucucauuggcgagagac

SEQ ID NO: 1339780 - RNA, 19 nt, Artificial Sequence
  Description of Artificial Sequence: Synthetic oligonucleotide
  Sense strand starting at position 3774 of SEQ ID NO: 1242337
ccaagucaccuggacagua

SEQ ID NO: 1339781 - RNA, 19 nt, Artificial Sequence
  Description of Artificial Sequence: Synthetic oligonucleotide
  Antisense strand to SEQ ID NO: 1339780
uacuguccaggugacuugg

SEQ ID NO: 1339782 - RNA, 19 nt, Artificial Sequence
  Description of Artificial Sequence: Synthetic oligonucleotide
  Sense strand starting at position 3790 of SEQ ID NO: 1242337
guaauuaaccaccgucacu

SEQ ID NO: 1339783 - RNA, 19 nt, Artificial Sequence
  Description of Artificial Sequence: Synthetic oligonucleotide
  Antisense strand to SEQ ID NO: 1339782
agugacggugguuaauuac

SEQ ID NO: 1339784 - RNA, 19 nt, Artificial Sequence
  Description of Artificial Sequence: Synthetic oligonucleotide
  Sense strand starting at position 3867 of SEQ ID NO: 1242337
cgcagaagcccagaaauca

SEQ ID NO: 1339785 - RNA, 19 nt, Artificial Sequence
  Description of Artificial Sequence: Synthetic oligonucleotide
  Antisense strand to SEQ ID NO: 1339784
ugauuucugggcuucugcg

SEQ ID NO: 1339786 - RNA, 19 nt, Artificial Sequence
  Description of Artificial Sequence: Synthetic oligonucleotide
  Sense strand starting at position 3898 of SEQ ID NO: 1242337
gcugcccuugcccaagaau

SEQ ID NO: 1339787 - RNA, 19 nt, Artificial Sequence
  Description of Artificial Sequence: Synthetic oligonucleotide
  Antisense strand to SEQ ID NO: 1339786
auucuugggcaagggcagc

SEQ ID NO: 1339788 - RNA, 19 nt, Artificial Sequence
  Description of Artificial Sequence: Synthetic oligonucleotide
  Sense strand starting at position 167 of SEQ ID NO: 1242338
cagggaugcucagucccua

SEQ ID NO: 1339789 - RNA, 19 nt, Artificial Sequence
  Description of Artificial Sequence: Synthetic oligonucleotide
  Antisense strand to SEQ ID NO: 1339788
uagggacugagcaucccug

SEQ ID NO: 1339790 - RNA, 19 nt, Artificial Sequence
  Description of Artificial Sequence: Synthetic oligonucleotide
  Sense strand starting at position 209 of SEQ ID NO: 1242338
gucuaagaauucuugggcu

SEQ ID NO: 1339791 - RNA, 19 nt, Artificial Sequence
  Description of Artificial Sequence: Synthetic oligonucleotide
  Antisense strand to SEQ ID NO: 1339790
agcccaagaauucuuagac

SEQ ID NO: 1339792 - RNA, 19 nt, Artificial Sequence
  Description of Artificial Sequence: Synthetic oligonucleotide
  Sense strand starting at position 211 of SEQ ID NO: 1242338
cuaagaauucuugggcuug

SEQ ID NO: 1339793 - RNA, 19 nt, Artificial Sequence
  Description of Artificial Sequence: Synthetic oligonucleotide
  Antisense strand to SEQ ID NO: 1339792
caagcccaagaauucuuag

SEQ ID NO: 1339794 - RNA, 19 nt, Artificial Sequence
  Description of Artificial Sequence: Synthetic oligonucleotide
  Sense strand starting at position 250 of SEQ ID NO: 1242338
agagcaagggauuguauua

SEQ ID NO: 1339795 - RNA, 19 nt, Artificial Sequence
  Description of Artificial Sequence: Synthetic oligonucleotide
  Antisense strand to SEQ ID NO: 1339794
uaauacaaucccuugcucu

SEQ ID NO: 1339796 - RNA, 19 nt, Artificial Sequence
  Description of Artificial Sequence: Synthetic oligonucleotide
  Sense strand starting at position 321 of SEQ ID NO: 1242338
gcaaguuauuccuuggagg

SEQ ID NO: 1339797 - RNA, 19 nt, Artificial Sequence
  Description of Artificial Sequence: Synthetic oligonucleotide
  Antisense strand to SEQ ID NO: 1339796
ccuccaaggaauaacuugc

SEQ ID NO: 1339798 - RNA, 19 nt, Artificial Sequence
  Description of Artificial Sequence: Synthetic oligonucleotide
  Sense strand starting at position 322 of SEQ ID NO: 1242338
caaguuauuccuuggagga

SEQ ID NO: 1339799 - RNA, 19 nt, Artificial Sequence
  Description of Artificial Sequence: Synthetic oligonucleotide
  Antisense strand to SEQ ID NO: 1339798
uccuccaaggaauaacuug

SEQ ID NO: 1339800 - RNA, 19 nt, Artificial Sequence
  Description of Artificial Sequence: Synthetic oligonucleotide
  Sense strand starting at position 323 of SEQ ID NO: 1242338
aaguuauuccuuggaggag

SEQ ID NO: 1339801 - RNA, 19 nt, Artificial Sequence
  Description of Artificial Sequence: Synthetic oligonucleotide
  Antisense strand to SEQ ID NO: 1339800
cuccuccaaggaauaacuu

SEQ ID NO: 1339802 - RNA, 19 nt, Artificial Sequence
  Description of Artificial Sequence: Synthetic oligonucleotide
  Sense strand starting at position 388 of SEQ ID NO: 1242338
aggugcccuccuugaauga

SEQ ID NO: 1339803 - RNA, 19 nt, Artificial Sequence
  Description of Artificial Sequence: Synthetic oligonucleotide
  Antisense strand to SEQ ID NO: 1339802
ucauucaaggagggcaccu

SEQ ID NO: 1339804 - RNA, 19 nt, Artificial Sequence
  Description of Artificial Sequence: Synthetic oligonucleotide
  Sense strand starting at position 408 of SEQ ID NO: 1242338
augccaagcuauucuaaga

SEQ ID NO: 1339805 - RNA, 19 nt, Artificial Sequence
  Description of Artificial Sequence: Synthetic oligonucleotide
  Antisense strand to SEQ ID NO: 1339804
ucuuagaauagcuuggcau

SEQ ID NO: 1339806 - RNA, 19 nt, Artificial Sequence
  Description of Artificial Sequence: Synthetic oligonucleotide
  Sense strand starting at position 423 of SEQ ID NO: 1242338
aagaccucgucugucacaa

SEQ ID NO: 1339807 - RNA, 19 nt, Artificial Sequence
  Description of Artificial Sequence: Synthetic oligonucleotide
  Antisense strand to SEQ ID NO: 1339806
uugugacagacgaggucuu

SEQ ID NO: 1339808 - RNA, 19 nt, Artificial Sequence
  Description of Artificial Sequence: Synthetic oligonucleotide
  Sense strand starting at position 534 of SEQ ID NO: 1242338
ggagaauguaagcaacugu

SEQ ID NO: 1339809 - RNA, 19 nt, Artificial Sequence
  Description of Artificial Sequence: Synthetic oligonucleotide
  Antisense strand to SEQ ID NO: 1339808
acaguugcuuacauucucc

SEQ ID NO: 1339810 - RNA, 19 nt, Artificial Sequence
  Description of Artificial Sequence: Synthetic oligonucleotide
  Sense strand starting at position 851 of SEQ ID NO: 1242338
cccaguuguuaauuggaga

SEQ ID NO: 1339811 - RNA, 19 nt, Artificial Sequence
  Description of Artificial Sequence: Synthetic oligonucleotide
  Antisense strand to SEQ ID NO: 1339810
ucuccaauuaacaacuggg

SEQ ID NO: 1339812 - RNA, 19 nt, Artificial Sequence
  Description of Artificial Sequence: Synthetic oligonucleotide
  Sense strand starting at position 852 of SEQ ID NO: 1242338
ccaguuguuaauuggagau

SEQ ID NO: 1339813 - RNA, 19 nt, Artificial Sequence
  Description of Artificial Sequence: Synthetic oligonucleotide
  Antisense strand to SEQ ID NO: 1339812
aucuccaauuaacaacugg

SEQ ID NO: 1339814 - RNA, 19 nt, Artificial Sequence
  Description of Artificial Sequence: Synthetic oligonucleotide
  Sense strand starting at position 864 of SEQ ID NO: 1242338
uggagaucaugucccugua

SEQ ID NO: 1339815 - RNA, 19 nt, Artificial Sequence
  Description of Artificial Sequence: Synthetic oligonucleotide
  Antisense strand to SEQ ID NO: 1339814
uacagggacaugaucucca

SEQ ID NO: 1339816 - RNA, 19 nt, Artificial Sequence
  Description of Artificial Sequence: Synthetic oligonucleotide
  Sense strand starting at position 866 of SEQ ID NO: 1242338
gagaucaugucccuguaaa

SEQ ID NO: 1339817 - RNA, 19 nt, Artificial Sequence
  Description of Artificial Sequence: Synthetic oligonucleotide
  Antisense strand to SEQ ID NO: 1339816
uuuacagggacaugaucuc

SEQ ID NO: 1339818 - RNA, 19 nt, Artificial Sequence
  Description of Artificial Sequence: Synthetic oligonucleotide
  Sense strand starting at position 867 of SEQ ID NO: 1242338
agaucaugucccuguaaag

SEQ ID NO: 1339819 - RNA, 19 nt, Artificial Sequence
  Description of Artificial Sequence: Synthetic oligonucleotide
  Antisense strand to SEQ ID NO: 1339818
cuuuacagggacaugaucu

SEQ ID NO: 1339820 - RNA, 19 nt, Artificial Sequence
  Description of Artificial Sequence: Synthetic oligonucleotide
  Sense strand starting at position 1107 of SEQ ID NO: 1242338
guuugugaugcacaggaga

SEQ ID NO: 1339821 - RNA, 19 nt, Artificial Sequence
  Description of Artificial Sequence: Synthetic oligonucleotide
  Antisense strand to SEQ ID NO: 1339820
ucuccugugcaucacaaac

SEQ ID NO: 1339822 - RNA, 19 nt, Artificial Sequence
  Description of Artificial Sequence: Synthetic oligonucleotide
  Sense strand starting at position 1125 of SEQ ID NO: 1242338
aagacagagguuugugcau

SEQ ID NO: 1339823 - RNA, 19 nt, Artificial Sequence
  Description of Artificial Sequence: Synthetic oligonucleotide
  Antisense strand to SEQ ID NO: 1339822
augcacaaaccucugucuu

SEQ ID NO: 1339824 - RNA, 19 nt, Artificial Sequence
  Description of Artificial Sequence: Synthetic oligonucleotide
  Sense strand starting at position 1150 of SEQ ID NO: 1242338
ucaagaucucugcaccaga

SEQ ID NO: 1339825 - RNA, 19 nt, Artificial Sequence
  Description of Artificial Sequence: Synthetic oligonucleotide
  Antisense strand to SEQ ID NO: 1339824
ucuggugcagagaucuuga

SEQ ID NO: 1339826 - RNA, 19 nt, Artificial Sequence
  Description of Artificial Sequence: Synthetic oligonucleotide
  Sense strand starting at position 1421 of SEQ ID NO: 1242338
caccuugugcgggagacua

SEQ ID NO: 1339827 - RNA, 19 nt, Artificial Sequence
  Description of Artificial Sequence: Synthetic oligonucleotide
  Antisense strand to SEQ ID NO: 1339826
uagucucccgcacaaggug

SEQ ID NO: 1339828 - RNA, 19 nt, Artificial Sequence
  Description of Artificial Sequence: Synthetic oligonucleotide
  Sense strand starting at position 1429 of SEQ ID NO: 1242338
gcgggagacuacuuugaga

SEQ ID NO: 1339829 - RNA, 19 nt, Artificial Sequence
  Description of Artificial Sequence: Synthetic oligonucleotide
  Antisense strand to SEQ ID NO: 1339828
ucucaaaguagucucccgc

SEQ ID NO: 1339830 - RNA, 19 nt, Artificial Sequence
  Description of Artificial Sequence: Synthetic oligonucleotide
  Sense strand starting at position 1615 of SEQ ID NO: 1242338
aucucaauuugggagaacu

SEQ ID NO: 1339831 - RNA, 19 nt, Artificial Sequence
  Description of Artificial Sequence: Synthetic oligonucleotide
  Antisense strand to SEQ ID NO: 1339830
aguucucccaaauugagau

SEQ ID NO: 1339832 - RNA, 19 nt, Artificial Sequence
  Description of Artificial Sequence: Synthetic oligonucleotide
  Sense strand starting at position 2258 of SEQ ID NO: 1242338
cuccaaaugugggcaagau

SEQ ID NO: 1339833 - RNA, 19 nt, Artificial Sequence
  Description of Artificial Sequence: Synthetic oligonucleotide
  Antisense strand to SEQ ID NO: 1339832
aucuugcccacauuuggag

SEQ ID NO: 1339834 - RNA, 19 nt, Artificial Sequence
  Description of Artificial Sequence: Synthetic oligonucleotide
  Sense strand starting at position 2943 of SEQ ID NO: 1242338
agucaagacuccuugaaug

SEQ ID NO: 1339835 - RNA, 19 nt, Artificial Sequence
  Description of Artificial Sequence: Synthetic oligonucleotide
  Antisense strand to SEQ ID NO: 1339834
cauucaaggagucuugacu

SEQ ID NO: 1339836 - RNA, 19 nt, Artificial Sequence
  Description of Artificial Sequence: Synthetic oligonucleotide
  Sense strand starting at position 2945 of SEQ ID NO: 1242338
ucaagacuccuugaaugcu

SEQ ID NO: 1339837 - RNA, 19 nt, Artificial Sequence
  Description of Artificial Sequence: Synthetic oligonucleotide
  Antisense strand to SEQ ID NO: 1339836
agcauucaaggagucuuga

SEQ ID NO: 1339838 - RNA, 19 nt, Artificial Sequence
  Description of Artificial Sequence: Synthetic oligonucleotide
  Sense strand starting at position 3081 of SEQ ID NO: 1242338
gggaguuccucugagauuu

SEQ ID NO: 1339839 - RNA, 19 nt, Artificial Sequence
  Description of Artificial Sequence: Synthetic oligonucleotide
  Antisense strand to SEQ ID NO: 1339838
aaaucucagaggaacuccc

SEQ ID NO: 1339840 - RNA, 19 nt, Artificial Sequence
  Description of Artificial Sequence: Synthetic oligonucleotide
  Sense strand starting at position 3089 of SEQ ID NO: 1242338
cucugagauuucuggagaa

SEQ ID NO: 1339841 - RNA, 19 nt, Artificial Sequence
  Description of Artificial Sequence: Synthetic oligonucleotide
  Antisense strand to SEQ ID NO: 1339840
uucuccagaaaucucagag

SEQ ID NO: 1339842 - RNA, 19 nt, Artificial Sequence
  Description of Artificial Sequence: Synthetic oligonucleotide
  Sense strand starting at position 3108 of SEQ ID NO: 1242338
ggcgguuacauccaagaca

SEQ ID NO: 1339843 - RNA, 19 nt, Artificial Sequence
  Description of Artificial Sequence: Synthetic oligonucleotide
  Antisense strand to SEQ ID NO: 1339842
ugucuuggauguaaccgcc

SEQ ID NO: 1339844 - RNA, 19 nt, Artificial Sequence
  Description of Artificial Sequence: Synthetic oligonucleotide
  Sense strand starting at position 3153 of SEQ ID NO: 1242338
accuuuguucuauagagau

SEQ ID NO: 1339845 - RNA, 19 nt, Artificial Sequence
  Description of Artificial Sequence: Synthetic oligonucleotide
  Antisense strand to SEQ ID NO: 1339844
aucucuauagaacaaaggu

SEQ ID NO: 1339846 - RNA, 19 nt, Artificial Sequence
  Description of Artificial Sequence: Synthetic oligonucleotide
  Sense strand starting at position 3181 of SEQ ID NO: 1242338
guuuaagaaucuuccugaa

SEQ ID NO: 1339847 - RNA, 19 nt, Artificial Sequence
  Description of Artificial Sequence: Synthetic oligonucleotide
  Antisense strand to SEQ ID NO: 1339846
uucaggaagauucuuaaac

SEQ ID NO: 1339848 - RNA, 19 nt, Artificial Sequence
  Description of Artificial Sequence: Synthetic oligonucleotide
  Sense strand starting at position 3237 of SEQ ID NO: 1242338
uacauucuugcguagaauu

SEQ ID NO: 1339849 - RNA, 19 nt, Artificial Sequence
  Description of Artificial Sequence: Synthetic oligonucleotide
  Antisense strand to SEQ ID NO: 1339848
aauucuacgcaagaaugua

SEQ ID NO: 1339850 - RNA, 19 nt, Artificial Sequence
  Description of Artificial Sequence: Synthetic oligonucleotide
  Sense strand starting at position 3247 of SEQ ID NO: 1242338
cguagaauuguacauaacu

SEQ ID NO: 1339851 - RNA, 19 nt, Artificial Sequence
  Description of Artificial Sequence: Synthetic oligonucleotide
  Antisense strand to SEQ ID NO: 1339850
aguuauguacaauucuacg

SEQ ID NO: 1339852 - RNA, 19 nt, Artificial Sequence
  Description of Artificial Sequence: Synthetic oligonucleotide
  Sense strand starting at position 3412 of SEQ ID NO: 1242338
acagauugcgaguggaauc

SEQ ID NO: 1339853 - RNA, 19 nt, Artificial Sequence
  Description of Artificial Sequence: Synthetic oligonucleotide
  Antisense strand to SEQ ID NO: 1339852
gauuccacucgcaaucugu

SEQ ID NO: 1339854 - RNA, 19 nt, Artificial Sequence
  Description of Artificial Sequence: Synthetic oligonucleotide
  Sense strand starting at position 3538 of SEQ ID NO: 1242338
gaaggacccuugcugugaa

SEQ ID NO: 1339855 - RNA, 19 nt, Artificial Sequence
  Description of Artificial Sequence: Synthetic oligonucleotide
  Antisense strand to SEQ ID NO: 1339854
uucacagcaaggguccuuc

SEQ ID NO: 1339856 - RNA, 19 nt, Artificial Sequence
  Description of Artificial Sequence: Synthetic oligonucleotide
  Sense strand starting at position 3541 of SEQ ID NO: 1242338
ggacccuugcugugaaaca

SEQ ID NO: 1339857 - RNA, 19 nt, Artificial Sequence
  Description of Artificial Sequence: Synthetic oligonucleotide
  Antisense strand to SEQ ID NO: 1339856
uguuucacagcaagggucc

SEQ ID NO: 1339858 - RNA, 19 nt, Artificial Sequence
  Description of Artificial Sequence: Synthetic oligonucleotide
  Sense strand starting at position 3608 of SEQ ID NO: 1242338
gcgugaagucggucugguu

SEQ ID NO: 1339859 - RNA, 19 nt, Artificial Sequence
  Description of Artificial Sequence: Synthetic oligonucleotide
  Antisense strand to SEQ ID NO: 1339858
aaccagaccgacuucacgc

SEQ ID NO: 1339860 - RNA, 19 nt, Artificial Sequence
  Description of Artificial Sequence: Synthetic oligonucleotide
  Sense strand starting at position 3609 of SEQ ID NO: 1242338
cgugaagucggucugguua

SEQ ID NO: 1339861 - RNA, 19 nt, Artificial Sequence
  Description of Artificial Sequence: Synthetic oligonucleotide
  Antisense strand to SEQ ID NO: 1339860
uaaccagaccgacuucacg

SEQ ID NO: 1339862 - RNA, 19 nt, Artificial Sequence
  Description of Artificial Sequence: Synthetic oligonucleotide
  Sense strand starting at position 3675 of SEQ ID NO: 1242338
guacauucuagacaggguu

SEQ ID NO: 1339863 - RNA, 19 nt, Artificial Sequence
  Description of Artificial Sequence: Synthetic oligonucleotide
  Antisense strand to SEQ ID NO: 1339862
aacccugucuagaauguac

SEQ ID NO: 1339864 - RNA, 19 nt, Artificial Sequence
  Description of Artificial Sequence: Synthetic oligonucleotide
  Sense strand starting at position 3855 of SEQ ID NO: 1242338
ugucaaguguauuuguaua

SEQ ID NO: 1339865 - RNA, 19 nt, Artificial Sequence
  Description of Artificial Sequence: Synthetic oligonucleotide
  Antisense strand to SEQ ID NO: 1339864
uauacaaauacacuugaca

SEQ ID NO: 1339866 - RNA, 19 nt, Artificial Sequence
  Description of Artificial Sequence: Synthetic oligonucleotide
  Sense strand starting at position 3899 of SEQ ID NO: 1242338
uuaagugguuuagcaggaa

SEQ ID NO: 1339867 - RNA, 19 nt, Artificial Sequence
  Description of Artificial Sequence: Synthetic oligonucleotide
  Antisense strand to SEQ ID NO: 1339866
uuccugcuaaaccacuuaa

SEQ ID NO: 1339868 - RNA, 19 nt, Artificial Sequence
  Description of Artificial Sequence: Synthetic oligonucleotide
  Sense strand starting at position 223 of SEQ ID NO: 1242339
ggccauuuggcccgugaca

SEQ ID NO: 1339869 - RNA, 19 nt, Artificial Sequence
  Description of Artificial Sequence: Synthetic oligonucleotide
  Antisense strand to SEQ ID NO: 1339868
ugucacgggccaaauggcc

SEQ ID NO: 1339870 - RNA, 19 nt, Artificial Sequence
  Description of Artificial Sequence: Synthetic oligonucleotide
  Sense strand starting at position 225 of SEQ ID NO: 1242339
ccauuuggcccgugacauu

SEQ ID NO: 1339871 - RNA, 19 nt, Artificial Sequence
  Description of Artificial Sequence: Synthetic oligonucleotide
  Antisense strand to SEQ ID NO: 1339870
aaugucacgggccaaaugg

SEQ ID NO: 1339872 - RNA, 19 nt, Artificial Sequence
  Description of Artificial Sequence: Synthetic oligonucleotide
  Sense strand starting at position 232 of SEQ ID NO: 1242339
gcccgugacauuguguuua

SEQ ID NO: 1339873 - RNA, 19 nt, Artificial Sequence
  Description of Artificial Sequence: Synthetic oligonucleotide
  Antisense strand to SEQ ID NO: 1339872
uaaacacaaugucacgggc

SEQ ID NO: 1339874 - RNA, 19 nt, Artificial Sequence
  Description of Artificial Sequence: Synthetic oligonucleotide
  Sense strand starting at position 234 of SEQ ID NO: 1242339
ccgugacauuguguuuauu

SEQ ID NO: 1339875 - RNA, 19 nt, Artificial Sequence
  Description of Artificial Sequence: Synthetic oligonucleotide
  Antisense strand to SEQ ID NO: 1339874
aauaaacacaaugucacgg

SEQ ID NO: 1339876 - RNA, 19 nt, Artificial Sequence
  Description of Artificial Sequence: Synthetic oligonucleotide
  Sense strand starting at position 236 of SEQ ID NO: 1242339
gugacauuguguuuauuug

SEQ ID NO: 1339877 - RNA, 19 nt, Artificial Sequence
  Description of Artificial Sequence: Synthetic oligonucleotide
  Antisense strand to SEQ ID NO: 1339876
caaauaaacacaaugucac

SEQ ID NO: 1339878 - RNA, 19 nt, Artificial Sequence
  Description of Artificial Sequence: Synthetic oligonucleotide
  Sense strand starting at position 448 of SEQ ID NO: 1242339
aaaugcuucucuguggagu

SEQ ID NO: 1339879 - RNA, 19 nt, Artificial Sequence
  Description of Artificial Sequence: Synthetic oligonucleotide
  Antisense strand to SEQ ID NO: 1339878
acuccacagagaagcauuu

SEQ ID NO: 1339880 - RNA, 19 nt, Artificial Sequence
  Description of Artificial Sequence: Synthetic oligonucleotide
  Sense strand starting at position 449 of SEQ ID NO: 1242339
aaugcuucucuguggaguu

SEQ ID NO: 1339881 - RNA, 19 nt, Artificial Sequence
  Description of Artificial Sequence: Synthetic oligonucleotide
  Antisense strand to SEQ ID NO: 1339880
aacuccacagagaagcauu

SEQ ID NO: 1339882 - RNA, 19 nt, Artificial Sequence
  Description of Artificial Sequence: Synthetic oligonucleotide
  Sense strand starting at position 644 of SEQ ID NO: 1242339
cgcagaaaguuaucaaaca

SEQ ID NO: 1339883 - RNA, 19 nt, Artificial Sequence
  Description of Artificial Sequence: Synthetic oligonucleotide
  Antisense strand to SEQ ID NO: 1339882
uguuugauaacuuucugcg

SEQ ID NO: 1339884 - RNA, 19 nt, Artificial Sequence
  Description of Artificial Sequence: Synthetic oligonucleotide
  Sense strand starting at position 645 of SEQ ID NO: 1242339
gcagaaaguuaucaaacag

SEQ ID NO: 1339885 - RNA, 19 nt, Artificial Sequence
  Description of Artificial Sequence: Synthetic oligonucleotide
  Antisense strand to SEQ ID NO: 1339884
cuguuugauaacuuucugc

SEQ ID NO: 1339886 - RNA, 19 nt, Artificial Sequence
  Description of Artificial Sequence: Synthetic oligonucleotide
  Sense strand starting at position 1136 of SEQ ID NO: 1242339
gcacaucuggcccagcauu

SEQ ID NO: 1339887 - RNA, 19 nt, Artificial Sequence
  Description of Artificial Sequence: Synthetic oligonucleotide
  Antisense strand to SEQ ID NO: 1339886
aaugcugggccagaugugc

SEQ ID NO: 1339888 - RNA, 19 nt, Artificial Sequence
  Description of Artificial Sequence: Synthetic oligonucleotide
  Sense strand starting at position 1243 of SEQ ID NO: 1242339
ccagaaucccagggcugaa

SEQ ID NO: 1339889 - RNA, 19 nt, Artificial Sequence
  Description of Artificial Sequence: Synthetic oligonucleotide
  Antisense strand to SEQ ID NO: 1339888
uucagcccugggauucugg

SEQ ID NO: 1339890 - RNA, 19 nt, Artificial Sequence
  Description of Artificial Sequence: Synthetic oligonucleotide
  Sense strand starting at position 1311 of SEQ ID NO: 1242339
cuagccucucccuggaaga

SEQ ID NO: 1339891 - RNA, 19 nt, Artificial Sequence
  Description of Artificial Sequence: Synthetic oligonucleotide
  Antisense strand to SEQ ID NO: 1339890
ucuuccagggagaggcuag

SEQ ID NO: 1339892 - RNA, 19 nt, Artificial Sequence
  Description of Artificial Sequence: Synthetic oligonucleotide
  Sense strand starting at position 1352 of SEQ ID NO: 1242339
aauaaaucacgcugcgaag

SEQ ID NO: 1339893 - RNA, 19 nt, Artificial Sequence
  Description of Artificial Sequence: Synthetic oligonucleotide
  Antisense strand to SEQ ID NO: 1339892
cuucgcagcgugauuuauu

SEQ ID NO: 1339894 - RNA, 19 nt, Artificial Sequence
  Description of Artificial Sequence: Synthetic oligonucleotide
  Sense strand starting at position 1952 of SEQ ID NO: 1242339
uuccgaguugucuaggucu

SEQ ID NO: 1339895 - RNA, 19 nt, Artificial Sequence
  Description of Artificial Sequence: Synthetic oligonucleotide
  Antisense strand to SEQ ID NO: 1339894
agaccuagacaacucggaa

SEQ ID NO: 1339896 - RNA, 19 nt, Artificial Sequence
  Description of Artificial Sequence: Synthetic oligonucleotide
  Sense strand starting at position 2088 of SEQ ID NO: 1242339
ccucgcugcuuccugaaga

SEQ ID NO: 1339897 - RNA, 19 nt, Artificial Sequence
  Description of Artificial Sequence: Synthetic oligonucleotide
  Antisense strand to SEQ ID NO: 1339896
ucuucaggaagcagcgagg

SEQ ID NO: 1339898 - RNA, 19 nt, Artificial Sequence
  Description of Artificial Sequence: Synthetic oligonucleotide
  Sense strand starting at position 2168 of SEQ ID NO: 1242339
gcugccacuccagagagau

SEQ ID NO: 1339899 - RNA, 19 nt, Artificial Sequence
  Description of Artificial Sequence: Synthetic oligonucleotide
  Antisense strand to SEQ ID NO: 1339898
aucucucuggaguggcagc

SEQ ID NO: 1339900 - RNA, 19 nt, Artificial Sequence
  Description of Artificial Sequence: Synthetic oligonucleotide
  Sense strand starting at position 2174 of SEQ ID NO: 1242339
acuccagagagauggcuau

SEQ ID NO: 1339901 - RNA, 19 nt, Artificial Sequence
  Description of Artificial Sequence: Synthetic oligonucleotide
  Antisense strand to SEQ ID NO: 1339900
auagccaucucucuggagu

SEQ ID NO: 1339902 - RNA, 19 nt, Artificial Sequence
  Description of Artificial Sequence: Synthetic oligonucleotide
  Sense strand starting at position 2287 of SEQ ID NO: 1242339
cuaacucugucgcuuauuu

SEQ ID NO: 1339903 - RNA, 19 nt, Artificial Sequence
  Description of Artificial Sequence: Synthetic oligonucleotide
  Antisense strand to SEQ ID NO: 1339902
aaauaagcgacagaguuag

SEQ ID NO: 1339904 - RNA, 19 nt, Artificial Sequence
  Description of Artificial Sequence: Synthetic oligonucleotide
  Sense strand starting at position 2354 of SEQ ID NO: 1242339
ucugcugccguugugauau

SEQ ID NO: 1339905 - RNA, 19 nt, Artificial Sequence
  Description of Artificial Sequence: Synthetic oligonucleotide
  Antisense strand to SEQ ID NO: 1339904
auaucacaacggcagcaga

SEQ ID NO: 1339906 - RNA, 19 nt, Artificial Sequence
  Description of Artificial Sequence: Synthetic oligonucleotide
  Sense strand starting at position 2429 of SEQ ID NO: 1242339
cugagcaaguguucuuagu

SEQ ID NO: 1339907 - RNA, 19 nt, Artificial Sequence
  Description of Artificial Sequence: Synthetic oligonucleotide
  Antisense strand to SEQ ID NO: 1339906
acuaagaacacuugcucag

SEQ ID NO: 1339908 - RNA, 19 nt, Artificial Sequence
  Description of Artificial Sequence: Synthetic oligonucleotide
  Sense strand starting at position 2431 of SEQ ID NO: 1242339
gagcaaguguucuuaguca

SEQ ID NO: 1339909 - RNA, 19 nt, Artificial Sequence
  Description of Artificial Sequence: Synthetic oligonucleotide
  Antisense strand to SEQ ID NO: 1339908
ugacuaagaacacuugcuc

SEQ ID NO: 1339910 - RNA, 19 nt, Artificial Sequence
  Description of Artificial Sequence: Synthetic oligonucleotide
  Sense strand starting at position 2539 of SEQ ID NO: 1242339
uuuggagguuucucuuaag

SEQ ID NO: 1339911 - RNA, 19 nt, Artificial Sequence
  Description of Artificial Sequence: Synthetic oligonucleotide
  Antisense strand to SEQ ID NO: 1339910
cuuaagagaaaccuccaaa

SEQ ID NO: 1339912 - RNA, 19 nt, Artificial Sequence
  Description of Artificial Sequence: Synthetic oligonucleotide
  Sense strand starting at position 2545 of SEQ ID NO: 1242339
gguuucucuuaagcacuau

SEQ ID NO: 1339913 - RNA, 19 nt, Artificial Sequence
  Description of Artificial Sequence: Synthetic oligonucleotide
  Antisense strand to SEQ ID NO: 1339912
auagugcuuaagagaaacc

SEQ ID NO: 1339914 - RNA, 19 nt, Artificial Sequence
  Description of Artificial Sequence: Synthetic oligonucleotide
  Sense strand starting at position 2690 of SEQ ID NO: 1242339
gcccuauggcugugaagac

SEQ ID NO: 1339915 - RNA, 19 nt, Artificial Sequence
  Description of Artificial Sequence: Synthetic oligonucleotide
  Antisense strand to SEQ ID NO: 1339914
gucuucacagccauagggc

SEQ ID NO: 1339916 - RNA, 19 nt, Artificial Sequence
  Description of Artificial Sequence: Synthetic oligonucleotide
  Sense strand starting at position 2691 of SEQ ID NO: 1242339
cccuauggcugugaagaca

SEQ ID NO: 1339917 - RNA, 19 nt, Artificial Sequence
  Description of Artificial Sequence: Synthetic oligonucleotide
  Antisense strand to SEQ ID NO: 1339916
ugucuucacagccauaggg

SEQ ID NO: 1339918 - RNA, 19 nt, Artificial Sequence
  Description of Artificial Sequence: Synthetic oligonucleotide
  Sense strand starting at position 2862 of SEQ ID NO: 1242339
cuguguuucccugaaauau

SEQ ID NO: 1339919 - RNA, 19 nt, Artificial Sequence
  Description of Artificial Sequence: Synthetic oligonucleotide
  Antisense strand to SEQ ID NO: 1339918
auauuucagggaaacacag

SEQ ID NO: 1339920 - RNA, 19 nt, Artificial Sequence
  Description of Artificial Sequence: Synthetic oligonucleotide
  Sense strand starting at position 2872 of SEQ ID NO: 1242339
cugaaauauugaggucuca

SEQ ID NO: 1339921 - RNA, 19 nt, Artificial Sequence
  Description of Artificial Sequence: Synthetic oligonucleotide
  Antisense strand to SEQ ID NO: 1339920
ugagaccucaauauuucag

SEQ ID NO: 1339922 - RNA, 19 nt, Artificial Sequence
  Description of Artificial Sequence: Synthetic oligonucleotide
  Sense strand starting at position 2892 of SEQ ID NO: 1242339
aucgacaagcucuaaauau

SEQ ID NO: 1339923 - RNA, 19 nt, Artificial Sequence
  Description of Artificial Sequence: Synthetic oligonucleotide
  Antisense strand to SEQ ID NO: 1339922
auauuuagagcuugucgau

SEQ ID NO: 1339924 - RNA, 19 nt, Artificial Sequence
  Description of Artificial Sequence: Synthetic oligonucleotide
  Sense strand starting at position 3177 of SEQ ID NO: 1242339
gagcuaguucuagagucuc

SEQ ID NO: 1339925 - RNA, 19 nt, Artificial Sequence
  Description of Artificial Sequence: Synthetic oligonucleotide
  Antisense strand to SEQ ID NO: 1339924
gagacucuagaacuagcuc

SEQ ID NO: 1339926 - RNA, 19 nt, Artificial Sequence
  Description of Artificial Sequence: Synthetic oligonucleotide
  Sense strand starting at position 3187 of SEQ ID NO: 1242339
uagagucucucgccaauga

SEQ ID NO: 1339927 - RNA, 19 nt, Artificial Sequence
  Description of Artificial Sequence: Synthetic oligonucleotide
  Antisense strand to SEQ ID NO: 1339926
ucauuggcgagagacucua

SEQ ID NO: 1339928 - RNA, 19 nt, Artificial Sequence
  Description of Artificial Sequence: Synthetic oligonucleotide
  Sense strand starting at position 3191 of SEQ ID NO: 1242339
gucucucgccaaugagaag

SEQ ID NO: 1339929 - RNA, 19 nt, Artificial Sequence
  Description of Artificial Sequence: Synthetic oligonucleotide
  Antisense strand to SEQ ID NO: 1339928
cuucucauuggcgagagac

SEQ ID NO: 1339930 - RNA, 19 nt, Artificial Sequence
  Description of Artificial Sequence: Synthetic oligonucleotide
  Sense strand starting at position 3224 of SEQ ID NO: 1242339
ccaagucaccuggacagua

SEQ ID NO: 1339931 - RNA, 19 nt, Artificial Sequence
  Description of Artificial Sequence: Synthetic oligonucleotide
  Antisense strand to SEQ ID NO: 1339930
uacuguccaggugacuugg

SEQ ID NO: 1339932 - RNA, 19 nt, Artificial Sequence
  Description of Artificial Sequence: Synthetic oligonucleotide
  Sense strand starting at position 3240 of SEQ ID NO: 1242339
guaauuaaccaccgucacu

SEQ ID NO: 1339933 - RNA, 19 nt, Artificial Sequence
  Description of Artificial Sequence: Synthetic oligonucleotide
  Antisense strand to SEQ ID NO: 1339932
agugacggugguuaauuac

SEQ ID NO: 1339934 - RNA, 19 nt, Artificial Sequence
  Description of Artificial Sequence: Synthetic oligonucleotide
  Sense strand starting at position 3317 of SEQ ID NO: 1242339
cgcagaagcccagaaauca

SEQ ID NO: 1339935 - RNA, 19 nt, Artificial Sequence
  Description of Artificial Sequence: Synthetic oligonucleotide
  Antisense strand to SEQ ID NO: 1339934
ugauuucugggcuucugcg

SEQ ID NO: 1339936 - RNA, 19 nt, Artificial Sequence
  Description of Artificial Sequence: Synthetic oligonucleotide
  Sense strand starting at position 3348 of SEQ ID NO: 1242339
gcugcccuugcccaagaau

SEQ ID NO: 1339937 - RNA, 19 nt, Artificial Sequence
  Description of Artificial Sequence: Synthetic oligonucleotide
  Antisense strand to SEQ ID NO: 1339936
auucuugggcaagggcagc

SEQ ID NO: 1339938 - RNA, 19 nt, Artificial Sequence
  Description of Artificial Sequence: Synthetic oligonucleotide
  Sense strand starting at position 3624 of SEQ ID NO: 1242339
aagcaaaggugcuuugaca

SEQ ID NO: 1339939 - RNA, 19 nt, Artificial Sequence
  Description of Artificial Sequence: Synthetic oligonucleotide
  Antisense strand to SEQ ID NO: 1339938
ugucaaagcaccuuugcuu

SEQ ID NO: 1339940 - RNA, 19 nt, Artificial Sequence
  Description of Artificial Sequence: Synthetic oligonucleotide
  Sense strand starting at position 3647 of SEQ ID NO: 1242339
gguguaugcacugauuccu

SEQ ID NO: 1339941 - RNA, 19 nt, Artificial Sequence
  Description of Artificial Sequence: Synthetic oligonucleotide
  Antisense strand to SEQ ID NO: 1339940
aggaaucagugcauacacc

SEQ ID NO: 1339942 - RNA, 19 nt, Artificial Sequence
  Description of Artificial Sequence: Synthetic oligonucleotide
  Sense strand starting at position 3730 of SEQ ID NO: 1242339
acagacacauugggauaua

SEQ ID NO: 1339943 - RNA, 19 nt, Artificial Sequence
  Description of Artificial Sequence: Synthetic oligonucleotide
  Antisense strand to SEQ ID NO: 1339942
uauaucccaaugugucugu

SEQ ID NO: 1339944 - RNA, 19 nt, Artificial Sequence
  Description of Artificial Sequence: Synthetic oligonucleotide
  Sense strand starting at position 3731 of SEQ ID NO: 1242339
cagacacauugggauauau

SEQ ID NO: 1339945 - RNA, 19 nt, Artificial Sequence
  Description of Artificial Sequence: Synthetic oligonucleotide
  Antisense strand to SEQ ID NO: 1339944
auauaucccaaugugucug

SEQ ID NO: 1339946 - RNA, 19 nt, Artificial Sequence
  Description of Artificial Sequence: Synthetic oligonucleotide
  Sense strand starting at position 3931 of SEQ ID NO: 1242339
uaaggaucgggcugauaau

SEQ ID NO: 1339947 - RNA, 19 nt, Artificial Sequence
  Description of Artificial Sequence: Synthetic oligonucleotide
  Antisense strand to SEQ ID NO: 1339946
auuaucagcccgauccuua

SEQ ID NO: 1339948 - RNA, 19 nt, Artificial Sequence
  Description of Artificial Sequence: Synthetic oligonucleotide
  Sense strand starting at position 160 of SEQ ID NO: 1242340
cccaguuguuaauuggaga

SEQ ID NO: 1339949 - RNA, 19 nt, Artificial Sequence
  Description of Artificial Sequence: Synthetic oligonucleotide
  Antisense strand to SEQ ID NO: 1339948
ucuccaauuaacaacuggg

SEQ ID NO: 1339950 - RNA, 19 nt, Artificial Sequence
  Description of Artificial Sequence: Synthetic oligonucleotide
  Sense strand starting at position 161 of SEQ ID NO: 1242340
ccaguuguuaauuggagau

SEQ ID NO: 1339951 - RNA, 19 nt, Artificial Sequence
  Description of Artificial Sequence: Synthetic oligonucleotide
  Antisense strand to SEQ ID NO: 1339950
aucuccaauuaacaacugg

SEQ ID NO: 1339952 - RNA, 19 nt, Artificial Sequence
  Description of Artificial Sequence: Synthetic oligonucleotide
  Sense strand starting at position 173 of SEQ ID NO: 1242340
uggagaucaugucccugua

SEQ ID NO: 1339953 - RNA, 19 nt, Artificial Sequence
  Description of Artificial Sequence: Synthetic oligonucleotide
  Antisense strand to SEQ ID NO: 1339952
uacagggacaugaucucca

SEQ ID NO: 1339954 - RNA, 19 nt, Artificial Sequence
  Description of Artificial Sequence: Synthetic oligonucleotide
  Sense strand starting at position 175 of SEQ ID NO: 1242340
gagaucaugucccuguaaa

SEQ ID NO: 1339955 - RNA, 19 nt, Artificial Sequence
  Description of Artificial Sequence: Synthetic oligonucleotide
  Antisense strand to SEQ ID NO: 1339954
uuuacagggacaugaucuc

SEQ ID NO: 1339956 - RNA, 19 nt, Artificial Sequence
  Description of Artificial Sequence: Synthetic oligonucleotide
  Sense strand starting at position 176 of SEQ ID NO: 1242340
agaucaugucccuguaaag

SEQ ID NO: 1339957 - RNA, 19 nt, Artificial Sequence
  Description of Artificial Sequence: Synthetic oligonucleotide
  Antisense strand to SEQ ID NO: 1339956
cuuuacagggacaugaucu

SEQ ID NO: 1339958 - RNA, 19 nt, Artificial Sequence
  Description of Artificial Sequence: Synthetic oligonucleotide
  Sense strand starting at position 416 of SEQ ID NO: 1242340
guuugugaugcacaggaga

SEQ ID NO: 1339959 - RNA, 19 nt, Artificial Sequence
  Description of Artificial Sequence: Synthetic oligonucleotide
  Antisense strand to SEQ ID NO: 1339958
ucuccugugcaucacaaac

SEQ ID NO: 1339960 - RNA, 19 nt, Artificial Sequence
  Description of Artificial Sequence: Synthetic oligonucleotide
  Sense strand starting at position 434 of SEQ ID NO: 1242340
aagacagagguuugugcau

SEQ ID NO: 1339961 - RNA, 19 nt, Artificial Sequence
  Description of Artificial Sequence: Synthetic oligonucleotide
  Antisense strand to SEQ ID NO: 1339960
augcacaaaccucugucuu

SEQ ID NO: 1339962 - RNA, 19 nt, Artificial Sequence
  Description of Artificial Sequence: Synthetic oligonucleotide
  Sense strand starting at position 459 of SEQ ID NO: 1242340
ucaagaucucugcaccaga

SEQ ID NO: 1339963 - RNA, 19 nt, Artificial Sequence
  Description of Artificial Sequence: Synthetic oligonucleotide
  Antisense strand to SEQ ID NO: 1339962
ucuggugcagagaucuuga

SEQ ID NO: 1339964 - RNA, 19 nt, Artificial Sequence
  Description of Artificial Sequence: Synthetic oligonucleotide
  Sense strand starting at position 730 of SEQ ID NO: 1242340
caccuugugcgggagacua

SEQ ID NO: 1339965 - RNA, 19 nt, Artificial Sequence
  Description of Artificial Sequence: Synthetic oligonucleotide
  Antisense strand to SEQ ID NO: 1339964
uagucucccgcacaaggug

SEQ ID NO: 1339966 - RNA, 19 nt, Artificial Sequence
  Description of Artificial Sequence: Synthetic oligonucleotide
  Sense strand starting at position 738 of SEQ ID NO: 1242340
gcgggagacuacuuugaga

SEQ ID NO: 1339967 - RNA, 19 nt, Artificial Sequence
  Description of Artificial Sequence: Synthetic oligonucleotide
  Antisense strand to SEQ ID NO: 1339966
ucucaaaguagucucccgc

SEQ ID NO: 1339968 - RNA, 19 nt, Artificial Sequence
  Description of Artificial Sequence: Synthetic oligonucleotide
  Sense strand starting at position 924 of SEQ ID NO: 1242340
aucucaauuugggagaacu

SEQ ID NO: 1339969 - RNA, 19 nt, Artificial Sequence
  Description of Artificial Sequence: Synthetic oligonucleotide
  Antisense strand to SEQ ID NO: 1339968
aguucucccaaauugagau

SEQ ID NO: 1339970 - RNA, 19 nt, Artificial Sequence
  Description of Artificial Sequence: Synthetic oligonucleotide
  Sense strand starting at position 1567 of SEQ ID NO: 1242340
cuccaaaugugggcaagau

SEQ ID NO: 1339971 - RNA, 19 nt, Artificial Sequence
  Description of Artificial Sequence: Synthetic oligonucleotide
  Antisense strand to SEQ ID NO: 1339970
aucuugcccacauuuggag

SEQ ID NO: 1339972 - RNA, 19 nt, Artificial Sequence
  Description of Artificial Sequence: Synthetic oligonucleotide
  Sense strand starting at position 2252 of SEQ ID NO: 1242340
agucaagacuccuugaaug

SEQ ID NO: 1339973 - RNA, 19 nt, Artificial Sequence
  Description of Artificial Sequence: Synthetic oligonucleotide
  Antisense strand to SEQ ID NO: 1339972
cauucaaggagucuugacu

SEQ ID NO: 1339974 - RNA, 19 nt, Artificial Sequence
  Description of Artificial Sequence: Synthetic oligonucleotide
  Sense strand starting at position 2254 of SEQ ID NO: 1242340
ucaagacuccuugaaugcu

SEQ ID NO: 1339975 - RNA, 19 nt, Artificial Sequence
  Description of Artificial Sequence: Synthetic oligonucleotide
  Antisense strand to SEQ ID NO: 1339974
agcauucaaggagucuuga

SEQ ID NO: 1339976 - RNA, 19 nt, Artificial Sequence
  Description of Artificial Sequence: Synthetic oligonucleotide
  Sense strand starting at position 2417 of SEQ ID NO: 1242340
ggcgguuacauccaagaca

SEQ ID NO: 1339977 - RNA, 19 nt, Artificial Sequence
  Description of Artificial Sequence: Synthetic oligonucleotide
  Antisense strand to SEQ ID NO: 1339976
ugucuuggauguaaccgcc

SEQ ID NO: 1339978 - RNA, 19 nt, Artificial Sequence
  Description of Artificial Sequence: Synthetic oligonucleotide
  Sense strand starting at position 2462 of SEQ ID NO: 1242340
accuuuguucuauagagau

SEQ ID NO: 1339979 - RNA, 19 nt, Artificial Sequence
  Description of Artificial Sequence: Synthetic oligonucleotide
  Antisense strand to SEQ ID NO: 1339978
aucucuauagaacaaaggu

SEQ ID NO: 1339980 - RNA, 19 nt, Artificial Sequence
  Description of Artificial Sequence: Synthetic oligonucleotide
  Sense strand starting at position 2490 of SEQ ID NO: 1242340
guuuaagaaucuuccugaa

SEQ ID NO: 1339981 - RNA, 19 nt, Artificial Sequence
  Description of Artificial Sequence: Synthetic oligonucleotide
  Antisense strand to SEQ ID NO: 1339980
uucaggaagauucuuaaac

SEQ ID NO: 1339982 - RNA, 19 nt, Artificial Sequence
  Description of Artificial Sequence: Synthetic oligonucleotide
  Sense strand starting at position 2556 of SEQ ID NO: 1242340
cguagaauuguacauaacu

SEQ ID NO: 1339983 - RNA, 19 nt, Artificial Sequence
  Description of Artificial Sequence: Synthetic oligonucleotide
  Antisense strand to SEQ ID NO: 1339982
aguuauguacaauucuacg

SEQ ID NO: 1339984 - RNA, 19 nt, Artificial Sequence
  Description of Artificial Sequence: Synthetic oligonucleotide
  Sense strand starting at position 2847 of SEQ ID NO: 1242340
gaaggacccuugcugugaa

SEQ ID NO: 1339985 - RNA, 19 nt, Artificial Sequence
  Description of Artificial Sequence: Synthetic oligonucleotide
  Antisense strand to SEQ ID NO: 1339984
uucacagcaaggguccuuc

SEQ ID NO: 1339986 - RNA, 19 nt, Artificial Sequence
  Description of Artificial Sequence: Synthetic oligonucleotide
  Sense strand starting at position 2850 of SEQ ID NO: 1242340
ggacccuugcugugaaaca

SEQ ID NO: 1339987 - RNA, 19 nt, Artificial Sequence
  Description of Artificial Sequence: Synthetic oligonucleotide
  Antisense strand to SEQ ID NO: 1339986
uguuucacagcaagggucc

SEQ ID NO: 1339988 - RNA, 19 nt, Artificial Sequence
  Description of Artificial Sequence: Synthetic oligonucleotide
  Sense strand starting at position 2917 of SEQ ID NO: 1242340
gcgugaagucggucugguu

SEQ ID NO: 1339989 - RNA, 19 nt, Artificial Sequence
  Description of Artificial Sequence: Synthetic oligonucleotide
  Antisense strand to SEQ ID NO: 1339988
aaccagaccgacuucacgc

SEQ ID NO: 1339990 - RNA, 19 nt, Artificial Sequence
  Description of Artificial Sequence: Synthetic oligonucleotide
  Sense strand starting at position 2918 of SEQ ID NO: 1242340
cgugaagucggucugguua

SEQ ID NO: 1339991 - RNA, 19 nt, Artificial Sequence
  Description of Artificial Sequence: Synthetic oligonucleotide
  Antisense strand to SEQ ID NO: 1339990
uaaccagaccgacuucacg

SEQ ID NO: 1339992 - RNA, 19 nt, Artificial Sequence
  Description of Artificial Sequence: Synthetic oligonucleotide
  Sense strand starting at position 2984 of SEQ ID NO: 1242340
guacauucuagacaggguu

SEQ ID NO: 1339993 - RNA, 19 nt, Artificial Sequence
  Description of Artificial Sequence: Synthetic oligonucleotide
  Antisense strand to SEQ ID NO: 1339992
aacccugucuagaauguac

SEQ ID NO: 1339994 - RNA, 19 nt, Artificial Sequence
  Description of Artificial Sequence: Synthetic oligonucleotide
  Sense strand starting at position 3164 of SEQ ID NO: 1242340
ugucaaguguauuuguaua

SEQ ID NO: 1339995 - RNA, 19 nt, Artificial Sequence
  Description of Artificial Sequence: Synthetic oligonucleotide
  Antisense strand to SEQ ID NO: 1339994
uauacaaauacacuugaca

SEQ ID NO: 1339996 - RNA, 19 nt, Artificial Sequence
  Description of Artificial Sequence: Synthetic oligonucleotide
  Sense strand starting at position 3208 of SEQ ID NO: 1242340
uuaagugguuuagcaggaa

SEQ ID NO: 1339997 - RNA, 19 nt, Artificial Sequence
  Description of Artificial Sequence: Synthetic oligonucleotide
  Antisense strand to SEQ ID NO: 1339996
uuccugcuaaaccacuuaa

SEQ ID NO: 1339998 - RNA, 19 nt, Artificial Sequence
  Description of Artificial Sequence: Synthetic oligonucleotide
  Sense strand starting at position 3496 of SEQ ID NO: 1242340
gagcucacucgguaauuag

SEQ ID NO: 1339999 - RNA, 19 nt, Artificial Sequence
  Description of Artificial Sequence: Synthetic oligonucleotide
  Antisense strand to SEQ ID NO: 1339998
cuaauuaccgagugagcuc

SEQ ID NO: 1340000 - RNA, 19 nt, Artificial Sequence
  Description of Artificial Sequence: Synthetic oligonucleotide
  Sense strand starting at position 3505 of SEQ ID NO: 1242340
cgguaauuaggcgcucauu

SEQ ID NO: 1340001 - RNA, 19 nt, Artificial Sequence
  Description of Artificial Sequence: Synthetic oligonucleotide
  Antisense strand to SEQ ID NO: 1340000
aaugagcgccuaauuaccg

SEQ ID NO: 1340002 - RNA, 19 nt, Artificial Sequence
  Description of Artificial Sequence: Synthetic oligonucleotide
  Sense strand starting at position 3508 of SEQ ID NO: 1242340
uaauuaggcgcucauuaga

SEQ ID NO: 1340003 - RNA, 19 nt, Artificial Sequence
  Description of Artificial Sequence: Synthetic oligonucleotide
  Antisense strand to SEQ ID NO: 1340002
ucuaaugagcgccuaauua

SEQ ID NO: 1340004 - RNA, 19 nt, Artificial Sequence
  Description of Artificial Sequence: Synthetic oligonucleotide
  Sense strand starting at position 3527 of SEQ ID NO: 1242340
gugaccuuucccuacaugu

SEQ ID NO: 1340005 - RNA, 19 nt, Artificial Sequence
  Description of Artificial Sequence: Synthetic oligonucleotide
  Antisense strand to SEQ ID NO: 1340004
acauguagggaaaggucac

SEQ ID NO: 1340006 - RNA, 19 nt, Artificial Sequence
  Description of Artificial Sequence: Synthetic oligonucleotide
  Sense strand starting at position 3587 of SEQ ID NO: 1242340
ccaggacuccuuggaguca

SEQ ID NO: 1340007 - RNA, 19 nt, Artificial Sequence
  Description of Artificial Sequence: Synthetic oligonucleotide
  Antisense strand to SEQ ID NO: 1340006
ugacuccaaggaguccugg

SEQ ID NO: 1340008 - RNA, 19 nt, Artificial Sequence
  Description of Artificial Sequence: Synthetic oligonucleotide
  Sense strand starting at position 3678 of SEQ ID NO: 1242340
guagauuucuuacuguucu

SEQ ID NO: 1340009 - RNA, 19 nt, Artificial Sequence
  Description of Artificial Sequence: Synthetic oligonucleotide
  Antisense strand to SEQ ID NO: 1340008
agaacaguaagaaaucuac

SEQ ID NO: 1340010 - RNA, 19 nt, Artificial Sequence
  Description of Artificial Sequence: Synthetic oligonucleotide
  Sense strand starting at position 3697 of SEQ ID NO: 1242340
uccaaauugccuggcauuu

SEQ ID NO: 1340011 - RNA, 19 nt, Artificial Sequence
  Description of Artificial Sequence: Synthetic oligonucleotide
  Antisense strand to SEQ ID NO: 1340010
aaaugccaggcaauuugga

SEQ ID NO: 1340012 - RNA, 19 nt, Artificial Sequence
  Description of Artificial Sequence: Synthetic oligonucleotide
  Sense strand starting at position 3719 of SEQ ID NO: 1242340
aaaggucuguaaguggaaa

SEQ ID NO: 1340013 - RNA, 19 nt, Artificial Sequence
  Description of Artificial Sequence: Synthetic oligonucleotide
  Antisense strand to SEQ ID NO: 1340012
uuuccacuuacagaccuuu

SEQ ID NO: 1340014 - RNA, 19 nt, Artificial Sequence
  Description of Artificial Sequence: Synthetic oligonucleotide
  Sense strand starting at position 3764 of SEQ ID NO: 1242340
gaaaguaaccagcaggguu

SEQ ID NO: 1340015 - RNA, 19 nt, Artificial Sequence
  Description of Artificial Sequence: Synthetic oligonucleotide
  Antisense strand to SEQ ID NO: 1340014
aacccugcugguuacuuuc

SEQ ID NO: 1340016 - RNA, 19 nt, Artificial Sequence
  Description of Artificial Sequence: Synthetic oligonucleotide
  Sense strand starting at position 3855 of SEQ ID NO: 1242340
ggagguagccgguaacuau

SEQ ID NO: 1340017 - RNA, 19 nt, Artificial Sequence
  Description of Artificial Sequence: Synthetic oligonucleotide
  Antisense strand to SEQ ID NO: 1340016
auaguuaccggcuaccucc

SEQ ID NO: 1340018 - RNA, 19 nt, Artificial Sequence
  Description of Artificial Sequence: Synthetic oligonucleotide
  Sense strand starting at position 3862 of SEQ ID NO: 1242340
gccgguaacuauuuaccuu

SEQ ID NO: 1340019 - RNA, 19 nt, Artificial Sequence
  Description of Artificial Sequence: Synthetic oligonucleotide
  Antisense strand to SEQ ID NO: 1340018
aagguaaauaguuaccggc

SEQ ID NO: 1340020 - RNA, 19 nt, Artificial Sequence
  Description of Artificial Sequence: Synthetic oligonucleotide
  Sense strand starting at position 3931 of SEQ ID NO: 1242340
uaaguacuugguuaaguua

SEQ ID NO: 1340021 - RNA, 19 nt, Artificial Sequence
  Description of Artificial Sequence: Synthetic oligonucleotide
  Antisense strand to SEQ ID NO: 1340020
uaacuuaaccaaguacuua

SEQ ID NO: 1340022 - RNA, 19 nt, Artificial Sequence
  Description of Artificial Sequence: Synthetic oligonucleotide
  Sense strand starting at position 3934 of SEQ ID NO: 1242340
guacuugguuaaguuagaa

SEQ ID NO: 1340023 - RNA, 19 nt, Artificial Sequence
  Description of Artificial Sequence: Synthetic oligonucleotide
  Antisense strand to SEQ ID NO: 1340022
uucuaacuuaaccaaguac

SEQ ID NO: 1340024 - RNA, 19 nt, Artificial Sequence
  Description of Artificial Sequence: Synthetic oligonucleotide
  Sense strand starting at position 3944 of SEQ ID NO: 1242340
aaguuagaacccugcauag

SEQ ID NO: 1340025 - RNA, 19 nt, Artificial Sequence
  Description of Artificial Sequence: Synthetic oligonucleotide
  Antisense strand to SEQ ID NO: 1340024
cuaugcaggguucuaacuu

SEQ ID NO: 1340026 - RNA, 19 nt, Artificial Sequence
  Description of Artificial Sequence: Synthetic oligonucleotide
  Sense strand starting at position 3973 of SEQ ID NO: 1242340
uacacagagugcucagauu

SEQ ID NO: 1340027 - RNA, 19 nt, Artificial Sequence
  Description of Artificial Sequence: Synthetic oligonucleotide
  Antisense strand to SEQ ID NO: 1340026
aaucugagcacucugugua

SEQ ID NO: 1340028 - RNA, 19 nt, Artificial Sequence
  Description of Artificial Sequence: Synthetic oligonucleotide
  Sense strand starting at position 350 of SEQ ID NO: 1242341
ccucacuguuugcuggaaa

SEQ ID NO: 1340029 - RNA, 19 nt, Artificial Sequence
  Description of Artificial Sequence: Synthetic oligonucleotide
  Antisense strand to SEQ ID NO: 1340028
uuuccagcaaacagugagg

SEQ ID NO: 1340030 - RNA, 19 nt, Artificial Sequence
  Description of Artificial Sequence: Synthetic oligonucleotide
  Sense strand starting at position 353 of SEQ ID NO: 1242341
cacuguuugcuggaaaguc

SEQ ID NO: 1340031 - RNA, 19 nt, Artificial Sequence
  Description of Artificial Sequence: Synthetic oligonucleotide
  Antisense strand to SEQ ID NO: 1340030
gacuuuccagcaaacagug

SEQ ID NO: 1340032 - RNA, 19 nt, Artificial Sequence
  Description of Artificial Sequence: Synthetic oligonucleotide
  Sense strand starting at position 557 of SEQ ID NO: 1242341
uuaaaugcagcccaugaua

SEQ ID NO: 1340033 - RNA, 19 nt, Artificial Sequence
  Description of Artificial Sequence: Synthetic oligonucleotide
  Antisense strand to SEQ ID NO: 1340032
uaucaugggcugcauuuaa

SEQ ID NO: 1340034 - RNA, 19 nt, Artificial Sequence
  Description of Artificial Sequence: Synthetic oligonucleotide
  Sense strand starting at position 1415 of SEQ ID NO: 1242341
gucauccacugguugguaa

SEQ ID NO: 1340035 - RNA, 19 nt, Artificial Sequence
  Description of Artificial Sequence: Synthetic oligonucleotide
  Antisense strand to SEQ ID NO: 1340034
uuaccaaccaguggaugac

SEQ ID NO: 1340036 - RNA, 19 nt, Artificial Sequence
  Description of Artificial Sequence: Synthetic oligonucleotide
  Sense strand starting at position 1438 of SEQ ID NO: 1242341
gcgagaggacucggaucuu

SEQ ID NO: 1340037 - RNA, 19 nt, Artificial Sequence
  Description of Artificial Sequence: Synthetic oligonucleotide
  Antisense strand to SEQ ID NO: 1340036
aagauccgaguccucucgc

SEQ ID NO: 1340038 - RNA, 19 nt, Artificial Sequence
  Description of Artificial Sequence: Synthetic oligonucleotide
  Sense strand starting at position 1571 of SEQ ID NO: 1242341
aaaggaguuugugcacauc

SEQ ID NO: 1340039 - RNA, 19 nt, Artificial Sequence
  Description of Artificial Sequence: Synthetic oligonucleotide
  Antisense strand to SEQ ID NO: 1340038
gaugugcacaaacuccuuu

SEQ ID NO: 1340040 - RNA, 19 nt, Artificial Sequence
  Description of Artificial Sequence: Synthetic oligonucleotide
  Sense strand starting at position 1574 of SEQ ID NO: 1242341
ggaguuugugcacaucuga

SEQ ID NO: 1340041 - RNA, 19 nt, Artificial Sequence
  Description of Artificial Sequence: Synthetic oligonucleotide
  Antisense strand to SEQ ID NO: 1340040
ucagaugugcacaaacucc

SEQ ID NO: 1340042 - RNA, 19 nt, Artificial Sequence
  Description of Artificial Sequence: Synthetic oligonucleotide
  Sense strand starting at position 1737 of SEQ ID NO: 1242341
gcgagacuuacuuggguag

SEQ ID NO: 1340043 - RNA, 19 nt, Artificial Sequence
  Description of Artificial Sequence: Synthetic oligonucleotide
  Antisense strand to SEQ ID NO: 1340042
cuacccaaguaagucucgc

SEQ ID NO: 1340044 - RNA, 19 nt, Artificial Sequence
  Description of Artificial Sequence: Synthetic oligonucleotide
  Sense strand starting at position 1741 of SEQ ID NO: 1242341
gacuuacuuggguagcgau

SEQ ID NO: 1340045 - RNA, 19 nt, Artificial Sequence
  Description of Artificial Sequence: Synthetic oligonucleotide
  Antisense strand to SEQ ID NO: 1340044
aucgcuacccaaguaaguc

SEQ ID NO: 1340046 - RNA, 19 nt, Artificial Sequence
  Description of Artificial Sequence: Synthetic oligonucleotide
  Sense strand starting at position 2192 of SEQ ID NO: 1242341
cugugugucccguugauac

SEQ ID NO: 1340047 - RNA, 19 nt, Artificial Sequence
  Description of Artificial Sequence: Synthetic oligonucleotide
  Antisense strand to SEQ ID NO: 1340046
guaucaacgggacacacag

SEQ ID NO: 1340048 - RNA, 19 nt, Artificial Sequence
  Description of Artificial Sequence: Synthetic oligonucleotide
  Sense strand starting at position 2440 of SEQ ID NO: 1242341
gggagacaucugugaugug

SEQ ID NO: 1340049 - RNA, 19 nt, Artificial Sequence
  Description of Artificial Sequence: Synthetic oligonucleotide
  Antisense strand to SEQ ID NO: 1340048
cacaucacagaugucuccc

SEQ ID NO: 1340050 - RNA, 19 nt, Artificial Sequence
  Description of Artificial Sequence: Synthetic oligonucleotide
  Sense strand starting at position 2575 of SEQ ID NO: 1242341
gacaaaugucaugguuaug

SEQ ID NO: 1340051 - RNA, 19 nt, Artificial Sequence
  Description of Artificial Sequence: Synthetic oligonucleotide
  Antisense strand to SEQ ID NO: 1340050
cauaaccaugacauuuguc

SEQ ID NO: 1340052 - RNA, 19 nt, Artificial Sequence
  Description of Artificial Sequence: Synthetic oligonucleotide
  Sense strand starting at position 2578 of SEQ ID NO: 1242341
aaaugucaugguuauguaa

SEQ ID NO: 1340053 - RNA, 19 nt, Artificial Sequence
  Description of Artificial Sequence: Synthetic oligonucleotide
  Antisense strand to SEQ ID NO: 1340052
uuacauaaccaugacauuu

SEQ ID NO: 1340054 - RNA, 19 nt, Artificial Sequence
  Description of Artificial Sequence: Synthetic oligonucleotide
  Sense strand starting at position 2598 of SEQ ID NO: 1242341
auguuaacaguaggauaaa

SEQ ID NO: 1340055 - RNA, 19 nt, Artificial Sequence
  Description of Artificial Sequence: Synthetic oligonucleotide
  Antisense strand to SEQ ID NO: 1340054
uuuauccuacuguuaacau

SEQ ID NO: 1340056 - RNA, 19 nt, Artificial Sequence
  Description of Artificial Sequence: Synthetic oligonucleotide
  Sense strand starting at position 2635 of SEQ ID NO: 1242341
gggacugucuuugccacuu

SEQ ID NO: 1340057 - RNA, 19 nt, Artificial Sequence
  Description of Artificial Sequence: Synthetic oligonucleotide
  Antisense strand to SEQ ID NO: 1340056
aaguggcaaagacaguccc

SEQ ID NO: 1340058 - RNA, 19 nt, Artificial Sequence
  Description of Artificial Sequence: Synthetic oligonucleotide
  Sense strand starting at position 2703 of SEQ ID NO: 1242341
acacguauaaaggauugua

SEQ ID NO: 1340059 - RNA, 19 nt, Artificial Sequence
  Description of Artificial Sequence: Synthetic oligonucleotide
  Antisense strand to SEQ ID NO: 1340058
uacaauccuuuauacgugu

SEQ ID NO: 1340060 - RNA, 19 nt, Artificial Sequence
  Description of Artificial Sequence: Synthetic oligonucleotide
  Sense strand starting at position 2706 of SEQ ID NO: 1242341
cguauaaaggauuguaaga

SEQ ID NO: 1340061 - RNA, 19 nt, Artificial Sequence
  Description of Artificial Sequence: Synthetic oligonucleotide
  Antisense strand to SEQ ID NO: 1340060
ucuuacaauccuuuauacg

SEQ ID NO: 1340062 - RNA, 19 nt, Artificial Sequence
  Description of Artificial Sequence: Synthetic oligonucleotide
  Sense strand starting at position 2764 of SEQ ID NO: 1242341
caggaacugucuucugguu

SEQ ID NO: 1340063 - RNA, 19 nt, Artificial Sequence
  Description of Artificial Sequence: Synthetic oligonucleotide
  Antisense strand to SEQ ID NO: 1340062
aaccagaagacaguuccug

SEQ ID NO: 1340064 - RNA, 19 nt, Artificial Sequence
  Description of Artificial Sequence: Synthetic oligonucleotide
  Sense strand starting at position 2769 of SEQ ID NO: 1242341
acugucuucugguuaagau

SEQ ID NO: 1340065 - RNA, 19 nt, Artificial Sequence
  Description of Artificial Sequence: Synthetic oligonucleotide
  Antisense strand to SEQ ID NO: 1340064
aucuuaaccagaagacagu

SEQ ID NO: 1340066 - RNA, 19 nt, Artificial Sequence
  Description of Artificial Sequence: Synthetic oligonucleotide
  Sense strand starting at position 2770 of SEQ ID NO: 1242341
cugucuucugguuaagauc

SEQ ID NO: 1340067 - RNA, 19 nt, Artificial Sequence
  Description of Artificial Sequence: Synthetic oligonucleotide
  Antisense strand to SEQ ID NO: 1340066
gaucuuaaccagaagacag

SEQ ID NO: 1340068 - RNA, 19 nt, Artificial Sequence
  Description of Artificial Sequence: Synthetic oligonucleotide
  Sense strand starting at position 2777 of SEQ ID NO: 1242341
cugguuaagaucugugauc

SEQ ID NO: 1340069 - RNA, 19 nt, Artificial Sequence
  Description of Artificial Sequence: Synthetic oligonucleotide
  Antisense strand to SEQ ID NO: 1340068
gaucacagaucuuaaccag

SEQ ID NO: 1340070 - RNA, 19 nt, Artificial Sequence
  Description of Artificial Sequence: Synthetic oligonucleotide
  Sense strand starting at position 2778 of SEQ ID NO: 1242341
ugguuaagaucugugaucu

SEQ ID NO: 1340071 - RNA, 19 nt, Artificial Sequence
  Description of Artificial Sequence: Synthetic oligonucleotide
  Antisense strand to SEQ ID NO: 1340070
agaucacagaucuuaacca

SEQ ID NO: 1340072 - RNA, 19 nt, Artificial Sequence
  Description of Artificial Sequence: Synthetic oligonucleotide
  Sense strand starting at position 2779 of SEQ ID NO: 1242341
gguuaagaucugugaucuu

SEQ ID NO: 1340073 - RNA, 19 nt, Artificial Sequence
  Description of Artificial Sequence: Synthetic oligonucleotide
  Antisense strand to SEQ ID NO: 1340072
aagaucacagaucuuaacc

SEQ ID NO: 1340074 - RNA, 19 nt, Artificial Sequence
  Description of Artificial Sequence: Synthetic oligonucleotide
  Sense strand starting at position 2782 of SEQ ID NO: 1242341
uaagaucugugaucuugac

SEQ ID NO: 1340075 - RNA, 19 nt, Artificial Sequence
  Description of Artificial Sequence: Synthetic oligonucleotide
  Antisense strand to SEQ ID NO: 1340074
gucaagaucacagaucuua

SEQ ID NO: 1340076 - RNA, 19 nt, Artificial Sequence
  Description of Artificial Sequence: Synthetic oligonucleotide
  Sense strand starting at position 2790 of SEQ ID NO: 1242341
gugaucuugacaugaguua

SEQ ID NO: 1340077 - RNA, 19 nt, Artificial Sequence
  Description of Artificial Sequence: Synthetic oligonucleotide
  Antisense strand to SEQ ID NO: 1340076
uaacucaugucaagaucac

SEQ ID NO: 1340078 - RNA, 19 nt, Artificial Sequence
  Description of Artificial Sequence: Synthetic oligonucleotide
  Sense strand starting at position 2815 of SEQ ID NO: 1242341
auauuuaggucugggaauu

SEQ ID NO: 1340079 - RNA, 19 nt, Artificial Sequence
  Description of Artificial Sequence: Synthetic oligonucleotide
  Antisense strand to SEQ ID NO: 1340078
aauucccagaccuaaauau

SEQ ID NO: 1340080 - RNA, 19 nt, Artificial Sequence
  Description of Artificial Sequence: Synthetic oligonucleotide
  Sense strand starting at position 2884 of SEQ ID NO: 1242341
aguauaacagucuguauau

SEQ ID NO: 1340081 - RNA, 19 nt, Artificial Sequence
  Description of Artificial Sequence: Synthetic oligonucleotide
  Antisense strand to SEQ ID NO: 1340080
auauacagacuguuauacu

SEQ ID NO: 1340082 - RNA, 19 nt, Artificial Sequence
  Description of Artificial Sequence: Synthetic oligonucleotide
  Sense strand starting at position 2885 of SEQ ID NO: 1242341
guauaacagucuguauauu

SEQ ID NO: 1340083 - RNA, 19 nt, Artificial Sequence
  Description of Artificial Sequence: Synthetic oligonucleotide
  Antisense strand to SEQ ID NO: 1340082
aauauacagacuguuauac

SEQ ID NO: 1340084 - RNA, 19 nt, Artificial Sequence
  Description of Artificial Sequence: Synthetic oligonucleotide
  Sense strand starting at position 2906 of SEQ ID NO: 1242341
cugcuuagucuguauauug

SEQ ID NO: 1340085 - RNA, 19 nt, Artificial Sequence
  Description of Artificial Sequence: Synthetic oligonucleotide
  Antisense strand to SEQ ID NO: 1340084
caauauacagacuaagcag

SEQ ID NO: 1340086 - RNA, 19 nt, Artificial Sequence
  Description of Artificial Sequence: Synthetic oligonucleotide
  Sense strand starting at position 3081 of SEQ ID NO: 1242341
uuuccuagcucauugaaga

SEQ ID NO: 1340087 - RNA, 19 nt, Artificial Sequence
  Description of Artificial Sequence: Synthetic oligonucleotide
  Antisense strand to SEQ ID NO: 1340086
ucuucaaugagcuaggaaa

SEQ ID NO: 1340088 - RNA, 19 nt, Artificial Sequence
  Description of Artificial Sequence: Synthetic oligonucleotide
  Sense strand starting at position 3082 of SEQ ID NO: 1242341
uuccuagcucauugaagag

SEQ ID NO: 1340089 - RNA, 19 nt, Artificial Sequence
  Description of Artificial Sequence: Synthetic oligonucleotide
  Antisense strand to SEQ ID NO: 1340088
cucuucaaugagcuaggaa

SEQ ID NO: 1340090 - RNA, 19 nt, Artificial Sequence
  Description of Artificial Sequence: Synthetic oligonucleotide
  Sense strand starting at position 3729 of SEQ ID NO: 1242341
caggauauacugugcuuua

SEQ ID NO: 1340091 - RNA, 19 nt, Artificial Sequence
  Description of Artificial Sequence: Synthetic oligonucleotide
  Antisense strand to SEQ ID NO: 1340090
uaaagcacaguauauccug

SEQ ID NO: 1340092 - RNA, 19 nt, Artificial Sequence
  Description of Artificial Sequence: Synthetic oligonucleotide
  Sense strand starting at position 3730 of SEQ ID NO: 1242341
aggauauacugugcuuuau

SEQ ID NO: 1340093 - RNA, 19 nt, Artificial Sequence
  Description of Artificial Sequence: Synthetic oligonucleotide
  Antisense strand to SEQ ID NO: 1340092
auaaagcacaguauauccu

SEQ ID NO: 1340094 - RNA, 19 nt, Artificial Sequence
  Description of Artificial Sequence: Synthetic oligonucleotide
  Sense strand starting at position 3740 of SEQ ID NO: 1242341
gugcuuuaucuagacaauc

SEQ ID NO: 1340095 - RNA, 19 nt, Artificial Sequence
  Description of Artificial Sequence: Synthetic oligonucleotide
  Antisense strand to SEQ ID NO: 1340094
gauugucuagauaaagcac

SEQ ID NO: 1340096 - RNA, 19 nt, Artificial Sequence
  Description of Artificial Sequence: Synthetic oligonucleotide
  Sense strand starting at position 3749 of SEQ ID NO: 1242341
cuagacaaucccuaguguu

SEQ ID NO: 1340097 - RNA, 19 nt, Artificial Sequence
  Description of Artificial Sequence: Synthetic oligonucleotide
  Antisense strand to SEQ ID NO: 1340096
aacacuagggauugucuag

SEQ ID NO: 1340098 - RNA, 19 nt, Artificial Sequence
  Description of Artificial Sequence: Synthetic oligonucleotide
  Sense strand starting at position 3836 of SEQ ID NO: 1242341
auauguaagucuuugcaca

SEQ ID NO: 1340099 - RNA, 19 nt, Artificial Sequence
  Description of Artificial Sequence: Synthetic oligonucleotide
  Antisense strand to SEQ ID NO: 1340098
ugugcaaagacuuacauau

SEQ ID NO: 1340100 - RNA, 19 nt, Artificial Sequence
  Description of Artificial Sequence: Synthetic oligonucleotide
  Sense strand starting at position 3838 of SEQ ID NO: 1242341
auguaagucuuugcacaac

SEQ ID NO: 1340101 - RNA, 19 nt, Artificial Sequence
  Description of Artificial Sequence: Synthetic oligonucleotide
  Antisense strand to SEQ ID NO: 1340100
guugugcaaagacuuacau

SEQ ID NO: 1340102 - RNA, 19 nt, Artificial Sequence
  Description of Artificial Sequence: Synthetic oligonucleotide
  Sense strand starting at position 3850 of SEQ ID NO: 1242341
gcacaacuuucugugaauu

SEQ ID NO: 1340103 - RNA, 19 nt, Artificial Sequence
  Description of Artificial Sequence: Synthetic oligonucleotide
  Antisense strand to SEQ ID NO: 1340102
aauucacagaaaguugugc

SEQ ID NO: 1340104 - RNA, 19 nt, Artificial Sequence
  Description of Artificial Sequence: Synthetic oligonucleotide
  Sense strand starting at position 3860 of SEQ ID NO: 1242341
cugugaauuccuggaggca

SEQ ID NO: 1340105 - RNA, 19 nt, Artificial Sequence
  Description of Artificial Sequence: Synthetic oligonucleotide
  Antisense strand to SEQ ID NO: 1340104
ugccuccaggaauucacag

SEQ ID NO: 1340106 - RNA, 19 nt, Artificial Sequence
  Description of Artificial Sequence: Synthetic oligonucleotide
  Sense strand starting at position 3861 of SEQ ID NO: 1242341
ugugaauuccuggaggcag

SEQ ID NO: 1340107 - RNA, 19 nt, Artificial Sequence
  Description of Artificial Sequence: Synthetic oligonucleotide
  Antisense strand to SEQ ID NO: 1340106
cugccuccaggaauucaca

SEQ ID NO: 1340108 - RNA, 19 nt, Artificial Sequence
  Description of Artificial Sequence: Synthetic oligonucleotide
  Sense strand starting at position 255 of SEQ ID NO: 1242342
ggccuuauccaccaucagu

SEQ ID NO: 1340109 - RNA, 19 nt, Artificial Sequence
  Description of Artificial Sequence: Synthetic oligonucleotide
  Antisense strand to SEQ ID NO: 1340108
acugaugguggauaaggcc

SEQ ID NO: 1340110 - RNA, 19 nt, Artificial Sequence
  Description of Artificial Sequence: Synthetic oligonucleotide
  Sense strand starting at position 464 of SEQ ID NO: 1242342
gaaacuggguucccaaacu

SEQ ID NO: 1340111 - RNA, 19 nt, Artificial Sequence
  Description of Artificial Sequence: Synthetic oligonucleotide
  Antisense strand to SEQ ID NO: 1340110
aguuugggaacccaguuuc

SEQ ID NO: 1340112 - RNA, 19 nt, Artificial Sequence
  Description of Artificial Sequence: Synthetic oligonucleotide
  Sense strand starting at position 504 of SEQ ID NO: 1242342
uuaggaccaucccaugaaa

SEQ ID NO: 1340113 - RNA, 19 nt, Artificial Sequence
  Description of Artificial Sequence: Synthetic oligonucleotide
  Antisense strand to SEQ ID NO: 1340112
uuucaugggaugguccuaa

SEQ ID NO: 1340114 - RNA, 19 nt, Artificial Sequence
  Description of Artificial Sequence: Synthetic oligonucleotide
  Sense strand starting at position 546 of SEQ ID NO: 1242342
gugagcuuugacuggagaa

SEQ ID NO: 1340115 - RNA, 19 nt, Artificial Sequence
  Description of Artificial Sequence: Synthetic oligonucleotide
  Antisense strand to SEQ ID NO: 1340114
uucuccagucaaagcucac

SEQ ID NO: 1340116 - RNA, 19 nt, Artificial Sequence
  Description of Artificial Sequence: Synthetic oligonucleotide
  Sense strand starting at position 547 of SEQ ID NO: 1242342
ugagcuuugacuggagaaa

SEQ ID NO: 1340117 - RNA, 19 nt, Artificial Sequence
  Description of Artificial Sequence: Synthetic oligonucleotide
  Antisense strand to SEQ ID NO: 1340116
uuucuccagucaaagcuca

SEQ ID NO: 1340118 - RNA, 19 nt, Artificial Sequence
  Description of Artificial Sequence: Synthetic oligonucleotide
  Sense strand starting at position 651 of SEQ ID NO: 1242342
ggaacugaguccuaugagg

SEQ ID NO: 1340119 - RNA, 19 nt, Artificial Sequence
  Description of Artificial Sequence: Synthetic oligonucleotide
  Antisense strand to SEQ ID NO: 1340118
ccucauaggacucaguucc

SEQ ID NO: 1340120 - RNA, 19 nt, Artificial Sequence
  Description of Artificial Sequence: Synthetic oligonucleotide
  Sense strand starting at position 653 of SEQ ID NO: 1242342
aacugaguccuaugaggug

SEQ ID NO: 1340121 - RNA, 19 nt, Artificial Sequence
  Description of Artificial Sequence: Synthetic oligonucleotide
  Antisense strand to SEQ ID NO: 1340120
caccucauaggacucaguu

SEQ ID NO: 1340122 - RNA, 19 nt, Artificial Sequence
  Description of Artificial Sequence: Synthetic oligonucleotide
  Sense strand starting at position 858 of SEQ ID NO: 1242342
gcucaauggcacugagaau

SEQ ID NO: 1340123 - RNA, 19 nt, Artificial Sequence
  Description of Artificial Sequence: Synthetic oligonucleotide
  Antisense strand to SEQ ID NO: 1340122
auucucagugccauugagc

SEQ ID NO: 1340124 - RNA, 19 nt, Artificial Sequence
  Description of Artificial Sequence: Synthetic oligonucleotide
  Sense strand starting at position 869 of SEQ ID NO: 1242342
cugagaauagccgagucaa

SEQ ID NO: 1340125 - RNA, 19 nt, Artificial Sequence
  Description of Artificial Sequence: Synthetic oligonucleotide
  Antisense strand to SEQ ID NO: 1340124
uugacucggcuauucucag

SEQ ID NO: 1340126 - RNA, 19 nt, Artificial Sequence
  Description of Artificial Sequence: Synthetic oligonucleotide
  Sense strand starting at position 897 of SEQ ID NO: 1242342
ucaaguucuucugcgucaa

SEQ ID NO: 1340127 - RNA, 19 nt, Artificial Sequence
  Description of Artificial Sequence: Synthetic oligonucleotide
  Antisense strand to SEQ ID NO: 1340126
uugacgcagaagaacuuga

SEQ ID NO: 1340128 - RNA, 19 nt, Artificial Sequence
  Description of Artificial Sequence: Synthetic oligonucleotide
  Sense strand starting at position 898 of SEQ ID NO: 1242342
caaguucuucugcgucaag

SEQ ID NO: 1340129 - RNA, 19 nt, Artificial Sequence
  Description of Artificial Sequence: Synthetic oligonucleotide
  Antisense strand to SEQ ID NO: 1340128
cuugacgcagaagaacuug

SEQ ID NO: 1340130 - RNA, 19 nt, Artificial Sequence
  Description of Artificial Sequence: Synthetic oligonucleotide
  Sense strand starting at position 943 of SEQ ID NO: 1242342
ucggaucuucucggccaga

SEQ ID NO: 1340131 - RNA, 19 nt, Artificial Sequence
  Description of Artificial Sequence: Synthetic oligonucleotide
  Antisense strand to SEQ ID NO: 1340130
ucuggccgagaagauccga

SEQ ID NO: 1340132 - RNA, 19 nt, Artificial Sequence
  Description of Artificial Sequence: Synthetic oligonucleotide
  Sense strand starting at position 1012 of SEQ ID NO: 1242342
cugaauuaguacguugaca

SEQ ID NO: 1340133 - RNA, 19 nt, Artificial Sequence
  Description of Artificial Sequence: Synthetic oligonucleotide
  Antisense strand to SEQ ID NO: 1340132
ugucaacguacuaauucag

SEQ ID NO: 1340134 - RNA, 19 nt, Artificial Sequence
  Description of Artificial Sequence: Synthetic oligonucleotide
  Sense strand starting at position 1014 of SEQ ID NO: 1242342
gaauuaguacguugacauc

SEQ ID NO: 1340135 - RNA, 19 nt, Artificial Sequence
  Description of Artificial Sequence: Synthetic oligonucleotide
  Antisense strand to SEQ ID NO: 1340134
gaugucaacguacuaauuc

SEQ ID NO: 1340136 - RNA, 19 nt, Artificial Sequence
  Description of Artificial Sequence: Synthetic oligonucleotide
  Sense strand starting at position 1100 of SEQ ID NO: 1242342
ggcagccauuucucuguga

SEQ ID NO: 1340137 - RNA, 19 nt, Artificial Sequence
  Description of Artificial Sequence: Synthetic oligonucleotide
  Antisense strand to SEQ ID NO: 1340136
ucacagagaaauggcugcc

SEQ ID NO: 1340138 - RNA, 19 nt, Artificial Sequence
  Description of Artificial Sequence: Synthetic oligonucleotide
  Sense strand starting at position 1101 of SEQ ID NO: 1242342
gcagccauuucucugugau

SEQ ID NO: 1340139 - RNA, 19 nt, Artificial Sequence
  Description of Artificial Sequence: Synthetic oligonucleotide
  Antisense strand to SEQ ID NO: 1340138
aucacagagaaauggcugc

SEQ ID NO: 1340140 - RNA, 19 nt, Artificial Sequence
  Description of Artificial Sequence: Synthetic oligonucleotide
  Sense strand starting at position 1102 of SEQ ID NO: 1242342
cagccauuucucugugaug

SEQ ID NO: 1340141 - RNA, 19 nt, Artificial Sequence
  Description of Artificial Sequence: Synthetic oligonucleotide
  Antisense strand to SEQ ID NO: 1340140
caucacagagaaauggcug

SEQ ID NO: 1340142 - RNA, 19 nt, Artificial Sequence
  Description of Artificial Sequence: Synthetic oligonucleotide
  Sense strand starting at position 1103 of SEQ ID NO: 1242342
agccauuucucugugaugu

SEQ ID NO: 1340143 - RNA, 19 nt, Artificial Sequence
  Description of Artificial Sequence: Synthetic oligonucleotide
  Antisense strand to SEQ ID NO: 1340142
acaucacagagaaauggcu

SEQ ID NO: 1340144 - RNA, 19 nt, Artificial Sequence
  Description of Artificial Sequence: Synthetic oligonucleotide
  Sense strand starting at position 1104 of SEQ ID NO: 1242342
gccauuucucugugauguu

SEQ ID NO: 1340145 - RNA, 19 nt, Artificial Sequence
  Description of Artificial Sequence: Synthetic oligonucleotide
  Antisense strand to SEQ ID NO: 1340144
aacaucacagagaaauggc

SEQ ID NO: 1340146 - RNA, 19 nt, Artificial Sequence
  Description of Artificial Sequence: Synthetic oligonucleotide
  Sense strand starting at position 1105 of SEQ ID NO: 1242342
ccauuucucugugauguuu

SEQ ID NO: 1340147 - RNA, 19 nt, Artificial Sequence
  Description of Artificial Sequence: Synthetic oligonucleotide
  Antisense strand to SEQ ID NO: 1340146
aaacaucacagagaaaugg

SEQ ID NO: 1340148 - RNA, 19 nt, Artificial Sequence
  Description of Artificial Sequence: Synthetic oligonucleotide
  Sense strand starting at position 1169 of SEQ ID NO: 1242342
ucgguauccggguagcaaa

SEQ ID NO: 1340149 - RNA, 19 nt, Artificial Sequence
  Description of Artificial Sequence: Synthetic oligonucleotide
  Antisense strand to SEQ ID NO: 1340148
uuugcuacccggauaccga

SEQ ID NO: 1340150 - RNA, 19 nt, Artificial Sequence
  Description of Artificial Sequence: Synthetic oligonucleotide
  Sense strand starting at position 1302 of SEQ ID NO: 1242342
gcccaaggcuuucuccauu

SEQ ID NO: 1340151 - RNA, 19 nt, Artificial Sequence
  Description of Artificial Sequence: Synthetic oligonucleotide
  Antisense strand to SEQ ID NO: 1340150
aauggagaaagccuugggc

SEQ ID NO: 1340152 - RNA, 19 nt, Artificial Sequence
  Description of Artificial Sequence: Synthetic oligonucleotide
  Sense strand starting at position 1401 of SEQ ID NO: 1242342
cgcugugucccagagcuca

SEQ ID NO: 1340153 - RNA, 19 nt, Artificial Sequence
  Description of Artificial Sequence: Synthetic oligonucleotide
  Antisense strand to SEQ ID NO: 1340152
ugagcucugggacacagcg

SEQ ID NO: 1340154 - RNA, 19 nt, Artificial Sequence
  Description of Artificial Sequence: Synthetic oligonucleotide
  Sense strand starting at position 1470 of SEQ ID NO: 1242342
gggagagccugaguuagga

SEQ ID NO: 1340155 - RNA, 19 nt, Artificial Sequence
  Description of Artificial Sequence: Synthetic oligonucleotide
  Antisense strand to SEQ ID NO: 1340154
uccuaacucaggcucuccc

SEQ ID NO: 1340156 - RNA, 19 nt, Artificial Sequence
  Description of Artificial Sequence: Synthetic oligonucleotide
  Sense strand starting at position 2162 of SEQ ID NO: 1242342
agaaucgucaaaugagaau

SEQ ID NO: 1340157 - RNA, 19 nt, Artificial Sequence
  Description of Artificial Sequence: Synthetic oligonucleotide
  Antisense strand to SEQ ID NO: 1340156
auucucauuugacgauucu

SEQ ID NO: 1340158 - RNA, 19 nt, Artificial Sequence
  Description of Artificial Sequence: Synthetic oligonucleotide
  Sense strand starting at position 2204 of SEQ ID NO: 1242342
gauuuauuguuaggaggaa

SEQ ID NO: 1340159 - RNA, 19 nt, Artificial Sequence
  Description of Artificial Sequence: Synthetic oligonucleotide
  Antisense strand to SEQ ID NO: 1340158
uuccuccuaacaauaaauc

SEQ ID NO: 1340160 - RNA, 19 nt, Artificial Sequence
  Description of Artificial Sequence: Synthetic oligonucleotide
  Sense strand starting at position 2258 of SEQ ID NO: 1242342
agguuaaacaagugugcaa

SEQ ID NO: 1340161 - RNA, 19 nt, Artificial Sequence
  Description of Artificial Sequence: Synthetic oligonucleotide
  Antisense strand to SEQ ID NO: 1340160
uugcacacuuguuuaaccu

SEQ ID NO: 1340162 - RNA, 19 nt, Artificial Sequence
  Description of Artificial Sequence: Synthetic oligonucleotide
  Sense strand starting at position 2260 of SEQ ID NO: 1242342
guuaaacaagugugcaaau

SEQ ID NO: 1340163 - RNA, 19 nt, Artificial Sequence
  Description of Artificial Sequence: Synthetic oligonucleotide
  Antisense strand to SEQ ID NO: 1340162
auuugcacacuuguuuaac

SEQ ID NO: 1340164 - RNA, 19 nt, Artificial Sequence
  Description of Artificial Sequence: Synthetic oligonucleotide
  Sense strand starting at position 2261 of SEQ ID NO: 1242342
uuaaacaagugugcaaauu

SEQ ID NO: 1340165 - RNA, 19 nt, Artificial Sequence
  Description of Artificial Sequence: Synthetic oligonucleotide
  Antisense strand to SEQ ID NO: 1340164
aauuugcacacuuguuuaa

SEQ ID NO: 1340166 - RNA, 19 nt, Artificial Sequence
  Description of Artificial Sequence: Synthetic oligonucleotide
  Sense strand starting at position 2317 of SEQ ID NO: 1242342
auguuugcaugaguauuaa

SEQ ID NO: 1340167 - RNA, 19 nt, Artificial Sequence
  Description of Artificial Sequence: Synthetic oligonucleotide
  Antisense strand to SEQ ID NO: 1340166
uuaauacucaugcaaacau

SEQ ID NO: 1340168 - RNA, 19 nt, Artificial Sequence
  Description of Artificial Sequence: Synthetic oligonucleotide
  Sense strand starting at position 2503 of SEQ ID NO: 1242342
gcaugugugacagauccua

SEQ ID NO: 1340169 - RNA, 19 nt, Artificial Sequence
  Description of Artificial Sequence: Synthetic oligonucleotide
  Antisense strand to SEQ ID NO: 1340168
uaggaucugucacacaugc

SEQ ID NO: 1340170 - RNA, 19 nt, Artificial Sequence
  Description of Artificial Sequence: Synthetic oligonucleotide
  Sense strand starting at position 2565 of SEQ ID NO: 1242342
gcgggaauuaugggcgaga

SEQ ID NO: 1340171 - RNA, 19 nt, Artificial Sequence
  Description of Artificial Sequence: Synthetic oligonucleotide
  Antisense strand to SEQ ID NO: 1340170
ucucgcccauaauucccgc

SEQ ID NO: 1340172 - RNA, 19 nt, Artificial Sequence
  Description of Artificial Sequence: Synthetic oligonucleotide
  Sense strand starting at position 2566 of SEQ ID NO: 1242342
cgggaauuaugggcgagaa

SEQ ID NO: 1340173 - RNA, 19 nt, Artificial Sequence
  Description of Artificial Sequence: Synthetic oligonucleotide
  Antisense strand to SEQ ID NO: 1340172
uucucgcccauaauucccg

SEQ ID NO: 1340174 - RNA, 19 nt, Artificial Sequence
  Description of Artificial Sequence: Synthetic oligonucleotide
  Sense strand starting at position 2567 of SEQ ID NO: 1242342
gggaauuaugggcgagaaa

SEQ ID NO: 1340175 - RNA, 19 nt, Artificial Sequence
  Description of Artificial Sequence: Synthetic oligonucleotide
  Antisense strand to SEQ ID NO: 1340174
uuucucgcccauaauuccc

SEQ ID NO: 1340176 - RNA, 19 nt, Artificial Sequence
  Description of Artificial Sequence: Synthetic oligonucleotide
  Sense strand starting at position 3373 of SEQ ID NO: 1242342
gcuugagugggccgagauu

SEQ ID NO: 1340177 - RNA, 19 nt, Artificial Sequence
  Description of Artificial Sequence: Synthetic oligonucleotide
  Antisense strand to SEQ ID NO: 1340176
aaucucggcccacucaagc

SEQ ID NO: 1340178 - RNA, 19 nt, Artificial Sequence
  Description of Artificial Sequence: Synthetic oligonucleotide
  Sense strand starting at position 3633 of SEQ ID NO: 1242342
ccaggaggcuuaucauauu

SEQ ID NO: 1340179 - RNA, 19 nt, Artificial Sequence
  Description of Artificial Sequence: Synthetic oligonucleotide
  Antisense strand to SEQ ID NO: 1340178
aauaugauaagccuccugg

SEQ ID NO: 1340180 - RNA, 19 nt, Artificial Sequence
  Description of Artificial Sequence: Synthetic oligonucleotide
  Sense strand starting at position 3664 of SEQ ID NO: 1242342
ucuucugaccuguaucaga

SEQ ID NO: 1340181 - RNA, 19 nt, Artificial Sequence
  Description of Artificial Sequence: Synthetic oligonucleotide
  Antisense strand to SEQ ID NO: 1340180
ucugauacaggucagaaga

SEQ ID NO: 1340182 - RNA, 19 nt, Artificial Sequence
  Description of Artificial Sequence: Synthetic oligonucleotide
  Sense strand starting at position 3677 of SEQ ID NO: 1242342
aucagaaaguuagaaucau

SEQ ID NO: 1340183 - RNA, 19 nt, Artificial Sequence
  Description of Artificial Sequence: Synthetic oligonucleotide
  Antisense strand to SEQ ID NO: 1340182
augauucuaacuuucugau

SEQ ID NO: 1340184 - RNA, 19 nt, Artificial Sequence
  Description of Artificial Sequence: Synthetic oligonucleotide
  Sense strand starting at position 3683 of SEQ ID NO: 1242342
aaguuagaaucaucguaaa

SEQ ID NO: 1340185 - RNA, 19 nt, Artificial Sequence
  Description of Artificial Sequence: Synthetic oligonucleotide
  Antisense strand to SEQ ID NO: 1340184
uuuacgaugauucuaacuu

SEQ ID NO: 1340186 - RNA, 19 nt, Artificial Sequence
  Description of Artificial Sequence: Synthetic oligonucleotide
  Sense strand starting at position 3885 of SEQ ID NO: 1242342
gugcaaugacgcgagcaua

SEQ ID NO: 1340187 - RNA, 19 nt, Artificial Sequence
  Description of Artificial Sequence: Synthetic oligonucleotide
  Antisense strand to SEQ ID NO: 1340186
uaugcucgcgucauugcac

SEQ ID NO: 1340188 - RNA, 19 nt, Artificial Sequence
  Description of Artificial Sequence: Synthetic oligonucleotide
  Sense strand starting at position 176 of SEQ ID NO: 1242343
guaggauggaaguguuaug

SEQ ID NO: 1340189 - RNA, 19 nt, Artificial Sequence
  Description of Artificial Sequence: Synthetic oligonucleotide
  Antisense strand to SEQ ID NO: 1340188
cauaacacuuccauccuac

SEQ ID NO: 1340190 - RNA, 19 nt, Artificial Sequence
  Description of Artificial Sequence: Synthetic oligonucleotide
  Sense strand starting at position 186 of SEQ ID NO: 1242343
aguguuaugaaauguaaug

SEQ ID NO: 1340191 - RNA, 19 nt, Artificial Sequence
  Description of Artificial Sequence: Synthetic oligonucleotide
  Antisense strand to SEQ ID NO: 1340190
cauuacauuucauaacacu

SEQ ID NO: 1340192 - RNA, 19 nt, Artificial Sequence
  Description of Artificial Sequence: Synthetic oligonucleotide
  Sense strand starting at position 286 of SEQ ID NO: 1242343
ggagacagcucuucuguuu

SEQ ID NO: 1340193 - RNA, 19 nt, Artificial Sequence
  Description of Artificial Sequence: Synthetic oligonucleotide
  Antisense strand to SEQ ID NO: 1340192
aaacagaagagcugucucc

SEQ ID NO: 1340194 - RNA, 19 nt, Artificial Sequence
  Description of Artificial Sequence: Synthetic oligonucleotide
  Sense strand starting at position 515 of SEQ ID NO: 1242343
gagagcuggcgucauagaa

SEQ ID NO: 1340195 - RNA, 19 nt, Artificial Sequence
  Description of Artificial Sequence: Synthetic oligonucleotide
  Antisense strand to SEQ ID NO: 1340194
uucuaugacgccagcucuc

SEQ ID NO: 1340196 - RNA, 19 nt, Artificial Sequence
  Description of Artificial Sequence: Synthetic oligonucleotide
  Sense strand starting at position 549 of SEQ ID NO: 1242343
gagaccuggguuugaauca

SEQ ID NO: 1340197 - RNA, 19 nt, Artificial Sequence
  Description of Artificial Sequence: Synthetic oligonucleotide
  Antisense strand to SEQ ID NO: 1340196
ugauucaaacccaggucuc

SEQ ID NO: 1340198 - RNA, 19 nt, Artificial Sequence
  Description of Artificial Sequence: Synthetic oligonucleotide
  Sense strand starting at position 568 of SEQ ID NO: 1242343
ggcuuugucaguuaugacu

SEQ ID NO: 1340199 - RNA, 19 nt, Artificial Sequence
  Description of Artificial Sequence: Synthetic oligonucleotide
  Antisense strand to SEQ ID NO: 1340198
agucauaacugacaaagcc

SEQ ID NO: 1340200 - RNA, 19 nt, Artificial Sequence
  Description of Artificial Sequence: Synthetic oligonucleotide
  Sense strand starting at position 579 of SEQ ID NO: 1242343
uuaugacuugugugacccu

SEQ ID NO: 1340201 - RNA, 19 nt, Artificial Sequence
  Description of Artificial Sequence: Synthetic oligonucleotide
  Antisense strand to SEQ ID NO: 1340200
agggucacacaagucauaa

SEQ ID NO: 1340202 - RNA, 19 nt, Artificial Sequence
  Description of Artificial Sequence: Synthetic oligonucleotide
  Sense strand starting at position 917 of SEQ ID NO: 1242343
caccuuucuggcugguaga

SEQ ID NO: 1340203 - RNA, 19 nt, Artificial Sequence
  Description of Artificial Sequence: Synthetic oligonucleotide
  Antisense strand to SEQ ID NO: 1340202
ucuaccagccagaaaggug

SEQ ID NO: 1340204 - RNA, 19 nt, Artificial Sequence
  Description of Artificial Sequence: Synthetic oligonucleotide
  Sense strand starting at position 928 of SEQ ID NO: 1242343
cugguagacauccagguau

SEQ ID NO: 1340205 - RNA, 19 nt, Artificial Sequence
  Description of Artificial Sequence: Synthetic oligonucleotide
  Antisense strand to SEQ ID NO: 1340204
auaccuggaugucuaccag

SEQ ID NO: 1340206 - RNA, 19 nt, Artificial Sequence
  Description of Artificial Sequence: Synthetic oligonucleotide
  Sense strand starting at position 930 of SEQ ID NO: 1242343
gguagacauccagguaugu

SEQ ID NO: 1340207 - RNA, 19 nt, Artificial Sequence
  Description of Artificial Sequence: Synthetic oligonucleotide
  Antisense strand to SEQ ID NO: 1340206
acauaccuggaugucuacc

SEQ ID NO: 1340208 - RNA, 19 nt, Artificial Sequence
  Description of Artificial Sequence: Synthetic oligonucleotide
  Sense strand starting at position 939 of SEQ ID NO: 1242343
ccagguaugugggcacaga

SEQ ID NO: 1340209 - RNA, 19 nt, Artificial Sequence
  Description of Artificial Sequence: Synthetic oligonucleotide
  Antisense strand to SEQ ID NO: 1340208
ucugugcccacauaccugg

SEQ ID NO: 1340210 - RNA, 19 nt, Artificial Sequence
  Description of Artificial Sequence: Synthetic oligonucleotide
  Sense strand starting at position 1102 of SEQ ID NO: 1242343
agaacaagauccuagauuu

SEQ ID NO: 1340211 - RNA, 19 nt, Artificial Sequence
  Description of Artificial Sequence: Synthetic oligonucleotide
  Antisense strand to SEQ ID NO: 1340210
aaaucuaggaucuuguucu

SEQ ID NO: 1340212 - RNA, 19 nt, Artificial Sequence
  Description of Artificial Sequence: Synthetic oligonucleotide
  Sense strand starting at position 1172 of SEQ ID NO: 1242343
agccauuaacuuugaguuu

SEQ ID NO: 1340213 - RNA, 19 nt, Artificial Sequence
  Description of Artificial Sequence: Synthetic oligonucleotide
  Antisense strand to SEQ ID NO: 1340212
aaacucaaaguuaauggcu

SEQ ID NO: 1340214 - RNA, 19 nt, Artificial Sequence
  Description of Artificial Sequence: Synthetic oligonucleotide
  Sense strand starting at position 1701 of SEQ ID NO: 1242343
aucaaauuggucuggcuca

SEQ ID NO: 1340215 - RNA, 19 nt, Artificial Sequence
  Description of Artificial Sequence: Synthetic oligonucleotide
  Antisense strand to SEQ ID NO: 1340214
ugagccagaccaauuugau

SEQ ID NO: 1340216 - RNA, 19 nt, Artificial Sequence
  Description of Artificial Sequence: Synthetic oligonucleotide
  Sense strand starting at position 1712 of SEQ ID NO: 1242343
cuggcucaaccuggagaau

SEQ ID NO: 1340217 - RNA, 19 nt, Artificial Sequence
  Description of Artificial Sequence: Synthetic oligonucleotide
  Antisense strand to SEQ ID NO: 1340216
auucuccagguugagccag

SEQ ID NO: 1340218 - RNA, 19 nt, Artificial Sequence
  Description of Artificial Sequence: Synthetic oligonucleotide
  Sense strand starting at position 1724 of SEQ ID NO: 1242343
ggagaauggccaggugguu

SEQ ID NO: 1340219 - RNA, 19 nt, Artificial Sequence
  Description of Artificial Sequence: Synthetic oligonucleotide
  Antisense strand to SEQ ID NO: 1340218
aaccaccuggccauucucc

SEQ ID NO: 1340220 - RNA, 19 nt, Artificial Sequence
  Description of Artificial Sequence: Synthetic oligonucleotide
  Sense strand starting at position 1941 of SEQ ID NO: 1242343
uugggauuagugugucaua

SEQ ID NO: 1340221 - RNA, 19 nt, Artificial Sequence
  Description of Artificial Sequence: Synthetic oligonucleotide
  Antisense strand to SEQ ID NO: 1340220
uaugacacacuaaucccaa

SEQ ID NO: 1340222 - RNA, 19 nt, Artificial Sequence
  Description of Artificial Sequence: Synthetic oligonucleotide
  Sense strand starting at position 1942 of SEQ ID NO: 1242343
ugggauuagugugucauaa

SEQ ID NO: 1340223 - RNA, 19 nt, Artificial Sequence
  Description of Artificial Sequence: Synthetic oligonucleotide
  Antisense strand to SEQ ID NO: 1340222
uuaugacacacuaauccca

SEQ ID NO: 1340224 - RNA, 19 nt, Artificial Sequence
  Description of Artificial Sequence: Synthetic oligonucleotide
  Sense strand starting at position 1977 of SEQ ID NO: 1242343
cacaguuuccguuaaaucg

SEQ ID NO: 1340225 - RNA, 19 nt, Artificial Sequence
  Description of Artificial Sequence: Synthetic oligonucleotide
  Antisense strand to SEQ ID NO: 1340224
cgauuuaacggaaacugug

SEQ ID NO: 1340226 - RNA, 19 nt, Artificial Sequence
  Description of Artificial Sequence: Synthetic oligonucleotide
  Sense strand starting at position 2281 of SEQ ID NO: 1242343
ucguaaauaugacuacauc

SEQ ID NO: 1340227 - RNA, 19 nt, Artificial Sequence
  Description of Artificial Sequence: Synthetic oligonucleotide
  Antisense strand to SEQ ID NO: 1340226
gauguagucauauuuacga

SEQ ID NO: 1340228 - RNA, 19 nt, Artificial Sequence
  Description of Artificial Sequence: Synthetic oligonucleotide
  Sense strand starting at position 2282 of SEQ ID NO: 1242343
cguaaauaugacuacaucu

SEQ ID NO: 1340229 - RNA, 19 nt, Artificial Sequence
  Description of Artificial Sequence: Synthetic oligonucleotide
  Antisense strand to SEQ ID NO: 1340228
agauguagucauauuuacg

SEQ ID NO: 1340230 - RNA, 19 nt, Artificial Sequence
  Description of Artificial Sequence: Synthetic oligonucleotide
  Sense strand starting at position 2401 of SEQ ID NO: 1242343
ugagaaauguggcugguua

SEQ ID NO: 1340231 - RNA, 19 nt, Artificial Sequence
  Description of Artificial Sequence: Synthetic oligonucleotide
  Antisense strand to SEQ ID NO: 1340230
uaaccagccacauuucuca

SEQ ID NO: 1340232 - RNA, 19 nt, Artificial Sequence
  Description of Artificial Sequence: Synthetic oligonucleotide
  Sense strand starting at position 2402 of SEQ ID NO: 1242343
gagaaauguggcugguuaa

SEQ ID NO: 1340233 - RNA, 19 nt, Artificial Sequence
  Description of Artificial Sequence: Synthetic oligonucleotide
  Antisense strand to SEQ ID NO: 1340232
uuaaccagccacauuucuc

SEQ ID NO: 1340234 - RNA, 19 nt, Artificial Sequence
  Description of Artificial Sequence: Synthetic oligonucleotide
  Sense strand starting at position 2403 of SEQ ID NO: 1242343
agaaauguggcugguuaag

SEQ ID NO: 1340235 - RNA, 19 nt, Artificial Sequence
  Description of Artificial Sequence: Synthetic oligonucleotide
  Antisense strand to SEQ ID NO: 1340234
cuuaaccagccacauuucu

SEQ ID NO: 1340236 - RNA, 19 nt, Artificial Sequence
  Description of Artificial Sequence: Synthetic oligonucleotide
  Sense strand starting at position 2526 of SEQ ID NO: 1242343
aucuucuggccgggaaaca

SEQ ID NO: 1340237 - RNA, 19 nt, Artificial Sequence
  Description of Artificial Sequence: Synthetic oligonucleotide
  Antisense strand to SEQ ID NO: 1340236
uguuucccggccagaagau

SEQ ID NO: 1340238 - RNA, 19 nt, Artificial Sequence
  Description of Artificial Sequence: Synthetic oligonucleotide
  Sense strand starting at position 2527 of SEQ ID NO: 1242343
ucuucuggccgggaaacau

SEQ ID NO: 1340239 - RNA, 19 nt, Artificial Sequence
  Description of Artificial Sequence: Synthetic oligonucleotide
  Antisense strand to SEQ ID NO: 1340238
auguuucccggccagaaga

SEQ ID NO: 1340240 - RNA, 19 nt, Artificial Sequence
  Description of Artificial Sequence: Synthetic oligonucleotide
  Sense strand starting at position 2567 of SEQ ID NO: 1242343
aguuuccuccucuaagaag

SEQ ID NO: 1340241 - RNA, 19 nt, Artificial Sequence
  Description of Artificial Sequence: Synthetic oligonucleotide
  Antisense strand to SEQ ID NO: 1340240
cuucuuagaggaggaaacu

SEQ ID NO: 1340242 - RNA, 19 nt, Artificial Sequence
  Description of Artificial Sequence: Synthetic oligonucleotide
  Sense strand starting at position 2611 of SEQ ID NO: 1242343
augacuuuagugcggauga

SEQ ID NO: 1340243 - RNA, 19 nt, Artificial Sequence
  Description of Artificial Sequence: Synthetic oligonucleotide
  Antisense strand to SEQ ID NO: 1340242
ucauccgcacuaaagucau

SEQ ID NO: 1340244 - RNA, 19 nt, Artificial Sequence
  Description of Artificial Sequence: Synthetic oligonucleotide
  Sense strand starting at position 2613 of SEQ ID NO: 1242343
gacuuuagugcggaugaaa

SEQ ID NO: 1340245 - RNA, 19 nt, Artificial Sequence
  Description of Artificial Sequence: Synthetic oligonucleotide
  Antisense strand to SEQ ID NO: 1340244
uuucauccgcacuaaaguc

SEQ ID NO: 1340246 - RNA, 19 nt, Artificial Sequence
  Description of Artificial Sequence: Synthetic oligonucleotide
  Sense strand starting at position 2810 of SEQ ID NO: 1242343
uugcuauuccacuggauga

SEQ ID NO: 1340247 - RNA, 19 nt, Artificial Sequence
  Description of Artificial Sequence: Synthetic oligonucleotide
  Antisense strand to SEQ ID NO: 1340246
ucauccaguggaauagcaa

SEQ ID NO: 1340248 - RNA, 19 nt, Artificial Sequence
  Description of Artificial Sequence: Synthetic oligonucleotide
  Sense strand starting at position 2836 of SEQ ID NO: 1242343
guaauuccuguagaacauu

SEQ ID NO: 1340249 - RNA, 19 nt, Artificial Sequence
  Description of Artificial Sequence: Synthetic oligonucleotide
  Antisense strand to SEQ ID NO: 1340248
aauguucuacaggaauuac

SEQ ID NO: 1340250 - RNA, 19 nt, Artificial Sequence
  Description of Artificial Sequence: Synthetic oligonucleotide
  Sense strand starting at position 2902 of SEQ ID NO: 1242343
gggagcucuccuuguuuaa

SEQ ID NO: 1340251 - RNA, 19 nt, Artificial Sequence
  Description of Artificial Sequence: Synthetic oligonucleotide
  Antisense strand to SEQ ID NO: 1340250
uuaaacaaggagagcuccc

SEQ ID NO: 1340252 - RNA, 19 nt, Artificial Sequence
  Description of Artificial Sequence: Synthetic oligonucleotide
  Sense strand starting at position 3171 of SEQ ID NO: 1242343
cugcaaugccuggugcuua

SEQ ID NO: 1340253 - RNA, 19 nt, Artificial Sequence
  Description of Artificial Sequence: Synthetic oligonucleotide
  Antisense strand to SEQ ID NO: 1340252
uaagcaccaggcauugcag

SEQ ID NO: 1340254 - RNA, 19 nt, Artificial Sequence
  Description of Artificial Sequence: Synthetic oligonucleotide
  Sense strand starting at position 3216 of SEQ ID NO: 1242343
ugagcucuuuguuuccaaa

SEQ ID NO: 1340255 - RNA, 19 nt, Artificial Sequence
  Description of Artificial Sequence: Synthetic oligonucleotide
  Antisense strand to SEQ ID NO: 1340254
uuuggaaacaaagagcuca

SEQ ID NO: 1340256 - RNA, 19 nt, Artificial Sequence
  Description of Artificial Sequence: Synthetic oligonucleotide
  Sense strand starting at position 3412 of SEQ ID NO: 1242343
ggguaaugcuagagauugg

SEQ ID NO: 1340257 - RNA, 19 nt, Artificial Sequence
  Description of Artificial Sequence: Synthetic oligonucleotide
  Antisense strand to SEQ ID NO: 1340256
ccaaucucuagcauuaccc

SEQ ID NO: 1340258 - RNA, 19 nt, Artificial Sequence
  Description of Artificial Sequence: Synthetic oligonucleotide
  Sense strand starting at position 3888 of SEQ ID NO: 1242343
uuauaugugugauccuauu

SEQ ID NO: 1340259 - RNA, 19 nt, Artificial Sequence
  Description of Artificial Sequence: Synthetic oligonucleotide
  Antisense strand to SEQ ID NO: 1340258
aauaggaucacacauauaa

SEQ ID NO: 1340260 - RNA, 19 nt, Artificial Sequence
  Description of Artificial Sequence: Synthetic oligonucleotide
  Sense strand starting at position 3926 of SEQ ID NO: 1242343
ugaaguauuucucauaaga

SEQ ID NO: 1340261 - RNA, 19 nt, Artificial Sequence
  Description of Artificial Sequence: Synthetic oligonucleotide
  Antisense strand to SEQ ID NO: 1340260
ucuuaugagaaauacuuca

SEQ ID NO: 1340262 - RNA, 19 nt, Artificial Sequence
  Description of Artificial Sequence: Synthetic oligonucleotide
  Sense strand starting at position 3944 of SEQ ID NO: 1242343
aauuuagagucccaaguga

SEQ ID NO: 1340263 - RNA, 19 nt, Artificial Sequence
  Description of Artificial Sequence: Synthetic oligonucleotide
  Antisense strand to SEQ ID NO: 1340262
ucacuugggacucuaaauu

SEQ ID NO: 1340264 - RNA, 19 nt, Artificial Sequence
  Description of Artificial Sequence: Synthetic oligonucleotide
  Sense strand starting at position 3955 of SEQ ID NO: 1242343
ccaagugagaugugcuaua

SEQ ID NO: 1340265 - RNA, 19 nt, Artificial Sequence
  Description of Artificial Sequence: Synthetic oligonucleotide
  Antisense strand to SEQ ID NO: 1340264
uauagcacaucucacuugg

SEQ ID NO: 1340266 - RNA, 19 nt, Artificial Sequence
  Description of Artificial Sequence: Synthetic oligonucleotide
  Sense strand starting at position 3968 of SEQ ID NO: 1242343
gcuauaaaguaucuaaaga

SEQ ID NO: 1340267 - RNA, 19 nt, Artificial Sequence
  Description of Artificial Sequence: Synthetic oligonucleotide
  Antisense strand to SEQ ID NO: 1340266
ucuuuagauacuuuauagc

SEQ ID NO: 1340268 - RNA, 19 nt, Artificial Sequence
  Description of Artificial Sequence: Synthetic oligonucleotide
  Sense strand starting at position 339 of SEQ ID NO: 1242344
agauccuuugcucaaauga

SEQ ID NO: 1340269 - RNA, 19 nt, Artificial Sequence
  Description of Artificial Sequence: Synthetic oligonucleotide
  Antisense strand to SEQ ID NO: 1340268
ucauuugagcaaaggaucu

SEQ ID NO: 1340270 - RNA, 19 nt, Artificial Sequence
  Description of Artificial Sequence: Synthetic oligonucleotide
  Sense strand starting at position 423 of SEQ ID NO: 1242344
ugcauuaagcgugcuccua

SEQ ID NO: 1340271 - RNA, 19 nt, Artificial Sequence
  Description of Artificial Sequence: Synthetic oligonucleotide
  Antisense strand to SEQ ID NO: 1340270
uaggagcacgcuuaaugca

SEQ ID NO: 1340272 - RNA, 19 nt, Artificial Sequence
  Description of Artificial Sequence: Synthetic oligonucleotide
  Sense strand starting at position 441 of SEQ ID NO: 1242344
agcccuaugccguagaaag

SEQ ID NO: 1340273 - RNA, 19 nt, Artificial Sequence
  Description of Artificial Sequence: Synthetic oligonucleotide
  Antisense strand to SEQ ID NO: 1340272
cuuucuacggcauagggcu

SEQ ID NO: 1340274 - RNA, 19 nt, Artificial Sequence
  Description of Artificial Sequence: Synthetic oligonucleotide
  Sense strand starting at position 501 of SEQ ID NO: 1242344
cugugacagccucaggaaa

SEQ ID NO: 1340275 - RNA, 19 nt, Artificial Sequence
  Description of Artificial Sequence: Synthetic oligonucleotide
  Antisense strand to SEQ ID NO: 1340274
uuuccugaggcugucacag

SEQ ID NO: 1340276 - RNA, 19 nt, Artificial Sequence
  Description of Artificial Sequence: Synthetic oligonucleotide
  Sense strand starting at position 575 of SEQ ID NO: 1242344
aaacuugaaugagauaguu

SEQ ID NO: 1340277 - RNA, 19 nt, Artificial Sequence
  Description of Artificial Sequence: Synthetic oligonucleotide
  Antisense strand to SEQ ID NO: 1340276
aacuaucucauucaaguuu

SEQ ID NO: 1340278 - RNA, 19 nt, Artificial Sequence
  Description of Artificial Sequence: Synthetic oligonucleotide
  Sense strand starting at position 583 of SEQ ID NO: 1242344
augagauaguugccaaguu

SEQ ID NO: 1340279 - RNA, 19 nt, Artificial Sequence
  Description of Artificial Sequence: Synthetic oligonucleotide
  Antisense strand to SEQ ID NO: 1340278
aacuuggcaacuaucucau

SEQ ID NO: 1340280 - RNA, 19 nt, Artificial Sequence
  Description of Artificial Sequence: Synthetic oligonucleotide
  Sense strand starting at position 592 of SEQ ID NO: 1242344
uugccaaguugucuugaua

SEQ ID NO: 1340281 - RNA, 19 nt, Artificial Sequence
  Description of Artificial Sequence: Synthetic oligonucleotide
  Antisense strand to SEQ ID NO: 1340280
uaucaagacaacuuggcaa

SEQ ID NO: 1340282 - RNA, 19 nt, Artificial Sequence
  Description of Artificial Sequence: Synthetic oligonucleotide
  Sense strand starting at position 595 of SEQ ID NO: 1242344
ccaaguugucuugauaguu

SEQ ID NO: 1340283 - RNA, 19 nt, Artificial Sequence
  Description of Artificial Sequence: Synthetic oligonucleotide
  Antisense strand to SEQ ID NO: 1340282
aacuaucaagacaacuugg

SEQ ID NO: 1340284 - RNA, 19 nt, Artificial Sequence
  Description of Artificial Sequence: Synthetic oligonucleotide
  Sense strand starting at position 600 of SEQ ID NO: 1242344
uugucuugauaguugccaa

SEQ ID NO: 1340285 - RNA, 19 nt, Artificial Sequence
  Description of Artificial Sequence: Synthetic oligonucleotide
  Antisense strand to SEQ ID NO: 1340284
uuggcaacuaucaagacaa

SEQ ID NO: 1340286 - RNA, 19 nt, Artificial Sequence
  Description of Artificial Sequence: Synthetic oligonucleotide
  Sense strand starting at position 603 of SEQ ID NO: 1242344
ucuugauaguugccaaguu

SEQ ID NO: 1340287 - RNA, 19 nt, Artificial Sequence
  Description of Artificial Sequence: Synthetic oligonucleotide
  Antisense strand to SEQ ID NO: 1340286
aacuuggcaacuaucaaga

SEQ ID NO: 1340288 - RNA, 19 nt, Artificial Sequence
  Description of Artificial Sequence: Synthetic oligonucleotide
  Sense strand starting at position 769 of SEQ ID NO: 1242344
gcacuauuguggccagaac

SEQ ID NO: 1340289 - RNA, 19 nt, Artificial Sequence
  Description of Artificial Sequence: Synthetic oligonucleotide
  Antisense strand to SEQ ID NO: 1340288
guucuggccacaauagugc

SEQ ID NO: 1340290 - RNA, 19 nt, Artificial Sequence
  Description of Artificial Sequence: Synthetic oligonucleotide
  Sense strand starting at position 770 of SEQ ID NO: 1242344
cacuauuguggccagaacu

SEQ ID NO: 1340291 - RNA, 19 nt, Artificial Sequence
  Description of Artificial Sequence: Synthetic oligonucleotide
  Antisense strand to SEQ ID NO: 1340290
aguucuggccacaauagug

SEQ ID NO: 1340292 - RNA, 19 nt, Artificial Sequence
  Description of Artificial Sequence: Synthetic oligonucleotide
  Sense strand starting at position 1073 of SEQ ID NO: 1242344
uugacaucugguugaacgu

SEQ ID NO: 1340293 - RNA, 19 nt, Artificial Sequence
  Description of Artificial Sequence: Synthetic oligonucleotide
  Antisense strand to SEQ ID NO: 1340292
acguucaaccagaugucaa

SEQ ID NO: 1340294 - RNA, 19 nt, Artificial Sequence
  Description of Artificial Sequence: Synthetic oligonucleotide
  Sense strand starting at position 1074 of SEQ ID NO: 1242344
ugacaucugguugaacguu

SEQ ID NO: 1340295 - RNA, 19 nt, Artificial Sequence
  Description of Artificial Sequence: Synthetic oligonucleotide
  Antisense strand to SEQ ID NO: 1340294
aacguucaaccagauguca

SEQ ID NO: 1340296 - RNA, 19 nt, Artificial Sequence
  Description of Artificial Sequence: Synthetic oligonucleotide
  Sense strand starting at position 1348 of SEQ ID NO: 1242344
ggaucugaagucugcguau

SEQ ID NO: 1340297 - RNA, 19 nt, Artificial Sequence
  Description of Artificial Sequence: Synthetic oligonucleotide
  Antisense strand to SEQ ID NO: 1340296
auacgcagacuucagaucc

SEQ ID NO: 1340298 - RNA, 19 nt, Artificial Sequence
  Description of Artificial Sequence: Synthetic oligonucleotide
  Sense strand starting at position 1350 of SEQ ID NO: 1242344
aucugaagucugcguauag

SEQ ID NO: 1340299 - RNA, 19 nt, Artificial Sequence
  Description of Artificial Sequence: Synthetic oligonucleotide
  Antisense strand to SEQ ID NO: 1340298
cuauacgcagacuucagau

SEQ ID NO: 1340300 - RNA, 19 nt, Artificial Sequence
  Description of Artificial Sequence: Synthetic oligonucleotide
  Sense strand starting at position 1362 of SEQ ID NO: 1242344
cguauaguccagggaguug

SEQ ID NO: 1340301 - RNA, 19 nt, Artificial Sequence
  Description of Artificial Sequence: Synthetic oligonucleotide
  Antisense strand to SEQ ID NO: 1340300
caacucccuggacuauacg

SEQ ID NO: 1340302 - RNA, 19 nt, Artificial Sequence
  Description of Artificial Sequence: Synthetic oligonucleotide
  Sense strand starting at position 2184 of SEQ ID NO: 1242344
gggagacuucuugggcgga

SEQ ID NO: 1340303 - RNA, 19 nt, Artificial Sequence
  Description of Artificial Sequence: Synthetic oligonucleotide
  Antisense strand to SEQ ID NO: 1340302
uccgcccaagaagucuccc

SEQ ID NO: 1340304 - RNA, 19 nt, Artificial Sequence
  Description of Artificial Sequence: Synthetic oligonucleotide
  Sense strand starting at position 2280 of SEQ ID NO: 1242344
ccggaauacgcucagcaua

SEQ ID NO: 1340305 - RNA, 19 nt, Artificial Sequence
  Description of Artificial Sequence: Synthetic oligonucleotide
  Antisense strand to SEQ ID NO: 1340304
uaugcugagcguauuccgg

SEQ ID NO: 1340306 - RNA, 19 nt, Artificial Sequence
  Description of Artificial Sequence: Synthetic oligonucleotide
  Sense strand starting at position 2282 of SEQ ID NO: 1242344
ggaauacgcucagcauauu

SEQ ID NO: 1340307 - RNA, 19 nt, Artificial Sequence
  Description of Artificial Sequence: Synthetic oligonucleotide
  Antisense strand to SEQ ID NO: 1340306
aauaugcugagcguauucc

SEQ ID NO: 1340308 - RNA, 19 nt, Artificial Sequence
  Description of Artificial Sequence: Synthetic oligonucleotide
  Sense strand starting at position 2523 of SEQ ID NO: 1242344
cuuguaauuguaugcaacu

SEQ ID NO: 1340309 - RNA, 19 nt, Artificial Sequence
  Description of Artificial Sequence: Synthetic oligonucleotide
  Antisense strand to SEQ ID NO: 1340308
aguugcauacaauuacaag

SEQ ID NO: 1340310 - RNA, 19 nt, Artificial Sequence
  Description of Artificial Sequence: Synthetic oligonucleotide
  Sense strand starting at position 2524 of SEQ ID NO: 1242344
uuguaauuguaugcaacuu

SEQ ID NO: 1340311 - RNA, 19 nt, Artificial Sequence
  Description of Artificial Sequence: Synthetic oligonucleotide
  Antisense strand to SEQ ID NO: 1340310
aaguugcauacaauuacaa

SEQ ID NO: 1340312 - RNA, 19 nt, Artificial Sequence
  Description of Artificial Sequence: Synthetic oligonucleotide
  Sense strand starting at position 2600 of SEQ ID NO: 1242344
gugaacauuucuuaagagu

SEQ ID NO: 1340313 - RNA, 19 nt, Artificial Sequence
  Description of Artificial Sequence: Synthetic oligonucleotide
  Antisense strand to SEQ ID NO: 1340312
acucuuaagaaauguucac

SEQ ID NO: 1340314 - RNA, 19 nt, Artificial Sequence
  Description of Artificial Sequence: Synthetic oligonucleotide
  Sense strand starting at position 2637 of SEQ ID NO: 1242344
aagaaauaucuaggccagu

SEQ ID NO: 1340315 - RNA, 19 nt, Artificial Sequence
  Description of Artificial Sequence: Synthetic oligonucleotide
  Antisense strand to SEQ ID NO: 1340314
acuggccuagauauuucuu

SEQ ID NO: 1340316 - RNA, 19 nt, Artificial Sequence
  Description of Artificial Sequence: Synthetic oligonucleotide
  Sense strand starting at position 2751 of SEQ ID NO: 1242344
acgugacuguagucacaga

SEQ ID NO: 1340317 - RNA, 19 nt, Artificial Sequence
  Description of Artificial Sequence: Synthetic oligonucleotide
  Antisense strand to SEQ ID NO: 1340316
ucugugacuacagucacgu

SEQ ID NO: 1340318 - RNA, 19 nt, Artificial Sequence
  Description of Artificial Sequence: Synthetic oligonucleotide
  Sense strand starting at position 2752 of SEQ ID NO: 1242344
cgugacuguagucacagau

SEQ ID NO: 1340319 - RNA, 19 nt, Artificial Sequence
  Description of Artificial Sequence: Synthetic oligonucleotide
  Antisense strand to SEQ ID NO: 1340318
aucugugacuacagucacg

SEQ ID NO: 1340320 - RNA, 19 nt, Artificial Sequence
  Description of Artificial Sequence: Synthetic oligonucleotide
  Sense strand starting at position 2829 of SEQ ID NO: 1242344
ccaugaucacucugggcaa

SEQ ID NO: 1340321 - RNA, 19 nt, Artificial Sequence
  Description of Artificial Sequence: Synthetic oligonucleotide
  Antisense strand to SEQ ID NO: 1340320
uugcccagagugaucaugg

SEQ ID NO: 1340322 - RNA, 19 nt, Artificial Sequence
  Description of Artificial Sequence: Synthetic oligonucleotide
  Sense strand starting at position 3168 of SEQ ID NO: 1242344
cuggaaaccuucccagauc

SEQ ID NO: 1340323 - RNA, 19 nt, Artificial Sequence
  Description of Artificial Sequence: Synthetic oligonucleotide
  Antisense strand to SEQ ID NO: 1340322
gaucugggaagguuuccag

SEQ ID NO: 1340324 - RNA, 19 nt, Artificial Sequence
  Description of Artificial Sequence: Synthetic oligonucleotide
  Sense strand starting at position 3169 of SEQ ID NO: 1242344
uggaaaccuucccagauca

SEQ ID NO: 1340325 - RNA, 19 nt, Artificial Sequence
  Description of Artificial Sequence: Synthetic oligonucleotide
  Antisense strand to SEQ ID NO: 1340324
ugaucugggaagguuucca

SEQ ID NO: 1340326 - RNA, 19 nt, Artificial Sequence
  Description of Artificial Sequence: Synthetic oligonucleotide
  Sense strand starting at position 3183 of SEQ ID NO: 1242344
gaucaccaccuuggugaaa

SEQ ID NO: 1340327 - RNA, 19 nt, Artificial Sequence
  Description of Artificial Sequence: Synthetic oligonucleotide
  Antisense strand to SEQ ID NO: 1340326
uuucaccaagguggugauc

SEQ ID NO: 1340328 - RNA, 19 nt, Artificial Sequence
  Description of Artificial Sequence: Synthetic oligonucleotide
  Sense strand starting at position 3184 of SEQ ID NO: 1242344
aucaccaccuuggugaaau

SEQ ID NO: 1340329 - RNA, 19 nt, Artificial Sequence
  Description of Artificial Sequence: Synthetic oligonucleotide
  Antisense strand to SEQ ID NO: 1340328
auuucaccaagguggugau

SEQ ID NO: 1340330 - RNA, 19 nt, Artificial Sequence
  Description of Artificial Sequence: Synthetic oligonucleotide
  Sense strand starting at position 3444 of SEQ ID NO: 1242344
cggauuucuacauguuggu

SEQ ID NO: 1340331 - RNA, 19 nt, Artificial Sequence
  Description of Artificial Sequence: Synthetic oligonucleotide
  Antisense strand to SEQ ID NO: 1340330
accaacauguagaaauccg

SEQ ID NO: 1340332 - RNA, 19 nt, Artificial Sequence
  Description of Artificial Sequence: Synthetic oligonucleotide
  Sense strand starting at position 3559 of SEQ ID NO: 1242344
acacucuguucugugauua

SEQ ID NO: 1340333 - RNA, 19 nt, Artificial Sequence
  Description of Artificial Sequence: Synthetic oligonucleotide
  Antisense strand to SEQ ID NO: 1340332
uaaucacagaacagagugu

SEQ ID NO: 1340334 - RNA, 19 nt, Artificial Sequence
  Description of Artificial Sequence: Synthetic oligonucleotide
  Sense strand starting at position 3563 of SEQ ID NO: 1242344
ucuguucugugauuauuug

SEQ ID NO: 1340335 - RNA, 19 nt, Artificial Sequence
  Description of Artificial Sequence: Synthetic oligonucleotide
  Antisense strand to SEQ ID NO: 1340334
caaauaaucacagaacaga

SEQ ID NO: 1340336 - RNA, 19 nt, Artificial Sequence
  Description of Artificial Sequence: Synthetic oligonucleotide
  Sense strand starting at position 3570 of SEQ ID NO: 1242344
ugugauuauuugcuuucua

SEQ ID NO: 1340337 - RNA, 19 nt, Artificial Sequence
  Description of Artificial Sequence: Synthetic oligonucleotide
  Antisense strand to SEQ ID NO: 1340336
uagaaagcaaauaaucaca

SEQ ID NO: 1340338 - RNA, 19 nt, Artificial Sequence
  Description of Artificial Sequence: Synthetic oligonucleotide
  Sense strand starting at position 3571 of SEQ ID NO: 1242344
gugauuauuugcuuucuac

SEQ ID NO: 1340339 - RNA, 19 nt, Artificial Sequence
  Description of Artificial Sequence: Synthetic oligonucleotide
  Antisense strand to SEQ ID NO: 1340338
guagaaagcaaauaaucac

SEQ ID NO: 1340340 - RNA, 19 nt, Artificial Sequence
  Description of Artificial Sequence: Synthetic oligonucleotide
  Sense strand starting at position 3820 of SEQ ID NO: 1242344
ggaggcagcucugugagau

SEQ ID NO: 1340341 - RNA, 19 nt, Artificial Sequence
  Description of Artificial Sequence: Synthetic oligonucleotide
  Antisense strand to SEQ ID NO: 1340340
aucucacagagcugccucc

SEQ ID NO: 1340342 - RNA, 19 nt, Artificial Sequence
  Description of Artificial Sequence: Synthetic oligonucleotide
  Sense strand starting at position 3821 of SEQ ID NO: 1242344
gaggcagcucugugagaua

SEQ ID NO: 1340343 - RNA, 19 nt, Artificial Sequence
  Description of Artificial Sequence: Synthetic oligonucleotide
  Antisense strand to SEQ ID NO: 1340342
uaucucacagagcugccuc

SEQ ID NO: 1340344 - RNA, 19 nt, Artificial Sequence
  Description of Artificial Sequence: Synthetic oligonucleotide
  Sense strand starting at position 3835 of SEQ ID NO: 1242344
agauaaacggauugugaug

SEQ ID NO: 1340345 - RNA, 19 nt, Artificial Sequence
  Description of Artificial Sequence: Synthetic oligonucleotide
  Antisense strand to SEQ ID NO: 1340344
caucacaauccguuuaucu

SEQ ID NO: 1340346 - RNA, 19 nt, Artificial Sequence
  Description of Artificial Sequence: Synthetic oligonucleotide
  Sense strand starting at position 3972 of SEQ ID NO: 1242344
gacagagcucuuuaucuug

SEQ ID NO: 1340347 - RNA, 19 nt, Artificial Sequence
  Description of Artificial Sequence: Synthetic oligonucleotide
  Antisense strand to SEQ ID NO: 1340346
caagauaaagagcucuguc

SEQ ID NO: 1340348 - RNA, 19 nt, Artificial Sequence
  Description of Artificial Sequence: Synthetic oligonucleotide
  Sense strand starting at position 61 of SEQ ID NO: 1242345
ccaguucuaugucugguga

SEQ ID NO: 1340349 - RNA, 19 nt, Artificial Sequence
  Description of Artificial Sequence: Synthetic oligonucleotide
  Antisense strand to SEQ ID NO: 1340348
ucaccagacauagaacugg

SEQ ID NO: 1340350 - RNA, 19 nt, Artificial Sequence
  Description of Artificial Sequence: Synthetic oligonucleotide
  Sense strand starting at position 62 of SEQ ID NO: 1242345
caguucuaugucuggugaa

SEQ ID NO: 1340351 - RNA, 19 nt, Artificial Sequence
  Description of Artificial Sequence: Synthetic oligonucleotide
  Antisense strand to SEQ ID NO: 1340350
uucaccagacauagaacug

SEQ ID NO: 1340352 - RNA, 19 nt, Artificial Sequence
  Description of Artificial Sequence: Synthetic oligonucleotide
  Sense strand starting at position 148 of SEQ ID NO: 1242345
ugauauagcacccgugaua

SEQ ID NO: 1340353 - RNA, 19 nt, Artificial Sequence
  Description of Artificial Sequence: Synthetic oligonucleotide
  Antisense strand to SEQ ID NO: 1340352
uaucacgggugcuauauca

SEQ ID NO: 1340354 - RNA, 19 nt, Artificial Sequence
  Description of Artificial Sequence: Synthetic oligonucleotide
  Sense strand starting at position 246 of SEQ ID NO: 1242345
uguugugaaucuuugguca

SEQ ID NO: 1340355 - RNA, 19 nt, Artificial Sequence
  Description of Artificial Sequence: Synthetic oligonucleotide
  Antisense strand to SEQ ID NO: 1340354
ugaccaaagauucacaaca

SEQ ID NO: 1340356 - RNA, 19 nt, Artificial Sequence
  Description of Artificial Sequence: Synthetic oligonucleotide
  Sense strand starting at position 249 of SEQ ID NO: 1242345
ugugaaucuuuggucacaa

SEQ ID NO: 1340357 - RNA, 19 nt, Artificial Sequence
  Description of Artificial Sequence: Synthetic oligonucleotide
  Antisense strand to SEQ ID NO: 1340356
uugugaccaaagauucaca

SEQ ID NO: 1340358 - RNA, 19 nt, Artificial Sequence
  Description of Artificial Sequence: Synthetic oligonucleotide
  Sense strand starting at position 250 of SEQ ID NO: 1242345
gugaaucuuuggucacaaa

SEQ ID NO: 1340359 - RNA, 19 nt, Artificial Sequence
  Description of Artificial Sequence: Synthetic oligonucleotide
  Antisense strand to SEQ ID NO: 1340358
uuugugaccaaagauucac

SEQ ID NO: 1340360 - RNA, 19 nt, Artificial Sequence
  Description of Artificial Sequence: Synthetic oligonucleotide
  Sense strand starting at position 440 of SEQ ID NO: 1242345
ggugaaacaauguggcuua

SEQ ID NO: 1340361 - RNA, 19 nt, Artificial Sequence
  Description of Artificial Sequence: Synthetic oligonucleotide
  Antisense strand to SEQ ID NO: 1340360
uaagccacauuguuucacc

SEQ ID NO: 1340362 - RNA, 19 nt, Artificial Sequence
  Description of Artificial Sequence: Synthetic oligonucleotide
  Sense strand starting at position 443 of SEQ ID NO: 1242345
gaaacaauguggcuuauac

SEQ ID NO: 1340363 - RNA, 19 nt, Artificial Sequence
  Description of Artificial Sequence: Synthetic oligonucleotide
  Antisense strand to SEQ ID NO: 1340362
guauaagccacauuguuuc

SEQ ID NO: 1340364 - RNA, 19 nt, Artificial Sequence
  Description of Artificial Sequence: Synthetic oligonucleotide
  Sense strand starting at position 451 of SEQ ID NO: 1242345
guggcuuauacugacauga

SEQ ID NO: 1340365 - RNA, 19 nt, Artificial Sequence
  Description of Artificial Sequence: Synthetic oligonucleotide
  Antisense strand to SEQ ID NO: 1340364
ucaugucaguauaagccac

SEQ ID NO: 1340366 - RNA, 19 nt, Artificial Sequence
  Description of Artificial Sequence: Synthetic oligonucleotide
  Sense strand starting at position 546 of SEQ ID NO: 1242345
uacagaaguuguguauggu

SEQ ID NO: 1340367 - RNA, 19 nt, Artificial Sequence
  Description of Artificial Sequence: Synthetic oligonucleotide
  Antisense strand to SEQ ID NO: 1340366
accauacacaacuucugua

SEQ ID NO: 1340368 - RNA, 19 nt, Artificial Sequence
  Description of Artificial Sequence: Synthetic oligonucleotide
  Sense strand starting at position 547 of SEQ ID NO: 1242345
acagaaguuguguauggua

SEQ ID NO: 1340369 - RNA, 19 nt, Artificial Sequence
  Description of Artificial Sequence: Synthetic oligonucleotide
  Antisense strand to SEQ ID NO: 1340368
uaccauacacaacuucugu

SEQ ID NO: 1340370 - RNA, 19 nt, Artificial Sequence
  Description of Artificial Sequence: Synthetic oligonucleotide
  Sense strand starting at position 549 of SEQ ID NO: 1242345
agaaguuguguaugguaau

SEQ ID NO: 1340371 - RNA, 19 nt, Artificial Sequence
  Description of Artificial Sequence: Synthetic oligonucleotide
  Antisense strand to SEQ ID NO: 1340370
auuaccauacacaacuucu

SEQ ID NO: 1340372 - RNA, 19 nt, Artificial Sequence
  Description of Artificial Sequence: Synthetic oligonucleotide
  Sense strand starting at position 555 of SEQ ID NO: 1242345
uguguaugguaaucucaaa

SEQ ID NO: 1340373 - RNA, 19 nt, Artificial Sequence
  Description of Artificial Sequence: Synthetic oligonucleotide
  Antisense strand to SEQ ID NO: 1340372
uuugagauuaccauacaca

SEQ ID NO: 1340374 - RNA, 19 nt, Artificial Sequence
  Description of Artificial Sequence: Synthetic oligonucleotide
  Sense strand starting at position 726 of SEQ ID NO: 1242345
aguuuagauuaagucacau

SEQ ID NO: 1340375 - RNA, 19 nt, Artificial Sequence
  Description of Artificial Sequence: Synthetic oligonucleotide
  Antisense strand to SEQ ID NO: 1340374
augugacuuaaucuaaacu

SEQ ID NO: 1340376 - RNA, 19 nt, Artificial Sequence
  Description of Artificial Sequence: Synthetic oligonucleotide
  Sense strand starting at position 817 of SEQ ID NO: 1242345
auuaaugccgcacauaaau

SEQ ID NO: 1340377 - RNA, 19 nt, Artificial Sequence
  Description of Artificial Sequence: Synthetic oligonucleotide
  Antisense strand to SEQ ID NO: 1340376
auuuaugugcggcauuaau

SEQ ID NO: 1340378 - RNA, 19 nt, Artificial Sequence
  Description of Artificial Sequence: Synthetic oligonucleotide
  Sense strand starting at position 908 of SEQ ID NO: 1242345
accucauacuuucugguau

SEQ ID NO: 1340379 - RNA, 19 nt, Artificial Sequence
  Description of Artificial Sequence: Synthetic oligonucleotide
  Antisense strand to SEQ ID NO: 1340378
auaccagaaaguaugaggu

SEQ ID NO: 1340380 - RNA, 19 nt, Artificial Sequence
  Description of Artificial Sequence: Synthetic oligonucleotide
  Sense strand starting at position 1140 of SEQ ID NO: 1242345
aucugacgcgucuguauuu

SEQ ID NO: 1340381 - RNA, 19 nt, Artificial Sequence
  Description of Artificial Sequence: Synthetic oligonucleotide
  Antisense strand to SEQ ID NO: 1340380
aaauacagacgcgucagau

SEQ ID NO: 1340382 - RNA, 19 nt, Artificial Sequence
  Description of Artificial Sequence: Synthetic oligonucleotide
  Sense strand starting at position 1171 of SEQ ID NO: 1242345
ggacuacguuuccuugauc

SEQ ID NO: 1340383 - RNA, 19 nt, Artificial Sequence
  Description of Artificial Sequence: Synthetic oligonucleotide
  Antisense strand to SEQ ID NO: 1340382
gaucaaggaaacguagucc

SEQ ID NO: 1340384 - RNA, 19 nt, Artificial Sequence
  Description of Artificial Sequence: Synthetic oligonucleotide
  Sense strand starting at position 1172 of SEQ ID NO: 1242345
gacuacguuuccuugauca

SEQ ID NO: 1340385 - RNA, 19 nt, Artificial Sequence
  Description of Artificial Sequence: Synthetic oligonucleotide
  Antisense strand to SEQ ID NO: 1340384
ugaucaaggaaacguaguc

SEQ ID NO: 1340386 - RNA, 19 nt, Artificial Sequence
  Description of Artificial Sequence: Synthetic oligonucleotide
  Sense strand starting at position 1174 of SEQ ID NO: 1242345
cuacguuuccuugaucaca

SEQ ID NO: 1340387 - RNA, 19 nt, Artificial Sequence
  Description of Artificial Sequence: Synthetic oligonucleotide
  Antisense strand to SEQ ID NO: 1340386
ugugaucaaggaaacguag

SEQ ID NO: 1340388 - RNA, 19 nt, Artificial Sequence
  Description of Artificial Sequence: Synthetic oligonucleotide
  Sense strand starting at position 2056 of SEQ ID NO: 1242345
ccauuaacaucuguuuguu

SEQ ID NO: 1340389 - RNA, 19 nt, Artificial Sequence
  Description of Artificial Sequence: Synthetic oligonucleotide
  Antisense strand to SEQ ID NO: 1340388
aacaaacagauguuaaugg

SEQ ID NO: 1340390 - RNA, 19 nt, Artificial Sequence
  Description of Artificial Sequence: Synthetic oligonucleotide
  Sense strand starting at position 2084 of SEQ ID NO: 1242345
gcucgauucccguuucuca

SEQ ID NO: 1340391 - RNA, 19 nt, Artificial Sequence
  Description of Artificial Sequence: Synthetic oligonucleotide
  Antisense strand to SEQ ID NO: 1340390
ugagaaacgggaaucgagc

SEQ ID NO: 1340392 - RNA, 19 nt, Artificial Sequence
  Description of Artificial Sequence: Synthetic oligonucleotide
  Sense strand starting at position 2151 of SEQ ID NO: 1242345
cagucuguuggcgaacuga

SEQ ID NO: 1340393 - RNA, 19 nt, Artificial Sequence
  Description of Artificial Sequence: Synthetic oligonucleotide
  Antisense strand to SEQ ID NO: 1340392
ucaguucgccaacagacug

SEQ ID NO: 1340394 - RNA, 19 nt, Artificial Sequence
  Description of Artificial Sequence: Synthetic oligonucleotide
  Sense strand starting at position 2162 of SEQ ID NO: 1242345
cgaacugaaaggugucaca

SEQ ID NO: 1340395 - RNA, 19 nt, Artificial Sequence
  Description of Artificial Sequence: Synthetic oligonucleotide
  Antisense strand to SEQ ID NO: 1340394
ugugacaccuuucaguucg

SEQ ID NO: 1340396 - RNA, 19 nt, Artificial Sequence
  Description of Artificial Sequence: Synthetic oligonucleotide
  Sense strand starting at position 2387 of SEQ ID NO: 1242345
acggcaccucacuguuaaa

SEQ ID NO: 1340397 - RNA, 19 nt, Artificial Sequence
  Description of Artificial Sequence: Synthetic oligonucleotide
  Antisense strand to SEQ ID NO: 1340396
uuuaacagugaggugccgu

SEQ ID NO: 1340398 - RNA, 19 nt, Artificial Sequence
  Description of Artificial Sequence: Synthetic oligonucleotide
  Sense strand starting at position 2441 of SEQ ID NO: 1242345
acauaucuccugcgaacuc

SEQ ID NO: 1340399 - RNA, 19 nt, Artificial Sequence
  Description of Artificial Sequence: Synthetic oligonucleotide
  Antisense strand to SEQ ID NO: 1340398
gaguucgcaggagauaugu

SEQ ID NO: 1340400 - RNA, 19 nt, Artificial Sequence
  Description of Artificial Sequence: Synthetic oligonucleotide
  Sense strand starting at position 2472 of SEQ ID NO: 1242345
cgcauaagccuccuuguuu

SEQ ID NO: 1340401 - RNA, 19 nt, Artificial Sequence
  Description of Artificial Sequence: Synthetic oligonucleotide
  Antisense strand to SEQ ID NO: 1340400
aaacaaggaggcuuaugcg

SEQ ID NO: 1340402 - RNA, 19 nt, Artificial Sequence
  Description of Artificial Sequence: Synthetic oligonucleotide
  Sense strand starting at position 2506 of SEQ ID NO: 1242345
guagauaacaaaugcguca

SEQ ID NO: 1340403 - RNA, 19 nt, Artificial Sequence
  Description of Artificial Sequence: Synthetic oligonucleotide
  Antisense strand to SEQ ID NO: 1340402
ugacgcauuuguuaucuac

SEQ ID NO: 1340404 - RNA, 19 nt, Artificial Sequence
  Description of Artificial Sequence: Synthetic oligonucleotide
  Sense strand starting at position 2509 of SEQ ID NO: 1242345
gauaacaaaugcgucauua

SEQ ID NO: 1340405 - RNA, 19 nt, Artificial Sequence
  Description of Artificial Sequence: Synthetic oligonucleotide
  Antisense strand to SEQ ID NO: 1340404
uaaugacgcauuuguuauc

SEQ ID NO: 1340406 - RNA, 19 nt, Artificial Sequence
  Description of Artificial Sequence: Synthetic oligonucleotide
  Sense strand starting at position 2513 of SEQ ID NO: 1242345
acaaaugcgucauuauaug

SEQ ID NO: 1340407 - RNA, 19 nt, Artificial Sequence
  Description of Artificial Sequence: Synthetic oligonucleotide
  Antisense strand to SEQ ID NO: 1340406
cauauaaugacgcauuugu

SEQ ID NO: 1340408 - RNA, 19 nt, Artificial Sequence
  Description of Artificial Sequence: Synthetic oligonucleotide
  Sense strand starting at position 2595 of SEQ ID NO: 1242345
aguggugccacuuaagagu

SEQ ID NO: 1340409 - RNA, 19 nt, Artificial Sequence
  Description of Artificial Sequence: Synthetic oligonucleotide
  Antisense strand to SEQ ID NO: 1340408
acucuuaaguggcaccacu

SEQ ID NO: 1340410 - RNA, 19 nt, Artificial Sequence
  Description of Artificial Sequence: Synthetic oligonucleotide
  Sense strand starting at position 2604 of SEQ ID NO: 1242345
acuuaagaguucucugauu

SEQ ID NO: 1340411 - RNA, 19 nt, Artificial Sequence
  Description of Artificial Sequence: Synthetic oligonucleotide
  Antisense strand to SEQ ID NO: 1340410
aaucagagaacucuuaagu

SEQ ID NO: 1340412 - RNA, 19 nt, Artificial Sequence
  Description of Artificial Sequence: Synthetic oligonucleotide
  Sense strand starting at position 2606 of SEQ ID NO: 1242345
uuaagaguucucugauuga

SEQ ID NO: 1340413 - RNA, 19 nt, Artificial Sequence
  Description of Artificial Sequence: Synthetic oligonucleotide
  Antisense strand to SEQ ID NO: 1340412
ucaaucagagaacucuuaa

SEQ ID NO: 1340414 - RNA, 19 nt, Artificial Sequence
  Description of Artificial Sequence: Synthetic oligonucleotide
  Sense strand starting at position 2609 of SEQ ID NO: 1242345
agaguucucugauugauga

SEQ ID NO: 1340415 - RNA, 19 nt, Artificial Sequence
  Description of Artificial Sequence: Synthetic oligonucleotide
  Antisense strand to SEQ ID NO: 1340414
ucaucaaucagagaacucu

SEQ ID NO: 1340416 - RNA, 19 nt, Artificial Sequence
  Description of Artificial Sequence: Synthetic oligonucleotide
  Sense strand starting at position 2610 of SEQ ID NO: 1242345
gaguucucugauugaugag

SEQ ID NO: 1340417 - RNA, 19 nt, Artificial Sequence
  Description of Artificial Sequence: Synthetic oligonucleotide
  Antisense strand to SEQ ID NO: 1340416
cucaucaaucagagaacuc

SEQ ID NO: 1340418 - RNA, 19 nt, Artificial Sequence
  Description of Artificial Sequence: Synthetic oligonucleotide
  Sense strand starting at position 3541 of SEQ ID NO: 1242345
agagcauucgacuaggauu

SEQ ID NO: 1340419 - RNA, 19 nt, Artificial Sequence
  Description of Artificial Sequence: Synthetic oligonucleotide
  Antisense strand to SEQ ID NO: 1340418
aauccuagucgaaugcucu

SEQ ID NO: 1340420 - RNA, 19 nt, Artificial Sequence
  Description of Artificial Sequence: Synthetic oligonucleotide
  Sense strand starting at position 3843 of SEQ ID NO: 1242345
ugagaagugcuuuaaguga

SEQ ID NO: 1340421 - RNA, 19 nt, Artificial Sequence
  Description of Artificial Sequence: Synthetic oligonucleotide
  Antisense strand to SEQ ID NO: 1340420
ucacuuaaagcacuucuca

SEQ ID NO: 1340422 - RNA, 19 nt, Artificial Sequence
  Description of Artificial Sequence: Synthetic oligonucleotide
  Sense strand starting at position 3964 of SEQ ID NO: 1242345
ggguuaaaucagugguucu

SEQ ID NO: 1340423 - RNA, 19 nt, Artificial Sequence
  Description of Artificial Sequence: Synthetic oligonucleotide
  Antisense strand to SEQ ID NO: 1340422
agaaccacugauuuaaccc

SEQ ID NO: 1340424 - RNA, 19 nt, Artificial Sequence
  Description of Artificial Sequence: Synthetic oligonucleotide
  Sense strand starting at position 3965 of SEQ ID NO: 1242345
gguuaaaucagugguucug

SEQ ID NO: 1340425 - RNA, 19 nt, Artificial Sequence
  Description of Artificial Sequence: Synthetic oligonucleotide
  Antisense strand to SEQ ID NO: 1340424
cagaaccacugauuuaacc

SEQ ID NO: 1340426 - RNA, 19 nt, Artificial Sequence
  Description of Artificial Sequence: Synthetic oligonucleotide
  Sense strand starting at position 3967 of SEQ ID NO: 1242345
uuaaaucagugguucugaa

SEQ ID NO: 1340427 - RNA, 19 nt, Artificial Sequence
  Description of Artificial Sequence: Synthetic oligonucleotide
  Antisense strand to SEQ ID NO: 1340426
uucagaaccacugauuuaa

SEQ ID NO: 1340428 - RNA, 19 nt, Artificial Sequence
  Description of Artificial Sequence: Synthetic oligonucleotide
  Sense strand starting at position 51 of SEQ ID NO: 1242346
uguccuuagcccuauauua

SEQ ID NO: 1340429 - RNA, 19 nt, Artificial Sequence
  Description of Artificial Sequence: Synthetic oligonucleotide
  Antisense strand to SEQ ID NO: 1340428
uaauauagggcuaaggaca

SEQ ID NO: 1340430 - RNA, 19 nt, Artificial Sequence
  Description of Artificial Sequence: Synthetic oligonucleotide
  Sense strand starting at position 77 of SEQ ID NO: 1242346
agauaacguuacccauaga

SEQ ID NO: 1340431 - RNA, 19 nt, Artificial Sequence
  Description of Artificial Sequence: Synthetic oligonucleotide
  Antisense strand to SEQ ID NO: 1340430
ucuauggguaacguuaucu

SEQ ID NO: 1340432 - RNA, 19 nt, Artificial Sequence
  Description of Artificial Sequence: Synthetic oligonucleotide
  Sense strand starting at position 161 of SEQ ID NO: 1242346
uacugaagucuuggcccaa

SEQ ID NO: 1340433 - RNA, 19 nt, Artificial Sequence
  Description of Artificial Sequence: Synthetic oligonucleotide
  Antisense strand to SEQ ID NO: 1340432
uugggccaagacuucagua

SEQ ID NO: 1340434 - RNA, 19 nt, Artificial Sequence
  Description of Artificial Sequence: Synthetic oligonucleotide
  Sense strand starting at position 162 of SEQ ID NO: 1242346
acugaagucuuggcccaaa

SEQ ID NO: 1340435 - RNA, 19 nt, Artificial Sequence
  Description of Artificial Sequence: Synthetic oligonucleotide
  Antisense strand to SEQ ID NO: 1340434
uuugggccaagacuucagu

SEQ ID NO: 1340436 - RNA, 19 nt, Artificial Sequence
  Description of Artificial Sequence: Synthetic oligonucleotide
  Sense strand starting at position 205 of SEQ ID NO: 1242346
gcacauaaguaugccucaa

SEQ ID NO: 1340437 - RNA, 19 nt, Artificial Sequence
  Description of Artificial Sequence: Synthetic oligonucleotide
  Antisense strand to SEQ ID NO: 1340436
uugaggcauacuuaugugc

SEQ ID NO: 1340438 - RNA, 19 nt, Artificial Sequence
  Description of Artificial Sequence: Synthetic oligonucleotide
  Sense strand starting at position 207 of SEQ ID NO: 1242346
acauaaguaugccucaagu

SEQ ID NO: 1340439 - RNA, 19 nt, Artificial Sequence
  Description of Artificial Sequence: Synthetic oligonucleotide
  Antisense strand to SEQ ID NO: 1340438
acuugaggcauacuuaugu

SEQ ID NO: 1340440 - RNA, 19 nt, Artificial Sequence
  Description of Artificial Sequence: Synthetic oligonucleotide
  Sense strand starting at position 209 of SEQ ID NO: 1242346
auaaguaugccucaaguaa

SEQ ID NO: 1340441 - RNA, 19 nt, Artificial Sequence
  Description of Artificial Sequence: Synthetic oligonucleotide
  Antisense strand to SEQ ID NO: 1340440
uuacuugaggcauacuuau

SEQ ID NO: 1340442 - RNA, 19 nt, Artificial Sequence
  Description of Artificial Sequence: Synthetic oligonucleotide
  Sense strand starting at position 220 of SEQ ID NO: 1242346
ucaaguaaagcaugauaca

SEQ ID NO: 1340443 - RNA, 19 nt, Artificial Sequence
  Description of Artificial Sequence: Synthetic oligonucleotide
  Antisense strand to SEQ ID NO: 1340442
uguaucaugcuuuacuuga

SEQ ID NO: 1340444 - RNA, 19 nt, Artificial Sequence
  Description of Artificial Sequence: Synthetic oligonucleotide
  Sense strand starting at position 348 of SEQ ID NO: 1242346
cuaggaguaucugcuaaau

SEQ ID NO: 1340445 - RNA, 19 nt, Artificial Sequence
  Description of Artificial Sequence: Synthetic oligonucleotide
  Antisense strand to SEQ ID NO: 1340444
auuuagcagauacuccuag

SEQ ID NO: 1340446 - RNA, 19 nt, Artificial Sequence
  Description of Artificial Sequence: Synthetic oligonucleotide
  Sense strand starting at position 360 of SEQ ID NO: 1242346
gcuaaaugacugcaccuua

SEQ ID NO: 1340447 - RNA, 19 nt, Artificial Sequence
  Description of Artificial Sequence: Synthetic oligonucleotide
  Antisense strand to SEQ ID NO: 1340446
uaaggugcagucauuuagc

SEQ ID NO: 1340448 - RNA, 19 nt, Artificial Sequence
  Description of Artificial Sequence: Synthetic oligonucleotide
  Sense strand starting at position 447 of SEQ ID NO: 1242346
ggaguaccaaagugaaauu

SEQ ID NO: 1340449 - RNA, 19 nt, Artificial Sequence
  Description of Artificial Sequence: Synthetic oligonucleotide
  Antisense strand to SEQ ID NO: 1340448
aauuucacuuugguacucc

SEQ ID NO: 1340450 - RNA, 19 nt, Artificial Sequence
  Description of Artificial Sequence: Synthetic oligonucleotide
  Sense strand starting at position 456 of SEQ ID NO: 1242346
aagugaaauucguuaagau

SEQ ID NO: 1340451 - RNA, 19 nt, Artificial Sequence
  Description of Artificial Sequence: Synthetic oligonucleotide
  Antisense strand to SEQ ID NO: 1340450
aucuuaacgaauuucacuu

SEQ ID NO: 1340452 - RNA, 19 nt, Artificial Sequence
  Description of Artificial Sequence: Synthetic oligonucleotide
  Sense strand starting at position 457 of SEQ ID NO: 1242346
agugaaauucguuaagaug

SEQ ID NO: 1340453 - RNA, 19 nt, Artificial Sequence
  Description of Artificial Sequence: Synthetic oligonucleotide
  Antisense strand to SEQ ID NO: 1340452
caucuuaacgaauuucacu

SEQ ID NO: 1340454 - RNA, 19 nt, Artificial Sequence
  Description of Artificial Sequence: Synthetic oligonucleotide
  Sense strand starting at position 628 of SEQ ID NO: 1242346
ugauauagcacccgugaua

SEQ ID NO: 1340455 - RNA, 19 nt, Artificial Sequence
  Description of Artificial Sequence: Synthetic oligonucleotide
  Antisense strand to SEQ ID NO: 1340454
uaucacgggugcuauauca

SEQ ID NO: 1340456 - RNA, 19 nt, Artificial Sequence
  Description of Artificial Sequence: Synthetic oligonucleotide
  Sense strand starting at position 729 of SEQ ID NO: 1242346
ugugaaucuuuggucacaa

SEQ ID NO: 1340457 - RNA, 19 nt, Artificial Sequence
  Description of Artificial Sequence: Synthetic oligonucleotide
  Antisense strand to SEQ ID NO: 1340456
uugugaccaaagauucaca

SEQ ID NO: 1340458 - RNA, 19 nt, Artificial Sequence
  Description of Artificial Sequence: Synthetic oligonucleotide
  Sense strand starting at position 730 of SEQ ID NO: 1242346
gugaaucuuuggucacaaa

SEQ ID NO: 1340459 - RNA, 19 nt, Artificial Sequence
  Description of Artificial Sequence: Synthetic oligonucleotide
  Antisense strand to SEQ ID NO: 1340458
uuugugaccaaagauucac

SEQ ID NO: 1340460 - RNA, 19 nt, Artificial Sequence
  Description of Artificial Sequence: Synthetic oligonucleotide
  Sense strand starting at position 920 of SEQ ID NO: 1242346
ggugaaacaauguggcuua

SEQ ID NO: 1340461 - RNA, 19 nt, Artificial Sequence
  Description of Artificial Sequence: Synthetic oligonucleotide
  Antisense strand to SEQ ID NO: 1340460
uaagccacauuguuucacc

SEQ ID NO: 1340462 - RNA, 19 nt, Artificial Sequence
  Description of Artificial Sequence: Synthetic oligonucleotide
  Sense strand starting at position 923 of SEQ ID NO: 1242346
gaaacaauguggcuuauac

SEQ ID NO: 1340463 - RNA, 19 nt, Artificial Sequence
  Description of Artificial Sequence: Synthetic oligonucleotide
  Antisense strand to SEQ ID NO: 1340462
guauaagccacauuguuuc

SEQ ID NO: 1340464 - RNA, 19 nt, Artificial Sequence
  Description of Artificial Sequence: Synthetic oligonucleotide
  Sense strand starting at position 931 of SEQ ID NO: 1242346
guggcuuauacugacauga

SEQ ID NO: 1340465 - RNA, 19 nt, Artificial Sequence
  Description of Artificial Sequence: Synthetic oligonucleotide
  Antisense strand to SEQ ID NO: 1340464
ucaugucaguauaagccac

SEQ ID NO: 1340466 - RNA, 19 nt, Artificial Sequence
  Description of Artificial Sequence: Synthetic oligonucleotide
  Sense strand starting at position 1027 of SEQ ID NO: 1242346
acagaaguuguguauggua

SEQ ID NO: 1340467 - RNA, 19 nt, Artificial Sequence
  Description of Artificial Sequence: Synthetic oligonucleotide
  Antisense strand to SEQ ID NO: 1340466
uaccauacacaacuucugu

SEQ ID NO: 1340468 - RNA, 19 nt, Artificial Sequence
  Description of Artificial Sequence: Synthetic oligonucleotide
  Sense strand starting at position 1029 of SEQ ID NO: 1242346
agaaguuguguaugguaau

SEQ ID NO: 1340469 - RNA, 19 nt, Artificial Sequence
  Description of Artificial Sequence: Synthetic oligonucleotide
  Antisense strand to SEQ ID NO: 1340468
auuaccauacacaacuucu

SEQ ID NO: 1340470 - RNA, 19 nt, Artificial Sequence
  Description of Artificial Sequence: Synthetic oligonucleotide
  Sense strand starting at position 1035 of SEQ ID NO: 1242346
uguguaugguaaucucaaa

SEQ ID NO: 1340471 - RNA, 19 nt, Artificial Sequence
  Description of Artificial Sequence: Synthetic oligonucleotide
  Antisense strand to SEQ ID NO: 1340470
uuugagauuaccauacaca

SEQ ID NO: 1340472 - RNA, 19 nt, Artificial Sequence
  Description of Artificial Sequence: Synthetic oligonucleotide
  Sense strand starting at position 1206 of SEQ ID NO: 1242346
aguuuagauuaagucacau

SEQ ID NO: 1340473 - RNA, 19 nt, Artificial Sequence
  Description of Artificial Sequence: Synthetic oligonucleotide
  Antisense strand to SEQ ID NO: 1340472
augugacuuaaucuaaacu

SEQ ID NO: 1340474 - RNA, 19 nt, Artificial Sequence
  Description of Artificial Sequence: Synthetic oligonucleotide
  Sense strand starting at position 1297 of SEQ ID NO: 1242346
auuaaugccgcacauaaau

SEQ ID NO: 1340475 - RNA, 19 nt, Artificial Sequence
  Description of Artificial Sequence: Synthetic oligonucleotide
  Antisense strand to SEQ ID NO: 1340474
auuuaugugcggcauuaau

SEQ ID NO: 1340476 - RNA, 19 nt, Artificial Sequence
  Description of Artificial Sequence: Synthetic oligonucleotide
  Sense strand starting at position 1388 of SEQ ID NO: 1242346
accucauacuuucugguau

SEQ ID NO: 1340477 - RNA, 19 nt, Artificial Sequence
  Description of Artificial Sequence: Synthetic oligonucleotide
  Antisense strand to SEQ ID NO: 1340476
auaccagaaaguaugaggu

SEQ ID NO: 1340478 - RNA, 19 nt, Artificial Sequence
  Description of Artificial Sequence: Synthetic oligonucleotide
  Sense strand starting at position 1651 of SEQ ID NO: 1242346
ggacuacguuuccuugauc

SEQ ID NO: 1340479 - RNA, 19 nt, Artificial Sequence
  Description of Artificial Sequence: Synthetic oligonucleotide
  Antisense strand to SEQ ID NO: 1340478
gaucaaggaaacguagucc

SEQ ID NO: 1340480 - RNA, 19 nt, Artificial Sequence
  Description of Artificial Sequence: Synthetic oligonucleotide
  Sense strand starting at position 1652 of SEQ ID NO: 1242346
gacuacguuuccuugauca

SEQ ID NO: 1340481 - RNA, 19 nt, Artificial Sequence
  Description of Artificial Sequence: Synthetic oligonucleotide
  Antisense strand to SEQ ID NO: 1340480
ugaucaaggaaacguaguc

SEQ ID NO: 1340482 - RNA, 19 nt, Artificial Sequence
  Description of Artificial Sequence: Synthetic oligonucleotide
  Sense strand starting at position 1654 of SEQ ID NO: 1242346
cuacguuuccuugaucaca

SEQ ID NO: 1340483 - RNA, 19 nt, Artificial Sequence
  Description of Artificial Sequence: Synthetic oligonucleotide
  Antisense strand to SEQ ID NO: 1340482
ugugaucaaggaaacguag

SEQ ID NO: 1340484 - RNA, 19 nt, Artificial Sequence
  Description of Artificial Sequence: Synthetic oligonucleotide
  Sense strand starting at position 2564 of SEQ ID NO: 1242346
gcucgauucccguuucuca

SEQ ID NO: 1340485 - RNA, 19 nt, Artificial Sequence
  Description of Artificial Sequence: Synthetic oligonucleotide
  Antisense strand to SEQ ID NO: 1340484
ugagaaacgggaaucgagc

SEQ ID NO: 1340486 - RNA, 19 nt, Artificial Sequence
  Description of Artificial Sequence: Synthetic oligonucleotide
  Sense strand starting at position 2631 of SEQ ID NO: 1242346
cagucuguuggcgaacuga

SEQ ID NO: 1340487 - RNA, 19 nt, Artificial Sequence
  Description of Artificial Sequence: Synthetic oligonucleotide
  Antisense strand to SEQ ID NO: 1340486
ucaguucgccaacagacug

SEQ ID NO: 1340488 - RNA, 19 nt, Artificial Sequence
  Description of Artificial Sequence: Synthetic oligonucleotide
  Sense strand starting at position 2642 of SEQ ID NO: 1242346
cgaacugaaaggugucaca

SEQ ID NO: 1340489 - RNA, 19 nt, Artificial Sequence
  Description of Artificial Sequence: Synthetic oligonucleotide
  Antisense strand to SEQ ID NO: 1340488
ugugacaccuuucaguucg

SEQ ID NO: 1340490 - RNA, 19 nt, Artificial Sequence
  Description of Artificial Sequence: Synthetic oligonucleotide
  Sense strand starting at position 2952 of SEQ ID NO: 1242346
cgcauaagccuccuuguuu

SEQ ID NO: 1340491 - RNA, 19 nt, Artificial Sequence
  Description of Artificial Sequence: Synthetic oligonucleotide
  Antisense strand to SEQ ID NO: 1340490
aaacaaggaggcuuaugcg

SEQ ID NO: 1340492 - RNA, 19 nt, Artificial Sequence
  Description of Artificial Sequence: Synthetic oligonucleotide
  Sense strand starting at position 2986 of SEQ ID NO: 1242346
guagauaacaaaugcguca

SEQ ID NO: 1340493 - RNA, 19 nt, Artificial Sequence
  Description of Artificial Sequence: Synthetic oligonucleotide
  Antisense strand to SEQ ID NO: 1340492
ugacgcauuuguuaucuac

SEQ ID NO: 1340494 - RNA, 19 nt, Artificial Sequence
  Description of Artificial Sequence: Synthetic oligonucleotide
  Sense strand starting at position 2989 of SEQ ID NO: 1242346
gauaacaaaugcgucauua

SEQ ID NO: 1340495 - RNA, 19 nt, Artificial Sequence
  Description of Artificial Sequence: Synthetic oligonucleotide
  Antisense strand to SEQ ID NO: 1340494
uaaugacgcauuuguuauc

SEQ ID NO: 1340496 - RNA, 19 nt, Artificial Sequence
  Description of Artificial Sequence: Synthetic oligonucleotide
  Sense strand starting at position 2993 of SEQ ID NO: 1242346
acaaaugcgucauuauaug

SEQ ID NO: 1340497 - RNA, 19 nt, Artificial Sequence
  Description of Artificial Sequence: Synthetic oligonucleotide
  Antisense strand to SEQ ID NO: 1340496
cauauaaugacgcauuugu

SEQ ID NO: 1340498 - RNA, 19 nt, Artificial Sequence
  Description of Artificial Sequence: Synthetic oligonucleotide
  Sense strand starting at position 3075 of SEQ ID NO: 1242346
aguggugccacuuaagagu

SEQ ID NO: 1340499 - RNA, 19 nt, Artificial Sequence
  Description of Artificial Sequence: Synthetic oligonucleotide
  Antisense strand to SEQ ID NO: 1340498
acucuuaaguggcaccacu

SEQ ID NO: 1340500 - RNA, 19 nt, Artificial Sequence
  Description of Artificial Sequence: Synthetic oligonucleotide
  Sense strand starting at position 3084 of SEQ ID NO: 1242346
acuuaagaguucucugauu

SEQ ID NO: 1340501 - RNA, 19 nt, Artificial Sequence
  Description of Artificial Sequence: Synthetic oligonucleotide
  Antisense strand to SEQ ID NO: 1340500
aaucagagaacucuuaagu

SEQ ID NO: 1340502 - RNA, 19 nt, Artificial Sequence
  Description of Artificial Sequence: Synthetic oligonucleotide
  Sense strand starting at position 3086 of SEQ ID NO: 1242346
uuaagaguucucugauuga

SEQ ID NO: 1340503 - RNA, 19 nt, Artificial Sequence
  Description of Artificial Sequence: Synthetic oligonucleotide
  Antisense strand to SEQ ID NO: 1340502
ucaaucagagaacucuuaa

SEQ ID NO: 1340504 - RNA, 19 nt, Artificial Sequence
  Description of Artificial Sequence: Synthetic oligonucleotide
  Sense strand starting at position 3089 of SEQ ID NO: 1242346
agaguucucugauugauga

SEQ ID NO: 1340505 - RNA, 19 nt, Artificial Sequence
  Description of Artificial Sequence: Synthetic oligonucleotide
  Antisense strand to SEQ ID NO: 1340504
ucaucaaucagagaacucu

SEQ ID NO: 1340506 - RNA, 19 nt, Artificial Sequence
  Description of Artificial Sequence: Synthetic oligonucleotide
  Sense strand starting at position 3090 of SEQ ID NO: 1242346
gaguucucugauugaugag

SEQ ID NO: 1340507 - RNA, 19 nt, Artificial Sequence
  Description of Artificial Sequence: Synthetic oligonucleotide
  Antisense strand to SEQ ID NO: 1340506
cucaucaaucagagaacuc

SEQ ID NO: 1340508 - RNA, 19 nt, Artificial Sequence
  Description of Artificial Sequence: Synthetic oligonucleotide
  Sense strand starting at position 99 of SEQ ID NO: 1242347
caaggaaauuguguacgaa

SEQ ID NO: 1340509 - RNA, 19 nt, Artificial Sequence
  Description of Artificial Sequence: Synthetic oligonucleotide
  Antisense strand to SEQ ID NO: 1340508
uucguacacaauuuccuug

SEQ ID NO: 1340510 - RNA, 19 nt, Artificial Sequence
  Description of Artificial Sequence: Synthetic oligonucleotide
  Sense strand starting at position 102 of SEQ ID NO: 1242347
ggaaauuguguacgaaauu

SEQ ID NO: 1340511 - RNA, 19 nt, Artificial Sequence
  Description of Artificial Sequence: Synthetic oligonucleotide
  Antisense strand to SEQ ID NO: 1340510
aauuucguacacaauuucc

SEQ ID NO: 1340512 - RNA, 19 nt, Artificial Sequence
  Description of Artificial Sequence: Synthetic oligonucleotide
  Sense strand starting at position 113 of SEQ ID NO: 1242347
acgaaauugcuauggaauu

SEQ ID NO: 1340513 - RNA, 19 nt, Artificial Sequence
  Description of Artificial Sequence: Synthetic oligonucleotide
  Antisense strand to SEQ ID NO: 1340512
aauuccauagcaauuucgu

SEQ ID NO: 1340514 - RNA, 19 nt, Artificial Sequence
  Description of Artificial Sequence: Synthetic oligonucleotide
  Sense strand starting at position 248 of SEQ ID NO: 1242347
uucggaaggcugcauaaga

SEQ ID NO: 1340515 - RNA, 19 nt, Artificial Sequence
  Description of Artificial Sequence: Synthetic oligonucleotide
  Antisense strand to SEQ ID NO: 1340514
ucuuaugcagccuuccgaa

SEQ ID NO: 1340516 - RNA, 19 nt, Artificial Sequence
  Description of Artificial Sequence: Synthetic oligonucleotide
  Sense strand starting at position 377 of SEQ ID NO: 1242347
augcuaaugguguaugaaa

SEQ ID NO: 1340517 - RNA, 19 nt, Artificial Sequence
  Description of Artificial Sequence: Synthetic oligonucleotide
  Antisense strand to SEQ ID NO: 1340516
uuucauacaccauuagcau

SEQ ID NO: 1340518 - RNA, 19 nt, Artificial Sequence
  Description of Artificial Sequence: Synthetic oligonucleotide
  Sense strand starting at position 578 of SEQ ID NO: 1242347
cgacuauuucccugccucu

SEQ ID NO: 1340519 - RNA, 19 nt, Artificial Sequence
  Description of Artificial Sequence: Synthetic oligonucleotide
  Antisense strand to SEQ ID NO: 1340518
agaggcagggaaauagucg

SEQ ID NO: 1340520 - RNA, 19 nt, Artificial Sequence
  Description of Artificial Sequence: Synthetic oligonucleotide
  Sense strand starting at position 911 of SEQ ID NO: 1242347
ugauucuugcaagaaugca

SEQ ID NO: 1340521 - RNA, 19 nt, Artificial Sequence
  Description of Artificial Sequence: Synthetic oligonucleotide
  Antisense strand to SEQ ID NO: 1340520
ugcauucuugcaagaauca

SEQ ID NO: 1340522 - RNA, 19 nt, Artificial Sequence
  Description of Artificial Sequence: Synthetic oligonucleotide
  Sense strand starting at position 941 of SEQ ID NO: 1242347
augaguagccgcguucuca

SEQ ID NO: 1340523 - RNA, 19 nt, Artificial Sequence
  Description of Artificial Sequence: Synthetic oligonucleotide
  Antisense strand to SEQ ID NO: 1340522
ugagaacgcggcuacucau

SEQ ID NO: 1340524 - RNA, 19 nt, Artificial Sequence
  Description of Artificial Sequence: Synthetic oligonucleotide
  Sense strand starting at position 942 of SEQ ID NO: 1242347
ugaguagccgcguucucau

SEQ ID NO: 1340525 - RNA, 19 nt, Artificial Sequence
  Description of Artificial Sequence: Synthetic oligonucleotide
  Antisense strand to SEQ ID NO: 1340524
augagaacgcggcuacuca

SEQ ID NO: 1340526 - RNA, 19 nt, Artificial Sequence
  Description of Artificial Sequence: Synthetic oligonucleotide
  Sense strand starting at position 950 of SEQ ID NO: 1242347
cgcguucucauggaauuua

SEQ ID NO: 1340527 - RNA, 19 nt, Artificial Sequence
  Description of Artificial Sequence: Synthetic oligonucleotide
  Antisense strand to SEQ ID NO: 1340526
uaaauuccaugagaacgcg

SEQ ID NO: 1340528 - RNA, 19 nt, Artificial Sequence
  Description of Artificial Sequence: Synthetic oligonucleotide
  Sense strand starting at position 1084 of SEQ ID NO: 1242347
gaggcugucgcuguuauua

SEQ ID NO: 1340529 - RNA, 19 nt, Artificial Sequence
  Description of Artificial Sequence: Synthetic oligonucleotide
  Antisense strand to SEQ ID NO: 1340528
uaauaacagcgacagccuc

SEQ ID NO: 1340530 - RNA, 19 nt, Artificial Sequence
  Description of Artificial Sequence: Synthetic oligonucleotide
  Sense strand starting at position 1663 of SEQ ID NO: 1242347
cacagugaucagcagagca

SEQ ID NO: 1340531 - RNA, 19 nt, Artificial Sequence
  Description of Artificial Sequence: Synthetic oligonucleotide
  Antisense strand to SEQ ID NO: 1340530
ugcucugcugaucacugug

SEQ ID NO: 1340532 - RNA, 19 nt, Artificial Sequence
  Description of Artificial Sequence: Synthetic oligonucleotide
  Sense strand starting at position 1665 of SEQ ID NO: 1242347
cagugaucagcagagcaaa

SEQ ID NO: 1340533 - RNA, 19 nt, Artificial Sequence
  Description of Artificial Sequence: Synthetic oligonucleotide
  Antisense strand to SEQ ID NO: 1340532
uuugcucugcugaucacug

SEQ ID NO: 1340534 - RNA, 19 nt, Artificial Sequence
  Description of Artificial Sequence: Synthetic oligonucleotide
  Sense strand starting at position 2249 of SEQ ID NO: 1242347
uugcccuccucagugauuu

SEQ ID NO: 1340535 - RNA, 19 nt, Artificial Sequence
  Description of Artificial Sequence: Synthetic oligonucleotide
  Antisense strand to SEQ ID NO: 1340534
aaaucacugaggagggcaa

SEQ ID NO: 1340536 - RNA, 19 nt, Artificial Sequence
  Description of Artificial Sequence: Synthetic oligonucleotide
  Sense strand starting at position 2380 of SEQ ID NO: 1242347
ucuccucuccuggaguaua

SEQ ID NO: 1340537 - RNA, 19 nt, Artificial Sequence
  Description of Artificial Sequence: Synthetic oligonucleotide
  Antisense strand to SEQ ID NO: 1340536
uauacuccaggagaggaga

SEQ ID NO: 1340538 - RNA, 19 nt, Artificial Sequence
  Description of Artificial Sequence: Synthetic oligonucleotide
  Sense strand starting at position 2388 of SEQ ID NO: 1242347
ccuggaguauaagcuuaua

SEQ ID NO: 1340539 - RNA, 19 nt, Artificial Sequence
  Description of Artificial Sequence: Synthetic oligonucleotide
  Antisense strand to SEQ ID NO: 1340538
uauaagcuuauacuccagg

SEQ ID NO: 1340540 - RNA, 19 nt, Artificial Sequence
  Description of Artificial Sequence: Synthetic oligonucleotide
  Sense strand starting at position 2412 of SEQ ID NO: 1242347
cagggaacaugucuuaauu

SEQ ID NO: 1340541 - RNA, 19 nt, Artificial Sequence
  Description of Artificial Sequence: Synthetic oligonucleotide
  Antisense strand to SEQ ID NO: 1340540
aauuaagacauguucccug

SEQ ID NO: 1340542 - RNA, 19 nt, Artificial Sequence
  Description of Artificial Sequence: Synthetic oligonucleotide
  Sense strand starting at position 2503 of SEQ ID NO: 1242347
acagauaaugccuguauac

SEQ ID NO: 1340543 - RNA, 19 nt, Artificial Sequence
  Description of Artificial Sequence: Synthetic oligonucleotide
  Antisense strand to SEQ ID NO: 1340542
guauacaggcauuaucugu

SEQ ID NO: 1340544 - RNA, 19 nt, Artificial Sequence
  Description of Artificial Sequence: Synthetic oligonucleotide
  Sense strand starting at position 2505 of SEQ ID NO: 1242347
agauaaugccuguauacuu

SEQ ID NO: 1340545 - RNA, 19 nt, Artificial Sequence
  Description of Artificial Sequence: Synthetic oligonucleotide
  Antisense strand to SEQ ID NO: 1340544
aaguauacaggcauuaucu

SEQ ID NO: 1340546 - RNA, 19 nt, Artificial Sequence
  Description of Artificial Sequence: Synthetic oligonucleotide
  Sense strand starting at position 2574 of SEQ ID NO: 1242347
ggaaucaacauugguaugu

SEQ ID NO: 1340547 - RNA, 19 nt, Artificial Sequence
  Description of Artificial Sequence: Synthetic oligonucleotide
  Antisense strand to SEQ ID NO: 1340546
acauaccaauguugauucc

SEQ ID NO: 1340548 - RNA, 19 nt, Artificial Sequence
  Description of Artificial Sequence: Synthetic oligonucleotide
  Sense strand starting at position 2575 of SEQ ID NO: 1242347
gaaucaacauugguauguu

SEQ ID NO: 1340549 - RNA, 19 nt, Artificial Sequence
  Description of Artificial Sequence: Synthetic oligonucleotide
  Antisense strand to SEQ ID NO: 1340548
aacauaccaauguugauuc

SEQ ID NO: 1340550 - RNA, 19 nt, Artificial Sequence
  Description of Artificial Sequence: Synthetic oligonucleotide
  Sense strand starting at position 2583 of SEQ ID NO: 1242347
auugguauguuacugauua

SEQ ID NO: 1340551 - RNA, 19 nt, Artificial Sequence
  Description of Artificial Sequence: Synthetic oligonucleotide
  Antisense strand to SEQ ID NO: 1340550
uaaucaguaacauaccaau

SEQ ID NO: 1340552 - RNA, 19 nt, Artificial Sequence
  Description of Artificial Sequence: Synthetic oligonucleotide
  Sense strand starting at position 2591 of SEQ ID NO: 1242347
guuacugauuauuucgcua

SEQ ID NO: 1340553 - RNA, 19 nt, Artificial Sequence
  Description of Artificial Sequence: Synthetic oligonucleotide
  Antisense strand to SEQ ID NO: 1340552
uagcgaaauaaucaguaac

SEQ ID NO: 1340554 - RNA, 19 nt, Artificial Sequence
  Description of Artificial Sequence: Synthetic oligonucleotide
  Sense strand starting at position 2594 of SEQ ID NO: 1242347
acugauuauuucgcuaguu

SEQ ID NO: 1340555 - RNA, 19 nt, Artificial Sequence
  Description of Artificial Sequence: Synthetic oligonucleotide
  Antisense strand to SEQ ID NO: 1340554
aacuagcgaaauaaucagu

SEQ ID NO: 1340556 - RNA, 19 nt, Artificial Sequence
  Description of Artificial Sequence: Synthetic oligonucleotide
  Sense strand starting at position 2595 of SEQ ID NO: 1242347
cugauuauuucgcuaguuu

SEQ ID NO: 1340557 - RNA, 19 nt, Artificial Sequence
  Description of Artificial Sequence: Synthetic oligonucleotide
  Antisense strand to SEQ ID NO: 1340556
aaacuagcgaaauaaucag

SEQ ID NO: 1340558 - RNA, 19 nt, Artificial Sequence
  Description of Artificial Sequence: Synthetic oligonucleotide
  Sense strand starting at position 2649 of SEQ ID NO: 1242347
ccgaucucacauuauguuu

SEQ ID NO: 1340559 - RNA, 19 nt, Artificial Sequence
  Description of Artificial Sequence: Synthetic oligonucleotide
  Antisense strand to SEQ ID NO: 1340558
aaacauaaugugagaucgg

SEQ ID NO: 1340560 - RNA, 19 nt, Artificial Sequence
  Description of Artificial Sequence: Synthetic oligonucleotide
  Sense strand starting at position 2768 of SEQ ID NO: 1242347
guuguagaauaucccuuaa

SEQ ID NO: 1340561 - RNA, 19 nt, Artificial Sequence
  Description of Artificial Sequence: Synthetic oligonucleotide
  Antisense strand to SEQ ID NO: 1340560
uuaagggauauucuacaac

SEQ ID NO: 1340562 - RNA, 19 nt, Artificial Sequence
  Description of Artificial Sequence: Synthetic oligonucleotide
  Sense strand starting at position 2770 of SEQ ID NO: 1242347
uguagaauaucccuuaaug

SEQ ID NO: 1340563 - RNA, 19 nt, Artificial Sequence
  Description of Artificial Sequence: Synthetic oligonucleotide
  Antisense strand to SEQ ID NO: 1340562
cauuaagggauauucuaca

SEQ ID NO: 1340564 - RNA, 19 nt, Artificial Sequence
  Description of Artificial Sequence: Synthetic oligonucleotide
  Sense strand starting at position 2888 of SEQ ID NO: 1242347
cgcuguggcacugucauaa

SEQ ID NO: 1340565 - RNA, 19 nt, Artificial Sequence
  Description of Artificial Sequence: Synthetic oligonucleotide
  Antisense strand to SEQ ID NO: 1340564
uuaugacagugccacagcg

SEQ ID NO: 1340566 - RNA, 19 nt, Artificial Sequence
  Description of Artificial Sequence: Synthetic oligonucleotide
  Sense strand starting at position 2964 of SEQ ID NO: 1242347
uagcuaggaccauagguau

SEQ ID NO: 1340567 - RNA, 19 nt, Artificial Sequence
  Description of Artificial Sequence: Synthetic oligonucleotide
  Antisense strand to SEQ ID NO: 1340566
auaccuaugguccuagcua

SEQ ID NO: 1340568 - RNA, 19 nt, Artificial Sequence
  Description of Artificial Sequence: Synthetic oligonucleotide
  Sense strand starting at position 2970 of SEQ ID NO: 1242347
ggaccauagguauguuuac

SEQ ID NO: 1340569 - RNA, 19 nt, Artificial Sequence
  Description of Artificial Sequence: Synthetic oligonucleotide
  Antisense strand to SEQ ID NO: 1340568
guaaacauaccuauggucc

SEQ ID NO: 1340570 - RNA, 19 nt, Artificial Sequence
  Description of Artificial Sequence: Synthetic oligonucleotide
  Sense strand starting at position 2971 of SEQ ID NO: 1242347
gaccauagguauguuuacu

SEQ ID NO: 1340571 - RNA, 19 nt, Artificial Sequence
  Description of Artificial Sequence: Synthetic oligonucleotide
  Antisense strand to SEQ ID NO: 1340570
aguaaacauaccuaugguc

SEQ ID NO: 1340572 - RNA, 19 nt, Artificial Sequence
  Description of Artificial Sequence: Synthetic oligonucleotide
  Sense strand starting at position 3188 of SEQ ID NO: 1242347
gacugaugcccuuggagag

SEQ ID NO: 1340573 - RNA, 19 nt, Artificial Sequence
  Description of Artificial Sequence: Synthetic oligonucleotide
  Antisense strand to SEQ ID NO: 1340572
cucuccaagggcaucaguc

SEQ ID NO: 1340574 - RNA, 19 nt, Artificial Sequence
  Description of Artificial Sequence: Synthetic oligonucleotide
  Sense strand starting at position 3219 of SEQ ID NO: 1242347
acucaagucccguaaagau

SEQ ID NO: 1340575 - RNA, 19 nt, Artificial Sequence
  Description of Artificial Sequence: Synthetic oligonucleotide
  Antisense strand to SEQ ID NO: 1340574
aucuuuacgggacuugagu

SEQ ID NO: 1340576 - RNA, 19 nt, Artificial Sequence
  Description of Artificial Sequence: Synthetic oligonucleotide
  Sense strand starting at position 3307 of SEQ ID NO: 1242347
ccuauugcagcucaagaga

SEQ ID NO: 1340577 - RNA, 19 nt, Artificial Sequence
  Description of Artificial Sequence: Synthetic oligonucleotide
  Antisense strand to SEQ ID NO: 1340576
ucucuugagcugcaauagg

SEQ ID NO: 1340578 - RNA, 19 nt, Artificial Sequence
  Description of Artificial Sequence: Synthetic oligonucleotide
  Sense strand starting at position 3464 of SEQ ID NO: 1242347
gccugaaguccacagguau

SEQ ID NO: 1340579 - RNA, 19 nt, Artificial Sequence
  Description of Artificial Sequence: Synthetic oligonucleotide
  Antisense strand to SEQ ID NO: 1340578
auaccuguggacuucaggc

SEQ ID NO: 1340580 - RNA, 19 nt, Artificial Sequence
  Description of Artificial Sequence: Synthetic oligonucleotide
  Sense strand starting at position 3538 of SEQ ID NO: 1242347
aaaugugaccucugcagac

SEQ ID NO: 1340581 - RNA, 19 nt, Artificial Sequence
  Description of Artificial Sequence: Synthetic oligonucleotide
  Antisense strand to SEQ ID NO: 1340580
gucugcagaggucacauuu

SEQ ID NO: 1340582 - RNA, 19 nt, Artificial Sequence
  Description of Artificial Sequence: Synthetic oligonucleotide
  Sense strand starting at position 3633 of SEQ ID NO: 1242347
guuuauaaggauugacugu

SEQ ID NO: 1340583 - RNA, 19 nt, Artificial Sequence
  Description of Artificial Sequence: Synthetic oligonucleotide
  Antisense strand to SEQ ID NO: 1340582
acagucaauccuuauaaac

SEQ ID NO: 1340584 - RNA, 19 nt, Artificial Sequence
  Description of Artificial Sequence: Synthetic oligonucleotide
  Sense strand starting at position 3640 of SEQ ID NO: 1242347
aggauugacuguuuauucu

SEQ ID NO: 1340585 - RNA, 19 nt, Artificial Sequence
  Description of Artificial Sequence: Synthetic oligonucleotide
  Antisense strand to SEQ ID NO: 1340584
agaauaaacagucaauccu

SEQ ID NO: 1340586 - RNA, 19 nt, Artificial Sequence
  Description of Artificial Sequence: Synthetic oligonucleotide
  Sense strand starting at position 3865 of SEQ ID NO: 1242347
caggaugacuguuuauucu

SEQ ID NO: 1340587 - RNA, 19 nt, Artificial Sequence
  Description of Artificial Sequence: Synthetic oligonucleotide
  Antisense strand to SEQ ID NO: 1340586
agaauaaacagucauccug

SEQ ID NO: 1340588 - RNA, 19 nt, Artificial Sequence
  Description of Artificial Sequence: Synthetic oligonucleotide
  Sense strand starting at position 4 of SEQ ID NO: 1242348
cgucucagggucuaaauau

SEQ ID NO: 1340589 - RNA, 19 nt, Artificial Sequence
  Description of Artificial Sequence: Synthetic oligonucleotide
  Antisense strand to SEQ ID NO: 1340588
auauuuagacccugagacg

SEQ ID NO: 1340590 - RNA, 19 nt, Artificial Sequence
  Description of Artificial Sequence: Synthetic oligonucleotide
  Sense strand starting at position 167 of SEQ ID NO: 1242348
ggaaaucgccuuuaauuaa

SEQ ID NO: 1340591 - RNA, 19 nt, Artificial Sequence
  Description of Artificial Sequence: Synthetic oligonucleotide
  Antisense strand to SEQ ID NO: 1340590
uuaauuaaaggcgauuucc

SEQ ID NO: 1340592 - RNA, 19 nt, Artificial Sequence
  Description of Artificial Sequence: Synthetic oligonucleotide
  Sense strand starting at position 224 of SEQ ID NO: 1242348
acucgaauuccgugaaugg

SEQ ID NO: 1340593 - RNA, 19 nt, Artificial Sequence
  Description of Artificial Sequence: Synthetic oligonucleotide
  Antisense strand to SEQ ID NO: 1340592
ccauucacggaauucgagu

SEQ ID NO: 1340594 - RNA, 19 nt, Artificial Sequence
  Description of Artificial Sequence: Synthetic oligonucleotide
  Sense strand starting at position 228 of SEQ ID NO: 1242348
gaauuccgugaaugggaaa

SEQ ID NO: 1340595 - RNA, 19 nt, Artificial Sequence
  Description of Artificial Sequence: Synthetic oligonucleotide
  Antisense strand to SEQ ID NO: 1340594
uuucccauucacggaauuc

SEQ ID NO: 1340596 - RNA, 19 nt, Artificial Sequence
  Description of Artificial Sequence: Synthetic oligonucleotide
  Sense strand starting at position 301 of SEQ ID NO: 1242348
agcacaugaucagccauau

SEQ ID NO: 1340597 - RNA, 19 nt, Artificial Sequence
  Description of Artificial Sequence: Synthetic oligonucleotide
  Antisense strand to SEQ ID NO: 1340596
auauggcugaucaugugcu

SEQ ID NO: 1340598 - RNA, 19 nt, Artificial Sequence
  Description of Artificial Sequence: Synthetic oligonucleotide
  Sense strand starting at position 516 of SEQ ID NO: 1242348
gagugacaggcgcgauuua

SEQ ID NO: 1340599 - RNA, 19 nt, Artificial Sequence
  Description of Artificial Sequence: Synthetic oligonucleotide
  Antisense strand to SEQ ID NO: 1340598
uaaaucgcgccugucacuc

SEQ ID NO: 1340600 - RNA, 19 nt, Artificial Sequence
  Description of Artificial Sequence: Synthetic oligonucleotide
  Sense strand starting at position 517 of SEQ ID NO: 1242348
agugacaggcgcgauuuau

SEQ ID NO: 1340601 - RNA, 19 nt, Artificial Sequence
  Description of Artificial Sequence: Synthetic oligonucleotide
  Antisense strand to SEQ ID NO: 1340600
auaaaucgcgccugucacu

SEQ ID NO: 1340602 - RNA, 19 nt, Artificial Sequence
  Description of Artificial Sequence: Synthetic oligonucleotide
  Sense strand starting at position 525 of SEQ ID NO: 1242348
gcgcgauuuauacauuauu

SEQ ID NO: 1340603 - RNA, 19 nt, Artificial Sequence
  Description of Artificial Sequence: Synthetic oligonucleotide
  Antisense strand to SEQ ID NO: 1340602
aauaauguauaaaucgcgc

SEQ ID NO: 1340604 - RNA, 19 nt, Artificial Sequence
  Description of Artificial Sequence: Synthetic oligonucleotide
  Sense strand starting at position 662 of SEQ ID NO: 1242348
gagugagcuuuccucaaca

SEQ ID NO: 1340605 - RNA, 19 nt, Artificial Sequence
  Description of Artificial Sequence: Synthetic oligonucleotide
  Antisense strand to SEQ ID NO: 1340604
uguugaggaaagcucacuc

SEQ ID NO: 1340606 - RNA, 19 nt, Artificial Sequence
  Description of Artificial Sequence: Synthetic oligonucleotide
  Sense strand starting at position 848 of SEQ ID NO: 1242348
gcagaaaugcuuggaaccu

SEQ ID NO: 1340607 - RNA, 19 nt, Artificial Sequence
  Description of Artificial Sequence: Synthetic oligonucleotide
  Antisense strand to SEQ ID NO: 1340606
agguuccaagcauuucugc

SEQ ID NO: 1340608 - RNA, 19 nt, Artificial Sequence
  Description of Artificial Sequence: Synthetic oligonucleotide
  Sense strand starting at position 1427 of SEQ ID NO: 1242348
agcguauuuaauugaggca

SEQ ID NO: 1340609 - RNA, 19 nt, Artificial Sequence
  Description of Artificial Sequence: Synthetic oligonucleotide
  Antisense strand to SEQ ID NO: 1340608
ugccucaauuaaauacgcu

SEQ ID NO: 1340610 - RNA, 19 nt, Artificial Sequence
  Description of Artificial Sequence: Synthetic oligonucleotide
  Sense strand starting at position 1928 of SEQ ID NO: 1242348
uguagagaucgcuggagau

SEQ ID NO: 1340611 - RNA, 19 nt, Artificial Sequence
  Description of Artificial Sequence: Synthetic oligonucleotide
  Antisense strand to SEQ ID NO: 1340610
aucuccagcgaucucuaca

SEQ ID NO: 1340612 - RNA, 19 nt, Artificial Sequence
  Description of Artificial Sequence: Synthetic oligonucleotide
  Sense strand starting at position 2397 of SEQ ID NO: 1242348
ugagacucucucgggaaca

SEQ ID NO: 1340613 - RNA, 19 nt, Artificial Sequence
  Description of Artificial Sequence: Synthetic oligonucleotide
  Antisense strand to SEQ ID NO: 1340612
uguucccgagagagucuca

SEQ ID NO: 1340614 - RNA, 19 nt, Artificial Sequence
  Description of Artificial Sequence: Synthetic oligonucleotide
  Sense strand starting at position 2450 of SEQ ID NO: 1242348
gacaaauccgauuguccac

SEQ ID NO: 1340615 - RNA, 19 nt, Artificial Sequence
  Description of Artificial Sequence: Synthetic oligonucleotide
  Antisense strand to SEQ ID NO: 1340614
guggacaaucggauuuguc

SEQ ID NO: 1340616 - RNA, 19 nt, Artificial Sequence
  Description of Artificial Sequence: Synthetic oligonucleotide
  Sense strand starting at position 2620 of SEQ ID NO: 1242348
guuuccaaucuugguuaaa

SEQ ID NO: 1340617 - RNA, 19 nt, Artificial Sequence
  Description of Artificial Sequence: Synthetic oligonucleotide
  Antisense strand to SEQ ID NO: 1340616
uuuaaccaagauuggaaac

SEQ ID NO: 1340618 - RNA, 19 nt, Artificial Sequence
  Description of Artificial Sequence: Synthetic oligonucleotide
  Sense strand starting at position 2622 of SEQ ID NO: 1242348
uuccaaucuugguuaaaga

SEQ ID NO: 1340619 - RNA, 19 nt, Artificial Sequence
  Description of Artificial Sequence: Synthetic oligonucleotide
  Antisense strand to SEQ ID NO: 1340618
ucuuuaaccaagauuggaa

SEQ ID NO: 1340620 - RNA, 19 nt, Artificial Sequence
  Description of Artificial Sequence: Synthetic oligonucleotide
  Sense strand starting at position 2633 of SEQ ID NO: 1242348
guuaaagacaucugugucu

SEQ ID NO: 1340621 - RNA, 19 nt, Artificial Sequence
  Description of Artificial Sequence: Synthetic oligonucleotide
  Antisense strand to SEQ ID NO: 1340620
agacacagaugucuuuaac

SEQ ID NO: 1340622 - RNA, 19 nt, Artificial Sequence
  Description of Artificial Sequence: Synthetic oligonucleotide
  Sense strand starting at position 2794 of SEQ ID NO: 1242348
cuguuuggucgacaacuau

SEQ ID NO: 1340623 - RNA, 19 nt, Artificial Sequence
  Description of Artificial Sequence: Synthetic oligonucleotide
  Antisense strand to SEQ ID NO: 1340622
auaguugucgaccaaacag

SEQ ID NO: 1340624 - RNA, 19 nt, Artificial Sequence
  Description of Artificial Sequence: Synthetic oligonucleotide
  Sense strand starting at position 2805 of SEQ ID NO: 1242348
acaacuaucuaagcuggau

SEQ ID NO: 1340625 - RNA, 19 nt, Artificial Sequence
  Description of Artificial Sequence: Synthetic oligonucleotide
  Antisense strand to SEQ ID NO: 1340624
auccagcuuagauaguugu

SEQ ID NO: 1340626 - RNA, 19 nt, Artificial Sequence
  Description of Artificial Sequence: Synthetic oligonucleotide
  Sense strand starting at position 2808 of SEQ ID NO: 1242348
acuaucuaagcuggauaaa

SEQ ID NO: 1340627 - RNA, 19 nt, Artificial Sequence
  Description of Artificial Sequence: Synthetic oligonucleotide
  Antisense strand to SEQ ID NO: 1340626
uuuauccagcuuagauagu

SEQ ID NO: 1340628 - RNA, 19 nt, Artificial Sequence
  Description of Artificial Sequence: Synthetic oligonucleotide
  Sense strand starting at position 2867 of SEQ ID NO: 1242348
gucaauucccacugguacu

SEQ ID NO: 1340629 - RNA, 19 nt, Artificial Sequence
  Description of Artificial Sequence: Synthetic oligonucleotide
  Antisense strand to SEQ ID NO: 1340628
aguaccagugggaauugac

SEQ ID NO: 1340630 - RNA, 19 nt, Artificial Sequence
  Description of Artificial Sequence: Synthetic oligonucleotide
  Sense strand starting at position 2898 of SEQ ID NO: 1242348
uguacagucucauccauaa

SEQ ID NO: 1340631 - RNA, 19 nt, Artificial Sequence
  Description of Artificial Sequence: Synthetic oligonucleotide
  Antisense strand to SEQ ID NO: 1340630
uuauggaugagacuguaca

SEQ ID NO: 1340632 - RNA, 19 nt, Artificial Sequence
  Description of Artificial Sequence: Synthetic oligonucleotide
  Sense strand starting at position 2939 of SEQ ID NO: 1242348
auuacuaaugcccggauaa

SEQ ID NO: 1340633 - RNA, 19 nt, Artificial Sequence
  Description of Artificial Sequence: Synthetic oligonucleotide
  Antisense strand to SEQ ID NO: 1340632
uuauccgggcauuaguaau

SEQ ID NO: 1340634 - RNA, 19 nt, Artificial Sequence
  Description of Artificial Sequence: Synthetic oligonucleotide
  Sense strand starting at position 2940 of SEQ ID NO: 1242348
uuacuaaugcccggauaac

SEQ ID NO: 1340635 - RNA, 19 nt, Artificial Sequence
  Description of Artificial Sequence: Synthetic oligonucleotide
  Antisense strand to SEQ ID NO: 1340634
guuauccgggcauuaguaa

SEQ ID NO: 1340636 - RNA, 19 nt, Artificial Sequence
  Description of Artificial Sequence: Synthetic oligonucleotide
  Sense strand starting at position 2989 of SEQ ID NO: 1242348
guauuauuauaggcaucau

SEQ ID NO: 1340637 - RNA, 19 nt, Artificial Sequence
  Description of Artificial Sequence: Synthetic oligonucleotide
  Antisense strand to SEQ ID NO: 1340636
augaugccuauaauaauac

SEQ ID NO: 1340638 - RNA, 19 nt, Artificial Sequence
  Description of Artificial Sequence: Synthetic oligonucleotide
  Sense strand starting at position 3072 of SEQ ID NO: 1242348
agauaauugcaucaucguu

SEQ ID NO: 1340639 - RNA, 19 nt, Artificial Sequence
  Description of Artificial Sequence: Synthetic oligonucleotide
  Antisense strand to SEQ ID NO: 1340638
aacgaugaugcaauuaucu

SEQ ID NO: 1340640 - RNA, 19 nt, Artificial Sequence
  Description of Artificial Sequence: Synthetic oligonucleotide
  Sense strand starting at position 3156 of SEQ ID NO: 1242348
guaguagccugauuugucu

SEQ ID NO: 1340641 - RNA, 19 nt, Artificial Sequence
  Description of Artificial Sequence: Synthetic oligonucleotide
  Antisense strand to SEQ ID NO: 1340640
agacaaaucaggcuacuac

SEQ ID NO: 1340642 - RNA, 19 nt, Artificial Sequence
  Description of Artificial Sequence: Synthetic oligonucleotide
  Sense strand starting at position 3162 of SEQ ID NO: 1242348
gccugauuugucugccuuc

SEQ ID NO: 1340643 - RNA, 19 nt, Artificial Sequence
  Description of Artificial Sequence: Synthetic oligonucleotide
  Antisense strand to SEQ ID NO: 1340642
gaaggcagacaaaucaggc

SEQ ID NO: 1340644 - RNA, 19 nt, Artificial Sequence
  Description of Artificial Sequence: Synthetic oligonucleotide
  Sense strand starting at position 3362 of SEQ ID NO: 1242348
cuaacuuccugguuuggaa

SEQ ID NO: 1340645 - RNA, 19 nt, Artificial Sequence
  Description of Artificial Sequence: Synthetic oligonucleotide
  Antisense strand to SEQ ID NO: 1340644
uuccaaaccaggaaguuag

SEQ ID NO: 1340646 - RNA, 19 nt, Artificial Sequence
  Description of Artificial Sequence: Synthetic oligonucleotide
  Sense strand starting at position 3476 of SEQ ID NO: 1242348
guuacugaucuugaucuua

SEQ ID NO: 1340647 - RNA, 19 nt, Artificial Sequence
  Description of Artificial Sequence: Synthetic oligonucleotide
  Antisense strand to SEQ ID NO: 1340646
uaagaucaagaucaguaac

SEQ ID NO: 1340648 - RNA, 19 nt, Artificial Sequence
  Description of Artificial Sequence: Synthetic oligonucleotide
  Sense strand starting at position 3563 of SEQ ID NO: 1242348
gggugauguaaaugagaug

SEQ ID NO: 1340649 - RNA, 19 nt, Artificial Sequence
  Description of Artificial Sequence: Synthetic oligonucleotide
  Antisense strand to SEQ ID NO: 1340648
caucucauuuacaucaccc

SEQ ID NO: 1340650 - RNA, 19 nt, Artificial Sequence
  Description of Artificial Sequence: Synthetic oligonucleotide
  Sense strand starting at position 3564 of SEQ ID NO: 1242348
ggugauguaaaugagaugu

SEQ ID NO: 1340651 - RNA, 19 nt, Artificial Sequence
  Description of Artificial Sequence: Synthetic oligonucleotide
  Antisense strand to SEQ ID NO: 1340650
acaucucauuuacaucacc

SEQ ID NO: 1340652 - RNA, 19 nt, Artificial Sequence
  Description of Artificial Sequence: Synthetic oligonucleotide
  Sense strand starting at position 3568 of SEQ ID NO: 1242348
auguaaaugagaugugaac

SEQ ID NO: 1340653 - RNA, 19 nt, Artificial Sequence
  Description of Artificial Sequence: Synthetic oligonucleotide
  Antisense strand to SEQ ID NO: 1340652
guucacaucucauuuacau

SEQ ID NO: 1340654 - RNA, 19 nt, Artificial Sequence
  Description of Artificial Sequence: Synthetic oligonucleotide
  Sense strand starting at position 3581 of SEQ ID NO: 1242348
gugaacaguccugauaccu

SEQ ID NO: 1340655 - RNA, 19 nt, Artificial Sequence
  Description of Artificial Sequence: Synthetic oligonucleotide
  Antisense strand to SEQ ID NO: 1340654
agguaucaggacuguucac

SEQ ID NO: 1340656 - RNA, 19 nt, Artificial Sequence
  Description of Artificial Sequence: Synthetic oligonucleotide
  Sense strand starting at position 3636 of SEQ ID NO: 1242348
gucuguuggcgccuacaaa

SEQ ID NO: 1340657 - RNA, 19 nt, Artificial Sequence
  Description of Artificial Sequence: Synthetic oligonucleotide
  Antisense strand to SEQ ID NO: 1340656
uuuguaggcgccaacagac

SEQ ID NO: 1340658 - RNA, 19 nt, Artificial Sequence
  Description of Artificial Sequence: Synthetic oligonucleotide
  Sense strand starting at position 3713 of SEQ ID NO: 1242348
agcacagauuuccagagua

SEQ ID NO: 1340659 - RNA, 19 nt, Artificial Sequence
  Description of Artificial Sequence: Synthetic oligonucleotide
  Antisense strand to SEQ ID NO: 1340658
uacucuggaaaucugugcu

SEQ ID NO: 1340660 - RNA, 19 nt, Artificial Sequence
  Description of Artificial Sequence: Synthetic oligonucleotide
  Sense strand starting at position 3765 of SEQ ID NO: 1242348
aguaauguucuugaugcaa

SEQ ID NO: 1340661 - RNA, 19 nt, Artificial Sequence
  Description of Artificial Sequence: Synthetic oligonucleotide
  Antisense strand to SEQ ID NO: 1340660
uugcaucaagaacauuacu

SEQ ID NO: 1340662 - RNA, 19 nt, Artificial Sequence
  Description of Artificial Sequence: Synthetic oligonucleotide
  Sense strand starting at position 3785 of SEQ ID NO: 1242348
ugaccuagcuuguuacacu

SEQ ID NO: 1340663 - RNA, 19 nt, Artificial Sequence
  Description of Artificial Sequence: Synthetic oligonucleotide
  Antisense strand to SEQ ID NO: 1340662
aguguaacaagcuagguca

SEQ ID NO: 1340664 - RNA, 19 nt, Artificial Sequence
  Description of Artificial Sequence: Synthetic oligonucleotide
  Sense strand starting at position 3947 of SEQ ID NO: 1242348
caguaauucuaucugggac

SEQ ID NO: 1340665 - RNA, 19 nt, Artificial Sequence
  Description of Artificial Sequence: Synthetic oligonucleotide
  Antisense strand to SEQ ID NO: 1340664
gucccagauagaauuacug

SEQ ID NO: 1340666 - RNA, 19 nt, Artificial Sequence
  Description of Artificial Sequence: Synthetic oligonucleotide
  Sense strand starting at position 3950 of SEQ ID NO: 1242348
uaauucuaucugggacgca

SEQ ID NO: 1340667 - RNA, 19 nt, Artificial Sequence
  Description of Artificial Sequence: Synthetic oligonucleotide
  Antisense strand to SEQ ID NO: 1340666
ugcgucccagauagaauua

SEQ ID NO: 1340668 - RNA, 19 nt, Artificial Sequence
  Description of Artificial Sequence: Synthetic oligonucleotide
  Sense strand starting at position 44 of SEQ ID NO: 1242349
guggauaaagacuggcauu

SEQ ID NO: 1340669 - RNA, 19 nt, Artificial Sequence
  Description of Artificial Sequence: Synthetic oligonucleotide
  Antisense strand to SEQ ID NO: 1340668
aaugccagucuuuauccac

SEQ ID NO: 1340670 - RNA, 19 nt, Artificial Sequence
  Description of Artificial Sequence: Synthetic oligonucleotide
  Sense strand starting at position 441 of SEQ ID NO: 1242349
guacguuucggccuguuaa

SEQ ID NO: 1340671 - RNA, 19 nt, Artificial Sequence
  Description of Artificial Sequence: Synthetic oligonucleotide
  Antisense strand to SEQ ID NO: 1340670
uuaacaggccgaaacguac

SEQ ID NO: 1340672 - RNA, 19 nt, Artificial Sequence
  Description of Artificial Sequence: Synthetic oligonucleotide
  Sense strand starting at position 443 of SEQ ID NO: 1242349
acguuucggccuguuaaua

SEQ ID NO: 1340673 - RNA, 19 nt, Artificial Sequence
  Description of Artificial Sequence: Synthetic oligonucleotide
  Antisense strand to SEQ ID NO: 1340672
uauuaacaggccgaaacgu

SEQ ID NO: 1340674 - RNA, 19 nt, Artificial Sequence
  Description of Artificial Sequence: Synthetic oligonucleotide
  Sense strand starting at position 444 of SEQ ID NO: 1242349
cguuucggccuguuaauaa

SEQ ID NO: 1340675 - RNA, 19 nt, Artificial Sequence
  Description of Artificial Sequence: Synthetic oligonucleotide
  Antisense strand to SEQ ID NO: 1340674
uuauuaacaggccgaaacg

SEQ ID NO: 1340676 - RNA, 19 nt, Artificial Sequence
  Description of Artificial Sequence: Synthetic oligonucleotide
  Sense strand starting at position 504 of SEQ ID NO: 1242349
aaagcucggugauccgaaa

SEQ ID NO: 1340677 - RNA, 19 nt, Artificial Sequence
  Description of Artificial Sequence: Synthetic oligonucleotide
  Antisense strand to SEQ ID NO: 1340676
uuucggaucaccgagcuuu

SEQ ID NO: 1340678 - RNA, 19 nt, Artificial Sequence
  Description of Artificial Sequence: Synthetic oligonucleotide
  Sense strand starting at position 918 of SEQ ID NO: 1242349
aucagaaaguucccugacu

SEQ ID NO: 1340679 - RNA, 19 nt, Artificial Sequence
  Description of Artificial Sequence: Synthetic oligonucleotide
  Antisense strand to SEQ ID NO: 1340678
agucagggaacuuucugau

SEQ ID NO: 1340680 - RNA, 19 nt, Artificial Sequence
  Description of Artificial Sequence: Synthetic oligonucleotide
  Sense strand starting at position 919 of SEQ ID NO: 1242349
ucagaaaguucccugacuu

SEQ ID NO: 1340681 - RNA, 19 nt, Artificial Sequence
  Description of Artificial Sequence: Synthetic oligonucleotide
  Antisense strand to SEQ ID NO: 1340680
aagucagggaacuuucuga

SEQ ID NO: 1340682 - RNA, 19 nt, Artificial Sequence
  Description of Artificial Sequence: Synthetic oligonucleotide
  Sense strand starting at position 920 of SEQ ID NO: 1242349
cagaaaguucccugacuug

SEQ ID NO: 1340683 - RNA, 19 nt, Artificial Sequence
  Description of Artificial Sequence: Synthetic oligonucleotide
  Antisense strand to SEQ ID NO: 1340682
caagucagggaacuuucug

SEQ ID NO: 1340684 - RNA, 19 nt, Artificial Sequence
  Description of Artificial Sequence: Synthetic oligonucleotide
  Sense strand starting at position 2541 of SEQ ID NO: 1242349
acuucugggccguggagaa

SEQ ID NO: 1340685 - RNA, 19 nt, Artificial Sequence
  Description of Artificial Sequence: Synthetic oligonucleotide
  Antisense strand to SEQ ID NO: 1340684
uucuccacggcccagaagu

SEQ ID NO: 1340686 - RNA, 19 nt, Artificial Sequence
  Description of Artificial Sequence: Synthetic oligonucleotide
  Sense strand starting at position 2587 of SEQ ID NO: 1242349
ggaguaagcuccuccgaag

SEQ ID NO: 1340687 - RNA, 19 nt, Artificial Sequence
  Description of Artificial Sequence: Synthetic oligonucleotide
  Antisense strand to SEQ ID NO: 1340686
cuucggaggagcuuacucc

SEQ ID NO: 1340688 - RNA, 19 nt, Artificial Sequence
  Description of Artificial Sequence: Synthetic oligonucleotide
  Sense strand starting at position 2599 of SEQ ID NO: 1242349
uccgaagucuuucuggaga

SEQ ID NO: 1340689 - RNA, 19 nt, Artificial Sequence
  Description of Artificial Sequence: Synthetic oligonucleotide
  Antisense strand to SEQ ID NO: 1340688
ucuccagaaagacuucgga

SEQ ID NO: 1340690 - RNA, 19 nt, Artificial Sequence
  Description of Artificial Sequence: Synthetic oligonucleotide
  Sense strand starting at position 2655 of SEQ ID NO: 1242349
cuuggcaacccuuggauau

SEQ ID NO: 1340691 - RNA, 19 nt, Artificial Sequence
  Description of Artificial Sequence: Synthetic oligonucleotide
  Antisense strand to SEQ ID NO: 1340690
auauccaaggguugccaag

SEQ ID NO: 1340692 - RNA, 19 nt, Artificial Sequence
  Description of Artificial Sequence: Synthetic oligonucleotide
  Sense strand starting at position 2656 of SEQ ID NO: 1242349
uuggcaacccuuggauauu

SEQ ID NO: 1340693 - RNA, 19 nt, Artificial Sequence
  Description of Artificial Sequence: Synthetic oligonucleotide
  Antisense strand to SEQ ID NO: 1340692
aauauccaaggguugccaa

SEQ ID NO: 1340694 - RNA, 19 nt, Artificial Sequence
  Description of Artificial Sequence: Synthetic oligonucleotide
  Sense strand starting at position 2767 of SEQ ID NO: 1242349
ccggaaauuguaugugaau

SEQ ID NO: 1340695 - RNA, 19 nt, Artificial Sequence
  Description of Artificial Sequence: Synthetic oligonucleotide
  Antisense strand to SEQ ID NO: 1340694
auucacauacaauuuccgg

SEQ ID NO: 1340696 - RNA, 19 nt, Artificial Sequence
  Description of Artificial Sequence: Synthetic oligonucleotide
  Sense strand starting at position 2768 of SEQ ID NO: 1242349
cggaaauuguaugugaauc

SEQ ID NO: 1340697 - RNA, 19 nt, Artificial Sequence
  Description of Artificial Sequence: Synthetic oligonucleotide
  Antisense strand to SEQ ID NO: 1340696
gauucacauacaauuuccg

SEQ ID NO: 1340698 - RNA, 19 nt, Artificial Sequence
  Description of Artificial Sequence: Synthetic oligonucleotide
  Sense strand starting at position 2769 of SEQ ID NO: 1242349
ggaaauuguaugugaauca

SEQ ID NO: 1340699 - RNA, 19 nt, Artificial Sequence
  Description of Artificial Sequence: Synthetic oligonucleotide
  Antisense strand to SEQ ID NO: 1340698
ugauucacauacaauuucc

SEQ ID NO: 1340700 - RNA, 19 nt, Artificial Sequence
  Description of Artificial Sequence: Synthetic oligonucleotide
  Sense strand starting at position 2776 of SEQ ID NO: 1242349
guaugugaaucaccuaaau

SEQ ID NO: 1340701 - RNA, 19 nt, Artificial Sequence
  Description of Artificial Sequence: Synthetic oligonucleotide
  Antisense strand to SEQ ID NO: 1340700
auuuaggugauucacauac

SEQ ID NO: 1340702 - RNA, 19 nt, Artificial Sequence
  Description of Artificial Sequence: Synthetic oligonucleotide
  Sense strand starting at position 2810 of SEQ ID NO: 1242349
gcugauuugagccgcuaaa

SEQ ID NO: 1340703 - RNA, 19 nt, Artificial Sequence
  Description of Artificial Sequence: Synthetic oligonucleotide
  Antisense strand to SEQ ID NO: 1340702
uuuagcggcucaaaucagc

SEQ ID NO: 1340704 - RNA, 19 nt, Artificial Sequence
  Description of Artificial Sequence: Synthetic oligonucleotide
  Sense strand starting at position 2944 of SEQ ID NO: 1242349
gaaggugaacuuuguacau

SEQ ID NO: 1340705 - RNA, 19 nt, Artificial Sequence
  Description of Artificial Sequence: Synthetic oligonucleotide
  Antisense strand to SEQ ID NO: 1340704
auguacaaaguucaccuuc

SEQ ID NO: 1340706 - RNA, 19 nt, Artificial Sequence
  Description of Artificial Sequence: Synthetic oligonucleotide
  Sense strand starting at position 2946 of SEQ ID NO: 1242349
aggugaacuuuguacauuu

SEQ ID NO: 1340707 - RNA, 19 nt, Artificial Sequence
  Description of Artificial Sequence: Synthetic oligonucleotide
  Antisense strand to SEQ ID NO: 1340706
aaauguacaaaguucaccu

SEQ ID NO: 1340708 - RNA, 19 nt, Artificial Sequence
  Description of Artificial Sequence: Synthetic oligonucleotide
  Sense strand starting at position 2964 of SEQ ID NO: 1242349
uuaacaugcgacuaagacu

SEQ ID NO: 1340709 - RNA, 19 nt, Artificial Sequence
  Description of Artificial Sequence: Synthetic oligonucleotide
  Antisense strand to SEQ ID NO: 1340708
agucuuagucgcauguuaa

SEQ ID NO: 1340710 - RNA, 19 nt, Artificial Sequence
  Description of Artificial Sequence: Synthetic oligonucleotide
  Sense strand starting at position 3014 of SEQ ID NO: 1242349
ucuuacuguccuuacggaa

SEQ ID NO: 1340711 - RNA, 19 nt, Artificial Sequence
  Description of Artificial Sequence: Synthetic oligonucleotide
  Antisense strand to SEQ ID NO: 1340710
uuccguaaggacaguaaga

SEQ ID NO: 1340712 - RNA, 19 nt, Artificial Sequence
  Description of Artificial Sequence: Synthetic oligonucleotide
  Sense strand starting at position 3032 of SEQ ID NO: 1242349
acuguaaaucaugacguua

SEQ ID NO: 1340713 - RNA, 19 nt, Artificial Sequence
  Description of Artificial Sequence: Synthetic oligonucleotide
  Antisense strand to SEQ ID NO: 1340712
uaacgucaugauuuacagu

SEQ ID NO: 1340714 - RNA, 19 nt, Artificial Sequence
  Description of Artificial Sequence: Synthetic oligonucleotide
  Sense strand starting at position 3061 of SEQ ID NO: 1242349
ggucaaucucuuuacaaug

SEQ ID NO: 1340715 - RNA, 19 nt, Artificial Sequence
  Description of Artificial Sequence: Synthetic oligonucleotide
  Antisense strand to SEQ ID NO: 1340714
cauuguaaagagauugacc

SEQ ID NO: 1340716 - RNA, 19 nt, Artificial Sequence
  Description of Artificial Sequence: Synthetic oligonucleotide
  Sense strand starting at position 3100 of SEQ ID NO: 1242349
cagagucugcauuguuuaa

SEQ ID NO: 1340717 - RNA, 19 nt, Artificial Sequence
  Description of Artificial Sequence: Synthetic oligonucleotide
  Antisense strand to SEQ ID NO: 1340716
uuaaacaaugcagacucug

SEQ ID NO: 1340718 - RNA, 19 nt, Artificial Sequence
  Description of Artificial Sequence: Synthetic oligonucleotide
  Sense strand starting at position 3134 of SEQ ID NO: 1242349
gucuauaguaccgagcaua

SEQ ID NO: 1340719 - RNA, 19 nt, Artificial Sequence
  Description of Artificial Sequence: Synthetic oligonucleotide
  Antisense strand to SEQ ID NO: 1340718
uaugcucgguacuauagac

SEQ ID NO: 1340720 - RNA, 19 nt, Artificial Sequence
  Description of Artificial Sequence: Synthetic oligonucleotide
  Sense strand starting at position 3137 of SEQ ID NO: 1242349
uauaguaccgagcauaaca

SEQ ID NO: 1340721 - RNA, 19 nt, Artificial Sequence
  Description of Artificial Sequence: Synthetic oligonucleotide
  Antisense strand to SEQ ID NO: 1340720
uguuaugcucgguacuaua

SEQ ID NO: 1340722 - RNA, 19 nt, Artificial Sequence
  Description of Artificial Sequence: Synthetic oligonucleotide
  Sense strand starting at position 3267 of SEQ ID NO: 1242349
uggcuauuagcuguugcau

SEQ ID NO: 1340723 - RNA, 19 nt, Artificial Sequence
  Description of Artificial Sequence: Synthetic oligonucleotide
  Antisense strand to SEQ ID NO: 1340722
augcaacagcuaauagcca

SEQ ID NO: 1340724 - RNA, 19 nt, Artificial Sequence
  Description of Artificial Sequence: Synthetic oligonucleotide
  Sense strand starting at position 3268 of SEQ ID NO: 1242349
ggcuauuagcuguugcauu

SEQ ID NO: 1340725 - RNA, 19 nt, Artificial Sequence
  Description of Artificial Sequence: Synthetic oligonucleotide
  Antisense strand to SEQ ID NO: 1340724
aaugcaacagcuaauagcc

SEQ ID NO: 1340726 - RNA, 19 nt, Artificial Sequence
  Description of Artificial Sequence: Synthetic oligonucleotide
  Sense strand starting at position 3303 of SEQ ID NO: 1242349
ggauaauucuagcauauuu

SEQ ID NO: 1340727 - RNA, 19 nt, Artificial Sequence
  Description of Artificial Sequence: Synthetic oligonucleotide
  Antisense strand to SEQ ID NO: 1340726
aaauaugcuagaauuaucc

SEQ ID NO: 1340728 - RNA, 19 nt, Artificial Sequence
  Description of Artificial Sequence: Synthetic oligonucleotide
  Sense strand starting at position 3381 of SEQ ID NO: 1242349
gcaaauaaucagcaccgua

SEQ ID NO: 1340729 - RNA, 19 nt, Artificial Sequence
  Description of Artificial Sequence: Synthetic oligonucleotide
  Antisense strand to SEQ ID NO: 1340728
uacggugcugauuauuugc

SEQ ID NO: 1340730 - RNA, 19 nt, Artificial Sequence
  Description of Artificial Sequence: Synthetic oligonucleotide
  Sense strand starting at position 3467 of SEQ ID NO: 1242349
uauacagcgcucugauuua

SEQ ID NO: 1340731 - RNA, 19 nt, Artificial Sequence
  Description of Artificial Sequence: Synthetic oligonucleotide
  Antisense strand to SEQ ID NO: 1340730
uaaaucagagcgcuguaua

SEQ ID NO: 1340732 - RNA, 19 nt, Artificial Sequence
  Description of Artificial Sequence: Synthetic oligonucleotide
  Sense strand starting at position 3499 of SEQ ID NO: 1242349
guucguuguccuucaguca

SEQ ID NO: 1340733 - RNA, 19 nt, Artificial Sequence
  Description of Artificial Sequence: Synthetic oligonucleotide
  Antisense strand to SEQ ID NO: 1340732
ugacugaaggacaacgaac

SEQ ID NO: 1340734 - RNA, 19 nt, Artificial Sequence
  Description of Artificial Sequence: Synthetic oligonucleotide
  Sense strand starting at position 3701 of SEQ ID NO: 1242349
agccauacccacuguaaug

SEQ ID NO: 1340735 - RNA, 19 nt, Artificial Sequence
  Description of Artificial Sequence: Synthetic oligonucleotide
  Antisense strand to SEQ ID NO: 1340734
cauuacaguggguauggcu

SEQ ID NO: 1340736 - RNA, 19 nt, Artificial Sequence
  Description of Artificial Sequence: Synthetic oligonucleotide
  Sense strand starting at position 3825 of SEQ ID NO: 1242349
auugauuucccuugugcua

SEQ ID NO: 1340737 - RNA, 19 nt, Artificial Sequence
  Description of Artificial Sequence: Synthetic oligonucleotide
  Antisense strand to SEQ ID NO: 1340736
uagcacaagggaaaucaau

SEQ ID NO: 1340738 - RNA, 19 nt, Artificial Sequence
  Description of Artificial Sequence: Synthetic oligonucleotide
  Sense strand starting at position 3870 of SEQ ID NO: 1242349
gcaggucccagguacaauu

SEQ ID NO: 1340739 - RNA, 19 nt, Artificial Sequence
  Description of Artificial Sequence: Synthetic oligonucleotide
  Antisense strand to SEQ ID NO: 1340738
aauuguaccugggaccugc

SEQ ID NO: 1340740 - RNA, 19 nt, Artificial Sequence
  Description of Artificial Sequence: Synthetic oligonucleotide
  Sense strand starting at position 3929 of SEQ ID NO: 1242349
gacugcauccucggaagua

SEQ ID NO: 1340741 - RNA, 19 nt, Artificial Sequence
  Description of Artificial Sequence: Synthetic oligonucleotide
  Antisense strand to SEQ ID NO: 1340740
uacuuccgaggaugcaguc

SEQ ID NO: 1340742 - RNA, 19 nt, Artificial Sequence
  Description of Artificial Sequence: Synthetic oligonucleotide
  Sense strand starting at position 3941 of SEQ ID NO: 1242349
ggaaguauguucuucccua

SEQ ID NO: 1340743 - RNA, 19 nt, Artificial Sequence
  Description of Artificial Sequence: Synthetic oligonucleotide
  Antisense strand to SEQ ID NO: 1340742
uagggaagaacauacuucc

SEQ ID NO: 1340744 - RNA, 19 nt, Artificial Sequence
  Description of Artificial Sequence: Synthetic oligonucleotide
  Sense strand starting at position 3945 of SEQ ID NO: 1242349
guauguucuucccuacuca

SEQ ID NO: 1340745 - RNA, 19 nt, Artificial Sequence
  Description of Artificial Sequence: Synthetic oligonucleotide
  Antisense strand to SEQ ID NO: 1340744
ugaguagggaagaacauac

SEQ ID NO: 1340746 - RNA, 19 nt, Artificial Sequence
  Description of Artificial Sequence: Synthetic oligonucleotide
  Sense strand starting at position 3979 of SEQ ID NO: 1242349
gauauacaacucggaugau

SEQ ID NO: 1340747 - RNA, 19 nt, Artificial Sequence
  Description of Artificial Sequence: Synthetic oligonucleotide
  Antisense strand to SEQ ID NO: 1340746
aucauccgaguuguauauc

SEQ ID NO: 1340748 - RNA, 19 nt, Artificial Sequence
  Description of Artificial Sequence: Synthetic oligonucleotide
  Sense strand starting at position 19 of SEQ ID NO: 1242350
gagagaauaugguaaacac

SEQ ID NO: 1340749 - RNA, 19 nt, Artificial Sequence
  Description of Artificial Sequence: Synthetic oligonucleotide
  Antisense strand to SEQ ID NO: 1340748
guguuuaccauauucucuc

SEQ ID NO: 1340750 - RNA, 19 nt, Artificial Sequence
  Description of Artificial Sequence: Synthetic oligonucleotide
  Sense strand starting at position 57 of SEQ ID NO: 1242350
aguacaucccagugaugaa

SEQ ID NO: 1340751 - RNA, 19 nt, Artificial Sequence
  Description of Artificial Sequence: Synthetic oligonucleotide
  Antisense strand to SEQ ID NO: 1340750
uucaucacugggauguacu

SEQ ID NO: 1340752 - RNA, 19 nt, Artificial Sequence
  Description of Artificial Sequence: Synthetic oligonucleotide
  Sense strand starting at position 85 of SEQ ID NO: 1242350
auagaagaucagugcuaca

SEQ ID NO: 1340753 - RNA, 19 nt, Artificial Sequence
  Description of Artificial Sequence: Synthetic oligonucleotide
  Antisense strand to SEQ ID NO: 1340752
uguagcacugaucuucuau

SEQ ID NO: 1340754 - RNA, 19 nt, Artificial Sequence
  Description of Artificial Sequence: Synthetic oligonucleotide
  Sense strand starting at position 90 of SEQ ID NO: 1242350
agaucagugcuacacgauu

SEQ ID NO: 1340755 - RNA, 19 nt, Artificial Sequence
  Description of Artificial Sequence: Synthetic oligonucleotide
  Antisense strand to SEQ ID NO: 1340754
aaucguguagcacugaucu

SEQ ID NO: 1340756 - RNA, 19 nt, Artificial Sequence
  Description of Artificial Sequence: Synthetic oligonucleotide
  Sense strand starting at position 231 of SEQ ID NO: 1242350
ucuuaaauuuggcauagaa

SEQ ID NO: 1340757 - RNA, 19 nt, Artificial Sequence
  Description of Artificial Sequence: Synthetic oligonucleotide
  Antisense strand to SEQ ID NO: 1340756
uucuaugccaaauuuaaga

SEQ ID NO: 1340758 - RNA, 19 nt, Artificial Sequence
  Description of Artificial Sequence: Synthetic oligonucleotide
  Sense strand starting at position 479 of SEQ ID NO: 1242350
guaagaagauuagaacaga

SEQ ID NO: 1340759 - RNA, 19 nt, Artificial Sequence
  Description of Artificial Sequence: Synthetic oligonucleotide
  Antisense strand to SEQ ID NO: 1340758
ucuguucuaaucuucuuac

SEQ ID NO: 1340760 - RNA, 19 nt, Artificial Sequence
  Description of Artificial Sequence: Synthetic oligonucleotide
  Sense strand starting at position 703 of SEQ ID NO: 1242350
gagucuacauaagcagaaa

SEQ ID NO: 1340761 - RNA, 19 nt, Artificial Sequence
  Description of Artificial Sequence: Synthetic oligonucleotide
  Antisense strand to SEQ ID NO: 1340760
uuucugcuuauguagacuc

SEQ ID NO: 1340762 - RNA, 19 nt, Artificial Sequence
  Description of Artificial Sequence: Synthetic oligonucleotide
  Sense strand starting at position 785 of SEQ ID NO: 1242350
gcgccauaccuacaucaca

SEQ ID NO: 1340763 - RNA, 19 nt, Artificial Sequence
  Description of Artificial Sequence: Synthetic oligonucleotide
  Antisense strand to SEQ ID NO: 1340762
ugugauguagguauggcgc

SEQ ID NO: 1340764 - RNA, 19 nt, Artificial Sequence
  Description of Artificial Sequence: Synthetic oligonucleotide
  Sense strand starting at position 882 of SEQ ID NO: 1242350
augcacuaaaugugcgaaa

SEQ ID NO: 1340765 - RNA, 19 nt, Artificial Sequence
  Description of Artificial Sequence: Synthetic oligonucleotide
  Antisense strand to SEQ ID NO: 1340764
uuucgcacauuuagugcau

SEQ ID NO: 1340766 - RNA, 19 nt, Artificial Sequence
  Description of Artificial Sequence: Synthetic oligonucleotide
  Sense strand starting at position 883 of SEQ ID NO: 1242350
ugcacuaaaugugcgaaau

SEQ ID NO: 1340767 - RNA, 19 nt, Artificial Sequence
  Description of Artificial Sequence: Synthetic oligonucleotide
  Antisense strand to SEQ ID NO: 1340766
auuucgcacauuuagugca

SEQ ID NO: 1340768 - RNA, 19 nt, Artificial Sequence
  Description of Artificial Sequence: Synthetic oligonucleotide
  Sense strand starting at position 884 of SEQ ID NO: 1242350
gcacuaaaugugcgaaauu

SEQ ID NO: 1340769 - RNA, 19 nt, Artificial Sequence
  Description of Artificial Sequence: Synthetic oligonucleotide
  Antisense strand to SEQ ID NO: 1340768
aauuucgcacauuuagugc

SEQ ID NO: 1340770 - RNA, 19 nt, Artificial Sequence
  Description of Artificial Sequence: Synthetic oligonucleotide
  Sense strand starting at position 893 of SEQ ID NO: 1242350
gugcgaaauuaggcaaauu

SEQ ID NO: 1340771 - RNA, 19 nt, Artificial Sequence
  Description of Artificial Sequence: Synthetic oligonucleotide
  Antisense strand to SEQ ID NO: 1340770
aauuugccuaauuucgcac

SEQ ID NO: 1340772 - RNA, 19 nt, Artificial Sequence
  Description of Artificial Sequence: Synthetic oligonucleotide
  Sense strand starting at position 1273 of SEQ ID NO: 1242350
augugaguaacagguccua

SEQ ID NO: 1340773 - RNA, 19 nt, Artificial Sequence
  Description of Artificial Sequence: Synthetic oligonucleotide
  Antisense strand to SEQ ID NO: 1340772
uaggaccuguuacucacau

SEQ ID NO: 1340774 - RNA, 19 nt, Artificial Sequence
  Description of Artificial Sequence: Synthetic oligonucleotide
  Sense strand starting at position 1296 of SEQ ID NO: 1242350
auaggaaaugugugaggau

SEQ ID NO: 1340775 - RNA, 19 nt, Artificial Sequence
  Description of Artificial Sequence: Synthetic oligonucleotide
  Antisense strand to SEQ ID NO: 1340774
auccucacacauuuccuau

SEQ ID NO: 1340776 - RNA, 19 nt, Artificial Sequence
  Description of Artificial Sequence: Synthetic oligonucleotide
  Sense strand starting at position 1299 of SEQ ID NO: 1242350
ggaaaugugugaggauuua

SEQ ID NO: 1340777 - RNA, 19 nt, Artificial Sequence
  Description of Artificial Sequence: Synthetic oligonucleotide
  Antisense strand to SEQ ID NO: 1340776
uaaauccucacacauuucc

SEQ ID NO: 1340778 - RNA, 19 nt, Artificial Sequence
  Description of Artificial Sequence: Synthetic oligonucleotide
  Sense strand starting at position 1347 of SEQ ID NO: 1242350
agugccuguuacuuauaua

SEQ ID NO: 1340779 - RNA, 19 nt, Artificial Sequence
  Description of Artificial Sequence: Synthetic oligonucleotide
  Antisense strand to SEQ ID NO: 1340778
uauauaaguaacaggcacu

SEQ ID NO: 1340780 - RNA, 19 nt, Artificial Sequence
  Description of Artificial Sequence: Synthetic oligonucleotide
  Sense strand starting at position 1421 of SEQ ID NO: 1242350
ccacaaauccagcgcagau

SEQ ID NO: 1340781 - RNA, 19 nt, Artificial Sequence
  Description of Artificial Sequence: Synthetic oligonucleotide
  Antisense strand to SEQ ID NO: 1340780
aucugcgcuggauuugugg

SEQ ID NO: 1340782 - RNA, 19 nt, Artificial Sequence
  Description of Artificial Sequence: Synthetic oligonucleotide
  Sense strand starting at position 1431 of SEQ ID NO: 1242350
agcgcagauuuguccagaa

SEQ ID NO: 1340783 - RNA, 19 nt, Artificial Sequence
  Description of Artificial Sequence: Synthetic oligonucleotide
  Antisense strand to SEQ ID NO: 1340782
uucuggacaaaucugcgcu

SEQ ID NO: 1340784 - RNA, 19 nt, Artificial Sequence
  Description of Artificial Sequence: Synthetic oligonucleotide
  Sense strand starting at position 1446 of SEQ ID NO: 1242350
agaaccaaucagugcuaga

SEQ ID NO: 1340785 - RNA, 19 nt, Artificial Sequence
  Description of Artificial Sequence: Synthetic oligonucleotide
  Antisense strand to SEQ ID NO: 1340784
ucuagcacugauugguucu

SEQ ID NO: 1340786 - RNA, 19 nt, Artificial Sequence
  Description of Artificial Sequence: Synthetic oligonucleotide
  Sense strand starting at position 1451 of SEQ ID NO: 1242350
caaucagugcuagaaguga

SEQ ID NO: 1340787 - RNA, 19 nt, Artificial Sequence
  Description of Artificial Sequence: Synthetic oligonucleotide
  Antisense strand to SEQ ID NO: 1340786
ucacuucuagcacugauug

SEQ ID NO: 1340788 - RNA, 19 nt, Artificial Sequence
  Description of Artificial Sequence: Synthetic oligonucleotide
  Sense strand starting at position 1456 of SEQ ID NO: 1242350
agugcuagaagugauaaca

SEQ ID NO: 1340789 - RNA, 19 nt, Artificial Sequence
  Description of Artificial Sequence: Synthetic oligonucleotide
  Antisense strand to SEQ ID NO: 1340788
uguuaucacuucuagcacu

SEQ ID NO: 1340790 - RNA, 19 nt, Artificial Sequence
  Description of Artificial Sequence: Synthetic oligonucleotide
  Sense strand starting at position 1549 of SEQ ID NO: 1242350
ccuaaagaguaacucguaa

SEQ ID NO: 1340791 - RNA, 19 nt, Artificial Sequence
  Description of Artificial Sequence: Synthetic oligonucleotide
  Antisense strand to SEQ ID NO: 1340790
uuacgaguuacucuuuagg

SEQ ID NO: 1340792 - RNA, 19 nt, Artificial Sequence
  Description of Artificial Sequence: Synthetic oligonucleotide
  Sense strand starting at position 1585 of SEQ ID NO: 1242350
aauggaccucuggguuuau

SEQ ID NO: 1340793 - RNA, 19 nt, Artificial Sequence
  Description of Artificial Sequence: Synthetic oligonucleotide
  Antisense strand to SEQ ID NO: 1340792
auaaacccagagguccauu

SEQ ID NO: 1340794 - RNA, 19 nt, Artificial Sequence
  Description of Artificial Sequence: Synthetic oligonucleotide
  Sense strand starting at position 1704 of SEQ ID NO: 1242350
ggucaagggcuccaguuaa

SEQ ID NO: 1340795 - RNA, 19 nt, Artificial Sequence
  Description of Artificial Sequence: Synthetic oligonucleotide
  Antisense strand to SEQ ID NO: 1340794
uuaacuggagcccuugacc

SEQ ID NO: 1340796 - RNA, 19 nt, Artificial Sequence
  Description of Artificial Sequence: Synthetic oligonucleotide
  Sense strand starting at position 1795 of SEQ ID NO: 1242350
gcccgagaucuaugcacag

SEQ ID NO: 1340797 - RNA, 19 nt, Artificial Sequence
  Description of Artificial Sequence: Synthetic oligonucleotide
  Antisense strand to SEQ ID NO: 1340796
cugugcauagaucucgggc

SEQ ID NO: 1340798 - RNA, 19 nt, Artificial Sequence
  Description of Artificial Sequence: Synthetic oligonucleotide
  Sense strand starting at position 2133 of SEQ ID NO: 1242350
ccacguaagcucuauacca

SEQ ID NO: 1340799 - RNA, 19 nt, Artificial Sequence
  Description of Artificial Sequence: Synthetic oligonucleotide
  Antisense strand to SEQ ID NO: 1340798
ugguauagagcuuacgugg

SEQ ID NO: 1340800 - RNA, 19 nt, Artificial Sequence
  Description of Artificial Sequence: Synthetic oligonucleotide
  Sense strand starting at position 2135 of SEQ ID NO: 1242350
acguaagcucuauaccauc

SEQ ID NO: 1340801 - RNA, 19 nt, Artificial Sequence
  Description of Artificial Sequence: Synthetic oligonucleotide
  Antisense strand to SEQ ID NO: 1340800
gaugguauagagcuuacgu

SEQ ID NO: 1340802 - RNA, 19 nt, Artificial Sequence
  Description of Artificial Sequence: Synthetic oligonucleotide
  Sense strand starting at position 2654 of SEQ ID NO: 1242350
ugacgaauguguuuaugga

SEQ ID NO: 1340803 - RNA, 19 nt, Artificial Sequence
  Description of Artificial Sequence: Synthetic oligonucleotide
  Antisense strand to SEQ ID NO: 1340802
uccauaaacacauucguca

SEQ ID NO: 1340804 - RNA, 19 nt, Artificial Sequence
  Description of Artificial Sequence: Synthetic oligonucleotide
  Sense strand starting at position 2655 of SEQ ID NO: 1242350
gacgaauguguuuauggaa

SEQ ID NO: 1340805 - RNA, 19 nt, Artificial Sequence
  Description of Artificial Sequence: Synthetic oligonucleotide
  Antisense strand to SEQ ID NO: 1340804
uuccauaaacacauucguc

SEQ ID NO: 1340806 - RNA, 19 nt, Artificial Sequence
  Description of Artificial Sequence: Synthetic oligonucleotide
  Sense strand starting at position 2676 of SEQ ID NO: 1242350
gcuagaagguaaccaugaa

SEQ ID NO: 1340807 - RNA, 19 nt, Artificial Sequence
  Description of Artificial Sequence: Synthetic oligonucleotide
  Antisense strand to SEQ ID NO: 1340806
uucaugguuaccuucuagc

SEQ ID NO: 1340808 - RNA, 19 nt, Artificial Sequence
  Description of Artificial Sequence: Synthetic oligonucleotide
  Sense strand starting at position 2719 of SEQ ID NO: 1242350
cagugugcacugcagaaau

SEQ ID NO: 1340809 - RNA, 19 nt, Artificial Sequence
  Description of Artificial Sequence: Synthetic oligonucleotide
  Antisense strand to SEQ ID NO: 1340808
auuucugcagugcacacug

SEQ ID NO: 1340810 - RNA, 19 nt, Artificial Sequence
  Description of Artificial Sequence: Synthetic oligonucleotide
  Sense strand starting at position 2732 of SEQ ID NO: 1242350
agaaauagugguggugaga

SEQ ID NO: 1340811 - RNA, 19 nt, Artificial Sequence
  Description of Artificial Sequence: Synthetic oligonucleotide
  Antisense strand to SEQ ID NO: 1340810
ucucaccaccacuauuucu

SEQ ID NO: 1340812 - RNA, 19 nt, Artificial Sequence
  Description of Artificial Sequence: Synthetic oligonucleotide
  Sense strand starting at position 2774 of SEQ ID NO: 1242350
cuagcaagguuaucaucuu

SEQ ID NO: 1340813 - RNA, 19 nt, Artificial Sequence
  Description of Artificial Sequence: Synthetic oligonucleotide
  Antisense strand to SEQ ID NO: 1340812
aagaugauaaccuugcuag

SEQ ID NO: 1340814 - RNA, 19 nt, Artificial Sequence
  Description of Artificial Sequence: Synthetic oligonucleotide
  Sense strand starting at position 2794 of SEQ ID NO: 1242350
uccagaaucuugccuuugu

SEQ ID NO: 1340815 - RNA, 19 nt, Artificial Sequence
  Description of Artificial Sequence: Synthetic oligonucleotide
  Antisense strand to SEQ ID NO: 1340814
acaaaggcaagauucugga

SEQ ID NO: 1340816 - RNA, 19 nt, Artificial Sequence
  Description of Artificial Sequence: Synthetic oligonucleotide
  Sense strand starting at position 2795 of SEQ ID NO: 1242350
ccagaaucuugccuuuguu

SEQ ID NO: 1340817 - RNA, 19 nt, Artificial Sequence
  Description of Artificial Sequence: Synthetic oligonucleotide
  Antisense strand to SEQ ID NO: 1340816
aacaaaggcaagauucugg

SEQ ID NO: 1340818 - RNA, 19 nt, Artificial Sequence
  Description of Artificial Sequence: Synthetic oligonucleotide
  Sense strand starting at position 3048 of SEQ ID NO: 1242350
uccuguucccuugaauaga

SEQ ID NO: 1340819 - RNA, 19 nt, Artificial Sequence
  Description of Artificial Sequence: Synthetic oligonucleotide
  Antisense strand to SEQ ID NO: 1340818
ucuauucaagggaacagga

SEQ ID NO: 1340820 - RNA, 19 nt, Artificial Sequence
  Description of Artificial Sequence: Synthetic oligonucleotide
  Sense strand starting at position 3056 of SEQ ID NO: 1242350
ccuugaauagacugucagu

SEQ ID NO: 1340821 - RNA, 19 nt, Artificial Sequence
  Description of Artificial Sequence: Synthetic oligonucleotide
  Antisense strand to SEQ ID NO: 1340820
acugacagucuauucaagg

SEQ ID NO: 1340822 - RNA, 19 nt, Artificial Sequence
  Description of Artificial Sequence: Synthetic oligonucleotide
  Sense strand starting at position 3125 of SEQ ID NO: 1242350
acguguugccaugcacaua

SEQ ID NO: 1340823 - RNA, 19 nt, Artificial Sequence
  Description of Artificial Sequence: Synthetic oligonucleotide
  Antisense strand to SEQ ID NO: 1340822
uaugugcauggcaacacgu

SEQ ID NO: 1340824 - RNA, 19 nt, Artificial Sequence
  Description of Artificial Sequence: Synthetic oligonucleotide
  Sense strand starting at position 3249 of SEQ ID NO: 1242350
cuuguuaaaccagauugcu

SEQ ID NO: 1340825 - RNA, 19 nt, Artificial Sequence
  Description of Artificial Sequence: Synthetic oligonucleotide
  Antisense strand to SEQ ID NO: 1340824
agcaaucugguuuaacaag

SEQ ID NO: 1340826 - RNA, 19 nt, Artificial Sequence
  Description of Artificial Sequence: Synthetic oligonucleotide
  Sense strand starting at position 3575 of SEQ ID NO: 1242350
ggccucaaccucugaguuu

SEQ ID NO: 1340827 - RNA, 19 nt, Artificial Sequence
  Description of Artificial Sequence: Synthetic oligonucleotide
  Antisense strand to SEQ ID NO: 1340826
aaacucagagguugaggcc

SEQ ID NO: 1340828 - RNA, 19 nt, Artificial Sequence
  Description of Artificial Sequence: Synthetic oligonucleotide
  Sense strand starting at position 5 of SEQ ID NO: 1242351
aggcaacugucgcugagaa

SEQ ID NO: 1340829 - RNA, 19 nt, Artificial Sequence
  Description of Artificial Sequence: Synthetic oligonucleotide
  Antisense strand to SEQ ID NO: 1340828
uucucagcgacaguugccu

SEQ ID NO: 1340830 - RNA, 19 nt, Artificial Sequence
  Description of Artificial Sequence: Synthetic oligonucleotide
  Sense strand starting at position 7 of SEQ ID NO: 1242351
gcaacugucgcugagaaca

SEQ ID NO: 1340831 - RNA, 19 nt, Artificial Sequence
  Description of Artificial Sequence: Synthetic oligonucleotide
  Antisense strand to SEQ ID NO: 1340830
uguucucagcgacaguugc

SEQ ID NO: 1340832 - RNA, 19 nt, Artificial Sequence
  Description of Artificial Sequence: Synthetic oligonucleotide
  Sense strand starting at position 34 of SEQ ID NO: 1242351
cgcaaauuacgacaucauu

SEQ ID NO: 1340833 - RNA, 19 nt, Artificial Sequence
  Description of Artificial Sequence: Synthetic oligonucleotide
  Antisense strand to SEQ ID NO: 1340832
aaugaugucguaauuugcg

SEQ ID NO: 1340834 - RNA, 19 nt, Artificial Sequence
  Description of Artificial Sequence: Synthetic oligonucleotide
  Sense strand starting at position 173 of SEQ ID NO: 1242351
accagucuuagguagugaa

SEQ ID NO: 1340835 - RNA, 19 nt, Artificial Sequence
  Description of Artificial Sequence: Synthetic oligonucleotide
  Antisense strand to SEQ ID NO: 1340834
uucacuaccuaagacuggu

SEQ ID NO: 1340836 - RNA, 19 nt, Artificial Sequence
  Description of Artificial Sequence: Synthetic oligonucleotide
  Sense strand starting at position 177 of SEQ ID NO: 1242351
gucuuagguagugaaacaa

SEQ ID NO: 1340837 - RNA, 19 nt, Artificial Sequence
  Description of Artificial Sequence: Synthetic oligonucleotide
  Antisense strand to SEQ ID NO: 1340836
uuguuucacuaccuaagac

SEQ ID NO: 1340838 - RNA, 19 nt, Artificial Sequence
  Description of Artificial Sequence: Synthetic oligonucleotide
  Sense strand starting at position 366 of SEQ ID NO: 1242351
acuauuaugcaugguagca

SEQ ID NO: 1340839 - RNA, 19 nt, Artificial Sequence
  Description of Artificial Sequence: Synthetic oligonucleotide
  Antisense strand to SEQ ID NO: 1340838
ugcuaccaugcauaauagu

SEQ ID NO: 1340840 - RNA, 19 nt, Artificial Sequence
  Description of Artificial Sequence: Synthetic oligonucleotide
  Sense strand starting at position 642 of SEQ ID NO: 1242351
ggaguacaccgauaucagu

SEQ ID NO: 1340841 - RNA, 19 nt, Artificial Sequence
  Description of Artificial Sequence: Synthetic oligonucleotide
  Antisense strand to SEQ ID NO: 1340840
acugauaucgguguacucc

SEQ ID NO: 1340842 - RNA, 19 nt, Artificial Sequence
  Description of Artificial Sequence: Synthetic oligonucleotide
  Sense strand starting at position 648 of SEQ ID NO: 1242351
caccgauaucagugggcga

SEQ ID NO: 1340843 - RNA, 19 nt, Artificial Sequence
  Description of Artificial Sequence: Synthetic oligonucleotide
  Antisense strand to SEQ ID NO: 1340842
ucgcccacugauaucggug

SEQ ID NO: 1340844 - RNA, 19 nt, Artificial Sequence
  Description of Artificial Sequence: Synthetic oligonucleotide
  Sense strand starting at position 706 of SEQ ID NO: 1242351
acaaguaauguuugaagca

SEQ ID NO: 1340845 - RNA, 19 nt, Artificial Sequence
  Description of Artificial Sequence: Synthetic oligonucleotide
  Antisense strand to SEQ ID NO: 1340844
ugcuucaaacauuacuugu

SEQ ID NO: 1340846 - RNA, 19 nt, Artificial Sequence
  Description of Artificial Sequence: Synthetic oligonucleotide
  Sense strand starting at position 937 of SEQ ID NO: 1242351
uauuguaagguuuggagau

SEQ ID NO: 1340847 - RNA, 19 nt, Artificial Sequence
  Description of Artificial Sequence: Synthetic oligonucleotide
  Antisense strand to SEQ ID NO: 1340846
aucuccaaaccuuacaaua

SEQ ID NO: 1340848 - RNA, 19 nt, Artificial Sequence
  Description of Artificial Sequence: Synthetic oligonucleotide
  Sense strand starting at position 1047 of SEQ ID NO: 1242351
cuaaacacguguuuccaaa

SEQ ID NO: 1340849 - RNA, 19 nt, Artificial Sequence
  Description of Artificial Sequence: Synthetic oligonucleotide
  Antisense strand to SEQ ID NO: 1340848
uuuggaaacacguguuuag

SEQ ID NO: 1340850 - RNA, 19 nt, Artificial Sequence
  Description of Artificial Sequence: Synthetic oligonucleotide
  Sense strand starting at position 1073 of SEQ ID NO: 1242351
aguggaaagacuggugaua

SEQ ID NO: 1340851 - RNA, 19 nt, Artificial Sequence
  Description of Artificial Sequence: Synthetic oligonucleotide
  Antisense strand to SEQ ID NO: 1340850
uaucaccagucuuuccacu

SEQ ID NO: 1340852 - RNA, 19 nt, Artificial Sequence
  Description of Artificial Sequence: Synthetic oligonucleotide
  Sense strand starting at position 1100 of SEQ ID NO: 1242351
uguuuaaaccuccaagucu

SEQ ID NO: 1340853 - RNA, 19 nt, Artificial Sequence
  Description of Artificial Sequence: Synthetic oligonucleotide
  Antisense strand to SEQ ID NO: 1340852
agacuuggagguuuaaaca

SEQ ID NO: 1340854 - RNA, 19 nt, Artificial Sequence
  Description of Artificial Sequence: Synthetic oligonucleotide
  Sense strand starting at position 1114 of SEQ ID NO: 1242351
agucuucccaacugugagu

SEQ ID NO: 1340855 - RNA, 19 nt, Artificial Sequence
  Description of Artificial Sequence: Synthetic oligonucleotide
  Antisense strand to SEQ ID NO: 1340854
acucacaguugggaagacu

SEQ ID NO: 1340856 - RNA, 19 nt, Artificial Sequence
  Description of Artificial Sequence: Synthetic oligonucleotide
  Sense strand starting at position 1116 of SEQ ID NO: 1242351
ucuucccaacugugaguaa

SEQ ID NO: 1340857 - RNA, 19 nt, Artificial Sequence
  Description of Artificial Sequence: Synthetic oligonucleotide
  Antisense strand to SEQ ID NO: 1340856
uuacucacaguugggaaga

SEQ ID NO: 1340858 - RNA, 19 nt, Artificial Sequence
  Description of Artificial Sequence: Synthetic oligonucleotide
  Sense strand starting at position 1312 of SEQ ID NO: 1242351
uuucucugaucacuguuua

SEQ ID NO: 1340859 - RNA, 19 nt, Artificial Sequence
  Description of Artificial Sequence: Synthetic oligonucleotide
  Antisense strand to SEQ ID NO: 1340858
uaaacagugaucagagaaa

SEQ ID NO: 1340860 - RNA, 19 nt, Artificial Sequence
  Description of Artificial Sequence: Synthetic oligonucleotide
  Sense strand starting at position 1388 of SEQ ID NO: 1242351
acguauuuaguccaacgca

SEQ ID NO: 1340861 - RNA, 19 nt, Artificial Sequence
  Description of Artificial Sequence: Synthetic oligonucleotide
  Antisense strand to SEQ ID NO: 1340860
ugcguuggacuaaauacgu

SEQ ID NO: 1340862 - RNA, 19 nt, Artificial Sequence
  Description of Artificial Sequence: Synthetic oligonucleotide
  Sense strand starting at position 1523 of SEQ ID NO: 1242351
cuuauuacgaguuggcuaa

SEQ ID NO: 1340863 - RNA, 19 nt, Artificial Sequence
  Description of Artificial Sequence: Synthetic oligonucleotide
  Antisense strand to SEQ ID NO: 1340862
uuagccaacucguaauaag

SEQ ID NO: 1340864 - RNA, 19 nt, Artificial Sequence
  Description of Artificial Sequence: Synthetic oligonucleotide
  Sense strand starting at position 1527 of SEQ ID NO: 1242351
uuacgaguuggcuaaggau

SEQ ID NO: 1340865 - RNA, 19 nt, Artificial Sequence
  Description of Artificial Sequence: Synthetic oligonucleotide
  Antisense strand to SEQ ID NO: 1340864
auccuuagccaacucguaa

SEQ ID NO: 1340866 - RNA, 19 nt, Artificial Sequence
  Description of Artificial Sequence: Synthetic oligonucleotide
  Sense strand starting at position 1747 of SEQ ID NO: 1242351
ccacguugccucuaagaug

SEQ ID NO: 1340867 - RNA, 19 nt, Artificial Sequence
  Description of Artificial Sequence: Synthetic oligonucleotide
  Antisense strand to SEQ ID NO: 1340866
caucuuagaggcaacgugg

SEQ ID NO: 1340868 - RNA, 19 nt, Artificial Sequence
  Description of Artificial Sequence: Synthetic oligonucleotide
  Sense strand starting at position 1848 of SEQ ID NO: 1242351
uacagauucuaugcuccga

SEQ ID NO: 1340869 - RNA, 19 nt, Artificial Sequence
  Description of Artificial Sequence: Synthetic oligonucleotide
  Antisense strand to SEQ ID NO: 1340868
ucggagcauagaaucugua

SEQ ID NO: 1340870 - RNA, 19 nt, Artificial Sequence
  Description of Artificial Sequence: Synthetic oligonucleotide
  Sense strand starting at position 2107 of SEQ ID NO: 1242351
aaacgagaguguuauuucu

SEQ ID NO: 1340871 - RNA, 19 nt, Artificial Sequence
  Description of Artificial Sequence: Synthetic oligonucleotide
  Antisense strand to SEQ ID NO: 1340870
agaaauaacacucucguuu

SEQ ID NO: 1340872 - RNA, 19 nt, Artificial Sequence
  Description of Artificial Sequence: Synthetic oligonucleotide
  Sense strand starting at position 2109 of SEQ ID NO: 1242351
acgagaguguuauuucuuu

SEQ ID NO: 1340873 - RNA, 19 nt, Artificial Sequence
  Description of Artificial Sequence: Synthetic oligonucleotide
  Antisense strand to SEQ ID NO: 1340872
aaagaaauaacacucucgu

SEQ ID NO: 1340874 - RNA, 19 nt, Artificial Sequence
  Description of Artificial Sequence: Synthetic oligonucleotide
  Sense strand starting at position 2122 of SEQ ID NO: 1242351
uucuuuauuugugggaaau

SEQ ID NO: 1340875 - RNA, 19 nt, Artificial Sequence
  Description of Artificial Sequence: Synthetic oligonucleotide
  Antisense strand to SEQ ID NO: 1340874
auuucccacaaauaaagaa

SEQ ID NO: 1340876 - RNA, 19 nt, Artificial Sequence
  Description of Artificial Sequence: Synthetic oligonucleotide
  Sense strand starting at position 2124 of SEQ ID NO: 1242351
cuuuauuugugggaaauua

SEQ ID NO: 1340877 - RNA, 19 nt, Artificial Sequence
  Description of Artificial Sequence: Synthetic oligonucleotide
  Antisense strand to SEQ ID NO: 1340876
uaauuucccacaaauaaag

SEQ ID NO: 1340878 - RNA, 19 nt, Artificial Sequence
  Description of Artificial Sequence: Synthetic oligonucleotide
  Sense strand starting at position 2714 of SEQ ID NO: 1242351
gagcuugcuugucucagga

SEQ ID NO: 1340879 - RNA, 19 nt, Artificial Sequence
  Description of Artificial Sequence: Synthetic oligonucleotide
  Antisense strand to SEQ ID NO: 1340878
uccugagacaagcaagcuc

SEQ ID NO: 1340880 - RNA, 19 nt, Artificial Sequence
  Description of Artificial Sequence: Synthetic oligonucleotide
  Sense strand starting at position 2735 of SEQ ID NO: 1242351
aaacguguacgucaucaaa

SEQ ID NO: 1340881 - RNA, 19 nt, Artificial Sequence
  Description of Artificial Sequence: Synthetic oligonucleotide
  Antisense strand to SEQ ID NO: 1340880
uuugaugacguacacguuu

SEQ ID NO: 1340882 - RNA, 19 nt, Artificial Sequence
  Description of Artificial Sequence: Synthetic oligonucleotide
  Sense strand starting at position 2764 of SEQ ID NO: 1242351
gguggcaaguguuccaaga

SEQ ID NO: 1340883 - RNA, 19 nt, Artificial Sequence
  Description of Artificial Sequence: Synthetic oligonucleotide
  Antisense strand to SEQ ID NO: 1340882
ucuuggaacacuugccacc

SEQ ID NO: 1340884 - RNA, 19 nt, Artificial Sequence
  Description of Artificial Sequence: Synthetic oligonucleotide
  Sense strand starting at position 2784 of SEQ ID NO: 1242351
gcgauuuauucuuucugcu

SEQ ID NO: 1340885 - RNA, 19 nt, Artificial Sequence
  Description of Artificial Sequence: Synthetic oligonucleotide
  Antisense strand to SEQ ID NO: 1340884
agcagaaagaauaaaucgc

SEQ ID NO: 1340886 - RNA, 19 nt, Artificial Sequence
  Description of Artificial Sequence: Synthetic oligonucleotide
  Sense strand starting at position 2873 of SEQ ID NO: 1242351
uguuuaaagccuuguugac

SEQ ID NO: 1340887 - RNA, 19 nt, Artificial Sequence
  Description of Artificial Sequence: Synthetic oligonucleotide
  Antisense strand to SEQ ID NO: 1340886
gucaacaaggcuuuaaaca

SEQ ID NO: 1340888 - RNA, 19 nt, Artificial Sequence
  Description of Artificial Sequence: Synthetic oligonucleotide
  Sense strand starting at position 2896 of SEQ ID NO: 1242351
aagaaugaaaugugguguu

SEQ ID NO: 1340889 - RNA, 19 nt, Artificial Sequence
  Description of Artificial Sequence: Synthetic oligonucleotide
  Antisense strand to SEQ ID NO: 1340888
aacaccacauuucauucuu

SEQ ID NO: 1340890 - RNA, 19 nt, Artificial Sequence
  Description of Artificial Sequence: Synthetic oligonucleotide
  Sense strand starting at position 2913 of SEQ ID NO: 1242351
uuagucuguuaaucucuau

SEQ ID NO: 1340891 - RNA, 19 nt, Artificial Sequence
  Description of Artificial Sequence: Synthetic oligonucleotide
  Antisense strand to SEQ ID NO: 1340890
auagagauuaacagacuaa

SEQ ID NO: 1340892 - RNA, 19 nt, Artificial Sequence
  Description of Artificial Sequence: Synthetic oligonucleotide
  Sense strand starting at position 2927 of SEQ ID NO: 1242351
ucuauuauucgagguaguu

SEQ ID NO: 1340893 - RNA, 19 nt, Artificial Sequence
  Description of Artificial Sequence: Synthetic oligonucleotide
  Antisense strand to SEQ ID NO: 1340892
aacuaccucgaauaauaga

SEQ ID NO: 1340894 - RNA, 19 nt, Artificial Sequence
  Description of Artificial Sequence: Synthetic oligonucleotide
  Sense strand starting at position 3231 of SEQ ID NO: 1242351
ugauaaaugcuagguguaa

SEQ ID NO: 1340895 - RNA, 19 nt, Artificial Sequence
  Description of Artificial Sequence: Synthetic oligonucleotide
  Antisense strand to SEQ ID NO: 1340894
uuacaccuagcauuuauca

SEQ ID NO: 1340896 - RNA, 19 nt, Artificial Sequence
  Description of Artificial Sequence: Synthetic oligonucleotide
  Sense strand starting at position 3232 of SEQ ID NO: 1242351
gauaaaugcuagguguaac

SEQ ID NO: 1340897 - RNA, 19 nt, Artificial Sequence
  Description of Artificial Sequence: Synthetic oligonucleotide
  Antisense strand to SEQ ID NO: 1340896
guuacaccuagcauuuauc

SEQ ID NO: 1340898 - RNA, 19 nt, Artificial Sequence
  Description of Artificial Sequence: Synthetic oligonucleotide
  Sense strand starting at position 3280 of SEQ ID NO: 1242351
agaaccgcuguguaaucua

SEQ ID NO: 1340899 - RNA, 19 nt, Artificial Sequence
  Description of Artificial Sequence: Synthetic oligonucleotide
  Antisense strand to SEQ ID NO: 1340898
uagauuacacagcgguucu

SEQ ID NO: 1340900 - RNA, 19 nt, Artificial Sequence
  Description of Artificial Sequence: Synthetic oligonucleotide
  Sense strand starting at position 3288 of SEQ ID NO: 1242351
uguguaaucuagcccauga

SEQ ID NO: 1340901 - RNA, 19 nt, Artificial Sequence
  Description of Artificial Sequence: Synthetic oligonucleotide
  Antisense strand to SEQ ID NO: 1340900
ucaugggcuagauuacaca

SEQ ID NO: 1340902 - RNA, 19 nt, Artificial Sequence
  Description of Artificial Sequence: Synthetic oligonucleotide
  Sense strand starting at position 3290 of SEQ ID NO: 1242351
uguaaucuagcccaugauu

SEQ ID NO: 1340903 - RNA, 19 nt, Artificial Sequence
  Description of Artificial Sequence: Synthetic oligonucleotide
  Antisense strand to SEQ ID NO: 1340902
aaucaugggcuagauuaca

SEQ ID NO: 1340904 - RNA, 19 nt, Artificial Sequence
  Description of Artificial Sequence: Synthetic oligonucleotide
  Sense strand starting at position 3422 of SEQ ID NO: 1242351
cuggcaugucuuggacauc

SEQ ID NO: 1340905 - RNA, 19 nt, Artificial Sequence
  Description of Artificial Sequence: Synthetic oligonucleotide
  Antisense strand to SEQ ID NO: 1340904
gauguccaagacaugccag

SEQ ID NO: 1340906 - RNA, 19 nt, Artificial Sequence
  Description of Artificial Sequence: Synthetic oligonucleotide
  Sense strand starting at position 3425 of SEQ ID NO: 1242351
gcaugucuuggacaucuuu

SEQ ID NO: 1340907 - RNA, 19 nt, Artificial Sequence
  Description of Artificial Sequence: Synthetic oligonucleotide
  Antisense strand to SEQ ID NO: 1340906
aaagauguccaagacaugc

SEQ ID NO: 1340908 - RNA, 19 nt, Artificial Sequence
  Description of Artificial Sequence: Synthetic oligonucleotide
  Sense strand starting at position 214 of SEQ ID NO: 1242352
gggcuuguuaaauaugaca

SEQ ID NO: 1340909 - RNA, 19 nt, Artificial Sequence
  Description of Artificial Sequence: Synthetic oligonucleotide
  Antisense strand to SEQ ID NO: 1340908
ugucauauuuaacaagccc

SEQ ID NO: 1340910 - RNA, 19 nt, Artificial Sequence
  Description of Artificial Sequence: Synthetic oligonucleotide
  Sense strand starting at position 270 of SEQ ID NO: 1242352
ggucacaacccuggaguua

SEQ ID NO: 1340911 - RNA, 19 nt, Artificial Sequence
  Description of Artificial Sequence: Synthetic oligonucleotide
  Antisense strand to SEQ ID NO: 1340910
uaacuccaggguugugacc

SEQ ID NO: 1340912 - RNA, 19 nt, Artificial Sequence
  Description of Artificial Sequence: Synthetic oligonucleotide
  Sense strand starting at position 316 of SEQ ID NO: 1242352
uuaaguaaccuguacaaug

SEQ ID NO: 1340913 - RNA, 19 nt, Artificial Sequence
  Description of Artificial Sequence: Synthetic oligonucleotide
  Antisense strand to SEQ ID NO: 1340912
cauuguacagguuacuuaa

SEQ ID NO: 1340914 - RNA, 19 nt, Artificial Sequence
  Description of Artificial Sequence: Synthetic oligonucleotide
  Sense strand starting at position 461 of SEQ ID NO: 1242352
gcaagaauuuacugaaaga

SEQ ID NO: 1340915 - RNA, 19 nt, Artificial Sequence
  Description of Artificial Sequence: Synthetic oligonucleotide
  Antisense strand to SEQ ID NO: 1340914
ucuuucaguaaauucuugc

SEQ ID NO: 1340916 - RNA, 19 nt, Artificial Sequence
  Description of Artificial Sequence: Synthetic oligonucleotide
  Sense strand starting at position 905 of SEQ ID NO: 1242352
gagucugauaaggaaacgu

SEQ ID NO: 1340917 - RNA, 19 nt, Artificial Sequence
  Description of Artificial Sequence: Synthetic oligonucleotide
  Antisense strand to SEQ ID NO: 1340916
acguuuccuuaucagacuc

SEQ ID NO: 1340918 - RNA, 19 nt, Artificial Sequence
  Description of Artificial Sequence: Synthetic oligonucleotide
  Sense strand starting at position 1452 of SEQ ID NO: 1242352
aggcaauuacaccgaaaga

SEQ ID NO: 1340919 - RNA, 19 nt, Artificial Sequence
  Description of Artificial Sequence: Synthetic oligonucleotide
  Antisense strand to SEQ ID NO: 1340918
ucuuucgguguaauugccu

SEQ ID NO: 1340920 - RNA, 19 nt, Artificial Sequence
  Description of Artificial Sequence: Synthetic oligonucleotide
  Sense strand starting at position 1463 of SEQ ID NO: 1242352
ccgaaagagguccgaguaa

SEQ ID NO: 1340921 - RNA, 19 nt, Artificial Sequence
  Description of Artificial Sequence: Synthetic oligonucleotide
  Antisense strand to SEQ ID NO: 1340920
uuacucggaccucuuucgg

SEQ ID NO: 1340922 - RNA, 19 nt, Artificial Sequence
  Description of Artificial Sequence: Synthetic oligonucleotide
  Sense strand starting at position 1476 of SEQ ID NO: 1242352
gaguaagugucccugagag

SEQ ID NO: 1340923 - RNA, 19 nt, Artificial Sequence
  Description of Artificial Sequence: Synthetic oligonucleotide
  Antisense strand to SEQ ID NO: 1340922
cucucagggacacuuacuc

SEQ ID NO: 1340924 - RNA, 19 nt, Artificial Sequence
  Description of Artificial Sequence: Synthetic oligonucleotide
  Sense strand starting at position 1478 of SEQ ID NO: 1242352
guaagugucccugagagag

SEQ ID NO: 1340925 - RNA, 19 nt, Artificial Sequence
  Description of Artificial Sequence: Synthetic oligonucleotide
  Antisense strand to SEQ ID NO: 1340924
cucucucagggacacuuac

SEQ ID NO: 1340926 - RNA, 19 nt, Artificial Sequence
  Description of Artificial Sequence: Synthetic oligonucleotide
  Sense strand starting at position 1700 of SEQ ID NO: 1242352
ccggaagugcucagucgaa

SEQ ID NO: 1340927 - RNA, 19 nt, Artificial Sequence
  Description of Artificial Sequence: Synthetic oligonucleotide
  Antisense strand to SEQ ID NO: 1340926
uucgacugagcacuuccgg

SEQ ID NO: 1340928 - RNA, 19 nt, Artificial Sequence
  Description of Artificial Sequence: Synthetic oligonucleotide
  Sense strand starting at position 2119 of SEQ ID NO: 1242352
guucuuacuguugagaaag

SEQ ID NO: 1340929 - RNA, 19 nt, Artificial Sequence
  Description of Artificial Sequence: Synthetic oligonucleotide
  Antisense strand to SEQ ID NO: 1340928
cuuucucaacaguaagaac

SEQ ID NO: 1340930 - RNA, 19 nt, Artificial Sequence
  Description of Artificial Sequence: Synthetic oligonucleotide
  Sense strand starting at position 2137 of SEQ ID NO: 1242352
guuucucagcgccugcaaa

SEQ ID NO: 1340931 - RNA, 19 nt, Artificial Sequence
  Description of Artificial Sequence: Synthetic oligonucleotide
  Antisense strand to SEQ ID NO: 1340930
uuugcaggcgcugagaaac

SEQ ID NO: 1340932 - RNA, 19 nt, Artificial Sequence
  Description of Artificial Sequence: Synthetic oligonucleotide
  Sense strand starting at position 2185 of SEQ ID NO: 1242352
aggaccugagaacguuaaa

SEQ ID NO: 1340933 - RNA, 19 nt, Artificial Sequence
  Description of Artificial Sequence: Synthetic oligonucleotide
  Antisense strand to SEQ ID NO: 1340932
uuuaacguucucagguccu

SEQ ID NO: 1340934 - RNA, 19 nt, Artificial Sequence
  Description of Artificial Sequence: Synthetic oligonucleotide
  Sense strand starting at position 2398 of SEQ ID NO: 1242352
gcaggaccuugguugagau

SEQ ID NO: 1340935 - RNA, 19 nt, Artificial Sequence
  Description of Artificial Sequence: Synthetic oligonucleotide
  Antisense strand to SEQ ID NO: 1340934
aucucaaccaagguccugc

SEQ ID NO: 1340936 - RNA, 19 nt, Artificial Sequence
  Description of Artificial Sequence: Synthetic oligonucleotide
  Sense strand starting at position 2399 of SEQ ID NO: 1242352
caggaccuugguugagaua

SEQ ID NO: 1340937 - RNA, 19 nt, Artificial Sequence
  Description of Artificial Sequence: Synthetic oligonucleotide
  Antisense strand to SEQ ID NO: 1340936
uaucucaaccaagguccug

SEQ ID NO: 1340938 - RNA, 19 nt, Artificial Sequence
  Description of Artificial Sequence: Synthetic oligonucleotide
  Sense strand starting at position 2408 of SEQ ID NO: 1242352
gguugagauagguagaugu

SEQ ID NO: 1340939 - RNA, 19 nt, Artificial Sequence
  Description of Artificial Sequence: Synthetic oligonucleotide
  Antisense strand to SEQ ID NO: 1340938
acaucuaccuaucucaacc

SEQ ID NO: 1340940 - RNA, 19 nt, Artificial Sequence
  Description of Artificial Sequence: Synthetic oligonucleotide
  Sense strand starting at position 2465 of SEQ ID NO: 1242352
agccguagagcgcuuacua

SEQ ID NO: 1340941 - RNA, 19 nt, Artificial Sequence
  Description of Artificial Sequence: Synthetic oligonucleotide
  Antisense strand to SEQ ID NO: 1340940
uaguaagcgcucuacggcu

SEQ ID NO: 1340942 - RNA, 19 nt, Artificial Sequence
  Description of Artificial Sequence: Synthetic oligonucleotide
  Sense strand starting at position 2466 of SEQ ID NO: 1242352
gccguagagcgcuuacuau

SEQ ID NO: 1340943 - RNA, 19 nt, Artificial Sequence
  Description of Artificial Sequence: Synthetic oligonucleotide
  Antisense strand to SEQ ID NO: 1340942
auaguaagcgcucuacggc

SEQ ID NO: 1340944 - RNA, 19 nt, Artificial Sequence
  Description of Artificial Sequence: Synthetic oligonucleotide
  Sense strand starting at position 2535 of SEQ ID NO: 1242352
ccaggaguuggauguuauc

SEQ ID NO: 1340945 - RNA, 19 nt, Artificial Sequence
  Description of Artificial Sequence: Synthetic oligonucleotide
  Antisense strand to SEQ ID NO: 1340944
gauaacauccaacuccugg

SEQ ID NO: 1340946 - RNA, 19 nt, Artificial Sequence
  Description of Artificial Sequence: Synthetic oligonucleotide
  Sense strand starting at position 2544 of SEQ ID NO: 1242352
ggauguuaucuccaucuug

SEQ ID NO: 1340947 - RNA, 19 nt, Artificial Sequence
  Description of Artificial Sequence: Synthetic oligonucleotide
  Antisense strand to SEQ ID NO: 1340946
caagauggagauaacaucc

SEQ ID NO: 1340948 - RNA, 19 nt, Artificial Sequence
  Description of Artificial Sequence: Synthetic oligonucleotide
  Sense strand starting at position 2578 of SEQ ID NO: 1242352
agucuuagagcugguaaac

SEQ ID NO: 1340949 - RNA, 19 nt, Artificial Sequence
  Description of Artificial Sequence: Synthetic oligonucleotide
  Antisense strand to SEQ ID NO: 1340948
guuuaccagcucuaagacu

SEQ ID NO: 1340950 - RNA, 19 nt, Artificial Sequence
  Description of Artificial Sequence: Synthetic oligonucleotide
  Sense strand starting at position 2590 of SEQ ID NO: 1242352
gguaaacuagcccaagauu

SEQ ID NO: 1340951 - RNA, 19 nt, Artificial Sequence
  Description of Artificial Sequence: Synthetic oligonucleotide
  Antisense strand to SEQ ID NO: 1340950
aaucuugggcuaguuuacc

SEQ ID NO: 1340952 - RNA, 19 nt, Artificial Sequence
  Description of Artificial Sequence: Synthetic oligonucleotide
  Sense strand starting at position 2738 of SEQ ID NO: 1242352
cugguaacuaaccgaagau

SEQ ID NO: 1340953 - RNA, 19 nt, Artificial Sequence
  Description of Artificial Sequence: Synthetic oligonucleotide
  Antisense strand to SEQ ID NO: 1340952
aucuucgguuaguuaccag

SEQ ID NO: 1340954 - RNA, 19 nt, Artificial Sequence
  Description of Artificial Sequence: Synthetic oligonucleotide
  Sense strand starting at position 2830 of SEQ ID NO: 1242352
gagggauuauggguaagcu

SEQ ID NO: 1340955 - RNA, 19 nt, Artificial Sequence
  Description of Artificial Sequence: Synthetic oligonucleotide
  Antisense strand to SEQ ID NO: 1340954
agcuuacccauaaucccuc

SEQ ID NO: 1340956 - RNA, 19 nt, Artificial Sequence
  Description of Artificial Sequence: Synthetic oligonucleotide
  Sense strand starting at position 2856 of SEQ ID NO: 1242352
acccguuauuuguuaucua

SEQ ID NO: 1340957 - RNA, 19 nt, Artificial Sequence
  Description of Artificial Sequence: Synthetic oligonucleotide
  Antisense strand to SEQ ID NO: 1340956
uagauaacaaauaacgggu

SEQ ID NO: 1340958 - RNA, 19 nt, Artificial Sequence
  Description of Artificial Sequence: Synthetic oligonucleotide
  Sense strand starting at position 2859 of SEQ ID NO: 1242352
cguuauuuguuaucuaaac

SEQ ID NO: 1340959 - RNA, 19 nt, Artificial Sequence
  Description of Artificial Sequence: Synthetic oligonucleotide
  Antisense strand to SEQ ID NO: 1340958
guuuagauaacaaauaacg

SEQ ID NO: 1340960 - RNA, 19 nt, Artificial Sequence
  Description of Artificial Sequence: Synthetic oligonucleotide
  Sense strand starting at position 2914 of SEQ ID NO: 1242352
ugcauuccucguggaauuu

SEQ ID NO: 1340961 - RNA, 19 nt, Artificial Sequence
  Description of Artificial Sequence: Synthetic oligonucleotide
  Antisense strand to SEQ ID NO: 1340960
aaauuccacgaggaaugca

SEQ ID NO: 1340962 - RNA, 19 nt, Artificial Sequence
  Description of Artificial Sequence: Synthetic oligonucleotide
  Sense strand starting at position 2923 of SEQ ID NO: 1242352
cguggaauuugcuuaguuu

SEQ ID NO: 1340963 - RNA, 19 nt, Artificial Sequence
  Description of Artificial Sequence: Synthetic oligonucleotide
  Antisense strand to SEQ ID NO: 1340962
aaacuaagcaaauuccacg

SEQ ID NO: 1340964 - RNA, 19 nt, Artificial Sequence
  Description of Artificial Sequence: Synthetic oligonucleotide
  Sense strand starting at position 2934 of SEQ ID NO: 1242352
cuuaguuuaccggaaaguu

SEQ ID NO: 1340965 - RNA, 19 nt, Artificial Sequence
  Description of Artificial Sequence: Synthetic oligonucleotide
  Antisense strand to SEQ ID NO: 1340964
aacuuuccgguaaacuaag

SEQ ID NO: 1340966 - RNA, 19 nt, Artificial Sequence
  Description of Artificial Sequence: Synthetic oligonucleotide
  Sense strand starting at position 2942 of SEQ ID NO: 1242352
accggaaaguuaguucuau

SEQ ID NO: 1340967 - RNA, 19 nt, Artificial Sequence
  Description of Artificial Sequence: Synthetic oligonucleotide
  Antisense strand to SEQ ID NO: 1340966
auagaacuaacuuuccggu

SEQ ID NO: 1340968 - RNA, 19 nt, Artificial Sequence
  Description of Artificial Sequence: Synthetic oligonucleotide
  Sense strand starting at position 2943 of SEQ ID NO: 1242352
ccggaaaguuaguucuaug

SEQ ID NO: 1340969 - RNA, 19 nt, Artificial Sequence
  Description of Artificial Sequence: Synthetic oligonucleotide
  Antisense strand to SEQ ID NO: 1340968
cauagaacuaacuuuccgg

SEQ ID NO: 1340970 - RNA, 19 nt, Artificial Sequence
  Description of Artificial Sequence: Synthetic oligonucleotide
  Sense strand starting at position 3039 of SEQ ID NO: 1242352
aagaaacauuucuguugga

SEQ ID NO: 1340971 - RNA, 19 nt, Artificial Sequence
  Description of Artificial Sequence: Synthetic oligonucleotide
  Antisense strand to SEQ ID NO: 1340970
uccaacagaaauguuucuu

SEQ ID NO: 1340972 - RNA, 19 nt, Artificial Sequence
  Description of Artificial Sequence: Synthetic oligonucleotide
  Sense strand starting at position 3044 of SEQ ID NO: 1242352
acauuucuguuggaaucca

SEQ ID NO: 1340973 - RNA, 19 nt, Artificial Sequence
  Description of Artificial Sequence: Synthetic oligonucleotide
  Antisense strand to SEQ ID NO: 1340972
uggauuccaacagaaaugu

SEQ ID NO: 1340974 - RNA, 19 nt, Artificial Sequence
  Description of Artificial Sequence: Synthetic oligonucleotide
  Sense strand starting at position 3052 of SEQ ID NO: 1242352
guuggaauccaccgaucua

SEQ ID NO: 1340975 - RNA, 19 nt, Artificial Sequence
  Description of Artificial Sequence: Synthetic oligonucleotide
  Antisense strand to SEQ ID NO: 1340974
uagaucgguggauuccaac

SEQ ID NO: 1340976 - RNA, 19 nt, Artificial Sequence
  Description of Artificial Sequence: Synthetic oligonucleotide
  Sense strand starting at position 3218 of SEQ ID NO: 1242352
uuggucaagaaagguuaaa

SEQ ID NO: 1340977 - RNA, 19 nt, Artificial Sequence
  Description of Artificial Sequence: Synthetic oligonucleotide
  Antisense strand to SEQ ID NO: 1340976
uuuaaccuuucuugaccaa

SEQ ID NO: 1340978 - RNA, 19 nt, Artificial Sequence
  Description of Artificial Sequence: Synthetic oligonucleotide
  Sense strand starting at position 3288 of SEQ ID NO: 1242352
acuguuuguccagcagugu

SEQ ID NO: 1340979 - RNA, 19 nt, Artificial Sequence
  Description of Artificial Sequence: Synthetic oligonucleotide
  Antisense strand to SEQ ID NO: 1340978
acacugcuggacaaacagu

SEQ ID NO: 1340980 - RNA, 19 nt, Artificial Sequence
  Description of Artificial Sequence: Synthetic oligonucleotide
  Sense strand starting at position 3618 of SEQ ID NO: 1242352
aacugaucugguugacaag

SEQ ID NO: 1340981 - RNA, 19 nt, Artificial Sequence
  Description of Artificial Sequence: Synthetic oligonucleotide
  Antisense strand to SEQ ID NO: 1340980
cuugucaaccagaucaguu

SEQ ID NO: 1340982 - RNA, 19 nt, Artificial Sequence
  Description of Artificial Sequence: Synthetic oligonucleotide
  Sense strand starting at position 3619 of SEQ ID NO: 1242352
acugaucugguugacaagu

SEQ ID NO: 1340983 - RNA, 19 nt, Artificial Sequence
  Description of Artificial Sequence: Synthetic oligonucleotide
  Antisense strand to SEQ ID NO: 1340982
acuugucaaccagaucagu

SEQ ID NO: 1340984 - RNA, 19 nt, Artificial Sequence
  Description of Artificial Sequence: Synthetic oligonucleotide
  Sense strand starting at position 3642 of SEQ ID NO: 1242352
cuuuguggucauugaggaa

SEQ ID NO: 1340985 - RNA, 19 nt, Artificial Sequence
  Description of Artificial Sequence: Synthetic oligonucleotide
  Antisense strand to SEQ ID NO: 1340984
uuccucaaugaccacaaag

SEQ ID NO: 1340986 - RNA, 19 nt, Artificial Sequence
  Description of Artificial Sequence: Synthetic oligonucleotide
  Sense strand starting at position 3786 of SEQ ID NO: 1242352
uguguugaugaaggacuua

SEQ ID NO: 1340987 - RNA, 19 nt, Artificial Sequence
  Description of Artificial Sequence: Synthetic oligonucleotide
  Antisense strand to SEQ ID NO: 1340986
uaaguccuucaucaacaca

SEQ ID NO: 1340988 - RNA, 19 nt, Artificial Sequence
  Description of Artificial Sequence: Synthetic oligonucleotide
  Sense strand starting at position 5 of SEQ ID NO: 1242353
cagagaugcuccucugaag

SEQ ID NO: 1340989 - RNA, 19 nt, Artificial Sequence
  Description of Artificial Sequence: Synthetic oligonucleotide
  Antisense strand to SEQ ID NO: 1340988
cuucagaggagcaucucug

SEQ ID NO: 1340990 - RNA, 19 nt, Artificial Sequence
  Description of Artificial Sequence: Synthetic oligonucleotide
  Sense strand starting at position 185 of SEQ ID NO: 1242353
ucaggugcucuucgugaau

SEQ ID NO: 1340991 - RNA, 19 nt, Artificial Sequence
  Description of Artificial Sequence: Synthetic oligonucleotide
  Antisense strand to SEQ ID NO: 1340990
auucacgaagagcaccuga

SEQ ID NO: 1340992 - RNA, 19 nt, Artificial Sequence
  Description of Artificial Sequence: Synthetic oligonucleotide
  Sense strand starting at position 188 of SEQ ID NO: 1242353
ggugcucuucgugaaugcu

SEQ ID NO: 1340993 - RNA, 19 nt, Artificial Sequence
  Description of Artificial Sequence: Synthetic oligonucleotide
  Antisense strand to SEQ ID NO: 1340992
agcauucacgaagagcacc

SEQ ID NO: 1340994 - RNA, 19 nt, Artificial Sequence
  Description of Artificial Sequence: Synthetic oligonucleotide
  Sense strand starting at position 290 of SEQ ID NO: 1242353
aggugaaguuccgugucuu

SEQ ID NO: 1340995 - RNA, 19 nt, Artificial Sequence
  Description of Artificial Sequence: Synthetic oligonucleotide
  Antisense strand to SEQ ID NO: 1340994
aagacacggaacuucaccu

SEQ ID NO: 1340996 - RNA, 19 nt, Artificial Sequence
  Description of Artificial Sequence: Synthetic oligonucleotide
  Sense strand starting at position 291 of SEQ ID NO: 1242353
ggugaaguuccgugucuuc

SEQ ID NO: 1340997 - RNA, 19 nt, Artificial Sequence
  Description of Artificial Sequence: Synthetic oligonucleotide
  Antisense strand to SEQ ID NO: 1340996
gaagacacggaacuucacc

SEQ ID NO: 1340998 - RNA, 19 nt, Artificial Sequence
  Description of Artificial Sequence: Synthetic oligonucleotide
  Sense strand starting at position 319 of SEQ ID NO: 1242353
gggcauaagcagcaauuau

SEQ ID NO: 1340999 - RNA, 19 nt, Artificial Sequence
  Description of Artificial Sequence: Synthetic oligonucleotide
  Antisense strand to SEQ ID NO: 1340998
auaauugcugcuuaugccc

SEQ ID NO: 1341000 - RNA, 19 nt, Artificial Sequence
  Description of Artificial Sequence: Synthetic oligonucleotide
  Sense strand starting at position 328 of SEQ ID NO: 1242353
cagcaauuaucgcacgaag

SEQ ID NO: 1341001 - RNA, 19 nt, Artificial Sequence
  Description of Artificial Sequence: Synthetic oligonucleotide
  Antisense strand to SEQ ID NO: 1341000
cuucgugcgauaauugcug

SEQ ID NO: 1341002 - RNA, 19 nt, Artificial Sequence
  Description of Artificial Sequence: Synthetic oligonucleotide
  Sense strand starting at position 330 of SEQ ID NO: 1242353
gcaauuaucgcacgaaguu

SEQ ID NO: 1341003 - RNA, 19 nt, Artificial Sequence
  Description of Artificial Sequence: Synthetic oligonucleotide
  Antisense strand to SEQ ID NO: 1341002
aacuucgugcgauaauugc

SEQ ID NO: 1341004 - RNA, 19 nt, Artificial Sequence
  Description of Artificial Sequence: Synthetic oligonucleotide
  Sense strand starting at position 331 of SEQ ID NO: 1242353
caauuaucgcacgaaguuu

SEQ ID NO: 1341005 - RNA, 19 nt, Artificial Sequence
  Description of Artificial Sequence: Synthetic oligonucleotide
  Antisense strand to SEQ ID NO: 1341004
aaacuucgugcgauaauug

SEQ ID NO: 1341006 - RNA, 19 nt, Artificial Sequence
  Description of Artificial Sequence: Synthetic oligonucleotide
  Sense strand starting at position 431 of SEQ ID NO: 1242353
ggagcuguguccagguugu

SEQ ID NO: 1341007 - RNA, 19 nt, Artificial Sequence
  Description of Artificial Sequence: Synthetic oligonucleotide
  Antisense strand to SEQ ID NO: 1341006
acaaccuggacacagcucc

SEQ ID NO: 1341008 - RNA, 19 nt, Artificial Sequence
  Description of Artificial Sequence: Synthetic oligonucleotide
  Sense strand starting at position 468 of SEQ ID NO: 1242353
gagugaaaggcuggaggua

SEQ ID NO: 1341009 - RNA, 19 nt, Artificial Sequence
  Description of Artificial Sequence: Synthetic oligonucleotide
  Antisense strand to SEQ ID NO: 1341008
uaccuccagccuuucacuc

SEQ ID NO: 1341010 - RNA, 19 nt, Artificial Sequence
  Description of Artificial Sequence: Synthetic oligonucleotide
  Sense strand starting at position 510 of SEQ ID NO: 1242353
ggaagauccugccggacua

SEQ ID NO: 1341011 - RNA, 19 nt, Artificial Sequence
  Description of Artificial Sequence: Synthetic oligonucleotide
  Antisense strand to SEQ ID NO: 1341010
uaguccggcaggaucuucc

SEQ ID NO: 1341012 - RNA, 19 nt, Artificial Sequence
  Description of Artificial Sequence: Synthetic oligonucleotide
  Sense strand starting at position 544 of SEQ ID NO: 1242353
ggaguuucaggccgucuga

SEQ ID NO: 1341013 - RNA, 19 nt, Artificial Sequence
  Description of Artificial Sequence: Synthetic oligonucleotide
  Antisense strand to SEQ ID NO: 1341012
ucagacggccugaaacucc

SEQ ID NO: 1341014 - RNA, 19 nt, Artificial Sequence
  Description of Artificial Sequence: Synthetic oligonucleotide
  Sense strand starting at position 557 of SEQ ID NO: 1242353
gucugauccucguccgcaa

SEQ ID NO: 1341015 - RNA, 19 nt, Artificial Sequence
  Description of Artificial Sequence: Synthetic oligonucleotide
  Antisense strand to SEQ ID NO: 1341014
uugcggacgaggaucagac

SEQ ID NO: 1341016 - RNA, 19 nt, Artificial Sequence
  Description of Artificial Sequence: Synthetic oligonucleotide
  Sense strand starting at position 749 of SEQ ID NO: 1242353
ccgggcacguucuuaagua

SEQ ID NO: 1341017 - RNA, 19 nt, Artificial Sequence
  Description of Artificial Sequence: Synthetic oligonucleotide
  Antisense strand to SEQ ID NO: 1341016
uacuuaagaacgugcccgg

SEQ ID NO: 1341018 - RNA, 19 nt, Artificial Sequence
  Description of Artificial Sequence: Synthetic oligonucleotide
  Sense strand starting at position 757 of SEQ ID NO: 1242353
guucuuaaguacgcugaga

SEQ ID NO: 1341019 - RNA, 19 nt, Artificial Sequence
  Description of Artificial Sequence: Synthetic oligonucleotide
  Antisense strand to SEQ ID NO: 1341018
ucucagcguacuuaagaac

SEQ ID NO: 1341020 - RNA, 19 nt, Artificial Sequence
  Description of Artificial Sequence: Synthetic oligonucleotide
  Sense strand starting at position 759 of SEQ ID NO: 1242353
ucuuaaguacgcugagacu

SEQ ID NO: 1341021 - RNA, 19 nt, Artificial Sequence
  Description of Artificial Sequence: Synthetic oligonucleotide
  Antisense strand to SEQ ID NO: 1341020
agucucagcguacuuaaga

SEQ ID NO: 1341022 - RNA, 19 nt, Artificial Sequence
  Description of Artificial Sequence: Synthetic oligonucleotide
  Sense strand starting at position 1458 of SEQ ID NO: 1242353
gagucuggguccucagcua

SEQ ID NO: 1341023 - RNA, 19 nt, Artificial Sequence
  Description of Artificial Sequence: Synthetic oligonucleotide
  Antisense strand to SEQ ID NO: 1341022
uagcugaggacccagacuc

SEQ ID NO: 1341024 - RNA, 19 nt, Artificial Sequence
  Description of Artificial Sequence: Synthetic oligonucleotide
  Sense strand starting at position 1542 of SEQ ID NO: 1242353
cgccaucagcgcucugaga

SEQ ID NO: 1341025 - RNA, 19 nt, Artificial Sequence
  Description of Artificial Sequence: Synthetic oligonucleotide
  Antisense strand to SEQ ID NO: 1341024
ucucagagcgcugauggcg

SEQ ID NO: 1341026 - RNA, 19 nt, Artificial Sequence
  Description of Artificial Sequence: Synthetic oligonucleotide
  Sense strand starting at position 1765 of SEQ ID NO: 1242353
guauucuugccucaaggac

SEQ ID NO: 1341027 - RNA, 19 nt, Artificial Sequence
  Description of Artificial Sequence: Synthetic oligonucleotide
  Antisense strand to SEQ ID NO: 1341026
guccuugaggcaagaauac

SEQ ID NO: 1341028 - RNA, 19 nt, Artificial Sequence
  Description of Artificial Sequence: Synthetic oligonucleotide
  Sense strand starting at position 2138 of SEQ ID NO: 1242353
gcggaauucgcucaggcaa

SEQ ID NO: 1341029 - RNA, 19 nt, Artificial Sequence
  Description of Artificial Sequence: Synthetic oligonucleotide
  Antisense strand to SEQ ID NO: 1341028
uugccugagcgaauuccgc

SEQ ID NO: 1341030 - RNA, 19 nt, Artificial Sequence
  Description of Artificial Sequence: Synthetic oligonucleotide
  Sense strand starting at position 2140 of SEQ ID NO: 1242353
ggaauucgcucaggcaaca

SEQ ID NO: 1341031 - RNA, 19 nt, Artificial Sequence
  Description of Artificial Sequence: Synthetic oligonucleotide
  Antisense strand to SEQ ID NO: 1341030
uguugccugagcgaauucc

SEQ ID NO: 1341032 - RNA, 19 nt, Artificial Sequence
  Description of Artificial Sequence: Synthetic oligonucleotide
  Sense strand starting at position 2501 of SEQ ID NO: 1242353
gagcaaagcucugucucga

SEQ ID NO: 1341033 - RNA, 19 nt, Artificial Sequence
  Description of Artificial Sequence: Synthetic oligonucleotide
  Antisense strand to SEQ ID NO: 1341032
ucgagacagagcuuugcuc

SEQ ID NO: 1341034 - RNA, 19 nt, Artificial Sequence
  Description of Artificial Sequence: Synthetic oligonucleotide
  Sense strand starting at position 2573 of SEQ ID NO: 1242353
cccauucuccaggauguga

SEQ ID NO: 1341035 - RNA, 19 nt, Artificial Sequence
  Description of Artificial Sequence: Synthetic oligonucleotide
  Antisense strand to SEQ ID NO: 1341034
ucacauccuggagaauggg

SEQ ID NO: 1341036 - RNA, 19 nt, Artificial Sequence
  Description of Artificial Sequence: Synthetic oligonucleotide
  Sense strand starting at position 2575 of SEQ ID NO: 1242353
cauucuccaggaugugauu

SEQ ID NO: 1341037 - RNA, 19 nt, Artificial Sequence
  Description of Artificial Sequence: Synthetic oligonucleotide
  Antisense strand to SEQ ID NO: 1341036
aaucacauccuggagaaug

SEQ ID NO: 1341038 - RNA, 19 nt, Artificial Sequence
  Description of Artificial Sequence: Synthetic oligonucleotide
  Sense strand starting at position 2578 of SEQ ID NO: 1242353
ucuccaggaugugauuauu

SEQ ID NO: 1341039 - RNA, 19 nt, Artificial Sequence
  Description of Artificial Sequence: Synthetic oligonucleotide
  Antisense strand to SEQ ID NO: 1341038
aauaaucacauccuggaga

SEQ ID NO: 1341040 - RNA, 19 nt, Artificial Sequence
  Description of Artificial Sequence: Synthetic oligonucleotide
  Sense strand starting at position 2847 of SEQ ID NO: 1242353
ggcugucaggacuacugau

SEQ ID NO: 1341041 - RNA, 19 nt, Artificial Sequence
  Description of Artificial Sequence: Synthetic oligonucleotide
  Antisense strand to SEQ ID NO: 1341040
aucaguaguccugacagcc

SEQ ID NO: 1341042 - RNA, 19 nt, Artificial Sequence
  Description of Artificial Sequence: Synthetic oligonucleotide
  Sense strand starting at position 2948 of SEQ ID NO: 1242353
cgcagucaggacugagaga

SEQ ID NO: 1341043 - RNA, 19 nt, Artificial Sequence
  Description of Artificial Sequence: Synthetic oligonucleotide
  Antisense strand to SEQ ID NO: 1341042
ucucucaguccugacugcg

SEQ ID NO: 1341044 - RNA, 19 nt, Artificial Sequence
  Description of Artificial Sequence: Synthetic oligonucleotide
  Sense strand starting at position 3192 of SEQ ID NO: 1242353
aggguuuacuuccuuguca

SEQ ID NO: 1341045 - RNA, 19 nt, Artificial Sequence
  Description of Artificial Sequence: Synthetic oligonucleotide
  Antisense strand to SEQ ID NO: 1341044
ugacaaggaaguaaacccu

SEQ ID NO: 1341046 - RNA, 19 nt, Artificial Sequence
  Description of Artificial Sequence: Synthetic oligonucleotide
  Sense strand starting at position 3194 of SEQ ID NO: 1242353
gguuuacuuccuugucacu

SEQ ID NO: 1341047 - RNA, 19 nt, Artificial Sequence
  Description of Artificial Sequence: Synthetic oligonucleotide
  Antisense strand to SEQ ID NO: 1341046
agugacaaggaaguaaacc

SEQ ID NO: 1341048 - RNA, 19 nt, Artificial Sequence
  Description of Artificial Sequence: Synthetic oligonucleotide
  Sense strand starting at position 3507 of SEQ ID NO: 1242353
aaggucaggcccugagaaa

SEQ ID NO: 1341049 - RNA, 19 nt, Artificial Sequence
  Description of Artificial Sequence: Synthetic oligonucleotide
  Antisense strand to SEQ ID NO: 1341048
uuucucagggccugaccuu

SEQ ID NO: 1341050 - RNA, 19 nt, Artificial Sequence
  Description of Artificial Sequence: Synthetic oligonucleotide
  Sense strand starting at position 3531 of SEQ ID NO: 1242353
cccgaaaggcuggaaguua

SEQ ID NO: 1341051 - RNA, 19 nt, Artificial Sequence
  Description of Artificial Sequence: Synthetic oligonucleotide
  Antisense strand to SEQ ID NO: 1341050
uaacuuccagccuuucggg

SEQ ID NO: 1341052 - RNA, 19 nt, Artificial Sequence
  Description of Artificial Sequence: Synthetic oligonucleotide
  Sense strand starting at position 3539 of SEQ ID NO: 1242353
gcuggaaguuacguuggaa

SEQ ID NO: 1341053 - RNA, 19 nt, Artificial Sequence
  Description of Artificial Sequence: Synthetic oligonucleotide
  Antisense strand to SEQ ID NO: 1341052
uuccaacguaacuuccagc

SEQ ID NO: 1341054 - RNA, 19 nt, Artificial Sequence
  Description of Artificial Sequence: Synthetic oligonucleotide
  Sense strand starting at position 3645 of SEQ ID NO: 1242353
uucugucauuuggagaaag

SEQ ID NO: 1341055 - RNA, 19 nt, Artificial Sequence
  Description of Artificial Sequence: Synthetic oligonucleotide
  Antisense strand to SEQ ID NO: 1341054
cuuucuccaaaugacagaa

SEQ ID NO: 1341056 - RNA, 19 nt, Artificial Sequence
  Description of Artificial Sequence: Synthetic oligonucleotide
  Sense strand starting at position 3758 of SEQ ID NO: 1242353
uaaacugcugucggaugua

SEQ ID NO: 1341057 - RNA, 19 nt, Artificial Sequence
  Description of Artificial Sequence: Synthetic oligonucleotide
  Antisense strand to SEQ ID NO: 1341056
uacauccgacagcaguuua

SEQ ID NO: 1341058 - RNA, 19 nt, Artificial Sequence
  Description of Artificial Sequence: Synthetic oligonucleotide
  Sense strand starting at position 3761 of SEQ ID NO: 1242353
acugcugucggauguagaa

SEQ ID NO: 1341059 - RNA, 19 nt, Artificial Sequence
  Description of Artificial Sequence: Synthetic oligonucleotide
  Antisense strand to SEQ ID NO: 1341058
uucuacauccgacagcagu

SEQ ID NO: 1341060 - RNA, 19 nt, Artificial Sequence
  Description of Artificial Sequence: Synthetic oligonucleotide
  Sense strand starting at position 3763 of SEQ ID NO: 1242353
ugcugucggauguagaaga

SEQ ID NO: 1341061 - RNA, 19 nt, Artificial Sequence
  Description of Artificial Sequence: Synthetic oligonucleotide
  Antisense strand to SEQ ID NO: 1341060
ucuucuacauccgacagca

SEQ ID NO: 1341062 - RNA, 19 nt, Artificial Sequence
  Description of Artificial Sequence: Synthetic oligonucleotide
  Sense strand starting at position 3893 of SEQ ID NO: 1242353
aaauguacaucgugauuag

SEQ ID NO: 1341063 - RNA, 19 nt, Artificial Sequence
  Description of Artificial Sequence: Synthetic oligonucleotide
  Antisense strand to SEQ ID NO: 1341062
cuaaucacgauguacauuu

SEQ ID NO: 1341064 - RNA, 19 nt, Artificial Sequence
  Description of Artificial Sequence: Synthetic oligonucleotide
  Sense strand starting at position 40 of SEQ ID NO: 1242354
acuugaagucuguguuuac

SEQ ID NO: 1341065 - RNA, 19 nt, Artificial Sequence
  Description of Artificial Sequence: Synthetic oligonucleotide
  Antisense strand to SEQ ID NO: 1341064
guaaacacagacuucaagu

SEQ ID NO: 1341066 - RNA, 19 nt, Artificial Sequence
  Description of Artificial Sequence: Synthetic oligonucleotide
  Sense strand starting at position 41 of SEQ ID NO: 1242354
cuugaagucuguguuuaca

SEQ ID NO: 1341067 - RNA, 19 nt, Artificial Sequence
  Description of Artificial Sequence: Synthetic oligonucleotide
  Antisense strand to SEQ ID NO: 1341066
uguaaacacagacuucaag

SEQ ID NO: 1341068 - RNA, 19 nt, Artificial Sequence
  Description of Artificial Sequence: Synthetic oligonucleotide
  Sense strand starting at position 44 of SEQ ID NO: 1242354
gaagucuguguuuacacca

SEQ ID NO: 1341069 - RNA, 19 nt, Artificial Sequence
  Description of Artificial Sequence: Synthetic oligonucleotide
  Antisense strand to SEQ ID NO: 1341068
ugguguaaacacagacuuc

SEQ ID NO: 1341070 - RNA, 19 nt, Artificial Sequence
  Description of Artificial Sequence: Synthetic oligonucleotide
  Sense strand starting at position 49 of SEQ ID NO: 1242354
cuguguuuacaccaaagaa

SEQ ID NO: 1341071 - RNA, 19 nt, Artificial Sequence
  Description of Artificial Sequence: Synthetic oligonucleotide
  Antisense strand to SEQ ID NO: 1341070
uucuuugguguaaacacag

SEQ ID NO: 1341072 - RNA, 19 nt, Artificial Sequence
  Description of Artificial Sequence: Synthetic oligonucleotide
  Sense strand starting at position 146 of SEQ ID NO: 1242354
agacuuaacugguuccaga

SEQ ID NO: 1341073 - RNA, 19 nt, Artificial Sequence
  Description of Artificial Sequence: Synthetic oligonucleotide
  Antisense strand to SEQ ID NO: 1341072
ucuggaaccaguuaagucu

SEQ ID NO: 1341074 - RNA, 19 nt, Artificial Sequence
  Description of Artificial Sequence: Synthetic oligonucleotide
  Sense strand starting at position 149 of SEQ ID NO: 1242354
cuuaacugguuccagaaga

SEQ ID NO: 1341075 - RNA, 19 nt, Artificial Sequence
  Description of Artificial Sequence: Synthetic oligonucleotide
  Antisense strand to SEQ ID NO: 1341074
ucuucuggaaccaguuaag

SEQ ID NO: 1341076 - RNA, 19 nt, Artificial Sequence
  Description of Artificial Sequence: Synthetic oligonucleotide
  Sense strand starting at position 221 of SEQ ID NO: 1242354
uauggaauguauggauuaa

SEQ ID NO: 1341077 - RNA, 19 nt, Artificial Sequence
  Description of Artificial Sequence: Synthetic oligonucleotide
  Antisense strand to SEQ ID NO: 1341076
uuaauccauacauuccaua

SEQ ID NO: 1341078 - RNA, 19 nt, Artificial Sequence
  Description of Artificial Sequence: Synthetic oligonucleotide
  Sense strand starting at position 234 of SEQ ID NO: 1242354
gauuaaaggucucagauuc

SEQ ID NO: 1341079 - RNA, 19 nt, Artificial Sequence
  Description of Artificial Sequence: Synthetic oligonucleotide
  Antisense strand to SEQ ID NO: 1341078
gaaucugagaccuuuaauc

SEQ ID NO: 1341080 - RNA, 19 nt, Artificial Sequence
  Description of Artificial Sequence: Synthetic oligonucleotide
  Sense strand starting at position 286 of SEQ ID NO: 1242354
gcuuuaucauuugaggauu

SEQ ID NO: 1341081 - RNA, 19 nt, Artificial Sequence
  Description of Artificial Sequence: Synthetic oligonucleotide
  Antisense strand to SEQ ID NO: 1341080
aauccucaaaugauaaagc

SEQ ID NO: 1341082 - RNA, 19 nt, Artificial Sequence
  Description of Artificial Sequence: Synthetic oligonucleotide
  Sense strand starting at position 324 of SEQ ID NO: 1242354
cagaaaguuuaccucagga

SEQ ID NO: 1341083 - RNA, 19 nt, Artificial Sequence
  Description of Artificial Sequence: Synthetic oligonucleotide
  Antisense strand to SEQ ID NO: 1341082
uccugagguaaacuuucug

SEQ ID NO: 1341084 - RNA, 19 nt, Artificial Sequence
  Description of Artificial Sequence: Synthetic oligonucleotide
  Sense strand starting at position 422 of SEQ ID NO: 1242354
ucaucagaugcgugacaua

SEQ ID NO: 1341085 - RNA, 19 nt, Artificial Sequence
  Description of Artificial Sequence: Synthetic oligonucleotide
  Antisense strand to SEQ ID NO: 1341084
uaugucacgcaucugauga

SEQ ID NO: 1341086 - RNA, 19 nt, Artificial Sequence
  Description of Artificial Sequence: Synthetic oligonucleotide
  Sense strand starting at position 431 of SEQ ID NO: 1242354
gcgugacauaacuacaaag

SEQ ID NO: 1341087 - RNA, 19 nt, Artificial Sequence
  Description of Artificial Sequence: Synthetic oligonucleotide
  Antisense strand to SEQ ID NO: 1341086
cuuuguaguuaugucacgc

SEQ ID NO: 1341088 - RNA, 19 nt, Artificial Sequence
  Description of Artificial Sequence: Synthetic oligonucleotide
  Sense strand starting at position 502 of SEQ ID NO: 1242354
ugagcacaugugcauauau

SEQ ID NO: 1341089 - RNA, 19 nt, Artificial Sequence
  Description of Artificial Sequence: Synthetic oligonucleotide
  Antisense strand to SEQ ID NO: 1341088
auauaugcacaugugcuca

SEQ ID NO: 1341090 - RNA, 19 nt, Artificial Sequence
  Description of Artificial Sequence: Synthetic oligonucleotide
  Sense strand starting at position 504 of SEQ ID NO: 1242354
agcacaugugcauauauaa

SEQ ID NO: 1341091 - RNA, 19 nt, Artificial Sequence
  Description of Artificial Sequence: Synthetic oligonucleotide
  Antisense strand to SEQ ID NO: 1341090
uuauauaugcacaugugcu

SEQ ID NO: 1341092 - RNA, 19 nt, Artificial Sequence
  Description of Artificial Sequence: Synthetic oligonucleotide
  Sense strand starting at position 622 of SEQ ID NO: 1242354
cuugguuucucacucucua

SEQ ID NO: 1341093 - RNA, 19 nt, Artificial Sequence
  Description of Artificial Sequence: Synthetic oligonucleotide
  Antisense strand to SEQ ID NO: 1341092
uagagagugagaaaccaag

SEQ ID NO: 1341094 - RNA, 19 nt, Artificial Sequence
  Description of Artificial Sequence: Synthetic oligonucleotide
  Sense strand starting at position 758 of SEQ ID NO: 1242354
ggcaauuaauacguugacu

SEQ ID NO: 1341095 - RNA, 19 nt, Artificial Sequence
  Description of Artificial Sequence: Synthetic oligonucleotide
  Antisense strand to SEQ ID NO: 1341094
agucaacguauuaauugcc

SEQ ID NO: 1341096 - RNA, 19 nt, Artificial Sequence
  Description of Artificial Sequence: Synthetic oligonucleotide
  Sense strand starting at position 793 of SEQ ID NO: 1242354
aggccauaugccuauaaau

SEQ ID NO: 1341097 - RNA, 19 nt, Artificial Sequence
  Description of Artificial Sequence: Synthetic oligonucleotide
  Antisense strand to SEQ ID NO: 1341096
auuuauaggcauauggccu

SEQ ID NO: 1341098 - RNA, 19 nt, Artificial Sequence
  Description of Artificial Sequence: Synthetic oligonucleotide
  Sense strand starting at position 802 of SEQ ID NO: 1242354
gccuauaaaucucucgaac

SEQ ID NO: 1341099 - RNA, 19 nt, Artificial Sequence
  Description of Artificial Sequence: Synthetic oligonucleotide
  Antisense strand to SEQ ID NO: 1341098
guucgagagauuuauaggc

SEQ ID NO: 1341100 - RNA, 19 nt, Artificial Sequence
  Description of Artificial Sequence: Synthetic oligonucleotide
  Sense strand starting at position 824 of SEQ ID NO: 1242354
aacugcaacugugaaguaa

SEQ ID NO: 1341101 - RNA, 19 nt, Artificial Sequence
  Description of Artificial Sequence: Synthetic oligonucleotide
  Antisense strand to SEQ ID NO: 1341100
uuacuucacaguugcaguu

SEQ ID NO: 1341102 - RNA, 19 nt, Artificial Sequence
  Description of Artificial Sequence: Synthetic oligonucleotide
  Sense strand starting at position 828 of SEQ ID NO: 1242354
gcaacugugaaguaagcau

SEQ ID NO: 1341103 - RNA, 19 nt, Artificial Sequence
  Description of Artificial Sequence: Synthetic oligonucleotide
  Antisense strand to SEQ ID NO: 1341102
augcuuacuucacaguugc

SEQ ID NO: 1341104 - RNA, 19 nt, Artificial Sequence
  Description of Artificial Sequence: Synthetic oligonucleotide
  Sense strand starting at position 832 of SEQ ID NO: 1242354
cugugaaguaagcauuaga

SEQ ID NO: 1341105 - RNA, 19 nt, Artificial Sequence
  Description of Artificial Sequence: Synthetic oligonucleotide
  Antisense strand to SEQ ID NO: 1341104
ucuaaugcuuacuucacag

SEQ ID NO: 1341106 - RNA, 19 nt, Artificial Sequence
  Description of Artificial Sequence: Synthetic oligonucleotide
  Sense strand starting at position 835 of SEQ ID NO: 1242354
ugaaguaagcauuagaagu

SEQ ID NO: 1341107 - RNA, 19 nt, Artificial Sequence
  Description of Artificial Sequence: Synthetic oligonucleotide
  Antisense strand to SEQ ID NO: 1341106
acuucuaaugcuuacuuca

SEQ ID NO: 1341108 - RNA, 19 nt, Artificial Sequence
  Description of Artificial Sequence: Synthetic oligonucleotide
  Sense strand starting at position 1326 of SEQ ID NO: 1242354
ggagucucaggcuaacgaa

SEQ ID NO: 1341109 - RNA, 19 nt, Artificial Sequence
  Description of Artificial Sequence: Synthetic oligonucleotide
  Antisense strand to SEQ ID NO: 1341108
uucguuagccugagacucc

SEQ ID NO: 1341110 - RNA, 19 nt, Artificial Sequence
  Description of Artificial Sequence: Synthetic oligonucleotide
  Sense strand starting at position 1358 of SEQ ID NO: 1242354
cgucucuucccgagucgga

SEQ ID NO: 1341111 - RNA, 19 nt, Artificial Sequence
  Description of Artificial Sequence: Synthetic oligonucleotide
  Antisense strand to SEQ ID NO: 1341110
uccgacucgggaagagacg

SEQ ID NO: 1341112 - RNA, 19 nt, Artificial Sequence
  Description of Artificial Sequence: Synthetic oligonucleotide
  Sense strand starting at position 1437 of SEQ ID NO: 1242354
ccugcuaucuuguugcgga

SEQ ID NO: 1341113 - RNA, 19 nt, Artificial Sequence
  Description of Artificial Sequence: Synthetic oligonucleotide
  Antisense strand to SEQ ID NO: 1341112
uccgcaacaagauagcagg

SEQ ID NO: 1341114 - RNA, 19 nt, Artificial Sequence
  Description of Artificial Sequence: Synthetic oligonucleotide
  Sense strand starting at position 1493 of SEQ ID NO: 1242354
gcgcuuguucguguggaag

SEQ ID NO: 1341115 - RNA, 19 nt, Artificial Sequence
  Description of Artificial Sequence: Synthetic oligonucleotide
  Antisense strand to SEQ ID NO: 1341114
cuuccacacgaacaagcgc

SEQ ID NO: 1341116 - RNA, 19 nt, Artificial Sequence
  Description of Artificial Sequence: Synthetic oligonucleotide
  Sense strand starting at position 1626 of SEQ ID NO: 1242354
gcaaccuucugggaagagu

SEQ ID NO: 1341117 - RNA, 19 nt, Artificial Sequence
  Description of Artificial Sequence: Synthetic oligonucleotide
  Antisense strand to SEQ ID NO: 1341116
acucuucccagaagguugc

SEQ ID NO: 1341118 - RNA, 19 nt, Artificial Sequence
  Description of Artificial Sequence: Synthetic oligonucleotide
  Sense strand starting at position 1921 of SEQ ID NO: 1242354
acaggcgaagccuguuaaa

SEQ ID NO: 1341119 - RNA, 19 nt, Artificial Sequence
  Description of Artificial Sequence: Synthetic oligonucleotide
  Antisense strand to SEQ ID NO: 1341118
uuuaacaggcuucgccugu

SEQ ID NO: 1341120 - RNA, 19 nt, Artificial Sequence
  Description of Artificial Sequence: Synthetic oligonucleotide
  Sense strand starting at position 2164 of SEQ ID NO: 1242354
gugcgaugugcucuagcgu

SEQ ID NO: 1341121 - RNA, 19 nt, Artificial Sequence
  Description of Artificial Sequence: Synthetic oligonucleotide
  Antisense strand to SEQ ID NO: 1341120
acgcuagagcacaucgcac

SEQ ID NO: 1341122 - RNA, 19 nt, Artificial Sequence
  Description of Artificial Sequence: Synthetic oligonucleotide
  Sense strand starting at position 2325 of SEQ ID NO: 1242354
gccggagacuugucaggua

SEQ ID NO: 1341123 - RNA, 19 nt, Artificial Sequence
  Description of Artificial Sequence: Synthetic oligonucleotide
  Antisense strand to SEQ ID NO: 1341122
uaccugacaagucuccggc

SEQ ID NO: 1341124 - RNA, 19 nt, Artificial Sequence
  Description of Artificial Sequence: Synthetic oligonucleotide
  Sense strand starting at position 2384 of SEQ ID NO: 1242354
cgggccuuugcucaaaugu

SEQ ID NO: 1341125 - RNA, 19 nt, Artificial Sequence
  Description of Artificial Sequence: Synthetic oligonucleotide
  Antisense strand to SEQ ID NO: 1341124
acauuugagcaaaggcccg

SEQ ID NO: 1341126 - RNA, 19 nt, Artificial Sequence
  Description of Artificial Sequence: Synthetic oligonucleotide
  Sense strand starting at position 2393 of SEQ ID NO: 1242354
gcucaaaugucgccuuauc

SEQ ID NO: 1341127 - RNA, 19 nt, Artificial Sequence
  Description of Artificial Sequence: Synthetic oligonucleotide
  Antisense strand to SEQ ID NO: 1341126
gauaaggcgacauuugagc

SEQ ID NO: 1341128 - RNA, 19 nt, Artificial Sequence
  Description of Artificial Sequence: Synthetic oligonucleotide
  Sense strand starting at position 2403 of SEQ ID NO: 1242354
cgccuuaucagagggcuuu

SEQ ID NO: 1341129 - RNA, 19 nt, Artificial Sequence
  Description of Artificial Sequence: Synthetic oligonucleotide
  Antisense strand to SEQ ID NO: 1341128
aaagcccucugauaaggcg

SEQ ID NO: 1341130 - RNA, 19 nt, Artificial Sequence
  Description of Artificial Sequence: Synthetic oligonucleotide
  Sense strand starting at position 2472 of SEQ ID NO: 1242354
cuagcacuugccgugugau

SEQ ID NO: 1341131 - RNA, 19 nt, Artificial Sequence
  Description of Artificial Sequence: Synthetic oligonucleotide
  Antisense strand to SEQ ID NO: 1341130
aucacacggcaagugcuag

SEQ ID NO: 1341132 - RNA, 19 nt, Artificial Sequence
  Description of Artificial Sequence: Synthetic oligonucleotide
  Sense strand starting at position 2513 of SEQ ID NO: 1242354
gggugagcuccaugacagu

SEQ ID NO: 1341133 - RNA, 19 nt, Artificial Sequence
  Description of Artificial Sequence: Synthetic oligonucleotide
  Antisense strand to SEQ ID NO: 1341132
acugucauggagcucaccc

SEQ ID NO: 1341134 - RNA, 19 nt, Artificial Sequence
  Description of Artificial Sequence: Synthetic oligonucleotide
  Sense strand starting at position 2519 of SEQ ID NO: 1242354
gcuccaugacaguaauggu

SEQ ID NO: 1341135 - RNA, 19 nt, Artificial Sequence
  Description of Artificial Sequence: Synthetic oligonucleotide
  Antisense strand to SEQ ID NO: 1341134
accauuacugucauggagc

SEQ ID NO: 1341136 - RNA, 19 nt, Artificial Sequence
  Description of Artificial Sequence: Synthetic oligonucleotide
  Sense strand starting at position 2549 of SEQ ID NO: 1242354
gcuaauucccagugcuuga

SEQ ID NO: 1341137 - RNA, 19 nt, Artificial Sequence
  Description of Artificial Sequence: Synthetic oligonucleotide
  Antisense strand to SEQ ID NO: 1341136
ucaagcacugggaauuagc

SEQ ID NO: 1341138 - RNA, 19 nt, Artificial Sequence
  Description of Artificial Sequence: Synthetic oligonucleotide
  Sense strand starting at position 3002 of SEQ ID NO: 1242354
ggagcaaacuuccagucaa

SEQ ID NO: 1341139 - RNA, 19 nt, Artificial Sequence
  Description of Artificial Sequence: Synthetic oligonucleotide
  Antisense strand to SEQ ID NO: 1341138
uugacuggaaguuugcucc

SEQ ID NO: 1341140 - RNA, 19 nt, Artificial Sequence
  Description of Artificial Sequence: Synthetic oligonucleotide
  Sense strand starting at position 3410 of SEQ ID NO: 1242354
agugaagugacaugguaac

SEQ ID NO: 1341141 - RNA, 19 nt, Artificial Sequence
  Description of Artificial Sequence: Synthetic oligonucleotide
  Antisense strand to SEQ ID NO: 1341140
guuaccaugucacuucacu

SEQ ID NO: 1341142 - RNA, 19 nt, Artificial Sequence
  Description of Artificial Sequence: Synthetic oligonucleotide
  Sense strand starting at position 3443 of SEQ ID NO: 1242354
ucgauuuccugggcucaca

SEQ ID NO: 1341143 - RNA, 19 nt, Artificial Sequence
  Description of Artificial Sequence: Synthetic oligonucleotide
  Antisense strand to SEQ ID NO: 1341142
ugugagcccaggaaaucga

SEQ ID NO: 1341144 - RNA, 19 nt, Artificial Sequence
  Description of Artificial Sequence: Synthetic oligonucleotide
  Sense strand starting at position 45 of SEQ ID NO: 1242355
ucaucacuggguuggagaa

SEQ ID NO: 1341145 - RNA, 19 nt, Artificial Sequence
  Description of Artificial Sequence: Synthetic oligonucleotide
  Antisense strand to SEQ ID NO: 1341144
uucuccaacccagugauga

SEQ ID NO: 1341146 - RNA, 19 nt, Artificial Sequence
  Description of Artificial Sequence: Synthetic oligonucleotide
  Sense strand starting at position 46 of SEQ ID NO: 1242355
caucacuggguuggagaau

SEQ ID NO: 1341147 - RNA, 19 nt, Artificial Sequence
  Description of Artificial Sequence: Synthetic oligonucleotide
  Antisense strand to SEQ ID NO: 1341146
auucuccaacccagugaug

SEQ ID NO: 1341148 - RNA, 19 nt, Artificial Sequence
  Description of Artificial Sequence: Synthetic oligonucleotide
  Sense strand starting at position 72 of SEQ ID NO: 1242355
gauauaccuucugugaguc

SEQ ID NO: 1341149 - RNA, 19 nt, Artificial Sequence
  Description of Artificial Sequence: Synthetic oligonucleotide
  Antisense strand to SEQ ID NO: 1341148
gacucacagaagguauauc

SEQ ID NO: 1341150 - RNA, 19 nt, Artificial Sequence
  Description of Artificial Sequence: Synthetic oligonucleotide
  Sense strand starting at position 238 of SEQ ID NO: 1242355
gcaccuguucgacauuucu

SEQ ID NO: 1341151 - RNA, 19 nt, Artificial Sequence
  Description of Artificial Sequence: Synthetic oligonucleotide
  Antisense strand to SEQ ID NO: 1341150
agaaaugucgaacaggugc

SEQ ID NO: 1341152 - RNA, 19 nt, Artificial Sequence
  Description of Artificial Sequence: Synthetic oligonucleotide
  Sense strand starting at position 565 of SEQ ID NO: 1242355
acagcuuuagacugaagaa

SEQ ID NO: 1341153 - RNA, 19 nt, Artificial Sequence
  Description of Artificial Sequence: Synthetic oligonucleotide
  Antisense strand to SEQ ID NO: 1341152
uucuucagucuaaagcugu

SEQ ID NO: 1341154 - RNA, 19 nt, Artificial Sequence
  Description of Artificial Sequence: Synthetic oligonucleotide
  Sense strand starting at position 616 of SEQ ID NO: 1242355
aaacucaucgucugaagag

SEQ ID NO: 1341155 - RNA, 19 nt, Artificial Sequence
  Description of Artificial Sequence: Synthetic oligonucleotide
  Antisense strand to SEQ ID NO: 1341154
cucuucagacgaugaguuu

SEQ ID NO: 1341156 - RNA, 19 nt, Artificial Sequence
  Description of Artificial Sequence: Synthetic oligonucleotide
  Sense strand starting at position 657 of SEQ ID NO: 1242355
uggcauaucuccuuugaau

SEQ ID NO: 1341157 - RNA, 19 nt, Artificial Sequence
  Description of Artificial Sequence: Synthetic oligonucleotide
  Antisense strand to SEQ ID NO: 1341156
auucaaaggagauaugcca

SEQ ID NO: 1341158 - RNA, 19 nt, Artificial Sequence
  Description of Artificial Sequence: Synthetic oligonucleotide
  Sense strand starting at position 692 of SEQ ID NO: 1242355
cccgaaauguuucuacaau

SEQ ID NO: 1341159 - RNA, 19 nt, Artificial Sequence
  Description of Artificial Sequence: Synthetic oligonucleotide
  Antisense strand to SEQ ID NO: 1341158
auuguagaaacauuucggg

SEQ ID NO: 1341160 - RNA, 19 nt, Artificial Sequence
  Description of Artificial Sequence: Synthetic oligonucleotide
  Sense strand starting at position 784 of SEQ ID NO: 1242355
guucuaauguaucuuaacu

SEQ ID NO: 1341161 - RNA, 19 nt, Artificial Sequence
  Description of Artificial Sequence: Synthetic oligonucleotide
  Antisense strand to SEQ ID NO: 1341160
aguuaagauacauuagaac

SEQ ID NO: 1341162 - RNA, 19 nt, Artificial Sequence
  Description of Artificial Sequence: Synthetic oligonucleotide
  Sense strand starting at position 960 of SEQ ID NO: 1242355
uguaguaaaucucuagcca

SEQ ID NO: 1341163 - RNA, 19 nt, Artificial Sequence
  Description of Artificial Sequence: Synthetic oligonucleotide
  Antisense strand to SEQ ID NO: 1341162
uggcuagagauuuacuaca

SEQ ID NO: 1341164 - RNA, 19 nt, Artificial Sequence
  Description of Artificial Sequence: Synthetic oligonucleotide
  Sense strand starting at position 961 of SEQ ID NO: 1242355
guaguaaaucucuagccaa

SEQ ID NO: 1341165 - RNA, 19 nt, Artificial Sequence
  Description of Artificial Sequence: Synthetic oligonucleotide
  Antisense strand to SEQ ID NO: 1341164
uuggcuagagauuuacuac

SEQ ID NO: 1341166 - RNA, 19 nt, Artificial Sequence
  Description of Artificial Sequence: Synthetic oligonucleotide
  Sense strand starting at position 1250 of SEQ ID NO: 1242355
aaugaacugucuucgauga

SEQ ID NO: 1341167 - RNA, 19 nt, Artificial Sequence
  Description of Artificial Sequence: Synthetic oligonucleotide
  Antisense strand to SEQ ID NO: 1341166
ucaucgaagacaguucauu

SEQ ID NO: 1341168 - RNA, 19 nt, Artificial Sequence
  Description of Artificial Sequence: Synthetic oligonucleotide
  Sense strand starting at position 1251 of SEQ ID NO: 1242355
augaacugucuucgaugaa

SEQ ID NO: 1341169 - RNA, 19 nt, Artificial Sequence
  Description of Artificial Sequence: Synthetic oligonucleotide
  Antisense strand to SEQ ID NO: 1341168
uucaucgaagacaguucau

SEQ ID NO: 1341170 - RNA, 19 nt, Artificial Sequence
  Description of Artificial Sequence: Synthetic oligonucleotide
  Sense strand starting at position 1314 of SEQ ID NO: 1242355
uguggacucgcuuagagua

SEQ ID NO: 1341171 - RNA, 19 nt, Artificial Sequence
  Description of Artificial Sequence: Synthetic oligonucleotide
  Antisense strand to SEQ ID NO: 1341170
uacucuaagcgaguccaca

SEQ ID NO: 1341172 - RNA, 19 nt, Artificial Sequence
  Description of Artificial Sequence: Synthetic oligonucleotide
  Sense strand starting at position 1397 of SEQ ID NO: 1242355
gcugaucugacaggaauuc

SEQ ID NO: 1341173 - RNA, 19 nt, Artificial Sequence
  Description of Artificial Sequence: Synthetic oligonucleotide
  Antisense strand to SEQ ID NO: 1341172
gaauuccugucagaucagc

SEQ ID NO: 1341174 - RNA, 19 nt, Artificial Sequence
  Description of Artificial Sequence: Synthetic oligonucleotide
  Sense strand starting at position 1409 of SEQ ID NO: 1242355
ggaauucuugcugagcgac

SEQ ID NO: 1341175 - RNA, 19 nt, Artificial Sequence
  Description of Artificial Sequence: Synthetic oligonucleotide
  Antisense strand to SEQ ID NO: 1341174
gucgcucagcaagaauucc

SEQ ID NO: 1341176 - RNA, 19 nt, Artificial Sequence
  Description of Artificial Sequence: Synthetic oligonucleotide
  Sense strand starting at position 1427 of SEQ ID NO: 1242355
ccguccuugacggaauuaa

SEQ ID NO: 1341177 - RNA, 19 nt, Artificial Sequence
  Description of Artificial Sequence: Synthetic oligonucleotide
  Antisense strand to SEQ ID NO: 1341176
uuaauuccgucaaggacgg

SEQ ID NO: 1341178 - RNA, 19 nt, Artificial Sequence
  Description of Artificial Sequence: Synthetic oligonucleotide
  Sense strand starting at position 1789 of SEQ ID NO: 1242355
ucauccgucccauaugacu

SEQ ID NO: 1341179 - RNA, 19 nt, Artificial Sequence
  Description of Artificial Sequence: Synthetic oligonucleotide
  Antisense strand to SEQ ID NO: 1341178
agucauaugggacggauga

SEQ ID NO: 1341180 - RNA, 19 nt, Artificial Sequence
  Description of Artificial Sequence: Synthetic oligonucleotide
  Sense strand starting at position 1800 of SEQ ID NO: 1242355
auaugacucucgguaaaga

SEQ ID NO: 1341181 - RNA, 19 nt, Artificial Sequence
  Description of Artificial Sequence: Synthetic oligonucleotide
  Antisense strand to SEQ ID NO: 1341180
ucuuuaccgagagucauau

SEQ ID NO: 1341182 - RNA, 19 nt, Artificial Sequence
  Description of Artificial Sequence: Synthetic oligonucleotide
  Sense strand starting at position 1942 of SEQ ID NO: 1242355
caucaacuuccgggauaga

SEQ ID NO: 1341183 - RNA, 19 nt, Artificial Sequence
  Description of Artificial Sequence: Synthetic oligonucleotide
  Antisense strand to SEQ ID NO: 1341182
ucuaucccggaaguugaug

SEQ ID NO: 1341184 - RNA, 19 nt, Artificial Sequence
  Description of Artificial Sequence: Synthetic oligonucleotide
  Sense strand starting at position 2364 of SEQ ID NO: 1242355
uaauacgugccagagagau

SEQ ID NO: 1341185 - RNA, 19 nt, Artificial Sequence
  Description of Artificial Sequence: Synthetic oligonucleotide
  Antisense strand to SEQ ID NO: 1341184
aucucucuggcacguauua

SEQ ID NO: 1341186 - RNA, 19 nt, Artificial Sequence
  Description of Artificial Sequence: Synthetic oligonucleotide
  Sense strand starting at position 2366 of SEQ ID NO: 1242355
auacgugccagagagauua

SEQ ID NO: 1341187 - RNA, 19 nt, Artificial Sequence
  Description of Artificial Sequence: Synthetic oligonucleotide
  Antisense strand to SEQ ID NO: 1341186
uaaucucucuggcacguau

SEQ ID NO: 1341188 - RNA, 19 nt, Artificial Sequence
  Description of Artificial Sequence: Synthetic oligonucleotide
  Sense strand starting at position 2549 of SEQ ID NO: 1242355
gaggauuacucguccuuug

SEQ ID NO: 1341189 - RNA, 19 nt, Artificial Sequence
  Description of Artificial Sequence: Synthetic oligonucleotide
  Antisense strand to SEQ ID NO: 1341188
caaaggacgaguaauccuc

SEQ ID NO: 1341190 - RNA, 19 nt, Artificial Sequence
  Description of Artificial Sequence: Synthetic oligonucleotide
  Sense strand starting at position 2596 of SEQ ID NO: 1242355
aggcgaaugucaccgauga

SEQ ID NO: 1341191 - RNA, 19 nt, Artificial Sequence
  Description of Artificial Sequence: Synthetic oligonucleotide
  Antisense strand to SEQ ID NO: 1341190
ucaucggugacauucgccu

SEQ ID NO: 1341192 - RNA, 19 nt, Artificial Sequence
  Description of Artificial Sequence: Synthetic oligonucleotide
  Sense strand starting at position 2600 of SEQ ID NO: 1242355
gaaugucaccgaugaccga

SEQ ID NO: 1341193 - RNA, 19 nt, Artificial Sequence
  Description of Artificial Sequence: Synthetic oligonucleotide
  Antisense strand to SEQ ID NO: 1341192
ucggucaucggugacauuc

SEQ ID NO: 1341194 - RNA, 19 nt, Artificial Sequence
  Description of Artificial Sequence: Synthetic oligonucleotide
  Sense strand starting at position 2613 of SEQ ID NO: 1242355
gaccgaacaugagucuuua

SEQ ID NO: 1341195 - RNA, 19 nt, Artificial Sequence
  Description of Artificial Sequence: Synthetic oligonucleotide
  Antisense strand to SEQ ID NO: 1341194
uaaagacucauguucgguc

SEQ ID NO: 1341196 - RNA, 19 nt, Artificial Sequence
  Description of Artificial Sequence: Synthetic oligonucleotide
  Sense strand starting at position 2768 of SEQ ID NO: 1242355
acaggaacacgccauuauu

SEQ ID NO: 1341197 - RNA, 19 nt, Artificial Sequence
  Description of Artificial Sequence: Synthetic oligonucleotide
  Antisense strand to SEQ ID NO: 1341196
aauaauggcguguuccugu

SEQ ID NO: 1341198 - RNA, 19 nt, Artificial Sequence
  Description of Artificial Sequence: Synthetic oligonucleotide
  Sense strand starting at position 2771 of SEQ ID NO: 1242355
ggaacacgccauuauucuu

SEQ ID NO: 1341199 - RNA, 19 nt, Artificial Sequence
  Description of Artificial Sequence: Synthetic oligonucleotide
  Antisense strand to SEQ ID NO: 1341198
aagaauaauggcguguucc

SEQ ID NO: 1341200 - RNA, 19 nt, Artificial Sequence
  Description of Artificial Sequence: Synthetic oligonucleotide
  Sense strand starting at position 2908 of SEQ ID NO: 1242355
gcgugacagcaugcucuau

SEQ ID NO: 1341201 - RNA, 19 nt, Artificial Sequence
  Description of Artificial Sequence: Synthetic oligonucleotide
  Antisense strand to SEQ ID NO: 1341200
auagagcaugcugucacgc

SEQ ID NO: 1341202 - RNA, 19 nt, Artificial Sequence
  Description of Artificial Sequence: Synthetic oligonucleotide
  Sense strand starting at position 2910 of SEQ ID NO: 1242355
gugacagcaugcucuauuu

SEQ ID NO: 1341203 - RNA, 19 nt, Artificial Sequence
  Description of Artificial Sequence: Synthetic oligonucleotide
  Antisense strand to SEQ ID NO: 1341202
aaauagagcaugcugucac

SEQ ID NO: 1341204 - RNA, 19 nt, Artificial Sequence
  Description of Artificial Sequence: Synthetic oligonucleotide
  Sense strand starting at position 2934 of SEQ ID NO: 1242355
gaggaaacucuaugcuuga

SEQ ID NO: 1341205 - RNA, 19 nt, Artificial Sequence
  Description of Artificial Sequence: Synthetic oligonucleotide
  Antisense strand to SEQ ID NO: 1341204
ucaagcauagaguuuccuc

SEQ ID NO: 1341206 - RNA, 19 nt, Artificial Sequence
  Description of Artificial Sequence: Synthetic oligonucleotide
  Sense strand starting at position 2935 of SEQ ID NO: 1242355
aggaaacucuaugcuugaa

SEQ ID NO: 1341207 - RNA, 19 nt, Artificial Sequence
  Description of Artificial Sequence: Synthetic oligonucleotide
  Antisense strand to SEQ ID NO: 1341206
uucaagcauagaguuuccu

SEQ ID NO: 1341208 - RNA, 19 nt, Artificial Sequence
  Description of Artificial Sequence: Synthetic oligonucleotide
  Sense strand starting at position 2959 of SEQ ID NO: 1242355
ggugucaugggcgaccaaa

SEQ ID NO: 1341209 - RNA, 19 nt, Artificial Sequence
  Description of Artificial Sequence: Synthetic oligonucleotide
  Antisense strand to SEQ ID NO: 1341208
uuuggucgcccaugacacc

SEQ ID NO: 1341210 - RNA, 19 nt, Artificial Sequence
  Description of Artificial Sequence: Synthetic oligonucleotide
  Sense strand starting at position 3348 of SEQ ID NO: 1242355
cugacuugauguucuuaau

SEQ ID NO: 1341211 - RNA, 19 nt, Artificial Sequence
  Description of Artificial Sequence: Synthetic oligonucleotide
  Antisense strand to SEQ ID NO: 1341210
auuaagaacaucaagucag

SEQ ID NO: 1341212 - RNA, 19 nt, Artificial Sequence
  Description of Artificial Sequence: Synthetic oligonucleotide
  Sense strand starting at position 3546 of SEQ ID NO: 1242355
ggaucaucuugugcauaau

SEQ ID NO: 1341213 - RNA, 19 nt, Artificial Sequence
  Description of Artificial Sequence: Synthetic oligonucleotide
  Antisense strand to SEQ ID NO: 1341212
auuaugcacaagaugaucc

SEQ ID NO: 1341214 - RNA, 19 nt, Artificial Sequence
  Description of Artificial Sequence: Synthetic oligonucleotide
  Sense strand starting at position 3857 of SEQ ID NO: 1242355
gcuucuuaaugggcauaua

SEQ ID NO: 1341215 - RNA, 19 nt, Artificial Sequence
  Description of Artificial Sequence: Synthetic oligonucleotide
  Antisense strand to SEQ ID NO: 1341214
uauaugcccauuaagaagc

SEQ ID NO: 1341216 - RNA, 19 nt, Artificial Sequence
  Description of Artificial Sequence: Synthetic oligonucleotide
  Sense strand starting at position 3872 of SEQ ID NO: 1242355
uauagcauuuguccuguga

SEQ ID NO: 1341217 - RNA, 19 nt, Artificial Sequence
  Description of Artificial Sequence: Synthetic oligonucleotide
  Antisense strand to SEQ ID NO: 1341216
ucacaggacaaaugcuaua

SEQ ID NO: 1341218 - RNA, 19 nt, Artificial Sequence
  Description of Artificial Sequence: Synthetic oligonucleotide
  Sense strand starting at position 3876 of SEQ ID NO: 1242355
gcauuuguccugugacuau

SEQ ID NO: 1341219 - RNA, 19 nt, Artificial Sequence
  Description of Artificial Sequence: Synthetic oligonucleotide
  Antisense strand to SEQ ID NO: 1341218
auagucacaggacaaaugc

SEQ ID NO: 1341220 - RNA, 19 nt, Artificial Sequence
  Description of Artificial Sequence: Synthetic oligonucleotide
  Sense strand starting at position 3879 of SEQ ID NO: 1242355
uuuguccugugacuauaua

SEQ ID NO: 1341221 - RNA, 19 nt, Artificial Sequence
  Description of Artificial Sequence: Synthetic oligonucleotide
  Antisense strand to SEQ ID NO: 1341220
uauauagucacaggacaaa

SEQ ID NO: 1341222 - RNA, 19 nt, Artificial Sequence
  Description of Artificial Sequence: Synthetic oligonucleotide
  Sense strand starting at position 3880 of SEQ ID NO: 1242355
uuguccugugacuauauau

SEQ ID NO: 1341223 - RNA, 19 nt, Artificial Sequence
  Description of Artificial Sequence: Synthetic oligonucleotide
  Antisense strand to SEQ ID NO: 1341222
auauauagucacaggacaa

SEQ ID NO: 1341224 - RNA, 19 nt, Artificial Sequence
  Description of Artificial Sequence: Synthetic oligonucleotide
  Sense strand starting at position 383 of SEQ ID NO: 1242356
ggcuuaaguccagggauau

SEQ ID NO: 1341225 - RNA, 19 nt, Artificial Sequence
  Description of Artificial Sequence: Synthetic oligonucleotide
  Antisense strand to SEQ ID NO: 1341224
auaucccuggacuuaagcc

SEQ ID NO: 1341226 - RNA, 19 nt, Artificial Sequence
  Description of Artificial Sequence: Synthetic oligonucleotide
  Sense strand starting at position 384 of SEQ ID NO: 1242356
gcuuaaguccagggauaug

SEQ ID NO: 1341227 - RNA, 19 nt, Artificial Sequence
  Description of Artificial Sequence: Synthetic oligonucleotide
  Antisense strand to SEQ ID NO: 1341226
cauaucccuggacuuaagc

SEQ ID NO: 1341228 - RNA, 19 nt, Artificial Sequence
  Description of Artificial Sequence: Synthetic oligonucleotide
  Sense strand starting at position 482 of SEQ ID NO: 1242356
guggaaugugaggguuaga

SEQ ID NO: 1341229 - RNA, 19 nt, Artificial Sequence
  Description of Artificial Sequence: Synthetic oligonucleotide
  Antisense strand to SEQ ID NO: 1341228
ucuaacccucacauuccac

SEQ ID NO: 1341230 - RNA, 19 nt, Artificial Sequence
  Description of Artificial Sequence: Synthetic oligonucleotide
  Sense strand starting at position 492 of SEQ ID NO: 1242356
aggguuagaccagaucugu

SEQ ID NO: 1341231 - RNA, 19 nt, Artificial Sequence
  Description of Artificial Sequence: Synthetic oligonucleotide
  Antisense strand to SEQ ID NO: 1341230
acagaucuggucuaacccu

SEQ ID NO: 1341232 - RNA, 19 nt, Artificial Sequence
  Description of Artificial Sequence: Synthetic oligonucleotide
  Sense strand starting at position 510 of SEQ ID NO: 1242356
ugcuuuagaaauugggaua

SEQ ID NO: 1341233 - RNA, 19 nt, Artificial Sequence
  Description of Artificial Sequence: Synthetic oligonucleotide
  Antisense strand to SEQ ID NO: 1341232
uaucccaauuucuaaagca

SEQ ID NO: 1341234 - RNA, 19 nt, Artificial Sequence
  Description of Artificial Sequence: Synthetic oligonucleotide
  Sense strand starting at position 532 of SEQ ID NO: 1242356
gagggaauucgucaaugua

SEQ ID NO: 1341235 - RNA, 19 nt, Artificial Sequence
  Description of Artificial Sequence: Synthetic oligonucleotide
  Antisense strand to SEQ ID NO: 1341234
uacauugacgaauucccuc

SEQ ID NO: 1341236 - RNA, 19 nt, Artificial Sequence
  Description of Artificial Sequence: Synthetic oligonucleotide
  Sense strand starting at position 535 of SEQ ID NO: 1242356
ggaauucgucaauguauga

SEQ ID NO: 1341237 - RNA, 19 nt, Artificial Sequence
  Description of Artificial Sequence: Synthetic oligonucleotide
  Antisense strand to SEQ ID NO: 1341236
ucauacauugacgaauucc

SEQ ID NO: 1341238 - RNA, 19 nt, Artificial Sequence
  Description of Artificial Sequence: Synthetic oligonucleotide
  Sense strand starting at position 548 of SEQ ID NO: 1242356
guaugauauauugacgcaa

SEQ ID NO: 1341239 - RNA, 19 nt, Artificial Sequence
  Description of Artificial Sequence: Synthetic oligonucleotide
  Antisense strand to SEQ ID NO: 1341238
uugcgucaauauaucauac

SEQ ID NO: 1341240 - RNA, 19 nt, Artificial Sequence
  Description of Artificial Sequence: Synthetic oligonucleotide
  Sense strand starting at position 568 of SEQ ID NO: 1242356
ucgauugaucaauggaaca

SEQ ID NO: 1341241 - RNA, 19 nt, Artificial Sequence
  Description of Artificial Sequence: Synthetic oligonucleotide
  Antisense strand to SEQ ID NO: 1341240
uguuccauugaucaaucga

SEQ ID NO: 1341242 - RNA, 19 nt, Artificial Sequence
  Description of Artificial Sequence: Synthetic oligonucleotide
  Sense strand starting at position 652 of SEQ ID NO: 1242356
aaacuaguguuacugagag

SEQ ID NO: 1341243 - RNA, 19 nt, Artificial Sequence
  Description of Artificial Sequence: Synthetic oligonucleotide
  Antisense strand to SEQ ID NO: 1341242
cucucaguaacacuaguuu

SEQ ID NO: 1341244 - RNA, 19 nt, Artificial Sequence
  Description of Artificial Sequence: Synthetic oligonucleotide
  Sense strand starting at position 654 of SEQ ID NO: 1242356
acuaguguuacugagaggu

SEQ ID NO: 1341245 - RNA, 19 nt, Artificial Sequence
  Description of Artificial Sequence: Synthetic oligonucleotide
  Antisense strand to SEQ ID NO: 1341244
accucucaguaacacuagu

SEQ ID NO: 1341246 - RNA, 19 nt, Artificial Sequence
  Description of Artificial Sequence: Synthetic oligonucleotide
  Sense strand starting at position 658 of SEQ ID NO: 1242356
guguuacugagagguaaac

SEQ ID NO: 1341247 - RNA, 19 nt, Artificial Sequence
  Description of Artificial Sequence: Synthetic oligonucleotide
  Antisense strand to SEQ ID NO: 1341246
guuuaccucucaguaacac

SEQ ID NO: 1341248 - RNA, 19 nt, Artificial Sequence
  Description of Artificial Sequence: Synthetic oligonucleotide
  Sense strand starting at position 667 of SEQ ID NO: 1242356
agagguaaacaguguuacu

SEQ ID NO: 1341249 - RNA, 19 nt, Artificial Sequence
  Description of Artificial Sequence: Synthetic oligonucleotide
  Antisense strand to SEQ ID NO: 1341248
aguaacacuguuuaccucu

SEQ ID NO: 1341250 - RNA, 19 nt, Artificial Sequence
  Description of Artificial Sequence: Synthetic oligonucleotide
  Sense strand starting at position 703 of SEQ ID NO: 1242356
guaccucauagaugugaug

SEQ ID NO: 1341251 - RNA, 19 nt, Artificial Sequence
  Description of Artificial Sequence: Synthetic oligonucleotide
  Antisense strand to SEQ ID NO: 1341250
caucacaucuaugagguac

SEQ ID NO: 1341252 - RNA, 19 nt, Artificial Sequence
  Description of Artificial Sequence: Synthetic oligonucleotide
  Sense strand starting at position 705 of SEQ ID NO: 1242356
accucauagaugugaugga

SEQ ID NO: 1341253 - RNA, 19 nt, Artificial Sequence
  Description of Artificial Sequence: Synthetic oligonucleotide
  Antisense strand to SEQ ID NO: 1341252
uccaucacaucuaugaggu

SEQ ID NO: 1341254 - RNA, 19 nt, Artificial Sequence
  Description of Artificial Sequence: Synthetic oligonucleotide
  Sense strand starting at position 762 of SEQ ID NO: 1242356
gucucuaucccugacaucu

SEQ ID NO: 1341255 - RNA, 19 nt, Artificial Sequence
  Description of Artificial Sequence: Synthetic oligonucleotide
  Antisense strand to SEQ ID NO: 1341254
agaugucagggauagagac

SEQ ID NO: 1341256 - RNA, 19 nt, Artificial Sequence
  Description of Artificial Sequence: Synthetic oligonucleotide
  Sense strand starting at position 802 of SEQ ID NO: 1242356
uuaaguaguaguuauagga

SEQ ID NO: 1341257 - RNA, 19 nt, Artificial Sequence
  Description of Artificial Sequence: Synthetic oligonucleotide
  Antisense strand to SEQ ID NO: 1341256
uccuauaacuacuacuuaa

SEQ ID NO: 1341258 - RNA, 19 nt, Artificial Sequence
  Description of Artificial Sequence: Synthetic oligonucleotide
  Sense strand starting at position 915 of SEQ ID NO: 1242356
caaggcugucauuagaauu

SEQ ID NO: 1341259 - RNA, 19 nt, Artificial Sequence
  Description of Artificial Sequence: Synthetic oligonucleotide
  Antisense strand to SEQ ID NO: 1341258
aauucuaaugacagccuug

SEQ ID NO: 1341260 - RNA, 19 nt, Artificial Sequence
  Description of Artificial Sequence: Synthetic oligonucleotide
  Sense strand starting at position 923 of SEQ ID NO: 1242356
ucauuagaauuaguggaca

SEQ ID NO: 1341261 - RNA, 19 nt, Artificial Sequence
  Description of Artificial Sequence: Synthetic oligonucleotide
  Antisense strand to SEQ ID NO: 1341260
uguccacuaauucuaauga

SEQ ID NO: 1341262 - RNA, 19 nt, Artificial Sequence
  Description of Artificial Sequence: Synthetic oligonucleotide
  Sense strand starting at position 935 of SEQ ID NO: 1242356
guggacauacaauguuuaa

SEQ ID NO: 1341263 - RNA, 19 nt, Artificial Sequence
  Description of Artificial Sequence: Synthetic oligonucleotide
  Antisense strand to SEQ ID NO: 1341262
uuaaacauuguauguccac

SEQ ID NO: 1341264 - RNA, 19 nt, Artificial Sequence
  Description of Artificial Sequence: Synthetic oligonucleotide
  Sense strand starting at position 1062 of SEQ ID NO: 1242356
cgguguuuaaaggaauuau

SEQ ID NO: 1341265 - RNA, 19 nt, Artificial Sequence
  Description of Artificial Sequence: Synthetic oligonucleotide
  Antisense strand to SEQ ID NO: 1341264
auaauuccuuuaaacaccg

SEQ ID NO: 1341266 - RNA, 19 nt, Artificial Sequence
  Description of Artificial Sequence: Synthetic oligonucleotide
  Sense strand starting at position 1091 of SEQ ID NO: 1242356
acuucugucccuuggaaac

SEQ ID NO: 1341267 - RNA, 19 nt, Artificial Sequence
  Description of Artificial Sequence: Synthetic oligonucleotide
  Antisense strand to SEQ ID NO: 1341266
guuuccaagggacagaagu

SEQ ID NO: 1341268 - RNA, 19 nt, Artificial Sequence
  Description of Artificial Sequence: Synthetic oligonucleotide
  Sense strand starting at position 1253 of SEQ ID NO: 1242356
guaccuaugcuuuacuaag

SEQ ID NO: 1341269 - RNA, 19 nt, Artificial Sequence
  Description of Artificial Sequence: Synthetic oligonucleotide
  Antisense strand to SEQ ID NO: 1341268
cuuaguaaagcauagguac

SEQ ID NO: 1341270 - RNA, 19 nt, Artificial Sequence
  Description of Artificial Sequence: Synthetic oligonucleotide
  Sense strand starting at position 2052 of SEQ ID NO: 1242356
cgauaagugagcgaaugag

SEQ ID NO: 1341271 - RNA, 19 nt, Artificial Sequence
  Description of Artificial Sequence: Synthetic oligonucleotide
  Antisense strand to SEQ ID NO: 1341270
cucauucgcucacuuaucg

SEQ ID NO: 1341272 - RNA, 19 nt, Artificial Sequence
  Description of Artificial Sequence: Synthetic oligonucleotide
  Sense strand starting at position 2092 of SEQ ID NO: 1242356
ggugaauugagugagcuua

SEQ ID NO: 1341273 - RNA, 19 nt, Artificial Sequence
  Description of Artificial Sequence: Synthetic oligonucleotide
  Antisense strand to SEQ ID NO: 1341272
uaagcucacucaauucacc

SEQ ID NO: 1341274 - RNA, 19 nt, Artificial Sequence
  Description of Artificial Sequence: Synthetic oligonucleotide
  Sense strand starting at position 2094 of SEQ ID NO: 1242356
ugaauugagugagcuuaga

SEQ ID NO: 1341275 - RNA, 19 nt, Artificial Sequence
  Description of Artificial Sequence: Synthetic oligonucleotide
  Antisense strand to SEQ ID NO: 1341274
ucuaagcucacucaauuca

SEQ ID NO: 1341276 - RNA, 19 nt, Artificial Sequence
  Description of Artificial Sequence: Synthetic oligonucleotide
  Sense strand starting at position 2258 of SEQ ID NO: 1242356
gucccuugggucugaagaa

SEQ ID NO: 1341277 - RNA, 19 nt, Artificial Sequence
  Description of Artificial Sequence: Synthetic oligonucleotide
  Antisense strand to SEQ ID NO: 1341276
uucuucagacccaagggac

SEQ ID NO: 1341278 - RNA, 19 nt, Artificial Sequence
  Description of Artificial Sequence: Synthetic oligonucleotide
  Sense strand starting at position 2405 of SEQ ID NO: 1242356
acuuguaucucaguaagau

SEQ ID NO: 1341279 - RNA, 19 nt, Artificial Sequence
  Description of Artificial Sequence: Synthetic oligonucleotide
  Antisense strand to SEQ ID NO: 1341278
aucuuacugagauacaagu

SEQ ID NO: 1341280 - RNA, 19 nt, Artificial Sequence
  Description of Artificial Sequence: Synthetic oligonucleotide
  Sense strand starting at position 2406 of SEQ ID NO: 1242356
cuuguaucucaguaagauu

SEQ ID NO: 1341281 - RNA, 19 nt, Artificial Sequence
  Description of Artificial Sequence: Synthetic oligonucleotide
  Antisense strand to SEQ ID NO: 1341280
aaucuuacugagauacaag

SEQ ID NO: 1341282 - RNA, 19 nt, Artificial Sequence
  Description of Artificial Sequence: Synthetic oligonucleotide
  Sense strand starting at position 2535 of SEQ ID NO: 1242356
ugcuuccauccugagauua

SEQ ID NO: 1341283 - RNA, 19 nt, Artificial Sequence
  Description of Artificial Sequence: Synthetic oligonucleotide
  Antisense strand to SEQ ID NO: 1341282
uaaucucaggauggaagca

SEQ ID NO: 1341284 - RNA, 19 nt, Artificial Sequence
  Description of Artificial Sequence: Synthetic oligonucleotide
  Sense strand starting at position 2572 of SEQ ID NO: 1242356
aggauauauggcgaggguu

SEQ ID NO: 1341285 - RNA, 19 nt, Artificial Sequence
  Description of Artificial Sequence: Synthetic oligonucleotide
  Antisense strand to SEQ ID NO: 1341284
aacccucgccauauauccu

SEQ ID NO: 1341286 - RNA, 19 nt, Artificial Sequence
  Description of Artificial Sequence: Synthetic oligonucleotide
  Sense strand starting at position 2584 of SEQ ID NO: 1242356
gaggguucuuaagugcaaa

SEQ ID NO: 1341287 - RNA, 19 nt, Artificial Sequence
  Description of Artificial Sequence: Synthetic oligonucleotide
  Antisense strand to SEQ ID NO: 1341286
uuugcacuuaagaacccuc

SEQ ID NO: 1341288 - RNA, 19 nt, Artificial Sequence
  Description of Artificial Sequence: Synthetic oligonucleotide
  Sense strand starting at position 2650 of SEQ ID NO: 1242356
auauuagugccucauagaa

SEQ ID NO: 1341289 - RNA, 19 nt, Artificial Sequence
  Description of Artificial Sequence: Synthetic oligonucleotide
  Antisense strand to SEQ ID NO: 1341288
uucuaugaggcacuaauau

SEQ ID NO: 1341290 - RNA, 19 nt, Artificial Sequence
  Description of Artificial Sequence: Synthetic oligonucleotide
  Sense strand starting at position 3225 of SEQ ID NO: 1242356
ugguauccagagugggauu

SEQ ID NO: 1341291 - RNA, 19 nt, Artificial Sequence
  Description of Artificial Sequence: Synthetic oligonucleotide
  Antisense strand to SEQ ID NO: 1341290
aaucccacucuggauacca

SEQ ID NO: 1341292 - RNA, 19 nt, Artificial Sequence
  Description of Artificial Sequence: Synthetic oligonucleotide
  Sense strand starting at position 3435 of SEQ ID NO: 1242356
agaacuccauaugcugaaa

SEQ ID NO: 1341293 - RNA, 19 nt, Artificial Sequence
  Description of Artificial Sequence: Synthetic oligonucleotide
  Antisense strand to SEQ ID NO: 1341292
uuucagcauauggaguucu

SEQ ID NO: 1341294 - RNA, 19 nt, Artificial Sequence
  Description of Artificial Sequence: Synthetic oligonucleotide
  Sense strand starting at position 3484 of SEQ ID NO: 1242356
gagguagaauucuccauug

SEQ ID NO: 1341295 - RNA, 19 nt, Artificial Sequence
  Description of Artificial Sequence: Synthetic oligonucleotide
  Antisense strand to SEQ ID NO: 1341294
caauggagaauucuaccuc

SEQ ID NO: 1341296 - RNA, 19 nt, Artificial Sequence
  Description of Artificial Sequence: Synthetic oligonucleotide
  Sense strand starting at position 3489 of SEQ ID NO: 1242356
agaauucuccauugauugu

SEQ ID NO: 1341297 - RNA, 19 nt, Artificial Sequence
  Description of Artificial Sequence: Synthetic oligonucleotide
  Antisense strand to SEQ ID NO: 1341296
acaaucaauggagaauucu

SEQ ID NO: 1341298 - RNA, 19 nt, Artificial Sequence
  Description of Artificial Sequence: Synthetic oligonucleotide
  Sense strand starting at position 3540 of SEQ ID NO: 1242356
gggacaucaucucucaagu

SEQ ID NO: 1341299 - RNA, 19 nt, Artificial Sequence
  Description of Artificial Sequence: Synthetic oligonucleotide
  Antisense strand to SEQ ID NO: 1341298
acuugagagaugauguccc

SEQ ID NO: 1341300 - RNA, 19 nt, Artificial Sequence
  Description of Artificial Sequence: Synthetic oligonucleotide
  Sense strand starting at position 3859 of SEQ ID NO: 1242356
uugucauauucuguaaaca

SEQ ID NO: 1341301 - RNA, 19 nt, Artificial Sequence
  Description of Artificial Sequence: Synthetic oligonucleotide
  Antisense strand to SEQ ID NO: 1341300
uguuuacagaauaugacaa

SEQ ID NO: 1341302 - RNA, 19 nt, Artificial Sequence
  Description of Artificial Sequence: Synthetic oligonucleotide
  Sense strand starting at position 3860 of SEQ ID NO: 1242356
ugucauauucuguaaacau

SEQ ID NO: 1341303 - RNA, 19 nt, Artificial Sequence
  Description of Artificial Sequence: Synthetic oligonucleotide
  Antisense strand to SEQ ID NO: 1341302
auguuuacagaauaugaca

SEQ ID NO: 1341304 - RNA, 19 nt, Artificial Sequence
  Description of Artificial Sequence: Synthetic oligonucleotide
  Sense strand starting at position 35 of SEQ ID NO: 1242357
gugguaagagccuaaucug

SEQ ID NO: 1341305 - RNA, 19 nt, Artificial Sequence
  Description of Artificial Sequence: Synthetic oligonucleotide
  Antisense strand to SEQ ID NO: 1341304
cagauuaggcucuuaccac

SEQ ID NO: 1341306 - RNA, 19 nt, Artificial Sequence
  Description of Artificial Sequence: Synthetic oligonucleotide
  Sense strand starting at position 38 of SEQ ID NO: 1242357
guaagagccuaaucugaac

SEQ ID NO: 1341307 - RNA, 19 nt, Artificial Sequence
  Description of Artificial Sequence: Synthetic oligonucleotide
  Antisense strand to SEQ ID NO: 1341306
guucagauuaggcucuuac

SEQ ID NO: 1341308 - RNA, 19 nt, Artificial Sequence
  Description of Artificial Sequence: Synthetic oligonucleotide
  Sense strand starting at position 188 of SEQ ID NO: 1242357
gcacuuaagagugguauua

SEQ ID NO: 1341309 - RNA, 19 nt, Artificial Sequence
  Description of Artificial Sequence: Synthetic oligonucleotide
  Antisense strand to SEQ ID NO: 1341308
uaauaccacucuuaagugc

SEQ ID NO: 1341310 - RNA, 19 nt, Artificial Sequence
  Description of Artificial Sequence: Synthetic oligonucleotide
  Sense strand starting at position 313 of SEQ ID NO: 1242357
agauuuagguuuggaaauc

SEQ ID NO: 1341311 - RNA, 19 nt, Artificial Sequence
  Description of Artificial Sequence: Synthetic oligonucleotide
  Antisense strand to SEQ ID NO: 1341310
gauuuccaaaccuaaaucu

SEQ ID NO: 1341312 - RNA, 19 nt, Artificial Sequence
  Description of Artificial Sequence: Synthetic oligonucleotide
  Sense strand starting at position 314 of SEQ ID NO: 1242357
gauuuagguuuggaaauca

SEQ ID NO: 1341313 - RNA, 19 nt, Artificial Sequence
  Description of Artificial Sequence: Synthetic oligonucleotide
  Antisense strand to SEQ ID NO: 1341312
ugauuuccaaaccuaaauc

SEQ ID NO: 1341314 - RNA, 19 nt, Artificial Sequence
  Description of Artificial Sequence: Synthetic oligonucleotide
  Sense strand starting at position 346 of SEQ ID NO: 1242357
augagauacuuguucuuug

SEQ ID NO: 1341315 - RNA, 19 nt, Artificial Sequence
  Description of Artificial Sequence: Synthetic oligonucleotide
  Antisense strand to SEQ ID NO: 1341314
caaagaacaaguaucucau

SEQ ID NO: 1341316 - RNA, 19 nt, Artificial Sequence
  Description of Artificial Sequence: Synthetic oligonucleotide
  Sense strand starting at position 472 of SEQ ID NO: 1242357
uuccacugugucuaccaaa

SEQ ID NO: 1341317 - RNA, 19 nt, Artificial Sequence
  Description of Artificial Sequence: Synthetic oligonucleotide
  Antisense strand to SEQ ID NO: 1341316
uuugguagacacaguggaa

SEQ ID NO: 1341318 - RNA, 19 nt, Artificial Sequence
  Description of Artificial Sequence: Synthetic oligonucleotide
  Sense strand starting at position 507 of SEQ ID NO: 1242357
gacaguucucacgaucugu

SEQ ID NO: 1341319 - RNA, 19 nt, Artificial Sequence
  Description of Artificial Sequence: Synthetic oligonucleotide
  Antisense strand to SEQ ID NO: 1341318
acagaucgugagaacuguc

SEQ ID NO: 1341320 - RNA, 19 nt, Artificial Sequence
  Description of Artificial Sequence: Synthetic oligonucleotide
  Sense strand starting at position 578 of SEQ ID NO: 1242357
ucguaacgacaucauguau

SEQ ID NO: 1341321 - RNA, 19 nt, Artificial Sequence
  Description of Artificial Sequence: Synthetic oligonucleotide
  Antisense strand to SEQ ID NO: 1341320
auacaugaugucguuacga

SEQ ID NO: 1341322 - RNA, 19 nt, Artificial Sequence
  Description of Artificial Sequence: Synthetic oligonucleotide
  Sense strand starting at position 666 of SEQ ID NO: 1242357
uaucauguuccugagagca

SEQ ID NO: 1341323 - RNA, 19 nt, Artificial Sequence
  Description of Artificial Sequence: Synthetic oligonucleotide
  Antisense strand to SEQ ID NO: 1341322
ugcucucaggaacaugaua

SEQ ID NO: 1341324 - RNA, 19 nt, Artificial Sequence
  Description of Artificial Sequence: Synthetic oligonucleotide
  Sense strand starting at position 671 of SEQ ID NO: 1242357
uguuccugagagcaaguau

SEQ ID NO: 1341325 - RNA, 19 nt, Artificial Sequence
  Description of Artificial Sequence: Synthetic oligonucleotide
  Antisense strand to SEQ ID NO: 1341324
auacuugcucucaggaaca

SEQ ID NO: 1341326 - RNA, 19 nt, Artificial Sequence
  Description of Artificial Sequence: Synthetic oligonucleotide
  Sense strand starting at position 726 of SEQ ID NO: 1242357
ggcuuugguccgucacuuu

SEQ ID NO: 1341327 - RNA, 19 nt, Artificial Sequence
  Description of Artificial Sequence: Synthetic oligonucleotide
  Antisense strand to SEQ ID NO: 1341326
aaagugacggaccaaagcc

SEQ ID NO: 1341328 - RNA, 19 nt, Artificial Sequence
  Description of Artificial Sequence: Synthetic oligonucleotide
  Sense strand starting at position 746 of SEQ ID NO: 1242357
agcugaaucccuuggaucu

SEQ ID NO: 1341329 - RNA, 19 nt, Artificial Sequence
  Description of Artificial Sequence: Synthetic oligonucleotide
  Antisense strand to SEQ ID NO: 1341328
agauccaagggauucagcu

SEQ ID NO: 1341330 - RNA, 19 nt, Artificial Sequence
  Description of Artificial Sequence: Synthetic oligonucleotide
  Sense strand starting at position 747 of SEQ ID NO: 1242357
gcugaaucccuuggaucua

SEQ ID NO: 1341331 - RNA, 19 nt, Artificial Sequence
  Description of Artificial Sequence: Synthetic oligonucleotide
  Antisense strand to SEQ ID NO: 1341330
uagauccaagggauucagc

SEQ ID NO: 1341332 - RNA, 19 nt, Artificial Sequence
  Description of Artificial Sequence: Synthetic oligonucleotide
  Sense strand starting at position 771 of SEQ ID NO: 1242357
ugaggucaauaucuuugau

SEQ ID NO: 1341333 - RNA, 19 nt, Artificial Sequence
  Description of Artificial Sequence: Synthetic oligonucleotide
  Antisense strand to SEQ ID NO: 1341332
aucaaagauauugaccuca

SEQ ID NO: 1341334 - RNA, 19 nt, Artificial Sequence
  Description of Artificial Sequence: Synthetic oligonucleotide
  Sense strand starting at position 773 of SEQ ID NO: 1242357
aggucaauaucuuugaucu

SEQ ID NO: 1341335 - RNA, 19 nt, Artificial Sequence
  Description of Artificial Sequence: Synthetic oligonucleotide
  Antisense strand to SEQ ID NO: 1341334
agaucaaagauauugaccu

SEQ ID NO: 1341336 - RNA, 19 nt, Artificial Sequence
  Description of Artificial Sequence: Synthetic oligonucleotide
  Sense strand starting at position 774 of SEQ ID NO: 1242357
ggucaauaucuuugaucug

SEQ ID NO: 1341337 - RNA, 19 nt, Artificial Sequence
  Description of Artificial Sequence: Synthetic oligonucleotide
  Antisense strand to SEQ ID NO: 1341336
cagaucaaagauauugacc

SEQ ID NO: 1341338 - RNA, 19 nt, Artificial Sequence
  Description of Artificial Sequence: Synthetic oligonucleotide
  Sense strand starting at position 977 of SEQ ID NO: 1242357
gaaacaauguguuucucug

SEQ ID NO: 1341339 - RNA, 19 nt, Artificial Sequence
  Description of Artificial Sequence: Synthetic oligonucleotide
  Antisense strand to SEQ ID NO: 1341338
cagagaaacacauuguuuc

SEQ ID NO: 1341340 - RNA, 19 nt, Artificial Sequence
  Description of Artificial Sequence: Synthetic oligonucleotide
  Sense strand starting at position 1234 of SEQ ID NO: 1242357
cuccgcuuucuuccgcaaa

SEQ ID NO: 1341341 - RNA, 19 nt, Artificial Sequence
  Description of Artificial Sequence: Synthetic oligonucleotide
  Antisense strand to SEQ ID NO: 1341340
uuugcggaagaaagcggag

SEQ ID NO: 1341342 - RNA, 19 nt, Artificial Sequence
  Description of Artificial Sequence: Synthetic oligonucleotide
  Sense strand starting at position 1286 of SEQ ID NO: 1242357
ugagucuuuccguacagga

SEQ ID NO: 1341343 - RNA, 19 nt, Artificial Sequence
  Description of Artificial Sequence: Synthetic oligonucleotide
  Antisense strand to SEQ ID NO: 1341342
uccuguacggaaagacuca

SEQ ID NO: 1341344 - RNA, 19 nt, Artificial Sequence
  Description of Artificial Sequence: Synthetic oligonucleotide
  Sense strand starting at position 1387 of SEQ ID NO: 1242357
uaguauggaccuuagugua

SEQ ID NO: 1341345 - RNA, 19 nt, Artificial Sequence
  Description of Artificial Sequence: Synthetic oligonucleotide
  Antisense strand to SEQ ID NO: 1341344
uacacuaagguccauacua

SEQ ID NO: 1341346 - RNA, 19 nt, Artificial Sequence
  Description of Artificial Sequence: Synthetic oligonucleotide
  Sense strand starting at position 1462 of SEQ ID NO: 1242357
guacaugaguggccaaaca

SEQ ID NO: 1341347 - RNA, 19 nt, Artificial Sequence
  Description of Artificial Sequence: Synthetic oligonucleotide
  Antisense strand to SEQ ID NO: 1341346
uguuuggccacucauguac

SEQ ID NO: 1341348 - RNA, 19 nt, Artificial Sequence
  Description of Artificial Sequence: Synthetic oligonucleotide
  Sense strand starting at position 2080 of SEQ ID NO: 1242357
accuguucgcuguuacuuu

SEQ ID NO: 1341349 - RNA, 19 nt, Artificial Sequence
  Description of Artificial Sequence: Synthetic oligonucleotide
  Antisense strand to SEQ ID NO: 1341348
aaaguaacagcgaacaggu

SEQ ID NO: 1341350 - RNA, 19 nt, Artificial Sequence
  Description of Artificial Sequence: Synthetic oligonucleotide
  Sense strand starting at position 2166 of SEQ ID NO: 1242357
gucggcauuuaugcaagua

SEQ ID NO: 1341351 - RNA, 19 nt, Artificial Sequence
  Description of Artificial Sequence: Synthetic oligonucleotide
  Antisense strand to SEQ ID NO: 1341350
uacuugcauaaaugccgac

SEQ ID NO: 1341352 - RNA, 19 nt, Artificial Sequence
  Description of Artificial Sequence: Synthetic oligonucleotide
  Sense strand starting at position 2167 of SEQ ID NO: 1242357
ucggcauuuaugcaaguau

SEQ ID NO: 1341353 - RNA, 19 nt, Artificial Sequence
  Description of Artificial Sequence: Synthetic oligonucleotide
  Antisense strand to SEQ ID NO: 1341352
auacuugcauaaaugccga

SEQ ID NO: 1341354 - RNA, 19 nt, Artificial Sequence
  Description of Artificial Sequence: Synthetic oligonucleotide
  Sense strand starting at position 2200 of SEQ ID NO: 1242357
uugugcuuugccucggagu

SEQ ID NO: 1341355 - RNA, 19 nt, Artificial Sequence
  Description of Artificial Sequence: Synthetic oligonucleotide
  Antisense strand to SEQ ID NO: 1341354
acuccgaggcaaagcacaa

SEQ ID NO: 1341356 - RNA, 19 nt, Artificial Sequence
  Description of Artificial Sequence: Synthetic oligonucleotide
  Sense strand starting at position 2277 of SEQ ID NO: 1242357
auucucgucccacagugau

SEQ ID NO: 1341357 - RNA, 19 nt, Artificial Sequence
  Description of Artificial Sequence: Synthetic oligonucleotide
  Antisense strand to SEQ ID NO: 1341356
aucacugugggacgagaau

SEQ ID NO: 1341358 - RNA, 19 nt, Artificial Sequence
  Description of Artificial Sequence: Synthetic oligonucleotide
  Sense strand starting at position 2289 of SEQ ID NO: 1242357
cagugauuugcagggugua

SEQ ID NO: 1341359 - RNA, 19 nt, Artificial Sequence
  Description of Artificial Sequence: Synthetic oligonucleotide
  Antisense strand to SEQ ID NO: 1341358
uacacccugcaaaucacug

SEQ ID NO: 1341360 - RNA, 19 nt, Artificial Sequence
  Description of Artificial Sequence: Synthetic oligonucleotide
  Sense strand starting at position 2290 of SEQ ID NO: 1242357
agugauuugcaggguguaa

SEQ ID NO: 1341361 - RNA, 19 nt, Artificial Sequence
  Description of Artificial Sequence: Synthetic oligonucleotide
  Antisense strand to SEQ ID NO: 1341360
uuacacccugcaaaucacu

SEQ ID NO: 1341362 - RNA, 19 nt, Artificial Sequence
  Description of Artificial Sequence: Synthetic oligonucleotide
  Sense strand starting at position 2585 of SEQ ID NO: 1242357
guguguuugccugucucua

SEQ ID NO: 1341363 - RNA, 19 nt, Artificial Sequence
  Description of Artificial Sequence: Synthetic oligonucleotide
  Antisense strand to SEQ ID NO: 1341362
uagagacaggcaaacacac

SEQ ID NO: 1341364 - RNA, 19 nt, Artificial Sequence
  Description of Artificial Sequence: Synthetic oligonucleotide
  Sense strand starting at position 2707 of SEQ ID NO: 1242357
ggauuucaguucguuuggu

SEQ ID NO: 1341365 - RNA, 19 nt, Artificial Sequence
  Description of Artificial Sequence: Synthetic oligonucleotide
  Antisense strand to SEQ ID NO: 1341364
accaaacgaacugaaaucc

SEQ ID NO: 1341366 - RNA, 19 nt, Artificial Sequence
  Description of Artificial Sequence: Synthetic oligonucleotide
  Sense strand starting at position 2768 of SEQ ID NO: 1242357
auaggcauuugauacauau

SEQ ID NO: 1341367 - RNA, 19 nt, Artificial Sequence
  Description of Artificial Sequence: Synthetic oligonucleotide
  Antisense strand to SEQ ID NO: 1341366
auauguaucaaaugccuau

SEQ ID NO: 1341368 - RNA, 19 nt, Artificial Sequence
  Description of Artificial Sequence: Synthetic oligonucleotide
  Sense strand starting at position 2849 of SEQ ID NO: 1242357
uuaauuggucacuaaucga

SEQ ID NO: 1341369 - RNA, 19 nt, Artificial Sequence
  Description of Artificial Sequence: Synthetic oligonucleotide
  Antisense strand to SEQ ID NO: 1341368
ucgauuagugaccaauuaa

SEQ ID NO: 1341370 - RNA, 19 nt, Artificial Sequence
  Description of Artificial Sequence: Synthetic oligonucleotide
  Sense strand starting at position 2857 of SEQ ID NO: 1242357
ucacuaaucgaugggcauu

SEQ ID NO: 1341371 - RNA, 19 nt, Artificial Sequence
  Description of Artificial Sequence: Synthetic oligonucleotide
  Antisense strand to SEQ ID NO: 1341370
aaugcccaucgauuaguga

SEQ ID NO: 1341372 - RNA, 19 nt, Artificial Sequence
  Description of Artificial Sequence: Synthetic oligonucleotide
  Sense strand starting at position 2890 of SEQ ID NO: 1242357
uaauaaguaucuguuggua

SEQ ID NO: 1341373 - RNA, 19 nt, Artificial Sequence
  Description of Artificial Sequence: Synthetic oligonucleotide
  Antisense strand to SEQ ID NO: 1341372
uaccaacagauacuuauua

SEQ ID NO: 1341374 - RNA, 19 nt, Artificial Sequence
  Description of Artificial Sequence: Synthetic oligonucleotide
  Sense strand starting at position 3216 of SEQ ID NO: 1242357
ucuauucuuucguugauuu

SEQ ID NO: 1341375 - RNA, 19 nt, Artificial Sequence
  Description of Artificial Sequence: Synthetic oligonucleotide
  Antisense strand to SEQ ID NO: 1341374
aaaucaacgaaagaauaga

SEQ ID NO: 1341376 - RNA, 19 nt, Artificial Sequence
  Description of Artificial Sequence: Synthetic oligonucleotide
  Sense strand starting at position 3242 of SEQ ID NO: 1242357
cacuuuacacguuaagguu

SEQ ID NO: 1341377 - RNA, 19 nt, Artificial Sequence
  Description of Artificial Sequence: Synthetic oligonucleotide
  Antisense strand to SEQ ID NO: 1341376
aaccuuaacguguaaagug

SEQ ID NO: 1341378 - RNA, 19 nt, Artificial Sequence
  Description of Artificial Sequence: Synthetic oligonucleotide
  Sense strand starting at position 3310 of SEQ ID NO: 1242357
agcuuugcucaugguauuu

SEQ ID NO: 1341379 - RNA, 19 nt, Artificial Sequence
  Description of Artificial Sequence: Synthetic oligonucleotide
  Antisense strand to SEQ ID NO: 1341378
aaauaccaugagcaaagcu

SEQ ID NO: 1341380 - RNA, 19 nt, Artificial Sequence
  Description of Artificial Sequence: Synthetic oligonucleotide
  Sense strand starting at position 3393 of SEQ ID NO: 1242357
gguacuuuccuuuaaacug

SEQ ID NO: 1341381 - RNA, 19 nt, Artificial Sequence
  Description of Artificial Sequence: Synthetic oligonucleotide
  Antisense strand to SEQ ID NO: 1341380
caguuuaaaggaaaguacc

SEQ ID NO: 1341382 - RNA, 19 nt, Artificial Sequence
  Description of Artificial Sequence: Synthetic oligonucleotide
  Sense strand starting at position 3519 of SEQ ID NO: 1242357
auaagacuccagugucuuu

SEQ ID NO: 1341383 - RNA, 19 nt, Artificial Sequence
  Description of Artificial Sequence: Synthetic oligonucleotide
  Antisense strand to SEQ ID NO: 1341382
aaagacacuggagucuuau

SEQ ID NO: 1341384 - RNA, 19 nt, Artificial Sequence
  Description of Artificial Sequence: Synthetic oligonucleotide
  Sense strand starting at position 35 of SEQ ID NO: 1242358
aguuucuauuccuuagaua

SEQ ID NO: 1341385 - RNA, 19 nt, Artificial Sequence
  Description of Artificial Sequence: Synthetic oligonucleotide
  Antisense strand to SEQ ID NO: 1341384
uaucuaaggaauagaaacu

SEQ ID NO: 1341386 - RNA, 19 nt, Artificial Sequence
  Description of Artificial Sequence: Synthetic oligonucleotide
  Sense strand starting at position 36 of SEQ ID NO: 1242358
guuucuauuccuuagauag

SEQ ID NO: 1341387 - RNA, 19 nt, Artificial Sequence
  Description of Artificial Sequence: Synthetic oligonucleotide
  Antisense strand to SEQ ID NO: 1341386
cuaucuaaggaauagaaac

SEQ ID NO: 1341388 - RNA, 19 nt, Artificial Sequence
  Description of Artificial Sequence: Synthetic oligonucleotide
  Sense strand starting at position 43 of SEQ ID NO: 1242358
uuccuuagauagucuuaca

SEQ ID NO: 1341389 - RNA, 19 nt, Artificial Sequence
  Description of Artificial Sequence: Synthetic oligonucleotide
  Antisense strand to SEQ ID NO: 1341388
uguaagacuaucuaaggaa

SEQ ID NO: 1341390 - RNA, 19 nt, Artificial Sequence
  Description of Artificial Sequence: Synthetic oligonucleotide
  Sense strand starting at position 890 of SEQ ID NO: 1242358
aggagaccaucuuuguauc

SEQ ID NO: 1341391 - RNA, 19 nt, Artificial Sequence
  Description of Artificial Sequence: Synthetic oligonucleotide
  Antisense strand to SEQ ID NO: 1341390
gauacaaagauggucuccu

SEQ ID NO: 1341392 - RNA, 19 nt, Artificial Sequence
  Description of Artificial Sequence: Synthetic oligonucleotide
  Sense strand starting at position 911 of SEQ ID NO: 1242358
cugguaucacuagagcacu

SEQ ID NO: 1341393 - RNA, 19 nt, Artificial Sequence
  Description of Artificial Sequence: Synthetic oligonucleotide
  Antisense strand to SEQ ID NO: 1341392
agugcucuagugauaccag

SEQ ID NO: 1341394 - RNA, 19 nt, Artificial Sequence
  Description of Artificial Sequence: Synthetic oligonucleotide
  Sense strand starting at position 1040 of SEQ ID NO: 1242358
aagaaagaauucugggaug

SEQ ID NO: 1341395 - RNA, 19 nt, Artificial Sequence
  Description of Artificial Sequence: Synthetic oligonucleotide
  Antisense strand to SEQ ID NO: 1341394
caucccagaauucuuucuu

SEQ ID NO: 1341396 - RNA, 19 nt, Artificial Sequence
  Description of Artificial Sequence: Synthetic oligonucleotide
  Sense strand starting at position 1042 of SEQ ID NO: 1242358
gaaagaauucugggaugcu

SEQ ID NO: 1341397 - RNA, 19 nt, Artificial Sequence
  Description of Artificial Sequence: Synthetic oligonucleotide
  Antisense strand to SEQ ID NO: 1341396
agcaucccagaauucuuuc

SEQ ID NO: 1341398 - RNA, 19 nt, Artificial Sequence
  Description of Artificial Sequence: Synthetic oligonucleotide
  Sense strand starting at position 1215 of SEQ ID NO: 1242358
cgacccuagucgccaaaua

SEQ ID NO: 1341399 - RNA, 19 nt, Artificial Sequence
  Description of Artificial Sequence: Synthetic oligonucleotide
  Antisense strand to SEQ ID NO: 1341398
uauuuggcgacuagggucg

SEQ ID NO: 1341400 - RNA, 19 nt, Artificial Sequence
  Description of Artificial Sequence: Synthetic oligonucleotide
  Sense strand starting at position 1216 of SEQ ID NO: 1242358
gacccuagucgccaaauaa

SEQ ID NO: 1341401 - RNA, 19 nt, Artificial Sequence
  Description of Artificial Sequence: Synthetic oligonucleotide
  Antisense strand to SEQ ID NO: 1341400
uuauuuggcgacuaggguc

SEQ ID NO: 1341402 - RNA, 19 nt, Artificial Sequence
  Description of Artificial Sequence: Synthetic oligonucleotide
  Sense strand starting at position 1249 of SEQ ID NO: 1242358
cuaagucauccuuggcaag

SEQ ID NO: 1341403 - RNA, 19 nt, Artificial Sequence
  Description of Artificial Sequence: Synthetic oligonucleotide
  Antisense strand to SEQ ID NO: 1341402
cuugccaaggaugacuuag

SEQ ID NO: 1341404 - RNA, 19 nt, Artificial Sequence
  Description of Artificial Sequence: Synthetic oligonucleotide
  Sense strand starting at position 1251 of SEQ ID NO: 1242358
aagucauccuuggcaagca

SEQ ID NO: 1341405 - RNA, 19 nt, Artificial Sequence
  Description of Artificial Sequence: Synthetic oligonucleotide
  Antisense strand to SEQ ID NO: 1341404
ugcuugccaaggaugacuu

SEQ ID NO: 1341406 - RNA, 19 nt, Artificial Sequence
  Description of Artificial Sequence: Synthetic oligonucleotide
  Sense strand starting at position 1287 of SEQ ID NO: 1242358
aacauuuacgaguguccuu

SEQ ID NO: 1341407 - RNA, 19 nt, Artificial Sequence
  Description of Artificial Sequence: Synthetic oligonucleotide
  Antisense strand to SEQ ID NO: 1341406
aaggacacucguaaauguu

SEQ ID NO: 1341408 - RNA, 19 nt, Artificial Sequence
  Description of Artificial Sequence: Synthetic oligonucleotide
  Sense strand starting at position 1313 of SEQ ID NO: 1242358
ccacaucccuuguccgaaa

SEQ ID NO: 1341409 - RNA, 19 nt, Artificial Sequence
  Description of Artificial Sequence: Synthetic oligonucleotide
  Antisense strand to SEQ ID NO: 1341408
uuucggacaagggaugugg

SEQ ID NO: 1341410 - RNA, 19 nt, Artificial Sequence
  Description of Artificial Sequence: Synthetic oligonucleotide
  Sense strand starting at position 1434 of SEQ ID NO: 1242358
gggcgauacuuccuaucuc

SEQ ID NO: 1341411 - RNA, 19 nt, Artificial Sequence
  Description of Artificial Sequence: Synthetic oligonucleotide
  Antisense strand to SEQ ID NO: 1341410
gagauaggaaguaucgccc

SEQ ID NO: 1341412 - RNA, 19 nt, Artificial Sequence
  Description of Artificial Sequence: Synthetic oligonucleotide
  Sense strand starting at position 2125 of SEQ ID NO: 1242358
gagaguggugguggcuuua

SEQ ID NO: 1341413 - RNA, 19 nt, Artificial Sequence
  Description of Artificial Sequence: Synthetic oligonucleotide
  Antisense strand to SEQ ID NO: 1341412
uaaagccaccaccacucuc

SEQ ID NO: 1341414 - RNA, 19 nt, Artificial Sequence
  Description of Artificial Sequence: Synthetic oligonucleotide
  Sense strand starting at position 2155 of SEQ ID NO: 1242358
ccuggaguccuuggcugua

SEQ ID NO: 1341415 - RNA, 19 nt, Artificial Sequence
  Description of Artificial Sequence: Synthetic oligonucleotide
  Antisense strand to SEQ ID NO: 1341414
uacagccaaggacuccagg

SEQ ID NO: 1341416 - RNA, 19 nt, Artificial Sequence
  Description of Artificial Sequence: Synthetic oligonucleotide
  Sense strand starting at position 2290 of SEQ ID NO: 1242358
acugauggcguguacuuaa

SEQ ID NO: 1341417 - RNA, 19 nt, Artificial Sequence
  Description of Artificial Sequence: Synthetic oligonucleotide
  Antisense strand to SEQ ID NO: 1341416
uuaaguacacgccaucagu

SEQ ID NO: 1341418 - RNA, 19 nt, Artificial Sequence
  Description of Artificial Sequence: Synthetic oligonucleotide
  Sense strand starting at position 2450 of SEQ ID NO: 1242358
uagaguguugcaugcagag

SEQ ID NO: 1341419 - RNA, 19 nt, Artificial Sequence
  Description of Artificial Sequence: Synthetic oligonucleotide
  Antisense strand to SEQ ID NO: 1341418
cucugcaugcaacacucua

SEQ ID NO: 1341420 - RNA, 19 nt, Artificial Sequence
  Description of Artificial Sequence: Synthetic oligonucleotide
  Sense strand starting at position 2452 of SEQ ID NO: 1242358
gaguguugcaugcagagaa

SEQ ID NO: 1341421 - RNA, 19 nt, Artificial Sequence
  Description of Artificial Sequence: Synthetic oligonucleotide
  Antisense strand to SEQ ID NO: 1341420
uucucugcaugcaacacuc

SEQ ID NO: 1341422 - RNA, 19 nt, Artificial Sequence
  Description of Artificial Sequence: Synthetic oligonucleotide
  Sense strand starting at position 2499 of SEQ ID NO: 1242358
uaaaguuagguucggagaa

SEQ ID NO: 1341423 - RNA, 19 nt, Artificial Sequence
  Description of Artificial Sequence: Synthetic oligonucleotide
  Antisense strand to SEQ ID NO: 1341422
uucuccgaaccuaacuuua

SEQ ID NO: 1341424 - RNA, 19 nt, Artificial Sequence
  Description of Artificial Sequence: Synthetic oligonucleotide
  Sense strand starting at position 2523 of SEQ ID NO: 1242358
guuaguuauggccagagca

SEQ ID NO: 1341425 - RNA, 19 nt, Artificial Sequence
  Description of Artificial Sequence: Synthetic oligonucleotide
  Antisense strand to SEQ ID NO: 1341424
ugcucuggccauaacuaac

SEQ ID NO: 1341426 - RNA, 19 nt, Artificial Sequence
  Description of Artificial Sequence: Synthetic oligonucleotide
  Sense strand starting at position 2525 of SEQ ID NO: 1242358
uaguuauggccagagcaga

SEQ ID NO: 1341427 - RNA, 19 nt, Artificial Sequence
  Description of Artificial Sequence: Synthetic oligonucleotide
  Antisense strand to SEQ ID NO: 1341426
ucugcucuggccauaacua

SEQ ID NO: 1341428 - RNA, 19 nt, Artificial Sequence
  Description of Artificial Sequence: Synthetic oligonucleotide
  Sense strand starting at position 2590 of SEQ ID NO: 1242358
gcgacugccucacucagau

SEQ ID NO: 1341429 - RNA, 19 nt, Artificial Sequence
  Description of Artificial Sequence: Synthetic oligonucleotide
  Antisense strand to SEQ ID NO: 1341428
aucugagugaggcagucgc

SEQ ID NO: 1341430 - RNA, 19 nt, Artificial Sequence
  Description of Artificial Sequence: Synthetic oligonucleotide
  Sense strand starting at position 2609 of SEQ ID NO: 1242358
ccuaauaaguaagcugaau

SEQ ID NO: 1341431 - RNA, 19 nt, Artificial Sequence
  Description of Artificial Sequence: Synthetic oligonucleotide
  Antisense strand to SEQ ID NO: 1341430
auucagcuuacuuauuagg

SEQ ID NO: 1341432 - RNA, 19 nt, Artificial Sequence
  Description of Artificial Sequence: Synthetic oligonucleotide
  Sense strand starting at position 2631 of SEQ ID NO: 1242358
ggaguuugaacuugaguau

SEQ ID NO: 1341433 - RNA, 19 nt, Artificial Sequence
  Description of Artificial Sequence: Synthetic oligonucleotide
  Antisense strand to SEQ ID NO: 1341432
auacucaaguucaaacucc

SEQ ID NO: 1341434 - RNA, 19 nt, Artificial Sequence
  Description of Artificial Sequence: Synthetic oligonucleotide
  Sense strand starting at position 2634 of SEQ ID NO: 1242358
guuugaacuugaguauuga

SEQ ID NO: 1341435 - RNA, 19 nt, Artificial Sequence
  Description of Artificial Sequence: Synthetic oligonucleotide
  Antisense strand to SEQ ID NO: 1341434
ucaauacucaaguucaaac

SEQ ID NO: 1341436 - RNA, 19 nt, Artificial Sequence
  Description of Artificial Sequence: Synthetic oligonucleotide
  Sense strand starting at position 2826 of SEQ ID NO: 1242358
cugauuuguggugguguuu

SEQ ID NO: 1341437 - RNA, 19 nt, Artificial Sequence
  Description of Artificial Sequence: Synthetic oligonucleotide
  Antisense strand to SEQ ID NO: 1341436
aaacaccaccacaaaucag

SEQ ID NO: 1341438 - RNA, 19 nt, Artificial Sequence
  Description of Artificial Sequence: Synthetic oligonucleotide
  Sense strand starting at position 3144 of SEQ ID NO: 1242358
uccggaauagauggcauua

SEQ ID NO: 1341439 - RNA, 19 nt, Artificial Sequence
  Description of Artificial Sequence: Synthetic oligonucleotide
  Antisense strand to SEQ ID NO: 1341438
uaaugccaucuauuccgga

SEQ ID NO: 1341440 - RNA, 19 nt, Artificial Sequence
  Description of Artificial Sequence: Synthetic oligonucleotide
  Sense strand starting at position 3341 of SEQ ID NO: 1242358
agauuacucugaccgcagu

SEQ ID NO: 1341441 - RNA, 19 nt, Artificial Sequence
  Description of Artificial Sequence: Synthetic oligonucleotide
  Antisense strand to SEQ ID NO: 1341440
acugcggucagaguaaucu

SEQ ID NO: 1341442 - RNA, 19 nt, Artificial Sequence
  Description of Artificial Sequence: Synthetic oligonucleotide
  Sense strand starting at position 3342 of SEQ ID NO: 1242358
gauuacucugaccgcagua

SEQ ID NO: 1341443 - RNA, 19 nt, Artificial Sequence
  Description of Artificial Sequence: Synthetic oligonucleotide
  Antisense strand to SEQ ID NO: 1341442
uacugcggucagaguaauc

SEQ ID NO: 1341444 - RNA, 19 nt, Artificial Sequence
  Description of Artificial Sequence: Synthetic oligonucleotide
  Sense strand starting at position 3381 of SEQ ID NO: 1242358
gggagaucgcuuggauugu

SEQ ID NO: 1341445 - RNA, 19 nt, Artificial Sequence
  Description of Artificial Sequence: Synthetic oligonucleotide
  Antisense strand to SEQ ID NO: 1341444
acaauccaagcgaucuccc

SEQ ID NO: 1341446 - RNA, 19 nt, Artificial Sequence
  Description of Artificial Sequence: Synthetic oligonucleotide
  Sense strand starting at position 3400 of SEQ ID NO: 1242358
uguugucuucuuggcaaga

SEQ ID NO: 1341447 - RNA, 19 nt, Artificial Sequence
  Description of Artificial Sequence: Synthetic oligonucleotide
  Antisense strand to SEQ ID NO: 1341446
ucuugccaagaagacaaca

SEQ ID NO: 1341448 - RNA, 19 nt, Artificial Sequence
  Description of Artificial Sequence: Synthetic oligonucleotide
  Sense strand starting at position 3401 of SEQ ID NO: 1242358
guugucuucuuggcaagag

SEQ ID NO: 1341449 - RNA, 19 nt, Artificial Sequence
  Description of Artificial Sequence: Synthetic oligonucleotide
  Antisense strand to SEQ ID NO: 1341448
cucuugccaagaagacaac

SEQ ID NO: 1341450 - RNA, 19 nt, Artificial Sequence
  Description of Artificial Sequence: Synthetic oligonucleotide
  Sense strand starting at position 3466 of SEQ ID NO: 1242358
guggauggacucuggauaa

SEQ ID NO: 1341451 - RNA, 19 nt, Artificial Sequence
  Description of Artificial Sequence: Synthetic oligonucleotide
  Antisense strand to SEQ ID NO: 1341450
uuauccagaguccauccac

SEQ ID NO: 1341452 - RNA, 19 nt, Artificial Sequence
  Description of Artificial Sequence: Synthetic oligonucleotide
  Sense strand starting at position 3477 of SEQ ID NO: 1242358
cuggauaauuuggaacgua

SEQ ID NO: 1341453 - RNA, 19 nt, Artificial Sequence
  Description of Artificial Sequence: Synthetic oligonucleotide
  Antisense strand to SEQ ID NO: 1341452
uacguuccaaauuauccag

SEQ ID NO: 1341454 - RNA, 19 nt, Artificial Sequence
  Description of Artificial Sequence: Synthetic oligonucleotide
  Sense strand starting at position 3637 of SEQ ID NO: 1242358
ggaacugguguguauagga

SEQ ID NO: 1341455 - RNA, 19 nt, Artificial Sequence
  Description of Artificial Sequence: Synthetic oligonucleotide
  Antisense strand to SEQ ID NO: 1341454
uccuauacacaccaguucc

SEQ ID NO: 1341456 - RNA, 19 nt, Artificial Sequence
  Description of Artificial Sequence: Synthetic oligonucleotide
  Sense strand starting at position 3646 of SEQ ID NO: 1242358
guguauaggaaauaaguuu

SEQ ID NO: 1341457 - RNA, 19 nt, Artificial Sequence
  Description of Artificial Sequence: Synthetic oligonucleotide
  Antisense strand to SEQ ID NO: 1341456
aaacuuauuuccuauacac

SEQ ID NO: 1341458 - RNA, 19 nt, Artificial Sequence
  Description of Artificial Sequence: Synthetic oligonucleotide
  Sense strand starting at position 3694 of SEQ ID NO: 1242358
aaaggucagcuccagaagu

SEQ ID NO: 1341459 - RNA, 19 nt, Artificial Sequence
  Description of Artificial Sequence: Synthetic oligonucleotide
  Antisense strand to SEQ ID NO: 1341458
acuucuggagcugaccuuu

SEQ ID NO: 1341460 - RNA, 19 nt, Artificial Sequence
  Description of Artificial Sequence: Synthetic oligonucleotide
  Sense strand starting at position 3696 of SEQ ID NO: 1242358
aggucagcuccagaaguua

SEQ ID NO: 1341461 - RNA, 19 nt, Artificial Sequence
  Description of Artificial Sequence: Synthetic oligonucleotide
  Antisense strand to SEQ ID NO: 1341460
uaacuucuggagcugaccu

SEQ ID NO: 1341462 - RNA, 19 nt, Artificial Sequence
  Description of Artificial Sequence: Synthetic oligonucleotide
  Sense strand starting at position 3716 of SEQ ID NO: 1242358
uuccuuuagugauuaggaa

SEQ ID NO: 1341463 - RNA, 19 nt, Artificial Sequence
  Description of Artificial Sequence: Synthetic oligonucleotide
  Antisense strand to SEQ ID NO: 1341462
uuccuaaucacuaaaggaa

SEQ ID NO: 1341464 - RNA, 19 nt, Artificial Sequence
  Description of Artificial Sequence: Synthetic oligonucleotide
  Sense strand starting at position 55 of SEQ ID NO: 1242359
auaguaaaccuuggcuaca

SEQ ID NO: 1341465 - RNA, 19 nt, Artificial Sequence
  Description of Artificial Sequence: Synthetic oligonucleotide
  Antisense strand to SEQ ID NO: 1341464
uguagccaagguuuacuau

SEQ ID NO: 1341466 - RNA, 19 nt, Artificial Sequence
  Description of Artificial Sequence: Synthetic oligonucleotide
  Sense strand starting at position 200 of SEQ ID NO: 1242359
gccucaacucccugggaca

SEQ ID NO: 1341467 - RNA, 19 nt, Artificial Sequence
  Description of Artificial Sequence: Synthetic oligonucleotide
  Antisense strand to SEQ ID NO: 1341466
ugucccagggaguugaggc

SEQ ID NO: 1341468 - RNA, 19 nt, Artificial Sequence
  Description of Artificial Sequence: Synthetic oligonucleotide
  Sense strand starting at position 201 of SEQ ID NO: 1242359
ccucaacucccugggacau

SEQ ID NO: 1341469 - RNA, 19 nt, Artificial Sequence
  Description of Artificial Sequence: Synthetic oligonucleotide
  Antisense strand to SEQ ID NO: 1341468
augucccagggaguugagg

SEQ ID NO: 1341470 - RNA, 19 nt, Artificial Sequence
  Description of Artificial Sequence: Synthetic oligonucleotide
  Sense strand starting at position 258 of SEQ ID NO: 1242359
agcaauaacgccuagaaga

SEQ ID NO: 1341471 - RNA, 19 nt, Artificial Sequence
  Description of Artificial Sequence: Synthetic oligonucleotide
  Antisense strand to SEQ ID NO: 1341470
ucuucuaggcguuauugcu

SEQ ID NO: 1341472 - RNA, 19 nt, Artificial Sequence
  Description of Artificial Sequence: Synthetic oligonucleotide
  Sense strand starting at position 266 of SEQ ID NO: 1242359
cgccuagaagaucauuaau

SEQ ID NO: 1341473 - RNA, 19 nt, Artificial Sequence
  Description of Artificial Sequence: Synthetic oligonucleotide
  Antisense strand to SEQ ID NO: 1341472
auuaaugaucuucuaggcg

SEQ ID NO: 1341474 - RNA, 19 nt, Artificial Sequence
  Description of Artificial Sequence: Synthetic oligonucleotide
  Sense strand starting at position 417 of SEQ ID NO: 1242359
gcuuuauaacaauaggguu

SEQ ID NO: 1341475 - RNA, 19 nt, Artificial Sequence
  Description of Artificial Sequence: Synthetic oligonucleotide
  Antisense strand to SEQ ID NO: 1341474
aacccuauuguuauaaagc

SEQ ID NO: 1341476 - RNA, 19 nt, Artificial Sequence
  Description of Artificial Sequence: Synthetic oligonucleotide
  Sense strand starting at position 423 of SEQ ID NO: 1242359
uaacaauaggguugucaug

SEQ ID NO: 1341477 - RNA, 19 nt, Artificial Sequence
  Description of Artificial Sequence: Synthetic oligonucleotide
  Antisense strand to SEQ ID NO: 1341476
caugacaacccuauuguua

SEQ ID NO: 1341478 - RNA, 19 nt, Artificial Sequence
  Description of Artificial Sequence: Synthetic oligonucleotide
  Sense strand starting at position 425 of SEQ ID NO: 1242359
acaauaggguugucaugag

SEQ ID NO: 1341479 - RNA, 19 nt, Artificial Sequence
  Description of Artificial Sequence: Synthetic oligonucleotide
  Antisense strand to SEQ ID NO: 1341478
cucaugacaacccuauugu

SEQ ID NO: 1341480 - RNA, 19 nt, Artificial Sequence
  Description of Artificial Sequence: Synthetic oligonucleotide
  Sense strand starting at position 468 of SEQ ID NO: 1242359
ugcagugugagagaugaga

SEQ ID NO: 1341481 - RNA, 19 nt, Artificial Sequence
  Description of Artificial Sequence: Synthetic oligonucleotide
  Antisense strand to SEQ ID NO: 1341480
ucucaucucucacacugca

SEQ ID NO: 1341482 - RNA, 19 nt, Artificial Sequence
  Description of Artificial Sequence: Synthetic oligonucleotide
  Sense strand starting at position 470 of SEQ ID NO: 1242359
cagugugagagaugagaau

SEQ ID NO: 1341483 - RNA, 19 nt, Artificial Sequence
  Description of Artificial Sequence: Synthetic oligonucleotide
  Antisense strand to SEQ ID NO: 1341482
auucucaucucucacacug

SEQ ID NO: 1341484 - RNA, 19 nt, Artificial Sequence
  Description of Artificial Sequence: Synthetic oligonucleotide
  Sense strand starting at position 559 of SEQ ID NO: 1242359
ggcgauagguacuuccaua

SEQ ID NO: 1341485 - RNA, 19 nt, Artificial Sequence
  Description of Artificial Sequence: Synthetic oligonucleotide
  Antisense strand to SEQ ID NO: 1341484
uauggaaguaccuaucgcc

SEQ ID NO: 1341486 - RNA, 19 nt, Artificial Sequence
  Description of Artificial Sequence: Synthetic oligonucleotide
  Sense strand starting at position 639 of SEQ ID NO: 1242359
ugaaguaaauuggaaggaa

SEQ ID NO: 1341487 - RNA, 19 nt, Artificial Sequence
  Description of Artificial Sequence: Synthetic oligonucleotide
  Antisense strand to SEQ ID NO: 1341486
uuccuuccaauuuacuuca

SEQ ID NO: 1341488 - RNA, 19 nt, Artificial Sequence
  Description of Artificial Sequence: Synthetic oligonucleotide
  Sense strand starting at position 703 of SEQ ID NO: 1242359
aguugugaucuucgaagac

SEQ ID NO: 1341489 - RNA, 19 nt, Artificial Sequence
  Description of Artificial Sequence: Synthetic oligonucleotide
  Antisense strand to SEQ ID NO: 1341488
gucuucgaagaucacaacu

SEQ ID NO: 1341490 - RNA, 19 nt, Artificial Sequence
  Description of Artificial Sequence: Synthetic oligonucleotide
  Sense strand starting at position 831 of SEQ ID NO: 1242359
cagagcgauuugccguuua

SEQ ID NO: 1341491 - RNA, 19 nt, Artificial Sequence
  Description of Artificial Sequence: Synthetic oligonucleotide
  Antisense strand to SEQ ID NO: 1341490
uaaacggcaaaucgcucug

SEQ ID NO: 1341492 - RNA, 19 nt, Artificial Sequence
  Description of Artificial Sequence: Synthetic oligonucleotide
  Sense strand starting at position 867 of SEQ ID NO: 1242359
cacgauaacguuuaauccu

SEQ ID NO: 1341493 - RNA, 19 nt, Artificial Sequence
  Description of Artificial Sequence: Synthetic oligonucleotide
  Antisense strand to SEQ ID NO: 1341492
aggauuaaacguuaucgug

SEQ ID NO: 1341494 - RNA, 19 nt, Artificial Sequence
  Description of Artificial Sequence: Synthetic oligonucleotide
  Sense strand starting at position 1036 of SEQ ID NO: 1242359
cccugaaagucuuuguauu

SEQ ID NO: 1341495 - RNA, 19 nt, Artificial Sequence
  Description of Artificial Sequence: Synthetic oligonucleotide
  Antisense strand to SEQ ID NO: 1341494
aauacaaagacuuucaggg

SEQ ID NO: 1341496 - RNA, 19 nt, Artificial Sequence
  Description of Artificial Sequence: Synthetic oligonucleotide
  Sense strand starting at position 1037 of SEQ ID NO: 1242359
ccugaaagucuuuguauua

SEQ ID NO: 1341497 - RNA, 19 nt, Artificial Sequence
  Description of Artificial Sequence: Synthetic oligonucleotide
  Antisense strand to SEQ ID NO: 1341496
uaauacaaagacuuucagg

SEQ ID NO: 1341498 - RNA, 19 nt, Artificial Sequence
  Description of Artificial Sequence: Synthetic oligonucleotide
  Sense strand starting at position 1038 of SEQ ID NO: 1242359
cugaaagucuuuguauuau

SEQ ID NO: 1341499 - RNA, 19 nt, Artificial Sequence
  Description of Artificial Sequence: Synthetic oligonucleotide
  Antisense strand to SEQ ID NO: 1341498
auaauacaaagacuuucag

SEQ ID NO: 1341500 - RNA, 19 nt, Artificial Sequence
  Description of Artificial Sequence: Synthetic oligonucleotide
  Sense strand starting at position 1047 of SEQ ID NO: 1242359
uuuguauuaucuccuacag

SEQ ID NO: 1341501 - RNA, 19 nt, Artificial Sequence
  Description of Artificial Sequence: Synthetic oligonucleotide
  Antisense strand to SEQ ID NO: 1341500
cuguaggagauaauacaaa

SEQ ID NO: 1341502 - RNA, 19 nt, Artificial Sequence
  Description of Artificial Sequence: Synthetic oligonucleotide
  Sense strand starting at position 1468 of SEQ ID NO: 1242359
ggaguauggaggugucaga

SEQ ID NO: 1341503 - RNA, 19 nt, Artificial Sequence
  Description of Artificial Sequence: Synthetic oligonucleotide
  Antisense strand to SEQ ID NO: 1341502
ucugacaccuccauacucc

SEQ ID NO: 1341504 - RNA, 19 nt, Artificial Sequence
  Description of Artificial Sequence: Synthetic oligonucleotide
  Sense strand starting at position 2724 of SEQ ID NO: 1242359
gagggugauuguccacuua

SEQ ID NO: 1341505 - RNA, 19 nt, Artificial Sequence
  Description of Artificial Sequence: Synthetic oligonucleotide
  Antisense strand to SEQ ID NO: 1341504
uaaguggacaaucacccuc

SEQ ID NO: 1341506 - RNA, 19 nt, Artificial Sequence
  Description of Artificial Sequence: Synthetic oligonucleotide
  Sense strand starting at position 2750 of SEQ ID NO: 1242359
guuugcaacucccuggaua

SEQ ID NO: 1341507 - RNA, 19 nt, Artificial Sequence
  Description of Artificial Sequence: Synthetic oligonucleotide
  Antisense strand to SEQ ID NO: 1341506
uauccagggaguugcaaac

SEQ ID NO: 1341508 - RNA, 19 nt, Artificial Sequence
  Description of Artificial Sequence: Synthetic oligonucleotide
  Sense strand starting at position 2761 of SEQ ID NO: 1242359
ccuggauaguccuuucuac

SEQ ID NO: 1341509 - RNA, 19 nt, Artificial Sequence
  Description of Artificial Sequence: Synthetic oligonucleotide
  Antisense strand to SEQ ID NO: 1341508
guagaaaggacuauccagg

SEQ ID NO: 1341510 - RNA, 19 nt, Artificial Sequence
  Description of Artificial Sequence: Synthetic oligonucleotide
  Sense strand starting at position 3134 of SEQ ID NO: 1242359
cuguuugauggccgagaag

SEQ ID NO: 1341511 - RNA, 19 nt, Artificial Sequence
  Description of Artificial Sequence: Synthetic oligonucleotide
  Antisense strand to SEQ ID NO: 1341510
cuucucggccaucaaacag

SEQ ID NO: 1341512 - RNA, 19 nt, Artificial Sequence
  Description of Artificial Sequence: Synthetic oligonucleotide
  Sense strand starting at position 3136 of SEQ ID NO: 1242359
guuugauggccgagaagcu

SEQ ID NO: 1341513 - RNA, 19 nt, Artificial Sequence
  Description of Artificial Sequence: Synthetic oligonucleotide
  Antisense strand to SEQ ID NO: 1341512
agcuucucggccaucaaac

SEQ ID NO: 1341514 - RNA, 19 nt, Artificial Sequence
  Description of Artificial Sequence: Synthetic oligonucleotide
  Sense strand starting at position 3192 of SEQ ID NO: 1242359
gauguagauuuaggaggaa

SEQ ID NO: 1341515 - RNA, 19 nt, Artificial Sequence
  Description of Artificial Sequence: Synthetic oligonucleotide
  Antisense strand to SEQ ID NO: 1341514
uuccuccuaaaucuacauc

SEQ ID NO: 1341516 - RNA, 19 nt, Artificial Sequence
  Description of Artificial Sequence: Synthetic oligonucleotide
  Sense strand starting at position 3226 of SEQ ID NO: 1242359
ugguaauucugggcugaug

SEQ ID NO: 1341517 - RNA, 19 nt, Artificial Sequence
  Description of Artificial Sequence: Synthetic oligonucleotide
  Antisense strand to SEQ ID NO: 1341516
caucagcccagaauuacca

SEQ ID NO: 1341518 - RNA, 19 nt, Artificial Sequence
  Description of Artificial Sequence: Synthetic oligonucleotide
  Sense strand starting at position 3228 of SEQ ID NO: 1242359
guaauucugggcugaugau

SEQ ID NO: 1341519 - RNA, 19 nt, Artificial Sequence
  Description of Artificial Sequence: Synthetic oligonucleotide
  Antisense strand to SEQ ID NO: 1341518
aucaucagcccagaauuac

SEQ ID NO: 1341520 - RNA, 19 nt, Artificial Sequence
  Description of Artificial Sequence: Synthetic oligonucleotide
  Sense strand starting at position 3305 of SEQ ID NO: 1242359
gacgacaucuaucucuuga

SEQ ID NO: 1341521 - RNA, 19 nt, Artificial Sequence
  Description of Artificial Sequence: Synthetic oligonucleotide
  Antisense strand to SEQ ID NO: 1341520
ucaagagauagaugucguc

SEQ ID NO: 1341522 - RNA, 19 nt, Artificial Sequence
  Description of Artificial Sequence: Synthetic oligonucleotide
  Sense strand starting at position 3307 of SEQ ID NO: 1242359
cgacaucuaucucuugaug

SEQ ID NO: 1341523 - RNA, 19 nt, Artificial Sequence
  Description of Artificial Sequence: Synthetic oligonucleotide
  Antisense strand to SEQ ID NO: 1341522
caucaagagauagaugucg

SEQ ID NO: 1341524 - RNA, 19 nt, Artificial Sequence
  Description of Artificial Sequence: Synthetic oligonucleotide
  Sense strand starting at position 3318 of SEQ ID NO: 1242359
ucuugaugcuaccuuaaga

SEQ ID NO: 1341525 - RNA, 19 nt, Artificial Sequence
  Description of Artificial Sequence: Synthetic oligonucleotide
  Antisense strand to SEQ ID NO: 1341524
ucuuaagguagcaucaaga

SEQ ID NO: 1341526 - RNA, 19 nt, Artificial Sequence
  Description of Artificial Sequence: Synthetic oligonucleotide
  Sense strand starting at position 3405 of SEQ ID NO: 1242359
cuuguauuguacucaaacu

SEQ ID NO: 1341527 - RNA, 19 nt, Artificial Sequence
  Description of Artificial Sequence: Synthetic oligonucleotide
  Antisense strand to SEQ ID NO: 1341526
aguuugaguacaauacaag

SEQ ID NO: 1341528 - RNA, 19 nt, Artificial Sequence
  Description of Artificial Sequence: Synthetic oligonucleotide
  Sense strand starting at position 3462 of SEQ ID NO: 1242359
cugaaacccgccuagaaua

SEQ ID NO: 1341529 - RNA, 19 nt, Artificial Sequence
  Description of Artificial Sequence: Synthetic oligonucleotide
  Antisense strand to SEQ ID NO: 1341528
uauucuaggcggguuucag

SEQ ID NO: 1341530 - RNA, 19 nt, Artificial Sequence
  Description of Artificial Sequence: Synthetic oligonucleotide
  Sense strand starting at position 3482 of SEQ ID NO: 1242359
gucaaaccaucuguacauu

SEQ ID NO: 1341531 - RNA, 19 nt, Artificial Sequence
  Description of Artificial Sequence: Synthetic oligonucleotide
  Antisense strand to SEQ ID NO: 1341530
aauguacagaugguuugac

SEQ ID NO: 1341532 - RNA, 19 nt, Artificial Sequence
  Description of Artificial Sequence: Synthetic oligonucleotide
  Sense strand starting at position 3622 of SEQ ID NO: 1242359
gagccuaugucaucuuuga

SEQ ID NO: 1341533 - RNA, 19 nt, Artificial Sequence
  Description of Artificial Sequence: Synthetic oligonucleotide
  Antisense strand to SEQ ID NO: 1341532
ucaaagaugacauaggcuc

SEQ ID NO: 1341534 - RNA, 19 nt, Artificial Sequence
  Description of Artificial Sequence: Synthetic oligonucleotide
  Sense strand starting at position 3630 of SEQ ID NO: 1242359
gucaucuuugauggccaua

SEQ ID NO: 1341535 - RNA, 19 nt, Artificial Sequence
  Description of Artificial Sequence: Synthetic oligonucleotide
  Antisense strand to SEQ ID NO: 1341534
uauggccaucaaagaugac

SEQ ID NO: 1341536 - RNA, 19 nt, Artificial Sequence
  Description of Artificial Sequence: Synthetic oligonucleotide
  Sense strand starting at position 3633 of SEQ ID NO: 1242359
aucuuugauggccauauga

SEQ ID NO: 1341537 - RNA, 19 nt, Artificial Sequence
  Description of Artificial Sequence: Synthetic oligonucleotide
  Antisense strand to SEQ ID NO: 1341536
ucauauggccaucaaagau

SEQ ID NO: 1341538 - RNA, 19 nt, Artificial Sequence
  Description of Artificial Sequence: Synthetic oligonucleotide
  Sense strand starting at position 3663 of SEQ ID NO: 1242359
ggucuucuuccugaauugu

SEQ ID NO: 1341539 - RNA, 19 nt, Artificial Sequence
  Description of Artificial Sequence: Synthetic oligonucleotide
  Antisense strand to SEQ ID NO: 1341538
acaauucaggaagaagacc

SEQ ID NO: 1341540 - RNA, 19 nt, Artificial Sequence
  Description of Artificial Sequence: Synthetic oligonucleotide
  Sense strand starting at position 3712 of SEQ ID NO: 1242359
uuaugugcagccuaauauu

SEQ ID NO: 1341541 - RNA, 19 nt, Artificial Sequence
  Description of Artificial Sequence: Synthetic oligonucleotide
  Antisense strand to SEQ ID NO: 1341540
aauauuaggcugcacauaa

SEQ ID NO: 1341542 - RNA, 19 nt, Artificial Sequence
  Description of Artificial Sequence: Synthetic oligonucleotide
  Sense strand starting at position 3766 of SEQ ID NO: 1242359
uguguuuggaguuaacuag

SEQ ID NO: 1341543 - RNA, 19 nt, Artificial Sequence
  Description of Artificial Sequence: Synthetic oligonucleotide
  Antisense strand to SEQ ID NO: 1341542
cuaguuaacuccaaacaca

SEQ ID NO: 1341544 - RNA, 19 nt, Artificial Sequence
  Description of Artificial Sequence: Synthetic oligonucleotide
  Sense strand starting at position 763 of SEQ ID NO: 1242360
ggaagauuguuucuuccuu

SEQ ID NO: 1341545 - RNA, 19 nt, Artificial Sequence
  Description of Artificial Sequence: Synthetic oligonucleotide
  Antisense strand to SEQ ID NO: 1341544
aaggaagaaacaaucuucc

SEQ ID NO: 1341546 - RNA, 19 nt, Artificial Sequence
  Description of Artificial Sequence: Synthetic oligonucleotide
  Sense strand starting at position 1031 of SEQ ID NO: 1242360
cggaaaucgugccaaugca

SEQ ID NO: 1341547 - RNA, 19 nt, Artificial Sequence
  Description of Artificial Sequence: Synthetic oligonucleotide
  Antisense strand to SEQ ID NO: 1341546
ugcauuggcacgauuuccg

SEQ ID NO: 1341548 - RNA, 19 nt, Artificial Sequence
  Description of Artificial Sequence: Synthetic oligonucleotide
  Sense strand starting at position 1117 of SEQ ID NO: 1242360
gucagugcaucucaacuau

SEQ ID NO: 1341549 - RNA, 19 nt, Artificial Sequence
  Description of Artificial Sequence: Synthetic oligonucleotide
  Antisense strand to SEQ ID NO: 1341548
auaguugagaugcacugac

SEQ ID NO: 1341550 - RNA, 19 nt, Artificial Sequence
  Description of Artificial Sequence: Synthetic oligonucleotide
  Sense strand starting at position 1229 of SEQ ID NO: 1242360
gcucuccuaucuggucaaa

SEQ ID NO: 1341551 - RNA, 19 nt, Artificial Sequence
  Description of Artificial Sequence: Synthetic oligonucleotide
  Antisense strand to SEQ ID NO: 1341550
uuugaccagauaggagagc

SEQ ID NO: 1341552 - RNA, 19 nt, Artificial Sequence
  Description of Artificial Sequence: Synthetic oligonucleotide
  Sense strand starting at position 1488 of SEQ ID NO: 1242360
cuucuaaagugacucaaga

SEQ ID NO: 1341553 - RNA, 19 nt, Artificial Sequence
  Description of Artificial Sequence: Synthetic oligonucleotide
  Antisense strand to SEQ ID NO: 1341552
ucuugagucacuuuagaag

SEQ ID NO: 1341554 - RNA, 19 nt, Artificial Sequence
  Description of Artificial Sequence: Synthetic oligonucleotide
  Sense strand starting at position 1506 of SEQ ID NO: 1242360
acaggugucuauccaagaa

SEQ ID NO: 1341555 - RNA, 19 nt, Artificial Sequence
  Description of Artificial Sequence: Synthetic oligonucleotide
  Antisense strand to SEQ ID NO: 1341554
uucuuggauagacaccugu

SEQ ID NO: 1341556 - RNA, 19 nt, Artificial Sequence
  Description of Artificial Sequence: Synthetic oligonucleotide
  Sense strand starting at position 2335 of SEQ ID NO: 1242360
agaccaaguuugggaagaa

SEQ ID NO: 1341557 - RNA, 19 nt, Artificial Sequence
  Description of Artificial Sequence: Synthetic oligonucleotide
  Antisense strand to SEQ ID NO: 1341556
uucuucccaaacuuggucu

SEQ ID NO: 1341558 - RNA, 19 nt, Artificial Sequence
  Description of Artificial Sequence: Synthetic oligonucleotide
  Sense strand starting at position 2359 of SEQ ID NO: 1242360
aacugaucccugggcaaag

SEQ ID NO: 1341559 - RNA, 19 nt, Artificial Sequence
  Description of Artificial Sequence: Synthetic oligonucleotide
  Antisense strand to SEQ ID NO: 1341558
cuuugcccagggaucaguu

SEQ ID NO: 1341560 - RNA, 19 nt, Artificial Sequence
  Description of Artificial Sequence: Synthetic oligonucleotide
  Sense strand starting at position 2397 of SEQ ID NO: 1242360
gccagaggccuugggagaa

SEQ ID NO: 1341561 - RNA, 19 nt, Artificial Sequence
  Description of Artificial Sequence: Synthetic oligonucleotide
  Antisense strand to SEQ ID NO: 1341560
uucucccaaggccucuggc

SEQ ID NO: 1341562 - RNA, 19 nt, Artificial Sequence
  Description of Artificial Sequence: Synthetic oligonucleotide
  Sense strand starting at position 2422 of SEQ ID NO: 1242360
aagcgcuucuucugcagaa

SEQ ID NO: 1341563 - RNA, 19 nt, Artificial Sequence
  Description of Artificial Sequence: Synthetic oligonucleotide
  Antisense strand to SEQ ID NO: 1341562
uucugcagaagaagcgcuu

SEQ ID NO: 1341564 - RNA, 19 nt, Artificial Sequence
  Description of Artificial Sequence: Synthetic oligonucleotide
  Sense strand starting at position 2454 of SEQ ID NO: 1242360
agagaagugccaggaccau

SEQ ID NO: 1341565 - RNA, 19 nt, Artificial Sequence
  Description of Artificial Sequence: Synthetic oligonucleotide
  Antisense strand to SEQ ID NO: 1341564
augguccuggcacuucucu

SEQ ID NO: 1341566 - RNA, 19 nt, Artificial Sequence
  Description of Artificial Sequence: Synthetic oligonucleotide
  Sense strand starting at position 2618 of SEQ ID NO: 1242360
ugaagugacucacggaauu

SEQ ID NO: 1341567 - RNA, 19 nt, Artificial Sequence
  Description of Artificial Sequence: Synthetic oligonucleotide
  Antisense strand to SEQ ID NO: 1341566
aauuccgugagucacuuca

SEQ ID NO: 1341568 - RNA, 19 nt, Artificial Sequence
  Description of Artificial Sequence: Synthetic oligonucleotide
  Sense strand starting at position 2955 of SEQ ID NO: 1242360
augcuaggauuauacucau

SEQ ID NO: 1341569 - RNA, 19 nt, Artificial Sequence
  Description of Artificial Sequence: Synthetic oligonucleotide
  Antisense strand to SEQ ID NO: 1341568
augaguauaauccuagcau

SEQ ID NO: 1341570 - RNA, 19 nt, Artificial Sequence
  Description of Artificial Sequence: Synthetic oligonucleotide
  Sense strand starting at position 2961 of SEQ ID NO: 1242360
ggauuauacucaugaacca

SEQ ID NO: 1341571 - RNA, 19 nt, Artificial Sequence
  Description of Artificial Sequence: Synthetic oligonucleotide
  Antisense strand to SEQ ID NO: 1341570
ugguucaugaguauaaucc

SEQ ID NO: 1341572 - RNA, 19 nt, Artificial Sequence
  Description of Artificial Sequence: Synthetic oligonucleotide
  Sense strand starting at position 3006 of SEQ ID NO: 1242360
uuuggaucugucugguauu

SEQ ID NO: 1341573 - RNA, 19 nt, Artificial Sequence
  Description of Artificial Sequence: Synthetic oligonucleotide
  Antisense strand to SEQ ID NO: 1341572
aauaccagacagauccaaa

SEQ ID NO: 1341574 - RNA, 19 nt, Artificial Sequence
  Description of Artificial Sequence: Synthetic oligonucleotide
  Sense strand starting at position 3007 of SEQ ID NO: 1242360
uuggaucugucugguauua

SEQ ID NO: 1341575 - RNA, 19 nt, Artificial Sequence
  Description of Artificial Sequence: Synthetic oligonucleotide
  Antisense strand to SEQ ID NO: 1341574
uaauaccagacagauccaa

SEQ ID NO: 1341576 - RNA, 19 nt, Artificial Sequence
  Description of Artificial Sequence: Synthetic oligonucleotide
  Sense strand starting at position 3009 of SEQ ID NO: 1242360
ggaucugucugguauuauu

SEQ ID NO: 1341577 - RNA, 19 nt, Artificial Sequence
  Description of Artificial Sequence: Synthetic oligonucleotide
  Antisense strand to SEQ ID NO: 1341576
aauaauaccagacagaucc

SEQ ID NO: 1341578 - RNA, 19 nt, Artificial Sequence
  Description of Artificial Sequence: Synthetic oligonucleotide
  Sense strand starting at position 3072 of SEQ ID NO: 1242360
gaacuaauacagugcuguu

SEQ ID NO: 1341579 - RNA, 19 nt, Artificial Sequence
  Description of Artificial Sequence: Synthetic oligonucleotide
  Antisense strand to SEQ ID NO: 1341578
aacagcacuguauuaguuc

SEQ ID NO: 1341580 - RNA, 19 nt, Artificial Sequence
  Description of Artificial Sequence: Synthetic oligonucleotide
  Sense strand starting at position 3075 of SEQ ID NO: 1242360
cuaauacagugcuguuaau

SEQ ID NO: 1341581 - RNA, 19 nt, Artificial Sequence
  Description of Artificial Sequence: Synthetic oligonucleotide
  Antisense strand to SEQ ID NO: 1341580
auuaacagcacuguauuag

SEQ ID NO: 1341582 - RNA, 19 nt, Artificial Sequence
  Description of Artificial Sequence: Synthetic oligonucleotide
  Sense strand starting at position 3082 of SEQ ID NO: 1242360
agugcuguuaauuggucua

SEQ ID NO: 1341583 - RNA, 19 nt, Artificial Sequence
  Description of Artificial Sequence: Synthetic oligonucleotide
  Antisense strand to SEQ ID NO: 1341582
uagaccaauuaacagcacu

SEQ ID NO: 1341584 - RNA, 19 nt, Artificial Sequence
  Description of Artificial Sequence: Synthetic oligonucleotide
  Sense strand starting at position 3084 of SEQ ID NO: 1242360
ugcuguuaauuggucuauu

SEQ ID NO: 1341585 - RNA, 19 nt, Artificial Sequence
  Description of Artificial Sequence: Synthetic oligonucleotide
  Antisense strand to SEQ ID NO: 1341584
aauagaccaauuaacagca

SEQ ID NO: 1341586 - RNA, 19 nt, Artificial Sequence
  Description of Artificial Sequence: Synthetic oligonucleotide
  Sense strand starting at position 3085 of SEQ ID NO: 1242360
gcuguuaauuggucuauug

SEQ ID NO: 1341587 - RNA, 19 nt, Artificial Sequence
  Description of Artificial Sequence: Synthetic oligonucleotide
  Antisense strand to SEQ ID NO: 1341586
caauagaccaauuaacagc

SEQ ID NO: 1341588 - RNA, 19 nt, Artificial Sequence
  Description of Artificial Sequence: Synthetic oligonucleotide
  Sense strand starting at position 3796 of SEQ ID NO: 1242360
cuaagauugcaacauugca

SEQ ID NO: 1341589 - RNA, 19 nt, Artificial Sequence
  Description of Artificial Sequence: Synthetic oligonucleotide
  Antisense strand to SEQ ID NO: 1341588
ugcaauguugcaaucuuag

SEQ ID NO: 1341590 - RNA, 19 nt, Artificial Sequence
  Description of Artificial Sequence: Synthetic oligonucleotide
  Sense strand starting at position 16 of SEQ ID NO: 1242361
uugagucagucauugggca

SEQ ID NO: 1341591 - RNA, 19 nt, Artificial Sequence
  Description of Artificial Sequence: Synthetic oligonucleotide
  Antisense strand to SEQ ID NO: 1341590
ugcccaaugacugacucaa

SEQ ID NO: 1341592 - RNA, 19 nt, Artificial Sequence
  Description of Artificial Sequence: Synthetic oligonucleotide
  Sense strand starting at position 18 of SEQ ID NO: 1242361
gagucagucauugggcacu

SEQ ID NO: 1341593 - RNA, 19 nt, Artificial Sequence
  Description of Artificial Sequence: Synthetic oligonucleotide
  Antisense strand to SEQ ID NO: 1341592
agugcccaaugacugacuc

SEQ ID NO: 1341594 - RNA, 19 nt, Artificial Sequence
  Description of Artificial Sequence: Synthetic oligonucleotide
  Sense strand starting at position 20 of SEQ ID NO: 1242361
gucagucauugggcacuaa

SEQ ID NO: 1341595 - RNA, 19 nt, Artificial Sequence
  Description of Artificial Sequence: Synthetic oligonucleotide
  Antisense strand to SEQ ID NO: 1341594
uuagugcccaaugacugac

SEQ ID NO: 1341596 - RNA, 19 nt, Artificial Sequence
  Description of Artificial Sequence: Synthetic oligonucleotide
  Sense strand starting at position 130 of SEQ ID NO: 1242361
ugcuuaagacuuggacacu

SEQ ID NO: 1341597 - RNA, 19 nt, Artificial Sequence
  Description of Artificial Sequence: Synthetic oligonucleotide
  Antisense strand to SEQ ID NO: 1341596
aguguccaagucuuaagca

SEQ ID NO: 1341598 - RNA, 19 nt, Artificial Sequence
  Description of Artificial Sequence: Synthetic oligonucleotide
  Sense strand starting at position 426 of SEQ ID NO: 1242361
gucacuacuuaguccuauu

SEQ ID NO: 1341599 - RNA, 19 nt, Artificial Sequence
  Description of Artificial Sequence: Synthetic oligonucleotide
  Antisense strand to SEQ ID NO: 1341598
aauaggacuaaguagugac

SEQ ID NO: 1341600 - RNA, 19 nt, Artificial Sequence
  Description of Artificial Sequence: Synthetic oligonucleotide
  Sense strand starting at position 456 of SEQ ID NO: 1242361
agagaaaggugcuagaaag

SEQ ID NO: 1341601 - RNA, 19 nt, Artificial Sequence
  Description of Artificial Sequence: Synthetic oligonucleotide
  Antisense strand to SEQ ID NO: 1341600
cuuucuagcaccuuucucu

SEQ ID NO: 1341602 - RNA, 19 nt, Artificial Sequence
  Description of Artificial Sequence: Synthetic oligonucleotide
  Sense strand starting at position 664 of SEQ ID NO: 1242361
cucucagcucuagagacuu

SEQ ID NO: 1341603 - RNA, 19 nt, Artificial Sequence
  Description of Artificial Sequence: Synthetic oligonucleotide
  Antisense strand to SEQ ID NO: 1341602
aagucucuagagcugagag

SEQ ID NO: 1341604 - RNA, 19 nt, Artificial Sequence
  Description of Artificial Sequence: Synthetic oligonucleotide
  Sense strand starting at position 672 of SEQ ID NO: 1242361
ucuagagacuuugcccuaa

SEQ ID NO: 1341605 - RNA, 19 nt, Artificial Sequence
  Description of Artificial Sequence: Synthetic oligonucleotide
  Antisense strand to SEQ ID NO: 1341604
uuagggcaaagucucuaga

SEQ ID NO: 1341606 - RNA, 19 nt, Artificial Sequence
  Description of Artificial Sequence: Synthetic oligonucleotide
  Sense strand starting at position 676 of SEQ ID NO: 1242361
gagacuuugcccuaaggcu

SEQ ID NO: 1341607 - RNA, 19 nt, Artificial Sequence
  Description of Artificial Sequence: Synthetic oligonucleotide
  Antisense strand to SEQ ID NO: 1341606
agccuuagggcaaagucuc

SEQ ID NO: 1341608 - RNA, 19 nt, Artificial Sequence
  Description of Artificial Sequence: Synthetic oligonucleotide
  Sense strand starting at position 924 of SEQ ID NO: 1242361
ugugccuuugcccauacau

SEQ ID NO: 1341609 - RNA, 19 nt, Artificial Sequence
  Description of Artificial Sequence: Synthetic oligonucleotide
  Antisense strand to SEQ ID NO: 1341608
auguaugggcaaaggcaca

SEQ ID NO: 1341610 - RNA, 19 nt, Artificial Sequence
  Description of Artificial Sequence: Synthetic oligonucleotide
  Sense strand starting at position 1087 of SEQ ID NO: 1242361
cugggacauuacuuguuua

SEQ ID NO: 1341611 - RNA, 19 nt, Artificial Sequence
  Description of Artificial Sequence: Synthetic oligonucleotide
  Antisense strand to SEQ ID NO: 1341610
uaaacaaguaaugucccag

SEQ ID NO: 1341612 - RNA, 19 nt, Artificial Sequence
  Description of Artificial Sequence: Synthetic oligonucleotide
  Sense strand starting at position 1090 of SEQ ID NO: 1242361
ggacauuacuuguuuaagc

SEQ ID NO: 1341613 - RNA, 19 nt, Artificial Sequence
  Description of Artificial Sequence: Synthetic oligonucleotide
  Antisense strand to SEQ ID NO: 1341612
gcuuaaacaaguaaugucc

SEQ ID NO: 1341614 - RNA, 19 nt, Artificial Sequence
  Description of Artificial Sequence: Synthetic oligonucleotide
  Sense strand starting at position 1187 of SEQ ID NO: 1242361
ggacaaggaucgguucaca

SEQ ID NO: 1341615 - RNA, 19 nt, Artificial Sequence
  Description of Artificial Sequence: Synthetic oligonucleotide
  Antisense strand to SEQ ID NO: 1341614
ugugaaccgauccuugucc

SEQ ID NO: 1341616 - RNA, 19 nt, Artificial Sequence
  Description of Artificial Sequence: Synthetic oligonucleotide
  Sense strand starting at position 1417 of SEQ ID NO: 1242361
ggcgcuaguuggaaggaaa

SEQ ID NO: 1341617 - RNA, 19 nt, Artificial Sequence
  Description of Artificial Sequence: Synthetic oligonucleotide
  Antisense strand to SEQ ID NO: 1341616
uuuccuuccaacuagcgcc

SEQ ID NO: 1341618 - RNA, 19 nt, Artificial Sequence
  Description of Artificial Sequence: Synthetic oligonucleotide
  Sense strand starting at position 2041 of SEQ ID NO: 1242361
agucacucucgcgagacuu

SEQ ID NO: 1341619 - RNA, 19 nt, Artificial Sequence
  Description of Artificial Sequence: Synthetic oligonucleotide
  Antisense strand to SEQ ID NO: 1341618
aagucucgcgagagugacu

SEQ ID NO: 1341620 - RNA, 19 nt, Artificial Sequence
  Description of Artificial Sequence: Synthetic oligonucleotide
  Sense strand starting at position 2130 of SEQ ID NO: 1242361
ggagcuguccgaggugcua

SEQ ID NO: 1341621 - RNA, 19 nt, Artificial Sequence
  Description of Artificial Sequence: Synthetic oligonucleotide
  Antisense strand to SEQ ID NO: 1341620
uagcaccucggacagcucc

SEQ ID NO: 1341622 - RNA, 19 nt, Artificial Sequence
  Description of Artificial Sequence: Synthetic oligonucleotide
  Sense strand starting at position 2377 of SEQ ID NO: 1242361
ugcggaagguccuucagau

SEQ ID NO: 1341623 - RNA, 19 nt, Artificial Sequence
  Description of Artificial Sequence: Synthetic oligonucleotide
  Antisense strand to SEQ ID NO: 1341622
aucugaaggaccuuccgca

SEQ ID NO: 1341624 - RNA, 19 nt, Artificial Sequence
  Description of Artificial Sequence: Synthetic oligonucleotide
  Sense strand starting at position 2738 of SEQ ID NO: 1242361
agagaugaauaccaagaga

SEQ ID NO: 1341625 - RNA, 19 nt, Artificial Sequence
  Description of Artificial Sequence: Synthetic oligonucleotide
  Antisense strand to SEQ ID NO: 1341624
ucucuugguauucaucucu

SEQ ID NO: 1341626 - RNA, 19 nt, Artificial Sequence
  Description of Artificial Sequence: Synthetic oligonucleotide
  Sense strand starting at position 2850 of SEQ ID NO: 1242361
uuuauugugauugguguuu

SEQ ID NO: 1341627 - RNA, 19 nt, Artificial Sequence
  Description of Artificial Sequence: Synthetic oligonucleotide
  Antisense strand to SEQ ID NO: 1341626
aaacaccaaucacaauaaa

SEQ ID NO: 1341628 - RNA, 19 nt, Artificial Sequence
  Description of Artificial Sequence: Synthetic oligonucleotide
  Sense strand starting at position 2871 of SEQ ID NO: 1242361
auaguaaaccuccguggga

SEQ ID NO: 1341629 - RNA, 19 nt, Artificial Sequence
  Description of Artificial Sequence: Synthetic oligonucleotide
  Antisense strand to SEQ ID NO: 1341628
ucccacggagguuuacuau

SEQ ID NO: 1341630 - RNA, 19 nt, Artificial Sequence
  Description of Artificial Sequence: Synthetic oligonucleotide
  Sense strand starting at position 2872 of SEQ ID NO: 1242361
uaguaaaccuccgugggau

SEQ ID NO: 1341631 - RNA, 19 nt, Artificial Sequence
  Description of Artificial Sequence: Synthetic oligonucleotide
  Antisense strand to SEQ ID NO: 1341630
aucccacggagguuuacua

SEQ ID NO: 1341632 - RNA, 19 nt, Artificial Sequence
  Description of Artificial Sequence: Synthetic oligonucleotide
  Sense strand starting at position 2873 of SEQ ID NO: 1242361
aguaaaccuccgugggauc

SEQ ID NO: 1341633 - RNA, 19 nt, Artificial Sequence
  Description of Artificial Sequence: Synthetic oligonucleotide
  Antisense strand to SEQ ID NO: 1341632
gaucccacggagguuuacu

SEQ ID NO: 1341634 - RNA, 19 nt, Artificial Sequence
  Description of Artificial Sequence: Synthetic oligonucleotide
  Sense strand starting at position 3026 of SEQ ID NO: 1242361
cagggauucuuugccuaga

SEQ ID NO: 1341635 - RNA, 19 nt, Artificial Sequence
  Description of Artificial Sequence: Synthetic oligonucleotide
  Antisense strand to SEQ ID NO: 1341634
ucuaggcaaagaaucccug

SEQ ID NO: 1341636 - RNA, 19 nt, Artificial Sequence
  Description of Artificial Sequence: Synthetic oligonucleotide
  Sense strand starting at position 3027 of SEQ ID NO: 1242361
agggauucuuugccuagaa

SEQ ID NO: 1341637 - RNA, 19 nt, Artificial Sequence
  Description of Artificial Sequence: Synthetic oligonucleotide
  Antisense strand to SEQ ID NO: 1341636
uucuaggcaaagaaucccu

SEQ ID NO: 1341638 - RNA, 19 nt, Artificial Sequence
  Description of Artificial Sequence: Synthetic oligonucleotide
  Sense strand starting at position 3028 of SEQ ID NO: 1242361
gggauucuuugccuagaau

SEQ ID NO: 1341639 - RNA, 19 nt, Artificial Sequence
  Description of Artificial Sequence: Synthetic oligonucleotide
  Antisense strand to SEQ ID NO: 1341638
auucuaggcaaagaauccc

SEQ ID NO: 1341640 - RNA, 19 nt, Artificial Sequence
  Description of Artificial Sequence: Synthetic oligonucleotide
  Sense strand starting at position 3029 of SEQ ID NO: 1242361
ggauucuuugccuagaaua

SEQ ID NO: 1341641 - RNA, 19 nt, Artificial Sequence
  Description of Artificial Sequence: Synthetic oligonucleotide
  Antisense strand to SEQ ID NO: 1341640
uauucuaggcaaagaaucc

SEQ ID NO: 1341642 - RNA, 19 nt, Artificial Sequence
  Description of Artificial Sequence: Synthetic oligonucleotide
  Sense strand starting at position 3031 of SEQ ID NO: 1242361
auucuuugccuagaauaag

SEQ ID NO: 1341643 - RNA, 19 nt, Artificial Sequence
  Description of Artificial Sequence: Synthetic oligonucleotide
  Antisense strand to SEQ ID NO: 1341642
cuuauucuaggcaaagaau

SEQ ID NO: 1341644 - RNA, 19 nt, Artificial Sequence
  Description of Artificial Sequence: Synthetic oligonucleotide
  Sense strand starting at position 3279 of SEQ ID NO: 1242361
caguccugucccugguuga

SEQ ID NO: 1341645 - RNA, 19 nt, Artificial Sequence
  Description of Artificial Sequence: Synthetic oligonucleotide
  Antisense strand to SEQ ID NO: 1341644
ucaaccagggacaggacug

SEQ ID NO: 1341646 - RNA, 19 nt, Artificial Sequence
  Description of Artificial Sequence: Synthetic oligonucleotide
  Sense strand starting at position 3379 of SEQ ID NO: 1242361
ugggaaccugucgaaguua

SEQ ID NO: 1341647 - RNA, 19 nt, Artificial Sequence
  Description of Artificial Sequence: Synthetic oligonucleotide
  Antisense strand to SEQ ID NO: 1341646
uaacuucgacagguuccca

SEQ ID NO: 1341648 - RNA, 19 nt, Artificial Sequence
  Description of Artificial Sequence: Synthetic oligonucleotide
  Sense strand starting at position 3391 of SEQ ID NO: 1242361
gaaguuaucaaguguggcu

SEQ ID NO: 1341649 - RNA, 19 nt, Artificial Sequence
  Description of Artificial Sequence: Synthetic oligonucleotide
  Antisense strand to SEQ ID NO: 1341648
agccacacuugauaacuuc

SEQ ID NO: 1341650 - RNA, 19 nt, Artificial Sequence
  Description of Artificial Sequence: Synthetic oligonucleotide
  Sense strand starting at position 3433 of SEQ ID NO: 1242361
ccaugugggccucaggaaa

SEQ ID NO: 1341651 - RNA, 19 nt, Artificial Sequence
  Description of Artificial Sequence: Synthetic oligonucleotide
  Antisense strand to SEQ ID NO: 1341650
uuuccugaggcccacaugg

SEQ ID NO: 1341652 - RNA, 19 nt, Artificial Sequence
  Description of Artificial Sequence: Synthetic oligonucleotide
  Sense strand starting at position 3597 of SEQ ID NO: 1242361
gucugaugaccacggacaa

SEQ ID NO: 1341653 - RNA, 19 nt, Artificial Sequence
  Description of Artificial Sequence: Synthetic oligonucleotide
  Antisense strand to SEQ ID NO: 1341652
uuguccguggucaucagac

SEQ ID NO: 1341654 - RNA, 19 nt, Artificial Sequence
  Description of Artificial Sequence: Synthetic oligonucleotide
  Sense strand starting at position 3787 of SEQ ID NO: 1242361
ggcauuugcugguuaccua

SEQ ID NO: 1341655 - RNA, 19 nt, Artificial Sequence
  Description of Artificial Sequence: Synthetic oligonucleotide
  Antisense strand to SEQ ID NO: 1341654
uagguaaccagcaaaugcc

SEQ ID NO: 1341656 - RNA, 19 nt, Artificial Sequence
  Description of Artificial Sequence: Synthetic oligonucleotide
  Sense strand starting at position 3795 of SEQ ID NO: 1242361
cugguuaccuaccaugaga

SEQ ID NO: 1341657 - RNA, 19 nt, Artificial Sequence
  Description of Artificial Sequence: Synthetic oligonucleotide
  Antisense strand to SEQ ID NO: 1341656
ucucaugguagguaaccag

SEQ ID NO: 1341658 - RNA, 19 nt, Artificial Sequence
  Description of Artificial Sequence: Synthetic oligonucleotide
  Sense strand starting at position 3797 of SEQ ID NO: 1242361
gguuaccuaccaugagaag

SEQ ID NO: 1341659 - RNA, 19 nt, Artificial Sequence
  Description of Artificial Sequence: Synthetic oligonucleotide
  Antisense strand to SEQ ID NO: 1341658
cuucucaugguagguaacc

SEQ ID NO: 1341660 - RNA, 19 nt, Artificial Sequence
  Description of Artificial Sequence: Synthetic oligonucleotide
  Sense strand starting at position 3817 of SEQ ID NO: 1242361
agcauacagcagugguuaa

SEQ ID NO: 1341661 - RNA, 19 nt, Artificial Sequence
  Description of Artificial Sequence: Synthetic oligonucleotide
  Antisense strand to SEQ ID NO: 1341660
uuaaccacugcuguaugcu

SEQ ID NO: 1341662 - RNA, 19 nt, Artificial Sequence
  Description of Artificial Sequence: Synthetic oligonucleotide
  Sense strand starting at position 3821 of SEQ ID NO: 1242361
uacagcagugguuaagaau

SEQ ID NO: 1341663 - RNA, 19 nt, Artificial Sequence
  Description of Artificial Sequence: Synthetic oligonucleotide
  Antisense strand to SEQ ID NO: 1341662
auucuuaaccacugcugua

SEQ ID NO: 1341664 - RNA, 19 nt, Artificial Sequence
  Description of Artificial Sequence: Synthetic oligonucleotide
  Sense strand starting at position 3830 of SEQ ID NO: 1242361
gguuaagaauaucaaccua

SEQ ID NO: 1341665 - RNA, 19 nt, Artificial Sequence
  Description of Artificial Sequence: Synthetic oligonucleotide
  Antisense strand to SEQ ID NO: 1341664
uagguugauauucuuaacc

SEQ ID NO: 1341666 - RNA, 19 nt, Artificial Sequence
  Description of Artificial Sequence: Synthetic oligonucleotide
  Sense strand starting at position 3876 of SEQ ID NO: 1242361
gugugaauuugagaaggua

SEQ ID NO: 1341667 - RNA, 19 nt, Artificial Sequence
  Description of Artificial Sequence: Synthetic oligonucleotide
  Antisense strand to SEQ ID NO: 1341666
uaccuucucaaauucacac

SEQ ID NO: 1341668 - RNA, 19 nt, Artificial Sequence
  Description of Artificial Sequence: Synthetic oligonucleotide
  Sense strand starting at position 3890 of SEQ ID NO: 1242361
agguacuaauccucacuga

SEQ ID NO: 1341669 - RNA, 19 nt, Artificial Sequence
  Description of Artificial Sequence: Synthetic oligonucleotide
  Antisense strand to SEQ ID NO: 1341668
ucagugaggauuaguaccu

SEQ ID NO: 1341670 - RNA, 19 nt, Artificial Sequence
  Description of Artificial Sequence: Synthetic oligonucleotide
  Sense strand starting at position 88 of SEQ ID NO: 1242362
uuguuacaauagucacaaa

SEQ ID NO: 1341671 - RNA, 19 nt, Artificial Sequence
  Description of Artificial Sequence: Synthetic oligonucleotide
  Antisense strand to SEQ ID NO: 1341670
uuugugacuauuguaacaa

SEQ ID NO: 1341672 - RNA, 19 nt, Artificial Sequence
  Description of Artificial Sequence: Synthetic oligonucleotide
  Sense strand starting at position 157 of SEQ ID NO: 1242362
ucggguuauguacagaugu

SEQ ID NO: 1341673 - RNA, 19 nt, Artificial Sequence
  Description of Artificial Sequence: Synthetic oligonucleotide
  Antisense strand to SEQ ID NO: 1341672
acaucuguacauaacccga

SEQ ID NO: 1341674 - RNA, 19 nt, Artificial Sequence
  Description of Artificial Sequence: Synthetic oligonucleotide
  Sense strand starting at position 159 of SEQ ID NO: 1242362
ggguuauguacagauguuu

SEQ ID NO: 1341675 - RNA, 19 nt, Artificial Sequence
  Description of Artificial Sequence: Synthetic oligonucleotide
  Antisense strand to SEQ ID NO: 1341674
aaacaucuguacauaaccc

SEQ ID NO: 1341676 - RNA, 19 nt, Artificial Sequence
  Description of Artificial Sequence: Synthetic oligonucleotide
  Sense strand starting at position 164 of SEQ ID NO: 1242362
auguacagauguuugauua

SEQ ID NO: 1341677 - RNA, 19 nt, Artificial Sequence
  Description of Artificial Sequence: Synthetic oligonucleotide
  Antisense strand to SEQ ID NO: 1341676
uaaucaaacaucuguacau

SEQ ID NO: 1341678 - RNA, 19 nt, Artificial Sequence
  Description of Artificial Sequence: Synthetic oligonucleotide
  Sense strand starting at position 165 of SEQ ID NO: 1242362
uguacagauguuugauuau

SEQ ID NO: 1341679 - RNA, 19 nt, Artificial Sequence
  Description of Artificial Sequence: Synthetic oligonucleotide
  Antisense strand to SEQ ID NO: 1341678
auaaucaaacaucuguaca

SEQ ID NO: 1341680 - RNA, 19 nt, Artificial Sequence
  Description of Artificial Sequence: Synthetic oligonucleotide
  Sense strand starting at position 339 of SEQ ID NO: 1242362
ucauguugauauguacuuu

SEQ ID NO: 1341681 - RNA, 19 nt, Artificial Sequence
  Description of Artificial Sequence: Synthetic oligonucleotide
  Antisense strand to SEQ ID NO: 1341680
aaaguacauaucaacauga

SEQ ID NO: 1341682 - RNA, 19 nt, Artificial Sequence
  Description of Artificial Sequence: Synthetic oligonucleotide
  Sense strand starting at position 377 of SEQ ID NO: 1242362
uagcuccuuguggaaagau

SEQ ID NO: 1341683 - RNA, 19 nt, Artificial Sequence
  Description of Artificial Sequence: Synthetic oligonucleotide
  Antisense strand to SEQ ID NO: 1341682
aucuuuccacaaggagcua

SEQ ID NO: 1341684 - RNA, 19 nt, Artificial Sequence
  Description of Artificial Sequence: Synthetic oligonucleotide
  Sense strand starting at position 386 of SEQ ID NO: 1242362
guggaaagauuagcuguua

SEQ ID NO: 1341685 - RNA, 19 nt, Artificial Sequence
  Description of Artificial Sequence: Synthetic oligonucleotide
  Antisense strand to SEQ ID NO: 1341684
uaacagcuaaucuuuccac

SEQ ID NO: 1341686 - RNA, 19 nt, Artificial Sequence
  Description of Artificial Sequence: Synthetic oligonucleotide
  Sense strand starting at position 387 of SEQ ID NO: 1242362
uggaaagauuagcuguuaa

SEQ ID NO: 1341687 - RNA, 19 nt, Artificial Sequence
  Description of Artificial Sequence: Synthetic oligonucleotide
  Antisense strand to SEQ ID NO: 1341686
uuaacagcuaaucuuucca

SEQ ID NO: 1341688 - RNA, 19 nt, Artificial Sequence
  Description of Artificial Sequence: Synthetic oligonucleotide
  Sense strand starting at position 687 of SEQ ID NO: 1242362
acaaguuaugcugaggcaa

SEQ ID NO: 1341689 - RNA, 19 nt, Artificial Sequence
  Description of Artificial Sequence: Synthetic oligonucleotide
  Antisense strand to SEQ ID NO: 1341688
uugccucagcauaacuugu

SEQ ID NO: 1341690 - RNA, 19 nt, Artificial Sequence
  Description of Artificial Sequence: Synthetic oligonucleotide
  Sense strand starting at position 705 of SEQ ID NO: 1242362
acuuguuagcuauaaggaa

SEQ ID NO: 1341691 - RNA, 19 nt, Artificial Sequence
  Description of Artificial Sequence: Synthetic oligonucleotide
  Antisense strand to SEQ ID NO: 1341690
uuccuuauagcuaacaagu

SEQ ID NO: 1341692 - RNA, 19 nt, Artificial Sequence
  Description of Artificial Sequence: Synthetic oligonucleotide
  Sense strand starting at position 876 of SEQ ID NO: 1242362
acaggugaauucuuguuua

SEQ ID NO: 1341693 - RNA, 19 nt, Artificial Sequence
  Description of Artificial Sequence: Synthetic oligonucleotide
  Antisense strand to SEQ ID NO: 1341692
uaaacaagaauucaccugu

SEQ ID NO: 1341694 - RNA, 19 nt, Artificial Sequence
  Description of Artificial Sequence: Synthetic oligonucleotide
  Sense strand starting at position 884 of SEQ ID NO: 1242362
auucuuguuuagcuugaaa

SEQ ID NO: 1341695 - RNA, 19 nt, Artificial Sequence
  Description of Artificial Sequence: Synthetic oligonucleotide
  Antisense strand to SEQ ID NO: 1341694
uuucaagcuaaacaagaau

SEQ ID NO: 1341696 - RNA, 19 nt, Artificial Sequence
  Description of Artificial Sequence: Synthetic oligonucleotide
  Sense strand starting at position 887 of SEQ ID NO: 1242362
cuuguuuagcuugaaacau

SEQ ID NO: 1341697 - RNA, 19 nt, Artificial Sequence
  Description of Artificial Sequence: Synthetic oligonucleotide
  Antisense strand to SEQ ID NO: 1341696
auguuucaagcuaaacaag

SEQ ID NO: 1341698 - RNA, 19 nt, Artificial Sequence
  Description of Artificial Sequence: Synthetic oligonucleotide
  Sense strand starting at position 899 of SEQ ID NO: 1242362
gaaacaucuuguguaaaga

SEQ ID NO: 1341699 - RNA, 19 nt, Artificial Sequence
  Description of Artificial Sequence: Synthetic oligonucleotide
  Antisense strand to SEQ ID NO: 1341698
ucuuuacacaagauguuuc

SEQ ID NO: 1341700 - RNA, 19 nt, Artificial Sequence
  Description of Artificial Sequence: Synthetic oligonucleotide
  Sense strand starting at position 909 of SEQ ID NO: 1242362
guguaaagauguucucaaa

SEQ ID NO: 1341701 - RNA, 19 nt, Artificial Sequence
  Description of Artificial Sequence: Synthetic oligonucleotide
  Antisense strand to SEQ ID NO: 1341700
uuugagaacaucuuuacac

SEQ ID NO: 1341702 - RNA, 19 nt, Artificial Sequence
  Description of Artificial Sequence: Synthetic oligonucleotide
  Sense strand starting at position 1359 of SEQ ID NO: 1242362
agagaaauuuggcagacaa

SEQ ID NO: 1341703 - RNA, 19 nt, Artificial Sequence
  Description of Artificial Sequence: Synthetic oligonucleotide
  Antisense strand to SEQ ID NO: 1341702
uugucugccaaauuucucu

SEQ ID NO: 1341704 - RNA, 19 nt, Artificial Sequence
  Description of Artificial Sequence: Synthetic oligonucleotide
  Sense strand starting at position 1402 of SEQ ID NO: 1242362
acgagacaguuaucacgaa

SEQ ID NO: 1341705 - RNA, 19 nt, Artificial Sequence
  Description of Artificial Sequence: Synthetic oligonucleotide
  Antisense strand to SEQ ID NO: 1341704
uucgugauaacugucucgu

SEQ ID NO: 1341706 - RNA, 19 nt, Artificial Sequence
  Description of Artificial Sequence: Synthetic oligonucleotide
  Sense strand starting at position 1406 of SEQ ID NO: 1242362
gacaguuaucacgaaccuc

SEQ ID NO: 1341707 - RNA, 19 nt, Artificial Sequence
  Description of Artificial Sequence: Synthetic oligonucleotide
  Antisense strand to SEQ ID NO: 1341706
gagguucgugauaacuguc

SEQ ID NO: 1341708 - RNA, 19 nt, Artificial Sequence
  Description of Artificial Sequence: Synthetic oligonucleotide
  Sense strand starting at position 1414 of SEQ ID NO: 1242362
ucacgaaccuccucugaua

SEQ ID NO: 1341709 - RNA, 19 nt, Artificial Sequence
  Description of Artificial Sequence: Synthetic oligonucleotide
  Antisense strand to SEQ ID NO: 1341708
uaucagaggagguucguga

SEQ ID NO: 1341710 - RNA, 19 nt, Artificial Sequence
  Description of Artificial Sequence: Synthetic oligonucleotide
  Sense strand starting at position 1992 of SEQ ID NO: 1242362
aggagaaguaccgagcuua

SEQ ID NO: 1341711 - RNA, 19 nt, Artificial Sequence
  Description of Artificial Sequence: Synthetic oligonucleotide
  Antisense strand to SEQ ID NO: 1341710
uaagcucgguacuucuccu

SEQ ID NO: 1341712 - RNA, 19 nt, Artificial Sequence
  Description of Artificial Sequence: Synthetic oligonucleotide
  Sense strand starting at position 2225 of SEQ ID NO: 1242362
cuaaucugcuggucauaau

SEQ ID NO: 1341713 - RNA, 19 nt, Artificial Sequence
  Description of Artificial Sequence: Synthetic oligonucleotide
  Antisense strand to SEQ ID NO: 1341712
auuaugaccagcagauuag

SEQ ID NO: 1341714 - RNA, 19 nt, Artificial Sequence
  Description of Artificial Sequence: Synthetic oligonucleotide
  Sense strand starting at position 2361 of SEQ ID NO: 1242362
acuaaucagcccuagaagu

SEQ ID NO: 1341715 - RNA, 19 nt, Artificial Sequence
  Description of Artificial Sequence: Synthetic oligonucleotide
  Antisense strand to SEQ ID NO: 1341714
acuucuagggcugauuagu

SEQ ID NO: 1341716 - RNA, 19 nt, Artificial Sequence
  Description of Artificial Sequence: Synthetic oligonucleotide
  Sense strand starting at position 2372 of SEQ ID NO: 1242362
cuagaagucuaauugcaaa

SEQ ID NO: 1341717 - RNA, 19 nt, Artificial Sequence
  Description of Artificial Sequence: Synthetic oligonucleotide
  Antisense strand to SEQ ID NO: 1341716
uuugcaauuagacuucuag

SEQ ID NO: 1341718 - RNA, 19 nt, Artificial Sequence
  Description of Artificial Sequence: Synthetic oligonucleotide
  Sense strand starting at position 2399 of SEQ ID NO: 1242362
agucuaucucuuuaggacu

SEQ ID NO: 1341719 - RNA, 19 nt, Artificial Sequence
  Description of Artificial Sequence: Synthetic oligonucleotide
  Antisense strand to SEQ ID NO: 1341718
aguccuaaagagauagacu

SEQ ID NO: 1341720 - RNA, 19 nt, Artificial Sequence
  Description of Artificial Sequence: Synthetic oligonucleotide
  Sense strand starting at position 2548 of SEQ ID NO: 1242362
ucuccuuacuuugucauga

SEQ ID NO: 1341721 - RNA, 19 nt, Artificial Sequence
  Description of Artificial Sequence: Synthetic oligonucleotide
  Antisense strand to SEQ ID NO: 1341720
ucaugacaaaguaaggaga

SEQ ID NO: 1341722 - RNA, 19 nt, Artificial Sequence
  Description of Artificial Sequence: Synthetic oligonucleotide
  Sense strand starting at position 2553 of SEQ ID NO: 1242362
uuacuuugucaugacuauu

SEQ ID NO: 1341723 - RNA, 19 nt, Artificial Sequence
  Description of Artificial Sequence: Synthetic oligonucleotide
  Antisense strand to SEQ ID NO: 1341722
aauagucaugacaaaguaa

SEQ ID NO: 1341724 - RNA, 19 nt, Artificial Sequence
  Description of Artificial Sequence: Synthetic oligonucleotide
  Sense strand starting at position 2556 of SEQ ID NO: 1242362
cuuugucaugacuauugga

SEQ ID NO: 1341725 - RNA, 19 nt, Artificial Sequence
  Description of Artificial Sequence: Synthetic oligonucleotide
  Antisense strand to SEQ ID NO: 1341724
uccaauagucaugacaaag

SEQ ID NO: 1341726 - RNA, 19 nt, Artificial Sequence
  Description of Artificial Sequence: Synthetic oligonucleotide
  Sense strand starting at position 2579 of SEQ ID NO: 1242362
uggaaugaagccuauguau

SEQ ID NO: 1341727 - RNA, 19 nt, Artificial Sequence
  Description of Artificial Sequence: Synthetic oligonucleotide
  Antisense strand to SEQ ID NO: 1341726
auacauaggcuucauucca

SEQ ID NO: 1341728 - RNA, 19 nt, Artificial Sequence
  Description of Artificial Sequence: Synthetic oligonucleotide
  Sense strand starting at position 2862 of SEQ ID NO: 1242362
ggacuaauaucugcaccau

SEQ ID NO: 1341729 - RNA, 19 nt, Artificial Sequence
  Description of Artificial Sequence: Synthetic oligonucleotide
  Antisense strand to SEQ ID NO: 1341728
auggugcagauauuagucc

SEQ ID NO: 1341730 - RNA, 19 nt, Artificial Sequence
  Description of Artificial Sequence: Synthetic oligonucleotide
  Sense strand starting at position 3000 of SEQ ID NO: 1242362
uagagauugcgcuaaagua

SEQ ID NO: 1341731 - RNA, 19 nt, Artificial Sequence
  Description of Artificial Sequence: Synthetic oligonucleotide
  Antisense strand to SEQ ID NO: 1341730
uacuuuagcgcaaucucua

SEQ ID NO: 1341732 - RNA, 19 nt, Artificial Sequence
  Description of Artificial Sequence: Synthetic oligonucleotide
  Sense strand starting at position 3051 of SEQ ID NO: 1242362
aucuccaaguuaucaggau

SEQ ID NO: 1341733 - RNA, 19 nt, Artificial Sequence
  Description of Artificial Sequence: Synthetic oligonucleotide
  Antisense strand to SEQ ID NO: 1341732
auccugauaacuuggagau

SEQ ID NO: 1341734 - RNA, 19 nt, Artificial Sequence
  Description of Artificial Sequence: Synthetic oligonucleotide
  Sense strand starting at position 3374 of SEQ ID NO: 1242362
uccuuaaaucuguguggga

SEQ ID NO: 1341735 - RNA, 19 nt, Artificial Sequence
  Description of Artificial Sequence: Synthetic oligonucleotide
  Antisense strand to SEQ ID NO: 1341734
ucccacacagauuuaagga

SEQ ID NO: 1341736 - RNA, 19 nt, Artificial Sequence
  Description of Artificial Sequence: Synthetic oligonucleotide
  Sense strand starting at position 3375 of SEQ ID NO: 1242362
ccuuaaaucugugugggaa

SEQ ID NO: 1341737 - RNA, 19 nt, Artificial Sequence
  Description of Artificial Sequence: Synthetic oligonucleotide
  Antisense strand to SEQ ID NO: 1341736
uucccacacagauuuaagg

SEQ ID NO: 1341738 - RNA, 19 nt, Artificial Sequence
  Description of Artificial Sequence: Synthetic oligonucleotide
  Sense strand starting at position 3376 of SEQ ID NO: 1242362
cuuaaaucugugugggaaa

SEQ ID NO: 1341739 - RNA, 19 nt, Artificial Sequence
  Description of Artificial Sequence: Synthetic oligonucleotide
  Antisense strand to SEQ ID NO: 1341738
uuucccacacagauuuaag

SEQ ID NO: 1341740 - RNA, 19 nt, Artificial Sequence
  Description of Artificial Sequence: Synthetic oligonucleotide
  Sense strand starting at position 3498 of SEQ ID NO: 1242362
uuagcauuccuggaauccu

SEQ ID NO: 1341741 - RNA, 19 nt, Artificial Sequence
  Description of Artificial Sequence: Synthetic oligonucleotide
  Antisense strand to SEQ ID NO: 1341740
aggauuccaggaaugcuaa

SEQ ID NO: 1341742 - RNA, 19 nt, Artificial Sequence
  Description of Artificial Sequence: Synthetic oligonucleotide
  Sense strand starting at position 3538 of SEQ ID NO: 1242362
ggcaauuacuaugugcaaa

SEQ ID NO: 1341743 - RNA, 19 nt, Artificial Sequence
  Description of Artificial Sequence: Synthetic oligonucleotide
  Antisense strand to SEQ ID NO: 1341742
uuugcacauaguaauugcc

SEQ ID NO: 1341744 - RNA, 19 nt, Artificial Sequence
  Description of Artificial Sequence: Synthetic oligonucleotide
  Sense strand starting at position 3613 of SEQ ID NO: 1242362
ugugcuuguccucaaagag

SEQ ID NO: 1341745 - RNA, 19 nt, Artificial Sequence
  Description of Artificial Sequence: Synthetic oligonucleotide
  Antisense strand to SEQ ID NO: 1341744
cucuuugaggacaagcaca

SEQ ID NO: 1341746 - RNA, 19 nt, Artificial Sequence
  Description of Artificial Sequence: Synthetic oligonucleotide
  Sense strand starting at position 3878 of SEQ ID NO: 1242362
ccaccugagucucuuagaa

SEQ ID NO: 1341747 - RNA, 19 nt, Artificial Sequence
  Description of Artificial Sequence: Synthetic oligonucleotide
  Antisense strand to SEQ ID NO: 1341746
uucuaagagacucaggugg

SEQ ID NO: 1341748 - RNA, 19 nt, Artificial Sequence
  Description of Artificial Sequence: Synthetic oligonucleotide
  Sense strand starting at position 3891 of SEQ ID NO: 1242362
uuagaaugcucccucuuag

SEQ ID NO: 1341749 - RNA, 19 nt, Artificial Sequence
  Description of Artificial Sequence: Synthetic oligonucleotide
  Antisense strand to SEQ ID NO: 1341748
cuaagagggagcauucuaa

SEQ ID NO: 1341750 - RNA, 19 nt, Artificial Sequence
  Description of Artificial Sequence: Synthetic oligonucleotide
  Sense strand starting at position 1181 of SEQ ID NO: 1242363
aucaguaacuaauugagua

SEQ ID NO: 1341751 - RNA, 19 nt, Artificial Sequence
  Description of Artificial Sequence: Synthetic oligonucleotide
  Antisense strand to SEQ ID NO: 1341750
uacucaauuaguuacugau

SEQ ID NO: 1341752 - RNA, 19 nt, Artificial Sequence
  Description of Artificial Sequence: Synthetic oligonucleotide
  Sense strand starting at position 1185 of SEQ ID NO: 1242363
guaacuaauugaguaaaca

SEQ ID NO: 1341753 - RNA, 19 nt, Artificial Sequence
  Description of Artificial Sequence: Synthetic oligonucleotide
  Antisense strand to SEQ ID NO: 1341752
uguuuacucaauuaguuac

SEQ ID NO: 1341754 - RNA, 19 nt, Artificial Sequence
  Description of Artificial Sequence: Synthetic oligonucleotide
  Sense strand starting at position 1306 of SEQ ID NO: 1242363
agagcaagaauaugugcuu

SEQ ID NO: 1341755 - RNA, 19 nt, Artificial Sequence
  Description of Artificial Sequence: Synthetic oligonucleotide
  Antisense strand to SEQ ID NO: 1341754
aagcacauauucuugcucu

SEQ ID NO: 1341756 - RNA, 19 nt, Artificial Sequence
  Description of Artificial Sequence: Synthetic oligonucleotide
  Sense strand starting at position 1307 of SEQ ID NO: 1242363
gagcaagaauaugugcuuu

SEQ ID NO: 1341757 - RNA, 19 nt, Artificial Sequence
  Description of Artificial Sequence: Synthetic oligonucleotide
  Antisense strand to SEQ ID NO: 1341756
aaagcacauauucuugcuc

SEQ ID NO: 1341758 - RNA, 19 nt, Artificial Sequence
  Description of Artificial Sequence: Synthetic oligonucleotide
  Sense strand starting at position 1357 of SEQ ID NO: 1242363
aggaauuaucgaggcagac

SEQ ID NO: 1341759 - RNA, 19 nt, Artificial Sequence
  Description of Artificial Sequence: Synthetic oligonucleotide
  Antisense strand to SEQ ID NO: 1341758
gucugccucgauaauuccu

SEQ ID NO: 1341760 - RNA, 19 nt, Artificial Sequence
  Description of Artificial Sequence: Synthetic oligonucleotide
  Sense strand starting at position 1420 of SEQ ID NO: 1242363
guaguuuaagaagauguuu

SEQ ID NO: 1341761 - RNA, 19 nt, Artificial Sequence
  Description of Artificial Sequence: Synthetic oligonucleotide
  Antisense strand to SEQ ID NO: 1341760
aaacaucuucuuaaacuac

SEQ ID NO: 1341762 - RNA, 19 nt, Artificial Sequence
  Description of Artificial Sequence: Synthetic oligonucleotide
  Sense strand starting at position 1468 of SEQ ID NO: 1242363
aaguaaagugugggagaca

SEQ ID NO: 1341763 - RNA, 19 nt, Artificial Sequence
  Description of Artificial Sequence: Synthetic oligonucleotide
  Antisense strand to SEQ ID NO: 1341762
ugucucccacacuuuacuu

SEQ ID NO: 1341764 - RNA, 19 nt, Artificial Sequence
  Description of Artificial Sequence: Synthetic oligonucleotide
  Sense strand starting at position 1585 of SEQ ID NO: 1242363
gagaguagguuccuuuaag

SEQ ID NO: 1341765 - RNA, 19 nt, Artificial Sequence
  Description of Artificial Sequence: Synthetic oligonucleotide
  Antisense strand to SEQ ID NO: 1341764
cuuaaaggaaccuacucuc

SEQ ID NO: 1341766 - RNA, 19 nt, Artificial Sequence
  Description of Artificial Sequence: Synthetic oligonucleotide
  Sense strand starting at position 1586 of SEQ ID NO: 1242363
agaguagguuccuuuaaga

SEQ ID NO: 1341767 - RNA, 19 nt, Artificial Sequence
  Description of Artificial Sequence: Synthetic oligonucleotide
  Antisense strand to SEQ ID NO: 1341766
ucuuaaaggaaccuacucu

SEQ ID NO: 1341768 - RNA, 19 nt, Artificial Sequence
  Description of Artificial Sequence: Synthetic oligonucleotide
  Sense strand starting at position 1596 of SEQ ID NO: 1242363
ccuuuaagacuuggcuaga

SEQ ID NO: 1341769 - RNA, 19 nt, Artificial Sequence
  Description of Artificial Sequence: Synthetic oligonucleotide
  Antisense strand to SEQ ID NO: 1341768
ucuagccaagucuuaaagg

SEQ ID NO: 1341770 - RNA, 19 nt, Artificial Sequence
  Description of Artificial Sequence: Synthetic oligonucleotide
  Sense strand starting at position 1716 of SEQ ID NO: 1242363
agguaccauaaguguuaga

SEQ ID NO: 1341771 - RNA, 19 nt, Artificial Sequence
  Description of Artificial Sequence: Synthetic oligonucleotide
  Antisense strand to SEQ ID NO: 1341770
ucuaacacuuaugguaccu

SEQ ID NO: 1341772 - RNA, 19 nt, Artificial Sequence
  Description of Artificial Sequence: Synthetic oligonucleotide
  Sense strand starting at position 1764 of SEQ ID NO: 1242363
ggcucuaagguugaauagu

SEQ ID NO: 1341773 - RNA, 19 nt, Artificial Sequence
  Description of Artificial Sequence: Synthetic oligonucleotide
  Antisense strand to SEQ ID NO: 1341772
acuauucaaccuuagagcc

SEQ ID NO: 1341774 - RNA, 19 nt, Artificial Sequence
  Description of Artificial Sequence: Synthetic oligonucleotide
  Sense strand starting at position 1804 of SEQ ID NO: 1242363
aucacugugcuuuaugaca

SEQ ID NO: 1341775 - RNA, 19 nt, Artificial Sequence
  Description of Artificial Sequence: Synthetic oligonucleotide
  Antisense strand to SEQ ID NO: 1341774
ugucauaaagcacagugau

SEQ ID NO: 1341776 - RNA, 19 nt, Artificial Sequence
  Description of Artificial Sequence: Synthetic oligonucleotide
  Sense strand starting at position 1815 of SEQ ID NO: 1242363
uuaugacaauguguuccau

SEQ ID NO: 1341777 - RNA, 19 nt, Artificial Sequence
  Description of Artificial Sequence: Synthetic oligonucleotide
  Antisense strand to SEQ ID NO: 1341776
auggaacacauugucauaa

SEQ ID NO: 1341778 - RNA, 19 nt, Artificial Sequence
  Description of Artificial Sequence: Synthetic oligonucleotide
  Sense strand starting at position 1817 of SEQ ID NO: 1242363
augacaauguguuccauag

SEQ ID NO: 1341779 - RNA, 19 nt, Artificial Sequence
  Description of Artificial Sequence: Synthetic oligonucleotide
  Antisense strand to SEQ ID NO: 1341778
cuauggaacacauugucau

SEQ ID NO: 1341780 - RNA, 19 nt, Artificial Sequence
  Description of Artificial Sequence: Synthetic oligonucleotide
  Sense strand starting at position 1821 of SEQ ID NO: 1242363
caauguguuccauagggua

SEQ ID NO: 1341781 - RNA, 19 nt, Artificial Sequence
  Description of Artificial Sequence: Synthetic oligonucleotide
  Antisense strand to SEQ ID NO: 1341780
uacccuauggaacacauug

SEQ ID NO: 1341782 - RNA, 19 nt, Artificial Sequence
  Description of Artificial Sequence: Synthetic oligonucleotide
  Sense strand starting at position 1829 of SEQ ID NO: 1242363
uccauaggguaucuugaau

SEQ ID NO: 1341783 - RNA, 19 nt, Artificial Sequence
  Description of Artificial Sequence: Synthetic oligonucleotide
  Antisense strand to SEQ ID NO: 1341782
auucaagauacccuaugga

SEQ ID NO: 1341784 - RNA, 19 nt, Artificial Sequence
  Description of Artificial Sequence: Synthetic oligonucleotide
  Sense strand starting at position 1908 of SEQ ID NO: 1242363
uaaggcuagucuuuaagau

SEQ ID NO: 1341785 - RNA, 19 nt, Artificial Sequence
  Description of Artificial Sequence: Synthetic oligonucleotide
  Antisense strand to SEQ ID NO: 1341784
aucuuaaagacuagccuua

SEQ ID NO: 1341786 - RNA, 19 nt, Artificial Sequence
  Description of Artificial Sequence: Synthetic oligonucleotide
  Sense strand starting at position 1909 of SEQ ID NO: 1242363
aaggcuagucuuuaagaua

SEQ ID NO: 1341787 - RNA, 19 nt, Artificial Sequence
  Description of Artificial Sequence: Synthetic oligonucleotide
  Antisense strand to SEQ ID NO: 1341786
uaucuuaaagacuagccuu

SEQ ID NO: 1341788 - RNA, 19 nt, Artificial Sequence
  Description of Artificial Sequence: Synthetic oligonucleotide
  Sense strand starting at position 2177 of SEQ ID NO: 1242363
agaccucagugcucuccaa

SEQ ID NO: 1341789 - RNA, 19 nt, Artificial Sequence
  Description of Artificial Sequence: Synthetic oligonucleotide
  Antisense strand to SEQ ID NO: 1341788
uuggagagcacugaggucu

SEQ ID NO: 1341790 - RNA, 19 nt, Artificial Sequence
  Description of Artificial Sequence: Synthetic oligonucleotide
  Sense strand starting at position 2317 of SEQ ID NO: 1242363
auacacguuuaacugaauu

SEQ ID NO: 1341791 - RNA, 19 nt, Artificial Sequence
  Description of Artificial Sequence: Synthetic oligonucleotide
  Antisense strand to SEQ ID NO: 1341790
aauucaguuaaacguguau

SEQ ID NO: 1341792 - RNA, 19 nt, Artificial Sequence
  Description of Artificial Sequence: Synthetic oligonucleotide
  Sense strand starting at position 2455 of SEQ ID NO: 1242363
cuguguaacuuuccuuaag

SEQ ID NO: 1341793 - RNA, 19 nt, Artificial Sequence
  Description of Artificial Sequence: Synthetic oligonucleotide
  Antisense strand to SEQ ID NO: 1341792
cuuaaggaaaguuacacag

SEQ ID NO: 1341794 - RNA, 19 nt, Artificial Sequence
  Description of Artificial Sequence: Synthetic oligonucleotide
  Sense strand starting at position 2456 of SEQ ID NO: 1242363
uguguaacuuuccuuaaga

SEQ ID NO: 1341795 - RNA, 19 nt, Artificial Sequence
  Description of Artificial Sequence: Synthetic oligonucleotide
  Antisense strand to SEQ ID NO: 1341794
ucuuaaggaaaguuacaca

SEQ ID NO: 1341796 - RNA, 19 nt, Artificial Sequence
  Description of Artificial Sequence: Synthetic oligonucleotide
  Sense strand starting at position 2457 of SEQ ID NO: 1242363
guguaacuuuccuuaagaa

SEQ ID NO: 1341797 - RNA, 19 nt, Artificial Sequence
  Description of Artificial Sequence: Synthetic oligonucleotide
  Antisense strand to SEQ ID NO: 1341796
uucuuaaggaaaguuacac

SEQ ID NO: 1341798 - RNA, 19 nt, Artificial Sequence
  Description of Artificial Sequence: Synthetic oligonucleotide
  Sense strand starting at position 2517 of SEQ ID NO: 1242363
auuacauaaggcuguaagu

SEQ ID NO: 1341799 - RNA, 19 nt, Artificial Sequence
  Description of Artificial Sequence: Synthetic oligonucleotide
  Antisense strand to SEQ ID NO: 1341798
acuuacagccuuauguaau

SEQ ID NO: 1341800 - RNA, 19 nt, Artificial Sequence
  Description of Artificial Sequence: Synthetic oligonucleotide
  Sense strand starting at position 2629 of SEQ ID NO: 1242363
cugggaaauugcuuaacaa

SEQ ID NO: 1341801 - RNA, 19 nt, Artificial Sequence
  Description of Artificial Sequence: Synthetic oligonucleotide
  Antisense strand to SEQ ID NO: 1341800
uuguuaagcaauuucccag

SEQ ID NO: 1341802 - RNA, 19 nt, Artificial Sequence
  Description of Artificial Sequence: Synthetic oligonucleotide
  Sense strand starting at position 2669 of SEQ ID NO: 1242363
augaccuaacucuguauga

SEQ ID NO: 1341803 - RNA, 19 nt, Artificial Sequence
  Description of Artificial Sequence: Synthetic oligonucleotide
  Antisense strand to SEQ ID NO: 1341802
ucauacagaguuaggucau

SEQ ID NO: 1341804 - RNA, 19 nt, Artificial Sequence
  Description of Artificial Sequence: Synthetic oligonucleotide
  Sense strand starting at position 2670 of SEQ ID NO: 1242363
ugaccuaacucuguaugaa

SEQ ID NO: 1341805 - RNA, 19 nt, Artificial Sequence
  Description of Artificial Sequence: Synthetic oligonucleotide
  Antisense strand to SEQ ID NO: 1341804
uucauacagaguuagguca

SEQ ID NO: 1341806 - RNA, 19 nt, Artificial Sequence
  Description of Artificial Sequence: Synthetic oligonucleotide
  Sense strand starting at position 2683 of SEQ ID NO: 1242363
uaugaagagucagugaaca

SEQ ID NO: 1341807 - RNA, 19 nt, Artificial Sequence
  Description of Artificial Sequence: Synthetic oligonucleotide
  Antisense strand to SEQ ID NO: 1341806
uguucacugacucuucaua

SEQ ID NO: 1341808 - RNA, 19 nt, Artificial Sequence
  Description of Artificial Sequence: Synthetic oligonucleotide
  Sense strand starting at position 2802 of SEQ ID NO: 1242363
guaaacauauguccggaua

SEQ ID NO: 1341809 - RNA, 19 nt, Artificial Sequence
  Description of Artificial Sequence: Synthetic oligonucleotide
  Antisense strand to SEQ ID NO: 1341808
uauccggacauauguuuac

SEQ ID NO: 1341810 - RNA, 19 nt, Artificial Sequence
  Description of Artificial Sequence: Synthetic oligonucleotide
  Sense strand starting at position 2803 of SEQ ID NO: 1242363
uaaacauauguccggauaa

SEQ ID NO: 1341811 - RNA, 19 nt, Artificial Sequence
  Description of Artificial Sequence: Synthetic oligonucleotide
  Antisense strand to SEQ ID NO: 1341810
uuauccggacauauguuua

SEQ ID NO: 1341812 - RNA, 19 nt, Artificial Sequence
  Description of Artificial Sequence: Synthetic oligonucleotide
  Sense strand starting at position 2979 of SEQ ID NO: 1242363
gugcuaauauaugcuacaa

SEQ ID NO: 1341813 - RNA, 19 nt, Artificial Sequence
  Description of Artificial Sequence: Synthetic oligonucleotide
  Antisense strand to SEQ ID NO: 1341812
uuguagcauauauuagcac

SEQ ID NO: 1341814 - RNA, 19 nt, Artificial Sequence
  Description of Artificial Sequence: Synthetic oligonucleotide
  Sense strand starting at position 3065 of SEQ ID NO: 1242363
gauuccacauacgugaaau

SEQ ID NO: 1341815 - RNA, 19 nt, Artificial Sequence
  Description of Artificial Sequence: Synthetic oligonucleotide
  Antisense strand to SEQ ID NO: 1341814
auuucacguauguggaauc

SEQ ID NO: 1341816 - RNA, 19 nt, Artificial Sequence
  Description of Artificial Sequence: Synthetic oligonucleotide
  Sense strand starting at position 3075 of SEQ ID NO: 1242363
acgugaaauguccagaaca

SEQ ID NO: 1341817 - RNA, 19 nt, Artificial Sequence
  Description of Artificial Sequence: Synthetic oligonucleotide
  Antisense strand to SEQ ID NO: 1341816
uguucuggacauuucacgu

SEQ ID NO: 1341818 - RNA, 19 nt, Artificial Sequence
  Description of Artificial Sequence: Synthetic oligonucleotide
  Sense strand starting at position 3077 of SEQ ID NO: 1242363
gugaaauguccagaacagu

SEQ ID NO: 1341819 - RNA, 19 nt, Artificial Sequence
  Description of Artificial Sequence: Synthetic oligonucleotide
  Antisense strand to SEQ ID NO: 1341818
acuguucuggacauuucac

SEQ ID NO: 1341820 - RNA, 19 nt, Artificial Sequence
  Description of Artificial Sequence: Synthetic oligonucleotide
  Sense strand starting at position 3484 of SEQ ID NO: 1242363
cccagcaugccagacauau

SEQ ID NO: 1341821 - RNA, 19 nt, Artificial Sequence
  Description of Artificial Sequence: Synthetic oligonucleotide
  Antisense strand to SEQ ID NO: 1341820
auaugucuggcaugcuggg

SEQ ID NO: 1341822 - RNA, 19 nt, Artificial Sequence
  Description of Artificial Sequence: Synthetic oligonucleotide
  Sense strand starting at position 3507 of SEQ ID NO: 1242363
gcauuagggcuuuauaccu

SEQ ID NO: 1341823 - RNA, 19 nt, Artificial Sequence
  Description of Artificial Sequence: Synthetic oligonucleotide
  Antisense strand to SEQ ID NO: 1341822
agguauaaagcccuaaugc

SEQ ID NO: 1341824 - RNA, 19 nt, Artificial Sequence
  Description of Artificial Sequence: Synthetic oligonucleotide
  Sense strand starting at position 3513 of SEQ ID NO: 1242363
gggcuuuauaccuguugga

SEQ ID NO: 1341825 - RNA, 19 nt, Artificial Sequence
  Description of Artificial Sequence: Synthetic oligonucleotide
  Antisense strand to SEQ ID NO: 1341824
uccaacagguauaaagccc

SEQ ID NO: 1341826 - RNA, 19 nt, Artificial Sequence
  Description of Artificial Sequence: Synthetic oligonucleotide
  Sense strand starting at position 3758 of SEQ ID NO: 1242363
ccaucaugucuggguaacu

SEQ ID NO: 1341827 - RNA, 19 nt, Artificial Sequence
  Description of Artificial Sequence: Synthetic oligonucleotide
  Antisense strand to SEQ ID NO: 1341826
aguuacccagacaugaugg

SEQ ID NO: 1341828 - RNA, 19 nt, Artificial Sequence
  Description of Artificial Sequence: Synthetic oligonucleotide
  Sense strand starting at position 3759 of SEQ ID NO: 1242363
caucaugucuggguaacuu

SEQ ID NO: 1341829 - RNA, 19 nt, Artificial Sequence
  Description of Artificial Sequence: Synthetic oligonucleotide
  Antisense strand to SEQ ID NO: 1341828
aaguuacccagacaugaug

SEQ ID NO: 1341830 - RNA, 19 nt, Artificial Sequence
  Description of Artificial Sequence: Synthetic oligonucleotide
  Sense strand starting at position 461 of SEQ ID NO: 1242364
guguuaauuucuuucuccu

SEQ ID NO: 1341831 - RNA, 19 nt, Artificial Sequence
  Description of Artificial Sequence: Synthetic oligonucleotide
  Antisense strand to SEQ ID NO: 1341830
aggagaaagaaauuaacac

SEQ ID NO: 1341832 - RNA, 19 nt, Artificial Sequence
  Description of Artificial Sequence: Synthetic oligonucleotide
  Sense strand starting at position 477 of SEQ ID NO: 1242364
ccuauaauauuguugaaag

SEQ ID NO: 1341833 - RNA, 19 nt, Artificial Sequence
  Description of Artificial Sequence: Synthetic oligonucleotide
  Antisense strand to SEQ ID NO: 1341832
cuuucaacaauauuauagg

SEQ ID NO: 1341834 - RNA, 19 nt, Artificial Sequence
  Description of Artificial Sequence: Synthetic oligonucleotide
  Sense strand starting at position 534 of SEQ ID NO: 1242364
ggaugugaugcugagcuua

SEQ ID NO: 1341835 - RNA, 19 nt, Artificial Sequence
  Description of Artificial Sequence: Synthetic oligonucleotide
  Antisense strand to SEQ ID NO: 1341834
uaagcucagcaucacaucc

SEQ ID NO: 1341836 - RNA, 19 nt, Artificial Sequence
  Description of Artificial Sequence: Synthetic oligonucleotide
  Sense strand starting at position 547 of SEQ ID NO: 1242364
agcuuacuggguuauuaua

SEQ ID NO: 1341837 - RNA, 19 nt, Artificial Sequence
  Description of Artificial Sequence: Synthetic oligonucleotide
  Antisense strand to SEQ ID NO: 1341836
uauaauaacccaguaagcu

SEQ ID NO: 1341838 - RNA, 19 nt, Artificial Sequence
  Description of Artificial Sequence: Synthetic oligonucleotide
  Sense strand starting at position 549 of SEQ ID NO: 1242364
cuuacuggguuauuauaua

SEQ ID NO: 1341839 - RNA, 19 nt, Artificial Sequence
  Description of Artificial Sequence: Synthetic oligonucleotide
  Antisense strand to SEQ ID NO: 1341838
uauauaauaacccaguaag

SEQ ID NO: 1341840 - RNA, 19 nt, Artificial Sequence
  Description of Artificial Sequence: Synthetic oligonucleotide
  Sense strand starting at position 608 of SEQ ID NO: 1242364
acugcuagggcauagaauu

SEQ ID NO: 1341841 - RNA, 19 nt, Artificial Sequence
  Description of Artificial Sequence: Synthetic oligonucleotide
  Antisense strand to SEQ ID NO: 1341840
aauucuaugcccuagcagu

SEQ ID NO: 1341842 - RNA, 19 nt, Artificial Sequence
  Description of Artificial Sequence: Synthetic oligonucleotide
  Sense strand starting at position 861 of SEQ ID NO: 1242364
aaauuuaauugugcguuga

SEQ ID NO: 1341843 - RNA, 19 nt, Artificial Sequence
  Description of Artificial Sequence: Synthetic oligonucleotide
  Antisense strand to SEQ ID NO: 1341842
ucaacgcacaauuaaauuu

SEQ ID NO: 1341844 - RNA, 19 nt, Artificial Sequence
  Description of Artificial Sequence: Synthetic oligonucleotide
  Sense strand starting at position 862 of SEQ ID NO: 1242364
aauuuaauugugcguugaa

SEQ ID NO: 1341845 - RNA, 19 nt, Artificial Sequence
  Description of Artificial Sequence: Synthetic oligonucleotide
  Antisense strand to SEQ ID NO: 1341844
uucaacgcacaauuaaauu

SEQ ID NO: 1341846 - RNA, 19 nt, Artificial Sequence
  Description of Artificial Sequence: Synthetic oligonucleotide
  Sense strand starting at position 863 of SEQ ID NO: 1242364
auuuaauugugcguugaag

SEQ ID NO: 1341847 - RNA, 19 nt, Artificial Sequence
  Description of Artificial Sequence: Synthetic oligonucleotide
  Antisense strand to SEQ ID NO: 1341846
cuucaacgcacaauuaaau

SEQ ID NO: 1341848 - RNA, 19 nt, Artificial Sequence
  Description of Artificial Sequence: Synthetic oligonucleotide
  Sense strand starting at position 1106 of SEQ ID NO: 1242364
acacuaggguuaucagcua

SEQ ID NO: 1341849 - RNA, 19 nt, Artificial Sequence
  Description of Artificial Sequence: Synthetic oligonucleotide
  Antisense strand to SEQ ID NO: 1341848
uagcugauaacccuagugu

SEQ ID NO: 1341850 - RNA, 19 nt, Artificial Sequence
  Description of Artificial Sequence: Synthetic oligonucleotide
  Sense strand starting at position 1121 of SEQ ID NO: 1242364
gcuauucucagcuagagag

SEQ ID NO: 1341851 - RNA, 19 nt, Artificial Sequence
  Description of Artificial Sequence: Synthetic oligonucleotide
  Antisense strand to SEQ ID NO: 1341850
cucucuagcugagaauagc

SEQ ID NO: 1341852 - RNA, 19 nt, Artificial Sequence
  Description of Artificial Sequence: Synthetic oligonucleotide
  Sense strand starting at position 1156 of SEQ ID NO: 1242364
guauuauuggcacacuaaa

SEQ ID NO: 1341853 - RNA, 19 nt, Artificial Sequence
  Description of Artificial Sequence: Synthetic oligonucleotide
  Antisense strand to SEQ ID NO: 1341852
uuuagugugccaauaauac

SEQ ID NO: 1341854 - RNA, 19 nt, Artificial Sequence
  Description of Artificial Sequence: Synthetic oligonucleotide
  Sense strand starting at position 1201 of SEQ ID NO: 1242364
uaaugaauagacugucuga

SEQ ID NO: 1341855 - RNA, 19 nt, Artificial Sequence
  Description of Artificial Sequence: Synthetic oligonucleotide
  Antisense strand to SEQ ID NO: 1341854
ucagacagucuauucauua

SEQ ID NO: 1341856 - RNA, 19 nt, Artificial Sequence
  Description of Artificial Sequence: Synthetic oligonucleotide
  Sense strand starting at position 1375 of SEQ ID NO: 1242364
aacugauuucucuguccgu

SEQ ID NO: 1341857 - RNA, 19 nt, Artificial Sequence
  Description of Artificial Sequence: Synthetic oligonucleotide
  Antisense strand to SEQ ID NO: 1341856
acggacagagaaaucaguu

SEQ ID NO: 1341858 - RNA, 19 nt, Artificial Sequence
  Description of Artificial Sequence: Synthetic oligonucleotide
  Sense strand starting at position 1376 of SEQ ID NO: 1242364
acugauuucucuguccgua

SEQ ID NO: 1341859 - RNA, 19 nt, Artificial Sequence
  Description of Artificial Sequence: Synthetic oligonucleotide
  Antisense strand to SEQ ID NO: 1341858
uacggacagagaaaucagu

SEQ ID NO: 1341860 - RNA, 19 nt, Artificial Sequence
  Description of Artificial Sequence: Synthetic oligonucleotide
  Sense strand starting at position 1378 of SEQ ID NO: 1242364
ugauuucucuguccguauu

SEQ ID NO: 1341861 - RNA, 19 nt, Artificial Sequence
  Description of Artificial Sequence: Synthetic oligonucleotide
  Antisense strand to SEQ ID NO: 1341860
aauacggacagagaaauca

SEQ ID NO: 1341862 - RNA, 19 nt, Artificial Sequence
  Description of Artificial Sequence: Synthetic oligonucleotide
  Sense strand starting at position 1399 of SEQ ID NO: 1242364
uggauaugauuugaucaga

SEQ ID NO: 1341863 - RNA, 19 nt, Artificial Sequence
  Description of Artificial Sequence: Synthetic oligonucleotide
  Antisense strand to SEQ ID NO: 1341862
ucugaucaaaucauaucca

SEQ ID NO: 1341864 - RNA, 19 nt, Artificial Sequence
  Description of Artificial Sequence: Synthetic oligonucleotide
  Sense strand starting at position 2091 of SEQ ID NO: 1242364
gugacagaauugucccaac

SEQ ID NO: 1341865 - RNA, 19 nt, Artificial Sequence
  Description of Artificial Sequence: Synthetic oligonucleotide
  Antisense strand to SEQ ID NO: 1341864
guugggacaauucugucac

SEQ ID NO: 1341866 - RNA, 19 nt, Artificial Sequence
  Description of Artificial Sequence: Synthetic oligonucleotide
  Sense strand starting at position 2218 of SEQ ID NO: 1242364
ugggauaucugcuccagaa

SEQ ID NO: 1341867 - RNA, 19 nt, Artificial Sequence
  Description of Artificial Sequence: Synthetic oligonucleotide
  Antisense strand to SEQ ID NO: 1341866
uucuggagcagauauccca

SEQ ID NO: 1341868 - RNA, 19 nt, Artificial Sequence
  Description of Artificial Sequence: Synthetic oligonucleotide
  Sense strand starting at position 2220 of SEQ ID NO: 1242364
ggauaucugcuccagaauc

SEQ ID NO: 1341869 - RNA, 19 nt, Artificial Sequence
  Description of Artificial Sequence: Synthetic oligonucleotide
  Antisense strand to SEQ ID NO: 1341868
gauucuggagcagauaucc

SEQ ID NO: 1341870 - RNA, 19 nt, Artificial Sequence
  Description of Artificial Sequence: Synthetic oligonucleotide
  Sense strand starting at position 2395 of SEQ ID NO: 1242364
gucagauugcugcaauaca

SEQ ID NO: 1341871 - RNA, 19 nt, Artificial Sequence
  Description of Artificial Sequence: Synthetic oligonucleotide
  Antisense strand to SEQ ID NO: 1341870
uguauugcagcaaucugac

SEQ ID NO: 1341872 - RNA, 19 nt, Artificial Sequence
  Description of Artificial Sequence: Synthetic oligonucleotide
  Sense strand starting at position 2555 of SEQ ID NO: 1242364
gaagcugcauuucuguaaa

SEQ ID NO: 1341873 - RNA, 19 nt, Artificial Sequence
  Description of Artificial Sequence: Synthetic oligonucleotide
  Antisense strand to SEQ ID NO: 1341872
uuuacagaaaugcagcuuc

SEQ ID NO: 1341874 - RNA, 19 nt, Artificial Sequence
  Description of Artificial Sequence: Synthetic oligonucleotide
  Sense strand starting at position 2771 of SEQ ID NO: 1242364
acauuaaugugagcaggau

SEQ ID NO: 1341875 - RNA, 19 nt, Artificial Sequence
  Description of Artificial Sequence: Synthetic oligonucleotide
  Antisense strand to SEQ ID NO: 1341874
auccugcucacauuaaugu

SEQ ID NO: 1341876 - RNA, 19 nt, Artificial Sequence
  Description of Artificial Sequence: Synthetic oligonucleotide
  Sense strand starting at position 2799 of SEQ ID NO: 1242364
gcucuuuagucucugauuu

SEQ ID NO: 1341877 - RNA, 19 nt, Artificial Sequence
  Description of Artificial Sequence: Synthetic oligonucleotide
  Antisense strand to SEQ ID NO: 1341876
aaaucagagacuaaagagc

SEQ ID NO: 1341878 - RNA, 19 nt, Artificial Sequence
  Description of Artificial Sequence: Synthetic oligonucleotide
  Sense strand starting at position 2937 of SEQ ID NO: 1242364
ggaggaaguuauucaagua

SEQ ID NO: 1341879 - RNA, 19 nt, Artificial Sequence
  Description of Artificial Sequence: Synthetic oligonucleotide
  Antisense strand to SEQ ID NO: 1341878
uacuugaauaacuuccucc

SEQ ID NO: 1341880 - RNA, 19 nt, Artificial Sequence
  Description of Artificial Sequence: Synthetic oligonucleotide
  Sense strand starting at position 3096 of SEQ ID NO: 1242364
cuuuauuggcaguaauaac

SEQ ID NO: 1341881 - RNA, 19 nt, Artificial Sequence
  Description of Artificial Sequence: Synthetic oligonucleotide
  Antisense strand to SEQ ID NO: 1341880
guuauuacugccaauaaag

SEQ ID NO: 1341882 - RNA, 19 nt, Artificial Sequence
  Description of Artificial Sequence: Synthetic oligonucleotide
  Sense strand starting at position 3121 of SEQ ID NO: 1242364
uuauuaucccaguauacug

SEQ ID NO: 1341883 - RNA, 19 nt, Artificial Sequence
  Description of Artificial Sequence: Synthetic oligonucleotide
  Antisense strand to SEQ ID NO: 1341882
caguauacugggauaauaa

SEQ ID NO: 1341884 - RNA, 19 nt, Artificial Sequence
  Description of Artificial Sequence: Synthetic oligonucleotide
  Sense strand starting at position 3172 of SEQ ID NO: 1242364
agcugaaugaaggguauau

SEQ ID NO: 1341885 - RNA, 19 nt, Artificial Sequence
  Description of Artificial Sequence: Synthetic oligonucleotide
  Antisense strand to SEQ ID NO: 1341884
auauacccuucauucagcu

SEQ ID NO: 1341886 - RNA, 19 nt, Artificial Sequence
  Description of Artificial Sequence: Synthetic oligonucleotide
  Sense strand starting at position 3205 of SEQ ID NO: 1242364
uuucuuuaugauggaaaug

SEQ ID NO: 1341887 - RNA, 19 nt, Artificial Sequence
  Description of Artificial Sequence: Synthetic oligonucleotide
  Antisense strand to SEQ ID NO: 1341886
cauuuccaucauaaagaaa

SEQ ID NO: 1341888 - RNA, 19 nt, Artificial Sequence
  Description of Artificial Sequence: Synthetic oligonucleotide
  Sense strand starting at position 3439 of SEQ ID NO: 1242364
ugucccauuccugacucau

SEQ ID NO: 1341889 - RNA, 19 nt, Artificial Sequence
  Description of Artificial Sequence: Synthetic oligonucleotide
  Antisense strand to SEQ ID NO: 1341888
augagucaggaaugggaca

SEQ ID NO: 1341890 - RNA, 19 nt, Artificial Sequence
  Description of Artificial Sequence: Synthetic oligonucleotide
  Sense strand starting at position 3585 of SEQ ID NO: 1242364
gacuuaaagugauuauguu

SEQ ID NO: 1341891 - RNA, 19 nt, Artificial Sequence
  Description of Artificial Sequence: Synthetic oligonucleotide
  Antisense strand to SEQ ID NO: 1341890
aacauaaucacuuuaaguc

SEQ ID NO: 1341892 - RNA, 19 nt, Artificial Sequence
  Description of Artificial Sequence: Synthetic oligonucleotide
  Sense strand starting at position 3639 of SEQ ID NO: 1242364
ugaucaaaugaguggugga

SEQ ID NO: 1341893 - RNA, 19 nt, Artificial Sequence
  Description of Artificial Sequence: Synthetic oligonucleotide
  Antisense strand to SEQ ID NO: 1341892
uccaccacucauuugauca

SEQ ID NO: 1341894 - RNA, 19 nt, Artificial Sequence
  Description of Artificial Sequence: Synthetic oligonucleotide
  Sense strand starting at position 3644 of SEQ ID NO: 1242364
aaaugagugguggagcauu

SEQ ID NO: 1341895 - RNA, 19 nt, Artificial Sequence
  Description of Artificial Sequence: Synthetic oligonucleotide
  Antisense strand to SEQ ID NO: 1341894
aaugcuccaccacucauuu

SEQ ID NO: 1341896 - RNA, 19 nt, Artificial Sequence
  Description of Artificial Sequence: Synthetic oligonucleotide
  Sense strand starting at position 3674 of SEQ ID NO: 1242364
aggcaugaauuaguuuaca

SEQ ID NO: 1341897 - RNA, 19 nt, Artificial Sequence
  Description of Artificial Sequence: Synthetic oligonucleotide
  Antisense strand to SEQ ID NO: 1341896
uguaaacuaauucaugccu

SEQ ID NO: 1341898 - RNA, 19 nt, Artificial Sequence
  Description of Artificial Sequence: Synthetic oligonucleotide
  Sense strand starting at position 3730 of SEQ ID NO: 1242364
uaggucugugaauggagua

SEQ ID NO: 1341899 - RNA, 19 nt, Artificial Sequence
  Description of Artificial Sequence: Synthetic oligonucleotide
  Antisense strand to SEQ ID NO: 1341898
uacuccauucacagaccua

SEQ ID NO: 1341900 - RNA, 19 nt, Artificial Sequence
  Description of Artificial Sequence: Synthetic oligonucleotide
  Sense strand starting at position 3731 of SEQ ID NO: 1242364
aggucugugaauggaguaa

SEQ ID NO: 1341901 - RNA, 19 nt, Artificial Sequence
  Description of Artificial Sequence: Synthetic oligonucleotide
  Antisense strand to SEQ ID NO: 1341900
uuacuccauucacagaccu

SEQ ID NO: 1341902 - RNA, 19 nt, Artificial Sequence
  Description of Artificial Sequence: Synthetic oligonucleotide
  Sense strand starting at position 3735 of SEQ ID NO: 1242364
cugugaauggaguaauccu

SEQ ID NO: 1341903 - RNA, 19 nt, Artificial Sequence
  Description of Artificial Sequence: Synthetic oligonucleotide
  Antisense strand to SEQ ID NO: 1341902
aggauuacuccauucacag

SEQ ID NO: 1341904 - RNA, 19 nt, Artificial Sequence
  Description of Artificial Sequence: Synthetic oligonucleotide
  Sense strand starting at position 3778 of SEQ ID NO: 1242364
cuuaacagguguuuauuga

SEQ ID NO: 1341905 - RNA, 19 nt, Artificial Sequence
  Description of Artificial Sequence: Synthetic oligonucleotide
  Antisense strand to SEQ ID NO: 1341904
ucaauaaacaccuguuaag

SEQ ID NO: 1341906 - RNA, 19 nt, Artificial Sequence
  Description of Artificial Sequence: Synthetic oligonucleotide
  Sense strand starting at position 3802 of SEQ ID NO: 1242364
ugaaauguaccagguauug

SEQ ID NO: 1341907 - RNA, 19 nt, Artificial Sequence
  Description of Artificial Sequence: Synthetic oligonucleotide
  Antisense strand to SEQ ID NO: 1341906
caauaccugguacauuuca

SEQ ID NO: 1341908 - RNA, 19 nt, Artificial Sequence
  Description of Artificial Sequence: Synthetic oligonucleotide
  Sense strand starting at position 3868 of SEQ ID NO: 1242364
aguccuauagccuaguaga

SEQ ID NO: 1341909 - RNA, 19 nt, Artificial Sequence
  Description of Artificial Sequence: Synthetic oligonucleotide
  Antisense strand to SEQ ID NO: 1341908
ucuacuaggcuauaggacu

SEQ ID NO: 1341910 - RNA, 19 nt, Artificial Sequence
  Description of Artificial Sequence: Synthetic oligonucleotide
  Sense strand starting at position 76 of SEQ ID NO: 1242365
auugucaaccugcagauaa

SEQ ID NO: 1341911 - RNA, 19 nt, Artificial Sequence
  Description of Artificial Sequence: Synthetic oligonucleotide
  Antisense strand to SEQ ID NO: 1341910
uuaucugcagguugacaau

SEQ ID NO: 1341912 - RNA, 19 nt, Artificial Sequence
  Description of Artificial Sequence: Synthetic oligonucleotide
  Sense strand starting at position 120 of SEQ ID NO: 1242365
acaaucggcaauugugaua

SEQ ID NO: 1341913 - RNA, 19 nt, Artificial Sequence
  Description of Artificial Sequence: Synthetic oligonucleotide
  Antisense strand to SEQ ID NO: 1341912
uaucacaauugccgauugu

SEQ ID NO: 1341914 - RNA, 19 nt, Artificial Sequence
  Description of Artificial Sequence: Synthetic oligonucleotide
  Sense strand starting at position 249 of SEQ ID NO: 1242365
ggcagagcaucauugcaga

SEQ ID NO: 1341915 - RNA, 19 nt, Artificial Sequence
  Description of Artificial Sequence: Synthetic oligonucleotide
  Antisense strand to SEQ ID NO: 1341914
ucugcaaugaugcucugcc

SEQ ID NO: 1341916 - RNA, 19 nt, Artificial Sequence
  Description of Artificial Sequence: Synthetic oligonucleotide
  Sense strand starting at position 254 of SEQ ID NO: 1242365
agcaucauugcagaaaggu

SEQ ID NO: 1341917 - RNA, 19 nt, Artificial Sequence
  Description of Artificial Sequence: Synthetic oligonucleotide
  Antisense strand to SEQ ID NO: 1341916
accuuucugcaaugaugcu

SEQ ID NO: 1341918 - RNA, 19 nt, Artificial Sequence
  Description of Artificial Sequence: Synthetic oligonucleotide
  Sense strand starting at position 263 of SEQ ID NO: 1242365
gcagaaagguauuaaacaa

SEQ ID NO: 1341919 - RNA, 19 nt, Artificial Sequence
  Description of Artificial Sequence: Synthetic oligonucleotide
  Antisense strand to SEQ ID NO: 1341918
uuguuuaauaccuuucugc

SEQ ID NO: 1341920 - RNA, 19 nt, Artificial Sequence
  Description of Artificial Sequence: Synthetic oligonucleotide
  Sense strand starting at position 307 of SEQ ID NO: 1242365
cuguuugcauucuugagaa

SEQ ID NO: 1341921 - RNA, 19 nt, Artificial Sequence
  Description of Artificial Sequence: Synthetic oligonucleotide
  Antisense strand to SEQ ID NO: 1341920
uucucaagaaugcaaacag

SEQ ID NO: 1341922 - RNA, 19 nt, Artificial Sequence
  Description of Artificial Sequence: Synthetic oligonucleotide
  Sense strand starting at position 309 of SEQ ID NO: 1242365
guuugcauucuugagaaag

SEQ ID NO: 1341923 - RNA, 19 nt, Artificial Sequence
  Description of Artificial Sequence: Synthetic oligonucleotide
  Antisense strand to SEQ ID NO: 1341922
cuuucucaagaaugcaaac

SEQ ID NO: 1341924 - RNA, 19 nt, Artificial Sequence
  Description of Artificial Sequence: Synthetic oligonucleotide
  Sense strand starting at position 368 of SEQ ID NO: 1242365
ccuuguagcucccugaaag

SEQ ID NO: 1341925 - RNA, 19 nt, Artificial Sequence
  Description of Artificial Sequence: Synthetic oligonucleotide
  Antisense strand to SEQ ID NO: 1341924
cuuucagggagcuacaagg

SEQ ID NO: 1341926 - RNA, 19 nt, Artificial Sequence
  Description of Artificial Sequence: Synthetic oligonucleotide
  Sense strand starting at position 369 of SEQ ID NO: 1242365
cuuguagcucccugaaagu

SEQ ID NO: 1341927 - RNA, 19 nt, Artificial Sequence
  Description of Artificial Sequence: Synthetic oligonucleotide
  Antisense strand to SEQ ID NO: 1341926
acuuucagggagcuacaag

SEQ ID NO: 1341928 - RNA, 19 nt, Artificial Sequence
  Description of Artificial Sequence: Synthetic oligonucleotide
  Sense strand starting at position 379 of SEQ ID NO: 1242365
ccugaaaguucugcauuac

SEQ ID NO: 1341929 - RNA, 19 nt, Artificial Sequence
  Description of Artificial Sequence: Synthetic oligonucleotide
  Antisense strand to SEQ ID NO: 1341928
guaaugcagaacuuucagg

SEQ ID NO: 1341930 - RNA, 19 nt, Artificial Sequence
  Description of Artificial Sequence: Synthetic oligonucleotide
  Sense strand starting at position 380 of SEQ ID NO: 1242365
cugaaaguucugcauuacu

SEQ ID NO: 1341931 - RNA, 19 nt, Artificial Sequence
  Description of Artificial Sequence: Synthetic oligonucleotide
  Antisense strand to SEQ ID NO: 1341930
aguaaugcagaacuuucag

SEQ ID NO: 1341932 - RNA, 19 nt, Artificial Sequence
  Description of Artificial Sequence: Synthetic oligonucleotide
  Sense strand starting at position 487 of SEQ ID NO: 1242365
uuucccagucucugggaau

SEQ ID NO: 1341933 - RNA, 19 nt, Artificial Sequence
  Description of Artificial Sequence: Synthetic oligonucleotide
  Antisense strand to SEQ ID NO: 1341932
auucccagagacugggaaa

SEQ ID NO: 1341934 - RNA, 19 nt, Artificial Sequence
  Description of Artificial Sequence: Synthetic oligonucleotide
  Sense strand starting at position 592 of SEQ ID NO: 1242365
gcaaacauccaauacguuu

SEQ ID NO: 1341935 - RNA, 19 nt, Artificial Sequence
  Description of Artificial Sequence: Synthetic oligonucleotide
  Antisense strand to SEQ ID NO: 1341934
aaacguauuggauguuugc

SEQ ID NO: 1341936 - RNA, 19 nt, Artificial Sequence
  Description of Artificial Sequence: Synthetic oligonucleotide
  Sense strand starting at position 607 of SEQ ID NO: 1242365
guuugcgauccugaaagga

SEQ ID NO: 1341937 - RNA, 19 nt, Artificial Sequence
  Description of Artificial Sequence: Synthetic oligonucleotide
  Antisense strand to SEQ ID NO: 1341936
uccuuucaggaucgcaaac

SEQ ID NO: 1341938 - RNA, 19 nt, Artificial Sequence
  Description of Artificial Sequence: Synthetic oligonucleotide
  Sense strand starting at position 699 of SEQ ID NO: 1242365
gagugaucguaggcaaguc

SEQ ID NO: 1341939 - RNA, 19 nt, Artificial Sequence
  Description of Artificial Sequence: Synthetic oligonucleotide
  Antisense strand to SEQ ID NO: 1341938
gacuugccuacgaucacuc

SEQ ID NO: 1341940 - RNA, 19 nt, Artificial Sequence
  Description of Artificial Sequence: Synthetic oligonucleotide
  Sense strand starting at position 795 of SEQ ID NO: 1242365
acauguuaagaguguuuag

SEQ ID NO: 1341941 - RNA, 19 nt, Artificial Sequence
  Description of Artificial Sequence: Synthetic oligonucleotide
  Antisense strand to SEQ ID NO: 1341940
cuaaacacucuuaacaugu

SEQ ID NO: 1341942 - RNA, 19 nt, Artificial Sequence
  Description of Artificial Sequence: Synthetic oligonucleotide
  Sense strand starting at position 798 of SEQ ID NO: 1242365
uguuaagaguguuuaggac

SEQ ID NO: 1341943 - RNA, 19 nt, Artificial Sequence
  Description of Artificial Sequence: Synthetic oligonucleotide
  Antisense strand to SEQ ID NO: 1341942
guccuaaacacucuuaaca

SEQ ID NO: 1341944 - RNA, 19 nt, Artificial Sequence
  Description of Artificial Sequence: Synthetic oligonucleotide
  Sense strand starting at position 1025 of SEQ ID NO: 1242365
gcugcuuaacguguuugga

SEQ ID NO: 1341945 - RNA, 19 nt, Artificial Sequence
  Description of Artificial Sequence: Synthetic oligonucleotide
  Antisense strand to SEQ ID NO: 1341944
uccaaacacguuaagcagc

SEQ ID NO: 1341946 - RNA, 19 nt, Artificial Sequence
  Description of Artificial Sequence: Synthetic oligonucleotide
  Sense strand starting at position 1551 of SEQ ID NO: 1242365
ucuccaaagagcugagagu

SEQ ID NO: 1341947 - RNA, 19 nt, Artificial Sequence
  Description of Artificial Sequence: Synthetic oligonucleotide
  Antisense strand to SEQ ID NO: 1341946
acucucagcucuuuggaga

SEQ ID NO: 1341948 - RNA, 19 nt, Artificial Sequence
  Description of Artificial Sequence: Synthetic oligonucleotide
  Sense strand starting at position 1560 of SEQ ID NO: 1242365
agcugagaguagcuguuua

SEQ ID NO: 1341949 - RNA, 19 nt, Artificial Sequence
  Description of Artificial Sequence: Synthetic oligonucleotide
  Antisense strand to SEQ ID NO: 1341948
uaaacagcuacucucagcu

SEQ ID NO: 1341950 - RNA, 19 nt, Artificial Sequence
  Description of Artificial Sequence: Synthetic oligonucleotide
  Sense strand starting at position 1564 of SEQ ID NO: 1242365
gagaguagcuguuuaacag

SEQ ID NO: 1341951 - RNA, 19 nt, Artificial Sequence
  Description of Artificial Sequence: Synthetic oligonucleotide
  Antisense strand to SEQ ID NO: 1341950
cuguuaaacagcuacucuc

SEQ ID NO: 1341952 - RNA, 19 nt, Artificial Sequence
  Description of Artificial Sequence: Synthetic oligonucleotide
  Sense strand starting at position 1679 of SEQ ID NO: 1242365
agcaaacgccgcucugauu

SEQ ID NO: 1341953 - RNA, 19 nt, Artificial Sequence
  Description of Artificial Sequence: Synthetic oligonucleotide
  Antisense strand to SEQ ID NO: 1341952
aaucagagcggcguuugcu

SEQ ID NO: 1341954 - RNA, 19 nt, Artificial Sequence
  Description of Artificial Sequence: Synthetic oligonucleotide
  Sense strand starting at position 1686 of SEQ ID NO: 1242365
gccgcucugauuugaugaa

SEQ ID NO: 1341955 - RNA, 19 nt, Artificial Sequence
  Description of Artificial Sequence: Synthetic oligonucleotide
  Antisense strand to SEQ ID NO: 1341954
uucaucaaaucagagcggc

SEQ ID NO: 1341956 - RNA, 19 nt, Artificial Sequence
  Description of Artificial Sequence: Synthetic oligonucleotide
  Sense strand starting at position 2050 of SEQ ID NO: 1242365
gacugcaucccagauaagu

SEQ ID NO: 1341957 - RNA, 19 nt, Artificial Sequence
  Description of Artificial Sequence: Synthetic oligonucleotide
  Antisense strand to SEQ ID NO: 1341956
acuuaucugggaugcaguc

SEQ ID NO: 1341958 - RNA, 19 nt, Artificial Sequence
  Description of Artificial Sequence: Synthetic oligonucleotide
  Sense strand starting at position 2163 of SEQ ID NO: 1242365
caucgaccuccauguaagu

SEQ ID NO: 1341959 - RNA, 19 nt, Artificial Sequence
  Description of Artificial Sequence: Synthetic oligonucleotide
  Antisense strand to SEQ ID NO: 1341958
acuuacauggaggucgaug

SEQ ID NO: 1341960 - RNA, 19 nt, Artificial Sequence
  Description of Artificial Sequence: Synthetic oligonucleotide
  Sense strand starting at position 2391 of SEQ ID NO: 1242365
gccucuuacuaaucaggaa

SEQ ID NO: 1341961 - RNA, 19 nt, Artificial Sequence
  Description of Artificial Sequence: Synthetic oligonucleotide
  Antisense strand to SEQ ID NO: 1341960
uuccugauuaguaagaggc

SEQ ID NO: 1341962 - RNA, 19 nt, Artificial Sequence
  Description of Artificial Sequence: Synthetic oligonucleotide
  Sense strand starting at position 2474 of SEQ ID NO: 1242365
guagaaauaucagcucuga

SEQ ID NO: 1341963 - RNA, 19 nt, Artificial Sequence
  Description of Artificial Sequence: Synthetic oligonucleotide
  Antisense strand to SEQ ID NO: 1341962
ucagagcugauauuucuac

SEQ ID NO: 1341964 - RNA, 19 nt, Artificial Sequence
  Description of Artificial Sequence: Synthetic oligonucleotide
  Sense strand starting at position 2482 of SEQ ID NO: 1242365
aucagcucugaguguuauu

SEQ ID NO: 1341965 - RNA, 19 nt, Artificial Sequence
  Description of Artificial Sequence: Synthetic oligonucleotide
  Antisense strand to SEQ ID NO: 1341964
aauaacacucagagcugau

SEQ ID NO: 1341966 - RNA, 19 nt, Artificial Sequence
  Description of Artificial Sequence: Synthetic oligonucleotide
  Sense strand starting at position 2564 of SEQ ID NO: 1242365
cagcauacuguagaaguau

SEQ ID NO: 1341967 - RNA, 19 nt, Artificial Sequence
  Description of Artificial Sequence: Synthetic oligonucleotide
  Antisense strand to SEQ ID NO: 1341966
auacuucuacaguaugcug

SEQ ID NO: 1341968 - RNA, 19 nt, Artificial Sequence
  Description of Artificial Sequence: Synthetic oligonucleotide
  Sense strand starting at position 2573 of SEQ ID NO: 1242365
guagaaguauguccaggua

SEQ ID NO: 1341969 - RNA, 19 nt, Artificial Sequence
  Description of Artificial Sequence: Synthetic oligonucleotide
  Antisense strand to SEQ ID NO: 1341968
uaccuggacauacuucuac

SEQ ID NO: 1341970 - RNA, 19 nt, Artificial Sequence
  Description of Artificial Sequence: Synthetic oligonucleotide
  Sense strand starting at position 2576 of SEQ ID NO: 1242365
gaaguauguccagguaguc

SEQ ID NO: 1341971 - RNA, 19 nt, Artificial Sequence
  Description of Artificial Sequence: Synthetic oligonucleotide
  Antisense strand to SEQ ID NO: 1341970
gacuaccuggacauacuuc

SEQ ID NO: 1341972 - RNA, 19 nt, Artificial Sequence
  Description of Artificial Sequence: Synthetic oligonucleotide
  Sense strand starting at position 2586 of SEQ ID NO: 1242365
cagguagucccagauucuu

SEQ ID NO: 1341973 - RNA, 19 nt, Artificial Sequence
  Description of Artificial Sequence: Synthetic oligonucleotide
  Antisense strand to SEQ ID NO: 1341972
aagaaucugggacuaccug

SEQ ID NO: 1341974 - RNA, 19 nt, Artificial Sequence
  Description of Artificial Sequence: Synthetic oligonucleotide
  Sense strand starting at position 2631 of SEQ ID NO: 1242365
augugcaaucuugaacacu

SEQ ID NO: 1341975 - RNA, 19 nt, Artificial Sequence
  Description of Artificial Sequence: Synthetic oligonucleotide
  Antisense strand to SEQ ID NO: 1341974
aguguucaagauugcacau

SEQ ID NO: 1341976 - RNA, 19 nt, Artificial Sequence
  Description of Artificial Sequence: Synthetic oligonucleotide
  Sense strand starting at position 2790 of SEQ ID NO: 1242365
uuaucuuagcucuagagag

SEQ ID NO: 1341977 - RNA, 19 nt, Artificial Sequence
  Description of Artificial Sequence: Synthetic oligonucleotide
  Antisense strand to SEQ ID NO: 1341976
cucucuagagcuaagauaa

SEQ ID NO: 1341978 - RNA, 19 nt, Artificial Sequence
  Description of Artificial Sequence: Synthetic oligonucleotide
  Sense strand starting at position 2843 of SEQ ID NO: 1242365
auaaauagaggcuggcaaa

SEQ ID NO: 1341979 - RNA, 19 nt, Artificial Sequence
  Description of Artificial Sequence: Synthetic oligonucleotide
  Antisense strand to SEQ ID NO: 1341978
uuugccagccucuauuuau

SEQ ID NO: 1341980 - RNA, 19 nt, Artificial Sequence
  Description of Artificial Sequence: Synthetic oligonucleotide
  Sense strand starting at position 3019 of SEQ ID NO: 1242365
ccaugcuggaguuaguauu

SEQ ID NO: 1341981 - RNA, 19 nt, Artificial Sequence
  Description of Artificial Sequence: Synthetic oligonucleotide
  Antisense strand to SEQ ID NO: 1341980
aauacuaacuccagcaugg

SEQ ID NO: 1341982 - RNA, 19 nt, Artificial Sequence
  Description of Artificial Sequence: Synthetic oligonucleotide
  Sense strand starting at position 3596 of SEQ ID NO: 1242365
gguuuaaauucugccacaa

SEQ ID NO: 1341983 - RNA, 19 nt, Artificial Sequence
  Description of Artificial Sequence: Synthetic oligonucleotide
  Antisense strand to SEQ ID NO: 1341982
uuguggcagaauuuaaacc

SEQ ID NO: 1341984 - RNA, 19 nt, Artificial Sequence
  Description of Artificial Sequence: Synthetic oligonucleotide
  Sense strand starting at position 3650 of SEQ ID NO: 1242365
guucuuagugaucauauua

SEQ ID NO: 1341985 - RNA, 19 nt, Artificial Sequence
  Description of Artificial Sequence: Synthetic oligonucleotide
  Antisense strand to SEQ ID NO: 1341984
uaauaugaucacuaagaac

SEQ ID NO: 1341986 - RNA, 19 nt, Artificial Sequence
  Description of Artificial Sequence: Synthetic oligonucleotide
  Sense strand starting at position 3657 of SEQ ID NO: 1242365
gugaucauauuauagaaug

SEQ ID NO: 1341987 - RNA, 19 nt, Artificial Sequence
  Description of Artificial Sequence: Synthetic oligonucleotide
  Antisense strand to SEQ ID NO: 1341986
cauucuauaauaugaucac

SEQ ID NO: 1341988 - RNA, 19 nt, Artificial Sequence
  Description of Artificial Sequence: Synthetic oligonucleotide
  Sense strand starting at position 3683 of SEQ ID NO: 1242365
gcagucuacuaaguucuau

SEQ ID NO: 1341989 - RNA, 19 nt, Artificial Sequence
  Description of Artificial Sequence: Synthetic oligonucleotide
  Antisense strand to SEQ ID NO: 1341988
auagaacuuaguagacugc

SEQ ID NO: 1341990 - RNA, 19 nt, Artificial Sequence
  Description of Artificial Sequence: Synthetic oligonucleotide
  Sense strand starting at position 13 of SEQ ID NO: 1242366
caacuaaugucagugaagu

SEQ ID NO: 1341991 - RNA, 19 nt, Artificial Sequence
  Description of Artificial Sequence: Synthetic oligonucleotide
  Antisense strand to SEQ ID NO: 1341990
acuucacugacauuaguug

SEQ ID NO: 1341992 - RNA, 19 nt, Artificial Sequence
  Description of Artificial Sequence: Synthetic oligonucleotide
  Sense strand starting at position 14 of SEQ ID NO: 1242366
aacuaaugucagugaagua

SEQ ID NO: 1341993 - RNA, 19 nt, Artificial Sequence
  Description of Artificial Sequence: Synthetic oligonucleotide
  Antisense strand to SEQ ID NO: 1341992
uacuucacugacauuaguu

SEQ ID NO: 1341994 - RNA, 19 nt, Artificial Sequence
  Description of Artificial Sequence: Synthetic oligonucleotide
  Sense strand starting at position 170 of SEQ ID NO: 1242366
ucugaaaucuagcuuuaga

SEQ ID NO: 1341995 - RNA, 19 nt, Artificial Sequence
  Description of Artificial Sequence: Synthetic oligonucleotide
  Antisense strand to SEQ ID NO: 1341994
ucuaaagcuagauuucaga

SEQ ID NO: 1341996 - RNA, 19 nt, Artificial Sequence
  Description of Artificial Sequence: Synthetic oligonucleotide
  Sense strand starting at position 173 of SEQ ID NO: 1242366
gaaaucuagcuuuagaguc

SEQ ID NO: 1341997 - RNA, 19 nt, Artificial Sequence
  Description of Artificial Sequence: Synthetic oligonucleotide
  Antisense strand to SEQ ID NO: 1341996
gacucuaaagcuagauuuc

SEQ ID NO: 1341998 - RNA, 19 nt, Artificial Sequence
  Description of Artificial Sequence: Synthetic oligonucleotide
  Sense strand starting at position 246 of SEQ ID NO: 1242366
guuuaauaagaacaacguu

SEQ ID NO: 1341999 - RNA, 19 nt, Artificial Sequence
  Description of Artificial Sequence: Synthetic oligonucleotide
  Antisense strand to SEQ ID NO: 1341998
aacguuguucuuauuaaac

SEQ ID NO: 1342000 - RNA, 19 nt, Artificial Sequence
  Description of Artificial Sequence: Synthetic oligonucleotide
  Sense strand starting at position 406 of SEQ ID NO: 1242366
ccuagcauagaguacaaua

SEQ ID NO: 1342001 - RNA, 19 nt, Artificial Sequence
  Description of Artificial Sequence: Synthetic oligonucleotide
  Antisense strand to SEQ ID NO: 1342000
uauuguacucuaugcuagg

SEQ ID NO: 1342002 - RNA, 19 nt, Artificial Sequence
  Description of Artificial Sequence: Synthetic oligonucleotide
  Sense strand starting at position 455 of SEQ ID NO: 1242366
agagaaauaucuguggcau

SEQ ID NO: 1342003 - RNA, 19 nt, Artificial Sequence
  Description of Artificial Sequence: Synthetic oligonucleotide
  Antisense strand to SEQ ID NO: 1342002
augccacagauauuucucu

SEQ ID NO: 1342004 - RNA, 19 nt, Artificial Sequence
  Description of Artificial Sequence: Synthetic oligonucleotide
  Sense strand starting at position 456 of SEQ ID NO: 1242366
gagaaauaucuguggcauc

SEQ ID NO: 1342005 - RNA, 19 nt, Artificial Sequence
  Description of Artificial Sequence: Synthetic oligonucleotide
  Antisense strand to SEQ ID NO: 1342004
gaugccacagauauuucuc

SEQ ID NO: 1342006 - RNA, 19 nt, Artificial Sequence
  Description of Artificial Sequence: Synthetic oligonucleotide
  Sense strand starting at position 524 of SEQ ID NO: 1242366
uuugaaguguugucauaaa

SEQ ID NO: 1342007 - RNA, 19 nt, Artificial Sequence
  Description of Artificial Sequence: Synthetic oligonucleotide
  Antisense strand to SEQ ID NO: 1342006
uuuaugacaacacuucaaa

SEQ ID NO: 1342008 - RNA, 19 nt, Artificial Sequence
  Description of Artificial Sequence: Synthetic oligonucleotide
  Sense strand starting at position 578 of SEQ ID NO: 1242366
gcucaauucugacugacag

SEQ ID NO: 1342009 - RNA, 19 nt, Artificial Sequence
  Description of Artificial Sequence: Synthetic oligonucleotide
  Antisense strand to SEQ ID NO: 1342008
cugucagucagaauugagc

SEQ ID NO: 1342010 - RNA, 19 nt, Artificial Sequence
  Description of Artificial Sequence: Synthetic oligonucleotide
  Sense strand starting at position 579 of SEQ ID NO: 1242366
cucaauucugacugacaga

SEQ ID NO: 1342011 - RNA, 19 nt, Artificial Sequence
  Description of Artificial Sequence: Synthetic oligonucleotide
  Antisense strand to SEQ ID NO: 1342010
ucugucagucagaauugag

SEQ ID NO: 1342012 - RNA, 19 nt, Artificial Sequence
  Description of Artificial Sequence: Synthetic oligonucleotide
  Sense strand starting at position 634 of SEQ ID NO: 1242366
aggaaagguuguguaucua

SEQ ID NO: 1342013 - RNA, 19 nt, Artificial Sequence
  Description of Artificial Sequence: Synthetic oligonucleotide
  Antisense strand to SEQ ID NO: 1342012
uagauacacaaccuuuccu

SEQ ID NO: 1342014 - RNA, 19 nt, Artificial Sequence
  Description of Artificial Sequence: Synthetic oligonucleotide
  Sense strand starting at position 645 of SEQ ID NO: 1242366
uguaucuacuucccuaagu

SEQ ID NO: 1342015 - RNA, 19 nt, Artificial Sequence
  Description of Artificial Sequence: Synthetic oligonucleotide
  Antisense strand to SEQ ID NO: 1342014
acuuagggaaguagauaca

SEQ ID NO: 1342016 - RNA, 19 nt, Artificial Sequence
  Description of Artificial Sequence: Synthetic oligonucleotide
  Sense strand starting at position 658 of SEQ ID NO: 1242366
cuaaguggcaguuauaagu

SEQ ID NO: 1342017 - RNA, 19 nt, Artificial Sequence
  Description of Artificial Sequence: Synthetic oligonucleotide
  Antisense strand to SEQ ID NO: 1342016
acuuauaacugccacuuag

SEQ ID NO: 1342018 - RNA, 19 nt, Artificial Sequence
  Description of Artificial Sequence: Synthetic oligonucleotide
  Sense strand starting at position 1012 of SEQ ID NO: 1242366
gggcaaguaguguaacugu

SEQ ID NO: 1342019 - RNA, 19 nt, Artificial Sequence
  Description of Artificial Sequence: Synthetic oligonucleotide
  Antisense strand to SEQ ID NO: 1342018
acaguuacacuacuugccc

SEQ ID NO: 1342020 - RNA, 19 nt, Artificial Sequence
  Description of Artificial Sequence: Synthetic oligonucleotide
  Sense strand starting at position 1043 of SEQ ID NO: 1242366
cccagagugguccaaguca

SEQ ID NO: 1342021 - RNA, 19 nt, Artificial Sequence
  Description of Artificial Sequence: Synthetic oligonucleotide
  Antisense strand to SEQ ID NO: 1342020
ugacuuggaccacucuggg

SEQ ID NO: 1342022 - RNA, 19 nt, Artificial Sequence
  Description of Artificial Sequence: Synthetic oligonucleotide
  Sense strand starting at position 1419 of SEQ ID NO: 1242366
ggccacagucuccaaagaa

SEQ ID NO: 1342023 - RNA, 19 nt, Artificial Sequence
  Description of Artificial Sequence: Synthetic oligonucleotide
  Antisense strand to SEQ ID NO: 1342022
uucuuuggagacuguggcc

SEQ ID NO: 1342024 - RNA, 19 nt, Artificial Sequence
  Description of Artificial Sequence: Synthetic oligonucleotide
  Sense strand starting at position 1437 of SEQ ID NO: 1242366
aagcgaaugacccggguau

SEQ ID NO: 1342025 - RNA, 19 nt, Artificial Sequence
  Description of Artificial Sequence: Synthetic oligonucleotide
  Antisense strand to SEQ ID NO: 1342024
auacccgggucauucgcuu

SEQ ID NO: 1342026 - RNA, 19 nt, Artificial Sequence
  Description of Artificial Sequence: Synthetic oligonucleotide
  Sense strand starting at position 2594 of SEQ ID NO: 1242366
aagguuggaccgugugaga

SEQ ID NO: 1342027 - RNA, 19 nt, Artificial Sequence
  Description of Artificial Sequence: Synthetic oligonucleotide
  Antisense strand to SEQ ID NO: 1342026
ucucacacgguccaaccuu

SEQ ID NO: 1342028 - RNA, 19 nt, Artificial Sequence
  Description of Artificial Sequence: Synthetic oligonucleotide
  Sense strand starting at position 2596 of SEQ ID NO: 1242366
gguuggaccgugugagaga

SEQ ID NO: 1342029 - RNA, 19 nt, Artificial Sequence
  Description of Artificial Sequence: Synthetic oligonucleotide
  Antisense strand to SEQ ID NO: 1342028
ucucucacacgguccaacc

SEQ ID NO: 1342030 - RNA, 19 nt, Artificial Sequence
  Description of Artificial Sequence: Synthetic oligonucleotide
  Sense strand starting at position 2701 of SEQ ID NO: 1242366
gugcaacagcgugaugaga

SEQ ID NO: 1342031 - RNA, 19 nt, Artificial Sequence
  Description of Artificial Sequence: Synthetic oligonucleotide
  Antisense strand to SEQ ID NO: 1342030
ucucaucacgcuguugcac

SEQ ID NO: 1342032 - RNA, 19 nt, Artificial Sequence
  Description of Artificial Sequence: Synthetic oligonucleotide
  Sense strand starting at position 2709 of SEQ ID NO: 1242366
gcgugaugagaccaccagu

SEQ ID NO: 1342033 - RNA, 19 nt, Artificial Sequence
  Description of Artificial Sequence: Synthetic oligonucleotide
  Antisense strand to SEQ ID NO: 1342032
acugguggucucaucacgc

SEQ ID NO: 1342034 - RNA, 19 nt, Artificial Sequence
  Description of Artificial Sequence: Synthetic oligonucleotide
  Sense strand starting at position 2783 of SEQ ID NO: 1242366
uugacauggucuccuugaa

SEQ ID NO: 1342035 - RNA, 19 nt, Artificial Sequence
  Description of Artificial Sequence: Synthetic oligonucleotide
  Antisense strand to SEQ ID NO: 1342034
uucaaggagaccaugucaa

SEQ ID NO: 1342036 - RNA, 19 nt, Artificial Sequence
  Description of Artificial Sequence: Synthetic oligonucleotide
  Sense strand starting at position 2832 of SEQ ID NO: 1242366
ccuugaagugacuaucuuu

SEQ ID NO: 1342037 - RNA, 19 nt, Artificial Sequence
  Description of Artificial Sequence: Synthetic oligonucleotide
  Antisense strand to SEQ ID NO: 1342036
aaagauagucacuucaagg

SEQ ID NO: 1342038 - RNA, 19 nt, Artificial Sequence
  Description of Artificial Sequence: Synthetic oligonucleotide
  Sense strand starting at position 2914 of SEQ ID NO: 1242366
gcuggauuacuugguauca

SEQ ID NO: 1342039 - RNA, 19 nt, Artificial Sequence
  Description of Artificial Sequence: Synthetic oligonucleotide
  Antisense strand to SEQ ID NO: 1342038
ugauaccaaguaauccagc

SEQ ID NO: 1342040 - RNA, 19 nt, Artificial Sequence
  Description of Artificial Sequence: Synthetic oligonucleotide
  Sense strand starting at position 2915 of SEQ ID NO: 1242366
cuggauuacuugguaucau

SEQ ID NO: 1342041 - RNA, 19 nt, Artificial Sequence
  Description of Artificial Sequence: Synthetic oligonucleotide
  Antisense strand to SEQ ID NO: 1342040
augauaccaaguaauccag

SEQ ID NO: 1342042 - RNA, 19 nt, Artificial Sequence
  Description of Artificial Sequence: Synthetic oligonucleotide
  Sense strand starting at position 3013 of SEQ ID NO: 1242366
acuggaacucuuuguagua

SEQ ID NO: 1342043 - RNA, 19 nt, Artificial Sequence
  Description of Artificial Sequence: Synthetic oligonucleotide
  Antisense strand to SEQ ID NO: 1342042
uacuacaaagaguuccagu

SEQ ID NO: 1342044 - RNA, 19 nt, Artificial Sequence
  Description of Artificial Sequence: Synthetic oligonucleotide
  Sense strand starting at position 3014 of SEQ ID NO: 1242366
cuggaacucuuuguaguau

SEQ ID NO: 1342045 - RNA, 19 nt, Artificial Sequence
  Description of Artificial Sequence: Synthetic oligonucleotide
  Antisense strand to SEQ ID NO: 1342044
auacuacaaagaguuccag

SEQ ID NO: 1342046 - RNA, 19 nt, Artificial Sequence
  Description of Artificial Sequence: Synthetic oligonucleotide
  Sense strand starting at position 3023 of SEQ ID NO: 1242366
uuuguaguauccucgaaau

SEQ ID NO: 1342047 - RNA, 19 nt, Artificial Sequence
  Description of Artificial Sequence: Synthetic oligonucleotide
  Antisense strand to SEQ ID NO: 1342046
auuucgaggauacuacaaa

SEQ ID NO: 1342048 - RNA, 19 nt, Artificial Sequence
  Description of Artificial Sequence: Synthetic oligonucleotide
  Sense strand starting at position 3025 of SEQ ID NO: 1242366
uguaguauccucgaaauuc

SEQ ID NO: 1342049 - RNA, 19 nt, Artificial Sequence
  Description of Artificial Sequence: Synthetic oligonucleotide
  Antisense strand to SEQ ID NO: 1342048
gaauuucgaggauacuaca

SEQ ID NO: 1342050 - RNA, 19 nt, Artificial Sequence
  Description of Artificial Sequence: Synthetic oligonucleotide
  Sense strand starting at position 3033 of SEQ ID NO: 1242366
ccucgaaauucuuuaaaug

SEQ ID NO: 1342051 - RNA, 19 nt, Artificial Sequence
  Description of Artificial Sequence: Synthetic oligonucleotide
  Antisense strand to SEQ ID NO: 1342050
cauuuaaagaauuucgagg

SEQ ID NO: 1342052 - RNA, 19 nt, Artificial Sequence
  Description of Artificial Sequence: Synthetic oligonucleotide
  Sense strand starting at position 3075 of SEQ ID NO: 1242366
uugaauuuauuggaggaug

SEQ ID NO: 1342053 - RNA, 19 nt, Artificial Sequence
  Description of Artificial Sequence: Synthetic oligonucleotide
  Antisense strand to SEQ ID NO: 1342052
cauccuccaauaaauucaa

SEQ ID NO: 1342054 - RNA, 19 nt, Artificial Sequence
  Description of Artificial Sequence: Synthetic oligonucleotide
  Sense strand starting at position 3083 of SEQ ID NO: 1242366
auuggaggauggcuguaau

SEQ ID NO: 1342055 - RNA, 19 nt, Artificial Sequence
  Description of Artificial Sequence: Synthetic oligonucleotide
  Antisense strand to SEQ ID NO: 1342054
auuacagccauccuccaau

SEQ ID NO: 1342056 - RNA, 19 nt, Artificial Sequence
  Description of Artificial Sequence: Synthetic oligonucleotide
  Sense strand starting at position 3195 of SEQ ID NO: 1242366
uugggaaauagcugcaguu

SEQ ID NO: 1342057 - RNA, 19 nt, Artificial Sequence
  Description of Artificial Sequence: Synthetic oligonucleotide
  Antisense strand to SEQ ID NO: 1342056
aacugcagcuauuucccaa

SEQ ID NO: 1342058 - RNA, 19 nt, Artificial Sequence
  Description of Artificial Sequence: Synthetic oligonucleotide
  Sense strand starting at position 3735 of SEQ ID NO: 1242366
acuaauaauuccgcuggua

SEQ ID NO: 1342059 - RNA, 19 nt, Artificial Sequence
  Description of Artificial Sequence: Synthetic oligonucleotide
  Antisense strand to SEQ ID NO: 1342058
uaccagcggaauuauuagu

SEQ ID NO: 1342060 - RNA, 19 nt, Artificial Sequence
  Description of Artificial Sequence: Synthetic oligonucleotide
  Sense strand starting at position 3747 of SEQ ID NO: 1242366
gcugguacaauggaauauu

SEQ ID NO: 1342061 - RNA, 19 nt, Artificial Sequence
  Description of Artificial Sequence: Synthetic oligonucleotide
  Antisense strand to SEQ ID NO: 1342060
aauauuccauuguaccagc

SEQ ID NO: 1342062 - RNA, 19 nt, Artificial Sequence
  Description of Artificial Sequence: Synthetic oligonucleotide
  Sense strand starting at position 3756 of SEQ ID NO: 1242366
auggaauauuaaucuggca

SEQ ID NO: 1342063 - RNA, 19 nt, Artificial Sequence
  Description of Artificial Sequence: Synthetic oligonucleotide
  Antisense strand to SEQ ID NO: 1342062
ugccagauuaauauuccau

SEQ ID NO: 1342064 - RNA, 19 nt, Artificial Sequence
  Description of Artificial Sequence: Synthetic oligonucleotide
  Sense strand starting at position 3847 of SEQ ID NO: 1242366
agcauugcaugauuccauu

SEQ ID NO: 1342065 - RNA, 19 nt, Artificial Sequence
  Description of Artificial Sequence: Synthetic oligonucleotide
  Antisense strand to SEQ ID NO: 1342064
aauggaaucaugcaaugcu

SEQ ID NO: 1342066 - RNA, 19 nt, Artificial Sequence
  Description of Artificial Sequence: Synthetic oligonucleotide
  Sense strand starting at position 3856 of SEQ ID NO: 1242366
ugauuccauuuaggugaaa

SEQ ID NO: 1342067 - RNA, 19 nt, Artificial Sequence
  Description of Artificial Sequence: Synthetic oligonucleotide
  Antisense strand to SEQ ID NO: 1342066
uuucaccuaaauggaauca

SEQ ID NO: 1342068 - RNA, 19 nt, Artificial Sequence
  Description of Artificial Sequence: Synthetic oligonucleotide
  Sense strand starting at position 3903 of SEQ ID NO: 1242366
ggaaaucagugguugccua

SEQ ID NO: 1342069 - RNA, 19 nt, Artificial Sequence
  Description of Artificial Sequence: Synthetic oligonucleotide
  Antisense strand to SEQ ID NO: 1342068
uaggcaaccacugauuucc

SEQ ID NO: 1342070 - RNA, 19 nt, Artificial Sequence
  Description of Artificial Sequence: Synthetic oligonucleotide
  Sense strand starting at position 128 of SEQ ID NO: 1242367
cguggacuuuggaaagaug

SEQ ID NO: 1342071 - RNA, 19 nt, Artificial Sequence
  Description of Artificial Sequence: Synthetic oligonucleotide
  Antisense strand to SEQ ID NO: 1342070
caucuuuccaaaguccacg

SEQ ID NO: 1342072 - RNA, 19 nt, Artificial Sequence
  Description of Artificial Sequence: Synthetic oligonucleotide
  Sense strand starting at position 161 of SEQ ID NO: 1242367
ggcucucuaguuuaaauaa

SEQ ID NO: 1342073 - RNA, 19 nt, Artificial Sequence
  Description of Artificial Sequence: Synthetic oligonucleotide
  Antisense strand to SEQ ID NO: 1342072
uuauuuaaacuagagagcc

SEQ ID NO: 1342074 - RNA, 19 nt, Artificial Sequence
  Description of Artificial Sequence: Synthetic oligonucleotide
  Sense strand starting at position 197 of SEQ ID NO: 1242367
cugcuaggauaaucacaaa

SEQ ID NO: 1342075 - RNA, 19 nt, Artificial Sequence
  Description of Artificial Sequence: Synthetic oligonucleotide
  Antisense strand to SEQ ID NO: 1342074
uuugugauuauccuagcag

SEQ ID NO: 1342076 - RNA, 19 nt, Artificial Sequence
  Description of Artificial Sequence: Synthetic oligonucleotide
  Sense strand starting at position 420 of SEQ ID NO: 1242367
ucagguauuuaugauagau

SEQ ID NO: 1342077 - RNA, 19 nt, Artificial Sequence
  Description of Artificial Sequence: Synthetic oligonucleotide
  Antisense strand to SEQ ID NO: 1342076
aucuaucauaaauaccuga

SEQ ID NO: 1342078 - RNA, 19 nt, Artificial Sequence
  Description of Artificial Sequence: Synthetic oligonucleotide
  Sense strand starting at position 422 of SEQ ID NO: 1242367
agguauuuaugauagauac

SEQ ID NO: 1342079 - RNA, 19 nt, Artificial Sequence
  Description of Artificial Sequence: Synthetic oligonucleotide
  Antisense strand to SEQ ID NO: 1342078
guaucuaucauaaauaccu

SEQ ID NO: 1342080 - RNA, 19 nt, Artificial Sequence
  Description of Artificial Sequence: Synthetic oligonucleotide
  Sense strand starting at position 484 of SEQ ID NO: 1242367
agaauacuucugggucaca

SEQ ID NO: 1342081 - RNA, 19 nt, Artificial Sequence
  Description of Artificial Sequence: Synthetic oligonucleotide
  Antisense strand to SEQ ID NO: 1342080
ugugacccagaaguauucu

SEQ ID NO: 1342082 - RNA, 19 nt, Artificial Sequence
  Description of Artificial Sequence: Synthetic oligonucleotide
  Sense strand starting at position 485 of SEQ ID NO: 1242367
gaauacuucugggucacau

SEQ ID NO: 1342083 - RNA, 19 nt, Artificial Sequence
  Description of Artificial Sequence: Synthetic oligonucleotide
  Antisense strand to SEQ ID NO: 1342082
augugacccagaaguauuc

SEQ ID NO: 1342084 - RNA, 19 nt, Artificial Sequence
  Description of Artificial Sequence: Synthetic oligonucleotide
  Sense strand starting at position 508 of SEQ ID NO: 1242367
gccuaaguguauuugccaa

SEQ ID NO: 1342085 - RNA, 19 nt, Artificial Sequence
  Description of Artificial Sequence: Synthetic oligonucleotide
  Antisense strand to SEQ ID NO: 1342084
uuggcaaauacacuuaggc

SEQ ID NO: 1342086 - RNA, 19 nt, Artificial Sequence
  Description of Artificial Sequence: Synthetic oligonucleotide
  Sense strand starting at position 523 of SEQ ID NO: 1242367
ccaagagacucuguaucaa

SEQ ID NO: 1342087 - RNA, 19 nt, Artificial Sequence
  Description of Artificial Sequence: Synthetic oligonucleotide
  Antisense strand to SEQ ID NO: 1342086
uugauacagagucucuugg

SEQ ID NO: 1342088 - RNA, 19 nt, Artificial Sequence
  Description of Artificial Sequence: Synthetic oligonucleotide
  Sense strand starting at position 535 of SEQ ID NO: 1242367
guaucaauuucucuuuggu

SEQ ID NO: 1342089 - RNA, 19 nt, Artificial Sequence
  Description of Artificial Sequence: Synthetic oligonucleotide
  Antisense strand to SEQ ID NO: 1342088
accaaagagaaauugauac

SEQ ID NO: 1342090 - RNA, 19 nt, Artificial Sequence
  Description of Artificial Sequence: Synthetic oligonucleotide
  Sense strand starting at position 668 of SEQ ID NO: 1242367
ugugcuuugccugcuaaga

SEQ ID NO: 1342091 - RNA, 19 nt, Artificial Sequence
  Description of Artificial Sequence: Synthetic oligonucleotide
  Antisense strand to SEQ ID NO: 1342090
ucuuagcaggcaaagcaca

SEQ ID NO: 1342092 - RNA, 19 nt, Artificial Sequence
  Description of Artificial Sequence: Synthetic oligonucleotide
  Sense strand starting at position 742 of SEQ ID NO: 1242367
ugggaaaucuuaucucauu

SEQ ID NO: 1342093 - RNA, 19 nt, Artificial Sequence
  Description of Artificial Sequence: Synthetic oligonucleotide
  Antisense strand to SEQ ID NO: 1342092
aaugagauaagauuuccca

SEQ ID NO: 1342094 - RNA, 19 nt, Artificial Sequence
  Description of Artificial Sequence: Synthetic oligonucleotide
  Sense strand starting at position 829 of SEQ ID NO: 1242367
ucuagucaucaaugggcaa

SEQ ID NO: 1342095 - RNA, 19 nt, Artificial Sequence
  Description of Artificial Sequence: Synthetic oligonucleotide
  Antisense strand to SEQ ID NO: 1342094
uugcccauugaugacuaga

SEQ ID NO: 1342096 - RNA, 19 nt, Artificial Sequence
  Description of Artificial Sequence: Synthetic oligonucleotide
  Sense strand starting at position 1049 of SEQ ID NO: 1242367
auaggacuacuuugcgaau

SEQ ID NO: 1342097 - RNA, 19 nt, Artificial Sequence
  Description of Artificial Sequence: Synthetic oligonucleotide
  Antisense strand to SEQ ID NO: 1342096
auucgcaaaguaguccuau

SEQ ID NO: 1342098 - RNA, 19 nt, Artificial Sequence
  Description of Artificial Sequence: Synthetic oligonucleotide
  Sense strand starting at position 1050 of SEQ ID NO: 1242367
uaggacuacuuugcgaaua

SEQ ID NO: 1342099 - RNA, 19 nt, Artificial Sequence
  Description of Artificial Sequence: Synthetic oligonucleotide
  Antisense strand to SEQ ID NO: 1342098
uauucgcaaaguaguccua

SEQ ID NO: 1342100 - RNA, 19 nt, Artificial Sequence
  Description of Artificial Sequence: Synthetic oligonucleotide
  Sense strand starting at position 1055 of SEQ ID NO: 1242367
cuacuuugcgaauaugaaa

SEQ ID NO: 1342101 - RNA, 19 nt, Artificial Sequence
  Description of Artificial Sequence: Synthetic oligonucleotide
  Antisense strand to SEQ ID NO: 1342100
uuucauauucgcaaaguag

SEQ ID NO: 1342102 - RNA, 19 nt, Artificial Sequence
  Description of Artificial Sequence: Synthetic oligonucleotide
  Sense strand starting at position 1313 of SEQ ID NO: 1242367
acagucuuucugggugaga

SEQ ID NO: 1342103 - RNA, 19 nt, Artificial Sequence
  Description of Artificial Sequence: Synthetic oligonucleotide
  Antisense strand to SEQ ID NO: 1342102
ucucacccagaaagacugu

SEQ ID NO: 1342104 - RNA, 19 nt, Artificial Sequence
  Description of Artificial Sequence: Synthetic oligonucleotide
  Sense strand starting at position 1314 of SEQ ID NO: 1242367
cagucuuucugggugagaa

SEQ ID NO: 1342105 - RNA, 19 nt, Artificial Sequence
  Description of Artificial Sequence: Synthetic oligonucleotide
  Antisense strand to SEQ ID NO: 1342104
uucucacccagaaagacug

SEQ ID NO: 1342106 - RNA, 19 nt, Artificial Sequence
  Description of Artificial Sequence: Synthetic oligonucleotide
  Sense strand starting at position 1315 of SEQ ID NO: 1242367
agucuuucugggugagaag

SEQ ID NO: 1342107 - RNA, 19 nt, Artificial Sequence
  Description of Artificial Sequence: Synthetic oligonucleotide
  Antisense strand to SEQ ID NO: 1342106
cuucucacccagaaagacu

SEQ ID NO: 1342108 - RNA, 19 nt, Artificial Sequence
  Description of Artificial Sequence: Synthetic oligonucleotide
  Sense strand starting at position 1506 of SEQ ID NO: 1242367
ggaaguaaucaggguugga

SEQ ID NO: 1342109 - RNA, 19 nt, Artificial Sequence
  Description of Artificial Sequence: Synthetic oligonucleotide
  Antisense strand to SEQ ID NO: 1342108
uccaacccugauuacuucc

SEQ ID NO: 1342110 - RNA, 19 nt, Artificial Sequence
  Description of Artificial Sequence: Synthetic oligonucleotide
  Sense strand starting at position 1761 of SEQ ID NO: 1242367
gcgcuagucgguguaaaca

SEQ ID NO: 1342111 - RNA, 19 nt, Artificial Sequence
  Description of Artificial Sequence: Synthetic oligonucleotide
  Antisense strand to SEQ ID NO: 1342110
uguuuacaccgacuagcgc

SEQ ID NO: 1342112 - RNA, 19 nt, Artificial Sequence
  Description of Artificial Sequence: Synthetic oligonucleotide
  Sense strand starting at position 2168 of SEQ ID NO: 1242367
acuguuaaacgagaagugu

SEQ ID NO: 1342113 - RNA, 19 nt, Artificial Sequence
  Description of Artificial Sequence: Synthetic oligonucleotide
  Antisense strand to SEQ ID NO: 1342112
acacuucucguuuaacagu

SEQ ID NO: 1342114 - RNA, 19 nt, Artificial Sequence
  Description of Artificial Sequence: Synthetic oligonucleotide
  Sense strand starting at position 2172 of SEQ ID NO: 1242367
uuaaacgagaagugucaga

SEQ ID NO: 1342115 - RNA, 19 nt, Artificial Sequence
  Description of Artificial Sequence: Synthetic oligonucleotide
  Antisense strand to SEQ ID NO: 1342114
ucugacacuucucguuuaa

SEQ ID NO: 1342116 - RNA, 19 nt, Artificial Sequence
  Description of Artificial Sequence: Synthetic oligonucleotide
  Sense strand starting at position 2360 of SEQ ID NO: 1242367
aauggagucuugcccuaga

SEQ ID NO: 1342117 - RNA, 19 nt, Artificial Sequence
  Description of Artificial Sequence: Synthetic oligonucleotide
  Antisense strand to SEQ ID NO: 1342116
ucuagggcaagacuccauu

SEQ ID NO: 1342118 - RNA, 19 nt, Artificial Sequence
  Description of Artificial Sequence: Synthetic oligonucleotide
  Sense strand starting at position 2536 of SEQ ID NO: 1242367
uaugcaggaucuguauaac

SEQ ID NO: 1342119 - RNA, 19 nt, Artificial Sequence
  Description of Artificial Sequence: Synthetic oligonucleotide
  Antisense strand to SEQ ID NO: 1342118
guuauacagauccugcaua

SEQ ID NO: 1342120 - RNA, 19 nt, Artificial Sequence
  Description of Artificial Sequence: Synthetic oligonucleotide
  Sense strand starting at position 2556 of SEQ ID NO: 1242367
ccacccaacggguaauuau

SEQ ID NO: 1342121 - RNA, 19 nt, Artificial Sequence
  Description of Artificial Sequence: Synthetic oligonucleotide
  Antisense strand to SEQ ID NO: 1342120
auaauuacccguugggugg

SEQ ID NO: 1342122 - RNA, 19 nt, Artificial Sequence
  Description of Artificial Sequence: Synthetic oligonucleotide
  Sense strand starting at position 2603 of SEQ ID NO: 1242367
ggcagagacugucuugaaa

SEQ ID NO: 1342123 - RNA, 19 nt, Artificial Sequence
  Description of Artificial Sequence: Synthetic oligonucleotide
  Antisense strand to SEQ ID NO: 1342122
uuucaagacagucucugcc

SEQ ID NO: 1342124 - RNA, 19 nt, Artificial Sequence
  Description of Artificial Sequence: Synthetic oligonucleotide
  Sense strand starting at position 2654 of SEQ ID NO: 1242367
cugggcaucuccucagaca

SEQ ID NO: 1342125 - RNA, 19 nt, Artificial Sequence
  Description of Artificial Sequence: Synthetic oligonucleotide
  Antisense strand to SEQ ID NO: 1342124
ugucugaggagaugcccag

SEQ ID NO: 1342126 - RNA, 19 nt, Artificial Sequence
  Description of Artificial Sequence: Synthetic oligonucleotide
  Sense strand starting at position 2686 of SEQ ID NO: 1242367
ccacacccucugugaagau

SEQ ID NO: 1342127 - RNA, 19 nt, Artificial Sequence
  Description of Artificial Sequence: Synthetic oligonucleotide
  Antisense strand to SEQ ID NO: 1342126
aucuucacagagggugugg

SEQ ID NO: 1342128 - RNA, 19 nt, Artificial Sequence
  Description of Artificial Sequence: Synthetic oligonucleotide
  Sense strand starting at position 2845 of SEQ ID NO: 1242367
aaguauaucggaggauaug

SEQ ID NO: 1342129 - RNA, 19 nt, Artificial Sequence
  Description of Artificial Sequence: Synthetic oligonucleotide
  Antisense strand to SEQ ID NO: 1342128
cauauccuccgauauacuu

SEQ ID NO: 1342130 - RNA, 19 nt, Artificial Sequence
  Description of Artificial Sequence: Synthetic oligonucleotide
  Sense strand starting at position 2854 of SEQ ID NO: 1242367
ggaggauaugcauggauug

SEQ ID NO: 1342131 - RNA, 19 nt, Artificial Sequence
  Description of Artificial Sequence: Synthetic oligonucleotide
  Antisense strand to SEQ ID NO: 1342130
caauccaugcauauccucc

SEQ ID NO: 1342132 - RNA, 19 nt, Artificial Sequence
  Description of Artificial Sequence: Synthetic oligonucleotide
  Sense strand starting at position 2855 of SEQ ID NO: 1242367
gaggauaugcauggauugu

SEQ ID NO: 1342133 - RNA, 19 nt, Artificial Sequence
  Description of Artificial Sequence: Synthetic oligonucleotide
  Antisense strand to SEQ ID NO: 1342132
acaauccaugcauauccuc

SEQ ID NO: 1342134 - RNA, 19 nt, Artificial Sequence
  Description of Artificial Sequence: Synthetic oligonucleotide
  Sense strand starting at position 2864 of SEQ ID NO: 1242367
cauggauuguaugcaaaua

SEQ ID NO: 1342135 - RNA, 19 nt, Artificial Sequence
  Description of Artificial Sequence: Synthetic oligonucleotide
  Antisense strand to SEQ ID NO: 1342134
uauuugcauacaauccaug

SEQ ID NO: 1342136 - RNA, 19 nt, Artificial Sequence
  Description of Artificial Sequence: Synthetic oligonucleotide
  Sense strand starting at position 3284 of SEQ ID NO: 1242367
auuagaaacuuucugagca

SEQ ID NO: 1342137 - RNA, 19 nt, Artificial Sequence
  Description of Artificial Sequence: Synthetic oligonucleotide
  Antisense strand to SEQ ID NO: 1342136
ugcucagaaaguuucuaau

SEQ ID NO: 1342138 - RNA, 19 nt, Artificial Sequence
  Description of Artificial Sequence: Synthetic oligonucleotide
  Sense strand starting at position 3478 of SEQ ID NO: 1242367
gcugaaaggagcuauauug

SEQ ID NO: 1342139 - RNA, 19 nt, Artificial Sequence
  Description of Artificial Sequence: Synthetic oligonucleotide
  Antisense strand to SEQ ID NO: 1342138
caauauagcuccuuucagc

SEQ ID NO: 1342140 - RNA, 19 nt, Artificial Sequence
  Description of Artificial Sequence: Synthetic oligonucleotide
  Sense strand starting at position 3634 of SEQ ID NO: 1242367
augcauguguauuugaacu

SEQ ID NO: 1342141 - RNA, 19 nt, Artificial Sequence
  Description of Artificial Sequence: Synthetic oligonucleotide
  Antisense strand to SEQ ID NO: 1342140
aguucaaauacacaugcau

SEQ ID NO: 1342142 - RNA, 19 nt, Artificial Sequence
  Description of Artificial Sequence: Synthetic oligonucleotide
  Sense strand starting at position 3793 of SEQ ID NO: 1242367
aggaguaguuauguaaacu

SEQ ID NO: 1342143 - RNA, 19 nt, Artificial Sequence
  Description of Artificial Sequence: Synthetic oligonucleotide
  Antisense strand to SEQ ID NO: 1342142
aguuuacauaacuacuccu

SEQ ID NO: 1342144 - RNA, 19 nt, Artificial Sequence
  Description of Artificial Sequence: Synthetic oligonucleotide
  Sense strand starting at position 3794 of SEQ ID NO: 1242367
ggaguaguuauguaaacua

SEQ ID NO: 1342145 - RNA, 19 nt, Artificial Sequence
  Description of Artificial Sequence: Synthetic oligonucleotide
  Antisense strand to SEQ ID NO: 1342144
uaguuuacauaacuacucc

SEQ ID NO: 1342146 - RNA, 19 nt, Artificial Sequence
  Description of Artificial Sequence: Synthetic oligonucleotide
  Sense strand starting at position 3882 of SEQ ID NO: 1242367
ggucuauagccauaauaua

SEQ ID NO: 1342147 - RNA, 19 nt, Artificial Sequence
  Description of Artificial Sequence: Synthetic oligonucleotide
  Antisense strand to SEQ ID NO: 1342146
uauauuauggcuauagacc

SEQ ID NO: 1342148 - RNA, 19 nt, Artificial Sequence
  Description of Artificial Sequence: Synthetic oligonucleotide
  Sense strand starting at position 3977 of SEQ ID NO: 1242367
gaggaaugaucugaggaaa

SEQ ID NO: 1342149 - RNA, 19 nt, Artificial Sequence
  Description of Artificial Sequence: Synthetic oligonucleotide
  Antisense strand to SEQ ID NO: 1342148
uuuccucagaucauuccuc

SEQ ID NO: 1342150 - RNA, 19 nt, Artificial Sequence
  Description of Artificial Sequence: Synthetic oligonucleotide
  Sense strand starting at position 637 of SEQ ID NO: 1242368
ggagacauauccuagauuu

SEQ ID NO: 1342151 - RNA, 19 nt, Artificial Sequence
  Description of Artificial Sequence: Synthetic oligonucleotide
  Antisense strand to SEQ ID NO: 1342150
aaaucuaggauaugucucc

SEQ ID NO: 1342152 - RNA, 19 nt, Artificial Sequence
  Description of Artificial Sequence: Synthetic oligonucleotide
  Sense strand starting at position 876 of SEQ ID NO: 1242368
agaagagucacuugagcca

SEQ ID NO: 1342153 - RNA, 19 nt, Artificial Sequence
  Description of Artificial Sequence: Synthetic oligonucleotide
  Antisense strand to SEQ ID NO: 1342152
uggcucaagugacucuucu

SEQ ID NO: 1342154 - RNA, 19 nt, Artificial Sequence
  Description of Artificial Sequence: Synthetic oligonucleotide
  Sense strand starting at position 934 of SEQ ID NO: 1242368
cacuguagccuggaggaua

SEQ ID NO: 1342155 - RNA, 19 nt, Artificial Sequence
  Description of Artificial Sequence: Synthetic oligonucleotide
  Antisense strand to SEQ ID NO: 1342154
uauccuccaggcuacagug

SEQ ID NO: 1342156 - RNA, 19 nt, Artificial Sequence
  Description of Artificial Sequence: Synthetic oligonucleotide
  Sense strand starting at position 1227 of SEQ ID NO: 1242368
agaggaauccuguguuuaa

SEQ ID NO: 1342157 - RNA, 19 nt, Artificial Sequence
  Description of Artificial Sequence: Synthetic oligonucleotide
  Antisense strand to SEQ ID NO: 1342156
uuaaacacaggauuccucu

SEQ ID NO: 1342158 - RNA, 19 nt, Artificial Sequence
  Description of Artificial Sequence: Synthetic oligonucleotide
  Sense strand starting at position 1228 of SEQ ID NO: 1242368
gaggaauccuguguuuaac

SEQ ID NO: 1342159 - RNA, 19 nt, Artificial Sequence
  Description of Artificial Sequence: Synthetic oligonucleotide
  Antisense strand to SEQ ID NO: 1342158
guuaaacacaggauuccuc

SEQ ID NO: 1342160 - RNA, 19 nt, Artificial Sequence
  Description of Artificial Sequence: Synthetic oligonucleotide
  Sense strand starting at position 1234 of SEQ ID NO: 1242368
uccuguguuuaacucaaau

SEQ ID NO: 1342161 - RNA, 19 nt, Artificial Sequence
  Description of Artificial Sequence: Synthetic oligonucleotide
  Antisense strand to SEQ ID NO: 1342160
auuugaguuaaacacagga

SEQ ID NO: 1342162 - RNA, 19 nt, Artificial Sequence
  Description of Artificial Sequence: Synthetic oligonucleotide
  Sense strand starting at position 1328 of SEQ ID NO: 1242368
gccuuucugcuagaccaga

SEQ ID NO: 1342163 - RNA, 19 nt, Artificial Sequence
  Description of Artificial Sequence: Synthetic oligonucleotide
  Antisense strand to SEQ ID NO: 1342162
ucuggucuagcagaaaggc

SEQ ID NO: 1342164 - RNA, 19 nt, Artificial Sequence
  Description of Artificial Sequence: Synthetic oligonucleotide
  Sense strand starting at position 1424 of SEQ ID NO: 1242368
gcaccuuggugcucaguga

SEQ ID NO: 1342165 - RNA, 19 nt, Artificial Sequence
  Description of Artificial Sequence: Synthetic oligonucleotide
  Antisense strand to SEQ ID NO: 1342164
ucacugagcaccaaggugc

SEQ ID NO: 1342166 - RNA, 19 nt, Artificial Sequence
  Description of Artificial Sequence: Synthetic oligonucleotide
  Sense strand starting at position 1428 of SEQ ID NO: 1242368
cuuggugcucagugagaag

SEQ ID NO: 1342167 - RNA, 19 nt, Artificial Sequence
  Description of Artificial Sequence: Synthetic oligonucleotide
  Antisense strand to SEQ ID NO: 1342166
cuucucacugagcaccaag

SEQ ID NO: 1342168 - RNA, 19 nt, Artificial Sequence
  Description of Artificial Sequence: Synthetic oligonucleotide
  Sense strand starting at position 1466 of SEQ ID NO: 1242368
gccuaacucggaggucaua

SEQ ID NO: 1342169 - RNA, 19 nt, Artificial Sequence
  Description of Artificial Sequence: Synthetic oligonucleotide
  Antisense strand to SEQ ID NO: 1342168
uaugaccuccgaguuaggc

SEQ ID NO: 1342170 - RNA, 19 nt, Artificial Sequence
  Description of Artificial Sequence: Synthetic oligonucleotide
  Sense strand starting at position 1477 of SEQ ID NO: 1242368
aggucauauccacgaccau

SEQ ID NO: 1342171 - RNA, 19 nt, Artificial Sequence
  Description of Artificial Sequence: Synthetic oligonucleotide
  Antisense strand to SEQ ID NO: 1342170
auggucguggauaugaccu

SEQ ID NO: 1342172 - RNA, 19 nt, Artificial Sequence
  Description of Artificial Sequence: Synthetic oligonucleotide
  Sense strand starting at position 1478 of SEQ ID NO: 1242368
ggucauauccacgaccauu

SEQ ID NO: 1342173 - RNA, 19 nt, Artificial Sequence
  Description of Artificial Sequence: Synthetic oligonucleotide
  Antisense strand to SEQ ID NO: 1342172
aauggucguggauaugacc

SEQ ID NO: 1342174 - RNA, 19 nt, Artificial Sequence
  Description of Artificial Sequence: Synthetic oligonucleotide
  Sense strand starting at position 1585 of SEQ ID NO: 1242368
cgaugugaacgcugcucaa

SEQ ID NO: 1342175 - RNA, 19 nt, Artificial Sequence
  Description of Artificial Sequence: Synthetic oligonucleotide
  Antisense strand to SEQ ID NO: 1342174
uugagcagcguucacaucg

SEQ ID NO: 1342176 - RNA, 19 nt, Artificial Sequence
  Description of Artificial Sequence: Synthetic oligonucleotide
  Sense strand starting at position 2045 of SEQ ID NO: 1242368
ccguguuuacgggaauugu

SEQ ID NO: 1342177 - RNA, 19 nt, Artificial Sequence
  Description of Artificial Sequence: Synthetic oligonucleotide
  Antisense strand to SEQ ID NO: 1342176
acaauucccguaaacacgg

SEQ ID NO: 1342178 - RNA, 19 nt, Artificial Sequence
  Description of Artificial Sequence: Synthetic oligonucleotide
  Sense strand starting at position 2046 of SEQ ID NO: 1242368
cguguuuacgggaauuguc

SEQ ID NO: 1342179 - RNA, 19 nt, Artificial Sequence
  Description of Artificial Sequence: Synthetic oligonucleotide
  Antisense strand to SEQ ID NO: 1342178
gacaauucccguaaacacg

SEQ ID NO: 1342180 - RNA, 19 nt, Artificial Sequence
  Description of Artificial Sequence: Synthetic oligonucleotide
  Sense strand starting at position 2245 of SEQ ID NO: 1242368
gguccuucaccuugggaga

SEQ ID NO: 1342181 - RNA, 19 nt, Artificial Sequence
  Description of Artificial Sequence: Synthetic oligonucleotide
  Antisense strand to SEQ ID NO: 1342180
ucucccaaggugaaggacc

SEQ ID NO: 1342182 - RNA, 19 nt, Artificial Sequence
  Description of Artificial Sequence: Synthetic oligonucleotide
  Sense strand starting at position 2350 of SEQ ID NO: 1242368
uaccuaacuggcuguguua

SEQ ID NO: 1342183 - RNA, 19 nt, Artificial Sequence
  Description of Artificial Sequence: Synthetic oligonucleotide
  Antisense strand to SEQ ID NO: 1342182
uaacacagccaguuaggua

SEQ ID NO: 1342184 - RNA, 19 nt, Artificial Sequence
  Description of Artificial Sequence: Synthetic oligonucleotide
  Sense strand starting at position 2373 of SEQ ID NO: 1242368
ggacgaguuccuuaaccuc

SEQ ID NO: 1342185 - RNA, 19 nt, Artificial Sequence
  Description of Artificial Sequence: Synthetic oligonucleotide
  Antisense strand to SEQ ID NO: 1342184
gagguuaaggaacucgucc

SEQ ID NO: 1342186 - RNA, 19 nt, Artificial Sequence
  Description of Artificial Sequence: Synthetic oligonucleotide
  Sense strand starting at position 2413 of SEQ ID NO: 1242368
cuguaaagugggcaucaga

SEQ ID NO: 1342187 - RNA, 19 nt, Artificial Sequence
  Description of Artificial Sequence: Synthetic oligonucleotide
  Antisense strand to SEQ ID NO: 1342186
ucugaugcccacuuuacag

SEQ ID NO: 1342188 - RNA, 19 nt, Artificial Sequence
  Description of Artificial Sequence: Synthetic oligonucleotide
  Sense strand starting at position 2447 of SEQ ID NO: 1242368
caaggcugugaugggaaau

SEQ ID NO: 1342189 - RNA, 19 nt, Artificial Sequence
  Description of Artificial Sequence: Synthetic oligonucleotide
  Antisense strand to SEQ ID NO: 1342188
auuucccaucacagccuug

SEQ ID NO: 1342190 - RNA, 19 nt, Artificial Sequence
  Description of Artificial Sequence: Synthetic oligonucleotide
  Sense strand starting at position 2496 of SEQ ID NO: 1242368
gucagcucucaagaauggu

SEQ ID NO: 1342191 - RNA, 19 nt, Artificial Sequence
  Description of Artificial Sequence: Synthetic oligonucleotide
  Antisense strand to SEQ ID NO: 1342190
accauucuugagagcugac

SEQ ID NO: 1342192 - RNA, 19 nt, Artificial Sequence
  Description of Artificial Sequence: Synthetic oligonucleotide
  Sense strand starting at position 2499 of SEQ ID NO: 1242368
agcucucaagaaugguaau

SEQ ID NO: 1342193 - RNA, 19 nt, Artificial Sequence
  Description of Artificial Sequence: Synthetic oligonucleotide
  Antisense strand to SEQ ID NO: 1342192
auuaccauucuugagagcu

SEQ ID NO: 1342194 - RNA, 19 nt, Artificial Sequence
  Description of Artificial Sequence: Synthetic oligonucleotide
  Sense strand starting at position 2502 of SEQ ID NO: 1242368
ucucaagaaugguaauauu

SEQ ID NO: 1342195 - RNA, 19 nt, Artificial Sequence
  Description of Artificial Sequence: Synthetic oligonucleotide
  Antisense strand to SEQ ID NO: 1342194
aauauuaccauucuugaga

SEQ ID NO: 1342196 - RNA, 19 nt, Artificial Sequence
  Description of Artificial Sequence: Synthetic oligonucleotide
  Sense strand starting at position 2505 of SEQ ID NO: 1242368
caagaaugguaauauuguu

SEQ ID NO: 1342197 - RNA, 19 nt, Artificial Sequence
  Description of Artificial Sequence: Synthetic oligonucleotide
  Antisense strand to SEQ ID NO: 1342196
aacaauauuaccauucuug

SEQ ID NO: 1342198 - RNA, 19 nt, Artificial Sequence
  Description of Artificial Sequence: Synthetic oligonucleotide
  Sense strand starting at position 2510 of SEQ ID NO: 1242368
augguaauauuguuuacag

SEQ ID NO: 1342199 - RNA, 19 nt, Artificial Sequence
  Description of Artificial Sequence: Synthetic oligonucleotide
  Antisense strand to SEQ ID NO: 1342198
cuguaaacaauauuaccau

SEQ ID NO: 1342200 - RNA, 19 nt, Artificial Sequence
  Description of Artificial Sequence: Synthetic oligonucleotide
  Sense strand starting at position 2511 of SEQ ID NO: 1242368
ugguaauauuguuuacaga

SEQ ID NO: 1342201 - RNA, 19 nt, Artificial Sequence
  Description of Artificial Sequence: Synthetic oligonucleotide
  Antisense strand to SEQ ID NO: 1342200
ucuguaaacaauauuacca

SEQ ID NO: 1342202 - RNA, 19 nt, Artificial Sequence
  Description of Artificial Sequence: Synthetic oligonucleotide
  Sense strand starting at position 2581 of SEQ ID NO: 1242368
acgucuccacccgagauaa

SEQ ID NO: 1342203 - RNA, 19 nt, Artificial Sequence
  Description of Artificial Sequence: Synthetic oligonucleotide
  Antisense strand to SEQ ID NO: 1342202
uuaucucggguggagacgu

SEQ ID NO: 1342204 - RNA, 19 nt, Artificial Sequence
  Description of Artificial Sequence: Synthetic oligonucleotide
  Sense strand starting at position 2583 of SEQ ID NO: 1242368
gucuccacccgagauaaau

SEQ ID NO: 1342205 - RNA, 19 nt, Artificial Sequence
  Description of Artificial Sequence: Synthetic oligonucleotide
  Antisense strand to SEQ ID NO: 1342204
auuuaucucggguggagac

SEQ ID NO: 1342206 - RNA, 19 nt, Artificial Sequence
  Description of Artificial Sequence: Synthetic oligonucleotide
  Sense strand starting at position 2634 of SEQ ID NO: 1242368
gggcgugcucagagaguaa

SEQ ID NO: 1342207 - RNA, 19 nt, Artificial Sequence
  Description of Artificial Sequence: Synthetic oligonucleotide
  Antisense strand to SEQ ID NO: 1342206
uuacucucugagcacgccc

SEQ ID NO: 1342208 - RNA, 19 nt, Artificial Sequence
  Description of Artificial Sequence: Synthetic oligonucleotide
  Sense strand starting at position 2676 of SEQ ID NO: 1242368
gggugaaagauaggguuau

SEQ ID NO: 1342209 - RNA, 19 nt, Artificial Sequence
  Description of Artificial Sequence: Synthetic oligonucleotide
  Antisense strand to SEQ ID NO: 1342208
auaacccuaucuuucaccc

SEQ ID NO: 1342210 - RNA, 19 nt, Artificial Sequence
  Description of Artificial Sequence: Synthetic oligonucleotide
  Sense strand starting at position 2754 of SEQ ID NO: 1242368
gcuaucuuccaggaaagca

SEQ ID NO: 1342211 - RNA, 19 nt, Artificial Sequence
  Description of Artificial Sequence: Synthetic oligonucleotide
  Antisense strand to SEQ ID NO: 1342210
ugcuuuccuggaagauagc

SEQ ID NO: 1342212 - RNA, 19 nt, Artificial Sequence
  Description of Artificial Sequence: Synthetic oligonucleotide
  Sense strand starting at position 2811 of SEQ ID NO: 1242368
uggacuuguaaguggcuga

SEQ ID NO: 1342213 - RNA, 19 nt, Artificial Sequence
  Description of Artificial Sequence: Synthetic oligonucleotide
  Antisense strand to SEQ ID NO: 1342212
ucagccacuuacaagucca

SEQ ID NO: 1342214 - RNA, 19 nt, Artificial Sequence
  Description of Artificial Sequence: Synthetic oligonucleotide
  Sense strand starting at position 2935 of SEQ ID NO: 1242368
gccucuccucuccgggaau

SEQ ID NO: 1342215 - RNA, 19 nt, Artificial Sequence
  Description of Artificial Sequence: Synthetic oligonucleotide
  Antisense strand to SEQ ID NO: 1342214
auucccggagaggagaggc

SEQ ID NO: 1342216 - RNA, 19 nt, Artificial Sequence
  Description of Artificial Sequence: Synthetic oligonucleotide
  Sense strand starting at position 3031 of SEQ ID NO: 1242368
acaagaaaguuagacaaca

SEQ ID NO: 1342217 - RNA, 19 nt, Artificial Sequence
  Description of Artificial Sequence: Synthetic oligonucleotide
  Antisense strand to SEQ ID NO: 1342216
uguugucuaacuuucuugu

SEQ ID NO: 1342218 - RNA, 19 nt, Artificial Sequence
  Description of Artificial Sequence: Synthetic oligonucleotide
  Sense strand starting at position 3102 of SEQ ID NO: 1242368
uggcaucaaccuuguuaau

SEQ ID NO: 1342219 - RNA, 19 nt, Artificial Sequence
  Description of Artificial Sequence: Synthetic oligonucleotide
  Antisense strand to SEQ ID NO: 1342218
auuaacaagguugaugcca

SEQ ID NO: 1342220 - RNA, 19 nt, Artificial Sequence
  Description of Artificial Sequence: Synthetic oligonucleotide
  Sense strand starting at position 3407 of SEQ ID NO: 1242368
ccggccgucagcguuaaua

SEQ ID NO: 1342221 - RNA, 19 nt, Artificial Sequence
  Description of Artificial Sequence: Synthetic oligonucleotide
  Antisense strand to SEQ ID NO: 1342220
uauuaacgcugacggccgg

SEQ ID NO: 1342222 - RNA, 19 nt, Artificial Sequence
  Description of Artificial Sequence: Synthetic oligonucleotide
  Sense strand starting at position 3463 of SEQ ID NO: 1242368
uguaguaaacugcacaaau

SEQ ID NO: 1342223 - RNA, 19 nt, Artificial Sequence
  Description of Artificial Sequence: Synthetic oligonucleotide
  Antisense strand to SEQ ID NO: 1342222
auuugugcaguuuacuaca

SEQ ID NO: 1342224 - RNA, 19 nt, Artificial Sequence
  Description of Artificial Sequence: Synthetic oligonucleotide
  Sense strand starting at position 3517 of SEQ ID NO: 1242368
cuuccuguguguuuccuau

SEQ ID NO: 1342225 - RNA, 19 nt, Artificial Sequence
  Description of Artificial Sequence: Synthetic oligonucleotide
  Antisense strand to SEQ ID NO: 1342224
auaggaaacacacaggaag

SEQ ID NO: 1342226 - RNA, 19 nt, Artificial Sequence
  Description of Artificial Sequence: Synthetic oligonucleotide
  Sense strand starting at position 3523 of SEQ ID NO: 1242368
guguguuuccuaugcauaa

SEQ ID NO: 1342227 - RNA, 19 nt, Artificial Sequence
  Description of Artificial Sequence: Synthetic oligonucleotide
  Antisense strand to SEQ ID NO: 1342226
uuaugcauaggaaacacac

SEQ ID NO: 1342228 - RNA, 19 nt, Artificial Sequence
  Description of Artificial Sequence: Synthetic oligonucleotide
  Sense strand starting at position 3524 of SEQ ID NO: 1242368
uguguuuccuaugcauaau

SEQ ID NO: 1342229 - RNA, 19 nt, Artificial Sequence
  Description of Artificial Sequence: Synthetic oligonucleotide
  Antisense strand to SEQ ID NO: 1342228
auuaugcauaggaaacaca

SEQ ID NO: 1342230 - RNA, 19 nt, Artificial Sequence
  Description of Artificial Sequence: Synthetic oligonucleotide
  Sense strand starting at position 157 of SEQ ID NO: 1242369
gaaguaaacucugagcuga

SEQ ID NO: 1342231 - RNA, 19 nt, Artificial Sequence
  Description of Artificial Sequence: Synthetic oligonucleotide
  Antisense strand to SEQ ID NO: 1342230
ucagcucagaguuuacuuc

SEQ ID NO: 1342232 - RNA, 19 nt, Artificial Sequence
  Description of Artificial Sequence: Synthetic oligonucleotide
  Sense strand starting at position 159 of SEQ ID NO: 1242369
aguaaacucugagcugagu

SEQ ID NO: 1342233 - RNA, 19 nt, Artificial Sequence
  Description of Artificial Sequence: Synthetic oligonucleotide
  Antisense strand to SEQ ID NO: 1342232
acucagcucagaguuuacu

SEQ ID NO: 1342234 - RNA, 19 nt, Artificial Sequence
  Description of Artificial Sequence: Synthetic oligonucleotide
  Sense strand starting at position 165 of SEQ ID NO: 1242369
cucugagcugaguaacacu

SEQ ID NO: 1342235 - RNA, 19 nt, Artificial Sequence
  Description of Artificial Sequence: Synthetic oligonucleotide
  Antisense strand to SEQ ID NO: 1342234
aguguuacucagcucagag

SEQ ID NO: 1342236 - RNA, 19 nt, Artificial Sequence
  Description of Artificial Sequence: Synthetic oligonucleotide
  Sense strand starting at position 245 of SEQ ID NO: 1242369
uccucacuaccuugaggua

SEQ ID NO: 1342237 - RNA, 19 nt, Artificial Sequence
  Description of Artificial Sequence: Synthetic oligonucleotide
  Antisense strand to SEQ ID NO: 1342236
uaccucaagguagugagga

SEQ ID NO: 1342238 - RNA, 19 nt, Artificial Sequence
  Description of Artificial Sequence: Synthetic oligonucleotide
  Sense strand starting at position 343 of SEQ ID NO: 1242369
uuacuaaguggcugaggua

SEQ ID NO: 1342239 - RNA, 19 nt, Artificial Sequence
  Description of Artificial Sequence: Synthetic oligonucleotide
  Antisense strand to SEQ ID NO: 1342238
uaccucagccacuuaguaa

SEQ ID NO: 1342240 - RNA, 19 nt, Artificial Sequence
  Description of Artificial Sequence: Synthetic oligonucleotide
  Sense strand starting at position 372 of SEQ ID NO: 1242369
ccaggucaucugcaguauu

SEQ ID NO: 1342241 - RNA, 19 nt, Artificial Sequence
  Description of Artificial Sequence: Synthetic oligonucleotide
  Antisense strand to SEQ ID NO: 1342240
aauacugcagaugaccugg

SEQ ID NO: 1342242 - RNA, 19 nt, Artificial Sequence
  Description of Artificial Sequence: Synthetic oligonucleotide
  Sense strand starting at position 436 of SEQ ID NO: 1242369
gccuuaauuuaagugcuga

SEQ ID NO: 1342243 - RNA, 19 nt, Artificial Sequence
  Description of Artificial Sequence: Synthetic oligonucleotide
  Antisense strand to SEQ ID NO: 1342242
ucagcacuuaaauuaaggc

SEQ ID NO: 1342244 - RNA, 19 nt, Artificial Sequence
  Description of Artificial Sequence: Synthetic oligonucleotide
  Sense strand starting at position 511 of SEQ ID NO: 1242369
gauggaagucugggacagu

SEQ ID NO: 1342245 - RNA, 19 nt, Artificial Sequence
  Description of Artificial Sequence: Synthetic oligonucleotide
  Antisense strand to SEQ ID NO: 1342244
acugucccagacuuccauc

SEQ ID NO: 1342246 - RNA, 19 nt, Artificial Sequence
  Description of Artificial Sequence: Synthetic oligonucleotide
  Sense strand starting at position 512 of SEQ ID NO: 1242369
auggaagucugggacaguu

SEQ ID NO: 1342247 - RNA, 19 nt, Artificial Sequence
  Description of Artificial Sequence: Synthetic oligonucleotide
  Antisense strand to SEQ ID NO: 1342246
aacugucccagacuuccau

SEQ ID NO: 1342248 - RNA, 19 nt, Artificial Sequence
  Description of Artificial Sequence: Synthetic oligonucleotide
  Sense strand starting at position 522 of SEQ ID NO: 1242369
gggacaguuucagucugua

SEQ ID NO: 1342249 - RNA, 19 nt, Artificial Sequence
  Description of Artificial Sequence: Synthetic oligonucleotide
  Antisense strand to SEQ ID NO: 1342248
uacagacugaaacuguccc

SEQ ID NO: 1342250 - RNA, 19 nt, Artificial Sequence
  Description of Artificial Sequence: Synthetic oligonucleotide
  Sense strand starting at position 593 of SEQ ID NO: 1242369
aguuaaagggcuugcggau

SEQ ID NO: 1342251 - RNA, 19 nt, Artificial Sequence
  Description of Artificial Sequence: Synthetic oligonucleotide
  Antisense strand to SEQ ID NO: 1342250
auccgcaagcccuuuaacu

SEQ ID NO: 1342252 - RNA, 19 nt, Artificial Sequence
  Description of Artificial Sequence: Synthetic oligonucleotide
  Sense strand starting at position 722 of SEQ ID NO: 1242369
uuacuugcccaguggaaga

SEQ ID NO: 1342253 - RNA, 19 nt, Artificial Sequence
  Description of Artificial Sequence: Synthetic oligonucleotide
  Antisense strand to SEQ ID NO: 1342252
ucuuccacugggcaaguaa

SEQ ID NO: 1342254 - RNA, 19 nt, Artificial Sequence
  Description of Artificial Sequence: Synthetic oligonucleotide
  Sense strand starting at position 737 of SEQ ID NO: 1242369
aagaaaugggcuugggauc

SEQ ID NO: 1342255 - RNA, 19 nt, Artificial Sequence
  Description of Artificial Sequence: Synthetic oligonucleotide
  Antisense strand to SEQ ID NO: 1342254
gaucccaagcccauuucuu

SEQ ID NO: 1342256 - RNA, 19 nt, Artificial Sequence
  Description of Artificial Sequence: Synthetic oligonucleotide
  Sense strand starting at position 1172 of SEQ ID NO: 1242369
cugcgacuugcugggaaua

SEQ ID NO: 1342257 - RNA, 19 nt, Artificial Sequence
  Description of Artificial Sequence: Synthetic oligonucleotide
  Antisense strand to SEQ ID NO: 1342256
uauucccagcaagucgcag

SEQ ID NO: 1342258 - RNA, 19 nt, Artificial Sequence
  Description of Artificial Sequence: Synthetic oligonucleotide
  Sense strand starting at position 1270 of SEQ ID NO: 1242369
ggcucuggucagcaucaaa

SEQ ID NO: 1342259 - RNA, 19 nt, Artificial Sequence
  Description of Artificial Sequence: Synthetic oligonucleotide
  Antisense strand to SEQ ID NO: 1342258
uuugaugcugaccagagcc

SEQ ID NO: 1342260 - RNA, 19 nt, Artificial Sequence
  Description of Artificial Sequence: Synthetic oligonucleotide
  Sense strand starting at position 2443 of SEQ ID NO: 1242369
gggcuagcagcuugagagu

SEQ ID NO: 1342261 - RNA, 19 nt, Artificial Sequence
  Description of Artificial Sequence: Synthetic oligonucleotide
  Antisense strand to SEQ ID NO: 1342260
acucucaagcugcuagccc

SEQ ID NO: 1342262 - RNA, 19 nt, Artificial Sequence
  Description of Artificial Sequence: Synthetic oligonucleotide
  Sense strand starting at position 2475 of SEQ ID NO: 1242369
aggucaauccacugcaagu

SEQ ID NO: 1342263 - RNA, 19 nt, Artificial Sequence
  Description of Artificial Sequence: Synthetic oligonucleotide
  Antisense strand to SEQ ID NO: 1342262
acuugcaguggauugaccu

SEQ ID NO: 1342264 - RNA, 19 nt, Artificial Sequence
  Description of Artificial Sequence: Synthetic oligonucleotide
  Sense strand starting at position 2542 of SEQ ID NO: 1242369
cgggcuuguccgcuuaaua

SEQ ID NO: 1342265 - RNA, 19 nt, Artificial Sequence
  Description of Artificial Sequence: Synthetic oligonucleotide
  Antisense strand to SEQ ID NO: 1342264
uauuaagcggacaagcccg

SEQ ID NO: 1342266 - RNA, 19 nt, Artificial Sequence
  Description of Artificial Sequence: Synthetic oligonucleotide
  Sense strand starting at position 2556 of SEQ ID NO: 1242369
uaauauucuguccacgcga

SEQ ID NO: 1342267 - RNA, 19 nt, Artificial Sequence
  Description of Artificial Sequence: Synthetic oligonucleotide
  Antisense strand to SEQ ID NO: 1342266
ucgcguggacagaauauua

SEQ ID NO: 1342268 - RNA, 19 nt, Artificial Sequence
  Description of Artificial Sequence: Synthetic oligonucleotide
  Sense strand starting at position 2593 of SEQ ID NO: 1242369
gggcaagauuagcuuaagu

SEQ ID NO: 1342269 - RNA, 19 nt, Artificial Sequence
  Description of Artificial Sequence: Synthetic oligonucleotide
  Antisense strand to SEQ ID NO: 1342268
acuuaagcuaaucuugccc

SEQ ID NO: 1342270 - RNA, 19 nt, Artificial Sequence
  Description of Artificial Sequence: Synthetic oligonucleotide
  Sense strand starting at position 2595 of SEQ ID NO: 1242369
gcaagauuagcuuaagugg

SEQ ID NO: 1342271 - RNA, 19 nt, Artificial Sequence
  Description of Artificial Sequence: Synthetic oligonucleotide
  Antisense strand to SEQ ID NO: 1342270
ccacuuaagcuaaucuugc

SEQ ID NO: 1342272 - RNA, 19 nt, Artificial Sequence
  Description of Artificial Sequence: Synthetic oligonucleotide
  Sense strand starting at position 2598 of SEQ ID NO: 1242369
agauuagcuuaagugggau

SEQ ID NO: 1342273 - RNA, 19 nt, Artificial Sequence
  Description of Artificial Sequence: Synthetic oligonucleotide
  Antisense strand to SEQ ID NO: 1342272
aucccacuuaagcuaaucu

SEQ ID NO: 1342274 - RNA, 19 nt, Artificial Sequence
  Description of Artificial Sequence: Synthetic oligonucleotide
  Sense strand starting at position 2600 of SEQ ID NO: 1242369
auuagcuuaagugggauaa

SEQ ID NO: 1342275 - RNA, 19 nt, Artificial Sequence
  Description of Artificial Sequence: Synthetic oligonucleotide
  Antisense strand to SEQ ID NO: 1342274
uuaucccacuuaagcuaau

SEQ ID NO: 1342276 - RNA, 19 nt, Artificial Sequence
  Description of Artificial Sequence: Synthetic oligonucleotide
  Sense strand starting at position 2602 of SEQ ID NO: 1242369
uagcuuaagugggauaaua

SEQ ID NO: 1342277 - RNA, 19 nt, Artificial Sequence
  Description of Artificial Sequence: Synthetic oligonucleotide
  Antisense strand to SEQ ID NO: 1342276
uauuaucccacuuaagcua

SEQ ID NO: 1342278 - RNA, 19 nt, Artificial Sequence
  Description of Artificial Sequence: Synthetic oligonucleotide
  Sense strand starting at position 2610 of SEQ ID NO: 1242369
gugggauaauaggauuuaa

SEQ ID NO: 1342279 - RNA, 19 nt, Artificial Sequence
  Description of Artificial Sequence: Synthetic oligonucleotide
  Antisense strand to SEQ ID NO: 1342278
uuaaauccuauuaucccac

SEQ ID NO: 1342280 - RNA, 19 nt, Artificial Sequence
  Description of Artificial Sequence: Synthetic oligonucleotide
  Sense strand starting at position 2831 of SEQ ID NO: 1242369
aguggaucccaacagcauu

SEQ ID NO: 1342281 - RNA, 19 nt, Artificial Sequence
  Description of Artificial Sequence: Synthetic oligonucleotide
  Antisense strand to SEQ ID NO: 1342280
aaugcuguugggauccacu

SEQ ID NO: 1342282 - RNA, 19 nt, Artificial Sequence
  Description of Artificial Sequence: Synthetic oligonucleotide
  Sense strand starting at position 2958 of SEQ ID NO: 1242369
uguaguaguuccuccugua

SEQ ID NO: 1342283 - RNA, 19 nt, Artificial Sequence
  Description of Artificial Sequence: Synthetic oligonucleotide
  Antisense strand to SEQ ID NO: 1342282
uacaggaggaacuacuaca

SEQ ID NO: 1342284 - RNA, 19 nt, Artificial Sequence
  Description of Artificial Sequence: Synthetic oligonucleotide
  Sense strand starting at position 2967 of SEQ ID NO: 1242369
uccuccuguaguuaagagu

SEQ ID NO: 1342285 - RNA, 19 nt, Artificial Sequence
  Description of Artificial Sequence: Synthetic oligonucleotide
  Antisense strand to SEQ ID NO: 1342284
acucuuaacuacaggagga

SEQ ID NO: 1342286 - RNA, 19 nt, Artificial Sequence
  Description of Artificial Sequence: Synthetic oligonucleotide
  Sense strand starting at position 2993 of SEQ ID NO: 1242369
agugaaagccucugcuagu

SEQ ID NO: 1342287 - RNA, 19 nt, Artificial Sequence
  Description of Artificial Sequence: Synthetic oligonucleotide
  Antisense strand to SEQ ID NO: 1342286
acuagcagaggcuuucacu

SEQ ID NO: 1342288 - RNA, 19 nt, Artificial Sequence
  Description of Artificial Sequence: Synthetic oligonucleotide
  Sense strand starting at position 2994 of SEQ ID NO: 1242369
gugaaagccucugcuaguu

SEQ ID NO: 1342289 - RNA, 19 nt, Artificial Sequence
  Description of Artificial Sequence: Synthetic oligonucleotide
  Antisense strand to SEQ ID NO: 1342288
aacuagcagaggcuuucac

SEQ ID NO: 1342290 - RNA, 19 nt, Artificial Sequence
  Description of Artificial Sequence: Synthetic oligonucleotide
  Sense strand starting at position 3006 of SEQ ID NO: 1242369
gcuaguuauuuccauggca

SEQ ID NO: 1342291 - RNA, 19 nt, Artificial Sequence
  Description of Artificial Sequence: Synthetic oligonucleotide
  Antisense strand to SEQ ID NO: 1342290
ugccauggaaauaacuagc

SEQ ID NO: 1342292 - RNA, 19 nt, Artificial Sequence
  Description of Artificial Sequence: Synthetic oligonucleotide
  Sense strand starting at position 3009 of SEQ ID NO: 1242369
aguuauuuccauggcagua

SEQ ID NO: 1342293 - RNA, 19 nt, Artificial Sequence
  Description of Artificial Sequence: Synthetic oligonucleotide
  Antisense strand to SEQ ID NO: 1342292
uacugccauggaaauaacu

SEQ ID NO: 1342294 - RNA, 19 nt, Artificial Sequence
  Description of Artificial Sequence: Synthetic oligonucleotide
  Sense strand starting at position 3026 of SEQ ID NO: 1242369
uagagaccaucgcuccaua

SEQ ID NO: 1342295 - RNA, 19 nt, Artificial Sequence
  Description of Artificial Sequence: Synthetic oligonucleotide
  Antisense strand to SEQ ID NO: 1342294
uauggagcgauggucucua

SEQ ID NO: 1342296 - RNA, 19 nt, Artificial Sequence
  Description of Artificial Sequence: Synthetic oligonucleotide
  Sense strand starting at position 3029 of SEQ ID NO: 1242369
agaccaucgcuccauaaau

SEQ ID NO: 1342297 - RNA, 19 nt, Artificial Sequence
  Description of Artificial Sequence: Synthetic oligonucleotide
  Antisense strand to SEQ ID NO: 1342296
auuuauggagcgauggucu

SEQ ID NO: 1342298 - RNA, 19 nt, Artificial Sequence
  Description of Artificial Sequence: Synthetic oligonucleotide
  Sense strand starting at position 3220 of SEQ ID NO: 1242369
agcuaaguuuccucaugcu

SEQ ID NO: 1342299 - RNA, 19 nt, Artificial Sequence
  Description of Artificial Sequence: Synthetic oligonucleotide
  Antisense strand to SEQ ID NO: 1342298
agcaugaggaaacuuagcu

SEQ ID NO: 1342300 - RNA, 19 nt, Artificial Sequence
  Description of Artificial Sequence: Synthetic oligonucleotide
  Sense strand starting at position 3228 of SEQ ID NO: 1242369
uuccucaugcugcaugauu

SEQ ID NO: 1342301 - RNA, 19 nt, Artificial Sequence
  Description of Artificial Sequence: Synthetic oligonucleotide
  Antisense strand to SEQ ID NO: 1342300
aaucaugcagcaugaggaa

SEQ ID NO: 1342302 - RNA, 19 nt, Artificial Sequence
  Description of Artificial Sequence: Synthetic oligonucleotide
  Sense strand starting at position 3237 of SEQ ID NO: 1242369
cugcaugauuucuguaccu

SEQ ID NO: 1342303 - RNA, 19 nt, Artificial Sequence
  Description of Artificial Sequence: Synthetic oligonucleotide
  Antisense strand to SEQ ID NO: 1342302
agguacagaaaucaugcag

SEQ ID NO: 1342304 - RNA, 19 nt, Artificial Sequence
  Description of Artificial Sequence: Synthetic oligonucleotide
  Sense strand starting at position 3367 of SEQ ID NO: 1242369
gcuacuauugcccagguuu

SEQ ID NO: 1342305 - RNA, 19 nt, Artificial Sequence
  Description of Artificial Sequence: Synthetic oligonucleotide
  Antisense strand to SEQ ID NO: 1342304
aaaccugggcaauaguagc

SEQ ID NO: 1342306 - RNA, 19 nt, Artificial Sequence
  Description of Artificial Sequence: Synthetic oligonucleotide
  Sense strand starting at position 3383 of SEQ ID NO: 1242369
uuuggaugcuuacucuaaa

SEQ ID NO: 1342307 - RNA, 19 nt, Artificial Sequence
  Description of Artificial Sequence: Synthetic oligonucleotide
  Antisense strand to SEQ ID NO: 1342306
uuuagaguaagcauccaaa

SEQ ID NO: 1342308 - RNA, 19 nt, Artificial Sequence
  Description of Artificial Sequence: Synthetic oligonucleotide
  Sense strand starting at position 3384 of SEQ ID NO: 1242369
uuggaugcuuacucuaaau

SEQ ID NO: 1342309 - RNA, 19 nt, Artificial Sequence
  Description of Artificial Sequence: Synthetic oligonucleotide
  Antisense strand to SEQ ID NO: 1342308
auuuagaguaagcauccaa

SEQ ID NO: 1342310 - RNA, 19 nt, Artificial Sequence
  Description of Artificial Sequence: Synthetic oligonucleotide
  Sense strand starting at position 9 of SEQ ID NO: 1242370
guccaucagggaugucaaa

SEQ ID NO: 1342311 - RNA, 19 nt, Artificial Sequence
  Description of Artificial Sequence: Synthetic oligonucleotide
  Antisense strand to SEQ ID NO: 1342310
uuugacaucccugauggac

SEQ ID NO: 1342312 - RNA, 19 nt, Artificial Sequence
  Description of Artificial Sequence: Synthetic oligonucleotide
  Sense strand starting at position 30 of SEQ ID NO: 1242370
gaaauauaaccaggucagu

SEQ ID NO: 1342313 - RNA, 19 nt, Artificial Sequence
  Description of Artificial Sequence: Synthetic oligonucleotide
  Antisense strand to SEQ ID NO: 1342312
acugaccugguuauauuuc

SEQ ID NO: 1342314 - RNA, 19 nt, Artificial Sequence
  Description of Artificial Sequence: Synthetic oligonucleotide
  Sense strand starting at position 262 of SEQ ID NO: 1242370
uucucuugucaagagcuua

SEQ ID NO: 1342315 - RNA, 19 nt, Artificial Sequence
  Description of Artificial Sequence: Synthetic oligonucleotide
  Antisense strand to SEQ ID NO: 1342314
uaagcucuugacaagagaa

SEQ ID NO: 1342316 - RNA, 19 nt, Artificial Sequence
  Description of Artificial Sequence: Synthetic oligonucleotide
  Sense strand starting at position 270 of SEQ ID NO: 1242370
ucaagagcuuauucugaau

SEQ ID NO: 1342317 - RNA, 19 nt, Artificial Sequence
  Description of Artificial Sequence: Synthetic oligonucleotide
  Antisense strand to SEQ ID NO: 1342316
auucagaauaagcucuuga

SEQ ID NO: 1342318 - RNA, 19 nt, Artificial Sequence
  Description of Artificial Sequence: Synthetic oligonucleotide
  Sense strand starting at position 348 of SEQ ID NO: 1242370
uuuguagugggcuaaggaa

SEQ ID NO: 1342319 - RNA, 19 nt, Artificial Sequence
  Description of Artificial Sequence: Synthetic oligonucleotide
  Antisense strand to SEQ ID NO: 1342318
uuccuuagcccacuacaaa

SEQ ID NO: 1342320 - RNA, 19 nt, Artificial Sequence
  Description of Artificial Sequence: Synthetic oligonucleotide
  Sense strand starting at position 370 of SEQ ID NO: 1242370
gcaccaugaacaggugaua

SEQ ID NO: 1342321 - RNA, 19 nt, Artificial Sequence
  Description of Artificial Sequence: Synthetic oligonucleotide
  Antisense strand to SEQ ID NO: 1342320
uaucaccuguucauggugc

SEQ ID NO: 1342322 - RNA, 19 nt, Artificial Sequence
  Description of Artificial Sequence: Synthetic oligonucleotide
  Sense strand starting at position 381 of SEQ ID NO: 1242370
aggugauaccauuguaauu

SEQ ID NO: 1342323 - RNA, 19 nt, Artificial Sequence
  Description of Artificial Sequence: Synthetic oligonucleotide
  Antisense strand to SEQ ID NO: 1342322
aauuacaaugguaucaccu

SEQ ID NO: 1342324 - RNA, 19 nt, Artificial Sequence
  Description of Artificial Sequence: Synthetic oligonucleotide
  Sense strand starting at position 499 of SEQ ID NO: 1242370
cucugauucuggguacaca

SEQ ID NO: 1342325 - RNA, 19 nt, Artificial Sequence
  Description of Artificial Sequence: Synthetic oligonucleotide
  Antisense strand to SEQ ID NO: 1342324
uguguacccagaaucagag

SEQ ID NO: 1342326 - RNA, 19 nt, Artificial Sequence
  Description of Artificial Sequence: Synthetic oligonucleotide
  Sense strand starting at position 500 of SEQ ID NO: 1242370
ucugauucuggguacacau

SEQ ID NO: 1342327 - RNA, 19 nt, Artificial Sequence
  Description of Artificial Sequence: Synthetic oligonucleotide
  Antisense strand to SEQ ID NO: 1342326
auguguacccagaaucaga

SEQ ID NO: 1342328 - RNA, 19 nt, Artificial Sequence
  Description of Artificial Sequence: Synthetic oligonucleotide
  Sense strand starting at position 874 of SEQ ID NO: 1242370
gucucugugaauuagaguc

SEQ ID NO: 1342329 - RNA, 19 nt, Artificial Sequence
  Description of Artificial Sequence: Synthetic oligonucleotide
  Antisense strand to SEQ ID NO: 1342328
gacucuaauucacagagac

SEQ ID NO: 1342330 - RNA, 19 nt, Artificial Sequence
  Description of Artificial Sequence: Synthetic oligonucleotide
  Sense strand starting at position 1079 of SEQ ID NO: 1242370
aacagucaccgcgaacaau

SEQ ID NO: 1342331 - RNA, 19 nt, Artificial Sequence
  Description of Artificial Sequence: Synthetic oligonucleotide
  Antisense strand to SEQ ID NO: 1342330
auuguucgcggugacuguu

SEQ ID NO: 1342332 - RNA, 19 nt, Artificial Sequence
  Description of Artificial Sequence: Synthetic oligonucleotide
  Sense strand starting at position 2297 of SEQ ID NO: 1242370
gucguugcgaugguuuaga

SEQ ID NO: 1342333 - RNA, 19 nt, Artificial Sequence
  Description of Artificial Sequence: Synthetic oligonucleotide
  Antisense strand to SEQ ID NO: 1342332
ucuaaaccaucgcaacgac

SEQ ID NO: 1342334 - RNA, 19 nt, Artificial Sequence
  Description of Artificial Sequence: Synthetic oligonucleotide
  Sense strand starting at position 2313 of SEQ ID NO: 1242370
agauauauuguguacuaca

SEQ ID NO: 1342335 - RNA, 19 nt, Artificial Sequence
  Description of Artificial Sequence: Synthetic oligonucleotide
  Antisense strand to SEQ ID NO: 1342334
uguaguacacaauauaucu

SEQ ID NO: 1342336 - RNA, 19 nt, Artificial Sequence
  Description of Artificial Sequence: Synthetic oligonucleotide
  Sense strand starting at position 2395 of SEQ ID NO: 1242370
agguguuaaucaucuaacc

SEQ ID NO: 1342337 - RNA, 19 nt, Artificial Sequence
  Description of Artificial Sequence: Synthetic oligonucleotide
  Antisense strand to SEQ ID NO: 1342336
gguuagaugauuaacaccu

SEQ ID NO: 1342338 - RNA, 19 nt, Artificial Sequence
  Description of Artificial Sequence: Synthetic oligonucleotide
  Sense strand starting at position 2541 of SEQ ID NO: 1242370
gcuuccucgcuguuauugu

SEQ ID NO: 1342339 - RNA, 19 nt, Artificial Sequence
  Description of Artificial Sequence: Synthetic oligonucleotide
  Antisense strand to SEQ ID NO: 1342338
acaauaacagcgaggaagc

SEQ ID NO: 1342340 - RNA, 19 nt, Artificial Sequence
  Description of Artificial Sequence: Synthetic oligonucleotide
  Sense strand starting at position 2552 of SEQ ID NO: 1242370
guuauuguuguggaaauau

SEQ ID NO: 1342341 - RNA, 19 nt, Artificial Sequence
  Description of Artificial Sequence: Synthetic oligonucleotide
  Antisense strand to SEQ ID NO: 1342340
auauuuccacaacaauaac

SEQ ID NO: 1342342 - RNA, 19 nt, Artificial Sequence
  Description of Artificial Sequence: Synthetic oligonucleotide
  Sense strand starting at position 2588 of SEQ ID NO: 1242370
ccuguuucugcagacaaug

SEQ ID NO: 1342343 - RNA, 19 nt, Artificial Sequence
  Description of Artificial Sequence: Synthetic oligonucleotide
  Antisense strand to SEQ ID NO: 1342342
cauugucugcagaaacagg

SEQ ID NO: 1342344 - RNA, 19 nt, Artificial Sequence
  Description of Artificial Sequence: Synthetic oligonucleotide
  Sense strand starting at position 2604 of SEQ ID NO: 1242370
augagaaguuccuuucuaa

SEQ ID NO: 1342345 - RNA, 19 nt, Artificial Sequence
  Description of Artificial Sequence: Synthetic oligonucleotide
  Antisense strand to SEQ ID NO: 1342344
uuagaaaggaacuucucau

SEQ ID NO: 1342346 - RNA, 19 nt, Artificial Sequence
  Description of Artificial Sequence: Synthetic oligonucleotide
  Sense strand starting at position 2706 of SEQ ID NO: 1242370
acuacuggucuuuaaguuu

SEQ ID NO: 1342347 - RNA, 19 nt, Artificial Sequence
  Description of Artificial Sequence: Synthetic oligonucleotide
  Antisense strand to SEQ ID NO: 1342346
aaacuuaaagaccaguagu

SEQ ID NO: 1342348 - RNA, 19 nt, Artificial Sequence
  Description of Artificial Sequence: Synthetic oligonucleotide
  Sense strand starting at position 2719 of SEQ ID NO: 1242370
aaguuucucuaggcagaac

SEQ ID NO: 1342349 - RNA, 19 nt, Artificial Sequence
  Description of Artificial Sequence: Synthetic oligonucleotide
  Antisense strand to SEQ ID NO: 1342348
guucugccuagagaaacuu

SEQ ID NO: 1342350 - RNA, 19 nt, Artificial Sequence
  Description of Artificial Sequence: Synthetic oligonucleotide
  Sense strand starting at position 2722 of SEQ ID NO: 1242370
uuucucuaggcagaacuau

SEQ ID NO: 1342351 - RNA, 19 nt, Artificial Sequence
  Description of Artificial Sequence: Synthetic oligonucleotide
  Antisense strand to SEQ ID NO: 1342350
auaguucugccuagagaaa

SEQ ID NO: 1342352 - RNA, 19 nt, Artificial Sequence
  Description of Artificial Sequence: Synthetic oligonucleotide
  Sense strand starting at position 2732 of SEQ ID NO: 1242370
cagaacuauuggucuguaa

SEQ ID NO: 1342353 - RNA, 19 nt, Artificial Sequence
  Description of Artificial Sequence: Synthetic oligonucleotide
  Antisense strand to SEQ ID NO: 1342352
uuacagaccaauaguucug

SEQ ID NO: 1342354 - RNA, 19 nt, Artificial Sequence
  Description of Artificial Sequence: Synthetic oligonucleotide
  Sense strand starting at position 2842 of SEQ ID NO: 1242370
auguucaaggagugaaugu

SEQ ID NO: 1342355 - RNA, 19 nt, Artificial Sequence
  Description of Artificial Sequence: Synthetic oligonucleotide
  Antisense strand to SEQ ID NO: 1342354
acauucacuccuugaacau

SEQ ID NO: 1342356 - RNA, 19 nt, Artificial Sequence
  Description of Artificial Sequence: Synthetic oligonucleotide
  Sense strand starting at position 2849 of SEQ ID NO: 1242370
aggagugaaugucccuuaa

SEQ ID NO: 1342357 - RNA, 19 nt, Artificial Sequence
  Description of Artificial Sequence: Synthetic oligonucleotide
  Antisense strand to SEQ ID NO: 1342356
uuaagggacauucacuccu

SEQ ID NO: 1342358 - RNA, 19 nt, Artificial Sequence
  Description of Artificial Sequence: Synthetic oligonucleotide
  Sense strand starting at position 2851 of SEQ ID NO: 1242370
gagugaaugucccuuaaau

SEQ ID NO: 1342359 - RNA, 19 nt, Artificial Sequence
  Description of Artificial Sequence: Synthetic oligonucleotide
  Antisense strand to SEQ ID NO: 1342358
auuuaagggacauucacuc

SEQ ID NO: 1342360 - RNA, 19 nt, Artificial Sequence
  Description of Artificial Sequence: Synthetic oligonucleotide
  Sense strand starting at position 2853 of SEQ ID NO: 1242370
gugaaugucccuuaaauau

SEQ ID NO: 1342361 - RNA, 19 nt, Artificial Sequence
  Description of Artificial Sequence: Synthetic oligonucleotide
  Antisense strand to SEQ ID NO: 1342360
auauuuaagggacauucac

SEQ ID NO: 1342362 - RNA, 19 nt, Artificial Sequence
  Description of Artificial Sequence: Synthetic oligonucleotide
  Sense strand starting at position 2976 of SEQ ID NO: 1242370
uuuggaguuagcuggauga

SEQ ID NO: 1342363 - RNA, 19 nt, Artificial Sequence
  Description of Artificial Sequence: Synthetic oligonucleotide
  Antisense strand to SEQ ID NO: 1342362
ucauccagcuaacuccaaa

SEQ ID NO: 1342364 - RNA, 19 nt, Artificial Sequence
  Description of Artificial Sequence: Synthetic oligonucleotide
  Sense strand starting at position 2978 of SEQ ID NO: 1242370
uggaguuagcuggaugauu

SEQ ID NO: 1342365 - RNA, 19 nt, Artificial Sequence
  Description of Artificial Sequence: Synthetic oligonucleotide
  Antisense strand to SEQ ID NO: 1342364
aaucauccagcuaacucca

SEQ ID NO: 1342366 - RNA, 19 nt, Artificial Sequence
  Description of Artificial Sequence: Synthetic oligonucleotide
  Sense strand starting at position 3056 of SEQ ID NO: 1242370
cuaagaugauacucagguu

SEQ ID NO: 1342367 - RNA, 19 nt, Artificial Sequence
  Description of Artificial Sequence: Synthetic oligonucleotide
  Antisense strand to SEQ ID NO: 1342366
aaccugaguaucaucuuag

SEQ ID NO: 1342368 - RNA, 19 nt, Artificial Sequence
  Description of Artificial Sequence: Synthetic oligonucleotide
  Sense strand starting at position 3077 of SEQ ID NO: 1242370
uaacuugguggucacuaaa

SEQ ID NO: 1342369 - RNA, 19 nt, Artificial Sequence
  Description of Artificial Sequence: Synthetic oligonucleotide
  Antisense strand to SEQ ID NO: 1342368
uuuagugaccaccaaguua

SEQ ID NO: 1342370 - RNA, 19 nt, Artificial Sequence
  Description of Artificial Sequence: Synthetic oligonucleotide
  Sense strand starting at position 3080 of SEQ ID NO: 1242370
cuugguggucacuaaaugu

SEQ ID NO: 1342371 - RNA, 19 nt, Artificial Sequence
  Description of Artificial Sequence: Synthetic oligonucleotide
  Antisense strand to SEQ ID NO: 1342370
acauuuagugaccaccaag

SEQ ID NO: 1342372 - RNA, 19 nt, Artificial Sequence
  Description of Artificial Sequence: Synthetic oligonucleotide
  Sense strand starting at position 3115 of SEQ ID NO: 1242370
uagagaucccaugguucuu

SEQ ID NO: 1342373 - RNA, 19 nt, Artificial Sequence
  Description of Artificial Sequence: Synthetic oligonucleotide
  Antisense strand to SEQ ID NO: 1342372
aagaaccaugggaucucua

SEQ ID NO: 1342374 - RNA, 19 nt, Artificial Sequence
  Description of Artificial Sequence: Synthetic oligonucleotide
  Sense strand starting at position 3573 of SEQ ID NO: 1242370
ccucaacaaccuugugaga

SEQ ID NO: 1342375 - RNA, 19 nt, Artificial Sequence
  Description of Artificial Sequence: Synthetic oligonucleotide
  Antisense strand to SEQ ID NO: 1342374
ucucacaagguuguugagg

SEQ ID NO: 1342376 - RNA, 19 nt, Artificial Sequence
  Description of Artificial Sequence: Synthetic oligonucleotide
  Sense strand starting at position 3635 of SEQ ID NO: 1242370
ucacauagccaguaauuag

SEQ ID NO: 1342377 - RNA, 19 nt, Artificial Sequence
  Description of Artificial Sequence: Synthetic oligonucleotide
  Antisense strand to SEQ ID NO: 1342376
cuaauuacuggcuauguga

SEQ ID NO: 1342378 - RNA, 19 nt, Artificial Sequence
  Description of Artificial Sequence: Synthetic oligonucleotide
  Sense strand starting at position 3644 of SEQ ID NO: 1242370
caguaauuaguggagcaga

SEQ ID NO: 1342379 - RNA, 19 nt, Artificial Sequence
  Description of Artificial Sequence: Synthetic oligonucleotide
  Antisense strand to SEQ ID NO: 1342378
ucugcuccacuaauuacug

SEQ ID NO: 1342380 - RNA, 19 nt, Artificial Sequence
  Description of Artificial Sequence: Synthetic oligonucleotide
  Sense strand starting at position 3798 of SEQ ID NO: 1242370
agcaucauagcaggaagaa

SEQ ID NO: 1342381 - RNA, 19 nt, Artificial Sequence
  Description of Artificial Sequence: Synthetic oligonucleotide
  Antisense strand to SEQ ID NO: 1342380
uucuuccugcuaugaugcu

SEQ ID NO: 1342382 - RNA, 19 nt, Artificial Sequence
  Description of Artificial Sequence: Synthetic oligonucleotide
  Sense strand starting at position 3821 of SEQ ID NO: 1242370
cgguaaugaaauggguaga

SEQ ID NO: 1342383 - RNA, 19 nt, Artificial Sequence
  Description of Artificial Sequence: Synthetic oligonucleotide
  Antisense strand to SEQ ID NO: 1342382
ucuacccauuucauuaccg

SEQ ID NO: 1342384 - RNA, 19 nt, Artificial Sequence
  Description of Artificial Sequence: Synthetic oligonucleotide
  Sense strand starting at position 3832 of SEQ ID NO: 1242370
uggguagaacuucagguuu

SEQ ID NO: 1342385 - RNA, 19 nt, Artificial Sequence
  Description of Artificial Sequence: Synthetic oligonucleotide
  Antisense strand to SEQ ID NO: 1342384
aaaccugaaguucuaccca

SEQ ID NO: 1342386 - RNA, 19 nt, Artificial Sequence
  Description of Artificial Sequence: Synthetic oligonucleotide
  Sense strand starting at position 3913 of SEQ ID NO: 1242370
cuaccuguggccuguauuu

SEQ ID NO: 1342387 - RNA, 19 nt, Artificial Sequence
  Description of Artificial Sequence: Synthetic oligonucleotide
  Antisense strand to SEQ ID NO: 1342386
aaauacaggccacagguag

SEQ ID NO: 1342388 - RNA, 19 nt, Artificial Sequence
  Description of Artificial Sequence: Synthetic oligonucleotide
  Sense strand starting at position 3973 of SEQ ID NO: 1242370
gugcgugacagaucgcuga

SEQ ID NO: 1342389 - RNA, 19 nt, Artificial Sequence
  Description of Artificial Sequence: Synthetic oligonucleotide
  Antisense strand to SEQ ID NO: 1342388
ucagcgaucugucacgcac

SEQ ID NO: 1342390 - RNA, 19 nt, Artificial Sequence
  Description of Artificial Sequence: Synthetic oligonucleotide
  Sense strand starting at position 54 of SEQ ID NO: 1242371
gcuauuagagggcaccaaa

SEQ ID NO: 1342391 - RNA, 19 nt, Artificial Sequence
  Description of Artificial Sequence: Synthetic oligonucleotide
  Antisense strand to SEQ ID NO: 1342390
uuuggugcccucuaauagc

SEQ ID NO: 1342392 - RNA, 19 nt, Artificial Sequence
  Description of Artificial Sequence: Synthetic oligonucleotide
  Sense strand starting at position 173 of SEQ ID NO: 1242371
cuggcauacucuccugagu

SEQ ID NO: 1342393 - RNA, 19 nt, Artificial Sequence
  Description of Artificial Sequence: Synthetic oligonucleotide
  Antisense strand to SEQ ID NO: 1342392
acucaggagaguaugccag

SEQ ID NO: 1342394 - RNA, 19 nt, Artificial Sequence
  Description of Artificial Sequence: Synthetic oligonucleotide
  Sense strand starting at position 243 of SEQ ID NO: 1242371
auagcaucccuacgaggaa

SEQ ID NO: 1342395 - RNA, 19 nt, Artificial Sequence
  Description of Artificial Sequence: Synthetic oligonucleotide
  Antisense strand to SEQ ID NO: 1342394
uuccucguagggaugcuau

SEQ ID NO: 1342396 - RNA, 19 nt, Artificial Sequence
  Description of Artificial Sequence: Synthetic oligonucleotide
  Sense strand starting at position 246 of SEQ ID NO: 1242371
gcaucccuacgaggaauaa

SEQ ID NO: 1342397 - RNA, 19 nt, Artificial Sequence
  Description of Artificial Sequence: Synthetic oligonucleotide
  Antisense strand to SEQ ID NO: 1342396
uuauuccucguagggaugc

SEQ ID NO: 1342398 - RNA, 19 nt, Artificial Sequence
  Description of Artificial Sequence: Synthetic oligonucleotide
  Sense strand starting at position 272 of SEQ ID NO: 1242371
uaggaauauucuguaggau

SEQ ID NO: 1342399 - RNA, 19 nt, Artificial Sequence
  Description of Artificial Sequence: Synthetic oligonucleotide
  Antisense strand to SEQ ID NO: 1342398
auccuacagaauauuccua

SEQ ID NO: 1342400 - RNA, 19 nt, Artificial Sequence
  Description of Artificial Sequence: Synthetic oligonucleotide
  Sense strand starting at position 275 of SEQ ID NO: 1242371
gaauauucuguaggaugca

SEQ ID NO: 1342401 - RNA, 19 nt, Artificial Sequence
  Description of Artificial Sequence: Synthetic oligonucleotide
  Antisense strand to SEQ ID NO: 1342400
ugcauccuacagaauauuc

SEQ ID NO: 1342402 - RNA, 19 nt, Artificial Sequence
  Description of Artificial Sequence: Synthetic oligonucleotide
  Sense strand starting at position 294 of SEQ ID NO: 1242371
guaagaaauaguugcuagu

SEQ ID NO: 1342403 - RNA, 19 nt, Artificial Sequence
  Description of Artificial Sequence: Synthetic oligonucleotide
  Antisense strand to SEQ ID NO: 1342402
acuagcaacuauuucuuac

SEQ ID NO: 1342404 - RNA, 19 nt, Artificial Sequence
  Description of Artificial Sequence: Synthetic oligonucleotide
  Sense strand starting at position 307 of SEQ ID NO: 1242371
gcuaguuguuaaucuaaca

SEQ ID NO: 1342405 - RNA, 19 nt, Artificial Sequence
  Description of Artificial Sequence: Synthetic oligonucleotide
  Antisense strand to SEQ ID NO: 1342404
uguuagauuaacaacuagc

SEQ ID NO: 1342406 - RNA, 19 nt, Artificial Sequence
  Description of Artificial Sequence: Synthetic oligonucleotide
  Sense strand starting at position 372 of SEQ ID NO: 1242371
aagccuuaggguuaucuau

SEQ ID NO: 1342407 - RNA, 19 nt, Artificial Sequence
  Description of Artificial Sequence: Synthetic oligonucleotide
  Antisense strand to SEQ ID NO: 1342406
auagauaacccuaaggcuu

SEQ ID NO: 1342408 - RNA, 19 nt, Artificial Sequence
  Description of Artificial Sequence: Synthetic oligonucleotide
  Sense strand starting at position 374 of SEQ ID NO: 1242371
gccuuaggguuaucuauuu

SEQ ID NO: 1342409 - RNA, 19 nt, Artificial Sequence
  Description of Artificial Sequence: Synthetic oligonucleotide
  Antisense strand to SEQ ID NO: 1342408
aaauagauaacccuaaggc

SEQ ID NO: 1342410 - RNA, 19 nt, Artificial Sequence
  Description of Artificial Sequence: Synthetic oligonucleotide
  Sense strand starting at position 467 of SEQ ID NO: 1242371
cucagcuauggcugaacua

SEQ ID NO: 1342411 - RNA, 19 nt, Artificial Sequence
  Description of Artificial Sequence: Synthetic oligonucleotide
  Antisense strand to SEQ ID NO: 1342410
uaguucagccauagcugag

SEQ ID NO: 1342412 - RNA, 19 nt, Artificial Sequence
  Description of Artificial Sequence: Synthetic oligonucleotide
  Sense strand starting at position 468 of SEQ ID NO: 1242371
ucagcuauggcugaacuau

SEQ ID NO: 1342413 - RNA, 19 nt, Artificial Sequence
  Description of Artificial Sequence: Synthetic oligonucleotide
  Antisense strand to SEQ ID NO: 1342412
auaguucagccauagcuga

SEQ ID NO: 1342414 - RNA, 19 nt, Artificial Sequence
  Description of Artificial Sequence: Synthetic oligonucleotide
  Sense strand starting at position 474 of SEQ ID NO: 1242371
auggcugaacuaugguuua

SEQ ID NO: 1342415 - RNA, 19 nt, Artificial Sequence
  Description of Artificial Sequence: Synthetic oligonucleotide
  Antisense strand to SEQ ID NO: 1342414
uaaaccauaguucagccau

SEQ ID NO: 1342416 - RNA, 19 nt, Artificial Sequence
  Description of Artificial Sequence: Synthetic oligonucleotide
  Sense strand starting at position 536 of SEQ ID NO: 1242371
cucagagcuuaucuggcau

SEQ ID NO: 1342417 - RNA, 19 nt, Artificial Sequence
  Description of Artificial Sequence: Synthetic oligonucleotide
  Antisense strand to SEQ ID NO: 1342416
augccagauaagcucugag

SEQ ID NO: 1342418 - RNA, 19 nt, Artificial Sequence
  Description of Artificial Sequence: Synthetic oligonucleotide
  Sense strand starting at position 562 of SEQ ID NO: 1242371
uuaucuaagccagaguaaa

SEQ ID NO: 1342419 - RNA, 19 nt, Artificial Sequence
  Description of Artificial Sequence: Synthetic oligonucleotide
  Antisense strand to SEQ ID NO: 1342418
uuuacucuggcuuagauaa

SEQ ID NO: 1342420 - RNA, 19 nt, Artificial Sequence
  Description of Artificial Sequence: Synthetic oligonucleotide
  Sense strand starting at position 573 of SEQ ID NO: 1242371
agaguaaauguuuguguaa

SEQ ID NO: 1342421 - RNA, 19 nt, Artificial Sequence
  Description of Artificial Sequence: Synthetic oligonucleotide
  Antisense strand to SEQ ID NO: 1342420
uuacacaaacauuuacucu

SEQ ID NO: 1342422 - RNA, 19 nt, Artificial Sequence
  Description of Artificial Sequence: Synthetic oligonucleotide
  Sense strand starting at position 574 of SEQ ID NO: 1242371
gaguaaauguuuguguaau

SEQ ID NO: 1342423 - RNA, 19 nt, Artificial Sequence
  Description of Artificial Sequence: Synthetic oligonucleotide
  Antisense strand to SEQ ID NO: 1342422
auuacacaaacauuuacuc

SEQ ID NO: 1342424 - RNA, 19 nt, Artificial Sequence
  Description of Artificial Sequence: Synthetic oligonucleotide
  Sense strand starting at position 605 of SEQ ID NO: 1242371
gaaagaauaugccugucac

SEQ ID NO: 1342425 - RNA, 19 nt, Artificial Sequence
  Description of Artificial Sequence: Synthetic oligonucleotide
  Antisense strand to SEQ ID NO: 1342424
gugacaggcauauucuuuc

SEQ ID NO: 1342426 - RNA, 19 nt, Artificial Sequence
  Description of Artificial Sequence: Synthetic oligonucleotide
  Sense strand starting at position 768 of SEQ ID NO: 1242371
ccuugagcggucugagaug

SEQ ID NO: 1342427 - RNA, 19 nt, Artificial Sequence
  Description of Artificial Sequence: Synthetic oligonucleotide
  Antisense strand to SEQ ID NO: 1342426
caucucagaccgcucaagg

SEQ ID NO: 1342428 - RNA, 19 nt, Artificial Sequence
  Description of Artificial Sequence: Synthetic oligonucleotide
  Sense strand starting at position 773 of SEQ ID NO: 1242371
agcggucugagaugagauu

SEQ ID NO: 1342429 - RNA, 19 nt, Artificial Sequence
  Description of Artificial Sequence: Synthetic oligonucleotide
  Antisense strand to SEQ ID NO: 1342428
aaucucaucucagaccgcu

SEQ ID NO: 1342430 - RNA, 19 nt, Artificial Sequence
  Description of Artificial Sequence: Synthetic oligonucleotide
  Sense strand starting at position 888 of SEQ ID NO: 1242371
agaccuuucccagggacuu

SEQ ID NO: 1342431 - RNA, 19 nt, Artificial Sequence
  Description of Artificial Sequence: Synthetic oligonucleotide
  Antisense strand to SEQ ID NO: 1342430
aagucccugggaaaggucu

SEQ ID NO: 1342432 - RNA, 19 nt, Artificial Sequence
  Description of Artificial Sequence: Synthetic oligonucleotide
  Sense strand starting at position 1008 of SEQ ID NO: 1242371
aauucuuaccgccagaagu

SEQ ID NO: 1342433 - RNA, 19 nt, Artificial Sequence
  Description of Artificial Sequence: Synthetic oligonucleotide
  Antisense strand to SEQ ID NO: 1342432
acuucuggcgguaagaauu

SEQ ID NO: 1342434 - RNA, 19 nt, Artificial Sequence
  Description of Artificial Sequence: Synthetic oligonucleotide
  Sense strand starting at position 1010 of SEQ ID NO: 1242371
uucuuaccgccagaaguuu

SEQ ID NO: 1342435 - RNA, 19 nt, Artificial Sequence
  Description of Artificial Sequence: Synthetic oligonucleotide
  Antisense strand to SEQ ID NO: 1342434
aaacuucuggcgguaagaa

SEQ ID NO: 1342436 - RNA, 19 nt, Artificial Sequence
  Description of Artificial Sequence: Synthetic oligonucleotide
  Sense strand starting at position 1109 of SEQ ID NO: 1242371
gcuguaguggcagacauaa

SEQ ID NO: 1342437 - RNA, 19 nt, Artificial Sequence
  Description of Artificial Sequence: Synthetic oligonucleotide
  Antisense strand to SEQ ID NO: 1342436
uuaugucugccacuacagc

SEQ ID NO: 1342438 - RNA, 19 nt, Artificial Sequence
  Description of Artificial Sequence: Synthetic oligonucleotide
  Sense strand starting at position 1140 of SEQ ID NO: 1242371
guugacgaagucuauauau

SEQ ID NO: 1342439 - RNA, 19 nt, Artificial Sequence
  Description of Artificial Sequence: Synthetic oligonucleotide
  Antisense strand to SEQ ID NO: 1342438
auauauagacuucgucaac

SEQ ID NO: 1342440 - RNA, 19 nt, Artificial Sequence
  Description of Artificial Sequence: Synthetic oligonucleotide
  Sense strand starting at position 1142 of SEQ ID NO: 1242371
ugacgaagucuauauaucu

SEQ ID NO: 1342441 - RNA, 19 nt, Artificial Sequence
  Description of Artificial Sequence: Synthetic oligonucleotide
  Antisense strand to SEQ ID NO: 1342440
agauauauagacuucguca

SEQ ID NO: 1342442 - RNA, 19 nt, Artificial Sequence
  Description of Artificial Sequence: Synthetic oligonucleotide
  Sense strand starting at position 1176 of SEQ ID NO: 1242371
ugcgccuucccugugagau

SEQ ID NO: 1342443 - RNA, 19 nt, Artificial Sequence
  Description of Artificial Sequence: Synthetic oligonucleotide
  Antisense strand to SEQ ID NO: 1342442
aucucacagggaaggcgca

SEQ ID NO: 1342444 - RNA, 19 nt, Artificial Sequence
  Description of Artificial Sequence: Synthetic oligonucleotide
  Sense strand starting at position 1232 of SEQ ID NO: 1242371
acaucaguuaccgaauggu

SEQ ID NO: 1342445 - RNA, 19 nt, Artificial Sequence
  Description of Artificial Sequence: Synthetic oligonucleotide
  Antisense strand to SEQ ID NO: 1342444
accauucgguaacugaugu

SEQ ID NO: 1342446 - RNA, 19 nt, Artificial Sequence
  Description of Artificial Sequence: Synthetic oligonucleotide
  Sense strand starting at position 1437 of SEQ ID NO: 1242371
ccaauucucgugcacacuu

SEQ ID NO: 1342447 - RNA, 19 nt, Artificial Sequence
  Description of Artificial Sequence: Synthetic oligonucleotide
  Antisense strand to SEQ ID NO: 1342446
aagugugcacgagaauugg

SEQ ID NO: 1342448 - RNA, 19 nt, Artificial Sequence
  Description of Artificial Sequence: Synthetic oligonucleotide
  Sense strand starting at position 1584 of SEQ ID NO: 1242371
cgcugucaagacgggaaau

SEQ ID NO: 1342449 - RNA, 19 nt, Artificial Sequence
  Description of Artificial Sequence: Synthetic oligonucleotide
  Antisense strand to SEQ ID NO: 1342448
auuucccgucuugacagcg

SEQ ID NO: 1342450 - RNA, 19 nt, Artificial Sequence
  Description of Artificial Sequence: Synthetic oligonucleotide
  Sense strand starting at position 1585 of SEQ ID NO: 1242371
gcugucaagacgggaaaua

SEQ ID NO: 1342451 - RNA, 19 nt, Artificial Sequence
  Description of Artificial Sequence: Synthetic oligonucleotide
  Antisense strand to SEQ ID NO: 1342450
uauuucccgucuugacagc

SEQ ID NO: 1342452 - RNA, 19 nt, Artificial Sequence
  Description of Artificial Sequence: Synthetic oligonucleotide
  Sense strand starting at position 2762 of SEQ ID NO: 1242371
acaagagcauuagcaaauu

SEQ ID NO: 1342453 - RNA, 19 nt, Artificial Sequence
  Description of Artificial Sequence: Synthetic oligonucleotide
  Antisense strand to SEQ ID NO: 1342452
aauuugcuaaugcucuugu

SEQ ID NO: 1342454 - RNA, 19 nt, Artificial Sequence
  Description of Artificial Sequence: Synthetic oligonucleotide
  Sense strand starting at position 2918 of SEQ ID NO: 1242371
cuuggcuuccuugauagaa

SEQ ID NO: 1342455 - RNA, 19 nt, Artificial Sequence
  Description of Artificial Sequence: Synthetic oligonucleotide
  Antisense strand to SEQ ID NO: 1342454
uucuaucaaggaagccaag

SEQ ID NO: 1342456 - RNA, 19 nt, Artificial Sequence
  Description of Artificial Sequence: Synthetic oligonucleotide
  Sense strand starting at position 3464 of SEQ ID NO: 1242371
ggcgcaguuguuccgugaa

SEQ ID NO: 1342457 - RNA, 19 nt, Artificial Sequence
  Description of Artificial Sequence: Synthetic oligonucleotide
  Antisense strand to SEQ ID NO: 1342456
uucacggaacaacugcgcc

SEQ ID NO: 1342458 - RNA, 19 nt, Artificial Sequence
  Description of Artificial Sequence: Synthetic oligonucleotide
  Sense strand starting at position 3477 of SEQ ID NO: 1242371
cgugaaguucugccuuagu

SEQ ID NO: 1342459 - RNA, 19 nt, Artificial Sequence
  Description of Artificial Sequence: Synthetic oligonucleotide
  Antisense strand to SEQ ID NO: 1342458
acuaaggcagaacuucacg

SEQ ID NO: 1342460 - RNA, 19 nt, Artificial Sequence
  Description of Artificial Sequence: Synthetic oligonucleotide
  Sense strand starting at position 3678 of SEQ ID NO: 1242371
gaaagccauucuguacagu

SEQ ID NO: 1342461 - RNA, 19 nt, Artificial Sequence
  Description of Artificial Sequence: Synthetic oligonucleotide
  Antisense strand to SEQ ID NO: 1342460
acuguacagaauggcuuuc

SEQ ID NO: 1342462 - RNA, 19 nt, Artificial Sequence
  Description of Artificial Sequence: Synthetic oligonucleotide
  Sense strand starting at position 3681 of SEQ ID NO: 1242371
agccauucuguacaguaua

SEQ ID NO: 1342463 - RNA, 19 nt, Artificial Sequence
  Description of Artificial Sequence: Synthetic oligonucleotide
  Antisense strand to SEQ ID NO: 1342462
uauacuguacagaauggcu

SEQ ID NO: 1342464 - RNA, 19 nt, Artificial Sequence
  Description of Artificial Sequence: Synthetic oligonucleotide
  Sense strand starting at position 3744 of SEQ ID NO: 1242371
uaauauguugugggagaaa

SEQ ID NO: 1342465 - RNA, 19 nt, Artificial Sequence
  Description of Artificial Sequence: Synthetic oligonucleotide
  Antisense strand to SEQ ID NO: 1342464
uuucucccacaacauauua

SEQ ID NO: 1342466 - RNA, 19 nt, Artificial Sequence
  Description of Artificial Sequence: Synthetic oligonucleotide
  Sense strand starting at position 3921 of SEQ ID NO: 1242371
ggcucuaaauggcuagaau

SEQ ID NO: 1342467 - RNA, 19 nt, Artificial Sequence
  Description of Artificial Sequence: Synthetic oligonucleotide
  Antisense strand to SEQ ID NO: 1342466
auucuagccauuuagagcc

SEQ ID NO: 1342468 - RNA, 19 nt, Artificial Sequence
  Description of Artificial Sequence: Synthetic oligonucleotide
  Sense strand starting at position 3922 of SEQ ID NO: 1242371
gcucuaaauggcuagaaug

SEQ ID NO: 1342469 - RNA, 19 nt, Artificial Sequence
  Description of Artificial Sequence: Synthetic oligonucleotide
  Antisense strand to SEQ ID NO: 1342468
cauucuagccauuuagagc

SEQ ID NO: 1342470 - RNA, 19 nt, Artificial Sequence
  Description of Artificial Sequence: Synthetic oligonucleotide
  Sense strand starting at position 99 of SEQ ID NO: 1242372
ugcauuaagugcuaagaag

SEQ ID NO: 1342471 - RNA, 19 nt, Artificial Sequence
  Description of Artificial Sequence: Synthetic oligonucleotide
  Antisense strand to SEQ ID NO: 1342470
cuucuuagcacuuaaugca

SEQ ID NO: 1342472 - RNA, 19 nt, Artificial Sequence
  Description of Artificial Sequence: Synthetic oligonucleotide
  Sense strand starting at position 110 of SEQ ID NO: 1242372
cuaagaagugggugugcau

SEQ ID NO: 1342473 - RNA, 19 nt, Artificial Sequence
  Description of Artificial Sequence: Synthetic oligonucleotide
  Antisense strand to SEQ ID NO: 1342472
augcacacccacuucuuag

SEQ ID NO: 1342474 - RNA, 19 nt, Artificial Sequence
  Description of Artificial Sequence: Synthetic oligonucleotide
  Sense strand starting at position 113 of SEQ ID NO: 1242372
agaagugggugugcauuaa

SEQ ID NO: 1342475 - RNA, 19 nt, Artificial Sequence
  Description of Artificial Sequence: Synthetic oligonucleotide
  Antisense strand to SEQ ID NO: 1342474
uuaaugcacacccacuucu

SEQ ID NO: 1342476 - RNA, 19 nt, Artificial Sequence
  Description of Artificial Sequence: Synthetic oligonucleotide
  Sense strand starting at position 206 of SEQ ID NO: 1242372
agggaaagauuccagaaca

SEQ ID NO: 1342477 - RNA, 19 nt, Artificial Sequence
  Description of Artificial Sequence: Synthetic oligonucleotide
  Antisense strand to SEQ ID NO: 1342476
uguucuggaaucuuucccu

SEQ ID NO: 1342478 - RNA, 19 nt, Artificial Sequence
  Description of Artificial Sequence: Synthetic oligonucleotide
  Sense strand starting at position 263 of SEQ ID NO: 1242372
cgcuaugauguccaagaca

SEQ ID NO: 1342479 - RNA, 19 nt, Artificial Sequence
  Description of Artificial Sequence: Synthetic oligonucleotide
  Antisense strand to SEQ ID NO: 1342478
ugucuuggacaucauagcg

SEQ ID NO: 1342480 - RNA, 19 nt, Artificial Sequence
  Description of Artificial Sequence: Synthetic oligonucleotide
  Sense strand starting at position 523 of SEQ ID NO: 1242372
gguccugugccagaucaga

SEQ ID NO: 1342481 - RNA, 19 nt, Artificial Sequence
  Description of Artificial Sequence: Synthetic oligonucleotide
  Antisense strand to SEQ ID NO: 1342480
ucugaucuggcacaggacc

SEQ ID NO: 1342482 - RNA, 19 nt, Artificial Sequence
  Description of Artificial Sequence: Synthetic oligonucleotide
  Sense strand starting at position 672 of SEQ ID NO: 1242372
cccagauaaugcucagacu

SEQ ID NO: 1342483 - RNA, 19 nt, Artificial Sequence
  Description of Artificial Sequence: Synthetic oligonucleotide
  Antisense strand to SEQ ID NO: 1342482
agucugagcauuaucuggg

SEQ ID NO: 1342484 - RNA, 19 nt, Artificial Sequence
  Description of Artificial Sequence: Synthetic oligonucleotide
  Sense strand starting at position 849 of SEQ ID NO: 1242372
ggaggcauuugugugcaau

SEQ ID NO: 1342485 - RNA, 19 nt, Artificial Sequence
  Description of Artificial Sequence: Synthetic oligonucleotide
  Antisense strand to SEQ ID NO: 1342484
auugcacacaaaugccucc

SEQ ID NO: 1342486 - RNA, 19 nt, Artificial Sequence
  Description of Artificial Sequence: Synthetic oligonucleotide
  Sense strand starting at position 850 of SEQ ID NO: 1242372
gaggcauuugugugcaaug

SEQ ID NO: 1342487 - RNA, 19 nt, Artificial Sequence
  Description of Artificial Sequence: Synthetic oligonucleotide
  Antisense strand to SEQ ID NO: 1342486
cauugcacacaaaugccuc

SEQ ID NO: 1342488 - RNA, 19 nt, Artificial Sequence
  Description of Artificial Sequence: Synthetic oligonucleotide
  Sense strand starting at position 852 of SEQ ID NO: 1242372
ggcauuugugugcaaugca

SEQ ID NO: 1342489 - RNA, 19 nt, Artificial Sequence
  Description of Artificial Sequence: Synthetic oligonucleotide
  Antisense strand to SEQ ID NO: 1342488
ugcauugcacacaaaugcc

SEQ ID NO: 1342490 - RNA, 19 nt, Artificial Sequence
  Description of Artificial Sequence: Synthetic oligonucleotide
  Sense strand starting at position 883 of SEQ ID NO: 1242372
ucaguuccucgcggcagaa

SEQ ID NO: 1342491 - RNA, 19 nt, Artificial Sequence
  Description of Artificial Sequence: Synthetic oligonucleotide
  Antisense strand to SEQ ID NO: 1342490
uucugccgcgaggaacuga

SEQ ID NO: 1342492 - RNA, 19 nt, Artificial Sequence
  Description of Artificial Sequence: Synthetic oligonucleotide
  Sense strand starting at position 923 of SEQ ID NO: 1242372
cggcuuucugucccauagu

SEQ ID NO: 1342493 - RNA, 19 nt, Artificial Sequence
  Description of Artificial Sequence: Synthetic oligonucleotide
  Antisense strand to SEQ ID NO: 1342492
acuaugggacagaaagccg

SEQ ID NO: 1342494 - RNA, 19 nt, Artificial Sequence
  Description of Artificial Sequence: Synthetic oligonucleotide
  Sense strand starting at position 924 of SEQ ID NO: 1242372
ggcuuucugucccauagua

SEQ ID NO: 1342495 - RNA, 19 nt, Artificial Sequence
  Description of Artificial Sequence: Synthetic oligonucleotide
  Antisense strand to SEQ ID NO: 1342494
uacuaugggacagaaagcc

SEQ ID NO: 1342496 - RNA, 19 nt, Artificial Sequence
  Description of Artificial Sequence: Synthetic oligonucleotide
  Sense strand starting at position 926 of SEQ ID NO: 1242372
cuuucugucccauaguaca

SEQ ID NO: 1342497 - RNA, 19 nt, Artificial Sequence
  Description of Artificial Sequence: Synthetic oligonucleotide
  Antisense strand to SEQ ID NO: 1342496
uguacuaugggacagaaag

SEQ ID NO: 1342498 - RNA, 19 nt, Artificial Sequence
  Description of Artificial Sequence: Synthetic oligonucleotide
  Sense strand starting at position 1097 of SEQ ID NO: 1242372
gccgauuucuggugacaac

SEQ ID NO: 1342499 - RNA, 19 nt, Artificial Sequence
  Description of Artificial Sequence: Synthetic oligonucleotide
  Antisense strand to SEQ ID NO: 1342498
guugucaccagaaaucggc

SEQ ID NO: 1342500 - RNA, 19 nt, Artificial Sequence
  Description of Artificial Sequence: Synthetic oligonucleotide
  Sense strand starting at position 1982 of SEQ ID NO: 1242372
gcggcaaucagccgagacu

SEQ ID NO: 1342501 - RNA, 19 nt, Artificial Sequence
  Description of Artificial Sequence: Synthetic oligonucleotide
  Antisense strand to SEQ ID NO: 1342500
agucucggcugauugccgc

SEQ ID NO: 1342502 - RNA, 19 nt, Artificial Sequence
  Description of Artificial Sequence: Synthetic oligonucleotide
  Sense strand starting at position 2105 of SEQ ID NO: 1242372
uggcuuuccugagcgagag

SEQ ID NO: 1342503 - RNA, 19 nt, Artificial Sequence
  Description of Artificial Sequence: Synthetic oligonucleotide
  Antisense strand to SEQ ID NO: 1342502
cucucgcucaggaaagcca

SEQ ID NO: 1342504 - RNA, 19 nt, Artificial Sequence
  Description of Artificial Sequence: Synthetic oligonucleotide
  Sense strand starting at position 2192 of SEQ ID NO: 1242372
aagccagacuuguggucuu

SEQ ID NO: 1342505 - RNA, 19 nt, Artificial Sequence
  Description of Artificial Sequence: Synthetic oligonucleotide
  Antisense strand to SEQ ID NO: 1342504
aagaccacaagucuggcuu

SEQ ID NO: 1342506 - RNA, 19 nt, Artificial Sequence
  Description of Artificial Sequence: Synthetic oligonucleotide
  Sense strand starting at position 2282 of SEQ ID NO: 1242372
gcguagaagucguggagga

SEQ ID NO: 1342507 - RNA, 19 nt, Artificial Sequence
  Description of Artificial Sequence: Synthetic oligonucleotide
  Antisense strand to SEQ ID NO: 1342506
uccuccacgacuucuacgc

SEQ ID NO: 1342508 - RNA, 19 nt, Artificial Sequence
  Description of Artificial Sequence: Synthetic oligonucleotide
  Sense strand starting at position 2376 of SEQ ID NO: 1242372
gacuaugguccucggagga

SEQ ID NO: 1342509 - RNA, 19 nt, Artificial Sequence
  Description of Artificial Sequence: Synthetic oligonucleotide
  Antisense strand to SEQ ID NO: 1342508
uccuccgaggaccauaguc

SEQ ID NO: 1342510 - RNA, 19 nt, Artificial Sequence
  Description of Artificial Sequence: Synthetic oligonucleotide
  Sense strand starting at position 2388 of SEQ ID NO: 1242372
cggaggaugcguucgccua

SEQ ID NO: 1342511 - RNA, 19 nt, Artificial Sequence
  Description of Artificial Sequence: Synthetic oligonucleotide
  Antisense strand to SEQ ID NO: 1342510
uaggcgaacgcauccuccg

SEQ ID NO: 1342512 - RNA, 19 nt, Artificial Sequence
  Description of Artificial Sequence: Synthetic oligonucleotide
  Sense strand starting at position 2389 of SEQ ID NO: 1242372
ggaggaugcguucgccuaa

SEQ ID NO: 1342513 - RNA, 19 nt, Artificial Sequence
  Description of Artificial Sequence: Synthetic oligonucleotide
  Antisense strand to SEQ ID NO: 1342512
uuaggcgaacgcauccucc

SEQ ID NO: 1342514 - RNA, 19 nt, Artificial Sequence
  Description of Artificial Sequence: Synthetic oligonucleotide
  Sense strand starting at position 2394 of SEQ ID NO: 1242372
augcguucgccuaagugga

SEQ ID NO: 1342515 - RNA, 19 nt, Artificial Sequence
  Description of Artificial Sequence: Synthetic oligonucleotide
  Antisense strand to SEQ ID NO: 1342514
uccacuuaggcgaacgcau

SEQ ID NO: 1342516 - RNA, 19 nt, Artificial Sequence
  Description of Artificial Sequence: Synthetic oligonucleotide
  Sense strand starting at position 2479 of SEQ ID NO: 1242372
uguugcuuugccugggaga

SEQ ID NO: 1342517 - RNA, 19 nt, Artificial Sequence
  Description of Artificial Sequence: Synthetic oligonucleotide
  Antisense strand to SEQ ID NO: 1342516
ucucccaggcaaagcaaca

SEQ ID NO: 1342518 - RNA, 19 nt, Artificial Sequence
  Description of Artificial Sequence: Synthetic oligonucleotide
  Sense strand starting at position 2481 of SEQ ID NO: 1242372
uugcuuugccugggagaac

SEQ ID NO: 1342519 - RNA, 19 nt, Artificial Sequence
  Description of Artificial Sequence: Synthetic oligonucleotide
  Antisense strand to SEQ ID NO: 1342518
guucucccaggcaaagcaa

SEQ ID NO: 1342520 - RNA, 19 nt, Artificial Sequence
  Description of Artificial Sequence: Synthetic oligonucleotide
  Sense strand starting at position 2482 of SEQ ID NO: 1242372
ugcuuugccugggagaaca

SEQ ID NO: 1342521 - RNA, 19 nt, Artificial Sequence
  Description of Artificial Sequence: Synthetic oligonucleotide
  Antisense strand to SEQ ID NO: 1342520
uguucucccaggcaaagca

SEQ ID NO: 1342522 - RNA, 19 nt, Artificial Sequence
  Description of Artificial Sequence: Synthetic oligonucleotide
  Sense strand starting at position 2892 of SEQ ID NO: 1242372
cgugccugcccuuuguaaa

SEQ ID NO: 1342523 - RNA, 19 nt, Artificial Sequence
  Description of Artificial Sequence: Synthetic oligonucleotide
  Antisense strand to SEQ ID NO: 1342522
uuuacaaagggcaggcacg

SEQ ID NO: 1342524 - RNA, 19 nt, Artificial Sequence
  Description of Artificial Sequence: Synthetic oligonucleotide
  Sense strand starting at position 2998 of SEQ ID NO: 1242372
cucaguaaguacuuaucua

SEQ ID NO: 1342525 - RNA, 19 nt, Artificial Sequence
  Description of Artificial Sequence: Synthetic oligonucleotide
  Antisense strand to SEQ ID NO: 1342524
uagauaaguacuuacugag

SEQ ID NO: 1342526 - RNA, 19 nt, Artificial Sequence
  Description of Artificial Sequence: Synthetic oligonucleotide
  Sense strand starting at position 3002 of SEQ ID NO: 1242372
guaaguacuuaucuagugu

SEQ ID NO: 1342527 - RNA, 19 nt, Artificial Sequence
  Description of Artificial Sequence: Synthetic oligonucleotide
  Antisense strand to SEQ ID NO: 1342526
acacuagauaaguacuuac

SEQ ID NO: 1342528 - RNA, 19 nt, Artificial Sequence
  Description of Artificial Sequence: Synthetic oligonucleotide
  Sense strand starting at position 3006 of SEQ ID NO: 1242372
guacuuaucuaguguuuac

SEQ ID NO: 1342529 - RNA, 19 nt, Artificial Sequence
  Description of Artificial Sequence: Synthetic oligonucleotide
  Antisense strand to SEQ ID NO: 1342528
guaaacacuagauaaguac

SEQ ID NO: 1342530 - RNA, 19 nt, Artificial Sequence
  Description of Artificial Sequence: Synthetic oligonucleotide
  Sense strand starting at position 3010 of SEQ ID NO: 1242372
uuaucuaguguuuacugga

SEQ ID NO: 1342531 - RNA, 19 nt, Artificial Sequence
  Description of Artificial Sequence: Synthetic oligonucleotide
  Antisense strand to SEQ ID NO: 1342530
uccaguaaacacuagauaa

SEQ ID NO: 1342532 - RNA, 19 nt, Artificial Sequence
  Description of Artificial Sequence: Synthetic oligonucleotide
  Sense strand starting at position 3015 of SEQ ID NO: 1242372
uaguguuuacuggaugucu

SEQ ID NO: 1342533 - RNA, 19 nt, Artificial Sequence
  Description of Artificial Sequence: Synthetic oligonucleotide
  Antisense strand to SEQ ID NO: 1342532
agacauccaguaaacacua

SEQ ID NO: 1342534 - RNA, 19 nt, Artificial Sequence
  Description of Artificial Sequence: Synthetic oligonucleotide
  Sense strand starting at position 3017 of SEQ ID NO: 1242372
guguuuacuggaugucuag

SEQ ID NO: 1342535 - RNA, 19 nt, Artificial Sequence
  Description of Artificial Sequence: Synthetic oligonucleotide
  Antisense strand to SEQ ID NO: 1342534
cuagacauccaguaaacac

SEQ ID NO: 1342536 - RNA, 19 nt, Artificial Sequence
  Description of Artificial Sequence: Synthetic oligonucleotide
  Sense strand starting at position 3186 of SEQ ID NO: 1242372
ggaccauuugguuguuguu

SEQ ID NO: 1342537 - RNA, 19 nt, Artificial Sequence
  Description of Artificial Sequence: Synthetic oligonucleotide
  Antisense strand to SEQ ID NO: 1342536
aacaacaaccaaauggucc

SEQ ID NO: 1342538 - RNA, 19 nt, Artificial Sequence
  Description of Artificial Sequence: Synthetic oligonucleotide
  Sense strand starting at position 3240 of SEQ ID NO: 1242372
gaaguuuggcuuuaccauu

SEQ ID NO: 1342539 - RNA, 19 nt, Artificial Sequence
  Description of Artificial Sequence: Synthetic oligonucleotide
  Antisense strand to SEQ ID NO: 1342538
aaugguaaagccaaacuuc

SEQ ID NO: 1342540 - RNA, 19 nt, Artificial Sequence
  Description of Artificial Sequence: Synthetic oligonucleotide
  Sense strand starting at position 3567 of SEQ ID NO: 1242372
cagugucuguccucucuau

SEQ ID NO: 1342541 - RNA, 19 nt, Artificial Sequence
  Description of Artificial Sequence: Synthetic oligonucleotide
  Antisense strand to SEQ ID NO: 1342540
auagagaggacagacacug

SEQ ID NO: 1342542 - RNA, 19 nt, Artificial Sequence
  Description of Artificial Sequence: Synthetic oligonucleotide
  Sense strand starting at position 3571 of SEQ ID NO: 1242372
gucuguccucucuaugcaa

SEQ ID NO: 1342543 - RNA, 19 nt, Artificial Sequence
  Description of Artificial Sequence: Synthetic oligonucleotide
  Antisense strand to SEQ ID NO: 1342542
uugcauagagaggacagac

SEQ ID NO: 1342544 - RNA, 19 nt, Artificial Sequence
  Description of Artificial Sequence: Synthetic oligonucleotide
  Sense strand starting at position 3834 of SEQ ID NO: 1242372
cgguaaaugguagaacgaa

SEQ ID NO: 1342545 - RNA, 19 nt, Artificial Sequence
  Description of Artificial Sequence: Synthetic oligonucleotide
  Antisense strand to SEQ ID NO: 1342544
uucguucuaccauuuaccg

SEQ ID NO: 1342546 - RNA, 19 nt, Artificial Sequence
  Description of Artificial Sequence: Synthetic oligonucleotide
  Sense strand starting at position 3900 of SEQ ID NO: 1242372
ugugcugugccaucucaua

SEQ ID NO: 1342547 - RNA, 19 nt, Artificial Sequence
  Description of Artificial Sequence: Synthetic oligonucleotide
  Antisense strand to SEQ ID NO: 1342546
uaugagauggcacagcaca

SEQ ID NO: 1342548 - RNA, 19 nt, Artificial Sequence
  Description of Artificial Sequence: Synthetic oligonucleotide
  Sense strand starting at position 3941 of SEQ ID NO: 1242372
uucgcacuccuaugagaua

SEQ ID NO: 1342549 - RNA, 19 nt, Artificial Sequence
  Description of Artificial Sequence: Synthetic oligonucleotide
  Antisense strand to SEQ ID NO: 1342548
uaucucauaggagugcgaa

SEQ ID NO: 1342550 - RNA, 19 nt, Artificial Sequence
  Description of Artificial Sequence: Synthetic oligonucleotide
  Sense strand starting at position 22 of SEQ ID NO: 1242373
guccgauugccauguguca

SEQ ID NO: 1342551 - RNA, 19 nt, Artificial Sequence
  Description of Artificial Sequence: Synthetic oligonucleotide
  Antisense strand to SEQ ID NO: 1342550
ugacacauggcaaucggac

SEQ ID NO: 1342552 - RNA, 19 nt, Artificial Sequence
  Description of Artificial Sequence: Synthetic oligonucleotide
  Sense strand starting at position 169 of SEQ ID NO: 1242373
cacagacugucguuggaca

SEQ ID NO: 1342553 - RNA, 19 nt, Artificial Sequence
  Description of Artificial Sequence: Synthetic oligonucleotide
  Antisense strand to SEQ ID NO: 1342552
uguccaacgacagucugug

SEQ ID NO: 1342554 - RNA, 19 nt, Artificial Sequence
  Description of Artificial Sequence: Synthetic oligonucleotide
  Sense strand starting at position 170 of SEQ ID NO: 1242373
acagacugucguuggacaa

SEQ ID NO: 1342555 - RNA, 19 nt, Artificial Sequence
  Description of Artificial Sequence: Synthetic oligonucleotide
  Antisense strand to SEQ ID NO: 1342554
uuguccaacgacagucugu

SEQ ID NO: 1342556 - RNA, 19 nt, Artificial Sequence
  Description of Artificial Sequence: Synthetic oligonucleotide
  Sense strand starting at position 397 of SEQ ID NO: 1242373
ugcauuaagugcuaagaag

SEQ ID NO: 1342557 - RNA, 19 nt, Artificial Sequence
  Description of Artificial Sequence: Synthetic oligonucleotide
  Antisense strand to SEQ ID NO: 1342556
cuucuuagcacuuaaugca

SEQ ID NO: 1342558 - RNA, 19 nt, Artificial Sequence
  Description of Artificial Sequence: Synthetic oligonucleotide
  Sense strand starting at position 408 of SEQ ID NO: 1242373
cuaagaagugggugugcau

SEQ ID NO: 1342559 - RNA, 19 nt, Artificial Sequence
  Description of Artificial Sequence: Synthetic oligonucleotide
  Antisense strand to SEQ ID NO: 1342558
augcacacccacuucuuag

SEQ ID NO: 1342560 - RNA, 19 nt, Artificial Sequence
  Description of Artificial Sequence: Synthetic oligonucleotide
  Sense strand starting at position 411 of SEQ ID NO: 1242373
agaagugggugugcauuaa

SEQ ID NO: 1342561 - RNA, 19 nt, Artificial Sequence
  Description of Artificial Sequence: Synthetic oligonucleotide
  Antisense strand to SEQ ID NO: 1342560
uuaaugcacacccacuucu

SEQ ID NO: 1342562 - RNA, 19 nt, Artificial Sequence
  Description of Artificial Sequence: Synthetic oligonucleotide
  Sense strand starting at position 504 of SEQ ID NO: 1242373
agggaaagauuccagaaca

SEQ ID NO: 1342563 - RNA, 19 nt, Artificial Sequence
  Description of Artificial Sequence: Synthetic oligonucleotide
  Antisense strand to SEQ ID NO: 1342562
uguucuggaaucuuucccu

SEQ ID NO: 1342564 - RNA, 19 nt, Artificial Sequence
  Description of Artificial Sequence: Synthetic oligonucleotide
  Sense strand starting at position 561 of SEQ ID NO: 1242373
cgcuaugauguccaagaca

SEQ ID NO: 1342565 - RNA, 19 nt, Artificial Sequence
  Description of Artificial Sequence: Synthetic oligonucleotide
  Antisense strand to SEQ ID NO: 1342564
ugucuuggacaucauagcg

SEQ ID NO: 1342566 - RNA, 19 nt, Artificial Sequence
  Description of Artificial Sequence: Synthetic oligonucleotide
  Sense strand starting at position 821 of SEQ ID NO: 1242373
gguccugugccagaucaga

SEQ ID NO: 1342567 - RNA, 19 nt, Artificial Sequence
  Description of Artificial Sequence: Synthetic oligonucleotide
  Antisense strand to SEQ ID NO: 1342566
ucugaucuggcacaggacc

SEQ ID NO: 1342568 - RNA, 19 nt, Artificial Sequence
  Description of Artificial Sequence: Synthetic oligonucleotide
  Sense strand starting at position 970 of SEQ ID NO: 1242373
cccagauaaugcucagacu

SEQ ID NO: 1342569 - RNA, 19 nt, Artificial Sequence
  Description of Artificial Sequence: Synthetic oligonucleotide
  Antisense strand to SEQ ID NO: 1342568
agucugagcauuaucuggg

SEQ ID NO: 1342570 - RNA, 19 nt, Artificial Sequence
  Description of Artificial Sequence: Synthetic oligonucleotide
  Sense strand starting at position 1147 of SEQ ID NO: 1242373
ggaggcauuugugugcaau

SEQ ID NO: 1342571 - RNA, 19 nt, Artificial Sequence
  Description of Artificial Sequence: Synthetic oligonucleotide
  Antisense strand to SEQ ID NO: 1342570
auugcacacaaaugccucc

SEQ ID NO: 1342572 - RNA, 19 nt, Artificial Sequence
  Description of Artificial Sequence: Synthetic oligonucleotide
  Sense strand starting at position 1148 of SEQ ID NO: 1242373
gaggcauuugugugcaaug

SEQ ID NO: 1342573 - RNA, 19 nt, Artificial Sequence
  Description of Artificial Sequence: Synthetic oligonucleotide
  Antisense strand to SEQ ID NO: 1342572
cauugcacacaaaugccuc

SEQ ID NO: 1342574 - RNA, 19 nt, Artificial Sequence
  Description of Artificial Sequence: Synthetic oligonucleotide
  Sense strand starting at position 1150 of SEQ ID NO: 1242373
ggcauuugugugcaaugca

SEQ ID NO: 1342575 - RNA, 19 nt, Artificial Sequence
  Description of Artificial Sequence: Synthetic oligonucleotide
  Antisense strand to SEQ ID NO: 1342574
ugcauugcacacaaaugcc

SEQ ID NO: 1342576 - RNA, 19 nt, Artificial Sequence
  Description of Artificial Sequence: Synthetic oligonucleotide
  Sense strand starting at position 1181 of SEQ ID NO: 1242373
ucaguuccucgcggcagaa

SEQ ID NO: 1342577 - RNA, 19 nt, Artificial Sequence
  Description of Artificial Sequence: Synthetic oligonucleotide
  Antisense strand to SEQ ID NO: 1342576
uucugccgcgaggaacuga

SEQ ID NO: 1342578 - RNA, 19 nt, Artificial Sequence
  Description of Artificial Sequence: Synthetic oligonucleotide
  Sense strand starting at position 1221 of SEQ ID NO: 1242373
cggcuuucugucccauagu

SEQ ID NO: 1342579 - RNA, 19 nt, Artificial Sequence
  Description of Artificial Sequence: Synthetic oligonucleotide
  Antisense strand to SEQ ID NO: 1342578
acuaugggacagaaagccg

SEQ ID NO: 1342580 - RNA, 19 nt, Artificial Sequence
  Description of Artificial Sequence: Synthetic oligonucleotide
  Sense strand starting at position 1222 of SEQ ID NO: 1242373
ggcuuucugucccauagua

SEQ ID NO: 1342581 - RNA, 19 nt, Artificial Sequence
  Description of Artificial Sequence: Synthetic oligonucleotide
  Antisense strand to SEQ ID NO: 1342580
uacuaugggacagaaagcc

SEQ ID NO: 1342582 - RNA, 19 nt, Artificial Sequence
  Description of Artificial Sequence: Synthetic oligonucleotide
  Sense strand starting at position 1224 of SEQ ID NO: 1242373
cuuucugucccauaguaca

SEQ ID NO: 1342583 - RNA, 19 nt, Artificial Sequence
  Description of Artificial Sequence: Synthetic oligonucleotide
  Antisense strand to SEQ ID NO: 1342582
uguacuaugggacagaaag

SEQ ID NO: 1342584 - RNA, 19 nt, Artificial Sequence
  Description of Artificial Sequence: Synthetic oligonucleotide
  Sense strand starting at position 1395 of SEQ ID NO: 1242373
gccgauuucuggugacaac

SEQ ID NO: 1342585 - RNA, 19 nt, Artificial Sequence
  Description of Artificial Sequence: Synthetic oligonucleotide
  Antisense strand to SEQ ID NO: 1342584
guugucaccagaaaucggc

SEQ ID NO: 1342586 - RNA, 19 nt, Artificial Sequence
  Description of Artificial Sequence: Synthetic oligonucleotide
  Sense strand starting at position 2280 of SEQ ID NO: 1242373
gcggcaaucagccgagacu

SEQ ID NO: 1342587 - RNA, 19 nt, Artificial Sequence
  Description of Artificial Sequence: Synthetic oligonucleotide
  Antisense strand to SEQ ID NO: 1342586
agucucggcugauugccgc

SEQ ID NO: 1342588 - RNA, 19 nt, Artificial Sequence
  Description of Artificial Sequence: Synthetic oligonucleotide
  Sense strand starting at position 2403 of SEQ ID NO: 1242373
uggcuuuccugagcgagag

SEQ ID NO: 1342589 - RNA, 19 nt, Artificial Sequence
  Description of Artificial Sequence: Synthetic oligonucleotide
  Antisense strand to SEQ ID NO: 1342588
cucucgcucaggaaagcca

SEQ ID NO: 1342590 - RNA, 19 nt, Artificial Sequence
  Description of Artificial Sequence: Synthetic oligonucleotide
  Sense strand starting at position 2490 of SEQ ID NO: 1242373
aagccagacuuguggucuu

SEQ ID NO: 1342591 - RNA, 19 nt, Artificial Sequence
  Description of Artificial Sequence: Synthetic oligonucleotide
  Antisense strand to SEQ ID NO: 1342590
aagaccacaagucuggcuu

SEQ ID NO: 1342592 - RNA, 19 nt, Artificial Sequence
  Description of Artificial Sequence: Synthetic oligonucleotide
  Sense strand starting at position 2580 of SEQ ID NO: 1242373
gcguagaagucguggagga

SEQ ID NO: 1342593 - RNA, 19 nt, Artificial Sequence
  Description of Artificial Sequence: Synthetic oligonucleotide
  Antisense strand to SEQ ID NO: 1342592
uccuccacgacuucuacgc

SEQ ID NO: 1342594 - RNA, 19 nt, Artificial Sequence
  Description of Artificial Sequence: Synthetic oligonucleotide
  Sense strand starting at position 2674 of SEQ ID NO: 1242373
gacuaugguccucggagga

SEQ ID NO: 1342595 - RNA, 19 nt, Artificial Sequence
  Description of Artificial Sequence: Synthetic oligonucleotide
  Antisense strand to SEQ ID NO: 1342594
uccuccgaggaccauaguc

SEQ ID NO: 1342596 - RNA, 19 nt, Artificial Sequence
  Description of Artificial Sequence: Synthetic oligonucleotide
  Sense strand starting at position 2686 of SEQ ID NO: 1242373
cggaggaugcguucgccua

SEQ ID NO: 1342597 - RNA, 19 nt, Artificial Sequence
  Description of Artificial Sequence: Synthetic oligonucleotide
  Antisense strand to SEQ ID NO: 1342596
uaggcgaacgcauccuccg

SEQ ID NO: 1342598 - RNA, 19 nt, Artificial Sequence
  Description of Artificial Sequence: Synthetic oligonucleotide
  Sense strand starting at position 2687 of SEQ ID NO: 1242373
ggaggaugcguucgccuaa

SEQ ID NO: 1342599 - RNA, 19 nt, Artificial Sequence
  Description of Artificial Sequence: Synthetic oligonucleotide
  Antisense strand to SEQ ID NO: 1342598
uuaggcgaacgcauccucc

SEQ ID NO: 1342600 - RNA, 19 nt, Artificial Sequence
  Description of Artificial Sequence: Synthetic oligonucleotide
  Sense strand starting at position 2692 of SEQ ID NO: 1242373
augcguucgccuaagugga

SEQ ID NO: 1342601 - RNA, 19 nt, Artificial Sequence
  Description of Artificial Sequence: Synthetic oligonucleotide
  Antisense strand to SEQ ID NO: 1342600
uccacuuaggcgaacgcau

SEQ ID NO: 1342602 - RNA, 19 nt, Artificial Sequence
  Description of Artificial Sequence: Synthetic oligonucleotide
  Sense strand starting at position 2777 of SEQ ID NO: 1242373
uguugcuuugccugggaga

SEQ ID NO: 1342603 - RNA, 19 nt, Artificial Sequence
  Description of Artificial Sequence: Synthetic oligonucleotide
  Antisense strand to SEQ ID NO: 1342602
ucucccaggcaaagcaaca

SEQ ID NO: 1342604 - RNA, 19 nt, Artificial Sequence
  Description of Artificial Sequence: Synthetic oligonucleotide
  Sense strand starting at position 2779 of SEQ ID NO: 1242373
uugcuuugccugggagaac

SEQ ID NO: 1342605 - RNA, 19 nt, Artificial Sequence
  Description of Artificial Sequence: Synthetic oligonucleotide
  Antisense strand to SEQ ID NO: 1342604
guucucccaggcaaagcaa

SEQ ID NO: 1342606 - RNA, 19 nt, Artificial Sequence
  Description of Artificial Sequence: Synthetic oligonucleotide
  Sense strand starting at position 2780 of SEQ ID NO: 1242373
ugcuuugccugggagaaca

SEQ ID NO: 1342607 - RNA, 19 nt, Artificial Sequence
  Description of Artificial Sequence: Synthetic oligonucleotide
  Antisense strand to SEQ ID NO: 1342606
uguucucccaggcaaagca

SEQ ID NO: 1342608 - RNA, 19 nt, Artificial Sequence
  Description of Artificial Sequence: Synthetic oligonucleotide
  Sense strand starting at position 3190 of SEQ ID NO: 1242373
cgugccugcccuuuguaaa

SEQ ID NO: 1342609 - RNA, 19 nt, Artificial Sequence
  Description of Artificial Sequence: Synthetic oligonucleotide
  Antisense strand to SEQ ID NO: 1342608
uuuacaaagggcaggcacg

SEQ ID NO: 1342610 - RNA, 19 nt, Artificial Sequence
  Description of Artificial Sequence: Synthetic oligonucleotide
  Sense strand starting at position 3296 of SEQ ID NO: 1242373
cucaguaaguacuuaucua

SEQ ID NO: 1342611 - RNA, 19 nt, Artificial Sequence
  Description of Artificial Sequence: Synthetic oligonucleotide
  Antisense strand to SEQ ID NO: 1342610
uagauaaguacuuacugag

SEQ ID NO: 1342612 - RNA, 19 nt, Artificial Sequence
  Description of Artificial Sequence: Synthetic oligonucleotide
  Sense strand starting at position 3300 of SEQ ID NO: 1242373
guaaguacuuaucuagugu

SEQ ID NO: 1342613 - RNA, 19 nt, Artificial Sequence
  Description of Artificial Sequence: Synthetic oligonucleotide
  Antisense strand to SEQ ID NO: 1342612
acacuagauaaguacuuac

SEQ ID NO: 1342614 - RNA, 19 nt, Artificial Sequence
  Description of Artificial Sequence: Synthetic oligonucleotide
  Sense strand starting at position 3304 of SEQ ID NO: 1242373
guacuuaucuaguguuuac

SEQ ID NO: 1342615 - RNA, 19 nt, Artificial Sequence
  Description of Artificial Sequence: Synthetic oligonucleotide
  Antisense strand to SEQ ID NO: 1342614
guaaacacuagauaaguac

SEQ ID NO: 1342616 - RNA, 19 nt, Artificial Sequence
  Description of Artificial Sequence: Synthetic oligonucleotide
  Sense strand starting at position 3308 of SEQ ID NO: 1242373
uuaucuaguguuuacugga

SEQ ID NO: 1342617 - RNA, 19 nt, Artificial Sequence
  Description of Artificial Sequence: Synthetic oligonucleotide
  Antisense strand to SEQ ID NO: 1342616
uccaguaaacacuagauaa

SEQ ID NO: 1342618 - RNA, 19 nt, Artificial Sequence
  Description of Artificial Sequence: Synthetic oligonucleotide
  Sense strand starting at position 3313 of SEQ ID NO: 1242373
uaguguuuacuggaugucu

SEQ ID NO: 1342619 - RNA, 19 nt, Artificial Sequence
  Description of Artificial Sequence: Synthetic oligonucleotide
  Antisense strand to SEQ ID NO: 1342618
agacauccaguaaacacua

SEQ ID NO: 1342620 - RNA, 19 nt, Artificial Sequence
  Description of Artificial Sequence: Synthetic oligonucleotide
  Sense strand starting at position 3315 of SEQ ID NO: 1242373
guguuuacuggaugucuag

SEQ ID NO: 1342621 - RNA, 19 nt, Artificial Sequence
  Description of Artificial Sequence: Synthetic oligonucleotide
  Antisense strand to SEQ ID NO: 1342620
cuagacauccaguaaacac

SEQ ID NO: 1342622 - RNA, 19 nt, Artificial Sequence
  Description of Artificial Sequence: Synthetic oligonucleotide
  Sense strand starting at position 3484 of SEQ ID NO: 1242373
ggaccauuugguuguuguu

SEQ ID NO: 1342623 - RNA, 19 nt, Artificial Sequence
  Description of Artificial Sequence: Synthetic oligonucleotide
  Antisense strand to SEQ ID NO: 1342622
aacaacaaccaaauggucc

SEQ ID NO: 1342624 - RNA, 19 nt, Artificial Sequence
  Description of Artificial Sequence: Synthetic oligonucleotide
  Sense strand starting at position 3538 of SEQ ID NO: 1242373
gaaguuuggcuuuaccauu

SEQ ID NO: 1342625 - RNA, 19 nt, Artificial Sequence
  Description of Artificial Sequence: Synthetic oligonucleotide
  Antisense strand to SEQ ID NO: 1342624
aaugguaaagccaaacuuc

SEQ ID NO: 1342626 - RNA, 19 nt, Artificial Sequence
  Description of Artificial Sequence: Synthetic oligonucleotide
  Sense strand starting at position 3865 of SEQ ID NO: 1242373
cagugucuguccucucuau

SEQ ID NO: 1342627 - RNA, 19 nt, Artificial Sequence
  Description of Artificial Sequence: Synthetic oligonucleotide
  Antisense strand to SEQ ID NO: 1342626
auagagaggacagacacug

SEQ ID NO: 1342628 - RNA, 19 nt, Artificial Sequence
  Description of Artificial Sequence: Synthetic oligonucleotide
  Sense strand starting at position 3869 of SEQ ID NO: 1242373
gucuguccucucuaugcaa

SEQ ID NO: 1342629 - RNA, 19 nt, Artificial Sequence
  Description of Artificial Sequence: Synthetic oligonucleotide
  Antisense strand to SEQ ID NO: 1342628
uugcauagagaggacagac

SEQ ID NO: 1342630 - RNA, 19 nt, Artificial Sequence
  Description of Artificial Sequence: Synthetic oligonucleotide
  Sense strand starting at position 526 of SEQ ID NO: 1242374
acuagcugugaugaugauu

SEQ ID NO: 1342631 - RNA, 19 nt, Artificial Sequence
  Description of Artificial Sequence: Synthetic oligonucleotide
  Antisense strand to SEQ ID NO: 1342630
aaucaucaucacagcuagu

SEQ ID NO: 1342632 - RNA, 19 nt, Artificial Sequence
  Description of Artificial Sequence: Synthetic oligonucleotide
  Sense strand starting at position 529 of SEQ ID NO: 1242374
agcugugaugaugauuaua

SEQ ID NO: 1342633 - RNA, 19 nt, Artificial Sequence
  Description of Artificial Sequence: Synthetic oligonucleotide
  Antisense strand to SEQ ID NO: 1342632
uauaaucaucaucacagcu

SEQ ID NO: 1342634 - RNA, 19 nt, Artificial Sequence
  Description of Artificial Sequence: Synthetic oligonucleotide
  Sense strand starting at position 531 of SEQ ID NO: 1242374
cugugaugaugauuauaau

SEQ ID NO: 1342635 - RNA, 19 nt, Artificial Sequence
  Description of Artificial Sequence: Synthetic oligonucleotide
  Antisense strand to SEQ ID NO: 1342634
auuauaaucaucaucacag

SEQ ID NO: 1342636 - RNA, 19 nt, Artificial Sequence
  Description of Artificial Sequence: Synthetic oligonucleotide
  Sense strand starting at position 671 of SEQ ID NO: 1242374
uaggguuauccaggcaaau

SEQ ID NO: 1342637 - RNA, 19 nt, Artificial Sequence
  Description of Artificial Sequence: Synthetic oligonucleotide
  Antisense strand to SEQ ID NO: 1342636
auuugccuggauaacccua

SEQ ID NO: 1342638 - RNA, 19 nt, Artificial Sequence
  Description of Artificial Sequence: Synthetic oligonucleotide
  Sense strand starting at position 910 of SEQ ID NO: 1242374
uucugucagauguagauga

SEQ ID NO: 1342639 - RNA, 19 nt, Artificial Sequence
  Description of Artificial Sequence: Synthetic oligonucleotide
  Antisense strand to SEQ ID NO: 1342638
ucaucuacaucugacagaa

SEQ ID NO: 1342640 - RNA, 19 nt, Artificial Sequence
  Description of Artificial Sequence: Synthetic oligonucleotide
  Sense strand starting at position 914 of SEQ ID NO: 1242374
gucagauguagaugaccau

SEQ ID NO: 1342641 - RNA, 19 nt, Artificial Sequence
  Description of Artificial Sequence: Synthetic oligonucleotide
  Antisense strand to SEQ ID NO: 1342640
auggucaucuacaucugac

SEQ ID NO: 1342642 - RNA, 19 nt, Artificial Sequence
  Description of Artificial Sequence: Synthetic oligonucleotide
  Sense strand starting at position 921 of SEQ ID NO: 1242374
guagaugaccauuaggcau

SEQ ID NO: 1342643 - RNA, 19 nt, Artificial Sequence
  Description of Artificial Sequence: Synthetic oligonucleotide
  Antisense strand to SEQ ID NO: 1342642
augccuaauggucaucuac

SEQ ID NO: 1342644 - RNA, 19 nt, Artificial Sequence
  Description of Artificial Sequence: Synthetic oligonucleotide
  Sense strand starting at position 1093 of SEQ ID NO: 1242374
augauuaagugccuuuaaa

SEQ ID NO: 1342645 - RNA, 19 nt, Artificial Sequence
  Description of Artificial Sequence: Synthetic oligonucleotide
  Antisense strand to SEQ ID NO: 1342644
uuuaaaggcacuuaaucau

SEQ ID NO: 1342646 - RNA, 19 nt, Artificial Sequence
  Description of Artificial Sequence: Synthetic oligonucleotide
  Sense strand starting at position 1128 of SEQ ID NO: 1242374
aagcauuaacagugagauu

SEQ ID NO: 1342647 - RNA, 19 nt, Artificial Sequence
  Description of Artificial Sequence: Synthetic oligonucleotide
  Antisense strand to SEQ ID NO: 1342646
aaucucacuguuaaugcuu

SEQ ID NO: 1342648 - RNA, 19 nt, Artificial Sequence
  Description of Artificial Sequence: Synthetic oligonucleotide
  Sense strand starting at position 1204 of SEQ ID NO: 1242374
auaguuccugagggaaauu

SEQ ID NO: 1342649 - RNA, 19 nt, Artificial Sequence
  Description of Artificial Sequence: Synthetic oligonucleotide
  Antisense strand to SEQ ID NO: 1342648
aauuucccucaggaacuau

SEQ ID NO: 1342650 - RNA, 19 nt, Artificial Sequence
  Description of Artificial Sequence: Synthetic oligonucleotide
  Sense strand starting at position 1257 of SEQ ID NO: 1242374
auagaaguuagcgauauaa

SEQ ID NO: 1342651 - RNA, 19 nt, Artificial Sequence
  Description of Artificial Sequence: Synthetic oligonucleotide
  Antisense strand to SEQ ID NO: 1342650
uuauaucgcuaacuucuau

SEQ ID NO: 1342652 - RNA, 19 nt, Artificial Sequence
  Description of Artificial Sequence: Synthetic oligonucleotide
  Sense strand starting at position 1259 of SEQ ID NO: 1242374
agaaguuagcgauauaaac

SEQ ID NO: 1342653 - RNA, 19 nt, Artificial Sequence
  Description of Artificial Sequence: Synthetic oligonucleotide
  Antisense strand to SEQ ID NO: 1342652
guuuauaucgcuaacuucu

SEQ ID NO: 1342654 - RNA, 19 nt, Artificial Sequence
  Description of Artificial Sequence: Synthetic oligonucleotide
  Sense strand starting at position 1297 of SEQ ID NO: 1242374
uggauuauacuauguggaa

SEQ ID NO: 1342655 - RNA, 19 nt, Artificial Sequence
  Description of Artificial Sequence: Synthetic oligonucleotide
  Antisense strand to SEQ ID NO: 1342654
uuccacauaguauaaucca

SEQ ID NO: 1342656 - RNA, 19 nt, Artificial Sequence
  Description of Artificial Sequence: Synthetic oligonucleotide
  Sense strand starting at position 1336 of SEQ ID NO: 1242374
cagagaaauguaggagguu

SEQ ID NO: 1342657 - RNA, 19 nt, Artificial Sequence
  Description of Artificial Sequence: Synthetic oligonucleotide
  Antisense strand to SEQ ID NO: 1342656
aaccuccuacauuucucug

SEQ ID NO: 1342658 - RNA, 19 nt, Artificial Sequence
  Description of Artificial Sequence: Synthetic oligonucleotide
  Sense strand starting at position 1339 of SEQ ID NO: 1242374
agaaauguaggagguuuga

SEQ ID NO: 1342659 - RNA, 19 nt, Artificial Sequence
  Description of Artificial Sequence: Synthetic oligonucleotide
  Antisense strand to SEQ ID NO: 1342658
ucaaaccuccuacauuucu

SEQ ID NO: 1342660 - RNA, 19 nt, Artificial Sequence
  Description of Artificial Sequence: Synthetic oligonucleotide
  Sense strand starting at position 1412 of SEQ ID NO: 1242374
guuaacucaguuugaaaua

SEQ ID NO: 1342661 - RNA, 19 nt, Artificial Sequence
  Description of Artificial Sequence: Synthetic oligonucleotide
  Antisense strand to SEQ ID NO: 1342660
uauuucaaacugaguuaac

SEQ ID NO: 1342662 - RNA, 19 nt, Artificial Sequence
  Description of Artificial Sequence: Synthetic oligonucleotide
  Sense strand starting at position 1486 of SEQ ID NO: 1242374
auugauuccuaagucuaga

SEQ ID NO: 1342663 - RNA, 19 nt, Artificial Sequence
  Description of Artificial Sequence: Synthetic oligonucleotide
  Antisense strand to SEQ ID NO: 1342662
ucuagacuuaggaaucaau

SEQ ID NO: 1342664 - RNA, 19 nt, Artificial Sequence
  Description of Artificial Sequence: Synthetic oligonucleotide
  Sense strand starting at position 2477 of SEQ ID NO: 1242374
agguuaugucaccacucuu

SEQ ID NO: 1342665 - RNA, 19 nt, Artificial Sequence
  Description of Artificial Sequence: Synthetic oligonucleotide
  Antisense strand to SEQ ID NO: 1342664
aagaguggugacauaaccu

SEQ ID NO: 1342666 - RNA, 19 nt, Artificial Sequence
  Description of Artificial Sequence: Synthetic oligonucleotide
  Sense strand starting at position 2507 of SEQ ID NO: 1242374
guuggcuguguguuuguau

SEQ ID NO: 1342667 - RNA, 19 nt, Artificial Sequence
  Description of Artificial Sequence: Synthetic oligonucleotide
  Antisense strand to SEQ ID NO: 1342666
auacaaacacacagccaac

SEQ ID NO: 1342668 - RNA, 19 nt, Artificial Sequence
  Description of Artificial Sequence: Synthetic oligonucleotide
  Sense strand starting at position 2547 of SEQ ID NO: 1242374
gaucuuaaugguggaaagu

SEQ ID NO: 1342669 - RNA, 19 nt, Artificial Sequence
  Description of Artificial Sequence: Synthetic oligonucleotide
  Antisense strand to SEQ ID NO: 1342668
acuuuccaccauuaagauc

SEQ ID NO: 1342670 - RNA, 19 nt, Artificial Sequence
  Description of Artificial Sequence: Synthetic oligonucleotide
  Sense strand starting at position 2717 of SEQ ID NO: 1242374
gaguuuaaacuguagcaug

SEQ ID NO: 1342671 - RNA, 19 nt, Artificial Sequence
  Description of Artificial Sequence: Synthetic oligonucleotide
  Antisense strand to SEQ ID NO: 1342670
caugcuacaguuuaaacuc

SEQ ID NO: 1342672 - RNA, 19 nt, Artificial Sequence
  Description of Artificial Sequence: Synthetic oligonucleotide
  Sense strand starting at position 2922 of SEQ ID NO: 1242374
uggcuaauuucugucugac

SEQ ID NO: 1342673 - RNA, 19 nt, Artificial Sequence
  Description of Artificial Sequence: Synthetic oligonucleotide
  Antisense strand to SEQ ID NO: 1342672
gucagacagaaauuagcca

SEQ ID NO: 1342674 - RNA, 19 nt, Artificial Sequence
  Description of Artificial Sequence: Synthetic oligonucleotide
  Sense strand starting at position 2924 of SEQ ID NO: 1242374
gcuaauuucugucugaccu

SEQ ID NO: 1342675 - RNA, 19 nt, Artificial Sequence
  Description of Artificial Sequence: Synthetic oligonucleotide
  Antisense strand to SEQ ID NO: 1342674
aggucagacagaaauuagc

SEQ ID NO: 1342676 - RNA, 19 nt, Artificial Sequence
  Description of Artificial Sequence: Synthetic oligonucleotide
  Sense strand starting at position 2932 of SEQ ID NO: 1242374
cugucugaccuuuaggauu

SEQ ID NO: 1342677 - RNA, 19 nt, Artificial Sequence
  Description of Artificial Sequence: Synthetic oligonucleotide
  Antisense strand to SEQ ID NO: 1342676
aauccuaaaggucagacag

SEQ ID NO: 1342678 - RNA, 19 nt, Artificial Sequence
  Description of Artificial Sequence: Synthetic oligonucleotide
  Sense strand starting at position 2997 of SEQ ID NO: 1242374
agauuaaguuagguaccau

SEQ ID NO: 1342679 - RNA, 19 nt, Artificial Sequence
  Description of Artificial Sequence: Synthetic oligonucleotide
  Antisense strand to SEQ ID NO: 1342678
augguaccuaacuuaaucu

SEQ ID NO: 1342680 - RNA, 19 nt, Artificial Sequence
  Description of Artificial Sequence: Synthetic oligonucleotide
  Sense strand starting at position 3103 of SEQ ID NO: 1242374
ggguuugacuacuuuggua

SEQ ID NO: 1342681 - RNA, 19 nt, Artificial Sequence
  Description of Artificial Sequence: Synthetic oligonucleotide
  Antisense strand to SEQ ID NO: 1342680
uaccaaaguagucaaaccc

SEQ ID NO: 1342682 - RNA, 19 nt, Artificial Sequence
  Description of Artificial Sequence: Synthetic oligonucleotide
  Sense strand starting at position 3105 of SEQ ID NO: 1242374
guuugacuacuuugguaag

SEQ ID NO: 1342683 - RNA, 19 nt, Artificial Sequence
  Description of Artificial Sequence: Synthetic oligonucleotide
  Antisense strand to SEQ ID NO: 1342682
cuuaccaaaguagucaaac

SEQ ID NO: 1342684 - RNA, 19 nt, Artificial Sequence
  Description of Artificial Sequence: Synthetic oligonucleotide
  Sense strand starting at position 3365 of SEQ ID NO: 1242374
auauauagcucagugaauu

SEQ ID NO: 1342685 - RNA, 19 nt, Artificial Sequence
  Description of Artificial Sequence: Synthetic oligonucleotide
  Antisense strand to SEQ ID NO: 1342684
aauucacugagcuauauau

SEQ ID NO: 1342686 - RNA, 19 nt, Artificial Sequence
  Description of Artificial Sequence: Synthetic oligonucleotide
  Sense strand starting at position 3391 of SEQ ID NO: 1242374
agaacauaccaguguaacu

SEQ ID NO: 1342687 - RNA, 19 nt, Artificial Sequence
  Description of Artificial Sequence: Synthetic oligonucleotide
  Antisense strand to SEQ ID NO: 1342686
aguuacacugguauguucu

SEQ ID NO: 1342688 - RNA, 19 nt, Artificial Sequence
  Description of Artificial Sequence: Synthetic oligonucleotide
  Sense strand starting at position 3797 of SEQ ID NO: 1242374
uggccuaugaauuaugagu

SEQ ID NO: 1342689 - RNA, 19 nt, Artificial Sequence
  Description of Artificial Sequence: Synthetic oligonucleotide
  Antisense strand to SEQ ID NO: 1342688
acucauaauucauaggcca

SEQ ID NO: 1342690 - RNA, 19 nt, Artificial Sequence
  Description of Artificial Sequence: Synthetic oligonucleotide
  Sense strand starting at position 3802 of SEQ ID NO: 1242374
uaugaauuaugagugguaa

SEQ ID NO: 1342691 - RNA, 19 nt, Artificial Sequence
  Description of Artificial Sequence: Synthetic oligonucleotide
  Antisense strand to SEQ ID NO: 1342690
uuaccacucauaauucaua

SEQ ID NO: 1342692 - RNA, 19 nt, Artificial Sequence
  Description of Artificial Sequence: Synthetic oligonucleotide
  Sense strand starting at position 3803 of SEQ ID NO: 1242374
augaauuaugagugguaaa

SEQ ID NO: 1342693 - RNA, 19 nt, Artificial Sequence
  Description of Artificial Sequence: Synthetic oligonucleotide
  Antisense strand to SEQ ID NO: 1342692
uuuaccacucauaauucau

SEQ ID NO: 1342694 - RNA, 19 nt, Artificial Sequence
  Description of Artificial Sequence: Synthetic oligonucleotide
  Sense strand starting at position 3804 of SEQ ID NO: 1242374
ugaauuaugagugguaaau

SEQ ID NO: 1342695 - RNA, 19 nt, Artificial Sequence
  Description of Artificial Sequence: Synthetic oligonucleotide
  Antisense strand to SEQ ID NO: 1342694
auuuaccacucauaauuca

SEQ ID NO: 1342696 - RNA, 19 nt, Artificial Sequence
  Description of Artificial Sequence: Synthetic oligonucleotide
  Sense strand starting at position 3810 of SEQ ID NO: 1242374
augagugguaaauaugcuu

SEQ ID NO: 1342697 - RNA, 19 nt, Artificial Sequence
  Description of Artificial Sequence: Synthetic oligonucleotide
  Antisense strand to SEQ ID NO: 1342696
aagcauauuuaccacucau

SEQ ID NO: 1342698 - RNA, 19 nt, Artificial Sequence
  Description of Artificial Sequence: Synthetic oligonucleotide
  Sense strand starting at position 3815 of SEQ ID NO: 1242374
ugguaaauaugcuugggau

SEQ ID NO: 1342699 - RNA, 19 nt, Artificial Sequence
  Description of Artificial Sequence: Synthetic oligonucleotide
  Antisense strand to SEQ ID NO: 1342698
aucccaagcauauuuacca

SEQ ID NO: 1342700 - RNA, 19 nt, Artificial Sequence
  Description of Artificial Sequence: Synthetic oligonucleotide
  Sense strand starting at position 3816 of SEQ ID NO: 1242374
gguaaauaugcuugggaua

SEQ ID NO: 1342701 - RNA, 19 nt, Artificial Sequence
  Description of Artificial Sequence: Synthetic oligonucleotide
  Antisense strand to SEQ ID NO: 1342700
uaucccaagcauauuuacc

SEQ ID NO: 1342702 - RNA, 19 nt, Artificial Sequence
  Description of Artificial Sequence: Synthetic oligonucleotide
  Sense strand starting at position 3817 of SEQ ID NO: 1242374
guaaauaugcuugggauag

SEQ ID NO: 1342703 - RNA, 19 nt, Artificial Sequence
  Description of Artificial Sequence: Synthetic oligonucleotide
  Antisense strand to SEQ ID NO: 1342702
cuaucccaagcauauuuac

SEQ ID NO: 1342704 - RNA, 19 nt, Artificial Sequence
  Description of Artificial Sequence: Synthetic oligonucleotide
  Sense strand starting at position 3821 of SEQ ID NO: 1242374
auaugcuugggauagguau

SEQ ID NO: 1342705 - RNA, 19 nt, Artificial Sequence
  Description of Artificial Sequence: Synthetic oligonucleotide
  Antisense strand to SEQ ID NO: 1342704
auaccuaucccaagcauau

SEQ ID NO: 1342706 - RNA, 19 nt, Artificial Sequence
  Description of Artificial Sequence: Synthetic oligonucleotide
  Sense strand starting at position 3935 of SEQ ID NO: 1242374
gggcaacugaaguguaauu

SEQ ID NO: 1342707 - RNA, 19 nt, Artificial Sequence
  Description of Artificial Sequence: Synthetic oligonucleotide
  Antisense strand to SEQ ID NO: 1342706
aauuacacuucaguugccc

SEQ ID NO: 1342708 - RNA, 19 nt, Artificial Sequence
  Description of Artificial Sequence: Synthetic oligonucleotide
  Sense strand starting at position 3954 of SEQ ID NO: 1242374
uuacauguacagugaggaa

SEQ ID NO: 1342709 - RNA, 19 nt, Artificial Sequence
  Description of Artificial Sequence: Synthetic oligonucleotide
  Antisense strand to SEQ ID NO: 1342708
uuccucacuguacauguaa

SEQ ID NO: 1342710 - RNA, 19 nt, Artificial Sequence
  Description of Artificial Sequence: Synthetic oligonucleotide
  Sense strand starting at position 14 of SEQ ID NO: 1242375
gacagcaucccgugcauuu

SEQ ID NO: 1342711 - RNA, 19 nt, Artificial Sequence
  Description of Artificial Sequence: Synthetic oligonucleotide
  Antisense strand to SEQ ID NO: 1342710
aaaugcacgggaugcuguc

SEQ ID NO: 1342712 - RNA, 19 nt, Artificial Sequence
  Description of Artificial Sequence: Synthetic oligonucleotide
  Sense strand starting at position 232 of SEQ ID NO: 1242375
gagagcgugcguguuugaa

SEQ ID NO: 1342713 - RNA, 19 nt, Artificial Sequence
  Description of Artificial Sequence: Synthetic oligonucleotide
  Antisense strand to SEQ ID NO: 1342712
uucaaacacgcacgcucuc

SEQ ID NO: 1342714 - RNA, 19 nt, Artificial Sequence
  Description of Artificial Sequence: Synthetic oligonucleotide
  Sense strand starting at position 233 of SEQ ID NO: 1242375
agagcgugcguguuugaaa

SEQ ID NO: 1342715 - RNA, 19 nt, Artificial Sequence
  Description of Artificial Sequence: Synthetic oligonucleotide
  Antisense strand to SEQ ID NO: 1342714
uuucaaacacgcacgcucu

SEQ ID NO: 1342716 - RNA, 19 nt, Artificial Sequence
  Description of Artificial Sequence: Synthetic oligonucleotide
  Sense strand starting at position 1448 of SEQ ID NO: 1242375
cucagagucccuuaggacu

SEQ ID NO: 1342717 - RNA, 19 nt, Artificial Sequence
  Description of Artificial Sequence: Synthetic oligonucleotide
  Antisense strand to SEQ ID NO: 1342716
aguccuaagggacucugag

SEQ ID NO: 1342718 - RNA, 19 nt, Artificial Sequence
  Description of Artificial Sequence: Synthetic oligonucleotide
  Sense strand starting at position 1474 of SEQ ID NO: 1242375
gagcuucuagacuacguua

SEQ ID NO: 1342719 - RNA, 19 nt, Artificial Sequence
  Description of Artificial Sequence: Synthetic oligonucleotide
  Antisense strand to SEQ ID NO: 1342718
uaacguagucuagaagcuc

SEQ ID NO: 1342720 - RNA, 19 nt, Artificial Sequence
  Description of Artificial Sequence: Synthetic oligonucleotide
  Sense strand starting at position 1477 of SEQ ID NO: 1242375
cuucuagacuacguuacau

SEQ ID NO: 1342721 - RNA, 19 nt, Artificial Sequence
  Description of Artificial Sequence: Synthetic oligonucleotide
  Antisense strand to SEQ ID NO: 1342720
auguaacguagucuagaag

SEQ ID NO: 1342722 - RNA, 19 nt, Artificial Sequence
  Description of Artificial Sequence: Synthetic oligonucleotide
  Sense strand starting at position 1513 of SEQ ID NO: 1242375
ugauuacaguucucaggca

SEQ ID NO: 1342723 - RNA, 19 nt, Artificial Sequence
  Description of Artificial Sequence: Synthetic oligonucleotide
  Antisense strand to SEQ ID NO: 1342722
ugccugagaacuguaauca

SEQ ID NO: 1342724 - RNA, 19 nt, Artificial Sequence
  Description of Artificial Sequence: Synthetic oligonucleotide
  Sense strand starting at position 1666 of SEQ ID NO: 1242375
cgcugucaugguguucuua

SEQ ID NO: 1342725 - RNA, 19 nt, Artificial Sequence
  Description of Artificial Sequence: Synthetic oligonucleotide
  Antisense strand to SEQ ID NO: 1342724
uaagaacaccaugacagcg

SEQ ID NO: 1342726 - RNA, 19 nt, Artificial Sequence
  Description of Artificial Sequence: Synthetic oligonucleotide
  Sense strand starting at position 1680 of SEQ ID NO: 1242375
ucuuacucccgguagaugu

SEQ ID NO: 1342727 - RNA, 19 nt, Artificial Sequence
  Description of Artificial Sequence: Synthetic oligonucleotide
  Antisense strand to SEQ ID NO: 1342726
acaucuaccgggaguaaga

SEQ ID NO: 1342728 - RNA, 19 nt, Artificial Sequence
  Description of Artificial Sequence: Synthetic oligonucleotide
  Sense strand starting at position 2051 of SEQ ID NO: 1242375
gagguuguccagcacugau

SEQ ID NO: 1342729 - RNA, 19 nt, Artificial Sequence
  Description of Artificial Sequence: Synthetic oligonucleotide
  Antisense strand to SEQ ID NO: 1342728
aucagugcuggacaaccuc

SEQ ID NO: 1342730 - RNA, 19 nt, Artificial Sequence
  Description of Artificial Sequence: Synthetic oligonucleotide
  Sense strand starting at position 2101 of SEQ ID NO: 1242375
guugcacuaguggauauaa

SEQ ID NO: 1342731 - RNA, 19 nt, Artificial Sequence
  Description of Artificial Sequence: Synthetic oligonucleotide
  Antisense strand to SEQ ID NO: 1342730
uuauauccacuagugcaac

SEQ ID NO: 1342732 - RNA, 19 nt, Artificial Sequence
  Description of Artificial Sequence: Synthetic oligonucleotide
  Sense strand starting at position 2103 of SEQ ID NO: 1242375
ugcacuaguggauauaacu

SEQ ID NO: 1342733 - RNA, 19 nt, Artificial Sequence
  Description of Artificial Sequence: Synthetic oligonucleotide
  Antisense strand to SEQ ID NO: 1342732
aguuauauccacuagugca

SEQ ID NO: 1342734 - RNA, 19 nt, Artificial Sequence
  Description of Artificial Sequence: Synthetic oligonucleotide
  Sense strand starting at position 2120 of SEQ ID NO: 1242375
cuaugucgucuuguaguau

SEQ ID NO: 1342735 - RNA, 19 nt, Artificial Sequence
  Description of Artificial Sequence: Synthetic oligonucleotide
  Antisense strand to SEQ ID NO: 1342734
auacuacaagacgacauag

SEQ ID NO: 1342736 - RNA, 19 nt, Artificial Sequence
  Description of Artificial Sequence: Synthetic oligonucleotide
  Sense strand starting at position 2154 of SEQ ID NO: 1242375
ucgauugcugcagauacua

SEQ ID NO: 1342737 - RNA, 19 nt, Artificial Sequence
  Description of Artificial Sequence: Synthetic oligonucleotide
  Antisense strand to SEQ ID NO: 1342736
uaguaucugcagcaaucga

SEQ ID NO: 1342738 - RNA, 19 nt, Artificial Sequence
  Description of Artificial Sequence: Synthetic oligonucleotide
  Sense strand starting at position 2333 of SEQ ID NO: 1242375
uugcuucuccaagaagcaa

SEQ ID NO: 1342739 - RNA, 19 nt, Artificial Sequence
  Description of Artificial Sequence: Synthetic oligonucleotide
  Antisense strand to SEQ ID NO: 1342738
uugcuucuuggagaagcaa

SEQ ID NO: 1342740 - RNA, 19 nt, Artificial Sequence
  Description of Artificial Sequence: Synthetic oligonucleotide
  Sense strand starting at position 2480 of SEQ ID NO: 1242375
aucaaaugaucaguacgua

SEQ ID NO: 1342741 - RNA, 19 nt, Artificial Sequence
  Description of Artificial Sequence: Synthetic oligonucleotide
  Antisense strand to SEQ ID NO: 1342740
uacguacugaucauuugau

SEQ ID NO: 1342742 - RNA, 19 nt, Artificial Sequence
  Description of Artificial Sequence: Synthetic oligonucleotide
  Sense strand starting at position 2481 of SEQ ID NO: 1242375
ucaaaugaucaguacguaa

SEQ ID NO: 1342743 - RNA, 19 nt, Artificial Sequence
  Description of Artificial Sequence: Synthetic oligonucleotide
  Antisense strand to SEQ ID NO: 1342742
uuacguacugaucauuuga

SEQ ID NO: 1342744 - RNA, 19 nt, Artificial Sequence
  Description of Artificial Sequence: Synthetic oligonucleotide
  Sense strand starting at position 2483 of SEQ ID NO: 1242375
aaaugaucaguacguaauu

SEQ ID NO: 1342745 - RNA, 19 nt, Artificial Sequence
  Description of Artificial Sequence: Synthetic oligonucleotide
  Antisense strand to SEQ ID NO: 1342744
aauuacguacugaucauuu

SEQ ID NO: 1342746 - RNA, 19 nt, Artificial Sequence
  Description of Artificial Sequence: Synthetic oligonucleotide
  Sense strand starting at position 2527 of SEQ ID NO: 1242375
uaaagaggucuuuguaguc

SEQ ID NO: 1342747 - RNA, 19 nt, Artificial Sequence
  Description of Artificial Sequence: Synthetic oligonucleotide
  Antisense strand to SEQ ID NO: 1342746
gacuacaaagaccucuuua

SEQ ID NO: 1342748 - RNA, 19 nt, Artificial Sequence
  Description of Artificial Sequence: Synthetic oligonucleotide
  Sense strand starting at position 2533 of SEQ ID NO: 1242375
ggucuuuguagucauacac

SEQ ID NO: 1342749 - RNA, 19 nt, Artificial Sequence
  Description of Artificial Sequence: Synthetic oligonucleotide
  Antisense strand to SEQ ID NO: 1342748
guguaugacuacaaagacc

SEQ ID NO: 1342750 - RNA, 19 nt, Artificial Sequence
  Description of Artificial Sequence: Synthetic oligonucleotide
  Sense strand starting at position 2791 of SEQ ID NO: 1242375
guacacaaaugguugcaua

SEQ ID NO: 1342751 - RNA, 19 nt, Artificial Sequence
  Description of Artificial Sequence: Synthetic oligonucleotide
  Antisense strand to SEQ ID NO: 1342750
uaugcaaccauuuguguac

SEQ ID NO: 1342752 - RNA, 19 nt, Artificial Sequence
  Description of Artificial Sequence: Synthetic oligonucleotide
  Sense strand starting at position 3119 of SEQ ID NO: 1242375
acuagcugugaugaugauu

SEQ ID NO: 1342753 - RNA, 19 nt, Artificial Sequence
  Description of Artificial Sequence: Synthetic oligonucleotide
  Antisense strand to SEQ ID NO: 1342752
aaucaucaucacagcuagu

SEQ ID NO: 1342754 - RNA, 19 nt, Artificial Sequence
  Description of Artificial Sequence: Synthetic oligonucleotide
  Sense strand starting at position 3122 of SEQ ID NO: 1242375
agcugugaugaugauuaua

SEQ ID NO: 1342755 - RNA, 19 nt, Artificial Sequence
  Description of Artificial Sequence: Synthetic oligonucleotide
  Antisense strand to SEQ ID NO: 1342754
uauaaucaucaucacagcu

SEQ ID NO: 1342756 - RNA, 19 nt, Artificial Sequence
  Description of Artificial Sequence: Synthetic oligonucleotide
  Sense strand starting at position 3124 of SEQ ID NO: 1242375
cugugaugaugauuauaau

SEQ ID NO: 1342757 - RNA, 19 nt, Artificial Sequence
  Description of Artificial Sequence: Synthetic oligonucleotide
  Antisense strand to SEQ ID NO: 1342756
auuauaaucaucaucacag

SEQ ID NO: 1342758 - RNA, 19 nt, Artificial Sequence
  Description of Artificial Sequence: Synthetic oligonucleotide
  Sense strand starting at position 3233 of SEQ ID NO: 1242375
agaguagaauaagacuaaa

SEQ ID NO: 1342759 - RNA, 19 nt, Artificial Sequence
  Description of Artificial Sequence: Synthetic oligonucleotide
  Antisense strand to SEQ ID NO: 1342758
uuuagucuuauucuacucu

SEQ ID NO: 1342760 - RNA, 19 nt, Artificial Sequence
  Description of Artificial Sequence: Synthetic oligonucleotide
  Sense strand starting at position 3264 of SEQ ID NO: 1242375
uaggguuauccaggcaaau

SEQ ID NO: 1342761 - RNA, 19 nt, Artificial Sequence
  Description of Artificial Sequence: Synthetic oligonucleotide
  Antisense strand to SEQ ID NO: 1342760
auuugccuggauaacccua

SEQ ID NO: 1342762 - RNA, 19 nt, Artificial Sequence
  Description of Artificial Sequence: Synthetic oligonucleotide
  Sense strand starting at position 3475 of SEQ ID NO: 1242375
gugacauguucaguuuagg

SEQ ID NO: 1342763 - RNA, 19 nt, Artificial Sequence
  Description of Artificial Sequence: Synthetic oligonucleotide
  Antisense strand to SEQ ID NO: 1342762
ccuaaacugaacaugucac

SEQ ID NO: 1342764 - RNA, 19 nt, Artificial Sequence
  Description of Artificial Sequence: Synthetic oligonucleotide
  Sense strand starting at position 3501 of SEQ ID NO: 1242375
aguucugucagauguagau

SEQ ID NO: 1342765 - RNA, 19 nt, Artificial Sequence
  Description of Artificial Sequence: Synthetic oligonucleotide
  Antisense strand to SEQ ID NO: 1342764
aucuacaucugacagaacu

SEQ ID NO: 1342766 - RNA, 19 nt, Artificial Sequence
  Description of Artificial Sequence: Synthetic oligonucleotide
  Sense strand starting at position 3503 of SEQ ID NO: 1242375
uucugucagauguagauga

SEQ ID NO: 1342767 - RNA, 19 nt, Artificial Sequence
  Description of Artificial Sequence: Synthetic oligonucleotide
  Antisense strand to SEQ ID NO: 1342766
ucaucuacaucugacagaa

SEQ ID NO: 1342768 - RNA, 19 nt, Artificial Sequence
  Description of Artificial Sequence: Synthetic oligonucleotide
  Sense strand starting at position 3507 of SEQ ID NO: 1242375
gucagauguagaugaccau

SEQ ID NO: 1342769 - RNA, 19 nt, Artificial Sequence
  Description of Artificial Sequence: Synthetic oligonucleotide
  Antisense strand to SEQ ID NO: 1342768
auggucaucuacaucugac

SEQ ID NO: 1342770 - RNA, 19 nt, Artificial Sequence
  Description of Artificial Sequence: Synthetic oligonucleotide
  Sense strand starting at position 3514 of SEQ ID NO: 1242375
guagaugaccauuaggcau

SEQ ID NO: 1342771 - RNA, 19 nt, Artificial Sequence
  Description of Artificial Sequence: Synthetic oligonucleotide
  Antisense strand to SEQ ID NO: 1342770
augccuaauggucaucuac

SEQ ID NO: 1342772 - RNA, 19 nt, Artificial Sequence
  Description of Artificial Sequence: Synthetic oligonucleotide
  Sense strand starting at position 3686 of SEQ ID NO: 1242375
augauuaagugccuuuaaa

SEQ ID NO: 1342773 - RNA, 19 nt, Artificial Sequence
  Description of Artificial Sequence: Synthetic oligonucleotide
  Antisense strand to SEQ ID NO: 1342772
uuuaaaggcacuuaaucau

SEQ ID NO: 1342774 - RNA, 19 nt, Artificial Sequence
  Description of Artificial Sequence: Synthetic oligonucleotide
  Sense strand starting at position 3721 of SEQ ID NO: 1242375
aagcauuaacagugagauu

SEQ ID NO: 1342775 - RNA, 19 nt, Artificial Sequence
  Description of Artificial Sequence: Synthetic oligonucleotide
  Antisense strand to SEQ ID NO: 1342774
aaucucacuguuaaugcuu

SEQ ID NO: 1342776 - RNA, 19 nt, Artificial Sequence
  Description of Artificial Sequence: Synthetic oligonucleotide
  Sense strand starting at position 3789 of SEQ ID NO: 1242375
aguaguauauaguuccuga

SEQ ID NO: 1342777 - RNA, 19 nt, Artificial Sequence
  Description of Artificial Sequence: Synthetic oligonucleotide
  Antisense strand to SEQ ID NO: 1342776
ucaggaacuauauacuacu

SEQ ID NO: 1342778 - RNA, 19 nt, Artificial Sequence
  Description of Artificial Sequence: Synthetic oligonucleotide
  Sense strand starting at position 3797 of SEQ ID NO: 1242375
auaguuccugagggaaauu

SEQ ID NO: 1342779 - RNA, 19 nt, Artificial Sequence
  Description of Artificial Sequence: Synthetic oligonucleotide
  Antisense strand to SEQ ID NO: 1342778
aauuucccucaggaacuau

SEQ ID NO: 1342780 - RNA, 19 nt, Artificial Sequence
  Description of Artificial Sequence: Synthetic oligonucleotide
  Sense strand starting at position 3850 of SEQ ID NO: 1242375
auagaaguuagcgauauaa

SEQ ID NO: 1342781 - RNA, 19 nt, Artificial Sequence
  Description of Artificial Sequence: Synthetic oligonucleotide
  Antisense strand to SEQ ID NO: 1342780
uuauaucgcuaacuucuau

SEQ ID NO: 1342782 - RNA, 19 nt, Artificial Sequence
  Description of Artificial Sequence: Synthetic oligonucleotide
  Sense strand starting at position 3852 of SEQ ID NO: 1242375
agaaguuagcgauauaaac

SEQ ID NO: 1342783 - RNA, 19 nt, Artificial Sequence
  Description of Artificial Sequence: Synthetic oligonucleotide
  Antisense strand to SEQ ID NO: 1342782
guuuauaucgcuaacuucu

SEQ ID NO: 1342784 - RNA, 19 nt, Artificial Sequence
  Description of Artificial Sequence: Synthetic oligonucleotide
  Sense strand starting at position 3890 of SEQ ID NO: 1242375
uggauuauacuauguggaa

SEQ ID NO: 1342785 - RNA, 19 nt, Artificial Sequence
  Description of Artificial Sequence: Synthetic oligonucleotide
  Antisense strand to SEQ ID NO: 1342784
uuccacauaguauaaucca

SEQ ID NO: 1342786 - RNA, 19 nt, Artificial Sequence
  Description of Artificial Sequence: Synthetic oligonucleotide
  Sense strand starting at position 3929 of SEQ ID NO: 1242375
cagagaaauguaggagguu

SEQ ID NO: 1342787 - RNA, 19 nt, Artificial Sequence
  Description of Artificial Sequence: Synthetic oligonucleotide
  Antisense strand to SEQ ID NO: 1342786
aaccuccuacauuucucug

SEQ ID NO: 1342788 - RNA, 19 nt, Artificial Sequence
  Description of Artificial Sequence: Synthetic oligonucleotide
  Sense strand starting at position 3932 of SEQ ID NO: 1242375
agaaauguaggagguuuga

SEQ ID NO: 1342789 - RNA, 19 nt, Artificial Sequence
  Description of Artificial Sequence: Synthetic oligonucleotide
  Antisense strand to SEQ ID NO: 1342788
ucaaaccuccuacauuucu

SEQ ID NO: 1342790 - RNA, 19 nt, Artificial Sequence
  Description of Artificial Sequence: Synthetic oligonucleotide
  Sense strand starting at position 68 of SEQ ID NO: 1242376
gacagcaucccgugcauuu

SEQ ID NO: 1342791 - RNA, 19 nt, Artificial Sequence
  Description of Artificial Sequence: Synthetic oligonucleotide
  Antisense strand to SEQ ID NO: 1342790
aaaugcacgggaugcuguc

SEQ ID NO: 1342792 - RNA, 19 nt, Artificial Sequence
  Description of Artificial Sequence: Synthetic oligonucleotide
  Sense strand starting at position 286 of SEQ ID NO: 1242376
gagagcgugcguguuugaa

SEQ ID NO: 1342793 - RNA, 19 nt, Artificial Sequence
  Description of Artificial Sequence: Synthetic oligonucleotide
  Antisense strand to SEQ ID NO: 1342792
uucaaacacgcacgcucuc

SEQ ID NO: 1342794 - RNA, 19 nt, Artificial Sequence
  Description of Artificial Sequence: Synthetic oligonucleotide
  Sense strand starting at position 287 of SEQ ID NO: 1242376
agagcgugcguguuugaaa

SEQ ID NO: 1342795 - RNA, 19 nt, Artificial Sequence
  Description of Artificial Sequence: Synthetic oligonucleotide
  Antisense strand to SEQ ID NO: 1342794
uuucaaacacgcacgcucu

SEQ ID NO: 1342796 - RNA, 19 nt, Artificial Sequence
  Description of Artificial Sequence: Synthetic oligonucleotide
  Sense strand starting at position 1502 of SEQ ID NO: 1242376
cucagagucccuuaggacu

SEQ ID NO: 1342797 - RNA, 19 nt, Artificial Sequence
  Description of Artificial Sequence: Synthetic oligonucleotide
  Antisense strand to SEQ ID NO: 1342796
aguccuaagggacucugag

SEQ ID NO: 1342798 - RNA, 19 nt, Artificial Sequence
  Description of Artificial Sequence: Synthetic oligonucleotide
  Sense strand starting at position 1528 of SEQ ID NO: 1242376
gagcuucuagacuacguua

SEQ ID NO: 1342799 - RNA, 19 nt, Artificial Sequence
  Description of Artificial Sequence: Synthetic oligonucleotide
  Antisense strand to SEQ ID NO: 1342798
uaacguagucuagaagcuc

SEQ ID NO: 1342800 - RNA, 19 nt, Artificial Sequence
  Description of Artificial Sequence: Synthetic oligonucleotide
  Sense strand starting at position 1531 of SEQ ID NO: 1242376
cuucuagacuacguuacau

SEQ ID NO: 1342801 - RNA, 19 nt, Artificial Sequence
  Description of Artificial Sequence: Synthetic oligonucleotide
  Antisense strand to SEQ ID NO: 1342800
auguaacguagucuagaag

SEQ ID NO: 1342802 - RNA, 19 nt, Artificial Sequence
  Description of Artificial Sequence: Synthetic oligonucleotide
  Sense strand starting at position 1559 of SEQ ID NO: 1242376
ggcugacgugauuacaguu

SEQ ID NO: 1342803 - RNA, 19 nt, Artificial Sequence
  Description of Artificial Sequence: Synthetic oligonucleotide
  Antisense strand to SEQ ID NO: 1342802
aacuguaaucacgucagcc

SEQ ID NO: 1342804 - RNA, 19 nt, Artificial Sequence
  Description of Artificial Sequence: Synthetic oligonucleotide
  Sense strand starting at position 1567 of SEQ ID NO: 1242376
ugauuacaguucucaggca

SEQ ID NO: 1342805 - RNA, 19 nt, Artificial Sequence
  Description of Artificial Sequence: Synthetic oligonucleotide
  Antisense strand to SEQ ID NO: 1342804
ugccugagaacuguaauca

SEQ ID NO: 1342806 - RNA, 19 nt, Artificial Sequence
  Description of Artificial Sequence: Synthetic oligonucleotide
  Sense strand starting at position 1720 of SEQ ID NO: 1242376
cgcugucaugguguucuua

SEQ ID NO: 1342807 - RNA, 19 nt, Artificial Sequence
  Description of Artificial Sequence: Synthetic oligonucleotide
  Antisense strand to SEQ ID NO: 1342806
uaagaacaccaugacagcg

SEQ ID NO: 1342808 - RNA, 19 nt, Artificial Sequence
  Description of Artificial Sequence: Synthetic oligonucleotide
  Sense strand starting at position 1734 of SEQ ID NO: 1242376
ucuuacucccgguagaugu

SEQ ID NO: 1342809 - RNA, 19 nt, Artificial Sequence
  Description of Artificial Sequence: Synthetic oligonucleotide
  Antisense strand to SEQ ID NO: 1342808
acaucuaccgggaguaaga

SEQ ID NO: 1342810 - RNA, 19 nt, Artificial Sequence
  Description of Artificial Sequence: Synthetic oligonucleotide
  Sense strand starting at position 2105 of SEQ ID NO: 1242376
gagguuguccagcacugau

SEQ ID NO: 1342811 - RNA, 19 nt, Artificial Sequence
  Description of Artificial Sequence: Synthetic oligonucleotide
  Antisense strand to SEQ ID NO: 1342810
aucagugcuggacaaccuc

SEQ ID NO: 1342812 - RNA, 19 nt, Artificial Sequence
  Description of Artificial Sequence: Synthetic oligonucleotide
  Sense strand starting at position 2155 of SEQ ID NO: 1242376
guugcacuaguggauauaa

SEQ ID NO: 1342813 - RNA, 19 nt, Artificial Sequence
  Description of Artificial Sequence: Synthetic oligonucleotide
  Antisense strand to SEQ ID NO: 1342812
uuauauccacuagugcaac

SEQ ID NO: 1342814 - RNA, 19 nt, Artificial Sequence
  Description of Artificial Sequence: Synthetic oligonucleotide
  Sense strand starting at position 2157 of SEQ ID NO: 1242376
ugcacuaguggauauaacu

SEQ ID NO: 1342815 - RNA, 19 nt, Artificial Sequence
  Description of Artificial Sequence: Synthetic oligonucleotide
  Antisense strand to SEQ ID NO: 1342814
aguuauauccacuagugca

SEQ ID NO: 1342816 - RNA, 19 nt, Artificial Sequence
  Description of Artificial Sequence: Synthetic oligonucleotide
  Sense strand starting at position 2174 of SEQ ID NO: 1242376
cuaugucgucuuguaguau

SEQ ID NO: 1342817 - RNA, 19 nt, Artificial Sequence
  Description of Artificial Sequence: Synthetic oligonucleotide
  Antisense strand to SEQ ID NO: 1342816
auacuacaagacgacauag

SEQ ID NO: 1342818 - RNA, 19 nt, Artificial Sequence
  Description of Artificial Sequence: Synthetic oligonucleotide
  Sense strand starting at position 2208 of SEQ ID NO: 1242376
ucgauugcugcagauacua

SEQ ID NO: 1342819 - RNA, 19 nt, Artificial Sequence
  Description of Artificial Sequence: Synthetic oligonucleotide
  Antisense strand to SEQ ID NO: 1342818
uaguaucugcagcaaucga

SEQ ID NO: 1342820 - RNA, 19 nt, Artificial Sequence
  Description of Artificial Sequence: Synthetic oligonucleotide
  Sense strand starting at position 2387 of SEQ ID NO: 1242376
uugcuucuccaagaagcaa

SEQ ID NO: 1342821 - RNA, 19 nt, Artificial Sequence
  Description of Artificial Sequence: Synthetic oligonucleotide
  Antisense strand to SEQ ID NO: 1342820
uugcuucuuggagaagcaa

SEQ ID NO: 1342822 - RNA, 19 nt, Artificial Sequence
  Description of Artificial Sequence: Synthetic oligonucleotide
  Sense strand starting at position 2534 of SEQ ID NO: 1242376
aucaaaugaucaguacgua

SEQ ID NO: 1342823 - RNA, 19 nt, Artificial Sequence
  Description of Artificial Sequence: Synthetic oligonucleotide
  Antisense strand to SEQ ID NO: 1342822
uacguacugaucauuugau

SEQ ID NO: 1342824 - RNA, 19 nt, Artificial Sequence
  Description of Artificial Sequence: Synthetic oligonucleotide
  Sense strand starting at position 2535 of SEQ ID NO: 1242376
ucaaaugaucaguacguaa

SEQ ID NO: 1342825 - RNA, 19 nt, Artificial Sequence
  Description of Artificial Sequence: Synthetic oligonucleotide
  Antisense strand to SEQ ID NO: 1342824
uuacguacugaucauuuga

SEQ ID NO: 1342826 - RNA, 19 nt, Artificial Sequence
  Description of Artificial Sequence: Synthetic oligonucleotide
  Sense strand starting at position 2537 of SEQ ID NO: 1242376
aaaugaucaguacguaauu

SEQ ID NO: 1342827 - RNA, 19 nt, Artificial Sequence
  Description of Artificial Sequence: Synthetic oligonucleotide
  Antisense strand to SEQ ID NO: 1342826
aauuacguacugaucauuu

SEQ ID NO: 1342828 - RNA, 19 nt, Artificial Sequence
  Description of Artificial Sequence: Synthetic oligonucleotide
  Sense strand starting at position 2581 of SEQ ID NO: 1242376
uaaagaggucuuuguaguc

SEQ ID NO: 1342829 - RNA, 19 nt, Artificial Sequence
  Description of Artificial Sequence: Synthetic oligonucleotide
  Antisense strand to SEQ ID NO: 1342828
gacuacaaagaccucuuua

SEQ ID NO: 1342830 - RNA, 19 nt, Artificial Sequence
  Description of Artificial Sequence: Synthetic oligonucleotide
  Sense strand starting at position 2587 of SEQ ID NO: 1242376
ggucuuuguagucauacac

SEQ ID NO: 1342831 - RNA, 19 nt, Artificial Sequence
  Description of Artificial Sequence: Synthetic oligonucleotide
  Antisense strand to SEQ ID NO: 1342830
guguaugacuacaaagacc

SEQ ID NO: 1342832 - RNA, 19 nt, Artificial Sequence
  Description of Artificial Sequence: Synthetic oligonucleotide
  Sense strand starting at position 2845 of SEQ ID NO: 1242376
guacacaaaugguugcaua

SEQ ID NO: 1342833 - RNA, 19 nt, Artificial Sequence
  Description of Artificial Sequence: Synthetic oligonucleotide
  Antisense strand to SEQ ID NO: 1342832
uaugcaaccauuuguguac

SEQ ID NO: 1342834 - RNA, 19 nt, Artificial Sequence
  Description of Artificial Sequence: Synthetic oligonucleotide
  Sense strand starting at position 3173 of SEQ ID NO: 1242376
acuagcugugaugaugauu

SEQ ID NO: 1342835 - RNA, 19 nt, Artificial Sequence
  Description of Artificial Sequence: Synthetic oligonucleotide
  Antisense strand to SEQ ID NO: 1342834
aaucaucaucacagcuagu

SEQ ID NO: 1342836 - RNA, 19 nt, Artificial Sequence
  Description of Artificial Sequence: Synthetic oligonucleotide
  Sense strand starting at position 3176 of SEQ ID NO: 1242376
agcugugaugaugauuaua

SEQ ID NO: 1342837 - RNA, 19 nt, Artificial Sequence
  Description of Artificial Sequence: Synthetic oligonucleotide
  Antisense strand to SEQ ID NO: 1342836
uauaaucaucaucacagcu

SEQ ID NO: 1342838 - RNA, 19 nt, Artificial Sequence
  Description of Artificial Sequence: Synthetic oligonucleotide
  Sense strand starting at position 3178 of SEQ ID NO: 1242376
cugugaugaugauuauaau

SEQ ID NO: 1342839 - RNA, 19 nt, Artificial Sequence
  Description of Artificial Sequence: Synthetic oligonucleotide
  Antisense strand to SEQ ID NO: 1342838
auuauaaucaucaucacag

SEQ ID NO: 1342840 - RNA, 19 nt, Artificial Sequence
  Description of Artificial Sequence: Synthetic oligonucleotide
  Sense strand starting at position 3287 of SEQ ID NO: 1242376
agaguagaauaagacuaaa

SEQ ID NO: 1342841 - RNA, 19 nt, Artificial Sequence
  Description of Artificial Sequence: Synthetic oligonucleotide
  Antisense strand to SEQ ID NO: 1342840
uuuagucuuauucuacucu

SEQ ID NO: 1342842 - RNA, 19 nt, Artificial Sequence
  Description of Artificial Sequence: Synthetic oligonucleotide
  Sense strand starting at position 3318 of SEQ ID NO: 1242376
uaggguuauccaggcaaau

SEQ ID NO: 1342843 - RNA, 19 nt, Artificial Sequence
  Description of Artificial Sequence: Synthetic oligonucleotide
  Antisense strand to SEQ ID NO: 1342842
auuugccuggauaacccua

SEQ ID NO: 1342844 - RNA, 19 nt, Artificial Sequence
  Description of Artificial Sequence: Synthetic oligonucleotide
  Sense strand starting at position 3529 of SEQ ID NO: 1242376
gugacauguucaguuuagg

SEQ ID NO: 1342845 - RNA, 19 nt, Artificial Sequence
  Description of Artificial Sequence: Synthetic oligonucleotide
  Antisense strand to SEQ ID NO: 1342844
ccuaaacugaacaugucac

SEQ ID NO: 1342846 - RNA, 19 nt, Artificial Sequence
  Description of Artificial Sequence: Synthetic oligonucleotide
  Sense strand starting at position 3555 of SEQ ID NO: 1242376
aguucugucagauguagau

SEQ ID NO: 1342847 - RNA, 19 nt, Artificial Sequence
  Description of Artificial Sequence: Synthetic oligonucleotide
  Antisense strand to SEQ ID NO: 1342846
aucuacaucugacagaacu

SEQ ID NO: 1342848 - RNA, 19 nt, Artificial Sequence
  Description of Artificial Sequence: Synthetic oligonucleotide
  Sense strand starting at position 3557 of SEQ ID NO: 1242376
uucugucagauguagauga

SEQ ID NO: 1342849 - RNA, 19 nt, Artificial Sequence
  Description of Artificial Sequence: Synthetic oligonucleotide
  Antisense strand to SEQ ID NO: 1342848
ucaucuacaucugacagaa

SEQ ID NO: 1342850 - RNA, 19 nt, Artificial Sequence
  Description of Artificial Sequence: Synthetic oligonucleotide
  Sense strand starting at position 3561 of SEQ ID NO: 1242376
gucagauguagaugaccau

SEQ ID NO: 1342851 - RNA, 19 nt, Artificial Sequence
  Description of Artificial Sequence: Synthetic oligonucleotide
  Antisense strand to SEQ ID NO: 1342850
auggucaucuacaucugac

SEQ ID NO: 1342852 - RNA, 19 nt, Artificial Sequence
  Description of Artificial Sequence: Synthetic oligonucleotide
  Sense strand starting at position 3568 of SEQ ID NO: 1242376
guagaugaccauuaggcau

SEQ ID NO: 1342853 - RNA, 19 nt, Artificial Sequence
  Description of Artificial Sequence: Synthetic oligonucleotide
  Antisense strand to SEQ ID NO: 1342852
augccuaauggucaucuac

SEQ ID NO: 1342854 - RNA, 19 nt, Artificial Sequence
  Description of Artificial Sequence: Synthetic oligonucleotide
  Sense strand starting at position 3740 of SEQ ID NO: 1242376
augauuaagugccuuuaaa

SEQ ID NO: 1342855 - RNA, 19 nt, Artificial Sequence
  Description of Artificial Sequence: Synthetic oligonucleotide
  Antisense strand to SEQ ID NO: 1342854
uuuaaaggcacuuaaucau

SEQ ID NO: 1342856 - RNA, 19 nt, Artificial Sequence
  Description of Artificial Sequence: Synthetic oligonucleotide
  Sense strand starting at position 3775 of SEQ ID NO: 1242376
aagcauuaacagugagauu

SEQ ID NO: 1342857 - RNA, 19 nt, Artificial Sequence
  Description of Artificial Sequence: Synthetic oligonucleotide
  Antisense strand to SEQ ID NO: 1342856
aaucucacuguuaaugcuu

SEQ ID NO: 1342858 - RNA, 19 nt, Artificial Sequence
  Description of Artificial Sequence: Synthetic oligonucleotide
  Sense strand starting at position 3843 of SEQ ID NO: 1242376
aguaguauauaguuccuga

SEQ ID NO: 1342859 - RNA, 19 nt, Artificial Sequence
  Description of Artificial Sequence: Synthetic oligonucleotide
  Antisense strand to SEQ ID NO: 1342858
ucaggaacuauauacuacu

SEQ ID NO: 1342860 - RNA, 19 nt, Artificial Sequence
  Description of Artificial Sequence: Synthetic oligonucleotide
  Sense strand starting at position 3851 of SEQ ID NO: 1242376
auaguuccugagggaaauu

SEQ ID NO: 1342861 - RNA, 19 nt, Artificial Sequence
  Description of Artificial Sequence: Synthetic oligonucleotide
  Antisense strand to SEQ ID NO: 1342860
aauuucccucaggaacuau

SEQ ID NO: 1342862 - RNA, 19 nt, Artificial Sequence
  Description of Artificial Sequence: Synthetic oligonucleotide
  Sense strand starting at position 3904 of SEQ ID NO: 1242376
auagaaguuagcgauauaa

SEQ ID NO: 1342863 - RNA, 19 nt, Artificial Sequence
  Description of Artificial Sequence: Synthetic oligonucleotide
  Antisense strand to SEQ ID NO: 1342862
uuauaucgcuaacuucuau

SEQ ID NO: 1342864 - RNA, 19 nt, Artificial Sequence
  Description of Artificial Sequence: Synthetic oligonucleotide
  Sense strand starting at position 3906 of SEQ ID NO: 1242376
agaaguuagcgauauaaac

SEQ ID NO: 1342865 - RNA, 19 nt, Artificial Sequence
  Description of Artificial Sequence: Synthetic oligonucleotide
  Antisense strand to SEQ ID NO: 1342864
guuuauaucgcuaacuucu

SEQ ID NO: 1342866 - RNA, 19 nt, Artificial Sequence
  Description of Artificial Sequence: Synthetic oligonucleotide
  Sense strand starting at position 3944 of SEQ ID NO: 1242376
uggauuauacuauguggaa

SEQ ID NO: 1342867 - RNA, 19 nt, Artificial Sequence
  Description of Artificial Sequence: Synthetic oligonucleotide
  Antisense strand to SEQ ID NO: 1342866
uuccacauaguauaaucca

SEQ ID NO: 1342868 - RNA, 19 nt, Artificial Sequence
  Description of Artificial Sequence: Synthetic oligonucleotide
  Sense strand starting at position 3983 of SEQ ID NO: 1242376
cagagaaauguaggagguu

SEQ ID NO: 1342869 - RNA, 19 nt, Artificial Sequence
  Description of Artificial Sequence: Synthetic oligonucleotide
  Antisense strand to SEQ ID NO: 1342868
aaccuccuacauuucucug

SEQ ID NO: 1342870 - RNA, 19 nt, Artificial Sequence
  Description of Artificial Sequence: Synthetic oligonucleotide
  Sense strand starting at position 17 of SEQ ID NO: 1242377
ccaagugaauucuuuguuu

SEQ ID NO: 1342871 - RNA, 19 nt, Artificial Sequence
  Description of Artificial Sequence: Synthetic oligonucleotide
  Antisense strand to SEQ ID NO: 1342870
aaacaaagaauucacuugg

SEQ ID NO: 1342872 - RNA, 19 nt, Artificial Sequence
  Description of Artificial Sequence: Synthetic oligonucleotide
  Sense strand starting at position 22 of SEQ ID NO: 1242377
ugaauucuuuguuuaaagg

SEQ ID NO: 1342873 - RNA, 19 nt, Artificial Sequence
  Description of Artificial Sequence: Synthetic oligonucleotide
  Antisense strand to SEQ ID NO: 1342872
ccuuuaaacaaagaauuca

SEQ ID NO: 1342874 - RNA, 19 nt, Artificial Sequence
  Description of Artificial Sequence: Synthetic oligonucleotide
  Sense strand starting at position 154 of SEQ ID NO: 1242377
aggcacuguauguaguaau

SEQ ID NO: 1342875 - RNA, 19 nt, Artificial Sequence
  Description of Artificial Sequence: Synthetic oligonucleotide
  Antisense strand to SEQ ID NO: 1342874
auuacuacauacagugccu

SEQ ID NO: 1342876 - RNA, 19 nt, Artificial Sequence
  Description of Artificial Sequence: Synthetic oligonucleotide
  Sense strand starting at position 164 of SEQ ID NO: 1242377
uguaguaaucucuaugaga

SEQ ID NO: 1342877 - RNA, 19 nt, Artificial Sequence
  Description of Artificial Sequence: Synthetic oligonucleotide
  Antisense strand to SEQ ID NO: 1342876
ucucauagagauuacuaca

SEQ ID NO: 1342878 - RNA, 19 nt, Artificial Sequence
  Description of Artificial Sequence: Synthetic oligonucleotide
  Sense strand starting at position 166 of SEQ ID NO: 1242377
uaguaaucucuaugagagu

SEQ ID NO: 1342879 - RNA, 19 nt, Artificial Sequence
  Description of Artificial Sequence: Synthetic oligonucleotide
  Antisense strand to SEQ ID NO: 1342878
acucucauagagauuacua

SEQ ID NO: 1342880 - RNA, 19 nt, Artificial Sequence
  Description of Artificial Sequence: Synthetic oligonucleotide
  Sense strand starting at position 298 of SEQ ID NO: 1242377
agcuuuaaggcuggagaca

SEQ ID NO: 1342881 - RNA, 19 nt, Artificial Sequence
  Description of Artificial Sequence: Synthetic oligonucleotide
  Antisense strand to SEQ ID NO: 1342880
ugucuccagccuuaaagcu

SEQ ID NO: 1342882 - RNA, 19 nt, Artificial Sequence
  Description of Artificial Sequence: Synthetic oligonucleotide
  Sense strand starting at position 299 of SEQ ID NO: 1242377
gcuuuaaggcuggagacaa

SEQ ID NO: 1342883 - RNA, 19 nt, Artificial Sequence
  Description of Artificial Sequence: Synthetic oligonucleotide
  Antisense strand to SEQ ID NO: 1342882
uugucuccagccuuaaagc

SEQ ID NO: 1342884 - RNA, 19 nt, Artificial Sequence
  Description of Artificial Sequence: Synthetic oligonucleotide
  Sense strand starting at position 365 of SEQ ID NO: 1242377
guaacuaauuuggaccuga

SEQ ID NO: 1342885 - RNA, 19 nt, Artificial Sequence
  Description of Artificial Sequence: Synthetic oligonucleotide
  Antisense strand to SEQ ID NO: 1342884
ucagguccaaauuaguuac

SEQ ID NO: 1342886 - RNA, 19 nt, Artificial Sequence
  Description of Artificial Sequence: Synthetic oligonucleotide
  Sense strand starting at position 393 of SEQ ID NO: 1242377
aggaaugaacagugcugaa

SEQ ID NO: 1342887 - RNA, 19 nt, Artificial Sequence
  Description of Artificial Sequence: Synthetic oligonucleotide
  Antisense strand to SEQ ID NO: 1342886
uucagcacuguucauuccu

SEQ ID NO: 1342888 - RNA, 19 nt, Artificial Sequence
  Description of Artificial Sequence: Synthetic oligonucleotide
  Sense strand starting at position 507 of SEQ ID NO: 1242377
guaguuaaaugaccuccau

SEQ ID NO: 1342889 - RNA, 19 nt, Artificial Sequence
  Description of Artificial Sequence: Synthetic oligonucleotide
  Antisense strand to SEQ ID NO: 1342888
auggaggucauuuaacuac

SEQ ID NO: 1342890 - RNA, 19 nt, Artificial Sequence
  Description of Artificial Sequence: Synthetic oligonucleotide
  Sense strand starting at position 877 of SEQ ID NO: 1242377
cuaguuuagugagucucaa

SEQ ID NO: 1342891 - RNA, 19 nt, Artificial Sequence
  Description of Artificial Sequence: Synthetic oligonucleotide
  Antisense strand to SEQ ID NO: 1342890
uugagacucacuaaacuag

SEQ ID NO: 1342892 - RNA, 19 nt, Artificial Sequence
  Description of Artificial Sequence: Synthetic oligonucleotide
  Sense strand starting at position 1045 of SEQ ID NO: 1242377
uuccacuagugaucuugau

SEQ ID NO: 1342893 - RNA, 19 nt, Artificial Sequence
  Description of Artificial Sequence: Synthetic oligonucleotide
  Antisense strand to SEQ ID NO: 1342892
aucaagaucacuaguggaa

SEQ ID NO: 1342894 - RNA, 19 nt, Artificial Sequence
  Description of Artificial Sequence: Synthetic oligonucleotide
  Sense strand starting at position 1049 of SEQ ID NO: 1242377
acuagugaucuugaucuua

SEQ ID NO: 1342895 - RNA, 19 nt, Artificial Sequence
  Description of Artificial Sequence: Synthetic oligonucleotide
  Antisense strand to SEQ ID NO: 1342894
uaagaucaagaucacuagu

SEQ ID NO: 1342896 - RNA, 19 nt, Artificial Sequence
  Description of Artificial Sequence: Synthetic oligonucleotide
  Sense strand starting at position 1189 of SEQ ID NO: 1242377
uuauaacgaugcuucuuua

SEQ ID NO: 1342897 - RNA, 19 nt, Artificial Sequence
  Description of Artificial Sequence: Synthetic oligonucleotide
  Antisense strand to SEQ ID NO: 1342896
uaaagaagcaucguuauaa

SEQ ID NO: 1342898 - RNA, 19 nt, Artificial Sequence
  Description of Artificial Sequence: Synthetic oligonucleotide
  Sense strand starting at position 1226 of SEQ ID NO: 1242377
uacgguuuccaucagguuu

SEQ ID NO: 1342899 - RNA, 19 nt, Artificial Sequence
  Description of Artificial Sequence: Synthetic oligonucleotide
  Antisense strand to SEQ ID NO: 1342898
aaaccugauggaaaccgua

SEQ ID NO: 1342900 - RNA, 19 nt, Artificial Sequence
  Description of Artificial Sequence: Synthetic oligonucleotide
  Sense strand starting at position 1318 of SEQ ID NO: 1242377
uuucguauuucuuugacca

SEQ ID NO: 1342901 - RNA, 19 nt, Artificial Sequence
  Description of Artificial Sequence: Synthetic oligonucleotide
  Antisense strand to SEQ ID NO: 1342900
uggucaaagaaauacgaaa

SEQ ID NO: 1342902 - RNA, 19 nt, Artificial Sequence
  Description of Artificial Sequence: Synthetic oligonucleotide
  Sense strand starting at position 1319 of SEQ ID NO: 1242377
uucguauuucuuugaccag

SEQ ID NO: 1342903 - RNA, 19 nt, Artificial Sequence
  Description of Artificial Sequence: Synthetic oligonucleotide
  Antisense strand to SEQ ID NO: 1342902
cuggucaaagaaauacgaa

SEQ ID NO: 1342904 - RNA, 19 nt, Artificial Sequence
  Description of Artificial Sequence: Synthetic oligonucleotide
  Sense strand starting at position 1453 of SEQ ID NO: 1242377
gacagcaucccgugcauuu

SEQ ID NO: 1342905 - RNA, 19 nt, Artificial Sequence
  Description of Artificial Sequence: Synthetic oligonucleotide
  Antisense strand to SEQ ID NO: 1342904
aaaugcacgggaugcuguc

SEQ ID NO: 1342906 - RNA, 19 nt, Artificial Sequence
  Description of Artificial Sequence: Synthetic oligonucleotide
  Sense strand starting at position 1671 of SEQ ID NO: 1242377
gagagcgugcguguuugaa

SEQ ID NO: 1342907 - RNA, 19 nt, Artificial Sequence
  Description of Artificial Sequence: Synthetic oligonucleotide
  Antisense strand to SEQ ID NO: 1342906
uucaaacacgcacgcucuc

SEQ ID NO: 1342908 - RNA, 19 nt, Artificial Sequence
  Description of Artificial Sequence: Synthetic oligonucleotide
  Sense strand starting at position 1672 of SEQ ID NO: 1242377
agagcgugcguguuugaaa

SEQ ID NO: 1342909 - RNA, 19 nt, Artificial Sequence
  Description of Artificial Sequence: Synthetic oligonucleotide
  Antisense strand to SEQ ID NO: 1342908
uuucaaacacgcacgcucu

SEQ ID NO: 1342910 - RNA, 19 nt, Artificial Sequence
  Description of Artificial Sequence: Synthetic oligonucleotide
  Sense strand starting at position 2887 of SEQ ID NO: 1242377
cucagagucccuuaggacu

SEQ ID NO: 1342911 - RNA, 19 nt, Artificial Sequence
  Description of Artificial Sequence: Synthetic oligonucleotide
  Antisense strand to SEQ ID NO: 1342910
aguccuaagggacucugag

SEQ ID NO: 1342912 - RNA, 19 nt, Artificial Sequence
  Description of Artificial Sequence: Synthetic oligonucleotide
  Sense strand starting at position 2913 of SEQ ID NO: 1242377
gagcuucuagacuacguua

SEQ ID NO: 1342913 - RNA, 19 nt, Artificial Sequence
  Description of Artificial Sequence: Synthetic oligonucleotide
  Antisense strand to SEQ ID NO: 1342912
uaacguagucuagaagcuc

SEQ ID NO: 1342914 - RNA, 19 nt, Artificial Sequence
  Description of Artificial Sequence: Synthetic oligonucleotide
  Sense strand starting at position 2916 of SEQ ID NO: 1242377
cuucuagacuacguuacau

SEQ ID NO: 1342915 - RNA, 19 nt, Artificial Sequence
  Description of Artificial Sequence: Synthetic oligonucleotide
  Antisense strand to SEQ ID NO: 1342914
auguaacguagucuagaag

SEQ ID NO: 1342916 - RNA, 19 nt, Artificial Sequence
  Description of Artificial Sequence: Synthetic oligonucleotide
  Sense strand starting at position 2944 of SEQ ID NO: 1242377
ggcugacgugauuacaguu

SEQ ID NO: 1342917 - RNA, 19 nt, Artificial Sequence
  Description of Artificial Sequence: Synthetic oligonucleotide
  Antisense strand to SEQ ID NO: 1342916
aacuguaaucacgucagcc

SEQ ID NO: 1342918 - RNA, 19 nt, Artificial Sequence
  Description of Artificial Sequence: Synthetic oligonucleotide
  Sense strand starting at position 2952 of SEQ ID NO: 1242377
ugauuacaguucucaggca

SEQ ID NO: 1342919 - RNA, 19 nt, Artificial Sequence
  Description of Artificial Sequence: Synthetic oligonucleotide
  Antisense strand to SEQ ID NO: 1342918
ugccugagaacuguaauca

SEQ ID NO: 1342920 - RNA, 19 nt, Artificial Sequence
  Description of Artificial Sequence: Synthetic oligonucleotide
  Sense strand starting at position 3105 of SEQ ID NO: 1242377
cgcugucaugguguucuua

SEQ ID NO: 1342921 - RNA, 19 nt, Artificial Sequence
  Description of Artificial Sequence: Synthetic oligonucleotide
  Antisense strand to SEQ ID NO: 1342920
uaagaacaccaugacagcg

SEQ ID NO: 1342922 - RNA, 19 nt, Artificial Sequence
  Description of Artificial Sequence: Synthetic oligonucleotide
  Sense strand starting at position 3119 of SEQ ID NO: 1242377
ucuuacucccgguagaugu

SEQ ID NO: 1342923 - RNA, 19 nt, Artificial Sequence
  Description of Artificial Sequence: Synthetic oligonucleotide
  Antisense strand to SEQ ID NO: 1342922
acaucuaccgggaguaaga

SEQ ID NO: 1342924 - RNA, 19 nt, Artificial Sequence
  Description of Artificial Sequence: Synthetic oligonucleotide
  Sense strand starting at position 3490 of SEQ ID NO: 1242377
gagguuguccagcacugau

SEQ ID NO: 1342925 - RNA, 19 nt, Artificial Sequence
  Description of Artificial Sequence: Synthetic oligonucleotide
  Antisense strand to SEQ ID NO: 1342924
aucagugcuggacaaccuc

SEQ ID NO: 1342926 - RNA, 19 nt, Artificial Sequence
  Description of Artificial Sequence: Synthetic oligonucleotide
  Sense strand starting at position 3540 of SEQ ID NO: 1242377
guugcacuaguggauauaa

SEQ ID NO: 1342927 - RNA, 19 nt, Artificial Sequence
  Description of Artificial Sequence: Synthetic oligonucleotide
  Antisense strand to SEQ ID NO: 1342926
uuauauccacuagugcaac

SEQ ID NO: 1342928 - RNA, 19 nt, Artificial Sequence
  Description of Artificial Sequence: Synthetic oligonucleotide
  Sense strand starting at position 3542 of SEQ ID NO: 1242377
ugcacuaguggauauaacu

SEQ ID NO: 1342929 - RNA, 19 nt, Artificial Sequence
  Description of Artificial Sequence: Synthetic oligonucleotide
  Antisense strand to SEQ ID NO: 1342928
aguuauauccacuagugca

SEQ ID NO: 1342930 - RNA, 19 nt, Artificial Sequence
  Description of Artificial Sequence: Synthetic oligonucleotide
  Sense strand starting at position 3551 of SEQ ID NO: 1242377
ggauauaacuaugucgucu

SEQ ID NO: 1342931 - RNA, 19 nt, Artificial Sequence
  Description of Artificial Sequence: Synthetic oligonucleotide
  Antisense strand to SEQ ID NO: 1342930
agacgacauaguuauaucc

SEQ ID NO: 1342932 - RNA, 19 nt, Artificial Sequence
  Description of Artificial Sequence: Synthetic oligonucleotide
  Sense strand starting at position 3559 of SEQ ID NO: 1242377
cuaugucgucuuguaguau

SEQ ID NO: 1342933 - RNA, 19 nt, Artificial Sequence
  Description of Artificial Sequence: Synthetic oligonucleotide
  Antisense strand to SEQ ID NO: 1342932
auacuacaagacgacauag

SEQ ID NO: 1342934 - RNA, 19 nt, Artificial Sequence
  Description of Artificial Sequence: Synthetic oligonucleotide
  Sense strand starting at position 3593 of SEQ ID NO: 1242377
ucgauugcugcagauacua

SEQ ID NO: 1342935 - RNA, 19 nt, Artificial Sequence
  Description of Artificial Sequence: Synthetic oligonucleotide
  Antisense strand to SEQ ID NO: 1342934
uaguaucugcagcaaucga

SEQ ID NO: 1342936 - RNA, 19 nt, Artificial Sequence
  Description of Artificial Sequence: Synthetic oligonucleotide
  Sense strand starting at position 3772 of SEQ ID NO: 1242377
uugcuucuccaagaagcaa

SEQ ID NO: 1342937 - RNA, 19 nt, Artificial Sequence
  Description of Artificial Sequence: Synthetic oligonucleotide
  Antisense strand to SEQ ID NO: 1342936
uugcuucuuggagaagcaa

SEQ ID NO: 1342938 - RNA, 19 nt, Artificial Sequence
  Description of Artificial Sequence: Synthetic oligonucleotide
  Sense strand starting at position 3919 of SEQ ID NO: 1242377
aucaaaugaucaguacgua

SEQ ID NO: 1342939 - RNA, 19 nt, Artificial Sequence
  Description of Artificial Sequence: Synthetic oligonucleotide
  Antisense strand to SEQ ID NO: 1342938
uacguacugaucauuugau

SEQ ID NO: 1342940 - RNA, 19 nt, Artificial Sequence
  Description of Artificial Sequence: Synthetic oligonucleotide
  Sense strand starting at position 3920 of SEQ ID NO: 1242377
ucaaaugaucaguacguaa

SEQ ID NO: 1342941 - RNA, 19 nt, Artificial Sequence
  Description of Artificial Sequence: Synthetic oligonucleotide
  Antisense strand to SEQ ID NO: 1342940
uuacguacugaucauuuga

SEQ ID NO: 1342942 - RNA, 19 nt, Artificial Sequence
  Description of Artificial Sequence: Synthetic oligonucleotide
  Sense strand starting at position 3922 of SEQ ID NO: 1242377
aaaugaucaguacguaauu

SEQ ID NO: 1342943 - RNA, 19 nt, Artificial Sequence
  Description of Artificial Sequence: Synthetic oligonucleotide
  Antisense strand to SEQ ID NO: 1342942
aauuacguacugaucauuu

SEQ ID NO: 1342944 - RNA, 19 nt, Artificial Sequence
  Description of Artificial Sequence: Synthetic oligonucleotide
  Sense strand starting at position 3966 of SEQ ID NO: 1242377
uaaagaggucuuuguaguc

SEQ ID NO: 1342945 - RNA, 19 nt, Artificial Sequence
  Description of Artificial Sequence: Synthetic oligonucleotide
  Antisense strand to SEQ ID NO: 1342944
gacuacaaagaccucuuua

SEQ ID NO: 1342946 - RNA, 19 nt, Artificial Sequence
  Description of Artificial Sequence: Synthetic oligonucleotide
  Sense strand starting at position 3971 of SEQ ID NO: 1242377
aggucuuuguagucauaca

SEQ ID NO: 1342947 - RNA, 19 nt, Artificial Sequence
  Description of Artificial Sequence: Synthetic oligonucleotide
  Antisense strand to SEQ ID NO: 1342946
uguaugacuacaaagaccu

SEQ ID NO: 1342948 - RNA, 19 nt, Artificial Sequence
  Description of Artificial Sequence: Synthetic oligonucleotide
  Sense strand starting at position 3972 of SEQ ID NO: 1242377
ggucuuuguagucauacac

SEQ ID NO: 1342949 - RNA, 19 nt, Artificial Sequence
  Description of Artificial Sequence: Synthetic oligonucleotide
  Antisense strand to SEQ ID NO: 1342948
guguaugacuacaaagacc

SEQ ID NO: 1342950 - RNA, 19 nt, Artificial Sequence
  Description of Artificial Sequence: Synthetic oligonucleotide
  Sense strand starting at position 339 of SEQ ID NO: 1242378
ucagaagucuggugacaca

SEQ ID NO: 1342951 - RNA, 19 nt, Artificial Sequence
  Description of Artificial Sequence: Synthetic oligonucleotide
  Antisense strand to SEQ ID NO: 1342950
ugugucaccagacuucuga

SEQ ID NO: 1342952 - RNA, 19 nt, Artificial Sequence
  Description of Artificial Sequence: Synthetic oligonucleotide
  Sense strand starting at position 363 of SEQ ID NO: 1242378
aagggucucuauucuguau

SEQ ID NO: 1342953 - RNA, 19 nt, Artificial Sequence
  Description of Artificial Sequence: Synthetic oligonucleotide
  Antisense strand to SEQ ID NO: 1342952
auacagaauagagacccuu

SEQ ID NO: 1342954 - RNA, 19 nt, Artificial Sequence
  Description of Artificial Sequence: Synthetic oligonucleotide
  Sense strand starting at position 366 of SEQ ID NO: 1242378
ggucucuauucuguauuga

SEQ ID NO: 1342955 - RNA, 19 nt, Artificial Sequence
  Description of Artificial Sequence: Synthetic oligonucleotide
  Antisense strand to SEQ ID NO: 1342954
ucaauacagaauagagacc

SEQ ID NO: 1342956 - RNA, 19 nt, Artificial Sequence
  Description of Artificial Sequence: Synthetic oligonucleotide
  Sense strand starting at position 367 of SEQ ID NO: 1242378
gucucuauucuguauugag

SEQ ID NO: 1342957 - RNA, 19 nt, Artificial Sequence
  Description of Artificial Sequence: Synthetic oligonucleotide
  Antisense strand to SEQ ID NO: 1342956
cucaauacagaauagagac

SEQ ID NO: 1342958 - RNA, 19 nt, Artificial Sequence
  Description of Artificial Sequence: Synthetic oligonucleotide
  Sense strand starting at position 476 of SEQ ID NO: 1242378
acaacuguauuugaaaugu

SEQ ID NO: 1342959 - RNA, 19 nt, Artificial Sequence
  Description of Artificial Sequence: Synthetic oligonucleotide
  Antisense strand to SEQ ID NO: 1342958
acauuucaaauacaguugu

SEQ ID NO: 1342960 - RNA, 19 nt, Artificial Sequence
  Description of Artificial Sequence: Synthetic oligonucleotide
  Sense strand starting at position 570 of SEQ ID NO: 1242378
cguccuuuccuguaaggcu

SEQ ID NO: 1342961 - RNA, 19 nt, Artificial Sequence
  Description of Artificial Sequence: Synthetic oligonucleotide
  Antisense strand to SEQ ID NO: 1342960
agccuuacaggaaaggacg

SEQ ID NO: 1342962 - RNA, 19 nt, Artificial Sequence
  Description of Artificial Sequence: Synthetic oligonucleotide
  Sense strand starting at position 578 of SEQ ID NO: 1242378
ccuguaaggcugugagcua

SEQ ID NO: 1342963 - RNA, 19 nt, Artificial Sequence
  Description of Artificial Sequence: Synthetic oligonucleotide
  Antisense strand to SEQ ID NO: 1342962
uagcucacagccuuacagg

SEQ ID NO: 1342964 - RNA, 19 nt, Artificial Sequence
  Description of Artificial Sequence: Synthetic oligonucleotide
  Sense strand starting at position 579 of SEQ ID NO: 1242378
cuguaaggcugugagcuaa

SEQ ID NO: 1342965 - RNA, 19 nt, Artificial Sequence
  Description of Artificial Sequence: Synthetic oligonucleotide
  Antisense strand to SEQ ID NO: 1342964
uuagcucacagccuuacag

SEQ ID NO: 1342966 - RNA, 19 nt, Artificial Sequence
  Description of Artificial Sequence: Synthetic oligonucleotide
  Sense strand starting at position 858 of SEQ ID NO: 1242378
cugguuaccgccuaaggaa

SEQ ID NO: 1342967 - RNA, 19 nt, Artificial Sequence
  Description of Artificial Sequence: Synthetic oligonucleotide
  Antisense strand to SEQ ID NO: 1342966
uuccuuaggcgguaaccag

SEQ ID NO: 1342968 - RNA, 19 nt, Artificial Sequence
  Description of Artificial Sequence: Synthetic oligonucleotide
  Sense strand starting at position 2083 of SEQ ID NO: 1242378
gcagcaacaucugguauuu

SEQ ID NO: 1342969 - RNA, 19 nt, Artificial Sequence
  Description of Artificial Sequence: Synthetic oligonucleotide
  Antisense strand to SEQ ID NO: 1342968
aaauaccagauguugcugc

SEQ ID NO: 1342970 - RNA, 19 nt, Artificial Sequence
  Description of Artificial Sequence: Synthetic oligonucleotide
  Sense strand starting at position 2199 of SEQ ID NO: 1242378
uuggaucaguggcugagau

SEQ ID NO: 1342971 - RNA, 19 nt, Artificial Sequence
  Description of Artificial Sequence: Synthetic oligonucleotide
  Antisense strand to SEQ ID NO: 1342970
aucucagccacugauccaa

SEQ ID NO: 1342972 - RNA, 19 nt, Artificial Sequence
  Description of Artificial Sequence: Synthetic oligonucleotide
  Sense strand starting at position 2200 of SEQ ID NO: 1242378
uggaucaguggcugagauu

SEQ ID NO: 1342973 - RNA, 19 nt, Artificial Sequence
  Description of Artificial Sequence: Synthetic oligonucleotide
  Antisense strand to SEQ ID NO: 1342972
aaucucagccacugaucca

SEQ ID NO: 1342974 - RNA, 19 nt, Artificial Sequence
  Description of Artificial Sequence: Synthetic oligonucleotide
  Sense strand starting at position 2201 of SEQ ID NO: 1242378
ggaucaguggcugagauua

SEQ ID NO: 1342975 - RNA, 19 nt, Artificial Sequence
  Description of Artificial Sequence: Synthetic oligonucleotide
  Antisense strand to SEQ ID NO: 1342974
uaaucucagccacugaucc

SEQ ID NO: 1342976 - RNA, 19 nt, Artificial Sequence
  Description of Artificial Sequence: Synthetic oligonucleotide
  Sense strand starting at position 2203 of SEQ ID NO: 1242378
aucaguggcugagauuaga

SEQ ID NO: 1342977 - RNA, 19 nt, Artificial Sequence
  Description of Artificial Sequence: Synthetic oligonucleotide
  Antisense strand to SEQ ID NO: 1342976
ucuaaucucagccacugau

SEQ ID NO: 1342978 - RNA, 19 nt, Artificial Sequence
  Description of Artificial Sequence: Synthetic oligonucleotide
  Sense strand starting at position 2665 of SEQ ID NO: 1242378
uggcgugaacccgguagau

SEQ ID NO: 1342979 - RNA, 19 nt, Artificial Sequence
  Description of Artificial Sequence: Synthetic oligonucleotide
  Antisense strand to SEQ ID NO: 1342978
aucuaccggguucacgcca

SEQ ID NO: 1342980 - RNA, 19 nt, Artificial Sequence
  Description of Artificial Sequence: Synthetic oligonucleotide
  Sense strand starting at position 2966 of SEQ ID NO: 1242378
gccggagaaccgugugaac

SEQ ID NO: 1342981 - RNA, 19 nt, Artificial Sequence
  Description of Artificial Sequence: Synthetic oligonucleotide
  Antisense strand to SEQ ID NO: 1342980
guucacacgguucuccggc

SEQ ID NO: 1342982 - RNA, 19 nt, Artificial Sequence
  Description of Artificial Sequence: Synthetic oligonucleotide
  Sense strand starting at position 3359 of SEQ ID NO: 1242378
gccacaauuggguauaucu

SEQ ID NO: 1342983 - RNA, 19 nt, Artificial Sequence
  Description of Artificial Sequence: Synthetic oligonucleotide
  Antisense strand to SEQ ID NO: 1342982
agauauacccaauuguggc

SEQ ID NO: 1342984 - RNA, 19 nt, Artificial Sequence
  Description of Artificial Sequence: Synthetic oligonucleotide
  Sense strand starting at position 3366 of SEQ ID NO: 1242378
uuggguauaucuugaugag

SEQ ID NO: 1342985 - RNA, 19 nt, Artificial Sequence
  Description of Artificial Sequence: Synthetic oligonucleotide
  Antisense strand to SEQ ID NO: 1342984
cucaucaagauauacccaa

SEQ ID NO: 1342986 - RNA, 19 nt, Artificial Sequence
  Description of Artificial Sequence: Synthetic oligonucleotide
  Sense strand starting at position 3367 of SEQ ID NO: 1242378
uggguauaucuugaugagc

SEQ ID NO: 1342987 - RNA, 19 nt, Artificial Sequence
  Description of Artificial Sequence: Synthetic oligonucleotide
  Antisense strand to SEQ ID NO: 1342986
gcucaucaagauauaccca

SEQ ID NO: 1342988 - RNA, 19 nt, Artificial Sequence
  Description of Artificial Sequence: Synthetic oligonucleotide
  Sense strand starting at position 3369 of SEQ ID NO: 1242378
gguauaucuugaugagcac

SEQ ID NO: 1342989 - RNA, 19 nt, Artificial Sequence
  Description of Artificial Sequence: Synthetic oligonucleotide
  Antisense strand to SEQ ID NO: 1342988
gugcucaucaagauauacc

SEQ ID NO: 1342990 - RNA, 19 nt, Artificial Sequence
  Description of Artificial Sequence: Synthetic oligonucleotide
  Sense strand starting at position 3370 of SEQ ID NO: 1242378
guauaucuugaugagcaca

SEQ ID NO: 1342991 - RNA, 19 nt, Artificial Sequence
  Description of Artificial Sequence: Synthetic oligonucleotide
  Antisense strand to SEQ ID NO: 1342990
ugugcucaucaagauauac

SEQ ID NO: 1342992 - RNA, 19 nt, Artificial Sequence
  Description of Artificial Sequence: Synthetic oligonucleotide
  Sense strand starting at position 3375 of SEQ ID NO: 1242378
ucuugaugagcacagcaua

SEQ ID NO: 1342993 - RNA, 19 nt, Artificial Sequence
  Description of Artificial Sequence: Synthetic oligonucleotide
  Antisense strand to SEQ ID NO: 1342992
uaugcugugcucaucaaga

SEQ ID NO: 1342994 - RNA, 19 nt, Artificial Sequence
  Description of Artificial Sequence: Synthetic oligonucleotide
  Sense strand starting at position 3490 of SEQ ID NO: 1242378
guauuuauaugucugucua

SEQ ID NO: 1342995 - RNA, 19 nt, Artificial Sequence
  Description of Artificial Sequence: Synthetic oligonucleotide
  Antisense strand to SEQ ID NO: 1342994
uagacagacauauaaauac

SEQ ID NO: 1342996 - RNA, 19 nt, Artificial Sequence
  Description of Artificial Sequence: Synthetic oligonucleotide
  Sense strand starting at position 473 of SEQ ID NO: 1242379
ucagaagucuggugacaca

SEQ ID NO: 1342997 - RNA, 19 nt, Artificial Sequence
  Description of Artificial Sequence: Synthetic oligonucleotide
  Antisense strand to SEQ ID NO: 1342996
ugugucaccagacuucuga

SEQ ID NO: 1342998 - RNA, 19 nt, Artificial Sequence
  Description of Artificial Sequence: Synthetic oligonucleotide
  Sense strand starting at position 497 of SEQ ID NO: 1242379
aagggucucuauucuguau

SEQ ID NO: 1342999 - RNA, 19 nt, Artificial Sequence
  Description of Artificial Sequence: Synthetic oligonucleotide
  Antisense strand to SEQ ID NO: 1342998
auacagaauagagacccuu

SEQ ID NO: 1343000 - RNA, 19 nt, Artificial Sequence
  Description of Artificial Sequence: Synthetic oligonucleotide
  Sense strand starting at position 500 of SEQ ID NO: 1242379
ggucucuauucuguauuga

SEQ ID NO: 1343001 - RNA, 19 nt, Artificial Sequence
  Description of Artificial Sequence: Synthetic oligonucleotide
  Antisense strand to SEQ ID NO: 1343000
ucaauacagaauagagacc

SEQ ID NO: 1343002 - RNA, 19 nt, Artificial Sequence
  Description of Artificial Sequence: Synthetic oligonucleotide
  Sense strand starting at position 501 of SEQ ID NO: 1242379
gucucuauucuguauugag

SEQ ID NO: 1343003 - RNA, 19 nt, Artificial Sequence
  Description of Artificial Sequence: Synthetic oligonucleotide
  Antisense strand to SEQ ID NO: 1343002
cucaauacagaauagagac

SEQ ID NO: 1343004 - RNA, 19 nt, Artificial Sequence
  Description of Artificial Sequence: Synthetic oligonucleotide
  Sense strand starting at position 610 of SEQ ID NO: 1242379
acaacuguauuugaaaugu

SEQ ID NO: 1343005 - RNA, 19 nt, Artificial Sequence
  Description of Artificial Sequence: Synthetic oligonucleotide
  Antisense strand to SEQ ID NO: 1343004
acauuucaaauacaguugu

SEQ ID NO: 1343006 - RNA, 19 nt, Artificial Sequence
  Description of Artificial Sequence: Synthetic oligonucleotide
  Sense strand starting at position 704 of SEQ ID NO: 1242379
cguccuuuccuguaaggcu

SEQ ID NO: 1343007 - RNA, 19 nt, Artificial Sequence
  Description of Artificial Sequence: Synthetic oligonucleotide
  Antisense strand to SEQ ID NO: 1343006
agccuuacaggaaaggacg

SEQ ID NO: 1343008 - RNA, 19 nt, Artificial Sequence
  Description of Artificial Sequence: Synthetic oligonucleotide
  Sense strand starting at position 712 of SEQ ID NO: 1242379
ccuguaaggcugugagcua

SEQ ID NO: 1343009 - RNA, 19 nt, Artificial Sequence
  Description of Artificial Sequence: Synthetic oligonucleotide
  Antisense strand to SEQ ID NO: 1343008
uagcucacagccuuacagg

SEQ ID NO: 1343010 - RNA, 19 nt, Artificial Sequence
  Description of Artificial Sequence: Synthetic oligonucleotide
  Sense strand starting at position 713 of SEQ ID NO: 1242379
cuguaaggcugugagcuaa

SEQ ID NO: 1343011 - RNA, 19 nt, Artificial Sequence
  Description of Artificial Sequence: Synthetic oligonucleotide
  Antisense strand to SEQ ID NO: 1343010
uuagcucacagccuuacag

SEQ ID NO: 1343012 - RNA, 19 nt, Artificial Sequence
  Description of Artificial Sequence: Synthetic oligonucleotide
  Sense strand starting at position 992 of SEQ ID NO: 1242379
cugguuaccgccuaaggaa

SEQ ID NO: 1343013 - RNA, 19 nt, Artificial Sequence
  Description of Artificial Sequence: Synthetic oligonucleotide
  Antisense strand to SEQ ID NO: 1343012
uuccuuaggcgguaaccag

SEQ ID NO: 1343014 - RNA, 19 nt, Artificial Sequence
  Description of Artificial Sequence: Synthetic oligonucleotide
  Sense strand starting at position 2217 of SEQ ID NO: 1242379
gcagcaacaucugguauuu

SEQ ID NO: 1343015 - RNA, 19 nt, Artificial Sequence
  Description of Artificial Sequence: Synthetic oligonucleotide
  Antisense strand to SEQ ID NO: 1343014
aaauaccagauguugcugc

SEQ ID NO: 1343016 - RNA, 19 nt, Artificial Sequence
  Description of Artificial Sequence: Synthetic oligonucleotide
  Sense strand starting at position 2333 of SEQ ID NO: 1242379
uuggaucaguggcugagau

SEQ ID NO: 1343017 - RNA, 19 nt, Artificial Sequence
  Description of Artificial Sequence: Synthetic oligonucleotide
  Antisense strand to SEQ ID NO: 1343016
aucucagccacugauccaa

SEQ ID NO: 1343018 - RNA, 19 nt, Artificial Sequence
  Description of Artificial Sequence: Synthetic oligonucleotide
  Sense strand starting at position 2334 of SEQ ID NO: 1242379
uggaucaguggcugagauu

SEQ ID NO: 1343019 - RNA, 19 nt, Artificial Sequence
  Description of Artificial Sequence: Synthetic oligonucleotide
  Antisense strand to SEQ ID NO: 1343018
aaucucagccacugaucca

SEQ ID NO: 1343020 - RNA, 19 nt, Artificial Sequence
  Description of Artificial Sequence: Synthetic oligonucleotide
  Sense strand starting at position 2335 of SEQ ID NO: 1242379
ggaucaguggcugagauua

SEQ ID NO: 1343021 - RNA, 19 nt, Artificial Sequence
  Description of Artificial Sequence: Synthetic oligonucleotide
  Antisense strand to SEQ ID NO: 1343020
uaaucucagccacugaucc

SEQ ID NO: 1343022 - RNA, 19 nt, Artificial Sequence
  Description of Artificial Sequence: Synthetic oligonucleotide
  Sense strand starting at position 2337 of SEQ ID NO: 1242379
aucaguggcugagauuaga

SEQ ID NO: 1343023 - RNA, 19 nt, Artificial Sequence
  Description of Artificial Sequence: Synthetic oligonucleotide
  Antisense strand to SEQ ID NO: 1343022
ucuaaucucagccacugau

SEQ ID NO: 1343024 - RNA, 19 nt, Artificial Sequence
  Description of Artificial Sequence: Synthetic oligonucleotide
  Sense strand starting at position 2799 of SEQ ID NO: 1242379
uggcgugaacccgguagau

SEQ ID NO: 1343025 - RNA, 19 nt, Artificial Sequence
  Description of Artificial Sequence: Synthetic oligonucleotide
  Antisense strand to SEQ ID NO: 1343024
aucuaccggguucacgcca

SEQ ID NO: 1343026 - RNA, 19 nt, Artificial Sequence
  Description of Artificial Sequence: Synthetic oligonucleotide
  Sense strand starting at position 3100 of SEQ ID NO: 1242379
gccggagaaccgugugaac

SEQ ID NO: 1343027 - RNA, 19 nt, Artificial Sequence
  Description of Artificial Sequence: Synthetic oligonucleotide
  Antisense strand to SEQ ID NO: 1343026
guucacacgguucuccggc

SEQ ID NO: 1343028 - RNA, 19 nt, Artificial Sequence
  Description of Artificial Sequence: Synthetic oligonucleotide
  Sense strand starting at position 3493 of SEQ ID NO: 1242379
gccacaauuggguauaucu

SEQ ID NO: 1343029 - RNA, 19 nt, Artificial Sequence
  Description of Artificial Sequence: Synthetic oligonucleotide
  Antisense strand to SEQ ID NO: 1343028
agauauacccaauuguggc

SEQ ID NO: 1343030 - RNA, 19 nt, Artificial Sequence
  Description of Artificial Sequence: Synthetic oligonucleotide
  Sense strand starting at position 3500 of SEQ ID NO: 1242379
uuggguauaucuugaugag

SEQ ID NO: 1343031 - RNA, 19 nt, Artificial Sequence
  Description of Artificial Sequence: Synthetic oligonucleotide
  Antisense strand to SEQ ID NO: 1343030
cucaucaagauauacccaa

SEQ ID NO: 1343032 - RNA, 19 nt, Artificial Sequence
  Description of Artificial Sequence: Synthetic oligonucleotide
  Sense strand starting at position 3501 of SEQ ID NO: 1242379
uggguauaucuugaugagc

SEQ ID NO: 1343033 - RNA, 19 nt, Artificial Sequence
  Description of Artificial Sequence: Synthetic oligonucleotide
  Antisense strand to SEQ ID NO: 1343032
gcucaucaagauauaccca

SEQ ID NO: 1343034 - RNA, 19 nt, Artificial Sequence
  Description of Artificial Sequence: Synthetic oligonucleotide
  Sense strand starting at position 3503 of SEQ ID NO: 1242379
gguauaucuugaugagcac

SEQ ID NO: 1343035 - RNA, 19 nt, Artificial Sequence
  Description of Artificial Sequence: Synthetic oligonucleotide
  Antisense strand to SEQ ID NO: 1343034
gugcucaucaagauauacc

SEQ ID NO: 1343036 - RNA, 19 nt, Artificial Sequence
  Description of Artificial Sequence: Synthetic oligonucleotide
  Sense strand starting at position 3504 of SEQ ID NO: 1242379
guauaucuugaugagcaca

SEQ ID NO: 1343037 - RNA, 19 nt, Artificial Sequence
  Description of Artificial Sequence: Synthetic oligonucleotide
  Antisense strand to SEQ ID NO: 1343036
ugugcucaucaagauauac

SEQ ID NO: 1343038 - RNA, 19 nt, Artificial Sequence
  Description of Artificial Sequence: Synthetic oligonucleotide
  Sense strand starting at position 3509 of SEQ ID NO: 1242379
ucuugaugagcacagcaua

SEQ ID NO: 1343039 - RNA, 19 nt, Artificial Sequence
  Description of Artificial Sequence: Synthetic oligonucleotide
  Antisense strand to SEQ ID NO: 1343038
uaugcugugcucaucaaga

SEQ ID NO: 1343040 - RNA, 19 nt, Artificial Sequence
  Description of Artificial Sequence: Synthetic oligonucleotide
  Sense strand starting at position 3624 of SEQ ID NO: 1242379
guauuuauaugucugucua

SEQ ID NO: 1343041 - RNA, 19 nt, Artificial Sequence
  Description of Artificial Sequence: Synthetic oligonucleotide
  Antisense strand to SEQ ID NO: 1343040
uagacagacauauaaauac

SEQ ID NO: 1343042 - RNA, 19 nt, Artificial Sequence
  Description of Artificial Sequence: Synthetic oligonucleotide
  Sense strand starting at position 22 of SEQ ID NO: 1242380
gcacuacugcaguaaaucu

SEQ ID NO: 1343043 - RNA, 19 nt, Artificial Sequence
  Description of Artificial Sequence: Synthetic oligonucleotide
  Antisense strand to SEQ ID NO: 1343042
agauuuacugcaguagugc

SEQ ID NO: 1343044 - RNA, 19 nt, Artificial Sequence
  Description of Artificial Sequence: Synthetic oligonucleotide
  Sense strand starting at position 586 of SEQ ID NO: 1242380
gcugaaguucaguggcgaa

SEQ ID NO: 1343045 - RNA, 19 nt, Artificial Sequence
  Description of Artificial Sequence: Synthetic oligonucleotide
  Antisense strand to SEQ ID NO: 1343044
uucgccacugaacuucagc

SEQ ID NO: 1343046 - RNA, 19 nt, Artificial Sequence
  Description of Artificial Sequence: Synthetic oligonucleotide
  Sense strand starting at position 746 of SEQ ID NO: 1242380
aggauauugccgcagagaa

SEQ ID NO: 1343047 - RNA, 19 nt, Artificial Sequence
  Description of Artificial Sequence: Synthetic oligonucleotide
  Antisense strand to SEQ ID NO: 1343046
uucucugcggcaauauccu

SEQ ID NO: 1343048 - RNA, 19 nt, Artificial Sequence
  Description of Artificial Sequence: Synthetic oligonucleotide
  Sense strand starting at position 748 of SEQ ID NO: 1242380
gauauugccgcagagaaac

SEQ ID NO: 1343049 - RNA, 19 nt, Artificial Sequence
  Description of Artificial Sequence: Synthetic oligonucleotide
  Antisense strand to SEQ ID NO: 1343048
guuucucugcggcaauauc

SEQ ID NO: 1343050 - RNA, 19 nt, Artificial Sequence
  Description of Artificial Sequence: Synthetic oligonucleotide
  Sense strand starting at position 787 of SEQ ID NO: 1242380
agaucaacuuuauugaagu

SEQ ID NO: 1343051 - RNA, 19 nt, Artificial Sequence
  Description of Artificial Sequence: Synthetic oligonucleotide
  Antisense strand to SEQ ID NO: 1343050
acuucaauaaaguugaucu

SEQ ID NO: 1343052 - RNA, 19 nt, Artificial Sequence
  Description of Artificial Sequence: Synthetic oligonucleotide
  Sense strand starting at position 1211 of SEQ ID NO: 1242380
ugugcagguccagggauuu

SEQ ID NO: 1343053 - RNA, 19 nt, Artificial Sequence
  Description of Artificial Sequence: Synthetic oligonucleotide
  Antisense strand to SEQ ID NO: 1343052
aaaucccuggaccugcaca

SEQ ID NO: 1343054 - RNA, 19 nt, Artificial Sequence
  Description of Artificial Sequence: Synthetic oligonucleotide
  Sense strand starting at position 1237 of SEQ ID NO: 1242380
ggauccuguuuaggaaaca

SEQ ID NO: 1343055 - RNA, 19 nt, Artificial Sequence
  Description of Artificial Sequence: Synthetic oligonucleotide
  Antisense strand to SEQ ID NO: 1343054
uguuuccuaaacaggaucc

SEQ ID NO: 1343056 - RNA, 19 nt, Artificial Sequence
  Description of Artificial Sequence: Synthetic oligonucleotide
  Sense strand starting at position 2306 of SEQ ID NO: 1242380
gcaagagugucagcggcaa

SEQ ID NO: 1343057 - RNA, 19 nt, Artificial Sequence
  Description of Artificial Sequence: Synthetic oligonucleotide
  Antisense strand to SEQ ID NO: 1343056
uugccgcugacacucuugc

SEQ ID NO: 1343058 - RNA, 19 nt, Artificial Sequence
  Description of Artificial Sequence: Synthetic oligonucleotide
  Sense strand starting at position 2558 of SEQ ID NO: 1242380
gccggugauugcuuuccaa

SEQ ID NO: 1343059 - RNA, 19 nt, Artificial Sequence
  Description of Artificial Sequence: Synthetic oligonucleotide
  Antisense strand to SEQ ID NO: 1343058
uuggaaagcaaucaccggc

SEQ ID NO: 1343060 - RNA, 19 nt, Artificial Sequence
  Description of Artificial Sequence: Synthetic oligonucleotide
  Sense strand starting at position 2680 of SEQ ID NO: 1242380
gcgaguagucacggucuga

SEQ ID NO: 1343061 - RNA, 19 nt, Artificial Sequence
  Description of Artificial Sequence: Synthetic oligonucleotide
  Antisense strand to SEQ ID NO: 1343060
ucagaccgugacuacucgc

SEQ ID NO: 1343062 - RNA, 19 nt, Artificial Sequence
  Description of Artificial Sequence: Synthetic oligonucleotide
  Sense strand starting at position 2684 of SEQ ID NO: 1242380
guagucacggucugaggua

SEQ ID NO: 1343063 - RNA, 19 nt, Artificial Sequence
  Description of Artificial Sequence: Synthetic oligonucleotide
  Antisense strand to SEQ ID NO: 1343062
uaccucagaccgugacuac

SEQ ID NO: 1343064 - RNA, 19 nt, Artificial Sequence
  Description of Artificial Sequence: Synthetic oligonucleotide
  Sense strand starting at position 2696 of SEQ ID NO: 1242380
ugagguaguuccgauaacu

SEQ ID NO: 1343065 - RNA, 19 nt, Artificial Sequence
  Description of Artificial Sequence: Synthetic oligonucleotide
  Antisense strand to SEQ ID NO: 1343064
aguuaucggaacuaccuca

SEQ ID NO: 1343066 - RNA, 19 nt, Artificial Sequence
  Description of Artificial Sequence: Synthetic oligonucleotide
  Sense strand starting at position 2996 of SEQ ID NO: 1242380
gucccaguguugucaggag

SEQ ID NO: 1343067 - RNA, 19 nt, Artificial Sequence
  Description of Artificial Sequence: Synthetic oligonucleotide
  Antisense strand to SEQ ID NO: 1343066
cuccugacaacacugggac

SEQ ID NO: 1343068 - RNA, 19 nt, Artificial Sequence
  Description of Artificial Sequence: Synthetic oligonucleotide
  Sense strand starting at position 3069 of SEQ ID NO: 1242380
acagguagccggcaagaaa

SEQ ID NO: 1343069 - RNA, 19 nt, Artificial Sequence
  Description of Artificial Sequence: Synthetic oligonucleotide
  Antisense strand to SEQ ID NO: 1343068
uuucuugccggcuaccugu

SEQ ID NO: 1343070 - RNA, 19 nt, Artificial Sequence
  Description of Artificial Sequence: Synthetic oligonucleotide
  Sense strand starting at position 3081 of SEQ ID NO: 1242380
caagaaaggguuuguggaa

SEQ ID NO: 1343071 - RNA, 19 nt, Artificial Sequence
  Description of Artificial Sequence: Synthetic oligonucleotide
  Antisense strand to SEQ ID NO: 1343070
uuccacaaacccuuucuug

SEQ ID NO: 1343072 - RNA, 19 nt, Artificial Sequence
  Description of Artificial Sequence: Synthetic oligonucleotide
  Sense strand starting at position 3210 of SEQ ID NO: 1242380
cagggagcgccucauuauu

SEQ ID NO: 1343073 - RNA, 19 nt, Artificial Sequence
  Description of Artificial Sequence: Synthetic oligonucleotide
  Antisense strand to SEQ ID NO: 1343072
aauaaugaggcgcucccug

SEQ ID NO: 1343074 - RNA, 19 nt, Artificial Sequence
  Description of Artificial Sequence: Synthetic oligonucleotide
  Sense strand starting at position 3282 of SEQ ID NO: 1242380
gacugaagaugccagacau

SEQ ID NO: 1343075 - RNA, 19 nt, Artificial Sequence
  Description of Artificial Sequence: Synthetic oligonucleotide
  Antisense strand to SEQ ID NO: 1343074
augucuggcaucuucaguc

SEQ ID NO: 1343076 - RNA, 19 nt, Artificial Sequence
  Description of Artificial Sequence: Synthetic oligonucleotide
  Sense strand starting at position 3292 of SEQ ID NO: 1242380
gccagacauccugagaguu

SEQ ID NO: 1343077 - RNA, 19 nt, Artificial Sequence
  Description of Artificial Sequence: Synthetic oligonucleotide
  Antisense strand to SEQ ID NO: 1343076
aacucucaggaugucuggc

SEQ ID NO: 1343078 - RNA, 19 nt, Artificial Sequence
  Description of Artificial Sequence: Synthetic oligonucleotide
  Sense strand starting at position 3325 of SEQ ID NO: 1242380
ggcuauucugaaggagaug

SEQ ID NO: 1343079 - RNA, 19 nt, Artificial Sequence
  Description of Artificial Sequence: Synthetic oligonucleotide
  Antisense strand to SEQ ID NO: 1343078
caucuccuucagaauagcc

SEQ ID NO: 1343080 - RNA, 19 nt, Artificial Sequence
  Description of Artificial Sequence: Synthetic oligonucleotide
  Sense strand starting at position 3375 of SEQ ID NO: 1242380
ggugggugaggccagaaau

SEQ ID NO: 1343081 - RNA, 19 nt, Artificial Sequence
  Description of Artificial Sequence: Synthetic oligonucleotide
  Antisense strand to SEQ ID NO: 1343080
auuucuggccucacccacc

SEQ ID NO: 1343082 - RNA, 19 nt, Artificial Sequence
  Description of Artificial Sequence: Synthetic oligonucleotide
  Sense strand starting at position 3386 of SEQ ID NO: 1242380
ccagaaauugcagggaguu

SEQ ID NO: 1343083 - RNA, 19 nt, Artificial Sequence
  Description of Artificial Sequence: Synthetic oligonucleotide
  Antisense strand to SEQ ID NO: 1343082
aacucccugcaauuucugg

SEQ ID NO: 1343084 - RNA, 19 nt, Artificial Sequence
  Description of Artificial Sequence: Synthetic oligonucleotide
  Sense strand starting at position 3392 of SEQ ID NO: 1242380
auugcagggaguugugaua

SEQ ID NO: 1343085 - RNA, 19 nt, Artificial Sequence
  Description of Artificial Sequence: Synthetic oligonucleotide
  Antisense strand to SEQ ID NO: 1343084
uaucacaacucccugcaau

SEQ ID NO: 1343086 - RNA, 19 nt, Artificial Sequence
  Description of Artificial Sequence: Synthetic oligonucleotide
  Sense strand starting at position 3590 of SEQ ID NO: 1242380
ggacuaacaugggaagcuu

SEQ ID NO: 1343087 - RNA, 19 nt, Artificial Sequence
  Description of Artificial Sequence: Synthetic oligonucleotide
  Antisense strand to SEQ ID NO: 1343086
aagcuucccauguuagucc

SEQ ID NO: 1343088 - RNA, 19 nt, Artificial Sequence
  Description of Artificial Sequence: Synthetic oligonucleotide
  Sense strand starting at position 3610 of SEQ ID NO: 1242380
ggcauugucuuccuuucua

SEQ ID NO: 1343089 - RNA, 19 nt, Artificial Sequence
  Description of Artificial Sequence: Synthetic oligonucleotide
  Antisense strand to SEQ ID NO: 1343088
uagaaaggaagacaaugcc

SEQ ID NO: 1343090 - RNA, 19 nt, Artificial Sequence
  Description of Artificial Sequence: Synthetic oligonucleotide
  Sense strand starting at position 3772 of SEQ ID NO: 1242380
gccggaaacgucuggacaa

SEQ ID NO: 1343091 - RNA, 19 nt, Artificial Sequence
  Description of Artificial Sequence: Synthetic oligonucleotide
  Antisense strand to SEQ ID NO: 1343090
uuguccagacguuuccggc

SEQ ID NO: 1343092 - RNA, 19 nt, Artificial Sequence
  Description of Artificial Sequence: Synthetic oligonucleotide
  Sense strand starting at position 3773 of SEQ ID NO: 1242380
ccggaaacgucuggacaag

SEQ ID NO: 1343093 - RNA, 19 nt, Artificial Sequence
  Description of Artificial Sequence: Synthetic oligonucleotide
  Antisense strand to SEQ ID NO: 1343092
cuuguccagacguuuccgg

SEQ ID NO: 1343094 - RNA, 19 nt, Artificial Sequence
  Description of Artificial Sequence: Synthetic oligonucleotide
  Sense strand starting at position 3833 of SEQ ID NO: 1242380
auaauuaaacaguggcaaa

SEQ ID NO: 1343095 - RNA, 19 nt, Artificial Sequence
  Description of Artificial Sequence: Synthetic oligonucleotide
  Antisense strand to SEQ ID NO: 1343094
uuugccacuguuuaauuau

SEQ ID NO: 1343096 - RNA, 19 nt, Artificial Sequence
  Description of Artificial Sequence: Synthetic oligonucleotide
  Sense strand starting at position 3894 of SEQ ID NO: 1242380
auuggaagcucguuauaug

SEQ ID NO: 1343097 - RNA, 19 nt, Artificial Sequence
  Description of Artificial Sequence: Synthetic oligonucleotide
  Antisense strand to SEQ ID NO: 1343096
cauauaacgagcuuccaau

SEQ ID NO: 1343098 - RNA, 19 nt, Artificial Sequence
  Description of Artificial Sequence: Synthetic oligonucleotide
  Sense strand starting at position 3897 of SEQ ID NO: 1242380
ggaagcucguuauauggga

SEQ ID NO: 1343099 - RNA, 19 nt, Artificial Sequence
  Description of Artificial Sequence: Synthetic oligonucleotide
  Antisense strand to SEQ ID NO: 1343098
ucccauauaacgagcuucc

SEQ ID NO: 1343100 - RNA, 19 nt, Artificial Sequence
  Description of Artificial Sequence: Synthetic oligonucleotide
  Sense strand starting at position 3901 of SEQ ID NO: 1242380
gcucguuauaugggaggaa

SEQ ID NO: 1343101 - RNA, 19 nt, Artificial Sequence
  Description of Artificial Sequence: Synthetic oligonucleotide
  Antisense strand to SEQ ID NO: 1343100
uuccucccauauaacgagc

SEQ ID NO: 1343102 - RNA, 19 nt, Artificial Sequence
  Description of Artificial Sequence: Synthetic oligonucleotide
  Sense strand starting at position 3902 of SEQ ID NO: 1242380
cucguuauaugggaggaau

SEQ ID NO: 1343103 - RNA, 19 nt, Artificial Sequence
  Description of Artificial Sequence: Synthetic oligonucleotide
  Antisense strand to SEQ ID NO: 1343102
auuccucccauauaacgag

SEQ ID NO: 1343104 - RNA, 19 nt, Artificial Sequence
  Description of Artificial Sequence: Synthetic oligonucleotide
  Sense strand starting at position 874 of SEQ ID NO: 1242381
ucagaagucuggugacaca

SEQ ID NO: 1343105 - RNA, 19 nt, Artificial Sequence
  Description of Artificial Sequence: Synthetic oligonucleotide
  Antisense strand to SEQ ID NO: 1343104
ugugucaccagacuucuga

SEQ ID NO: 1343106 - RNA, 19 nt, Artificial Sequence
  Description of Artificial Sequence: Synthetic oligonucleotide
  Sense strand starting at position 898 of SEQ ID NO: 1242381
aagggucucuauucuguau

SEQ ID NO: 1343107 - RNA, 19 nt, Artificial Sequence
  Description of Artificial Sequence: Synthetic oligonucleotide
  Antisense strand to SEQ ID NO: 1343106
auacagaauagagacccuu

SEQ ID NO: 1343108 - RNA, 19 nt, Artificial Sequence
  Description of Artificial Sequence: Synthetic oligonucleotide
  Sense strand starting at position 901 of SEQ ID NO: 1242381
ggucucuauucuguauuga

SEQ ID NO: 1343109 - RNA, 19 nt, Artificial Sequence
  Description of Artificial Sequence: Synthetic oligonucleotide
  Antisense strand to SEQ ID NO: 1343108
ucaauacagaauagagacc

SEQ ID NO: 1343110 - RNA, 19 nt, Artificial Sequence
  Description of Artificial Sequence: Synthetic oligonucleotide
  Sense strand starting at position 902 of SEQ ID NO: 1242381
gucucuauucuguauugag

SEQ ID NO: 1343111 - RNA, 19 nt, Artificial Sequence
  Description of Artificial Sequence: Synthetic oligonucleotide
  Antisense strand to SEQ ID NO: 1343110
cucaauacagaauagagac

SEQ ID NO: 1343112 - RNA, 19 nt, Artificial Sequence
  Description of Artificial Sequence: Synthetic oligonucleotide
  Sense strand starting at position 1011 of SEQ ID NO: 1242381
acaacuguauuugaaaugu

SEQ ID NO: 1343113 - RNA, 19 nt, Artificial Sequence
  Description of Artificial Sequence: Synthetic oligonucleotide
  Antisense strand to SEQ ID NO: 1343112
acauuucaaauacaguugu

SEQ ID NO: 1343114 - RNA, 19 nt, Artificial Sequence
  Description of Artificial Sequence: Synthetic oligonucleotide
  Sense strand starting at position 1105 of SEQ ID NO: 1242381
cguccuuuccuguaaggcu

SEQ ID NO: 1343115 - RNA, 19 nt, Artificial Sequence
  Description of Artificial Sequence: Synthetic oligonucleotide
  Antisense strand to SEQ ID NO: 1343114
agccuuacaggaaaggacg

SEQ ID NO: 1343116 - RNA, 19 nt, Artificial Sequence
  Description of Artificial Sequence: Synthetic oligonucleotide
  Sense strand starting at position 1113 of SEQ ID NO: 1242381
ccuguaaggcugugagcua

SEQ ID NO: 1343117 - RNA, 19 nt, Artificial Sequence
  Description of Artificial Sequence: Synthetic oligonucleotide
  Antisense strand to SEQ ID NO: 1343116
uagcucacagccuuacagg

SEQ ID NO: 1343118 - RNA, 19 nt, Artificial Sequence
  Description of Artificial Sequence: Synthetic oligonucleotide
  Sense strand starting at position 1114 of SEQ ID NO: 1242381
cuguaaggcugugagcuaa

SEQ ID NO: 1343119 - RNA, 19 nt, Artificial Sequence
  Description of Artificial Sequence: Synthetic oligonucleotide
  Antisense strand to SEQ ID NO: 1343118
uuagcucacagccuuacag

SEQ ID NO: 1343120 - RNA, 19 nt, Artificial Sequence
  Description of Artificial Sequence: Synthetic oligonucleotide
  Sense strand starting at position 1393 of SEQ ID NO: 1242381
cugguuaccgccuaaggaa

SEQ ID NO: 1343121 - RNA, 19 nt, Artificial Sequence
  Description of Artificial Sequence: Synthetic oligonucleotide
  Antisense strand to SEQ ID NO: 1343120
uuccuuaggcgguaaccag

SEQ ID NO: 1343122 - RNA, 19 nt, Artificial Sequence
  Description of Artificial Sequence: Synthetic oligonucleotide
  Sense strand starting at position 2618 of SEQ ID NO: 1242381
gcagcaacaucugguauuu

SEQ ID NO: 1343123 - RNA, 19 nt, Artificial Sequence
  Description of Artificial Sequence: Synthetic oligonucleotide
  Antisense strand to SEQ ID NO: 1343122
aaauaccagauguugcugc

SEQ ID NO: 1343124 - RNA, 19 nt, Artificial Sequence
  Description of Artificial Sequence: Synthetic oligonucleotide
  Sense strand starting at position 2734 of SEQ ID NO: 1242381
uuggaucaguggcugagau

SEQ ID NO: 1343125 - RNA, 19 nt, Artificial Sequence
  Description of Artificial Sequence: Synthetic oligonucleotide
  Antisense strand to SEQ ID NO: 1343124
aucucagccacugauccaa

SEQ ID NO: 1343126 - RNA, 19 nt, Artificial Sequence
  Description of Artificial Sequence: Synthetic oligonucleotide
  Sense strand starting at position 2735 of SEQ ID NO: 1242381
uggaucaguggcugagauu

SEQ ID NO: 1343127 - RNA, 19 nt, Artificial Sequence
  Description of Artificial Sequence: Synthetic oligonucleotide
  Antisense strand to SEQ ID NO: 1343126
aaucucagccacugaucca

SEQ ID NO: 1343128 - RNA, 19 nt, Artificial Sequence
  Description of Artificial Sequence: Synthetic oligonucleotide
  Sense strand starting at position 2736 of SEQ ID NO: 1242381
ggaucaguggcugagauua

SEQ ID NO: 1343129 - RNA, 19 nt, Artificial Sequence
  Description of Artificial Sequence: Synthetic oligonucleotide
  Antisense strand to SEQ ID NO: 1343128
uaaucucagccacugaucc

SEQ ID NO: 1343130 - RNA, 19 nt, Artificial Sequence
  Description of Artificial Sequence: Synthetic oligonucleotide
  Sense strand starting at position 2738 of SEQ ID NO: 1242381
aucaguggcugagauuaga

SEQ ID NO: 1343131 - RNA, 19 nt, Artificial Sequence
  Description of Artificial Sequence: Synthetic oligonucleotide
  Antisense strand to SEQ ID NO: 1343130
ucuaaucucagccacugau

SEQ ID NO: 1343132 - RNA, 19 nt, Artificial Sequence
  Description of Artificial Sequence: Synthetic oligonucleotide
  Sense strand starting at position 3200 of SEQ ID NO: 1242381
uggcgugaacccgguagau

SEQ ID NO: 1343133 - RNA, 19 nt, Artificial Sequence
  Description of Artificial Sequence: Synthetic oligonucleotide
  Antisense strand to SEQ ID NO: 1343132
aucuaccggguucacgcca

SEQ ID NO: 1343134 - RNA, 19 nt, Artificial Sequence
  Description of Artificial Sequence: Synthetic oligonucleotide
  Sense strand starting at position 3501 of SEQ ID NO: 1242381
gccggagaaccgugugaac

SEQ ID NO: 1343135 - RNA, 19 nt, Artificial Sequence
  Description of Artificial Sequence: Synthetic oligonucleotide
  Antisense strand to SEQ ID NO: 1343134
guucacacgguucuccggc

SEQ ID NO: 1343136 - RNA, 19 nt, Artificial Sequence
  Description of Artificial Sequence: Synthetic oligonucleotide
  Sense strand starting at position 3894 of SEQ ID NO: 1242381
gccacaauuggguauaucu

SEQ ID NO: 1343137 - RNA, 19 nt, Artificial Sequence
  Description of Artificial Sequence: Synthetic oligonucleotide
  Antisense strand to SEQ ID NO: 1343136
agauauacccaauuguggc

SEQ ID NO: 1343138 - RNA, 19 nt, Artificial Sequence
  Description of Artificial Sequence: Synthetic oligonucleotide
  Sense strand starting at position 3901 of SEQ ID NO: 1242381
uuggguauaucuugaugag

SEQ ID NO: 1343139 - RNA, 19 nt, Artificial Sequence
  Description of Artificial Sequence: Synthetic oligonucleotide
  Antisense strand to SEQ ID NO: 1343138
cucaucaagauauacccaa

SEQ ID NO: 1343140 - RNA, 19 nt, Artificial Sequence
  Description of Artificial Sequence: Synthetic oligonucleotide
  Sense strand starting at position 3902 of SEQ ID NO: 1242381
uggguauaucuugaugagc

SEQ ID NO: 1343141 - RNA, 19 nt, Artificial Sequence
  Description of Artificial Sequence: Synthetic oligonucleotide
  Antisense strand to SEQ ID NO: 1343140
gcucaucaagauauaccca

SEQ ID NO: 1343142 - RNA, 19 nt, Artificial Sequence
  Description of Artificial Sequence: Synthetic oligonucleotide
  Sense strand starting at position 3904 of SEQ ID NO: 1242381
gguauaucuugaugagcac

SEQ ID NO: 1343143 - RNA, 19 nt, Artificial Sequence
  Description of Artificial Sequence: Synthetic oligonucleotide
  Antisense strand to SEQ ID NO: 1343142
gugcucaucaagauauacc

SEQ ID NO: 1343144 - RNA, 19 nt, Artificial Sequence
  Description of Artificial Sequence: Synthetic oligonucleotide
  Sense strand starting at position 3905 of SEQ ID NO: 1242381
guauaucuugaugagcaca

SEQ ID NO: 1343145 - RNA, 19 nt, Artificial Sequence
  Description of Artificial Sequence: Synthetic oligonucleotide
  Antisense strand to SEQ ID NO: 1343144
ugugcucaucaagauauac

SEQ ID NO: 1343146 - RNA, 19 nt, Artificial Sequence
  Description of Artificial Sequence: Synthetic oligonucleotide
  Sense strand starting at position 3910 of SEQ ID NO: 1242381
ucuugaugagcacagcaua

SEQ ID NO: 1343147 - RNA, 19 nt, Artificial Sequence
  Description of Artificial Sequence: Synthetic oligonucleotide
  Antisense strand to SEQ ID NO: 1343146
uaugcugugcucaucaaga

SEQ ID NO: 1343148 - RNA, 19 nt, Artificial Sequence
  Description of Artificial Sequence: Synthetic oligonucleotide
  Sense strand starting at position 267 of SEQ ID NO: 1242382
acccacuuguuaucuuaga

SEQ ID NO: 1343149 - RNA, 19 nt, Artificial Sequence
  Description of Artificial Sequence: Synthetic oligonucleotide
  Antisense strand to SEQ ID NO: 1343148
ucuaagauaacaagugggu

SEQ ID NO: 1343150 - RNA, 19 nt, Artificial Sequence
  Description of Artificial Sequence: Synthetic oligonucleotide
  Sense strand starting at position 340 of SEQ ID NO: 1242382
gcucaucaggaaugcagaa

SEQ ID NO: 1343151 - RNA, 19 nt, Artificial Sequence
  Description of Artificial Sequence: Synthetic oligonucleotide
  Antisense strand to SEQ ID NO: 1343150
uucugcauuccugaugagc

SEQ ID NO: 1343152 - RNA, 19 nt, Artificial Sequence
  Description of Artificial Sequence: Synthetic oligonucleotide
  Sense strand starting at position 407 of SEQ ID NO: 1242382
gcugguuaggagggagaaa

SEQ ID NO: 1343153 - RNA, 19 nt, Artificial Sequence
  Description of Artificial Sequence: Synthetic oligonucleotide
  Antisense strand to SEQ ID NO: 1343152
uuucucccuccuaaccagc

SEQ ID NO: 1343154 - RNA, 19 nt, Artificial Sequence
  Description of Artificial Sequence: Synthetic oligonucleotide
  Sense strand starting at position 610 of SEQ ID NO: 1242382
auagcaucugggcaauguu

SEQ ID NO: 1343155 - RNA, 19 nt, Artificial Sequence
  Description of Artificial Sequence: Synthetic oligonucleotide
  Antisense strand to SEQ ID NO: 1343154
aacauugcccagaugcuau

SEQ ID NO: 1343156 - RNA, 19 nt, Artificial Sequence
  Description of Artificial Sequence: Synthetic oligonucleotide
  Sense strand starting at position 642 of SEQ ID NO: 1242382
aggauuguguuaccaagau

SEQ ID NO: 1343157 - RNA, 19 nt, Artificial Sequence
  Description of Artificial Sequence: Synthetic oligonucleotide
  Antisense strand to SEQ ID NO: 1343156
aucuugguaacacaauccu

SEQ ID NO: 1343158 - RNA, 19 nt, Artificial Sequence
  Description of Artificial Sequence: Synthetic oligonucleotide
  Sense strand starting at position 646 of SEQ ID NO: 1242382
uuguguuaccaagauaacc

SEQ ID NO: 1343159 - RNA, 19 nt, Artificial Sequence
  Description of Artificial Sequence: Synthetic oligonucleotide
  Antisense strand to SEQ ID NO: 1343158
gguuaucuugguaacacaa

SEQ ID NO: 1343160 - RNA, 19 nt, Artificial Sequence
  Description of Artificial Sequence: Synthetic oligonucleotide
  Sense strand starting at position 698 of SEQ ID NO: 1242382
caaagucuggcucaagguu

SEQ ID NO: 1343161 - RNA, 19 nt, Artificial Sequence
  Description of Artificial Sequence: Synthetic oligonucleotide
  Antisense strand to SEQ ID NO: 1343160
aaccuugagccagacuuug

SEQ ID NO: 1343162 - RNA, 19 nt, Artificial Sequence
  Description of Artificial Sequence: Synthetic oligonucleotide
  Sense strand starting at position 1073 of SEQ ID NO: 1242382
agucauaaugcauggaaag

SEQ ID NO: 1343163 - RNA, 19 nt, Artificial Sequence
  Description of Artificial Sequence: Synthetic oligonucleotide
  Antisense strand to SEQ ID NO: 1343162
cuuuccaugcauuaugacu

SEQ ID NO: 1343164 - RNA, 19 nt, Artificial Sequence
  Description of Artificial Sequence: Synthetic oligonucleotide
  Sense strand starting at position 1432 of SEQ ID NO: 1242382
ugaggaaaggcauacguua

SEQ ID NO: 1343165 - RNA, 19 nt, Artificial Sequence
  Description of Artificial Sequence: Synthetic oligonucleotide
  Antisense strand to SEQ ID NO: 1343164
uaacguaugccuuuccuca

SEQ ID NO: 1343166 - RNA, 19 nt, Artificial Sequence
  Description of Artificial Sequence: Synthetic oligonucleotide
  Sense strand starting at position 1434 of SEQ ID NO: 1242382
aggaaaggcauacguuaau

SEQ ID NO: 1343167 - RNA, 19 nt, Artificial Sequence
  Description of Artificial Sequence: Synthetic oligonucleotide
  Antisense strand to SEQ ID NO: 1343166
auuaacguaugccuuuccu

SEQ ID NO: 1343168 - RNA, 19 nt, Artificial Sequence
  Description of Artificial Sequence: Synthetic oligonucleotide
  Sense strand starting at position 1437 of SEQ ID NO: 1242382
aaaggcauacguuaaugua

SEQ ID NO: 1343169 - RNA, 19 nt, Artificial Sequence
  Description of Artificial Sequence: Synthetic oligonucleotide
  Antisense strand to SEQ ID NO: 1343168
uacauuaacguaugccuuu

SEQ ID NO: 1343170 - RNA, 19 nt, Artificial Sequence
  Description of Artificial Sequence: Synthetic oligonucleotide
  Sense strand starting at position 1461 of SEQ ID NO: 1242382
gagguuaacccaggagguu

SEQ ID NO: 1343171 - RNA, 19 nt, Artificial Sequence
  Description of Artificial Sequence: Synthetic oligonucleotide
  Antisense strand to SEQ ID NO: 1343170
aaccuccuggguuaaccuc

SEQ ID NO: 1343172 - RNA, 19 nt, Artificial Sequence
  Description of Artificial Sequence: Synthetic oligonucleotide
  Sense strand starting at position 1585 of SEQ ID NO: 1242382
ucauuauaagcaggcuuga

SEQ ID NO: 1343173 - RNA, 19 nt, Artificial Sequence
  Description of Artificial Sequence: Synthetic oligonucleotide
  Antisense strand to SEQ ID NO: 1343172
ucaagccugcuuauaauga

SEQ ID NO: 1343174 - RNA, 19 nt, Artificial Sequence
  Description of Artificial Sequence: Synthetic oligonucleotide
  Sense strand starting at position 1590 of SEQ ID NO: 1242382
auaagcaggcuugagauau

SEQ ID NO: 1343175 - RNA, 19 nt, Artificial Sequence
  Description of Artificial Sequence: Synthetic oligonucleotide
  Antisense strand to SEQ ID NO: 1343174
auaucucaagccugcuuau

SEQ ID NO: 1343176 - RNA, 19 nt, Artificial Sequence
  Description of Artificial Sequence: Synthetic oligonucleotide
  Sense strand starting at position 1594 of SEQ ID NO: 1242382
gcaggcuugagauaucuga

SEQ ID NO: 1343177 - RNA, 19 nt, Artificial Sequence
  Description of Artificial Sequence: Synthetic oligonucleotide
  Antisense strand to SEQ ID NO: 1343176
ucagauaucucaagccugc

SEQ ID NO: 1343178 - RNA, 19 nt, Artificial Sequence
  Description of Artificial Sequence: Synthetic oligonucleotide
  Sense strand starting at position 1601 of SEQ ID NO: 1242382
ugagauaucugaccuuucu

SEQ ID NO: 1343179 - RNA, 19 nt, Artificial Sequence
  Description of Artificial Sequence: Synthetic oligonucleotide
  Antisense strand to SEQ ID NO: 1343178
agaaaggucagauaucuca

SEQ ID NO: 1343180 - RNA, 19 nt, Artificial Sequence
  Description of Artificial Sequence: Synthetic oligonucleotide
  Sense strand starting at position 1888 of SEQ ID NO: 1242382
auccuugucccagggauua

SEQ ID NO: 1343181 - RNA, 19 nt, Artificial Sequence
  Description of Artificial Sequence: Synthetic oligonucleotide
  Antisense strand to SEQ ID NO: 1343180
uaaucccugggacaaggau

SEQ ID NO: 1343182 - RNA, 19 nt, Artificial Sequence
  Description of Artificial Sequence: Synthetic oligonucleotide
  Sense strand starting at position 2071 of SEQ ID NO: 1242382
gaaggagcuuuguccuuag

SEQ ID NO: 1343183 - RNA, 19 nt, Artificial Sequence
  Description of Artificial Sequence: Synthetic oligonucleotide
  Antisense strand to SEQ ID NO: 1343182
cuaaggacaaagcuccuuc

SEQ ID NO: 1343184 - RNA, 19 nt, Artificial Sequence
  Description of Artificial Sequence: Synthetic oligonucleotide
  Sense strand starting at position 2113 of SEQ ID NO: 1242382
ggcuguucucuccagauua

SEQ ID NO: 1343185 - RNA, 19 nt, Artificial Sequence
  Description of Artificial Sequence: Synthetic oligonucleotide
  Antisense strand to SEQ ID NO: 1343184
uaaucuggagagaacagcc

SEQ ID NO: 1343186 - RNA, 19 nt, Artificial Sequence
  Description of Artificial Sequence: Synthetic oligonucleotide
  Sense strand starting at position 2161 of SEQ ID NO: 1242382
ggauuagcauucuuuauug

SEQ ID NO: 1343187 - RNA, 19 nt, Artificial Sequence
  Description of Artificial Sequence: Synthetic oligonucleotide
  Antisense strand to SEQ ID NO: 1343186
caauaaagaaugcuaaucc

SEQ ID NO: 1343188 - RNA, 19 nt, Artificial Sequence
  Description of Artificial Sequence: Synthetic oligonucleotide
  Sense strand starting at position 2169 of SEQ ID NO: 1242382
auucuuuauugguuuagga

SEQ ID NO: 1343189 - RNA, 19 nt, Artificial Sequence
  Description of Artificial Sequence: Synthetic oligonucleotide
  Antisense strand to SEQ ID NO: 1343188
uccuaaaccaauaaagaau

SEQ ID NO: 1343190 - RNA, 19 nt, Artificial Sequence
  Description of Artificial Sequence: Synthetic oligonucleotide
  Sense strand starting at position 2171 of SEQ ID NO: 1242382
ucuuuauugguuuaggauu

SEQ ID NO: 1343191 - RNA, 19 nt, Artificial Sequence
  Description of Artificial Sequence: Synthetic oligonucleotide
  Antisense strand to SEQ ID NO: 1343190
aauccuaaaccaauaaaga

SEQ ID NO: 1343192 - RNA, 19 nt, Artificial Sequence
  Description of Artificial Sequence: Synthetic oligonucleotide
  Sense strand starting at position 2262 of SEQ ID NO: 1242382
uaguuuaugaggugguuaa

SEQ ID NO: 1343193 - RNA, 19 nt, Artificial Sequence
  Description of Artificial Sequence: Synthetic oligonucleotide
  Antisense strand to SEQ ID NO: 1343192
uuaaccaccucauaaacua

SEQ ID NO: 1343194 - RNA, 19 nt, Artificial Sequence
  Description of Artificial Sequence: Synthetic oligonucleotide
  Sense strand starting at position 2263 of SEQ ID NO: 1242382
aguuuaugaggugguuaag

SEQ ID NO: 1343195 - RNA, 19 nt, Artificial Sequence
  Description of Artificial Sequence: Synthetic oligonucleotide
  Antisense strand to SEQ ID NO: 1343194
cuuaaccaccucauaaacu

SEQ ID NO: 1343196 - RNA, 19 nt, Artificial Sequence
  Description of Artificial Sequence: Synthetic oligonucleotide
  Sense strand starting at position 2310 of SEQ ID NO: 1242382
ucggguuaggucugagaga

SEQ ID NO: 1343197 - RNA, 19 nt, Artificial Sequence
  Description of Artificial Sequence: Synthetic oligonucleotide
  Antisense strand to SEQ ID NO: 1343196
ucucucagaccuaacccga

SEQ ID NO: 1343198 - RNA, 19 nt, Artificial Sequence
  Description of Artificial Sequence: Synthetic oligonucleotide
  Sense strand starting at position 2323 of SEQ ID NO: 1242382
gagagaaggccucgcacaa

SEQ ID NO: 1343199 - RNA, 19 nt, Artificial Sequence
  Description of Artificial Sequence: Synthetic oligonucleotide
  Antisense strand to SEQ ID NO: 1343198
uugugcgaggccuucucuc

SEQ ID NO: 1343200 - RNA, 19 nt, Artificial Sequence
  Description of Artificial Sequence: Synthetic oligonucleotide
  Sense strand starting at position 2850 of SEQ ID NO: 1242382
ccuaaaggagcuugauagu

SEQ ID NO: 1343201 - RNA, 19 nt, Artificial Sequence
  Description of Artificial Sequence: Synthetic oligonucleotide
  Antisense strand to SEQ ID NO: 1343200
acuaucaagcuccuuuagg

SEQ ID NO: 1343202 - RNA, 19 nt, Artificial Sequence
  Description of Artificial Sequence: Synthetic oligonucleotide
  Sense strand starting at position 2887 of SEQ ID NO: 1242382
ggugcauagaauggaauua

SEQ ID NO: 1343203 - RNA, 19 nt, Artificial Sequence
  Description of Artificial Sequence: Synthetic oligonucleotide
  Antisense strand to SEQ ID NO: 1343202
uaauuccauucuaugcacc

SEQ ID NO: 1343204 - RNA, 19 nt, Artificial Sequence
  Description of Artificial Sequence: Synthetic oligonucleotide
  Sense strand starting at position 2931 of SEQ ID NO: 1242382
acuugucaucgugaaucca

SEQ ID NO: 1343205 - RNA, 19 nt, Artificial Sequence
  Description of Artificial Sequence: Synthetic oligonucleotide
  Antisense strand to SEQ ID NO: 1343204
uggauucacgaugacaagu

SEQ ID NO: 1343206 - RNA, 19 nt, Artificial Sequence
  Description of Artificial Sequence: Synthetic oligonucleotide
  Sense strand starting at position 2940 of SEQ ID NO: 1242382
cgugaauccaugcaugaac

SEQ ID NO: 1343207 - RNA, 19 nt, Artificial Sequence
  Description of Artificial Sequence: Synthetic oligonucleotide
  Antisense strand to SEQ ID NO: 1343206
guucaugcauggauucacg

SEQ ID NO: 1343208 - RNA, 19 nt, Artificial Sequence
  Description of Artificial Sequence: Synthetic oligonucleotide
  Sense strand starting at position 3282 of SEQ ID NO: 1242382
aggaguauuagugggaguu

SEQ ID NO: 1343209 - RNA, 19 nt, Artificial Sequence
  Description of Artificial Sequence: Synthetic oligonucleotide
  Antisense strand to SEQ ID NO: 1343208
aacucccacuaauacuccu

SEQ ID NO: 1343210 - RNA, 19 nt, Artificial Sequence
  Description of Artificial Sequence: Synthetic oligonucleotide
  Sense strand starting at position 3283 of SEQ ID NO: 1242382
ggaguauuagugggaguuu

SEQ ID NO: 1343211 - RNA, 19 nt, Artificial Sequence
  Description of Artificial Sequence: Synthetic oligonucleotide
  Antisense strand to SEQ ID NO: 1343210
aaacucccacuaauacucc

SEQ ID NO: 1343212 - RNA, 19 nt, Artificial Sequence
  Description of Artificial Sequence: Synthetic oligonucleotide
  Sense strand starting at position 3338 of SEQ ID NO: 1242382
agggcacuucugggaauga

SEQ ID NO: 1343213 - RNA, 19 nt, Artificial Sequence
  Description of Artificial Sequence: Synthetic oligonucleotide
  Antisense strand to SEQ ID NO: 1343212
ucauucccagaagugcccu

SEQ ID NO: 1343214 - RNA, 19 nt, Artificial Sequence
  Description of Artificial Sequence: Synthetic oligonucleotide
  Sense strand starting at position 3354 of SEQ ID NO: 1242382
ugacccuuccugggaguuu

SEQ ID NO: 1343215 - RNA, 19 nt, Artificial Sequence
  Description of Artificial Sequence: Synthetic oligonucleotide
  Antisense strand to SEQ ID NO: 1343214
aaacucccaggaaggguca

SEQ ID NO: 1343216 - RNA, 19 nt, Artificial Sequence
  Description of Artificial Sequence: Synthetic oligonucleotide
  Sense strand starting at position 3372 of SEQ ID NO: 1242382
uaugguguugguugagaau

SEQ ID NO: 1343217 - RNA, 19 nt, Artificial Sequence
  Description of Artificial Sequence: Synthetic oligonucleotide
  Antisense strand to SEQ ID NO: 1343216
auucucaaccaacaccaua

SEQ ID NO: 1343218 - RNA, 19 nt, Artificial Sequence
  Description of Artificial Sequence: Synthetic oligonucleotide
  Sense strand starting at position 3509 of SEQ ID NO: 1242382
aggcuauucugcuuaauuu

SEQ ID NO: 1343219 - RNA, 19 nt, Artificial Sequence
  Description of Artificial Sequence: Synthetic oligonucleotide
  Antisense strand to SEQ ID NO: 1343218
aaauuaagcagaauagccu

SEQ ID NO: 1343220 - RNA, 19 nt, Artificial Sequence
  Description of Artificial Sequence: Synthetic oligonucleotide
  Sense strand starting at position 3518 of SEQ ID NO: 1242382
ugcuuaauuuggguuguuu

SEQ ID NO: 1343221 - RNA, 19 nt, Artificial Sequence
  Description of Artificial Sequence: Synthetic oligonucleotide
  Antisense strand to SEQ ID NO: 1343220
aaacaacccaaauuaagca

SEQ ID NO: 1343222 - RNA, 19 nt, Artificial Sequence
  Description of Artificial Sequence: Synthetic oligonucleotide
  Sense strand starting at position 3526 of SEQ ID NO: 1242382
uuggguuguuuccugaaac

SEQ ID NO: 1343223 - RNA, 19 nt, Artificial Sequence
  Description of Artificial Sequence: Synthetic oligonucleotide
  Antisense strand to SEQ ID NO: 1343222
guuucaggaaacaacccaa

SEQ ID NO: 1343224 - RNA, 19 nt, Artificial Sequence
  Description of Artificial Sequence: Synthetic oligonucleotide
  Sense strand starting at position 3568 of SEQ ID NO: 1242382
gcacauuaaugccugggaa

SEQ ID NO: 1343225 - RNA, 19 nt, Artificial Sequence
  Description of Artificial Sequence: Synthetic oligonucleotide
  Antisense strand to SEQ ID NO: 1343224
uucccaggcauuaaugugc

SEQ ID NO: 1343226 - RNA, 19 nt, Artificial Sequence
  Description of Artificial Sequence: Synthetic oligonucleotide
  Sense strand starting at position 3580 of SEQ ID NO: 1242382
cugggaaccuauguaacau

SEQ ID NO: 1343227 - RNA, 19 nt, Artificial Sequence
  Description of Artificial Sequence: Synthetic oligonucleotide
  Antisense strand to SEQ ID NO: 1343226
auguuacauagguucccag

SEQ ID NO: 1343228 - RNA, 19 nt, Artificial Sequence
  Description of Artificial Sequence: Synthetic oligonucleotide
  Sense strand starting at position 126 of SEQ ID NO: 1242383
cuauccuaggcucaaaguu

SEQ ID NO: 1343229 - RNA, 19 nt, Artificial Sequence
  Description of Artificial Sequence: Synthetic oligonucleotide
  Antisense strand to SEQ ID NO: 1343228
aacuuugagccuaggauag

SEQ ID NO: 1343230 - RNA, 19 nt, Artificial Sequence
  Description of Artificial Sequence: Synthetic oligonucleotide
  Sense strand starting at position 240 of SEQ ID NO: 1242383
ugagcaugugauggaugau

SEQ ID NO: 1343231 - RNA, 19 nt, Artificial Sequence
  Description of Artificial Sequence: Synthetic oligonucleotide
  Antisense strand to SEQ ID NO: 1343230
aucauccaucacaugcuca

SEQ ID NO: 1343232 - RNA, 19 nt, Artificial Sequence
  Description of Artificial Sequence: Synthetic oligonucleotide
  Sense strand starting at position 241 of SEQ ID NO: 1242383
gagcaugugauggaugauu

SEQ ID NO: 1343233 - RNA, 19 nt, Artificial Sequence
  Description of Artificial Sequence: Synthetic oligonucleotide
  Antisense strand to SEQ ID NO: 1343232
aaucauccaucacaugcuc

SEQ ID NO: 1343234 - RNA, 19 nt, Artificial Sequence
  Description of Artificial Sequence: Synthetic oligonucleotide
  Sense strand starting at position 243 of SEQ ID NO: 1242383
gcaugugauggaugauuga

SEQ ID NO: 1343235 - RNA, 19 nt, Artificial Sequence
  Description of Artificial Sequence: Synthetic oligonucleotide
  Antisense strand to SEQ ID NO: 1343234
ucaaucauccaucacaugc

SEQ ID NO: 1343236 - RNA, 19 nt, Artificial Sequence
  Description of Artificial Sequence: Synthetic oligonucleotide
  Sense strand starting at position 282 of SEQ ID NO: 1242383
cagggaaaucuaggcaauu

SEQ ID NO: 1343237 - RNA, 19 nt, Artificial Sequence
  Description of Artificial Sequence: Synthetic oligonucleotide
  Antisense strand to SEQ ID NO: 1343236
aauugccuagauuucccug

SEQ ID NO: 1343238 - RNA, 19 nt, Artificial Sequence
  Description of Artificial Sequence: Synthetic oligonucleotide
  Sense strand starting at position 376 of SEQ ID NO: 1242383
cccucuuaccuguaggaca

SEQ ID NO: 1343239 - RNA, 19 nt, Artificial Sequence
  Description of Artificial Sequence: Synthetic oligonucleotide
  Antisense strand to SEQ ID NO: 1343238
uguccuacagguaagaggg

SEQ ID NO: 1343240 - RNA, 19 nt, Artificial Sequence
  Description of Artificial Sequence: Synthetic oligonucleotide
  Sense strand starting at position 663 of SEQ ID NO: 1242383
gagcccaaaugauuaaguu

SEQ ID NO: 1343241 - RNA, 19 nt, Artificial Sequence
  Description of Artificial Sequence: Synthetic oligonucleotide
  Antisense strand to SEQ ID NO: 1343240
aacuuaaucauuugggcuc

SEQ ID NO: 1343242 - RNA, 19 nt, Artificial Sequence
  Description of Artificial Sequence: Synthetic oligonucleotide
  Sense strand starting at position 830 of SEQ ID NO: 1242383
gcuggagauguugagguuu

SEQ ID NO: 1343243 - RNA, 19 nt, Artificial Sequence
  Description of Artificial Sequence: Synthetic oligonucleotide
  Antisense strand to SEQ ID NO: 1343242
aaaccucaacaucuccagc

SEQ ID NO: 1343244 - RNA, 19 nt, Artificial Sequence
  Description of Artificial Sequence: Synthetic oligonucleotide
  Sense strand starting at position 853 of SEQ ID NO: 1242383
gggagucccucccucagaa

SEQ ID NO: 1343245 - RNA, 19 nt, Artificial Sequence
  Description of Artificial Sequence: Synthetic oligonucleotide
  Antisense strand to SEQ ID NO: 1343244
uucugagggagggacuccc

SEQ ID NO: 1343246 - RNA, 19 nt, Artificial Sequence
  Description of Artificial Sequence: Synthetic oligonucleotide
  Sense strand starting at position 1079 of SEQ ID NO: 1242383
ccagauauguauucccuca

SEQ ID NO: 1343247 - RNA, 19 nt, Artificial Sequence
  Description of Artificial Sequence: Synthetic oligonucleotide
  Antisense strand to SEQ ID NO: 1343246
ugagggaauacauaucugg

SEQ ID NO: 1343248 - RNA, 19 nt, Artificial Sequence
  Description of Artificial Sequence: Synthetic oligonucleotide
  Sense strand starting at position 1081 of SEQ ID NO: 1242383
agauauguauucccucacu

SEQ ID NO: 1343249 - RNA, 19 nt, Artificial Sequence
  Description of Artificial Sequence: Synthetic oligonucleotide
  Antisense strand to SEQ ID NO: 1343248
agugagggaauacauaucu

SEQ ID NO: 1343250 - RNA, 19 nt, Artificial Sequence
  Description of Artificial Sequence: Synthetic oligonucleotide
  Sense strand starting at position 1266 of SEQ ID NO: 1242383
gcacgagucagugaccaua

SEQ ID NO: 1343251 - RNA, 19 nt, Artificial Sequence
  Description of Artificial Sequence: Synthetic oligonucleotide
  Antisense strand to SEQ ID NO: 1343250
uauggucacugacucgugc

SEQ ID NO: 1343252 - RNA, 19 nt, Artificial Sequence
  Description of Artificial Sequence: Synthetic oligonucleotide
  Sense strand starting at position 1268 of SEQ ID NO: 1242383
acgagucagugaccauaaa

SEQ ID NO: 1343253 - RNA, 19 nt, Artificial Sequence
  Description of Artificial Sequence: Synthetic oligonucleotide
  Antisense strand to SEQ ID NO: 1343252
uuuauggucacugacucgu

SEQ ID NO: 1343254 - RNA, 19 nt, Artificial Sequence
  Description of Artificial Sequence: Synthetic oligonucleotide
  Sense strand starting at position 1410 of SEQ ID NO: 1242383
uggccuuuauaccuaggau

SEQ ID NO: 1343255 - RNA, 19 nt, Artificial Sequence
  Description of Artificial Sequence: Synthetic oligonucleotide
  Antisense strand to SEQ ID NO: 1343254
auccuagguauaaaggcca

SEQ ID NO: 1343256 - RNA, 19 nt, Artificial Sequence
  Description of Artificial Sequence: Synthetic oligonucleotide
  Sense strand starting at position 1530 of SEQ ID NO: 1242383
cuaguuacucaucaaguca

SEQ ID NO: 1343257 - RNA, 19 nt, Artificial Sequence
  Description of Artificial Sequence: Synthetic oligonucleotide
  Antisense strand to SEQ ID NO: 1343256
ugacuugaugaguaacuag

SEQ ID NO: 1343258 - RNA, 19 nt, Artificial Sequence
  Description of Artificial Sequence: Synthetic oligonucleotide
  Sense strand starting at position 1737 of SEQ ID NO: 1242383
gaaccagucugauccagag

SEQ ID NO: 1343259 - RNA, 19 nt, Artificial Sequence
  Description of Artificial Sequence: Synthetic oligonucleotide
  Antisense strand to SEQ ID NO: 1343258
cucuggaucagacugguuc

SEQ ID NO: 1343260 - RNA, 19 nt, Artificial Sequence
  Description of Artificial Sequence: Synthetic oligonucleotide
  Sense strand starting at position 1822 of SEQ ID NO: 1242383
uuacuugcgggugaugaau

SEQ ID NO: 1343261 - RNA, 19 nt, Artificial Sequence
  Description of Artificial Sequence: Synthetic oligonucleotide
  Antisense strand to SEQ ID NO: 1343260
auucaucacccgcaaguaa

SEQ ID NO: 1343262 - RNA, 19 nt, Artificial Sequence
  Description of Artificial Sequence: Synthetic oligonucleotide
  Sense strand starting at position 2500 of SEQ ID NO: 1242383
aaaucugggcccugggaau

SEQ ID NO: 1343263 - RNA, 19 nt, Artificial Sequence
  Description of Artificial Sequence: Synthetic oligonucleotide
  Antisense strand to SEQ ID NO: 1343262
auucccagggcccagauuu

SEQ ID NO: 1343264 - RNA, 19 nt, Artificial Sequence
  Description of Artificial Sequence: Synthetic oligonucleotide
  Sense strand starting at position 3034 of SEQ ID NO: 1242383
ugcagucagccucaaggau

SEQ ID NO: 1343265 - RNA, 19 nt, Artificial Sequence
  Description of Artificial Sequence: Synthetic oligonucleotide
  Antisense strand to SEQ ID NO: 1343264
auccuugaggcugacugca

SEQ ID NO: 1343266 - RNA, 19 nt, Artificial Sequence
  Description of Artificial Sequence: Synthetic oligonucleotide
  Sense strand starting at position 3137 of SEQ ID NO: 1242383
cuuacuaaauuguugcaga

SEQ ID NO: 1343267 - RNA, 19 nt, Artificial Sequence
  Description of Artificial Sequence: Synthetic oligonucleotide
  Antisense strand to SEQ ID NO: 1343266
ucugcaacaauuuaguaag

SEQ ID NO: 1343268 - RNA, 19 nt, Artificial Sequence
  Description of Artificial Sequence: Synthetic oligonucleotide
  Sense strand starting at position 3142 of SEQ ID NO: 1242383
uaaauuguugcagagaacu

SEQ ID NO: 1343269 - RNA, 19 nt, Artificial Sequence
  Description of Artificial Sequence: Synthetic oligonucleotide
  Antisense strand to SEQ ID NO: 1343268
aguucucugcaacaauuua

SEQ ID NO: 1343270 - RNA, 19 nt, Artificial Sequence
  Description of Artificial Sequence: Synthetic oligonucleotide
  Sense strand starting at position 3238 of SEQ ID NO: 1242383
agggcauaaugguugauaa

SEQ ID NO: 1343271 - RNA, 19 nt, Artificial Sequence
  Description of Artificial Sequence: Synthetic oligonucleotide
  Antisense strand to SEQ ID NO: 1343270
uuaucaaccauuaugcccu

SEQ ID NO: 1343272 - RNA, 19 nt, Artificial Sequence
  Description of Artificial Sequence: Synthetic oligonucleotide
  Sense strand starting at position 3239 of SEQ ID NO: 1242383
gggcauaaugguugauaau

SEQ ID NO: 1343273 - RNA, 19 nt, Artificial Sequence
  Description of Artificial Sequence: Synthetic oligonucleotide
  Antisense strand to SEQ ID NO: 1343272
auuaucaaccauuaugccc

SEQ ID NO: 1343274 - RNA, 19 nt, Artificial Sequence
  Description of Artificial Sequence: Synthetic oligonucleotide
  Sense strand starting at position 3300 of SEQ ID NO: 1242383
guuacaauaugacugaagu

SEQ ID NO: 1343275 - RNA, 19 nt, Artificial Sequence
  Description of Artificial Sequence: Synthetic oligonucleotide
  Antisense strand to SEQ ID NO: 1343274
acuucagucauauuguaac

SEQ ID NO: 1343276 - RNA, 19 nt, Artificial Sequence
  Description of Artificial Sequence: Synthetic oligonucleotide
  Sense strand starting at position 3390 of SEQ ID NO: 1242383
gacagagaugcuugguuuc

SEQ ID NO: 1343277 - RNA, 19 nt, Artificial Sequence
  Description of Artificial Sequence: Synthetic oligonucleotide
  Antisense strand to SEQ ID NO: 1343276
gaaaccaagcaucucuguc

SEQ ID NO: 1343278 - RNA, 19 nt, Artificial Sequence
  Description of Artificial Sequence: Synthetic oligonucleotide
  Sense strand starting at position 3538 of SEQ ID NO: 1242383
agaacuaaucaauggcgau

SEQ ID NO: 1343279 - RNA, 19 nt, Artificial Sequence
  Description of Artificial Sequence: Synthetic oligonucleotide
  Antisense strand to SEQ ID NO: 1343278
aucgccauugauuaguucu

SEQ ID NO: 1343280 - RNA, 19 nt, Artificial Sequence
  Description of Artificial Sequence: Synthetic oligonucleotide
  Sense strand starting at position 3544 of SEQ ID NO: 1242383
aaucaauggcgauagaagu

SEQ ID NO: 1343281 - RNA, 19 nt, Artificial Sequence
  Description of Artificial Sequence: Synthetic oligonucleotide
  Antisense strand to SEQ ID NO: 1343280
acuucuaucgccauugauu

SEQ ID NO: 1343282 - RNA, 19 nt, Artificial Sequence
  Description of Artificial Sequence: Synthetic oligonucleotide
  Sense strand starting at position 3562 of SEQ ID NO: 1242383
uuaagauagugguuaccuu

SEQ ID NO: 1343283 - RNA, 19 nt, Artificial Sequence
  Description of Artificial Sequence: Synthetic oligonucleotide
  Antisense strand to SEQ ID NO: 1343282
aagguaaccacuaucuuaa

SEQ ID NO: 1343284 - RNA, 19 nt, Artificial Sequence
  Description of Artificial Sequence: Synthetic oligonucleotide
  Sense strand starting at position 3658 of SEQ ID NO: 1242383
uguggauugagugaguuga

SEQ ID NO: 1343285 - RNA, 19 nt, Artificial Sequence
  Description of Artificial Sequence: Synthetic oligonucleotide
  Antisense strand to SEQ ID NO: 1343284
ucaacucacucaauccaca

SEQ ID NO: 1343286 - RNA, 19 nt, Artificial Sequence
  Description of Artificial Sequence: Synthetic oligonucleotide
  Sense strand starting at position 3660 of SEQ ID NO: 1242383
uggauugagugaguugagu

SEQ ID NO: 1343287 - RNA, 19 nt, Artificial Sequence
  Description of Artificial Sequence: Synthetic oligonucleotide
  Antisense strand to SEQ ID NO: 1343286
acucaacucacucaaucca

SEQ ID NO: 1343288 - RNA, 19 nt, Artificial Sequence
  Description of Artificial Sequence: Synthetic oligonucleotide
  Sense strand starting at position 3662 of SEQ ID NO: 1242383
gauugagugaguugaguga

SEQ ID NO: 1343289 - RNA, 19 nt, Artificial Sequence
  Description of Artificial Sequence: Synthetic oligonucleotide
  Antisense strand to SEQ ID NO: 1343288
ucacucaacucacucaauc

SEQ ID NO: 1343290 - RNA, 19 nt, Artificial Sequence
  Description of Artificial Sequence: Synthetic oligonucleotide
  Sense strand starting at position 3666 of SEQ ID NO: 1242383
gagugaguugagugagagu

SEQ ID NO: 1343291 - RNA, 19 nt, Artificial Sequence
  Description of Artificial Sequence: Synthetic oligonucleotide
  Antisense strand to SEQ ID NO: 1343290
acucucacucaacucacuc

SEQ ID NO: 1343292 - RNA, 19 nt, Artificial Sequence
  Description of Artificial Sequence: Synthetic oligonucleotide
  Sense strand starting at position 3772 of SEQ ID NO: 1242383
cagccagauuuccuugguu

SEQ ID NO: 1343293 - RNA, 19 nt, Artificial Sequence
  Description of Artificial Sequence: Synthetic oligonucleotide
  Antisense strand to SEQ ID NO: 1343292
aaccaaggaaaucuggcug

SEQ ID NO: 1343294 - RNA, 19 nt, Artificial Sequence
  Description of Artificial Sequence: Synthetic oligonucleotide
  Sense strand starting at position 3843 of SEQ ID NO: 1242383
ugcuguuaggaagguuaga

SEQ ID NO: 1343295 - RNA, 19 nt, Artificial Sequence
  Description of Artificial Sequence: Synthetic oligonucleotide
  Antisense strand to SEQ ID NO: 1343294
ucuaaccuuccuaacagca

SEQ ID NO: 1343296 - RNA, 19 nt, Artificial Sequence
  Description of Artificial Sequence: Synthetic oligonucleotide
  Sense strand starting at position 3854 of SEQ ID NO: 1242383
agguuagauuaguuaaauc

SEQ ID NO: 1343297 - RNA, 19 nt, Artificial Sequence
  Description of Artificial Sequence: Synthetic oligonucleotide
  Antisense strand to SEQ ID NO: 1343296
gauuuaacuaaucuaaccu

SEQ ID NO: 1343298 - RNA, 19 nt, Artificial Sequence
  Description of Artificial Sequence: Synthetic oligonucleotide
  Sense strand starting at position 3874 of SEQ ID NO: 1242383
uuagaacaguguguggaau

SEQ ID NO: 1343299 - RNA, 19 nt, Artificial Sequence
  Description of Artificial Sequence: Synthetic oligonucleotide
  Antisense strand to SEQ ID NO: 1343298
auuccacacacuguucuaa

SEQ ID NO: 1343300 - RNA, 19 nt, Artificial Sequence
  Description of Artificial Sequence: Synthetic oligonucleotide
  Sense strand starting at position 3875 of SEQ ID NO: 1242383
uagaacaguguguggaaua

SEQ ID NO: 1343301 - RNA, 19 nt, Artificial Sequence
  Description of Artificial Sequence: Synthetic oligonucleotide
  Antisense strand to SEQ ID NO: 1343300
uauuccacacacuguucua

SEQ ID NO: 1343302 - RNA, 19 nt, Artificial Sequence
  Description of Artificial Sequence: Synthetic oligonucleotide
  Sense strand starting at position 3880 of SEQ ID NO: 1242383
caguguguggaauaacaua

SEQ ID NO: 1343303 - RNA, 19 nt, Artificial Sequence
  Description of Artificial Sequence: Synthetic oligonucleotide
  Antisense strand to SEQ ID NO: 1343302
uauguuauuccacacacug

SEQ ID NO: 1343304 - RNA, 19 nt, Artificial Sequence
  Description of Artificial Sequence: Synthetic oligonucleotide
  Sense strand starting at position 3900 of SEQ ID NO: 1242383
ugacuaggauuagcuauua

SEQ ID NO: 1343305 - RNA, 19 nt, Artificial Sequence
  Description of Artificial Sequence: Synthetic oligonucleotide
  Antisense strand to SEQ ID NO: 1343304
uaauagcuaauccuaguca

SEQ ID NO: 1343306 - RNA, 19 nt, Artificial Sequence
  Description of Artificial Sequence: Synthetic oligonucleotide
  Sense strand starting at position 3905 of SEQ ID NO: 1242383
aggauuagcuauuaauuug

SEQ ID NO: 1343307 - RNA, 19 nt, Artificial Sequence
  Description of Artificial Sequence: Synthetic oligonucleotide
  Antisense strand to SEQ ID NO: 1343306
caaauuaauagcuaauccu

SEQ ID NO: 1343308 - RNA, 19 nt, Artificial Sequence
  Description of Artificial Sequence: Synthetic oligonucleotide
  Sense strand starting at position 43 of SEQ ID NO: 1242384
uugaguggucacugcucaa

SEQ ID NO: 1343309 - RNA, 19 nt, Artificial Sequence
  Description of Artificial Sequence: Synthetic oligonucleotide
  Antisense strand to SEQ ID NO: 1343308
uugagcagugaccacucaa

SEQ ID NO: 1343310 - RNA, 19 nt, Artificial Sequence
  Description of Artificial Sequence: Synthetic oligonucleotide
  Sense strand starting at position 46 of SEQ ID NO: 1242384
aguggucacugcucaacaa

SEQ ID NO: 1343311 - RNA, 19 nt, Artificial Sequence
  Description of Artificial Sequence: Synthetic oligonucleotide
  Antisense strand to SEQ ID NO: 1343310
uuguugagcagugaccacu

SEQ ID NO: 1343312 - RNA, 19 nt, Artificial Sequence
  Description of Artificial Sequence: Synthetic oligonucleotide
  Sense strand starting at position 47 of SEQ ID NO: 1242384
guggucacugcucaacaau

SEQ ID NO: 1343313 - RNA, 19 nt, Artificial Sequence
  Description of Artificial Sequence: Synthetic oligonucleotide
  Antisense strand to SEQ ID NO: 1343312
auuguugagcagugaccac

SEQ ID NO: 1343314 - RNA, 19 nt, Artificial Sequence
  Description of Artificial Sequence: Synthetic oligonucleotide
  Sense strand starting at position 71 of SEQ ID NO: 1242384
ggcuaaacauugucccuaa

SEQ ID NO: 1343315 - RNA, 19 nt, Artificial Sequence
  Description of Artificial Sequence: Synthetic oligonucleotide
  Antisense strand to SEQ ID NO: 1343314
uuagggacaauguuuagcc

SEQ ID NO: 1343316 - RNA, 19 nt, Artificial Sequence
  Description of Artificial Sequence: Synthetic oligonucleotide
  Sense strand starting at position 100 of SEQ ID NO: 1242384
ugucuagagucugccuuua

SEQ ID NO: 1343317 - RNA, 19 nt, Artificial Sequence
  Description of Artificial Sequence: Synthetic oligonucleotide
  Antisense strand to SEQ ID NO: 1343316
uaaaggcagacucuagaca

SEQ ID NO: 1343318 - RNA, 19 nt, Artificial Sequence
  Description of Artificial Sequence: Synthetic oligonucleotide
  Sense strand starting at position 102 of SEQ ID NO: 1242384
ucuagagucugccuuuaac

SEQ ID NO: 1343319 - RNA, 19 nt, Artificial Sequence
  Description of Artificial Sequence: Synthetic oligonucleotide
  Antisense strand to SEQ ID NO: 1343318
guuaaaggcagacucuaga

SEQ ID NO: 1343320 - RNA, 19 nt, Artificial Sequence
  Description of Artificial Sequence: Synthetic oligonucleotide
  Sense strand starting at position 166 of SEQ ID NO: 1242384
cuccgcuuaggcuggaaau

SEQ ID NO: 1343321 - RNA, 19 nt, Artificial Sequence
  Description of Artificial Sequence: Synthetic oligonucleotide
  Antisense strand to SEQ ID NO: 1343320
auuuccagccuaagcggag

SEQ ID NO: 1343322 - RNA, 19 nt, Artificial Sequence
  Description of Artificial Sequence: Synthetic oligonucleotide
  Sense strand starting at position 168 of SEQ ID NO: 1242384
ccgcuuaggcuggaaauca

SEQ ID NO: 1343323 - RNA, 19 nt, Artificial Sequence
  Description of Artificial Sequence: Synthetic oligonucleotide
  Antisense strand to SEQ ID NO: 1343322
ugauuuccagccuaagcgg

SEQ ID NO: 1343324 - RNA, 19 nt, Artificial Sequence
  Description of Artificial Sequence: Synthetic oligonucleotide
  Sense strand starting at position 255 of SEQ ID NO: 1242384
aggccagugacaugugaau

SEQ ID NO: 1343325 - RNA, 19 nt, Artificial Sequence
  Description of Artificial Sequence: Synthetic oligonucleotide
  Antisense strand to SEQ ID NO: 1343324
auucacaugucacuggccu

SEQ ID NO: 1343326 - RNA, 19 nt, Artificial Sequence
  Description of Artificial Sequence: Synthetic oligonucleotide
  Sense strand starting at position 257 of SEQ ID NO: 1242384
gccagugacaugugaaugu

SEQ ID NO: 1343327 - RNA, 19 nt, Artificial Sequence
  Description of Artificial Sequence: Synthetic oligonucleotide
  Antisense strand to SEQ ID NO: 1343326
acauucacaugucacuggc

SEQ ID NO: 1343328 - RNA, 19 nt, Artificial Sequence
  Description of Artificial Sequence: Synthetic oligonucleotide
  Sense strand starting at position 261 of SEQ ID NO: 1242384
gugacaugugaauguccca

SEQ ID NO: 1343329 - RNA, 19 nt, Artificial Sequence
  Description of Artificial Sequence: Synthetic oligonucleotide
  Antisense strand to SEQ ID NO: 1343328
ugggacauucacaugucac

SEQ ID NO: 1343330 - RNA, 19 nt, Artificial Sequence
  Description of Artificial Sequence: Synthetic oligonucleotide
  Sense strand starting at position 492 of SEQ ID NO: 1242384
agaaucuucuaauugcagu

SEQ ID NO: 1343331 - RNA, 19 nt, Artificial Sequence
  Description of Artificial Sequence: Synthetic oligonucleotide
  Antisense strand to SEQ ID NO: 1343330
acugcaauuagaagauucu

SEQ ID NO: 1343332 - RNA, 19 nt, Artificial Sequence
  Description of Artificial Sequence: Synthetic oligonucleotide
  Sense strand starting at position 521 of SEQ ID NO: 1242384
gggccaauuugugggagaa

SEQ ID NO: 1343333 - RNA, 19 nt, Artificial Sequence
  Description of Artificial Sequence: Synthetic oligonucleotide
  Antisense strand to SEQ ID NO: 1343332
uucucccacaaauuggccc

SEQ ID NO: 1343334 - RNA, 19 nt, Artificial Sequence
  Description of Artificial Sequence: Synthetic oligonucleotide
  Sense strand starting at position 560 of SEQ ID NO: 1242384
aaauguggacguugaauga

SEQ ID NO: 1343335 - RNA, 19 nt, Artificial Sequence
  Description of Artificial Sequence: Synthetic oligonucleotide
  Antisense strand to SEQ ID NO: 1343334
ucauucaacguccacauuu

SEQ ID NO: 1343336 - RNA, 19 nt, Artificial Sequence
  Description of Artificial Sequence: Synthetic oligonucleotide
  Sense strand starting at position 814 of SEQ ID NO: 1242384
ccuguuuccucugcucaga

SEQ ID NO: 1343337 - RNA, 19 nt, Artificial Sequence
  Description of Artificial Sequence: Synthetic oligonucleotide
  Antisense strand to SEQ ID NO: 1343336
ucugagcagaggaaacagg

SEQ ID NO: 1343338 - RNA, 19 nt, Artificial Sequence
  Description of Artificial Sequence: Synthetic oligonucleotide
  Sense strand starting at position 938 of SEQ ID NO: 1242384
cuguguuauuugucauccu

SEQ ID NO: 1343339 - RNA, 19 nt, Artificial Sequence
  Description of Artificial Sequence: Synthetic oligonucleotide
  Antisense strand to SEQ ID NO: 1343338
aggaugacaaauaacacag

SEQ ID NO: 1343340 - RNA, 19 nt, Artificial Sequence
  Description of Artificial Sequence: Synthetic oligonucleotide
  Sense strand starting at position 1403 of SEQ ID NO: 1242384
cgcagaaucucuccgauuu

SEQ ID NO: 1343341 - RNA, 19 nt, Artificial Sequence
  Description of Artificial Sequence: Synthetic oligonucleotide
  Antisense strand to SEQ ID NO: 1343340
aaaucggagagauucugcg

SEQ ID NO: 1343342 - RNA, 19 nt, Artificial Sequence
  Description of Artificial Sequence: Synthetic oligonucleotide
  Sense strand starting at position 2095 of SEQ ID NO: 1242384
uagaucuagcucugagauu

SEQ ID NO: 1343343 - RNA, 19 nt, Artificial Sequence
  Description of Artificial Sequence: Synthetic oligonucleotide
  Antisense strand to SEQ ID NO: 1343342
aaucucagagcuagaucua

SEQ ID NO: 1343344 - RNA, 19 nt, Artificial Sequence
  Description of Artificial Sequence: Synthetic oligonucleotide
  Sense strand starting at position 2215 of SEQ ID NO: 1242384
cucgguguauguuuaagaa

SEQ ID NO: 1343345 - RNA, 19 nt, Artificial Sequence
  Description of Artificial Sequence: Synthetic oligonucleotide
  Antisense strand to SEQ ID NO: 1343344
uucuuaaacauacaccgag

SEQ ID NO: 1343346 - RNA, 19 nt, Artificial Sequence
  Description of Artificial Sequence: Synthetic oligonucleotide
  Sense strand starting at position 2352 of SEQ ID NO: 1242384
ggugcaaucugcucaaaug

SEQ ID NO: 1343347 - RNA, 19 nt, Artificial Sequence
  Description of Artificial Sequence: Synthetic oligonucleotide
  Antisense strand to SEQ ID NO: 1343346
cauuugagcagauugcacc

SEQ ID NO: 1343348 - RNA, 19 nt, Artificial Sequence
  Description of Artificial Sequence: Synthetic oligonucleotide
  Sense strand starting at position 2353 of SEQ ID NO: 1242384
gugcaaucugcucaaauga

SEQ ID NO: 1343349 - RNA, 19 nt, Artificial Sequence
  Description of Artificial Sequence: Synthetic oligonucleotide
  Antisense strand to SEQ ID NO: 1343348
ucauuugagcagauugcac

SEQ ID NO: 1343350 - RNA, 19 nt, Artificial Sequence
  Description of Artificial Sequence: Synthetic oligonucleotide
  Sense strand starting at position 2382 of SEQ ID NO: 1242384
cugggagcccuagaguuau

SEQ ID NO: 1343351 - RNA, 19 nt, Artificial Sequence
  Description of Artificial Sequence: Synthetic oligonucleotide
  Antisense strand to SEQ ID NO: 1343350
auaacucuagggcucccag

SEQ ID NO: 1343352 - RNA, 19 nt, Artificial Sequence
  Description of Artificial Sequence: Synthetic oligonucleotide
  Sense strand starting at position 2492 of SEQ ID NO: 1242384
uaaagagcucguugcauau

SEQ ID NO: 1343353 - RNA, 19 nt, Artificial Sequence
  Description of Artificial Sequence: Synthetic oligonucleotide
  Antisense strand to SEQ ID NO: 1343352
auaugcaacgagcucuuua

SEQ ID NO: 1343354 - RNA, 19 nt, Artificial Sequence
  Description of Artificial Sequence: Synthetic oligonucleotide
  Sense strand starting at position 2502 of SEQ ID NO: 1242384
guugcauauccggcggagu

SEQ ID NO: 1343355 - RNA, 19 nt, Artificial Sequence
  Description of Artificial Sequence: Synthetic oligonucleotide
  Antisense strand to SEQ ID NO: 1343354
acuccgccggauaugcaac

SEQ ID NO: 1343356 - RNA, 19 nt, Artificial Sequence
  Description of Artificial Sequence: Synthetic oligonucleotide
  Sense strand starting at position 2561 of SEQ ID NO: 1242384
agcugugucaguuacagag

SEQ ID NO: 1343357 - RNA, 19 nt, Artificial Sequence
  Description of Artificial Sequence: Synthetic oligonucleotide
  Antisense strand to SEQ ID NO: 1343356
cucuguaacugacacagcu

SEQ ID NO: 1343358 - RNA, 19 nt, Artificial Sequence
  Description of Artificial Sequence: Synthetic oligonucleotide
  Sense strand starting at position 2640 of SEQ ID NO: 1242384
ggagcauugcguuaaccuc

SEQ ID NO: 1343359 - RNA, 19 nt, Artificial Sequence
  Description of Artificial Sequence: Synthetic oligonucleotide
  Antisense strand to SEQ ID NO: 1343358
gagguuaacgcaaugcucc

SEQ ID NO: 1343360 - RNA, 19 nt, Artificial Sequence
  Description of Artificial Sequence: Synthetic oligonucleotide
  Sense strand starting at position 2693 of SEQ ID NO: 1242384
cgcugaaucuggcuuccaa

SEQ ID NO: 1343361 - RNA, 19 nt, Artificial Sequence
  Description of Artificial Sequence: Synthetic oligonucleotide
  Antisense strand to SEQ ID NO: 1343360
uuggaagccagauucagcg

SEQ ID NO: 1343362 - RNA, 19 nt, Artificial Sequence
  Description of Artificial Sequence: Synthetic oligonucleotide
  Sense strand starting at position 2707 of SEQ ID NO: 1242384
uccaaaggucccgaggauu

SEQ ID NO: 1343363 - RNA, 19 nt, Artificial Sequence
  Description of Artificial Sequence: Synthetic oligonucleotide
  Antisense strand to SEQ ID NO: 1343362
aauccucgggaccuuugga

SEQ ID NO: 1343364 - RNA, 19 nt, Artificial Sequence
  Description of Artificial Sequence: Synthetic oligonucleotide
  Sense strand starting at position 2734 of SEQ ID NO: 1242384
uagaauauauguuuggcaa

SEQ ID NO: 1343365 - RNA, 19 nt, Artificial Sequence
  Description of Artificial Sequence: Synthetic oligonucleotide
  Antisense strand to SEQ ID NO: 1343364
uugccaaacauauauucua

SEQ ID NO: 1343366 - RNA, 19 nt, Artificial Sequence
  Description of Artificial Sequence: Synthetic oligonucleotide
  Sense strand starting at position 2735 of SEQ ID NO: 1242384
agaauauauguuuggcaac

SEQ ID NO: 1343367 - RNA, 19 nt, Artificial Sequence
  Description of Artificial Sequence: Synthetic oligonucleotide
  Antisense strand to SEQ ID NO: 1343366
guugccaaacauauauucu

SEQ ID NO: 1343368 - RNA, 19 nt, Artificial Sequence
  Description of Artificial Sequence: Synthetic oligonucleotide
  Sense strand starting at position 3049 of SEQ ID NO: 1242384
aagcauguagacuggaaua

SEQ ID NO: 1343369 - RNA, 19 nt, Artificial Sequence
  Description of Artificial Sequence: Synthetic oligonucleotide
  Antisense strand to SEQ ID NO: 1343368
uauuccagucuacaugcuu

SEQ ID NO: 1343370 - RNA, 19 nt, Artificial Sequence
  Description of Artificial Sequence: Synthetic oligonucleotide
  Sense strand starting at position 3072 of SEQ ID NO: 1242384
guguuccuccucugauacu

SEQ ID NO: 1343371 - RNA, 19 nt, Artificial Sequence
  Description of Artificial Sequence: Synthetic oligonucleotide
  Antisense strand to SEQ ID NO: 1343370
aguaucagaggaggaacac

SEQ ID NO: 1343372 - RNA, 19 nt, Artificial Sequence
  Description of Artificial Sequence: Synthetic oligonucleotide
  Sense strand starting at position 3112 of SEQ ID NO: 1242384
aguggagaucgugggauaa

SEQ ID NO: 1343373 - RNA, 19 nt, Artificial Sequence
  Description of Artificial Sequence: Synthetic oligonucleotide
  Antisense strand to SEQ ID NO: 1343372
uuaucccacgaucuccacu

SEQ ID NO: 1343374 - RNA, 19 nt, Artificial Sequence
  Description of Artificial Sequence: Synthetic oligonucleotide
  Sense strand starting at position 3134 of SEQ ID NO: 1242384
cagccagucagaggguuaa

SEQ ID NO: 1343375 - RNA, 19 nt, Artificial Sequence
  Description of Artificial Sequence: Synthetic oligonucleotide
  Antisense strand to SEQ ID NO: 1343374
uuaacccucugacuggcug

SEQ ID NO: 1343376 - RNA, 19 nt, Artificial Sequence
  Description of Artificial Sequence: Synthetic oligonucleotide
  Sense strand starting at position 3147 of SEQ ID NO: 1242384
gguuaaugagcaugacuug

SEQ ID NO: 1343377 - RNA, 19 nt, Artificial Sequence
  Description of Artificial Sequence: Synthetic oligonucleotide
  Antisense strand to SEQ ID NO: 1343376
caagucaugcucauuaacc

SEQ ID NO: 1343378 - RNA, 19 nt, Artificial Sequence
  Description of Artificial Sequence: Synthetic oligonucleotide
  Sense strand starting at position 3156 of SEQ ID NO: 1242384
gcaugacuugggugagugu

SEQ ID NO: 1343379 - RNA, 19 nt, Artificial Sequence
  Description of Artificial Sequence: Synthetic oligonucleotide
  Antisense strand to SEQ ID NO: 1343378
acacucacccaagucaugc

SEQ ID NO: 1343380 - RNA, 19 nt, Artificial Sequence
  Description of Artificial Sequence: Synthetic oligonucleotide
  Sense strand starting at position 3418 of SEQ ID NO: 1242384
ccaugcuccagagagguuu

SEQ ID NO: 1343381 - RNA, 19 nt, Artificial Sequence
  Description of Artificial Sequence: Synthetic oligonucleotide
  Antisense strand to SEQ ID NO: 1343380
aaaccucucuggagcaugg

SEQ ID NO: 1343382 - RNA, 19 nt, Artificial Sequence
  Description of Artificial Sequence: Synthetic oligonucleotide
  Sense strand starting at position 3538 of SEQ ID NO: 1242384
cuccacagucguuaguaca

SEQ ID NO: 1343383 - RNA, 19 nt, Artificial Sequence
  Description of Artificial Sequence: Synthetic oligonucleotide
  Antisense strand to SEQ ID NO: 1343382
uguacuaacgacuguggag

SEQ ID NO: 1343384 - RNA, 19 nt, Artificial Sequence
  Description of Artificial Sequence: Synthetic oligonucleotide
  Sense strand starting at position 3709 of SEQ ID NO: 1242384
auagauuuauuggagguuu

SEQ ID NO: 1343385 - RNA, 19 nt, Artificial Sequence
  Description of Artificial Sequence: Synthetic oligonucleotide
  Antisense strand to SEQ ID NO: 1343384
aaaccuccaauaaaucuau

SEQ ID NO: 1343386 - RNA, 19 nt, Artificial Sequence
  Description of Artificial Sequence: Synthetic oligonucleotide
  Sense strand starting at position 3762 of SEQ ID NO: 1242384
gguacucaucauugcuaca

SEQ ID NO: 1343387 - RNA, 19 nt, Artificial Sequence
  Description of Artificial Sequence: Synthetic oligonucleotide
  Antisense strand to SEQ ID NO: 1343386
uguagcaaugaugaguacc

SEQ ID NO: 1343388 - RNA, 19 nt, Artificial Sequence
  Description of Artificial Sequence: Synthetic oligonucleotide
  Sense strand starting at position 127 of SEQ ID NO: 1242385
ucaucuucuccugaggguu

SEQ ID NO: 1343389 - RNA, 19 nt, Artificial Sequence
  Description of Artificial Sequence: Synthetic oligonucleotide
  Antisense strand to SEQ ID NO: 1343388
aacccucaggagaagauga

SEQ ID NO: 1343390 - RNA, 19 nt, Artificial Sequence
  Description of Artificial Sequence: Synthetic oligonucleotide
  Sense strand starting at position 243 of SEQ ID NO: 1242385
uaguauuucgcauguauuc

SEQ ID NO: 1343391 - RNA, 19 nt, Artificial Sequence
  Description of Artificial Sequence: Synthetic oligonucleotide
  Antisense strand to SEQ ID NO: 1343390
gaauacaugcgaaauacua

SEQ ID NO: 1343392 - RNA, 19 nt, Artificial Sequence
  Description of Artificial Sequence: Synthetic oligonucleotide
  Sense strand starting at position 271 of SEQ ID NO: 1242385
auugaaaucugagcugcaa

SEQ ID NO: 1343393 - RNA, 19 nt, Artificial Sequence
  Description of Artificial Sequence: Synthetic oligonucleotide
  Antisense strand to SEQ ID NO: 1343392
uugcagcucagauuucaau

SEQ ID NO: 1343394 - RNA, 19 nt, Artificial Sequence
  Description of Artificial Sequence: Synthetic oligonucleotide
  Sense strand starting at position 317 of SEQ ID NO: 1242385
ccacaucuugacugagcaa

SEQ ID NO: 1343395 - RNA, 19 nt, Artificial Sequence
  Description of Artificial Sequence: Synthetic oligonucleotide
  Antisense strand to SEQ ID NO: 1343394
uugcucagucaagaugugg

SEQ ID NO: 1343396 - RNA, 19 nt, Artificial Sequence
  Description of Artificial Sequence: Synthetic oligonucleotide
  Sense strand starting at position 411 of SEQ ID NO: 1242385
caguaaaggcaauaaaugu

SEQ ID NO: 1343397 - RNA, 19 nt, Artificial Sequence
  Description of Artificial Sequence: Synthetic oligonucleotide
  Antisense strand to SEQ ID NO: 1343396
acauuuauugccuuuacug

SEQ ID NO: 1343398 - RNA, 19 nt, Artificial Sequence
  Description of Artificial Sequence: Synthetic oligonucleotide
  Sense strand starting at position 484 of SEQ ID NO: 1242385
uugagaaguguuuguuaaa

SEQ ID NO: 1343399 - RNA, 19 nt, Artificial Sequence
  Description of Artificial Sequence: Synthetic oligonucleotide
  Antisense strand to SEQ ID NO: 1343398
uuuaacaaacacuucucaa

SEQ ID NO: 1343400 - RNA, 19 nt, Artificial Sequence
  Description of Artificial Sequence: Synthetic oligonucleotide
  Sense strand starting at position 485 of SEQ ID NO: 1242385
ugagaaguguuuguuaaau

SEQ ID NO: 1343401 - RNA, 19 nt, Artificial Sequence
  Description of Artificial Sequence: Synthetic oligonucleotide
  Antisense strand to SEQ ID NO: 1343400
auuuaacaaacacuucuca

SEQ ID NO: 1343402 - RNA, 19 nt, Artificial Sequence
  Description of Artificial Sequence: Synthetic oligonucleotide
  Sense strand starting at position 552 of SEQ ID NO: 1242385
guuucuacagcacagaaau

SEQ ID NO: 1343403 - RNA, 19 nt, Artificial Sequence
  Description of Artificial Sequence: Synthetic oligonucleotide
  Antisense strand to SEQ ID NO: 1343402
auuucugugcuguagaaac

SEQ ID NO: 1343404 - RNA, 19 nt, Artificial Sequence
  Description of Artificial Sequence: Synthetic oligonucleotide
  Sense strand starting at position 636 of SEQ ID NO: 1242385
uuugaaguccuugacucuu

SEQ ID NO: 1343405 - RNA, 19 nt, Artificial Sequence
  Description of Artificial Sequence: Synthetic oligonucleotide
  Antisense strand to SEQ ID NO: 1343404
aagagucaaggacuucaaa

SEQ ID NO: 1343406 - RNA, 19 nt, Artificial Sequence
  Description of Artificial Sequence: Synthetic oligonucleotide
  Sense strand starting at position 696 of SEQ ID NO: 1242385
aucagcugccucuaucaga

SEQ ID NO: 1343407 - RNA, 19 nt, Artificial Sequence
  Description of Artificial Sequence: Synthetic oligonucleotide
  Antisense strand to SEQ ID NO: 1343406
ucugauagaggcagcugau

SEQ ID NO: 1343408 - RNA, 19 nt, Artificial Sequence
  Description of Artificial Sequence: Synthetic oligonucleotide
  Sense strand starting at position 795 of SEQ ID NO: 1242385
gccugacuccaguacaagu

SEQ ID NO: 1343409 - RNA, 19 nt, Artificial Sequence
  Description of Artificial Sequence: Synthetic oligonucleotide
  Antisense strand to SEQ ID NO: 1343408
acuuguacuggagucaggc

SEQ ID NO: 1343410 - RNA, 19 nt, Artificial Sequence
  Description of Artificial Sequence: Synthetic oligonucleotide
  Sense strand starting at position 806 of SEQ ID NO: 1242385
guacaagucagauaguugu

SEQ ID NO: 1343411 - RNA, 19 nt, Artificial Sequence
  Description of Artificial Sequence: Synthetic oligonucleotide
  Antisense strand to SEQ ID NO: 1343410
acaacuaucugacuuguac

SEQ ID NO: 1343412 - RNA, 19 nt, Artificial Sequence
  Description of Artificial Sequence: Synthetic oligonucleotide
  Sense strand starting at position 814 of SEQ ID NO: 1242385
cagauaguuguagggacau

SEQ ID NO: 1343413 - RNA, 19 nt, Artificial Sequence
  Description of Artificial Sequence: Synthetic oligonucleotide
  Antisense strand to SEQ ID NO: 1343412
augucccuacaacuaucug

SEQ ID NO: 1343414 - RNA, 19 nt, Artificial Sequence
  Description of Artificial Sequence: Synthetic oligonucleotide
  Sense strand starting at position 951 of SEQ ID NO: 1242385
gaaguucuuagagggcaga

SEQ ID NO: 1343415 - RNA, 19 nt, Artificial Sequence
  Description of Artificial Sequence: Synthetic oligonucleotide
  Antisense strand to SEQ ID NO: 1343414
ucugcccucuaagaacuuc

SEQ ID NO: 1343416 - RNA, 19 nt, Artificial Sequence
  Description of Artificial Sequence: Synthetic oligonucleotide
  Sense strand starting at position 2047 of SEQ ID NO: 1242385
gggcaaaugacuggccuau

SEQ ID NO: 1343417 - RNA, 19 nt, Artificial Sequence
  Description of Artificial Sequence: Synthetic oligonucleotide
  Antisense strand to SEQ ID NO: 1343416
auaggccagucauuugccc

SEQ ID NO: 1343418 - RNA, 19 nt, Artificial Sequence
  Description of Artificial Sequence: Synthetic oligonucleotide
  Sense strand starting at position 2049 of SEQ ID NO: 1242385
gcaaaugacuggccuauua

SEQ ID NO: 1343419 - RNA, 19 nt, Artificial Sequence
  Description of Artificial Sequence: Synthetic oligonucleotide
  Antisense strand to SEQ ID NO: 1343418
uaauaggccagucauuugc

SEQ ID NO: 1343420 - RNA, 19 nt, Artificial Sequence
  Description of Artificial Sequence: Synthetic oligonucleotide
  Sense strand starting at position 2376 of SEQ ID NO: 1242385
cugagaugugcaggaugau

SEQ ID NO: 1343421 - RNA, 19 nt, Artificial Sequence
  Description of Artificial Sequence: Synthetic oligonucleotide
  Antisense strand to SEQ ID NO: 1343420
aucauccugcacaucucag

SEQ ID NO: 1343422 - RNA, 19 nt, Artificial Sequence
  Description of Artificial Sequence: Synthetic oligonucleotide
  Sense strand starting at position 2388 of SEQ ID NO: 1242385
ggaugauacgcagcguguu

SEQ ID NO: 1343423 - RNA, 19 nt, Artificial Sequence
  Description of Artificial Sequence: Synthetic oligonucleotide
  Antisense strand to SEQ ID NO: 1343422
aacacgcugcguaucaucc

SEQ ID NO: 1343424 - RNA, 19 nt, Artificial Sequence
  Description of Artificial Sequence: Synthetic oligonucleotide
  Sense strand starting at position 2393 of SEQ ID NO: 1242385
auacgcagcguguugaaau

SEQ ID NO: 1343425 - RNA, 19 nt, Artificial Sequence
  Description of Artificial Sequence: Synthetic oligonucleotide
  Antisense strand to SEQ ID NO: 1343424
auuucaacacgcugcguau

SEQ ID NO: 1343426 - RNA, 19 nt, Artificial Sequence
  Description of Artificial Sequence: Synthetic oligonucleotide
  Sense strand starting at position 2416 of SEQ ID NO: 1242385
augaaugaacuuugccgaa

SEQ ID NO: 1343427 - RNA, 19 nt, Artificial Sequence
  Description of Artificial Sequence: Synthetic oligonucleotide
  Antisense strand to SEQ ID NO: 1343426
uucggcaaaguucauucau

SEQ ID NO: 1343428 - RNA, 19 nt, Artificial Sequence
  Description of Artificial Sequence: Synthetic oligonucleotide
  Sense strand starting at position 2418 of SEQ ID NO: 1242385
gaaugaacuuugccgaaug

SEQ ID NO: 1343429 - RNA, 19 nt, Artificial Sequence
  Description of Artificial Sequence: Synthetic oligonucleotide
  Antisense strand to SEQ ID NO: 1343428
cauucggcaaaguucauuc

SEQ ID NO: 1343430 - RNA, 19 nt, Artificial Sequence
  Description of Artificial Sequence: Synthetic oligonucleotide
  Sense strand starting at position 2420 of SEQ ID NO: 1242385
augaacuuugccgaaugaa

SEQ ID NO: 1343431 - RNA, 19 nt, Artificial Sequence
  Description of Artificial Sequence: Synthetic oligonucleotide
  Antisense strand to SEQ ID NO: 1343430
uucauucggcaaaguucau

SEQ ID NO: 1343432 - RNA, 19 nt, Artificial Sequence
  Description of Artificial Sequence: Synthetic oligonucleotide
  Sense strand starting at position 2433 of SEQ ID NO: 1242385
aaugaauuucucugugugu

SEQ ID NO: 1343433 - RNA, 19 nt, Artificial Sequence
  Description of Artificial Sequence: Synthetic oligonucleotide
  Antisense strand to SEQ ID NO: 1343432
acacacagagaaauucauu

SEQ ID NO: 1343434 - RNA, 19 nt, Artificial Sequence
  Description of Artificial Sequence: Synthetic oligonucleotide
  Sense strand starting at position 2458 of SEQ ID NO: 1242385
gcuaauaaaucugugaaug

SEQ ID NO: 1343435 - RNA, 19 nt, Artificial Sequence
  Description of Artificial Sequence: Synthetic oligonucleotide
  Antisense strand to SEQ ID NO: 1343434
cauucacagauuuauuagc

SEQ ID NO: 1343436 - RNA, 19 nt, Artificial Sequence
  Description of Artificial Sequence: Synthetic oligonucleotide
  Sense strand starting at position 2469 of SEQ ID NO: 1242385
ugugaaugaagcugagaau

SEQ ID NO: 1343437 - RNA, 19 nt, Artificial Sequence
  Description of Artificial Sequence: Synthetic oligonucleotide
  Antisense strand to SEQ ID NO: 1343436
auucucagcuucauucaca

SEQ ID NO: 1343438 - RNA, 19 nt, Artificial Sequence
  Description of Artificial Sequence: Synthetic oligonucleotide
  Sense strand starting at position 2478 of SEQ ID NO: 1242385
agcugagaauagcuguaau

SEQ ID NO: 1343439 - RNA, 19 nt, Artificial Sequence
  Description of Artificial Sequence: Synthetic oligonucleotide
  Antisense strand to SEQ ID NO: 1343438
auuacagcuauucucagcu

SEQ ID NO: 1343440 - RNA, 19 nt, Artificial Sequence
  Description of Artificial Sequence: Synthetic oligonucleotide
  Sense strand starting at position 2576 of SEQ ID NO: 1242385
acuaguagccgagagaaau

SEQ ID NO: 1343441 - RNA, 19 nt, Artificial Sequence
  Description of Artificial Sequence: Synthetic oligonucleotide
  Antisense strand to SEQ ID NO: 1343440
auuucucucggcuacuagu

SEQ ID NO: 1343442 - RNA, 19 nt, Artificial Sequence
  Description of Artificial Sequence: Synthetic oligonucleotide
  Sense strand starting at position 2633 of SEQ ID NO: 1242385
guaucugaugaaugaguua

SEQ ID NO: 1343443 - RNA, 19 nt, Artificial Sequence
  Description of Artificial Sequence: Synthetic oligonucleotide
  Antisense strand to SEQ ID NO: 1343442
uaacucauucaucagauac

SEQ ID NO: 1343444 - RNA, 19 nt, Artificial Sequence
  Description of Artificial Sequence: Synthetic oligonucleotide
  Sense strand starting at position 2659 of SEQ ID NO: 1242385
aggcaaucuuuacuacaga

SEQ ID NO: 1343445 - RNA, 19 nt, Artificial Sequence
  Description of Artificial Sequence: Synthetic oligonucleotide
  Antisense strand to SEQ ID NO: 1343444
ucuguaguaaagauugccu

SEQ ID NO: 1343446 - RNA, 19 nt, Artificial Sequence
  Description of Artificial Sequence: Synthetic oligonucleotide
  Sense strand starting at position 2799 of SEQ ID NO: 1242385
ucacaacuccugugggaag

SEQ ID NO: 1343447 - RNA, 19 nt, Artificial Sequence
  Description of Artificial Sequence: Synthetic oligonucleotide
  Antisense strand to SEQ ID NO: 1343446
cuucccacaggaguuguga

SEQ ID NO: 1343448 - RNA, 19 nt, Artificial Sequence
  Description of Artificial Sequence: Synthetic oligonucleotide
  Sense strand starting at position 2810 of SEQ ID NO: 1242385
gugggaagccaugaugcau

SEQ ID NO: 1343449 - RNA, 19 nt, Artificial Sequence
  Description of Artificial Sequence: Synthetic oligonucleotide
  Antisense strand to SEQ ID NO: 1343448
augcaucauggcuucccac

SEQ ID NO: 1343450 - RNA, 19 nt, Artificial Sequence
  Description of Artificial Sequence: Synthetic oligonucleotide
  Sense strand starting at position 3216 of SEQ ID NO: 1242385
cuggauuaggcuuauguau

SEQ ID NO: 1343451 - RNA, 19 nt, Artificial Sequence
  Description of Artificial Sequence: Synthetic oligonucleotide
  Antisense strand to SEQ ID NO: 1343450
auacauaagccuaauccag

SEQ ID NO: 1343452 - RNA, 19 nt, Artificial Sequence
  Description of Artificial Sequence: Synthetic oligonucleotide
  Sense strand starting at position 3285 of SEQ ID NO: 1242385
gaauuaaaugguugagagu

SEQ ID NO: 1343453 - RNA, 19 nt, Artificial Sequence
  Description of Artificial Sequence: Synthetic oligonucleotide
  Antisense strand to SEQ ID NO: 1343452
acucucaaccauuuaauuc

SEQ ID NO: 1343454 - RNA, 19 nt, Artificial Sequence
  Description of Artificial Sequence: Synthetic oligonucleotide
  Sense strand starting at position 3545 of SEQ ID NO: 1242385
acaggcucugggcaagaau

SEQ ID NO: 1343455 - RNA, 19 nt, Artificial Sequence
  Description of Artificial Sequence: Synthetic oligonucleotide
  Antisense strand to SEQ ID NO: 1343454
auucuugcccagagccugu

SEQ ID NO: 1343456 - RNA, 19 nt, Artificial Sequence
  Description of Artificial Sequence: Synthetic oligonucleotide
  Sense strand starting at position 3548 of SEQ ID NO: 1242385
ggcucugggcaagaauauu

SEQ ID NO: 1343457 - RNA, 19 nt, Artificial Sequence
  Description of Artificial Sequence: Synthetic oligonucleotide
  Antisense strand to SEQ ID NO: 1343456
aauauucuugcccagagcc

SEQ ID NO: 1343458 - RNA, 19 nt, Artificial Sequence
  Description of Artificial Sequence: Synthetic oligonucleotide
  Sense strand starting at position 3641 of SEQ ID NO: 1242385
cccuguguugcuucuguua

SEQ ID NO: 1343459 - RNA, 19 nt, Artificial Sequence
  Description of Artificial Sequence: Synthetic oligonucleotide
  Antisense strand to SEQ ID NO: 1343458
uaacagaagcaacacaggg

SEQ ID NO: 1343460 - RNA, 19 nt, Artificial Sequence
  Description of Artificial Sequence: Synthetic oligonucleotide
  Sense strand starting at position 3659 of SEQ ID NO: 1242385
augcuaugaugaccucauu

SEQ ID NO: 1343461 - RNA, 19 nt, Artificial Sequence
  Description of Artificial Sequence: Synthetic oligonucleotide
  Antisense strand to SEQ ID NO: 1343460
aaugaggucaucauagcau

SEQ ID NO: 1343462 - RNA, 19 nt, Artificial Sequence
  Description of Artificial Sequence: Synthetic oligonucleotide
  Sense strand starting at position 3678 of SEQ ID NO: 1242385
auaugcucccuuuagaaag

SEQ ID NO: 1343463 - RNA, 19 nt, Artificial Sequence
  Description of Artificial Sequence: Synthetic oligonucleotide
  Antisense strand to SEQ ID NO: 1343462
cuuucuaaagggagcauau

SEQ ID NO: 1343464 - RNA, 19 nt, Artificial Sequence
  Description of Artificial Sequence: Synthetic oligonucleotide
  Sense strand starting at position 3715 of SEQ ID NO: 1242385
ccugaauguccucauaugu

SEQ ID NO: 1343465 - RNA, 19 nt, Artificial Sequence
  Description of Artificial Sequence: Synthetic oligonucleotide
  Antisense strand to SEQ ID NO: 1343464
acauaugaggacauucagg

SEQ ID NO: 1343466 - RNA, 19 nt, Artificial Sequence
  Description of Artificial Sequence: Synthetic oligonucleotide
  Sense strand starting at position 3811 of SEQ ID NO: 1242385
acaugugggcaguaugaaa

SEQ ID NO: 1343467 - RNA, 19 nt, Artificial Sequence
  Description of Artificial Sequence: Synthetic oligonucleotide
  Antisense strand to SEQ ID NO: 1343466
uuucauacugcccacaugu

SEQ ID NO: 1343468 - RNA, 19 nt, Artificial Sequence
  Description of Artificial Sequence: Synthetic oligonucleotide
  Sense strand starting at position 49 of SEQ ID NO: 1242386
ccauguugccugugccaaa

SEQ ID NO: 1343469 - RNA, 19 nt, Artificial Sequence
  Description of Artificial Sequence: Synthetic oligonucleotide
  Antisense strand to SEQ ID NO: 1343468
uuuggcacaggcaacaugg

SEQ ID NO: 1343470 - RNA, 19 nt, Artificial Sequence
  Description of Artificial Sequence: Synthetic oligonucleotide
  Sense strand starting at position 87 of SEQ ID NO: 1242386
aggagacugacuggucagu

SEQ ID NO: 1343471 - RNA, 19 nt, Artificial Sequence
  Description of Artificial Sequence: Synthetic oligonucleotide
  Antisense strand to SEQ ID NO: 1343470
acugaccagucagucuccu

SEQ ID NO: 1343472 - RNA, 19 nt, Artificial Sequence
  Description of Artificial Sequence: Synthetic oligonucleotide
  Sense strand starting at position 216 of SEQ ID NO: 1242386
ugaaccuuccucugcagaa

SEQ ID NO: 1343473 - RNA, 19 nt, Artificial Sequence
  Description of Artificial Sequence: Synthetic oligonucleotide
  Antisense strand to SEQ ID NO: 1343472
uucugcagaggaagguuca

SEQ ID NO: 1343474 - RNA, 19 nt, Artificial Sequence
  Description of Artificial Sequence: Synthetic oligonucleotide
  Sense strand starting at position 232 of SEQ ID NO: 1242386
gaauaaguauccuggccca

SEQ ID NO: 1343475 - RNA, 19 nt, Artificial Sequence
  Description of Artificial Sequence: Synthetic oligonucleotide
  Antisense strand to SEQ ID NO: 1343474
ugggccaggauacuuauuc

SEQ ID NO: 1343476 - RNA, 19 nt, Artificial Sequence
  Description of Artificial Sequence: Synthetic oligonucleotide
  Sense strand starting at position 313 of SEQ ID NO: 1242386
cugcucugacccugacaga

SEQ ID NO: 1343477 - RNA, 19 nt, Artificial Sequence
  Description of Artificial Sequence: Synthetic oligonucleotide
  Antisense strand to SEQ ID NO: 1343476
ucugucagggucagagcag

SEQ ID NO: 1343478 - RNA, 19 nt, Artificial Sequence
  Description of Artificial Sequence: Synthetic oligonucleotide
  Sense strand starting at position 314 of SEQ ID NO: 1242386
ugcucugacccugacagau

SEQ ID NO: 1343479 - RNA, 19 nt, Artificial Sequence
  Description of Artificial Sequence: Synthetic oligonucleotide
  Antisense strand to SEQ ID NO: 1343478
aucugucagggucagagca

SEQ ID NO: 1343480 - RNA, 19 nt, Artificial Sequence
  Description of Artificial Sequence: Synthetic oligonucleotide
  Sense strand starting at position 381 of SEQ ID NO: 1242386
gccucaauccuggagccaa

SEQ ID NO: 1343481 - RNA, 19 nt, Artificial Sequence
  Description of Artificial Sequence: Synthetic oligonucleotide
  Antisense strand to SEQ ID NO: 1343480
uuggcuccaggauugaggc

SEQ ID NO: 1343482 - RNA, 19 nt, Artificial Sequence
  Description of Artificial Sequence: Synthetic oligonucleotide
  Sense strand starting at position 773 of SEQ ID NO: 1242386
gguccugagcacugacuau

SEQ ID NO: 1343483 - RNA, 19 nt, Artificial Sequence
  Description of Artificial Sequence: Synthetic oligonucleotide
  Antisense strand to SEQ ID NO: 1343482
auagucagugcucaggacc

SEQ ID NO: 1343484 - RNA, 19 nt, Artificial Sequence
  Description of Artificial Sequence: Synthetic oligonucleotide
  Sense strand starting at position 925 of SEQ ID NO: 1242386
cuguguccgcaaggagaaa

SEQ ID NO: 1343485 - RNA, 19 nt, Artificial Sequence
  Description of Artificial Sequence: Synthetic oligonucleotide
  Antisense strand to SEQ ID NO: 1343484
uuucuccuugcggacacag

SEQ ID NO: 1343486 - RNA, 19 nt, Artificial Sequence
  Description of Artificial Sequence: Synthetic oligonucleotide
  Sense strand starting at position 983 of SEQ ID NO: 1242386
ggaugcuuaggcuggagaa

SEQ ID NO: 1343487 - RNA, 19 nt, Artificial Sequence
  Description of Artificial Sequence: Synthetic oligonucleotide
  Antisense strand to SEQ ID NO: 1343486
uucuccagccuaagcaucc

SEQ ID NO: 1343488 - RNA, 19 nt, Artificial Sequence
  Description of Artificial Sequence: Synthetic oligonucleotide
  Sense strand starting at position 984 of SEQ ID NO: 1242386
gaugcuuaggcuggagaaa

SEQ ID NO: 1343489 - RNA, 19 nt, Artificial Sequence
  Description of Artificial Sequence: Synthetic oligonucleotide
  Antisense strand to SEQ ID NO: 1343488
uuucuccagccuaagcauc

SEQ ID NO: 1343490 - RNA, 19 nt, Artificial Sequence
  Description of Artificial Sequence: Synthetic oligonucleotide
  Sense strand starting at position 1160 of SEQ ID NO: 1242386
cucaauucccguuagcaaa

SEQ ID NO: 1343491 - RNA, 19 nt, Artificial Sequence
  Description of Artificial Sequence: Synthetic oligonucleotide
  Antisense strand to SEQ ID NO: 1343490
uuugcuaacgggaauugag

SEQ ID NO: 1343492 - RNA, 19 nt, Artificial Sequence
  Description of Artificial Sequence: Synthetic oligonucleotide
  Sense strand starting at position 1181 of SEQ ID NO: 1242386
gcucauggaucaggcuaga

SEQ ID NO: 1343493 - RNA, 19 nt, Artificial Sequence
  Description of Artificial Sequence: Synthetic oligonucleotide
  Antisense strand to SEQ ID NO: 1343492
ucuagccugauccaugagc

SEQ ID NO: 1343494 - RNA, 19 nt, Artificial Sequence
  Description of Artificial Sequence: Synthetic oligonucleotide
  Sense strand starting at position 1300 of SEQ ID NO: 1242386
cucagauuagucgguugag

SEQ ID NO: 1343495 - RNA, 19 nt, Artificial Sequence
  Description of Artificial Sequence: Synthetic oligonucleotide
  Antisense strand to SEQ ID NO: 1343494
cucaaccgacuaaucugag

SEQ ID NO: 1343496 - RNA, 19 nt, Artificial Sequence
  Description of Artificial Sequence: Synthetic oligonucleotide
  Sense strand starting at position 1301 of SEQ ID NO: 1242386
ucagauuagucgguugaga

SEQ ID NO: 1343497 - RNA, 19 nt, Artificial Sequence
  Description of Artificial Sequence: Synthetic oligonucleotide
  Antisense strand to SEQ ID NO: 1343496
ucucaaccgacuaaucuga

SEQ ID NO: 1343498 - RNA, 19 nt, Artificial Sequence
  Description of Artificial Sequence: Synthetic oligonucleotide
  Sense strand starting at position 1303 of SEQ ID NO: 1242386
agauuagucgguugagaau

SEQ ID NO: 1343499 - RNA, 19 nt, Artificial Sequence
  Description of Artificial Sequence: Synthetic oligonucleotide
  Antisense strand to SEQ ID NO: 1343498
auucucaaccgacuaaucu

SEQ ID NO: 1343500 - RNA, 19 nt, Artificial Sequence
  Description of Artificial Sequence: Synthetic oligonucleotide
  Sense strand starting at position 1312 of SEQ ID NO: 1242386
gguugagaaucugaacaaa

SEQ ID NO: 1343501 - RNA, 19 nt, Artificial Sequence
  Description of Artificial Sequence: Synthetic oligonucleotide
  Antisense strand to SEQ ID NO: 1343500
uuuguucagauucucaacc

SEQ ID NO: 1343502 - RNA, 19 nt, Artificial Sequence
  Description of Artificial Sequence: Synthetic oligonucleotide
  Sense strand starting at position 2225 of SEQ ID NO: 1242386
cgacuacuggacugagguu

SEQ ID NO: 1343503 - RNA, 19 nt, Artificial Sequence
  Description of Artificial Sequence: Synthetic oligonucleotide
  Antisense strand to SEQ ID NO: 1343502
aaccucaguccaguagucg

SEQ ID NO: 1343504 - RNA, 19 nt, Artificial Sequence
  Description of Artificial Sequence: Synthetic oligonucleotide
  Sense strand starting at position 2238 of SEQ ID NO: 1242386
gagguugaauccuuuacgu

SEQ ID NO: 1343505 - RNA, 19 nt, Artificial Sequence
  Description of Artificial Sequence: Synthetic oligonucleotide
  Antisense strand to SEQ ID NO: 1343504
acguaaaggauucaaccuc

SEQ ID NO: 1343506 - RNA, 19 nt, Artificial Sequence
  Description of Artificial Sequence: Synthetic oligonucleotide
  Sense strand starting at position 2240 of SEQ ID NO: 1242386
gguugaauccuuuacgugu

SEQ ID NO: 1343507 - RNA, 19 nt, Artificial Sequence
  Description of Artificial Sequence: Synthetic oligonucleotide
  Antisense strand to SEQ ID NO: 1343506
acacguaaaggauucaacc

SEQ ID NO: 1343508 - RNA, 19 nt, Artificial Sequence
  Description of Artificial Sequence: Synthetic oligonucleotide
  Sense strand starting at position 2399 of SEQ ID NO: 1242386
ggaucucgcaacugggaaa

SEQ ID NO: 1343509 - RNA, 19 nt, Artificial Sequence
  Description of Artificial Sequence: Synthetic oligonucleotide
  Antisense strand to SEQ ID NO: 1343508
uuucccaguugcgagaucc

SEQ ID NO: 1343510 - RNA, 19 nt, Artificial Sequence
  Description of Artificial Sequence: Synthetic oligonucleotide
  Sense strand starting at position 2417 of SEQ ID NO: 1242386
acuauaaucuaggaggaaa

SEQ ID NO: 1343511 - RNA, 19 nt, Artificial Sequence
  Description of Artificial Sequence: Synthetic oligonucleotide
  Antisense strand to SEQ ID NO: 1343510
uuuccuccuagauuauagu

SEQ ID NO: 1343512 - RNA, 19 nt, Artificial Sequence
  Description of Artificial Sequence: Synthetic oligonucleotide
  Sense strand starting at position 2456 of SEQ ID NO: 1242386
gggcuagguucuguaagau

SEQ ID NO: 1343513 - RNA, 19 nt, Artificial Sequence
  Description of Artificial Sequence: Synthetic oligonucleotide
  Antisense strand to SEQ ID NO: 1343512
aucuuacagaaccuagccc

SEQ ID NO: 1343514 - RNA, 19 nt, Artificial Sequence
  Description of Artificial Sequence: Synthetic oligonucleotide
  Sense strand starting at position 2462 of SEQ ID NO: 1242386
gguucuguaagaugugucu

SEQ ID NO: 1343515 - RNA, 19 nt, Artificial Sequence
  Description of Artificial Sequence: Synthetic oligonucleotide
  Antisense strand to SEQ ID NO: 1343514
agacacaucuuacagaacc

SEQ ID NO: 1343516 - RNA, 19 nt, Artificial Sequence
  Description of Artificial Sequence: Synthetic oligonucleotide
  Sense strand starting at position 2464 of SEQ ID NO: 1242386
uucuguaagaugugucugu

SEQ ID NO: 1343517 - RNA, 19 nt, Artificial Sequence
  Description of Artificial Sequence: Synthetic oligonucleotide
  Antisense strand to SEQ ID NO: 1343516
acagacacaucuuacagaa

SEQ ID NO: 1343518 - RNA, 19 nt, Artificial Sequence
  Description of Artificial Sequence: Synthetic oligonucleotide
  Sense strand starting at position 2465 of SEQ ID NO: 1242386
ucuguaagaugugucugua

SEQ ID NO: 1343519 - RNA, 19 nt, Artificial Sequence
  Description of Artificial Sequence: Synthetic oligonucleotide
  Antisense strand to SEQ ID NO: 1343518
uacagacacaucuuacaga

SEQ ID NO: 1343520 - RNA, 19 nt, Artificial Sequence
  Description of Artificial Sequence: Synthetic oligonucleotide
  Sense strand starting at position 2468 of SEQ ID NO: 1242386
guaagaugugucuguaagc

SEQ ID NO: 1343521 - RNA, 19 nt, Artificial Sequence
  Description of Artificial Sequence: Synthetic oligonucleotide
  Antisense strand to SEQ ID NO: 1343520
gcuuacagacacaucuuac

SEQ ID NO: 1343522 - RNA, 19 nt, Artificial Sequence
  Description of Artificial Sequence: Synthetic oligonucleotide
  Sense strand starting at position 2724 of SEQ ID NO: 1242386
ccacauggcccugacgaua

SEQ ID NO: 1343523 - RNA, 19 nt, Artificial Sequence
  Description of Artificial Sequence: Synthetic oligonucleotide
  Antisense strand to SEQ ID NO: 1343522
uaucgucagggccaugugg

SEQ ID NO: 1343524 - RNA, 19 nt, Artificial Sequence
  Description of Artificial Sequence: Synthetic oligonucleotide
  Sense strand starting at position 2792 of SEQ ID NO: 1242386
ugucaaucagauuaguaac

SEQ ID NO: 1343525 - RNA, 19 nt, Artificial Sequence
  Description of Artificial Sequence: Synthetic oligonucleotide
  Antisense strand to SEQ ID NO: 1343524
guuacuaaucugauugaca

SEQ ID NO: 1343526 - RNA, 19 nt, Artificial Sequence
  Description of Artificial Sequence: Synthetic oligonucleotide
  Sense strand starting at position 2798 of SEQ ID NO: 1242386
ucagauuaguaacagaaug

SEQ ID NO: 1343527 - RNA, 19 nt, Artificial Sequence
  Description of Artificial Sequence: Synthetic oligonucleotide
  Antisense strand to SEQ ID NO: 1343526
cauucuguuacuaaucuga

SEQ ID NO: 1343528 - RNA, 19 nt, Artificial Sequence
  Description of Artificial Sequence: Synthetic oligonucleotide
  Sense strand starting at position 2844 of SEQ ID NO: 1242386
uagaaacagucccaguguu

SEQ ID NO: 1343529 - RNA, 19 nt, Artificial Sequence
  Description of Artificial Sequence: Synthetic oligonucleotide
  Antisense strand to SEQ ID NO: 1343528
aacacugggacuguuucua

SEQ ID NO: 1343530 - RNA, 19 nt, Artificial Sequence
  Description of Artificial Sequence: Synthetic oligonucleotide
  Sense strand starting at position 2852 of SEQ ID NO: 1242386
gucccaguguugucuauca

SEQ ID NO: 1343531 - RNA, 19 nt, Artificial Sequence
  Description of Artificial Sequence: Synthetic oligonucleotide
  Antisense strand to SEQ ID NO: 1343530
ugauagacaacacugggac

SEQ ID NO: 1343532 - RNA, 19 nt, Artificial Sequence
  Description of Artificial Sequence: Synthetic oligonucleotide
  Sense strand starting at position 2854 of SEQ ID NO: 1242386
cccaguguugucuaucaca

SEQ ID NO: 1343533 - RNA, 19 nt, Artificial Sequence
  Description of Artificial Sequence: Synthetic oligonucleotide
  Antisense strand to SEQ ID NO: 1343532
ugugauagacaacacuggg

SEQ ID NO: 1343534 - RNA, 19 nt, Artificial Sequence
  Description of Artificial Sequence: Synthetic oligonucleotide
  Sense strand starting at position 2857 of SEQ ID NO: 1242386
aguguugucuaucacaaac

SEQ ID NO: 1343535 - RNA, 19 nt, Artificial Sequence
  Description of Artificial Sequence: Synthetic oligonucleotide
  Antisense strand to SEQ ID NO: 1343534
guuugugauagacaacacu

SEQ ID NO: 1343536 - RNA, 19 nt, Artificial Sequence
  Description of Artificial Sequence: Synthetic oligonucleotide
  Sense strand starting at position 2900 of SEQ ID NO: 1242386
gcucaagugcuaggcauuu

SEQ ID NO: 1343537 - RNA, 19 nt, Artificial Sequence
  Description of Artificial Sequence: Synthetic oligonucleotide
  Antisense strand to SEQ ID NO: 1343536
aaaugccuagcacuugagc

SEQ ID NO: 1343538 - RNA, 19 nt, Artificial Sequence
  Description of Artificial Sequence: Synthetic oligonucleotide
  Sense strand starting at position 3276 of SEQ ID NO: 1242386
aguuccucaccauaaaugu

SEQ ID NO: 1343539 - RNA, 19 nt, Artificial Sequence
  Description of Artificial Sequence: Synthetic oligonucleotide
  Antisense strand to SEQ ID NO: 1343538
acauuuauggugaggaacu

SEQ ID NO: 1343540 - RNA, 19 nt, Artificial Sequence
  Description of Artificial Sequence: Synthetic oligonucleotide
  Sense strand starting at position 3785 of SEQ ID NO: 1242386
ggguguaaagaaggaugua

SEQ ID NO: 1343541 - RNA, 19 nt, Artificial Sequence
  Description of Artificial Sequence: Synthetic oligonucleotide
  Antisense strand to SEQ ID NO: 1343540
uacauccuucuuuacaccc

SEQ ID NO: 1343542 - RNA, 19 nt, Artificial Sequence
  Description of Artificial Sequence: Synthetic oligonucleotide
  Sense strand starting at position 3813 of SEQ ID NO: 1242386
cugugaaucuccugggauu

SEQ ID NO: 1343543 - RNA, 19 nt, Artificial Sequence
  Description of Artificial Sequence: Synthetic oligonucleotide
  Antisense strand to SEQ ID NO: 1343542
aaucccaggagauucacag

SEQ ID NO: 1343544 - RNA, 19 nt, Artificial Sequence
  Description of Artificial Sequence: Synthetic oligonucleotide
  Sense strand starting at position 3814 of SEQ ID NO: 1242386
ugugaaucuccugggauuc

SEQ ID NO: 1343545 - RNA, 19 nt, Artificial Sequence
  Description of Artificial Sequence: Synthetic oligonucleotide
  Antisense strand to SEQ ID NO: 1343544
gaaucccaggagauucaca

SEQ ID NO: 1343546 - RNA, 19 nt, Artificial Sequence
  Description of Artificial Sequence: Synthetic oligonucleotide
  Sense strand starting at position 3877 of SEQ ID NO: 1242386
gcaaauucuaguugggcga

SEQ ID NO: 1343547 - RNA, 19 nt, Artificial Sequence
  Description of Artificial Sequence: Synthetic oligonucleotide
  Antisense strand to SEQ ID NO: 1343546
ucgcccaacuagaauuugc

SEQ ID NO: 1343548 - RNA, 19 nt, Artificial Sequence
  Description of Artificial Sequence: Synthetic oligonucleotide
  Sense strand starting at position 33 of SEQ ID NO: 1242387
ggaacauguccaggaccau

SEQ ID NO: 1343549 - RNA, 19 nt, Artificial Sequence
  Description of Artificial Sequence: Synthetic oligonucleotide
  Antisense strand to SEQ ID NO: 1343548
augguccuggacauguucc

SEQ ID NO: 1343550 - RNA, 19 nt, Artificial Sequence
  Description of Artificial Sequence: Synthetic oligonucleotide
  Sense strand starting at position 44 of SEQ ID NO: 1242387
aggaccauucuacguaagu

SEQ ID NO: 1343551 - RNA, 19 nt, Artificial Sequence
  Description of Artificial Sequence: Synthetic oligonucleotide
  Antisense strand to SEQ ID NO: 1343550
acuuacguagaaugguccu

SEQ ID NO: 1343552 - RNA, 19 nt, Artificial Sequence
  Description of Artificial Sequence: Synthetic oligonucleotide
  Sense strand starting at position 132 of SEQ ID NO: 1242387
uuggcuguccugggagaga

SEQ ID NO: 1343553 - RNA, 19 nt, Artificial Sequence
  Description of Artificial Sequence: Synthetic oligonucleotide
  Antisense strand to SEQ ID NO: 1343552
ucucucccaggacagccaa

SEQ ID NO: 1343554 - RNA, 19 nt, Artificial Sequence
  Description of Artificial Sequence: Synthetic oligonucleotide
  Sense strand starting at position 168 of SEQ ID NO: 1242387
uugggacagaccugaaguu

SEQ ID NO: 1343555 - RNA, 19 nt, Artificial Sequence
  Description of Artificial Sequence: Synthetic oligonucleotide
  Antisense strand to SEQ ID NO: 1343554
aacuucaggucugucccaa

SEQ ID NO: 1343556 - RNA, 19 nt, Artificial Sequence
  Description of Artificial Sequence: Synthetic oligonucleotide
  Sense strand starting at position 592 of SEQ ID NO: 1242387
cuuugauucugagccagac

SEQ ID NO: 1343557 - RNA, 19 nt, Artificial Sequence
  Description of Artificial Sequence: Synthetic oligonucleotide
  Antisense strand to SEQ ID NO: 1343556
gucuggcucagaaucaaag

SEQ ID NO: 1343558 - RNA, 19 nt, Artificial Sequence
  Description of Artificial Sequence: Synthetic oligonucleotide
  Sense strand starting at position 1007 of SEQ ID NO: 1242387
auguuucuccuugaucauc

SEQ ID NO: 1343559 - RNA, 19 nt, Artificial Sequence
  Description of Artificial Sequence: Synthetic oligonucleotide
  Antisense strand to SEQ ID NO: 1343558
gaugaucaaggagaaacau

SEQ ID NO: 1343560 - RNA, 19 nt, Artificial Sequence
  Description of Artificial Sequence: Synthetic oligonucleotide
  Sense strand starting at position 1539 of SEQ ID NO: 1242387
aucacacugcaugguaaau

SEQ ID NO: 1343561 - RNA, 19 nt, Artificial Sequence
  Description of Artificial Sequence: Synthetic oligonucleotide
  Antisense strand to SEQ ID NO: 1343560
auuuaccaugcagugugau

SEQ ID NO: 1343562 - RNA, 19 nt, Artificial Sequence
  Description of Artificial Sequence: Synthetic oligonucleotide
  Sense strand starting at position 1719 of SEQ ID NO: 1242387
cuggauugggugggaucau

SEQ ID NO: 1343563 - RNA, 19 nt, Artificial Sequence
  Description of Artificial Sequence: Synthetic oligonucleotide
  Antisense strand to SEQ ID NO: 1343562
augaucccacccaauccag

SEQ ID NO: 1343564 - RNA, 19 nt, Artificial Sequence
  Description of Artificial Sequence: Synthetic oligonucleotide
  Sense strand starting at position 1743 of SEQ ID NO: 1242387
gggacagucuuuccaagug

SEQ ID NO: 1343565 - RNA, 19 nt, Artificial Sequence
  Description of Artificial Sequence: Synthetic oligonucleotide
  Antisense strand to SEQ ID NO: 1343564
cacuuggaaagacuguccc

SEQ ID NO: 1343566 - RNA, 19 nt, Artificial Sequence
  Description of Artificial Sequence: Synthetic oligonucleotide
  Sense strand starting at position 1761 of SEQ ID NO: 1242387
gaagcugugucaccagaag

SEQ ID NO: 1343567 - RNA, 19 nt, Artificial Sequence
  Description of Artificial Sequence: Synthetic oligonucleotide
  Antisense strand to SEQ ID NO: 1343566
cuucuggugacacagcuuc

SEQ ID NO: 1343568 - RNA, 19 nt, Artificial Sequence
  Description of Artificial Sequence: Synthetic oligonucleotide
  Sense strand starting at position 2178 of SEQ ID NO: 1242387
auagaaguuccugggcaga

SEQ ID NO: 1343569 - RNA, 19 nt, Artificial Sequence
  Description of Artificial Sequence: Synthetic oligonucleotide
  Antisense strand to SEQ ID NO: 1343568
ucugcccaggaacuucuau

SEQ ID NO: 1343570 - RNA, 19 nt, Artificial Sequence
  Description of Artificial Sequence: Synthetic oligonucleotide
  Sense strand starting at position 2249 of SEQ ID NO: 1242387
ggaggaagcugcuccuaua

SEQ ID NO: 1343571 - RNA, 19 nt, Artificial Sequence
  Description of Artificial Sequence: Synthetic oligonucleotide
  Antisense strand to SEQ ID NO: 1343570
uauaggagcagcuuccucc

SEQ ID NO: 1343572 - RNA, 19 nt, Artificial Sequence
  Description of Artificial Sequence: Synthetic oligonucleotide
  Sense strand starting at position 2328 of SEQ ID NO: 1242387
cucugaugugcucacuacu

SEQ ID NO: 1343573 - RNA, 19 nt, Artificial Sequence
  Description of Artificial Sequence: Synthetic oligonucleotide
  Antisense strand to SEQ ID NO: 1343572
aguagugagcacaucagag

SEQ ID NO: 1343574 - RNA, 19 nt, Artificial Sequence
  Description of Artificial Sequence: Synthetic oligonucleotide
  Sense strand starting at position 2376 of SEQ ID NO: 1242387
acaguagguacucaaugua

SEQ ID NO: 1343575 - RNA, 19 nt, Artificial Sequence
  Description of Artificial Sequence: Synthetic oligonucleotide
  Antisense strand to SEQ ID NO: 1343574
uacauugaguaccuacugu

SEQ ID NO: 1343576 - RNA, 19 nt, Artificial Sequence
  Description of Artificial Sequence: Synthetic oligonucleotide
  Sense strand starting at position 2379 of SEQ ID NO: 1242387
guagguacucaauguauac

SEQ ID NO: 1343577 - RNA, 19 nt, Artificial Sequence
  Description of Artificial Sequence: Synthetic oligonucleotide
  Antisense strand to SEQ ID NO: 1343576
guauacauugaguaccuac

SEQ ID NO: 1343578 - RNA, 19 nt, Artificial Sequence
  Description of Artificial Sequence: Synthetic oligonucleotide
  Sense strand starting at position 2556 of SEQ ID NO: 1242387
ggaggaauuguccgcaaag

SEQ ID NO: 1343579 - RNA, 19 nt, Artificial Sequence
  Description of Artificial Sequence: Synthetic oligonucleotide
  Antisense strand to SEQ ID NO: 1343578
cuuugcggacaauuccucc

SEQ ID NO: 1343580 - RNA, 19 nt, Artificial Sequence
  Description of Artificial Sequence: Synthetic oligonucleotide
  Sense strand starting at position 2557 of SEQ ID NO: 1242387
gaggaauuguccgcaaagg

SEQ ID NO: 1343581 - RNA, 19 nt, Artificial Sequence
  Description of Artificial Sequence: Synthetic oligonucleotide
  Antisense strand to SEQ ID NO: 1343580
ccuuugcggacaauuccuc

SEQ ID NO: 1343582 - RNA, 19 nt, Artificial Sequence
  Description of Artificial Sequence: Synthetic oligonucleotide
  Sense strand starting at position 2558 of SEQ ID NO: 1242387
aggaauuguccgcaaagga

SEQ ID NO: 1343583 - RNA, 19 nt, Artificial Sequence
  Description of Artificial Sequence: Synthetic oligonucleotide
  Antisense strand to SEQ ID NO: 1343582
uccuuugcggacaauuccu

SEQ ID NO: 1343584 - RNA, 19 nt, Artificial Sequence
  Description of Artificial Sequence: Synthetic oligonucleotide
  Sense strand starting at position 2671 of SEQ ID NO: 1242387
gcugguauuuaggcacauu

SEQ ID NO: 1343585 - RNA, 19 nt, Artificial Sequence
  Description of Artificial Sequence: Synthetic oligonucleotide
  Antisense strand to SEQ ID NO: 1343584
aaugugccuaaauaccagc

SEQ ID NO: 1343586 - RNA, 19 nt, Artificial Sequence
  Description of Artificial Sequence: Synthetic oligonucleotide
  Sense strand starting at position 2679 of SEQ ID NO: 1242387
uuaggcacauucucugaua

SEQ ID NO: 1343587 - RNA, 19 nt, Artificial Sequence
  Description of Artificial Sequence: Synthetic oligonucleotide
  Antisense strand to SEQ ID NO: 1343586
uaucagagaaugugccuaa

SEQ ID NO: 1343588 - RNA, 19 nt, Artificial Sequence
  Description of Artificial Sequence: Synthetic oligonucleotide
  Sense strand starting at position 2681 of SEQ ID NO: 1242387
aggcacauucucugauaua

SEQ ID NO: 1343589 - RNA, 19 nt, Artificial Sequence
  Description of Artificial Sequence: Synthetic oligonucleotide
  Antisense strand to SEQ ID NO: 1343588
uauaucagagaaugugccu

SEQ ID NO: 1343590 - RNA, 19 nt, Artificial Sequence
  Description of Artificial Sequence: Synthetic oligonucleotide
  Sense strand starting at position 2692 of SEQ ID NO: 1242387
cugauauagccagaaugcu

SEQ ID NO: 1343591 - RNA, 19 nt, Artificial Sequence
  Description of Artificial Sequence: Synthetic oligonucleotide
  Antisense strand to SEQ ID NO: 1343590
agcauucuggcuauaucag

SEQ ID NO: 1343592 - RNA, 19 nt, Artificial Sequence
  Description of Artificial Sequence: Synthetic oligonucleotide
  Sense strand starting at position 2798 of SEQ ID NO: 1242387
ccuccaggacucugcuaua

SEQ ID NO: 1343593 - RNA, 19 nt, Artificial Sequence
  Description of Artificial Sequence: Synthetic oligonucleotide
  Antisense strand to SEQ ID NO: 1343592
uauagcagaguccuggagg

SEQ ID NO: 1343594 - RNA, 19 nt, Artificial Sequence
  Description of Artificial Sequence: Synthetic oligonucleotide
  Sense strand starting at position 3093 of SEQ ID NO: 1242387
uacauugagugucuggaaa

SEQ ID NO: 1343595 - RNA, 19 nt, Artificial Sequence
  Description of Artificial Sequence: Synthetic oligonucleotide
  Antisense strand to SEQ ID NO: 1343594
uuuccagacacucaaugua

SEQ ID NO: 1343596 - RNA, 19 nt, Artificial Sequence
  Description of Artificial Sequence: Synthetic oligonucleotide
  Sense strand starting at position 3159 of SEQ ID NO: 1242387
ugguaauaguacccauauc

SEQ ID NO: 1343597 - RNA, 19 nt, Artificial Sequence
  Description of Artificial Sequence: Synthetic oligonucleotide
  Antisense strand to SEQ ID NO: 1343596
gauauggguacuauuacca

SEQ ID NO: 1343598 - RNA, 19 nt, Artificial Sequence
  Description of Artificial Sequence: Synthetic oligonucleotide
  Sense strand starting at position 3235 of SEQ ID NO: 1242387
ggagucagugcugaauaaa

SEQ ID NO: 1343599 - RNA, 19 nt, Artificial Sequence
  Description of Artificial Sequence: Synthetic oligonucleotide
  Antisense strand to SEQ ID NO: 1343598
uuuauucagcacugacucc

SEQ ID NO: 1343600 - RNA, 19 nt, Artificial Sequence
  Description of Artificial Sequence: Synthetic oligonucleotide
  Sense strand starting at position 3238 of SEQ ID NO: 1242387
gucagugcugaauaaaugu

SEQ ID NO: 1343601 - RNA, 19 nt, Artificial Sequence
  Description of Artificial Sequence: Synthetic oligonucleotide
  Antisense strand to SEQ ID NO: 1343600
acauuuauucagcacugac

SEQ ID NO: 1343602 - RNA, 19 nt, Artificial Sequence
  Description of Artificial Sequence: Synthetic oligonucleotide
  Sense strand starting at position 3247 of SEQ ID NO: 1242387
gaauaaauguuagcucuga

SEQ ID NO: 1343603 - RNA, 19 nt, Artificial Sequence
  Description of Artificial Sequence: Synthetic oligonucleotide
  Antisense strand to SEQ ID NO: 1343602
ucagagcuaacauuuauuc

SEQ ID NO: 1343604 - RNA, 19 nt, Artificial Sequence
  Description of Artificial Sequence: Synthetic oligonucleotide
  Sense strand starting at position 3251 of SEQ ID NO: 1242387
aaauguuagcucugaggau

SEQ ID NO: 1343605 - RNA, 19 nt, Artificial Sequence
  Description of Artificial Sequence: Synthetic oligonucleotide
  Antisense strand to SEQ ID NO: 1343604
auccucagagcuaacauuu

SEQ ID NO: 1343606 - RNA, 19 nt, Artificial Sequence
  Description of Artificial Sequence: Synthetic oligonucleotide
  Sense strand starting at position 3255 of SEQ ID NO: 1242387
guuagcucugaggauaauc

SEQ ID NO: 1343607 - RNA, 19 nt, Artificial Sequence
  Description of Artificial Sequence: Synthetic oligonucleotide
  Antisense strand to SEQ ID NO: 1343606
gauuauccucagagcuaac

SEQ ID NO: 1343608 - RNA, 19 nt, Artificial Sequence
  Description of Artificial Sequence: Synthetic oligonucleotide
  Sense strand starting at position 3373 of SEQ ID NO: 1242387
uguaguauguuaucauaga

SEQ ID NO: 1343609 - RNA, 19 nt, Artificial Sequence
  Description of Artificial Sequence: Synthetic oligonucleotide
  Antisense strand to SEQ ID NO: 1343608
ucuaugauaacauacuaca

SEQ ID NO: 1343610 - RNA, 19 nt, Artificial Sequence
  Description of Artificial Sequence: Synthetic oligonucleotide
  Sense strand starting at position 3425 of SEQ ID NO: 1242387
cuccucuauuuguagauuu

SEQ ID NO: 1343611 - RNA, 19 nt, Artificial Sequence
  Description of Artificial Sequence: Synthetic oligonucleotide
  Antisense strand to SEQ ID NO: 1343610
aaaucuacaaauagaggag

SEQ ID NO: 1343612 - RNA, 19 nt, Artificial Sequence
  Description of Artificial Sequence: Synthetic oligonucleotide
  Sense strand starting at position 3461 of SEQ ID NO: 1242387
uaaggaguccugcagcaaa

SEQ ID NO: 1343613 - RNA, 19 nt, Artificial Sequence
  Description of Artificial Sequence: Synthetic oligonucleotide
  Antisense strand to SEQ ID NO: 1343612
uuugcugcaggacuccuua

SEQ ID NO: 1343614 - RNA, 19 nt, Artificial Sequence
  Description of Artificial Sequence: Synthetic oligonucleotide
  Sense strand starting at position 3563 of SEQ ID NO: 1242387
ccugucacaguuugggaaa

SEQ ID NO: 1343615 - RNA, 19 nt, Artificial Sequence
  Description of Artificial Sequence: Synthetic oligonucleotide
  Antisense strand to SEQ ID NO: 1343614
uuucccaaacugugacagg

SEQ ID NO: 1343616 - RNA, 19 nt, Artificial Sequence
  Description of Artificial Sequence: Synthetic oligonucleotide
  Sense strand starting at position 3570 of SEQ ID NO: 1242387
caguuugggaaaugguaca

SEQ ID NO: 1343617 - RNA, 19 nt, Artificial Sequence
  Description of Artificial Sequence: Synthetic oligonucleotide
  Antisense strand to SEQ ID NO: 1343616
uguaccauuucccaaacug

SEQ ID NO: 1343618 - RNA, 19 nt, Artificial Sequence
  Description of Artificial Sequence: Synthetic oligonucleotide
  Sense strand starting at position 3589 of SEQ ID NO: 1242387
uuacuuaccuuccucgaga

SEQ ID NO: 1343619 - RNA, 19 nt, Artificial Sequence
  Description of Artificial Sequence: Synthetic oligonucleotide
  Antisense strand to SEQ ID NO: 1343618
ucucgaggaagguaaguaa

SEQ ID NO: 1343620 - RNA, 19 nt, Artificial Sequence
  Description of Artificial Sequence: Synthetic oligonucleotide
  Sense strand starting at position 3592 of SEQ ID NO: 1242387
cuuaccuuccucgagauca

SEQ ID NO: 1343621 - RNA, 19 nt, Artificial Sequence
  Description of Artificial Sequence: Synthetic oligonucleotide
  Antisense strand to SEQ ID NO: 1343620
ugaucucgaggaagguaag

SEQ ID NO: 1343622 - RNA, 19 nt, Artificial Sequence
  Description of Artificial Sequence: Synthetic oligonucleotide
  Sense strand starting at position 3597 of SEQ ID NO: 1242387
cuuccucgagaucaaacuu

SEQ ID NO: 1343623 - RNA, 19 nt, Artificial Sequence
  Description of Artificial Sequence: Synthetic oligonucleotide
  Antisense strand to SEQ ID NO: 1343622
aaguuugaucucgaggaag

SEQ ID NO: 1343624 - RNA, 19 nt, Artificial Sequence
  Description of Artificial Sequence: Synthetic oligonucleotide
  Sense strand starting at position 3850 of SEQ ID NO: 1242387
guaguaaacucaguacaga

SEQ ID NO: 1343625 - RNA, 19 nt, Artificial Sequence
  Description of Artificial Sequence: Synthetic oligonucleotide
  Antisense strand to SEQ ID NO: 1343624
ucuguacugaguuuacuac

SEQ ID NO: 1343626 - RNA, 19 nt, Artificial Sequence
  Description of Artificial Sequence: Synthetic oligonucleotide
  Sense strand starting at position 3914 of SEQ ID NO: 1242387
uuagcaaaugcuuagugaa

SEQ ID NO: 1343627 - RNA, 19 nt, Artificial Sequence
  Description of Artificial Sequence: Synthetic oligonucleotide
  Antisense strand to SEQ ID NO: 1343626
uucacuaagcauuugcuaa

SEQ ID NO: 1343628 - RNA, 19 nt, Artificial Sequence
  Description of Artificial Sequence: Synthetic oligonucleotide
  Sense strand starting at position 140 of SEQ ID NO: 1242388
uuaauuauuguccaucagu

SEQ ID NO: 1343629 - RNA, 19 nt, Artificial Sequence
  Description of Artificial Sequence: Synthetic oligonucleotide
  Antisense strand to SEQ ID NO: 1343628
acugauggacaauaauuaa

SEQ ID NO: 1343630 - RNA, 19 nt, Artificial Sequence
  Description of Artificial Sequence: Synthetic oligonucleotide
  Sense strand starting at position 203 of SEQ ID NO: 1242388
ggcaguggcuauuugcuaa

SEQ ID NO: 1343631 - RNA, 19 nt, Artificial Sequence
  Description of Artificial Sequence: Synthetic oligonucleotide
  Antisense strand to SEQ ID NO: 1343630
uuagcaaauagccacugcc

SEQ ID NO: 1343632 - RNA, 19 nt, Artificial Sequence
  Description of Artificial Sequence: Synthetic oligonucleotide
  Sense strand starting at position 474 of SEQ ID NO: 1242388
cucaacacguccucgagaa

SEQ ID NO: 1343633 - RNA, 19 nt, Artificial Sequence
  Description of Artificial Sequence: Synthetic oligonucleotide
  Antisense strand to SEQ ID NO: 1343632
uucucgaggacguguugag

SEQ ID NO: 1343634 - RNA, 19 nt, Artificial Sequence
  Description of Artificial Sequence: Synthetic oligonucleotide
  Sense strand starting at position 555 of SEQ ID NO: 1242388
acagaagacuuauaaagag

SEQ ID NO: 1343635 - RNA, 19 nt, Artificial Sequence
  Description of Artificial Sequence: Synthetic oligonucleotide
  Antisense strand to SEQ ID NO: 1343634
cucuuuauaagucuucugu

SEQ ID NO: 1343636 - RNA, 19 nt, Artificial Sequence
  Description of Artificial Sequence: Synthetic oligonucleotide
  Sense strand starting at position 848 of SEQ ID NO: 1242388
gccucuguacacgaaauca

SEQ ID NO: 1343637 - RNA, 19 nt, Artificial Sequence
  Description of Artificial Sequence: Synthetic oligonucleotide
  Antisense strand to SEQ ID NO: 1343636
ugauuucguguacagaggc

SEQ ID NO: 1343638 - RNA, 19 nt, Artificial Sequence
  Description of Artificial Sequence: Synthetic oligonucleotide
  Sense strand starting at position 964 of SEQ ID NO: 1242388
cccagugcuucuguggaaa

SEQ ID NO: 1343639 - RNA, 19 nt, Artificial Sequence
  Description of Artificial Sequence: Synthetic oligonucleotide
  Antisense strand to SEQ ID NO: 1343638
uuuccacagaagcacuggg

SEQ ID NO: 1343640 - RNA, 19 nt, Artificial Sequence
  Description of Artificial Sequence: Synthetic oligonucleotide
  Sense strand starting at position 977 of SEQ ID NO: 1242388
uggaaauuuguacguaugu

SEQ ID NO: 1343641 - RNA, 19 nt, Artificial Sequence
  Description of Artificial Sequence: Synthetic oligonucleotide
  Antisense strand to SEQ ID NO: 1343640
acauacguacaaauuucca

SEQ ID NO: 1343642 - RNA, 19 nt, Artificial Sequence
  Description of Artificial Sequence: Synthetic oligonucleotide
  Sense strand starting at position 978 of SEQ ID NO: 1242388
ggaaauuuguacguauguc

SEQ ID NO: 1343643 - RNA, 19 nt, Artificial Sequence
  Description of Artificial Sequence: Synthetic oligonucleotide
  Antisense strand to SEQ ID NO: 1343642
gacauacguacaaauuucc

SEQ ID NO: 1343644 - RNA, 19 nt, Artificial Sequence
  Description of Artificial Sequence: Synthetic oligonucleotide
  Sense strand starting at position 990 of SEQ ID NO: 1242388
guaugucuacuacaacacu

SEQ ID NO: 1343645 - RNA, 19 nt, Artificial Sequence
  Description of Artificial Sequence: Synthetic oligonucleotide
  Antisense strand to SEQ ID NO: 1343644
aguguuguaguagacauac

SEQ ID NO: 1343646 - RNA, 19 nt, Artificial Sequence
  Description of Artificial Sequence: Synthetic oligonucleotide
  Sense strand starting at position 1067 of SEQ ID NO: 1242388
cccggaagccuauaucuuu

SEQ ID NO: 1343647 - RNA, 19 nt, Artificial Sequence
  Description of Artificial Sequence: Synthetic oligonucleotide
  Antisense strand to SEQ ID NO: 1343646
aaagauauaggcuuccggg

SEQ ID NO: 1343648 - RNA, 19 nt, Artificial Sequence
  Description of Artificial Sequence: Synthetic oligonucleotide
  Sense strand starting at position 1112 of SEQ ID NO: 1242388
cguaaacgucgcucucaaa

SEQ ID NO: 1343649 - RNA, 19 nt, Artificial Sequence
  Description of Artificial Sequence: Synthetic oligonucleotide
  Antisense strand to SEQ ID NO: 1343648
uuugagagcgacguuuacg

SEQ ID NO: 1343650 - RNA, 19 nt, Artificial Sequence
  Description of Artificial Sequence: Synthetic oligonucleotide
  Sense strand starting at position 1124 of SEQ ID NO: 1242388
ucucaaaugucacaaggga

SEQ ID NO: 1343651 - RNA, 19 nt, Artificial Sequence
  Description of Artificial Sequence: Synthetic oligonucleotide
  Antisense strand to SEQ ID NO: 1343650
ucccuugugacauuugaga

SEQ ID NO: 1343652 - RNA, 19 nt, Artificial Sequence
  Description of Artificial Sequence: Synthetic oligonucleotide
  Sense strand starting at position 1220 of SEQ ID NO: 1242388
gugccauuguccucacaau

SEQ ID NO: 1343653 - RNA, 19 nt, Artificial Sequence
  Description of Artificial Sequence: Synthetic oligonucleotide
  Antisense strand to SEQ ID NO: 1343652
auugugaggacaauggcac

SEQ ID NO: 1343654 - RNA, 19 nt, Artificial Sequence
  Description of Artificial Sequence: Synthetic oligonucleotide
  Sense strand starting at position 1345 of SEQ ID NO: 1242388
ugaacucuucucuguugaa

SEQ ID NO: 1343655 - RNA, 19 nt, Artificial Sequence
  Description of Artificial Sequence: Synthetic oligonucleotide
  Antisense strand to SEQ ID NO: 1343654
uucaacagagaagaguuca

SEQ ID NO: 1343656 - RNA, 19 nt, Artificial Sequence
  Description of Artificial Sequence: Synthetic oligonucleotide
  Sense strand starting at position 1375 of SEQ ID NO: 1242388
cuugcaaugucauugauuu

SEQ ID NO: 1343657 - RNA, 19 nt, Artificial Sequence
  Description of Artificial Sequence: Synthetic oligonucleotide
  Antisense strand to SEQ ID NO: 1343656
aaaucaaugacauugcaag

SEQ ID NO: 1343658 - RNA, 19 nt, Artificial Sequence
  Description of Artificial Sequence: Synthetic oligonucleotide
  Sense strand starting at position 1383 of SEQ ID NO: 1242388
gucauugauuugucauugu

SEQ ID NO: 1343659 - RNA, 19 nt, Artificial Sequence
  Description of Artificial Sequence: Synthetic oligonucleotide
  Antisense strand to SEQ ID NO: 1343658
acaaugacaaaucaaugac

SEQ ID NO: 1343660 - RNA, 19 nt, Artificial Sequence
  Description of Artificial Sequence: Synthetic oligonucleotide
  Sense strand starting at position 1387 of SEQ ID NO: 1242388
uugauuugucauuguuugu

SEQ ID NO: 1343661 - RNA, 19 nt, Artificial Sequence
  Description of Artificial Sequence: Synthetic oligonucleotide
  Antisense strand to SEQ ID NO: 1343660
acaaacaaugacaaaucaa

SEQ ID NO: 1343662 - RNA, 19 nt, Artificial Sequence
  Description of Artificial Sequence: Synthetic oligonucleotide
  Sense strand starting at position 1630 of SEQ ID NO: 1242388
gccaaagucguucagauag

SEQ ID NO: 1343663 - RNA, 19 nt, Artificial Sequence
  Description of Artificial Sequence: Synthetic oligonucleotide
  Antisense strand to SEQ ID NO: 1343662
cuaucugaacgacuuuggc

SEQ ID NO: 1343664 - RNA, 19 nt, Artificial Sequence
  Description of Artificial Sequence: Synthetic oligonucleotide
  Sense strand starting at position 1679 of SEQ ID NO: 1242388
gagacuuugggccaccauu

SEQ ID NO: 1343665 - RNA, 19 nt, Artificial Sequence
  Description of Artificial Sequence: Synthetic oligonucleotide
  Antisense strand to SEQ ID NO: 1343664
aaugguggcccaaagucuc

SEQ ID NO: 1343666 - RNA, 19 nt, Artificial Sequence
  Description of Artificial Sequence: Synthetic oligonucleotide
  Sense strand starting at position 1742 of SEQ ID NO: 1242388
aggaauccuuugguugcaa

SEQ ID NO: 1343667 - RNA, 19 nt, Artificial Sequence
  Description of Artificial Sequence: Synthetic oligonucleotide
  Antisense strand to SEQ ID NO: 1343666
uugcaaccaaaggauuccu

SEQ ID NO: 1343668 - RNA, 19 nt, Artificial Sequence
  Description of Artificial Sequence: Synthetic oligonucleotide
  Sense strand starting at position 1743 of SEQ ID NO: 1242388
ggaauccuuugguugcaaa

SEQ ID NO: 1343669 - RNA, 19 nt, Artificial Sequence
  Description of Artificial Sequence: Synthetic oligonucleotide
  Antisense strand to SEQ ID NO: 1343668
uuugcaaccaaaggauucc

SEQ ID NO: 1343670 - RNA, 19 nt, Artificial Sequence
  Description of Artificial Sequence: Synthetic oligonucleotide
  Sense strand starting at position 1870 of SEQ ID NO: 1242388
ggaggaaccugguagauaa

SEQ ID NO: 1343671 - RNA, 19 nt, Artificial Sequence
  Description of Artificial Sequence: Synthetic oligonucleotide
  Antisense strand to SEQ ID NO: 1343670
uuaucuaccagguuccucc

SEQ ID NO: 1343672 - RNA, 19 nt, Artificial Sequence
  Description of Artificial Sequence: Synthetic oligonucleotide
  Sense strand starting at position 2037 of SEQ ID NO: 1242388
gagucacggcauuguggaa

SEQ ID NO: 1343673 - RNA, 19 nt, Artificial Sequence
  Description of Artificial Sequence: Synthetic oligonucleotide
  Antisense strand to SEQ ID NO: 1343672
uuccacaaugccgugacuc

SEQ ID NO: 1343674 - RNA, 19 nt, Artificial Sequence
  Description of Artificial Sequence: Synthetic oligonucleotide
  Sense strand starting at position 2107 of SEQ ID NO: 1242388
cugggaagcuaacucuaaa

SEQ ID NO: 1343675 - RNA, 19 nt, Artificial Sequence
  Description of Artificial Sequence: Synthetic oligonucleotide
  Antisense strand to SEQ ID NO: 1343674
uuuagaguuagcuucccag

SEQ ID NO: 1343676 - RNA, 19 nt, Artificial Sequence
  Description of Artificial Sequence: Synthetic oligonucleotide
  Sense strand starting at position 2303 of SEQ ID NO: 1242388
uugugaaugaccgaaucau

SEQ ID NO: 1343677 - RNA, 19 nt, Artificial Sequence
  Description of Artificial Sequence: Synthetic oligonucleotide
  Antisense strand to SEQ ID NO: 1343676
augauucggucauucacaa

SEQ ID NO: 1343678 - RNA, 19 nt, Artificial Sequence
  Description of Artificial Sequence: Synthetic oligonucleotide
  Sense strand starting at position 2407 of SEQ ID NO: 1242388
aauuaaggguuagaagaau

SEQ ID NO: 1343679 - RNA, 19 nt, Artificial Sequence
  Description of Artificial Sequence: Synthetic oligonucleotide
  Antisense strand to SEQ ID NO: 1343678
auucuucuaacccuuaauu

SEQ ID NO: 1343680 - RNA, 19 nt, Artificial Sequence
  Description of Artificial Sequence: Synthetic oligonucleotide
  Sense strand starting at position 2463 of SEQ ID NO: 1242388
ucccgugacaagugaaaua

SEQ ID NO: 1343681 - RNA, 19 nt, Artificial Sequence
  Description of Artificial Sequence: Synthetic oligonucleotide
  Antisense strand to SEQ ID NO: 1343680
uauuucacuugucacggga

SEQ ID NO: 1343682 - RNA, 19 nt, Artificial Sequence
  Description of Artificial Sequence: Synthetic oligonucleotide
  Sense strand starting at position 2526 of SEQ ID NO: 1242388
gugcuaaugagagguuugu

SEQ ID NO: 1343683 - RNA, 19 nt, Artificial Sequence
  Description of Artificial Sequence: Synthetic oligonucleotide
  Antisense strand to SEQ ID NO: 1343682
acaaaccucucauuagcac

SEQ ID NO: 1343684 - RNA, 19 nt, Artificial Sequence
  Description of Artificial Sequence: Synthetic oligonucleotide
  Sense strand starting at position 2535 of SEQ ID NO: 1242388
agagguuuguggccuucau

SEQ ID NO: 1343685 - RNA, 19 nt, Artificial Sequence
  Description of Artificial Sequence: Synthetic oligonucleotide
  Antisense strand to SEQ ID NO: 1343684
augaaggccacaaaccucu

SEQ ID NO: 1343686 - RNA, 19 nt, Artificial Sequence
  Description of Artificial Sequence: Synthetic oligonucleotide
  Sense strand starting at position 2557 of SEQ ID NO: 1242388
cacagucuccuaggugaga

SEQ ID NO: 1343687 - RNA, 19 nt, Artificial Sequence
  Description of Artificial Sequence: Synthetic oligonucleotide
  Antisense strand to SEQ ID NO: 1343686
ucucaccuaggagacugug

SEQ ID NO: 1343688 - RNA, 19 nt, Artificial Sequence
  Description of Artificial Sequence: Synthetic oligonucleotide
  Sense strand starting at position 2677 of SEQ ID NO: 1242388
ucaagucugucauuuggca

SEQ ID NO: 1343689 - RNA, 19 nt, Artificial Sequence
  Description of Artificial Sequence: Synthetic oligonucleotide
  Antisense strand to SEQ ID NO: 1343688
ugccaaaugacagacuuga

SEQ ID NO: 1343690 - RNA, 19 nt, Artificial Sequence
  Description of Artificial Sequence: Synthetic oligonucleotide
  Sense strand starting at position 2745 of SEQ ID NO: 1242388
guggcuaugucacucucaa

SEQ ID NO: 1343691 - RNA, 19 nt, Artificial Sequence
  Description of Artificial Sequence: Synthetic oligonucleotide
  Antisense strand to SEQ ID NO: 1343690
uugagagugacauagccac

SEQ ID NO: 1343692 - RNA, 19 nt, Artificial Sequence
  Description of Artificial Sequence: Synthetic oligonucleotide
  Sense strand starting at position 2830 of SEQ ID NO: 1242388
aggcaagcccgagaucauu

SEQ ID NO: 1343693 - RNA, 19 nt, Artificial Sequence
  Description of Artificial Sequence: Synthetic oligonucleotide
  Antisense strand to SEQ ID NO: 1343692
aaugaucucgggcuugccu

SEQ ID NO: 1343694 - RNA, 19 nt, Artificial Sequence
  Description of Artificial Sequence: Synthetic oligonucleotide
  Sense strand starting at position 2842 of SEQ ID NO: 1242388
gaucauuccugggagagac

SEQ ID NO: 1343695 - RNA, 19 nt, Artificial Sequence
  Description of Artificial Sequence: Synthetic oligonucleotide
  Antisense strand to SEQ ID NO: 1343694
gucucucccaggaaugauc

SEQ ID NO: 1343696 - RNA, 19 nt, Artificial Sequence
  Description of Artificial Sequence: Synthetic oligonucleotide
  Sense strand starting at position 3386 of SEQ ID NO: 1242388
ccaagcuuuggaugacuga

SEQ ID NO: 1343697 - RNA, 19 nt, Artificial Sequence
  Description of Artificial Sequence: Synthetic oligonucleotide
  Antisense strand to SEQ ID NO: 1343696
ucagucauccaaagcuugg

SEQ ID NO: 1343698 - RNA, 19 nt, Artificial Sequence
  Description of Artificial Sequence: Synthetic oligonucleotide
  Sense strand starting at position 3409 of SEQ ID NO: 1242388
aacguuauaugucuagaaa

SEQ ID NO: 1343699 - RNA, 19 nt, Artificial Sequence
  Description of Artificial Sequence: Synthetic oligonucleotide
  Antisense strand to SEQ ID NO: 1343698
uuucuagacauauaacguu

SEQ ID NO: 1343700 - RNA, 19 nt, Artificial Sequence
  Description of Artificial Sequence: Synthetic oligonucleotide
  Sense strand starting at position 3464 of SEQ ID NO: 1242388
caggaauguggugacuuau

SEQ ID NO: 1343701 - RNA, 19 nt, Artificial Sequence
  Description of Artificial Sequence: Synthetic oligonucleotide
  Antisense strand to SEQ ID NO: 1343700
auaagucaccacauuccug

SEQ ID NO: 1343702 - RNA, 19 nt, Artificial Sequence
  Description of Artificial Sequence: Synthetic oligonucleotide
  Sense strand starting at position 3524 of SEQ ID NO: 1242388
caaucugugggcuggaaua

SEQ ID NO: 1343703 - RNA, 19 nt, Artificial Sequence
  Description of Artificial Sequence: Synthetic oligonucleotide
  Antisense strand to SEQ ID NO: 1343702
uauuccagcccacagauug

SEQ ID NO: 1343704 - RNA, 19 nt, Artificial Sequence
  Description of Artificial Sequence: Synthetic oligonucleotide
  Sense strand starting at position 3562 of SEQ ID NO: 1242388
caggaaaggcucuggcuuu

SEQ ID NO: 1343705 - RNA, 19 nt, Artificial Sequence
  Description of Artificial Sequence: Synthetic oligonucleotide
  Antisense strand to SEQ ID NO: 1343704
aaagccagagccuuuccug

SEQ ID NO: 1343706 - RNA, 19 nt, Artificial Sequence
  Description of Artificial Sequence: Synthetic oligonucleotide
  Sense strand starting at position 3667 of SEQ ID NO: 1242388
guagccacucucuaagagu

SEQ ID NO: 1343707 - RNA, 19 nt, Artificial Sequence
  Description of Artificial Sequence: Synthetic oligonucleotide
  Antisense strand to SEQ ID NO: 1343706
acucuuagagaguggcuac

SEQ ID NO: 1343708 - RNA, 19 nt, Artificial Sequence
  Description of Artificial Sequence: Synthetic oligonucleotide
  Sense strand starting at position 342 of SEQ ID NO: 1242389
ucacgucauccgcaagaac

SEQ ID NO: 1343709 - RNA, 19 nt, Artificial Sequence
  Description of Artificial Sequence: Synthetic oligonucleotide
  Antisense strand to SEQ ID NO: 1343708
guucuugcggaugacguga

SEQ ID NO: 1343710 - RNA, 19 nt, Artificial Sequence
  Description of Artificial Sequence: Synthetic oligonucleotide
  Sense strand starting at position 433 of SEQ ID NO: 1242389
ucgggagaaugucauccaa

SEQ ID NO: 1343711 - RNA, 19 nt, Artificial Sequence
  Description of Artificial Sequence: Synthetic oligonucleotide
  Antisense strand to SEQ ID NO: 1343710
uuggaugacauucucccga

SEQ ID NO: 1343712 - RNA, 19 nt, Artificial Sequence
  Description of Artificial Sequence: Synthetic oligonucleotide
  Sense strand starting at position 435 of SEQ ID NO: 1242389
gggagaaugucauccaauc

SEQ ID NO: 1343713 - RNA, 19 nt, Artificial Sequence
  Description of Artificial Sequence: Synthetic oligonucleotide
  Antisense strand to SEQ ID NO: 1343712
gauuggaugacauucuccc

SEQ ID NO: 1343714 - RNA, 19 nt, Artificial Sequence
  Description of Artificial Sequence: Synthetic oligonucleotide
  Sense strand starting at position 1691 of SEQ ID NO: 1242389
aaccgacugcucggugaga

SEQ ID NO: 1343715 - RNA, 19 nt, Artificial Sequence
  Description of Artificial Sequence: Synthetic oligonucleotide
  Antisense strand to SEQ ID NO: 1343714
ucucaccgagcagucgguu

SEQ ID NO: 1343716 - RNA, 19 nt, Artificial Sequence
  Description of Artificial Sequence: Synthetic oligonucleotide
  Sense strand starting at position 1692 of SEQ ID NO: 1242389
accgacugcucggugagau

SEQ ID NO: 1343717 - RNA, 19 nt, Artificial Sequence
  Description of Artificial Sequence: Synthetic oligonucleotide
  Antisense strand to SEQ ID NO: 1343716
aucucaccgagcagucggu

SEQ ID NO: 1343718 - RNA, 19 nt, Artificial Sequence
  Description of Artificial Sequence: Synthetic oligonucleotide
  Sense strand starting at position 1693 of SEQ ID NO: 1242389
ccgacugcucggugagaua

SEQ ID NO: 1343719 - RNA, 19 nt, Artificial Sequence
  Description of Artificial Sequence: Synthetic oligonucleotide
  Antisense strand to SEQ ID NO: 1343718
uaucucaccgagcagucgg

SEQ ID NO: 1343720 - RNA, 19 nt, Artificial Sequence
  Description of Artificial Sequence: Synthetic oligonucleotide
  Sense strand starting at position 2184 of SEQ ID NO: 1242389
gggagacgcauccguggua

SEQ ID NO: 1343721 - RNA, 19 nt, Artificial Sequence
  Description of Artificial Sequence: Synthetic oligonucleotide
  Antisense strand to SEQ ID NO: 1343720
uaccacggaugcgucuccc

SEQ ID NO: 1343722 - RNA, 19 nt, Artificial Sequence
  Description of Artificial Sequence: Synthetic oligonucleotide
  Sense strand starting at position 2422 of SEQ ID NO: 1242389
ggcugugugaccuaaccgu

SEQ ID NO: 1343723 - RNA, 19 nt, Artificial Sequence
  Description of Artificial Sequence: Synthetic oligonucleotide
  Antisense strand to SEQ ID NO: 1343722
acgguuaggucacacagcc

SEQ ID NO: 1343724 - RNA, 19 nt, Artificial Sequence
  Description of Artificial Sequence: Synthetic oligonucleotide
  Sense strand starting at position 2449 of SEQ ID NO: 1242389
cgcucuguuaggcgacuaa

SEQ ID NO: 1343725 - RNA, 19 nt, Artificial Sequence
  Description of Artificial Sequence: Synthetic oligonucleotide
  Antisense strand to SEQ ID NO: 1343724
uuagucgccuaacagagcg

SEQ ID NO: 1343726 - RNA, 19 nt, Artificial Sequence
  Description of Artificial Sequence: Synthetic oligonucleotide
  Sense strand starting at position 2572 of SEQ ID NO: 1242389
gcaauuacagacuggauga

SEQ ID NO: 1343727 - RNA, 19 nt, Artificial Sequence
  Description of Artificial Sequence: Synthetic oligonucleotide
  Antisense strand to SEQ ID NO: 1343726
ucauccagucuguaauugc

SEQ ID NO: 1343728 - RNA, 19 nt, Artificial Sequence
  Description of Artificial Sequence: Synthetic oligonucleotide
  Sense strand starting at position 2585 of SEQ ID NO: 1242389
ggaugacaugcuuacucua

SEQ ID NO: 1343729 - RNA, 19 nt, Artificial Sequence
  Description of Artificial Sequence: Synthetic oligonucleotide
  Antisense strand to SEQ ID NO: 1343728
uagaguaagcaugucaucc

SEQ ID NO: 1343730 - RNA, 19 nt, Artificial Sequence
  Description of Artificial Sequence: Synthetic oligonucleotide
  Sense strand starting at position 2620 of SEQ ID NO: 1242389
agauucagccgaggagauu

SEQ ID NO: 1343731 - RNA, 19 nt, Artificial Sequence
  Description of Artificial Sequence: Synthetic oligonucleotide
  Antisense strand to SEQ ID NO: 1343730
aaucuccucggcugaaucu

SEQ ID NO: 1343732 - RNA, 19 nt, Artificial Sequence
  Description of Artificial Sequence: Synthetic oligonucleotide
  Sense strand starting at position 2631 of SEQ ID NO: 1242389
aggagauucuacguaagga

SEQ ID NO: 1343733 - RNA, 19 nt, Artificial Sequence
  Description of Artificial Sequence: Synthetic oligonucleotide
  Antisense strand to SEQ ID NO: 1343732
uccuuacguagaaucuccu

SEQ ID NO: 1343734 - RNA, 19 nt, Artificial Sequence
  Description of Artificial Sequence: Synthetic oligonucleotide
  Sense strand starting at position 2635 of SEQ ID NO: 1242389
gauucuacguaaggaacua

SEQ ID NO: 1343735 - RNA, 19 nt, Artificial Sequence
  Description of Artificial Sequence: Synthetic oligonucleotide
  Antisense strand to SEQ ID NO: 1343734
uaguuccuuacguagaauc

SEQ ID NO: 1343736 - RNA, 19 nt, Artificial Sequence
  Description of Artificial Sequence: Synthetic oligonucleotide
  Sense strand starting at position 2680 of SEQ ID NO: 1242389
uaggaauguguauguaaau

SEQ ID NO: 1343737 - RNA, 19 nt, Artificial Sequence
  Description of Artificial Sequence: Synthetic oligonucleotide
  Antisense strand to SEQ ID NO: 1343736
auuuacauacacauuccua

SEQ ID NO: 1343738 - RNA, 19 nt, Artificial Sequence
  Description of Artificial Sequence: Synthetic oligonucleotide
  Sense strand starting at position 2681 of SEQ ID NO: 1242389
aggaauguguauguaaaua

SEQ ID NO: 1343739 - RNA, 19 nt, Artificial Sequence
  Description of Artificial Sequence: Synthetic oligonucleotide
  Antisense strand to SEQ ID NO: 1343738
uauuuacauacacauuccu

SEQ ID NO: 1343740 - RNA, 19 nt, Artificial Sequence
  Description of Artificial Sequence: Synthetic oligonucleotide
  Sense strand starting at position 2741 of SEQ ID NO: 1242389
ugggaaagguuucaugaag

SEQ ID NO: 1343741 - RNA, 19 nt, Artificial Sequence
  Description of Artificial Sequence: Synthetic oligonucleotide
  Antisense strand to SEQ ID NO: 1343740
cuucaugaaaccuuuccca

SEQ ID NO: 1343742 - RNA, 19 nt, Artificial Sequence
  Description of Artificial Sequence: Synthetic oligonucleotide
  Sense strand starting at position 2771 of SEQ ID NO: 1242389
caaguugggucuuaaagau

SEQ ID NO: 1343743 - RNA, 19 nt, Artificial Sequence
  Description of Artificial Sequence: Synthetic oligonucleotide
  Antisense strand to SEQ ID NO: 1343742
aucuuuaagacccaacuug

SEQ ID NO: 1343744 - RNA, 19 nt, Artificial Sequence
  Description of Artificial Sequence: Synthetic oligonucleotide
  Sense strand starting at position 2994 of SEQ ID NO: 1242389
ccagaacuauaguguaaga

SEQ ID NO: 1343745 - RNA, 19 nt, Artificial Sequence
  Description of Artificial Sequence: Synthetic oligonucleotide
  Antisense strand to SEQ ID NO: 1343744
ucuuacacuauaguucugg

SEQ ID NO: 1343746 - RNA, 19 nt, Artificial Sequence
  Description of Artificial Sequence: Synthetic oligonucleotide
  Sense strand starting at position 2999 of SEQ ID NO: 1242389
acuauaguguaagauguuu

SEQ ID NO: 1343747 - RNA, 19 nt, Artificial Sequence
  Description of Artificial Sequence: Synthetic oligonucleotide
  Antisense strand to SEQ ID NO: 1343746
aaacaucuuacacuauagu

SEQ ID NO: 1343748 - RNA, 19 nt, Artificial Sequence
  Description of Artificial Sequence: Synthetic oligonucleotide
  Sense strand starting at position 3027 of SEQ ID NO: 1242389
gcagaaagauggguucuga

SEQ ID NO: 1343749 - RNA, 19 nt, Artificial Sequence
  Description of Artificial Sequence: Synthetic oligonucleotide
  Antisense strand to SEQ ID NO: 1343748
ucagaacccaucuuucugc

SEQ ID NO: 1343750 - RNA, 19 nt, Artificial Sequence
  Description of Artificial Sequence: Synthetic oligonucleotide
  Sense strand starting at position 3031 of SEQ ID NO: 1242389
aaagauggguucugacgau

SEQ ID NO: 1343751 - RNA, 19 nt, Artificial Sequence
  Description of Artificial Sequence: Synthetic oligonucleotide
  Antisense strand to SEQ ID NO: 1343750
aucgucagaacccaucuuu

SEQ ID NO: 1343752 - RNA, 19 nt, Artificial Sequence
  Description of Artificial Sequence: Synthetic oligonucleotide
  Sense strand starting at position 3099 of SEQ ID NO: 1242389
uuguaauacugcguuugga

SEQ ID NO: 1343753 - RNA, 19 nt, Artificial Sequence
  Description of Artificial Sequence: Synthetic oligonucleotide
  Antisense strand to SEQ ID NO: 1343752
uccaaacgcaguauuacaa

SEQ ID NO: 1343754 - RNA, 19 nt, Artificial Sequence
  Description of Artificial Sequence: Synthetic oligonucleotide
  Sense strand starting at position 3128 of SEQ ID NO: 1242389
gugccucuuguggaaggaa

SEQ ID NO: 1343755 - RNA, 19 nt, Artificial Sequence
  Description of Artificial Sequence: Synthetic oligonucleotide
  Antisense strand to SEQ ID NO: 1343754
uuccuuccacaagaggcac

SEQ ID NO: 1343756 - RNA, 19 nt, Artificial Sequence
  Description of Artificial Sequence: Synthetic oligonucleotide
  Sense strand starting at position 3232 of SEQ ID NO: 1242389
agcuuugacucagauccuu

SEQ ID NO: 1343757 - RNA, 19 nt, Artificial Sequence
  Description of Artificial Sequence: Synthetic oligonucleotide
  Antisense strand to SEQ ID NO: 1343756
aaggaucugagucaaagcu

SEQ ID NO: 1343758 - RNA, 19 nt, Artificial Sequence
  Description of Artificial Sequence: Synthetic oligonucleotide
  Sense strand starting at position 3318 of SEQ ID NO: 1242389
cccacaugucuguauucca

SEQ ID NO: 1343759 - RNA, 19 nt, Artificial Sequence
  Description of Artificial Sequence: Synthetic oligonucleotide
  Antisense strand to SEQ ID NO: 1343758
uggaauacagacauguggg

SEQ ID NO: 1343760 - RNA, 19 nt, Artificial Sequence
  Description of Artificial Sequence: Synthetic oligonucleotide
  Sense strand starting at position 3325 of SEQ ID NO: 1242389
gucuguauuccagagagcu

SEQ ID NO: 1343761 - RNA, 19 nt, Artificial Sequence
  Description of Artificial Sequence: Synthetic oligonucleotide
  Antisense strand to SEQ ID NO: 1343760
agcucucuggaauacagac

SEQ ID NO: 1343762 - RNA, 19 nt, Artificial Sequence
  Description of Artificial Sequence: Synthetic oligonucleotide
  Sense strand starting at position 3327 of SEQ ID NO: 1242389
cuguauuccagagagcuga

SEQ ID NO: 1343763 - RNA, 19 nt, Artificial Sequence
  Description of Artificial Sequence: Synthetic oligonucleotide
  Antisense strand to SEQ ID NO: 1343762
ucagcucucuggaauacag

SEQ ID NO: 1343764 - RNA, 19 nt, Artificial Sequence
  Description of Artificial Sequence: Synthetic oligonucleotide
  Sense strand starting at position 3408 of SEQ ID NO: 1242389
aaaggaaguuaauguggau

SEQ ID NO: 1343765 - RNA, 19 nt, Artificial Sequence
  Description of Artificial Sequence: Synthetic oligonucleotide
  Antisense strand to SEQ ID NO: 1343764
auccacauuaacuuccuuu

SEQ ID NO: 1343766 - RNA, 19 nt, Artificial Sequence
  Description of Artificial Sequence: Synthetic oligonucleotide
  Sense strand starting at position 3411 of SEQ ID NO: 1242389
ggaaguuaauguggauaag

SEQ ID NO: 1343767 - RNA, 19 nt, Artificial Sequence
  Description of Artificial Sequence: Synthetic oligonucleotide
  Antisense strand to SEQ ID NO: 1343766
cuuauccacauuaacuucc

SEQ ID NO: 1343768 - RNA, 19 nt, Artificial Sequence
  Description of Artificial Sequence: Synthetic oligonucleotide
  Sense strand starting at position 3482 of SEQ ID NO: 1242389
ccugcugccaguuaggaaa

SEQ ID NO: 1343769 - RNA, 19 nt, Artificial Sequence
  Description of Artificial Sequence: Synthetic oligonucleotide
  Antisense strand to SEQ ID NO: 1343768
uuuccuaacuggcagcagg

SEQ ID NO: 1343770 - RNA, 19 nt, Artificial Sequence
  Description of Artificial Sequence: Synthetic oligonucleotide
  Sense strand starting at position 3493 of SEQ ID NO: 1242389
uuaggaaauuauugggaag

SEQ ID NO: 1343771 - RNA, 19 nt, Artificial Sequence
  Description of Artificial Sequence: Synthetic oligonucleotide
  Antisense strand to SEQ ID NO: 1343770
cuucccaauaauuuccuaa

SEQ ID NO: 1343772 - RNA, 19 nt, Artificial Sequence
  Description of Artificial Sequence: Synthetic oligonucleotide
  Sense strand starting at position 3496 of SEQ ID NO: 1242389
ggaaauuauugggaagucu

SEQ ID NO: 1343773 - RNA, 19 nt, Artificial Sequence
  Description of Artificial Sequence: Synthetic oligonucleotide
  Antisense strand to SEQ ID NO: 1343772
agacuucccaauaauuucc

SEQ ID NO: 1343774 - RNA, 19 nt, Artificial Sequence
  Description of Artificial Sequence: Synthetic oligonucleotide
  Sense strand starting at position 3505 of SEQ ID NO: 1242389
ugggaagucuuucccaaua

SEQ ID NO: 1343775 - RNA, 19 nt, Artificial Sequence
  Description of Artificial Sequence: Synthetic oligonucleotide
  Antisense strand to SEQ ID NO: 1343774
uauugggaaagacuuccca

SEQ ID NO: 1343776 - RNA, 19 nt, Artificial Sequence
  Description of Artificial Sequence: Synthetic oligonucleotide
  Sense strand starting at position 3507 of SEQ ID NO: 1242389
ggaagucuuucccaauaau

SEQ ID NO: 1343777 - RNA, 19 nt, Artificial Sequence
  Description of Artificial Sequence: Synthetic oligonucleotide
  Antisense strand to SEQ ID NO: 1343776
auuauugggaaagacuucc

SEQ ID NO: 1343778 - RNA, 19 nt, Artificial Sequence
  Description of Artificial Sequence: Synthetic oligonucleotide
  Sense strand starting at position 3882 of SEQ ID NO: 1242389
ugagaagaauauugaagga

SEQ ID NO: 1343779 - RNA, 19 nt, Artificial Sequence
  Description of Artificial Sequence: Synthetic oligonucleotide
  Antisense strand to SEQ ID NO: 1343778
uccuucaauauucuucuca

SEQ ID NO: 1343780 - RNA, 19 nt, Artificial Sequence
  Description of Artificial Sequence: Synthetic oligonucleotide
  Sense strand starting at position 3901 of SEQ ID NO: 1242389
gagccuguauuugagaaag

SEQ ID NO: 1343781 - RNA, 19 nt, Artificial Sequence
  Description of Artificial Sequence: Synthetic oligonucleotide
  Antisense strand to SEQ ID NO: 1343780
cuuucucaaauacaggcuc

SEQ ID NO: 1343782 - RNA, 19 nt, Artificial Sequence
  Description of Artificial Sequence: Synthetic oligonucleotide
  Sense strand starting at position 3903 of SEQ ID NO: 1242389
gccuguauuugagaaagac

SEQ ID NO: 1343783 - RNA, 19 nt, Artificial Sequence
  Description of Artificial Sequence: Synthetic oligonucleotide
  Antisense strand to SEQ ID NO: 1343782
gucuuucucaaauacaggc

SEQ ID NO: 1343784 - RNA, 19 nt, Artificial Sequence
  Description of Artificial Sequence: Synthetic oligonucleotide
  Sense strand starting at position 3928 of SEQ ID NO: 1242389
ggaguaggugagugauuca

SEQ ID NO: 1343785 - RNA, 19 nt, Artificial Sequence
  Description of Artificial Sequence: Synthetic oligonucleotide
  Antisense strand to SEQ ID NO: 1343784
ugaaucacucaccuacucc

SEQ ID NO: 1343786 - RNA, 19 nt, Artificial Sequence
  Description of Artificial Sequence: Synthetic oligonucleotide
  Sense strand starting at position 3940 of SEQ ID NO: 1242389
ugauucaguguggguagua

SEQ ID NO: 1343787 - RNA, 19 nt, Artificial Sequence
  Description of Artificial Sequence: Synthetic oligonucleotide
  Antisense strand to SEQ ID NO: 1343786
uacuacccacacugaauca

SEQ ID NO: 1343788 - RNA, 19 nt, Artificial Sequence
  Description of Artificial Sequence: Synthetic oligonucleotide
  Sense strand starting at position 9 of SEQ ID NO: 1242390
auagcaaauucuuuaggaa

SEQ ID NO: 1343789 - RNA, 19 nt, Artificial Sequence
  Description of Artificial Sequence: Synthetic oligonucleotide
  Antisense strand to SEQ ID NO: 1343788
uuccuaaagaauuugcuau

SEQ ID NO: 1343790 - RNA, 19 nt, Artificial Sequence
  Description of Artificial Sequence: Synthetic oligonucleotide
  Sense strand starting at position 344 of SEQ ID NO: 1242390
guuuauauagcagaaccau

SEQ ID NO: 1343791 - RNA, 19 nt, Artificial Sequence
  Description of Artificial Sequence: Synthetic oligonucleotide
  Antisense strand to SEQ ID NO: 1343790
augguucugcuauauaaac

SEQ ID NO: 1343792 - RNA, 19 nt, Artificial Sequence
  Description of Artificial Sequence: Synthetic oligonucleotide
  Sense strand starting at position 386 of SEQ ID NO: 1242390
auacaacugucagagauau

SEQ ID NO: 1343793 - RNA, 19 nt, Artificial Sequence
  Description of Artificial Sequence: Synthetic oligonucleotide
  Antisense strand to SEQ ID NO: 1343792
auaucucugacaguuguau

SEQ ID NO: 1343794 - RNA, 19 nt, Artificial Sequence
  Description of Artificial Sequence: Synthetic oligonucleotide
  Sense strand starting at position 394 of SEQ ID NO: 1242390
gucagagauaucggaguau

SEQ ID NO: 1343795 - RNA, 19 nt, Artificial Sequence
  Description of Artificial Sequence: Synthetic oligonucleotide
  Antisense strand to SEQ ID NO: 1343794
auacuccgauaucucugac

SEQ ID NO: 1343796 - RNA, 19 nt, Artificial Sequence
  Description of Artificial Sequence: Synthetic oligonucleotide
  Sense strand starting at position 513 of SEQ ID NO: 1242390
aucucagccuuguaaagag

SEQ ID NO: 1343797 - RNA, 19 nt, Artificial Sequence
  Description of Artificial Sequence: Synthetic oligonucleotide
  Antisense strand to SEQ ID NO: 1343796
cucuuuacaaggcugagau

SEQ ID NO: 1343798 - RNA, 19 nt, Artificial Sequence
  Description of Artificial Sequence: Synthetic oligonucleotide
  Sense strand starting at position 555 of SEQ ID NO: 1242390
aggcuaacuucguuuaaag

SEQ ID NO: 1343799 - RNA, 19 nt, Artificial Sequence
  Description of Artificial Sequence: Synthetic oligonucleotide
  Antisense strand to SEQ ID NO: 1343798
cuuuaaacgaaguuagccu

SEQ ID NO: 1343800 - RNA, 19 nt, Artificial Sequence
  Description of Artificial Sequence: Synthetic oligonucleotide
  Sense strand starting at position 557 of SEQ ID NO: 1242390
gcuaacuucguuuaaaguc

SEQ ID NO: 1343801 - RNA, 19 nt, Artificial Sequence
  Description of Artificial Sequence: Synthetic oligonucleotide
  Antisense strand to SEQ ID NO: 1343800
gacuuuaaacgaaguuagc

SEQ ID NO: 1343802 - RNA, 19 nt, Artificial Sequence
  Description of Artificial Sequence: Synthetic oligonucleotide
  Sense strand starting at position 565 of SEQ ID NO: 1242390
cguuuaaaguccuaacgca

SEQ ID NO: 1343803 - RNA, 19 nt, Artificial Sequence
  Description of Artificial Sequence: Synthetic oligonucleotide
  Antisense strand to SEQ ID NO: 1343802
ugcguuaggacuuuaaacg

SEQ ID NO: 1343804 - RNA, 19 nt, Artificial Sequence
  Description of Artificial Sequence: Synthetic oligonucleotide
  Sense strand starting at position 702 of SEQ ID NO: 1242390
uuucuagucucugaugacu

SEQ ID NO: 1343805 - RNA, 19 nt, Artificial Sequence
  Description of Artificial Sequence: Synthetic oligonucleotide
  Antisense strand to SEQ ID NO: 1343804
agucaucagagacuagaaa

SEQ ID NO: 1343806 - RNA, 19 nt, Artificial Sequence
  Description of Artificial Sequence: Synthetic oligonucleotide
  Sense strand starting at position 962 of SEQ ID NO: 1242390
agaguaaguccugacaccu

SEQ ID NO: 1343807 - RNA, 19 nt, Artificial Sequence
  Description of Artificial Sequence: Synthetic oligonucleotide
  Antisense strand to SEQ ID NO: 1343806
aggugucaggacuuacucu

SEQ ID NO: 1343808 - RNA, 19 nt, Artificial Sequence
  Description of Artificial Sequence: Synthetic oligonucleotide
  Sense strand starting at position 1936 of SEQ ID NO: 1242390
uucucuguuacccgggaaa

SEQ ID NO: 1343809 - RNA, 19 nt, Artificial Sequence
  Description of Artificial Sequence: Synthetic oligonucleotide
  Antisense strand to SEQ ID NO: 1343808
uuucccggguaacagagaa

SEQ ID NO: 1343810 - RNA, 19 nt, Artificial Sequence
  Description of Artificial Sequence: Synthetic oligonucleotide
  Sense strand starting at position 1938 of SEQ ID NO: 1242390
cucuguuacccgggaaauc

SEQ ID NO: 1343811 - RNA, 19 nt, Artificial Sequence
  Description of Artificial Sequence: Synthetic oligonucleotide
  Antisense strand to SEQ ID NO: 1343810
gauuucccggguaacagag

SEQ ID NO: 1343812 - RNA, 19 nt, Artificial Sequence
  Description of Artificial Sequence: Synthetic oligonucleotide
  Sense strand starting at position 1991 of SEQ ID NO: 1242390
agacucagcuucguuccaa

SEQ ID NO: 1343813 - RNA, 19 nt, Artificial Sequence
  Description of Artificial Sequence: Synthetic oligonucleotide
  Antisense strand to SEQ ID NO: 1343812
uuggaacgaagcugagucu

SEQ ID NO: 1343814 - RNA, 19 nt, Artificial Sequence
  Description of Artificial Sequence: Synthetic oligonucleotide
  Sense strand starting at position 1992 of SEQ ID NO: 1242390
gacucagcuucguuccaau

SEQ ID NO: 1343815 - RNA, 19 nt, Artificial Sequence
  Description of Artificial Sequence: Synthetic oligonucleotide
  Antisense strand to SEQ ID NO: 1343814
auuggaacgaagcugaguc

SEQ ID NO: 1343816 - RNA, 19 nt, Artificial Sequence
  Description of Artificial Sequence: Synthetic oligonucleotide
  Sense strand starting at position 1995 of SEQ ID NO: 1242390
ucagcuucguuccaauaca

SEQ ID NO: 1343817 - RNA, 19 nt, Artificial Sequence
  Description of Artificial Sequence: Synthetic oligonucleotide
  Antisense strand to SEQ ID NO: 1343816
uguauuggaacgaagcuga

SEQ ID NO: 1343818 - RNA, 19 nt, Artificial Sequence
  Description of Artificial Sequence: Synthetic oligonucleotide
  Sense strand starting at position 2052 of SEQ ID NO: 1242390
cgaggccugucuuaugauu

SEQ ID NO: 1343819 - RNA, 19 nt, Artificial Sequence
  Description of Artificial Sequence: Synthetic oligonucleotide
  Antisense strand to SEQ ID NO: 1343818
aaucauaagacaggccucg

SEQ ID NO: 1343820 - RNA, 19 nt, Artificial Sequence
  Description of Artificial Sequence: Synthetic oligonucleotide
  Sense strand starting at position 2224 of SEQ ID NO: 1242390
ggaagcucuuccugucuca

SEQ ID NO: 1343821 - RNA, 19 nt, Artificial Sequence
  Description of Artificial Sequence: Synthetic oligonucleotide
  Antisense strand to SEQ ID NO: 1343820
ugagacaggaagagcuucc

SEQ ID NO: 1343822 - RNA, 19 nt, Artificial Sequence
  Description of Artificial Sequence: Synthetic oligonucleotide
  Sense strand starting at position 2385 of SEQ ID NO: 1242390
aaaugucuguaagugaaac

SEQ ID NO: 1343823 - RNA, 19 nt, Artificial Sequence
  Description of Artificial Sequence: Synthetic oligonucleotide
  Antisense strand to SEQ ID NO: 1343822
guuucacuuacagacauuu

SEQ ID NO: 1343824 - RNA, 19 nt, Artificial Sequence
  Description of Artificial Sequence: Synthetic oligonucleotide
  Sense strand starting at position 2557 of SEQ ID NO: 1242390
guggaauguuuacacuaga

SEQ ID NO: 1343825 - RNA, 19 nt, Artificial Sequence
  Description of Artificial Sequence: Synthetic oligonucleotide
  Antisense strand to SEQ ID NO: 1343824
ucuaguguaaacauuccac

SEQ ID NO: 1343826 - RNA, 19 nt, Artificial Sequence
  Description of Artificial Sequence: Synthetic oligonucleotide
  Sense strand starting at position 2638 of SEQ ID NO: 1242390
uccacauccuaggauuuga

SEQ ID NO: 1343827 - RNA, 19 nt, Artificial Sequence
  Description of Artificial Sequence: Synthetic oligonucleotide
  Antisense strand to SEQ ID NO: 1343826
ucaaauccuaggaugugga

SEQ ID NO: 1343828 - RNA, 19 nt, Artificial Sequence
  Description of Artificial Sequence: Synthetic oligonucleotide
  Sense strand starting at position 2722 of SEQ ID NO: 1242390
ccguccaguuaucuuuaca

SEQ ID NO: 1343829 - RNA, 19 nt, Artificial Sequence
  Description of Artificial Sequence: Synthetic oligonucleotide
  Antisense strand to SEQ ID NO: 1343828
uguaaagauaacuggacgg

SEQ ID NO: 1343830 - RNA, 19 nt, Artificial Sequence
  Description of Artificial Sequence: Synthetic oligonucleotide
  Sense strand starting at position 2725 of SEQ ID NO: 1242390
uccaguuaucuuuacaguu

SEQ ID NO: 1343831 - RNA, 19 nt, Artificial Sequence
  Description of Artificial Sequence: Synthetic oligonucleotide
  Antisense strand to SEQ ID NO: 1343830
aacuguaaagauaacugga

SEQ ID NO: 1343832 - RNA, 19 nt, Artificial Sequence
  Description of Artificial Sequence: Synthetic oligonucleotide
  Sense strand starting at position 2753 of SEQ ID NO: 1242390
cacacugcguccuuguaaa

SEQ ID NO: 1343833 - RNA, 19 nt, Artificial Sequence
  Description of Artificial Sequence: Synthetic oligonucleotide
  Antisense strand to SEQ ID NO: 1343832
uuuacaaggacgcagugug

SEQ ID NO: 1343834 - RNA, 19 nt, Artificial Sequence
  Description of Artificial Sequence: Synthetic oligonucleotide
  Sense strand starting at position 2995 of SEQ ID NO: 1242390
gaggcauccucagaacuga

SEQ ID NO: 1343835 - RNA, 19 nt, Artificial Sequence
  Description of Artificial Sequence: Synthetic oligonucleotide
  Antisense strand to SEQ ID NO: 1343834
ucaguucugaggaugccuc

SEQ ID NO: 1343836 - RNA, 19 nt, Artificial Sequence
  Description of Artificial Sequence: Synthetic oligonucleotide
  Sense strand starting at position 3167 of SEQ ID NO: 1242390
gcccucucuguguagguaa

SEQ ID NO: 1343837 - RNA, 19 nt, Artificial Sequence
  Description of Artificial Sequence: Synthetic oligonucleotide
  Antisense strand to SEQ ID NO: 1343836
uuaccuacacagagagggc

SEQ ID NO: 1343838 - RNA, 19 nt, Artificial Sequence
  Description of Artificial Sequence: Synthetic oligonucleotide
  Sense strand starting at position 3262 of SEQ ID NO: 1242390
gggccugacgcugaucuua

SEQ ID NO: 1343839 - RNA, 19 nt, Artificial Sequence
  Description of Artificial Sequence: Synthetic oligonucleotide
  Antisense strand to SEQ ID NO: 1343838
uaagaucagcgucaggccc

SEQ ID NO: 1343840 - RNA, 19 nt, Artificial Sequence
  Description of Artificial Sequence: Synthetic oligonucleotide
  Sense strand starting at position 3631 of SEQ ID NO: 1242390
gccaaacugcucggagguu

SEQ ID NO: 1343841 - RNA, 19 nt, Artificial Sequence
  Description of Artificial Sequence: Synthetic oligonucleotide
  Antisense strand to SEQ ID NO: 1343840
aaccuccgagcaguuuggc

SEQ ID NO: 1343842 - RNA, 19 nt, Artificial Sequence
  Description of Artificial Sequence: Synthetic oligonucleotide
  Sense strand starting at position 3632 of SEQ ID NO: 1242390
ccaaacugcucggagguua

SEQ ID NO: 1343843 - RNA, 19 nt, Artificial Sequence
  Description of Artificial Sequence: Synthetic oligonucleotide
  Antisense strand to SEQ ID NO: 1343842
uaaccuccgagcaguuugg

SEQ ID NO: 1343844 - RNA, 19 nt, Artificial Sequence
  Description of Artificial Sequence: Synthetic oligonucleotide
  Sense strand starting at position 3733 of SEQ ID NO: 1242390
gggcauucccaccauggua

SEQ ID NO: 1343845 - RNA, 19 nt, Artificial Sequence
  Description of Artificial Sequence: Synthetic oligonucleotide
  Antisense strand to SEQ ID NO: 1343844
uaccauggugggaaugccc

SEQ ID NO: 1343846 - RNA, 19 nt, Artificial Sequence
  Description of Artificial Sequence: Synthetic oligonucleotide
  Sense strand starting at position 3792 of SEQ ID NO: 1242390
acgacuucccgugaacaca

SEQ ID NO: 1343847 - RNA, 19 nt, Artificial Sequence
  Description of Artificial Sequence: Synthetic oligonucleotide
  Antisense strand to SEQ ID NO: 1343846
uguguucacgggaagucgu

SEQ ID NO: 1343848 - RNA, 19 nt, Artificial Sequence
  Description of Artificial Sequence: Synthetic oligonucleotide
  Sense strand starting at position 3821 of SEQ ID NO: 1242390
ugcgcuaagaucucgccua

SEQ ID NO: 1343849 - RNA, 19 nt, Artificial Sequence
  Description of Artificial Sequence: Synthetic oligonucleotide
  Antisense strand to SEQ ID NO: 1343848
uaggcgagaucuuagcgca

SEQ ID NO: 1343850 - RNA, 19 nt, Artificial Sequence
  Description of Artificial Sequence: Synthetic oligonucleotide
  Sense strand starting at position 3822 of SEQ ID NO: 1242390
gcgcuaagaucucgccuaa

SEQ ID NO: 1343851 - RNA, 19 nt, Artificial Sequence
  Description of Artificial Sequence: Synthetic oligonucleotide
  Antisense strand to SEQ ID NO: 1343850
uuaggcgagaucuuagcgc

SEQ ID NO: 1343852 - RNA, 19 nt, Artificial Sequence
  Description of Artificial Sequence: Synthetic oligonucleotide
  Sense strand starting at position 3855 of SEQ ID NO: 1242390
ggcacuagguugucagagu

SEQ ID NO: 1343853 - RNA, 19 nt, Artificial Sequence
  Description of Artificial Sequence: Synthetic oligonucleotide
  Antisense strand to SEQ ID NO: 1343852
acucugacaaccuagugcc

SEQ ID NO: 1343854 - RNA, 19 nt, Artificial Sequence
  Description of Artificial Sequence: Synthetic oligonucleotide
  Sense strand starting at position 3866 of SEQ ID NO: 1242390
gucagagucucagauacag

SEQ ID NO: 1343855 - RNA, 19 nt, Artificial Sequence
  Description of Artificial Sequence: Synthetic oligonucleotide
  Antisense strand to SEQ ID NO: 1343854
cuguaucugagacucugac

SEQ ID NO: 1343856 - RNA, 19 nt, Artificial Sequence
  Description of Artificial Sequence: Synthetic oligonucleotide
  Sense strand starting at position 3902 of SEQ ID NO: 1242390
cugccaugccuaggaaaga

SEQ ID NO: 1343857 - RNA, 19 nt, Artificial Sequence
  Description of Artificial Sequence: Synthetic oligonucleotide
  Antisense strand to SEQ ID NO: 1343856
ucuuuccuaggcauggcag

SEQ ID NO: 1343858 - RNA, 19 nt, Artificial Sequence
  Description of Artificial Sequence: Synthetic oligonucleotide
  Sense strand starting at position 3903 of SEQ ID NO: 1242390
ugccaugccuaggaaagaa

SEQ ID NO: 1343859 - RNA, 19 nt, Artificial Sequence
  Description of Artificial Sequence: Synthetic oligonucleotide
  Antisense strand to SEQ ID NO: 1343858
uucuuuccuaggcauggca

SEQ ID NO: 1343860 - RNA, 19 nt, Artificial Sequence
  Description of Artificial Sequence: Synthetic oligonucleotide
  Sense strand starting at position 3939 of SEQ ID NO: 1242390
ugcagaguucucgagcuua

SEQ ID NO: 1343861 - RNA, 19 nt, Artificial Sequence
  Description of Artificial Sequence: Synthetic oligonucleotide
  Antisense strand to SEQ ID NO: 1343860
uaagcucgagaacucugca

SEQ ID NO: 1343862 - RNA, 19 nt, Artificial Sequence
  Description of Artificial Sequence: Synthetic oligonucleotide
  Sense strand starting at position 3950 of SEQ ID NO: 1242390
cgagcuuaagcucagggaa

SEQ ID NO: 1343863 - RNA, 19 nt, Artificial Sequence
  Description of Artificial Sequence: Synthetic oligonucleotide
  Antisense strand to SEQ ID NO: 1343862
uucccugagcuuaagcucg

SEQ ID NO: 1343864 - RNA, 19 nt, Artificial Sequence
  Description of Artificial Sequence: Synthetic oligonucleotide
  Sense strand starting at position 3952 of SEQ ID NO: 1242390
agcuuaagcucagggaagu

SEQ ID NO: 1343865 - RNA, 19 nt, Artificial Sequence
  Description of Artificial Sequence: Synthetic oligonucleotide
  Antisense strand to SEQ ID NO: 1343864
acuucccugagcuuaagcu

SEQ ID NO: 1343866 - RNA, 19 nt, Artificial Sequence
  Description of Artificial Sequence: Synthetic oligonucleotide
  Sense strand starting at position 74 of SEQ ID NO: 1242391
cuguacuauguagaguaua

SEQ ID NO: 1343867 - RNA, 19 nt, Artificial Sequence
  Description of Artificial Sequence: Synthetic oligonucleotide
  Antisense strand to SEQ ID NO: 1343866
uauacucuacauaguacag

SEQ ID NO: 1343868 - RNA, 19 nt, Artificial Sequence
  Description of Artificial Sequence: Synthetic oligonucleotide
  Sense strand starting at position 93 of SEQ ID NO: 1242391
aauagaaaguggucuagau

SEQ ID NO: 1343869 - RNA, 19 nt, Artificial Sequence
  Description of Artificial Sequence: Synthetic oligonucleotide
  Antisense strand to SEQ ID NO: 1343868
aucuagaccacuuucuauu

SEQ ID NO: 1343870 - RNA, 19 nt, Artificial Sequence
  Description of Artificial Sequence: Synthetic oligonucleotide
  Sense strand starting at position 100 of SEQ ID NO: 1242391
aguggucuagauggucuaa

SEQ ID NO: 1343871 - RNA, 19 nt, Artificial Sequence
  Description of Artificial Sequence: Synthetic oligonucleotide
  Antisense strand to SEQ ID NO: 1343870
uuagaccaucuagaccacu

SEQ ID NO: 1343872 - RNA, 19 nt, Artificial Sequence
  Description of Artificial Sequence: Synthetic oligonucleotide
  Sense strand starting at position 102 of SEQ ID NO: 1242391
uggucuagauggucuaaca

SEQ ID NO: 1343873 - RNA, 19 nt, Artificial Sequence
  Description of Artificial Sequence: Synthetic oligonucleotide
  Antisense strand to SEQ ID NO: 1343872
uguuagaccaucuagacca

SEQ ID NO: 1343874 - RNA, 19 nt, Artificial Sequence
  Description of Artificial Sequence: Synthetic oligonucleotide
  Sense strand starting at position 170 of SEQ ID NO: 1242391
auagcaaauucuuuaggaa

SEQ ID NO: 1343875 - RNA, 19 nt, Artificial Sequence
  Description of Artificial Sequence: Synthetic oligonucleotide
  Antisense strand to SEQ ID NO: 1343874
uuccuaaagaauuugcuau

SEQ ID NO: 1343876 - RNA, 19 nt, Artificial Sequence
  Description of Artificial Sequence: Synthetic oligonucleotide
  Sense strand starting at position 505 of SEQ ID NO: 1242391
guuuauauagcagaaccau

SEQ ID NO: 1343877 - RNA, 19 nt, Artificial Sequence
  Description of Artificial Sequence: Synthetic oligonucleotide
  Antisense strand to SEQ ID NO: 1343876
augguucugcuauauaaac

SEQ ID NO: 1343878 - RNA, 19 nt, Artificial Sequence
  Description of Artificial Sequence: Synthetic oligonucleotide
  Sense strand starting at position 547 of SEQ ID NO: 1242391
auacaacugucagagauau

SEQ ID NO: 1343879 - RNA, 19 nt, Artificial Sequence
  Description of Artificial Sequence: Synthetic oligonucleotide
  Antisense strand to SEQ ID NO: 1343878
auaucucugacaguuguau

SEQ ID NO: 1343880 - RNA, 19 nt, Artificial Sequence
  Description of Artificial Sequence: Synthetic oligonucleotide
  Sense strand starting at position 555 of SEQ ID NO: 1242391
gucagagauaucggaguau

SEQ ID NO: 1343881 - RNA, 19 nt, Artificial Sequence
  Description of Artificial Sequence: Synthetic oligonucleotide
  Antisense strand to SEQ ID NO: 1343880
auacuccgauaucucugac

SEQ ID NO: 1343882 - RNA, 19 nt, Artificial Sequence
  Description of Artificial Sequence: Synthetic oligonucleotide
  Sense strand starting at position 674 of SEQ ID NO: 1242391
aucucagccuuguaaagag

SEQ ID NO: 1343883 - RNA, 19 nt, Artificial Sequence
  Description of Artificial Sequence: Synthetic oligonucleotide
  Antisense strand to SEQ ID NO: 1343882
cucuuuacaaggcugagau

SEQ ID NO: 1343884 - RNA, 19 nt, Artificial Sequence
  Description of Artificial Sequence: Synthetic oligonucleotide
  Sense strand starting at position 716 of SEQ ID NO: 1242391
aggcuaacuucguuuaaag

SEQ ID NO: 1343885 - RNA, 19 nt, Artificial Sequence
  Description of Artificial Sequence: Synthetic oligonucleotide
  Antisense strand to SEQ ID NO: 1343884
cuuuaaacgaaguuagccu

SEQ ID NO: 1343886 - RNA, 19 nt, Artificial Sequence
  Description of Artificial Sequence: Synthetic oligonucleotide
  Sense strand starting at position 718 of SEQ ID NO: 1242391
gcuaacuucguuuaaaguc

SEQ ID NO: 1343887 - RNA, 19 nt, Artificial Sequence
  Description of Artificial Sequence: Synthetic oligonucleotide
  Antisense strand to SEQ ID NO: 1343886
gacuuuaaacgaaguuagc

SEQ ID NO: 1343888 - RNA, 19 nt, Artificial Sequence
  Description of Artificial Sequence: Synthetic oligonucleotide
  Sense strand starting at position 726 of SEQ ID NO: 1242391
cguuuaaaguccuaacgca

SEQ ID NO: 1343889 - RNA, 19 nt, Artificial Sequence
  Description of Artificial Sequence: Synthetic oligonucleotide
  Antisense strand to SEQ ID NO: 1343888
ugcguuaggacuuuaaacg

SEQ ID NO: 1343890 - RNA, 19 nt, Artificial Sequence
  Description of Artificial Sequence: Synthetic oligonucleotide
  Sense strand starting at position 863 of SEQ ID NO: 1242391
uuucuagucucugaugacu

SEQ ID NO: 1343891 - RNA, 19 nt, Artificial Sequence
  Description of Artificial Sequence: Synthetic oligonucleotide
  Antisense strand to SEQ ID NO: 1343890
agucaucagagacuagaaa

SEQ ID NO: 1343892 - RNA, 19 nt, Artificial Sequence
  Description of Artificial Sequence: Synthetic oligonucleotide
  Sense strand starting at position 1123 of SEQ ID NO: 1242391
agaguaaguccugacaccu

SEQ ID NO: 1343893 - RNA, 19 nt, Artificial Sequence
  Description of Artificial Sequence: Synthetic oligonucleotide
  Antisense strand to SEQ ID NO: 1343892
aggugucaggacuuacucu

SEQ ID NO: 1343894 - RNA, 19 nt, Artificial Sequence
  Description of Artificial Sequence: Synthetic oligonucleotide
  Sense strand starting at position 2097 of SEQ ID NO: 1242391
uucucuguuacccgggaaa

SEQ ID NO: 1343895 - RNA, 19 nt, Artificial Sequence
  Description of Artificial Sequence: Synthetic oligonucleotide
  Antisense strand to SEQ ID NO: 1343894
uuucccggguaacagagaa

SEQ ID NO: 1343896 - RNA, 19 nt, Artificial Sequence
  Description of Artificial Sequence: Synthetic oligonucleotide
  Sense strand starting at position 2099 of SEQ ID NO: 1242391
cucuguuacccgggaaauc

SEQ ID NO: 1343897 - RNA, 19 nt, Artificial Sequence
  Description of Artificial Sequence: Synthetic oligonucleotide
  Antisense strand to SEQ ID NO: 1343896
gauuucccggguaacagag

SEQ ID NO: 1343898 - RNA, 19 nt, Artificial Sequence
  Description of Artificial Sequence: Synthetic oligonucleotide
  Sense strand starting at position 2152 of SEQ ID NO: 1242391
agacucagcuucguuccaa

SEQ ID NO: 1343899 - RNA, 19 nt, Artificial Sequence
  Description of Artificial Sequence: Synthetic oligonucleotide
  Antisense strand to SEQ ID NO: 1343898
uuggaacgaagcugagucu

SEQ ID NO: 1343900 - RNA, 19 nt, Artificial Sequence
  Description of Artificial Sequence: Synthetic oligonucleotide
  Sense strand starting at position 2153 of SEQ ID NO: 1242391
gacucagcuucguuccaau

SEQ ID NO: 1343901 - RNA, 19 nt, Artificial Sequence
  Description of Artificial Sequence: Synthetic oligonucleotide
  Antisense strand to SEQ ID NO: 1343900
auuggaacgaagcugaguc

SEQ ID NO: 1343902 - RNA, 19 nt, Artificial Sequence
  Description of Artificial Sequence: Synthetic oligonucleotide
  Sense strand starting at position 2156 of SEQ ID NO: 1242391
ucagcuucguuccaauaca

SEQ ID NO: 1343903 - RNA, 19 nt, Artificial Sequence
  Description of Artificial Sequence: Synthetic oligonucleotide
  Antisense strand to SEQ ID NO: 1343902
uguauuggaacgaagcuga

SEQ ID NO: 1343904 - RNA, 19 nt, Artificial Sequence
  Description of Artificial Sequence: Synthetic oligonucleotide
  Sense strand starting at position 2213 of SEQ ID NO: 1242391
cgaggccugucuuaugauu

SEQ ID NO: 1343905 - RNA, 19 nt, Artificial Sequence
  Description of Artificial Sequence: Synthetic oligonucleotide
  Antisense strand to SEQ ID NO: 1343904
aaucauaagacaggccucg

SEQ ID NO: 1343906 - RNA, 19 nt, Artificial Sequence
  Description of Artificial Sequence: Synthetic oligonucleotide
  Sense strand starting at position 2385 of SEQ ID NO: 1242391
ggaagcucuuccugucuca

SEQ ID NO: 1343907 - RNA, 19 nt, Artificial Sequence
  Description of Artificial Sequence: Synthetic oligonucleotide
  Antisense strand to SEQ ID NO: 1343906
ugagacaggaagagcuucc

SEQ ID NO: 1343908 - RNA, 19 nt, Artificial Sequence
  Description of Artificial Sequence: Synthetic oligonucleotide
  Sense strand starting at position 2546 of SEQ ID NO: 1242391
aaaugucuguaagugaaac

SEQ ID NO: 1343909 - RNA, 19 nt, Artificial Sequence
  Description of Artificial Sequence: Synthetic oligonucleotide
  Antisense strand to SEQ ID NO: 1343908
guuucacuuacagacauuu

SEQ ID NO: 1343910 - RNA, 19 nt, Artificial Sequence
  Description of Artificial Sequence: Synthetic oligonucleotide
  Sense strand starting at position 2718 of SEQ ID NO: 1242391
guggaauguuuacacuaga

SEQ ID NO: 1343911 - RNA, 19 nt, Artificial Sequence
  Description of Artificial Sequence: Synthetic oligonucleotide
  Antisense strand to SEQ ID NO: 1343910
ucuaguguaaacauuccac

SEQ ID NO: 1343912 - RNA, 19 nt, Artificial Sequence
  Description of Artificial Sequence: Synthetic oligonucleotide
  Sense strand starting at position 2799 of SEQ ID NO: 1242391
uccacauccuaggauuuga

SEQ ID NO: 1343913 - RNA, 19 nt, Artificial Sequence
  Description of Artificial Sequence: Synthetic oligonucleotide
  Antisense strand to SEQ ID NO: 1343912
ucaaauccuaggaugugga

SEQ ID NO: 1343914 - RNA, 19 nt, Artificial Sequence
  Description of Artificial Sequence: Synthetic oligonucleotide
  Sense strand starting at position 2883 of SEQ ID NO: 1242391
ccguccaguuaucuuuaca

SEQ ID NO: 1343915 - RNA, 19 nt, Artificial Sequence
  Description of Artificial Sequence: Synthetic oligonucleotide
  Antisense strand to SEQ ID NO: 1343914
uguaaagauaacuggacgg

SEQ ID NO: 1343916 - RNA, 19 nt, Artificial Sequence
  Description of Artificial Sequence: Synthetic oligonucleotide
  Sense strand starting at position 2886 of SEQ ID NO: 1242391
uccaguuaucuuuacaguu

SEQ ID NO: 1343917 - RNA, 19 nt, Artificial Sequence
  Description of Artificial Sequence: Synthetic oligonucleotide
  Antisense strand to SEQ ID NO: 1343916
aacuguaaagauaacugga

SEQ ID NO: 1343918 - RNA, 19 nt, Artificial Sequence
  Description of Artificial Sequence: Synthetic oligonucleotide
  Sense strand starting at position 2914 of SEQ ID NO: 1242391
cacacugcguccuuguaaa

SEQ ID NO: 1343919 - RNA, 19 nt, Artificial Sequence
  Description of Artificial Sequence: Synthetic oligonucleotide
  Antisense strand to SEQ ID NO: 1343918
uuuacaaggacgcagugug

SEQ ID NO: 1343920 - RNA, 19 nt, Artificial Sequence
  Description of Artificial Sequence: Synthetic oligonucleotide
  Sense strand starting at position 3156 of SEQ ID NO: 1242391
gaggcauccucagaacuga

SEQ ID NO: 1343921 - RNA, 19 nt, Artificial Sequence
  Description of Artificial Sequence: Synthetic oligonucleotide
  Antisense strand to SEQ ID NO: 1343920
ucaguucugaggaugccuc

SEQ ID NO: 1343922 - RNA, 19 nt, Artificial Sequence
  Description of Artificial Sequence: Synthetic oligonucleotide
  Sense strand starting at position 3328 of SEQ ID NO: 1242391
gcccucucuguguagguaa

SEQ ID NO: 1343923 - RNA, 19 nt, Artificial Sequence
  Description of Artificial Sequence: Synthetic oligonucleotide
  Antisense strand to SEQ ID NO: 1343922
uuaccuacacagagagggc

SEQ ID NO: 1343924 - RNA, 19 nt, Artificial Sequence
  Description of Artificial Sequence: Synthetic oligonucleotide
  Sense strand starting at position 3423 of SEQ ID NO: 1242391
gggccugacgcugaucuua

SEQ ID NO: 1343925 - RNA, 19 nt, Artificial Sequence
  Description of Artificial Sequence: Synthetic oligonucleotide
  Antisense strand to SEQ ID NO: 1343924
uaagaucagcgucaggccc

SEQ ID NO: 1343926 - RNA, 19 nt, Artificial Sequence
  Description of Artificial Sequence: Synthetic oligonucleotide
  Sense strand starting at position 3792 of SEQ ID NO: 1242391
gccaaacugcucggagguu

SEQ ID NO: 1343927 - RNA, 19 nt, Artificial Sequence
  Description of Artificial Sequence: Synthetic oligonucleotide
  Antisense strand to SEQ ID NO: 1343926
aaccuccgagcaguuuggc

SEQ ID NO: 1343928 - RNA, 19 nt, Artificial Sequence
  Description of Artificial Sequence: Synthetic oligonucleotide
  Sense strand starting at position 3793 of SEQ ID NO: 1242391
ccaaacugcucggagguua

SEQ ID NO: 1343929 - RNA, 19 nt, Artificial Sequence
  Description of Artificial Sequence: Synthetic oligonucleotide
  Antisense strand to SEQ ID NO: 1343928
uaaccuccgagcaguuugg

SEQ ID NO: 1343930 - RNA, 19 nt, Artificial Sequence
  Description of Artificial Sequence: Synthetic oligonucleotide
  Sense strand starting at position 3894 of SEQ ID NO: 1242391
gggcauucccaccauggua

SEQ ID NO: 1343931 - RNA, 19 nt, Artificial Sequence
  Description of Artificial Sequence: Synthetic oligonucleotide
  Antisense strand to SEQ ID NO: 1343930
uaccauggugggaaugccc

SEQ ID NO: 1343932 - RNA, 19 nt, Artificial Sequence
  Description of Artificial Sequence: Synthetic oligonucleotide
  Sense strand starting at position 3953 of SEQ ID NO: 1242391
acgacuucccgugaacaca

SEQ ID NO: 1343933 - RNA, 19 nt, Artificial Sequence
  Description of Artificial Sequence: Synthetic oligonucleotide
  Antisense strand to SEQ ID NO: 1343932
uguguucacgggaagucgu

SEQ ID NO: 1343934 - RNA, 19 nt, Artificial Sequence
  Description of Artificial Sequence: Synthetic oligonucleotide
  Sense strand starting at position 3982 of SEQ ID NO: 1242391
ugcgcuaagaucucgccua

SEQ ID NO: 1343935 - RNA, 19 nt, Artificial Sequence
  Description of Artificial Sequence: Synthetic oligonucleotide
  Antisense strand to SEQ ID NO: 1343934
uaggcgagaucuuagcgca

SEQ ID NO: 1343936 - RNA, 19 nt, Artificial Sequence
  Description of Artificial Sequence: Synthetic oligonucleotide
  Sense strand starting at position 3983 of SEQ ID NO: 1242391
gcgcuaagaucucgccuaa

SEQ ID NO: 1343937 - RNA, 19 nt, Artificial Sequence
  Description of Artificial Sequence: Synthetic oligonucleotide
  Antisense strand to SEQ ID NO: 1343936
uuaggcgagaucuuagcgc

SEQ ID NO: 1343938 - RNA, 19 nt, Artificial Sequence
  Description of Artificial Sequence: Synthetic oligonucleotide
  Sense strand starting at position 261 of SEQ ID NO: 1242392
auuacaaucucguucggua

SEQ ID NO: 1343939 - RNA, 19 nt, Artificial Sequence
  Description of Artificial Sequence: Synthetic oligonucleotide
  Antisense strand to SEQ ID NO: 1343938
uaccgaacgagauuguaau

SEQ ID NO: 1343940 - RNA, 19 nt, Artificial Sequence
  Description of Artificial Sequence: Synthetic oligonucleotide
  Sense strand starting at position 263 of SEQ ID NO: 1242392
uacaaucucguucgguaau

SEQ ID NO: 1343941 - RNA, 19 nt, Artificial Sequence
  Description of Artificial Sequence: Synthetic oligonucleotide
  Antisense strand to SEQ ID NO: 1343940
auuaccgaacgagauugua

SEQ ID NO: 1343942 - RNA, 19 nt, Artificial Sequence
  Description of Artificial Sequence: Synthetic oligonucleotide
  Sense strand starting at position 265 of SEQ ID NO: 1242392
caaucucguucgguaauua

SEQ ID NO: 1343943 - RNA, 19 nt, Artificial Sequence
  Description of Artificial Sequence: Synthetic oligonucleotide
  Antisense strand to SEQ ID NO: 1343942
uaauuaccgaacgagauug

SEQ ID NO: 1343944 - RNA, 19 nt, Artificial Sequence
  Description of Artificial Sequence: Synthetic oligonucleotide
  Sense strand starting at position 266 of SEQ ID NO: 1242392
aaucucguucgguaauuau

SEQ ID NO: 1343945 - RNA, 19 nt, Artificial Sequence
  Description of Artificial Sequence: Synthetic oligonucleotide
  Antisense strand to SEQ ID NO: 1343944
auaauuaccgaacgagauu

SEQ ID NO: 1343946 - RNA, 19 nt, Artificial Sequence
  Description of Artificial Sequence: Synthetic oligonucleotide
  Sense strand starting at position 275 of SEQ ID NO: 1242392
cgguaauuauucuuagccu

SEQ ID NO: 1343947 - RNA, 19 nt, Artificial Sequence
  Description of Artificial Sequence: Synthetic oligonucleotide
  Antisense strand to SEQ ID NO: 1343946
aggcuaagaauaauuaccg

SEQ ID NO: 1343948 - RNA, 19 nt, Artificial Sequence
  Description of Artificial Sequence: Synthetic oligonucleotide
  Sense strand starting at position 634 of SEQ ID NO: 1242392
ccuggucugagcuggagaa

SEQ ID NO: 1343949 - RNA, 19 nt, Artificial Sequence
  Description of Artificial Sequence: Synthetic oligonucleotide
  Antisense strand to SEQ ID NO: 1343948
uucuccagcucagaccagg

SEQ ID NO: 1343950 - RNA, 19 nt, Artificial Sequence
  Description of Artificial Sequence: Synthetic oligonucleotide
  Sense strand starting at position 635 of SEQ ID NO: 1242392
cuggucugagcuggagaaa

SEQ ID NO: 1343951 - RNA, 19 nt, Artificial Sequence
  Description of Artificial Sequence: Synthetic oligonucleotide
  Antisense strand to SEQ ID NO: 1343950
uuucuccagcucagaccag

SEQ ID NO: 1343952 - RNA, 19 nt, Artificial Sequence
  Description of Artificial Sequence: Synthetic oligonucleotide
  Sense strand starting at position 749 of SEQ ID NO: 1242392
gcguccggcggguuaauau

SEQ ID NO: 1343953 - RNA, 19 nt, Artificial Sequence
  Description of Artificial Sequence: Synthetic oligonucleotide
  Antisense strand to SEQ ID NO: 1343952
auauuaacccgccggacgc

SEQ ID NO: 1343954 - RNA, 19 nt, Artificial Sequence
  Description of Artificial Sequence: Synthetic oligonucleotide
  Sense strand starting at position 758 of SEQ ID NO: 1242392
ggguuaauaucaccgcgga

SEQ ID NO: 1343955 - RNA, 19 nt, Artificial Sequence
  Description of Artificial Sequence: Synthetic oligonucleotide
  Antisense strand to SEQ ID NO: 1343954
uccgcggugauauuaaccc

SEQ ID NO: 1343956 - RNA, 19 nt, Artificial Sequence
  Description of Artificial Sequence: Synthetic oligonucleotide
  Sense strand starting at position 981 of SEQ ID NO: 1242392
gagagccuagcuugaagaa

SEQ ID NO: 1343957 - RNA, 19 nt, Artificial Sequence
  Description of Artificial Sequence: Synthetic oligonucleotide
  Antisense strand to SEQ ID NO: 1343956
uucuucaagcuaggcucuc

SEQ ID NO: 1343958 - RNA, 19 nt, Artificial Sequence
  Description of Artificial Sequence: Synthetic oligonucleotide
  Sense strand starting at position 1016 of SEQ ID NO: 1242392
cgcagugcugcguuucagu

SEQ ID NO: 1343959 - RNA, 19 nt, Artificial Sequence
  Description of Artificial Sequence: Synthetic oligonucleotide
  Antisense strand to SEQ ID NO: 1343958
acugaaacgcagcacugcg

SEQ ID NO: 1343960 - RNA, 19 nt, Artificial Sequence
  Description of Artificial Sequence: Synthetic oligonucleotide
  Sense strand starting at position 1031 of SEQ ID NO: 1242392
caguaucgcccucauuaga

SEQ ID NO: 1343961 - RNA, 19 nt, Artificial Sequence
  Description of Artificial Sequence: Synthetic oligonucleotide
  Antisense strand to SEQ ID NO: 1343960
ucuaaugagggcgauacug

SEQ ID NO: 1343962 - RNA, 19 nt, Artificial Sequence
  Description of Artificial Sequence: Synthetic oligonucleotide
  Sense strand starting at position 1038 of SEQ ID NO: 1242392
gcccucauuagacgaugua

SEQ ID NO: 1343963 - RNA, 19 nt, Artificial Sequence
  Description of Artificial Sequence: Synthetic oligonucleotide
  Antisense strand to SEQ ID NO: 1343962
uacaucgucuaaugagggc

SEQ ID NO: 1343964 - RNA, 19 nt, Artificial Sequence
  Description of Artificial Sequence: Synthetic oligonucleotide
  Sense strand starting at position 1453 of SEQ ID NO: 1242392
aguugaauuaacggcaguu

SEQ ID NO: 1343965 - RNA, 19 nt, Artificial Sequence
  Description of Artificial Sequence: Synthetic oligonucleotide
  Antisense strand to SEQ ID NO: 1343964
aacugccguuaauucaacu

SEQ ID NO: 1343966 - RNA, 19 nt, Artificial Sequence
  Description of Artificial Sequence: Synthetic oligonucleotide
  Sense strand starting at position 1473 of SEQ ID NO: 1242392
ucgucaguuaauuagguuu

SEQ ID NO: 1343967 - RNA, 19 nt, Artificial Sequence
  Description of Artificial Sequence: Synthetic oligonucleotide
  Antisense strand to SEQ ID NO: 1343966
aaaccuaauuaacugacga

SEQ ID NO: 1343968 - RNA, 19 nt, Artificial Sequence
  Description of Artificial Sequence: Synthetic oligonucleotide
  Sense strand starting at position 1547 of SEQ ID NO: 1242392
gcgcuuacuguguaaacac

SEQ ID NO: 1343969 - RNA, 19 nt, Artificial Sequence
  Description of Artificial Sequence: Synthetic oligonucleotide
  Antisense strand to SEQ ID NO: 1343968
guguuuacacaguaagcgc

SEQ ID NO: 1343970 - RNA, 19 nt, Artificial Sequence
  Description of Artificial Sequence: Synthetic oligonucleotide
  Sense strand starting at position 1555 of SEQ ID NO: 1242392
uguguaaacacguauucug

SEQ ID NO: 1343971 - RNA, 19 nt, Artificial Sequence
  Description of Artificial Sequence: Synthetic oligonucleotide
  Antisense strand to SEQ ID NO: 1343970
cagaauacguguuuacaca

SEQ ID NO: 1343972 - RNA, 19 nt, Artificial Sequence
  Description of Artificial Sequence: Synthetic oligonucleotide
  Sense strand starting at position 1558 of SEQ ID NO: 1242392
guaaacacguauucugaau

SEQ ID NO: 1343973 - RNA, 19 nt, Artificial Sequence
  Description of Artificial Sequence: Synthetic oligonucleotide
  Antisense strand to SEQ ID NO: 1343972
auucagaauacguguuuac

SEQ ID NO: 1343974 - RNA, 19 nt, Artificial Sequence
  Description of Artificial Sequence: Synthetic oligonucleotide
  Sense strand starting at position 1651 of SEQ ID NO: 1242392
acucaaugauugccaaaug

SEQ ID NO: 1343975 - RNA, 19 nt, Artificial Sequence
  Description of Artificial Sequence: Synthetic oligonucleotide
  Antisense strand to SEQ ID NO: 1343974
cauuuggcaaucauugagu

SEQ ID NO: 1343976 - RNA, 19 nt, Artificial Sequence
  Description of Artificial Sequence: Synthetic oligonucleotide
  Sense strand starting at position 1987 of SEQ ID NO: 1242392
gcucuuugggaucauaggu

SEQ ID NO: 1343977 - RNA, 19 nt, Artificial Sequence
  Description of Artificial Sequence: Synthetic oligonucleotide
  Antisense strand to SEQ ID NO: 1343976
accuaugaucccaaagagc

SEQ ID NO: 1343978 - RNA, 19 nt, Artificial Sequence
  Description of Artificial Sequence: Synthetic oligonucleotide
  Sense strand starting at position 2033 of SEQ ID NO: 1242392
cucccuguucucgggaaca

SEQ ID NO: 1343979 - RNA, 19 nt, Artificial Sequence
  Description of Artificial Sequence: Synthetic oligonucleotide
  Antisense strand to SEQ ID NO: 1343978
uguucccgagaacagggag

SEQ ID NO: 1343980 - RNA, 19 nt, Artificial Sequence
  Description of Artificial Sequence: Synthetic oligonucleotide
  Sense strand starting at position 2035 of SEQ ID NO: 1242392
cccuguucucgggaacauc

SEQ ID NO: 1343981 - RNA, 19 nt, Artificial Sequence
  Description of Artificial Sequence: Synthetic oligonucleotide
  Antisense strand to SEQ ID NO: 1343980
gauguucccgagaacaggg

SEQ ID NO: 1343982 - RNA, 19 nt, Artificial Sequence
  Description of Artificial Sequence: Synthetic oligonucleotide
  Sense strand starting at position 2038 of SEQ ID NO: 1242392
uguucucgggaacaucaaa

SEQ ID NO: 1343983 - RNA, 19 nt, Artificial Sequence
  Description of Artificial Sequence: Synthetic oligonucleotide
  Antisense strand to SEQ ID NO: 1343982
uuugauguucccgagaaca

SEQ ID NO: 1343984 - RNA, 19 nt, Artificial Sequence
  Description of Artificial Sequence: Synthetic oligonucleotide
  Sense strand starting at position 2145 of SEQ ID NO: 1242392
auaucugcaucuguaggau

SEQ ID NO: 1343985 - RNA, 19 nt, Artificial Sequence
  Description of Artificial Sequence: Synthetic oligonucleotide
  Antisense strand to SEQ ID NO: 1343984
auccuacagaugcagauau

SEQ ID NO: 1343986 - RNA, 19 nt, Artificial Sequence
  Description of Artificial Sequence: Synthetic oligonucleotide
  Sense strand starting at position 2177 of SEQ ID NO: 1242392
cccacuuugcaggagugaa

SEQ ID NO: 1343987 - RNA, 19 nt, Artificial Sequence
  Description of Artificial Sequence: Synthetic oligonucleotide
  Antisense strand to SEQ ID NO: 1343986
uucacuccugcaaaguggg

SEQ ID NO: 1343988 - RNA, 19 nt, Artificial Sequence
  Description of Artificial Sequence: Synthetic oligonucleotide
  Sense strand starting at position 2195 of SEQ ID NO: 1242392
aggcgagugaaggauugau

SEQ ID NO: 1343989 - RNA, 19 nt, Artificial Sequence
  Description of Artificial Sequence: Synthetic oligonucleotide
  Antisense strand to SEQ ID NO: 1343988
aucaauccuucacucgccu

SEQ ID NO: 1343990 - RNA, 19 nt, Artificial Sequence
  Description of Artificial Sequence: Synthetic oligonucleotide
  Sense strand starting at position 2332 of SEQ ID NO: 1242392
uugggaaugguuugaaggu

SEQ ID NO: 1343991 - RNA, 19 nt, Artificial Sequence
  Description of Artificial Sequence: Synthetic oligonucleotide
  Antisense strand to SEQ ID NO: 1343990
accuucaaaccauucccaa

SEQ ID NO: 1343992 - RNA, 19 nt, Artificial Sequence
  Description of Artificial Sequence: Synthetic oligonucleotide
  Sense strand starting at position 2863 of SEQ ID NO: 1242392
guauccuucucucccgaau

SEQ ID NO: 1343993 - RNA, 19 nt, Artificial Sequence
  Description of Artificial Sequence: Synthetic oligonucleotide
  Antisense strand to SEQ ID NO: 1343992
auucgggagagaaggauac

SEQ ID NO: 1343994 - RNA, 19 nt, Artificial Sequence
  Description of Artificial Sequence: Synthetic oligonucleotide
  Sense strand starting at position 3008 of SEQ ID NO: 1242392
cuuagaaguuuccaaugaa

SEQ ID NO: 1343995 - RNA, 19 nt, Artificial Sequence
  Description of Artificial Sequence: Synthetic oligonucleotide
  Antisense strand to SEQ ID NO: 1343994
uucauuggaaacuucuaag

SEQ ID NO: 1343996 - RNA, 19 nt, Artificial Sequence
  Description of Artificial Sequence: Synthetic oligonucleotide
  Sense strand starting at position 3192 of SEQ ID NO: 1242392
uggauuguucauggguuaa

SEQ ID NO: 1343997 - RNA, 19 nt, Artificial Sequence
  Description of Artificial Sequence: Synthetic oligonucleotide
  Antisense strand to SEQ ID NO: 1343996
uuaacccaugaacaaucca

SEQ ID NO: 1343998 - RNA, 19 nt, Artificial Sequence
  Description of Artificial Sequence: Synthetic oligonucleotide
  Sense strand starting at position 3205 of SEQ ID NO: 1242392
gguuaauauuucccgguca

SEQ ID NO: 1343999 - RNA, 19 nt, Artificial Sequence
  Description of Artificial Sequence: Synthetic oligonucleotide
  Antisense strand to SEQ ID NO: 1343998
ugaccgggaaauauuaacc

SEQ ID NO: 1344000 - RNA, 19 nt, Artificial Sequence
  Description of Artificial Sequence: Synthetic oligonucleotide
  Sense strand starting at position 3207 of SEQ ID NO: 1242392
uuaauauuucccggucacu

SEQ ID NO: 1344001 - RNA, 19 nt, Artificial Sequence
  Description of Artificial Sequence: Synthetic oligonucleotide
  Antisense strand to SEQ ID NO: 1344000
agugaccgggaaauauuaa

SEQ ID NO: 1344002 - RNA, 19 nt, Artificial Sequence
  Description of Artificial Sequence: Synthetic oligonucleotide
  Sense strand starting at position 3237 of SEQ ID NO: 1242392
cugucucucccacgggaau

SEQ ID NO: 1344003 - RNA, 19 nt, Artificial Sequence
  Description of Artificial Sequence: Synthetic oligonucleotide
  Antisense strand to SEQ ID NO: 1344002
auucccgugggagagacag

SEQ ID NO: 1344004 - RNA, 19 nt, Artificial Sequence
  Description of Artificial Sequence: Synthetic oligonucleotide
  Sense strand starting at position 3257 of SEQ ID NO: 1242392
uugugucugcaguugcaua

SEQ ID NO: 1344005 - RNA, 19 nt, Artificial Sequence
  Description of Artificial Sequence: Synthetic oligonucleotide
  Antisense strand to SEQ ID NO: 1344004
uaugcaacugcagacacaa

SEQ ID NO: 1344006 - RNA, 19 nt, Artificial Sequence
  Description of Artificial Sequence: Synthetic oligonucleotide
  Sense strand starting at position 3294 of SEQ ID NO: 1242392
guagguacucagcauguuu

SEQ ID NO: 1344007 - RNA, 19 nt, Artificial Sequence
  Description of Artificial Sequence: Synthetic oligonucleotide
  Antisense strand to SEQ ID NO: 1344006
aaacaugcugaguaccuac

SEQ ID NO: 1344008 - RNA, 19 nt, Artificial Sequence
  Description of Artificial Sequence: Synthetic oligonucleotide
  Sense strand starting at position 3307 of SEQ ID NO: 1242392
auguuuggcaaaugaaaug

SEQ ID NO: 1344009 - RNA, 19 nt, Artificial Sequence
  Description of Artificial Sequence: Synthetic oligonucleotide
  Antisense strand to SEQ ID NO: 1344008
cauuucauuugccaaacau

SEQ ID NO: 1344010 - RNA, 19 nt, Artificial Sequence
  Description of Artificial Sequence: Synthetic oligonucleotide
  Sense strand starting at position 3321 of SEQ ID NO: 1242392
aaaugagcauuugagaaug

SEQ ID NO: 1344011 - RNA, 19 nt, Artificial Sequence
  Description of Artificial Sequence: Synthetic oligonucleotide
  Antisense strand to SEQ ID NO: 1344010
cauucucaaaugcucauuu

SEQ ID NO: 1344012 - RNA, 19 nt, Artificial Sequence
  Description of Artificial Sequence: Synthetic oligonucleotide
  Sense strand starting at position 3382 of SEQ ID NO: 1242392
cacaguuauugguccuguu

SEQ ID NO: 1344013 - RNA, 19 nt, Artificial Sequence
  Description of Artificial Sequence: Synthetic oligonucleotide
  Antisense strand to SEQ ID NO: 1344012
aacaggaccaauaacugug

SEQ ID NO: 1344014 - RNA, 19 nt, Artificial Sequence
  Description of Artificial Sequence: Synthetic oligonucleotide
  Sense strand starting at position 3520 of SEQ ID NO: 1242392
acacuuguucuugggaggu

SEQ ID NO: 1344015 - RNA, 19 nt, Artificial Sequence
  Description of Artificial Sequence: Synthetic oligonucleotide
  Antisense strand to SEQ ID NO: 1344014
accucccaagaacaagugu

SEQ ID NO: 1344016 - RNA, 19 nt, Artificial Sequence
  Description of Artificial Sequence: Synthetic oligonucleotide
  Sense strand starting at position 3653 of SEQ ID NO: 1242392
caagacuugcacuguuuga

SEQ ID NO: 1344017 - RNA, 19 nt, Artificial Sequence
  Description of Artificial Sequence: Synthetic oligonucleotide
  Antisense strand to SEQ ID NO: 1344016
ucaaacagugcaagucuug

SEQ ID NO: 1344018 - RNA, 19 nt, Artificial Sequence
  Description of Artificial Sequence: Synthetic oligonucleotide
  Sense strand starting at position 28 of SEQ ID NO: 1242393
aaguaagauggauaguguu

SEQ ID NO: 1344019 - RNA, 19 nt, Artificial Sequence
  Description of Artificial Sequence: Synthetic oligonucleotide
  Antisense strand to SEQ ID NO: 1344018
aacacuauccaucuuacuu

SEQ ID NO: 1344020 - RNA, 19 nt, Artificial Sequence
  Description of Artificial Sequence: Synthetic oligonucleotide
  Sense strand starting at position 34 of SEQ ID NO: 1242393
gauggauaguguuuggaau

SEQ ID NO: 1344021 - RNA, 19 nt, Artificial Sequence
  Description of Artificial Sequence: Synthetic oligonucleotide
  Antisense strand to SEQ ID NO: 1344020
auuccaaacacuauccauc

SEQ ID NO: 1344022 - RNA, 19 nt, Artificial Sequence
  Description of Artificial Sequence: Synthetic oligonucleotide
  Sense strand starting at position 35 of SEQ ID NO: 1242393
auggauaguguuuggaaua

SEQ ID NO: 1344023 - RNA, 19 nt, Artificial Sequence
  Description of Artificial Sequence: Synthetic oligonucleotide
  Antisense strand to SEQ ID NO: 1344022
uauuccaaacacuauccau

SEQ ID NO: 1344024 - RNA, 19 nt, Artificial Sequence
  Description of Artificial Sequence: Synthetic oligonucleotide
  Sense strand starting at position 40 of SEQ ID NO: 1242393
uaguguuuggaauagaccu

SEQ ID NO: 1344025 - RNA, 19 nt, Artificial Sequence
  Description of Artificial Sequence: Synthetic oligonucleotide
  Antisense strand to SEQ ID NO: 1344024
aggucuauuccaaacacua

SEQ ID NO: 1344026 - RNA, 19 nt, Artificial Sequence
  Description of Artificial Sequence: Synthetic oligonucleotide
  Sense strand starting at position 818 of SEQ ID NO: 1242393
uuagguaagggugggauau

SEQ ID NO: 1344027 - RNA, 19 nt, Artificial Sequence
  Description of Artificial Sequence: Synthetic oligonucleotide
  Antisense strand to SEQ ID NO: 1344026
auaucccacccuuaccuaa

SEQ ID NO: 1344028 - RNA, 19 nt, Artificial Sequence
  Description of Artificial Sequence: Synthetic oligonucleotide
  Sense strand starting at position 819 of SEQ ID NO: 1242393
uagguaagggugggauaua

SEQ ID NO: 1344029 - RNA, 19 nt, Artificial Sequence
  Description of Artificial Sequence: Synthetic oligonucleotide
  Antisense strand to SEQ ID NO: 1344028
uauaucccacccuuaccua

SEQ ID NO: 1344030 - RNA, 19 nt, Artificial Sequence
  Description of Artificial Sequence: Synthetic oligonucleotide
  Sense strand starting at position 892 of SEQ ID NO: 1242393
uuaucuguccaggaaccuu

SEQ ID NO: 1344031 - RNA, 19 nt, Artificial Sequence
  Description of Artificial Sequence: Synthetic oligonucleotide
  Antisense strand to SEQ ID NO: 1344030
aagguuccuggacagauaa

SEQ ID NO: 1344032 - RNA, 19 nt, Artificial Sequence
  Description of Artificial Sequence: Synthetic oligonucleotide
  Sense strand starting at position 910 of SEQ ID NO: 1242393
uagucaugugaguaauuaa

SEQ ID NO: 1344033 - RNA, 19 nt, Artificial Sequence
  Description of Artificial Sequence: Synthetic oligonucleotide
  Antisense strand to SEQ ID NO: 1344032
uuaauuacucacaugacua

SEQ ID NO: 1344034 - RNA, 19 nt, Artificial Sequence
  Description of Artificial Sequence: Synthetic oligonucleotide
  Sense strand starting at position 913 of SEQ ID NO: 1242393
ucaugugaguaauuaaauc

SEQ ID NO: 1344035 - RNA, 19 nt, Artificial Sequence
  Description of Artificial Sequence: Synthetic oligonucleotide
  Antisense strand to SEQ ID NO: 1344034
gauuuaauuacucacauga

SEQ ID NO: 1344036 - RNA, 19 nt, Artificial Sequence
  Description of Artificial Sequence: Synthetic oligonucleotide
  Sense strand starting at position 1003 of SEQ ID NO: 1242393
uuuguaguauuugcuugaa

SEQ ID NO: 1344037 - RNA, 19 nt, Artificial Sequence
  Description of Artificial Sequence: Synthetic oligonucleotide
  Antisense strand to SEQ ID NO: 1344036
uucaagcaaauacuacaaa

SEQ ID NO: 1344038 - RNA, 19 nt, Artificial Sequence
  Description of Artificial Sequence: Synthetic oligonucleotide
  Sense strand starting at position 1005 of SEQ ID NO: 1242393
uguaguauuugcuugaauu

SEQ ID NO: 1344039 - RNA, 19 nt, Artificial Sequence
  Description of Artificial Sequence: Synthetic oligonucleotide
  Antisense strand to SEQ ID NO: 1344038
aauucaagcaaauacuaca

SEQ ID NO: 1344040 - RNA, 19 nt, Artificial Sequence
  Description of Artificial Sequence: Synthetic oligonucleotide
  Sense strand starting at position 1006 of SEQ ID NO: 1242393
guaguauuugcuugaauuc

SEQ ID NO: 1344041 - RNA, 19 nt, Artificial Sequence
  Description of Artificial Sequence: Synthetic oligonucleotide
  Antisense strand to SEQ ID NO: 1344040
gaauucaagcaaauacuac

SEQ ID NO: 1344042 - RNA, 19 nt, Artificial Sequence
  Description of Artificial Sequence: Synthetic oligonucleotide
  Sense strand starting at position 1092 of SEQ ID NO: 1242393
augagaauauucucagccu

SEQ ID NO: 1344043 - RNA, 19 nt, Artificial Sequence
  Description of Artificial Sequence: Synthetic oligonucleotide
  Antisense strand to SEQ ID NO: 1344042
aggcugagaauauucucau

SEQ ID NO: 1344044 - RNA, 19 nt, Artificial Sequence
  Description of Artificial Sequence: Synthetic oligonucleotide
  Sense strand starting at position 1095 of SEQ ID NO: 1242393
agaauauucucagccuaag

SEQ ID NO: 1344045 - RNA, 19 nt, Artificial Sequence
  Description of Artificial Sequence: Synthetic oligonucleotide
  Antisense strand to SEQ ID NO: 1344044
cuuaggcugagaauauucu

SEQ ID NO: 1344046 - RNA, 19 nt, Artificial Sequence
  Description of Artificial Sequence: Synthetic oligonucleotide
  Sense strand starting at position 1588 of SEQ ID NO: 1242393
cugugaggugaauagacuu

SEQ ID NO: 1344047 - RNA, 19 nt, Artificial Sequence
  Description of Artificial Sequence: Synthetic oligonucleotide
  Antisense strand to SEQ ID NO: 1344046
aagucuauucaccucacag

SEQ ID NO: 1344048 - RNA, 19 nt, Artificial Sequence
  Description of Artificial Sequence: Synthetic oligonucleotide
  Sense strand starting at position 2011 of SEQ ID NO: 1242393
agcgucacccaggaauaua

SEQ ID NO: 1344049 - RNA, 19 nt, Artificial Sequence
  Description of Artificial Sequence: Synthetic oligonucleotide
  Antisense strand to SEQ ID NO: 1344048
uauauuccugggugacgcu

SEQ ID NO: 1344050 - RNA, 19 nt, Artificial Sequence
  Description of Artificial Sequence: Synthetic oligonucleotide
  Sense strand starting at position 2065 of SEQ ID NO: 1242393
cugcuuauugguuagaaac

SEQ ID NO: 1344051 - RNA, 19 nt, Artificial Sequence
  Description of Artificial Sequence: Synthetic oligonucleotide
  Antisense strand to SEQ ID NO: 1344050
guuucuaaccaauaagcag

SEQ ID NO: 1344052 - RNA, 19 nt, Artificial Sequence
  Description of Artificial Sequence: Synthetic oligonucleotide
  Sense strand starting at position 2075 of SEQ ID NO: 1242393
guuagaaacuuucuugaaa

SEQ ID NO: 1344053 - RNA, 19 nt, Artificial Sequence
  Description of Artificial Sequence: Synthetic oligonucleotide
  Antisense strand to SEQ ID NO: 1344052
uuucaagaaaguuucuaac

SEQ ID NO: 1344054 - RNA, 19 nt, Artificial Sequence
  Description of Artificial Sequence: Synthetic oligonucleotide
  Sense strand starting at position 2086 of SEQ ID NO: 1242393
ucuugaaagagaugacugu

SEQ ID NO: 1344055 - RNA, 19 nt, Artificial Sequence
  Description of Artificial Sequence: Synthetic oligonucleotide
  Antisense strand to SEQ ID NO: 1344054
acagucaucucuuucaaga

SEQ ID NO: 1344056 - RNA, 19 nt, Artificial Sequence
  Description of Artificial Sequence: Synthetic oligonucleotide
  Sense strand starting at position 2090 of SEQ ID NO: 1242393
gaaagagaugacugugcaa

SEQ ID NO: 1344057 - RNA, 19 nt, Artificial Sequence
  Description of Artificial Sequence: Synthetic oligonucleotide
  Antisense strand to SEQ ID NO: 1344056
uugcacagucaucucuuuc

SEQ ID NO: 1344058 - RNA, 19 nt, Artificial Sequence
  Description of Artificial Sequence: Synthetic oligonucleotide
  Sense strand starting at position 2092 of SEQ ID NO: 1242393
aagagaugacugugcaaug

SEQ ID NO: 1344059 - RNA, 19 nt, Artificial Sequence
  Description of Artificial Sequence: Synthetic oligonucleotide
  Antisense strand to SEQ ID NO: 1344058
cauugcacagucaucucuu

SEQ ID NO: 1344060 - RNA, 19 nt, Artificial Sequence
  Description of Artificial Sequence: Synthetic oligonucleotide
  Sense strand starting at position 2093 of SEQ ID NO: 1242393
agagaugacugugcaauga

SEQ ID NO: 1344061 - RNA, 19 nt, Artificial Sequence
  Description of Artificial Sequence: Synthetic oligonucleotide
  Antisense strand to SEQ ID NO: 1344060
ucauugcacagucaucucu

SEQ ID NO: 1344062 - RNA, 19 nt, Artificial Sequence
  Description of Artificial Sequence: Synthetic oligonucleotide
  Sense strand starting at position 2106 of SEQ ID NO: 1242393
caaugauuggccuggaaua

SEQ ID NO: 1344063 - RNA, 19 nt, Artificial Sequence
  Description of Artificial Sequence: Synthetic oligonucleotide
  Antisense strand to SEQ ID NO: 1344062
uauuccaggccaaucauug

SEQ ID NO: 1344064 - RNA, 19 nt, Artificial Sequence
  Description of Artificial Sequence: Synthetic oligonucleotide
  Sense strand starting at position 2107 of SEQ ID NO: 1242393
aaugauuggccuggaauag

SEQ ID NO: 1344065 - RNA, 19 nt, Artificial Sequence
  Description of Artificial Sequence: Synthetic oligonucleotide
  Antisense strand to SEQ ID NO: 1344064
cuauuccaggccaaucauu

SEQ ID NO: 1344066 - RNA, 19 nt, Artificial Sequence
  Description of Artificial Sequence: Synthetic oligonucleotide
  Sense strand starting at position 2108 of SEQ ID NO: 1242393
augauuggccuggaauagu

SEQ ID NO: 1344067 - RNA, 19 nt, Artificial Sequence
  Description of Artificial Sequence: Synthetic oligonucleotide
  Antisense strand to SEQ ID NO: 1344066
acuauuccaggccaaucau

SEQ ID NO: 1344068 - RNA, 19 nt, Artificial Sequence
  Description of Artificial Sequence: Synthetic oligonucleotide
  Sense strand starting at position 2144 of SEQ ID NO: 1242393
gucauuagcccugaggaaa

SEQ ID NO: 1344069 - RNA, 19 nt, Artificial Sequence
  Description of Artificial Sequence: Synthetic oligonucleotide
  Antisense strand to SEQ ID NO: 1344068
uuuccucagggcuaaugac

SEQ ID NO: 1344070 - RNA, 19 nt, Artificial Sequence
  Description of Artificial Sequence: Synthetic oligonucleotide
  Sense strand starting at position 2190 of SEQ ID NO: 1242393
guaguaaaccauuaauccu

SEQ ID NO: 1344071 - RNA, 19 nt, Artificial Sequence
  Description of Artificial Sequence: Synthetic oligonucleotide
  Antisense strand to SEQ ID NO: 1344070
aggauuaaugguuuacuac

SEQ ID NO: 1344072 - RNA, 19 nt, Artificial Sequence
  Description of Artificial Sequence: Synthetic oligonucleotide
  Sense strand starting at position 2299 of SEQ ID NO: 1242393
uuagucauuugggaauaga

SEQ ID NO: 1344073 - RNA, 19 nt, Artificial Sequence
  Description of Artificial Sequence: Synthetic oligonucleotide
  Antisense strand to SEQ ID NO: 1344072
ucuauucccaaaugacuaa

SEQ ID NO: 1344074 - RNA, 19 nt, Artificial Sequence
  Description of Artificial Sequence: Synthetic oligonucleotide
  Sense strand starting at position 2424 of SEQ ID NO: 1242393
gaaaguagugucugaaaug

SEQ ID NO: 1344075 - RNA, 19 nt, Artificial Sequence
  Description of Artificial Sequence: Synthetic oligonucleotide
  Antisense strand to SEQ ID NO: 1344074
cauuucagacacuacuuuc

SEQ ID NO: 1344076 - RNA, 19 nt, Artificial Sequence
  Description of Artificial Sequence: Synthetic oligonucleotide
  Sense strand starting at position 2459 of SEQ ID NO: 1242393
aguagacauuaccuugacu

SEQ ID NO: 1344077 - RNA, 19 nt, Artificial Sequence
  Description of Artificial Sequence: Synthetic oligonucleotide
  Antisense strand to SEQ ID NO: 1344076
agucaagguaaugucuacu

SEQ ID NO: 1344078 - RNA, 19 nt, Artificial Sequence
  Description of Artificial Sequence: Synthetic oligonucleotide
  Sense strand starting at position 2496 of SEQ ID NO: 1242393
gcagauuaagaguggaauc

SEQ ID NO: 1344079 - RNA, 19 nt, Artificial Sequence
  Description of Artificial Sequence: Synthetic oligonucleotide
  Antisense strand to SEQ ID NO: 1344078
gauuccacucuuaaucugc

SEQ ID NO: 1344080 - RNA, 19 nt, Artificial Sequence
  Description of Artificial Sequence: Synthetic oligonucleotide
  Sense strand starting at position 3117 of SEQ ID NO: 1242393
gugauuuccaguugucuga

SEQ ID NO: 1344081 - RNA, 19 nt, Artificial Sequence
  Description of Artificial Sequence: Synthetic oligonucleotide
  Antisense strand to SEQ ID NO: 1344080
ucagacaacuggaaaucac

SEQ ID NO: 1344082 - RNA, 19 nt, Artificial Sequence
  Description of Artificial Sequence: Synthetic oligonucleotide
  Sense strand starting at position 3119 of SEQ ID NO: 1242393
gauuuccaguugucugagu

SEQ ID NO: 1344083 - RNA, 19 nt, Artificial Sequence
  Description of Artificial Sequence: Synthetic oligonucleotide
  Antisense strand to SEQ ID NO: 1344082
acucagacaacuggaaauc

SEQ ID NO: 1344084 - RNA, 19 nt, Artificial Sequence
  Description of Artificial Sequence: Synthetic oligonucleotide
  Sense strand starting at position 3120 of SEQ ID NO: 1242393
auuuccaguugucugagua

SEQ ID NO: 1344085 - RNA, 19 nt, Artificial Sequence
  Description of Artificial Sequence: Synthetic oligonucleotide
  Antisense strand to SEQ ID NO: 1344084
uacucagacaacuggaaau

SEQ ID NO: 1344086 - RNA, 19 nt, Artificial Sequence
  Description of Artificial Sequence: Synthetic oligonucleotide
  Sense strand starting at position 3280 of SEQ ID NO: 1242393
aaugcaguuguggauuaua

SEQ ID NO: 1344087 - RNA, 19 nt, Artificial Sequence
  Description of Artificial Sequence: Synthetic oligonucleotide
  Antisense strand to SEQ ID NO: 1344086
uauaauccacaacugcauu

SEQ ID NO: 1344088 - RNA, 19 nt, Artificial Sequence
  Description of Artificial Sequence: Synthetic oligonucleotide
  Sense strand starting at position 3512 of SEQ ID NO: 1242393
agguaaguuagugaacuga

SEQ ID NO: 1344089 - RNA, 19 nt, Artificial Sequence
  Description of Artificial Sequence: Synthetic oligonucleotide
  Antisense strand to SEQ ID NO: 1344088
ucaguucacuaacuuaccu

SEQ ID NO: 1344090 - RNA, 19 nt, Artificial Sequence
  Description of Artificial Sequence: Synthetic oligonucleotide
  Sense strand starting at position 3535 of SEQ ID NO: 1242393
ggauuauagaagugucuag

SEQ ID NO: 1344091 - RNA, 19 nt, Artificial Sequence
  Description of Artificial Sequence: Synthetic oligonucleotide
  Antisense strand to SEQ ID NO: 1344090
cuagacacuucuauaaucc

SEQ ID NO: 1344092 - RNA, 19 nt, Artificial Sequence
  Description of Artificial Sequence: Synthetic oligonucleotide
  Sense strand starting at position 3940 of SEQ ID NO: 1242393
ucuaccaaugacugugaau

SEQ ID NO: 1344093 - RNA, 19 nt, Artificial Sequence
  Description of Artificial Sequence: Synthetic oligonucleotide
  Antisense strand to SEQ ID NO: 1344092
auucacagucauugguaga

SEQ ID NO: 1344094 - RNA, 19 nt, Artificial Sequence
  Description of Artificial Sequence: Synthetic oligonucleotide
  Sense strand starting at position 3949 of SEQ ID NO: 1242393
gacugugaauaccucugau

SEQ ID NO: 1344095 - RNA, 19 nt, Artificial Sequence
  Description of Artificial Sequence: Synthetic oligonucleotide
  Antisense strand to SEQ ID NO: 1344094
aucagagguauucacaguc

SEQ ID NO: 1344096 - RNA, 19 nt, Artificial Sequence
  Description of Artificial Sequence: Synthetic oligonucleotide
  Sense strand starting at position 3952 of SEQ ID NO: 1242393
ugugaauaccucugauacc

SEQ ID NO: 1344097 - RNA, 19 nt, Artificial Sequence
  Description of Artificial Sequence: Synthetic oligonucleotide
  Antisense strand to SEQ ID NO: 1344096
gguaucagagguauucaca

SEQ ID NO: 1344098 - RNA, 19 nt, Artificial Sequence
  Description of Artificial Sequence: Synthetic oligonucleotide
  Sense strand starting at position 25 of SEQ ID NO: 1242394
gagaauaaauuacauggga

SEQ ID NO: 1344099 - RNA, 19 nt, Artificial Sequence
  Description of Artificial Sequence: Synthetic oligonucleotide
  Antisense strand to SEQ ID NO: 1344098
ucccauguaauuuauucuc

SEQ ID NO: 1344100 - RNA, 19 nt, Artificial Sequence
  Description of Artificial Sequence: Synthetic oligonucleotide
  Sense strand starting at position 69 of SEQ ID NO: 1242394
agucuuccauuugacagaa

SEQ ID NO: 1344101 - RNA, 19 nt, Artificial Sequence
  Description of Artificial Sequence: Synthetic oligonucleotide
  Antisense strand to SEQ ID NO: 1344100
uucugucaaauggaagacu

SEQ ID NO: 1344102 - RNA, 19 nt, Artificial Sequence
  Description of Artificial Sequence: Synthetic oligonucleotide
  Sense strand starting at position 189 of SEQ ID NO: 1242394
auucgaagucuuggaggaa

SEQ ID NO: 1344103 - RNA, 19 nt, Artificial Sequence
  Description of Artificial Sequence: Synthetic oligonucleotide
  Antisense strand to SEQ ID NO: 1344102
uuccuccaagacuucgaau

SEQ ID NO: 1344104 - RNA, 19 nt, Artificial Sequence
  Description of Artificial Sequence: Synthetic oligonucleotide
  Sense strand starting at position 267 of SEQ ID NO: 1242394
agccaaugauggcuacaga

SEQ ID NO: 1344105 - RNA, 19 nt, Artificial Sequence
  Description of Artificial Sequence: Synthetic oligonucleotide
  Antisense strand to SEQ ID NO: 1344104
ucuguagccaucauuggcu

SEQ ID NO: 1344106 - RNA, 19 nt, Artificial Sequence
  Description of Artificial Sequence: Synthetic oligonucleotide
  Sense strand starting at position 268 of SEQ ID NO: 1242394
gccaaugauggcuacagaa

SEQ ID NO: 1344107 - RNA, 19 nt, Artificial Sequence
  Description of Artificial Sequence: Synthetic oligonucleotide
  Antisense strand to SEQ ID NO: 1344106
uucuguagccaucauuggc

SEQ ID NO: 1344108 - RNA, 19 nt, Artificial Sequence
  Description of Artificial Sequence: Synthetic oligonucleotide
  Sense strand starting at position 337 of SEQ ID NO: 1242394
acgauuacauucuuugaua

SEQ ID NO: 1344109 - RNA, 19 nt, Artificial Sequence
  Description of Artificial Sequence: Synthetic oligonucleotide
  Antisense strand to SEQ ID NO: 1344108
uaucaaagaauguaaucgu

SEQ ID NO: 1344110 - RNA, 19 nt, Artificial Sequence
  Description of Artificial Sequence: Synthetic oligonucleotide
  Sense strand starting at position 338 of SEQ ID NO: 1242394
cgauuacauucuuugauau

SEQ ID NO: 1344111 - RNA, 19 nt, Artificial Sequence
  Description of Artificial Sequence: Synthetic oligonucleotide
  Antisense strand to SEQ ID NO: 1344110
auaucaaagaauguaaucg

SEQ ID NO: 1344112 - RNA, 19 nt, Artificial Sequence
  Description of Artificial Sequence: Synthetic oligonucleotide
  Sense strand starting at position 493 of SEQ ID NO: 1242394
uccaaagaguuccuaagca

SEQ ID NO: 1344113 - RNA, 19 nt, Artificial Sequence
  Description of Artificial Sequence: Synthetic oligonucleotide
  Antisense strand to SEQ ID NO: 1344112
ugcuuaggaacucuuugga

SEQ ID NO: 1344114 - RNA, 19 nt, Artificial Sequence
  Description of Artificial Sequence: Synthetic oligonucleotide
  Sense strand starting at position 529 of SEQ ID NO: 1242394
uugguuccugaugacuauu

SEQ ID NO: 1344115 - RNA, 19 nt, Artificial Sequence
  Description of Artificial Sequence: Synthetic oligonucleotide
  Antisense strand to SEQ ID NO: 1344114
aauagucaucaggaaccaa

SEQ ID NO: 1344116 - RNA, 19 nt, Artificial Sequence
  Description of Artificial Sequence: Synthetic oligonucleotide
  Sense strand starting at position 531 of SEQ ID NO: 1242394
gguuccugaugacuauuau

SEQ ID NO: 1344117 - RNA, 19 nt, Artificial Sequence
  Description of Artificial Sequence: Synthetic oligonucleotide
  Antisense strand to SEQ ID NO: 1344116
auaauagucaucaggaacc

SEQ ID NO: 1344118 - RNA, 19 nt, Artificial Sequence
  Description of Artificial Sequence: Synthetic oligonucleotide
  Sense strand starting at position 532 of SEQ ID NO: 1242394
guuccugaugacuauuaua

SEQ ID NO: 1344119 - RNA, 19 nt, Artificial Sequence
  Description of Artificial Sequence: Synthetic oligonucleotide
  Antisense strand to SEQ ID NO: 1344118
uauaauagucaucaggaac

SEQ ID NO: 1344120 - RNA, 19 nt, Artificial Sequence
  Description of Artificial Sequence: Synthetic oligonucleotide
  Sense strand starting at position 563 of SEQ ID NO: 1242394
ugauuaugaucuuccagau

SEQ ID NO: 1344121 - RNA, 19 nt, Artificial Sequence
  Description of Artificial Sequence: Synthetic oligonucleotide
  Antisense strand to SEQ ID NO: 1344120
aucuggaagaucauaauca

SEQ ID NO: 1344122 - RNA, 19 nt, Artificial Sequence
  Description of Artificial Sequence: Synthetic oligonucleotide
  Sense strand starting at position 580 of SEQ ID NO: 1242394
auccauagauggucaucuu

SEQ ID NO: 1344123 - RNA, 19 nt, Artificial Sequence
  Description of Artificial Sequence: Synthetic oligonucleotide
  Antisense strand to SEQ ID NO: 1344122
aagaugaccaucuauggau

SEQ ID NO: 1344124 - RNA, 19 nt, Artificial Sequence
  Description of Artificial Sequence: Synthetic oligonucleotide
  Sense strand starting at position 583 of SEQ ID NO: 1242394
cauagauggucaucuugga

SEQ ID NO: 1344125 - RNA, 19 nt, Artificial Sequence
  Description of Artificial Sequence: Synthetic oligonucleotide
  Antisense strand to SEQ ID NO: 1344124
uccaagaugaccaucuaug

SEQ ID NO: 1344126 - RNA, 19 nt, Artificial Sequence
  Description of Artificial Sequence: Synthetic oligonucleotide
  Sense strand starting at position 587 of SEQ ID NO: 1242394
gauggucaucuuggauaaa

SEQ ID NO: 1344127 - RNA, 19 nt, Artificial Sequence
  Description of Artificial Sequence: Synthetic oligonucleotide
  Antisense strand to SEQ ID NO: 1344126
uuuauccaagaugaccauc

SEQ ID NO: 1344128 - RNA, 19 nt, Artificial Sequence
  Description of Artificial Sequence: Synthetic oligonucleotide
  Sense strand starting at position 642 of SEQ ID NO: 1242394
cuacuuacccucgaugaca

SEQ ID NO: 1344129 - RNA, 19 nt, Artificial Sequence
  Description of Artificial Sequence: Synthetic oligonucleotide
  Antisense strand to SEQ ID NO: 1344128
ugucaucgaggguaaguag

SEQ ID NO: 1344130 - RNA, 19 nt, Artificial Sequence
  Description of Artificial Sequence: Synthetic oligonucleotide
  Sense strand starting at position 782 of SEQ ID NO: 1242394
agcuaaaucuuacucggga

SEQ ID NO: 1344131 - RNA, 19 nt, Artificial Sequence
  Description of Artificial Sequence: Synthetic oligonucleotide
  Antisense strand to SEQ ID NO: 1344130
ucccgaguaagauuuagcu

SEQ ID NO: 1344132 - RNA, 19 nt, Artificial Sequence
  Description of Artificial Sequence: Synthetic oligonucleotide
  Sense strand starting at position 783 of SEQ ID NO: 1242394
gcuaaaucuuacucgggaa

SEQ ID NO: 1344133 - RNA, 19 nt, Artificial Sequence
  Description of Artificial Sequence: Synthetic oligonucleotide
  Antisense strand to SEQ ID NO: 1344132
uucccgaguaagauuuagc

SEQ ID NO: 1344134 - RNA, 19 nt, Artificial Sequence
  Description of Artificial Sequence: Synthetic oligonucleotide
  Sense strand starting at position 843 of SEQ ID NO: 1242394
uggaaugucaucgaucuuu

SEQ ID NO: 1344135 - RNA, 19 nt, Artificial Sequence
  Description of Artificial Sequence: Synthetic oligonucleotide
  Antisense strand to SEQ ID NO: 1344134
aaagaucgaugacauucca

SEQ ID NO: 1344136 - RNA, 19 nt, Artificial Sequence
  Description of Artificial Sequence: Synthetic oligonucleotide
  Sense strand starting at position 902 of SEQ ID NO: 1242394
ugguuucuggaggaugcau

SEQ ID NO: 1344137 - RNA, 19 nt, Artificial Sequence
  Description of Artificial Sequence: Synthetic oligonucleotide
  Antisense strand to SEQ ID NO: 1344136
augcauccuccagaaacca

SEQ ID NO: 1344138 - RNA, 19 nt, Artificial Sequence
  Description of Artificial Sequence: Synthetic oligonucleotide
  Sense strand starting at position 1094 of SEQ ID NO: 1242394
ccgacuguccuagaaagug

SEQ ID NO: 1344139 - RNA, 19 nt, Artificial Sequence
  Description of Artificial Sequence: Synthetic oligonucleotide
  Antisense strand to SEQ ID NO: 1344138
cacuuucuaggacagucgg

SEQ ID NO: 1344140 - RNA, 19 nt, Artificial Sequence
  Description of Artificial Sequence: Synthetic oligonucleotide
  Sense strand starting at position 1110 of SEQ ID NO: 1242394
gugcaucaccaauagguga

SEQ ID NO: 1344141 - RNA, 19 nt, Artificial Sequence
  Description of Artificial Sequence: Synthetic oligonucleotide
  Antisense strand to SEQ ID NO: 1344140
ucaccuauuggugaugcac

SEQ ID NO: 1344142 - RNA, 19 nt, Artificial Sequence
  Description of Artificial Sequence: Synthetic oligonucleotide
  Sense strand starting at position 1378 of SEQ ID NO: 1242394
ccuuuaucaggcgacuaua

SEQ ID NO: 1344143 - RNA, 19 nt, Artificial Sequence
  Description of Artificial Sequence: Synthetic oligonucleotide
  Antisense strand to SEQ ID NO: 1344142
uauagucgccugauaaagg

SEQ ID NO: 1344144 - RNA, 19 nt, Artificial Sequence
  Description of Artificial Sequence: Synthetic oligonucleotide
  Sense strand starting at position 1390 of SEQ ID NO: 1242394
gacuauagcguggaucaga

SEQ ID NO: 1344145 - RNA, 19 nt, Artificial Sequence
  Description of Artificial Sequence: Synthetic oligonucleotide
  Antisense strand to SEQ ID NO: 1344144
ucugauccacgcuauaguc

SEQ ID NO: 1344146 - RNA, 19 nt, Artificial Sequence
  Description of Artificial Sequence: Synthetic oligonucleotide
  Sense strand starting at position 1534 of SEQ ID NO: 1242394
gggaaaggugcacaugcau

SEQ ID NO: 1344147 - RNA, 19 nt, Artificial Sequence
  Description of Artificial Sequence: Synthetic oligonucleotide
  Antisense strand to SEQ ID NO: 1344146
augcaugugcaccuuuccc

SEQ ID NO: 1344148 - RNA, 19 nt, Artificial Sequence
  Description of Artificial Sequence: Synthetic oligonucleotide
  Sense strand starting at position 2000 of SEQ ID NO: 1242394
uguuguuuacuagccggua

SEQ ID NO: 1344149 - RNA, 19 nt, Artificial Sequence
  Description of Artificial Sequence: Synthetic oligonucleotide
  Antisense strand to SEQ ID NO: 1344148
uaccggcuaguaaacaaca

SEQ ID NO: 1344150 - RNA, 19 nt, Artificial Sequence
  Description of Artificial Sequence: Synthetic oligonucleotide
  Sense strand starting at position 2570 of SEQ ID NO: 1242394
gcuccuauaccugggaaua

SEQ ID NO: 1344151 - RNA, 19 nt, Artificial Sequence
  Description of Artificial Sequence: Synthetic oligonucleotide
  Antisense strand to SEQ ID NO: 1344150
uauucccagguauaggagc

SEQ ID NO: 1344152 - RNA, 19 nt, Artificial Sequence
  Description of Artificial Sequence: Synthetic oligonucleotide
  Sense strand starting at position 2571 of SEQ ID NO: 1242394
cuccuauaccugggaauaa

SEQ ID NO: 1344153 - RNA, 19 nt, Artificial Sequence
  Description of Artificial Sequence: Synthetic oligonucleotide
  Antisense strand to SEQ ID NO: 1344152
uuauucccagguauaggag

SEQ ID NO: 1344154 - RNA, 19 nt, Artificial Sequence
  Description of Artificial Sequence: Synthetic oligonucleotide
  Sense strand starting at position 2606 of SEQ ID NO: 1242394
uauguagaggucuacauac

SEQ ID NO: 1344155 - RNA, 19 nt, Artificial Sequence
  Description of Artificial Sequence: Synthetic oligonucleotide
  Antisense strand to SEQ ID NO: 1344154
guauguagaccucuacaua

SEQ ID NO: 1344156 - RNA, 19 nt, Artificial Sequence
  Description of Artificial Sequence: Synthetic oligonucleotide
  Sense strand starting at position 2731 of SEQ ID NO: 1242394
gaucgaucaccugagcuca

SEQ ID NO: 1344157 - RNA, 19 nt, Artificial Sequence
  Description of Artificial Sequence: Synthetic oligonucleotide
  Antisense strand to SEQ ID NO: 1344156
ugagcucaggugaucgauc

SEQ ID NO: 1344158 - RNA, 19 nt, Artificial Sequence
  Description of Artificial Sequence: Synthetic oligonucleotide
  Sense strand starting at position 2842 of SEQ ID NO: 1242394
ccagcuauuccuuagacug

SEQ ID NO: 1344159 - RNA, 19 nt, Artificial Sequence
  Description of Artificial Sequence: Synthetic oligonucleotide
  Antisense strand to SEQ ID NO: 1344158
cagucuaaggaauagcugg

SEQ ID NO: 1344160 - RNA, 19 nt, Artificial Sequence
  Description of Artificial Sequence: Synthetic oligonucleotide
  Sense strand starting at position 3115 of SEQ ID NO: 1242394
uggagaagacguugaugua

SEQ ID NO: 1344161 - RNA, 19 nt, Artificial Sequence
  Description of Artificial Sequence: Synthetic oligonucleotide
  Antisense strand to SEQ ID NO: 1344160
uacaucaacgucuucucca

SEQ ID NO: 1344162 - RNA, 19 nt, Artificial Sequence
  Description of Artificial Sequence: Synthetic oligonucleotide
  Sense strand starting at position 3116 of SEQ ID NO: 1242394
ggagaagacguugauguau

SEQ ID NO: 1344163 - RNA, 19 nt, Artificial Sequence
  Description of Artificial Sequence: Synthetic oligonucleotide
  Antisense strand to SEQ ID NO: 1344162
auacaucaacgucuucucc

SEQ ID NO: 1344164 - RNA, 19 nt, Artificial Sequence
  Description of Artificial Sequence: Synthetic oligonucleotide
  Sense strand starting at position 3164 of SEQ ID NO: 1242394
cuacauuugucgcuagaau

SEQ ID NO: 1344165 - RNA, 19 nt, Artificial Sequence
  Description of Artificial Sequence: Synthetic oligonucleotide
  Antisense strand to SEQ ID NO: 1344164
auucuagcgacaaauguag

SEQ ID NO: 1344166 - RNA, 19 nt, Artificial Sequence
  Description of Artificial Sequence: Synthetic oligonucleotide
  Sense strand starting at position 3259 of SEQ ID NO: 1242394
agcuauuuccuauagcugu

SEQ ID NO: 1344167 - RNA, 19 nt, Artificial Sequence
  Description of Artificial Sequence: Synthetic oligonucleotide
  Antisense strand to SEQ ID NO: 1344166
acagcuauaggaaauagcu

SEQ ID NO: 1344168 - RNA, 19 nt, Artificial Sequence
  Description of Artificial Sequence: Synthetic oligonucleotide
  Sense strand starting at position 3351 of SEQ ID NO: 1242394
cucacaagugguuauguuu

SEQ ID NO: 1344169 - RNA, 19 nt, Artificial Sequence
  Description of Artificial Sequence: Synthetic oligonucleotide
  Antisense strand to SEQ ID NO: 1344168
aaacauaaccacuugugag

SEQ ID NO: 1344170 - RNA, 19 nt, Artificial Sequence
  Description of Artificial Sequence: Synthetic oligonucleotide
  Sense strand starting at position 3689 of SEQ ID NO: 1242394
accaguguaucugcauuua

SEQ ID NO: 1344171 - RNA, 19 nt, Artificial Sequence
  Description of Artificial Sequence: Synthetic oligonucleotide
  Antisense strand to SEQ ID NO: 1344170
uaaaugcagauacacuggu

SEQ ID NO: 1344172 - RNA, 19 nt, Artificial Sequence
  Description of Artificial Sequence: Synthetic oligonucleotide
  Sense strand starting at position 3756 of SEQ ID NO: 1242394
cuuguuucugagcacuaac

SEQ ID NO: 1344173 - RNA, 19 nt, Artificial Sequence
  Description of Artificial Sequence: Synthetic oligonucleotide
  Antisense strand to SEQ ID NO: 1344172
guuagugcucagaaacaag

SEQ ID NO: 1344174 - RNA, 19 nt, Artificial Sequence
  Description of Artificial Sequence: Synthetic oligonucleotide
  Sense strand starting at position 3759 of SEQ ID NO: 1242394
guuucugagcacuaaccaa

SEQ ID NO: 1344175 - RNA, 19 nt, Artificial Sequence
  Description of Artificial Sequence: Synthetic oligonucleotide
  Antisense strand to SEQ ID NO: 1344174
uugguuagugcucagaaac

SEQ ID NO: 1344176 - RNA, 19 nt, Artificial Sequence
  Description of Artificial Sequence: Synthetic oligonucleotide
  Sense strand starting at position 3981 of SEQ ID NO: 1242394
ggugguagcauggagcaau

SEQ ID NO: 1344177 - RNA, 19 nt, Artificial Sequence
  Description of Artificial Sequence: Synthetic oligonucleotide
  Antisense strand to SEQ ID NO: 1344176
auugcuccaugcuaccacc

SEQ ID NO: 1344178 - RNA, 19 nt, Artificial Sequence
  Description of Artificial Sequence: Synthetic oligonucleotide
  Sense strand starting at position 33 of SEQ ID NO: 1242395
acgauuacauucuuugaua

SEQ ID NO: 1344179 - RNA, 19 nt, Artificial Sequence
  Description of Artificial Sequence: Synthetic oligonucleotide
  Antisense strand to SEQ ID NO: 1344178
uaucaaagaauguaaucgu

SEQ ID NO: 1344180 - RNA, 19 nt, Artificial Sequence
  Description of Artificial Sequence: Synthetic oligonucleotide
  Sense strand starting at position 34 of SEQ ID NO: 1242395
cgauuacauucuuugauau

SEQ ID NO: 1344181 - RNA, 19 nt, Artificial Sequence
  Description of Artificial Sequence: Synthetic oligonucleotide
  Antisense strand to SEQ ID NO: 1344180
auaucaaagaauguaaucg

SEQ ID NO: 1344182 - RNA, 19 nt, Artificial Sequence
  Description of Artificial Sequence: Synthetic oligonucleotide
  Sense strand starting at position 189 of SEQ ID NO: 1242395
uccaaagaguuccuaagca

SEQ ID NO: 1344183 - RNA, 19 nt, Artificial Sequence
  Description of Artificial Sequence: Synthetic oligonucleotide
  Antisense strand to SEQ ID NO: 1344182
ugcuuaggaacucuuugga

SEQ ID NO: 1344184 - RNA, 19 nt, Artificial Sequence
  Description of Artificial Sequence: Synthetic oligonucleotide
  Sense strand starting at position 225 of SEQ ID NO: 1242395
uugguuccugaugacuauu

SEQ ID NO: 1344185 - RNA, 19 nt, Artificial Sequence
  Description of Artificial Sequence: Synthetic oligonucleotide
  Antisense strand to SEQ ID NO: 1344184
aauagucaucaggaaccaa

SEQ ID NO: 1344186 - RNA, 19 nt, Artificial Sequence
  Description of Artificial Sequence: Synthetic oligonucleotide
  Sense strand starting at position 227 of SEQ ID NO: 1242395
gguuccugaugacuauuau

SEQ ID NO: 1344187 - RNA, 19 nt, Artificial Sequence
  Description of Artificial Sequence: Synthetic oligonucleotide
  Antisense strand to SEQ ID NO: 1344186
auaauagucaucaggaacc

SEQ ID NO: 1344188 - RNA, 19 nt, Artificial Sequence
  Description of Artificial Sequence: Synthetic oligonucleotide
  Sense strand starting at position 228 of SEQ ID NO: 1242395
guuccugaugacuauuaua

SEQ ID NO: 1344189 - RNA, 19 nt, Artificial Sequence
  Description of Artificial Sequence: Synthetic oligonucleotide
  Antisense strand to SEQ ID NO: 1344188
uauaauagucaucaggaac

SEQ ID NO: 1344190 - RNA, 19 nt, Artificial Sequence
  Description of Artificial Sequence: Synthetic oligonucleotide
  Sense strand starting at position 259 of SEQ ID NO: 1242395
ugauuaugaucuuccagau

SEQ ID NO: 1344191 - RNA, 19 nt, Artificial Sequence
  Description of Artificial Sequence: Synthetic oligonucleotide
  Antisense strand to SEQ ID NO: 1344190
aucuggaagaucauaauca

SEQ ID NO: 1344192 - RNA, 19 nt, Artificial Sequence
  Description of Artificial Sequence: Synthetic oligonucleotide
  Sense strand starting at position 276 of SEQ ID NO: 1242395
auccauagauggucaucuu

SEQ ID NO: 1344193 - RNA, 19 nt, Artificial Sequence
  Description of Artificial Sequence: Synthetic oligonucleotide
  Antisense strand to SEQ ID NO: 1344192
aagaugaccaucuauggau

SEQ ID NO: 1344194 - RNA, 19 nt, Artificial Sequence
  Description of Artificial Sequence: Synthetic oligonucleotide
  Sense strand starting at position 279 of SEQ ID NO: 1242395
cauagauggucaucuugga

SEQ ID NO: 1344195 - RNA, 19 nt, Artificial Sequence
  Description of Artificial Sequence: Synthetic oligonucleotide
  Antisense strand to SEQ ID NO: 1344194
uccaagaugaccaucuaug

SEQ ID NO: 1344196 - RNA, 19 nt, Artificial Sequence
  Description of Artificial Sequence: Synthetic oligonucleotide
  Sense strand starting at position 283 of SEQ ID NO: 1242395
gauggucaucuuggauaaa

SEQ ID NO: 1344197 - RNA, 19 nt, Artificial Sequence
  Description of Artificial Sequence: Synthetic oligonucleotide
  Antisense strand to SEQ ID NO: 1344196
uuuauccaagaugaccauc

SEQ ID NO: 1344198 - RNA, 19 nt, Artificial Sequence
  Description of Artificial Sequence: Synthetic oligonucleotide
  Sense strand starting at position 338 of SEQ ID NO: 1242395
cuacuuacccucgaugaca

SEQ ID NO: 1344199 - RNA, 19 nt, Artificial Sequence
  Description of Artificial Sequence: Synthetic oligonucleotide
  Antisense strand to SEQ ID NO: 1344198
ugucaucgaggguaaguag

SEQ ID NO: 1344200 - RNA, 19 nt, Artificial Sequence
  Description of Artificial Sequence: Synthetic oligonucleotide
  Sense strand starting at position 478 of SEQ ID NO: 1242395
agcuaaaucuuacucggga

SEQ ID NO: 1344201 - RNA, 19 nt, Artificial Sequence
  Description of Artificial Sequence: Synthetic oligonucleotide
  Antisense strand to SEQ ID NO: 1344200
ucccgaguaagauuuagcu

SEQ ID NO: 1344202 - RNA, 19 nt, Artificial Sequence
  Description of Artificial Sequence: Synthetic oligonucleotide
  Sense strand starting at position 479 of SEQ ID NO: 1242395
gcuaaaucuuacucgggaa

SEQ ID NO: 1344203 - RNA, 19 nt, Artificial Sequence
  Description of Artificial Sequence: Synthetic oligonucleotide
  Antisense strand to SEQ ID NO: 1344202
uucccgaguaagauuuagc

SEQ ID NO: 1344204 - RNA, 19 nt, Artificial Sequence
  Description of Artificial Sequence: Synthetic oligonucleotide
  Sense strand starting at position 539 of SEQ ID NO: 1242395
uggaaugucaucgaucuuu

SEQ ID NO: 1344205 - RNA, 19 nt, Artificial Sequence
  Description of Artificial Sequence: Synthetic oligonucleotide
  Antisense strand to SEQ ID NO: 1344204
aaagaucgaugacauucca

SEQ ID NO: 1344206 - RNA, 19 nt, Artificial Sequence
  Description of Artificial Sequence: Synthetic oligonucleotide
  Sense strand starting at position 598 of SEQ ID NO: 1242395
ugguuucuggaggaugcau

SEQ ID NO: 1344207 - RNA, 19 nt, Artificial Sequence
  Description of Artificial Sequence: Synthetic oligonucleotide
  Antisense strand to SEQ ID NO: 1344206
augcauccuccagaaacca

SEQ ID NO: 1344208 - RNA, 19 nt, Artificial Sequence
  Description of Artificial Sequence: Synthetic oligonucleotide
  Sense strand starting at position 790 of SEQ ID NO: 1242395
ccgacuguccuagaaagug

SEQ ID NO: 1344209 - RNA, 19 nt, Artificial Sequence
  Description of Artificial Sequence: Synthetic oligonucleotide
  Antisense strand to SEQ ID NO: 1344208
cacuuucuaggacagucgg

SEQ ID NO: 1344210 - RNA, 19 nt, Artificial Sequence
  Description of Artificial Sequence: Synthetic oligonucleotide
  Sense strand starting at position 806 of SEQ ID NO: 1242395
gugcaucaccaauagguga

SEQ ID NO: 1344211 - RNA, 19 nt, Artificial Sequence
  Description of Artificial Sequence: Synthetic oligonucleotide
  Antisense strand to SEQ ID NO: 1344210
ucaccuauuggugaugcac

SEQ ID NO: 1344212 - RNA, 19 nt, Artificial Sequence
  Description of Artificial Sequence: Synthetic oligonucleotide
  Sense strand starting at position 1074 of SEQ ID NO: 1242395
ccuuuaucaggcgacuaua

SEQ ID NO: 1344213 - RNA, 19 nt, Artificial Sequence
  Description of Artificial Sequence: Synthetic oligonucleotide
  Antisense strand to SEQ ID NO: 1344212
uauagucgccugauaaagg

SEQ ID NO: 1344214 - RNA, 19 nt, Artificial Sequence
  Description of Artificial Sequence: Synthetic oligonucleotide
  Sense strand starting at position 1086 of SEQ ID NO: 1242395
gacuauagcguggaucaga

SEQ ID NO: 1344215 - RNA, 19 nt, Artificial Sequence
  Description of Artificial Sequence: Synthetic oligonucleotide
  Antisense strand to SEQ ID NO: 1344214
ucugauccacgcuauaguc

SEQ ID NO: 1344216 - RNA, 19 nt, Artificial Sequence
  Description of Artificial Sequence: Synthetic oligonucleotide
  Sense strand starting at position 1230 of SEQ ID NO: 1242395
gggaaaggugcacaugcau

SEQ ID NO: 1344217 - RNA, 19 nt, Artificial Sequence
  Description of Artificial Sequence: Synthetic oligonucleotide
  Antisense strand to SEQ ID NO: 1344216
augcaugugcaccuuuccc

SEQ ID NO: 1344218 - RNA, 19 nt, Artificial Sequence
  Description of Artificial Sequence: Synthetic oligonucleotide
  Sense strand starting at position 1696 of SEQ ID NO: 1242395
uguuguuuacuagccggua

SEQ ID NO: 1344219 - RNA, 19 nt, Artificial Sequence
  Description of Artificial Sequence: Synthetic oligonucleotide
  Antisense strand to SEQ ID NO: 1344218
uaccggcuaguaaacaaca

SEQ ID NO: 1344220 - RNA, 19 nt, Artificial Sequence
  Description of Artificial Sequence: Synthetic oligonucleotide
  Sense strand starting at position 2266 of SEQ ID NO: 1242395
gcuccuauaccugggaaua

SEQ ID NO: 1344221 - RNA, 19 nt, Artificial Sequence
  Description of Artificial Sequence: Synthetic oligonucleotide
  Antisense strand to SEQ ID NO: 1344220
uauucccagguauaggagc

SEQ ID NO: 1344222 - RNA, 19 nt, Artificial Sequence
  Description of Artificial Sequence: Synthetic oligonucleotide
  Sense strand starting at position 2267 of SEQ ID NO: 1242395
cuccuauaccugggaauaa

SEQ ID NO: 1344223 - RNA, 19 nt, Artificial Sequence
  Description of Artificial Sequence: Synthetic oligonucleotide
  Antisense strand to SEQ ID NO: 1344222
uuauucccagguauaggag

SEQ ID NO: 1344224 - RNA, 19 nt, Artificial Sequence
  Description of Artificial Sequence: Synthetic oligonucleotide
  Sense strand starting at position 2302 of SEQ ID NO: 1242395
uauguagaggucuacauac

SEQ ID NO: 1344225 - RNA, 19 nt, Artificial Sequence
  Description of Artificial Sequence: Synthetic oligonucleotide
  Antisense strand to SEQ ID NO: 1344224
guauguagaccucuacaua

SEQ ID NO: 1344226 - RNA, 19 nt, Artificial Sequence
  Description of Artificial Sequence: Synthetic oligonucleotide
  Sense strand starting at position 2427 of SEQ ID NO: 1242395
gaucgaucaccugagcuca

SEQ ID NO: 1344227 - RNA, 19 nt, Artificial Sequence
  Description of Artificial Sequence: Synthetic oligonucleotide
  Antisense strand to SEQ ID NO: 1344226
ugagcucaggugaucgauc

SEQ ID NO: 1344228 - RNA, 19 nt, Artificial Sequence
  Description of Artificial Sequence: Synthetic oligonucleotide
  Sense strand starting at position 2538 of SEQ ID NO: 1242395
ccagcuauuccuuagacug

SEQ ID NO: 1344229 - RNA, 19 nt, Artificial Sequence
  Description of Artificial Sequence: Synthetic oligonucleotide
  Antisense strand to SEQ ID NO: 1344228
cagucuaaggaauagcugg

SEQ ID NO: 1344230 - RNA, 19 nt, Artificial Sequence
  Description of Artificial Sequence: Synthetic oligonucleotide
  Sense strand starting at position 2811 of SEQ ID NO: 1242395
uggagaagacguugaugua

SEQ ID NO: 1344231 - RNA, 19 nt, Artificial Sequence
  Description of Artificial Sequence: Synthetic oligonucleotide
  Antisense strand to SEQ ID NO: 1344230
uacaucaacgucuucucca

SEQ ID NO: 1344232 - RNA, 19 nt, Artificial Sequence
  Description of Artificial Sequence: Synthetic oligonucleotide
  Sense strand starting at position 2812 of SEQ ID NO: 1242395
ggagaagacguugauguau

SEQ ID NO: 1344233 - RNA, 19 nt, Artificial Sequence
  Description of Artificial Sequence: Synthetic oligonucleotide
  Antisense strand to SEQ ID NO: 1344232
auacaucaacgucuucucc

SEQ ID NO: 1344234 - RNA, 19 nt, Artificial Sequence
  Description of Artificial Sequence: Synthetic oligonucleotide
  Sense strand starting at position 2860 of SEQ ID NO: 1242395
cuacauuugucgcuagaau

SEQ ID NO: 1344235 - RNA, 19 nt, Artificial Sequence
  Description of Artificial Sequence: Synthetic oligonucleotide
  Antisense strand to SEQ ID NO: 1344234
auucuagcgacaaauguag

SEQ ID NO: 1344236 - RNA, 19 nt, Artificial Sequence
  Description of Artificial Sequence: Synthetic oligonucleotide
  Sense strand starting at position 2955 of SEQ ID NO: 1242395
agcuauuuccuauagcugu

SEQ ID NO: 1344237 - RNA, 19 nt, Artificial Sequence
  Description of Artificial Sequence: Synthetic oligonucleotide
  Antisense strand to SEQ ID NO: 1344236
acagcuauaggaaauagcu

SEQ ID NO: 1344238 - RNA, 19 nt, Artificial Sequence
  Description of Artificial Sequence: Synthetic oligonucleotide
  Sense strand starting at position 3047 of SEQ ID NO: 1242395
cucacaagugguuauguuu

SEQ ID NO: 1344239 - RNA, 19 nt, Artificial Sequence
  Description of Artificial Sequence: Synthetic oligonucleotide
  Antisense strand to SEQ ID NO: 1344238
aaacauaaccacuugugag

SEQ ID NO: 1344240 - RNA, 19 nt, Artificial Sequence
  Description of Artificial Sequence: Synthetic oligonucleotide
  Sense strand starting at position 3089 of SEQ ID NO: 1242395
acuguauucccggaaguuc

SEQ ID NO: 1344241 - RNA, 19 nt, Artificial Sequence
  Description of Artificial Sequence: Synthetic oligonucleotide
  Antisense strand to SEQ ID NO: 1344240
gaacuuccgggaauacagu

SEQ ID NO: 1344242 - RNA, 19 nt, Artificial Sequence
  Description of Artificial Sequence: Synthetic oligonucleotide
  Sense strand starting at position 3385 of SEQ ID NO: 1242395
accaguguaucugcauuua

SEQ ID NO: 1344243 - RNA, 19 nt, Artificial Sequence
  Description of Artificial Sequence: Synthetic oligonucleotide
  Antisense strand to SEQ ID NO: 1344242
uaaaugcagauacacuggu

SEQ ID NO: 1344244 - RNA, 19 nt, Artificial Sequence
  Description of Artificial Sequence: Synthetic oligonucleotide
  Sense strand starting at position 3452 of SEQ ID NO: 1242395
cuuguuucugagcacuaac

SEQ ID NO: 1344245 - RNA, 19 nt, Artificial Sequence
  Description of Artificial Sequence: Synthetic oligonucleotide
  Antisense strand to SEQ ID NO: 1344244
guuagugcucagaaacaag

SEQ ID NO: 1344246 - RNA, 19 nt, Artificial Sequence
  Description of Artificial Sequence: Synthetic oligonucleotide
  Sense strand starting at position 3455 of SEQ ID NO: 1242395
guuucugagcacuaaccaa

SEQ ID NO: 1344247 - RNA, 19 nt, Artificial Sequence
  Description of Artificial Sequence: Synthetic oligonucleotide
  Antisense strand to SEQ ID NO: 1344246
uugguuagugcucagaaac

SEQ ID NO: 1344248 - RNA, 19 nt, Artificial Sequence
  Description of Artificial Sequence: Synthetic oligonucleotide
  Sense strand starting at position 3476 of SEQ ID NO: 1242395
ucuauaaauguaugucuca

SEQ ID NO: 1344249 - RNA, 19 nt, Artificial Sequence
  Description of Artificial Sequence: Synthetic oligonucleotide
  Antisense strand to SEQ ID NO: 1344248
ugagacauacauuuauaga

SEQ ID NO: 1344250 - RNA, 19 nt, Artificial Sequence
  Description of Artificial Sequence: Synthetic oligonucleotide
  Sense strand starting at position 3677 of SEQ ID NO: 1242395
ggugguagcauggagcaau

SEQ ID NO: 1344251 - RNA, 19 nt, Artificial Sequence
  Description of Artificial Sequence: Synthetic oligonucleotide
  Antisense strand to SEQ ID NO: 1344250
auugcuccaugcuaccacc

SEQ ID NO: 1344252 - RNA, 19 nt, Artificial Sequence
  Description of Artificial Sequence: Synthetic oligonucleotide
  Sense strand starting at position 3781 of SEQ ID NO: 1242395
ugacuuuggugcuuaagaa

SEQ ID NO: 1344253 - RNA, 19 nt, Artificial Sequence
  Description of Artificial Sequence: Synthetic oligonucleotide
  Antisense strand to SEQ ID NO: 1344252
uucuuaagcaccaaaguca

SEQ ID NO: 1344254 - RNA, 19 nt, Artificial Sequence
  Description of Artificial Sequence: Synthetic oligonucleotide
  Sense strand starting at position 3782 of SEQ ID NO: 1242395
gacuuuggugcuuaagaaa

SEQ ID NO: 1344255 - RNA, 19 nt, Artificial Sequence
  Description of Artificial Sequence: Synthetic oligonucleotide
  Antisense strand to SEQ ID NO: 1344254
uuucuuaagcaccaaaguc

SEQ ID NO: 1344256 - RNA, 19 nt, Artificial Sequence
  Description of Artificial Sequence: Synthetic oligonucleotide
  Sense strand starting at position 3980 of SEQ ID NO: 1242395
uuaagaacccugcaaguaa

SEQ ID NO: 1344257 - RNA, 19 nt, Artificial Sequence
  Description of Artificial Sequence: Synthetic oligonucleotide
  Antisense strand to SEQ ID NO: 1344256
uuacuugcaggguucuuaa

SEQ ID NO: 1344258 - RNA, 19 nt, Artificial Sequence
  Description of Artificial Sequence: Synthetic oligonucleotide
  Sense strand starting at position 4 of SEQ ID NO: 1242396
aaugcuuaaggguaacgua

SEQ ID NO: 1344259 - RNA, 19 nt, Artificial Sequence
  Description of Artificial Sequence: Synthetic oligonucleotide
  Antisense strand to SEQ ID NO: 1344258
uacguuacccuuaagcauu

SEQ ID NO: 1344260 - RNA, 19 nt, Artificial Sequence
  Description of Artificial Sequence: Synthetic oligonucleotide
  Sense strand starting at position 255 of SEQ ID NO: 1242396
uggaauuaauuuggaggaa

SEQ ID NO: 1344261 - RNA, 19 nt, Artificial Sequence
  Description of Artificial Sequence: Synthetic oligonucleotide
  Antisense strand to SEQ ID NO: 1344260
uuccuccaaauuaauucca

SEQ ID NO: 1344262 - RNA, 19 nt, Artificial Sequence
  Description of Artificial Sequence: Synthetic oligonucleotide
  Sense strand starting at position 308 of SEQ ID NO: 1242396
uuuaauccaguguaugaca

SEQ ID NO: 1344263 - RNA, 19 nt, Artificial Sequence
  Description of Artificial Sequence: Synthetic oligonucleotide
  Antisense strand to SEQ ID NO: 1344262
ugucauacacuggauuaaa

SEQ ID NO: 1344264 - RNA, 19 nt, Artificial Sequence
  Description of Artificial Sequence: Synthetic oligonucleotide
  Sense strand starting at position 354 of SEQ ID NO: 1242396
aacaguaaagucugagaac

SEQ ID NO: 1344265 - RNA, 19 nt, Artificial Sequence
  Description of Artificial Sequence: Synthetic oligonucleotide
  Antisense strand to SEQ ID NO: 1344264
guucucagacuuuacuguu

SEQ ID NO: 1344266 - RNA, 19 nt, Artificial Sequence
  Description of Artificial Sequence: Synthetic oligonucleotide
  Sense strand starting at position 402 of SEQ ID NO: 1242396
auuagucaaggaugaguga

SEQ ID NO: 1344267 - RNA, 19 nt, Artificial Sequence
  Description of Artificial Sequence: Synthetic oligonucleotide
  Antisense strand to SEQ ID NO: 1344266
ucacucauccuugacuaau

SEQ ID NO: 1344268 - RNA, 19 nt, Artificial Sequence
  Description of Artificial Sequence: Synthetic oligonucleotide
  Sense strand starting at position 405 of SEQ ID NO: 1242396
agucaaggaugagugaauu

SEQ ID NO: 1344269 - RNA, 19 nt, Artificial Sequence
  Description of Artificial Sequence: Synthetic oligonucleotide
  Antisense strand to SEQ ID NO: 1344268
aauucacucauccuugacu

SEQ ID NO: 1344270 - RNA, 19 nt, Artificial Sequence
  Description of Artificial Sequence: Synthetic oligonucleotide
  Sense strand starting at position 415 of SEQ ID NO: 1242396
gagugaauucuaggacugu

SEQ ID NO: 1344271 - RNA, 19 nt, Artificial Sequence
  Description of Artificial Sequence: Synthetic oligonucleotide
  Antisense strand to SEQ ID NO: 1344270
acaguccuagaauucacuc

SEQ ID NO: 1344272 - RNA, 19 nt, Artificial Sequence
  Description of Artificial Sequence: Synthetic oligonucleotide
  Sense strand starting at position 419 of SEQ ID NO: 1242396
gaauucuaggacuguaaac

SEQ ID NO: 1344273 - RNA, 19 nt, Artificial Sequence
  Description of Artificial Sequence: Synthetic oligonucleotide
  Antisense strand to SEQ ID NO: 1344272
guuuacaguccuagaauuc

SEQ ID NO: 1344274 - RNA, 19 nt, Artificial Sequence
  Description of Artificial Sequence: Synthetic oligonucleotide
  Sense strand starting at position 509 of SEQ ID NO: 1242396
uccugaacccuuuagguua

SEQ ID NO: 1344275 - RNA, 19 nt, Artificial Sequence
  Description of Artificial Sequence: Synthetic oligonucleotide
  Antisense strand to SEQ ID NO: 1344274
uaaccuaaaggguucagga

SEQ ID NO: 1344276 - RNA, 19 nt, Artificial Sequence
  Description of Artificial Sequence: Synthetic oligonucleotide
  Sense strand starting at position 606 of SEQ ID NO: 1242396
ucaaacuuggguggaauau

SEQ ID NO: 1344277 - RNA, 19 nt, Artificial Sequence
  Description of Artificial Sequence: Synthetic oligonucleotide
  Antisense strand to SEQ ID NO: 1344276
auauuccacccaaguuuga

SEQ ID NO: 1344278 - RNA, 19 nt, Artificial Sequence
  Description of Artificial Sequence: Synthetic oligonucleotide
  Sense strand starting at position 830 of SEQ ID NO: 1242396
cacacaaacugguuuagga

SEQ ID NO: 1344279 - RNA, 19 nt, Artificial Sequence
  Description of Artificial Sequence: Synthetic oligonucleotide
  Antisense strand to SEQ ID NO: 1344278
uccuaaaccaguuugugug

SEQ ID NO: 1344280 - RNA, 19 nt, Artificial Sequence
  Description of Artificial Sequence: Synthetic oligonucleotide
  Sense strand starting at position 887 of SEQ ID NO: 1242396
gcuugugugcuaccugcua

SEQ ID NO: 1344281 - RNA, 19 nt, Artificial Sequence
  Description of Artificial Sequence: Synthetic oligonucleotide
  Antisense strand to SEQ ID NO: 1344280
uagcagguagcacacaagc

SEQ ID NO: 1344282 - RNA, 19 nt, Artificial Sequence
  Description of Artificial Sequence: Synthetic oligonucleotide
  Sense strand starting at position 1105 of SEQ ID NO: 1242396
auucgaagucuuggaggaa

SEQ ID NO: 1344283 - RNA, 19 nt, Artificial Sequence
  Description of Artificial Sequence: Synthetic oligonucleotide
  Antisense strand to SEQ ID NO: 1344282
uuccuccaagacuucgaau

SEQ ID NO: 1344284 - RNA, 19 nt, Artificial Sequence
  Description of Artificial Sequence: Synthetic oligonucleotide
  Sense strand starting at position 1183 of SEQ ID NO: 1242396
agccaaugauggcuacaga

SEQ ID NO: 1344285 - RNA, 19 nt, Artificial Sequence
  Description of Artificial Sequence: Synthetic oligonucleotide
  Antisense strand to SEQ ID NO: 1344284
ucuguagccaucauuggcu

SEQ ID NO: 1344286 - RNA, 19 nt, Artificial Sequence
  Description of Artificial Sequence: Synthetic oligonucleotide
  Sense strand starting at position 1184 of SEQ ID NO: 1242396
gccaaugauggcuacagaa

SEQ ID NO: 1344287 - RNA, 19 nt, Artificial Sequence
  Description of Artificial Sequence: Synthetic oligonucleotide
  Antisense strand to SEQ ID NO: 1344286
uucuguagccaucauuggc

SEQ ID NO: 1344288 - RNA, 19 nt, Artificial Sequence
  Description of Artificial Sequence: Synthetic oligonucleotide
  Sense strand starting at position 1253 of SEQ ID NO: 1242396
acgauuacauucuuugaua

SEQ ID NO: 1344289 - RNA, 19 nt, Artificial Sequence
  Description of Artificial Sequence: Synthetic oligonucleotide
  Antisense strand to SEQ ID NO: 1344288
uaucaaagaauguaaucgu

SEQ ID NO: 1344290 - RNA, 19 nt, Artificial Sequence
  Description of Artificial Sequence: Synthetic oligonucleotide
  Sense strand starting at position 1254 of SEQ ID NO: 1242396
cgauuacauucuuugauau

SEQ ID NO: 1344291 - RNA, 19 nt, Artificial Sequence
  Description of Artificial Sequence: Synthetic oligonucleotide
  Antisense strand to SEQ ID NO: 1344290
auaucaaagaauguaaucg

SEQ ID NO: 1344292 - RNA, 19 nt, Artificial Sequence
  Description of Artificial Sequence: Synthetic oligonucleotide
  Sense strand starting at position 1409 of SEQ ID NO: 1242396
uccaaagaguuccuaagca

SEQ ID NO: 1344293 - RNA, 19 nt, Artificial Sequence
  Description of Artificial Sequence: Synthetic oligonucleotide
  Antisense strand to SEQ ID NO: 1344292
ugcuuaggaacucuuugga

SEQ ID NO: 1344294 - RNA, 19 nt, Artificial Sequence
  Description of Artificial Sequence: Synthetic oligonucleotide
  Sense strand starting at position 1445 of SEQ ID NO: 1242396
uugguuccugaugacuauu

SEQ ID NO: 1344295 - RNA, 19 nt, Artificial Sequence
  Description of Artificial Sequence: Synthetic oligonucleotide
  Antisense strand to SEQ ID NO: 1344294
aauagucaucaggaaccaa

SEQ ID NO: 1344296 - RNA, 19 nt, Artificial Sequence
  Description of Artificial Sequence: Synthetic oligonucleotide
  Sense strand starting at position 1447 of SEQ ID NO: 1242396
gguuccugaugacuauuau

SEQ ID NO: 1344297 - RNA, 19 nt, Artificial Sequence
  Description of Artificial Sequence: Synthetic oligonucleotide
  Antisense strand to SEQ ID NO: 1344296
auaauagucaucaggaacc

SEQ ID NO: 1344298 - RNA, 19 nt, Artificial Sequence
  Description of Artificial Sequence: Synthetic oligonucleotide
  Sense strand starting at position 1448 of SEQ ID NO: 1242396
guuccugaugacuauuaua

SEQ ID NO: 1344299 - RNA, 19 nt, Artificial Sequence
  Description of Artificial Sequence: Synthetic oligonucleotide
  Antisense strand to SEQ ID NO: 1344298
uauaauagucaucaggaac

SEQ ID NO: 1344300 - RNA, 19 nt, Artificial Sequence
  Description of Artificial Sequence: Synthetic oligonucleotide
  Sense strand starting at position 1479 of SEQ ID NO: 1242396
ugauuaugaucuuccagau

SEQ ID NO: 1344301 - RNA, 19 nt, Artificial Sequence
  Description of Artificial Sequence: Synthetic oligonucleotide
  Antisense strand to SEQ ID NO: 1344300
aucuggaagaucauaauca

SEQ ID NO: 1344302 - RNA, 19 nt, Artificial Sequence
  Description of Artificial Sequence: Synthetic oligonucleotide
  Sense strand starting at position 1496 of SEQ ID NO: 1242396
auccauagauggucaucuu

SEQ ID NO: 1344303 - RNA, 19 nt, Artificial Sequence
  Description of Artificial Sequence: Synthetic oligonucleotide
  Antisense strand to SEQ ID NO: 1344302
aagaugaccaucuauggau

SEQ ID NO: 1344304 - RNA, 19 nt, Artificial Sequence
  Description of Artificial Sequence: Synthetic oligonucleotide
  Sense strand starting at position 1499 of SEQ ID NO: 1242396
cauagauggucaucuugga

SEQ ID NO: 1344305 - RNA, 19 nt, Artificial Sequence
  Description of Artificial Sequence: Synthetic oligonucleotide
  Antisense strand to SEQ ID NO: 1344304
uccaagaugaccaucuaug

SEQ ID NO: 1344306 - RNA, 19 nt, Artificial Sequence
  Description of Artificial Sequence: Synthetic oligonucleotide
  Sense strand starting at position 1503 of SEQ ID NO: 1242396
gauggucaucuuggauaaa

SEQ ID NO: 1344307 - RNA, 19 nt, Artificial Sequence
  Description of Artificial Sequence: Synthetic oligonucleotide
  Antisense strand to SEQ ID NO: 1344306
uuuauccaagaugaccauc

SEQ ID NO: 1344308 - RNA, 19 nt, Artificial Sequence
  Description of Artificial Sequence: Synthetic oligonucleotide
  Sense strand starting at position 1558 of SEQ ID NO: 1242396
cuacuuacccucgaugaca

SEQ ID NO: 1344309 - RNA, 19 nt, Artificial Sequence
  Description of Artificial Sequence: Synthetic oligonucleotide
  Antisense strand to SEQ ID NO: 1344308
ugucaucgaggguaaguag

SEQ ID NO: 1344310 - RNA, 19 nt, Artificial Sequence
  Description of Artificial Sequence: Synthetic oligonucleotide
  Sense strand starting at position 1698 of SEQ ID NO: 1242396
agcuaaaucuuacucggga

SEQ ID NO: 1344311 - RNA, 19 nt, Artificial Sequence
  Description of Artificial Sequence: Synthetic oligonucleotide
  Antisense strand to SEQ ID NO: 1344310
ucccgaguaagauuuagcu

SEQ ID NO: 1344312 - RNA, 19 nt, Artificial Sequence
  Description of Artificial Sequence: Synthetic oligonucleotide
  Sense strand starting at position 1759 of SEQ ID NO: 1242396
uggaaugucaucgaucuuu

SEQ ID NO: 1344313 - RNA, 19 nt, Artificial Sequence
  Description of Artificial Sequence: Synthetic oligonucleotide
  Antisense strand to SEQ ID NO: 1344312
aaagaucgaugacauucca

SEQ ID NO: 1344314 - RNA, 19 nt, Artificial Sequence
  Description of Artificial Sequence: Synthetic oligonucleotide
  Sense strand starting at position 1818 of SEQ ID NO: 1242396
ugguuucuggaggaugcau

SEQ ID NO: 1344315 - RNA, 19 nt, Artificial Sequence
  Description of Artificial Sequence: Synthetic oligonucleotide
  Antisense strand to SEQ ID NO: 1344314
augcauccuccagaaacca

SEQ ID NO: 1344316 - RNA, 19 nt, Artificial Sequence
  Description of Artificial Sequence: Synthetic oligonucleotide
  Sense strand starting at position 2010 of SEQ ID NO: 1242396
ccgacuguccuagaaagug

SEQ ID NO: 1344317 - RNA, 19 nt, Artificial Sequence
  Description of Artificial Sequence: Synthetic oligonucleotide
  Antisense strand to SEQ ID NO: 1344316
cacuuucuaggacagucgg

SEQ ID NO: 1344318 - RNA, 19 nt, Artificial Sequence
  Description of Artificial Sequence: Synthetic oligonucleotide
  Sense strand starting at position 2026 of SEQ ID NO: 1242396
gugcaucaccaauagguga

SEQ ID NO: 1344319 - RNA, 19 nt, Artificial Sequence
  Description of Artificial Sequence: Synthetic oligonucleotide
  Antisense strand to SEQ ID NO: 1344318
ucaccuauuggugaugcac

SEQ ID NO: 1344320 - RNA, 19 nt, Artificial Sequence
  Description of Artificial Sequence: Synthetic oligonucleotide
  Sense strand starting at position 2294 of SEQ ID NO: 1242396
ccuuuaucaggcgacuaua

SEQ ID NO: 1344321 - RNA, 19 nt, Artificial Sequence
  Description of Artificial Sequence: Synthetic oligonucleotide
  Antisense strand to SEQ ID NO: 1344320
uauagucgccugauaaagg

SEQ ID NO: 1344322 - RNA, 19 nt, Artificial Sequence
  Description of Artificial Sequence: Synthetic oligonucleotide
  Sense strand starting at position 2306 of SEQ ID NO: 1242396
gacuauagcguggaucaga

SEQ ID NO: 1344323 - RNA, 19 nt, Artificial Sequence
  Description of Artificial Sequence: Synthetic oligonucleotide
  Antisense strand to SEQ ID NO: 1344322
ucugauccacgcuauaguc

SEQ ID NO: 1344324 - RNA, 19 nt, Artificial Sequence
  Description of Artificial Sequence: Synthetic oligonucleotide
  Sense strand starting at position 2450 of SEQ ID NO: 1242396
gggaaaggugcacaugcau

SEQ ID NO: 1344325 - RNA, 19 nt, Artificial Sequence
  Description of Artificial Sequence: Synthetic oligonucleotide
  Antisense strand to SEQ ID NO: 1344324
augcaugugcaccuuuccc

SEQ ID NO: 1344326 - RNA, 19 nt, Artificial Sequence
  Description of Artificial Sequence: Synthetic oligonucleotide
  Sense strand starting at position 2916 of SEQ ID NO: 1242396
uguuguuuacuagccggua

SEQ ID NO: 1344327 - RNA, 19 nt, Artificial Sequence
  Description of Artificial Sequence: Synthetic oligonucleotide
  Antisense strand to SEQ ID NO: 1344326
uaccggcuaguaaacaaca

SEQ ID NO: 1344328 - RNA, 19 nt, Artificial Sequence
  Description of Artificial Sequence: Synthetic oligonucleotide
  Sense strand starting at position 3486 of SEQ ID NO: 1242396
gcuccuauaccugggaaua

SEQ ID NO: 1344329 - RNA, 19 nt, Artificial Sequence
  Description of Artificial Sequence: Synthetic oligonucleotide
  Antisense strand to SEQ ID NO: 1344328
uauucccagguauaggagc

SEQ ID NO: 1344330 - RNA, 19 nt, Artificial Sequence
  Description of Artificial Sequence: Synthetic oligonucleotide
  Sense strand starting at position 3487 of SEQ ID NO: 1242396
cuccuauaccugggaauaa

SEQ ID NO: 1344331 - RNA, 19 nt, Artificial Sequence
  Description of Artificial Sequence: Synthetic oligonucleotide
  Antisense strand to SEQ ID NO: 1344330
uuauucccagguauaggag

SEQ ID NO: 1344332 - RNA, 19 nt, Artificial Sequence
  Description of Artificial Sequence: Synthetic oligonucleotide
  Sense strand starting at position 3522 of SEQ ID NO: 1242396
uauguagaggucuacauac

SEQ ID NO: 1344333 - RNA, 19 nt, Artificial Sequence
  Description of Artificial Sequence: Synthetic oligonucleotide
  Antisense strand to SEQ ID NO: 1344332
guauguagaccucuacaua

SEQ ID NO: 1344334 - RNA, 19 nt, Artificial Sequence
  Description of Artificial Sequence: Synthetic oligonucleotide
  Sense strand starting at position 3647 of SEQ ID NO: 1242396
gaucgaucaccugagcuca

SEQ ID NO: 1344335 - RNA, 19 nt, Artificial Sequence
  Description of Artificial Sequence: Synthetic oligonucleotide
  Antisense strand to SEQ ID NO: 1344334
ugagcucaggugaucgauc

SEQ ID NO: 1344336 - RNA, 19 nt, Artificial Sequence
  Description of Artificial Sequence: Synthetic oligonucleotide
  Sense strand starting at position 3758 of SEQ ID NO: 1242396
ccagcuauuccuuagacug

SEQ ID NO: 1344337 - RNA, 19 nt, Artificial Sequence
  Description of Artificial Sequence: Synthetic oligonucleotide
  Antisense strand to SEQ ID NO: 1344336
cagucuaaggaauagcugg

SEQ ID NO: 1344338 - RNA, 19 nt, Artificial Sequence
  Description of Artificial Sequence: Synthetic oligonucleotide
  Sense strand starting at position 63 of SEQ ID NO: 1242397
cuucguuugcagcuuauga

SEQ ID NO: 1344339 - RNA, 19 nt, Artificial Sequence
  Description of Artificial Sequence: Synthetic oligonucleotide
  Antisense strand to SEQ ID NO: 1344338
ucauaagcugcaaacgaag

SEQ ID NO: 1344340 - RNA, 19 nt, Artificial Sequence
  Description of Artificial Sequence: Synthetic oligonucleotide
  Sense strand starting at position 264 of SEQ ID NO: 1242397
aguugaguuguagagaauc

SEQ ID NO: 1344341 - RNA, 19 nt, Artificial Sequence
  Description of Artificial Sequence: Synthetic oligonucleotide
  Antisense strand to SEQ ID NO: 1344340
gauucucuacaacucaacu

SEQ ID NO: 1344342 - RNA, 19 nt, Artificial Sequence
  Description of Artificial Sequence: Synthetic oligonucleotide
  Sense strand starting at position 515 of SEQ ID NO: 1242397
cgcuauugacaccaaggaa

SEQ ID NO: 1344343 - RNA, 19 nt, Artificial Sequence
  Description of Artificial Sequence: Synthetic oligonucleotide
  Antisense strand to SEQ ID NO: 1344342
uuccuuggugucaauagcg

SEQ ID NO: 1344344 - RNA, 19 nt, Artificial Sequence
  Description of Artificial Sequence: Synthetic oligonucleotide
  Sense strand starting at position 528 of SEQ ID NO: 1242397
aaggaauugcaauguguua

SEQ ID NO: 1344345 - RNA, 19 nt, Artificial Sequence
  Description of Artificial Sequence: Synthetic oligonucleotide
  Antisense strand to SEQ ID NO: 1344344
uaacacauugcaauuccuu

SEQ ID NO: 1344346 - RNA, 19 nt, Artificial Sequence
  Description of Artificial Sequence: Synthetic oligonucleotide
  Sense strand starting at position 530 of SEQ ID NO: 1242397
ggaauugcaauguguuaca

SEQ ID NO: 1344347 - RNA, 19 nt, Artificial Sequence
  Description of Artificial Sequence: Synthetic oligonucleotide
  Antisense strand to SEQ ID NO: 1344346
uguaacacauugcaauucc

SEQ ID NO: 1344348 - RNA, 19 nt, Artificial Sequence
  Description of Artificial Sequence: Synthetic oligonucleotide
  Sense strand starting at position 542 of SEQ ID NO: 1242397
uguuacaugcuauaaagga

SEQ ID NO: 1344349 - RNA, 19 nt, Artificial Sequence
  Description of Artificial Sequence: Synthetic oligonucleotide
  Antisense strand to SEQ ID NO: 1344348
uccuuuauagcauguaaca

SEQ ID NO: 1344350 - RNA, 19 nt, Artificial Sequence
  Description of Artificial Sequence: Synthetic oligonucleotide
  Sense strand starting at position 916 of SEQ ID NO: 1242397
uugagagcuuauucccuua

SEQ ID NO: 1344351 - RNA, 19 nt, Artificial Sequence
  Description of Artificial Sequence: Synthetic oligonucleotide
  Antisense strand to SEQ ID NO: 1344350
uaagggaauaagcucucaa

SEQ ID NO: 1344352 - RNA, 19 nt, Artificial Sequence
  Description of Artificial Sequence: Synthetic oligonucleotide
  Sense strand starting at position 1084 of SEQ ID NO: 1242397
gugaacuguuaccauuuaa

SEQ ID NO: 1344353 - RNA, 19 nt, Artificial Sequence
  Description of Artificial Sequence: Synthetic oligonucleotide
  Antisense strand to SEQ ID NO: 1344352
uuaaaugguaacaguucac

SEQ ID NO: 1344354 - RNA, 19 nt, Artificial Sequence
  Description of Artificial Sequence: Synthetic oligonucleotide
  Sense strand starting at position 1234 of SEQ ID NO: 1242397
auaguuuaagcugguaaac

SEQ ID NO: 1344355 - RNA, 19 nt, Artificial Sequence
  Description of Artificial Sequence: Synthetic oligonucleotide
  Antisense strand to SEQ ID NO: 1344354
guuuaccagcuuaaacuau

SEQ ID NO: 1344356 - RNA, 19 nt, Artificial Sequence
  Description of Artificial Sequence: Synthetic oligonucleotide
  Sense strand starting at position 1266 of SEQ ID NO: 1242397
ugaauaaccugagaaauca

SEQ ID NO: 1344357 - RNA, 19 nt, Artificial Sequence
  Description of Artificial Sequence: Synthetic oligonucleotide
  Antisense strand to SEQ ID NO: 1344356
ugauuucucagguuauuca

SEQ ID NO: 1344358 - RNA, 19 nt, Artificial Sequence
  Description of Artificial Sequence: Synthetic oligonucleotide
  Sense strand starting at position 1349 of SEQ ID NO: 1242397
guaaacugcuaaguuuaaa

SEQ ID NO: 1344359 - RNA, 19 nt, Artificial Sequence
  Description of Artificial Sequence: Synthetic oligonucleotide
  Antisense strand to SEQ ID NO: 1344358
uuuaaacuuagcaguuuac

SEQ ID NO: 1344360 - RNA, 19 nt, Artificial Sequence
  Description of Artificial Sequence: Synthetic oligonucleotide
  Sense strand starting at position 1361 of SEQ ID NO: 1242397
guuuaaaugucauccacuc

SEQ ID NO: 1344361 - RNA, 19 nt, Artificial Sequence
  Description of Artificial Sequence: Synthetic oligonucleotide
  Antisense strand to SEQ ID NO: 1344360
gaguggaugacauuuaaac

SEQ ID NO: 1344362 - RNA, 19 nt, Artificial Sequence
  Description of Artificial Sequence: Synthetic oligonucleotide
  Sense strand starting at position 1373 of SEQ ID NO: 1242397
uccacucgguggguuuaaa

SEQ ID NO: 1344363 - RNA, 19 nt, Artificial Sequence
  Description of Artificial Sequence: Synthetic oligonucleotide
  Antisense strand to SEQ ID NO: 1344362
uuuaaacccaccgagugga

SEQ ID NO: 1344364 - RNA, 19 nt, Artificial Sequence
  Description of Artificial Sequence: Synthetic oligonucleotide
  Sense strand starting at position 1551 of SEQ ID NO: 1242397
aacaauccagugugugaga

SEQ ID NO: 1344365 - RNA, 19 nt, Artificial Sequence
  Description of Artificial Sequence: Synthetic oligonucleotide
  Antisense strand to SEQ ID NO: 1344364
ucucacacacuggauuguu

SEQ ID NO: 1344366 - RNA, 19 nt, Artificial Sequence
  Description of Artificial Sequence: Synthetic oligonucleotide
  Sense strand starting at position 1553 of SEQ ID NO: 1242397
caauccagugugugagaaa

SEQ ID NO: 1344367 - RNA, 19 nt, Artificial Sequence
  Description of Artificial Sequence: Synthetic oligonucleotide
  Antisense strand to SEQ ID NO: 1344366
uuucucacacacuggauug

SEQ ID NO: 1344368 - RNA, 19 nt, Artificial Sequence
  Description of Artificial Sequence: Synthetic oligonucleotide
  Sense strand starting at position 1672 of SEQ ID NO: 1242397
uugauauccuaguuacuuc

SEQ ID NO: 1344369 - RNA, 19 nt, Artificial Sequence
  Description of Artificial Sequence: Synthetic oligonucleotide
  Antisense strand to SEQ ID NO: 1344368
gaaguaacuaggauaucaa

SEQ ID NO: 1344370 - RNA, 19 nt, Artificial Sequence
  Description of Artificial Sequence: Synthetic oligonucleotide
  Sense strand starting at position 1878 of SEQ ID NO: 1242397
uuugcucuuucuguauuua

SEQ ID NO: 1344371 - RNA, 19 nt, Artificial Sequence
  Description of Artificial Sequence: Synthetic oligonucleotide
  Antisense strand to SEQ ID NO: 1344370
uaaauacagaaagagcaaa

SEQ ID NO: 1344372 - RNA, 19 nt, Artificial Sequence
  Description of Artificial Sequence: Synthetic oligonucleotide
  Sense strand starting at position 1953 of SEQ ID NO: 1242397
gugaucccugccuacaaga

SEQ ID NO: 1344373 - RNA, 19 nt, Artificial Sequence
  Description of Artificial Sequence: Synthetic oligonucleotide
  Antisense strand to SEQ ID NO: 1344372
ucuuguaggcagggaucac

SEQ ID NO: 1344374 - RNA, 19 nt, Artificial Sequence
  Description of Artificial Sequence: Synthetic oligonucleotide
  Sense strand starting at position 1983 of SEQ ID NO: 1242397
ggauucgggaaguacuuua

SEQ ID NO: 1344375 - RNA, 19 nt, Artificial Sequence
  Description of Artificial Sequence: Synthetic oligonucleotide
  Antisense strand to SEQ ID NO: 1344374
uaaaguacuucccgaaucc

SEQ ID NO: 1344376 - RNA, 19 nt, Artificial Sequence
  Description of Artificial Sequence: Synthetic oligonucleotide
  Sense strand starting at position 1994 of SEQ ID NO: 1242397
guacuuuaagcucacguga

SEQ ID NO: 1344377 - RNA, 19 nt, Artificial Sequence
  Description of Artificial Sequence: Synthetic oligonucleotide
  Antisense strand to SEQ ID NO: 1344376
ucacgugagcuuaaaguac

SEQ ID NO: 1344378 - RNA, 19 nt, Artificial Sequence
  Description of Artificial Sequence: Synthetic oligonucleotide
  Sense strand starting at position 2051 of SEQ ID NO: 1242397
cuuccacaguguuuaucau

SEQ ID NO: 1344379 - RNA, 19 nt, Artificial Sequence
  Description of Artificial Sequence: Synthetic oligonucleotide
  Antisense strand to SEQ ID NO: 1344378
augauaaacacuguggaag

SEQ ID NO: 1344380 - RNA, 19 nt, Artificial Sequence
  Description of Artificial Sequence: Synthetic oligonucleotide
  Sense strand starting at position 2052 of SEQ ID NO: 1242397
uuccacaguguuuaucauu

SEQ ID NO: 1344381 - RNA, 19 nt, Artificial Sequence
  Description of Artificial Sequence: Synthetic oligonucleotide
  Antisense strand to SEQ ID NO: 1344380
aaugauaaacacuguggaa

SEQ ID NO: 1344382 - RNA, 19 nt, Artificial Sequence
  Description of Artificial Sequence: Synthetic oligonucleotide
  Sense strand starting at position 2202 of SEQ ID NO: 1242397
accgcuugcuccucuauuu

SEQ ID NO: 1344383 - RNA, 19 nt, Artificial Sequence
  Description of Artificial Sequence: Synthetic oligonucleotide
  Antisense strand to SEQ ID NO: 1344382
aaauagaggagcaagcggu

SEQ ID NO: 1344384 - RNA, 19 nt, Artificial Sequence
  Description of Artificial Sequence: Synthetic oligonucleotide
  Sense strand starting at position 2245 of SEQ ID NO: 1242397
ucugcaugucaugaucuca

SEQ ID NO: 1344385 - RNA, 19 nt, Artificial Sequence
  Description of Artificial Sequence: Synthetic oligonucleotide
  Antisense strand to SEQ ID NO: 1344384
ugagaucaugacaugcaga

SEQ ID NO: 1344386 - RNA, 19 nt, Artificial Sequence
  Description of Artificial Sequence: Synthetic oligonucleotide
  Sense strand starting at position 3179 of SEQ ID NO: 1242397
agcugacgacuuuagagua

SEQ ID NO: 1344387 - RNA, 19 nt, Artificial Sequence
  Description of Artificial Sequence: Synthetic oligonucleotide
  Antisense strand to SEQ ID NO: 1344386
uacucuaaagucgucagcu

SEQ ID NO: 1344388 - RNA, 19 nt, Artificial Sequence
  Description of Artificial Sequence: Synthetic oligonucleotide
  Sense strand starting at position 3186 of SEQ ID NO: 1242397
gacuuuagaguaugagguu

SEQ ID NO: 1344389 - RNA, 19 nt, Artificial Sequence
  Description of Artificial Sequence: Synthetic oligonucleotide
  Antisense strand to SEQ ID NO: 1344388
aaccucauacucuaaaguc

SEQ ID NO: 1344390 - RNA, 19 nt, Artificial Sequence
  Description of Artificial Sequence: Synthetic oligonucleotide
  Sense strand starting at position 3200 of SEQ ID NO: 1242397
agguucuaccucuguacuu

SEQ ID NO: 1344391 - RNA, 19 nt, Artificial Sequence
  Description of Artificial Sequence: Synthetic oligonucleotide
  Antisense strand to SEQ ID NO: 1344390
aaguacagagguagaaccu

SEQ ID NO: 1344392 - RNA, 19 nt, Artificial Sequence
  Description of Artificial Sequence: Synthetic oligonucleotide
  Sense strand starting at position 3201 of SEQ ID NO: 1242397
gguucuaccucuguacuua

SEQ ID NO: 1344393 - RNA, 19 nt, Artificial Sequence
  Description of Artificial Sequence: Synthetic oligonucleotide
  Antisense strand to SEQ ID NO: 1344392
uaaguacagagguagaacc

SEQ ID NO: 1344394 - RNA, 19 nt, Artificial Sequence
  Description of Artificial Sequence: Synthetic oligonucleotide
  Sense strand starting at position 3234 of SEQ ID NO: 1242397
uaaauugagcccuguguaa

SEQ ID NO: 1344395 - RNA, 19 nt, Artificial Sequence
  Description of Artificial Sequence: Synthetic oligonucleotide
  Antisense strand to SEQ ID NO: 1344394
uuacacagggcucaauuua

SEQ ID NO: 1344396 - RNA, 19 nt, Artificial Sequence
  Description of Artificial Sequence: Synthetic oligonucleotide
  Sense strand starting at position 3236 of SEQ ID NO: 1242397
aauugagcccuguguaaug

SEQ ID NO: 1344397 - RNA, 19 nt, Artificial Sequence
  Description of Artificial Sequence: Synthetic oligonucleotide
  Antisense strand to SEQ ID NO: 1344396
cauuacacagggcucaauu

SEQ ID NO: 1344398 - RNA, 19 nt, Artificial Sequence
  Description of Artificial Sequence: Synthetic oligonucleotide
  Sense strand starting at position 3245 of SEQ ID NO: 1242397
cuguguaauguccauauug

SEQ ID NO: 1344399 - RNA, 19 nt, Artificial Sequence
  Description of Artificial Sequence: Synthetic oligonucleotide
  Antisense strand to SEQ ID NO: 1344398
caauauggacauuacacag

SEQ ID NO: 1344400 - RNA, 19 nt, Artificial Sequence
  Description of Artificial Sequence: Synthetic oligonucleotide
  Sense strand starting at position 3247 of SEQ ID NO: 1242397
guguaauguccauauugau

SEQ ID NO: 1344401 - RNA, 19 nt, Artificial Sequence
  Description of Artificial Sequence: Synthetic oligonucleotide
  Antisense strand to SEQ ID NO: 1344400
aucaauauggacauuacac

SEQ ID NO: 1344402 - RNA, 19 nt, Artificial Sequence
  Description of Artificial Sequence: Synthetic oligonucleotide
  Sense strand starting at position 3277 of SEQ ID NO: 1242397
aggccucuguuauugggaa

SEQ ID NO: 1344403 - RNA, 19 nt, Artificial Sequence
  Description of Artificial Sequence: Synthetic oligonucleotide
  Antisense strand to SEQ ID NO: 1344402
uucccaauaacagaggccu

SEQ ID NO: 1344404 - RNA, 19 nt, Artificial Sequence
  Description of Artificial Sequence: Synthetic oligonucleotide
  Sense strand starting at position 3279 of SEQ ID NO: 1242397
gccucuguuauugggaaug

SEQ ID NO: 1344405 - RNA, 19 nt, Artificial Sequence
  Description of Artificial Sequence: Synthetic oligonucleotide
  Antisense strand to SEQ ID NO: 1344404
cauucccaauaacagaggc

SEQ ID NO: 1344406 - RNA, 19 nt, Artificial Sequence
  Description of Artificial Sequence: Synthetic oligonucleotide
  Sense strand starting at position 3311 of SEQ ID NO: 1242397
aaguaagguugugcuaaau

SEQ ID NO: 1344407 - RNA, 19 nt, Artificial Sequence
  Description of Artificial Sequence: Synthetic oligonucleotide
  Antisense strand to SEQ ID NO: 1344406
auuuagcacaaccuuacuu

SEQ ID NO: 1344408 - RNA, 19 nt, Artificial Sequence
  Description of Artificial Sequence: Synthetic oligonucleotide
  Sense strand starting at position 3439 of SEQ ID NO: 1242397
acaugaguauaugaagaaa

SEQ ID NO: 1344409 - RNA, 19 nt, Artificial Sequence
  Description of Artificial Sequence: Synthetic oligonucleotide
  Antisense strand to SEQ ID NO: 1344408
uuucuucauauacucaugu

SEQ ID NO: 1344410 - RNA, 19 nt, Artificial Sequence
  Description of Artificial Sequence: Synthetic oligonucleotide
  Sense strand starting at position 3720 of SEQ ID NO: 1242397
gcacaaucacguugauaac

SEQ ID NO: 1344411 - RNA, 19 nt, Artificial Sequence
  Description of Artificial Sequence: Synthetic oligonucleotide
  Antisense strand to SEQ ID NO: 1344410
guuaucaacgugauugugc

SEQ ID NO: 1344412 - RNA, 19 nt, Artificial Sequence
  Description of Artificial Sequence: Synthetic oligonucleotide
  Sense strand starting at position 3743 of SEQ ID NO: 1242397
uuaugcuagcaagaauacu

SEQ ID NO: 1344413 - RNA, 19 nt, Artificial Sequence
  Description of Artificial Sequence: Synthetic oligonucleotide
  Antisense strand to SEQ ID NO: 1344412
aguauucuugcuagcauaa

SEQ ID NO: 1344414 - RNA, 19 nt, Artificial Sequence
  Description of Artificial Sequence: Synthetic oligonucleotide
  Sense strand starting at position 3752 of SEQ ID NO: 1242397
caagaauacuggccuuguu

SEQ ID NO: 1344415 - RNA, 19 nt, Artificial Sequence
  Description of Artificial Sequence: Synthetic oligonucleotide
  Antisense strand to SEQ ID NO: 1344414
aacaaggccaguauucuug

SEQ ID NO: 1344416 - RNA, 19 nt, Artificial Sequence
  Description of Artificial Sequence: Synthetic oligonucleotide
  Sense strand starting at position 3971 of SEQ ID NO: 1242397
ccuguaguuccagaaggcu

SEQ ID NO: 1344417 - RNA, 19 nt, Artificial Sequence
  Description of Artificial Sequence: Synthetic oligonucleotide
  Antisense strand to SEQ ID NO: 1344416
agccuucuggaacuacagg

SEQ ID NO: 1344418 - RNA, 19 nt, Artificial Sequence
  Description of Artificial Sequence: Synthetic oligonucleotide
  Sense strand starting at position 56 of SEQ ID NO: 1242398
agucucauuugggaugaga

SEQ ID NO: 1344419 - RNA, 19 nt, Artificial Sequence
  Description of Artificial Sequence: Synthetic oligonucleotide
  Antisense strand to SEQ ID NO: 1344418
ucucaucccaaaugagacu

SEQ ID NO: 1344420 - RNA, 19 nt, Artificial Sequence
  Description of Artificial Sequence: Synthetic oligonucleotide
  Sense strand starting at position 500 of SEQ ID NO: 1242398
acaucuuaccuggaauugu

SEQ ID NO: 1344421 - RNA, 19 nt, Artificial Sequence
  Description of Artificial Sequence: Synthetic oligonucleotide
  Antisense strand to SEQ ID NO: 1344420
acaauuccagguaagaugu

SEQ ID NO: 1344422 - RNA, 19 nt, Artificial Sequence
  Description of Artificial Sequence: Synthetic oligonucleotide
  Sense strand starting at position 508 of SEQ ID NO: 1242398
ccuggaauuguaggaucau

SEQ ID NO: 1344423 - RNA, 19 nt, Artificial Sequence
  Description of Artificial Sequence: Synthetic oligonucleotide
  Antisense strand to SEQ ID NO: 1344422
augauccuacaauuccagg

SEQ ID NO: 1344424 - RNA, 19 nt, Artificial Sequence
  Description of Artificial Sequence: Synthetic oligonucleotide
  Sense strand starting at position 608 of SEQ ID NO: 1242398
gguugugacaucuggauuc

SEQ ID NO: 1344425 - RNA, 19 nt, Artificial Sequence
  Description of Artificial Sequence: Synthetic oligonucleotide
  Antisense strand to SEQ ID NO: 1344424
gaauccagaugucacaacc

SEQ ID NO: 1344426 - RNA, 19 nt, Artificial Sequence
  Description of Artificial Sequence: Synthetic oligonucleotide
  Sense strand starting at position 851 of SEQ ID NO: 1242398
ugacccaaacuuuguagaa

SEQ ID NO: 1344427 - RNA, 19 nt, Artificial Sequence
  Description of Artificial Sequence: Synthetic oligonucleotide
  Antisense strand to SEQ ID NO: 1344426
uucuacaaaguuuggguca

SEQ ID NO: 1344428 - RNA, 19 nt, Artificial Sequence
  Description of Artificial Sequence: Synthetic oligonucleotide
  Sense strand starting at position 873 of SEQ ID NO: 1242398
uaccaugauugauugguaa

SEQ ID NO: 1344429 - RNA, 19 nt, Artificial Sequence
  Description of Artificial Sequence: Synthetic oligonucleotide
  Antisense strand to SEQ ID NO: 1344428
uuaccaaucaaucauggua

SEQ ID NO: 1344430 - RNA, 19 nt, Artificial Sequence
  Description of Artificial Sequence: Synthetic oligonucleotide
  Sense strand starting at position 875 of SEQ ID NO: 1242398
ccaugauugauugguaaug

SEQ ID NO: 1344431 - RNA, 19 nt, Artificial Sequence
  Description of Artificial Sequence: Synthetic oligonucleotide
  Antisense strand to SEQ ID NO: 1344430
cauuaccaaucaaucaugg

SEQ ID NO: 1344432 - RNA, 19 nt, Artificial Sequence
  Description of Artificial Sequence: Synthetic oligonucleotide
  Sense strand starting at position 884 of SEQ ID NO: 1242398
auugguaaugucugugaua

SEQ ID NO: 1344433 - RNA, 19 nt, Artificial Sequence
  Description of Artificial Sequence: Synthetic oligonucleotide
  Antisense strand to SEQ ID NO: 1344432
uaucacagacauuaccaau

SEQ ID NO: 1344434 - RNA, 19 nt, Artificial Sequence
  Description of Artificial Sequence: Synthetic oligonucleotide
  Sense strand starting at position 886 of SEQ ID NO: 1242398
ugguaaugucugugauaga

SEQ ID NO: 1344435 - RNA, 19 nt, Artificial Sequence
  Description of Artificial Sequence: Synthetic oligonucleotide
  Antisense strand to SEQ ID NO: 1344434
ucuaucacagacauuacca

SEQ ID NO: 1344436 - RNA, 19 nt, Artificial Sequence
  Description of Artificial Sequence: Synthetic oligonucleotide
  Sense strand starting at position 950 of SEQ ID NO: 1242398
ggacuauauuaucuuugua

SEQ ID NO: 1344437 - RNA, 19 nt, Artificial Sequence
  Description of Artificial Sequence: Synthetic oligonucleotide
  Antisense strand to SEQ ID NO: 1344436
uacaaagauaauauagucc

SEQ ID NO: 1344438 - RNA, 19 nt, Artificial Sequence
  Description of Artificial Sequence: Synthetic oligonucleotide
  Sense strand starting at position 966 of SEQ ID NO: 1242398
guagcuuacuuucuaugaa

SEQ ID NO: 1344439 - RNA, 19 nt, Artificial Sequence
  Description of Artificial Sequence: Synthetic oligonucleotide
  Antisense strand to SEQ ID NO: 1344438
uucauagaaaguaagcuac

SEQ ID NO: 1344440 - RNA, 19 nt, Artificial Sequence
  Description of Artificial Sequence: Synthetic oligonucleotide
  Sense strand starting at position 988 of SEQ ID NO: 1242398
acuagaggcuuuguuauag

SEQ ID NO: 1344441 - RNA, 19 nt, Artificial Sequence
  Description of Artificial Sequence: Synthetic oligonucleotide
  Antisense strand to SEQ ID NO: 1344440
cuauaacaaagccucuagu

SEQ ID NO: 1344442 - RNA, 19 nt, Artificial Sequence
  Description of Artificial Sequence: Synthetic oligonucleotide
  Sense strand starting at position 1392 of SEQ ID NO: 1242398
aguggugucaugggaucua

SEQ ID NO: 1344443 - RNA, 19 nt, Artificial Sequence
  Description of Artificial Sequence: Synthetic oligonucleotide
  Antisense strand to SEQ ID NO: 1344442
uagaucccaugacaccacu

SEQ ID NO: 1344444 - RNA, 19 nt, Artificial Sequence
  Description of Artificial Sequence: Synthetic oligonucleotide
  Sense strand starting at position 1636 of SEQ ID NO: 1242398
ccugaugaccuggguuuga

SEQ ID NO: 1344445 - RNA, 19 nt, Artificial Sequence
  Description of Artificial Sequence: Synthetic oligonucleotide
  Antisense strand to SEQ ID NO: 1344444
ucaaacccaggucaucagg

SEQ ID NO: 1344446 - RNA, 19 nt, Artificial Sequence
  Description of Artificial Sequence: Synthetic oligonucleotide
  Sense strand starting at position 1690 of SEQ ID NO: 1242398
cuaacugggugauuccuua

SEQ ID NO: 1344447 - RNA, 19 nt, Artificial Sequence
  Description of Artificial Sequence: Synthetic oligonucleotide
  Antisense strand to SEQ ID NO: 1344446
uaaggaaucacccaguuag

SEQ ID NO: 1344448 - RNA, 19 nt, Artificial Sequence
  Description of Artificial Sequence: Synthetic oligonucleotide
  Sense strand starting at position 1744 of SEQ ID NO: 1242398
cuuccagaguuggugacaa

SEQ ID NO: 1344449 - RNA, 19 nt, Artificial Sequence
  Description of Artificial Sequence: Synthetic oligonucleotide
  Antisense strand to SEQ ID NO: 1344448
uugucaccaacucuggaag

SEQ ID NO: 1344450 - RNA, 19 nt, Artificial Sequence
  Description of Artificial Sequence: Synthetic oligonucleotide
  Sense strand starting at position 1798 of SEQ ID NO: 1242398
gugucuggcaccuagaaag

SEQ ID NO: 1344451 - RNA, 19 nt, Artificial Sequence
  Description of Artificial Sequence: Synthetic oligonucleotide
  Antisense strand to SEQ ID NO: 1344450
cuuucuaggugccagacac

SEQ ID NO: 1344452 - RNA, 19 nt, Artificial Sequence
  Description of Artificial Sequence: Synthetic oligonucleotide
  Sense strand starting at position 2119 of SEQ ID NO: 1242398
ccuaaacucucaguuaguu

SEQ ID NO: 1344453 - RNA, 19 nt, Artificial Sequence
  Description of Artificial Sequence: Synthetic oligonucleotide
  Antisense strand to SEQ ID NO: 1344452
aacuaacugagaguuuagg

SEQ ID NO: 1344454 - RNA, 19 nt, Artificial Sequence
  Description of Artificial Sequence: Synthetic oligonucleotide
  Sense strand starting at position 2307 of SEQ ID NO: 1242398
aagucuucuguugagcaau

SEQ ID NO: 1344455 - RNA, 19 nt, Artificial Sequence
  Description of Artificial Sequence: Synthetic oligonucleotide
  Antisense strand to SEQ ID NO: 1344454
auugcucaacagaagacuu

SEQ ID NO: 1344456 - RNA, 19 nt, Artificial Sequence
  Description of Artificial Sequence: Synthetic oligonucleotide
  Sense strand starting at position 2362 of SEQ ID NO: 1242398
ggucuuggcacugagauua

SEQ ID NO: 1344457 - RNA, 19 nt, Artificial Sequence
  Description of Artificial Sequence: Synthetic oligonucleotide
  Antisense strand to SEQ ID NO: 1344456
uaaucucagugccaagacc

SEQ ID NO: 1344458 - RNA, 19 nt, Artificial Sequence
  Description of Artificial Sequence: Synthetic oligonucleotide
  Sense strand starting at position 2624 of SEQ ID NO: 1242398
cggaucagcucuguggaaa

SEQ ID NO: 1344459 - RNA, 19 nt, Artificial Sequence
  Description of Artificial Sequence: Synthetic oligonucleotide
  Antisense strand to SEQ ID NO: 1344458
uuuccacagagcugauccg

SEQ ID NO: 1344460 - RNA, 19 nt, Artificial Sequence
  Description of Artificial Sequence: Synthetic oligonucleotide
  Sense strand starting at position 2625 of SEQ ID NO: 1242398
ggaucagcucuguggaaag

SEQ ID NO: 1344461 - RNA, 19 nt, Artificial Sequence
  Description of Artificial Sequence: Synthetic oligonucleotide
  Antisense strand to SEQ ID NO: 1344460
cuuuccacagagcugaucc

SEQ ID NO: 1344462 - RNA, 19 nt, Artificial Sequence
  Description of Artificial Sequence: Synthetic oligonucleotide
  Sense strand starting at position 2654 of SEQ ID NO: 1242398
ccuguaaagaguggaaaca

SEQ ID NO: 1344463 - RNA, 19 nt, Artificial Sequence
  Description of Artificial Sequence: Synthetic oligonucleotide
  Antisense strand to SEQ ID NO: 1344462
uguuuccacucuuuacagg

SEQ ID NO: 1344464 - RNA, 19 nt, Artificial Sequence
  Description of Artificial Sequence: Synthetic oligonucleotide
  Sense strand starting at position 2782 of SEQ ID NO: 1242398
gucaucucaggguguagaa

SEQ ID NO: 1344465 - RNA, 19 nt, Artificial Sequence
  Description of Artificial Sequence: Synthetic oligonucleotide
  Antisense strand to SEQ ID NO: 1344464
uucuacacccugagaugac

SEQ ID NO: 1344466 - RNA, 19 nt, Artificial Sequence
  Description of Artificial Sequence: Synthetic oligonucleotide
  Sense strand starting at position 2810 of SEQ ID NO: 1242398
gcucuugagcacgacugaa

SEQ ID NO: 1344467 - RNA, 19 nt, Artificial Sequence
  Description of Artificial Sequence: Synthetic oligonucleotide
  Antisense strand to SEQ ID NO: 1344466
uucagucgugcucaagagc

SEQ ID NO: 1344468 - RNA, 19 nt, Artificial Sequence
  Description of Artificial Sequence: Synthetic oligonucleotide
  Sense strand starting at position 2902 of SEQ ID NO: 1242398
uuguccucccugggaugau

SEQ ID NO: 1344469 - RNA, 19 nt, Artificial Sequence
  Description of Artificial Sequence: Synthetic oligonucleotide
  Antisense strand to SEQ ID NO: 1344468
aucaucccagggaggacaa

SEQ ID NO: 1344470 - RNA, 19 nt, Artificial Sequence
  Description of Artificial Sequence: Synthetic oligonucleotide
  Sense strand starting at position 2978 of SEQ ID NO: 1242398
ggaucauggcuuuagcauc

SEQ ID NO: 1344471 - RNA, 19 nt, Artificial Sequence
  Description of Artificial Sequence: Synthetic oligonucleotide
  Antisense strand to SEQ ID NO: 1344470
gaugcuaaagccaugaucc

SEQ ID NO: 1344472 - RNA, 19 nt, Artificial Sequence
  Description of Artificial Sequence: Synthetic oligonucleotide
  Sense strand starting at position 3110 of SEQ ID NO: 1242398
ccaagaggucuuuaucauc

SEQ ID NO: 1344473 - RNA, 19 nt, Artificial Sequence
  Description of Artificial Sequence: Synthetic oligonucleotide
  Antisense strand to SEQ ID NO: 1344472
gaugauaaagaccucuugg

SEQ ID NO: 1344474 - RNA, 19 nt, Artificial Sequence
  Description of Artificial Sequence: Synthetic oligonucleotide
  Sense strand starting at position 3116 of SEQ ID NO: 1242398
ggucuuuaucaucaggacu

SEQ ID NO: 1344475 - RNA, 19 nt, Artificial Sequence
  Description of Artificial Sequence: Synthetic oligonucleotide
  Antisense strand to SEQ ID NO: 1344474
aguccugaugauaaagacc

SEQ ID NO: 1344476 - RNA, 19 nt, Artificial Sequence
  Description of Artificial Sequence: Synthetic oligonucleotide
  Sense strand starting at position 3124 of SEQ ID NO: 1242398
ucaucaggacuuugcuaga

SEQ ID NO: 1344477 - RNA, 19 nt, Artificial Sequence
  Description of Artificial Sequence: Synthetic oligonucleotide
  Antisense strand to SEQ ID NO: 1344476
ucuagcaaaguccugauga

SEQ ID NO: 1344478 - RNA, 19 nt, Artificial Sequence
  Description of Artificial Sequence: Synthetic oligonucleotide
  Sense strand starting at position 3133 of SEQ ID NO: 1242398
cuuugcuagagucagugau

SEQ ID NO: 1344479 - RNA, 19 nt, Artificial Sequence
  Description of Artificial Sequence: Synthetic oligonucleotide
  Antisense strand to SEQ ID NO: 1344478
aucacugacucuagcaaag

SEQ ID NO: 1344480 - RNA, 19 nt, Artificial Sequence
  Description of Artificial Sequence: Synthetic oligonucleotide
  Sense strand starting at position 3137 of SEQ ID NO: 1242398
gcuagagucagugauuccu

SEQ ID NO: 1344481 - RNA, 19 nt, Artificial Sequence
  Description of Artificial Sequence: Synthetic oligonucleotide
  Antisense strand to SEQ ID NO: 1344480
aggaaucacugacucuagc

SEQ ID NO: 1344482 - RNA, 19 nt, Artificial Sequence
  Description of Artificial Sequence: Synthetic oligonucleotide
  Sense strand starting at position 3143 of SEQ ID NO: 1242398
gucagugauuccucuggga

SEQ ID NO: 1344483 - RNA, 19 nt, Artificial Sequence
  Description of Artificial Sequence: Synthetic oligonucleotide
  Antisense strand to SEQ ID NO: 1344482
ucccagaggaaucacugac

SEQ ID NO: 1344484 - RNA, 19 nt, Artificial Sequence
  Description of Artificial Sequence: Synthetic oligonucleotide
  Sense strand starting at position 3145 of SEQ ID NO: 1242398
cagugauuccucugggagu

SEQ ID NO: 1344485 - RNA, 19 nt, Artificial Sequence
  Description of Artificial Sequence: Synthetic oligonucleotide
  Antisense strand to SEQ ID NO: 1344484
acucccagaggaaucacug

SEQ ID NO: 1344486 - RNA, 19 nt, Artificial Sequence
  Description of Artificial Sequence: Synthetic oligonucleotide
  Sense strand starting at position 3147 of SEQ ID NO: 1242398
gugauuccucugggaguag

SEQ ID NO: 1344487 - RNA, 19 nt, Artificial Sequence
  Description of Artificial Sequence: Synthetic oligonucleotide
  Antisense strand to SEQ ID NO: 1344486
cuacucccagaggaaucac

SEQ ID NO: 1344488 - RNA, 19 nt, Artificial Sequence
  Description of Artificial Sequence: Synthetic oligonucleotide
  Sense strand starting at position 3158 of SEQ ID NO: 1242398
gggaguagccacugaugac

SEQ ID NO: 1344489 - RNA, 19 nt, Artificial Sequence
  Description of Artificial Sequence: Synthetic oligonucleotide
  Antisense strand to SEQ ID NO: 1344488
gucaucaguggcuacuccc

SEQ ID NO: 1344490 - RNA, 19 nt, Artificial Sequence
  Description of Artificial Sequence: Synthetic oligonucleotide
  Sense strand starting at position 3330 of SEQ ID NO: 1242398
ugagguuuaccuugaggaa

SEQ ID NO: 1344491 - RNA, 19 nt, Artificial Sequence
  Description of Artificial Sequence: Synthetic oligonucleotide
  Antisense strand to SEQ ID NO: 1344490
uuccucaagguaaaccuca

SEQ ID NO: 1344492 - RNA, 19 nt, Artificial Sequence
  Description of Artificial Sequence: Synthetic oligonucleotide
  Sense strand starting at position 3394 of SEQ ID NO: 1242398
ccaucagcagcuuagauua

SEQ ID NO: 1344493 - RNA, 19 nt, Artificial Sequence
  Description of Artificial Sequence: Synthetic oligonucleotide
  Antisense strand to SEQ ID NO: 1344492
uaaucuaagcugcugaugg

SEQ ID NO: 1344494 - RNA, 19 nt, Artificial Sequence
  Description of Artificial Sequence: Synthetic oligonucleotide
  Sense strand starting at position 3439 of SEQ ID NO: 1242398
cuguucuuaccuugaggaa

SEQ ID NO: 1344495 - RNA, 19 nt, Artificial Sequence
  Description of Artificial Sequence: Synthetic oligonucleotide
  Antisense strand to SEQ ID NO: 1344494
uuccucaagguaagaacag

SEQ ID NO: 1344496 - RNA, 19 nt, Artificial Sequence
  Description of Artificial Sequence: Synthetic oligonucleotide
  Sense strand starting at position 3440 of SEQ ID NO: 1242398
uguucuuaccuugaggaau

SEQ ID NO: 1344497 - RNA, 19 nt, Artificial Sequence
  Description of Artificial Sequence: Synthetic oligonucleotide
  Antisense strand to SEQ ID NO: 1344496
auuccucaagguaagaaca

SEQ ID NO: 1344498 - RNA, 19 nt, Artificial Sequence
  Description of Artificial Sequence: Synthetic oligonucleotide
  Sense strand starting at position 2119 of SEQ ID NO: 1242399
gggucuuugcaagaguaaa

SEQ ID NO: 1344499 - RNA, 19 nt, Artificial Sequence
  Description of Artificial Sequence: Synthetic oligonucleotide
  Antisense strand to SEQ ID NO: 1344498
uuuacucuugcaaagaccc

SEQ ID NO: 1344500 - RNA, 19 nt, Artificial Sequence
  Description of Artificial Sequence: Synthetic oligonucleotide
  Sense strand starting at position 2168 of SEQ ID NO: 1242399
gccuacucuuaagagaaag

SEQ ID NO: 1344501 - RNA, 19 nt, Artificial Sequence
  Description of Artificial Sequence: Synthetic oligonucleotide
  Antisense strand to SEQ ID NO: 1344500
cuuucucuuaagaguaggc

SEQ ID NO: 1344502 - RNA, 19 nt, Artificial Sequence
  Description of Artificial Sequence: Synthetic oligonucleotide
  Sense strand starting at position 2326 of SEQ ID NO: 1242399
cuaagauccugggagcuca

SEQ ID NO: 1344503 - RNA, 19 nt, Artificial Sequence
  Description of Artificial Sequence: Synthetic oligonucleotide
  Antisense strand to SEQ ID NO: 1344502
ugagcucccaggaucuuag

SEQ ID NO: 1344504 - RNA, 19 nt, Artificial Sequence
  Description of Artificial Sequence: Synthetic oligonucleotide
  Sense strand starting at position 2337 of SEQ ID NO: 1242399
ggagcucagucauccauag

SEQ ID NO: 1344505 - RNA, 19 nt, Artificial Sequence
  Description of Artificial Sequence: Synthetic oligonucleotide
  Antisense strand to SEQ ID NO: 1344504
cuauggaugacugagcucc

SEQ ID NO: 1344506 - RNA, 19 nt, Artificial Sequence
  Description of Artificial Sequence: Synthetic oligonucleotide
  Sense strand starting at position 2406 of SEQ ID NO: 1242399
gagauauggcuuuaagcua

SEQ ID NO: 1344507 - RNA, 19 nt, Artificial Sequence
  Description of Artificial Sequence: Synthetic oligonucleotide
  Antisense strand to SEQ ID NO: 1344506
uagcuuaaagccauaucuc

SEQ ID NO: 1344508 - RNA, 19 nt, Artificial Sequence
  Description of Artificial Sequence: Synthetic oligonucleotide
  Sense strand starting at position 2413 of SEQ ID NO: 1242399
ggcuuuaagcuauagacaa

SEQ ID NO: 1344509 - RNA, 19 nt, Artificial Sequence
  Description of Artificial Sequence: Synthetic oligonucleotide
  Antisense strand to SEQ ID NO: 1344508
uugucuauagcuuaaagcc

SEQ ID NO: 1344510 - RNA, 19 nt, Artificial Sequence
  Description of Artificial Sequence: Synthetic oligonucleotide
  Sense strand starting at position 2448 of SEQ ID NO: 1242399
agggcauugccagggacau

SEQ ID NO: 1344511 - RNA, 19 nt, Artificial Sequence
  Description of Artificial Sequence: Synthetic oligonucleotide
  Antisense strand to SEQ ID NO: 1344510
augucccuggcaaugcccu

SEQ ID NO: 1344512 - RNA, 19 nt, Artificial Sequence
  Description of Artificial Sequence: Synthetic oligonucleotide
  Sense strand starting at position 2449 of SEQ ID NO: 1242399
gggcauugccagggacauu

SEQ ID NO: 1344513 - RNA, 19 nt, Artificial Sequence
  Description of Artificial Sequence: Synthetic oligonucleotide
  Antisense strand to SEQ ID NO: 1344512
aaugucccuggcaaugccc

SEQ ID NO: 1344514 - RNA, 19 nt, Artificial Sequence
  Description of Artificial Sequence: Synthetic oligonucleotide
  Sense strand starting at position 2450 of SEQ ID NO: 1242399
ggcauugccagggacauua

SEQ ID NO: 1344515 - RNA, 19 nt, Artificial Sequence
  Description of Artificial Sequence: Synthetic oligonucleotide
  Antisense strand to SEQ ID NO: 1344514
uaaugucccuggcaaugcc

SEQ ID NO: 1344516 - RNA, 19 nt, Artificial Sequence
  Description of Artificial Sequence: Synthetic oligonucleotide
  Sense strand starting at position 2463 of SEQ ID NO: 1242399
acauuaaggcuccauguau

SEQ ID NO: 1344517 - RNA, 19 nt, Artificial Sequence
  Description of Artificial Sequence: Synthetic oligonucleotide
  Antisense strand to SEQ ID NO: 1344516
auacauggagccuuaaugu

SEQ ID NO: 1344518 - RNA, 19 nt, Artificial Sequence
  Description of Artificial Sequence: Synthetic oligonucleotide
  Sense strand starting at position 2534 of SEQ ID NO: 1242399
aaguuaauguuauagagcu

SEQ ID NO: 1344519 - RNA, 19 nt, Artificial Sequence
  Description of Artificial Sequence: Synthetic oligonucleotide
  Antisense strand to SEQ ID NO: 1344518
agcucuauaacauuaacuu

SEQ ID NO: 1344520 - RNA, 19 nt, Artificial Sequence
  Description of Artificial Sequence: Synthetic oligonucleotide
  Sense strand starting at position 2628 of SEQ ID NO: 1242399
ccagcugugucauccugga

SEQ ID NO: 1344521 - RNA, 19 nt, Artificial Sequence
  Description of Artificial Sequence: Synthetic oligonucleotide
  Antisense strand to SEQ ID NO: 1344520
uccaggaugacacagcugg

SEQ ID NO: 1344522 - RNA, 19 nt, Artificial Sequence
  Description of Artificial Sequence: Synthetic oligonucleotide
  Sense strand starting at position 2659 of SEQ ID NO: 1242399
uggugccucaucugugaaa

SEQ ID NO: 1344523 - RNA, 19 nt, Artificial Sequence
  Description of Artificial Sequence: Synthetic oligonucleotide
  Antisense strand to SEQ ID NO: 1344522
uuucacagaugaggcacca

SEQ ID NO: 1344524 - RNA, 19 nt, Artificial Sequence
  Description of Artificial Sequence: Synthetic oligonucleotide
  Sense strand starting at position 2672 of SEQ ID NO: 1242399
gugaaaugggcaugauaac

SEQ ID NO: 1344525 - RNA, 19 nt, Artificial Sequence
  Description of Artificial Sequence: Synthetic oligonucleotide
  Antisense strand to SEQ ID NO: 1344524
guuaucaugcccauuucac

SEQ ID NO: 1344526 - RNA, 19 nt, Artificial Sequence
  Description of Artificial Sequence: Synthetic oligonucleotide
  Sense strand starting at position 2678 of SEQ ID NO: 1242399
ugggcaugauaacauauau

SEQ ID NO: 1344527 - RNA, 19 nt, Artificial Sequence
  Description of Artificial Sequence: Synthetic oligonucleotide
  Antisense strand to SEQ ID NO: 1344526
auauauguuaucaugccca

SEQ ID NO: 1344528 - RNA, 19 nt, Artificial Sequence
  Description of Artificial Sequence: Synthetic oligonucleotide
  Sense strand starting at position 2779 of SEQ ID NO: 1242399
acuguauauucuguuaguu

SEQ ID NO: 1344529 - RNA, 19 nt, Artificial Sequence
  Description of Artificial Sequence: Synthetic oligonucleotide
  Antisense strand to SEQ ID NO: 1344528
aacuaacagaauauacagu

SEQ ID NO: 1344530 - RNA, 19 nt, Artificial Sequence
  Description of Artificial Sequence: Synthetic oligonucleotide
  Sense strand starting at position 2781 of SEQ ID NO: 1242399
uguauauucuguuaguuug

SEQ ID NO: 1344531 - RNA, 19 nt, Artificial Sequence
  Description of Artificial Sequence: Synthetic oligonucleotide
  Antisense strand to SEQ ID NO: 1344530
caaacuaacagaauauaca

SEQ ID NO: 1344532 - RNA, 19 nt, Artificial Sequence
  Description of Artificial Sequence: Synthetic oligonucleotide
  Sense strand starting at position 2809 of SEQ ID NO: 1242399
ucaugugcauguuauaaua

SEQ ID NO: 1344533 - RNA, 19 nt, Artificial Sequence
  Description of Artificial Sequence: Synthetic oligonucleotide
  Antisense strand to SEQ ID NO: 1344532
uauuauaacaugcacauga

SEQ ID NO: 1344534 - RNA, 19 nt, Artificial Sequence
  Description of Artificial Sequence: Synthetic oligonucleotide
  Sense strand starting at position 2860 of SEQ ID NO: 1242399
auaacagugucacaggaau

SEQ ID NO: 1344535 - RNA, 19 nt, Artificial Sequence
  Description of Artificial Sequence: Synthetic oligonucleotide
  Antisense strand to SEQ ID NO: 1344534
auuccugugacacuguuau

SEQ ID NO: 1344536 - RNA, 19 nt, Artificial Sequence
  Description of Artificial Sequence: Synthetic oligonucleotide
  Sense strand starting at position 2871 of SEQ ID NO: 1242399
acaggaauguugagcgagu

SEQ ID NO: 1344537 - RNA, 19 nt, Artificial Sequence
  Description of Artificial Sequence: Synthetic oligonucleotide
  Antisense strand to SEQ ID NO: 1344536
acucgcucaacauuccugu

SEQ ID NO: 1344538 - RNA, 19 nt, Artificial Sequence
  Description of Artificial Sequence: Synthetic oligonucleotide
  Sense strand starting at position 2872 of SEQ ID NO: 1242399
caggaauguugagcgagua

SEQ ID NO: 1344539 - RNA, 19 nt, Artificial Sequence
  Description of Artificial Sequence: Synthetic oligonucleotide
  Antisense strand to SEQ ID NO: 1344538
uacucgcucaacauuccug

SEQ ID NO: 1344540 - RNA, 19 nt, Artificial Sequence
  Description of Artificial Sequence: Synthetic oligonucleotide
  Sense strand starting at position 2873 of SEQ ID NO: 1242399
aggaauguugagcgaguaa

SEQ ID NO: 1344541 - RNA, 19 nt, Artificial Sequence
  Description of Artificial Sequence: Synthetic oligonucleotide
  Antisense strand to SEQ ID NO: 1344540
uuacucgcucaacauuccu

SEQ ID NO: 1344542 - RNA, 19 nt, Artificial Sequence
  Description of Artificial Sequence: Synthetic oligonucleotide
  Sense strand starting at position 3409 of SEQ ID NO: 1242399
uuagaagugagcugaguaa

SEQ ID NO: 1344543 - RNA, 19 nt, Artificial Sequence
  Description of Artificial Sequence: Synthetic oligonucleotide
  Antisense strand to SEQ ID NO: 1344542
uuacucagcucacuucuaa

SEQ ID NO: 1344544 - RNA, 19 nt, Artificial Sequence
  Description of Artificial Sequence: Synthetic oligonucleotide
  Sense strand starting at position 3420 of SEQ ID NO: 1242399
cugaguaacccauggaauc

SEQ ID NO: 1344545 - RNA, 19 nt, Artificial Sequence
  Description of Artificial Sequence: Synthetic oligonucleotide
  Antisense strand to SEQ ID NO: 1344544
gauuccauggguuacucag

SEQ ID NO: 1344546 - RNA, 19 nt, Artificial Sequence
  Description of Artificial Sequence: Synthetic oligonucleotide
  Sense strand starting at position 3421 of SEQ ID NO: 1242399
ugaguaacccauggaaucu

SEQ ID NO: 1344547 - RNA, 19 nt, Artificial Sequence
  Description of Artificial Sequence: Synthetic oligonucleotide
  Antisense strand to SEQ ID NO: 1344546
agauuccauggguuacuca

SEQ ID NO: 1344548 - RNA, 19 nt, Artificial Sequence
  Description of Artificial Sequence: Synthetic oligonucleotide
  Sense strand starting at position 3431 of SEQ ID NO: 1242399
auggaaucugucugguaca

SEQ ID NO: 1344549 - RNA, 19 nt, Artificial Sequence
  Description of Artificial Sequence: Synthetic oligonucleotide
  Antisense strand to SEQ ID NO: 1344548
uguaccagacagauuccau

SEQ ID NO: 1344550 - RNA, 19 nt, Artificial Sequence
  Description of Artificial Sequence: Synthetic oligonucleotide
  Sense strand starting at position 3432 of SEQ ID NO: 1242399
uggaaucugucugguacaa

SEQ ID NO: 1344551 - RNA, 19 nt, Artificial Sequence
  Description of Artificial Sequence: Synthetic oligonucleotide
  Antisense strand to SEQ ID NO: 1344550
uuguaccagacagauucca

SEQ ID NO: 1344552 - RNA, 19 nt, Artificial Sequence
  Description of Artificial Sequence: Synthetic oligonucleotide
  Sense strand starting at position 3434 of SEQ ID NO: 1242399
gaaucugucugguacaacu

SEQ ID NO: 1344553 - RNA, 19 nt, Artificial Sequence
  Description of Artificial Sequence: Synthetic oligonucleotide
  Antisense strand to SEQ ID NO: 1344552
aguuguaccagacagauuc

SEQ ID NO: 1344554 - RNA, 19 nt, Artificial Sequence
  Description of Artificial Sequence: Synthetic oligonucleotide
  Sense strand starting at position 3444 of SEQ ID NO: 1242399
gguacaacuccucaucuga

SEQ ID NO: 1344555 - RNA, 19 nt, Artificial Sequence
  Description of Artificial Sequence: Synthetic oligonucleotide
  Antisense strand to SEQ ID NO: 1344554
ucagaugaggaguuguacc

SEQ ID NO: 1344556 - RNA, 19 nt, Artificial Sequence
  Description of Artificial Sequence: Synthetic oligonucleotide
  Sense strand starting at position 3451 of SEQ ID NO: 1242399
cuccucaucugagauauga

SEQ ID NO: 1344557 - RNA, 19 nt, Artificial Sequence
  Description of Artificial Sequence: Synthetic oligonucleotide
  Antisense strand to SEQ ID NO: 1344556
ucauaucucagaugaggag

SEQ ID NO: 1344558 - RNA, 19 nt, Artificial Sequence
  Description of Artificial Sequence: Synthetic oligonucleotide
  Sense strand starting at position 3489 of SEQ ID NO: 1242399
ggagaugugacuugcuuaa

SEQ ID NO: 1344559 - RNA, 19 nt, Artificial Sequence
  Description of Artificial Sequence: Synthetic oligonucleotide
  Antisense strand to SEQ ID NO: 1344558
uuaagcaagucacaucucc

SEQ ID NO: 1344560 - RNA, 19 nt, Artificial Sequence
  Description of Artificial Sequence: Synthetic oligonucleotide
  Sense strand starting at position 3491 of SEQ ID NO: 1242399
agaugugacuugcuuaaca

SEQ ID NO: 1344561 - RNA, 19 nt, Artificial Sequence
  Description of Artificial Sequence: Synthetic oligonucleotide
  Antisense strand to SEQ ID NO: 1344560
uguuaagcaagucacaucu

SEQ ID NO: 1344562 - RNA, 19 nt, Artificial Sequence
  Description of Artificial Sequence: Synthetic oligonucleotide
  Sense strand starting at position 3493 of SEQ ID NO: 1242399
augugacuugcuuaacauc

SEQ ID NO: 1344563 - RNA, 19 nt, Artificial Sequence
  Description of Artificial Sequence: Synthetic oligonucleotide
  Antisense strand to SEQ ID NO: 1344562
gauguuaagcaagucacau

SEQ ID NO: 1344564 - RNA, 19 nt, Artificial Sequence
  Description of Artificial Sequence: Synthetic oligonucleotide
  Sense strand starting at position 3655 of SEQ ID NO: 1242399
ccuucuuugucccugauuu

SEQ ID NO: 1344565 - RNA, 19 nt, Artificial Sequence
  Description of Artificial Sequence: Synthetic oligonucleotide
  Antisense strand to SEQ ID NO: 1344564
aaaucagggacaaagaagg

SEQ ID NO: 1344566 - RNA, 19 nt, Artificial Sequence
  Description of Artificial Sequence: Synthetic oligonucleotide
  Sense strand starting at position 3656 of SEQ ID NO: 1242399
cuucuuugucccugauuuc

SEQ ID NO: 1344567 - RNA, 19 nt, Artificial Sequence
  Description of Artificial Sequence: Synthetic oligonucleotide
  Antisense strand to SEQ ID NO: 1344566
gaaaucagggacaaagaag

SEQ ID NO: 1344568 - RNA, 19 nt, Artificial Sequence
  Description of Artificial Sequence: Synthetic oligonucleotide
  Sense strand starting at position 3761 of SEQ ID NO: 1242399
gcagaaauuucagaggguc

SEQ ID NO: 1344569 - RNA, 19 nt, Artificial Sequence
  Description of Artificial Sequence: Synthetic oligonucleotide
  Antisense strand to SEQ ID NO: 1344568
gacccucugaaauuucugc

SEQ ID NO: 1344570 - RNA, 19 nt, Artificial Sequence
  Description of Artificial Sequence: Synthetic oligonucleotide
  Sense strand starting at position 3786 of SEQ ID NO: 1242399
uuucuaauguuccuguguu

SEQ ID NO: 1344571 - RNA, 19 nt, Artificial Sequence
  Description of Artificial Sequence: Synthetic oligonucleotide
  Antisense strand to SEQ ID NO: 1344570
aacacaggaacauuagaaa

SEQ ID NO: 1344572 - RNA, 19 nt, Artificial Sequence
  Description of Artificial Sequence: Synthetic oligonucleotide
  Sense strand starting at position 3790 of SEQ ID NO: 1242399
uaauguuccuguguuaugu

SEQ ID NO: 1344573 - RNA, 19 nt, Artificial Sequence
  Description of Artificial Sequence: Synthetic oligonucleotide
  Antisense strand to SEQ ID NO: 1344572
acauaacacaggaacauua

SEQ ID NO: 1344574 - RNA, 19 nt, Artificial Sequence
  Description of Artificial Sequence: Synthetic oligonucleotide
  Sense strand starting at position 3796 of SEQ ID NO: 1242399
uccuguguuauguaacaga

SEQ ID NO: 1344575 - RNA, 19 nt, Artificial Sequence
  Description of Artificial Sequence: Synthetic oligonucleotide
  Antisense strand to SEQ ID NO: 1344574
ucuguuacauaacacagga

SEQ ID NO: 1344576 - RNA, 19 nt, Artificial Sequence
  Description of Artificial Sequence: Synthetic oligonucleotide
  Sense strand starting at position 3801 of SEQ ID NO: 1242399
uguuauguaacagagcuga

SEQ ID NO: 1344577 - RNA, 19 nt, Artificial Sequence
  Description of Artificial Sequence: Synthetic oligonucleotide
  Antisense strand to SEQ ID NO: 1344576
ucagcucuguuacauaaca

SEQ ID NO: 1344578 - RNA, 19 nt, Artificial Sequence
  Description of Artificial Sequence: Synthetic oligonucleotide
  Sense strand starting at position 83 of SEQ ID NO: 1242400
cccugugagagccaugguu

SEQ ID NO: 1344579 - RNA, 19 nt, Artificial Sequence
  Description of Artificial Sequence: Synthetic oligonucleotide
  Antisense strand to SEQ ID NO: 1344578
aaccauggcucucacaggg

SEQ ID NO: 1344580 - RNA, 19 nt, Artificial Sequence
  Description of Artificial Sequence: Synthetic oligonucleotide
  Sense strand starting at position 372 of SEQ ID NO: 1242400
auguuauagucacugaaca

SEQ ID NO: 1344581 - RNA, 19 nt, Artificial Sequence
  Description of Artificial Sequence: Synthetic oligonucleotide
  Antisense strand to SEQ ID NO: 1344580
uguucagugacuauaacau

SEQ ID NO: 1344582 - RNA, 19 nt, Artificial Sequence
  Description of Artificial Sequence: Synthetic oligonucleotide
  Sense strand starting at position 373 of SEQ ID NO: 1242400
uguuauagucacugaacaa

SEQ ID NO: 1344583 - RNA, 19 nt, Artificial Sequence
  Description of Artificial Sequence: Synthetic oligonucleotide
  Antisense strand to SEQ ID NO: 1344582
uuguucagugacuauaaca

SEQ ID NO: 1344584 - RNA, 19 nt, Artificial Sequence
  Description of Artificial Sequence: Synthetic oligonucleotide
  Sense strand starting at position 556 of SEQ ID NO: 1242400
gucacaagauuugaucauc

SEQ ID NO: 1344585 - RNA, 19 nt, Artificial Sequence
  Description of Artificial Sequence: Synthetic oligonucleotide
  Antisense strand to SEQ ID NO: 1344584
gaugaucaaaucuugugac

SEQ ID NO: 1344586 - RNA, 19 nt, Artificial Sequence
  Description of Artificial Sequence: Synthetic oligonucleotide
  Sense strand starting at position 592 of SEQ ID NO: 1242400
aagcuuuaggguuggguaa

SEQ ID NO: 1344587 - RNA, 19 nt, Artificial Sequence
  Description of Artificial Sequence: Synthetic oligonucleotide
  Antisense strand to SEQ ID NO: 1344586
uuacccaacccuaaagcuu

SEQ ID NO: 1344588 - RNA, 19 nt, Artificial Sequence
  Description of Artificial Sequence: Synthetic oligonucleotide
  Sense strand starting at position 629 of SEQ ID NO: 1242400
gcaacugagccagaauuac

SEQ ID NO: 1344589 - RNA, 19 nt, Artificial Sequence
  Description of Artificial Sequence: Synthetic oligonucleotide
  Antisense strand to SEQ ID NO: 1344588
guaauucuggcucaguugc

SEQ ID NO: 1344590 - RNA, 19 nt, Artificial Sequence
  Description of Artificial Sequence: Synthetic oligonucleotide
  Sense strand starting at position 655 of SEQ ID NO: 1242400
acaguaacccuauggcuaa

SEQ ID NO: 1344591 - RNA, 19 nt, Artificial Sequence
  Description of Artificial Sequence: Synthetic oligonucleotide
  Antisense strand to SEQ ID NO: 1344590
uuagccauaggguuacugu

SEQ ID NO: 1344592 - RNA, 19 nt, Artificial Sequence
  Description of Artificial Sequence: Synthetic oligonucleotide
  Sense strand starting at position 823 of SEQ ID NO: 1242400
aggucuugacauggugaga

SEQ ID NO: 1344593 - RNA, 19 nt, Artificial Sequence
  Description of Artificial Sequence: Synthetic oligonucleotide
  Antisense strand to SEQ ID NO: 1344592
ucucaccaugucaagaccu

SEQ ID NO: 1344594 - RNA, 19 nt, Artificial Sequence
  Description of Artificial Sequence: Synthetic oligonucleotide
  Sense strand starting at position 986 of SEQ ID NO: 1242400
gucagacagauuugucugu

SEQ ID NO: 1344595 - RNA, 19 nt, Artificial Sequence
  Description of Artificial Sequence: Synthetic oligonucleotide
  Antisense strand to SEQ ID NO: 1344594
acagacaaaucugucugac

SEQ ID NO: 1344596 - RNA, 19 nt, Artificial Sequence
  Description of Artificial Sequence: Synthetic oligonucleotide
  Sense strand starting at position 1213 of SEQ ID NO: 1242400
cucccuacaugguuagaaa

SEQ ID NO: 1344597 - RNA, 19 nt, Artificial Sequence
  Description of Artificial Sequence: Synthetic oligonucleotide
  Antisense strand to SEQ ID NO: 1344596
uuucuaaccauguagggag

SEQ ID NO: 1344598 - RNA, 19 nt, Artificial Sequence
  Description of Artificial Sequence: Synthetic oligonucleotide
  Sense strand starting at position 1321 of SEQ ID NO: 1242400
uguugccuuacagggaaau

SEQ ID NO: 1344599 - RNA, 19 nt, Artificial Sequence
  Description of Artificial Sequence: Synthetic oligonucleotide
  Antisense strand to SEQ ID NO: 1344598
auuucccuguaaggcaaca

SEQ ID NO: 1344600 - RNA, 19 nt, Artificial Sequence
  Description of Artificial Sequence: Synthetic oligonucleotide
  Sense strand starting at position 1333 of SEQ ID NO: 1242400
gggaaaucugagcacgcau

SEQ ID NO: 1344601 - RNA, 19 nt, Artificial Sequence
  Description of Artificial Sequence: Synthetic oligonucleotide
  Antisense strand to SEQ ID NO: 1344600
augcgugcucagauuuccc

SEQ ID NO: 1344602 - RNA, 19 nt, Artificial Sequence
  Description of Artificial Sequence: Synthetic oligonucleotide
  Sense strand starting at position 1445 of SEQ ID NO: 1242400
aggccaagucuugagguaa

SEQ ID NO: 1344603 - RNA, 19 nt, Artificial Sequence
  Description of Artificial Sequence: Synthetic oligonucleotide
  Antisense strand to SEQ ID NO: 1344602
uuaccucaagacuuggccu

SEQ ID NO: 1344604 - RNA, 19 nt, Artificial Sequence
  Description of Artificial Sequence: Synthetic oligonucleotide
  Sense strand starting at position 1460 of SEQ ID NO: 1242400
guaaauugggcucagguca

SEQ ID NO: 1344605 - RNA, 19 nt, Artificial Sequence
  Description of Artificial Sequence: Synthetic oligonucleotide
  Antisense strand to SEQ ID NO: 1344604
ugaccugagcccaauuuac

SEQ ID NO: 1344606 - RNA, 19 nt, Artificial Sequence
  Description of Artificial Sequence: Synthetic oligonucleotide
  Sense strand starting at position 1475 of SEQ ID NO: 1242400
gucagcuaagaaggauaua

SEQ ID NO: 1344607 - RNA, 19 nt, Artificial Sequence
  Description of Artificial Sequence: Synthetic oligonucleotide
  Antisense strand to SEQ ID NO: 1344606
uauauccuucuuagcugac

SEQ ID NO: 1344608 - RNA, 19 nt, Artificial Sequence
  Description of Artificial Sequence: Synthetic oligonucleotide
  Sense strand starting at position 1500 of SEQ ID NO: 1242400
auaccucagccaggaauua

SEQ ID NO: 1344609 - RNA, 19 nt, Artificial Sequence
  Description of Artificial Sequence: Synthetic oligonucleotide
  Antisense strand to SEQ ID NO: 1344608
uaauuccuggcugagguau

SEQ ID NO: 1344610 - RNA, 19 nt, Artificial Sequence
  Description of Artificial Sequence: Synthetic oligonucleotide
  Sense strand starting at position 2075 of SEQ ID NO: 1242400
gcggauuggccaucgcgaa

SEQ ID NO: 1344611 - RNA, 19 nt, Artificial Sequence
  Description of Artificial Sequence: Synthetic oligonucleotide
  Antisense strand to SEQ ID NO: 1344610
uucgcgauggccaauccgc

SEQ ID NO: 1344612 - RNA, 19 nt, Artificial Sequence
  Description of Artificial Sequence: Synthetic oligonucleotide
  Sense strand starting at position 2251 of SEQ ID NO: 1242400
aaaguuuaugccgacggaa

SEQ ID NO: 1344613 - RNA, 19 nt, Artificial Sequence
  Description of Artificial Sequence: Synthetic oligonucleotide
  Antisense strand to SEQ ID NO: 1344612
uuccgucggcauaaacuuu

SEQ ID NO: 1344614 - RNA, 19 nt, Artificial Sequence
  Description of Artificial Sequence: Synthetic oligonucleotide
  Sense strand starting at position 2513 of SEQ ID NO: 1242400
gcguaaacugcacgauuuc

SEQ ID NO: 1344615 - RNA, 19 nt, Artificial Sequence
  Description of Artificial Sequence: Synthetic oligonucleotide
  Antisense strand to SEQ ID NO: 1344614
gaaaucgugcaguuuacgc

SEQ ID NO: 1344616 - RNA, 19 nt, Artificial Sequence
  Description of Artificial Sequence: Synthetic oligonucleotide
  Sense strand starting at position 2741 of SEQ ID NO: 1242400
guagaauccugcuuugaga

SEQ ID NO: 1344617 - RNA, 19 nt, Artificial Sequence
  Description of Artificial Sequence: Synthetic oligonucleotide
  Antisense strand to SEQ ID NO: 1344616
ucucaaagcaggauucuac

SEQ ID NO: 1344618 - RNA, 19 nt, Artificial Sequence
  Description of Artificial Sequence: Synthetic oligonucleotide
  Sense strand starting at position 2771 of SEQ ID NO: 1242400
gagaaucaguucuuuauga

SEQ ID NO: 1344619 - RNA, 19 nt, Artificial Sequence
  Description of Artificial Sequence: Synthetic oligonucleotide
  Antisense strand to SEQ ID NO: 1344618
ucauaaagaacugauucuc

SEQ ID NO: 1344620 - RNA, 19 nt, Artificial Sequence
  Description of Artificial Sequence: Synthetic oligonucleotide
  Sense strand starting at position 2772 of SEQ ID NO: 1242400
agaaucaguucuuuaugaa

SEQ ID NO: 1344621 - RNA, 19 nt, Artificial Sequence
  Description of Artificial Sequence: Synthetic oligonucleotide
  Antisense strand to SEQ ID NO: 1344620
uucauaaagaacugauucu

SEQ ID NO: 1344622 - RNA, 19 nt, Artificial Sequence
  Description of Artificial Sequence: Synthetic oligonucleotide
  Sense strand starting at position 2779 of SEQ ID NO: 1242400
guucuuuaugaaugagcua

SEQ ID NO: 1344623 - RNA, 19 nt, Artificial Sequence
  Description of Artificial Sequence: Synthetic oligonucleotide
  Antisense strand to SEQ ID NO: 1344622
uagcucauucauaaagaac

SEQ ID NO: 1344624 - RNA, 19 nt, Artificial Sequence
  Description of Artificial Sequence: Synthetic oligonucleotide
  Sense strand starting at position 2782 of SEQ ID NO: 1242400
cuuuaugaaugagcuaauu

SEQ ID NO: 1344625 - RNA, 19 nt, Artificial Sequence
  Description of Artificial Sequence: Synthetic oligonucleotide
  Antisense strand to SEQ ID NO: 1344624
aauuagcucauucauaaag

SEQ ID NO: 1344626 - RNA, 19 nt, Artificial Sequence
  Description of Artificial Sequence: Synthetic oligonucleotide
  Sense strand starting at position 2899 of SEQ ID NO: 1242400
aaagaagagcccuaguugu

SEQ ID NO: 1344627 - RNA, 19 nt, Artificial Sequence
  Description of Artificial Sequence: Synthetic oligonucleotide
  Antisense strand to SEQ ID NO: 1344626
acaacuagggcucuucuuu

SEQ ID NO: 1344628 - RNA, 19 nt, Artificial Sequence
  Description of Artificial Sequence: Synthetic oligonucleotide
  Sense strand starting at position 3340 of SEQ ID NO: 1242400
uauacugcuugagugaacu

SEQ ID NO: 1344629 - RNA, 19 nt, Artificial Sequence
  Description of Artificial Sequence: Synthetic oligonucleotide
  Antisense strand to SEQ ID NO: 1344628
aguucacucaagcaguaua

SEQ ID NO: 1344630 - RNA, 19 nt, Artificial Sequence
  Description of Artificial Sequence: Synthetic oligonucleotide
  Sense strand starting at position 3404 of SEQ ID NO: 1242400
cuaaauugaucucccacga

SEQ ID NO: 1344631 - RNA, 19 nt, Artificial Sequence
  Description of Artificial Sequence: Synthetic oligonucleotide
  Antisense strand to SEQ ID NO: 1344630
ucgugggagaucaauuuag

SEQ ID NO: 1344632 - RNA, 19 nt, Artificial Sequence
  Description of Artificial Sequence: Synthetic oligonucleotide
  Sense strand starting at position 3408 of SEQ ID NO: 1242400
auugaucucccacgacuuu

SEQ ID NO: 1344633 - RNA, 19 nt, Artificial Sequence
  Description of Artificial Sequence: Synthetic oligonucleotide
  Antisense strand to SEQ ID NO: 1344632
aaagucgugggagaucaau

SEQ ID NO: 1344634 - RNA, 19 nt, Artificial Sequence
  Description of Artificial Sequence: Synthetic oligonucleotide
  Sense strand starting at position 3431 of SEQ ID NO: 1242400
cuguuaaugaggugcauuu

SEQ ID NO: 1344635 - RNA, 19 nt, Artificial Sequence
  Description of Artificial Sequence: Synthetic oligonucleotide
  Antisense strand to SEQ ID NO: 1344634
aaaugcaccucauuaacag

SEQ ID NO: 1344636 - RNA, 19 nt, Artificial Sequence
  Description of Artificial Sequence: Synthetic oligonucleotide
  Sense strand starting at position 3463 of SEQ ID NO: 1242400
aaugcaucacuugggagaa

SEQ ID NO: 1344637 - RNA, 19 nt, Artificial Sequence
  Description of Artificial Sequence: Synthetic oligonucleotide
  Antisense strand to SEQ ID NO: 1344636
uucucccaagugaugcauu

SEQ ID NO: 1344638 - RNA, 19 nt, Artificial Sequence
  Description of Artificial Sequence: Synthetic oligonucleotide
  Sense strand starting at position 3579 of SEQ ID NO: 1242400
ugaucuaagucuguguaaa

SEQ ID NO: 1344639 - RNA, 19 nt, Artificial Sequence
  Description of Artificial Sequence: Synthetic oligonucleotide
  Antisense strand to SEQ ID NO: 1344638
uuuacacagacuuagauca

SEQ ID NO: 1344640 - RNA, 19 nt, Artificial Sequence
  Description of Artificial Sequence: Synthetic oligonucleotide
  Sense strand starting at position 3580 of SEQ ID NO: 1242400
gaucuaagucuguguaaac

SEQ ID NO: 1344641 - RNA, 19 nt, Artificial Sequence
  Description of Artificial Sequence: Synthetic oligonucleotide
  Antisense strand to SEQ ID NO: 1344640
guuuacacagacuuagauc

SEQ ID NO: 1344642 - RNA, 19 nt, Artificial Sequence
  Description of Artificial Sequence: Synthetic oligonucleotide
  Sense strand starting at position 3628 of SEQ ID NO: 1242400
ggcaguacuccucaugauc

SEQ ID NO: 1344643 - RNA, 19 nt, Artificial Sequence
  Description of Artificial Sequence: Synthetic oligonucleotide
  Antisense strand to SEQ ID NO: 1344642
gaucaugaggaguacugcc

SEQ ID NO: 1344644 - RNA, 19 nt, Artificial Sequence
  Description of Artificial Sequence: Synthetic oligonucleotide
  Sense strand starting at position 3720 of SEQ ID NO: 1242400
auaugucugcuugaaugag

SEQ ID NO: 1344645 - RNA, 19 nt, Artificial Sequence
  Description of Artificial Sequence: Synthetic oligonucleotide
  Antisense strand to SEQ ID NO: 1344644
cucauucaagcagacauau

SEQ ID NO: 1344646 - RNA, 19 nt, Artificial Sequence
  Description of Artificial Sequence: Synthetic oligonucleotide
  Sense strand starting at position 3724 of SEQ ID NO: 1242400
gucugcuugaaugaggaga

SEQ ID NO: 1344647 - RNA, 19 nt, Artificial Sequence
  Description of Artificial Sequence: Synthetic oligonucleotide
  Antisense strand to SEQ ID NO: 1344646
ucuccucauucaagcagac

SEQ ID NO: 1344648 - RNA, 19 nt, Artificial Sequence
  Description of Artificial Sequence: Synthetic oligonucleotide
  Sense strand starting at position 3744 of SEQ ID NO: 1242400
gaggaaauguguuucuggu

SEQ ID NO: 1344649 - RNA, 19 nt, Artificial Sequence
  Description of Artificial Sequence: Synthetic oligonucleotide
  Antisense strand to SEQ ID NO: 1344648
accagaaacacauuuccuc

SEQ ID NO: 1344650 - RNA, 19 nt, Artificial Sequence
  Description of Artificial Sequence: Synthetic oligonucleotide
  Sense strand starting at position 3760 of SEQ ID NO: 1242400
gguguccagaguuaacauu

SEQ ID NO: 1344651 - RNA, 19 nt, Artificial Sequence
  Description of Artificial Sequence: Synthetic oligonucleotide
  Antisense strand to SEQ ID NO: 1344650
aauguuaacucuggacacc

SEQ ID NO: 1344652 - RNA, 19 nt, Artificial Sequence
  Description of Artificial Sequence: Synthetic oligonucleotide
  Sense strand starting at position 3929 of SEQ ID NO: 1242400
cccuuagugagcguauguu

SEQ ID NO: 1344653 - RNA, 19 nt, Artificial Sequence
  Description of Artificial Sequence: Synthetic oligonucleotide
  Antisense strand to SEQ ID NO: 1344652
aacauacgcucacuaaggg

SEQ ID NO: 1344654 - RNA, 19 nt, Artificial Sequence
  Description of Artificial Sequence: Synthetic oligonucleotide
  Sense strand starting at position 3952 of SEQ ID NO: 1242400
ucuaauauaguguaguuga

SEQ ID NO: 1344655 - RNA, 19 nt, Artificial Sequence
  Description of Artificial Sequence: Synthetic oligonucleotide
  Antisense strand to SEQ ID NO: 1344654
ucaacuacacuauauuaga

SEQ ID NO: 1344656 - RNA, 19 nt, Artificial Sequence
  Description of Artificial Sequence: Synthetic oligonucleotide
  Sense strand starting at position 3957 of SEQ ID NO: 1242400
uauaguguaguugaaccaa

SEQ ID NO: 1344657 - RNA, 19 nt, Artificial Sequence
  Description of Artificial Sequence: Synthetic oligonucleotide
  Antisense strand to SEQ ID NO: 1344656
uugguucaacuacacuaua

SEQ ID NO: 1344658 - RNA, 19 nt, Artificial Sequence
  Description of Artificial Sequence: Synthetic oligonucleotide
  Sense strand starting at position 96 of SEQ ID NO: 1242401
gggucuuugcaagaguaaa

SEQ ID NO: 1344659 - RNA, 19 nt, Artificial Sequence
  Description of Artificial Sequence: Synthetic oligonucleotide
  Antisense strand to SEQ ID NO: 1344658
uuuacucuugcaaagaccc

SEQ ID NO: 1344660 - RNA, 19 nt, Artificial Sequence
  Description of Artificial Sequence: Synthetic oligonucleotide
  Sense strand starting at position 314 of SEQ ID NO: 1242401
ggagcucagucauccauag

SEQ ID NO: 1344661 - RNA, 19 nt, Artificial Sequence
  Description of Artificial Sequence: Synthetic oligonucleotide
  Antisense strand to SEQ ID NO: 1344660
cuauggaugacugagcucc

SEQ ID NO: 1344662 - RNA, 19 nt, Artificial Sequence
  Description of Artificial Sequence: Synthetic oligonucleotide
  Sense strand starting at position 383 of SEQ ID NO: 1242401
gagauauggcuuuaagcua

SEQ ID NO: 1344663 - RNA, 19 nt, Artificial Sequence
  Description of Artificial Sequence: Synthetic oligonucleotide
  Antisense strand to SEQ ID NO: 1344662
uagcuuaaagccauaucuc

SEQ ID NO: 1344664 - RNA, 19 nt, Artificial Sequence
  Description of Artificial Sequence: Synthetic oligonucleotide
  Sense strand starting at position 390 of SEQ ID NO: 1242401
ggcuuuaagcuauagacaa

SEQ ID NO: 1344665 - RNA, 19 nt, Artificial Sequence
  Description of Artificial Sequence: Synthetic oligonucleotide
  Antisense strand to SEQ ID NO: 1344664
uugucuauagcuuaaagcc

SEQ ID NO: 1344666 - RNA, 19 nt, Artificial Sequence
  Description of Artificial Sequence: Synthetic oligonucleotide
  Sense strand starting at position 425 of SEQ ID NO: 1242401
agggcauugccagggacau

SEQ ID NO: 1344667 - RNA, 19 nt, Artificial Sequence
  Description of Artificial Sequence: Synthetic oligonucleotide
  Antisense strand to SEQ ID NO: 1344666
augucccuggcaaugcccu

SEQ ID NO: 1344668 - RNA, 19 nt, Artificial Sequence
  Description of Artificial Sequence: Synthetic oligonucleotide
  Sense strand starting at position 427 of SEQ ID NO: 1242401
ggcauugccagggacauua

SEQ ID NO: 1344669 - RNA, 19 nt, Artificial Sequence
  Description of Artificial Sequence: Synthetic oligonucleotide
  Antisense strand to SEQ ID NO: 1344668
uaaugucccuggcaaugcc

SEQ ID NO: 1344670 - RNA, 19 nt, Artificial Sequence
  Description of Artificial Sequence: Synthetic oligonucleotide
  Sense strand starting at position 440 of SEQ ID NO: 1242401
acauuaaggcuccauguau

SEQ ID NO: 1344671 - RNA, 19 nt, Artificial Sequence
  Description of Artificial Sequence: Synthetic oligonucleotide
  Antisense strand to SEQ ID NO: 1344670
auacauggagccuuaaugu

SEQ ID NO: 1344672 - RNA, 19 nt, Artificial Sequence
  Description of Artificial Sequence: Synthetic oligonucleotide
  Sense strand starting at position 649 of SEQ ID NO: 1242401
gugaaaugggcaugauaac

SEQ ID NO: 1344673 - RNA, 19 nt, Artificial Sequence
  Description of Artificial Sequence: Synthetic oligonucleotide
  Antisense strand to SEQ ID NO: 1344672
guuaucaugcccauuucac

SEQ ID NO: 1344674 - RNA, 19 nt, Artificial Sequence
  Description of Artificial Sequence: Synthetic oligonucleotide
  Sense strand starting at position 1386 of SEQ ID NO: 1242401
uuagaagugagcugaguaa

SEQ ID NO: 1344675 - RNA, 19 nt, Artificial Sequence
  Description of Artificial Sequence: Synthetic oligonucleotide
  Antisense strand to SEQ ID NO: 1344674
uuacucagcucacuucuaa

SEQ ID NO: 1344676 - RNA, 19 nt, Artificial Sequence
  Description of Artificial Sequence: Synthetic oligonucleotide
  Sense strand starting at position 1397 of SEQ ID NO: 1242401
cugaguaacccauggaauc

SEQ ID NO: 1344677 - RNA, 19 nt, Artificial Sequence
  Description of Artificial Sequence: Synthetic oligonucleotide
  Antisense strand to SEQ ID NO: 1344676
gauuccauggguuacucag

SEQ ID NO: 1344678 - RNA, 19 nt, Artificial Sequence
  Description of Artificial Sequence: Synthetic oligonucleotide
  Sense strand starting at position 1398 of SEQ ID NO: 1242401
ugaguaacccauggaaucu

SEQ ID NO: 1344679 - RNA, 19 nt, Artificial Sequence
  Description of Artificial Sequence: Synthetic oligonucleotide
  Antisense strand to SEQ ID NO: 1344678
agauuccauggguuacuca

SEQ ID NO: 1344680 - RNA, 19 nt, Artificial Sequence
  Description of Artificial Sequence: Synthetic oligonucleotide
  Sense strand starting at position 1408 of SEQ ID NO: 1242401
auggaaucugucugguaca

SEQ ID NO: 1344681 - RNA, 19 nt, Artificial Sequence
  Description of Artificial Sequence: Synthetic oligonucleotide
  Antisense strand to SEQ ID NO: 1344680
uguaccagacagauuccau

SEQ ID NO: 1344682 - RNA, 19 nt, Artificial Sequence
  Description of Artificial Sequence: Synthetic oligonucleotide
  Sense strand starting at position 1421 of SEQ ID NO: 1242401
gguacaacuccucaucuga

SEQ ID NO: 1344683 - RNA, 19 nt, Artificial Sequence
  Description of Artificial Sequence: Synthetic oligonucleotide
  Antisense strand to SEQ ID NO: 1344682
ucagaugaggaguuguacc

SEQ ID NO: 1344684 - RNA, 19 nt, Artificial Sequence
  Description of Artificial Sequence: Synthetic oligonucleotide
  Sense strand starting at position 1466 of SEQ ID NO: 1242401
ggagaugugacuugcuuaa

SEQ ID NO: 1344685 - RNA, 19 nt, Artificial Sequence
  Description of Artificial Sequence: Synthetic oligonucleotide
  Antisense strand to SEQ ID NO: 1344684
uuaagcaagucacaucucc

SEQ ID NO: 1344686 - RNA, 19 nt, Artificial Sequence
  Description of Artificial Sequence: Synthetic oligonucleotide
  Sense strand starting at position 1468 of SEQ ID NO: 1242401
agaugugacuugcuuaaca

SEQ ID NO: 1344687 - RNA, 19 nt, Artificial Sequence
  Description of Artificial Sequence: Synthetic oligonucleotide
  Antisense strand to SEQ ID NO: 1344686
uguuaagcaagucacaucu

SEQ ID NO: 1344688 - RNA, 19 nt, Artificial Sequence
  Description of Artificial Sequence: Synthetic oligonucleotide
  Sense strand starting at position 1470 of SEQ ID NO: 1242401
augugacuugcuuaacauc

SEQ ID NO: 1344689 - RNA, 19 nt, Artificial Sequence
  Description of Artificial Sequence: Synthetic oligonucleotide
  Antisense strand to SEQ ID NO: 1344688
gauguuaagcaagucacau

SEQ ID NO: 1344690 - RNA, 19 nt, Artificial Sequence
  Description of Artificial Sequence: Synthetic oligonucleotide
  Sense strand starting at position 1632 of SEQ ID NO: 1242401
ccuucuuugucccugauuu

SEQ ID NO: 1344691 - RNA, 19 nt, Artificial Sequence
  Description of Artificial Sequence: Synthetic oligonucleotide
  Antisense strand to SEQ ID NO: 1344690
aaaucagggacaaagaagg

SEQ ID NO: 1344692 - RNA, 19 nt, Artificial Sequence
  Description of Artificial Sequence: Synthetic oligonucleotide
  Sense strand starting at position 1633 of SEQ ID NO: 1242401
cuucuuugucccugauuuc

SEQ ID NO: 1344693 - RNA, 19 nt, Artificial Sequence
  Description of Artificial Sequence: Synthetic oligonucleotide
  Antisense strand to SEQ ID NO: 1344692
gaaaucagggacaaagaag

SEQ ID NO: 1344694 - RNA, 19 nt, Artificial Sequence
  Description of Artificial Sequence: Synthetic oligonucleotide
  Sense strand starting at position 1773 of SEQ ID NO: 1242401
uccuguguuauguaacaga

SEQ ID NO: 1344695 - RNA, 19 nt, Artificial Sequence
  Description of Artificial Sequence: Synthetic oligonucleotide
  Antisense strand to SEQ ID NO: 1344694
ucuguuacauaacacagga

SEQ ID NO: 1344696 - RNA, 19 nt, Artificial Sequence
  Description of Artificial Sequence: Synthetic oligonucleotide
  Sense strand starting at position 1778 of SEQ ID NO: 1242401
uguuauguaacagagcuga

SEQ ID NO: 1344697 - RNA, 19 nt, Artificial Sequence
  Description of Artificial Sequence: Synthetic oligonucleotide
  Antisense strand to SEQ ID NO: 1344696
ucagcucuguuacauaaca

SEQ ID NO: 1344698 - RNA, 19 nt, Artificial Sequence
  Description of Artificial Sequence: Synthetic oligonucleotide
  Sense strand starting at position 2056 of SEQ ID NO: 1242401
uuaucagggcauuguacaa

SEQ ID NO: 1344699 - RNA, 19 nt, Artificial Sequence
  Description of Artificial Sequence: Synthetic oligonucleotide
  Antisense strand to SEQ ID NO: 1344698
uuguacaaugcccugauaa

SEQ ID NO: 1344700 - RNA, 19 nt, Artificial Sequence
  Description of Artificial Sequence: Synthetic oligonucleotide
  Sense strand starting at position 2194 of SEQ ID NO: 1242401
guuucuaagcuaugagaau

SEQ ID NO: 1344701 - RNA, 19 nt, Artificial Sequence
  Description of Artificial Sequence: Synthetic oligonucleotide
  Antisense strand to SEQ ID NO: 1344700
auucucauagcuuagaaac

SEQ ID NO: 1344702 - RNA, 19 nt, Artificial Sequence
  Description of Artificial Sequence: Synthetic oligonucleotide
  Sense strand starting at position 2207 of SEQ ID NO: 1242401
gagaaugagagguggucua

SEQ ID NO: 1344703 - RNA, 19 nt, Artificial Sequence
  Description of Artificial Sequence: Synthetic oligonucleotide
  Antisense strand to SEQ ID NO: 1344702
uagaccaccucucauucuc

SEQ ID NO: 1344704 - RNA, 19 nt, Artificial Sequence
  Description of Artificial Sequence: Synthetic oligonucleotide
  Sense strand starting at position 2401 of SEQ ID NO: 1242401
uguccuuccuauuuguaag

SEQ ID NO: 1344705 - RNA, 19 nt, Artificial Sequence
  Description of Artificial Sequence: Synthetic oligonucleotide
  Antisense strand to SEQ ID NO: 1344704
cuuacaaauaggaaggaca

SEQ ID NO: 1344706 - RNA, 19 nt, Artificial Sequence
  Description of Artificial Sequence: Synthetic oligonucleotide
  Sense strand starting at position 2413 of SEQ ID NO: 1242401
uuguaaggugaaugugaga

SEQ ID NO: 1344707 - RNA, 19 nt, Artificial Sequence
  Description of Artificial Sequence: Synthetic oligonucleotide
  Antisense strand to SEQ ID NO: 1344706
ucucacauucaccuuacaa

SEQ ID NO: 1344708 - RNA, 19 nt, Artificial Sequence
  Description of Artificial Sequence: Synthetic oligonucleotide
  Sense strand starting at position 2516 of SEQ ID NO: 1242401
aaaggaaauccuuggugua

SEQ ID NO: 1344709 - RNA, 19 nt, Artificial Sequence
  Description of Artificial Sequence: Synthetic oligonucleotide
  Antisense strand to SEQ ID NO: 1344708
uacaccaaggauuuccuuu

SEQ ID NO: 1344710 - RNA, 19 nt, Artificial Sequence
  Description of Artificial Sequence: Synthetic oligonucleotide
  Sense strand starting at position 2517 of SEQ ID NO: 1242401
aaggaaauccuugguguag

SEQ ID NO: 1344711 - RNA, 19 nt, Artificial Sequence
  Description of Artificial Sequence: Synthetic oligonucleotide
  Antisense strand to SEQ ID NO: 1344710
cuacaccaaggauuuccuu

SEQ ID NO: 1344712 - RNA, 19 nt, Artificial Sequence
  Description of Artificial Sequence: Synthetic oligonucleotide
  Sense strand starting at position 2518 of SEQ ID NO: 1242401
aggaaauccuugguguaga

SEQ ID NO: 1344713 - RNA, 19 nt, Artificial Sequence
  Description of Artificial Sequence: Synthetic oligonucleotide
  Antisense strand to SEQ ID NO: 1344712
ucuacaccaaggauuuccu

SEQ ID NO: 1344714 - RNA, 19 nt, Artificial Sequence
  Description of Artificial Sequence: Synthetic oligonucleotide
  Sense strand starting at position 2624 of SEQ ID NO: 1242401
augacuuggagcugaucaa

SEQ ID NO: 1344715 - RNA, 19 nt, Artificial Sequence
  Description of Artificial Sequence: Synthetic oligonucleotide
  Antisense strand to SEQ ID NO: 1344714
uugaucagcuccaagucau

SEQ ID NO: 1344716 - RNA, 19 nt, Artificial Sequence
  Description of Artificial Sequence: Synthetic oligonucleotide
  Sense strand starting at position 2666 of SEQ ID NO: 1242401
gggaucuugugauccuaac

SEQ ID NO: 1344717 - RNA, 19 nt, Artificial Sequence
  Description of Artificial Sequence: Synthetic oligonucleotide
  Antisense strand to SEQ ID NO: 1344716
guuaggaucacaagauccc

SEQ ID NO: 1344718 - RNA, 19 nt, Artificial Sequence
  Description of Artificial Sequence: Synthetic oligonucleotide
  Sense strand starting at position 2672 of SEQ ID NO: 1242401
uugugauccuaaccauuga

SEQ ID NO: 1344719 - RNA, 19 nt, Artificial Sequence
  Description of Artificial Sequence: Synthetic oligonucleotide
  Antisense strand to SEQ ID NO: 1344718
ucaaugguuaggaucacaa

SEQ ID NO: 1344720 - RNA, 19 nt, Artificial Sequence
  Description of Artificial Sequence: Synthetic oligonucleotide
  Sense strand starting at position 3254 of SEQ ID NO: 1242401
ucauaaauguugccaagga

SEQ ID NO: 1344721 - RNA, 19 nt, Artificial Sequence
  Description of Artificial Sequence: Synthetic oligonucleotide
  Antisense strand to SEQ ID NO: 1344720
uccuuggcaacauuuauga

SEQ ID NO: 1344722 - RNA, 19 nt, Artificial Sequence
  Description of Artificial Sequence: Synthetic oligonucleotide
  Sense strand starting at position 3331 of SEQ ID NO: 1242401
ucuuauuaucaugggauuc

SEQ ID NO: 1344723 - RNA, 19 nt, Artificial Sequence
  Description of Artificial Sequence: Synthetic oligonucleotide
  Antisense strand to SEQ ID NO: 1344722
gaaucccaugauaauaaga

SEQ ID NO: 1344724 - RNA, 19 nt, Artificial Sequence
  Description of Artificial Sequence: Synthetic oligonucleotide
  Sense strand starting at position 3444 of SEQ ID NO: 1242401
acuucucagugguuauaaa

SEQ ID NO: 1344725 - RNA, 19 nt, Artificial Sequence
  Description of Artificial Sequence: Synthetic oligonucleotide
  Antisense strand to SEQ ID NO: 1344724
uuuauaaccacugagaagu

SEQ ID NO: 1344726 - RNA, 19 nt, Artificial Sequence
  Description of Artificial Sequence: Synthetic oligonucleotide
  Sense strand starting at position 3445 of SEQ ID NO: 1242401
cuucucagugguuauaaac

SEQ ID NO: 1344727 - RNA, 19 nt, Artificial Sequence
  Description of Artificial Sequence: Synthetic oligonucleotide
  Antisense strand to SEQ ID NO: 1344726
guuuauaaccacugagaag

SEQ ID NO: 1344728 - RNA, 19 nt, Artificial Sequence
  Description of Artificial Sequence: Synthetic oligonucleotide
  Sense strand starting at position 3493 of SEQ ID NO: 1242401
gacauuaccuguuugauag

SEQ ID NO: 1344729 - RNA, 19 nt, Artificial Sequence
  Description of Artificial Sequence: Synthetic oligonucleotide
  Antisense strand to SEQ ID NO: 1344728
cuaucaaacagguaauguc

SEQ ID NO: 1344730 - RNA, 19 nt, Artificial Sequence
  Description of Artificial Sequence: Synthetic oligonucleotide
  Sense strand starting at position 3590 of SEQ ID NO: 1242401
ucacaaucagauuguguua

SEQ ID NO: 1344731 - RNA, 19 nt, Artificial Sequence
  Description of Artificial Sequence: Synthetic oligonucleotide
  Antisense strand to SEQ ID NO: 1344730
uaacacaaucugauuguga

SEQ ID NO: 1344732 - RNA, 19 nt, Artificial Sequence
  Description of Artificial Sequence: Synthetic oligonucleotide
  Sense strand starting at position 3593 of SEQ ID NO: 1242401
caaucagauuguguuagag

SEQ ID NO: 1344733 - RNA, 19 nt, Artificial Sequence
  Description of Artificial Sequence: Synthetic oligonucleotide
  Antisense strand to SEQ ID NO: 1344732
cucuaacacaaucugauug

SEQ ID NO: 1344734 - RNA, 19 nt, Artificial Sequence
  Description of Artificial Sequence: Synthetic oligonucleotide
  Sense strand starting at position 3668 of SEQ ID NO: 1242401
gugcaaucaccugauuaau

SEQ ID NO: 1344735 - RNA, 19 nt, Artificial Sequence
  Description of Artificial Sequence: Synthetic oligonucleotide
  Antisense strand to SEQ ID NO: 1344734
auuaaucaggugauugcac

SEQ ID NO: 1344736 - RNA, 19 nt, Artificial Sequence
  Description of Artificial Sequence: Synthetic oligonucleotide
  Sense strand starting at position 3883 of SEQ ID NO: 1242401
agcauaacccagugaggaa

SEQ ID NO: 1344737 - RNA, 19 nt, Artificial Sequence
  Description of Artificial Sequence: Synthetic oligonucleotide
  Antisense strand to SEQ ID NO: 1344736
uuccucacuggguuaugcu

SEQ ID NO: 1344738 - RNA, 19 nt, Artificial Sequence
  Description of Artificial Sequence: Synthetic oligonucleotide
  Sense strand starting at position 64 of SEQ ID NO: 1242402
cagucuugugaauaugcaa

SEQ ID NO: 1344739 - RNA, 19 nt, Artificial Sequence
  Description of Artificial Sequence: Synthetic oligonucleotide
  Antisense strand to SEQ ID NO: 1344738
uugcauauucacaagacug

SEQ ID NO: 1344740 - RNA, 19 nt, Artificial Sequence
  Description of Artificial Sequence: Synthetic oligonucleotide
  Sense strand starting at position 187 of SEQ ID NO: 1242402
gcucauauggcacagaaca

SEQ ID NO: 1344741 - RNA, 19 nt, Artificial Sequence
  Description of Artificial Sequence: Synthetic oligonucleotide
  Antisense strand to SEQ ID NO: 1344740
uguucugugccauaugagc

SEQ ID NO: 1344742 - RNA, 19 nt, Artificial Sequence
  Description of Artificial Sequence: Synthetic oligonucleotide
  Sense strand starting at position 244 of SEQ ID NO: 1242402
gaaggucuaugcucagaau

SEQ ID NO: 1344743 - RNA, 19 nt, Artificial Sequence
  Description of Artificial Sequence: Synthetic oligonucleotide
  Antisense strand to SEQ ID NO: 1344742
auucugagcauagaccuuc

SEQ ID NO: 1344744 - RNA, 19 nt, Artificial Sequence
  Description of Artificial Sequence: Synthetic oligonucleotide
  Sense strand starting at position 245 of SEQ ID NO: 1242402
aaggucuaugcucagaauu

SEQ ID NO: 1344745 - RNA, 19 nt, Artificial Sequence
  Description of Artificial Sequence: Synthetic oligonucleotide
  Antisense strand to SEQ ID NO: 1344744
aauucugagcauagaccuu

SEQ ID NO: 1344746 - RNA, 19 nt, Artificial Sequence
  Description of Artificial Sequence: Synthetic oligonucleotide
  Sense strand starting at position 255 of SEQ ID NO: 1242402
cucagaauucugggcaaca

SEQ ID NO: 1344747 - RNA, 19 nt, Artificial Sequence
  Description of Artificial Sequence: Synthetic oligonucleotide
  Antisense strand to SEQ ID NO: 1344746
uguugcccagaauucugag

SEQ ID NO: 1344748 - RNA, 19 nt, Artificial Sequence
  Description of Artificial Sequence: Synthetic oligonucleotide
  Sense strand starting at position 256 of SEQ ID NO: 1242402
ucagaauucugggcaacau

SEQ ID NO: 1344749 - RNA, 19 nt, Artificial Sequence
  Description of Artificial Sequence: Synthetic oligonucleotide
  Antisense strand to SEQ ID NO: 1344748
auguugcccagaauucuga

SEQ ID NO: 1344750 - RNA, 19 nt, Artificial Sequence
  Description of Artificial Sequence: Synthetic oligonucleotide
  Sense strand starting at position 382 of SEQ ID NO: 1242402
ugucuaaggucacuuagga

SEQ ID NO: 1344751 - RNA, 19 nt, Artificial Sequence
  Description of Artificial Sequence: Synthetic oligonucleotide
  Antisense strand to SEQ ID NO: 1344750
uccuaagugaccuuagaca

SEQ ID NO: 1344752 - RNA, 19 nt, Artificial Sequence
  Description of Artificial Sequence: Synthetic oligonucleotide
  Sense strand starting at position 503 of SEQ ID NO: 1242402
ugcauuuguuuaucacuuu

SEQ ID NO: 1344753 - RNA, 19 nt, Artificial Sequence
  Description of Artificial Sequence: Synthetic oligonucleotide
  Antisense strand to SEQ ID NO: 1344752
aaagugauaaacaaaugca

SEQ ID NO: 1344754 - RNA, 19 nt, Artificial Sequence
  Description of Artificial Sequence: Synthetic oligonucleotide
  Sense strand starting at position 645 of SEQ ID NO: 1242402
uuggaacaguucuuauaac

SEQ ID NO: 1344755 - RNA, 19 nt, Artificial Sequence
  Description of Artificial Sequence: Synthetic oligonucleotide
  Antisense strand to SEQ ID NO: 1344754
guuauaagaacuguuccaa

SEQ ID NO: 1344756 - RNA, 19 nt, Artificial Sequence
  Description of Artificial Sequence: Synthetic oligonucleotide
  Sense strand starting at position 725 of SEQ ID NO: 1242402
cggguucuaacuugaagaa

SEQ ID NO: 1344757 - RNA, 19 nt, Artificial Sequence
  Description of Artificial Sequence: Synthetic oligonucleotide
  Antisense strand to SEQ ID NO: 1344756
uucuucaaguuagaacccg

SEQ ID NO: 1344758 - RNA, 19 nt, Artificial Sequence
  Description of Artificial Sequence: Synthetic oligonucleotide
  Sense strand starting at position 781 of SEQ ID NO: 1242402
cgaccaguuccuuaagaca

SEQ ID NO: 1344759 - RNA, 19 nt, Artificial Sequence
  Description of Artificial Sequence: Synthetic oligonucleotide
  Antisense strand to SEQ ID NO: 1344758
ugucuuaaggaacuggucg

SEQ ID NO: 1344760 - RNA, 19 nt, Artificial Sequence
  Description of Artificial Sequence: Synthetic oligonucleotide
  Sense strand starting at position 1105 of SEQ ID NO: 1242402
gggugcuauuuccuguuaa

SEQ ID NO: 1344761 - RNA, 19 nt, Artificial Sequence
  Description of Artificial Sequence: Synthetic oligonucleotide
  Antisense strand to SEQ ID NO: 1344760
uuaacaggaaauagcaccc

SEQ ID NO: 1344762 - RNA, 19 nt, Artificial Sequence
  Description of Artificial Sequence: Synthetic oligonucleotide
  Sense strand starting at position 1187 of SEQ ID NO: 1242402
uuaagaaaucuguaagugu

SEQ ID NO: 1344763 - RNA, 19 nt, Artificial Sequence
  Description of Artificial Sequence: Synthetic oligonucleotide
  Antisense strand to SEQ ID NO: 1344762
acacuuacagauuucuuaa

SEQ ID NO: 1344764 - RNA, 19 nt, Artificial Sequence
  Description of Artificial Sequence: Synthetic oligonucleotide
  Sense strand starting at position 1250 of SEQ ID NO: 1242402
agcgcuucugaauauaaca

SEQ ID NO: 1344765 - RNA, 19 nt, Artificial Sequence
  Description of Artificial Sequence: Synthetic oligonucleotide
  Antisense strand to SEQ ID NO: 1344764
uguuauauucagaagcgcu

SEQ ID NO: 1344766 - RNA, 19 nt, Artificial Sequence
  Description of Artificial Sequence: Synthetic oligonucleotide
  Sense strand starting at position 1512 of SEQ ID NO: 1242402
uccacuguugcagagagaa

SEQ ID NO: 1344767 - RNA, 19 nt, Artificial Sequence
  Description of Artificial Sequence: Synthetic oligonucleotide
  Antisense strand to SEQ ID NO: 1344766
uucucucugcaacagugga

SEQ ID NO: 1344768 - RNA, 19 nt, Artificial Sequence
  Description of Artificial Sequence: Synthetic oligonucleotide
  Sense strand starting at position 1586 of SEQ ID NO: 1242402
ggagacuuggccuacuaug

SEQ ID NO: 1344769 - RNA, 19 nt, Artificial Sequence
  Description of Artificial Sequence: Synthetic oligonucleotide
  Antisense strand to SEQ ID NO: 1344768
cauaguaggccaagucucc

SEQ ID NO: 1344770 - RNA, 19 nt, Artificial Sequence
  Description of Artificial Sequence: Synthetic oligonucleotide
  Sense strand starting at position 1597 of SEQ ID NO: 1242402
cuacuaugaucucugugaa

SEQ ID NO: 1344771 - RNA, 19 nt, Artificial Sequence
  Description of Artificial Sequence: Synthetic oligonucleotide
  Antisense strand to SEQ ID NO: 1344770
uucacagagaucauaguag

SEQ ID NO: 1344772 - RNA, 19 nt, Artificial Sequence
  Description of Artificial Sequence: Synthetic oligonucleotide
  Sense strand starting at position 1600 of SEQ ID NO: 1242402
cuaugaucucugugaauua

SEQ ID NO: 1344773 - RNA, 19 nt, Artificial Sequence
  Description of Artificial Sequence: Synthetic oligonucleotide
  Antisense strand to SEQ ID NO: 1344772
uaauucacagagaucauag

SEQ ID NO: 1344774 - RNA, 19 nt, Artificial Sequence
  Description of Artificial Sequence: Synthetic oligonucleotide
  Sense strand starting at position 1610 of SEQ ID NO: 1242402
ugugaauuacuuuggagua

SEQ ID NO: 1344775 - RNA, 19 nt, Artificial Sequence
  Description of Artificial Sequence: Synthetic oligonucleotide
  Antisense strand to SEQ ID NO: 1344774
uacuccaaaguaauucaca

SEQ ID NO: 1344776 - RNA, 19 nt, Artificial Sequence
  Description of Artificial Sequence: Synthetic oligonucleotide
  Sense strand starting at position 1703 of SEQ ID NO: 1242402
aagugagcccauugagaau

SEQ ID NO: 1344777 - RNA, 19 nt, Artificial Sequence
  Description of Artificial Sequence: Synthetic oligonucleotide
  Antisense strand to SEQ ID NO: 1344776
auucucaaugggcucacuu

SEQ ID NO: 1344778 - RNA, 19 nt, Artificial Sequence
  Description of Artificial Sequence: Synthetic oligonucleotide
  Sense strand starting at position 2331 of SEQ ID NO: 1242402
guuguuuggguugauauua

SEQ ID NO: 1344779 - RNA, 19 nt, Artificial Sequence
  Description of Artificial Sequence: Synthetic oligonucleotide
  Antisense strand to SEQ ID NO: 1344778
uaauaucaacccaaacaac

SEQ ID NO: 1344780 - RNA, 19 nt, Artificial Sequence
  Description of Artificial Sequence: Synthetic oligonucleotide
  Sense strand starting at position 2462 of SEQ ID NO: 1242402
aaucgucuagcugagaaau

SEQ ID NO: 1344781 - RNA, 19 nt, Artificial Sequence
  Description of Artificial Sequence: Synthetic oligonucleotide
  Antisense strand to SEQ ID NO: 1344780
auuucucagcuagacgauu

SEQ ID NO: 1344782 - RNA, 19 nt, Artificial Sequence
  Description of Artificial Sequence: Synthetic oligonucleotide
  Sense strand starting at position 2468 of SEQ ID NO: 1242402
cuagcugagaaaugauagu

SEQ ID NO: 1344783 - RNA, 19 nt, Artificial Sequence
  Description of Artificial Sequence: Synthetic oligonucleotide
  Antisense strand to SEQ ID NO: 1344782
acuaucauuucucagcuag

SEQ ID NO: 1344784 - RNA, 19 nt, Artificial Sequence
  Description of Artificial Sequence: Synthetic oligonucleotide
  Sense strand starting at position 2475 of SEQ ID NO: 1242402
agaaaugauaguggcuuga

SEQ ID NO: 1344785 - RNA, 19 nt, Artificial Sequence
  Description of Artificial Sequence: Synthetic oligonucleotide
  Antisense strand to SEQ ID NO: 1344784
ucaagccacuaucauuucu

SEQ ID NO: 1344786 - RNA, 19 nt, Artificial Sequence
  Description of Artificial Sequence: Synthetic oligonucleotide
  Sense strand starting at position 2477 of SEQ ID NO: 1242402
aaaugauaguggcuugaac

SEQ ID NO: 1344787 - RNA, 19 nt, Artificial Sequence
  Description of Artificial Sequence: Synthetic oligonucleotide
  Antisense strand to SEQ ID NO: 1344786
guucaagccacuaucauuu

SEQ ID NO: 1344788 - RNA, 19 nt, Artificial Sequence
  Description of Artificial Sequence: Synthetic oligonucleotide
  Sense strand starting at position 2479 of SEQ ID NO: 1242402
augauaguggcuugaacca

SEQ ID NO: 1344789 - RNA, 19 nt, Artificial Sequence
  Description of Artificial Sequence: Synthetic oligonucleotide
  Antisense strand to SEQ ID NO: 1344788
ugguucaagccacuaucau

SEQ ID NO: 1344790 - RNA, 19 nt, Artificial Sequence
  Description of Artificial Sequence: Synthetic oligonucleotide
  Sense strand starting at position 2516 of SEQ ID NO: 1242402
uggagaguagcugacaguu

SEQ ID NO: 1344791 - RNA, 19 nt, Artificial Sequence
  Description of Artificial Sequence: Synthetic oligonucleotide
  Antisense strand to SEQ ID NO: 1344790
aacugucagcuacucucca

SEQ ID NO: 1344792 - RNA, 19 nt, Artificial Sequence
  Description of Artificial Sequence: Synthetic oligonucleotide
  Sense strand starting at position 2592 of SEQ ID NO: 1242402
gccagagggagcuaucuaa

SEQ ID NO: 1344793 - RNA, 19 nt, Artificial Sequence
  Description of Artificial Sequence: Synthetic oligonucleotide
  Antisense strand to SEQ ID NO: 1344792
uuagauagcucccucuggc

SEQ ID NO: 1344794 - RNA, 19 nt, Artificial Sequence
  Description of Artificial Sequence: Synthetic oligonucleotide
  Sense strand starting at position 2628 of SEQ ID NO: 1242402
caagguaguguuuaaauau

SEQ ID NO: 1344795 - RNA, 19 nt, Artificial Sequence
  Description of Artificial Sequence: Synthetic oligonucleotide
  Antisense strand to SEQ ID NO: 1344794
auauuuaaacacuaccuug

SEQ ID NO: 1344796 - RNA, 19 nt, Artificial Sequence
  Description of Artificial Sequence: Synthetic oligonucleotide
  Sense strand starting at position 2858 of SEQ ID NO: 1242402
cuguauuuggguuguggua

SEQ ID NO: 1344797 - RNA, 19 nt, Artificial Sequence
  Description of Artificial Sequence: Synthetic oligonucleotide
  Antisense strand to SEQ ID NO: 1344796
uaccacaacccaaauacag

SEQ ID NO: 1344798 - RNA, 19 nt, Artificial Sequence
  Description of Artificial Sequence: Synthetic oligonucleotide
  Sense strand starting at position 3254 of SEQ ID NO: 1242402
aauugauaugccuaguaag

SEQ ID NO: 1344799 - RNA, 19 nt, Artificial Sequence
  Description of Artificial Sequence: Synthetic oligonucleotide
  Antisense strand to SEQ ID NO: 1344798
cuuacuaggcauaucaauu

SEQ ID NO: 1344800 - RNA, 19 nt, Artificial Sequence
  Description of Artificial Sequence: Synthetic oligonucleotide
  Sense strand starting at position 3296 of SEQ ID NO: 1242402
aucugauggaacggaguaa

SEQ ID NO: 1344801 - RNA, 19 nt, Artificial Sequence
  Description of Artificial Sequence: Synthetic oligonucleotide
  Antisense strand to SEQ ID NO: 1344800
uuacuccguuccaucagau

SEQ ID NO: 1344802 - RNA, 19 nt, Artificial Sequence
  Description of Artificial Sequence: Synthetic oligonucleotide
  Sense strand starting at position 3332 of SEQ ID NO: 1242402
gugaucuugggucggaaga

SEQ ID NO: 1344803 - RNA, 19 nt, Artificial Sequence
  Description of Artificial Sequence: Synthetic oligonucleotide
  Antisense strand to SEQ ID NO: 1344802
ucuuccgacccaagaucac

SEQ ID NO: 1344804 - RNA, 19 nt, Artificial Sequence
  Description of Artificial Sequence: Synthetic oligonucleotide
  Sense strand starting at position 3333 of SEQ ID NO: 1242402
ugaucuugggucggaagaa

SEQ ID NO: 1344805 - RNA, 19 nt, Artificial Sequence
  Description of Artificial Sequence: Synthetic oligonucleotide
  Antisense strand to SEQ ID NO: 1344804
uucuuccgacccaagauca

SEQ ID NO: 1344806 - RNA, 19 nt, Artificial Sequence
  Description of Artificial Sequence: Synthetic oligonucleotide
  Sense strand starting at position 3377 of SEQ ID NO: 1242402
gggaauugguauccauuau

SEQ ID NO: 1344807 - RNA, 19 nt, Artificial Sequence
  Description of Artificial Sequence: Synthetic oligonucleotide
  Antisense strand to SEQ ID NO: 1344806
auaauggauaccaauuccc

SEQ ID NO: 1344808 - RNA, 19 nt, Artificial Sequence
  Description of Artificial Sequence: Synthetic oligonucleotide
  Sense strand starting at position 3411 of SEQ ID NO: 1242402
ugucauuucuaggaacuag

SEQ ID NO: 1344809 - RNA, 19 nt, Artificial Sequence
  Description of Artificial Sequence: Synthetic oligonucleotide
  Antisense strand to SEQ ID NO: 1344808
cuaguuccuagaaaugaca

SEQ ID NO: 1344810 - RNA, 19 nt, Artificial Sequence
  Description of Artificial Sequence: Synthetic oligonucleotide
  Sense strand starting at position 3794 of SEQ ID NO: 1242402
agccaauugcuauggaaca

SEQ ID NO: 1344811 - RNA, 19 nt, Artificial Sequence
  Description of Artificial Sequence: Synthetic oligonucleotide
  Antisense strand to SEQ ID NO: 1344810
uguuccauagcaauuggcu

SEQ ID NO: 1344812 - RNA, 19 nt, Artificial Sequence
  Description of Artificial Sequence: Synthetic oligonucleotide
  Sense strand starting at position 3858 of SEQ ID NO: 1242402
aucgauuacuuugcaauga

SEQ ID NO: 1344813 - RNA, 19 nt, Artificial Sequence
  Description of Artificial Sequence: Synthetic oligonucleotide
  Antisense strand to SEQ ID NO: 1344812
ucauugcaaaguaaucgau

SEQ ID NO: 1344814 - RNA, 19 nt, Artificial Sequence
  Description of Artificial Sequence: Synthetic oligonucleotide
  Sense strand starting at position 3869 of SEQ ID NO: 1242402
ugcaaugaauggucuugaa

SEQ ID NO: 1344815 - RNA, 19 nt, Artificial Sequence
  Description of Artificial Sequence: Synthetic oligonucleotide
  Antisense strand to SEQ ID NO: 1344814
uucaagaccauucauugca

SEQ ID NO: 1344816 - RNA, 19 nt, Artificial Sequence
  Description of Artificial Sequence: Synthetic oligonucleotide
  Sense strand starting at position 3908 of SEQ ID NO: 1242402
auaugcuuggucuaaacaa

SEQ ID NO: 1344817 - RNA, 19 nt, Artificial Sequence
  Description of Artificial Sequence: Synthetic oligonucleotide
  Antisense strand to SEQ ID NO: 1344816
uuguuuagaccaagcauau

SEQ ID NO: 1344818 - RNA, 19 nt, Artificial Sequence
  Description of Artificial Sequence: Synthetic oligonucleotide
  Sense strand starting at position 298 of SEQ ID NO: 1242403
gggauagugauauguuauc

SEQ ID NO: 1344819 - RNA, 19 nt, Artificial Sequence
  Description of Artificial Sequence: Synthetic oligonucleotide
  Antisense strand to SEQ ID NO: 1344818
gauaacauaucacuauccc

SEQ ID NO: 1344820 - RNA, 19 nt, Artificial Sequence
  Description of Artificial Sequence: Synthetic oligonucleotide
  Sense strand starting at position 343 of SEQ ID NO: 1242403
uagggcuuagcacagaaau

SEQ ID NO: 1344821 - RNA, 19 nt, Artificial Sequence
  Description of Artificial Sequence: Synthetic oligonucleotide
  Antisense strand to SEQ ID NO: 1344820
auuucugugcuaagcccua

SEQ ID NO: 1344822 - RNA, 19 nt, Artificial Sequence
  Description of Artificial Sequence: Synthetic oligonucleotide
  Sense strand starting at position 445 of SEQ ID NO: 1242403
cuucuuacugacugagaga

SEQ ID NO: 1344823 - RNA, 19 nt, Artificial Sequence
  Description of Artificial Sequence: Synthetic oligonucleotide
  Antisense strand to SEQ ID NO: 1344822
ucucucagucaguaagaag

SEQ ID NO: 1344824 - RNA, 19 nt, Artificial Sequence
  Description of Artificial Sequence: Synthetic oligonucleotide
  Sense strand starting at position 555 of SEQ ID NO: 1242403
cugaccuugucaucacuua

SEQ ID NO: 1344825 - RNA, 19 nt, Artificial Sequence
  Description of Artificial Sequence: Synthetic oligonucleotide
  Antisense strand to SEQ ID NO: 1344824
uaagugaugacaaggucag

SEQ ID NO: 1344826 - RNA, 19 nt, Artificial Sequence
  Description of Artificial Sequence: Synthetic oligonucleotide
  Sense strand starting at position 584 of SEQ ID NO: 1242403
ucaagucuggcugaaaugu

SEQ ID NO: 1344827 - RNA, 19 nt, Artificial Sequence
  Description of Artificial Sequence: Synthetic oligonucleotide
  Antisense strand to SEQ ID NO: 1344826
acauuucagccagacuuga

SEQ ID NO: 1344828 - RNA, 19 nt, Artificial Sequence
  Description of Artificial Sequence: Synthetic oligonucleotide
  Sense strand starting at position 595 of SEQ ID NO: 1242403
ugaaauguggcaggagcua

SEQ ID NO: 1344829 - RNA, 19 nt, Artificial Sequence
  Description of Artificial Sequence: Synthetic oligonucleotide
  Antisense strand to SEQ ID NO: 1344828
uagcuccugccacauuuca

SEQ ID NO: 1344830 - RNA, 19 nt, Artificial Sequence
  Description of Artificial Sequence: Synthetic oligonucleotide
  Sense strand starting at position 623 of SEQ ID NO: 1242403
cugaaagggucacuauugu

SEQ ID NO: 1344831 - RNA, 19 nt, Artificial Sequence
  Description of Artificial Sequence: Synthetic oligonucleotide
  Antisense strand to SEQ ID NO: 1344830
acaauagugacccuuucag

SEQ ID NO: 1344832 - RNA, 19 nt, Artificial Sequence
  Description of Artificial Sequence: Synthetic oligonucleotide
  Sense strand starting at position 716 of SEQ ID NO: 1242403
caccuuuguucugcaggga

SEQ ID NO: 1344833 - RNA, 19 nt, Artificial Sequence
  Description of Artificial Sequence: Synthetic oligonucleotide
  Antisense strand to SEQ ID NO: 1344832
ucccugcagaacaaaggug

SEQ ID NO: 1344834 - RNA, 19 nt, Artificial Sequence
  Description of Artificial Sequence: Synthetic oligonucleotide
  Sense strand starting at position 777 of SEQ ID NO: 1242403
ugaagccugccucauuaga

SEQ ID NO: 1344835 - RNA, 19 nt, Artificial Sequence
  Description of Artificial Sequence: Synthetic oligonucleotide
  Antisense strand to SEQ ID NO: 1344834
ucuaaugaggcaggcuuca

SEQ ID NO: 1344836 - RNA, 19 nt, Artificial Sequence
  Description of Artificial Sequence: Synthetic oligonucleotide
  Sense strand starting at position 822 of SEQ ID NO: 1242403
agaagugacuuucccauga

SEQ ID NO: 1344837 - RNA, 19 nt, Artificial Sequence
  Description of Artificial Sequence: Synthetic oligonucleotide
  Antisense strand to SEQ ID NO: 1344836
ucaugggaaagucacuucu

SEQ ID NO: 1344838 - RNA, 19 nt, Artificial Sequence
  Description of Artificial Sequence: Synthetic oligonucleotide
  Sense strand starting at position 826 of SEQ ID NO: 1242403
gugacuuucccaugaucac

SEQ ID NO: 1344839 - RNA, 19 nt, Artificial Sequence
  Description of Artificial Sequence: Synthetic oligonucleotide
  Antisense strand to SEQ ID NO: 1344838
gugaucaugggaaagucac

SEQ ID NO: 1344840 - RNA, 19 nt, Artificial Sequence
  Description of Artificial Sequence: Synthetic oligonucleotide
  Sense strand starting at position 892 of SEQ ID NO: 1242403
agaguucgcacucaagauc

SEQ ID NO: 1344841 - RNA, 19 nt, Artificial Sequence
  Description of Artificial Sequence: Synthetic oligonucleotide
  Antisense strand to SEQ ID NO: 1344840
gaucuugagugcgaacucu

SEQ ID NO: 1344842 - RNA, 19 nt, Artificial Sequence
  Description of Artificial Sequence: Synthetic oligonucleotide
  Sense strand starting at position 942 of SEQ ID NO: 1242403
ugauuaagagcuuggaauu

SEQ ID NO: 1344843 - RNA, 19 nt, Artificial Sequence
  Description of Artificial Sequence: Synthetic oligonucleotide
  Antisense strand to SEQ ID NO: 1344842
aauuccaagcucuuaauca

SEQ ID NO: 1344844 - RNA, 19 nt, Artificial Sequence
  Description of Artificial Sequence: Synthetic oligonucleotide
  Sense strand starting at position 963 of SEQ ID NO: 1242403
gagauagauggcugggcau

SEQ ID NO: 1344845 - RNA, 19 nt, Artificial Sequence
  Description of Artificial Sequence: Synthetic oligonucleotide
  Antisense strand to SEQ ID NO: 1344844
augcccagccaucuaucuc

SEQ ID NO: 1344846 - RNA, 19 nt, Artificial Sequence
  Description of Artificial Sequence: Synthetic oligonucleotide
  Sense strand starting at position 965 of SEQ ID NO: 1242403
gauagauggcugggcauga

SEQ ID NO: 1344847 - RNA, 19 nt, Artificial Sequence
  Description of Artificial Sequence: Synthetic oligonucleotide
  Antisense strand to SEQ ID NO: 1344846
ucaugcccagccaucuauc

SEQ ID NO: 1344848 - RNA, 19 nt, Artificial Sequence
  Description of Artificial Sequence: Synthetic oligonucleotide
  Sense strand starting at position 2165 of SEQ ID NO: 1242403
uugugaccgaaguacuuua

SEQ ID NO: 1344849 - RNA, 19 nt, Artificial Sequence
  Description of Artificial Sequence: Synthetic oligonucleotide
  Antisense strand to SEQ ID NO: 1344848
uaaaguacuucggucacaa

SEQ ID NO: 1344850 - RNA, 19 nt, Artificial Sequence
  Description of Artificial Sequence: Synthetic oligonucleotide
  Sense strand starting at position 2198 of SEQ ID NO: 1242403
gguuucuuuaaauggugau

SEQ ID NO: 1344851 - RNA, 19 nt, Artificial Sequence
  Description of Artificial Sequence: Synthetic oligonucleotide
  Antisense strand to SEQ ID NO: 1344850
aucaccauuuaaagaaacc

SEQ ID NO: 1344852 - RNA, 19 nt, Artificial Sequence
  Description of Artificial Sequence: Synthetic oligonucleotide
  Sense strand starting at position 2284 of SEQ ID NO: 1242403
ccacuaauagaauggcuua

SEQ ID NO: 1344853 - RNA, 19 nt, Artificial Sequence
  Description of Artificial Sequence: Synthetic oligonucleotide
  Antisense strand to SEQ ID NO: 1344852
uaagccauucuauuagugg

SEQ ID NO: 1344854 - RNA, 19 nt, Artificial Sequence
  Description of Artificial Sequence: Synthetic oligonucleotide
  Sense strand starting at position 2297 of SEQ ID NO: 1242403
ggcuuauggagaugacacu

SEQ ID NO: 1344855 - RNA, 19 nt, Artificial Sequence
  Description of Artificial Sequence: Synthetic oligonucleotide
  Antisense strand to SEQ ID NO: 1344854
agugucaucuccauaagcc

SEQ ID NO: 1344856 - RNA, 19 nt, Artificial Sequence
  Description of Artificial Sequence: Synthetic oligonucleotide
  Sense strand starting at position 2303 of SEQ ID NO: 1242403
uggagaugacacuguuauu

SEQ ID NO: 1344857 - RNA, 19 nt, Artificial Sequence
  Description of Artificial Sequence: Synthetic oligonucleotide
  Antisense strand to SEQ ID NO: 1344856
aauaacagugucaucucca

SEQ ID NO: 1344858 - RNA, 19 nt, Artificial Sequence
  Description of Artificial Sequence: Synthetic oligonucleotide
  Sense strand starting at position 2315 of SEQ ID NO: 1242403
uguuauuaccgauaaagug

SEQ ID NO: 1344859 - RNA, 19 nt, Artificial Sequence
  Description of Artificial Sequence: Synthetic oligonucleotide
  Antisense strand to SEQ ID NO: 1344858
cacuuuaucgguaauaaca

SEQ ID NO: 1344860 - RNA, 19 nt, Artificial Sequence
  Description of Artificial Sequence: Synthetic oligonucleotide
  Sense strand starting at position 2323 of SEQ ID NO: 1242403
ccgauaaagugccuuauaa

SEQ ID NO: 1344861 - RNA, 19 nt, Artificial Sequence
  Description of Artificial Sequence: Synthetic oligonucleotide
  Antisense strand to SEQ ID NO: 1344860
uuauaaggcacuuuaucgg

SEQ ID NO: 1344862 - RNA, 19 nt, Artificial Sequence
  Description of Artificial Sequence: Synthetic oligonucleotide
  Sense strand starting at position 2362 of SEQ ID NO: 1242403
uuauuaauagcggguacca

SEQ ID NO: 1344863 - RNA, 19 nt, Artificial Sequence
  Description of Artificial Sequence: Synthetic oligonucleotide
  Antisense strand to SEQ ID NO: 1344862
ugguacccgcuauuaauaa

SEQ ID NO: 1344864 - RNA, 19 nt, Artificial Sequence
  Description of Artificial Sequence: Synthetic oligonucleotide
  Sense strand starting at position 2516 of SEQ ID NO: 1242403
aacagaaaugccuguggca

SEQ ID NO: 1344865 - RNA, 19 nt, Artificial Sequence
  Description of Artificial Sequence: Synthetic oligonucleotide
  Antisense strand to SEQ ID NO: 1344864
ugccacaggcauuucuguu

SEQ ID NO: 1344866 - RNA, 19 nt, Artificial Sequence
  Description of Artificial Sequence: Synthetic oligonucleotide
  Sense strand starting at position 2711 of SEQ ID NO: 1242403
uucccucauguugaaaguu

SEQ ID NO: 1344867 - RNA, 19 nt, Artificial Sequence
  Description of Artificial Sequence: Synthetic oligonucleotide
  Antisense strand to SEQ ID NO: 1344866
aacuuucaacaugagggaa

SEQ ID NO: 1344868 - RNA, 19 nt, Artificial Sequence
  Description of Artificial Sequence: Synthetic oligonucleotide
  Sense strand starting at position 2768 of SEQ ID NO: 1242403
ggcucugucagagaauagu

SEQ ID NO: 1344869 - RNA, 19 nt, Artificial Sequence
  Description of Artificial Sequence: Synthetic oligonucleotide
  Antisense strand to SEQ ID NO: 1344868
acuauucucugacagagcc

SEQ ID NO: 1344870 - RNA, 19 nt, Artificial Sequence
  Description of Artificial Sequence: Synthetic oligonucleotide
  Sense strand starting at position 2798 of SEQ ID NO: 1242403
gacauugaguaagugguau

SEQ ID NO: 1344871 - RNA, 19 nt, Artificial Sequence
  Description of Artificial Sequence: Synthetic oligonucleotide
  Antisense strand to SEQ ID NO: 1344870
auaccacuuacucaauguc

SEQ ID NO: 1344872 - RNA, 19 nt, Artificial Sequence
  Description of Artificial Sequence: Synthetic oligonucleotide
  Sense strand starting at position 2811 of SEQ ID NO: 1242403
ugguauuggcaugacucaa

SEQ ID NO: 1344873 - RNA, 19 nt, Artificial Sequence
  Description of Artificial Sequence: Synthetic oligonucleotide
  Antisense strand to SEQ ID NO: 1344872
uugagucaugccaauacca

SEQ ID NO: 1344874 - RNA, 19 nt, Artificial Sequence
  Description of Artificial Sequence: Synthetic oligonucleotide
  Sense strand starting at position 2896 of SEQ ID NO: 1242403
agugaaugcucacuacuug

SEQ ID NO: 1344875 - RNA, 19 nt, Artificial Sequence
  Description of Artificial Sequence: Synthetic oligonucleotide
  Antisense strand to SEQ ID NO: 1344874
caaguagugagcauucacu

SEQ ID NO: 1344876 - RNA, 19 nt, Artificial Sequence
  Description of Artificial Sequence: Synthetic oligonucleotide
  Sense strand starting at position 2928 of SEQ ID NO: 1242403
ucaggaucuaaguaguguu

SEQ ID NO: 1344877 - RNA, 19 nt, Artificial Sequence
  Description of Artificial Sequence: Synthetic oligonucleotide
  Antisense strand to SEQ ID NO: 1344876
aacacuacuuagauccuga

SEQ ID NO: 1344878 - RNA, 19 nt, Artificial Sequence
  Description of Artificial Sequence: Synthetic oligonucleotide
  Sense strand starting at position 2981 of SEQ ID NO: 1242403
cuaucuuaauuugauacga

SEQ ID NO: 1344879 - RNA, 19 nt, Artificial Sequence
  Description of Artificial Sequence: Synthetic oligonucleotide
  Antisense strand to SEQ ID NO: 1344878
ucguaucaaauuaagauag

SEQ ID NO: 1344880 - RNA, 19 nt, Artificial Sequence
  Description of Artificial Sequence: Synthetic oligonucleotide
  Sense strand starting at position 3040 of SEQ ID NO: 1242403
ggagcuucccuauguuaca

SEQ ID NO: 1344881 - RNA, 19 nt, Artificial Sequence
  Description of Artificial Sequence: Synthetic oligonucleotide
  Antisense strand to SEQ ID NO: 1344880
uguaacauagggaagcucc

SEQ ID NO: 1344882 - RNA, 19 nt, Artificial Sequence
  Description of Artificial Sequence: Synthetic oligonucleotide
  Sense strand starting at position 3119 of SEQ ID NO: 1242403
agggaagcuuaggugaauu

SEQ ID NO: 1344883 - RNA, 19 nt, Artificial Sequence
  Description of Artificial Sequence: Synthetic oligonucleotide
  Antisense strand to SEQ ID NO: 1344882
aauucaccuaagcuucccu

SEQ ID NO: 1344884 - RNA, 19 nt, Artificial Sequence
  Description of Artificial Sequence: Synthetic oligonucleotide
  Sense strand starting at position 3137 of SEQ ID NO: 1242403
ugagacagccgguaaguaa

SEQ ID NO: 1344885 - RNA, 19 nt, Artificial Sequence
  Description of Artificial Sequence: Synthetic oligonucleotide
  Antisense strand to SEQ ID NO: 1344884
uuacuuaccggcugucuca

SEQ ID NO: 1344886 - RNA, 19 nt, Artificial Sequence
  Description of Artificial Sequence: Synthetic oligonucleotide
  Sense strand starting at position 3236 of SEQ ID NO: 1242403
ccuccuauucucuagguuu

SEQ ID NO: 1344887 - RNA, 19 nt, Artificial Sequence
  Description of Artificial Sequence: Synthetic oligonucleotide
  Antisense strand to SEQ ID NO: 1344886
aaaccuagagaauaggagg

SEQ ID NO: 1344888 - RNA, 19 nt, Artificial Sequence
  Description of Artificial Sequence: Synthetic oligonucleotide
  Sense strand starting at position 3595 of SEQ ID NO: 1242403
uggcuaaucgcuucugugu

SEQ ID NO: 1344889 - RNA, 19 nt, Artificial Sequence
  Description of Artificial Sequence: Synthetic oligonucleotide
  Antisense strand to SEQ ID NO: 1344888
acacagaagcgauuagcca

SEQ ID NO: 1344890 - RNA, 19 nt, Artificial Sequence
  Description of Artificial Sequence: Synthetic oligonucleotide
  Sense strand starting at position 3596 of SEQ ID NO: 1242403
ggcuaaucgcuucugugua

SEQ ID NO: 1344891 - RNA, 19 nt, Artificial Sequence
  Description of Artificial Sequence: Synthetic oligonucleotide
  Antisense strand to SEQ ID NO: 1344890
uacacagaagcgauuagcc

SEQ ID NO: 1344892 - RNA, 19 nt, Artificial Sequence
  Description of Artificial Sequence: Synthetic oligonucleotide
  Sense strand starting at position 3668 of SEQ ID NO: 1242403
gcuagauuaccacaagggu

SEQ ID NO: 1344893 - RNA, 19 nt, Artificial Sequence
  Description of Artificial Sequence: Synthetic oligonucleotide
  Antisense strand to SEQ ID NO: 1344892
acccuugugguaaucuagc

SEQ ID NO: 1344894 - RNA, 19 nt, Artificial Sequence
  Description of Artificial Sequence: Synthetic oligonucleotide
  Sense strand starting at position 3705 of SEQ ID NO: 1242403
uucugaggaucacuuuaac

SEQ ID NO: 1344895 - RNA, 19 nt, Artificial Sequence
  Description of Artificial Sequence: Synthetic oligonucleotide
  Antisense strand to SEQ ID NO: 1344894
guuaaagugauccucagaa

SEQ ID NO: 1344896 - RNA, 19 nt, Artificial Sequence
  Description of Artificial Sequence: Synthetic oligonucleotide
  Sense strand starting at position 3781 of SEQ ID NO: 1242403
uaaguaguaacuggagagu

SEQ ID NO: 1344897 - RNA, 19 nt, Artificial Sequence
  Description of Artificial Sequence: Synthetic oligonucleotide
  Antisense strand to SEQ ID NO: 1344896
acucuccaguuacuacuua

SEQ ID NO: 1344898 - RNA, 19 nt, Artificial Sequence
  Description of Artificial Sequence: Synthetic oligonucleotide
  Sense strand starting at position 159 of SEQ ID NO: 1242404
cugcuucuccaucagagau

SEQ ID NO: 1344899 - RNA, 19 nt, Artificial Sequence
  Description of Artificial Sequence: Synthetic oligonucleotide
  Antisense strand to SEQ ID NO: 1344898
aucucugauggagaagcag

SEQ ID NO: 1344900 - RNA, 19 nt, Artificial Sequence
  Description of Artificial Sequence: Synthetic oligonucleotide
  Sense strand starting at position 246 of SEQ ID NO: 1242404
ggaagccaccuaugugauu

SEQ ID NO: 1344901 - RNA, 19 nt, Artificial Sequence
  Description of Artificial Sequence: Synthetic oligonucleotide
  Antisense strand to SEQ ID NO: 1344900
aaucacauagguggcuucc

SEQ ID NO: 1344902 - RNA, 19 nt, Artificial Sequence
  Description of Artificial Sequence: Synthetic oligonucleotide
  Sense strand starting at position 247 of SEQ ID NO: 1242404
gaagccaccuaugugauua

SEQ ID NO: 1344903 - RNA, 19 nt, Artificial Sequence
  Description of Artificial Sequence: Synthetic oligonucleotide
  Antisense strand to SEQ ID NO: 1344902
uaaucacauagguggcuuc

SEQ ID NO: 1344904 - RNA, 19 nt, Artificial Sequence
  Description of Artificial Sequence: Synthetic oligonucleotide
  Sense strand starting at position 455 of SEQ ID NO: 1242404
guguuucaggucugucaag

SEQ ID NO: 1344905 - RNA, 19 nt, Artificial Sequence
  Description of Artificial Sequence: Synthetic oligonucleotide
  Antisense strand to SEQ ID NO: 1344904
cuugacagaccugaaacac

SEQ ID NO: 1344906 - RNA, 19 nt, Artificial Sequence
  Description of Artificial Sequence: Synthetic oligonucleotide
  Sense strand starting at position 554 of SEQ ID NO: 1242404
agggcugaaugcuuuaguu

SEQ ID NO: 1344907 - RNA, 19 nt, Artificial Sequence
  Description of Artificial Sequence: Synthetic oligonucleotide
  Antisense strand to SEQ ID NO: 1344906
aacuaaagcauucagcccu

SEQ ID NO: 1344908 - RNA, 19 nt, Artificial Sequence
  Description of Artificial Sequence: Synthetic oligonucleotide
  Sense strand starting at position 708 of SEQ ID NO: 1242404
uuggaaguuuggagaggau

SEQ ID NO: 1344909 - RNA, 19 nt, Artificial Sequence
  Description of Artificial Sequence: Synthetic oligonucleotide
  Antisense strand to SEQ ID NO: 1344908
auccucuccaaacuuccaa

SEQ ID NO: 1344910 - RNA, 19 nt, Artificial Sequence
  Description of Artificial Sequence: Synthetic oligonucleotide
  Sense strand starting at position 790 of SEQ ID NO: 1242404
gcauuacaaguguaucauu

SEQ ID NO: 1344911 - RNA, 19 nt, Artificial Sequence
  Description of Artificial Sequence: Synthetic oligonucleotide
  Antisense strand to SEQ ID NO: 1344910
aaugauacacuuguaaugc

SEQ ID NO: 1344912 - RNA, 19 nt, Artificial Sequence
  Description of Artificial Sequence: Synthetic oligonucleotide
  Sense strand starting at position 795 of SEQ ID NO: 1242404
acaaguguaucauuaaaca

SEQ ID NO: 1344913 - RNA, 19 nt, Artificial Sequence
  Description of Artificial Sequence: Synthetic oligonucleotide
  Antisense strand to SEQ ID NO: 1344912
uguuuaaugauacacuugu

SEQ ID NO: 1344914 - RNA, 19 nt, Artificial Sequence
  Description of Artificial Sequence: Synthetic oligonucleotide
  Sense strand starting at position 1338 of SEQ ID NO: 1242404
gcccauguguuaccuugau

SEQ ID NO: 1344915 - RNA, 19 nt, Artificial Sequence
  Description of Artificial Sequence: Synthetic oligonucleotide
  Antisense strand to SEQ ID NO: 1344914
aucaagguaacacaugggc

SEQ ID NO: 1344916 - RNA, 19 nt, Artificial Sequence
  Description of Artificial Sequence: Synthetic oligonucleotide
  Sense strand starting at position 1342 of SEQ ID NO: 1242404
auguguuaccuugauugaa

SEQ ID NO: 1344917 - RNA, 19 nt, Artificial Sequence
  Description of Artificial Sequence: Synthetic oligonucleotide
  Antisense strand to SEQ ID NO: 1344916
uucaaucaagguaacacau

SEQ ID NO: 1344918 - RNA, 19 nt, Artificial Sequence
  Description of Artificial Sequence: Synthetic oligonucleotide
  Sense strand starting at position 1371 of SEQ ID NO: 1242404
agagcaagacucuaccuuu

SEQ ID NO: 1344919 - RNA, 19 nt, Artificial Sequence
  Description of Artificial Sequence: Synthetic oligonucleotide
  Antisense strand to SEQ ID NO: 1344918
aaagguagagucuugcucu

SEQ ID NO: 1344920 - RNA, 19 nt, Artificial Sequence
  Description of Artificial Sequence: Synthetic oligonucleotide
  Sense strand starting at position 2024 of SEQ ID NO: 1242404
gauuuaaugggcugugugu

SEQ ID NO: 1344921 - RNA, 19 nt, Artificial Sequence
  Description of Artificial Sequence: Synthetic oligonucleotide
  Antisense strand to SEQ ID NO: 1344920
acacacagcccauuaaauc

SEQ ID NO: 1344922 - RNA, 19 nt, Artificial Sequence
  Description of Artificial Sequence: Synthetic oligonucleotide
  Sense strand starting at position 2114 of SEQ ID NO: 1242404
ucuggugguggguaauaga

SEQ ID NO: 1344923 - RNA, 19 nt, Artificial Sequence
  Description of Artificial Sequence: Synthetic oligonucleotide
  Antisense strand to SEQ ID NO: 1344922
ucuauuacccaccaccaga

SEQ ID NO: 1344924 - RNA, 19 nt, Artificial Sequence
  Description of Artificial Sequence: Synthetic oligonucleotide
  Sense strand starting at position 2200 of SEQ ID NO: 1242404
gcaggugucauugcuguca

SEQ ID NO: 1344925 - RNA, 19 nt, Artificial Sequence
  Description of Artificial Sequence: Synthetic oligonucleotide
  Antisense strand to SEQ ID NO: 1344924
ugacagcaaugacaccugc

SEQ ID NO: 1344926 - RNA, 19 nt, Artificial Sequence
  Description of Artificial Sequence: Synthetic oligonucleotide
  Sense strand starting at position 2509 of SEQ ID NO: 1242404
guggccuguuuccuaagga

SEQ ID NO: 1344927 - RNA, 19 nt, Artificial Sequence
  Description of Artificial Sequence: Synthetic oligonucleotide
  Antisense strand to SEQ ID NO: 1344926
uccuuaggaaacaggccac

SEQ ID NO: 1344928 - RNA, 19 nt, Artificial Sequence
  Description of Artificial Sequence: Synthetic oligonucleotide
  Sense strand starting at position 2838 of SEQ ID NO: 1242404
uuuauaaguagugagugaa

SEQ ID NO: 1344929 - RNA, 19 nt, Artificial Sequence
  Description of Artificial Sequence: Synthetic oligonucleotide
  Antisense strand to SEQ ID NO: 1344928
uucacucacuacuuauaaa

SEQ ID NO: 1344930 - RNA, 19 nt, Artificial Sequence
  Description of Artificial Sequence: Synthetic oligonucleotide
  Sense strand starting at position 2841 of SEQ ID NO: 1242404
auaaguagugagugaaaca

SEQ ID NO: 1344931 - RNA, 19 nt, Artificial Sequence
  Description of Artificial Sequence: Synthetic oligonucleotide
  Antisense strand to SEQ ID NO: 1344930
uguuucacucacuacuuau

SEQ ID NO: 1344932 - RNA, 19 nt, Artificial Sequence
  Description of Artificial Sequence: Synthetic oligonucleotide
  Sense strand starting at position 2871 of SEQ ID NO: 1242404
caagaacugucagaagagu

SEQ ID NO: 1344933 - RNA, 19 nt, Artificial Sequence
  Description of Artificial Sequence: Synthetic oligonucleotide
  Antisense strand to SEQ ID NO: 1344932
acucuucugacaguucuug

SEQ ID NO: 1344934 - RNA, 19 nt, Artificial Sequence
  Description of Artificial Sequence: Synthetic oligonucleotide
  Sense strand starting at position 2882 of SEQ ID NO: 1242404
agaagaguugcucagcaau

SEQ ID NO: 1344935 - RNA, 19 nt, Artificial Sequence
  Description of Artificial Sequence: Synthetic oligonucleotide
  Antisense strand to SEQ ID NO: 1344934
auugcugagcaacucuucu

SEQ ID NO: 1344936 - RNA, 19 nt, Artificial Sequence
  Description of Artificial Sequence: Synthetic oligonucleotide
  Sense strand starting at position 2884 of SEQ ID NO: 1242404
aagaguugcucagcaaucu

SEQ ID NO: 1344937 - RNA, 19 nt, Artificial Sequence
  Description of Artificial Sequence: Synthetic oligonucleotide
  Antisense strand to SEQ ID NO: 1344936
agauugcugagcaacucuu

SEQ ID NO: 1344938 - RNA, 19 nt, Artificial Sequence
  Description of Artificial Sequence: Synthetic oligonucleotide
  Sense strand starting at position 2968 of SEQ ID NO: 1242404
cauugcaucgauucgugua

SEQ ID NO: 1344939 - RNA, 19 nt, Artificial Sequence
  Description of Artificial Sequence: Synthetic oligonucleotide
  Antisense strand to SEQ ID NO: 1344938
uacacgaaucgaugcaaug

SEQ ID NO: 1344940 - RNA, 19 nt, Artificial Sequence
  Description of Artificial Sequence: Synthetic oligonucleotide
  Sense strand starting at position 2973 of SEQ ID NO: 1242404
caucgauucguguauccaa

SEQ ID NO: 1344941 - RNA, 19 nt, Artificial Sequence
  Description of Artificial Sequence: Synthetic oligonucleotide
  Antisense strand to SEQ ID NO: 1344940
uuggauacacgaaucgaug

SEQ ID NO: 1344942 - RNA, 19 nt, Artificial Sequence
  Description of Artificial Sequence: Synthetic oligonucleotide
  Sense strand starting at position 3009 of SEQ ID NO: 1242404
aggcuuaucacucgucaag

SEQ ID NO: 1344943 - RNA, 19 nt, Artificial Sequence
  Description of Artificial Sequence: Synthetic oligonucleotide
  Antisense strand to SEQ ID NO: 1344942
cuugacgagugauaagccu

SEQ ID NO: 1344944 - RNA, 19 nt, Artificial Sequence
  Description of Artificial Sequence: Synthetic oligonucleotide
  Sense strand starting at position 3021 of SEQ ID NO: 1242404
cgucaaguuccaugaacau

SEQ ID NO: 1344945 - RNA, 19 nt, Artificial Sequence
  Description of Artificial Sequence: Synthetic oligonucleotide
  Antisense strand to SEQ ID NO: 1344944
auguucauggaacuugacg

SEQ ID NO: 1344946 - RNA, 19 nt, Artificial Sequence
  Description of Artificial Sequence: Synthetic oligonucleotide
  Sense strand starting at position 3056 of SEQ ID NO: 1242404
ucuccuaaaccugggauga

SEQ ID NO: 1344947 - RNA, 19 nt, Artificial Sequence
  Description of Artificial Sequence: Synthetic oligonucleotide
  Antisense strand to SEQ ID NO: 1344946
ucaucccagguuuaggaga

SEQ ID NO: 1344948 - RNA, 19 nt, Artificial Sequence
  Description of Artificial Sequence: Synthetic oligonucleotide
  Sense strand starting at position 3057 of SEQ ID NO: 1242404
cuccuaaaccugggaugau

SEQ ID NO: 1344949 - RNA, 19 nt, Artificial Sequence
  Description of Artificial Sequence: Synthetic oligonucleotide
  Antisense strand to SEQ ID NO: 1344948
aucaucccagguuuaggag

SEQ ID NO: 1344950 - RNA, 19 nt, Artificial Sequence
  Description of Artificial Sequence: Synthetic oligonucleotide
  Sense strand starting at position 3058 of SEQ ID NO: 1242404
uccuaaaccugggaugauu

SEQ ID NO: 1344951 - RNA, 19 nt, Artificial Sequence
  Description of Artificial Sequence: Synthetic oligonucleotide
  Antisense strand to SEQ ID NO: 1344950
aaucaucccagguuuagga

SEQ ID NO: 1344952 - RNA, 19 nt, Artificial Sequence
  Description of Artificial Sequence: Synthetic oligonucleotide
  Sense strand starting at position 3067 of SEQ ID NO: 1242404
ugggaugauuggcagaaag

SEQ ID NO: 1344953 - RNA, 19 nt, Artificial Sequence
  Description of Artificial Sequence: Synthetic oligonucleotide
  Antisense strand to SEQ ID NO: 1344952
cuuucugccaaucauccca

SEQ ID NO: 1344954 - RNA, 19 nt, Artificial Sequence
  Description of Artificial Sequence: Synthetic oligonucleotide
  Sense strand starting at position 3106 of SEQ ID NO: 1242404
uucugcauuuggcauugaa

SEQ ID NO: 1344955 - RNA, 19 nt, Artificial Sequence
  Description of Artificial Sequence: Synthetic oligonucleotide
  Antisense strand to SEQ ID NO: 1344954
uucaaugccaaaugcagaa

SEQ ID NO: 1344956 - RNA, 19 nt, Artificial Sequence
  Description of Artificial Sequence: Synthetic oligonucleotide
  Sense strand starting at position 3134 of SEQ ID NO: 1242404
ucccguagucuguaguaga

SEQ ID NO: 1344957 - RNA, 19 nt, Artificial Sequence
  Description of Artificial Sequence: Synthetic oligonucleotide
  Antisense strand to SEQ ID NO: 1344956
ucuacuacagacuacggga

SEQ ID NO: 1344958 - RNA, 19 nt, Artificial Sequence
  Description of Artificial Sequence: Synthetic oligonucleotide
  Sense strand starting at position 3139 of SEQ ID NO: 1242404
uagucuguaguagaaauau

SEQ ID NO: 1344959 - RNA, 19 nt, Artificial Sequence
  Description of Artificial Sequence: Synthetic oligonucleotide
  Antisense strand to SEQ ID NO: 1344958
auauuucuacuacagacua

SEQ ID NO: 1344960 - RNA, 19 nt, Artificial Sequence
  Description of Artificial Sequence: Synthetic oligonucleotide
  Sense strand starting at position 3148 of SEQ ID NO: 1242404
guagaaauauuggaaagua

SEQ ID NO: 1344961 - RNA, 19 nt, Artificial Sequence
  Description of Artificial Sequence: Synthetic oligonucleotide
  Antisense strand to SEQ ID NO: 1344960
uacuuuccaauauuucuac

SEQ ID NO: 1344962 - RNA, 19 nt, Artificial Sequence
  Description of Artificial Sequence: Synthetic oligonucleotide
  Sense strand starting at position 3488 of SEQ ID NO: 1242404
auacucuuugcuugugacu

SEQ ID NO: 1344963 - RNA, 19 nt, Artificial Sequence
  Description of Artificial Sequence: Synthetic oligonucleotide
  Antisense strand to SEQ ID NO: 1344962
agucacaagcaaagaguau

SEQ ID NO: 1344964 - RNA, 19 nt, Artificial Sequence
  Description of Artificial Sequence: Synthetic oligonucleotide
  Sense strand starting at position 3659 of SEQ ID NO: 1242404
aacgguuuccgauauaguu

SEQ ID NO: 1344965 - RNA, 19 nt, Artificial Sequence
  Description of Artificial Sequence: Synthetic oligonucleotide
  Antisense strand to SEQ ID NO: 1344964
aacuauaucggaaaccguu

SEQ ID NO: 1344966 - RNA, 19 nt, Artificial Sequence
  Description of Artificial Sequence: Synthetic oligonucleotide
  Sense strand starting at position 3661 of SEQ ID NO: 1242404
cgguuuccgauauaguuua

SEQ ID NO: 1344967 - RNA, 19 nt, Artificial Sequence
  Description of Artificial Sequence: Synthetic oligonucleotide
  Antisense strand to SEQ ID NO: 1344966
uaaacuauaucggaaaccg

SEQ ID NO: 1344968 - RNA, 19 nt, Artificial Sequence
  Description of Artificial Sequence: Synthetic oligonucleotide
  Sense strand starting at position 3702 of SEQ ID NO: 1242404
ugagaacaucugggcacau

SEQ ID NO: 1344969 - RNA, 19 nt, Artificial Sequence
  Description of Artificial Sequence: Synthetic oligonucleotide
  Antisense strand to SEQ ID NO: 1344968
augugcccagauguucuca

SEQ ID NO: 1344970 - RNA, 19 nt, Artificial Sequence
  Description of Artificial Sequence: Synthetic oligonucleotide
  Sense strand starting at position 3713 of SEQ ID NO: 1242404
gggcacauguggucaucau

SEQ ID NO: 1344971 - RNA, 19 nt, Artificial Sequence
  Description of Artificial Sequence: Synthetic oligonucleotide
  Antisense strand to SEQ ID NO: 1344970
augaugaccacaugugccc

SEQ ID NO: 1344972 - RNA, 19 nt, Artificial Sequence
  Description of Artificial Sequence: Synthetic oligonucleotide
  Sense strand starting at position 3717 of SEQ ID NO: 1242404
acauguggucaucauccaa

SEQ ID NO: 1344973 - RNA, 19 nt, Artificial Sequence
  Description of Artificial Sequence: Synthetic oligonucleotide
  Antisense strand to SEQ ID NO: 1344972
uuggaugaugaccacaugu

SEQ ID NO: 1344974 - RNA, 19 nt, Artificial Sequence
  Description of Artificial Sequence: Synthetic oligonucleotide
  Sense strand starting at position 3867 of SEQ ID NO: 1242404
agagcucacuguucccaaa

SEQ ID NO: 1344975 - RNA, 19 nt, Artificial Sequence
  Description of Artificial Sequence: Synthetic oligonucleotide
  Antisense strand to SEQ ID NO: 1344974
uuugggaacagugagcucu

SEQ ID NO: 1344976 - RNA, 19 nt, Artificial Sequence
  Description of Artificial Sequence: Synthetic oligonucleotide
  Sense strand starting at position 3917 of SEQ ID NO: 1242404
guguauuucccuuguuguu

SEQ ID NO: 1344977 - RNA, 19 nt, Artificial Sequence
  Description of Artificial Sequence: Synthetic oligonucleotide
  Antisense strand to SEQ ID NO: 1344976
aacaacaagggaaauacac

SEQ ID NO: 1344978 - RNA, 19 nt, Artificial Sequence
  Description of Artificial Sequence: Synthetic oligonucleotide
  Sense strand starting at position 8 of SEQ ID NO: 1242405
guaugacuucugcacucuu

SEQ ID NO: 1344979 - RNA, 19 nt, Artificial Sequence
  Description of Artificial Sequence: Synthetic oligonucleotide
  Antisense strand to SEQ ID NO: 1344978
aagagugcagaagucauac

SEQ ID NO: 1344980 - RNA, 19 nt, Artificial Sequence
  Description of Artificial Sequence: Synthetic oligonucleotide
  Sense strand starting at position 326 of SEQ ID NO: 1242405
cugaguauuccagaagagc

SEQ ID NO: 1344981 - RNA, 19 nt, Artificial Sequence
  Description of Artificial Sequence: Synthetic oligonucleotide
  Antisense strand to SEQ ID NO: 1344980
gcucuucuggaauacucag

SEQ ID NO: 1344982 - RNA, 19 nt, Artificial Sequence
  Description of Artificial Sequence: Synthetic oligonucleotide
  Sense strand starting at position 552 of SEQ ID NO: 1242405
gaguuuauggcacauguuu

SEQ ID NO: 1344983 - RNA, 19 nt, Artificial Sequence
  Description of Artificial Sequence: Synthetic oligonucleotide
  Antisense strand to SEQ ID NO: 1344982
aaacaugugccauaaacuc

SEQ ID NO: 1344984 - RNA, 19 nt, Artificial Sequence
  Description of Artificial Sequence: Synthetic oligonucleotide
  Sense strand starting at position 558 of SEQ ID NO: 1242405
auggcacauguuuaaguua

SEQ ID NO: 1344985 - RNA, 19 nt, Artificial Sequence
  Description of Artificial Sequence: Synthetic oligonucleotide
  Antisense strand to SEQ ID NO: 1344984
uaacuuaaacaugugccau

SEQ ID NO: 1344986 - RNA, 19 nt, Artificial Sequence
  Description of Artificial Sequence: Synthetic oligonucleotide
  Sense strand starting at position 561 of SEQ ID NO: 1242405
gcacauguuuaaguuaauu

SEQ ID NO: 1344987 - RNA, 19 nt, Artificial Sequence
  Description of Artificial Sequence: Synthetic oligonucleotide
  Antisense strand to SEQ ID NO: 1344986
aauuaacuuaaacaugugc

SEQ ID NO: 1344988 - RNA, 19 nt, Artificial Sequence
  Description of Artificial Sequence: Synthetic oligonucleotide
  Sense strand starting at position 617 of SEQ ID NO: 1242405
agguggagcgguugugaua

SEQ ID NO: 1344989 - RNA, 19 nt, Artificial Sequence
  Description of Artificial Sequence: Synthetic oligonucleotide
  Antisense strand to SEQ ID NO: 1344988
uaucacaaccgcuccaccu

SEQ ID NO: 1344990 - RNA, 19 nt, Artificial Sequence
  Description of Artificial Sequence: Synthetic oligonucleotide
  Sense strand starting at position 813 of SEQ ID NO: 1242405
gagcauugggaucagucau

SEQ ID NO: 1344991 - RNA, 19 nt, Artificial Sequence
  Description of Artificial Sequence: Synthetic oligonucleotide
  Antisense strand to SEQ ID NO: 1344990
augacugaucccaaugcuc

SEQ ID NO: 1344992 - RNA, 19 nt, Artificial Sequence
  Description of Artificial Sequence: Synthetic oligonucleotide
  Sense strand starting at position 925 of SEQ ID NO: 1242405
uggugauuaccaugagcuc

SEQ ID NO: 1344993 - RNA, 19 nt, Artificial Sequence
  Description of Artificial Sequence: Synthetic oligonucleotide
  Antisense strand to SEQ ID NO: 1344992
gagcucaugguaaucacca

SEQ ID NO: 1344994 - RNA, 19 nt, Artificial Sequence
  Description of Artificial Sequence: Synthetic oligonucleotide
  Sense strand starting at position 1055 of SEQ ID NO: 1242405
gccugaaagauuggucauu

SEQ ID NO: 1344995 - RNA, 19 nt, Artificial Sequence
  Description of Artificial Sequence: Synthetic oligonucleotide
  Antisense strand to SEQ ID NO: 1344994
aaugaccaaucuuucaggc

SEQ ID NO: 1344996 - RNA, 19 nt, Artificial Sequence
  Description of Artificial Sequence: Synthetic oligonucleotide
  Sense strand starting at position 1056 of SEQ ID NO: 1242405
ccugaaagauuggucauuc

SEQ ID NO: 1344997 - RNA, 19 nt, Artificial Sequence
  Description of Artificial Sequence: Synthetic oligonucleotide
  Antisense strand to SEQ ID NO: 1344996
gaaugaccaaucuuucagg

SEQ ID NO: 1344998 - RNA, 19 nt, Artificial Sequence
  Description of Artificial Sequence: Synthetic oligonucleotide
  Sense strand starting at position 1057 of SEQ ID NO: 1242405
cugaaagauuggucauucu

SEQ ID NO: 1344999 - RNA, 19 nt, Artificial Sequence
  Description of Artificial Sequence: Synthetic oligonucleotide
  Antisense strand to SEQ ID NO: 1344998
agaaugaccaaucuuucag

SEQ ID NO: 1345000 - RNA, 19 nt, Artificial Sequence
  Description of Artificial Sequence: Synthetic oligonucleotide
  Sense strand starting at position 1060 of SEQ ID NO: 1242405
aaagauuggucauucuguu

SEQ ID NO: 1345001 - RNA, 19 nt, Artificial Sequence
  Description of Artificial Sequence: Synthetic oligonucleotide
  Antisense strand to SEQ ID NO: 1345000
aacagaaugaccaaucuuu

SEQ ID NO: 1345002 - RNA, 19 nt, Artificial Sequence
  Description of Artificial Sequence: Synthetic oligonucleotide
  Sense strand starting at position 1140 of SEQ ID NO: 1242405
uuugaaggcuuaguugauu

SEQ ID NO: 1345003 - RNA, 19 nt, Artificial Sequence
  Description of Artificial Sequence: Synthetic oligonucleotide
  Antisense strand to SEQ ID NO: 1345002
aaucaacuaagccuucaaa

SEQ ID NO: 1345004 - RNA, 19 nt, Artificial Sequence
  Description of Artificial Sequence: Synthetic oligonucleotide
  Sense strand starting at position 1145 of SEQ ID NO: 1242405
aggcuuaguugauuucuuu

SEQ ID NO: 1345005 - RNA, 19 nt, Artificial Sequence
  Description of Artificial Sequence: Synthetic oligonucleotide
  Antisense strand to SEQ ID NO: 1345004
aaagaaaucaacuaagccu

SEQ ID NO: 1345006 - RNA, 19 nt, Artificial Sequence
  Description of Artificial Sequence: Synthetic oligonucleotide
  Sense strand starting at position 1154 of SEQ ID NO: 1242405
ugauuucuuuaagaacuga

SEQ ID NO: 1345007 - RNA, 19 nt, Artificial Sequence
  Description of Artificial Sequence: Synthetic oligonucleotide
  Antisense strand to SEQ ID NO: 1345006
ucaguucuuaaagaaauca

SEQ ID NO: 1345008 - RNA, 19 nt, Artificial Sequence
  Description of Artificial Sequence: Synthetic oligonucleotide
  Sense strand starting at position 1234 of SEQ ID NO: 1242405
uccucuugugaauagcuaa

SEQ ID NO: 1345009 - RNA, 19 nt, Artificial Sequence
  Description of Artificial Sequence: Synthetic oligonucleotide
  Antisense strand to SEQ ID NO: 1345008
uuagcuauucacaagagga

SEQ ID NO: 1345010 - RNA, 19 nt, Artificial Sequence
  Description of Artificial Sequence: Synthetic oligonucleotide
  Sense strand starting at position 1237 of SEQ ID NO: 1242405
ucuugugaauagcuaaaga

SEQ ID NO: 1345011 - RNA, 19 nt, Artificial Sequence
  Description of Artificial Sequence: Synthetic oligonucleotide
  Antisense strand to SEQ ID NO: 1345010
ucuuuagcuauucacaaga

SEQ ID NO: 1345012 - RNA, 19 nt, Artificial Sequence
  Description of Artificial Sequence: Synthetic oligonucleotide
  Sense strand starting at position 1260 of SEQ ID NO: 1242405
gcaguaagauaggagaaga

SEQ ID NO: 1345013 - RNA, 19 nt, Artificial Sequence
  Description of Artificial Sequence: Synthetic oligonucleotide
  Antisense strand to SEQ ID NO: 1345012
ucuucuccuaucuuacugc

SEQ ID NO: 1345014 - RNA, 19 nt, Artificial Sequence
  Description of Artificial Sequence: Synthetic oligonucleotide
  Sense strand starting at position 1281 of SEQ ID NO: 1242405
aaugaaaggcaguggaauu

SEQ ID NO: 1345015 - RNA, 19 nt, Artificial Sequence
  Description of Artificial Sequence: Synthetic oligonucleotide
  Antisense strand to SEQ ID NO: 1345014
aauuccacugccuuucauu

SEQ ID NO: 1345016 - RNA, 19 nt, Artificial Sequence
  Description of Artificial Sequence: Synthetic oligonucleotide
  Sense strand starting at position 1331 of SEQ ID NO: 1242405
ggaucugggcuauaaaggu

SEQ ID NO: 1345017 - RNA, 19 nt, Artificial Sequence
  Description of Artificial Sequence: Synthetic oligonucleotide
  Antisense strand to SEQ ID NO: 1345016
accuuuauagcccagaucc

SEQ ID NO: 1345018 - RNA, 19 nt, Artificial Sequence
  Description of Artificial Sequence: Synthetic oligonucleotide
  Sense strand starting at position 1367 of SEQ ID NO: 1242405
aagaaagagucacagggua

SEQ ID NO: 1345019 - RNA, 19 nt, Artificial Sequence
  Description of Artificial Sequence: Synthetic oligonucleotide
  Antisense strand to SEQ ID NO: 1345018
uacccugugacucuuucuu

SEQ ID NO: 1345020 - RNA, 19 nt, Artificial Sequence
  Description of Artificial Sequence: Synthetic oligonucleotide
  Sense strand starting at position 1417 of SEQ ID NO: 1242405
ugagcuugcugaguaagaa

SEQ ID NO: 1345021 - RNA, 19 nt, Artificial Sequence
  Description of Artificial Sequence: Synthetic oligonucleotide
  Antisense strand to SEQ ID NO: 1345020
uucuuacucagcaagcuca

SEQ ID NO: 1345022 - RNA, 19 nt, Artificial Sequence
  Description of Artificial Sequence: Synthetic oligonucleotide
  Sense strand starting at position 1418 of SEQ ID NO: 1242405
gagcuugcugaguaagaag

SEQ ID NO: 1345023 - RNA, 19 nt, Artificial Sequence
  Description of Artificial Sequence: Synthetic oligonucleotide
  Antisense strand to SEQ ID NO: 1345022
cuucuuacucagcaagcuc

SEQ ID NO: 1345024 - RNA, 19 nt, Artificial Sequence
  Description of Artificial Sequence: Synthetic oligonucleotide
  Sense strand starting at position 1472 of SEQ ID NO: 1242405
ccuaaaguauugcugaaca

SEQ ID NO: 1345025 - RNA, 19 nt, Artificial Sequence
  Description of Artificial Sequence: Synthetic oligonucleotide
  Antisense strand to SEQ ID NO: 1345024
uguucagcaauacuuuagg

SEQ ID NO: 1345026 - RNA, 19 nt, Artificial Sequence
  Description of Artificial Sequence: Synthetic oligonucleotide
  Sense strand starting at position 1663 of SEQ ID NO: 1242405
gccucagaauaagcaaauu

SEQ ID NO: 1345027 - RNA, 19 nt, Artificial Sequence
  Description of Artificial Sequence: Synthetic oligonucleotide
  Antisense strand to SEQ ID NO: 1345026
aauuugcuuauucugaggc

SEQ ID NO: 1345028 - RNA, 19 nt, Artificial Sequence
  Description of Artificial Sequence: Synthetic oligonucleotide
  Sense strand starting at position 2253 of SEQ ID NO: 1242405
ccaggauaacauggcgaaa

SEQ ID NO: 1345029 - RNA, 19 nt, Artificial Sequence
  Description of Artificial Sequence: Synthetic oligonucleotide
  Antisense strand to SEQ ID NO: 1345028
uuucgccauguuauccugg

SEQ ID NO: 1345030 - RNA, 19 nt, Artificial Sequence
  Description of Artificial Sequence: Synthetic oligonucleotide
  Sense strand starting at position 2490 of SEQ ID NO: 1242405
gguacauuccuguaagcau

SEQ ID NO: 1345031 - RNA, 19 nt, Artificial Sequence
  Description of Artificial Sequence: Synthetic oligonucleotide
  Antisense strand to SEQ ID NO: 1345030
augcuuacaggaauguacc

SEQ ID NO: 1345032 - RNA, 19 nt, Artificial Sequence
  Description of Artificial Sequence: Synthetic oligonucleotide
  Sense strand starting at position 2594 of SEQ ID NO: 1242405
gcuggaaagacaugcccua

SEQ ID NO: 1345033 - RNA, 19 nt, Artificial Sequence
  Description of Artificial Sequence: Synthetic oligonucleotide
  Antisense strand to SEQ ID NO: 1345032
uagggcaugucuuuccagc

SEQ ID NO: 1345034 - RNA, 19 nt, Artificial Sequence
  Description of Artificial Sequence: Synthetic oligonucleotide
  Sense strand starting at position 2784 of SEQ ID NO: 1242405
acagaucagugaggaaaga

SEQ ID NO: 1345035 - RNA, 19 nt, Artificial Sequence
  Description of Artificial Sequence: Synthetic oligonucleotide
  Antisense strand to SEQ ID NO: 1345034
ucuuuccucacugaucugu

SEQ ID NO: 1345036 - RNA, 19 nt, Artificial Sequence
  Description of Artificial Sequence: Synthetic oligonucleotide
  Sense strand starting at position 2802 of SEQ ID NO: 1242405
acggaugugucaagaaagg

SEQ ID NO: 1345037 - RNA, 19 nt, Artificial Sequence
  Description of Artificial Sequence: Synthetic oligonucleotide
  Antisense strand to SEQ ID NO: 1345036
ccuuucuugacacauccgu

SEQ ID NO: 1345038 - RNA, 19 nt, Artificial Sequence
  Description of Artificial Sequence: Synthetic oligonucleotide
  Sense strand starting at position 2839 of SEQ ID NO: 1242405
gugaaucacgcuuguaauc

SEQ ID NO: 1345039 - RNA, 19 nt, Artificial Sequence
  Description of Artificial Sequence: Synthetic oligonucleotide
  Antisense strand to SEQ ID NO: 1345038
gauuacaagcgugauucac

SEQ ID NO: 1345040 - RNA, 19 nt, Artificial Sequence
  Description of Artificial Sequence: Synthetic oligonucleotide
  Sense strand starting at position 3164 of SEQ ID NO: 1242405
uuauccuggccuggaaaga

SEQ ID NO: 1345041 - RNA, 19 nt, Artificial Sequence
  Description of Artificial Sequence: Synthetic oligonucleotide
  Antisense strand to SEQ ID NO: 1345040
ucuuuccaggccaggauaa

SEQ ID NO: 1345042 - RNA, 19 nt, Artificial Sequence
  Description of Artificial Sequence: Synthetic oligonucleotide
  Sense strand starting at position 3629 of SEQ ID NO: 1242405
uggccagguucucuaucuu

SEQ ID NO: 1345043 - RNA, 19 nt, Artificial Sequence
  Description of Artificial Sequence: Synthetic oligonucleotide
  Antisense strand to SEQ ID NO: 1345042
aagauagagaaccuggcca

SEQ ID NO: 1345044 - RNA, 19 nt, Artificial Sequence
  Description of Artificial Sequence: Synthetic oligonucleotide
  Sense strand starting at position 3655 of SEQ ID NO: 1242405
acuguaucccuaggcucaa

SEQ ID NO: 1345045 - RNA, 19 nt, Artificial Sequence
  Description of Artificial Sequence: Synthetic oligonucleotide
  Antisense strand to SEQ ID NO: 1345044
uugagccuagggauacagu

SEQ ID NO: 1345046 - RNA, 19 nt, Artificial Sequence
  Description of Artificial Sequence: Synthetic oligonucleotide
  Sense strand starting at position 3740 of SEQ ID NO: 1242405
cacagauucuggcuuagau

SEQ ID NO: 1345047 - RNA, 19 nt, Artificial Sequence
  Description of Artificial Sequence: Synthetic oligonucleotide
  Antisense strand to SEQ ID NO: 1345046
aucuaagccagaaucugug

SEQ ID NO: 1345048 - RNA, 19 nt, Artificial Sequence
  Description of Artificial Sequence: Synthetic oligonucleotide
  Sense strand starting at position 3742 of SEQ ID NO: 1242405
cagauucuggcuuagauua

SEQ ID NO: 1345049 - RNA, 19 nt, Artificial Sequence
  Description of Artificial Sequence: Synthetic oligonucleotide
  Antisense strand to SEQ ID NO: 1345048
uaaucuaagccagaaucug

SEQ ID NO: 1345050 - RNA, 19 nt, Artificial Sequence
  Description of Artificial Sequence: Synthetic oligonucleotide
  Sense strand starting at position 3754 of SEQ ID NO: 1242405
uagauuauuugguauguag

SEQ ID NO: 1345051 - RNA, 19 nt, Artificial Sequence
  Description of Artificial Sequence: Synthetic oligonucleotide
  Antisense strand to SEQ ID NO: 1345050
cuacauaccaaauaaucua

SEQ ID NO: 1345052 - RNA, 19 nt, Artificial Sequence
  Description of Artificial Sequence: Synthetic oligonucleotide
  Sense strand starting at position 3862 of SEQ ID NO: 1242405
agaguagauguguguugua

SEQ ID NO: 1345053 - RNA, 19 nt, Artificial Sequence
  Description of Artificial Sequence: Synthetic oligonucleotide
  Antisense strand to SEQ ID NO: 1345052
uacaacacacaucuacucu

SEQ ID NO: 1345054 - RNA, 19 nt, Artificial Sequence
  Description of Artificial Sequence: Synthetic oligonucleotide
  Sense strand starting at position 3874 of SEQ ID NO: 1242405
uguuguauucuggaucgag

SEQ ID NO: 1345055 - RNA, 19 nt, Artificial Sequence
  Description of Artificial Sequence: Synthetic oligonucleotide
  Antisense strand to SEQ ID NO: 1345054
cucgauccagaauacaaca

SEQ ID NO: 1345056 - RNA, 19 nt, Artificial Sequence
  Description of Artificial Sequence: Synthetic oligonucleotide
  Sense strand starting at position 3878 of SEQ ID NO: 1242405
guauucuggaucgagagca

SEQ ID NO: 1345057 - RNA, 19 nt, Artificial Sequence
  Description of Artificial Sequence: Synthetic oligonucleotide
  Antisense strand to SEQ ID NO: 1345056
ugcucucgauccagaauac

SEQ ID NO: 1345058 - RNA, 19 nt, Artificial Sequence
  Description of Artificial Sequence: Synthetic oligonucleotide
  Sense strand starting at position 30 of SEQ ID NO: 1242406
augccuaaaugagucacaa

SEQ ID NO: 1345059 - RNA, 19 nt, Artificial Sequence
  Description of Artificial Sequence: Synthetic oligonucleotide
  Antisense strand to SEQ ID NO: 1345058
uugugacucauuuaggcau

SEQ ID NO: 1345060 - RNA, 19 nt, Artificial Sequence
  Description of Artificial Sequence: Synthetic oligonucleotide
  Sense strand starting at position 49 of SEQ ID NO: 1242406
ugugaaguguauuucuuac

SEQ ID NO: 1345061 - RNA, 19 nt, Artificial Sequence
  Description of Artificial Sequence: Synthetic oligonucleotide
  Antisense strand to SEQ ID NO: 1345060
guaagaaauacacuucaca

SEQ ID NO: 1345062 - RNA, 19 nt, Artificial Sequence
  Description of Artificial Sequence: Synthetic oligonucleotide
  Sense strand starting at position 55 of SEQ ID NO: 1242406
guguauuucuuacuacagu

SEQ ID NO: 1345063 - RNA, 19 nt, Artificial Sequence
  Description of Artificial Sequence: Synthetic oligonucleotide
  Antisense strand to SEQ ID NO: 1345062
acuguaguaagaaauacac

SEQ ID NO: 1345064 - RNA, 19 nt, Artificial Sequence
  Description of Artificial Sequence: Synthetic oligonucleotide
  Sense strand starting at position 88 of SEQ ID NO: 1242406
uuugaaagccacugagaua

SEQ ID NO: 1345065 - RNA, 19 nt, Artificial Sequence
  Description of Artificial Sequence: Synthetic oligonucleotide
  Antisense strand to SEQ ID NO: 1345064
uaucucaguggcuuucaaa

SEQ ID NO: 1345066 - RNA, 19 nt, Artificial Sequence
  Description of Artificial Sequence: Synthetic oligonucleotide
  Sense strand starting at position 348 of SEQ ID NO: 1242406
uuaugucacuuuguaaacu

SEQ ID NO: 1345067 - RNA, 19 nt, Artificial Sequence
  Description of Artificial Sequence: Synthetic oligonucleotide
  Antisense strand to SEQ ID NO: 1345066
aguuuacaaagugacauaa

SEQ ID NO: 1345068 - RNA, 19 nt, Artificial Sequence
  Description of Artificial Sequence: Synthetic oligonucleotide
  Sense strand starting at position 359 of SEQ ID NO: 1242406
uguaaacugucacugagaa

SEQ ID NO: 1345069 - RNA, 19 nt, Artificial Sequence
  Description of Artificial Sequence: Synthetic oligonucleotide
  Antisense strand to SEQ ID NO: 1345068
uucucagugacaguuuaca

SEQ ID NO: 1345070 - RNA, 19 nt, Artificial Sequence
  Description of Artificial Sequence: Synthetic oligonucleotide
  Sense strand starting at position 360 of SEQ ID NO: 1242406
guaaacugucacugagaag

SEQ ID NO: 1345071 - RNA, 19 nt, Artificial Sequence
  Description of Artificial Sequence: Synthetic oligonucleotide
  Antisense strand to SEQ ID NO: 1345070
cuucucagugacaguuuac

SEQ ID NO: 1345072 - RNA, 19 nt, Artificial Sequence
  Description of Artificial Sequence: Synthetic oligonucleotide
  Sense strand starting at position 374 of SEQ ID NO: 1242406
agaaguuaguaguuauacu

SEQ ID NO: 1345073 - RNA, 19 nt, Artificial Sequence
  Description of Artificial Sequence: Synthetic oligonucleotide
  Antisense strand to SEQ ID NO: 1345072
aguauaacuacuaacuucu

SEQ ID NO: 1345074 - RNA, 19 nt, Artificial Sequence
  Description of Artificial Sequence: Synthetic oligonucleotide
  Sense strand starting at position 381 of SEQ ID NO: 1242406
aguaguuauacugacguga

SEQ ID NO: 1345075 - RNA, 19 nt, Artificial Sequence
  Description of Artificial Sequence: Synthetic oligonucleotide
  Antisense strand to SEQ ID NO: 1345074
ucacgucaguauaacuacu

SEQ ID NO: 1345076 - RNA, 19 nt, Artificial Sequence
  Description of Artificial Sequence: Synthetic oligonucleotide
  Sense strand starting at position 385 of SEQ ID NO: 1242406
guuauacugacgugauuga

SEQ ID NO: 1345077 - RNA, 19 nt, Artificial Sequence
  Description of Artificial Sequence: Synthetic oligonucleotide
  Antisense strand to SEQ ID NO: 1345076
ucaaucacgucaguauaac

SEQ ID NO: 1345078 - RNA, 19 nt, Artificial Sequence
  Description of Artificial Sequence: Synthetic oligonucleotide
  Sense strand starting at position 386 of SEQ ID NO: 1242406
uuauacugacgugauugaa

SEQ ID NO: 1345079 - RNA, 19 nt, Artificial Sequence
  Description of Artificial Sequence: Synthetic oligonucleotide
  Antisense strand to SEQ ID NO: 1345078
uucaaucacgucaguauaa

SEQ ID NO: 1345080 - RNA, 19 nt, Artificial Sequence
  Description of Artificial Sequence: Synthetic oligonucleotide
  Sense strand starting at position 545 of SEQ ID NO: 1242406
ucauguuaguugguaauua

SEQ ID NO: 1345081 - RNA, 19 nt, Artificial Sequence
  Description of Artificial Sequence: Synthetic oligonucleotide
  Antisense strand to SEQ ID NO: 1345080
uaauuaccaacuaacauga

SEQ ID NO: 1345082 - RNA, 19 nt, Artificial Sequence
  Description of Artificial Sequence: Synthetic oligonucleotide
  Sense strand starting at position 569 of SEQ ID NO: 1242406
gcaaaucucuuggcuauaa

SEQ ID NO: 1345083 - RNA, 19 nt, Artificial Sequence
  Description of Artificial Sequence: Synthetic oligonucleotide
  Antisense strand to SEQ ID NO: 1345082
uuauagccaagagauuugc

SEQ ID NO: 1345084 - RNA, 19 nt, Artificial Sequence
  Description of Artificial Sequence: Synthetic oligonucleotide
  Sense strand starting at position 656 of SEQ ID NO: 1242406
agauguggcucuuccauua

SEQ ID NO: 1345085 - RNA, 19 nt, Artificial Sequence
  Description of Artificial Sequence: Synthetic oligonucleotide
  Antisense strand to SEQ ID NO: 1345084
uaauggaagagccacaucu

SEQ ID NO: 1345086 - RNA, 19 nt, Artificial Sequence
  Description of Artificial Sequence: Synthetic oligonucleotide
  Sense strand starting at position 717 of SEQ ID NO: 1242406
ccuggaaauccuuacaugu

SEQ ID NO: 1345087 - RNA, 19 nt, Artificial Sequence
  Description of Artificial Sequence: Synthetic oligonucleotide
  Antisense strand to SEQ ID NO: 1345086
acauguaaggauuuccagg

SEQ ID NO: 1345088 - RNA, 19 nt, Artificial Sequence
  Description of Artificial Sequence: Synthetic oligonucleotide
  Sense strand starting at position 902 of SEQ ID NO: 1242406
agauaacguccuuaacuuu

SEQ ID NO: 1345089 - RNA, 19 nt, Artificial Sequence
  Description of Artificial Sequence: Synthetic oligonucleotide
  Antisense strand to SEQ ID NO: 1345088
aaaguuaaggacguuaucu

SEQ ID NO: 1345090 - RNA, 19 nt, Artificial Sequence
  Description of Artificial Sequence: Synthetic oligonucleotide
  Sense strand starting at position 913 of SEQ ID NO: 1242406
uuaacuuuacgguagauga

SEQ ID NO: 1345091 - RNA, 19 nt, Artificial Sequence
  Description of Artificial Sequence: Synthetic oligonucleotide
  Antisense strand to SEQ ID NO: 1345090
ucaucuaccguaaaguuaa

SEQ ID NO: 1345092 - RNA, 19 nt, Artificial Sequence
  Description of Artificial Sequence: Synthetic oligonucleotide
  Sense strand starting at position 923 of SEQ ID NO: 1242406
gguagaugacagugguuga

SEQ ID NO: 1345093 - RNA, 19 nt, Artificial Sequence
  Description of Artificial Sequence: Synthetic oligonucleotide
  Antisense strand to SEQ ID NO: 1345092
ucaaccacugucaucuacc

SEQ ID NO: 1345094 - RNA, 19 nt, Artificial Sequence
  Description of Artificial Sequence: Synthetic oligonucleotide
  Sense strand starting at position 924 of SEQ ID NO: 1242406
guagaugacagugguugaa

SEQ ID NO: 1345095 - RNA, 19 nt, Artificial Sequence
  Description of Artificial Sequence: Synthetic oligonucleotide
  Antisense strand to SEQ ID NO: 1345094
uucaaccacugucaucuac

SEQ ID NO: 1345096 - RNA, 19 nt, Artificial Sequence
  Description of Artificial Sequence: Synthetic oligonucleotide
  Sense strand starting at position 926 of SEQ ID NO: 1242406
agaugacagugguugaaca

SEQ ID NO: 1345097 - RNA, 19 nt, Artificial Sequence
  Description of Artificial Sequence: Synthetic oligonucleotide
  Antisense strand to SEQ ID NO: 1345096
uguucaaccacugucaucu

SEQ ID NO: 1345098 - RNA, 19 nt, Artificial Sequence
  Description of Artificial Sequence: Synthetic oligonucleotide
  Sense strand starting at position 927 of SEQ ID NO: 1242406
gaugacagugguugaacaa

SEQ ID NO: 1345099 - RNA, 19 nt, Artificial Sequence
  Description of Artificial Sequence: Synthetic oligonucleotide
  Antisense strand to SEQ ID NO: 1345098
uuguucaaccacugucauc

SEQ ID NO: 1345100 - RNA, 19 nt, Artificial Sequence
  Description of Artificial Sequence: Synthetic oligonucleotide
  Sense strand starting at position 1028 of SEQ ID NO: 1242406
acaugagaucagugucuug

SEQ ID NO: 1345101 - RNA, 19 nt, Artificial Sequence
  Description of Artificial Sequence: Synthetic oligonucleotide
  Antisense strand to SEQ ID NO: 1345100
caagacacugaucucaugu

SEQ ID NO: 1345102 - RNA, 19 nt, Artificial Sequence
  Description of Artificial Sequence: Synthetic oligonucleotide
  Sense strand starting at position 1031 of SEQ ID NO: 1242406
ugagaucagugucuugaua

SEQ ID NO: 1345103 - RNA, 19 nt, Artificial Sequence
  Description of Artificial Sequence: Synthetic oligonucleotide
  Antisense strand to SEQ ID NO: 1345102
uaucaagacacugaucuca

SEQ ID NO: 1345104 - RNA, 19 nt, Artificial Sequence
  Description of Artificial Sequence: Synthetic oligonucleotide
  Sense strand starting at position 1093 of SEQ ID NO: 1242406
guaacuacagcuugacaaa

SEQ ID NO: 1345105 - RNA, 19 nt, Artificial Sequence
  Description of Artificial Sequence: Synthetic oligonucleotide
  Antisense strand to SEQ ID NO: 1345104
uuugucaagcuguaguuac

SEQ ID NO: 1345106 - RNA, 19 nt, Artificial Sequence
  Description of Artificial Sequence: Synthetic oligonucleotide
  Sense strand starting at position 1138 of SEQ ID NO: 1242406
gugaguuggcaacacaacu

SEQ ID NO: 1345107 - RNA, 19 nt, Artificial Sequence
  Description of Artificial Sequence: Synthetic oligonucleotide
  Antisense strand to SEQ ID NO: 1345106
aguuguguugccaacucac

SEQ ID NO: 1345108 - RNA, 19 nt, Artificial Sequence
  Description of Artificial Sequence: Synthetic oligonucleotide
  Sense strand starting at position 1290 of SEQ ID NO: 1242406
cugacuguuggucaaaggu

SEQ ID NO: 1345109 - RNA, 19 nt, Artificial Sequence
  Description of Artificial Sequence: Synthetic oligonucleotide
  Antisense strand to SEQ ID NO: 1345108
accuuugaccaacagucag

SEQ ID NO: 1345110 - RNA, 19 nt, Artificial Sequence
  Description of Artificial Sequence: Synthetic oligonucleotide
  Sense strand starting at position 1415 of SEQ ID NO: 1242406
guuuguugaaccgagaaag

SEQ ID NO: 1345111 - RNA, 19 nt, Artificial Sequence
  Description of Artificial Sequence: Synthetic oligonucleotide
  Antisense strand to SEQ ID NO: 1345110
cuuucucgguucaacaaac

SEQ ID NO: 1345112 - RNA, 19 nt, Artificial Sequence
  Description of Artificial Sequence: Synthetic oligonucleotide
  Sense strand starting at position 1446 of SEQ ID NO: 1242406
cgccucauccgagaaguca

SEQ ID NO: 1345113 - RNA, 19 nt, Artificial Sequence
  Description of Artificial Sequence: Synthetic oligonucleotide
  Antisense strand to SEQ ID NO: 1345112
ugacuucucggaugaggcg

SEQ ID NO: 1345114 - RNA, 19 nt, Artificial Sequence
  Description of Artificial Sequence: Synthetic oligonucleotide
  Sense strand starting at position 2277 of SEQ ID NO: 1242406
aggaguucccuccaccgaa

SEQ ID NO: 1345115 - RNA, 19 nt, Artificial Sequence
  Description of Artificial Sequence: Synthetic oligonucleotide
  Antisense strand to SEQ ID NO: 1345114
uucgguggagggaacuccu

SEQ ID NO: 1345116 - RNA, 19 nt, Artificial Sequence
  Description of Artificial Sequence: Synthetic oligonucleotide
  Sense strand starting at position 2609 of SEQ ID NO: 1242406
uggagauacugcgaauuug

SEQ ID NO: 1345117 - RNA, 19 nt, Artificial Sequence
  Description of Artificial Sequence: Synthetic oligonucleotide
  Antisense strand to SEQ ID NO: 1345116
caaauucgcaguaucucca

SEQ ID NO: 1345118 - RNA, 19 nt, Artificial Sequence
  Description of Artificial Sequence: Synthetic oligonucleotide
  Sense strand starting at position 2617 of SEQ ID NO: 1242406
cugcgaauuugguuccaga

SEQ ID NO: 1345119 - RNA, 19 nt, Artificial Sequence
  Description of Artificial Sequence: Synthetic oligonucleotide
  Antisense strand to SEQ ID NO: 1345118
ucuggaaccaaauucgcag

SEQ ID NO: 1345120 - RNA, 19 nt, Artificial Sequence
  Description of Artificial Sequence: Synthetic oligonucleotide
  Sense strand starting at position 2718 of SEQ ID NO: 1242406
aagcguguaauagcguuau

SEQ ID NO: 1345121 - RNA, 19 nt, Artificial Sequence
  Description of Artificial Sequence: Synthetic oligonucleotide
  Antisense strand to SEQ ID NO: 1345120
auaacgcuauuacacgcuu

SEQ ID NO: 1345122 - RNA, 19 nt, Artificial Sequence
  Description of Artificial Sequence: Synthetic oligonucleotide
  Sense strand starting at position 2720 of SEQ ID NO: 1242406
gcguguaauagcguuaugu

SEQ ID NO: 1345123 - RNA, 19 nt, Artificial Sequence
  Description of Artificial Sequence: Synthetic oligonucleotide
  Antisense strand to SEQ ID NO: 1345122
acauaacgcuauuacacgc

SEQ ID NO: 1345124 - RNA, 19 nt, Artificial Sequence
  Description of Artificial Sequence: Synthetic oligonucleotide
  Sense strand starting at position 2721 of SEQ ID NO: 1242406
cguguaauagcguuauguc

SEQ ID NO: 1345125 - RNA, 19 nt, Artificial Sequence
  Description of Artificial Sequence: Synthetic oligonucleotide
  Antisense strand to SEQ ID NO: 1345124
gacauaacgcuauuacacg

SEQ ID NO: 1345126 - RNA, 19 nt, Artificial Sequence
  Description of Artificial Sequence: Synthetic oligonucleotide
  Sense strand starting at position 2805 of SEQ ID NO: 1242406
uguuaauugcucugaggaa

SEQ ID NO: 1345127 - RNA, 19 nt, Artificial Sequence
  Description of Artificial Sequence: Synthetic oligonucleotide
  Antisense strand to SEQ ID NO: 1345126
uuccucagagcaauuaaca

SEQ ID NO: 1345128 - RNA, 19 nt, Artificial Sequence
  Description of Artificial Sequence: Synthetic oligonucleotide
  Sense strand starting at position 3410 of SEQ ID NO: 1242406
uugcuauauugauugacuu

SEQ ID NO: 1345129 - RNA, 19 nt, Artificial Sequence
  Description of Artificial Sequence: Synthetic oligonucleotide
  Antisense strand to SEQ ID NO: 1345128
aagucaaucaauauagcaa

SEQ ID NO: 1345130 - RNA, 19 nt, Artificial Sequence
  Description of Artificial Sequence: Synthetic oligonucleotide
  Sense strand starting at position 3443 of SEQ ID NO: 1242406
guucuugauggcgugugau

SEQ ID NO: 1345131 - RNA, 19 nt, Artificial Sequence
  Description of Artificial Sequence: Synthetic oligonucleotide
  Antisense strand to SEQ ID NO: 1345130
aucacacgccaucaagaac

SEQ ID NO: 1345132 - RNA, 19 nt, Artificial Sequence
  Description of Artificial Sequence: Synthetic oligonucleotide
  Sense strand starting at position 3642 of SEQ ID NO: 1242406
ucugcuuaucuauaagaag

SEQ ID NO: 1345133 - RNA, 19 nt, Artificial Sequence
  Description of Artificial Sequence: Synthetic oligonucleotide
  Antisense strand to SEQ ID NO: 1345132
cuucuuauagauaagcaga

SEQ ID NO: 1345134 - RNA, 19 nt, Artificial Sequence
  Description of Artificial Sequence: Synthetic oligonucleotide
  Sense strand starting at position 3892 of SEQ ID NO: 1242406
gcugaauccucuccagaag

SEQ ID NO: 1345135 - RNA, 19 nt, Artificial Sequence
  Description of Artificial Sequence: Synthetic oligonucleotide
  Antisense strand to SEQ ID NO: 1345134
cuucuggagaggauucagc

SEQ ID NO: 1345136 - RNA, 19 nt, Artificial Sequence
  Description of Artificial Sequence: Synthetic oligonucleotide
  Sense strand starting at position 3893 of SEQ ID NO: 1242406
cugaauccucuccagaagu

SEQ ID NO: 1345137 - RNA, 19 nt, Artificial Sequence
  Description of Artificial Sequence: Synthetic oligonucleotide
  Antisense strand to SEQ ID NO: 1345136
acuucuggagaggauucag

SEQ ID NO: 1345138 - RNA, 19 nt, Artificial Sequence
  Description of Artificial Sequence: Synthetic oligonucleotide
  Sense strand starting at position 320 of SEQ ID NO: 1242407
guauuauuguacuuauacc

SEQ ID NO: 1345139 - RNA, 19 nt, Artificial Sequence
  Description of Artificial Sequence: Synthetic oligonucleotide
  Antisense strand to SEQ ID NO: 1345138
gguauaaguacaauaauac

SEQ ID NO: 1345140 - RNA, 19 nt, Artificial Sequence
  Description of Artificial Sequence: Synthetic oligonucleotide
  Sense strand starting at position 377 of SEQ ID NO: 1242407
uggaacuaaucagaucagu

SEQ ID NO: 1345141 - RNA, 19 nt, Artificial Sequence
  Description of Artificial Sequence: Synthetic oligonucleotide
  Antisense strand to SEQ ID NO: 1345140
acugaucugauuaguucca

SEQ ID NO: 1345142 - RNA, 19 nt, Artificial Sequence
  Description of Artificial Sequence: Synthetic oligonucleotide
  Sense strand starting at position 382 of SEQ ID NO: 1242407
cuaaucagaucaguguaca

SEQ ID NO: 1345143 - RNA, 19 nt, Artificial Sequence
  Description of Artificial Sequence: Synthetic oligonucleotide
  Antisense strand to SEQ ID NO: 1345142
uguacacugaucugauuag

SEQ ID NO: 1345144 - RNA, 19 nt, Artificial Sequence
  Description of Artificial Sequence: Synthetic oligonucleotide
  Sense strand starting at position 410 of SEQ ID NO: 1242407
guaagcuauuguccacagu

SEQ ID NO: 1345145 - RNA, 19 nt, Artificial Sequence
  Description of Artificial Sequence: Synthetic oligonucleotide
  Antisense strand to SEQ ID NO: 1345144
acuguggacaauagcuuac

SEQ ID NO: 1345146 - RNA, 19 nt, Artificial Sequence
  Description of Artificial Sequence: Synthetic oligonucleotide
  Sense strand starting at position 413 of SEQ ID NO: 1242407
agcuauuguccacagugga

SEQ ID NO: 1345147 - RNA, 19 nt, Artificial Sequence
  Description of Artificial Sequence: Synthetic oligonucleotide
  Antisense strand to SEQ ID NO: 1345146
uccacuguggacaauagcu

SEQ ID NO: 1345148 - RNA, 19 nt, Artificial Sequence
  Description of Artificial Sequence: Synthetic oligonucleotide
  Sense strand starting at position 844 of SEQ ID NO: 1242407
ccuccucagcuauguuaga

SEQ ID NO: 1345149 - RNA, 19 nt, Artificial Sequence
  Description of Artificial Sequence: Synthetic oligonucleotide
  Antisense strand to SEQ ID NO: 1345148
ucuaacauagcugaggagg

SEQ ID NO: 1345150 - RNA, 19 nt, Artificial Sequence
  Description of Artificial Sequence: Synthetic oligonucleotide
  Sense strand starting at position 845 of SEQ ID NO: 1242407
cuccucagcuauguuagau

SEQ ID NO: 1345151 - RNA, 19 nt, Artificial Sequence
  Description of Artificial Sequence: Synthetic oligonucleotide
  Antisense strand to SEQ ID NO: 1345150
aucuaacauagcugaggag

SEQ ID NO: 1345152 - RNA, 19 nt, Artificial Sequence
  Description of Artificial Sequence: Synthetic oligonucleotide
  Sense strand starting at position 876 of SEQ ID NO: 1242407
agcgacauauuucuuucuu

SEQ ID NO: 1345153 - RNA, 19 nt, Artificial Sequence
  Description of Artificial Sequence: Synthetic oligonucleotide
  Antisense strand to SEQ ID NO: 1345152
aagaaagaaauaugucgcu

SEQ ID NO: 1345154 - RNA, 19 nt, Artificial Sequence
  Description of Artificial Sequence: Synthetic oligonucleotide
  Sense strand starting at position 877 of SEQ ID NO: 1242407
gcgacauauuucuuucuuu

SEQ ID NO: 1345155 - RNA, 19 nt, Artificial Sequence
  Description of Artificial Sequence: Synthetic oligonucleotide
  Antisense strand to SEQ ID NO: 1345154
aaagaaagaaauaugucgc

SEQ ID NO: 1345156 - RNA, 19 nt, Artificial Sequence
  Description of Artificial Sequence: Synthetic oligonucleotide
  Sense strand starting at position 1508 of SEQ ID NO: 1242407
gcacguauccaguuugcuu

SEQ ID NO: 1345157 - RNA, 19 nt, Artificial Sequence
  Description of Artificial Sequence: Synthetic oligonucleotide
  Antisense strand to SEQ ID NO: 1345156
aagcaaacuggauacgugc

SEQ ID NO: 1345158 - RNA, 19 nt, Artificial Sequence
  Description of Artificial Sequence: Synthetic oligonucleotide
  Sense strand starting at position 1512 of SEQ ID NO: 1242407
guauccaguuugcuucuaa

SEQ ID NO: 1345159 - RNA, 19 nt, Artificial Sequence
  Description of Artificial Sequence: Synthetic oligonucleotide
  Antisense strand to SEQ ID NO: 1345158
uuagaagcaaacuggauac

SEQ ID NO: 1345160 - RNA, 19 nt, Artificial Sequence
  Description of Artificial Sequence: Synthetic oligonucleotide
  Sense strand starting at position 1524 of SEQ ID NO: 1242407
cuucuaaagugagcaucau

SEQ ID NO: 1345161 - RNA, 19 nt, Artificial Sequence
  Description of Artificial Sequence: Synthetic oligonucleotide
  Antisense strand to SEQ ID NO: 1345160
augaugcucacuuuagaag

SEQ ID NO: 1345162 - RNA, 19 nt, Artificial Sequence
  Description of Artificial Sequence: Synthetic oligonucleotide
  Sense strand starting at position 1525 of SEQ ID NO: 1242407
uucuaaagugagcaucaua

SEQ ID NO: 1345163 - RNA, 19 nt, Artificial Sequence
  Description of Artificial Sequence: Synthetic oligonucleotide
  Antisense strand to SEQ ID NO: 1345162
uaugaugcucacuuuagaa

SEQ ID NO: 1345164 - RNA, 19 nt, Artificial Sequence
  Description of Artificial Sequence: Synthetic oligonucleotide
  Sense strand starting at position 1528 of SEQ ID NO: 1242407
uaaagugagcaucauauug

SEQ ID NO: 1345165 - RNA, 19 nt, Artificial Sequence
  Description of Artificial Sequence: Synthetic oligonucleotide
  Antisense strand to SEQ ID NO: 1345164
caauaugaugcucacuuua

SEQ ID NO: 1345166 - RNA, 19 nt, Artificial Sequence
  Description of Artificial Sequence: Synthetic oligonucleotide
  Sense strand starting at position 1650 of SEQ ID NO: 1242407
gcauuuaguugucuugucu

SEQ ID NO: 1345167 - RNA, 19 nt, Artificial Sequence
  Description of Artificial Sequence: Synthetic oligonucleotide
  Antisense strand to SEQ ID NO: 1345166
agacaagacaacuaaaugc

SEQ ID NO: 1345168 - RNA, 19 nt, Artificial Sequence
  Description of Artificial Sequence: Synthetic oligonucleotide
  Sense strand starting at position 1706 of SEQ ID NO: 1242407
gggcuuaaccaucgugcca

SEQ ID NO: 1345169 - RNA, 19 nt, Artificial Sequence
  Description of Artificial Sequence: Synthetic oligonucleotide
  Antisense strand to SEQ ID NO: 1345168
uggcacgaugguuaagccc

SEQ ID NO: 1345170 - RNA, 19 nt, Artificial Sequence
  Description of Artificial Sequence: Synthetic oligonucleotide
  Sense strand starting at position 1719 of SEQ ID NO: 1242407
gugccauuggacugugacu

SEQ ID NO: 1345171 - RNA, 19 nt, Artificial Sequence
  Description of Artificial Sequence: Synthetic oligonucleotide
  Antisense strand to SEQ ID NO: 1345170
agucacaguccaauggcac

SEQ ID NO: 1345172 - RNA, 19 nt, Artificial Sequence
  Description of Artificial Sequence: Synthetic oligonucleotide
  Sense strand starting at position 2015 of SEQ ID NO: 1242407
guaucacuccagggugacu

SEQ ID NO: 1345173 - RNA, 19 nt, Artificial Sequence
  Description of Artificial Sequence: Synthetic oligonucleotide
  Antisense strand to SEQ ID NO: 1345172
agucacccuggagugauac

SEQ ID NO: 1345174 - RNA, 19 nt, Artificial Sequence
  Description of Artificial Sequence: Synthetic oligonucleotide
  Sense strand starting at position 2120 of SEQ ID NO: 1242407
uguuauguguuggccucaa

SEQ ID NO: 1345175 - RNA, 19 nt, Artificial Sequence
  Description of Artificial Sequence: Synthetic oligonucleotide
  Antisense strand to SEQ ID NO: 1345174
uugaggccaacacauaaca

SEQ ID NO: 1345176 - RNA, 19 nt, Artificial Sequence
  Description of Artificial Sequence: Synthetic oligonucleotide
  Sense strand starting at position 2124 of SEQ ID NO: 1242407
auguguuggccucaaguaa

SEQ ID NO: 1345177 - RNA, 19 nt, Artificial Sequence
  Description of Artificial Sequence: Synthetic oligonucleotide
  Antisense strand to SEQ ID NO: 1345176
uuacuugaggccaacacau

SEQ ID NO: 1345178 - RNA, 19 nt, Artificial Sequence
  Description of Artificial Sequence: Synthetic oligonucleotide
  Sense strand starting at position 2247 of SEQ ID NO: 1242407
aggucucuauugcccaaua

SEQ ID NO: 1345179 - RNA, 19 nt, Artificial Sequence
  Description of Artificial Sequence: Synthetic oligonucleotide
  Antisense strand to SEQ ID NO: 1345178
uauugggcaauagagaccu

SEQ ID NO: 1345180 - RNA, 19 nt, Artificial Sequence
  Description of Artificial Sequence: Synthetic oligonucleotide
  Sense strand starting at position 2248 of SEQ ID NO: 1242407
ggucucuauugcccaauau

SEQ ID NO: 1345181 - RNA, 19 nt, Artificial Sequence
  Description of Artificial Sequence: Synthetic oligonucleotide
  Antisense strand to SEQ ID NO: 1345180
auauugggcaauagagacc

SEQ ID NO: 1345182 - RNA, 19 nt, Artificial Sequence
  Description of Artificial Sequence: Synthetic oligonucleotide
  Sense strand starting at position 2334 of SEQ ID NO: 1242407
aggucauggcaugauguga

SEQ ID NO: 1345183 - RNA, 19 nt, Artificial Sequence
  Description of Artificial Sequence: Synthetic oligonucleotide
  Antisense strand to SEQ ID NO: 1345182
ucacaucaugccaugaccu

SEQ ID NO: 1345184 - RNA, 19 nt, Artificial Sequence
  Description of Artificial Sequence: Synthetic oligonucleotide
  Sense strand starting at position 2345 of SEQ ID NO: 1242407
ugaugugaauuccucacaa

SEQ ID NO: 1345185 - RNA, 19 nt, Artificial Sequence
  Description of Artificial Sequence: Synthetic oligonucleotide
  Antisense strand to SEQ ID NO: 1345184
uugugaggaauucacauca

SEQ ID NO: 1345186 - RNA, 19 nt, Artificial Sequence
  Description of Artificial Sequence: Synthetic oligonucleotide
  Sense strand starting at position 2349 of SEQ ID NO: 1242407
gugaauuccucacaaggag

SEQ ID NO: 1345187 - RNA, 19 nt, Artificial Sequence
  Description of Artificial Sequence: Synthetic oligonucleotide
  Antisense strand to SEQ ID NO: 1345186
cuccuugugaggaauucac

SEQ ID NO: 1345188 - RNA, 19 nt, Artificial Sequence
  Description of Artificial Sequence: Synthetic oligonucleotide
  Sense strand starting at position 2373 of SEQ ID NO: 1242407
aaauaugaccuuuggaggu

SEQ ID NO: 1345189 - RNA, 19 nt, Artificial Sequence
  Description of Artificial Sequence: Synthetic oligonucleotide
  Antisense strand to SEQ ID NO: 1345188
accuccaaaggucauauuu

SEQ ID NO: 1345190 - RNA, 19 nt, Artificial Sequence
  Description of Artificial Sequence: Synthetic oligonucleotide
  Sense strand starting at position 2558 of SEQ ID NO: 1242407
aggcaaucauuguugguuu

SEQ ID NO: 1345191 - RNA, 19 nt, Artificial Sequence
  Description of Artificial Sequence: Synthetic oligonucleotide
  Antisense strand to SEQ ID NO: 1345190
aaaccaacaaugauugccu

SEQ ID NO: 1345192 - RNA, 19 nt, Artificial Sequence
  Description of Artificial Sequence: Synthetic oligonucleotide
  Sense strand starting at position 2562 of SEQ ID NO: 1242407
aaucauuguugguuuagca

SEQ ID NO: 1345193 - RNA, 19 nt, Artificial Sequence
  Description of Artificial Sequence: Synthetic oligonucleotide
  Antisense strand to SEQ ID NO: 1345192
ugcuaaaccaacaaugauu

SEQ ID NO: 1345194 - RNA, 19 nt, Artificial Sequence
  Description of Artificial Sequence: Synthetic oligonucleotide
  Sense strand starting at position 2994 of SEQ ID NO: 1242407
aguuaaacauuagucaaca

SEQ ID NO: 1345195 - RNA, 19 nt, Artificial Sequence
  Description of Artificial Sequence: Synthetic oligonucleotide
  Antisense strand to SEQ ID NO: 1345194
uguugacuaauguuuaacu

SEQ ID NO: 1345196 - RNA, 19 nt, Artificial Sequence
  Description of Artificial Sequence: Synthetic oligonucleotide
  Sense strand starting at position 2995 of SEQ ID NO: 1242407
guuaaacauuagucaacag

SEQ ID NO: 1345197 - RNA, 19 nt, Artificial Sequence
  Description of Artificial Sequence: Synthetic oligonucleotide
  Antisense strand to SEQ ID NO: 1345196
cuguugacuaauguuuaac

SEQ ID NO: 1345198 - RNA, 19 nt, Artificial Sequence
  Description of Artificial Sequence: Synthetic oligonucleotide
  Sense strand starting at position 3138 of SEQ ID NO: 1242407
agcaucuacuguguagaua

SEQ ID NO: 1345199 - RNA, 19 nt, Artificial Sequence
  Description of Artificial Sequence: Synthetic oligonucleotide
  Antisense strand to SEQ ID NO: 1345198
uaucuacacaguagaugcu

SEQ ID NO: 1345200 - RNA, 19 nt, Artificial Sequence
  Description of Artificial Sequence: Synthetic oligonucleotide
  Sense strand starting at position 3147 of SEQ ID NO: 1242407
uguguagauacaugguaaa

SEQ ID NO: 1345201 - RNA, 19 nt, Artificial Sequence
  Description of Artificial Sequence: Synthetic oligonucleotide
  Antisense strand to SEQ ID NO: 1345200
uuuaccauguaucuacaca

SEQ ID NO: 1345202 - RNA, 19 nt, Artificial Sequence
  Description of Artificial Sequence: Synthetic oligonucleotide
  Sense strand starting at position 3150 of SEQ ID NO: 1242407
guagauacaugguaaauaa

SEQ ID NO: 1345203 - RNA, 19 nt, Artificial Sequence
  Description of Artificial Sequence: Synthetic oligonucleotide
  Antisense strand to SEQ ID NO: 1345202
uuauuuaccauguaucuac

SEQ ID NO: 1345204 - RNA, 19 nt, Artificial Sequence
  Description of Artificial Sequence: Synthetic oligonucleotide
  Sense strand starting at position 3263 of SEQ ID NO: 1242407
agugaucauuucugugaau

SEQ ID NO: 1345205 - RNA, 19 nt, Artificial Sequence
  Description of Artificial Sequence: Synthetic oligonucleotide
  Antisense strand to SEQ ID NO: 1345204
auucacagaaaugaucacu

SEQ ID NO: 1345206 - RNA, 19 nt, Artificial Sequence
  Description of Artificial Sequence: Synthetic oligonucleotide
  Sense strand starting at position 3745 of SEQ ID NO: 1242407
agcuuaaugugucuggaac

SEQ ID NO: 1345207 - RNA, 19 nt, Artificial Sequence
  Description of Artificial Sequence: Synthetic oligonucleotide
  Antisense strand to SEQ ID NO: 1345206
guuccagacacauuaagcu

SEQ ID NO: 1345208 - RNA, 19 nt, Artificial Sequence
  Description of Artificial Sequence: Synthetic oligonucleotide
  Sense strand starting at position 3746 of SEQ ID NO: 1242407
gcuuaaugugucuggaaca

SEQ ID NO: 1345209 - RNA, 19 nt, Artificial Sequence
  Description of Artificial Sequence: Synthetic oligonucleotide
  Antisense strand to SEQ ID NO: 1345208
uguuccagacacauuaagc

SEQ ID NO: 1345210 - RNA, 19 nt, Artificial Sequence
  Description of Artificial Sequence: Synthetic oligonucleotide
  Sense strand starting at position 3773 of SEQ ID NO: 1242407
gccaauauagcugaaucau

SEQ ID NO: 1345211 - RNA, 19 nt, Artificial Sequence
  Description of Artificial Sequence: Synthetic oligonucleotide
  Antisense strand to SEQ ID NO: 1345210
augauucagcuauauuggc

SEQ ID NO: 1345212 - RNA, 19 nt, Artificial Sequence
  Description of Artificial Sequence: Synthetic oligonucleotide
  Sense strand starting at position 3779 of SEQ ID NO: 1242407
auagcugaaucauagugau

SEQ ID NO: 1345213 - RNA, 19 nt, Artificial Sequence
  Description of Artificial Sequence: Synthetic oligonucleotide
  Antisense strand to SEQ ID NO: 1345212
aucacuaugauucagcuau

SEQ ID NO: 1345214 - RNA, 19 nt, Artificial Sequence
  Description of Artificial Sequence: Synthetic oligonucleotide
  Sense strand starting at position 3814 of SEQ ID NO: 1242407
ggaauaaagucagaggaca

SEQ ID NO: 1345215 - RNA, 19 nt, Artificial Sequence
  Description of Artificial Sequence: Synthetic oligonucleotide
  Antisense strand to SEQ ID NO: 1345214
uguccucugacuuuauucc

SEQ ID NO: 1345216 - RNA, 19 nt, Artificial Sequence
  Description of Artificial Sequence: Synthetic oligonucleotide
  Sense strand starting at position 3920 of SEQ ID NO: 1242407
aggguuuaggcaggaaagu

SEQ ID NO: 1345217 - RNA, 19 nt, Artificial Sequence
  Description of Artificial Sequence: Synthetic oligonucleotide
  Antisense strand to SEQ ID NO: 1345216
acuuuccugccuaaacccu

SEQ ID NO: 1345218 - RNA, 19 nt, Artificial Sequence
  Description of Artificial Sequence: Synthetic oligonucleotide
  Sense strand starting at position 81 of SEQ ID NO: 1242408
cucaaauuccaagggcuaa

SEQ ID NO: 1345219 - RNA, 19 nt, Artificial Sequence
  Description of Artificial Sequence: Synthetic oligonucleotide
  Antisense strand to SEQ ID NO: 1345218
uuagcccuuggaauuugag

SEQ ID NO: 1345220 - RNA, 19 nt, Artificial Sequence
  Description of Artificial Sequence: Synthetic oligonucleotide
  Sense strand starting at position 99 of SEQ ID NO: 1242408
auagguacugucugcaacu

SEQ ID NO: 1345221 - RNA, 19 nt, Artificial Sequence
  Description of Artificial Sequence: Synthetic oligonucleotide
  Antisense strand to SEQ ID NO: 1345220
aguugcagacaguaccuau

SEQ ID NO: 1345222 - RNA, 19 nt, Artificial Sequence
  Description of Artificial Sequence: Synthetic oligonucleotide
  Sense strand starting at position 193 of SEQ ID NO: 1242408
acuugcagucuacaaguua

SEQ ID NO: 1345223 - RNA, 19 nt, Artificial Sequence
  Description of Artificial Sequence: Synthetic oligonucleotide
  Antisense strand to SEQ ID NO: 1345222
uaacuuguagacugcaagu

SEQ ID NO: 1345224 - RNA, 19 nt, Artificial Sequence
  Description of Artificial Sequence: Synthetic oligonucleotide
  Sense strand starting at position 204 of SEQ ID NO: 1242408
acaaguuacgaaugcacaa

SEQ ID NO: 1345225 - RNA, 19 nt, Artificial Sequence
  Description of Artificial Sequence: Synthetic oligonucleotide
  Antisense strand to SEQ ID NO: 1345224
uugugcauucguaacuugu

SEQ ID NO: 1345226 - RNA, 19 nt, Artificial Sequence
  Description of Artificial Sequence: Synthetic oligonucleotide
  Sense strand starting at position 376 of SEQ ID NO: 1242408
ccaagcacugcuuguauuu

SEQ ID NO: 1345227 - RNA, 19 nt, Artificial Sequence
  Description of Artificial Sequence: Synthetic oligonucleotide
  Antisense strand to SEQ ID NO: 1345226
aaauacaagcagugcuugg

SEQ ID NO: 1345228 - RNA, 19 nt, Artificial Sequence
  Description of Artificial Sequence: Synthetic oligonucleotide
  Sense strand starting at position 408 of SEQ ID NO: 1242408
agcccugagccuuaagaga

SEQ ID NO: 1345229 - RNA, 19 nt, Artificial Sequence
  Description of Artificial Sequence: Synthetic oligonucleotide
  Antisense strand to SEQ ID NO: 1345228
ucucuuaaggcucagggcu

SEQ ID NO: 1345230 - RNA, 19 nt, Artificial Sequence
  Description of Artificial Sequence: Synthetic oligonucleotide
  Sense strand starting at position 413 of SEQ ID NO: 1242408
ugagccuuaagagauaguu

SEQ ID NO: 1345231 - RNA, 19 nt, Artificial Sequence
  Description of Artificial Sequence: Synthetic oligonucleotide
  Antisense strand to SEQ ID NO: 1345230
aacuaucucuuaaggcuca

SEQ ID NO: 1345232 - RNA, 19 nt, Artificial Sequence
  Description of Artificial Sequence: Synthetic oligonucleotide
  Sense strand starting at position 621 of SEQ ID NO: 1242408
auuccaguugcgggucaau

SEQ ID NO: 1345233 - RNA, 19 nt, Artificial Sequence
  Description of Artificial Sequence: Synthetic oligonucleotide
  Antisense strand to SEQ ID NO: 1345232
auugacccgcaacuggaau

SEQ ID NO: 1345234 - RNA, 19 nt, Artificial Sequence
  Description of Artificial Sequence: Synthetic oligonucleotide
  Sense strand starting at position 638 of SEQ ID NO: 1242408
auagccaaguaaugauuua

SEQ ID NO: 1345235 - RNA, 19 nt, Artificial Sequence
  Description of Artificial Sequence: Synthetic oligonucleotide
  Antisense strand to SEQ ID NO: 1345234
uaaaucauuacuuggcuau

SEQ ID NO: 1345236 - RNA, 19 nt, Artificial Sequence
  Description of Artificial Sequence: Synthetic oligonucleotide
  Sense strand starting at position 697 of SEQ ID NO: 1242408
acuguacuuagguguggaa

SEQ ID NO: 1345237 - RNA, 19 nt, Artificial Sequence
  Description of Artificial Sequence: Synthetic oligonucleotide
  Antisense strand to SEQ ID NO: 1345236
uuccacaccuaaguacagu

SEQ ID NO: 1345238 - RNA, 19 nt, Artificial Sequence
  Description of Artificial Sequence: Synthetic oligonucleotide
  Sense strand starting at position 787 of SEQ ID NO: 1242408
agugcugagucauuacaag

SEQ ID NO: 1345239 - RNA, 19 nt, Artificial Sequence
  Description of Artificial Sequence: Synthetic oligonucleotide
  Antisense strand to SEQ ID NO: 1345238
cuuguaaugacucagcacu

SEQ ID NO: 1345240 - RNA, 19 nt, Artificial Sequence
  Description of Artificial Sequence: Synthetic oligonucleotide
  Sense strand starting at position 801 of SEQ ID NO: 1242408
acaagcuguuuccucugaa

SEQ ID NO: 1345241 - RNA, 19 nt, Artificial Sequence
  Description of Artificial Sequence: Synthetic oligonucleotide
  Antisense strand to SEQ ID NO: 1345240
uucagaggaaacagcuugu

SEQ ID NO: 1345242 - RNA, 19 nt, Artificial Sequence
  Description of Artificial Sequence: Synthetic oligonucleotide
  Sense strand starting at position 804 of SEQ ID NO: 1242408
agcuguuuccucugaaaug

SEQ ID NO: 1345243 - RNA, 19 nt, Artificial Sequence
  Description of Artificial Sequence: Synthetic oligonucleotide
  Antisense strand to SEQ ID NO: 1345242
cauuucagaggaaacagcu

SEQ ID NO: 1345244 - RNA, 19 nt, Artificial Sequence
  Description of Artificial Sequence: Synthetic oligonucleotide
  Sense strand starting at position 994 of SEQ ID NO: 1242408
accguaacuuuaucccaga

SEQ ID NO: 1345245 - RNA, 19 nt, Artificial Sequence
  Description of Artificial Sequence: Synthetic oligonucleotide
  Antisense strand to SEQ ID NO: 1345244
ucugggauaaaguuacggu

SEQ ID NO: 1345246 - RNA, 19 nt, Artificial Sequence
  Description of Artificial Sequence: Synthetic oligonucleotide
  Sense strand starting at position 1119 of SEQ ID NO: 1242408
ccuguaauuggcggaugua

SEQ ID NO: 1345247 - RNA, 19 nt, Artificial Sequence
  Description of Artificial Sequence: Synthetic oligonucleotide
  Antisense strand to SEQ ID NO: 1345246
uacauccgccaauuacagg

SEQ ID NO: 1345248 - RNA, 19 nt, Artificial Sequence
  Description of Artificial Sequence: Synthetic oligonucleotide
  Sense strand starting at position 1122 of SEQ ID NO: 1242408
guaauuggcggauguagaa

SEQ ID NO: 1345249 - RNA, 19 nt, Artificial Sequence
  Description of Artificial Sequence: Synthetic oligonucleotide
  Antisense strand to SEQ ID NO: 1345248
uucuacauccgccaauuac

SEQ ID NO: 1345250 - RNA, 19 nt, Artificial Sequence
  Description of Artificial Sequence: Synthetic oligonucleotide
  Sense strand starting at position 1166 of SEQ ID NO: 1242408
uagauuuguucucgaggag

SEQ ID NO: 1345251 - RNA, 19 nt, Artificial Sequence
  Description of Artificial Sequence: Synthetic oligonucleotide
  Antisense strand to SEQ ID NO: 1345250
cuccucgagaacaaaucua

SEQ ID NO: 1345252 - RNA, 19 nt, Artificial Sequence
  Description of Artificial Sequence: Synthetic oligonucleotide
  Sense strand starting at position 1181 of SEQ ID NO: 1242408
ggaggaugcaauggagagu

SEQ ID NO: 1345253 - RNA, 19 nt, Artificial Sequence
  Description of Artificial Sequence: Synthetic oligonucleotide
  Antisense strand to SEQ ID NO: 1345252
acucuccauugcauccucc

SEQ ID NO: 1345254 - RNA, 19 nt, Artificial Sequence
  Description of Artificial Sequence: Synthetic oligonucleotide
  Sense strand starting at position 1207 of SEQ ID NO: 1242408
gcaggaugcuaacugguuu

SEQ ID NO: 1345255 - RNA, 19 nt, Artificial Sequence
  Description of Artificial Sequence: Synthetic oligonucleotide
  Antisense strand to SEQ ID NO: 1345254
aaaccaguuagcauccugc

SEQ ID NO: 1345256 - RNA, 19 nt, Artificial Sequence
  Description of Artificial Sequence: Synthetic oligonucleotide
  Sense strand starting at position 1265 of SEQ ID NO: 1242408
uuucguuccucuccaagga

SEQ ID NO: 1345257 - RNA, 19 nt, Artificial Sequence
  Description of Artificial Sequence: Synthetic oligonucleotide
  Antisense strand to SEQ ID NO: 1345256
uccuuggagaggaacgaaa

SEQ ID NO: 1345258 - RNA, 19 nt, Artificial Sequence
  Description of Artificial Sequence: Synthetic oligonucleotide
  Sense strand starting at position 2549 of SEQ ID NO: 1242408
ggcuguucccaggaaggga

SEQ ID NO: 1345259 - RNA, 19 nt, Artificial Sequence
  Description of Artificial Sequence: Synthetic oligonucleotide
  Antisense strand to SEQ ID NO: 1345258
ucccuuccugggaacagcc

SEQ ID NO: 1345260 - RNA, 19 nt, Artificial Sequence
  Description of Artificial Sequence: Synthetic oligonucleotide
  Sense strand starting at position 3072 of SEQ ID NO: 1242408
ccaauaggaucugcuaguu

SEQ ID NO: 1345261 - RNA, 19 nt, Artificial Sequence
  Description of Artificial Sequence: Synthetic oligonucleotide
  Antisense strand to SEQ ID NO: 1345260
aacuagcagauccuauugg

SEQ ID NO: 1345262 - RNA, 19 nt, Artificial Sequence
  Description of Artificial Sequence: Synthetic oligonucleotide
  Sense strand starting at position 3077 of SEQ ID NO: 1242408
aggaucugcuaguucucaa

SEQ ID NO: 1345263 - RNA, 19 nt, Artificial Sequence
  Description of Artificial Sequence: Synthetic oligonucleotide
  Antisense strand to SEQ ID NO: 1345262
uugagaacuagcagauccu

SEQ ID NO: 1345264 - RNA, 19 nt, Artificial Sequence
  Description of Artificial Sequence: Synthetic oligonucleotide
  Sense strand starting at position 3101 of SEQ ID NO: 1242408
gcguuuggaagcugagaga

SEQ ID NO: 1345265 - RNA, 19 nt, Artificial Sequence
  Description of Artificial Sequence: Synthetic oligonucleotide
  Antisense strand to SEQ ID NO: 1345264
ucucucagcuuccaaacgc

SEQ ID NO: 1345266 - RNA, 19 nt, Artificial Sequence
  Description of Artificial Sequence: Synthetic oligonucleotide
  Sense strand starting at position 3207 of SEQ ID NO: 1242408
cuuaauaauugugucaaag

SEQ ID NO: 1345267 - RNA, 19 nt, Artificial Sequence
  Description of Artificial Sequence: Synthetic oligonucleotide
  Antisense strand to SEQ ID NO: 1345266
cuuugacacaauuauuaag

SEQ ID NO: 1345268 - RNA, 19 nt, Artificial Sequence
  Description of Artificial Sequence: Synthetic oligonucleotide
  Sense strand starting at position 3286 of SEQ ID NO: 1242408
agcaaugaacccgaccaua

SEQ ID NO: 1345269 - RNA, 19 nt, Artificial Sequence
  Description of Artificial Sequence: Synthetic oligonucleotide
  Antisense strand to SEQ ID NO: 1345268
uauggucggguucauugcu

SEQ ID NO: 1345270 - RNA, 19 nt, Artificial Sequence
  Description of Artificial Sequence: Synthetic oligonucleotide
  Sense strand starting at position 3308 of SEQ ID NO: 1242408
uuccuuucucccgaagaac

SEQ ID NO: 1345271 - RNA, 19 nt, Artificial Sequence
  Description of Artificial Sequence: Synthetic oligonucleotide
  Antisense strand to SEQ ID NO: 1345270
guucuucgggagaaaggaa

SEQ ID NO: 1345272 - RNA, 19 nt, Artificial Sequence
  Description of Artificial Sequence: Synthetic oligonucleotide
  Sense strand starting at position 3323 of SEQ ID NO: 1242408
gaacuugaaugagaaugga

SEQ ID NO: 1345273 - RNA, 19 nt, Artificial Sequence
  Description of Artificial Sequence: Synthetic oligonucleotide
  Antisense strand to SEQ ID NO: 1345272
uccauucucauucaaguuc

SEQ ID NO: 1345274 - RNA, 19 nt, Artificial Sequence
  Description of Artificial Sequence: Synthetic oligonucleotide
  Sense strand starting at position 3415 of SEQ ID NO: 1242408
cgugaucucacccaggcuu

SEQ ID NO: 1345275 - RNA, 19 nt, Artificial Sequence
  Description of Artificial Sequence: Synthetic oligonucleotide
  Antisense strand to SEQ ID NO: 1345274
aagccugggugagaucacg

SEQ ID NO: 1345276 - RNA, 19 nt, Artificial Sequence
  Description of Artificial Sequence: Synthetic oligonucleotide
  Sense strand starting at position 3553 of SEQ ID NO: 1242408
cggccaguccuauaaugag

SEQ ID NO: 1345277 - RNA, 19 nt, Artificial Sequence
  Description of Artificial Sequence: Synthetic oligonucleotide
  Antisense strand to SEQ ID NO: 1345276
cucauuauaggacuggccg

SEQ ID NO: 1345278 - RNA, 19 nt, Artificial Sequence
  Description of Artificial Sequence: Synthetic oligonucleotide
  Sense strand starting at position 3621 of SEQ ID NO: 1242408
gccaacuucucugcaggau

SEQ ID NO: 1345279 - RNA, 19 nt, Artificial Sequence
  Description of Artificial Sequence: Synthetic oligonucleotide
  Antisense strand to SEQ ID NO: 1345278
auccugcagagaaguuggc

SEQ ID NO: 1345280 - RNA, 19 nt, Artificial Sequence
  Description of Artificial Sequence: Synthetic oligonucleotide
  Sense strand starting at position 3763 of SEQ ID NO: 1242408
ugagcugagacuugucuac

SEQ ID NO: 1345281 - RNA, 19 nt, Artificial Sequence
  Description of Artificial Sequence: Synthetic oligonucleotide
  Antisense strand to SEQ ID NO: 1345280
guagacaagucucagcuca

SEQ ID NO: 1345282 - RNA, 19 nt, Artificial Sequence
  Description of Artificial Sequence: Synthetic oligonucleotide
  Sense strand starting at position 3765 of SEQ ID NO: 1242408
agcugagacuugucuacga

SEQ ID NO: 1345283 - RNA, 19 nt, Artificial Sequence
  Description of Artificial Sequence: Synthetic oligonucleotide
  Antisense strand to SEQ ID NO: 1345282
ucguagacaagucucagcu

SEQ ID NO: 1345284 - RNA, 19 nt, Artificial Sequence
  Description of Artificial Sequence: Synthetic oligonucleotide
  Sense strand starting at position 3767 of SEQ ID NO: 1242408
cugagacuugucuacgaau

SEQ ID NO: 1345285 - RNA, 19 nt, Artificial Sequence
  Description of Artificial Sequence: Synthetic oligonucleotide
  Antisense strand to SEQ ID NO: 1345284
auucguagacaagucucag

SEQ ID NO: 1345286 - RNA, 19 nt, Artificial Sequence
  Description of Artificial Sequence: Synthetic oligonucleotide
  Sense strand starting at position 3769 of SEQ ID NO: 1242408
gagacuugucuacgaaugg

SEQ ID NO: 1345287 - RNA, 19 nt, Artificial Sequence
  Description of Artificial Sequence: Synthetic oligonucleotide
  Antisense strand to SEQ ID NO: 1345286
ccauucguagacaagucuc

SEQ ID NO: 1345288 - RNA, 19 nt, Artificial Sequence
  Description of Artificial Sequence: Synthetic oligonucleotide
  Sense strand starting at position 3803 of SEQ ID NO: 1242408
ugaaaugugcggagugcuu

SEQ ID NO: 1345289 - RNA, 19 nt, Artificial Sequence
  Description of Artificial Sequence: Synthetic oligonucleotide
  Antisense strand to SEQ ID NO: 1345288
aagcacuccgcacauuuca

SEQ ID NO: 1345290 - RNA, 19 nt, Artificial Sequence
  Description of Artificial Sequence: Synthetic oligonucleotide
  Sense strand starting at position 3880 of SEQ ID NO: 1242408
ugcuuauuauggccagaca

SEQ ID NO: 1345291 - RNA, 19 nt, Artificial Sequence
  Description of Artificial Sequence: Synthetic oligonucleotide
  Antisense strand to SEQ ID NO: 1345290
ugucuggccauaauaagca

SEQ ID NO: 1345292 - RNA, 19 nt, Artificial Sequence
  Description of Artificial Sequence: Synthetic oligonucleotide
  Sense strand starting at position 3881 of SEQ ID NO: 1242408
gcuuauuauggccagacac

SEQ ID NO: 1345293 - RNA, 19 nt, Artificial Sequence
  Description of Artificial Sequence: Synthetic oligonucleotide
  Antisense strand to SEQ ID NO: 1345292
gugucuggccauaauaagc

SEQ ID NO: 1345294 - RNA, 19 nt, Artificial Sequence
  Description of Artificial Sequence: Synthetic oligonucleotide
  Sense strand starting at position 3883 of SEQ ID NO: 1242408
uuauuauggccagacacca

SEQ ID NO: 1345295 - RNA, 19 nt, Artificial Sequence
  Description of Artificial Sequence: Synthetic oligonucleotide
  Antisense strand to SEQ ID NO: 1345294
uggugucuggccauaauaa

SEQ ID NO: 1345296 - RNA, 19 nt, Artificial Sequence
  Description of Artificial Sequence: Synthetic oligonucleotide
  Sense strand starting at position 3917 of SEQ ID NO: 1242408
ccgcauuuacaacguaauc

SEQ ID NO: 1345297 - RNA, 19 nt, Artificial Sequence
  Description of Artificial Sequence: Synthetic oligonucleotide
  Antisense strand to SEQ ID NO: 1345296
gauuacguuguaaaugcgg

SEQ ID NO: 1345298 - RNA, 19 nt, Artificial Sequence
  Description of Artificial Sequence: Synthetic oligonucleotide
  Sense strand starting at position 156 of SEQ ID NO: 1242409
gcuaauuaaucauggauuu

SEQ ID NO: 1345299 - RNA, 19 nt, Artificial Sequence
  Description of Artificial Sequence: Synthetic oligonucleotide
  Antisense strand to SEQ ID NO: 1345298
aaauccaugauuaauuagc

SEQ ID NO: 1345300 - RNA, 19 nt, Artificial Sequence
  Description of Artificial Sequence: Synthetic oligonucleotide
  Sense strand starting at position 177 of SEQ ID NO: 1242409
cccucuaccuuguuaguau

SEQ ID NO: 1345301 - RNA, 19 nt, Artificial Sequence
  Description of Artificial Sequence: Synthetic oligonucleotide
  Antisense strand to SEQ ID NO: 1345300
auacuaacaagguagaggg

SEQ ID NO: 1345302 - RNA, 19 nt, Artificial Sequence
  Description of Artificial Sequence: Synthetic oligonucleotide
  Sense strand starting at position 186 of SEQ ID NO: 1242409
uuguuaguaugauugguga

SEQ ID NO: 1345303 - RNA, 19 nt, Artificial Sequence
  Description of Artificial Sequence: Synthetic oligonucleotide
  Antisense strand to SEQ ID NO: 1345302
ucaccaaucauacuaacaa

SEQ ID NO: 1345304 - RNA, 19 nt, Artificial Sequence
  Description of Artificial Sequence: Synthetic oligonucleotide
  Sense strand starting at position 716 of SEQ ID NO: 1242409
ugguuucuuguuuggagua

SEQ ID NO: 1345305 - RNA, 19 nt, Artificial Sequence
  Description of Artificial Sequence: Synthetic oligonucleotide
  Antisense strand to SEQ ID NO: 1345304
uacuccaaacaagaaacca

SEQ ID NO: 1345306 - RNA, 19 nt, Artificial Sequence
  Description of Artificial Sequence: Synthetic oligonucleotide
  Sense strand starting at position 721 of SEQ ID NO: 1242409
ucuuguuuggaguaucagu

SEQ ID NO: 1345307 - RNA, 19 nt, Artificial Sequence
  Description of Artificial Sequence: Synthetic oligonucleotide
  Antisense strand to SEQ ID NO: 1345306
acugauacuccaaacaaga

SEQ ID NO: 1345308 - RNA, 19 nt, Artificial Sequence
  Description of Artificial Sequence: Synthetic oligonucleotide
  Sense strand starting at position 726 of SEQ ID NO: 1242409
uuuggaguaucaguugaaa

SEQ ID NO: 1345309 - RNA, 19 nt, Artificial Sequence
  Description of Artificial Sequence: Synthetic oligonucleotide
  Antisense strand to SEQ ID NO: 1345308
uuucaacugauacuccaaa

SEQ ID NO: 1345310 - RNA, 19 nt, Artificial Sequence
  Description of Artificial Sequence: Synthetic oligonucleotide
  Sense strand starting at position 728 of SEQ ID NO: 1242409
uggaguaucaguugaaaca

SEQ ID NO: 1345311 - RNA, 19 nt, Artificial Sequence
  Description of Artificial Sequence: Synthetic oligonucleotide
  Antisense strand to SEQ ID NO: 1345310
uguuucaacugauacucca

SEQ ID NO: 1345312 - RNA, 19 nt, Artificial Sequence
  Description of Artificial Sequence: Synthetic oligonucleotide
  Sense strand starting at position 888 of SEQ ID NO: 1242409
acauuagaauugccaguca

SEQ ID NO: 1345313 - RNA, 19 nt, Artificial Sequence
  Description of Artificial Sequence: Synthetic oligonucleotide
  Antisense strand to SEQ ID NO: 1345312
ugacuggcaauucuaaugu

SEQ ID NO: 1345314 - RNA, 19 nt, Artificial Sequence
  Description of Artificial Sequence: Synthetic oligonucleotide
  Sense strand starting at position 1009 of SEQ ID NO: 1242409
uaaauucuaccgugucaag

SEQ ID NO: 1345315 - RNA, 19 nt, Artificial Sequence
  Description of Artificial Sequence: Synthetic oligonucleotide
  Antisense strand to SEQ ID NO: 1345314
cuugacacgguagaauuua

SEQ ID NO: 1345316 - RNA, 19 nt, Artificial Sequence
  Description of Artificial Sequence: Synthetic oligonucleotide
  Sense strand starting at position 1210 of SEQ ID NO: 1242409
aauuauugcgcugaugcaa

SEQ ID NO: 1345317 - RNA, 19 nt, Artificial Sequence
  Description of Artificial Sequence: Synthetic oligonucleotide
  Antisense strand to SEQ ID NO: 1345316
uugcaucagcgcaauaauu

SEQ ID NO: 1345318 - RNA, 19 nt, Artificial Sequence
  Description of Artificial Sequence: Synthetic oligonucleotide
  Sense strand starting at position 1312 of SEQ ID NO: 1242409
aacgguugggcacaauuaa

SEQ ID NO: 1345319 - RNA, 19 nt, Artificial Sequence
  Description of Artificial Sequence: Synthetic oligonucleotide
  Antisense strand to SEQ ID NO: 1345318
uuaauugugcccaaccguu

SEQ ID NO: 1345320 - RNA, 19 nt, Artificial Sequence
  Description of Artificial Sequence: Synthetic oligonucleotide
  Sense strand starting at position 1333 of SEQ ID NO: 1242409
gguaacuucgcagaaguca

SEQ ID NO: 1345321 - RNA, 19 nt, Artificial Sequence
  Description of Artificial Sequence: Synthetic oligonucleotide
  Antisense strand to SEQ ID NO: 1345320
ugacuucugcgaaguuacc

SEQ ID NO: 1345322 - RNA, 19 nt, Artificial Sequence
  Description of Artificial Sequence: Synthetic oligonucleotide
  Sense strand starting at position 1341 of SEQ ID NO: 1242409
cgcagaagucaccaaagua

SEQ ID NO: 1345323 - RNA, 19 nt, Artificial Sequence
  Description of Artificial Sequence: Synthetic oligonucleotide
  Antisense strand to SEQ ID NO: 1345322
uacuuuggugacuucugcg

SEQ ID NO: 1345324 - RNA, 19 nt, Artificial Sequence
  Description of Artificial Sequence: Synthetic oligonucleotide
  Sense strand starting at position 1750 of SEQ ID NO: 1242409
ccugcuugagucgggagau

SEQ ID NO: 1345325 - RNA, 19 nt, Artificial Sequence
  Description of Artificial Sequence: Synthetic oligonucleotide
  Antisense strand to SEQ ID NO: 1345324
aucucccgacucaagcagg

SEQ ID NO: 1345326 - RNA, 19 nt, Artificial Sequence
  Description of Artificial Sequence: Synthetic oligonucleotide
  Sense strand starting at position 2279 of SEQ ID NO: 1242409
agucuugagcaacaacgau

SEQ ID NO: 1345327 - RNA, 19 nt, Artificial Sequence
  Description of Artificial Sequence: Synthetic oligonucleotide
  Antisense strand to SEQ ID NO: 1345326
aucguuguugcucaagacu

SEQ ID NO: 1345328 - RNA, 19 nt, Artificial Sequence
  Description of Artificial Sequence: Synthetic oligonucleotide
  Sense strand starting at position 2376 of SEQ ID NO: 1242409
ggaaauacuuuaucaguuc

SEQ ID NO: 1345329 - RNA, 19 nt, Artificial Sequence
  Description of Artificial Sequence: Synthetic oligonucleotide
  Antisense strand to SEQ ID NO: 1345328
gaacugauaaaguauuucc

SEQ ID NO: 1345330 - RNA, 19 nt, Artificial Sequence
  Description of Artificial Sequence: Synthetic oligonucleotide
  Sense strand starting at position 2384 of SEQ ID NO: 1242409
uuuaucaguucugcugaau

SEQ ID NO: 1345331 - RNA, 19 nt, Artificial Sequence
  Description of Artificial Sequence: Synthetic oligonucleotide
  Antisense strand to SEQ ID NO: 1345330
auucagcagaacugauaaa

SEQ ID NO: 1345332 - RNA, 19 nt, Artificial Sequence
  Description of Artificial Sequence: Synthetic oligonucleotide
  Sense strand starting at position 2387 of SEQ ID NO: 1242409
aucaguucugcugaauaau

SEQ ID NO: 1345333 - RNA, 19 nt, Artificial Sequence
  Description of Artificial Sequence: Synthetic oligonucleotide
  Antisense strand to SEQ ID NO: 1345332
auuauucagcagaacugau

SEQ ID NO: 1345334 - RNA, 19 nt, Artificial Sequence
  Description of Artificial Sequence: Synthetic oligonucleotide
  Sense strand starting at position 2390 of SEQ ID NO: 1242409
aguucugcugaauaaucga

SEQ ID NO: 1345335 - RNA, 19 nt, Artificial Sequence
  Description of Artificial Sequence: Synthetic oligonucleotide
  Antisense strand to SEQ ID NO: 1345334
ucgauuauucagcagaacu

SEQ ID NO: 1345336 - RNA, 19 nt, Artificial Sequence
  Description of Artificial Sequence: Synthetic oligonucleotide
  Sense strand starting at position 2569 of SEQ ID NO: 1242409
ggcagcuuagguuauucua

SEQ ID NO: 1345337 - RNA, 19 nt, Artificial Sequence
  Description of Artificial Sequence: Synthetic oligonucleotide
  Antisense strand to SEQ ID NO: 1345336
uagaauaaccuaagcugcc

SEQ ID NO: 1345338 - RNA, 19 nt, Artificial Sequence
  Description of Artificial Sequence: Synthetic oligonucleotide
  Sense strand starting at position 2715 of SEQ ID NO: 1242409
guacuuguugccguuauca

SEQ ID NO: 1345339 - RNA, 19 nt, Artificial Sequence
  Description of Artificial Sequence: Synthetic oligonucleotide
  Antisense strand to SEQ ID NO: 1345338
ugauaacggcaacaaguac

SEQ ID NO: 1345340 - RNA, 19 nt, Artificial Sequence
  Description of Artificial Sequence: Synthetic oligonucleotide
  Sense strand starting at position 2717 of SEQ ID NO: 1242409
acuuguugccguuaucaua

SEQ ID NO: 1345341 - RNA, 19 nt, Artificial Sequence
  Description of Artificial Sequence: Synthetic oligonucleotide
  Antisense strand to SEQ ID NO: 1345340
uaugauaacggcaacaagu

SEQ ID NO: 1345342 - RNA, 19 nt, Artificial Sequence
  Description of Artificial Sequence: Synthetic oligonucleotide
  Sense strand starting at position 2781 of SEQ ID NO: 1242409
cagugagcaucuucuuaug

SEQ ID NO: 1345343 - RNA, 19 nt, Artificial Sequence
  Description of Artificial Sequence: Synthetic oligonucleotide
  Antisense strand to SEQ ID NO: 1345342
cauaagaagaugcucacug

SEQ ID NO: 1345344 - RNA, 19 nt, Artificial Sequence
  Description of Artificial Sequence: Synthetic oligonucleotide
  Sense strand starting at position 2783 of SEQ ID NO: 1242409
gugagcaucuucuuaugga

SEQ ID NO: 1345345 - RNA, 19 nt, Artificial Sequence
  Description of Artificial Sequence: Synthetic oligonucleotide
  Antisense strand to SEQ ID NO: 1345344
uccauaagaagaugcucac

SEQ ID NO: 1345346 - RNA, 19 nt, Artificial Sequence
  Description of Artificial Sequence: Synthetic oligonucleotide
  Sense strand starting at position 2799 of SEQ ID NO: 1242409
ggaggaucggccuguacaa

SEQ ID NO: 1345347 - RNA, 19 nt, Artificial Sequence
  Description of Artificial Sequence: Synthetic oligonucleotide
  Antisense strand to SEQ ID NO: 1345346
uuguacaggccgauccucc

SEQ ID NO: 1345348 - RNA, 19 nt, Artificial Sequence
  Description of Artificial Sequence: Synthetic oligonucleotide
  Sense strand starting at position 2811 of SEQ ID NO: 1242409
uguacaagugaguaccuau

SEQ ID NO: 1345349 - RNA, 19 nt, Artificial Sequence
  Description of Artificial Sequence: Synthetic oligonucleotide
  Antisense strand to SEQ ID NO: 1345348
auagguacucacuuguaca

SEQ ID NO: 1345350 - RNA, 19 nt, Artificial Sequence
  Description of Artificial Sequence: Synthetic oligonucleotide
  Sense strand starting at position 2899 of SEQ ID NO: 1242409
uccauaaggugauuaugau

SEQ ID NO: 1345351 - RNA, 19 nt, Artificial Sequence
  Description of Artificial Sequence: Synthetic oligonucleotide
  Antisense strand to SEQ ID NO: 1345350
aucauaaucaccuuaugga

SEQ ID NO: 1345352 - RNA, 19 nt, Artificial Sequence
  Description of Artificial Sequence: Synthetic oligonucleotide
  Sense strand starting at position 2955 of SEQ ID NO: 1242409
uuaaauuccugagaucuga

SEQ ID NO: 1345353 - RNA, 19 nt, Artificial Sequence
  Description of Artificial Sequence: Synthetic oligonucleotide
  Antisense strand to SEQ ID NO: 1345352
ucagaucucaggaauuuaa

SEQ ID NO: 1345354 - RNA, 19 nt, Artificial Sequence
  Description of Artificial Sequence: Synthetic oligonucleotide
  Sense strand starting at position 3043 of SEQ ID NO: 1242409
acauuaggguaguucuuua

SEQ ID NO: 1345355 - RNA, 19 nt, Artificial Sequence
  Description of Artificial Sequence: Synthetic oligonucleotide
  Antisense strand to SEQ ID NO: 1345354
uaaagaacuacccuaaugu

SEQ ID NO: 1345356 - RNA, 19 nt, Artificial Sequence
  Description of Artificial Sequence: Synthetic oligonucleotide
  Sense strand starting at position 3048 of SEQ ID NO: 1242409
aggguaguucuuuacaguu

SEQ ID NO: 1345357 - RNA, 19 nt, Artificial Sequence
  Description of Artificial Sequence: Synthetic oligonucleotide
  Antisense strand to SEQ ID NO: 1345356
aacuguaaagaacuacccu

SEQ ID NO: 1345358 - RNA, 19 nt, Artificial Sequence
  Description of Artificial Sequence: Synthetic oligonucleotide
  Sense strand starting at position 3072 of SEQ ID NO: 1242409
ggcacuuugacguacagua

SEQ ID NO: 1345359 - RNA, 19 nt, Artificial Sequence
  Description of Artificial Sequence: Synthetic oligonucleotide
  Antisense strand to SEQ ID NO: 1345358
uacuguacgucaaagugcc

SEQ ID NO: 1345360 - RNA, 19 nt, Artificial Sequence
  Description of Artificial Sequence: Synthetic oligonucleotide
  Sense strand starting at position 3119 of SEQ ID NO: 1242409
aguaaaucuccgugaggcu

SEQ ID NO: 1345361 - RNA, 19 nt, Artificial Sequence
  Description of Artificial Sequence: Synthetic oligonucleotide
  Antisense strand to SEQ ID NO: 1345360
agccucacggagauuuacu

SEQ ID NO: 1345362 - RNA, 19 nt, Artificial Sequence
  Description of Artificial Sequence: Synthetic oligonucleotide
  Sense strand starting at position 3120 of SEQ ID NO: 1242409
guaaaucuccgugaggcuu

SEQ ID NO: 1345363 - RNA, 19 nt, Artificial Sequence
  Description of Artificial Sequence: Synthetic oligonucleotide
  Antisense strand to SEQ ID NO: 1345362
aagccucacggagauuuac

SEQ ID NO: 1345364 - RNA, 19 nt, Artificial Sequence
  Description of Artificial Sequence: Synthetic oligonucleotide
  Sense strand starting at position 3182 of SEQ ID NO: 1242409
ggccgagcugugcucaaau

SEQ ID NO: 1345365 - RNA, 19 nt, Artificial Sequence
  Description of Artificial Sequence: Synthetic oligonucleotide
  Antisense strand to SEQ ID NO: 1345364
auuugagcacagcucggcc

SEQ ID NO: 1345366 - RNA, 19 nt, Artificial Sequence
  Description of Artificial Sequence: Synthetic oligonucleotide
  Sense strand starting at position 3202 of SEQ ID NO: 1242409
ccaggcuccugauuccaaa

SEQ ID NO: 1345367 - RNA, 19 nt, Artificial Sequence
  Description of Artificial Sequence: Synthetic oligonucleotide
  Antisense strand to SEQ ID NO: 1345366
uuuggaaucaggagccugg

SEQ ID NO: 1345368 - RNA, 19 nt, Artificial Sequence
  Description of Artificial Sequence: Synthetic oligonucleotide
  Sense strand starting at position 3261 of SEQ ID NO: 1242409
agaaguuuagaaugcaaga

SEQ ID NO: 1345369 - RNA, 19 nt, Artificial Sequence
  Description of Artificial Sequence: Synthetic oligonucleotide
  Antisense strand to SEQ ID NO: 1345368
ucuugcauucuaaacuucu

SEQ ID NO: 1345370 - RNA, 19 nt, Artificial Sequence
  Description of Artificial Sequence: Synthetic oligonucleotide
  Sense strand starting at position 3334 of SEQ ID NO: 1242409
ggccaagauacaggguuua

SEQ ID NO: 1345371 - RNA, 19 nt, Artificial Sequence
  Description of Artificial Sequence: Synthetic oligonucleotide
  Antisense strand to SEQ ID NO: 1345370
uaaacccuguaucuuggcc

SEQ ID NO: 1345372 - RNA, 19 nt, Artificial Sequence
  Description of Artificial Sequence: Synthetic oligonucleotide
  Sense strand starting at position 3856 of SEQ ID NO: 1242409
uggcccagcccucaagauu

SEQ ID NO: 1345373 - RNA, 19 nt, Artificial Sequence
  Description of Artificial Sequence: Synthetic oligonucleotide
  Antisense strand to SEQ ID NO: 1345372
aaucuugagggcugggcca

SEQ ID NO: 1345374 - RNA, 19 nt, Artificial Sequence
  Description of Artificial Sequence: Synthetic oligonucleotide
  Sense strand starting at position 3878 of SEQ ID NO: 1242409
agagauuuaucugggaacu

SEQ ID NO: 1345375 - RNA, 19 nt, Artificial Sequence
  Description of Artificial Sequence: Synthetic oligonucleotide
  Antisense strand to SEQ ID NO: 1345374
aguucccagauaaaucucu

SEQ ID NO: 1345376 - RNA, 19 nt, Artificial Sequence
  Description of Artificial Sequence: Synthetic oligonucleotide
  Sense strand starting at position 3880 of SEQ ID NO: 1242409
agauuuaucugggaacuua

SEQ ID NO: 1345377 - RNA, 19 nt, Artificial Sequence
  Description of Artificial Sequence: Synthetic oligonucleotide
  Antisense strand to SEQ ID NO: 1345376
uaaguucccagauaaaucu

SEQ ID NO: 1345378 - RNA, 19 nt, Artificial Sequence
  Description of Artificial Sequence: Synthetic oligonucleotide
  Sense strand starting at position 114 of SEQ ID NO: 1242410
auaagaguugcauaugacu

SEQ ID NO: 1345379 - RNA, 19 nt, Artificial Sequence
  Description of Artificial Sequence: Synthetic oligonucleotide
  Antisense strand to SEQ ID NO: 1345378
agucauaugcaacucuuau

SEQ ID NO: 1345380 - RNA, 19 nt, Artificial Sequence
  Description of Artificial Sequence: Synthetic oligonucleotide
  Sense strand starting at position 129 of SEQ ID NO: 1242410
gacuaauugccaggugagu

SEQ ID NO: 1345381 - RNA, 19 nt, Artificial Sequence
  Description of Artificial Sequence: Synthetic oligonucleotide
  Antisense strand to SEQ ID NO: 1345380
acucaccuggcaauuaguc

SEQ ID NO: 1345382 - RNA, 19 nt, Artificial Sequence
  Description of Artificial Sequence: Synthetic oligonucleotide
  Sense strand starting at position 134 of SEQ ID NO: 1242410
auugccaggugaguauuaa

SEQ ID NO: 1345383 - RNA, 19 nt, Artificial Sequence
  Description of Artificial Sequence: Synthetic oligonucleotide
  Antisense strand to SEQ ID NO: 1345382
uuaauacucaccuggcaau

SEQ ID NO: 1345384 - RNA, 19 nt, Artificial Sequence
  Description of Artificial Sequence: Synthetic oligonucleotide
  Sense strand starting at position 135 of SEQ ID NO: 1242410
uugccaggugaguauuaau

SEQ ID NO: 1345385 - RNA, 19 nt, Artificial Sequence
  Description of Artificial Sequence: Synthetic oligonucleotide
  Antisense strand to SEQ ID NO: 1345384
auuaauacucaccuggcaa

SEQ ID NO: 1345386 - RNA, 19 nt, Artificial Sequence
  Description of Artificial Sequence: Synthetic oligonucleotide
  Sense strand starting at position 144 of SEQ ID NO: 1242410
gaguauuaauaugcacaag

SEQ ID NO: 1345387 - RNA, 19 nt, Artificial Sequence
  Description of Artificial Sequence: Synthetic oligonucleotide
  Antisense strand to SEQ ID NO: 1345386
cuugugcauauuaauacuc

SEQ ID NO: 1345388 - RNA, 19 nt, Artificial Sequence
  Description of Artificial Sequence: Synthetic oligonucleotide
  Sense strand starting at position 200 of SEQ ID NO: 1242410
gccuacauccuguauggau

SEQ ID NO: 1345389 - RNA, 19 nt, Artificial Sequence
  Description of Artificial Sequence: Synthetic oligonucleotide
  Antisense strand to SEQ ID NO: 1345388
auccauacaggauguaggc

SEQ ID NO: 1345390 - RNA, 19 nt, Artificial Sequence
  Description of Artificial Sequence: Synthetic oligonucleotide
  Sense strand starting at position 274 of SEQ ID NO: 1242410
gggccagucaucugggaau

SEQ ID NO: 1345391 - RNA, 19 nt, Artificial Sequence
  Description of Artificial Sequence: Synthetic oligonucleotide
  Antisense strand to SEQ ID NO: 1345390
auucccagaugacuggccc

SEQ ID NO: 1345392 - RNA, 19 nt, Artificial Sequence
  Description of Artificial Sequence: Synthetic oligonucleotide
  Sense strand starting at position 480 of SEQ ID NO: 1242410
cgaccucagacaggguaaa

SEQ ID NO: 1345393 - RNA, 19 nt, Artificial Sequence
  Description of Artificial Sequence: Synthetic oligonucleotide
  Antisense strand to SEQ ID NO: 1345392
uuuacccugucugaggucg

SEQ ID NO: 1345394 - RNA, 19 nt, Artificial Sequence
  Description of Artificial Sequence: Synthetic oligonucleotide
  Sense strand starting at position 654 of SEQ ID NO: 1242410
cuaaauggaucccauuuga

SEQ ID NO: 1345395 - RNA, 19 nt, Artificial Sequence
  Description of Artificial Sequence: Synthetic oligonucleotide
  Antisense strand to SEQ ID NO: 1345394
ucaaaugggauccauuuag

SEQ ID NO: 1345396 - RNA, 19 nt, Artificial Sequence
  Description of Artificial Sequence: Synthetic oligonucleotide
  Sense strand starting at position 766 of SEQ ID NO: 1242410
caccucguccuggaauauu

SEQ ID NO: 1345397 - RNA, 19 nt, Artificial Sequence
  Description of Artificial Sequence: Synthetic oligonucleotide
  Antisense strand to SEQ ID NO: 1345396
aauauuccaggacgaggug

SEQ ID NO: 1345398 - RNA, 19 nt, Artificial Sequence
  Description of Artificial Sequence: Synthetic oligonucleotide
  Sense strand starting at position 974 of SEQ ID NO: 1242410
gagacauacucauccgaca

SEQ ID NO: 1345399 - RNA, 19 nt, Artificial Sequence
  Description of Artificial Sequence: Synthetic oligonucleotide
  Antisense strand to SEQ ID NO: 1345398
ugucggaugaguaugucuc

SEQ ID NO: 1345400 - RNA, 19 nt, Artificial Sequence
  Description of Artificial Sequence: Synthetic oligonucleotide
  Sense strand starting at position 1061 of SEQ ID NO: 1242410
aggaaagggcucuguccuu

SEQ ID NO: 1345401 - RNA, 19 nt, Artificial Sequence
  Description of Artificial Sequence: Synthetic oligonucleotide
  Antisense strand to SEQ ID NO: 1345400
aaggacagagcccuuuccu

SEQ ID NO: 1345402 - RNA, 19 nt, Artificial Sequence
  Description of Artificial Sequence: Synthetic oligonucleotide
  Sense strand starting at position 1108 of SEQ ID NO: 1242410
gggccuuaaacgcagaaua

SEQ ID NO: 1345403 - RNA, 19 nt, Artificial Sequence
  Description of Artificial Sequence: Synthetic oligonucleotide
  Antisense strand to SEQ ID NO: 1345402
uauucugcguuuaaggccc

SEQ ID NO: 1345404 - RNA, 19 nt, Artificial Sequence
  Description of Artificial Sequence: Synthetic oligonucleotide
  Sense strand starting at position 1110 of SEQ ID NO: 1242410
gccuuaaacgcagaauaga

SEQ ID NO: 1345405 - RNA, 19 nt, Artificial Sequence
  Description of Artificial Sequence: Synthetic oligonucleotide
  Antisense strand to SEQ ID NO: 1345404
ucuauucugcguuuaaggc

SEQ ID NO: 1345406 - RNA, 19 nt, Artificial Sequence
  Description of Artificial Sequence: Synthetic oligonucleotide
  Sense strand starting at position 1308 of SEQ ID NO: 1242410
gaaacagacagcuguggua

SEQ ID NO: 1345407 - RNA, 19 nt, Artificial Sequence
  Description of Artificial Sequence: Synthetic oligonucleotide
  Antisense strand to SEQ ID NO: 1345406
uaccacagcugucuguuuc

SEQ ID NO: 1345408 - RNA, 19 nt, Artificial Sequence
  Description of Artificial Sequence: Synthetic oligonucleotide
  Sense strand starting at position 1416 of SEQ ID NO: 1242410
aggcaauugugagcaauca

SEQ ID NO: 1345409 - RNA, 19 nt, Artificial Sequence
  Description of Artificial Sequence: Synthetic oligonucleotide
  Antisense strand to SEQ ID NO: 1345408
ugauugcucacaauugccu

SEQ ID NO: 1345410 - RNA, 19 nt, Artificial Sequence
  Description of Artificial Sequence: Synthetic oligonucleotide
  Sense strand starting at position 1417 of SEQ ID NO: 1242410
ggcaauugugagcaaucac

SEQ ID NO: 1345411 - RNA, 19 nt, Artificial Sequence
  Description of Artificial Sequence: Synthetic oligonucleotide
  Antisense strand to SEQ ID NO: 1345410
gugauugcucacaauugcc

SEQ ID NO: 1345412 - RNA, 19 nt, Artificial Sequence
  Description of Artificial Sequence: Synthetic oligonucleotide
  Sense strand starting at position 2022 of SEQ ID NO: 1242410
gcaugacucagaggaguca

SEQ ID NO: 1345413 - RNA, 19 nt, Artificial Sequence
  Description of Artificial Sequence: Synthetic oligonucleotide
  Antisense strand to SEQ ID NO: 1345412
ugacuccucugagucaugc

SEQ ID NO: 1345414 - RNA, 19 nt, Artificial Sequence
  Description of Artificial Sequence: Synthetic oligonucleotide
  Sense strand starting at position 2031 of SEQ ID NO: 1242410
agaggagucaguugucuua

SEQ ID NO: 1345415 - RNA, 19 nt, Artificial Sequence
  Description of Artificial Sequence: Synthetic oligonucleotide
  Antisense strand to SEQ ID NO: 1345414
uaagacaacugacuccucu

SEQ ID NO: 1345416 - RNA, 19 nt, Artificial Sequence
  Description of Artificial Sequence: Synthetic oligonucleotide
  Sense strand starting at position 2033 of SEQ ID NO: 1242410
aggagucaguugucuuaaa

SEQ ID NO: 1345417 - RNA, 19 nt, Artificial Sequence
  Description of Artificial Sequence: Synthetic oligonucleotide
  Antisense strand to SEQ ID NO: 1345416
uuuaagacaacugacuccu

SEQ ID NO: 1345418 - RNA, 19 nt, Artificial Sequence
  Description of Artificial Sequence: Synthetic oligonucleotide
  Sense strand starting at position 2111 of SEQ ID NO: 1242410
cacagaugucucuguuaag

SEQ ID NO: 1345419 - RNA, 19 nt, Artificial Sequence
  Description of Artificial Sequence: Synthetic oligonucleotide
  Antisense strand to SEQ ID NO: 1345418
cuuaacagagacaucugug

SEQ ID NO: 1345420 - RNA, 19 nt, Artificial Sequence
  Description of Artificial Sequence: Synthetic oligonucleotide
  Sense strand starting at position 2258 of SEQ ID NO: 1242410
uggcucagccaguaacaau

SEQ ID NO: 1345421 - RNA, 19 nt, Artificial Sequence
  Description of Artificial Sequence: Synthetic oligonucleotide
  Antisense strand to SEQ ID NO: 1345420
auuguuacuggcugagcca

SEQ ID NO: 1345422 - RNA, 19 nt, Artificial Sequence
  Description of Artificial Sequence: Synthetic oligonucleotide
  Sense strand starting at position 2280 of SEQ ID NO: 1242410
gacagagguccaugcauuc

SEQ ID NO: 1345423 - RNA, 19 nt, Artificial Sequence
  Description of Artificial Sequence: Synthetic oligonucleotide
  Antisense strand to SEQ ID NO: 1345422
gaaugcauggaccucuguc

SEQ ID NO: 1345424 - RNA, 19 nt, Artificial Sequence
  Description of Artificial Sequence: Synthetic oligonucleotide
  Sense strand starting at position 2315 of SEQ ID NO: 1242410
guggaaagcaaauguccua

SEQ ID NO: 1345425 - RNA, 19 nt, Artificial Sequence
  Description of Artificial Sequence: Synthetic oligonucleotide
  Antisense strand to SEQ ID NO: 1345424
uaggacauuugcuuuccac

SEQ ID NO: 1345426 - RNA, 19 nt, Artificial Sequence
  Description of Artificial Sequence: Synthetic oligonucleotide
  Sense strand starting at position 2348 of SEQ ID NO: 1242410
agagaagaucguggaucua

SEQ ID NO: 1345427 - RNA, 19 nt, Artificial Sequence
  Description of Artificial Sequence: Synthetic oligonucleotide
  Antisense strand to SEQ ID NO: 1345426
uagauccacgaucuucucu

SEQ ID NO: 1345428 - RNA, 19 nt, Artificial Sequence
  Description of Artificial Sequence: Synthetic oligonucleotide
  Sense strand starting at position 2357 of SEQ ID NO: 1242410
cguggaucuagccacagaa

SEQ ID NO: 1345429 - RNA, 19 nt, Artificial Sequence
  Description of Artificial Sequence: Synthetic oligonucleotide
  Antisense strand to SEQ ID NO: 1345428
uucuguggcuagauccacg

SEQ ID NO: 1345430 - RNA, 19 nt, Artificial Sequence
  Description of Artificial Sequence: Synthetic oligonucleotide
  Sense strand starting at position 2700 of SEQ ID NO: 1242410
gacagagcacccugguuau

SEQ ID NO: 1345431 - RNA, 19 nt, Artificial Sequence
  Description of Artificial Sequence: Synthetic oligonucleotide
  Antisense strand to SEQ ID NO: 1345430
auaaccagggugcucuguc

SEQ ID NO: 1345432 - RNA, 19 nt, Artificial Sequence
  Description of Artificial Sequence: Synthetic oligonucleotide
  Sense strand starting at position 2703 of SEQ ID NO: 1242410
agagcacccugguuauaac

SEQ ID NO: 1345433 - RNA, 19 nt, Artificial Sequence
  Description of Artificial Sequence: Synthetic oligonucleotide
  Antisense strand to SEQ ID NO: 1345432
guuauaaccagggugcucu

SEQ ID NO: 1345434 - RNA, 19 nt, Artificial Sequence
  Description of Artificial Sequence: Synthetic oligonucleotide
  Sense strand starting at position 2740 of SEQ ID NO: 1242410
gucaauaaauaugcuugau

SEQ ID NO: 1345435 - RNA, 19 nt, Artificial Sequence
  Description of Artificial Sequence: Synthetic oligonucleotide
  Antisense strand to SEQ ID NO: 1345434
aucaagcauauuuauugac

SEQ ID NO: 1345436 - RNA, 19 nt, Artificial Sequence
  Description of Artificial Sequence: Synthetic oligonucleotide
  Sense strand starting at position 3114 of SEQ ID NO: 1242410
aggcauucugcugaugaau

SEQ ID NO: 1345437 - RNA, 19 nt, Artificial Sequence
  Description of Artificial Sequence: Synthetic oligonucleotide
  Antisense strand to SEQ ID NO: 1345436
auucaucagcagaaugccu

SEQ ID NO: 1345438 - RNA, 19 nt, Artificial Sequence
  Description of Artificial Sequence: Synthetic oligonucleotide
  Sense strand starting at position 3123 of SEQ ID NO: 1242410
gcugaugaauauucucauu

SEQ ID NO: 1345439 - RNA, 19 nt, Artificial Sequence
  Description of Artificial Sequence: Synthetic oligonucleotide
  Antisense strand to SEQ ID NO: 1345438
aaugagaauauucaucagc

SEQ ID NO: 1345440 - RNA, 19 nt, Artificial Sequence
  Description of Artificial Sequence: Synthetic oligonucleotide
  Sense strand starting at position 3203 of SEQ ID NO: 1242410
guauuugucuacucuucuu

SEQ ID NO: 1345441 - RNA, 19 nt, Artificial Sequence
  Description of Artificial Sequence: Synthetic oligonucleotide
  Antisense strand to SEQ ID NO: 1345440
aagaagaguagacaaauac

SEQ ID NO: 1345442 - RNA, 19 nt, Artificial Sequence
  Description of Artificial Sequence: Synthetic oligonucleotide
  Sense strand starting at position 3307 of SEQ ID NO: 1242410
ugaaguuaauucucacugu

SEQ ID NO: 1345443 - RNA, 19 nt, Artificial Sequence
  Description of Artificial Sequence: Synthetic oligonucleotide
  Antisense strand to SEQ ID NO: 1345442
acagugagaauuaacuuca

SEQ ID NO: 1345444 - RNA, 19 nt, Artificial Sequence
  Description of Artificial Sequence: Synthetic oligonucleotide
  Sense strand starting at position 3310 of SEQ ID NO: 1242410
aguuaauucucacugugga

SEQ ID NO: 1345445 - RNA, 19 nt, Artificial Sequence
  Description of Artificial Sequence: Synthetic oligonucleotide
  Antisense strand to SEQ ID NO: 1345444
uccacagugagaauuaacu

SEQ ID NO: 1345446 - RNA, 19 nt, Artificial Sequence
  Description of Artificial Sequence: Synthetic oligonucleotide
  Sense strand starting at position 3311 of SEQ ID NO: 1242410
guuaauucucacuguggag

SEQ ID NO: 1345447 - RNA, 19 nt, Artificial Sequence
  Description of Artificial Sequence: Synthetic oligonucleotide
  Antisense strand to SEQ ID NO: 1345446
cuccacagugagaauuaac

SEQ ID NO: 1345448 - RNA, 19 nt, Artificial Sequence
  Description of Artificial Sequence: Synthetic oligonucleotide
  Sense strand starting at position 3331 of SEQ ID NO: 1242410
ucaacaagcuguguaaacu

SEQ ID NO: 1345449 - RNA, 19 nt, Artificial Sequence
  Description of Artificial Sequence: Synthetic oligonucleotide
  Antisense strand to SEQ ID NO: 1345448
aguuuacacagcuuguuga

SEQ ID NO: 1345450 - RNA, 19 nt, Artificial Sequence
  Description of Artificial Sequence: Synthetic oligonucleotide
  Sense strand starting at position 3860 of SEQ ID NO: 1242410
uuggauacucugggauguu

SEQ ID NO: 1345451 - RNA, 19 nt, Artificial Sequence
  Description of Artificial Sequence: Synthetic oligonucleotide
  Antisense strand to SEQ ID NO: 1345450
aacaucccagaguauccaa

SEQ ID NO: 1345452 - RNA, 19 nt, Artificial Sequence
  Description of Artificial Sequence: Synthetic oligonucleotide
  Sense strand starting at position 3971 of SEQ ID NO: 1242410
uugaguauauucuuuggaa

SEQ ID NO: 1345453 - RNA, 19 nt, Artificial Sequence
  Description of Artificial Sequence: Synthetic oligonucleotide
  Antisense strand to SEQ ID NO: 1345452
uuccaaagaauauacucaa

SEQ ID NO: 1345454 - RNA, 19 nt, Artificial Sequence
  Description of Artificial Sequence: Synthetic oligonucleotide
  Sense strand starting at position 3972 of SEQ ID NO: 1242410
ugaguauauucuuuggaaa

SEQ ID NO: 1345455 - RNA, 19 nt, Artificial Sequence
  Description of Artificial Sequence: Synthetic oligonucleotide
  Antisense strand to SEQ ID NO: 1345454
uuuccaaagaauauacuca

SEQ ID NO: 1345456 - RNA, 19 nt, Artificial Sequence
  Description of Artificial Sequence: Synthetic oligonucleotide
  Sense strand starting at position 3973 of SEQ ID NO: 1242410
gaguauauucuuuggaaau

SEQ ID NO: 1345457 - RNA, 19 nt, Artificial Sequence
  Description of Artificial Sequence: Synthetic oligonucleotide
  Antisense strand to SEQ ID NO: 1345456
auuuccaaagaauauacuc

SEQ ID NO: 1345458 - RNA, 19 nt, Artificial Sequence
  Description of Artificial Sequence: Synthetic oligonucleotide
  Sense strand starting at position 238 of SEQ ID NO: 1242411
ggugacagcagauaugcua

SEQ ID NO: 1345459 - RNA, 19 nt, Artificial Sequence
  Description of Artificial Sequence: Synthetic oligonucleotide
  Antisense strand to SEQ ID NO: 1345458
uagcauaucugcugucacc

SEQ ID NO: 1345460 - RNA, 19 nt, Artificial Sequence
  Description of Artificial Sequence: Synthetic oligonucleotide
  Sense strand starting at position 251 of SEQ ID NO: 1242411
augcuaaucugacugaagu

SEQ ID NO: 1345461 - RNA, 19 nt, Artificial Sequence
  Description of Artificial Sequence: Synthetic oligonucleotide
  Antisense strand to SEQ ID NO: 1345460
acuucagucagauuagcau

SEQ ID NO: 1345462 - RNA, 19 nt, Artificial Sequence
  Description of Artificial Sequence: Synthetic oligonucleotide
  Sense strand starting at position 252 of SEQ ID NO: 1242411
ugcuaaucugacugaaguu

SEQ ID NO: 1345463 - RNA, 19 nt, Artificial Sequence
  Description of Artificial Sequence: Synthetic oligonucleotide
  Antisense strand to SEQ ID NO: 1345462
aacuucagucagauuagca

SEQ ID NO: 1345464 - RNA, 19 nt, Artificial Sequence
  Description of Artificial Sequence: Synthetic oligonucleotide
  Sense strand starting at position 265 of SEQ ID NO: 1242411
gaaguuggucagggugaaa

SEQ ID NO: 1345465 - RNA, 19 nt, Artificial Sequence
  Description of Artificial Sequence: Synthetic oligonucleotide
  Antisense strand to SEQ ID NO: 1345464
uuucacccugaccaacuuc

SEQ ID NO: 1345466 - RNA, 19 nt, Artificial Sequence
  Description of Artificial Sequence: Synthetic oligonucleotide
  Sense strand starting at position 268 of SEQ ID NO: 1242411
guuggucagggugaaauaa

SEQ ID NO: 1345467 - RNA, 19 nt, Artificial Sequence
  Description of Artificial Sequence: Synthetic oligonucleotide
  Antisense strand to SEQ ID NO: 1345466
uuauuucacccugaccaac

SEQ ID NO: 1345468 - RNA, 19 nt, Artificial Sequence
  Description of Artificial Sequence: Synthetic oligonucleotide
  Sense strand starting at position 500 of SEQ ID NO: 1242411
cagccacagucauuaagga

SEQ ID NO: 1345469 - RNA, 19 nt, Artificial Sequence
  Description of Artificial Sequence: Synthetic oligonucleotide
  Antisense strand to SEQ ID NO: 1345468
uccuuaaugacuguggcug

SEQ ID NO: 1345470 - RNA, 19 nt, Artificial Sequence
  Description of Artificial Sequence: Synthetic oligonucleotide
  Sense strand starting at position 591 of SEQ ID NO: 1242411
ugauuucauugagggagga

SEQ ID NO: 1345471 - RNA, 19 nt, Artificial Sequence
  Description of Artificial Sequence: Synthetic oligonucleotide
  Antisense strand to SEQ ID NO: 1345470
uccucccucaaugaaauca

SEQ ID NO: 1345472 - RNA, 19 nt, Artificial Sequence
  Description of Artificial Sequence: Synthetic oligonucleotide
  Sense strand starting at position 971 of SEQ ID NO: 1242411
ggcacaaucugugucuaaa

SEQ ID NO: 1345473 - RNA, 19 nt, Artificial Sequence
  Description of Artificial Sequence: Synthetic oligonucleotide
  Antisense strand to SEQ ID NO: 1345472
uuuagacacagauugugcc

SEQ ID NO: 1345474 - RNA, 19 nt, Artificial Sequence
  Description of Artificial Sequence: Synthetic oligonucleotide
  Sense strand starting at position 1055 of SEQ ID NO: 1242411
uuugaagugggcugggaau

SEQ ID NO: 1345475 - RNA, 19 nt, Artificial Sequence
  Description of Artificial Sequence: Synthetic oligonucleotide
  Antisense strand to SEQ ID NO: 1345474
auucccagcccacuucaaa

SEQ ID NO: 1345476 - RNA, 19 nt, Artificial Sequence
  Description of Artificial Sequence: Synthetic oligonucleotide
  Sense strand starting at position 1066 of SEQ ID NO: 1242411
cugggaaucggcuacaguu

SEQ ID NO: 1345477 - RNA, 19 nt, Artificial Sequence
  Description of Artificial Sequence: Synthetic oligonucleotide
  Antisense strand to SEQ ID NO: 1345476
aacuguagccgauucccag

SEQ ID NO: 1345478 - RNA, 19 nt, Artificial Sequence
  Description of Artificial Sequence: Synthetic oligonucleotide
  Sense strand starting at position 1075 of SEQ ID NO: 1242411
ggcuacaguuccuuaaaca

SEQ ID NO: 1345479 - RNA, 19 nt, Artificial Sequence
  Description of Artificial Sequence: Synthetic oligonucleotide
  Antisense strand to SEQ ID NO: 1345478
uguuuaaggaacuguagcc

SEQ ID NO: 1345480 - RNA, 19 nt, Artificial Sequence
  Description of Artificial Sequence: Synthetic oligonucleotide
  Sense strand starting at position 1175 of SEQ ID NO: 1242411
aacugcuuuggaggguuaa

SEQ ID NO: 1345481 - RNA, 19 nt, Artificial Sequence
  Description of Artificial Sequence: Synthetic oligonucleotide
  Antisense strand to SEQ ID NO: 1345480
uuaacccuccaaagcaguu

SEQ ID NO: 1345482 - RNA, 19 nt, Artificial Sequence
  Description of Artificial Sequence: Synthetic oligonucleotide
  Sense strand starting at position 1176 of SEQ ID NO: 1242411
acugcuuuggaggguuaau

SEQ ID NO: 1345483 - RNA, 19 nt, Artificial Sequence
  Description of Artificial Sequence: Synthetic oligonucleotide
  Antisense strand to SEQ ID NO: 1345482
auuaacccuccaaagcagu

SEQ ID NO: 1345484 - RNA, 19 nt, Artificial Sequence
  Description of Artificial Sequence: Synthetic oligonucleotide
  Sense strand starting at position 1187 of SEQ ID NO: 1242411
ggguuaaugggaugguguu

SEQ ID NO: 1345485 - RNA, 19 nt, Artificial Sequence
  Description of Artificial Sequence: Synthetic oligonucleotide
  Antisense strand to SEQ ID NO: 1345484
aacaccaucccauuaaccc

SEQ ID NO: 1345486 - RNA, 19 nt, Artificial Sequence
  Description of Artificial Sequence: Synthetic oligonucleotide
  Sense strand starting at position 1188 of SEQ ID NO: 1242411
gguuaaugggaugguguuu

SEQ ID NO: 1345487 - RNA, 19 nt, Artificial Sequence
  Description of Artificial Sequence: Synthetic oligonucleotide
  Antisense strand to SEQ ID NO: 1345486
aaacaccaucccauuaacc

SEQ ID NO: 1345488 - RNA, 19 nt, Artificial Sequence
  Description of Artificial Sequence: Synthetic oligonucleotide
  Sense strand starting at position 1277 of SEQ ID NO: 1242411
ugcucuuauugaucuagac

SEQ ID NO: 1345489 - RNA, 19 nt, Artificial Sequence
  Description of Artificial Sequence: Synthetic oligonucleotide
  Antisense strand to SEQ ID NO: 1345488
gucuagaucaauaagagca

SEQ ID NO: 1345490 - RNA, 19 nt, Artificial Sequence
  Description of Artificial Sequence: Synthetic oligonucleotide
  Sense strand starting at position 1480 of SEQ ID NO: 1242411
ggagauggauguuuacuua

SEQ ID NO: 1345491 - RNA, 19 nt, Artificial Sequence
  Description of Artificial Sequence: Synthetic oligonucleotide
  Antisense strand to SEQ ID NO: 1345490
uaaguaaacauccaucucc

SEQ ID NO: 1345492 - RNA, 19 nt, Artificial Sequence
  Description of Artificial Sequence: Synthetic oligonucleotide
  Sense strand starting at position 1484 of SEQ ID NO: 1242411
auggauguuuacuuacaca

SEQ ID NO: 1345493 - RNA, 19 nt, Artificial Sequence
  Description of Artificial Sequence: Synthetic oligonucleotide
  Antisense strand to SEQ ID NO: 1345492
uguguaaguaaacauccau

SEQ ID NO: 1345494 - RNA, 19 nt, Artificial Sequence
  Description of Artificial Sequence: Synthetic oligonucleotide
  Sense strand starting at position 1836 of SEQ ID NO: 1242411
acagaucucuggccagcaa

SEQ ID NO: 1345495 - RNA, 19 nt, Artificial Sequence
  Description of Artificial Sequence: Synthetic oligonucleotide
  Antisense strand to SEQ ID NO: 1345494
uugcuggccagagaucugu

SEQ ID NO: 1345496 - RNA, 19 nt, Artificial Sequence
  Description of Artificial Sequence: Synthetic oligonucleotide
  Sense strand starting at position 1987 of SEQ ID NO: 1242411
gcaagacauguuugugaag

SEQ ID NO: 1345497 - RNA, 19 nt, Artificial Sequence
  Description of Artificial Sequence: Synthetic oligonucleotide
  Antisense strand to SEQ ID NO: 1345496
cuucacaaacaugucuugc

SEQ ID NO: 1345498 - RNA, 19 nt, Artificial Sequence
  Description of Artificial Sequence: Synthetic oligonucleotide
  Sense strand starting at position 1988 of SEQ ID NO: 1242411
caagacauguuugugaagu

SEQ ID NO: 1345499 - RNA, 19 nt, Artificial Sequence
  Description of Artificial Sequence: Synthetic oligonucleotide
  Antisense strand to SEQ ID NO: 1345498
acuucacaaacaugucuug

SEQ ID NO: 1345500 - RNA, 19 nt, Artificial Sequence
  Description of Artificial Sequence: Synthetic oligonucleotide
  Sense strand starting at position 2094 of SEQ ID NO: 1242411
uuucucugucgcuaacaga

SEQ ID NO: 1345501 - RNA, 19 nt, Artificial Sequence
  Description of Artificial Sequence: Synthetic oligonucleotide
  Antisense strand to SEQ ID NO: 1345500
ucuguuagcgacagagaaa

SEQ ID NO: 1345502 - RNA, 19 nt, Artificial Sequence
  Description of Artificial Sequence: Synthetic oligonucleotide
  Sense strand starting at position 2150 of SEQ ID NO: 1242411
ggaggacaguacuuugcaa

SEQ ID NO: 1345503 - RNA, 19 nt, Artificial Sequence
  Description of Artificial Sequence: Synthetic oligonucleotide
  Antisense strand to SEQ ID NO: 1345502
uugcaaaguacuguccucc

SEQ ID NO: 1345504 - RNA, 19 nt, Artificial Sequence
  Description of Artificial Sequence: Synthetic oligonucleotide
  Sense strand starting at position 2229 of SEQ ID NO: 1242411
gggccuucuggccagauua

SEQ ID NO: 1345505 - RNA, 19 nt, Artificial Sequence
  Description of Artificial Sequence: Synthetic oligonucleotide
  Antisense strand to SEQ ID NO: 1345504
uaaucuggccagaaggccc

SEQ ID NO: 1345506 - RNA, 19 nt, Artificial Sequence
  Description of Artificial Sequence: Synthetic oligonucleotide
  Sense strand starting at position 2262 of SEQ ID NO: 1242411
gcuugagagaaaugaugca

SEQ ID NO: 1345507 - RNA, 19 nt, Artificial Sequence
  Description of Artificial Sequence: Synthetic oligonucleotide
  Antisense strand to SEQ ID NO: 1345506
ugcaucauuucucucaagc

SEQ ID NO: 1345508 - RNA, 19 nt, Artificial Sequence
  Description of Artificial Sequence: Synthetic oligonucleotide
  Sense strand starting at position 2292 of SEQ ID NO: 1242411
gcuggugaucaacaaaggu

SEQ ID NO: 1345509 - RNA, 19 nt, Artificial Sequence
  Description of Artificial Sequence: Synthetic oligonucleotide
  Antisense strand to SEQ ID NO: 1345508
accuuuguugaucaccagc

SEQ ID NO: 1345510 - RNA, 19 nt, Artificial Sequence
  Description of Artificial Sequence: Synthetic oligonucleotide
  Sense strand starting at position 2672 of SEQ ID NO: 1242411
ggaagaacuuaugaaggaa

SEQ ID NO: 1345511 - RNA, 19 nt, Artificial Sequence
  Description of Artificial Sequence: Synthetic oligonucleotide
  Antisense strand to SEQ ID NO: 1345510
uuccuucauaaguucuucc

SEQ ID NO: 1345512 - RNA, 19 nt, Artificial Sequence
  Description of Artificial Sequence: Synthetic oligonucleotide
  Sense strand starting at position 2735 of SEQ ID NO: 1242411
acuugcagugcugauauca

SEQ ID NO: 1345513 - RNA, 19 nt, Artificial Sequence
  Description of Artificial Sequence: Synthetic oligonucleotide
  Antisense strand to SEQ ID NO: 1345512
ugauaucagcacugcaagu

SEQ ID NO: 1345514 - RNA, 19 nt, Artificial Sequence
  Description of Artificial Sequence: Synthetic oligonucleotide
  Sense strand starting at position 2762 of SEQ ID NO: 1242411
aaguguuuauaucugugaa

SEQ ID NO: 1345515 - RNA, 19 nt, Artificial Sequence
  Description of Artificial Sequence: Synthetic oligonucleotide
  Antisense strand to SEQ ID NO: 1345514
uucacagauauaaacacuu

SEQ ID NO: 1345516 - RNA, 19 nt, Artificial Sequence
  Description of Artificial Sequence: Synthetic oligonucleotide
  Sense strand starting at position 2765 of SEQ ID NO: 1242411
uguuuauaucugugaacca

SEQ ID NO: 1345517 - RNA, 19 nt, Artificial Sequence
  Description of Artificial Sequence: Synthetic oligonucleotide
  Antisense strand to SEQ ID NO: 1345516
ugguucacagauauaaaca

SEQ ID NO: 1345518 - RNA, 19 nt, Artificial Sequence
  Description of Artificial Sequence: Synthetic oligonucleotide
  Sense strand starting at position 2887 of SEQ ID NO: 1242411
cagccugcuccgucuuaca

SEQ ID NO: 1345519 - RNA, 19 nt, Artificial Sequence
  Description of Artificial Sequence: Synthetic oligonucleotide
  Antisense strand to SEQ ID NO: 1345518
uguaagacggagcaggcug

SEQ ID NO: 1345520 - RNA, 19 nt, Artificial Sequence
  Description of Artificial Sequence: Synthetic oligonucleotide
  Sense strand starting at position 2909 of SEQ ID NO: 1242411
cccagcuuccuugaaggaa

SEQ ID NO: 1345521 - RNA, 19 nt, Artificial Sequence
  Description of Artificial Sequence: Synthetic oligonucleotide
  Antisense strand to SEQ ID NO: 1345520
uuccuucaaggaagcuggg

SEQ ID NO: 1345522 - RNA, 19 nt, Artificial Sequence
  Description of Artificial Sequence: Synthetic oligonucleotide
  Sense strand starting at position 2928 of SEQ ID NO: 1242411
ccaggacuccucuguugag

SEQ ID NO: 1345523 - RNA, 19 nt, Artificial Sequence
  Description of Artificial Sequence: Synthetic oligonucleotide
  Antisense strand to SEQ ID NO: 1345522
cucaacagaggaguccugg

SEQ ID NO: 1345524 - RNA, 19 nt, Artificial Sequence
  Description of Artificial Sequence: Synthetic oligonucleotide
  Sense strand starting at position 3707 of SEQ ID NO: 1242411
ugggauguguuuccucaca

SEQ ID NO: 1345525 - RNA, 19 nt, Artificial Sequence
  Description of Artificial Sequence: Synthetic oligonucleotide
  Antisense strand to SEQ ID NO: 1345524
ugugaggaaacacauccca

SEQ ID NO: 1345526 - RNA, 19 nt, Artificial Sequence
  Description of Artificial Sequence: Synthetic oligonucleotide
  Sense strand starting at position 3709 of SEQ ID NO: 1242411
ggauguguuuccucacaug

SEQ ID NO: 1345527 - RNA, 19 nt, Artificial Sequence
  Description of Artificial Sequence: Synthetic oligonucleotide
  Antisense strand to SEQ ID NO: 1345526
caugugaggaaacacaucc

SEQ ID NO: 1345528 - RNA, 19 nt, Artificial Sequence
  Description of Artificial Sequence: Synthetic oligonucleotide
  Sense strand starting at position 3758 of SEQ ID NO: 1242411
uggcacaaucuuuaaugua

SEQ ID NO: 1345529 - RNA, 19 nt, Artificial Sequence
  Description of Artificial Sequence: Synthetic oligonucleotide
  Antisense strand to SEQ ID NO: 1345528
uacauuaaagauugugcca

SEQ ID NO: 1345530 - RNA, 19 nt, Artificial Sequence
  Description of Artificial Sequence: Synthetic oligonucleotide
  Sense strand starting at position 3780 of SEQ ID NO: 1242411
gcaauuaugcaggguugaa

SEQ ID NO: 1345531 - RNA, 19 nt, Artificial Sequence
  Description of Artificial Sequence: Synthetic oligonucleotide
  Antisense strand to SEQ ID NO: 1345530
uucaacccugcauaauugc

SEQ ID NO: 1345532 - RNA, 19 nt, Artificial Sequence
  Description of Artificial Sequence: Synthetic oligonucleotide
  Sense strand starting at position 3870 of SEQ ID NO: 1242411
uucugugaucuugaaucac

SEQ ID NO: 1345533 - RNA, 19 nt, Artificial Sequence
  Description of Artificial Sequence: Synthetic oligonucleotide
  Antisense strand to SEQ ID NO: 1345532
gugauucaagaucacagaa

SEQ ID NO: 1345534 - RNA, 19 nt, Artificial Sequence
  Description of Artificial Sequence: Synthetic oligonucleotide
  Sense strand starting at position 3888 of SEQ ID NO: 1242411
cugaucuggccuuggauau

SEQ ID NO: 1345535 - RNA, 19 nt, Artificial Sequence
  Description of Artificial Sequence: Synthetic oligonucleotide
  Antisense strand to SEQ ID NO: 1345534
auauccaaggccagaucag

SEQ ID NO: 1345536 - RNA, 19 nt, Artificial Sequence
  Description of Artificial Sequence: Synthetic oligonucleotide
  Sense strand starting at position 3889 of SEQ ID NO: 1242411
ugaucuggccuuggauauu

SEQ ID NO: 1345537 - RNA, 19 nt, Artificial Sequence
  Description of Artificial Sequence: Synthetic oligonucleotide
  Antisense strand to SEQ ID NO: 1345536
aauauccaaggccagauca

SEQ ID NO: 1345538 - RNA, 19 nt, Artificial Sequence
  Description of Artificial Sequence: Synthetic oligonucleotide
  Sense strand starting at position 174 of SEQ ID NO: 1242412
gacucugucugggaaaggu

SEQ ID NO: 1345539 - RNA, 19 nt, Artificial Sequence
  Description of Artificial Sequence: Synthetic oligonucleotide
  Antisense strand to SEQ ID NO: 1345538
accuuucccagacagaguc

SEQ ID NO: 1345540 - RNA, 19 nt, Artificial Sequence
  Description of Artificial Sequence: Synthetic oligonucleotide
  Sense strand starting at position 356 of SEQ ID NO: 1242412
guacacauucuauguggca

SEQ ID NO: 1345541 - RNA, 19 nt, Artificial Sequence
  Description of Artificial Sequence: Synthetic oligonucleotide
  Antisense strand to SEQ ID NO: 1345540
ugccacauagaauguguac

SEQ ID NO: 1345542 - RNA, 19 nt, Artificial Sequence
  Description of Artificial Sequence: Synthetic oligonucleotide
  Sense strand starting at position 436 of SEQ ID NO: 1242412
ugggaaacaucuggagaug

SEQ ID NO: 1345543 - RNA, 19 nt, Artificial Sequence
  Description of Artificial Sequence: Synthetic oligonucleotide
  Antisense strand to SEQ ID NO: 1345542
caucuccagauguuuccca

SEQ ID NO: 1345544 - RNA, 19 nt, Artificial Sequence
  Description of Artificial Sequence: Synthetic oligonucleotide
  Sense strand starting at position 501 of SEQ ID NO: 1242412
aucacaugugguugucaca

SEQ ID NO: 1345545 - RNA, 19 nt, Artificial Sequence
  Description of Artificial Sequence: Synthetic oligonucleotide
  Antisense strand to SEQ ID NO: 1345544
ugugacaaccacaugugau

SEQ ID NO: 1345546 - RNA, 19 nt, Artificial Sequence
  Description of Artificial Sequence: Synthetic oligonucleotide
  Sense strand starting at position 504 of SEQ ID NO: 1242412
acaugugguugucacacaa

SEQ ID NO: 1345547 - RNA, 19 nt, Artificial Sequence
  Description of Artificial Sequence: Synthetic oligonucleotide
  Antisense strand to SEQ ID NO: 1345546
uugugugacaaccacaugu

SEQ ID NO: 1345548 - RNA, 19 nt, Artificial Sequence
  Description of Artificial Sequence: Synthetic oligonucleotide
  Sense strand starting at position 540 of SEQ ID NO: 1242412
gucuccacuggucaucaga

SEQ ID NO: 1345549 - RNA, 19 nt, Artificial Sequence
  Description of Artificial Sequence: Synthetic oligonucleotide
  Antisense strand to SEQ ID NO: 1345548
ucugaugaccaguggagac

SEQ ID NO: 1345550 - RNA, 19 nt, Artificial Sequence
  Description of Artificial Sequence: Synthetic oligonucleotide
  Sense strand starting at position 550 of SEQ ID NO: 1242412
gucaucagaagaggcauua

SEQ ID NO: 1345551 - RNA, 19 nt, Artificial Sequence
  Description of Artificial Sequence: Synthetic oligonucleotide
  Antisense strand to SEQ ID NO: 1345550
uaaugccucuucugaugac

SEQ ID NO: 1345552 - RNA, 19 nt, Artificial Sequence
  Description of Artificial Sequence: Synthetic oligonucleotide
  Sense strand starting at position 594 of SEQ ID NO: 1242412
ccaugugacugcuugaggu

SEQ ID NO: 1345553 - RNA, 19 nt, Artificial Sequence
  Description of Artificial Sequence: Synthetic oligonucleotide
  Antisense strand to SEQ ID NO: 1345552
accucaagcagucacaugg

SEQ ID NO: 1345554 - RNA, 19 nt, Artificial Sequence
  Description of Artificial Sequence: Synthetic oligonucleotide
  Sense strand starting at position 642 of SEQ ID NO: 1242412
gugacaucucacuaaggca

SEQ ID NO: 1345555 - RNA, 19 nt, Artificial Sequence
  Description of Artificial Sequence: Synthetic oligonucleotide
  Antisense strand to SEQ ID NO: 1345554
ugccuuagugagaugucac

SEQ ID NO: 1345556 - RNA, 19 nt, Artificial Sequence
  Description of Artificial Sequence: Synthetic oligonucleotide
  Sense strand starting at position 1171 of SEQ ID NO: 1242412
gcgguugcucuacaaauac

SEQ ID NO: 1345557 - RNA, 19 nt, Artificial Sequence
  Description of Artificial Sequence: Synthetic oligonucleotide
  Antisense strand to SEQ ID NO: 1345556
guauuuguagagcaaccgc

SEQ ID NO: 1345558 - RNA, 19 nt, Artificial Sequence
  Description of Artificial Sequence: Synthetic oligonucleotide
  Sense strand starting at position 1254 of SEQ ID NO: 1242412
accagcugcuaaucaguua

SEQ ID NO: 1345559 - RNA, 19 nt, Artificial Sequence
  Description of Artificial Sequence: Synthetic oligonucleotide
  Antisense strand to SEQ ID NO: 1345558
uaacugauuagcagcuggu

SEQ ID NO: 1345560 - RNA, 19 nt, Artificial Sequence
  Description of Artificial Sequence: Synthetic oligonucleotide
  Sense strand starting at position 1257 of SEQ ID NO: 1242412
agcugcuaaucaguuaaga

SEQ ID NO: 1345561 - RNA, 19 nt, Artificial Sequence
  Description of Artificial Sequence: Synthetic oligonucleotide
  Antisense strand to SEQ ID NO: 1345560
ucuuaacugauuagcagcu

SEQ ID NO: 1345562 - RNA, 19 nt, Artificial Sequence
  Description of Artificial Sequence: Synthetic oligonucleotide
  Sense strand starting at position 1388 of SEQ ID NO: 1242412
gaaggaagguggucuguua

SEQ ID NO: 1345563 - RNA, 19 nt, Artificial Sequence
  Description of Artificial Sequence: Synthetic oligonucleotide
  Antisense strand to SEQ ID NO: 1345562
uaacagaccaccuuccuuc

SEQ ID NO: 1345564 - RNA, 19 nt, Artificial Sequence
  Description of Artificial Sequence: Synthetic oligonucleotide
  Sense strand starting at position 1613 of SEQ ID NO: 1242412
gucugaaauguguacuccu

SEQ ID NO: 1345565 - RNA, 19 nt, Artificial Sequence
  Description of Artificial Sequence: Synthetic oligonucleotide
  Antisense strand to SEQ ID NO: 1345564
aggaguacacauuucagac

SEQ ID NO: 1345566 - RNA, 19 nt, Artificial Sequence
  Description of Artificial Sequence: Synthetic oligonucleotide
  Sense strand starting at position 1616 of SEQ ID NO: 1242412
ugaaauguguacuccuaga

SEQ ID NO: 1345567 - RNA, 19 nt, Artificial Sequence
  Description of Artificial Sequence: Synthetic oligonucleotide
  Antisense strand to SEQ ID NO: 1345566
ucuaggaguacacauuuca

SEQ ID NO: 1345568 - RNA, 19 nt, Artificial Sequence
  Description of Artificial Sequence: Synthetic oligonucleotide
  Sense strand starting at position 1728 of SEQ ID NO: 1242412
cuuucuguccucugaagau

SEQ ID NO: 1345569 - RNA, 19 nt, Artificial Sequence
  Description of Artificial Sequence: Synthetic oligonucleotide
  Antisense strand to SEQ ID NO: 1345568
aucuucagaggacagaaag

SEQ ID NO: 1345570 - RNA, 19 nt, Artificial Sequence
  Description of Artificial Sequence: Synthetic oligonucleotide
  Sense strand starting at position 1763 of SEQ ID NO: 1242412
acccuuuggucccuacuau

SEQ ID NO: 1345571 - RNA, 19 nt, Artificial Sequence
  Description of Artificial Sequence: Synthetic oligonucleotide
  Antisense strand to SEQ ID NO: 1345570
auaguagggaccaaagggu

SEQ ID NO: 1345572 - RNA, 19 nt, Artificial Sequence
  Description of Artificial Sequence: Synthetic oligonucleotide
  Sense strand starting at position 1793 of SEQ ID NO: 1242412
cagaccagguguuauuauu

SEQ ID NO: 1345573 - RNA, 19 nt, Artificial Sequence
  Description of Artificial Sequence: Synthetic oligonucleotide
  Antisense strand to SEQ ID NO: 1345572
aauaauaacaccuggucug

SEQ ID NO: 1345574 - RNA, 19 nt, Artificial Sequence
  Description of Artificial Sequence: Synthetic oligonucleotide
  Sense strand starting at position 1801 of SEQ ID NO: 1242412
guguuauuauuuguugucu

SEQ ID NO: 1345575 - RNA, 19 nt, Artificial Sequence
  Description of Artificial Sequence: Synthetic oligonucleotide
  Antisense strand to SEQ ID NO: 1345574
agacaacaaauaauaacac

SEQ ID NO: 1345576 - RNA, 19 nt, Artificial Sequence
  Description of Artificial Sequence: Synthetic oligonucleotide
  Sense strand starting at position 1830 of SEQ ID NO: 1242412
uguccucacucagcaguua

SEQ ID NO: 1345577 - RNA, 19 nt, Artificial Sequence
  Description of Artificial Sequence: Synthetic oligonucleotide
  Antisense strand to SEQ ID NO: 1345576
uaacugcugagugaggaca

SEQ ID NO: 1345578 - RNA, 19 nt, Artificial Sequence
  Description of Artificial Sequence: Synthetic oligonucleotide
  Sense strand starting at position 1869 of SEQ ID NO: 1242412
caaagacagugugaucuau

SEQ ID NO: 1345579 - RNA, 19 nt, Artificial Sequence
  Description of Artificial Sequence: Synthetic oligonucleotide
  Antisense strand to SEQ ID NO: 1345578
auagaucacacugucuuug

SEQ ID NO: 1345580 - RNA, 19 nt, Artificial Sequence
  Description of Artificial Sequence: Synthetic oligonucleotide
  Sense strand starting at position 1914 of SEQ ID NO: 1242412
acugaagcccuccaagauu

SEQ ID NO: 1345581 - RNA, 19 nt, Artificial Sequence
  Description of Artificial Sequence: Synthetic oligonucleotide
  Antisense strand to SEQ ID NO: 1345580
aaucuuggagggcuucagu

SEQ ID NO: 1345582 - RNA, 19 nt, Artificial Sequence
  Description of Artificial Sequence: Synthetic oligonucleotide
  Sense strand starting at position 1934 of SEQ ID NO: 1242412
gcucuuugaacagggagua

SEQ ID NO: 1345583 - RNA, 19 nt, Artificial Sequence
  Description of Artificial Sequence: Synthetic oligonucleotide
  Antisense strand to SEQ ID NO: 1345582
uacucccuguucaaagagc

SEQ ID NO: 1345584 - RNA, 19 nt, Artificial Sequence
  Description of Artificial Sequence: Synthetic oligonucleotide
  Sense strand starting at position 2012 of SEQ ID NO: 1242412
gggucuccuccuuaacacu

SEQ ID NO: 1345585 - RNA, 19 nt, Artificial Sequence
  Description of Artificial Sequence: Synthetic oligonucleotide
  Antisense strand to SEQ ID NO: 1345584
aguguuaaggaggagaccc

SEQ ID NO: 1345586 - RNA, 19 nt, Artificial Sequence
  Description of Artificial Sequence: Synthetic oligonucleotide
  Sense strand starting at position 2087 of SEQ ID NO: 1242412
gaacgucacguccaaauua

SEQ ID NO: 1345587 - RNA, 19 nt, Artificial Sequence
  Description of Artificial Sequence: Synthetic oligonucleotide
  Antisense strand to SEQ ID NO: 1345586
uaauuuggacgugacguuc

SEQ ID NO: 1345588 - RNA, 19 nt, Artificial Sequence
  Description of Artificial Sequence: Synthetic oligonucleotide
  Sense strand starting at position 2184 of SEQ ID NO: 1242412
uuuccuggagucugaaagu

SEQ ID NO: 1345589 - RNA, 19 nt, Artificial Sequence
  Description of Artificial Sequence: Synthetic oligonucleotide
  Antisense strand to SEQ ID NO: 1345588
acuuucagacuccaggaaa

SEQ ID NO: 1345590 - RNA, 19 nt, Artificial Sequence
  Description of Artificial Sequence: Synthetic oligonucleotide
  Sense strand starting at position 2214 of SEQ ID NO: 1242412
acacguuauuugcauguaa

SEQ ID NO: 1345591 - RNA, 19 nt, Artificial Sequence
  Description of Artificial Sequence: Synthetic oligonucleotide
  Antisense strand to SEQ ID NO: 1345590
uuacaugcaaauaacgugu

SEQ ID NO: 1345592 - RNA, 19 nt, Artificial Sequence
  Description of Artificial Sequence: Synthetic oligonucleotide
  Sense strand starting at position 2216 of SEQ ID NO: 1242412
acguuauuugcauguaaau

SEQ ID NO: 1345593 - RNA, 19 nt, Artificial Sequence
  Description of Artificial Sequence: Synthetic oligonucleotide
  Antisense strand to SEQ ID NO: 1345592
auuuacaugcaaauaacgu

SEQ ID NO: 1345594 - RNA, 19 nt, Artificial Sequence
  Description of Artificial Sequence: Synthetic oligonucleotide
  Sense strand starting at position 2274 of SEQ ID NO: 1242412
gcccauuucucccugcaga

SEQ ID NO: 1345595 - RNA, 19 nt, Artificial Sequence
  Description of Artificial Sequence: Synthetic oligonucleotide
  Antisense strand to SEQ ID NO: 1345594
ucugcagggagaaaugggc

SEQ ID NO: 1345596 - RNA, 19 nt, Artificial Sequence
  Description of Artificial Sequence: Synthetic oligonucleotide
  Sense strand starting at position 2346 of SEQ ID NO: 1242412
gccugaugcccaggcgaau

SEQ ID NO: 1345597 - RNA, 19 nt, Artificial Sequence
  Description of Artificial Sequence: Synthetic oligonucleotide
  Antisense strand to SEQ ID NO: 1345596
auucgccugggcaucaggc

SEQ ID NO: 1345598 - RNA, 19 nt, Artificial Sequence
  Description of Artificial Sequence: Synthetic oligonucleotide
  Sense strand starting at position 2429 of SEQ ID NO: 1242412
ccagucuauugggacugaa

SEQ ID NO: 1345599 - RNA, 19 nt, Artificial Sequence
  Description of Artificial Sequence: Synthetic oligonucleotide
  Antisense strand to SEQ ID NO: 1345598
uucagucccaauagacugg

SEQ ID NO: 1345600 - RNA, 19 nt, Artificial Sequence
  Description of Artificial Sequence: Synthetic oligonucleotide
  Sense strand starting at position 2477 of SEQ ID NO: 1242412
gaaacaguguugcuauuuc

SEQ ID NO: 1345601 - RNA, 19 nt, Artificial Sequence
  Description of Artificial Sequence: Synthetic oligonucleotide
  Antisense strand to SEQ ID NO: 1345600
gaaauagcaacacuguuuc

SEQ ID NO: 1345602 - RNA, 19 nt, Artificial Sequence
  Description of Artificial Sequence: Synthetic oligonucleotide
  Sense strand starting at position 2763 of SEQ ID NO: 1242412
cgugccuaccuggaauauu

SEQ ID NO: 1345603 - RNA, 19 nt, Artificial Sequence
  Description of Artificial Sequence: Synthetic oligonucleotide
  Antisense strand to SEQ ID NO: 1345602
aauauuccagguaggcacg

SEQ ID NO: 1345604 - RNA, 19 nt, Artificial Sequence
  Description of Artificial Sequence: Synthetic oligonucleotide
  Sense strand starting at position 3292 of SEQ ID NO: 1242412
ggaaauguggauugugcuu

SEQ ID NO: 1345605 - RNA, 19 nt, Artificial Sequence
  Description of Artificial Sequence: Synthetic oligonucleotide
  Antisense strand to SEQ ID NO: 1345604
aagcacaauccacauuucc

SEQ ID NO: 1345606 - RNA, 19 nt, Artificial Sequence
  Description of Artificial Sequence: Synthetic oligonucleotide
  Sense strand starting at position 3297 of SEQ ID NO: 1242412
uguggauugugcuugcuuu

SEQ ID NO: 1345607 - RNA, 19 nt, Artificial Sequence
  Description of Artificial Sequence: Synthetic oligonucleotide
  Antisense strand to SEQ ID NO: 1345606
aaagcaagcacaauccaca

SEQ ID NO: 1345608 - RNA, 19 nt, Artificial Sequence
  Description of Artificial Sequence: Synthetic oligonucleotide
  Sense strand starting at position 3304 of SEQ ID NO: 1242412
ugugcuugcuuucugcaga

SEQ ID NO: 1345609 - RNA, 19 nt, Artificial Sequence
  Description of Artificial Sequence: Synthetic oligonucleotide
  Antisense strand to SEQ ID NO: 1345608
ucugcagaaagcaagcaca

SEQ ID NO: 1345610 - RNA, 19 nt, Artificial Sequence
  Description of Artificial Sequence: Synthetic oligonucleotide
  Sense strand starting at position 3664 of SEQ ID NO: 1242412
augagaguucuuuaggcac

SEQ ID NO: 1345611 - RNA, 19 nt, Artificial Sequence
  Description of Artificial Sequence: Synthetic oligonucleotide
  Antisense strand to SEQ ID NO: 1345610
gugccuaaagaacucucau

SEQ ID NO: 1345612 - RNA, 19 nt, Artificial Sequence
  Description of Artificial Sequence: Synthetic oligonucleotide
  Sense strand starting at position 3667 of SEQ ID NO: 1242412
agaguucuuuaggcacaga

SEQ ID NO: 1345613 - RNA, 19 nt, Artificial Sequence
  Description of Artificial Sequence: Synthetic oligonucleotide
  Antisense strand to SEQ ID NO: 1345612
ucugugccuaaagaacucu

SEQ ID NO: 1345614 - RNA, 19 nt, Artificial Sequence
  Description of Artificial Sequence: Synthetic oligonucleotide
  Sense strand starting at position 3670 of SEQ ID NO: 1242412
guucuuuaggcacagauau

SEQ ID NO: 1345615 - RNA, 19 nt, Artificial Sequence
  Description of Artificial Sequence: Synthetic oligonucleotide
  Antisense strand to SEQ ID NO: 1345614
auaucugugccuaaagaac

SEQ ID NO: 1345616 - RNA, 19 nt, Artificial Sequence
  Description of Artificial Sequence: Synthetic oligonucleotide
  Sense strand starting at position 3706 of SEQ ID NO: 1242412
aaagaagagugacaaagua

SEQ ID NO: 1345617 - RNA, 19 nt, Artificial Sequence
  Description of Artificial Sequence: Synthetic oligonucleotide
  Antisense strand to SEQ ID NO: 1345616
uacuuugucacucuucuuu

SEQ ID NO: 1345618 - RNA, 19 nt, Artificial Sequence
  Description of Artificial Sequence: Synthetic oligonucleotide
  Sense strand starting at position 205 of SEQ ID NO: 1242413
cucgguucccguggacaga

SEQ ID NO: 1345619 - RNA, 19 nt, Artificial Sequence
  Description of Artificial Sequence: Synthetic oligonucleotide
  Antisense strand to SEQ ID NO: 1345618
ucuguccacgggaaccgag

SEQ ID NO: 1345620 - RNA, 19 nt, Artificial Sequence
  Description of Artificial Sequence: Synthetic oligonucleotide
  Sense strand starting at position 206 of SEQ ID NO: 1242413
ucgguucccguggacagau

SEQ ID NO: 1345621 - RNA, 19 nt, Artificial Sequence
  Description of Artificial Sequence: Synthetic oligonucleotide
  Antisense strand to SEQ ID NO: 1345620
aucuguccacgggaaccga

SEQ ID NO: 1345622 - RNA, 19 nt, Artificial Sequence
  Description of Artificial Sequence: Synthetic oligonucleotide
  Sense strand starting at position 729 of SEQ ID NO: 1242413
cguucugcacgguuucaaa

SEQ ID NO: 1345623 - RNA, 19 nt, Artificial Sequence
  Description of Artificial Sequence: Synthetic oligonucleotide
  Antisense strand to SEQ ID NO: 1345622
uuugaaaccgugcagaacg

SEQ ID NO: 1345624 - RNA, 19 nt, Artificial Sequence
  Description of Artificial Sequence: Synthetic oligonucleotide
  Sense strand starting at position 1018 of SEQ ID NO: 1242413
accgcauuccuguagagga

SEQ ID NO: 1345625 - RNA, 19 nt, Artificial Sequence
  Description of Artificial Sequence: Synthetic oligonucleotide
  Antisense strand to SEQ ID NO: 1345624
uccucuacaggaaugcggu

SEQ ID NO: 1345626 - RNA, 19 nt, Artificial Sequence
  Description of Artificial Sequence: Synthetic oligonucleotide
  Sense strand starting at position 1020 of SEQ ID NO: 1242413
cgcauuccuguagaggaaa

SEQ ID NO: 1345627 - RNA, 19 nt, Artificial Sequence
  Description of Artificial Sequence: Synthetic oligonucleotide
  Antisense strand to SEQ ID NO: 1345626
uuuccucuacaggaaugcg

SEQ ID NO: 1345628 - RNA, 19 nt, Artificial Sequence
  Description of Artificial Sequence: Synthetic oligonucleotide
  Sense strand starting at position 1242 of SEQ ID NO: 1242413
gggaaugugagguguggaa

SEQ ID NO: 1345629 - RNA, 19 nt, Artificial Sequence
  Description of Artificial Sequence: Synthetic oligonucleotide
  Antisense strand to SEQ ID NO: 1345628
uuccacaccucacauuccc

SEQ ID NO: 1345630 - RNA, 19 nt, Artificial Sequence
  Description of Artificial Sequence: Synthetic oligonucleotide
  Sense strand starting at position 1285 of SEQ ID NO: 1242413
gggcucugaucuuugcaaa

SEQ ID NO: 1345631 - RNA, 19 nt, Artificial Sequence
  Description of Artificial Sequence: Synthetic oligonucleotide
  Antisense strand to SEQ ID NO: 1345630
uuugcaaagaucagagccc

SEQ ID NO: 1345632 - RNA, 19 nt, Artificial Sequence
  Description of Artificial Sequence: Synthetic oligonucleotide
  Sense strand starting at position 1286 of SEQ ID NO: 1242413
ggcucugaucuuugcaaau

SEQ ID NO: 1345633 - RNA, 19 nt, Artificial Sequence
  Description of Artificial Sequence: Synthetic oligonucleotide
  Antisense strand to SEQ ID NO: 1345632
auuugcaaagaucagagcc

SEQ ID NO: 1345634 - RNA, 19 nt, Artificial Sequence
  Description of Artificial Sequence: Synthetic oligonucleotide
  Sense strand starting at position 1297 of SEQ ID NO: 1242413
uugcaaaucagagaugguu

SEQ ID NO: 1345635 - RNA, 19 nt, Artificial Sequence
  Description of Artificial Sequence: Synthetic oligonucleotide
  Antisense strand to SEQ ID NO: 1345634
aaccaucucugauuugcaa

SEQ ID NO: 1345636 - RNA, 19 nt, Artificial Sequence
  Description of Artificial Sequence: Synthetic oligonucleotide
  Sense strand starting at position 2108 of SEQ ID NO: 1242413
cuagcuuugaugcgcagau

SEQ ID NO: 1345637 - RNA, 19 nt, Artificial Sequence
  Description of Artificial Sequence: Synthetic oligonucleotide
  Antisense strand to SEQ ID NO: 1345636
aucugcgcaucaaagcuag

SEQ ID NO: 1345638 - RNA, 19 nt, Artificial Sequence
  Description of Artificial Sequence: Synthetic oligonucleotide
  Sense strand starting at position 2803 of SEQ ID NO: 1242413
uuuauucucuagucgguga

SEQ ID NO: 1345639 - RNA, 19 nt, Artificial Sequence
  Description of Artificial Sequence: Synthetic oligonucleotide
  Antisense strand to SEQ ID NO: 1345638
ucaccgacuagagaauaaa

SEQ ID NO: 1345640 - RNA, 19 nt, Artificial Sequence
  Description of Artificial Sequence: Synthetic oligonucleotide
  Sense strand starting at position 2805 of SEQ ID NO: 1242413
uauucucuagucggugaga

SEQ ID NO: 1345641 - RNA, 19 nt, Artificial Sequence
  Description of Artificial Sequence: Synthetic oligonucleotide
  Antisense strand to SEQ ID NO: 1345640
ucucaccgacuagagaaua

SEQ ID NO: 1345642 - RNA, 19 nt, Artificial Sequence
  Description of Artificial Sequence: Synthetic oligonucleotide
  Sense strand starting at position 2806 of SEQ ID NO: 1242413
auucucuagucggugagau

SEQ ID NO: 1345643 - RNA, 19 nt, Artificial Sequence
  Description of Artificial Sequence: Synthetic oligonucleotide
  Antisense strand to SEQ ID NO: 1345642
aucucaccgacuagagaau

SEQ ID NO: 1345644 - RNA, 19 nt, Artificial Sequence
  Description of Artificial Sequence: Synthetic oligonucleotide
  Sense strand starting at position 2807 of SEQ ID NO: 1242413
uucucuagucggugagauc

SEQ ID NO: 1345645 - RNA, 19 nt, Artificial Sequence
  Description of Artificial Sequence: Synthetic oligonucleotide
  Antisense strand to SEQ ID NO: 1345644
gaucucaccgacuagagaa

SEQ ID NO: 1345646 - RNA, 19 nt, Artificial Sequence
  Description of Artificial Sequence: Synthetic oligonucleotide
  Sense strand starting at position 2808 of SEQ ID NO: 1242413
ucucuagucggugagauca

SEQ ID NO: 1345647 - RNA, 19 nt, Artificial Sequence
  Description of Artificial Sequence: Synthetic oligonucleotide
  Antisense strand to SEQ ID NO: 1345646
ugaucucaccgacuagaga

SEQ ID NO: 1345648 - RNA, 19 nt, Artificial Sequence
  Description of Artificial Sequence: Synthetic oligonucleotide
  Sense strand starting at position 2810 of SEQ ID NO: 1242413
ucuagucggugagaucaca

SEQ ID NO: 1345649 - RNA, 19 nt, Artificial Sequence
  Description of Artificial Sequence: Synthetic oligonucleotide
  Antisense strand to SEQ ID NO: 1345648
ugugaucucaccgacuaga

SEQ ID NO: 1345650 - RNA, 19 nt, Artificial Sequence
  Description of Artificial Sequence: Synthetic oligonucleotide
  Sense strand starting at position 2908 of SEQ ID NO: 1242413
cagugacaaccuggacaau

SEQ ID NO: 1345651 - RNA, 19 nt, Artificial Sequence
  Description of Artificial Sequence: Synthetic oligonucleotide
  Antisense strand to SEQ ID NO: 1345650
auuguccagguugucacug

SEQ ID NO: 1345652 - RNA, 19 nt, Artificial Sequence
  Description of Artificial Sequence: Synthetic oligonucleotide
  Sense strand starting at position 2942 of SEQ ID NO: 1242413
ucucuugagccuugugaac

SEQ ID NO: 1345653 - RNA, 19 nt, Artificial Sequence
  Description of Artificial Sequence: Synthetic oligonucleotide
  Antisense strand to SEQ ID NO: 1345652
guucacaaggcucaagaga

SEQ ID NO: 1345654 - RNA, 19 nt, Artificial Sequence
  Description of Artificial Sequence: Synthetic oligonucleotide
  Sense strand starting at position 2996 of SEQ ID NO: 1242413
uguugaguucuugaaggaa

SEQ ID NO: 1345655 - RNA, 19 nt, Artificial Sequence
  Description of Artificial Sequence: Synthetic oligonucleotide
  Antisense strand to SEQ ID NO: 1345654
uuccuucaagaacucaaca

SEQ ID NO: 1345656 - RNA, 19 nt, Artificial Sequence
  Description of Artificial Sequence: Synthetic oligonucleotide
  Sense strand starting at position 3064 of SEQ ID NO: 1242413
gguguuuguugcuggaucu

SEQ ID NO: 1345657 - RNA, 19 nt, Artificial Sequence
  Description of Artificial Sequence: Synthetic oligonucleotide
  Antisense strand to SEQ ID NO: 1345656
agauccagcaacaaacacc

SEQ ID NO: 1345658 - RNA, 19 nt, Artificial Sequence
  Description of Artificial Sequence: Synthetic oligonucleotide
  Sense strand starting at position 3071 of SEQ ID NO: 1242413
guugcuggaucuccugaua

SEQ ID NO: 1345659 - RNA, 19 nt, Artificial Sequence
  Description of Artificial Sequence: Synthetic oligonucleotide
  Antisense strand to SEQ ID NO: 1345658
uaucaggagauccagcaac

SEQ ID NO: 1345660 - RNA, 19 nt, Artificial Sequence
  Description of Artificial Sequence: Synthetic oligonucleotide
  Sense strand starting at position 3074 of SEQ ID NO: 1242413
gcuggaucuccugauagag

SEQ ID NO: 1345661 - RNA, 19 nt, Artificial Sequence
  Description of Artificial Sequence: Synthetic oligonucleotide
  Antisense strand to SEQ ID NO: 1345660
cucuaucaggagauccagc

SEQ ID NO: 1345662 - RNA, 19 nt, Artificial Sequence
  Description of Artificial Sequence: Synthetic oligonucleotide
  Sense strand starting at position 3089 of SEQ ID NO: 1242413
agagaaggaucggaaauuu

SEQ ID NO: 1345663 - RNA, 19 nt, Artificial Sequence
  Description of Artificial Sequence: Synthetic oligonucleotide
  Antisense strand to SEQ ID NO: 1345662
aaauuuccgauccuucucu

SEQ ID NO: 1345664 - RNA, 19 nt, Artificial Sequence
  Description of Artificial Sequence: Synthetic oligonucleotide
  Sense strand starting at position 3185 of SEQ ID NO: 1242413
uucggagaguuuguguauu

SEQ ID NO: 1345665 - RNA, 19 nt, Artificial Sequence
  Description of Artificial Sequence: Synthetic oligonucleotide
  Antisense strand to SEQ ID NO: 1345664
aauacacaaacucuccgaa

SEQ ID NO: 1345666 - RNA, 19 nt, Artificial Sequence
  Description of Artificial Sequence: Synthetic oligonucleotide
  Sense strand starting at position 3187 of SEQ ID NO: 1242413
cggagaguuuguguauuca

SEQ ID NO: 1345667 - RNA, 19 nt, Artificial Sequence
  Description of Artificial Sequence: Synthetic oligonucleotide
  Antisense strand to SEQ ID NO: 1345666
ugaauacacaaacucuccg

SEQ ID NO: 1345668 - RNA, 19 nt, Artificial Sequence
  Description of Artificial Sequence: Synthetic oligonucleotide
  Sense strand starting at position 3362 of SEQ ID NO: 1242413
ccgacuagccggugucuaa

SEQ ID NO: 1345669 - RNA, 19 nt, Artificial Sequence
  Description of Artificial Sequence: Synthetic oligonucleotide
  Antisense strand to SEQ ID NO: 1345668
uuagacaccggcuagucgg

SEQ ID NO: 1345670 - RNA, 19 nt, Artificial Sequence
  Description of Artificial Sequence: Synthetic oligonucleotide
  Sense strand starting at position 3373 of SEQ ID NO: 1242413
gugucuaagcccuuuguuu

SEQ ID NO: 1345671 - RNA, 19 nt, Artificial Sequence
  Description of Artificial Sequence: Synthetic oligonucleotide
  Antisense strand to SEQ ID NO: 1345670
aaacaaagggcuuagacac

SEQ ID NO: 1345672 - RNA, 19 nt, Artificial Sequence
  Description of Artificial Sequence: Synthetic oligonucleotide
  Sense strand starting at position 3534 of SEQ ID NO: 1242413
cuugccuugcuccggagaa

SEQ ID NO: 1345673 - RNA, 19 nt, Artificial Sequence
  Description of Artificial Sequence: Synthetic oligonucleotide
  Antisense strand to SEQ ID NO: 1345672
uucuccggagcaaggcaag

SEQ ID NO: 1345674 - RNA, 19 nt, Artificial Sequence
  Description of Artificial Sequence: Synthetic oligonucleotide
  Sense strand starting at position 3843 of SEQ ID NO: 1242413
aacagugguuggugaggua

SEQ ID NO: 1345675 - RNA, 19 nt, Artificial Sequence
  Description of Artificial Sequence: Synthetic oligonucleotide
  Antisense strand to SEQ ID NO: 1345674
uaccucaccaaccacuguu

SEQ ID NO: 1345676 - RNA, 19 nt, Artificial Sequence
  Description of Artificial Sequence: Synthetic oligonucleotide
  Sense strand starting at position 3846 of SEQ ID NO: 1242413
agugguuggugagguagau

SEQ ID NO: 1345677 - RNA, 19 nt, Artificial Sequence
  Description of Artificial Sequence: Synthetic oligonucleotide
  Antisense strand to SEQ ID NO: 1345676
aucuaccucaccaaccacu

SEQ ID NO: 1345678 - RNA, 19 nt, Artificial Sequence
  Description of Artificial Sequence: Synthetic oligonucleotide
  Sense strand starting at position 3858 of SEQ ID NO: 1242413
gguagauguuccugugccu

SEQ ID NO: 1345679 - RNA, 19 nt, Artificial Sequence
  Description of Artificial Sequence: Synthetic oligonucleotide
  Antisense strand to SEQ ID NO: 1345678
aggcacaggaacaucuacc

SEQ ID NO: 1345680 - RNA, 19 nt, Artificial Sequence
  Description of Artificial Sequence: Synthetic oligonucleotide
  Sense strand starting at position 3915 of SEQ ID NO: 1242413
caggguuccaaguggcaga

SEQ ID NO: 1345681 - RNA, 19 nt, Artificial Sequence
  Description of Artificial Sequence: Synthetic oligonucleotide
  Antisense strand to SEQ ID NO: 1345680
ucugccacuuggaacccug

SEQ ID NO: 1345682 - RNA, 19 nt, Artificial Sequence
  Description of Artificial Sequence: Synthetic oligonucleotide
  Sense strand starting at position 3946 of SEQ ID NO: 1242413
acccaauacuuuguugaag

SEQ ID NO: 1345683 - RNA, 19 nt, Artificial Sequence
  Description of Artificial Sequence: Synthetic oligonucleotide
  Antisense strand to SEQ ID NO: 1345682
cuucaacaaaguauugggu

SEQ ID NO: 1345684 - RNA, 19 nt, Artificial Sequence
  Description of Artificial Sequence: Synthetic oligonucleotide
  Sense strand starting at position 38 of SEQ ID NO: 1242414
uuaaguuuaccggagccuu

SEQ ID NO: 1345685 - RNA, 19 nt, Artificial Sequence
  Description of Artificial Sequence: Synthetic oligonucleotide
  Antisense strand to SEQ ID NO: 1345684
aaggcuccgguaaacuuaa

SEQ ID NO: 1345686 - RNA, 19 nt, Artificial Sequence
  Description of Artificial Sequence: Synthetic oligonucleotide
  Sense strand starting at position 58 of SEQ ID NO: 1242414
agauaaaguugccacuuga

SEQ ID NO: 1345687 - RNA, 19 nt, Artificial Sequence
  Description of Artificial Sequence: Synthetic oligonucleotide
  Antisense strand to SEQ ID NO: 1345686
ucaaguggcaacuuuaucu

SEQ ID NO: 1345688 - RNA, 19 nt, Artificial Sequence
  Description of Artificial Sequence: Synthetic oligonucleotide
  Sense strand starting at position 182 of SEQ ID NO: 1242414
cgcagugucacagagagaa

SEQ ID NO: 1345689 - RNA, 19 nt, Artificial Sequence
  Description of Artificial Sequence: Synthetic oligonucleotide
  Antisense strand to SEQ ID NO: 1345688
uucucucugugacacugcg

SEQ ID NO: 1345690 - RNA, 19 nt, Artificial Sequence
  Description of Artificial Sequence: Synthetic oligonucleotide
  Sense strand starting at position 2132 of SEQ ID NO: 1242414
cgcugauuguugcgcaaac

SEQ ID NO: 1345691 - RNA, 19 nt, Artificial Sequence
  Description of Artificial Sequence: Synthetic oligonucleotide
  Antisense strand to SEQ ID NO: 1345690
guuugcgcaacaaucagcg

SEQ ID NO: 1345692 - RNA, 19 nt, Artificial Sequence
  Description of Artificial Sequence: Synthetic oligonucleotide
  Sense strand starting at position 2133 of SEQ ID NO: 1242414
gcugauuguugcgcaaaca

SEQ ID NO: 1345693 - RNA, 19 nt, Artificial Sequence
  Description of Artificial Sequence: Synthetic oligonucleotide
  Antisense strand to SEQ ID NO: 1345692
uguuugcgcaacaaucagc

SEQ ID NO: 1345694 - RNA, 19 nt, Artificial Sequence
  Description of Artificial Sequence: Synthetic oligonucleotide
  Sense strand starting at position 2134 of SEQ ID NO: 1242414
cugauuguugcgcaaacaa

SEQ ID NO: 1345695 - RNA, 19 nt, Artificial Sequence
  Description of Artificial Sequence: Synthetic oligonucleotide
  Antisense strand to SEQ ID NO: 1345694
uuguuugcgcaacaaucag

SEQ ID NO: 1345696 - RNA, 19 nt, Artificial Sequence
  Description of Artificial Sequence: Synthetic oligonucleotide
  Sense strand starting at position 2500 of SEQ ID NO: 1242414
acuuuaaaguuguuccaaa

SEQ ID NO: 1345697 - RNA, 19 nt, Artificial Sequence
  Description of Artificial Sequence: Synthetic oligonucleotide
  Antisense strand to SEQ ID NO: 1345696
uuuggaacaacuuuaaagu

SEQ ID NO: 1345698 - RNA, 19 nt, Artificial Sequence
  Description of Artificial Sequence: Synthetic oligonucleotide
  Sense strand starting at position 2501 of SEQ ID NO: 1242414
cuuuaaaguuguuccaaac

SEQ ID NO: 1345699 - RNA, 19 nt, Artificial Sequence
  Description of Artificial Sequence: Synthetic oligonucleotide
  Antisense strand to SEQ ID NO: 1345698
guuuggaacaacuuuaaag

SEQ ID NO: 1345700 - RNA, 19 nt, Artificial Sequence
  Description of Artificial Sequence: Synthetic oligonucleotide
  Sense strand starting at position 2916 of SEQ ID NO: 1242414
ggaucacgcuuucccuaga

SEQ ID NO: 1345701 - RNA, 19 nt, Artificial Sequence
  Description of Artificial Sequence: Synthetic oligonucleotide
  Antisense strand to SEQ ID NO: 1345700
ucuagggaaagcgugaucc

SEQ ID NO: 1345702 - RNA, 19 nt, Artificial Sequence
  Description of Artificial Sequence: Synthetic oligonucleotide
  Sense strand starting at position 2921 of SEQ ID NO: 1242414
acgcuuucccuagagaggu

SEQ ID NO: 1345703 - RNA, 19 nt, Artificial Sequence
  Description of Artificial Sequence: Synthetic oligonucleotide
  Antisense strand to SEQ ID NO: 1345702
accucucuagggaaagcgu

SEQ ID NO: 1345704 - RNA, 19 nt, Artificial Sequence
  Description of Artificial Sequence: Synthetic oligonucleotide
  Sense strand starting at position 3105 of SEQ ID NO: 1242414
uuguaaagucgggauuggu

SEQ ID NO: 1345705 - RNA, 19 nt, Artificial Sequence
  Description of Artificial Sequence: Synthetic oligonucleotide
  Antisense strand to SEQ ID NO: 1345704
accaaucccgacuuuacaa

SEQ ID NO: 1345706 - RNA, 19 nt, Artificial Sequence
  Description of Artificial Sequence: Synthetic oligonucleotide
  Sense strand starting at position 3364 of SEQ ID NO: 1242414
gcgggucucccuggagagu

SEQ ID NO: 1345707 - RNA, 19 nt, Artificial Sequence
  Description of Artificial Sequence: Synthetic oligonucleotide
  Antisense strand to SEQ ID NO: 1345706
acucuccagggagacccgc

SEQ ID NO: 1345708 - RNA, 19 nt, Artificial Sequence
  Description of Artificial Sequence: Synthetic oligonucleotide
  Sense strand starting at position 3366 of SEQ ID NO: 1242414
gggucucccuggagaguga

SEQ ID NO: 1345709 - RNA, 19 nt, Artificial Sequence
  Description of Artificial Sequence: Synthetic oligonucleotide
  Antisense strand to SEQ ID NO: 1345708
ucacucuccagggagaccc

SEQ ID NO: 1345710 - RNA, 19 nt, Artificial Sequence
  Description of Artificial Sequence: Synthetic oligonucleotide
  Sense strand starting at position 3497 of SEQ ID NO: 1242414
ugcugagcuuuaccuggaa

SEQ ID NO: 1345711 - RNA, 19 nt, Artificial Sequence
  Description of Artificial Sequence: Synthetic oligonucleotide
  Antisense strand to SEQ ID NO: 1345710
uuccagguaaagcucagca

SEQ ID NO: 1345712 - RNA, 19 nt, Artificial Sequence
  Description of Artificial Sequence: Synthetic oligonucleotide
  Sense strand starting at position 3500 of SEQ ID NO: 1242414
ugagcuuuaccuggaacca

SEQ ID NO: 1345713 - RNA, 19 nt, Artificial Sequence
  Description of Artificial Sequence: Synthetic oligonucleotide
  Antisense strand to SEQ ID NO: 1345712
ugguuccagguaaagcuca

SEQ ID NO: 1345714 - RNA, 19 nt, Artificial Sequence
  Description of Artificial Sequence: Synthetic oligonucleotide
  Sense strand starting at position 3638 of SEQ ID NO: 1242414
gccucaguuucuuguuuga

SEQ ID NO: 1345715 - RNA, 19 nt, Artificial Sequence
  Description of Artificial Sequence: Synthetic oligonucleotide
  Antisense strand to SEQ ID NO: 1345714
ucaaacaagaaacugaggc

SEQ ID NO: 1345716 - RNA, 19 nt, Artificial Sequence
  Description of Artificial Sequence: Synthetic oligonucleotide
  Sense strand starting at position 3640 of SEQ ID NO: 1242414
cucaguuucuuguuugaaa

SEQ ID NO: 1345717 - RNA, 19 nt, Artificial Sequence
  Description of Artificial Sequence: Synthetic oligonucleotide
  Antisense strand to SEQ ID NO: 1345716
uuucaaacaagaaacugag

SEQ ID NO: 1345718 - RNA, 19 nt, Artificial Sequence
  Description of Artificial Sequence: Synthetic oligonucleotide
  Sense strand starting at position 3641 of SEQ ID NO: 1242414
ucaguuucuuguuugaaac

SEQ ID NO: 1345719 - RNA, 19 nt, Artificial Sequence
  Description of Artificial Sequence: Synthetic oligonucleotide
  Antisense strand to SEQ ID NO: 1345718
guuucaaacaagaaacuga

SEQ ID NO: 1345720 - RNA, 19 nt, Artificial Sequence
  Description of Artificial Sequence: Synthetic oligonucleotide
  Sense strand starting at position 3698 of SEQ ID NO: 1242414
cacgaaggucccuggagau

SEQ ID NO: 1345721 - RNA, 19 nt, Artificial Sequence
  Description of Artificial Sequence: Synthetic oligonucleotide
  Antisense strand to SEQ ID NO: 1345720
aucuccagggaccuucgug

SEQ ID NO: 1345722 - RNA, 19 nt, Artificial Sequence
  Description of Artificial Sequence: Synthetic oligonucleotide
  Sense strand starting at position 3711 of SEQ ID NO: 1242414
ggagauagugcacguuaaa

SEQ ID NO: 1345723 - RNA, 19 nt, Artificial Sequence
  Description of Artificial Sequence: Synthetic oligonucleotide
  Antisense strand to SEQ ID NO: 1345722
uuuaacgugcacuaucucc

SEQ ID NO: 1345724 - RNA, 19 nt, Artificial Sequence
  Description of Artificial Sequence: Synthetic oligonucleotide
  Sense strand starting at position 3926 of SEQ ID NO: 1242414
cguguaugcucuuugugga

SEQ ID NO: 1345725 - RNA, 19 nt, Artificial Sequence
  Description of Artificial Sequence: Synthetic oligonucleotide
  Antisense strand to SEQ ID NO: 1345724
uccacaaagagcauacacg

SEQ ID NO: 1345726 - RNA, 19 nt, Artificial Sequence
  Description of Artificial Sequence: Synthetic oligonucleotide
  Sense strand starting at position 3927 of SEQ ID NO: 1242414
guguaugcucuuuguggau

SEQ ID NO: 1345727 - RNA, 19 nt, Artificial Sequence
  Description of Artificial Sequence: Synthetic oligonucleotide
  Antisense strand to SEQ ID NO: 1345726
auccacaaagagcauacac

SEQ ID NO: 1345728 - RNA, 19 nt, Artificial Sequence
  Description of Artificial Sequence: Synthetic oligonucleotide
  Sense strand starting at position 3929 of SEQ ID NO: 1242414
guaugcucuuuguggauua

SEQ ID NO: 1345729 - RNA, 19 nt, Artificial Sequence
  Description of Artificial Sequence: Synthetic oligonucleotide
  Antisense strand to SEQ ID NO: 1345728
uaauccacaaagagcauac

SEQ ID NO: 1345730 - RNA, 19 nt, Artificial Sequence
  Description of Artificial Sequence: Synthetic oligonucleotide
  Sense strand starting at position 3930 of SEQ ID NO: 1242414
uaugcucuuuguggauuau

SEQ ID NO: 1345731 - RNA, 19 nt, Artificial Sequence
  Description of Artificial Sequence: Synthetic oligonucleotide
  Antisense strand to SEQ ID NO: 1345730
auaauccacaaagagcaua

SEQ ID NO: 1345732 - RNA, 19 nt, Artificial Sequence
  Description of Artificial Sequence: Synthetic oligonucleotide
  Sense strand starting at position 3936 of SEQ ID NO: 1242414
cuuuguggauuaucuuuga

SEQ ID NO: 1345733 - RNA, 19 nt, Artificial Sequence
  Description of Artificial Sequence: Synthetic oligonucleotide
  Antisense strand to SEQ ID NO: 1345732
ucaaagauaauccacaaag

SEQ ID NO: 1345734 - RNA, 19 nt, Artificial Sequence
  Description of Artificial Sequence: Synthetic oligonucleotide
  Sense strand starting at position 3939 of SEQ ID NO: 1242414
uguggauuaucuuugacug

SEQ ID NO: 1345735 - RNA, 19 nt, Artificial Sequence
  Description of Artificial Sequence: Synthetic oligonucleotide
  Antisense strand to SEQ ID NO: 1345734
cagucaaagauaauccaca

SEQ ID NO: 1345736 - RNA, 19 nt, Artificial Sequence
  Description of Artificial Sequence: Synthetic oligonucleotide
  Sense strand starting at position 3940 of SEQ ID NO: 1242414
guggauuaucuuugacugu

SEQ ID NO: 1345737 - RNA, 19 nt, Artificial Sequence
  Description of Artificial Sequence: Synthetic oligonucleotide
  Antisense strand to SEQ ID NO: 1345736
acagucaaagauaauccac

SEQ ID NO: 1345738 - RNA, 19 nt, Artificial Sequence
  Description of Artificial Sequence: Synthetic oligonucleotide
  Sense strand starting at position 3943 of SEQ ID NO: 1242414
gauuaucuuugacugugua

SEQ ID NO: 1345739 - RNA, 19 nt, Artificial Sequence
  Description of Artificial Sequence: Synthetic oligonucleotide
  Antisense strand to SEQ ID NO: 1345738
uacacagucaaagauaauc

SEQ ID NO: 1345740 - RNA, 19 nt, Artificial Sequence
  Description of Artificial Sequence: Synthetic oligonucleotide
  Sense strand starting at position 3944 of SEQ ID NO: 1242414
auuaucuuugacuguguau

SEQ ID NO: 1345741 - RNA, 19 nt, Artificial Sequence
  Description of Artificial Sequence: Synthetic oligonucleotide
  Antisense strand to SEQ ID NO: 1345740
auacacagucaaagauaau

SEQ ID NO: 1345742 - RNA, 19 nt, Artificial Sequence
  Description of Artificial Sequence: Synthetic oligonucleotide
  Sense strand starting at position 3951 of SEQ ID NO: 1242414
uugacuguguauuacaaua

SEQ ID NO: 1345743 - RNA, 19 nt, Artificial Sequence
  Description of Artificial Sequence: Synthetic oligonucleotide
  Antisense strand to SEQ ID NO: 1345742
uauuguaauacacagucaa

SEQ ID NO: 1345744 - RNA, 19 nt, Artificial Sequence
  Description of Artificial Sequence: Synthetic oligonucleotide
  Sense strand starting at position 3968 of SEQ ID NO: 1242414
uaauaauaguucgugcgua

SEQ ID NO: 1345745 - RNA, 19 nt, Artificial Sequence
  Description of Artificial Sequence: Synthetic oligonucleotide
  Antisense strand to SEQ ID NO: 1345744
uacgcacgaacuauuauua

SEQ ID NO: 1345746 - RNA, 19 nt, Artificial Sequence
  Description of Artificial Sequence: Synthetic oligonucleotide
  Sense strand starting at position 3969 of SEQ ID NO: 1242414
aauaauaguucgugcguau

SEQ ID NO: 1345747 - RNA, 19 nt, Artificial Sequence
  Description of Artificial Sequence: Synthetic oligonucleotide
  Antisense strand to SEQ ID NO: 1345746
auacgcacgaacuauuauu

SEQ ID NO: 1345748 - RNA, 19 nt, Artificial Sequence
  Description of Artificial Sequence: Synthetic oligonucleotide
  Sense strand starting at position 3970 of SEQ ID NO: 1242414
auaauaguucgugcguauu

SEQ ID NO: 1345749 - RNA, 19 nt, Artificial Sequence
  Description of Artificial Sequence: Synthetic oligonucleotide
  Antisense strand to SEQ ID NO: 1345748
aauacgcacgaacuauuau

SEQ ID NO: 1345750 - RNA, 19 nt, Artificial Sequence
  Description of Artificial Sequence: Synthetic oligonucleotide
  Sense strand starting at position 3972 of SEQ ID NO: 1242414
aauaguucgugcguauuga

SEQ ID NO: 1345751 - RNA, 19 nt, Artificial Sequence
  Description of Artificial Sequence: Synthetic oligonucleotide
  Antisense strand to SEQ ID NO: 1345750
ucaauacgcacgaacuauu

SEQ ID NO: 1345752 - RNA, 19 nt, Artificial Sequence
  Description of Artificial Sequence: Synthetic oligonucleotide
  Sense strand starting at position 3979 of SEQ ID NO: 1242414
cgugcguauugagucguua

SEQ ID NO: 1345753 - RNA, 19 nt, Artificial Sequence
  Description of Artificial Sequence: Synthetic oligonucleotide
  Antisense strand to SEQ ID NO: 1345752
uaacgacucaauacgcacg

SEQ ID NO: 1345754 - RNA, 19 nt, Artificial Sequence
  Description of Artificial Sequence: Synthetic oligonucleotide
  Sense strand starting at position 3980 of SEQ ID NO: 1242414
gugcguauugagucguuac

SEQ ID NO: 1345755 - RNA, 19 nt, Artificial Sequence
  Description of Artificial Sequence: Synthetic oligonucleotide
  Antisense strand to SEQ ID NO: 1345754
guaacgacucaauacgcac

SEQ ID NO: 1345756 - RNA, 19 nt, Artificial Sequence
  Description of Artificial Sequence: Synthetic oligonucleotide
  Sense strand starting at position 3981 of SEQ ID NO: 1242414
ugcguauugagucguuacu

SEQ ID NO: 1345757 - RNA, 19 nt, Artificial Sequence
  Description of Artificial Sequence: Synthetic oligonucleotide
  Antisense strand to SEQ ID NO: 1345756
aguaacgacucaauacgca

SEQ ID NO: 1345758 - RNA, 19 nt, Artificial Sequence
  Description of Artificial Sequence: Synthetic oligonucleotide
  Sense strand starting at position 3982 of SEQ ID NO: 1242414
gcguauugagucguuacua

SEQ ID NO: 1345759 - RNA, 19 nt, Artificial Sequence
  Description of Artificial Sequence: Synthetic oligonucleotide
  Antisense strand to SEQ ID NO: 1345758
uaguaacgacucaauacgc

SEQ ID NO: 1345760 - RNA, 19 nt, Artificial Sequence
  Description of Artificial Sequence: Synthetic oligonucleotide
  Sense strand starting at position 3983 of SEQ ID NO: 1242414
cguauugagucguuacuau

SEQ ID NO: 1345761 - RNA, 19 nt, Artificial Sequence
  Description of Artificial Sequence: Synthetic oligonucleotide
  Antisense strand to SEQ ID NO: 1345760
auaguaacgacucaauacg

SEQ ID NO: 1345762 - RNA, 19 nt, Artificial Sequence
  Description of Artificial Sequence: Synthetic oligonucleotide
  Sense strand starting at position 159 of SEQ ID NO: 1242415
ggagaaucgcuugaagugu

SEQ ID NO: 1345763 - RNA, 19 nt, Artificial Sequence
  Description of Artificial Sequence: Synthetic oligonucleotide
  Antisense strand to SEQ ID NO: 1345762
acacuucaagcgauucucc

SEQ ID NO: 1345764 - RNA, 19 nt, Artificial Sequence
  Description of Artificial Sequence: Synthetic oligonucleotide
  Sense strand starting at position 1031 of SEQ ID NO: 1242415
uaacauuguggugacugau

SEQ ID NO: 1345765 - RNA, 19 nt, Artificial Sequence
  Description of Artificial Sequence: Synthetic oligonucleotide
  Antisense strand to SEQ ID NO: 1345764
aucagucaccacaauguua

SEQ ID NO: 1345766 - RNA, 19 nt, Artificial Sequence
  Description of Artificial Sequence: Synthetic oligonucleotide
  Sense strand starting at position 1034 of SEQ ID NO: 1242415
cauuguggugacugauuaa

SEQ ID NO: 1345767 - RNA, 19 nt, Artificial Sequence
  Description of Artificial Sequence: Synthetic oligonucleotide
  Antisense strand to SEQ ID NO: 1345766
uuaaucagucaccacaaug

SEQ ID NO: 1345768 - RNA, 19 nt, Artificial Sequence
  Description of Artificial Sequence: Synthetic oligonucleotide
  Sense strand starting at position 1037 of SEQ ID NO: 1242415
uguggugacugauuaaaga

SEQ ID NO: 1345769 - RNA, 19 nt, Artificial Sequence
  Description of Artificial Sequence: Synthetic oligonucleotide
  Antisense strand to SEQ ID NO: 1345768
ucuuuaaucagucaccaca

SEQ ID NO: 1345770 - RNA, 19 nt, Artificial Sequence
  Description of Artificial Sequence: Synthetic oligonucleotide
  Sense strand starting at position 1161 of SEQ ID NO: 1242415
aguaaugccgcgagguaag

SEQ ID NO: 1345771 - RNA, 19 nt, Artificial Sequence
  Description of Artificial Sequence: Synthetic oligonucleotide
  Antisense strand to SEQ ID NO: 1345770
cuuaccucgcggcauuacu

SEQ ID NO: 1345772 - RNA, 19 nt, Artificial Sequence
  Description of Artificial Sequence: Synthetic oligonucleotide
  Sense strand starting at position 1179 of SEQ ID NO: 1242415
ggcugaaccuuucuagaga

SEQ ID NO: 1345773 - RNA, 19 nt, Artificial Sequence
  Description of Artificial Sequence: Synthetic oligonucleotide
  Antisense strand to SEQ ID NO: 1345772
ucucuagaaagguucagcc

SEQ ID NO: 1345774 - RNA, 19 nt, Artificial Sequence
  Description of Artificial Sequence: Synthetic oligonucleotide
  Sense strand starting at position 1252 of SEQ ID NO: 1242415
agagcuaucugaucacugu

SEQ ID NO: 1345775 - RNA, 19 nt, Artificial Sequence
  Description of Artificial Sequence: Synthetic oligonucleotide
  Antisense strand to SEQ ID NO: 1345774
acagugaucagauagcucu

SEQ ID NO: 1345776 - RNA, 19 nt, Artificial Sequence
  Description of Artificial Sequence: Synthetic oligonucleotide
  Sense strand starting at position 1261 of SEQ ID NO: 1242415
ugaucacuguggucaccau

SEQ ID NO: 1345777 - RNA, 19 nt, Artificial Sequence
  Description of Artificial Sequence: Synthetic oligonucleotide
  Antisense strand to SEQ ID NO: 1345776
auggugaccacagugauca

SEQ ID NO: 1345778 - RNA, 19 nt, Artificial Sequence
  Description of Artificial Sequence: Synthetic oligonucleotide
  Sense strand starting at position 1262 of SEQ ID NO: 1242415
gaucacuguggucaccaua

SEQ ID NO: 1345779 - RNA, 19 nt, Artificial Sequence
  Description of Artificial Sequence: Synthetic oligonucleotide
  Antisense strand to SEQ ID NO: 1345778
uauggugaccacagugauc

SEQ ID NO: 1345780 - RNA, 19 nt, Artificial Sequence
  Description of Artificial Sequence: Synthetic oligonucleotide
  Sense strand starting at position 1331 of SEQ ID NO: 1242415
gaaagugaucucuguuuaa

SEQ ID NO: 1345781 - RNA, 19 nt, Artificial Sequence
  Description of Artificial Sequence: Synthetic oligonucleotide
  Antisense strand to SEQ ID NO: 1345780
uuaaacagagaucacuuuc

SEQ ID NO: 1345782 - RNA, 19 nt, Artificial Sequence
  Description of Artificial Sequence: Synthetic oligonucleotide
  Sense strand starting at position 2090 of SEQ ID NO: 1242415
ggaaggguucccggaggaa

SEQ ID NO: 1345783 - RNA, 19 nt, Artificial Sequence
  Description of Artificial Sequence: Synthetic oligonucleotide
  Antisense strand to SEQ ID NO: 1345782
uuccuccgggaacccuucc

SEQ ID NO: 1345784 - RNA, 19 nt, Artificial Sequence
  Description of Artificial Sequence: Synthetic oligonucleotide
  Sense strand starting at position 2103 of SEQ ID NO: 1242415
gaggaagugacuugaguca

SEQ ID NO: 1345785 - RNA, 19 nt, Artificial Sequence
  Description of Artificial Sequence: Synthetic oligonucleotide
  Antisense strand to SEQ ID NO: 1345784
ugacucaagucacuuccuc

SEQ ID NO: 1345786 - RNA, 19 nt, Artificial Sequence
  Description of Artificial Sequence: Synthetic oligonucleotide
  Sense strand starting at position 2144 of SEQ ID NO: 1242415
ccggaaauccggcagagaa

SEQ ID NO: 1345787 - RNA, 19 nt, Artificial Sequence
  Description of Artificial Sequence: Synthetic oligonucleotide
  Antisense strand to SEQ ID NO: 1345786
uucucugccggauuuccgg

SEQ ID NO: 1345788 - RNA, 19 nt, Artificial Sequence
  Description of Artificial Sequence: Synthetic oligonucleotide
  Sense strand starting at position 2191 of SEQ ID NO: 1242415
acagcuuaugucgagaaca

SEQ ID NO: 1345789 - RNA, 19 nt, Artificial Sequence
  Description of Artificial Sequence: Synthetic oligonucleotide
  Antisense strand to SEQ ID NO: 1345788
uguucucgacauaagcugu

SEQ ID NO: 1345790 - RNA, 19 nt, Artificial Sequence
  Description of Artificial Sequence: Synthetic oligonucleotide
  Sense strand starting at position 2297 of SEQ ID NO: 1242415
gcuuuagaaggccaacaau

SEQ ID NO: 1345791 - RNA, 19 nt, Artificial Sequence
  Description of Artificial Sequence: Synthetic oligonucleotide
  Antisense strand to SEQ ID NO: 1345790
auuguuggccuucuaaagc

SEQ ID NO: 1345792 - RNA, 19 nt, Artificial Sequence
  Description of Artificial Sequence: Synthetic oligonucleotide
  Sense strand starting at position 2307 of SEQ ID NO: 1242415
gccaacaaucgcuagaucu

SEQ ID NO: 1345793 - RNA, 19 nt, Artificial Sequence
  Description of Artificial Sequence: Synthetic oligonucleotide
  Antisense strand to SEQ ID NO: 1345792
agaucuagcgauuguuggc

SEQ ID NO: 1345794 - RNA, 19 nt, Artificial Sequence
  Description of Artificial Sequence: Synthetic oligonucleotide
  Sense strand starting at position 2324 of SEQ ID NO: 1242415
cuuggaaggccuuggaauu

SEQ ID NO: 1345795 - RNA, 19 nt, Artificial Sequence
  Description of Artificial Sequence: Synthetic oligonucleotide
  Antisense strand to SEQ ID NO: 1345794
aauuccaaggccuuccaag

SEQ ID NO: 1345796 - RNA, 19 nt, Artificial Sequence
  Description of Artificial Sequence: Synthetic oligonucleotide
  Sense strand starting at position 2342 of SEQ ID NO: 1242415
uuuagaccacuuuguacua

SEQ ID NO: 1345797 - RNA, 19 nt, Artificial Sequence
  Description of Artificial Sequence: Synthetic oligonucleotide
  Antisense strand to SEQ ID NO: 1345796
uaguacaaaguggucuaaa

SEQ ID NO: 1345798 - RNA, 19 nt, Artificial Sequence
  Description of Artificial Sequence: Synthetic oligonucleotide
  Sense strand starting at position 2920 of SEQ ID NO: 1242415
aggaguaaguagucuauuc

SEQ ID NO: 1345799 - RNA, 19 nt, Artificial Sequence
  Description of Artificial Sequence: Synthetic oligonucleotide
  Antisense strand to SEQ ID NO: 1345798
gaauagacuacuuacuccu

SEQ ID NO: 1345800 - RNA, 19 nt, Artificial Sequence
  Description of Artificial Sequence: Synthetic oligonucleotide
  Sense strand starting at position 2922 of SEQ ID NO: 1242415
gaguaaguagucuauuccu

SEQ ID NO: 1345801 - RNA, 19 nt, Artificial Sequence
  Description of Artificial Sequence: Synthetic oligonucleotide
  Antisense strand to SEQ ID NO: 1345800
aggaauagacuacuuacuc

SEQ ID NO: 1345802 - RNA, 19 nt, Artificial Sequence
  Description of Artificial Sequence: Synthetic oligonucleotide
  Sense strand starting at position 2991 of SEQ ID NO: 1242415
cacagaggucacugauuau

SEQ ID NO: 1345803 - RNA, 19 nt, Artificial Sequence
  Description of Artificial Sequence: Synthetic oligonucleotide
  Antisense strand to SEQ ID NO: 1345802
auaaucagugaccucugug

SEQ ID NO: 1345804 - RNA, 19 nt, Artificial Sequence
  Description of Artificial Sequence: Synthetic oligonucleotide
  Sense strand starting at position 2997 of SEQ ID NO: 1242415
ggucacugauuaucucagu

SEQ ID NO: 1345805 - RNA, 19 nt, Artificial Sequence
  Description of Artificial Sequence: Synthetic oligonucleotide
  Antisense strand to SEQ ID NO: 1345804
acugagauaaucagugacc

SEQ ID NO: 1345806 - RNA, 19 nt, Artificial Sequence
  Description of Artificial Sequence: Synthetic oligonucleotide
  Sense strand starting at position 3002 of SEQ ID NO: 1242415
cugauuaucucagugaaag

SEQ ID NO: 1345807 - RNA, 19 nt, Artificial Sequence
  Description of Artificial Sequence: Synthetic oligonucleotide
  Antisense strand to SEQ ID NO: 1345806
cuuucacugagauaaucag

SEQ ID NO: 1345808 - RNA, 19 nt, Artificial Sequence
  Description of Artificial Sequence: Synthetic oligonucleotide
  Sense strand starting at position 3003 of SEQ ID NO: 1242415
ugauuaucucagugaaagc

SEQ ID NO: 1345809 - RNA, 19 nt, Artificial Sequence
  Description of Artificial Sequence: Synthetic oligonucleotide
  Antisense strand to SEQ ID NO: 1345808
gcuuucacugagauaauca

SEQ ID NO: 1345810 - RNA, 19 nt, Artificial Sequence
  Description of Artificial Sequence: Synthetic oligonucleotide
  Sense strand starting at position 3091 of SEQ ID NO: 1242415
ggacaaguuguagaaugcu

SEQ ID NO: 1345811 - RNA, 19 nt, Artificial Sequence
  Description of Artificial Sequence: Synthetic oligonucleotide
  Antisense strand to SEQ ID NO: 1345810
agcauucuacaacuugucc

SEQ ID NO: 1345812 - RNA, 19 nt, Artificial Sequence
  Description of Artificial Sequence: Synthetic oligonucleotide
  Sense strand starting at position 3208 of SEQ ID NO: 1242415
ggagaaacuugagcauggu

SEQ ID NO: 1345813 - RNA, 19 nt, Artificial Sequence
  Description of Artificial Sequence: Synthetic oligonucleotide
  Antisense strand to SEQ ID NO: 1345812
accaugcucaaguuucucc

SEQ ID NO: 1345814 - RNA, 19 nt, Artificial Sequence
  Description of Artificial Sequence: Synthetic oligonucleotide
  Sense strand starting at position 3271 of SEQ ID NO: 1242415
aagggauagucaguaggca

SEQ ID NO: 1345815 - RNA, 19 nt, Artificial Sequence
  Description of Artificial Sequence: Synthetic oligonucleotide
  Antisense strand to SEQ ID NO: 1345814
ugccuacugacuaucccuu

SEQ ID NO: 1345816 - RNA, 19 nt, Artificial Sequence
  Description of Artificial Sequence: Synthetic oligonucleotide
  Sense strand starting at position 3272 of SEQ ID NO: 1242415
agggauagucaguaggcaa

SEQ ID NO: 1345817 - RNA, 19 nt, Artificial Sequence
  Description of Artificial Sequence: Synthetic oligonucleotide
  Antisense strand to SEQ ID NO: 1345816
uugccuacugacuaucccu

SEQ ID NO: 1345818 - RNA, 19 nt, Artificial Sequence
  Description of Artificial Sequence: Synthetic oligonucleotide
  Sense strand starting at position 3275 of SEQ ID NO: 1242415
gauagucaguaggcaaaga

SEQ ID NO: 1345819 - RNA, 19 nt, Artificial Sequence
  Description of Artificial Sequence: Synthetic oligonucleotide
  Antisense strand to SEQ ID NO: 1345818
ucuuugccuacugacuauc

SEQ ID NO: 1345820 - RNA, 19 nt, Artificial Sequence
  Description of Artificial Sequence: Synthetic oligonucleotide
  Sense strand starting at position 3276 of SEQ ID NO: 1242415
auagucaguaggcaaagau

SEQ ID NO: 1345821 - RNA, 19 nt, Artificial Sequence
  Description of Artificial Sequence: Synthetic oligonucleotide
  Antisense strand to SEQ ID NO: 1345820
aucuuugccuacugacuau

SEQ ID NO: 1345822 - RNA, 19 nt, Artificial Sequence
  Description of Artificial Sequence: Synthetic oligonucleotide
  Sense strand starting at position 3330 of SEQ ID NO: 1242415
guucgaaacacugguaaga

SEQ ID NO: 1345823 - RNA, 19 nt, Artificial Sequence
  Description of Artificial Sequence: Synthetic oligonucleotide
  Antisense strand to SEQ ID NO: 1345822
ucuuaccaguguuucgaac

SEQ ID NO: 1345824 - RNA, 19 nt, Artificial Sequence
  Description of Artificial Sequence: Synthetic oligonucleotide
  Sense strand starting at position 3415 of SEQ ID NO: 1242415
gaggaaguauguuucugua

SEQ ID NO: 1345825 - RNA, 19 nt, Artificial Sequence
  Description of Artificial Sequence: Synthetic oligonucleotide
  Antisense strand to SEQ ID NO: 1345824
uacagaaacauacuuccuc

SEQ ID NO: 1345826 - RNA, 19 nt, Artificial Sequence
  Description of Artificial Sequence: Synthetic oligonucleotide
  Sense strand starting at position 3434 of SEQ ID NO: 1242415
uguuuaguaacaggaaguu

SEQ ID NO: 1345827 - RNA, 19 nt, Artificial Sequence
  Description of Artificial Sequence: Synthetic oligonucleotide
  Antisense strand to SEQ ID NO: 1345826
aacuuccuguuacuaaaca

SEQ ID NO: 1345828 - RNA, 19 nt, Artificial Sequence
  Description of Artificial Sequence: Synthetic oligonucleotide
  Sense strand starting at position 3548 of SEQ ID NO: 1242415
cugagaagauuuggaauau

SEQ ID NO: 1345829 - RNA, 19 nt, Artificial Sequence
  Description of Artificial Sequence: Synthetic oligonucleotide
  Antisense strand to SEQ ID NO: 1345828
auauuccaaaucuucucag

SEQ ID NO: 1345830 - RNA, 19 nt, Artificial Sequence
  Description of Artificial Sequence: Synthetic oligonucleotide
  Sense strand starting at position 3588 of SEQ ID NO: 1242415
uugacagaagaauguugua

SEQ ID NO: 1345831 - RNA, 19 nt, Artificial Sequence
  Description of Artificial Sequence: Synthetic oligonucleotide
  Antisense strand to SEQ ID NO: 1345830
uacaacauucuucugucaa

SEQ ID NO: 1345832 - RNA, 19 nt, Artificial Sequence
  Description of Artificial Sequence: Synthetic oligonucleotide
  Sense strand starting at position 3667 of SEQ ID NO: 1242415
ugcccuccuguguaaauuu

SEQ ID NO: 1345833 - RNA, 19 nt, Artificial Sequence
  Description of Artificial Sequence: Synthetic oligonucleotide
  Antisense strand to SEQ ID NO: 1345832
aaauuuacacaggagggca

SEQ ID NO: 1345834 - RNA, 19 nt, Artificial Sequence
  Description of Artificial Sequence: Synthetic oligonucleotide
  Sense strand starting at position 3756 of SEQ ID NO: 1242415
gguugugauggucauugau

SEQ ID NO: 1345835 - RNA, 19 nt, Artificial Sequence
  Description of Artificial Sequence: Synthetic oligonucleotide
  Antisense strand to SEQ ID NO: 1345834
aucaaugaccaucacaacc

SEQ ID NO: 1345836 - RNA, 19 nt, Artificial Sequence
  Description of Artificial Sequence: Synthetic oligonucleotide
  Sense strand starting at position 3758 of SEQ ID NO: 1242415
uugugauggucauugauau

SEQ ID NO: 1345837 - RNA, 19 nt, Artificial Sequence
  Description of Artificial Sequence: Synthetic oligonucleotide
  Antisense strand to SEQ ID NO: 1345836
auaucaaugaccaucacaa

SEQ ID NO: 1345838 - RNA, 19 nt, Artificial Sequence
  Description of Artificial Sequence: Synthetic oligonucleotide
  Sense strand starting at position 3759 of SEQ ID NO: 1242415
ugugauggucauugauaua

SEQ ID NO: 1345839 - RNA, 19 nt, Artificial Sequence
  Description of Artificial Sequence: Synthetic oligonucleotide
  Antisense strand to SEQ ID NO: 1345838
uauaucaaugaccaucaca

SEQ ID NO: 1345840 - RNA, 19 nt, Artificial Sequence
  Description of Artificial Sequence: Synthetic oligonucleotide
  Sense strand starting at position 3836 of SEQ ID NO: 1242415
ggagaugcuuuauugugau

SEQ ID NO: 1345841 - RNA, 19 nt, Artificial Sequence
  Description of Artificial Sequence: Synthetic oligonucleotide
  Antisense strand to SEQ ID NO: 1345840
aucacaauaaagcaucucc

SEQ ID NO: 1345842 - RNA, 19 nt, Artificial Sequence
  Description of Artificial Sequence: Synthetic oligonucleotide
  Sense strand starting at position 34 of SEQ ID NO: 1242416
uuuggagguggucaucaau

SEQ ID NO: 1345843 - RNA, 19 nt, Artificial Sequence
  Description of Artificial Sequence: Synthetic oligonucleotide
  Antisense strand to SEQ ID NO: 1345842
auugaugaccaccuccaaa

SEQ ID NO: 1345844 - RNA, 19 nt, Artificial Sequence
  Description of Artificial Sequence: Synthetic oligonucleotide
  Sense strand starting at position 254 of SEQ ID NO: 1242416
aguauaacuucccuaagga

SEQ ID NO: 1345845 - RNA, 19 nt, Artificial Sequence
  Description of Artificial Sequence: Synthetic oligonucleotide
  Antisense strand to SEQ ID NO: 1345844
uccuuagggaaguuauacu

SEQ ID NO: 1345846 - RNA, 19 nt, Artificial Sequence
  Description of Artificial Sequence: Synthetic oligonucleotide
  Sense strand starting at position 289 of SEQ ID NO: 1242416
ugauaugucacagguguac

SEQ ID NO: 1345847 - RNA, 19 nt, Artificial Sequence
  Description of Artificial Sequence: Synthetic oligonucleotide
  Antisense strand to SEQ ID NO: 1345846
guacaccugugacauauca

SEQ ID NO: 1345848 - RNA, 19 nt, Artificial Sequence
  Description of Artificial Sequence: Synthetic oligonucleotide
  Sense strand starting at position 291 of SEQ ID NO: 1242416
auaugucacagguguacaa

SEQ ID NO: 1345849 - RNA, 19 nt, Artificial Sequence
  Description of Artificial Sequence: Synthetic oligonucleotide
  Antisense strand to SEQ ID NO: 1345848
uuguacaccugugacauau

SEQ ID NO: 1345850 - RNA, 19 nt, Artificial Sequence
  Description of Artificial Sequence: Synthetic oligonucleotide
  Sense strand starting at position 293 of SEQ ID NO: 1242416
augucacagguguacaaua

SEQ ID NO: 1345851 - RNA, 19 nt, Artificial Sequence
  Description of Artificial Sequence: Synthetic oligonucleotide
  Antisense strand to SEQ ID NO: 1345850
uauuguacaccugugacau

SEQ ID NO: 1345852 - RNA, 19 nt, Artificial Sequence
  Description of Artificial Sequence: Synthetic oligonucleotide
  Sense strand starting at position 322 of SEQ ID NO: 1242416
uacaaagggcuuugguaau

SEQ ID NO: 1345853 - RNA, 19 nt, Artificial Sequence
  Description of Artificial Sequence: Synthetic oligonucleotide
  Antisense strand to SEQ ID NO: 1345852
auuaccaaagcccuuugua

SEQ ID NO: 1345854 - RNA, 19 nt, Artificial Sequence
  Description of Artificial Sequence: Synthetic oligonucleotide
  Sense strand starting at position 454 of SEQ ID NO: 1242416
ucgagaacaccuuggccaa

SEQ ID NO: 1345855 - RNA, 19 nt, Artificial Sequence
  Description of Artificial Sequence: Synthetic oligonucleotide
  Antisense strand to SEQ ID NO: 1345854
uuggccaagguguucucga

SEQ ID NO: 1345856 - RNA, 19 nt, Artificial Sequence
  Description of Artificial Sequence: Synthetic oligonucleotide
  Sense strand starting at position 677 of SEQ ID NO: 1242416
gaaugcugagcagggauua

SEQ ID NO: 1345857 - RNA, 19 nt, Artificial Sequence
  Description of Artificial Sequence: Synthetic oligonucleotide
  Antisense strand to SEQ ID NO: 1345856
uaaucccugcucagcauuc

SEQ ID NO: 1345858 - RNA, 19 nt, Artificial Sequence
  Description of Artificial Sequence: Synthetic oligonucleotide
  Sense strand starting at position 1078 of SEQ ID NO: 1242416
gaaggugaagcacgagaau

SEQ ID NO: 1345859 - RNA, 19 nt, Artificial Sequence
  Description of Artificial Sequence: Synthetic oligonucleotide
  Antisense strand to SEQ ID NO: 1345858
auucucgugcuucaccuuc

SEQ ID NO: 1345860 - RNA, 19 nt, Artificial Sequence
  Description of Artificial Sequence: Synthetic oligonucleotide
  Sense strand starting at position 1317 of SEQ ID NO: 1242416
ccggaagcuccagacguua

SEQ ID NO: 1345861 - RNA, 19 nt, Artificial Sequence
  Description of Artificial Sequence: Synthetic oligonucleotide
  Antisense strand to SEQ ID NO: 1345860
uaacgucuggagcuuccgg

SEQ ID NO: 1345862 - RNA, 19 nt, Artificial Sequence
  Description of Artificial Sequence: Synthetic oligonucleotide
  Sense strand starting at position 1380 of SEQ ID NO: 1242416
augggaggaucuaggaguu

SEQ ID NO: 1345863 - RNA, 19 nt, Artificial Sequence
  Description of Artificial Sequence: Synthetic oligonucleotide
  Antisense strand to SEQ ID NO: 1345862
aacuccuagauccucccau

SEQ ID NO: 1345864 - RNA, 19 nt, Artificial Sequence
  Description of Artificial Sequence: Synthetic oligonucleotide
  Sense strand starting at position 1530 of SEQ ID NO: 1242416
gucugagggcgaugaacau

SEQ ID NO: 1345865 - RNA, 19 nt, Artificial Sequence
  Description of Artificial Sequence: Synthetic oligonucleotide
  Antisense strand to SEQ ID NO: 1345864
auguucaucgcccucagac

SEQ ID NO: 1345866 - RNA, 19 nt, Artificial Sequence
  Description of Artificial Sequence: Synthetic oligonucleotide
  Sense strand starting at position 1677 of SEQ ID NO: 1242416
gauaccuguuuguuuguaa

SEQ ID NO: 1345867 - RNA, 19 nt, Artificial Sequence
  Description of Artificial Sequence: Synthetic oligonucleotide
  Antisense strand to SEQ ID NO: 1345866
uuacaaacaaacagguauc

SEQ ID NO: 1345868 - RNA, 19 nt, Artificial Sequence
  Description of Artificial Sequence: Synthetic oligonucleotide
  Sense strand starting at position 1678 of SEQ ID NO: 1242416
auaccuguuuguuuguaaa

SEQ ID NO: 1345869 - RNA, 19 nt, Artificial Sequence
  Description of Artificial Sequence: Synthetic oligonucleotide
  Antisense strand to SEQ ID NO: 1345868
uuuacaaacaaacagguau

SEQ ID NO: 1345870 - RNA, 19 nt, Artificial Sequence
  Description of Artificial Sequence: Synthetic oligonucleotide
  Sense strand starting at position 1778 of SEQ ID NO: 1242416
gggaaauggucgcucggga

SEQ ID NO: 1345871 - RNA, 19 nt, Artificial Sequence
  Description of Artificial Sequence: Synthetic oligonucleotide
  Antisense strand to SEQ ID NO: 1345870
ucccgagcgaccauuuccc

SEQ ID NO: 1345872 - RNA, 19 nt, Artificial Sequence
  Description of Artificial Sequence: Synthetic oligonucleotide
  Sense strand starting at position 2115 of SEQ ID NO: 1242416
ggguacagccugugucaaa

SEQ ID NO: 1345873 - RNA, 19 nt, Artificial Sequence
  Description of Artificial Sequence: Synthetic oligonucleotide
  Antisense strand to SEQ ID NO: 1345872
uuugacacaggcuguaccc

SEQ ID NO: 1345874 - RNA, 19 nt, Artificial Sequence
  Description of Artificial Sequence: Synthetic oligonucleotide
  Sense strand starting at position 2197 of SEQ ID NO: 1242416
ugaagaaaucuuggguuug

SEQ ID NO: 1345875 - RNA, 19 nt, Artificial Sequence
  Description of Artificial Sequence: Synthetic oligonucleotide
  Antisense strand to SEQ ID NO: 1345874
caaacccaagauuucuuca

SEQ ID NO: 1345876 - RNA, 19 nt, Artificial Sequence
  Description of Artificial Sequence: Synthetic oligonucleotide
  Sense strand starting at position 2209 of SEQ ID NO: 1242416
ggguuuggcuauccuuuaa

SEQ ID NO: 1345877 - RNA, 19 nt, Artificial Sequence
  Description of Artificial Sequence: Synthetic oligonucleotide
  Antisense strand to SEQ ID NO: 1345876
uuaaaggauagccaaaccc

SEQ ID NO: 1345878 - RNA, 19 nt, Artificial Sequence
  Description of Artificial Sequence: Synthetic oligonucleotide
  Sense strand starting at position 2216 of SEQ ID NO: 1242416
gcuauccuuuaauccgaua

SEQ ID NO: 1345879 - RNA, 19 nt, Artificial Sequence
  Description of Artificial Sequence: Synthetic oligonucleotide
  Antisense strand to SEQ ID NO: 1345878
uaucggauuaaaggauagc

SEQ ID NO: 1345880 - RNA, 19 nt, Artificial Sequence
  Description of Artificial Sequence: Synthetic oligonucleotide
  Sense strand starting at position 2221 of SEQ ID NO: 1242416
ccuuuaauccgauaggcca

SEQ ID NO: 1345881 - RNA, 19 nt, Artificial Sequence
  Description of Artificial Sequence: Synthetic oligonucleotide
  Antisense strand to SEQ ID NO: 1345880
uggccuaucggauuaaagg

SEQ ID NO: 1345882 - RNA, 19 nt, Artificial Sequence
  Description of Artificial Sequence: Synthetic oligonucleotide
  Sense strand starting at position 2309 of SEQ ID NO: 1242416
ccaaguggcuaucuuuaac

SEQ ID NO: 1345883 - RNA, 19 nt, Artificial Sequence
  Description of Artificial Sequence: Synthetic oligonucleotide
  Antisense strand to SEQ ID NO: 1345882
guuaaagauagccacuugg

SEQ ID NO: 1345884 - RNA, 19 nt, Artificial Sequence
  Description of Artificial Sequence: Synthetic oligonucleotide
  Sense strand starting at position 2360 of SEQ ID NO: 1242416
gcaccaaaucaguagcaca

SEQ ID NO: 1345885 - RNA, 19 nt, Artificial Sequence
  Description of Artificial Sequence: Synthetic oligonucleotide
  Antisense strand to SEQ ID NO: 1345884
ugugcuacugauuuggugc

SEQ ID NO: 1345886 - RNA, 19 nt, Artificial Sequence
  Description of Artificial Sequence: Synthetic oligonucleotide
  Sense strand starting at position 2379 of SEQ ID NO: 1242416
ugaacucuacuguguuaag

SEQ ID NO: 1345887 - RNA, 19 nt, Artificial Sequence
  Description of Artificial Sequence: Synthetic oligonucleotide
  Antisense strand to SEQ ID NO: 1345886
cuuaacacaguagaguuca

SEQ ID NO: 1345888 - RNA, 19 nt, Artificial Sequence
  Description of Artificial Sequence: Synthetic oligonucleotide
  Sense strand starting at position 2380 of SEQ ID NO: 1242416
gaacucuacuguguuaaga

SEQ ID NO: 1345889 - RNA, 19 nt, Artificial Sequence
  Description of Artificial Sequence: Synthetic oligonucleotide
  Antisense strand to SEQ ID NO: 1345888
ucuuaacacaguagaguuc

SEQ ID NO: 1345890 - RNA, 19 nt, Artificial Sequence
  Description of Artificial Sequence: Synthetic oligonucleotide
  Sense strand starting at position 2498 of SEQ ID NO: 1242416
gugcuuaagaacugagauu

SEQ ID NO: 1345891 - RNA, 19 nt, Artificial Sequence
  Description of Artificial Sequence: Synthetic oligonucleotide
  Antisense strand to SEQ ID NO: 1345890
aaucucaguucuuaagcac

SEQ ID NO: 1345892 - RNA, 19 nt, Artificial Sequence
  Description of Artificial Sequence: Synthetic oligonucleotide
  Sense strand starting at position 2560 of SEQ ID NO: 1242416
aacugagacugucuugaca

SEQ ID NO: 1345893 - RNA, 19 nt, Artificial Sequence
  Description of Artificial Sequence: Synthetic oligonucleotide
  Antisense strand to SEQ ID NO: 1345892
ugucaagacagucucaguu

SEQ ID NO: 1345894 - RNA, 19 nt, Artificial Sequence
  Description of Artificial Sequence: Synthetic oligonucleotide
  Sense strand starting at position 2563 of SEQ ID NO: 1242416
ugagacugucuugacaguu

SEQ ID NO: 1345895 - RNA, 19 nt, Artificial Sequence
  Description of Artificial Sequence: Synthetic oligonucleotide
  Antisense strand to SEQ ID NO: 1345894
aacugucaagacagucuca

SEQ ID NO: 1345896 - RNA, 19 nt, Artificial Sequence
  Description of Artificial Sequence: Synthetic oligonucleotide
  Sense strand starting at position 2576 of SEQ ID NO: 1242416
acaguucgagacugucaga

SEQ ID NO: 1345897 - RNA, 19 nt, Artificial Sequence
  Description of Artificial Sequence: Synthetic oligonucleotide
  Antisense strand to SEQ ID NO: 1345896
ucugacagucucgaacugu

SEQ ID NO: 1345898 - RNA, 19 nt, Artificial Sequence
  Description of Artificial Sequence: Synthetic oligonucleotide
  Sense strand starting at position 2652 of SEQ ID NO: 1242416
agguuaauucuaggguaau

SEQ ID NO: 1345899 - RNA, 19 nt, Artificial Sequence
  Description of Artificial Sequence: Synthetic oligonucleotide
  Antisense strand to SEQ ID NO: 1345898
auuacccuagaauuaaccu

SEQ ID NO: 1345900 - RNA, 19 nt, Artificial Sequence
  Description of Artificial Sequence: Synthetic oligonucleotide
  Sense strand starting at position 2675 of SEQ ID NO: 1242416
gcaguuuagcuuuaugggu

SEQ ID NO: 1345901 - RNA, 19 nt, Artificial Sequence
  Description of Artificial Sequence: Synthetic oligonucleotide
  Antisense strand to SEQ ID NO: 1345900
acccauaaagcuaaacugc

SEQ ID NO: 1345902 - RNA, 19 nt, Artificial Sequence
  Description of Artificial Sequence: Synthetic oligonucleotide
  Sense strand starting at position 2705 of SEQ ID NO: 1242416
cccuuauaucuggaggcau

SEQ ID NO: 1345903 - RNA, 19 nt, Artificial Sequence
  Description of Artificial Sequence: Synthetic oligonucleotide
  Antisense strand to SEQ ID NO: 1345902
augccuccagauauaaggg

SEQ ID NO: 1345904 - RNA, 19 nt, Artificial Sequence
  Description of Artificial Sequence: Synthetic oligonucleotide
  Sense strand starting at position 2742 of SEQ ID NO: 1242416
gaacacaguugguuaacau

SEQ ID NO: 1345905 - RNA, 19 nt, Artificial Sequence
  Description of Artificial Sequence: Synthetic oligonucleotide
  Antisense strand to SEQ ID NO: 1345904
auguuaaccaacuguguuc

SEQ ID NO: 1345906 - RNA, 19 nt, Artificial Sequence
  Description of Artificial Sequence: Synthetic oligonucleotide
  Sense strand starting at position 2809 of SEQ ID NO: 1242416
cagagagucuugcucugac

SEQ ID NO: 1345907 - RNA, 19 nt, Artificial Sequence
  Description of Artificial Sequence: Synthetic oligonucleotide
  Antisense strand to SEQ ID NO: 1345906
gucagagcaagacucucug

SEQ ID NO: 1345908 - RNA, 19 nt, Artificial Sequence
  Description of Artificial Sequence: Synthetic oligonucleotide
  Sense strand starting at position 3004 of SEQ ID NO: 1242416
ugaacucauuggcucaagu

SEQ ID NO: 1345909 - RNA, 19 nt, Artificial Sequence
  Description of Artificial Sequence: Synthetic oligonucleotide
  Antisense strand to SEQ ID NO: 1345908
acuugagccaaugaguuca

SEQ ID NO: 1345910 - RNA, 19 nt, Artificial Sequence
  Description of Artificial Sequence: Synthetic oligonucleotide
  Sense strand starting at position 3123 of SEQ ID NO: 1242416
auuguuauagcugguuaaa

SEQ ID NO: 1345911 - RNA, 19 nt, Artificial Sequence
  Description of Artificial Sequence: Synthetic oligonucleotide
  Antisense strand to SEQ ID NO: 1345910
uuuaaccagcuauaacaau

SEQ ID NO: 1345912 - RNA, 19 nt, Artificial Sequence
  Description of Artificial Sequence: Synthetic oligonucleotide
  Sense strand starting at position 3208 of SEQ ID NO: 1242416
cccucuugugguuaaaguu

SEQ ID NO: 1345913 - RNA, 19 nt, Artificial Sequence
  Description of Artificial Sequence: Synthetic oligonucleotide
  Antisense strand to SEQ ID NO: 1345912
aacuuuaaccacaagaggg

SEQ ID NO: 1345914 - RNA, 19 nt, Artificial Sequence
  Description of Artificial Sequence: Synthetic oligonucleotide
  Sense strand starting at position 3373 of SEQ ID NO: 1242416
acugaacuccauggacuua

SEQ ID NO: 1345915 - RNA, 19 nt, Artificial Sequence
  Description of Artificial Sequence: Synthetic oligonucleotide
  Antisense strand to SEQ ID NO: 1345914
uaaguccauggaguucagu

SEQ ID NO: 1345916 - RNA, 19 nt, Artificial Sequence
  Description of Artificial Sequence: Synthetic oligonucleotide
  Sense strand starting at position 3783 of SEQ ID NO: 1242416
ucaucugauuuggcuugua

SEQ ID NO: 1345917 - RNA, 19 nt, Artificial Sequence
  Description of Artificial Sequence: Synthetic oligonucleotide
  Antisense strand to SEQ ID NO: 1345916
uacaagccaaaucagauga

SEQ ID NO: 1345918 - RNA, 19 nt, Artificial Sequence
  Description of Artificial Sequence: Synthetic oligonucleotide
  Sense strand starting at position 3836 of SEQ ID NO: 1242416
gagcuugugcugcaacaaa

SEQ ID NO: 1345919 - RNA, 19 nt, Artificial Sequence
  Description of Artificial Sequence: Synthetic oligonucleotide
  Antisense strand to SEQ ID NO: 1345918
uuuguugcagcacaagcuc

SEQ ID NO: 1345920 - RNA, 19 nt, Artificial Sequence
  Description of Artificial Sequence: Synthetic oligonucleotide
  Sense strand starting at position 3847 of SEQ ID NO: 1242416
gcaacaaauuaggcagaaa

SEQ ID NO: 1345921 - RNA, 19 nt, Artificial Sequence
  Description of Artificial Sequence: Synthetic oligonucleotide
  Antisense strand to SEQ ID NO: 1345920
uuucugccuaauuuguugc

SEQ ID NO: 1345922 - RNA, 19 nt, Artificial Sequence
  Description of Artificial Sequence: Synthetic oligonucleotide
  Sense strand starting at position 59 of SEQ ID NO: 1242417
gcaugacuugccgcuguuu

SEQ ID NO: 1345923 - RNA, 19 nt, Artificial Sequence
  Description of Artificial Sequence: Synthetic oligonucleotide
  Antisense strand to SEQ ID NO: 1345922
aaacagcggcaagucaugc

SEQ ID NO: 1345924 - RNA, 19 nt, Artificial Sequence
  Description of Artificial Sequence: Synthetic oligonucleotide
  Sense strand starting at position 60 of SEQ ID NO: 1242417
caugacuugccgcuguuua

SEQ ID NO: 1345925 - RNA, 19 nt, Artificial Sequence
  Description of Artificial Sequence: Synthetic oligonucleotide
  Antisense strand to SEQ ID NO: 1345924
uaaacagcggcaagucaug

SEQ ID NO: 1345926 - RNA, 19 nt, Artificial Sequence
  Description of Artificial Sequence: Synthetic oligonucleotide
  Sense strand starting at position 70 of SEQ ID NO: 1242417
cgcuguuuaagauacuaga

SEQ ID NO: 1345927 - RNA, 19 nt, Artificial Sequence
  Description of Artificial Sequence: Synthetic oligonucleotide
  Antisense strand to SEQ ID NO: 1345926
ucuaguaucuuaaacagcg

SEQ ID NO: 1345928 - RNA, 19 nt, Artificial Sequence
  Description of Artificial Sequence: Synthetic oligonucleotide
  Sense strand starting at position 121 of SEQ ID NO: 1242417
ugccaugaagcuuagaauc

SEQ ID NO: 1345929 - RNA, 19 nt, Artificial Sequence
  Description of Artificial Sequence: Synthetic oligonucleotide
  Antisense strand to SEQ ID NO: 1345928
gauucuaagcuucauggca

SEQ ID NO: 1345930 - RNA, 19 nt, Artificial Sequence
  Description of Artificial Sequence: Synthetic oligonucleotide
  Sense strand starting at position 171 of SEQ ID NO: 1242417
ggcugauauaggcagcuaa

SEQ ID NO: 1345931 - RNA, 19 nt, Artificial Sequence
  Description of Artificial Sequence: Synthetic oligonucleotide
  Antisense strand to SEQ ID NO: 1345930
uuagcugccuauaucagcc

SEQ ID NO: 1345932 - RNA, 19 nt, Artificial Sequence
  Description of Artificial Sequence: Synthetic oligonucleotide
  Sense strand starting at position 231 of SEQ ID NO: 1242417
gucguuugggcuaguuaag

SEQ ID NO: 1345933 - RNA, 19 nt, Artificial Sequence
  Description of Artificial Sequence: Synthetic oligonucleotide
  Antisense strand to SEQ ID NO: 1345932
cuuaacuagcccaaacgac

SEQ ID NO: 1345934 - RNA, 19 nt, Artificial Sequence
  Description of Artificial Sequence: Synthetic oligonucleotide
  Sense strand starting at position 324 of SEQ ID NO: 1242417
acgacaguucuccacucuu

SEQ ID NO: 1345935 - RNA, 19 nt, Artificial Sequence
  Description of Artificial Sequence: Synthetic oligonucleotide
  Antisense strand to SEQ ID NO: 1345934
aagaguggagaacugucgu

SEQ ID NO: 1345936 - RNA, 19 nt, Artificial Sequence
  Description of Artificial Sequence: Synthetic oligonucleotide
  Sense strand starting at position 385 of SEQ ID NO: 1242417
ucaacauaucacgacaguu

SEQ ID NO: 1345937 - RNA, 19 nt, Artificial Sequence
  Description of Artificial Sequence: Synthetic oligonucleotide
  Antisense strand to SEQ ID NO: 1345936
aacugucgugauauguuga

SEQ ID NO: 1345938 - RNA, 19 nt, Artificial Sequence
  Description of Artificial Sequence: Synthetic oligonucleotide
  Sense strand starting at position 434 of SEQ ID NO: 1242417
auugaagaucaaugguuua

SEQ ID NO: 1345939 - RNA, 19 nt, Artificial Sequence
  Description of Artificial Sequence: Synthetic oligonucleotide
  Antisense strand to SEQ ID NO: 1345938
uaaaccauugaucuucaau

SEQ ID NO: 1345940 - RNA, 19 nt, Artificial Sequence
  Description of Artificial Sequence: Synthetic oligonucleotide
  Sense strand starting at position 458 of SEQ ID NO: 1242417
aguaauaaaucugugaaca

SEQ ID NO: 1345941 - RNA, 19 nt, Artificial Sequence
  Description of Artificial Sequence: Synthetic oligonucleotide
  Antisense strand to SEQ ID NO: 1345940
uguucacagauuuauuacu

SEQ ID NO: 1345942 - RNA, 19 nt, Artificial Sequence
  Description of Artificial Sequence: Synthetic oligonucleotide
  Sense strand starting at position 459 of SEQ ID NO: 1242417
guaauaaaucugugaacac

SEQ ID NO: 1345943 - RNA, 19 nt, Artificial Sequence
  Description of Artificial Sequence: Synthetic oligonucleotide
  Antisense strand to SEQ ID NO: 1345942
guguucacagauuuauuac

SEQ ID NO: 1345944 - RNA, 19 nt, Artificial Sequence
  Description of Artificial Sequence: Synthetic oligonucleotide
  Sense strand starting at position 513 of SEQ ID NO: 1242417
uguguuaggcacuauaaga

SEQ ID NO: 1345945 - RNA, 19 nt, Artificial Sequence
  Description of Artificial Sequence: Synthetic oligonucleotide
  Antisense strand to SEQ ID NO: 1345944
ucuuauagugccuaacaca

SEQ ID NO: 1345946 - RNA, 19 nt, Artificial Sequence
  Description of Artificial Sequence: Synthetic oligonucleotide
  Sense strand starting at position 630 of SEQ ID NO: 1242417
acguauucucaacacugca

SEQ ID NO: 1345947 - RNA, 19 nt, Artificial Sequence
  Description of Artificial Sequence: Synthetic oligonucleotide
  Antisense strand to SEQ ID NO: 1345946
ugcaguguugagaauacgu

SEQ ID NO: 1345948 - RNA, 19 nt, Artificial Sequence
  Description of Artificial Sequence: Synthetic oligonucleotide
  Sense strand starting at position 646 of SEQ ID NO: 1242417
gcacaugcuccauaaagag

SEQ ID NO: 1345949 - RNA, 19 nt, Artificial Sequence
  Description of Artificial Sequence: Synthetic oligonucleotide
  Antisense strand to SEQ ID NO: 1345948
cucuuuauggagcaugugc

SEQ ID NO: 1345950 - RNA, 19 nt, Artificial Sequence
  Description of Artificial Sequence: Synthetic oligonucleotide
  Sense strand starting at position 878 of SEQ ID NO: 1242417
gcuugagacacaggaauca

SEQ ID NO: 1345951 - RNA, 19 nt, Artificial Sequence
  Description of Artificial Sequence: Synthetic oligonucleotide
  Antisense strand to SEQ ID NO: 1345950
ugauuccugugucucaagc

SEQ ID NO: 1345952 - RNA, 19 nt, Artificial Sequence
  Description of Artificial Sequence: Synthetic oligonucleotide
  Sense strand starting at position 1011 of SEQ ID NO: 1242417
ucccaaaggucggcaagaa

SEQ ID NO: 1345953 - RNA, 19 nt, Artificial Sequence
  Description of Artificial Sequence: Synthetic oligonucleotide
  Antisense strand to SEQ ID NO: 1345952
uucuugccgaccuuuggga

SEQ ID NO: 1345954 - RNA, 19 nt, Artificial Sequence
  Description of Artificial Sequence: Synthetic oligonucleotide
  Sense strand starting at position 1012 of SEQ ID NO: 1242417
cccaaaggucggcaagaaa

SEQ ID NO: 1345955 - RNA, 19 nt, Artificial Sequence
  Description of Artificial Sequence: Synthetic oligonucleotide
  Antisense strand to SEQ ID NO: 1345954
uuucuugccgaccuuuggg

SEQ ID NO: 1345956 - RNA, 19 nt, Artificial Sequence
  Description of Artificial Sequence: Synthetic oligonucleotide
  Sense strand starting at position 1105 of SEQ ID NO: 1242417
auggucuuauccucagaga

SEQ ID NO: 1345957 - RNA, 19 nt, Artificial Sequence
  Description of Artificial Sequence: Synthetic oligonucleotide
  Antisense strand to SEQ ID NO: 1345956
ucucugaggauaagaccau

SEQ ID NO: 1345958 - RNA, 19 nt, Artificial Sequence
  Description of Artificial Sequence: Synthetic oligonucleotide
  Sense strand starting at position 1118 of SEQ ID NO: 1242417
cagagaaguugcucuauca

SEQ ID NO: 1345959 - RNA, 19 nt, Artificial Sequence
  Description of Artificial Sequence: Synthetic oligonucleotide
  Antisense strand to SEQ ID NO: 1345958
ugauagagcaacuucucug

SEQ ID NO: 1345960 - RNA, 19 nt, Artificial Sequence
  Description of Artificial Sequence: Synthetic oligonucleotide
  Sense strand starting at position 1202 of SEQ ID NO: 1242417
ucuugcuaagguugaaaua

SEQ ID NO: 1345961 - RNA, 19 nt, Artificial Sequence
  Description of Artificial Sequence: Synthetic oligonucleotide
  Antisense strand to SEQ ID NO: 1345960
uauuucaaccuuagcaaga

SEQ ID NO: 1345962 - RNA, 19 nt, Artificial Sequence
  Description of Artificial Sequence: Synthetic oligonucleotide
  Sense strand starting at position 1233 of SEQ ID NO: 1242417
gaauaauugcgagcgcuuc

SEQ ID NO: 1345963 - RNA, 19 nt, Artificial Sequence
  Description of Artificial Sequence: Synthetic oligonucleotide
  Antisense strand to SEQ ID NO: 1345962
gaagcgcucgcaauuauuc

SEQ ID NO: 1345964 - RNA, 19 nt, Artificial Sequence
  Description of Artificial Sequence: Synthetic oligonucleotide
  Sense strand starting at position 2492 of SEQ ID NO: 1242417
gcuugugaccuuuagacuu

SEQ ID NO: 1345965 - RNA, 19 nt, Artificial Sequence
  Description of Artificial Sequence: Synthetic oligonucleotide
  Antisense strand to SEQ ID NO: 1345964
aagucuaaaggucacaagc

SEQ ID NO: 1345966 - RNA, 19 nt, Artificial Sequence
  Description of Artificial Sequence: Synthetic oligonucleotide
  Sense strand starting at position 2570 of SEQ ID NO: 1242417
agugauuaaugaccagagu

SEQ ID NO: 1345967 - RNA, 19 nt, Artificial Sequence
  Description of Artificial Sequence: Synthetic oligonucleotide
  Antisense strand to SEQ ID NO: 1345966
acucuggucauuaaucacu

SEQ ID NO: 1345968 - RNA, 19 nt, Artificial Sequence
  Description of Artificial Sequence: Synthetic oligonucleotide
  Sense strand starting at position 2759 of SEQ ID NO: 1242417
auauuaugucuggagucca

SEQ ID NO: 1345969 - RNA, 19 nt, Artificial Sequence
  Description of Artificial Sequence: Synthetic oligonucleotide
  Antisense strand to SEQ ID NO: 1345968
uggacuccagacauaauau

SEQ ID NO: 1345970 - RNA, 19 nt, Artificial Sequence
  Description of Artificial Sequence: Synthetic oligonucleotide
  Sense strand starting at position 2779 of SEQ ID NO: 1242417
ccagguugcauacagagau

SEQ ID NO: 1345971 - RNA, 19 nt, Artificial Sequence
  Description of Artificial Sequence: Synthetic oligonucleotide
  Antisense strand to SEQ ID NO: 1345970
aucucuguaugcaaccugg

SEQ ID NO: 1345972 - RNA, 19 nt, Artificial Sequence
  Description of Artificial Sequence: Synthetic oligonucleotide
  Sense strand starting at position 2783 of SEQ ID NO: 1242417
guugcauacagagaugguu

SEQ ID NO: 1345973 - RNA, 19 nt, Artificial Sequence
  Description of Artificial Sequence: Synthetic oligonucleotide
  Antisense strand to SEQ ID NO: 1345972
aaccaucucuguaugcaac

SEQ ID NO: 1345974 - RNA, 19 nt, Artificial Sequence
  Description of Artificial Sequence: Synthetic oligonucleotide
  Sense strand starting at position 2810 of SEQ ID NO: 1242417
uuugcugcugaagagaauu

SEQ ID NO: 1345975 - RNA, 19 nt, Artificial Sequence
  Description of Artificial Sequence: Synthetic oligonucleotide
  Antisense strand to SEQ ID NO: 1345974
aauucucuucagcagcaaa

SEQ ID NO: 1345976 - RNA, 19 nt, Artificial Sequence
  Description of Artificial Sequence: Synthetic oligonucleotide
  Sense strand starting at position 2940 of SEQ ID NO: 1242417
uucugaugcacguuugcau

SEQ ID NO: 1345977 - RNA, 19 nt, Artificial Sequence
  Description of Artificial Sequence: Synthetic oligonucleotide
  Antisense strand to SEQ ID NO: 1345976
augcaaacgugcaucagaa

SEQ ID NO: 1345978 - RNA, 19 nt, Artificial Sequence
  Description of Artificial Sequence: Synthetic oligonucleotide
  Sense strand starting at position 2973 of SEQ ID NO: 1242417
gugggacugcugggacaua

SEQ ID NO: 1345979 - RNA, 19 nt, Artificial Sequence
  Description of Artificial Sequence: Synthetic oligonucleotide
  Antisense strand to SEQ ID NO: 1345978
uaugucccagcagucccac

SEQ ID NO: 1345980 - RNA, 19 nt, Artificial Sequence
  Description of Artificial Sequence: Synthetic oligonucleotide
  Sense strand starting at position 3009 of SEQ ID NO: 1242417
auaaguaaugcccaacagu

SEQ ID NO: 1345981 - RNA, 19 nt, Artificial Sequence
  Description of Artificial Sequence: Synthetic oligonucleotide
  Antisense strand to SEQ ID NO: 1345980
acuguugggcauuacuuau

SEQ ID NO: 1345982 - RNA, 19 nt, Artificial Sequence
  Description of Artificial Sequence: Synthetic oligonucleotide
  Sense strand starting at position 3012 of SEQ ID NO: 1242417
aguaaugcccaacaguuau

SEQ ID NO: 1345983 - RNA, 19 nt, Artificial Sequence
  Description of Artificial Sequence: Synthetic oligonucleotide
  Antisense strand to SEQ ID NO: 1345982
auaacuguugggcauuacu

SEQ ID NO: 1345984 - RNA, 19 nt, Artificial Sequence
  Description of Artificial Sequence: Synthetic oligonucleotide
  Sense strand starting at position 3029 of SEQ ID NO: 1242417
augcuaagaggcugaaaua

SEQ ID NO: 1345985 - RNA, 19 nt, Artificial Sequence
  Description of Artificial Sequence: Synthetic oligonucleotide
  Antisense strand to SEQ ID NO: 1345984
uauuucagccucuuagcau

SEQ ID NO: 1345986 - RNA, 19 nt, Artificial Sequence
  Description of Artificial Sequence: Synthetic oligonucleotide
  Sense strand starting at position 3379 of SEQ ID NO: 1242417
cuuaaugguguugaugauu

SEQ ID NO: 1345987 - RNA, 19 nt, Artificial Sequence
  Description of Artificial Sequence: Synthetic oligonucleotide
  Antisense strand to SEQ ID NO: 1345986
aaucaucaacaccauuaag

SEQ ID NO: 1345988 - RNA, 19 nt, Artificial Sequence
  Description of Artificial Sequence: Synthetic oligonucleotide
  Sense strand starting at position 3384 of SEQ ID NO: 1242417
ugguguugaugauuagauu

SEQ ID NO: 1345989 - RNA, 19 nt, Artificial Sequence
  Description of Artificial Sequence: Synthetic oligonucleotide
  Antisense strand to SEQ ID NO: 1345988
aaucuaaucaucaacacca

SEQ ID NO: 1345990 - RNA, 19 nt, Artificial Sequence
  Description of Artificial Sequence: Synthetic oligonucleotide
  Sense strand starting at position 3535 of SEQ ID NO: 1242417
ccaaauagccgggacuaua

SEQ ID NO: 1345991 - RNA, 19 nt, Artificial Sequence
  Description of Artificial Sequence: Synthetic oligonucleotide
  Antisense strand to SEQ ID NO: 1345990
uauagucccggcuauuugg

SEQ ID NO: 1345992 - RNA, 19 nt, Artificial Sequence
  Description of Artificial Sequence: Synthetic oligonucleotide
  Sense strand starting at position 3827 of SEQ ID NO: 1242417
uguggucuacuagacgauu

SEQ ID NO: 1345993 - RNA, 19 nt, Artificial Sequence
  Description of Artificial Sequence: Synthetic oligonucleotide
  Antisense strand to SEQ ID NO: 1345992
aaucgucuaguagaccaca

SEQ ID NO: 1345994 - RNA, 19 nt, Artificial Sequence
  Description of Artificial Sequence: Synthetic oligonucleotide
  Sense strand starting at position 3830 of SEQ ID NO: 1242417
ggucuacuagacgauuguu

SEQ ID NO: 1345995 - RNA, 19 nt, Artificial Sequence
  Description of Artificial Sequence: Synthetic oligonucleotide
  Antisense strand to SEQ ID NO: 1345994
aacaaucgucuaguagacc

SEQ ID NO: 1345996 - RNA, 19 nt, Artificial Sequence
  Description of Artificial Sequence: Synthetic oligonucleotide
  Sense strand starting at position 3880 of SEQ ID NO: 1242417
cggagaugauucuccuuga

SEQ ID NO: 1345997 - RNA, 19 nt, Artificial Sequence
  Description of Artificial Sequence: Synthetic oligonucleotide
  Antisense strand to SEQ ID NO: 1345996
ucaaggagaaucaucuccg

SEQ ID NO: 1345998 - RNA, 19 nt, Artificial Sequence
  Description of Artificial Sequence: Synthetic oligonucleotide
  Sense strand starting at position 3883 of SEQ ID NO: 1242417
agaugauucuccuugaacu

SEQ ID NO: 1345999 - RNA, 19 nt, Artificial Sequence
  Description of Artificial Sequence: Synthetic oligonucleotide
  Antisense strand to SEQ ID NO: 1345998
aguucaaggagaaucaucu

SEQ ID NO: 1346000 - RNA, 19 nt, Artificial Sequence
  Description of Artificial Sequence: Synthetic oligonucleotide
  Sense strand starting at position 3965 of SEQ ID NO: 1242417
cucguaagaacaggacauu

SEQ ID NO: 1346001 - RNA, 19 nt, Artificial Sequence
  Description of Artificial Sequence: Synthetic oligonucleotide
  Antisense strand to SEQ ID NO: 1346000
aauguccuguucuuacgag

SEQ ID NO: 1346002 - RNA, 19 nt, Artificial Sequence
  Description of Artificial Sequence: Synthetic oligonucleotide
  Sense strand starting at position 104 of SEQ ID NO: 1242418
uaguuuacugcagagcuga

SEQ ID NO: 1346003 - RNA, 19 nt, Artificial Sequence
  Description of Artificial Sequence: Synthetic oligonucleotide
  Antisense strand to SEQ ID NO: 1346002
ucagcucugcaguaaacua

SEQ ID NO: 1346004 - RNA, 19 nt, Artificial Sequence
  Description of Artificial Sequence: Synthetic oligonucleotide
  Sense strand starting at position 319 of SEQ ID NO: 1242418
ugcuguaucagccagguga

SEQ ID NO: 1346005 - RNA, 19 nt, Artificial Sequence
  Description of Artificial Sequence: Synthetic oligonucleotide
  Antisense strand to SEQ ID NO: 1346004
ucaccuggcugauacagca

SEQ ID NO: 1346006 - RNA, 19 nt, Artificial Sequence
  Description of Artificial Sequence: Synthetic oligonucleotide
  Sense strand starting at position 720 of SEQ ID NO: 1242418
ccagguuauuucgacauag

SEQ ID NO: 1346007 - RNA, 19 nt, Artificial Sequence
  Description of Artificial Sequence: Synthetic oligonucleotide
  Antisense strand to SEQ ID NO: 1346006
cuaugucgaaauaaccugg

SEQ ID NO: 1346008 - RNA, 19 nt, Artificial Sequence
  Description of Artificial Sequence: Synthetic oligonucleotide
  Sense strand starting at position 829 of SEQ ID NO: 1242418
augcaaguucugcacauca

SEQ ID NO: 1346009 - RNA, 19 nt, Artificial Sequence
  Description of Artificial Sequence: Synthetic oligonucleotide
  Antisense strand to SEQ ID NO: 1346008
ugaugugcagaacuugcau

SEQ ID NO: 1346010 - RNA, 19 nt, Artificial Sequence
  Description of Artificial Sequence: Synthetic oligonucleotide
  Sense strand starting at position 831 of SEQ ID NO: 1242418
gcaaguucugcacaucauu

SEQ ID NO: 1346011 - RNA, 19 nt, Artificial Sequence
  Description of Artificial Sequence: Synthetic oligonucleotide
  Antisense strand to SEQ ID NO: 1346010
aaugaugugcagaacuugc

SEQ ID NO: 1346012 - RNA, 19 nt, Artificial Sequence
  Description of Artificial Sequence: Synthetic oligonucleotide
  Sense strand starting at position 1413 of SEQ ID NO: 1242418
cgcaguggucacuauuaua

SEQ ID NO: 1346013 - RNA, 19 nt, Artificial Sequence
  Description of Artificial Sequence: Synthetic oligonucleotide
  Antisense strand to SEQ ID NO: 1346012
uauaauagugaccacugcg

SEQ ID NO: 1346014 - RNA, 19 nt, Artificial Sequence
  Description of Artificial Sequence: Synthetic oligonucleotide
  Sense strand starting at position 1567 of SEQ ID NO: 1242418
cugcaaucacccugaugua

SEQ ID NO: 1346015 - RNA, 19 nt, Artificial Sequence
  Description of Artificial Sequence: Synthetic oligonucleotide
  Antisense strand to SEQ ID NO: 1346014
uacaucagggugauugcag

SEQ ID NO: 1346016 - RNA, 19 nt, Artificial Sequence
  Description of Artificial Sequence: Synthetic oligonucleotide
  Sense strand starting at position 1761 of SEQ ID NO: 1242418
acagcaagccucugaacau

SEQ ID NO: 1346017 - RNA, 19 nt, Artificial Sequence
  Description of Artificial Sequence: Synthetic oligonucleotide
  Antisense strand to SEQ ID NO: 1346016
auguucagaggcuugcugu

SEQ ID NO: 1346018 - RNA, 19 nt, Artificial Sequence
  Description of Artificial Sequence: Synthetic oligonucleotide
  Sense strand starting at position 1782 of SEQ ID NO: 1242418
cggaucugguucuccagaa

SEQ ID NO: 1346019 - RNA, 19 nt, Artificial Sequence
  Description of Artificial Sequence: Synthetic oligonucleotide
  Antisense strand to SEQ ID NO: 1346018
uucuggagaaccagauccg

SEQ ID NO: 1346020 - RNA, 19 nt, Artificial Sequence
  Description of Artificial Sequence: Synthetic oligonucleotide
  Sense strand starting at position 1783 of SEQ ID NO: 1242418
ggaucugguucuccagaac

SEQ ID NO: 1346021 - RNA, 19 nt, Artificial Sequence
  Description of Artificial Sequence: Synthetic oligonucleotide
  Antisense strand to SEQ ID NO: 1346020
guucuggagaaccagaucc

SEQ ID NO: 1346022 - RNA, 19 nt, Artificial Sequence
  Description of Artificial Sequence: Synthetic oligonucleotide
  Sense strand starting at position 2395 of SEQ ID NO: 1242418
gcgccauaaccacaaucaa

SEQ ID NO: 1346023 - RNA, 19 nt, Artificial Sequence
  Description of Artificial Sequence: Synthetic oligonucleotide
  Antisense strand to SEQ ID NO: 1346022
uugauugugguuauggcgc

SEQ ID NO: 1346024 - RNA, 19 nt, Artificial Sequence
  Description of Artificial Sequence: Synthetic oligonucleotide
  Sense strand starting at position 2415 of SEQ ID NO: 1242418
gcaaauacgccagacuuga

SEQ ID NO: 1346025 - RNA, 19 nt, Artificial Sequence
  Description of Artificial Sequence: Synthetic oligonucleotide
  Antisense strand to SEQ ID NO: 1346024
ucaagucuggcguauuugc

SEQ ID NO: 1346026 - RNA, 19 nt, Artificial Sequence
  Description of Artificial Sequence: Synthetic oligonucleotide
  Sense strand starting at position 2736 of SEQ ID NO: 1242418
aaucaaugauagcuggagu

SEQ ID NO: 1346027 - RNA, 19 nt, Artificial Sequence
  Description of Artificial Sequence: Synthetic oligonucleotide
  Antisense strand to SEQ ID NO: 1346026
acuccagcuaucauugauu

SEQ ID NO: 1346028 - RNA, 19 nt, Artificial Sequence
  Description of Artificial Sequence: Synthetic oligonucleotide
  Sense strand starting at position 2826 of SEQ ID NO: 1242418
gcagaaauaacggaagcau

SEQ ID NO: 1346029 - RNA, 19 nt, Artificial Sequence
  Description of Artificial Sequence: Synthetic oligonucleotide
  Antisense strand to SEQ ID NO: 1346028
augcuuccguuauuucugc

SEQ ID NO: 1346030 - RNA, 19 nt, Artificial Sequence
  Description of Artificial Sequence: Synthetic oligonucleotide
  Sense strand starting at position 2956 of SEQ ID NO: 1242418
ucaauugcccauuaucgaa

SEQ ID NO: 1346031 - RNA, 19 nt, Artificial Sequence
  Description of Artificial Sequence: Synthetic oligonucleotide
  Antisense strand to SEQ ID NO: 1346030
uucgauaaugggcaauuga

SEQ ID NO: 1346032 - RNA, 19 nt, Artificial Sequence
  Description of Artificial Sequence: Synthetic oligonucleotide
  Sense strand starting at position 2983 of SEQ ID NO: 1242418
ggugaugugaguggagguu

SEQ ID NO: 1346033 - RNA, 19 nt, Artificial Sequence
  Description of Artificial Sequence: Synthetic oligonucleotide
  Antisense strand to SEQ ID NO: 1346032
aaccuccacucacaucacc

SEQ ID NO: 1346034 - RNA, 19 nt, Artificial Sequence
  Description of Artificial Sequence: Synthetic oligonucleotide
  Sense strand starting at position 2989 of SEQ ID NO: 1242418
gugaguggagguugacuaa

SEQ ID NO: 1346035 - RNA, 19 nt, Artificial Sequence
  Description of Artificial Sequence: Synthetic oligonucleotide
  Antisense strand to SEQ ID NO: 1346034
uuagucaaccuccacucac

SEQ ID NO: 1346036 - RNA, 19 nt, Artificial Sequence
  Description of Artificial Sequence: Synthetic oligonucleotide
  Sense strand starting at position 2998 of SEQ ID NO: 1242418
gguugacuaaaugguuaaa

SEQ ID NO: 1346037 - RNA, 19 nt, Artificial Sequence
  Description of Artificial Sequence: Synthetic oligonucleotide
  Antisense strand to SEQ ID NO: 1346036
uuuaaccauuuagucaacc

SEQ ID NO: 1346038 - RNA, 19 nt, Artificial Sequence
  Description of Artificial Sequence: Synthetic oligonucleotide
  Sense strand starting at position 3000 of SEQ ID NO: 1242418
uugacuaaaugguuaaauc

SEQ ID NO: 1346039 - RNA, 19 nt, Artificial Sequence
  Description of Artificial Sequence: Synthetic oligonucleotide
  Antisense strand to SEQ ID NO: 1346038
gauuuaaccauuuagucaa

SEQ ID NO: 1346040 - RNA, 19 nt, Artificial Sequence
  Description of Artificial Sequence: Synthetic oligonucleotide
  Sense strand starting at position 3082 of SEQ ID NO: 1242418
gaggcuuaucaaugcugac

SEQ ID NO: 1346041 - RNA, 19 nt, Artificial Sequence
  Description of Artificial Sequence: Synthetic oligonucleotide
  Antisense strand to SEQ ID NO: 1346040
gucagcauugauaagccuc

SEQ ID NO: 1346042 - RNA, 19 nt, Artificial Sequence
  Description of Artificial Sequence: Synthetic oligonucleotide
  Sense strand starting at position 3118 of SEQ ID NO: 1242418
cucagaaacuguguaaugu

SEQ ID NO: 1346043 - RNA, 19 nt, Artificial Sequence
  Description of Artificial Sequence: Synthetic oligonucleotide
  Antisense strand to SEQ ID NO: 1346042
acauuacacaguuucugag

SEQ ID NO: 1346044 - RNA, 19 nt, Artificial Sequence
  Description of Artificial Sequence: Synthetic oligonucleotide
  Sense strand starting at position 3119 of SEQ ID NO: 1242418
ucagaaacuguguaauguu

SEQ ID NO: 1346045 - RNA, 19 nt, Artificial Sequence
  Description of Artificial Sequence: Synthetic oligonucleotide
  Antisense strand to SEQ ID NO: 1346044
aacauuacacaguuucuga

SEQ ID NO: 1346046 - RNA, 19 nt, Artificial Sequence
  Description of Artificial Sequence: Synthetic oligonucleotide
  Sense strand starting at position 3128 of SEQ ID NO: 1242418
guguaauguuccucacaga

SEQ ID NO: 1346047 - RNA, 19 nt, Artificial Sequence
  Description of Artificial Sequence: Synthetic oligonucleotide
  Antisense strand to SEQ ID NO: 1346046
ucugugaggaacauuacac

SEQ ID NO: 1346048 - RNA, 19 nt, Artificial Sequence
  Description of Artificial Sequence: Synthetic oligonucleotide
  Sense strand starting at position 3129 of SEQ ID NO: 1242418
uguaauguuccucacagag

SEQ ID NO: 1346049 - RNA, 19 nt, Artificial Sequence
  Description of Artificial Sequence: Synthetic oligonucleotide
  Antisense strand to SEQ ID NO: 1346048
cucugugaggaacauuaca

SEQ ID NO: 1346050 - RNA, 19 nt, Artificial Sequence
  Description of Artificial Sequence: Synthetic oligonucleotide
  Sense strand starting at position 3190 of SEQ ID NO: 1242418
augcaauauggcugaugga

SEQ ID NO: 1346051 - RNA, 19 nt, Artificial Sequence
  Description of Artificial Sequence: Synthetic oligonucleotide
  Antisense strand to SEQ ID NO: 1346050
uccaucagccauauugcau

SEQ ID NO: 1346052 - RNA, 19 nt, Artificial Sequence
  Description of Artificial Sequence: Synthetic oligonucleotide
  Sense strand starting at position 3191 of SEQ ID NO: 1242418
ugcaauauggcugauggaa

SEQ ID NO: 1346053 - RNA, 19 nt, Artificial Sequence
  Description of Artificial Sequence: Synthetic oligonucleotide
  Antisense strand to SEQ ID NO: 1346052
uuccaucagccauauugca

SEQ ID NO: 1346054 - RNA, 19 nt, Artificial Sequence
  Description of Artificial Sequence: Synthetic oligonucleotide
  Sense strand starting at position 3216 of SEQ ID NO: 1242418
auguauuaggcugaaucau

SEQ ID NO: 1346055 - RNA, 19 nt, Artificial Sequence
  Description of Artificial Sequence: Synthetic oligonucleotide
  Antisense strand to SEQ ID NO: 1346054
augauucagccuaauacau

SEQ ID NO: 1346056 - RNA, 19 nt, Artificial Sequence
  Description of Artificial Sequence: Synthetic oligonucleotide
  Sense strand starting at position 3321 of SEQ ID NO: 1242418
augggaaguugacucugau

SEQ ID NO: 1346057 - RNA, 19 nt, Artificial Sequence
  Description of Artificial Sequence: Synthetic oligonucleotide
  Antisense strand to SEQ ID NO: 1346056
aucagagucaacuucccau

SEQ ID NO: 1346058 - RNA, 19 nt, Artificial Sequence
  Description of Artificial Sequence: Synthetic oligonucleotide
  Sense strand starting at position 3324 of SEQ ID NO: 1242418
ggaaguugacucugaucac

SEQ ID NO: 1346059 - RNA, 19 nt, Artificial Sequence
  Description of Artificial Sequence: Synthetic oligonucleotide
  Antisense strand to SEQ ID NO: 1346058
gugaucagagucaacuucc

SEQ ID NO: 1346060 - RNA, 19 nt, Artificial Sequence
  Description of Artificial Sequence: Synthetic oligonucleotide
  Sense strand starting at position 3333 of SEQ ID NO: 1242418
cucugaucacgggagucaa

SEQ ID NO: 1346061 - RNA, 19 nt, Artificial Sequence
  Description of Artificial Sequence: Synthetic oligonucleotide
  Antisense strand to SEQ ID NO: 1346060
uugacucccgugaucagag

SEQ ID NO: 1346062 - RNA, 19 nt, Artificial Sequence
  Description of Artificial Sequence: Synthetic oligonucleotide
  Sense strand starting at position 3717 of SEQ ID NO: 1242418
accauuauaguccagugau

SEQ ID NO: 1346063 - RNA, 19 nt, Artificial Sequence
  Description of Artificial Sequence: Synthetic oligonucleotide
  Antisense strand to SEQ ID NO: 1346062
aucacuggacuauaauggu

SEQ ID NO: 1346064 - RNA, 19 nt, Artificial Sequence
  Description of Artificial Sequence: Synthetic oligonucleotide
  Sense strand starting at position 3720 of SEQ ID NO: 1242418
auuauaguccagugaugaa

SEQ ID NO: 1346065 - RNA, 19 nt, Artificial Sequence
  Description of Artificial Sequence: Synthetic oligonucleotide
  Antisense strand to SEQ ID NO: 1346064
uucaucacuggacuauaau

SEQ ID NO: 1346066 - RNA, 19 nt, Artificial Sequence
  Description of Artificial Sequence: Synthetic oligonucleotide
  Sense strand starting at position 3799 of SEQ ID NO: 1242418
auguuacuuugagcaaguu

SEQ ID NO: 1346067 - RNA, 19 nt, Artificial Sequence
  Description of Artificial Sequence: Synthetic oligonucleotide
  Antisense strand to SEQ ID NO: 1346066
aacuugcucaaaguaacau

SEQ ID NO: 1346068 - RNA, 19 nt, Artificial Sequence
  Description of Artificial Sequence: Synthetic oligonucleotide
  Sense strand starting at position 3800 of SEQ ID NO: 1242418
uguuacuuugagcaaguua

SEQ ID NO: 1346069 - RNA, 19 nt, Artificial Sequence
  Description of Artificial Sequence: Synthetic oligonucleotide
  Antisense strand to SEQ ID NO: 1346068
uaacuugcucaaaguaaca

SEQ ID NO: 1346070 - RNA, 19 nt, Artificial Sequence
  Description of Artificial Sequence: Synthetic oligonucleotide
  Sense strand starting at position 3860 of SEQ ID NO: 1242418
aagggauucuguuuacuuu

SEQ ID NO: 1346071 - RNA, 19 nt, Artificial Sequence
  Description of Artificial Sequence: Synthetic oligonucleotide
  Antisense strand to SEQ ID NO: 1346070
aaaguaaacagaaucccuu

SEQ ID NO: 1346072 - RNA, 19 nt, Artificial Sequence
  Description of Artificial Sequence: Synthetic oligonucleotide
  Sense strand starting at position 3861 of SEQ ID NO: 1242418
agggauucuguuuacuuua

SEQ ID NO: 1346073 - RNA, 19 nt, Artificial Sequence
  Description of Artificial Sequence: Synthetic oligonucleotide
  Antisense strand to SEQ ID NO: 1346072
uaaaguaaacagaaucccu

SEQ ID NO: 1346074 - RNA, 19 nt, Artificial Sequence
  Description of Artificial Sequence: Synthetic oligonucleotide
  Sense strand starting at position 3863 of SEQ ID NO: 1242418
ggauucuguuuacuuuaua

SEQ ID NO: 1346075 - RNA, 19 nt, Artificial Sequence
  Description of Artificial Sequence: Synthetic oligonucleotide
  Antisense strand to SEQ ID NO: 1346074
uauaaaguaaacagaaucc

SEQ ID NO: 1346076 - RNA, 19 nt, Artificial Sequence
  Description of Artificial Sequence: Synthetic oligonucleotide
  Sense strand starting at position 3928 of SEQ ID NO: 1242418
ccuaguauaagcuggguaa

SEQ ID NO: 1346077 - RNA, 19 nt, Artificial Sequence
  Description of Artificial Sequence: Synthetic oligonucleotide
  Antisense strand to SEQ ID NO: 1346076
uuacccagcuuauacuagg

SEQ ID NO: 1346078 - RNA, 19 nt, Artificial Sequence
  Description of Artificial Sequence: Synthetic oligonucleotide
  Sense strand starting at position 3929 of SEQ ID NO: 1242418
cuaguauaagcuggguaaa

SEQ ID NO: 1346079 - RNA, 19 nt, Artificial Sequence
  Description of Artificial Sequence: Synthetic oligonucleotide
  Antisense strand to SEQ ID NO: 1346078
uuuacccagcuuauacuag

SEQ ID NO: 1346080 - RNA, 19 nt, Artificial Sequence
  Description of Artificial Sequence: Synthetic oligonucleotide
  Sense strand starting at position 3981 of SEQ ID NO: 1242418
aguacuacuucuucuagga

SEQ ID NO: 1346081 - RNA, 19 nt, Artificial Sequence
  Description of Artificial Sequence: Synthetic oligonucleotide
  Antisense strand to SEQ ID NO: 1346080
uccuagaagaaguaguacu

SEQ ID NO: 1346082 - RNA, 19 nt, Artificial Sequence
  Description of Artificial Sequence: Synthetic oligonucleotide
  Sense strand starting at position 255 of SEQ ID NO: 1242419
cgcgaacuucaggaggaau

SEQ ID NO: 1346083 - RNA, 19 nt, Artificial Sequence
  Description of Artificial Sequence: Synthetic oligonucleotide
  Antisense strand to SEQ ID NO: 1346082
auuccuccugaaguucgcg

SEQ ID NO: 1346084 - RNA, 19 nt, Artificial Sequence
  Description of Artificial Sequence: Synthetic oligonucleotide
  Sense strand starting at position 263 of SEQ ID NO: 1242419
ucaggaggaauucgguuua

SEQ ID NO: 1346085 - RNA, 19 nt, Artificial Sequence
  Description of Artificial Sequence: Synthetic oligonucleotide
  Antisense strand to SEQ ID NO: 1346084
uaaaccgaauuccuccuga

SEQ ID NO: 1346086 - RNA, 19 nt, Artificial Sequence
  Description of Artificial Sequence: Synthetic oligonucleotide
  Sense strand starting at position 268 of SEQ ID NO: 1242419
aggaauucgguuuauaguu

SEQ ID NO: 1346087 - RNA, 19 nt, Artificial Sequence
  Description of Artificial Sequence: Synthetic oligonucleotide
  Antisense strand to SEQ ID NO: 1346086
aacuauaaaccgaauuccu

SEQ ID NO: 1346088 - RNA, 19 nt, Artificial Sequence
  Description of Artificial Sequence: Synthetic oligonucleotide
  Sense strand starting at position 337 of SEQ ID NO: 1242419
caucaugccuuuguaggaa

SEQ ID NO: 1346089 - RNA, 19 nt, Artificial Sequence
  Description of Artificial Sequence: Synthetic oligonucleotide
  Antisense strand to SEQ ID NO: 1346088
uuccuacaaaggcaugaug

SEQ ID NO: 1346090 - RNA, 19 nt, Artificial Sequence
  Description of Artificial Sequence: Synthetic oligonucleotide
  Sense strand starting at position 340 of SEQ ID NO: 1242419
caugccuuuguaggaauaa

SEQ ID NO: 1346091 - RNA, 19 nt, Artificial Sequence
  Description of Artificial Sequence: Synthetic oligonucleotide
  Antisense strand to SEQ ID NO: 1346090
uuauuccuacaaaggcaug

SEQ ID NO: 1346092 - RNA, 19 nt, Artificial Sequence
  Description of Artificial Sequence: Synthetic oligonucleotide
  Sense strand starting at position 476 of SEQ ID NO: 1242419
cagucagugcuugagaucu

SEQ ID NO: 1346093 - RNA, 19 nt, Artificial Sequence
  Description of Artificial Sequence: Synthetic oligonucleotide
  Antisense strand to SEQ ID NO: 1346092
agaucucaagcacugacug

SEQ ID NO: 1346094 - RNA, 19 nt, Artificial Sequence
  Description of Artificial Sequence: Synthetic oligonucleotide
  Sense strand starting at position 510 of SEQ ID NO: 1242419
cccgauggaucagcugaua

SEQ ID NO: 1346095 - RNA, 19 nt, Artificial Sequence
  Description of Artificial Sequence: Synthetic oligonucleotide
  Antisense strand to SEQ ID NO: 1346094
uaucagcugauccaucggg

SEQ ID NO: 1346096 - RNA, 19 nt, Artificial Sequence
  Description of Artificial Sequence: Synthetic oligonucleotide
  Sense strand starting at position 547 of SEQ ID NO: 1242419
ugacucaucugaucuuaug

SEQ ID NO: 1346097 - RNA, 19 nt, Artificial Sequence
  Description of Artificial Sequence: Synthetic oligonucleotide
  Antisense strand to SEQ ID NO: 1346096
cauaagaucagaugaguca

SEQ ID NO: 1346098 - RNA, 19 nt, Artificial Sequence
  Description of Artificial Sequence: Synthetic oligonucleotide
  Sense strand starting at position 836 of SEQ ID NO: 1242419
ucccuugggugguuacaaa

SEQ ID NO: 1346099 - RNA, 19 nt, Artificial Sequence
  Description of Artificial Sequence: Synthetic oligonucleotide
  Antisense strand to SEQ ID NO: 1346098
uuuguaaccacccaaggga

SEQ ID NO: 1346100 - RNA, 19 nt, Artificial Sequence
  Description of Artificial Sequence: Synthetic oligonucleotide
  Sense strand starting at position 869 of SEQ ID NO: 1242419
accucagaggagugucaaa

SEQ ID NO: 1346101 - RNA, 19 nt, Artificial Sequence
  Description of Artificial Sequence: Synthetic oligonucleotide
  Antisense strand to SEQ ID NO: 1346100
uuugacacuccucugaggu

SEQ ID NO: 1346102 - RNA, 19 nt, Artificial Sequence
  Description of Artificial Sequence: Synthetic oligonucleotide
  Sense strand starting at position 874 of SEQ ID NO: 1242419
agaggagugucaaagguug

SEQ ID NO: 1346103 - RNA, 19 nt, Artificial Sequence
  Description of Artificial Sequence: Synthetic oligonucleotide
  Antisense strand to SEQ ID NO: 1346102
caaccuuugacacuccucu

SEQ ID NO: 1346104 - RNA, 19 nt, Artificial Sequence
  Description of Artificial Sequence: Synthetic oligonucleotide
  Sense strand starting at position 882 of SEQ ID NO: 1242419
gucaaagguugagccuaaa

SEQ ID NO: 1346105 - RNA, 19 nt, Artificial Sequence
  Description of Artificial Sequence: Synthetic oligonucleotide
  Antisense strand to SEQ ID NO: 1346104
uuuaggcucaaccuuugac

SEQ ID NO: 1346106 - RNA, 19 nt, Artificial Sequence
  Description of Artificial Sequence: Synthetic oligonucleotide
  Sense strand starting at position 933 of SEQ ID NO: 1242419
gguguuaaauuauugacag

SEQ ID NO: 1346107 - RNA, 19 nt, Artificial Sequence
  Description of Artificial Sequence: Synthetic oligonucleotide
  Antisense strand to SEQ ID NO: 1346106
cugucaauaauuuaacacc

SEQ ID NO: 1346108 - RNA, 19 nt, Artificial Sequence
  Description of Artificial Sequence: Synthetic oligonucleotide
  Sense strand starting at position 1064 of SEQ ID NO: 1242419
acuauaugcuaccuggaua

SEQ ID NO: 1346109 - RNA, 19 nt, Artificial Sequence
  Description of Artificial Sequence: Synthetic oligonucleotide
  Antisense strand to SEQ ID NO: 1346108
uauccagguagcauauagu

SEQ ID NO: 1346110 - RNA, 19 nt, Artificial Sequence
  Description of Artificial Sequence: Synthetic oligonucleotide
  Sense strand starting at position 1183 of SEQ ID NO: 1242419
ucuauaucauugguuaucu

SEQ ID NO: 1346111 - RNA, 19 nt, Artificial Sequence
  Description of Artificial Sequence: Synthetic oligonucleotide
  Antisense strand to SEQ ID NO: 1346110
agauaaccaaugauauaga

SEQ ID NO: 1346112 - RNA, 19 nt, Artificial Sequence
  Description of Artificial Sequence: Synthetic oligonucleotide
  Sense strand starting at position 1193 of SEQ ID NO: 1242419
ugguuaucugugcaaacau

SEQ ID NO: 1346113 - RNA, 19 nt, Artificial Sequence
  Description of Artificial Sequence: Synthetic oligonucleotide
  Antisense strand to SEQ ID NO: 1346112
auguuugcacagauaacca

SEQ ID NO: 1346114 - RNA, 19 nt, Artificial Sequence
  Description of Artificial Sequence: Synthetic oligonucleotide
  Sense strand starting at position 1306 of SEQ ID NO: 1242419
cgacauuccuauuugcgca

SEQ ID NO: 1346115 - RNA, 19 nt, Artificial Sequence
  Description of Artificial Sequence: Synthetic oligonucleotide
  Antisense strand to SEQ ID NO: 1346114
ugcgcaaauaggaaugucg

SEQ ID NO: 1346116 - RNA, 19 nt, Artificial Sequence
  Description of Artificial Sequence: Synthetic oligonucleotide
  Sense strand starting at position 1356 of SEQ ID NO: 1242419
agucgcaauguucugucua

SEQ ID NO: 1346117 - RNA, 19 nt, Artificial Sequence
  Description of Artificial Sequence: Synthetic oligonucleotide
  Antisense strand to SEQ ID NO: 1346116
uagacagaacauugcgacu

SEQ ID NO: 1346118 - RNA, 19 nt, Artificial Sequence
  Description of Artificial Sequence: Synthetic oligonucleotide
  Sense strand starting at position 1363 of SEQ ID NO: 1242419
auguucugucuacacaaau

SEQ ID NO: 1346119 - RNA, 19 nt, Artificial Sequence
  Description of Artificial Sequence: Synthetic oligonucleotide
  Antisense strand to SEQ ID NO: 1346118
auuuguguagacagaacau

SEQ ID NO: 1346120 - RNA, 19 nt, Artificial Sequence
  Description of Artificial Sequence: Synthetic oligonucleotide
  Sense strand starting at position 1460 of SEQ ID NO: 1242419
cgauucugagcauauguga

SEQ ID NO: 1346121 - RNA, 19 nt, Artificial Sequence
  Description of Artificial Sequence: Synthetic oligonucleotide
  Antisense strand to SEQ ID NO: 1346120
ucacauaugcucagaaucg

SEQ ID NO: 1346122 - RNA, 19 nt, Artificial Sequence
  Description of Artificial Sequence: Synthetic oligonucleotide
  Sense strand starting at position 1690 of SEQ ID NO: 1242419
aaacgaaaguuguuaauac

SEQ ID NO: 1346123 - RNA, 19 nt, Artificial Sequence
  Description of Artificial Sequence: Synthetic oligonucleotide
  Antisense strand to SEQ ID NO: 1346122
guauuaacaacuuucguuu

SEQ ID NO: 1346124 - RNA, 19 nt, Artificial Sequence
  Description of Artificial Sequence: Synthetic oligonucleotide
  Sense strand starting at position 1826 of SEQ ID NO: 1242419
ugaauauuaccaggaaagc

SEQ ID NO: 1346125 - RNA, 19 nt, Artificial Sequence
  Description of Artificial Sequence: Synthetic oligonucleotide
  Antisense strand to SEQ ID NO: 1346124
gcuuuccugguaauauuca

SEQ ID NO: 1346126 - RNA, 19 nt, Artificial Sequence
  Description of Artificial Sequence: Synthetic oligonucleotide
  Sense strand starting at position 2272 of SEQ ID NO: 1242419
accuaagugucaucaguaa

SEQ ID NO: 1346127 - RNA, 19 nt, Artificial Sequence
  Description of Artificial Sequence: Synthetic oligonucleotide
  Antisense strand to SEQ ID NO: 1346126
uuacugaugacacuuaggu

SEQ ID NO: 1346128 - RNA, 19 nt, Artificial Sequence
  Description of Artificial Sequence: Synthetic oligonucleotide
  Sense strand starting at position 2276 of SEQ ID NO: 1242419
aagugucaucaguaauagu

SEQ ID NO: 1346129 - RNA, 19 nt, Artificial Sequence
  Description of Artificial Sequence: Synthetic oligonucleotide
  Antisense strand to SEQ ID NO: 1346128
acuauuacugaugacacuu

SEQ ID NO: 1346130 - RNA, 19 nt, Artificial Sequence
  Description of Artificial Sequence: Synthetic oligonucleotide
  Sense strand starting at position 2285 of SEQ ID NO: 1242419
caguaauagugaguucuaa

SEQ ID NO: 1346131 - RNA, 19 nt, Artificial Sequence
  Description of Artificial Sequence: Synthetic oligonucleotide
  Antisense strand to SEQ ID NO: 1346130
uuagaacucacuauuacug

SEQ ID NO: 1346132 - RNA, 19 nt, Artificial Sequence
  Description of Artificial Sequence: Synthetic oligonucleotide
  Sense strand starting at position 2321 of SEQ ID NO: 1242419
agggacaacugagaauauu

SEQ ID NO: 1346133 - RNA, 19 nt, Artificial Sequence
  Description of Artificial Sequence: Synthetic oligonucleotide
  Antisense strand to SEQ ID NO: 1346132
aauauucucaguugucccu

SEQ ID NO: 1346134 - RNA, 19 nt, Artificial Sequence
  Description of Artificial Sequence: Synthetic oligonucleotide
  Sense strand starting at position 2332 of SEQ ID NO: 1242419
agaauauugguguagguuc

SEQ ID NO: 1346135 - RNA, 19 nt, Artificial Sequence
  Description of Artificial Sequence: Synthetic oligonucleotide
  Antisense strand to SEQ ID NO: 1346134
gaaccuacaccaauauucu

SEQ ID NO: 1346136 - RNA, 19 nt, Artificial Sequence
  Description of Artificial Sequence: Synthetic oligonucleotide
  Sense strand starting at position 2389 of SEQ ID NO: 1242419
agcacacuuggcuaagaga

SEQ ID NO: 1346137 - RNA, 19 nt, Artificial Sequence
  Description of Artificial Sequence: Synthetic oligonucleotide
  Antisense strand to SEQ ID NO: 1346136
ucucuuagccaagugugcu

SEQ ID NO: 1346138 - RNA, 19 nt, Artificial Sequence
  Description of Artificial Sequence: Synthetic oligonucleotide
  Sense strand starting at position 2642 of SEQ ID NO: 1242419
aaaucauuccuagguggau

SEQ ID NO: 1346139 - RNA, 19 nt, Artificial Sequence
  Description of Artificial Sequence: Synthetic oligonucleotide
  Antisense strand to SEQ ID NO: 1346138
auccaccuaggaaugauuu

SEQ ID NO: 1346140 - RNA, 19 nt, Artificial Sequence
  Description of Artificial Sequence: Synthetic oligonucleotide
  Sense strand starting at position 2699 of SEQ ID NO: 1242419
acaucuaauuugggaacau

SEQ ID NO: 1346141 - RNA, 19 nt, Artificial Sequence
  Description of Artificial Sequence: Synthetic oligonucleotide
  Antisense strand to SEQ ID NO: 1346140
auguucccaaauuagaugu

SEQ ID NO: 1346142 - RNA, 19 nt, Artificial Sequence
  Description of Artificial Sequence: Synthetic oligonucleotide
  Sense strand starting at position 3111 of SEQ ID NO: 1242419
acgugauguaaguaaagac

SEQ ID NO: 1346143 - RNA, 19 nt, Artificial Sequence
  Description of Artificial Sequence: Synthetic oligonucleotide
  Antisense strand to SEQ ID NO: 1346142
gucuuuacuuacaucacgu

SEQ ID NO: 1346144 - RNA, 19 nt, Artificial Sequence
  Description of Artificial Sequence: Synthetic oligonucleotide
  Sense strand starting at position 3174 of SEQ ID NO: 1242419
cuuguagggcuuuagauca

SEQ ID NO: 1346145 - RNA, 19 nt, Artificial Sequence
  Description of Artificial Sequence: Synthetic oligonucleotide
  Antisense strand to SEQ ID NO: 1346144
ugaucuaaagcccuacaag

SEQ ID NO: 1346146 - RNA, 19 nt, Artificial Sequence
  Description of Artificial Sequence: Synthetic oligonucleotide
  Sense strand starting at position 3360 of SEQ ID NO: 1242419
ucaauuauagguugcauca

SEQ ID NO: 1346147 - RNA, 19 nt, Artificial Sequence
  Description of Artificial Sequence: Synthetic oligonucleotide
  Antisense strand to SEQ ID NO: 1346146
ugaugcaaccuauaauuga

SEQ ID NO: 1346148 - RNA, 19 nt, Artificial Sequence
  Description of Artificial Sequence: Synthetic oligonucleotide
  Sense strand starting at position 3428 of SEQ ID NO: 1242419
uuauguauuuggcuguaaa

SEQ ID NO: 1346149 - RNA, 19 nt, Artificial Sequence
  Description of Artificial Sequence: Synthetic oligonucleotide
  Antisense strand to SEQ ID NO: 1346148
uuuacagccaaauacauaa

SEQ ID NO: 1346150 - RNA, 19 nt, Artificial Sequence
  Description of Artificial Sequence: Synthetic oligonucleotide
  Sense strand starting at position 3467 of SEQ ID NO: 1242419
cccugaaaggcacaaugua

SEQ ID NO: 1346151 - RNA, 19 nt, Artificial Sequence
  Description of Artificial Sequence: Synthetic oligonucleotide
  Antisense strand to SEQ ID NO: 1346150
uacauugugccuuucaggg

SEQ ID NO: 1346152 - RNA, 19 nt, Artificial Sequence
  Description of Artificial Sequence: Synthetic oligonucleotide
  Sense strand starting at position 3497 of SEQ ID NO: 1242419
acaaaucuucuagaggcuu

SEQ ID NO: 1346153 - RNA, 19 nt, Artificial Sequence
  Description of Artificial Sequence: Synthetic oligonucleotide
  Antisense strand to SEQ ID NO: 1346152
aagccucuagaagauuugu

SEQ ID NO: 1346154 - RNA, 19 nt, Artificial Sequence
  Description of Artificial Sequence: Synthetic oligonucleotide
  Sense strand starting at position 3825 of SEQ ID NO: 1242419
ggccaacugggcuagaauu

SEQ ID NO: 1346155 - RNA, 19 nt, Artificial Sequence
  Description of Artificial Sequence: Synthetic oligonucleotide
  Antisense strand to SEQ ID NO: 1346154
aauucuagcccaguuggcc

SEQ ID NO: 1346156 - RNA, 19 nt, Artificial Sequence
  Description of Artificial Sequence: Synthetic oligonucleotide
  Sense strand starting at position 3831 of SEQ ID NO: 1242419
cugggcuagaauuaauagu

SEQ ID NO: 1346157 - RNA, 19 nt, Artificial Sequence
  Description of Artificial Sequence: Synthetic oligonucleotide
  Antisense strand to SEQ ID NO: 1346156
acuauuaauucuagcccag

SEQ ID NO: 1346158 - RNA, 19 nt, Artificial Sequence
  Description of Artificial Sequence: Synthetic oligonucleotide
  Sense strand starting at position 3850 of SEQ ID NO: 1242419
cgcuguguuaaagagaaac

SEQ ID NO: 1346159 - RNA, 19 nt, Artificial Sequence
  Description of Artificial Sequence: Synthetic oligonucleotide
  Antisense strand to SEQ ID NO: 1346158
guuucucuuuaacacagcg

SEQ ID NO: 1346160 - RNA, 19 nt, Artificial Sequence
  Description of Artificial Sequence: Synthetic oligonucleotide
  Sense strand starting at position 3911 of SEQ ID NO: 1242419
agaggugauguauaugcua

SEQ ID NO: 1346161 - RNA, 19 nt, Artificial Sequence
  Description of Artificial Sequence: Synthetic oligonucleotide
  Antisense strand to SEQ ID NO: 1346160
uagcauauacaucaccucu

SEQ ID NO: 1346162 - RNA, 19 nt, Artificial Sequence
  Description of Artificial Sequence: Synthetic oligonucleotide
  Sense strand starting at position 7 of SEQ ID NO: 1242420
caguaagguaggcauguua

SEQ ID NO: 1346163 - RNA, 19 nt, Artificial Sequence
  Description of Artificial Sequence: Synthetic oligonucleotide
  Antisense strand to SEQ ID NO: 1346162
uaacaugccuaccuuacug

SEQ ID NO: 1346164 - RNA, 19 nt, Artificial Sequence
  Description of Artificial Sequence: Synthetic oligonucleotide
  Sense strand starting at position 104 of SEQ ID NO: 1242420
caauaugguuuauugggaa

SEQ ID NO: 1346165 - RNA, 19 nt, Artificial Sequence
  Description of Artificial Sequence: Synthetic oligonucleotide
  Antisense strand to SEQ ID NO: 1346164
uucccaauaaaccauauug

SEQ ID NO: 1346166 - RNA, 19 nt, Artificial Sequence
  Description of Artificial Sequence: Synthetic oligonucleotide
  Sense strand starting at position 188 of SEQ ID NO: 1242420
acgcaacucucaucaauga

SEQ ID NO: 1346167 - RNA, 19 nt, Artificial Sequence
  Description of Artificial Sequence: Synthetic oligonucleotide
  Antisense strand to SEQ ID NO: 1346166
ucauugaugagaguugcgu

SEQ ID NO: 1346168 - RNA, 19 nt, Artificial Sequence
  Description of Artificial Sequence: Synthetic oligonucleotide
  Sense strand starting at position 189 of SEQ ID NO: 1242420
cgcaacucucaucaaugaa

SEQ ID NO: 1346169 - RNA, 19 nt, Artificial Sequence
  Description of Artificial Sequence: Synthetic oligonucleotide
  Antisense strand to SEQ ID NO: 1346168
uucauugaugagaguugcg

SEQ ID NO: 1346170 - RNA, 19 nt, Artificial Sequence
  Description of Artificial Sequence: Synthetic oligonucleotide
  Sense strand starting at position 274 of SEQ ID NO: 1242420
ugggaaucaucuuucccuu

SEQ ID NO: 1346171 - RNA, 19 nt, Artificial Sequence
  Description of Artificial Sequence: Synthetic oligonucleotide
  Antisense strand to SEQ ID NO: 1346170
aagggaaagaugauuccca

SEQ ID NO: 1346172 - RNA, 19 nt, Artificial Sequence
  Description of Artificial Sequence: Synthetic oligonucleotide
  Sense strand starting at position 276 of SEQ ID NO: 1242420
ggaaucaucuuucccuugu

SEQ ID NO: 1346173 - RNA, 19 nt, Artificial Sequence
  Description of Artificial Sequence: Synthetic oligonucleotide
  Antisense strand to SEQ ID NO: 1346172
acaagggaaagaugauucc

SEQ ID NO: 1346174 - RNA, 19 nt, Artificial Sequence
  Description of Artificial Sequence: Synthetic oligonucleotide
  Sense strand starting at position 318 of SEQ ID NO: 1242420
ucuaucuaguuugcaauga

SEQ ID NO: 1346175 - RNA, 19 nt, Artificial Sequence
  Description of Artificial Sequence: Synthetic oligonucleotide
  Antisense strand to SEQ ID NO: 1346174
ucauugcaaacuagauaga

SEQ ID NO: 1346176 - RNA, 19 nt, Artificial Sequence
  Description of Artificial Sequence: Synthetic oligonucleotide
  Sense strand starting at position 457 of SEQ ID NO: 1242420
uucuguauaggguauugaa

SEQ ID NO: 1346177 - RNA, 19 nt, Artificial Sequence
  Description of Artificial Sequence: Synthetic oligonucleotide
  Antisense strand to SEQ ID NO: 1346176
uucaauacccuauacagaa

SEQ ID NO: 1346178 - RNA, 19 nt, Artificial Sequence
  Description of Artificial Sequence: Synthetic oligonucleotide
  Sense strand starting at position 627 of SEQ ID NO: 1242420
ccauaagauugaggauuuc

SEQ ID NO: 1346179 - RNA, 19 nt, Artificial Sequence
  Description of Artificial Sequence: Synthetic oligonucleotide
  Antisense strand to SEQ ID NO: 1346178
gaaauccucaaucuuaugg

SEQ ID NO: 1346180 - RNA, 19 nt, Artificial Sequence
  Description of Artificial Sequence: Synthetic oligonucleotide
  Sense strand starting at position 713 of SEQ ID NO: 1242420
uagagaauguguuucucuc

SEQ ID NO: 1346181 - RNA, 19 nt, Artificial Sequence
  Description of Artificial Sequence: Synthetic oligonucleotide
  Antisense strand to SEQ ID NO: 1346180
gagagaaacacauucucua

SEQ ID NO: 1346182 - RNA, 19 nt, Artificial Sequence
  Description of Artificial Sequence: Synthetic oligonucleotide
  Sense strand starting at position 715 of SEQ ID NO: 1242420
gagaauguguuucucucaa

SEQ ID NO: 1346183 - RNA, 19 nt, Artificial Sequence
  Description of Artificial Sequence: Synthetic oligonucleotide
  Antisense strand to SEQ ID NO: 1346182
uugagagaaacacauucuc

SEQ ID NO: 1346184 - RNA, 19 nt, Artificial Sequence
  Description of Artificial Sequence: Synthetic oligonucleotide
  Sense strand starting at position 758 of SEQ ID NO: 1242420
auucguauugcagaaccua

SEQ ID NO: 1346185 - RNA, 19 nt, Artificial Sequence
  Description of Artificial Sequence: Synthetic oligonucleotide
  Antisense strand to SEQ ID NO: 1346184
uagguucugcaauacgaau

SEQ ID NO: 1346186 - RNA, 19 nt, Artificial Sequence
  Description of Artificial Sequence: Synthetic oligonucleotide
  Sense strand starting at position 824 of SEQ ID NO: 1242420
ggaaguuaguguuuaaccu

SEQ ID NO: 1346187 - RNA, 19 nt, Artificial Sequence
  Description of Artificial Sequence: Synthetic oligonucleotide
  Antisense strand to SEQ ID NO: 1346186
agguuaaacacuaacuucc

SEQ ID NO: 1346188 - RNA, 19 nt, Artificial Sequence
  Description of Artificial Sequence: Synthetic oligonucleotide
  Sense strand starting at position 825 of SEQ ID NO: 1242420
gaaguuaguguuuaaccua

SEQ ID NO: 1346189 - RNA, 19 nt, Artificial Sequence
  Description of Artificial Sequence: Synthetic oligonucleotide
  Antisense strand to SEQ ID NO: 1346188
uagguuaaacacuaacuuc

SEQ ID NO: 1346190 - RNA, 19 nt, Artificial Sequence
  Description of Artificial Sequence: Synthetic oligonucleotide
  Sense strand starting at position 890 of SEQ ID NO: 1242420
auauaugaggagugucaaa

SEQ ID NO: 1346191 - RNA, 19 nt, Artificial Sequence
  Description of Artificial Sequence: Synthetic oligonucleotide
  Antisense strand to SEQ ID NO: 1346190
uuugacacuccucauauau

SEQ ID NO: 1346192 - RNA, 19 nt, Artificial Sequence
  Description of Artificial Sequence: Synthetic oligonucleotide
  Sense strand starting at position 929 of SEQ ID NO: 1242420
acauuaauggagcacguaa

SEQ ID NO: 1346193 - RNA, 19 nt, Artificial Sequence
  Description of Artificial Sequence: Synthetic oligonucleotide
  Antisense strand to SEQ ID NO: 1346192
uuacgugcuccauuaaugu

SEQ ID NO: 1346194 - RNA, 19 nt, Artificial Sequence
  Description of Artificial Sequence: Synthetic oligonucleotide
  Sense strand starting at position 1079 of SEQ ID NO: 1242420
auauaugcugcuugaagau

SEQ ID NO: 1346195 - RNA, 19 nt, Artificial Sequence
  Description of Artificial Sequence: Synthetic oligonucleotide
  Antisense strand to SEQ ID NO: 1346194
aucuucaagcagcauauau

SEQ ID NO: 1346196 - RNA, 19 nt, Artificial Sequence
  Description of Artificial Sequence: Synthetic oligonucleotide
  Sense strand starting at position 1089 of SEQ ID NO: 1242420
cuugaagauguaugacauu

SEQ ID NO: 1346197 - RNA, 19 nt, Artificial Sequence
  Description of Artificial Sequence: Synthetic oligonucleotide
  Antisense strand to SEQ ID NO: 1346196
aaugucauacaucuucaag

SEQ ID NO: 1346198 - RNA, 19 nt, Artificial Sequence
  Description of Artificial Sequence: Synthetic oligonucleotide
  Sense strand starting at position 1357 of SEQ ID NO: 1242420
guguucugucuacacaaau

SEQ ID NO: 1346199 - RNA, 19 nt, Artificial Sequence
  Description of Artificial Sequence: Synthetic oligonucleotide
  Antisense strand to SEQ ID NO: 1346198
auuuguguagacagaacac

SEQ ID NO: 1346200 - RNA, 19 nt, Artificial Sequence
  Description of Artificial Sequence: Synthetic oligonucleotide
  Sense strand starting at position 1437 of SEQ ID NO: 1242420
gcuucuuuaagccugcgau

SEQ ID NO: 1346201 - RNA, 19 nt, Artificial Sequence
  Description of Artificial Sequence: Synthetic oligonucleotide
  Antisense strand to SEQ ID NO: 1346200
aucgcaggcuuaaagaagc

SEQ ID NO: 1346202 - RNA, 19 nt, Artificial Sequence
  Description of Artificial Sequence: Synthetic oligonucleotide
  Sense strand starting at position 1483 of SEQ ID NO: 1242420
caggaaagucucugacccu

SEQ ID NO: 1346203 - RNA, 19 nt, Artificial Sequence
  Description of Artificial Sequence: Synthetic oligonucleotide
  Antisense strand to SEQ ID NO: 1346202
agggucagagacuuuccug

SEQ ID NO: 1346204 - RNA, 19 nt, Artificial Sequence
  Description of Artificial Sequence: Synthetic oligonucleotide
  Sense strand starting at position 2325 of SEQ ID NO: 1242420
aauauugguguaggagcaa

SEQ ID NO: 1346205 - RNA, 19 nt, Artificial Sequence
  Description of Artificial Sequence: Synthetic oligonucleotide
  Antisense strand to SEQ ID NO: 1346204
uugcuccuacaccaauauu

SEQ ID NO: 1346206 - RNA, 19 nt, Artificial Sequence
  Description of Artificial Sequence: Synthetic oligonucleotide
  Sense strand starting at position 2337 of SEQ ID NO: 1242420
ggagcaaaguauccaggau

SEQ ID NO: 1346207 - RNA, 19 nt, Artificial Sequence
  Description of Artificial Sequence: Synthetic oligonucleotide
  Antisense strand to SEQ ID NO: 1346206
auccuggauacuuugcucc

SEQ ID NO: 1346208 - RNA, 19 nt, Artificial Sequence
  Description of Artificial Sequence: Synthetic oligonucleotide
  Sense strand starting at position 2434 of SEQ ID NO: 1242420
ugaagacucuuaguaauua

SEQ ID NO: 1346209 - RNA, 19 nt, Artificial Sequence
  Description of Artificial Sequence: Synthetic oligonucleotide
  Antisense strand to SEQ ID NO: 1346208
uaauuacuaagagucuuca

SEQ ID NO: 1346210 - RNA, 19 nt, Artificial Sequence
  Description of Artificial Sequence: Synthetic oligonucleotide
  Sense strand starting at position 2557 of SEQ ID NO: 1242420
uuaguagaaagauggcuuu

SEQ ID NO: 1346211 - RNA, 19 nt, Artificial Sequence
  Description of Artificial Sequence: Synthetic oligonucleotide
  Antisense strand to SEQ ID NO: 1346210
aaagccaucuuucuacuaa

SEQ ID NO: 1346212 - RNA, 19 nt, Artificial Sequence
  Description of Artificial Sequence: Synthetic oligonucleotide
  Sense strand starting at position 2580 of SEQ ID NO: 1242420
aucaauguucuaggaaauu

SEQ ID NO: 1346213 - RNA, 19 nt, Artificial Sequence
  Description of Artificial Sequence: Synthetic oligonucleotide
  Antisense strand to SEQ ID NO: 1346212
aauuuccuagaacauugau

SEQ ID NO: 1346214 - RNA, 19 nt, Artificial Sequence
  Description of Artificial Sequence: Synthetic oligonucleotide
  Sense strand starting at position 2615 of SEQ ID NO: 1242420
aguuaaauguaccuuuaac

SEQ ID NO: 1346215 - RNA, 19 nt, Artificial Sequence
  Description of Artificial Sequence: Synthetic oligonucleotide
  Antisense strand to SEQ ID NO: 1346214
guuaaagguacauuuaacu

SEQ ID NO: 1346216 - RNA, 19 nt, Artificial Sequence
  Description of Artificial Sequence: Synthetic oligonucleotide
  Sense strand starting at position 2811 of SEQ ID NO: 1242420
uaguuuaugugagcaagga

SEQ ID NO: 1346217 - RNA, 19 nt, Artificial Sequence
  Description of Artificial Sequence: Synthetic oligonucleotide
  Antisense strand to SEQ ID NO: 1346216
uccuugcucacauaaacua

SEQ ID NO: 1346218 - RNA, 19 nt, Artificial Sequence
  Description of Artificial Sequence: Synthetic oligonucleotide
  Sense strand starting at position 2815 of SEQ ID NO: 1242420
uuaugugagcaaggacuau

SEQ ID NO: 1346219 - RNA, 19 nt, Artificial Sequence
  Description of Artificial Sequence: Synthetic oligonucleotide
  Antisense strand to SEQ ID NO: 1346218
auaguccuugcucacauaa

SEQ ID NO: 1346220 - RNA, 19 nt, Artificial Sequence
  Description of Artificial Sequence: Synthetic oligonucleotide
  Sense strand starting at position 2879 of SEQ ID NO: 1242420
uguacuuaggagugguaau

SEQ ID NO: 1346221 - RNA, 19 nt, Artificial Sequence
  Description of Artificial Sequence: Synthetic oligonucleotide
  Antisense strand to SEQ ID NO: 1346220
auuaccacuccuaaguaca

SEQ ID NO: 1346222 - RNA, 19 nt, Artificial Sequence
  Description of Artificial Sequence: Synthetic oligonucleotide
  Sense strand starting at position 2880 of SEQ ID NO: 1242420
guacuuaggagugguaaua

SEQ ID NO: 1346223 - RNA, 19 nt, Artificial Sequence
  Description of Artificial Sequence: Synthetic oligonucleotide
  Antisense strand to SEQ ID NO: 1346222
uauuaccacuccuaaguac

SEQ ID NO: 1346224 - RNA, 19 nt, Artificial Sequence
  Description of Artificial Sequence: Synthetic oligonucleotide
  Sense strand starting at position 2941 of SEQ ID NO: 1242420
gauacauaaugccuguaga

SEQ ID NO: 1346225 - RNA, 19 nt, Artificial Sequence
  Description of Artificial Sequence: Synthetic oligonucleotide
  Antisense strand to SEQ ID NO: 1346224
ucuacaggcauuauguauc

SEQ ID NO: 1346226 - RNA, 19 nt, Artificial Sequence
  Description of Artificial Sequence: Synthetic oligonucleotide
  Sense strand starting at position 2942 of SEQ ID NO: 1242420
auacauaaugccuguagau

SEQ ID NO: 1346227 - RNA, 19 nt, Artificial Sequence
  Description of Artificial Sequence: Synthetic oligonucleotide
  Antisense strand to SEQ ID NO: 1346226
aucuacaggcauuauguau

SEQ ID NO: 1346228 - RNA, 19 nt, Artificial Sequence
  Description of Artificial Sequence: Synthetic oligonucleotide
  Sense strand starting at position 2944 of SEQ ID NO: 1242420
acauaaugccuguagauaa

SEQ ID NO: 1346229 - RNA, 19 nt, Artificial Sequence
  Description of Artificial Sequence: Synthetic oligonucleotide
  Antisense strand to SEQ ID NO: 1346228
uuaucuacaggcauuaugu

SEQ ID NO: 1346230 - RNA, 19 nt, Artificial Sequence
  Description of Artificial Sequence: Synthetic oligonucleotide
  Sense strand starting at position 3070 of SEQ ID NO: 1242420
cgccauaguaaaggaauaa

SEQ ID NO: 1346231 - RNA, 19 nt, Artificial Sequence
  Description of Artificial Sequence: Synthetic oligonucleotide
  Antisense strand to SEQ ID NO: 1346230
uuauuccuuuacuauggcg

SEQ ID NO: 1346232 - RNA, 19 nt, Artificial Sequence
  Description of Artificial Sequence: Synthetic oligonucleotide
  Sense strand starting at position 3573 of SEQ ID NO: 1242420
aaauuugcccgguguggua

SEQ ID NO: 1346233 - RNA, 19 nt, Artificial Sequence
  Description of Artificial Sequence: Synthetic oligonucleotide
  Antisense strand to SEQ ID NO: 1346232
uaccacaccgggcaaauuu

SEQ ID NO: 1346234 - RNA, 19 nt, Artificial Sequence
  Description of Artificial Sequence: Synthetic oligonucleotide
  Sense strand starting at position 3828 of SEQ ID NO: 1242420
cucuguuaaccagaagcuu

SEQ ID NO: 1346235 - RNA, 19 nt, Artificial Sequence
  Description of Artificial Sequence: Synthetic oligonucleotide
  Antisense strand to SEQ ID NO: 1346234
aagcuucugguuaacagag

SEQ ID NO: 1346236 - RNA, 19 nt, Artificial Sequence
  Description of Artificial Sequence: Synthetic oligonucleotide
  Sense strand starting at position 3837 of SEQ ID NO: 1242420
ccagaagcuuuggugauau

SEQ ID NO: 1346237 - RNA, 19 nt, Artificial Sequence
  Description of Artificial Sequence: Synthetic oligonucleotide
  Antisense strand to SEQ ID NO: 1346236
auaucaccaaagcuucugg

SEQ ID NO: 1346238 - RNA, 19 nt, Artificial Sequence
  Description of Artificial Sequence: Synthetic oligonucleotide
  Sense strand starting at position 3867 of SEQ ID NO: 1242420
ugagauuccuacgcaacac

SEQ ID NO: 1346239 - RNA, 19 nt, Artificial Sequence
  Description of Artificial Sequence: Synthetic oligonucleotide
  Antisense strand to SEQ ID NO: 1346238
guguugcguaggaaucuca

SEQ ID NO: 1346240 - RNA, 19 nt, Artificial Sequence
  Description of Artificial Sequence: Synthetic oligonucleotide
  Sense strand starting at position 3952 of SEQ ID NO: 1242420
gaaggugucaauggaaggu

SEQ ID NO: 1346241 - RNA, 19 nt, Artificial Sequence
  Description of Artificial Sequence: Synthetic oligonucleotide
  Antisense strand to SEQ ID NO: 1346240
accuuccauugacaccuuc

SEQ ID NO: 1346242 - RNA, 19 nt, Artificial Sequence
  Description of Artificial Sequence: Synthetic oligonucleotide
  Sense strand starting at position 190 of SEQ ID NO: 1242421
cuuuauuaggccuaucaug

SEQ ID NO: 1346243 - RNA, 19 nt, Artificial Sequence
  Description of Artificial Sequence: Synthetic oligonucleotide
  Antisense strand to SEQ ID NO: 1346242
caugauaggccuaauaaag

SEQ ID NO: 1346244 - RNA, 19 nt, Artificial Sequence
  Description of Artificial Sequence: Synthetic oligonucleotide
  Sense strand starting at position 575 of SEQ ID NO: 1242421
aacugauguccuggauacu

SEQ ID NO: 1346245 - RNA, 19 nt, Artificial Sequence
  Description of Artificial Sequence: Synthetic oligonucleotide
  Antisense strand to SEQ ID NO: 1346244
aguauccaggacaucaguu

SEQ ID NO: 1346246 - RNA, 19 nt, Artificial Sequence
  Description of Artificial Sequence: Synthetic oligonucleotide
  Sense strand starting at position 1825 of SEQ ID NO: 1242421
cgggacucuuccugcuaga

SEQ ID NO: 1346247 - RNA, 19 nt, Artificial Sequence
  Description of Artificial Sequence: Synthetic oligonucleotide
  Antisense strand to SEQ ID NO: 1346246
ucuagcaggaagagucccg

SEQ ID NO: 1346248 - RNA, 19 nt, Artificial Sequence
  Description of Artificial Sequence: Synthetic oligonucleotide
  Sense strand starting at position 1828 of SEQ ID NO: 1242421
gacucuuccugcuagauga

SEQ ID NO: 1346249 - RNA, 19 nt, Artificial Sequence
  Description of Artificial Sequence: Synthetic oligonucleotide
  Antisense strand to SEQ ID NO: 1346248
ucaucuagcaggaagaguc

SEQ ID NO: 1346250 - RNA, 19 nt, Artificial Sequence
  Description of Artificial Sequence: Synthetic oligonucleotide
  Sense strand starting at position 2035 of SEQ ID NO: 1242421
gugccaauugccuggauua

SEQ ID NO: 1346251 - RNA, 19 nt, Artificial Sequence
  Description of Artificial Sequence: Synthetic oligonucleotide
  Antisense strand to SEQ ID NO: 1346250
uaauccaggcaauuggcac

SEQ ID NO: 1346252 - RNA, 19 nt, Artificial Sequence
  Description of Artificial Sequence: Synthetic oligonucleotide
  Sense strand starting at position 2037 of SEQ ID NO: 1242421
gccaauugccuggauuacu

SEQ ID NO: 1346253 - RNA, 19 nt, Artificial Sequence
  Description of Artificial Sequence: Synthetic oligonucleotide
  Antisense strand to SEQ ID NO: 1346252
aguaauccaggcaauuggc

SEQ ID NO: 1346254 - RNA, 19 nt, Artificial Sequence
  Description of Artificial Sequence: Synthetic oligonucleotide
  Sense strand starting at position 2122 of SEQ ID NO: 1242421
gcagauacauaccucgauu

SEQ ID NO: 1346255 - RNA, 19 nt, Artificial Sequence
  Description of Artificial Sequence: Synthetic oligonucleotide
  Antisense strand to SEQ ID NO: 1346254
aaucgagguauguaucugc

SEQ ID NO: 1346256 - RNA, 19 nt, Artificial Sequence
  Description of Artificial Sequence: Synthetic oligonucleotide
  Sense strand starting at position 2124 of SEQ ID NO: 1242421
agauacauaccucgauuac

SEQ ID NO: 1346257 - RNA, 19 nt, Artificial Sequence
  Description of Artificial Sequence: Synthetic oligonucleotide
  Antisense strand to SEQ ID NO: 1346256
guaaucgagguauguaucu

SEQ ID NO: 1346258 - RNA, 19 nt, Artificial Sequence
  Description of Artificial Sequence: Synthetic oligonucleotide
  Sense strand starting at position 2208 of SEQ ID NO: 1242421
uggcuugauuccuauuuaa

SEQ ID NO: 1346259 - RNA, 19 nt, Artificial Sequence
  Description of Artificial Sequence: Synthetic oligonucleotide
  Antisense strand to SEQ ID NO: 1346258
uuaaauaggaaucaagcca

SEQ ID NO: 1346260 - RNA, 19 nt, Artificial Sequence
  Description of Artificial Sequence: Synthetic oligonucleotide
  Sense strand starting at position 2279 of SEQ ID NO: 1242421
augauuaaauuggugcaaa

SEQ ID NO: 1346261 - RNA, 19 nt, Artificial Sequence
  Description of Artificial Sequence: Synthetic oligonucleotide
  Antisense strand to SEQ ID NO: 1346260
uuugcaccaauuuaaucau

SEQ ID NO: 1346262 - RNA, 19 nt, Artificial Sequence
  Description of Artificial Sequence: Synthetic oligonucleotide
  Sense strand starting at position 2312 of SEQ ID NO: 1242421
ggcagagauuuaggagauu

SEQ ID NO: 1346263 - RNA, 19 nt, Artificial Sequence
  Description of Artificial Sequence: Synthetic oligonucleotide
  Antisense strand to SEQ ID NO: 1346262
aaucuccuaaaucucugcc

SEQ ID NO: 1346264 - RNA, 19 nt, Artificial Sequence
  Description of Artificial Sequence: Synthetic oligonucleotide
  Sense strand starting at position 2359 of SEQ ID NO: 1242421
ggcgggaaggcugagauua

SEQ ID NO: 1346265 - RNA, 19 nt, Artificial Sequence
  Description of Artificial Sequence: Synthetic oligonucleotide
  Antisense strand to SEQ ID NO: 1346264
uaaucucagccuucccgcc

SEQ ID NO: 1346266 - RNA, 19 nt, Artificial Sequence
  Description of Artificial Sequence: Synthetic oligonucleotide
  Sense strand starting at position 2361 of SEQ ID NO: 1242421
cgggaaggcugagauuaca

SEQ ID NO: 1346267 - RNA, 19 nt, Artificial Sequence
  Description of Artificial Sequence: Synthetic oligonucleotide
  Antisense strand to SEQ ID NO: 1346266
uguaaucucagccuucccg

SEQ ID NO: 1346268 - RNA, 19 nt, Artificial Sequence
  Description of Artificial Sequence: Synthetic oligonucleotide
  Sense strand starting at position 2478 of SEQ ID NO: 1242421
gccaguagauauuaacucu

SEQ ID NO: 1346269 - RNA, 19 nt, Artificial Sequence
  Description of Artificial Sequence: Synthetic oligonucleotide
  Antisense strand to SEQ ID NO: 1346268
agaguuaauaucuacuggc

SEQ ID NO: 1346270 - RNA, 19 nt, Artificial Sequence
  Description of Artificial Sequence: Synthetic oligonucleotide
  Sense strand starting at position 2581 of SEQ ID NO: 1242421
guuugaauuugcugaaagu

SEQ ID NO: 1346271 - RNA, 19 nt, Artificial Sequence
  Description of Artificial Sequence: Synthetic oligonucleotide
  Antisense strand to SEQ ID NO: 1346270
acuuucagcaaauucaaac

SEQ ID NO: 1346272 - RNA, 19 nt, Artificial Sequence
  Description of Artificial Sequence: Synthetic oligonucleotide
  Sense strand starting at position 2590 of SEQ ID NO: 1242421
ugcugaaaguuugauguau

SEQ ID NO: 1346273 - RNA, 19 nt, Artificial Sequence
  Description of Artificial Sequence: Synthetic oligonucleotide
  Antisense strand to SEQ ID NO: 1346272
auacaucaaacuuucagca

SEQ ID NO: 1346274 - RNA, 19 nt, Artificial Sequence
  Description of Artificial Sequence: Synthetic oligonucleotide
  Sense strand starting at position 2592 of SEQ ID NO: 1242421
cugaaaguuugauguauag

SEQ ID NO: 1346275 - RNA, 19 nt, Artificial Sequence
  Description of Artificial Sequence: Synthetic oligonucleotide
  Antisense strand to SEQ ID NO: 1346274
cuauacaucaaacuuucag

SEQ ID NO: 1346276 - RNA, 19 nt, Artificial Sequence
  Description of Artificial Sequence: Synthetic oligonucleotide
  Sense strand starting at position 2598 of SEQ ID NO: 1242421
guuugauguauagggaagu

SEQ ID NO: 1346277 - RNA, 19 nt, Artificial Sequence
  Description of Artificial Sequence: Synthetic oligonucleotide
  Antisense strand to SEQ ID NO: 1346276
acuucccuauacaucaaac

SEQ ID NO: 1346278 - RNA, 19 nt, Artificial Sequence
  Description of Artificial Sequence: Synthetic oligonucleotide
  Sense strand starting at position 2599 of SEQ ID NO: 1242421
uuugauguauagggaaguu

SEQ ID NO: 1346279 - RNA, 19 nt, Artificial Sequence
  Description of Artificial Sequence: Synthetic oligonucleotide
  Antisense strand to SEQ ID NO: 1346278
aacuucccuauacaucaaa

SEQ ID NO: 1346280 - RNA, 19 nt, Artificial Sequence
  Description of Artificial Sequence: Synthetic oligonucleotide
  Sense strand starting at position 2612 of SEQ ID NO: 1242421
gaaguugacuaccgaugua

SEQ ID NO: 1346281 - RNA, 19 nt, Artificial Sequence
  Description of Artificial Sequence: Synthetic oligonucleotide
  Antisense strand to SEQ ID NO: 1346280
uacaucgguagucaacuuc

SEQ ID NO: 1346282 - RNA, 19 nt, Artificial Sequence
  Description of Artificial Sequence: Synthetic oligonucleotide
  Sense strand starting at position 2615 of SEQ ID NO: 1242421
guugacuaccgauguauga

SEQ ID NO: 1346283 - RNA, 19 nt, Artificial Sequence
  Description of Artificial Sequence: Synthetic oligonucleotide
  Antisense strand to SEQ ID NO: 1346282
ucauacaucgguagucaac

SEQ ID NO: 1346284 - RNA, 19 nt, Artificial Sequence
  Description of Artificial Sequence: Synthetic oligonucleotide
  Sense strand starting at position 2617 of SEQ ID NO: 1242421
ugacuaccgauguaugaca

SEQ ID NO: 1346285 - RNA, 19 nt, Artificial Sequence
  Description of Artificial Sequence: Synthetic oligonucleotide
  Antisense strand to SEQ ID NO: 1346284
ugucauacaucgguaguca

SEQ ID NO: 1346286 - RNA, 19 nt, Artificial Sequence
  Description of Artificial Sequence: Synthetic oligonucleotide
  Sense strand starting at position 2624 of SEQ ID NO: 1242421
cgauguaugacagaagcaa

SEQ ID NO: 1346287 - RNA, 19 nt, Artificial Sequence
  Description of Artificial Sequence: Synthetic oligonucleotide
  Antisense strand to SEQ ID NO: 1346286
uugcuucugucauacaucg

SEQ ID NO: 1346288 - RNA, 19 nt, Artificial Sequence
  Description of Artificial Sequence: Synthetic oligonucleotide
  Sense strand starting at position 2754 of SEQ ID NO: 1242421
augaaaggcuauuacuaga

SEQ ID NO: 1346289 - RNA, 19 nt, Artificial Sequence
  Description of Artificial Sequence: Synthetic oligonucleotide
  Antisense strand to SEQ ID NO: 1346288
ucuaguaauagccuuucau

SEQ ID NO: 1346290 - RNA, 19 nt, Artificial Sequence
  Description of Artificial Sequence: Synthetic oligonucleotide
  Sense strand starting at position 2762 of SEQ ID NO: 1242421
cuauuacuagacugguaaa

SEQ ID NO: 1346291 - RNA, 19 nt, Artificial Sequence
  Description of Artificial Sequence: Synthetic oligonucleotide
  Antisense strand to SEQ ID NO: 1346290
uuuaccagucuaguaauag

SEQ ID NO: 1346292 - RNA, 19 nt, Artificial Sequence
  Description of Artificial Sequence: Synthetic oligonucleotide
  Sense strand starting at position 3120 of SEQ ID NO: 1242421
ccggccuggaccugagauu

SEQ ID NO: 1346293 - RNA, 19 nt, Artificial Sequence
  Description of Artificial Sequence: Synthetic oligonucleotide
  Antisense strand to SEQ ID NO: 1346292
aaucucagguccaggccgg

SEQ ID NO: 1346294 - RNA, 19 nt, Artificial Sequence
  Description of Artificial Sequence: Synthetic oligonucleotide
  Sense strand starting at position 3174 of SEQ ID NO: 1242421
aaagcuguccacuagggua

SEQ ID NO: 1346295 - RNA, 19 nt, Artificial Sequence
  Description of Artificial Sequence: Synthetic oligonucleotide
  Antisense strand to SEQ ID NO: 1346294
uacccuaguggacagcuuu

SEQ ID NO: 1346296 - RNA, 19 nt, Artificial Sequence
  Description of Artificial Sequence: Synthetic oligonucleotide
  Sense strand starting at position 3188 of SEQ ID NO: 1242421
ggguauuuauuuggugcau

SEQ ID NO: 1346297 - RNA, 19 nt, Artificial Sequence
  Description of Artificial Sequence: Synthetic oligonucleotide
  Antisense strand to SEQ ID NO: 1346296
augcaccaaauaaauaccc

SEQ ID NO: 1346298 - RNA, 19 nt, Artificial Sequence
  Description of Artificial Sequence: Synthetic oligonucleotide
  Sense strand starting at position 3219 of SEQ ID NO: 1242421
gcucaugucugccugauuu

SEQ ID NO: 1346299 - RNA, 19 nt, Artificial Sequence
  Description of Artificial Sequence: Synthetic oligonucleotide
  Antisense strand to SEQ ID NO: 1346298
aaaucaggcagacaugagc

SEQ ID NO: 1346300 - RNA, 19 nt, Artificial Sequence
  Description of Artificial Sequence: Synthetic oligonucleotide
  Sense strand starting at position 3227 of SEQ ID NO: 1242421
cugccugauuuaugagacu

SEQ ID NO: 1346301 - RNA, 19 nt, Artificial Sequence
  Description of Artificial Sequence: Synthetic oligonucleotide
  Antisense strand to SEQ ID NO: 1346300
agucucauaaaucaggcag

SEQ ID NO: 1346302 - RNA, 19 nt, Artificial Sequence
  Description of Artificial Sequence: Synthetic oligonucleotide
  Sense strand starting at position 3230 of SEQ ID NO: 1242421
ccugauuuaugagacugac

SEQ ID NO: 1346303 - RNA, 19 nt, Artificial Sequence
  Description of Artificial Sequence: Synthetic oligonucleotide
  Antisense strand to SEQ ID NO: 1346302
gucagucucauaaaucagg

SEQ ID NO: 1346304 - RNA, 19 nt, Artificial Sequence
  Description of Artificial Sequence: Synthetic oligonucleotide
  Sense strand starting at position 3343 of SEQ ID NO: 1242421
ggaggucacaucuaauggu

SEQ ID NO: 1346305 - RNA, 19 nt, Artificial Sequence
  Description of Artificial Sequence: Synthetic oligonucleotide
  Antisense strand to SEQ ID NO: 1346304
accauuagaugugaccucc

SEQ ID NO: 1346306 - RNA, 19 nt, Artificial Sequence
  Description of Artificial Sequence: Synthetic oligonucleotide
  Sense strand starting at position 3455 of SEQ ID NO: 1242421
ggagaaauguucuaguucc

SEQ ID NO: 1346307 - RNA, 19 nt, Artificial Sequence
  Description of Artificial Sequence: Synthetic oligonucleotide
  Antisense strand to SEQ ID NO: 1346306
ggaacuagaacauuucucc

SEQ ID NO: 1346308 - RNA, 19 nt, Artificial Sequence
  Description of Artificial Sequence: Synthetic oligonucleotide
  Sense strand starting at position 3462 of SEQ ID NO: 1242421
uguucuaguuccucacuca

SEQ ID NO: 1346309 - RNA, 19 nt, Artificial Sequence
  Description of Artificial Sequence: Synthetic oligonucleotide
  Antisense strand to SEQ ID NO: 1346308
ugagugaggaacuagaaca

SEQ ID NO: 1346310 - RNA, 19 nt, Artificial Sequence
  Description of Artificial Sequence: Synthetic oligonucleotide
  Sense strand starting at position 3581 of SEQ ID NO: 1242421
guggaaguagcccaugagu

SEQ ID NO: 1346311 - RNA, 19 nt, Artificial Sequence
  Description of Artificial Sequence: Synthetic oligonucleotide
  Antisense strand to SEQ ID NO: 1346310
acucaugggcuacuuccac

SEQ ID NO: 1346312 - RNA, 19 nt, Artificial Sequence
  Description of Artificial Sequence: Synthetic oligonucleotide
  Sense strand starting at position 3583 of SEQ ID NO: 1242421
ggaaguagcccaugaguuu

SEQ ID NO: 1346313 - RNA, 19 nt, Artificial Sequence
  Description of Artificial Sequence: Synthetic oligonucleotide
  Antisense strand to SEQ ID NO: 1346312
aaacucaugggcuacuucc

SEQ ID NO: 1346314 - RNA, 19 nt, Artificial Sequence
  Description of Artificial Sequence: Synthetic oligonucleotide
  Sense strand starting at position 3658 of SEQ ID NO: 1242421
gguguagugguaugaguca

SEQ ID NO: 1346315 - RNA, 19 nt, Artificial Sequence
  Description of Artificial Sequence: Synthetic oligonucleotide
  Antisense strand to SEQ ID NO: 1346314
ugacucauaccacuacacc

SEQ ID NO: 1346316 - RNA, 19 nt, Artificial Sequence
  Description of Artificial Sequence: Synthetic oligonucleotide
  Sense strand starting at position 3663 of SEQ ID NO: 1242421
agugguaugagucaugauc

SEQ ID NO: 1346317 - RNA, 19 nt, Artificial Sequence
  Description of Artificial Sequence: Synthetic oligonucleotide
  Antisense strand to SEQ ID NO: 1346316
gaucaugacucauaccacu

SEQ ID NO: 1346318 - RNA, 19 nt, Artificial Sequence
  Description of Artificial Sequence: Synthetic oligonucleotide
  Sense strand starting at position 3832 of SEQ ID NO: 1242421
gccaguggguguuucagaa

SEQ ID NO: 1346319 - RNA, 19 nt, Artificial Sequence
  Description of Artificial Sequence: Synthetic oligonucleotide
  Antisense strand to SEQ ID NO: 1346318
uucugaaacacccacuggc

SEQ ID NO: 1346320 - RNA, 19 nt, Artificial Sequence
  Description of Artificial Sequence: Synthetic oligonucleotide
  Sense strand starting at position 3875 of SEQ ID NO: 1242421
ucagaauguuggccacaug

SEQ ID NO: 1346321 - RNA, 19 nt, Artificial Sequence
  Description of Artificial Sequence: Synthetic oligonucleotide
  Antisense strand to SEQ ID NO: 1346320
cauguggccaacauucuga

SEQ ID NO: 1346322 - RNA, 19 nt, Artificial Sequence
  Description of Artificial Sequence: Synthetic oligonucleotide
  Sense strand starting at position 302 of SEQ ID NO: 1242422
aacugauguccuggauacu

SEQ ID NO: 1346323 - RNA, 19 nt, Artificial Sequence
  Description of Artificial Sequence: Synthetic oligonucleotide
  Antisense strand to SEQ ID NO: 1346322
aguauccaggacaucaguu

SEQ ID NO: 1346324 - RNA, 19 nt, Artificial Sequence
  Description of Artificial Sequence: Synthetic oligonucleotide
  Sense strand starting at position 1552 of SEQ ID NO: 1242422
cgggacucuuccugcuaga

SEQ ID NO: 1346325 - RNA, 19 nt, Artificial Sequence
  Description of Artificial Sequence: Synthetic oligonucleotide
  Antisense strand to SEQ ID NO: 1346324
ucuagcaggaagagucccg

SEQ ID NO: 1346326 - RNA, 19 nt, Artificial Sequence
  Description of Artificial Sequence: Synthetic oligonucleotide
  Sense strand starting at position 1555 of SEQ ID NO: 1242422
gacucuuccugcuagauga

SEQ ID NO: 1346327 - RNA, 19 nt, Artificial Sequence
  Description of Artificial Sequence: Synthetic oligonucleotide
  Antisense strand to SEQ ID NO: 1346326
ucaucuagcaggaagaguc

SEQ ID NO: 1346328 - RNA, 19 nt, Artificial Sequence
  Description of Artificial Sequence: Synthetic oligonucleotide
  Sense strand starting at position 1762 of SEQ ID NO: 1242422
gugccaauugccuggauua

SEQ ID NO: 1346329 - RNA, 19 nt, Artificial Sequence
  Description of Artificial Sequence: Synthetic oligonucleotide
  Antisense strand to SEQ ID NO: 1346328
uaauccaggcaauuggcac

SEQ ID NO: 1346330 - RNA, 19 nt, Artificial Sequence
  Description of Artificial Sequence: Synthetic oligonucleotide
  Sense strand starting at position 1764 of SEQ ID NO: 1242422
gccaauugccuggauuacu

SEQ ID NO: 1346331 - RNA, 19 nt, Artificial Sequence
  Description of Artificial Sequence: Synthetic oligonucleotide
  Antisense strand to SEQ ID NO: 1346330
aguaauccaggcaauuggc

SEQ ID NO: 1346332 - RNA, 19 nt, Artificial Sequence
  Description of Artificial Sequence: Synthetic oligonucleotide
  Sense strand starting at position 1849 of SEQ ID NO: 1242422
gcagauacauaccucgauu

SEQ ID NO: 1346333 - RNA, 19 nt, Artificial Sequence
  Description of Artificial Sequence: Synthetic oligonucleotide
  Antisense strand to SEQ ID NO: 1346332
aaucgagguauguaucugc

SEQ ID NO: 1346334 - RNA, 19 nt, Artificial Sequence
  Description of Artificial Sequence: Synthetic oligonucleotide
  Sense strand starting at position 1851 of SEQ ID NO: 1242422
agauacauaccucgauuac

SEQ ID NO: 1346335 - RNA, 19 nt, Artificial Sequence
  Description of Artificial Sequence: Synthetic oligonucleotide
  Antisense strand to SEQ ID NO: 1346334
guaaucgagguauguaucu

SEQ ID NO: 1346336 - RNA, 19 nt, Artificial Sequence
  Description of Artificial Sequence: Synthetic oligonucleotide
  Sense strand starting at position 1935 of SEQ ID NO: 1242422
uggcuugauuccuauuuaa

SEQ ID NO: 1346337 - RNA, 19 nt, Artificial Sequence
  Description of Artificial Sequence: Synthetic oligonucleotide
  Antisense strand to SEQ ID NO: 1346336
uuaaauaggaaucaagcca

SEQ ID NO: 1346338 - RNA, 19 nt, Artificial Sequence
  Description of Artificial Sequence: Synthetic oligonucleotide
  Sense strand starting at position 2006 of SEQ ID NO: 1242422
augauuaaauuggugcaaa

SEQ ID NO: 1346339 - RNA, 19 nt, Artificial Sequence
  Description of Artificial Sequence: Synthetic oligonucleotide
  Antisense strand to SEQ ID NO: 1346338
uuugcaccaauuuaaucau

SEQ ID NO: 1346340 - RNA, 19 nt, Artificial Sequence
  Description of Artificial Sequence: Synthetic oligonucleotide
  Sense strand starting at position 2039 of SEQ ID NO: 1242422
ggcagagauuuaggagauu

SEQ ID NO: 1346341 - RNA, 19 nt, Artificial Sequence
  Description of Artificial Sequence: Synthetic oligonucleotide
  Antisense strand to SEQ ID NO: 1346340
aaucuccuaaaucucugcc

SEQ ID NO: 1346342 - RNA, 19 nt, Artificial Sequence
  Description of Artificial Sequence: Synthetic oligonucleotide
  Sense strand starting at position 2086 of SEQ ID NO: 1242422
ggcgggaaggcugagauua

SEQ ID NO: 1346343 - RNA, 19 nt, Artificial Sequence
  Description of Artificial Sequence: Synthetic oligonucleotide
  Antisense strand to SEQ ID NO: 1346342
uaaucucagccuucccgcc

SEQ ID NO: 1346344 - RNA, 19 nt, Artificial Sequence
  Description of Artificial Sequence: Synthetic oligonucleotide
  Sense strand starting at position 2088 of SEQ ID NO: 1242422
cgggaaggcugagauuaca

SEQ ID NO: 1346345 - RNA, 19 nt, Artificial Sequence
  Description of Artificial Sequence: Synthetic oligonucleotide
  Antisense strand to SEQ ID NO: 1346344
uguaaucucagccuucccg

SEQ ID NO: 1346346 - RNA, 19 nt, Artificial Sequence
  Description of Artificial Sequence: Synthetic oligonucleotide
  Sense strand starting at position 2205 of SEQ ID NO: 1242422
gccaguagauauuaacucu

SEQ ID NO: 1346347 - RNA, 19 nt, Artificial Sequence
  Description of Artificial Sequence: Synthetic oligonucleotide
  Antisense strand to SEQ ID NO: 1346346
agaguuaauaucuacuggc

SEQ ID NO: 1346348 - RNA, 19 nt, Artificial Sequence
  Description of Artificial Sequence: Synthetic oligonucleotide
  Sense strand starting at position 2308 of SEQ ID NO: 1242422
guuugaauuugcugaaagu

SEQ ID NO: 1346349 - RNA, 19 nt, Artificial Sequence
  Description of Artificial Sequence: Synthetic oligonucleotide
  Antisense strand to SEQ ID NO: 1346348
acuuucagcaaauucaaac

SEQ ID NO: 1346350 - RNA, 19 nt, Artificial Sequence
  Description of Artificial Sequence: Synthetic oligonucleotide
  Sense strand starting at position 2317 of SEQ ID NO: 1242422
ugcugaaaguuugauguau

SEQ ID NO: 1346351 - RNA, 19 nt, Artificial Sequence
  Description of Artificial Sequence: Synthetic oligonucleotide
  Antisense strand to SEQ ID NO: 1346350
auacaucaaacuuucagca

SEQ ID NO: 1346352 - RNA, 19 nt, Artificial Sequence
  Description of Artificial Sequence: Synthetic oligonucleotide
  Sense strand starting at position 2319 of SEQ ID NO: 1242422
cugaaaguuugauguauag

SEQ ID NO: 1346353 - RNA, 19 nt, Artificial Sequence
  Description of Artificial Sequence: Synthetic oligonucleotide
  Antisense strand to SEQ ID NO: 1346352
cuauacaucaaacuuucag

SEQ ID NO: 1346354 - RNA, 19 nt, Artificial Sequence
  Description of Artificial Sequence: Synthetic oligonucleotide
  Sense strand starting at position 2325 of SEQ ID NO: 1242422
guuugauguauagggaagu

SEQ ID NO: 1346355 - RNA, 19 nt, Artificial Sequence
  Description of Artificial Sequence: Synthetic oligonucleotide
  Antisense strand to SEQ ID NO: 1346354
acuucccuauacaucaaac

SEQ ID NO: 1346356 - RNA, 19 nt, Artificial Sequence
  Description of Artificial Sequence: Synthetic oligonucleotide
  Sense strand starting at position 2326 of SEQ ID NO: 1242422
uuugauguauagggaaguu

SEQ ID NO: 1346357 - RNA, 19 nt, Artificial Sequence
  Description of Artificial Sequence: Synthetic oligonucleotide
  Antisense strand to SEQ ID NO: 1346356
aacuucccuauacaucaaa

SEQ ID NO: 1346358 - RNA, 19 nt, Artificial Sequence
  Description of Artificial Sequence: Synthetic oligonucleotide
  Sense strand starting at position 2339 of SEQ ID NO: 1242422
gaaguugacuaccgaugua

SEQ ID NO: 1346359 - RNA, 19 nt, Artificial Sequence
  Description of Artificial Sequence: Synthetic oligonucleotide
  Antisense strand to SEQ ID NO: 1346358
uacaucgguagucaacuuc

SEQ ID NO: 1346360 - RNA, 19 nt, Artificial Sequence
  Description of Artificial Sequence: Synthetic oligonucleotide
  Sense strand starting at position 2342 of SEQ ID NO: 1242422
guugacuaccgauguauga

SEQ ID NO: 1346361 - RNA, 19 nt, Artificial Sequence
  Description of Artificial Sequence: Synthetic oligonucleotide
  Antisense strand to SEQ ID NO: 1346360
ucauacaucgguagucaac

SEQ ID NO: 1346362 - RNA, 19 nt, Artificial Sequence
  Description of Artificial Sequence: Synthetic oligonucleotide
  Sense strand starting at position 2344 of SEQ ID NO: 1242422
ugacuaccgauguaugaca

SEQ ID NO: 1346363 - RNA, 19 nt, Artificial Sequence
  Description of Artificial Sequence: Synthetic oligonucleotide
  Antisense strand to SEQ ID NO: 1346362
ugucauacaucgguaguca

SEQ ID NO: 1346364 - RNA, 19 nt, Artificial Sequence
  Description of Artificial Sequence: Synthetic oligonucleotide
  Sense strand starting at position 2351 of SEQ ID NO: 1242422
cgauguaugacagaagcaa

SEQ ID NO: 1346365 - RNA, 19 nt, Artificial Sequence
  Description of Artificial Sequence: Synthetic oligonucleotide
  Antisense strand to SEQ ID NO: 1346364
uugcuucugucauacaucg

SEQ ID NO: 1346366 - RNA, 19 nt, Artificial Sequence
  Description of Artificial Sequence: Synthetic oligonucleotide
  Sense strand starting at position 2481 of SEQ ID NO: 1242422
augaaaggcuauuacuaga

SEQ ID NO: 1346367 - RNA, 19 nt, Artificial Sequence
  Description of Artificial Sequence: Synthetic oligonucleotide
  Antisense strand to SEQ ID NO: 1346366
ucuaguaauagccuuucau

SEQ ID NO: 1346368 - RNA, 19 nt, Artificial Sequence
  Description of Artificial Sequence: Synthetic oligonucleotide
  Sense strand starting at position 2489 of SEQ ID NO: 1242422
cuauuacuagacugguaaa

SEQ ID NO: 1346369 - RNA, 19 nt, Artificial Sequence
  Description of Artificial Sequence: Synthetic oligonucleotide
  Antisense strand to SEQ ID NO: 1346368
uuuaccagucuaguaauag

SEQ ID NO: 1346370 - RNA, 19 nt, Artificial Sequence
  Description of Artificial Sequence: Synthetic oligonucleotide
  Sense strand starting at position 2847 of SEQ ID NO: 1242422
ccggccuggaccugagauu

SEQ ID NO: 1346371 - RNA, 19 nt, Artificial Sequence
  Description of Artificial Sequence: Synthetic oligonucleotide
  Antisense strand to SEQ ID NO: 1346370
aaucucagguccaggccgg

SEQ ID NO: 1346372 - RNA, 19 nt, Artificial Sequence
  Description of Artificial Sequence: Synthetic oligonucleotide
  Sense strand starting at position 2901 of SEQ ID NO: 1242422
aaagcuguccacuagggua

SEQ ID NO: 1346373 - RNA, 19 nt, Artificial Sequence
  Description of Artificial Sequence: Synthetic oligonucleotide
  Antisense strand to SEQ ID NO: 1346372
uacccuaguggacagcuuu

SEQ ID NO: 1346374 - RNA, 19 nt, Artificial Sequence
  Description of Artificial Sequence: Synthetic oligonucleotide
  Sense strand starting at position 2915 of SEQ ID NO: 1242422
ggguauuuauuuggugcau

SEQ ID NO: 1346375 - RNA, 19 nt, Artificial Sequence
  Description of Artificial Sequence: Synthetic oligonucleotide
  Antisense strand to SEQ ID NO: 1346374
augcaccaaauaaauaccc

SEQ ID NO: 1346376 - RNA, 19 nt, Artificial Sequence
  Description of Artificial Sequence: Synthetic oligonucleotide
  Sense strand starting at position 2946 of SEQ ID NO: 1242422
gcucaugucugccugauuu

SEQ ID NO: 1346377 - RNA, 19 nt, Artificial Sequence
  Description of Artificial Sequence: Synthetic oligonucleotide
  Antisense strand to SEQ ID NO: 1346376
aaaucaggcagacaugagc

SEQ ID NO: 1346378 - RNA, 19 nt, Artificial Sequence
  Description of Artificial Sequence: Synthetic oligonucleotide
  Sense strand starting at position 2954 of SEQ ID NO: 1242422
cugccugauuuaugagacu

SEQ ID NO: 1346379 - RNA, 19 nt, Artificial Sequence
  Description of Artificial Sequence: Synthetic oligonucleotide
  Antisense strand to SEQ ID NO: 1346378
agucucauaaaucaggcag

SEQ ID NO: 1346380 - RNA, 19 nt, Artificial Sequence
  Description of Artificial Sequence: Synthetic oligonucleotide
  Sense strand starting at position 2957 of SEQ ID NO: 1242422
ccugauuuaugagacugac

SEQ ID NO: 1346381 - RNA, 19 nt, Artificial Sequence
  Description of Artificial Sequence: Synthetic oligonucleotide
  Antisense strand to SEQ ID NO: 1346380
gucagucucauaaaucagg

SEQ ID NO: 1346382 - RNA, 19 nt, Artificial Sequence
  Description of Artificial Sequence: Synthetic oligonucleotide
  Sense strand starting at position 3070 of SEQ ID NO: 1242422
ggaggucacaucuaauggu

SEQ ID NO: 1346383 - RNA, 19 nt, Artificial Sequence
  Description of Artificial Sequence: Synthetic oligonucleotide
  Antisense strand to SEQ ID NO: 1346382
accauuagaugugaccucc

SEQ ID NO: 1346384 - RNA, 19 nt, Artificial Sequence
  Description of Artificial Sequence: Synthetic oligonucleotide
  Sense strand starting at position 3182 of SEQ ID NO: 1242422
ggagaaauguucuaguucc

SEQ ID NO: 1346385 - RNA, 19 nt, Artificial Sequence
  Description of Artificial Sequence: Synthetic oligonucleotide
  Antisense strand to SEQ ID NO: 1346384
ggaacuagaacauuucucc

SEQ ID NO: 1346386 - RNA, 19 nt, Artificial Sequence
  Description of Artificial Sequence: Synthetic oligonucleotide
  Sense strand starting at position 3189 of SEQ ID NO: 1242422
uguucuaguuccucacuca

SEQ ID NO: 1346387 - RNA, 19 nt, Artificial Sequence
  Description of Artificial Sequence: Synthetic oligonucleotide
  Antisense strand to SEQ ID NO: 1346386
ugagugaggaacuagaaca

SEQ ID NO: 1346388 - RNA, 19 nt, Artificial Sequence
  Description of Artificial Sequence: Synthetic oligonucleotide
  Sense strand starting at position 3308 of SEQ ID NO: 1242422
guggaaguagcccaugagu

SEQ ID NO: 1346389 - RNA, 19 nt, Artificial Sequence
  Description of Artificial Sequence: Synthetic oligonucleotide
  Antisense strand to SEQ ID NO: 1346388
acucaugggcuacuuccac

SEQ ID NO: 1346390 - RNA, 19 nt, Artificial Sequence
  Description of Artificial Sequence: Synthetic oligonucleotide
  Sense strand starting at position 3310 of SEQ ID NO: 1242422
ggaaguagcccaugaguuu

SEQ ID NO: 1346391 - RNA, 19 nt, Artificial Sequence
  Description of Artificial Sequence: Synthetic oligonucleotide
  Antisense strand to SEQ ID NO: 1346390
aaacucaugggcuacuucc

SEQ ID NO: 1346392 - RNA, 19 nt, Artificial Sequence
  Description of Artificial Sequence: Synthetic oligonucleotide
  Sense strand starting at position 3385 of SEQ ID NO: 1242422
gguguagugguaugaguca

SEQ ID NO: 1346393 - RNA, 19 nt, Artificial Sequence
  Description of Artificial Sequence: Synthetic oligonucleotide
  Antisense strand to SEQ ID NO: 1346392
ugacucauaccacuacacc

SEQ ID NO: 1346394 - RNA, 19 nt, Artificial Sequence
  Description of Artificial Sequence: Synthetic oligonucleotide
  Sense strand starting at position 3390 of SEQ ID NO: 1242422
agugguaugagucaugauc

SEQ ID NO: 1346395 - RNA, 19 nt, Artificial Sequence
  Description of Artificial Sequence: Synthetic oligonucleotide
  Antisense strand to SEQ ID NO: 1346394
gaucaugacucauaccacu

SEQ ID NO: 1346396 - RNA, 19 nt, Artificial Sequence
  Description of Artificial Sequence: Synthetic oligonucleotide
  Sense strand starting at position 3559 of SEQ ID NO: 1242422
gccaguggguguuucagaa

SEQ ID NO: 1346397 - RNA, 19 nt, Artificial Sequence
  Description of Artificial Sequence: Synthetic oligonucleotide
  Antisense strand to SEQ ID NO: 1346396
uucugaaacacccacuggc

SEQ ID NO: 1346398 - RNA, 19 nt, Artificial Sequence
  Description of Artificial Sequence: Synthetic oligonucleotide
  Sense strand starting at position 3602 of SEQ ID NO: 1242422
ucagaauguuggccacaug

SEQ ID NO: 1346399 - RNA, 19 nt, Artificial Sequence
  Description of Artificial Sequence: Synthetic oligonucleotide
  Antisense strand to SEQ ID NO: 1346398
cauguggccaacauucuga

SEQ ID NO: 1346400 - RNA, 19 nt, Artificial Sequence
  Description of Artificial Sequence: Synthetic oligonucleotide
  Sense strand starting at position 104 of SEQ ID NO: 1242423
uaguuuacugcagagcuga

SEQ ID NO: 1346401 - RNA, 19 nt, Artificial Sequence
  Description of Artificial Sequence: Synthetic oligonucleotide
  Antisense strand to SEQ ID NO: 1346400
ucagcucugcaguaaacua

SEQ ID NO: 1346402 - RNA, 19 nt, Artificial Sequence
  Description of Artificial Sequence: Synthetic oligonucleotide
  Sense strand starting at position 319 of SEQ ID NO: 1242423
ugcuguaucagccagguga

SEQ ID NO: 1346403 - RNA, 19 nt, Artificial Sequence
  Description of Artificial Sequence: Synthetic oligonucleotide
  Antisense strand to SEQ ID NO: 1346402
ucaccuggcugauacagca

SEQ ID NO: 1346404 - RNA, 19 nt, Artificial Sequence
  Description of Artificial Sequence: Synthetic oligonucleotide
  Sense strand starting at position 720 of SEQ ID NO: 1242423
ccagguuauuucgacauag

SEQ ID NO: 1346405 - RNA, 19 nt, Artificial Sequence
  Description of Artificial Sequence: Synthetic oligonucleotide
  Antisense strand to SEQ ID NO: 1346404
cuaugucgaaauaaccugg

SEQ ID NO: 1346406 - RNA, 19 nt, Artificial Sequence
  Description of Artificial Sequence: Synthetic oligonucleotide
  Sense strand starting at position 829 of SEQ ID NO: 1242423
augcaaguucugcacauca

SEQ ID NO: 1346407 - RNA, 19 nt, Artificial Sequence
  Description of Artificial Sequence: Synthetic oligonucleotide
  Antisense strand to SEQ ID NO: 1346406
ugaugugcagaacuugcau

SEQ ID NO: 1346408 - RNA, 19 nt, Artificial Sequence
  Description of Artificial Sequence: Synthetic oligonucleotide
  Sense strand starting at position 831 of SEQ ID NO: 1242423
gcaaguucugcacaucauu

SEQ ID NO: 1346409 - RNA, 19 nt, Artificial Sequence
  Description of Artificial Sequence: Synthetic oligonucleotide
  Antisense strand to SEQ ID NO: 1346408
aaugaugugcagaacuugc

SEQ ID NO: 1346410 - RNA, 19 nt, Artificial Sequence
  Description of Artificial Sequence: Synthetic oligonucleotide
  Sense strand starting at position 1413 of SEQ ID NO: 1242423
cgcaguggucacuauuaua

SEQ ID NO: 1346411 - RNA, 19 nt, Artificial Sequence
  Description of Artificial Sequence: Synthetic oligonucleotide
  Antisense strand to SEQ ID NO: 1346410
uauaauagugaccacugcg

SEQ ID NO: 1346412 - RNA, 19 nt, Artificial Sequence
  Description of Artificial Sequence: Synthetic oligonucleotide
  Sense strand starting at position 1567 of SEQ ID NO: 1242423
cugcaaucacccugaugua

SEQ ID NO: 1346413 - RNA, 19 nt, Artificial Sequence
  Description of Artificial Sequence: Synthetic oligonucleotide
  Antisense strand to SEQ ID NO: 1346412
uacaucagggugauugcag

SEQ ID NO: 1346414 - RNA, 19 nt, Artificial Sequence
  Description of Artificial Sequence: Synthetic oligonucleotide
  Sense strand starting at position 1761 of SEQ ID NO: 1242423
acagcaagccucugaacau

SEQ ID NO: 1346415 - RNA, 19 nt, Artificial Sequence
  Description of Artificial Sequence: Synthetic oligonucleotide
  Antisense strand to SEQ ID NO: 1346414
auguucagaggcuugcugu

SEQ ID NO: 1346416 - RNA, 19 nt, Artificial Sequence
  Description of Artificial Sequence: Synthetic oligonucleotide
  Sense strand starting at position 1782 of SEQ ID NO: 1242423
cggaucugguucuccagaa

SEQ ID NO: 1346417 - RNA, 19 nt, Artificial Sequence
  Description of Artificial Sequence: Synthetic oligonucleotide
  Antisense strand to SEQ ID NO: 1346416
uucuggagaaccagauccg

SEQ ID NO: 1346418 - RNA, 19 nt, Artificial Sequence
  Description of Artificial Sequence: Synthetic oligonucleotide
  Sense strand starting at position 1783 of SEQ ID NO: 1242423
ggaucugguucuccagaac

SEQ ID NO: 1346419 - RNA, 19 nt, Artificial Sequence
  Description of Artificial Sequence: Synthetic oligonucleotide
  Antisense strand to SEQ ID NO: 1346418
guucuggagaaccagaucc

SEQ ID NO: 1346420 - RNA, 19 nt, Artificial Sequence
  Description of Artificial Sequence: Synthetic oligonucleotide
  Sense strand starting at position 2395 of SEQ ID NO: 1242423
gcgccauaaccacaaucaa

SEQ ID NO: 1346421 - RNA, 19 nt, Artificial Sequence
  Description of Artificial Sequence: Synthetic oligonucleotide
  Antisense strand to SEQ ID NO: 1346420
uugauugugguuauggcgc

SEQ ID NO: 1346422 - RNA, 19 nt, Artificial Sequence
  Description of Artificial Sequence: Synthetic oligonucleotide
  Sense strand starting at position 2415 of SEQ ID NO: 1242423
gcaaauacgccagacuuga

SEQ ID NO: 1346423 - RNA, 19 nt, Artificial Sequence
  Description of Artificial Sequence: Synthetic oligonucleotide
  Antisense strand to SEQ ID NO: 1346422
ucaagucuggcguauuugc

SEQ ID NO: 1346424 - RNA, 19 nt, Artificial Sequence
  Description of Artificial Sequence: Synthetic oligonucleotide
  Sense strand starting at position 2736 of SEQ ID NO: 1242423
aaucaaugauagcuggagu

SEQ ID NO: 1346425 - RNA, 19 nt, Artificial Sequence
  Description of Artificial Sequence: Synthetic oligonucleotide
  Antisense strand to SEQ ID NO: 1346424
acuccagcuaucauugauu

SEQ ID NO: 1346426 - RNA, 19 nt, Artificial Sequence
  Description of Artificial Sequence: Synthetic oligonucleotide
  Sense strand starting at position 2826 of SEQ ID NO: 1242423
gcagaaauaacggaagcau

SEQ ID NO: 1346427 - RNA, 19 nt, Artificial Sequence
  Description of Artificial Sequence: Synthetic oligonucleotide
  Antisense strand to SEQ ID NO: 1346426
augcuuccguuauuucugc

SEQ ID NO: 1346428 - RNA, 19 nt, Artificial Sequence
  Description of Artificial Sequence: Synthetic oligonucleotide
  Sense strand starting at position 2956 of SEQ ID NO: 1242423
ucaauugcccauuaucgaa

SEQ ID NO: 1346429 - RNA, 19 nt, Artificial Sequence
  Description of Artificial Sequence: Synthetic oligonucleotide
  Antisense strand to SEQ ID NO: 1346428
uucgauaaugggcaauuga

SEQ ID NO: 1346430 - RNA, 19 nt, Artificial Sequence
  Description of Artificial Sequence: Synthetic oligonucleotide
  Sense strand starting at position 2983 of SEQ ID NO: 1242423
ggugaugugaguggagguu

SEQ ID NO: 1346431 - RNA, 19 nt, Artificial Sequence
  Description of Artificial Sequence: Synthetic oligonucleotide
  Antisense strand to SEQ ID NO: 1346430
aaccuccacucacaucacc

SEQ ID NO: 1346432 - RNA, 19 nt, Artificial Sequence
  Description of Artificial Sequence: Synthetic oligonucleotide
  Sense strand starting at position 2989 of SEQ ID NO: 1242423
gugaguggagguugacuaa

SEQ ID NO: 1346433 - RNA, 19 nt, Artificial Sequence
  Description of Artificial Sequence: Synthetic oligonucleotide
  Antisense strand to SEQ ID NO: 1346432
uuagucaaccuccacucac

SEQ ID NO: 1346434 - RNA, 19 nt, Artificial Sequence
  Description of Artificial Sequence: Synthetic oligonucleotide
  Sense strand starting at position 2998 of SEQ ID NO: 1242423
gguugacuaaaugguuaaa

SEQ ID NO: 1346435 - RNA, 19 nt, Artificial Sequence
  Description of Artificial Sequence: Synthetic oligonucleotide
  Antisense strand to SEQ ID NO: 1346434
uuuaaccauuuagucaacc

SEQ ID NO: 1346436 - RNA, 19 nt, Artificial Sequence
  Description of Artificial Sequence: Synthetic oligonucleotide
  Sense strand starting at position 3000 of SEQ ID NO: 1242423
uugacuaaaugguuaaauc

SEQ ID NO: 1346437 - RNA, 19 nt, Artificial Sequence
  Description of Artificial Sequence: Synthetic oligonucleotide
  Antisense strand to SEQ ID NO: 1346436
gauuuaaccauuuagucaa

SEQ ID NO: 1346438 - RNA, 19 nt, Artificial Sequence
  Description of Artificial Sequence: Synthetic oligonucleotide
  Sense strand starting at position 3082 of SEQ ID NO: 1242423
gaggcuuaucaaugcugac

SEQ ID NO: 1346439 - RNA, 19 nt, Artificial Sequence
  Description of Artificial Sequence: Synthetic oligonucleotide
  Antisense strand to SEQ ID NO: 1346438
gucagcauugauaagccuc

SEQ ID NO: 1346440 - RNA, 19 nt, Artificial Sequence
  Description of Artificial Sequence: Synthetic oligonucleotide
  Sense strand starting at position 3118 of SEQ ID NO: 1242423
cucagaaacuguguaaugu

SEQ ID NO: 1346441 - RNA, 19 nt, Artificial Sequence
  Description of Artificial Sequence: Synthetic oligonucleotide
  Antisense strand to SEQ ID NO: 1346440
acauuacacaguuucugag

SEQ ID NO: 1346442 - RNA, 19 nt, Artificial Sequence
  Description of Artificial Sequence: Synthetic oligonucleotide
  Sense strand starting at position 3119 of SEQ ID NO: 1242423
ucagaaacuguguaauguu

SEQ ID NO: 1346443 - RNA, 19 nt, Artificial Sequence
  Description of Artificial Sequence: Synthetic oligonucleotide
  Antisense strand to SEQ ID NO: 1346442
aacauuacacaguuucuga

SEQ ID NO: 1346444 - RNA, 19 nt, Artificial Sequence
  Description of Artificial Sequence: Synthetic oligonucleotide
  Sense strand starting at position 3128 of SEQ ID NO: 1242423
guguaauguuccucacaga

SEQ ID NO: 1346445 - RNA, 19 nt, Artificial Sequence
  Description of Artificial Sequence: Synthetic oligonucleotide
  Antisense strand to SEQ ID NO: 1346444
ucugugaggaacauuacac

SEQ ID NO: 1346446 - RNA, 19 nt, Artificial Sequence
  Description of Artificial Sequence: Synthetic oligonucleotide
  Sense strand starting at position 3129 of SEQ ID NO: 1242423
uguaauguuccucacagag

SEQ ID NO: 1346447 - RNA, 19 nt, Artificial Sequence
  Description of Artificial Sequence: Synthetic oligonucleotide
  Antisense strand to SEQ ID NO: 1346446
cucugugaggaacauuaca

SEQ ID NO: 1346448 - RNA, 19 nt, Artificial Sequence
  Description of Artificial Sequence: Synthetic oligonucleotide
  Sense strand starting at position 3190 of SEQ ID NO: 1242423
augcaauauggcugaugga

SEQ ID NO: 1346449 - RNA, 19 nt, Artificial Sequence
  Description of Artificial Sequence: Synthetic oligonucleotide
  Antisense strand to SEQ ID NO: 1346448
uccaucagccauauugcau

SEQ ID NO: 1346450 - RNA, 19 nt, Artificial Sequence
  Description of Artificial Sequence: Synthetic oligonucleotide
  Sense strand starting at position 3191 of SEQ ID NO: 1242423
ugcaauauggcugauggaa

SEQ ID NO: 1346451 - RNA, 19 nt, Artificial Sequence
  Description of Artificial Sequence: Synthetic oligonucleotide
  Antisense strand to SEQ ID NO: 1346450
uuccaucagccauauugca

SEQ ID NO: 1346452 - RNA, 19 nt, Artificial Sequence
  Description of Artificial Sequence: Synthetic oligonucleotide
  Sense strand starting at position 3216 of SEQ ID NO: 1242423
auguauuaggcugaaucau

SEQ ID NO: 1346453 - RNA, 19 nt, Artificial Sequence
  Description of Artificial Sequence: Synthetic oligonucleotide
  Antisense strand to SEQ ID NO: 1346452
augauucagccuaauacau

SEQ ID NO: 1346454 - RNA, 19 nt, Artificial Sequence
  Description of Artificial Sequence: Synthetic oligonucleotide
  Sense strand starting at position 3321 of SEQ ID NO: 1242423
augggaaguugacucugau

SEQ ID NO: 1346455 - RNA, 19 nt, Artificial Sequence
  Description of Artificial Sequence: Synthetic oligonucleotide
  Antisense strand to SEQ ID NO: 1346454
aucagagucaacuucccau

SEQ ID NO: 1346456 - RNA, 19 nt, Artificial Sequence
  Description of Artificial Sequence: Synthetic oligonucleotide
  Sense strand starting at position 3324 of SEQ ID NO: 1242423
ggaaguugacucugaucac

SEQ ID NO: 1346457 - RNA, 19 nt, Artificial Sequence
  Description of Artificial Sequence: Synthetic oligonucleotide
  Antisense strand to SEQ ID NO: 1346456
gugaucagagucaacuucc

SEQ ID NO: 1346458 - RNA, 19 nt, Artificial Sequence
  Description of Artificial Sequence: Synthetic oligonucleotide
  Sense strand starting at position 3333 of SEQ ID NO: 1242423
cucugaucacgggagucaa

SEQ ID NO: 1346459 - RNA, 19 nt, Artificial Sequence
  Description of Artificial Sequence: Synthetic oligonucleotide
  Antisense strand to SEQ ID NO: 1346458
uugacucccgugaucagag

SEQ ID NO: 1346460 - RNA, 19 nt, Artificial Sequence
  Description of Artificial Sequence: Synthetic oligonucleotide
  Sense strand starting at position 3717 of SEQ ID NO: 1242423
accauuauaguccagugau

SEQ ID NO: 1346461 - RNA, 19 nt, Artificial Sequence
  Description of Artificial Sequence: Synthetic oligonucleotide
  Antisense strand to SEQ ID NO: 1346460
aucacuggacuauaauggu

SEQ ID NO: 1346462 - RNA, 19 nt, Artificial Sequence
  Description of Artificial Sequence: Synthetic oligonucleotide
  Sense strand starting at position 3720 of SEQ ID NO: 1242423
auuauaguccagugaugaa

SEQ ID NO: 1346463 - RNA, 19 nt, Artificial Sequence
  Description of Artificial Sequence: Synthetic oligonucleotide
  Antisense strand to SEQ ID NO: 1346462
uucaucacuggacuauaau

SEQ ID NO: 1346464 - RNA, 19 nt, Artificial Sequence
  Description of Artificial Sequence: Synthetic oligonucleotide
  Sense strand starting at position 3799 of SEQ ID NO: 1242423
auguuacuuugagcaaguu

SEQ ID NO: 1346465 - RNA, 19 nt, Artificial Sequence
  Description of Artificial Sequence: Synthetic oligonucleotide
  Antisense strand to SEQ ID NO: 1346464
aacuugcucaaaguaacau

SEQ ID NO: 1346466 - RNA, 19 nt, Artificial Sequence
  Description of Artificial Sequence: Synthetic oligonucleotide
  Sense strand starting at position 3800 of SEQ ID NO: 1242423
uguuacuuugagcaaguua

SEQ ID NO: 1346467 - RNA, 19 nt, Artificial Sequence
  Description of Artificial Sequence: Synthetic oligonucleotide
  Antisense strand to SEQ ID NO: 1346466
uaacuugcucaaaguaaca

SEQ ID NO: 1346468 - RNA, 19 nt, Artificial Sequence
  Description of Artificial Sequence: Synthetic oligonucleotide
  Sense strand starting at position 3860 of SEQ ID NO: 1242423
aagggauucuguuuacuuu

SEQ ID NO: 1346469 - RNA, 19 nt, Artificial Sequence
  Description of Artificial Sequence: Synthetic oligonucleotide
  Antisense strand to SEQ ID NO: 1346468
aaaguaaacagaaucccuu

SEQ ID NO: 1346470 - RNA, 19 nt, Artificial Sequence
  Description of Artificial Sequence: Synthetic oligonucleotide
  Sense strand starting at position 3861 of SEQ ID NO: 1242423
agggauucuguuuacuuua

SEQ ID NO: 1346471 - RNA, 19 nt, Artificial Sequence
  Description of Artificial Sequence: Synthetic oligonucleotide
  Antisense strand to SEQ ID NO: 1346470
uaaaguaaacagaaucccu

SEQ ID NO: 1346472 - RNA, 19 nt, Artificial Sequence
  Description of Artificial Sequence: Synthetic oligonucleotide
  Sense strand starting at position 3863 of SEQ ID NO: 1242423
ggauucuguuuacuuuaua

SEQ ID NO: 1346473 - RNA, 19 nt, Artificial Sequence
  Description of Artificial Sequence: Synthetic oligonucleotide
  Antisense strand to SEQ ID NO: 1346472
uauaaaguaaacagaaucc

SEQ ID NO: 1346474 - RNA, 19 nt, Artificial Sequence
  Description of Artificial Sequence: Synthetic oligonucleotide
  Sense strand starting at position 3928 of SEQ ID NO: 1242423
ccuaguauaagcuggguaa

SEQ ID NO: 1346475 - RNA, 19 nt, Artificial Sequence
  Description of Artificial Sequence: Synthetic oligonucleotide
  Antisense strand to SEQ ID NO: 1346474
uuacccagcuuauacuagg

SEQ ID NO: 1346476 - RNA, 19 nt, Artificial Sequence
  Description of Artificial Sequence: Synthetic oligonucleotide
  Sense strand starting at position 3929 of SEQ ID NO: 1242423
cuaguauaagcuggguaaa

SEQ ID NO: 1346477 - RNA, 19 nt, Artificial Sequence
  Description of Artificial Sequence: Synthetic oligonucleotide
  Antisense strand to SEQ ID NO: 1346476
uuuacccagcuuauacuag

SEQ ID NO: 1346478 - RNA, 19 nt, Artificial Sequence
  Description of Artificial Sequence: Synthetic oligonucleotide
  Sense strand starting at position 3981 of SEQ ID NO: 1242423
aguacuacuucuucuagga

SEQ ID NO: 1346479 - RNA, 19 nt, Artificial Sequence
  Description of Artificial Sequence: Synthetic oligonucleotide
  Antisense strand to SEQ ID NO: 1346478
uccuagaagaaguaguacu

SEQ ID NO: 1346480 - RNA, 19 nt, Artificial Sequence
  Description of Artificial Sequence: Synthetic oligonucleotide
  Sense strand starting at position 39 of SEQ ID NO: 1242424
uaguuuacugcagagcuga

SEQ ID NO: 1346481 - RNA, 19 nt, Artificial Sequence
  Description of Artificial Sequence: Synthetic oligonucleotide
  Antisense strand to SEQ ID NO: 1346480
ucagcucugcaguaaacua

SEQ ID NO: 1346482 - RNA, 19 nt, Artificial Sequence
  Description of Artificial Sequence: Synthetic oligonucleotide
  Sense strand starting at position 254 of SEQ ID NO: 1242424
ugcuguaucagccagguga

SEQ ID NO: 1346483 - RNA, 19 nt, Artificial Sequence
  Description of Artificial Sequence: Synthetic oligonucleotide
  Antisense strand to SEQ ID NO: 1346482
ucaccuggcugauacagca

SEQ ID NO: 1346484 - RNA, 19 nt, Artificial Sequence
  Description of Artificial Sequence: Synthetic oligonucleotide
  Sense strand starting at position 655 of SEQ ID NO: 1242424
ccagguuauuucgacauag

SEQ ID NO: 1346485 - RNA, 19 nt, Artificial Sequence
  Description of Artificial Sequence: Synthetic oligonucleotide
  Antisense strand to SEQ ID NO: 1346484
cuaugucgaaauaaccugg

SEQ ID NO: 1346486 - RNA, 19 nt, Artificial Sequence
  Description of Artificial Sequence: Synthetic oligonucleotide
  Sense strand starting at position 764 of SEQ ID NO: 1242424
augcaaguucugcacauca

SEQ ID NO: 1346487 - RNA, 19 nt, Artificial Sequence
  Description of Artificial Sequence: Synthetic oligonucleotide
  Antisense strand to SEQ ID NO: 1346486
ugaugugcagaacuugcau

SEQ ID NO: 1346488 - RNA, 19 nt, Artificial Sequence
  Description of Artificial Sequence: Synthetic oligonucleotide
  Sense strand starting at position 766 of SEQ ID NO: 1242424
gcaaguucugcacaucauu

SEQ ID NO: 1346489 - RNA, 19 nt, Artificial Sequence
  Description of Artificial Sequence: Synthetic oligonucleotide
  Antisense strand to SEQ ID NO: 1346488
aaugaugugcagaacuugc

SEQ ID NO: 1346490 - RNA, 19 nt, Artificial Sequence
  Description of Artificial Sequence: Synthetic oligonucleotide
  Sense strand starting at position 1348 of SEQ ID NO: 1242424
cgcaguggucacuauuaua

SEQ ID NO: 1346491 - RNA, 19 nt, Artificial Sequence
  Description of Artificial Sequence: Synthetic oligonucleotide
  Antisense strand to SEQ ID NO: 1346490
uauaauagugaccacugcg

SEQ ID NO: 1346492 - RNA, 19 nt, Artificial Sequence
  Description of Artificial Sequence: Synthetic oligonucleotide
  Sense strand starting at position 1502 of SEQ ID NO: 1242424
cugcaaucacccugaugua

SEQ ID NO: 1346493 - RNA, 19 nt, Artificial Sequence
  Description of Artificial Sequence: Synthetic oligonucleotide
  Antisense strand to SEQ ID NO: 1346492
uacaucagggugauugcag

SEQ ID NO: 1346494 - RNA, 19 nt, Artificial Sequence
  Description of Artificial Sequence: Synthetic oligonucleotide
  Sense strand starting at position 1696 of SEQ ID NO: 1242424
acagcaagccucugaacau

SEQ ID NO: 1346495 - RNA, 19 nt, Artificial Sequence
  Description of Artificial Sequence: Synthetic oligonucleotide
  Antisense strand to SEQ ID NO: 1346494
auguucagaggcuugcugu

SEQ ID NO: 1346496 - RNA, 19 nt, Artificial Sequence
  Description of Artificial Sequence: Synthetic oligonucleotide
  Sense strand starting at position 1717 of SEQ ID NO: 1242424
cggaucugguucuccagaa

SEQ ID NO: 1346497 - RNA, 19 nt, Artificial Sequence
  Description of Artificial Sequence: Synthetic oligonucleotide
  Antisense strand to SEQ ID NO: 1346496
uucuggagaaccagauccg

SEQ ID NO: 1346498 - RNA, 19 nt, Artificial Sequence
  Description of Artificial Sequence: Synthetic oligonucleotide
  Sense strand starting at position 1718 of SEQ ID NO: 1242424
ggaucugguucuccagaac

SEQ ID NO: 1346499 - RNA, 19 nt, Artificial Sequence
  Description of Artificial Sequence: Synthetic oligonucleotide
  Antisense strand to SEQ ID NO: 1346498
guucuggagaaccagaucc

SEQ ID NO: 1346500 - RNA, 19 nt, Artificial Sequence
  Description of Artificial Sequence: Synthetic oligonucleotide
  Sense strand starting at position 2330 of SEQ ID NO: 1242424
gcgccauaaccacaaucaa

SEQ ID NO: 1346501 - RNA, 19 nt, Artificial Sequence
  Description of Artificial Sequence: Synthetic oligonucleotide
  Antisense strand to SEQ ID NO: 1346500
uugauugugguuauggcgc

SEQ ID NO: 1346502 - RNA, 19 nt, Artificial Sequence
  Description of Artificial Sequence: Synthetic oligonucleotide
  Sense strand starting at position 2350 of SEQ ID NO: 1242424
gcaaauacgccagacuuga

SEQ ID NO: 1346503 - RNA, 19 nt, Artificial Sequence
  Description of Artificial Sequence: Synthetic oligonucleotide
  Antisense strand to SEQ ID NO: 1346502
ucaagucuggcguauuugc

SEQ ID NO: 1346504 - RNA, 19 nt, Artificial Sequence
  Description of Artificial Sequence: Synthetic oligonucleotide
  Sense strand starting at position 2671 of SEQ ID NO: 1242424
aaucaaugauagcuggagu

SEQ ID NO: 1346505 - RNA, 19 nt, Artificial Sequence
  Description of Artificial Sequence: Synthetic oligonucleotide
  Antisense strand to SEQ ID NO: 1346504
acuccagcuaucauugauu

SEQ ID NO: 1346506 - RNA, 19 nt, Artificial Sequence
  Description of Artificial Sequence: Synthetic oligonucleotide
  Sense strand starting at position 2761 of SEQ ID NO: 1242424
gcagaaauaacggaagcau

SEQ ID NO: 1346507 - RNA, 19 nt, Artificial Sequence
  Description of Artificial Sequence: Synthetic oligonucleotide
  Antisense strand to SEQ ID NO: 1346506
augcuuccguuauuucugc

SEQ ID NO: 1346508 - RNA, 19 nt, Artificial Sequence
  Description of Artificial Sequence: Synthetic oligonucleotide
  Sense strand starting at position 2891 of SEQ ID NO: 1242424
ucaauugcccauuaucgaa

SEQ ID NO: 1346509 - RNA, 19 nt, Artificial Sequence
  Description of Artificial Sequence: Synthetic oligonucleotide
  Antisense strand to SEQ ID NO: 1346508
uucgauaaugggcaauuga

SEQ ID NO: 1346510 - RNA, 19 nt, Artificial Sequence
  Description of Artificial Sequence: Synthetic oligonucleotide
  Sense strand starting at position 2918 of SEQ ID NO: 1242424
ggugaugugaguggagguu

SEQ ID NO: 1346511 - RNA, 19 nt, Artificial Sequence
  Description of Artificial Sequence: Synthetic oligonucleotide
  Antisense strand to SEQ ID NO: 1346510
aaccuccacucacaucacc

SEQ ID NO: 1346512 - RNA, 19 nt, Artificial Sequence
  Description of Artificial Sequence: Synthetic oligonucleotide
  Sense strand starting at position 2924 of SEQ ID NO: 1242424
gugaguggagguugacuaa

SEQ ID NO: 1346513 - RNA, 19 nt, Artificial Sequence
  Description of Artificial Sequence: Synthetic oligonucleotide
  Antisense strand to SEQ ID NO: 1346512
uuagucaaccuccacucac

SEQ ID NO: 1346514 - RNA, 19 nt, Artificial Sequence
  Description of Artificial Sequence: Synthetic oligonucleotide
  Sense strand starting at position 2933 of SEQ ID NO: 1242424
gguugacuaaaugguuaaa

SEQ ID NO: 1346515 - RNA, 19 nt, Artificial Sequence
  Description of Artificial Sequence: Synthetic oligonucleotide
  Antisense strand to SEQ ID NO: 1346514
uuuaaccauuuagucaacc

SEQ ID NO: 1346516 - RNA, 19 nt, Artificial Sequence
  Description of Artificial Sequence: Synthetic oligonucleotide
  Sense strand starting at position 2935 of SEQ ID NO: 1242424
uugacuaaaugguuaaauc

SEQ ID NO: 1346517 - RNA, 19 nt, Artificial Sequence
  Description of Artificial Sequence: Synthetic oligonucleotide
  Antisense strand to SEQ ID NO: 1346516
gauuuaaccauuuagucaa

SEQ ID NO: 1346518 - RNA, 19 nt, Artificial Sequence
  Description of Artificial Sequence: Synthetic oligonucleotide
  Sense strand starting at position 3017 of SEQ ID NO: 1242424
gaggcuuaucaaugcugac

SEQ ID NO: 1346519 - RNA, 19 nt, Artificial Sequence
  Description of Artificial Sequence: Synthetic oligonucleotide
  Antisense strand to SEQ ID NO: 1346518
gucagcauugauaagccuc

SEQ ID NO: 1346520 - RNA, 19 nt, Artificial Sequence
  Description of Artificial Sequence: Synthetic oligonucleotide
  Sense strand starting at position 3053 of SEQ ID NO: 1242424
cucagaaacuguguaaugu

SEQ ID NO: 1346521 - RNA, 19 nt, Artificial Sequence
  Description of Artificial Sequence: Synthetic oligonucleotide
  Antisense strand to SEQ ID NO: 1346520
acauuacacaguuucugag

SEQ ID NO: 1346522 - RNA, 19 nt, Artificial Sequence
  Description of Artificial Sequence: Synthetic oligonucleotide
  Sense strand starting at position 3054 of SEQ ID NO: 1242424
ucagaaacuguguaauguu

SEQ ID NO: 1346523 - RNA, 19 nt, Artificial Sequence
  Description of Artificial Sequence: Synthetic oligonucleotide
  Antisense strand to SEQ ID NO: 1346522
aacauuacacaguuucuga

SEQ ID NO: 1346524 - RNA, 19 nt, Artificial Sequence
  Description of Artificial Sequence: Synthetic oligonucleotide
  Sense strand starting at position 3063 of SEQ ID NO: 1242424
guguaauguuccucacaga

SEQ ID NO: 1346525 - RNA, 19 nt, Artificial Sequence
  Description of Artificial Sequence: Synthetic oligonucleotide
  Antisense strand to SEQ ID NO: 1346524
ucugugaggaacauuacac

SEQ ID NO: 1346526 - RNA, 19 nt, Artificial Sequence
  Description of Artificial Sequence: Synthetic oligonucleotide
  Sense strand starting at position 3064 of SEQ ID NO: 1242424
uguaauguuccucacagag

SEQ ID NO: 1346527 - RNA, 19 nt, Artificial Sequence
  Description of Artificial Sequence: Synthetic oligonucleotide
  Antisense strand to SEQ ID NO: 1346526
cucugugaggaacauuaca

SEQ ID NO: 1346528 - RNA, 19 nt, Artificial Sequence
  Description of Artificial Sequence: Synthetic oligonucleotide
  Sense strand starting at position 3125 of SEQ ID NO: 1242424
augcaauauggcugaugga

SEQ ID NO: 1346529 - RNA, 19 nt, Artificial Sequence
  Description of Artificial Sequence: Synthetic oligonucleotide
  Antisense strand to SEQ ID NO: 1346528
uccaucagccauauugcau

SEQ ID NO: 1346530 - RNA, 19 nt, Artificial Sequence
  Description of Artificial Sequence: Synthetic oligonucleotide
  Sense strand starting at position 3126 of SEQ ID NO: 1242424
ugcaauauggcugauggaa

SEQ ID NO: 1346531 - RNA, 19 nt, Artificial Sequence
  Description of Artificial Sequence: Synthetic oligonucleotide
  Antisense strand to SEQ ID NO: 1346530
uuccaucagccauauugca

SEQ ID NO: 1346532 - RNA, 19 nt, Artificial Sequence
  Description of Artificial Sequence: Synthetic oligonucleotide
  Sense strand starting at position 3151 of SEQ ID NO: 1242424
auguauuaggcugaaucau

SEQ ID NO: 1346533 - RNA, 19 nt, Artificial Sequence
  Description of Artificial Sequence: Synthetic oligonucleotide
  Antisense strand to SEQ ID NO: 1346532
augauucagccuaauacau

SEQ ID NO: 1346534 - RNA, 19 nt, Artificial Sequence
  Description of Artificial Sequence: Synthetic oligonucleotide
  Sense strand starting at position 3256 of SEQ ID NO: 1242424
augggaaguugacucugau

SEQ ID NO: 1346535 - RNA, 19 nt, Artificial Sequence
  Description of Artificial Sequence: Synthetic oligonucleotide
  Antisense strand to SEQ ID NO: 1346534
aucagagucaacuucccau

SEQ ID NO: 1346536 - RNA, 19 nt, Artificial Sequence
  Description of Artificial Sequence: Synthetic oligonucleotide
  Sense strand starting at position 3259 of SEQ ID NO: 1242424
ggaaguugacucugaucac

SEQ ID NO: 1346537 - RNA, 19 nt, Artificial Sequence
  Description of Artificial Sequence: Synthetic oligonucleotide
  Antisense strand to SEQ ID NO: 1346536
gugaucagagucaacuucc

SEQ ID NO: 1346538 - RNA, 19 nt, Artificial Sequence
  Description of Artificial Sequence: Synthetic oligonucleotide
  Sense strand starting at position 3268 of SEQ ID NO: 1242424
cucugaucacgggagucaa

SEQ ID NO: 1346539 - RNA, 19 nt, Artificial Sequence
  Description of Artificial Sequence: Synthetic oligonucleotide
  Antisense strand to SEQ ID NO: 1346538
uugacucccgugaucagag

SEQ ID NO: 1346540 - RNA, 19 nt, Artificial Sequence
  Description of Artificial Sequence: Synthetic oligonucleotide
  Sense strand starting at position 3652 of SEQ ID NO: 1242424
accauuauaguccagugau

SEQ ID NO: 1346541 - RNA, 19 nt, Artificial Sequence
  Description of Artificial Sequence: Synthetic oligonucleotide
  Antisense strand to SEQ ID NO: 1346540
aucacuggacuauaauggu

SEQ ID NO: 1346542 - RNA, 19 nt, Artificial Sequence
  Description of Artificial Sequence: Synthetic oligonucleotide
  Sense strand starting at position 3655 of SEQ ID NO: 1242424
auuauaguccagugaugaa

SEQ ID NO: 1346543 - RNA, 19 nt, Artificial Sequence
  Description of Artificial Sequence: Synthetic oligonucleotide
  Antisense strand to SEQ ID NO: 1346542
uucaucacuggacuauaau

SEQ ID NO: 1346544 - RNA, 19 nt, Artificial Sequence
  Description of Artificial Sequence: Synthetic oligonucleotide
  Sense strand starting at position 3735 of SEQ ID NO: 1242424
uguuacuuugagcaaguua

SEQ ID NO: 1346545 - RNA, 19 nt, Artificial Sequence
  Description of Artificial Sequence: Synthetic oligonucleotide
  Antisense strand to SEQ ID NO: 1346544
uaacuugcucaaaguaaca

SEQ ID NO: 1346546 - RNA, 19 nt, Artificial Sequence
  Description of Artificial Sequence: Synthetic oligonucleotide
  Sense strand starting at position 3795 of SEQ ID NO: 1242424
aagggauucuguuuacuuu

SEQ ID NO: 1346547 - RNA, 19 nt, Artificial Sequence
  Description of Artificial Sequence: Synthetic oligonucleotide
  Antisense strand to SEQ ID NO: 1346546
aaaguaaacagaaucccuu

SEQ ID NO: 1346548 - RNA, 19 nt, Artificial Sequence
  Description of Artificial Sequence: Synthetic oligonucleotide
  Sense strand starting at position 3796 of SEQ ID NO: 1242424
agggauucuguuuacuuua

SEQ ID NO: 1346549 - RNA, 19 nt, Artificial Sequence
  Description of Artificial Sequence: Synthetic oligonucleotide
  Antisense strand to SEQ ID NO: 1346548
uaaaguaaacagaaucccu

SEQ ID NO: 1346550 - RNA, 19 nt, Artificial Sequence
  Description of Artificial Sequence: Synthetic oligonucleotide
  Sense strand starting at position 3798 of SEQ ID NO: 1242424
ggauucuguuuacuuuaua

SEQ ID NO: 1346551 - RNA, 19 nt, Artificial Sequence
  Description of Artificial Sequence: Synthetic oligonucleotide
  Antisense strand to SEQ ID NO: 1346550
uauaaaguaaacagaaucc

SEQ ID NO: 1346552 - RNA, 19 nt, Artificial Sequence
  Description of Artificial Sequence: Synthetic oligonucleotide
  Sense strand starting at position 3863 of SEQ ID NO: 1242424
ccuaguauaagcuggguaa

SEQ ID NO: 1346553 - RNA, 19 nt, Artificial Sequence
  Description of Artificial Sequence: Synthetic oligonucleotide
  Antisense strand to SEQ ID NO: 1346552
uuacccagcuuauacuagg

SEQ ID NO: 1346554 - RNA, 19 nt, Artificial Sequence
  Description of Artificial Sequence: Synthetic oligonucleotide
  Sense strand starting at position 3864 of SEQ ID NO: 1242424
cuaguauaagcuggguaaa

SEQ ID NO: 1346555 - RNA, 19 nt, Artificial Sequence
  Description of Artificial Sequence: Synthetic oligonucleotide
  Antisense strand to SEQ ID NO: 1346554
uuuacccagcuuauacuag

SEQ ID NO: 1346556 - RNA, 19 nt, Artificial Sequence
  Description of Artificial Sequence: Synthetic oligonucleotide
  Sense strand starting at position 3916 of SEQ ID NO: 1242424
aguacuacuucuucuagga

SEQ ID NO: 1346557 - RNA, 19 nt, Artificial Sequence
  Description of Artificial Sequence: Synthetic oligonucleotide
  Antisense strand to SEQ ID NO: 1346556
uccuagaagaaguaguacu

SEQ ID NO: 1346558 - RNA, 19 nt, Artificial Sequence
  Description of Artificial Sequence: Synthetic oligonucleotide
  Sense strand starting at position 3935 of SEQ ID NO: 1242424
gcaggaauuggguguucau

SEQ ID NO: 1346559 - RNA, 19 nt, Artificial Sequence
  Description of Artificial Sequence: Synthetic oligonucleotide
  Antisense strand to SEQ ID NO: 1346558
augaacacccaauuccugc

SEQ ID NO: 1346560 - RNA, 19 nt, Artificial Sequence
  Description of Artificial Sequence: Synthetic oligonucleotide
  Sense strand starting at position 34 of SEQ ID NO: 1242425
ccacauguugcauaaagaa

SEQ ID NO: 1346561 - RNA, 19 nt, Artificial Sequence
  Description of Artificial Sequence: Synthetic oligonucleotide
  Antisense strand to SEQ ID NO: 1346560
uucuuuaugcaacaugugg

SEQ ID NO: 1346562 - RNA, 19 nt, Artificial Sequence
  Description of Artificial Sequence: Synthetic oligonucleotide
  Sense strand starting at position 170 of SEQ ID NO: 1242425
uaccaagugguaugaguaa

SEQ ID NO: 1346563 - RNA, 19 nt, Artificial Sequence
  Description of Artificial Sequence: Synthetic oligonucleotide
  Antisense strand to SEQ ID NO: 1346562
uuacucauaccacuuggua

SEQ ID NO: 1346564 - RNA, 19 nt, Artificial Sequence
  Description of Artificial Sequence: Synthetic oligonucleotide
  Sense strand starting at position 221 of SEQ ID NO: 1242425
cugguuccauaacugauua

SEQ ID NO: 1346565 - RNA, 19 nt, Artificial Sequence
  Description of Artificial Sequence: Synthetic oligonucleotide
  Antisense strand to SEQ ID NO: 1346564
uaaucaguuauggaaccag

SEQ ID NO: 1346566 - RNA, 19 nt, Artificial Sequence
  Description of Artificial Sequence: Synthetic oligonucleotide
  Sense strand starting at position 285 of SEQ ID NO: 1242425
uuauuagagacccggauau

SEQ ID NO: 1346567 - RNA, 19 nt, Artificial Sequence
  Description of Artificial Sequence: Synthetic oligonucleotide
  Antisense strand to SEQ ID NO: 1346566
auauccgggucucuaauaa

SEQ ID NO: 1346568 - RNA, 19 nt, Artificial Sequence
  Description of Artificial Sequence: Synthetic oligonucleotide
  Sense strand starting at position 406 of SEQ ID NO: 1242425
gucaacuuacguuaacuuu

SEQ ID NO: 1346569 - RNA, 19 nt, Artificial Sequence
  Description of Artificial Sequence: Synthetic oligonucleotide
  Antisense strand to SEQ ID NO: 1346568
aaaguuaacguaaguugac

SEQ ID NO: 1346570 - RNA, 19 nt, Artificial Sequence
  Description of Artificial Sequence: Synthetic oligonucleotide
  Sense strand starting at position 649 of SEQ ID NO: 1242425
ccacgucucacauggaaag

SEQ ID NO: 1346571 - RNA, 19 nt, Artificial Sequence
  Description of Artificial Sequence: Synthetic oligonucleotide
  Antisense strand to SEQ ID NO: 1346570
cuuuccaugugagacgugg

SEQ ID NO: 1346572 - RNA, 19 nt, Artificial Sequence
  Description of Artificial Sequence: Synthetic oligonucleotide
  Sense strand starting at position 667 of SEQ ID NO: 1242425
gggagagugccuuagacug

SEQ ID NO: 1346573 - RNA, 19 nt, Artificial Sequence
  Description of Artificial Sequence: Synthetic oligonucleotide
  Antisense strand to SEQ ID NO: 1346572
cagucuaaggcacucuccc

SEQ ID NO: 1346574 - RNA, 19 nt, Artificial Sequence
  Description of Artificial Sequence: Synthetic oligonucleotide
  Sense strand starting at position 1005 of SEQ ID NO: 1242425
gccuccuaccgguaacauu

SEQ ID NO: 1346575 - RNA, 19 nt, Artificial Sequence
  Description of Artificial Sequence: Synthetic oligonucleotide
  Antisense strand to SEQ ID NO: 1346574
aauguuaccgguaggaggc

SEQ ID NO: 1346576 - RNA, 19 nt, Artificial Sequence
  Description of Artificial Sequence: Synthetic oligonucleotide
  Sense strand starting at position 1015 of SEQ ID NO: 1242425
gguaacauuacgggaaaca

SEQ ID NO: 1346577 - RNA, 19 nt, Artificial Sequence
  Description of Artificial Sequence: Synthetic oligonucleotide
  Antisense strand to SEQ ID NO: 1346576
uguuucccguaauguuacc

SEQ ID NO: 1346578 - RNA, 19 nt, Artificial Sequence
  Description of Artificial Sequence: Synthetic oligonucleotide
  Sense strand starting at position 1105 of SEQ ID NO: 1242425
ggagaaagcuuucugaucu

SEQ ID NO: 1346579 - RNA, 19 nt, Artificial Sequence
  Description of Artificial Sequence: Synthetic oligonucleotide
  Antisense strand to SEQ ID NO: 1346578
agaucagaaagcuuucucc

SEQ ID NO: 1346580 - RNA, 19 nt, Artificial Sequence
  Description of Artificial Sequence: Synthetic oligonucleotide
  Sense strand starting at position 1125 of SEQ ID NO: 1242425
uguagugauuuaucuggca

SEQ ID NO: 1346581 - RNA, 19 nt, Artificial Sequence
  Description of Artificial Sequence: Synthetic oligonucleotide
  Antisense strand to SEQ ID NO: 1346580
ugccagauaaaucacuaca

SEQ ID NO: 1346582 - RNA, 19 nt, Artificial Sequence
  Description of Artificial Sequence: Synthetic oligonucleotide
  Sense strand starting at position 1235 of SEQ ID NO: 1242425
ugguuauuaucgguaaaug

SEQ ID NO: 1346583 - RNA, 19 nt, Artificial Sequence
  Description of Artificial Sequence: Synthetic oligonucleotide
  Antisense strand to SEQ ID NO: 1346582
cauuuaccgauaauaacca

SEQ ID NO: 1346584 - RNA, 19 nt, Artificial Sequence
  Description of Artificial Sequence: Synthetic oligonucleotide
  Sense strand starting at position 1236 of SEQ ID NO: 1242425
gguuauuaucgguaaaugc

SEQ ID NO: 1346585 - RNA, 19 nt, Artificial Sequence
  Description of Artificial Sequence: Synthetic oligonucleotide
  Antisense strand to SEQ ID NO: 1346584
gcauuuaccgauaauaacc

SEQ ID NO: 1346586 - RNA, 19 nt, Artificial Sequence
  Description of Artificial Sequence: Synthetic oligonucleotide
  Sense strand starting at position 1246 of SEQ ID NO: 1242425
gguaaaugcugggcuaaag

SEQ ID NO: 1346587 - RNA, 19 nt, Artificial Sequence
  Description of Artificial Sequence: Synthetic oligonucleotide
  Antisense strand to SEQ ID NO: 1346586
cuuuagcccagcauuuacc

SEQ ID NO: 1346588 - RNA, 19 nt, Artificial Sequence
  Description of Artificial Sequence: Synthetic oligonucleotide
  Sense strand starting at position 1338 of SEQ ID NO: 1242425
gggaaaggucugcauccca

SEQ ID NO: 1346589 - RNA, 19 nt, Artificial Sequence
  Description of Artificial Sequence: Synthetic oligonucleotide
  Antisense strand to SEQ ID NO: 1346588
ugggaugcagaccuuuccc

SEQ ID NO: 1346590 - RNA, 19 nt, Artificial Sequence
  Description of Artificial Sequence: Synthetic oligonucleotide
  Sense strand starting at position 1358 of SEQ ID NO: 1242425
ucgcuuauuccguccuacu

SEQ ID NO: 1346591 - RNA, 19 nt, Artificial Sequence
  Description of Artificial Sequence: Synthetic oligonucleotide
  Antisense strand to SEQ ID NO: 1346590
aguaggacggaauaagcga

SEQ ID NO: 1346592 - RNA, 19 nt, Artificial Sequence
  Description of Artificial Sequence: Synthetic oligonucleotide
  Sense strand starting at position 2164 of SEQ ID NO: 1242425
ucuggauagcuuuauccaa

SEQ ID NO: 1346593 - RNA, 19 nt, Artificial Sequence
  Description of Artificial Sequence: Synthetic oligonucleotide
  Antisense strand to SEQ ID NO: 1346592
uuggauaaagcuauccaga

SEQ ID NO: 1346594 - RNA, 19 nt, Artificial Sequence
  Description of Artificial Sequence: Synthetic oligonucleotide
  Sense strand starting at position 2166 of SEQ ID NO: 1242425
uggauagcuuuauccaaca

SEQ ID NO: 1346595 - RNA, 19 nt, Artificial Sequence
  Description of Artificial Sequence: Synthetic oligonucleotide
  Antisense strand to SEQ ID NO: 1346594
uguuggauaaagcuaucca

SEQ ID NO: 1346596 - RNA, 19 nt, Artificial Sequence
  Description of Artificial Sequence: Synthetic oligonucleotide
  Sense strand starting at position 2171 of SEQ ID NO: 1242425
agcuuuauccaacaggcuu

SEQ ID NO: 1346597 - RNA, 19 nt, Artificial Sequence
  Description of Artificial Sequence: Synthetic oligonucleotide
  Antisense strand to SEQ ID NO: 1346596
aagccuguuggauaaagcu

SEQ ID NO: 1346598 - RNA, 19 nt, Artificial Sequence
  Description of Artificial Sequence: Synthetic oligonucleotide
  Sense strand starting at position 2188 of SEQ ID NO: 1242425
uucuaagaguucgucugaa

SEQ ID NO: 1346599 - RNA, 19 nt, Artificial Sequence
  Description of Artificial Sequence: Synthetic oligonucleotide
  Antisense strand to SEQ ID NO: 1346598
uucagacgaacucuuagaa

SEQ ID NO: 1346600 - RNA, 19 nt, Artificial Sequence
  Description of Artificial Sequence: Synthetic oligonucleotide
  Sense strand starting at position 2294 of SEQ ID NO: 1242425
uuucgauugagguaucuga

SEQ ID NO: 1346601 - RNA, 19 nt, Artificial Sequence
  Description of Artificial Sequence: Synthetic oligonucleotide
  Antisense strand to SEQ ID NO: 1346600
ucagauaccucaaucgaaa

SEQ ID NO: 1346602 - RNA, 19 nt, Artificial Sequence
  Description of Artificial Sequence: Synthetic oligonucleotide
  Sense strand starting at position 2504 of SEQ ID NO: 1242425
auaaucaauucugcuugga

SEQ ID NO: 1346603 - RNA, 19 nt, Artificial Sequence
  Description of Artificial Sequence: Synthetic oligonucleotide
  Antisense strand to SEQ ID NO: 1346602
uccaagcagaauugauuau

SEQ ID NO: 1346604 - RNA, 19 nt, Artificial Sequence
  Description of Artificial Sequence: Synthetic oligonucleotide
  Sense strand starting at position 2507 of SEQ ID NO: 1242425
aucaauucugcuuggagaa

SEQ ID NO: 1346605 - RNA, 19 nt, Artificial Sequence
  Description of Artificial Sequence: Synthetic oligonucleotide
  Antisense strand to SEQ ID NO: 1346604
uucuccaagcagaauugau

SEQ ID NO: 1346606 - RNA, 19 nt, Artificial Sequence
  Description of Artificial Sequence: Synthetic oligonucleotide
  Sense strand starting at position 2508 of SEQ ID NO: 1242425
ucaauucugcuuggagaag

SEQ ID NO: 1346607 - RNA, 19 nt, Artificial Sequence
  Description of Artificial Sequence: Synthetic oligonucleotide
  Antisense strand to SEQ ID NO: 1346606
cuucuccaagcagaauuga

SEQ ID NO: 1346608 - RNA, 19 nt, Artificial Sequence
  Description of Artificial Sequence: Synthetic oligonucleotide
  Sense strand starting at position 2611 of SEQ ID NO: 1242425
gaguaaguggaguggaaua

SEQ ID NO: 1346609 - RNA, 19 nt, Artificial Sequence
  Description of Artificial Sequence: Synthetic oligonucleotide
  Antisense strand to SEQ ID NO: 1346608
uauuccacuccacuuacuc

SEQ ID NO: 1346610 - RNA, 19 nt, Artificial Sequence
  Description of Artificial Sequence: Synthetic oligonucleotide
  Sense strand starting at position 2751 of SEQ ID NO: 1242425
gcauguuagcaugggacaa

SEQ ID NO: 1346611 - RNA, 19 nt, Artificial Sequence
  Description of Artificial Sequence: Synthetic oligonucleotide
  Antisense strand to SEQ ID NO: 1346610
uugucccaugcuaacaugc

SEQ ID NO: 1346612 - RNA, 19 nt, Artificial Sequence
  Description of Artificial Sequence: Synthetic oligonucleotide
  Sense strand starting at position 2762 of SEQ ID NO: 1242425
ugggacaauucugcaagau

SEQ ID NO: 1346613 - RNA, 19 nt, Artificial Sequence
  Description of Artificial Sequence: Synthetic oligonucleotide
  Antisense strand to SEQ ID NO: 1346612
aucuugcagaauuguccca

SEQ ID NO: 1346614 - RNA, 19 nt, Artificial Sequence
  Description of Artificial Sequence: Synthetic oligonucleotide
  Sense strand starting at position 2803 of SEQ ID NO: 1242425
uggcauuugucaccaacuu

SEQ ID NO: 1346615 - RNA, 19 nt, Artificial Sequence
  Description of Artificial Sequence: Synthetic oligonucleotide
  Antisense strand to SEQ ID NO: 1346614
aaguuggugacaaaugcca

SEQ ID NO: 1346616 - RNA, 19 nt, Artificial Sequence
  Description of Artificial Sequence: Synthetic oligonucleotide
  Sense strand starting at position 2824 of SEQ ID NO: 1242425
acaagagguuuaguuaguu

SEQ ID NO: 1346617 - RNA, 19 nt, Artificial Sequence
  Description of Artificial Sequence: Synthetic oligonucleotide
  Antisense strand to SEQ ID NO: 1346616
aacuaacuaaaccucuugu

SEQ ID NO: 1346618 - RNA, 19 nt, Artificial Sequence
  Description of Artificial Sequence: Synthetic oligonucleotide
  Sense strand starting at position 2928 of SEQ ID NO: 1242425
cuuccaugccuauggauca

SEQ ID NO: 1346619 - RNA, 19 nt, Artificial Sequence
  Description of Artificial Sequence: Synthetic oligonucleotide
  Antisense strand to SEQ ID NO: 1346618
ugauccauaggcauggaag

SEQ ID NO: 1346620 - RNA, 19 nt, Artificial Sequence
  Description of Artificial Sequence: Synthetic oligonucleotide
  Sense strand starting at position 2939 of SEQ ID NO: 1242425
auggaucaccuauggcaaa

SEQ ID NO: 1346621 - RNA, 19 nt, Artificial Sequence
  Description of Artificial Sequence: Synthetic oligonucleotide
  Antisense strand to SEQ ID NO: 1346620
uuugccauaggugauccau

SEQ ID NO: 1346622 - RNA, 19 nt, Artificial Sequence
  Description of Artificial Sequence: Synthetic oligonucleotide
  Sense strand starting at position 2968 of SEQ ID NO: 1242425
caaauuugaucggagggau

SEQ ID NO: 1346623 - RNA, 19 nt, Artificial Sequence
  Description of Artificial Sequence: Synthetic oligonucleotide
  Antisense strand to SEQ ID NO: 1346622
aucccuccgaucaaauuug

SEQ ID NO: 1346624 - RNA, 19 nt, Artificial Sequence
  Description of Artificial Sequence: Synthetic oligonucleotide
  Sense strand starting at position 3384 of SEQ ID NO: 1242425
ggcgaucuccauuauguca

SEQ ID NO: 1346625 - RNA, 19 nt, Artificial Sequence
  Description of Artificial Sequence: Synthetic oligonucleotide
  Antisense strand to SEQ ID NO: 1346624
ugacauaauggagaucgcc

SEQ ID NO: 1346626 - RNA, 19 nt, Artificial Sequence
  Description of Artificial Sequence: Synthetic oligonucleotide
  Sense strand starting at position 3392 of SEQ ID NO: 1242425
ccauuaugucaccacugua

SEQ ID NO: 1346627 - RNA, 19 nt, Artificial Sequence
  Description of Artificial Sequence: Synthetic oligonucleotide
  Antisense strand to SEQ ID NO: 1346626
uacaguggugacauaaugg

SEQ ID NO: 1346628 - RNA, 19 nt, Artificial Sequence
  Description of Artificial Sequence: Synthetic oligonucleotide
  Sense strand starting at position 3453 of SEQ ID NO: 1242425
aggccauuagcagaaauau

SEQ ID NO: 1346629 - RNA, 19 nt, Artificial Sequence
  Description of Artificial Sequence: Synthetic oligonucleotide
  Antisense strand to SEQ ID NO: 1346628
auauuucugcuaauggccu

SEQ ID NO: 1346630 - RNA, 19 nt, Artificial Sequence
  Description of Artificial Sequence: Synthetic oligonucleotide
  Sense strand starting at position 3496 of SEQ ID NO: 1242425
uggacugagucccuuagga

SEQ ID NO: 1346631 - RNA, 19 nt, Artificial Sequence
  Description of Artificial Sequence: Synthetic oligonucleotide
  Antisense strand to SEQ ID NO: 1346630
uccuaagggacucagucca

SEQ ID NO: 1346632 - RNA, 19 nt, Artificial Sequence
  Description of Artificial Sequence: Synthetic oligonucleotide
  Sense strand starting at position 3657 of SEQ ID NO: 1242425
gagaaauaauuguaaagag

SEQ ID NO: 1346633 - RNA, 19 nt, Artificial Sequence
  Description of Artificial Sequence: Synthetic oligonucleotide
  Antisense strand to SEQ ID NO: 1346632
cucuuuacaauuauuucuc

SEQ ID NO: 1346634 - RNA, 19 nt, Artificial Sequence
  Description of Artificial Sequence: Synthetic oligonucleotide
  Sense strand starting at position 3727 of SEQ ID NO: 1242425
aucuuuaacuuaucacgga

SEQ ID NO: 1346635 - RNA, 19 nt, Artificial Sequence
  Description of Artificial Sequence: Synthetic oligonucleotide
  Antisense strand to SEQ ID NO: 1346634
uccgugauaaguuaaagau

SEQ ID NO: 1346636 - RNA, 19 nt, Artificial Sequence
  Description of Artificial Sequence: Synthetic oligonucleotide
  Sense strand starting at position 3731 of SEQ ID NO: 1242425
uuaacuuaucacggauacu

SEQ ID NO: 1346637 - RNA, 19 nt, Artificial Sequence
  Description of Artificial Sequence: Synthetic oligonucleotide
  Antisense strand to SEQ ID NO: 1346636
aguauccgugauaaguuaa

SEQ ID NO: 1346638 - RNA, 19 nt, Artificial Sequence
  Description of Artificial Sequence: Synthetic oligonucleotide
  Sense strand starting at position 3741 of SEQ ID NO: 1242425
acggauacugagugaguca

SEQ ID NO: 1346639 - RNA, 19 nt, Artificial Sequence
  Description of Artificial Sequence: Synthetic oligonucleotide
  Antisense strand to SEQ ID NO: 1346638
ugacucacucaguauccgu

SEQ ID NO: 1346640 - RNA, 19 nt, Artificial Sequence
  Description of Artificial Sequence: Synthetic oligonucleotide
  Sense strand starting at position 211 of SEQ ID NO: 1242426
guaaccaagucuguccaaa

SEQ ID NO: 1346641 - RNA, 19 nt, Artificial Sequence
  Description of Artificial Sequence: Synthetic oligonucleotide
  Antisense strand to SEQ ID NO: 1346640
uuuggacagacuugguuac

SEQ ID NO: 1346642 - RNA, 19 nt, Artificial Sequence
  Description of Artificial Sequence: Synthetic oligonucleotide
  Sense strand starting at position 276 of SEQ ID NO: 1242426
gcuggauccuggcagaugu

SEQ ID NO: 1346643 - RNA, 19 nt, Artificial Sequence
  Description of Artificial Sequence: Synthetic oligonucleotide
  Antisense strand to SEQ ID NO: 1346642
acaucugccaggauccagc

SEQ ID NO: 1346644 - RNA, 19 nt, Artificial Sequence
  Description of Artificial Sequence: Synthetic oligonucleotide
  Sense strand starting at position 545 of SEQ ID NO: 1242426
cagggcucuuuguuccaaa

SEQ ID NO: 1346645 - RNA, 19 nt, Artificial Sequence
  Description of Artificial Sequence: Synthetic oligonucleotide
  Antisense strand to SEQ ID NO: 1346644
uuuggaacaaagagcccug

SEQ ID NO: 1346646 - RNA, 19 nt, Artificial Sequence
  Description of Artificial Sequence: Synthetic oligonucleotide
  Sense strand starting at position 816 of SEQ ID NO: 1242426
gguguuuggaccuauauua

SEQ ID NO: 1346647 - RNA, 19 nt, Artificial Sequence
  Description of Artificial Sequence: Synthetic oligonucleotide
  Antisense strand to SEQ ID NO: 1346646
uaauauagguccaaacacc

SEQ ID NO: 1346648 - RNA, 19 nt, Artificial Sequence
  Description of Artificial Sequence: Synthetic oligonucleotide
  Sense strand starting at position 967 of SEQ ID NO: 1242426
cucgcauaccuggauguaa

SEQ ID NO: 1346649 - RNA, 19 nt, Artificial Sequence
  Description of Artificial Sequence: Synthetic oligonucleotide
  Antisense strand to SEQ ID NO: 1346648
uuacauccagguaugcgag

SEQ ID NO: 1346650 - RNA, 19 nt, Artificial Sequence
  Description of Artificial Sequence: Synthetic oligonucleotide
  Sense strand starting at position 1065 of SEQ ID NO: 1242426
uguacagcuucuugaucua

SEQ ID NO: 1346651 - RNA, 19 nt, Artificial Sequence
  Description of Artificial Sequence: Synthetic oligonucleotide
  Antisense strand to SEQ ID NO: 1346650
uagaucaagaagcuguaca

SEQ ID NO: 1346652 - RNA, 19 nt, Artificial Sequence
  Description of Artificial Sequence: Synthetic oligonucleotide
  Sense strand starting at position 1074 of SEQ ID NO: 1242426
ucuugaucuacuggagguu

SEQ ID NO: 1346653 - RNA, 19 nt, Artificial Sequence
  Description of Artificial Sequence: Synthetic oligonucleotide
  Antisense strand to SEQ ID NO: 1346652
aaccuccaguagaucaaga

SEQ ID NO: 1346654 - RNA, 19 nt, Artificial Sequence
  Description of Artificial Sequence: Synthetic oligonucleotide
  Sense strand starting at position 1086 of SEQ ID NO: 1242426
ggagguuuaccgcgugcga

SEQ ID NO: 1346655 - RNA, 19 nt, Artificial Sequence
  Description of Artificial Sequence: Synthetic oligonucleotide
  Antisense strand to SEQ ID NO: 1346654
ucgcacgcgguaaaccucc

SEQ ID NO: 1346656 - RNA, 19 nt, Artificial Sequence
  Description of Artificial Sequence: Synthetic oligonucleotide
  Sense strand starting at position 1087 of SEQ ID NO: 1242426
gagguuuaccgcgugcgau

SEQ ID NO: 1346657 - RNA, 19 nt, Artificial Sequence
  Description of Artificial Sequence: Synthetic oligonucleotide
  Antisense strand to SEQ ID NO: 1346656
aucgcacgcgguaaaccuc

SEQ ID NO: 1346658 - RNA, 19 nt, Artificial Sequence
  Description of Artificial Sequence: Synthetic oligonucleotide
  Sense strand starting at position 1676 of SEQ ID NO: 1242426
ccucaagagcucgaaccau

SEQ ID NO: 1346659 - RNA, 19 nt, Artificial Sequence
  Description of Artificial Sequence: Synthetic oligonucleotide
  Antisense strand to SEQ ID NO: 1346658
augguucgagcucuugagg

SEQ ID NO: 1346660 - RNA, 19 nt, Artificial Sequence
  Description of Artificial Sequence: Synthetic oligonucleotide
  Sense strand starting at position 2182 of SEQ ID NO: 1242426
gagucaaccguuugucaaa

SEQ ID NO: 1346661 - RNA, 19 nt, Artificial Sequence
  Description of Artificial Sequence: Synthetic oligonucleotide
  Antisense strand to SEQ ID NO: 1346660
uuugacaaacgguugacuc

SEQ ID NO: 1346662 - RNA, 19 nt, Artificial Sequence
  Description of Artificial Sequence: Synthetic oligonucleotide
  Sense strand starting at position 2184 of SEQ ID NO: 1242426
gucaaccguuugucaaaca

SEQ ID NO: 1346663 - RNA, 19 nt, Artificial Sequence
  Description of Artificial Sequence: Synthetic oligonucleotide
  Antisense strand to SEQ ID NO: 1346662
uguuugacaaacgguugac

SEQ ID NO: 1346664 - RNA, 19 nt, Artificial Sequence
  Description of Artificial Sequence: Synthetic oligonucleotide
  Sense strand starting at position 2185 of SEQ ID NO: 1242426
ucaaccguuugucaaacau

SEQ ID NO: 1346665 - RNA, 19 nt, Artificial Sequence
  Description of Artificial Sequence: Synthetic oligonucleotide
  Antisense strand to SEQ ID NO: 1346664
auguuugacaaacgguuga

SEQ ID NO: 1346666 - RNA, 19 nt, Artificial Sequence
  Description of Artificial Sequence: Synthetic oligonucleotide
  Sense strand starting at position 2394 of SEQ ID NO: 1242426
ucagccuggucccugaaau

SEQ ID NO: 1346667 - RNA, 19 nt, Artificial Sequence
  Description of Artificial Sequence: Synthetic oligonucleotide
  Antisense strand to SEQ ID NO: 1346666
auuucagggaccaggcuga

SEQ ID NO: 1346668 - RNA, 19 nt, Artificial Sequence
  Description of Artificial Sequence: Synthetic oligonucleotide
  Sense strand starting at position 2395 of SEQ ID NO: 1242426
cagccuggucccugaaauu

SEQ ID NO: 1346669 - RNA, 19 nt, Artificial Sequence
  Description of Artificial Sequence: Synthetic oligonucleotide
  Antisense strand to SEQ ID NO: 1346668
aauuucagggaccaggcug

SEQ ID NO: 1346670 - RNA, 19 nt, Artificial Sequence
  Description of Artificial Sequence: Synthetic oligonucleotide
  Sense strand starting at position 2406 of SEQ ID NO: 1242426
cugaaauugugaucuggau

SEQ ID NO: 1346671 - RNA, 19 nt, Artificial Sequence
  Description of Artificial Sequence: Synthetic oligonucleotide
  Antisense strand to SEQ ID NO: 1346670
auccagaucacaauuucag

SEQ ID NO: 1346672 - RNA, 19 nt, Artificial Sequence
  Description of Artificial Sequence: Synthetic oligonucleotide
  Sense strand starting at position 2604 of SEQ ID NO: 1242426
cuccgauuuggacgucaga

SEQ ID NO: 1346673 - RNA, 19 nt, Artificial Sequence
  Description of Artificial Sequence: Synthetic oligonucleotide
  Antisense strand to SEQ ID NO: 1346672
ucugacguccaaaucggag

SEQ ID NO: 1346674 - RNA, 19 nt, Artificial Sequence
  Description of Artificial Sequence: Synthetic oligonucleotide
  Sense strand starting at position 2615 of SEQ ID NO: 1242426
acgucagacugccuggauu

SEQ ID NO: 1346675 - RNA, 19 nt, Artificial Sequence
  Description of Artificial Sequence: Synthetic oligonucleotide
  Antisense strand to SEQ ID NO: 1346674
aauccaggcagucugacgu

SEQ ID NO: 1346676 - RNA, 19 nt, Artificial Sequence
  Description of Artificial Sequence: Synthetic oligonucleotide
  Sense strand starting at position 2642 of SEQ ID NO: 1242426
uccguagaccuuugcucau

SEQ ID NO: 1346677 - RNA, 19 nt, Artificial Sequence
  Description of Artificial Sequence: Synthetic oligonucleotide
  Antisense strand to SEQ ID NO: 1346676
augagcaaaggucuacgga

SEQ ID NO: 1346678 - RNA, 19 nt, Artificial Sequence
  Description of Artificial Sequence: Synthetic oligonucleotide
  Sense strand starting at position 2694 of SEQ ID NO: 1242426
aaguguauaaagugagaug

SEQ ID NO: 1346679 - RNA, 19 nt, Artificial Sequence
  Description of Artificial Sequence: Synthetic oligonucleotide
  Antisense strand to SEQ ID NO: 1346678
caucucacuuuauacacuu

SEQ ID NO: 1346680 - RNA, 19 nt, Artificial Sequence
  Description of Artificial Sequence: Synthetic oligonucleotide
  Sense strand starting at position 2697 of SEQ ID NO: 1242426
uguauaaagugagaugauu

SEQ ID NO: 1346681 - RNA, 19 nt, Artificial Sequence
  Description of Artificial Sequence: Synthetic oligonucleotide
  Antisense strand to SEQ ID NO: 1346680
aaucaucucacuuuauaca

SEQ ID NO: 1346682 - RNA, 19 nt, Artificial Sequence
  Description of Artificial Sequence: Synthetic oligonucleotide
  Sense strand starting at position 3012 of SEQ ID NO: 1242426
ugagaugauucauguuagg

SEQ ID NO: 1346683 - RNA, 19 nt, Artificial Sequence
  Description of Artificial Sequence: Synthetic oligonucleotide
  Antisense strand to SEQ ID NO: 1346682
ccuaacaugaaucaucuca

SEQ ID NO: 1346684 - RNA, 19 nt, Artificial Sequence
  Description of Artificial Sequence: Synthetic oligonucleotide
  Sense strand starting at position 3023 of SEQ ID NO: 1242426
auguuaggcccuuaacaga

SEQ ID NO: 1346685 - RNA, 19 nt, Artificial Sequence
  Description of Artificial Sequence: Synthetic oligonucleotide
  Antisense strand to SEQ ID NO: 1346684
ucuguuaagggccuaacau

SEQ ID NO: 1346686 - RNA, 19 nt, Artificial Sequence
  Description of Artificial Sequence: Synthetic oligonucleotide
  Sense strand starting at position 3064 of SEQ ID NO: 1242426
gugggcuucuccuggauga

SEQ ID NO: 1346687 - RNA, 19 nt, Artificial Sequence
  Description of Artificial Sequence: Synthetic oligonucleotide
  Antisense strand to SEQ ID NO: 1346686
ucauccaggagaagcccac

SEQ ID NO: 1346688 - RNA, 19 nt, Artificial Sequence
  Description of Artificial Sequence: Synthetic oligonucleotide
  Sense strand starting at position 3066 of SEQ ID NO: 1242426
gggcuucuccuggaugacu

SEQ ID NO: 1346689 - RNA, 19 nt, Artificial Sequence
  Description of Artificial Sequence: Synthetic oligonucleotide
  Antisense strand to SEQ ID NO: 1346688
agucauccaggagaagccc

SEQ ID NO: 1346690 - RNA, 19 nt, Artificial Sequence
  Description of Artificial Sequence: Synthetic oligonucleotide
  Sense strand starting at position 3075 of SEQ ID NO: 1242426
cuggaugacuaggauaagu

SEQ ID NO: 1346691 - RNA, 19 nt, Artificial Sequence
  Description of Artificial Sequence: Synthetic oligonucleotide
  Antisense strand to SEQ ID NO: 1346690
acuuauccuagucauccag

SEQ ID NO: 1346692 - RNA, 19 nt, Artificial Sequence
  Description of Artificial Sequence: Synthetic oligonucleotide
  Sense strand starting at position 3165 of SEQ ID NO: 1242426
gcagguucuuccuggauau

SEQ ID NO: 1346693 - RNA, 19 nt, Artificial Sequence
  Description of Artificial Sequence: Synthetic oligonucleotide
  Antisense strand to SEQ ID NO: 1346692
auauccaggaagaaccugc

SEQ ID NO: 1346694 - RNA, 19 nt, Artificial Sequence
  Description of Artificial Sequence: Synthetic oligonucleotide
  Sense strand starting at position 3166 of SEQ ID NO: 1242426
cagguucuuccuggauaug

SEQ ID NO: 1346695 - RNA, 19 nt, Artificial Sequence
  Description of Artificial Sequence: Synthetic oligonucleotide
  Antisense strand to SEQ ID NO: 1346694
cauauccaggaagaaccug

SEQ ID NO: 1346696 - RNA, 19 nt, Artificial Sequence
  Description of Artificial Sequence: Synthetic oligonucleotide
  Sense strand starting at position 3167 of SEQ ID NO: 1242426
agguucuuccuggauaugu

SEQ ID NO: 1346697 - RNA, 19 nt, Artificial Sequence
  Description of Artificial Sequence: Synthetic oligonucleotide
  Antisense strand to SEQ ID NO: 1346696
acauauccaggaagaaccu

SEQ ID NO: 1346698 - RNA, 19 nt, Artificial Sequence
  Description of Artificial Sequence: Synthetic oligonucleotide
  Sense strand starting at position 3176 of SEQ ID NO: 1242426
cuggauauguggcaggauu

SEQ ID NO: 1346699 - RNA, 19 nt, Artificial Sequence
  Description of Artificial Sequence: Synthetic oligonucleotide
  Antisense strand to SEQ ID NO: 1346698
aauccugccacauauccag

SEQ ID NO: 1346700 - RNA, 19 nt, Artificial Sequence
  Description of Artificial Sequence: Synthetic oligonucleotide
  Sense strand starting at position 3556 of SEQ ID NO: 1242426
gcaaacaggucucaccaau

SEQ ID NO: 1346701 - RNA, 19 nt, Artificial Sequence
  Description of Artificial Sequence: Synthetic oligonucleotide
  Antisense strand to SEQ ID NO: 1346700
auuggugagaccuguuugc

SEQ ID NO: 1346702 - RNA, 19 nt, Artificial Sequence
  Description of Artificial Sequence: Synthetic oligonucleotide
  Sense strand starting at position 3633 of SEQ ID NO: 1242426
agcugaaacuucccagauu

SEQ ID NO: 1346703 - RNA, 19 nt, Artificial Sequence
  Description of Artificial Sequence: Synthetic oligonucleotide
  Antisense strand to SEQ ID NO: 1346702
aaucugggaaguuucagcu

SEQ ID NO: 1346704 - RNA, 19 nt, Artificial Sequence
  Description of Artificial Sequence: Synthetic oligonucleotide
  Sense strand starting at position 3634 of SEQ ID NO: 1242426
gcugaaacuucccagauuc

SEQ ID NO: 1346705 - RNA, 19 nt, Artificial Sequence
  Description of Artificial Sequence: Synthetic oligonucleotide
  Antisense strand to SEQ ID NO: 1346704
gaaucugggaaguuucagc

SEQ ID NO: 1346706 - RNA, 19 nt, Artificial Sequence
  Description of Artificial Sequence: Synthetic oligonucleotide
  Sense strand starting at position 3690 of SEQ ID NO: 1242426
ggagaagugcugugcuuuc

SEQ ID NO: 1346707 - RNA, 19 nt, Artificial Sequence
  Description of Artificial Sequence: Synthetic oligonucleotide
  Antisense strand to SEQ ID NO: 1346706
gaaagcacagcacuucucc

SEQ ID NO: 1346708 - RNA, 19 nt, Artificial Sequence
  Description of Artificial Sequence: Synthetic oligonucleotide
  Sense strand starting at position 3798 of SEQ ID NO: 1242426
cugggauccucagacuucu

SEQ ID NO: 1346709 - RNA, 19 nt, Artificial Sequence
  Description of Artificial Sequence: Synthetic oligonucleotide
  Antisense strand to SEQ ID NO: 1346708
agaagucugaggaucccag

SEQ ID NO: 1346710 - RNA, 19 nt, Artificial Sequence
  Description of Artificial Sequence: Synthetic oligonucleotide
  Sense strand starting at position 3911 of SEQ ID NO: 1242426
agcacaaacuguuaucaag

SEQ ID NO: 1346711 - RNA, 19 nt, Artificial Sequence
  Description of Artificial Sequence: Synthetic oligonucleotide
  Antisense strand to SEQ ID NO: 1346710
cuugauaacaguuugugcu

SEQ ID NO: 1346712 - RNA, 19 nt, Artificial Sequence
  Description of Artificial Sequence: Synthetic oligonucleotide
  Sense strand starting at position 3917 of SEQ ID NO: 1242426
aacuguuaucaaggcaugu

SEQ ID NO: 1346713 - RNA, 19 nt, Artificial Sequence
  Description of Artificial Sequence: Synthetic oligonucleotide
  Antisense strand to SEQ ID NO: 1346712
acaugccuugauaacaguu

SEQ ID NO: 1346714 - RNA, 19 nt, Artificial Sequence
  Description of Artificial Sequence: Synthetic oligonucleotide
  Sense strand starting at position 407 of SEQ ID NO: 1242427
cgaguuuccugccugcacu

SEQ ID NO: 1346715 - RNA, 19 nt, Artificial Sequence
  Description of Artificial Sequence: Synthetic oligonucleotide
  Antisense strand to SEQ ID NO: 1346714
agugcaggcaggaaacucg

SEQ ID NO: 1346716 - RNA, 19 nt, Artificial Sequence
  Description of Artificial Sequence: Synthetic oligonucleotide
  Sense strand starting at position 2124 of SEQ ID NO: 1242427
ggcauaugcuugugagcag

SEQ ID NO: 1346717 - RNA, 19 nt, Artificial Sequence
  Description of Artificial Sequence: Synthetic oligonucleotide
  Antisense strand to SEQ ID NO: 1346716
cugcucacaagcauaugcc

SEQ ID NO: 1346718 - RNA, 19 nt, Artificial Sequence
  Description of Artificial Sequence: Synthetic oligonucleotide
  Sense strand starting at position 2232 of SEQ ID NO: 1242427
agucaagugaccuggagaa

SEQ ID NO: 1346719 - RNA, 19 nt, Artificial Sequence
  Description of Artificial Sequence: Synthetic oligonucleotide
  Antisense strand to SEQ ID NO: 1346718
uucuccaggucacuugacu

SEQ ID NO: 1346720 - RNA, 19 nt, Artificial Sequence
  Description of Artificial Sequence: Synthetic oligonucleotide
  Sense strand starting at position 2245 of SEQ ID NO: 1242427
ggagaaaucugcccugcga

SEQ ID NO: 1346721 - RNA, 19 nt, Artificial Sequence
  Description of Artificial Sequence: Synthetic oligonucleotide
  Antisense strand to SEQ ID NO: 1346720
ucgcagggcagauuucucc

SEQ ID NO: 1346722 - RNA, 19 nt, Artificial Sequence
  Description of Artificial Sequence: Synthetic oligonucleotide
  Sense strand starting at position 2762 of SEQ ID NO: 1242427
ugccuaauuccucagcagu

SEQ ID NO: 1346723 - RNA, 19 nt, Artificial Sequence
  Description of Artificial Sequence: Synthetic oligonucleotide
  Antisense strand to SEQ ID NO: 1346722
acugcugaggaauuaggca

SEQ ID NO: 1346724 - RNA, 19 nt, Artificial Sequence
  Description of Artificial Sequence: Synthetic oligonucleotide
  Sense strand starting at position 2793 of SEQ ID NO: 1242427
cgcugacccugcucugaau

SEQ ID NO: 1346725 - RNA, 19 nt, Artificial Sequence
  Description of Artificial Sequence: Synthetic oligonucleotide
  Antisense strand to SEQ ID NO: 1346724
auucagagcagggucagcg

SEQ ID NO: 1346726 - RNA, 19 nt, Artificial Sequence
  Description of Artificial Sequence: Synthetic oligonucleotide
  Sense strand starting at position 2914 of SEQ ID NO: 1242427
uuuggaguuuggagaguga

SEQ ID NO: 1346727 - RNA, 19 nt, Artificial Sequence
  Description of Artificial Sequence: Synthetic oligonucleotide
  Antisense strand to SEQ ID NO: 1346726
ucacucuccaaacuccaaa

SEQ ID NO: 1346728 - RNA, 19 nt, Artificial Sequence
  Description of Artificial Sequence: Synthetic oligonucleotide
  Sense strand starting at position 3762 of SEQ ID NO: 1242427
ggcgcagcucagagauugu

SEQ ID NO: 1346729 - RNA, 19 nt, Artificial Sequence
  Description of Artificial Sequence: Synthetic oligonucleotide
  Antisense strand to SEQ ID NO: 1346728
acaaucucugagcugcgcc

SEQ ID NO: 1346730 - RNA, 19 nt, Artificial Sequence
  Description of Artificial Sequence: Synthetic oligonucleotide
  Sense strand starting at position 3814 of SEQ ID NO: 1242427
aggcgucugaccuaagaua

SEQ ID NO: 1346731 - RNA, 19 nt, Artificial Sequence
  Description of Artificial Sequence: Synthetic oligonucleotide
  Antisense strand to SEQ ID NO: 1346730
uaucuuaggucagacgccu

SEQ ID NO: 1346732 - RNA, 19 nt, Artificial Sequence
  Description of Artificial Sequence: Synthetic oligonucleotide
  Sense strand starting at position 3957 of SEQ ID NO: 1242427
gguuccguguugcuuagua

SEQ ID NO: 1346733 - RNA, 19 nt, Artificial Sequence
  Description of Artificial Sequence: Synthetic oligonucleotide
  Antisense strand to SEQ ID NO: 1346732
uacuaagcaacacggaacc

SEQ ID NO: 1346734 - RNA, 19 nt, Artificial Sequence
  Description of Artificial Sequence: Synthetic oligonucleotide
  Sense strand starting at position 3959 of SEQ ID NO: 1242427
uuccguguugcuuaguaca

SEQ ID NO: 1346735 - RNA, 19 nt, Artificial Sequence
  Description of Artificial Sequence: Synthetic oligonucleotide
  Antisense strand to SEQ ID NO: 1346734
uguacuaagcaacacggaa

SEQ ID NO: 1346736 - RNA, 19 nt, Artificial Sequence
  Description of Artificial Sequence: Synthetic oligonucleotide
  Sense strand starting at position 16 of SEQ ID NO: 1242428
ugaugagaucaagguuagu

SEQ ID NO: 1346737 - RNA, 19 nt, Artificial Sequence
  Description of Artificial Sequence: Synthetic oligonucleotide
  Antisense strand to SEQ ID NO: 1346736
acuaaccuugaucucauca

SEQ ID NO: 1346738 - RNA, 19 nt, Artificial Sequence
  Description of Artificial Sequence: Synthetic oligonucleotide
  Sense strand starting at position 54 of SEQ ID NO: 1242428
caaagcuuugucuacggaa

SEQ ID NO: 1346739 - RNA, 19 nt, Artificial Sequence
  Description of Artificial Sequence: Synthetic oligonucleotide
  Antisense strand to SEQ ID NO: 1346738
uuccguagacaaagcuuug

SEQ ID NO: 1346740 - RNA, 19 nt, Artificial Sequence
  Description of Artificial Sequence: Synthetic oligonucleotide
  Sense strand starting at position 99 of SEQ ID NO: 1242428
aguggaagaccaugaguuu

SEQ ID NO: 1346741 - RNA, 19 nt, Artificial Sequence
  Description of Artificial Sequence: Synthetic oligonucleotide
  Antisense strand to SEQ ID NO: 1346740
aaacucauggucuuccacu

SEQ ID NO: 1346742 - RNA, 19 nt, Artificial Sequence
  Description of Artificial Sequence: Synthetic oligonucleotide
  Sense strand starting at position 105 of SEQ ID NO: 1242428
agaccaugaguuugaggua

SEQ ID NO: 1346743 - RNA, 19 nt, Artificial Sequence
  Description of Artificial Sequence: Synthetic oligonucleotide
  Antisense strand to SEQ ID NO: 1346742
uaccucaaacucauggucu

SEQ ID NO: 1346744 - RNA, 19 nt, Artificial Sequence
  Description of Artificial Sequence: Synthetic oligonucleotide
  Sense strand starting at position 130 of SEQ ID NO: 1242428
aggagaacuuaacuguguu

SEQ ID NO: 1346745 - RNA, 19 nt, Artificial Sequence
  Description of Artificial Sequence: Synthetic oligonucleotide
  Antisense strand to SEQ ID NO: 1346744
aacacaguuaaguucuccu

SEQ ID NO: 1346746 - RNA, 19 nt, Artificial Sequence
  Description of Artificial Sequence: Synthetic oligonucleotide
  Sense strand starting at position 131 of SEQ ID NO: 1242428
ggagaacuuaacuguguuu

SEQ ID NO: 1346747 - RNA, 19 nt, Artificial Sequence
  Description of Artificial Sequence: Synthetic oligonucleotide
  Antisense strand to SEQ ID NO: 1346746
aaacacaguuaaguucucc

SEQ ID NO: 1346748 - RNA, 19 nt, Artificial Sequence
  Description of Artificial Sequence: Synthetic oligonucleotide
  Sense strand starting at position 133 of SEQ ID NO: 1242428
agaacuuaacuguguuucu

SEQ ID NO: 1346749 - RNA, 19 nt, Artificial Sequence
  Description of Artificial Sequence: Synthetic oligonucleotide
  Antisense strand to SEQ ID NO: 1346748
agaaacacaguuaaguucu

SEQ ID NO: 1346750 - RNA, 19 nt, Artificial Sequence
  Description of Artificial Sequence: Synthetic oligonucleotide
  Sense strand starting at position 229 of SEQ ID NO: 1242428
cucugaggccuccaucaaa

SEQ ID NO: 1346751 - RNA, 19 nt, Artificial Sequence
  Description of Artificial Sequence: Synthetic oligonucleotide
  Antisense strand to SEQ ID NO: 1346750
uuugauggaggccucagag

SEQ ID NO: 1346752 - RNA, 19 nt, Artificial Sequence
  Description of Artificial Sequence: Synthetic oligonucleotide
  Sense strand starting at position 259 of SEQ ID NO: 1242428
cugucauaauuguugacuu

SEQ ID NO: 1346753 - RNA, 19 nt, Artificial Sequence
  Description of Artificial Sequence: Synthetic oligonucleotide
  Antisense strand to SEQ ID NO: 1346752
aagucaacaauuaugacag

SEQ ID NO: 1346754 - RNA, 19 nt, Artificial Sequence
  Description of Artificial Sequence: Synthetic oligonucleotide
  Sense strand starting at position 261 of SEQ ID NO: 1242428
gucauaauuguugacuuua

SEQ ID NO: 1346755 - RNA, 19 nt, Artificial Sequence
  Description of Artificial Sequence: Synthetic oligonucleotide
  Antisense strand to SEQ ID NO: 1346754
uaaagucaacaauuaugac

SEQ ID NO: 1346756 - RNA, 19 nt, Artificial Sequence
  Description of Artificial Sequence: Synthetic oligonucleotide
  Sense strand starting at position 374 of SEQ ID NO: 1242428
augagugaauguuugugga

SEQ ID NO: 1346757 - RNA, 19 nt, Artificial Sequence
  Description of Artificial Sequence: Synthetic oligonucleotide
  Antisense strand to SEQ ID NO: 1346756
uccacaaacauucacucau

SEQ ID NO: 1346758 - RNA, 19 nt, Artificial Sequence
  Description of Artificial Sequence: Synthetic oligonucleotide
  Sense strand starting at position 376 of SEQ ID NO: 1242428
gagugaauguuuguggaau

SEQ ID NO: 1346759 - RNA, 19 nt, Artificial Sequence
  Description of Artificial Sequence: Synthetic oligonucleotide
  Antisense strand to SEQ ID NO: 1346758
auuccacaaacauucacuc

SEQ ID NO: 1346760 - RNA, 19 nt, Artificial Sequence
  Description of Artificial Sequence: Synthetic oligonucleotide
  Sense strand starting at position 408 of SEQ ID NO: 1242428
ggaaaucacucugcaagcu

SEQ ID NO: 1346761 - RNA, 19 nt, Artificial Sequence
  Description of Artificial Sequence: Synthetic oligonucleotide
  Antisense strand to SEQ ID NO: 1346760
agcuugcagagugauuucc

SEQ ID NO: 1346762 - RNA, 19 nt, Artificial Sequence
  Description of Artificial Sequence: Synthetic oligonucleotide
  Sense strand starting at position 518 of SEQ ID NO: 1242428
gguggaggcuccaaagagu

SEQ ID NO: 1346763 - RNA, 19 nt, Artificial Sequence
  Description of Artificial Sequence: Synthetic oligonucleotide
  Antisense strand to SEQ ID NO: 1346762
acucuuuggagccuccacc

SEQ ID NO: 1346764 - RNA, 19 nt, Artificial Sequence
  Description of Artificial Sequence: Synthetic oligonucleotide
  Sense strand starting at position 575 of SEQ ID NO: 1242428
ccuugucguggcucuguua

SEQ ID NO: 1346765 - RNA, 19 nt, Artificial Sequence
  Description of Artificial Sequence: Synthetic oligonucleotide
  Antisense strand to SEQ ID NO: 1346764
uaacagagccacgacaagg

SEQ ID NO: 1346766 - RNA, 19 nt, Artificial Sequence
  Description of Artificial Sequence: Synthetic oligonucleotide
  Sense strand starting at position 576 of SEQ ID NO: 1242428
cuugucguggcucuguuaa

SEQ ID NO: 1346767 - RNA, 19 nt, Artificial Sequence
  Description of Artificial Sequence: Synthetic oligonucleotide
  Antisense strand to SEQ ID NO: 1346766
uuaacagagccacgacaag

SEQ ID NO: 1346768 - RNA, 19 nt, Artificial Sequence
  Description of Artificial Sequence: Synthetic oligonucleotide
  Sense strand starting at position 583 of SEQ ID NO: 1242428
uggcucuguuaacuaacaa

SEQ ID NO: 1346769 - RNA, 19 nt, Artificial Sequence
  Description of Artificial Sequence: Synthetic oligonucleotide
  Antisense strand to SEQ ID NO: 1346768
uuguuaguuaacagagcca

SEQ ID NO: 1346770 - RNA, 19 nt, Artificial Sequence
  Description of Artificial Sequence: Synthetic oligonucleotide
  Sense strand starting at position 694 of SEQ ID NO: 1242428
aagggaguccuugagcagu

SEQ ID NO: 1346771 - RNA, 19 nt, Artificial Sequence
  Description of Artificial Sequence: Synthetic oligonucleotide
  Antisense strand to SEQ ID NO: 1346770
acugcucaaggacucccuu

SEQ ID NO: 1346772 - RNA, 19 nt, Artificial Sequence
  Description of Artificial Sequence: Synthetic oligonucleotide
  Sense strand starting at position 702 of SEQ ID NO: 1242428
ccuugagcagucugaaauu

SEQ ID NO: 1346773 - RNA, 19 nt, Artificial Sequence
  Description of Artificial Sequence: Synthetic oligonucleotide
  Antisense strand to SEQ ID NO: 1346772
aauuucagacugcucaagg

SEQ ID NO: 1346774 - RNA, 19 nt, Artificial Sequence
  Description of Artificial Sequence: Synthetic oligonucleotide
  Sense strand starting at position 713 of SEQ ID NO: 1242428
cugaaauuguugccaaacu

SEQ ID NO: 1346775 - RNA, 19 nt, Artificial Sequence
  Description of Artificial Sequence: Synthetic oligonucleotide
  Antisense strand to SEQ ID NO: 1346774
aguuuggcaacaauuucag

SEQ ID NO: 1346776 - RNA, 19 nt, Artificial Sequence
  Description of Artificial Sequence: Synthetic oligonucleotide
  Sense strand starting at position 805 of SEQ ID NO: 1242428
ucugaauuacugcaguuua

SEQ ID NO: 1346777 - RNA, 19 nt, Artificial Sequence
  Description of Artificial Sequence: Synthetic oligonucleotide
  Antisense strand to SEQ ID NO: 1346776
uaaacugcaguaauucaga

SEQ ID NO: 1346778 - RNA, 19 nt, Artificial Sequence
  Description of Artificial Sequence: Synthetic oligonucleotide
  Sense strand starting at position 831 of SEQ ID NO: 1242428
acgcauguacuuugaggga

SEQ ID NO: 1346779 - RNA, 19 nt, Artificial Sequence
  Description of Artificial Sequence: Synthetic oligonucleotide
  Antisense strand to SEQ ID NO: 1346778
ucccucaaaguacaugcgu

SEQ ID NO: 1346780 - RNA, 19 nt, Artificial Sequence
  Description of Artificial Sequence: Synthetic oligonucleotide
  Sense strand starting at position 1252 of SEQ ID NO: 1242428
guacuaagugcugaguacu

SEQ ID NO: 1346781 - RNA, 19 nt, Artificial Sequence
  Description of Artificial Sequence: Synthetic oligonucleotide
  Antisense strand to SEQ ID NO: 1346780
aguacucagcacuuaguac

SEQ ID NO: 1346782 - RNA, 19 nt, Artificial Sequence
  Description of Artificial Sequence: Synthetic oligonucleotide
  Sense strand starting at position 1266 of SEQ ID NO: 1242428
guacucuugugaucaucau

SEQ ID NO: 1346783 - RNA, 19 nt, Artificial Sequence
  Description of Artificial Sequence: Synthetic oligonucleotide
  Antisense strand to SEQ ID NO: 1346782
augaugaucacaagaguac

SEQ ID NO: 1346784 - RNA, 19 nt, Artificial Sequence
  Description of Artificial Sequence: Synthetic oligonucleotide
  Sense strand starting at position 1296 of SEQ ID NO: 1242428
ggagguuuaucagucccaa

SEQ ID NO: 1346785 - RNA, 19 nt, Artificial Sequence
  Description of Artificial Sequence: Synthetic oligonucleotide
  Antisense strand to SEQ ID NO: 1346784
uugggacugauaaaccucc

SEQ ID NO: 1346786 - RNA, 19 nt, Artificial Sequence
  Description of Artificial Sequence: Synthetic oligonucleotide
  Sense strand starting at position 2473 of SEQ ID NO: 1242428
aaacguuagcugcagaaga

SEQ ID NO: 1346787 - RNA, 19 nt, Artificial Sequence
  Description of Artificial Sequence: Synthetic oligonucleotide
  Antisense strand to SEQ ID NO: 1346786
ucuucugcagcuaacguuu

SEQ ID NO: 1346788 - RNA, 19 nt, Artificial Sequence
  Description of Artificial Sequence: Synthetic oligonucleotide
  Sense strand starting at position 2475 of SEQ ID NO: 1242428
acguuagcugcagaagaau

SEQ ID NO: 1346789 - RNA, 19 nt, Artificial Sequence
  Description of Artificial Sequence: Synthetic oligonucleotide
  Antisense strand to SEQ ID NO: 1346788
auucuucugcagcuaacgu

SEQ ID NO: 1346790 - RNA, 19 nt, Artificial Sequence
  Description of Artificial Sequence: Synthetic oligonucleotide
  Sense strand starting at position 2590 of SEQ ID NO: 1242428
ggguccauauuccuagcaa

SEQ ID NO: 1346791 - RNA, 19 nt, Artificial Sequence
  Description of Artificial Sequence: Synthetic oligonucleotide
  Antisense strand to SEQ ID NO: 1346790
uugcuaggaauauggaccc

SEQ ID NO: 1346792 - RNA, 19 nt, Artificial Sequence
  Description of Artificial Sequence: Synthetic oligonucleotide
  Sense strand starting at position 2735 of SEQ ID NO: 1242428
aaugaauucgugcaucauu

SEQ ID NO: 1346793 - RNA, 19 nt, Artificial Sequence
  Description of Artificial Sequence: Synthetic oligonucleotide
  Antisense strand to SEQ ID NO: 1346792
aaugaugcacgaauucauu

SEQ ID NO: 1346794 - RNA, 19 nt, Artificial Sequence
  Description of Artificial Sequence: Synthetic oligonucleotide
  Sense strand starting at position 2738 of SEQ ID NO: 1242428
gaauucgugcaucauuaca

SEQ ID NO: 1346795 - RNA, 19 nt, Artificial Sequence
  Description of Artificial Sequence: Synthetic oligonucleotide
  Antisense strand to SEQ ID NO: 1346794
uguaaugaugcacgaauuc

SEQ ID NO: 1346796 - RNA, 19 nt, Artificial Sequence
  Description of Artificial Sequence: Synthetic oligonucleotide
  Sense strand starting at position 2937 of SEQ ID NO: 1242428
guggcaugcgccuuaaucu

SEQ ID NO: 1346797 - RNA, 19 nt, Artificial Sequence
  Description of Artificial Sequence: Synthetic oligonucleotide
  Antisense strand to SEQ ID NO: 1346796
agauuaaggcgcaugccac

SEQ ID NO: 1346798 - RNA, 19 nt, Artificial Sequence
  Description of Artificial Sequence: Synthetic oligonucleotide
  Sense strand starting at position 3148 of SEQ ID NO: 1242428
agaguuucugcccaaacuc

SEQ ID NO: 1346799 - RNA, 19 nt, Artificial Sequence
  Description of Artificial Sequence: Synthetic oligonucleotide
  Antisense strand to SEQ ID NO: 1346798
gaguuugggcagaaacucu

SEQ ID NO: 1346800 - RNA, 19 nt, Artificial Sequence
  Description of Artificial Sequence: Synthetic oligonucleotide
  Sense strand starting at position 3178 of SEQ ID NO: 1242428
cucucagcccucugagaaa

SEQ ID NO: 1346801 - RNA, 19 nt, Artificial Sequence
  Description of Artificial Sequence: Synthetic oligonucleotide
  Antisense strand to SEQ ID NO: 1346800
uuucucagagggcugagag

SEQ ID NO: 1346802 - RNA, 19 nt, Artificial Sequence
  Description of Artificial Sequence: Synthetic oligonucleotide
  Sense strand starting at position 3231 of SEQ ID NO: 1242428
ucuagauaggccuaagucu

SEQ ID NO: 1346803 - RNA, 19 nt, Artificial Sequence
  Description of Artificial Sequence: Synthetic oligonucleotide
  Antisense strand to SEQ ID NO: 1346802
agacuuaggccuaucuaga

SEQ ID NO: 1346804 - RNA, 19 nt, Artificial Sequence
  Description of Artificial Sequence: Synthetic oligonucleotide
  Sense strand starting at position 3269 of SEQ ID NO: 1242428
ugaggauaaugcucaggau

SEQ ID NO: 1346805 - RNA, 19 nt, Artificial Sequence
  Description of Artificial Sequence: Synthetic oligonucleotide
  Antisense strand to SEQ ID NO: 1346804
auccugagcauuauccuca

SEQ ID NO: 1346806 - RNA, 19 nt, Artificial Sequence
  Description of Artificial Sequence: Synthetic oligonucleotide
  Sense strand starting at position 3583 of SEQ ID NO: 1242428
gucuucuuggacugaguca

SEQ ID NO: 1346807 - RNA, 19 nt, Artificial Sequence
  Description of Artificial Sequence: Synthetic oligonucleotide
  Antisense strand to SEQ ID NO: 1346806
ugacucaguccaagaagac

SEQ ID NO: 1346808 - RNA, 19 nt, Artificial Sequence
  Description of Artificial Sequence: Synthetic oligonucleotide
  Sense strand starting at position 3622 of SEQ ID NO: 1242428
aggucagauaagugaguuu

SEQ ID NO: 1346809 - RNA, 19 nt, Artificial Sequence
  Description of Artificial Sequence: Synthetic oligonucleotide
  Antisense strand to SEQ ID NO: 1346808
aaacucacuuaucugaccu

SEQ ID NO: 1346810 - RNA, 19 nt, Artificial Sequence
  Description of Artificial Sequence: Synthetic oligonucleotide
  Sense strand starting at position 3625 of SEQ ID NO: 1242428
ucagauaagugaguuuauc

SEQ ID NO: 1346811 - RNA, 19 nt, Artificial Sequence
  Description of Artificial Sequence: Synthetic oligonucleotide
  Antisense strand to SEQ ID NO: 1346810
gauaaacucacuuaucuga

SEQ ID NO: 1346812 - RNA, 19 nt, Artificial Sequence
  Description of Artificial Sequence: Synthetic oligonucleotide
  Sense strand starting at position 3791 of SEQ ID NO: 1242428
cccgcuugauuaccuagaa

SEQ ID NO: 1346813 - RNA, 19 nt, Artificial Sequence
  Description of Artificial Sequence: Synthetic oligonucleotide
  Antisense strand to SEQ ID NO: 1346812
uucuagguaaucaagcggg

SEQ ID NO: 1346814 - RNA, 19 nt, Artificial Sequence
  Description of Artificial Sequence: Synthetic oligonucleotide
  Sense strand starting at position 3792 of SEQ ID NO: 1242428
ccgcuugauuaccuagaaa

SEQ ID NO: 1346815 - RNA, 19 nt, Artificial Sequence
  Description of Artificial Sequence: Synthetic oligonucleotide
  Antisense strand to SEQ ID NO: 1346814
uuucuagguaaucaagcgg

SEQ ID NO: 1346816 - RNA, 19 nt, Artificial Sequence
  Description of Artificial Sequence: Synthetic oligonucleotide
  Sense strand starting at position 220 of SEQ ID NO: 1242429
auaggacagcucugaauau

SEQ ID NO: 1346817 - RNA, 19 nt, Artificial Sequence
  Description of Artificial Sequence: Synthetic oligonucleotide
  Antisense strand to SEQ ID NO: 1346816
auauucagagcuguccuau

SEQ ID NO: 1346818 - RNA, 19 nt, Artificial Sequence
  Description of Artificial Sequence: Synthetic oligonucleotide
  Sense strand starting at position 269 of SEQ ID NO: 1242429
guggguaccuccucaauug

SEQ ID NO: 1346819 - RNA, 19 nt, Artificial Sequence
  Description of Artificial Sequence: Synthetic oligonucleotide
  Antisense strand to SEQ ID NO: 1346818
caauugaggagguacccac

SEQ ID NO: 1346820 - RNA, 19 nt, Artificial Sequence
  Description of Artificial Sequence: Synthetic oligonucleotide
  Sense strand starting at position 303 of SEQ ID NO: 1242429
guguuaugacaaggaauga

SEQ ID NO: 1346821 - RNA, 19 nt, Artificial Sequence
  Description of Artificial Sequence: Synthetic oligonucleotide
  Antisense strand to SEQ ID NO: 1346820
ucauuccuugucauaacac

SEQ ID NO: 1346822 - RNA, 19 nt, Artificial Sequence
  Description of Artificial Sequence: Synthetic oligonucleotide
  Sense strand starting at position 590 of SEQ ID NO: 1242429
cucacagguccugacaauu

SEQ ID NO: 1346823 - RNA, 19 nt, Artificial Sequence
  Description of Artificial Sequence: Synthetic oligonucleotide
  Antisense strand to SEQ ID NO: 1346822
aauugucaggaccugugag

SEQ ID NO: 1346824 - RNA, 19 nt, Artificial Sequence
  Description of Artificial Sequence: Synthetic oligonucleotide
  Sense strand starting at position 641 of SEQ ID NO: 1242429
gaucauauaucggcagaga

SEQ ID NO: 1346825 - RNA, 19 nt, Artificial Sequence
  Description of Artificial Sequence: Synthetic oligonucleotide
  Antisense strand to SEQ ID NO: 1346824
ucucugccgauauaugauc

SEQ ID NO: 1346826 - RNA, 19 nt, Artificial Sequence
  Description of Artificial Sequence: Synthetic oligonucleotide
  Sense strand starting at position 2041 of SEQ ID NO: 1242429
ggccaauggaaacguuaga

SEQ ID NO: 1346827 - RNA, 19 nt, Artificial Sequence
  Description of Artificial Sequence: Synthetic oligonucleotide
  Antisense strand to SEQ ID NO: 1346826
ucuaacguuuccauuggcc

SEQ ID NO: 1346828 - RNA, 19 nt, Artificial Sequence
  Description of Artificial Sequence: Synthetic oligonucleotide
  Sense strand starting at position 2087 of SEQ ID NO: 1242429
ugguguccgcuuucgugaa

SEQ ID NO: 1346829 - RNA, 19 nt, Artificial Sequence
  Description of Artificial Sequence: Synthetic oligonucleotide
  Antisense strand to SEQ ID NO: 1346828
uucacgaaagcggacacca

SEQ ID NO: 1346830 - RNA, 19 nt, Artificial Sequence
  Description of Artificial Sequence: Synthetic oligonucleotide
  Sense strand starting at position 2105 of SEQ ID NO: 1242429
aaucgaguugccuaaccca

SEQ ID NO: 1346831 - RNA, 19 nt, Artificial Sequence
  Description of Artificial Sequence: Synthetic oligonucleotide
  Antisense strand to SEQ ID NO: 1346830
uggguuaggcaacucgauu

SEQ ID NO: 1346832 - RNA, 19 nt, Artificial Sequence
  Description of Artificial Sequence: Synthetic oligonucleotide
  Sense strand starting at position 2120 of SEQ ID NO: 1242429
cccagagcuuucccgagau

SEQ ID NO: 1346833 - RNA, 19 nt, Artificial Sequence
  Description of Artificial Sequence: Synthetic oligonucleotide
  Antisense strand to SEQ ID NO: 1346832
aucucgggaaagcucuggg

SEQ ID NO: 1346834 - RNA, 19 nt, Artificial Sequence
  Description of Artificial Sequence: Synthetic oligonucleotide
  Sense strand starting at position 2124 of SEQ ID NO: 1242429
gagcuuucccgagaugguc

SEQ ID NO: 1346835 - RNA, 19 nt, Artificial Sequence
  Description of Artificial Sequence: Synthetic oligonucleotide
  Antisense strand to SEQ ID NO: 1346834
gaccaucucgggaaagcuc

SEQ ID NO: 1346836 - RNA, 19 nt, Artificial Sequence
  Description of Artificial Sequence: Synthetic oligonucleotide
  Sense strand starting at position 2136 of SEQ ID NO: 1242429
gauggucuucguuacaggu

SEQ ID NO: 1346837 - RNA, 19 nt, Artificial Sequence
  Description of Artificial Sequence: Synthetic oligonucleotide
  Antisense strand to SEQ ID NO: 1346836
accuguaacgaagaccauc

SEQ ID NO: 1346838 - RNA, 19 nt, Artificial Sequence
  Description of Artificial Sequence: Synthetic oligonucleotide
  Sense strand starting at position 2180 of SEQ ID NO: 1242429
ucacuaggucauuaagcau

SEQ ID NO: 1346839 - RNA, 19 nt, Artificial Sequence
  Description of Artificial Sequence: Synthetic oligonucleotide
  Antisense strand to SEQ ID NO: 1346838
augcuuaaugaccuaguga

SEQ ID NO: 1346840 - RNA, 19 nt, Artificial Sequence
  Description of Artificial Sequence: Synthetic oligonucleotide
  Sense strand starting at position 2183 of SEQ ID NO: 1242429
cuaggucauuaagcaugua

SEQ ID NO: 1346841 - RNA, 19 nt, Artificial Sequence
  Description of Artificial Sequence: Synthetic oligonucleotide
  Antisense strand to SEQ ID NO: 1346840
uacaugcuuaaugaccuag

SEQ ID NO: 1346842 - RNA, 19 nt, Artificial Sequence
  Description of Artificial Sequence: Synthetic oligonucleotide
  Sense strand starting at position 2197 of SEQ ID NO: 1242429
auguacuuuggugguuaca

SEQ ID NO: 1346843 - RNA, 19 nt, Artificial Sequence
  Description of Artificial Sequence: Synthetic oligonucleotide
  Antisense strand to SEQ ID NO: 1346842
uguaaccaccaaaguacau

SEQ ID NO: 1346844 - RNA, 19 nt, Artificial Sequence
  Description of Artificial Sequence: Synthetic oligonucleotide
  Sense strand starting at position 2199 of SEQ ID NO: 1242429
guacuuuggugguuacaua

SEQ ID NO: 1346845 - RNA, 19 nt, Artificial Sequence
  Description of Artificial Sequence: Synthetic oligonucleotide
  Antisense strand to SEQ ID NO: 1346844
uauguaaccaccaaaguac

SEQ ID NO: 1346846 - RNA, 19 nt, Artificial Sequence
  Description of Artificial Sequence: Synthetic oligonucleotide
  Sense strand starting at position 2206 of SEQ ID NO: 1242429
ggugguuacauauaucuug

SEQ ID NO: 1346847 - RNA, 19 nt, Artificial Sequence
  Description of Artificial Sequence: Synthetic oligonucleotide
  Antisense strand to SEQ ID NO: 1346846
caagauauauguaaccacc

SEQ ID NO: 1346848 - RNA, 19 nt, Artificial Sequence
  Description of Artificial Sequence: Synthetic oligonucleotide
  Sense strand starting at position 2209 of SEQ ID NO: 1242429
gguuacauauaucuuggaa

SEQ ID NO: 1346849 - RNA, 19 nt, Artificial Sequence
  Description of Artificial Sequence: Synthetic oligonucleotide
  Antisense strand to SEQ ID NO: 1346848
uuccaagauauauguaacc

SEQ ID NO: 1346850 - RNA, 19 nt, Artificial Sequence
  Description of Artificial Sequence: Synthetic oligonucleotide
  Sense strand starting at position 2383 of SEQ ID NO: 1242429
ggugacuuggcguaacuga

SEQ ID NO: 1346851 - RNA, 19 nt, Artificial Sequence
  Description of Artificial Sequence: Synthetic oligonucleotide
  Antisense strand to SEQ ID NO: 1346850
ucaguuacgccaagucacc

SEQ ID NO: 1346852 - RNA, 19 nt, Artificial Sequence
  Description of Artificial Sequence: Synthetic oligonucleotide
  Sense strand starting at position 2388 of SEQ ID NO: 1242429
cuuggcguaacugagaaua

SEQ ID NO: 1346853 - RNA, 19 nt, Artificial Sequence
  Description of Artificial Sequence: Synthetic oligonucleotide
  Antisense strand to SEQ ID NO: 1346852
uauucucaguuacgccaag

SEQ ID NO: 1346854 - RNA, 19 nt, Artificial Sequence
  Description of Artificial Sequence: Synthetic oligonucleotide
  Sense strand starting at position 2579 of SEQ ID NO: 1242429
guacauuuguucugauuuc

SEQ ID NO: 1346855 - RNA, 19 nt, Artificial Sequence
  Description of Artificial Sequence: Synthetic oligonucleotide
  Antisense strand to SEQ ID NO: 1346854
gaaaucagaacaaauguac

SEQ ID NO: 1346856 - RNA, 19 nt, Artificial Sequence
  Description of Artificial Sequence: Synthetic oligonucleotide
  Sense strand starting at position 2608 of SEQ ID NO: 1242429
uugaauauucuuuggcaac

SEQ ID NO: 1346857 - RNA, 19 nt, Artificial Sequence
  Description of Artificial Sequence: Synthetic oligonucleotide
  Antisense strand to SEQ ID NO: 1346856
guugccaaagaauauucaa

SEQ ID NO: 1346858 - RNA, 19 nt, Artificial Sequence
  Description of Artificial Sequence: Synthetic oligonucleotide
  Sense strand starting at position 2614 of SEQ ID NO: 1242429
auucuuuggcaacaaguua

SEQ ID NO: 1346859 - RNA, 19 nt, Artificial Sequence
  Description of Artificial Sequence: Synthetic oligonucleotide
  Antisense strand to SEQ ID NO: 1346858
uaacuuguugccaaagaau

SEQ ID NO: 1346860 - RNA, 19 nt, Artificial Sequence
  Description of Artificial Sequence: Synthetic oligonucleotide
  Sense strand starting at position 2691 of SEQ ID NO: 1242429
uccuguauuagaggcgaua

SEQ ID NO: 1346861 - RNA, 19 nt, Artificial Sequence
  Description of Artificial Sequence: Synthetic oligonucleotide
  Antisense strand to SEQ ID NO: 1346860
uaucgccucuaauacagga

SEQ ID NO: 1346862 - RNA, 19 nt, Artificial Sequence
  Description of Artificial Sequence: Synthetic oligonucleotide
  Sense strand starting at position 2704 of SEQ ID NO: 1242429
gcgauaccuaucuacguua

SEQ ID NO: 1346863 - RNA, 19 nt, Artificial Sequence
  Description of Artificial Sequence: Synthetic oligonucleotide
  Antisense strand to SEQ ID NO: 1346862
uaacguagauagguaucgc

SEQ ID NO: 1346864 - RNA, 19 nt, Artificial Sequence
  Description of Artificial Sequence: Synthetic oligonucleotide
  Sense strand starting at position 2707 of SEQ ID NO: 1242429
auaccuaucuacguuauua

SEQ ID NO: 1346865 - RNA, 19 nt, Artificial Sequence
  Description of Artificial Sequence: Synthetic oligonucleotide
  Antisense strand to SEQ ID NO: 1346864
uaauaacguagauagguau

SEQ ID NO: 1346866 - RNA, 19 nt, Artificial Sequence
  Description of Artificial Sequence: Synthetic oligonucleotide
  Sense strand starting at position 2709 of SEQ ID NO: 1242429
accuaucuacguuauuaag

SEQ ID NO: 1346867 - RNA, 19 nt, Artificial Sequence
  Description of Artificial Sequence: Synthetic oligonucleotide
  Antisense strand to SEQ ID NO: 1346866
cuuaauaacguagauaggu

SEQ ID NO: 1346868 - RNA, 19 nt, Artificial Sequence
  Description of Artificial Sequence: Synthetic oligonucleotide
  Sense strand starting at position 2711 of SEQ ID NO: 1242429
cuaucuacguuauuaagac

SEQ ID NO: 1346869 - RNA, 19 nt, Artificial Sequence
  Description of Artificial Sequence: Synthetic oligonucleotide
  Antisense strand to SEQ ID NO: 1346868
gucuuaauaacguagauag

SEQ ID NO: 1346870 - RNA, 19 nt, Artificial Sequence
  Description of Artificial Sequence: Synthetic oligonucleotide
  Sense strand starting at position 2771 of SEQ ID NO: 1242429
cccuuucgcacagggaauu

SEQ ID NO: 1346871 - RNA, 19 nt, Artificial Sequence
  Description of Artificial Sequence: Synthetic oligonucleotide
  Antisense strand to SEQ ID NO: 1346870
aauucccugugcgaaaggg

SEQ ID NO: 1346872 - RNA, 19 nt, Artificial Sequence
  Description of Artificial Sequence: Synthetic oligonucleotide
  Sense strand starting at position 2931 of SEQ ID NO: 1242429
acccaaauuugugaguuga

SEQ ID NO: 1346873 - RNA, 19 nt, Artificial Sequence
  Description of Artificial Sequence: Synthetic oligonucleotide
  Antisense strand to SEQ ID NO: 1346872
ucaacucacaaauuugggu

SEQ ID NO: 1346874 - RNA, 19 nt, Artificial Sequence
  Description of Artificial Sequence: Synthetic oligonucleotide
  Sense strand starting at position 3056 of SEQ ID NO: 1242429
cugucagaucugggaucuu

SEQ ID NO: 1346875 - RNA, 19 nt, Artificial Sequence
  Description of Artificial Sequence: Synthetic oligonucleotide
  Antisense strand to SEQ ID NO: 1346874
aagaucccagaucugacag

SEQ ID NO: 1346876 - RNA, 19 nt, Artificial Sequence
  Description of Artificial Sequence: Synthetic oligonucleotide
  Sense strand starting at position 3082 of SEQ ID NO: 1242429
augccaguuccugaucuca

SEQ ID NO: 1346877 - RNA, 19 nt, Artificial Sequence
  Description of Artificial Sequence: Synthetic oligonucleotide
  Antisense strand to SEQ ID NO: 1346876
ugagaucaggaacuggcau

SEQ ID NO: 1346878 - RNA, 19 nt, Artificial Sequence
  Description of Artificial Sequence: Synthetic oligonucleotide
  Sense strand starting at position 3125 of SEQ ID NO: 1242429
augacagacuucuugacuu

SEQ ID NO: 1346879 - RNA, 19 nt, Artificial Sequence
  Description of Artificial Sequence: Synthetic oligonucleotide
  Antisense strand to SEQ ID NO: 1346878
aagucaagaagucugucau

SEQ ID NO: 1346880 - RNA, 19 nt, Artificial Sequence
  Description of Artificial Sequence: Synthetic oligonucleotide
  Sense strand starting at position 3132 of SEQ ID NO: 1242429
acuucuugacuugacagua

SEQ ID NO: 1346881 - RNA, 19 nt, Artificial Sequence
  Description of Artificial Sequence: Synthetic oligonucleotide
  Antisense strand to SEQ ID NO: 1346880
uacugucaagucaagaagu

SEQ ID NO: 1346882 - RNA, 19 nt, Artificial Sequence
  Description of Artificial Sequence: Synthetic oligonucleotide
  Sense strand starting at position 3237 of SEQ ID NO: 1242429
auggauaagucacccauua

SEQ ID NO: 1346883 - RNA, 19 nt, Artificial Sequence
  Description of Artificial Sequence: Synthetic oligonucleotide
  Antisense strand to SEQ ID NO: 1346882
uaaugggugacuuauccau

SEQ ID NO: 1346884 - RNA, 19 nt, Artificial Sequence
  Description of Artificial Sequence: Synthetic oligonucleotide
  Sense strand starting at position 3459 of SEQ ID NO: 1242429
gcuuuaaggaucugggaga

SEQ ID NO: 1346885 - RNA, 19 nt, Artificial Sequence
  Description of Artificial Sequence: Synthetic oligonucleotide
  Antisense strand to SEQ ID NO: 1346884
ucucccagauccuuaaagc

SEQ ID NO: 1346886 - RNA, 19 nt, Artificial Sequence
  Description of Artificial Sequence: Synthetic oligonucleotide
  Sense strand starting at position 3593 of SEQ ID NO: 1242429
gguuuaauggaguggaaua

SEQ ID NO: 1346887 - RNA, 19 nt, Artificial Sequence
  Description of Artificial Sequence: Synthetic oligonucleotide
  Antisense strand to SEQ ID NO: 1346886
uauuccacuccauuaaacc

SEQ ID NO: 1346888 - RNA, 19 nt, Artificial Sequence
  Description of Artificial Sequence: Synthetic oligonucleotide
  Sense strand starting at position 3594 of SEQ ID NO: 1242429
guuuaauggaguggaauaa

SEQ ID NO: 1346889 - RNA, 19 nt, Artificial Sequence
  Description of Artificial Sequence: Synthetic oligonucleotide
  Antisense strand to SEQ ID NO: 1346888
uuauuccacuccauuaaac

SEQ ID NO: 1346890 - RNA, 19 nt, Artificial Sequence
  Description of Artificial Sequence: Synthetic oligonucleotide
  Sense strand starting at position 3682 of SEQ ID NO: 1242429
ggcacaaacuaugcuauua

SEQ ID NO: 1346891 - RNA, 19 nt, Artificial Sequence
  Description of Artificial Sequence: Synthetic oligonucleotide
  Antisense strand to SEQ ID NO: 1346890
uaauagcauaguuugugcc

SEQ ID NO: 1346892 - RNA, 19 nt, Artificial Sequence
  Description of Artificial Sequence: Synthetic oligonucleotide
  Sense strand starting at position 3701 of SEQ ID NO: 1242429
ggaauaugaugagaaggaa

SEQ ID NO: 1346893 - RNA, 19 nt, Artificial Sequence
  Description of Artificial Sequence: Synthetic oligonucleotide
  Antisense strand to SEQ ID NO: 1346892
uuccuucucaucauauucc

SEQ ID NO: 1346894 - RNA, 19 nt, Artificial Sequence
  Description of Artificial Sequence: Synthetic oligonucleotide
  Sense strand starting at position 3737 of SEQ ID NO: 1242429
guuggucuaagagguugau

SEQ ID NO: 1346895 - RNA, 19 nt, Artificial Sequence
  Description of Artificial Sequence: Synthetic oligonucleotide
  Antisense strand to SEQ ID NO: 1346894
aucaaccucuuagaccaac

SEQ ID NO: 1346896 - RNA, 19 nt, Artificial Sequence
  Description of Artificial Sequence: Synthetic oligonucleotide
  Sense strand starting at position 444 of SEQ ID NO: 1242430
acagcuguucucuguaaac

SEQ ID NO: 1346897 - RNA, 19 nt, Artificial Sequence
  Description of Artificial Sequence: Synthetic oligonucleotide
  Antisense strand to SEQ ID NO: 1346896
guuuacagagaacagcugu

SEQ ID NO: 1346898 - RNA, 19 nt, Artificial Sequence
  Description of Artificial Sequence: Synthetic oligonucleotide
  Sense strand starting at position 446 of SEQ ID NO: 1242430
agcuguucucuguaaacaa

SEQ ID NO: 1346899 - RNA, 19 nt, Artificial Sequence
  Description of Artificial Sequence: Synthetic oligonucleotide
  Antisense strand to SEQ ID NO: 1346898
uuguuuacagagaacagcu

SEQ ID NO: 1346900 - RNA, 19 nt, Artificial Sequence
  Description of Artificial Sequence: Synthetic oligonucleotide
  Sense strand starting at position 552 of SEQ ID NO: 1242430
ggagaacagugcucccuaa

SEQ ID NO: 1346901 - RNA, 19 nt, Artificial Sequence
  Description of Artificial Sequence: Synthetic oligonucleotide
  Antisense strand to SEQ ID NO: 1346900
uuagggagcacuguucucc

SEQ ID NO: 1346902 - RNA, 19 nt, Artificial Sequence
  Description of Artificial Sequence: Synthetic oligonucleotide
  Sense strand starting at position 556 of SEQ ID NO: 1242430
aacagugcucccuaaacgu

SEQ ID NO: 1346903 - RNA, 19 nt, Artificial Sequence
  Description of Artificial Sequence: Synthetic oligonucleotide
  Antisense strand to SEQ ID NO: 1346902
acguuuagggagcacuguu

SEQ ID NO: 1346904 - RNA, 19 nt, Artificial Sequence
  Description of Artificial Sequence: Synthetic oligonucleotide
  Sense strand starting at position 570 of SEQ ID NO: 1242430
aacguucucucuucguaua

SEQ ID NO: 1346905 - RNA, 19 nt, Artificial Sequence
  Description of Artificial Sequence: Synthetic oligonucleotide
  Antisense strand to SEQ ID NO: 1346904
uauacgaagagagaacguu

SEQ ID NO: 1346906 - RNA, 19 nt, Artificial Sequence
  Description of Artificial Sequence: Synthetic oligonucleotide
  Sense strand starting at position 620 of SEQ ID NO: 1242430
uggguacgugagugauugu

SEQ ID NO: 1346907 - RNA, 19 nt, Artificial Sequence
  Description of Artificial Sequence: Synthetic oligonucleotide
  Antisense strand to SEQ ID NO: 1346906
acaaucacucacguaccca

SEQ ID NO: 1346908 - RNA, 19 nt, Artificial Sequence
  Description of Artificial Sequence: Synthetic oligonucleotide
  Sense strand starting at position 623 of SEQ ID NO: 1242430
guacgugagugauugucca

SEQ ID NO: 1346909 - RNA, 19 nt, Artificial Sequence
  Description of Artificial Sequence: Synthetic oligonucleotide
  Antisense strand to SEQ ID NO: 1346908
uggacaaucacucacguac

SEQ ID NO: 1346910 - RNA, 19 nt, Artificial Sequence
  Description of Artificial Sequence: Synthetic oligonucleotide
  Sense strand starting at position 631 of SEQ ID NO: 1242430
gugauuguccaaggcccau

SEQ ID NO: 1346911 - RNA, 19 nt, Artificial Sequence
  Description of Artificial Sequence: Synthetic oligonucleotide
  Antisense strand to SEQ ID NO: 1346910
augggccuuggacaaucac

SEQ ID NO: 1346912 - RNA, 19 nt, Artificial Sequence
  Description of Artificial Sequence: Synthetic oligonucleotide
  Sense strand starting at position 709 of SEQ ID NO: 1242430
cgagaagcugcagaaugau

SEQ ID NO: 1346913 - RNA, 19 nt, Artificial Sequence
  Description of Artificial Sequence: Synthetic oligonucleotide
  Antisense strand to SEQ ID NO: 1346912
aucauucugcagcuucucg

SEQ ID NO: 1346914 - RNA, 19 nt, Artificial Sequence
  Description of Artificial Sequence: Synthetic oligonucleotide
  Sense strand starting at position 752 of SEQ ID NO: 1242430
gagagaaguugugaucaaa

SEQ ID NO: 1346915 - RNA, 19 nt, Artificial Sequence
  Description of Artificial Sequence: Synthetic oligonucleotide
  Antisense strand to SEQ ID NO: 1346914
uuugaucacaacuucucuc

SEQ ID NO: 1346916 - RNA, 19 nt, Artificial Sequence
  Description of Artificial Sequence: Synthetic oligonucleotide
  Sense strand starting at position 795 of SEQ ID NO: 1242430
gagccuaccuaggauaaga

SEQ ID NO: 1346917 - RNA, 19 nt, Artificial Sequence
  Description of Artificial Sequence: Synthetic oligonucleotide
  Antisense strand to SEQ ID NO: 1346916
ucuuauccuagguaggcuc

SEQ ID NO: 1346918 - RNA, 19 nt, Artificial Sequence
  Description of Artificial Sequence: Synthetic oligonucleotide
  Sense strand starting at position 878 of SEQ ID NO: 1242430
cugacuaugccuugagcua

SEQ ID NO: 1346919 - RNA, 19 nt, Artificial Sequence
  Description of Artificial Sequence: Synthetic oligonucleotide
  Antisense strand to SEQ ID NO: 1346918
uagcucaaggcauagucag

SEQ ID NO: 1346920 - RNA, 19 nt, Artificial Sequence
  Description of Artificial Sequence: Synthetic oligonucleotide
  Sense strand starting at position 879 of SEQ ID NO: 1242430
ugacuaugccuugagcuau

SEQ ID NO: 1346921 - RNA, 19 nt, Artificial Sequence
  Description of Artificial Sequence: Synthetic oligonucleotide
  Antisense strand to SEQ ID NO: 1346920
auagcucaaggcauaguca

SEQ ID NO: 1346922 - RNA, 19 nt, Artificial Sequence
  Description of Artificial Sequence: Synthetic oligonucleotide
  Sense strand starting at position 901 of SEQ ID NO: 1242430
cgaagagacucgucugguu

SEQ ID NO: 1346923 - RNA, 19 nt, Artificial Sequence
  Description of Artificial Sequence: Synthetic oligonucleotide
  Antisense strand to SEQ ID NO: 1346922
aaccagacgagucucuucg

SEQ ID NO: 1346924 - RNA, 19 nt, Artificial Sequence
  Description of Artificial Sequence: Synthetic oligonucleotide
  Sense strand starting at position 903 of SEQ ID NO: 1242430
aagagacucgucugguuua

SEQ ID NO: 1346925 - RNA, 19 nt, Artificial Sequence
  Description of Artificial Sequence: Synthetic oligonucleotide
  Antisense strand to SEQ ID NO: 1346924
uaaaccagacgagucucuu

SEQ ID NO: 1346926 - RNA, 19 nt, Artificial Sequence
  Description of Artificial Sequence: Synthetic oligonucleotide
  Sense strand starting at position 916 of SEQ ID NO: 1242430
gguuuacacuucuuaaagg

SEQ ID NO: 1346927 - RNA, 19 nt, Artificial Sequence
  Description of Artificial Sequence: Synthetic oligonucleotide
  Antisense strand to SEQ ID NO: 1346926
ccuuuaagaaguguaaacc

SEQ ID NO: 1346928 - RNA, 19 nt, Artificial Sequence
  Description of Artificial Sequence: Synthetic oligonucleotide
  Sense strand starting at position 917 of SEQ ID NO: 1242430
guuuacacuucuuaaagga

SEQ ID NO: 1346929 - RNA, 19 nt, Artificial Sequence
  Description of Artificial Sequence: Synthetic oligonucleotide
  Antisense strand to SEQ ID NO: 1346928
uccuuuaagaaguguaaac

SEQ ID NO: 1346930 - RNA, 19 nt, Artificial Sequence
  Description of Artificial Sequence: Synthetic oligonucleotide
  Sense strand starting at position 1038 of SEQ ID NO: 1242430
uggaucuccuaacaaauga

SEQ ID NO: 1346931 - RNA, 19 nt, Artificial Sequence
  Description of Artificial Sequence: Synthetic oligonucleotide
  Antisense strand to SEQ ID NO: 1346930
ucauuuguuaggagaucca

SEQ ID NO: 1346932 - RNA, 19 nt, Artificial Sequence
  Description of Artificial Sequence: Synthetic oligonucleotide
  Sense strand starting at position 1291 of SEQ ID NO: 1242430
cgagguucugcagaagaga

SEQ ID NO: 1346933 - RNA, 19 nt, Artificial Sequence
  Description of Artificial Sequence: Synthetic oligonucleotide
  Antisense strand to SEQ ID NO: 1346932
ucucuucugcagaaccucg

SEQ ID NO: 1346934 - RNA, 19 nt, Artificial Sequence
  Description of Artificial Sequence: Synthetic oligonucleotide
  Sense strand starting at position 1390 of SEQ ID NO: 1242430
gcucaucuccggcuugagu

SEQ ID NO: 1346935 - RNA, 19 nt, Artificial Sequence
  Description of Artificial Sequence: Synthetic oligonucleotide
  Antisense strand to SEQ ID NO: 1346934
acucaagccggagaugagc

SEQ ID NO: 1346936 - RNA, 19 nt, Artificial Sequence
  Description of Artificial Sequence: Synthetic oligonucleotide
  Sense strand starting at position 2255 of SEQ ID NO: 1242430
gaggcuuccuccuuuagua

SEQ ID NO: 1346937 - RNA, 19 nt, Artificial Sequence
  Description of Artificial Sequence: Synthetic oligonucleotide
  Antisense strand to SEQ ID NO: 1346936
uacuaaaggaggaagccuc

SEQ ID NO: 1346938 - RNA, 19 nt, Artificial Sequence
  Description of Artificial Sequence: Synthetic oligonucleotide
  Sense strand starting at position 2267 of SEQ ID NO: 1242430
uuuaguagguucuugaaau

SEQ ID NO: 1346939 - RNA, 19 nt, Artificial Sequence
  Description of Artificial Sequence: Synthetic oligonucleotide
  Antisense strand to SEQ ID NO: 1346938
auuucaagaaccuacuaaa

SEQ ID NO: 1346940 - RNA, 19 nt, Artificial Sequence
  Description of Artificial Sequence: Synthetic oligonucleotide
  Sense strand starting at position 2339 of SEQ ID NO: 1242430
gcagguuugcuacaacaag

SEQ ID NO: 1346941 - RNA, 19 nt, Artificial Sequence
  Description of Artificial Sequence: Synthetic oligonucleotide
  Antisense strand to SEQ ID NO: 1346940
cuuguuguagcaaaccugc

SEQ ID NO: 1346942 - RNA, 19 nt, Artificial Sequence
  Description of Artificial Sequence: Synthetic oligonucleotide
  Sense strand starting at position 2622 of SEQ ID NO: 1242430
gagaaaucaugagggcaaa

SEQ ID NO: 1346943 - RNA, 19 nt, Artificial Sequence
  Description of Artificial Sequence: Synthetic oligonucleotide
  Antisense strand to SEQ ID NO: 1346942
uuugcccucaugauuucuc

SEQ ID NO: 1346944 - RNA, 19 nt, Artificial Sequence
  Description of Artificial Sequence: Synthetic oligonucleotide
  Sense strand starting at position 2763 of SEQ ID NO: 1242430
agaagaauuggguggcaag

SEQ ID NO: 1346945 - RNA, 19 nt, Artificial Sequence
  Description of Artificial Sequence: Synthetic oligonucleotide
  Antisense strand to SEQ ID NO: 1346944
cuugccacccaauucuucu

SEQ ID NO: 1346946 - RNA, 19 nt, Artificial Sequence
  Description of Artificial Sequence: Synthetic oligonucleotide
  Sense strand starting at position 2790 of SEQ ID NO: 1242430
agcugagaguggaauggua

SEQ ID NO: 1346947 - RNA, 19 nt, Artificial Sequence
  Description of Artificial Sequence: Synthetic oligonucleotide
  Antisense strand to SEQ ID NO: 1346946
uaccauuccacucucagcu

SEQ ID NO: 1346948 - RNA, 19 nt, Artificial Sequence
  Description of Artificial Sequence: Synthetic oligonucleotide
  Sense strand starting at position 3102 of SEQ ID NO: 1242430
ugggcauccuuuccagaga

SEQ ID NO: 1346949 - RNA, 19 nt, Artificial Sequence
  Description of Artificial Sequence: Synthetic oligonucleotide
  Antisense strand to SEQ ID NO: 1346948
ucucuggaaaggaugccca

SEQ ID NO: 1346950 - RNA, 19 nt, Artificial Sequence
  Description of Artificial Sequence: Synthetic oligonucleotide
  Sense strand starting at position 3145 of SEQ ID NO: 1242430
gcugaauggccaggaaaca

SEQ ID NO: 1346951 - RNA, 19 nt, Artificial Sequence
  Description of Artificial Sequence: Synthetic oligonucleotide
  Antisense strand to SEQ ID NO: 1346950
uguuuccuggccauucagc

SEQ ID NO: 1346952 - RNA, 19 nt, Artificial Sequence
  Description of Artificial Sequence: Synthetic oligonucleotide
  Sense strand starting at position 3183 of SEQ ID NO: 1242430
cugagcauccaguacugua

SEQ ID NO: 1346953 - RNA, 19 nt, Artificial Sequence
  Description of Artificial Sequence: Synthetic oligonucleotide
  Antisense strand to SEQ ID NO: 1346952
uacaguacuggaugcucag

SEQ ID NO: 1346954 - RNA, 19 nt, Artificial Sequence
  Description of Artificial Sequence: Synthetic oligonucleotide
  Sense strand starting at position 3358 of SEQ ID NO: 1242430
guggguacagcacagaaua

SEQ ID NO: 1346955 - RNA, 19 nt, Artificial Sequence
  Description of Artificial Sequence: Synthetic oligonucleotide
  Antisense strand to SEQ ID NO: 1346954
uauucugugcuguacccac

SEQ ID NO: 1346956 - RNA, 19 nt, Artificial Sequence
  Description of Artificial Sequence: Synthetic oligonucleotide
  Sense strand starting at position 3423 of SEQ ID NO: 1242430
ccgugaggcugcucccaaa

SEQ ID NO: 1346957 - RNA, 19 nt, Artificial Sequence
  Description of Artificial Sequence: Synthetic oligonucleotide
  Antisense strand to SEQ ID NO: 1346956
uuugggagcagccucacgg

SEQ ID NO: 1346958 - RNA, 19 nt, Artificial Sequence
  Description of Artificial Sequence: Synthetic oligonucleotide
  Sense strand starting at position 3586 of SEQ ID NO: 1242430
gccaucacugcagaugaaa

SEQ ID NO: 1346959 - RNA, 19 nt, Artificial Sequence
  Description of Artificial Sequence: Synthetic oligonucleotide
  Antisense strand to SEQ ID NO: 1346958
uuucaucugcagugauggc

SEQ ID NO: 1346960 - RNA, 19 nt, Artificial Sequence
  Description of Artificial Sequence: Synthetic oligonucleotide
  Sense strand starting at position 3625 of SEQ ID NO: 1242430
gaagaagugugaucccaag

SEQ ID NO: 1346961 - RNA, 19 nt, Artificial Sequence
  Description of Artificial Sequence: Synthetic oligonucleotide
  Antisense strand to SEQ ID NO: 1346960
cuugggaucacacuucuuc

SEQ ID NO: 1346962 - RNA, 19 nt, Artificial Sequence
  Description of Artificial Sequence: Synthetic oligonucleotide
  Sense strand starting at position 3631 of SEQ ID NO: 1242430
gugugaucccaaggaagga

SEQ ID NO: 1346963 - RNA, 19 nt, Artificial Sequence
  Description of Artificial Sequence: Synthetic oligonucleotide
  Antisense strand to SEQ ID NO: 1346962
uccuuccuugggaucacac

SEQ ID NO: 1346964 - RNA, 19 nt, Artificial Sequence
  Description of Artificial Sequence: Synthetic oligonucleotide
  Sense strand starting at position 3918 of SEQ ID NO: 1242430
uugucacucucgucugaua

SEQ ID NO: 1346965 - RNA, 19 nt, Artificial Sequence
  Description of Artificial Sequence: Synthetic oligonucleotide
  Antisense strand to SEQ ID NO: 1346964
uaucagacgagagugacaa

SEQ ID NO: 1346966 - RNA, 19 nt, Artificial Sequence
  Description of Artificial Sequence: Synthetic oligonucleotide
  Sense strand starting at position 3920 of SEQ ID NO: 1242430
gucacucucgucugauauu

SEQ ID NO: 1346967 - RNA, 19 nt, Artificial Sequence
  Description of Artificial Sequence: Synthetic oligonucleotide
  Antisense strand to SEQ ID NO: 1346966
aauaucagacgagagugac

SEQ ID NO: 1346968 - RNA, 19 nt, Artificial Sequence
  Description of Artificial Sequence: Synthetic oligonucleotide
  Sense strand starting at position 3921 of SEQ ID NO: 1242430
ucacucucgucugauauuu

SEQ ID NO: 1346969 - RNA, 19 nt, Artificial Sequence
  Description of Artificial Sequence: Synthetic oligonucleotide
  Antisense strand to SEQ ID NO: 1346968
aaauaucagacgagaguga

SEQ ID NO: 1346970 - RNA, 19 nt, Artificial Sequence
  Description of Artificial Sequence: Synthetic oligonucleotide
  Sense strand starting at position 3957 of SEQ ID NO: 1242430
ucuguaagcucauugcuuu

SEQ ID NO: 1346971 - RNA, 19 nt, Artificial Sequence
  Description of Artificial Sequence: Synthetic oligonucleotide
  Antisense strand to SEQ ID NO: 1346970
aaagcaaugagcuuacaga

SEQ ID NO: 1346972 - RNA, 19 nt, Artificial Sequence
  Description of Artificial Sequence: Synthetic oligonucleotide
  Sense strand starting at position 3958 of SEQ ID NO: 1242430
cuguaagcucauugcuuua

SEQ ID NO: 1346973 - RNA, 19 nt, Artificial Sequence
  Description of Artificial Sequence: Synthetic oligonucleotide
  Antisense strand to SEQ ID NO: 1346972
uaaagcaaugagcuuacag

SEQ ID NO: 1346974 - RNA, 19 nt, Artificial Sequence
  Description of Artificial Sequence: Synthetic oligonucleotide
  Sense strand starting at position 3977 of SEQ ID NO: 1242430
ucaaauauuuguugagcuu

SEQ ID NO: 1346975 - RNA, 19 nt, Artificial Sequence
  Description of Artificial Sequence: Synthetic oligonucleotide
  Antisense strand to SEQ ID NO: 1346974
aagcucaacaaauauuuga

SEQ ID NO: 1346976 - RNA, 19 nt, Artificial Sequence
  Description of Artificial Sequence: Synthetic oligonucleotide
  Sense strand starting at position 55 of SEQ ID NO: 1242431
ugcacucuagucugagcua

SEQ ID NO: 1346977 - RNA, 19 nt, Artificial Sequence
  Description of Artificial Sequence: Synthetic oligonucleotide
  Antisense strand to SEQ ID NO: 1346976
uagcucagacuagagugca

SEQ ID NO: 1346978 - RNA, 19 nt, Artificial Sequence
  Description of Artificial Sequence: Synthetic oligonucleotide
  Sense strand starting at position 139 of SEQ ID NO: 1242431
aaauuaugguguuaggcaa

SEQ ID NO: 1346979 - RNA, 19 nt, Artificial Sequence
  Description of Artificial Sequence: Synthetic oligonucleotide
  Antisense strand to SEQ ID NO: 1346978
uugccuaacaccauaauuu

SEQ ID NO: 1346980 - RNA, 19 nt, Artificial Sequence
  Description of Artificial Sequence: Synthetic oligonucleotide
  Sense strand starting at position 143 of SEQ ID NO: 1242431
uaugguguuaggcaagaga

SEQ ID NO: 1346981 - RNA, 19 nt, Artificial Sequence
  Description of Artificial Sequence: Synthetic oligonucleotide
  Antisense strand to SEQ ID NO: 1346980
ucucuugccuaacaccaua

SEQ ID NO: 1346982 - RNA, 19 nt, Artificial Sequence
  Description of Artificial Sequence: Synthetic oligonucleotide
  Sense strand starting at position 156 of SEQ ID NO: 1242431
aagagacugcacugaguua

SEQ ID NO: 1346983 - RNA, 19 nt, Artificial Sequence
  Description of Artificial Sequence: Synthetic oligonucleotide
  Antisense strand to SEQ ID NO: 1346982
uaacucagugcagucucuu

SEQ ID NO: 1346984 - RNA, 19 nt, Artificial Sequence
  Description of Artificial Sequence: Synthetic oligonucleotide
  Sense strand starting at position 208 of SEQ ID NO: 1242431
cagaguguacugugugaca

SEQ ID NO: 1346985 - RNA, 19 nt, Artificial Sequence
  Description of Artificial Sequence: Synthetic oligonucleotide
  Antisense strand to SEQ ID NO: 1346984
ugucacacaguacacucug

SEQ ID NO: 1346986 - RNA, 19 nt, Artificial Sequence
  Description of Artificial Sequence: Synthetic oligonucleotide
  Sense strand starting at position 210 of SEQ ID NO: 1242431
gaguguacugugugacagu

SEQ ID NO: 1346987 - RNA, 19 nt, Artificial Sequence
  Description of Artificial Sequence: Synthetic oligonucleotide
  Antisense strand to SEQ ID NO: 1346986
acugucacacaguacacuc

SEQ ID NO: 1346988 - RNA, 19 nt, Artificial Sequence
  Description of Artificial Sequence: Synthetic oligonucleotide
  Sense strand starting at position 254 of SEQ ID NO: 1242431
ccauauauguuagucacuu

SEQ ID NO: 1346989 - RNA, 19 nt, Artificial Sequence
  Description of Artificial Sequence: Synthetic oligonucleotide
  Antisense strand to SEQ ID NO: 1346988
aagugacuaacauauaugg

SEQ ID NO: 1346990 - RNA, 19 nt, Artificial Sequence
  Description of Artificial Sequence: Synthetic oligonucleotide
  Sense strand starting at position 258 of SEQ ID NO: 1242431
auauguuagucacuuguga

SEQ ID NO: 1346991 - RNA, 19 nt, Artificial Sequence
  Description of Artificial Sequence: Synthetic oligonucleotide
  Antisense strand to SEQ ID NO: 1346990
ucacaagugacuaacauau

SEQ ID NO: 1346992 - RNA, 19 nt, Artificial Sequence
  Description of Artificial Sequence: Synthetic oligonucleotide
  Sense strand starting at position 260 of SEQ ID NO: 1242431
auguuagucacuugugacu

SEQ ID NO: 1346993 - RNA, 19 nt, Artificial Sequence
  Description of Artificial Sequence: Synthetic oligonucleotide
  Antisense strand to SEQ ID NO: 1346992
agucacaagugacuaacau

SEQ ID NO: 1346994 - RNA, 19 nt, Artificial Sequence
  Description of Artificial Sequence: Synthetic oligonucleotide
  Sense strand starting at position 273 of SEQ ID NO: 1242431
gugacuugcugaucuacaa

SEQ ID NO: 1346995 - RNA, 19 nt, Artificial Sequence
  Description of Artificial Sequence: Synthetic oligonucleotide
  Antisense strand to SEQ ID NO: 1346994
uuguagaucagcaagucac

SEQ ID NO: 1346996 - RNA, 19 nt, Artificial Sequence
  Description of Artificial Sequence: Synthetic oligonucleotide
  Sense strand starting at position 304 of SEQ ID NO: 1242431
aauaacugguguuaguaau

SEQ ID NO: 1346997 - RNA, 19 nt, Artificial Sequence
  Description of Artificial Sequence: Synthetic oligonucleotide
  Antisense strand to SEQ ID NO: 1346996
auuacuaacaccaguuauu

SEQ ID NO: 1346998 - RNA, 19 nt, Artificial Sequence
  Description of Artificial Sequence: Synthetic oligonucleotide
  Sense strand starting at position 310 of SEQ ID NO: 1242431
ugguguuaguaauaaugau

SEQ ID NO: 1346999 - RNA, 19 nt, Artificial Sequence
  Description of Artificial Sequence: Synthetic oligonucleotide
  Antisense strand to SEQ ID NO: 1346998
aucauuauuacuaacacca

SEQ ID NO: 1347000 - RNA, 19 nt, Artificial Sequence
  Description of Artificial Sequence: Synthetic oligonucleotide
  Sense strand starting at position 372 of SEQ ID NO: 1242431
gguccucuaugucaaggaa

SEQ ID NO: 1347001 - RNA, 19 nt, Artificial Sequence
  Description of Artificial Sequence: Synthetic oligonucleotide
  Antisense strand to SEQ ID NO: 1347000
uuccuugacauagaggacc

SEQ ID NO: 1347002 - RNA, 19 nt, Artificial Sequence
  Description of Artificial Sequence: Synthetic oligonucleotide
  Sense strand starting at position 375 of SEQ ID NO: 1242431
ccucuaugucaaggaagaa

SEQ ID NO: 1347003 - RNA, 19 nt, Artificial Sequence
  Description of Artificial Sequence: Synthetic oligonucleotide
  Antisense strand to SEQ ID NO: 1347002
uucuuccuugacauagagg

SEQ ID NO: 1347004 - RNA, 19 nt, Artificial Sequence
  Description of Artificial Sequence: Synthetic oligonucleotide
  Sense strand starting at position 549 of SEQ ID NO: 1242431
uaacuaagaucguuuagca

SEQ ID NO: 1347005 - RNA, 19 nt, Artificial Sequence
  Description of Artificial Sequence: Synthetic oligonucleotide
  Antisense strand to SEQ ID NO: 1347004
ugcuaaacgaucuuaguua

SEQ ID NO: 1347006 - RNA, 19 nt, Artificial Sequence
  Description of Artificial Sequence: Synthetic oligonucleotide
  Sense strand starting at position 1024 of SEQ ID NO: 1242431
ucagucuuugcagaccaga

SEQ ID NO: 1347007 - RNA, 19 nt, Artificial Sequence
  Description of Artificial Sequence: Synthetic oligonucleotide
  Antisense strand to SEQ ID NO: 1347006
ucuggucugcaaagacuga

SEQ ID NO: 1347008 - RNA, 19 nt, Artificial Sequence
  Description of Artificial Sequence: Synthetic oligonucleotide
  Sense strand starting at position 1066 of SEQ ID NO: 1242431
guuguucuaacgugggaaa

SEQ ID NO: 1347009 - RNA, 19 nt, Artificial Sequence
  Description of Artificial Sequence: Synthetic oligonucleotide
  Antisense strand to SEQ ID NO: 1347008
uuucccacguuagaacaac

SEQ ID NO: 1347010 - RNA, 19 nt, Artificial Sequence
  Description of Artificial Sequence: Synthetic oligonucleotide
  Sense strand starting at position 1150 of SEQ ID NO: 1242431
aaugaaaugugagcgucau

SEQ ID NO: 1347011 - RNA, 19 nt, Artificial Sequence
  Description of Artificial Sequence: Synthetic oligonucleotide
  Antisense strand to SEQ ID NO: 1347010
augacgcucacauuucauu

SEQ ID NO: 1347012 - RNA, 19 nt, Artificial Sequence
  Description of Artificial Sequence: Synthetic oligonucleotide
  Sense strand starting at position 1151 of SEQ ID NO: 1242431
augaaaugugagcgucaug

SEQ ID NO: 1347013 - RNA, 19 nt, Artificial Sequence
  Description of Artificial Sequence: Synthetic oligonucleotide
  Antisense strand to SEQ ID NO: 1347012
caugacgcucacauuucau

SEQ ID NO: 1347014 - RNA, 19 nt, Artificial Sequence
  Description of Artificial Sequence: Synthetic oligonucleotide
  Sense strand starting at position 1154 of SEQ ID NO: 1242431
aaaugugagcgucaugcuu

SEQ ID NO: 1347015 - RNA, 19 nt, Artificial Sequence
  Description of Artificial Sequence: Synthetic oligonucleotide
  Antisense strand to SEQ ID NO: 1347014
aagcaugacgcucacauuu

SEQ ID NO: 1347016 - RNA, 19 nt, Artificial Sequence
  Description of Artificial Sequence: Synthetic oligonucleotide
  Sense strand starting at position 1173 of SEQ ID NO: 1242431
uuccacaagucaugaaaga

SEQ ID NO: 1347017 - RNA, 19 nt, Artificial Sequence
  Description of Artificial Sequence: Synthetic oligonucleotide
  Antisense strand to SEQ ID NO: 1347016
ucuuucaugacuuguggaa

SEQ ID NO: 1347018 - RNA, 19 nt, Artificial Sequence
  Description of Artificial Sequence: Synthetic oligonucleotide
  Sense strand starting at position 1306 of SEQ ID NO: 1242431
acaaguuaugggugcagca

SEQ ID NO: 1347019 - RNA, 19 nt, Artificial Sequence
  Description of Artificial Sequence: Synthetic oligonucleotide
  Antisense strand to SEQ ID NO: 1347018
ugcugcacccauaacuugu

SEQ ID NO: 1347020 - RNA, 19 nt, Artificial Sequence
  Description of Artificial Sequence: Synthetic oligonucleotide
  Sense strand starting at position 1773 of SEQ ID NO: 1242431
ccgucacucacucggauaa

SEQ ID NO: 1347021 - RNA, 19 nt, Artificial Sequence
  Description of Artificial Sequence: Synthetic oligonucleotide
  Antisense strand to SEQ ID NO: 1347020
uuauccgagugagugacgg

SEQ ID NO: 1347022 - RNA, 19 nt, Artificial Sequence
  Description of Artificial Sequence: Synthetic oligonucleotide
  Sense strand starting at position 2226 of SEQ ID NO: 1242431
gggauaccgccgugguuua

SEQ ID NO: 1347023 - RNA, 19 nt, Artificial Sequence
  Description of Artificial Sequence: Synthetic oligonucleotide
  Antisense strand to SEQ ID NO: 1347022
uaaaccacggcgguauccc

SEQ ID NO: 1347024 - RNA, 19 nt, Artificial Sequence
  Description of Artificial Sequence: Synthetic oligonucleotide
  Sense strand starting at position 2246 of SEQ ID NO: 1242431
acgcggucccugugaggaa

SEQ ID NO: 1347025 - RNA, 19 nt, Artificial Sequence
  Description of Artificial Sequence: Synthetic oligonucleotide
  Antisense strand to SEQ ID NO: 1347024
uuccucacagggaccgcgu

SEQ ID NO: 1347026 - RNA, 19 nt, Artificial Sequence
  Description of Artificial Sequence: Synthetic oligonucleotide
  Sense strand starting at position 2282 of SEQ ID NO: 1242431
ggcagauaaccuggcaauu

SEQ ID NO: 1347027 - RNA, 19 nt, Artificial Sequence
  Description of Artificial Sequence: Synthetic oligonucleotide
  Antisense strand to SEQ ID NO: 1347026
aauugccagguuaucugcc

SEQ ID NO: 1347028 - RNA, 19 nt, Artificial Sequence
  Description of Artificial Sequence: Synthetic oligonucleotide
  Sense strand starting at position 2296 of SEQ ID NO: 1242431
caauuaccacagcgugaaa

SEQ ID NO: 1347029 - RNA, 19 nt, Artificial Sequence
  Description of Artificial Sequence: Synthetic oligonucleotide
  Antisense strand to SEQ ID NO: 1347028
uuucacgcugugguaauug

SEQ ID NO: 1347030 - RNA, 19 nt, Artificial Sequence
  Description of Artificial Sequence: Synthetic oligonucleotide
  Sense strand starting at position 2419 of SEQ ID NO: 1242431
ccaagaacugagcauaguu

SEQ ID NO: 1347031 - RNA, 19 nt, Artificial Sequence
  Description of Artificial Sequence: Synthetic oligonucleotide
  Antisense strand to SEQ ID NO: 1347030
aacuaugcucaguucuugg

SEQ ID NO: 1347032 - RNA, 19 nt, Artificial Sequence
  Description of Artificial Sequence: Synthetic oligonucleotide
  Sense strand starting at position 2429 of SEQ ID NO: 1242431
agcauaguuccggcgaguu

SEQ ID NO: 1347033 - RNA, 19 nt, Artificial Sequence
  Description of Artificial Sequence: Synthetic oligonucleotide
  Antisense strand to SEQ ID NO: 1347032
aacucgccggaacuaugcu

SEQ ID NO: 1347034 - RNA, 19 nt, Artificial Sequence
  Description of Artificial Sequence: Synthetic oligonucleotide
  Sense strand starting at position 2430 of SEQ ID NO: 1242431
gcauaguuccggcgaguug

SEQ ID NO: 1347035 - RNA, 19 nt, Artificial Sequence
  Description of Artificial Sequence: Synthetic oligonucleotide
  Antisense strand to SEQ ID NO: 1347034
caacucgccggaacuaugc

SEQ ID NO: 1347036 - RNA, 19 nt, Artificial Sequence
  Description of Artificial Sequence: Synthetic oligonucleotide
  Sense strand starting at position 2642 of SEQ ID NO: 1242431
gggacuaauagauggcagu

SEQ ID NO: 1347037 - RNA, 19 nt, Artificial Sequence
  Description of Artificial Sequence: Synthetic oligonucleotide
  Antisense strand to SEQ ID NO: 1347036
acugccaucuauuaguccc

SEQ ID NO: 1347038 - RNA, 19 nt, Artificial Sequence
  Description of Artificial Sequence: Synthetic oligonucleotide
  Sense strand starting at position 2798 of SEQ ID NO: 1242431
uagugaaacuucguggcua

SEQ ID NO: 1347039 - RNA, 19 nt, Artificial Sequence
  Description of Artificial Sequence: Synthetic oligonucleotide
  Antisense strand to SEQ ID NO: 1347038
uagccacgaaguuucacua

SEQ ID NO: 1347040 - RNA, 19 nt, Artificial Sequence
  Description of Artificial Sequence: Synthetic oligonucleotide
  Sense strand starting at position 2800 of SEQ ID NO: 1242431
gugaaacuucguggcuacu

SEQ ID NO: 1347041 - RNA, 19 nt, Artificial Sequence
  Description of Artificial Sequence: Synthetic oligonucleotide
  Antisense strand to SEQ ID NO: 1347040
aguagccacgaaguuucac

SEQ ID NO: 1347042 - RNA, 19 nt, Artificial Sequence
  Description of Artificial Sequence: Synthetic oligonucleotide
  Sense strand starting at position 2802 of SEQ ID NO: 1242431
gaaacuucguggcuacuaa

SEQ ID NO: 1347043 - RNA, 19 nt, Artificial Sequence
  Description of Artificial Sequence: Synthetic oligonucleotide
  Antisense strand to SEQ ID NO: 1347042
uuaguagccacgaaguuuc

SEQ ID NO: 1347044 - RNA, 19 nt, Artificial Sequence
  Description of Artificial Sequence: Synthetic oligonucleotide
  Sense strand starting at position 2803 of SEQ ID NO: 1242431
aaacuucguggcuacuaaa

SEQ ID NO: 1347045 - RNA, 19 nt, Artificial Sequence
  Description of Artificial Sequence: Synthetic oligonucleotide
  Antisense strand to SEQ ID NO: 1347044
uuuaguagccacgaaguuu

SEQ ID NO: 1347046 - RNA, 19 nt, Artificial Sequence
  Description of Artificial Sequence: Synthetic oligonucleotide
  Sense strand starting at position 3149 of SEQ ID NO: 1242431
gcugggaacgguugugauu

SEQ ID NO: 1347047 - RNA, 19 nt, Artificial Sequence
  Description of Artificial Sequence: Synthetic oligonucleotide
  Antisense strand to SEQ ID NO: 1347046
aaucacaaccguucccagc

SEQ ID NO: 1347048 - RNA, 19 nt, Artificial Sequence
  Description of Artificial Sequence: Synthetic oligonucleotide
  Sense strand starting at position 3152 of SEQ ID NO: 1242431
gggaacgguugugauuaga

SEQ ID NO: 1347049 - RNA, 19 nt, Artificial Sequence
  Description of Artificial Sequence: Synthetic oligonucleotide
  Antisense strand to SEQ ID NO: 1347048
ucuaaucacaaccguuccc

SEQ ID NO: 1347050 - RNA, 19 nt, Artificial Sequence
  Description of Artificial Sequence: Synthetic oligonucleotide
  Sense strand starting at position 3163 of SEQ ID NO: 1242431
ugauuagauuuguauucca

SEQ ID NO: 1347051 - RNA, 19 nt, Artificial Sequence
  Description of Artificial Sequence: Synthetic oligonucleotide
  Antisense strand to SEQ ID NO: 1347050
uggaauacaaaucuaauca

SEQ ID NO: 1347052 - RNA, 19 nt, Artificial Sequence
  Description of Artificial Sequence: Synthetic oligonucleotide
  Sense strand starting at position 3193 of SEQ ID NO: 1242431
cuuccuguagcaugaagaa

SEQ ID NO: 1347053 - RNA, 19 nt, Artificial Sequence
  Description of Artificial Sequence: Synthetic oligonucleotide
  Antisense strand to SEQ ID NO: 1347052
uucuucaugcuacaggaag

SEQ ID NO: 1347054 - RNA, 19 nt, Artificial Sequence
  Description of Artificial Sequence: Synthetic oligonucleotide
  Sense strand starting at position 3913 of SEQ ID NO: 1242431
guaguaacccuauggaguc

SEQ ID NO: 1347055 - RNA, 19 nt, Artificial Sequence
  Description of Artificial Sequence: Synthetic oligonucleotide
  Antisense strand to SEQ ID NO: 1347054
gacuccauaggguuacuac

SEQ ID NO: 1347056 - RNA, 19 nt, Artificial Sequence
  Description of Artificial Sequence: Synthetic oligonucleotide
  Sense strand starting at position 11 of SEQ ID NO: 1242432
agguuaaacuaagauauac

SEQ ID NO: 1347057 - RNA, 19 nt, Artificial Sequence
  Description of Artificial Sequence: Synthetic oligonucleotide
  Antisense strand to SEQ ID NO: 1347056
guauaucuuaguuuaaccu

SEQ ID NO: 1347058 - RNA, 19 nt, Artificial Sequence
  Description of Artificial Sequence: Synthetic oligonucleotide
  Sense strand starting at position 39 of SEQ ID NO: 1242432
agaguacaucauuagcaua

SEQ ID NO: 1347059 - RNA, 19 nt, Artificial Sequence
  Description of Artificial Sequence: Synthetic oligonucleotide
  Antisense strand to SEQ ID NO: 1347058
uaugcuaaugauguacucu

SEQ ID NO: 1347060 - RNA, 19 nt, Artificial Sequence
  Description of Artificial Sequence: Synthetic oligonucleotide
  Sense strand starting at position 47 of SEQ ID NO: 1242432
ucauuagcauagggacaau

SEQ ID NO: 1347061 - RNA, 19 nt, Artificial Sequence
  Description of Artificial Sequence: Synthetic oligonucleotide
  Antisense strand to SEQ ID NO: 1347060
auugucccuaugcuaauga

SEQ ID NO: 1347062 - RNA, 19 nt, Artificial Sequence
  Description of Artificial Sequence: Synthetic oligonucleotide
  Sense strand starting at position 140 of SEQ ID NO: 1242432
agaccuauguacuuugaaa

SEQ ID NO: 1347063 - RNA, 19 nt, Artificial Sequence
  Description of Artificial Sequence: Synthetic oligonucleotide
  Antisense strand to SEQ ID NO: 1347062
uuucaaaguacauaggucu

SEQ ID NO: 1347064 - RNA, 19 nt, Artificial Sequence
  Description of Artificial Sequence: Synthetic oligonucleotide
  Sense strand starting at position 341 of SEQ ID NO: 1242432
ccugcuggguucucaaaca

SEQ ID NO: 1347065 - RNA, 19 nt, Artificial Sequence
  Description of Artificial Sequence: Synthetic oligonucleotide
  Antisense strand to SEQ ID NO: 1347064
uguuugagaacccagcagg

SEQ ID NO: 1347066 - RNA, 19 nt, Artificial Sequence
  Description of Artificial Sequence: Synthetic oligonucleotide
  Sense strand starting at position 359 of SEQ ID NO: 1242432
accuaaagauuucggcuuu

SEQ ID NO: 1347067 - RNA, 19 nt, Artificial Sequence
  Description of Artificial Sequence: Synthetic oligonucleotide
  Antisense strand to SEQ ID NO: 1347066
aaagccgaaaucuuuaggu

SEQ ID NO: 1347068 - RNA, 19 nt, Artificial Sequence
  Description of Artificial Sequence: Synthetic oligonucleotide
  Sense strand starting at position 502 of SEQ ID NO: 1242432
agagauuccucuuucgagc

SEQ ID NO: 1347069 - RNA, 19 nt, Artificial Sequence
  Description of Artificial Sequence: Synthetic oligonucleotide
  Antisense strand to SEQ ID NO: 1347068
gcucgaaagaggaaucucu

SEQ ID NO: 1347070 - RNA, 19 nt, Artificial Sequence
  Description of Artificial Sequence: Synthetic oligonucleotide
  Sense strand starting at position 594 of SEQ ID NO: 1242432
aaugucaggagcuguuaga

SEQ ID NO: 1347071 - RNA, 19 nt, Artificial Sequence
  Description of Artificial Sequence: Synthetic oligonucleotide
  Antisense strand to SEQ ID NO: 1347070
ucuaacagcuccugacauu

SEQ ID NO: 1347072 - RNA, 19 nt, Artificial Sequence
  Description of Artificial Sequence: Synthetic oligonucleotide
  Sense strand starting at position 607 of SEQ ID NO: 1242432
guuagaggagcuggagauu

SEQ ID NO: 1347073 - RNA, 19 nt, Artificial Sequence
  Description of Artificial Sequence: Synthetic oligonucleotide
  Antisense strand to SEQ ID NO: 1347072
aaucuccagcuccucuaac

SEQ ID NO: 1347074 - RNA, 19 nt, Artificial Sequence
  Description of Artificial Sequence: Synthetic oligonucleotide
  Sense strand starting at position 649 of SEQ ID NO: 1242432
ggcuacucaucuuaaagaa

SEQ ID NO: 1347075 - RNA, 19 nt, Artificial Sequence
  Description of Artificial Sequence: Synthetic oligonucleotide
  Antisense strand to SEQ ID NO: 1347074
uucuuuaagaugaguagcc

SEQ ID NO: 1347076 - RNA, 19 nt, Artificial Sequence
  Description of Artificial Sequence: Synthetic oligonucleotide
  Sense strand starting at position 914 of SEQ ID NO: 1242432
ugccgugaaccgugacuga

SEQ ID NO: 1347077 - RNA, 19 nt, Artificial Sequence
  Description of Artificial Sequence: Synthetic oligonucleotide
  Antisense strand to SEQ ID NO: 1347076
ucagucacgguucacggca

SEQ ID NO: 1347078 - RNA, 19 nt, Artificial Sequence
  Description of Artificial Sequence: Synthetic oligonucleotide
  Sense strand starting at position 1045 of SEQ ID NO: 1242432
guaaacucuuaaguacuga

SEQ ID NO: 1347079 - RNA, 19 nt, Artificial Sequence
  Description of Artificial Sequence: Synthetic oligonucleotide
  Antisense strand to SEQ ID NO: 1347078
ucaguacuuaagaguuuac

SEQ ID NO: 1347080 - RNA, 19 nt, Artificial Sequence
  Description of Artificial Sequence: Synthetic oligonucleotide
  Sense strand starting at position 1065 of SEQ ID NO: 1242432
ccaagaguuacggaaguac

SEQ ID NO: 1347081 - RNA, 19 nt, Artificial Sequence
  Description of Artificial Sequence: Synthetic oligonucleotide
  Antisense strand to SEQ ID NO: 1347080
guacuuccguaacucuugg

SEQ ID NO: 1347082 - RNA, 19 nt, Artificial Sequence
  Description of Artificial Sequence: Synthetic oligonucleotide
  Sense strand starting at position 1092 of SEQ ID NO: 1242432
gcauuauuguaaucauguu

SEQ ID NO: 1347083 - RNA, 19 nt, Artificial Sequence
  Description of Artificial Sequence: Synthetic oligonucleotide
  Antisense strand to SEQ ID NO: 1347082
aacaugauuacaauaaugc

SEQ ID NO: 1347084 - RNA, 19 nt, Artificial Sequence
  Description of Artificial Sequence: Synthetic oligonucleotide
  Sense strand starting at position 1098 of SEQ ID NO: 1242432
uuguaaucauguuugucuu

SEQ ID NO: 1347085 - RNA, 19 nt, Artificial Sequence
  Description of Artificial Sequence: Synthetic oligonucleotide
  Antisense strand to SEQ ID NO: 1347084
aagacaaacaugauuacaa

SEQ ID NO: 1347086 - RNA, 19 nt, Artificial Sequence
  Description of Artificial Sequence: Synthetic oligonucleotide
  Sense strand starting at position 1136 of SEQ ID NO: 1242432
gcaagaaagaagugucuua

SEQ ID NO: 1347087 - RNA, 19 nt, Artificial Sequence
  Description of Artificial Sequence: Synthetic oligonucleotide
  Antisense strand to SEQ ID NO: 1347086
uaagacacuucuuucuugc

SEQ ID NO: 1347088 - RNA, 19 nt, Artificial Sequence
  Description of Artificial Sequence: Synthetic oligonucleotide
  Sense strand starting at position 1143 of SEQ ID NO: 1242432
agaagugucuuacucaacu

SEQ ID NO: 1347089 - RNA, 19 nt, Artificial Sequence
  Description of Artificial Sequence: Synthetic oligonucleotide
  Antisense strand to SEQ ID NO: 1347088
aguugaguaagacacuucu

SEQ ID NO: 1347090 - RNA, 19 nt, Artificial Sequence
  Description of Artificial Sequence: Synthetic oligonucleotide
  Sense strand starting at position 1248 of SEQ ID NO: 1242432
aggacuacaugugaaagaa

SEQ ID NO: 1347091 - RNA, 19 nt, Artificial Sequence
  Description of Artificial Sequence: Synthetic oligonucleotide
  Antisense strand to SEQ ID NO: 1347090
uucuuucacauguaguccu

SEQ ID NO: 1347092 - RNA, 19 nt, Artificial Sequence
  Description of Artificial Sequence: Synthetic oligonucleotide
  Sense strand starting at position 1362 of SEQ ID NO: 1242432
gggacucgacccugugaca

SEQ ID NO: 1347093 - RNA, 19 nt, Artificial Sequence
  Description of Artificial Sequence: Synthetic oligonucleotide
  Antisense strand to SEQ ID NO: 1347092
ugucacagggucgaguccc

SEQ ID NO: 1347094 - RNA, 19 nt, Artificial Sequence
  Description of Artificial Sequence: Synthetic oligonucleotide
  Sense strand starting at position 1382 of SEQ ID NO: 1242432
uuaaucaaccuguguugaa

SEQ ID NO: 1347095 - RNA, 19 nt, Artificial Sequence
  Description of Artificial Sequence: Synthetic oligonucleotide
  Antisense strand to SEQ ID NO: 1347094
uucaacacagguugauuaa

SEQ ID NO: 1347096 - RNA, 19 nt, Artificial Sequence
  Description of Artificial Sequence: Synthetic oligonucleotide
  Sense strand starting at position 1385 of SEQ ID NO: 1242432
aucaaccuguguugaauaa

SEQ ID NO: 1347097 - RNA, 19 nt, Artificial Sequence
  Description of Artificial Sequence: Synthetic oligonucleotide
  Antisense strand to SEQ ID NO: 1347096
uuauucaacacagguugau

SEQ ID NO: 1347098 - RNA, 19 nt, Artificial Sequence
  Description of Artificial Sequence: Synthetic oligonucleotide
  Sense strand starting at position 1386 of SEQ ID NO: 1242432
ucaaccuguguugaauaau

SEQ ID NO: 1347099 - RNA, 19 nt, Artificial Sequence
  Description of Artificial Sequence: Synthetic oligonucleotide
  Antisense strand to SEQ ID NO: 1347098
auuauucaacacagguuga

SEQ ID NO: 1347100 - RNA, 19 nt, Artificial Sequence
  Description of Artificial Sequence: Synthetic oligonucleotide
  Sense strand starting at position 1539 of SEQ ID NO: 1242432
gggaaagguucugugagga

SEQ ID NO: 1347101 - RNA, 19 nt, Artificial Sequence
  Description of Artificial Sequence: Synthetic oligonucleotide
  Antisense strand to SEQ ID NO: 1347100
uccucacagaaccuuuccc

SEQ ID NO: 1347102 - RNA, 19 nt, Artificial Sequence
  Description of Artificial Sequence: Synthetic oligonucleotide
  Sense strand starting at position 2082 of SEQ ID NO: 1242432
cggcugucuccggucgauu

SEQ ID NO: 1347103 - RNA, 19 nt, Artificial Sequence
  Description of Artificial Sequence: Synthetic oligonucleotide
  Antisense strand to SEQ ID NO: 1347102
aaucgaccggagacagccg

SEQ ID NO: 1347104 - RNA, 19 nt, Artificial Sequence
  Description of Artificial Sequence: Synthetic oligonucleotide
  Sense strand starting at position 2175 of SEQ ID NO: 1242432
gcuuaacugcucuggcaug

SEQ ID NO: 1347105 - RNA, 19 nt, Artificial Sequence
  Description of Artificial Sequence: Synthetic oligonucleotide
  Antisense strand to SEQ ID NO: 1347104
caugccagagcaguuaagc

SEQ ID NO: 1347106 - RNA, 19 nt, Artificial Sequence
  Description of Artificial Sequence: Synthetic oligonucleotide
  Sense strand starting at position 2358 of SEQ ID NO: 1242432
ugccauuuccuugguagca

SEQ ID NO: 1347107 - RNA, 19 nt, Artificial Sequence
  Description of Artificial Sequence: Synthetic oligonucleotide
  Antisense strand to SEQ ID NO: 1347106
ugcuaccaaggaaauggca

SEQ ID NO: 1347108 - RNA, 19 nt, Artificial Sequence
  Description of Artificial Sequence: Synthetic oligonucleotide
  Sense strand starting at position 2359 of SEQ ID NO: 1242432
gccauuuccuugguagcau

SEQ ID NO: 1347109 - RNA, 19 nt, Artificial Sequence
  Description of Artificial Sequence: Synthetic oligonucleotide
  Antisense strand to SEQ ID NO: 1347108
augcuaccaaggaaauggc

SEQ ID NO: 1347110 - RNA, 19 nt, Artificial Sequence
  Description of Artificial Sequence: Synthetic oligonucleotide
  Sense strand starting at position 2430 of SEQ ID NO: 1242432
gucaaauaauauccauugu

SEQ ID NO: 1347111 - RNA, 19 nt, Artificial Sequence
  Description of Artificial Sequence: Synthetic oligonucleotide
  Antisense strand to SEQ ID NO: 1347110
acaauggauauuauuugac

SEQ ID NO: 1347112 - RNA, 19 nt, Artificial Sequence
  Description of Artificial Sequence: Synthetic oligonucleotide
  Sense strand starting at position 2774 of SEQ ID NO: 1242432
gccaguuccuguccaauaa

SEQ ID NO: 1347113 - RNA, 19 nt, Artificial Sequence
  Description of Artificial Sequence: Synthetic oligonucleotide
  Antisense strand to SEQ ID NO: 1347112
uuauuggacaggaacuggc

SEQ ID NO: 1347114 - RNA, 19 nt, Artificial Sequence
  Description of Artificial Sequence: Synthetic oligonucleotide
  Sense strand starting at position 2778 of SEQ ID NO: 1242432
guuccuguccaauaagaau

SEQ ID NO: 1347115 - RNA, 19 nt, Artificial Sequence
  Description of Artificial Sequence: Synthetic oligonucleotide
  Antisense strand to SEQ ID NO: 1347114
auucuuauuggacaggaac

SEQ ID NO: 1347116 - RNA, 19 nt, Artificial Sequence
  Description of Artificial Sequence: Synthetic oligonucleotide
  Sense strand starting at position 2784 of SEQ ID NO: 1242432
guccaauaagaauguaaac

SEQ ID NO: 1347117 - RNA, 19 nt, Artificial Sequence
  Description of Artificial Sequence: Synthetic oligonucleotide
  Antisense strand to SEQ ID NO: 1347116
guuuacauucuuauuggac

SEQ ID NO: 1347118 - RNA, 19 nt, Artificial Sequence
  Description of Artificial Sequence: Synthetic oligonucleotide
  Sense strand starting at position 2880 of SEQ ID NO: 1242432
ucccgcauuuguugaucaa

SEQ ID NO: 1347119 - RNA, 19 nt, Artificial Sequence
  Description of Artificial Sequence: Synthetic oligonucleotide
  Antisense strand to SEQ ID NO: 1347118
uugaucaacaaaugcggga

SEQ ID NO: 1347120 - RNA, 19 nt, Artificial Sequence
  Description of Artificial Sequence: Synthetic oligonucleotide
  Sense strand starting at position 2887 of SEQ ID NO: 1242432
uuuguugaucaaugcauga

SEQ ID NO: 1347121 - RNA, 19 nt, Artificial Sequence
  Description of Artificial Sequence: Synthetic oligonucleotide
  Antisense strand to SEQ ID NO: 1347120
ucaugcauugaucaacaaa

SEQ ID NO: 1347122 - RNA, 19 nt, Artificial Sequence
  Description of Artificial Sequence: Synthetic oligonucleotide
  Sense strand starting at position 2892 of SEQ ID NO: 1242432
ugaucaaugcaugaccuua

SEQ ID NO: 1347123 - RNA, 19 nt, Artificial Sequence
  Description of Artificial Sequence: Synthetic oligonucleotide
  Antisense strand to SEQ ID NO: 1347122
uaaggucaugcauugauca

SEQ ID NO: 1347124 - RNA, 19 nt, Artificial Sequence
  Description of Artificial Sequence: Synthetic oligonucleotide
  Sense strand starting at position 3156 of SEQ ID NO: 1242432
cggugauuuaccuguccca

SEQ ID NO: 1347125 - RNA, 19 nt, Artificial Sequence
  Description of Artificial Sequence: Synthetic oligonucleotide
  Antisense strand to SEQ ID NO: 1347124
ugggacagguaaaucaccg

SEQ ID NO: 1347126 - RNA, 19 nt, Artificial Sequence
  Description of Artificial Sequence: Synthetic oligonucleotide
  Sense strand starting at position 3312 of SEQ ID NO: 1242432
agcaauuucuaagguuaca

SEQ ID NO: 1347127 - RNA, 19 nt, Artificial Sequence
  Description of Artificial Sequence: Synthetic oligonucleotide
  Antisense strand to SEQ ID NO: 1347126
uguaaccuuagaaauugcu

SEQ ID NO: 1347128 - RNA, 19 nt, Artificial Sequence
  Description of Artificial Sequence: Synthetic oligonucleotide
  Sense strand starting at position 3328 of SEQ ID NO: 1242432
acacuuguguuagcuacaa

SEQ ID NO: 1347129 - RNA, 19 nt, Artificial Sequence
  Description of Artificial Sequence: Synthetic oligonucleotide
  Antisense strand to SEQ ID NO: 1347128
uuguagcuaacacaagugu

SEQ ID NO: 1347130 - RNA, 19 nt, Artificial Sequence
  Description of Artificial Sequence: Synthetic oligonucleotide
  Sense strand starting at position 3332 of SEQ ID NO: 1242432
uuguguuagcuacaacaaa

SEQ ID NO: 1347131 - RNA, 19 nt, Artificial Sequence
  Description of Artificial Sequence: Synthetic oligonucleotide
  Antisense strand to SEQ ID NO: 1347130
uuuguuguagcuaacacaa

SEQ ID NO: 1347132 - RNA, 19 nt, Artificial Sequence
  Description of Artificial Sequence: Synthetic oligonucleotide
  Sense strand starting at position 3358 of SEQ ID NO: 1242432
cccuuauaaucaggacagu

SEQ ID NO: 1347133 - RNA, 19 nt, Artificial Sequence
  Description of Artificial Sequence: Synthetic oligonucleotide
  Antisense strand to SEQ ID NO: 1347132
acuguccugauuauaaggg

SEQ ID NO: 1347134 - RNA, 19 nt, Artificial Sequence
  Description of Artificial Sequence: Synthetic oligonucleotide
  Sense strand starting at position 3375 of SEQ ID NO: 1242432
gucuucucaugccuguaaa

SEQ ID NO: 1347135 - RNA, 19 nt, Artificial Sequence
  Description of Artificial Sequence: Synthetic oligonucleotide
  Antisense strand to SEQ ID NO: 1347134
uuuacaggcaugagaagac

SEQ ID NO: 1347136 - RNA, 19 nt, Artificial Sequence
  Description of Artificial Sequence: Synthetic oligonucleotide
  Sense strand starting at position 5 of SEQ ID NO: 1242433
cugagauugugaccaaacu

SEQ ID NO: 1347137 - RNA, 19 nt, Artificial Sequence
  Description of Artificial Sequence: Synthetic oligonucleotide
  Antisense strand to SEQ ID NO: 1347136
aguuuggucacaaucucag

SEQ ID NO: 1347138 - RNA, 19 nt, Artificial Sequence
  Description of Artificial Sequence: Synthetic oligonucleotide
  Sense strand starting at position 28 of SEQ ID NO: 1242433
aguacugaauaagaaagaa

SEQ ID NO: 1347139 - RNA, 19 nt, Artificial Sequence
  Description of Artificial Sequence: Synthetic oligonucleotide
  Antisense strand to SEQ ID NO: 1347138
uucuuucuuauucaguacu

SEQ ID NO: 1347140 - RNA, 19 nt, Artificial Sequence
  Description of Artificial Sequence: Synthetic oligonucleotide
  Sense strand starting at position 149 of SEQ ID NO: 1242433
ccuuaaucuugccuaagga

SEQ ID NO: 1347141 - RNA, 19 nt, Artificial Sequence
  Description of Artificial Sequence: Synthetic oligonucleotide
  Antisense strand to SEQ ID NO: 1347140
uccuuaggcaagauuaagg

SEQ ID NO: 1347142 - RNA, 19 nt, Artificial Sequence
  Description of Artificial Sequence: Synthetic oligonucleotide
  Sense strand starting at position 150 of SEQ ID NO: 1242433
cuuaaucuugccuaaggaa

SEQ ID NO: 1347143 - RNA, 19 nt, Artificial Sequence
  Description of Artificial Sequence: Synthetic oligonucleotide
  Antisense strand to SEQ ID NO: 1347142
uuccuuaggcaagauuaag

SEQ ID NO: 1347144 - RNA, 19 nt, Artificial Sequence
  Description of Artificial Sequence: Synthetic oligonucleotide
  Sense strand starting at position 215 of SEQ ID NO: 1242433
ugugcugcuggacaauaaa

SEQ ID NO: 1347145 - RNA, 19 nt, Artificial Sequence
  Description of Artificial Sequence: Synthetic oligonucleotide
  Antisense strand to SEQ ID NO: 1347144
uuuauuguccagcagcaca

SEQ ID NO: 1347146 - RNA, 19 nt, Artificial Sequence
  Description of Artificial Sequence: Synthetic oligonucleotide
  Sense strand starting at position 577 of SEQ ID NO: 1242433
gcggugaugggcuccugua

SEQ ID NO: 1347147 - RNA, 19 nt, Artificial Sequence
  Description of Artificial Sequence: Synthetic oligonucleotide
  Antisense strand to SEQ ID NO: 1347146
uacaggagcccaucaccgc

SEQ ID NO: 1347148 - RNA, 19 nt, Artificial Sequence
  Description of Artificial Sequence: Synthetic oligonucleotide
  Sense strand starting at position 824 of SEQ ID NO: 1242433
aucaauguuuaagucacau

SEQ ID NO: 1347149 - RNA, 19 nt, Artificial Sequence
  Description of Artificial Sequence: Synthetic oligonucleotide
  Antisense strand to SEQ ID NO: 1347148
augugacuuaaacauugau

SEQ ID NO: 1347150 - RNA, 19 nt, Artificial Sequence
  Description of Artificial Sequence: Synthetic oligonucleotide
  Sense strand starting at position 847 of SEQ ID NO: 1242433
agcauaauuagucagaggu

SEQ ID NO: 1347151 - RNA, 19 nt, Artificial Sequence
  Description of Artificial Sequence: Synthetic oligonucleotide
  Antisense strand to SEQ ID NO: 1347150
accucugacuaauuaugcu

SEQ ID NO: 1347152 - RNA, 19 nt, Artificial Sequence
  Description of Artificial Sequence: Synthetic oligonucleotide
  Sense strand starting at position 863 of SEQ ID NO: 1242433
gguuucugcuacuuuauuu

SEQ ID NO: 1347153 - RNA, 19 nt, Artificial Sequence
  Description of Artificial Sequence: Synthetic oligonucleotide
  Antisense strand to SEQ ID NO: 1347152
aaauaaaguagcagaaacc

SEQ ID NO: 1347154 - RNA, 19 nt, Artificial Sequence
  Description of Artificial Sequence: Synthetic oligonucleotide
  Sense strand starting at position 891 of SEQ ID NO: 1242433
guugaugugcauuguggaa

SEQ ID NO: 1347155 - RNA, 19 nt, Artificial Sequence
  Description of Artificial Sequence: Synthetic oligonucleotide
  Antisense strand to SEQ ID NO: 1347154
uuccacaaugcacaucaac

SEQ ID NO: 1347156 - RNA, 19 nt, Artificial Sequence
  Description of Artificial Sequence: Synthetic oligonucleotide
  Sense strand starting at position 1111 of SEQ ID NO: 1242433
accugacaucugugacauc

SEQ ID NO: 1347157 - RNA, 19 nt, Artificial Sequence
  Description of Artificial Sequence: Synthetic oligonucleotide
  Antisense strand to SEQ ID NO: 1347156
gaugucacagaugucaggu

SEQ ID NO: 1347158 - RNA, 19 nt, Artificial Sequence
  Description of Artificial Sequence: Synthetic oligonucleotide
  Sense strand starting at position 1121 of SEQ ID NO: 1242433
ugugacaucucuucucaug

SEQ ID NO: 1347159 - RNA, 19 nt, Artificial Sequence
  Description of Artificial Sequence: Synthetic oligonucleotide
  Antisense strand to SEQ ID NO: 1347158
caugagaagagaugucaca

SEQ ID NO: 1347160 - RNA, 19 nt, Artificial Sequence
  Description of Artificial Sequence: Synthetic oligonucleotide
  Sense strand starting at position 1511 of SEQ ID NO: 1242433
uguugaaucuuugugccaa

SEQ ID NO: 1347161 - RNA, 19 nt, Artificial Sequence
  Description of Artificial Sequence: Synthetic oligonucleotide
  Antisense strand to SEQ ID NO: 1347160
uuggcacaaagauucaaca

SEQ ID NO: 1347162 - RNA, 19 nt, Artificial Sequence
  Description of Artificial Sequence: Synthetic oligonucleotide
  Sense strand starting at position 2532 of SEQ ID NO: 1242433
ugaggagagggcugaguua

SEQ ID NO: 1347163 - RNA, 19 nt, Artificial Sequence
  Description of Artificial Sequence: Synthetic oligonucleotide
  Antisense strand to SEQ ID NO: 1347162
uaacucagcccucuccuca

SEQ ID NO: 1347164 - RNA, 19 nt, Artificial Sequence
  Description of Artificial Sequence: Synthetic oligonucleotide
  Sense strand starting at position 2688 of SEQ ID NO: 1242433
gguuccagacuuugaugaa

SEQ ID NO: 1347165 - RNA, 19 nt, Artificial Sequence
  Description of Artificial Sequence: Synthetic oligonucleotide
  Antisense strand to SEQ ID NO: 1347164
uucaucaaagucuggaacc

SEQ ID NO: 1347166 - RNA, 19 nt, Artificial Sequence
  Description of Artificial Sequence: Synthetic oligonucleotide
  Sense strand starting at position 2770 of SEQ ID NO: 1242433
uccguaguccuccacucaa

SEQ ID NO: 1347167 - RNA, 19 nt, Artificial Sequence
  Description of Artificial Sequence: Synthetic oligonucleotide
  Antisense strand to SEQ ID NO: 1347166
uugaguggaggacuacgga

SEQ ID NO: 1347168 - RNA, 19 nt, Artificial Sequence
  Description of Artificial Sequence: Synthetic oligonucleotide
  Sense strand starting at position 2899 of SEQ ID NO: 1242433
uguaaucauuguucuuaag

SEQ ID NO: 1347169 - RNA, 19 nt, Artificial Sequence
  Description of Artificial Sequence: Synthetic oligonucleotide
  Antisense strand to SEQ ID NO: 1347168
cuuaagaacaaugauuaca

SEQ ID NO: 1347170 - RNA, 19 nt, Artificial Sequence
  Description of Artificial Sequence: Synthetic oligonucleotide
  Sense strand starting at position 2934 of SEQ ID NO: 1242433
gucuuaagguguuccagac

SEQ ID NO: 1347171 - RNA, 19 nt, Artificial Sequence
  Description of Artificial Sequence: Synthetic oligonucleotide
  Antisense strand to SEQ ID NO: 1347170
gucuggaacaccuuaagac

SEQ ID NO: 1347172 - RNA, 19 nt, Artificial Sequence
  Description of Artificial Sequence: Synthetic oligonucleotide
  Sense strand starting at position 3008 of SEQ ID NO: 1242433
acauguaaaucuccuuguu

SEQ ID NO: 1347173 - RNA, 19 nt, Artificial Sequence
  Description of Artificial Sequence: Synthetic oligonucleotide
  Antisense strand to SEQ ID NO: 1347172
aacaaggagauuuacaugu

SEQ ID NO: 1347174 - RNA, 19 nt, Artificial Sequence
  Description of Artificial Sequence: Synthetic oligonucleotide
  Sense strand starting at position 3096 of SEQ ID NO: 1242433
gaaagcuuguacccuguuu

SEQ ID NO: 1347175 - RNA, 19 nt, Artificial Sequence
  Description of Artificial Sequence: Synthetic oligonucleotide
  Antisense strand to SEQ ID NO: 1347174
aaacaggguacaagcuuuc

SEQ ID NO: 1347176 - RNA, 19 nt, Artificial Sequence
  Description of Artificial Sequence: Synthetic oligonucleotide
  Sense strand starting at position 3120 of SEQ ID NO: 1242433
ccuguagacuuugccuuua

SEQ ID NO: 1347177 - RNA, 19 nt, Artificial Sequence
  Description of Artificial Sequence: Synthetic oligonucleotide
  Antisense strand to SEQ ID NO: 1347176
uaaaggcaaagucuacagg

SEQ ID NO: 1347178 - RNA, 19 nt, Artificial Sequence
  Description of Artificial Sequence: Synthetic oligonucleotide
  Sense strand starting at position 3186 of SEQ ID NO: 1242433
auugcauccuacuuaguua

SEQ ID NO: 1347179 - RNA, 19 nt, Artificial Sequence
  Description of Artificial Sequence: Synthetic oligonucleotide
  Antisense strand to SEQ ID NO: 1347178
uaacuaaguaggaugcaau

SEQ ID NO: 1347180 - RNA, 19 nt, Artificial Sequence
  Description of Artificial Sequence: Synthetic oligonucleotide
  Sense strand starting at position 3189 of SEQ ID NO: 1242433
gcauccuacuuaguuauca

SEQ ID NO: 1347181 - RNA, 19 nt, Artificial Sequence
  Description of Artificial Sequence: Synthetic oligonucleotide
  Antisense strand to SEQ ID NO: 1347180
ugauaacuaaguaggaugc

SEQ ID NO: 1347182 - RNA, 19 nt, Artificial Sequence
  Description of Artificial Sequence: Synthetic oligonucleotide
  Sense strand starting at position 3233 of SEQ ID NO: 1242433
uggguuccacucuagaacu

SEQ ID NO: 1347183 - RNA, 19 nt, Artificial Sequence
  Description of Artificial Sequence: Synthetic oligonucleotide
  Antisense strand to SEQ ID NO: 1347182
aguucuagaguggaaccca

SEQ ID NO: 1347184 - RNA, 19 nt, Artificial Sequence
  Description of Artificial Sequence: Synthetic oligonucleotide
  Sense strand starting at position 3374 of SEQ ID NO: 1242433
uuguaagcaccacauagau

SEQ ID NO: 1347185 - RNA, 19 nt, Artificial Sequence
  Description of Artificial Sequence: Synthetic oligonucleotide
  Antisense strand to SEQ ID NO: 1347184
aucuauguggugcuuacaa

SEQ ID NO: 1347186 - RNA, 19 nt, Artificial Sequence
  Description of Artificial Sequence: Synthetic oligonucleotide
  Sense strand starting at position 3451 of SEQ ID NO: 1242433
aaucguuuaauggguggaa

SEQ ID NO: 1347187 - RNA, 19 nt, Artificial Sequence
  Description of Artificial Sequence: Synthetic oligonucleotide
  Antisense strand to SEQ ID NO: 1347186
uuccacccauuaaacgauu

SEQ ID NO: 1347188 - RNA, 19 nt, Artificial Sequence
  Description of Artificial Sequence: Synthetic oligonucleotide
  Sense strand starting at position 3452 of SEQ ID NO: 1242433
aucguuuaauggguggaau

SEQ ID NO: 1347189 - RNA, 19 nt, Artificial Sequence
  Description of Artificial Sequence: Synthetic oligonucleotide
  Antisense strand to SEQ ID NO: 1347188
auuccacccauuaaacgau

SEQ ID NO: 1347190 - RNA, 19 nt, Artificial Sequence
  Description of Artificial Sequence: Synthetic oligonucleotide
  Sense strand starting at position 3453 of SEQ ID NO: 1242433
ucguuuaauggguggaaua

SEQ ID NO: 1347191 - RNA, 19 nt, Artificial Sequence
  Description of Artificial Sequence: Synthetic oligonucleotide
  Antisense strand to SEQ ID NO: 1347190
uauuccacccauuaaacga

SEQ ID NO: 1347192 - RNA, 19 nt, Artificial Sequence
  Description of Artificial Sequence: Synthetic oligonucleotide
  Sense strand starting at position 3454 of SEQ ID NO: 1242433
cguuuaauggguggaauaa

SEQ ID NO: 1347193 - RNA, 19 nt, Artificial Sequence
  Description of Artificial Sequence: Synthetic oligonucleotide
  Antisense strand to SEQ ID NO: 1347192
uuauuccacccauuaaacg

SEQ ID NO: 1347194 - RNA, 19 nt, Artificial Sequence
  Description of Artificial Sequence: Synthetic oligonucleotide
  Sense strand starting at position 3463 of SEQ ID NO: 1242433
gguggaauaacuugcaaac

SEQ ID NO: 1347195 - RNA, 19 nt, Artificial Sequence
  Description of Artificial Sequence: Synthetic oligonucleotide
  Antisense strand to SEQ ID NO: 1347194
guuugcaaguuauuccacc

SEQ ID NO: 1347196 - RNA, 19 nt, Artificial Sequence
  Description of Artificial Sequence: Synthetic oligonucleotide
  Sense strand starting at position 3480 of SEQ ID NO: 1242433
acuacugguugucucugaa

SEQ ID NO: 1347197 - RNA, 19 nt, Artificial Sequence
  Description of Artificial Sequence: Synthetic oligonucleotide
  Antisense strand to SEQ ID NO: 1347196
uucagagacaaccaguagu

SEQ ID NO: 1347198 - RNA, 19 nt, Artificial Sequence
  Description of Artificial Sequence: Synthetic oligonucleotide
  Sense strand starting at position 3483 of SEQ ID NO: 1242433
acugguugucucugaaacu

SEQ ID NO: 1347199 - RNA, 19 nt, Artificial Sequence
  Description of Artificial Sequence: Synthetic oligonucleotide
  Antisense strand to SEQ ID NO: 1347198
aguuucagagacaaccagu

SEQ ID NO: 1347200 - RNA, 19 nt, Artificial Sequence
  Description of Artificial Sequence: Synthetic oligonucleotide
  Sense strand starting at position 3492 of SEQ ID NO: 1242433
cucugaaacugguuaugga

SEQ ID NO: 1347201 - RNA, 19 nt, Artificial Sequence
  Description of Artificial Sequence: Synthetic oligonucleotide
  Antisense strand to SEQ ID NO: 1347200
uccauaaccaguuucagag

SEQ ID NO: 1347202 - RNA, 19 nt, Artificial Sequence
  Description of Artificial Sequence: Synthetic oligonucleotide
  Sense strand starting at position 3514 of SEQ ID NO: 1242433
ucauuacauuaguugucua

SEQ ID NO: 1347203 - RNA, 19 nt, Artificial Sequence
  Description of Artificial Sequence: Synthetic oligonucleotide
  Antisense strand to SEQ ID NO: 1347202
uagacaacuaauguaauga

SEQ ID NO: 1347204 - RNA, 19 nt, Artificial Sequence
  Description of Artificial Sequence: Synthetic oligonucleotide
  Sense strand starting at position 3538 of SEQ ID NO: 1242433
ccagguggucucgaagcuu

SEQ ID NO: 1347205 - RNA, 19 nt, Artificial Sequence
  Description of Artificial Sequence: Synthetic oligonucleotide
  Antisense strand to SEQ ID NO: 1347204
aagcuucgagaccaccugg

SEQ ID NO: 1347206 - RNA, 19 nt, Artificial Sequence
  Description of Artificial Sequence: Synthetic oligonucleotide
  Sense strand starting at position 3578 of SEQ ID NO: 1242433
gagugauuccaccagucca

SEQ ID NO: 1347207 - RNA, 19 nt, Artificial Sequence
  Description of Artificial Sequence: Synthetic oligonucleotide
  Antisense strand to SEQ ID NO: 1347206
uggacugguggaaucacuc

SEQ ID NO: 1347208 - RNA, 19 nt, Artificial Sequence
  Description of Artificial Sequence: Synthetic oligonucleotide
  Sense strand starting at position 3591 of SEQ ID NO: 1242433
aguccauuagcacaugauu

SEQ ID NO: 1347209 - RNA, 19 nt, Artificial Sequence
  Description of Artificial Sequence: Synthetic oligonucleotide
  Antisense strand to SEQ ID NO: 1347208
aaucaugugcuaauggacu

SEQ ID NO: 1347210 - RNA, 19 nt, Artificial Sequence
  Description of Artificial Sequence: Synthetic oligonucleotide
  Sense strand starting at position 3600 of SEQ ID NO: 1242433
gcacaugauuagcccauaa

SEQ ID NO: 1347211 - RNA, 19 nt, Artificial Sequence
  Description of Artificial Sequence: Synthetic oligonucleotide
  Antisense strand to SEQ ID NO: 1347210
uuaugggcuaaucaugugc

SEQ ID NO: 1347212 - RNA, 19 nt, Artificial Sequence
  Description of Artificial Sequence: Synthetic oligonucleotide
  Sense strand starting at position 3676 of SEQ ID NO: 1242433
gacggaucgcuugauugag

SEQ ID NO: 1347213 - RNA, 19 nt, Artificial Sequence
  Description of Artificial Sequence: Synthetic oligonucleotide
  Antisense strand to SEQ ID NO: 1347212
cucaaucaagcgauccguc

SEQ ID NO: 1347214 - RNA, 19 nt, Artificial Sequence
  Description of Artificial Sequence: Synthetic oligonucleotide
  Sense strand starting at position 3820 of SEQ ID NO: 1242433
aucuguuaagcccagaugu

SEQ ID NO: 1347215 - RNA, 19 nt, Artificial Sequence
  Description of Artificial Sequence: Synthetic oligonucleotide
  Antisense strand to SEQ ID NO: 1347214
acaucugggcuuaacagau

SEQ ID NO: 1347216 - RNA, 19 nt, Artificial Sequence
  Description of Artificial Sequence: Synthetic oligonucleotide
  Sense strand starting at position 137 of SEQ ID NO: 1242434
gcggugaugggcuccugua

SEQ ID NO: 1347217 - RNA, 19 nt, Artificial Sequence
  Description of Artificial Sequence: Synthetic oligonucleotide
  Antisense strand to SEQ ID NO: 1347216
uacaggagcccaucaccgc

SEQ ID NO: 1347218 - RNA, 19 nt, Artificial Sequence
  Description of Artificial Sequence: Synthetic oligonucleotide
  Sense strand starting at position 384 of SEQ ID NO: 1242434
aucaauguuuaagucacau

SEQ ID NO: 1347219 - RNA, 19 nt, Artificial Sequence
  Description of Artificial Sequence: Synthetic oligonucleotide
  Antisense strand to SEQ ID NO: 1347218
augugacuuaaacauugau

SEQ ID NO: 1347220 - RNA, 19 nt, Artificial Sequence
  Description of Artificial Sequence: Synthetic oligonucleotide
  Sense strand starting at position 407 of SEQ ID NO: 1242434
agcauaauuagucagaggu

SEQ ID NO: 1347221 - RNA, 19 nt, Artificial Sequence
  Description of Artificial Sequence: Synthetic oligonucleotide
  Antisense strand to SEQ ID NO: 1347220
accucugacuaauuaugcu

SEQ ID NO: 1347222 - RNA, 19 nt, Artificial Sequence
  Description of Artificial Sequence: Synthetic oligonucleotide
  Sense strand starting at position 423 of SEQ ID NO: 1242434
gguuucugcuacuuuauuu

SEQ ID NO: 1347223 - RNA, 19 nt, Artificial Sequence
  Description of Artificial Sequence: Synthetic oligonucleotide
  Antisense strand to SEQ ID NO: 1347222
aaauaaaguagcagaaacc

SEQ ID NO: 1347224 - RNA, 19 nt, Artificial Sequence
  Description of Artificial Sequence: Synthetic oligonucleotide
  Sense strand starting at position 671 of SEQ ID NO: 1242434
accugacaucugugacauc

SEQ ID NO: 1347225 - RNA, 19 nt, Artificial Sequence
  Description of Artificial Sequence: Synthetic oligonucleotide
  Antisense strand to SEQ ID NO: 1347224
gaugucacagaugucaggu

SEQ ID NO: 1347226 - RNA, 19 nt, Artificial Sequence
  Description of Artificial Sequence: Synthetic oligonucleotide
  Sense strand starting at position 681 of SEQ ID NO: 1242434
ugugacaucucuucucaug

SEQ ID NO: 1347227 - RNA, 19 nt, Artificial Sequence
  Description of Artificial Sequence: Synthetic oligonucleotide
  Antisense strand to SEQ ID NO: 1347226
caugagaagagaugucaca

SEQ ID NO: 1347228 - RNA, 19 nt, Artificial Sequence
  Description of Artificial Sequence: Synthetic oligonucleotide
  Sense strand starting at position 2092 of SEQ ID NO: 1242434
ugaggagagggcugaguua

SEQ ID NO: 1347229 - RNA, 19 nt, Artificial Sequence
  Description of Artificial Sequence: Synthetic oligonucleotide
  Antisense strand to SEQ ID NO: 1347228
uaacucagcccucuccuca

SEQ ID NO: 1347230 - RNA, 19 nt, Artificial Sequence
  Description of Artificial Sequence: Synthetic oligonucleotide
  Sense strand starting at position 2248 of SEQ ID NO: 1242434
gguuccagacuuugaugaa

SEQ ID NO: 1347231 - RNA, 19 nt, Artificial Sequence
  Description of Artificial Sequence: Synthetic oligonucleotide
  Antisense strand to SEQ ID NO: 1347230
uucaucaaagucuggaacc

SEQ ID NO: 1347232 - RNA, 19 nt, Artificial Sequence
  Description of Artificial Sequence: Synthetic oligonucleotide
  Sense strand starting at position 2330 of SEQ ID NO: 1242434
uccguaguccuccacucaa

SEQ ID NO: 1347233 - RNA, 19 nt, Artificial Sequence
  Description of Artificial Sequence: Synthetic oligonucleotide
  Antisense strand to SEQ ID NO: 1347232
uugaguggaggacuacgga

SEQ ID NO: 1347234 - RNA, 19 nt, Artificial Sequence
  Description of Artificial Sequence: Synthetic oligonucleotide
  Sense strand starting at position 2459 of SEQ ID NO: 1242434
uguaaucauuguucuuaag

SEQ ID NO: 1347235 - RNA, 19 nt, Artificial Sequence
  Description of Artificial Sequence: Synthetic oligonucleotide
  Antisense strand to SEQ ID NO: 1347234
cuuaagaacaaugauuaca

SEQ ID NO: 1347236 - RNA, 19 nt, Artificial Sequence
  Description of Artificial Sequence: Synthetic oligonucleotide
  Sense strand starting at position 2494 of SEQ ID NO: 1242434
gucuuaagguguuccagac

SEQ ID NO: 1347237 - RNA, 19 nt, Artificial Sequence
  Description of Artificial Sequence: Synthetic oligonucleotide
  Antisense strand to SEQ ID NO: 1347236
gucuggaacaccuuaagac

SEQ ID NO: 1347238 - RNA, 19 nt, Artificial Sequence
  Description of Artificial Sequence: Synthetic oligonucleotide
  Sense strand starting at position 2568 of SEQ ID NO: 1242434
acauguaaaucuccuuguu

SEQ ID NO: 1347239 - RNA, 19 nt, Artificial Sequence
  Description of Artificial Sequence: Synthetic oligonucleotide
  Antisense strand to SEQ ID NO: 1347238
aacaaggagauuuacaugu

SEQ ID NO: 1347240 - RNA, 19 nt, Artificial Sequence
  Description of Artificial Sequence: Synthetic oligonucleotide
  Sense strand starting at position 2680 of SEQ ID NO: 1242434
ccuguagacuuugccuuua

SEQ ID NO: 1347241 - RNA, 19 nt, Artificial Sequence
  Description of Artificial Sequence: Synthetic oligonucleotide
  Antisense strand to SEQ ID NO: 1347240
uaaaggcaaagucuacagg

SEQ ID NO: 1347242 - RNA, 19 nt, Artificial Sequence
  Description of Artificial Sequence: Synthetic oligonucleotide
  Sense strand starting at position 2746 of SEQ ID NO: 1242434
auugcauccuacuuaguua

SEQ ID NO: 1347243 - RNA, 19 nt, Artificial Sequence
  Description of Artificial Sequence: Synthetic oligonucleotide
  Antisense strand to SEQ ID NO: 1347242
uaacuaaguaggaugcaau

SEQ ID NO: 1347244 - RNA, 19 nt, Artificial Sequence
  Description of Artificial Sequence: Synthetic oligonucleotide
  Sense strand starting at position 2749 of SEQ ID NO: 1242434
gcauccuacuuaguuauca

SEQ ID NO: 1347245 - RNA, 19 nt, Artificial Sequence
  Description of Artificial Sequence: Synthetic oligonucleotide
  Antisense strand to SEQ ID NO: 1347244
ugauaacuaaguaggaugc

SEQ ID NO: 1347246 - RNA, 19 nt, Artificial Sequence
  Description of Artificial Sequence: Synthetic oligonucleotide
  Sense strand starting at position 2793 of SEQ ID NO: 1242434
uggguuccacucuagaacu

SEQ ID NO: 1347247 - RNA, 19 nt, Artificial Sequence
  Description of Artificial Sequence: Synthetic oligonucleotide
  Antisense strand to SEQ ID NO: 1347246
aguucuagaguggaaccca

SEQ ID NO: 1347248 - RNA, 19 nt, Artificial Sequence
  Description of Artificial Sequence: Synthetic oligonucleotide
  Sense strand starting at position 2934 of SEQ ID NO: 1242434
uuguaagcaccacauagau

SEQ ID NO: 1347249 - RNA, 19 nt, Artificial Sequence
  Description of Artificial Sequence: Synthetic oligonucleotide
  Antisense strand to SEQ ID NO: 1347248
aucuauguggugcuuacaa

SEQ ID NO: 1347250 - RNA, 19 nt, Artificial Sequence
  Description of Artificial Sequence: Synthetic oligonucleotide
  Sense strand starting at position 3011 of SEQ ID NO: 1242434
aaucguuuaauggguggaa

SEQ ID NO: 1347251 - RNA, 19 nt, Artificial Sequence
  Description of Artificial Sequence: Synthetic oligonucleotide
  Antisense strand to SEQ ID NO: 1347250
uuccacccauuaaacgauu

SEQ ID NO: 1347252 - RNA, 19 nt, Artificial Sequence
  Description of Artificial Sequence: Synthetic oligonucleotide
  Sense strand starting at position 3012 of SEQ ID NO: 1242434
aucguuuaauggguggaau

SEQ ID NO: 1347253 - RNA, 19 nt, Artificial Sequence
  Description of Artificial Sequence: Synthetic oligonucleotide
  Antisense strand to SEQ ID NO: 1347252
auuccacccauuaaacgau

SEQ ID NO: 1347254 - RNA, 19 nt, Artificial Sequence
  Description of Artificial Sequence: Synthetic oligonucleotide
  Sense strand starting at position 3013 of SEQ ID NO: 1242434
ucguuuaauggguggaaua

SEQ ID NO: 1347255 - RNA, 19 nt, Artificial Sequence
  Description of Artificial Sequence: Synthetic oligonucleotide
  Antisense strand to SEQ ID NO: 1347254
uauuccacccauuaaacga

SEQ ID NO: 1347256 - RNA, 19 nt, Artificial Sequence
  Description of Artificial Sequence: Synthetic oligonucleotide
  Sense strand starting at position 3014 of SEQ ID NO: 1242434
cguuuaauggguggaauaa

SEQ ID NO: 1347257 - RNA, 19 nt, Artificial Sequence
  Description of Artificial Sequence: Synthetic oligonucleotide
  Antisense strand to SEQ ID NO: 1347256
uuauuccacccauuaaacg

SEQ ID NO: 1347258 - RNA, 19 nt, Artificial Sequence
  Description of Artificial Sequence: Synthetic oligonucleotide
  Sense strand starting at position 3023 of SEQ ID NO: 1242434
gguggaauaacuugcaaac

SEQ ID NO: 1347259 - RNA, 19 nt, Artificial Sequence
  Description of Artificial Sequence: Synthetic oligonucleotide
  Antisense strand to SEQ ID NO: 1347258
guuugcaaguuauuccacc

SEQ ID NO: 1347260 - RNA, 19 nt, Artificial Sequence
  Description of Artificial Sequence: Synthetic oligonucleotide
  Sense strand starting at position 3040 of SEQ ID NO: 1242434
acuacugguugucucugaa

SEQ ID NO: 1347261 - RNA, 19 nt, Artificial Sequence
  Description of Artificial Sequence: Synthetic oligonucleotide
  Antisense strand to SEQ ID NO: 1347260
uucagagacaaccaguagu

SEQ ID NO: 1347262 - RNA, 19 nt, Artificial Sequence
  Description of Artificial Sequence: Synthetic oligonucleotide
  Sense strand starting at position 3043 of SEQ ID NO: 1242434
acugguugucucugaaacu

SEQ ID NO: 1347263 - RNA, 19 nt, Artificial Sequence
  Description of Artificial Sequence: Synthetic oligonucleotide
  Antisense strand to SEQ ID NO: 1347262
aguuucagagacaaccagu

SEQ ID NO: 1347264 - RNA, 19 nt, Artificial Sequence
  Description of Artificial Sequence: Synthetic oligonucleotide
  Sense strand starting at position 3052 of SEQ ID NO: 1242434
cucugaaacugguuaugga

SEQ ID NO: 1347265 - RNA, 19 nt, Artificial Sequence
  Description of Artificial Sequence: Synthetic oligonucleotide
  Antisense strand to SEQ ID NO: 1347264
uccauaaccaguuucagag

SEQ ID NO: 1347266 - RNA, 19 nt, Artificial Sequence
  Description of Artificial Sequence: Synthetic oligonucleotide
  Sense strand starting at position 3074 of SEQ ID NO: 1242434
ucauuacauuaguugucua

SEQ ID NO: 1347267 - RNA, 19 nt, Artificial Sequence
  Description of Artificial Sequence: Synthetic oligonucleotide
  Antisense strand to SEQ ID NO: 1347266
uagacaacuaauguaauga

SEQ ID NO: 1347268 - RNA, 19 nt, Artificial Sequence
  Description of Artificial Sequence: Synthetic oligonucleotide
  Sense strand starting at position 3098 of SEQ ID NO: 1242434
ccagguggucucgaagcuu

SEQ ID NO: 1347269 - RNA, 19 nt, Artificial Sequence
  Description of Artificial Sequence: Synthetic oligonucleotide
  Antisense strand to SEQ ID NO: 1347268
aagcuucgagaccaccugg

SEQ ID NO: 1347270 - RNA, 19 nt, Artificial Sequence
  Description of Artificial Sequence: Synthetic oligonucleotide
  Sense strand starting at position 3138 of SEQ ID NO: 1242434
gagugauuccaccagucca

SEQ ID NO: 1347271 - RNA, 19 nt, Artificial Sequence
  Description of Artificial Sequence: Synthetic oligonucleotide
  Antisense strand to SEQ ID NO: 1347270
uggacugguggaaucacuc

SEQ ID NO: 1347272 - RNA, 19 nt, Artificial Sequence
  Description of Artificial Sequence: Synthetic oligonucleotide
  Sense strand starting at position 3151 of SEQ ID NO: 1242434
aguccauuagcacaugauu

SEQ ID NO: 1347273 - RNA, 19 nt, Artificial Sequence
  Description of Artificial Sequence: Synthetic oligonucleotide
  Antisense strand to SEQ ID NO: 1347272
aaucaugugcuaauggacu

SEQ ID NO: 1347274 - RNA, 19 nt, Artificial Sequence
  Description of Artificial Sequence: Synthetic oligonucleotide
  Sense strand starting at position 3160 of SEQ ID NO: 1242434
gcacaugauuagcccauaa

SEQ ID NO: 1347275 - RNA, 19 nt, Artificial Sequence
  Description of Artificial Sequence: Synthetic oligonucleotide
  Antisense strand to SEQ ID NO: 1347274
uuaugggcuaaucaugugc

SEQ ID NO: 1347276 - RNA, 19 nt, Artificial Sequence
  Description of Artificial Sequence: Synthetic oligonucleotide
  Sense strand starting at position 3236 of SEQ ID NO: 1242434
gacggaucgcuugauugag

SEQ ID NO: 1347277 - RNA, 19 nt, Artificial Sequence
  Description of Artificial Sequence: Synthetic oligonucleotide
  Antisense strand to SEQ ID NO: 1347276
cucaaucaagcgauccguc

SEQ ID NO: 1347278 - RNA, 19 nt, Artificial Sequence
  Description of Artificial Sequence: Synthetic oligonucleotide
  Sense strand starting at position 3380 of SEQ ID NO: 1242434
aucuguuaagcccagaugu

SEQ ID NO: 1347279 - RNA, 19 nt, Artificial Sequence
  Description of Artificial Sequence: Synthetic oligonucleotide
  Antisense strand to SEQ ID NO: 1347278
acaucugggcuuaacagau

SEQ ID NO: 1347280 - RNA, 19 nt, Artificial Sequence
  Description of Artificial Sequence: Synthetic oligonucleotide
  Sense strand starting at position 3591 of SEQ ID NO: 1242434
uggauauacccguauguua

SEQ ID NO: 1347281 - RNA, 19 nt, Artificial Sequence
  Description of Artificial Sequence: Synthetic oligonucleotide
  Antisense strand to SEQ ID NO: 1347280
uaacauacggguauaucca

SEQ ID NO: 1347282 - RNA, 19 nt, Artificial Sequence
  Description of Artificial Sequence: Synthetic oligonucleotide
  Sense strand starting at position 3593 of SEQ ID NO: 1242434
gauauacccguauguuaaa

SEQ ID NO: 1347283 - RNA, 19 nt, Artificial Sequence
  Description of Artificial Sequence: Synthetic oligonucleotide
  Antisense strand to SEQ ID NO: 1347282
uuuaacauacggguauauc

SEQ ID NO: 1347284 - RNA, 19 nt, Artificial Sequence
  Description of Artificial Sequence: Synthetic oligonucleotide
  Sense strand starting at position 3613 of SEQ ID NO: 1242434
gucauuguucuguuagugu

SEQ ID NO: 1347285 - RNA, 19 nt, Artificial Sequence
  Description of Artificial Sequence: Synthetic oligonucleotide
  Antisense strand to SEQ ID NO: 1347284
acacuaacagaacaaugac

SEQ ID NO: 1347286 - RNA, 19 nt, Artificial Sequence
  Description of Artificial Sequence: Synthetic oligonucleotide
  Sense strand starting at position 3632 of SEQ ID NO: 1242434
gguaguaaacuuugacaau

SEQ ID NO: 1347287 - RNA, 19 nt, Artificial Sequence
  Description of Artificial Sequence: Synthetic oligonucleotide
  Antisense strand to SEQ ID NO: 1347286
auugucaaaguuuacuacc

SEQ ID NO: 1347288 - RNA, 19 nt, Artificial Sequence
  Description of Artificial Sequence: Synthetic oligonucleotide
  Sense strand starting at position 3756 of SEQ ID NO: 1242434
gggaaaccauggucauguu

SEQ ID NO: 1347289 - RNA, 19 nt, Artificial Sequence
  Description of Artificial Sequence: Synthetic oligonucleotide
  Antisense strand to SEQ ID NO: 1347288
aacaugaccaugguuuccc

SEQ ID NO: 1347290 - RNA, 19 nt, Artificial Sequence
  Description of Artificial Sequence: Synthetic oligonucleotide
  Sense strand starting at position 3778 of SEQ ID NO: 1242434
guccucaguuguuccauaa

SEQ ID NO: 1347291 - RNA, 19 nt, Artificial Sequence
  Description of Artificial Sequence: Synthetic oligonucleotide
  Antisense strand to SEQ ID NO: 1347290
uuauggaacaacugaggac

SEQ ID NO: 1347292 - RNA, 19 nt, Artificial Sequence
  Description of Artificial Sequence: Synthetic oligonucleotide
  Sense strand starting at position 3782 of SEQ ID NO: 1242434
ucaguuguuccauaacaca

SEQ ID NO: 1347293 - RNA, 19 nt, Artificial Sequence
  Description of Artificial Sequence: Synthetic oligonucleotide
  Antisense strand to SEQ ID NO: 1347292
uguguuauggaacaacuga

SEQ ID NO: 1347294 - RNA, 19 nt, Artificial Sequence
  Description of Artificial Sequence: Synthetic oligonucleotide
  Sense strand starting at position 3852 of SEQ ID NO: 1242434
gugaauuccagcugaauug

SEQ ID NO: 1347295 - RNA, 19 nt, Artificial Sequence
  Description of Artificial Sequence: Synthetic oligonucleotide
  Antisense strand to SEQ ID NO: 1347294
caauucagcuggaauucac

SEQ ID NO: 1347296 - RNA, 19 nt, Artificial Sequence
  Description of Artificial Sequence: Synthetic oligonucleotide
  Sense strand starting at position 29 of SEQ ID NO: 1242435
uuuggaaguuguugugaug

SEQ ID NO: 1347297 - RNA, 19 nt, Artificial Sequence
  Description of Artificial Sequence: Synthetic oligonucleotide
  Antisense strand to SEQ ID NO: 1347296
caucacaacaacuuccaaa

SEQ ID NO: 1347298 - RNA, 19 nt, Artificial Sequence
  Description of Artificial Sequence: Synthetic oligonucleotide
  Sense strand starting at position 41 of SEQ ID NO: 1242435
ugugaugaggccugaguga

SEQ ID NO: 1347299 - RNA, 19 nt, Artificial Sequence
  Description of Artificial Sequence: Synthetic oligonucleotide
  Antisense strand to SEQ ID NO: 1347298
ucacucaggccucaucaca

SEQ ID NO: 1347300 - RNA, 19 nt, Artificial Sequence
  Description of Artificial Sequence: Synthetic oligonucleotide
  Sense strand starting at position 62 of SEQ ID NO: 1242435
ggauguguggcacagcaau

SEQ ID NO: 1347301 - RNA, 19 nt, Artificial Sequence
  Description of Artificial Sequence: Synthetic oligonucleotide
  Antisense strand to SEQ ID NO: 1347300
auugcugugccacacaucc

SEQ ID NO: 1347302 - RNA, 19 nt, Artificial Sequence
  Description of Artificial Sequence: Synthetic oligonucleotide
  Sense strand starting at position 87 of SEQ ID NO: 1242435
gcuguaaagugcucacaga

SEQ ID NO: 1347303 - RNA, 19 nt, Artificial Sequence
  Description of Artificial Sequence: Synthetic oligonucleotide
  Antisense strand to SEQ ID NO: 1347302
ucugugagcacuuuacagc

SEQ ID NO: 1347304 - RNA, 19 nt, Artificial Sequence
  Description of Artificial Sequence: Synthetic oligonucleotide
  Sense strand starting at position 106 of SEQ ID NO: 1242435
gguuaugagaggugaccua

SEQ ID NO: 1347305 - RNA, 19 nt, Artificial Sequence
  Description of Artificial Sequence: Synthetic oligonucleotide
  Antisense strand to SEQ ID NO: 1347304
uaggucaccucucauaacc

SEQ ID NO: 1347306 - RNA, 19 nt, Artificial Sequence
  Description of Artificial Sequence: Synthetic oligonucleotide
  Sense strand starting at position 250 of SEQ ID NO: 1242435
uccgcuuugccuuuaucua

SEQ ID NO: 1347307 - RNA, 19 nt, Artificial Sequence
  Description of Artificial Sequence: Synthetic oligonucleotide
  Antisense strand to SEQ ID NO: 1347306
uagauaaaggcaaagcgga

SEQ ID NO: 1347308 - RNA, 19 nt, Artificial Sequence
  Description of Artificial Sequence: Synthetic oligonucleotide
  Sense strand starting at position 251 of SEQ ID NO: 1242435
ccgcuuugccuuuaucuau

SEQ ID NO: 1347309 - RNA, 19 nt, Artificial Sequence
  Description of Artificial Sequence: Synthetic oligonucleotide
  Antisense strand to SEQ ID NO: 1347308
auagauaaaggcaaagcgg

SEQ ID NO: 1347310 - RNA, 19 nt, Artificial Sequence
  Description of Artificial Sequence: Synthetic oligonucleotide
  Sense strand starting at position 257 of SEQ ID NO: 1242435
ugccuuuaucuauggaagu

SEQ ID NO: 1347311 - RNA, 19 nt, Artificial Sequence
  Description of Artificial Sequence: Synthetic oligonucleotide
  Antisense strand to SEQ ID NO: 1347310
acuuccauagauaaaggca

SEQ ID NO: 1347312 - RNA, 19 nt, Artificial Sequence
  Description of Artificial Sequence: Synthetic oligonucleotide
  Sense strand starting at position 258 of SEQ ID NO: 1242435
gccuuuaucuauggaagua

SEQ ID NO: 1347313 - RNA, 19 nt, Artificial Sequence
  Description of Artificial Sequence: Synthetic oligonucleotide
  Antisense strand to SEQ ID NO: 1347312
uacuuccauagauaaaggc

SEQ ID NO: 1347314 - RNA, 19 nt, Artificial Sequence
  Description of Artificial Sequence: Synthetic oligonucleotide
  Sense strand starting at position 440 of SEQ ID NO: 1242435
ggcuucugugccuacaaca

SEQ ID NO: 1347315 - RNA, 19 nt, Artificial Sequence
  Description of Artificial Sequence: Synthetic oligonucleotide
  Antisense strand to SEQ ID NO: 1347314
uguuguaggcacagaagcc

SEQ ID NO: 1347316 - RNA, 19 nt, Artificial Sequence
  Description of Artificial Sequence: Synthetic oligonucleotide
  Sense strand starting at position 809 of SEQ ID NO: 1242435
cucugaacauccugaguuc

SEQ ID NO: 1347317 - RNA, 19 nt, Artificial Sequence
  Description of Artificial Sequence: Synthetic oligonucleotide
  Antisense strand to SEQ ID NO: 1347316
gaacucaggauguucagag

SEQ ID NO: 1347318 - RNA, 19 nt, Artificial Sequence
  Description of Artificial Sequence: Synthetic oligonucleotide
  Sense strand starting at position 894 of SEQ ID NO: 1242435
gccuacuaccgaugugaag

SEQ ID NO: 1347319 - RNA, 19 nt, Artificial Sequence
  Description of Artificial Sequence: Synthetic oligonucleotide
  Antisense strand to SEQ ID NO: 1347318
cuucacaucgguaguaggc

SEQ ID NO: 1347320 - RNA, 19 nt, Artificial Sequence
  Description of Artificial Sequence: Synthetic oligonucleotide
  Sense strand starting at position 940 of SEQ ID NO: 1242435
cauugaucaccaggcuuga

SEQ ID NO: 1347321 - RNA, 19 nt, Artificial Sequence
  Description of Artificial Sequence: Synthetic oligonucleotide
  Antisense strand to SEQ ID NO: 1347320
ucaagccuggugaucaaug

SEQ ID NO: 1347322 - RNA, 19 nt, Artificial Sequence
  Description of Artificial Sequence: Synthetic oligonucleotide
  Sense strand starting at position 953 of SEQ ID NO: 1242435
gcuugauucggcuguacug

SEQ ID NO: 1347323 - RNA, 19 nt, Artificial Sequence
  Description of Artificial Sequence: Synthetic oligonucleotide
  Antisense strand to SEQ ID NO: 1347322
caguacagccgaaucaagc

SEQ ID NO: 1347324 - RNA, 19 nt, Artificial Sequence
  Description of Artificial Sequence: Synthetic oligonucleotide
  Sense strand starting at position 1189 of SEQ ID NO: 1242435
aucacuugaacguggaaga

SEQ ID NO: 1347325 - RNA, 19 nt, Artificial Sequence
  Description of Artificial Sequence: Synthetic oligonucleotide
  Antisense strand to SEQ ID NO: 1347324
ucuuccacguucaagugau

SEQ ID NO: 1347326 - RNA, 19 nt, Artificial Sequence
  Description of Artificial Sequence: Synthetic oligonucleotide
  Sense strand starting at position 2722 of SEQ ID NO: 1242435
gcccgaugcaaaugaucuu

SEQ ID NO: 1347327 - RNA, 19 nt, Artificial Sequence
  Description of Artificial Sequence: Synthetic oligonucleotide
  Antisense strand to SEQ ID NO: 1347326
aagaucauuugcaucgggc

SEQ ID NO: 1347328 - RNA, 19 nt, Artificial Sequence
  Description of Artificial Sequence: Synthetic oligonucleotide
  Sense strand starting at position 2796 of SEQ ID NO: 1242435
cguggcugcaccugugaua

SEQ ID NO: 1347329 - RNA, 19 nt, Artificial Sequence
  Description of Artificial Sequence: Synthetic oligonucleotide
  Antisense strand to SEQ ID NO: 1347328
uaucacaggugcagccacg

SEQ ID NO: 1347330 - RNA, 19 nt, Artificial Sequence
  Description of Artificial Sequence: Synthetic oligonucleotide
  Sense strand starting at position 2799 of SEQ ID NO: 1242435
ggcugcaccugugauaaca

SEQ ID NO: 1347331 - RNA, 19 nt, Artificial Sequence
  Description of Artificial Sequence: Synthetic oligonucleotide
  Antisense strand to SEQ ID NO: 1347330
uguuaucacaggugcagcc

SEQ ID NO: 1347332 - RNA, 19 nt, Artificial Sequence
  Description of Artificial Sequence: Synthetic oligonucleotide
  Sense strand starting at position 2861 of SEQ ID NO: 1242435
cccugcugucagggugaga

SEQ ID NO: 1347333 - RNA, 19 nt, Artificial Sequence
  Description of Artificial Sequence: Synthetic oligonucleotide
  Antisense strand to SEQ ID NO: 1347332
ucucacccugacagcaggg

SEQ ID NO: 1347334 - RNA, 19 nt, Artificial Sequence
  Description of Artificial Sequence: Synthetic oligonucleotide
  Sense strand starting at position 2982 of SEQ ID NO: 1242435
ccugcuauggcucauugga

SEQ ID NO: 1347335 - RNA, 19 nt, Artificial Sequence
  Description of Artificial Sequence: Synthetic oligonucleotide
  Antisense strand to SEQ ID NO: 1347334
uccaaugagccauagcagg

SEQ ID NO: 1347336 - RNA, 19 nt, Artificial Sequence
  Description of Artificial Sequence: Synthetic oligonucleotide
  Sense strand starting at position 3059 of SEQ ID NO: 1242435
gcuacuuucuuccagggaa

SEQ ID NO: 1347337 - RNA, 19 nt, Artificial Sequence
  Description of Artificial Sequence: Synthetic oligonucleotide
  Antisense strand to SEQ ID NO: 1347336
uucccuggaagaaaguagc

SEQ ID NO: 1347338 - RNA, 19 nt, Artificial Sequence
  Description of Artificial Sequence: Synthetic oligonucleotide
  Sense strand starting at position 3062 of SEQ ID NO: 1242435
acuuucuuccagggaaaug

SEQ ID NO: 1347339 - RNA, 19 nt, Artificial Sequence
  Description of Artificial Sequence: Synthetic oligonucleotide
  Antisense strand to SEQ ID NO: 1347338
cauuucccuggaagaaagu

SEQ ID NO: 1347340 - RNA, 19 nt, Artificial Sequence
  Description of Artificial Sequence: Synthetic oligonucleotide
  Sense strand starting at position 3110 of SEQ ID NO: 1242435
caccaaguagcugaguuaa

SEQ ID NO: 1347341 - RNA, 19 nt, Artificial Sequence
  Description of Artificial Sequence: Synthetic oligonucleotide
  Antisense strand to SEQ ID NO: 1347340
uuaacucagcuacuuggug

SEQ ID NO: 1347342 - RNA, 19 nt, Artificial Sequence
  Description of Artificial Sequence: Synthetic oligonucleotide
  Sense strand starting at position 3112 of SEQ ID NO: 1242435
ccaaguagcugaguuaaug

SEQ ID NO: 1347343 - RNA, 19 nt, Artificial Sequence
  Description of Artificial Sequence: Synthetic oligonucleotide
  Antisense strand to SEQ ID NO: 1347342
cauuaacucagcuacuugg

SEQ ID NO: 1347344 - RNA, 19 nt, Artificial Sequence
  Description of Artificial Sequence: Synthetic oligonucleotide
  Sense strand starting at position 3168 of SEQ ID NO: 1242435
auugcuccuccugaguaaa

SEQ ID NO: 1347345 - RNA, 19 nt, Artificial Sequence
  Description of Artificial Sequence: Synthetic oligonucleotide
  Antisense strand to SEQ ID NO: 1347344
uuuacucaggaggagcaau

SEQ ID NO: 1347346 - RNA, 19 nt, Artificial Sequence
  Description of Artificial Sequence: Synthetic oligonucleotide
  Sense strand starting at position 3216 of SEQ ID NO: 1242435
agggucugaacaggugaaa

SEQ ID NO: 1347347 - RNA, 19 nt, Artificial Sequence
  Description of Artificial Sequence: Synthetic oligonucleotide
  Antisense strand to SEQ ID NO: 1347346
uuucaccuguucagacccu

SEQ ID NO: 1347348 - RNA, 19 nt, Artificial Sequence
  Description of Artificial Sequence: Synthetic oligonucleotide
  Sense strand starting at position 3337 of SEQ ID NO: 1242435
ggaacauucuucccaguuu

SEQ ID NO: 1347349 - RNA, 19 nt, Artificial Sequence
  Description of Artificial Sequence: Synthetic oligonucleotide
  Antisense strand to SEQ ID NO: 1347348
aaacugggaagaauguucc

SEQ ID NO: 1347350 - RNA, 19 nt, Artificial Sequence
  Description of Artificial Sequence: Synthetic oligonucleotide
  Sense strand starting at position 3348 of SEQ ID NO: 1242435
cccaguuucucauccagag

SEQ ID NO: 1347351 - RNA, 19 nt, Artificial Sequence
  Description of Artificial Sequence: Synthetic oligonucleotide
  Antisense strand to SEQ ID NO: 1347350
cucuggaugagaaacuggg

SEQ ID NO: 1347352 - RNA, 19 nt, Artificial Sequence
  Description of Artificial Sequence: Synthetic oligonucleotide
  Sense strand starting at position 3365 of SEQ ID NO: 1242435
agcagcuuugccuagcaga

SEQ ID NO: 1347353 - RNA, 19 nt, Artificial Sequence
  Description of Artificial Sequence: Synthetic oligonucleotide
  Antisense strand to SEQ ID NO: 1347352
ucugcuaggcaaagcugcu

SEQ ID NO: 1347354 - RNA, 19 nt, Artificial Sequence
  Description of Artificial Sequence: Synthetic oligonucleotide
  Sense strand starting at position 3481 of SEQ ID NO: 1242435
ucuggauguuuaggguuua

SEQ ID NO: 1347355 - RNA, 19 nt, Artificial Sequence
  Description of Artificial Sequence: Synthetic oligonucleotide
  Antisense strand to SEQ ID NO: 1347354
uaaacccuaaacauccaga

SEQ ID NO: 1347356 - RNA, 19 nt, Artificial Sequence
  Description of Artificial Sequence: Synthetic oligonucleotide
  Sense strand starting at position 3482 of SEQ ID NO: 1242435
cuggauguuuaggguuuau

SEQ ID NO: 1347357 - RNA, 19 nt, Artificial Sequence
  Description of Artificial Sequence: Synthetic oligonucleotide
  Antisense strand to SEQ ID NO: 1347356
auaaacccuaaacauccag

SEQ ID NO: 1347358 - RNA, 19 nt, Artificial Sequence
  Description of Artificial Sequence: Synthetic oligonucleotide
  Sense strand starting at position 3511 of SEQ ID NO: 1242435
uggcacacugguggauaua

SEQ ID NO: 1347359 - RNA, 19 nt, Artificial Sequence
  Description of Artificial Sequence: Synthetic oligonucleotide
  Antisense strand to SEQ ID NO: 1347358
uauauccaccagugugcca

SEQ ID NO: 1347360 - RNA, 19 nt, Artificial Sequence
  Description of Artificial Sequence: Synthetic oligonucleotide
  Sense strand starting at position 3537 of SEQ ID NO: 1242435
ggugguaugcugggaauga

SEQ ID NO: 1347361 - RNA, 19 nt, Artificial Sequence
  Description of Artificial Sequence: Synthetic oligonucleotide
  Antisense strand to SEQ ID NO: 1347360
ucauucccagcauaccacc

SEQ ID NO: 1347362 - RNA, 19 nt, Artificial Sequence
  Description of Artificial Sequence: Synthetic oligonucleotide
  Sense strand starting at position 3538 of SEQ ID NO: 1242435
gugguaugcugggaaugaa

SEQ ID NO: 1347363 - RNA, 19 nt, Artificial Sequence
  Description of Artificial Sequence: Synthetic oligonucleotide
  Antisense strand to SEQ ID NO: 1347362
uucauucccagcauaccac

SEQ ID NO: 1347364 - RNA, 19 nt, Artificial Sequence
  Description of Artificial Sequence: Synthetic oligonucleotide
  Sense strand starting at position 3541 of SEQ ID NO: 1242435
guaugcugggaaugaagaa

SEQ ID NO: 1347365 - RNA, 19 nt, Artificial Sequence
  Description of Artificial Sequence: Synthetic oligonucleotide
  Antisense strand to SEQ ID NO: 1347364
uucuucauucccagcauac

SEQ ID NO: 1347366 - RNA, 19 nt, Artificial Sequence
  Description of Artificial Sequence: Synthetic oligonucleotide
  Sense strand starting at position 3566 of SEQ ID NO: 1242435
ugugcagucacugggaaga

SEQ ID NO: 1347367 - RNA, 19 nt, Artificial Sequence
  Description of Artificial Sequence: Synthetic oligonucleotide
  Antisense strand to SEQ ID NO: 1347366
ucuucccagugacugcaca

SEQ ID NO: 1347368 - RNA, 19 nt, Artificial Sequence
  Description of Artificial Sequence: Synthetic oligonucleotide
  Sense strand starting at position 3568 of SEQ ID NO: 1242435
ugcagucacugggaagaaa

SEQ ID NO: 1347369 - RNA, 19 nt, Artificial Sequence
  Description of Artificial Sequence: Synthetic oligonucleotide
  Antisense strand to SEQ ID NO: 1347368
uuucuucccagugacugca

SEQ ID NO: 1347370 - RNA, 19 nt, Artificial Sequence
  Description of Artificial Sequence: Synthetic oligonucleotide
  Sense strand starting at position 3944 of SEQ ID NO: 1242435
ugugccugaccucaagaau

SEQ ID NO: 1347371 - RNA, 19 nt, Artificial Sequence
  Description of Artificial Sequence: Synthetic oligonucleotide
  Antisense strand to SEQ ID NO: 1347370
auucuugaggucaggcaca

SEQ ID NO: 1347372 - RNA, 19 nt, Artificial Sequence
  Description of Artificial Sequence: Synthetic oligonucleotide
  Sense strand starting at position 3947 of SEQ ID NO: 1242435
gccugaccucaagaaucuu

SEQ ID NO: 1347373 - RNA, 19 nt, Artificial Sequence
  Description of Artificial Sequence: Synthetic oligonucleotide
  Antisense strand to SEQ ID NO: 1347372
aagauucuugaggucaggc

SEQ ID NO: 1347374 - RNA, 19 nt, Artificial Sequence
  Description of Artificial Sequence: Synthetic oligonucleotide
  Sense strand starting at position 43 of SEQ ID NO: 1242436
ggcuucugugccuacaaca

SEQ ID NO: 1347375 - RNA, 19 nt, Artificial Sequence
  Description of Artificial Sequence: Synthetic oligonucleotide
  Antisense strand to SEQ ID NO: 1347374
uguuguaggcacagaagcc

SEQ ID NO: 1347376 - RNA, 19 nt, Artificial Sequence
  Description of Artificial Sequence: Synthetic oligonucleotide
  Sense strand starting at position 412 of SEQ ID NO: 1242436
cucugaacauccugaguuc

SEQ ID NO: 1347377 - RNA, 19 nt, Artificial Sequence
  Description of Artificial Sequence: Synthetic oligonucleotide
  Antisense strand to SEQ ID NO: 1347376
gaacucaggauguucagag

SEQ ID NO: 1347378 - RNA, 19 nt, Artificial Sequence
  Description of Artificial Sequence: Synthetic oligonucleotide
  Sense strand starting at position 497 of SEQ ID NO: 1242436
gccuacuaccgaugugaag

SEQ ID NO: 1347379 - RNA, 19 nt, Artificial Sequence
  Description of Artificial Sequence: Synthetic oligonucleotide
  Antisense strand to SEQ ID NO: 1347378
cuucacaucgguaguaggc

SEQ ID NO: 1347380 - RNA, 19 nt, Artificial Sequence
  Description of Artificial Sequence: Synthetic oligonucleotide
  Sense strand starting at position 543 of SEQ ID NO: 1242436
cauugaucaccaggcuuga

SEQ ID NO: 1347381 - RNA, 19 nt, Artificial Sequence
  Description of Artificial Sequence: Synthetic oligonucleotide
  Antisense strand to SEQ ID NO: 1347380
ucaagccuggugaucaaug

SEQ ID NO: 1347382 - RNA, 19 nt, Artificial Sequence
  Description of Artificial Sequence: Synthetic oligonucleotide
  Sense strand starting at position 556 of SEQ ID NO: 1242436
gcuugauucggcuguacug

SEQ ID NO: 1347383 - RNA, 19 nt, Artificial Sequence
  Description of Artificial Sequence: Synthetic oligonucleotide
  Antisense strand to SEQ ID NO: 1347382
caguacagccgaaucaagc

SEQ ID NO: 1347384 - RNA, 19 nt, Artificial Sequence
  Description of Artificial Sequence: Synthetic oligonucleotide
  Sense strand starting at position 792 of SEQ ID NO: 1242436
aucacuugaacguggaaga

SEQ ID NO: 1347385 - RNA, 19 nt, Artificial Sequence
  Description of Artificial Sequence: Synthetic oligonucleotide
  Antisense strand to SEQ ID NO: 1347384
ucuuccacguucaagugau

SEQ ID NO: 1347386 - RNA, 19 nt, Artificial Sequence
  Description of Artificial Sequence: Synthetic oligonucleotide
  Sense strand starting at position 2325 of SEQ ID NO: 1242436
gcccgaugcaaaugaucuu

SEQ ID NO: 1347387 - RNA, 19 nt, Artificial Sequence
  Description of Artificial Sequence: Synthetic oligonucleotide
  Antisense strand to SEQ ID NO: 1347386
aagaucauuugcaucgggc

SEQ ID NO: 1347388 - RNA, 19 nt, Artificial Sequence
  Description of Artificial Sequence: Synthetic oligonucleotide
  Sense strand starting at position 2399 of SEQ ID NO: 1242436
cguggcugcaccugugaua

SEQ ID NO: 1347389 - RNA, 19 nt, Artificial Sequence
  Description of Artificial Sequence: Synthetic oligonucleotide
  Antisense strand to SEQ ID NO: 1347388
uaucacaggugcagccacg

SEQ ID NO: 1347390 - RNA, 19 nt, Artificial Sequence
  Description of Artificial Sequence: Synthetic oligonucleotide
  Sense strand starting at position 2402 of SEQ ID NO: 1242436
ggcugcaccugugauaaca

SEQ ID NO: 1347391 - RNA, 19 nt, Artificial Sequence
  Description of Artificial Sequence: Synthetic oligonucleotide
  Antisense strand to SEQ ID NO: 1347390
uguuaucacaggugcagcc

SEQ ID NO: 1347392 - RNA, 19 nt, Artificial Sequence
  Description of Artificial Sequence: Synthetic oligonucleotide
  Sense strand starting at position 2464 of SEQ ID NO: 1242436
cccugcugucagggugaga

SEQ ID NO: 1347393 - RNA, 19 nt, Artificial Sequence
  Description of Artificial Sequence: Synthetic oligonucleotide
  Antisense strand to SEQ ID NO: 1347392
ucucacccugacagcaggg

SEQ ID NO: 1347394 - RNA, 19 nt, Artificial Sequence
  Description of Artificial Sequence: Synthetic oligonucleotide
  Sense strand starting at position 2585 of SEQ ID NO: 1242436
ccugcuauggcucauugga

SEQ ID NO: 1347395 - RNA, 19 nt, Artificial Sequence
  Description of Artificial Sequence: Synthetic oligonucleotide
  Antisense strand to SEQ ID NO: 1347394
uccaaugagccauagcagg

SEQ ID NO: 1347396 - RNA, 19 nt, Artificial Sequence
  Description of Artificial Sequence: Synthetic oligonucleotide
  Sense strand starting at position 2662 of SEQ ID NO: 1242436
gcuacuuucuuccagggaa

SEQ ID NO: 1347397 - RNA, 19 nt, Artificial Sequence
  Description of Artificial Sequence: Synthetic oligonucleotide
  Antisense strand to SEQ ID NO: 1347396
uucccuggaagaaaguagc

SEQ ID NO: 1347398 - RNA, 19 nt, Artificial Sequence
  Description of Artificial Sequence: Synthetic oligonucleotide
  Sense strand starting at position 2665 of SEQ ID NO: 1242436
acuuucuuccagggaaaug

SEQ ID NO: 1347399 - RNA, 19 nt, Artificial Sequence
  Description of Artificial Sequence: Synthetic oligonucleotide
  Antisense strand to SEQ ID NO: 1347398
cauuucccuggaagaaagu

SEQ ID NO: 1347400 - RNA, 19 nt, Artificial Sequence
  Description of Artificial Sequence: Synthetic oligonucleotide
  Sense strand starting at position 2713 of SEQ ID NO: 1242436
caccaaguagcugaguuaa

SEQ ID NO: 1347401 - RNA, 19 nt, Artificial Sequence
  Description of Artificial Sequence: Synthetic oligonucleotide
  Antisense strand to SEQ ID NO: 1347400
uuaacucagcuacuuggug

SEQ ID NO: 1347402 - RNA, 19 nt, Artificial Sequence
  Description of Artificial Sequence: Synthetic oligonucleotide
  Sense strand starting at position 2715 of SEQ ID NO: 1242436
ccaaguagcugaguuaaug

SEQ ID NO: 1347403 - RNA, 19 nt, Artificial Sequence
  Description of Artificial Sequence: Synthetic oligonucleotide
  Antisense strand to SEQ ID NO: 1347402
cauuaacucagcuacuugg

SEQ ID NO: 1347404 - RNA, 19 nt, Artificial Sequence
  Description of Artificial Sequence: Synthetic oligonucleotide
  Sense strand starting at position 2771 of SEQ ID NO: 1242436
auugcuccuccugaguaaa

SEQ ID NO: 1347405 - RNA, 19 nt, Artificial Sequence
  Description of Artificial Sequence: Synthetic oligonucleotide
  Antisense strand to SEQ ID NO: 1347404
uuuacucaggaggagcaau

SEQ ID NO: 1347406 - RNA, 19 nt, Artificial Sequence
  Description of Artificial Sequence: Synthetic oligonucleotide
  Sense strand starting at position 2819 of SEQ ID NO: 1242436
agggucugaacaggugaaa

SEQ ID NO: 1347407 - RNA, 19 nt, Artificial Sequence
  Description of Artificial Sequence: Synthetic oligonucleotide
  Antisense strand to SEQ ID NO: 1347406
uuucaccuguucagacccu

SEQ ID NO: 1347408 - RNA, 19 nt, Artificial Sequence
  Description of Artificial Sequence: Synthetic oligonucleotide
  Sense strand starting at position 2940 of SEQ ID NO: 1242436
ggaacauucuucccaguuu

SEQ ID NO: 1347409 - RNA, 19 nt, Artificial Sequence
  Description of Artificial Sequence: Synthetic oligonucleotide
  Antisense strand to SEQ ID NO: 1347408
aaacugggaagaauguucc

SEQ ID NO: 1347410 - RNA, 19 nt, Artificial Sequence
  Description of Artificial Sequence: Synthetic oligonucleotide
  Sense strand starting at position 2951 of SEQ ID NO: 1242436
cccaguuucucauccagag

SEQ ID NO: 1347411 - RNA, 19 nt, Artificial Sequence
  Description of Artificial Sequence: Synthetic oligonucleotide
  Antisense strand to SEQ ID NO: 1347410
cucuggaugagaaacuggg

SEQ ID NO: 1347412 - RNA, 19 nt, Artificial Sequence
  Description of Artificial Sequence: Synthetic oligonucleotide
  Sense strand starting at position 2968 of SEQ ID NO: 1242436
agcagcuuugccuagcaga

SEQ ID NO: 1347413 - RNA, 19 nt, Artificial Sequence
  Description of Artificial Sequence: Synthetic oligonucleotide
  Antisense strand to SEQ ID NO: 1347412
ucugcuaggcaaagcugcu

SEQ ID NO: 1347414 - RNA, 19 nt, Artificial Sequence
  Description of Artificial Sequence: Synthetic oligonucleotide
  Sense strand starting at position 3084 of SEQ ID NO: 1242436
ucuggauguuuaggguuua

SEQ ID NO: 1347415 - RNA, 19 nt, Artificial Sequence
  Description of Artificial Sequence: Synthetic oligonucleotide
  Antisense strand to SEQ ID NO: 1347414
uaaacccuaaacauccaga

SEQ ID NO: 1347416 - RNA, 19 nt, Artificial Sequence
  Description of Artificial Sequence: Synthetic oligonucleotide
  Sense strand starting at position 3085 of SEQ ID NO: 1242436
cuggauguuuaggguuuau

SEQ ID NO: 1347417 - RNA, 19 nt, Artificial Sequence
  Description of Artificial Sequence: Synthetic oligonucleotide
  Antisense strand to SEQ ID NO: 1347416
auaaacccuaaacauccag

SEQ ID NO: 1347418 - RNA, 19 nt, Artificial Sequence
  Description of Artificial Sequence: Synthetic oligonucleotide
  Sense strand starting at position 3114 of SEQ ID NO: 1242436
uggcacacugguggauaua

SEQ ID NO: 1347419 - RNA, 19 nt, Artificial Sequence
  Description of Artificial Sequence: Synthetic oligonucleotide
  Antisense strand to SEQ ID NO: 1347418
uauauccaccagugugcca

SEQ ID NO: 1347420 - RNA, 19 nt, Artificial Sequence
  Description of Artificial Sequence: Synthetic oligonucleotide
  Sense strand starting at position 3140 of SEQ ID NO: 1242436
ggugguaugcugggaauga

SEQ ID NO: 1347421 - RNA, 19 nt, Artificial Sequence
  Description of Artificial Sequence: Synthetic oligonucleotide
  Antisense strand to SEQ ID NO: 1347420
ucauucccagcauaccacc

SEQ ID NO: 1347422 - RNA, 19 nt, Artificial Sequence
  Description of Artificial Sequence: Synthetic oligonucleotide
  Sense strand starting at position 3141 of SEQ ID NO: 1242436
gugguaugcugggaaugaa

SEQ ID NO: 1347423 - RNA, 19 nt, Artificial Sequence
  Description of Artificial Sequence: Synthetic oligonucleotide
  Antisense strand to SEQ ID NO: 1347422
uucauucccagcauaccac

SEQ ID NO: 1347424 - RNA, 19 nt, Artificial Sequence
  Description of Artificial Sequence: Synthetic oligonucleotide
  Sense strand starting at position 3144 of SEQ ID NO: 1242436
guaugcugggaaugaagaa

SEQ ID NO: 1347425 - RNA, 19 nt, Artificial Sequence
  Description of Artificial Sequence: Synthetic oligonucleotide
  Antisense strand to SEQ ID NO: 1347424
uucuucauucccagcauac

SEQ ID NO: 1347426 - RNA, 19 nt, Artificial Sequence
  Description of Artificial Sequence: Synthetic oligonucleotide
  Sense strand starting at position 3169 of SEQ ID NO: 1242436
ugugcagucacugggaaga

SEQ ID NO: 1347427 - RNA, 19 nt, Artificial Sequence
  Description of Artificial Sequence: Synthetic oligonucleotide
  Antisense strand to SEQ ID NO: 1347426
ucuucccagugacugcaca

SEQ ID NO: 1347428 - RNA, 19 nt, Artificial Sequence
  Description of Artificial Sequence: Synthetic oligonucleotide
  Sense strand starting at position 3171 of SEQ ID NO: 1242436
ugcagucacugggaagaaa

SEQ ID NO: 1347429 - RNA, 19 nt, Artificial Sequence
  Description of Artificial Sequence: Synthetic oligonucleotide
  Antisense strand to SEQ ID NO: 1347428
uuucuucccagugacugca

SEQ ID NO: 1347430 - RNA, 19 nt, Artificial Sequence
  Description of Artificial Sequence: Synthetic oligonucleotide
  Sense strand starting at position 3547 of SEQ ID NO: 1242436
ugugccugaccucaagaau

SEQ ID NO: 1347431 - RNA, 19 nt, Artificial Sequence
  Description of Artificial Sequence: Synthetic oligonucleotide
  Antisense strand to SEQ ID NO: 1347430
auucuugaggucaggcaca

SEQ ID NO: 1347432 - RNA, 19 nt, Artificial Sequence
  Description of Artificial Sequence: Synthetic oligonucleotide
  Sense strand starting at position 3550 of SEQ ID NO: 1242436
gccugaccucaagaaucuu

SEQ ID NO: 1347433 - RNA, 19 nt, Artificial Sequence
  Description of Artificial Sequence: Synthetic oligonucleotide
  Antisense strand to SEQ ID NO: 1347432
aagauucuugaggucaggc

SEQ ID NO: 1347434 - RNA, 19 nt, Artificial Sequence
  Description of Artificial Sequence: Synthetic oligonucleotide
  Sense strand starting at position 3784 of SEQ ID NO: 1242436
cagguaaacugacuuguca

SEQ ID NO: 1347435 - RNA, 19 nt, Artificial Sequence
  Description of Artificial Sequence: Synthetic oligonucleotide
  Antisense strand to SEQ ID NO: 1347434
ugacaagucaguuuaccug

SEQ ID NO: 1347436 - RNA, 19 nt, Artificial Sequence
  Description of Artificial Sequence: Synthetic oligonucleotide
  Sense strand starting at position 3791 of SEQ ID NO: 1242436
acugacuugucaggucauu

SEQ ID NO: 1347437 - RNA, 19 nt, Artificial Sequence
  Description of Artificial Sequence: Synthetic oligonucleotide
  Antisense strand to SEQ ID NO: 1347436
aaugaccugacaagucagu

SEQ ID NO: 1347438 - RNA, 19 nt, Artificial Sequence
  Description of Artificial Sequence: Synthetic oligonucleotide
  Sense strand starting at position 3870 of SEQ ID NO: 1242436
gcuuaaacccugggcuuua

SEQ ID NO: 1347439 - RNA, 19 nt, Artificial Sequence
  Description of Artificial Sequence: Synthetic oligonucleotide
  Antisense strand to SEQ ID NO: 1347438
uaaagcccaggguuuaagc

SEQ ID NO: 1347440 - RNA, 19 nt, Artificial Sequence
  Description of Artificial Sequence: Synthetic oligonucleotide
  Sense strand starting at position 3884 of SEQ ID NO: 1242436
cuuuauggccuuugcaauu

SEQ ID NO: 1347441 - RNA, 19 nt, Artificial Sequence
  Description of Artificial Sequence: Synthetic oligonucleotide
  Antisense strand to SEQ ID NO: 1347440
aauugcaaaggccauaaag

SEQ ID NO: 1347442 - RNA, 19 nt, Artificial Sequence
  Description of Artificial Sequence: Synthetic oligonucleotide
  Sense strand starting at position 262 of SEQ ID NO: 1242437
ggaugaucuuuagauuugu

SEQ ID NO: 1347443 - RNA, 19 nt, Artificial Sequence
  Description of Artificial Sequence: Synthetic oligonucleotide
  Antisense strand to SEQ ID NO: 1347442
acaaaucuaaagaucaucc

SEQ ID NO: 1347444 - RNA, 19 nt, Artificial Sequence
  Description of Artificial Sequence: Synthetic oligonucleotide
  Sense strand starting at position 277 of SEQ ID NO: 1242437
uugugaaggcuaugaaauc

SEQ ID NO: 1347445 - RNA, 19 nt, Artificial Sequence
  Description of Artificial Sequence: Synthetic oligonucleotide
  Antisense strand to SEQ ID NO: 1347444
gauuucauagccuucacaa

SEQ ID NO: 1347446 - RNA, 19 nt, Artificial Sequence
  Description of Artificial Sequence: Synthetic oligonucleotide
  Sense strand starting at position 299 of SEQ ID NO: 1242437
ugacaagucuacuuaagua

SEQ ID NO: 1347447 - RNA, 19 nt, Artificial Sequence
  Description of Artificial Sequence: Synthetic oligonucleotide
  Antisense strand to SEQ ID NO: 1347446
uacuuaaguagacuuguca

SEQ ID NO: 1347448 - RNA, 19 nt, Artificial Sequence
  Description of Artificial Sequence: Synthetic oligonucleotide
  Sense strand starting at position 303 of SEQ ID NO: 1242437
aagucuacuuaaguagagu

SEQ ID NO: 1347449 - RNA, 19 nt, Artificial Sequence
  Description of Artificial Sequence: Synthetic oligonucleotide
  Antisense strand to SEQ ID NO: 1347448
acucuacuuaaguagacuu

SEQ ID NO: 1347450 - RNA, 19 nt, Artificial Sequence
  Description of Artificial Sequence: Synthetic oligonucleotide
  Sense strand starting at position 304 of SEQ ID NO: 1242437
agucuacuuaaguagaguu

SEQ ID NO: 1347451 - RNA, 19 nt, Artificial Sequence
  Description of Artificial Sequence: Synthetic oligonucleotide
  Antisense strand to SEQ ID NO: 1347450
aacucuacuuaaguagacu

SEQ ID NO: 1347452 - RNA, 19 nt, Artificial Sequence
  Description of Artificial Sequence: Synthetic oligonucleotide
  Sense strand starting at position 379 of SEQ ID NO: 1242437
acugauguaucacuaagcu

SEQ ID NO: 1347453 - RNA, 19 nt, Artificial Sequence
  Description of Artificial Sequence: Synthetic oligonucleotide
  Antisense strand to SEQ ID NO: 1347452
agcuuagugauacaucagu

SEQ ID NO: 1347454 - RNA, 19 nt, Artificial Sequence
  Description of Artificial Sequence: Synthetic oligonucleotide
  Sense strand starting at position 414 of SEQ ID NO: 1242437
aagggauuaguacgaaugu

SEQ ID NO: 1347455 - RNA, 19 nt, Artificial Sequence
  Description of Artificial Sequence: Synthetic oligonucleotide
  Antisense strand to SEQ ID NO: 1347454
acauucguacuaaucccuu

SEQ ID NO: 1347456 - RNA, 19 nt, Artificial Sequence
  Description of Artificial Sequence: Synthetic oligonucleotide
  Sense strand starting at position 420 of SEQ ID NO: 1242437
uuaguacgaaugugauauu

SEQ ID NO: 1347457 - RNA, 19 nt, Artificial Sequence
  Description of Artificial Sequence: Synthetic oligonucleotide
  Antisense strand to SEQ ID NO: 1347456
aauaucacauucguacuaa

SEQ ID NO: 1347458 - RNA, 19 nt, Artificial Sequence
  Description of Artificial Sequence: Synthetic oligonucleotide
  Sense strand starting at position 561 of SEQ ID NO: 1242437
aguauuaucugucugauua

SEQ ID NO: 1347459 - RNA, 19 nt, Artificial Sequence
  Description of Artificial Sequence: Synthetic oligonucleotide
  Antisense strand to SEQ ID NO: 1347458
uaaucagacagauaauacu

SEQ ID NO: 1347460 - RNA, 19 nt, Artificial Sequence
  Description of Artificial Sequence: Synthetic oligonucleotide
  Sense strand starting at position 562 of SEQ ID NO: 1242437
guauuaucugucugauuac

SEQ ID NO: 1347461 - RNA, 19 nt, Artificial Sequence
  Description of Artificial Sequence: Synthetic oligonucleotide
  Antisense strand to SEQ ID NO: 1347460
guaaucagacagauaauac

SEQ ID NO: 1347462 - RNA, 19 nt, Artificial Sequence
  Description of Artificial Sequence: Synthetic oligonucleotide
  Sense strand starting at position 565 of SEQ ID NO: 1242437
uuaucugucugauuacaca

SEQ ID NO: 1347463 - RNA, 19 nt, Artificial Sequence
  Description of Artificial Sequence: Synthetic oligonucleotide
  Antisense strand to SEQ ID NO: 1347462
uguguaaucagacagauaa

SEQ ID NO: 1347464 - RNA, 19 nt, Artificial Sequence
  Description of Artificial Sequence: Synthetic oligonucleotide
  Sense strand starting at position 591 of SEQ ID NO: 1242437
ccuuaaagacuccgacuaa

SEQ ID NO: 1347465 - RNA, 19 nt, Artificial Sequence
  Description of Artificial Sequence: Synthetic oligonucleotide
  Antisense strand to SEQ ID NO: 1347464
uuagucggagucuuuaagg

SEQ ID NO: 1347466 - RNA, 19 nt, Artificial Sequence
  Description of Artificial Sequence: Synthetic oligonucleotide
  Sense strand starting at position 886 of SEQ ID NO: 1242437
aaauaacaugcguaaguuu

SEQ ID NO: 1347467 - RNA, 19 nt, Artificial Sequence
  Description of Artificial Sequence: Synthetic oligonucleotide
  Antisense strand to SEQ ID NO: 1347466
aaacuuacgcauguuauuu

SEQ ID NO: 1347468 - RNA, 19 nt, Artificial Sequence
  Description of Artificial Sequence: Synthetic oligonucleotide
  Sense strand starting at position 1019 of SEQ ID NO: 1242437
cuauuacuucucugugacu

SEQ ID NO: 1347469 - RNA, 19 nt, Artificial Sequence
  Description of Artificial Sequence: Synthetic oligonucleotide
  Antisense strand to SEQ ID NO: 1347468
agucacagagaaguaauag

SEQ ID NO: 1347470 - RNA, 19 nt, Artificial Sequence
  Description of Artificial Sequence: Synthetic oligonucleotide
  Sense strand starting at position 1021 of SEQ ID NO: 1242437
auuacuucucugugacuau

SEQ ID NO: 1347471 - RNA, 19 nt, Artificial Sequence
  Description of Artificial Sequence: Synthetic oligonucleotide
  Antisense strand to SEQ ID NO: 1347470
auagucacagagaaguaau

SEQ ID NO: 1347472 - RNA, 19 nt, Artificial Sequence
  Description of Artificial Sequence: Synthetic oligonucleotide
  Sense strand starting at position 1024 of SEQ ID NO: 1242437
acuucucugugacuaugaa

SEQ ID NO: 1347473 - RNA, 19 nt, Artificial Sequence
  Description of Artificial Sequence: Synthetic oligonucleotide
  Antisense strand to SEQ ID NO: 1347472
uucauagucacagagaagu

SEQ ID NO: 1347474 - RNA, 19 nt, Artificial Sequence
  Description of Artificial Sequence: Synthetic oligonucleotide
  Sense strand starting at position 1025 of SEQ ID NO: 1242437
cuucucugugacuaugaaa

SEQ ID NO: 1347475 - RNA, 19 nt, Artificial Sequence
  Description of Artificial Sequence: Synthetic oligonucleotide
  Antisense strand to SEQ ID NO: 1347474
uuucauagucacagagaag

SEQ ID NO: 1347476 - RNA, 19 nt, Artificial Sequence
  Description of Artificial Sequence: Synthetic oligonucleotide
  Sense strand starting at position 1100 of SEQ ID NO: 1242437
ccuuuaaauuaggcagaaa

SEQ ID NO: 1347477 - RNA, 19 nt, Artificial Sequence
  Description of Artificial Sequence: Synthetic oligonucleotide
  Antisense strand to SEQ ID NO: 1347476
uuucugccuaauuuaaagg

SEQ ID NO: 1347478 - RNA, 19 nt, Artificial Sequence
  Description of Artificial Sequence: Synthetic oligonucleotide
  Sense strand starting at position 1416 of SEQ ID NO: 1242437
uuaaauaugcugggacagu

SEQ ID NO: 1347479 - RNA, 19 nt, Artificial Sequence
  Description of Artificial Sequence: Synthetic oligonucleotide
  Antisense strand to SEQ ID NO: 1347478
acugucccagcauauuuaa

SEQ ID NO: 1347480 - RNA, 19 nt, Artificial Sequence
  Description of Artificial Sequence: Synthetic oligonucleotide
  Sense strand starting at position 1436 of SEQ ID NO: 1242437
agcaacuaucgagaagcau

SEQ ID NO: 1347481 - RNA, 19 nt, Artificial Sequence
  Description of Artificial Sequence: Synthetic oligonucleotide
  Antisense strand to SEQ ID NO: 1347480
augcuucucgauaguugcu

SEQ ID NO: 1347482 - RNA, 19 nt, Artificial Sequence
  Description of Artificial Sequence: Synthetic oligonucleotide
  Sense strand starting at position 1497 of SEQ ID NO: 1242437
guagguauuucgccagacu

SEQ ID NO: 1347483 - RNA, 19 nt, Artificial Sequence
  Description of Artificial Sequence: Synthetic oligonucleotide
  Antisense strand to SEQ ID NO: 1347482
agucuggcgaaauaccuac

SEQ ID NO: 1347484 - RNA, 19 nt, Artificial Sequence
  Description of Artificial Sequence: Synthetic oligonucleotide
  Sense strand starting at position 2220 of SEQ ID NO: 1242437
caguaacuacccgaguguu

SEQ ID NO: 1347485 - RNA, 19 nt, Artificial Sequence
  Description of Artificial Sequence: Synthetic oligonucleotide
  Antisense strand to SEQ ID NO: 1347484
aacacucggguaguuacug

SEQ ID NO: 1347486 - RNA, 19 nt, Artificial Sequence
  Description of Artificial Sequence: Synthetic oligonucleotide
  Sense strand starting at position 2253 of SEQ ID NO: 1242437
aucuaagggucacccuaau

SEQ ID NO: 1347487 - RNA, 19 nt, Artificial Sequence
  Description of Artificial Sequence: Synthetic oligonucleotide
  Antisense strand to SEQ ID NO: 1347486
auuagggugacccuuagau

SEQ ID NO: 1347488 - RNA, 19 nt, Artificial Sequence
  Description of Artificial Sequence: Synthetic oligonucleotide
  Sense strand starting at position 2283 of SEQ ID NO: 1242437
ucauuuguuccuggccacu

SEQ ID NO: 1347489 - RNA, 19 nt, Artificial Sequence
  Description of Artificial Sequence: Synthetic oligonucleotide
  Antisense strand to SEQ ID NO: 1347488
aguggccaggaacaaauga

SEQ ID NO: 1347490 - RNA, 19 nt, Artificial Sequence
  Description of Artificial Sequence: Synthetic oligonucleotide
  Sense strand starting at position 2611 of SEQ ID NO: 1242437
ggaaccaagucuguacuaa

SEQ ID NO: 1347491 - RNA, 19 nt, Artificial Sequence
  Description of Artificial Sequence: Synthetic oligonucleotide
  Antisense strand to SEQ ID NO: 1347490
uuaguacagacuugguucc

SEQ ID NO: 1347492 - RNA, 19 nt, Artificial Sequence
  Description of Artificial Sequence: Synthetic oligonucleotide
  Sense strand starting at position 3576 of SEQ ID NO: 1242437
uauaguagguccucagaua

SEQ ID NO: 1347493 - RNA, 19 nt, Artificial Sequence
  Description of Artificial Sequence: Synthetic oligonucleotide
  Antisense strand to SEQ ID NO: 1347492
uaucugaggaccuacuaua

SEQ ID NO: 1347494 - RNA, 19 nt, Artificial Sequence
  Description of Artificial Sequence: Synthetic oligonucleotide
  Sense strand starting at position 3577 of SEQ ID NO: 1242437
auaguagguccucagauau

SEQ ID NO: 1347495 - RNA, 19 nt, Artificial Sequence
  Description of Artificial Sequence: Synthetic oligonucleotide
  Antisense strand to SEQ ID NO: 1347494
auaucugaggaccuacuau

SEQ ID NO: 1347496 - RNA, 19 nt, Artificial Sequence
  Description of Artificial Sequence: Synthetic oligonucleotide
  Sense strand starting at position 3660 of SEQ ID NO: 1242437
uaguuuaacgagggacaca

SEQ ID NO: 1347497 - RNA, 19 nt, Artificial Sequence
  Description of Artificial Sequence: Synthetic oligonucleotide
  Antisense strand to SEQ ID NO: 1347496
ugugucccucguuaaacua

SEQ ID NO: 1347498 - RNA, 19 nt, Artificial Sequence
  Description of Artificial Sequence: Synthetic oligonucleotide
  Sense strand starting at position 3673 of SEQ ID NO: 1242437
gacacagaugugugagcaa

SEQ ID NO: 1347499 - RNA, 19 nt, Artificial Sequence
  Description of Artificial Sequence: Synthetic oligonucleotide
  Antisense strand to SEQ ID NO: 1347498
uugcucacacaucuguguc

SEQ ID NO: 1347500 - RNA, 19 nt, Artificial Sequence
  Description of Artificial Sequence: Synthetic oligonucleotide
  Sense strand starting at position 3676 of SEQ ID NO: 1242437
acagaugugugagcaaaca

SEQ ID NO: 1347501 - RNA, 19 nt, Artificial Sequence
  Description of Artificial Sequence: Synthetic oligonucleotide
  Antisense strand to SEQ ID NO: 1347500
uguuugcucacacaucugu

SEQ ID NO: 1347502 - RNA, 19 nt, Artificial Sequence
  Description of Artificial Sequence: Synthetic oligonucleotide
  Sense strand starting at position 3718 of SEQ ID NO: 1242437
uuguuugcacaagauguua

SEQ ID NO: 1347503 - RNA, 19 nt, Artificial Sequence
  Description of Artificial Sequence: Synthetic oligonucleotide
  Antisense strand to SEQ ID NO: 1347502
uaacaucuugugcaaacaa

SEQ ID NO: 1347504 - RNA, 19 nt, Artificial Sequence
  Description of Artificial Sequence: Synthetic oligonucleotide
  Sense strand starting at position 3791 of SEQ ID NO: 1242437
cugagucugggugaguuaa

SEQ ID NO: 1347505 - RNA, 19 nt, Artificial Sequence
  Description of Artificial Sequence: Synthetic oligonucleotide
  Antisense strand to SEQ ID NO: 1347504
uuaacucacccagacucag

SEQ ID NO: 1347506 - RNA, 19 nt, Artificial Sequence
  Description of Artificial Sequence: Synthetic oligonucleotide
  Sense strand starting at position 3793 of SEQ ID NO: 1242437
gagucugggugaguuaauu

SEQ ID NO: 1347507 - RNA, 19 nt, Artificial Sequence
  Description of Artificial Sequence: Synthetic oligonucleotide
  Antisense strand to SEQ ID NO: 1347506
aauuaacucacccagacuc

SEQ ID NO: 1347508 - RNA, 19 nt, Artificial Sequence
  Description of Artificial Sequence: Synthetic oligonucleotide
  Sense strand starting at position 3839 of SEQ ID NO: 1242437
gggcacuuccaggaagagu

SEQ ID NO: 1347509 - RNA, 19 nt, Artificial Sequence
  Description of Artificial Sequence: Synthetic oligonucleotide
  Antisense strand to SEQ ID NO: 1347508
acucuuccuggaagugccc

SEQ ID NO: 1347510 - RNA, 19 nt, Artificial Sequence
  Description of Artificial Sequence: Synthetic oligonucleotide
  Sense strand starting at position 3848 of SEQ ID NO: 1242437
caggaagagugagccauua

SEQ ID NO: 1347511 - RNA, 19 nt, Artificial Sequence
  Description of Artificial Sequence: Synthetic oligonucleotide
  Antisense strand to SEQ ID NO: 1347510
uaauggcucacucuuccug

SEQ ID NO: 1347512 - RNA, 19 nt, Artificial Sequence
  Description of Artificial Sequence: Synthetic oligonucleotide
  Sense strand starting at position 3850 of SEQ ID NO: 1242437
ggaagagugagccauuagu

SEQ ID NO: 1347513 - RNA, 19 nt, Artificial Sequence
  Description of Artificial Sequence: Synthetic oligonucleotide
  Antisense strand to SEQ ID NO: 1347512
acuaauggcucacucuucc

SEQ ID NO: 1347514 - RNA, 19 nt, Artificial Sequence
  Description of Artificial Sequence: Synthetic oligonucleotide
  Sense strand starting at position 3906 of SEQ ID NO: 1242437
uugggcuuggcugaaguua

SEQ ID NO: 1347515 - RNA, 19 nt, Artificial Sequence
  Description of Artificial Sequence: Synthetic oligonucleotide
  Antisense strand to SEQ ID NO: 1347514
uaacuucagccaagcccaa

SEQ ID NO: 1347516 - RNA, 19 nt, Artificial Sequence
  Description of Artificial Sequence: Synthetic oligonucleotide
  Sense strand starting at position 3917 of SEQ ID NO: 1242437
ugaaguuaugaguggugaa

SEQ ID NO: 1347517 - RNA, 19 nt, Artificial Sequence
  Description of Artificial Sequence: Synthetic oligonucleotide
  Antisense strand to SEQ ID NO: 1347516
uucaccacucauaacuuca

SEQ ID NO: 1347518 - RNA, 19 nt, Artificial Sequence
  Description of Artificial Sequence: Synthetic oligonucleotide
  Sense strand starting at position 3918 of SEQ ID NO: 1242437
gaaguuaugaguggugaaa

SEQ ID NO: 1347519 - RNA, 19 nt, Artificial Sequence
  Description of Artificial Sequence: Synthetic oligonucleotide
  Antisense strand to SEQ ID NO: 1347518
uuucaccacucauaacuuc

SEQ ID NO: 1347520 - RNA, 19 nt, Artificial Sequence
  Description of Artificial Sequence: Synthetic oligonucleotide
  Sense strand starting at position 3979 of SEQ ID NO: 1242437
uugggacuguuugugacuu

SEQ ID NO: 1347521 - RNA, 19 nt, Artificial Sequence
  Description of Artificial Sequence: Synthetic oligonucleotide
  Antisense strand to SEQ ID NO: 1347520
aagucacaaacagucccaa

SEQ ID NO: 1347522 - RNA, 19 nt, Artificial Sequence
  Description of Artificial Sequence: Synthetic oligonucleotide
  Sense strand starting at position 1 of SEQ ID NO: 1242438
gagauagacuucuugaucu

SEQ ID NO: 1347523 - RNA, 19 nt, Artificial Sequence
  Description of Artificial Sequence: Synthetic oligonucleotide
  Antisense strand to SEQ ID NO: 1347522
agaucaagaagucuaucuc

SEQ ID NO: 1347524 - RNA, 19 nt, Artificial Sequence
  Description of Artificial Sequence: Synthetic oligonucleotide
  Sense strand starting at position 20 of SEQ ID NO: 1242438
cccucaaaguaggucuaau

SEQ ID NO: 1347525 - RNA, 19 nt, Artificial Sequence
  Description of Artificial Sequence: Synthetic oligonucleotide
  Antisense strand to SEQ ID NO: 1347524
auuagaccuacuuugaggg

SEQ ID NO: 1347526 - RNA, 19 nt, Artificial Sequence
  Description of Artificial Sequence: Synthetic oligonucleotide
  Sense strand starting at position 32 of SEQ ID NO: 1242438
gucuaaucugcagaaggca

SEQ ID NO: 1347527 - RNA, 19 nt, Artificial Sequence
  Description of Artificial Sequence: Synthetic oligonucleotide
  Antisense strand to SEQ ID NO: 1347526
ugccuucugcagauuagac

SEQ ID NO: 1347528 - RNA, 19 nt, Artificial Sequence
  Description of Artificial Sequence: Synthetic oligonucleotide
  Sense strand starting at position 143 of SEQ ID NO: 1242438
cccacauaacugugucaac

SEQ ID NO: 1347529 - RNA, 19 nt, Artificial Sequence
  Description of Artificial Sequence: Synthetic oligonucleotide
  Antisense strand to SEQ ID NO: 1347528
guugacacaguuauguggg

SEQ ID NO: 1347530 - RNA, 19 nt, Artificial Sequence
  Description of Artificial Sequence: Synthetic oligonucleotide
  Sense strand starting at position 144 of SEQ ID NO: 1242438
ccacauaacugugucaaca

SEQ ID NO: 1347531 - RNA, 19 nt, Artificial Sequence
  Description of Artificial Sequence: Synthetic oligonucleotide
  Antisense strand to SEQ ID NO: 1347530
uguugacacaguuaugugg

SEQ ID NO: 1347532 - RNA, 19 nt, Artificial Sequence
  Description of Artificial Sequence: Synthetic oligonucleotide
  Sense strand starting at position 154 of SEQ ID NO: 1242438
gugucaacauucucagaac

SEQ ID NO: 1347533 - RNA, 19 nt, Artificial Sequence
  Description of Artificial Sequence: Synthetic oligonucleotide
  Antisense strand to SEQ ID NO: 1347532
guucugagaauguugacac

SEQ ID NO: 1347534 - RNA, 19 nt, Artificial Sequence
  Description of Artificial Sequence: Synthetic oligonucleotide
  Sense strand starting at position 264 of SEQ ID NO: 1242438
acaaauaagccgcgaauuu

SEQ ID NO: 1347535 - RNA, 19 nt, Artificial Sequence
  Description of Artificial Sequence: Synthetic oligonucleotide
  Antisense strand to SEQ ID NO: 1347534
aaauucgcggcuuauuugu

SEQ ID NO: 1347536 - RNA, 19 nt, Artificial Sequence
  Description of Artificial Sequence: Synthetic oligonucleotide
  Sense strand starting at position 303 of SEQ ID NO: 1242438
caagauguccaaggugaug

SEQ ID NO: 1347537 - RNA, 19 nt, Artificial Sequence
  Description of Artificial Sequence: Synthetic oligonucleotide
  Antisense strand to SEQ ID NO: 1347536
caucaccuuggacaucuug

SEQ ID NO: 1347538 - RNA, 19 nt, Artificial Sequence
  Description of Artificial Sequence: Synthetic oligonucleotide
  Sense strand starting at position 312 of SEQ ID NO: 1242438
caaggugauggauguuuaa

SEQ ID NO: 1347539 - RNA, 19 nt, Artificial Sequence
  Description of Artificial Sequence: Synthetic oligonucleotide
  Antisense strand to SEQ ID NO: 1347538
uuaaacauccaucaccuug

SEQ ID NO: 1347540 - RNA, 19 nt, Artificial Sequence
  Description of Artificial Sequence: Synthetic oligonucleotide
  Sense strand starting at position 315 of SEQ ID NO: 1242438
ggugauggauguuuaauua

SEQ ID NO: 1347541 - RNA, 19 nt, Artificial Sequence
  Description of Artificial Sequence: Synthetic oligonucleotide
  Antisense strand to SEQ ID NO: 1347540
uaauuaaacauccaucacc

SEQ ID NO: 1347542 - RNA, 19 nt, Artificial Sequence
  Description of Artificial Sequence: Synthetic oligonucleotide
  Sense strand starting at position 342 of SEQ ID NO: 1242438
augaaugaagagugugcua

SEQ ID NO: 1347543 - RNA, 19 nt, Artificial Sequence
  Description of Artificial Sequence: Synthetic oligonucleotide
  Antisense strand to SEQ ID NO: 1347542
uagcacacucuucauucau

SEQ ID NO: 1347544 - RNA, 19 nt, Artificial Sequence
  Description of Artificial Sequence: Synthetic oligonucleotide
  Sense strand starting at position 344 of SEQ ID NO: 1242438
gaaugaagagugugcuaug

SEQ ID NO: 1347545 - RNA, 19 nt, Artificial Sequence
  Description of Artificial Sequence: Synthetic oligonucleotide
  Antisense strand to SEQ ID NO: 1347544
cauagcacacucuucauuc

SEQ ID NO: 1347546 - RNA, 19 nt, Artificial Sequence
  Description of Artificial Sequence: Synthetic oligonucleotide
  Sense strand starting at position 583 of SEQ ID NO: 1242438
aaggucugacuuuaguaau

SEQ ID NO: 1347547 - RNA, 19 nt, Artificial Sequence
  Description of Artificial Sequence: Synthetic oligonucleotide
  Antisense strand to SEQ ID NO: 1347546
auuacuaaagucagaccuu

SEQ ID NO: 1347548 - RNA, 19 nt, Artificial Sequence
  Description of Artificial Sequence: Synthetic oligonucleotide
  Sense strand starting at position 594 of SEQ ID NO: 1242438
uuaguaaugcacuguauuu

SEQ ID NO: 1347549 - RNA, 19 nt, Artificial Sequence
  Description of Artificial Sequence: Synthetic oligonucleotide
  Antisense strand to SEQ ID NO: 1347548
aaauacagugcauuacuaa

SEQ ID NO: 1347550 - RNA, 19 nt, Artificial Sequence
  Description of Artificial Sequence: Synthetic oligonucleotide
  Sense strand starting at position 711 of SEQ ID NO: 1242438
cuaauauucugcuuggaau

SEQ ID NO: 1347551 - RNA, 19 nt, Artificial Sequence
  Description of Artificial Sequence: Synthetic oligonucleotide
  Antisense strand to SEQ ID NO: 1347550
auuccaagcagaauauuag

SEQ ID NO: 1347552 - RNA, 19 nt, Artificial Sequence
  Description of Artificial Sequence: Synthetic oligonucleotide
  Sense strand starting at position 777 of SEQ ID NO: 1242438
gcagcugucacguuaaagc

SEQ ID NO: 1347553 - RNA, 19 nt, Artificial Sequence
  Description of Artificial Sequence: Synthetic oligonucleotide
  Antisense strand to SEQ ID NO: 1347552
gcuuuaacgugacagcugc

SEQ ID NO: 1347554 - RNA, 19 nt, Artificial Sequence
  Description of Artificial Sequence: Synthetic oligonucleotide
  Sense strand starting at position 811 of SEQ ID NO: 1242438
cgaaguauuucguuuggaa

SEQ ID NO: 1347555 - RNA, 19 nt, Artificial Sequence
  Description of Artificial Sequence: Synthetic oligonucleotide
  Antisense strand to SEQ ID NO: 1347554
uuccaaacgaaauacuucg

SEQ ID NO: 1347556 - RNA, 19 nt, Artificial Sequence
  Description of Artificial Sequence: Synthetic oligonucleotide
  Sense strand starting at position 908 of SEQ ID NO: 1242438
aauguaaauucgguuacau

SEQ ID NO: 1347557 - RNA, 19 nt, Artificial Sequence
  Description of Artificial Sequence: Synthetic oligonucleotide
  Antisense strand to SEQ ID NO: 1347556
auguaaccgaauuuacauu

SEQ ID NO: 1347558 - RNA, 19 nt, Artificial Sequence
  Description of Artificial Sequence: Synthetic oligonucleotide
  Sense strand starting at position 910 of SEQ ID NO: 1242438
uguaaauucgguuacauca

SEQ ID NO: 1347559 - RNA, 19 nt, Artificial Sequence
  Description of Artificial Sequence: Synthetic oligonucleotide
  Antisense strand to SEQ ID NO: 1347558
ugauguaaccgaauuuaca

SEQ ID NO: 1347560 - RNA, 19 nt, Artificial Sequence
  Description of Artificial Sequence: Synthetic oligonucleotide
  Sense strand starting at position 995 of SEQ ID NO: 1242438
ugaagacacguccaauauu

SEQ ID NO: 1347561 - RNA, 19 nt, Artificial Sequence
  Description of Artificial Sequence: Synthetic oligonucleotide
  Antisense strand to SEQ ID NO: 1347560
aauauuggacgugucuuca

SEQ ID NO: 1347562 - RNA, 19 nt, Artificial Sequence
  Description of Artificial Sequence: Synthetic oligonucleotide
  Sense strand starting at position 1020 of SEQ ID NO: 1242438
gguaaacucuagcucaaca

SEQ ID NO: 1347563 - RNA, 19 nt, Artificial Sequence
  Description of Artificial Sequence: Synthetic oligonucleotide
  Antisense strand to SEQ ID NO: 1347562
uguugagcuagaguuuacc

SEQ ID NO: 1347564 - RNA, 19 nt, Artificial Sequence
  Description of Artificial Sequence: Synthetic oligonucleotide
  Sense strand starting at position 1283 of SEQ ID NO: 1242438
aagguauggugacugguau

SEQ ID NO: 1347565 - RNA, 19 nt, Artificial Sequence
  Description of Artificial Sequence: Synthetic oligonucleotide
  Antisense strand to SEQ ID NO: 1347564
auaccagucaccauaccuu

SEQ ID NO: 1347566 - RNA, 19 nt, Artificial Sequence
  Description of Artificial Sequence: Synthetic oligonucleotide
  Sense strand starting at position 1443 of SEQ ID NO: 1242438
cagcuaaaugugggaggau

SEQ ID NO: 1347567 - RNA, 19 nt, Artificial Sequence
  Description of Artificial Sequence: Synthetic oligonucleotide
  Antisense strand to SEQ ID NO: 1347566
auccucccacauuuagcug

SEQ ID NO: 1347568 - RNA, 19 nt, Artificial Sequence
  Description of Artificial Sequence: Synthetic oligonucleotide
  Sense strand starting at position 1602 of SEQ ID NO: 1242438
gggauuagcaaucgagauc

SEQ ID NO: 1347569 - RNA, 19 nt, Artificial Sequence
  Description of Artificial Sequence: Synthetic oligonucleotide
  Antisense strand to SEQ ID NO: 1347568
gaucucgauugcuaauccc

SEQ ID NO: 1347570 - RNA, 19 nt, Artificial Sequence
  Description of Artificial Sequence: Synthetic oligonucleotide
  Sense strand starting at position 1605 of SEQ ID NO: 1242438
auuagcaaucgagaucaau

SEQ ID NO: 1347571 - RNA, 19 nt, Artificial Sequence
  Description of Artificial Sequence: Synthetic oligonucleotide
  Antisense strand to SEQ ID NO: 1347570
auugaucucgauugcuaau

SEQ ID NO: 1347572 - RNA, 19 nt, Artificial Sequence
  Description of Artificial Sequence: Synthetic oligonucleotide
  Sense strand starting at position 1628 of SEQ ID NO: 1242438
cgcuuacucguugucagaa

SEQ ID NO: 1347573 - RNA, 19 nt, Artificial Sequence
  Description of Artificial Sequence: Synthetic oligonucleotide
  Antisense strand to SEQ ID NO: 1347572
uucugacaacgaguaagcg

SEQ ID NO: 1347574 - RNA, 19 nt, Artificial Sequence
  Description of Artificial Sequence: Synthetic oligonucleotide
  Sense strand starting at position 2282 of SEQ ID NO: 1242438
ggcggauuccuccagacac

SEQ ID NO: 1347575 - RNA, 19 nt, Artificial Sequence
  Description of Artificial Sequence: Synthetic oligonucleotide
  Antisense strand to SEQ ID NO: 1347574
gugucuggaggaauccgcc

SEQ ID NO: 1347576 - RNA, 19 nt, Artificial Sequence
  Description of Artificial Sequence: Synthetic oligonucleotide
  Sense strand starting at position 2837 of SEQ ID NO: 1242438
aucguugucgagccacuua

SEQ ID NO: 1347577 - RNA, 19 nt, Artificial Sequence
  Description of Artificial Sequence: Synthetic oligonucleotide
  Antisense strand to SEQ ID NO: 1347576
uaaguggcucgacaacgau

SEQ ID NO: 1347578 - RNA, 19 nt, Artificial Sequence
  Description of Artificial Sequence: Synthetic oligonucleotide
  Sense strand starting at position 2846 of SEQ ID NO: 1242438
gagccacuuagcggagaaa

SEQ ID NO: 1347579 - RNA, 19 nt, Artificial Sequence
  Description of Artificial Sequence: Synthetic oligonucleotide
  Antisense strand to SEQ ID NO: 1347578
uuucuccgcuaaguggcuc

SEQ ID NO: 1347580 - RNA, 19 nt, Artificial Sequence
  Description of Artificial Sequence: Synthetic oligonucleotide
  Sense strand starting at position 3080 of SEQ ID NO: 1242438
gggaaaucuggaggcuacu

SEQ ID NO: 1347581 - RNA, 19 nt, Artificial Sequence
  Description of Artificial Sequence: Synthetic oligonucleotide
  Antisense strand to SEQ ID NO: 1347580
aguagccuccagauuuccc

SEQ ID NO: 1347582 - RNA, 19 nt, Artificial Sequence
  Description of Artificial Sequence: Synthetic oligonucleotide
  Sense strand starting at position 3343 of SEQ ID NO: 1242438
agaauaugagaauguaugu

SEQ ID NO: 1347583 - RNA, 19 nt, Artificial Sequence
  Description of Artificial Sequence: Synthetic oligonucleotide
  Antisense strand to SEQ ID NO: 1347582
acauacauucucauauucu

SEQ ID NO: 1347584 - RNA, 19 nt, Artificial Sequence
  Description of Artificial Sequence: Synthetic oligonucleotide
  Sense strand starting at position 3430 of SEQ ID NO: 1242438
cucggaaagcuggagugau

SEQ ID NO: 1347585 - RNA, 19 nt, Artificial Sequence
  Description of Artificial Sequence: Synthetic oligonucleotide
  Antisense strand to SEQ ID NO: 1347584
aucacuccagcuuuccgag

SEQ ID NO: 1347586 - RNA, 19 nt, Artificial Sequence
  Description of Artificial Sequence: Synthetic oligonucleotide
  Sense strand starting at position 3434 of SEQ ID NO: 1242438
gaaagcuggagugauuguu

SEQ ID NO: 1347587 - RNA, 19 nt, Artificial Sequence
  Description of Artificial Sequence: Synthetic oligonucleotide
  Antisense strand to SEQ ID NO: 1347586
aacaaucacuccagcuuuc

SEQ ID NO: 1347588 - RNA, 19 nt, Artificial Sequence
  Description of Artificial Sequence: Synthetic oligonucleotide
  Sense strand starting at position 3444 of SEQ ID NO: 1242438
gugauuguuaauggagaac

SEQ ID NO: 1347589 - RNA, 19 nt, Artificial Sequence
  Description of Artificial Sequence: Synthetic oligonucleotide
  Antisense strand to SEQ ID NO: 1347588
guucuccauuaacaaucac

SEQ ID NO: 1347590 - RNA, 19 nt, Artificial Sequence
  Description of Artificial Sequence: Synthetic oligonucleotide
  Sense strand starting at position 3628 of SEQ ID NO: 1242438
acgaaugcauuguuagaag

SEQ ID NO: 1347591 - RNA, 19 nt, Artificial Sequence
  Description of Artificial Sequence: Synthetic oligonucleotide
  Antisense strand to SEQ ID NO: 1347590
cuucuaacaaugcauucgu

SEQ ID NO: 1347592 - RNA, 19 nt, Artificial Sequence
  Description of Artificial Sequence: Synthetic oligonucleotide
  Sense strand starting at position 3843 of SEQ ID NO: 1242438
cgcaucuucccagauauaa

SEQ ID NO: 1347593 - RNA, 19 nt, Artificial Sequence
  Description of Artificial Sequence: Synthetic oligonucleotide
  Antisense strand to SEQ ID NO: 1347592
uuauaucugggaagaugcg

SEQ ID NO: 1347594 - RNA, 19 nt, Artificial Sequence
  Description of Artificial Sequence: Synthetic oligonucleotide
  Sense strand starting at position 3892 of SEQ ID NO: 1242438
ccuucucagauuugugcga

SEQ ID NO: 1347595 - RNA, 19 nt, Artificial Sequence
  Description of Artificial Sequence: Synthetic oligonucleotide
  Antisense strand to SEQ ID NO: 1347594
ucgcacaaaucugagaagg

SEQ ID NO: 1347596 - RNA, 19 nt, Artificial Sequence
  Description of Artificial Sequence: Synthetic oligonucleotide
  Sense strand starting at position 3896 of SEQ ID NO: 1242438
cucagauuugugcgaccua

SEQ ID NO: 1347597 - RNA, 19 nt, Artificial Sequence
  Description of Artificial Sequence: Synthetic oligonucleotide
  Antisense strand to SEQ ID NO: 1347596
uaggucgcacaaaucugag

SEQ ID NO: 1347598 - RNA, 19 nt, Artificial Sequence
  Description of Artificial Sequence: Synthetic oligonucleotide
  Sense strand starting at position 3975 of SEQ ID NO: 1242438
uugggagaaccucguuaac

SEQ ID NO: 1347599 - RNA, 19 nt, Artificial Sequence
  Description of Artificial Sequence: Synthetic oligonucleotide
  Antisense strand to SEQ ID NO: 1347598
guuaacgagguucucccaa

SEQ ID NO: 1347600 - RNA, 19 nt, Artificial Sequence
  Description of Artificial Sequence: Synthetic oligonucleotide
  Sense strand starting at position 3977 of SEQ ID NO: 1242438
gggagaaccucguuaacaa

SEQ ID NO: 1347601 - RNA, 19 nt, Artificial Sequence
  Description of Artificial Sequence: Synthetic oligonucleotide
  Antisense strand to SEQ ID NO: 1347600
uuguuaacgagguucuccc

SEQ ID NO: 1347602 - RNA, 19 nt, Artificial Sequence
  Description of Artificial Sequence: Synthetic oligonucleotide
  Sense strand starting at position 67 of SEQ ID NO: 1242439
ggauguaagcuccacucca

SEQ ID NO: 1347603 - RNA, 19 nt, Artificial Sequence
  Description of Artificial Sequence: Synthetic oligonucleotide
  Antisense strand to SEQ ID NO: 1347602
uggaguggagcuuacaucc

SEQ ID NO: 1347604 - RNA, 19 nt, Artificial Sequence
  Description of Artificial Sequence: Synthetic oligonucleotide
  Sense strand starting at position 74 of SEQ ID NO: 1242439
agcuccacuccaggauaua

SEQ ID NO: 1347605 - RNA, 19 nt, Artificial Sequence
  Description of Artificial Sequence: Synthetic oligonucleotide
  Antisense strand to SEQ ID NO: 1347604
uauauccuggaguggagcu

SEQ ID NO: 1347606 - RNA, 19 nt, Artificial Sequence
  Description of Artificial Sequence: Synthetic oligonucleotide
  Sense strand starting at position 426 of SEQ ID NO: 1242439
ggcucuguuggcugguuaa

SEQ ID NO: 1347607 - RNA, 19 nt, Artificial Sequence
  Description of Artificial Sequence: Synthetic oligonucleotide
  Antisense strand to SEQ ID NO: 1347606
uuaaccagccaacagagcc

SEQ ID NO: 1347608 - RNA, 19 nt, Artificial Sequence
  Description of Artificial Sequence: Synthetic oligonucleotide
  Sense strand starting at position 437 of SEQ ID NO: 1242439
cugguuaaccaucgaucuu

SEQ ID NO: 1347609 - RNA, 19 nt, Artificial Sequence
  Description of Artificial Sequence: Synthetic oligonucleotide
  Antisense strand to SEQ ID NO: 1347608
aagaucgaugguuaaccag

SEQ ID NO: 1347610 - RNA, 19 nt, Artificial Sequence
  Description of Artificial Sequence: Synthetic oligonucleotide
  Sense strand starting at position 446 of SEQ ID NO: 1242439
caucgaucuugccugguaa

SEQ ID NO: 1347611 - RNA, 19 nt, Artificial Sequence
  Description of Artificial Sequence: Synthetic oligonucleotide
  Antisense strand to SEQ ID NO: 1347610
uuaccaggcaagaucgaug

SEQ ID NO: 1347612 - RNA, 19 nt, Artificial Sequence
  Description of Artificial Sequence: Synthetic oligonucleotide
  Sense strand starting at position 447 of SEQ ID NO: 1242439
aucgaucuugccugguaaa

SEQ ID NO: 1347613 - RNA, 19 nt, Artificial Sequence
  Description of Artificial Sequence: Synthetic oligonucleotide
  Antisense strand to SEQ ID NO: 1347612
uuuaccaggcaagaucgau

SEQ ID NO: 1347614 - RNA, 19 nt, Artificial Sequence
  Description of Artificial Sequence: Synthetic oligonucleotide
  Sense strand starting at position 448 of SEQ ID NO: 1242439
ucgaucuugccugguaaau

SEQ ID NO: 1347615 - RNA, 19 nt, Artificial Sequence
  Description of Artificial Sequence: Synthetic oligonucleotide
  Antisense strand to SEQ ID NO: 1347614
auuuaccaggcaagaucga

SEQ ID NO: 1347616 - RNA, 19 nt, Artificial Sequence
  Description of Artificial Sequence: Synthetic oligonucleotide
  Sense strand starting at position 450 of SEQ ID NO: 1242439
gaucuugccugguaaauaa

SEQ ID NO: 1347617 - RNA, 19 nt, Artificial Sequence
  Description of Artificial Sequence: Synthetic oligonucleotide
  Antisense strand to SEQ ID NO: 1347616
uuauuuaccaggcaagauc

SEQ ID NO: 1347618 - RNA, 19 nt, Artificial Sequence
  Description of Artificial Sequence: Synthetic oligonucleotide
  Sense strand starting at position 510 of SEQ ID NO: 1242439
agagaacgcuaagauucuu

SEQ ID NO: 1347619 - RNA, 19 nt, Artificial Sequence
  Description of Artificial Sequence: Synthetic oligonucleotide
  Antisense strand to SEQ ID NO: 1347618
aagaaucuuagcguucucu

SEQ ID NO: 1347620 - RNA, 19 nt, Artificial Sequence
  Description of Artificial Sequence: Synthetic oligonucleotide
  Sense strand starting at position 533 of SEQ ID NO: 1242439
ccuagaauccugugagucu

SEQ ID NO: 1347621 - RNA, 19 nt, Artificial Sequence
  Description of Artificial Sequence: Synthetic oligonucleotide
  Antisense strand to SEQ ID NO: 1347620
agacucacaggauucuagg

SEQ ID NO: 1347622 - RNA, 19 nt, Artificial Sequence
  Description of Artificial Sequence: Synthetic oligonucleotide
  Sense strand starting at position 540 of SEQ ID NO: 1242439
uccugugagucucucuuau

SEQ ID NO: 1347623 - RNA, 19 nt, Artificial Sequence
  Description of Artificial Sequence: Synthetic oligonucleotide
  Antisense strand to SEQ ID NO: 1347622
auaagagagacucacagga

SEQ ID NO: 1347624 - RNA, 19 nt, Artificial Sequence
  Description of Artificial Sequence: Synthetic oligonucleotide
  Sense strand starting at position 542 of SEQ ID NO: 1242439
cugugagucucucuuauga

SEQ ID NO: 1347625 - RNA, 19 nt, Artificial Sequence
  Description of Artificial Sequence: Synthetic oligonucleotide
  Antisense strand to SEQ ID NO: 1347624
ucauaagagagacucacag

SEQ ID NO: 1347626 - RNA, 19 nt, Artificial Sequence
  Description of Artificial Sequence: Synthetic oligonucleotide
  Sense strand starting at position 813 of SEQ ID NO: 1242439
ccaccuuggcccugaggaa

SEQ ID NO: 1347627 - RNA, 19 nt, Artificial Sequence
  Description of Artificial Sequence: Synthetic oligonucleotide
  Antisense strand to SEQ ID NO: 1347626
uuccucagggccaaggugg

SEQ ID NO: 1347628 - RNA, 19 nt, Artificial Sequence
  Description of Artificial Sequence: Synthetic oligonucleotide
  Sense strand starting at position 1219 of SEQ ID NO: 1242439
agacguuauugauccacuu

SEQ ID NO: 1347629 - RNA, 19 nt, Artificial Sequence
  Description of Artificial Sequence: Synthetic oligonucleotide
  Antisense strand to SEQ ID NO: 1347628
aaguggaucaauaacgucu

SEQ ID NO: 1347630 - RNA, 19 nt, Artificial Sequence
  Description of Artificial Sequence: Synthetic oligonucleotide
  Sense strand starting at position 1226 of SEQ ID NO: 1242439
auugauccacuuggugaaa

SEQ ID NO: 1347631 - RNA, 19 nt, Artificial Sequence
  Description of Artificial Sequence: Synthetic oligonucleotide
  Antisense strand to SEQ ID NO: 1347630
uuucaccaaguggaucaau

SEQ ID NO: 1347632 - RNA, 19 nt, Artificial Sequence
  Description of Artificial Sequence: Synthetic oligonucleotide
  Sense strand starting at position 1239 of SEQ ID NO: 1242439
gugaaagucuucuccugca

SEQ ID NO: 1347633 - RNA, 19 nt, Artificial Sequence
  Description of Artificial Sequence: Synthetic oligonucleotide
  Antisense strand to SEQ ID NO: 1347632
ugcaggagaagacuuucac

SEQ ID NO: 1347634 - RNA, 19 nt, Artificial Sequence
  Description of Artificial Sequence: Synthetic oligonucleotide
  Sense strand starting at position 1270 of SEQ ID NO: 1242439
gggccuguagcuugcgaau

SEQ ID NO: 1347635 - RNA, 19 nt, Artificial Sequence
  Description of Artificial Sequence: Synthetic oligonucleotide
  Antisense strand to SEQ ID NO: 1347634
auucgcaagcuacaggccc

SEQ ID NO: 1347636 - RNA, 19 nt, Artificial Sequence
  Description of Artificial Sequence: Synthetic oligonucleotide
  Sense strand starting at position 1285 of SEQ ID NO: 1242439
gaauguggcccgucucgua

SEQ ID NO: 1347637 - RNA, 19 nt, Artificial Sequence
  Description of Artificial Sequence: Synthetic oligonucleotide
  Antisense strand to SEQ ID NO: 1347636
uacgagacgggccacauuc

SEQ ID NO: 1347638 - RNA, 19 nt, Artificial Sequence
  Description of Artificial Sequence: Synthetic oligonucleotide
  Sense strand starting at position 1304 of SEQ ID NO: 1242439
cugagaguccauggugaga

SEQ ID NO: 1347639 - RNA, 19 nt, Artificial Sequence
  Description of Artificial Sequence: Synthetic oligonucleotide
  Antisense strand to SEQ ID NO: 1347638
ucucaccauggacucucag

SEQ ID NO: 1347640 - RNA, 19 nt, Artificial Sequence
  Description of Artificial Sequence: Synthetic oligonucleotide
  Sense strand starting at position 1543 of SEQ ID NO: 1242439
gccagacuguccucacauu

SEQ ID NO: 1347641 - RNA, 19 nt, Artificial Sequence
  Description of Artificial Sequence: Synthetic oligonucleotide
  Antisense strand to SEQ ID NO: 1347640
aaugugaggacagucuggc

SEQ ID NO: 1347642 - RNA, 19 nt, Artificial Sequence
  Description of Artificial Sequence: Synthetic oligonucleotide
  Sense strand starting at position 1732 of SEQ ID NO: 1242439
acaggaaacugcuuaccuu

SEQ ID NO: 1347643 - RNA, 19 nt, Artificial Sequence
  Description of Artificial Sequence: Synthetic oligonucleotide
  Antisense strand to SEQ ID NO: 1347642
aagguaagcaguuuccugu

SEQ ID NO: 1347644 - RNA, 19 nt, Artificial Sequence
  Description of Artificial Sequence: Synthetic oligonucleotide
  Sense strand starting at position 1824 of SEQ ID NO: 1242439
uggugaugccuggguucca

SEQ ID NO: 1347645 - RNA, 19 nt, Artificial Sequence
  Description of Artificial Sequence: Synthetic oligonucleotide
  Antisense strand to SEQ ID NO: 1347644
uggaacccaggcaucacca

SEQ ID NO: 1347646 - RNA, 19 nt, Artificial Sequence
  Description of Artificial Sequence: Synthetic oligonucleotide
  Sense strand starting at position 2058 of SEQ ID NO: 1242439
gggccauugccagaugaug

SEQ ID NO: 1347647 - RNA, 19 nt, Artificial Sequence
  Description of Artificial Sequence: Synthetic oligonucleotide
  Antisense strand to SEQ ID NO: 1347646
caucaucuggcaauggccc

SEQ ID NO: 1347648 - RNA, 19 nt, Artificial Sequence
  Description of Artificial Sequence: Synthetic oligonucleotide
  Sense strand starting at position 2060 of SEQ ID NO: 1242439
gccauugccagaugauguc

SEQ ID NO: 1347649 - RNA, 19 nt, Artificial Sequence
  Description of Artificial Sequence: Synthetic oligonucleotide
  Antisense strand to SEQ ID NO: 1347648
gacaucaucuggcaauggc

SEQ ID NO: 1347650 - RNA, 19 nt, Artificial Sequence
  Description of Artificial Sequence: Synthetic oligonucleotide
  Sense strand starting at position 2066 of SEQ ID NO: 1242439
gccagaugauguccuccuu

SEQ ID NO: 1347651 - RNA, 19 nt, Artificial Sequence
  Description of Artificial Sequence: Synthetic oligonucleotide
  Antisense strand to SEQ ID NO: 1347650
aaggaggacaucaucuggc

SEQ ID NO: 1347652 - RNA, 19 nt, Artificial Sequence
  Description of Artificial Sequence: Synthetic oligonucleotide
  Sense strand starting at position 2519 of SEQ ID NO: 1242439
guguuaacucugggcucca

SEQ ID NO: 1347653 - RNA, 19 nt, Artificial Sequence
  Description of Artificial Sequence: Synthetic oligonucleotide
  Antisense strand to SEQ ID NO: 1347652
uggagcccagaguuaacac

SEQ ID NO: 1347654 - RNA, 19 nt, Artificial Sequence
  Description of Artificial Sequence: Synthetic oligonucleotide
  Sense strand starting at position 2838 of SEQ ID NO: 1242439
agggaugagucacacuuga

SEQ ID NO: 1347655 - RNA, 19 nt, Artificial Sequence
  Description of Artificial Sequence: Synthetic oligonucleotide
  Antisense strand to SEQ ID NO: 1347654
ucaagugugacucaucccu

SEQ ID NO: 1347656 - RNA, 19 nt, Artificial Sequence
  Description of Artificial Sequence: Synthetic oligonucleotide
  Sense strand starting at position 2923 of SEQ ID NO: 1242439
cggcuuccugcgucugaga

SEQ ID NO: 1347657 - RNA, 19 nt, Artificial Sequence
  Description of Artificial Sequence: Synthetic oligonucleotide
  Antisense strand to SEQ ID NO: 1347656
ucucagacgcaggaagccg

SEQ ID NO: 1347658 - RNA, 19 nt, Artificial Sequence
  Description of Artificial Sequence: Synthetic oligonucleotide
  Sense strand starting at position 2925 of SEQ ID NO: 1242439
gcuuccugcgucugagaga

SEQ ID NO: 1347659 - RNA, 19 nt, Artificial Sequence
  Description of Artificial Sequence: Synthetic oligonucleotide
  Antisense strand to SEQ ID NO: 1347658
ucucucagacgcaggaagc

SEQ ID NO: 1347660 - RNA, 19 nt, Artificial Sequence
  Description of Artificial Sequence: Synthetic oligonucleotide
  Sense strand starting at position 3485 of SEQ ID NO: 1242439
gcuuguuccuucuccuagu

SEQ ID NO: 1347661 - RNA, 19 nt, Artificial Sequence
  Description of Artificial Sequence: Synthetic oligonucleotide
  Antisense strand to SEQ ID NO: 1347660
acuaggagaaggaacaagc

SEQ ID NO: 1347662 - RNA, 19 nt, Artificial Sequence
  Description of Artificial Sequence: Synthetic oligonucleotide
  Sense strand starting at position 3519 of SEQ ID NO: 1242439
uggaguccugugugauguu

SEQ ID NO: 1347663 - RNA, 19 nt, Artificial Sequence
  Description of Artificial Sequence: Synthetic oligonucleotide
  Antisense strand to SEQ ID NO: 1347662
aacaucacacaggacucca

SEQ ID NO: 1347664 - RNA, 19 nt, Artificial Sequence
  Description of Artificial Sequence: Synthetic oligonucleotide
  Sense strand starting at position 3573 of SEQ ID NO: 1242439
guggaguccugugugaugu

SEQ ID NO: 1347665 - RNA, 19 nt, Artificial Sequence
  Description of Artificial Sequence: Synthetic oligonucleotide
  Antisense strand to SEQ ID NO: 1347664
acaucacacaggacuccac

SEQ ID NO: 1347666 - RNA, 19 nt, Artificial Sequence
  Description of Artificial Sequence: Synthetic oligonucleotide
  Sense strand starting at position 3749 of SEQ ID NO: 1242439
ccuguuuggccacgacuga

SEQ ID NO: 1347667 - RNA, 19 nt, Artificial Sequence
  Description of Artificial Sequence: Synthetic oligonucleotide
  Antisense strand to SEQ ID NO: 1347666
ucagucguggccaaacagg

SEQ ID NO: 1347668 - RNA, 19 nt, Artificial Sequence
  Description of Artificial Sequence: Synthetic oligonucleotide
  Sense strand starting at position 3783 of SEQ ID NO: 1242439
aaaugagaacccugugggu

SEQ ID NO: 1347669 - RNA, 19 nt, Artificial Sequence
  Description of Artificial Sequence: Synthetic oligonucleotide
  Antisense strand to SEQ ID NO: 1347668
acccacaggguucucauuu

SEQ ID NO: 1347670 - RNA, 19 nt, Artificial Sequence
  Description of Artificial Sequence: Synthetic oligonucleotide
  Sense strand starting at position 3802 of SEQ ID NO: 1242439
cggaacaaaguuuggauua

SEQ ID NO: 1347671 - RNA, 19 nt, Artificial Sequence
  Description of Artificial Sequence: Synthetic oligonucleotide
  Antisense strand to SEQ ID NO: 1347670
uaauccaaacuuuguuccg

SEQ ID NO: 1347672 - RNA, 19 nt, Artificial Sequence
  Description of Artificial Sequence: Synthetic oligonucleotide
  Sense strand starting at position 3803 of SEQ ID NO: 1242439
ggaacaaaguuuggauuau

SEQ ID NO: 1347673 - RNA, 19 nt, Artificial Sequence
  Description of Artificial Sequence: Synthetic oligonucleotide
  Antisense strand to SEQ ID NO: 1347672
auaauccaaacuuuguucc

SEQ ID NO: 1347674 - RNA, 19 nt, Artificial Sequence
  Description of Artificial Sequence: Synthetic oligonucleotide
  Sense strand starting at position 3804 of SEQ ID NO: 1242439
gaacaaaguuuggauuauu

SEQ ID NO: 1347675 - RNA, 19 nt, Artificial Sequence
  Description of Artificial Sequence: Synthetic oligonucleotide
  Antisense strand to SEQ ID NO: 1347674
aauaauccaaacuuuguuc

SEQ ID NO: 1347676 - RNA, 19 nt, Artificial Sequence
  Description of Artificial Sequence: Synthetic oligonucleotide
  Sense strand starting at position 3813 of SEQ ID NO: 1242439
uuggauuauuuauguugca

SEQ ID NO: 1347677 - RNA, 19 nt, Artificial Sequence
  Description of Artificial Sequence: Synthetic oligonucleotide
  Antisense strand to SEQ ID NO: 1347676
ugcaacauaaauaauccaa

SEQ ID NO: 1347678 - RNA, 19 nt, Artificial Sequence
  Description of Artificial Sequence: Synthetic oligonucleotide
  Sense strand starting at position 3816 of SEQ ID NO: 1242439
gauuauuuauguugcaagu

SEQ ID NO: 1347679 - RNA, 19 nt, Artificial Sequence
  Description of Artificial Sequence: Synthetic oligonucleotide
  Antisense strand to SEQ ID NO: 1347678
acuugcaacauaaauaauc

SEQ ID NO: 1347680 - RNA, 19 nt, Artificial Sequence
  Description of Artificial Sequence: Synthetic oligonucleotide
  Sense strand starting at position 3847 of SEQ ID NO: 1242439
aagugaaacugguuuaaac

SEQ ID NO: 1347681 - RNA, 19 nt, Artificial Sequence
  Description of Artificial Sequence: Synthetic oligonucleotide
  Antisense strand to SEQ ID NO: 1347680
guuuaaaccaguuucacuu

SEQ ID NO: 1347682 - RNA, 19 nt, Artificial Sequence
  Description of Artificial Sequence: Synthetic oligonucleotide
  Sense strand starting at position 90 of SEQ ID NO: 1242440
ccuugaccucuggagcuua

SEQ ID NO: 1347683 - RNA, 19 nt, Artificial Sequence
  Description of Artificial Sequence: Synthetic oligonucleotide
  Antisense strand to SEQ ID NO: 1347682
uaagcuccagaggucaagg

SEQ ID NO: 1347684 - RNA, 19 nt, Artificial Sequence
  Description of Artificial Sequence: Synthetic oligonucleotide
  Sense strand starting at position 505 of SEQ ID NO: 1242440
ccaagaagcccugguuuaa

SEQ ID NO: 1347685 - RNA, 19 nt, Artificial Sequence
  Description of Artificial Sequence: Synthetic oligonucleotide
  Antisense strand to SEQ ID NO: 1347684
uuaaaccagggcuucuugg

SEQ ID NO: 1347686 - RNA, 19 nt, Artificial Sequence
  Description of Artificial Sequence: Synthetic oligonucleotide
  Sense strand starting at position 516 of SEQ ID NO: 1242440
ugguuuaaaugggaaggau

SEQ ID NO: 1347687 - RNA, 19 nt, Artificial Sequence
  Description of Artificial Sequence: Synthetic oligonucleotide
  Antisense strand to SEQ ID NO: 1347686
auccuucccauuuaaacca

SEQ ID NO: 1347688 - RNA, 19 nt, Artificial Sequence
  Description of Artificial Sequence: Synthetic oligonucleotide
  Sense strand starting at position 571 of SEQ ID NO: 1242440
cugggugguuugagauuga

SEQ ID NO: 1347689 - RNA, 19 nt, Artificial Sequence
  Description of Artificial Sequence: Synthetic oligonucleotide
  Antisense strand to SEQ ID NO: 1347688
ucaaucucaaaccacccag

SEQ ID NO: 1347690 - RNA, 19 nt, Artificial Sequence
  Description of Artificial Sequence: Synthetic oligonucleotide
  Sense strand starting at position 581 of SEQ ID NO: 1242440
ugagauugauggcugugga

SEQ ID NO: 1347691 - RNA, 19 nt, Artificial Sequence
  Description of Artificial Sequence: Synthetic oligonucleotide
  Antisense strand to SEQ ID NO: 1347690
uccacagccaucaaucuca

SEQ ID NO: 1347692 - RNA, 19 nt, Artificial Sequence
  Description of Artificial Sequence: Synthetic oligonucleotide
  Sense strand starting at position 582 of SEQ ID NO: 1242440
gagauugauggcuguggaa

SEQ ID NO: 1347693 - RNA, 19 nt, Artificial Sequence
  Description of Artificial Sequence: Synthetic oligonucleotide
  Antisense strand to SEQ ID NO: 1347692
uuccacagccaucaaucuc

SEQ ID NO: 1347694 - RNA, 19 nt, Artificial Sequence
  Description of Artificial Sequence: Synthetic oligonucleotide
  Sense strand starting at position 997 of SEQ ID NO: 1242440
gagauccuccaguguaugu

SEQ ID NO: 1347695 - RNA, 19 nt, Artificial Sequence
  Description of Artificial Sequence: Synthetic oligonucleotide
  Antisense strand to SEQ ID NO: 1347694
acauacacuggaggaucuc

SEQ ID NO: 1347696 - RNA, 19 nt, Artificial Sequence
  Description of Artificial Sequence: Synthetic oligonucleotide
  Sense strand starting at position 1006 of SEQ ID NO: 1242440
caguguauguauucuacua

SEQ ID NO: 1347697 - RNA, 19 nt, Artificial Sequence
  Description of Artificial Sequence: Synthetic oligonucleotide
  Antisense strand to SEQ ID NO: 1347696
uaguagaauacauacacug

SEQ ID NO: 1347698 - RNA, 19 nt, Artificial Sequence
  Description of Artificial Sequence: Synthetic oligonucleotide
  Sense strand starting at position 1081 of SEQ ID NO: 1242440
aguuguaacuugcccauca

SEQ ID NO: 1347699 - RNA, 19 nt, Artificial Sequence
  Description of Artificial Sequence: Synthetic oligonucleotide
  Antisense strand to SEQ ID NO: 1347698
ugaugggcaaguuacaacu

SEQ ID NO: 1347700 - RNA, 19 nt, Artificial Sequence
  Description of Artificial Sequence: Synthetic oligonucleotide
  Sense strand starting at position 1083 of SEQ ID NO: 1242440
uuguaacuugcccaucaga

SEQ ID NO: 1347701 - RNA, 19 nt, Artificial Sequence
  Description of Artificial Sequence: Synthetic oligonucleotide
  Antisense strand to SEQ ID NO: 1347700
ucugaugggcaaguuacaa

SEQ ID NO: 1347702 - RNA, 19 nt, Artificial Sequence
  Description of Artificial Sequence: Synthetic oligonucleotide
  Sense strand starting at position 1110 of SEQ ID NO: 1242440
gggacugagaguugacuca

SEQ ID NO: 1347703 - RNA, 19 nt, Artificial Sequence
  Description of Artificial Sequence: Synthetic oligonucleotide
  Antisense strand to SEQ ID NO: 1347702
ugagucaacucucaguccc

SEQ ID NO: 1347704 - RNA, 19 nt, Artificial Sequence
  Description of Artificial Sequence: Synthetic oligonucleotide
  Sense strand starting at position 1117 of SEQ ID NO: 1242440
agaguugacucacuuacuc

SEQ ID NO: 1347705 - RNA, 19 nt, Artificial Sequence
  Description of Artificial Sequence: Synthetic oligonucleotide
  Antisense strand to SEQ ID NO: 1347704
gaguaagugagucaacucu

SEQ ID NO: 1347706 - RNA, 19 nt, Artificial Sequence
  Description of Artificial Sequence: Synthetic oligonucleotide
  Sense strand starting at position 1212 of SEQ ID NO: 1242440
cuaggcauacacuguugaa

SEQ ID NO: 1347707 - RNA, 19 nt, Artificial Sequence
  Description of Artificial Sequence: Synthetic oligonucleotide
  Antisense strand to SEQ ID NO: 1347706
uucaacaguguaugccuag

SEQ ID NO: 1347708 - RNA, 19 nt, Artificial Sequence
  Description of Artificial Sequence: Synthetic oligonucleotide
  Sense strand starting at position 1244 of SEQ ID NO: 1242440
gauuccuacccaugugaag

SEQ ID NO: 1347709 - RNA, 19 nt, Artificial Sequence
  Description of Artificial Sequence: Synthetic oligonucleotide
  Antisense strand to SEQ ID NO: 1347708
cuucacauggguaggaauc

SEQ ID NO: 1347710 - RNA, 19 nt, Artificial Sequence
  Description of Artificial Sequence: Synthetic oligonucleotide
  Sense strand starting at position 1258 of SEQ ID NO: 1242440
ugaaguuugcgaggaauga

SEQ ID NO: 1347711 - RNA, 19 nt, Artificial Sequence
  Description of Artificial Sequence: Synthetic oligonucleotide
  Antisense strand to SEQ ID NO: 1347710
ucauuccucgcaaacuuca

SEQ ID NO: 1347712 - RNA, 19 nt, Artificial Sequence
  Description of Artificial Sequence: Synthetic oligonucleotide
  Sense strand starting at position 1259 of SEQ ID NO: 1242440
gaaguuugcgaggaaugaa

SEQ ID NO: 1347713 - RNA, 19 nt, Artificial Sequence
  Description of Artificial Sequence: Synthetic oligonucleotide
  Antisense strand to SEQ ID NO: 1347712
uucauuccucgcaaacuuc

SEQ ID NO: 1347714 - RNA, 19 nt, Artificial Sequence
  Description of Artificial Sequence: Synthetic oligonucleotide
  Sense strand starting at position 1262 of SEQ ID NO: 1242440
guuugcgaggaaugaaagu

SEQ ID NO: 1347715 - RNA, 19 nt, Artificial Sequence
  Description of Artificial Sequence: Synthetic oligonucleotide
  Antisense strand to SEQ ID NO: 1347714
acuuucauuccucgcaaac

SEQ ID NO: 1347716 - RNA, 19 nt, Artificial Sequence
  Description of Artificial Sequence: Synthetic oligonucleotide
  Sense strand starting at position 1495 of SEQ ID NO: 1242440
agggauccuuaucacaaga

SEQ ID NO: 1347717 - RNA, 19 nt, Artificial Sequence
  Description of Artificial Sequence: Synthetic oligonucleotide
  Antisense strand to SEQ ID NO: 1347716
ucuugugauaaggaucccu

SEQ ID NO: 1347718 - RNA, 19 nt, Artificial Sequence
  Description of Artificial Sequence: Synthetic oligonucleotide
  Sense strand starting at position 1497 of SEQ ID NO: 1242440
ggauccuuaucacaagaaa

SEQ ID NO: 1347719 - RNA, 19 nt, Artificial Sequence
  Description of Artificial Sequence: Synthetic oligonucleotide
  Antisense strand to SEQ ID NO: 1347718
uuucuugugauaaggaucc

SEQ ID NO: 1347720 - RNA, 19 nt, Artificial Sequence
  Description of Artificial Sequence: Synthetic oligonucleotide
  Sense strand starting at position 1527 of SEQ ID NO: 1242440
ggaggaagaucagagcaaa

SEQ ID NO: 1347721 - RNA, 19 nt, Artificial Sequence
  Description of Artificial Sequence: Synthetic oligonucleotide
  Antisense strand to SEQ ID NO: 1347720
uuugcucugaucuuccucc

SEQ ID NO: 1347722 - RNA, 19 nt, Artificial Sequence
  Description of Artificial Sequence: Synthetic oligonucleotide
  Sense strand starting at position 1612 of SEQ ID NO: 1242440
ugcaaaugcuuccuggaug

SEQ ID NO: 1347723 - RNA, 19 nt, Artificial Sequence
  Description of Artificial Sequence: Synthetic oligonucleotide
  Antisense strand to SEQ ID NO: 1347722
cauccaggaagcauuugca

SEQ ID NO: 1347724 - RNA, 19 nt, Artificial Sequence
  Description of Artificial Sequence: Synthetic oligonucleotide
  Sense strand starting at position 1615 of SEQ ID NO: 1242440
aaaugcuuccuggaugagu

SEQ ID NO: 1347725 - RNA, 19 nt, Artificial Sequence
  Description of Artificial Sequence: Synthetic oligonucleotide
  Antisense strand to SEQ ID NO: 1347724
acucauccaggaagcauuu

SEQ ID NO: 1347726 - RNA, 19 nt, Artificial Sequence
  Description of Artificial Sequence: Synthetic oligonucleotide
  Sense strand starting at position 1710 of SEQ ID NO: 1242440
acagcuaagcaaugagacu

SEQ ID NO: 1347727 - RNA, 19 nt, Artificial Sequence
  Description of Artificial Sequence: Synthetic oligonucleotide
  Antisense strand to SEQ ID NO: 1347726
agucucauugcuuagcugu

SEQ ID NO: 1347728 - RNA, 19 nt, Artificial Sequence
  Description of Artificial Sequence: Synthetic oligonucleotide
  Sense strand starting at position 1717 of SEQ ID NO: 1242440
agcaaugagacuuguggga

SEQ ID NO: 1347729 - RNA, 19 nt, Artificial Sequence
  Description of Artificial Sequence: Synthetic oligonucleotide
  Antisense strand to SEQ ID NO: 1347728
ucccacaagucucauugcu

SEQ ID NO: 1347730 - RNA, 19 nt, Artificial Sequence
  Description of Artificial Sequence: Synthetic oligonucleotide
  Sense strand starting at position 1741 of SEQ ID NO: 1242440
gggaaugaguucuugcuau

SEQ ID NO: 1347731 - RNA, 19 nt, Artificial Sequence
  Description of Artificial Sequence: Synthetic oligonucleotide
  Antisense strand to SEQ ID NO: 1347730
auagcaagaacucauuccc

SEQ ID NO: 1347732 - RNA, 19 nt, Artificial Sequence
  Description of Artificial Sequence: Synthetic oligonucleotide
  Sense strand starting at position 1747 of SEQ ID NO: 1242440
gaguucuugcuaugcauca

SEQ ID NO: 1347733 - RNA, 19 nt, Artificial Sequence
  Description of Artificial Sequence: Synthetic oligonucleotide
  Antisense strand to SEQ ID NO: 1347732
ugaugcauagcaagaacuc

SEQ ID NO: 1347734 - RNA, 19 nt, Artificial Sequence
  Description of Artificial Sequence: Synthetic oligonucleotide
  Sense strand starting at position 1828 of SEQ ID NO: 1242440
ggcagaugaacagguugua

SEQ ID NO: 1347735 - RNA, 19 nt, Artificial Sequence
  Description of Artificial Sequence: Synthetic oligonucleotide
  Antisense strand to SEQ ID NO: 1347734
uacaaccuguucaucugcc

SEQ ID NO: 1347736 - RNA, 19 nt, Artificial Sequence
  Description of Artificial Sequence: Synthetic oligonucleotide
  Sense strand starting at position 1831 of SEQ ID NO: 1242440
agaugaacagguuguauua

SEQ ID NO: 1347737 - RNA, 19 nt, Artificial Sequence
  Description of Artificial Sequence: Synthetic oligonucleotide
  Antisense strand to SEQ ID NO: 1347736
uaauacaaccuguucaucu

SEQ ID NO: 1347738 - RNA, 19 nt, Artificial Sequence
  Description of Artificial Sequence: Synthetic oligonucleotide
  Sense strand starting at position 2043 of SEQ ID NO: 1242440
ucgugagacuaacucacua

SEQ ID NO: 1347739 - RNA, 19 nt, Artificial Sequence
  Description of Artificial Sequence: Synthetic oligonucleotide
  Antisense strand to SEQ ID NO: 1347738
uagugaguuagucucacga

SEQ ID NO: 1347740 - RNA, 19 nt, Artificial Sequence
  Description of Artificial Sequence: Synthetic oligonucleotide
  Sense strand starting at position 2188 of SEQ ID NO: 1242440
accauauuacagggcaaua

SEQ ID NO: 1347741 - RNA, 19 nt, Artificial Sequence
  Description of Artificial Sequence: Synthetic oligonucleotide
  Antisense strand to SEQ ID NO: 1347740
uauugcccuguaauauggu

SEQ ID NO: 1347742 - RNA, 19 nt, Artificial Sequence
  Description of Artificial Sequence: Synthetic oligonucleotide
  Sense strand starting at position 2327 of SEQ ID NO: 1242440
ggaguaaccucaucugugu

SEQ ID NO: 1347743 - RNA, 19 nt, Artificial Sequence
  Description of Artificial Sequence: Synthetic oligonucleotide
  Antisense strand to SEQ ID NO: 1347742
acacagaugagguuacucc

SEQ ID NO: 1347744 - RNA, 19 nt, Artificial Sequence
  Description of Artificial Sequence: Synthetic oligonucleotide
  Sense strand starting at position 2330 of SEQ ID NO: 1242440
guaaccucaucugugucau

SEQ ID NO: 1347745 - RNA, 19 nt, Artificial Sequence
  Description of Artificial Sequence: Synthetic oligonucleotide
  Antisense strand to SEQ ID NO: 1347744
augacacagaugagguuac

SEQ ID NO: 1347746 - RNA, 19 nt, Artificial Sequence
  Description of Artificial Sequence: Synthetic oligonucleotide
  Sense strand starting at position 2415 of SEQ ID NO: 1242440
agcauuaucgguugcaaga

SEQ ID NO: 1347747 - RNA, 19 nt, Artificial Sequence
  Description of Artificial Sequence: Synthetic oligonucleotide
  Antisense strand to SEQ ID NO: 1347746
ucuugcaaccgauaaugcu

SEQ ID NO: 1347748 - RNA, 19 nt, Artificial Sequence
  Description of Artificial Sequence: Synthetic oligonucleotide
  Sense strand starting at position 2992 of SEQ ID NO: 1242440
aaauucucagugggaguuu

SEQ ID NO: 1347749 - RNA, 19 nt, Artificial Sequence
  Description of Artificial Sequence: Synthetic oligonucleotide
  Antisense strand to SEQ ID NO: 1347748
aaacucccacugagaauuu

SEQ ID NO: 1347750 - RNA, 19 nt, Artificial Sequence
  Description of Artificial Sequence: Synthetic oligonucleotide
  Sense strand starting at position 3016 of SEQ ID NO: 1242440
ugaccaacuguaugucaaa

SEQ ID NO: 1347751 - RNA, 19 nt, Artificial Sequence
  Description of Artificial Sequence: Synthetic oligonucleotide
  Antisense strand to SEQ ID NO: 1347750
uuugacauacaguugguca

SEQ ID NO: 1347752 - RNA, 19 nt, Artificial Sequence
  Description of Artificial Sequence: Synthetic oligonucleotide
  Sense strand starting at position 3094 of SEQ ID NO: 1242440
aacuauuaugauggguauu

SEQ ID NO: 1347753 - RNA, 19 nt, Artificial Sequence
  Description of Artificial Sequence: Synthetic oligonucleotide
  Antisense strand to SEQ ID NO: 1347752
aauacccaucauaauaguu

SEQ ID NO: 1347754 - RNA, 19 nt, Artificial Sequence
  Description of Artificial Sequence: Synthetic oligonucleotide
  Sense strand starting at position 3672 of SEQ ID NO: 1242440
ccagaaaggucuccuagga

SEQ ID NO: 1347755 - RNA, 19 nt, Artificial Sequence
  Description of Artificial Sequence: Synthetic oligonucleotide
  Antisense strand to SEQ ID NO: 1347754
uccuaggagaccuuucugg

SEQ ID NO: 1347756 - RNA, 19 nt, Artificial Sequence
  Description of Artificial Sequence: Synthetic oligonucleotide
  Sense strand starting at position 3676 of SEQ ID NO: 1242440
aaaggucuccuaggacaua

SEQ ID NO: 1347757 - RNA, 19 nt, Artificial Sequence
  Description of Artificial Sequence: Synthetic oligonucleotide
  Antisense strand to SEQ ID NO: 1347756
uauguccuaggagaccuuu

SEQ ID NO: 1347758 - RNA, 19 nt, Artificial Sequence
  Description of Artificial Sequence: Synthetic oligonucleotide
  Sense strand starting at position 3677 of SEQ ID NO: 1242440
aaggucuccuaggacauaa

SEQ ID NO: 1347759 - RNA, 19 nt, Artificial Sequence
  Description of Artificial Sequence: Synthetic oligonucleotide
  Antisense strand to SEQ ID NO: 1347758
uuauguccuaggagaccuu

SEQ ID NO: 1347760 - RNA, 19 nt, Artificial Sequence
  Description of Artificial Sequence: Synthetic oligonucleotide
  Sense strand starting at position 3727 of SEQ ID NO: 1242440
ucagaaaucuggucucaaa

SEQ ID NO: 1347761 - RNA, 19 nt, Artificial Sequence
  Description of Artificial Sequence: Synthetic oligonucleotide
  Antisense strand to SEQ ID NO: 1347760
uuugagaccagauuucuga

SEQ ID NO: 1347762 - RNA, 19 nt, Artificial Sequence
  Description of Artificial Sequence: Synthetic oligonucleotide
  Sense strand starting at position 395 of SEQ ID NO: 1242441
uguuuauguucuuuacuac

SEQ ID NO: 1347763 - RNA, 19 nt, Artificial Sequence
  Description of Artificial Sequence: Synthetic oligonucleotide
  Antisense strand to SEQ ID NO: 1347762
guaguaaagaacauaaaca

SEQ ID NO: 1347764 - RNA, 19 nt, Artificial Sequence
  Description of Artificial Sequence: Synthetic oligonucleotide
  Sense strand starting at position 396 of SEQ ID NO: 1242441
guuuauguucuuuacuacu

SEQ ID NO: 1347765 - RNA, 19 nt, Artificial Sequence
  Description of Artificial Sequence: Synthetic oligonucleotide
  Antisense strand to SEQ ID NO: 1347764
aguaguaaagaacauaaac

SEQ ID NO: 1347766 - RNA, 19 nt, Artificial Sequence
  Description of Artificial Sequence: Synthetic oligonucleotide
  Sense strand starting at position 441 of SEQ ID NO: 1242441
acugcuagaucuuguuauu

SEQ ID NO: 1347767 - RNA, 19 nt, Artificial Sequence
  Description of Artificial Sequence: Synthetic oligonucleotide
  Antisense strand to SEQ ID NO: 1347766
aauaacaagaucuagcagu

SEQ ID NO: 1347768 - RNA, 19 nt, Artificial Sequence
  Description of Artificial Sequence: Synthetic oligonucleotide
  Sense strand starting at position 550 of SEQ ID NO: 1242441
ugcaauugguuuccuuuau

SEQ ID NO: 1347769 - RNA, 19 nt, Artificial Sequence
  Description of Artificial Sequence: Synthetic oligonucleotide
  Antisense strand to SEQ ID NO: 1347768
auaaaggaaaccaauugca

SEQ ID NO: 1347770 - RNA, 19 nt, Artificial Sequence
  Description of Artificial Sequence: Synthetic oligonucleotide
  Sense strand starting at position 551 of SEQ ID NO: 1242441
gcaauugguuuccuuuaua

SEQ ID NO: 1347771 - RNA, 19 nt, Artificial Sequence
  Description of Artificial Sequence: Synthetic oligonucleotide
  Antisense strand to SEQ ID NO: 1347770
uauaaaggaaaccaauugc

SEQ ID NO: 1347772 - RNA, 19 nt, Artificial Sequence
  Description of Artificial Sequence: Synthetic oligonucleotide
  Sense strand starting at position 658 of SEQ ID NO: 1242441
gccgaagugugcggaucau

SEQ ID NO: 1347773 - RNA, 19 nt, Artificial Sequence
  Description of Artificial Sequence: Synthetic oligonucleotide
  Antisense strand to SEQ ID NO: 1347772
augauccgcacacuucggc

SEQ ID NO: 1347774 - RNA, 19 nt, Artificial Sequence
  Description of Artificial Sequence: Synthetic oligonucleotide
  Sense strand starting at position 750 of SEQ ID NO: 1242441
aggugugcugcgccuguaa

SEQ ID NO: 1347775 - RNA, 19 nt, Artificial Sequence
  Description of Artificial Sequence: Synthetic oligonucleotide
  Antisense strand to SEQ ID NO: 1347774
uuacaggcgcagcacaccu

SEQ ID NO: 1347776 - RNA, 19 nt, Artificial Sequence
  Description of Artificial Sequence: Synthetic oligonucleotide
  Sense strand starting at position 752 of SEQ ID NO: 1242441
gugugcugcgccuguaauc

SEQ ID NO: 1347777 - RNA, 19 nt, Artificial Sequence
  Description of Artificial Sequence: Synthetic oligonucleotide
  Antisense strand to SEQ ID NO: 1347776
gauuacaggcgcagcacac

SEQ ID NO: 1347778 - RNA, 19 nt, Artificial Sequence
  Description of Artificial Sequence: Synthetic oligonucleotide
  Sense strand starting at position 893 of SEQ ID NO: 1242441
aaaguauuguucugagagu

SEQ ID NO: 1347779 - RNA, 19 nt, Artificial Sequence
  Description of Artificial Sequence: Synthetic oligonucleotide
  Antisense strand to SEQ ID NO: 1347778
acucucagaacaauacuuu

SEQ ID NO: 1347780 - RNA, 19 nt, Artificial Sequence
  Description of Artificial Sequence: Synthetic oligonucleotide
  Sense strand starting at position 894 of SEQ ID NO: 1242441
aaguauuguucugagaguc

SEQ ID NO: 1347781 - RNA, 19 nt, Artificial Sequence
  Description of Artificial Sequence: Synthetic oligonucleotide
  Antisense strand to SEQ ID NO: 1347780
gacucucagaacaauacuu

SEQ ID NO: 1347782 - RNA, 19 nt, Artificial Sequence
  Description of Artificial Sequence: Synthetic oligonucleotide
  Sense strand starting at position 902 of SEQ ID NO: 1242441
uucugagagucuuuagccu

SEQ ID NO: 1347783 - RNA, 19 nt, Artificial Sequence
  Description of Artificial Sequence: Synthetic oligonucleotide
  Antisense strand to SEQ ID NO: 1347782
aggcuaaagacucucagaa

SEQ ID NO: 1347784 - RNA, 19 nt, Artificial Sequence
  Description of Artificial Sequence: Synthetic oligonucleotide
  Sense strand starting at position 957 of SEQ ID NO: 1242441
ggaacagagcccugcauua

SEQ ID NO: 1347785 - RNA, 19 nt, Artificial Sequence
  Description of Artificial Sequence: Synthetic oligonucleotide
  Antisense strand to SEQ ID NO: 1347784
uaaugcagggcucuguucc

SEQ ID NO: 1347786 - RNA, 19 nt, Artificial Sequence
  Description of Artificial Sequence: Synthetic oligonucleotide
  Sense strand starting at position 1210 of SEQ ID NO: 1242441
gcgcagugucgguggauga

SEQ ID NO: 1347787 - RNA, 19 nt, Artificial Sequence
  Description of Artificial Sequence: Synthetic oligonucleotide
  Antisense strand to SEQ ID NO: 1347786
ucauccaccgacacugcgc

SEQ ID NO: 1347788 - RNA, 19 nt, Artificial Sequence
  Description of Artificial Sequence: Synthetic oligonucleotide
  Sense strand starting at position 1220 of SEQ ID NO: 1242441
gguggaugacugugucaau

SEQ ID NO: 1347789 - RNA, 19 nt, Artificial Sequence
  Description of Artificial Sequence: Synthetic oligonucleotide
  Antisense strand to SEQ ID NO: 1347788
auugacacagucauccacc

SEQ ID NO: 1347790 - RNA, 19 nt, Artificial Sequence
  Description of Artificial Sequence: Synthetic oligonucleotide
  Sense strand starting at position 1221 of SEQ ID NO: 1242441
guggaugacugugucaauc

SEQ ID NO: 1347791 - RNA, 19 nt, Artificial Sequence
  Description of Artificial Sequence: Synthetic oligonucleotide
  Antisense strand to SEQ ID NO: 1347790
gauugacacagucauccac

SEQ ID NO: 1347792 - RNA, 19 nt, Artificial Sequence
  Description of Artificial Sequence: Synthetic oligonucleotide
  Sense strand starting at position 1397 of SEQ ID NO: 1242441
cugacacucugagaaggaa

SEQ ID NO: 1347793 - RNA, 19 nt, Artificial Sequence
  Description of Artificial Sequence: Synthetic oligonucleotide
  Antisense strand to SEQ ID NO: 1347792
uuccuucucagagugucag

SEQ ID NO: 1347794 - RNA, 19 nt, Artificial Sequence
  Description of Artificial Sequence: Synthetic oligonucleotide
  Sense strand starting at position 1460 of SEQ ID NO: 1242441
ugcagguguccggaguuga

SEQ ID NO: 1347795 - RNA, 19 nt, Artificial Sequence
  Description of Artificial Sequence: Synthetic oligonucleotide
  Antisense strand to SEQ ID NO: 1347794
ucaacuccggacaccugca

SEQ ID NO: 1347796 - RNA, 19 nt, Artificial Sequence
  Description of Artificial Sequence: Synthetic oligonucleotide
  Sense strand starting at position 1461 of SEQ ID NO: 1242441
gcagguguccggaguugag

SEQ ID NO: 1347797 - RNA, 19 nt, Artificial Sequence
  Description of Artificial Sequence: Synthetic oligonucleotide
  Antisense strand to SEQ ID NO: 1347796
cucaacuccggacaccugc

SEQ ID NO: 1347798 - RNA, 19 nt, Artificial Sequence
  Description of Artificial Sequence: Synthetic oligonucleotide
  Sense strand starting at position 1528 of SEQ ID NO: 1242441
cggaaaccgaguuaagcua

SEQ ID NO: 1347799 - RNA, 19 nt, Artificial Sequence
  Description of Artificial Sequence: Synthetic oligonucleotide
  Antisense strand to SEQ ID NO: 1347798
uagcuuaacucgguuuccg

SEQ ID NO: 1347800 - RNA, 19 nt, Artificial Sequence
  Description of Artificial Sequence: Synthetic oligonucleotide
  Sense strand starting at position 2147 of SEQ ID NO: 1242441
acagguauucccgcgcuca

SEQ ID NO: 1347801 - RNA, 19 nt, Artificial Sequence
  Description of Artificial Sequence: Synthetic oligonucleotide
  Antisense strand to SEQ ID NO: 1347800
ugagcgcgggaauaccugu

SEQ ID NO: 1347802 - RNA, 19 nt, Artificial Sequence
  Description of Artificial Sequence: Synthetic oligonucleotide
  Sense strand starting at position 2148 of SEQ ID NO: 1242441
cagguauucccgcgcucau

SEQ ID NO: 1347803 - RNA, 19 nt, Artificial Sequence
  Description of Artificial Sequence: Synthetic oligonucleotide
  Antisense strand to SEQ ID NO: 1347802
augagcgcgggaauaccug

SEQ ID NO: 1347804 - RNA, 19 nt, Artificial Sequence
  Description of Artificial Sequence: Synthetic oligonucleotide
  Sense strand starting at position 2149 of SEQ ID NO: 1242441
agguauucccgcgcucauu

SEQ ID NO: 1347805 - RNA, 19 nt, Artificial Sequence
  Description of Artificial Sequence: Synthetic oligonucleotide
  Antisense strand to SEQ ID NO: 1347804
aaugagcgcgggaauaccu

SEQ ID NO: 1347806 - RNA, 19 nt, Artificial Sequence
  Description of Artificial Sequence: Synthetic oligonucleotide
  Sense strand starting at position 2310 of SEQ ID NO: 1242441
cggcucuuuccagguugau

SEQ ID NO: 1347807 - RNA, 19 nt, Artificial Sequence
  Description of Artificial Sequence: Synthetic oligonucleotide
  Antisense strand to SEQ ID NO: 1347806
aucaaccuggaaagagccg

SEQ ID NO: 1347808 - RNA, 19 nt, Artificial Sequence
  Description of Artificial Sequence: Synthetic oligonucleotide
  Sense strand starting at position 2313 of SEQ ID NO: 1242441
cucuuuccagguugaugua

SEQ ID NO: 1347809 - RNA, 19 nt, Artificial Sequence
  Description of Artificial Sequence: Synthetic oligonucleotide
  Antisense strand to SEQ ID NO: 1347808
uacaucaaccuggaaagag

SEQ ID NO: 1347810 - RNA, 19 nt, Artificial Sequence
  Description of Artificial Sequence: Synthetic oligonucleotide
  Sense strand starting at position 2326 of SEQ ID NO: 1242441
gauguaaagucucagugag

SEQ ID NO: 1347811 - RNA, 19 nt, Artificial Sequence
  Description of Artificial Sequence: Synthetic oligonucleotide
  Antisense strand to SEQ ID NO: 1347810
cucacugagacuuuacauc

SEQ ID NO: 1347812 - RNA, 19 nt, Artificial Sequence
  Description of Artificial Sequence: Synthetic oligonucleotide
  Sense strand starting at position 2328 of SEQ ID NO: 1242441
uguaaagucucagugagug

SEQ ID NO: 1347813 - RNA, 19 nt, Artificial Sequence
  Description of Artificial Sequence: Synthetic oligonucleotide
  Antisense strand to SEQ ID NO: 1347812
cacucacugagacuuuaca

SEQ ID NO: 1347814 - RNA, 19 nt, Artificial Sequence
  Description of Artificial Sequence: Synthetic oligonucleotide
  Sense strand starting at position 2340 of SEQ ID NO: 1242441
gugagugguucuccaccau

SEQ ID NO: 1347815 - RNA, 19 nt, Artificial Sequence
  Description of Artificial Sequence: Synthetic oligonucleotide
  Antisense strand to SEQ ID NO: 1347814
augguggagaaccacucac

SEQ ID NO: 1347816 - RNA, 19 nt, Artificial Sequence
  Description of Artificial Sequence: Synthetic oligonucleotide
  Sense strand starting at position 2344 of SEQ ID NO: 1242441
gugguucuccaccauauca

SEQ ID NO: 1347817 - RNA, 19 nt, Artificial Sequence
  Description of Artificial Sequence: Synthetic oligonucleotide
  Antisense strand to SEQ ID NO: 1347816
ugauaugguggagaaccac

SEQ ID NO: 1347818 - RNA, 19 nt, Artificial Sequence
  Description of Artificial Sequence: Synthetic oligonucleotide
  Sense strand starting at position 2346 of SEQ ID NO: 1242441
gguucuccaccauaucaga

SEQ ID NO: 1347819 - RNA, 19 nt, Artificial Sequence
  Description of Artificial Sequence: Synthetic oligonucleotide
  Antisense strand to SEQ ID NO: 1347818
ucugauaugguggagaacc

SEQ ID NO: 1347820 - RNA, 19 nt, Artificial Sequence
  Description of Artificial Sequence: Synthetic oligonucleotide
  Sense strand starting at position 2406 of SEQ ID NO: 1242441
gucucauaaccugagaagu

SEQ ID NO: 1347821 - RNA, 19 nt, Artificial Sequence
  Description of Artificial Sequence: Synthetic oligonucleotide
  Antisense strand to SEQ ID NO: 1347820
acuucucagguuaugagac

SEQ ID NO: 1347822 - RNA, 19 nt, Artificial Sequence
  Description of Artificial Sequence: Synthetic oligonucleotide
  Sense strand starting at position 2423 of SEQ ID NO: 1242441
gugcaagugcuagaagcuu

SEQ ID NO: 1347823 - RNA, 19 nt, Artificial Sequence
  Description of Artificial Sequence: Synthetic oligonucleotide
  Antisense strand to SEQ ID NO: 1347822
aagcuucuagcacuugcac

SEQ ID NO: 1347824 - RNA, 19 nt, Artificial Sequence
  Description of Artificial Sequence: Synthetic oligonucleotide
  Sense strand starting at position 2468 of SEQ ID NO: 1242441
uugaaaguuugaguuucuu

SEQ ID NO: 1347825 - RNA, 19 nt, Artificial Sequence
  Description of Artificial Sequence: Synthetic oligonucleotide
  Antisense strand to SEQ ID NO: 1347824
aagaaacucaaacuuucaa

SEQ ID NO: 1347826 - RNA, 19 nt, Artificial Sequence
  Description of Artificial Sequence: Synthetic oligonucleotide
  Sense strand starting at position 2990 of SEQ ID NO: 1242441
ugcagcauugcuucuguga

SEQ ID NO: 1347827 - RNA, 19 nt, Artificial Sequence
  Description of Artificial Sequence: Synthetic oligonucleotide
  Antisense strand to SEQ ID NO: 1347826
ucacagaagcaaugcugca

SEQ ID NO: 1347828 - RNA, 19 nt, Artificial Sequence
  Description of Artificial Sequence: Synthetic oligonucleotide
  Sense strand starting at position 2991 of SEQ ID NO: 1242441
gcagcauugcuucugugac

SEQ ID NO: 1347829 - RNA, 19 nt, Artificial Sequence
  Description of Artificial Sequence: Synthetic oligonucleotide
  Antisense strand to SEQ ID NO: 1347828
gucacagaagcaaugcugc

SEQ ID NO: 1347830 - RNA, 19 nt, Artificial Sequence
  Description of Artificial Sequence: Synthetic oligonucleotide
  Sense strand starting at position 2992 of SEQ ID NO: 1242441
cagcauugcuucugugaca

SEQ ID NO: 1347831 - RNA, 19 nt, Artificial Sequence
  Description of Artificial Sequence: Synthetic oligonucleotide
  Antisense strand to SEQ ID NO: 1347830
ugucacagaagcaaugcug

SEQ ID NO: 1347832 - RNA, 19 nt, Artificial Sequence
  Description of Artificial Sequence: Synthetic oligonucleotide
  Sense strand starting at position 2993 of SEQ ID NO: 1242441
agcauugcuucugugacau

SEQ ID NO: 1347833 - RNA, 19 nt, Artificial Sequence
  Description of Artificial Sequence: Synthetic oligonucleotide
  Antisense strand to SEQ ID NO: 1347832
augucacagaagcaaugcu

SEQ ID NO: 1347834 - RNA, 19 nt, Artificial Sequence
  Description of Artificial Sequence: Synthetic oligonucleotide
  Sense strand starting at position 2997 of SEQ ID NO: 1242441
uugcuucugugacaugauu

SEQ ID NO: 1347835 - RNA, 19 nt, Artificial Sequence
  Description of Artificial Sequence: Synthetic oligonucleotide
  Antisense strand to SEQ ID NO: 1347834
aaucaugucacagaagcaa

SEQ ID NO: 1347836 - RNA, 19 nt, Artificial Sequence
  Description of Artificial Sequence: Synthetic oligonucleotide
  Sense strand starting at position 3346 of SEQ ID NO: 1242441
ggcaaauaacucugguaaa

SEQ ID NO: 1347837 - RNA, 19 nt, Artificial Sequence
  Description of Artificial Sequence: Synthetic oligonucleotide
  Antisense strand to SEQ ID NO: 1347836
uuuaccagaguuauuugcc

SEQ ID NO: 1347838 - RNA, 19 nt, Artificial Sequence
  Description of Artificial Sequence: Synthetic oligonucleotide
  Sense strand starting at position 3347 of SEQ ID NO: 1242441
gcaaauaacucugguaaag

SEQ ID NO: 1347839 - RNA, 19 nt, Artificial Sequence
  Description of Artificial Sequence: Synthetic oligonucleotide
  Antisense strand to SEQ ID NO: 1347838
cuuuaccagaguuauuugc

SEQ ID NO: 1347840 - RNA, 19 nt, Artificial Sequence
  Description of Artificial Sequence: Synthetic oligonucleotide
  Sense strand starting at position 3682 of SEQ ID NO: 1242441
ccuugaccucuggagcuua

SEQ ID NO: 1347841 - RNA, 19 nt, Artificial Sequence
  Description of Artificial Sequence: Synthetic oligonucleotide
  Antisense strand to SEQ ID NO: 1347840
uaagcuccagaggucaagg

SEQ ID NO: 1347842 - RNA, 19 nt, Artificial Sequence
  Description of Artificial Sequence: Synthetic oligonucleotide
  Sense strand starting at position 131 of SEQ ID NO: 1242442
cccuuagaaagguggcauu

SEQ ID NO: 1347843 - RNA, 19 nt, Artificial Sequence
  Description of Artificial Sequence: Synthetic oligonucleotide
  Antisense strand to SEQ ID NO: 1347842
aaugccaccuuucuaaggg

SEQ ID NO: 1347844 - RNA, 19 nt, Artificial Sequence
  Description of Artificial Sequence: Synthetic oligonucleotide
  Sense strand starting at position 181 of SEQ ID NO: 1242442
gaggacuucucaguauuaa

SEQ ID NO: 1347845 - RNA, 19 nt, Artificial Sequence
  Description of Artificial Sequence: Synthetic oligonucleotide
  Antisense strand to SEQ ID NO: 1347844
uuaauacugagaaguccuc

SEQ ID NO: 1347846 - RNA, 19 nt, Artificial Sequence
  Description of Artificial Sequence: Synthetic oligonucleotide
  Sense strand starting at position 326 of SEQ ID NO: 1242442
gaagaacacuccuuagguu

SEQ ID NO: 1347847 - RNA, 19 nt, Artificial Sequence
  Description of Artificial Sequence: Synthetic oligonucleotide
  Antisense strand to SEQ ID NO: 1347846
aaccuaaggaguguucuuc

SEQ ID NO: 1347848 - RNA, 19 nt, Artificial Sequence
  Description of Artificial Sequence: Synthetic oligonucleotide
  Sense strand starting at position 417 of SEQ ID NO: 1242442
gauaacuuguccuuagguu

SEQ ID NO: 1347849 - RNA, 19 nt, Artificial Sequence
  Description of Artificial Sequence: Synthetic oligonucleotide
  Antisense strand to SEQ ID NO: 1347848
aaccuaaggacaaguuauc

SEQ ID NO: 1347850 - RNA, 19 nt, Artificial Sequence
  Description of Artificial Sequence: Synthetic oligonucleotide
  Sense strand starting at position 418 of SEQ ID NO: 1242442
auaacuuguccuuagguuu

SEQ ID NO: 1347851 - RNA, 19 nt, Artificial Sequence
  Description of Artificial Sequence: Synthetic oligonucleotide
  Antisense strand to SEQ ID NO: 1347850
aaaccuaaggacaaguuau

SEQ ID NO: 1347852 - RNA, 19 nt, Artificial Sequence
  Description of Artificial Sequence: Synthetic oligonucleotide
  Sense strand starting at position 546 of SEQ ID NO: 1242442
ucaugcagucaguauccua

SEQ ID NO: 1347853 - RNA, 19 nt, Artificial Sequence
  Description of Artificial Sequence: Synthetic oligonucleotide
  Antisense strand to SEQ ID NO: 1347852
uaggauacugacugcauga

SEQ ID NO: 1347854 - RNA, 19 nt, Artificial Sequence
  Description of Artificial Sequence: Synthetic oligonucleotide
  Sense strand starting at position 553 of SEQ ID NO: 1242442
gucaguauccuacacuaau

SEQ ID NO: 1347855 - RNA, 19 nt, Artificial Sequence
  Description of Artificial Sequence: Synthetic oligonucleotide
  Antisense strand to SEQ ID NO: 1347854
auuaguguaggauacugac

SEQ ID NO: 1347856 - RNA, 19 nt, Artificial Sequence
  Description of Artificial Sequence: Synthetic oligonucleotide
  Sense strand starting at position 659 of SEQ ID NO: 1242442
agggcucuugacuaaaugu

SEQ ID NO: 1347857 - RNA, 19 nt, Artificial Sequence
  Description of Artificial Sequence: Synthetic oligonucleotide
  Antisense strand to SEQ ID NO: 1347856
acauuuagucaagagcccu

SEQ ID NO: 1347858 - RNA, 19 nt, Artificial Sequence
  Description of Artificial Sequence: Synthetic oligonucleotide
  Sense strand starting at position 730 of SEQ ID NO: 1242442
ccacaaagauaaggaaaua

SEQ ID NO: 1347859 - RNA, 19 nt, Artificial Sequence
  Description of Artificial Sequence: Synthetic oligonucleotide
  Antisense strand to SEQ ID NO: 1347858
uauuuccuuaucuuugugg

SEQ ID NO: 1347860 - RNA, 19 nt, Artificial Sequence
  Description of Artificial Sequence: Synthetic oligonucleotide
  Sense strand starting at position 835 of SEQ ID NO: 1242442
cuuacaguacuacgaauaa

SEQ ID NO: 1347861 - RNA, 19 nt, Artificial Sequence
  Description of Artificial Sequence: Synthetic oligonucleotide
  Antisense strand to SEQ ID NO: 1347860
uuauucguaguacuguaag

SEQ ID NO: 1347862 - RNA, 19 nt, Artificial Sequence
  Description of Artificial Sequence: Synthetic oligonucleotide
  Sense strand starting at position 877 of SEQ ID NO: 1242442
ccacaagagcuuuagcaga

SEQ ID NO: 1347863 - RNA, 19 nt, Artificial Sequence
  Description of Artificial Sequence: Synthetic oligonucleotide
  Antisense strand to SEQ ID NO: 1347862
ucugcuaaagcucuugugg

SEQ ID NO: 1347864 - RNA, 19 nt, Artificial Sequence
  Description of Artificial Sequence: Synthetic oligonucleotide
  Sense strand starting at position 882 of SEQ ID NO: 1242442
agagcuuuagcagaacuaa

SEQ ID NO: 1347865 - RNA, 19 nt, Artificial Sequence
  Description of Artificial Sequence: Synthetic oligonucleotide
  Antisense strand to SEQ ID NO: 1347864
uuaguucugcuaaagcucu

SEQ ID NO: 1347866 - RNA, 19 nt, Artificial Sequence
  Description of Artificial Sequence: Synthetic oligonucleotide
  Sense strand starting at position 893 of SEQ ID NO: 1242442
agaacuaacgacugucuga

SEQ ID NO: 1347867 - RNA, 19 nt, Artificial Sequence
  Description of Artificial Sequence: Synthetic oligonucleotide
  Antisense strand to SEQ ID NO: 1347866
ucagacagucguuaguucu

SEQ ID NO: 1347868 - RNA, 19 nt, Artificial Sequence
  Description of Artificial Sequence: Synthetic oligonucleotide
  Sense strand starting at position 1141 of SEQ ID NO: 1242442
uguugucugcgggcucaaa

SEQ ID NO: 1347869 - RNA, 19 nt, Artificial Sequence
  Description of Artificial Sequence: Synthetic oligonucleotide
  Antisense strand to SEQ ID NO: 1347868
uuugagcccgcagacaaca

SEQ ID NO: 1347870 - RNA, 19 nt, Artificial Sequence
  Description of Artificial Sequence: Synthetic oligonucleotide
  Sense strand starting at position 1167 of SEQ ID NO: 1242442
acaguacccuucuuuggaa

SEQ ID NO: 1347871 - RNA, 19 nt, Artificial Sequence
  Description of Artificial Sequence: Synthetic oligonucleotide
  Antisense strand to SEQ ID NO: 1347870
uuccaaagaaggguacugu

SEQ ID NO: 1347872 - RNA, 19 nt, Artificial Sequence
  Description of Artificial Sequence: Synthetic oligonucleotide
  Sense strand starting at position 1187 of SEQ ID NO: 1242442
ggguuugguucgaccguca

SEQ ID NO: 1347873 - RNA, 19 nt, Artificial Sequence
  Description of Artificial Sequence: Synthetic oligonucleotide
  Antisense strand to SEQ ID NO: 1347872
ugacggucgaaccaaaccc

SEQ ID NO: 1347874 - RNA, 19 nt, Artificial Sequence
  Description of Artificial Sequence: Synthetic oligonucleotide
  Sense strand starting at position 1355 of SEQ ID NO: 1242442
uggcgaaacccuggagaaa

SEQ ID NO: 1347875 - RNA, 19 nt, Artificial Sequence
  Description of Artificial Sequence: Synthetic oligonucleotide
  Antisense strand to SEQ ID NO: 1347874
uuucuccaggguuucgcca

SEQ ID NO: 1347876 - RNA, 19 nt, Artificial Sequence
  Description of Artificial Sequence: Synthetic oligonucleotide
  Sense strand starting at position 1398 of SEQ ID NO: 1242442
guaauaucgaagcacguua

SEQ ID NO: 1347877 - RNA, 19 nt, Artificial Sequence
  Description of Artificial Sequence: Synthetic oligonucleotide
  Antisense strand to SEQ ID NO: 1347876
uaacgugcuucgauauuac

SEQ ID NO: 1347878 - RNA, 19 nt, Artificial Sequence
  Description of Artificial Sequence: Synthetic oligonucleotide
  Sense strand starting at position 1475 of SEQ ID NO: 1242442
ggcccauuguuaccagaag

SEQ ID NO: 1347879 - RNA, 19 nt, Artificial Sequence
  Description of Artificial Sequence: Synthetic oligonucleotide
  Antisense strand to SEQ ID NO: 1347878
cuucugguaacaaugggcc

SEQ ID NO: 1347880 - RNA, 19 nt, Artificial Sequence
  Description of Artificial Sequence: Synthetic oligonucleotide
  Sense strand starting at position 1561 of SEQ ID NO: 1242442
cccgaaugugcucaguaca

SEQ ID NO: 1347881 - RNA, 19 nt, Artificial Sequence
  Description of Artificial Sequence: Synthetic oligonucleotide
  Antisense strand to SEQ ID NO: 1347880
uguacugagcacauucggg

SEQ ID NO: 1347882 - RNA, 19 nt, Artificial Sequence
  Description of Artificial Sequence: Synthetic oligonucleotide
  Sense strand starting at position 1842 of SEQ ID NO: 1242442
ggcacaggucucgaguaac

SEQ ID NO: 1347883 - RNA, 19 nt, Artificial Sequence
  Description of Artificial Sequence: Synthetic oligonucleotide
  Antisense strand to SEQ ID NO: 1347882
guuacucgagaccugugcc

SEQ ID NO: 1347884 - RNA, 19 nt, Artificial Sequence
  Description of Artificial Sequence: Synthetic oligonucleotide
  Sense strand starting at position 2002 of SEQ ID NO: 1242442
cgggacuuccgcuacuaga

SEQ ID NO: 1347885 - RNA, 19 nt, Artificial Sequence
  Description of Artificial Sequence: Synthetic oligonucleotide
  Antisense strand to SEQ ID NO: 1347884
ucuaguagcggaagucccg

SEQ ID NO: 1347886 - RNA, 19 nt, Artificial Sequence
  Description of Artificial Sequence: Synthetic oligonucleotide
  Sense strand starting at position 2403 of SEQ ID NO: 1242442
guagguaucagcuauuguu

SEQ ID NO: 1347887 - RNA, 19 nt, Artificial Sequence
  Description of Artificial Sequence: Synthetic oligonucleotide
  Antisense strand to SEQ ID NO: 1347886
aacaauagcugauaccuac

SEQ ID NO: 1347888 - RNA, 19 nt, Artificial Sequence
  Description of Artificial Sequence: Synthetic oligonucleotide
  Sense strand starting at position 2857 of SEQ ID NO: 1242442
ucaggagaacuagguugua

SEQ ID NO: 1347889 - RNA, 19 nt, Artificial Sequence
  Description of Artificial Sequence: Synthetic oligonucleotide
  Antisense strand to SEQ ID NO: 1347888
uacaaccuaguucuccuga

SEQ ID NO: 1347890 - RNA, 19 nt, Artificial Sequence
  Description of Artificial Sequence: Synthetic oligonucleotide
  Sense strand starting at position 3026 of SEQ ID NO: 1242442
ccugguuuccuggaaguug

SEQ ID NO: 1347891 - RNA, 19 nt, Artificial Sequence
  Description of Artificial Sequence: Synthetic oligonucleotide
  Antisense strand to SEQ ID NO: 1347890
caacuuccaggaaaccagg

SEQ ID NO: 1347892 - RNA, 19 nt, Artificial Sequence
  Description of Artificial Sequence: Synthetic oligonucleotide
  Sense strand starting at position 3106 of SEQ ID NO: 1242442
uaaugaauuccgugagaca

SEQ ID NO: 1347893 - RNA, 19 nt, Artificial Sequence
  Description of Artificial Sequence: Synthetic oligonucleotide
  Antisense strand to SEQ ID NO: 1347892
ugucucacggaauucauua

SEQ ID NO: 1347894 - RNA, 19 nt, Artificial Sequence
  Description of Artificial Sequence: Synthetic oligonucleotide
  Sense strand starting at position 3201 of SEQ ID NO: 1242442
agaacuuugaguugaaagc

SEQ ID NO: 1347895 - RNA, 19 nt, Artificial Sequence
  Description of Artificial Sequence: Synthetic oligonucleotide
  Antisense strand to SEQ ID NO: 1347894
gcuuucaacucaaaguucu

SEQ ID NO: 1347896 - RNA, 19 nt, Artificial Sequence
  Description of Artificial Sequence: Synthetic oligonucleotide
  Sense strand starting at position 3202 of SEQ ID NO: 1242442
gaacuuugaguugaaagcu

SEQ ID NO: 1347897 - RNA, 19 nt, Artificial Sequence
  Description of Artificial Sequence: Synthetic oligonucleotide
  Antisense strand to SEQ ID NO: 1347896
agcuuucaacucaaaguuc

SEQ ID NO: 1347898 - RNA, 19 nt, Artificial Sequence
  Description of Artificial Sequence: Synthetic oligonucleotide
  Sense strand starting at position 3459 of SEQ ID NO: 1242442
agacucguuaaggaaguuu

SEQ ID NO: 1347899 - RNA, 19 nt, Artificial Sequence
  Description of Artificial Sequence: Synthetic oligonucleotide
  Antisense strand to SEQ ID NO: 1347898
aaacuuccuuaacgagucu

SEQ ID NO: 1347900 - RNA, 19 nt, Artificial Sequence
  Description of Artificial Sequence: Synthetic oligonucleotide
  Sense strand starting at position 3525 of SEQ ID NO: 1242442
gucuguguuguggagaaug

SEQ ID NO: 1347901 - RNA, 19 nt, Artificial Sequence
  Description of Artificial Sequence: Synthetic oligonucleotide
  Antisense strand to SEQ ID NO: 1347900
cauucuccacaacacagac

SEQ ID NO: 1347902 - RNA, 19 nt, Artificial Sequence
  Description of Artificial Sequence: Synthetic oligonucleotide
  Sense strand starting at position 3527 of SEQ ID NO: 1242442
cuguguuguggagaaugca

SEQ ID NO: 1347903 - RNA, 19 nt, Artificial Sequence
  Description of Artificial Sequence: Synthetic oligonucleotide
  Antisense strand to SEQ ID NO: 1347902
ugcauucuccacaacacag

SEQ ID NO: 1347904 - RNA, 19 nt, Artificial Sequence
  Description of Artificial Sequence: Synthetic oligonucleotide
  Sense strand starting at position 3676 of SEQ ID NO: 1242442
ggcugaugaccuuguguag

SEQ ID NO: 1347905 - RNA, 19 nt, Artificial Sequence
  Description of Artificial Sequence: Synthetic oligonucleotide
  Antisense strand to SEQ ID NO: 1347904
cuacacaaggucaucagcc

SEQ ID NO: 1347906 - RNA, 19 nt, Artificial Sequence
  Description of Artificial Sequence: Synthetic oligonucleotide
  Sense strand starting at position 3843 of SEQ ID NO: 1242442
ugaccuaacgugggucaau

SEQ ID NO: 1347907 - RNA, 19 nt, Artificial Sequence
  Description of Artificial Sequence: Synthetic oligonucleotide
  Antisense strand to SEQ ID NO: 1347906
auugacccacguuagguca

SEQ ID NO: 1347908 - RNA, 19 nt, Artificial Sequence
  Description of Artificial Sequence: Synthetic oligonucleotide
  Sense strand starting at position 3875 of SEQ ID NO: 1242442
ccaggacuuugacuucuga

SEQ ID NO: 1347909 - RNA, 19 nt, Artificial Sequence
  Description of Artificial Sequence: Synthetic oligonucleotide
  Antisense strand to SEQ ID NO: 1347908
ucagaagucaaaguccugg

SEQ ID NO: 1347910 - RNA, 19 nt, Artificial Sequence
  Description of Artificial Sequence: Synthetic oligonucleotide
  Sense strand starting at position 3882 of SEQ ID NO: 1242442
uuugacuucugagcuagua

SEQ ID NO: 1347911 - RNA, 19 nt, Artificial Sequence
  Description of Artificial Sequence: Synthetic oligonucleotide
  Antisense strand to SEQ ID NO: 1347910
uacuagcucagaagucaaa

SEQ ID NO: 1347912 - RNA, 19 nt, Artificial Sequence
  Description of Artificial Sequence: Synthetic oligonucleotide
  Sense strand starting at position 3929 of SEQ ID NO: 1242442
uguccagucauuugaaugu

SEQ ID NO: 1347913 - RNA, 19 nt, Artificial Sequence
  Description of Artificial Sequence: Synthetic oligonucleotide
  Antisense strand to SEQ ID NO: 1347912
acauucaaaugacuggaca

SEQ ID NO: 1347914 - RNA, 19 nt, Artificial Sequence
  Description of Artificial Sequence: Synthetic oligonucleotide
  Sense strand starting at position 3939 of SEQ ID NO: 1242442
uuugaaugugaggauguuu

SEQ ID NO: 1347915 - RNA, 19 nt, Artificial Sequence
  Description of Artificial Sequence: Synthetic oligonucleotide
  Antisense strand to SEQ ID NO: 1347914
aaacauccucacauucaaa

SEQ ID NO: 1347916 - RNA, 19 nt, Artificial Sequence
  Description of Artificial Sequence: Synthetic oligonucleotide
  Sense strand starting at position 3962 of SEQ ID NO: 1242442
ucaucuguauuggcagaua

SEQ ID NO: 1347917 - RNA, 19 nt, Artificial Sequence
  Description of Artificial Sequence: Synthetic oligonucleotide
  Antisense strand to SEQ ID NO: 1347916
uaucugccaauacagauga

SEQ ID NO: 1347918 - RNA, 19 nt, Artificial Sequence
  Description of Artificial Sequence: Synthetic oligonucleotide
  Sense strand starting at position 3965 of SEQ ID NO: 1242442
ucuguauuggcagauauca

SEQ ID NO: 1347919 - RNA, 19 nt, Artificial Sequence
  Description of Artificial Sequence: Synthetic oligonucleotide
  Antisense strand to SEQ ID NO: 1347918
ugauaucugccaauacaga

SEQ ID NO: 1347920 - RNA, 19 nt, Artificial Sequence
  Description of Artificial Sequence: Synthetic oligonucleotide
  Sense strand starting at position 3967 of SEQ ID NO: 1242442
uguauuggcagauaucaug

SEQ ID NO: 1347921 - RNA, 19 nt, Artificial Sequence
  Description of Artificial Sequence: Synthetic oligonucleotide
  Antisense strand to SEQ ID NO: 1347920
caugauaucugccaauaca

SEQ ID NO: 1347922 - RNA, 19 nt, Artificial Sequence
  Description of Artificial Sequence: Synthetic oligonucleotide
  Sense strand starting at position 87 of SEQ ID NO: 1242443
auaaacucucagcagugaa

SEQ ID NO: 1347923 - RNA, 19 nt, Artificial Sequence
  Description of Artificial Sequence: Synthetic oligonucleotide
  Antisense strand to SEQ ID NO: 1347922
uucacugcugagaguuuau

SEQ ID NO: 1347924 - RNA, 19 nt, Artificial Sequence
  Description of Artificial Sequence: Synthetic oligonucleotide
  Sense strand starting at position 159 of SEQ ID NO: 1242443
ugggacauuuaucaacaaa

SEQ ID NO: 1347925 - RNA, 19 nt, Artificial Sequence
  Description of Artificial Sequence: Synthetic oligonucleotide
  Antisense strand to SEQ ID NO: 1347924
uuuguugauaaauguccca

SEQ ID NO: 1347926 - RNA, 19 nt, Artificial Sequence
  Description of Artificial Sequence: Synthetic oligonucleotide
  Sense strand starting at position 186 of SEQ ID NO: 1242443
uugagaagucaguaugagu

SEQ ID NO: 1347927 - RNA, 19 nt, Artificial Sequence
  Description of Artificial Sequence: Synthetic oligonucleotide
  Antisense strand to SEQ ID NO: 1347926
acucauacugacuucucaa

SEQ ID NO: 1347928 - RNA, 19 nt, Artificial Sequence
  Description of Artificial Sequence: Synthetic oligonucleotide
  Sense strand starting at position 191 of SEQ ID NO: 1242443
aagucaguaugaguuuaaa

SEQ ID NO: 1347929 - RNA, 19 nt, Artificial Sequence
  Description of Artificial Sequence: Synthetic oligonucleotide
  Antisense strand to SEQ ID NO: 1347928
uuuaaacucauacugacuu

SEQ ID NO: 1347930 - RNA, 19 nt, Artificial Sequence
  Description of Artificial Sequence: Synthetic oligonucleotide
  Sense strand starting at position 194 of SEQ ID NO: 1242443
ucaguaugaguuuaaagca

SEQ ID NO: 1347931 - RNA, 19 nt, Artificial Sequence
  Description of Artificial Sequence: Synthetic oligonucleotide
  Antisense strand to SEQ ID NO: 1347930
ugcuuuaaacucauacuga

SEQ ID NO: 1347932 - RNA, 19 nt, Artificial Sequence
  Description of Artificial Sequence: Synthetic oligonucleotide
  Sense strand starting at position 254 of SEQ ID NO: 1242443
uggguuuaggcauaucacu

SEQ ID NO: 1347933 - RNA, 19 nt, Artificial Sequence
  Description of Artificial Sequence: Synthetic oligonucleotide
  Antisense strand to SEQ ID NO: 1347932
agugauaugccuaaaccca

SEQ ID NO: 1347934 - RNA, 19 nt, Artificial Sequence
  Description of Artificial Sequence: Synthetic oligonucleotide
  Sense strand starting at position 314 of SEQ ID NO: 1242443
uggugaacauugguaggau

SEQ ID NO: 1347935 - RNA, 19 nt, Artificial Sequence
  Description of Artificial Sequence: Synthetic oligonucleotide
  Antisense strand to SEQ ID NO: 1347934
auccuaccaauguucacca

SEQ ID NO: 1347936 - RNA, 19 nt, Artificial Sequence
  Description of Artificial Sequence: Synthetic oligonucleotide
  Sense strand starting at position 356 of SEQ ID NO: 1242443
augagaauuucucaugaga

SEQ ID NO: 1347937 - RNA, 19 nt, Artificial Sequence
  Description of Artificial Sequence: Synthetic oligonucleotide
  Antisense strand to SEQ ID NO: 1347936
ucucaugagaaauucucau

SEQ ID NO: 1347938 - RNA, 19 nt, Artificial Sequence
  Description of Artificial Sequence: Synthetic oligonucleotide
  Sense strand starting at position 478 of SEQ ID NO: 1242443
auggaauccuagcuagaag

SEQ ID NO: 1347939 - RNA, 19 nt, Artificial Sequence
  Description of Artificial Sequence: Synthetic oligonucleotide
  Antisense strand to SEQ ID NO: 1347938
cuucuagcuaggauuccau

SEQ ID NO: 1347940 - RNA, 19 nt, Artificial Sequence
  Description of Artificial Sequence: Synthetic oligonucleotide
  Sense strand starting at position 582 of SEQ ID NO: 1242443
aucuuauaggcacaguaua

SEQ ID NO: 1347941 - RNA, 19 nt, Artificial Sequence
  Description of Artificial Sequence: Synthetic oligonucleotide
  Antisense strand to SEQ ID NO: 1347940
uauacugugccuauaagau

SEQ ID NO: 1347942 - RNA, 19 nt, Artificial Sequence
  Description of Artificial Sequence: Synthetic oligonucleotide
  Sense strand starting at position 716 of SEQ ID NO: 1242443
gauuaauggacugguguua

SEQ ID NO: 1347943 - RNA, 19 nt, Artificial Sequence
  Description of Artificial Sequence: Synthetic oligonucleotide
  Antisense strand to SEQ ID NO: 1347942
uaacaccaguccauuaauc

SEQ ID NO: 1347944 - RNA, 19 nt, Artificial Sequence
  Description of Artificial Sequence: Synthetic oligonucleotide
  Sense strand starting at position 1001 of SEQ ID NO: 1242443
uagggagacucaguuuaac

SEQ ID NO: 1347945 - RNA, 19 nt, Artificial Sequence
  Description of Artificial Sequence: Synthetic oligonucleotide
  Antisense strand to SEQ ID NO: 1347944
guuaaacugagucucccua

SEQ ID NO: 1347946 - RNA, 19 nt, Artificial Sequence
  Description of Artificial Sequence: Synthetic oligonucleotide
  Sense strand starting at position 1197 of SEQ ID NO: 1242443
guauaaugacaaugagcaa

SEQ ID NO: 1347947 - RNA, 19 nt, Artificial Sequence
  Description of Artificial Sequence: Synthetic oligonucleotide
  Antisense strand to SEQ ID NO: 1347946
uugcucauugucauuauac

SEQ ID NO: 1347948 - RNA, 19 nt, Artificial Sequence
  Description of Artificial Sequence: Synthetic oligonucleotide
  Sense strand starting at position 1209 of SEQ ID NO: 1242443
ugagcaauuaaggguuaau

SEQ ID NO: 1347949 - RNA, 19 nt, Artificial Sequence
  Description of Artificial Sequence: Synthetic oligonucleotide
  Antisense strand to SEQ ID NO: 1347948
auuaacccuuaauugcuca

SEQ ID NO: 1347950 - RNA, 19 nt, Artificial Sequence
  Description of Artificial Sequence: Synthetic oligonucleotide
  Sense strand starting at position 1268 of SEQ ID NO: 1242443
uuaucuaaggaaugguuaa

SEQ ID NO: 1347951 - RNA, 19 nt, Artificial Sequence
  Description of Artificial Sequence: Synthetic oligonucleotide
  Antisense strand to SEQ ID NO: 1347950
uuaaccauuccuuagauaa

SEQ ID NO: 1347952 - RNA, 19 nt, Artificial Sequence
  Description of Artificial Sequence: Synthetic oligonucleotide
  Sense strand starting at position 1280 of SEQ ID NO: 1242443
ugguuaaacuaacugggau

SEQ ID NO: 1347953 - RNA, 19 nt, Artificial Sequence
  Description of Artificial Sequence: Synthetic oligonucleotide
  Antisense strand to SEQ ID NO: 1347952
aucccaguuaguuuaacca

SEQ ID NO: 1347954 - RNA, 19 nt, Artificial Sequence
  Description of Artificial Sequence: Synthetic oligonucleotide
  Sense strand starting at position 1281 of SEQ ID NO: 1242443
gguuaaacuaacugggauu

SEQ ID NO: 1347955 - RNA, 19 nt, Artificial Sequence
  Description of Artificial Sequence: Synthetic oligonucleotide
  Antisense strand to SEQ ID NO: 1347954
aaucccaguuaguuuaacc

SEQ ID NO: 1347956 - RNA, 19 nt, Artificial Sequence
  Description of Artificial Sequence: Synthetic oligonucleotide
  Sense strand starting at position 1493 of SEQ ID NO: 1242443
caugauuuacuguguguua

SEQ ID NO: 1347957 - RNA, 19 nt, Artificial Sequence
  Description of Artificial Sequence: Synthetic oligonucleotide
  Antisense strand to SEQ ID NO: 1347956
uaacacacaguaaaucaug

SEQ ID NO: 1347958 - RNA, 19 nt, Artificial Sequence
  Description of Artificial Sequence: Synthetic oligonucleotide
  Sense strand starting at position 1494 of SEQ ID NO: 1242443
augauuuacuguguguuau

SEQ ID NO: 1347959 - RNA, 19 nt, Artificial Sequence
  Description of Artificial Sequence: Synthetic oligonucleotide
  Antisense strand to SEQ ID NO: 1347958
auaacacacaguaaaucau

SEQ ID NO: 1347960 - RNA, 19 nt, Artificial Sequence
  Description of Artificial Sequence: Synthetic oligonucleotide
  Sense strand starting at position 1495 of SEQ ID NO: 1242443
ugauuuacuguguguuauu

SEQ ID NO: 1347961 - RNA, 19 nt, Artificial Sequence
  Description of Artificial Sequence: Synthetic oligonucleotide
  Antisense strand to SEQ ID NO: 1347960
aauaacacacaguaaauca

SEQ ID NO: 1347962 - RNA, 19 nt, Artificial Sequence
  Description of Artificial Sequence: Synthetic oligonucleotide
  Sense strand starting at position 1664 of SEQ ID NO: 1242443
ucuguaauucuagaacagu

SEQ ID NO: 1347963 - RNA, 19 nt, Artificial Sequence
  Description of Artificial Sequence: Synthetic oligonucleotide
  Antisense strand to SEQ ID NO: 1347962
acuguucuagaauuacaga

SEQ ID NO: 1347964 - RNA, 19 nt, Artificial Sequence
  Description of Artificial Sequence: Synthetic oligonucleotide
  Sense strand starting at position 1667 of SEQ ID NO: 1242443
guaauucuagaacaguguu

SEQ ID NO: 1347965 - RNA, 19 nt, Artificial Sequence
  Description of Artificial Sequence: Synthetic oligonucleotide
  Antisense strand to SEQ ID NO: 1347964
aacacuguucuagaauuac

SEQ ID NO: 1347966 - RNA, 19 nt, Artificial Sequence
  Description of Artificial Sequence: Synthetic oligonucleotide
  Sense strand starting at position 1704 of SEQ ID NO: 1242443
acucauuaaugggucacaa

SEQ ID NO: 1347967 - RNA, 19 nt, Artificial Sequence
  Description of Artificial Sequence: Synthetic oligonucleotide
  Antisense strand to SEQ ID NO: 1347966
uugugacccauuaaugagu

SEQ ID NO: 1347968 - RNA, 19 nt, Artificial Sequence
  Description of Artificial Sequence: Synthetic oligonucleotide
  Sense strand starting at position 1911 of SEQ ID NO: 1242443
ugugaaagugacuacugua

SEQ ID NO: 1347969 - RNA, 19 nt, Artificial Sequence
  Description of Artificial Sequence: Synthetic oligonucleotide
  Antisense strand to SEQ ID NO: 1347968
uacaguagucacuuucaca

SEQ ID NO: 1347970 - RNA, 19 nt, Artificial Sequence
  Description of Artificial Sequence: Synthetic oligonucleotide
  Sense strand starting at position 1944 of SEQ ID NO: 1242443
auguguguucuauaagaua

SEQ ID NO: 1347971 - RNA, 19 nt, Artificial Sequence
  Description of Artificial Sequence: Synthetic oligonucleotide
  Antisense strand to SEQ ID NO: 1347970
uaucuuauagaacacacau

SEQ ID NO: 1347972 - RNA, 19 nt, Artificial Sequence
  Description of Artificial Sequence: Synthetic oligonucleotide
  Sense strand starting at position 2045 of SEQ ID NO: 1242443
ccaagagcccagcauuaaa

SEQ ID NO: 1347973 - RNA, 19 nt, Artificial Sequence
  Description of Artificial Sequence: Synthetic oligonucleotide
  Antisense strand to SEQ ID NO: 1347972
uuuaaugcugggcucuugg

SEQ ID NO: 1347974 - RNA, 19 nt, Artificial Sequence
  Description of Artificial Sequence: Synthetic oligonucleotide
  Sense strand starting at position 2181 of SEQ ID NO: 1242443
gcauauacacucuggagga

SEQ ID NO: 1347975 - RNA, 19 nt, Artificial Sequence
  Description of Artificial Sequence: Synthetic oligonucleotide
  Antisense strand to SEQ ID NO: 1347974
uccuccagaguguauaugc

SEQ ID NO: 1347976 - RNA, 19 nt, Artificial Sequence
  Description of Artificial Sequence: Synthetic oligonucleotide
  Sense strand starting at position 2223 of SEQ ID NO: 1242443
agaugcaauggcuagaagu

SEQ ID NO: 1347977 - RNA, 19 nt, Artificial Sequence
  Description of Artificial Sequence: Synthetic oligonucleotide
  Antisense strand to SEQ ID NO: 1347976
acuucuagccauugcaucu

SEQ ID NO: 1347978 - RNA, 19 nt, Artificial Sequence
  Description of Artificial Sequence: Synthetic oligonucleotide
  Sense strand starting at position 2225 of SEQ ID NO: 1242443
augcaauggcuagaaguua

SEQ ID NO: 1347979 - RNA, 19 nt, Artificial Sequence
  Description of Artificial Sequence: Synthetic oligonucleotide
  Antisense strand to SEQ ID NO: 1347978
uaacuucuagccauugcau

SEQ ID NO: 1347980 - RNA, 19 nt, Artificial Sequence
  Description of Artificial Sequence: Synthetic oligonucleotide
  Sense strand starting at position 2487 of SEQ ID NO: 1242443
cauaguauuuaggaagacu

SEQ ID NO: 1347981 - RNA, 19 nt, Artificial Sequence
  Description of Artificial Sequence: Synthetic oligonucleotide
  Antisense strand to SEQ ID NO: 1347980
agucuuccuaaauacuaug

SEQ ID NO: 1347982 - RNA, 19 nt, Artificial Sequence
  Description of Artificial Sequence: Synthetic oligonucleotide
  Sense strand starting at position 2652 of SEQ ID NO: 1242443
uccucaguacugcaaggaa

SEQ ID NO: 1347983 - RNA, 19 nt, Artificial Sequence
  Description of Artificial Sequence: Synthetic oligonucleotide
  Antisense strand to SEQ ID NO: 1347982
uuccuugcaguacugagga

SEQ ID NO: 1347984 - RNA, 19 nt, Artificial Sequence
  Description of Artificial Sequence: Synthetic oligonucleotide
  Sense strand starting at position 3115 of SEQ ID NO: 1242443
gaguuauuagcacagagca

SEQ ID NO: 1347985 - RNA, 19 nt, Artificial Sequence
  Description of Artificial Sequence: Synthetic oligonucleotide
  Antisense strand to SEQ ID NO: 1347984
ugcucugugcuaauaacuc

SEQ ID NO: 1347986 - RNA, 19 nt, Artificial Sequence
  Description of Artificial Sequence: Synthetic oligonucleotide
  Sense strand starting at position 3117 of SEQ ID NO: 1242443
guuauuagcacagagcaga

SEQ ID NO: 1347987 - RNA, 19 nt, Artificial Sequence
  Description of Artificial Sequence: Synthetic oligonucleotide
  Antisense strand to SEQ ID NO: 1347986
ucugcucugugcuaauaac

SEQ ID NO: 1347988 - RNA, 19 nt, Artificial Sequence
  Description of Artificial Sequence: Synthetic oligonucleotide
  Sense strand starting at position 3354 of SEQ ID NO: 1242443
augaaaugugagggcaaca

SEQ ID NO: 1347989 - RNA, 19 nt, Artificial Sequence
  Description of Artificial Sequence: Synthetic oligonucleotide
  Antisense strand to SEQ ID NO: 1347988
uguugcccucacauuucau

SEQ ID NO: 1347990 - RNA, 19 nt, Artificial Sequence
  Description of Artificial Sequence: Synthetic oligonucleotide
  Sense strand starting at position 3373 of SEQ ID NO: 1242443
gggauagccaaucgaacua

SEQ ID NO: 1347991 - RNA, 19 nt, Artificial Sequence
  Description of Artificial Sequence: Synthetic oligonucleotide
  Antisense strand to SEQ ID NO: 1347990
uaguucgauuggcuauccc

SEQ ID NO: 1347992 - RNA, 19 nt, Artificial Sequence
  Description of Artificial Sequence: Synthetic oligonucleotide
  Sense strand starting at position 3501 of SEQ ID NO: 1242443
uuggaagugccugaccuua

SEQ ID NO: 1347993 - RNA, 19 nt, Artificial Sequence
  Description of Artificial Sequence: Synthetic oligonucleotide
  Antisense strand to SEQ ID NO: 1347992
uaaggucaggcacuuccaa

SEQ ID NO: 1347994 - RNA, 19 nt, Artificial Sequence
  Description of Artificial Sequence: Synthetic oligonucleotide
  Sense strand starting at position 3712 of SEQ ID NO: 1242443
uguccuguuaauuagagga

SEQ ID NO: 1347995 - RNA, 19 nt, Artificial Sequence
  Description of Artificial Sequence: Synthetic oligonucleotide
  Antisense strand to SEQ ID NO: 1347994
uccucuaauuaacaggaca

SEQ ID NO: 1347996 - RNA, 19 nt, Artificial Sequence
  Description of Artificial Sequence: Synthetic oligonucleotide
  Sense strand starting at position 3774 of SEQ ID NO: 1242443
ugugcacaagcauaauaau

SEQ ID NO: 1347997 - RNA, 19 nt, Artificial Sequence
  Description of Artificial Sequence: Synthetic oligonucleotide
  Antisense strand to SEQ ID NO: 1347996
auuauuaugcuugugcaca

SEQ ID NO: 1347998 - RNA, 19 nt, Artificial Sequence
  Description of Artificial Sequence: Synthetic oligonucleotide
  Sense strand starting at position 3924 of SEQ ID NO: 1242443
cuauguuugggaggaguga

SEQ ID NO: 1347999 - RNA, 19 nt, Artificial Sequence
  Description of Artificial Sequence: Synthetic oligonucleotide
  Antisense strand to SEQ ID NO: 1347998
ucacuccucccaaacauag

SEQ ID NO: 1348000 - RNA, 19 nt, Artificial Sequence
  Description of Artificial Sequence: Synthetic oligonucleotide
  Sense strand starting at position 3928 of SEQ ID NO: 1242443
guuugggaggagugauuga

SEQ ID NO: 1348001 - RNA, 19 nt, Artificial Sequence
  Description of Artificial Sequence: Synthetic oligonucleotide
  Antisense strand to SEQ ID NO: 1348000
ucaaucacuccucccaaac

SEQ ID NO: 1348002 - RNA, 19 nt, Artificial Sequence
  Description of Artificial Sequence: Synthetic oligonucleotide
  Sense strand starting at position 27 of SEQ ID NO: 1242444
acucaagaguacuucuguu

SEQ ID NO: 1348003 - RNA, 19 nt, Artificial Sequence
  Description of Artificial Sequence: Synthetic oligonucleotide
  Antisense strand to SEQ ID NO: 1348002
aacagaaguacucuugagu

SEQ ID NO: 1348004 - RNA, 19 nt, Artificial Sequence
  Description of Artificial Sequence: Synthetic oligonucleotide
  Sense strand starting at position 52 of SEQ ID NO: 1242444
aucuccuaacugggaguua

SEQ ID NO: 1348005 - RNA, 19 nt, Artificial Sequence
  Description of Artificial Sequence: Synthetic oligonucleotide
  Antisense strand to SEQ ID NO: 1348004
uaacucccaguuaggagau

SEQ ID NO: 1348006 - RNA, 19 nt, Artificial Sequence
  Description of Artificial Sequence: Synthetic oligonucleotide
  Sense strand starting at position 78 of SEQ ID NO: 1242444
cucugacucugcucuugua

SEQ ID NO: 1348007 - RNA, 19 nt, Artificial Sequence
  Description of Artificial Sequence: Synthetic oligonucleotide
  Antisense strand to SEQ ID NO: 1348006
uacaagagcagagucagag

SEQ ID NO: 1348008 - RNA, 19 nt, Artificial Sequence
  Description of Artificial Sequence: Synthetic oligonucleotide
  Sense strand starting at position 87 of SEQ ID NO: 1242444
ugcucuuguagcugucaga

SEQ ID NO: 1348009 - RNA, 19 nt, Artificial Sequence
  Description of Artificial Sequence: Synthetic oligonucleotide
  Antisense strand to SEQ ID NO: 1348008
ucugacagcuacaagagca

SEQ ID NO: 1348010 - RNA, 19 nt, Artificial Sequence
  Description of Artificial Sequence: Synthetic oligonucleotide
  Sense strand starting at position 90 of SEQ ID NO: 1242444
ucuuguagcugucagagca

SEQ ID NO: 1348011 - RNA, 19 nt, Artificial Sequence
  Description of Artificial Sequence: Synthetic oligonucleotide
  Antisense strand to SEQ ID NO: 1348010
ugcucugacagcuacaaga

SEQ ID NO: 1348012 - RNA, 19 nt, Artificial Sequence
  Description of Artificial Sequence: Synthetic oligonucleotide
  Sense strand starting at position 227 of SEQ ID NO: 1242444
uguucucucuuucggcaau

SEQ ID NO: 1348013 - RNA, 19 nt, Artificial Sequence
  Description of Artificial Sequence: Synthetic oligonucleotide
  Antisense strand to SEQ ID NO: 1348012
auugccgaaagagagaaca

SEQ ID NO: 1348014 - RNA, 19 nt, Artificial Sequence
  Description of Artificial Sequence: Synthetic oligonucleotide
  Sense strand starting at position 228 of SEQ ID NO: 1242444
guucucucuuucggcaauu

SEQ ID NO: 1348015 - RNA, 19 nt, Artificial Sequence
  Description of Artificial Sequence: Synthetic oligonucleotide
  Antisense strand to SEQ ID NO: 1348014
aauugccgaaagagagaac

SEQ ID NO: 1348016 - RNA, 19 nt, Artificial Sequence
  Description of Artificial Sequence: Synthetic oligonucleotide
  Sense strand starting at position 363 of SEQ ID NO: 1242444
guaagagcucacuaaaugu

SEQ ID NO: 1348017 - RNA, 19 nt, Artificial Sequence
  Description of Artificial Sequence: Synthetic oligonucleotide
  Antisense strand to SEQ ID NO: 1348016
acauuuagugagcucuuac

SEQ ID NO: 1348018 - RNA, 19 nt, Artificial Sequence
  Description of Artificial Sequence: Synthetic oligonucleotide
  Sense strand starting at position 643 of SEQ ID NO: 1242444
ccaagaucucaacagugcu

SEQ ID NO: 1348019 - RNA, 19 nt, Artificial Sequence
  Description of Artificial Sequence: Synthetic oligonucleotide
  Antisense strand to SEQ ID NO: 1348018
agcacuguugagaucuugg

SEQ ID NO: 1348020 - RNA, 19 nt, Artificial Sequence
  Description of Artificial Sequence: Synthetic oligonucleotide
  Sense strand starting at position 646 of SEQ ID NO: 1242444
agaucucaacagugcuaaa

SEQ ID NO: 1348021 - RNA, 19 nt, Artificial Sequence
  Description of Artificial Sequence: Synthetic oligonucleotide
  Antisense strand to SEQ ID NO: 1348020
uuuagcacuguugagaucu

SEQ ID NO: 1348022 - RNA, 19 nt, Artificial Sequence
  Description of Artificial Sequence: Synthetic oligonucleotide
  Sense strand starting at position 666 of SEQ ID NO: 1242444
gcauacauggauuaucuua

SEQ ID NO: 1348023 - RNA, 19 nt, Artificial Sequence
  Description of Artificial Sequence: Synthetic oligonucleotide
  Antisense strand to SEQ ID NO: 1348022
uaagauaauccauguaugc

SEQ ID NO: 1348024 - RNA, 19 nt, Artificial Sequence
  Description of Artificial Sequence: Synthetic oligonucleotide
  Sense strand starting at position 705 of SEQ ID NO: 1242444
agagguaagugcuaucauu

SEQ ID NO: 1348025 - RNA, 19 nt, Artificial Sequence
  Description of Artificial Sequence: Synthetic oligonucleotide
  Antisense strand to SEQ ID NO: 1348024
aaugauagcacuuaccucu

SEQ ID NO: 1348026 - RNA, 19 nt, Artificial Sequence
  Description of Artificial Sequence: Synthetic oligonucleotide
  Sense strand starting at position 758 of SEQ ID NO: 1242444
agaauaacuugcucaaggu

SEQ ID NO: 1348027 - RNA, 19 nt, Artificial Sequence
  Description of Artificial Sequence: Synthetic oligonucleotide
  Antisense strand to SEQ ID NO: 1348026
accuugagcaaguuauucu

SEQ ID NO: 1348028 - RNA, 19 nt, Artificial Sequence
  Description of Artificial Sequence: Synthetic oligonucleotide
  Sense strand starting at position 801 of SEQ ID NO: 1242444
gccugaauccagcaaagcu

SEQ ID NO: 1348029 - RNA, 19 nt, Artificial Sequence
  Description of Artificial Sequence: Synthetic oligonucleotide
  Antisense strand to SEQ ID NO: 1348028
agcuuugcuggauucaggc

SEQ ID NO: 1348030 - RNA, 19 nt, Artificial Sequence
  Description of Artificial Sequence: Synthetic oligonucleotide
  Sense strand starting at position 843 of SEQ ID NO: 1242444
caguucgagcccugcaaua

SEQ ID NO: 1348031 - RNA, 19 nt, Artificial Sequence
  Description of Artificial Sequence: Synthetic oligonucleotide
  Antisense strand to SEQ ID NO: 1348030
uauugcagggcucgaacug

SEQ ID NO: 1348032 - RNA, 19 nt, Artificial Sequence
  Description of Artificial Sequence: Synthetic oligonucleotide
  Sense strand starting at position 845 of SEQ ID NO: 1242444
guucgagcccugcaauacu

SEQ ID NO: 1348033 - RNA, 19 nt, Artificial Sequence
  Description of Artificial Sequence: Synthetic oligonucleotide
  Antisense strand to SEQ ID NO: 1348032
aguauugcagggcucgaac

SEQ ID NO: 1348034 - RNA, 19 nt, Artificial Sequence
  Description of Artificial Sequence: Synthetic oligonucleotide
  Sense strand starting at position 861 of SEQ ID NO: 1242444
acuacagucuaugaaugau

SEQ ID NO: 1348035 - RNA, 19 nt, Artificial Sequence
  Description of Artificial Sequence: Synthetic oligonucleotide
  Antisense strand to SEQ ID NO: 1348034
aucauucauagacuguagu

SEQ ID NO: 1348036 - RNA, 19 nt, Artificial Sequence
  Description of Artificial Sequence: Synthetic oligonucleotide
  Sense strand starting at position 1026 of SEQ ID NO: 1242444
aagugauauuaaggugugu

SEQ ID NO: 1348037 - RNA, 19 nt, Artificial Sequence
  Description of Artificial Sequence: Synthetic oligonucleotide
  Antisense strand to SEQ ID NO: 1348036
acacaccuuaauaucacuu

SEQ ID NO: 1348038 - RNA, 19 nt, Artificial Sequence
  Description of Artificial Sequence: Synthetic oligonucleotide
  Sense strand starting at position 1060 of SEQ ID NO: 1242444
agaaguggcuuaugacaau

SEQ ID NO: 1348039 - RNA, 19 nt, Artificial Sequence
  Description of Artificial Sequence: Synthetic oligonucleotide
  Antisense strand to SEQ ID NO: 1348038
auugucauaagccacuucu

SEQ ID NO: 1348040 - RNA, 19 nt, Artificial Sequence
  Description of Artificial Sequence: Synthetic oligonucleotide
  Sense strand starting at position 1063 of SEQ ID NO: 1242444
aguggcuuaugacaauaca

SEQ ID NO: 1348041 - RNA, 19 nt, Artificial Sequence
  Description of Artificial Sequence: Synthetic oligonucleotide
  Antisense strand to SEQ ID NO: 1348040
uguauugucauaagccacu

SEQ ID NO: 1348042 - RNA, 19 nt, Artificial Sequence
  Description of Artificial Sequence: Synthetic oligonucleotide
  Sense strand starting at position 1066 of SEQ ID NO: 1242444
ggcuuaugacaauacagcu

SEQ ID NO: 1348043 - RNA, 19 nt, Artificial Sequence
  Description of Artificial Sequence: Synthetic oligonucleotide
  Antisense strand to SEQ ID NO: 1348042
agcuguauugucauaagcc

SEQ ID NO: 1348044 - RNA, 19 nt, Artificial Sequence
  Description of Artificial Sequence: Synthetic oligonucleotide
  Sense strand starting at position 1079 of SEQ ID NO: 1242444
acagcuuugguuuagguau

SEQ ID NO: 1348045 - RNA, 19 nt, Artificial Sequence
  Description of Artificial Sequence: Synthetic oligonucleotide
  Antisense strand to SEQ ID NO: 1348044
auaccuaaaccaaagcugu

SEQ ID NO: 1348046 - RNA, 19 nt, Artificial Sequence
  Description of Artificial Sequence: Synthetic oligonucleotide
  Sense strand starting at position 1081 of SEQ ID NO: 1242444
agcuuugguuuagguauua

SEQ ID NO: 1348047 - RNA, 19 nt, Artificial Sequence
  Description of Artificial Sequence: Synthetic oligonucleotide
  Antisense strand to SEQ ID NO: 1348046
uaauaccuaaaccaaagcu

SEQ ID NO: 1348048 - RNA, 19 nt, Artificial Sequence
  Description of Artificial Sequence: Synthetic oligonucleotide
  Sense strand starting at position 1140 of SEQ ID NO: 1242444
aaggauagaugugauaaau

SEQ ID NO: 1348049 - RNA, 19 nt, Artificial Sequence
  Description of Artificial Sequence: Synthetic oligonucleotide
  Antisense strand to SEQ ID NO: 1348048
auuuaucacaucuauccuu

SEQ ID NO: 1348050 - RNA, 19 nt, Artificial Sequence
  Description of Artificial Sequence: Synthetic oligonucleotide
  Sense strand starting at position 1341 of SEQ ID NO: 1242444
gcuagaaauugaucccaaa

SEQ ID NO: 1348051 - RNA, 19 nt, Artificial Sequence
  Description of Artificial Sequence: Synthetic oligonucleotide
  Antisense strand to SEQ ID NO: 1348050
uuugggaucaauuucuagc

SEQ ID NO: 1348052 - RNA, 19 nt, Artificial Sequence
  Description of Artificial Sequence: Synthetic oligonucleotide
  Sense strand starting at position 1412 of SEQ ID NO: 1242444
gugauaccucaucaagcca

SEQ ID NO: 1348053 - RNA, 19 nt, Artificial Sequence
  Description of Artificial Sequence: Synthetic oligonucleotide
  Antisense strand to SEQ ID NO: 1348052
uggcuugaugagguaucac

SEQ ID NO: 1348054 - RNA, 19 nt, Artificial Sequence
  Description of Artificial Sequence: Synthetic oligonucleotide
  Sense strand starting at position 3527 of SEQ ID NO: 1242444
gcugacagauacugaagaa

SEQ ID NO: 1348055 - RNA, 19 nt, Artificial Sequence
  Description of Artificial Sequence: Synthetic oligonucleotide
  Antisense strand to SEQ ID NO: 1348054
uucuucaguaucugucagc

SEQ ID NO: 1348056 - RNA, 19 nt, Artificial Sequence
  Description of Artificial Sequence: Synthetic oligonucleotide
  Sense strand starting at position 3575 of SEQ ID NO: 1242444
gccuuuacgauguguacua

SEQ ID NO: 1348057 - RNA, 19 nt, Artificial Sequence
  Description of Artificial Sequence: Synthetic oligonucleotide
  Antisense strand to SEQ ID NO: 1348056
uaguacacaucguaaaggc

SEQ ID NO: 1348058 - RNA, 19 nt, Artificial Sequence
  Description of Artificial Sequence: Synthetic oligonucleotide
  Sense strand starting at position 3586 of SEQ ID NO: 1242444
guguacuaguggcagcaaa

SEQ ID NO: 1348059 - RNA, 19 nt, Artificial Sequence
  Description of Artificial Sequence: Synthetic oligonucleotide
  Antisense strand to SEQ ID NO: 1348058
uuugcugccacuaguacac

SEQ ID NO: 1348060 - RNA, 19 nt, Artificial Sequence
  Description of Artificial Sequence: Synthetic oligonucleotide
  Sense strand starting at position 3704 of SEQ ID NO: 1242444
uggaguuauuaacgccacu

SEQ ID NO: 1348061 - RNA, 19 nt, Artificial Sequence
  Description of Artificial Sequence: Synthetic oligonucleotide
  Antisense strand to SEQ ID NO: 1348060
aguggcguuaauaacucca

SEQ ID NO: 1348062 - RNA, 19 nt, Artificial Sequence
  Description of Artificial Sequence: Synthetic oligonucleotide
  Sense strand starting at position 3734 of SEQ ID NO: 1242444
aguggaaguuauuaagagu

SEQ ID NO: 1348063 - RNA, 19 nt, Artificial Sequence
  Description of Artificial Sequence: Synthetic oligonucleotide
  Antisense strand to SEQ ID NO: 1348062
acucuuaauaacuuccacu

SEQ ID NO: 1348064 - RNA, 19 nt, Artificial Sequence
  Description of Artificial Sequence: Synthetic oligonucleotide
  Sense strand starting at position 3737 of SEQ ID NO: 1242444
ggaaguuauuaagagugga

SEQ ID NO: 1348065 - RNA, 19 nt, Artificial Sequence
  Description of Artificial Sequence: Synthetic oligonucleotide
  Antisense strand to SEQ ID NO: 1348064
uccacucuuaauaacuucc

SEQ ID NO: 1348066 - RNA, 19 nt, Artificial Sequence
  Description of Artificial Sequence: Synthetic oligonucleotide
  Sense strand starting at position 3740 of SEQ ID NO: 1242444
aguuauuaagaguggaggu

SEQ ID NO: 1348067 - RNA, 19 nt, Artificial Sequence
  Description of Artificial Sequence: Synthetic oligonucleotide
  Antisense strand to SEQ ID NO: 1348066
accuccacucuuaauaacu

SEQ ID NO: 1348068 - RNA, 19 nt, Artificial Sequence
  Description of Artificial Sequence: Synthetic oligonucleotide
  Sense strand starting at position 3741 of SEQ ID NO: 1242444
guuauuaagaguggagguu

SEQ ID NO: 1348069 - RNA, 19 nt, Artificial Sequence
  Description of Artificial Sequence: Synthetic oligonucleotide
  Antisense strand to SEQ ID NO: 1348068
aaccuccacucuuaauaac

SEQ ID NO: 1348070 - RNA, 19 nt, Artificial Sequence
  Description of Artificial Sequence: Synthetic oligonucleotide
  Sense strand starting at position 243 of SEQ ID NO: 1242445
acucaagaguacuucuguu

SEQ ID NO: 1348071 - RNA, 19 nt, Artificial Sequence
  Description of Artificial Sequence: Synthetic oligonucleotide
  Antisense strand to SEQ ID NO: 1348070
aacagaaguacucuugagu

SEQ ID NO: 1348072 - RNA, 19 nt, Artificial Sequence
  Description of Artificial Sequence: Synthetic oligonucleotide
  Sense strand starting at position 268 of SEQ ID NO: 1242445
aucuccuaacugggaguua

SEQ ID NO: 1348073 - RNA, 19 nt, Artificial Sequence
  Description of Artificial Sequence: Synthetic oligonucleotide
  Antisense strand to SEQ ID NO: 1348072
uaacucccaguuaggagau

SEQ ID NO: 1348074 - RNA, 19 nt, Artificial Sequence
  Description of Artificial Sequence: Synthetic oligonucleotide
  Sense strand starting at position 294 of SEQ ID NO: 1242445
cucugacucugcucuugua

SEQ ID NO: 1348075 - RNA, 19 nt, Artificial Sequence
  Description of Artificial Sequence: Synthetic oligonucleotide
  Antisense strand to SEQ ID NO: 1348074
uacaagagcagagucagag

SEQ ID NO: 1348076 - RNA, 19 nt, Artificial Sequence
  Description of Artificial Sequence: Synthetic oligonucleotide
  Sense strand starting at position 303 of SEQ ID NO: 1242445
ugcucuuguagcugucaga

SEQ ID NO: 1348077 - RNA, 19 nt, Artificial Sequence
  Description of Artificial Sequence: Synthetic oligonucleotide
  Antisense strand to SEQ ID NO: 1348076
ucugacagcuacaagagca

SEQ ID NO: 1348078 - RNA, 19 nt, Artificial Sequence
  Description of Artificial Sequence: Synthetic oligonucleotide
  Sense strand starting at position 306 of SEQ ID NO: 1242445
ucuuguagcugucagagca

SEQ ID NO: 1348079 - RNA, 19 nt, Artificial Sequence
  Description of Artificial Sequence: Synthetic oligonucleotide
  Antisense strand to SEQ ID NO: 1348078
ugcucugacagcuacaaga

SEQ ID NO: 1348080 - RNA, 19 nt, Artificial Sequence
  Description of Artificial Sequence: Synthetic oligonucleotide
  Sense strand starting at position 443 of SEQ ID NO: 1242445
uguucucucuuucggcaau

SEQ ID NO: 1348081 - RNA, 19 nt, Artificial Sequence
  Description of Artificial Sequence: Synthetic oligonucleotide
  Antisense strand to SEQ ID NO: 1348080
auugccgaaagagagaaca

SEQ ID NO: 1348082 - RNA, 19 nt, Artificial Sequence
  Description of Artificial Sequence: Synthetic oligonucleotide
  Sense strand starting at position 444 of SEQ ID NO: 1242445
guucucucuuucggcaauu

SEQ ID NO: 1348083 - RNA, 19 nt, Artificial Sequence
  Description of Artificial Sequence: Synthetic oligonucleotide
  Antisense strand to SEQ ID NO: 1348082
aauugccgaaagagagaac

SEQ ID NO: 1348084 - RNA, 19 nt, Artificial Sequence
  Description of Artificial Sequence: Synthetic oligonucleotide
  Sense strand starting at position 579 of SEQ ID NO: 1242445
guaagagcucacuaaaugu

SEQ ID NO: 1348085 - RNA, 19 nt, Artificial Sequence
  Description of Artificial Sequence: Synthetic oligonucleotide
  Antisense strand to SEQ ID NO: 1348084
acauuuagugagcucuuac

SEQ ID NO: 1348086 - RNA, 19 nt, Artificial Sequence
  Description of Artificial Sequence: Synthetic oligonucleotide
  Sense strand starting at position 859 of SEQ ID NO: 1242445
ccaagaucucaacagugcu

SEQ ID NO: 1348087 - RNA, 19 nt, Artificial Sequence
  Description of Artificial Sequence: Synthetic oligonucleotide
  Antisense strand to SEQ ID NO: 1348086
agcacuguugagaucuugg

SEQ ID NO: 1348088 - RNA, 19 nt, Artificial Sequence
  Description of Artificial Sequence: Synthetic oligonucleotide
  Sense strand starting at position 862 of SEQ ID NO: 1242445
agaucucaacagugcuaaa

SEQ ID NO: 1348089 - RNA, 19 nt, Artificial Sequence
  Description of Artificial Sequence: Synthetic oligonucleotide
  Antisense strand to SEQ ID NO: 1348088
uuuagcacuguugagaucu

SEQ ID NO: 1348090 - RNA, 19 nt, Artificial Sequence
  Description of Artificial Sequence: Synthetic oligonucleotide
  Sense strand starting at position 882 of SEQ ID NO: 1242445
gcauacauggauuaucuua

SEQ ID NO: 1348091 - RNA, 19 nt, Artificial Sequence
  Description of Artificial Sequence: Synthetic oligonucleotide
  Antisense strand to SEQ ID NO: 1348090
uaagauaauccauguaugc

SEQ ID NO: 1348092 - RNA, 19 nt, Artificial Sequence
  Description of Artificial Sequence: Synthetic oligonucleotide
  Sense strand starting at position 921 of SEQ ID NO: 1242445
agagguaagugcuaucauu

SEQ ID NO: 1348093 - RNA, 19 nt, Artificial Sequence
  Description of Artificial Sequence: Synthetic oligonucleotide
  Antisense strand to SEQ ID NO: 1348092
aaugauagcacuuaccucu

SEQ ID NO: 1348094 - RNA, 19 nt, Artificial Sequence
  Description of Artificial Sequence: Synthetic oligonucleotide
  Sense strand starting at position 974 of SEQ ID NO: 1242445
agaauaacuugcucaaggu

SEQ ID NO: 1348095 - RNA, 19 nt, Artificial Sequence
  Description of Artificial Sequence: Synthetic oligonucleotide
  Antisense strand to SEQ ID NO: 1348094
accuugagcaaguuauucu

SEQ ID NO: 1348096 - RNA, 19 nt, Artificial Sequence
  Description of Artificial Sequence: Synthetic oligonucleotide
  Sense strand starting at position 1017 of SEQ ID NO: 1242445
gccugaauccagcaaagcu

SEQ ID NO: 1348097 - RNA, 19 nt, Artificial Sequence
  Description of Artificial Sequence: Synthetic oligonucleotide
  Antisense strand to SEQ ID NO: 1348096
agcuuugcuggauucaggc

SEQ ID NO: 1348098 - RNA, 19 nt, Artificial Sequence
  Description of Artificial Sequence: Synthetic oligonucleotide
  Sense strand starting at position 1059 of SEQ ID NO: 1242445
caguucgagcccugcaaua

SEQ ID NO: 1348099 - RNA, 19 nt, Artificial Sequence
  Description of Artificial Sequence: Synthetic oligonucleotide
  Antisense strand to SEQ ID NO: 1348098
uauugcagggcucgaacug

SEQ ID NO: 1348100 - RNA, 19 nt, Artificial Sequence
  Description of Artificial Sequence: Synthetic oligonucleotide
  Sense strand starting at position 1061 of SEQ ID NO: 1242445
guucgagcccugcaauacu

SEQ ID NO: 1348101 - RNA, 19 nt, Artificial Sequence
  Description of Artificial Sequence: Synthetic oligonucleotide
  Antisense strand to SEQ ID NO: 1348100
aguauugcagggcucgaac

SEQ ID NO: 1348102 - RNA, 19 nt, Artificial Sequence
  Description of Artificial Sequence: Synthetic oligonucleotide
  Sense strand starting at position 1077 of SEQ ID NO: 1242445
acuacagucuaugaaugau

SEQ ID NO: 1348103 - RNA, 19 nt, Artificial Sequence
  Description of Artificial Sequence: Synthetic oligonucleotide
  Antisense strand to SEQ ID NO: 1348102
aucauucauagacuguagu

SEQ ID NO: 1348104 - RNA, 19 nt, Artificial Sequence
  Description of Artificial Sequence: Synthetic oligonucleotide
  Sense strand starting at position 1242 of SEQ ID NO: 1242445
aagugauauuaaggugugu

SEQ ID NO: 1348105 - RNA, 19 nt, Artificial Sequence
  Description of Artificial Sequence: Synthetic oligonucleotide
  Antisense strand to SEQ ID NO: 1348104
acacaccuuaauaucacuu

SEQ ID NO: 1348106 - RNA, 19 nt, Artificial Sequence
  Description of Artificial Sequence: Synthetic oligonucleotide
  Sense strand starting at position 1276 of SEQ ID NO: 1242445
agaaguggcuuaugacaau

SEQ ID NO: 1348107 - RNA, 19 nt, Artificial Sequence
  Description of Artificial Sequence: Synthetic oligonucleotide
  Antisense strand to SEQ ID NO: 1348106
auugucauaagccacuucu

SEQ ID NO: 1348108 - RNA, 19 nt, Artificial Sequence
  Description of Artificial Sequence: Synthetic oligonucleotide
  Sense strand starting at position 1279 of SEQ ID NO: 1242445
aguggcuuaugacaauaca

SEQ ID NO: 1348109 - RNA, 19 nt, Artificial Sequence
  Description of Artificial Sequence: Synthetic oligonucleotide
  Antisense strand to SEQ ID NO: 1348108
uguauugucauaagccacu

SEQ ID NO: 1348110 - RNA, 19 nt, Artificial Sequence
  Description of Artificial Sequence: Synthetic oligonucleotide
  Sense strand starting at position 1282 of SEQ ID NO: 1242445
ggcuuaugacaauacagcu

SEQ ID NO: 1348111 - RNA, 19 nt, Artificial Sequence
  Description of Artificial Sequence: Synthetic oligonucleotide
  Antisense strand to SEQ ID NO: 1348110
agcuguauugucauaagcc

SEQ ID NO: 1348112 - RNA, 19 nt, Artificial Sequence
  Description of Artificial Sequence: Synthetic oligonucleotide
  Sense strand starting at position 1295 of SEQ ID NO: 1242445
acagcuuugguuuagguau

SEQ ID NO: 1348113 - RNA, 19 nt, Artificial Sequence
  Description of Artificial Sequence: Synthetic oligonucleotide
  Antisense strand to SEQ ID NO: 1348112
auaccuaaaccaaagcugu

SEQ ID NO: 1348114 - RNA, 19 nt, Artificial Sequence
  Description of Artificial Sequence: Synthetic oligonucleotide
  Sense strand starting at position 1297 of SEQ ID NO: 1242445
agcuuugguuuagguauua

SEQ ID NO: 1348115 - RNA, 19 nt, Artificial Sequence
  Description of Artificial Sequence: Synthetic oligonucleotide
  Antisense strand to SEQ ID NO: 1348114
uaauaccuaaaccaaagcu

SEQ ID NO: 1348116 - RNA, 19 nt, Artificial Sequence
  Description of Artificial Sequence: Synthetic oligonucleotide
  Sense strand starting at position 1356 of SEQ ID NO: 1242445
aaggauagaugugauaaau

SEQ ID NO: 1348117 - RNA, 19 nt, Artificial Sequence
  Description of Artificial Sequence: Synthetic oligonucleotide
  Antisense strand to SEQ ID NO: 1348116
auuuaucacaucuauccuu

SEQ ID NO: 1348118 - RNA, 19 nt, Artificial Sequence
  Description of Artificial Sequence: Synthetic oligonucleotide
  Sense strand starting at position 1557 of SEQ ID NO: 1242445
gcuagaaauugaucccaaa

SEQ ID NO: 1348119 - RNA, 19 nt, Artificial Sequence
  Description of Artificial Sequence: Synthetic oligonucleotide
  Antisense strand to SEQ ID NO: 1348118
uuugggaucaauuucuagc

SEQ ID NO: 1348120 - RNA, 19 nt, Artificial Sequence
  Description of Artificial Sequence: Synthetic oligonucleotide
  Sense strand starting at position 1628 of SEQ ID NO: 1242445
gugauaccucaucaagcca

SEQ ID NO: 1348121 - RNA, 19 nt, Artificial Sequence
  Description of Artificial Sequence: Synthetic oligonucleotide
  Antisense strand to SEQ ID NO: 1348120
uggcuugaugagguaucac

SEQ ID NO: 1348122 - RNA, 19 nt, Artificial Sequence
  Description of Artificial Sequence: Synthetic oligonucleotide
  Sense strand starting at position 3743 of SEQ ID NO: 1242445
gcugacagauacugaagaa

SEQ ID NO: 1348123 - RNA, 19 nt, Artificial Sequence
  Description of Artificial Sequence: Synthetic oligonucleotide
  Antisense strand to SEQ ID NO: 1348122
uucuucaguaucugucagc

SEQ ID NO: 1348124 - RNA, 19 nt, Artificial Sequence
  Description of Artificial Sequence: Synthetic oligonucleotide
  Sense strand starting at position 3791 of SEQ ID NO: 1242445
gccuuuacgauguguacua

SEQ ID NO: 1348125 - RNA, 19 nt, Artificial Sequence
  Description of Artificial Sequence: Synthetic oligonucleotide
  Antisense strand to SEQ ID NO: 1348124
uaguacacaucguaaaggc

SEQ ID NO: 1348126 - RNA, 19 nt, Artificial Sequence
  Description of Artificial Sequence: Synthetic oligonucleotide
  Sense strand starting at position 3802 of SEQ ID NO: 1242445
guguacuaguggcagcaaa

SEQ ID NO: 1348127 - RNA, 19 nt, Artificial Sequence
  Description of Artificial Sequence: Synthetic oligonucleotide
  Antisense strand to SEQ ID NO: 1348126
uuugcugccacuaguacac

SEQ ID NO: 1348128 - RNA, 19 nt, Artificial Sequence
  Description of Artificial Sequence: Synthetic oligonucleotide
  Sense strand starting at position 3920 of SEQ ID NO: 1242445
uggaguuauuaacgccacu

SEQ ID NO: 1348129 - RNA, 19 nt, Artificial Sequence
  Description of Artificial Sequence: Synthetic oligonucleotide
  Antisense strand to SEQ ID NO: 1348128
aguggcguuaauaacucca

SEQ ID NO: 1348130 - RNA, 19 nt, Artificial Sequence
  Description of Artificial Sequence: Synthetic oligonucleotide
  Sense strand starting at position 3950 of SEQ ID NO: 1242445
aguggaaguuauuaagagu

SEQ ID NO: 1348131 - RNA, 19 nt, Artificial Sequence
  Description of Artificial Sequence: Synthetic oligonucleotide
  Antisense strand to SEQ ID NO: 1348130
acucuuaauaacuuccacu

SEQ ID NO: 1348132 - RNA, 19 nt, Artificial Sequence
  Description of Artificial Sequence: Synthetic oligonucleotide
  Sense strand starting at position 3953 of SEQ ID NO: 1242445
ggaaguuauuaagagugga

SEQ ID NO: 1348133 - RNA, 19 nt, Artificial Sequence
  Description of Artificial Sequence: Synthetic oligonucleotide
  Antisense strand to SEQ ID NO: 1348132
uccacucuuaauaacuucc

SEQ ID NO: 1348134 - RNA, 19 nt, Artificial Sequence
  Description of Artificial Sequence: Synthetic oligonucleotide
  Sense strand starting at position 3956 of SEQ ID NO: 1242445
aguuauuaagaguggaggu

SEQ ID NO: 1348135 - RNA, 19 nt, Artificial Sequence
  Description of Artificial Sequence: Synthetic oligonucleotide
  Antisense strand to SEQ ID NO: 1348134
accuccacucuuaauaacu

SEQ ID NO: 1348136 - RNA, 19 nt, Artificial Sequence
  Description of Artificial Sequence: Synthetic oligonucleotide
  Sense strand starting at position 3957 of SEQ ID NO: 1242445
guuauuaagaguggagguu

SEQ ID NO: 1348137 - RNA, 19 nt, Artificial Sequence
  Description of Artificial Sequence: Synthetic oligonucleotide
  Antisense strand to SEQ ID NO: 1348136
aaccuccacucuuaauaac

SEQ ID NO: 1348138 - RNA, 19 nt, Artificial Sequence
  Description of Artificial Sequence: Synthetic oligonucleotide
  Sense strand starting at position 5 of SEQ ID NO: 1242446
guaagaauucagugaaugg

SEQ ID NO: 1348139 - RNA, 19 nt, Artificial Sequence
  Description of Artificial Sequence: Synthetic oligonucleotide
  Antisense strand to SEQ ID NO: 1348138
ccauucacugaauucuuac

SEQ ID NO: 1348140 - RNA, 19 nt, Artificial Sequence
  Description of Artificial Sequence: Synthetic oligonucleotide
  Sense strand starting at position 212 of SEQ ID NO: 1242446
agacgugacuugcccgauu

SEQ ID NO: 1348141 - RNA, 19 nt, Artificial Sequence
  Description of Artificial Sequence: Synthetic oligonucleotide
  Antisense strand to SEQ ID NO: 1348140
aaucgggcaagucacgucu

SEQ ID NO: 1348142 - RNA, 19 nt, Artificial Sequence
  Description of Artificial Sequence: Synthetic oligonucleotide
  Sense strand starting at position 278 of SEQ ID NO: 1242446
uguuuaucucugcguggga

SEQ ID NO: 1348143 - RNA, 19 nt, Artificial Sequence
  Description of Artificial Sequence: Synthetic oligonucleotide
  Antisense strand to SEQ ID NO: 1348142
ucccacgcagagauaaaca

SEQ ID NO: 1348144 - RNA, 19 nt, Artificial Sequence
  Description of Artificial Sequence: Synthetic oligonucleotide
  Sense strand starting at position 279 of SEQ ID NO: 1242446
guuuaucucugcgugggaa

SEQ ID NO: 1348145 - RNA, 19 nt, Artificial Sequence
  Description of Artificial Sequence: Synthetic oligonucleotide
  Antisense strand to SEQ ID NO: 1348144
uucccacgcagagauaaac

SEQ ID NO: 1348146 - RNA, 19 nt, Artificial Sequence
  Description of Artificial Sequence: Synthetic oligonucleotide
  Sense strand starting at position 280 of SEQ ID NO: 1242446
uuuaucucugcgugggaau

SEQ ID NO: 1348147 - RNA, 19 nt, Artificial Sequence
  Description of Artificial Sequence: Synthetic oligonucleotide
  Antisense strand to SEQ ID NO: 1348146
auucccacgcagagauaaa

SEQ ID NO: 1348148 - RNA, 19 nt, Artificial Sequence
  Description of Artificial Sequence: Synthetic oligonucleotide
  Sense strand starting at position 281 of SEQ ID NO: 1242446
uuaucucugcgugggaauu

SEQ ID NO: 1348149 - RNA, 19 nt, Artificial Sequence
  Description of Artificial Sequence: Synthetic oligonucleotide
  Antisense strand to SEQ ID NO: 1348148
aauucccacgcagagauaa

SEQ ID NO: 1348150 - RNA, 19 nt, Artificial Sequence
  Description of Artificial Sequence: Synthetic oligonucleotide
  Sense strand starting at position 301 of SEQ ID NO: 1242446
guggcacguuguguauuaa

SEQ ID NO: 1348151 - RNA, 19 nt, Artificial Sequence
  Description of Artificial Sequence: Synthetic oligonucleotide
  Antisense strand to SEQ ID NO: 1348150
uuaauacacaacgugccac

SEQ ID NO: 1348152 - RNA, 19 nt, Artificial Sequence
  Description of Artificial Sequence: Synthetic oligonucleotide
  Sense strand starting at position 313 of SEQ ID NO: 1242446
guauuaacugcgcagcauu

SEQ ID NO: 1348153 - RNA, 19 nt, Artificial Sequence
  Description of Artificial Sequence: Synthetic oligonucleotide
  Antisense strand to SEQ ID NO: 1348152
aaugcugcgcaguuaauac

SEQ ID NO: 1348154 - RNA, 19 nt, Artificial Sequence
  Description of Artificial Sequence: Synthetic oligonucleotide
  Sense strand starting at position 320 of SEQ ID NO: 1242446
cugcgcagcauuugugaaa

SEQ ID NO: 1348155 - RNA, 19 nt, Artificial Sequence
  Description of Artificial Sequence: Synthetic oligonucleotide
  Antisense strand to SEQ ID NO: 1348154
uuucacaaaugcugcgcag

SEQ ID NO: 1348156 - RNA, 19 nt, Artificial Sequence
  Description of Artificial Sequence: Synthetic oligonucleotide
  Sense strand starting at position 323 of SEQ ID NO: 1242446
cgcagcauuugugaaaguu

SEQ ID NO: 1348157 - RNA, 19 nt, Artificial Sequence
  Description of Artificial Sequence: Synthetic oligonucleotide
  Antisense strand to SEQ ID NO: 1348156
aacuuucacaaaugcugcg

SEQ ID NO: 1348158 - RNA, 19 nt, Artificial Sequence
  Description of Artificial Sequence: Synthetic oligonucleotide
  Sense strand starting at position 1018 of SEQ ID NO: 1242446
gguacagacuuucccgaaa

SEQ ID NO: 1348159 - RNA, 19 nt, Artificial Sequence
  Description of Artificial Sequence: Synthetic oligonucleotide
  Antisense strand to SEQ ID NO: 1348158
uuucgggaaagucuguacc

SEQ ID NO: 1348160 - RNA, 19 nt, Artificial Sequence
  Description of Artificial Sequence: Synthetic oligonucleotide
  Sense strand starting at position 1021 of SEQ ID NO: 1242446
acagacuuucccgaaaugu

SEQ ID NO: 1348161 - RNA, 19 nt, Artificial Sequence
  Description of Artificial Sequence: Synthetic oligonucleotide
  Antisense strand to SEQ ID NO: 1348160
acauuucgggaaagucugu

SEQ ID NO: 1348162 - RNA, 19 nt, Artificial Sequence
  Description of Artificial Sequence: Synthetic oligonucleotide
  Sense strand starting at position 2462 of SEQ ID NO: 1242446
cgguuucagccaggcagau

SEQ ID NO: 1348163 - RNA, 19 nt, Artificial Sequence
  Description of Artificial Sequence: Synthetic oligonucleotide
  Antisense strand to SEQ ID NO: 1348162
aucugccuggcugaaaccg

SEQ ID NO: 1348164 - RNA, 19 nt, Artificial Sequence
  Description of Artificial Sequence: Synthetic oligonucleotide
  Sense strand starting at position 2475 of SEQ ID NO: 1242446
gcagauguuucagcaguug

SEQ ID NO: 1348165 - RNA, 19 nt, Artificial Sequence
  Description of Artificial Sequence: Synthetic oligonucleotide
  Antisense strand to SEQ ID NO: 1348164
caacugcugaaacaucugc

SEQ ID NO: 1348166 - RNA, 19 nt, Artificial Sequence
  Description of Artificial Sequence: Synthetic oligonucleotide
  Sense strand starting at position 2560 of SEQ ID NO: 1242446
ugaagaugcugacuacagu

SEQ ID NO: 1348167 - RNA, 19 nt, Artificial Sequence
  Description of Artificial Sequence: Synthetic oligonucleotide
  Antisense strand to SEQ ID NO: 1348166
acuguagucagcaucuuca

SEQ ID NO: 1348168 - RNA, 19 nt, Artificial Sequence
  Description of Artificial Sequence: Synthetic oligonucleotide
  Sense strand starting at position 2561 of SEQ ID NO: 1242446
gaagaugcugacuacaguu

SEQ ID NO: 1348169 - RNA, 19 nt, Artificial Sequence
  Description of Artificial Sequence: Synthetic oligonucleotide
  Antisense strand to SEQ ID NO: 1348168
aacuguagucagcaucuuc

SEQ ID NO: 1348170 - RNA, 19 nt, Artificial Sequence
  Description of Artificial Sequence: Synthetic oligonucleotide
  Sense strand starting at position 2590 of SEQ ID NO: 1242446
gcucucagcccucgagaaa

SEQ ID NO: 1348171 - RNA, 19 nt, Artificial Sequence
  Description of Artificial Sequence: Synthetic oligonucleotide
  Antisense strand to SEQ ID NO: 1348170
uuucucgagggcugagagc

SEQ ID NO: 1348172 - RNA, 19 nt, Artificial Sequence
  Description of Artificial Sequence: Synthetic oligonucleotide
  Sense strand starting at position 2704 of SEQ ID NO: 1242446
cuggaacccucggcuagaa

SEQ ID NO: 1348173 - RNA, 19 nt, Artificial Sequence
  Description of Artificial Sequence: Synthetic oligonucleotide
  Antisense strand to SEQ ID NO: 1348172
uucuagccgaggguuccag

SEQ ID NO: 1348174 - RNA, 19 nt, Artificial Sequence
  Description of Artificial Sequence: Synthetic oligonucleotide
  Sense strand starting at position 2836 of SEQ ID NO: 1242446
ggaggccugucuugaucaa

SEQ ID NO: 1348175 - RNA, 19 nt, Artificial Sequence
  Description of Artificial Sequence: Synthetic oligonucleotide
  Antisense strand to SEQ ID NO: 1348174
uugaucaagacaggccucc

SEQ ID NO: 1348176 - RNA, 19 nt, Artificial Sequence
  Description of Artificial Sequence: Synthetic oligonucleotide
  Sense strand starting at position 2837 of SEQ ID NO: 1242446
gaggccugucuugaucaaa

SEQ ID NO: 1348177 - RNA, 19 nt, Artificial Sequence
  Description of Artificial Sequence: Synthetic oligonucleotide
  Antisense strand to SEQ ID NO: 1348176
uuugaucaagacaggccuc

SEQ ID NO: 1348178 - RNA, 19 nt, Artificial Sequence
  Description of Artificial Sequence: Synthetic oligonucleotide
  Sense strand starting at position 2905 of SEQ ID NO: 1242446
uuccgaauauuguacacuu

SEQ ID NO: 1348179 - RNA, 19 nt, Artificial Sequence
  Description of Artificial Sequence: Synthetic oligonucleotide
  Antisense strand to SEQ ID NO: 1348178
aaguguacaauauucggaa

SEQ ID NO: 1348180 - RNA, 19 nt, Artificial Sequence
  Description of Artificial Sequence: Synthetic oligonucleotide
  Sense strand starting at position 3045 of SEQ ID NO: 1242446
uggaacaauuccugaaauu

SEQ ID NO: 1348181 - RNA, 19 nt, Artificial Sequence
  Description of Artificial Sequence: Synthetic oligonucleotide
  Antisense strand to SEQ ID NO: 1348180
aauuucaggaauuguucca

SEQ ID NO: 1348182 - RNA, 19 nt, Artificial Sequence
  Description of Artificial Sequence: Synthetic oligonucleotide
  Sense strand starting at position 3054 of SEQ ID NO: 1242446
uccugaaauuaagaaaugu

SEQ ID NO: 1348183 - RNA, 19 nt, Artificial Sequence
  Description of Artificial Sequence: Synthetic oligonucleotide
  Antisense strand to SEQ ID NO: 1348182
acauuucuuaauuucagga

SEQ ID NO: 1348184 - RNA, 19 nt, Artificial Sequence
  Description of Artificial Sequence: Synthetic oligonucleotide
  Sense strand starting at position 3080 of SEQ ID NO: 1242446
cagaaaugaucaucugguu

SEQ ID NO: 1348185 - RNA, 19 nt, Artificial Sequence
  Description of Artificial Sequence: Synthetic oligonucleotide
  Antisense strand to SEQ ID NO: 1348184
aaccagaugaucauuucug

SEQ ID NO: 1348186 - RNA, 19 nt, Artificial Sequence
  Description of Artificial Sequence: Synthetic oligonucleotide
  Sense strand starting at position 3085 of SEQ ID NO: 1242446
augaucaucugguuuauga

SEQ ID NO: 1348187 - RNA, 19 nt, Artificial Sequence
  Description of Artificial Sequence: Synthetic oligonucleotide
  Antisense strand to SEQ ID NO: 1348186
ucauaaaccagaugaucau

SEQ ID NO: 1348188 - RNA, 19 nt, Artificial Sequence
  Description of Artificial Sequence: Synthetic oligonucleotide
  Sense strand starting at position 3095 of SEQ ID NO: 1242446
gguuuaugaaaggguccuu

SEQ ID NO: 1348189 - RNA, 19 nt, Artificial Sequence
  Description of Artificial Sequence: Synthetic oligonucleotide
  Antisense strand to SEQ ID NO: 1348188
aaggacccuuucauaaacc

SEQ ID NO: 1348190 - RNA, 19 nt, Artificial Sequence
  Description of Artificial Sequence: Synthetic oligonucleotide
  Sense strand starting at position 3137 of SEQ ID NO: 1242446
aguccuguuggagaagcua

SEQ ID NO: 1348191 - RNA, 19 nt, Artificial Sequence
  Description of Artificial Sequence: Synthetic oligonucleotide
  Antisense strand to SEQ ID NO: 1348190
uagcuucuccaacaggacu

SEQ ID NO: 1348192 - RNA, 19 nt, Artificial Sequence
  Description of Artificial Sequence: Synthetic oligonucleotide
  Sense strand starting at position 3224 of SEQ ID NO: 1242446
ggaccacucagaggaguuu

SEQ ID NO: 1348193 - RNA, 19 nt, Artificial Sequence
  Description of Artificial Sequence: Synthetic oligonucleotide
  Antisense strand to SEQ ID NO: 1348192
aaacuccucugaguggucc

SEQ ID NO: 1348194 - RNA, 19 nt, Artificial Sequence
  Description of Artificial Sequence: Synthetic oligonucleotide
  Sense strand starting at position 3460 of SEQ ID NO: 1242446
cagccuggagaauggauua

SEQ ID NO: 1348195 - RNA, 19 nt, Artificial Sequence
  Description of Artificial Sequence: Synthetic oligonucleotide
  Antisense strand to SEQ ID NO: 1348194
uaauccauucuccaggcug

SEQ ID NO: 1348196 - RNA, 19 nt, Artificial Sequence
  Description of Artificial Sequence: Synthetic oligonucleotide
  Sense strand starting at position 3555 of SEQ ID NO: 1242446
agaggaagcguguacuaau

SEQ ID NO: 1348197 - RNA, 19 nt, Artificial Sequence
  Description of Artificial Sequence: Synthetic oligonucleotide
  Antisense strand to SEQ ID NO: 1348196
auuaguacacgcuuccucu

SEQ ID NO: 1348198 - RNA, 19 nt, Artificial Sequence
  Description of Artificial Sequence: Synthetic oligonucleotide
  Sense strand starting at position 3596 of SEQ ID NO: 1242446
cuucccauuccuuggcgaa

SEQ ID NO: 1348199 - RNA, 19 nt, Artificial Sequence
  Description of Artificial Sequence: Synthetic oligonucleotide
  Antisense strand to SEQ ID NO: 1348198
uucgccaaggaaugggaag

SEQ ID NO: 1348200 - RNA, 19 nt, Artificial Sequence
  Description of Artificial Sequence: Synthetic oligonucleotide
  Sense strand starting at position 3598 of SEQ ID NO: 1242446
ucccauuccuuggcgaagu

SEQ ID NO: 1348201 - RNA, 19 nt, Artificial Sequence
  Description of Artificial Sequence: Synthetic oligonucleotide
  Antisense strand to SEQ ID NO: 1348200
acuucgccaaggaauggga

SEQ ID NO: 1348202 - RNA, 19 nt, Artificial Sequence
  Description of Artificial Sequence: Synthetic oligonucleotide
  Sense strand starting at position 3723 of SEQ ID NO: 1242446
gucuguuagaggcagggau

SEQ ID NO: 1348203 - RNA, 19 nt, Artificial Sequence
  Description of Artificial Sequence: Synthetic oligonucleotide
  Antisense strand to SEQ ID NO: 1348202
aucccugccucuaacagac

SEQ ID NO: 1348204 - RNA, 19 nt, Artificial Sequence
  Description of Artificial Sequence: Synthetic oligonucleotide
  Sense strand starting at position 3752 of SEQ ID NO: 1242446
aggagaguuucccaucagu

SEQ ID NO: 1348205 - RNA, 19 nt, Artificial Sequence
  Description of Artificial Sequence: Synthetic oligonucleotide
  Antisense strand to SEQ ID NO: 1348204
acugaugggaaacucuccu

SEQ ID NO: 1348206 - RNA, 19 nt, Artificial Sequence
  Description of Artificial Sequence: Synthetic oligonucleotide
  Sense strand starting at position 3829 of SEQ ID NO: 1242446
cccuuugucuugcuugaag

SEQ ID NO: 1348207 - RNA, 19 nt, Artificial Sequence
  Description of Artificial Sequence: Synthetic oligonucleotide
  Antisense strand to SEQ ID NO: 1348206
cuucaagcaagacaaaggg

SEQ ID NO: 1348208 - RNA, 19 nt, Artificial Sequence
  Description of Artificial Sequence: Synthetic oligonucleotide
  Sense strand starting at position 3838 of SEQ ID NO: 1242446
uugcuugaagggugguuua

SEQ ID NO: 1348209 - RNA, 19 nt, Artificial Sequence
  Description of Artificial Sequence: Synthetic oligonucleotide
  Antisense strand to SEQ ID NO: 1348208
uaaaccacccuucaagcaa

SEQ ID NO: 1348210 - RNA, 19 nt, Artificial Sequence
  Description of Artificial Sequence: Synthetic oligonucleotide
  Sense strand starting at position 3951 of SEQ ID NO: 1242446
ccugguaugcugcucugua

SEQ ID NO: 1348211 - RNA, 19 nt, Artificial Sequence
  Description of Artificial Sequence: Synthetic oligonucleotide
  Antisense strand to SEQ ID NO: 1348210
uacagagcagcauaccagg

SEQ ID NO: 1348212 - RNA, 19 nt, Artificial Sequence
  Description of Artificial Sequence: Synthetic oligonucleotide
  Sense strand starting at position 3952 of SEQ ID NO: 1242446
cugguaugcugcucuguau

SEQ ID NO: 1348213 - RNA, 19 nt, Artificial Sequence
  Description of Artificial Sequence: Synthetic oligonucleotide
  Antisense strand to SEQ ID NO: 1348212
auacagagcagcauaccag

SEQ ID NO: 1348214 - RNA, 19 nt, Artificial Sequence
  Description of Artificial Sequence: Synthetic oligonucleotide
  Sense strand starting at position 3953 of SEQ ID NO: 1242446
ugguaugcugcucuguauu

SEQ ID NO: 1348215 - RNA, 19 nt, Artificial Sequence
  Description of Artificial Sequence: Synthetic oligonucleotide
  Antisense strand to SEQ ID NO: 1348214
aauacagagcagcauacca

SEQ ID NO: 1348216 - RNA, 19 nt, Artificial Sequence
  Description of Artificial Sequence: Synthetic oligonucleotide
  Sense strand starting at position 3956 of SEQ ID NO: 1242446
uaugcugcucuguauuuga

SEQ ID NO: 1348217 - RNA, 19 nt, Artificial Sequence
  Description of Artificial Sequence: Synthetic oligonucleotide
  Antisense strand to SEQ ID NO: 1348216
ucaaauacagagcagcaua

SEQ ID NO: 1348218 - RNA, 19 nt, Artificial Sequence
  Description of Artificial Sequence: Synthetic oligonucleotide
  Sense strand starting at position 23 of SEQ ID NO: 1242447
cucccucucugagucauga

SEQ ID NO: 1348219 - RNA, 19 nt, Artificial Sequence
  Description of Artificial Sequence: Synthetic oligonucleotide
  Antisense strand to SEQ ID NO: 1348218
ucaugacucagagagggag

SEQ ID NO: 1348220 - RNA, 19 nt, Artificial Sequence
  Description of Artificial Sequence: Synthetic oligonucleotide
  Sense strand starting at position 40 of SEQ ID NO: 1242447
gagguuucccaccgggaaa

SEQ ID NO: 1348221 - RNA, 19 nt, Artificial Sequence
  Description of Artificial Sequence: Synthetic oligonucleotide
  Antisense strand to SEQ ID NO: 1348220
uuucccggugggaaaccuc

SEQ ID NO: 1348222 - RNA, 19 nt, Artificial Sequence
  Description of Artificial Sequence: Synthetic oligonucleotide
  Sense strand starting at position 210 of SEQ ID NO: 1242447
cuuggaaagacuuacguca

SEQ ID NO: 1348223 - RNA, 19 nt, Artificial Sequence
  Description of Artificial Sequence: Synthetic oligonucleotide
  Antisense strand to SEQ ID NO: 1348222
ugacguaagucuuuccaag

SEQ ID NO: 1348224 - RNA, 19 nt, Artificial Sequence
  Description of Artificial Sequence: Synthetic oligonucleotide
  Sense strand starting at position 215 of SEQ ID NO: 1242447
aaagacuuacgucagugau

SEQ ID NO: 1348225 - RNA, 19 nt, Artificial Sequence
  Description of Artificial Sequence: Synthetic oligonucleotide
  Antisense strand to SEQ ID NO: 1348224
aucacugacguaagucuuu

SEQ ID NO: 1348226 - RNA, 19 nt, Artificial Sequence
  Description of Artificial Sequence: Synthetic oligonucleotide
  Sense strand starting at position 322 of SEQ ID NO: 1242447
ucuagugucccauauacaa

SEQ ID NO: 1348227 - RNA, 19 nt, Artificial Sequence
  Description of Artificial Sequence: Synthetic oligonucleotide
  Antisense strand to SEQ ID NO: 1348226
uuguauaugggacacuaga

SEQ ID NO: 1348228 - RNA, 19 nt, Artificial Sequence
  Description of Artificial Sequence: Synthetic oligonucleotide
  Sense strand starting at position 399 of SEQ ID NO: 1242447
acuuguuaucuugagauug

SEQ ID NO: 1348229 - RNA, 19 nt, Artificial Sequence
  Description of Artificial Sequence: Synthetic oligonucleotide
  Antisense strand to SEQ ID NO: 1348228
caaucucaagauaacaagu

SEQ ID NO: 1348230 - RNA, 19 nt, Artificial Sequence
  Description of Artificial Sequence: Synthetic oligonucleotide
  Sense strand starting at position 404 of SEQ ID NO: 1242447
uuaucuugagauuguaucu

SEQ ID NO: 1348231 - RNA, 19 nt, Artificial Sequence
  Description of Artificial Sequence: Synthetic oligonucleotide
  Antisense strand to SEQ ID NO: 1348230
agauacaaucucaagauaa

SEQ ID NO: 1348232 - RNA, 19 nt, Artificial Sequence
  Description of Artificial Sequence: Synthetic oligonucleotide
  Sense strand starting at position 409 of SEQ ID NO: 1242447
uugagauuguaucuaagga

SEQ ID NO: 1348233 - RNA, 19 nt, Artificial Sequence
  Description of Artificial Sequence: Synthetic oligonucleotide
  Antisense strand to SEQ ID NO: 1348232
uccuuagauacaaucucaa

SEQ ID NO: 1348234 - RNA, 19 nt, Artificial Sequence
  Description of Artificial Sequence: Synthetic oligonucleotide
  Sense strand starting at position 453 of SEQ ID NO: 1242447
gucacuacucuuuaggaca

SEQ ID NO: 1348235 - RNA, 19 nt, Artificial Sequence
  Description of Artificial Sequence: Synthetic oligonucleotide
  Antisense strand to SEQ ID NO: 1348234
uguccuaaagaguagugac

SEQ ID NO: 1348236 - RNA, 19 nt, Artificial Sequence
  Description of Artificial Sequence: Synthetic oligonucleotide
  Sense strand starting at position 549 of SEQ ID NO: 1242447
agaauacaguuugcuggaa

SEQ ID NO: 1348237 - RNA, 19 nt, Artificial Sequence
  Description of Artificial Sequence: Synthetic oligonucleotide
  Antisense strand to SEQ ID NO: 1348236
uuccagcaaacuguauucu

SEQ ID NO: 1348238 - RNA, 19 nt, Artificial Sequence
  Description of Artificial Sequence: Synthetic oligonucleotide
  Sense strand starting at position 550 of SEQ ID NO: 1242447
gaauacaguuugcuggaaa

SEQ ID NO: 1348239 - RNA, 19 nt, Artificial Sequence
  Description of Artificial Sequence: Synthetic oligonucleotide
  Antisense strand to SEQ ID NO: 1348238
uuuccagcaaacuguauuc

SEQ ID NO: 1348240 - RNA, 19 nt, Artificial Sequence
  Description of Artificial Sequence: Synthetic oligonucleotide
  Sense strand starting at position 553 of SEQ ID NO: 1242447
uacaguuugcuggaaauga

SEQ ID NO: 1348241 - RNA, 19 nt, Artificial Sequence
  Description of Artificial Sequence: Synthetic oligonucleotide
  Antisense strand to SEQ ID NO: 1348240
ucauuuccagcaaacugua

SEQ ID NO: 1348242 - RNA, 19 nt, Artificial Sequence
  Description of Artificial Sequence: Synthetic oligonucleotide
  Sense strand starting at position 622 of SEQ ID NO: 1242447
uaggguugauuugaauauu

SEQ ID NO: 1348243 - RNA, 19 nt, Artificial Sequence
  Description of Artificial Sequence: Synthetic oligonucleotide
  Antisense strand to SEQ ID NO: 1348242
aauauucaaaucaacccua

SEQ ID NO: 1348244 - RNA, 19 nt, Artificial Sequence
  Description of Artificial Sequence: Synthetic oligonucleotide
  Sense strand starting at position 684 of SEQ ID NO: 1242447
ucugguaaucuuugaacga

SEQ ID NO: 1348245 - RNA, 19 nt, Artificial Sequence
  Description of Artificial Sequence: Synthetic oligonucleotide
  Antisense strand to SEQ ID NO: 1348244
ucguucaaagauuaccaga

SEQ ID NO: 1348246 - RNA, 19 nt, Artificial Sequence
  Description of Artificial Sequence: Synthetic oligonucleotide
  Sense strand starting at position 688 of SEQ ID NO: 1242447
guaaucuuugaacgaggca

SEQ ID NO: 1348247 - RNA, 19 nt, Artificial Sequence
  Description of Artificial Sequence: Synthetic oligonucleotide
  Antisense strand to SEQ ID NO: 1348246
ugccucguucaaagauuac

SEQ ID NO: 1348248 - RNA, 19 nt, Artificial Sequence
  Description of Artificial Sequence: Synthetic oligonucleotide
  Sense strand starting at position 711 of SEQ ID NO: 1242447
cuuacagguucccuggaaa

SEQ ID NO: 1348249 - RNA, 19 nt, Artificial Sequence
  Description of Artificial Sequence: Synthetic oligonucleotide
  Antisense strand to SEQ ID NO: 1348248
uuuccagggaaccuguaag

SEQ ID NO: 1348250 - RNA, 19 nt, Artificial Sequence
  Description of Artificial Sequence: Synthetic oligonucleotide
  Sense strand starting at position 909 of SEQ ID NO: 1242447
gggacuagucuugggcaaa

SEQ ID NO: 1348251 - RNA, 19 nt, Artificial Sequence
  Description of Artificial Sequence: Synthetic oligonucleotide
  Antisense strand to SEQ ID NO: 1348250
uuugcccaagacuaguccc

SEQ ID NO: 1348252 - RNA, 19 nt, Artificial Sequence
  Description of Artificial Sequence: Synthetic oligonucleotide
  Sense strand starting at position 1357 of SEQ ID NO: 1242447
ggguucaugcuguaaugaa

SEQ ID NO: 1348253 - RNA, 19 nt, Artificial Sequence
  Description of Artificial Sequence: Synthetic oligonucleotide
  Antisense strand to SEQ ID NO: 1348252
uucauuacagcaugaaccc

SEQ ID NO: 1348254 - RNA, 19 nt, Artificial Sequence
  Description of Artificial Sequence: Synthetic oligonucleotide
  Sense strand starting at position 1583 of SEQ ID NO: 1242447
ugggcaagucacugaguga

SEQ ID NO: 1348255 - RNA, 19 nt, Artificial Sequence
  Description of Artificial Sequence: Synthetic oligonucleotide
  Antisense strand to SEQ ID NO: 1348254
ucacucagugacuugccca

SEQ ID NO: 1348256 - RNA, 19 nt, Artificial Sequence
  Description of Artificial Sequence: Synthetic oligonucleotide
  Sense strand starting at position 1584 of SEQ ID NO: 1242447
gggcaagucacugagugaa

SEQ ID NO: 1348257 - RNA, 19 nt, Artificial Sequence
  Description of Artificial Sequence: Synthetic oligonucleotide
  Antisense strand to SEQ ID NO: 1348256
uucacucagugacuugccc

SEQ ID NO: 1348258 - RNA, 19 nt, Artificial Sequence
  Description of Artificial Sequence: Synthetic oligonucleotide
  Sense strand starting at position 1586 of SEQ ID NO: 1242447
gcaagucacugagugaaag

SEQ ID NO: 1348259 - RNA, 19 nt, Artificial Sequence
  Description of Artificial Sequence: Synthetic oligonucleotide
  Antisense strand to SEQ ID NO: 1348258
cuuucacucagugacuugc

SEQ ID NO: 1348260 - RNA, 19 nt, Artificial Sequence
  Description of Artificial Sequence: Synthetic oligonucleotide
  Sense strand starting at position 1625 of SEQ ID NO: 1242447
aagucauugugagcauaac

SEQ ID NO: 1348261 - RNA, 19 nt, Artificial Sequence
  Description of Artificial Sequence: Synthetic oligonucleotide
  Antisense strand to SEQ ID NO: 1348260
guuaugcucacaaugacuu

SEQ ID NO: 1348262 - RNA, 19 nt, Artificial Sequence
  Description of Artificial Sequence: Synthetic oligonucleotide
  Sense strand starting at position 1626 of SEQ ID NO: 1242447
agucauugugagcauaaca

SEQ ID NO: 1348263 - RNA, 19 nt, Artificial Sequence
  Description of Artificial Sequence: Synthetic oligonucleotide
  Antisense strand to SEQ ID NO: 1348262
uguuaugcucacaaugacu

SEQ ID NO: 1348264 - RNA, 19 nt, Artificial Sequence
  Description of Artificial Sequence: Synthetic oligonucleotide
  Sense strand starting at position 2362 of SEQ ID NO: 1242447
ugcgauuugcauuagaggu

SEQ ID NO: 1348265 - RNA, 19 nt, Artificial Sequence
  Description of Artificial Sequence: Synthetic oligonucleotide
  Antisense strand to SEQ ID NO: 1348264
accucuaaugcaaaucgca

SEQ ID NO: 1348266 - RNA, 19 nt, Artificial Sequence
  Description of Artificial Sequence: Synthetic oligonucleotide
  Sense strand starting at position 2368 of SEQ ID NO: 1242447
uugcauuagagguaauaug

SEQ ID NO: 1348267 - RNA, 19 nt, Artificial Sequence
  Description of Artificial Sequence: Synthetic oligonucleotide
  Antisense strand to SEQ ID NO: 1348266
cauauuaccucuaaugcaa

SEQ ID NO: 1348268 - RNA, 19 nt, Artificial Sequence
  Description of Artificial Sequence: Synthetic oligonucleotide
  Sense strand starting at position 2496 of SEQ ID NO: 1242447
ggacccaucguagaguguu

SEQ ID NO: 1348269 - RNA, 19 nt, Artificial Sequence
  Description of Artificial Sequence: Synthetic oligonucleotide
  Antisense strand to SEQ ID NO: 1348268
aacacucuacgaugggucc

SEQ ID NO: 1348270 - RNA, 19 nt, Artificial Sequence
  Description of Artificial Sequence: Synthetic oligonucleotide
  Sense strand starting at position 2603 of SEQ ID NO: 1242447
gcuuaccugagauggagaa

SEQ ID NO: 1348271 - RNA, 19 nt, Artificial Sequence
  Description of Artificial Sequence: Synthetic oligonucleotide
  Antisense strand to SEQ ID NO: 1348270
uucuccaucucagguaagc

SEQ ID NO: 1348272 - RNA, 19 nt, Artificial Sequence
  Description of Artificial Sequence: Synthetic oligonucleotide
  Sense strand starting at position 2622 of SEQ ID NO: 1242447
gagauagggugaguucagu

SEQ ID NO: 1348273 - RNA, 19 nt, Artificial Sequence
  Description of Artificial Sequence: Synthetic oligonucleotide
  Antisense strand to SEQ ID NO: 1348272
acugaacucacccuaucuc

SEQ ID NO: 1348274 - RNA, 19 nt, Artificial Sequence
  Description of Artificial Sequence: Synthetic oligonucleotide
  Sense strand starting at position 2682 of SEQ ID NO: 1242447
gcagguguccaggagucaa

SEQ ID NO: 1348275 - RNA, 19 nt, Artificial Sequence
  Description of Artificial Sequence: Synthetic oligonucleotide
  Antisense strand to SEQ ID NO: 1348274
uugacuccuggacaccugc

SEQ ID NO: 1348276 - RNA, 19 nt, Artificial Sequence
  Description of Artificial Sequence: Synthetic oligonucleotide
  Sense strand starting at position 2719 of SEQ ID NO: 1242447
gcgagaggcccggcuuuau

SEQ ID NO: 1348277 - RNA, 19 nt, Artificial Sequence
  Description of Artificial Sequence: Synthetic oligonucleotide
  Antisense strand to SEQ ID NO: 1348276
auaaagccgggccucucgc

SEQ ID NO: 1348278 - RNA, 19 nt, Artificial Sequence
  Description of Artificial Sequence: Synthetic oligonucleotide
  Sense strand starting at position 2846 of SEQ ID NO: 1242447
cugcgcuaucaccaacuaa

SEQ ID NO: 1348279 - RNA, 19 nt, Artificial Sequence
  Description of Artificial Sequence: Synthetic oligonucleotide
  Antisense strand to SEQ ID NO: 1348278
uuaguuggugauagcgcag

SEQ ID NO: 1348280 - RNA, 19 nt, Artificial Sequence
  Description of Artificial Sequence: Synthetic oligonucleotide
  Sense strand starting at position 2940 of SEQ ID NO: 1242447
cgauauaaauguuuggaag

SEQ ID NO: 1348281 - RNA, 19 nt, Artificial Sequence
  Description of Artificial Sequence: Synthetic oligonucleotide
  Antisense strand to SEQ ID NO: 1348280
cuuccaaacauuuauaucg

SEQ ID NO: 1348282 - RNA, 19 nt, Artificial Sequence
  Description of Artificial Sequence: Synthetic oligonucleotide
  Sense strand starting at position 2946 of SEQ ID NO: 1242447
aaauguuuggaagaguagu

SEQ ID NO: 1348283 - RNA, 19 nt, Artificial Sequence
  Description of Artificial Sequence: Synthetic oligonucleotide
  Antisense strand to SEQ ID NO: 1348282
acuacucuuccaaacauuu

SEQ ID NO: 1348284 - RNA, 19 nt, Artificial Sequence
  Description of Artificial Sequence: Synthetic oligonucleotide
  Sense strand starting at position 3096 of SEQ ID NO: 1242447
aguuuacuccaaggugaaa

SEQ ID NO: 1348285 - RNA, 19 nt, Artificial Sequence
  Description of Artificial Sequence: Synthetic oligonucleotide
  Antisense strand to SEQ ID NO: 1348284
uuucaccuuggaguaaacu

SEQ ID NO: 1348286 - RNA, 19 nt, Artificial Sequence
  Description of Artificial Sequence: Synthetic oligonucleotide
  Sense strand starting at position 3481 of SEQ ID NO: 1242447
agggaaguaacgcauguaa

SEQ ID NO: 1348287 - RNA, 19 nt, Artificial Sequence
  Description of Artificial Sequence: Synthetic oligonucleotide
  Antisense strand to SEQ ID NO: 1348286
uuacaugcguuacuucccu

SEQ ID NO: 1348288 - RNA, 19 nt, Artificial Sequence
  Description of Artificial Sequence: Synthetic oligonucleotide
  Sense strand starting at position 3483 of SEQ ID NO: 1242447
ggaaguaacgcauguaaau

SEQ ID NO: 1348289 - RNA, 19 nt, Artificial Sequence
  Description of Artificial Sequence: Synthetic oligonucleotide
  Antisense strand to SEQ ID NO: 1348288
auuuacaugcguuacuucc

SEQ ID NO: 1348290 - RNA, 19 nt, Artificial Sequence
  Description of Artificial Sequence: Synthetic oligonucleotide
  Sense strand starting at position 3839 of SEQ ID NO: 1242447
acaugaaguuuguuuauac

SEQ ID NO: 1348291 - RNA, 19 nt, Artificial Sequence
  Description of Artificial Sequence: Synthetic oligonucleotide
  Antisense strand to SEQ ID NO: 1348290
guauaaacaaacuucaugu

SEQ ID NO: 1348292 - RNA, 19 nt, Artificial Sequence
  Description of Artificial Sequence: Synthetic oligonucleotide
  Sense strand starting at position 3857 of SEQ ID NO: 1242447
cccuguguuggugagggua

SEQ ID NO: 1348293 - RNA, 19 nt, Artificial Sequence
  Description of Artificial Sequence: Synthetic oligonucleotide
  Antisense strand to SEQ ID NO: 1348292
uacccucaccaacacaggg

SEQ ID NO: 1348294 - RNA, 19 nt, Artificial Sequence
  Description of Artificial Sequence: Synthetic oligonucleotide
  Sense strand starting at position 3876 of SEQ ID NO: 1242447
uggagaaauaguuguuaca

SEQ ID NO: 1348295 - RNA, 19 nt, Artificial Sequence
  Description of Artificial Sequence: Synthetic oligonucleotide
  Antisense strand to SEQ ID NO: 1348294
uguaacaacuauuucucca

SEQ ID NO: 1348296 - RNA, 19 nt, Artificial Sequence
  Description of Artificial Sequence: Synthetic oligonucleotide
  Sense strand starting at position 3878 of SEQ ID NO: 1242447
gagaaauaguuguuacaca

SEQ ID NO: 1348297 - RNA, 19 nt, Artificial Sequence
  Description of Artificial Sequence: Synthetic oligonucleotide
  Antisense strand to SEQ ID NO: 1348296
uguguaacaacuauuucuc

SEQ ID NO: 1348298 - RNA, 19 nt, Artificial Sequence
  Description of Artificial Sequence: Synthetic oligonucleotide
  Sense strand starting at position 57 of SEQ ID NO: 1242448
ggcucuuaacuugagcuga

SEQ ID NO: 1348299 - RNA, 19 nt, Artificial Sequence
  Description of Artificial Sequence: Synthetic oligonucleotide
  Antisense strand to SEQ ID NO: 1348298
ucagcucaaguuaagagcc

SEQ ID NO: 1348300 - RNA, 19 nt, Artificial Sequence
  Description of Artificial Sequence: Synthetic oligonucleotide
  Sense strand starting at position 59 of SEQ ID NO: 1242448
cucuuaacuugagcugaaa

SEQ ID NO: 1348301 - RNA, 19 nt, Artificial Sequence
  Description of Artificial Sequence: Synthetic oligonucleotide
  Antisense strand to SEQ ID NO: 1348300
uuucagcucaaguuaagag

SEQ ID NO: 1348302 - RNA, 19 nt, Artificial Sequence
  Description of Artificial Sequence: Synthetic oligonucleotide
  Sense strand starting at position 62 of SEQ ID NO: 1242448
uuaacuugagcugaaagua

SEQ ID NO: 1348303 - RNA, 19 nt, Artificial Sequence
  Description of Artificial Sequence: Synthetic oligonucleotide
  Antisense strand to SEQ ID NO: 1348302
uacuuucagcucaaguuaa

SEQ ID NO: 1348304 - RNA, 19 nt, Artificial Sequence
  Description of Artificial Sequence: Synthetic oligonucleotide
  Sense strand starting at position 115 of SEQ ID NO: 1242448
uuugguauguuauucucua

SEQ ID NO: 1348305 - RNA, 19 nt, Artificial Sequence
  Description of Artificial Sequence: Synthetic oligonucleotide
  Antisense strand to SEQ ID NO: 1348304
uagagaauaacauaccaaa

SEQ ID NO: 1348306 - RNA, 19 nt, Artificial Sequence
  Description of Artificial Sequence: Synthetic oligonucleotide
  Sense strand starting at position 116 of SEQ ID NO: 1242448
uugguauguuauucucuac

SEQ ID NO: 1348307 - RNA, 19 nt, Artificial Sequence
  Description of Artificial Sequence: Synthetic oligonucleotide
  Antisense strand to SEQ ID NO: 1348306
guagagaauaacauaccaa

SEQ ID NO: 1348308 - RNA, 19 nt, Artificial Sequence
  Description of Artificial Sequence: Synthetic oligonucleotide
  Sense strand starting at position 119 of SEQ ID NO: 1242448
guauguuauucucuacugu

SEQ ID NO: 1348309 - RNA, 19 nt, Artificial Sequence
  Description of Artificial Sequence: Synthetic oligonucleotide
  Antisense strand to SEQ ID NO: 1348308
acaguagagaauaacauac

SEQ ID NO: 1348310 - RNA, 19 nt, Artificial Sequence
  Description of Artificial Sequence: Synthetic oligonucleotide
  Sense strand starting at position 514 of SEQ ID NO: 1242448
auuccuaguguccaaggaa

SEQ ID NO: 1348311 - RNA, 19 nt, Artificial Sequence
  Description of Artificial Sequence: Synthetic oligonucleotide
  Antisense strand to SEQ ID NO: 1348310
uuccuuggacacuaggaau

SEQ ID NO: 1348312 - RNA, 19 nt, Artificial Sequence
  Description of Artificial Sequence: Synthetic oligonucleotide
  Sense strand starting at position 546 of SEQ ID NO: 1242448
gaauguuaggaguggucaa

SEQ ID NO: 1348313 - RNA, 19 nt, Artificial Sequence
  Description of Artificial Sequence: Synthetic oligonucleotide
  Antisense strand to SEQ ID NO: 1348312
uugaccacuccuaacauuc

SEQ ID NO: 1348314 - RNA, 19 nt, Artificial Sequence
  Description of Artificial Sequence: Synthetic oligonucleotide
  Sense strand starting at position 547 of SEQ ID NO: 1242448
aauguuaggaguggucaau

SEQ ID NO: 1348315 - RNA, 19 nt, Artificial Sequence
  Description of Artificial Sequence: Synthetic oligonucleotide
  Antisense strand to SEQ ID NO: 1348314
auugaccacuccuaacauu

SEQ ID NO: 1348316 - RNA, 19 nt, Artificial Sequence
  Description of Artificial Sequence: Synthetic oligonucleotide
  Sense strand starting at position 553 of SEQ ID NO: 1242448
aggaguggucaauacuguu

SEQ ID NO: 1348317 - RNA, 19 nt, Artificial Sequence
  Description of Artificial Sequence: Synthetic oligonucleotide
  Antisense strand to SEQ ID NO: 1348316
aacaguauugaccacuccu

SEQ ID NO: 1348318 - RNA, 19 nt, Artificial Sequence
  Description of Artificial Sequence: Synthetic oligonucleotide
  Sense strand starting at position 680 of SEQ ID NO: 1242448
uccaguuaugaagaagcca

SEQ ID NO: 1348319 - RNA, 19 nt, Artificial Sequence
  Description of Artificial Sequence: Synthetic oligonucleotide
  Antisense strand to SEQ ID NO: 1348318
uggcuucuucauaacugga

SEQ ID NO: 1348320 - RNA, 19 nt, Artificial Sequence
  Description of Artificial Sequence: Synthetic oligonucleotide
  Sense strand starting at position 827 of SEQ ID NO: 1242448
uucucauuagucugucaau

SEQ ID NO: 1348321 - RNA, 19 nt, Artificial Sequence
  Description of Artificial Sequence: Synthetic oligonucleotide
  Antisense strand to SEQ ID NO: 1348320
auugacagacuaaugagaa

SEQ ID NO: 1348322 - RNA, 19 nt, Artificial Sequence
  Description of Artificial Sequence: Synthetic oligonucleotide
  Sense strand starting at position 828 of SEQ ID NO: 1242448
ucucauuagucugucaauu

SEQ ID NO: 1348323 - RNA, 19 nt, Artificial Sequence
  Description of Artificial Sequence: Synthetic oligonucleotide
  Antisense strand to SEQ ID NO: 1348322
aauugacagacuaaugaga

SEQ ID NO: 1348324 - RNA, 19 nt, Artificial Sequence
  Description of Artificial Sequence: Synthetic oligonucleotide
  Sense strand starting at position 869 of SEQ ID NO: 1242448
auuucuauaugaggacgaa

SEQ ID NO: 1348325 - RNA, 19 nt, Artificial Sequence
  Description of Artificial Sequence: Synthetic oligonucleotide
  Antisense strand to SEQ ID NO: 1348324
uucguccucauauagaaau

SEQ ID NO: 1348326 - RNA, 19 nt, Artificial Sequence
  Description of Artificial Sequence: Synthetic oligonucleotide
  Sense strand starting at position 872 of SEQ ID NO: 1242448
ucuauaugaggacgaacau

SEQ ID NO: 1348327 - RNA, 19 nt, Artificial Sequence
  Description of Artificial Sequence: Synthetic oligonucleotide
  Antisense strand to SEQ ID NO: 1348326
auguucguccucauauaga

SEQ ID NO: 1348328 - RNA, 19 nt, Artificial Sequence
  Description of Artificial Sequence: Synthetic oligonucleotide
  Sense strand starting at position 923 of SEQ ID NO: 1242448
gacgauaccuuucuugauc

SEQ ID NO: 1348329 - RNA, 19 nt, Artificial Sequence
  Description of Artificial Sequence: Synthetic oligonucleotide
  Antisense strand to SEQ ID NO: 1348328
gaucaagaaagguaucguc

SEQ ID NO: 1348330 - RNA, 19 nt, Artificial Sequence
  Description of Artificial Sequence: Synthetic oligonucleotide
  Sense strand starting at position 1135 of SEQ ID NO: 1242448
gcucuuggcggucuuacua

SEQ ID NO: 1348331 - RNA, 19 nt, Artificial Sequence
  Description of Artificial Sequence: Synthetic oligonucleotide
  Antisense strand to SEQ ID NO: 1348330
uaguaagaccgccaagagc

SEQ ID NO: 1348332 - RNA, 19 nt, Artificial Sequence
  Description of Artificial Sequence: Synthetic oligonucleotide
  Sense strand starting at position 1142 of SEQ ID NO: 1242448
gcggucuuacuacauagaa

SEQ ID NO: 1348333 - RNA, 19 nt, Artificial Sequence
  Description of Artificial Sequence: Synthetic oligonucleotide
  Antisense strand to SEQ ID NO: 1348332
uucuauguaguaagaccgc

SEQ ID NO: 1348334 - RNA, 19 nt, Artificial Sequence
  Description of Artificial Sequence: Synthetic oligonucleotide
  Sense strand starting at position 1155 of SEQ ID NO: 1242448
auagaaggcucuuuaaacu

SEQ ID NO: 1348335 - RNA, 19 nt, Artificial Sequence
  Description of Artificial Sequence: Synthetic oligonucleotide
  Antisense strand to SEQ ID NO: 1348334
aguuuaaagagccuucuau

SEQ ID NO: 1348336 - RNA, 19 nt, Artificial Sequence
  Description of Artificial Sequence: Synthetic oligonucleotide
  Sense strand starting at position 1278 of SEQ ID NO: 1242448
augagaggugcggaaucaa

SEQ ID NO: 1348337 - RNA, 19 nt, Artificial Sequence
  Description of Artificial Sequence: Synthetic oligonucleotide
  Antisense strand to SEQ ID NO: 1348336
uugauuccgcaccucucau

SEQ ID NO: 1348338 - RNA, 19 nt, Artificial Sequence
  Description of Artificial Sequence: Synthetic oligonucleotide
  Sense strand starting at position 1318 of SEQ ID NO: 1242448
cacugagggcucugagaga

SEQ ID NO: 1348339 - RNA, 19 nt, Artificial Sequence
  Description of Artificial Sequence: Synthetic oligonucleotide
  Antisense strand to SEQ ID NO: 1348338
ucucucagagcccucagug

SEQ ID NO: 1348340 - RNA, 19 nt, Artificial Sequence
  Description of Artificial Sequence: Synthetic oligonucleotide
  Sense strand starting at position 1369 of SEQ ID NO: 1242448
caguuccguccuggauuaa

SEQ ID NO: 1348341 - RNA, 19 nt, Artificial Sequence
  Description of Artificial Sequence: Synthetic oligonucleotide
  Antisense strand to SEQ ID NO: 1348340
uuaauccaggacggaacug

SEQ ID NO: 1348342 - RNA, 19 nt, Artificial Sequence
  Description of Artificial Sequence: Synthetic oligonucleotide
  Sense strand starting at position 1370 of SEQ ID NO: 1242448
aguuccguccuggauuaaa

SEQ ID NO: 1348343 - RNA, 19 nt, Artificial Sequence
  Description of Artificial Sequence: Synthetic oligonucleotide
  Antisense strand to SEQ ID NO: 1348342
uuuaauccaggacggaacu

SEQ ID NO: 1348344 - RNA, 19 nt, Artificial Sequence
  Description of Artificial Sequence: Synthetic oligonucleotide
  Sense strand starting at position 1386 of SEQ ID NO: 1242448
aaaucagcugucgagcaua

SEQ ID NO: 1348345 - RNA, 19 nt, Artificial Sequence
  Description of Artificial Sequence: Synthetic oligonucleotide
  Antisense strand to SEQ ID NO: 1348344
uaugcucgacagcugauuu

SEQ ID NO: 1348346 - RNA, 19 nt, Artificial Sequence
  Description of Artificial Sequence: Synthetic oligonucleotide
  Sense strand starting at position 1389 of SEQ ID NO: 1242448
ucagcugucgagcauagaa

SEQ ID NO: 1348347 - RNA, 19 nt, Artificial Sequence
  Description of Artificial Sequence: Synthetic oligonucleotide
  Antisense strand to SEQ ID NO: 1348346
uucuaugcucgacagcuga

SEQ ID NO: 1348348 - RNA, 19 nt, Artificial Sequence
  Description of Artificial Sequence: Synthetic oligonucleotide
  Sense strand starting at position 1560 of SEQ ID NO: 1242448
ggagaaugcucaucccucu

SEQ ID NO: 1348349 - RNA, 19 nt, Artificial Sequence
  Description of Artificial Sequence: Synthetic oligonucleotide
  Antisense strand to SEQ ID NO: 1348348
agagggaugagcauucucc

SEQ ID NO: 1348350 - RNA, 19 nt, Artificial Sequence
  Description of Artificial Sequence: Synthetic oligonucleotide
  Sense strand starting at position 1786 of SEQ ID NO: 1242448
gucacuuugucaccgauuu

SEQ ID NO: 1348351 - RNA, 19 nt, Artificial Sequence
  Description of Artificial Sequence: Synthetic oligonucleotide
  Antisense strand to SEQ ID NO: 1348350
aaaucggugacaaagugac

SEQ ID NO: 1348352 - RNA, 19 nt, Artificial Sequence
  Description of Artificial Sequence: Synthetic oligonucleotide
  Sense strand starting at position 2516 of SEQ ID NO: 1242448
ccgcgaggacucagugcua

SEQ ID NO: 1348353 - RNA, 19 nt, Artificial Sequence
  Description of Artificial Sequence: Synthetic oligonucleotide
  Antisense strand to SEQ ID NO: 1348352
uagcacugaguccucgcgg

SEQ ID NO: 1348354 - RNA, 19 nt, Artificial Sequence
  Description of Artificial Sequence: Synthetic oligonucleotide
  Sense strand starting at position 2552 of SEQ ID NO: 1242448
cccgcuuacccagaaauag

SEQ ID NO: 1348355 - RNA, 19 nt, Artificial Sequence
  Description of Artificial Sequence: Synthetic oligonucleotide
  Antisense strand to SEQ ID NO: 1348354
cuauuucuggguaagcggg

SEQ ID NO: 1348356 - RNA, 19 nt, Artificial Sequence
  Description of Artificial Sequence: Synthetic oligonucleotide
  Sense strand starting at position 2585 of SEQ ID NO: 1242448
cuagguguccgugcuaugu

SEQ ID NO: 1348357 - RNA, 19 nt, Artificial Sequence
  Description of Artificial Sequence: Synthetic oligonucleotide
  Antisense strand to SEQ ID NO: 1348356
acauagcacggacaccuag

SEQ ID NO: 1348358 - RNA, 19 nt, Artificial Sequence
  Description of Artificial Sequence: Synthetic oligonucleotide
  Sense strand starting at position 2683 of SEQ ID NO: 1242448
acugucaauucugugguua

SEQ ID NO: 1348359 - RNA, 19 nt, Artificial Sequence
  Description of Artificial Sequence: Synthetic oligonucleotide
  Antisense strand to SEQ ID NO: 1348358
uaaccacagaauugacagu

SEQ ID NO: 1348360 - RNA, 19 nt, Artificial Sequence
  Description of Artificial Sequence: Synthetic oligonucleotide
  Sense strand starting at position 2684 of SEQ ID NO: 1242448
cugucaauucugugguuaa

SEQ ID NO: 1348361 - RNA, 19 nt, Artificial Sequence
  Description of Artificial Sequence: Synthetic oligonucleotide
  Antisense strand to SEQ ID NO: 1348360
uuaaccacagaauugacag

SEQ ID NO: 1348362 - RNA, 19 nt, Artificial Sequence
  Description of Artificial Sequence: Synthetic oligonucleotide
  Sense strand starting at position 2687 of SEQ ID NO: 1242448
ucaauucugugguuaaauu

SEQ ID NO: 1348363 - RNA, 19 nt, Artificial Sequence
  Description of Artificial Sequence: Synthetic oligonucleotide
  Antisense strand to SEQ ID NO: 1348362
aauuuaaccacagaauuga

SEQ ID NO: 1348364 - RNA, 19 nt, Artificial Sequence
  Description of Artificial Sequence: Synthetic oligonucleotide
  Sense strand starting at position 3102 of SEQ ID NO: 1242448
ggucuucuuguacaaccaa

SEQ ID NO: 1348365 - RNA, 19 nt, Artificial Sequence
  Description of Artificial Sequence: Synthetic oligonucleotide
  Antisense strand to SEQ ID NO: 1348364
uugguuguacaagaagacc

SEQ ID NO: 1348366 - RNA, 19 nt, Artificial Sequence
  Description of Artificial Sequence: Synthetic oligonucleotide
  Sense strand starting at position 3376 of SEQ ID NO: 1242448
ccuuaauggugucuaggaa

SEQ ID NO: 1348367 - RNA, 19 nt, Artificial Sequence
  Description of Artificial Sequence: Synthetic oligonucleotide
  Antisense strand to SEQ ID NO: 1348366
uuccuagacaccauuaagg

SEQ ID NO: 1348368 - RNA, 19 nt, Artificial Sequence
  Description of Artificial Sequence: Synthetic oligonucleotide
  Sense strand starting at position 3377 of SEQ ID NO: 1242448
cuuaauggugucuaggaac

SEQ ID NO: 1348369 - RNA, 19 nt, Artificial Sequence
  Description of Artificial Sequence: Synthetic oligonucleotide
  Antisense strand to SEQ ID NO: 1348368
guuccuagacaccauuaag

SEQ ID NO: 1348370 - RNA, 19 nt, Artificial Sequence
  Description of Artificial Sequence: Synthetic oligonucleotide
  Sense strand starting at position 3431 of SEQ ID NO: 1242448
ucuuguuaucuugacauau

SEQ ID NO: 1348371 - RNA, 19 nt, Artificial Sequence
  Description of Artificial Sequence: Synthetic oligonucleotide
  Antisense strand to SEQ ID NO: 1348370
auaugucaagauaacaaga

SEQ ID NO: 1348372 - RNA, 19 nt, Artificial Sequence
  Description of Artificial Sequence: Synthetic oligonucleotide
  Sense strand starting at position 3546 of SEQ ID NO: 1242448
ugacuuugcuuguucucaa

SEQ ID NO: 1348373 - RNA, 19 nt, Artificial Sequence
  Description of Artificial Sequence: Synthetic oligonucleotide
  Antisense strand to SEQ ID NO: 1348372
uugagaacaagcaaaguca

SEQ ID NO: 1348374 - RNA, 19 nt, Artificial Sequence
  Description of Artificial Sequence: Synthetic oligonucleotide
  Sense strand starting at position 3584 of SEQ ID NO: 1242448
gguauauagauagguaugu

SEQ ID NO: 1348375 - RNA, 19 nt, Artificial Sequence
  Description of Artificial Sequence: Synthetic oligonucleotide
  Antisense strand to SEQ ID NO: 1348374
acauaccuaucuauauacc

SEQ ID NO: 1348376 - RNA, 19 nt, Artificial Sequence
  Description of Artificial Sequence: Synthetic oligonucleotide
  Sense strand starting at position 3585 of SEQ ID NO: 1242448
guauauagauagguauguu

SEQ ID NO: 1348377 - RNA, 19 nt, Artificial Sequence
  Description of Artificial Sequence: Synthetic oligonucleotide
  Antisense strand to SEQ ID NO: 1348376
aacauaccuaucuauauac

SEQ ID NO: 1348378 - RNA, 19 nt, Artificial Sequence
  Description of Artificial Sequence: Synthetic oligonucleotide
  Sense strand starting at position 235 of SEQ ID NO: 1242449
ucuggcuccuugccuaaua

SEQ ID NO: 1348379 - RNA, 19 nt, Artificial Sequence
  Description of Artificial Sequence: Synthetic oligonucleotide
  Antisense strand to SEQ ID NO: 1348378
uauuaggcaaggagccaga

SEQ ID NO: 1348380 - RNA, 19 nt, Artificial Sequence
  Description of Artificial Sequence: Synthetic oligonucleotide
  Sense strand starting at position 236 of SEQ ID NO: 1242449
cuggcuccuugccuaauau

SEQ ID NO: 1348381 - RNA, 19 nt, Artificial Sequence
  Description of Artificial Sequence: Synthetic oligonucleotide
  Antisense strand to SEQ ID NO: 1348380
auauuaggcaaggagccag

SEQ ID NO: 1348382 - RNA, 19 nt, Artificial Sequence
  Description of Artificial Sequence: Synthetic oligonucleotide
  Sense strand starting at position 237 of SEQ ID NO: 1242449
uggcuccuugccuaauauu

SEQ ID NO: 1348383 - RNA, 19 nt, Artificial Sequence
  Description of Artificial Sequence: Synthetic oligonucleotide
  Antisense strand to SEQ ID NO: 1348382
aauauuaggcaaggagcca

SEQ ID NO: 1348384 - RNA, 19 nt, Artificial Sequence
  Description of Artificial Sequence: Synthetic oligonucleotide
  Sense strand starting at position 397 of SEQ ID NO: 1242449
ugaugaugcucuccucacu

SEQ ID NO: 1348385 - RNA, 19 nt, Artificial Sequence
  Description of Artificial Sequence: Synthetic oligonucleotide
  Antisense strand to SEQ ID NO: 1348384
agugaggagagcaucauca

SEQ ID NO: 1348386 - RNA, 19 nt, Artificial Sequence
  Description of Artificial Sequence: Synthetic oligonucleotide
  Sense strand starting at position 552 of SEQ ID NO: 1242449
ccagaagugugcuuuccag

SEQ ID NO: 1348387 - RNA, 19 nt, Artificial Sequence
  Description of Artificial Sequence: Synthetic oligonucleotide
  Antisense strand to SEQ ID NO: 1348386
cuggaaagcacacuucugg

SEQ ID NO: 1348388 - RNA, 19 nt, Artificial Sequence
  Description of Artificial Sequence: Synthetic oligonucleotide
  Sense strand starting at position 569 of SEQ ID NO: 1242449
aggaguccuuaugaagaug

SEQ ID NO: 1348389 - RNA, 19 nt, Artificial Sequence
  Description of Artificial Sequence: Synthetic oligonucleotide
  Antisense strand to SEQ ID NO: 1348388
caucuucauaaggacuccu

SEQ ID NO: 1348390 - RNA, 19 nt, Artificial Sequence
  Description of Artificial Sequence: Synthetic oligonucleotide
  Sense strand starting at position 602 of SEQ ID NO: 1242449
agggauaaaucauaaauag

SEQ ID NO: 1348391 - RNA, 19 nt, Artificial Sequence
  Description of Artificial Sequence: Synthetic oligonucleotide
  Antisense strand to SEQ ID NO: 1348390
cuauuuaugauuuaucccu

SEQ ID NO: 1348392 - RNA, 19 nt, Artificial Sequence
  Description of Artificial Sequence: Synthetic oligonucleotide
  Sense strand starting at position 948 of SEQ ID NO: 1242449
cagaaucugggaugagguu

SEQ ID NO: 1348393 - RNA, 19 nt, Artificial Sequence
  Description of Artificial Sequence: Synthetic oligonucleotide
  Antisense strand to SEQ ID NO: 1348392
aaccucaucccagauucug

SEQ ID NO: 1348394 - RNA, 19 nt, Artificial Sequence
  Description of Artificial Sequence: Synthetic oligonucleotide
  Sense strand starting at position 1105 of SEQ ID NO: 1242449
ucaagagacuucuggauag

SEQ ID NO: 1348395 - RNA, 19 nt, Artificial Sequence
  Description of Artificial Sequence: Synthetic oligonucleotide
  Antisense strand to SEQ ID NO: 1348394
cuauccagaagucucuuga

SEQ ID NO: 1348396 - RNA, 19 nt, Artificial Sequence
  Description of Artificial Sequence: Synthetic oligonucleotide
  Sense strand starting at position 1412 of SEQ ID NO: 1242449
cgguuucuucuaugcgaaa

SEQ ID NO: 1348397 - RNA, 19 nt, Artificial Sequence
  Description of Artificial Sequence: Synthetic oligonucleotide
  Antisense strand to SEQ ID NO: 1348396
uuucgcauagaagaaaccg

SEQ ID NO: 1348398 - RNA, 19 nt, Artificial Sequence
  Description of Artificial Sequence: Synthetic oligonucleotide
  Sense strand starting at position 2259 of SEQ ID NO: 1242449
ggaccauccugagcaacau

SEQ ID NO: 1348399 - RNA, 19 nt, Artificial Sequence
  Description of Artificial Sequence: Synthetic oligonucleotide
  Antisense strand to SEQ ID NO: 1348398
auguugcucaggauggucc

SEQ ID NO: 1348400 - RNA, 19 nt, Artificial Sequence
  Description of Artificial Sequence: Synthetic oligonucleotide
  Sense strand starting at position 2446 of SEQ ID NO: 1242449
gcaagaucucaucaggguu

SEQ ID NO: 1348401 - RNA, 19 nt, Artificial Sequence
  Description of Artificial Sequence: Synthetic oligonucleotide
  Antisense strand to SEQ ID NO: 1348400
aacccugaugagaucuugc

SEQ ID NO: 1348402 - RNA, 19 nt, Artificial Sequence
  Description of Artificial Sequence: Synthetic oligonucleotide
  Sense strand starting at position 2472 of SEQ ID NO: 1242449
agccaaucuucuccaggau

SEQ ID NO: 1348403 - RNA, 19 nt, Artificial Sequence
  Description of Artificial Sequence: Synthetic oligonucleotide
  Antisense strand to SEQ ID NO: 1348402
auccuggagaagauuggcu

SEQ ID NO: 1348404 - RNA, 19 nt, Artificial Sequence
  Description of Artificial Sequence: Synthetic oligonucleotide
  Sense strand starting at position 2487 of SEQ ID NO: 1242449
ggaucaaggacaugcuaua

SEQ ID NO: 1348405 - RNA, 19 nt, Artificial Sequence
  Description of Artificial Sequence: Synthetic oligonucleotide
  Antisense strand to SEQ ID NO: 1348404
uauagcauguccuugaucc

SEQ ID NO: 1348406 - RNA, 19 nt, Artificial Sequence
  Description of Artificial Sequence: Synthetic oligonucleotide
  Sense strand starting at position 2565 of SEQ ID NO: 1242449
uggguuucucugggacaua

SEQ ID NO: 1348407 - RNA, 19 nt, Artificial Sequence
  Description of Artificial Sequence: Synthetic oligonucleotide
  Antisense strand to SEQ ID NO: 1348406
uaugucccagagaaaccca

SEQ ID NO: 1348408 - RNA, 19 nt, Artificial Sequence
  Description of Artificial Sequence: Synthetic oligonucleotide
  Sense strand starting at position 2575 of SEQ ID NO: 1242449
ugggacauagucugcaaau

SEQ ID NO: 1348409 - RNA, 19 nt, Artificial Sequence
  Description of Artificial Sequence: Synthetic oligonucleotide
  Antisense strand to SEQ ID NO: 1348408
auuugcagacuauguccca

SEQ ID NO: 1348410 - RNA, 19 nt, Artificial Sequence
  Description of Artificial Sequence: Synthetic oligonucleotide
  Sense strand starting at position 2576 of SEQ ID NO: 1242449
gggacauagucugcaaauu

SEQ ID NO: 1348411 - RNA, 19 nt, Artificial Sequence
  Description of Artificial Sequence: Synthetic oligonucleotide
  Antisense strand to SEQ ID NO: 1348410
aauuugcagacuauguccc

SEQ ID NO: 1348412 - RNA, 19 nt, Artificial Sequence
  Description of Artificial Sequence: Synthetic oligonucleotide
  Sense strand starting at position 2577 of SEQ ID NO: 1242449
ggacauagucugcaaauua

SEQ ID NO: 1348413 - RNA, 19 nt, Artificial Sequence
  Description of Artificial Sequence: Synthetic oligonucleotide
  Antisense strand to SEQ ID NO: 1348412
uaauuugcagacuaugucc

SEQ ID NO: 1348414 - RNA, 19 nt, Artificial Sequence
  Description of Artificial Sequence: Synthetic oligonucleotide
  Sense strand starting at position 2687 of SEQ ID NO: 1242449
ccgugaucaagguggagua

SEQ ID NO: 1348415 - RNA, 19 nt, Artificial Sequence
  Description of Artificial Sequence: Synthetic oligonucleotide
  Antisense strand to SEQ ID NO: 1348414
uacuccaccuugaucacgg

SEQ ID NO: 1348416 - RNA, 19 nt, Artificial Sequence
  Description of Artificial Sequence: Synthetic oligonucleotide
  Sense strand starting at position 2703 of SEQ ID NO: 1242449
guaggaaggccugaacuuu

SEQ ID NO: 1348417 - RNA, 19 nt, Artificial Sequence
  Description of Artificial Sequence: Synthetic oligonucleotide
  Antisense strand to SEQ ID NO: 1348416
aaaguucaggccuuccuac

SEQ ID NO: 1348418 - RNA, 19 nt, Artificial Sequence
  Description of Artificial Sequence: Synthetic oligonucleotide
  Sense strand starting at position 2711 of SEQ ID NO: 1242449
gccugaacuuuggcacaaa

SEQ ID NO: 1348419 - RNA, 19 nt, Artificial Sequence
  Description of Artificial Sequence: Synthetic oligonucleotide
  Antisense strand to SEQ ID NO: 1348418
uuugugccaaaguucaggc

SEQ ID NO: 1348420 - RNA, 19 nt, Artificial Sequence
  Description of Artificial Sequence: Synthetic oligonucleotide
  Sense strand starting at position 2902 of SEQ ID NO: 1242449
cucuccagggcuugagaaa

SEQ ID NO: 1348421 - RNA, 19 nt, Artificial Sequence
  Description of Artificial Sequence: Synthetic oligonucleotide
  Antisense strand to SEQ ID NO: 1348420
uuucucaagcccuggagag

SEQ ID NO: 1348422 - RNA, 19 nt, Artificial Sequence
  Description of Artificial Sequence: Synthetic oligonucleotide
  Sense strand starting at position 2923 of SEQ ID NO: 1242449
cugaaugcaacucgugaau

SEQ ID NO: 1348423 - RNA, 19 nt, Artificial Sequence
  Description of Artificial Sequence: Synthetic oligonucleotide
  Antisense strand to SEQ ID NO: 1348422
auucacgaguugcauucag

SEQ ID NO: 1348424 - RNA, 19 nt, Artificial Sequence
  Description of Artificial Sequence: Synthetic oligonucleotide
  Sense strand starting at position 2937 of SEQ ID NO: 1242449
ugaauuuccuuugagaagu

SEQ ID NO: 1348425 - RNA, 19 nt, Artificial Sequence
  Description of Artificial Sequence: Synthetic oligonucleotide
  Antisense strand to SEQ ID NO: 1348424
acuucucaaaggaaauuca

SEQ ID NO: 1348426 - RNA, 19 nt, Artificial Sequence
  Description of Artificial Sequence: Synthetic oligonucleotide
  Sense strand starting at position 2939 of SEQ ID NO: 1242449
aauuuccuuugagaagugu

SEQ ID NO: 1348427 - RNA, 19 nt, Artificial Sequence
  Description of Artificial Sequence: Synthetic oligonucleotide
  Antisense strand to SEQ ID NO: 1348426
acacuucucaaaggaaauu

SEQ ID NO: 1348428 - RNA, 19 nt, Artificial Sequence
  Description of Artificial Sequence: Synthetic oligonucleotide
  Sense strand starting at position 2988 of SEQ ID NO: 1242449
ggagcaggcuaucuuccaa

SEQ ID NO: 1348429 - RNA, 19 nt, Artificial Sequence
  Description of Artificial Sequence: Synthetic oligonucleotide
  Antisense strand to SEQ ID NO: 1348428
uuggaagauagccugcucc

SEQ ID NO: 1348430 - RNA, 19 nt, Artificial Sequence
  Description of Artificial Sequence: Synthetic oligonucleotide
  Sense strand starting at position 3153 of SEQ ID NO: 1242449
cucuaaaggccugggagua

SEQ ID NO: 1348431 - RNA, 19 nt, Artificial Sequence
  Description of Artificial Sequence: Synthetic oligonucleotide
  Antisense strand to SEQ ID NO: 1348430
uacucccaggccuuuagag

SEQ ID NO: 1348432 - RNA, 19 nt, Artificial Sequence
  Description of Artificial Sequence: Synthetic oligonucleotide
  Sense strand starting at position 3206 of SEQ ID NO: 1242449
gccuuacagucccuaggaa

SEQ ID NO: 1348433 - RNA, 19 nt, Artificial Sequence
  Description of Artificial Sequence: Synthetic oligonucleotide
  Antisense strand to SEQ ID NO: 1348432
uuccuagggacuguaaggc

SEQ ID NO: 1348434 - RNA, 19 nt, Artificial Sequence
  Description of Artificial Sequence: Synthetic oligonucleotide
  Sense strand starting at position 3301 of SEQ ID NO: 1242449
uuucuagucuguuucuaag

SEQ ID NO: 1348435 - RNA, 19 nt, Artificial Sequence
  Description of Artificial Sequence: Synthetic oligonucleotide
  Antisense strand to SEQ ID NO: 1348434
cuuagaaacagacuagaaa

SEQ ID NO: 1348436 - RNA, 19 nt, Artificial Sequence
  Description of Artificial Sequence: Synthetic oligonucleotide
  Sense strand starting at position 3303 of SEQ ID NO: 1242449
ucuagucuguuucuaaguu

SEQ ID NO: 1348437 - RNA, 19 nt, Artificial Sequence
  Description of Artificial Sequence: Synthetic oligonucleotide
  Antisense strand to SEQ ID NO: 1348436
aacuuagaaacagacuaga

SEQ ID NO: 1348438 - RNA, 19 nt, Artificial Sequence
  Description of Artificial Sequence: Synthetic oligonucleotide
  Sense strand starting at position 3307 of SEQ ID NO: 1242449
gucuguuucuaaguuggaa

SEQ ID NO: 1348439 - RNA, 19 nt, Artificial Sequence
  Description of Artificial Sequence: Synthetic oligonucleotide
  Antisense strand to SEQ ID NO: 1348438
uuccaacuuagaaacagac

SEQ ID NO: 1348440 - RNA, 19 nt, Artificial Sequence
  Description of Artificial Sequence: Synthetic oligonucleotide
  Sense strand starting at position 3359 of SEQ ID NO: 1242449
agugguugcgaugguuuaa

SEQ ID NO: 1348441 - RNA, 19 nt, Artificial Sequence
  Description of Artificial Sequence: Synthetic oligonucleotide
  Antisense strand to SEQ ID NO: 1348440
uuaaaccaucgcaaccacu

SEQ ID NO: 1348442 - RNA, 19 nt, Artificial Sequence
  Description of Artificial Sequence: Synthetic oligonucleotide
  Sense strand starting at position 3682 of SEQ ID NO: 1242449
gcuccuagguugucagagu

SEQ ID NO: 1348443 - RNA, 19 nt, Artificial Sequence
  Description of Artificial Sequence: Synthetic oligonucleotide
  Antisense strand to SEQ ID NO: 1348442
acucugacaaccuaggagc

SEQ ID NO: 1348444 - RNA, 19 nt, Artificial Sequence
  Description of Artificial Sequence: Synthetic oligonucleotide
  Sense strand starting at position 3729 of SEQ ID NO: 1242449
guuguucccugguuccaaa

SEQ ID NO: 1348445 - RNA, 19 nt, Artificial Sequence
  Description of Artificial Sequence: Synthetic oligonucleotide
  Antisense strand to SEQ ID NO: 1348444
uuuggaaccagggaacaac

SEQ ID NO: 1348446 - RNA, 19 nt, Artificial Sequence
  Description of Artificial Sequence: Synthetic oligonucleotide
  Sense strand starting at position 3796 of SEQ ID NO: 1242449
cuaggaucuuguccuagca

SEQ ID NO: 1348447 - RNA, 19 nt, Artificial Sequence
  Description of Artificial Sequence: Synthetic oligonucleotide
  Antisense strand to SEQ ID NO: 1348446
ugcuaggacaagauccuag

SEQ ID NO: 1348448 - RNA, 19 nt, Artificial Sequence
  Description of Artificial Sequence: Synthetic oligonucleotide
  Sense strand starting at position 3814 of SEQ ID NO: 1242449
acacuccuuggguaucauu

SEQ ID NO: 1348449 - RNA, 19 nt, Artificial Sequence
  Description of Artificial Sequence: Synthetic oligonucleotide
  Antisense strand to SEQ ID NO: 1348448
aaugauacccaaggagugu

SEQ ID NO: 1348450 - RNA, 19 nt, Artificial Sequence
  Description of Artificial Sequence: Synthetic oligonucleotide
  Sense strand starting at position 3824 of SEQ ID NO: 1242449
gguaucauuucucaugaau

SEQ ID NO: 1348451 - RNA, 19 nt, Artificial Sequence
  Description of Artificial Sequence: Synthetic oligonucleotide
  Antisense strand to SEQ ID NO: 1348450
auucaugagaaaugauacc

SEQ ID NO: 1348452 - RNA, 19 nt, Artificial Sequence
  Description of Artificial Sequence: Synthetic oligonucleotide
  Sense strand starting at position 3943 of SEQ ID NO: 1242449
acccuaaaucccuggugaa

SEQ ID NO: 1348453 - RNA, 19 nt, Artificial Sequence
  Description of Artificial Sequence: Synthetic oligonucleotide
  Antisense strand to SEQ ID NO: 1348452
uucaccagggauuuagggu

SEQ ID NO: 1348454 - RNA, 19 nt, Artificial Sequence
  Description of Artificial Sequence: Synthetic oligonucleotide
  Sense strand starting at position 3944 of SEQ ID NO: 1242449
cccuaaaucccuggugaau

SEQ ID NO: 1348455 - RNA, 19 nt, Artificial Sequence
  Description of Artificial Sequence: Synthetic oligonucleotide
  Antisense strand to SEQ ID NO: 1348454
auucaccagggauuuaggg

SEQ ID NO: 1348456 - RNA, 19 nt, Artificial Sequence
  Description of Artificial Sequence: Synthetic oligonucleotide
  Sense strand starting at position 3946 of SEQ ID NO: 1242449
cuaaaucccuggugaauuu

SEQ ID NO: 1348457 - RNA, 19 nt, Artificial Sequence
  Description of Artificial Sequence: Synthetic oligonucleotide
  Antisense strand to SEQ ID NO: 1348456
aaauucaccagggauuuag

SEQ ID NO: 1348458 - RNA, 19 nt, Artificial Sequence
  Description of Artificial Sequence: Synthetic oligonucleotide
  Sense strand starting at position 172 of SEQ ID NO: 1242450
gcaagaucucaucaggguu

SEQ ID NO: 1348459 - RNA, 19 nt, Artificial Sequence
  Description of Artificial Sequence: Synthetic oligonucleotide
  Antisense strand to SEQ ID NO: 1348458
aacccugaugagaucuugc

SEQ ID NO: 1348460 - RNA, 19 nt, Artificial Sequence
  Description of Artificial Sequence: Synthetic oligonucleotide
  Sense strand starting at position 198 of SEQ ID NO: 1242450
agccaaucuucuccaggau

SEQ ID NO: 1348461 - RNA, 19 nt, Artificial Sequence
  Description of Artificial Sequence: Synthetic oligonucleotide
  Antisense strand to SEQ ID NO: 1348460
auccuggagaagauuggcu

SEQ ID NO: 1348462 - RNA, 19 nt, Artificial Sequence
  Description of Artificial Sequence: Synthetic oligonucleotide
  Sense strand starting at position 213 of SEQ ID NO: 1242450
ggaucaaggacaugcuaua

SEQ ID NO: 1348463 - RNA, 19 nt, Artificial Sequence
  Description of Artificial Sequence: Synthetic oligonucleotide
  Antisense strand to SEQ ID NO: 1348462
uauagcauguccuugaucc

SEQ ID NO: 1348464 - RNA, 19 nt, Artificial Sequence
  Description of Artificial Sequence: Synthetic oligonucleotide
  Sense strand starting at position 291 of SEQ ID NO: 1242450
uggguuucucugggacaua

SEQ ID NO: 1348465 - RNA, 19 nt, Artificial Sequence
  Description of Artificial Sequence: Synthetic oligonucleotide
  Antisense strand to SEQ ID NO: 1348464
uaugucccagagaaaccca

SEQ ID NO: 1348466 - RNA, 19 nt, Artificial Sequence
  Description of Artificial Sequence: Synthetic oligonucleotide
  Sense strand starting at position 301 of SEQ ID NO: 1242450
ugggacauagucugcaaau

SEQ ID NO: 1348467 - RNA, 19 nt, Artificial Sequence
  Description of Artificial Sequence: Synthetic oligonucleotide
  Antisense strand to SEQ ID NO: 1348466
auuugcagacuauguccca

SEQ ID NO: 1348468 - RNA, 19 nt, Artificial Sequence
  Description of Artificial Sequence: Synthetic oligonucleotide
  Sense strand starting at position 302 of SEQ ID NO: 1242450
gggacauagucugcaaauu

SEQ ID NO: 1348469 - RNA, 19 nt, Artificial Sequence
  Description of Artificial Sequence: Synthetic oligonucleotide
  Antisense strand to SEQ ID NO: 1348468
aauuugcagacuauguccc

SEQ ID NO: 1348470 - RNA, 19 nt, Artificial Sequence
  Description of Artificial Sequence: Synthetic oligonucleotide
  Sense strand starting at position 303 of SEQ ID NO: 1242450
ggacauagucugcaaauua

SEQ ID NO: 1348471 - RNA, 19 nt, Artificial Sequence
  Description of Artificial Sequence: Synthetic oligonucleotide
  Antisense strand to SEQ ID NO: 1348470
uaauuugcagacuaugucc

SEQ ID NO: 1348472 - RNA, 19 nt, Artificial Sequence
  Description of Artificial Sequence: Synthetic oligonucleotide
  Sense strand starting at position 413 of SEQ ID NO: 1242450
ccgugaucaagguggagua

SEQ ID NO: 1348473 - RNA, 19 nt, Artificial Sequence
  Description of Artificial Sequence: Synthetic oligonucleotide
  Antisense strand to SEQ ID NO: 1348472
uacuccaccuugaucacgg

SEQ ID NO: 1348474 - RNA, 19 nt, Artificial Sequence
  Description of Artificial Sequence: Synthetic oligonucleotide
  Sense strand starting at position 429 of SEQ ID NO: 1242450
guaggaaggccugaacuuu

SEQ ID NO: 1348475 - RNA, 19 nt, Artificial Sequence
  Description of Artificial Sequence: Synthetic oligonucleotide
  Antisense strand to SEQ ID NO: 1348474
aaaguucaggccuuccuac

SEQ ID NO: 1348476 - RNA, 19 nt, Artificial Sequence
  Description of Artificial Sequence: Synthetic oligonucleotide
  Sense strand starting at position 437 of SEQ ID NO: 1242450
gccugaacuuuggcacaaa

SEQ ID NO: 1348477 - RNA, 19 nt, Artificial Sequence
  Description of Artificial Sequence: Synthetic oligonucleotide
  Antisense strand to SEQ ID NO: 1348476
uuugugccaaaguucaggc

SEQ ID NO: 1348478 - RNA, 19 nt, Artificial Sequence
  Description of Artificial Sequence: Synthetic oligonucleotide
  Sense strand starting at position 628 of SEQ ID NO: 1242450
cucuccagggcuugagaaa

SEQ ID NO: 1348479 - RNA, 19 nt, Artificial Sequence
  Description of Artificial Sequence: Synthetic oligonucleotide
  Antisense strand to SEQ ID NO: 1348478
uuucucaagcccuggagag

SEQ ID NO: 1348480 - RNA, 19 nt, Artificial Sequence
  Description of Artificial Sequence: Synthetic oligonucleotide
  Sense strand starting at position 649 of SEQ ID NO: 1242450
cugaaugcaacucgugaau

SEQ ID NO: 1348481 - RNA, 19 nt, Artificial Sequence
  Description of Artificial Sequence: Synthetic oligonucleotide
  Antisense strand to SEQ ID NO: 1348480
auucacgaguugcauucag

SEQ ID NO: 1348482 - RNA, 19 nt, Artificial Sequence
  Description of Artificial Sequence: Synthetic oligonucleotide
  Sense strand starting at position 663 of SEQ ID NO: 1242450
ugaauuuccuuugagaagu

SEQ ID NO: 1348483 - RNA, 19 nt, Artificial Sequence
  Description of Artificial Sequence: Synthetic oligonucleotide
  Antisense strand to SEQ ID NO: 1348482
acuucucaaaggaaauuca

SEQ ID NO: 1348484 - RNA, 19 nt, Artificial Sequence
  Description of Artificial Sequence: Synthetic oligonucleotide
  Sense strand starting at position 665 of SEQ ID NO: 1242450
aauuuccuuugagaagugu

SEQ ID NO: 1348485 - RNA, 19 nt, Artificial Sequence
  Description of Artificial Sequence: Synthetic oligonucleotide
  Antisense strand to SEQ ID NO: 1348484
acacuucucaaaggaaauu

SEQ ID NO: 1348486 - RNA, 19 nt, Artificial Sequence
  Description of Artificial Sequence: Synthetic oligonucleotide
  Sense strand starting at position 714 of SEQ ID NO: 1242450
ggagcaggcuaucuuccaa

SEQ ID NO: 1348487 - RNA, 19 nt, Artificial Sequence
  Description of Artificial Sequence: Synthetic oligonucleotide
  Antisense strand to SEQ ID NO: 1348486
uuggaagauagccugcucc

SEQ ID NO: 1348488 - RNA, 19 nt, Artificial Sequence
  Description of Artificial Sequence: Synthetic oligonucleotide
  Sense strand starting at position 879 of SEQ ID NO: 1242450
cucuaaaggccugggagua

SEQ ID NO: 1348489 - RNA, 19 nt, Artificial Sequence
  Description of Artificial Sequence: Synthetic oligonucleotide
  Antisense strand to SEQ ID NO: 1348488
uacucccaggccuuuagag

SEQ ID NO: 1348490 - RNA, 19 nt, Artificial Sequence
  Description of Artificial Sequence: Synthetic oligonucleotide
  Sense strand starting at position 932 of SEQ ID NO: 1242450
gccuuacagucccuaggaa

SEQ ID NO: 1348491 - RNA, 19 nt, Artificial Sequence
  Description of Artificial Sequence: Synthetic oligonucleotide
  Antisense strand to SEQ ID NO: 1348490
uuccuagggacuguaaggc

SEQ ID NO: 1348492 - RNA, 19 nt, Artificial Sequence
  Description of Artificial Sequence: Synthetic oligonucleotide
  Sense strand starting at position 1027 of SEQ ID NO: 1242450
uuucuagucuguuucuaag

SEQ ID NO: 1348493 - RNA, 19 nt, Artificial Sequence
  Description of Artificial Sequence: Synthetic oligonucleotide
  Antisense strand to SEQ ID NO: 1348492
cuuagaaacagacuagaaa

SEQ ID NO: 1348494 - RNA, 19 nt, Artificial Sequence
  Description of Artificial Sequence: Synthetic oligonucleotide
  Sense strand starting at position 1033 of SEQ ID NO: 1242450
gucuguuucuaaguuggaa

SEQ ID NO: 1348495 - RNA, 19 nt, Artificial Sequence
  Description of Artificial Sequence: Synthetic oligonucleotide
  Antisense strand to SEQ ID NO: 1348494
uuccaacuuagaaacagac

SEQ ID NO: 1348496 - RNA, 19 nt, Artificial Sequence
  Description of Artificial Sequence: Synthetic oligonucleotide
  Sense strand starting at position 1522 of SEQ ID NO: 1242450
cuaggaucuuguccuagca

SEQ ID NO: 1348497 - RNA, 19 nt, Artificial Sequence
  Description of Artificial Sequence: Synthetic oligonucleotide
  Antisense strand to SEQ ID NO: 1348496
ugcuaggacaagauccuag

SEQ ID NO: 1348498 - RNA, 19 nt, Artificial Sequence
  Description of Artificial Sequence: Synthetic oligonucleotide
  Sense strand starting at position 1540 of SEQ ID NO: 1242450
acacuccuuggguaucauu

SEQ ID NO: 1348499 - RNA, 19 nt, Artificial Sequence
  Description of Artificial Sequence: Synthetic oligonucleotide
  Antisense strand to SEQ ID NO: 1348498
aaugauacccaaggagugu

SEQ ID NO: 1348500 - RNA, 19 nt, Artificial Sequence
  Description of Artificial Sequence: Synthetic oligonucleotide
  Sense strand starting at position 1550 of SEQ ID NO: 1242450
gguaucauuucucaugaau

SEQ ID NO: 1348501 - RNA, 19 nt, Artificial Sequence
  Description of Artificial Sequence: Synthetic oligonucleotide
  Antisense strand to SEQ ID NO: 1348500
auucaugagaaaugauacc

SEQ ID NO: 1348502 - RNA, 19 nt, Artificial Sequence
  Description of Artificial Sequence: Synthetic oligonucleotide
  Sense strand starting at position 1669 of SEQ ID NO: 1242450
acccuaaaucccuggugaa

SEQ ID NO: 1348503 - RNA, 19 nt, Artificial Sequence
  Description of Artificial Sequence: Synthetic oligonucleotide
  Antisense strand to SEQ ID NO: 1348502
uucaccagggauuuagggu

SEQ ID NO: 1348504 - RNA, 19 nt, Artificial Sequence
  Description of Artificial Sequence: Synthetic oligonucleotide
  Sense strand starting at position 1670 of SEQ ID NO: 1242450
cccuaaaucccuggugaau

SEQ ID NO: 1348505 - RNA, 19 nt, Artificial Sequence
  Description of Artificial Sequence: Synthetic oligonucleotide
  Antisense strand to SEQ ID NO: 1348504
auucaccagggauuuaggg

SEQ ID NO: 1348506 - RNA, 19 nt, Artificial Sequence
  Description of Artificial Sequence: Synthetic oligonucleotide
  Sense strand starting at position 1717 of SEQ ID NO: 1242450
gggcucuccuuuccagaau

SEQ ID NO: 1348507 - RNA, 19 nt, Artificial Sequence
  Description of Artificial Sequence: Synthetic oligonucleotide
  Antisense strand to SEQ ID NO: 1348506
auucuggaaaggagagccc

SEQ ID NO: 1348508 - RNA, 19 nt, Artificial Sequence
  Description of Artificial Sequence: Synthetic oligonucleotide
  Sense strand starting at position 1849 of SEQ ID NO: 1242450
gccagugugaacggaugaa

SEQ ID NO: 1348509 - RNA, 19 nt, Artificial Sequence
  Description of Artificial Sequence: Synthetic oligonucleotide
  Antisense strand to SEQ ID NO: 1348508
uucauccguucacacuggc

SEQ ID NO: 1348510 - RNA, 19 nt, Artificial Sequence
  Description of Artificial Sequence: Synthetic oligonucleotide
  Sense strand starting at position 2549 of SEQ ID NO: 1242450
gguuucuccacugagcagu

SEQ ID NO: 1348511 - RNA, 19 nt, Artificial Sequence
  Description of Artificial Sequence: Synthetic oligonucleotide
  Antisense strand to SEQ ID NO: 1348510
acugcucaguggagaaacc

SEQ ID NO: 1348512 - RNA, 19 nt, Artificial Sequence
  Description of Artificial Sequence: Synthetic oligonucleotide
  Sense strand starting at position 2631 of SEQ ID NO: 1242450
gccucaacuuugccucaga

SEQ ID NO: 1348513 - RNA, 19 nt, Artificial Sequence
  Description of Artificial Sequence: Synthetic oligonucleotide
  Antisense strand to SEQ ID NO: 1348512
ucugaggcaaaguugaggc

SEQ ID NO: 1348514 - RNA, 19 nt, Artificial Sequence
  Description of Artificial Sequence: Synthetic oligonucleotide
  Sense strand starting at position 2749 of SEQ ID NO: 1242450
ccagauccgaggugagaaa

SEQ ID NO: 1348515 - RNA, 19 nt, Artificial Sequence
  Description of Artificial Sequence: Synthetic oligonucleotide
  Antisense strand to SEQ ID NO: 1348514
uuucucaccucggaucugg

SEQ ID NO: 1348516 - RNA, 19 nt, Artificial Sequence
  Description of Artificial Sequence: Synthetic oligonucleotide
  Sense strand starting at position 2814 of SEQ ID NO: 1242450
gugguuucugcuuaaggaa

SEQ ID NO: 1348517 - RNA, 19 nt, Artificial Sequence
  Description of Artificial Sequence: Synthetic oligonucleotide
  Antisense strand to SEQ ID NO: 1348516
uuccuuaagcagaaaccac

SEQ ID NO: 1348518 - RNA, 19 nt, Artificial Sequence
  Description of Artificial Sequence: Synthetic oligonucleotide
  Sense strand starting at position 2968 of SEQ ID NO: 1242450
accguauuacaguaacuuu

SEQ ID NO: 1348519 - RNA, 19 nt, Artificial Sequence
  Description of Artificial Sequence: Synthetic oligonucleotide
  Antisense strand to SEQ ID NO: 1348518
aaaguuacuguaauacggu

SEQ ID NO: 1348520 - RNA, 19 nt, Artificial Sequence
  Description of Artificial Sequence: Synthetic oligonucleotide
  Sense strand starting at position 3336 of SEQ ID NO: 1242450
uggccagauuggucucuaa

SEQ ID NO: 1348521 - RNA, 19 nt, Artificial Sequence
  Description of Artificial Sequence: Synthetic oligonucleotide
  Antisense strand to SEQ ID NO: 1348520
uuagagaccaaucuggcca

SEQ ID NO: 1348522 - RNA, 19 nt, Artificial Sequence
  Description of Artificial Sequence: Synthetic oligonucleotide
  Sense strand starting at position 3468 of SEQ ID NO: 1242450
auggauaaguuccuauguu

SEQ ID NO: 1348523 - RNA, 19 nt, Artificial Sequence
  Description of Artificial Sequence: Synthetic oligonucleotide
  Antisense strand to SEQ ID NO: 1348522
aacauaggaacuuauccau

SEQ ID NO: 1348524 - RNA, 19 nt, Artificial Sequence
  Description of Artificial Sequence: Synthetic oligonucleotide
  Sense strand starting at position 3661 of SEQ ID NO: 1242450
ugaauuaaauagccuauga

SEQ ID NO: 1348525 - RNA, 19 nt, Artificial Sequence
  Description of Artificial Sequence: Synthetic oligonucleotide
  Antisense strand to SEQ ID NO: 1348524
ucauaggcuauuuaauuca

SEQ ID NO: 1348526 - RNA, 19 nt, Artificial Sequence
  Description of Artificial Sequence: Synthetic oligonucleotide
  Sense strand starting at position 3780 of SEQ ID NO: 1242450
augauugaagccuguauaa

SEQ ID NO: 1348527 - RNA, 19 nt, Artificial Sequence
  Description of Artificial Sequence: Synthetic oligonucleotide
  Antisense strand to SEQ ID NO: 1348526
uuauacaggcuucaaucau

SEQ ID NO: 1348528 - RNA, 19 nt, Artificial Sequence
  Description of Artificial Sequence: Synthetic oligonucleotide
  Sense strand starting at position 3782 of SEQ ID NO: 1242450
gauugaagccuguauaaca

SEQ ID NO: 1348529 - RNA, 19 nt, Artificial Sequence
  Description of Artificial Sequence: Synthetic oligonucleotide
  Antisense strand to SEQ ID NO: 1348528
uguuauacaggcuucaauc

SEQ ID NO: 1348530 - RNA, 19 nt, Artificial Sequence
  Description of Artificial Sequence: Synthetic oligonucleotide
  Sense strand starting at position 3870 of SEQ ID NO: 1242450
agaggagcuguuuggugaa

SEQ ID NO: 1348531 - RNA, 19 nt, Artificial Sequence
  Description of Artificial Sequence: Synthetic oligonucleotide
  Antisense strand to SEQ ID NO: 1348530
uucaccaaacagcuccucu

SEQ ID NO: 1348532 - RNA, 19 nt, Artificial Sequence
  Description of Artificial Sequence: Synthetic oligonucleotide
  Sense strand starting at position 3872 of SEQ ID NO: 1242450
aggagcuguuuggugaaua

SEQ ID NO: 1348533 - RNA, 19 nt, Artificial Sequence
  Description of Artificial Sequence: Synthetic oligonucleotide
  Antisense strand to SEQ ID NO: 1348532
uauucaccaaacagcuccu

SEQ ID NO: 1348534 - RNA, 19 nt, Artificial Sequence
  Description of Artificial Sequence: Synthetic oligonucleotide
  Sense strand starting at position 3887 of SEQ ID NO: 1242450
aauagagguugucuugcua

SEQ ID NO: 1348535 - RNA, 19 nt, Artificial Sequence
  Description of Artificial Sequence: Synthetic oligonucleotide
  Antisense strand to SEQ ID NO: 1348534
uagcaagacaaccucuauu

SEQ ID NO: 1348536 - RNA, 19 nt, Artificial Sequence
  Description of Artificial Sequence: Synthetic oligonucleotide
  Sense strand starting at position 3898 of SEQ ID NO: 1242450
ucuugcuauguagauuaaa

SEQ ID NO: 1348537 - RNA, 19 nt, Artificial Sequence
  Description of Artificial Sequence: Synthetic oligonucleotide
  Antisense strand to SEQ ID NO: 1348536
uuuaaucuacauagcaaga

SEQ ID NO: 1348538 - RNA, 19 nt, Artificial Sequence
  Description of Artificial Sequence: Synthetic oligonucleotide
  Sense strand starting at position 29 of SEQ ID NO: 1242451
ccaugaaggccuugggaca

SEQ ID NO: 1348539 - RNA, 19 nt, Artificial Sequence
  Description of Artificial Sequence: Synthetic oligonucleotide
  Antisense strand to SEQ ID NO: 1348538
ugucccaaggccuucaugg

SEQ ID NO: 1348540 - RNA, 19 nt, Artificial Sequence
  Description of Artificial Sequence: Synthetic oligonucleotide
  Sense strand starting at position 136 of SEQ ID NO: 1242451
gggagccugugauuaucaa

SEQ ID NO: 1348541 - RNA, 19 nt, Artificial Sequence
  Description of Artificial Sequence: Synthetic oligonucleotide
  Antisense strand to SEQ ID NO: 1348540
uugauaaucacaggcuccc

SEQ ID NO: 1348542 - RNA, 19 nt, Artificial Sequence
  Description of Artificial Sequence: Synthetic oligonucleotide
  Sense strand starting at position 137 of SEQ ID NO: 1242451
ggagccugugauuaucaaa

SEQ ID NO: 1348543 - RNA, 19 nt, Artificial Sequence
  Description of Artificial Sequence: Synthetic oligonucleotide
  Antisense strand to SEQ ID NO: 1348542
uuugauaaucacaggcucc

SEQ ID NO: 1348544 - RNA, 19 nt, Artificial Sequence
  Description of Artificial Sequence: Synthetic oligonucleotide
  Sense strand starting at position 538 of SEQ ID NO: 1242451
cucugaguccagcagcaaa

SEQ ID NO: 1348545 - RNA, 19 nt, Artificial Sequence
  Description of Artificial Sequence: Synthetic oligonucleotide
  Antisense strand to SEQ ID NO: 1348544
uuugcugcuggacucagag

SEQ ID NO: 1348546 - RNA, 19 nt, Artificial Sequence
  Description of Artificial Sequence: Synthetic oligonucleotide
  Sense strand starting at position 1182 of SEQ ID NO: 1242451
gguagccuucuagaguagu

SEQ ID NO: 1348547 - RNA, 19 nt, Artificial Sequence
  Description of Artificial Sequence: Synthetic oligonucleotide
  Antisense strand to SEQ ID NO: 1348546
acuacucuagaaggcuacc

SEQ ID NO: 1348548 - RNA, 19 nt, Artificial Sequence
  Description of Artificial Sequence: Synthetic oligonucleotide
  Sense strand starting at position 1233 of SEQ ID NO: 1242451
ggcuguuaacaucaagaug

SEQ ID NO: 1348549 - RNA, 19 nt, Artificial Sequence
  Description of Artificial Sequence: Synthetic oligonucleotide
  Antisense strand to SEQ ID NO: 1348548
caucuugauguuaacagcc

SEQ ID NO: 1348550 - RNA, 19 nt, Artificial Sequence
  Description of Artificial Sequence: Synthetic oligonucleotide
  Sense strand starting at position 1236 of SEQ ID NO: 1242451
uguuaacaucaagaugcaa

SEQ ID NO: 1348551 - RNA, 19 nt, Artificial Sequence
  Description of Artificial Sequence: Synthetic oligonucleotide
  Antisense strand to SEQ ID NO: 1348550
uugcaucuugauguuaaca

SEQ ID NO: 1348552 - RNA, 19 nt, Artificial Sequence
  Description of Artificial Sequence: Synthetic oligonucleotide
  Sense strand starting at position 1371 of SEQ ID NO: 1242451
ggccuugagauguaggcuu

SEQ ID NO: 1348553 - RNA, 19 nt, Artificial Sequence
  Description of Artificial Sequence: Synthetic oligonucleotide
  Antisense strand to SEQ ID NO: 1348552
aagccuacaucucaaggcc

SEQ ID NO: 1348554 - RNA, 19 nt, Artificial Sequence
  Description of Artificial Sequence: Synthetic oligonucleotide
  Sense strand starting at position 1523 of SEQ ID NO: 1242451
cagacaggacucugcgaau

SEQ ID NO: 1348555 - RNA, 19 nt, Artificial Sequence
  Description of Artificial Sequence: Synthetic oligonucleotide
  Antisense strand to SEQ ID NO: 1348554
auucgcagaguccugucug

SEQ ID NO: 1348556 - RNA, 19 nt, Artificial Sequence
  Description of Artificial Sequence: Synthetic oligonucleotide
  Sense strand starting at position 1621 of SEQ ID NO: 1242451
ucagaauugcuccagccca

SEQ ID NO: 1348557 - RNA, 19 nt, Artificial Sequence
  Description of Artificial Sequence: Synthetic oligonucleotide
  Antisense strand to SEQ ID NO: 1348556
ugggcuggagcaauucuga

SEQ ID NO: 1348558 - RNA, 19 nt, Artificial Sequence
  Description of Artificial Sequence: Synthetic oligonucleotide
  Sense strand starting at position 1825 of SEQ ID NO: 1242451
uugaucucucccggaaacu

SEQ ID NO: 1348559 - RNA, 19 nt, Artificial Sequence
  Description of Artificial Sequence: Synthetic oligonucleotide
  Antisense strand to SEQ ID NO: 1348558
aguuuccgggagagaucaa

SEQ ID NO: 1348560 - RNA, 19 nt, Artificial Sequence
  Description of Artificial Sequence: Synthetic oligonucleotide
  Sense strand starting at position 1826 of SEQ ID NO: 1242451
ugaucucucccggaaacuu

SEQ ID NO: 1348561 - RNA, 19 nt, Artificial Sequence
  Description of Artificial Sequence: Synthetic oligonucleotide
  Antisense strand to SEQ ID NO: 1348560
aaguuuccgggagagauca

SEQ ID NO: 1348562 - RNA, 19 nt, Artificial Sequence
  Description of Artificial Sequence: Synthetic oligonucleotide
  Sense strand starting at position 1947 of SEQ ID NO: 1242451
ggcaguuggcccugagaag

SEQ ID NO: 1348563 - RNA, 19 nt, Artificial Sequence
  Description of Artificial Sequence: Synthetic oligonucleotide
  Antisense strand to SEQ ID NO: 1348562
cuucucagggccaacugcc

SEQ ID NO: 1348564 - RNA, 19 nt, Artificial Sequence
  Description of Artificial Sequence: Synthetic oligonucleotide
  Sense strand starting at position 1948 of SEQ ID NO: 1242451
gcaguuggcccugagaagu

SEQ ID NO: 1348565 - RNA, 19 nt, Artificial Sequence
  Description of Artificial Sequence: Synthetic oligonucleotide
  Antisense strand to SEQ ID NO: 1348564
acuucucagggccaacugc

SEQ ID NO: 1348566 - RNA, 19 nt, Artificial Sequence
  Description of Artificial Sequence: Synthetic oligonucleotide
  Sense strand starting at position 2211 of SEQ ID NO: 1242451
cucgaaacuugaucuccuu

SEQ ID NO: 1348567 - RNA, 19 nt, Artificial Sequence
  Description of Artificial Sequence: Synthetic oligonucleotide
  Antisense strand to SEQ ID NO: 1348566
aaggagaucaaguuucgag

SEQ ID NO: 1348568 - RNA, 19 nt, Artificial Sequence
  Description of Artificial Sequence: Synthetic oligonucleotide
  Sense strand starting at position 2238 of SEQ ID NO: 1242451
gagucaccucaguggagaa

SEQ ID NO: 1348569 - RNA, 19 nt, Artificial Sequence
  Description of Artificial Sequence: Synthetic oligonucleotide
  Antisense strand to SEQ ID NO: 1348568
uucuccacugaggugacuc

SEQ ID NO: 1348570 - RNA, 19 nt, Artificial Sequence
  Description of Artificial Sequence: Synthetic oligonucleotide
  Sense strand starting at position 2359 of SEQ ID NO: 1242451
gggccacugccugaugaau

SEQ ID NO: 1348571 - RNA, 19 nt, Artificial Sequence
  Description of Artificial Sequence: Synthetic oligonucleotide
  Antisense strand to SEQ ID NO: 1348570
auucaucaggcaguggccc

SEQ ID NO: 1348572 - RNA, 19 nt, Artificial Sequence
  Description of Artificial Sequence: Synthetic oligonucleotide
  Sense strand starting at position 2482 of SEQ ID NO: 1242451
gggcuucagggcuggaauu

SEQ ID NO: 1348573 - RNA, 19 nt, Artificial Sequence
  Description of Artificial Sequence: Synthetic oligonucleotide
  Antisense strand to SEQ ID NO: 1348572
aauuccagcccugaagccc

SEQ ID NO: 1348574 - RNA, 19 nt, Artificial Sequence
  Description of Artificial Sequence: Synthetic oligonucleotide
  Sense strand starting at position 2496 of SEQ ID NO: 1242451
gaauuccagguaugaucua

SEQ ID NO: 1348575 - RNA, 19 nt, Artificial Sequence
  Description of Artificial Sequence: Synthetic oligonucleotide
  Antisense strand to SEQ ID NO: 1348574
uagaucauaccuggaauuc

SEQ ID NO: 1348576 - RNA, 19 nt, Artificial Sequence
  Description of Artificial Sequence: Synthetic oligonucleotide
  Sense strand starting at position 2863 of SEQ ID NO: 1242451
gaggcagucucuuccuuga

SEQ ID NO: 1348577 - RNA, 19 nt, Artificial Sequence
  Description of Artificial Sequence: Synthetic oligonucleotide
  Antisense strand to SEQ ID NO: 1348576
ucaaggaagagacugccuc

SEQ ID NO: 1348578 - RNA, 19 nt, Artificial Sequence
  Description of Artificial Sequence: Synthetic oligonucleotide
  Sense strand starting at position 2865 of SEQ ID NO: 1242451
ggcagucucuuccuugaag

SEQ ID NO: 1348579 - RNA, 19 nt, Artificial Sequence
  Description of Artificial Sequence: Synthetic oligonucleotide
  Antisense strand to SEQ ID NO: 1348578
cuucaaggaagagacugcc

SEQ ID NO: 1348580 - RNA, 19 nt, Artificial Sequence
  Description of Artificial Sequence: Synthetic oligonucleotide
  Sense strand starting at position 2867 of SEQ ID NO: 1242451
cagucucuuccuugaagga

SEQ ID NO: 1348581 - RNA, 19 nt, Artificial Sequence
  Description of Artificial Sequence: Synthetic oligonucleotide
  Antisense strand to SEQ ID NO: 1348580
uccuucaaggaagagacug

SEQ ID NO: 1348582 - RNA, 19 nt, Artificial Sequence
  Description of Artificial Sequence: Synthetic oligonucleotide
  Sense strand starting at position 2931 of SEQ ID NO: 1242451
augugagauuggcuuccaa

SEQ ID NO: 1348583 - RNA, 19 nt, Artificial Sequence
  Description of Artificial Sequence: Synthetic oligonucleotide
  Antisense strand to SEQ ID NO: 1348582
uuggaagccaaucucacau

SEQ ID NO: 1348584 - RNA, 19 nt, Artificial Sequence
  Description of Artificial Sequence: Synthetic oligonucleotide
  Sense strand starting at position 2938 of SEQ ID NO: 1242451
auuggcuuccaaugauagu

SEQ ID NO: 1348585 - RNA, 19 nt, Artificial Sequence
  Description of Artificial Sequence: Synthetic oligonucleotide
  Antisense strand to SEQ ID NO: 1348584
acuaucauuggaagccaau

SEQ ID NO: 1348586 - RNA, 19 nt, Artificial Sequence
  Description of Artificial Sequence: Synthetic oligonucleotide
  Sense strand starting at position 3083 of SEQ ID NO: 1242451
ccaucuuguccauggagaa

SEQ ID NO: 1348587 - RNA, 19 nt, Artificial Sequence
  Description of Artificial Sequence: Synthetic oligonucleotide
  Antisense strand to SEQ ID NO: 1348586
uucuccauggacaagaugg

SEQ ID NO: 1348588 - RNA, 19 nt, Artificial Sequence
  Description of Artificial Sequence: Synthetic oligonucleotide
  Sense strand starting at position 3084 of SEQ ID NO: 1242451
caucuuguccauggagaag

SEQ ID NO: 1348589 - RNA, 19 nt, Artificial Sequence
  Description of Artificial Sequence: Synthetic oligonucleotide
  Antisense strand to SEQ ID NO: 1348588
cuucuccauggacaagaug

SEQ ID NO: 1348590 - RNA, 19 nt, Artificial Sequence
  Description of Artificial Sequence: Synthetic oligonucleotide
  Sense strand starting at position 3268 of SEQ ID NO: 1242451
uccaucaaugcugauaagu

SEQ ID NO: 1348591 - RNA, 19 nt, Artificial Sequence
  Description of Artificial Sequence: Synthetic oligonucleotide
  Antisense strand to SEQ ID NO: 1348590
acuuaucagcauugaugga

SEQ ID NO: 1348592 - RNA, 19 nt, Artificial Sequence
  Description of Artificial Sequence: Synthetic oligonucleotide
  Sense strand starting at position 3323 of SEQ ID NO: 1242451
ugagguaauucucuggacu

SEQ ID NO: 1348593 - RNA, 19 nt, Artificial Sequence
  Description of Artificial Sequence: Synthetic oligonucleotide
  Antisense strand to SEQ ID NO: 1348592
aguccagagaauuaccuca

SEQ ID NO: 1348594 - RNA, 19 nt, Artificial Sequence
  Description of Artificial Sequence: Synthetic oligonucleotide
  Sense strand starting at position 3324 of SEQ ID NO: 1242451
gagguaauucucuggacug

SEQ ID NO: 1348595 - RNA, 19 nt, Artificial Sequence
  Description of Artificial Sequence: Synthetic oligonucleotide
  Antisense strand to SEQ ID NO: 1348594
caguccagagaauuaccuc

SEQ ID NO: 1348596 - RNA, 19 nt, Artificial Sequence
  Description of Artificial Sequence: Synthetic oligonucleotide
  Sense strand starting at position 3396 of SEQ ID NO: 1242451
guugcugaacaauacauaa

SEQ ID NO: 1348597 - RNA, 19 nt, Artificial Sequence
  Description of Artificial Sequence: Synthetic oligonucleotide
  Antisense strand to SEQ ID NO: 1348596
uuauguauuguucagcaac

SEQ ID NO: 1348598 - RNA, 19 nt, Artificial Sequence
  Description of Artificial Sequence: Synthetic oligonucleotide
  Sense strand starting at position 3431 of SEQ ID NO: 1242451
augcuucuuuaacuaggua

SEQ ID NO: 1348599 - RNA, 19 nt, Artificial Sequence
  Description of Artificial Sequence: Synthetic oligonucleotide
  Antisense strand to SEQ ID NO: 1348598
uaccuaguuaaagaagcau

SEQ ID NO: 1348600 - RNA, 19 nt, Artificial Sequence
  Description of Artificial Sequence: Synthetic oligonucleotide
  Sense strand starting at position 3435 of SEQ ID NO: 1242451
uucuuuaacuagguagaca

SEQ ID NO: 1348601 - RNA, 19 nt, Artificial Sequence
  Description of Artificial Sequence: Synthetic oligonucleotide
  Antisense strand to SEQ ID NO: 1348600
ugucuaccuaguuaaagaa

SEQ ID NO: 1348602 - RNA, 19 nt, Artificial Sequence
  Description of Artificial Sequence: Synthetic oligonucleotide
  Sense strand starting at position 3447 of SEQ ID NO: 1242451
guagacauauguguaugua

SEQ ID NO: 1348603 - RNA, 19 nt, Artificial Sequence
  Description of Artificial Sequence: Synthetic oligonucleotide
  Antisense strand to SEQ ID NO: 1348602
uacauacacauaugucuac

SEQ ID NO: 1348604 - RNA, 19 nt, Artificial Sequence
  Description of Artificial Sequence: Synthetic oligonucleotide
  Sense strand starting at position 3636 of SEQ ID NO: 1242451
ugaguaaggagcugugaag

SEQ ID NO: 1348605 - RNA, 19 nt, Artificial Sequence
  Description of Artificial Sequence: Synthetic oligonucleotide
  Antisense strand to SEQ ID NO: 1348604
cuucacagcuccuuacuca

SEQ ID NO: 1348606 - RNA, 19 nt, Artificial Sequence
  Description of Artificial Sequence: Synthetic oligonucleotide
  Sense strand starting at position 3659 of SEQ ID NO: 1242451
cacugagcugugugaauuu

SEQ ID NO: 1348607 - RNA, 19 nt, Artificial Sequence
  Description of Artificial Sequence: Synthetic oligonucleotide
  Antisense strand to SEQ ID NO: 1348606
aaauucacacagcucagug

SEQ ID NO: 1348608 - RNA, 19 nt, Artificial Sequence
  Description of Artificial Sequence: Synthetic oligonucleotide
  Sense strand starting at position 3728 of SEQ ID NO: 1242451
agauguagcccuuagacua

SEQ ID NO: 1348609 - RNA, 19 nt, Artificial Sequence
  Description of Artificial Sequence: Synthetic oligonucleotide
  Antisense strand to SEQ ID NO: 1348608
uagucuaagggcuacaucu

SEQ ID NO: 1348610 - RNA, 19 nt, Artificial Sequence
  Description of Artificial Sequence: Synthetic oligonucleotide
  Sense strand starting at position 3770 of SEQ ID NO: 1242451
aagaguguugagcacaauu

SEQ ID NO: 1348611 - RNA, 19 nt, Artificial Sequence
  Description of Artificial Sequence: Synthetic oligonucleotide
  Antisense strand to SEQ ID NO: 1348610
aauugugcucaacacucuu

SEQ ID NO: 1348612 - RNA, 19 nt, Artificial Sequence
  Description of Artificial Sequence: Synthetic oligonucleotide
  Sense strand starting at position 3835 of SEQ ID NO: 1242451
uccuucuagcugggugaaa

SEQ ID NO: 1348613 - RNA, 19 nt, Artificial Sequence
  Description of Artificial Sequence: Synthetic oligonucleotide
  Antisense strand to SEQ ID NO: 1348612
uuucacccagcuagaagga

SEQ ID NO: 1348614 - RNA, 19 nt, Artificial Sequence
  Description of Artificial Sequence: Synthetic oligonucleotide
  Sense strand starting at position 3859 of SEQ ID NO: 1242451
uugugauagcuggaucuca

SEQ ID NO: 1348615 - RNA, 19 nt, Artificial Sequence
  Description of Artificial Sequence: Synthetic oligonucleotide
  Antisense strand to SEQ ID NO: 1348614
ugagauccagcuaucacaa

SEQ ID NO: 1348616 - RNA, 19 nt, Artificial Sequence
  Description of Artificial Sequence: Synthetic oligonucleotide
  Sense strand starting at position 3903 of SEQ ID NO: 1242451
gaagucaugaguuaaguag

SEQ ID NO: 1348617 - RNA, 19 nt, Artificial Sequence
  Description of Artificial Sequence: Synthetic oligonucleotide
  Antisense strand to SEQ ID NO: 1348616
cuacuuaacucaugacuuc

SEQ ID NO: 1348618 - RNA, 19 nt, Artificial Sequence
  Description of Artificial Sequence: Synthetic oligonucleotide
  Sense strand starting at position 200 of SEQ ID NO: 1242452
gcaagacauccuggcagga

SEQ ID NO: 1348619 - RNA, 19 nt, Artificial Sequence
  Description of Artificial Sequence: Synthetic oligonucleotide
  Antisense strand to SEQ ID NO: 1348618
uccugccaggaugucuugc

SEQ ID NO: 1348620 - RNA, 19 nt, Artificial Sequence
  Description of Artificial Sequence: Synthetic oligonucleotide
  Sense strand starting at position 387 of SEQ ID NO: 1242452
ggaauaggcucuccucauc

SEQ ID NO: 1348621 - RNA, 19 nt, Artificial Sequence
  Description of Artificial Sequence: Synthetic oligonucleotide
  Antisense strand to SEQ ID NO: 1348620
gaugaggagagccuauucc

SEQ ID NO: 1348622 - RNA, 19 nt, Artificial Sequence
  Description of Artificial Sequence: Synthetic oligonucleotide
  Sense strand starting at position 436 of SEQ ID NO: 1242452
cuuguuuccucagugacuu

SEQ ID NO: 1348623 - RNA, 19 nt, Artificial Sequence
  Description of Artificial Sequence: Synthetic oligonucleotide
  Antisense strand to SEQ ID NO: 1348622
aagucacugaggaaacaag

SEQ ID NO: 1348624 - RNA, 19 nt, Artificial Sequence
  Description of Artificial Sequence: Synthetic oligonucleotide
  Sense strand starting at position 448 of SEQ ID NO: 1242452
gugacuucucaccaggcuu

SEQ ID NO: 1348625 - RNA, 19 nt, Artificial Sequence
  Description of Artificial Sequence: Synthetic oligonucleotide
  Antisense strand to SEQ ID NO: 1348624
aagccuggugagaagucac

SEQ ID NO: 1348626 - RNA, 19 nt, Artificial Sequence
  Description of Artificial Sequence: Synthetic oligonucleotide
  Sense strand starting at position 643 of SEQ ID NO: 1242452
gggagccaucccugcagau

SEQ ID NO: 1348627 - RNA, 19 nt, Artificial Sequence
  Description of Artificial Sequence: Synthetic oligonucleotide
  Antisense strand to SEQ ID NO: 1348626
aucugcagggauggcuccc

SEQ ID NO: 1348628 - RNA, 19 nt, Artificial Sequence
  Description of Artificial Sequence: Synthetic oligonucleotide
  Sense strand starting at position 645 of SEQ ID NO: 1242452
gagccaucccugcagaucu

SEQ ID NO: 1348629 - RNA, 19 nt, Artificial Sequence
  Description of Artificial Sequence: Synthetic oligonucleotide
  Antisense strand to SEQ ID NO: 1348628
agaucugcagggauggcuc

SEQ ID NO: 1348630 - RNA, 19 nt, Artificial Sequence
  Description of Artificial Sequence: Synthetic oligonucleotide
  Sense strand starting at position 658 of SEQ ID NO: 1242452
agaucugaaucaucuguau

SEQ ID NO: 1348631 - RNA, 19 nt, Artificial Sequence
  Description of Artificial Sequence: Synthetic oligonucleotide
  Antisense strand to SEQ ID NO: 1348630
auacagaugauucagaucu

SEQ ID NO: 1348632 - RNA, 19 nt, Artificial Sequence
  Description of Artificial Sequence: Synthetic oligonucleotide
  Sense strand starting at position 711 of SEQ ID NO: 1242452
agccuuaggugucuuaaca

SEQ ID NO: 1348633 - RNA, 19 nt, Artificial Sequence
  Description of Artificial Sequence: Synthetic oligonucleotide
  Antisense strand to SEQ ID NO: 1348632
uguuaagacaccuaaggcu

SEQ ID NO: 1348634 - RNA, 19 nt, Artificial Sequence
  Description of Artificial Sequence: Synthetic oligonucleotide
  Sense strand starting at position 737 of SEQ ID NO: 1242452
gagggauguuguucucaug

SEQ ID NO: 1348635 - RNA, 19 nt, Artificial Sequence
  Description of Artificial Sequence: Synthetic oligonucleotide
  Antisense strand to SEQ ID NO: 1348634
caugagaacaacaucccuc

SEQ ID NO: 1348636 - RNA, 19 nt, Artificial Sequence
  Description of Artificial Sequence: Synthetic oligonucleotide
  Sense strand starting at position 744 of SEQ ID NO: 1242452
guuguucucauguaacaga

SEQ ID NO: 1348637 - RNA, 19 nt, Artificial Sequence
  Description of Artificial Sequence: Synthetic oligonucleotide
  Antisense strand to SEQ ID NO: 1348636
ucuguuacaugagaacaac

SEQ ID NO: 1348638 - RNA, 19 nt, Artificial Sequence
  Description of Artificial Sequence: Synthetic oligonucleotide
  Sense strand starting at position 895 of SEQ ID NO: 1242452
cauucugauggcugacaga

SEQ ID NO: 1348639 - RNA, 19 nt, Artificial Sequence
  Description of Artificial Sequence: Synthetic oligonucleotide
  Antisense strand to SEQ ID NO: 1348638
ucugucagccaucagaaug

SEQ ID NO: 1348640 - RNA, 19 nt, Artificial Sequence
  Description of Artificial Sequence: Synthetic oligonucleotide
  Sense strand starting at position 1174 of SEQ ID NO: 1242452
cucuuuaauccugaagguu

SEQ ID NO: 1348641 - RNA, 19 nt, Artificial Sequence
  Description of Artificial Sequence: Synthetic oligonucleotide
  Antisense strand to SEQ ID NO: 1348640
aaccuucaggauuaaagag

SEQ ID NO: 1348642 - RNA, 19 nt, Artificial Sequence
  Description of Artificial Sequence: Synthetic oligonucleotide
  Sense strand starting at position 1183 of SEQ ID NO: 1242452
ccugaagguuacuuucuua

SEQ ID NO: 1348643 - RNA, 19 nt, Artificial Sequence
  Description of Artificial Sequence: Synthetic oligonucleotide
  Antisense strand to SEQ ID NO: 1348642
uaagaaaguaaccuucagg

SEQ ID NO: 1348644 - RNA, 19 nt, Artificial Sequence
  Description of Artificial Sequence: Synthetic oligonucleotide
  Sense strand starting at position 1426 of SEQ ID NO: 1242452
gucugagcugccuaaagag

SEQ ID NO: 1348645 - RNA, 19 nt, Artificial Sequence
  Description of Artificial Sequence: Synthetic oligonucleotide
  Antisense strand to SEQ ID NO: 1348644
cucuuuaggcagcucagac

SEQ ID NO: 1348646 - RNA, 19 nt, Artificial Sequence
  Description of Artificial Sequence: Synthetic oligonucleotide
  Sense strand starting at position 1645 of SEQ ID NO: 1242452
ggccucggugauggaaaua

SEQ ID NO: 1348647 - RNA, 19 nt, Artificial Sequence
  Description of Artificial Sequence: Synthetic oligonucleotide
  Antisense strand to SEQ ID NO: 1348646
uauuuccaucaccgaggcc

SEQ ID NO: 1348648 - RNA, 19 nt, Artificial Sequence
  Description of Artificial Sequence: Synthetic oligonucleotide
  Sense strand starting at position 1928 of SEQ ID NO: 1242452
gggaaucuguccguuucuu

SEQ ID NO: 1348649 - RNA, 19 nt, Artificial Sequence
  Description of Artificial Sequence: Synthetic oligonucleotide
  Antisense strand to SEQ ID NO: 1348648
aagaaacggacagauuccc

SEQ ID NO: 1348650 - RNA, 19 nt, Artificial Sequence
  Description of Artificial Sequence: Synthetic oligonucleotide
  Sense strand starting at position 1947 of SEQ ID NO: 1242452
cuccuaggguuuccaugaa

SEQ ID NO: 1348651 - RNA, 19 nt, Artificial Sequence
  Description of Artificial Sequence: Synthetic oligonucleotide
  Antisense strand to SEQ ID NO: 1348650
uucauggaaacccuaggag

SEQ ID NO: 1348652 - RNA, 19 nt, Artificial Sequence
  Description of Artificial Sequence: Synthetic oligonucleotide
  Sense strand starting at position 1966 of SEQ ID NO: 1242452
ggaggcaacaugugucuca

SEQ ID NO: 1348653 - RNA, 19 nt, Artificial Sequence
  Description of Artificial Sequence: Synthetic oligonucleotide
  Antisense strand to SEQ ID NO: 1348652
ugagacacauguugccucc

SEQ ID NO: 1348654 - RNA, 19 nt, Artificial Sequence
  Description of Artificial Sequence: Synthetic oligonucleotide
  Sense strand starting at position 1967 of SEQ ID NO: 1242452
gaggcaacaugugucucau

SEQ ID NO: 1348655 - RNA, 19 nt, Artificial Sequence
  Description of Artificial Sequence: Synthetic oligonucleotide
  Antisense strand to SEQ ID NO: 1348654
augagacacauguugccuc

SEQ ID NO: 1348656 - RNA, 19 nt, Artificial Sequence
  Description of Artificial Sequence: Synthetic oligonucleotide
  Sense strand starting at position 1973 of SEQ ID NO: 1242452
acaugugucucauugguaa

SEQ ID NO: 1348657 - RNA, 19 nt, Artificial Sequence
  Description of Artificial Sequence: Synthetic oligonucleotide
  Antisense strand to SEQ ID NO: 1348656
uuaccaaugagacacaugu

SEQ ID NO: 1348658 - RNA, 19 nt, Artificial Sequence
  Description of Artificial Sequence: Synthetic oligonucleotide
  Sense strand starting at position 1975 of SEQ ID NO: 1242452
augugucucauugguaaac

SEQ ID NO: 1348659 - RNA, 19 nt, Artificial Sequence
  Description of Artificial Sequence: Synthetic oligonucleotide
  Antisense strand to SEQ ID NO: 1348658
guuuaccaaugagacacau

SEQ ID NO: 1348660 - RNA, 19 nt, Artificial Sequence
  Description of Artificial Sequence: Synthetic oligonucleotide
  Sense strand starting at position 2045 of SEQ ID NO: 1242452
ggcggaaauuagcucuuua

SEQ ID NO: 1348661 - RNA, 19 nt, Artificial Sequence
  Description of Artificial Sequence: Synthetic oligonucleotide
  Antisense strand to SEQ ID NO: 1348660
uaaagagcuaauuuccgcc

SEQ ID NO: 1348662 - RNA, 19 nt, Artificial Sequence
  Description of Artificial Sequence: Synthetic oligonucleotide
  Sense strand starting at position 2303 of SEQ ID NO: 1242452
gggucucuguccuuccaau

SEQ ID NO: 1348663 - RNA, 19 nt, Artificial Sequence
  Description of Artificial Sequence: Synthetic oligonucleotide
  Antisense strand to SEQ ID NO: 1348662
auuggaaggacagagaccc

SEQ ID NO: 1348664 - RNA, 19 nt, Artificial Sequence
  Description of Artificial Sequence: Synthetic oligonucleotide
  Sense strand starting at position 2553 of SEQ ID NO: 1242452
uggucuguaccaugggaaa

SEQ ID NO: 1348665 - RNA, 19 nt, Artificial Sequence
  Description of Artificial Sequence: Synthetic oligonucleotide
  Antisense strand to SEQ ID NO: 1348664
uuucccaugguacagacca

SEQ ID NO: 1348666 - RNA, 19 nt, Artificial Sequence
  Description of Artificial Sequence: Synthetic oligonucleotide
  Sense strand starting at position 2622 of SEQ ID NO: 1242452
agaaccuuuccguggugau

SEQ ID NO: 1348667 - RNA, 19 nt, Artificial Sequence
  Description of Artificial Sequence: Synthetic oligonucleotide
  Antisense strand to SEQ ID NO: 1348666
aucaccacggaaagguucu

SEQ ID NO: 1348668 - RNA, 19 nt, Artificial Sequence
  Description of Artificial Sequence: Synthetic oligonucleotide
  Sense strand starting at position 2623 of SEQ ID NO: 1242452
gaaccuuuccguggugauc

SEQ ID NO: 1348669 - RNA, 19 nt, Artificial Sequence
  Description of Artificial Sequence: Synthetic oligonucleotide
  Antisense strand to SEQ ID NO: 1348668
gaucaccacggaaagguuc

SEQ ID NO: 1348670 - RNA, 19 nt, Artificial Sequence
  Description of Artificial Sequence: Synthetic oligonucleotide
  Sense strand starting at position 2752 of SEQ ID NO: 1242452
guagacagggcuugaaauc

SEQ ID NO: 1348671 - RNA, 19 nt, Artificial Sequence
  Description of Artificial Sequence: Synthetic oligonucleotide
  Antisense strand to SEQ ID NO: 1348670
gauuucaagcccugucuac

SEQ ID NO: 1348672 - RNA, 19 nt, Artificial Sequence
  Description of Artificial Sequence: Synthetic oligonucleotide
  Sense strand starting at position 2761 of SEQ ID NO: 1242452
gcuugaaauccuggaggcu

SEQ ID NO: 1348673 - RNA, 19 nt, Artificial Sequence
  Description of Artificial Sequence: Synthetic oligonucleotide
  Antisense strand to SEQ ID NO: 1348672
agccuccaggauuucaagc

SEQ ID NO: 1348674 - RNA, 19 nt, Artificial Sequence
  Description of Artificial Sequence: Synthetic oligonucleotide
  Sense strand starting at position 2943 of SEQ ID NO: 1242452
ccgagcuuuauuugaugua

SEQ ID NO: 1348675 - RNA, 19 nt, Artificial Sequence
  Description of Artificial Sequence: Synthetic oligonucleotide
  Antisense strand to SEQ ID NO: 1348674
uacaucaaauaaagcucgg

SEQ ID NO: 1348676 - RNA, 19 nt, Artificial Sequence
  Description of Artificial Sequence: Synthetic oligonucleotide
  Sense strand starting at position 2944 of SEQ ID NO: 1242452
cgagcuuuauuugauguaa

SEQ ID NO: 1348677 - RNA, 19 nt, Artificial Sequence
  Description of Artificial Sequence: Synthetic oligonucleotide
  Antisense strand to SEQ ID NO: 1348676
uuacaucaaauaaagcucg

SEQ ID NO: 1348678 - RNA, 19 nt, Artificial Sequence
  Description of Artificial Sequence: Synthetic oligonucleotide
  Sense strand starting at position 2999 of SEQ ID NO: 1242452
gcgggaaacuugccuucca

SEQ ID NO: 1348679 - RNA, 19 nt, Artificial Sequence
  Description of Artificial Sequence: Synthetic oligonucleotide
  Antisense strand to SEQ ID NO: 1348678
uggaaggcaaguuucccgc

SEQ ID NO: 1348680 - RNA, 19 nt, Artificial Sequence
  Description of Artificial Sequence: Synthetic oligonucleotide
  Sense strand starting at position 3120 of SEQ ID NO: 1242452
agaaauugagcuuggcaaa

SEQ ID NO: 1348681 - RNA, 19 nt, Artificial Sequence
  Description of Artificial Sequence: Synthetic oligonucleotide
  Antisense strand to SEQ ID NO: 1348680
uuugccaagcucaauuucu

SEQ ID NO: 1348682 - RNA, 19 nt, Artificial Sequence
  Description of Artificial Sequence: Synthetic oligonucleotide
  Sense strand starting at position 3121 of SEQ ID NO: 1242452
gaaauugagcuuggcaaag

SEQ ID NO: 1348683 - RNA, 19 nt, Artificial Sequence
  Description of Artificial Sequence: Synthetic oligonucleotide
  Antisense strand to SEQ ID NO: 1348682
cuuugccaagcucaauuuc

SEQ ID NO: 1348684 - RNA, 19 nt, Artificial Sequence
  Description of Artificial Sequence: Synthetic oligonucleotide
  Sense strand starting at position 3400 of SEQ ID NO: 1242452
guuagacauccuugccuau

SEQ ID NO: 1348685 - RNA, 19 nt, Artificial Sequence
  Description of Artificial Sequence: Synthetic oligonucleotide
  Antisense strand to SEQ ID NO: 1348684
auaggcaaggaugucuaac

SEQ ID NO: 1348686 - RNA, 19 nt, Artificial Sequence
  Description of Artificial Sequence: Synthetic oligonucleotide
  Sense strand starting at position 3751 of SEQ ID NO: 1242452
cauccucuuccuuggagga

SEQ ID NO: 1348687 - RNA, 19 nt, Artificial Sequence
  Description of Artificial Sequence: Synthetic oligonucleotide
  Antisense strand to SEQ ID NO: 1348686
uccuccaaggaagaggaug

SEQ ID NO: 1348688 - RNA, 19 nt, Artificial Sequence
  Description of Artificial Sequence: Synthetic oligonucleotide
  Sense strand starting at position 3752 of SEQ ID NO: 1242452
auccucuuccuuggaggaa

SEQ ID NO: 1348689 - RNA, 19 nt, Artificial Sequence
  Description of Artificial Sequence: Synthetic oligonucleotide
  Antisense strand to SEQ ID NO: 1348688
uuccuccaaggaagaggau

SEQ ID NO: 1348690 - RNA, 19 nt, Artificial Sequence
  Description of Artificial Sequence: Synthetic oligonucleotide
  Sense strand starting at position 3842 of SEQ ID NO: 1242452
ugauguaugguagggcuua

SEQ ID NO: 1348691 - RNA, 19 nt, Artificial Sequence
  Description of Artificial Sequence: Synthetic oligonucleotide
  Antisense strand to SEQ ID NO: 1348690
uaagcccuaccauacauca

SEQ ID NO: 1348692 - RNA, 19 nt, Artificial Sequence
  Description of Artificial Sequence: Synthetic oligonucleotide
  Sense strand starting at position 3908 of SEQ ID NO: 1242452
acgggaguuggcuguuuga

SEQ ID NO: 1348693 - RNA, 19 nt, Artificial Sequence
  Description of Artificial Sequence: Synthetic oligonucleotide
  Antisense strand to SEQ ID NO: 1348692
ucaaacagccaacucccgu

SEQ ID NO: 1348694 - RNA, 19 nt, Artificial Sequence
  Description of Artificial Sequence: Synthetic oligonucleotide
  Sense strand starting at position 3911 of SEQ ID NO: 1242452
ggaguuggcuguuugagac

SEQ ID NO: 1348695 - RNA, 19 nt, Artificial Sequence
  Description of Artificial Sequence: Synthetic oligonucleotide
  Antisense strand to SEQ ID NO: 1348694
gucucaaacagccaacucc

SEQ ID NO: 1348696 - RNA, 19 nt, Artificial Sequence
  Description of Artificial Sequence: Synthetic oligonucleotide
  Sense strand starting at position 3961 of SEQ ID NO: 1242452
ugguguguugcugauacca

SEQ ID NO: 1348697 - RNA, 19 nt, Artificial Sequence
  Description of Artificial Sequence: Synthetic oligonucleotide
  Antisense strand to SEQ ID NO: 1348696
ugguaucagcaacacacca

SEQ ID NO: 1348698 - RNA, 19 nt, Artificial Sequence
  Description of Artificial Sequence: Synthetic oligonucleotide
  Sense strand starting at position 507 of SEQ ID NO: 1242453
gguagccuucuagaguagu

SEQ ID NO: 1348699 - RNA, 19 nt, Artificial Sequence
  Description of Artificial Sequence: Synthetic oligonucleotide
  Antisense strand to SEQ ID NO: 1348698
acuacucuagaaggcuacc

SEQ ID NO: 1348700 - RNA, 19 nt, Artificial Sequence
  Description of Artificial Sequence: Synthetic oligonucleotide
  Sense strand starting at position 558 of SEQ ID NO: 1242453
ggcuguuaacaucaagaug

SEQ ID NO: 1348701 - RNA, 19 nt, Artificial Sequence
  Description of Artificial Sequence: Synthetic oligonucleotide
  Antisense strand to SEQ ID NO: 1348700
caucuugauguuaacagcc

SEQ ID NO: 1348702 - RNA, 19 nt, Artificial Sequence
  Description of Artificial Sequence: Synthetic oligonucleotide
  Sense strand starting at position 561 of SEQ ID NO: 1242453
uguuaacaucaagaugcaa

SEQ ID NO: 1348703 - RNA, 19 nt, Artificial Sequence
  Description of Artificial Sequence: Synthetic oligonucleotide
  Antisense strand to SEQ ID NO: 1348702
uugcaucuugauguuaaca

SEQ ID NO: 1348704 - RNA, 19 nt, Artificial Sequence
  Description of Artificial Sequence: Synthetic oligonucleotide
  Sense strand starting at position 696 of SEQ ID NO: 1242453
ggccuugagauguaggcuu

SEQ ID NO: 1348705 - RNA, 19 nt, Artificial Sequence
  Description of Artificial Sequence: Synthetic oligonucleotide
  Antisense strand to SEQ ID NO: 1348704
aagccuacaucucaaggcc

SEQ ID NO: 1348706 - RNA, 19 nt, Artificial Sequence
  Description of Artificial Sequence: Synthetic oligonucleotide
  Sense strand starting at position 848 of SEQ ID NO: 1242453
cagacaggacucugcgaau

SEQ ID NO: 1348707 - RNA, 19 nt, Artificial Sequence
  Description of Artificial Sequence: Synthetic oligonucleotide
  Antisense strand to SEQ ID NO: 1348706
auucgcagaguccugucug

SEQ ID NO: 1348708 - RNA, 19 nt, Artificial Sequence
  Description of Artificial Sequence: Synthetic oligonucleotide
  Sense strand starting at position 946 of SEQ ID NO: 1242453
ucagaauugcuccagccca

SEQ ID NO: 1348709 - RNA, 19 nt, Artificial Sequence
  Description of Artificial Sequence: Synthetic oligonucleotide
  Antisense strand to SEQ ID NO: 1348708
ugggcuggagcaauucuga

SEQ ID NO: 1348710 - RNA, 19 nt, Artificial Sequence
  Description of Artificial Sequence: Synthetic oligonucleotide
  Sense strand starting at position 1150 of SEQ ID NO: 1242453
uugaucucucccggaaacu

SEQ ID NO: 1348711 - RNA, 19 nt, Artificial Sequence
  Description of Artificial Sequence: Synthetic oligonucleotide
  Antisense strand to SEQ ID NO: 1348710
aguuuccgggagagaucaa

SEQ ID NO: 1348712 - RNA, 19 nt, Artificial Sequence
  Description of Artificial Sequence: Synthetic oligonucleotide
  Sense strand starting at position 1151 of SEQ ID NO: 1242453
ugaucucucccggaaacuu

SEQ ID NO: 1348713 - RNA, 19 nt, Artificial Sequence
  Description of Artificial Sequence: Synthetic oligonucleotide
  Antisense strand to SEQ ID NO: 1348712
aaguuuccgggagagauca

SEQ ID NO: 1348714 - RNA, 19 nt, Artificial Sequence
  Description of Artificial Sequence: Synthetic oligonucleotide
  Sense strand starting at position 1272 of SEQ ID NO: 1242453
ggcaguuggcccugagaag

SEQ ID NO: 1348715 - RNA, 19 nt, Artificial Sequence
  Description of Artificial Sequence: Synthetic oligonucleotide
  Antisense strand to SEQ ID NO: 1348714
cuucucagggccaacugcc

SEQ ID NO: 1348716 - RNA, 19 nt, Artificial Sequence
  Description of Artificial Sequence: Synthetic oligonucleotide
  Sense strand starting at position 1273 of SEQ ID NO: 1242453
gcaguuggcccugagaagu

SEQ ID NO: 1348717 - RNA, 19 nt, Artificial Sequence
  Description of Artificial Sequence: Synthetic oligonucleotide
  Antisense strand to SEQ ID NO: 1348716
acuucucagggccaacugc

SEQ ID NO: 1348718 - RNA, 19 nt, Artificial Sequence
  Description of Artificial Sequence: Synthetic oligonucleotide
  Sense strand starting at position 1536 of SEQ ID NO: 1242453
cucgaaacuugaucuccuu

SEQ ID NO: 1348719 - RNA, 19 nt, Artificial Sequence
  Description of Artificial Sequence: Synthetic oligonucleotide
  Antisense strand to SEQ ID NO: 1348718
aaggagaucaaguuucgag

SEQ ID NO: 1348720 - RNA, 19 nt, Artificial Sequence
  Description of Artificial Sequence: Synthetic oligonucleotide
  Sense strand starting at position 1563 of SEQ ID NO: 1242453
gagucaccucaguggagaa

SEQ ID NO: 1348721 - RNA, 19 nt, Artificial Sequence
  Description of Artificial Sequence: Synthetic oligonucleotide
  Antisense strand to SEQ ID NO: 1348720
uucuccacugaggugacuc

SEQ ID NO: 1348722 - RNA, 19 nt, Artificial Sequence
  Description of Artificial Sequence: Synthetic oligonucleotide
  Sense strand starting at position 1684 of SEQ ID NO: 1242453
gggccacugccugaugaau

SEQ ID NO: 1348723 - RNA, 19 nt, Artificial Sequence
  Description of Artificial Sequence: Synthetic oligonucleotide
  Antisense strand to SEQ ID NO: 1348722
auucaucaggcaguggccc

SEQ ID NO: 1348724 - RNA, 19 nt, Artificial Sequence
  Description of Artificial Sequence: Synthetic oligonucleotide
  Sense strand starting at position 1807 of SEQ ID NO: 1242453
gggcuucagggcuggaauu

SEQ ID NO: 1348725 - RNA, 19 nt, Artificial Sequence
  Description of Artificial Sequence: Synthetic oligonucleotide
  Antisense strand to SEQ ID NO: 1348724
aauuccagcccugaagccc

SEQ ID NO: 1348726 - RNA, 19 nt, Artificial Sequence
  Description of Artificial Sequence: Synthetic oligonucleotide
  Sense strand starting at position 1821 of SEQ ID NO: 1242453
gaauuccagguaugaucua

SEQ ID NO: 1348727 - RNA, 19 nt, Artificial Sequence
  Description of Artificial Sequence: Synthetic oligonucleotide
  Antisense strand to SEQ ID NO: 1348726
uagaucauaccuggaauuc

SEQ ID NO: 1348728 - RNA, 19 nt, Artificial Sequence
  Description of Artificial Sequence: Synthetic oligonucleotide
  Sense strand starting at position 2188 of SEQ ID NO: 1242453
gaggcagucucuuccuuga

SEQ ID NO: 1348729 - RNA, 19 nt, Artificial Sequence
  Description of Artificial Sequence: Synthetic oligonucleotide
  Antisense strand to SEQ ID NO: 1348728
ucaaggaagagacugccuc

SEQ ID NO: 1348730 - RNA, 19 nt, Artificial Sequence
  Description of Artificial Sequence: Synthetic oligonucleotide
  Sense strand starting at position 2192 of SEQ ID NO: 1242453
cagucucuuccuugaagga

SEQ ID NO: 1348731 - RNA, 19 nt, Artificial Sequence
  Description of Artificial Sequence: Synthetic oligonucleotide
  Antisense strand to SEQ ID NO: 1348730
uccuucaaggaagagacug

SEQ ID NO: 1348732 - RNA, 19 nt, Artificial Sequence
  Description of Artificial Sequence: Synthetic oligonucleotide
  Sense strand starting at position 2256 of SEQ ID NO: 1242453
augugagauuggcuuccaa

SEQ ID NO: 1348733 - RNA, 19 nt, Artificial Sequence
  Description of Artificial Sequence: Synthetic oligonucleotide
  Antisense strand to SEQ ID NO: 1348732
uuggaagccaaucucacau

SEQ ID NO: 1348734 - RNA, 19 nt, Artificial Sequence
  Description of Artificial Sequence: Synthetic oligonucleotide
  Sense strand starting at position 2263 of SEQ ID NO: 1242453
auuggcuuccaaugauagu

SEQ ID NO: 1348735 - RNA, 19 nt, Artificial Sequence
  Description of Artificial Sequence: Synthetic oligonucleotide
  Antisense strand to SEQ ID NO: 1348734
acuaucauuggaagccaau

SEQ ID NO: 1348736 - RNA, 19 nt, Artificial Sequence
  Description of Artificial Sequence: Synthetic oligonucleotide
  Sense strand starting at position 2408 of SEQ ID NO: 1242453
ccaucuuguccauggagaa

SEQ ID NO: 1348737 - RNA, 19 nt, Artificial Sequence
  Description of Artificial Sequence: Synthetic oligonucleotide
  Antisense strand to SEQ ID NO: 1348736
uucuccauggacaagaugg

SEQ ID NO: 1348738 - RNA, 19 nt, Artificial Sequence
  Description of Artificial Sequence: Synthetic oligonucleotide
  Sense strand starting at position 2409 of SEQ ID NO: 1242453
caucuuguccauggagaag

SEQ ID NO: 1348739 - RNA, 19 nt, Artificial Sequence
  Description of Artificial Sequence: Synthetic oligonucleotide
  Antisense strand to SEQ ID NO: 1348738
cuucuccauggacaagaug

SEQ ID NO: 1348740 - RNA, 19 nt, Artificial Sequence
  Description of Artificial Sequence: Synthetic oligonucleotide
  Sense strand starting at position 2593 of SEQ ID NO: 1242453
uccaucaaugcugauaagu

SEQ ID NO: 1348741 - RNA, 19 nt, Artificial Sequence
  Description of Artificial Sequence: Synthetic oligonucleotide
  Antisense strand to SEQ ID NO: 1348740
acuuaucagcauugaugga

SEQ ID NO: 1348742 - RNA, 19 nt, Artificial Sequence
  Description of Artificial Sequence: Synthetic oligonucleotide
  Sense strand starting at position 2648 of SEQ ID NO: 1242453
ugagguaauucucuggacu

SEQ ID NO: 1348743 - RNA, 19 nt, Artificial Sequence
  Description of Artificial Sequence: Synthetic oligonucleotide
  Antisense strand to SEQ ID NO: 1348742
aguccagagaauuaccuca

SEQ ID NO: 1348744 - RNA, 19 nt, Artificial Sequence
  Description of Artificial Sequence: Synthetic oligonucleotide
  Sense strand starting at position 2649 of SEQ ID NO: 1242453
gagguaauucucuggacug

SEQ ID NO: 1348745 - RNA, 19 nt, Artificial Sequence
  Description of Artificial Sequence: Synthetic oligonucleotide
  Antisense strand to SEQ ID NO: 1348744
caguccagagaauuaccuc

SEQ ID NO: 1348746 - RNA, 19 nt, Artificial Sequence
  Description of Artificial Sequence: Synthetic oligonucleotide
  Sense strand starting at position 2721 of SEQ ID NO: 1242453
guugcugaacaauacauaa

SEQ ID NO: 1348747 - RNA, 19 nt, Artificial Sequence
  Description of Artificial Sequence: Synthetic oligonucleotide
  Antisense strand to SEQ ID NO: 1348746
uuauguauuguucagcaac

SEQ ID NO: 1348748 - RNA, 19 nt, Artificial Sequence
  Description of Artificial Sequence: Synthetic oligonucleotide
  Sense strand starting at position 2756 of SEQ ID NO: 1242453
augcuucuuuaacuaggua

SEQ ID NO: 1348749 - RNA, 19 nt, Artificial Sequence
  Description of Artificial Sequence: Synthetic oligonucleotide
  Antisense strand to SEQ ID NO: 1348748
uaccuaguuaaagaagcau

SEQ ID NO: 1348750 - RNA, 19 nt, Artificial Sequence
  Description of Artificial Sequence: Synthetic oligonucleotide
  Sense strand starting at position 2760 of SEQ ID NO: 1242453
uucuuuaacuagguagaca

SEQ ID NO: 1348751 - RNA, 19 nt, Artificial Sequence
  Description of Artificial Sequence: Synthetic oligonucleotide
  Antisense strand to SEQ ID NO: 1348750
ugucuaccuaguuaaagaa

SEQ ID NO: 1348752 - RNA, 19 nt, Artificial Sequence
  Description of Artificial Sequence: Synthetic oligonucleotide
  Sense strand starting at position 2961 of SEQ ID NO: 1242453
ugaguaaggagcugugaag

SEQ ID NO: 1348753 - RNA, 19 nt, Artificial Sequence
  Description of Artificial Sequence: Synthetic oligonucleotide
  Antisense strand to SEQ ID NO: 1348752
cuucacagcuccuuacuca

SEQ ID NO: 1348754 - RNA, 19 nt, Artificial Sequence
  Description of Artificial Sequence: Synthetic oligonucleotide
  Sense strand starting at position 2984 of SEQ ID NO: 1242453
cacugagcugugugaauuu

SEQ ID NO: 1348755 - RNA, 19 nt, Artificial Sequence
  Description of Artificial Sequence: Synthetic oligonucleotide
  Antisense strand to SEQ ID NO: 1348754
aaauucacacagcucagug

SEQ ID NO: 1348756 - RNA, 19 nt, Artificial Sequence
  Description of Artificial Sequence: Synthetic oligonucleotide
  Sense strand starting at position 3053 of SEQ ID NO: 1242453
agauguagcccuuagacua

SEQ ID NO: 1348757 - RNA, 19 nt, Artificial Sequence
  Description of Artificial Sequence: Synthetic oligonucleotide
  Antisense strand to SEQ ID NO: 1348756
uagucuaagggcuacaucu

SEQ ID NO: 1348758 - RNA, 19 nt, Artificial Sequence
  Description of Artificial Sequence: Synthetic oligonucleotide
  Sense strand starting at position 3095 of SEQ ID NO: 1242453
aagaguguugagcacaauu

SEQ ID NO: 1348759 - RNA, 19 nt, Artificial Sequence
  Description of Artificial Sequence: Synthetic oligonucleotide
  Antisense strand to SEQ ID NO: 1348758
aauugugcucaacacucuu

SEQ ID NO: 1348760 - RNA, 19 nt, Artificial Sequence
  Description of Artificial Sequence: Synthetic oligonucleotide
  Sense strand starting at position 3160 of SEQ ID NO: 1242453
uccuucuagcugggugaaa

SEQ ID NO: 1348761 - RNA, 19 nt, Artificial Sequence
  Description of Artificial Sequence: Synthetic oligonucleotide
  Antisense strand to SEQ ID NO: 1348760
uuucacccagcuagaagga

SEQ ID NO: 1348762 - RNA, 19 nt, Artificial Sequence
  Description of Artificial Sequence: Synthetic oligonucleotide
  Sense strand starting at position 3184 of SEQ ID NO: 1242453
uugugauagcuggaucuca

SEQ ID NO: 1348763 - RNA, 19 nt, Artificial Sequence
  Description of Artificial Sequence: Synthetic oligonucleotide
  Antisense strand to SEQ ID NO: 1348762
ugagauccagcuaucacaa

SEQ ID NO: 1348764 - RNA, 19 nt, Artificial Sequence
  Description of Artificial Sequence: Synthetic oligonucleotide
  Sense strand starting at position 3228 of SEQ ID NO: 1242453
gaagucaugaguuaaguag

SEQ ID NO: 1348765 - RNA, 19 nt, Artificial Sequence
  Description of Artificial Sequence: Synthetic oligonucleotide
  Antisense strand to SEQ ID NO: 1348764
cuacuuaacucaugacuuc

SEQ ID NO: 1348766 - RNA, 19 nt, Artificial Sequence
  Description of Artificial Sequence: Synthetic oligonucleotide
  Sense strand starting at position 3529 of SEQ ID NO: 1242453
ucauucuauggcugggaga

SEQ ID NO: 1348767 - RNA, 19 nt, Artificial Sequence
  Description of Artificial Sequence: Synthetic oligonucleotide
  Antisense strand to SEQ ID NO: 1348766
ucucccagccauagaauga

SEQ ID NO: 1348768 - RNA, 19 nt, Artificial Sequence
  Description of Artificial Sequence: Synthetic oligonucleotide
  Sense strand starting at position 3531 of SEQ ID NO: 1242453
auucuauggcugggagacu

SEQ ID NO: 1348769 - RNA, 19 nt, Artificial Sequence
  Description of Artificial Sequence: Synthetic oligonucleotide
  Antisense strand to SEQ ID NO: 1348768
agucucccagccauagaau

SEQ ID NO: 1348770 - RNA, 19 nt, Artificial Sequence
  Description of Artificial Sequence: Synthetic oligonucleotide
  Sense strand starting at position 3545 of SEQ ID NO: 1242453
agacuccuucugggauuga

SEQ ID NO: 1348771 - RNA, 19 nt, Artificial Sequence
  Description of Artificial Sequence: Synthetic oligonucleotide
  Antisense strand to SEQ ID NO: 1348770
ucaaucccagaaggagucu

SEQ ID NO: 1348772 - RNA, 19 nt, Artificial Sequence
  Description of Artificial Sequence: Synthetic oligonucleotide
  Sense strand starting at position 3573 of SEQ ID NO: 1242453
ccaaguguugauuaagcca

SEQ ID NO: 1348773 - RNA, 19 nt, Artificial Sequence
  Description of Artificial Sequence: Synthetic oligonucleotide
  Antisense strand to SEQ ID NO: 1348772
uggcuuaaucaacacuugg

SEQ ID NO: 1348774 - RNA, 19 nt, Artificial Sequence
  Description of Artificial Sequence: Synthetic oligonucleotide
  Sense strand starting at position 3576 of SEQ ID NO: 1242453
aguguugauuaagccaaau

SEQ ID NO: 1348775 - RNA, 19 nt, Artificial Sequence
  Description of Artificial Sequence: Synthetic oligonucleotide
  Antisense strand to SEQ ID NO: 1348774
auuuggcuuaaucaacacu

SEQ ID NO: 1348776 - RNA, 19 nt, Artificial Sequence
  Description of Artificial Sequence: Synthetic oligonucleotide
  Sense strand starting at position 3658 of SEQ ID NO: 1242453
cugggucucucugucaaua

SEQ ID NO: 1348777 - RNA, 19 nt, Artificial Sequence
  Description of Artificial Sequence: Synthetic oligonucleotide
  Antisense strand to SEQ ID NO: 1348776
uauugacagagagacccag

SEQ ID NO: 1348778 - RNA, 19 nt, Artificial Sequence
  Description of Artificial Sequence: Synthetic oligonucleotide
  Sense strand starting at position 20 of SEQ ID NO: 1242454
ucaaauccggccuggagau

SEQ ID NO: 1348779 - RNA, 19 nt, Artificial Sequence
  Description of Artificial Sequence: Synthetic oligonucleotide
  Antisense strand to SEQ ID NO: 1348778
aucuccaggccggauuuga

SEQ ID NO: 1348780 - RNA, 19 nt, Artificial Sequence
  Description of Artificial Sequence: Synthetic oligonucleotide
  Sense strand starting at position 272 of SEQ ID NO: 1242454
acuucuugagcccaaggua

SEQ ID NO: 1348781 - RNA, 19 nt, Artificial Sequence
  Description of Artificial Sequence: Synthetic oligonucleotide
  Antisense strand to SEQ ID NO: 1348780
uaccuugggcucaagaagu

SEQ ID NO: 1348782 - RNA, 19 nt, Artificial Sequence
  Description of Artificial Sequence: Synthetic oligonucleotide
  Sense strand starting at position 410 of SEQ ID NO: 1242454
agagaaggaugguaaugau

SEQ ID NO: 1348783 - RNA, 19 nt, Artificial Sequence
  Description of Artificial Sequence: Synthetic oligonucleotide
  Antisense strand to SEQ ID NO: 1348782
aucauuaccauccuucucu

SEQ ID NO: 1348784 - RNA, 19 nt, Artificial Sequence
  Description of Artificial Sequence: Synthetic oligonucleotide
  Sense strand starting at position 655 of SEQ ID NO: 1242454
cccugaagccauggaagau

SEQ ID NO: 1348785 - RNA, 19 nt, Artificial Sequence
  Description of Artificial Sequence: Synthetic oligonucleotide
  Antisense strand to SEQ ID NO: 1348784
aucuuccauggcuucaggg

SEQ ID NO: 1348786 - RNA, 19 nt, Artificial Sequence
  Description of Artificial Sequence: Synthetic oligonucleotide
  Sense strand starting at position 674 of SEQ ID NO: 1242454
cuggaaugguaacaagaau

SEQ ID NO: 1348787 - RNA, 19 nt, Artificial Sequence
  Description of Artificial Sequence: Synthetic oligonucleotide
  Antisense strand to SEQ ID NO: 1348786
auucuuguuaccauuccag

SEQ ID NO: 1348788 - RNA, 19 nt, Artificial Sequence
  Description of Artificial Sequence: Synthetic oligonucleotide
  Sense strand starting at position 692 of SEQ ID NO: 1242454
ugaauugacacgugucuca

SEQ ID NO: 1348789 - RNA, 19 nt, Artificial Sequence
  Description of Artificial Sequence: Synthetic oligonucleotide
  Antisense strand to SEQ ID NO: 1348788
ugagacacgugucaauuca

SEQ ID NO: 1348790 - RNA, 19 nt, Artificial Sequence
  Description of Artificial Sequence: Synthetic oligonucleotide
  Sense strand starting at position 723 of SEQ ID NO: 1242454
agggaagucugagagacaa

SEQ ID NO: 1348791 - RNA, 19 nt, Artificial Sequence
  Description of Artificial Sequence: Synthetic oligonucleotide
  Antisense strand to SEQ ID NO: 1348790
uugucucucagacuucccu

SEQ ID NO: 1348792 - RNA, 19 nt, Artificial Sequence
  Description of Artificial Sequence: Synthetic oligonucleotide
  Sense strand starting at position 817 of SEQ ID NO: 1242454
ggcugaugccaguauccaa

SEQ ID NO: 1348793 - RNA, 19 nt, Artificial Sequence
  Description of Artificial Sequence: Synthetic oligonucleotide
  Antisense strand to SEQ ID NO: 1348792
uuggauacuggcaucagcc

SEQ ID NO: 1348794 - RNA, 19 nt, Artificial Sequence
  Description of Artificial Sequence: Synthetic oligonucleotide
  Sense strand starting at position 955 of SEQ ID NO: 1242454
gccauuugggcuuggcaca

SEQ ID NO: 1348795 - RNA, 19 nt, Artificial Sequence
  Description of Artificial Sequence: Synthetic oligonucleotide
  Antisense strand to SEQ ID NO: 1348794
ugugccaagcccaaauggc

SEQ ID NO: 1348796 - RNA, 19 nt, Artificial Sequence
  Description of Artificial Sequence: Synthetic oligonucleotide
  Sense strand starting at position 1005 of SEQ ID NO: 1242454
ccaugaaggccuugggaca

SEQ ID NO: 1348797 - RNA, 19 nt, Artificial Sequence
  Description of Artificial Sequence: Synthetic oligonucleotide
  Antisense strand to SEQ ID NO: 1348796
ugucccaaggccuucaugg

SEQ ID NO: 1348798 - RNA, 19 nt, Artificial Sequence
  Description of Artificial Sequence: Synthetic oligonucleotide
  Sense strand starting at position 1112 of SEQ ID NO: 1242454
gggagccugugauuaucaa

SEQ ID NO: 1348799 - RNA, 19 nt, Artificial Sequence
  Description of Artificial Sequence: Synthetic oligonucleotide
  Antisense strand to SEQ ID NO: 1348798
uugauaaucacaggcuccc

SEQ ID NO: 1348800 - RNA, 19 nt, Artificial Sequence
  Description of Artificial Sequence: Synthetic oligonucleotide
  Sense strand starting at position 1113 of SEQ ID NO: 1242454
ggagccugugauuaucaaa

SEQ ID NO: 1348801 - RNA, 19 nt, Artificial Sequence
  Description of Artificial Sequence: Synthetic oligonucleotide
  Antisense strand to SEQ ID NO: 1348800
uuugauaaucacaggcucc

SEQ ID NO: 1348802 - RNA, 19 nt, Artificial Sequence
  Description of Artificial Sequence: Synthetic oligonucleotide
  Sense strand starting at position 1514 of SEQ ID NO: 1242454
cucugaguccagcagcaaa

SEQ ID NO: 1348803 - RNA, 19 nt, Artificial Sequence
  Description of Artificial Sequence: Synthetic oligonucleotide
  Antisense strand to SEQ ID NO: 1348802
uuugcugcuggacucagag

SEQ ID NO: 1348804 - RNA, 19 nt, Artificial Sequence
  Description of Artificial Sequence: Synthetic oligonucleotide
  Sense strand starting at position 2158 of SEQ ID NO: 1242454
gguagccuucuagaguagu

SEQ ID NO: 1348805 - RNA, 19 nt, Artificial Sequence
  Description of Artificial Sequence: Synthetic oligonucleotide
  Antisense strand to SEQ ID NO: 1348804
acuacucuagaaggcuacc

SEQ ID NO: 1348806 - RNA, 19 nt, Artificial Sequence
  Description of Artificial Sequence: Synthetic oligonucleotide
  Sense strand starting at position 2209 of SEQ ID NO: 1242454
ggcuguuaacaucaagaug

SEQ ID NO: 1348807 - RNA, 19 nt, Artificial Sequence
  Description of Artificial Sequence: Synthetic oligonucleotide
  Antisense strand to SEQ ID NO: 1348806
caucuugauguuaacagcc

SEQ ID NO: 1348808 - RNA, 19 nt, Artificial Sequence
  Description of Artificial Sequence: Synthetic oligonucleotide
  Sense strand starting at position 2212 of SEQ ID NO: 1242454
uguuaacaucaagaugcaa

SEQ ID NO: 1348809 - RNA, 19 nt, Artificial Sequence
  Description of Artificial Sequence: Synthetic oligonucleotide
  Antisense strand to SEQ ID NO: 1348808
uugcaucuugauguuaaca

SEQ ID NO: 1348810 - RNA, 19 nt, Artificial Sequence
  Description of Artificial Sequence: Synthetic oligonucleotide
  Sense strand starting at position 2340 of SEQ ID NO: 1242454
gugguguggccuugagaug

SEQ ID NO: 1348811 - RNA, 19 nt, Artificial Sequence
  Description of Artificial Sequence: Synthetic oligonucleotide
  Antisense strand to SEQ ID NO: 1348810
caucucaaggccacaccac

SEQ ID NO: 1348812 - RNA, 19 nt, Artificial Sequence
  Description of Artificial Sequence: Synthetic oligonucleotide
  Sense strand starting at position 2341 of SEQ ID NO: 1242454
ugguguggccuugagaugu

SEQ ID NO: 1348813 - RNA, 19 nt, Artificial Sequence
  Description of Artificial Sequence: Synthetic oligonucleotide
  Antisense strand to SEQ ID NO: 1348812
acaucucaaggccacacca

SEQ ID NO: 1348814 - RNA, 19 nt, Artificial Sequence
  Description of Artificial Sequence: Synthetic oligonucleotide
  Sense strand starting at position 2347 of SEQ ID NO: 1242454
ggccuugagauguaggcuu

SEQ ID NO: 1348815 - RNA, 19 nt, Artificial Sequence
  Description of Artificial Sequence: Synthetic oligonucleotide
  Antisense strand to SEQ ID NO: 1348814
aagccuacaucucaaggcc

SEQ ID NO: 1348816 - RNA, 19 nt, Artificial Sequence
  Description of Artificial Sequence: Synthetic oligonucleotide
  Sense strand starting at position 2499 of SEQ ID NO: 1242454
cagacaggacucugcgaau

SEQ ID NO: 1348817 - RNA, 19 nt, Artificial Sequence
  Description of Artificial Sequence: Synthetic oligonucleotide
  Antisense strand to SEQ ID NO: 1348816
auucgcagaguccugucug

SEQ ID NO: 1348818 - RNA, 19 nt, Artificial Sequence
  Description of Artificial Sequence: Synthetic oligonucleotide
  Sense strand starting at position 2597 of SEQ ID NO: 1242454
ucagaauugcuccagccca

SEQ ID NO: 1348819 - RNA, 19 nt, Artificial Sequence
  Description of Artificial Sequence: Synthetic oligonucleotide
  Antisense strand to SEQ ID NO: 1348818
ugggcuggagcaauucuga

SEQ ID NO: 1348820 - RNA, 19 nt, Artificial Sequence
  Description of Artificial Sequence: Synthetic oligonucleotide
  Sense strand starting at position 2801 of SEQ ID NO: 1242454
uugaucucucccggaaacu

SEQ ID NO: 1348821 - RNA, 19 nt, Artificial Sequence
  Description of Artificial Sequence: Synthetic oligonucleotide
  Antisense strand to SEQ ID NO: 1348820
aguuuccgggagagaucaa

SEQ ID NO: 1348822 - RNA, 19 nt, Artificial Sequence
  Description of Artificial Sequence: Synthetic oligonucleotide
  Sense strand starting at position 2802 of SEQ ID NO: 1242454
ugaucucucccggaaacuu

SEQ ID NO: 1348823 - RNA, 19 nt, Artificial Sequence
  Description of Artificial Sequence: Synthetic oligonucleotide
  Antisense strand to SEQ ID NO: 1348822
aaguuuccgggagagauca

SEQ ID NO: 1348824 - RNA, 19 nt, Artificial Sequence
  Description of Artificial Sequence: Synthetic oligonucleotide
  Sense strand starting at position 2923 of SEQ ID NO: 1242454
ggcaguuggcccugagaag

SEQ ID NO: 1348825 - RNA, 19 nt, Artificial Sequence
  Description of Artificial Sequence: Synthetic oligonucleotide
  Antisense strand to SEQ ID NO: 1348824
cuucucagggccaacugcc

SEQ ID NO: 1348826 - RNA, 19 nt, Artificial Sequence
  Description of Artificial Sequence: Synthetic oligonucleotide
  Sense strand starting at position 2924 of SEQ ID NO: 1242454
gcaguuggcccugagaagu

SEQ ID NO: 1348827 - RNA, 19 nt, Artificial Sequence
  Description of Artificial Sequence: Synthetic oligonucleotide
  Antisense strand to SEQ ID NO: 1348826
acuucucagggccaacugc

SEQ ID NO: 1348828 - RNA, 19 nt, Artificial Sequence
  Description of Artificial Sequence: Synthetic oligonucleotide
  Sense strand starting at position 3175 of SEQ ID NO: 1242454
ccaaaccguuugcucgaaa

SEQ ID NO: 1348829 - RNA, 19 nt, Artificial Sequence
  Description of Artificial Sequence: Synthetic oligonucleotide
  Antisense strand to SEQ ID NO: 1348828
uuucgagcaaacgguuugg

SEQ ID NO: 1348830 - RNA, 19 nt, Artificial Sequence
  Description of Artificial Sequence: Synthetic oligonucleotide
  Sense strand starting at position 3178 of SEQ ID NO: 1242454
aaccguuugcucgaaacuu

SEQ ID NO: 1348831 - RNA, 19 nt, Artificial Sequence
  Description of Artificial Sequence: Synthetic oligonucleotide
  Antisense strand to SEQ ID NO: 1348830
aaguuucgagcaaacgguu

SEQ ID NO: 1348832 - RNA, 19 nt, Artificial Sequence
  Description of Artificial Sequence: Synthetic oligonucleotide
  Sense strand starting at position 3187 of SEQ ID NO: 1242454
cucgaaacuugaucuccuu

SEQ ID NO: 1348833 - RNA, 19 nt, Artificial Sequence
  Description of Artificial Sequence: Synthetic oligonucleotide
  Antisense strand to SEQ ID NO: 1348832
aaggagaucaaguuucgag

SEQ ID NO: 1348834 - RNA, 19 nt, Artificial Sequence
  Description of Artificial Sequence: Synthetic oligonucleotide
  Sense strand starting at position 3214 of SEQ ID NO: 1242454
gagucaccucaguggagaa

SEQ ID NO: 1348835 - RNA, 19 nt, Artificial Sequence
  Description of Artificial Sequence: Synthetic oligonucleotide
  Antisense strand to SEQ ID NO: 1348834
uucuccacugaggugacuc

SEQ ID NO: 1348836 - RNA, 19 nt, Artificial Sequence
  Description of Artificial Sequence: Synthetic oligonucleotide
  Sense strand starting at position 3242 of SEQ ID NO: 1242454
gggcuuugauggcugaguu

SEQ ID NO: 1348837 - RNA, 19 nt, Artificial Sequence
  Description of Artificial Sequence: Synthetic oligonucleotide
  Antisense strand to SEQ ID NO: 1348836
aacucagccaucaaagccc

SEQ ID NO: 1348838 - RNA, 19 nt, Artificial Sequence
  Description of Artificial Sequence: Synthetic oligonucleotide
  Sense strand starting at position 3243 of SEQ ID NO: 1242454
ggcuuugauggcugaguuu

SEQ ID NO: 1348839 - RNA, 19 nt, Artificial Sequence
  Description of Artificial Sequence: Synthetic oligonucleotide
  Antisense strand to SEQ ID NO: 1348838
aaacucagccaucaaagcc

SEQ ID NO: 1348840 - RNA, 19 nt, Artificial Sequence
  Description of Artificial Sequence: Synthetic oligonucleotide
  Sense strand starting at position 3335 of SEQ ID NO: 1242454
gggccacugccugaugaau

SEQ ID NO: 1348841 - RNA, 19 nt, Artificial Sequence
  Description of Artificial Sequence: Synthetic oligonucleotide
  Antisense strand to SEQ ID NO: 1348840
auucaucaggcaguggccc

SEQ ID NO: 1348842 - RNA, 19 nt, Artificial Sequence
  Description of Artificial Sequence: Synthetic oligonucleotide
  Sense strand starting at position 3458 of SEQ ID NO: 1242454
gggcuucagggcuggaauu

SEQ ID NO: 1348843 - RNA, 19 nt, Artificial Sequence
  Description of Artificial Sequence: Synthetic oligonucleotide
  Antisense strand to SEQ ID NO: 1348842
aauuccagcccugaagccc

SEQ ID NO: 1348844 - RNA, 19 nt, Artificial Sequence
  Description of Artificial Sequence: Synthetic oligonucleotide
  Sense strand starting at position 3472 of SEQ ID NO: 1242454
gaauuccagguaugaucua

SEQ ID NO: 1348845 - RNA, 19 nt, Artificial Sequence
  Description of Artificial Sequence: Synthetic oligonucleotide
  Antisense strand to SEQ ID NO: 1348844
uagaucauaccuggaauuc

SEQ ID NO: 1348846 - RNA, 19 nt, Artificial Sequence
  Description of Artificial Sequence: Synthetic oligonucleotide
  Sense strand starting at position 3517 of SEQ ID NO: 1242454
cucggagcuuucucuucua

SEQ ID NO: 1348847 - RNA, 19 nt, Artificial Sequence
  Description of Artificial Sequence: Synthetic oligonucleotide
  Antisense strand to SEQ ID NO: 1348846
uagaagagaaagcuccgag

SEQ ID NO: 1348848 - RNA, 19 nt, Artificial Sequence
  Description of Artificial Sequence: Synthetic oligonucleotide
  Sense strand starting at position 3839 of SEQ ID NO: 1242454
gaggcagucucuuccuuga

SEQ ID NO: 1348849 - RNA, 19 nt, Artificial Sequence
  Description of Artificial Sequence: Synthetic oligonucleotide
  Antisense strand to SEQ ID NO: 1348848
ucaaggaagagacugccuc

SEQ ID NO: 1348850 - RNA, 19 nt, Artificial Sequence
  Description of Artificial Sequence: Synthetic oligonucleotide
  Sense strand starting at position 3841 of SEQ ID NO: 1242454
ggcagucucuuccuugaag

SEQ ID NO: 1348851 - RNA, 19 nt, Artificial Sequence
  Description of Artificial Sequence: Synthetic oligonucleotide
  Antisense strand to SEQ ID NO: 1348850
cuucaaggaagagacugcc

SEQ ID NO: 1348852 - RNA, 19 nt, Artificial Sequence
  Description of Artificial Sequence: Synthetic oligonucleotide
  Sense strand starting at position 3843 of SEQ ID NO: 1242454
cagucucuuccuugaagga

SEQ ID NO: 1348853 - RNA, 19 nt, Artificial Sequence
  Description of Artificial Sequence: Synthetic oligonucleotide
  Antisense strand to SEQ ID NO: 1348852
uccuucaaggaagagacug

SEQ ID NO: 1348854 - RNA, 19 nt, Artificial Sequence
  Description of Artificial Sequence: Synthetic oligonucleotide
  Sense strand starting at position 3907 of SEQ ID NO: 1242454
augugagauuggcuuccaa

SEQ ID NO: 1348855 - RNA, 19 nt, Artificial Sequence
  Description of Artificial Sequence: Synthetic oligonucleotide
  Antisense strand to SEQ ID NO: 1348854
uuggaagccaaucucacau

SEQ ID NO: 1348856 - RNA, 19 nt, Artificial Sequence
  Description of Artificial Sequence: Synthetic oligonucleotide
  Sense strand starting at position 3914 of SEQ ID NO: 1242454
auuggcuuccaaugauagu

SEQ ID NO: 1348857 - RNA, 19 nt, Artificial Sequence
  Description of Artificial Sequence: Synthetic oligonucleotide
  Antisense strand to SEQ ID NO: 1348856
acuaucauuggaagccaau

SEQ ID NO: 1348858 - RNA, 19 nt, Artificial Sequence
  Description of Artificial Sequence: Synthetic oligonucleotide
  Sense strand starting at position 536 of SEQ ID NO: 1242455
gcaagacauccuggcagga

SEQ ID NO: 1348859 - RNA, 19 nt, Artificial Sequence
  Description of Artificial Sequence: Synthetic oligonucleotide
  Antisense strand to SEQ ID NO: 1348858
uccugccaggaugucuugc

SEQ ID NO: 1348860 - RNA, 19 nt, Artificial Sequence
  Description of Artificial Sequence: Synthetic oligonucleotide
  Sense strand starting at position 723 of SEQ ID NO: 1242455
ggaauaggcucuccucauc

SEQ ID NO: 1348861 - RNA, 19 nt, Artificial Sequence
  Description of Artificial Sequence: Synthetic oligonucleotide
  Antisense strand to SEQ ID NO: 1348860
gaugaggagagccuauucc

SEQ ID NO: 1348862 - RNA, 19 nt, Artificial Sequence
  Description of Artificial Sequence: Synthetic oligonucleotide
  Sense strand starting at position 767 of SEQ ID NO: 1242455
gggugcuuguuuccucagu

SEQ ID NO: 1348863 - RNA, 19 nt, Artificial Sequence
  Description of Artificial Sequence: Synthetic oligonucleotide
  Antisense strand to SEQ ID NO: 1348862
acugaggaaacaagcaccc

SEQ ID NO: 1348864 - RNA, 19 nt, Artificial Sequence
  Description of Artificial Sequence: Synthetic oligonucleotide
  Sense strand starting at position 769 of SEQ ID NO: 1242455
gugcuuguuuccucaguga

SEQ ID NO: 1348865 - RNA, 19 nt, Artificial Sequence
  Description of Artificial Sequence: Synthetic oligonucleotide
  Antisense strand to SEQ ID NO: 1348864
ucacugaggaaacaagcac

SEQ ID NO: 1348866 - RNA, 19 nt, Artificial Sequence
  Description of Artificial Sequence: Synthetic oligonucleotide
  Sense strand starting at position 772 of SEQ ID NO: 1242455
cuuguuuccucagugacuu

SEQ ID NO: 1348867 - RNA, 19 nt, Artificial Sequence
  Description of Artificial Sequence: Synthetic oligonucleotide
  Antisense strand to SEQ ID NO: 1348866
aagucacugaggaaacaag

SEQ ID NO: 1348868 - RNA, 19 nt, Artificial Sequence
  Description of Artificial Sequence: Synthetic oligonucleotide
  Sense strand starting at position 784 of SEQ ID NO: 1242455
gugacuucucaccaggcuu

SEQ ID NO: 1348869 - RNA, 19 nt, Artificial Sequence
  Description of Artificial Sequence: Synthetic oligonucleotide
  Antisense strand to SEQ ID NO: 1348868
aagccuggugagaagucac

SEQ ID NO: 1348870 - RNA, 19 nt, Artificial Sequence
  Description of Artificial Sequence: Synthetic oligonucleotide
  Sense strand starting at position 979 of SEQ ID NO: 1242455
gggagccaucccugcagau

SEQ ID NO: 1348871 - RNA, 19 nt, Artificial Sequence
  Description of Artificial Sequence: Synthetic oligonucleotide
  Antisense strand to SEQ ID NO: 1348870
aucugcagggauggcuccc

SEQ ID NO: 1348872 - RNA, 19 nt, Artificial Sequence
  Description of Artificial Sequence: Synthetic oligonucleotide
  Sense strand starting at position 981 of SEQ ID NO: 1242455
gagccaucccugcagaucu

SEQ ID NO: 1348873 - RNA, 19 nt, Artificial Sequence
  Description of Artificial Sequence: Synthetic oligonucleotide
  Antisense strand to SEQ ID NO: 1348872
agaucugcagggauggcuc

SEQ ID NO: 1348874 - RNA, 19 nt, Artificial Sequence
  Description of Artificial Sequence: Synthetic oligonucleotide
  Sense strand starting at position 994 of SEQ ID NO: 1242455
agaucugaaucaucuguau

SEQ ID NO: 1348875 - RNA, 19 nt, Artificial Sequence
  Description of Artificial Sequence: Synthetic oligonucleotide
  Antisense strand to SEQ ID NO: 1348874
auacagaugauucagaucu

SEQ ID NO: 1348876 - RNA, 19 nt, Artificial Sequence
  Description of Artificial Sequence: Synthetic oligonucleotide
  Sense strand starting at position 1047 of SEQ ID NO: 1242455
agccuuaggugucuuaaca

SEQ ID NO: 1348877 - RNA, 19 nt, Artificial Sequence
  Description of Artificial Sequence: Synthetic oligonucleotide
  Antisense strand to SEQ ID NO: 1348876
uguuaagacaccuaaggcu

SEQ ID NO: 1348878 - RNA, 19 nt, Artificial Sequence
  Description of Artificial Sequence: Synthetic oligonucleotide
  Sense strand starting at position 1073 of SEQ ID NO: 1242455
gagggauguuguucucaug

SEQ ID NO: 1348879 - RNA, 19 nt, Artificial Sequence
  Description of Artificial Sequence: Synthetic oligonucleotide
  Antisense strand to SEQ ID NO: 1348878
caugagaacaacaucccuc

SEQ ID NO: 1348880 - RNA, 19 nt, Artificial Sequence
  Description of Artificial Sequence: Synthetic oligonucleotide
  Sense strand starting at position 1080 of SEQ ID NO: 1242455
guuguucucauguaacaga

SEQ ID NO: 1348881 - RNA, 19 nt, Artificial Sequence
  Description of Artificial Sequence: Synthetic oligonucleotide
  Antisense strand to SEQ ID NO: 1348880
ucuguuacaugagaacaac

SEQ ID NO: 1348882 - RNA, 19 nt, Artificial Sequence
  Description of Artificial Sequence: Synthetic oligonucleotide
  Sense strand starting at position 1231 of SEQ ID NO: 1242455
cauucugauggcugacaga

SEQ ID NO: 1348883 - RNA, 19 nt, Artificial Sequence
  Description of Artificial Sequence: Synthetic oligonucleotide
  Antisense strand to SEQ ID NO: 1348882
ucugucagccaucagaaug

SEQ ID NO: 1348884 - RNA, 19 nt, Artificial Sequence
  Description of Artificial Sequence: Synthetic oligonucleotide
  Sense strand starting at position 1510 of SEQ ID NO: 1242455
cucuuuaauccugaagguu

SEQ ID NO: 1348885 - RNA, 19 nt, Artificial Sequence
  Description of Artificial Sequence: Synthetic oligonucleotide
  Antisense strand to SEQ ID NO: 1348884
aaccuucaggauuaaagag

SEQ ID NO: 1348886 - RNA, 19 nt, Artificial Sequence
  Description of Artificial Sequence: Synthetic oligonucleotide
  Sense strand starting at position 1519 of SEQ ID NO: 1242455
ccugaagguuacuuucuua

SEQ ID NO: 1348887 - RNA, 19 nt, Artificial Sequence
  Description of Artificial Sequence: Synthetic oligonucleotide
  Antisense strand to SEQ ID NO: 1348886
uaagaaaguaaccuucagg

SEQ ID NO: 1348888 - RNA, 19 nt, Artificial Sequence
  Description of Artificial Sequence: Synthetic oligonucleotide
  Sense strand starting at position 1693 of SEQ ID NO: 1242455
ggcgcaucugucugaccaa

SEQ ID NO: 1348889 - RNA, 19 nt, Artificial Sequence
  Description of Artificial Sequence: Synthetic oligonucleotide
  Antisense strand to SEQ ID NO: 1348888
uuggucagacagaugcgcc

SEQ ID NO: 1348890 - RNA, 19 nt, Artificial Sequence
  Description of Artificial Sequence: Synthetic oligonucleotide
  Sense strand starting at position 1762 of SEQ ID NO: 1242455
gucugagcugccuaaagag

SEQ ID NO: 1348891 - RNA, 19 nt, Artificial Sequence
  Description of Artificial Sequence: Synthetic oligonucleotide
  Antisense strand to SEQ ID NO: 1348890
cucuuuaggcagcucagac

SEQ ID NO: 1348892 - RNA, 19 nt, Artificial Sequence
  Description of Artificial Sequence: Synthetic oligonucleotide
  Sense strand starting at position 1981 of SEQ ID NO: 1242455
ggccucggugauggaaaua

SEQ ID NO: 1348893 - RNA, 19 nt, Artificial Sequence
  Description of Artificial Sequence: Synthetic oligonucleotide
  Antisense strand to SEQ ID NO: 1348892
uauuuccaucaccgaggcc

SEQ ID NO: 1348894 - RNA, 19 nt, Artificial Sequence
  Description of Artificial Sequence: Synthetic oligonucleotide
  Sense strand starting at position 2264 of SEQ ID NO: 1242455
gggaaucuguccguuucuu

SEQ ID NO: 1348895 - RNA, 19 nt, Artificial Sequence
  Description of Artificial Sequence: Synthetic oligonucleotide
  Antisense strand to SEQ ID NO: 1348894
aagaaacggacagauuccc

SEQ ID NO: 1348896 - RNA, 19 nt, Artificial Sequence
  Description of Artificial Sequence: Synthetic oligonucleotide
  Sense strand starting at position 2283 of SEQ ID NO: 1242455
cuccuaggguuuccaugaa

SEQ ID NO: 1348897 - RNA, 19 nt, Artificial Sequence
  Description of Artificial Sequence: Synthetic oligonucleotide
  Antisense strand to SEQ ID NO: 1348896
uucauggaaacccuaggag

SEQ ID NO: 1348898 - RNA, 19 nt, Artificial Sequence
  Description of Artificial Sequence: Synthetic oligonucleotide
  Sense strand starting at position 2302 of SEQ ID NO: 1242455
ggaggcaacaugugucuca

SEQ ID NO: 1348899 - RNA, 19 nt, Artificial Sequence
  Description of Artificial Sequence: Synthetic oligonucleotide
  Antisense strand to SEQ ID NO: 1348898
ugagacacauguugccucc

SEQ ID NO: 1348900 - RNA, 19 nt, Artificial Sequence
  Description of Artificial Sequence: Synthetic oligonucleotide
  Sense strand starting at position 2303 of SEQ ID NO: 1242455
gaggcaacaugugucucau

SEQ ID NO: 1348901 - RNA, 19 nt, Artificial Sequence
  Description of Artificial Sequence: Synthetic oligonucleotide
  Antisense strand to SEQ ID NO: 1348900
augagacacauguugccuc

SEQ ID NO: 1348902 - RNA, 19 nt, Artificial Sequence
  Description of Artificial Sequence: Synthetic oligonucleotide
  Sense strand starting at position 2309 of SEQ ID NO: 1242455
acaugugucucauugguaa

SEQ ID NO: 1348903 - RNA, 19 nt, Artificial Sequence
  Description of Artificial Sequence: Synthetic oligonucleotide
  Antisense strand to SEQ ID NO: 1348902
uuaccaaugagacacaugu

SEQ ID NO: 1348904 - RNA, 19 nt, Artificial Sequence
  Description of Artificial Sequence: Synthetic oligonucleotide
  Sense strand starting at position 2311 of SEQ ID NO: 1242455
augugucucauugguaaac

SEQ ID NO: 1348905 - RNA, 19 nt, Artificial Sequence
  Description of Artificial Sequence: Synthetic oligonucleotide
  Antisense strand to SEQ ID NO: 1348904
guuuaccaaugagacacau

SEQ ID NO: 1348906 - RNA, 19 nt, Artificial Sequence
  Description of Artificial Sequence: Synthetic oligonucleotide
  Sense strand starting at position 2381 of SEQ ID NO: 1242455
ggcggaaauuagcucuuua

SEQ ID NO: 1348907 - RNA, 19 nt, Artificial Sequence
  Description of Artificial Sequence: Synthetic oligonucleotide
  Antisense strand to SEQ ID NO: 1348906
uaaagagcuaauuuccgcc

SEQ ID NO: 1348908 - RNA, 19 nt, Artificial Sequence
  Description of Artificial Sequence: Synthetic oligonucleotide
  Sense strand starting at position 2639 of SEQ ID NO: 1242455
gggucucuguccuuccaau

SEQ ID NO: 1348909 - RNA, 19 nt, Artificial Sequence
  Description of Artificial Sequence: Synthetic oligonucleotide
  Antisense strand to SEQ ID NO: 1348908
auuggaaggacagagaccc

SEQ ID NO: 1348910 - RNA, 19 nt, Artificial Sequence
  Description of Artificial Sequence: Synthetic oligonucleotide
  Sense strand starting at position 2889 of SEQ ID NO: 1242455
uggucuguaccaugggaaa

SEQ ID NO: 1348911 - RNA, 19 nt, Artificial Sequence
  Description of Artificial Sequence: Synthetic oligonucleotide
  Antisense strand to SEQ ID NO: 1348910
uuucccaugguacagacca

SEQ ID NO: 1348912 - RNA, 19 nt, Artificial Sequence
  Description of Artificial Sequence: Synthetic oligonucleotide
  Sense strand starting at position 2958 of SEQ ID NO: 1242455
agaaccuuuccguggugau

SEQ ID NO: 1348913 - RNA, 19 nt, Artificial Sequence
  Description of Artificial Sequence: Synthetic oligonucleotide
  Antisense strand to SEQ ID NO: 1348912
aucaccacggaaagguucu

SEQ ID NO: 1348914 - RNA, 19 nt, Artificial Sequence
  Description of Artificial Sequence: Synthetic oligonucleotide
  Sense strand starting at position 2959 of SEQ ID NO: 1242455
gaaccuuuccguggugauc

SEQ ID NO: 1348915 - RNA, 19 nt, Artificial Sequence
  Description of Artificial Sequence: Synthetic oligonucleotide
  Antisense strand to SEQ ID NO: 1348914
gaucaccacggaaagguuc

SEQ ID NO: 1348916 - RNA, 19 nt, Artificial Sequence
  Description of Artificial Sequence: Synthetic oligonucleotide
  Sense strand starting at position 3074 of SEQ ID NO: 1242455
ggugaagucucagaguaga

SEQ ID NO: 1348917 - RNA, 19 nt, Artificial Sequence
  Description of Artificial Sequence: Synthetic oligonucleotide
  Antisense strand to SEQ ID NO: 1348916
ucuacucugagacuucacc

SEQ ID NO: 1348918 - RNA, 19 nt, Artificial Sequence
  Description of Artificial Sequence: Synthetic oligonucleotide
  Sense strand starting at position 3088 of SEQ ID NO: 1242455
guagacagggcuugaaauc

SEQ ID NO: 1348919 - RNA, 19 nt, Artificial Sequence
  Description of Artificial Sequence: Synthetic oligonucleotide
  Antisense strand to SEQ ID NO: 1348918
gauuucaagcccugucuac

SEQ ID NO: 1348920 - RNA, 19 nt, Artificial Sequence
  Description of Artificial Sequence: Synthetic oligonucleotide
  Sense strand starting at position 3097 of SEQ ID NO: 1242455
gcuugaaauccuggaggcu

SEQ ID NO: 1348921 - RNA, 19 nt, Artificial Sequence
  Description of Artificial Sequence: Synthetic oligonucleotide
  Antisense strand to SEQ ID NO: 1348920
agccuccaggauuucaagc

SEQ ID NO: 1348922 - RNA, 19 nt, Artificial Sequence
  Description of Artificial Sequence: Synthetic oligonucleotide
  Sense strand starting at position 3279 of SEQ ID NO: 1242455
ccgagcuuuauuugaugua

SEQ ID NO: 1348923 - RNA, 19 nt, Artificial Sequence
  Description of Artificial Sequence: Synthetic oligonucleotide
  Antisense strand to SEQ ID NO: 1348922
uacaucaaauaaagcucgg

SEQ ID NO: 1348924 - RNA, 19 nt, Artificial Sequence
  Description of Artificial Sequence: Synthetic oligonucleotide
  Sense strand starting at position 3280 of SEQ ID NO: 1242455
cgagcuuuauuugauguaa

SEQ ID NO: 1348925 - RNA, 19 nt, Artificial Sequence
  Description of Artificial Sequence: Synthetic oligonucleotide
  Antisense strand to SEQ ID NO: 1348924
uuacaucaaauaaagcucg

SEQ ID NO: 1348926 - RNA, 19 nt, Artificial Sequence
  Description of Artificial Sequence: Synthetic oligonucleotide
  Sense strand starting at position 3282 of SEQ ID NO: 1242455
agcuuuauuugauguaaug

SEQ ID NO: 1348927 - RNA, 19 nt, Artificial Sequence
  Description of Artificial Sequence: Synthetic oligonucleotide
  Antisense strand to SEQ ID NO: 1348926
cauuacaucaaauaaagcu

SEQ ID NO: 1348928 - RNA, 19 nt, Artificial Sequence
  Description of Artificial Sequence: Synthetic oligonucleotide
  Sense strand starting at position 3316 of SEQ ID NO: 1242455
cccuucugaucccagggau

SEQ ID NO: 1348929 - RNA, 19 nt, Artificial Sequence
  Description of Artificial Sequence: Synthetic oligonucleotide
  Antisense strand to SEQ ID NO: 1348928
aucccugggaucagaaggg

SEQ ID NO: 1348930 - RNA, 19 nt, Artificial Sequence
  Description of Artificial Sequence: Synthetic oligonucleotide
  Sense strand starting at position 3335 of SEQ ID NO: 1242455
gcgggaaacuugccuucca

SEQ ID NO: 1348931 - RNA, 19 nt, Artificial Sequence
  Description of Artificial Sequence: Synthetic oligonucleotide
  Antisense strand to SEQ ID NO: 1348930
uggaaggcaaguuucccgc

SEQ ID NO: 1348932 - RNA, 19 nt, Artificial Sequence
  Description of Artificial Sequence: Synthetic oligonucleotide
  Sense strand starting at position 3456 of SEQ ID NO: 1242455
agaaauugagcuuggcaaa

SEQ ID NO: 1348933 - RNA, 19 nt, Artificial Sequence
  Description of Artificial Sequence: Synthetic oligonucleotide
  Antisense strand to SEQ ID NO: 1348932
uuugccaagcucaauuucu

SEQ ID NO: 1348934 - RNA, 19 nt, Artificial Sequence
  Description of Artificial Sequence: Synthetic oligonucleotide
  Sense strand starting at position 3457 of SEQ ID NO: 1242455
gaaauugagcuuggcaaag

SEQ ID NO: 1348935 - RNA, 19 nt, Artificial Sequence
  Description of Artificial Sequence: Synthetic oligonucleotide
  Antisense strand to SEQ ID NO: 1348934
cuuugccaagcucaauuuc

SEQ ID NO: 1348936 - RNA, 19 nt, Artificial Sequence
  Description of Artificial Sequence: Synthetic oligonucleotide
  Sense strand starting at position 3736 of SEQ ID NO: 1242455
guuagacauccuugccuau

SEQ ID NO: 1348937 - RNA, 19 nt, Artificial Sequence
  Description of Artificial Sequence: Synthetic oligonucleotide
  Antisense strand to SEQ ID NO: 1348936
auaggcaaggaugucuaac

SEQ ID NO: 1348938 - RNA, 19 nt, Artificial Sequence
  Description of Artificial Sequence: Synthetic oligonucleotide
  Sense strand starting at position 3592 of SEQ ID NO: 1242456
uuauuaaugugcuucugau

SEQ ID NO: 1348939 - RNA, 19 nt, Artificial Sequence
  Description of Artificial Sequence: Synthetic oligonucleotide
  Antisense strand to SEQ ID NO: 1348938
aucagaagcacauuaauaa

SEQ ID NO: 1348940 - RNA, 19 nt, Artificial Sequence
  Description of Artificial Sequence: Synthetic oligonucleotide
  Sense strand starting at position 3598 of SEQ ID NO: 1242456
augugcuucugaucuagaa

SEQ ID NO: 1348941 - RNA, 19 nt, Artificial Sequence
  Description of Artificial Sequence: Synthetic oligonucleotide
  Antisense strand to SEQ ID NO: 1348940
uucuagaucagaagcacau

SEQ ID NO: 1348942 - RNA, 19 nt, Artificial Sequence
  Description of Artificial Sequence: Synthetic oligonucleotide
  Sense strand starting at position 3600 of SEQ ID NO: 1242456
gugcuucugaucuagaaga

SEQ ID NO: 1348943 - RNA, 19 nt, Artificial Sequence
  Description of Artificial Sequence: Synthetic oligonucleotide
  Antisense strand to SEQ ID NO: 1348942
ucuucuagaucagaagcac

SEQ ID NO: 1348944 - RNA, 19 nt, Artificial Sequence
  Description of Artificial Sequence: Synthetic oligonucleotide
  Sense strand starting at position 3602 of SEQ ID NO: 1242456
gcuucugaucuagaagauu

SEQ ID NO: 1348945 - RNA, 19 nt, Artificial Sequence
  Description of Artificial Sequence: Synthetic oligonucleotide
  Antisense strand to SEQ ID NO: 1348944
aaucuucuagaucagaagc

SEQ ID NO: 1348946 - RNA, 19 nt, Artificial Sequence
  Description of Artificial Sequence: Synthetic oligonucleotide
  Sense strand starting at position 3621 of SEQ ID NO: 1242456
cacuuaggaucauagaguu

SEQ ID NO: 1348947 - RNA, 19 nt, Artificial Sequence
  Description of Artificial Sequence: Synthetic oligonucleotide
  Antisense strand to SEQ ID NO: 1348946
aacucuaugauccuaagug

SEQ ID NO: 1348948 - RNA, 19 nt, Artificial Sequence
  Description of Artificial Sequence: Synthetic oligonucleotide
  Sense strand starting at position 83 of SEQ ID NO: 1242457
auuaaagucugacuuguau

SEQ ID NO: 1348949 - RNA, 19 nt, Artificial Sequence
  Description of Artificial Sequence: Synthetic oligonucleotide
  Antisense strand to SEQ ID NO: 1348948
auacaagucagacuuuaau

SEQ ID NO: 1348950 - RNA, 19 nt, Artificial Sequence
  Description of Artificial Sequence: Synthetic oligonucleotide
  Sense strand starting at position 119 of SEQ ID NO: 1242457
gggugucagccugugucua

SEQ ID NO: 1348951 - RNA, 19 nt, Artificial Sequence
  Description of Artificial Sequence: Synthetic oligonucleotide
  Antisense strand to SEQ ID NO: 1348950
uagacacaggcugacaccc

SEQ ID NO: 1348952 - RNA, 19 nt, Artificial Sequence
  Description of Artificial Sequence: Synthetic oligonucleotide
  Sense strand starting at position 224 of SEQ ID NO: 1242457
gggagagucauguggguca

SEQ ID NO: 1348953 - RNA, 19 nt, Artificial Sequence
  Description of Artificial Sequence: Synthetic oligonucleotide
  Antisense strand to SEQ ID NO: 1348952
ugacccacaugacucuccc

SEQ ID NO: 1348954 - RNA, 19 nt, Artificial Sequence
  Description of Artificial Sequence: Synthetic oligonucleotide
  Sense strand starting at position 226 of SEQ ID NO: 1242457
gagagucaugugggucacu

SEQ ID NO: 1348955 - RNA, 19 nt, Artificial Sequence
  Description of Artificial Sequence: Synthetic oligonucleotide
  Antisense strand to SEQ ID NO: 1348954
agugacccacaugacucuc

SEQ ID NO: 1348956 - RNA, 19 nt, Artificial Sequence
  Description of Artificial Sequence: Synthetic oligonucleotide
  Sense strand starting at position 451 of SEQ ID NO: 1242457
gagccaggacauuguuauc

SEQ ID NO: 1348957 - RNA, 19 nt, Artificial Sequence
  Description of Artificial Sequence: Synthetic oligonucleotide
  Antisense strand to SEQ ID NO: 1348956
gauaacaauguccuggcuc

SEQ ID NO: 1348958 - RNA, 19 nt, Artificial Sequence
  Description of Artificial Sequence: Synthetic oligonucleotide
  Sense strand starting at position 456 of SEQ ID NO: 1242457
aggacauuguuaucaucau

SEQ ID NO: 1348959 - RNA, 19 nt, Artificial Sequence
  Description of Artificial Sequence: Synthetic oligonucleotide
  Antisense strand to SEQ ID NO: 1348958
augaugauaacaauguccu

SEQ ID NO: 1348960 - RNA, 19 nt, Artificial Sequence
  Description of Artificial Sequence: Synthetic oligonucleotide
  Sense strand starting at position 843 of SEQ ID NO: 1242457
acguuaaguuacccuuaaa

SEQ ID NO: 1348961 - RNA, 19 nt, Artificial Sequence
  Description of Artificial Sequence: Synthetic oligonucleotide
  Antisense strand to SEQ ID NO: 1348960
uuuaaggguaacuuaacgu

SEQ ID NO: 1348962 - RNA, 19 nt, Artificial Sequence
  Description of Artificial Sequence: Synthetic oligonucleotide
  Sense strand starting at position 933 of SEQ ID NO: 1242457
agagauuucuaccacccgu

SEQ ID NO: 1348963 - RNA, 19 nt, Artificial Sequence
  Description of Artificial Sequence: Synthetic oligonucleotide
  Antisense strand to SEQ ID NO: 1348962
acgggugguagaaaucucu

SEQ ID NO: 1348964 - RNA, 19 nt, Artificial Sequence
  Description of Artificial Sequence: Synthetic oligonucleotide
  Sense strand starting at position 1066 of SEQ ID NO: 1242457
ccuucugugucccuaagaa

SEQ ID NO: 1348965 - RNA, 19 nt, Artificial Sequence
  Description of Artificial Sequence: Synthetic oligonucleotide
  Antisense strand to SEQ ID NO: 1348964
uucuuagggacacagaagg

SEQ ID NO: 1348966 - RNA, 19 nt, Artificial Sequence
  Description of Artificial Sequence: Synthetic oligonucleotide
  Sense strand starting at position 1170 of SEQ ID NO: 1242457
ugaauucuguucuuuaaga

SEQ ID NO: 1348967 - RNA, 19 nt, Artificial Sequence
  Description of Artificial Sequence: Synthetic oligonucleotide
  Antisense strand to SEQ ID NO: 1348966
ucuuaaagaacagaauuca

SEQ ID NO: 1348968 - RNA, 19 nt, Artificial Sequence
  Description of Artificial Sequence: Synthetic oligonucleotide
  Sense strand starting at position 1288 of SEQ ID NO: 1242457
gccugacauuuauaaguug

SEQ ID NO: 1348969 - RNA, 19 nt, Artificial Sequence
  Description of Artificial Sequence: Synthetic oligonucleotide
  Antisense strand to SEQ ID NO: 1348968
caacuuauaaaugucaggc

SEQ ID NO: 1348970 - RNA, 19 nt, Artificial Sequence
  Description of Artificial Sequence: Synthetic oligonucleotide
  Sense strand starting at position 1313 of SEQ ID NO: 1242457
uacuuauggcgcuaauagu

SEQ ID NO: 1348971 - RNA, 19 nt, Artificial Sequence
  Description of Artificial Sequence: Synthetic oligonucleotide
  Antisense strand to SEQ ID NO: 1348970
acuauuagcgccauaagua

SEQ ID NO: 1348972 - RNA, 19 nt, Artificial Sequence
  Description of Artificial Sequence: Synthetic oligonucleotide
  Sense strand starting at position 1476 of SEQ ID NO: 1242457
cugugcgagcguguauauu

SEQ ID NO: 1348973 - RNA, 19 nt, Artificial Sequence
  Description of Artificial Sequence: Synthetic oligonucleotide
  Antisense strand to SEQ ID NO: 1348972
aauauacacgcucgcacag

SEQ ID NO: 1348974 - RNA, 19 nt, Artificial Sequence
  Description of Artificial Sequence: Synthetic oligonucleotide
  Sense strand starting at position 2007 of SEQ ID NO: 1242457
acuucuuauuccucgaguu

SEQ ID NO: 1348975 - RNA, 19 nt, Artificial Sequence
  Description of Artificial Sequence: Synthetic oligonucleotide
  Antisense strand to SEQ ID NO: 1348974
aacucgaggaauaagaagu

SEQ ID NO: 1348976 - RNA, 19 nt, Artificial Sequence
  Description of Artificial Sequence: Synthetic oligonucleotide
  Sense strand starting at position 2008 of SEQ ID NO: 1242457
cuucuuauuccucgaguuu

SEQ ID NO: 1348977 - RNA, 19 nt, Artificial Sequence
  Description of Artificial Sequence: Synthetic oligonucleotide
  Antisense strand to SEQ ID NO: 1348976
aaacucgaggaauaagaag

SEQ ID NO: 1348978 - RNA, 19 nt, Artificial Sequence
  Description of Artificial Sequence: Synthetic oligonucleotide
  Sense strand starting at position 2186 of SEQ ID NO: 1242457
cccaaaguaucgucgauca

SEQ ID NO: 1348979 - RNA, 19 nt, Artificial Sequence
  Description of Artificial Sequence: Synthetic oligonucleotide
  Antisense strand to SEQ ID NO: 1348978
ugaucgacgauacuuuggg

SEQ ID NO: 1348980 - RNA, 19 nt, Artificial Sequence
  Description of Artificial Sequence: Synthetic oligonucleotide
  Sense strand starting at position 2188 of SEQ ID NO: 1242457
caaaguaucgucgaucaug

SEQ ID NO: 1348981 - RNA, 19 nt, Artificial Sequence
  Description of Artificial Sequence: Synthetic oligonucleotide
  Antisense strand to SEQ ID NO: 1348980
caugaucgacgauacuuug

SEQ ID NO: 1348982 - RNA, 19 nt, Artificial Sequence
  Description of Artificial Sequence: Synthetic oligonucleotide
  Sense strand starting at position 2229 of SEQ ID NO: 1242457
ucguuugccucaucaggaa

SEQ ID NO: 1348983 - RNA, 19 nt, Artificial Sequence
  Description of Artificial Sequence: Synthetic oligonucleotide
  Antisense strand to SEQ ID NO: 1348982
uuccugaugaggcaaacga

SEQ ID NO: 1348984 - RNA, 19 nt, Artificial Sequence
  Description of Artificial Sequence: Synthetic oligonucleotide
  Sense strand starting at position 2404 of SEQ ID NO: 1242457
ccgaaagacucuuuaggag

SEQ ID NO: 1348985 - RNA, 19 nt, Artificial Sequence
  Description of Artificial Sequence: Synthetic oligonucleotide
  Antisense strand to SEQ ID NO: 1348984
cuccuaaagagucuuucgg

SEQ ID NO: 1348986 - RNA, 19 nt, Artificial Sequence
  Description of Artificial Sequence: Synthetic oligonucleotide
  Sense strand starting at position 2755 of SEQ ID NO: 1242457
ggagucauuucucaacaug

SEQ ID NO: 1348987 - RNA, 19 nt, Artificial Sequence
  Description of Artificial Sequence: Synthetic oligonucleotide
  Antisense strand to SEQ ID NO: 1348986
cauguugagaaaugacucc

SEQ ID NO: 1348988 - RNA, 19 nt, Artificial Sequence
  Description of Artificial Sequence: Synthetic oligonucleotide
  Sense strand starting at position 3024 of SEQ ID NO: 1242457
guagaagucucacucuguu

SEQ ID NO: 1348989 - RNA, 19 nt, Artificial Sequence
  Description of Artificial Sequence: Synthetic oligonucleotide
  Antisense strand to SEQ ID NO: 1348988
aacagagugagacuucuac

SEQ ID NO: 1348990 - RNA, 19 nt, Artificial Sequence
  Description of Artificial Sequence: Synthetic oligonucleotide
  Sense strand starting at position 3141 of SEQ ID NO: 1242457
cacauuuagugcuggaaag

SEQ ID NO: 1348991 - RNA, 19 nt, Artificial Sequence
  Description of Artificial Sequence: Synthetic oligonucleotide
  Antisense strand to SEQ ID NO: 1348990
cuuuccagcacuaaaugug

SEQ ID NO: 1348992 - RNA, 19 nt, Artificial Sequence
  Description of Artificial Sequence: Synthetic oligonucleotide
  Sense strand starting at position 3214 of SEQ ID NO: 1242457
guacucuggccauauggaa

SEQ ID NO: 1348993 - RNA, 19 nt, Artificial Sequence
  Description of Artificial Sequence: Synthetic oligonucleotide
  Antisense strand to SEQ ID NO: 1348992
uuccauauggccagaguac

SEQ ID NO: 1348994 - RNA, 19 nt, Artificial Sequence
  Description of Artificial Sequence: Synthetic oligonucleotide
  Sense strand starting at position 3233 of SEQ ID NO: 1242457
cuucuaauuccuuggacgu

SEQ ID NO: 1348995 - RNA, 19 nt, Artificial Sequence
  Description of Artificial Sequence: Synthetic oligonucleotide
  Antisense strand to SEQ ID NO: 1348994
acguccaaggaauuagaag

SEQ ID NO: 1348996 - RNA, 19 nt, Artificial Sequence
  Description of Artificial Sequence: Synthetic oligonucleotide
  Sense strand starting at position 3474 of SEQ ID NO: 1242457
aguuguuguccggcuucca

SEQ ID NO: 1348997 - RNA, 19 nt, Artificial Sequence
  Description of Artificial Sequence: Synthetic oligonucleotide
  Antisense strand to SEQ ID NO: 1348996
uggaagccggacaacaacu

SEQ ID NO: 1348998 - RNA, 19 nt, Artificial Sequence
  Description of Artificial Sequence: Synthetic oligonucleotide
  Sense strand starting at position 3475 of SEQ ID NO: 1242457
guuguuguccggcuuccau

SEQ ID NO: 1348999 - RNA, 19 nt, Artificial Sequence
  Description of Artificial Sequence: Synthetic oligonucleotide
  Antisense strand to SEQ ID NO: 1348998
auggaagccggacaacaac

SEQ ID NO: 1349000 - RNA, 19 nt, Artificial Sequence
  Description of Artificial Sequence: Synthetic oligonucleotide
  Sense strand starting at position 3496 of SEQ ID NO: 1242457
gagaauguaagcuguagga

SEQ ID NO: 1349001 - RNA, 19 nt, Artificial Sequence
  Description of Artificial Sequence: Synthetic oligonucleotide
  Antisense strand to SEQ ID NO: 1349000
uccuacagcuuacauucuc

SEQ ID NO: 1349002 - RNA, 19 nt, Artificial Sequence
  Description of Artificial Sequence: Synthetic oligonucleotide
  Sense strand starting at position 3498 of SEQ ID NO: 1242457
gaauguaagcuguaggaac

SEQ ID NO: 1349003 - RNA, 19 nt, Artificial Sequence
  Description of Artificial Sequence: Synthetic oligonucleotide
  Antisense strand to SEQ ID NO: 1349002
guuccuacagcuuacauuc

SEQ ID NO: 1349004 - RNA, 19 nt, Artificial Sequence
  Description of Artificial Sequence: Synthetic oligonucleotide
  Sense strand starting at position 3555 of SEQ ID NO: 1242457
agaauaucguaucugcuua

SEQ ID NO: 1349005 - RNA, 19 nt, Artificial Sequence
  Description of Artificial Sequence: Synthetic oligonucleotide
  Antisense strand to SEQ ID NO: 1349004
uaagcagauacgauauucu

SEQ ID NO: 1349006 - RNA, 19 nt, Artificial Sequence
  Description of Artificial Sequence: Synthetic oligonucleotide
  Sense strand starting at position 3560 of SEQ ID NO: 1242457
aucguaucugcuuaauauc

SEQ ID NO: 1349007 - RNA, 19 nt, Artificial Sequence
  Description of Artificial Sequence: Synthetic oligonucleotide
  Antisense strand to SEQ ID NO: 1349006
gauauuaagcagauacgau

SEQ ID NO: 1349008 - RNA, 19 nt, Artificial Sequence
  Description of Artificial Sequence: Synthetic oligonucleotide
  Sense strand starting at position 3596 of SEQ ID NO: 1242457
uccagauuaagguggcaaa

SEQ ID NO: 1349009 - RNA, 19 nt, Artificial Sequence
  Description of Artificial Sequence: Synthetic oligonucleotide
  Antisense strand to SEQ ID NO: 1349008
uuugccaccuuaaucugga

SEQ ID NO: 1349010 - RNA, 19 nt, Artificial Sequence
  Description of Artificial Sequence: Synthetic oligonucleotide
  Sense strand starting at position 3642 of SEQ ID NO: 1242457
ugcucuuucccaggcaaua

SEQ ID NO: 1349011 - RNA, 19 nt, Artificial Sequence
  Description of Artificial Sequence: Synthetic oligonucleotide
  Antisense strand to SEQ ID NO: 1349010
uauugccugggaaagagca

SEQ ID NO: 1349012 - RNA, 19 nt, Artificial Sequence
  Description of Artificial Sequence: Synthetic oligonucleotide
  Sense strand starting at position 3716 of SEQ ID NO: 1242457
aguaucaccugcucuugaa

SEQ ID NO: 1349013 - RNA, 19 nt, Artificial Sequence
  Description of Artificial Sequence: Synthetic oligonucleotide
  Antisense strand to SEQ ID NO: 1349012
uucaagagcaggugauacu

SEQ ID NO: 1349014 - RNA, 19 nt, Artificial Sequence
  Description of Artificial Sequence: Synthetic oligonucleotide
  Sense strand starting at position 3874 of SEQ ID NO: 1242457
gguauucuauugccugaau

SEQ ID NO: 1349015 - RNA, 19 nt, Artificial Sequence
  Description of Artificial Sequence: Synthetic oligonucleotide
  Antisense strand to SEQ ID NO: 1349014
auucaggcaauagaauacc

SEQ ID NO: 1349016 - RNA, 19 nt, Artificial Sequence
  Description of Artificial Sequence: Synthetic oligonucleotide
  Sense strand starting at position 3875 of SEQ ID NO: 1242457
guauucuauugccugaaua

SEQ ID NO: 1349017 - RNA, 19 nt, Artificial Sequence
  Description of Artificial Sequence: Synthetic oligonucleotide
  Antisense strand to SEQ ID NO: 1349016
uauucaggcaauagaauac

SEQ ID NO: 1349018 - RNA, 19 nt, Artificial Sequence
  Description of Artificial Sequence: Synthetic oligonucleotide
  Sense strand starting at position 3906 of SEQ ID NO: 1242457
ucccuucuucuaugagugu

SEQ ID NO: 1349019 - RNA, 19 nt, Artificial Sequence
  Description of Artificial Sequence: Synthetic oligonucleotide
  Antisense strand to SEQ ID NO: 1349018
acacucauagaagaaggga

SEQ ID NO: 1349020 - RNA, 19 nt, Artificial Sequence
  Description of Artificial Sequence: Synthetic oligonucleotide
  Sense strand starting at position 3909 of SEQ ID NO: 1242457
cuucuucuaugaguguaca

SEQ ID NO: 1349021 - RNA, 19 nt, Artificial Sequence
  Description of Artificial Sequence: Synthetic oligonucleotide
  Antisense strand to SEQ ID NO: 1349020
uguacacucauagaagaag

SEQ ID NO: 1349022 - RNA, 19 nt, Artificial Sequence
  Description of Artificial Sequence: Synthetic oligonucleotide
  Sense strand starting at position 3910 of SEQ ID NO: 1242457
uucuucuaugaguguacau

SEQ ID NO: 1349023 - RNA, 19 nt, Artificial Sequence
  Description of Artificial Sequence: Synthetic oligonucleotide
  Antisense strand to SEQ ID NO: 1349022
auguacacucauagaagaa

SEQ ID NO: 1349024 - RNA, 19 nt, Artificial Sequence
  Description of Artificial Sequence: Synthetic oligonucleotide
  Sense strand starting at position 3946 of SEQ ID NO: 1242457
uuuagcugugaugaauaaa

SEQ ID NO: 1349025 - RNA, 19 nt, Artificial Sequence
  Description of Artificial Sequence: Synthetic oligonucleotide
  Antisense strand to SEQ ID NO: 1349024
uuuauucaucacagcuaaa

SEQ ID NO: 1349026 - RNA, 19 nt, Artificial Sequence
  Description of Artificial Sequence: Synthetic oligonucleotide
  Sense strand starting at position 3949 of SEQ ID NO: 1242457
agcugugaugaauaaagcu

SEQ ID NO: 1349027 - RNA, 19 nt, Artificial Sequence
  Description of Artificial Sequence: Synthetic oligonucleotide
  Antisense strand to SEQ ID NO: 1349026
agcuuuauucaucacagcu

SEQ ID NO: 1349028 - RNA, 19 nt, Artificial Sequence
  Description of Artificial Sequence: Synthetic oligonucleotide
  Sense strand starting at position 59 of SEQ ID NO: 1242458
gauguaggcgcauguaaca

SEQ ID NO: 1349029 - RNA, 19 nt, Artificial Sequence
  Description of Artificial Sequence: Synthetic oligonucleotide
  Antisense strand to SEQ ID NO: 1349028
uguuacaugcgccuacauc

SEQ ID NO: 1349030 - RNA, 19 nt, Artificial Sequence
  Description of Artificial Sequence: Synthetic oligonucleotide
  Sense strand starting at position 440 of SEQ ID NO: 1242458
auuaaagucugacuuguau

SEQ ID NO: 1349031 - RNA, 19 nt, Artificial Sequence
  Description of Artificial Sequence: Synthetic oligonucleotide
  Antisense strand to SEQ ID NO: 1349030
auacaagucagacuuuaau

SEQ ID NO: 1349032 - RNA, 19 nt, Artificial Sequence
  Description of Artificial Sequence: Synthetic oligonucleotide
  Sense strand starting at position 476 of SEQ ID NO: 1242458
gggugucagccugugucua

SEQ ID NO: 1349033 - RNA, 19 nt, Artificial Sequence
  Description of Artificial Sequence: Synthetic oligonucleotide
  Antisense strand to SEQ ID NO: 1349032
uagacacaggcugacaccc

SEQ ID NO: 1349034 - RNA, 19 nt, Artificial Sequence
  Description of Artificial Sequence: Synthetic oligonucleotide
  Sense strand starting at position 581 of SEQ ID NO: 1242458
gggagagucauguggguca

SEQ ID NO: 1349035 - RNA, 19 nt, Artificial Sequence
  Description of Artificial Sequence: Synthetic oligonucleotide
  Antisense strand to SEQ ID NO: 1349034
ugacccacaugacucuccc

SEQ ID NO: 1349036 - RNA, 19 nt, Artificial Sequence
  Description of Artificial Sequence: Synthetic oligonucleotide
  Sense strand starting at position 583 of SEQ ID NO: 1242458
gagagucaugugggucacu

SEQ ID NO: 1349037 - RNA, 19 nt, Artificial Sequence
  Description of Artificial Sequence: Synthetic oligonucleotide
  Antisense strand to SEQ ID NO: 1349036
agugacccacaugacucuc

SEQ ID NO: 1349038 - RNA, 19 nt, Artificial Sequence
  Description of Artificial Sequence: Synthetic oligonucleotide
  Sense strand starting at position 764 of SEQ ID NO: 1242458
ccugauuacgagugcuucu

SEQ ID NO: 1349039 - RNA, 19 nt, Artificial Sequence
  Description of Artificial Sequence: Synthetic oligonucleotide
  Antisense strand to SEQ ID NO: 1349038
agaagcacucguaaucagg

SEQ ID NO: 1349040 - RNA, 19 nt, Artificial Sequence
  Description of Artificial Sequence: Synthetic oligonucleotide
  Sense strand starting at position 808 of SEQ ID NO: 1242458
gagccaggacauuguuauc

SEQ ID NO: 1349041 - RNA, 19 nt, Artificial Sequence
  Description of Artificial Sequence: Synthetic oligonucleotide
  Antisense strand to SEQ ID NO: 1349040
gauaacaauguccuggcuc

SEQ ID NO: 1349042 - RNA, 19 nt, Artificial Sequence
  Description of Artificial Sequence: Synthetic oligonucleotide
  Sense strand starting at position 811 of SEQ ID NO: 1242458
ccaggacauuguuaucauc

SEQ ID NO: 1349043 - RNA, 19 nt, Artificial Sequence
  Description of Artificial Sequence: Synthetic oligonucleotide
  Antisense strand to SEQ ID NO: 1349042
gaugauaacaauguccugg

SEQ ID NO: 1349044 - RNA, 19 nt, Artificial Sequence
  Description of Artificial Sequence: Synthetic oligonucleotide
  Sense strand starting at position 813 of SEQ ID NO: 1242458
aggacauuguuaucaucau

SEQ ID NO: 1349045 - RNA, 19 nt, Artificial Sequence
  Description of Artificial Sequence: Synthetic oligonucleotide
  Antisense strand to SEQ ID NO: 1349044
augaugauaacaauguccu

SEQ ID NO: 1349046 - RNA, 19 nt, Artificial Sequence
  Description of Artificial Sequence: Synthetic oligonucleotide
  Sense strand starting at position 814 of SEQ ID NO: 1242458
ggacauuguuaucaucauc

SEQ ID NO: 1349047 - RNA, 19 nt, Artificial Sequence
  Description of Artificial Sequence: Synthetic oligonucleotide
  Antisense strand to SEQ ID NO: 1349046
gaugaugauaacaaugucc

SEQ ID NO: 1349048 - RNA, 19 nt, Artificial Sequence
  Description of Artificial Sequence: Synthetic oligonucleotide
  Sense strand starting at position 1200 of SEQ ID NO: 1242458
acguuaaguuacccuuaaa

SEQ ID NO: 1349049 - RNA, 19 nt, Artificial Sequence
  Description of Artificial Sequence: Synthetic oligonucleotide
  Antisense strand to SEQ ID NO: 1349048
uuuaaggguaacuuaacgu

SEQ ID NO: 1349050 - RNA, 19 nt, Artificial Sequence
  Description of Artificial Sequence: Synthetic oligonucleotide
  Sense strand starting at position 1219 of SEQ ID NO: 1242458
cggaguaauuugcaucugu

SEQ ID NO: 1349051 - RNA, 19 nt, Artificial Sequence
  Description of Artificial Sequence: Synthetic oligonucleotide
  Antisense strand to SEQ ID NO: 1349050
acagaugcaaauuacuccg

SEQ ID NO: 1349052 - RNA, 19 nt, Artificial Sequence
  Description of Artificial Sequence: Synthetic oligonucleotide
  Sense strand starting at position 1232 of SEQ ID NO: 1242458
aucuguaauuuccggauaa

SEQ ID NO: 1349053 - RNA, 19 nt, Artificial Sequence
  Description of Artificial Sequence: Synthetic oligonucleotide
  Antisense strand to SEQ ID NO: 1349052
uuauccggaaauuacagau

SEQ ID NO: 1349054 - RNA, 19 nt, Artificial Sequence
  Description of Artificial Sequence: Synthetic oligonucleotide
  Sense strand starting at position 1233 of SEQ ID NO: 1242458
ucuguaauuuccggauaaa

SEQ ID NO: 1349055 - RNA, 19 nt, Artificial Sequence
  Description of Artificial Sequence: Synthetic oligonucleotide
  Antisense strand to SEQ ID NO: 1349054
uuuauccggaaauuacaga

SEQ ID NO: 1349056 - RNA, 19 nt, Artificial Sequence
  Description of Artificial Sequence: Synthetic oligonucleotide
  Sense strand starting at position 1290 of SEQ ID NO: 1242458
agagauuucuaccacccgu

SEQ ID NO: 1349057 - RNA, 19 nt, Artificial Sequence
  Description of Artificial Sequence: Synthetic oligonucleotide
  Antisense strand to SEQ ID NO: 1349056
acgggugguagaaaucucu

SEQ ID NO: 1349058 - RNA, 19 nt, Artificial Sequence
  Description of Artificial Sequence: Synthetic oligonucleotide
  Sense strand starting at position 1423 of SEQ ID NO: 1242458
ccuucugugucccuaagaa

SEQ ID NO: 1349059 - RNA, 19 nt, Artificial Sequence
  Description of Artificial Sequence: Synthetic oligonucleotide
  Antisense strand to SEQ ID NO: 1349058
uucuuagggacacagaagg

SEQ ID NO: 1349060 - RNA, 19 nt, Artificial Sequence
  Description of Artificial Sequence: Synthetic oligonucleotide
  Sense strand starting at position 1527 of SEQ ID NO: 1242458
ugaauucuguucuuuaaga

SEQ ID NO: 1349061 - RNA, 19 nt, Artificial Sequence
  Description of Artificial Sequence: Synthetic oligonucleotide
  Antisense strand to SEQ ID NO: 1349060
ucuuaaagaacagaauuca

SEQ ID NO: 1349062 - RNA, 19 nt, Artificial Sequence
  Description of Artificial Sequence: Synthetic oligonucleotide
  Sense strand starting at position 1639 of SEQ ID NO: 1242458
ccagcagccugacauuuau

SEQ ID NO: 1349063 - RNA, 19 nt, Artificial Sequence
  Description of Artificial Sequence: Synthetic oligonucleotide
  Antisense strand to SEQ ID NO: 1349062
auaaaugucaggcugcugg

SEQ ID NO: 1349064 - RNA, 19 nt, Artificial Sequence
  Description of Artificial Sequence: Synthetic oligonucleotide
  Sense strand starting at position 1645 of SEQ ID NO: 1242458
gccugacauuuauaaguug

SEQ ID NO: 1349065 - RNA, 19 nt, Artificial Sequence
  Description of Artificial Sequence: Synthetic oligonucleotide
  Antisense strand to SEQ ID NO: 1349064
caacuuauaaaugucaggc

SEQ ID NO: 1349066 - RNA, 19 nt, Artificial Sequence
  Description of Artificial Sequence: Synthetic oligonucleotide
  Sense strand starting at position 1670 of SEQ ID NO: 1242458
uacuuauggcgcuaauagu

SEQ ID NO: 1349067 - RNA, 19 nt, Artificial Sequence
  Description of Artificial Sequence: Synthetic oligonucleotide
  Antisense strand to SEQ ID NO: 1349066
acuauuagcgccauaagua

SEQ ID NO: 1349068 - RNA, 19 nt, Artificial Sequence
  Description of Artificial Sequence: Synthetic oligonucleotide
  Sense strand starting at position 1833 of SEQ ID NO: 1242458
cugugcgagcguguauauu

SEQ ID NO: 1349069 - RNA, 19 nt, Artificial Sequence
  Description of Artificial Sequence: Synthetic oligonucleotide
  Antisense strand to SEQ ID NO: 1349068
aauauacacgcucgcacag

SEQ ID NO: 1349070 - RNA, 19 nt, Artificial Sequence
  Description of Artificial Sequence: Synthetic oligonucleotide
  Sense strand starting at position 2364 of SEQ ID NO: 1242458
acuucuuauuccucgaguu

SEQ ID NO: 1349071 - RNA, 19 nt, Artificial Sequence
  Description of Artificial Sequence: Synthetic oligonucleotide
  Antisense strand to SEQ ID NO: 1349070
aacucgaggaauaagaagu

SEQ ID NO: 1349072 - RNA, 19 nt, Artificial Sequence
  Description of Artificial Sequence: Synthetic oligonucleotide
  Sense strand starting at position 2365 of SEQ ID NO: 1242458
cuucuuauuccucgaguuu

SEQ ID NO: 1349073 - RNA, 19 nt, Artificial Sequence
  Description of Artificial Sequence: Synthetic oligonucleotide
  Antisense strand to SEQ ID NO: 1349072
aaacucgaggaauaagaag

SEQ ID NO: 1349074 - RNA, 19 nt, Artificial Sequence
  Description of Artificial Sequence: Synthetic oligonucleotide
  Sense strand starting at position 2543 of SEQ ID NO: 1242458
cccaaaguaucgucgauca

SEQ ID NO: 1349075 - RNA, 19 nt, Artificial Sequence
  Description of Artificial Sequence: Synthetic oligonucleotide
  Antisense strand to SEQ ID NO: 1349074
ugaucgacgauacuuuggg

SEQ ID NO: 1349076 - RNA, 19 nt, Artificial Sequence
  Description of Artificial Sequence: Synthetic oligonucleotide
  Sense strand starting at position 2545 of SEQ ID NO: 1242458
caaaguaucgucgaucaug

SEQ ID NO: 1349077 - RNA, 19 nt, Artificial Sequence
  Description of Artificial Sequence: Synthetic oligonucleotide
  Antisense strand to SEQ ID NO: 1349076
caugaucgacgauacuuug

SEQ ID NO: 1349078 - RNA, 19 nt, Artificial Sequence
  Description of Artificial Sequence: Synthetic oligonucleotide
  Sense strand starting at position 2586 of SEQ ID NO: 1242458
ucguuugccucaucaggaa

SEQ ID NO: 1349079 - RNA, 19 nt, Artificial Sequence
  Description of Artificial Sequence: Synthetic oligonucleotide
  Antisense strand to SEQ ID NO: 1349078
uuccugaugaggcaaacga

SEQ ID NO: 1349080 - RNA, 19 nt, Artificial Sequence
  Description of Artificial Sequence: Synthetic oligonucleotide
  Sense strand starting at position 2761 of SEQ ID NO: 1242458
ccgaaagacucuuuaggag

SEQ ID NO: 1349081 - RNA, 19 nt, Artificial Sequence
  Description of Artificial Sequence: Synthetic oligonucleotide
  Antisense strand to SEQ ID NO: 1349080
cuccuaaagagucuuucgg

SEQ ID NO: 1349082 - RNA, 19 nt, Artificial Sequence
  Description of Artificial Sequence: Synthetic oligonucleotide
  Sense strand starting at position 3112 of SEQ ID NO: 1242458
ggagucauuucucaacaug

SEQ ID NO: 1349083 - RNA, 19 nt, Artificial Sequence
  Description of Artificial Sequence: Synthetic oligonucleotide
  Antisense strand to SEQ ID NO: 1349082
cauguugagaaaugacucc

SEQ ID NO: 1349084 - RNA, 19 nt, Artificial Sequence
  Description of Artificial Sequence: Synthetic oligonucleotide
  Sense strand starting at position 3381 of SEQ ID NO: 1242458
guagaagucucacucuguu

SEQ ID NO: 1349085 - RNA, 19 nt, Artificial Sequence
  Description of Artificial Sequence: Synthetic oligonucleotide
  Antisense strand to SEQ ID NO: 1349084
aacagagugagacuucuac

SEQ ID NO: 1349086 - RNA, 19 nt, Artificial Sequence
  Description of Artificial Sequence: Synthetic oligonucleotide
  Sense strand starting at position 3498 of SEQ ID NO: 1242458
cacauuuagugcuggaaag

SEQ ID NO: 1349087 - RNA, 19 nt, Artificial Sequence
  Description of Artificial Sequence: Synthetic oligonucleotide
  Antisense strand to SEQ ID NO: 1349086
cuuuccagcacuaaaugug

SEQ ID NO: 1349088 - RNA, 19 nt, Artificial Sequence
  Description of Artificial Sequence: Synthetic oligonucleotide
  Sense strand starting at position 3571 of SEQ ID NO: 1242458
guacucuggccauauggaa

SEQ ID NO: 1349089 - RNA, 19 nt, Artificial Sequence
  Description of Artificial Sequence: Synthetic oligonucleotide
  Antisense strand to SEQ ID NO: 1349088
uuccauauggccagaguac

SEQ ID NO: 1349090 - RNA, 19 nt, Artificial Sequence
  Description of Artificial Sequence: Synthetic oligonucleotide
  Sense strand starting at position 3590 of SEQ ID NO: 1242458
cuucuaauuccuuggacgu

SEQ ID NO: 1349091 - RNA, 19 nt, Artificial Sequence
  Description of Artificial Sequence: Synthetic oligonucleotide
  Antisense strand to SEQ ID NO: 1349090
acguccaaggaauuagaag

SEQ ID NO: 1349092 - RNA, 19 nt, Artificial Sequence
  Description of Artificial Sequence: Synthetic oligonucleotide
  Sense strand starting at position 3831 of SEQ ID NO: 1242458
aguuguuguccggcuucca

SEQ ID NO: 1349093 - RNA, 19 nt, Artificial Sequence
  Description of Artificial Sequence: Synthetic oligonucleotide
  Antisense strand to SEQ ID NO: 1349092
uggaagccggacaacaacu

SEQ ID NO: 1349094 - RNA, 19 nt, Artificial Sequence
  Description of Artificial Sequence: Synthetic oligonucleotide
  Sense strand starting at position 3832 of SEQ ID NO: 1242458
guuguuguccggcuuccau

SEQ ID NO: 1349095 - RNA, 19 nt, Artificial Sequence
  Description of Artificial Sequence: Synthetic oligonucleotide
  Antisense strand to SEQ ID NO: 1349094
auggaagccggacaacaac

SEQ ID NO: 1349096 - RNA, 19 nt, Artificial Sequence
  Description of Artificial Sequence: Synthetic oligonucleotide
  Sense strand starting at position 3853 of SEQ ID NO: 1242458
gagaauguaagcuguagga

SEQ ID NO: 1349097 - RNA, 19 nt, Artificial Sequence
  Description of Artificial Sequence: Synthetic oligonucleotide
  Antisense strand to SEQ ID NO: 1349096
uccuacagcuuacauucuc

SEQ ID NO: 1349098 - RNA, 19 nt, Artificial Sequence
  Description of Artificial Sequence: Synthetic oligonucleotide
  Sense strand starting at position 3855 of SEQ ID NO: 1242458
gaauguaagcuguaggaac

SEQ ID NO: 1349099 - RNA, 19 nt, Artificial Sequence
  Description of Artificial Sequence: Synthetic oligonucleotide
  Antisense strand to SEQ ID NO: 1349098
guuccuacagcuuacauuc

SEQ ID NO: 1349100 - RNA, 19 nt, Artificial Sequence
  Description of Artificial Sequence: Synthetic oligonucleotide
  Sense strand starting at position 3881 of SEQ ID NO: 1242458
ucuguugucugccucauau

SEQ ID NO: 1349101 - RNA, 19 nt, Artificial Sequence
  Description of Artificial Sequence: Synthetic oligonucleotide
  Antisense strand to SEQ ID NO: 1349100
auaugaggcagacaacaga

SEQ ID NO: 1349102 - RNA, 19 nt, Artificial Sequence
  Description of Artificial Sequence: Synthetic oligonucleotide
  Sense strand starting at position 3912 of SEQ ID NO: 1242458
agaauaucguaucugcuua

SEQ ID NO: 1349103 - RNA, 19 nt, Artificial Sequence
  Description of Artificial Sequence: Synthetic oligonucleotide
  Antisense strand to SEQ ID NO: 1349102
uaagcagauacgauauucu

SEQ ID NO: 1349104 - RNA, 19 nt, Artificial Sequence
  Description of Artificial Sequence: Synthetic oligonucleotide
  Sense strand starting at position 3917 of SEQ ID NO: 1242458
aucguaucugcuuaauauc

SEQ ID NO: 1349105 - RNA, 19 nt, Artificial Sequence
  Description of Artificial Sequence: Synthetic oligonucleotide
  Antisense strand to SEQ ID NO: 1349104
gauauuaagcagauacgau

SEQ ID NO: 1349106 - RNA, 19 nt, Artificial Sequence
  Description of Artificial Sequence: Synthetic oligonucleotide
  Sense strand starting at position 3953 of SEQ ID NO: 1242458
uccagauuaagguggcaaa

SEQ ID NO: 1349107 - RNA, 19 nt, Artificial Sequence
  Description of Artificial Sequence: Synthetic oligonucleotide
  Antisense strand to SEQ ID NO: 1349106
uuugccaccuuaaucugga

SEQ ID NO: 1349108 - RNA, 19 nt, Artificial Sequence
  Description of Artificial Sequence: Synthetic oligonucleotide
  Sense strand starting at position 69 of SEQ ID NO: 1242459
gucacaucaccgcagucau

SEQ ID NO: 1349109 - RNA, 19 nt, Artificial Sequence
  Description of Artificial Sequence: Synthetic oligonucleotide
  Antisense strand to SEQ ID NO: 1349108
augacugcggugaugugac

SEQ ID NO: 1349110 - RNA, 19 nt, Artificial Sequence
  Description of Artificial Sequence: Synthetic oligonucleotide
  Sense strand starting at position 80 of SEQ ID NO: 1242459
gcagucauuccauaugaca

SEQ ID NO: 1349111 - RNA, 19 nt, Artificial Sequence
  Description of Artificial Sequence: Synthetic oligonucleotide
  Antisense strand to SEQ ID NO: 1349110
ugucauauggaaugacugc

SEQ ID NO: 1349112 - RNA, 19 nt, Artificial Sequence
  Description of Artificial Sequence: Synthetic oligonucleotide
  Sense strand starting at position 183 of SEQ ID NO: 1242459
uugugaaauugugcagaug

SEQ ID NO: 1349113 - RNA, 19 nt, Artificial Sequence
  Description of Artificial Sequence: Synthetic oligonucleotide
  Antisense strand to SEQ ID NO: 1349112
caucugcacaauuucacaa

SEQ ID NO: 1349114 - RNA, 19 nt, Artificial Sequence
  Description of Artificial Sequence: Synthetic oligonucleotide
  Sense strand starting at position 184 of SEQ ID NO: 1242459
ugugaaauugugcagaugu

SEQ ID NO: 1349115 - RNA, 19 nt, Artificial Sequence
  Description of Artificial Sequence: Synthetic oligonucleotide
  Antisense strand to SEQ ID NO: 1349114
acaucugcacaauuucaca

SEQ ID NO: 1349116 - RNA, 19 nt, Artificial Sequence
  Description of Artificial Sequence: Synthetic oligonucleotide
  Sense strand starting at position 234 of SEQ ID NO: 1242459
uagugugauuugggaauau

SEQ ID NO: 1349117 - RNA, 19 nt, Artificial Sequence
  Description of Artificial Sequence: Synthetic oligonucleotide
  Antisense strand to SEQ ID NO: 1349116
auauucccaaaucacacua

SEQ ID NO: 1349118 - RNA, 19 nt, Artificial Sequence
  Description of Artificial Sequence: Synthetic oligonucleotide
  Sense strand starting at position 254 of SEQ ID NO: 1242459
uccaauucuggcugaggca

SEQ ID NO: 1349119 - RNA, 19 nt, Artificial Sequence
  Description of Artificial Sequence: Synthetic oligonucleotide
  Antisense strand to SEQ ID NO: 1349118
ugccucagccagaauugga

SEQ ID NO: 1349120 - RNA, 19 nt, Artificial Sequence
  Description of Artificial Sequence: Synthetic oligonucleotide
  Sense strand starting at position 352 of SEQ ID NO: 1242459
aggguuugcuucccugaaa

SEQ ID NO: 1349121 - RNA, 19 nt, Artificial Sequence
  Description of Artificial Sequence: Synthetic oligonucleotide
  Antisense strand to SEQ ID NO: 1349120
uuucagggaagcaaacccu

SEQ ID NO: 1349122 - RNA, 19 nt, Artificial Sequence
  Description of Artificial Sequence: Synthetic oligonucleotide
  Sense strand starting at position 353 of SEQ ID NO: 1242459
ggguuugcuucccugaaau

SEQ ID NO: 1349123 - RNA, 19 nt, Artificial Sequence
  Description of Artificial Sequence: Synthetic oligonucleotide
  Antisense strand to SEQ ID NO: 1349122
auuucagggaagcaaaccc

SEQ ID NO: 1349124 - RNA, 19 nt, Artificial Sequence
  Description of Artificial Sequence: Synthetic oligonucleotide
  Sense strand starting at position 355 of SEQ ID NO: 1242459
guuugcuucccugaaauag

SEQ ID NO: 1349125 - RNA, 19 nt, Artificial Sequence
  Description of Artificial Sequence: Synthetic oligonucleotide
  Antisense strand to SEQ ID NO: 1349124
cuauuucagggaagcaaac

SEQ ID NO: 1349126 - RNA, 19 nt, Artificial Sequence
  Description of Artificial Sequence: Synthetic oligonucleotide
  Sense strand starting at position 365 of SEQ ID NO: 1242459
cugaaauaguaacuguuua

SEQ ID NO: 1349127 - RNA, 19 nt, Artificial Sequence
  Description of Artificial Sequence: Synthetic oligonucleotide
  Antisense strand to SEQ ID NO: 1349126
uaaacaguuacuauuucag

SEQ ID NO: 1349128 - RNA, 19 nt, Artificial Sequence
  Description of Artificial Sequence: Synthetic oligonucleotide
  Sense strand starting at position 499 of SEQ ID NO: 1242459
cucuguucugcaugagggu

SEQ ID NO: 1349129 - RNA, 19 nt, Artificial Sequence
  Description of Artificial Sequence: Synthetic oligonucleotide
  Antisense strand to SEQ ID NO: 1349128
acccucaugcagaacagag

SEQ ID NO: 1349130 - RNA, 19 nt, Artificial Sequence
  Description of Artificial Sequence: Synthetic oligonucleotide
  Sense strand starting at position 568 of SEQ ID NO: 1242459
gcggcuuccaacugggaaa

SEQ ID NO: 1349131 - RNA, 19 nt, Artificial Sequence
  Description of Artificial Sequence: Synthetic oligonucleotide
  Antisense strand to SEQ ID NO: 1349130
uuucccaguuggaagccgc

SEQ ID NO: 1349132 - RNA, 19 nt, Artificial Sequence
  Description of Artificial Sequence: Synthetic oligonucleotide
  Sense strand starting at position 569 of SEQ ID NO: 1242459
cggcuuccaacugggaaau

SEQ ID NO: 1349133 - RNA, 19 nt, Artificial Sequence
  Description of Artificial Sequence: Synthetic oligonucleotide
  Antisense strand to SEQ ID NO: 1349132
auuucccaguuggaagccg

SEQ ID NO: 1349134 - RNA, 19 nt, Artificial Sequence
  Description of Artificial Sequence: Synthetic oligonucleotide
  Sense strand starting at position 571 of SEQ ID NO: 1242459
gcuuccaacugggaaauca

SEQ ID NO: 1349135 - RNA, 19 nt, Artificial Sequence
  Description of Artificial Sequence: Synthetic oligonucleotide
  Antisense strand to SEQ ID NO: 1349134
ugauuucccaguuggaagc

SEQ ID NO: 1349136 - RNA, 19 nt, Artificial Sequence
  Description of Artificial Sequence: Synthetic oligonucleotide
  Sense strand starting at position 581 of SEQ ID NO: 1242459
gggaaaucauauuggcaaa

SEQ ID NO: 1349137 - RNA, 19 nt, Artificial Sequence
  Description of Artificial Sequence: Synthetic oligonucleotide
  Antisense strand to SEQ ID NO: 1349136
uuugccaauaugauuuccc

SEQ ID NO: 1349138 - RNA, 19 nt, Artificial Sequence
  Description of Artificial Sequence: Synthetic oligonucleotide
  Sense strand starting at position 671 of SEQ ID NO: 1242459
ccgucacuucugcaaguga

SEQ ID NO: 1349139 - RNA, 19 nt, Artificial Sequence
  Description of Artificial Sequence: Synthetic oligonucleotide
  Antisense strand to SEQ ID NO: 1349138
ucacuugcagaagugacgg

SEQ ID NO: 1349140 - RNA, 19 nt, Artificial Sequence
  Description of Artificial Sequence: Synthetic oligonucleotide
  Sense strand starting at position 688 of SEQ ID NO: 1242459
gagagagguuucucgguug

SEQ ID NO: 1349141 - RNA, 19 nt, Artificial Sequence
  Description of Artificial Sequence: Synthetic oligonucleotide
  Antisense strand to SEQ ID NO: 1349140
caaccgagaaaccucucuc

SEQ ID NO: 1349142 - RNA, 19 nt, Artificial Sequence
  Description of Artificial Sequence: Synthetic oligonucleotide
  Sense strand starting at position 691 of SEQ ID NO: 1242459
agagguuucucgguugacu

SEQ ID NO: 1349143 - RNA, 19 nt, Artificial Sequence
  Description of Artificial Sequence: Synthetic oligonucleotide
  Antisense strand to SEQ ID NO: 1349142
agucaaccgagaaaccucu

SEQ ID NO: 1349144 - RNA, 19 nt, Artificial Sequence
  Description of Artificial Sequence: Synthetic oligonucleotide
  Sense strand starting at position 799 of SEQ ID NO: 1242459
cacgcuugucaagaguuaa

SEQ ID NO: 1349145 - RNA, 19 nt, Artificial Sequence
  Description of Artificial Sequence: Synthetic oligonucleotide
  Antisense strand to SEQ ID NO: 1349144
uuaacucuugacaagcgug

SEQ ID NO: 1349146 - RNA, 19 nt, Artificial Sequence
  Description of Artificial Sequence: Synthetic oligonucleotide
  Sense strand starting at position 2265 of SEQ ID NO: 1242459
ggccuugguggauggaaau

SEQ ID NO: 1349147 - RNA, 19 nt, Artificial Sequence
  Description of Artificial Sequence: Synthetic oligonucleotide
  Antisense strand to SEQ ID NO: 1349146
auuuccauccaccaaggcc

SEQ ID NO: 1349148 - RNA, 19 nt, Artificial Sequence
  Description of Artificial Sequence: Synthetic oligonucleotide
  Sense strand starting at position 3228 of SEQ ID NO: 1242459
accauaaagugcuccaagu

SEQ ID NO: 1349149 - RNA, 19 nt, Artificial Sequence
  Description of Artificial Sequence: Synthetic oligonucleotide
  Antisense strand to SEQ ID NO: 1349148
acuuggagcacuuuauggu

SEQ ID NO: 1349150 - RNA, 19 nt, Artificial Sequence
  Description of Artificial Sequence: Synthetic oligonucleotide
  Sense strand starting at position 3317 of SEQ ID NO: 1242459
agcuguuucuuuccagcau

SEQ ID NO: 1349151 - RNA, 19 nt, Artificial Sequence
  Description of Artificial Sequence: Synthetic oligonucleotide
  Antisense strand to SEQ ID NO: 1349150
augcuggaaagaaacagcu

SEQ ID NO: 1349152 - RNA, 19 nt, Artificial Sequence
  Description of Artificial Sequence: Synthetic oligonucleotide
  Sense strand starting at position 3332 of SEQ ID NO: 1242459
gcauuucccuaagaaagua

SEQ ID NO: 1349153 - RNA, 19 nt, Artificial Sequence
  Description of Artificial Sequence: Synthetic oligonucleotide
  Antisense strand to SEQ ID NO: 1349152
uacuuucuuagggaaaugc

SEQ ID NO: 1349154 - RNA, 19 nt, Artificial Sequence
  Description of Artificial Sequence: Synthetic oligonucleotide
  Sense strand starting at position 3352 of SEQ ID NO: 1242459
ucaguuuaauugccaugga

SEQ ID NO: 1349155 - RNA, 19 nt, Artificial Sequence
  Description of Artificial Sequence: Synthetic oligonucleotide
  Antisense strand to SEQ ID NO: 1349154
uccauggcaauuaaacuga

SEQ ID NO: 1349156 - RNA, 19 nt, Artificial Sequence
  Description of Artificial Sequence: Synthetic oligonucleotide
  Sense strand starting at position 3353 of SEQ ID NO: 1242459
caguuuaauugccauggaa

SEQ ID NO: 1349157 - RNA, 19 nt, Artificial Sequence
  Description of Artificial Sequence: Synthetic oligonucleotide
  Antisense strand to SEQ ID NO: 1349156
uuccauggcaauuaaacug

SEQ ID NO: 1349158 - RNA, 19 nt, Artificial Sequence
  Description of Artificial Sequence: Synthetic oligonucleotide
  Sense strand starting at position 3355 of SEQ ID NO: 1242459
guuuaauugccauggaaac

SEQ ID NO: 1349159 - RNA, 19 nt, Artificial Sequence
  Description of Artificial Sequence: Synthetic oligonucleotide
  Antisense strand to SEQ ID NO: 1349158
guuuccauggcaauuaaac

SEQ ID NO: 1349160 - RNA, 19 nt, Artificial Sequence
  Description of Artificial Sequence: Synthetic oligonucleotide
  Sense strand starting at position 3415 of SEQ ID NO: 1242459
ggcaguuauuuaugaauga

SEQ ID NO: 1349161 - RNA, 19 nt, Artificial Sequence
  Description of Artificial Sequence: Synthetic oligonucleotide
  Antisense strand to SEQ ID NO: 1349160
ucauucauaaauaacugcc

SEQ ID NO: 1349162 - RNA, 19 nt, Artificial Sequence
  Description of Artificial Sequence: Synthetic oligonucleotide
  Sense strand starting at position 3416 of SEQ ID NO: 1242459
gcaguuauuuaugaaugac

SEQ ID NO: 1349163 - RNA, 19 nt, Artificial Sequence
  Description of Artificial Sequence: Synthetic oligonucleotide
  Antisense strand to SEQ ID NO: 1349162
gucauucauaaauaacugc

SEQ ID NO: 1349164 - RNA, 19 nt, Artificial Sequence
  Description of Artificial Sequence: Synthetic oligonucleotide
  Sense strand starting at position 3428 of SEQ ID NO: 1242459
gaaugacaguucucaguau

SEQ ID NO: 1349165 - RNA, 19 nt, Artificial Sequence
  Description of Artificial Sequence: Synthetic oligonucleotide
  Antisense strand to SEQ ID NO: 1349164
auacugagaacugucauuc

SEQ ID NO: 1349166 - RNA, 19 nt, Artificial Sequence
  Description of Artificial Sequence: Synthetic oligonucleotide
  Sense strand starting at position 3432 of SEQ ID NO: 1242459
gacaguucucaguauaagu

SEQ ID NO: 1349167 - RNA, 19 nt, Artificial Sequence
  Description of Artificial Sequence: Synthetic oligonucleotide
  Antisense strand to SEQ ID NO: 1349166
acuuauacugagaacuguc

SEQ ID NO: 1349168 - RNA, 19 nt, Artificial Sequence
  Description of Artificial Sequence: Synthetic oligonucleotide
  Sense strand starting at position 3434 of SEQ ID NO: 1242459
caguucucaguauaagugu

SEQ ID NO: 1349169 - RNA, 19 nt, Artificial Sequence
  Description of Artificial Sequence: Synthetic oligonucleotide
  Antisense strand to SEQ ID NO: 1349168
acacuuauacugagaacug

SEQ ID NO: 1349170 - RNA, 19 nt, Artificial Sequence
  Description of Artificial Sequence: Synthetic oligonucleotide
  Sense strand starting at position 3441 of SEQ ID NO: 1242459
caguauaagugucauuaag

SEQ ID NO: 1349171 - RNA, 19 nt, Artificial Sequence
  Description of Artificial Sequence: Synthetic oligonucleotide
  Antisense strand to SEQ ID NO: 1349170
cuuaaugacacuuauacug

SEQ ID NO: 1349172 - RNA, 19 nt, Artificial Sequence
  Description of Artificial Sequence: Synthetic oligonucleotide
  Sense strand starting at position 3443 of SEQ ID NO: 1242459
guauaagugucauuaaggc

SEQ ID NO: 1349173 - RNA, 19 nt, Artificial Sequence
  Description of Artificial Sequence: Synthetic oligonucleotide
  Antisense strand to SEQ ID NO: 1349172
gccuuaaugacacuuauac

SEQ ID NO: 1349174 - RNA, 19 nt, Artificial Sequence
  Description of Artificial Sequence: Synthetic oligonucleotide
  Sense strand starting at position 3750 of SEQ ID NO: 1242459
ccauucuguaggugguaga

SEQ ID NO: 1349175 - RNA, 19 nt, Artificial Sequence
  Description of Artificial Sequence: Synthetic oligonucleotide
  Antisense strand to SEQ ID NO: 1349174
ucuaccaccuacagaaugg

SEQ ID NO: 1349176 - RNA, 19 nt, Artificial Sequence
  Description of Artificial Sequence: Synthetic oligonucleotide
  Sense strand starting at position 3751 of SEQ ID NO: 1242459
cauucuguaggugguagaa

SEQ ID NO: 1349177 - RNA, 19 nt, Artificial Sequence
  Description of Artificial Sequence: Synthetic oligonucleotide
  Antisense strand to SEQ ID NO: 1349176
uucuaccaccuacagaaug

SEQ ID NO: 1349178 - RNA, 19 nt, Artificial Sequence
  Description of Artificial Sequence: Synthetic oligonucleotide
  Sense strand starting at position 3823 of SEQ ID NO: 1242459
ggguggaaaguggguuuau

SEQ ID NO: 1349179 - RNA, 19 nt, Artificial Sequence
  Description of Artificial Sequence: Synthetic oligonucleotide
  Antisense strand to SEQ ID NO: 1349178
auaaacccacuuuccaccc

SEQ ID NO: 1349180 - RNA, 19 nt, Artificial Sequence
  Description of Artificial Sequence: Synthetic oligonucleotide
  Sense strand starting at position 3824 of SEQ ID NO: 1242459
gguggaaaguggguuuauu

SEQ ID NO: 1349181 - RNA, 19 nt, Artificial Sequence
  Description of Artificial Sequence: Synthetic oligonucleotide
  Antisense strand to SEQ ID NO: 1349180
aauaaacccacuuuccacc

SEQ ID NO: 1349182 - RNA, 19 nt, Artificial Sequence
  Description of Artificial Sequence: Synthetic oligonucleotide
  Sense strand starting at position 3944 of SEQ ID NO: 1242459
cuggccuuugcuugucaaa

SEQ ID NO: 1349183 - RNA, 19 nt, Artificial Sequence
  Description of Artificial Sequence: Synthetic oligonucleotide
  Antisense strand to SEQ ID NO: 1349182
uuugacaagcaaaggccag

SEQ ID NO: 1349184 - RNA, 19 nt, Artificial Sequence
  Description of Artificial Sequence: Synthetic oligonucleotide
  Sense strand starting at position 3946 of SEQ ID NO: 1242459
ggccuuugcuugucaaaca

SEQ ID NO: 1349185 - RNA, 19 nt, Artificial Sequence
  Description of Artificial Sequence: Synthetic oligonucleotide
  Antisense strand to SEQ ID NO: 1349184
uguuugacaagcaaaggcc

SEQ ID NO: 1349186 - RNA, 19 nt, Artificial Sequence
  Description of Artificial Sequence: Synthetic oligonucleotide
  Sense strand starting at position 3978 of SEQ ID NO: 1242459
ggugucaucgcccaaaccu

SEQ ID NO: 1349187 - RNA, 19 nt, Artificial Sequence
  Description of Artificial Sequence: Synthetic oligonucleotide
  Antisense strand to SEQ ID NO: 1349186
agguuugggcgaugacacc

SEQ ID NO: 1349188 - RNA, 19 nt, Artificial Sequence
  Description of Artificial Sequence: Synthetic oligonucleotide
  Sense strand starting at position 315 of SEQ ID NO: 1242460
ugcaguaaccgagaucaug

SEQ ID NO: 1349189 - RNA, 19 nt, Artificial Sequence
  Description of Artificial Sequence: Synthetic oligonucleotide
  Antisense strand to SEQ ID NO: 1349188
caugaucucgguuacugca

SEQ ID NO: 1349190 - RNA, 19 nt, Artificial Sequence
  Description of Artificial Sequence: Synthetic oligonucleotide
  Sense strand starting at position 568 of SEQ ID NO: 1242460
uuggaaauccuagguaauu

SEQ ID NO: 1349191 - RNA, 19 nt, Artificial Sequence
  Description of Artificial Sequence: Synthetic oligonucleotide
  Antisense strand to SEQ ID NO: 1349190
aauuaccuaggauuuccaa

SEQ ID NO: 1349192 - RNA, 19 nt, Artificial Sequence
  Description of Artificial Sequence: Synthetic oligonucleotide
  Sense strand starting at position 569 of SEQ ID NO: 1242460
uggaaauccuagguaauua

SEQ ID NO: 1349193 - RNA, 19 nt, Artificial Sequence
  Description of Artificial Sequence: Synthetic oligonucleotide
  Antisense strand to SEQ ID NO: 1349192
uaauuaccuaggauuucca

SEQ ID NO: 1349194 - RNA, 19 nt, Artificial Sequence
  Description of Artificial Sequence: Synthetic oligonucleotide
  Sense strand starting at position 871 of SEQ ID NO: 1242460
caagucauucuccaggguu

SEQ ID NO: 1349195 - RNA, 19 nt, Artificial Sequence
  Description of Artificial Sequence: Synthetic oligonucleotide
  Antisense strand to SEQ ID NO: 1349194
aacccuggagaaugacuug

SEQ ID NO: 1349196 - RNA, 19 nt, Artificial Sequence
  Description of Artificial Sequence: Synthetic oligonucleotide
  Sense strand starting at position 967 of SEQ ID NO: 1242460
caaauaauguggcuggaaa

SEQ ID NO: 1349197 - RNA, 19 nt, Artificial Sequence
  Description of Artificial Sequence: Synthetic oligonucleotide
  Antisense strand to SEQ ID NO: 1349196
uuuccagccacauuauuug

SEQ ID NO: 1349198 - RNA, 19 nt, Artificial Sequence
  Description of Artificial Sequence: Synthetic oligonucleotide
  Sense strand starting at position 1402 of SEQ ID NO: 1242460
aggcucuuuaauggacgaa

SEQ ID NO: 1349199 - RNA, 19 nt, Artificial Sequence
  Description of Artificial Sequence: Synthetic oligonucleotide
  Antisense strand to SEQ ID NO: 1349198
uucguccauuaaagagccu

SEQ ID NO: 1349200 - RNA, 19 nt, Artificial Sequence
  Description of Artificial Sequence: Synthetic oligonucleotide
  Sense strand starting at position 1403 of SEQ ID NO: 1242460
ggcucuuuaauggacgaau

SEQ ID NO: 1349201 - RNA, 19 nt, Artificial Sequence
  Description of Artificial Sequence: Synthetic oligonucleotide
  Antisense strand to SEQ ID NO: 1349200
auucguccauuaaagagcc

SEQ ID NO: 1349202 - RNA, 19 nt, Artificial Sequence
  Description of Artificial Sequence: Synthetic oligonucleotide
  Sense strand starting at position 2373 of SEQ ID NO: 1242460
caucgucugcguucuccaa

SEQ ID NO: 1349203 - RNA, 19 nt, Artificial Sequence
  Description of Artificial Sequence: Synthetic oligonucleotide
  Antisense strand to SEQ ID NO: 1349202
uuggagaacgcagacgaug

SEQ ID NO: 1349204 - RNA, 19 nt, Artificial Sequence
  Description of Artificial Sequence: Synthetic oligonucleotide
  Sense strand starting at position 2374 of SEQ ID NO: 1242460
aucgucugcguucuccaaa

SEQ ID NO: 1349205 - RNA, 19 nt, Artificial Sequence
  Description of Artificial Sequence: Synthetic oligonucleotide
  Antisense strand to SEQ ID NO: 1349204
uuuggagaacgcagacgau

SEQ ID NO: 1349206 - RNA, 19 nt, Artificial Sequence
  Description of Artificial Sequence: Synthetic oligonucleotide
  Sense strand starting at position 2492 of SEQ ID NO: 1242460
uggccuuucgugccaaacu

SEQ ID NO: 1349207 - RNA, 19 nt, Artificial Sequence
  Description of Artificial Sequence: Synthetic oligonucleotide
  Antisense strand to SEQ ID NO: 1349206
aguuuggcacgaaaggcca

SEQ ID NO: 1349208 - RNA, 19 nt, Artificial Sequence
  Description of Artificial Sequence: Synthetic oligonucleotide
  Sense strand starting at position 2605 of SEQ ID NO: 1242460
gggcaaaugccacauauau

SEQ ID NO: 1349209 - RNA, 19 nt, Artificial Sequence
  Description of Artificial Sequence: Synthetic oligonucleotide
  Antisense strand to SEQ ID NO: 1349208
auauauguggcauuugccc

SEQ ID NO: 1349210 - RNA, 19 nt, Artificial Sequence
  Description of Artificial Sequence: Synthetic oligonucleotide
  Sense strand starting at position 2612 of SEQ ID NO: 1242460
ugccacauauaucuuugua

SEQ ID NO: 1349211 - RNA, 19 nt, Artificial Sequence
  Description of Artificial Sequence: Synthetic oligonucleotide
  Antisense strand to SEQ ID NO: 1349210
uacaaagauauauguggca

SEQ ID NO: 1349212 - RNA, 19 nt, Artificial Sequence
  Description of Artificial Sequence: Synthetic oligonucleotide
  Sense strand starting at position 2649 of SEQ ID NO: 1242460
gugaaacuuccuggagcag

SEQ ID NO: 1349213 - RNA, 19 nt, Artificial Sequence
  Description of Artificial Sequence: Synthetic oligonucleotide
  Antisense strand to SEQ ID NO: 1349212
cugcuccaggaaguuucac

SEQ ID NO: 1349214 - RNA, 19 nt, Artificial Sequence
  Description of Artificial Sequence: Synthetic oligonucleotide
  Sense strand starting at position 2699 of SEQ ID NO: 1242460
gggcuuaggaugugacaaa

SEQ ID NO: 1349215 - RNA, 19 nt, Artificial Sequence
  Description of Artificial Sequence: Synthetic oligonucleotide
  Antisense strand to SEQ ID NO: 1349214
uuugucacauccuaagccc

SEQ ID NO: 1349216 - RNA, 19 nt, Artificial Sequence
  Description of Artificial Sequence: Synthetic oligonucleotide
  Sense strand starting at position 2721 of SEQ ID NO: 1242460
uguucuaaacucuguaaca

SEQ ID NO: 1349217 - RNA, 19 nt, Artificial Sequence
  Description of Artificial Sequence: Synthetic oligonucleotide
  Antisense strand to SEQ ID NO: 1349216
uguuacagaguuuagaaca

SEQ ID NO: 1349218 - RNA, 19 nt, Artificial Sequence
  Description of Artificial Sequence: Synthetic oligonucleotide
  Sense strand starting at position 2722 of SEQ ID NO: 1242460
guucuaaacucuguaacag

SEQ ID NO: 1349219 - RNA, 19 nt, Artificial Sequence
  Description of Artificial Sequence: Synthetic oligonucleotide
  Antisense strand to SEQ ID NO: 1349218
cuguuacagaguuuagaac

SEQ ID NO: 1349220 - RNA, 19 nt, Artificial Sequence
  Description of Artificial Sequence: Synthetic oligonucleotide
  Sense strand starting at position 2723 of SEQ ID NO: 1242460
uucuaaacucuguaacagu

SEQ ID NO: 1349221 - RNA, 19 nt, Artificial Sequence
  Description of Artificial Sequence: Synthetic oligonucleotide
  Antisense strand to SEQ ID NO: 1349220
acuguuacagaguuuagaa

SEQ ID NO: 1349222 - RNA, 19 nt, Artificial Sequence
  Description of Artificial Sequence: Synthetic oligonucleotide
  Sense strand starting at position 2739 of SEQ ID NO: 1242460
aguaguaacuccuuuaauc

SEQ ID NO: 1349223 - RNA, 19 nt, Artificial Sequence
  Description of Artificial Sequence: Synthetic oligonucleotide
  Antisense strand to SEQ ID NO: 1349222
gauuaaaggaguuacuacu

SEQ ID NO: 1349224 - RNA, 19 nt, Artificial Sequence
  Description of Artificial Sequence: Synthetic oligonucleotide
  Sense strand starting at position 2783 of SEQ ID NO: 1242460
ccgcuuauagcuggagaaa

SEQ ID NO: 1349225 - RNA, 19 nt, Artificial Sequence
  Description of Artificial Sequence: Synthetic oligonucleotide
  Antisense strand to SEQ ID NO: 1349224
uuucuccagcuauaagcgg

SEQ ID NO: 1349226 - RNA, 19 nt, Artificial Sequence
  Description of Artificial Sequence: Synthetic oligonucleotide
  Sense strand starting at position 2784 of SEQ ID NO: 1242460
cgcuuauagcuggagaaau

SEQ ID NO: 1349227 - RNA, 19 nt, Artificial Sequence
  Description of Artificial Sequence: Synthetic oligonucleotide
  Antisense strand to SEQ ID NO: 1349226
auuucuccagcuauaagcg

SEQ ID NO: 1349228 - RNA, 19 nt, Artificial Sequence
  Description of Artificial Sequence: Synthetic oligonucleotide
  Sense strand starting at position 2810 of SEQ ID NO: 1242460
cagugagacuguguuacuu

SEQ ID NO: 1349229 - RNA, 19 nt, Artificial Sequence
  Description of Artificial Sequence: Synthetic oligonucleotide
  Antisense strand to SEQ ID NO: 1349228
aaguaacacagucucacug

SEQ ID NO: 1349230 - RNA, 19 nt, Artificial Sequence
  Description of Artificial Sequence: Synthetic oligonucleotide
  Sense strand starting at position 2814 of SEQ ID NO: 1242460
gagacuguguuacuugacu

SEQ ID NO: 1349231 - RNA, 19 nt, Artificial Sequence
  Description of Artificial Sequence: Synthetic oligonucleotide
  Antisense strand to SEQ ID NO: 1349230
agucaaguaacacagucuc

SEQ ID NO: 1349232 - RNA, 19 nt, Artificial Sequence
  Description of Artificial Sequence: Synthetic oligonucleotide
  Sense strand starting at position 2819 of SEQ ID NO: 1242460
uguguuacuugacuaaggu

SEQ ID NO: 1349233 - RNA, 19 nt, Artificial Sequence
  Description of Artificial Sequence: Synthetic oligonucleotide
  Antisense strand to SEQ ID NO: 1349232
accuuagucaaguaacaca

SEQ ID NO: 1349234 - RNA, 19 nt, Artificial Sequence
  Description of Artificial Sequence: Synthetic oligonucleotide
  Sense strand starting at position 2934 of SEQ ID NO: 1242460
uuuaauugagcaugucaua

SEQ ID NO: 1349235 - RNA, 19 nt, Artificial Sequence
  Description of Artificial Sequence: Synthetic oligonucleotide
  Antisense strand to SEQ ID NO: 1349234
uaugacaugcucaauuaaa

SEQ ID NO: 1349236 - RNA, 19 nt, Artificial Sequence
  Description of Artificial Sequence: Synthetic oligonucleotide
  Sense strand starting at position 2964 of SEQ ID NO: 1242460
agguaauaaugcccuuaua

SEQ ID NO: 1349237 - RNA, 19 nt, Artificial Sequence
  Description of Artificial Sequence: Synthetic oligonucleotide
  Antisense strand to SEQ ID NO: 1349236
uauaagggcauuauuaccu

SEQ ID NO: 1349238 - RNA, 19 nt, Artificial Sequence
  Description of Artificial Sequence: Synthetic oligonucleotide
  Sense strand starting at position 3134 of SEQ ID NO: 1242460
gcagaaucagugcaggaga

SEQ ID NO: 1349239 - RNA, 19 nt, Artificial Sequence
  Description of Artificial Sequence: Synthetic oligonucleotide
  Antisense strand to SEQ ID NO: 1349238
ucuccugcacugauucugc

SEQ ID NO: 1349240 - RNA, 19 nt, Artificial Sequence
  Description of Artificial Sequence: Synthetic oligonucleotide
  Sense strand starting at position 3164 of SEQ ID NO: 1242460
gggacaagcucauuggauu

SEQ ID NO: 1349241 - RNA, 19 nt, Artificial Sequence
  Description of Artificial Sequence: Synthetic oligonucleotide
  Antisense strand to SEQ ID NO: 1349240
aauccaaugagcuuguccc

SEQ ID NO: 1349242 - RNA, 19 nt, Artificial Sequence
  Description of Artificial Sequence: Synthetic oligonucleotide
  Sense strand starting at position 3165 of SEQ ID NO: 1242460
ggacaagcucauuggauua

SEQ ID NO: 1349243 - RNA, 19 nt, Artificial Sequence
  Description of Artificial Sequence: Synthetic oligonucleotide
  Antisense strand to SEQ ID NO: 1349242
uaauccaaugagcuugucc

SEQ ID NO: 1349244 - RNA, 19 nt, Artificial Sequence
  Description of Artificial Sequence: Synthetic oligonucleotide
  Sense strand starting at position 3170 of SEQ ID NO: 1242460
agcucauuggauuaagcua

SEQ ID NO: 1349245 - RNA, 19 nt, Artificial Sequence
  Description of Artificial Sequence: Synthetic oligonucleotide
  Antisense strand to SEQ ID NO: 1349244
uagcuuaauccaaugagcu

SEQ ID NO: 1349246 - RNA, 19 nt, Artificial Sequence
  Description of Artificial Sequence: Synthetic oligonucleotide
  Sense strand starting at position 3178 of SEQ ID NO: 1242460
ggauuaagcuaaguggaau

SEQ ID NO: 1349247 - RNA, 19 nt, Artificial Sequence
  Description of Artificial Sequence: Synthetic oligonucleotide
  Antisense strand to SEQ ID NO: 1349246
auuccacuuagcuuaaucc

SEQ ID NO: 1349248 - RNA, 19 nt, Artificial Sequence
  Description of Artificial Sequence: Synthetic oligonucleotide
  Sense strand starting at position 3225 of SEQ ID NO: 1242460
ugaaguauguugcuaacca

SEQ ID NO: 1349249 - RNA, 19 nt, Artificial Sequence
  Description of Artificial Sequence: Synthetic oligonucleotide
  Antisense strand to SEQ ID NO: 1349248
ugguuagcaacauacuuca

SEQ ID NO: 1349250 - RNA, 19 nt, Artificial Sequence
  Description of Artificial Sequence: Synthetic oligonucleotide
  Sense strand starting at position 3260 of SEQ ID NO: 1242460
uuuaguccuuccucaggaa

SEQ ID NO: 1349251 - RNA, 19 nt, Artificial Sequence
  Description of Artificial Sequence: Synthetic oligonucleotide
  Antisense strand to SEQ ID NO: 1349250
uuccugaggaaggacuaaa

SEQ ID NO: 1349252 - RNA, 19 nt, Artificial Sequence
  Description of Artificial Sequence: Synthetic oligonucleotide
  Sense strand starting at position 3772 of SEQ ID NO: 1242460
cacuguaguuauuucguca

SEQ ID NO: 1349253 - RNA, 19 nt, Artificial Sequence
  Description of Artificial Sequence: Synthetic oligonucleotide
  Antisense strand to SEQ ID NO: 1349252
ugacgaaauaacuacagug

SEQ ID NO: 1349254 - RNA, 19 nt, Artificial Sequence
  Description of Artificial Sequence: Synthetic oligonucleotide
  Sense strand starting at position 3775 of SEQ ID NO: 1242460
uguaguuauuucgucaguu

SEQ ID NO: 1349255 - RNA, 19 nt, Artificial Sequence
  Description of Artificial Sequence: Synthetic oligonucleotide
  Antisense strand to SEQ ID NO: 1349254
aacugacgaaauaacuaca

SEQ ID NO: 1349256 - RNA, 19 nt, Artificial Sequence
  Description of Artificial Sequence: Synthetic oligonucleotide
  Sense strand starting at position 3776 of SEQ ID NO: 1242460
guaguuauuucgucaguuc

SEQ ID NO: 1349257 - RNA, 19 nt, Artificial Sequence
  Description of Artificial Sequence: Synthetic oligonucleotide
  Antisense strand to SEQ ID NO: 1349256
gaacugacgaaauaacuac

SEQ ID NO: 1349258 - RNA, 19 nt, Artificial Sequence
  Description of Artificial Sequence: Synthetic oligonucleotide
  Sense strand starting at position 3779 of SEQ ID NO: 1242460
guuauuucgucaguuccag

SEQ ID NO: 1349259 - RNA, 19 nt, Artificial Sequence
  Description of Artificial Sequence: Synthetic oligonucleotide
  Antisense strand to SEQ ID NO: 1349258
cuggaacugacgaaauaac

SEQ ID NO: 1349260 - RNA, 19 nt, Artificial Sequence
  Description of Artificial Sequence: Synthetic oligonucleotide
  Sense strand starting at position 3785 of SEQ ID NO: 1242460
ucgucaguuccagaaugca

SEQ ID NO: 1349261 - RNA, 19 nt, Artificial Sequence
  Description of Artificial Sequence: Synthetic oligonucleotide
  Antisense strand to SEQ ID NO: 1349260
ugcauucuggaacugacga

SEQ ID NO: 1349262 - RNA, 19 nt, Artificial Sequence
  Description of Artificial Sequence: Synthetic oligonucleotide
  Sense strand starting at position 3831 of SEQ ID NO: 1242460
gcagaaucccuacaguguu

SEQ ID NO: 1349263 - RNA, 19 nt, Artificial Sequence
  Description of Artificial Sequence: Synthetic oligonucleotide
  Antisense strand to SEQ ID NO: 1349262
aacacuguagggauucugc

SEQ ID NO: 1349264 - RNA, 19 nt, Artificial Sequence
  Description of Artificial Sequence: Synthetic oligonucleotide
  Sense strand starting at position 3861 of SEQ ID NO: 1242460
cggacauaaggcuauuauu

SEQ ID NO: 1349265 - RNA, 19 nt, Artificial Sequence
  Description of Artificial Sequence: Synthetic oligonucleotide
  Antisense strand to SEQ ID NO: 1349264
aauaauagccuuauguccg

SEQ ID NO: 1349266 - RNA, 19 nt, Artificial Sequence
  Description of Artificial Sequence: Synthetic oligonucleotide
  Sense strand starting at position 3867 of SEQ ID NO: 1242460
uaaggcuauuauucuggua

SEQ ID NO: 1349267 - RNA, 19 nt, Artificial Sequence
  Description of Artificial Sequence: Synthetic oligonucleotide
  Antisense strand to SEQ ID NO: 1349266
uaccagaauaauagccuua

SEQ ID NO: 1349268 - RNA, 19 nt, Artificial Sequence
  Description of Artificial Sequence: Synthetic oligonucleotide
  Sense strand starting at position 211 of SEQ ID NO: 1242461
cagggaaggucauugacuu

SEQ ID NO: 1349269 - RNA, 19 nt, Artificial Sequence
  Description of Artificial Sequence: Synthetic oligonucleotide
  Antisense strand to SEQ ID NO: 1349268
aagucaaugaccuucccug

SEQ ID NO: 1349270 - RNA, 19 nt, Artificial Sequence
  Description of Artificial Sequence: Synthetic oligonucleotide
  Sense strand starting at position 212 of SEQ ID NO: 1242461
agggaaggucauugacuuu

SEQ ID NO: 1349271 - RNA, 19 nt, Artificial Sequence
  Description of Artificial Sequence: Synthetic oligonucleotide
  Antisense strand to SEQ ID NO: 1349270
aaagucaaugaccuucccu

SEQ ID NO: 1349272 - RNA, 19 nt, Artificial Sequence
  Description of Artificial Sequence: Synthetic oligonucleotide
  Sense strand starting at position 1041 of SEQ ID NO: 1242461
ggcuccauguucucauuua

SEQ ID NO: 1349273 - RNA, 19 nt, Artificial Sequence
  Description of Artificial Sequence: Synthetic oligonucleotide
  Antisense strand to SEQ ID NO: 1349272
uaaaugagaacauggagcc

SEQ ID NO: 1349274 - RNA, 19 nt, Artificial Sequence
  Description of Artificial Sequence: Synthetic oligonucleotide
  Sense strand starting at position 1183 of SEQ ID NO: 1242461
cuucucuaagcucagagaa

SEQ ID NO: 1349275 - RNA, 19 nt, Artificial Sequence
  Description of Artificial Sequence: Synthetic oligonucleotide
  Antisense strand to SEQ ID NO: 1349274
uucucugagcuuagagaag

SEQ ID NO: 1349276 - RNA, 19 nt, Artificial Sequence
  Description of Artificial Sequence: Synthetic oligonucleotide
  Sense strand starting at position 1226 of SEQ ID NO: 1242461
aaagcaaggccuggugaua

SEQ ID NO: 1349277 - RNA, 19 nt, Artificial Sequence
  Description of Artificial Sequence: Synthetic oligonucleotide
  Antisense strand to SEQ ID NO: 1349276
uaucaccaggccuugcuuu

SEQ ID NO: 1349278 - RNA, 19 nt, Artificial Sequence
  Description of Artificial Sequence: Synthetic oligonucleotide
  Sense strand starting at position 1249 of SEQ ID NO: 1242461
gccauaaagcaguaacauu

SEQ ID NO: 1349279 - RNA, 19 nt, Artificial Sequence
  Description of Artificial Sequence: Synthetic oligonucleotide
  Antisense strand to SEQ ID NO: 1349278
aauguuacugcuuuauggc

SEQ ID NO: 1349280 - RNA, 19 nt, Artificial Sequence
  Description of Artificial Sequence: Synthetic oligonucleotide
  Sense strand starting at position 1336 of SEQ ID NO: 1242461
gagacuuaagauuggcuaa

SEQ ID NO: 1349281 - RNA, 19 nt, Artificial Sequence
  Description of Artificial Sequence: Synthetic oligonucleotide
  Antisense strand to SEQ ID NO: 1349280
uuagccaaucuuaagucuc

SEQ ID NO: 1349282 - RNA, 19 nt, Artificial Sequence
  Description of Artificial Sequence: Synthetic oligonucleotide
  Sense strand starting at position 1338 of SEQ ID NO: 1242461
gacuuaagauuggcuaaag

SEQ ID NO: 1349283 - RNA, 19 nt, Artificial Sequence
  Description of Artificial Sequence: Synthetic oligonucleotide
  Antisense strand to SEQ ID NO: 1349282
cuuuagccaaucuuaaguc

SEQ ID NO: 1349284 - RNA, 19 nt, Artificial Sequence
  Description of Artificial Sequence: Synthetic oligonucleotide
  Sense strand starting at position 1339 of SEQ ID NO: 1242461
acuuaagauuggcuaaagu

SEQ ID NO: 1349285 - RNA, 19 nt, Artificial Sequence
  Description of Artificial Sequence: Synthetic oligonucleotide
  Antisense strand to SEQ ID NO: 1349284
acuuuagccaaucuuaagu

SEQ ID NO: 1349286 - RNA, 19 nt, Artificial Sequence
  Description of Artificial Sequence: Synthetic oligonucleotide
  Sense strand starting at position 1440 of SEQ ID NO: 1242461
cuuguaaacuggguuuaga

SEQ ID NO: 1349287 - RNA, 19 nt, Artificial Sequence
  Description of Artificial Sequence: Synthetic oligonucleotide
  Antisense strand to SEQ ID NO: 1349286
ucuaaacccaguuuacaag

SEQ ID NO: 1349288 - RNA, 19 nt, Artificial Sequence
  Description of Artificial Sequence: Synthetic oligonucleotide
  Sense strand starting at position 1583 of SEQ ID NO: 1242461
guuagaauagcacauaugu

SEQ ID NO: 1349289 - RNA, 19 nt, Artificial Sequence
  Description of Artificial Sequence: Synthetic oligonucleotide
  Antisense strand to SEQ ID NO: 1349288
acauaugugcuauucuaac

SEQ ID NO: 1349290 - RNA, 19 nt, Artificial Sequence
  Description of Artificial Sequence: Synthetic oligonucleotide
  Sense strand starting at position 1789 of SEQ ID NO: 1242461
ggcacucagagcugacaaa

SEQ ID NO: 1349291 - RNA, 19 nt, Artificial Sequence
  Description of Artificial Sequence: Synthetic oligonucleotide
  Antisense strand to SEQ ID NO: 1349290
uuugucagcucugagugcc

SEQ ID NO: 1349292 - RNA, 19 nt, Artificial Sequence
  Description of Artificial Sequence: Synthetic oligonucleotide
  Sense strand starting at position 2108 of SEQ ID NO: 1242461
agggauuaaaccugcuagu

SEQ ID NO: 1349293 - RNA, 19 nt, Artificial Sequence
  Description of Artificial Sequence: Synthetic oligonucleotide
  Antisense strand to SEQ ID NO: 1349292
acuagcagguuuaaucccu

SEQ ID NO: 1349294 - RNA, 19 nt, Artificial Sequence
  Description of Artificial Sequence: Synthetic oligonucleotide
  Sense strand starting at position 2413 of SEQ ID NO: 1242461
agaugucuuggguaccagu

SEQ ID NO: 1349295 - RNA, 19 nt, Artificial Sequence
  Description of Artificial Sequence: Synthetic oligonucleotide
  Antisense strand to SEQ ID NO: 1349294
acugguacccaagacaucu

SEQ ID NO: 1349296 - RNA, 19 nt, Artificial Sequence
  Description of Artificial Sequence: Synthetic oligonucleotide
  Sense strand starting at position 2633 of SEQ ID NO: 1242461
aaaugaagcugucuuagac

SEQ ID NO: 1349297 - RNA, 19 nt, Artificial Sequence
  Description of Artificial Sequence: Synthetic oligonucleotide
  Antisense strand to SEQ ID NO: 1349296
gucuaagacagcuucauuu

SEQ ID NO: 1349298 - RNA, 19 nt, Artificial Sequence
  Description of Artificial Sequence: Synthetic oligonucleotide
  Sense strand starting at position 2806 of SEQ ID NO: 1242461
ugcucaauauuuguugcau

SEQ ID NO: 1349299 - RNA, 19 nt, Artificial Sequence
  Description of Artificial Sequence: Synthetic oligonucleotide
  Antisense strand to SEQ ID NO: 1349298
augcaacaaauauugagca

SEQ ID NO: 1349300 - RNA, 19 nt, Artificial Sequence
  Description of Artificial Sequence: Synthetic oligonucleotide
  Sense strand starting at position 2807 of SEQ ID NO: 1242461
gcucaauauuuguugcaug

SEQ ID NO: 1349301 - RNA, 19 nt, Artificial Sequence
  Description of Artificial Sequence: Synthetic oligonucleotide
  Antisense strand to SEQ ID NO: 1349300
caugcaacaaauauugagc

SEQ ID NO: 1349302 - RNA, 19 nt, Artificial Sequence
  Description of Artificial Sequence: Synthetic oligonucleotide
  Sense strand starting at position 2920 of SEQ ID NO: 1242461
cauccuuagucauuaggag

SEQ ID NO: 1349303 - RNA, 19 nt, Artificial Sequence
  Description of Artificial Sequence: Synthetic oligonucleotide
  Antisense strand to SEQ ID NO: 1349302
cuccuaaugacuaaggaug

SEQ ID NO: 1349304 - RNA, 19 nt, Artificial Sequence
  Description of Artificial Sequence: Synthetic oligonucleotide
  Sense strand starting at position 2928 of SEQ ID NO: 1242461
gucauuaggagaugauagu

SEQ ID NO: 1349305 - RNA, 19 nt, Artificial Sequence
  Description of Artificial Sequence: Synthetic oligonucleotide
  Antisense strand to SEQ ID NO: 1349304
acuaucaucuccuaaugac

SEQ ID NO: 1349306 - RNA, 19 nt, Artificial Sequence
  Description of Artificial Sequence: Synthetic oligonucleotide
  Sense strand starting at position 2989 of SEQ ID NO: 1242461
uuuggacucugaccucaaa

SEQ ID NO: 1349307 - RNA, 19 nt, Artificial Sequence
  Description of Artificial Sequence: Synthetic oligonucleotide
  Antisense strand to SEQ ID NO: 1349306
uuugaggucagaguccaaa

SEQ ID NO: 1349308 - RNA, 19 nt, Artificial Sequence
  Description of Artificial Sequence: Synthetic oligonucleotide
  Sense strand starting at position 3116 of SEQ ID NO: 1242461
ggagucuuccacggacaca

SEQ ID NO: 1349309 - RNA, 19 nt, Artificial Sequence
  Description of Artificial Sequence: Synthetic oligonucleotide
  Antisense strand to SEQ ID NO: 1349308
uguguccguggaagacucc

SEQ ID NO: 1349310 - RNA, 19 nt, Artificial Sequence
  Description of Artificial Sequence: Synthetic oligonucleotide
  Sense strand starting at position 3379 of SEQ ID NO: 1242461
cauucuaaggucugcaaga

SEQ ID NO: 1349311 - RNA, 19 nt, Artificial Sequence
  Description of Artificial Sequence: Synthetic oligonucleotide
  Antisense strand to SEQ ID NO: 1349310
ucuugcagaccuuagaaug

SEQ ID NO: 1349312 - RNA, 19 nt, Artificial Sequence
  Description of Artificial Sequence: Synthetic oligonucleotide
  Sense strand starting at position 3380 of SEQ ID NO: 1242461
auucuaaggucugcaagaa

SEQ ID NO: 1349313 - RNA, 19 nt, Artificial Sequence
  Description of Artificial Sequence: Synthetic oligonucleotide
  Antisense strand to SEQ ID NO: 1349312
uucuugcagaccuuagaau

SEQ ID NO: 1349314 - RNA, 19 nt, Artificial Sequence
  Description of Artificial Sequence: Synthetic oligonucleotide
  Sense strand starting at position 3381 of SEQ ID NO: 1242461
uucuaaggucugcaagaag

SEQ ID NO: 1349315 - RNA, 19 nt, Artificial Sequence
  Description of Artificial Sequence: Synthetic oligonucleotide
  Antisense strand to SEQ ID NO: 1349314
cuucuugcagaccuuagaa

SEQ ID NO: 1349316 - RNA, 19 nt, Artificial Sequence
  Description of Artificial Sequence: Synthetic oligonucleotide
  Sense strand starting at position 3384 of SEQ ID NO: 1242461
uaaggucugcaagaaguuu

SEQ ID NO: 1349317 - RNA, 19 nt, Artificial Sequence
  Description of Artificial Sequence: Synthetic oligonucleotide
  Antisense strand to SEQ ID NO: 1349316
aaacuucuugcagaccuua

SEQ ID NO: 1349318 - RNA, 19 nt, Artificial Sequence
  Description of Artificial Sequence: Synthetic oligonucleotide
  Sense strand starting at position 3432 of SEQ ID NO: 1242461
agacaucauuuaggauuau

SEQ ID NO: 1349319 - RNA, 19 nt, Artificial Sequence
  Description of Artificial Sequence: Synthetic oligonucleotide
  Antisense strand to SEQ ID NO: 1349318
auaauccuaaaugaugucu

SEQ ID NO: 1349320 - RNA, 19 nt, Artificial Sequence
  Description of Artificial Sequence: Synthetic oligonucleotide
  Sense strand starting at position 3501 of SEQ ID NO: 1242461
gcaauuguuccuugagaag

SEQ ID NO: 1349321 - RNA, 19 nt, Artificial Sequence
  Description of Artificial Sequence: Synthetic oligonucleotide
  Antisense strand to SEQ ID NO: 1349320
cuucucaaggaacaauugc

SEQ ID NO: 1349322 - RNA, 19 nt, Artificial Sequence
  Description of Artificial Sequence: Synthetic oligonucleotide
  Sense strand starting at position 3521 of SEQ ID NO: 1242461
ugaggaucaggucgggaau

SEQ ID NO: 1349323 - RNA, 19 nt, Artificial Sequence
  Description of Artificial Sequence: Synthetic oligonucleotide
  Antisense strand to SEQ ID NO: 1349322
auucccgaccugauccuca

SEQ ID NO: 1349324 - RNA, 19 nt, Artificial Sequence
  Description of Artificial Sequence: Synthetic oligonucleotide
  Sense strand starting at position 3522 of SEQ ID NO: 1242461
gaggaucaggucgggaauu

SEQ ID NO: 1349325 - RNA, 19 nt, Artificial Sequence
  Description of Artificial Sequence: Synthetic oligonucleotide
  Antisense strand to SEQ ID NO: 1349324
aauucccgaccugauccuc

SEQ ID NO: 1349326 - RNA, 19 nt, Artificial Sequence
  Description of Artificial Sequence: Synthetic oligonucleotide
  Sense strand starting at position 3637 of SEQ ID NO: 1242461
ugugaauuguaggugauaa

SEQ ID NO: 1349327 - RNA, 19 nt, Artificial Sequence
  Description of Artificial Sequence: Synthetic oligonucleotide
  Antisense strand to SEQ ID NO: 1349326
uuaucaccuacaauucaca

SEQ ID NO: 1349328 - RNA, 19 nt, Artificial Sequence
  Description of Artificial Sequence: Synthetic oligonucleotide
  Sense strand starting at position 3638 of SEQ ID NO: 1242461
gugaauuguaggugauaac

SEQ ID NO: 1349329 - RNA, 19 nt, Artificial Sequence
  Description of Artificial Sequence: Synthetic oligonucleotide
  Antisense strand to SEQ ID NO: 1349328
guuaucaccuacaauucac

SEQ ID NO: 1349330 - RNA, 19 nt, Artificial Sequence
  Description of Artificial Sequence: Synthetic oligonucleotide
  Sense strand starting at position 3671 of SEQ ID NO: 1242461
gccaauacaguuuagucau

SEQ ID NO: 1349331 - RNA, 19 nt, Artificial Sequence
  Description of Artificial Sequence: Synthetic oligonucleotide
  Antisense strand to SEQ ID NO: 1349330
augacuaaacuguauuggc

SEQ ID NO: 1349332 - RNA, 19 nt, Artificial Sequence
  Description of Artificial Sequence: Synthetic oligonucleotide
  Sense strand starting at position 3813 of SEQ ID NO: 1242461
gggaauuacauguguccau

SEQ ID NO: 1349333 - RNA, 19 nt, Artificial Sequence
  Description of Artificial Sequence: Synthetic oligonucleotide
  Antisense strand to SEQ ID NO: 1349332
auggacacauguaauuccc

SEQ ID NO: 1349334 - RNA, 19 nt, Artificial Sequence
  Description of Artificial Sequence: Synthetic oligonucleotide
  Sense strand starting at position 3814 of SEQ ID NO: 1242461
ggaauuacauguguccauu

SEQ ID NO: 1349335 - RNA, 19 nt, Artificial Sequence
  Description of Artificial Sequence: Synthetic oligonucleotide
  Antisense strand to SEQ ID NO: 1349334
aauggacacauguaauucc

SEQ ID NO: 1349336 - RNA, 19 nt, Artificial Sequence
  Description of Artificial Sequence: Synthetic oligonucleotide
  Sense strand starting at position 3843 of SEQ ID NO: 1242461
gcugaaugauccuuaccau

SEQ ID NO: 1349337 - RNA, 19 nt, Artificial Sequence
  Description of Artificial Sequence: Synthetic oligonucleotide
  Antisense strand to SEQ ID NO: 1349336
augguaaggaucauucagc

SEQ ID NO: 1349338 - RNA, 19 nt, Artificial Sequence
  Description of Artificial Sequence: Synthetic oligonucleotide
  Sense strand starting at position 3892 of SEQ ID NO: 1242461
cuugguuucccauauauug

SEQ ID NO: 1349339 - RNA, 19 nt, Artificial Sequence
  Description of Artificial Sequence: Synthetic oligonucleotide
  Antisense strand to SEQ ID NO: 1349338
caauauaugggaaaccaag

SEQ ID NO: 1349340 - RNA, 19 nt, Artificial Sequence
  Description of Artificial Sequence: Synthetic oligonucleotide
  Sense strand starting at position 3960 of SEQ ID NO: 1242461
uuuaaacuucuauacguga

SEQ ID NO: 1349341 - RNA, 19 nt, Artificial Sequence
  Description of Artificial Sequence: Synthetic oligonucleotide
  Antisense strand to SEQ ID NO: 1349340
ucacguauagaaguuuaaa

SEQ ID NO: 1349342 - RNA, 19 nt, Artificial Sequence
  Description of Artificial Sequence: Synthetic oligonucleotide
  Sense strand starting at position 3963 of SEQ ID NO: 1242461
aaacuucuauacgugagga

SEQ ID NO: 1349343 - RNA, 19 nt, Artificial Sequence
  Description of Artificial Sequence: Synthetic oligonucleotide
  Antisense strand to SEQ ID NO: 1349342
uccucacguauagaaguuu

SEQ ID NO: 1349344 - RNA, 19 nt, Artificial Sequence
  Description of Artificial Sequence: Synthetic oligonucleotide
  Sense strand starting at position 3965 of SEQ ID NO: 1242461
acuucuauacgugaggauu

SEQ ID NO: 1349345 - RNA, 19 nt, Artificial Sequence
  Description of Artificial Sequence: Synthetic oligonucleotide
  Antisense strand to SEQ ID NO: 1349344
aauccucacguauagaagu

SEQ ID NO: 1349346 - RNA, 19 nt, Artificial Sequence
  Description of Artificial Sequence: Synthetic oligonucleotide
  Sense strand starting at position 3968 of SEQ ID NO: 1242461
ucuauacgugaggauucuu

SEQ ID NO: 1349347 - RNA, 19 nt, Artificial Sequence
  Description of Artificial Sequence: Synthetic oligonucleotide
  Antisense strand to SEQ ID NO: 1349346
aagaauccucacguauaga

SEQ ID NO: 1349348 - RNA, 19 nt, Artificial Sequence
  Description of Artificial Sequence: Synthetic oligonucleotide
  Sense strand starting at position 21 of SEQ ID NO: 1242462
acaggcacucucuaaguaa

SEQ ID NO: 1349349 - RNA, 19 nt, Artificial Sequence
  Description of Artificial Sequence: Synthetic oligonucleotide
  Antisense strand to SEQ ID NO: 1349348
uuacuuagagagugccugu

SEQ ID NO: 1349350 - RNA, 19 nt, Artificial Sequence
  Description of Artificial Sequence: Synthetic oligonucleotide
  Sense strand starting at position 33 of SEQ ID NO: 1242462
uaaguaagccuguguagga

SEQ ID NO: 1349351 - RNA, 19 nt, Artificial Sequence
  Description of Artificial Sequence: Synthetic oligonucleotide
  Antisense strand to SEQ ID NO: 1349350
uccuacacaggcuuacuua

SEQ ID NO: 1349352 - RNA, 19 nt, Artificial Sequence
  Description of Artificial Sequence: Synthetic oligonucleotide
  Sense strand starting at position 138 of SEQ ID NO: 1242462
aucagauccugcuugaacu

SEQ ID NO: 1349353 - RNA, 19 nt, Artificial Sequence
  Description of Artificial Sequence: Synthetic oligonucleotide
  Antisense strand to SEQ ID NO: 1349352
aguucaagcaggaucugau

SEQ ID NO: 1349354 - RNA, 19 nt, Artificial Sequence
  Description of Artificial Sequence: Synthetic oligonucleotide
  Sense strand starting at position 170 of SEQ ID NO: 1242462
ucagcaaagcucuaagaac

SEQ ID NO: 1349355 - RNA, 19 nt, Artificial Sequence
  Description of Artificial Sequence: Synthetic oligonucleotide
  Antisense strand to SEQ ID NO: 1349354
guucuuagagcuuugcuga

SEQ ID NO: 1349356 - RNA, 19 nt, Artificial Sequence
  Description of Artificial Sequence: Synthetic oligonucleotide
  Sense strand starting at position 257 of SEQ ID NO: 1242462
ccaggaguuugccuagucu

SEQ ID NO: 1349357 - RNA, 19 nt, Artificial Sequence
  Description of Artificial Sequence: Synthetic oligonucleotide
  Antisense strand to SEQ ID NO: 1349356
agacuaggcaaacuccugg

SEQ ID NO: 1349358 - RNA, 19 nt, Artificial Sequence
  Description of Artificial Sequence: Synthetic oligonucleotide
  Sense strand starting at position 592 of SEQ ID NO: 1242462
gucuguccacuggaggauu

SEQ ID NO: 1349359 - RNA, 19 nt, Artificial Sequence
  Description of Artificial Sequence: Synthetic oligonucleotide
  Antisense strand to SEQ ID NO: 1349358
aauccuccaguggacagac

SEQ ID NO: 1349360 - RNA, 19 nt, Artificial Sequence
  Description of Artificial Sequence: Synthetic oligonucleotide
  Sense strand starting at position 787 of SEQ ID NO: 1242462
aucugacucuuucugucua

SEQ ID NO: 1349361 - RNA, 19 nt, Artificial Sequence
  Description of Artificial Sequence: Synthetic oligonucleotide
  Antisense strand to SEQ ID NO: 1349360
uagacagaaagagucagau

SEQ ID NO: 1349362 - RNA, 19 nt, Artificial Sequence
  Description of Artificial Sequence: Synthetic oligonucleotide
  Sense strand starting at position 789 of SEQ ID NO: 1242462
cugacucuuucugucuaca

SEQ ID NO: 1349363 - RNA, 19 nt, Artificial Sequence
  Description of Artificial Sequence: Synthetic oligonucleotide
  Antisense strand to SEQ ID NO: 1349362
uguagacagaaagagucag

SEQ ID NO: 1349364 - RNA, 19 nt, Artificial Sequence
  Description of Artificial Sequence: Synthetic oligonucleotide
  Sense strand starting at position 797 of SEQ ID NO: 1242462
uucugucuacagugcuaaa

SEQ ID NO: 1349365 - RNA, 19 nt, Artificial Sequence
  Description of Artificial Sequence: Synthetic oligonucleotide
  Antisense strand to SEQ ID NO: 1349364
uuuagcacuguagacagaa

SEQ ID NO: 1349366 - RNA, 19 nt, Artificial Sequence
  Description of Artificial Sequence: Synthetic oligonucleotide
  Sense strand starting at position 871 of SEQ ID NO: 1242462
ugguuucggcccaggaguu

SEQ ID NO: 1349367 - RNA, 19 nt, Artificial Sequence
  Description of Artificial Sequence: Synthetic oligonucleotide
  Antisense strand to SEQ ID NO: 1349366
aacuccugggccgaaacca

SEQ ID NO: 1349368 - RNA, 19 nt, Artificial Sequence
  Description of Artificial Sequence: Synthetic oligonucleotide
  Sense strand starting at position 1139 of SEQ ID NO: 1242462
uacugagcaguuuaaagua

SEQ ID NO: 1349369 - RNA, 19 nt, Artificial Sequence
  Description of Artificial Sequence: Synthetic oligonucleotide
  Antisense strand to SEQ ID NO: 1349368
uacuuuaaacugcucagua

SEQ ID NO: 1349370 - RNA, 19 nt, Artificial Sequence
  Description of Artificial Sequence: Synthetic oligonucleotide
  Sense strand starting at position 1262 of SEQ ID NO: 1242462
uaggcaaaguucuaaagga

SEQ ID NO: 1349371 - RNA, 19 nt, Artificial Sequence
  Description of Artificial Sequence: Synthetic oligonucleotide
  Antisense strand to SEQ ID NO: 1349370
uccuuuagaacuuugccua

SEQ ID NO: 1349372 - RNA, 19 nt, Artificial Sequence
  Description of Artificial Sequence: Synthetic oligonucleotide
  Sense strand starting at position 1403 of SEQ ID NO: 1242462
gggucaaggugucugagaa

SEQ ID NO: 1349373 - RNA, 19 nt, Artificial Sequence
  Description of Artificial Sequence: Synthetic oligonucleotide
  Antisense strand to SEQ ID NO: 1349372
uucucagacaccuugaccc

SEQ ID NO: 1349374 - RNA, 19 nt, Artificial Sequence
  Description of Artificial Sequence: Synthetic oligonucleotide
  Sense strand starting at position 1404 of SEQ ID NO: 1242462
ggucaaggugucugagaaa

SEQ ID NO: 1349375 - RNA, 19 nt, Artificial Sequence
  Description of Artificial Sequence: Synthetic oligonucleotide
  Antisense strand to SEQ ID NO: 1349374
uuucucagacaccuugacc

SEQ ID NO: 1349376 - RNA, 19 nt, Artificial Sequence
  Description of Artificial Sequence: Synthetic oligonucleotide
  Sense strand starting at position 1865 of SEQ ID NO: 1242462
ccgacagcuucugcagaua

SEQ ID NO: 1349377 - RNA, 19 nt, Artificial Sequence
  Description of Artificial Sequence: Synthetic oligonucleotide
  Antisense strand to SEQ ID NO: 1349376
uaucugcagaagcugucgg

SEQ ID NO: 1349378 - RNA, 19 nt, Artificial Sequence
  Description of Artificial Sequence: Synthetic oligonucleotide
  Sense strand starting at position 2254 of SEQ ID NO: 1242462
ggaugaagcaauggucuau

SEQ ID NO: 1349379 - RNA, 19 nt, Artificial Sequence
  Description of Artificial Sequence: Synthetic oligonucleotide
  Antisense strand to SEQ ID NO: 1349378
auagaccauugcuucaucc

SEQ ID NO: 1349380 - RNA, 19 nt, Artificial Sequence
  Description of Artificial Sequence: Synthetic oligonucleotide
  Sense strand starting at position 2321 of SEQ ID NO: 1242462
agcggaguguccgcuuaaa

SEQ ID NO: 1349381 - RNA, 19 nt, Artificial Sequence
  Description of Artificial Sequence: Synthetic oligonucleotide
  Antisense strand to SEQ ID NO: 1349380
uuuaagcggacacuccgcu

SEQ ID NO: 1349382 - RNA, 19 nt, Artificial Sequence
  Description of Artificial Sequence: Synthetic oligonucleotide
  Sense strand starting at position 2353 of SEQ ID NO: 1242462
cuguguaucuuauucuaaa

SEQ ID NO: 1349383 - RNA, 19 nt, Artificial Sequence
  Description of Artificial Sequence: Synthetic oligonucleotide
  Antisense strand to SEQ ID NO: 1349382
uuuagaauaagauacacag

SEQ ID NO: 1349384 - RNA, 19 nt, Artificial Sequence
  Description of Artificial Sequence: Synthetic oligonucleotide
  Sense strand starting at position 2448 of SEQ ID NO: 1242462
cugagugggugcucaguaa

SEQ ID NO: 1349385 - RNA, 19 nt, Artificial Sequence
  Description of Artificial Sequence: Synthetic oligonucleotide
  Antisense strand to SEQ ID NO: 1349384
uuacugagcacccacucag

SEQ ID NO: 1349386 - RNA, 19 nt, Artificial Sequence
  Description of Artificial Sequence: Synthetic oligonucleotide
  Sense strand starting at position 2565 of SEQ ID NO: 1242462
gccggguacgguucuguau

SEQ ID NO: 1349387 - RNA, 19 nt, Artificial Sequence
  Description of Artificial Sequence: Synthetic oligonucleotide
  Antisense strand to SEQ ID NO: 1349386
auacagaaccguacccggc

SEQ ID NO: 1349388 - RNA, 19 nt, Artificial Sequence
  Description of Artificial Sequence: Synthetic oligonucleotide
  Sense strand starting at position 2629 of SEQ ID NO: 1242462
ugcccucguggagguuaua

SEQ ID NO: 1349389 - RNA, 19 nt, Artificial Sequence
  Description of Artificial Sequence: Synthetic oligonucleotide
  Antisense strand to SEQ ID NO: 1349388
uauaaccuccacgagggca

SEQ ID NO: 1349390 - RNA, 19 nt, Artificial Sequence
  Description of Artificial Sequence: Synthetic oligonucleotide
  Sense strand starting at position 2639 of SEQ ID NO: 1242462
gagguuauauucuaguaag

SEQ ID NO: 1349391 - RNA, 19 nt, Artificial Sequence
  Description of Artificial Sequence: Synthetic oligonucleotide
  Antisense strand to SEQ ID NO: 1349390
cuuacuagaauauaaccuc

SEQ ID NO: 1349392 - RNA, 19 nt, Artificial Sequence
  Description of Artificial Sequence: Synthetic oligonucleotide
  Sense strand starting at position 2688 of SEQ ID NO: 1242462
aaaguaaugugugcuaugu

SEQ ID NO: 1349393 - RNA, 19 nt, Artificial Sequence
  Description of Artificial Sequence: Synthetic oligonucleotide
  Antisense strand to SEQ ID NO: 1349392
acauagcacacauuacuuu

SEQ ID NO: 1349394 - RNA, 19 nt, Artificial Sequence
  Description of Artificial Sequence: Synthetic oligonucleotide
  Sense strand starting at position 2692 of SEQ ID NO: 1242462
uaaugugugcuauguugua

SEQ ID NO: 1349395 - RNA, 19 nt, Artificial Sequence
  Description of Artificial Sequence: Synthetic oligonucleotide
  Antisense strand to SEQ ID NO: 1349394
uacaacauagcacacauua

SEQ ID NO: 1349396 - RNA, 19 nt, Artificial Sequence
  Description of Artificial Sequence: Synthetic oligonucleotide
  Sense strand starting at position 2708 of SEQ ID NO: 1242462
guauaaaugccgugaugac

SEQ ID NO: 1349397 - RNA, 19 nt, Artificial Sequence
  Description of Artificial Sequence: Synthetic oligonucleotide
  Antisense strand to SEQ ID NO: 1349396
gucaucacggcauuuauac

SEQ ID NO: 1349398 - RNA, 19 nt, Artificial Sequence
  Description of Artificial Sequence: Synthetic oligonucleotide
  Sense strand starting at position 2709 of SEQ ID NO: 1242462
uauaaaugccgugaugaca

SEQ ID NO: 1349399 - RNA, 19 nt, Artificial Sequence
  Description of Artificial Sequence: Synthetic oligonucleotide
  Antisense strand to SEQ ID NO: 1349398
ugucaucacggcauuuaua

SEQ ID NO: 1349400 - RNA, 19 nt, Artificial Sequence
  Description of Artificial Sequence: Synthetic oligonucleotide
  Sense strand starting at position 2718 of SEQ ID NO: 1242462
cgugaugacauguaaauga

SEQ ID NO: 1349401 - RNA, 19 nt, Artificial Sequence
  Description of Artificial Sequence: Synthetic oligonucleotide
  Antisense strand to SEQ ID NO: 1349400
ucauuuacaugucaucacg

SEQ ID NO: 1349402 - RNA, 19 nt, Artificial Sequence
  Description of Artificial Sequence: Synthetic oligonucleotide
  Sense strand starting at position 2728 of SEQ ID NO: 1242462
uguaaaugauuaccgcuua

SEQ ID NO: 1349403 - RNA, 19 nt, Artificial Sequence
  Description of Artificial Sequence: Synthetic oligonucleotide
  Antisense strand to SEQ ID NO: 1349402
uaagcgguaaucauuuaca

SEQ ID NO: 1349404 - RNA, 19 nt, Artificial Sequence
  Description of Artificial Sequence: Synthetic oligonucleotide
  Sense strand starting at position 2758 of SEQ ID NO: 1242462
aguauuuaucagugcuuua

SEQ ID NO: 1349405 - RNA, 19 nt, Artificial Sequence
  Description of Artificial Sequence: Synthetic oligonucleotide
  Antisense strand to SEQ ID NO: 1349404
uaaagcacugauaaauacu

SEQ ID NO: 1349406 - RNA, 19 nt, Artificial Sequence
  Description of Artificial Sequence: Synthetic oligonucleotide
  Sense strand starting at position 2763 of SEQ ID NO: 1242462
uuaucagugcuuuauagac

SEQ ID NO: 1349407 - RNA, 19 nt, Artificial Sequence
  Description of Artificial Sequence: Synthetic oligonucleotide
  Antisense strand to SEQ ID NO: 1349406
gucuauaaagcacugauaa

SEQ ID NO: 1349408 - RNA, 19 nt, Artificial Sequence
  Description of Artificial Sequence: Synthetic oligonucleotide
  Sense strand starting at position 3278 of SEQ ID NO: 1242462
ggugauggauaccuuacuu

SEQ ID NO: 1349409 - RNA, 19 nt, Artificial Sequence
  Description of Artificial Sequence: Synthetic oligonucleotide
  Antisense strand to SEQ ID NO: 1349408
aaguaagguauccaucacc

SEQ ID NO: 1349410 - RNA, 19 nt, Artificial Sequence
  Description of Artificial Sequence: Synthetic oligonucleotide
  Sense strand starting at position 3528 of SEQ ID NO: 1242462
cagaaaugugggugaagca

SEQ ID NO: 1349411 - RNA, 19 nt, Artificial Sequence
  Description of Artificial Sequence: Synthetic oligonucleotide
  Antisense strand to SEQ ID NO: 1349410
ugcuucacccacauuucug

SEQ ID NO: 1349412 - RNA, 19 nt, Artificial Sequence
  Description of Artificial Sequence: Synthetic oligonucleotide
  Sense strand starting at position 3529 of SEQ ID NO: 1242462
agaaaugugggugaagcau

SEQ ID NO: 1349413 - RNA, 19 nt, Artificial Sequence
  Description of Artificial Sequence: Synthetic oligonucleotide
  Antisense strand to SEQ ID NO: 1349412
augcuucacccacauuucu

SEQ ID NO: 1349414 - RNA, 19 nt, Artificial Sequence
  Description of Artificial Sequence: Synthetic oligonucleotide
  Sense strand starting at position 3568 of SEQ ID NO: 1242462
aguacaagagcucacuuua

SEQ ID NO: 1349415 - RNA, 19 nt, Artificial Sequence
  Description of Artificial Sequence: Synthetic oligonucleotide
  Antisense strand to SEQ ID NO: 1349414
uaaagugagcucuuguacu

SEQ ID NO: 1349416 - RNA, 19 nt, Artificial Sequence
  Description of Artificial Sequence: Synthetic oligonucleotide
  Sense strand starting at position 3600 of SEQ ID NO: 1242462
ggaaguguauagcuacaua

SEQ ID NO: 1349417 - RNA, 19 nt, Artificial Sequence
  Description of Artificial Sequence: Synthetic oligonucleotide
  Antisense strand to SEQ ID NO: 1349416
uauguagcuauacacuucc

SEQ ID NO: 1349418 - RNA, 19 nt, Artificial Sequence
  Description of Artificial Sequence: Synthetic oligonucleotide
  Sense strand starting at position 3655 of SEQ ID NO: 1242462
cucauagauuugcauguuu

SEQ ID NO: 1349419 - RNA, 19 nt, Artificial Sequence
  Description of Artificial Sequence: Synthetic oligonucleotide
  Antisense strand to SEQ ID NO: 1349418
aaacaugcaaaucuaugag

SEQ ID NO: 1349420 - RNA, 19 nt, Artificial Sequence
  Description of Artificial Sequence: Synthetic oligonucleotide
  Sense strand starting at position 3881 of SEQ ID NO: 1242462
accugucuuugagcacaau

SEQ ID NO: 1349421 - RNA, 19 nt, Artificial Sequence
  Description of Artificial Sequence: Synthetic oligonucleotide
  Antisense strand to SEQ ID NO: 1349420
auugugcucaaagacaggu

SEQ ID NO: 1349422 - RNA, 19 nt, Artificial Sequence
  Description of Artificial Sequence: Synthetic oligonucleotide
  Sense strand starting at position 3893 of SEQ ID NO: 1242462
gcacaaucagcacaguguu

SEQ ID NO: 1349423 - RNA, 19 nt, Artificial Sequence
  Description of Artificial Sequence: Synthetic oligonucleotide
  Antisense strand to SEQ ID NO: 1349422
aacacugugcugauugugc

SEQ ID NO: 1349424 - RNA, 19 nt, Artificial Sequence
  Description of Artificial Sequence: Synthetic oligonucleotide
  Sense strand starting at position 3896 of SEQ ID NO: 1242462
caaucagcacaguguuaag

SEQ ID NO: 1349425 - RNA, 19 nt, Artificial Sequence
  Description of Artificial Sequence: Synthetic oligonucleotide
  Antisense strand to SEQ ID NO: 1349424
cuuaacacugugcugauug

SEQ ID NO: 1349426 - RNA, 19 nt, Artificial Sequence
  Description of Artificial Sequence: Synthetic oligonucleotide
  Sense strand starting at position 3939 of SEQ ID NO: 1242462
ccagaugugucuccuagcu

SEQ ID NO: 1349427 - RNA, 19 nt, Artificial Sequence
  Description of Artificial Sequence: Synthetic oligonucleotide
  Antisense strand to SEQ ID NO: 1349426
agcuaggagacacaucugg

SEQ ID NO: 1349428 - RNA, 19 nt, Artificial Sequence
  Description of Artificial Sequence: Synthetic oligonucleotide
  Sense strand starting at position 191 of SEQ ID NO: 1242463
ucgaaauucuagcucugga

SEQ ID NO: 1349429 - RNA, 19 nt, Artificial Sequence
  Description of Artificial Sequence: Synthetic oligonucleotide
  Antisense strand to SEQ ID NO: 1349428
uccagagcuagaauuucga

SEQ ID NO: 1349430 - RNA, 19 nt, Artificial Sequence
  Description of Artificial Sequence: Synthetic oligonucleotide
  Sense strand starting at position 435 of SEQ ID NO: 1242463
ugugcaagucuagacauua

SEQ ID NO: 1349431 - RNA, 19 nt, Artificial Sequence
  Description of Artificial Sequence: Synthetic oligonucleotide
  Antisense strand to SEQ ID NO: 1349430
uaaugucuagacuugcaca

SEQ ID NO: 1349432 - RNA, 19 nt, Artificial Sequence
  Description of Artificial Sequence: Synthetic oligonucleotide
  Sense strand starting at position 504 of SEQ ID NO: 1242463
acuacugcuuaagcagaaa

SEQ ID NO: 1349433 - RNA, 19 nt, Artificial Sequence
  Description of Artificial Sequence: Synthetic oligonucleotide
  Antisense strand to SEQ ID NO: 1349432
uuucugcuuaagcaguagu

SEQ ID NO: 1349434 - RNA, 19 nt, Artificial Sequence
  Description of Artificial Sequence: Synthetic oligonucleotide
  Sense strand starting at position 1591 of SEQ ID NO: 1242463
ccggguuucgcgcuguaca

SEQ ID NO: 1349435 - RNA, 19 nt, Artificial Sequence
  Description of Artificial Sequence: Synthetic oligonucleotide
  Antisense strand to SEQ ID NO: 1349434
uguacagcgcgaaacccgg

SEQ ID NO: 1349436 - RNA, 19 nt, Artificial Sequence
  Description of Artificial Sequence: Synthetic oligonucleotide
  Sense strand starting at position 1593 of SEQ ID NO: 1242463
ggguuucgcgcuguacaaa

SEQ ID NO: 1349437 - RNA, 19 nt, Artificial Sequence
  Description of Artificial Sequence: Synthetic oligonucleotide
  Antisense strand to SEQ ID NO: 1349436
uuuguacagcgcgaaaccc

SEQ ID NO: 1349438 - RNA, 19 nt, Artificial Sequence
  Description of Artificial Sequence: Synthetic oligonucleotide
  Sense strand starting at position 2728 of SEQ ID NO: 1242463
ugggacuaguucuugggaa

SEQ ID NO: 1349439 - RNA, 19 nt, Artificial Sequence
  Description of Artificial Sequence: Synthetic oligonucleotide
  Antisense strand to SEQ ID NO: 1349438
uucccaagaacuaguccca

SEQ ID NO: 1349440 - RNA, 19 nt, Artificial Sequence
  Description of Artificial Sequence: Synthetic oligonucleotide
  Sense strand starting at position 2729 of SEQ ID NO: 1242463
gggacuaguucuugggaau

SEQ ID NO: 1349441 - RNA, 19 nt, Artificial Sequence
  Description of Artificial Sequence: Synthetic oligonucleotide
  Antisense strand to SEQ ID NO: 1349440
auucccaagaacuaguccc

SEQ ID NO: 1349442 - RNA, 19 nt, Artificial Sequence
  Description of Artificial Sequence: Synthetic oligonucleotide
  Sense strand starting at position 2730 of SEQ ID NO: 1242463
ggacuaguucuugggaaug

SEQ ID NO: 1349443 - RNA, 19 nt, Artificial Sequence
  Description of Artificial Sequence: Synthetic oligonucleotide
  Antisense strand to SEQ ID NO: 1349442
cauucccaagaacuagucc

SEQ ID NO: 1349444 - RNA, 19 nt, Artificial Sequence
  Description of Artificial Sequence: Synthetic oligonucleotide
  Sense strand starting at position 2732 of SEQ ID NO: 1242463
acuaguucuugggaaugga

SEQ ID NO: 1349445 - RNA, 19 nt, Artificial Sequence
  Description of Artificial Sequence: Synthetic oligonucleotide
  Antisense strand to SEQ ID NO: 1349444
uccauucccaagaacuagu

SEQ ID NO: 1349446 - RNA, 19 nt, Artificial Sequence
  Description of Artificial Sequence: Synthetic oligonucleotide
  Sense strand starting at position 2735 of SEQ ID NO: 1242463
aguucuugggaauggauca

SEQ ID NO: 1349447 - RNA, 19 nt, Artificial Sequence
  Description of Artificial Sequence: Synthetic oligonucleotide
  Antisense strand to SEQ ID NO: 1349446
ugauccauucccaagaacu

SEQ ID NO: 1349448 - RNA, 19 nt, Artificial Sequence
  Description of Artificial Sequence: Synthetic oligonucleotide
  Sense strand starting at position 2736 of SEQ ID NO: 1242463
guucuugggaauggaucaa

SEQ ID NO: 1349449 - RNA, 19 nt, Artificial Sequence
  Description of Artificial Sequence: Synthetic oligonucleotide
  Antisense strand to SEQ ID NO: 1349448
uugauccauucccaagaac

SEQ ID NO: 1349450 - RNA, 19 nt, Artificial Sequence
  Description of Artificial Sequence: Synthetic oligonucleotide
  Sense strand starting at position 2883 of SEQ ID NO: 1242463
cuucgauucugggcugaag

SEQ ID NO: 1349451 - RNA, 19 nt, Artificial Sequence
  Description of Artificial Sequence: Synthetic oligonucleotide
  Antisense strand to SEQ ID NO: 1349450
cuucagcccagaaucgaag

SEQ ID NO: 1349452 - RNA, 19 nt, Artificial Sequence
  Description of Artificial Sequence: Synthetic oligonucleotide
  Sense strand starting at position 2886 of SEQ ID NO: 1242463
cgauucugggcugaaguga

SEQ ID NO: 1349453 - RNA, 19 nt, Artificial Sequence
  Description of Artificial Sequence: Synthetic oligonucleotide
  Antisense strand to SEQ ID NO: 1349452
ucacuucagcccagaaucg

SEQ ID NO: 1349454 - RNA, 19 nt, Artificial Sequence
  Description of Artificial Sequence: Synthetic oligonucleotide
  Sense strand starting at position 2931 of SEQ ID NO: 1242463
uugccucuuagguaaguga

SEQ ID NO: 1349455 - RNA, 19 nt, Artificial Sequence
  Description of Artificial Sequence: Synthetic oligonucleotide
  Antisense strand to SEQ ID NO: 1349454
ucacuuaccuaagaggcaa

SEQ ID NO: 1349456 - RNA, 19 nt, Artificial Sequence
  Description of Artificial Sequence: Synthetic oligonucleotide
  Sense strand starting at position 2996 of SEQ ID NO: 1242463
agaagacacuuccaaagua

SEQ ID NO: 1349457 - RNA, 19 nt, Artificial Sequence
  Description of Artificial Sequence: Synthetic oligonucleotide
  Antisense strand to SEQ ID NO: 1349456
uacuuuggaagugucuucu

SEQ ID NO: 1349458 - RNA, 19 nt, Artificial Sequence
  Description of Artificial Sequence: Synthetic oligonucleotide
  Sense strand starting at position 3109 of SEQ ID NO: 1242463
accauaugccauuacugua

SEQ ID NO: 1349459 - RNA, 19 nt, Artificial Sequence
  Description of Artificial Sequence: Synthetic oligonucleotide
  Antisense strand to SEQ ID NO: 1349458
uacaguaauggcauauggu

SEQ ID NO: 1349460 - RNA, 19 nt, Artificial Sequence
  Description of Artificial Sequence: Synthetic oligonucleotide
  Sense strand starting at position 3129 of SEQ ID NO: 1242463
uuaguacaguugucucuau

SEQ ID NO: 1349461 - RNA, 19 nt, Artificial Sequence
  Description of Artificial Sequence: Synthetic oligonucleotide
  Antisense strand to SEQ ID NO: 1349460
auagagacaacuguacuaa

SEQ ID NO: 1349462 - RNA, 19 nt, Artificial Sequence
  Description of Artificial Sequence: Synthetic oligonucleotide
  Sense strand starting at position 3130 of SEQ ID NO: 1242463
uaguacaguugucucuaua

SEQ ID NO: 1349463 - RNA, 19 nt, Artificial Sequence
  Description of Artificial Sequence: Synthetic oligonucleotide
  Antisense strand to SEQ ID NO: 1349462
uauagagacaacuguacua

SEQ ID NO: 1349464 - RNA, 19 nt, Artificial Sequence
  Description of Artificial Sequence: Synthetic oligonucleotide
  Sense strand starting at position 3140 of SEQ ID NO: 1242463
gucucuauauccgugggau

SEQ ID NO: 1349465 - RNA, 19 nt, Artificial Sequence
  Description of Artificial Sequence: Synthetic oligonucleotide
  Antisense strand to SEQ ID NO: 1349464
aucccacggauauagagac

SEQ ID NO: 1349466 - RNA, 19 nt, Artificial Sequence
  Description of Artificial Sequence: Synthetic oligonucleotide
  Sense strand starting at position 3141 of SEQ ID NO: 1242463
ucucuauauccgugggauu

SEQ ID NO: 1349467 - RNA, 19 nt, Artificial Sequence
  Description of Artificial Sequence: Synthetic oligonucleotide
  Antisense strand to SEQ ID NO: 1349466
aaucccacggauauagaga

SEQ ID NO: 1349468 - RNA, 19 nt, Artificial Sequence
  Description of Artificial Sequence: Synthetic oligonucleotide
  Sense strand starting at position 3142 of SEQ ID NO: 1242463
cucuauauccgugggauug

SEQ ID NO: 1349469 - RNA, 19 nt, Artificial Sequence
  Description of Artificial Sequence: Synthetic oligonucleotide
  Antisense strand to SEQ ID NO: 1349468
caaucccacggauauagag

SEQ ID NO: 1349470 - RNA, 19 nt, Artificial Sequence
  Description of Artificial Sequence: Synthetic oligonucleotide
  Sense strand starting at position 3153 of SEQ ID NO: 1242463
ugggauugguucccagacu

SEQ ID NO: 1349471 - RNA, 19 nt, Artificial Sequence
  Description of Artificial Sequence: Synthetic oligonucleotide
  Antisense strand to SEQ ID NO: 1349470
agucugggaaccaauccca

SEQ ID NO: 1349472 - RNA, 19 nt, Artificial Sequence
  Description of Artificial Sequence: Synthetic oligonucleotide
  Sense strand starting at position 3154 of SEQ ID NO: 1242463
gggauugguucccagacuc

SEQ ID NO: 1349473 - RNA, 19 nt, Artificial Sequence
  Description of Artificial Sequence: Synthetic oligonucleotide
  Antisense strand to SEQ ID NO: 1349472
gagucugggaaccaauccc

SEQ ID NO: 1349474 - RNA, 19 nt, Artificial Sequence
  Description of Artificial Sequence: Synthetic oligonucleotide
  Sense strand starting at position 3280 of SEQ ID NO: 1242463
ugugaauaguuguuaaggu

SEQ ID NO: 1349475 - RNA, 19 nt, Artificial Sequence
  Description of Artificial Sequence: Synthetic oligonucleotide
  Antisense strand to SEQ ID NO: 1349474
accuuaacaacuauucaca

SEQ ID NO: 1349476 - RNA, 19 nt, Artificial Sequence
  Description of Artificial Sequence: Synthetic oligonucleotide
  Sense strand starting at position 3295 of SEQ ID NO: 1242463
agguguauuuaggaaauaa

SEQ ID NO: 1349477 - RNA, 19 nt, Artificial Sequence
  Description of Artificial Sequence: Synthetic oligonucleotide
  Antisense strand to SEQ ID NO: 1349476
uuauuuccuaaauacaccu

SEQ ID NO: 1349478 - RNA, 19 nt, Artificial Sequence
  Description of Artificial Sequence: Synthetic oligonucleotide
  Sense strand starting at position 3393 of SEQ ID NO: 1242463
ugguaagccuaacuacauu

SEQ ID NO: 1349479 - RNA, 19 nt, Artificial Sequence
  Description of Artificial Sequence: Synthetic oligonucleotide
  Antisense strand to SEQ ID NO: 1349478
aauguaguuaggcuuacca

SEQ ID NO: 1349480 - RNA, 19 nt, Artificial Sequence
  Description of Artificial Sequence: Synthetic oligonucleotide
  Sense strand starting at position 3511 of SEQ ID NO: 1242463
uuggcuguaccugaaacuu

SEQ ID NO: 1349481 - RNA, 19 nt, Artificial Sequence
  Description of Artificial Sequence: Synthetic oligonucleotide
  Antisense strand to SEQ ID NO: 1349480
aaguuucagguacagccaa

SEQ ID NO: 1349482 - RNA, 19 nt, Artificial Sequence
  Description of Artificial Sequence: Synthetic oligonucleotide
  Sense strand starting at position 3689 of SEQ ID NO: 1242463
cacaguuauuggcuggcaa

SEQ ID NO: 1349483 - RNA, 19 nt, Artificial Sequence
  Description of Artificial Sequence: Synthetic oligonucleotide
  Antisense strand to SEQ ID NO: 1349482
uugccagccaauaacugug

SEQ ID NO: 1349484 - RNA, 19 nt, Artificial Sequence
  Description of Artificial Sequence: Synthetic oligonucleotide
  Sense strand starting at position 3690 of SEQ ID NO: 1242463
acaguuauuggcuggcaau

SEQ ID NO: 1349485 - RNA, 19 nt, Artificial Sequence
  Description of Artificial Sequence: Synthetic oligonucleotide
  Antisense strand to SEQ ID NO: 1349484
auugccagccaauaacugu

SEQ ID NO: 1349486 - RNA, 19 nt, Artificial Sequence
  Description of Artificial Sequence: Synthetic oligonucleotide
  Sense strand starting at position 3691 of SEQ ID NO: 1242463
caguuauuggcuggcaaug

SEQ ID NO: 1349487 - RNA, 19 nt, Artificial Sequence
  Description of Artificial Sequence: Synthetic oligonucleotide
  Antisense strand to SEQ ID NO: 1349486
cauugccagccaauaacug

SEQ ID NO: 1349488 - RNA, 19 nt, Artificial Sequence
  Description of Artificial Sequence: Synthetic oligonucleotide
  Sense strand starting at position 3702 of SEQ ID NO: 1242463
uggcaaugagcguaacaua

SEQ ID NO: 1349489 - RNA, 19 nt, Artificial Sequence
  Description of Artificial Sequence: Synthetic oligonucleotide
  Antisense strand to SEQ ID NO: 1349488
uauguuacgcucauugcca

SEQ ID NO: 1349490 - RNA, 19 nt, Artificial Sequence
  Description of Artificial Sequence: Synthetic oligonucleotide
  Sense strand starting at position 3705 of SEQ ID NO: 1242463
caaugagcguaacauauuu

SEQ ID NO: 1349491 - RNA, 19 nt, Artificial Sequence
  Description of Artificial Sequence: Synthetic oligonucleotide
  Antisense strand to SEQ ID NO: 1349490
aaauauguuacgcucauug

SEQ ID NO: 1349492 - RNA, 19 nt, Artificial Sequence
  Description of Artificial Sequence: Synthetic oligonucleotide
  Sense strand starting at position 3713 of SEQ ID NO: 1242463
guaacauauuugggccaau

SEQ ID NO: 1349493 - RNA, 19 nt, Artificial Sequence
  Description of Artificial Sequence: Synthetic oligonucleotide
  Antisense strand to SEQ ID NO: 1349492
auuggcccaaauauguuac

SEQ ID NO: 1349494 - RNA, 19 nt, Artificial Sequence
  Description of Artificial Sequence: Synthetic oligonucleotide
  Sense strand starting at position 3736 of SEQ ID NO: 1242463
ggagcaauuuccuggucuu

SEQ ID NO: 1349495 - RNA, 19 nt, Artificial Sequence
  Description of Artificial Sequence: Synthetic oligonucleotide
  Antisense strand to SEQ ID NO: 1349494
aagaccaggaaauugcucc

SEQ ID NO: 1349496 - RNA, 19 nt, Artificial Sequence
  Description of Artificial Sequence: Synthetic oligonucleotide
  Sense strand starting at position 3737 of SEQ ID NO: 1242463
gagcaauuuccuggucuuu

SEQ ID NO: 1349497 - RNA, 19 nt, Artificial Sequence
  Description of Artificial Sequence: Synthetic oligonucleotide
  Antisense strand to SEQ ID NO: 1349496
aaagaccaggaaauugcuc

SEQ ID NO: 1349498 - RNA, 19 nt, Artificial Sequence
  Description of Artificial Sequence: Synthetic oligonucleotide
  Sense strand starting at position 3739 of SEQ ID NO: 1242463
gcaauuuccuggucuuugu

SEQ ID NO: 1349499 - RNA, 19 nt, Artificial Sequence
  Description of Artificial Sequence: Synthetic oligonucleotide
  Antisense strand to SEQ ID NO: 1349498
acaaagaccaggaaauugc

SEQ ID NO: 1349500 - RNA, 19 nt, Artificial Sequence
  Description of Artificial Sequence: Synthetic oligonucleotide
  Sense strand starting at position 3868 of SEQ ID NO: 1242463
acaagucuagccggguuaa

SEQ ID NO: 1349501 - RNA, 19 nt, Artificial Sequence
  Description of Artificial Sequence: Synthetic oligonucleotide
  Antisense strand to SEQ ID NO: 1349500
uuaacccggcuagacuugu

SEQ ID NO: 1349502 - RNA, 19 nt, Artificial Sequence
  Description of Artificial Sequence: Synthetic oligonucleotide
  Sense strand starting at position 3869 of SEQ ID NO: 1242463
caagucuagccggguuaaa

SEQ ID NO: 1349503 - RNA, 19 nt, Artificial Sequence
  Description of Artificial Sequence: Synthetic oligonucleotide
  Antisense strand to SEQ ID NO: 1349502
uuuaacccggcuagacuug

SEQ ID NO: 1349504 - RNA, 19 nt, Artificial Sequence
  Description of Artificial Sequence: Synthetic oligonucleotide
  Sense strand starting at position 3921 of SEQ ID NO: 1242463
gagaucugaucuuugguga

SEQ ID NO: 1349505 - RNA, 19 nt, Artificial Sequence
  Description of Artificial Sequence: Synthetic oligonucleotide
  Antisense strand to SEQ ID NO: 1349504
ucaccaaagaucagaucuc

SEQ ID NO: 1349506 - RNA, 19 nt, Artificial Sequence
  Description of Artificial Sequence: Synthetic oligonucleotide
  Sense strand starting at position 3924 of SEQ ID NO: 1242463
aucugaucuuuggugacuu

SEQ ID NO: 1349507 - RNA, 19 nt, Artificial Sequence
  Description of Artificial Sequence: Synthetic oligonucleotide
  Antisense strand to SEQ ID NO: 1349506
aagucaccaaagaucagau

SEQ ID NO: 1349508 - RNA, 19 nt, Artificial Sequence
  Description of Artificial Sequence: Synthetic oligonucleotide
  Sense strand starting at position 398 of SEQ ID NO: 1242464
aguucuuaguauccuaguu

SEQ ID NO: 1349509 - RNA, 19 nt, Artificial Sequence
  Description of Artificial Sequence: Synthetic oligonucleotide
  Antisense strand to SEQ ID NO: 1349508
aacuaggauacuaagaacu

SEQ ID NO: 1349510 - RNA, 19 nt, Artificial Sequence
  Description of Artificial Sequence: Synthetic oligonucleotide
  Sense strand starting at position 726 of SEQ ID NO: 1242464
uauugaaacuuuccgaguu

SEQ ID NO: 1349511 - RNA, 19 nt, Artificial Sequence
  Description of Artificial Sequence: Synthetic oligonucleotide
  Antisense strand to SEQ ID NO: 1349510
aacucggaaaguuucaaua

SEQ ID NO: 1349512 - RNA, 19 nt, Artificial Sequence
  Description of Artificial Sequence: Synthetic oligonucleotide
  Sense strand starting at position 841 of SEQ ID NO: 1242464
auagaacucuuguuuagca

SEQ ID NO: 1349513 - RNA, 19 nt, Artificial Sequence
  Description of Artificial Sequence: Synthetic oligonucleotide
  Antisense strand to SEQ ID NO: 1349512
ugcuaaacaagaguucuau

SEQ ID NO: 1349514 - RNA, 19 nt, Artificial Sequence
  Description of Artificial Sequence: Synthetic oligonucleotide
  Sense strand starting at position 843 of SEQ ID NO: 1242464
agaacucuuguuuagcaaa

SEQ ID NO: 1349515 - RNA, 19 nt, Artificial Sequence
  Description of Artificial Sequence: Synthetic oligonucleotide
  Antisense strand to SEQ ID NO: 1349514
uuugcuaaacaagaguucu

SEQ ID NO: 1349516 - RNA, 19 nt, Artificial Sequence
  Description of Artificial Sequence: Synthetic oligonucleotide
  Sense strand starting at position 886 of SEQ ID NO: 1242464
ccuagucaugugcuugcua

SEQ ID NO: 1349517 - RNA, 19 nt, Artificial Sequence
  Description of Artificial Sequence: Synthetic oligonucleotide
  Antisense strand to SEQ ID NO: 1349516
uagcaagcacaugacuagg

SEQ ID NO: 1349518 - RNA, 19 nt, Artificial Sequence
  Description of Artificial Sequence: Synthetic oligonucleotide
  Sense strand starting at position 893 of SEQ ID NO: 1242464
augugcuugcuauaaauca

SEQ ID NO: 1349519 - RNA, 19 nt, Artificial Sequence
  Description of Artificial Sequence: Synthetic oligonucleotide
  Antisense strand to SEQ ID NO: 1349518
ugauuuauagcaagcacau

SEQ ID NO: 1349520 - RNA, 19 nt, Artificial Sequence
  Description of Artificial Sequence: Synthetic oligonucleotide
  Sense strand starting at position 920 of SEQ ID NO: 1242464
uacagugcauucuuuggaa

SEQ ID NO: 1349521 - RNA, 19 nt, Artificial Sequence
  Description of Artificial Sequence: Synthetic oligonucleotide
  Antisense strand to SEQ ID NO: 1349520
uuccaaagaaugcacugua

SEQ ID NO: 1349522 - RNA, 19 nt, Artificial Sequence
  Description of Artificial Sequence: Synthetic oligonucleotide
  Sense strand starting at position 1001 of SEQ ID NO: 1242464
auucuaguuugauuggaaa

SEQ ID NO: 1349523 - RNA, 19 nt, Artificial Sequence
  Description of Artificial Sequence: Synthetic oligonucleotide
  Antisense strand to SEQ ID NO: 1349522
uuuccaaucaaacuagaau

SEQ ID NO: 1349524 - RNA, 19 nt, Artificial Sequence
  Description of Artificial Sequence: Synthetic oligonucleotide
  Sense strand starting at position 1272 of SEQ ID NO: 1242464
ucaagcucauugcuaguaa

SEQ ID NO: 1349525 - RNA, 19 nt, Artificial Sequence
  Description of Artificial Sequence: Synthetic oligonucleotide
  Antisense strand to SEQ ID NO: 1349524
uuacuagcaaugagcuuga

SEQ ID NO: 1349526 - RNA, 19 nt, Artificial Sequence
  Description of Artificial Sequence: Synthetic oligonucleotide
  Sense strand starting at position 1364 of SEQ ID NO: 1242464
acaacuauugaguagcuau

SEQ ID NO: 1349527 - RNA, 19 nt, Artificial Sequence
  Description of Artificial Sequence: Synthetic oligonucleotide
  Antisense strand to SEQ ID NO: 1349526
auagcuacucaauaguugu

SEQ ID NO: 1349528 - RNA, 19 nt, Artificial Sequence
  Description of Artificial Sequence: Synthetic oligonucleotide
  Sense strand starting at position 1367 of SEQ ID NO: 1242464
acuauugaguagcuaugua

SEQ ID NO: 1349529 - RNA, 19 nt, Artificial Sequence
  Description of Artificial Sequence: Synthetic oligonucleotide
  Antisense strand to SEQ ID NO: 1349528
uacauagcuacucaauagu

SEQ ID NO: 1349530 - RNA, 19 nt, Artificial Sequence
  Description of Artificial Sequence: Synthetic oligonucleotide
  Sense strand starting at position 1372 of SEQ ID NO: 1242464
ugaguagcuauguagcaga

SEQ ID NO: 1349531 - RNA, 19 nt, Artificial Sequence
  Description of Artificial Sequence: Synthetic oligonucleotide
  Antisense strand to SEQ ID NO: 1349530
ucugcuacauagcuacuca

SEQ ID NO: 1349532 - RNA, 19 nt, Artificial Sequence
  Description of Artificial Sequence: Synthetic oligonucleotide
  Sense strand starting at position 2012 of SEQ ID NO: 1242464
gggaguaagucuucaguac

SEQ ID NO: 1349533 - RNA, 19 nt, Artificial Sequence
  Description of Artificial Sequence: Synthetic oligonucleotide
  Antisense strand to SEQ ID NO: 1349532
guacugaagacuuacuccc

SEQ ID NO: 1349534 - RNA, 19 nt, Artificial Sequence
  Description of Artificial Sequence: Synthetic oligonucleotide
  Sense strand starting at position 2108 of SEQ ID NO: 1242464
ggguuuaugcuguaaguaa

SEQ ID NO: 1349535 - RNA, 19 nt, Artificial Sequence
  Description of Artificial Sequence: Synthetic oligonucleotide
  Antisense strand to SEQ ID NO: 1349534
uuacuuacagcauaaaccc

SEQ ID NO: 1349536 - RNA, 19 nt, Artificial Sequence
  Description of Artificial Sequence: Synthetic oligonucleotide
  Sense strand starting at position 2150 of SEQ ID NO: 1242464
cuugcauugguggaggaua

SEQ ID NO: 1349537 - RNA, 19 nt, Artificial Sequence
  Description of Artificial Sequence: Synthetic oligonucleotide
  Antisense strand to SEQ ID NO: 1349536
uauccuccaccaaugcaag

SEQ ID NO: 1349538 - RNA, 19 nt, Artificial Sequence
  Description of Artificial Sequence: Synthetic oligonucleotide
  Sense strand starting at position 2263 of SEQ ID NO: 1242464
agauuugucucauauauac

SEQ ID NO: 1349539 - RNA, 19 nt, Artificial Sequence
  Description of Artificial Sequence: Synthetic oligonucleotide
  Antisense strand to SEQ ID NO: 1349538
guauauaugagacaaaucu

SEQ ID NO: 1349540 - RNA, 19 nt, Artificial Sequence
  Description of Artificial Sequence: Synthetic oligonucleotide
  Sense strand starting at position 2367 of SEQ ID NO: 1242464
agagaaaccuagcuugcua

SEQ ID NO: 1349541 - RNA, 19 nt, Artificial Sequence
  Description of Artificial Sequence: Synthetic oligonucleotide
  Antisense strand to SEQ ID NO: 1349540
uagcaagcuagguuucucu

SEQ ID NO: 1349542 - RNA, 19 nt, Artificial Sequence
  Description of Artificial Sequence: Synthetic oligonucleotide
  Sense strand starting at position 2403 of SEQ ID NO: 1242464
ucugccauggucuaaaguu

SEQ ID NO: 1349543 - RNA, 19 nt, Artificial Sequence
  Description of Artificial Sequence: Synthetic oligonucleotide
  Antisense strand to SEQ ID NO: 1349542
aacuuuagaccauggcaga

SEQ ID NO: 1349544 - RNA, 19 nt, Artificial Sequence
  Description of Artificial Sequence: Synthetic oligonucleotide
  Sense strand starting at position 2469 of SEQ ID NO: 1242464
acugaaucauguguaacaa

SEQ ID NO: 1349545 - RNA, 19 nt, Artificial Sequence
  Description of Artificial Sequence: Synthetic oligonucleotide
  Antisense strand to SEQ ID NO: 1349544
uuguuacacaugauucagu

SEQ ID NO: 1349546 - RNA, 19 nt, Artificial Sequence
  Description of Artificial Sequence: Synthetic oligonucleotide
  Sense strand starting at position 2479 of SEQ ID NO: 1242464
guguaacaagaaggaucua

SEQ ID NO: 1349547 - RNA, 19 nt, Artificial Sequence
  Description of Artificial Sequence: Synthetic oligonucleotide
  Antisense strand to SEQ ID NO: 1349546
uagauccuucuuguuacac

SEQ ID NO: 1349548 - RNA, 19 nt, Artificial Sequence
  Description of Artificial Sequence: Synthetic oligonucleotide
  Sense strand starting at position 2765 of SEQ ID NO: 1242464
aguuuauaauguccugcaa

SEQ ID NO: 1349549 - RNA, 19 nt, Artificial Sequence
  Description of Artificial Sequence: Synthetic oligonucleotide
  Antisense strand to SEQ ID NO: 1349548
uugcaggacauuauaaacu

SEQ ID NO: 1349550 - RNA, 19 nt, Artificial Sequence
  Description of Artificial Sequence: Synthetic oligonucleotide
  Sense strand starting at position 2778 of SEQ ID NO: 1242464
cugcaauaggacuguucuu

SEQ ID NO: 1349551 - RNA, 19 nt, Artificial Sequence
  Description of Artificial Sequence: Synthetic oligonucleotide
  Antisense strand to SEQ ID NO: 1349550
aagaacaguccuauugcag

SEQ ID NO: 1349552 - RNA, 19 nt, Artificial Sequence
  Description of Artificial Sequence: Synthetic oligonucleotide
  Sense strand starting at position 2818 of SEQ ID NO: 1242464
cauauaaaguaugagagaa

SEQ ID NO: 1349553 - RNA, 19 nt, Artificial Sequence
  Description of Artificial Sequence: Synthetic oligonucleotide
  Antisense strand to SEQ ID NO: 1349552
uucucucauacuuuauaug

SEQ ID NO: 1349554 - RNA, 19 nt, Artificial Sequence
  Description of Artificial Sequence: Synthetic oligonucleotide
  Sense strand starting at position 2855 of SEQ ID NO: 1242464
auaagucuuuccucuaagu

SEQ ID NO: 1349555 - RNA, 19 nt, Artificial Sequence
  Description of Artificial Sequence: Synthetic oligonucleotide
  Antisense strand to SEQ ID NO: 1349554
acuuagaggaaagacuuau

SEQ ID NO: 1349556 - RNA, 19 nt, Artificial Sequence
  Description of Artificial Sequence: Synthetic oligonucleotide
  Sense strand starting at position 2865 of SEQ ID NO: 1242464
ccucuaaguuuauuauugu

SEQ ID NO: 1349557 - RNA, 19 nt, Artificial Sequence
  Description of Artificial Sequence: Synthetic oligonucleotide
  Antisense strand to SEQ ID NO: 1349556
acaauaauaaacuuagagg

SEQ ID NO: 1349558 - RNA, 19 nt, Artificial Sequence
  Description of Artificial Sequence: Synthetic oligonucleotide
  Sense strand starting at position 2920 of SEQ ID NO: 1242464
gcucacauuucucagaaag

SEQ ID NO: 1349559 - RNA, 19 nt, Artificial Sequence
  Description of Artificial Sequence: Synthetic oligonucleotide
  Antisense strand to SEQ ID NO: 1349558
cuuucugagaaaugugagc

SEQ ID NO: 1349560 - RNA, 19 nt, Artificial Sequence
  Description of Artificial Sequence: Synthetic oligonucleotide
  Sense strand starting at position 2922 of SEQ ID NO: 1242464
ucacauuucucagaaagga

SEQ ID NO: 1349561 - RNA, 19 nt, Artificial Sequence
  Description of Artificial Sequence: Synthetic oligonucleotide
  Antisense strand to SEQ ID NO: 1349560
uccuuucugagaaauguga

SEQ ID NO: 1349562 - RNA, 19 nt, Artificial Sequence
  Description of Artificial Sequence: Synthetic oligonucleotide
  Sense strand starting at position 2945 of SEQ ID NO: 1242464
uaagaagugugggaauaaa

SEQ ID NO: 1349563 - RNA, 19 nt, Artificial Sequence
  Description of Artificial Sequence: Synthetic oligonucleotide
  Antisense strand to SEQ ID NO: 1349562
uuuauucccacacuucuua

SEQ ID NO: 1349564 - RNA, 19 nt, Artificial Sequence
  Description of Artificial Sequence: Synthetic oligonucleotide
  Sense strand starting at position 3077 of SEQ ID NO: 1242464
aaucguuugcuguaauuac

SEQ ID NO: 1349565 - RNA, 19 nt, Artificial Sequence
  Description of Artificial Sequence: Synthetic oligonucleotide
  Antisense strand to SEQ ID NO: 1349564
guaauuacagcaaacgauu

SEQ ID NO: 1349566 - RNA, 19 nt, Artificial Sequence
  Description of Artificial Sequence: Synthetic oligonucleotide
  Sense strand starting at position 3186 of SEQ ID NO: 1242464
agguucuaacgggauugua

SEQ ID NO: 1349567 - RNA, 19 nt, Artificial Sequence
  Description of Artificial Sequence: Synthetic oligonucleotide
  Antisense strand to SEQ ID NO: 1349566
uacaaucccguuagaaccu

SEQ ID NO: 1349568 - RNA, 19 nt, Artificial Sequence
  Description of Artificial Sequence: Synthetic oligonucleotide
  Sense strand starting at position 3189 of SEQ ID NO: 1242464
uucuaacgggauuguauua

SEQ ID NO: 1349569 - RNA, 19 nt, Artificial Sequence
  Description of Artificial Sequence: Synthetic oligonucleotide
  Antisense strand to SEQ ID NO: 1349568
uaauacaaucccguuagaa

SEQ ID NO: 1349570 - RNA, 19 nt, Artificial Sequence
  Description of Artificial Sequence: Synthetic oligonucleotide
  Sense strand starting at position 3202 of SEQ ID NO: 1242464
guauuaaucagaggagagc

SEQ ID NO: 1349571 - RNA, 19 nt, Artificial Sequence
  Description of Artificial Sequence: Synthetic oligonucleotide
  Antisense strand to SEQ ID NO: 1349570
gcucuccucugauuaauac

SEQ ID NO: 1349572 - RNA, 19 nt, Artificial Sequence
  Description of Artificial Sequence: Synthetic oligonucleotide
  Sense strand starting at position 3274 of SEQ ID NO: 1242464
gcagaaauccucugugaaa

SEQ ID NO: 1349573 - RNA, 19 nt, Artificial Sequence
  Description of Artificial Sequence: Synthetic oligonucleotide
  Antisense strand to SEQ ID NO: 1349572
uuucacagaggauuucugc

SEQ ID NO: 1349574 - RNA, 19 nt, Artificial Sequence
  Description of Artificial Sequence: Synthetic oligonucleotide
  Sense strand starting at position 3420 of SEQ ID NO: 1242464
gcugauaguauuggaacaa

SEQ ID NO: 1349575 - RNA, 19 nt, Artificial Sequence
  Description of Artificial Sequence: Synthetic oligonucleotide
  Antisense strand to SEQ ID NO: 1349574
uuguuccaauacuaucagc

SEQ ID NO: 1349576 - RNA, 19 nt, Artificial Sequence
  Description of Artificial Sequence: Synthetic oligonucleotide
  Sense strand starting at position 3505 of SEQ ID NO: 1242464
uguacagcagacuauuaaa

SEQ ID NO: 1349577 - RNA, 19 nt, Artificial Sequence
  Description of Artificial Sequence: Synthetic oligonucleotide
  Antisense strand to SEQ ID NO: 1349576
uuuaauagucugcuguaca

SEQ ID NO: 1349578 - RNA, 19 nt, Artificial Sequence
  Description of Artificial Sequence: Synthetic oligonucleotide
  Sense strand starting at position 3526 of SEQ ID NO: 1242464
gccagucugcggagugguu

SEQ ID NO: 1349579 - RNA, 19 nt, Artificial Sequence
  Description of Artificial Sequence: Synthetic oligonucleotide
  Antisense strand to SEQ ID NO: 1349578
aaccacuccgcagacuggc

SEQ ID NO: 1349580 - RNA, 19 nt, Artificial Sequence
  Description of Artificial Sequence: Synthetic oligonucleotide
  Sense strand starting at position 3792 of SEQ ID NO: 1242464
aauagaaauugaggaggaa

SEQ ID NO: 1349581 - RNA, 19 nt, Artificial Sequence
  Description of Artificial Sequence: Synthetic oligonucleotide
  Antisense strand to SEQ ID NO: 1349580
uuccuccucaauuucuauu

SEQ ID NO: 1349582 - RNA, 19 nt, Artificial Sequence
  Description of Artificial Sequence: Synthetic oligonucleotide
  Sense strand starting at position 3827 of SEQ ID NO: 1242464
gccacaaagcacugacaau

SEQ ID NO: 1349583 - RNA, 19 nt, Artificial Sequence
  Description of Artificial Sequence: Synthetic oligonucleotide
  Antisense strand to SEQ ID NO: 1349582
auugucagugcuuuguggc

SEQ ID NO: 1349584 - RNA, 19 nt, Artificial Sequence
  Description of Artificial Sequence: Synthetic oligonucleotide
  Sense strand starting at position 3956 of SEQ ID NO: 1242464
cagagaggguacuuacuau

SEQ ID NO: 1349585 - RNA, 19 nt, Artificial Sequence
  Description of Artificial Sequence: Synthetic oligonucleotide
  Antisense strand to SEQ ID NO: 1349584
auaguaaguacccucucug

SEQ ID NO: 1349586 - RNA, 19 nt, Artificial Sequence
  Description of Artificial Sequence: Synthetic oligonucleotide
  Sense strand starting at position 3967 of SEQ ID NO: 1242464
cuuacuauguuguuugaua

SEQ ID NO: 1349587 - RNA, 19 nt, Artificial Sequence
  Description of Artificial Sequence: Synthetic oligonucleotide
  Antisense strand to SEQ ID NO: 1349586
uaucaaacaacauaguaag

SEQ ID NO: 1349588 - RNA, 19 nt, Artificial Sequence
  Description of Artificial Sequence: Synthetic oligonucleotide
  Sense strand starting at position 265 of SEQ ID NO: 1242465
uaacucgugcuagaauaca

SEQ ID NO: 1349589 - RNA, 19 nt, Artificial Sequence
  Description of Artificial Sequence: Synthetic oligonucleotide
  Antisense strand to SEQ ID NO: 1349588
uguauucuagcacgaguua

SEQ ID NO: 1349590 - RNA, 19 nt, Artificial Sequence
  Description of Artificial Sequence: Synthetic oligonucleotide
  Sense strand starting at position 316 of SEQ ID NO: 1242465
aggacuguaucccuaagga

SEQ ID NO: 1349591 - RNA, 19 nt, Artificial Sequence
  Description of Artificial Sequence: Synthetic oligonucleotide
  Antisense strand to SEQ ID NO: 1349590
uccuuagggauacaguccu

SEQ ID NO: 1349592 - RNA, 19 nt, Artificial Sequence
  Description of Artificial Sequence: Synthetic oligonucleotide
  Sense strand starting at position 437 of SEQ ID NO: 1242465
uugauugaggcauagcuga

SEQ ID NO: 1349593 - RNA, 19 nt, Artificial Sequence
  Description of Artificial Sequence: Synthetic oligonucleotide
  Antisense strand to SEQ ID NO: 1349592
ucagcuaugccucaaucaa

SEQ ID NO: 1349594 - RNA, 19 nt, Artificial Sequence
  Description of Artificial Sequence: Synthetic oligonucleotide
  Sense strand starting at position 628 of SEQ ID NO: 1242465
augcuuauagaucauaugu

SEQ ID NO: 1349595 - RNA, 19 nt, Artificial Sequence
  Description of Artificial Sequence: Synthetic oligonucleotide
  Antisense strand to SEQ ID NO: 1349594
acauaugaucuauaagcau

SEQ ID NO: 1349596 - RNA, 19 nt, Artificial Sequence
  Description of Artificial Sequence: Synthetic oligonucleotide
  Sense strand starting at position 639 of SEQ ID NO: 1242465
ucauauguagaucauacga

SEQ ID NO: 1349597 - RNA, 19 nt, Artificial Sequence
  Description of Artificial Sequence: Synthetic oligonucleotide
  Antisense strand to SEQ ID NO: 1349596
ucguaugaucuacauauga

SEQ ID NO: 1349598 - RNA, 19 nt, Artificial Sequence
  Description of Artificial Sequence: Synthetic oligonucleotide
  Sense strand starting at position 652 of SEQ ID NO: 1242465
auacgauaacucuaguuua

SEQ ID NO: 1349599 - RNA, 19 nt, Artificial Sequence
  Description of Artificial Sequence: Synthetic oligonucleotide
  Antisense strand to SEQ ID NO: 1349598
uaaacuagaguuaucguau

SEQ ID NO: 1349600 - RNA, 19 nt, Artificial Sequence
  Description of Artificial Sequence: Synthetic oligonucleotide
  Sense strand starting at position 655 of SEQ ID NO: 1242465
cgauaacucuaguuuaacc

SEQ ID NO: 1349601 - RNA, 19 nt, Artificial Sequence
  Description of Artificial Sequence: Synthetic oligonucleotide
  Antisense strand to SEQ ID NO: 1349600
gguuaaacuagaguuaucg

SEQ ID NO: 1349602 - RNA, 19 nt, Artificial Sequence
  Description of Artificial Sequence: Synthetic oligonucleotide
  Sense strand starting at position 730 of SEQ ID NO: 1242465
acggaagggaguuguuaaa

SEQ ID NO: 1349603 - RNA, 19 nt, Artificial Sequence
  Description of Artificial Sequence: Synthetic oligonucleotide
  Antisense strand to SEQ ID NO: 1349602
uuuaacaacucccuuccgu

SEQ ID NO: 1349604 - RNA, 19 nt, Artificial Sequence
  Description of Artificial Sequence: Synthetic oligonucleotide
  Sense strand starting at position 758 of SEQ ID NO: 1242465
uuuauaaggguauguauga

SEQ ID NO: 1349605 - RNA, 19 nt, Artificial Sequence
  Description of Artificial Sequence: Synthetic oligonucleotide
  Antisense strand to SEQ ID NO: 1349604
ucauacauacccuuauaaa

SEQ ID NO: 1349606 - RNA, 19 nt, Artificial Sequence
  Description of Artificial Sequence: Synthetic oligonucleotide
  Sense strand starting at position 759 of SEQ ID NO: 1242465
uuauaaggguauguaugau

SEQ ID NO: 1349607 - RNA, 19 nt, Artificial Sequence
  Description of Artificial Sequence: Synthetic oligonucleotide
  Antisense strand to SEQ ID NO: 1349606
aucauacauacccuuauaa

SEQ ID NO: 1349608 - RNA, 19 nt, Artificial Sequence
  Description of Artificial Sequence: Synthetic oligonucleotide
  Sense strand starting at position 981 of SEQ ID NO: 1242465
gacugucucuuuccugaga

SEQ ID NO: 1349609 - RNA, 19 nt, Artificial Sequence
  Description of Artificial Sequence: Synthetic oligonucleotide
  Antisense strand to SEQ ID NO: 1349608
ucucaggaaagagacaguc

SEQ ID NO: 1349610 - RNA, 19 nt, Artificial Sequence
  Description of Artificial Sequence: Synthetic oligonucleotide
  Sense strand starting at position 982 of SEQ ID NO: 1242465
acugucucuuuccugagau

SEQ ID NO: 1349611 - RNA, 19 nt, Artificial Sequence
  Description of Artificial Sequence: Synthetic oligonucleotide
  Antisense strand to SEQ ID NO: 1349610
aucucaggaaagagacagu

SEQ ID NO: 1349612 - RNA, 19 nt, Artificial Sequence
  Description of Artificial Sequence: Synthetic oligonucleotide
  Sense strand starting at position 1161 of SEQ ID NO: 1242465
aagcaaaggcaugguagau

SEQ ID NO: 1349613 - RNA, 19 nt, Artificial Sequence
  Description of Artificial Sequence: Synthetic oligonucleotide
  Antisense strand to SEQ ID NO: 1349612
aucuaccaugccuuugcuu

SEQ ID NO: 1349614 - RNA, 19 nt, Artificial Sequence
  Description of Artificial Sequence: Synthetic oligonucleotide
  Sense strand starting at position 1255 of SEQ ID NO: 1242465
cguugucaggauaguugua

SEQ ID NO: 1349615 - RNA, 19 nt, Artificial Sequence
  Description of Artificial Sequence: Synthetic oligonucleotide
  Antisense strand to SEQ ID NO: 1349614
uacaacuauccugacaacg

SEQ ID NO: 1349616 - RNA, 19 nt, Artificial Sequence
  Description of Artificial Sequence: Synthetic oligonucleotide
  Sense strand starting at position 1269 of SEQ ID NO: 1242465
uuguaauuacacugagaac

SEQ ID NO: 1349617 - RNA, 19 nt, Artificial Sequence
  Description of Artificial Sequence: Synthetic oligonucleotide
  Antisense strand to SEQ ID NO: 1349616
guucucaguguaauuacaa

SEQ ID NO: 1349618 - RNA, 19 nt, Artificial Sequence
  Description of Artificial Sequence: Synthetic oligonucleotide
  Sense strand starting at position 1305 of SEQ ID NO: 1242465
uuugaacgagaaugguaau

SEQ ID NO: 1349619 - RNA, 19 nt, Artificial Sequence
  Description of Artificial Sequence: Synthetic oligonucleotide
  Antisense strand to SEQ ID NO: 1349618
auuaccauucucguucaaa

SEQ ID NO: 1349620 - RNA, 19 nt, Artificial Sequence
  Description of Artificial Sequence: Synthetic oligonucleotide
  Sense strand starting at position 1306 of SEQ ID NO: 1242465
uugaacgagaaugguaauu

SEQ ID NO: 1349621 - RNA, 19 nt, Artificial Sequence
  Description of Artificial Sequence: Synthetic oligonucleotide
  Antisense strand to SEQ ID NO: 1349620
aauuaccauucucguucaa

SEQ ID NO: 1349622 - RNA, 19 nt, Artificial Sequence
  Description of Artificial Sequence: Synthetic oligonucleotide
  Sense strand starting at position 1311 of SEQ ID NO: 1242465
cgagaaugguaauucugau

SEQ ID NO: 1349623 - RNA, 19 nt, Artificial Sequence
  Description of Artificial Sequence: Synthetic oligonucleotide
  Antisense strand to SEQ ID NO: 1349622
aucagaauuaccauucucg

SEQ ID NO: 1349624 - RNA, 19 nt, Artificial Sequence
  Description of Artificial Sequence: Synthetic oligonucleotide
  Sense strand starting at position 1323 of SEQ ID NO: 1242465
uucugauugcagugggaag

SEQ ID NO: 1349625 - RNA, 19 nt, Artificial Sequence
  Description of Artificial Sequence: Synthetic oligonucleotide
  Antisense strand to SEQ ID NO: 1349624
cuucccacugcaaucagaa

SEQ ID NO: 1349626 - RNA, 19 nt, Artificial Sequence
  Description of Artificial Sequence: Synthetic oligonucleotide
  Sense strand starting at position 1384 of SEQ ID NO: 1242465
agguaaacucuaugaacuu

SEQ ID NO: 1349627 - RNA, 19 nt, Artificial Sequence
  Description of Artificial Sequence: Synthetic oligonucleotide
  Antisense strand to SEQ ID NO: 1349626
aaguucauagaguuuaccu

SEQ ID NO: 1349628 - RNA, 19 nt, Artificial Sequence
  Description of Artificial Sequence: Synthetic oligonucleotide
  Sense strand starting at position 1399 of SEQ ID NO: 1242465
acuugauauuaagcgaaau

SEQ ID NO: 1349629 - RNA, 19 nt, Artificial Sequence
  Description of Artificial Sequence: Synthetic oligonucleotide
  Antisense strand to SEQ ID NO: 1349628
auuucgcuuaauaucaagu

SEQ ID NO: 1349630 - RNA, 19 nt, Artificial Sequence
  Description of Artificial Sequence: Synthetic oligonucleotide
  Sense strand starting at position 1936 of SEQ ID NO: 1242465
aguugaacugaccgugaga

SEQ ID NO: 1349631 - RNA, 19 nt, Artificial Sequence
  Description of Artificial Sequence: Synthetic oligonucleotide
  Antisense strand to SEQ ID NO: 1349630
ucucacggucaguucaacu

SEQ ID NO: 1349632 - RNA, 19 nt, Artificial Sequence
  Description of Artificial Sequence: Synthetic oligonucleotide
  Sense strand starting at position 1938 of SEQ ID NO: 1242465
uugaacugaccgugagaca

SEQ ID NO: 1349633 - RNA, 19 nt, Artificial Sequence
  Description of Artificial Sequence: Synthetic oligonucleotide
  Antisense strand to SEQ ID NO: 1349632
ugucucacggucaguucaa

SEQ ID NO: 1349634 - RNA, 19 nt, Artificial Sequence
  Description of Artificial Sequence: Synthetic oligonucleotide
  Sense strand starting at position 2178 of SEQ ID NO: 1242465
gcaaauucgacuuaguuag

SEQ ID NO: 1349635 - RNA, 19 nt, Artificial Sequence
  Description of Artificial Sequence: Synthetic oligonucleotide
  Antisense strand to SEQ ID NO: 1349634
cuaacuaagucgaauuugc

SEQ ID NO: 1349636 - RNA, 19 nt, Artificial Sequence
  Description of Artificial Sequence: Synthetic oligonucleotide
  Sense strand starting at position 2255 of SEQ ID NO: 1242465
gccgcuacucuauagaaag

SEQ ID NO: 1349637 - RNA, 19 nt, Artificial Sequence
  Description of Artificial Sequence: Synthetic oligonucleotide
  Antisense strand to SEQ ID NO: 1349636
cuuucuauagaguagcggc

SEQ ID NO: 1349638 - RNA, 19 nt, Artificial Sequence
  Description of Artificial Sequence: Synthetic oligonucleotide
  Sense strand starting at position 2490 of SEQ ID NO: 1242465
ggcaaaucacucuguauau

SEQ ID NO: 1349639 - RNA, 19 nt, Artificial Sequence
  Description of Artificial Sequence: Synthetic oligonucleotide
  Antisense strand to SEQ ID NO: 1349638
auauacagagugauuugcc

SEQ ID NO: 1349640 - RNA, 19 nt, Artificial Sequence
  Description of Artificial Sequence: Synthetic oligonucleotide
  Sense strand starting at position 2575 of SEQ ID NO: 1242465
ugaauucgugcuuaggauc

SEQ ID NO: 1349641 - RNA, 19 nt, Artificial Sequence
  Description of Artificial Sequence: Synthetic oligonucleotide
  Antisense strand to SEQ ID NO: 1349640
gauccuaagcacgaauuca

SEQ ID NO: 1349642 - RNA, 19 nt, Artificial Sequence
  Description of Artificial Sequence: Synthetic oligonucleotide
  Sense strand starting at position 2586 of SEQ ID NO: 1242465
uuaggaucaugccugaaac

SEQ ID NO: 1349643 - RNA, 19 nt, Artificial Sequence
  Description of Artificial Sequence: Synthetic oligonucleotide
  Antisense strand to SEQ ID NO: 1349642
guuucaggcaugauccuaa

SEQ ID NO: 1349644 - RNA, 19 nt, Artificial Sequence
  Description of Artificial Sequence: Synthetic oligonucleotide
  Sense strand starting at position 2665 of SEQ ID NO: 1242465
ugauaugauguauggucau

SEQ ID NO: 1349645 - RNA, 19 nt, Artificial Sequence
  Description of Artificial Sequence: Synthetic oligonucleotide
  Antisense strand to SEQ ID NO: 1349644
augaccauacaucauauca

SEQ ID NO: 1349646 - RNA, 19 nt, Artificial Sequence
  Description of Artificial Sequence: Synthetic oligonucleotide
  Sense strand starting at position 2671 of SEQ ID NO: 1242465
gauguauggucaucugauc

SEQ ID NO: 1349647 - RNA, 19 nt, Artificial Sequence
  Description of Artificial Sequence: Synthetic oligonucleotide
  Antisense strand to SEQ ID NO: 1349646
gaucagaugaccauacauc

SEQ ID NO: 1349648 - RNA, 19 nt, Artificial Sequence
  Description of Artificial Sequence: Synthetic oligonucleotide
  Sense strand starting at position 2679 of SEQ ID NO: 1242465
gucaucugaucuuuagaaa

SEQ ID NO: 1349649 - RNA, 19 nt, Artificial Sequence
  Description of Artificial Sequence: Synthetic oligonucleotide
  Antisense strand to SEQ ID NO: 1349648
uuucuaaagaucagaugac

SEQ ID NO: 1349650 - RNA, 19 nt, Artificial Sequence
  Description of Artificial Sequence: Synthetic oligonucleotide
  Sense strand starting at position 2864 of SEQ ID NO: 1242465
ugguguaaaucuuuaugac

SEQ ID NO: 1349651 - RNA, 19 nt, Artificial Sequence
  Description of Artificial Sequence: Synthetic oligonucleotide
  Antisense strand to SEQ ID NO: 1349650
gucauaaagauuuacacca

SEQ ID NO: 1349652 - RNA, 19 nt, Artificial Sequence
  Description of Artificial Sequence: Synthetic oligonucleotide
  Sense strand starting at position 2906 of SEQ ID NO: 1242465
cuugauggauucuuagaua

SEQ ID NO: 1349653 - RNA, 19 nt, Artificial Sequence
  Description of Artificial Sequence: Synthetic oligonucleotide
  Antisense strand to SEQ ID NO: 1349652
uaucuaagaauccaucaag

SEQ ID NO: 1349654 - RNA, 19 nt, Artificial Sequence
  Description of Artificial Sequence: Synthetic oligonucleotide
  Sense strand starting at position 3219 of SEQ ID NO: 1242465
gcuccaaccuggucaacaa

SEQ ID NO: 1349655 - RNA, 19 nt, Artificial Sequence
  Description of Artificial Sequence: Synthetic oligonucleotide
  Antisense strand to SEQ ID NO: 1349654
uuguugaccagguuggagc

SEQ ID NO: 1349656 - RNA, 19 nt, Artificial Sequence
  Description of Artificial Sequence: Synthetic oligonucleotide
  Sense strand starting at position 3395 of SEQ ID NO: 1242465
uaaauaacuugugucugga

SEQ ID NO: 1349657 - RNA, 19 nt, Artificial Sequence
  Description of Artificial Sequence: Synthetic oligonucleotide
  Antisense strand to SEQ ID NO: 1349656
uccagacacaaguuauuua

SEQ ID NO: 1349658 - RNA, 19 nt, Artificial Sequence
  Description of Artificial Sequence: Synthetic oligonucleotide
  Sense strand starting at position 3398 of SEQ ID NO: 1242465
auaacuugugucuggacua

SEQ ID NO: 1349659 - RNA, 19 nt, Artificial Sequence
  Description of Artificial Sequence: Synthetic oligonucleotide
  Antisense strand to SEQ ID NO: 1349658
uaguccagacacaaguuau

SEQ ID NO: 1349660 - RNA, 19 nt, Artificial Sequence
  Description of Artificial Sequence: Synthetic oligonucleotide
  Sense strand starting at position 3403 of SEQ ID NO: 1242465
uugugucuggacuauauaa

SEQ ID NO: 1349661 - RNA, 19 nt, Artificial Sequence
  Description of Artificial Sequence: Synthetic oligonucleotide
  Antisense strand to SEQ ID NO: 1349660
uuauauaguccagacacaa

SEQ ID NO: 1349662 - RNA, 19 nt, Artificial Sequence
  Description of Artificial Sequence: Synthetic oligonucleotide
  Sense strand starting at position 3868 of SEQ ID NO: 1242465
ucaguauuguccucaggga

SEQ ID NO: 1349663 - RNA, 19 nt, Artificial Sequence
  Description of Artificial Sequence: Synthetic oligonucleotide
  Antisense strand to SEQ ID NO: 1349662
ucccugaggacaauacuga

SEQ ID NO: 1349664 - RNA, 19 nt, Artificial Sequence
  Description of Artificial Sequence: Synthetic oligonucleotide
  Sense strand starting at position 3869 of SEQ ID NO: 1242465
caguauuguccucagggaa

SEQ ID NO: 1349665 - RNA, 19 nt, Artificial Sequence
  Description of Artificial Sequence: Synthetic oligonucleotide
  Antisense strand to SEQ ID NO: 1349664
uucccugaggacaauacug

SEQ ID NO: 1349666 - RNA, 19 nt, Artificial Sequence
  Description of Artificial Sequence: Synthetic oligonucleotide
  Sense strand starting at position 3872 of SEQ ID NO: 1242465
uauuguccucagggaaaug

SEQ ID NO: 1349667 - RNA, 19 nt, Artificial Sequence
  Description of Artificial Sequence: Synthetic oligonucleotide
  Antisense strand to SEQ ID NO: 1349666
cauuucccugaggacaaua

SEQ ID NO: 1349668 - RNA, 19 nt, Artificial Sequence
  Description of Artificial Sequence: Synthetic oligonucleotide
  Sense strand starting at position 81 of SEQ ID NO: 1242466
gcauaaugaucagcauauu

SEQ ID NO: 1349669 - RNA, 19 nt, Artificial Sequence
  Description of Artificial Sequence: Synthetic oligonucleotide
  Antisense strand to SEQ ID NO: 1349668
aauaugcugaucauuaugc

SEQ ID NO: 1349670 - RNA, 19 nt, Artificial Sequence
  Description of Artificial Sequence: Synthetic oligonucleotide
  Sense strand starting at position 96 of SEQ ID NO: 1242466
uauuguagguacucagauu

SEQ ID NO: 1349671 - RNA, 19 nt, Artificial Sequence
  Description of Artificial Sequence: Synthetic oligonucleotide
  Antisense strand to SEQ ID NO: 1349670
aaucugaguaccuacaaua

SEQ ID NO: 1349672 - RNA, 19 nt, Artificial Sequence
  Description of Artificial Sequence: Synthetic oligonucleotide
  Sense strand starting at position 188 of SEQ ID NO: 1242466
caucuuauugagggccuau

SEQ ID NO: 1349673 - RNA, 19 nt, Artificial Sequence
  Description of Artificial Sequence: Synthetic oligonucleotide
  Antisense strand to SEQ ID NO: 1349672
auaggcccucaauaagaug

SEQ ID NO: 1349674 - RNA, 19 nt, Artificial Sequence
  Description of Artificial Sequence: Synthetic oligonucleotide
  Sense strand starting at position 238 of SEQ ID NO: 1242466
cuaggacaguuaucucauu

SEQ ID NO: 1349675 - RNA, 19 nt, Artificial Sequence
  Description of Artificial Sequence: Synthetic oligonucleotide
  Antisense strand to SEQ ID NO: 1349674
aaugagauaacuguccuag

SEQ ID NO: 1349676 - RNA, 19 nt, Artificial Sequence
  Description of Artificial Sequence: Synthetic oligonucleotide
  Sense strand starting at position 268 of SEQ ID NO: 1242466
gcauccuugcagggacaaa

SEQ ID NO: 1349677 - RNA, 19 nt, Artificial Sequence
  Description of Artificial Sequence: Synthetic oligonucleotide
  Antisense strand to SEQ ID NO: 1349676
uuugucccugcaaggaugc

SEQ ID NO: 1349678 - RNA, 19 nt, Artificial Sequence
  Description of Artificial Sequence: Synthetic oligonucleotide
  Sense strand starting at position 322 of SEQ ID NO: 1242466
aagguucagguggguuaaa

SEQ ID NO: 1349679 - RNA, 19 nt, Artificial Sequence
  Description of Artificial Sequence: Synthetic oligonucleotide
  Antisense strand to SEQ ID NO: 1349678
uuuaacccaccugaaccuu

SEQ ID NO: 1349680 - RNA, 19 nt, Artificial Sequence
  Description of Artificial Sequence: Synthetic oligonucleotide
  Sense strand starting at position 336 of SEQ ID NO: 1242466
uuaaauaucucgucuaagg

SEQ ID NO: 1349681 - RNA, 19 nt, Artificial Sequence
  Description of Artificial Sequence: Synthetic oligonucleotide
  Antisense strand to SEQ ID NO: 1349680
ccuuagacgagauauuuaa

SEQ ID NO: 1349682 - RNA, 19 nt, Artificial Sequence
  Description of Artificial Sequence: Synthetic oligonucleotide
  Sense strand starting at position 338 of SEQ ID NO: 1242466
aaauaucucgucuaagguu

SEQ ID NO: 1349683 - RNA, 19 nt, Artificial Sequence
  Description of Artificial Sequence: Synthetic oligonucleotide
  Antisense strand to SEQ ID NO: 1349682
aaccuuagacgagauauuu

SEQ ID NO: 1349684 - RNA, 19 nt, Artificial Sequence
  Description of Artificial Sequence: Synthetic oligonucleotide
  Sense strand starting at position 642 of SEQ ID NO: 1242466
uagagacauccugggccau

SEQ ID NO: 1349685 - RNA, 19 nt, Artificial Sequence
  Description of Artificial Sequence: Synthetic oligonucleotide
  Antisense strand to SEQ ID NO: 1349684
auggcccaggaugucucua

SEQ ID NO: 1349686 - RNA, 19 nt, Artificial Sequence
  Description of Artificial Sequence: Synthetic oligonucleotide
  Sense strand starting at position 726 of SEQ ID NO: 1242466
cauugacuacugggcauau

SEQ ID NO: 1349687 - RNA, 19 nt, Artificial Sequence
  Description of Artificial Sequence: Synthetic oligonucleotide
  Antisense strand to SEQ ID NO: 1349686
auaugcccaguagucaaug

SEQ ID NO: 1349688 - RNA, 19 nt, Artificial Sequence
  Description of Artificial Sequence: Synthetic oligonucleotide
  Sense strand starting at position 727 of SEQ ID NO: 1242466
auugacuacugggcauauu

SEQ ID NO: 1349689 - RNA, 19 nt, Artificial Sequence
  Description of Artificial Sequence: Synthetic oligonucleotide
  Antisense strand to SEQ ID NO: 1349688
aauaugcccaguagucaau

SEQ ID NO: 1349690 - RNA, 19 nt, Artificial Sequence
  Description of Artificial Sequence: Synthetic oligonucleotide
  Sense strand starting at position 819 of SEQ ID NO: 1242466
uaaaguaagugaucuuagu

SEQ ID NO: 1349691 - RNA, 19 nt, Artificial Sequence
  Description of Artificial Sequence: Synthetic oligonucleotide
  Antisense strand to SEQ ID NO: 1349690
acuaagaucacuuacuuua

SEQ ID NO: 1349692 - RNA, 19 nt, Artificial Sequence
  Description of Artificial Sequence: Synthetic oligonucleotide
  Sense strand starting at position 832 of SEQ ID NO: 1242466
cuuaguaguuauccuagag

SEQ ID NO: 1349693 - RNA, 19 nt, Artificial Sequence
  Description of Artificial Sequence: Synthetic oligonucleotide
  Antisense strand to SEQ ID NO: 1349692
cucuaggauaacuacuaag

SEQ ID NO: 1349694 - RNA, 19 nt, Artificial Sequence
  Description of Artificial Sequence: Synthetic oligonucleotide
  Sense strand starting at position 1000 of SEQ ID NO: 1242466
gguagaucuauagguacug

SEQ ID NO: 1349695 - RNA, 19 nt, Artificial Sequence
  Description of Artificial Sequence: Synthetic oligonucleotide
  Antisense strand to SEQ ID NO: 1349694
caguaccuauagaucuacc

SEQ ID NO: 1349696 - RNA, 19 nt, Artificial Sequence
  Description of Artificial Sequence: Synthetic oligonucleotide
  Sense strand starting at position 1001 of SEQ ID NO: 1242466
guagaucuauagguacuga

SEQ ID NO: 1349697 - RNA, 19 nt, Artificial Sequence
  Description of Artificial Sequence: Synthetic oligonucleotide
  Antisense strand to SEQ ID NO: 1349696
ucaguaccuauagaucuac

SEQ ID NO: 1349698 - RNA, 19 nt, Artificial Sequence
  Description of Artificial Sequence: Synthetic oligonucleotide
  Sense strand starting at position 1139 of SEQ ID NO: 1242466
guauuacauugaguaaaug

SEQ ID NO: 1349699 - RNA, 19 nt, Artificial Sequence
  Description of Artificial Sequence: Synthetic oligonucleotide
  Antisense strand to SEQ ID NO: 1349698
cauuuacucaauguaauac

SEQ ID NO: 1349700 - RNA, 19 nt, Artificial Sequence
  Description of Artificial Sequence: Synthetic oligonucleotide
  Sense strand starting at position 1166 of SEQ ID NO: 1242466
aguguaaaugugcagacaa

SEQ ID NO: 1349701 - RNA, 19 nt, Artificial Sequence
  Description of Artificial Sequence: Synthetic oligonucleotide
  Antisense strand to SEQ ID NO: 1349700
uugucugcacauuuacacu

SEQ ID NO: 1349702 - RNA, 19 nt, Artificial Sequence
  Description of Artificial Sequence: Synthetic oligonucleotide
  Sense strand starting at position 1198 of SEQ ID NO: 1242466
guguuuacucuggagauga

SEQ ID NO: 1349703 - RNA, 19 nt, Artificial Sequence
  Description of Artificial Sequence: Synthetic oligonucleotide
  Antisense strand to SEQ ID NO: 1349702
ucaucuccagaguaaacac

SEQ ID NO: 1349704 - RNA, 19 nt, Artificial Sequence
  Description of Artificial Sequence: Synthetic oligonucleotide
  Sense strand starting at position 1237 of SEQ ID NO: 1242466
ggcagaggacuauagcuuu

SEQ ID NO: 1349705 - RNA, 19 nt, Artificial Sequence
  Description of Artificial Sequence: Synthetic oligonucleotide
  Antisense strand to SEQ ID NO: 1349704
aaagcuauaguccucugcc

SEQ ID NO: 1349706 - RNA, 19 nt, Artificial Sequence
  Description of Artificial Sequence: Synthetic oligonucleotide
  Sense strand starting at position 1243 of SEQ ID NO: 1242466
ggacuauagcuuuaucuau

SEQ ID NO: 1349707 - RNA, 19 nt, Artificial Sequence
  Description of Artificial Sequence: Synthetic oligonucleotide
  Antisense strand to SEQ ID NO: 1349706
auagauaaagcuauagucc

SEQ ID NO: 1349708 - RNA, 19 nt, Artificial Sequence
  Description of Artificial Sequence: Synthetic oligonucleotide
  Sense strand starting at position 1293 of SEQ ID NO: 1242466
uucccauauuucuugugca

SEQ ID NO: 1349709 - RNA, 19 nt, Artificial Sequence
  Description of Artificial Sequence: Synthetic oligonucleotide
  Antisense strand to SEQ ID NO: 1349708
ugcacaagaaauaugggaa

SEQ ID NO: 1349710 - RNA, 19 nt, Artificial Sequence
  Description of Artificial Sequence: Synthetic oligonucleotide
  Sense strand starting at position 1380 of SEQ ID NO: 1242466
uacaguuguagaggaaguu

SEQ ID NO: 1349711 - RNA, 19 nt, Artificial Sequence
  Description of Artificial Sequence: Synthetic oligonucleotide
  Antisense strand to SEQ ID NO: 1349710
aacuuccucuacaacugua

SEQ ID NO: 1349712 - RNA, 19 nt, Artificial Sequence
  Description of Artificial Sequence: Synthetic oligonucleotide
  Sense strand starting at position 1502 of SEQ ID NO: 1242466
auuagcuaagaucaguaau

SEQ ID NO: 1349713 - RNA, 19 nt, Artificial Sequence
  Description of Artificial Sequence: Synthetic oligonucleotide
  Antisense strand to SEQ ID NO: 1349712
auuacugaucuuagcuaau

SEQ ID NO: 1349714 - RNA, 19 nt, Artificial Sequence
  Description of Artificial Sequence: Synthetic oligonucleotide
  Sense strand starting at position 1504 of SEQ ID NO: 1242466
uagcuaagaucaguaauag

SEQ ID NO: 1349715 - RNA, 19 nt, Artificial Sequence
  Description of Artificial Sequence: Synthetic oligonucleotide
  Antisense strand to SEQ ID NO: 1349714
cuauuacugaucuuagcua

SEQ ID NO: 1349716 - RNA, 19 nt, Artificial Sequence
  Description of Artificial Sequence: Synthetic oligonucleotide
  Sense strand starting at position 1592 of SEQ ID NO: 1242466
aagauugucugguccaauc

SEQ ID NO: 1349717 - RNA, 19 nt, Artificial Sequence
  Description of Artificial Sequence: Synthetic oligonucleotide
  Antisense strand to SEQ ID NO: 1349716
gauuggaccagacaaucuu

SEQ ID NO: 1349718 - RNA, 19 nt, Artificial Sequence
  Description of Artificial Sequence: Synthetic oligonucleotide
  Sense strand starting at position 1652 of SEQ ID NO: 1242466
ugacuuguccaaugucaaa

SEQ ID NO: 1349719 - RNA, 19 nt, Artificial Sequence
  Description of Artificial Sequence: Synthetic oligonucleotide
  Antisense strand to SEQ ID NO: 1349718
uuugacauuggacaaguca

SEQ ID NO: 1349720 - RNA, 19 nt, Artificial Sequence
  Description of Artificial Sequence: Synthetic oligonucleotide
  Sense strand starting at position 1862 of SEQ ID NO: 1242466
ugccucaguucuguauuua

SEQ ID NO: 1349721 - RNA, 19 nt, Artificial Sequence
  Description of Artificial Sequence: Synthetic oligonucleotide
  Antisense strand to SEQ ID NO: 1349720
uaaauacagaacugaggca

SEQ ID NO: 1349722 - RNA, 19 nt, Artificial Sequence
  Description of Artificial Sequence: Synthetic oligonucleotide
  Sense strand starting at position 1863 of SEQ ID NO: 1242466
gccucaguucuguauuuac

SEQ ID NO: 1349723 - RNA, 19 nt, Artificial Sequence
  Description of Artificial Sequence: Synthetic oligonucleotide
  Antisense strand to SEQ ID NO: 1349722
guaaauacagaacugaggc

SEQ ID NO: 1349724 - RNA, 19 nt, Artificial Sequence
  Description of Artificial Sequence: Synthetic oligonucleotide
  Sense strand starting at position 2140 of SEQ ID NO: 1242466
cugauuaccgagcagauca

SEQ ID NO: 1349725 - RNA, 19 nt, Artificial Sequence
  Description of Artificial Sequence: Synthetic oligonucleotide
  Antisense strand to SEQ ID NO: 1349724
ugaucugcucgguaaucag

SEQ ID NO: 1349726 - RNA, 19 nt, Artificial Sequence
  Description of Artificial Sequence: Synthetic oligonucleotide
  Sense strand starting at position 2264 of SEQ ID NO: 1242466
uugauagcucuugagcaau

SEQ ID NO: 1349727 - RNA, 19 nt, Artificial Sequence
  Description of Artificial Sequence: Synthetic oligonucleotide
  Antisense strand to SEQ ID NO: 1349726
auugcucaagagcuaucaa

SEQ ID NO: 1349728 - RNA, 19 nt, Artificial Sequence
  Description of Artificial Sequence: Synthetic oligonucleotide
  Sense strand starting at position 2266 of SEQ ID NO: 1242466
gauagcucuugagcaauag

SEQ ID NO: 1349729 - RNA, 19 nt, Artificial Sequence
  Description of Artificial Sequence: Synthetic oligonucleotide
  Antisense strand to SEQ ID NO: 1349728
cuauugcucaagagcuauc

SEQ ID NO: 1349730 - RNA, 19 nt, Artificial Sequence
  Description of Artificial Sequence: Synthetic oligonucleotide
  Sense strand starting at position 2419 of SEQ ID NO: 1242466
accucauugagccgagaac

SEQ ID NO: 1349731 - RNA, 19 nt, Artificial Sequence
  Description of Artificial Sequence: Synthetic oligonucleotide
  Antisense strand to SEQ ID NO: 1349730
guucucggcucaaugaggu

SEQ ID NO: 1349732 - RNA, 19 nt, Artificial Sequence
  Description of Artificial Sequence: Synthetic oligonucleotide
  Sense strand starting at position 2520 of SEQ ID NO: 1242466
gaucuccuucgguaugauu

SEQ ID NO: 1349733 - RNA, 19 nt, Artificial Sequence
  Description of Artificial Sequence: Synthetic oligonucleotide
  Antisense strand to SEQ ID NO: 1349732
aaucauaccgaaggagauc

SEQ ID NO: 1349734 - RNA, 19 nt, Artificial Sequence
  Description of Artificial Sequence: Synthetic oligonucleotide
  Sense strand starting at position 2648 of SEQ ID NO: 1242466
ugggaagauuuguggagga

SEQ ID NO: 1349735 - RNA, 19 nt, Artificial Sequence
  Description of Artificial Sequence: Synthetic oligonucleotide
  Antisense strand to SEQ ID NO: 1349734
uccuccacaaaucuuccca

SEQ ID NO: 1349736 - RNA, 19 nt, Artificial Sequence
  Description of Artificial Sequence: Synthetic oligonucleotide
  Sense strand starting at position 2659 of SEQ ID NO: 1242466
guggaggagguguggaaau

SEQ ID NO: 1349737 - RNA, 19 nt, Artificial Sequence
  Description of Artificial Sequence: Synthetic oligonucleotide
  Antisense strand to SEQ ID NO: 1349736
auuuccacaccuccuccac

SEQ ID NO: 1349738 - RNA, 19 nt, Artificial Sequence
  Description of Artificial Sequence: Synthetic oligonucleotide
  Sense strand starting at position 3055 of SEQ ID NO: 1242466
ucuugauugguuggugaga

SEQ ID NO: 1349739 - RNA, 19 nt, Artificial Sequence
  Description of Artificial Sequence: Synthetic oligonucleotide
  Antisense strand to SEQ ID NO: 1349738
ucucaccaaccaaucaaga

SEQ ID NO: 1349740 - RNA, 19 nt, Artificial Sequence
  Description of Artificial Sequence: Synthetic oligonucleotide
  Sense strand starting at position 3066 of SEQ ID NO: 1242466
uggugagaccaauagcgau

SEQ ID NO: 1349741 - RNA, 19 nt, Artificial Sequence
  Description of Artificial Sequence: Synthetic oligonucleotide
  Antisense strand to SEQ ID NO: 1349740
aucgcuauuggucucacca

SEQ ID NO: 1349742 - RNA, 19 nt, Artificial Sequence
  Description of Artificial Sequence: Synthetic oligonucleotide
  Sense strand starting at position 3196 of SEQ ID NO: 1242466
caaccuggccuuugagaga

SEQ ID NO: 1349743 - RNA, 19 nt, Artificial Sequence
  Description of Artificial Sequence: Synthetic oligonucleotide
  Antisense strand to SEQ ID NO: 1349742
ucucucaaaggccagguug

SEQ ID NO: 1349744 - RNA, 19 nt, Artificial Sequence
  Description of Artificial Sequence: Synthetic oligonucleotide
  Sense strand starting at position 3581 of SEQ ID NO: 1242466
ccucuuauaggguauaugu

SEQ ID NO: 1349745 - RNA, 19 nt, Artificial Sequence
  Description of Artificial Sequence: Synthetic oligonucleotide
  Antisense strand to SEQ ID NO: 1349744
acauauacccuauaagagg

SEQ ID NO: 1349746 - RNA, 19 nt, Artificial Sequence
  Description of Artificial Sequence: Synthetic oligonucleotide
  Sense strand starting at position 3589 of SEQ ID NO: 1242466
aggguauaugugcacaaau

SEQ ID NO: 1349747 - RNA, 19 nt, Artificial Sequence
  Description of Artificial Sequence: Synthetic oligonucleotide
  Antisense strand to SEQ ID NO: 1349746
auuugugcacauauacccu

SEQ ID NO: 1349748 - RNA, 19 nt, Artificial Sequence
  Description of Artificial Sequence: Synthetic oligonucleotide
  Sense strand starting at position 99 of SEQ ID NO: 1242467
agugucaccuacuuaauua

SEQ ID NO: 1349749 - RNA, 19 nt, Artificial Sequence
  Description of Artificial Sequence: Synthetic oligonucleotide
  Antisense strand to SEQ ID NO: 1349748
uaauuaaguaggugacacu

SEQ ID NO: 1349750 - RNA, 19 nt, Artificial Sequence
  Description of Artificial Sequence: Synthetic oligonucleotide
  Sense strand starting at position 119 of SEQ ID NO: 1242467
guggcaaaguuggcauuua

SEQ ID NO: 1349751 - RNA, 19 nt, Artificial Sequence
  Description of Artificial Sequence: Synthetic oligonucleotide
  Antisense strand to SEQ ID NO: 1349750
uaaaugccaacuuugccac

SEQ ID NO: 1349752 - RNA, 19 nt, Artificial Sequence
  Description of Artificial Sequence: Synthetic oligonucleotide
  Sense strand starting at position 142 of SEQ ID NO: 1242467
uagacaguuugacucuaga

SEQ ID NO: 1349753 - RNA, 19 nt, Artificial Sequence
  Description of Artificial Sequence: Synthetic oligonucleotide
  Antisense strand to SEQ ID NO: 1349752
ucuagagucaaacugucua

SEQ ID NO: 1349754 - RNA, 19 nt, Artificial Sequence
  Description of Artificial Sequence: Synthetic oligonucleotide
  Sense strand starting at position 184 of SEQ ID NO: 1242467
gugguacuggucugaagau

SEQ ID NO: 1349755 - RNA, 19 nt, Artificial Sequence
  Description of Artificial Sequence: Synthetic oligonucleotide
  Antisense strand to SEQ ID NO: 1349754
aucuucagaccaguaccac

SEQ ID NO: 1349756 - RNA, 19 nt, Artificial Sequence
  Description of Artificial Sequence: Synthetic oligonucleotide
  Sense strand starting at position 582 of SEQ ID NO: 1242467
gacuuauucuaguugguga

SEQ ID NO: 1349757 - RNA, 19 nt, Artificial Sequence
  Description of Artificial Sequence: Synthetic oligonucleotide
  Antisense strand to SEQ ID NO: 1349756
ucaccaacuagaauaaguc

SEQ ID NO: 1349758 - RNA, 19 nt, Artificial Sequence
  Description of Artificial Sequence: Synthetic oligonucleotide
  Sense strand starting at position 584 of SEQ ID NO: 1242467
cuuauucuaguuggugaua

SEQ ID NO: 1349759 - RNA, 19 nt, Artificial Sequence
  Description of Artificial Sequence: Synthetic oligonucleotide
  Antisense strand to SEQ ID NO: 1349758
uaucaccaacuagaauaag

SEQ ID NO: 1349760 - RNA, 19 nt, Artificial Sequence
  Description of Artificial Sequence: Synthetic oligonucleotide
  Sense strand starting at position 672 of SEQ ID NO: 1242467
ugagccuucucugucaaac

SEQ ID NO: 1349761 - RNA, 19 nt, Artificial Sequence
  Description of Artificial Sequence: Synthetic oligonucleotide
  Antisense strand to SEQ ID NO: 1349760
guuugacagagaaggcuca

SEQ ID NO: 1349762 - RNA, 19 nt, Artificial Sequence
  Description of Artificial Sequence: Synthetic oligonucleotide
  Sense strand starting at position 1037 of SEQ ID NO: 1242467
gugccuggccauuagaaca

SEQ ID NO: 1349763 - RNA, 19 nt, Artificial Sequence
  Description of Artificial Sequence: Synthetic oligonucleotide
  Antisense strand to SEQ ID NO: 1349762
uguucuaauggccaggcac

SEQ ID NO: 1349764 - RNA, 19 nt, Artificial Sequence
  Description of Artificial Sequence: Synthetic oligonucleotide
  Sense strand starting at position 1403 of SEQ ID NO: 1242467
auacaugacccauguuuag

SEQ ID NO: 1349765 - RNA, 19 nt, Artificial Sequence
  Description of Artificial Sequence: Synthetic oligonucleotide
  Antisense strand to SEQ ID NO: 1349764
cuaaacaugggucauguau

SEQ ID NO: 1349766 - RNA, 19 nt, Artificial Sequence
  Description of Artificial Sequence: Synthetic oligonucleotide
  Sense strand starting at position 1788 of SEQ ID NO: 1242467
aacgaauggcuguaggauu

SEQ ID NO: 1349767 - RNA, 19 nt, Artificial Sequence
  Description of Artificial Sequence: Synthetic oligonucleotide
  Antisense strand to SEQ ID NO: 1349766
aauccuacagccauucguu

SEQ ID NO: 1349768 - RNA, 19 nt, Artificial Sequence
  Description of Artificial Sequence: Synthetic oligonucleotide
  Sense strand starting at position 1850 of SEQ ID NO: 1242467
agccguauugcacaaugaa

SEQ ID NO: 1349769 - RNA, 19 nt, Artificial Sequence
  Description of Artificial Sequence: Synthetic oligonucleotide
  Antisense strand to SEQ ID NO: 1349768
uucauugugcaauacggcu

SEQ ID NO: 1349770 - RNA, 19 nt, Artificial Sequence
  Description of Artificial Sequence: Synthetic oligonucleotide
  Sense strand starting at position 1853 of SEQ ID NO: 1242467
cguauugcacaaugaacua

SEQ ID NO: 1349771 - RNA, 19 nt, Artificial Sequence
  Description of Artificial Sequence: Synthetic oligonucleotide
  Antisense strand to SEQ ID NO: 1349770
uaguucauugugcaauacg

SEQ ID NO: 1349772 - RNA, 19 nt, Artificial Sequence
  Description of Artificial Sequence: Synthetic oligonucleotide
  Sense strand starting at position 1977 of SEQ ID NO: 1242467
aguacucacccugauccau

SEQ ID NO: 1349773 - RNA, 19 nt, Artificial Sequence
  Description of Artificial Sequence: Synthetic oligonucleotide
  Antisense strand to SEQ ID NO: 1349772
auggaucagggugaguacu

SEQ ID NO: 1349774 - RNA, 19 nt, Artificial Sequence
  Description of Artificial Sequence: Synthetic oligonucleotide
  Sense strand starting at position 2029 of SEQ ID NO: 1242467
acuagucaccaguacgauu

SEQ ID NO: 1349775 - RNA, 19 nt, Artificial Sequence
  Description of Artificial Sequence: Synthetic oligonucleotide
  Antisense strand to SEQ ID NO: 1349774
aaucguacuggugacuagu

SEQ ID NO: 1349776 - RNA, 19 nt, Artificial Sequence
  Description of Artificial Sequence: Synthetic oligonucleotide
  Sense strand starting at position 2172 of SEQ ID NO: 1242467
cagguacaucuuggcuuaa

SEQ ID NO: 1349777 - RNA, 19 nt, Artificial Sequence
  Description of Artificial Sequence: Synthetic oligonucleotide
  Antisense strand to SEQ ID NO: 1349776
uuaagccaagauguaccug

SEQ ID NO: 1349778 - RNA, 19 nt, Artificial Sequence
  Description of Artificial Sequence: Synthetic oligonucleotide
  Sense strand starting at position 2226 of SEQ ID NO: 1242467
ugcugagggauuuguuucu

SEQ ID NO: 1349779 - RNA, 19 nt, Artificial Sequence
  Description of Artificial Sequence: Synthetic oligonucleotide
  Antisense strand to SEQ ID NO: 1349778
agaaacaaaucccucagca

SEQ ID NO: 1349780 - RNA, 19 nt, Artificial Sequence
  Description of Artificial Sequence: Synthetic oligonucleotide
  Sense strand starting at position 2276 of SEQ ID NO: 1242467
aagugaugugaauggcaaa

SEQ ID NO: 1349781 - RNA, 19 nt, Artificial Sequence
  Description of Artificial Sequence: Synthetic oligonucleotide
  Antisense strand to SEQ ID NO: 1349780
uuugccauucacaucacuu

SEQ ID NO: 1349782 - RNA, 19 nt, Artificial Sequence
  Description of Artificial Sequence: Synthetic oligonucleotide
  Sense strand starting at position 2409 of SEQ ID NO: 1242467
agcuaugaggaaggucaua

SEQ ID NO: 1349783 - RNA, 19 nt, Artificial Sequence
  Description of Artificial Sequence: Synthetic oligonucleotide
  Antisense strand to SEQ ID NO: 1349782
uaugaccuuccucauagcu

SEQ ID NO: 1349784 - RNA, 19 nt, Artificial Sequence
  Description of Artificial Sequence: Synthetic oligonucleotide
  Sense strand starting at position 2414 of SEQ ID NO: 1242467
ugaggaaggucauagaaag

SEQ ID NO: 1349785 - RNA, 19 nt, Artificial Sequence
  Description of Artificial Sequence: Synthetic oligonucleotide
  Antisense strand to SEQ ID NO: 1349784
cuuucuaugaccuuccuca

SEQ ID NO: 1349786 - RNA, 19 nt, Artificial Sequence
  Description of Artificial Sequence: Synthetic oligonucleotide
  Sense strand starting at position 2520 of SEQ ID NO: 1242467
auuaaugcugcugauuaaa

SEQ ID NO: 1349787 - RNA, 19 nt, Artificial Sequence
  Description of Artificial Sequence: Synthetic oligonucleotide
  Antisense strand to SEQ ID NO: 1349786
uuuaaucagcagcauuaau

SEQ ID NO: 1349788 - RNA, 19 nt, Artificial Sequence
  Description of Artificial Sequence: Synthetic oligonucleotide
  Sense strand starting at position 2550 of SEQ ID NO: 1242467
caaaguuuccagugacaag

SEQ ID NO: 1349789 - RNA, 19 nt, Artificial Sequence
  Description of Artificial Sequence: Synthetic oligonucleotide
  Antisense strand to SEQ ID NO: 1349788
cuugucacuggaaacuuug

SEQ ID NO: 1349790 - RNA, 19 nt, Artificial Sequence
  Description of Artificial Sequence: Synthetic oligonucleotide
  Sense strand starting at position 2654 of SEQ ID NO: 1242467
ugaagaaguugagaucaga

SEQ ID NO: 1349791 - RNA, 19 nt, Artificial Sequence
  Description of Artificial Sequence: Synthetic oligonucleotide
  Antisense strand to SEQ ID NO: 1349790
ucugaucucaacuucuuca

SEQ ID NO: 1349792 - RNA, 19 nt, Artificial Sequence
  Description of Artificial Sequence: Synthetic oligonucleotide
  Sense strand starting at position 2682 of SEQ ID NO: 1242467
agcagagucguggugcuua

SEQ ID NO: 1349793 - RNA, 19 nt, Artificial Sequence
  Description of Artificial Sequence: Synthetic oligonucleotide
  Antisense strand to SEQ ID NO: 1349792
uaagcaccacgacucugcu

SEQ ID NO: 1349794 - RNA, 19 nt, Artificial Sequence
  Description of Artificial Sequence: Synthetic oligonucleotide
  Sense strand starting at position 2726 of SEQ ID NO: 1242467
agggauagagguugguuaa

SEQ ID NO: 1349795 - RNA, 19 nt, Artificial Sequence
  Description of Artificial Sequence: Synthetic oligonucleotide
  Antisense strand to SEQ ID NO: 1349794
uuaaccaaccucuaucccu

SEQ ID NO: 1349796 - RNA, 19 nt, Artificial Sequence
  Description of Artificial Sequence: Synthetic oligonucleotide
  Sense strand starting at position 2727 of SEQ ID NO: 1242467
gggauagagguugguuaag

SEQ ID NO: 1349797 - RNA, 19 nt, Artificial Sequence
  Description of Artificial Sequence: Synthetic oligonucleotide
  Antisense strand to SEQ ID NO: 1349796
cuuaaccaaccucuauccc

SEQ ID NO: 1349798 - RNA, 19 nt, Artificial Sequence
  Description of Artificial Sequence: Synthetic oligonucleotide
  Sense strand starting at position 2777 of SEQ ID NO: 1242467
agguucuaguguucuauaa

SEQ ID NO: 1349799 - RNA, 19 nt, Artificial Sequence
  Description of Artificial Sequence: Synthetic oligonucleotide
  Antisense strand to SEQ ID NO: 1349798
uuauagaacacuagaaccu

SEQ ID NO: 1349800 - RNA, 19 nt, Artificial Sequence
  Description of Artificial Sequence: Synthetic oligonucleotide
  Sense strand starting at position 2963 of SEQ ID NO: 1242467
aucagaaugucacucugua

SEQ ID NO: 1349801 - RNA, 19 nt, Artificial Sequence
  Description of Artificial Sequence: Synthetic oligonucleotide
  Antisense strand to SEQ ID NO: 1349800
uacagagugacauucugau

SEQ ID NO: 1349802 - RNA, 19 nt, Artificial Sequence
  Description of Artificial Sequence: Synthetic oligonucleotide
  Sense strand starting at position 2971 of SEQ ID NO: 1242467
gucacucuguaccucauaa

SEQ ID NO: 1349803 - RNA, 19 nt, Artificial Sequence
  Description of Artificial Sequence: Synthetic oligonucleotide
  Antisense strand to SEQ ID NO: 1349802
uuaugagguacagagugac

SEQ ID NO: 1349804 - RNA, 19 nt, Artificial Sequence
  Description of Artificial Sequence: Synthetic oligonucleotide
  Sense strand starting at position 3038 of SEQ ID NO: 1242467
aacaguguaguuuaacagu

SEQ ID NO: 1349805 - RNA, 19 nt, Artificial Sequence
  Description of Artificial Sequence: Synthetic oligonucleotide
  Antisense strand to SEQ ID NO: 1349804
acuguuaaacuacacuguu

SEQ ID NO: 1349806 - RNA, 19 nt, Artificial Sequence
  Description of Artificial Sequence: Synthetic oligonucleotide
  Sense strand starting at position 3122 of SEQ ID NO: 1242467
ggcuaagagcagugagauu

SEQ ID NO: 1349807 - RNA, 19 nt, Artificial Sequence
  Description of Artificial Sequence: Synthetic oligonucleotide
  Antisense strand to SEQ ID NO: 1349806
aaucucacugcucuuagcc

SEQ ID NO: 1349808 - RNA, 19 nt, Artificial Sequence
  Description of Artificial Sequence: Synthetic oligonucleotide
  Sense strand starting at position 3134 of SEQ ID NO: 1242467
ugagauugugaaugugcuu

SEQ ID NO: 1349809 - RNA, 19 nt, Artificial Sequence
  Description of Artificial Sequence: Synthetic oligonucleotide
  Antisense strand to SEQ ID NO: 1349808
aagcacauucacaaucuca

SEQ ID NO: 1349810 - RNA, 19 nt, Artificial Sequence
  Description of Artificial Sequence: Synthetic oligonucleotide
  Sense strand starting at position 3359 of SEQ ID NO: 1242467
gaacuuaguuuggucaaag

SEQ ID NO: 1349811 - RNA, 19 nt, Artificial Sequence
  Description of Artificial Sequence: Synthetic oligonucleotide
  Antisense strand to SEQ ID NO: 1349810
cuuugaccaaacuaaguuc

SEQ ID NO: 1349812 - RNA, 19 nt, Artificial Sequence
  Description of Artificial Sequence: Synthetic oligonucleotide
  Sense strand starting at position 3360 of SEQ ID NO: 1242467
aacuuaguuuggucaaaga

SEQ ID NO: 1349813 - RNA, 19 nt, Artificial Sequence
  Description of Artificial Sequence: Synthetic oligonucleotide
  Antisense strand to SEQ ID NO: 1349812
ucuuugaccaaacuaaguu

SEQ ID NO: 1349814 - RNA, 19 nt, Artificial Sequence
  Description of Artificial Sequence: Synthetic oligonucleotide
  Sense strand starting at position 3379 of SEQ ID NO: 1242467
auaagugcugcagacagaa

SEQ ID NO: 1349815 - RNA, 19 nt, Artificial Sequence
  Description of Artificial Sequence: Synthetic oligonucleotide
  Antisense strand to SEQ ID NO: 1349814
uucugucugcagcacuuau

SEQ ID NO: 1349816 - RNA, 19 nt, Artificial Sequence
  Description of Artificial Sequence: Synthetic oligonucleotide
  Sense strand starting at position 3442 of SEQ ID NO: 1242467
auagaagaccuucguaauu

SEQ ID NO: 1349817 - RNA, 19 nt, Artificial Sequence
  Description of Artificial Sequence: Synthetic oligonucleotide
  Antisense strand to SEQ ID NO: 1349816
aauuacgaaggucuucuau

SEQ ID NO: 1349818 - RNA, 19 nt, Artificial Sequence
  Description of Artificial Sequence: Synthetic oligonucleotide
  Sense strand starting at position 3453 of SEQ ID NO: 1242467
ucguaauucccugaguuaa

SEQ ID NO: 1349819 - RNA, 19 nt, Artificial Sequence
  Description of Artificial Sequence: Synthetic oligonucleotide
  Antisense strand to SEQ ID NO: 1349818
uuaacucagggaauuacga

SEQ ID NO: 1349820 - RNA, 19 nt, Artificial Sequence
  Description of Artificial Sequence: Synthetic oligonucleotide
  Sense strand starting at position 3455 of SEQ ID NO: 1242467
guaauucccugaguuaauc

SEQ ID NO: 1349821 - RNA, 19 nt, Artificial Sequence
  Description of Artificial Sequence: Synthetic oligonucleotide
  Antisense strand to SEQ ID NO: 1349820
gauuaacucagggaauuac

SEQ ID NO: 1349822 - RNA, 19 nt, Artificial Sequence
  Description of Artificial Sequence: Synthetic oligonucleotide
  Sense strand starting at position 3463 of SEQ ID NO: 1242467
cugaguuaaucugugugau

SEQ ID NO: 1349823 - RNA, 19 nt, Artificial Sequence
  Description of Artificial Sequence: Synthetic oligonucleotide
  Antisense strand to SEQ ID NO: 1349822
aucacacagauuaacucag

SEQ ID NO: 1349824 - RNA, 19 nt, Artificial Sequence
  Description of Artificial Sequence: Synthetic oligonucleotide
  Sense strand starting at position 3464 of SEQ ID NO: 1242467
ugaguuaaucugugugauu

SEQ ID NO: 1349825 - RNA, 19 nt, Artificial Sequence
  Description of Artificial Sequence: Synthetic oligonucleotide
  Antisense strand to SEQ ID NO: 1349824
aaucacacagauuaacuca

SEQ ID NO: 1349826 - RNA, 19 nt, Artificial Sequence
  Description of Artificial Sequence: Synthetic oligonucleotide
  Sense strand starting at position 3465 of SEQ ID NO: 1242467
gaguuaaucugugugauuc

SEQ ID NO: 1349827 - RNA, 19 nt, Artificial Sequence
  Description of Artificial Sequence: Synthetic oligonucleotide
  Antisense strand to SEQ ID NO: 1349826
gaaucacacagauuaacuc

SEQ ID NO: 1349828 - RNA, 19 nt, Artificial Sequence
  Description of Artificial Sequence: Synthetic oligonucleotide
  Sense strand starting at position 165 of SEQ ID NO: 1242468
guaagugcuacugaaguau

SEQ ID NO: 1349829 - RNA, 19 nt, Artificial Sequence
  Description of Artificial Sequence: Synthetic oligonucleotide
  Antisense strand to SEQ ID NO: 1349828
auacuucaguagcacuuac

SEQ ID NO: 1349830 - RNA, 19 nt, Artificial Sequence
  Description of Artificial Sequence: Synthetic oligonucleotide
  Sense strand starting at position 246 of SEQ ID NO: 1242468
gaaagauguuuagcugauu

SEQ ID NO: 1349831 - RNA, 19 nt, Artificial Sequence
  Description of Artificial Sequence: Synthetic oligonucleotide
  Antisense strand to SEQ ID NO: 1349830
aaucagcuaaacaucuuuc

SEQ ID NO: 1349832 - RNA, 19 nt, Artificial Sequence
  Description of Artificial Sequence: Synthetic oligonucleotide
  Sense strand starting at position 308 of SEQ ID NO: 1242468
ggcauaguuccaggauauu

SEQ ID NO: 1349833 - RNA, 19 nt, Artificial Sequence
  Description of Artificial Sequence: Synthetic oligonucleotide
  Antisense strand to SEQ ID NO: 1349832
aauauccuggaacuaugcc

SEQ ID NO: 1349834 - RNA, 19 nt, Artificial Sequence
  Description of Artificial Sequence: Synthetic oligonucleotide
  Sense strand starting at position 348 of SEQ ID NO: 1242468
caaagucuuguugguagga

SEQ ID NO: 1349835 - RNA, 19 nt, Artificial Sequence
  Description of Artificial Sequence: Synthetic oligonucleotide
  Antisense strand to SEQ ID NO: 1349834
uccuaccaacaagacuuug

SEQ ID NO: 1349836 - RNA, 19 nt, Artificial Sequence
  Description of Artificial Sequence: Synthetic oligonucleotide
  Sense strand starting at position 349 of SEQ ID NO: 1242468
aaagucuuguugguaggaa

SEQ ID NO: 1349837 - RNA, 19 nt, Artificial Sequence
  Description of Artificial Sequence: Synthetic oligonucleotide
  Antisense strand to SEQ ID NO: 1349836
uuccuaccaacaagacuuu

SEQ ID NO: 1349838 - RNA, 19 nt, Artificial Sequence
  Description of Artificial Sequence: Synthetic oligonucleotide
  Sense strand starting at position 357 of SEQ ID NO: 1242468
guugguaggaaguaauaua

SEQ ID NO: 1349839 - RNA, 19 nt, Artificial Sequence
  Description of Artificial Sequence: Synthetic oligonucleotide
  Antisense strand to SEQ ID NO: 1349838
uauauuacuuccuaccaac

SEQ ID NO: 1349840 - RNA, 19 nt, Artificial Sequence
  Description of Artificial Sequence: Synthetic oligonucleotide
  Sense strand starting at position 375 of SEQ ID NO: 1242468
aguauaguauguccaagaa

SEQ ID NO: 1349841 - RNA, 19 nt, Artificial Sequence
  Description of Artificial Sequence: Synthetic oligonucleotide
  Antisense strand to SEQ ID NO: 1349840
uucuuggacauacuauacu

SEQ ID NO: 1349842 - RNA, 19 nt, Artificial Sequence
  Description of Artificial Sequence: Synthetic oligonucleotide
  Sense strand starting at position 393 of SEQ ID NO: 1242468
acugaaaggucagcaugau

SEQ ID NO: 1349843 - RNA, 19 nt, Artificial Sequence
  Description of Artificial Sequence: Synthetic oligonucleotide
  Antisense strand to SEQ ID NO: 1349842
aucaugcugaccuuucagu

SEQ ID NO: 1349844 - RNA, 19 nt, Artificial Sequence
  Description of Artificial Sequence: Synthetic oligonucleotide
  Sense strand starting at position 488 of SEQ ID NO: 1242468
cauguaaauuggguuaaua

SEQ ID NO: 1349845 - RNA, 19 nt, Artificial Sequence
  Description of Artificial Sequence: Synthetic oligonucleotide
  Antisense strand to SEQ ID NO: 1349844
uauuaacccaauuuacaug

SEQ ID NO: 1349846 - RNA, 19 nt, Artificial Sequence
  Description of Artificial Sequence: Synthetic oligonucleotide
  Sense strand starting at position 579 of SEQ ID NO: 1242468
agguuaguacugcagaaag

SEQ ID NO: 1349847 - RNA, 19 nt, Artificial Sequence
  Description of Artificial Sequence: Synthetic oligonucleotide
  Antisense strand to SEQ ID NO: 1349846
cuuucugcaguacuaaccu

SEQ ID NO: 1349848 - RNA, 19 nt, Artificial Sequence
  Description of Artificial Sequence: Synthetic oligonucleotide
  Sense strand starting at position 693 of SEQ ID NO: 1242468
ggcugaaguuuaucacaag

SEQ ID NO: 1349849 - RNA, 19 nt, Artificial Sequence
  Description of Artificial Sequence: Synthetic oligonucleotide
  Antisense strand to SEQ ID NO: 1349848
cuugugauaaacuucagcc

SEQ ID NO: 1349850 - RNA, 19 nt, Artificial Sequence
  Description of Artificial Sequence: Synthetic oligonucleotide
  Sense strand starting at position 836 of SEQ ID NO: 1242468
aagucagcucacuagggau

SEQ ID NO: 1349851 - RNA, 19 nt, Artificial Sequence
  Description of Artificial Sequence: Synthetic oligonucleotide
  Antisense strand to SEQ ID NO: 1349850
aucccuagugagcugacuu

SEQ ID NO: 1349852 - RNA, 19 nt, Artificial Sequence
  Description of Artificial Sequence: Synthetic oligonucleotide
  Sense strand starting at position 990 of SEQ ID NO: 1242468
agggacuuuccucaagcuu

SEQ ID NO: 1349853 - RNA, 19 nt, Artificial Sequence
  Description of Artificial Sequence: Synthetic oligonucleotide
  Antisense strand to SEQ ID NO: 1349852
aagcuugaggaaagucccu

SEQ ID NO: 1349854 - RNA, 19 nt, Artificial Sequence
  Description of Artificial Sequence: Synthetic oligonucleotide
  Sense strand starting at position 1123 of SEQ ID NO: 1242468
aggacaagacucugugugu

SEQ ID NO: 1349855 - RNA, 19 nt, Artificial Sequence
  Description of Artificial Sequence: Synthetic oligonucleotide
  Antisense strand to SEQ ID NO: 1349854
acacacagagucuuguccu

SEQ ID NO: 1349856 - RNA, 19 nt, Artificial Sequence
  Description of Artificial Sequence: Synthetic oligonucleotide
  Sense strand starting at position 1211 of SEQ ID NO: 1242468
aggaauuaacugggucacu

SEQ ID NO: 1349857 - RNA, 19 nt, Artificial Sequence
  Description of Artificial Sequence: Synthetic oligonucleotide
  Antisense strand to SEQ ID NO: 1349856
agugacccaguuaauuccu

SEQ ID NO: 1349858 - RNA, 19 nt, Artificial Sequence
  Description of Artificial Sequence: Synthetic oligonucleotide
  Sense strand starting at position 1212 of SEQ ID NO: 1242468
ggaauuaacugggucacuu

SEQ ID NO: 1349859 - RNA, 19 nt, Artificial Sequence
  Description of Artificial Sequence: Synthetic oligonucleotide
  Antisense strand to SEQ ID NO: 1349858
aagugacccaguuaauucc

SEQ ID NO: 1349860 - RNA, 19 nt, Artificial Sequence
  Description of Artificial Sequence: Synthetic oligonucleotide
  Sense strand starting at position 1216 of SEQ ID NO: 1242468
uuaacugggucacuuaauu

SEQ ID NO: 1349861 - RNA, 19 nt, Artificial Sequence
  Description of Artificial Sequence: Synthetic oligonucleotide
  Antisense strand to SEQ ID NO: 1349860
aauuaagugacccaguuaa

SEQ ID NO: 1349862 - RNA, 19 nt, Artificial Sequence
  Description of Artificial Sequence: Synthetic oligonucleotide
  Sense strand starting at position 1221 of SEQ ID NO: 1242468
ugggucacuuaauuccaaa

SEQ ID NO: 1349863 - RNA, 19 nt, Artificial Sequence
  Description of Artificial Sequence: Synthetic oligonucleotide
  Antisense strand to SEQ ID NO: 1349862
uuuggaauuaagugaccca

SEQ ID NO: 1349864 - RNA, 19 nt, Artificial Sequence
  Description of Artificial Sequence: Synthetic oligonucleotide
  Sense strand starting at position 1244 of SEQ ID NO: 1242468
uaaugauaagugggaccuu

SEQ ID NO: 1349865 - RNA, 19 nt, Artificial Sequence
  Description of Artificial Sequence: Synthetic oligonucleotide
  Antisense strand to SEQ ID NO: 1349864
aaggucccacuuaucauua

SEQ ID NO: 1349866 - RNA, 19 nt, Artificial Sequence
  Description of Artificial Sequence: Synthetic oligonucleotide
  Sense strand starting at position 1286 of SEQ ID NO: 1242468
ccuaacuuugcagauuaga

SEQ ID NO: 1349867 - RNA, 19 nt, Artificial Sequence
  Description of Artificial Sequence: Synthetic oligonucleotide
  Antisense strand to SEQ ID NO: 1349866
ucuaaucugcaaaguuagg

SEQ ID NO: 1349868 - RNA, 19 nt, Artificial Sequence
  Description of Artificial Sequence: Synthetic oligonucleotide
  Sense strand starting at position 1311 of SEQ ID NO: 1242468
gaacuuucgagaugaggug

SEQ ID NO: 1349869 - RNA, 19 nt, Artificial Sequence
  Description of Artificial Sequence: Synthetic oligonucleotide
  Antisense strand to SEQ ID NO: 1349868
caccucaucucgaaaguuc

SEQ ID NO: 1349870 - RNA, 19 nt, Artificial Sequence
  Description of Artificial Sequence: Synthetic oligonucleotide
  Sense strand starting at position 1623 of SEQ ID NO: 1242468
gguucuucuggauaaccga

SEQ ID NO: 1349871 - RNA, 19 nt, Artificial Sequence
  Description of Artificial Sequence: Synthetic oligonucleotide
  Antisense strand to SEQ ID NO: 1349870
ucgguuauccagaagaacc

SEQ ID NO: 1349872 - RNA, 19 nt, Artificial Sequence
  Description of Artificial Sequence: Synthetic oligonucleotide
  Sense strand starting at position 2577 of SEQ ID NO: 1242468
ggagaugggcuguauuauu

SEQ ID NO: 1349873 - RNA, 19 nt, Artificial Sequence
  Description of Artificial Sequence: Synthetic oligonucleotide
  Antisense strand to SEQ ID NO: 1349872
aauaauacagcccaucucc

SEQ ID NO: 1349874 - RNA, 19 nt, Artificial Sequence
  Description of Artificial Sequence: Synthetic oligonucleotide
  Sense strand starting at position 2679 of SEQ ID NO: 1242468
uuguaugauggguacucaa

SEQ ID NO: 1349875 - RNA, 19 nt, Artificial Sequence
  Description of Artificial Sequence: Synthetic oligonucleotide
  Antisense strand to SEQ ID NO: 1349874
uugaguacccaucauacaa

SEQ ID NO: 1349876 - RNA, 19 nt, Artificial Sequence
  Description of Artificial Sequence: Synthetic oligonucleotide
  Sense strand starting at position 2682 of SEQ ID NO: 1242468
uaugauggguacucaaagu

SEQ ID NO: 1349877 - RNA, 19 nt, Artificial Sequence
  Description of Artificial Sequence: Synthetic oligonucleotide
  Antisense strand to SEQ ID NO: 1349876
acuuugaguacccaucaua

SEQ ID NO: 1349878 - RNA, 19 nt, Artificial Sequence
  Description of Artificial Sequence: Synthetic oligonucleotide
  Sense strand starting at position 2693 of SEQ ID NO: 1242468
cucaaagucuuguccagga

SEQ ID NO: 1349879 - RNA, 19 nt, Artificial Sequence
  Description of Artificial Sequence: Synthetic oligonucleotide
  Antisense strand to SEQ ID NO: 1349878
uccuggacaagacuuugag

SEQ ID NO: 1349880 - RNA, 19 nt, Artificial Sequence
  Description of Artificial Sequence: Synthetic oligonucleotide
  Sense strand starting at position 2851 of SEQ ID NO: 1242468
ucaccugucucauugagau

SEQ ID NO: 1349881 - RNA, 19 nt, Artificial Sequence
  Description of Artificial Sequence: Synthetic oligonucleotide
  Antisense strand to SEQ ID NO: 1349880
aucucaaugagacagguga

SEQ ID NO: 1349882 - RNA, 19 nt, Artificial Sequence
  Description of Artificial Sequence: Synthetic oligonucleotide
  Sense strand starting at position 2867 of SEQ ID NO: 1242468
gauguuuauuuagaccuga

SEQ ID NO: 1349883 - RNA, 19 nt, Artificial Sequence
  Description of Artificial Sequence: Synthetic oligonucleotide
  Antisense strand to SEQ ID NO: 1349882
ucaggucuaaauaaacauc

SEQ ID NO: 1349884 - RNA, 19 nt, Artificial Sequence
  Description of Artificial Sequence: Synthetic oligonucleotide
  Sense strand starting at position 2875 of SEQ ID NO: 1242468
uuuagaccugaauggcaaa

SEQ ID NO: 1349885 - RNA, 19 nt, Artificial Sequence
  Description of Artificial Sequence: Synthetic oligonucleotide
  Antisense strand to SEQ ID NO: 1349884
uuugccauucaggucuaaa

SEQ ID NO: 1349886 - RNA, 19 nt, Artificial Sequence
  Description of Artificial Sequence: Synthetic oligonucleotide
  Sense strand starting at position 2882 of SEQ ID NO: 1242468
cugaauggcaaaugucgaa

SEQ ID NO: 1349887 - RNA, 19 nt, Artificial Sequence
  Description of Artificial Sequence: Synthetic oligonucleotide
  Antisense strand to SEQ ID NO: 1349886
uucgacauuugccauucag

SEQ ID NO: 1349888 - RNA, 19 nt, Artificial Sequence
  Description of Artificial Sequence: Synthetic oligonucleotide
  Sense strand starting at position 2909 of SEQ ID NO: 1242468
guacuaacuagaggguuaa

SEQ ID NO: 1349889 - RNA, 19 nt, Artificial Sequence
  Description of Artificial Sequence: Synthetic oligonucleotide
  Antisense strand to SEQ ID NO: 1349888
uuaacccucuaguuaguac

SEQ ID NO: 1349890 - RNA, 19 nt, Artificial Sequence
  Description of Artificial Sequence: Synthetic oligonucleotide
  Sense strand starting at position 3039 of SEQ ID NO: 1242468
agagcauuguguucuauuu

SEQ ID NO: 1349891 - RNA, 19 nt, Artificial Sequence
  Description of Artificial Sequence: Synthetic oligonucleotide
  Antisense strand to SEQ ID NO: 1349890
aaauagaacacaaugcucu

SEQ ID NO: 1349892 - RNA, 19 nt, Artificial Sequence
  Description of Artificial Sequence: Synthetic oligonucleotide
  Sense strand starting at position 3061 of SEQ ID NO: 1242468
uguuguauuucuguuugua

SEQ ID NO: 1349893 - RNA, 19 nt, Artificial Sequence
  Description of Artificial Sequence: Synthetic oligonucleotide
  Antisense strand to SEQ ID NO: 1349892
uacaaacagaaauacaaca

SEQ ID NO: 1349894 - RNA, 19 nt, Artificial Sequence
  Description of Artificial Sequence: Synthetic oligonucleotide
  Sense strand starting at position 3065 of SEQ ID NO: 1242468
guauuucuguuuguaccuu

SEQ ID NO: 1349895 - RNA, 19 nt, Artificial Sequence
  Description of Artificial Sequence: Synthetic oligonucleotide
  Antisense strand to SEQ ID NO: 1349894
aagguacaaacagaaauac

SEQ ID NO: 1349896 - RNA, 19 nt, Artificial Sequence
  Description of Artificial Sequence: Synthetic oligonucleotide
  Sense strand starting at position 3216 of SEQ ID NO: 1242468
uaagaagguuggcauuuaa

SEQ ID NO: 1349897 - RNA, 19 nt, Artificial Sequence
  Description of Artificial Sequence: Synthetic oligonucleotide
  Antisense strand to SEQ ID NO: 1349896
uuaaaugccaaccuucuua

SEQ ID NO: 1349898 - RNA, 19 nt, Artificial Sequence
  Description of Artificial Sequence: Synthetic oligonucleotide
  Sense strand starting at position 3318 of SEQ ID NO: 1242468
uugcuuugauuuccaguuu

SEQ ID NO: 1349899 - RNA, 19 nt, Artificial Sequence
  Description of Artificial Sequence: Synthetic oligonucleotide
  Antisense strand to SEQ ID NO: 1349898
aaacuggaaaucaaagcaa

SEQ ID NO: 1349900 - RNA, 19 nt, Artificial Sequence
  Description of Artificial Sequence: Synthetic oligonucleotide
  Sense strand starting at position 3775 of SEQ ID NO: 1242468
uucugaaaucaggagccuu

SEQ ID NO: 1349901 - RNA, 19 nt, Artificial Sequence
  Description of Artificial Sequence: Synthetic oligonucleotide
  Antisense strand to SEQ ID NO: 1349900
aaggcuccugauuucagaa

SEQ ID NO: 1349902 - RNA, 19 nt, Artificial Sequence
  Description of Artificial Sequence: Synthetic oligonucleotide
  Sense strand starting at position 3864 of SEQ ID NO: 1242468
ugguaugucuuacuacuaa

SEQ ID NO: 1349903 - RNA, 19 nt, Artificial Sequence
  Description of Artificial Sequence: Synthetic oligonucleotide
  Antisense strand to SEQ ID NO: 1349902
uuaguaguaagacauacca

SEQ ID NO: 1349904 - RNA, 19 nt, Artificial Sequence
  Description of Artificial Sequence: Synthetic oligonucleotide
  Sense strand starting at position 3900 of SEQ ID NO: 1242468
ugguaauugggagggcaua

SEQ ID NO: 1349905 - RNA, 19 nt, Artificial Sequence
  Description of Artificial Sequence: Synthetic oligonucleotide
  Antisense strand to SEQ ID NO: 1349904
uaugcccucccaauuacca

SEQ ID NO: 1349906 - RNA, 19 nt, Artificial Sequence
  Description of Artificial Sequence: Synthetic oligonucleotide
  Sense strand starting at position 3901 of SEQ ID NO: 1242468
gguaauugggagggcauau

SEQ ID NO: 1349907 - RNA, 19 nt, Artificial Sequence
  Description of Artificial Sequence: Synthetic oligonucleotide
  Antisense strand to SEQ ID NO: 1349906
auaugcccucccaauuacc

SEQ ID NO: 1349908 - RNA, 19 nt, Artificial Sequence
  Description of Artificial Sequence: Synthetic oligonucleotide
  Sense strand starting at position 10 of SEQ ID NO: 1242469
guaucuaaggcuugaacag

SEQ ID NO: 1349909 - RNA, 19 nt, Artificial Sequence
  Description of Artificial Sequence: Synthetic oligonucleotide
  Antisense strand to SEQ ID NO: 1349908
cuguucaagccuuagauac

SEQ ID NO: 1349910 - RNA, 19 nt, Artificial Sequence
  Description of Artificial Sequence: Synthetic oligonucleotide
  Sense strand starting at position 50 of SEQ ID NO: 1242469
auuucuuguuuccuugagu

SEQ ID NO: 1349911 - RNA, 19 nt, Artificial Sequence
  Description of Artificial Sequence: Synthetic oligonucleotide
  Antisense strand to SEQ ID NO: 1349910
acucaaggaaacaagaaau

SEQ ID NO: 1349912 - RNA, 19 nt, Artificial Sequence
  Description of Artificial Sequence: Synthetic oligonucleotide
  Sense strand starting at position 223 of SEQ ID NO: 1242469
agaacugcugcguuaguuu

SEQ ID NO: 1349913 - RNA, 19 nt, Artificial Sequence
  Description of Artificial Sequence: Synthetic oligonucleotide
  Antisense strand to SEQ ID NO: 1349912
aaacuaacgcagcaguucu

SEQ ID NO: 1349914 - RNA, 19 nt, Artificial Sequence
  Description of Artificial Sequence: Synthetic oligonucleotide
  Sense strand starting at position 228 of SEQ ID NO: 1242469
ugcugcguuaguuuacaga

SEQ ID NO: 1349915 - RNA, 19 nt, Artificial Sequence
  Description of Artificial Sequence: Synthetic oligonucleotide
  Antisense strand to SEQ ID NO: 1349914
ucuguaaacuaacgcagca

SEQ ID NO: 1349916 - RNA, 19 nt, Artificial Sequence
  Description of Artificial Sequence: Synthetic oligonucleotide
  Sense strand starting at position 315 of SEQ ID NO: 1242469
gaagaagccucaccuggaa

SEQ ID NO: 1349917 - RNA, 19 nt, Artificial Sequence
  Description of Artificial Sequence: Synthetic oligonucleotide
  Antisense strand to SEQ ID NO: 1349916
uuccaggugaggcuucuuc

SEQ ID NO: 1349918 - RNA, 19 nt, Artificial Sequence
  Description of Artificial Sequence: Synthetic oligonucleotide
  Sense strand starting at position 913 of SEQ ID NO: 1242469
ugagcuuucuaggcuggga

SEQ ID NO: 1349919 - RNA, 19 nt, Artificial Sequence
  Description of Artificial Sequence: Synthetic oligonucleotide
  Antisense strand to SEQ ID NO: 1349918
ucccagccuagaaagcuca

SEQ ID NO: 1349920 - RNA, 19 nt, Artificial Sequence
  Description of Artificial Sequence: Synthetic oligonucleotide
  Sense strand starting at position 1687 of SEQ ID NO: 1242469
ggagccuugcccugaagag

SEQ ID NO: 1349921 - RNA, 19 nt, Artificial Sequence
  Description of Artificial Sequence: Synthetic oligonucleotide
  Antisense strand to SEQ ID NO: 1349920
cucuucagggcaaggcucc

SEQ ID NO: 1349922 - RNA, 19 nt, Artificial Sequence
  Description of Artificial Sequence: Synthetic oligonucleotide
  Sense strand starting at position 1688 of SEQ ID NO: 1242469
gagccuugcccugaagagu

SEQ ID NO: 1349923 - RNA, 19 nt, Artificial Sequence
  Description of Artificial Sequence: Synthetic oligonucleotide
  Antisense strand to SEQ ID NO: 1349922
acucuucagggcaaggcuc

SEQ ID NO: 1349924 - RNA, 19 nt, Artificial Sequence
  Description of Artificial Sequence: Synthetic oligonucleotide
  Sense strand starting at position 2355 of SEQ ID NO: 1242469
ggcuuucgggcgagcugau

SEQ ID NO: 1349925 - RNA, 19 nt, Artificial Sequence
  Description of Artificial Sequence: Synthetic oligonucleotide
  Antisense strand to SEQ ID NO: 1349924
aucagcucgcccgaaagcc

SEQ ID NO: 1349926 - RNA, 19 nt, Artificial Sequence
  Description of Artificial Sequence: Synthetic oligonucleotide
  Sense strand starting at position 2396 of SEQ ID NO: 1242469
gcgagagguggauacuaga

SEQ ID NO: 1349927 - RNA, 19 nt, Artificial Sequence
  Description of Artificial Sequence: Synthetic oligonucleotide
  Antisense strand to SEQ ID NO: 1349926
ucuaguauccaccucucgc

SEQ ID NO: 1349928 - RNA, 19 nt, Artificial Sequence
  Description of Artificial Sequence: Synthetic oligonucleotide
  Sense strand starting at position 2471 of SEQ ID NO: 1242469
gagagccauucguuaaagu

SEQ ID NO: 1349929 - RNA, 19 nt, Artificial Sequence
  Description of Artificial Sequence: Synthetic oligonucleotide
  Antisense strand to SEQ ID NO: 1349928
acuuuaacgaauggcucuc

SEQ ID NO: 1349930 - RNA, 19 nt, Artificial Sequence
  Description of Artificial Sequence: Synthetic oligonucleotide
  Sense strand starting at position 2472 of SEQ ID NO: 1242469
agagccauucguuaaagua

SEQ ID NO: 1349931 - RNA, 19 nt, Artificial Sequence
  Description of Artificial Sequence: Synthetic oligonucleotide
  Antisense strand to SEQ ID NO: 1349930
uacuuuaacgaauggcucu

SEQ ID NO: 1349932 - RNA, 19 nt, Artificial Sequence
  Description of Artificial Sequence: Synthetic oligonucleotide
  Sense strand starting at position 2803 of SEQ ID NO: 1242469
uaaggaaacuuacucguau

SEQ ID NO: 1349933 - RNA, 19 nt, Artificial Sequence
  Description of Artificial Sequence: Synthetic oligonucleotide
  Antisense strand to SEQ ID NO: 1349932
auacgaguaaguuuccuua

SEQ ID NO: 1349934 - RNA, 19 nt, Artificial Sequence
  Description of Artificial Sequence: Synthetic oligonucleotide
  Sense strand starting at position 2804 of SEQ ID NO: 1242469
aaggaaacuuacucguauc

SEQ ID NO: 1349935 - RNA, 19 nt, Artificial Sequence
  Description of Artificial Sequence: Synthetic oligonucleotide
  Antisense strand to SEQ ID NO: 1349934
gauacgaguaaguuuccuu

SEQ ID NO: 1349936 - RNA, 19 nt, Artificial Sequence
  Description of Artificial Sequence: Synthetic oligonucleotide
  Sense strand starting at position 2839 of SEQ ID NO: 1242469
aauugaaauugugucuuga

SEQ ID NO: 1349937 - RNA, 19 nt, Artificial Sequence
  Description of Artificial Sequence: Synthetic oligonucleotide
  Antisense strand to SEQ ID NO: 1349936
ucaagacacaauuucaauu

SEQ ID NO: 1349938 - RNA, 19 nt, Artificial Sequence
  Description of Artificial Sequence: Synthetic oligonucleotide
  Sense strand starting at position 2891 of SEQ ID NO: 1242469
cgugacuccuguuuggaga

SEQ ID NO: 1349939 - RNA, 19 nt, Artificial Sequence
  Description of Artificial Sequence: Synthetic oligonucleotide
  Antisense strand to SEQ ID NO: 1349938
ucuccaaacaggagucacg

SEQ ID NO: 1349940 - RNA, 19 nt, Artificial Sequence
  Description of Artificial Sequence: Synthetic oligonucleotide
  Sense strand starting at position 2892 of SEQ ID NO: 1242469
gugacuccuguuuggagaa

SEQ ID NO: 1349941 - RNA, 19 nt, Artificial Sequence
  Description of Artificial Sequence: Synthetic oligonucleotide
  Antisense strand to SEQ ID NO: 1349940
uucuccaaacaggagucac

SEQ ID NO: 1349942 - RNA, 19 nt, Artificial Sequence
  Description of Artificial Sequence: Synthetic oligonucleotide
  Sense strand starting at position 3096 of SEQ ID NO: 1242469
cugccuagugcuucuguca

SEQ ID NO: 1349943 - RNA, 19 nt, Artificial Sequence
  Description of Artificial Sequence: Synthetic oligonucleotide
  Antisense strand to SEQ ID NO: 1349942
ugacagaagcacuaggcag

SEQ ID NO: 1349944 - RNA, 19 nt, Artificial Sequence
  Description of Artificial Sequence: Synthetic oligonucleotide
  Sense strand starting at position 3097 of SEQ ID NO: 1242469
ugccuagugcuucugucau

SEQ ID NO: 1349945 - RNA, 19 nt, Artificial Sequence
  Description of Artificial Sequence: Synthetic oligonucleotide
  Antisense strand to SEQ ID NO: 1349944
augacagaagcacuaggca

SEQ ID NO: 1349946 - RNA, 19 nt, Artificial Sequence
  Description of Artificial Sequence: Synthetic oligonucleotide
  Sense strand starting at position 3114 of SEQ ID NO: 1242469
auugaagucuggucuccaa

SEQ ID NO: 1349947 - RNA, 19 nt, Artificial Sequence
  Description of Artificial Sequence: Synthetic oligonucleotide
  Antisense strand to SEQ ID NO: 1349946
uuggagaccagacuucaau

SEQ ID NO: 1349948 - RNA, 19 nt, Artificial Sequence
  Description of Artificial Sequence: Synthetic oligonucleotide
  Sense strand starting at position 3178 of SEQ ID NO: 1242469
ucaucucuucgggauggga

SEQ ID NO: 1349949 - RNA, 19 nt, Artificial Sequence
  Description of Artificial Sequence: Synthetic oligonucleotide
  Antisense strand to SEQ ID NO: 1349948
ucccaucccgaagagauga

SEQ ID NO: 1349950 - RNA, 19 nt, Artificial Sequence
  Description of Artificial Sequence: Synthetic oligonucleotide
  Sense strand starting at position 3218 of SEQ ID NO: 1242469
ugcugugauccagcgcuau

SEQ ID NO: 1349951 - RNA, 19 nt, Artificial Sequence
  Description of Artificial Sequence: Synthetic oligonucleotide
  Antisense strand to SEQ ID NO: 1349950
auagcgcuggaucacagca

SEQ ID NO: 1349952 - RNA, 19 nt, Artificial Sequence
  Description of Artificial Sequence: Synthetic oligonucleotide
  Sense strand starting at position 3261 of SEQ ID NO: 1242469
uagguagaagcuugaccaa

SEQ ID NO: 1349953 - RNA, 19 nt, Artificial Sequence
  Description of Artificial Sequence: Synthetic oligonucleotide
  Antisense strand to SEQ ID NO: 1349952
uuggucaagcuucuaccua

SEQ ID NO: 1349954 - RNA, 19 nt, Artificial Sequence
  Description of Artificial Sequence: Synthetic oligonucleotide
  Sense strand starting at position 3264 of SEQ ID NO: 1242469
guagaagcuugaccaaaua

SEQ ID NO: 1349955 - RNA, 19 nt, Artificial Sequence
  Description of Artificial Sequence: Synthetic oligonucleotide
  Antisense strand to SEQ ID NO: 1349954
uauuuggucaagcuucuac

SEQ ID NO: 1349956 - RNA, 19 nt, Artificial Sequence
  Description of Artificial Sequence: Synthetic oligonucleotide
  Sense strand starting at position 3369 of SEQ ID NO: 1242469
acagccaaguguuuacauu

SEQ ID NO: 1349957 - RNA, 19 nt, Artificial Sequence
  Description of Artificial Sequence: Synthetic oligonucleotide
  Antisense strand to SEQ ID NO: 1349956
aauguaaacacuuggcugu

SEQ ID NO: 1349958 - RNA, 19 nt, Artificial Sequence
  Description of Artificial Sequence: Synthetic oligonucleotide
  Sense strand starting at position 3418 of SEQ ID NO: 1242469
gggaguguuguaugacaag

SEQ ID NO: 1349959 - RNA, 19 nt, Artificial Sequence
  Description of Artificial Sequence: Synthetic oligonucleotide
  Antisense strand to SEQ ID NO: 1349958
cuugucauacaacacuccc

SEQ ID NO: 1349960 - RNA, 19 nt, Artificial Sequence
  Description of Artificial Sequence: Synthetic oligonucleotide
  Sense strand starting at position 3462 of SEQ ID NO: 1242469
guguguauuacggaaagag

SEQ ID NO: 1349961 - RNA, 19 nt, Artificial Sequence
  Description of Artificial Sequence: Synthetic oligonucleotide
  Antisense strand to SEQ ID NO: 1349960
cucuuuccguaauacacac

SEQ ID NO: 1349962 - RNA, 19 nt, Artificial Sequence
  Description of Artificial Sequence: Synthetic oligonucleotide
  Sense strand starting at position 3466 of SEQ ID NO: 1242469
guauuacggaaagaguguu

SEQ ID NO: 1349963 - RNA, 19 nt, Artificial Sequence
  Description of Artificial Sequence: Synthetic oligonucleotide
  Antisense strand to SEQ ID NO: 1349962
aacacucuuuccguaauac

SEQ ID NO: 1349964 - RNA, 19 nt, Artificial Sequence
  Description of Artificial Sequence: Synthetic oligonucleotide
  Sense strand starting at position 3487 of SEQ ID NO: 1242469
cuaguuacucaauauguau

SEQ ID NO: 1349965 - RNA, 19 nt, Artificial Sequence
  Description of Artificial Sequence: Synthetic oligonucleotide
  Antisense strand to SEQ ID NO: 1349964
auacauauugaguaacuag

SEQ ID NO: 1349966 - RNA, 19 nt, Artificial Sequence
  Description of Artificial Sequence: Synthetic oligonucleotide
  Sense strand starting at position 3520 of SEQ ID NO: 1242469
aaagaugaccgguauguuc

SEQ ID NO: 1349967 - RNA, 19 nt, Artificial Sequence
  Description of Artificial Sequence: Synthetic oligonucleotide
  Antisense strand to SEQ ID NO: 1349966
gaacauaccggucaucuuu

SEQ ID NO: 1349968 - RNA, 19 nt, Artificial Sequence
  Description of Artificial Sequence: Synthetic oligonucleotide
  Sense strand starting at position 3543 of SEQ ID NO: 1242469
ggcacauguuuguuggauu

SEQ ID NO: 1349969 - RNA, 19 nt, Artificial Sequence
  Description of Artificial Sequence: Synthetic oligonucleotide
  Antisense strand to SEQ ID NO: 1349968
aauccaacaaacaugugcc

SEQ ID NO: 1349970 - RNA, 19 nt, Artificial Sequence
  Description of Artificial Sequence: Synthetic oligonucleotide
  Sense strand starting at position 3587 of SEQ ID NO: 1242469
aguuucuacugguugauga

SEQ ID NO: 1349971 - RNA, 19 nt, Artificial Sequence
  Description of Artificial Sequence: Synthetic oligonucleotide
  Antisense strand to SEQ ID NO: 1349970
ucaucaaccaguagaaacu

SEQ ID NO: 1349972 - RNA, 19 nt, Artificial Sequence
  Description of Artificial Sequence: Synthetic oligonucleotide
  Sense strand starting at position 3588 of SEQ ID NO: 1242469
guuucuacugguugaugaa

SEQ ID NO: 1349973 - RNA, 19 nt, Artificial Sequence
  Description of Artificial Sequence: Synthetic oligonucleotide
  Antisense strand to SEQ ID NO: 1349972
uucaucaaccaguagaaac

SEQ ID NO: 1349974 - RNA, 19 nt, Artificial Sequence
  Description of Artificial Sequence: Synthetic oligonucleotide
  Sense strand starting at position 3589 of SEQ ID NO: 1242469
uuucuacugguugaugaau

SEQ ID NO: 1349975 - RNA, 19 nt, Artificial Sequence
  Description of Artificial Sequence: Synthetic oligonucleotide
  Antisense strand to SEQ ID NO: 1349974
auucaucaaccaguagaaa

SEQ ID NO: 1349976 - RNA, 19 nt, Artificial Sequence
  Description of Artificial Sequence: Synthetic oligonucleotide
  Sense strand starting at position 3625 of SEQ ID NO: 1242469
ccgcaaaucauagguaaug

SEQ ID NO: 1349977 - RNA, 19 nt, Artificial Sequence
  Description of Artificial Sequence: Synthetic oligonucleotide
  Antisense strand to SEQ ID NO: 1349976
cauuaccuaugauuugcgg

SEQ ID NO: 1349978 - RNA, 19 nt, Artificial Sequence
  Description of Artificial Sequence: Synthetic oligonucleotide
  Sense strand starting at position 3626 of SEQ ID NO: 1242469
cgcaaaucauagguaauga

SEQ ID NO: 1349979 - RNA, 19 nt, Artificial Sequence
  Description of Artificial Sequence: Synthetic oligonucleotide
  Antisense strand to SEQ ID NO: 1349978
ucauuaccuaugauuugcg

SEQ ID NO: 1349980 - RNA, 19 nt, Artificial Sequence
  Description of Artificial Sequence: Synthetic oligonucleotide
  Sense strand starting at position 3843 of SEQ ID NO: 1242469
cccacuggaucauugugua

SEQ ID NO: 1349981 - RNA, 19 nt, Artificial Sequence
  Description of Artificial Sequence: Synthetic oligonucleotide
  Antisense strand to SEQ ID NO: 1349980
uacacaaugauccaguggg

SEQ ID NO: 1349982 - RNA, 19 nt, Artificial Sequence
  Description of Artificial Sequence: Synthetic oligonucleotide
  Sense strand starting at position 3847 of SEQ ID NO: 1242469
cuggaucauuguguacaaa

SEQ ID NO: 1349983 - RNA, 19 nt, Artificial Sequence
  Description of Artificial Sequence: Synthetic oligonucleotide
  Antisense strand to SEQ ID NO: 1349982
uuuguacacaaugauccag

SEQ ID NO: 1349984 - RNA, 19 nt, Artificial Sequence
  Description of Artificial Sequence: Synthetic oligonucleotide
  Sense strand starting at position 3848 of SEQ ID NO: 1242469
uggaucauuguguacaaau

SEQ ID NO: 1349985 - RNA, 19 nt, Artificial Sequence
  Description of Artificial Sequence: Synthetic oligonucleotide
  Antisense strand to SEQ ID NO: 1349984
auuuguacacaaugaucca

SEQ ID NO: 1349986 - RNA, 19 nt, Artificial Sequence
  Description of Artificial Sequence: Synthetic oligonucleotide
  Sense strand starting at position 3874 of SEQ ID NO: 1242469
gggcuugagggcugcaaga

SEQ ID NO: 1349987 - RNA, 19 nt, Artificial Sequence
  Description of Artificial Sequence: Synthetic oligonucleotide
  Antisense strand to SEQ ID NO: 1349986
ucuugcagcccucaagccc

SEQ ID NO: 1349988 - RNA, 19 nt, Artificial Sequence
  Description of Artificial Sequence: Synthetic oligonucleotide
  Sense strand starting at position 121 of SEQ ID NO: 1242470
cugauugucaggugaagca

SEQ ID NO: 1349989 - RNA, 19 nt, Artificial Sequence
  Description of Artificial Sequence: Synthetic oligonucleotide
  Antisense strand to SEQ ID NO: 1349988
ugcuucaccugacaaucag

SEQ ID NO: 1349990 - RNA, 19 nt, Artificial Sequence
  Description of Artificial Sequence: Synthetic oligonucleotide
  Sense strand starting at position 294 of SEQ ID NO: 1242470
cacugugauuugcucaguu

SEQ ID NO: 1349991 - RNA, 19 nt, Artificial Sequence
  Description of Artificial Sequence: Synthetic oligonucleotide
  Antisense strand to SEQ ID NO: 1349990
aacugagcaaaucacagug

SEQ ID NO: 1349992 - RNA, 19 nt, Artificial Sequence
  Description of Artificial Sequence: Synthetic oligonucleotide
  Sense strand starting at position 337 of SEQ ID NO: 1242470
gcaugcagcggugauagaa

SEQ ID NO: 1349993 - RNA, 19 nt, Artificial Sequence
  Description of Artificial Sequence: Synthetic oligonucleotide
  Antisense strand to SEQ ID NO: 1349992
uucuaucaccgcugcaugc

SEQ ID NO: 1349994 - RNA, 19 nt, Artificial Sequence
  Description of Artificial Sequence: Synthetic oligonucleotide
  Sense strand starting at position 787 of SEQ ID NO: 1242470
ccugcuuggucccugacaa

SEQ ID NO: 1349995 - RNA, 19 nt, Artificial Sequence
  Description of Artificial Sequence: Synthetic oligonucleotide
  Antisense strand to SEQ ID NO: 1349994
uugucagggaccaagcagg

SEQ ID NO: 1349996 - RNA, 19 nt, Artificial Sequence
  Description of Artificial Sequence: Synthetic oligonucleotide
  Sense strand starting at position 788 of SEQ ID NO: 1242470
cugcuuggucccugacaag

SEQ ID NO: 1349997 - RNA, 19 nt, Artificial Sequence
  Description of Artificial Sequence: Synthetic oligonucleotide
  Antisense strand to SEQ ID NO: 1349996
cuugucagggaccaagcag

SEQ ID NO: 1349998 - RNA, 19 nt, Artificial Sequence
  Description of Artificial Sequence: Synthetic oligonucleotide
  Sense strand starting at position 1073 of SEQ ID NO: 1242470
ggagguaucacugauguua

SEQ ID NO: 1349999 - RNA, 19 nt, Artificial Sequence
  Description of Artificial Sequence: Synthetic oligonucleotide
  Antisense strand to SEQ ID NO: 1349998
uaacaucagugauaccucc

SEQ ID NO: 1350000 - RNA, 19 nt, Artificial Sequence
  Description of Artificial Sequence: Synthetic oligonucleotide
  Sense strand starting at position 1204 of SEQ ID NO: 1242470
agcccuguuguauaucauu

SEQ ID NO: 1350001 - RNA, 19 nt, Artificial Sequence
  Description of Artificial Sequence: Synthetic oligonucleotide
  Antisense strand to SEQ ID NO: 1350000
aaugauauacaacagggcu

SEQ ID NO: 1350002 - RNA, 19 nt, Artificial Sequence
  Description of Artificial Sequence: Synthetic oligonucleotide
  Sense strand starting at position 1231 of SEQ ID NO: 1242470
ucaaaucuaugauagaaag

SEQ ID NO: 1350003 - RNA, 19 nt, Artificial Sequence
  Description of Artificial Sequence: Synthetic oligonucleotide
  Antisense strand to SEQ ID NO: 1350002
cuuucuaucauagauuuga

SEQ ID NO: 1350004 - RNA, 19 nt, Artificial Sequence
  Description of Artificial Sequence: Synthetic oligonucleotide
  Sense strand starting at position 1378 of SEQ ID NO: 1242470
gguaacagucccuaacgaa

SEQ ID NO: 1350005 - RNA, 19 nt, Artificial Sequence
  Description of Artificial Sequence: Synthetic oligonucleotide
  Antisense strand to SEQ ID NO: 1350004
uucguuagggacuguuacc

SEQ ID NO: 1350006 - RNA, 19 nt, Artificial Sequence
  Description of Artificial Sequence: Synthetic oligonucleotide
  Sense strand starting at position 1393 of SEQ ID NO: 1242470
cgaaaucugacauggcaca

SEQ ID NO: 1350007 - RNA, 19 nt, Artificial Sequence
  Description of Artificial Sequence: Synthetic oligonucleotide
  Antisense strand to SEQ ID NO: 1350006
ugugccaugucagauuucg

SEQ ID NO: 1350008 - RNA, 19 nt, Artificial Sequence
  Description of Artificial Sequence: Synthetic oligonucleotide
  Sense strand starting at position 1640 of SEQ ID NO: 1242470
cugaucccucuugguagau

SEQ ID NO: 1350009 - RNA, 19 nt, Artificial Sequence
  Description of Artificial Sequence: Synthetic oligonucleotide
  Antisense strand to SEQ ID NO: 1350008
aucuaccaagagggaucag

SEQ ID NO: 1350010 - RNA, 19 nt, Artificial Sequence
  Description of Artificial Sequence: Synthetic oligonucleotide
  Sense strand starting at position 1641 of SEQ ID NO: 1242470
ugaucccucuugguagaua

SEQ ID NO: 1350011 - RNA, 19 nt, Artificial Sequence
  Description of Artificial Sequence: Synthetic oligonucleotide
  Antisense strand to SEQ ID NO: 1350010
uaucuaccaagagggauca

SEQ ID NO: 1350012 - RNA, 19 nt, Artificial Sequence
  Description of Artificial Sequence: Synthetic oligonucleotide
  Sense strand starting at position 2283 of SEQ ID NO: 1242470
uguguuugccuggacaagu

SEQ ID NO: 1350013 - RNA, 19 nt, Artificial Sequence
  Description of Artificial Sequence: Synthetic oligonucleotide
  Antisense strand to SEQ ID NO: 1350012
acuuguccaggcaaacaca

SEQ ID NO: 1350014 - RNA, 19 nt, Artificial Sequence
  Description of Artificial Sequence: Synthetic oligonucleotide
  Sense strand starting at position 2350 of SEQ ID NO: 1242470
uugggugaaugacuucuga

SEQ ID NO: 1350015 - RNA, 19 nt, Artificial Sequence
  Description of Artificial Sequence: Synthetic oligonucleotide
  Antisense strand to SEQ ID NO: 1350014
ucagaagucauucacccaa

SEQ ID NO: 1350016 - RNA, 19 nt, Artificial Sequence
  Description of Artificial Sequence: Synthetic oligonucleotide
  Sense strand starting at position 2386 of SEQ ID NO: 1242470
auuugaugguugcagaaau

SEQ ID NO: 1350017 - RNA, 19 nt, Artificial Sequence
  Description of Artificial Sequence: Synthetic oligonucleotide
  Antisense strand to SEQ ID NO: 1350016
auuucugcaaccaucaaau

SEQ ID NO: 1350018 - RNA, 19 nt, Artificial Sequence
  Description of Artificial Sequence: Synthetic oligonucleotide
  Sense strand starting at position 2396 of SEQ ID NO: 1242470
ugcagaaaucuaggcaguu

SEQ ID NO: 1350019 - RNA, 19 nt, Artificial Sequence
  Description of Artificial Sequence: Synthetic oligonucleotide
  Antisense strand to SEQ ID NO: 1350018
aacugccuagauuucugca

SEQ ID NO: 1350020 - RNA, 19 nt, Artificial Sequence
  Description of Artificial Sequence: Synthetic oligonucleotide
  Sense strand starting at position 2397 of SEQ ID NO: 1242470
gcagaaaucuaggcaguua

SEQ ID NO: 1350021 - RNA, 19 nt, Artificial Sequence
  Description of Artificial Sequence: Synthetic oligonucleotide
  Antisense strand to SEQ ID NO: 1350020
uaacugccuagauuucugc

SEQ ID NO: 1350022 - RNA, 19 nt, Artificial Sequence
  Description of Artificial Sequence: Synthetic oligonucleotide
  Sense strand starting at position 2473 of SEQ ID NO: 1242470
guuugugcaccaguuguau

SEQ ID NO: 1350023 - RNA, 19 nt, Artificial Sequence
  Description of Artificial Sequence: Synthetic oligonucleotide
  Antisense strand to SEQ ID NO: 1350022
auacaacuggugcacaaac

SEQ ID NO: 1350024 - RNA, 19 nt, Artificial Sequence
  Description of Artificial Sequence: Synthetic oligonucleotide
  Sense strand starting at position 2550 of SEQ ID NO: 1242470
ggucacuaugccuaaccaa

SEQ ID NO: 1350025 - RNA, 19 nt, Artificial Sequence
  Description of Artificial Sequence: Synthetic oligonucleotide
  Antisense strand to SEQ ID NO: 1350024
uugguuaggcauagugacc

SEQ ID NO: 1350026 - RNA, 19 nt, Artificial Sequence
  Description of Artificial Sequence: Synthetic oligonucleotide
  Sense strand starting at position 2604 of SEQ ID NO: 1242470
ggugguaacaugggaacaa

SEQ ID NO: 1350027 - RNA, 19 nt, Artificial Sequence
  Description of Artificial Sequence: Synthetic oligonucleotide
  Antisense strand to SEQ ID NO: 1350026
uuguucccauguuaccacc

SEQ ID NO: 1350028 - RNA, 19 nt, Artificial Sequence
  Description of Artificial Sequence: Synthetic oligonucleotide
  Sense strand starting at position 2623 of SEQ ID NO: 1242470
gugaaucccaagugucaga

SEQ ID NO: 1350029 - RNA, 19 nt, Artificial Sequence
  Description of Artificial Sequence: Synthetic oligonucleotide
  Antisense strand to SEQ ID NO: 1350028
ucugacacuugggauucac

SEQ ID NO: 1350030 - RNA, 19 nt, Artificial Sequence
  Description of Artificial Sequence: Synthetic oligonucleotide
  Sense strand starting at position 2649 of SEQ ID NO: 1242470
gucagaguacacugaaaug

SEQ ID NO: 1350031 - RNA, 19 nt, Artificial Sequence
  Description of Artificial Sequence: Synthetic oligonucleotide
  Antisense strand to SEQ ID NO: 1350030
cauuucaguguacucugac

SEQ ID NO: 1350032 - RNA, 19 nt, Artificial Sequence
  Description of Artificial Sequence: Synthetic oligonucleotide
  Sense strand starting at position 2799 of SEQ ID NO: 1242470
uuuacauggucaccuguua

SEQ ID NO: 1350033 - RNA, 19 nt, Artificial Sequence
  Description of Artificial Sequence: Synthetic oligonucleotide
  Antisense strand to SEQ ID NO: 1350032
uaacaggugaccauguaaa

SEQ ID NO: 1350034 - RNA, 19 nt, Artificial Sequence
  Description of Artificial Sequence: Synthetic oligonucleotide
  Sense strand starting at position 2806 of SEQ ID NO: 1242470
ggucaccuguuauccugaa

SEQ ID NO: 1350035 - RNA, 19 nt, Artificial Sequence
  Description of Artificial Sequence: Synthetic oligonucleotide
  Antisense strand to SEQ ID NO: 1350034
uucaggauaacaggugacc

SEQ ID NO: 1350036 - RNA, 19 nt, Artificial Sequence
  Description of Artificial Sequence: Synthetic oligonucleotide
  Sense strand starting at position 2807 of SEQ ID NO: 1242470
gucaccuguuauccugaaa

SEQ ID NO: 1350037 - RNA, 19 nt, Artificial Sequence
  Description of Artificial Sequence: Synthetic oligonucleotide
  Antisense strand to SEQ ID NO: 1350036
uuucaggauaacaggugac

SEQ ID NO: 1350038 - RNA, 19 nt, Artificial Sequence
  Description of Artificial Sequence: Synthetic oligonucleotide
  Sense strand starting at position 2827 of SEQ ID NO: 1242470
agcagagaccaugguuuaa

SEQ ID NO: 1350039 - RNA, 19 nt, Artificial Sequence
  Description of Artificial Sequence: Synthetic oligonucleotide
  Antisense strand to SEQ ID NO: 1350038
uuaaaccauggucucugcu

SEQ ID NO: 1350040 - RNA, 19 nt, Artificial Sequence
  Description of Artificial Sequence: Synthetic oligonucleotide
  Sense strand starting at position 2869 of SEQ ID NO: 1242470
cuguauucugccuagagug

SEQ ID NO: 1350041 - RNA, 19 nt, Artificial Sequence
  Description of Artificial Sequence: Synthetic oligonucleotide
  Antisense strand to SEQ ID NO: 1350040
cacucuaggcagaauacag

SEQ ID NO: 1350042 - RNA, 19 nt, Artificial Sequence
  Description of Artificial Sequence: Synthetic oligonucleotide
  Sense strand starting at position 2959 of SEQ ID NO: 1242470
cccugagguccuggaauua

SEQ ID NO: 1350043 - RNA, 19 nt, Artificial Sequence
  Description of Artificial Sequence: Synthetic oligonucleotide
  Antisense strand to SEQ ID NO: 1350042
uaauuccaggaccucaggg

SEQ ID NO: 1350044 - RNA, 19 nt, Artificial Sequence
  Description of Artificial Sequence: Synthetic oligonucleotide
  Sense strand starting at position 3023 of SEQ ID NO: 1242470
gugucucugggugaguauu

SEQ ID NO: 1350045 - RNA, 19 nt, Artificial Sequence
  Description of Artificial Sequence: Synthetic oligonucleotide
  Antisense strand to SEQ ID NO: 1350044
aauacucacccagagacac

SEQ ID NO: 1350046 - RNA, 19 nt, Artificial Sequence
  Description of Artificial Sequence: Synthetic oligonucleotide
  Sense strand starting at position 3025 of SEQ ID NO: 1242470
gucucugggugaguauuua

SEQ ID NO: 1350047 - RNA, 19 nt, Artificial Sequence
  Description of Artificial Sequence: Synthetic oligonucleotide
  Antisense strand to SEQ ID NO: 1350046
uaaauacucacccagagac

SEQ ID NO: 1350048 - RNA, 19 nt, Artificial Sequence
  Description of Artificial Sequence: Synthetic oligonucleotide
  Sense strand starting at position 3087 of SEQ ID NO: 1242470
gccauccuaugguuaugau

SEQ ID NO: 1350049 - RNA, 19 nt, Artificial Sequence
  Description of Artificial Sequence: Synthetic oligonucleotide
  Antisense strand to SEQ ID NO: 1350048
aucauaaccauaggauggc

SEQ ID NO: 1350050 - RNA, 19 nt, Artificial Sequence
  Description of Artificial Sequence: Synthetic oligonucleotide
  Sense strand starting at position 3096 of SEQ ID NO: 1242470
ugguuaugaugacuaucaa

SEQ ID NO: 1350051 - RNA, 19 nt, Artificial Sequence
  Description of Artificial Sequence: Synthetic oligonucleotide
  Antisense strand to SEQ ID NO: 1350050
uugauagucaucauaacca

SEQ ID NO: 1350052 - RNA, 19 nt, Artificial Sequence
  Description of Artificial Sequence: Synthetic oligonucleotide
  Sense strand starting at position 3322 of SEQ ID NO: 1242470
aguuuauuaucaccaguca

SEQ ID NO: 1350053 - RNA, 19 nt, Artificial Sequence
  Description of Artificial Sequence: Synthetic oligonucleotide
  Antisense strand to SEQ ID NO: 1350052
ugacuggugauaauaaacu

SEQ ID NO: 1350054 - RNA, 19 nt, Artificial Sequence
  Description of Artificial Sequence: Synthetic oligonucleotide
  Sense strand starting at position 3437 of SEQ ID NO: 1242470
ugaggauaauaucuccagu

SEQ ID NO: 1350055 - RNA, 19 nt, Artificial Sequence
  Description of Artificial Sequence: Synthetic oligonucleotide
  Antisense strand to SEQ ID NO: 1350054
acuggagauauuauccuca

SEQ ID NO: 1350056 - RNA, 19 nt, Artificial Sequence
  Description of Artificial Sequence: Synthetic oligonucleotide
  Sense strand starting at position 3439 of SEQ ID NO: 1242470
aggauaauaucuccaguua

SEQ ID NO: 1350057 - RNA, 19 nt, Artificial Sequence
  Description of Artificial Sequence: Synthetic oligonucleotide
  Antisense strand to SEQ ID NO: 1350056
uaacuggagauauuauccu

SEQ ID NO: 1350058 - RNA, 19 nt, Artificial Sequence
  Description of Artificial Sequence: Synthetic oligonucleotide
  Sense strand starting at position 3546 of SEQ ID NO: 1242470
gggcaaaguuaucuaccga

SEQ ID NO: 1350059 - RNA, 19 nt, Artificial Sequence
  Description of Artificial Sequence: Synthetic oligonucleotide
  Antisense strand to SEQ ID NO: 1350058
ucgguagauaacuuugccc

SEQ ID NO: 1350060 - RNA, 19 nt, Artificial Sequence
  Description of Artificial Sequence: Synthetic oligonucleotide
  Sense strand starting at position 3547 of SEQ ID NO: 1242470
ggcaaaguuaucuaccgag

SEQ ID NO: 1350061 - RNA, 19 nt, Artificial Sequence
  Description of Artificial Sequence: Synthetic oligonucleotide
  Antisense strand to SEQ ID NO: 1350060
cucgguagauaacuuugcc

SEQ ID NO: 1350062 - RNA, 19 nt, Artificial Sequence
  Description of Artificial Sequence: Synthetic oligonucleotide
  Sense strand starting at position 3601 of SEQ ID NO: 1242470
gccaaaguucuugaaagac

SEQ ID NO: 1350063 - RNA, 19 nt, Artificial Sequence
  Description of Artificial Sequence: Synthetic oligonucleotide
  Antisense strand to SEQ ID NO: 1350062
gucuuucaagaacuuuggc

SEQ ID NO: 1350064 - RNA, 19 nt, Artificial Sequence
  Description of Artificial Sequence: Synthetic oligonucleotide
  Sense strand starting at position 3643 of SEQ ID NO: 1242470
uugggaaacuuucuguaaa

SEQ ID NO: 1350065 - RNA, 19 nt, Artificial Sequence
  Description of Artificial Sequence: Synthetic oligonucleotide
  Antisense strand to SEQ ID NO: 1350064
uuuacagaaaguuucccaa

SEQ ID NO: 1350066 - RNA, 19 nt, Artificial Sequence
  Description of Artificial Sequence: Synthetic oligonucleotide
  Sense strand starting at position 3728 of SEQ ID NO: 1242470
gccauuauagcacaaagga

SEQ ID NO: 1350067 - RNA, 19 nt, Artificial Sequence
  Description of Artificial Sequence: Synthetic oligonucleotide
  Antisense strand to SEQ ID NO: 1350066
uccuuugugcuauaauggc

SEQ ID NO: 1350068 - RNA, 19 nt, Artificial Sequence
  Description of Artificial Sequence: Synthetic oligonucleotide
  Sense strand starting at position 314 of SEQ ID NO: 1242471
aucugacaugcaugugaau

SEQ ID NO: 1350069 - RNA, 19 nt, Artificial Sequence
  Description of Artificial Sequence: Synthetic oligonucleotide
  Antisense strand to SEQ ID NO: 1350068
auucacaugcaugucagau

SEQ ID NO: 1350070 - RNA, 19 nt, Artificial Sequence
  Description of Artificial Sequence: Synthetic oligonucleotide
  Sense strand starting at position 320 of SEQ ID NO: 1242471
caugcaugugaauauguca

SEQ ID NO: 1350071 - RNA, 19 nt, Artificial Sequence
  Description of Artificial Sequence: Synthetic oligonucleotide
  Antisense strand to SEQ ID NO: 1350070
ugacauauucacaugcaug

SEQ ID NO: 1350072 - RNA, 19 nt, Artificial Sequence
  Description of Artificial Sequence: Synthetic oligonucleotide
  Sense strand starting at position 327 of SEQ ID NO: 1242471
gugaauaugucauugauaa

SEQ ID NO: 1350073 - RNA, 19 nt, Artificial Sequence
  Description of Artificial Sequence: Synthetic oligonucleotide
  Antisense strand to SEQ ID NO: 1350072
uuaucaaugacauauucac

SEQ ID NO: 1350074 - RNA, 19 nt, Artificial Sequence
  Description of Artificial Sequence: Synthetic oligonucleotide
  Sense strand starting at position 341 of SEQ ID NO: 1242471
gauaaagagguuuguaguu

SEQ ID NO: 1350075 - RNA, 19 nt, Artificial Sequence
  Description of Artificial Sequence: Synthetic oligonucleotide
  Antisense strand to SEQ ID NO: 1350074
aacuacaaaccucuuuauc

SEQ ID NO: 1350076 - RNA, 19 nt, Artificial Sequence
  Description of Artificial Sequence: Synthetic oligonucleotide
  Sense strand starting at position 355 of SEQ ID NO: 1242471
uaguucucugcggguauuu

SEQ ID NO: 1350077 - RNA, 19 nt, Artificial Sequence
  Description of Artificial Sequence: Synthetic oligonucleotide
  Antisense strand to SEQ ID NO: 1350076
aaauacccgcagagaacua

SEQ ID NO: 1350078 - RNA, 19 nt, Artificial Sequence
  Description of Artificial Sequence: Synthetic oligonucleotide
  Sense strand starting at position 742 of SEQ ID NO: 1242471
acagaauuguuaccaauug

SEQ ID NO: 1350079 - RNA, 19 nt, Artificial Sequence
  Description of Artificial Sequence: Synthetic oligonucleotide
  Antisense strand to SEQ ID NO: 1350078
caauugguaacaauucugu

SEQ ID NO: 1350080 - RNA, 19 nt, Artificial Sequence
  Description of Artificial Sequence: Synthetic oligonucleotide
  Sense strand starting at position 771 of SEQ ID NO: 1242471
ccuguaauggguuaggauu

SEQ ID NO: 1350081 - RNA, 19 nt, Artificial Sequence
  Description of Artificial Sequence: Synthetic oligonucleotide
  Antisense strand to SEQ ID NO: 1350080
aauccuaacccauuacagg

SEQ ID NO: 1350082 - RNA, 19 nt, Artificial Sequence
  Description of Artificial Sequence: Synthetic oligonucleotide
  Sense strand starting at position 828 of SEQ ID NO: 1242471
cuagaugcuugggcagaua

SEQ ID NO: 1350083 - RNA, 19 nt, Artificial Sequence
  Description of Artificial Sequence: Synthetic oligonucleotide
  Antisense strand to SEQ ID NO: 1350082
uaucugcccaagcaucuag

SEQ ID NO: 1350084 - RNA, 19 nt, Artificial Sequence
  Description of Artificial Sequence: Synthetic oligonucleotide
  Sense strand starting at position 840 of SEQ ID NO: 1242471
gcagauauuuaagcugcca

SEQ ID NO: 1350085 - RNA, 19 nt, Artificial Sequence
  Description of Artificial Sequence: Synthetic oligonucleotide
  Antisense strand to SEQ ID NO: 1350084
uggcagcuuaaauaucugc

SEQ ID NO: 1350086 - RNA, 19 nt, Artificial Sequence
  Description of Artificial Sequence: Synthetic oligonucleotide
  Sense strand starting at position 1133 of SEQ ID NO: 1242471
aggugacagccaugaugua

SEQ ID NO: 1350087 - RNA, 19 nt, Artificial Sequence
  Description of Artificial Sequence: Synthetic oligonucleotide
  Antisense strand to SEQ ID NO: 1350086
uacaucauggcugucaccu

SEQ ID NO: 1350088 - RNA, 19 nt, Artificial Sequence
  Description of Artificial Sequence: Synthetic oligonucleotide
  Sense strand starting at position 1189 of SEQ ID NO: 1242471
ggauaauaguacuuacuca

SEQ ID NO: 1350089 - RNA, 19 nt, Artificial Sequence
  Description of Artificial Sequence: Synthetic oligonucleotide
  Antisense strand to SEQ ID NO: 1350088
ugaguaaguacuauuaucc

SEQ ID NO: 1350090 - RNA, 19 nt, Artificial Sequence
  Description of Artificial Sequence: Synthetic oligonucleotide
  Sense strand starting at position 1213 of SEQ ID NO: 1242471
ccacgcaugguugauauaa

SEQ ID NO: 1350091 - RNA, 19 nt, Artificial Sequence
  Description of Artificial Sequence: Synthetic oligonucleotide
  Antisense strand to SEQ ID NO: 1350090
uuauaucaaccaugcgugg

SEQ ID NO: 1350092 - RNA, 19 nt, Artificial Sequence
  Description of Artificial Sequence: Synthetic oligonucleotide
  Sense strand starting at position 1330 of SEQ ID NO: 1242471
uggcguugcaaccagagaa

SEQ ID NO: 1350093 - RNA, 19 nt, Artificial Sequence
  Description of Artificial Sequence: Synthetic oligonucleotide
  Antisense strand to SEQ ID NO: 1350092
uucucugguugcaacgcca

SEQ ID NO: 1350094 - RNA, 19 nt, Artificial Sequence
  Description of Artificial Sequence: Synthetic oligonucleotide
  Sense strand starting at position 1376 of SEQ ID NO: 1242471
guauuaugcaaccacggua

SEQ ID NO: 1350095 - RNA, 19 nt, Artificial Sequence
  Description of Artificial Sequence: Synthetic oligonucleotide
  Antisense strand to SEQ ID NO: 1350094
uaccgugguugcauaauac

SEQ ID NO: 1350096 - RNA, 19 nt, Artificial Sequence
  Description of Artificial Sequence: Synthetic oligonucleotide
  Sense strand starting at position 1381 of SEQ ID NO: 1242471
augcaaccacgguaaauau

SEQ ID NO: 1350097 - RNA, 19 nt, Artificial Sequence
  Description of Artificial Sequence: Synthetic oligonucleotide
  Antisense strand to SEQ ID NO: 1350096
auauuuaccgugguugcau

SEQ ID NO: 1350098 - RNA, 19 nt, Artificial Sequence
  Description of Artificial Sequence: Synthetic oligonucleotide
  Sense strand starting at position 1392 of SEQ ID NO: 1242471
guaaauauacauugaucug

SEQ ID NO: 1350099 - RNA, 19 nt, Artificial Sequence
  Description of Artificial Sequence: Synthetic oligonucleotide
  Antisense strand to SEQ ID NO: 1350098
cagaucaauguauauuuac

SEQ ID NO: 1350100 - RNA, 19 nt, Artificial Sequence
  Description of Artificial Sequence: Synthetic oligonucleotide
  Sense strand starting at position 1638 of SEQ ID NO: 1242471
uuucuugaagccuacagaa

SEQ ID NO: 1350101 - RNA, 19 nt, Artificial Sequence
  Description of Artificial Sequence: Synthetic oligonucleotide
  Antisense strand to SEQ ID NO: 1350100
uucuguaggcuucaagaaa

SEQ ID NO: 1350102 - RNA, 19 nt, Artificial Sequence
  Description of Artificial Sequence: Synthetic oligonucleotide
  Sense strand starting at position 1650 of SEQ ID NO: 1242471
uacagaaggucucccagaa

SEQ ID NO: 1350103 - RNA, 19 nt, Artificial Sequence
  Description of Artificial Sequence: Synthetic oligonucleotide
  Antisense strand to SEQ ID NO: 1350102
uucugggagaccuucugua

SEQ ID NO: 1350104 - RNA, 19 nt, Artificial Sequence
  Description of Artificial Sequence: Synthetic oligonucleotide
  Sense strand starting at position 1754 of SEQ ID NO: 1242471
uacacaaguggacguauua

SEQ ID NO: 1350105 - RNA, 19 nt, Artificial Sequence
  Description of Artificial Sequence: Synthetic oligonucleotide
  Antisense strand to SEQ ID NO: 1350104
uaauacguccacuugugua

SEQ ID NO: 1350106 - RNA, 19 nt, Artificial Sequence
  Description of Artificial Sequence: Synthetic oligonucleotide
  Sense strand starting at position 1791 of SEQ ID NO: 1242471
gcugcagacccuuaagauc

SEQ ID NO: 1350107 - RNA, 19 nt, Artificial Sequence
  Description of Artificial Sequence: Synthetic oligonucleotide
  Antisense strand to SEQ ID NO: 1350106
gaucuuaagggucugcagc

SEQ ID NO: 1350108 - RNA, 19 nt, Artificial Sequence
  Description of Artificial Sequence: Synthetic oligonucleotide
  Sense strand starting at position 2046 of SEQ ID NO: 1242471
agauucuagaagcguaacu

SEQ ID NO: 1350109 - RNA, 19 nt, Artificial Sequence
  Description of Artificial Sequence: Synthetic oligonucleotide
  Antisense strand to SEQ ID NO: 1350108
aguuacgcuucuagaaucu

SEQ ID NO: 1350110 - RNA, 19 nt, Artificial Sequence
  Description of Artificial Sequence: Synthetic oligonucleotide
  Sense strand starting at position 2117 of SEQ ID NO: 1242471
caguuaugguucccaggau

SEQ ID NO: 1350111 - RNA, 19 nt, Artificial Sequence
  Description of Artificial Sequence: Synthetic oligonucleotide
  Antisense strand to SEQ ID NO: 1350110
auccugggaaccauaacug

SEQ ID NO: 1350112 - RNA, 19 nt, Artificial Sequence
  Description of Artificial Sequence: Synthetic oligonucleotide
  Sense strand starting at position 2150 of SEQ ID NO: 1242471
cugauuauuuaugaacaug

SEQ ID NO: 1350113 - RNA, 19 nt, Artificial Sequence
  Description of Artificial Sequence: Synthetic oligonucleotide
  Antisense strand to SEQ ID NO: 1350112
cauguucauaaauaaucag

SEQ ID NO: 1350114 - RNA, 19 nt, Artificial Sequence
  Description of Artificial Sequence: Synthetic oligonucleotide
  Sense strand starting at position 2284 of SEQ ID NO: 1242471
cacacuugugcuggaaauc

SEQ ID NO: 1350115 - RNA, 19 nt, Artificial Sequence
  Description of Artificial Sequence: Synthetic oligonucleotide
  Antisense strand to SEQ ID NO: 1350114
gauuuccagcacaagugug

SEQ ID NO: 1350116 - RNA, 19 nt, Artificial Sequence
  Description of Artificial Sequence: Synthetic oligonucleotide
  Sense strand starting at position 2614 of SEQ ID NO: 1242471
uguuucuuccuggaguaau

SEQ ID NO: 1350117 - RNA, 19 nt, Artificial Sequence
  Description of Artificial Sequence: Synthetic oligonucleotide
  Antisense strand to SEQ ID NO: 1350116
auuacuccaggaagaaaca

SEQ ID NO: 1350118 - RNA, 19 nt, Artificial Sequence
  Description of Artificial Sequence: Synthetic oligonucleotide
  Sense strand starting at position 2624 of SEQ ID NO: 1242471
uggaguaauaaauguguuc

SEQ ID NO: 1350119 - RNA, 19 nt, Artificial Sequence
  Description of Artificial Sequence: Synthetic oligonucleotide
  Antisense strand to SEQ ID NO: 1350118
gaacacauuuauuacucca

SEQ ID NO: 1350120 - RNA, 19 nt, Artificial Sequence
  Description of Artificial Sequence: Synthetic oligonucleotide
  Sense strand starting at position 2702 of SEQ ID NO: 1242471
uguacacgaaauugugaaa

SEQ ID NO: 1350121 - RNA, 19 nt, Artificial Sequence
  Description of Artificial Sequence: Synthetic oligonucleotide
  Antisense strand to SEQ ID NO: 1350120
uuucacaauuucguguaca

SEQ ID NO: 1350122 - RNA, 19 nt, Artificial Sequence
  Description of Artificial Sequence: Synthetic oligonucleotide
  Sense strand starting at position 2711 of SEQ ID NO: 1242471
aauugugaaacguauggga

SEQ ID NO: 1350123 - RNA, 19 nt, Artificial Sequence
  Description of Artificial Sequence: Synthetic oligonucleotide
  Antisense strand to SEQ ID NO: 1350122
ucccauacguuucacaauu

SEQ ID NO: 1350124 - RNA, 19 nt, Artificial Sequence
  Description of Artificial Sequence: Synthetic oligonucleotide
  Sense strand starting at position 2713 of SEQ ID NO: 1242471
uugugaaacguaugggaaa

SEQ ID NO: 1350125 - RNA, 19 nt, Artificial Sequence
  Description of Artificial Sequence: Synthetic oligonucleotide
  Antisense strand to SEQ ID NO: 1350124
uuucccauacguuucacaa

SEQ ID NO: 1350126 - RNA, 19 nt, Artificial Sequence
  Description of Artificial Sequence: Synthetic oligonucleotide
  Sense strand starting at position 2715 of SEQ ID NO: 1242471
gugaaacguaugggaaaua

SEQ ID NO: 1350127 - RNA, 19 nt, Artificial Sequence
  Description of Artificial Sequence: Synthetic oligonucleotide
  Antisense strand to SEQ ID NO: 1350126
uauuucccauacguuucac

SEQ ID NO: 1350128 - RNA, 19 nt, Artificial Sequence
  Description of Artificial Sequence: Synthetic oligonucleotide
  Sense strand starting at position 2891 of SEQ ID NO: 1242471
ggauacuuguccucuucca

SEQ ID NO: 1350129 - RNA, 19 nt, Artificial Sequence
  Description of Artificial Sequence: Synthetic oligonucleotide
  Antisense strand to SEQ ID NO: 1350128
uggaagaggacaaguaucc

SEQ ID NO: 1350130 - RNA, 19 nt, Artificial Sequence
  Description of Artificial Sequence: Synthetic oligonucleotide
  Sense strand starting at position 3035 of SEQ ID NO: 1242471
auuaguuagggugagaucu

SEQ ID NO: 1350131 - RNA, 19 nt, Artificial Sequence
  Description of Artificial Sequence: Synthetic oligonucleotide
  Antisense strand to SEQ ID NO: 1350130
agaucucacccuaacuaau

SEQ ID NO: 1350132 - RNA, 19 nt, Artificial Sequence
  Description of Artificial Sequence: Synthetic oligonucleotide
  Sense strand starting at position 3041 of SEQ ID NO: 1242471
uagggugagaucugauugu

SEQ ID NO: 1350133 - RNA, 19 nt, Artificial Sequence
  Description of Artificial Sequence: Synthetic oligonucleotide
  Antisense strand to SEQ ID NO: 1350132
acaaucagaucucacccua

SEQ ID NO: 1350134 - RNA, 19 nt, Artificial Sequence
  Description of Artificial Sequence: Synthetic oligonucleotide
  Sense strand starting at position 3432 of SEQ ID NO: 1242471
ugucaagugagccaauagu

SEQ ID NO: 1350135 - RNA, 19 nt, Artificial Sequence
  Description of Artificial Sequence: Synthetic oligonucleotide
  Antisense strand to SEQ ID NO: 1350134
acuauuggcucacuugaca

SEQ ID NO: 1350136 - RNA, 19 nt, Artificial Sequence
  Description of Artificial Sequence: Synthetic oligonucleotide
  Sense strand starting at position 3458 of SEQ ID NO: 1242471
gcaaguuaugaauagcaac

SEQ ID NO: 1350137 - RNA, 19 nt, Artificial Sequence
  Description of Artificial Sequence: Synthetic oligonucleotide
  Antisense strand to SEQ ID NO: 1350136
guugcuauucauaacuugc

SEQ ID NO: 1350138 - RNA, 19 nt, Artificial Sequence
  Description of Artificial Sequence: Synthetic oligonucleotide
  Sense strand starting at position 3619 of SEQ ID NO: 1242471
uucuaauaaagguggaguu

SEQ ID NO: 1350139 - RNA, 19 nt, Artificial Sequence
  Description of Artificial Sequence: Synthetic oligonucleotide
  Antisense strand to SEQ ID NO: 1350138
aacuccaccuuuauuagaa

SEQ ID NO: 1350140 - RNA, 19 nt, Artificial Sequence
  Description of Artificial Sequence: Synthetic oligonucleotide
  Sense strand starting at position 3629 of SEQ ID NO: 1242471
gguggaguucucuaagauc

SEQ ID NO: 1350141 - RNA, 19 nt, Artificial Sequence
  Description of Artificial Sequence: Synthetic oligonucleotide
  Antisense strand to SEQ ID NO: 1350140
gaucuuagagaacuccacc

SEQ ID NO: 1350142 - RNA, 19 nt, Artificial Sequence
  Description of Artificial Sequence: Synthetic oligonucleotide
  Sense strand starting at position 3657 of SEQ ID NO: 1242471
uuguuucuuccagagacuu

SEQ ID NO: 1350143 - RNA, 19 nt, Artificial Sequence
  Description of Artificial Sequence: Synthetic oligonucleotide
  Antisense strand to SEQ ID NO: 1350142
aagucucuggaagaaacaa

SEQ ID NO: 1350144 - RNA, 19 nt, Artificial Sequence
  Description of Artificial Sequence: Synthetic oligonucleotide
  Sense strand starting at position 3872 of SEQ ID NO: 1242471
ucaugaaauuacuccuggu

SEQ ID NO: 1350145 - RNA, 19 nt, Artificial Sequence
  Description of Artificial Sequence: Synthetic oligonucleotide
  Antisense strand to SEQ ID NO: 1350144
accaggaguaauuucauga

SEQ ID NO: 1350146 - RNA, 19 nt, Artificial Sequence
  Description of Artificial Sequence: Synthetic oligonucleotide
  Sense strand starting at position 3876 of SEQ ID NO: 1242471
gaaauuacuccugguauug

SEQ ID NO: 1350147 - RNA, 19 nt, Artificial Sequence
  Description of Artificial Sequence: Synthetic oligonucleotide
  Antisense strand to SEQ ID NO: 1350146
caauaccaggaguaauuuc

SEQ ID NO: 1350148 - RNA, 19 nt, Artificial Sequence
  Description of Artificial Sequence: Synthetic oligonucleotide
  Sense strand starting at position 64 of SEQ ID NO: 1242472
agagcaugauuugaaauug

SEQ ID NO: 1350149 - RNA, 19 nt, Artificial Sequence
  Description of Artificial Sequence: Synthetic oligonucleotide
  Antisense strand to SEQ ID NO: 1350148
caauuucaaaucaugcucu

SEQ ID NO: 1350150 - RNA, 19 nt, Artificial Sequence
  Description of Artificial Sequence: Synthetic oligonucleotide
  Sense strand starting at position 169 of SEQ ID NO: 1242472
cuggcuucucaaugaacau

SEQ ID NO: 1350151 - RNA, 19 nt, Artificial Sequence
  Description of Artificial Sequence: Synthetic oligonucleotide
  Antisense strand to SEQ ID NO: 1350150
auguucauugagaagccag

SEQ ID NO: 1350152 - RNA, 19 nt, Artificial Sequence
  Description of Artificial Sequence: Synthetic oligonucleotide
  Sense strand starting at position 304 of SEQ ID NO: 1242472
agacuuuaaguuugcaaga

SEQ ID NO: 1350153 - RNA, 19 nt, Artificial Sequence
  Description of Artificial Sequence: Synthetic oligonucleotide
  Antisense strand to SEQ ID NO: 1350152
ucuugcaaacuuaaagucu

SEQ ID NO: 1350154 - RNA, 19 nt, Artificial Sequence
  Description of Artificial Sequence: Synthetic oligonucleotide
  Sense strand starting at position 309 of SEQ ID NO: 1242472
uuaaguuugcaagaaugua

SEQ ID NO: 1350155 - RNA, 19 nt, Artificial Sequence
  Description of Artificial Sequence: Synthetic oligonucleotide
  Antisense strand to SEQ ID NO: 1350154
uacauucuugcaaacuuaa

SEQ ID NO: 1350156 - RNA, 19 nt, Artificial Sequence
  Description of Artificial Sequence: Synthetic oligonucleotide
  Sense strand starting at position 317 of SEQ ID NO: 1242472
gcaagaauguacgcaagaa

SEQ ID NO: 1350157 - RNA, 19 nt, Artificial Sequence
  Description of Artificial Sequence: Synthetic oligonucleotide
  Antisense strand to SEQ ID NO: 1350156
uucuugcguacauucuugc

SEQ ID NO: 1350158 - RNA, 19 nt, Artificial Sequence
  Description of Artificial Sequence: Synthetic oligonucleotide
  Sense strand starting at position 321 of SEQ ID NO: 1242472
gaauguacgcaagaaugua

SEQ ID NO: 1350159 - RNA, 19 nt, Artificial Sequence
  Description of Artificial Sequence: Synthetic oligonucleotide
  Antisense strand to SEQ ID NO: 1350158
uacauucuugcguacauuc

SEQ ID NO: 1350160 - RNA, 19 nt, Artificial Sequence
  Description of Artificial Sequence: Synthetic oligonucleotide
  Sense strand starting at position 337 of SEQ ID NO: 1242472
guacucauuuagucagcca

SEQ ID NO: 1350161 - RNA, 19 nt, Artificial Sequence
  Description of Artificial Sequence: Synthetic oligonucleotide
  Antisense strand to SEQ ID NO: 1350160
uggcugacuaaaugaguac

SEQ ID NO: 1350162 - RNA, 19 nt, Artificial Sequence
  Description of Artificial Sequence: Synthetic oligonucleotide
  Sense strand starting at position 351 of SEQ ID NO: 1242472
agccaauacugacugaaca

SEQ ID NO: 1350163 - RNA, 19 nt, Artificial Sequence
  Description of Artificial Sequence: Synthetic oligonucleotide
  Antisense strand to SEQ ID NO: 1350162
uguucagucaguauuggcu

SEQ ID NO: 1350164 - RNA, 19 nt, Artificial Sequence
  Description of Artificial Sequence: Synthetic oligonucleotide
  Sense strand starting at position 845 of SEQ ID NO: 1242472
gagggugagagaugugcau

SEQ ID NO: 1350165 - RNA, 19 nt, Artificial Sequence
  Description of Artificial Sequence: Synthetic oligonucleotide
  Antisense strand to SEQ ID NO: 1350164
augcacaucucucacccuc

SEQ ID NO: 1350166 - RNA, 19 nt, Artificial Sequence
  Description of Artificial Sequence: Synthetic oligonucleotide
  Sense strand starting at position 847 of SEQ ID NO: 1242472
gggugagagaugugcauaa

SEQ ID NO: 1350167 - RNA, 19 nt, Artificial Sequence
  Description of Artificial Sequence: Synthetic oligonucleotide
  Antisense strand to SEQ ID NO: 1350166
uuaugcacaucucucaccc

SEQ ID NO: 1350168 - RNA, 19 nt, Artificial Sequence
  Description of Artificial Sequence: Synthetic oligonucleotide
  Sense strand starting at position 849 of SEQ ID NO: 1242472
gugagagaugugcauaauc

SEQ ID NO: 1350169 - RNA, 19 nt, Artificial Sequence
  Description of Artificial Sequence: Synthetic oligonucleotide
  Antisense strand to SEQ ID NO: 1350168
gauuaugcacaucucucac

SEQ ID NO: 1350170 - RNA, 19 nt, Artificial Sequence
  Description of Artificial Sequence: Synthetic oligonucleotide
  Sense strand starting at position 954 of SEQ ID NO: 1242472
agccuuaaaggguaaguga

SEQ ID NO: 1350171 - RNA, 19 nt, Artificial Sequence
  Description of Artificial Sequence: Synthetic oligonucleotide
  Antisense strand to SEQ ID NO: 1350170
ucacuuacccuuuaaggcu

SEQ ID NO: 1350172 - RNA, 19 nt, Artificial Sequence
  Description of Artificial Sequence: Synthetic oligonucleotide
  Sense strand starting at position 973 of SEQ ID NO: 1242472
aguuaagacuggccuggaa

SEQ ID NO: 1350173 - RNA, 19 nt, Artificial Sequence
  Description of Artificial Sequence: Synthetic oligonucleotide
  Antisense strand to SEQ ID NO: 1350172
uuccaggccagucuuaacu

SEQ ID NO: 1350174 - RNA, 19 nt, Artificial Sequence
  Description of Artificial Sequence: Synthetic oligonucleotide
  Sense strand starting at position 975 of SEQ ID NO: 1242472
uuaagacuggccuggaaga

SEQ ID NO: 1350175 - RNA, 19 nt, Artificial Sequence
  Description of Artificial Sequence: Synthetic oligonucleotide
  Antisense strand to SEQ ID NO: 1350174
ucuuccaggccagucuuaa

SEQ ID NO: 1350176 - RNA, 19 nt, Artificial Sequence
  Description of Artificial Sequence: Synthetic oligonucleotide
  Sense strand starting at position 1004 of SEQ ID NO: 1242472
gcauuccaggcagauugaa

SEQ ID NO: 1350177 - RNA, 19 nt, Artificial Sequence
  Description of Artificial Sequence: Synthetic oligonucleotide
  Antisense strand to SEQ ID NO: 1350176
uucaaucugccuggaaugc

SEQ ID NO: 1350178 - RNA, 19 nt, Artificial Sequence
  Description of Artificial Sequence: Synthetic oligonucleotide
  Sense strand starting at position 1094 of SEQ ID NO: 1242472
agauguaguguguaggaaa

SEQ ID NO: 1350179 - RNA, 19 nt, Artificial Sequence
  Description of Artificial Sequence: Synthetic oligonucleotide
  Antisense strand to SEQ ID NO: 1350178
uuuccuacacacuacaucu

SEQ ID NO: 1350180 - RNA, 19 nt, Artificial Sequence
  Description of Artificial Sequence: Synthetic oligonucleotide
  Sense strand starting at position 1208 of SEQ ID NO: 1242472
uuuauuuguuuccuuccga

SEQ ID NO: 1350181 - RNA, 19 nt, Artificial Sequence
  Description of Artificial Sequence: Synthetic oligonucleotide
  Antisense strand to SEQ ID NO: 1350180
ucggaaggaaacaaauaaa

SEQ ID NO: 1350182 - RNA, 19 nt, Artificial Sequence
  Description of Artificial Sequence: Synthetic oligonucleotide
  Sense strand starting at position 1209 of SEQ ID NO: 1242472
uuauuuguuuccuuccgaa

SEQ ID NO: 1350183 - RNA, 19 nt, Artificial Sequence
  Description of Artificial Sequence: Synthetic oligonucleotide
  Antisense strand to SEQ ID NO: 1350182
uucggaaggaaacaaauaa

SEQ ID NO: 1350184 - RNA, 19 nt, Artificial Sequence
  Description of Artificial Sequence: Synthetic oligonucleotide
  Sense strand starting at position 1235 of SEQ ID NO: 1242472
auagucauauuagucucau

SEQ ID NO: 1350185 - RNA, 19 nt, Artificial Sequence
  Description of Artificial Sequence: Synthetic oligonucleotide
  Antisense strand to SEQ ID NO: 1350184
augagacuaauaugacuau

SEQ ID NO: 1350186 - RNA, 19 nt, Artificial Sequence
  Description of Artificial Sequence: Synthetic oligonucleotide
  Sense strand starting at position 1284 of SEQ ID NO: 1242472
ccaaguucugguuagcaag

SEQ ID NO: 1350187 - RNA, 19 nt, Artificial Sequence
  Description of Artificial Sequence: Synthetic oligonucleotide
  Antisense strand to SEQ ID NO: 1350186
cuugcuaaccagaacuugg

SEQ ID NO: 1350188 - RNA, 19 nt, Artificial Sequence
  Description of Artificial Sequence: Synthetic oligonucleotide
  Sense strand starting at position 2300 of SEQ ID NO: 1242472
ccgagagaagcuuagcauu

SEQ ID NO: 1350189 - RNA, 19 nt, Artificial Sequence
  Description of Artificial Sequence: Synthetic oligonucleotide
  Antisense strand to SEQ ID NO: 1350188
aaugcuaagcuucucucgg

SEQ ID NO: 1350190 - RNA, 19 nt, Artificial Sequence
  Description of Artificial Sequence: Synthetic oligonucleotide
  Sense strand starting at position 2366 of SEQ ID NO: 1242472
gggcgugucgagaaguuuc

SEQ ID NO: 1350191 - RNA, 19 nt, Artificial Sequence
  Description of Artificial Sequence: Synthetic oligonucleotide
  Antisense strand to SEQ ID NO: 1350190
gaaacuucucgacacgccc

SEQ ID NO: 1350192 - RNA, 19 nt, Artificial Sequence
  Description of Artificial Sequence: Synthetic oligonucleotide
  Sense strand starting at position 2474 of SEQ ID NO: 1242472
gagggaauuugggaugguu

SEQ ID NO: 1350193 - RNA, 19 nt, Artificial Sequence
  Description of Artificial Sequence: Synthetic oligonucleotide
  Antisense strand to SEQ ID NO: 1350192
aaccaucccaaauucccuc

SEQ ID NO: 1350194 - RNA, 19 nt, Artificial Sequence
  Description of Artificial Sequence: Synthetic oligonucleotide
  Sense strand starting at position 2492 of SEQ ID NO: 1242472
uugaaucgaacuuguugaa

SEQ ID NO: 1350195 - RNA, 19 nt, Artificial Sequence
  Description of Artificial Sequence: Synthetic oligonucleotide
  Antisense strand to SEQ ID NO: 1350194
uucaacaaguucgauucaa

SEQ ID NO: 1350196 - RNA, 19 nt, Artificial Sequence
  Description of Artificial Sequence: Synthetic oligonucleotide
  Sense strand starting at position 2504 of SEQ ID NO: 1242472
uguugaaaucccuguggac

SEQ ID NO: 1350197 - RNA, 19 nt, Artificial Sequence
  Description of Artificial Sequence: Synthetic oligonucleotide
  Antisense strand to SEQ ID NO: 1350196
guccacagggauuucaaca

SEQ ID NO: 1350198 - RNA, 19 nt, Artificial Sequence
  Description of Artificial Sequence: Synthetic oligonucleotide
  Sense strand starting at position 2618 of SEQ ID NO: 1242472
cuaggaguuuaucugcaga

SEQ ID NO: 1350199 - RNA, 19 nt, Artificial Sequence
  Description of Artificial Sequence: Synthetic oligonucleotide
  Antisense strand to SEQ ID NO: 1350198
ucugcagauaaacuccuag

SEQ ID NO: 1350200 - RNA, 19 nt, Artificial Sequence
  Description of Artificial Sequence: Synthetic oligonucleotide
  Sense strand starting at position 2621 of SEQ ID NO: 1242472
ggaguuuaucugcagaagg

SEQ ID NO: 1350201 - RNA, 19 nt, Artificial Sequence
  Description of Artificial Sequence: Synthetic oligonucleotide
  Antisense strand to SEQ ID NO: 1350200
ccuucugcagauaaacucc

SEQ ID NO: 1350202 - RNA, 19 nt, Artificial Sequence
  Description of Artificial Sequence: Synthetic oligonucleotide
  Sense strand starting at position 2623 of SEQ ID NO: 1242472
aguuuaucugcagaaggua

SEQ ID NO: 1350203 - RNA, 19 nt, Artificial Sequence
  Description of Artificial Sequence: Synthetic oligonucleotide
  Antisense strand to SEQ ID NO: 1350202
uaccuucugcagauaaacu

SEQ ID NO: 1350204 - RNA, 19 nt, Artificial Sequence
  Description of Artificial Sequence: Synthetic oligonucleotide
  Sense strand starting at position 2707 of SEQ ID NO: 1242472
acaguuugggaaugguuaa

SEQ ID NO: 1350205 - RNA, 19 nt, Artificial Sequence
  Description of Artificial Sequence: Synthetic oligonucleotide
  Antisense strand to SEQ ID NO: 1350204
uuaaccauucccaaacugu

SEQ ID NO: 1350206 - RNA, 19 nt, Artificial Sequence
  Description of Artificial Sequence: Synthetic oligonucleotide
  Sense strand starting at position 2720 of SEQ ID NO: 1242472
gguuaaauaagguauggua

SEQ ID NO: 1350207 - RNA, 19 nt, Artificial Sequence
  Description of Artificial Sequence: Synthetic oligonucleotide
  Antisense strand to SEQ ID NO: 1350206
uaccauaccuuauuuaacc

SEQ ID NO: 1350208 - RNA, 19 nt, Artificial Sequence
  Description of Artificial Sequence: Synthetic oligonucleotide
  Sense strand starting at position 2722 of SEQ ID NO: 1242472
uuaaauaagguaugguaca

SEQ ID NO: 1350209 - RNA, 19 nt, Artificial Sequence
  Description of Artificial Sequence: Synthetic oligonucleotide
  Antisense strand to SEQ ID NO: 1350208
uguaccauaccuuauuuaa

SEQ ID NO: 1350210 - RNA, 19 nt, Artificial Sequence
  Description of Artificial Sequence: Synthetic oligonucleotide
  Sense strand starting at position 3147 of SEQ ID NO: 1242472
ugcagugaauucccuaaau

SEQ ID NO: 1350211 - RNA, 19 nt, Artificial Sequence
  Description of Artificial Sequence: Synthetic oligonucleotide
  Antisense strand to SEQ ID NO: 1350210
auuuagggaauucacugca

SEQ ID NO: 1350212 - RNA, 19 nt, Artificial Sequence
  Description of Artificial Sequence: Synthetic oligonucleotide
  Sense strand starting at position 3502 of SEQ ID NO: 1242472
uauaauauuguguaccgga

SEQ ID NO: 1350213 - RNA, 19 nt, Artificial Sequence
  Description of Artificial Sequence: Synthetic oligonucleotide
  Antisense strand to SEQ ID NO: 1350212
uccgguacacaauauuaua

SEQ ID NO: 1350214 - RNA, 19 nt, Artificial Sequence
  Description of Artificial Sequence: Synthetic oligonucleotide
  Sense strand starting at position 3624 of SEQ ID NO: 1242472
ccucuaggaucaguggaau

SEQ ID NO: 1350215 - RNA, 19 nt, Artificial Sequence
  Description of Artificial Sequence: Synthetic oligonucleotide
  Antisense strand to SEQ ID NO: 1350214
auuccacugauccuagagg

SEQ ID NO: 1350216 - RNA, 19 nt, Artificial Sequence
  Description of Artificial Sequence: Synthetic oligonucleotide
  Sense strand starting at position 3676 of SEQ ID NO: 1242472
gaaggucgguuaccugaau

SEQ ID NO: 1350217 - RNA, 19 nt, Artificial Sequence
  Description of Artificial Sequence: Synthetic oligonucleotide
  Antisense strand to SEQ ID NO: 1350216
auucagguaaccgaccuuc

SEQ ID NO: 1350218 - RNA, 19 nt, Artificial Sequence
  Description of Artificial Sequence: Synthetic oligonucleotide
  Sense strand starting at position 3677 of SEQ ID NO: 1242472
aaggucgguuaccugaaua

SEQ ID NO: 1350219 - RNA, 19 nt, Artificial Sequence
  Description of Artificial Sequence: Synthetic oligonucleotide
  Antisense strand to SEQ ID NO: 1350218
uauucagguaaccgaccuu

SEQ ID NO: 1350220 - RNA, 19 nt, Artificial Sequence
  Description of Artificial Sequence: Synthetic oligonucleotide
  Sense strand starting at position 3685 of SEQ ID NO: 1242472
uuaccugaauauguguuua

SEQ ID NO: 1350221 - RNA, 19 nt, Artificial Sequence
  Description of Artificial Sequence: Synthetic oligonucleotide
  Antisense strand to SEQ ID NO: 1350220
uaaacacauauucagguaa

SEQ ID NO: 1350222 - RNA, 19 nt, Artificial Sequence
  Description of Artificial Sequence: Synthetic oligonucleotide
  Sense strand starting at position 3689 of SEQ ID NO: 1242472
cugaauauguguuuaggga

SEQ ID NO: 1350223 - RNA, 19 nt, Artificial Sequence
  Description of Artificial Sequence: Synthetic oligonucleotide
  Antisense strand to SEQ ID NO: 1350222
ucccuaaacacauauucag

SEQ ID NO: 1350224 - RNA, 19 nt, Artificial Sequence
  Description of Artificial Sequence: Synthetic oligonucleotide
  Sense strand starting at position 3696 of SEQ ID NO: 1242472
uguguuuagggagauugau

SEQ ID NO: 1350225 - RNA, 19 nt, Artificial Sequence
  Description of Artificial Sequence: Synthetic oligonucleotide
  Antisense strand to SEQ ID NO: 1350224
aucaaucucccuaaacaca

SEQ ID NO: 1350226 - RNA, 19 nt, Artificial Sequence
  Description of Artificial Sequence: Synthetic oligonucleotide
  Sense strand starting at position 3896 of SEQ ID NO: 1242472
ggcugccugccauaacaaa

SEQ ID NO: 1350227 - RNA, 19 nt, Artificial Sequence
  Description of Artificial Sequence: Synthetic oligonucleotide
  Antisense strand to SEQ ID NO: 1350226
uuuguuauggcaggcagcc

SEQ ID NO: 1350228 - RNA, 19 nt, Artificial Sequence
  Description of Artificial Sequence: Synthetic oligonucleotide
  Sense strand starting at position 194 of SEQ ID NO: 1242473
auuuauuguucgucuccca

SEQ ID NO: 1350229 - RNA, 19 nt, Artificial Sequence
  Description of Artificial Sequence: Synthetic oligonucleotide
  Antisense strand to SEQ ID NO: 1350228
ugggagacgaacaauaaau

SEQ ID NO: 1350230 - RNA, 19 nt, Artificial Sequence
  Description of Artificial Sequence: Synthetic oligonucleotide
  Sense strand starting at position 243 of SEQ ID NO: 1242473
gguuaagucucucuguguu

SEQ ID NO: 1350231 - RNA, 19 nt, Artificial Sequence
  Description of Artificial Sequence: Synthetic oligonucleotide
  Antisense strand to SEQ ID NO: 1350230
aacacagagagacuuaacc

SEQ ID NO: 1350232 - RNA, 19 nt, Artificial Sequence
  Description of Artificial Sequence: Synthetic oligonucleotide
  Sense strand starting at position 289 of SEQ ID NO: 1242473
acagcaagugcucaauaua

SEQ ID NO: 1350233 - RNA, 19 nt, Artificial Sequence
  Description of Artificial Sequence: Synthetic oligonucleotide
  Antisense strand to SEQ ID NO: 1350232
uauauugagcacuugcugu

SEQ ID NO: 1350234 - RNA, 19 nt, Artificial Sequence
  Description of Artificial Sequence: Synthetic oligonucleotide
  Sense strand starting at position 679 of SEQ ID NO: 1242473
auuggaguuagacgaucuu

SEQ ID NO: 1350235 - RNA, 19 nt, Artificial Sequence
  Description of Artificial Sequence: Synthetic oligonucleotide
  Antisense strand to SEQ ID NO: 1350234
aagaucgucuaacuccaau

SEQ ID NO: 1350236 - RNA, 19 nt, Artificial Sequence
  Description of Artificial Sequence: Synthetic oligonucleotide
  Sense strand starting at position 1049 of SEQ ID NO: 1242473
gcaucaauuccugaucaug

SEQ ID NO: 1350237 - RNA, 19 nt, Artificial Sequence
  Description of Artificial Sequence: Synthetic oligonucleotide
  Antisense strand to SEQ ID NO: 1350236
caugaucaggaauugaugc

SEQ ID NO: 1350238 - RNA, 19 nt, Artificial Sequence
  Description of Artificial Sequence: Synthetic oligonucleotide
  Sense strand starting at position 1094 of SEQ ID NO: 1242473
aagaaucuauacuaggguu

SEQ ID NO: 1350239 - RNA, 19 nt, Artificial Sequence
  Description of Artificial Sequence: Synthetic oligonucleotide
  Antisense strand to SEQ ID NO: 1350238
aacccuaguauagauucuu

SEQ ID NO: 1350240 - RNA, 19 nt, Artificial Sequence
  Description of Artificial Sequence: Synthetic oligonucleotide
  Sense strand starting at position 1109 of SEQ ID NO: 1242473
gguucagaccuuugaggcu

SEQ ID NO: 1350241 - RNA, 19 nt, Artificial Sequence
  Description of Artificial Sequence: Synthetic oligonucleotide
  Antisense strand to SEQ ID NO: 1350240
agccucaaaggucugaacc

SEQ ID NO: 1350242 - RNA, 19 nt, Artificial Sequence
  Description of Artificial Sequence: Synthetic oligonucleotide
  Sense strand starting at position 1128 of SEQ ID NO: 1242473
gacagcgagcuuugaguuu

SEQ ID NO: 1350243 - RNA, 19 nt, Artificial Sequence
  Description of Artificial Sequence: Synthetic oligonucleotide
  Antisense strand to SEQ ID NO: 1350242
aaacucaaagcucgcuguc

SEQ ID NO: 1350244 - RNA, 19 nt, Artificial Sequence
  Description of Artificial Sequence: Synthetic oligonucleotide
  Sense strand starting at position 1134 of SEQ ID NO: 1242473
gagcuuugaguuugaugac

SEQ ID NO: 1350245 - RNA, 19 nt, Artificial Sequence
  Description of Artificial Sequence: Synthetic oligonucleotide
  Antisense strand to SEQ ID NO: 1350244
gucaucaaacucaaagcuc

SEQ ID NO: 1350246 - RNA, 19 nt, Artificial Sequence
  Description of Artificial Sequence: Synthetic oligonucleotide
  Sense strand starting at position 1135 of SEQ ID NO: 1242473
agcuuugaguuugaugaca

SEQ ID NO: 1350247 - RNA, 19 nt, Artificial Sequence
  Description of Artificial Sequence: Synthetic oligonucleotide
  Antisense strand to SEQ ID NO: 1350246
ugucaucaaacucaaagcu

SEQ ID NO: 1350248 - RNA, 19 nt, Artificial Sequence
  Description of Artificial Sequence: Synthetic oligonucleotide
  Sense strand starting at position 1143 of SEQ ID NO: 1242473
guuugaugacaguaccuaa

SEQ ID NO: 1350249 - RNA, 19 nt, Artificial Sequence
  Description of Artificial Sequence: Synthetic oligonucleotide
  Antisense strand to SEQ ID NO: 1350248
uuagguacugucaucaaac

SEQ ID NO: 1350250 - RNA, 19 nt, Artificial Sequence
  Description of Artificial Sequence: Synthetic oligonucleotide
  Sense strand starting at position 1166 of SEQ ID NO: 1242473
uauuaaguguacucaggaa

SEQ ID NO: 1350251 - RNA, 19 nt, Artificial Sequence
  Description of Artificial Sequence: Synthetic oligonucleotide
  Antisense strand to SEQ ID NO: 1350250
uuccugaguacacuuaaua

SEQ ID NO: 1350252 - RNA, 19 nt, Artificial Sequence
  Description of Artificial Sequence: Synthetic oligonucleotide
  Sense strand starting at position 1207 of SEQ ID NO: 1242473
uugucaggaaacugguauu

SEQ ID NO: 1350253 - RNA, 19 nt, Artificial Sequence
  Description of Artificial Sequence: Synthetic oligonucleotide
  Antisense strand to SEQ ID NO: 1350252
aauaccaguuuccugacaa

SEQ ID NO: 1350254 - RNA, 19 nt, Artificial Sequence
  Description of Artificial Sequence: Synthetic oligonucleotide
  Sense strand starting at position 1210 of SEQ ID NO: 1242473
ucaggaaacugguauuucu

SEQ ID NO: 1350255 - RNA, 19 nt, Artificial Sequence
  Description of Artificial Sequence: Synthetic oligonucleotide
  Antisense strand to SEQ ID NO: 1350254
agaaauaccaguuuccuga

SEQ ID NO: 1350256 - RNA, 19 nt, Artificial Sequence
  Description of Artificial Sequence: Synthetic oligonucleotide
  Sense strand starting at position 1229 of SEQ ID NO: 1242473
uucuucuauuuguagugaa

SEQ ID NO: 1350257 - RNA, 19 nt, Artificial Sequence
  Description of Artificial Sequence: Synthetic oligonucleotide
  Antisense strand to SEQ ID NO: 1350256
uucacuacaaauagaagaa

SEQ ID NO: 1350258 - RNA, 19 nt, Artificial Sequence
  Description of Artificial Sequence: Synthetic oligonucleotide
  Sense strand starting at position 1275 of SEQ ID NO: 1242473
ccucgucaauggucgcaua

SEQ ID NO: 1350259 - RNA, 19 nt, Artificial Sequence
  Description of Artificial Sequence: Synthetic oligonucleotide
  Antisense strand to SEQ ID NO: 1350258
uaugcgaccauugacgagg

SEQ ID NO: 1350260 - RNA, 19 nt, Artificial Sequence
  Description of Artificial Sequence: Synthetic oligonucleotide
  Sense strand starting at position 1276 of SEQ ID NO: 1242473
cucgucaauggucgcauaa

SEQ ID NO: 1350261 - RNA, 19 nt, Artificial Sequence
  Description of Artificial Sequence: Synthetic oligonucleotide
  Antisense strand to SEQ ID NO: 1350260
uuaugcgaccauugacgag

SEQ ID NO: 1350262 - RNA, 19 nt, Artificial Sequence
  Description of Artificial Sequence: Synthetic oligonucleotide
  Sense strand starting at position 1313 of SEQ ID NO: 1242473
uuaugaaauugucugaacu

SEQ ID NO: 1350263 - RNA, 19 nt, Artificial Sequence
  Description of Artificial Sequence: Synthetic oligonucleotide
  Antisense strand to SEQ ID NO: 1350262
aguucagacaauuucauaa

SEQ ID NO: 1350264 - RNA, 19 nt, Artificial Sequence
  Description of Artificial Sequence: Synthetic oligonucleotide
  Sense strand starting at position 1315 of SEQ ID NO: 1242473
augaaauugucugaacuuc

SEQ ID NO: 1350265 - RNA, 19 nt, Artificial Sequence
  Description of Artificial Sequence: Synthetic oligonucleotide
  Antisense strand to SEQ ID NO: 1350264
gaaguucagacaauuucau

SEQ ID NO: 1350266 - RNA, 19 nt, Artificial Sequence
  Description of Artificial Sequence: Synthetic oligonucleotide
  Sense strand starting at position 1360 of SEQ ID NO: 1242473
gagugaagguaacaaaugu

SEQ ID NO: 1350267 - RNA, 19 nt, Artificial Sequence
  Description of Artificial Sequence: Synthetic oligonucleotide
  Antisense strand to SEQ ID NO: 1350266
acauuuguuaccuucacuc

SEQ ID NO: 1350268 - RNA, 19 nt, Artificial Sequence
  Description of Artificial Sequence: Synthetic oligonucleotide
  Sense strand starting at position 1502 of SEQ ID NO: 1242473
gggugccaucccugaaaca

SEQ ID NO: 1350269 - RNA, 19 nt, Artificial Sequence
  Description of Artificial Sequence: Synthetic oligonucleotide
  Antisense strand to SEQ ID NO: 1350268
uguuucagggauggcaccc

SEQ ID NO: 1350270 - RNA, 19 nt, Artificial Sequence
  Description of Artificial Sequence: Synthetic oligonucleotide
  Sense strand starting at position 1503 of SEQ ID NO: 1242473
ggugccaucccugaaacau

SEQ ID NO: 1350271 - RNA, 19 nt, Artificial Sequence
  Description of Artificial Sequence: Synthetic oligonucleotide
  Antisense strand to SEQ ID NO: 1350270
auguuucagggauggcacc

SEQ ID NO: 1350272 - RNA, 19 nt, Artificial Sequence
  Description of Artificial Sequence: Synthetic oligonucleotide
  Sense strand starting at position 1690 of SEQ ID NO: 1242473
gcggcuuggcagaguaaga

SEQ ID NO: 1350273 - RNA, 19 nt, Artificial Sequence
  Description of Artificial Sequence: Synthetic oligonucleotide
  Antisense strand to SEQ ID NO: 1350272
ucuuacucugccaagccgc

SEQ ID NO: 1350274 - RNA, 19 nt, Artificial Sequence
  Description of Artificial Sequence: Synthetic oligonucleotide
  Sense strand starting at position 2019 of SEQ ID NO: 1242473
cagcguuuggcgccaaauc

SEQ ID NO: 1350275 - RNA, 19 nt, Artificial Sequence
  Description of Artificial Sequence: Synthetic oligonucleotide
  Antisense strand to SEQ ID NO: 1350274
gauuuggcgccaaacgcug

SEQ ID NO: 1350276 - RNA, 19 nt, Artificial Sequence
  Description of Artificial Sequence: Synthetic oligonucleotide
  Sense strand starting at position 2151 of SEQ ID NO: 1242473
aguuaagccuccuuauuug

SEQ ID NO: 1350277 - RNA, 19 nt, Artificial Sequence
  Description of Artificial Sequence: Synthetic oligonucleotide
  Antisense strand to SEQ ID NO: 1350276
caaauaaggaggcuuaacu

SEQ ID NO: 1350278 - RNA, 19 nt, Artificial Sequence
  Description of Artificial Sequence: Synthetic oligonucleotide
  Sense strand starting at position 2509 of SEQ ID NO: 1242473
cuuuaaaccuuggaaauag

SEQ ID NO: 1350279 - RNA, 19 nt, Artificial Sequence
  Description of Artificial Sequence: Synthetic oligonucleotide
  Antisense strand to SEQ ID NO: 1350278
cuauuuccaagguuuaaag

SEQ ID NO: 1350280 - RNA, 19 nt, Artificial Sequence
  Description of Artificial Sequence: Synthetic oligonucleotide
  Sense strand starting at position 2547 of SEQ ID NO: 1242473
ugaguugugggaggaggaa

SEQ ID NO: 1350281 - RNA, 19 nt, Artificial Sequence
  Description of Artificial Sequence: Synthetic oligonucleotide
  Antisense strand to SEQ ID NO: 1350280
uuccuccucccacaacuca

SEQ ID NO: 1350282 - RNA, 19 nt, Artificial Sequence
  Description of Artificial Sequence: Synthetic oligonucleotide
  Sense strand starting at position 2621 of SEQ ID NO: 1242473
agcagaaugcuucgaacuc

SEQ ID NO: 1350283 - RNA, 19 nt, Artificial Sequence
  Description of Artificial Sequence: Synthetic oligonucleotide
  Antisense strand to SEQ ID NO: 1350282
gaguucgaagcauucugcu

SEQ ID NO: 1350284 - RNA, 19 nt, Artificial Sequence
  Description of Artificial Sequence: Synthetic oligonucleotide
  Sense strand starting at position 2627 of SEQ ID NO: 1242473
augcuucgaacucagaguu

SEQ ID NO: 1350285 - RNA, 19 nt, Artificial Sequence
  Description of Artificial Sequence: Synthetic oligonucleotide
  Antisense strand to SEQ ID NO: 1350284
aacucugaguucgaagcau

SEQ ID NO: 1350286 - RNA, 19 nt, Artificial Sequence
  Description of Artificial Sequence: Synthetic oligonucleotide
  Sense strand starting at position 2831 of SEQ ID NO: 1242473
uggcgauccagcuggagau

SEQ ID NO: 1350287 - RNA, 19 nt, Artificial Sequence
  Description of Artificial Sequence: Synthetic oligonucleotide
  Antisense strand to SEQ ID NO: 1350286
aucuccagcuggaucgcca

SEQ ID NO: 1350288 - RNA, 19 nt, Artificial Sequence
  Description of Artificial Sequence: Synthetic oligonucleotide
  Sense strand starting at position 3445 of SEQ ID NO: 1242473
uguauuuguuuguauacac

SEQ ID NO: 1350289 - RNA, 19 nt, Artificial Sequence
  Description of Artificial Sequence: Synthetic oligonucleotide
  Antisense strand to SEQ ID NO: 1350288
guguauacaaacaaauaca

SEQ ID NO: 1350290 - RNA, 19 nt, Artificial Sequence
  Description of Artificial Sequence: Synthetic oligonucleotide
  Sense strand starting at position 3499 of SEQ ID NO: 1242473
acuagaaccuaugcaauga

SEQ ID NO: 1350291 - RNA, 19 nt, Artificial Sequence
  Description of Artificial Sequence: Synthetic oligonucleotide
  Antisense strand to SEQ ID NO: 1350290
ucauugcauagguucuagu

SEQ ID NO: 1350292 - RNA, 19 nt, Artificial Sequence
  Description of Artificial Sequence: Synthetic oligonucleotide
  Sense strand starting at position 3509 of SEQ ID NO: 1242473
augcaaugaaaguggcaua

SEQ ID NO: 1350293 - RNA, 19 nt, Artificial Sequence
  Description of Artificial Sequence: Synthetic oligonucleotide
  Antisense strand to SEQ ID NO: 1350292
uaugccacuuucauugcau

SEQ ID NO: 1350294 - RNA, 19 nt, Artificial Sequence
  Description of Artificial Sequence: Synthetic oligonucleotide
  Sense strand starting at position 3516 of SEQ ID NO: 1242473
gaaaguggcauaugggaua

SEQ ID NO: 1350295 - RNA, 19 nt, Artificial Sequence
  Description of Artificial Sequence: Synthetic oligonucleotide
  Antisense strand to SEQ ID NO: 1350294
uaucccauaugccacuuuc

SEQ ID NO: 1350296 - RNA, 19 nt, Artificial Sequence
  Description of Artificial Sequence: Synthetic oligonucleotide
  Sense strand starting at position 3656 of SEQ ID NO: 1242473
agaagauaauuagggaaua

SEQ ID NO: 1350297 - RNA, 19 nt, Artificial Sequence
  Description of Artificial Sequence: Synthetic oligonucleotide
  Antisense strand to SEQ ID NO: 1350296
uauucccuaauuaucuucu

SEQ ID NO: 1350298 - RNA, 19 nt, Artificial Sequence
  Description of Artificial Sequence: Synthetic oligonucleotide
  Sense strand starting at position 3657 of SEQ ID NO: 1242473
gaagauaauuagggaauac

SEQ ID NO: 1350299 - RNA, 19 nt, Artificial Sequence
  Description of Artificial Sequence: Synthetic oligonucleotide
  Antisense strand to SEQ ID NO: 1350298
guauucccuaauuaucuuc

SEQ ID NO: 1350300 - RNA, 19 nt, Artificial Sequence
  Description of Artificial Sequence: Synthetic oligonucleotide
  Sense strand starting at position 3667 of SEQ ID NO: 1242473
agggaauacuggcagcauu

SEQ ID NO: 1350301 - RNA, 19 nt, Artificial Sequence
  Description of Artificial Sequence: Synthetic oligonucleotide
  Antisense strand to SEQ ID NO: 1350300
aaugcugccaguauucccu

SEQ ID NO: 1350302 - RNA, 19 nt, Artificial Sequence
  Description of Artificial Sequence: Synthetic oligonucleotide
  Sense strand starting at position 3731 of SEQ ID NO: 1242473
cuucuuugagauggucuca

SEQ ID NO: 1350303 - RNA, 19 nt, Artificial Sequence
  Description of Artificial Sequence: Synthetic oligonucleotide
  Antisense strand to SEQ ID NO: 1350302
ugagaccaucucaaagaag

SEQ ID NO: 1350304 - RNA, 19 nt, Artificial Sequence
  Description of Artificial Sequence: Synthetic oligonucleotide
  Sense strand starting at position 3778 of SEQ ID NO: 1242473
ugcgaucacagcuagaauc

SEQ ID NO: 1350305 - RNA, 19 nt, Artificial Sequence
  Description of Artificial Sequence: Synthetic oligonucleotide
  Antisense strand to SEQ ID NO: 1350304
gauucuagcugugaucgca

SEQ ID NO: 1350306 - RNA, 19 nt, Artificial Sequence
  Description of Artificial Sequence: Synthetic oligonucleotide
  Sense strand starting at position 3788 of SEQ ID NO: 1242473
gcuagaaucaggugauccu

SEQ ID NO: 1350307 - RNA, 19 nt, Artificial Sequence
  Description of Artificial Sequence: Synthetic oligonucleotide
  Antisense strand to SEQ ID NO: 1350306
aggaucaccugauucuagc

SEQ ID NO: 1350308 - RNA, 19 nt, Artificial Sequence
  Description of Artificial Sequence: Synthetic oligonucleotide
  Sense strand starting at position 12 of SEQ ID NO: 1242474
gggagauaugacugcuggu

SEQ ID NO: 1350309 - RNA, 19 nt, Artificial Sequence
  Description of Artificial Sequence: Synthetic oligonucleotide
  Antisense strand to SEQ ID NO: 1350308
accagcagucauaucuccc

SEQ ID NO: 1350310 - RNA, 19 nt, Artificial Sequence
  Description of Artificial Sequence: Synthetic oligonucleotide
  Sense strand starting at position 153 of SEQ ID NO: 1242474
uuaauugaacuguggcuaa

SEQ ID NO: 1350311 - RNA, 19 nt, Artificial Sequence
  Description of Artificial Sequence: Synthetic oligonucleotide
  Antisense strand to SEQ ID NO: 1350310
uuagccacaguucaauuaa

SEQ ID NO: 1350312 - RNA, 19 nt, Artificial Sequence
  Description of Artificial Sequence: Synthetic oligonucleotide
  Sense strand starting at position 183 of SEQ ID NO: 1242474
aaguguugucacuugcugu

SEQ ID NO: 1350313 - RNA, 19 nt, Artificial Sequence
  Description of Artificial Sequence: Synthetic oligonucleotide
  Antisense strand to SEQ ID NO: 1350312
acagcaagugacaacacuu

SEQ ID NO: 1350314 - RNA, 19 nt, Artificial Sequence
  Description of Artificial Sequence: Synthetic oligonucleotide
  Sense strand starting at position 647 of SEQ ID NO: 1242474
gguagacaccuuuguauuc

SEQ ID NO: 1350315 - RNA, 19 nt, Artificial Sequence
  Description of Artificial Sequence: Synthetic oligonucleotide
  Antisense strand to SEQ ID NO: 1350314
gaauacaaaggugucuacc

SEQ ID NO: 1350316 - RNA, 19 nt, Artificial Sequence
  Description of Artificial Sequence: Synthetic oligonucleotide
  Sense strand starting at position 671 of SEQ ID NO: 1242474
cagaguugaucuguguaua

SEQ ID NO: 1350317 - RNA, 19 nt, Artificial Sequence
  Description of Artificial Sequence: Synthetic oligonucleotide
  Antisense strand to SEQ ID NO: 1350316
uauacacagaucaacucug

SEQ ID NO: 1350318 - RNA, 19 nt, Artificial Sequence
  Description of Artificial Sequence: Synthetic oligonucleotide
  Sense strand starting at position 672 of SEQ ID NO: 1242474
agaguugaucuguguauau

SEQ ID NO: 1350319 - RNA, 19 nt, Artificial Sequence
  Description of Artificial Sequence: Synthetic oligonucleotide
  Antisense strand to SEQ ID NO: 1350318
auauacacagaucaacucu

SEQ ID NO: 1350320 - RNA, 19 nt, Artificial Sequence
  Description of Artificial Sequence: Synthetic oligonucleotide
  Sense strand starting at position 790 of SEQ ID NO: 1242474
cuuugcuguccauauuugu

SEQ ID NO: 1350321 - RNA, 19 nt, Artificial Sequence
  Description of Artificial Sequence: Synthetic oligonucleotide
  Antisense strand to SEQ ID NO: 1350320
acaaauauggacagcaaag

SEQ ID NO: 1350322 - RNA, 19 nt, Artificial Sequence
  Description of Artificial Sequence: Synthetic oligonucleotide
  Sense strand starting at position 797 of SEQ ID NO: 1242474
guccauauuugucuuaccu

SEQ ID NO: 1350323 - RNA, 19 nt, Artificial Sequence
  Description of Artificial Sequence: Synthetic oligonucleotide
  Antisense strand to SEQ ID NO: 1350322
agguaagacaaauauggac

SEQ ID NO: 1350324 - RNA, 19 nt, Artificial Sequence
  Description of Artificial Sequence: Synthetic oligonucleotide
  Sense strand starting at position 865 of SEQ ID NO: 1242474
ggcugaucacgcuauauac

SEQ ID NO: 1350325 - RNA, 19 nt, Artificial Sequence
  Description of Artificial Sequence: Synthetic oligonucleotide
  Antisense strand to SEQ ID NO: 1350324
guauauagcgugaucagcc

SEQ ID NO: 1350326 - RNA, 19 nt, Artificial Sequence
  Description of Artificial Sequence: Synthetic oligonucleotide
  Sense strand starting at position 867 of SEQ ID NO: 1242474
cugaucacgcuauauacuu

SEQ ID NO: 1350327 - RNA, 19 nt, Artificial Sequence
  Description of Artificial Sequence: Synthetic oligonucleotide
  Antisense strand to SEQ ID NO: 1350326
aaguauauagcgugaucag

SEQ ID NO: 1350328 - RNA, 19 nt, Artificial Sequence
  Description of Artificial Sequence: Synthetic oligonucleotide
  Sense strand starting at position 912 of SEQ ID NO: 1242474
ugucuuauagagcaggaau

SEQ ID NO: 1350329 - RNA, 19 nt, Artificial Sequence
  Description of Artificial Sequence: Synthetic oligonucleotide
  Antisense strand to SEQ ID NO: 1350328
auuccugcucuauaagaca

SEQ ID NO: 1350330 - RNA, 19 nt, Artificial Sequence
  Description of Artificial Sequence: Synthetic oligonucleotide
  Sense strand starting at position 914 of SEQ ID NO: 1242474
ucuuauagagcaggaauua

SEQ ID NO: 1350331 - RNA, 19 nt, Artificial Sequence
  Description of Artificial Sequence: Synthetic oligonucleotide
  Antisense strand to SEQ ID NO: 1350330
uaauuccugcucuauaaga

SEQ ID NO: 1350332 - RNA, 19 nt, Artificial Sequence
  Description of Artificial Sequence: Synthetic oligonucleotide
  Sense strand starting at position 989 of SEQ ID NO: 1242474
auuagacugugcucaauug

SEQ ID NO: 1350333 - RNA, 19 nt, Artificial Sequence
  Description of Artificial Sequence: Synthetic oligonucleotide
  Antisense strand to SEQ ID NO: 1350332
caauugagcacagucuaau

SEQ ID NO: 1350334 - RNA, 19 nt, Artificial Sequence
  Description of Artificial Sequence: Synthetic oligonucleotide
  Sense strand starting at position 990 of SEQ ID NO: 1242474
uuagacugugcucaauuga

SEQ ID NO: 1350335 - RNA, 19 nt, Artificial Sequence
  Description of Artificial Sequence: Synthetic oligonucleotide
  Antisense strand to SEQ ID NO: 1350334
ucaauugagcacagucuaa

SEQ ID NO: 1350336 - RNA, 19 nt, Artificial Sequence
  Description of Artificial Sequence: Synthetic oligonucleotide
  Sense strand starting at position 1100 of SEQ ID NO: 1242474
uucccuuuacuagguuauu

SEQ ID NO: 1350337 - RNA, 19 nt, Artificial Sequence
  Description of Artificial Sequence: Synthetic oligonucleotide
  Antisense strand to SEQ ID NO: 1350336
aauaaccuaguaaagggaa

SEQ ID NO: 1350338 - RNA, 19 nt, Artificial Sequence
  Description of Artificial Sequence: Synthetic oligonucleotide
  Sense strand starting at position 1178 of SEQ ID NO: 1242474
ugggauuccgcauggauua

SEQ ID NO: 1350339 - RNA, 19 nt, Artificial Sequence
  Description of Artificial Sequence: Synthetic oligonucleotide
  Antisense strand to SEQ ID NO: 1350338
uaauccaugcggaauccca

SEQ ID NO: 1350340 - RNA, 19 nt, Artificial Sequence
  Description of Artificial Sequence: Synthetic oligonucleotide
  Sense strand starting at position 1228 of SEQ ID NO: 1242474
uccuguagauaaucagcaa

SEQ ID NO: 1350341 - RNA, 19 nt, Artificial Sequence
  Description of Artificial Sequence: Synthetic oligonucleotide
  Antisense strand to SEQ ID NO: 1350340
uugcugauuaucuacagga

SEQ ID NO: 1350342 - RNA, 19 nt, Artificial Sequence
  Description of Artificial Sequence: Synthetic oligonucleotide
  Sense strand starting at position 1232 of SEQ ID NO: 1242474
guagauaaucagcaacgua

SEQ ID NO: 1350343 - RNA, 19 nt, Artificial Sequence
  Description of Artificial Sequence: Synthetic oligonucleotide
  Antisense strand to SEQ ID NO: 1350342
uacguugcugauuaucuac

SEQ ID NO: 1350344 - RNA, 19 nt, Artificial Sequence
  Description of Artificial Sequence: Synthetic oligonucleotide
  Sense strand starting at position 1294 of SEQ ID NO: 1242474
ucauuaccucaguaacagu

SEQ ID NO: 1350345 - RNA, 19 nt, Artificial Sequence
  Description of Artificial Sequence: Synthetic oligonucleotide
  Antisense strand to SEQ ID NO: 1350344
acuguuacugagguaauga

SEQ ID NO: 1350346 - RNA, 19 nt, Artificial Sequence
  Description of Artificial Sequence: Synthetic oligonucleotide
  Sense strand starting at position 1346 of SEQ ID NO: 1242474
ggaauacagucccugacaa

SEQ ID NO: 1350347 - RNA, 19 nt, Artificial Sequence
  Description of Artificial Sequence: Synthetic oligonucleotide
  Antisense strand to SEQ ID NO: 1350346
uugucagggacuguauucc

SEQ ID NO: 1350348 - RNA, 19 nt, Artificial Sequence
  Description of Artificial Sequence: Synthetic oligonucleotide
  Sense strand starting at position 1353 of SEQ ID NO: 1242474
agucccugacaaugcaaua

SEQ ID NO: 1350349 - RNA, 19 nt, Artificial Sequence
  Description of Artificial Sequence: Synthetic oligonucleotide
  Antisense strand to SEQ ID NO: 1350348
uauugcauugucagggacu

SEQ ID NO: 1350350 - RNA, 19 nt, Artificial Sequence
  Description of Artificial Sequence: Synthetic oligonucleotide
  Sense strand starting at position 1463 of SEQ ID NO: 1242474
ccgugauaccaaugaauuc

SEQ ID NO: 1350351 - RNA, 19 nt, Artificial Sequence
  Description of Artificial Sequence: Synthetic oligonucleotide
  Antisense strand to SEQ ID NO: 1350350
gaauucauugguaucacgg

SEQ ID NO: 1350352 - RNA, 19 nt, Artificial Sequence
  Description of Artificial Sequence: Synthetic oligonucleotide
  Sense strand starting at position 1497 of SEQ ID NO: 1242474
gagagccuggcuggaaauu

SEQ ID NO: 1350353 - RNA, 19 nt, Artificial Sequence
  Description of Artificial Sequence: Synthetic oligonucleotide
  Antisense strand to SEQ ID NO: 1350352
aauuuccagccaggcucuc

SEQ ID NO: 1350354 - RNA, 19 nt, Artificial Sequence
  Description of Artificial Sequence: Synthetic oligonucleotide
  Sense strand starting at position 1508 of SEQ ID NO: 1242474
uggaaauucugagccagaa

SEQ ID NO: 1350355 - RNA, 19 nt, Artificial Sequence
  Description of Artificial Sequence: Synthetic oligonucleotide
  Antisense strand to SEQ ID NO: 1350354
uucuggcucagaauuucca

SEQ ID NO: 1350356 - RNA, 19 nt, Artificial Sequence
  Description of Artificial Sequence: Synthetic oligonucleotide
  Sense strand starting at position 2524 of SEQ ID NO: 1242474
aucaauugauguguucuau

SEQ ID NO: 1350357 - RNA, 19 nt, Artificial Sequence
  Description of Artificial Sequence: Synthetic oligonucleotide
  Antisense strand to SEQ ID NO: 1350356
auagaacacaucaauugau

SEQ ID NO: 1350358 - RNA, 19 nt, Artificial Sequence
  Description of Artificial Sequence: Synthetic oligonucleotide
  Sense strand starting at position 2626 of SEQ ID NO: 1242474
aauucuggacgcuggaaau

SEQ ID NO: 1350359 - RNA, 19 nt, Artificial Sequence
  Description of Artificial Sequence: Synthetic oligonucleotide
  Antisense strand to SEQ ID NO: 1350358
auuuccagcguccagaauu

SEQ ID NO: 1350360 - RNA, 19 nt, Artificial Sequence
  Description of Artificial Sequence: Synthetic oligonucleotide
  Sense strand starting at position 2636 of SEQ ID NO: 1242474
gcuggaaaugacugaacca

SEQ ID NO: 1350361 - RNA, 19 nt, Artificial Sequence
  Description of Artificial Sequence: Synthetic oligonucleotide
  Antisense strand to SEQ ID NO: 1350360
ugguucagucauuuccagc

SEQ ID NO: 1350362 - RNA, 19 nt, Artificial Sequence
  Description of Artificial Sequence: Synthetic oligonucleotide
  Sense strand starting at position 3011 of SEQ ID NO: 1242474
aguccuugucuuggaaaga

SEQ ID NO: 1350363 - RNA, 19 nt, Artificial Sequence
  Description of Artificial Sequence: Synthetic oligonucleotide
  Antisense strand to SEQ ID NO: 1350362
ucuuuccaagacaaggacu

SEQ ID NO: 1350364 - RNA, 19 nt, Artificial Sequence
  Description of Artificial Sequence: Synthetic oligonucleotide
  Sense strand starting at position 3063 of SEQ ID NO: 1242474
cuuaacugaugguuacaaa

SEQ ID NO: 1350365 - RNA, 19 nt, Artificial Sequence
  Description of Artificial Sequence: Synthetic oligonucleotide
  Antisense strand to SEQ ID NO: 1350364
uuuguaaccaucaguuaag

SEQ ID NO: 1350366 - RNA, 19 nt, Artificial Sequence
  Description of Artificial Sequence: Synthetic oligonucleotide
  Sense strand starting at position 3257 of SEQ ID NO: 1242474
uuggauuacacgcaaguau

SEQ ID NO: 1350367 - RNA, 19 nt, Artificial Sequence
  Description of Artificial Sequence: Synthetic oligonucleotide
  Antisense strand to SEQ ID NO: 1350366
auacuugcguguaauccaa

SEQ ID NO: 1350368 - RNA, 19 nt, Artificial Sequence
  Description of Artificial Sequence: Synthetic oligonucleotide
  Sense strand starting at position 3309 of SEQ ID NO: 1242474
cucagagaguuccuuuaau

SEQ ID NO: 1350369 - RNA, 19 nt, Artificial Sequence
  Description of Artificial Sequence: Synthetic oligonucleotide
  Antisense strand to SEQ ID NO: 1350368
auuaaaggaacucucugag

SEQ ID NO: 1350370 - RNA, 19 nt, Artificial Sequence
  Description of Artificial Sequence: Synthetic oligonucleotide
  Sense strand starting at position 3431 of SEQ ID NO: 1242474
auaucuagucucuggaaag

SEQ ID NO: 1350371 - RNA, 19 nt, Artificial Sequence
  Description of Artificial Sequence: Synthetic oligonucleotide
  Antisense strand to SEQ ID NO: 1350370
cuuuccagagacuagauau

SEQ ID NO: 1350372 - RNA, 19 nt, Artificial Sequence
  Description of Artificial Sequence: Synthetic oligonucleotide
  Sense strand starting at position 3456 of SEQ ID NO: 1242474
cucccacaguugucuauuu

SEQ ID NO: 1350373 - RNA, 19 nt, Artificial Sequence
  Description of Artificial Sequence: Synthetic oligonucleotide
  Antisense strand to SEQ ID NO: 1350372
aaauagacaacugugggag

SEQ ID NO: 1350374 - RNA, 19 nt, Artificial Sequence
  Description of Artificial Sequence: Synthetic oligonucleotide
  Sense strand starting at position 3463 of SEQ ID NO: 1242474
aguugucuauuucuucuau

SEQ ID NO: 1350375 - RNA, 19 nt, Artificial Sequence
  Description of Artificial Sequence: Synthetic oligonucleotide
  Antisense strand to SEQ ID NO: 1350374
auagaagaaauagacaacu

SEQ ID NO: 1350376 - RNA, 19 nt, Artificial Sequence
  Description of Artificial Sequence: Synthetic oligonucleotide
  Sense strand starting at position 3464 of SEQ ID NO: 1242474
guugucuauuucuucuaua

SEQ ID NO: 1350377 - RNA, 19 nt, Artificial Sequence
  Description of Artificial Sequence: Synthetic oligonucleotide
  Antisense strand to SEQ ID NO: 1350376
uauagaagaaauagacaac

SEQ ID NO: 1350378 - RNA, 19 nt, Artificial Sequence
  Description of Artificial Sequence: Synthetic oligonucleotide
  Sense strand starting at position 3684 of SEQ ID NO: 1242474
ugacccgucacugacagau

SEQ ID NO: 1350379 - RNA, 19 nt, Artificial Sequence
  Description of Artificial Sequence: Synthetic oligonucleotide
  Antisense strand to SEQ ID NO: 1350378
aucugucagugacggguca

SEQ ID NO: 1350380 - RNA, 19 nt, Artificial Sequence
  Description of Artificial Sequence: Synthetic oligonucleotide
  Sense strand starting at position 3731 of SEQ ID NO: 1242474
gguuguuauggacaucuau

SEQ ID NO: 1350381 - RNA, 19 nt, Artificial Sequence
  Description of Artificial Sequence: Synthetic oligonucleotide
  Antisense strand to SEQ ID NO: 1350380
auagauguccauaacaacc

SEQ ID NO: 1350382 - RNA, 19 nt, Artificial Sequence
  Description of Artificial Sequence: Synthetic oligonucleotide
  Sense strand starting at position 3740 of SEQ ID NO: 1242474
ggacaucuauuguuuacau

SEQ ID NO: 1350383 - RNA, 19 nt, Artificial Sequence
  Description of Artificial Sequence: Synthetic oligonucleotide
  Antisense strand to SEQ ID NO: 1350382
auguaaacaauagaugucc

SEQ ID NO: 1350384 - RNA, 19 nt, Artificial Sequence
  Description of Artificial Sequence: Synthetic oligonucleotide
  Sense strand starting at position 3779 of SEQ ID NO: 1242474
gcuagaagcaaagauugua

SEQ ID NO: 1350385 - RNA, 19 nt, Artificial Sequence
  Description of Artificial Sequence: Synthetic oligonucleotide
  Antisense strand to SEQ ID NO: 1350384
uacaaucuuugcuucuagc

SEQ ID NO: 1350386 - RNA, 19 nt, Artificial Sequence
  Description of Artificial Sequence: Synthetic oligonucleotide
  Sense strand starting at position 3782 of SEQ ID NO: 1242474
agaagcaaagauuguacua

SEQ ID NO: 1350387 - RNA, 19 nt, Artificial Sequence
  Description of Artificial Sequence: Synthetic oligonucleotide
  Antisense strand to SEQ ID NO: 1350386
uaguacaaucuuugcuucu

SEQ ID NO: 1350388 - RNA, 19 nt, Artificial Sequence
  Description of Artificial Sequence: Synthetic oligonucleotide
  Sense strand starting at position 6 of SEQ ID NO: 1242475
ugcuuuaaaugacugugaa

SEQ ID NO: 1350389 - RNA, 19 nt, Artificial Sequence
  Description of Artificial Sequence: Synthetic oligonucleotide
  Antisense strand to SEQ ID NO: 1350388
uucacagucauuuaaagca

SEQ ID NO: 1350390 - RNA, 19 nt, Artificial Sequence
  Description of Artificial Sequence: Synthetic oligonucleotide
  Sense strand starting at position 7 of SEQ ID NO: 1242475
gcuuuaaaugacugugaau

SEQ ID NO: 1350391 - RNA, 19 nt, Artificial Sequence
  Description of Artificial Sequence: Synthetic oligonucleotide
  Antisense strand to SEQ ID NO: 1350390
auucacagucauuuaaagc

SEQ ID NO: 1350392 - RNA, 19 nt, Artificial Sequence
  Description of Artificial Sequence: Synthetic oligonucleotide
  Sense strand starting at position 10 of SEQ ID NO: 1242475
uuaaaugacugugaauuuc

SEQ ID NO: 1350393 - RNA, 19 nt, Artificial Sequence
  Description of Artificial Sequence: Synthetic oligonucleotide
  Antisense strand to SEQ ID NO: 1350392
gaaauucacagucauuuaa

SEQ ID NO: 1350394 - RNA, 19 nt, Artificial Sequence
  Description of Artificial Sequence: Synthetic oligonucleotide
  Sense strand starting at position 242 of SEQ ID NO: 1242475
uuaagauuccaguagcuca

SEQ ID NO: 1350395 - RNA, 19 nt, Artificial Sequence
  Description of Artificial Sequence: Synthetic oligonucleotide
  Antisense strand to SEQ ID NO: 1350394
ugagcuacuggaaucuuaa

SEQ ID NO: 1350396 - RNA, 19 nt, Artificial Sequence
  Description of Artificial Sequence: Synthetic oligonucleotide
  Sense strand starting at position 381 of SEQ ID NO: 1242475
acaguaauauauguguaca

SEQ ID NO: 1350397 - RNA, 19 nt, Artificial Sequence
  Description of Artificial Sequence: Synthetic oligonucleotide
  Antisense strand to SEQ ID NO: 1350396
uguacacauauauuacugu

SEQ ID NO: 1350398 - RNA, 19 nt, Artificial Sequence
  Description of Artificial Sequence: Synthetic oligonucleotide
  Sense strand starting at position 383 of SEQ ID NO: 1242475
aguaauauauguguacaga

SEQ ID NO: 1350399 - RNA, 19 nt, Artificial Sequence
  Description of Artificial Sequence: Synthetic oligonucleotide
  Antisense strand to SEQ ID NO: 1350398
ucuguacacauauauuacu

SEQ ID NO: 1350400 - RNA, 19 nt, Artificial Sequence
  Description of Artificial Sequence: Synthetic oligonucleotide
  Sense strand starting at position 384 of SEQ ID NO: 1242475
guaauauauguguacagau

SEQ ID NO: 1350401 - RNA, 19 nt, Artificial Sequence
  Description of Artificial Sequence: Synthetic oligonucleotide
  Antisense strand to SEQ ID NO: 1350400
aucuguacacauauauuac

SEQ ID NO: 1350402 - RNA, 19 nt, Artificial Sequence
  Description of Artificial Sequence: Synthetic oligonucleotide
  Sense strand starting at position 534 of SEQ ID NO: 1242475
agcacuggcuuauuagaca

SEQ ID NO: 1350403 - RNA, 19 nt, Artificial Sequence
  Description of Artificial Sequence: Synthetic oligonucleotide
  Antisense strand to SEQ ID NO: 1350402
ugucuaauaagccagugcu

SEQ ID NO: 1350404 - RNA, 19 nt, Artificial Sequence
  Description of Artificial Sequence: Synthetic oligonucleotide
  Sense strand starting at position 539 of SEQ ID NO: 1242475
uggcuuauuagacaagagu

SEQ ID NO: 1350405 - RNA, 19 nt, Artificial Sequence
  Description of Artificial Sequence: Synthetic oligonucleotide
  Antisense strand to SEQ ID NO: 1350404
acucuugucuaauaagcca

SEQ ID NO: 1350406 - RNA, 19 nt, Artificial Sequence
  Description of Artificial Sequence: Synthetic oligonucleotide
  Sense strand starting at position 1002 of SEQ ID NO: 1242475
acguauuucucuccauacu

SEQ ID NO: 1350407 - RNA, 19 nt, Artificial Sequence
  Description of Artificial Sequence: Synthetic oligonucleotide
  Antisense strand to SEQ ID NO: 1350406
aguauggagagaaauacgu

SEQ ID NO: 1350408 - RNA, 19 nt, Artificial Sequence
  Description of Artificial Sequence: Synthetic oligonucleotide
  Sense strand starting at position 1040 of SEQ ID NO: 1242475
guguguugucuugcauauu

SEQ ID NO: 1350409 - RNA, 19 nt, Artificial Sequence
  Description of Artificial Sequence: Synthetic oligonucleotide
  Antisense strand to SEQ ID NO: 1350408
aauaugcaagacaacacac

SEQ ID NO: 1350410 - RNA, 19 nt, Artificial Sequence
  Description of Artificial Sequence: Synthetic oligonucleotide
  Sense strand starting at position 1043 of SEQ ID NO: 1242475
uguugucuugcauauuaag

SEQ ID NO: 1350411 - RNA, 19 nt, Artificial Sequence
  Description of Artificial Sequence: Synthetic oligonucleotide
  Antisense strand to SEQ ID NO: 1350410
cuuaauaugcaagacaaca

SEQ ID NO: 1350412 - RNA, 19 nt, Artificial Sequence
  Description of Artificial Sequence: Synthetic oligonucleotide
  Sense strand starting at position 1087 of SEQ ID NO: 1242475
aagugacauucuguguaau

SEQ ID NO: 1350413 - RNA, 19 nt, Artificial Sequence
  Description of Artificial Sequence: Synthetic oligonucleotide
  Antisense strand to SEQ ID NO: 1350412
auuacacagaaugucacuu

SEQ ID NO: 1350414 - RNA, 19 nt, Artificial Sequence
  Description of Artificial Sequence: Synthetic oligonucleotide
  Sense strand starting at position 1088 of SEQ ID NO: 1242475
agugacauucuguguaaua

SEQ ID NO: 1350415 - RNA, 19 nt, Artificial Sequence
  Description of Artificial Sequence: Synthetic oligonucleotide
  Antisense strand to SEQ ID NO: 1350414
uauuacacagaaugucacu

SEQ ID NO: 1350416 - RNA, 19 nt, Artificial Sequence
  Description of Artificial Sequence: Synthetic oligonucleotide
  Sense strand starting at position 1089 of SEQ ID NO: 1242475
gugacauucuguguaauac

SEQ ID NO: 1350417 - RNA, 19 nt, Artificial Sequence
  Description of Artificial Sequence: Synthetic oligonucleotide
  Antisense strand to SEQ ID NO: 1350416
guauuacacagaaugucac

SEQ ID NO: 1350418 - RNA, 19 nt, Artificial Sequence
  Description of Artificial Sequence: Synthetic oligonucleotide
  Sense strand starting at position 1097 of SEQ ID NO: 1242475
cuguguaauacggaaacaa

SEQ ID NO: 1350419 - RNA, 19 nt, Artificial Sequence
  Description of Artificial Sequence: Synthetic oligonucleotide
  Antisense strand to SEQ ID NO: 1350418
uuguuuccguauuacacag

SEQ ID NO: 1350420 - RNA, 19 nt, Artificial Sequence
  Description of Artificial Sequence: Synthetic oligonucleotide
  Sense strand starting at position 1118 of SEQ ID NO: 1242475
ccuuuccuccuaggaaaga

SEQ ID NO: 1350421 - RNA, 19 nt, Artificial Sequence
  Description of Artificial Sequence: Synthetic oligonucleotide
  Antisense strand to SEQ ID NO: 1350420
ucuuuccuaggaggaaagg

SEQ ID NO: 1350422 - RNA, 19 nt, Artificial Sequence
  Description of Artificial Sequence: Synthetic oligonucleotide
  Sense strand starting at position 1222 of SEQ ID NO: 1242475
uuaccuuuagauuguucuu

SEQ ID NO: 1350423 - RNA, 19 nt, Artificial Sequence
  Description of Artificial Sequence: Synthetic oligonucleotide
  Antisense strand to SEQ ID NO: 1350422
aagaacaaucuaaagguaa

SEQ ID NO: 1350424 - RNA, 19 nt, Artificial Sequence
  Description of Artificial Sequence: Synthetic oligonucleotide
  Sense strand starting at position 1227 of SEQ ID NO: 1242475
uuuagauuguucuuccuca

SEQ ID NO: 1350425 - RNA, 19 nt, Artificial Sequence
  Description of Artificial Sequence: Synthetic oligonucleotide
  Antisense strand to SEQ ID NO: 1350424
ugaggaagaacaaucuaaa

SEQ ID NO: 1350426 - RNA, 19 nt, Artificial Sequence
  Description of Artificial Sequence: Synthetic oligonucleotide
  Sense strand starting at position 1232 of SEQ ID NO: 1242475
auuguucuuccucaaugua

SEQ ID NO: 1350427 - RNA, 19 nt, Artificial Sequence
  Description of Artificial Sequence: Synthetic oligonucleotide
  Antisense strand to SEQ ID NO: 1350426
uacauugaggaagaacaau

SEQ ID NO: 1350428 - RNA, 19 nt, Artificial Sequence
  Description of Artificial Sequence: Synthetic oligonucleotide
  Sense strand starting at position 1408 of SEQ ID NO: 1242475
agauguuacggguaagcau

SEQ ID NO: 1350429 - RNA, 19 nt, Artificial Sequence
  Description of Artificial Sequence: Synthetic oligonucleotide
  Antisense strand to SEQ ID NO: 1350428
augcuuacccguaacaucu

SEQ ID NO: 1350430 - RNA, 19 nt, Artificial Sequence
  Description of Artificial Sequence: Synthetic oligonucleotide
  Sense strand starting at position 1472 of SEQ ID NO: 1242475
ucgauacuauuugaaguaa

SEQ ID NO: 1350431 - RNA, 19 nt, Artificial Sequence
  Description of Artificial Sequence: Synthetic oligonucleotide
  Antisense strand to SEQ ID NO: 1350430
uuacuucaaauaguaucga

SEQ ID NO: 1350432 - RNA, 19 nt, Artificial Sequence
  Description of Artificial Sequence: Synthetic oligonucleotide
  Sense strand starting at position 1537 of SEQ ID NO: 1242475
uguauuccuuuguuugaaa

SEQ ID NO: 1350433 - RNA, 19 nt, Artificial Sequence
  Description of Artificial Sequence: Synthetic oligonucleotide
  Antisense strand to SEQ ID NO: 1350432
uuucaaacaaaggaauaca

SEQ ID NO: 1350434 - RNA, 19 nt, Artificial Sequence
  Description of Artificial Sequence: Synthetic oligonucleotide
  Sense strand starting at position 1538 of SEQ ID NO: 1242475
guauuccuuuguuugaaau

SEQ ID NO: 1350435 - RNA, 19 nt, Artificial Sequence
  Description of Artificial Sequence: Synthetic oligonucleotide
  Antisense strand to SEQ ID NO: 1350434
auuucaaacaaaggaauac

SEQ ID NO: 1350436 - RNA, 19 nt, Artificial Sequence
  Description of Artificial Sequence: Synthetic oligonucleotide
  Sense strand starting at position 1776 of SEQ ID NO: 1242475
uauuguccauucguaggaa

SEQ ID NO: 1350437 - RNA, 19 nt, Artificial Sequence
  Description of Artificial Sequence: Synthetic oligonucleotide
  Antisense strand to SEQ ID NO: 1350436
uuccuacgaauggacaaua

SEQ ID NO: 1350438 - RNA, 19 nt, Artificial Sequence
  Description of Artificial Sequence: Synthetic oligonucleotide
  Sense strand starting at position 1788 of SEQ ID NO: 1242475
guaggaauacuuuguauua

SEQ ID NO: 1350439 - RNA, 19 nt, Artificial Sequence
  Description of Artificial Sequence: Synthetic oligonucleotide
  Antisense strand to SEQ ID NO: 1350438
uaauacaaaguauuccuac

SEQ ID NO: 1350440 - RNA, 19 nt, Artificial Sequence
  Description of Artificial Sequence: Synthetic oligonucleotide
  Sense strand starting at position 1876 of SEQ ID NO: 1242475
aguaauacagcaugaaaga

SEQ ID NO: 1350441 - RNA, 19 nt, Artificial Sequence
  Description of Artificial Sequence: Synthetic oligonucleotide
  Antisense strand to SEQ ID NO: 1350440
ucuuucaugcuguauuacu

SEQ ID NO: 1350442 - RNA, 19 nt, Artificial Sequence
  Description of Artificial Sequence: Synthetic oligonucleotide
  Sense strand starting at position 1980 of SEQ ID NO: 1242475
gugacaucagaucgaaacu

SEQ ID NO: 1350443 - RNA, 19 nt, Artificial Sequence
  Description of Artificial Sequence: Synthetic oligonucleotide
  Antisense strand to SEQ ID NO: 1350442
aguuucgaucugaugucac

SEQ ID NO: 1350444 - RNA, 19 nt, Artificial Sequence
  Description of Artificial Sequence: Synthetic oligonucleotide
  Sense strand starting at position 3119 of SEQ ID NO: 1242475
gcgagucuuccuguuuguu

SEQ ID NO: 1350445 - RNA, 19 nt, Artificial Sequence
  Description of Artificial Sequence: Synthetic oligonucleotide
  Antisense strand to SEQ ID NO: 1350444
aacaaacaggaagacucgc

SEQ ID NO: 1350446 - RNA, 19 nt, Artificial Sequence
  Description of Artificial Sequence: Synthetic oligonucleotide
  Sense strand starting at position 3120 of SEQ ID NO: 1242475
cgagucuuccuguuuguuu

SEQ ID NO: 1350447 - RNA, 19 nt, Artificial Sequence
  Description of Artificial Sequence: Synthetic oligonucleotide
  Antisense strand to SEQ ID NO: 1350446
aaacaaacaggaagacucg

SEQ ID NO: 1350448 - RNA, 19 nt, Artificial Sequence
  Description of Artificial Sequence: Synthetic oligonucleotide
  Sense strand starting at position 3200 of SEQ ID NO: 1242475
uuaagagacuuguccacuu

SEQ ID NO: 1350449 - RNA, 19 nt, Artificial Sequence
  Description of Artificial Sequence: Synthetic oligonucleotide
  Antisense strand to SEQ ID NO: 1350448
aaguggacaagucucuuaa

SEQ ID NO: 1350450 - RNA, 19 nt, Artificial Sequence
  Description of Artificial Sequence: Synthetic oligonucleotide
  Sense strand starting at position 3528 of SEQ ID NO: 1242475
ccuagagaccugugacauc

SEQ ID NO: 1350451 - RNA, 19 nt, Artificial Sequence
  Description of Artificial Sequence: Synthetic oligonucleotide
  Antisense strand to SEQ ID NO: 1350450
gaugucacaggucucuagg

SEQ ID NO: 1350452 - RNA, 19 nt, Artificial Sequence
  Description of Artificial Sequence: Synthetic oligonucleotide
  Sense strand starting at position 3597 of SEQ ID NO: 1242475
cgcccaucuagacaggaau

SEQ ID NO: 1350453 - RNA, 19 nt, Artificial Sequence
  Description of Artificial Sequence: Synthetic oligonucleotide
  Antisense strand to SEQ ID NO: 1350452
auuccugucuagaugggcg

SEQ ID NO: 1350454 - RNA, 19 nt, Artificial Sequence
  Description of Artificial Sequence: Synthetic oligonucleotide
  Sense strand starting at position 3634 of SEQ ID NO: 1242475
ggccaucaagauugcugaa

SEQ ID NO: 1350455 - RNA, 19 nt, Artificial Sequence
  Description of Artificial Sequence: Synthetic oligonucleotide
  Antisense strand to SEQ ID NO: 1350454
uucagcaaucuugauggcc

SEQ ID NO: 1350456 - RNA, 19 nt, Artificial Sequence
  Description of Artificial Sequence: Synthetic oligonucleotide
  Sense strand starting at position 3636 of SEQ ID NO: 1242475
ccaucaagauugcugaaau

SEQ ID NO: 1350457 - RNA, 19 nt, Artificial Sequence
  Description of Artificial Sequence: Synthetic oligonucleotide
  Antisense strand to SEQ ID NO: 1350456
auuucagcaaucuugaugg

SEQ ID NO: 1350458 - RNA, 19 nt, Artificial Sequence
  Description of Artificial Sequence: Synthetic oligonucleotide
  Sense strand starting at position 3650 of SEQ ID NO: 1242475
gaaauucuuguugaccgaa

SEQ ID NO: 1350459 - RNA, 19 nt, Artificial Sequence
  Description of Artificial Sequence: Synthetic oligonucleotide
  Antisense strand to SEQ ID NO: 1350458
uucggucaacaagaauuuc

SEQ ID NO: 1350460 - RNA, 19 nt, Artificial Sequence
  Description of Artificial Sequence: Synthetic oligonucleotide
  Sense strand starting at position 3707 of SEQ ID NO: 1242475
acucaaaguugggcagaaa

SEQ ID NO: 1350461 - RNA, 19 nt, Artificial Sequence
  Description of Artificial Sequence: Synthetic oligonucleotide
  Antisense strand to SEQ ID NO: 1350460
uuucugcccaacuuugagu

SEQ ID NO: 1350462 - RNA, 19 nt, Artificial Sequence
  Description of Artificial Sequence: Synthetic oligonucleotide
  Sense strand starting at position 3810 of SEQ ID NO: 1242475
caaggaacaugguaagaaa

SEQ ID NO: 1350463 - RNA, 19 nt, Artificial Sequence
  Description of Artificial Sequence: Synthetic oligonucleotide
  Antisense strand to SEQ ID NO: 1350462
uuucuuaccauguuccuug

SEQ ID NO: 1350464 - RNA, 19 nt, Artificial Sequence
  Description of Artificial Sequence: Synthetic oligonucleotide
  Sense strand starting at position 3882 of SEQ ID NO: 1242475
gccagaaauccuuaguaac

SEQ ID NO: 1350465 - RNA, 19 nt, Artificial Sequence
  Description of Artificial Sequence: Synthetic oligonucleotide
  Antisense strand to SEQ ID NO: 1350464
guuacuaaggauuucuggc

SEQ ID NO: 1350466 - RNA, 19 nt, Artificial Sequence
  Description of Artificial Sequence: Synthetic oligonucleotide
  Sense strand starting at position 3914 of SEQ ID NO: 1242475
ucuuuaaaguaucugguau

SEQ ID NO: 1350467 - RNA, 19 nt, Artificial Sequence
  Description of Artificial Sequence: Synthetic oligonucleotide
  Antisense strand to SEQ ID NO: 1350466
auaccagauacuuuaaaga

SEQ ID NO: 1350468 - RNA, 19 nt, Artificial Sequence
  Description of Artificial Sequence: Synthetic oligonucleotide
  Sense strand starting at position 47 of SEQ ID NO: 1242476
acguauuucucuccauacu

SEQ ID NO: 1350469 - RNA, 19 nt, Artificial Sequence
  Description of Artificial Sequence: Synthetic oligonucleotide
  Antisense strand to SEQ ID NO: 1350468
aguauggagagaaauacgu

SEQ ID NO: 1350470 - RNA, 19 nt, Artificial Sequence
  Description of Artificial Sequence: Synthetic oligonucleotide
  Sense strand starting at position 85 of SEQ ID NO: 1242476
guguguugucuugcauauu

SEQ ID NO: 1350471 - RNA, 19 nt, Artificial Sequence
  Description of Artificial Sequence: Synthetic oligonucleotide
  Antisense strand to SEQ ID NO: 1350470
aauaugcaagacaacacac

SEQ ID NO: 1350472 - RNA, 19 nt, Artificial Sequence
  Description of Artificial Sequence: Synthetic oligonucleotide
  Sense strand starting at position 88 of SEQ ID NO: 1242476
uguugucuugcauauuaag

SEQ ID NO: 1350473 - RNA, 19 nt, Artificial Sequence
  Description of Artificial Sequence: Synthetic oligonucleotide
  Antisense strand to SEQ ID NO: 1350472
cuuaauaugcaagacaaca

SEQ ID NO: 1350474 - RNA, 19 nt, Artificial Sequence
  Description of Artificial Sequence: Synthetic oligonucleotide
  Sense strand starting at position 132 of SEQ ID NO: 1242476
aagugacauucuguguaau

SEQ ID NO: 1350475 - RNA, 19 nt, Artificial Sequence
  Description of Artificial Sequence: Synthetic oligonucleotide
  Antisense strand to SEQ ID NO: 1350474
auuacacagaaugucacuu

SEQ ID NO: 1350476 - RNA, 19 nt, Artificial Sequence
  Description of Artificial Sequence: Synthetic oligonucleotide
  Sense strand starting at position 133 of SEQ ID NO: 1242476
agugacauucuguguaaua

SEQ ID NO: 1350477 - RNA, 19 nt, Artificial Sequence
  Description of Artificial Sequence: Synthetic oligonucleotide
  Antisense strand to SEQ ID NO: 1350476
uauuacacagaaugucacu

SEQ ID NO: 1350478 - RNA, 19 nt, Artificial Sequence
  Description of Artificial Sequence: Synthetic oligonucleotide
  Sense strand starting at position 134 of SEQ ID NO: 1242476
gugacauucuguguaauac

SEQ ID NO: 1350479 - RNA, 19 nt, Artificial Sequence
  Description of Artificial Sequence: Synthetic oligonucleotide
  Antisense strand to SEQ ID NO: 1350478
guauuacacagaaugucac

SEQ ID NO: 1350480 - RNA, 19 nt, Artificial Sequence
  Description of Artificial Sequence: Synthetic oligonucleotide
  Sense strand starting at position 142 of SEQ ID NO: 1242476
cuguguaauacggaaacaa

SEQ ID NO: 1350481 - RNA, 19 nt, Artificial Sequence
  Description of Artificial Sequence: Synthetic oligonucleotide
  Antisense strand to SEQ ID NO: 1350480
uuguuuccguauuacacag

SEQ ID NO: 1350482 - RNA, 19 nt, Artificial Sequence
  Description of Artificial Sequence: Synthetic oligonucleotide
  Sense strand starting at position 163 of SEQ ID NO: 1242476
ccuuuccuccuaggaaaga

SEQ ID NO: 1350483 - RNA, 19 nt, Artificial Sequence
  Description of Artificial Sequence: Synthetic oligonucleotide
  Antisense strand to SEQ ID NO: 1350482
ucuuuccuaggaggaaagg

SEQ ID NO: 1350484 - RNA, 19 nt, Artificial Sequence
  Description of Artificial Sequence: Synthetic oligonucleotide
  Sense strand starting at position 267 of SEQ ID NO: 1242476
uuaccuuuagauuguucuu

SEQ ID NO: 1350485 - RNA, 19 nt, Artificial Sequence
  Description of Artificial Sequence: Synthetic oligonucleotide
  Antisense strand to SEQ ID NO: 1350484
aagaacaaucuaaagguaa

SEQ ID NO: 1350486 - RNA, 19 nt, Artificial Sequence
  Description of Artificial Sequence: Synthetic oligonucleotide
  Sense strand starting at position 272 of SEQ ID NO: 1242476
uuuagauuguucuuccuca

SEQ ID NO: 1350487 - RNA, 19 nt, Artificial Sequence
  Description of Artificial Sequence: Synthetic oligonucleotide
  Antisense strand to SEQ ID NO: 1350486
ugaggaagaacaaucuaaa

SEQ ID NO: 1350488 - RNA, 19 nt, Artificial Sequence
  Description of Artificial Sequence: Synthetic oligonucleotide
  Sense strand starting at position 277 of SEQ ID NO: 1242476
auuguucuuccucaaugua

SEQ ID NO: 1350489 - RNA, 19 nt, Artificial Sequence
  Description of Artificial Sequence: Synthetic oligonucleotide
  Antisense strand to SEQ ID NO: 1350488
uacauugaggaagaacaau

SEQ ID NO: 1350490 - RNA, 19 nt, Artificial Sequence
  Description of Artificial Sequence: Synthetic oligonucleotide
  Sense strand starting at position 453 of SEQ ID NO: 1242476
agauguuacggguaagcau

SEQ ID NO: 1350491 - RNA, 19 nt, Artificial Sequence
  Description of Artificial Sequence: Synthetic oligonucleotide
  Antisense strand to SEQ ID NO: 1350490
augcuuacccguaacaucu

SEQ ID NO: 1350492 - RNA, 19 nt, Artificial Sequence
  Description of Artificial Sequence: Synthetic oligonucleotide
  Sense strand starting at position 517 of SEQ ID NO: 1242476
ucgauacuauuugaaguaa

SEQ ID NO: 1350493 - RNA, 19 nt, Artificial Sequence
  Description of Artificial Sequence: Synthetic oligonucleotide
  Antisense strand to SEQ ID NO: 1350492
uuacuucaaauaguaucga

SEQ ID NO: 1350494 - RNA, 19 nt, Artificial Sequence
  Description of Artificial Sequence: Synthetic oligonucleotide
  Sense strand starting at position 582 of SEQ ID NO: 1242476
uguauuccuuuguuugaaa

SEQ ID NO: 1350495 - RNA, 19 nt, Artificial Sequence
  Description of Artificial Sequence: Synthetic oligonucleotide
  Antisense strand to SEQ ID NO: 1350494
uuucaaacaaaggaauaca

SEQ ID NO: 1350496 - RNA, 19 nt, Artificial Sequence
  Description of Artificial Sequence: Synthetic oligonucleotide
  Sense strand starting at position 583 of SEQ ID NO: 1242476
guauuccuuuguuugaaau

SEQ ID NO: 1350497 - RNA, 19 nt, Artificial Sequence
  Description of Artificial Sequence: Synthetic oligonucleotide
  Antisense strand to SEQ ID NO: 1350496
auuucaaacaaaggaauac

SEQ ID NO: 1350498 - RNA, 19 nt, Artificial Sequence
  Description of Artificial Sequence: Synthetic oligonucleotide
  Sense strand starting at position 821 of SEQ ID NO: 1242476
uauuguccauucguaggaa

SEQ ID NO: 1350499 - RNA, 19 nt, Artificial Sequence
  Description of Artificial Sequence: Synthetic oligonucleotide
  Antisense strand to SEQ ID NO: 1350498
uuccuacgaauggacaaua

SEQ ID NO: 1350500 - RNA, 19 nt, Artificial Sequence
  Description of Artificial Sequence: Synthetic oligonucleotide
  Sense strand starting at position 824 of SEQ ID NO: 1242476
uguccauucguaggaauac

SEQ ID NO: 1350501 - RNA, 19 nt, Artificial Sequence
  Description of Artificial Sequence: Synthetic oligonucleotide
  Antisense strand to SEQ ID NO: 1350500
guauuccuacgaauggaca

SEQ ID NO: 1350502 - RNA, 19 nt, Artificial Sequence
  Description of Artificial Sequence: Synthetic oligonucleotide
  Sense strand starting at position 833 of SEQ ID NO: 1242476
guaggaauacuuuguauua

SEQ ID NO: 1350503 - RNA, 19 nt, Artificial Sequence
  Description of Artificial Sequence: Synthetic oligonucleotide
  Antisense strand to SEQ ID NO: 1350502
uaauacaaaguauuccuac

SEQ ID NO: 1350504 - RNA, 19 nt, Artificial Sequence
  Description of Artificial Sequence: Synthetic oligonucleotide
  Sense strand starting at position 921 of SEQ ID NO: 1242476
aguaauacagcaugaaaga

SEQ ID NO: 1350505 - RNA, 19 nt, Artificial Sequence
  Description of Artificial Sequence: Synthetic oligonucleotide
  Antisense strand to SEQ ID NO: 1350504
ucuuucaugcuguauuacu

SEQ ID NO: 1350506 - RNA, 19 nt, Artificial Sequence
  Description of Artificial Sequence: Synthetic oligonucleotide
  Sense strand starting at position 1025 of SEQ ID NO: 1242476
gugacaucagaucgaaacu

SEQ ID NO: 1350507 - RNA, 19 nt, Artificial Sequence
  Description of Artificial Sequence: Synthetic oligonucleotide
  Antisense strand to SEQ ID NO: 1350506
aguuucgaucugaugucac

SEQ ID NO: 1350508 - RNA, 19 nt, Artificial Sequence
  Description of Artificial Sequence: Synthetic oligonucleotide
  Sense strand starting at position 2164 of SEQ ID NO: 1242476
gcgagucuuccuguuuguu

SEQ ID NO: 1350509 - RNA, 19 nt, Artificial Sequence
  Description of Artificial Sequence: Synthetic oligonucleotide
  Antisense strand to SEQ ID NO: 1350508
aacaaacaggaagacucgc

SEQ ID NO: 1350510 - RNA, 19 nt, Artificial Sequence
  Description of Artificial Sequence: Synthetic oligonucleotide
  Sense strand starting at position 2165 of SEQ ID NO: 1242476
cgagucuuccuguuuguuu

SEQ ID NO: 1350511 - RNA, 19 nt, Artificial Sequence
  Description of Artificial Sequence: Synthetic oligonucleotide
  Antisense strand to SEQ ID NO: 1350510
aaacaaacaggaagacucg

SEQ ID NO: 1350512 - RNA, 19 nt, Artificial Sequence
  Description of Artificial Sequence: Synthetic oligonucleotide
  Sense strand starting at position 2245 of SEQ ID NO: 1242476
uuaagagacuuguccacuu

SEQ ID NO: 1350513 - RNA, 19 nt, Artificial Sequence
  Description of Artificial Sequence: Synthetic oligonucleotide
  Antisense strand to SEQ ID NO: 1350512
aaguggacaagucucuuaa

SEQ ID NO: 1350514 - RNA, 19 nt, Artificial Sequence
  Description of Artificial Sequence: Synthetic oligonucleotide
  Sense strand starting at position 2573 of SEQ ID NO: 1242476
ccuagagaccugugacauc

SEQ ID NO: 1350515 - RNA, 19 nt, Artificial Sequence
  Description of Artificial Sequence: Synthetic oligonucleotide
  Antisense strand to SEQ ID NO: 1350514
gaugucacaggucucuagg

SEQ ID NO: 1350516 - RNA, 19 nt, Artificial Sequence
  Description of Artificial Sequence: Synthetic oligonucleotide
  Sense strand starting at position 2642 of SEQ ID NO: 1242476
cgcccaucuagacaggaau

SEQ ID NO: 1350517 - RNA, 19 nt, Artificial Sequence
  Description of Artificial Sequence: Synthetic oligonucleotide
  Antisense strand to SEQ ID NO: 1350516
auuccugucuagaugggcg

SEQ ID NO: 1350518 - RNA, 19 nt, Artificial Sequence
  Description of Artificial Sequence: Synthetic oligonucleotide
  Sense strand starting at position 2679 of SEQ ID NO: 1242476
ggccaucaagauugcugaa

SEQ ID NO: 1350519 - RNA, 19 nt, Artificial Sequence
  Description of Artificial Sequence: Synthetic oligonucleotide
  Antisense strand to SEQ ID NO: 1350518
uucagcaaucuugauggcc

SEQ ID NO: 1350520 - RNA, 19 nt, Artificial Sequence
  Description of Artificial Sequence: Synthetic oligonucleotide
  Sense strand starting at position 2681 of SEQ ID NO: 1242476
ccaucaagauugcugaaau

SEQ ID NO: 1350521 - RNA, 19 nt, Artificial Sequence
  Description of Artificial Sequence: Synthetic oligonucleotide
  Antisense strand to SEQ ID NO: 1350520
auuucagcaaucuugaugg

SEQ ID NO: 1350522 - RNA, 19 nt, Artificial Sequence
  Description of Artificial Sequence: Synthetic oligonucleotide
  Sense strand starting at position 2695 of SEQ ID NO: 1242476
gaaauucuuguugaccgaa

SEQ ID NO: 1350523 - RNA, 19 nt, Artificial Sequence
  Description of Artificial Sequence: Synthetic oligonucleotide
  Antisense strand to SEQ ID NO: 1350522
uucggucaacaagaauuuc

SEQ ID NO: 1350524 - RNA, 19 nt, Artificial Sequence
  Description of Artificial Sequence: Synthetic oligonucleotide
  Sense strand starting at position 2752 of SEQ ID NO: 1242476
acucaaaguugggcagaaa

SEQ ID NO: 1350525 - RNA, 19 nt, Artificial Sequence
  Description of Artificial Sequence: Synthetic oligonucleotide
  Antisense strand to SEQ ID NO: 1350524
uuucugcccaacuuugagu

SEQ ID NO: 1350526 - RNA, 19 nt, Artificial Sequence
  Description of Artificial Sequence: Synthetic oligonucleotide
  Sense strand starting at position 2855 of SEQ ID NO: 1242476
caaggaacaugguaagaaa

SEQ ID NO: 1350527 - RNA, 19 nt, Artificial Sequence
  Description of Artificial Sequence: Synthetic oligonucleotide
  Antisense strand to SEQ ID NO: 1350526
uuucuuaccauguuccuug

SEQ ID NO: 1350528 - RNA, 19 nt, Artificial Sequence
  Description of Artificial Sequence: Synthetic oligonucleotide
  Sense strand starting at position 2927 of SEQ ID NO: 1242476
gccagaaauccuuaguaac

SEQ ID NO: 1350529 - RNA, 19 nt, Artificial Sequence
  Description of Artificial Sequence: Synthetic oligonucleotide
  Antisense strand to SEQ ID NO: 1350528
guuacuaaggauuucuggc

SEQ ID NO: 1350530 - RNA, 19 nt, Artificial Sequence
  Description of Artificial Sequence: Synthetic oligonucleotide
  Sense strand starting at position 2959 of SEQ ID NO: 1242476
ucuuuaaaguaucugguau

SEQ ID NO: 1350531 - RNA, 19 nt, Artificial Sequence
  Description of Artificial Sequence: Synthetic oligonucleotide
  Antisense strand to SEQ ID NO: 1350530
auaccagauacuuuaaaga

SEQ ID NO: 1350532 - RNA, 19 nt, Artificial Sequence
  Description of Artificial Sequence: Synthetic oligonucleotide
  Sense strand starting at position 3081 of SEQ ID NO: 1242476
caaagaaguauguguaggu

SEQ ID NO: 1350533 - RNA, 19 nt, Artificial Sequence
  Description of Artificial Sequence: Synthetic oligonucleotide
  Antisense strand to SEQ ID NO: 1350532
accuacacauacuucuuug

SEQ ID NO: 1350534 - RNA, 19 nt, Artificial Sequence
  Description of Artificial Sequence: Synthetic oligonucleotide
  Sense strand starting at position 3085 of SEQ ID NO: 1242476
gaaguauguguaggugaua

SEQ ID NO: 1350535 - RNA, 19 nt, Artificial Sequence
  Description of Artificial Sequence: Synthetic oligonucleotide
  Antisense strand to SEQ ID NO: 1350534
uaucaccuacacauacuuc

SEQ ID NO: 1350536 - RNA, 19 nt, Artificial Sequence
  Description of Artificial Sequence: Synthetic oligonucleotide
  Sense strand starting at position 3088 of SEQ ID NO: 1242476
guauguguaggugauacau

SEQ ID NO: 1350537 - RNA, 19 nt, Artificial Sequence
  Description of Artificial Sequence: Synthetic oligonucleotide
  Antisense strand to SEQ ID NO: 1350536
auguaucaccuacacauac

SEQ ID NO: 1350538 - RNA, 19 nt, Artificial Sequence
  Description of Artificial Sequence: Synthetic oligonucleotide
  Sense strand starting at position 3094 of SEQ ID NO: 1242476
guaggugauacauaaguau

SEQ ID NO: 1350539 - RNA, 19 nt, Artificial Sequence
  Description of Artificial Sequence: Synthetic oligonucleotide
  Antisense strand to SEQ ID NO: 1350538
auacuuauguaucaccuac

SEQ ID NO: 1350540 - RNA, 19 nt, Artificial Sequence
  Description of Artificial Sequence: Synthetic oligonucleotide
  Sense strand starting at position 3097 of SEQ ID NO: 1242476
ggugauacauaaguaucaa

SEQ ID NO: 1350541 - RNA, 19 nt, Artificial Sequence
  Description of Artificial Sequence: Synthetic oligonucleotide
  Antisense strand to SEQ ID NO: 1350540
uugauacuuauguaucacc

SEQ ID NO: 1350542 - RNA, 19 nt, Artificial Sequence
  Description of Artificial Sequence: Synthetic oligonucleotide
  Sense strand starting at position 3113 of SEQ ID NO: 1242476
caauuaaggcuucgaagug

SEQ ID NO: 1350543 - RNA, 19 nt, Artificial Sequence
  Description of Artificial Sequence: Synthetic oligonucleotide
  Antisense strand to SEQ ID NO: 1350542
cacuucgaagccuuaauug

SEQ ID NO: 1350544 - RNA, 19 nt, Artificial Sequence
  Description of Artificial Sequence: Synthetic oligonucleotide
  Sense strand starting at position 3627 of SEQ ID NO: 1242476
guaguugcucacguuuaua

SEQ ID NO: 1350545 - RNA, 19 nt, Artificial Sequence
  Description of Artificial Sequence: Synthetic oligonucleotide
  Antisense strand to SEQ ID NO: 1350544
uauaaacgugagcaacuac

SEQ ID NO: 1350546 - RNA, 19 nt, Artificial Sequence
  Description of Artificial Sequence: Synthetic oligonucleotide
  Sense strand starting at position 3803 of SEQ ID NO: 1242476
ggugacagacgccaguaau

SEQ ID NO: 1350547 - RNA, 19 nt, Artificial Sequence
  Description of Artificial Sequence: Synthetic oligonucleotide
  Antisense strand to SEQ ID NO: 1350546
auuacuggcgucugucacc

SEQ ID NO: 1350548 - RNA, 19 nt, Artificial Sequence
  Description of Artificial Sequence: Synthetic oligonucleotide
  Sense strand starting at position 233 of SEQ ID NO: 1242477
accggccuuaccugugaua

SEQ ID NO: 1350549 - RNA, 19 nt, Artificial Sequence
  Description of Artificial Sequence: Synthetic oligonucleotide
  Antisense strand to SEQ ID NO: 1350548
uaucacagguaaggccggu

SEQ ID NO: 1350550 - RNA, 19 nt, Artificial Sequence
  Description of Artificial Sequence: Synthetic oligonucleotide
  Sense strand starting at position 235 of SEQ ID NO: 1242477
cggccuuaccugugauacu

SEQ ID NO: 1350551 - RNA, 19 nt, Artificial Sequence
  Description of Artificial Sequence: Synthetic oligonucleotide
  Antisense strand to SEQ ID NO: 1350550
aguaucacagguaaggccg

SEQ ID NO: 1350552 - RNA, 19 nt, Artificial Sequence
  Description of Artificial Sequence: Synthetic oligonucleotide
  Sense strand starting at position 236 of SEQ ID NO: 1242477
ggccuuaccugugauacug

SEQ ID NO: 1350553 - RNA, 19 nt, Artificial Sequence
  Description of Artificial Sequence: Synthetic oligonucleotide
  Antisense strand to SEQ ID NO: 1350552
caguaucacagguaaggcc

SEQ ID NO: 1350554 - RNA, 19 nt, Artificial Sequence
  Description of Artificial Sequence: Synthetic oligonucleotide
  Sense strand starting at position 244 of SEQ ID NO: 1242477
cugugauacugagcuugca

SEQ ID NO: 1350555 - RNA, 19 nt, Artificial Sequence
  Description of Artificial Sequence: Synthetic oligonucleotide
  Antisense strand to SEQ ID NO: 1350554
ugcaagcucaguaucacag

SEQ ID NO: 1350556 - RNA, 19 nt, Artificial Sequence
  Description of Artificial Sequence: Synthetic oligonucleotide
  Sense strand starting at position 269 of SEQ ID NO: 1242477
ggaauucgucuuugauccu

SEQ ID NO: 1350557 - RNA, 19 nt, Artificial Sequence
  Description of Artificial Sequence: Synthetic oligonucleotide
  Antisense strand to SEQ ID NO: 1350556
aggaucaaagacgaauucc

SEQ ID NO: 1350558 - RNA, 19 nt, Artificial Sequence
  Description of Artificial Sequence: Synthetic oligonucleotide
  Sense strand starting at position 275 of SEQ ID NO: 1242477
cgucuuugauccugucaca

SEQ ID NO: 1350559 - RNA, 19 nt, Artificial Sequence
  Description of Artificial Sequence: Synthetic oligonucleotide
  Antisense strand to SEQ ID NO: 1350558
ugugacaggaucaaagacg

SEQ ID NO: 1350560 - RNA, 19 nt, Artificial Sequence
  Description of Artificial Sequence: Synthetic oligonucleotide
  Sense strand starting at position 294 of SEQ ID NO: 1242477
agacucagccaccgugaau

SEQ ID NO: 1350561 - RNA, 19 nt, Artificial Sequence
  Description of Artificial Sequence: Synthetic oligonucleotide
  Antisense strand to SEQ ID NO: 1350560
auucacgguggcugagucu

SEQ ID NO: 1350562 - RNA, 19 nt, Artificial Sequence
  Description of Artificial Sequence: Synthetic oligonucleotide
  Sense strand starting at position 671 of SEQ ID NO: 1242477
gccacucgcgcggaauuaa

SEQ ID NO: 1350563 - RNA, 19 nt, Artificial Sequence
  Description of Artificial Sequence: Synthetic oligonucleotide
  Antisense strand to SEQ ID NO: 1350562
uuaauuccgcgcgaguggc

SEQ ID NO: 1350564 - RNA, 19 nt, Artificial Sequence
  Description of Artificial Sequence: Synthetic oligonucleotide
  Sense strand starting at position 792 of SEQ ID NO: 1242477
cagauaaacugccucguuu

SEQ ID NO: 1350565 - RNA, 19 nt, Artificial Sequence
  Description of Artificial Sequence: Synthetic oligonucleotide
  Antisense strand to SEQ ID NO: 1350564
aaacgaggcaguuuaucug

SEQ ID NO: 1350566 - RNA, 19 nt, Artificial Sequence
  Description of Artificial Sequence: Synthetic oligonucleotide
  Sense strand starting at position 794 of SEQ ID NO: 1242477
gauaaacugccucguuuac

SEQ ID NO: 1350567 - RNA, 19 nt, Artificial Sequence
  Description of Artificial Sequence: Synthetic oligonucleotide
  Antisense strand to SEQ ID NO: 1350566
guaaacgaggcaguuuauc

SEQ ID NO: 1350568 - RNA, 19 nt, Artificial Sequence
  Description of Artificial Sequence: Synthetic oligonucleotide
  Sense strand starting at position 806 of SEQ ID NO: 1242477
cguuuacccugccaugaua

SEQ ID NO: 1350569 - RNA, 19 nt, Artificial Sequence
  Description of Artificial Sequence: Synthetic oligonucleotide
  Antisense strand to SEQ ID NO: 1350568
uaucauggcaggguaaacg

SEQ ID NO: 1350570 - RNA, 19 nt, Artificial Sequence
  Description of Artificial Sequence: Synthetic oligonucleotide
  Sense strand starting at position 808 of SEQ ID NO: 1242477
uuuacccugccaugauaga

SEQ ID NO: 1350571 - RNA, 19 nt, Artificial Sequence
  Description of Artificial Sequence: Synthetic oligonucleotide
  Antisense strand to SEQ ID NO: 1350570
ucuaucauggcaggguaaa

SEQ ID NO: 1350572 - RNA, 19 nt, Artificial Sequence
  Description of Artificial Sequence: Synthetic oligonucleotide
  Sense strand starting at position 809 of SEQ ID NO: 1242477
uuacccugccaugauagau

SEQ ID NO: 1350573 - RNA, 19 nt, Artificial Sequence
  Description of Artificial Sequence: Synthetic oligonucleotide
  Antisense strand to SEQ ID NO: 1350572
aucuaucauggcaggguaa

SEQ ID NO: 1350574 - RNA, 19 nt, Artificial Sequence
  Description of Artificial Sequence: Synthetic oligonucleotide
  Sense strand starting at position 843 of SEQ ID NO: 1242477
guugcaauuacucaccgga

SEQ ID NO: 1350575 - RNA, 19 nt, Artificial Sequence
  Description of Artificial Sequence: Synthetic oligonucleotide
  Antisense strand to SEQ ID NO: 1350574
uccggugaguaauugcaac

SEQ ID NO: 1350576 - RNA, 19 nt, Artificial Sequence
  Description of Artificial Sequence: Synthetic oligonucleotide
  Sense strand starting at position 846 of SEQ ID NO: 1242477
gcaauuacucaccggaugu

SEQ ID NO: 1350577 - RNA, 19 nt, Artificial Sequence
  Description of Artificial Sequence: Synthetic oligonucleotide
  Antisense strand to SEQ ID NO: 1350576
acauccggugaguaauugc

SEQ ID NO: 1350578 - RNA, 19 nt, Artificial Sequence
  Description of Artificial Sequence: Synthetic oligonucleotide
  Sense strand starting at position 859 of SEQ ID NO: 1242477
ggaugucugcccugcggau

SEQ ID NO: 1350579 - RNA, 19 nt, Artificial Sequence
  Description of Artificial Sequence: Synthetic oligonucleotide
  Antisense strand to SEQ ID NO: 1350578
auccgcagggcagacaucc

SEQ ID NO: 1350580 - RNA, 19 nt, Artificial Sequence
  Description of Artificial Sequence: Synthetic oligonucleotide
  Sense strand starting at position 1013 of SEQ ID NO: 1242477
gcucguucucgcagcgaaa

SEQ ID NO: 1350581 - RNA, 19 nt, Artificial Sequence
  Description of Artificial Sequence: Synthetic oligonucleotide
  Antisense strand to SEQ ID NO: 1350580
uuucgcugcgagaacgagc

SEQ ID NO: 1350582 - RNA, 19 nt, Artificial Sequence
  Description of Artificial Sequence: Synthetic oligonucleotide
  Sense strand starting at position 1014 of SEQ ID NO: 1242477
cucguucucgcagcgaaau

SEQ ID NO: 1350583 - RNA, 19 nt, Artificial Sequence
  Description of Artificial Sequence: Synthetic oligonucleotide
  Antisense strand to SEQ ID NO: 1350582
auuucgcugcgagaacgag

SEQ ID NO: 1350584 - RNA, 19 nt, Artificial Sequence
  Description of Artificial Sequence: Synthetic oligonucleotide
  Sense strand starting at position 1015 of SEQ ID NO: 1242477
ucguucucgcagcgaaauc

SEQ ID NO: 1350585 - RNA, 19 nt, Artificial Sequence
  Description of Artificial Sequence: Synthetic oligonucleotide
  Antisense strand to SEQ ID NO: 1350584
gauuucgcugcgagaacga

SEQ ID NO: 1350586 - RNA, 19 nt, Artificial Sequence
  Description of Artificial Sequence: Synthetic oligonucleotide
  Sense strand starting at position 2119 of SEQ ID NO: 1242477
augcccucuugugucuaaa

SEQ ID NO: 1350587 - RNA, 19 nt, Artificial Sequence
  Description of Artificial Sequence: Synthetic oligonucleotide
  Antisense strand to SEQ ID NO: 1350586
uuuagacacaagagggcau

SEQ ID NO: 1350588 - RNA, 19 nt, Artificial Sequence
  Description of Artificial Sequence: Synthetic oligonucleotide
  Sense strand starting at position 2174 of SEQ ID NO: 1242477
uggugacuuucgcauggga

SEQ ID NO: 1350589 - RNA, 19 nt, Artificial Sequence
  Description of Artificial Sequence: Synthetic oligonucleotide
  Antisense strand to SEQ ID NO: 1350588
ucccaugcgaaagucacca

SEQ ID NO: 1350590 - RNA, 19 nt, Artificial Sequence
  Description of Artificial Sequence: Synthetic oligonucleotide
  Sense strand starting at position 2176 of SEQ ID NO: 1242477
gugacuuucgcaugggagu

SEQ ID NO: 1350591 - RNA, 19 nt, Artificial Sequence
  Description of Artificial Sequence: Synthetic oligonucleotide
  Antisense strand to SEQ ID NO: 1350590
acucccaugcgaaagucac

SEQ ID NO: 1350592 - RNA, 19 nt, Artificial Sequence
  Description of Artificial Sequence: Synthetic oligonucleotide
  Sense strand starting at position 2206 of SEQ ID NO: 1242477
cuccucagaucaggaauua

SEQ ID NO: 1350593 - RNA, 19 nt, Artificial Sequence
  Description of Artificial Sequence: Synthetic oligonucleotide
  Antisense strand to SEQ ID NO: 1350592
uaauuccugaucugaggag

SEQ ID NO: 1350594 - RNA, 19 nt, Artificial Sequence
  Description of Artificial Sequence: Synthetic oligonucleotide
  Sense strand starting at position 2300 of SEQ ID NO: 1242477
acggucuacuagcaaauaa

SEQ ID NO: 1350595 - RNA, 19 nt, Artificial Sequence
  Description of Artificial Sequence: Synthetic oligonucleotide
  Antisense strand to SEQ ID NO: 1350594
uuauuugcuaguagaccgu

SEQ ID NO: 1350596 - RNA, 19 nt, Artificial Sequence
  Description of Artificial Sequence: Synthetic oligonucleotide
  Sense strand starting at position 2398 of SEQ ID NO: 1242477
accuguggcugguaguaau

SEQ ID NO: 1350597 - RNA, 19 nt, Artificial Sequence
  Description of Artificial Sequence: Synthetic oligonucleotide
  Antisense strand to SEQ ID NO: 1350596
auuacuaccagccacaggu

SEQ ID NO: 1350598 - RNA, 19 nt, Artificial Sequence
  Description of Artificial Sequence: Synthetic oligonucleotide
  Sense strand starting at position 2401 of SEQ ID NO: 1242477
uguggcugguaguaaugua

SEQ ID NO: 1350599 - RNA, 19 nt, Artificial Sequence
  Description of Artificial Sequence: Synthetic oligonucleotide
  Antisense strand to SEQ ID NO: 1350598
uacauuacuaccagccaca

SEQ ID NO: 1350600 - RNA, 19 nt, Artificial Sequence
  Description of Artificial Sequence: Synthetic oligonucleotide
  Sense strand starting at position 2409 of SEQ ID NO: 1242477
guaguaauguaucaguuua

SEQ ID NO: 1350601 - RNA, 19 nt, Artificial Sequence
  Description of Artificial Sequence: Synthetic oligonucleotide
  Antisense strand to SEQ ID NO: 1350600
uaaacugauacauuacuac

SEQ ID NO: 1350602 - RNA, 19 nt, Artificial Sequence
  Description of Artificial Sequence: Synthetic oligonucleotide
  Sense strand starting at position 2462 of SEQ ID NO: 1242477
ucucauuaggucugcaaag

SEQ ID NO: 1350603 - RNA, 19 nt, Artificial Sequence
  Description of Artificial Sequence: Synthetic oligonucleotide
  Antisense strand to SEQ ID NO: 1350602
cuuugcagaccuaaugaga

SEQ ID NO: 1350604 - RNA, 19 nt, Artificial Sequence
  Description of Artificial Sequence: Synthetic oligonucleotide
  Sense strand starting at position 2464 of SEQ ID NO: 1242477
ucauuaggucugcaaagca

SEQ ID NO: 1350605 - RNA, 19 nt, Artificial Sequence
  Description of Artificial Sequence: Synthetic oligonucleotide
  Antisense strand to SEQ ID NO: 1350604
ugcuuugcagaccuaauga

SEQ ID NO: 1350606 - RNA, 19 nt, Artificial Sequence
  Description of Artificial Sequence: Synthetic oligonucleotide
  Sense strand starting at position 2560 of SEQ ID NO: 1242477
aacgguggcuccuaaaguu

SEQ ID NO: 1350607 - RNA, 19 nt, Artificial Sequence
  Description of Artificial Sequence: Synthetic oligonucleotide
  Antisense strand to SEQ ID NO: 1350606
aacuuuaggagccaccguu

SEQ ID NO: 1350608 - RNA, 19 nt, Artificial Sequence
  Description of Artificial Sequence: Synthetic oligonucleotide
  Sense strand starting at position 2745 of SEQ ID NO: 1242477
ggagaagucugagggacuc

SEQ ID NO: 1350609 - RNA, 19 nt, Artificial Sequence
  Description of Artificial Sequence: Synthetic oligonucleotide
  Antisense strand to SEQ ID NO: 1350608
gagucccucagacuucucc

SEQ ID NO: 1350610 - RNA, 19 nt, Artificial Sequence
  Description of Artificial Sequence: Synthetic oligonucleotide
  Sense strand starting at position 3029 of SEQ ID NO: 1242477
guaggugucucggucgcua

SEQ ID NO: 1350611 - RNA, 19 nt, Artificial Sequence
  Description of Artificial Sequence: Synthetic oligonucleotide
  Antisense strand to SEQ ID NO: 1350610
uagcgaccgagacaccuac

SEQ ID NO: 1350612 - RNA, 19 nt, Artificial Sequence
  Description of Artificial Sequence: Synthetic oligonucleotide
  Sense strand starting at position 3422 of SEQ ID NO: 1242477
gggaguuacacgugagcac

SEQ ID NO: 1350613 - RNA, 19 nt, Artificial Sequence
  Description of Artificial Sequence: Synthetic oligonucleotide
  Antisense strand to SEQ ID NO: 1350612
gugcucacguguaacuccc

SEQ ID NO: 1350614 - RNA, 19 nt, Artificial Sequence
  Description of Artificial Sequence: Synthetic oligonucleotide
  Sense strand starting at position 3803 of SEQ ID NO: 1242477
gggcucuucguugcugauu

SEQ ID NO: 1350615 - RNA, 19 nt, Artificial Sequence
  Description of Artificial Sequence: Synthetic oligonucleotide
  Antisense strand to SEQ ID NO: 1350614
aaucagcaacgaagagccc

SEQ ID NO: 1350616 - RNA, 19 nt, Artificial Sequence
  Description of Artificial Sequence: Synthetic oligonucleotide
  Sense strand starting at position 3913 of SEQ ID NO: 1242477
gagccucccgcuugcaaau

SEQ ID NO: 1350617 - RNA, 19 nt, Artificial Sequence
  Description of Artificial Sequence: Synthetic oligonucleotide
  Antisense strand to SEQ ID NO: 1350616
auuugcaagcgggaggcuc

SEQ ID NO: 1350618 - RNA, 19 nt, Artificial Sequence
  Description of Artificial Sequence: Synthetic oligonucleotide
  Sense strand starting at position 3925 of SEQ ID NO: 1242477
ugcaaauagugcuuggaau

SEQ ID NO: 1350619 - RNA, 19 nt, Artificial Sequence
  Description of Artificial Sequence: Synthetic oligonucleotide
  Antisense strand to SEQ ID NO: 1350618
auuccaagcacuauuugca

SEQ ID NO: 1350620 - RNA, 19 nt, Artificial Sequence
  Description of Artificial Sequence: Synthetic oligonucleotide
  Sense strand starting at position 3926 of SEQ ID NO: 1242477
gcaaauagugcuuggaaug

SEQ ID NO: 1350621 - RNA, 19 nt, Artificial Sequence
  Description of Artificial Sequence: Synthetic oligonucleotide
  Antisense strand to SEQ ID NO: 1350620
cauuccaagcacuauuugc

SEQ ID NO: 1350622 - RNA, 19 nt, Artificial Sequence
  Description of Artificial Sequence: Synthetic oligonucleotide
  Sense strand starting at position 3938 of SEQ ID NO: 1242477
uggaauggcugcuuaauua

SEQ ID NO: 1350623 - RNA, 19 nt, Artificial Sequence
  Description of Artificial Sequence: Synthetic oligonucleotide
  Antisense strand to SEQ ID NO: 1350622
uaauuaagcagccauucca

SEQ ID NO: 1350624 - RNA, 19 nt, Artificial Sequence
  Description of Artificial Sequence: Synthetic oligonucleotide
  Sense strand starting at position 3946 of SEQ ID NO: 1242477
cugcuuaauuagcuuugaa

SEQ ID NO: 1350625 - RNA, 19 nt, Artificial Sequence
  Description of Artificial Sequence: Synthetic oligonucleotide
  Antisense strand to SEQ ID NO: 1350624
uucaaagcuaauuaagcag

SEQ ID NO: 1350626 - RNA, 19 nt, Artificial Sequence
  Description of Artificial Sequence: Synthetic oligonucleotide
  Sense strand starting at position 13 of SEQ ID NO: 1242478
aucucaacagaacguuaua

SEQ ID NO: 1350627 - RNA, 19 nt, Artificial Sequence
  Description of Artificial Sequence: Synthetic oligonucleotide
  Antisense strand to SEQ ID NO: 1350626
uauaacguucuguugagau

SEQ ID NO: 1350628 - RNA, 19 nt, Artificial Sequence
  Description of Artificial Sequence: Synthetic oligonucleotide
  Sense strand starting at position 18 of SEQ ID NO: 1242478
aacagaacguuauauuaug

SEQ ID NO: 1350629 - RNA, 19 nt, Artificial Sequence
  Description of Artificial Sequence: Synthetic oligonucleotide
  Antisense strand to SEQ ID NO: 1350628
cauaauauaacguucuguu

SEQ ID NO: 1350630 - RNA, 19 nt, Artificial Sequence
  Description of Artificial Sequence: Synthetic oligonucleotide
  Sense strand starting at position 25 of SEQ ID NO: 1242478
cguuauauuaugugguagu

SEQ ID NO: 1350631 - RNA, 19 nt, Artificial Sequence
  Description of Artificial Sequence: Synthetic oligonucleotide
  Antisense strand to SEQ ID NO: 1350630
acuaccacauaauauaacg

SEQ ID NO: 1350632 - RNA, 19 nt, Artificial Sequence
  Description of Artificial Sequence: Synthetic oligonucleotide
  Sense strand starting at position 28 of SEQ ID NO: 1242478
uauauuaugugguaguaag

SEQ ID NO: 1350633 - RNA, 19 nt, Artificial Sequence
  Description of Artificial Sequence: Synthetic oligonucleotide
  Antisense strand to SEQ ID NO: 1350632
cuuacuaccacauaauaua

SEQ ID NO: 1350634 - RNA, 19 nt, Artificial Sequence
  Description of Artificial Sequence: Synthetic oligonucleotide
  Sense strand starting at position 118 of SEQ ID NO: 1242478
cagggaaucguguguacac

SEQ ID NO: 1350635 - RNA, 19 nt, Artificial Sequence
  Description of Artificial Sequence: Synthetic oligonucleotide
  Antisense strand to SEQ ID NO: 1350634
guguacacacgauucccug

SEQ ID NO: 1350636 - RNA, 19 nt, Artificial Sequence
  Description of Artificial Sequence: Synthetic oligonucleotide
  Sense strand starting at position 119 of SEQ ID NO: 1242478
agggaaucguguguacacu

SEQ ID NO: 1350637 - RNA, 19 nt, Artificial Sequence
  Description of Artificial Sequence: Synthetic oligonucleotide
  Antisense strand to SEQ ID NO: 1350636
aguguacacacgauucccu

SEQ ID NO: 1350638 - RNA, 19 nt, Artificial Sequence
  Description of Artificial Sequence: Synthetic oligonucleotide
  Sense strand starting at position 141 of SEQ ID NO: 1242478
acccucuuguccucugaga

SEQ ID NO: 1350639 - RNA, 19 nt, Artificial Sequence
  Description of Artificial Sequence: Synthetic oligonucleotide
  Antisense strand to SEQ ID NO: 1350638
ucucagaggacaagagggu

SEQ ID NO: 1350640 - RNA, 19 nt, Artificial Sequence
  Description of Artificial Sequence: Synthetic oligonucleotide
  Sense strand starting at position 143 of SEQ ID NO: 1242478
ccucuuguccucugagagu

SEQ ID NO: 1350641 - RNA, 19 nt, Artificial Sequence
  Description of Artificial Sequence: Synthetic oligonucleotide
  Antisense strand to SEQ ID NO: 1350640
acucucagaggacaagagg

SEQ ID NO: 1350642 - RNA, 19 nt, Artificial Sequence
  Description of Artificial Sequence: Synthetic oligonucleotide
  Sense strand starting at position 162 of SEQ ID NO: 1242478
uauuuagcacugugucgaa

SEQ ID NO: 1350643 - RNA, 19 nt, Artificial Sequence
  Description of Artificial Sequence: Synthetic oligonucleotide
  Antisense strand to SEQ ID NO: 1350642
uucgacacagugcuaaaua

SEQ ID NO: 1350644 - RNA, 19 nt, Artificial Sequence
  Description of Artificial Sequence: Synthetic oligonucleotide
  Sense strand starting at position 179 of SEQ ID NO: 1242478
aaggccucuuauguggaaa

SEQ ID NO: 1350645 - RNA, 19 nt, Artificial Sequence
  Description of Artificial Sequence: Synthetic oligonucleotide
  Antisense strand to SEQ ID NO: 1350644
uuuccacauaagaggccuu

SEQ ID NO: 1350646 - RNA, 19 nt, Artificial Sequence
  Description of Artificial Sequence: Synthetic oligonucleotide
  Sense strand starting at position 180 of SEQ ID NO: 1242478
aggccucuuauguggaaag

SEQ ID NO: 1350647 - RNA, 19 nt, Artificial Sequence
  Description of Artificial Sequence: Synthetic oligonucleotide
  Antisense strand to SEQ ID NO: 1350646
cuuuccacauaagaggccu

SEQ ID NO: 1350648 - RNA, 19 nt, Artificial Sequence
  Description of Artificial Sequence: Synthetic oligonucleotide
  Sense strand starting at position 182 of SEQ ID NO: 1242478
gccucuuauguggaaagca

SEQ ID NO: 1350649 - RNA, 19 nt, Artificial Sequence
  Description of Artificial Sequence: Synthetic oligonucleotide
  Antisense strand to SEQ ID NO: 1350648
ugcuuuccacauaagaggc

SEQ ID NO: 1350650 - RNA, 19 nt, Artificial Sequence
  Description of Artificial Sequence: Synthetic oligonucleotide
  Sense strand starting at position 388 of SEQ ID NO: 1242478
guccuacucuggcuagauc

SEQ ID NO: 1350651 - RNA, 19 nt, Artificial Sequence
  Description of Artificial Sequence: Synthetic oligonucleotide
  Antisense strand to SEQ ID NO: 1350650
gaucuagccagaguaggac

SEQ ID NO: 1350652 - RNA, 19 nt, Artificial Sequence
  Description of Artificial Sequence: Synthetic oligonucleotide
  Sense strand starting at position 443 of SEQ ID NO: 1242478
ggaggucacuaagagagau

SEQ ID NO: 1350653 - RNA, 19 nt, Artificial Sequence
  Description of Artificial Sequence: Synthetic oligonucleotide
  Antisense strand to SEQ ID NO: 1350652
aucucucuuagugaccucc

SEQ ID NO: 1350654 - RNA, 19 nt, Artificial Sequence
  Description of Artificial Sequence: Synthetic oligonucleotide
  Sense strand starting at position 569 of SEQ ID NO: 1242478
acauaaagauaguacagaa

SEQ ID NO: 1350655 - RNA, 19 nt, Artificial Sequence
  Description of Artificial Sequence: Synthetic oligonucleotide
  Antisense strand to SEQ ID NO: 1350654
uucuguacuaucuuuaugu

SEQ ID NO: 1350656 - RNA, 19 nt, Artificial Sequence
  Description of Artificial Sequence: Synthetic oligonucleotide
  Sense strand starting at position 1068 of SEQ ID NO: 1242478
gugaaacaauucgaaacuu

SEQ ID NO: 1350657 - RNA, 19 nt, Artificial Sequence
  Description of Artificial Sequence: Synthetic oligonucleotide
  Antisense strand to SEQ ID NO: 1350656
aaguuucgaauuguuucac

SEQ ID NO: 1350658 - RNA, 19 nt, Artificial Sequence
  Description of Artificial Sequence: Synthetic oligonucleotide
  Sense strand starting at position 1080 of SEQ ID NO: 1242478
gaaacuucccgcgagccaa

SEQ ID NO: 1350659 - RNA, 19 nt, Artificial Sequence
  Description of Artificial Sequence: Synthetic oligonucleotide
  Antisense strand to SEQ ID NO: 1350658
uuggcucgcgggaaguuuc

SEQ ID NO: 1350660 - RNA, 19 nt, Artificial Sequence
  Description of Artificial Sequence: Synthetic oligonucleotide
  Sense strand starting at position 1099 of SEQ ID NO: 1242478
aggacuuaucacggcagca

SEQ ID NO: 1350661 - RNA, 19 nt, Artificial Sequence
  Description of Artificial Sequence: Synthetic oligonucleotide
  Antisense strand to SEQ ID NO: 1350660
ugcugccgugauaaguccu

SEQ ID NO: 1350662 - RNA, 19 nt, Artificial Sequence
  Description of Artificial Sequence: Synthetic oligonucleotide
  Sense strand starting at position 1398 of SEQ ID NO: 1242478
accggccuuaccugugaua

SEQ ID NO: 1350663 - RNA, 19 nt, Artificial Sequence
  Description of Artificial Sequence: Synthetic oligonucleotide
  Antisense strand to SEQ ID NO: 1350662
uaucacagguaaggccggu

SEQ ID NO: 1350664 - RNA, 19 nt, Artificial Sequence
  Description of Artificial Sequence: Synthetic oligonucleotide
  Sense strand starting at position 1400 of SEQ ID NO: 1242478
cggccuuaccugugauacu

SEQ ID NO: 1350665 - RNA, 19 nt, Artificial Sequence
  Description of Artificial Sequence: Synthetic oligonucleotide
  Antisense strand to SEQ ID NO: 1350664
aguaucacagguaaggccg

SEQ ID NO: 1350666 - RNA, 19 nt, Artificial Sequence
  Description of Artificial Sequence: Synthetic oligonucleotide
  Sense strand starting at position 1409 of SEQ ID NO: 1242478
cugugauacugagcuugca

SEQ ID NO: 1350667 - RNA, 19 nt, Artificial Sequence
  Description of Artificial Sequence: Synthetic oligonucleotide
  Antisense strand to SEQ ID NO: 1350666
ugcaagcucaguaucacag

SEQ ID NO: 1350668 - RNA, 19 nt, Artificial Sequence
  Description of Artificial Sequence: Synthetic oligonucleotide
  Sense strand starting at position 1434 of SEQ ID NO: 1242478
ggaauucgucuuugauccu

SEQ ID NO: 1350669 - RNA, 19 nt, Artificial Sequence
  Description of Artificial Sequence: Synthetic oligonucleotide
  Antisense strand to SEQ ID NO: 1350668
aggaucaaagacgaauucc

SEQ ID NO: 1350670 - RNA, 19 nt, Artificial Sequence
  Description of Artificial Sequence: Synthetic oligonucleotide
  Sense strand starting at position 1459 of SEQ ID NO: 1242478
agacucagccaccgugaau

SEQ ID NO: 1350671 - RNA, 19 nt, Artificial Sequence
  Description of Artificial Sequence: Synthetic oligonucleotide
  Antisense strand to SEQ ID NO: 1350670
auucacgguggcugagucu

SEQ ID NO: 1350672 - RNA, 19 nt, Artificial Sequence
  Description of Artificial Sequence: Synthetic oligonucleotide
  Sense strand starting at position 1836 of SEQ ID NO: 1242478
gccacucgcgcggaauuaa

SEQ ID NO: 1350673 - RNA, 19 nt, Artificial Sequence
  Description of Artificial Sequence: Synthetic oligonucleotide
  Antisense strand to SEQ ID NO: 1350672
uuaauuccgcgcgaguggc

SEQ ID NO: 1350674 - RNA, 19 nt, Artificial Sequence
  Description of Artificial Sequence: Synthetic oligonucleotide
  Sense strand starting at position 1957 of SEQ ID NO: 1242478
cagauaaacugccucguuu

SEQ ID NO: 1350675 - RNA, 19 nt, Artificial Sequence
  Description of Artificial Sequence: Synthetic oligonucleotide
  Antisense strand to SEQ ID NO: 1350674
aaacgaggcaguuuaucug

SEQ ID NO: 1350676 - RNA, 19 nt, Artificial Sequence
  Description of Artificial Sequence: Synthetic oligonucleotide
  Sense strand starting at position 1959 of SEQ ID NO: 1242478
gauaaacugccucguuuac

SEQ ID NO: 1350677 - RNA, 19 nt, Artificial Sequence
  Description of Artificial Sequence: Synthetic oligonucleotide
  Antisense strand to SEQ ID NO: 1350676
guaaacgaggcaguuuauc

SEQ ID NO: 1350678 - RNA, 19 nt, Artificial Sequence
  Description of Artificial Sequence: Synthetic oligonucleotide
  Sense strand starting at position 1973 of SEQ ID NO: 1242478
uuuacccugccaugauaga

SEQ ID NO: 1350679 - RNA, 19 nt, Artificial Sequence
  Description of Artificial Sequence: Synthetic oligonucleotide
  Antisense strand to SEQ ID NO: 1350678
ucuaucauggcaggguaaa

SEQ ID NO: 1350680 - RNA, 19 nt, Artificial Sequence
  Description of Artificial Sequence: Synthetic oligonucleotide
  Sense strand starting at position 1974 of SEQ ID NO: 1242478
uuacccugccaugauagau

SEQ ID NO: 1350681 - RNA, 19 nt, Artificial Sequence
  Description of Artificial Sequence: Synthetic oligonucleotide
  Antisense strand to SEQ ID NO: 1350680
aucuaucauggcaggguaa

SEQ ID NO: 1350682 - RNA, 19 nt, Artificial Sequence
  Description of Artificial Sequence: Synthetic oligonucleotide
  Sense strand starting at position 2008 of SEQ ID NO: 1242478
guugcaauuacucaccgga

SEQ ID NO: 1350683 - RNA, 19 nt, Artificial Sequence
  Description of Artificial Sequence: Synthetic oligonucleotide
  Antisense strand to SEQ ID NO: 1350682
uccggugaguaauugcaac

SEQ ID NO: 1350684 - RNA, 19 nt, Artificial Sequence
  Description of Artificial Sequence: Synthetic oligonucleotide
  Sense strand starting at position 2011 of SEQ ID NO: 1242478
gcaauuacucaccggaugu

SEQ ID NO: 1350685 - RNA, 19 nt, Artificial Sequence
  Description of Artificial Sequence: Synthetic oligonucleotide
  Antisense strand to SEQ ID NO: 1350684
acauccggugaguaauugc

SEQ ID NO: 1350686 - RNA, 19 nt, Artificial Sequence
  Description of Artificial Sequence: Synthetic oligonucleotide
  Sense strand starting at position 2024 of SEQ ID NO: 1242478
ggaugucugcccugcggau

SEQ ID NO: 1350687 - RNA, 19 nt, Artificial Sequence
  Description of Artificial Sequence: Synthetic oligonucleotide
  Antisense strand to SEQ ID NO: 1350686
auccgcagggcagacaucc

SEQ ID NO: 1350688 - RNA, 19 nt, Artificial Sequence
  Description of Artificial Sequence: Synthetic oligonucleotide
  Sense strand starting at position 2178 of SEQ ID NO: 1242478
gcucguucucgcagcgaaa

SEQ ID NO: 1350689 - RNA, 19 nt, Artificial Sequence
  Description of Artificial Sequence: Synthetic oligonucleotide
  Antisense strand to SEQ ID NO: 1350688
uuucgcugcgagaacgagc

SEQ ID NO: 1350690 - RNA, 19 nt, Artificial Sequence
  Description of Artificial Sequence: Synthetic oligonucleotide
  Sense strand starting at position 2179 of SEQ ID NO: 1242478
cucguucucgcagcgaaau

SEQ ID NO: 1350691 - RNA, 19 nt, Artificial Sequence
  Description of Artificial Sequence: Synthetic oligonucleotide
  Antisense strand to SEQ ID NO: 1350690
auuucgcugcgagaacgag

SEQ ID NO: 1350692 - RNA, 19 nt, Artificial Sequence
  Description of Artificial Sequence: Synthetic oligonucleotide
  Sense strand starting at position 3284 of SEQ ID NO: 1242478
augcccucuugugucuaaa

SEQ ID NO: 1350693 - RNA, 19 nt, Artificial Sequence
  Description of Artificial Sequence: Synthetic oligonucleotide
  Antisense strand to SEQ ID NO: 1350692
uuuagacacaagagggcau

SEQ ID NO: 1350694 - RNA, 19 nt, Artificial Sequence
  Description of Artificial Sequence: Synthetic oligonucleotide
  Sense strand starting at position 3341 of SEQ ID NO: 1242478
gugacuuucgcaugggagu

SEQ ID NO: 1350695 - RNA, 19 nt, Artificial Sequence
  Description of Artificial Sequence: Synthetic oligonucleotide
  Antisense strand to SEQ ID NO: 1350694
acucccaugcgaaagucac

SEQ ID NO: 1350696 - RNA, 19 nt, Artificial Sequence
  Description of Artificial Sequence: Synthetic oligonucleotide
  Sense strand starting at position 3371 of SEQ ID NO: 1242478
cuccucagaucaggaauua

SEQ ID NO: 1350697 - RNA, 19 nt, Artificial Sequence
  Description of Artificial Sequence: Synthetic oligonucleotide
  Antisense strand to SEQ ID NO: 1350696
uaauuccugaucugaggag

SEQ ID NO: 1350698 - RNA, 19 nt, Artificial Sequence
  Description of Artificial Sequence: Synthetic oligonucleotide
  Sense strand starting at position 3465 of SEQ ID NO: 1242478
acggucuacuagcaaauaa

SEQ ID NO: 1350699 - RNA, 19 nt, Artificial Sequence
  Description of Artificial Sequence: Synthetic oligonucleotide
  Antisense strand to SEQ ID NO: 1350698
uuauuugcuaguagaccgu

SEQ ID NO: 1350700 - RNA, 19 nt, Artificial Sequence
  Description of Artificial Sequence: Synthetic oligonucleotide
  Sense strand starting at position 3627 of SEQ ID NO: 1242478
ucucauuaggucugcaaag

SEQ ID NO: 1350701 - RNA, 19 nt, Artificial Sequence
  Description of Artificial Sequence: Synthetic oligonucleotide
  Antisense strand to SEQ ID NO: 1350700
cuuugcagaccuaaugaga

SEQ ID NO: 1350702 - RNA, 19 nt, Artificial Sequence
  Description of Artificial Sequence: Synthetic oligonucleotide
  Sense strand starting at position 3629 of SEQ ID NO: 1242478
ucauuaggucugcaaagca

SEQ ID NO: 1350703 - RNA, 19 nt, Artificial Sequence
  Description of Artificial Sequence: Synthetic oligonucleotide
  Antisense strand to SEQ ID NO: 1350702
ugcuuugcagaccuaauga

SEQ ID NO: 1350704 - RNA, 19 nt, Artificial Sequence
  Description of Artificial Sequence: Synthetic oligonucleotide
  Sense strand starting at position 3910 of SEQ ID NO: 1242478
ggagaagucugagggacuc

SEQ ID NO: 1350705 - RNA, 19 nt, Artificial Sequence
  Description of Artificial Sequence: Synthetic oligonucleotide
  Antisense strand to SEQ ID NO: 1350704
gagucccucagacuucucc

SEQ ID NO: 1350706 - RNA, 19 nt, Artificial Sequence
  Description of Artificial Sequence: Synthetic oligonucleotide
  Sense strand starting at position 116 of SEQ ID NO: 1242479
uuuaaaccugggugcaauu
